(19) United States
(12) Patent Application Publication
(10) Pub. No.: US 2013/0332133 A1
(43) Pub. Date: Dec. 12, 2013

(54) Classification of Protein Sequences and Uses of Classified Proteins

(71) Applicants: David Horn, Tel-Aviv (IL); Eytan Ruppin, Reut (IL); Vered Kunik, Ramat-HaSharon (IL); Zach Solan, Tel-Aviv (IL); Ben Sandbank, Ganei Tikva (IL); Yasmine Meroz, Tel-Aviv (IL); Uri Weinbart, Herzlia (IL)

(72) Inventors: David Horn, Tel-Aviv (IL); Eytan Ruppin, Reut (IL); Vered Kunik, Ramat-HaSharon (IL); Zach Solan, Tel-Aviv (IL); Ben Sandbank, Ganei Tikva (IL); Yasmine Meroz, Tel-Aviv (IL); Uri Weinbart, Herzlia (IL)

(73) Assignee: Ramot At Tel Aviv University Ltd., Tel-Aviv (IL)

(21) Appl. No.: 12/227,183

(22) PCT Filed: May 13, 2007
(86) PCT No.: PCT/IL2007/000585

§ 371 Date: Apr. 10, 2009

Related U.S. Application Data
(60) Provisional application No. 60/799,318, filed on May 11, 2006.
(60) Provisional application No. 60/861,746, filed on Nov. 30, 2006.

(51) Int. Cl. G06F 19/28

(52) U.S. Cl. CPC G06F 19/28
USPC 703/11

(57) ABSTRACT

A searchable protein database is disclosed. The protein database comprises a plurality of entries, each entry having a sufficiently short predicting sequence and a protein classifier corresponding to the predicting sequence. An unclassified protein sequence can be classifiable by the database via searching therein for a motif of amino acids matching a predicting sequence of the database, thereby attributing to the unclassified protein a protein classifier.

### FIELD AND BACKGROUND OF THE INVENTION

[0001] The present invention relates to bioinformatics and, more particularly, but not exclusively, to a method and apparatus for classification of proteins according to amino acid primary sequences. The invention also relates to uses of polypeptides annotated according to the teachings of the present invention.

[0002] Informatics is the study and application of computer and statistical techniques for the management of information. In Genome projects, bioinformatics includes the development of methods to search databases fast and efficiently, to analyze nucleic acid sequence information, to predict protein function from sequence data and the like. Increasingly, molecular biology is shifting from the laboratory bench to the computer desktop. Advanced quantitative analyses, database comparisons and computational algorithms are needed to explore the relationships between sequence, function, structure and phenotype.

[0003] Proteins are linear polymers of amino acids. The polymerization reaction, which produces a protein, results in the loss of one molecule of water from each peptide bond formed (linking two adjacent amino acids), and hence proteins are often said to be composed of amino acid residues. Natural protein molecules may contain as many as 20 different types of amino acid residues, the sequence of which defines the so-called “primary sequence” of the protein. Proteins perform all the processes defining life, including enzymatic catalysis, transport and storage, coordinated motion, mechanical/structural support, immune protection, generation and transmission of nerve impulses, and control of growth and differentiation. This immense range of functions is accomplished by a seemingly boundless variety of protein sequences which translate into three-dimensional structures.

[0004] Enzymes comprise a large protein category of interest for biologists and/or protein chemists. One widely accepted method of classifying enzymes is the Enzyme Commission commonly referred to as “EC” Hierarchy which consists of four numbers, n1:n2:n3:n4, corresponding to four levels of classification. For example, the oxidoreductases class corresponds to n1=1, one of the six main divisions. For this class, n2 (subclass) specifies electron donors, n3 (subsubclass) specifies electron acceptors and n4 indicates the exact enzymatic activity.

[0005] The properties of a protein are determined by its covalently-linked amino acid sequence. Genes encode proteins by providing a sequence of nucleotides that is translated into a sequence of amino acids. Proteins fold into a three-dimensional structure, which results substantially from non-covalent interactions (van der Waals forces, ionic bonds, hydrogen bonds, and hydrophobic and aromatic interactions) between the various amino acid side-chains within the molecule and with the water and ligand molecules within it. Examination of the three-dimensional structure of numerous natural proteins has revealed a number of recurring patterns, the most common are known as alpha helices, parallel beta sheets and anti-parallel beta sheets, which define a second level of structural organization.

[0006] The biological properties of proteins are mainly affected by the proteins' three-dimensional structure, which determines the function of enzymes, the capacity and specificity of binding proteins such as receptors and antibodies, and the structural attributes of receptor/ligand molecules. For example, the function of an enzyme relies on the structure of its active site, a regional locus in the protein having a shape and a size that enables it to fit the intended substrate snugly at the molecular level. It also has a specific arrangement of chemical moieties with particular properties at the atomic level which govern the binding and catalysis of the substrate efficiently. This specific arrangement of chemical moieties, typically referred to as the chromophore, stem from atoms of certain amino acids in the enzyme's primary structure, and in some cases comprise atoms from one or more other small molecules called coenzymes, which are also held in place by the protein.

[0007] Similarly to enzymes, all protein functions rely on molecular recognition. Transport proteins such as haemoglobin must recognize the molecules they carry (in this case oxygen), receptors on the cell surface must recognize particular signaling molecules called ligands, transcription factors must recognize particular DNA sequences and antibodies must recognize specific epitopes in antigens, and the functional integrity of the cell depends critically on protein-protein interactions, particularly on the formation of multi-protein complexes.

[0008] Protein three-dimensional structures have evolved to address the vast functions carried out by proteins, and over the past decades, thousands of these structures have been elucidated to atomic resolution, mainly by X-ray diffraction and NMR techniques. Most of the presently known structures are stored in the Protein Data Bank (PDB), and with them emerged the field of structure-function relationship research.

[0009] Known in the art are algorithms which attempt to predict three-dimensional structures based on the primary sequence of a protein. Based on the predicted three-dimensional structure and prior knowledge regarding the relation between a particular three-dimensional structure and certain biological properties, unclassified proteins having a known primary sequence can be classified into predetermined protein classes, such as reactivity classes, specific binding classes, functional classes and the like. These algorithms, however, make correct predictions only in limited number of cases in which the number of available homology proteins is sufficiently large.

[0010] The problem of classifying proteins from their primary sequence, has defied solution for over decades. One of the earliest classification methods is known as homology modeling. Homology modeling is applicable only for cases in which three-dimensional structures of similar primary sequences are already known. In this technique, a three-dimensional model for a protein of unknown structure (the target) is constructed based on one or more related proteins of known structure (the templates). The necessary conditions for getting a useful model are (i) detectable similarity and (ii) availability of a correct alignment between the target amino acid sequence and the template structures. Homology modeling is based on the notion that new proteins evolve gradually by amino acid substitution, addition and/or deletion, and that the three-dimensional structures and, therefore, affinity and functional classes are often strongly conserved during the evolution. In homology modeling, structural similarity is assumed between two proteins if there exist a similarity of at least 40% between the proteins at the sequence level.

[0011] However, even though the paradigm “structure determines function” holds generally true, presently known data-mining algorithms which use the structural and sequence databases for proteins are limited in automatically classifying and assigning function to new and unknown proteins solely on the basis of structural similarity to proteins of known structure and function.

[0012] In the field of genetic research, for example, the first step following the sequencing of a new gene is an effort to identify that gene's function. The most popular and straightforward methods to achieve that goal exploit the observation that if two peptide stretches exhibit sufficient similarity at the sequence level (i.e., one can be obtained from the other by a small number of insertions, deletions and/or amino acid mutations), then they probably are biologically related. Within this framework, the question of getting clues about the function of a new gene becomes one of identifying homologies in strings of amino acids. Generally, a homology refers to a similarity, likeness or relation between two or more sequences or strings. Thus, one is given a query sequence and a set of well characterized proteins and is looking for all regions of the query sequence which are similar to regions of sequences in the set.

[0013] The first approaches used for realizing this task were based on a technique known as dynamic programming. Unfortunately, the computational requirements of this method quickly render it impractical, especially when searching large databases. Generally, the problem is that dynamic programming variants spend a good part of their time computing homologies which eventually turn out to be unimportant. In an effort to work around this issue, a number of algorithms have been proposed which focus on discovering only extensive local similarities.

[0014] Identifying the similar regions between the query and the database sequences is, nevertheless, only the first part of the process. It is the second part of the process which is of interest to biologists. In the second part, the similarities are evaluated so as to properly classify the query sequence, according to its binding characteristics, function, three-dimensional structure and the like. Such evaluations are typically performed by combining biological information and statistical reasoning. Nonetheless, it is appreciated that there is a limit to how well a statistical model can approximate the biological reality.

[0015] A representative example of such evaluation relates to the classification of enzymes, which is typically according to their function. There are various known techniques for dealing with enzyme functional classification according to their primary sequence. One approach combines pairwise sequence similarity with the Support Vector Machine (SVM) classification method to obtain a remote homology detection [Liao, L. and Noble, W. S., 2003, “Combining pairwise sequence analysis and support vector machines for detecting remote protein evolutionary and structural relationships”, J. of Comp. Biology, 10, 857-868].

[0016] In another technique, a feature selection algorithm is applied to regular-expression eMOTIFs [Huang, J. Y. and Brutlag, D. L., 2001, “The eMOTIF database”, Nuclear Acids research, 29, 202-204; Neville-Manning et al., 1998, “Highly specific protein sequence motifs for genome analysis”, Proc. Natl. Acad. Sci. USA 95, 5865-5871]. This approach results in a high classification success rate at the second level of the EC classification.

[0017] In an additional technique exploits a sequence recognition algorithm disclosed in International Patent Application, Publication No. WO/2005010642, to classify enzyme functionality at the second level of the EC classification [Cai et al., 2003, “SVM-Prot: web-based support vector machine software for functional classification of a protein from its primary sequence”, Nuclear Acids Research, 31, 3692-3697].

[0018] Other methods of ascertaining functional data pertaining to primary sequence data are described by Ben-Hur and Brutlag (2006; Protein sequence motifs: Highly predictive features of protein function. In: Feature extraction, foundations and applications. I. Guyon, S. Gunn, M. Nikravesh, and L. Zadeh (eds.) Springer Verlag0 and by Liao and Noble (2003; Combining pairwise sequence analysis and support vector machines for detecting remote protein evolutionary and structural relationships. J. of Comp. Biology, 10:857-868).

[0019] The present invention provides solutions to the problems associated with prior art protein classification technique and provides searchable protein databases, tools to produce such databases, and method and apparatus for classifying protein sequences.

### SUMMARY OF THE INVENTION

[0020] According to one aspect of the present invention there is provided a searchable protein database, comprising a plurality of entries, each of the plurality of entries having a predicting sequence which comprises less than L amino acids and a protein classifier corresponding to the predicting sequence, wherein an unclassified protein sequence is classifiable by the database via searching therein for a motif of amino acids matching a predicting sequence of the database, thereby attributing to the unclassified protein a protein classifier.

[0021] According to further features in preferred embodiments of the invention described below, the database is a searchable enzyme database. According to still further features in the described preferred embodiments the protein classifier represents a branch of an EC hierarchical classification. According to still further features in the described preferred embodiments the predicting sequence is present exclusively in entries having protein classifier representing the branch or descending branch thereof.

[0022] According to another aspect of the present invention there is provided a readable data storage medium, carrying the database.

[0023] According to further features in preferred embodiments of the invention described below, the database comprises at least one of the files Table-11.txt, Table-37.txt and Table-42.txt on enclosed CD-ROM.

LENGTHY TABLES
The patent application contains a lengthy table section. A copy of the table is available in electronic form from the USPTO web site (http://seqdata.uspto.gov/?pageRequest=docDetail&DocID=US20130332133A1). An electronic copy of the table will also be available from the USPTO upon request and payment of the fee set forth in 37 CFR 1.19(b)(3).

[0024] According to yet another aspect of the present invention there is provided a method of classifying a protein sequence, comprising searching the protein sequence for a motif of amino acids matching a predicting sequence present in the protein database, and using the protein classifier corresponding to the predicting sequence for classifying the protein sequence.

[0025] According to further features in preferred embodiments of the invention described below, the method further comprises repeating the search at least once, thereby providing a plurality of motifs of amino acids matching predicting sequences present in the protein database.

[0026] According to still further features in the described preferred embodiments the method further comprises issuing a report containing classification of the protein sequence.

[0027] According to still further features in the described preferred embodiments the classifying the protein sequence comprises determining presence or absence of at least one active pocket or active site on the protein sequence.

[0028] According to still further features in the described preferred embodiments the method further comprises determining the location of the active pocket(s) or active site(s).

[0029] According to still another aspect of the present invention there is provided apparatus for classifying a protein sequence, comprising: a searcher, capable of accessing the protein database, the searcher being operable to search the protein sequence for a motif of amino acids matching a predicting sequence present in the protein database; and a classification functionality capable of accessing the protein database and providing a protein classifier corresponding to the predicting sequence, so as to classify the protein sequence by the protein classifier.

[0030] According to further features in preferred embodiments of the invention described below, the classification functionality determines presence or absence of at least one active pocket or active site on the protein sequence.

[0031] According to still further features in the described preferred embodiments the classification functionality determines the location of the at least one active pocket or active site.

[0032] According to an additional aspect of the present invention there is provided a method of characterizing a predetermined collection of protein classes defining a classification system for classifying a plurality of proteins, the method comprises: (a) extracting repeatedly occurring motifs from amino acid sequences of the plurality of proteins, thereby providing a set of motifs; and (b) for each protein class: searching the set of motifs for at least one motif which comprises less than L amino acids, the at least one motif being present in at least a few proteins belonging to the protein class but not in proteins belonging to other protein classes, and defining the at least one motif as a predicting sequence characterizing the protein class; thereby characterizing the collection of protein classes.

[0033] According to yet an additional aspect of the present invention there is provided a method of classifying a plurality of proteins into protein classes, comprising: (a) extracting repeatedly occurring motifs from the sequences of the plurality of proteins, thereby providing a set of motifs; and (b) using the set of motifs for defining protein classes, each being characterized by at least one motif which comprises less than L amino acids; thereby classifying the plurality of proteins according to the protein classes.

[0034] According to further features in preferred embodiments of the invention described below, the predicting sequence predicts protein affinity, and the protein classifier describes an affinity class of the protein.

[0035] According to still further features in the described preferred embodiments the predicting sequence predicts protein function, and the protein classifier describes a functional class of the protein.

[0036] According to still further features in the described preferred embodiments the protein classifier indicates presence of active site of active pocket at a location on the unclassified protein corresponding to the motif of amino acids.

[0037] According to still further features in the described preferred embodiments the extracting the repeatedly occurring motifs comprises, for each sequence of the plurality of proteins: searching for partial overlaps between the sequence and other sequences, applying a significance test on the partial overlaps, and defining a most significant partial overlap as a repeatedly occurring motif.

[0038] According to still further features in the described preferred embodiments the search for partial overlaps is by constructing a graph having a plurality of paths representing the sequences of the plurality of proteins, and searching for partial overlaps between paths of the graph.

[0039] According to still further features in the described preferred embodiments the search for partial overlaps between paths of the graph comprises: defining, for each path, a set of sub-paths of variable lengths, thereby defining a plurality of sets of sub-paths; and for each set of sub-paths, comparing each sub-path of the set with sub-paths of other sets.

[0040] According to still further features in the described preferred embodiments the application of the significance test comprises calculating, for each path, a set of probability functions characterizing the partial overlaps, and evaluating a statistical significance of the set of probability functions.

[0041] According to still an additional aspect of the present invention there is provided apparatus for characterizing a predetermined protein class being a member of a collection of protein classes defining a classification system for classifying a plurality of proteins, the apparatus comprises: (a) a motif extraction unit capable of extracting repeatedly occurring motifs from amino acid sequences of the plurality of proteins, thereby providing a set of motifs; (b) a searcher capable of searching the set of motifs for at least one motif which comprises less than L amino acids, the at least one motif being present in at least a few proteins belonging to the predetermined protein class but not in proteins belonging to other protein classes of the collection; and (c) a characterization unit capable of defining the at least one motif as a predicting sequence characterizing the predetermined protein class.

[0042] According to further features in preferred embodiments of the invention described below, the plurality of proteins comprises a plurality of enzymes. According to still further features in the described preferred embodiments the classification system is an EC hierarchical classification system. According to still further features in the described preferred embodiments the protein classes are branches of an EC hierarchical classification system.

[0043] According to further features in preferred embodiments of the invention described below, the method further comprises employing a screening procedure for reducing the number of predicting sequences.

[0044] According to a further aspect of the present invention there is provided apparatus for classifying a plurality of proteins into protein classes, comprising: (a) a motif extraction unit capable of extracting repeatedly occurring motifs from amino acid sequences of the plurality of proteins, thereby providing a set of motifs; and (b) a protein class definition unit, capable of defining protein classes using the set of motifs, wherein each protein class is characterized by at least one motif which comprises less than L amino acids.

[0045] According to further features in preferred embodiments of the invention described below, the motif extraction unit is operable to search each sequence for partial overlaps between the sequence and other sequences, to apply a significance test on the partial overlaps, and to define a most significant partial overlap as a repeatedly occurring motif.

[0046] According to still further features in the described preferred embodiments the motif extraction unit comprises a graph constructor capable of constructing a graph having a plurality of paths representing the sequences of the plurality of proteins.

[0047] According to still further features in the described preferred embodiments the graph comprises a plurality of vertices, each representing one type of amino acid, and wherein each path of the plurality of paths comprises a sequence of vertices respectively corresponding to an amino acid sequence of one protein of the plurality of proteins.

[0048] According to still further features in the described preferred embodiments L is selected from the group consisting of 5, 6, 7, 8, 9, 10, 11, 12, 13, 14 and 15.

[0049] In an exemplary embodiment of the invention, there is provided a method of processing a substrate, the method comprising:

[0050] contacting the substrate with at least one polypeptide selected from the group consisting of the polypeptides set forth in SEQ ID Nos.: 77,838 to 198,923 under conditions which allow processing of the substrate by said at least one polypeptide, wherein said at least one polypeptide is selected capable of processing the substrate.

[0051] Optionally, the reaction conditions include a temperature of at least 45°. centigrade.

[0052] Optionally, the substrate is selected from the group consisting of a lipid, a protein, a carbohydrate and a nucleic acid.

[0053] Optionally, the at least one peptide affects reaction kinetics of a lipid hydrolysis reaction.

[0054] Optionally, the at least one peptide affects reaction kinetics of a protein hydrolysis reaction.

[0055] Optionally, the at least one peptide affects reaction kinetics of a carbohydrate hydrolysis reaction.

[0056] Optionally, the at least one peptide affects reaction kinetics of a reaction with a nucleic acid substrate.

[0057] Optionally, said conditions comprise the presence of a detergent.

[0058] In an exemplary embodiment of the invention, there is provided a method of producing an enzyme, the method comprising:

[0059] (a) growing cells expressing a polypeptide selected from the group consisting of polypeptides as set forth in SEQ ID Nos.: 77,838 to 198,923; and

[0060] (b) harvesting said polypeptide from the culture.

[0061] Optionally, the method comprises:

[0062] (c) assaying a functional activity of said peptide.

[0063] Optionally, the method comprises:

[0064] (c) purifying said peptide at least 50% purity by weight.

[0065] Optionally, the method comprises:

[0066] (c) purifying said peptide to medical grade purity.

[0067] Optionally, the cells express said polypeptide because they have been transformed or transfected with an A nucleic acid construct comprising a nucleic acid sequence encoding a polypeptide selected from the group consisting of polypeptides as set forth in SEQ ID Nos.: 77,838 to 198,923 and a cis-acting regulatory element for expressing said polypeptide in a host cell

[0068] In an exemplary embodiment of the invention, there is provided a nucleic acid construct comprising a nucleic acid sequence encoding a polypeptide selected from the group consisting of polypeptides as set forth in SEQ ID Nos.: 77,838 to 198,923 and a cis-acting regulatory element for expressing said polypeptide in a host cell.

[0069] In an exemplary embodiment of the invention, there is provided a host cell comprising the construct.

[0070] Optionally, the host cell comprises a eukaryotic cell.

[0071] Optionally, the host cell comprises a prokaryotic cell.

[0072] In an exemplary embodiment of the invention, there is provided a transgenic plant expressing an exogenous polypeptide selected from the group consisting of polypeptides as set forth in SEQ ID Nos.: 77,838 to 198,923.

[0073] In an exemplary embodiment of the invention, there is provided a transgenic animal expressing an exogenous polypeptide selected from the group consisting of polypeptides as set forth in SEQ ID Nos.: 77,838 to 198,923.

[0074] In an exemplary embodiment of the invention, there is provided a method of producing a specific enzyme, the method comprising:

[0075] (a) growing a culture of host cells according to claim 52; and

[0076] (b) harvesting the polypeptide from the culture.

[0077] In an exemplary embodiment of the invention, there is provided a pharmaceutical composition comprising a pharmaceutically acceptable carrier and, as an active ingredient, at least one polypeptide selected from the group consisting of polypeptides as set forth in SEQ ID Nos.: 77,838 to 198,923.

[0078] In an exemplary embodiment of the invention, there is provided a isolated composition comprising a polypeptide selected from the group consisting of polypeptides as set forth in SEQ ID Nos.: 77,838 to 198,923.

[0079] Optionally, the composition comprises a cleaning agent.

[0080] Optionally, the cleaning agent comprises at least one member selected from the group consisting of a detergent, a solvent and a surfactant.

[0081] In an exemplary embodiment of the invention, there is provided a method of laundering fabric, the method comprising:

[0082] (a) mixing a composition according to any of claims 59-62 with water to produce a washing solution; and

[0083] (b) wetting the fabric with the washing solution.

[0084] Optionally, the method comprises heating to a temperature of at least 45° centigrade.

[0085] In an exemplary embodiment of the invention, there is provided a chemical reagent comprising:

[0086] (a) catalytic molecules comprising at least one peptide selected from the group consisting of SEQ ID Nos.: 77,838 to 198,923; and

[0087] (b) an insoluble support with the catalytic molecules bound thereto.

[0088] In an exemplary embodiment of the invention, there is provided a industrial process comprising:

[0089] (a) contacting a plurality of substrate molecules with a reagent according to claim 64; and

[0090] (b) adjusting reaction conditions to contribute to activity of the catalytic molecules in processing the substrate molecules.

[0091] Optionally, the process is conducted batchwise.

[0092] Optionally, the insoluble support is immobilized and the process is conducted as a flow-through process.

[0093] Optionally, the process is conducted at a temperature of at least 45° centigrade.

[0094] In an exemplary embodiment of the invention, there is provided a method of identifying an inhibitor of a catalytic activity of an enzyme of interest, the method comprising:

[0095] (a) contacting an enzyme comprising a polypeptide as set forth in one of SEQ ID nos.: 77,838 to 198,923 having an activity as set forth in one of tables 38 and 39 with a substrate thereof and an agent to be evaluated under conditions which allow catalytic processing of the substrate by the enzyme; and

[0096] (b) monitoring said catalytic processing of said substrate and:
[0097] (i) concluding that the agent is an inhibitor if a reduction in catalytic processing is observed; and
[0098] (ii) concluding that the agent is not an inhibitor if a reduction in catalytic processing is not observed.

[0099] The present invention successfully addresses the shortcomings of the presently known configurations by providing a method and apparatus for classifying protein sequences.

[0100] Unless otherwise defined, all technical and scientific terms used herein have the same meaning as commonly understood by one of ordinary skill in the art to which this invention belongs. Although methods and materials similar or equivalent to those described herein can be used in the practice or testing of the present invention, suitable methods and materials are described below. In case of conflict, the patent specification, including definitions, will control. In addition, the materials, methods, and examples are illustrative only and not intended to be limiting.

[0101] Implementation of the method and system of the present invention involves performing or completing selected tasks or steps manually, automatically, or a combination thereof. Moreover, according to actual instrumentation and equipment of preferred embodiments of the method and system of the present invention, several selected steps could be implemented by hardware or by software on any operating system of any firmware or a combination thereof. For example, as hardware, selected steps of the invention could be implemented as a chip or a circuit. As software, selected steps of the invention could be implemented as a plurality of software instructions being executed by a computer using any suitable operating system. In any case, selected steps of the method and system of the invention could be described as being performed by a data processor, such as a computing platform for executing a plurality of instructions.

### BRIEF DESCRIPTION OF THE DRAWINGS

[0102] The invention is herein described, by way of example only, with reference to the accompanying drawings. With specific reference now to the drawings in detail, it is stressed that the particulars shown are by way of example and for purposes of illustrative discussion of the preferred embodiments of the present invention only, and are presented in the cause of providing what is believed to be the most useful and readily understood description of the principles and conceptual aspects of the invention. In this regard, no attempt is made to show structural details of the invention in more detail than is necessary for a fundamental understanding of the invention, the description taken with the drawings making apparent to those skilled in the art how the several forms of the invention may be embodied in practice.

[0103] In the drawings:

[0104] FIG. 1 is a flowchart diagram describing a method suitable for classifying a target sequence of a protein, according to various exemplary embodiments of the present invention;

[0105] FIG. 2 is a schematic illustration of an apparatus for classifying a target protein sequence, according to various exemplary embodiments of the present invention;

[0106] FIG. 3 is a flowchart diagram of a method for characterizing a predetermined collection of protein classes, according to various exemplary embodiments of the present invention;

[0107] FIG. 4 is a schematic illustration of an apparatus for characterizing a protein class being a member of a collection of protein classes, according to various exemplary embodiments of the present invention;

[0108] FIG. 5 is a flowchart diagram of a method for classifying a plurality of proteins into protein classes, according to various exemplary embodiments of the present invention;

[0109] FIGS. 6a-b are simplified illustrations a structured graph (FIG. 6a) and a random graph (FIG. 6b), according to a preferred embodiment of the present invention;

[0110] FIG. 7a illustrates a representative example of a portion of a graph with a search-path going through five vertices, according to a preferred embodiment of the present invention;

[0111] FIG. 7b illustrates a pattern-vertex having three vertices which are identified as significant pattern of the trial path of FIG. 7a, according to a preferred embodiment of the present invention;

[0112] FIG. 8 is a histogram of motifs as function of their length as calculated according to a preferred embodiment of the present invention for the six main classes of the EC hierarchical classification;

[0113] FIGS. 9a-c are histograms of percentage identity of pairs of enzymes that contain the same predicting sequences which comprise less than 9 amino acids (FIG. 9a), between 9 and 12 amino acids (FIG. 9b) and more than 12 amino acids (FIG. 9c);

[0114] FIG. 10 is a histogram of number of proteins in an additional exemplary set of previously characterized proteins as a function of number of predicting sequence matches;

[0115] FIG. 11 is a histogram of number of proteins in same set of protein as in FIG. 10 as a function of number of predicting sequence matches indicating how many consistent and inconsistent matches for each number of predicting sequences;

[0116] FIG. 12 is a histogram similar to FIG. 11 showing 5 to 15 predicting sequence matches in greater detail;

[0117] FIG. 13 is a histogram indicating percentage of various combinations of consistent and inconsistent predicting sequence matches per protein;

[0118] FIG. 14 is a histogram depicting percentage of true predictions as a function of predicting sequence match category;

[0119] FIG. 15 is a histogram depicting number of proteins as a function of length of coverage (L) by number of consistent predicting sequences;

[0120] FIG. 16 is a histogram depicting number of proteins as a function of predicting sequence match category for a dataset of previously uncharacterized sequences;

[0121] FIG. 17 is a tree diagram illustrating representative portions of the EC hierarchy and the assignments of predicting sequences (PS) to predictive sequence classes to form exemplary predictive sequences according to some embodiments of the invention;

[0122] FIG. 18 shows aligned sequences of two groups of enzymes of level 4 that share the same 3rd level assignment. The organisms in the upper group, 5.1.3.20, belong to proteobacteria, while those of the lower group, 5.1.3.2, contain also eukaryotes (ARATH, CYATE and PEA); Bold-faced substrings denote predictive sequences; amino-acids flanked by spaces denote active sites and binding sites, as indicated above; a list of all predictive sequences and their assignments to predictive sequence classes is presented below the sequences.

[0123] FIG. 19 is a three dimensional spacefilling model of enzyme P67910 depicting the active sites of (1) S, (2) Y and (3) K and the motif RYFNV in location (4). Clearly the latter shares with the loci (1) and (2) the same pocket, thus indicating its possible importance in the function of this enzyme. Visualization was done using the tool described in Moreland, et al (2005; The molecular biology toolkit (mbt): A modular platform for developing molecular visualization applications. BMC Bioinformatics., 6:21);

[0124] FIG. 20a is a three-dimensional display of enzyme P07649 (PDB code 1DJ0), belonging to EC 5.4.99.12, showing [1] an active site D at sequence location 60, [2] a binding site Y at location 118, [3] a binding site L at location 245. The active site is common to two predicting sequences [4] containing (CAGRT(D)AGVH). Other shown predicting sequences are [5] GQVVH at locations 67-71, [6] FHARF at locations 107-111, known to be a tentative RNA-binding peptide, [7] ENDFTS at locations 157-163 and [8] HMVRNI at 201-207, sharing a pocket with the active and binding sites. GQVVH and ENDFTS belong to PS3, all other motifs belong to PS4.

[0125] FIG. 20b shows a different display of the same enzyme focuses on the pocket containing the active site.

[0126] FIG. 20c shows the relevant section of the enzyme sequence, with highlighted residues corresponding to the pocket and underlined residues corresponding to predicting sequences.

[0127] FIG. 21 is a histogram of number of enzyme sequences as a function of number of predicting sequences occurring on enzymes; the median is indicated on the Figure and the mean average is 9.5 predicting sequences/enzyme;

[0128] FIG. 22 is a pie chart illustrating the relation between the data of Swiss-Prot releases 45 and 48.3

[0129] FIG. 23 is histogram of number of enzymes as a function of number of predictive sequences with median and mean number of predictive sequences indicated;

[0130] FIG. 24 is a Venn diagram illustrating the intersection of enzymes characterized by an exemplary embodiment of the invention and PROsite data of Swiss-Prot; and

[0131] FIG. 25 is a histogram of coverage of ProSite motifs by PSs plotted as a function of the required minimal amount (in percents) of amino-acids shared by the two motifs.

### DESCRIPTION OF THE PREFERRED EMBODIMENTS

[0132] One aspect of the invention relates to an algorithm which employs a large number of short predictive sequences generally indicated as Sj, to determine a function (e.g. an enzymatic function) of a subject amino acid (AA) sequence which has not been previously characterized. A classifier Cj indicating Classification information (e.g. a classification in the Enzyme Commission Hierarchy) is associated with each predictive sequence Sj. In an exemplary embodiment of the invention, each Cj provides a position in the EC hierarchy.

[0133] In an exemplary embodiment of the invention, the algorithm searches the subject AA sequence to provide all the Sj hits thereon. The Sj hits can be either consistent (c) or inconsistent (i) where consistency indicates assignment to a same EC class or classes which share a parent/offspring relationship.

[0134] In an exemplary embodiment of the invention, 2 to 20 predictive sequences are used to assign an EC number to an AA sequence. Optionally, 3 to 5 predictive sequences are sufficient to reliably assign an EC number to an AA sequence. In some exemplary embodiments of the invention predictive sequences have significant predictive value even when they do not all consistently indicate a single EC classification.

[0135] Another aspect of the invention relates to automated analysis of AA sequences by a machine to identify predicting sequences within the sequence, analyze the identified predicting sequences and assign an EC classification based upon the identified predicting sequences. In an exemplary embodiment of the invention, the automated analysis assigns EC classifications which have low homology (e.g. 70%, or 60% or 50% or intermediate or lesser homologies at the AA level) to the most homologous enzyme in the assigned EC class. Optionally, the analysis assigns a single AA sequence to two EC classes. In an exemplary embodiment of the invention, assignment to two EC classifications indicates that there are two distinct enzymatic activities. Optionally, the two activities reside in distinct AA sequence domains or in overlapping AA sequence domains.

[0136] An additional aspect of the invention relates to use AA sequences which were previously isolated to perform a function revealed by analysis of predicting sequences residing in the sequence. According to various exemplary embodiments of the invention, large numbers of previously unknown enzymes for hydrolysis (e.g. of proteins and/or carbohydrates and/or lipids) are made available. According to other exemplary embodiments of the invention, large numbers of previously unknown enzymes for laboratory analytic use (e.g. nuclease and/or ligases and/or polymerases) and/or medical use are made available. Optionally, enzymes are made available in a variety of forms including but not limited to, chemical reagents comprising specific enzymes immobilized on an insoluble support, pharmaceutical compositions and cleaning preparations. Exemplary insoluble supports include, but are not limited to, cellulose, agarose, sephadex, sepharose, nitrocellulose, nylon, polycarbonate, polystyrene and glass. Immobilization is optionally transient (e.g. by ionic binding) or permanent (e.g. by covalent binding).

[0137] In an exemplary embodiment of the invention, the enzymes are isolated from thermophilic organisms. Optionally, such enzymes remain active at 45° centigrade or are chemically modified to obtain such thermal stability.

[0138] Another aspect of the invention relates to isolated nucleic acid sequence encoding at least a functional portion of an AA sequence which was previously isolated but whose function was only revealed by analysis of predicting sequences residing in the sequence. Optionally, analysis of large groups of newly characterized polypeptides gives rise to a smaller, but still significant, group of products. In an exemplary embodiment of the invention, isolated nucleic acid sequences which encode the polypeptides of the present invention are incorporated into an expression vector. Optionally, the expression vector can be used to transfect bacteria and/or to transform cells and recombinantly express the exogenous polypeptide therein. According to various exemplary embodiments of the invention, the cells can be prokaryotic or eukaryotic cells (e.g., mammalian cells, insect cells, yeast or plant cells) which are amenable to transformation. Optionally, the transformed cells comprise at least a portion of a transgenic animal or a transgenic plant.

[0139] In an exemplary embodiment of the invention, there is provided a detergent composition comprising one or more enzymes characterized according to a method according to an exemplary embodiment of the invention and/or a method of use of the composition. Optionally, enzymes characterized according to a method according to an exemplary embodiment of the invention are set forth in SEQ ID Nos.: 77,838 to 198,923. XXX try to limit??

[0140] In an exemplary embodiment of the invention, there is provided a food composition and/or a food processing composition comprising one or more enzymes characterized according to a method according to an exemplary embodiment of the invention and/or a method of use of the composition. Optionally, enzymes characterized according to a method according to an exemplary embodiment of the invention are set forth in SEQ ID Nos.: 77,838 to 198,923. XXX try to limit??

[0141] The present invention also encompasses compositions useful for the preparation of ethanol comprising one or more enzymes characterized according to a method according to an exemplary embodiment of the invention and/or a method of use of the composition. Optionally, enzymes characterized according to a method according to an exemplary embodiment of the invention are set forth in SEQ ID Nos.: 77,838 to 198,923. XXX try to limit??

[0142] The present embodiments comprise a searchable protein database which can be used for classifying a protein according to its amino acid primary sequence. Specifically, the present invention can be used to predict a class of an unclassified protein for the purpose of, e.g., predicting its affinity or function. The present embodiments further comprise readable data storage medium carrying the protein database, method and apparatus for classifying protein sequences, and method and apparatus for characterizing a collection of protein classes for the purpose, e.g., building or updating the database.

[0143] The principles and operation of a method and apparatus according to the present invention may be better understood with reference to the drawings and accompanying descriptions.

[0144] Before explaining at least one embodiment of the invention in detail, it is to be understood that the invention is not limited in its application to the details of construction and the arrangement of the components set forth in the following description or illustrated in the drawings. The invention is capable of other embodiments or of being practiced or carried out in various ways. Also, it is to be understood that the phraseology and terminology employed herein is for the purpose of description and should not be regarded as limiting.

[0145] It has long been recognized that in numerous cases proteins exhibit a high correlation between their three-dimensional structure and their function; however other cases revealed no such correlation.

[0146] For example, the enzyme lysozyme (PDB entry 8lyz and EC 3.2.1.17) and the enzyme α-lactalbumin (PDB entry 1alc and EC 2.4.1.22) share only 44% sequence identity, but their backbones superpose with a root-mean-square-deviation (RMSD) of only 1.55 Å, meaning these two enzymes share a very similar three-dimensional structure. Interestingly, their functions are mutually exclusive: α-lactalbumin can not hydrolyze glycosides and lysozyme can not participate in lactose synthesis.

[0147] A more impressive example of this phenomenon is the structural family known as the TIM barrel fold family, named after triosephosphate isomerase (PDB entry 1amk and EC 5.3.1.1). The eight-stranded a/13 TIM barrel is by far the most common tertiary fold observed in high resolution protein crystal structures. It is estimated that 10% of all known enzymes have this domain. The members of this large family of proteins catalyze very different reactions. Such diversity in function has made this family an attractive target for protein structure-function relationship research, and the evolutionary history of this protein family has been the subject of rigorous debate. Arguments have been made in favor of both convergent and divergent evolution, yet due to the lack of sequence homology, the ancestry of this molecule is still not understood.

[0148] Table 1 below presents some 84 members of the TIM barrel family sorted by their EC number, which represent the function of the enzyme, as further detailed hereinafter. As shown in Table 1 the enzymes of the TIM barrel family span over all classes of the EC hierarchical classification. These examples illustrate that mere backbone structural similarity does not necessarily imply functional similarity.

TABLE 1
TIM barrel family enzymes by EC class.

| | Enzyme/Protein name | EC Number |
|---|---|---|
| 1 | CHO reductase | 1.1.1.2 |
| 2 | Inosine monophosphate dehydrogenase | 1.1.1.205 |
| 3 | Aldehyde reductase | 1.1.1.21 |
| 4 | Aldose reductase | 1.1.1.21 |
| 5 | 3-alpha-hydroxy steroid dehydrogenase | 1.1.1.50 |
| 6 | Flavocytochrome B2 | 1.1.2.3 |
| 7 | Glycholate oxidase | 1.1.3.1 |
| 8 | 2-5-diketo D-gluconic acid reductase | 1.1.99.3 |
| 9 | Luciferase (flavin mono oxygenase) | 1.14.14.3 |
| 10 | Di hydro orotate dehydrogenase | 1.3.3.1 |
| 11 | Tetrahydromethanopterin reductase | 1.5.99.11 |
| 12 | Trimethylamine dehydrogenase | 1.5.99.7 |
| 13 | Old yellow enzyme | 1.6.99.1 |
| 14 | Methyltetrahydrofolate corrinoid | 2.1.1.13 |
| 15 | Transaldolase B | 2.2.1.2 |
| 16 | Cyclodextrin glycosyl transferase | 2.4.1.19 |
| 17 | Quinolinate phosphoribosyl transferase | 2.4.2.19 |
| 18 | tRNA- Guanine transglycosylase | 2.4.2.29 |
| 19 | Dihydropteroate synthase | 2.5.1.15 |
| 20 | Thiamin phosphate synthase | 2.5.1.3 |
| 21 | Pyruvate kinase | 2.7.1.40 |
| 22 | Pyruvate phosphate dikinase | 2.7.9.1 |
| 23 | Endonuclease IV | 3.1.21.2 |
| 24 | His A protein | 3.1.3.15 |
| 25 | Phosphoinositide-Specific Phospholipase C, Isozyme d1 | 3.1.4.11 |
| 26 | Phosphotriesterase | 3.1.8.1 |
| 27 | α-amylase | 3.2.1.1 |
| 28 | Oligo 1-6 glucosidase | 3.2.1.10 |
| 29 | Hevamine | 3.2.1.14 |
| 30 | chitinase A | 3.2.1.14 |
| 31 | β-amylase | 3.2.1.2 |
| 32 | β-glycosidase | 3.2.1.21 |
| 33 | 1-3 β glucanase | 3.2.1.39 |
| 34 | Endocellulase E1 | 3.2.1.4 |
| 35 | Chitobiase | 3.2.1.52 |
| 36 | 1,4 a D-glucan maltotetrahydrolase) | 3.2.1.60 |
| 37 | Isoamylase | 3.2.1.68 |
| 38 | 1-3, 1-4 β glucanase | 3.2.1.73 |
| 39 | β mannanase | 3.2.1.78 |
| 40 | Endo-β-1-4-xylanase | 3.2.1.8 |
| 41 | Exo-1-4-β-D- glycanase | 3.2.1.91 |
| 42 | Endo-β-N-acetyl glucose aminidase | 3.2.1.96 |
| 43 | Myrosinase (thioglucoside glucohydratase) | 3.2.3.1 |
| 44 | Urease (c subunit) | 3.5.1.5 |
| 45 | Adenosine deaminase | 3.5.4.4 |
| 46 | Ornithine decarboxylase | 4.1.1.17 |
| 47 | orotidine-5′-phosphate decarboxylase | 4.1.1.23 |
| 48 | Phosphoenol pyruvate carboxylase | 4.1.1.31 |
| 49 | Uroporphyrinogen decarboxylase | 4.1.1.37 |
| 50 | ribulose-bisphosphate carboxylase (large subunit) | 4.1.1.39 |
| 51 | Indole-3 glycerol phosphate synthase | 4.1.1.48 |
| 52 | Fructose bis-phosphate aldolase | 4.1.2.13 |
| 53 | Arabino-heptulosonate-7-phosphate synthase | 4.1.2.15 |
| 54 | 3-deoxy-D-manno-Octulosonate 8 phosphate synthase | 4.1.2.16 |
| 55 | Isocitrate Lyase | 4.1.3.1 |
| 56 | Malate synthase G | 4.1.3.2 |
| 57 | N-acetyl neuraminate lyase | 4.1.3.3 |
| 58 | 3-dehydroquinate dehydratase | 4.2.1.10 |
| 59 | Enolase | 4.2.1.11 |
| 60 | Tryptophan synthase (α subunit) | 4.2.1.20 |
| 61 | 5-Amino laevulinate dehydratase | 4.2.1.24 |
| 62 | propane Diol dehydratase | 4.2.1.28 |
| 63 | D-glucarate dehydratase | 4.2.1.40 |
| 64 | 2-Dehydro-3-Deoxy-Galactarate Aldolase | 4.2.1.42 |
| 65 | Dihydropicolinate Synthase | 4.2.1.52 |
| 66 | His F protein | 4.3.2.4 |
| 67 | Alanine racemase | 5.1.1.1 |
| 68 | Mandelate racemase | 5.1.2.2 |
| 69 | D-ribulose-5-phosphate 3-epimerase | 5.1.3.1 |
| 70 | Triosephosphate Isomerase | 5.3.1.1 |
| 71 | Rhamnose isomerase | 5.3.1.14 |
| 72 | N-5-phosphoryl anthranilate isomerase | 5.3.1.24 |
| 73 | Xylose isomerase | 5.3.1.5 |
| 74 | Phosphoenol pyruvate mutase | 5.4.2.9 |
| 75 | Glutamate Mutase | 5.4.99.1 |
| 76 | Methylmalonyl CoA mutase | 5.4.99.2 |
| 77 | Muconate cyclo isomerase | 5.5.1.1 |
| 78 | Chloromuconate isomerase | 5.5.1.7 |
| 79 | Yeast Hypothetical protein | — |
| 80 | FR-1 Protein | — |
| 81 | Potassium channel β subunit | — |
| 82 | Methylene tetrahydrofolate reductase | — |
| 83 | Narbonin | — |
| 84 | Concanavalin B | — |

[0149] Conversely, structural dissimilarity does not necessarily imply functional dissimilarity, as demonstrated among many proteins. For example, carbonic anhydrases (EC 4.2.1.1) from the archaebacteria Methanosarcina thermophila (PDB entry 1thj) is utterly structurally dissimilar to carbonic anhydrases from the mammal Mus musculus (PDB entry 1dmx).

[0150] In a search for classification techniques, the present inventors have devised a searchable protein database which can be used for efficiently classifying protein according to its amino acid primary sequence. The protein database of a preferred embodiment of the present invention comprises a plurality of entries, where each entry j has a predicting sequence Sⱼ and a protein classifier Cⱼ corresponding to the predicting sequence Sⱼ.

[0151] In some of the priority documents of the instant Application (U.S. Application No. 60/799,318 filed on May 11, 2006, and U.S. Application No. 60/861,746 filed on Nov. 30, 2006), “predicting sequences” or “PS” were also referred to as “specific peptides” or “SP”.

[0152] Exemplary databases according to the teachings of the present embodiments are provided in Appendix 1 and Tables 11, 37 and 42 on enclosed CD-ROM (files “Table-11.txt”, “Table-37.txt” and “Table-42.txt”). Methods suitable for constructing the database according to various exemplary embodiments of the present invention are provided hereinbelow.

[0153] As is further detailed hereinunder, the predicting sequence of each entry predicts the class to which a target protein belongs, while the corresponding classifier provides classification information of the respective class, subclass, sub-subclass etc. For example, in one embodiment, Sⱼ predicts the affinity of a protein and Cⱼ describes the affinity class of the protein.

[0154] The term “affinity”, as used herein, refers to a specific distinguishing property of a given protein which relate to the molecule(s) that bind and interact with it in a specific and characteristic mode, and thereby at least partially describe the protein's function. A set of one or more molecules which bind and interact with a protein in a specific manner, (e.g., substrates, ligands, coenzymes, co-factors, affinity-pair protein counterpart and the likes), is referred to herein as an “interacting set”.

[0155] The affinity of a protein according to the present embodiments correlates strongly to the protein's chromophore, which comprises a specific set of chemical moieties which are specifically positioned in three-dimensional space so as to fit a complementary arrangement of chemical moieties which is characteristic of a member of the interacting set. The binding and interaction between the protein and the members of its interacting set is therefore governed by structural recognition patterns which effect reversible binding and exhibit a high binding (dissociation) constant relative to molecules which are not members of the binding set.

[0156] The EC hierarchical classification system discussed in details in Appendix 2 below is one example for protein classification by affinity. For example, an enzyme which belongs to the hydrolases class (EC 3.-.-.-), acting on carbon-nitrogen bonds other than peptide bonds (EC 3.5.-.-) in cyclic amides (EC 3.5.2.-), is classified by affinity to cyclic amides such as, for example, cyanuric acid, and hence cyanuric acid amidohydrolase (EC 3.5.2.15) is uniquely identified by affinity to cyanuric acid. Thus, according to a preferred embodiment of the present invention Sⱼ predicts the branch of the EC tree to which the protein belongs and Cⱼ provides classification information in the form of the EC number defining the respective branch.

[0157] Receptor-ligand affinity is another example in which the predicting sequence predicts the affinity of a protein. Like enzymes, receptors interact with one or more ligands by binding which is governed by molecular recognition. The receptor exhibits one or more binding sites which are structurally and chemically compatible to bind the ligand, namely possess a unique chromophore comprising atoms of its amino acid chain. Therefore, a collection of receptor sequences wherein each receptor is associated with a known ligand can be classified according to the type of ligand that each receptor recognizes and binds. Thus, according to the presently preferred embodiment of the invention Cⱼ describes ligands to which a protein having the predicting sequence Sⱼ binds. Representative examples of such ligands, include, without limitation, peptide-type ligands, charge-type ligands, phosphate-type ligand, nucleotide-type ligands and the like.

[0158] Receptor classes can be attributed to specific ligand/activity types such as G-protein-coupled receptors (GPCRs), guanylyl cyclase receptors, tyrosine kinase receptors, erythropoietin receptor, growth factors receptors, cytokines receptors, nicotinic receptors, acetylcholine receptors, atrial-natriuretic peptide (ANP) receptors, natriuretic peptides receptors, guanylin receptors, glycine receptor, GABA receptors, glutamate (kainate) receptors, NMDA receptors, AMPA receptors, serotonin (5-HT3) receptors and the likes.

[0159] Within the large group of receptors, one particular class of receptors is the GPCRs super-family, also known as seven transmembrane receptors (7TMRs). This family is a protein family of transmembrane receptors that transduce an extracellular signal (ligand binding) into an intracellular signal (G protein activation). The GPCRs are the largest protein family known, and members of this family are involved in all types of stimulus-response pathways, from intercellular communication to physiological senses. The diversity of functions is matched by the wide range of ligands recognized by members of the family, including photons (rhodopsin, the archetypal GPCR), small molecules (in the case of the histamine receptors) and proteins (for example, chemokine receptors). This pervasive involvement in normal biological processes has the consequence of involving GPCRs in many pathological conditions, which has led to GPCRs being the target of 40% to 50% of modern medicinal drugs. The GPCRs can be further subdivided into subclasses and the present embodiments can be used to sub-classify receptors of the GPCR super-family.

[0160] Thus, according to a preferred embodiment of the present invention Sⱼ predicts the specific binding of a GPCR and Cⱼ comprises classification information which describes ligands to which the GPCR binds. For example, the classification information which can be provided by the classifier can include specific ligand/activity types, such as, but not limited to, “muscarinic”, acetylcholine receptors (acetylcholine and muscarine), adenosine receptors (adenosine), adrenoceptors (also known as adrenergic receptors, for adrenaline, and other structurally related hormones and drugs), GABA receptors, type-B (γ-aminobutyric acid or GABA), angiotensin receptors (angiotensin), cannabinoid receptors (cannabinoids), cholecystokinin receptors (cholecystokinin), dopamine receptors (dopamine), glucagon receptors (glucagon), metabotropic glutamate receptors (glutamate), histamine receptors (histamine), olfactory receptors (for the sense of smell), opioid receptors (opioids), rhodopsin (a photoreceptor), secretin receptors (secretin), serotonin receptors (except type-3), somatostatin receptors (somatostatin), calcium-sensing receptor (calcium) and the likes.

[0161] In an additional embodiment, Sⱼ predicts the three-dimensional structure of the protein or a portion thereof. In this embodiment, Cⱼ describes a class or family of proteins having sufficient structural homology. One example of such protein class is the aforementioned TIM barrel super-family, which include a large number of proteins which share a fold (main feature of the tertiary structure).

[0162] In still another embodiment, Sⱼ predicts the function of the protein. In this embodiment, Cⱼ describes a class or family of proteins that share functional attributes, such as, for example, proteins which are derived from a common ancestor. For example, a classification according to an ancestor can be used to classify proteins which contain a catalytic triads and which are related by convergent evolution towards a stable, useful active site. Among these are found the α/β hydrolase fold family, the eukaryotic serine protease family, the cysteine protease family and the subtilisin family. For example, the class of proteins associated with the α/β hydrolase fold comprises several hydrolytic enzymes of widely differing phylogenetic origin and catalytic function. The core of each member of this group is an α/β-sheet and not a barrel, of eight β-sheets connected by α-helices. These proteins have diverged from a common ancestor so as to preserve the arrangement of the catalytic residues, not the binding site. They all have a catalytic triad, the elements of which are borne on loops which are the best-conserved structural features in the fold. The unique topological and sequence arrangement of the triad residues produces a catalytic triad which is, in a sense, a mirror-image of the serine protease catalytic triad.

[0163] The classifier Cⱼ can also describe a class or family of proteins that share communication transmittance attributes, such as, but not limited to, the cytokines. Cytokines are soluble proteinaceous substances, such as the interleukins and lymphokines, produced by a wide variety of haemopoietic and non-haemopoietic cell types, and are critical to the functioning of both innate and adaptive immune responses.

[0164] Cytokines can be classified into four different classes based on structural homology. A first cytokines class includes the cytokines with four bundles of alpha-helices. This class is subdivided into three sub-classes, known as the Interleukin (IL) 2 subclass, the interferon (INF) subclass and the IL-10 subclass. A second cytokines class is known as the IL-1 family and primarily includes the IL-1 and IL-18. A third cytokines class, known as the IL-17 class, includes cytokines which have a specific effect in promoting proliferation of T-cells that cause cytotoxic effects. A fourth cytokines class includes the chemokines.

[0165] Cytokines, and particularly immunological cytokines, can also be classified according to the target cells and/or the cells for which they stimulate proliferation and differentiation. With respect to immunological cytokines, for example, these can be classified to several classes. One such class can include cytokines which activate T cells, another class can include cytokines which stimulate proliferation of antigen-activated T and B cells, an additional class can include cytokines which stimulate proliferation and differentiation of B cells, an additional class can include cytokines which activate macrophages, and an additional class can include cytokines which stimulate hematopoiesis. Thus, in this embodiment Sⱼ predicts the function of the cytokine and Cⱼ describes this function.

[0166] Also contemplated are embodiments in which Sⱼ predicts other protein attributes such as, but not limited to, electrostatic traits, cellular placement locus, motion capacity and the like. Depending on the protein attributes Cⱼ describes the class of proteins which share the respective attribute.

[0167] It is to be understood that the database of the present embodiments is not limited to one classification criterion. It is intended to embrace all combinations and sub-combinations of any of the aforementioned protein classification criteria.

[0168] For example, as will be appreciated by one of ordinary skill in the art, when the classifier Cⱼ comprises an EC number, the classification can be according to function and/or affinity. Thus, a particular entry in the database can comprise a predicting sequence which predicts, e.g., the ability of the enzyme to catalyze oxidoreduction reactions. In this case the corresponding classifier can be EC 1 which stands for the oxidoreductases main class in the EC hierarchical classification. Another entry in the database can comprise a predicting sequence which predicts, e.g., the ability of the enzyme to act on carbon-nitrogen bonds in the cyclic amide in cyanuric acid. In this case the corresponding classifier can be EC 3.5.2.15, which describes, inter alia, function (catalyzing hydrolytic cleavage) and affinity (to the carbon-nitrogen bond in the cyclic amide in cyanuric acid).

[0169] Another combination of classification criteria which is contemplated is the combination of classification by function and fold. For example, a particular entry in the database can comprise a predicting sequence which predicts, e.g., communication transmittance attributes. In this case the classifier comprises information regarding these attributes (for example the classifier can point to the cytokines class of proteins). Another entry can comprise a predicting sequence which predicts, e.g., one of the four structural types of the cytokines (e.g., the four α-helix bundle). In this case the classifier can point to the respective type of cytokine. Other combinations of classification criteria are also contemplated.

[0170] The protein database of the present embodiments can be embodied in any electronically readable data storage medium, including, without limitation, a memory medium (e.g., RAM, ROM, EEPROM, flash memory, etc.), an optical storage medium (e.g., CD-ROM, DVD, etc.), a magnetic storage medium (e.g., magnetic cassettes, magnetic tape, magnetic disk storage device, etc.), or any other medium which can be used to store the matrix and which can be accessed electronically, e.g., by a data processor. The protein database of the present embodiments can also be embodied on a printed medium, e.g., a paper.

[0171] The number of entries in the protein database of the present embodiments is referred to herein as the size V of the protein database. There is no limitation on the numerical value of V. Preferably, the number of entries is large so as to facilitate classification of many types of proteins. According to a preferred embodiment of the present invention the protein database comprises at least T entries (i.e., V≧T), where T can be any number disclosed either explicitly or implicitly in the specification. For example, T can be any number from 1 to the size of the exemplified protein databases provided in Appendix 1 below and further in Tables 11, 37 and 42 on enclosed CD-ROM.

[0172] If desired, the database can be parsimonious in the sense that its size V is reduced compared to the size Vₜ of the training set used for constructing the database. This embodiment is advantageous from the standpoint of data storage volume and/or processing time. It was found by the Inventors of the present invention that the size of the database can be significantly reduced by introducing further screening to the database according to additional information, e.g., biological data. For example, a parsimonious database can be obtained from a larger database by screening the larger database according to three-dimension structural information of known classified proteins, such as the proteins from which the entries of the larger database were extracted.

[0173] In preferred embodiment of the invention, a larger database is screened according to biological information, such as, but not limited to, existence of specific sites, secondary structure, DNA and RNA binding, metal binding, protein-protein interactions, etc. For example, screening can be done by keeping only entries corresponding to binding and active sites in known proteins, while removing all other entries. The size of the resulting parsimonious database is preferably less than half, more preferably less than third, more preferably less than quarter, more preferably less than fifth, more preferably less than sixth, more preferably less than seventh, more preferably less than eighth, more preferably less than ninth, more preferably less than tenth of the size of the larger database. As demonstrated in the Examples section that follows, such procedure can reduce a database of over 50,000 entries (e.g., the database provided in Table 11 of 37 on enclosed CD-ROM) to a database of less than 2500 entries, thus reducing the size of the database by a factor of about 20. A representative Example of a database in which all predicting sequence cover active and/or binding sites is provided in Appendix 1 and further in Table 42 on enclosed CD-ROM.

[0174] The advantage of the protein database of the present embodiments is in its canonical predicting sequences. The present Inventors have found that it is sufficient to attribute classification information to a target protein based on a relatively short class-predicting sequence. In various exemplary embodiments of the invention the predicting sequence comprises less than L amino acids, where L is an integer which is typically not larger than 15, e.g., L=5, L 6, L=7, L=8, L=9, L=10, L=11, L=12, L=13, L=14 or L=15. The number of amino acids in a predicting sequence is referred to herein as the length of the predicting sequence. A preferred method which can be used for constructing the protein database of the present embodiments is provided hereinunder.

[0175] The present Inventors have found that it is sufficient to classify an unclassified target protein, particularly, but not exclusively an enzyme, by searching in its primary sequence for a motif of amino acids matching one of the predicting sequences Sⱼ of the database. It will be appreciated that since the predicting sequences are generally short, the search for a matching motif over the primary sequence is a simple and fast task. In particular, the database of present embodiments is superior to prior art techniques because according to a preferred embodiment of the present invention it is not necessary to determine the similarity level (e.g., number of insertions, deletions and/or mutations) between the entire sequence of the target protein and the entire sequence of each individual protein of the database. Once a matching motif is found, the unclassified protein is classified by attributing the target protein with the protein classifier Cⱼ which corresponds to the matched predicting sequence Sⱼ. Once the protein is classified, its classification can be displayed, e.g., on a display device or hardcopy, recorded on a memory medium, or transmitted over a communication network.

[0176] When the database is an enzyme database, the protein classifiers of the database preferably represent branches of the EC hierarchical classification (EC tree). In various exemplary embodiments of the invention each predicting sequence Sⱼ is present exclusively in entries having protein classifier representing a specific EC branch or descending branch thereof. In other words, the predicting sequences are preferably specific to one, and only one, branch of the EC hierarchical classification, excluding uniqueness within its descending branches. For example, as is evident from the database provided in Appendix 1 below and further in Table 11 on enclosed CD-ROM, the predicting sequence SSFGSY (SEQ. ID No. 1907) is present in the EC branch 1.9.3.1 but not in any other EC branch because there are no descending branches to this EC branch. On the other hand, predicting sequence LEGEYG (SEQ. ID No. 13270) corresponds to the EC branch 1.1.1, and is therefore present only on EC branches beginning with the three EC numbers 1.1.1, but not necessarily on all of them.

[0177] Database in which protein classifiers representing branches of the EC tree can also be used for determining whether or not a target protein has enzymatic function. Thus, the primary sequence of an unclassified target protein can be searched for one or more motifs of amino acids matching one or more of the predicting sequences of the database. If such motif(s) exist, the protein can be identified as an enzyme. Moreover, the protein classifiers associated with the found motifs can be used for classifying the enzyme according to the EC classification.

[0178] Typically, the search over the primary sequence of the target protein results in a plurality of hits, each corresponding to a different entry of the database. In this case, a confidence or likelihood test is preferably employed so as to determine whether or not the target protein has enzymatic function. Optionally and preferably the confidence or likelihood test is employed to exclude one or more predicting sequence hits which are more likely to be accidentals. That is to say, predicting sequence hit corresponding to protein classifiers representing a branch of the EC tree which is likely to be false is excluded from the list of predicting sequence hits. Protein classifiers associated with the remaining predicting sequence hits can then be used for classifying the protein according to the EC classification.

[0179] The likelihood test preferably comprises a thresholding procedure in which the number of predicting sequence hits on the target protein is compared to one or more predetermined confidence thresholds. The simplest case is a procedure in which a single threshold is used, whereby if the number of hits is higher than the threshold the target protein is predicted as having enzymatic function, and if the number of predicting sequence hits equals or lower than the threshold, the hits are declared as false positive, and the target protein remains unclassified. A preferred value of the threshold in this embodiment is 2 more preferably 3, more preferably 4, even more preferably 5 or more.

[0180] In another embodiment, two or more predetermined thresholds are used. In this embodiment each threshold is associated with an expected error. If the number of predicting sequence hits is higher than the ith threshold but is lower than or equals the (i+1)th threshold, the target protein is predicted as having enzymatic function, and the prediction is associated with the ith expected error.

[0181] The expected errors can be obtained as follows: The database of the present embodiments can be tested against a database of random sequences, and a probability can be assigned to each number of hits. Additionally, the primary sequence of a plurality of classified proteins can be searched for motifs of amino acids matching predicting sequences of the database of the present embodiments so as to determine a set of observations, whereby each observation corresponds to a different number of predicting sequence hits. For example, one observation can be the number of classified proteins with no hits, another observation can be the number of classified proteins with one hit, and so on. A set of linear equations can then be constructed for using the sets of probabilities and observations as coefficients. The linear equations can be used for calculating the expected errors. For example, as demonstrated in the Examples section that follows, the expected error associated with a threshold of 2 hits is about 24%.

[0182] The database of the present embodiments can also be used for classification according to active sites or active pockets. Thus, a particular entry in the database can comprise a predicting sequence which predicts existence of an active site or an active pocket. For example, the primary sequence of an unclassified target protein (e.g., an enzyme), can be searched for a motif of amino acids matching one of the predicting sequences of the database. Once one or more such predicting sequences of the unclassified target protein are found, the location of one or more of the predicting sequences can be tagged as belonging to an active site or an active pocket of the target protein. Thus, the database of the present embodiments can be used to predict secondary or tertiary structure from primary sequence.

[0183] The term “active pocket” as used herein refers to any spatial region on the protein which includes at least one site capable of facilitating a biological or chemical effect. Typically, “active pocket” is a common term to binding pocket and catalytic pocket. For example, an active pocket of a protein can be a volume in the three-dimensional structure of the protein which includes one or more binding sites and/or active sites. Representative examples of loci of active sites and binding sites are shown in FIGS. 18 and 20 in the Examples section that follows.

[0184] Also contemplated is the use of the database of the present embodiments for classification according to DNA and RNA binding, metal binding, protein-protein interactions, and the like.

[0185] Following is a description of various applications for which the present embodiments can be useful. Each of the following applications can be in a form of a method, which comprises one or more method steps to be executed, or in the form of an apparatus having one or more components capable of performing various method steps.

[0186] Methods of the present embodiments can be embodied in many forms. For example, the methods can be embodied in a tangible medium such as a computer for performing the method steps. The methods can be embodied on a computer readable medium, comprising computer readable instructions for carrying out the method steps. The methods can also be embodied in electronic device having digital computer capabilities arranged to run the computer program on the tangible medium or execute the instruction on a computer readable medium.

[0187] Apparatus for implementing methods of the present embodiments can commonly be distributed to users on a distribution medium such as an electronically readable data storage medium in a form of computer programs. From the distribution medium, the computer programs can be copied to a hard disk or a similar intermediate storage medium. The computer programs can be run by loading the computer instructions either from their distribution medium or their intermediate storage to medium into the execution memory of the computer, configuring the computer to act in accordance with the method of the present embodiments. All these operations are well-known to those skilled in the art of computer systems.

[0188] Referring now to the drawings, FIG. 1 is a flowchart diagram describing a method suitable for classifying a target sequence of a protein, according to various exemplary embodiments of the present invention. The method begins at step 10 and continues to step 11 in which the readable protein database is provided. The method continues to step 12 in which the target sequence of the protein is searched for a motif of amino acids matching one or more of the predicting sequences of the database. The search over the target sequence of the protein can be repeated one or more time so as to provide a plurality of motifs, each matching one or more of the predicting sequences of the database. Since the protein primary sequence can be expressed as a one-dimensional vector of characters the search for matching motif can be easily achieved by the ordinarily skilled person, for example, by traversing the one-dimensional vector and comparing its elements with the elements of the predicting sequences of the database.

[0189] The method continues to step 13 in which the protein classifier corresponding to the predicting sequence is used for classifying the target protein sequence. The classification depends on the type of protein classifier. Specifically, when the predicting sequences of the database predict protein affinities, the target protein sequence is classified according to the protein classifier into a protein affinity class; when the predicting sequences of the database predict protein functions, the target protein sequence is classified according to the protein classifier into a protein functional class. Other classes are also contemplated. For example, the classification can be according to active sites or active pockets. Specifically, the presence or absence of one or more active sites or active pockets of the target protein can be determined. This can be achieved by using a database which covers active sites or active pockets to a sufficiently high degree of confidence (e.g., more than 50%, more preferably more than 60%). A representative database suitable for the presently preferred embodiment of the invention is provided in Table 42 on enclosed CD-ROM, see also Appendix 1 below.

[0190] The existence on the target sequence of motifs matching predicting sequences of such or similar database can be interpreted as presence of active sites or active pockets. Further, the number of matching motifs can be used for estimating the likelihood of such interpretation. Optionally and preferably the location of one or more of the motifs of the target protein which match predicting sequences of the database can be tagged as belonging to an active site or an active pocket.

[0191] Classification can also be according to DNA and RNA binding, metal binding, protein-protein interactions and the like.

[0192] Once the protein is classified, the method optionally and preferably continues to step 14 in which a report containing its classification is issued. The report can be displayed, recorded or transmitted as further detailed hereinabove. The method ends at step 15.

[0193] Reference is now made to FIG. 2 which is a schematic illustration of an apparatus 20 for classifying a target protein sequence. Apparatus 20 can be used for executing selected steps of the method described above and in the flowchart diagram in FIG. 1. Apparatus 20 comprises a searcher 22 which is capable of accessing the protein database of the present embodiments, generally shown at 24. Searcher 22 searches the target sequence for a motif of amino acids which matches a predicting sequence present in database 24, as further detailed above. Apparatus 20 further comprises a classification functionality 26 which also accesses database 24 and provides a protein classifier corresponding to the predicting sequence matched by searcher 22. Thus, in use, searcher 22 traverses the target sequence and compares motifs extracted from the target sequence to the predicting sequences of the database. Once a match is found between the extracted motif and a predicting sequence, searcher 22 passes the information to classification functionality 26 which pulls the respective classifier from database 24 and classifies the target sequence according to the classifier.

[0194] According to a preferred embodiment of the present invention classification functionality 26 determines the presence or absence and optionally the location of active pockets or active sites on the protein sequence, as further detailed hereinabove.

[0195] Classification functionality 26 is optionally and preferably operatively associated with an output unit 28 which displays, record and/or transmits a report containing the classification of the target sequence. Output unit 28 can comprise a display device, a printing device, a recording device and/or a transmitting device. Output unit can also comprise means suitable either for storing information in a computer readable medium or for communicating with functionalities which store the information in the computer readable medium.

[0196] The present embodiments successfully provide a method for characterizing protein classes. The method can be used to construct a protein database by assigning one or more predicting sequences for each protein class. Once the classes are assigned with predicting sequences, the database can be constructed, e.g., as a searchable table in which each entry comprises one predicting sequence and information regarding the protein class to which the predicting sequence is assigned. The constructed database can be recorded on a computer readable medium for further use. The method of this embodiment is supervised in the sense that it can be employed on any collection of protein classes provided each class in the collection includes a known number of protein sequences. A description of an unsupervised method according to another aspect of the present invention is provided hereinunder.

[0197] The supervised method can be employed on any collection of protein classes which defines a classification system. In one embodiment, the method is employed on a collection of enzyme classes which is spanned by the EC hierarchical classification system or a portion (selected branches) thereof.

[0198] More generally, the method can be used for providing efficient characterization to proteins which are already clustered by some protein clustering technique.

[0199] The term “cluster” refers to a protein sequence cluster, which is a group of protein sequences sharing a requisite level of homology and/or other similar traits according to a given clustering criterion. A process and/or method to group protein sequences as such is referred to as clustering, and is typically performed by a clustering application program implementing a cluster algorithm. Many cluster algorithms are known, including, without limitation hierarchical clustering, K-means clustering, Bayesian clustering and the like.

[0200] Thus, suppose for example, that many proteins are subjected to a clustering procedure which produces a collection of protein classes (cluster in this example) such that for each protein it is known (to a certain degree of confidence, say, at least 50%) to which class it belongs. The method of the present embodiments can be employed on the collection of classes and assign the classes predicting sequences. A representative example of such clustering procedure is a procedure which defines clusters of proteins which share a known fold. In this embodiment, the method of the present embodiments assigns sequences which predict the shared folds.

[0201] Reference is now made to FIG. 3 which is a flowchart diagram of a method for characterizing a predetermined collection of protein classes, according to various exemplary embodiments of the present invention.

[0202] The method begins at step 30 and continues to step 31 in which repeatedly occurring motifs are extracted from the amino acid sequences of the proteins. Preferably, but not obligatorily step 31 is executed on all the proteins of all the classes. The repeatedly occurring motifs can be extracted in any way known in the art. According to a preferred embodiment of the present invention step 31 employs a sequence recognition algorithm, such as, but not limited to, the algorithm disclosed in International Patent Application, Publication No. WO/2005010642, the contents of which are hereby incorporated by reference. A preferred technique for extracting the repeatedly occurring motifs is provided hereinunder. In any event, once step 31 is completed a set of motifs are provided.

[0203] The method continues to steps 32-34 in which each class is characterized by a predicting sequence, as follows. In step 32, a class is selected from the collection of protein classes. In step 33 the set of motifs is searched for one or more motifs present in at least a few (e.g., the majority of) proteins belonging to the selected class but not in proteins belonging to other protein classes. According to a preferred embodiment of the present invention step 33 is directed to search for motifs which are sufficiently short. Specifically, step 33 is directed to search for motifs which comprises less than L amino acids, where L is an integer which is typically not larger than 15, as further detailed hereinabove. In step 34 the (sufficiently short) motif which was found is defined as the predicting sequence which characterizes the set.

[0204] Once the predicting sequence is defined, the method loops back to step 32 and steps 32-34 are preferably repeated for another class of the collection. Optionally and preferably the method continues to step 35 in which biological information is used to screen the predicting sequences obtained in steps 32-34. Preferably, the screening step is performed so as to reduce the number of predicting sequences by at least a factor of R where R is a number greater than 1, more preferably greater than 2, e.g., R=5, R=10, R=15 or R=20. The biological information can comprise for example, active sites annotations, secondary structure and the like, and the screening can comprise keeping only predicting sequences which cover the biological information and discarding all other predicting sequences. A representative example of a screening process is provided in the Examples section that follows. Once all the classes of the collection are characterized by predicting sequences, the method optionally and preferably moves to step 36 in which the predicting sequences and classifiers providing classification information of the corresponding classes are recoded on a computer readable medium.

[0205] The method ends at step 37.

[0206] FIG. 4 is a schematic illustration of an apparatus 40 for characterizing a protein class being a member of a collection of protein classes, according to various exemplary embodiments of the present invention. Apparatus 40 can be used for executing selected steps of the method described hereinabove and in the flowchart diagram of FIG. 3. Apparatus 40 comprises a motif extraction unit 42 which extracts repeatedly occurring motifs as delineated above and further exemplified hereinunder. Apparatus 40 further comprises a searcher 44 which searches the set of motifs provided by unit 42 for motif or motifs present in several proteins belonging to the protein class but not in proteins belonging to other protein classes in the collection. The searcher 44 is preferably configured to provide sufficiently small motifs, as further detailed hereinabove. Apparatus 40 further comprises a characterization unit 46 which defines the motif or motifs found by searcher 44 as predicting sequence(s) characterizing the protein class. Optionally and preferably apparatus 40 comprises a screening unit 48 which screens the predicting sequences according to biological information as further detailed hereinabove and exemplified in the Examples section that follows.

[0207] In use, apparatus 40 can be employed for all or a portion of the classes in the collection, such that each class is assigned with one or more predicting sequences, and a database of predicting sequences Sⱼ and classifiers Cⱼ can be constructed as explained above. In various exemplary embodiments of the invention apparatus 40 comprises an output unit 49 which records the database on a computer readable medium or transmits the database to a functionality which records the database on a computer readable medium.

[0208] Repeatedly occurring motifs extracted from amino acid sequences of proteins can also be used for unsupervised classification of proteins.

[0209] As used herein, “unsupervised classification” refers to classification into a plurality of classes without any a-priori knowledge of the distribution of the proteins within the classes. Thus, unlike the supervised method described above in which the classes as well as the proteins of each class are known, in the unsupervised classification, all the proteins are initially unclassified and an unsupervised classification method is executed to define classes and the distribution of proteins within the defined classes.

[0210] Reference is now made to FIG. 5 which is a flowchart diagram of a method for classifying a plurality of proteins into protein classes, according to various exemplary embodiments of the present invention. The method of the presently preferred embodiments is unsupervised.

[0211] The method begins at step 50 and continues to step 51 in which repeatedly occurring motifs are extracted from the amino acid sequences of the proteins as delineated above and further exemplified hereinunder. The method continues to step 52 in which the motifs are used for defining protein classes. The definition of classes is according to the extracted motifs. Specifically, two or more proteins are declared as belonging to class Cⱼ if they all include the same motif Sⱼ. Preferably, but not obligatorily, the motifs can be used to define the classes in an exclusive manner. In this embodiment, two or more proteins are declared as belonging to class Cⱼ if they include the motif Sⱼ and if there is no other class Cᵢ (i≠j) which includes proteins having the motif Sⱼ. It is to be understood that the exclusive definition can be combined with a non-exclusive definition. Thus, the method can define both motifs which are exclusive to the respective classes and motifs which are present in more than one class. Such definition of classes is particularly useful for defining a hierarchical classification system (e.g., a tree) whereby a motif which is present in an ancestor class is also present in its descending classes. On the other hand, a descending class includes at least one motif which is not present in its ancestor or any other class having a non-descending relation therewith.

[0212] The method ends at step 53.

[0213] Following is a description of a preferred procedure for extracting repeatedly occurring motifs. The procedure is based on the sequence recognition algorithm disclosed in International Patent Application, Publication No. WO/2005010642.

[0214] The procedure beings with a search for overlaps between the sequences. Specifically, for each amino acid sequence, partial overlaps between the sequence and other sequences are searched. Each sequence is considered as “trial-sequence” which is compared, segment by segment, to all other sequences.

[0215] This can be done for example, by constructing a graph which represents the dataset. Such graph may include a plurality of vertices and paths of vertices, where each vertex represent one amino acid and each path of vertices represent a primary sequence of one protein. Thus, according to a preferred embodiment of the present invention, for 20 amino acids there are 20 vertices on the graph. These 20 vertices are connected thereamongst by edges, preferably directed edges, in many combinations, depending on the sequences of the proteins.

[0216] The endpoints of each path of the graph are preferably marked, e.g., by adding marking vertices, such as a “begin” vertex before its first vertex and an “end” vertex after its last vertex. These marking vertices represent the beginning and end of the respective sequence of the dataset. Thus, each vertex which represents an amino acid has at least one incoming path and at least one outgoing path, preferably an equal number of incoming and outgoing paths.

[0217] Once the graph is constructed, overlaps between the paths thereof can be searched, for example, by considering different sub-paths of different lengths for each path and comparing these sub-paths with sub-paths of other paths of the graph. It was found by the inventors of the present invention that such graph is not a random graph. Rather, the graph typically includes bundles of sub-paths, signifying a relatively high probability associated with a given sub-structure which can be identified as a motif.

[0218] FIGS. 6a-b, show simplified illustrations of a structured graph (FIG. 6a) and a random graph (FIG. 6b). Shown in FIGS. 6a-b, a plurality of vertices e1, e2, . . . , e16, each representing one amino acid. Referring to FIG. 6a, of particular interest are vertex e1 and vertex e15 which are connected by many sub-paths of the graph, hence defining an overlap 62 therebetween.

[0219] The procedure continues by applying a significance test on the partial overlaps. Significance tests are known in the art and can include, for example, statistical evaluation of flow quantities, such as, but not limited to, probability functions or conditional probability functions which characterize the partial overlaps between paths on the graph.

[0220] According to a preferred embodiment of the present invention a set of probability functions is defined using the number of paths connecting particular vertices on the graph. For example, considering a single vertex, e₁, on the graph, a probability, p(e₁), can be defined as the number of paths leaving e₁ divided by the total number of paths. Similarly, considering two vertices, e₁ and e₂, a (conditional) probability, p(e₂|e₁), can be defined as the number of paths leading from e₁ to e₂ divided by the total number of paths leaving e₁. This prescription is preferably applied to all combinations of vertices on the graph, defining, e.g., p(e₁), p(e₂|e₁), p(e₃|e₁ e₂), for paths leaving e₁ and going through e₂ and e₃, and p(e₁), p(e₁|e₂), p(e₁|e₂ e₃), for paths going through e₃ and e₂ and entering e₁. In terms of all the conditional probabilities, the graph can define a Markov model. Thus, a “search-path,” of length K, going through vertices e₁ e₂ . . . e_{K} on the graph (corresponding to a trial-sequence of K amino acids), can be used to define a variable order Markov model up to order K, represented by the following matrix:

$$M = ( \begin{matrix}p ( {e}_{1} ) & p ( {e}_{1} \vert {e}_{2} ) & p ( {e}_{1} \vert {e}_{2} {e}_{3} ) & … & p ( {e}_{1} \vert {e}_{2} … {e}_{K} ) \\ p ( {e}_{2} \vert {e}_{1} ) & p ( {e}_{2} ) & p ( {e}_{2} \vert {e}_{1} ) & … & p ( {e}_{2} \vert {e}_{3} … {e}_{K} ) \\ p ( {e}_{3} \vert {e}_{1} {e}_{2} ) & p ( {e}_{3} \vert {e}_{2} ) & p ( {e}_{3} ) & … & p ( {e}_{3} \vert {e}_{4} … {e}_{K} ) \\ ⋮ & & & ⋱ & ⋮ \\ p ( {e}_{K} \vert {e}_{1} {e}_{2} … {e}_{K - 1} ) & p ( {e}_{K} \vert {e}_{2} … {e}_{K - 1} ) & p ( {e}_{K} \vert {e}_{3} … {e}_{K - 1} ) & … & p ( {e}_{K} )\end{matrix} ) \qquad ( EQ . 1 )$$

[0221] For any sub-path of e1e2 . . . em having a length m<K, a similar Markov model can be obtained from an m×m diagonal sub-matrix of M. It will be appreciated that whereas the collection of all paths which represent a sequence of the dataset defines all the conditional probabilities appearing in M, the search-path e1e2 . . . eK used in M does not necessarily represent a sequence of the dataset. The definition of the search-path is based on conditional probabilities, such as p(e₂|e₁), which are predetermined by those paths which represent the sequences of the dataset.

[0222] An occurrence of a significant overlap (e.g., overlap 62 in FIG. 6a), along a search-path can be identified by observing some extreme values of the relevant conditional probabilities. According to a preferred embodiment of the present invention, the probability functions comprise probability functions characterizing a rightward direction on each path and probability function characterizing a leftward direction on each path. Thus, for a search-path e₁e₂ . . . , eₙ, . . . eₖ, a probability function, P_{R}, characterizing a rightward direction, is preferably defined by the first column of M, moving top down, and a probability function, P_{L}, characterizing a leftward direction, is preferably defined by the last column of M, moving bottom up. Specifically,

P_{R}(n)=p(eₙ|e₁e₂ . . . eₙ₁) and P_{L}(n)=p(eₙ|eₙ₁eₙ₊₂ . . . eₖ). (EQ. 2)

[0223] As will be appreciated by one ordinarily skilled in the art, both P_{R} and P_{L} vary between 0 and 1 and are specific to the path in question.

[0224] In terms of the number of paths, P_{R} and P_{L} can be understood considering, for simplicity, that the path in question is e1e2e3e4 (K=4). Hence, according to a preferred embodiment of the present invention, P_{R}(3)=p(e3|e1e2), the rightward direction probability corresponding to the sub-path e1e2e3 equals the number of paths moving from e1 through e2 into e3 divided by the number of paths moving from e1 to e2, and P_{L}(3)=p(e3|e4), the leftward direction probability corresponding to the sub-path e3e4 equals the number of paths moving from e3 to e4 divided by the number of paths entering e4. It is convenient to define the aforementioned probabilities in the explicit notations P_{R}(e1; e3) and P_{L}(e4; e3), respectively.

[0225] FIG. 7a illustrates a representative example of a portion of a graph in which a search-path, going through e1e2e3e4e5 and marked with a “begin” vertex at its beginning and an “end” vertex on its end, is selected. Also shown in FIG. 7a, are other paths, joining and leaving the search-path at various vertices. The bundle of sub-paths between vertex e2 and vertex e4 displays certain coherence, possibly indicating the presence of a significant pattern in the dataset.

[0226] To illustrate the use of the probabilities P_{R} and P_{L}, the portion of the graph is positioned in a rectangle coordinate system in which the vertices are conveniently arranged along the abscissa while the ordinate represent probability values. Progressing from e1 rightwards, P_{R}(n), n=1, 2, 3, 4, 5, has the values 4/41, ¾, 1, 1 and ⅓ respectively. Progressing from e4 leftwards, Pan), n=4, 3, 2, 1 has the values 6/41, 5/6, 1 and ⅗.

[0227] Thus, P_{R} first increases because some other paths join to form a coherent bundle, then decreases at e5, because many paths leave the path at e4. Similarly, progressing leftward, P_{L} first increases because other paths join as e4 and then decreases because paths leave the path at e2. The decline of P_{R} or P_{L} is preferably interpreted as an indication of the end and beginning of the candidate pattern respectively. The overlaps can be identified by requiring that the values of P_{R} and P_{L} within a candidate overlap are sufficiently large. Thus, a candidate overlap can be defined as a sub-sequence represented by a path or a sub-path on the graph in which P_{R}>1−ε_{R} and P_{L}>1−ε_{L} where ε_{R} and ε_{L} are two parameters smaller than unity. A typical value for ε_{R} and ε_{R} is from about 0.01 to about 0.99.

[0228] As used herein the term “about” refers to ±10%.

[0229] Optionally and preferably, the decrement of P_{R} and P_{L} can be quantified by defining decrease functions and comparing their values with predetermined cutoffs hence to identify overlaps between paths or sub-paths. According to a preferred embodiment of the present invention, the decrease functions are defined as ratios between probabilities of paths having some common vertices. In the example shown in FIG. 7a the decrement of P_{R} at e4 can be quantified using a rightward direction decrease function, D_{R}, defined as D_{R}(e1; e4)=P_{R}(e1; e5)/P_{R}(e1; e4), and the decrement of P_{L} at e2 can be quantified using a leftward direction decrease function, D_{L}, defined as D_{L}(e4; e2)=P_{L}(e4; e1)/P_{L}(e4; e2). Denoting the predetermined cutoffs by η_{R} and η_{L}, respectively, a partial overlap can be identified when both D_{R}<η_{R} and D_{L}<η_{L}. A typical value for both η_{R} and η_{L} is from about 0.3 to about 0.9.

[0230] Thus, the statistical significance of the decreases in P_{R} and P_{L} can be evaluated, for example, by defining their significance in terms a null hypothesis and requiring that the corresponding p-values are, on the average, smaller than a predetermined threshold, α. A typical value for α is from 0.001 to 0.1.

[0231] The null hypothesis depends on the choice of the functions which characterize the overlaps. For example, when the ratios are used, the null hypothesis can be P_{R}(e1; e5)≧η_{R}P_{R}(e1; e4) and P_{L}(e4; e1)≧η_{1L}P_{L}(e4; e2). Alternatively, the null hypothesis can be P_{R}>1−ε_{R} and P_{L}>1−ε_{L} or any other combination of the above conditions.

[0232] For a given search-path, P_{L} and P_{R} are preferably calculated from many starting points (such as e1 and e4 in the present example), more preferably from all starting points on the search-path, traversing each sub-path both leftward and rightward. This procedure defines many search-sections on the search-path, from which several partial overlaps can be identified. Once the partial overlaps have been identified, the most significant partial overlap is defined as a significant pattern.

[0233] In an alternative, yet preferred, embodiment, a set of cohesion coefficients, cᵢⱼ, i>j, are calculated, for each trial path, as follows:

cᵢⱼ=Mᵢⱼ log Mᵢⱼ/(M_{i1,j}M_{i,j+1}) (EQ. 3)

where Mᵢⱼ are elements of the variable order Markov model matrix (see Equation 1). For a given search-path there are many sub-paths, each represented by an element in the set cᵢⱼ, which can be considered as an “overlap score.” Once the set cᵢⱼ is calculated, its supremum is selected and the sub-path which corresponds to the supremum is preferably defined as the significant pattern of the search-path.

[0234] It is to be understood that it is not intended to limit the scope of the present invention to the above statistical significance tests, and that other significance tests as well as other probability functions or cohesion coefficients can be implemented.

[0235] The procedure in which overlaps are searched along a search-path is preferably repeated for more than one path of the original graph, more preferably on all the paths of the original path (hence on all the sequences). It will be appreciated that significant patterns can be found, depending on the degree by which the search-path overlaps with other paths.

[0236] According to a preferred embodiment of the present invention, the graph is “rewired” by merging each, or at least a few, significant patterns into a new vertex, referred to hereinafter as a pattern-vertex. This is equivalent to a redefinition of one or more sequences whereby several amino acids are grouped according to the significant patterns to which they belong. This rewiring process reduces the length of the paths of the graph, nonetheless the contents of the paths in terms of the original sequences of the proteins is conserved.

[0237] In principle, the identification of the significant patterns can depend on other vertices of the search-path, and not only on the vertices belonging to the overlapping sub-paths. The extent of this dependence is dictated by the selected identification procedure (e.g., the choice of the probability functions, the significant test, etc.). Referring to the example of FIG. 7a, a sub-path e2e3e4 is defined as a significant pattern of the search-path “begin”→e1→ . . . →e5→“end.” By definition, the vertices e2, e3 and e4, also belong to other paths on the graph, each in turn can also be selected as a search-path along which partial overlaps are searched. Being dependent on other vertices of the search-path, the sub-path e2e3e4 may be accepted as a significant pattern for one search-path and may be rejected, on account of failing to pass the selected significance test, for another search-path.

[0238] The definition of the pattern-vertices of the graph can therefore be done in more than one way.

[0239] In one embodiment, significant patterns are merged only on the path for which they turned out to be significant, while leaving the vertices unmerged on other paths.

[0240] In another embodiment, after each search on each search-path, sub-paths which are identified as significant patterns are merged into pattern-vertex, irrespectively whether or not these sub-paths are defined as significant patterns also in other paths.

[0241] In still another embodiment, after each search on each search-path, the sub-paths which are identified as significant patterns are merged into a pattern-vertex.

[0242] In yet another embodiment, after each search on each search-path, the sub-paths which are identified as significant patterns are merged into pattern-vertices.

[0243] In a further embodiment, after all paths are searched, the sub-paths which are identified as significant patterns are merged into pattern-vertices.

[0244] FIG. 7a illustrate a pattern-vertex 72 having vertices e2, e3 and e4, which are identified as significant pattern for the trial path of FIG. 7a. Note that vertices e2, e3 and e4 remain on the graph in addition to pattern-vertex 72, because, in the present example, there is a path which goes through e2 and e3 but not through e4, and a path which goes through e4 and e5 (see FIG. 7a) but not through e2 and e3.

[0245] The rewiring procedure can be used as a supplementary procedure, for example, when it is desired to provide new sequences which are not present originally. Generalization of the dataset is preferably achieved by defining equivalence classes of amino acids and allowing, for a given sequence, the replacement of one or more amino acids of the sequence with other amino acids which are members of the same equivalence class.

[0246] For example, suppose that an equivalence class, E, of two vertices, e3 and e6, is defined, i.e., E={e3, e6}. Suppose further that among the protein sequences there are two sequences, say, e1e2e3e4e5 and e1e2e6e4e7, which include the members of E. These sequences can be replaced with the generalized sequences e1e2Ee4e5 and e1e2Ee4e7, which, in addition to the original sequences, also include the new sequences e1e2e6e4e5 and e1e2e3e4e7, not necessarily present in any of the original proteins.

[0247] Using the above described databases, methods and apparatus, the present inventors were able to annotate polypeptides for the first time as having enzymatic activity. These polypeptides can find wide use in commodity, food, agrotec, cosmetic and pharma industries as outlined below.

[0248] Thus, according to a further aspect of the present invention there is provided a method of processing a substrate. The method comprising contacting the substrate with at least one polypeptide selected from the group consisting of the polypeptides set forth in EQ ID nos.: 77,838 to 198,923 under conditions which allow processing of the substrate by said at least one polypeptide, wherein said at least one polypeptide is selected capable of processing the substrate.

[0249] As used herein the phrase “processing a substrate” refers to enzymatic-dependent conversion (catalysis) of a substrate from a given chemical form to a distinct one. Examples of such catalysis reactions include, but are not limited to degradation, digestion, hydrolysis, nucleic acid cleavage, nucleic acid ligation, proteolytic cleavage, polymerization, transfer of an atom or functional group from one molecule to another and addition of a chemical group to a molecule.

[0250] The identity of the substrate will naturally dictate the selection of the polypeptide enzyme.

[0251] Information on correspondence between enzyme and substrate is readily available to one of ordinary skill in the art, for example from:

[0252] PRECISE (Predicted and Consensus Interaction Sites in Enzymes; structural bioinformatics lab; <http://precise.bu.edu/precisedb/default.aspx>) which is a database of interactions between the amino acid residues of an enzyme and its various ligands, i.e., substrate and transition state analogues, cofactors, inhibitors, and products; and/or from

[0253] The Catalytic Site Atlas (European Bioinformatics Institute; Hinxton; UK) described in “The Catalytic Site Atlas: a resource of catalytic sites and residues identified in enzymes using structural data. (Porter et al. (2004) Nucl. Acids. Res. 32: D129-D133). or CSA database (http://www.ebi.ac.uk/thornton-srv/databases/CSA/); and/or from

[0254] The KEGG LIGAND Database <http://www.genome.jp/ligand/> which is a composite database comprising three sections. The COMPOUND section provides information about metabolites and chemical compounds. The REACTION section provides a collection of substrate-product relations representing metabolic and other reactions. The ENZYME section provides for information about enzyme molecules. The Sep. 7, 2001 release includes 7298 compounds, 5166 reactions and 3829 enzymes. In addition to the keyword search provided by the DBGET/LinkDB system, a substructure search to the COMPOUND and REACTION sections is available through the World Wide Web (http://www.genome.ad.jp/ligand/). LIGAND may be also downloaded by anonymous FTP (ftp://ftp.genome.ad.jp/pub/kegg/ligand/); and/or from

[0255] The MetaCyc Encyclopedia of Metabolic Pathways (Caspi et al., 2006, “MetaCyc: A multiorganism database of metabolic pathways and enzymes”, Nucleic Acids Res., 34:D511-D516 2006) which is a database of nonredundant, experimentally elucidated metabolic pathways containing over 900 pathways from more than 900 different organisms curated from the scientific experimental literature. MetaCyc contains pathways involved in both primary and secondary metabolism, as well as associated compounds, enzymes, and genes. MetaCyc aims to catalog the universe of metabolism by storing a representative sample of each experimentally elucidated pathway. MetaCyc is used in a variety of scientific applications, such as providing a reference data set for computationally predicting the metabolic pathways of organisms from their sequenced genomes, supporting metabolic engineering, helping to compare biochemical networks, and serving as an encyclopedia of metabolism. MetaCyc pathways can be browsed from a list, from ontologies, or queried directly when searching for pathways, proteins, reactions or compounds. MetaCyc can also be queried programmatically using Java or PERL when installed locally; and or

[0256] The Human Protein Reference Database (Peri, S. et al. (2003) Development of human protein reference database as an initial platform for approaching systems biology in humans. Genome Research. 13:2363-2371.) which is centralized platform to visually depict and integrate information pertaining to domain architecture, post-translational modifications, interaction networks and disease association for each protein in the human proteome. Information in HPRD <http://www.hprd.org/> is manually extracted from the literature by expert biologists who read, interpret and analyze the published data. HPRD has been created using an object oriented database in Zope, an open source web application server, that provides versatility in query functions and allows data to be displayed dynamically. The database currently comprises 37,581 entries on protein/protein interactions; and/or

[0257] The Lipase Engineering Database (LED) (Jürgen Pleiss; Institute of Technical Biochemistry, University of Stuttgart, Stuttgart, Germany; http://www.led.uni-stuttgart.de) integrates information on sequence, structure, and function of lipases, esterases, and related proteins. The LED facilitates systematica analysis of sequence-structure-function relationships and is a useful tool to identify functionally relevant residues apart from the active site residues, and to design mutants with desired substrate specificity.

[0258] Table 38 comprises SEQ ID Nos.: 77,838 to 137,952 comprising polypeptide enzymes classified according to exemplary methods described herein. Table 40 comprises SEQ ID Nos.: 198,933 to 259039 with polynecleotide sequences corresponding to the polypeptide enzymes of table 38.

[0259] Table 39 comprises SEQ ID Nos.: 137,953 to 198,923 comprising polypeptide enzymes classified according to exemplary methods described herein. Table 41 comprises SEQ ID Nos.: 259,040 to 320,010 with polynecleotide sequences corresponding to the polypeptide enzymes of table 39.

[0260] The Polypeptides of SEQ ID Nos.: 77,838 to 198,923 set forth in Tables 38 and 39 included enzymes in all 6 major EC classes and many important subclasses. Polynucleotide sequences comprising SEQ ID Nos.: 198,933 to 320,009 set forth in tables 40 and 41 make available for the first time, a functional link between these sequences and their biological activity.

[0261] The potential utility of tables 38-41 and/or similar tables produced according to exemplary methods of the invention is huge. Using tables of this type and available databases, one of ordinary skill in the art can begin with a defined physiologic or industrial process, identify a problematic (e.g. rate limiting) step therein, determine the substrate of an enzymatic reaction in the problematic step, and select an appropriate enzyme from the table. Selection of the appropriate enzyme from the table can optionally be as a polypeptide sequence or a nucleotide sequence. Optionally, polypeptide sequences can be produced synthetically or biologically. Optionally, biological production includes isolation of PPM desired peptides from cells. Optionally, the cells are wild type cells or carry an expression vector. In an exemplary embodiment of the invention, an expression vector comprising regulatory sequences and at least a portion of a polynucleotide sequence comprising one of SEQ ID Nos.: 198,933 to 320,009 and encoding at least a functional portion of a corresponding polypeptide sequence comprising one of SEQ ID Nos.: 77,838 to 198,923.

[0262] The Nomenclature Committee of the International Union of Biochemistry and Molecular Biology (NC-IUBMB) is responsible for the maintenance of the enzyme list first published in 1961 and with the last printed edition in 1992 (IUBMB (1992), Enzyme Nomenclature 1992, Academic Press, San Diego). Since 1992 the list has been updated electronically by use of the web. In parallel with this process all published recommendations by the Committee were also converted to a web readable form. More recent changes to Enzyme Nomenclature and new recommendations have only been prepared for the web and are not available in hard copy.

[0263] The Enzyme Nomenclature list is an amplified and updated version of the 1992 edition. It currently contains details of over 3700 enzymes. It was prepared from the last printed edition, Enzyme Nomenclature 1992 (1) which was converted into html with additional data added. In many cases the reaction is given in words and illustrated with a reaction diagram (which may be part of a metabolic pathway). Other names for each enzyme are added and links are provided to other databases (BRENDA, EXPASY, KEGG, WIT, etc) and the CAS registry number provided when known. The references now have titles and link where relevant to the PubMed entry.

[0264] The EC hierarchy divides enzymes into six main classes—EC 1 oxidoreductases, EC 2 transferases, EC 3 hydrolases, EC 4 lyases, EC 5 isomersaes and EC 6 ligases which are described in greater detail hereinbelow in APPENDIX 2.

[0265] Tables 38 and 39 of polypeptide sequences and Tables 40 and 41 of nucleotide sequences specify the EC classification for each sequence in the table.

[0266] As used herein the phrase “polypeptide” refers to a naturally occurring or synthetic amino acid polymer which comprise at least an active portion which is sufficient to process the substrate of interest. Optionally the polypeptide also comprises a substrate recognition domain, optionally separate from the catalytic domain.

[0267] In an exemplary embodiment of the invention, an active portion of a polypeptide (e.g. as set forth in SEQ ID Nos.: 77,838 to 198,923) is identified using methods well known in the art (e.g. serial mutations followed by assays of activity and/or queries of available database to identify homologous active portions). Thus, an active portion of any of SEQ ID Nos.: 77,838 to 198,923 can be employed in exemplary embodiments of the invention.

[0268] Polypeptides used in accordance with the present invention refer to polypeptides having an amino acid sequence as further described hereinbelow. at least about 40%, at least about 50%, at least about 60%, at least about 70%, at least about 75%, at least about 80%, at least about 81%, at least about 82%, at least about 83%, at least about 84%, at least about 85%, at least about 86%, at least about 87%, at least about 88%, at least about 89%, at least about 90%, at least about 91%, at least about 92%, at least about 93%, at least about 93%, at least about 94%, at least about 95%, at least about 96%, at least about 97%, at least about 98%, at least about 99%, or more say 100% homologous to an amino acid sequence selected from the group consisting of SEQ ID Nos.: 77,838 to 198,923.

[0269] Homology (e.g., percent homology) can be determined using any homology comparison software, including for example, the BlastP software of the National Center of Biotechnology Information (NCBI) such as by using default parameters.

[0270] The present invention also encompasses fragments of the above described polypeptides and polypeptides having mutations, such as deletions, insertions or substitutions of one or more amino acids, either naturally occurring or man induced, either randomly or in a targeted fashion.

[0271] Thus, polypeptides (also referred to as peptides) of the present invention encompasses native polypeptides (either degradation products, synthetically synthesized peptides, or recombinant peptides), peptidomimetics (typically, synthetically synthesized peptides), and the peptide analogues peptoids and semipeptoids, and may have, for example, modifications rendering the peptides more stable while in a body or more capable of penetrating into cells. Such modifications include, but are not limited to: N-terminus modifications; C-terminus modifications; peptide bond modifications, including but not limited to CH₂—NH, CH₂—S, CH₂—S═O, O═C—NH, CH₂—O, CH₂—CH₂, S═C—NH, CH═CH, and CF═CH; backbone modifications; and residue modifications. Methods for preparing peptidomimetic compounds are well known in the art and are specified, for example, in Ramsden, C. A., ed. (1992), Quantitative Drug Design, Chapter 17.2, F. Choplin Pergamon Press, which is incorporated by reference as if fully set forth herein. Further details in this respect are provided hereinbelow.

[0272] Peptide bonds (—CO—NH—) within the peptide may be substituted, for example, by N-methylated bonds (—N(CH3)—CO—); ester bonds (—C(R)H—C—O-β-C(R)—N—); ketomethylene bonds (—CO—CH2—); α-aza bonds (—NH—N(R)—CO—), wherein R is any alkyl group, e.g., methyl; carba bonds (—CH2—NH—); hydroxyethylene bonds (—CH(OH)—CH2—); thioamide bonds (—CS—NH—); olefinic double bonds (—CH═CH—); retro amide bonds (—NH—CO—); and peptide derivatives (—N(R)—CH2—CO—), wherein R is the “normal” side chain, naturally presented on the carbon atom. These modifications can occur at any of the bonds along the peptide chain and even at several (2-3) at the same time.

[0273] Natural aromatic amino acids, Trp, Tyr, and Phe, may be substituted for synthetic non-natural acids such as, for instance, tetrahydroisoquinoline-3-carboxylic acid (TIC), naphthylelanine (Nol), ring-methylated derivatives of Phe, halogenated derivatives of Phe, and o-methyl-Tyr.

[0274] In addition to the above, the peptides of the present invention may also include one or more modified amino acids or one or more non-amino acid monomers (e.g., fatty acids, complex carbohydrates, etc.).

[0275] The term “amino acid” or “amino acids” is understood to include the 20 naturally occurring amino acids; those amino acids often modified post-translationally in vivo, including, for example, hydroxyproline, phosphoserine, and phosphothreonine; and other less common amino acids, including but not limited to 2-aminoadipic acid, hydroxylysine, isodesmosine, nor-valine, nor-leucine, and ornithine. Furthermore, the term “amino acid” includes both D- and L-amino acids.

[0276] The peptides of the present invention are preferably utilized in a linear form, although it will be appreciated that in cases where cyclization does not severely interfere with peptide characteristics, cyclic forms of the peptide can also be utilized.

[0277] The peptides of the present invention may be synthesized by any techniques that are known to those skilled in the art of peptide synthesis. For solid phase peptide synthesis, a summary of the many techniques may be found in: Stewart, J. M. and Young, J. D. (1963), “Solid Phase Peptide Synthesis,” W. H. Freeman Co. (San Francisco); and Meienhofer, J (1973). “Hormonal Proteins and Peptides,” vol. 2, p. 46, Academic Press (New York). For a review of classical solution synthesis, see Schroder, G. and Lupke, K. (1965). The Peptides, vol. 1, Academic Press (New York).

[0278] In general, peptide synthesis methods comprise the sequential addition of one or more amino acids or suitably protected amino acids to a growing peptide chain. Normally, either the amino or the carboxyl group of the first amino acid is protected by a suitable protecting group. The protected or derivatized amino acid can then either be attached to an inert solid support or utilized in solution by adding the next amino acid in the sequence having the complimentary (amino or carboxyl) group suitably protected, under conditions suitable for forming the amide linkage. The protecting group is then removed from this newly added amino acid residue and the next amino acid (suitably protected) is then added, and so forth; traditionally this process is accompanied by wash steps as well. After all of the desired amino acids have been linked in the proper sequence, any remaining protecting groups (and any solid support) are removed sequentially or concurrently, to afford the final peptide compound. By simple modification of this general procedure, it is possible to add more than one amino acid at a time to a growing chain, for example, by coupling (under conditions which do not racemize chiral centers) a protected tripeptide with a properly protected dipeptide to form, after deprotection, a pentapeptide, and so forth.

[0279] Further description of peptide synthesis is disclosed in U.S. Pat. No. 6,472,505. A preferred method of preparing the peptide compounds of the present invention involves solid-phase peptide synthesis, utilizing a solid support. Large-scale peptide synthesis is described by Andersson Biopolymers 2000, 55(3), 227-50.

### Exemplary Peptide Synthesis Protocols

[0280] Peptides can be produced synthetically by either Liquid-phase or solid-phase synthesis. Liquid-phase synthesis is generally preferred in large-scale production of peptides for industrial purposes. These synthesis protocols are described in greater detail in for example, by Atherton and Sheppard (Solid Phase peptide synthesis: a practical approach. IRL Press, Oxford, England, 1989) and by Stewart and Young (Solid phase peptide synthesis, 2nd edition, Pierce Chemical Company, Rockford, 1984, pp 91)

[0281] Solid-phase peptide synthesis (SPPS), allows the synthesis of natural peptides which are difficult to express in bacteria and/or the incorporation of unnatural amino acids, peptide/protein backbone modification, and the synthesis of D-proteins, which consist of D-amino acids.

### SPPS

[0282] In SPPS small solid beads, insoluble yet porous, are treated with functional units (‘linkers’) on which peptide chains can be built. The peptide will remain covalently attached to the bead until cleaved from it by a reagent such as trifluoroacetic acid. The peptide is thus ‘immobilized’ on the solid-phase and can be retained during a filtration process, whereas liquid-phase reagents and by-products of synthesis are flushed away.

[0283] The general principle of SPPS is one of repeated cycles of coupling-deprotection. The free N-terminal amine of a solid-phase attached peptide is coupled to a single N-protected amino acid unit. This unit is then deprotected, revealing a new N-terminal amine to which a further amino acid may be attached.

[0284] There are two common types of SPPS—Fmoc and Boc which proceed in a C-terminal to N-terminal fashion. The N-termini of amino acid monomers is protected by either Fmoc or Boc and added onto a deprotected amino acid chain. Automated synthesizers are available for both Fmoc and Boc techniques.

[0285] Stepwise elongation, in which the amino acids are connected step-by-step in turn, is ideal for small peptides containing between 2 and 100 amino acid residues. Another method is fragment condensation, in which peptide fragments are coupled. Although the stepwise method can elongate the peptide chain without racemization, the yield in creation of long or highly polar peptides tends to be poor. Fragment condensation is better than stepwise elongation for synthesizing sophisticated long peptides, but racemization can be problematic. In order to maintain acceptable kinetics in a fragment condensation reaction, the coupled fragment must be in gross excess.

[0286] A new development for producing longer peptide chains is chemical ligation: Unprotected peptide chains react chemoselectively in aqueous solution. A first kinetically controlled product rearranges to form the amide bond. The most common form native chemical ligation uses a peptide thioester that reacts with a terminal cystein residue.

### Boc SPPS

[0287] t-Boc (or Boc) stands for (tert)-(B)utyl (o)xy (c)arbonyl. To remove Boc from a growing peptide chain, acidic conditions are used (e.g. neat TFA). Removal of side-chain protecting groups and the peptide from the resin at the end of the synthesis is achieved by incubating in hydrofluoric acid (which can be dangerous). This danger represents a significant disadvantage to Boc. However Boc offers significant advantages in complex syntheses. When synthesizing nonnatural peptide analogs which are base-sensitive (such as depsipeptides), Boc is necessary.

### Fmoc SPPS

[0288] Fmoc stands for (F)luorenyl-(m)eth(o)xy-(c)arbonyl which serves as a protecting group instead of Boc. To remove Fmoc from a growing peptide chain, basic conditions (e.g, 20% piperidine in DMF) are used. Removal of side-chain protecting groups and peptide from the resin is achieved by incubating in trifluoroacetic acid (TFA). Fmoc deprotection is usually slow because the anionic nitrogen produced at the end is not a particularly favorable product, although the whole process is thermodynamically driven by the evolution of carbon dioxide. The main advantage of Fmoc chemistry is that no hydrofluoric acid is needed which contributes to safety. Fmoc is generally preferred for most routine synthesis because if this safety consideration.

Exemplary Solid supports

[0289] The physical properties of the solid support, and the applications to which it can be utilized, vary with the material from which the support is constructed, the amount of crosslinking, as well as the linker and handle being used. Commonly used solid supports include polystyrene and polyamide.

### General Synthesis Protocol

[0290] Due to amino acid excesses used to ensure complete coupling during each synthesis step, polymerization of amino acids is common in reactions where each amino acid is not protected. In order to prevent this polymerization, protective groups are used. A typical Fmoc or Boc synthesis involves cyclic repletion of the following steps:

[0291] Protective group is removed from trailing amino acids in a deprotection reaction;

[0292] Deprotection reagents washed away to provide clean coupling environment;

[0293] Protected amino acids dissolved in a solvent such as dimethylformamide (DMF) are combined with coupling reagents pumped through the synthesis column; and

[0294] Coupling reagents are washed away to provide a clean deprotection environment.

[0295] While Fmoc and Boc are the most commonly used protective groups, other groups such as benzyloxy-carbonyl (Z), allyloxycarbonyl (alloc) and lithographic protecting groups can also be used for protection.

[0296] Coupling the peptides typically involves activation of the carboxyl group to improve reaction kinetics. Activation is most commonly by carbodiimides and/or aromatic oximes.

[0297] In another embodiment polypeptide synthesis is effected by recombinant DNA technology. This is specifically preferred when large amounts of the polypeptide are needed.

[0298] Thus for example, a polynucleotide which comprise a nucleic acid sequence encoding the polypeptide of interest is ligated into a nucleic acid construct which comprise a cis-acting regulatory element positioned so as to drive transcription of the nucleic acid sequence when introduced into a host cell

[0299] Thus the polynucleotide of the present invention encodes a polypeptide having an amino acid sequence as described herein above. Such a polynucleotide may comprise a nucleic acid sequence at least about 40%, optionally about 70%, optionally about 75%, optionally about 80%, optionally about 81%, optionally about 82%, optionally about 83%, optionally about 84%, optionally about 85%, optionally about 86%, optionally about 87%, optionally about 88%, optionally about 89%, optionally about 90%, optionally about 91%, optionally about 92%, optionally about 93%, optionally about 93%, optionally about 94%, optionally about 95%, optionally about 96%, optionally about 97%, optionally about 98%, optionally about 99%, optionally about 100% homologou or identical (or intermediate degrees of homology or identity) to a nucleic acid sequence selected from the group consisting of SEQ ID nos.: 198,933 to 320,009.

[0300] The present invention also encompasses fragments of the above described polynucleotides and polynucleotides having mutations, such as deletions, insertions or substitutions of one or more amino acids, either naturally occurring or man induced, either randomly or in a targeted fashion.

[0301] The polynucleotide of the present invention refers to a single or double stranded nucleic acid sequences which is isolated and provided in the form of an RNA sequence, a complementary polynucleotide sequence (cDNA), a genomic polynucleotide sequence and/or a composite polynucleotide sequences (e.g., a combination of the above).

[0302] As used herein the phrase “complementary polynucleotide sequence” refers to a sequence, which results from reverse transcription of messenger RNA using a reverse transcriptase or any other RNA dependent DNA polymerase. Such a sequence can be subsequently amplified in vivo or in vitro using a DNA dependent DNA polymerase.

[0303] As used herein the phrase “genomic polynucleotide sequence” refers to a sequence derived (isolated) from a chromosome and thus it represents a contiguous portion of a chromosome.

[0304] As used herein the phrase “composite polynucleotide sequence” refers to a sequence, which is at least partially complementary and at least partially genomic. A composite sequence can include some exonal sequences required to encode the polypeptide of the present invention, as well as some intronic sequences interposing therebetween. The intronic sequences can be of any source, including of other genes, and typically will include conserved splicing signal sequences. Such intronic sequences may further include cis acting expression regulatory elements.

### Exemplary Construction of Polynucletide Expression Vectors

[0305] Considerations and methods relevant to construction of expression vectors are described in, for example, Sambrook, J. and D. W. Russell (2001; Molecular Cloning: A Laboratory Manual, 3rd ed., vol. 1-3, Cold Spring Harbor Press, Cold Spring Harbor N.Y.), Ausubel, F. M. et al. (1999; Short Protocols in Molecular Biology, 4.sup.th ed., John Wiley & Sons, New York N.Y.). One of ordinary skill in the art will be able to begin from an amino acid sequence encoding a gene, determine a polynucleotide sequence encoding the amino acid sequence, design and produce suitable oligo-nucleotide primers for isolation of the determined polynucleotide sequence (e.g. using computer programs intended for that purpose such as Primer Version 0.5, 1991, Whitehead Institute for Biomedical Research, Cambridge Mass.)., and clone the sequence into a suitable expression vector.

[0306] Expression vectors are available commercially (e.g from New England Biolabs; Ipswich, Mass., USA and Clontech laboratories; Mountainview Calif., USA). Selection of appropriate regulatory sequences can contribute to expression levels of the protein encoded by the cloned nucleotide sequence. Regulatory sequences can include promoters and/or enhancers and are optionally positioned upstream and/or downstream of the cloned nucleotide sequence. Regulatory sequences can be constitutive and/or tissue specific and/or inducible. Optionally, regulatory sequences are included in a commercially available or previously constructed vector. Alternatively, or additionally, regulatory sequences can be added to a vector during its construction using techniques known in the art.

[0307] Expression vectors can be DNA or RNA based and include, but are not limited to phage, plasmids, cosmids, phagemids, yeast artificial chromosomes (YACS), murine artificial chromosomes (MACS), Human artificial chromosomes (HACS) and viral vectors.

[0308] Vectors are typically transfected (e.g. by electroporation) into prokaryotic cells or transformed into eukaryotic cells (e.g. using calcium phosphate precipitation or lipofectin) so that the cells express the polypeptide encoded by the vector at a high level.

### Exemplary Culture and Harvest Conditions

[0309] Thus, the isolated polynucleotides of the present invention can be expressed in variety of single cell or multicell expression systems and the recombinant polypeptides recovered therefrom used in pharmaceutical and agricultural applications as described hereinabove with respect to the enzymatic composition of the present invention.

[0310] For expression in a single cell system, the polynucleotides of the present invention are cloned into an appropriate expression vector (i.e., construct).

[0311] Depending on the host/vector system utilized, any of a number of suitable transcription and translation elements including constitutive and inducible promoters, transcription enhancer elements, transcription terminators, and the like, can be used in the expression vector [see, e.g., Bitter et al., (1987) Methods in Enzymol. 153:516-544].

[0312] Other then containing the necessary elements for the transcription and translation of the inserted coding sequence, the expression construct of this aspect of the present invention can also include sequences engineered to enhance stability, production, purification, yield or toxicity of the expressed polypeptide. For example, the expression of a fusion protein or a cleavable fusion protein comprising a polypeptide of the present invention and a heterologous protein can be engineered. Such a fusion protein can be designed so as to be readily isolated by affinity chromatography; e.g., by immobilization on a column specific for the heterologous protein. Where a cleavage site is engineered between the protein of interest and the heterologous protein, the protein of interest can be released from the chromatographic column by treatment with an appropriate enzyme or agent that disrupts the cleavage site [e.g., see Booth et al. (1988) Immunol. Lett. 19:65-70; and Gardella et al., (1990) J. Biol. Chem. 265:15854-15859].

[0313] A variety of cells can be used as host-expression systems to express the coding sequence of the protein of interest. These include, but are not limited to, microorganisms, such as bacteria transformed with a recombinant bacteriophage DNA, plasmid DNA or cosmid DNA expression vector containing the coding sequence for the protein of interest; yeast transformed with recombinant yeast expression vectors containing the coding sequence for the protein of interest; plant cell systems infected with recombinant virus expression vectors (e.g., cauliflower mosaic virus, CaMV; tobacco mosaic virus, TMV) or transformed with recombinant plasmid expression vectors, such as Ti plasmid, containing the coding sequence (e.g. at least a portion of one or more of SEQ ID Nos.: 198,933 to 320,009). Mammalian expression systems can also be used to express the protein of interest. Bacterial systems are preferably used to produce recombinant proteins of interest, according to the present invention, thereby enabling a high production volume at low cost.

[0314] In bacterial systems, a number of expression vectors can be advantageously selected depending upon the use intended for the protein expressed. For example, when large quantities of protein are desired, vectors that direct the expression of high levels of protein product, possibly as a fusion with a hydrophobic signal sequence, which directs the expressed product into the periplasm of the bacteria or the culture medium where the protein product is readily purified may be desired. Certain fusion protein engineered with a specific cleavage site to aid in recovery of the protein may also be desirable. Such vectors adaptable to such manipulation include, but are not limited to, the pET series of E. coli expression vectors [Studier et al. (1990) Methods in Enzymol. 185:60-89).

[0315] It will be appreciated that when codon usage for proteins cloned from plants is inappropriate for expression in E. coli, the host cells can be co-transformed with vectors that encode species of tRNA that are rare in E. coli but are frequently used by plants. For example, co-transfection of the gene dnaY, encoding tRNA. _{ArgAGA/AGG}, a rare species of tRNA in E. coli, can lead to high-level expression of heterologous genes in E. coli. [Brinkmann et al., Gene 85:109 (1989) and Kane, Curr. Opin. Biotechnol. 6:494 (1995)]. The dnaY gene can also be incorporated in the expression construct such as for example in the case of the pUBS vector (U.S. Pat. No. 6,270,0988).

[0316] In yeast, a number of vectors containing constitutive or inducible promoters can be used, as disclosed in U.S. Pat. No. 5,932,447. Alternatively, vectors can be used which promote integration of foreign DNA sequences into the yeast chromosome.

[0317] Other expression systems such as insects and mammalian host cell systems, which are well known in the art can also be used by the present invention.

[0318] Transformed cells are cultured under conditions, which allow for the expression of high amounts of recombinant protein. Such conditions include, but are not limited to, media, bioreactor, temperature, pH and oxygen conditions that permit protein production. Media refers to any medium in which a cell is cultured to produce the recombinant protein of the present invention. Such a medium typically includes an aqueous solution having assimilable carbon, nitrogen and phosphate sources, and appropriate salts, minerals, metals and other nutrients, such as vitamins. Cells of the present invention can be cultured in conventional fermentation bioreactors, shake flasks, test tubes, microtiter dishes, and petri plates. Culturing can be carried out at a temperature, pH and oxygen content appropriate for a recombinant cell. Such culturing conditions are within the expertise of one of ordinary skill in the art.

[0319] Depending on the vector and host system used for production, resultant proteins of the present invention may either remain within the recombinant cell; be secreted into the fermentation medium; be secreted into a space between two cellular membranes, such as the periplasmic space in E. coli; or be retained on the outer surface of a cell or viral membrane.

[0320] Recovery of the recombinant protein is effected following an appropriate time in culture. The phrase “recovering the recombinant protein refers to collecting the whole fermentation medium containing the protein and need not imply additional steps of separation or purification. Not withstanding from the above, proteins of the present invention can be purified using a variety of standard protein purification techniques, such as, but not limited to, affinity chromatography, ion exchange chromatography, filtration, electrophoresis, hydrophobic interaction chromatography, gel filtration chromatography, reverse phase chromatography, concanavalin A chromatography, chromatofocusing and differential solubilization.

[0321] The recombinant proteins of the present invention are preferably retrieved in “substantially pure” form to be used in pharmaceutical compositions and/or agricultural compositions, described below. As used herein, “substantially pure” refers to a purity that allows for the effective use of the protein in the diverse applications, described hereinabove optionally, 50%, 60%, 70%, 80%, 90%, 95%, 99% or effectively 100% pure (or lesser or intermediate levels of purity).

[0322] In an exemplary embodiment of the invention, thermophilic bacteria (e.g. those listed in table 12) are cultured under suitable temperatures for optimal growth. Optionally, the thermophilic bacteria can be wild type or transformants carrying an expression vector. In an exemplary embodiment of the invention, extreme temperature conditions favor high level production of an enzyme of interest. Optionally, the enzyme of interest is purified from culture medium or from a bacterial lysate harvested from the culture using known purification strategies.

[0323] Although classification of enzymes isolated from Sargasso sea thermophiles is described herein as an illustrative example, application of exemplary analytic methods described herein can be applied to other datasets. Additional bacterial genomic datasets which are currently available, or expected to become available as a result of ongoing research efforts include, but are mot limited to Acidihiobacillus ferrooxidans (hiobacillus ferrooxidans), Acidobacerium capsulaum, Acinomyces naeslundii, Aeromonas hydrophila, Anaplasma phagocyophilum, Arhrobacer aurescens, Aspergillus fumigaus, Bacillus anhracis (numerous subspecies and field isolaes), Bacillus cereus (multiple sub-species) B, Bacillus mojavensis, Bacillus subilis subsp. spizizenii U-B-, Bacillus subilis subsp. subilis RO-NN-, Baceroides forsyhus, Baumannia cicadellinicola, Brucella ovis, Brugia wolbachia, Burkholderia hailandensis E, Campylobacer coli, Campylobacer lari, Campylobacer upsaliensis, Campylobacer jejuni, Carboxydoheus hydrogenofoans, Chlamydophila psiaci, Chrysiogenes arsenais, Closridium perfringens, Closridium perfringens, Coccidioides posadasii, Colwellia sp. Coproheobacer proeolyicus, Cyanobaceria sp., Cyanobaceria sp. Dichelobacer nodosus. Dicyoglomus heophilum, Ehrlichia chaffeensis, Enamoeba hisolyica, Epulopiscium sp., Erwinia chrysanhemi, Escherichia coli (numerous sub-species and strains), Fibrobacer succinogenes S, Geovibrio hiophilus, Gemmaa obscuriglobus, Haloferax volcanii, Hyphomonas nepunium, Klebsiella pneumoniae, Methylococcus capsulaus, Mycobacerium avium, Mycobacerium smegmais, Mycobacerium tuberculosis, Mycoplasma arhriidis, Mycoplasma bovis. Mycoplasma capricolumn, Myxococcus xanhus DK, Neorickesia sennesu Miyayama, Neosarorya fischeri, Persephonella marina EX-H, Plasmodium vivax Salvador I Prevoella ineedia, Prevoella ruminicola, Prochloron didemni, Ruminococcus albus, Shigella boydii BS, Shigella dyseneriae, Simkania negevensis, Sigmaella auraniaca DW/-, Srepococcus agalaciae A, Srepococcus gordonii Challis, Srepococcus miis, Srepococcus pneumoniae-B, Srepococcus sobrinus, Sulfurihydrogenibium azorense, Synechococcus sp. CC, Synergises jonesii, Thermodesulfobacerium commune DSM, Thermodesulfovibrio yellowsonii DSM, Thermomicrobium roseum DSM, Thermotoga neapoliana DSM, Toxoplasma gondii B, Trichomonas vaginalis G, Trypanosoma brucei Gua., Verrucomicrobium spinosum DSM, Yersinia pesis Angola, Yersinia pesis IP, Yersinia pseudouberculosis IP.

[0324] Alternatively, or additionally, exemplary analytic methods according to various embodiments of the invention can be applied to plant genome datasets which are currently available, or expected to become available as a result of ongoing research efforts including, but not limited to Arabidopsis, Maize, Rice, Cotton, Sorghum and Tobacco.

[0325] Alternatively, or additionally, exemplary analytic methods according to various embodiments of the invention can be applied to plant genome datasets which are currently available, or expected to become available as a result of ongoing research efforts including, but not limited to mouse, rat, guinea pig, pig, horse, cow, chicken, Xenopus laevis, and human.

[0326] Alternatively, or additionally, exemplary analytic methods according to various embodiments of the invention can be applied to determine function of non-enzyme molecules, such as enzymatic inhibitors (e.g. substrate analogs).

[0327] Once an EC number of an enzyme is known, one of ordinary skill in the art can easily ascertain the preferred substrate(s) using available information resources (e.g. BRENDA; The Comprehensive Enzyme Information System; Prof. Dr. D. Schomburg, Institut fuer Biochemie, Universitaet zu Köln, Zülpicher Str. 47, 50674 Köln, Germany <www.brenda.uni-koeln.de>). Additionally, Sigma-Aldrich Chemical Co. (St. Louis, Mo., USA) makes available a database of enzyme assay protocols searchable by EC number:

[0328] <http://www.sigmaaldrich.com/Area_of Interest/Biochemicals/Enzyme_Explorer/Key_Resources/Assay_Library/EC_Number.html>

[0329] Kits for assaying of enzyme activity are available commercially (e.g. from NOVASCREEN, Hanover Md., USA).

[0330] However, enzymatic assays are expensive to perform, with commercial kits typically costing in the range of $20 to $150 per assay. In an exemplary embodiment of the invention, assay costs are reduced by determining an EC classification according to exemplary methods disclosed herein and conducting a single assay to verify enzymatic activity.

[0331] In general, assay conditions are defined in terms of one or more of pH, osmolarity, temperature, time, substrate enzyme ratio and concentration of non peptide catalysts or inhibitors (e.g. divalent cations).

[0332] While the body of available gene sequences and regulatory sequences is constantly growing, the number of available useful gene expression constructs is limited to a large degree by difficulty in ascertaining a function of a gene sequence. In an exemplary embodiment of the invention, a known polypeptide with unknown function is rapidly and reliably characterized with respect to its function. Once characterized with respect to function, significant quantities (e.g. grams, kilos or even tons) of a desired polypeptide can be produced using recombinant DNA technology and/or bioreactors and/or synthetic protocols as outlined above.

[0333] This makes available, for the first time, useful quantities of a wide variety of polypeptides (e.g. enzymes) for use in industry, medicine and agriculture.

### Exemplary Industrial Applications of Enzymes

[0334] Enzymes are used in a wide variety of industrial and research applications which are briefly reviewed here. This review does not purport to be exhaustive and does not limit the scope of the invention.

[0335] Use of enzymes in industrial processes is well known to those of ordinary skill in the art. Exemplary industrial use of enzymes are described, for example, in “Industrial Enzymes and their Applications” (Helmut Uhlig; Translated by Elfriede M. Linsmaier-Bednar (1998) Wiley-IEEE:Technology & Industrial Arts). Exemplary applications include carbohydrate hydrolysis, proteolysis, ester cleavage (e.g. fat hydrolysis or lipolysis), glucose isomerization and oxido-reduction. The contents of this book are fully incorporated herein by reference.

[0336] In general, industrial enzymes can be divided into two broad categories: commodity enzymes and specialty enzymes.

[0337] Commodity enzymes are those which are used in large amounts (e.g. tens to hundreds to thousands of kilos/year). Typically, commodity enzymes can be employed in a relatively crude state (e.g. 10, 20, 30, 40 or 50% pure or lesser or intermediate degrees of purity) without complex purification prior to use. In general, preparation of commodity enzymes is conducted with a low profit margin and prices are relatively low (e.g. 5 to 40$/Kg).

[0338] In contrast, specialty enzymes are used in smaller amounts (e.g. grams to kilos). Typically, specialty enzymes are employed at a relatively high level of purity. In general, preparation of specialty enzymes is conducted with a high profit margin and prices are relatively high (e.g. 5 to 10,000$/g).

[0339] Protein hydrolysis accounts for the largest percentage of industrial enzyme use (approximately 59%). Carbohydrate hydrolysis is second (approximately 28%) and lipid hydrolysis accounts for about 3% of industrial enzyme use. The remaining 10% of industrial enzyme use is in specialty areas such as, for example, analytic use (e.g. nucleic acid “restriction enzymes”), pharmaceutical use and research (e.g. thermophilic polymerases).

[0340] The industrial market for enzymes is growing with an annual increase in volume of 10 to 15%. Total revenues increase by about 4 to 5% annually. Profit margins for commodity enzymes continue to fall. This trend is offset by increased use of specialty enzymes in, for example, diagnostics, fine chemical manufacture and chiral separation.

[0341] Industrial uses of enzymes in the food industry include, but are not limited to, use of amylases in bread-making, use of lipases in flavour development, use of proteases in cheese making and use of pectinases in clarifying fruit juices.

[0342] In the textile industry, cellulases are commonly employed in treating denim to generate a ‘stone-washed’ texture/appearance.

[0343] Another common industrial use of enzymes is in grain processing, for example to convert corn starch to high fructose syrups.

[0344] In agriculture, enzymes are commonly used to treat animal feeds to make the more digestible (e.g. cellulase, xylanase, phytase).

[0345] In waste management, lipases are frequently employed as drain cleaning agents.

[0346] In the laboratory diagnostic enzymes and polymerases play a prominent role in many molecular analytic protocols (e.g. restriction digestion and PCR). Other common molecular biology techniques rely upon reporter enzymes (e.g. alkaline phosphatase, glucose oxidase, β-glucosidase and horseradish peroxidase).

[0347] Specialized uses of enzymes in biotransformations is a small but lucrative field. For example, lipases, esterases and oxidoreductases can be employed in chiral separations, glucotransferases can be employed in synthesis of oligosaccharides, thermolysin can be employed in aspartame synthesis, nitrile hydratases can be employed in acrylamide and/or nicotinamide synthesis, proteases can be employed in peptide synthesis, penicillin acylase can be employed in manufacture of semisynthetic penicillins and aspartase can be employed in the manufacture of L-aspartate.

[0348] In processing of cornstarch to produce glucose, there are three enzymatic reactions commonly employed in sequence.

[0349] In a first enzymatic reaction, starch is hydrolyzed, for example using an α-amylase (cleaves a-1-4 glucosidic bonds in starch). Often, a high temperature is applied to expand starch granules, making amylose and amylopectin chains more accessible. Here is therefore an advantage to a thermostable enzyme in this process. In many cases the starch hydrolysis is a batch process and the enzyme is not reused.

[0350] In a second enzymatic reaction, maltose is converted to glucose, for example using an amyloglucosidase. In many cases amyloglucosidase has a pH optimum of 6.5 so that reaction conditions must be adjusted after the starch hydrolysis reaction by reducing the pH.

[0351] In a third enzymatic reaction, glucose is converted to fructose, for example using a xylose isomerase. Fructose is sweeter than glucose and is commonly used as sweetening agent in foodstuffs. Fructose commands a higher price than glucose. and is more profitable than glucose. Xylose isomerase converts glucose to fructose, in an equilibrium reaction: Glucose⇄Fructose.

[0352] For many commercial applications, it is sufficient to produce a 50:50 mixture of glucose:fructose. This mixture is commonly known as “high fructose syrup” (HFS). Optionally, reaction conditions are adjusted by binding or removing Calcium ions which can inhibit xylose isomerase.

[0353] There is also a large industry devoted to production of artificial sweeteners. One commoner artificial sweetener is aspartame (L-phenylalanyl-L-aspartyl-methyl ester). Aspartame can is often produced biocatalytically by peptide synthesis using a thermostable protease which normally hydrolyses the N-terminal amide bonds of hydrophobic amino acid residues in a peptide. Optionally, use of an immobilised enzyme allows continuous process and enzyme reuse.

[0354] In aspartame manufacture, a low water activity solvent system (organic solvent based) reverses the normal equilibrium to produce a CBZ-L-Phe-L-Asp-OMe intermediate which crystallizes out of solution. Chemical removal of the CBZ group (deblocking) produces L-Phe-L-Asp-OMe (Aspartame).

[0355] Another important industrial use of enzymes is in nitrile biotransformations, for example synthesis of acrylamide. About 45 thousand tons per year of acrylamide is synthesised biologically, using a whole cell catalyst. The catalyst is an engineered Rhodococcus strain containing high levels of the enzyme nitrile hydratase (NHase). Initially the wild type Rhodococcus was used. Subsequently a recombinant Rhodococcus expressing the NHase gene at high levels was employed. Currently, a recombinant Rhodococcus with an NHase gene engineered to increase stability, and to reduce substrate and product inhibitions employed. The Rhodococcus is typically grown in a stirred tank bioreactor.

[0356] The biological production of acrylamide has advantages over the chemical synthesis because of the absence of side-reactions, and the simpler recovery of the reaction product.

[0357] Another important industrial use of enzymes is in production of nicotinamide. Nicotinamide is an essential vitamin, and is widely used in the health-food and animal food-and-feed industries. Biological production, using the same Rhodococcus biocatalyst as for acrylamide production, produces about 5 thousand tons per year of nicotinamide. Whole cell cultures of Rhodococcus convert 3-cyanopyridine to nicotinamide.

[0358] Another important industrial use of enzymes is in production of penicillin derivatives. Penicillin is produced industrially at high yields by Streptomyces fermentations. The Penicillin is converted enzymatically by penicillin acylase to 6-aminopenicillanic acid. The 6-Aminopenicillanic acid is a substrate for chemical or microbial conversion to valuable commercial antibiotics (e.g. Ampicillin)

### Exemplary Composition Types

### Agricultural Compositions

[0359] In an exemplary embodiment of the invention, enzymatic compositions of the present invention can also be included in agricultural compositions, which also preferably include an agricultural acceptable carrier.

[0360] An agriculturally acceptable carrier can be a solid or a liquid, preferably a liquid, more preferably water. While not required, the agricultural composition of the invention may also contain other additives such as fertilizers, inert formulation aids, i.e. surfactants, emulsifiers, defoamers, dyes, extenders and the like. Reviews describing methods of preparation and application of agricultural compositions are available. See, for example, Couch and Ignoffo (1981) in Microbial Control of Pests and Plant Disease 1970-1980, Burges (ed.), chapter 34, pp. 621-634; Corke and Rishbeth, ibid, chapter 39, pp. 717-732; Brockwell (1980) in Methods for Evaluating Nitrogen Fixation, Bergersen (ed.) pp. 417-488; Burton (1982) in Biological Nitrogen Fixation Technology for Tropical Agriculture, Graham and Harris (eds.) pp. 105-114; and Roughley (1982) ibid, pp. 115-127; The Biology of Baculoviruses, Vol. II, supra, and references cited in the above. Wettable powder compositions incorporating baculoviruses for use in insect control are described in EP 697,170 incorporated by reference herein.

[0361] Preferred methods of applying the agricultural compositions of the present invention are leaf application, seed coating and soil application, as disclosed in U.S. Pat. No. 5,039,523, which is fully incorporated herein.

### Pharmaceutical Compositions

[0362] Polypeptides identified according to exemplary analytic methods of the invention can be administered to an organism per se, or in a pharmaceutical composition where it is mixed with suitable carriers or excipients.

[0363] As used herein, a “pharmaceutical composition” refers to a preparation of one or more of the active ingredients described herein with other chemical components such as physiologically suitable carriers and excipients. The purpose of a pharmaceutical composition is to facilitate administration of a compound to an organism.

[0364] As used herein, the term “active ingredient” refers to the polypeptide accountable for the intended biological effect.

[0365] Hereinafter, the phrases “physiologically acceptable carrier” and “pharmaceutically acceptable carrier,” which may be used interchangeably, refer to a carrier or a diluent that does not cause significant irritation to an organism and does not abrogate the biological activity and properties of the administered compound. An adjuvant is included under these phrases.

[0366] Herein, the term “excipient” refers to an inert substance added to a pharmaceutical composition to further facilitate administration of an active ingredient. Examples, without limitation, of excipients include calcium carbonate, calcium phosphate, various sugars and types of starch, cellulose derivatives, gelatin, vegetable oils, and polyethylene glycols.

[0367] Techniques for formulation and administration of drugs may be found in the latest edition of “Remington's Pharmaceutical Sciences,” Mack Publishing Co., Easton, Pa., which is herein fully incorporated by reference.

[0368] Suitable routes of administration may, for example, include oral, rectal, transmucosal, especially transnasal, intestinal, or parenteral delivery, including intramuscular, subcutaneous, and intramedullary injections, as well as intrathecal, direct intraventricular, intravenous, inrtaperitoneal, intranasal, or intraocular injections.

[0369] Alternately, one may administer the pharmaceutical composition in a local rather than systemic manner, for example, via injection of the pharmaceutical composition directly into a tissue region of a patient.

[0370] Pharmaceutical compositions of the present invention may be manufactured by processes well known in the art, e.g., by means of conventional mixing, dissolving, granulating, dragee-making, levigating, emulsifying, encapsulating, entrapping, or lyophilizing processes.

[0371] Pharmaceutical compositions for use in accordance with the present invention thus may be formulated in conventional manner using one or more physiologically acceptable carriers comprising excipients and auxiliaries, which facilitate processing of the active ingredients into preparations that can be used pharmaceutically. Proper formulation is dependent upon the route of administration chosen.

[0372] For injection, the active ingredients of the pharmaceutical composition may be formulated in aqueous solutions, preferably in physiologically compatible buffers such as Hank's solution, Ringer's solution, or physiological salt buffer. For transmucosal administration, penetrants appropriate to the barrier to be permeated are used in the formulation. Such penetrants are generally known in the art.

[0373] For oral administration, the pharmaceutical composition can be formulated readily by combining the active compounds with pharmaceutically acceptable carriers well known in the art. Such carriers enable the pharmaceutical composition to be formulated as tablets, pills, dragees, capsules, liquids, gels, syrups, slurries, suspensions, and the like, for oral ingestion by a patient. Pharmacological preparations for oral use can be made using a solid excipient, optionally grinding the resulting mixture, and processing the mixture of granules, after adding suitable auxiliaries as desired, to obtain tablets or dragee cores. Suitable excipients are, in particular, fillers such as sugars, including lactose, sucrose, mannitol, or sorbitol; cellulose preparations such as, for example, maize starch, wheat starch, rice starch, potato starch, gelatin, gum tragacanth, methyl cellulose, hydroxypropylmethyl-cellulose, and sodium carbomethylcellulose; and/or physiologically acceptable polymers such as polyvinylpyrrolidone (PVP). If desired, disintegrating agents, such as cross-linked polyvinyl pyrrolidone, agar, or alginic acid or a salt thereof, such as sodium alginate, may be added.

[0374] Dragee cores are provided with suitable coatings. For this purpose, concentrated sugar solutions may be used which may optionally contain gum arabic, talc, polyvinyl pyrrolidone, carbopol gel, polyethylene glycol, titanium dioxide, lacquer solutions, and suitable organic solvents or solvent mixtures. Dyestuffs or pigments may be added to the tablets or dragee coatings for identification or to characterize different combinations of active compound doses.

[0375] Pharmaceutical compositions that can be used orally include push-fit capsules made of gelatin, as well as soft, sealed capsules made of gelatin and a plasticizer, such as glycerol or sorbitol. The push-fit capsules may contain the active ingredients in admixture with filler such as lactose, binders such as starches, lubricants such as talc or magnesium stearate, and, optionally, stabilizers. In soft capsules, the active ingredients may be dissolved or suspended in suitable liquids, such as fatty oils, liquid paraffin, or liquid polyethylene glycols. In addition, stabilizers may be added. All formulations for oral administration should be in dosages suitable for the chosen route of administration.

[0376] For buccal administration, the compositions may take the form of tablets or lozenges formulated in conventional manner.

[0377] For administration by nasal inhalation, the active ingredients for use according to the present invention are conveniently delivered in the form of an aerosol spray presentation from a pressurized pack or a nebulizer with the use of a suitable propellant, e.g., dichlorodifluoromethane, trichlorofluoromethane, dichloro-tetrafluoroethane, or carbon dioxide. In the case of a pressurized aerosol, the dosage may be determined by providing a valve to deliver a metered amount. Capsules and cartridges of, for example, gelatin for use in a dispenser may be formulated containing a powder mix of the compound and a suitable powder base, such as lactose or starch.

[0378] The pharmaceutical composition described herein may be formulated for parenteral administration, e.g., by bolus injection or continuous infusion. Formulations for injection may be presented in unit dosage form, e.g., in ampoules or in multidose containers with, optionally, an added preservative. The compositions may be suspensions, solutions, or emulsions in oily or aqueous vehicles, and may contain formulatory agents such as suspending, stabilizing, and/or dispersing agents.

[0379] Pharmaceutical compositions for parenteral administration include aqueous solutions of the active preparation in water-soluble form. Additionally, suspensions of the active ingredients may be prepared as appropriate oily or water-based injection suspensions. Suitable lipophilic solvents or vehicles include fatty oils such as sesame oil, or synthetic fatty acid esters such as ethyl oleate, triglycerides, or liposomes. Aqueous injection suspensions may contain substances that increase the viscosity of the suspension, such as sodium carboxymethyl cellulose, sorbitol, or dextran. Optionally, the suspension may also contain suitable stabilizers or agents that increase the solubility of the active ingredients, to allow for the preparation of highly concentrated solutions.

[0380] Alternatively, the active ingredient may be in powder form for constitution with a suitable vehicle, e.g., a sterile, pyrogen-free, water-based solution, before use.

[0381] The pharmaceutical composition of the present invention may also be formulated in rectal compositions such as suppositories or retention enemas, using, for example, conventional suppository bases such as cocoa butter or other glycerides.

[0382] Pharmaceutical compositions suitable for use in the context of the present invention include compositions wherein the active ingredients are contained in an amount effective to achieve the intended purpose. More specifically, a “therapeutically effective amount” means an amount of active ingredients (e.g., a nucleic acid construct) effective to prevent, alleviate, or ameliorate symptoms of a disorder (e.g., ischemia) or prolong the survival of the subject being treated.

[0383] Determination of a therapeutically effective amount is well within the capability of those skilled in the art, especially in light of the detailed disclosure provided herein.

[0384] For any preparation used in the methods of the invention, the dosage or the therapeutically effective amount can be estimated initially from in vitro and cell culture assays. For example, a dose can be formulated in animal models to achieve a desired concentration or titer. Such information can be used to more accurately determine useful doses in humans.

[0385] Toxicity and therapeutic efficacy of the active ingredients described herein can be determined by standard pharmaceutical procedures in vitro, in cell cultures or experimental animals. The data obtained from these in vitro and cell culture assays and animal studies can be used in formulating a range of dosage for use in human. The dosage may vary depending upon the dosage form employed and the route of administration utilized. The exact formulation, route of administration, and dosage can be chosen by the individual physician in view of the patient's condition. (See, e.g., Fingl, E. et al. (1975), “The Pharmacological Basis of Therapeutics,” Ch. 1, p. 1.)

[0386] Dosage amount and administration intervals may be adjusted individually to provide sufficient plasma or brain levels of the active ingredient to induce or suppress the biological effect (i.e., minimally effective concentration, MEC). The MEC will vary for each preparation, but can be estimated from in vitro data. Dosages necessary to achieve the MEC will depend on individual characteristics and route of administration. Detection assays can be used to determine plasma concentrations.

[0387] Depending on the severity and responsiveness of the condition to be treated, dosing can be of a single or a plurality of administrations, with course of treatment lasting from several days to several weeks, or until cure is effected or diminution of the disease state is achieved.

[0388] The amount of a composition to be administered will, of course, be dependent on the subject being treated, the severity of the affliction, the manner of administration, the judgment of the prescribing physician, etc.

[0389] Compositions of the present invention may, if desired, be presented in a pack or dispenser device, such as an FDA-approved kit, which may contain one or more unit dosage forms containing the active ingredient. The pack may, for example, comprise metal or plastic foil, such as a blister pack. The pack or dispenser device may be accompanied by instructions for administration. The pack or dispenser device may also be accompanied by a notice in a form prescribed by a governmental agency regulating the manufacture, use, or sale of pharmaceuticals, which notice is reflective of approval by the agency of the form of the compositions for human or veterinary administration. Such notice, for example, may include labeling approved by the U.S. Food and Drug Administration for prescription drugs or of an approved product insert. Compositions comprising a preparation of the invention formulated in a pharmaceutically acceptable carrier may also be prepared, placed in an appropriate container, and labeled for treatment of an indicated condition, as further detailed above.

### Food Additives

[0390] In an exemplary embodiment of the invention, food compositions comprise one or more polypeptides of the present invention as food additives.

[0391] The phrase “food additive” [defined by the FDA in 21 C.F.R. 170.3(e)(1)] includes any liquid or solid material intended to be added to a food product. This material can, for example, include an agent having a distinct taste and/or flavor or physiological effect (e.g., vitamins).

[0392] Thus, the food additive composition, may comprise the polypeptide of the present invention.

[0393] The food additive composition of the present invention can include the polypeptide per se, or an encapsulated form of the polypeptide (described hereinabove with respect to pharmaceutical compositions). The food additive composition of the present invention can be added to a variety of food products.

[0394] As used herein, the phrase “food product” describes a material consisting essentially of protein, carbohydrate and/or fat, which is used in the body of an organism to sustain growth, repair and vital processes and to furnish energy. Food products may also contain supplementary substances such as minerals, vitamins and condiments. See Merriani-Webster's Collegiate Dictionary, 10th Edition, 1993. The phrase “food product” as used herein further includes a beverage adapted for human or animal consumption.

[0395] Representative examples of food products in which the food additive of the present invention can be incorporated include, without limitation, baked goods, soft drinks, cereals, candy, jams, jellies, tofu, cheese and ice cream.

[0396] A food product containing the food additive of the present invention can also include additional additives such as, for example, antioxidants, sweeteners, flavorings, colors, preservatives, enzymes, nutritive additives such as vitamins and minerals, emulsifiers, pH control agents such as acidulants, hydrocolloids, antifoams and release agents, flour improving or strengthening agents, raising or leavening agents, gases and chelating agents, the utility and effects of which are well-known in the art.

[0397] The polypeptide of the present invention can also be expressed in edible portions of commercially grown crops.

[0398] For example, the polypeptide of the present invention can be expressed in dicot or monocot plants, with a preference to moncot plants such as rice, wheat or barley. Methods of expressing exogenous polynucleotide sequences in plants are described hereinabove with respect to synthesis of a recombinant polypeptide in plant cells.

### Cosmetical Compositions

[0399] Such compositions are usually prepared for aesthetic use and may comprise the polypeptides of the present invention as either the active ingredient or as a carrier.

[0400] As used herein, the term “cosmetically or cosmeceutically acceptable carrier” describes a carrier or a diluent that does not cause significant irritation to an organism and does not abrogate the biological activity and properties of the applied active ingredient(s).

[0401] Examples of acceptable carriers that are usable in the context of the present invention include carrier materials that are well-known for use in the cosmetic and medical arts as bases for e.g., emulsions, creams, aqueous solutions, oils, ointments, pastes, gels, lotions, milks, foams, suspensions, aerosols and the like, depending on the final form of the composition.

[0402] Representative examples of suitable carriers according to the present invention therefore include, without limitation, water, liquid alcohols, liquid glycols, liquid polyalkylene glycols, liquid esters, liquid amides, liquid protein hydrolysates, liquid alkylated protein hydrolysates, liquid lanolin and lanolin derivatives, and like materials commonly employed in cosmetic and medicinal compositions.

[0403] Other suitable carriers according to the present invention include, without limitation, alcohols, such as, for example, monohydric and polyhydric alcohols, e.g., ethanol, isopropanol, glycerol, sorbitol, 2-methoxyethanol, diethyleneglycol, ethylene glycol, hexyleneglycol, mannitol, and propylene glycol; ethers such as diethyl or dipropyl ether; polyethylene glycols and methoxypolyoxyethylenes (carbowaxes having molecular weight ranging from 200 to 20,000); polyoxyethylene glycerols, polyoxyethylene sorbitols, stearoyl diacetin, and the like.

[0404] By selecting the appropriate carrier and optionally other ingredients that can be included in the composition, as is detailed hereinbelow, the compositions of the present invention may be formulated into any pharmaceutical, cosmetic or cosmeceutical form normally employed for topical application. Hence, the compositions of the present invention can be, for example, in a form of a cream, an ointment, a paste, a gel, a lotion, a milk, a suspension, an aerosol, a spray, a foam, a shampoo, a hair conditioner, a serum, a swab, a pledget, a pad and a soap.

[0405] The compositions of the present invention can optionally further comprise a variety of components that are suitable for rendering the compositions more cosmetically or aesthetically acceptable or to provide the compositions with additional usage benefits. Such conventional optional components are well known to those skilled in the art and are referred to herein as “ingredients”. These include any cosmetically acceptable ingredients such as those found in the CTFA International Cosmetic Ingredient Dictionary and Handbook, 8th edition, edited by Wenninger and Canterbery, (The Cosmetic, Toiletry, and Fragrance Association, Inc., Washington, D.C., 2000). Some non-limiting representative examples of these ingredients include humectants, deodorants, antiperspirants, sun screening agents, sunless tanning agents, hair conditioning agents, pH adjusting agents, chelating agents, preservatives, emulsifiers, occlusive agents, emollients, thickeners, solubilizing agents, penetration enhancers, anti-irritants, colorants, propellants (as described above) and surfactants.

[0406] Thus, for example, the compositions of the present invention can comprise, in combination with ammonium lactate and urea, one or more additional humectants or moisturizing agents. Representative examples of humectants that are usable in this context of the present invention include, without limitation, guanidine, glycolic acid and glycolate salts (e.g. ammonium slat and quaternary alkyl ammonium salt), aloe vera in any of its variety of forms (e.g., aloe vera gel), allantoin, urazole, polyhydroxy alcohols such as sorbitol, glycerol, hexanetriol, propylene glycol, butylene glycol, hexylene glycol and the like, polyethylene glycols, sugars and starches, sugar and starch derivatives (e.g., alkoxylated glucose), hyaluronic acid, lactamide monoethanolamine, acetamide monoethanolamine and any combination thereof.

[0407] The compositions of the present invention can further comprise a pH adjusting agent. As is discussed hereinabove, although the ammonium lactate or any corresponding ammonium salt may serve as a pH adjusting agent, it is preferable for the compositions of the invention to have a pH value of between about 4 and about 7, preferably between about 5 and about 6, most preferably about 5.5 or substantially 5.5 and hence the presence of a pH adjusting agent is preferred. Suitable pH adjusting agents include, for example, one or more of adipic acids, glycines, citric acids, calcium hydroxides, magnesium aluminometasilicates, buffers or any combinations thereof.

[0408] Representative examples of deodorant agents that are usable in the context of the present invention include, without limitation, quaternary ammonium compounds such as cetyl-trimethylammonium bromide, cetyl pyridinium chloride, benzethonium chloride, diisobutyl phenoxy ethoxy ethyl dimethyl benzyl ammonium chloride, sodium N-lauryl sarcosine, sodium N-palmIthyl sarcosine, lauroyl sarcosine, N-myristoyl glycine, potassium N-lauryl sarcosine, stearyl, trimethyl ammonium chloride, sodium aluminum chlorohydroxy lactate, tricetylmethyl ammonium chloride, 2,4,4′-trichloro-2′-hydroxy diphenyl ether, diaminoalkyl amides such as L-lysine hexadecyl amide, heavy metal salts of citrate, salicylate, and piroctose, especially zinc salts, and acids thereof, heavy metal salts of pyrithione, especially zinc pyrithione and zinc phenolsulfate. Other deodorant agents include, without limitation, odor absorbing materials such as carbonate and bicarbonate salts, e.g. as the alkali metal carbonates and bicarbonates, ammonium and tetraalkylammonium carbonates and bicarbonates, especially the sodium and potassium salts, or any combination of the above.

[0409] Antiperspirant agents can be incorporated in the compositions of the present invention either in a solubilized or a particulate form and include, for example, aluminum or zirconium astringent salts or complexes.

[0410] Representative examples of sun screening agents usable in context of the present invention include, without limitation, p-aminobenzoic acid, salts and derivatives thereof (ethyl, isobutyl, glyceryl esters; p-dimethylaminobenzoic acid); anthranilates (i.e., o-amino-benzoates; methyl, menthyl, phenyl, benzyl, phenylethyl, linalyl, terpinyl, and cyclohexenyl esters); salicylates (amyl, phenyl, octyl, benzyl, menthyl, glyceryl, and di-pro-pyleneglycol esters); cinnamic acid derivatives (menthyl and benzyl esters, a-phenyl cinnamonitrile; butyl cinnamoyl pyruvate); dihydroxycinnamic acid derivatives (umbelliferone, methylumbelliferone, methylaceto-umbelliferone); trihydroxy-cinnamic acid derivatives (esculetin, methylesculetin, daphnetin, and the glucosides, esculin and daphnin); hydrocarbons (diphenylbutadiene, stilbene); dibenzalacetone and benzalacetophenone; naphtholsulfonates (sodium salts of 2-naphthol-3,6-disulfonic and of 2-naphthol-6,8-disulfonic acids); di-hydroxynaphthoic acid and its salts; o- and p-hydroxybiphenyldisulfonates; coumarin derivatives (7-hydroxy, 7-methyl, 3-phenyl); diazoles (2-acetyl-3-bromoindazole, phenyl benzoxazole, methyl naphthoxazole, various aryl benzothiazoles); quinine salts (bisulfate, sulfate, chloride, oleate, and tannate); quinoline derivatives (8-hydroxyquinoline salts, 2-phenylquinoline); hydroxy- or methoxy-substituted benzophenones; uric and violuric acids; tannic acid and its derivatives (e.g., hexaethylether); (butyl carbotol) (6-propyl piperonyl)ether; hydroquinone; benzophenones (oxybenzene, sulisobenzone, dioxybenzone, benzoresorcinol, 2,2′,4,4′-tetrahydroxybenzophenone, 2,2′-dihydroxy-4,4′-dimethoxybenzophenone, octabenzone; 4-isopropyldibenzoylmethane; butylmethoxydibenzoylmethane; etocrylene; octocrylene; [3-(4′-methylbenzylidene bornan-2-one) and 4-isopropyl-di-benzoylmethane, and any combination thereof.

[0411] Representative examples of sunless tanning agents usable in context of the present invention include, without limitation, dihydroxyacetone, glyceraldehyde, indoles and their derivatives. The sunless tanning agents can be used in combination with the sunscreen agents.

[0412] Suitable hair conditioning agents that can be used in the context of the present invention include, for example, one or more collagens, cationic surfactants, modified silicones, proteins, keratins, dimethicone polyols, quaternary ammonium compounds, halogenated quaternary ammonium compounds, alkoxylated carboxylic acids, alkoxylated alcohols, alkoxylated amides, sorbitan derivatives, esters, polymeric ethers, glyceryl esters, or any combinations thereof.

[0413] The chelating agents are optionally added to the compositions of the present invention so as to enhance the preservative or preservative system. Preferred chelating agents are mild agents, such as, for example, ethylenediaminetetraacetic acid (EDTA), EDTA derivatives, or any combination thereof.

[0414] Suitable preservatives that can be used in the context of the present composition include, without limitation, one or more alkanols, disodium EDTA (ethylenediamine tetraacetate), EDTA salts, EDTA fatty acid conjugates, isothiazolinone, parabens such as methylparaben and propylparaben, propylene glycols, sorbates, urea derivatives such as diazolindinyl urea, or any combinations thereof.

[0415] Suitable emulsifiers that can be used in the context of the present invention include, for example, one or more sorbitans, alkoxylated fatty alcohols, alkylpolyglycosides, soaps, alkyl sulfates, monoalkyl and dialkyl phosphates, alkyl sulphonates, acyl isothionates, or any combinations thereof.

[0416] Suitable occlusive agents that can be used in the context of the present invention include, for example, petrolatum, mineral oil, beeswax, silicone oil, lanolin and oil-soluble lanolin derivatives, saturated and unsaturated fatty alcohols such as behenyl alcohol, hydrocarbons such as squalane, and various animal and vegetable oils such as almond oil, peanut oil, wheat germ oil, linseed oil, jojoba oil, oil of apricot pits, walnuts, palm nuts, pistachio nuts, sesame seeds, rapeseed, cade oil, corn oil, peach pit oil, poppyseed oil, pine oil, castor oil, soybean oil, avocado oil, safflower oil, coconut oil, hazelnut oil, olive oil, grape seed oil and sunflower seed oil.

[0417] Suitable emollients, other than ammonium lactate, that can be used in the context of the present invention include, for example, dodecane, squalane, cholesterol, isohexadecane, isononyl isononanoate, PPG Ethers, petrolatum, lanolin, safflower oil, castor oil, coconut oil, cottonseed oil, palm kernel oil, palm oil, peanut oil, soybean oil, polyol carboxylic acid esters, derivatives thereof and mixtures thereof.

[0418] Suitable thickeners that can be used in the context of the present invention include, for example, non-ionic water-soluble polymers such as hydroxyethylcellulose (commercially available under the Trademark Natrosol® 250 or 350), cationic water-soluble polymers such as Polyquat 37 (commercially available under the Trademark Synthalen® CN), fatty alcohols, fatty acids and their alkali salts and mixtures thereof.

[0419] Representative examples of solubilizing agents that are usable in this context of the present invention include, without limitation, complex-forming solubilizers such as citric acid, ethylenediamine-tetraacetate, sodium meta-phosphate, succinic acid, urea, cyclodextrin, polyvinylpyrrolidone, diethylammonium-ortho-benzoate, and micelle-forming solubilizers such as TWEENS and spans, e.g., TWEEN 80. Other solubilizers that are usable for the compositions of the present invention are, for example, polyoxyethylene sorbitan fatty acid ester, polyoxyethylene n-alkyl ethers, n-alkyl amine n-oxides, poloxamers, organic solvents, phospholipids and cyclodextrines.

[0420] Suitable penetration enhancers usable in context of the present invention include, but are not limited to, dimethylsulfoxide (DMSO), dimethyl formamide (DMF), allantoin, urazole, N,N-dimethylacetamide (DMA), decylmethylsulfoxide (C₁₀ MSO), polyethylene glycol monolaurate (PEGML), propylene glycol (PG), propylene glycol monolaurate (PGML), glycerol monolaurate (GML), lecithin, the 1-substituted azacycloheptan-2-ones, particularly 1-n-dodecylcyclazacycloheptan-2-one (available under the trademark Azone® from Whitby Research Incorporated, Richmond, Va.), alcohols, and the like. The permeation enhancer may also be a vegetable oil. Such oils include, for example, safflower oil, cottonseed oil and corn oil.

[0421] Suitable anti-irritants that can be used in the context of the present invention include, for example, steroidal and non steroidal anti-inflammatory agents or other materials such as aloe vera, chamomile, alpha-bisabolol, cola nitida extract, green tea extract, tea tree oil, licoric extract, allantoin, caffeine or other xanthines, glycyrrhizic acid and its derivatives.

[0422] Although a wide variety of ingredients can be included in the compositions of the present invention, in addition to the active ingredients, the compositions are preferably devoid of an enduring perfume composition. The incorporation of such a perfume composition in pharmaceutical compositions is considered in the art disadvantageous for skin and scalp medical treatment, as it oftentimes cause undesirable irritation of a sensitive skin.

[0423] As used herein, the phrase “an enduring perfume composition” describes a composition that comprises one or more perfumes that provide a long lasting aesthetic benefit with a minimum amount of material. Enduring perfume compositions are substantially deposited and remain on the body throughout any rinse and/or drying steps. Representative examples of such compositions are described, for example, in U.S. Pat. No. 6,086,903.

[0424] However, it should be noted that fragrances other than enduring perfume compositions, perfumes or perfume compositions, which are fast removable from the surface they are deposited on, can be included in the compositions of the present invention.

### Exemplary Medical Applications of Enzymes

[0425] Use of enzymes a wide variety of medical applications is contemplated and/or practiced. Exemplary medical applications which are briefly reviewed here. This review does not purport to be exhaustive and does not limit the scope of the invention. The cellular processes of biogenesis and biodegradation involve a number of key enzyme classes including oxidoreductases, transferases, hydrolases, lyases, isomerases, ligases, and others. Each class of enzyme comprises many substrate-specific enzymes having precise and well regulated functions. Enzymes facilitate metabolic processes such as glycolysis, the tricarboxylic cycle, and fatty acid metabolism; synthesis or degradation of amino acids, steroids, phospholipids, and alcohols; regulation of cell signaling, proliferation, inflammation, and apoptosis; and through catalyzing critical steps in DNA replication and repair and the process of translation. Once an enzyme has been classified according to EC nomenclature it is possible to predict with a high degree of certainty which substrate(s) the enzyme is specific to and/or what type of reaction the enzyme catalyzes.

### Oxidoreductases

[0426] Many pathways of biogenesis and biodegradation require oxidoreductase (dehydrogenase or reductase) activity, coupled to reduction or oxidation of a cofactor. Potential cofactors include cytochromes, oxygen, disulfide, iron-sulfur proteins, Ravin adenine dinucleotide (FAD), and the nicotinamide adenine dinucleotides NAD and NADP (Newsholme, E. A. and A. R. Leech (1983) Biochemistry for the Medical Sciences, John Wiley and Sons, Chichester, U. K. pp. 779-793). Reductase activity catalyzes transfer of electrons between substrate(s) and cofactor(s) with concurrent oxidation of the cofactor. Reverse dehydrogenase activity catalyzes the reduction of a cofactor and consequent oxidation of the substrate. Oxidoreductase enzymes are a broad superfamily that catalyze reactions in all cells of organisms, including metabolism of sugar, certain detoxification reactions, and synthesis or degradation of fatty acids, amino acids, glucocorticoids, estrogens, androgens, and prostaglandins. Different family members may be referred to as oxidoreductases, oxidases, reductases, or dehydrogenases, and they often have distinct cellular locations such as the cytosol, the plasma membrane, mitochondrial inner or outer membrane, and peroxisomes.

[0427] Short-chain alcohol dehydrogenases (SCADs) are a family of dehydrogenases that share only 15% to 30% sequence identity, with similarity predominantly in the coenzyme binding domain and the substrate binding domain. In addition to their role in detoxification of ethanol, SCADs are involved in synthesis and degradation of fatty acids, steroids, and some prostaglandins, and are therefore implicated in a variety of disorders such as lipid storage disease, myopathy, SCAD deficiency, and certain genetic disorders. For example, retinol dehydrogenase is a SCAD-family member (Simon, A. et al. (1995) J. Biol. Chem. 270:1107-1112) that converts retinol to retinal, the precursor of retinoic acid. Retinoic acid, a regulator of differentiation and apoptosis, has been shown to down-regulate genes involved in cell proliferation and inflammation (Chai, X. et al. (1995) J. Biol. Chem. 270:3900-3904). In addition, retinol dehydrogenase has been linked to hereditary eye diseases such as autosomal recessive childhood-onset severe retinal dystrophy (Simon, A. et al. (1996) Genomics 36:424-430).

[0428] Membrane-bound succinate dehydrogenases (succinate:quinone reductases, SQR) and fumarate reductases (quinol:fumarate reductases, QFR) couple the oxidation of succinate to fumarate with the reduction of quinone to quinol, and also catalyze the reverse reaction. QFR and SQR complexes are collectively known as succinate:quinone oxidoreductases (EC 1.3.5.1) and have similar compositions. The complexes consist of two hydrophilic and one or two hydrophobic, membrane-integrated subunits. The larger hydrophilic subunit A carries covalently bound flavin adenine dinucleotide; subunit B contains three iron-sulphur centers (Lancaster, C. R. and A. Kroger (2000) Biochim. Biophys. Acta 1459:422-431). The full-length cDNA sequence for the flavoprotein subunit of human heart succinate dehydrogenase (succinate: (acceptor) oxidoreductase; EC 1.3.99.1) is similar to the bovine succinate dehydrogenase in that it contains a cysteine triplet and in that the active site contains an additional cysteine that is not present in yeast or prokaryotic SQRs (Morris, A. A. et al. (1994) Biochim. Biophys. Acta 29:125-128).

[0429] Propagation of nerve impulses, modulation of cell proliferation and differentiation, induction of the immune response, and tissue homeostasis involve neurotransmitter metabolism (Weiss, B. (1991) Neurotoxicology 12:379-386; Collins, S. M. et al. (1992) Ann. N.Y. Acad. Sci. 664:415-424; Brown, J. K. and H. Imam (1991) J. Inherit. Metab. Dis. 14:436-458). Many pathways of neurotransmitter metabolism require oxidoreductase activity, coupled to reduction or oxidation of a cofactor, such as NAD⁺/NADH (Newsholme and Leech, supra, pp. 779-793). Degradation of catecholamines (epinephrine or norepinephrine) requires alcohol dehydrogenase (in the brain) or aldehyde dehydrogenase (in peripheral tissue). NAD⁺-dependent aldehyde dehydrogenase oxidizes 5-hydroxyindole-3-acetate (the product of 5-hydroxytryptamine (serotonin) metabolism) in the brain, blood platelets, liver and pulmonary endothelium (Newsholme and Leech, supra, p. 786). Other neurotransmitter degradation pathways that utilize NAD⁺/NADH-dependent oxidoreductase activity include those of L-DOPA (precursor of dopamine, a neuronal excitatory compound), glycine (an inhibitory neurotransmitter in the brain and spinal cord), histamine (liberated from mast cells during the inflammatory response), and taurine (an inhibitory neurotransmitter of the brain stem, spinal cord and retina) (Newsholme and Leech, supra, pp. 790, 792). Epigenetic or genetic defects in neurotransmitter metabolic pathways can result in diseases including Parkinson disease and inherited myoclonus (McCance, K. L. and S. E. Huether (1994) Pathophysiology, Mosby-Year Book, Inc., St. Louis, Mo. pp. 402-404; Gundlach, A. L. (1990) FASEB J. 4:2761-2766).

[0430] Tetrahydrofolate is a derivatized glutamate molecule that acts as a carrier, providing activated one-carbon units to a wide variety of biosynthetic reactions, including synthesis of purines, pyrimidines, and the amino acid methionine. Tetrahydrofolate is generated by the activity of a holoenzyme complex called tetrahydrofolate synthase, which includes three enzyme activities: tetrahydrofolate dehydrogenase, tetrahydrofolate cyclohydrolase, and tetrahydrofolate synthetase. Thus, tetrahydrofolate dehydrogenase plays an important role in generating building blocks for nucleic and amino acids, crucial to proliferating cells.

[0431] 3-Hydroxyacyl-CoA dehydrogenase (3HACD) is involved in fatty acid metabolism. It catalyzes the reduction of 3-hydroxyacyl-CoA to 3-oxoacyl-CoA, with concomitant oxidation of NAD to NADH, in the mitochondria and peroxisomes of eukaryotic cells. In peroxisomes, 3HACD and enoyl-CoA hydratase form an enzyme complex called bifunctional enzyme, defects in which are associated with peroxisomal bifunctional enzyme deficiency. This interruption in fatty acid metabolism produces accumulation of very-long chain fatty acids, disrupting development of the brain, bone, and adrenal glands. Infants born with this deficiency typically die within 6 months (Watkins, P. et al. (1989) J. Clin. Invest. 83:771-777; Online Mendelian Inheritance in Man (OMIM), #261515). The neurodegeneration characteristic of Alzheimer's disease involves development of extracellular plaques in certain brain regions. A major protein component of these plaques is the peptide amyloid-β (Aβ), which is one of several cleavage products of amyloid precursor protein (APP). 3HACD has been shown to bind the Aβ peptide, and is overexpressed in neurons affected in Alzheimer's disease. In addition, an antibody against 3HACD can block the toxic effects of Aβ in a cell culture model of Alzheimer's disease (Yan, S. et al. (1997) Nature 389:689-695; OMIM, #602057).

[0432] Steroids such as estrogen, testosterone, and corticosterone are generated from a common precursor, cholesterol, and interconverted. Enzymes acting upon cholesterol include dehydrogenases. Steroid dehydrogenases, such as the hydroxysteroid dehydrogenases, are involved in hypertension, fertility, and cancer (Duax, W. L. and D. Ghosh (1997) Steroids 62:95-100). One such dehydrogenase is 3-oxo-5-a-steroid dehydrogenase (OASD), a microsomal membrane protein highly expressed in prostate and other androgen-responsive tissues. OASD catalyzes the conversion of testosterone into dihydrotestosterone, which is the most potent androgen. Dihydrotestosterone is essential for the formation of the male phenotype during embryogenesis, as well as for proper androgen-mediated growth of tissues such as the prostate and male genitalia. A defect in OASD leads to defective formation of the external genitalia (Andersson, S. et al. (1991) Nature 354:159-161; Labrie, F. et al. (1992) Endocrinology 131:1571-1573; OMIM #264600).

[0433] 17β.-hydroxysteroid dehydrogenase (17βHSD6) plays an important role in the regulation of the male reproductive hormone, dihydrotestosterone (DHTT). 17βHSD6 acts to reduce levels of DHTT by oxidizing a precursor of DHTT, 3α-diol, to androsterone which is readily glucuronidated and removed. 17βHSD6 is active with both androgen and estrogen substrates in embryonic kidney 293 cells. Isozymes of 17βHSD catalyze oxidation and/or reduction reactions in various tissues with preferences for different steroid substrates (Biswas, M. G. and D. W. Russell (1997) J. Biol. Chem. 272:15959-15966). For example, 17βHSD1 preferentially reduces estradiol and is abundant in the ovary and placenta. 17βHSD2 catalyzes oxidation of androgens and is present in the endometrium and placenta. 17βHSD3 is exclusively a reductive enzyme in the testis (Geissler, W. M. et al. (1994) Nature Genet. 7:34-39). An excess of androgens such as DHTT can contribute to diseases such as benign prostatic hyperplasia and prostate cancer.

The oxidoreductase isocitrate dehydrogenase catalyzes the conversion of isocitrate to a-ketoglutarate, a substrate of the citric acid cycle. Isocitrate dehydrogenase can be either NAD or NADP dependent, and is found in the cytosol, mitochondria, and peroxisomes. Activity of isocitrate dehydrogenase is regulated developmentally, and by hormones, neurotransmitters, and growth factors.

[0434] Hydroxypyruvate reductase (HPR), a peroxisomal 2-hydroxyacid dehydrogenase in the glycolate pathway, catalyzes the conversion of hydroxypyruvate to glycerate with the oxidation of both NADH and NADPH. The reverse dehydrogenase reaction reduces NAD⁺ and NADP⁺. HPR recycles nucleotides and bases back into pathways leading to the synthesis of ATP and GTP, which are used to produce DNA and RNA and to control various aspects of signal transduction and energy metabolism. Purine nucleotide biosynthesis inhibitors are used as antiproliferative agents to treat cancer and viral diseases. HPR also regulates biochemical synthesis of serine and cellular serine levels available for protein synthesis.

[0435] The mitochondrial electron transport (or respiratory) chain is the series of oxidoreductase-type enzyme complexes in the mitochondrial membrane that is responsible for the transport of electrons from NADH to oxygen and the coupling of this oxidation to the synthesis of ATP (oxidative phosphorylation). ATP provides energy to drive energy-requiring reactions. The key respiratory chain complexes are NADH:ubiquinone oxidoreductase (complex I), succinate:ubiquinone oxidoreductase (complex II), cytochrome c₁-b oxidoreductase (complex III), cytochrome c oxidase (complex IV), and ATP synthase (complex V) (Alberts, B. et al. (1994) Molecular Biology of the Cell, Garland Publishing, Inc., New York, N.Y., pp. 677-678). All of these complexes are located on the inner matrix side of the mitochondrial membrane except complex II, which is on the cytosolic side where it transports electrons generated in the citric acid cycle to the respiratory chain. Electrons released in oxidation of succinate to fumarate in the citric acid cycle are transferred through electron carriers in complex II to membrane bound ubiquinone (Q). Transcriptional regulation of these nuclear-encoded genes controls the biogenesis of respiratory enzymes. Defects and altered expression of enzymes in the respiratory chain are associated with a variety of disease conditions.

Other dehydrogenase activities using NAD as a cofactor include 3-hydroxyisobutyrate dehydrogenase (3HBD), which catalyzes the NAD-dependent oxidation of 3-hydroxyisobutyrate to methylmalonate semialdehyde within mitochondria. 3-hydroxyisobutyrate levels are elevated in ketoacidosis, methylmalonic acidemia, and other disorders (Rougraff, P. M. et al. (1989) J. Biol. Chem. 264:5899-5903). Another mitochondrial dehydrogenase important in amino acid metabolism is the enzyme isovaleryl-CoA-dehydrogenase (IVD). IVD is involved in leucine metabolism and catalyzes the oxidation of isovaleryl-CoA to 3-methylcrotonyl-CoA. Human IVD is a tetrameric flavoprotein synthesized in the cytosol with a mitochondrial import signal sequence. A mutation in the gene encoding IVD results in isovaleric acidemia (Vockley, J. et al. (1992) J. Biol. Chem. 267:2494-2501).
The family of glutathione peroxidases encompass tetrameric glutathione peroxidases (GPx1-3) and the monomeric phospholipid hydroperoxide glutathione peroxidase (PHGPx/GPx4). Although the overall homology between the tetrameric enzymes and GPx4 is less than 30%, a pronounced similarity has been detected in clusters involved in the active site and a common catalytic triad has been defined by structural and kinetic data (Epp, O. et al. (1983) Eur. J. Biochem. 133:51-69). GPx1 is ubiquitously expressed in cells, whereas GPx2 is present in the liver and colon, and GPx3 is present in plasma. GPx4 is found at low levels in all tissues but is expressed at high levels in the testis (Ursini, F. et al (1995) Meth. Enzymol. 252:38-53). GPx4 is the only monomeric glutathione peroxidase found in mammals and the only mammalian glutathione peroxidase to show high affinity for and reactivity with phospholipid hydroperoxides, and to be membrane associated. A tandem mechanism for the antioxidant activities of GPx4 and vitamin E has been suggested. GPx4 has alternative transcription and translation start sites which determine its subcellular localization (Esworthy, R. S. et al. (1994) Gene 144:317-318; and Maiorino, M. et al. (1990) Meth. Enzymol. 186:448-450).

[0436] The glutathione S-transferases (GST) are a ubiquitous family of enzymes with dual substrate specificities that perform important biochemical functions of xenobiotic biotransformation and detoxification, drug metabolism, and protection of tissues against peroxidative damage. They catalyze the conjugation of an electrophile with reduced glutathione (GSH) which results in either activation or deactivation/detoxification. The absolute requirement for binding reduced GSH to a variety of chemicals necessitates a diversity in GST structures in various organisms and cell types. GSTs are homodimeric or heterodimeric proteins localized in the cytosol. The major isozymes share common structural and catalytic properties and include four major classes, Alpha, Mu, Pi, and Theta. Each GST possesses a common binding site for GSH, and a variable hydrophobic binding site specific for its particular electrophilic substrates. Specific amino acid residues within GSTs have been identified as important for these binding sites and for catalytic activity. Residues Q67, T68, D101, E104, and R131 are important for the binding of GSH (Lee, H.-C. et al. (1995) J. Biol. Chem. 270:99-109). Residues R13, R20, and R69 are important for the catalytic activity of GST (Stenberg, G. et al. (1991) Biochem. J. 274:549-555).

[0437] GSTs normally deactivate and detoxify potentially mutagenic and carcinogenic chemicals. Some forms of rat and human GSTs are reliable preneoplastic markers of carcinogenesis. Dihalomethanes, which produce liver tumors in mice, are believed to be activated by GST (Thier, R. et al. (1993) Proc. Natl. Acad. Sci. USA 90:8567-8580). The mutagenicity of ethylene dibromide and ethylene dichloride is increased in bacterial cells expressing the human Alpha GST, A1-1, while the mutagenicity of aflatoxin B1 is substantially reduced by enhancing the expression of GST (Simula, T. P. et al. (1993) Carcinogenesis 14:1371-1376). Thus, control of GST activity may be useful in the control of mutagenesis and carcinogenesis.

[0438] GST has been implicated in the acquired resistance of many cancers to drug treatment, the phenomenon known as multi-drug resistance (MDR). MDR occurs when a cancer patient is treated with a cytotoxic drug such as cyclophosphamide and subsequently becomes resistant to this drug and to a variety of other cytotoxic agents as well. Increased GST levels are associated with some drug resistant cancers, and it is believed that this increase occurs in response to the drug agent which is then deactivated by the GST catalyzed GSH conjugation reaction. The increased GST levels then protect the cancer cells from other cytotoxic agents for which GST has affinity. Increased levels of A1-1 in tumors has been linked to drug resistance induced by cyclophosphamide treatment (Dirven, H. A. et al. (1994) Cancer Res. 54:6215-6220). Thus control of GST activity in cancerous tissues may be useful in treating MDR in cancer patients.

[0439] The reduction of ribonucleotides to the corresponding deoxyribonucleotides, needed for DNA synthesis during cell proliferation, is catalyzed by the enzyme ribonucleotide diphosphate reductase. Glutaredoxin is a glutathione (GSH)-dependent hydrogen donor for ribonucleotide diphosphate reductase and contains the active site consensus sequence -C-P-Y-C-. This sequence is conserved in glutaredoxins from such different organisms as Escherichia coli, vaccinia virus, yeast, plants, and mammalian cells. Glutaredoxin has inherent GSH-disulfide oxidoreductase (thioltransferase) activity in a coupled system with GSH, NADPH, and GSH-reductase, catalyzing the reduction of low molecular weight disulfides as well as proteins. Glutaredoxin has been proposed to exert a general thiol redox control of protein activity by acting both as an effective protein disulfide reductase, similar to thioredoxin, and as a specific GSH-mixed disulfide reductase (Padilla, C. A. et al. (1996) FEBS Lett. 378:69-73).

In addition to their important role in DNA synthesis and cell division, glutaredoxin and other thioproteins provide effective antioxidant defense against oxygen radicals and hydrogen peroxide (Schalireuter, K. U. and J. M. Wood (1991) Melanoma Res. 1:159-167). Glutaredoxin is the principal agent responsible for protein dethiolation in vivo and reduces dehydroascorbic acid in normal human neutrophils (Jung, C. H. and J. A. Thomas (1996) Arch. Biochem. Biophys. 335:61-72; Park, J. B. and M. Levine (1996) Biochem. J. 315:931-938). T

[0440] The thioredoxin system serves as a hydrogen donor for ribonucleotide reductase and as a regulator of enzymes by redox control. It also modulates the activity of transcription factors such as NF-.kappa.B, AP-1, and steroid receptors. Several cytokines or secreted cytokine-like factors such as adult T-cell leukemia-derived factor, 3B6-interleukin-1, T-hybridoma-derived (MP-6) B cell stimulatory factor, and early pregnancy factor have been reported to be identical to thioredoxin (Holmgren, A. (1985) Annu. Rev. Biochem. 54:237-271; Abate, C. et al. (1990) Science 249:1157-1161; Tagaya, Y. et al. (1989) EMBO J. 8:757-764; Wakasugi, H. (1987) Proc. Natl. Acad. Sci. USA 84:804-808; Rosen, A. et al. (1995) Int. Immunol. 7:625-633). Thus thioredoxin secreted by stimulated lymphocytes (Yodoi, J. and T. Tursz (1991) Adv. Cancer Res. 57:381-411; Tagaya, N. et al. (1990) Proc. Natl. Acad. Sci. USA 87:8282-8286) has extracellular activities including a role as a regulator of cell growth and a mediator in the immune system (Miranda-Vizuete, A. et al. (1996) J. Biol. Chem. 271:19099-19103; Yamauchi, A. et al. (1992) Mol. Immunol. 29:263-270). Thioredoxin and thioredoxin reductase protect against cytotoxicity mediated by reactive oxygen species in disorders such as Alzheimer's disease (Lovell, M. A. (2000) Free Radic. Biol. Med. 28:418-427).

[0441] The selenoprotein thioredoxin reductase is secreted by both normal and neoplastic cells and has been implicated as both a growth factor and as a polypeptide involved in apoptosis (Soderberg, A. et al. (2000) Cancer Res. 60:2281-2289). An extracellular plasmin reductase secreted by hamster ovary cells (HT-1080) has been shown to participate in the generation of angiostatin from plasmin. In this case, the reduction of the plasmin disulfide bonds triggers the proteolytic cleavage of plasmin which yields the angiogenesis inhibitor, angiostatin (Stathakis, P. et al. (1997) J. Biol. Chem. 272:20641-20645). Low levels of reduced sulfhydryl groups in plasma has been associated with rheumatoid arthritis. The failure of these sulfhydryl groups to scavenge active oxygen species (e.g., hydrogen peroxide produced by activated neutrophils) results in oxidative damage to surrounding tissues and the resulting inflammation (Hall, N. D. et al. (1994) Rheumatol. Int. 4:35-38).

[0442] Another example of the importance of redox reactions in cell metabolism is the degradation of saturated and unsaturated fatty acids by mitochondrial and peroxisomal beta-oxidation enzymes which sequentially remove two-carbon units from Coenzyme A (CoA)-activated fatty acids. The main beta-oxidation pathway degrades both saturated and unsaturated fatty acids while the auxiliary pathway performs additional steps required for the degradation of unsaturated fatty acids.

[0443] The pathways of mitchondrial and peroxisomal beta-oxidation use similar enzymes, but have different substrate specificities and functions. Mitochondria oxidize short-, medium-, and long-chain fatty acids to produce energy for cells. Mitochondrial beta-oxidation is a major energy source for cardiac and skeletal muscle. In liver, it provides ketone bodies to the peripheral circulation when glucose levels are low as in starvation, endurance exercise, and diabetes (Eaton, S. et al. (1996) Biochem. J. 320:345-357). Peroxisomes oxidize medium-, long-, and very-long-chain fatty acids, dicarboxylic fatty acids, branched fatty acids, prostaglandins, xenobiotics, and bile acid intermediates. The chief roles of peroxisomal beta-oxidation are to shorten toxic lipophilic carboxylic acids to facilitate their excretion and to shorten very-long-chain fatty acids prior to mitochondrial beta-oxidation (Mannaerts, G. P. and P. P. Van Veldhoven (1993) Biochimie 75:147-158).

[0444] The auxiliary beta-oxidation enzyme 2,4-dienoyl-CoA reductase catalyzes the following reaction:

[0445] trans-2, cis/trans-4-dienoyl-CoA+NADPH+H⁺→trans-3-enoyl-CoA+NA-DP⁺

[0446] This reaction removes even-numbered double bonds from unsaturated fatty acids prior to their entry into the main beta-oxidation pathway (Koivuranta, K. T. et al. (1994) Biochem. J. 304:787-792). The enzyme may also remove odd-numbered double bonds from unsaturated fatty acids (Smeland, T. E. et al. (1992) Proc. Natl. Acad. Sci. USA 89:6673-6677).

[0447] Rat 2,4-dienoyl-CoA reductase is located in both mitochondria and peroxisomes (Dommes, V. et al. (1981) J. Biol. Chem. 256:8259-8262). Two immunologically different forms of rat mitochondrial enzyme exist with molecular masses of 60 kDa and 120 kDa (Hakkola, E. H. and J. K. Hiltunen (1993) Eur. J. Biochem. 215:199-204). The 120 kDa mitochondrial rat enzyme is synthesized as a 335 amino acid precursor with a 29 amino acid N-terminal leader peptide which is cleaved to form the mature enzyme (Hirose, A. et al. (1990) Biochim. Biophys. Acta 1049:346-349). A human mitochondrial enzyme 83% similar to rat enzyme is synthesized as a 335 amino acid residue precursor with a 19 amino acid N-terminal leader peptide (Koivuranta et al., supra). These cloned human and rat mitochondrial enzymes function as homotetramers (Koivuranta et al., supra). A Saccharomyces cerevisiae peroxisomal 2,4-dienoyl-CoA reductase is 295 amino acids long, contains a C-terminal peroxisomal targeting signal, and functions as a homodimer (Coe, J. G. S. et al. (1994) Mol. Gen. Genet. 244:661-672; and Gurvitz, A. et al. (1997) J. Biol. Chem. 272:22140-22147). All 2,4-dienoyl-CoA reductases have a fairly well conserved NADPH binding site motif (Koivuranta et al., supra).

[0448] The main pathway beta-oxidation enzyme enoyl-CoA hydratase catalyzes the reaction:

2-trans-enoyl-CoA+H₂O3-hydroxyacyl-CoA

[0449] This reaction hydrates the double bond between C-2 and C-3 of 2-trans-enoyl-CoA, which is generated from saturated and unsaturated fatty acids (Engel, C. K. et al. (1996) EMBO J. 15:5135-5145). This step is downstream from the step catalyzed by 2,4dienoyl-reductase. Different enoyl-CoA hydratases act on short-, medium-, and long-chain fatty acids (Eaton et al., supra). Mitochondrial and peroxisomal enoyl-CoA hydratases occur as both mono-functional enzymes and as part of multi-functional enzyme complexes. Human liver mitochondrial short-chain enoyl-CoA hydratase is synthesized as a 290 amino acid precursor with a 29 amino acid N-terminal leader peptide (Kanazawa, M. et al. (1993) Enzyme Protein 47:9-13; and Janssen, U. et al. (1997) Genomics 40:470-475). Rat short-chain enoyl-CoA hydratase is 87% identical to the human sequence in the mature region of the protein and functions as a to homohexamer (Kanazawa et al., supra; and Engel et al., supra). A mitochondrial trifunctional protein exists that has long-chain enoyl-CoA hydratase, 3-hydroxyacyl-CoA dehydrogenase, and long-chain 3-oxothiolase activities (Eaton et al., supra). In human peroxisomes, enoyl-CoA hydratase activity is found in both a 327 amino acid residue mono-functional enzyme and as part of a multi-functional enzyme, also known as bifunctional enzyme, which possesses enoyl-CoA hydratase, enoyl-CoA isomerase, and 3-hydroxyacyl-CoA hydrogenase activities (FitzPatrick, D. R. et al. (1995) Genomics 27:457-466; and Hoefler, G. et al. (1994) Genomics 19:60-67). A 339 amino acid residue human protein with short-chain enoyl-CoA hydratase activity also acts as an AU-specific RNA binding protein (Nakagawa, J. et al. (1995) Proc. Natl. Acad. Sci. USA 92:2051-2055). All enoyl-CoA hydratases share homology near two active site glutamic acid residues, with 17 amino acid residues that are highly conserved (Wu, W.-J. et al. (1997) Biochemistry 36:2211-2220).

[0450] Inherited deficiencies in mitochondrial and peroxisomal beta-oxidation enzymes are associated with severe diseases, some of which manifest soon after birth and lead to death within a few years. Mitochondrial beta-oxidation associated deficiencies include, e.g., carnitine palmitoyl transferase and carnitine deficiency, very-long-chain acyl-CoA dehydrogenase deficiency, medium-chain acyl-CoA dehydrogenase deficiency, short-chain acyl-CoA dehydrogenase deficiency, electron transport flavoprotein and electron transport flavoprotein:ubiquinone oxidoreductase deficiency, trifunctional protein deficiency, and short-chain 3-hydroxyacyl-CoA dehydrogenase deficiency (Eaton et al., supra). Mitochondrial trifunctional protein (including enoyl-CoA hydratase) deficient patients have reduced long-chain enoyl-CoA hydratase activities and suffer from non-ketotic hypoglycemia, sudden infant death syndrome, cardiomyopathy, hepatic dysfunction, and muscle weakness, and may die at an early age (Eaton et al., supra).

[0451] Defects in mitochondrial beta-oxidation are associated with Reye's syndrome, a disease characterized by hepatic dysfunction and encephalopathy that sometimes follows viral infection in children. Reye's syndrome patients may have elevated serum levels of free fatty acids (Cotran, R. S. et al. (1994) Robbins Pathologic Basis of Disease, W.B. Saunders Co., Philadelphia Pa., p. 866). Patients with mitochondrial short-chain 3-hydroxyacyl-CoA dehydrogenase deficiency and medium-chain 3-hydroxyacyl-CoA dehydrogenase deficiency also exhibit Reye-like illnesses (Eaton et al., supra; and Egidio, R. J. et al. (1989) Am. Fam. Physician 39:221-226).

[0452] Inherited conditions associated with peroxisomal beta-oxidation include Zellweger syndrome, neonatal adrenoleukodystrophy, infantile Refsum's disease, acyl-CoA oxidase deficiency, peroxisomal thiolase deficiency, and bifunctional protein deficiency (Suzuki, Y. et al. (1994) Am. J. Hum. Genet. 54:36-43; Hoefler et al., supra). Patients with peroxisomal bifunctional enzyme deficiency, including that of enoyl-CoA hydratase, suffer from hypotonia, seizures, psychomotor defects, and defective neuronal migration; accumulate very-long-chain fatty acids; and typically die within a few years of birth (Watkins, P. A. et al. (1989) J. Clin. Invest. 83:771-777).

[0453] Peroxisomal beta-oxidation is impaired in cancerous tissue. Although neoplastic human breast epithelial cells have the same number of peroxisomes as do normal cells, fatty acyl-CoA oxidase activity is lower than in control tissue (el Bouhtoury, F. et al. (1992) J. Pathol. 166:27-35). Human colon carcinomas have fewer peroxisomes than normal colon tissue and have lower fatty-acyl-CoA oxidase and bifunctional enzyme (including enoyl-CoA hydratase) activities than normal tissue (Cable, S. et al. (1992) Virchows Arch. B Cell Pathol. Incl. Mol. Pathol. 62:221-226).

[0454] 6-phosphogluconate dehydrogenase (6-PGDH) catalyses the NADP⁺-dependent oxidative decarboxylation of 6-phosphogluconate to ribulose 5-phosphate with the production of NADPH. The absence or inhibition of 6-PGDH results in the accumulation of 6-phosphogluconate to toxic levels in eukaryotic cells. 6-PGDH is the third enzyme of the pentose phosphate pathway (PPP) and is ubiquitous in nature. In some heterofermentatative species, NAD+ is used as a cofactor with the subsequent production of NADH.

[0455] The reaction proceeds through a 3-keto intermediate which is decarboxylated to give the enol of ribulose 5-phosphate, then converted to the keto product following tautomerization of the enol (Berdis A. J. and P. F. Cook (1993) Biochemistry 32:2041-2046). 6-PGDH activity is regulated by the inhibitory effect of NADPH, and the activating effect of 6-phosphogluconate (Rippa, M. et al. (1998) Biochim. Biophys. Acta 1429:83-92). Deficiencies in 6-PGDH activity have been linked to chronic hemolytic anemia.

[0456] The targeting of specific forms of 6-PGDH (e.g., enzymes found in trypanosomes) has been suggested as a means for controlling parasitic infections (Tetaud, E. et al. (1999) Biochem. J. 338:55-60). For example, the Trypanosoma brucei enzyme is markedly more sensitive to inhibition by the substrate analogue 6-phospho-2-deoxygluconate and the coenzyme analogue adenosine 2′,5′-bisphosphate, compared to the mammalian enzyme (Hanau, S. et al. (1996) Eur. J. Biochem. 240:592-599).

[0457] Ribonucleotide diphosphate reductase catalyzes the reduction of ribonucleotide diphosphates (i.e., ADP, GDP, CDP, and UDP) to their corresponding deoxyribonucleotide diphosphates (i.e., dADP, dGDP, dCDP, and dUDP) which are used for the synthesis of DNA. Ribonucleotide diphosphate reductase thereby performs a crucial role in the de novo synthesis of deoxynucleotide precursors. Deoxynucleotides are also produced from deoxynucleosides by nucleoside kinases via the salvage pathway.

[0458] Mammalian ribonucleotide diphosphate reductase comprises two components, an effector-binding component (E) and a non-heme iron component (F). Component E binds the nucleoside triphosphate effectors while component F contains the iron radical necessary for catalysis. Molecular weight determinations of the E and F components, as well as the holoenzyme, vary according to the methods used in purification of the proteins and the particular laboratory. Component E is approximately 90-100 kDa, component F is approximately 100-120 kDa, and the holoenzyme is 200-250 kDa.

[0459] Ribonucleotide diphosphate reductase activity is adversely effected by iron chelators, such as thiosemicarbazones, as well as EDTA. Deoxyribonucleotide diphosphates also appear to be negative allosteric effectors of ribonucleotide diphosphate reductase. Nucleotide triphosphates (both ribo- and deoxyribo-) appear to stimulate the activity of the enzyme. 3-methyl-4-nitrophenol, a metabolite of widely used organophosphate pesticides, is a potent inhibitor of ribonucleotide diphosphate reductase in mammalian cells. Some evidence suggests that ribonucleotide diphosphate reductase activity in DNA virus (e.g., herpes virus)-infected cells and in cancer cells is less sensitive to regulation by allosteric regulators and a correlation exists between high ribonucleotide diphosphate reductase activity levels and high rates of cell proliferation (e.g., in hepatomas). This observation suggests that virus-encoded ribonucleotide diphosphate reductases, and those present in cancer cells, are capable of maintaining an increased supply deoxyribonucleotide pool for the production of virus genomes or for the increased DNA synthesis which characterizes cancers cells. Ribonucleotide diphosphate reductase is thus a target for therapeutic intervention (Nutter, L. M. and Y.-C. Cheng (1984) Pharmac. Ther. 26:191-207; and Wright, J. A. (1983) Pharmac. Ther. 22:81-102).

[0460] Dihydrodiol dehydrogenases (DD) are monomeric, NAD(P)⁺-dependent, 34-37 kDa enzymes responsible for the detoxification of trans-dihydrodiol and anti-diol epoxide metabolites of polycyclic aromatic hydrocarbons (PAH) such as benzo[α]yrene, benz[α]anthracene, 7-methyl-benz[α]anthracene, 7,12-dimethyl-benz[α]anthracene, chrysene, and 5-methyl-chrysene. In mammalian cells, an environmental PAH toxin such as benzo[α]yrene is initially epoxidated by a microsomal cytochrome P450 to yield 7R,8R-arene-oxide and subsequently (−)-7R,8R-dihydrodiol ((−)-trans-7,8-dihydroxy-7,8-dihydrobenzo[α]pyrene or (−)-trans-B [α]P-diol) This latter compound is further transformed to the anti-diol epoxide of benzo[α]pyrene (i.e., (.+−.)-anti-7β,8α-dihydroxy-9α,10α-epoxy-7,8,9,10-tetrahydrobenzol[α]pyrene), by the same enzyme or a different enzyme, depending on the species. This resulting anti-diol epoxide of benzo[α]yrene, or the corresponding derivative from another PAH compound, is highly mutagenic. DD efficiently oxidizes the precursor of the anti-diol epoxide (i.e., trans-dihydrodiol) to transient catechols which auto-oxidize to quinones, also producing hydrogen peroxide and semiquinone radicals. This reaction prevents the formation of the highly carcinogenic anti-diol. Anti-diols are not themselves substrates for DD yet the addition of DD to a sample comprising an anti-diol compound results in a significant decrease in the induced mutation rate observed in the Ames test. In this instance, DD is able to bind to and sequester the anti-diol, even though it is not oxidized. Whether through oxidation or sequestration, DD plays an important role in the detoxification of metabolites of xenobiotic polycyclic compounds (Penning, T. M. (1993) Chemico-Biological Interactions 89:1-34).

[0461] 15-oxoprostaglandin 13-reductase (PGR) and 15-hydroxyprostaglandin dehydrogenase (15-PGDH) are enzymes present in the lung that are responsible for degrading circulating prostaglandins. Oxidative catabolism via passage through the pulmonary system is a common means of reducing the concentration of circulating prostaglandins. 15-PGDH oxidizes the 15-hydroxyl group of a variety of prostaglandins to produce the corresponding 15-oxo compounds. The 15-oxo derivatives usually have reduced biological activity compared to the 15-hydroxyl molecule. PGR further reduces the 13,14 double bond of the 15-oxo compound which typically leads to a further decrease in biological activity. PGR is a monomer with a molecular weight of approximately 36 kDa. The enzyme requires NADH or NADPH as a cofactor with a preference for NADH. The 15-oxo derivatives of prostaglandins PGE₁, PGE₂, and PGE₂a, are all substrates for PGR; however, the non-derivatized prostaglandins (i.e., PGE₁, PG₂, and PGE₂α) are not substrates (Ensor, C. M. et al. (1998) Biochem. J. 330:103-108).

[0462] 15-PGDH and PGR also catalyze the metabolism of lipoxin A₂ (LXA₄). Lipoxins (LX) are autacoids, lipids produced at the sites of localized inflammation, which down-regulate polymorphonuclear leukocyte (PMN) function and promote resolution of localized trauma. Lipoxin production is stimulated by the administration of aspirin in that cells displaying cyclooxygenase II (COX II) that has been acetylated by aspirin and cells that possess 5-lipoxygenase (5-LO) interact and produce lipoxin. 15-PGDH generates 15-oxo-LXA₄ with PGR further converting the 15-oxo compound to 13,14-dihydro-15-oxo-LXA₄ (Clish, C. B. et al. (2000) J. Biol. Chem. 275:25372-25380). This finding suggests a broad substrate specificity of the prostaglandin dehydrogenases and has implications for these enzymes in drug metabolism and as targets for therapeutic intervention to regulate inflammation.

[0463] The GMC (glucose-methanol-choline) oxidoreductase family of enzymes was defined based on sequence alignments of Drosophila melanogaster glucose dehydrogenase, Escherichia coli choline dehydrogenase, Aspergillus niger glucose oxidase, and Hansenula polymorpha methanol oxidase. Despite their different sources and substrate specificities, these four flavoproteins are homologous, being characterized by the presence of several distinctive sequence and structural features. Each molecule contains a canonical ADP-binding, beta-alpha-beta mononucleotide-binding motif close to the amino terminus. This fold comprises a four-stranded parallel beta-sheet sandwiched between a three-stranded antiparallel beta-sheet and alpha-helices. Nucleotides bind in similar positions relative to this chain fold (Cavener, D. R. (1992) J. Mol. Biol. 223:811-814; Wierenga, R. K. et al. (1986) J. Mol. Biol. 187:101-107). Members of the GMC oxidoreductase family also share a consensus sequence near the central region of the polypeptide. Additional members of the GMC oxidoreductase family include cholesterol oxidases from Brevibacterium sterolicum and Streptomyces; and an alcohol dehydrogenase from Pseudomonas oleovorans (Cavener, supra; Henikoff, S, and J. G. Henikoff (1994) Genomics 19:97-107; van Beilen, J. B. et al. (1992) Mol. Microbiol. 6:3121-3136).

[0464] IMP dehydrogenase and GMP reductase are two oxidoreductases which share many regions of sequence similarity. IMP dehydrogenase (EC 1.1.1.205) catalyes the NAD-dependent reduction of IMP (inosine monophosphate) into XMP (xanthine monophosphate) as part of de novo GTP biosynthesis (Collart, F. R. and E. Huberman (1988) J. Biol. Chem. 263:15769-15772). GMP reductase catalyzes the NADPH-dependent reductive deamination of GMP into IMP, helping to maintain the intracellular balance of adenine and guanine nucleotides (Andrews, S.C. and J. R. Guest (1988) Biochem. J. 255:35-43).

[0465] Pyridine nucleotide-disulphide oxidoreductases are FAD flavoproteins involved in the transfer of reducing equivalents from FAD to a substrate. These flavoproteins contain a pair of redox-active cysteines contained within a consensus sequence which is characteristic of this protein family (Kurlyan, J. et al. (1991) Nature 352:172-174). Members of this family of oxidoreductases include glutathione reductase (C 1.6.4.2); thioredoxin reductase of higher eukaryotes (EC 1.6.4.5); trypanothione reductase (EC 1.6.4.8); lipoamide dehydrogenase (EC 1.8.1.4), the E3 component of alpha-ketoacid dehydrogenase complexes; and mercuric reductase (EC 1.16.1.1).

### Transferases

[0466] Transferases are enzymes that catalyze the transfer of molecular groups. The reaction may involve an oxidation, reduction, or cleavage of covalent bonds, and is often specific to a substrate or to particular sites on a type of substrate. Transferases participate in reactions essential to such functions as synthesis and degradation of cell components, and regulation of cell functions including cell signaling, cell proliferation, inflammation, apoptosis, secretion and excretion. Transferases are involved in key steps in disease processes involving these functions. Transferases are frequently classified according to the type of group transferred. For example, methyl transferases transfer one-carbon methyl groups, amino transferases transfer nitrogenous amino groups, and similarly denominated enzymes transfer aldehyde or ketone, acyl, glycosyl, alkyl or aryl, isoprenyl, saccharyl, phosphorous-containing, sulfur-containing, or selenium-containing groups, as well as small enzymatic groups such as Coenzyme A.

[0467] Acyl transferases include peroxisomal carnitine octanoyl transferase, which is involved in the fatty acid beta-oxidation pathway, and mitochondrial carnitine palmitoyl transferases, involved in fatty acid metabolism and transport. Choline O-acetyl transferase catalyzes the biosynthesis of the neurotransmitter acetylcholine. N-acyltransferase enzymes catalyze the transfer of an amino acid conjugate to an activated carboxylic group. Endogenous compounds and xenobiotics are activated by acyl-CoA synthetases in the cytosol, microsomes, and mitochondria. The acyl-CoA intermediates are then conjugated with an amino acid (typically glycine, glutamine, or taurine, but also ornithine, arginine, histidine, serine, aspartic acid, and several dipeptides) by N-acyltransferases in the cytosol or mitochondria to form a metabolite with an amide bond. One well-characterized enzyme of this class is the bile acid-CoA:amino acid N-acyltransferase (BAT) responsible for generating the bile acid conjugates which serve as detergents in the gastrointestinal tract (Falany, C. N. et al. (1994) J. Biol. Chem. 269:19375-19379; Johnson, M. R. et al. (1991) J. Biol. Chem. 266:10227-10233). BAT is also useful as a predictive indicator for prognosis of hepatocellular carcinoma patients after partial hepatectomy (Furutani, M. et al. (1996) Hepatology 24:1441-1445).

### Acetyltransferases

[0468] Acetyltransferases have been extensively studied for their role in histone acetylation. Histone acetylation results in the relaxing of the chromatin structure in eukaryotic cells, allowing transcription factors to gain access to promoter elements of the DNA templates in the affected region of the genome (or the genome in general). In contrast, histone deacetylation results in a reduction in transcription by closing the chromatin structure and limiting access of transcription factors. To this end, a common means of stimulating cell transcription is the use of chemical agents that inhibit the deacetylation of histones (e.g., sodium butyrate), resulting in a global (albeit artifactual) increase in gene expression. The modulation of gene expression by acetylation also results from the acetylation of other proteins, including but not limited to, p53, GATA-1, MyoD, ACTR, TFIIE, TFIIF and the high mobility group proteins (HMG). In the case of p53, acetylation results in increased DNA binding, leading to the stimulation of transcription of genes regulated by p53. The prototypic histone acetylase (HAT) is Gcn5 from Saccharomyces cerevisiae. Gcn5 is a member of a family of acetylases that includes Tetrahymena p55, human Gcn5, and human p300/CBP. Histone acetylation is reviewed in (Cheung, W. L. et al. (2000) Curr. Opin. Cell Biol. 12:326-333 and Berger, S. L. (1999) Curr. Opin. Cell Biol. 11:336-341). Some acetyltransferase enzymes possess the alpha/beta hydrolase fold (Center of Applied Molecular Engineering Inst. of Chemistry and Biochemistry—University of Salzburg, http://predict.sanger.ac.uk/irbm-co-urse97/Docs/ms/) common to several other major classes of enzymes, including but not limited to, acetylcholinesterases and carboxylesterases (Structural Classification of Proteins, http:flscop.mrc-1mb.cam.ac.u1c/sco-p/index.html).

[0469] N-acetyltransferases are cytosolic enzymes which utilize the cofactor acetyl-coenzyme A (acetyl-CoA) to transfer the acetyl group to aromatic amines and hydrazine containing compounds. In humans, there are two highly similar N-acetyltransferase enzymes, NAT1 and NAT2; mice appear to have a third form of the enzyme, NAT3. The human forms of N-acetyltransferase have independent regulation (NAT1 is widely-expressed, whereas NAT2 is in liver and gut only) and overlapping substrate preferences. Both enzymes appear to accept most substrates to some extent, but NAT1 does prefer some substrates (para-aminobenzoic acid, para-aminosalicylic acid, sulfamethoxazole, and sulfanilamide), while NAT2 prefers others (isoniazid, hydralazine, procainamide, dapsone, aminoglutethimide, and sulfamethazine). A recently isolated human gene, tubedown-1, is homologous to the yeast NAT-1 N-acetyltransferases and encodes a protein associated with acetyltransferase activity. The expression patterns of tubedown-1 suggest that it may be involved in regulating vascular and hematopoietic development (Gendron, R. L. et al. (2000) Dev. Dyn. 218:300-315).

[0470] Amino transferases comprise a family of pyridoxal 5′-phosphate (PLP)-dependent enzymes that catalyze transformations of amino acids. Amino transferases play key roles in protein synthesis and degradation, and they contribute to other processes as well. For example, GABA aminotransferase (GABA-T) catalyzes the degradation of GABA, the major inhibitory amino acid neurotransmitter. The activity of GABA-T is correlated to neuropsychiatric disorders such as alcoholism, epilepsy, and Alzheimer's disease (Sherif, F. M. and S. S. Ahmed (1995) Clin. Biochem. 28:145-154). Other members of the family include pyruvate aminotransferase, branched-chain amino acid aminotransferase, tyrosine aminotransferase, aromatic aminotransferase, alanine:glyoxylate aminotransferase (AGT), and kynurenine aminotransferase (Vacca, R. A. et al. (1997) J. Biol. Chem. 272:21932-21937). Kynurenine aminotransferase catalyzes the irreversible transamination of the L-tryptophan metabolite L-kynurenine to form kynurenic acid. The enzyme may also catalyzes the reversible transamination reaction between L-2-aminoadipate and 2-oxoglutarate to produce 2-oxoadipate and L-glutamate. Kynurenic acid is a putative modulator of glutamatergic neurotransmission, thus a deficiency in kynurenine aminotransferase may be associated with pleiotropic effects (Buchli, R. et al. (1995) J. Biol. Chem. 270:29330-29335).

[0471] Glycosyl transferases include the mammalian UDP-glucouronosyl transferases, a family of membrane-bound microsomal enzymes catalyzing the transfer of glucouronic acid to lipophilic substrates in reactions that play important roles in detoxification and excretion of drugs, carcinogens, and other foreign substances. Another mammalian glycosyl transferase, mammalian UDP-galactose-ceramide galactosyl transferase, catalyzes the transfer of galactose to ceramide in the synthesis of galactocerebrosides in myelin membranes of the nervous system. The UDP-glycosyl transferases share a conserved signature domain of about 50 amino acid residues (PROSITE: PD0000359, http://expasy.hcuge.ch/sprot/pro-site.html).

[0472] Methyl transferases are involved in a variety of pharmacologically important processes. Nicotinamide N-methyl transferase catalyzes the N-methylation of nicotinamides and other pyridines, an important step in the cellular handling of drugs and other foreign compounds. Phenylethanolamine N-methyl transferase catalyzes the conversion of noradrenalin to adrenalin. 6-O-methylguanine-DNA methyl transferase reverses DNA methylation, an important step in carcinogenesis. Uroporphyrin-III C-methyl transferase, which catalyzes the transfer of two methyl groups from S-adenosyl-L-methionine to uroporphyrinogen III, is the first specific enzyme in the biosynthesis of cobalamin, a dietary enzyme whose uptake is deficient in pernicious anemia. Protein-arginine methyl transferases catalyze the posttranslational methylation of arginine residues in proteins, resulting in the mono- and dimethylation of arginine on the guanidino group. Substrates include histones, myelin basic protein, and heterogeneous nuclear ribonucleoproteins involved in mRNA processing, splicing, and transport. Protein-arginine methyl transferase interacts with proteins upregulated by mitogens, with proteins involved in chronic lymphocytic leukemia, and with interferon, suggesting an important role for methylation in cytokine receptor signaling (Lin, W.-J. et al. (1996) J. Biol. Chem. 271:15034-15044; Abramovich, C. et al. (1997) EMBO J. 16:260-266; and Scott, H. S. et al. (1998) Genomics 48:330-340).

[0473] Phospho transferases catalyze the transfer of high-energy phosphate groups and are important in energy-requiring and -releasing reactions. The metabolic enzyme creatine kinase catalyzes the reversible phosphate transfer between creatine/creatine phosphate and ATP/ADP. Glycocyamine kinase catalyzes phosphate transfer from ATP to guanidoacetate, and arginine kinase catalyzes phosphate transfer from ATP to arginine. A cysteine-containing active site is conserved in this family (PROSITE: PD0000103).

[0474] Prenyl transferases are heterodimers, consisting of an alpha and a beta subunit, that catalyze the transfer of an isoprenyl group. The Ras farnesyltransferase (FTase) enzyme transfers a farnesyl moiety from cytosolic farnesylpyrophosphate to a cysteine residue at the carboxyl terminus of the Ras oncogene protein. This modification is required to anchor Ras to the cell membrane so that it can perform its role in signal transduction. FTase inhibitors block Ras function and demonstrate antitumor activity (Buolamwini, J. K. (1999) Curr. Opin. Chem. Biol. 3:500-509). Ftase, which shares structural similarity with geranylgeranyl transferase, or Rab GG transferase, prenylates Rab proteins, allowing them to perform their roles in regulating vesicle transport (Seabra, M. C. (1996) J. Biol. Chem. 271:14398-14404).

[0475] Saccharyl transferases are glycating enzymes involved in a variety of metabolic processes. Oligosaccharyl transferase-48, for example, is a receptor for advanced glycation endproducts, which accumulate in vascular complications of diabetes, macrovascular disease, renal insufficiency, and Alzheimer's disease (Thornalley, P. J. (1998) Cell Mol. Biol. (Noisy-Le-Grand) 44:1013-1023).

[0476] Coenzyme A (CoA) transferase catalyzes the transfer of CoA between two carboxylic acids. Succinyl CoA:3-oxoacid CoA transferase, for example, transfers CoA from succinyl-CoA to a recipient such as acetoacetate. Acetoacetate is essential to the metabolism of ketone bodies, which accumulate in tissues affected by metabolic disorders such as diabetes (PROSITE: PD0000980).

[0477] Transglutaminase transferases (Tgases) are Ca²⁺ dependent enzymes capable of forming isopeptide bonds by catalyzing the transfer of the γ-carboxy group from protein-bound glutamine to the .epsilon.-amino group of protein-bound lysine residues or other primary amines. Tgases are the enzymes responsible for the cross-lining of cornified envelope (CE), the highly insoluble protein structure on the surface of corneocytes, into a chemically and mechanically resistant protein polymer. Seven known human Tgases have been identified. Individual transglutaminase gene products are specialized in the cross-linking of specific proteins or tissue structures, such as factor XIIIa which stabilizes the fibrin clot in hemostasis, prostrate transglutaminase which functions in semen coagulation, and tissue transglutaminase which is involved in GTP-binding in receptor signaling. Four (Tgases 1, 2, 3, and X) are expressed in terminally differentiating epithelia such as the epidermis. Tgases are critical for the proper cross-inking of the CE as seen in the pathology of patients suffering from one form of the skin diseases referred to as congenital ichthyosis which has been linked to mutations in the keratinocyte transglutaminase (TG_{K}) gene (Nemes, Z. et al. (1999) Proc. Natl. Acad. Sci. U.S.A. 96:8402-8407, Aeschlimann, D. et al. (1998) J. Biol. Chem. 273:3452-3460.)

### Hydrolases

[0478] Hydrolases are a class of enzymes that catalyze the cleavage of various covalent bonds in a substrate by the introduction of a molecule of water. The reaction involves a nucleophilic attack by the water molecule's oxygen atom on a target bond in the substrate. The water molecule is split across the target bond, breaking the bond and generating two product molecules. Hydrolases participate in reactions essential to such functions as synthesis and degradation of cell components, and for regulation of cell functions including cell signaling, cell proliferation, inflammation, apoptosis, secretion and excretion. Hydrolases are involved in key steps in disease processes involving these functions. Hydrolytic enzymes, or hydrolases, may be grouped by substrate specificity into classes including phosphatases, peptidases, lysophospholipases, phosphodiesterases, glycosidases, glyoxalases, aminohydrolases, carboxylesterases, sulfatases, phosphohydrolases, nucleotidases, lysozymes, and many others.

[0479] Phosphatases hydrolytically remove phosphate groups from proteins, an energy-providing step that regulates many cellular processes, including intracellular signaling pathways that in turn control cell growth and differentiation, cell-cell contact, the cell cycle, and oncogenesis.

[0480] Peptidases, also called proteases, cleave peptide bonds that form the backbone of peptide or protein chains. Proteolytic processing is essential to cell growth, differentiation, remodeling, and homeostasis as well as inflammation and the immune response. Since typical protein half-lives range from hours to a few days, peptidases are continually cleaving precursor proteins to their active form, removing signal sequences from targeted proteins, and degrading aged or defective proteins. Peptidases function in bacterial, parasitic, and viral invasion and replication within a host. Examples of peptidases include trypsin and chymotrypsin (components of the complement cascade and the blood-clotting cascade) lysosomal cathepsins, calpains, pepsin, renin, and chymosin (Beynon, R. J. and J. S. Bond (1994) Proteolytic Enzymes: A Practical Approach, Oxford University Press, New York, N.Y., pp. 1-5). Lysophospholipases (LPLs) regulate intracellular lipids by catalyzing the hydrolysis of ester bonds to remove an acyl group, a key step in lipid degradation. Small LPL isoforms, approximately 15-30 kD, function as hydrolases; larger isoforms function both as hydrolases and transacylases. A particular substrate for LPLs, lysophosphatidylcholine, causes lysis of cell membranes. LPL activity is regulated by signaling molecules important in numerous pathways, including the inflammatory response.

[0481] The phosphodiesterases catalyze the hydrolysis of one of the two ester bonds in a phosphodiester compound. Phosphodiesterases are therefore crucial to a variety of cellular processes. Phosphodiesterases include DNA and RNA endo- and exo-nucleases, which are essential to cell growth and replication as well as protein synthesis. Endonuclease V (deoxyinosine 3′-endonuclease) is an example of a type II site-specific deoxyribonuclease, a putative DNA repair enzyme that cleaves DNAs containing hypoxanthine, uracil, or mismatched bases. Escherichia coli endonuclease V has been shown to cleave DNA containing deoxyxanthosine at the second phosphodiester bond 3′ to deoxyxanthosine, generating a 3′-hydroxyl and a 5′-phosphoryl group at the nick site (He, B. et al. (2000) Mutat. Res. 459:109-114). It has been suggested that Escherichia coli endonuclease V plays a role in the removal of deaminated guanine, i.e., xanthine, from DNA, thus helping to protect the cell against the mutagenic effects of nitrosative deamination (Schouten, K. A. and B. Weiss (1999) Mutat. Res. 435:245-254). In eukaryotes, the process of tRNA splicing requires the removal of small tRNA introns that interrupt the anticodon loop 1 base 3′ to the anticodon. This process requires the stepwise action of an endonuclease, a ligase, and a phosphotransferase (Hong, L. et al. (1998) Science 280:279-284). Ribonuclease P (RNase P) is a ubiquitous RNA processing endonuclease that is required for generating the mature tRNA 5′-end during the tRNA splicing process. This is accomplished through the catalysis of the cleavage of P-3′O bonds to produce 5′-phosphate and 3′-hydroxyl end groups at a specific site on pre-tRNA. Catalysis by RNase P is absolutely dependent on divalent cations such as Mg²⁺ or Mn²⁺ (Kurz, J. C. et al. (2000) Curr. Opin. Chem. Biol. 4:553-558). Substrate recognition mechanisms of RNase P are well conserved among eukaryotes and bacteria (Fan enzymei, S. et al. (1998) Science 280:284-286). In Saccharomyces cerevisiae, POP1 (‘processing of precursor RNAs’) encodes a protein component of both RNase P and RNase MRP, another RNA processing protein. Mutations in yeast POP1 are lethal (Lygerou, Z. et al. (1994) Genes Dev. 8:1423-1433). Another phosphodiesterase, acid sphingomyelinase, hydrolyzes the membrane phospholipid sphingomyelin to ceramide and phosphorylcholine. Phosphorylcholine functions in synthesis of phosphatidylcholine, which is involved in intracellular signaling pathways. Ceramide is an essential precursor for the generation of gangliosides, membrane lipids found in high concentration in neural tissue. Defective acid sphingomyelinase phosphodiesterase leads to Niemann-Pick disease.

[0482] Glycosidases catalyze the cleavage of hemiacetyl bonds of glycosides, which are compounds that contain one or more sugar. Mammalian lactase-phlorizin hydrolase, for example, is an intestinal enzyme that splits lactose. Mammalian beta-galactosidase removes the terminal galactose from gangliosides, glycoproteins, and glycosaminoglycans, and deficiency of this enzyme is associated with a gangliosidosis known as Morquio disease type B (PROSITE PCD0000910). Vertebrate lysosomal alpha-glucosidase, which hydrolyzes glycogen, maltose, and isomaltose, and vertebrate intestinal sucrase-isomaltase, which hydrolyzes sucrose, maltose, and isomaltose, are widely distributed members of this family with highly conserved sequences at their active sites.

[0483] The glyoxylase system is involved in gluconeogenesis, the production of glucose from storage compounds in the body. It consists of glyoxylase I, which catalyzes the formation of S-D-lactoylglutathione from methyglyoxal, a side product of triose-phosphate energy metabolism, and glyoxylase II, which hydrolyzes S-D-lactoylglutathione to D-lactic acid and reduced glutathione. Glyoxylases are involved in hyperglycemia, non-insulin-dependent diabetes mellitus, the detoxification of bacterial toxins, and in the control of cell proliferation and microtubule assembly. NG,NG-dimethylarginine dimethylaminohydrolase (DDAH) is an enzyme that hydrolyzes the endogenous nitric oxide synthase (NOS) inhibitors, NG-monomethyl-arginine and NG,NG-dimethyl-L-arginine, to L-citrulline. Inhibiting DDAH can cause increased intracellular concentration of NOS inhibitors to levels sufficient to inhibit NOS. Therefore, DDAH inhibition may provide a method of NOS inhibition, and changes in the activity of DDAH could play a role in pathophysiological alterations in nitric oxide generation (MacAllister, R. J. et al. (1996) Br. J. Pharmacol. 119:1533-1540). DDAH was found in neurons displaying cytoskeletal abnormalities and oxidative stress in Alzheimer's disease. In age-matched control cases, DDAH was not found in neurons. This suggests that oxidative stress- and nitric oxide-mediated events play a role in the pathogenesis of Alzheimer's disease (Smith, M. A. et al. (1998) Free Rad. Biol. Med. 25:898-902).

[0484] Acyl-CoA thioesterase is another member of the carboxylesterase family (Alexson, S. E. et al. (1993) Eur. J. Biochem. 214:719-727). Evidence suggests that acyl-CoA thioesterase has a regulatory role in steroidogenic tissues (Finkielstein, C. et al. (1998) Eur. J. Biochem. 256:60-66).

[0485] The alpha/beta hydrolase protein fold is common to several hydrolases of diverse phylogenetic origin and catalytic function. Enzymes with the alpha/beta hydrolase fold have a common core structure consisting of eight beta-sheets connected by alpha-helices. The most conserved structural feature of this fold is the loops of the nucleophile-histidine-acid catalytic triad. The histidine in the catalytic triad is completely conserved, while the nucleophile and acid loops accommodate more than one type of amino acid (Ollis, D. L. et al. (1992) Protein Eng. 5:197-211).

[0486] Sulfatases are members of a highly conserved gene family that share extensive sequence homology and a high degree of structural similarity. Sulfatases catalyze the cleavage of sulfate esters. To perform this function, sulfatases undergo a unique post-translational modification in the endoplasmic reticulum that involves the oxidation of a conserved cysteine residue. A human disorder called multiple sulfatase deficiency is due to a defect in this post-translational modification step, leading to inactive sulfatases (Recksiek, M. et al. (1998) J. Biol. Chem. 273:6096-6103). Phosphohydrolases are enzymes that hydrolyze phosphate esters. Some phosphohydrolases contain a mutT domain signature sequence. MutT is a protein involved in the GO system responsible for removing an oxidatively damaged form of guanine from DNA. A region of about 40 amino acid residues, found in the N-terminus of mutT, is also found in other proteins, including some phosphohydrolases (PROSITE PD0000695).

[0487] Serine hydrolases are a large functional class of hydrolytic enzymes that contain a serine residue in their active site. This class of enzymes contains proteinases, esterases, and lipases which hydrolyze a variety of substrates and, therefore, have different biological roles. Proteins in this superfamily can be further grouped into subfamilies based on substrate specificity or amino acid similarities (Puente, X. S, and C. Lopez-Otin (1995) J. Biol. Chem. 270:12926-12932).

[0488] Neuropathy target esterase (NTE) is an integral membrane protein present in all neurons and in some non-neural-cell types of vertebrates. NTE is involved in a cell-signaling pathway controlling interactions between neurons and accessory glial cells in the developing nervous system. NTE has serine esterase activity and efficiently catalyses the hydrolysis of phenyl valerate (PV) in vitro, but its physiological substrate is unknown. NTE is not related to either the major serine esterase family, which includes acetylcholinesterase, nor to any other known serine hydrolases. NTE contains at least two functional domains: an N-terminal putative regulatory domain and a C-terminal effector domain which contains the esterase activity and is, in part, conserved in proteins found in bacteria, yeast, nematodes and insects. NTE's effector domain contains three predicted transmembrane segments, and the active-site serine residue lies at the center of one of these segments. The isolated recombinant domain shows PV hydrolase activity only when incorporated into phospholipid liposomes. NTE's esterase activity is largely redundant in adult vertebrates, but organophosphates which react with NTE in vivo initiate unknown events which lead to a neuropathy with degeneration of long axons. These neuropathic organophosphates leave a negatively charged group covalently attached to the active-site serine residue, which causes a toxic gain of function in NTE (Glynn, P. (1999) Biochem. J. 344:625-631). Further, the Drosophila neurodegeneration gene swiss-cheese encodes a neuronal protein involved in glia-neuron interaction and is homologous to the above human NTE (Moser, M. et al. (2000) Mech. Dev. 90:279-282).

[0489] Chitinases are chitin-degrading enzymes present in a variety of organisms and participate in processes including cell wall remodeling, defense and catabolism. Chitinase activity has been found in human serum, leukocytes, granulocytes, and in association with fertilized oocytes in mammals (Escott, G. M. (1995) Infect. Immunol. 63:4770-4773; DeSouza, M. M. (1995) Endocrinology 136:2485-2496). Glycolytic and proteolytic molecules in humans are associated with tissue damage in lung diseases and with increased tumorigenicity and metastatic potential of cancers (Mulligan, M. S. (1993) Proc. Natl. Acad. Sci. 90:11523-11527; Matrisian, L. M. (1991) Am. J. Med. Sci. 302:157-162; Witty, J. P. (1994) Cancer Res. 54:4805-4812). The discovery of a human enzyme with chitinolytic activity is noteworthy given the lack of endogenous chitin in the human body (Raghavan, N. (1994) Infect. Immun. 62:1901-1908). However, there is a group of mammalian proteins that share homology with chitinases from various non-mammalian organisms, such as bacteria, fungi, plants, and insects. The members of this family differ in their ability to hydrolyze chitin or chitin-like substrates. Some of the mammalian members of the family, such as a bovine whey chitotriosidase and human cartilage proteins which do not demonstrate specific chitinolytic activity, are expressed in association with tissue remodeling events (Rejman, J. J. (1988) Biochem. Biophys. Res. Commun. 150:329-334, Nyirkos, P. (1990) Biochem. J. 268:265-268). Elevated levels of human cartilage proteins have been reported in the synovial fluid and cartilage of patients with rheumatoid arthritis, a disease which produces a severe degradation of the cartilage and a proliferation of the synovial membrane in the affected joints (Hakala, B. E. (1993) J. Biol. Chem. 268:25803-25810).

[0490] A small subclass of hydrolases acting on ether bonds includes the thioether hydrolases. S-adenosyl-L-homocysteine hydrolase, also known as AdoHcyase or SAHH(PROSITE PDOC00603; EC 3.3.1.1), is a thioether hydrolase first described in rat liver extracts as the activity responsible for the reversible hydrolysis of S-adenosyl-L-homocysteine (AdoHcy) to adenosine and homocysteine (Sganga, M. W. et al. (1992) PNAS 89:6328-6332). SAHH is a cytosolic enzyme that has been found in all cells that have been tested, with the exception of Escherichia coli and certain related bacteria (Walker, R. D. et al. (1975) Can. J. Biochem. 53:312-319; Shimizu, S. et al. (1988) FEMS Microbiol. Lett. 51:177-180; Shimizu, S. et al. (1984) Eur. J. Biochem. 141:385-392). SAHH activity is dependent on NAD⁺ as a cofactor. Deficiency of SAHH is associated with hypermethioninemia (Online Mendelian Inheritance in Man (OMIM) #180960 Hypermethioninemia), a pathologic condition characterized by neonatal cholestasis, failure to thrive, mental and motor retardation, facial dysmorphism with abnormal hair and teeth, and myocaridopathy (Labrune, P. et al. (1990) J. Pediat. 117:220-226).

[0491] Another subclass of hydrolases includes those enzymes which act on carbon-nitrogen (C—N) bonds other than peptide bonds. To this subclass belong those enzymes hydrolyzing amides, amidines, and other C—N bonds. This subclass is further subdivided on the basis of substrate specificity such as linear amides, cyclic amides, linear amidines, cyclic amidines, nitrites and other compounds. A hydrolase belonging to the sub-subclass of enzymes acting on the cyclic amidines is adenosine deaminase (ADA). ADA catalyzes the breakdown of adenosine to inosine. ADA is present in many mammalian tissues, including placenta, muscle, lung, stomach, digestive diverticulum, spleen, erythrocytes, thymus, seminal plasma, thyroid, T-cells, bone marrow stem cells, and liver. A subclass of ADAs, ADAR, act on RNA and are classified as RNA editases. An ADAR from Drosophila, DADAR, expressed in the developing nervous system, may act on para voltage-gated Na+ channel transcripts in the central nervous system (Palladino, M. J. et al. (2000) RNA 6:1004-1018). ADA deficiency causes profound lymphopenia with severe combined immunodeficiency (SCID). Cells from patients with ADA deficiency contain low, sometimes undetectable, amounts of ADA catalytic activity and ADA protein. ADA deficiency stems from genetic mutations in the ADA gene (Hershfield, M. S. (1998) Semin. Hematol. 4:291-298). Metabolic consequences of ADA deficiency are associated with defects in alveogenesis, pulmonary inflammation, and airway obstruction (Blackburn, M. R. et al. (2000) J. Exp. Med. 192:159-170).

[0492] Pancreatic ribonucleases (RNase) are pyrimidine-specific endonucleases found in high quantity in the pancreas of certain mammalian taxa and of some reptiles (Beinterna, J. J. et al (1988) Prog. Biophys. Mol. Biol. 51:165-192). Proteins in the mammalian pancreatic RNase superfamily are noncytosolic endonucleases that degrade RNA through a two-step transphosphorolytic-hydrolytic reaction (Beinterna, J. J. et al. (1986) Mol. Biol. Evol. 3:262-275). Specifically, the enzymes are involved in endonucleolytic cleavage of 3′-phosphomononucleotides and 3′-phosphooligonucleotides ending in C-P or U-P with 2′,3′-cyclic phosphate intermediates. Ribonucleases can unwind the DNA helix by complexing with single-stranded DNA; the complex arises by an extended multi-site cation-anion interaction between lysine and arginine residues of the enzyme and phosphate groups of the nucleotides. Some of the enzymes belonging to this family appear to play a purely digestive role, whereas others exhibit potent and unusual biological activities (D'Alessio, G. (1993) Trends Cell Biol. 3:106-109). Proteins belonging to the pancreatic RNase family include: bovine seminal vesicle and brain ribonucleases; kidney non-secretory ribonucleases (Beinterna, J. J. et al (1986) FEBS Lett. 194:338-343); liver-type ribonucleases (Rosenberg, H. F. et al. (1989) PNAS U.S.A. 86:4460-4464); angiogenin, which induces vascularisation of normal and malignant tissues; eosinophil cationic protein (Hofsteenge, J. et al. (1989) Biochemistry 28:9806-9813), a cytotoxin and helminthotoxin with ribonuclease activity; and frog liver ribonuclease and frog sialic acid-binding lectin. The sequences of pancreatic RNases contain 4 conserved disulfide bonds and 3 amino acid residues involved in the catalytic activity.

[0493] ADP-ribosylation is a reversible post-translational protein modification in which an ADP-ribose moiety is transferred from β.-NAD to a target amino acid such as arginine or cysteine. ADP-ribosylarginine hydrolases regenerate arginine by removing ADP-ribose from the protein, completing the ADP-ribosylation cycle (Moss, J. et al. (1997) Adv. Exp. Med. Biol. 419:25-33). ADP-ribosylation is a well-known reaction among bacterial toxins. Cholera toxin, for example, disrupts the adenylyl cyclase system by ADP-ribosylating the α-subunit of the stimulatory G-protein, causing an increase in intracellular cAMP (Moss, J. and M. Vaughan (Eds) (1990) ADP-ribosylating Toxins and G-Proteins: Insights into Signal Transduction, American Society for Microbiology, Washington, D.C.). ADP-ribosylation may also have a regulatory function in eukaryotes, affecting such processes as cytoskeletal assembly (Zhou, H. et al. (1996) Arch. Biochem. Biophys. 334:214-222) and cell proliferation in cytotoxic T-cells (Wang, J. et al. (1996) J. Immunol. 156:2819-2827). Nucleotidases catalyze the formation of free nucleosides from nucleotides. The cytosolic nucleotidase cN-I (5′ nucleotidase-I) cloned from pigeon heart catalyzes the formation of adenosine from AMP generated during ATP hydrolysis (Sala-Newby, G. B. et al. (1999) J. Biol. Chem. 274:17789-17793). Increased adenosine concentration is thought to be a signal of metabolic stress, and adenosine receptors mediate effects including vasodilation, decreased stimulatory neuron firing and ischemic preconditioning in the heart (Schrader, J. (1990) Circulation 81:389-391; Rubino, A. et al. (1992) Eur. J. Pharmacol. 220:95-98; de Jong, J. W. et al. (2000) Pharmacol. Ther. 87:141-149). Deficiency of pyrimidine 5′-nucleotidase can result in hereditary hemolytic anemia (OMIM #266120).

The lysozyme c superfamily consists of conventional lysozymes c, calcium-binding lysozymes c, and α-lactalbumin (Prager, E. M. and P. Jolles (1996) EXS 75:9-31). The proteins in this superfamily have 35-40% sequence homology and share a common three-dimensional fold, but can have different functions. Lysozymes c are ubiquitous in a variety of tissues and secretions and can lyse the cell walls of certain bacteria (McKenzie, H. A. (1996) EXS 75:365-409). Alpha-lactalbumin is a metallo-protein that binds calcium and participates in the synthesis of lactose (Iyer, L. K. and P. K. Qasba (1999) Protein Eng. 12:129-139). Alpha-lactalbumin occurs in mammalian milk and colostrum (McKenzie, supra).

[0494] Lysozymes catalyze the hydrolysis of certain mucopolysaccharides of bacterial cell walls, specifically, the beta (1-4) glycosidic linkages between N-acetylmuramic acid and N-acetylglucosamine, and cause bacterial lysis. Lysozymes occur in diverse organisms including viruses, birds, and mammals. In humans, lysozymes are found in spleen, lung, kidney, white blood cells, plasma, saliva, milk, tears, and cartilage (OMIM #153450 Lysozyme; Weaver, L. H. et al. (1985) J. Mol. Biol. 184:739-741). Lysozyme c functions in ruminants as a digestive enzyme, releasing proteins from ingested bacterial cells, and may perform the same function in human newborns (Braun, O. H. et al. (1995) Klin. Pediatr. 207:4-7).

[0495] The two known forms of lysozymes, chicken-type and goose-type, were originally isolated from chicken and goose egg white, respectively. Chicken-type and goose-type lysozymes have similar three-dimensional structures, but different amino acid sequences (Nakano, T. and T. Graf (1991) Biochim. Biophys. Acta 1090:273-276). In chickens, both forms of lysozyme are found in neutrophil granulocytes (heterophils), but only chicken-type lysozyme is found in egg white. Generally, chicken-type lysozyme mRNA is found in both adherent monocytes and macrophages and nonadherent promyelocytes and granulocytes as well as in cells of the bone marrow, spleen, bursa, and oviduct. Goose-type lysozyme mRNA is found in non-adherent cells of the bone marrow and lung. Several isozymes have been found in rabbits, including leukocytic, gastrointestinal, and possibly lymphoepithelial forms (OMIM #153450, supra; Nakano and Graf, supra; and GenBank GI 1310929). A human lysozyme gene encoding a protein similar to chicken-type lysozyme has been cloned (Yoshimura, K. et al. (1988) Biochem. Biophys. Res. Commun. 150:794-801). A consensus motif featuring regularly spaced cysteine residues has been derived from the lysozyme C enzymes of various species (PROSITE PS00128). Lysozyme C shares about 40% amino acid sequence identity with α-lactalbumin.

[0496] Lysozymes have several disease associations. Lysozymuria is observed in diabetic nephropathy (Shima, M. et al. (1986) Clin. Chem. 32:1818-1822), endemic nephropathy (Bruckner, I. et al. (1978) Med. Interne. 16:117-125), urinary tract infections (Heidegger, H. (1990) Minerva Ginecol. 42:243-250), and acute monocytic leukemia (Shaw, M. T. (1978) Am. J. Hematol. 4:97-103). Nakano and Graf (supra) suggested a role for lysozyme in host defense systems. Older rabbits with an inherited lysozyme deficiency show increased susceptibility to infections, such as subcutaneous abscesses (OMIM #153450, supra). Human lysozyme gene mutations cause hereditary systemic amyloidosis, a rare autosomal dominant disease in which amyloid deposits form in the viscera, including the kidney, adrenal glands, spleen, and liver. This disease is usually fatal by the fifth decade. The amyloid deposits contain variant forms of lysozyme. Renal amyloidosis is the most common and potentially the most serious form of organ involvement (Pepys, M. B. et al. (1993) Nature 362:553-557; OMIM #105200 Familial Visceral Amyloidosis; Cotran, R. S. et al. (1994) Robbins Pathologic Basis of Disease, W.B. Saunders Company, Philadelphia Pa., pp. 231-238). Increased levels of lysozyme and lactate have been observed in the cerebrospinal fluid of patients with bacterial meningitis (Ponka, A. et al. (1983) Infection 11:129-131). Acute monocytic leukemia is characterized by massive lysozymuria (Den Tandt, W. R. (1988) Int. J. Biochem. 20:713-719).

### Lyases

[0497] Lyases are a class of enzymes that catalyze the cleavage of C—C, C—O, C—N, C—S, C-(halide), P—O, or other bonds without hydrolysis or oxidation to form two molecules, at least one of which contains a double bond (Stryer, L. (1995) Biochemistry, W.H. Freeman and Co., New York N.Y., p. 620). Under the International Classification of Enzymes (Webb, E. C. (1992) Enzyme Nomenclature 1992: Recommendations of the Nomenclature Committee of the International Union of Biochemistry and Molecular Biology on the Nomenclature and Classification of Enzymes, Academic Press, San Diego Calif.), lyases form a distinct class designated by the numeral 4 in the first digit of the enzyme number (i.e., EC 4.x.x.x).

Further classification of lyases reflects the type of bond cleaved as well as the nature of the cleaved group. The group of C—C lyases includes carboxyl-lyases (decarboxylases), aldehyde-lyases (aldolases), oxo-acid-lyases, and other lyases. The C—O lyase group includes hydro-lyases, lyases acting on polysaccharides, and other lyases. The C—N lyase group includes ammonia-lyases, amidine-lyases, amine-lyases (deaminases), and other lyases. Lyases are critical components of cellular biochemistry, with roles in metabolic energy production, including fatty acid metabolism and the tricarboxylic acid cycle, as well as other diverse enzymatic processes.

[0498] One important family of lyases are the carbonic anhydrases (CA), also called carbonate dehydratases, which catalyze the hydration of carbon dioxide in the reaction H₂O+CO₂≅HCO₃⁻+−H⁺. CA accelerates this reaction by a factor of over 10⁶ by virtue of a zinc ion located in a deep cleft about 15.ANG. below the protein's surface and co-ordinated to the imidazole groups of three His residues. Water bound to the zinc ion is rapidly converted to HCO₃⁻.

[0499] Eight enzymatic and evolutionarily related forms of carbonic anhydrase are currently known to exist in humans: three cytosolic isozymes (CAI, CAII, and CAIII), two membrane-bound forms (CAIV and CAVII), a mitochondrial form (CAV), a secreted salivary form (CAVI) and a yet uncharacterized isozyme (PROSITE PDOC00146 Eukaryotic-type carbonic anhydrases signature). Though the isoenzymes CAI, CAII, and bovine CAIII have similar secondary structures and polypeptide-chain folds, CAI has 6 tryptophans, CAII has 7 and CAIII has 8 (Boren, K. et al. (1996) Protein Sci. 5:2479-2484). CAII is the predominant CA isoenzyme in the brain of mammals.

CAs participate in a variety of physiological processes that involve pH regulation, CO₂ and HCO₃⁻ transport, ion transport, and water and electrolyte balance. For example, CAII contributes to H⁺ secretion by gastric parietal cells, by renal tubular cells, and by osteoclasts that secrete H⁺ to acidify the bone-resorbing compartment. In addition, CAII promotes HCO₃⁻ secretion by pancreatic duct cells, cilary body epithelium, choroid plexus, salivary gland acinar cells, and distal colonal epithelium, thus playing a role in the production of pancreatic juice, aqueous humor, cerebrospinal fluid, and saliva, and contributing to electrolyte and water balance. CAII also promotes CO₂ exchange in proximal tubules in the kidney, in erythrocytes, and in lung. CAIV has roles in several tissues: it facilitates HCO₃⁻ reabsorption in the kidney; promotes CO₂ flux in tissues including brain, skeletal muscle, and heart muscle; and promotes CO₂ exchange from the blood to the alveoli in the lung. CAVI probably plays a role in pH regulation in saliva, along with CAII, and may have a protective effect in the esophagus and stomach. Mitochondrial CAV appears to play important roles in gluconeogenesis and ureagenesis, based on the effects of CA inhibitors on these pathways. (Sly, W. S, and P. Y. Hu (1995) Ann. Rev. Biochem. 64:375-401.)
A number of disease states are marked by variations in CA activity. Mutations in CAII which lead to CAII deficiency are the cause of osteopetrosis with renal tubular acidosis (OMIM #259730 Osteopetrosis with Renal Tubular Acidosis). The concentration of CAII in the cerebrospinal fluid (CSF) appears to mark disease activity in patients with brain damage. High CA concentrations have been observed in patients with brain infarction. Patients with transient ischemic attack, multiple sclerosis, or epilepsy usually have CAII concentrations in the normal range, but higher CAII levels have been observed in the CSF of those with central nervous system infection, dementia, or trigeminal neuralgia (Parkkila, A. K. et al. (1997) Eur. J. Clin. Invest. 27:392-397). Colonic adenomas and adenocarcinomas have been observed to fail to stain for CA, whereas non-neoplastic controls showed CAI and CAII in the cytoplasm of the columnar cells lining the upper half of colonic crypts. The neoplasms show staining patterns similar to less mature cells lining the base of normal crypts (Gramlich T. L. et al. (1990) Arch. Pathol. Lab. Med. 114:415-419).

[0500] Therapeutic interventions in a number of diseases involve altering CA activity. CA inhibitors such as acetazolamide are used in the treatment of glaucoma (Stewart, W. C. (1999) Curr. Opin. Opthamol. 10:99-108), essential tremor and Parkinson's disease (Uitti, R. J. (1998) Geriatrics 53:46-48, 53-57), intermittent ataxia (Singhvi, J. P. et al. (2000) Neurology India 48:78-80), and altitude related illnesses (Klocke, D. L. et al. (1998) Mayo Clin. Proc. 73:988-992).

[0501] CA activity can be particularly useful as an indicator of long-term disease conditions, since the enzyme reacts relatively slowly to physiological changes. CAI and zinc concentrations have been observed to decrease in hyperthyroid Graves' disease (Yoshida, K. (1996) Tohoku J. Exp. Med. 178:345-356) and glycosylated CAI is observed in diabetes mellitus (Kondo, T. et al. (1987) Clin. Chim. Acta 166:227-236). A positive correlation has been observed between CAI and CAII reactivity and endometriosis (Brinton, D. A. et al. (1996) Ann. Clin. Lab. Sci. 26:409-420; D'Cruz, O. J. et al. (1996) Fertil. Steril. 66:547-556).

Another important member of the lyase family is ornithine decarboxylase (ODC), the initial rate-limiting enzyme in polyamine biosynthesis. ODC catalyses the transformation of ornithine into putrescine in the reaction L-ornithine≅putrescine+CO₂. Polyamines, which include putrescine and the subsequent metabolic pathway products spermidine and spermine, are ubiquitous cell components essential for DNA synthesis, cell differentiation, and proliferation. Thus the polyamines play a key role in tumor proliferation (Medina, M. A. et al. (1999) Biochem. Pharmacol. 57:1341-1344).
ODC is a pyridoxal-5′-phosphate (PLP)-dependent enzyme which is active as a homodimer. Conserved residues include those at the PLP binding site and a stretch of glycine residues thought to be part of a substrate binding region (PROSITE PDOC00685 Orn/DAP/Arg decarboxylase family 2 signatures). Mammalian ODCs also contain PEST regions, sequence fragments enriched in proline, glutamic acid, serine, and threonine residues that act as signals for intracellular degradation (Nedina et al., supra).

[0502] Many chemical carcinogens and tumor promoters increase ODC levels and activity. Several known oncogenes may increase ODC levels by enhancing transcription of the ODC gene, and ODC itself may act as an oncogene when expressed at very high levels. A high level of ODC is found in a number of precancerous conditions, and elevation of ODC levels has been used as part of a screen for tumor-promoting compounds (Pegg, A. E. et al. (1995) J. Cell. Biochem. Suppl. 22:132-138).

Inhibitors of ODC have been used to treat tumors in animal models and human clinical trials, and have been shown to reduce development of tumors of the bladder, brain, esophagus, gastrointestinal tract, lung, oral cavity, mammary gland, stomach, skin and trachea (Pegg et al., supra; McCann, P. P. and A. E. Pegg (1992) Pharmac. Ther. 54:195-215). ODC also shows promise as a target for chemoprevention (Pegg et al., supra). ODC inhibitors have also been used to treat infections by African trypanosomes, malaria, and Pneumocystis carinii, and are potentially useful for treatment of autoimmune diseases such as lupus and rheumatoid arthritis (McCann and Pegg, supra).

[0503] Another family of pyridoxal-dependent decarboxylases are the group II decarboxylases. This family includes glutamate decarboxylase (GAD) which catalyzes the decarboxylation of glutamate into the neurotransmitter GABA; histidine decarboxylase (HDC), which catalyzes the decarboxylation of histidine to histamine; aromatic-L-amino-acid decarboxylase (DDC), also known as L-dopa decarboxylase or tryptophan decarboxylase, which catalyzes the decarboxylation of tryptophan to tryptamine and also acts on 5-hydroxy-tryptophan and dihydroxyphenylalanine (L-dopa); and cysteine sulfinic acid decarboxylase (CSD), the rate-limiting enzyme in the synthesis of taurine from cysteine (PROSITE PD0000329 DDC/GAD/HDC/TyrDC pyridoxal-phosphate attachment site). Taurine is an abundant sulfonic amino acid in brain and is thought to act as an osmoregulator in brain cells (Bitoun, M. and M. Tappaz (2000) J. Neurochem. 75:919-924).

### Isomerases

[0504] Isomerases are a class of enzymes that catalyze geometric or structural changes within a molecule to form a single product. This class includes racemases and epimerases, cis-trans-isomerases, intramolecular oxidoreductases, intramolecular transferases (mutases) and intramolecular lyases. Isomerases are critical components of cellular biochemistry with roles in metabolic energy production including glycolysis, as well as other diverse enzymatic processes (Stryer, supra, pp. 483-507).

[0505] Racemases are a subset of isomerases that catalyze inversion of a molecule's configuration around the asymmetric carbon atom in a substrate having a single center of asymmetry, thereby interconverting two racemers. Epimerases are another subset of isomerases that catalyze inversion of configuration around an asymmetric carbon atom in a substrate with more than one center of symmetry, thereby interconverting two epimers. Racemases and epimerases can act on amino acids and derivatives, hydroxy acids and derivatives, and carbohydrates and derivatives. The interconversion of UDP-galactose and UDP-glucose is catalyzed by UDP-galactose-4′-epimerase. Proper regulation and function of this epimerase is essential to the synthesis of glycoproteins and glycolipids. Elevated blood galactose levels have been correlated with UDP-galactose-4′-epimerase deficiency in screening programs of infants (Gitzelmann, R. (1972) Helv. Paediat. Acta 27:125-130).

[0506] Correct folding of newly synthesized proteins is assisted by molecular chaperones and folding catalysts, two unrelated groups of helper molecules. Chaperones suppress non-productive side reactions by stoichiometric binding to folding intermediates, whereas folding enzymes catalyze some of the multiple folding steps that enable proteins to attain their final functional configurations (Kern, G. et al. (1994) FEBS Lett. 348:145-148). One class of folding enzymes, the peptidyl prolyl cis-trans isomerases (PPIases), isomerizes certain proline imidic bonds in what is considered to be a rate limiting step in protein maturation and export. PPIases catalyze the cis to trans isomerization of certain proline imidic bonds in proteins. There are three evolutionarily unrelated families of PPIases: the cyclophilins, the FK506 binding proteins, and the newly characterized parvulin family (Rahfeld, J. U. et al. (1994) FEBS Lett. 352:180-184).

[0507] The cyclophilins (CyP) were originally identified as major receptors for the immunosuppressive drug cyclosporin A (CsA), an inhibitor of T-cell activation (Handschumacher, R. E. et al. (1984) Science 226:544-547; Harding, M. W. et al. (1986) J. Biol. Chem. 261:8547-8555). Thus, the peptidyl-prolyl isomerase activity of CyP may be part of the signaling pathway that leads to T-cell activation. Subsequent work demonstrated that CyP's isomerase activity is essential for correct protein folding and/or protein trafficking, and may also be involved in assembly/disassembly of protein complexes and regulation of protein activity. For example, in Drosophila, the CyP NinaA is required for correct localization of rhodopsins, while a mammalian CyP (Cyp40) is part of the Hsp90/Hsp70 complex that binds steroid receptors. The mammalian CyP (CypA) has been shown to bind the gag protein from human immunodeficiency virus 1 (HIV-1), an interaction that can be inhibited by cyclosporin. Since cyclosporin has potent anti-HIV-1 activity, CypA may play an essential function in HIV-1 replication. Finally, Cyp40 has been shown to bind and inactivate the transcription factor c-Myb, an effect that is reversed by cyclosporin. This effect implicates CyP in the regulation of transcription, transformation, and differentiation (Bergsma, D. J. et al (1991) J. Biol. Chem. 266:23204-23214; Hunter, T. (1998) Cell 92:141-143; and Leverson, J. D. and S. A. Ness (1998) Mol. Cell. 1:203-211).

One of the major rate limiting steps in protein folding is the thiol:disulfide exchange that is necessary for correct protein assembly. Although incubation of reduced, unfolded proteins in buffers with defined ratios of oxidized and reduced thiols can lead to native conformation, the rate of folding is slow and the attainment of native conformation decreases proportionately with the size and number of cysteines in the protein. Certain cellular compartments such as the endoplasmic reticulum of eukaryotes and the periplasmic space of prokaryotes are maintained in a more oxidized state than the surrounding cytosol. Correct disulfide formation can occur in these compartments, but at a rate that is insufficient for normal cell processes and inadequate for synthesizing secreted proteins. The protein disulfide isomerases, thioredoxins and glutaredoxins are able to catalyze the formation of disulfide bonds and regulate the redox environment in cells to enable the necessary thiol:disulfide exchanges (Loferer, H. (1995) J. Biol. Chem. 270:26178-26183).

[0508] Each of these proteins has somewhat different functions, but all belong to a group of disulfide-containing redox proteins that contain a conserved active-site sequence and are ubiquitously distributed in eukaryotes and prokaryotes. Protein disulfide isomerases are found in the endoplasmic reticulum of eukaryotes and in the periplasmic space of prokaryotes. They function by exchanging their own disulfide for a thiol in a folding peptide chain. In contrast, the reduced thioredoxins and glutaredoxins are generally found in the cytoplasm and function by directly reducing disulfides in the substrate proteins.

[0509] Oxidoreductases can be isomerases as well. Oxidoreductases catalyze the reversible transfer of electrons from a substrate that becomes oxidized to a substrate that becomes reduced. This class of enzymes includes dehydrogenases, hydroxylases, oxidases, oxygenases, peroxidases, and reductases. Proper maintenance of oxidoreductase levels is physiologically important. For example, genetically-linked deficiencies in lipoamide dehydrogenase can result in lactic acidosis (Robinson, B. H. et al. (1977) Pediat. Res. 11:1198-1202).

[0510] Another subgroup of isomerases are the transferases (or mutases). Transferases transfer a chemical group from one compound (the donor) to another compound (the acceptor). The types of groups transferred by these enzymes include acyl groups, amino groups, phosphate groups (phosphotransferases or phosphomutases), and others. The transferase carnitine palmitoyltransferase is an important component of fatty acid metabolism. Genetically-linked deficiencies in this transferase can lead to myopathy (Scriver, C. et al. (1995) The Metabolic and Molecular Basis of Inherited Disease, McGraw-Hill, New York N.Y., pp. 1501-1533).

[0511] Yet another subgroup of isomerases are the topoisomersases. Topoisomerases are enzymes that affect the topological state of DNA. For example, defects in topoisomerases or their regulation can affect normal physiology. Reduced levels of topoisomerase II have been correlated with some of the DNA processing defects associated with the disorder ataxia-telangiectasia (Singh, S. P. et al. (1988) Nucleic Acids Res. 16:3919-3929).

### Ligases

[0512] Ligases catalyze the formation of a bond between two substrate molecules. The process involves the hydrolysis of a pyrophosphate bond in ATP or a similar energy donor. Ligases are classified based on the nature of the type of bond they form, which can include carbon-oxygen, carbon-sulfur, carbon-nitrogen, carbon-carbon and phosphoric ester bonds.

[0513] Ligases forming carbon-oxygen bonds include the aminoacyl-transfer RNA (tRNA) synthetases which are important RNA-associated enzymes with roles in translation. Protein biosynthesis depends on each amino acid forming a linkage with the appropriate tRNA. The aminoacyl-tRNA synthetases are responsible for the activation and correct attachment of an amino acid with its cognate tRNA. The 20 aminoacyl-tRNA synthetase enzymes can be divided into two structural classes, and each class is characterized by a distinctive topology of the catalytic domain. Class I enzymes contain a catalytic domain based on the nucleotide-binding “Rossman fold”. Class II enzymes contain a central catalytic domain, which consists of a seven-stranded antiparallel β-sheet motif, as well as N- and C-terminal regulatory domains. Class II enzymes are separated into two groups based on the heterodimeric or homodimeric structure of the enzyme; the latter group is further subdivided by the structure of the N- and C-terminal regulatory domains (Hartlein, M. and S. Cusack, (1995) J. Mol. Evol. 40:519-530). Autoantibodies against aminoacyl-tRNAs are generated by patients with dermatomyositis and polymyositis, and correlate strongly with complicating interstitial lung disease (ILD). These antibodies appear to be generated in response to viral infection, and coxsackie virus has been used to induce experimental viral myositis in animals.

[0514] Ligases forming carbon-sulfur bonds (acid-thiol ligases) mediate a large number of cellular biosynthetic intermediary metabolism processes involving intermolecular transfer of carbon atom-containing substrates (carbon substrates). Examples of such reactions include the tricarboxylic acid cycle, synthesis of fatty acids and long-chain phospholipids, synthesis of alcohols and aldehydes, synthesis of intermediary metabolites, and reactions involved in the amino acid degradation pathways. Some of these reactions require input of energy, usually in the form of conversion of ATP to either ADP or AMP and pyrophosphate.

In many cases, a carbon substrate is derived from a small molecule containing at least two carbon atoms. The carbon substrate is often covalently bound to a larger molecule which acts as a carbon substrate carrier molecule within the cell. In the biosynthetic mechanisms described above, the carrier molecule is coenzyme A. Coenzyme A (CoA) is structurally related to derivatives of the nucleotide ADP and consists of 4′-phosphopantetheine linked via a phosphodiester bond to the alpha phosphate group of adenosine 3′,5′-bisphosphate. The terminal thiol group of 4′-phosphopantetheine acts as the site for carbon substrate bond formation. The predominant carbon substrates which utilize CoA as a carrier molecule during biosynthesis and intermediary metabolism in the cell are acetyl, succinyl, and propionyl moieties, collectively referred to as acyl groups. Other carbon substrates include enoyl lipid, which acts as a fatty acid oxidation intermediate, and carnitine, which acts as an acetyl-CoA flux regulator/mitochondrial acyl group transfer protein. Acyl-CoA and acetyl-CoA are synthesized in the cell by acyl-CoA synthetase and acetyl-CoA synthetase, respectively.

[0515] Activation of fatty acids is mediated by at least three forms of acyl-CoA synthetase activity: i) acetyl-CoA synthetase, which activates acetate and several other low molecular weight carboxylic acids and is found in muscle mitochondria and the cytosol of other tissues; ii) medium-chain acyl-CoA synthetase, which activates fatty acids containing between four and eleven carbon atoms (predominantly from dietary sources), and is present only in liver mitochondria; and iii) acyl CoA synthetase, which is specific for long chain fatty acids with between six and twenty carbon atoms, and is found in microsomes and the mitochondria. Proteins associated with acyl-CoA synthetase activity have been identified from many sources including bacteria, yeast, plants, mouse, and man. The activity of acyl-CoA synthetase may be modulated by phosphorylation of the enzyme by cAMP-dependent protein kinase.

Ligases forming carbon-nitrogen bonds include amide synthases such as glutamine synthetase (glutamate-ammonia ligase) that catalyzes the amination of glutamic acid to glutamine by ammonia using the energy of ATP hydrolysis. Glutamine is the primary source for the amino group in various amide transfer reactions involved in de novo pyrimidine nucleotide synthesis and in purine and pyrimidine ribonucleotide interconversions. Overexpression of glutamine synthetase has been observed in primary liver cancer (Christa, L. et al. (1994) Gastroent. 106:1312-1320).

[0516] Acid-amino-acid ligases (peptide synthases) are represented by the ubiquitin conjugating enzymes which are associated with the ubiquitin conjugation system (UCS), a major pathway for the degradation of cellular proteins in eukaryotic cells and some bacteria. The UCS mediates the elimination of abnormal proteins and regulates the half-lives of important regulatory proteins that control cellular processes such as gene transcription and cell cycle progression. In the UCS pathway, proteins targeted for degradation are conjugated to ubiquitin (Ub), a small heat stable protein. Ub is first activated by a ubiquitin-activating enzyme (E1), and then transferred to one of several Ub-conjugating enzymes (E2). E2 then links the Ub molecule through its C-terminal glycine to an internal lysine (acceptor lysine) of a target protein. The ubiquitinated protein is then recognized and degraded by proteasome, a large, multisubunit proteolytic enzyme complex, and ubiquitin is released for reutilization by ubiquitin protease. The UCS is implicated in the degradation of mitotic cyclic kinases, oncoproteins, tumor suppressor genes such as p53, viral proteins, cell surface receptors associated with signal transduction, transcriptional regulators, and mutated or damaged proteins (Ciechanover, A. (1994) Cell 79:13-21).

[0517] Cyclo-ligases and other carbon-nitrogen ligases comprise various enzymes and enzyme complexes that participate in the de novo pathways of purine and pyrimidine biosynthesis. Because these pathways are critical to the synthesis of nucleotides for replication of both RNA and DNA, many of these enzymes have been the targets of clinical agents for the treatment of cell proliferative disorders such as cancer and infectious diseases.

[0518] Purine biosynthesis occurs de novo from the amino acids glycine and glutamine, and other small molecules. Three of the key reactions in this process are catalyzed by a trifunctional enzyme composed of glycinamide-ribonucleotide synthetase (GARS), aminoimidazole ribonucleotide synthetase (AIRS), and glycinamide ribonucleotide transformylase (GART). Together these three enzymes combine ribosylamine phosphate with glycine to yield phosphoribosyl aminoimidazole, a precursor to both adenylate and guanylate nucleotides. This trifunctional protein has been implicated in the pathology of Downs syndrome (Aimi, J. et al. (1990) Nucleic Acid Res. 18:6665-6672). Adenylosuccinate synthetase catalyzes a later step in purine biosynthesis that converts inosinic acid to adenylosuccinate, a key step on the path to ATP synthesis. This enzyme is also similar to another carbon-nitrogen ligase, argininosuccinate synthetase, that catalyzes a similar reaction in the urea cycle (Powell, S. M. et al. (1992) FEBS Lett. 303:4-10).

Adenylosuccinate synthetase, adenylosuccinate lyase, and AMP deaminase may be considered as a functional unit, the purine nucleotide cycle. This cycle converts AMP to inosine monophosphate (IMP) and reconverts IMP to AMP via adenylosuccinate, thereby producing NH₃ and forming fumarate from aspartate. In muscle, the purine nucleotide cycle functions, during intense exercise, in the regeneration of ATP by pulling the adenylate kinase reaction in the direction of ATP formation and by providing Krebs cycle intermediates. In kidney, the purine nucleotide cycle accounts for the release of NH₃ under normal acid-base conditions. In brain, the purine nucleotide cycle may contribute to ATP recovery. Adenylosuccinate lyase deficiency provokes psychomotor retardation, often accompanied by autistic features (Van den Berghe, G. et al. (1992) Prog Neurobiol. 39:547-561). A marked imbalance in the enzymic pattern of purine metabolism is linked with transformation and/or progression in cancer cells. In rat hepatomas the specific activities of the anabolic enzymes, IMP dehydrogenase, GMP synthetase, adenylosuccinate synthetase, adenylosuccinase, AMP deaminase and amidophosphoribosyltransferase, increased to 13.5-, 3.7-, 3.1-, 1.8-, 5.5- and 2.8-fold, respectively, of those in normal liver (Weber, G. (1983) Clin. Biochem. 16:57-63).

[0519] Like the de novo biosynthesis of purines, de novo synthesis of the pyrimidine nucleotides uridylate and cytidylate also arises from a common precursor, in this instance the nucleotide orotidylate derived from orotate and phosphoribosyl pyrophosphate (PPRP). Again a trifunctional enzyme comprising three carbon-nitrogen ligases plays a key role in the process. In this case the enzymes aspartate transcarbamylase (ATCase), carbamyl phosphate synthetase II, and dihydroorotase (DHOase) are encoded by a single gene called CAD. Together these three enzymes combine the initial reactants in pyrimidine biosynthesis, glutamine, CO₂ and ATP to form dihydroorotate, the precursor to orotate and orotidylate (Iwahana, H. et al. (1996) Biochem. Biophys. Res. Commun. 219:249-255). Further steps then lead to the synthesis of uridine nucleotides from orotidylate. Cytidine nucleotides are derived from uridine-5′-triphosphate (UTP) by the amidation of UTP using glutamine as the amino donor and the enzyme CTP synthetase. Regulatory mutations in the human CTP synthetase are believed to confer multi-drug resistance to agents widely used in cancer therapy (Yamauchi, M. et al. (1990) EMBO J. 9:2095-2099).

[0520] Ligases forming carbon-carbon bonds include the carboxylases acetyl-CoA carboxylase and pyruvate carboxylase. Acetyl-CoA carboxylase catalyzes the carboxylation of acetyl-CoA from CO₂ and H₂O using the energy of ATP hydrolysis. Acetyl-CoA carboxylase is the rate-limiting enzyme in the biogenesis of long-chain fatty acids. Two isoforms of acetyl-CoA carboxylase, types I and types II, are expressed in human in a tissue-specific manner (Ha, J. et al. (1994) Eur. J. Biochem. 219:297-306). Pyruvate carboxylase is a nuclear-encoded mitochondrial enzyme that catalyzes the conversion of pyruvate to oxaloacetate, a key intermediate in the citric acid cycle.

[0521] Ligases forming phosphoric ester bonds include the DNA ligases involved in both DNA replication and repair. DNA ligases seal phosphodiester bonds between two adjacent nucleotides in a DNA chain using the energy from ATP hydrolysis to first activate the free 5′-phosphate of one nucleotide and then react it with the 3′-OH group of the adjacent nucleotide. This resealing reaction is used in DNA replication to join small DNA fragments called “Okazaki” fragments that are transiently formed in the process of replicating new DNA, and in DNA repair. DNA repair is the process by which accidental base changes, such as those produced by oxidative damage, hydrolytic attack, or uncontrolled methylation of DNA, are corrected before replication or transcription of the DNA can occur. Bloom's syndrome is an inherited human disease in which individuals are partially deficient in DNA ligation and consequently have an increased incidence of cancer (Alberts et al., supra, p. 247).

[0522] Pantothenate synthetase (D-pantoate; beta-alanine ligase (AMP-forming); EC 6.3.2.1) is the last enzyme of the pathway of pantothenate (vitamin B(5)) synthesis. It catalyzes the condensation of pantoate with beta-alanine in an ATP-dependent reaction. The enzyme is dimeric, with two well-defined domains per protomer: the N-terminal domain, a Rossmann fold, contains the active site cavity, with the C-terminal domain forming a hinged lid. The N-terminal domain is structurally very similar to class I aminoacyl-tRNA synthetases and is thus a member of the cytidylyltransferase superfamily (von Delft, F. et al. (2000) Structure (Camb) 9:439-450). Farnesyl diphosphate synthase (FPPS) is an essential enzyme that is required both for cholesterol synthesis and protein prenylation. The enzyme catalyzes the formation of farnesyl diphosphate from dimethylallyl diphosphate and isopentyl diphosphate. FPPS is inhibited by nitrogen-containing biphosphonates, which can lead to the inhibition of osteoclast-mediated bone resorption by preventing protein prenylation (Dunford, J. E. et al. (2001) J. Pharmacol. Exp. Ther. 296:235-242).

[0523] 5-aminolevulinate synthase (ALAS; delta-aminolevulinate synthase; EC 2.3.1.37) catalyzes the rate-limiting step in heme biosynthesis in both erythroid and non-erythroid tissues. This enzyme is unique in the heme biosynthetic pathway in being encoded by two genes, the first encoding ALAS 1, the non-erythroid specific enzyme which is ubiquitously expressed, and the second encoding ALAS2, which is expressed exclusively in erythroid cells. The genes for ALAS 1 and ALAS2 are located, respectively, on chromosome 3 and on the X chromosome. Defects in the gene encoding ALAS2 result in X-linked sideroblastic anemia. Elevated levels of ALAS are seen in acute hepatic porphyrias and can be lowered by zinc mesoporphyrin.

### Drug Metabolizing Enzymes (DMEs)

[0524] The metabolism of a drug and its movement through the body (pharmacokinetics) are important in determining its effects, toxicity, and interactions with other drugs. The three processes governing pharmacokinetics are the absorption of the drug, distribution to various tissues, and elimination of drug metabolites. These processes are intimately coupled to drug metabolism, since a variety of metabolic modifications alter most of the physicochemical and pharmacological properties of drugs, including solubility, binding to receptors, and excretion rates. The metabolic pathways which modify drugs also accept a variety of naturally occurring substrates such as steroids, fatty acids, prostaglandins, leukotrienes, and vitamins. The enzymes in these pathways are therefore important sites of biochemical and pharmacological interaction between natural compounds, drugs, carcinogens, mutagens, and xenobiotics. It has long been appreciated that inherited differences in drug metabolism lead to drastically different levels of drug efficacy and toxicity among individuals. Advances in pharmacogenomics research, of which DMEs constitute an important part, are promising to expand the tools and information that can be brought to bear on questions of drug efficacy and toxicity (See Evans, W. E. and R. V. Relling (1999) Science 286:487-491). DMEs have broad substrate specificities, unlike antibodies, for example, which are diverse and highly specific. Since DMEs metabolize a wide variety of molecules, drug interactions may occur at the level of metabolism so that, for example, one compound may induce a DME that affects the metabolism of another compound.

[0525] Drug metabolic reactions are categorized as Phase I, which prepare the drug molecule for functioning and further metabolism, and Phase II, which are conjugative. In general, Phase I reaction products are partially or fully inactive, and Phase II reaction products are the chief excreted species. However, Phase I reaction products are sometimes more active than the original administered drugs; this metabolic activation principle is exploited by pro-drugs (e.g. L-dopa). Additionally, some nontoxic compounds (e.g. aflatoxin, benzo[α]pyrene) are metabolized to toxic intermediates through these pathways. Phase I reactions are usually rate-limiting in drug metabolism. Prior exposure to the compound, or other compounds, can induce the expression of Phase I enzymes however, and thereby increase substrate flux through the metabolic pathways. (See Klaassen, C. D. et al. (1996) Casarett and Doull's Toxicology: The Basic Science of Poisons, McGraw-Hill, New York, N.Y., pp. 113-186; Katzung, B. G. (1995) Basic and Clinical Pharmacology, Appleton and Lange, Norwalk, Conn., pp. 48-59; Gibson, G. G. and P. Skett (1994) Introduction to Drug Metabolism, Blackie Academic and Professional, London.).

[0526] The major classes of Phase I enzymes include, but are not limited to, cytochrome P450 and flavin-containing monooxygenase. Other enzyme classes involved in Phase I-type catalytic cycles and reactions include, but are not limited to, NADPH cytochrome P450 reductase (CPR), the microsomal cytochrome b5/NADH cytochrome b5 reductase system, the ferredoxin/ferredoxin reductase redox pair, aldo/keto reductases, and alcohol dehydrogenases. The major classes of Phase II enzymes include, but are not limited to, UDP glucuronyltransferase, sulfotransferase, glutathione S-transferase, N-acyltransferase, and N-acetyl transferase.

### Cytochrome P450 and P450 Catalytic Cycle-Associated Enzymes

[0527] Members of the cytochrome P450 superfamily of enzymes catalyze the oxidative metabolism of a variety of substrates, including natural compounds such as steroids, fatty acids, prostaglandins, leukotrienes, and vitamins, as well as drugs, carcinogens, mutagens, and xenobiotics. Cytochromes P450, also known as P450 heme-thiolate proteins, usually act as terminal oxidases in multi-component electron transfer chains, called P450-containing monooxygenase systems. Specific reactions catalyzed include hydroxylation, epoxidation, N-oxidation, sulfooxidation, N-, S-, and O-dealkylations, desulfation, deamination, and reduction of azo, nitro, and N-oxide groups. These reactions are involved in steroidogenesis of glucocorticoids, cortisols, estrogens, and androgens in animals; insecticide resistance in insects; herbicide resistance and flower coloring in plants; and environmental bioremediation by microorganisms. Cytochrome P450 actions on drugs, carcinogens, mutagens, and xenobiotics can result in detoxification or in conversion of the substance to a more toxic product. Cytochromes P450 are abundant in the liver, but also occur in other tissues; the enzymes are located in microsomes. (See ExPASY ENZYME EC 1.14.14.1; Prosite PDOC00081 Cytochrome P450 cysteine heme-iron ligand signature; PRINTS EP450I E-Class P450 Group I signature; Graham-Lorence, S, and J. A. Peterson (1996) FASEB J. 10:206-214.)

[0528] Four hundred cytochromes P450 have been identified in diverse organisms including bacteria, fungi, plants, and animals (Graham-Lorence and Peterson, supra). The B-class is found in prokaryotes and fungi, while the E-class is found in bacteria, plants, insects, vertebrates, and mammals. Five subclasses or groups are found within the larger family of E-class cytochromes P450 (PRINTS EP450I E-Class P450 Group I signature).

[0529] All cytochromes P450 use a heme cofactor and share structural attributes. Most cytochromes P450 are 400 to 530 amino acids in length. The secondary structure of the enzyme is about 70% alpha-helical and about 22% beta-sheet. The region around the heme-binding site in the C-terminal part of the protein is conserved among cytochromes P450. A ten amino acid signature sequence in this heme-iron ligand region has been identified which includes a conserved cysteine involved in binding the heme iron in the fifth coordination site. In eukaryotic cytochromes P450, a membrane-spanning region is usually found in the first 15-20 amino acids of the protein, generally consisting of approximately 15 hydrophobic residues followed by a positively charged residue. (See Prosite PDOC00081, supra; Graham-Lorence and Peterson, supra.)

[0530] Cytochrome P450 enzymes are involved in cell proliferation and development.

[0531] The enzymes have roles in chemical mutagenesis and carcinogenesis by metabolizing chemicals to reactive intermediates that form adducts with DNA (Nebert, D. W. and F. J. Gonzalez (1987) Ann. Rev. Biochem. 56:945-993). These adducts can cause nucleotide changes and DNA rearrangements that lead to oncogenesis. Cytochrome P450 expression in liver and other tissues is induced by xenobiotics such as polycyclic aromatic hydrocarbons, peroxisomal proliferators, phenobarbital, and the glucocorticoid dexamethasone (Dogra, S. C. et al. (1998) Clin. Exp. Pharmacol. Physiol. 25:1-9). A cytochrome P450 protein may participate in eye development as mutations in the P450 gene CYP1B1 cause primary congenital glaucoma (OMIM #601771 Cytochrome P450, subfamily I (dioxin-inducible), polypeptide 1; CYP1B1).

[0532] Cytochromes P450 are associated with inflammation and infection. Hepatic cytochrome P450 activities are profoundly affected by various infections and inflammatory stimuli, some of which are suppressed and some induced (Morgan, E. T. (1997) Drug Metab. Rev. 29:1129-1188). Effects observed in vivo can be mimicked by proinflammatory cytokines and interferons. Autoantibodies to two cytochrome P450 proteins were found in patients with autoimmune polyenodocrinopathy-candidiasis-ectodermal dystrophy (APECED), a polyglandular autoimmune syndrome (OMIM #240300 Autoimmune polyenodocrinopathy-candidiasis-ectodermal dystrophy).

[0533] Mutations in cytochromes P450 have been linked to metabolic disorders, including congenital adrenal hyperplasia, the most common adrenal disorder of infancy and childhood; pseudovitamin D-deficiency rickets; cerebrotendinous xanthomatosis, a lipid storage disease characterized by progressive neurologic dysfunction, premature atherosclerosis, and cataracts; and an inherited resistance to the anticoagulant drugs coumarin and warfarin (Isselbacher, K. J. et al. (1994) Harrison's Principles of Internal Medicine, McGraw-Hill, Inc. New York, N.Y., pp. 1968-1970; Takeyama, K. et al. (1997) Science 277:1827-1830; Kitanaka, S. et al. (1998) N. Engl. J. Med. 338:653-661; OMIM #213700 Cerebrotendinous xanthomatosis; and OMIM #122700 Coumarin resistance). Extremely high levels of expression of the cytochrome P450 protein aromatase were found in a fibrolamellar hepatocellular carcinoma from a boy with severe gynecomastia (feminization) (Agarwal, V. R. (1998) J. Clin. Endocrinol. Metab. 83:1797-1800).

[0534] The cytochrome P450 catalytic cycle is completed through reduction of cytochrome P450 by NADPH cytochrome P450 reductase (CPR). Another microsomal electron transport system consisting of cytochrome b5 and NADPH cytochrome b5 reductase has been widely viewed as a minor contributor of electrons to the cytochrome P450 catalytic cycle. However, a recent report by Lamb, D. C. et al. (1999; FEBS Lett. 462:283-288) identifies a Candida albicans cytochrome P450 (CYP51) which can be efficiently reduced and supported by the microsomal cytochrome b5/NADPH cytochrome b5 reductase system. Therefore, there are likely many cytochromes P450 which are supported by this alternative electron donor system.

[0535] Cytochrome b5 reductase is also responsible for the reduction of oxidized hemoglobin (methemoglobin, or ferrihemoglobin, which is unable to carry oxygen) to the active hemoglobin (ferrohemoglobin) in red blood cells. Methemoglobinemia results when there is a high level of oxidant drugs or an abnormal hemoglobin (hemoglobin M) which is not efficiently reduced. Methemoglobinemia can also result from a hereditary deficiency in red cell cytochrome b5 reductase (Reviewed in Mansour, A. and A. A. Lurie (1993) Am. J. Hematol. 42:7-12).

[0536] Members of the cytochrome P450 family are also closely associated with vitamin D synthesis and catabolism. Vitamin D exists as two biologically equivalent prohormones, ergocalciferol (vitamin D₂), produced in plant tissues, and cholecalciferol (vitamin D₃), produced in animal tissues. The latter form, cholecalciferol, is formed upon the exposure of 7-dehydrocholesterol to near ultraviolet light (i.e., 290-310 nm), normally resulting from even minimal periods of skin exposure to sunlight (reviewed in Miller, W. L. and A. A. Portale (2000) Trends Endocrinol. Metab. 11:315-319).

[0537] Both prohormone forms are further metabolized in the liver to 25-hydroxyvitamin D (25(OH)D) by the enzyme 25-hydroxylase. 25(OH)D is the most abundant precursor form of vitamin D which must be further metabolized in the kidney to the active form, 1α,25-dihydroxyvitami-n D (1α,25(OH)₂D), by the enzyme 25-hydroxyvitamin D 1α-hydroxylase (1α-hydroxylase). Regulation of 1α,25(OH)₂D production is primarily at this final step in the synthetic pathway. The activity of 1 α-hydroxylase depends upon several physiological factors including the circulating level of the enzyme product (1α,25(OH)₂D) and the levels of parathyroid hormone (PTH), calcitonin, insulin, calcium, phosphorus, growth hormone, and prolactin. Furthermore, extrarenal 1α.-hydroxylase activity has been reported, suggesting that tissue-specific, local regulation of 1α,25(OH)₂D production may also be biologically important. The catalysis of 1α,25(OH)₂D to 24,25-dihydroxyvitamin D (24,25(OH)₂2D), involving the enzyme 25-hydroxyvitamin D 24-hydroxylase (24-hydroxylase), also occurs in the kidney. 24-hydroxylase can also use 25(OH)D as a substrate (Shinki, T. et al. (1997) Proc. Natl. Acad. Sci. U.S.A. 94:12920-12925; Miller and Portale, supra; and references within).

[0538] Vitamin D 25-hydroxylase, 1α-hydroxylase, and 24-hydroxylase are all NADPH-dependent, type I (mitochondrial) cytochrome P450 enzymes that show a high degree of homology with other members of the family. Vitamin D 25-hydroxylase also shows a broad substrate specificity and may also perform 26-hydroxylation of bile acid intermediates and 25, 26, and 27-hydroxylation of cholesterol (Dilworth, F. J. et al. (1995) J. Biol. Chem. 270:16766-16774; Miller and Portale, supra; and references within).

[0539] The active form of vitamin D (1α,25(OH)₂D) is involved in calcium and phosphate homeostasis and promotes the differentiation of myeloid and skin cells. Vitamin D deficiency resulting from deficiencies in the enzymes involved in vitamin D metabolism (e.g., 1α-hydroxylase) causes hypocalcemia, hypophosphatemia, and vitamin D-dependent (sensitive) rickets, a disease characterized by loss of bone density and distinctive clinical features, including bandy or bow leggedness accompanied by a waddling gait. Deficiencies in vitamin D 25-hydroxylase cause cerebrotendinous xanthomatosis, a lipid-storage disease characterized by the deposition of cholesterol and cholestanol in the Achilles' tendons, brain, lungs, and many other tissues. The disease presents with progressive neurologic dysfunction, including postpubescent cerebellar ataxia, atherosclerosis, and cataracts. Vitamin D 25-hydroxylase deficiency does not result in rickets, suggesting the existence of alternative pathways for the synthesis of 25(OH)D (Griffin, J. E. and J. B. Zerwekh (1983) J. Clin. Invest. 72:1190-1199; Gamblin, G. T. et al. (1985) J. Clin. Invest. 75:954-960; and Miller and Portale, supra).

[0540] Ferredoxin and ferredoxin reductase are electron transport accessory proteins which support at least one human cytochrome P450 species, cytochrome P450c27 encoded by the CYP27 gene (Dilworth, F. J. et al. (1996) Biochem. J. 320:267-71). A Streptomyces griseus cytochrome P450, CYP104D1, was heterologously expressed in Escherichia coli and found to be reduced by the endogenous ferredoxin and ferredoxin reductase enzymes (Taylor, M. et al. (1999) Biochem. Biophys. Res. Commun. 263:838-842), suggesting that many cytochrome P450 species may be supported by the ferredoxin/ferredoxin reductase pair. Ferredoxin reductase has also been found in a model drug metabolism system to reduce actinomycin D, an antitumor antibiotic, to a reactive free radical species (Flitter, W. D. and R. P. Mason (1988) Arch. Biochem. Biophys. 267:632-639).

### Flavin-Containing Monooxygnase (FMO)

[0541] Flavin-containing monooxygenases oxidize the nucleophilic nitrogen, sulfur, and phosphorus heteroatom of an exceptional range of substrates. Like cytochromes P450, FMOs are microsomal and use NADPH and O₂; there is also a great deal of substrate overlap with cytochromes P450. The tissue distribution of FMOs includes liver, kidney, and lung.

[0542] Isoforms of FMO in mammals include FMO1, FMO2, FMO3, FMO4, and FMO5, which are expressed in a tissue-specific manner. The isoforms differ in their substrate specificities and properties such as inhibition by various compounds and stereospecificity of reaction. FMOs have a 13 amino acid signature sequence, the components of which span the N-terminal two-thirds of the sequences and include the FAD binding region and the FATGY motif found in many N-hydroxylating enzymes (Stehr, M. et al. (1998) Trends Biochem. Sci. 23:56-57; PRINTS FMOXYGENASE Flavin-containing monooxygenase signature). Specific reactions include oxidation of nucleophilic tertiary amines to N-oxides, secondary amines to hydroxylamines and nitrones, primary amines to hydroxylamines and oximes, and sulfur-containing compounds and phosphines to S- and P-oxides. Hydrazines, iodides, selenides, and boron-containing compounds are also substrates. FMOs are more heat labile and less detergent-sensitive than cytochromes P450 in vitro though FMO isoforms vary in thermal stability and detergent sensitivity.

[0543] FMOs play important roles in the metabolism of several drugs and xenobiotics. FMO (FMO3 in liver) is predominantly responsible for metabolizing (S)-nicotine to (S)-nicotine N-1′-oxide, which is excreted in urine. FMO is also involved in S-oxygenation of cimetidine, an H₂-antagonist widely used for the treatment of gastric ulcers. Liver-expressed forms of FMO are not under the same regulatory control as cytochrome P450. In rats, for example, phenobarbital treatment leads to the induction of cytochrome P450, but the repression of FMO1.

### Lysyl Oxidase

[0544] Lysyl oxidase (lysine 6-oxidase, LO) is a copper-dependent amine oxidase involved in the formation of connective tissue matrices by crosslinking collagen and elastin. LO is secreted as an N-glycosylated precursor protein of approximately 50 kDa and cleaved to the mature form of the enzyme by a metalloprotease, although the precursor form is also active. The copper atom in LO is involved in the transport of electrons to and from oxygen to facilitate the oxidative deamination of lysine residues in these extracellular matrix proteins. While the coordination of copper is essential to LO activity, insufficient dietary intake of copper does not influence the expression of the apoenzyme. However, the absence of the functional LO is linked to the skeletal and vascular tissue disorders that are associated with dietary copper deficiency. LO is also inhibited by a variety of semicarbazides, hydrazines, and amino nitrites, as well as heparin. Beta-aminopropionitrile is a commonly used inhibitor. LO activity is increased in response to ozone, cadmium, and elevated levels of hormones released in response to local tissue trauma, such as transforming growth factor-beta, platelet-derived growth factor, angiotensin II, and fibroblast growth factor. Abnormalities in LO activity have been linked to Menkes syndrome and occipital horn syndrome. Cytosolic forms of the enzyme have been implicated in abnormal cell proliferation (reviewed in Rucker, R. B. et al. (1998) Am. J. Clin. Nutr. 67:996 S-1002S and Smith-Mungo, L. I. and H. M. Kagan (1998) Matrix Biol. 16:387-398).

### Dihydrofolate Reductases

[0545] Dihydrofolate reductases (DHFR) are ubiquitous enzymes that catalyze the NADPH-dependent reduction of dihydrofolate to tetrahydrofolate, an essential step in the de novo synthesis of glycine and purines as well as the conversion of deoxyuridine monophosphate (dUMP) to deoxythymidine monophosphate (dTMP). The basic reaction is as follows:

7,8-dihydrofolate+NADPH→5,6,7,8-tetrahydrofolate+NADP

[0546] The enzymes can be inhibited by a number of dihydrofolate analogs, including trimethroprim and methotrexate. Since an abundance of dTMP is required for DNA synthesis, rapidly dividing cells require the activity of DHFR. The replication of DNA viruses (i.e., herpesvirus) also requires high levels of DHFR activity. As a result, drugs that target DHFR have been used for cancer chemotherapy and to inhibit DNA virus replication. (For similar reasons, thymidylate synthetases are also target enzymes.) Drugs that inhibit DHFR are preferentially cytotoxic for rapidly dividing cells (or DNA virus-infected cells) but have no specificity, resulting in the indiscriminate destruction of dividing cells. Furthermore, cancer cells may become resistant to drugs such as methotrexate as a result of acquired transport defects or the duplication of one or more DHFR genes (Stryer, L. (1988) Biochemistry. W.H. Freeman and Co., Inc. New York. pp. 511-519).

### Aldo/Keto Reductases

[0547] Aldo/keto reductases are monomeric NADPH-dependent oxidoreductases with broad substrate specificities (Bohren, K. M. et al. (1989) J. Biol. Chem. 264:9547-9551). These enzymes catalyze the reduction of carbonyl-containing compounds, including carbonyl-containing sugars and aromatic compounds, to the corresponding alcohols. Therefore, a variety of carbonyl-containing drugs and xenobiotics are likely metabolized by enzymes of this class.

[0548] One known reaction catalyzed by a family member, aldose reductase, is the reduction of glucose to sorbitol, which is then further metabolized to fructose by sorbitol dehydrogenase. Under normal conditions, the reduction of glucose to sorbitol is a minor pathway. In hyperglycemic states, however, the accumulation of sorbitol is implicated in the development of diabetic complications (OMIM #103880 Aldo-keto reductase family 1, member B 1). Members of this enzyme family are also highly expressed in some liver cancers (Cao, D. et al. (1998) J. Biol. Chem. 273:11429-11435).

### Alcohol Dehydrogenases

[0549] Alcohol dehydrogenases (ADHs) oxidize simple alcohols to the corresponding aldehydes. ADH is a cytosolic enzyme, prefers the cofactor NAD⁺, and also binds zinc ion. Liver contains the highest levels of ADH, with lower levels in kidney, lung, and the gastric mucosa.

[0550] Known ADH isoforms are dimeric proteins composed of 40 kDa subunits. There are five known gene loci which encode these subunits (a, b, g, p, c), and some of the loci have characterized allelic variants (b₁, b₂, b₃, g₁, g₂). The subunits can form homodimers and heterodimers; the subunit composition determines the specific properties of the active enzyme. The holoenzymes have therefore been categorized as Class I (subunit compositions aa, ab, ag, bg, gg), Class II (pp), and Class III (cc). Class I ADH isozymes oxidize ethanol and other small aliphatic alcohols, and are inhibited by pyrazole. Class II isozymes prefer longer chain aliphatic and aromatic alcohols, are unable to oxidize methanol, and are not inhibited by pyrazole. Class III isozymes prefer even longer chain aliphatic alcohols (five carbons and longer) and aromatic alcohols, and are not inhibited by pyrazole.

[0551] The short-chain alcohol dehydrogenases include a number of related enzymes with a variety of substrate specificities. Included in this group are the mammalian enzymes D-beta-hydroxybutyrate dehydrogenase, (R)-3-hydroxybutyrate dehydrogenase, 15-hydroxyprostaglandin dehydrogenase, NADPH-dependent carbonyl reductase, corticosteroid 11-beta-dehydrogenase, and estradiol 17-beta-dehydrogenase, as well as the bacterial enzymes acetoacetyl-CoA reductase, glucose 1-dehydrogenase, 3-beta-hydroxysteroid dehydrogenase, 20-beta-hydroxysteroid dehydrogenase, ribitol dehydrogenase, 3-oxoacyl reductase, 2,3-dihydro-2,3-dihydroxybenzoate dehydrogenase, sorbitol-6-phosphate 2-dehydrogenase, 7-alpha-hydroxysteroid dehydrogenase, cis-1,2-dihydroxy-3,4-cyclohexadiene-1-carboxylate dehydrogenase, cis-toluene dihydrodiol dehydrogenase, cis-benzene glycol dehydrogenase, biphenyl-2,3-dihydro-2,3-diol dehydrogenase, N-acylmannosamine 1-dehydrogenase, and 2-deoxy-D-gluconate 3-dehydrogenase (Krozowski, Z. (1994) J. Steroid Biochem. Mol. Biol. 51:125-130; Krozowski, Z. (1992) Mol. Cell. Endocrinol. 84:C25-31; and Marks, A. R. et al. (1992) J. Biol. Chem. 267:15459-15463).

### Sulfotransferases

[0552] Sulfate conjugation occurs on many of the same substrates which undergo O-glucuronidation to produce a highly water-soluble sulfuric acid ester. Sulfotransferases (ST) catalyze this reaction by transferring SO₃⁻ from the cofactor 3′-phosphoadenosine-5′-phosphosulfate (PAPS) to the substrate. ST substrates are predominantly phenols and aliphatic alcohols, but also include aromatic amines and aliphatic amines, which are conjugated to produce the corresponding sulfamates. The products of these reactions are excreted mainly in urine.

[0553] STs are found in a wide range of tissues, including liver, kidney, intestinal tract, lung, platelets, and brain. The enzymes are generally cytosolic, and multiple forms are often co-expressed. For example, there are more than a dozen forms of ST in rat liver cytosol. These biochemically characterized STs fall into five classes based on their substrate preference: arylsulfotransferase, alcohol sulfotransferase, estrogen sulfotransferase, tyrosine ester sulfotransferase, and bile salt sulfotransferase.

[0554] ST enzyme activity varies greatly with sex and age in rats. The combined effects of developmental cues and sex-related hormones are thought to lead to these differences in ST expression profiles, as well as the profiles of other DMEs such as cytochromes P450. Notably, the high expression of STs in cats partially compensates for their low level of UDP glucuronyltransferase activity.

[0555] Several forms of ST have been purified from human liver cytosol and cloned. There are two phenol sulfotransferases with different thermal stabilities and substrate preferences. The thermostable enzyme catalyzes the sulfation of phenols such as para-nitrophenol, minoxidil, and acetaminophen; the thermolabile enzyme prefers monoamine substrates such as dopamine, epinephrine, and levadopa. Other cloned STs include an estrogen sulfotransferase and an N-acetylglucosamine-6-O-sulfotransferase-. This last enzyme is illustrative of the other major role of STs in cellular biochemistry, the modification of carbohydrate structures that may be important in cellular differentiation and maturation of proteoglycans. Indeed, an inherited defect in a sulfotransferase has been implicated in macular corneal dystrophy, a disorder characterized by a failure to synthesize mature keratan sulfate proteoglycans (Nakazawa, K. et al. (1984) J. Biol. Chem. 259:13751-13757; OMIM #217800 Macular dystrophy, corneal).

### Galactosyltransferases

[0556] Galactosyltransferases are a subset of glycosyltransferases that transfer galactose (Gal) to the terminal N-acetylglucosamine (GlcNAc) oligosaccharide chains that are part of glycoproteins or glycolipids that are free in solution (Kolbinger, F. et al. (1998) J. Biol. Chem. 273:433-440; Amado, M. et al. (1999) Biochim. Biophys. Acta 1473:35-53). Galactosyltransferases have been detected on the cell surface and as soluble extracellular proteins, in addition to being present in the Golgi. P1,3-galactosyltransferases form Type I carbohydrate chains with Gal (β.1-3)GlcNAc linkages. Known human and mouse β1,3-galactosyltransferases appear to have a short cytosolic domain, a single transmembrane domain, and a catalytic domain with eight conserved regions. (Kolbinger et al., supra; and Hennet, T. et al. (1998) J. Biol. Chem. 273:58-65). In mouse UDP-galactose: β-N-acetylglucosamine β1,3-galactosyltransferase-I region 1 is located at amino acid residues 78-83, region 2 is located at amino acid residues 93-102, region 3 is located at amino acid residues 116-119, region 4 is located at amino acid residues 147-158, region 5 is located at amino acid residues 172-183, region 6 is located at amino acid residues 203-206, region 7 is located at amino acid residues 236-246, and region 8 is located at amino acid residues 264-275. A variant of a sequence found within mouse UDP-galactose: β-N-acetylglucosamine β1,3-galactosyltransferase-I region 8 is also found in bacterial galactosyltransferases, suggesting that this sequence defines a galactosyltransferase sequence motif (Hennet et al., supra). Recent work suggests that brainiac protein is a β1,3-galactosyltransferase (Yuan, Y. et al. (1997) Cell 88:9-11; and Hennet et al., supra).

[0557] UDP-Gal:GlcNAc-1,4-galactosyltransferase (−1,4-GalT) (Sato, T. et al., (1997) EMBO J. 16:1850-1857) catalyzes the formation of Type II carbohydrate chains with Gal (β1-4)GlcNAc linkages. As is the case with the β1,3-galactosyltransferase, a soluble form of the enzyme is formed by cleavage of the membrane-bound form. Amino acids conserved among β1,4-galactosyltransferases include two cysteines linked through a disulfide-bond and a putative UDP-galactose-binding site in the catalytic domain (Yadav, S, and K. Brew (1990) J. Biol. Chem. 265:14163-14169; Yadav, S. P. and K. Brew (1991) J. Biol. Chem. 266:698-703; and Shaper, N. L. et al. (1997) J. Biol. Chem. 272:31389-31399). β1,4-galactosyltransferases have several specialized roles in addition to synthesizing carbohydrate chains on glycoproteins or glycolipids. In mammals a β1,4-galactosyltransferase, as part of a heterodimer with α.-lactalbumin, functions in lactating mammary gland lactose production. A β1,4-galactosyltransferase on the surface of sperm functions as a receptor that specifically recognizes the egg. Cell surface β1,4-galactosyltransferases also function in cell adhesion, cell/basal lamina interaction, and normal and metastatic cell migration. (Shur, B. (1993) Curr. Opin. Cell Biol. 5:854-863; and Shaper, J. (1995) Adv. Exp. Med. Biol. 376:95-104).

### Gamma-Glutamyl Transpeptidase

[0558] Gamma-glutamyl transpeptidases are ubiquitously expressed enzymes that initiate extracellular glutathione (GSH) breakdown by cleaving gamma-glutamyl amide bonds. The breakdown of GSH provides cells with a regional cysteine pool for biosynthetic pathways. Gamma-glutamyl transpeptidases also contribute to cellular antioxidant defenses and expression is induced by oxidative stress. The cell surface-localized glycoproteins are expressed at high levels in cancer cells. Studies have suggested that the high level of gamma-glutamyl transpeptidase activity present on the surface of cancer cells could be exploited to activate precursor drugs, resulting in high local concentrations of anti-cancer therapeutic agents (Hanigan, M. H. (1998) Chem. Biol. Interact. 111-112:333-342; Taniguchi, N. and Y. Ikeda (1998) Adv. Enzymol. Relat. Areas Mol. Biol. 72:239-278; Chikhi, N. et al. (1999) Comp. Biochem. Physiol. B. Biochem. Mol. Biol. 122:367-380).

### Aminotransferases

[0559] Aminotransferases comprise a family of pyridoxal 5′-phosphate (PLP)-dependent enzymes that catalyze transformations of amino acids. Aspartate aminotransferase (AspAT) is the most extensively studied PLP-containing enzyme. It catalyzes the reversible transamination of dicarboxylic L-amino acids, aspartate and glutamate, and the corresponding 2-oxo acids, oxalacetate and 2-oxoglutarate. Other members of the family include pyruvate aminotransferase, branched-chain amino acid aminotransferase, tyrosine aminotransferase, aromatic aminotransferase, alanine:glyoxylate aminotransferase (AGT), and kynurenine aminotransferase (Vacca, R. A. et al. (1997) J. Biol. Chem. 272:21932-21937).

Primary hyperoxaluria type-1 is an autosomal recessive disorder resulting in a deficiency in the liver-specific peroxisomal enzyme, alanine:glyoxylate aminotransferase-1. The phenotype of the disorder is a deficiency in glyoxylate metabolism. In the absence of AGT, glyoxylate is oxidized to oxalate rather than being transaminated to glycine. The result is the deposition of insoluble calcium oxalate in the kidneys and urinary tract, ultimately causing renal failure (Lumb, M. J. et al. (1999) J. Biol. Chem. 274:20587-20596).

[0560] Kynurenine aminotransferase catalyzes the irreversible transamination of the L-tryptophan metabolite L-kynurenine to form kynurenic acid. The enzyme may also catalyze the reversible transamination reaction between L-2-aminoadipate and 2-oxoglutarate to produce 2-oxoadipate and L-glutamate. Kynurenic acid is a putative modulator of glutamatergic neurotransmission; thus a deficiency in kynurenine aminotransferase may be associated with pleotrophic effects (Buchli, R. et al. (1995) J. Biol. Chem. 270:29330-29335).

### Catechol-O-Methyltransferase

[0561] Catechol-O-methyltransferase (COMT) catalyzes the transfer of the methyl group of S-adenosyl-L-methionine (AdoMet; SAM) donor to one of the hydroxyl groups of the catechol substrate (e.g., L-dopa, dopamine, or DBA). Methylation of the 3′-hydroxyl group is favored over methylation of the 4′-hydroxyl group and the membrane bound isoform of COMT is more regiospecific than the soluble form. Translation of the soluble form of the enzyme results from utilization of an internal start codon in a full-length mRNA (1.5 kb) or from the translation of a shorter mRNA (1.3 kb), transcribed from an internal promoter. The proposed S_{N}2-like methylation reaction requires Mg⁺⁺ and is inhibited by Ca⁺⁺. The binding of the donor and substrate to COMT occurs sequentially. AdoMet first binds COMT in a Mg⁺⁺-independent manner, followed by the binding of Mg⁺⁺ and the binding of the catechol substrate.

[0562] The amount of COMT in tissues is relatively high compared to the amount of activity normally required, thus inhibition is problematic. Nonetheless, inhibitors have been developed for in vitro use (e.g., gallates, tropolone, U-0521, and 3′,4′-dihydroxy-2-methyl-propiophetropol-one) and for clinical use (e.g., nitrocatechol-based compounds and tolcapone). Administration of these inhibitors results in the increased half-life of L-dopa and the consequent formation of dopamine. Inhibition of COMT is also likely to increase the half-life of various other catechol-structure compounds, including but not limited to epinephrine/norepinephrine, isoprenaline, rimiterol, dobutamine, fenoldopam, apomorphine, and a.-methyldopa. A deficiency in norepinephrine has been linked to clinical depression, hence the use of COMT inhibitors could be useful in the treatment of depression. COMT inhibitors are generally well tolerated with minimal side effects and are ultimately metabolized in the liver with only minor accumulation of metabolites in the body (Mnnisto, P. T. and S. Kaakkola (1999) Pharmacol. Rev. 51:593-628).

### Copper-Zinc Superoxide Dismutases

[0563] Copper-zinc superoxide dismutases are compact homodimeric metalloenzymes involved in cellular defenses against oxidative damage. The enzymes contain one atom of zinc and one atom of copper per subunit and catalyze the dismutation of superoxide anions into O₂ and H₂O₂ The rate of dismutation is diffusion-limited and consequently enhanced by the presence of favorable electrostatic interactions between the substrate and enzyme active site. Examples of this class of enzyme have been identified in the cytoplasm of all the eukaryotic cells as well as in the periplasm of several bacterial species. Copper-zinc superoxide dismutases are robust enzymes that are highly resistant to proteolytic digestion and denaturing by urea and SDS. In addition to the compact structure of the enzymes, the presence of the metal ions and intrasubunit disulfide bonds is believed to be responsible for enzyme stability. The enzymes undergo reversible denaturation at temperatures as high as 70° C. (Battistoni, A. et al. (1998) J. Biol. Chem. 273:5655-5661).

[0564] Overexpression of superoxide dismutase has been implicated in enhancing freezing tolerance of transgenic alfalfa as well as providing resistance to environmental toxins such as the diphenyl ether herbicide, acifluorfen (McKersie, B. D. et al. (1993) Plant Physiol. 103:1155-1163). In addition, yeast cells become more resistant to freeze-thaw damage following exposure to hydrogen peroxide which causes the yeast cells to adapt to further peroxide stress by upregulating expression of superoxide dismutases. In this study, mutations to yeast superoxide dismutase genes had a more detrimental effect on freeze-thaw resistance than mutations which affected the regulation of glutathione metabolism, long suspected of being important in determining an organism's survival through the process of cryopreservation (Jong-In Park, J.-I. et al. (1998) J. Biol. Chem. 273:22921-22928).

[0565] Expression of superoxide dismutase is also associated with Mycobacterium tuberculosis, the organism that causes tuberculosis. Superoxide dismutase is one of the ten major proteins secreted by M. tuberculosis and its expression is upregulated approximately 5-fold in response to oxidative stress. M. tuberculosis expresses almost two orders of magnitude more superoxide dismutase than the nonpathogenic mycobacterium M. smegmatis, and secretes a much higher proportion of the expressed enzyme. The result is the secretion of .about.350-fold more enzyme by M. tuberculosis than M. smegmatis, providing substantial resistance to oxidative stress (Harth, G. and M. A. Horwitz (1999) J. Biol. Chem. 274:4281-4292).

[0566] The reduced expression of copper-zinc superoxide dismutases, as well as other enzymes with anti-oxidant capabilities, has been implicated in the early stages of cancer. The expression of copper-zinc superoxide dismutases is reduced in prostatic intraepithelial neoplasia and prostate carcinomas, (Bostwick, D. G. (2000) Cancer 89:123-134).

### Phosphoesterases

[0567] Phosphotriesterases (PTE, paraoxonases) are enzymes that hydrolyze toxic organophosphorus compounds and have been isolated from a variety of tissues. Phosphotriesterases play a central role in the detoxification of insecticides by mammals. Birds and insects lack PTE, and as a result have reduced tolerance for organophosphorus compounds (Vilanova, E. and M. A. Sogorb (1999) Crit. Rev. Toxicol. 29:21-57). Phosphotriesterase activity varies among individuals and is lower in infants than adults. PTE knockout mice are markedly more sensitive to the organophosphate-based toxins diazoxon and chlorpyrifos oxon (Furlong, C. E., et al. (2000) Neurotoxicology 21:91-100). Phosphotriesterase is also implicated in atherosclerosis and diseases involving lipoprotein metabolism.

[0568] Glycerophosphoryl diester phosphodiesterase (also known as glycerophosphodiester phosphodiesterase) is a phosphodiesterase which hydrolyzes deacetylated phospholipid glycerophosphodiesters to produce sn-glycerol-3-phosphate and an alcohol. Glycerophosphocholine, glycerophosphoethanolamine, glycerophosphoglycerol, and glycerophosphoinositol are examples of substrates for glycerophosphoryl diester phosphodiesterases. A glycerophosphoryl diester phosphodiesterase from E. coli has broad specificity for glycerophosphodiester substrates (Larson, T. J. et al. (1983) J. Biol. Chem. 248:5428-5432).

[0569] Cyclic nucleotide phosphodiesterases (PDEs) are crucial enzymes in the regulation of the cyclic nucleotides cAMP and cGMP. cAMP and cGMP function as intracellular second messengers to transduce a variety of extracellular signals including hormones, light, and neurotransmitters. PDEs degrade cyclic nucleotides to their corresponding monophosphates, thereby regulating the intracellular concentrations of cyclic nucleotides and their effects on signal transduction. Due to their roles as regulators of signal transduction, PDEs have been extensively studied as chemotherapeutic targets (Perry, M. J. and G. A. Higgs (1998) Curr. Opin. Chem. Biol. 2:472-481; Torphy, J. T. (1998) Am. J. Resp. Crit. Care Med. 157:351-370).

[0570] Families of mammalian PDEs have been classified based on their substrate specificity and affinity, sensitivity to cofactors, and sensitivity to inhibitory agents (Beavo, J. A. (1995) Physiol. Rev. 75:725-748; Conti, M. et al. (1995) Endocrine Rev. 16:370-389). Several of these families contain distinct genes, many of which are expressed in different tissues as splice variants. Within PDE families, there are multiple isozymes and multiple splice variants of these isozymes (Conti, M. and S.-L. C. Jin (1999) Prog. Nucleic Acid Res. Mol. Biol. 63:1-38). The existence of multiple PDE families, isozymes, and splice variants is an indication of the variety and complexity of the regulatory pathways involving cyclic nucleotides (Houslay, M. D. and G. Milligan (1997) Trends Biochem. Sci. 22:217-224).

[0571] Type 1 PDEs (PDE1s) are Ca²⁺/calmodulin-dependent and appear to be encoded by at least three different genes, each having at least two different splice variants (Kakkar, R. et al. (1999) Cell Mol. Life. Sci. 55:1164-1186). PDE1s have been found in the lung, heart, and brain. Some PDE1 isozymes are regulated in vitro by phosphorylation/dephosphorylation-. Phosphorylation of these PDE1 isozymes decreases the affinity of the enzyme for calmodulin, decreases PDE activity, and increases steady state levels of cAMP (Kakkar et al., supra). PDE1s may provide useful therapeutic targets for disorders of the central nervous system and the cardiovascular and immune systems, due to the involvement of PDE1s in both cyclic nucleotide and calcium signaling (Perry and Higgs, supra).

[0572] PDE2s are cGMP-stimulated PDEs that have been found in the cerebellum, neocortex, heart, kidney, lung, pulmonary artery, and skeletal muscle (Sadhu, K. et al. (1999) J. Histochem. Cytochem. 47:895-906). PDE2s are thought to mediate the effects of cAMP on catecholamine secretion, participate in the regulation of aldosterone (Beavo, supra), and play a role in olfactory signal transduction (Juilfs, D. M. et al. (1997) Proc. Natl. Acad. Sci. USA 94:3388-3395).

PDE3s have high affinity for both cGMP and cAMP, and so these cyclic nucleotides act as competitive substrates for PDE3s. PDE3s play roles in stimulating myocardial contractility, inhibiting platelet aggregation, relaxing vascular and airway smooth muscle, inhibiting proliferation of T-lymphocytes and cultured vascular smooth muscle cells, and regulating catecholamine-induced release of free fatty acids from adipose tissue. The PDE3 family of phosphodiesterases are sensitive to specific inhibitors such as cilostamide, enoximone, and lixazinone. Isozymes of PDE3 can be regulated by cAMP-dependent protein kinase, or by insulin-dependent kinases (Degerman, E. et al. (1997) J. Biol. Chem. 272:6823-6826).

[0573] PDE4s are specific for cAMP; are localized to airway smooth muscle, the vascular endothelium, and all inflammatory cells; and can be activated by cAMP-dependent phosphorylation. Since elevation of cAMP levels can lead to suppression of inflammatory cell activation and to relaxation of bronchial smooth muscle, PDE4s have been studied extensively as possible targets for novel anti-inflammatory agents, with special emphasis placed on the discovery of asthma treatments. PDE4 inhibitors are currently undergoing clinical trials as treatments for asthma, chronic obstructive pulmonary disease, and atopic eczema. All four known isozymes of PDE4 are susceptible to the inhibitor rolipram, a compound which has been shown to improve behavioral memory in mice (Barad, M. et al. (1998) Proc. Natl. Acad. Sci. USA 95:15020-15025). PDE4 inhibitors have also been studied as possible therapeutic agents against acute lung injury, endotoxemia, rheumatoid arthritis, multiple sclerosis, and various neurological and gastrointestinal indications (Doherty, A. M. (1999) Curr. Opin. Chem. Biol. 3:466-473).

[0574] PDE5 is highly selective for cGMP as a substrate (Turko, I. V. et al. (1998) Biochemistry 37:4200-4205), and has two allosteric cGMP-specific binding sites (McAllister-Lucas, L. M. et al. (1995) J. Biol. Chem. 270:30671-30679). Binding of cGMP to these allosteric binding sites seems to be important for phosphorylation of PDE5 by cGMP-dependent protein kinase rather than for direct regulation of catalytic activity. High levels of PDE5 are found in vascular smooth muscle, platelets, lung, and kidney. The inhibitor zaprinast is effective against PDE5 and PDE1s. Modification of zaprinast to provide specificity against PDE5 has resulted in sildenafil (VIAGRA; Pfizer, Inc., New York N.Y.), a treatment for male erectile dysfunction (Terrett, N. et al. (1996) Bioorg. Med. Chem. Lett. 6:1819-1824). Inhibitors of PDE5 are currently being studied as agents for cardiovascular therapy (Perry and Higgs, supra).

[0575] PDE6s, the photoreceptor cyclic nucleotide phosphodiesterases, are crucial components of the phototransduction cascade. In association with the G-protein transducin, PDE6s hydrolyze cGMP to regulate cGMP-gated cation channels in photoreceptor membranes. In addition to the cGMP-binding active site, PDE6s also have two high-affinity cGMP-binding sites which are thought to play a regulatory role in PDE6 function (Artemyev, N. O. et al. (1998) Methods 14:93-104). Defects in PDE6s have been associated with retinal disease. Retinal degeneration in the rd mouse (Yan, W. et al. (1998) Invest. Opthalmol. Vis. Sci. 39:2529-2536), autosomal recessive retinitis pigmentosa in humans (Danciger, M. et al. (1995) Genomics 30:1-7), and rod/cone dysplasia 1 in Irish Setter dogs (Suber, M. L. et al. (1993) Proc. Natl. Acad. Sci. USA 90:3968-3972) have been attributed to mutations in the PDE6B gene.

[0576] The PDE7 family of PDEs consists of only one known member having multiple splice variants (Bloom, T. J. and J. A. Beavo (1996) Proc. Natl. Acad. Sci. USA 93:14188-14192). PDE7s are cAMP specific, but little else is known about their physiological function. Although mRNAs encoding PDE7s are found in skeletal muscle, heart, brain, lung, kidney, and pancreas, expression of PDE7 proteins is restricted to specific tissue types (Han, P. et al. (1997) J. Biol. Chem. 272:16152-16157; Perry and Higgs, supra). PDE7s are very closely related to the PDE4 family; however, PDE7s are not inhibited by rolipram, a specific inhibitor of PDE4s (Beavo, supra).

[0577] PDE8s are cAMP specific, and are closely related to the PDE4 family. PDE8s are expressed in thyroid gland, testis, eye, liver, skeletal muscle, heart, kidney, ovary, and brain. The cAMP-hydrolyzing activity of PDE8s is not inhibited by the PDE inhibitors rolipram, vinpocetine, milrinone, IBMX (3-isobutyl-1-methylxanthine), or zaprinast, but PDE8s are inhibited by dipyridamole (Fisher, D. A. et al. (1998) Biochem. Biophys. Res. Commun. 246:570-577; Hayashi, M. et al. (1998) Biochem. Biophys. Res. Commun. 250:751-756; Soderling, S. H. et al. (1998) Proc. Natl. Acad. Sci. USA 95:8991-8996).

[0578] PDE9s are cGMP specific and most closely resemble the PDE8 family of PDEs. PDE9s are expressed in kidney, liver, lung, brain, spleen, and small intestine. PDE9s are not inhibited by sildenafil (VIAGRA; Pfizer, Inc., New York N.Y.), rolipram, vinpocetine, dipyridamole, or IBMX (3-isobutyl-1-methylxanthine), but they are sensitive to the PDE5 inhibitor zaprinast (Fisher, D. A. et al. (1998) J. Biol. Chem. 273:15559-15564; Soderling, S. H. et al. (1998) J. Biol. Chem. 273:15553-15558).

[0579] PDE10s are dual-substrate PDEs, hydrolyzing both cAMP and cGMP. PDE10s are expressed in brain, thyroid, and testis. (Soderling, S. H. et al. (1999) Proc. Natl. Acad. Sci. USA 96:7071-7076; Fujishige, K. et al. (1999) J. Biol. Chem. 274:18438-18445; Loughney, K. et al (1999) Gene 234:109-117).

[0580] PDEs are composed of a catalytic domain of about 270-300 amino acids, an N-terminal regulatory domain responsible for binding cofactors, and, in some cases, a hydrophilic C-terminal domain of unknown function (Conti and Jin, supra). A conserved, putative zinc-binding motif has been identified in the catalytic domain of all PDEs. N-terminal regulatory domains include non-catalytic cGMP-binding domains in PDE2s, PDE5s, and PDE6s; calmodulin-binding domains in PDE1s; and domains containing phosphorylation sites in PDE3s and PDE4s. In PDE5, the N-terminal cGMP-binding domain spans about 380 amino acid residues and comprises tandem repeats of a conserved sequence motif (McAllister-Lucas, L. M. et al. (1993) J. Biol. Chem. 268:22863-22873). The NKXnD motif has been shown by mutagenesis to be important for cGMP binding (Turko, I. V. et al. (1996) J. Biol. Chem. 271:22240-22244). PDE families display approximately 30% amino acid identity within the catalytic domain; however, isozymes within the same family typically display about 85-95% identity in this region (e.g. PDE4A vs PDE4B). Furthermore, within a family to there is extensive similarity (>60%) outside the catalytic domain; while across families, there is little or no sequence similarity outside this domain.

[0581] Many of the constituent functions of immune and inflammatory responses are inhibited by agents that increase intracellular levels of cAMP (Verghese, M. W. et al. (1995) Mol. Pharmacol. 47:1164-1171). A variety of diseases have been attributed to increased PDE activity and associated with decreased levels of cyclic nucleotides. For example, a form of diabetes insipidus in mice has been associated with increased PDE4 activity, an increase in low-Kₘ cAMP PDE activity has been reported in leukocytes of atopic patients, and PDE3 has been associated with cardiac disease.

[0582] Many inhibitors of PDEs have undergone clinical evaluation (Perry and Higgs, supra; Torphy, T. J. (1998) Am. J. Respir. Crit. Care Med. 157:351-370). PDE3 inhibitors are being developed as antithrombotic agents, antihypertensive agents, and as cardiotonic agents useful in the treatment of congestive heart failure. Rolipram, a PDE4 inhibitor, has been used in the treatment of depression, and other PDE4 inhibitors have an anti-inflammatory effect. Rolipram may inhibit HIV-1 replication (Angel, J. B. et al. (1995) AIDS 9:1137-1144). Additionally, rolipram suppresses the production of cytokines such as TNF-a and b and interferon g, and thus is effective against encephalomyelitis. Rolipram may also be effective in treating tardive dyskinesia and multiple sclerosis (Sommer, N. et al. (1995) Nat. Med. 1:244-248; Sasaki, H. et al. (1995) Eur. J. Pharmacol. 282:71-76). Theophylline is a nonspecific PDE inhibitor used in treatment of bronchial asthma and other respiratory diseases. Theophylline is believed to act on airway smooth muscle function and in an anti-inflammatory or immunomodulatory capacity Banner, K. H. and C. P. Page (1995) Eur. Respir. J. 8:996-1000). Pentoxifylline is another nonspecific PDE inhibitor used in the treatment of intermittent claudication and diabetes-induced peripheral vascular disease. Pentoxifylline is also known to block TNF-a production and may inhibit HIV-1 replication (Angel et al., supra).

[0583] PDEs have been reported to affect cellular proliferation of a variety of cell types (Conti et al. (1995) Endocrine Rev. 16:370-389) and have been implicated in various cancers. Growth of prostate carcinoma cell lines DU145 and LNCaP was inhibited by delivery of cAMP derivatives and PDE inhibitors (Bang, Y. J. et al. (1994) Proc. Natl. Acad. Sci. USA 91:5330-5334). These cells also showed a permanent conversion in phenotype from epithelial to neuronal morphology. It has also been suggested that PDE inhibitors can regulate mesangial cell proliferation (Matousovic, K. et al. (1995) J. Clin. Invest. 96:401-410) and lymphocyte proliferation (Joulain, C. et al. (1995) J. Lipid Mediat. Cell Signal. 11:63-79). One cancer treatment involves intracellular delivery of PDEs to particular cellular compartments of tumors, resulting in cell death (Deonarain, M. P. and A. A. Epenetos (1994) Br. J. Cancer 70:786-794).

[0584] Members of the UDP glucuronyltransferase family (UGTs) catalyze the transfer of a glucuronic acid group from the cofactor uridine diphosphate-glucuronic acid (UDP-glucuronic acid) to a substrate. The transfer is generally to a nucleophilic heteroatom (O, N, or S). Substrates include xenobiotics which have been functionalized by Phase I reactions, as well as endogenous compounds such as bilirubin, steroid hormones, and thyroid hormones. Products of glucuronidation are excreted in urine if the molecular weight of the substrate is less than about 250 g/mol, whereas larger glucuronidated substrates are excreted in bile.

[0585] UGTs are located in the microsomes of liver, kidney, intestine, skin, brain, spleen, and nasal mucosa, where they are on the same side of the endoplasmic reticulum membrane as cytochrome P450 enzymes and flavin-containing monooxygenases. UGTs have a C-terminal membrane-spanning domain which anchors them in the endoplasmic reticulum membrane, and a conserved signature domain of about 50 amino acid residues in their C terminal section (PROSITE PDOC00359 UDP-glycosyltransferase signature).

[0586] UGTs involved in drug metabolism are encoded by two gene families, UGT1 and UGT2. Members of the UGT1 family result from alternative splicing of a single gene locus, which has a variable substrate binding domain and constant region involved in cofactor binding and membrane insertion. Members of the UGT2 family are encoded by separate gene loci, and are divided into two families, UGT2A and UGT2B. The 2A subfamily is expressed in olfactory epithelium, and the 2B subfamily is expressed in liver microsomes. Mutations in UGT genes are associated with hyperbilirubinemia (OMIM #143500 Hyperbilirubinemia I); Crigler-Najjar syndrome, characterized by intense hyperbilirubinemia from birth (OMIM #218800 Crigler-Najjar syndrome); and a milder form of hyperbilirubinemia termed Gilbert's disease (OMIM #191740 UGT1).

### Thioesterases

[0587] Two soluble thioesterases involved in fatty acid biosynthesis have been isolated from mammalian tissues, one which is active only toward long-chain fatty-acyl thioesters and one which is active toward thioesters with a wide range of fatty-acyl chain-lengths. These thioesterases catalyze the chain-terminating step in the de novo biosynthesis of fatty acids. Chain termination involves the hydrolysis of the thioester bond which links the fatty acyl chain to the 4′-phosphopantetheine prosthetic group of the acyl carrier protein (ACP) subunit of the fatty acid synthase (Smith, S. (1981a) Methods Enzymol. 71:181-188; Smith, S. (1981b) Methods Enzymol. 71:188-200).

[0588] E. coli contains two soluble thioesterases, thioesterase I which is active only toward long-chain acyl thioesters, and thioesterase II (TEII) which has a broad chain-length specificity (Naggert, J. et al. (1991) J. Biol. Chem. 266:11044-11050). E. coli TEII does not exhibit sequence similarity with either of the two types of mammalian thioesterases which function as chain-terminating enzymes in de novo fatty acid biosynthesis. Unlike the mammalian thioesterases, E. coli TEII lacks the characteristic serine active site gly-X-ser-X-gly sequence motif and is not inactivated by the serine modifying agent diisopropyl fluorophosphate. However, modification of histidine 58 by iodoacetamide and diethylpyrocarbonate abolished TEII activity. Overexpression of TEII did not alter fatty acid content in E. coli, which suggests that it does not function as a chain-terminating enzyme in fatty acid biosynthesis (Naggert et al., supra). For that reason, Naggert et al. (supra) proposed that the physiological substrates for E. coli TEII may be coenzyme A (CoA)-fatty acid esters instead of ACP-phosphopanthetheine-fatty acid esters.

### Carboxylesterases

[0589] Mammalian carboxylesterases are a multigene family expressed in a variety of tissues and cell types. Acetylcholinesterase, butyrylcholinesterase, and carboxylesterase are grouped into the serine superfamily of esterases (B-esterases). Other carboxylesterases include thyroglobulin, thrombin, Factor IX, gliotactin, and plasminogen. Carboxylesterases catalyze the hydrolysis of ester- and amide-groups from molecules and are involved in detoxification of drugs, environmental toxins, and carcinogens. Substrates for carboxylesterases include short- and long-chain acyl-glycerols, acylcarnitine, carbonates, dipivefrin hydrochloride, cocaine, salicylates, capsaicin, palmitoyl-coenzyme A, imidapril, haloperidol, pyrrolizidine alkaloids, steroids, p-nitrophenyl acetate, malathion, butanilicaine, and isocarboxazide. Carboxylesterases are also important for the conversion of prodrugs to free acids, which may be the active form of the drug (e.g., lovastatin, used to lower blood cholesterol) (reviewed in Satoh, T. and Hosokawa, M. (1998) Annu. Rev. Pharmacol. Toxicol. 38:257-288). Neuroligins are a class of molecules that (i) have N-terminal signal sequences, (ii) resemble cell-surface receptors, (iii) contain carboxylesterase domains, (iv) are highly expressed in the brain, and (v) bind to neurexins in a calcium-dependent manner. Despite the homology to carboxylesterases, neuroligins lack the active site serine residue, implying a role in substrate binding rather than catalysis (Ichtchenko, K. et al. (1996) J. Biol. Chem. 271:2676-2682).

### Squalene Epoxidase

[0590] Squalene epoxidase (squalene monooxygenase, SE) is a microsomal membrane-bound, FAD-dependent oxidoreductase that catalyzes the first oxygenation step in the sterol biosynthetic pathway of eukaryotic cells. Cholesterol is an essential structural component of cytoplasmic membranes acquired via the LDL receptor-mediated pathway or the biosynthetic pathway. SE converts squalene to 2,3(S)oxidosqualene, which is then converted to lanosterol and then cholesterol.

[0591] High serum cholesterol levels result in the formation of atherosclerotic plaques in the arteries of higher organisms. This deposition of highly insoluble lipid material onto the walls of essential blood vessels results in decreased blood flow and potential necrosis. HMG-CoA reductase is responsible for the first committed step in cholesterol biosynthesis, conversion of 3-hydroxyl-3-methyl-glutaryl CoA (HMG-CoA) to mevalonate. HMG-CoA is the target of a number of pharmaceutical compounds designed to lower plasma cholesterol levels, but inhibition of MSG-CoA also results in the reduced synthesis of non-sterol intermediates required for other biochemical pathways. Since SE catalyzes a rate-limiting reaction that occurs later in the sterol synthesis pathway with cholesterol as the only end product, SE is a better ideal target for the design of anti-hyperlipidemic drugs (Nakamura, Y. et al. (1996) 271:8053-8056).

### Epoxide Hydrolases

[0592] Epoxide hydrolases catalyze the addition of water to epoxide-containing compounds, thereby hydrolyzing epoxides to their corresponding 1,2-diols. They are related to bacterial haloalkane dehalogenases and show sequence similarity to other members of the α/β hydrolase fold family of enzymes. This family of enzymes is important for the detoxification of xenobiotic epoxide compounds which are often highly electrophilic and destructive when introduced. Examples of epoxide hydrolase reactions include the hydrolysis of some leukotoxin to leukotoxin diol, and isoleukotoxin to isoleukotoxin diol. Leukotoxins alter membrane permeability and ion transport and cause inflammatory responses. In addition, epoxide carcinogens are produced by cytochrome P450 as intermediates in the detoxification of drugs and environmental toxins. Epoxide hydrolases possess a catalytic triad composed of Asp, Asp, and His (Arand, M. et al. (1996) J. Biol. Chem. 271:4223-4229; Rink, R. et al. (1997) J. Biol. Chem. 272:14650-14657; Argiriadi, M. A. et al. (2000) J. Biol. Chem. 275:15265-15270).

### Enzymes Involved in Tyrosine Catalysis

[0593] The degradation of the amino acid tyrosine, to either succinate and pyruvate or fumarate and acetoacetate, requires a large number of enzymes and generates a large number of intermediate compounds. In addition, many xenobiotic compounds may be metabolized using one or more reactions that are part of the tyrosine catabolic pathway. Enzymes involved in the degradation of tyrosine to succinate and pyruvate (e.g., in Arthrobacter species) include 4-hydroxyphenylpyruvate oxidase, 4-hydroxyphenylacetate 3-hydroxylase, 3,4-dihydroxyphenylacetate 2,3-dioxygenase, 5-carboxymethyl-2-hydroxymuconic semialdehyde dehydrogenase, trans,cis-5-carboxymethyl-2-hydroxymuconate isomerase, homoprotocatechuate isomerase/decarboxylase, cis-2-oxohept-3-ene-1,7-dioate hydratase, 2,4-dihydroxyhept-trans-2-ene-1,7-dioate aldolase, and succinic semialdehyde dehydrogenase. Enzymes involved in the degradation of tyrosine to fumarate and acetoacetate (e.g., in Pseudomonas species) include 4-hydroxyphenylpyruvate dioxygenase, homogentisate 1,2-dioxygenase, maleylacetoacetate isomerase, fumarylacetoacetate and 4-hydroxyphenylacetate. Additional enzymes associated with tyrosine metabolism in different organisms include 4-chlorophenylacetate-3,4-dioxygenase, aromatic aminotransferase, 5-oxopent-3-ene-1,2,5-tricarboxylate decarboxylase, 2-oxo-hept-3-ene-1,7-dioate hydratase, and 5-carboxymethyl-2-hydroxymuconate isomerase (Ellis, L. B. M. et al. (1999) Nucleic Acids Res. 27:373-376; Wackett, L. P. and Ellis, L. B. M. (1996) J. Microbiol. Meth. 25:91-93; and Schmidt, M. (1996) Amer. Soc. Microbiol. News 62:102).

[0594] In humans, acquired or inherited genetic defects in enzymes of the tyrosine degradation pathway may result in hereditary tyrosinemia. One form of this disease, hereditary tyrosinemia 1 (HT1) is caused by a deficiency in the enzyme fumarylacetoacetate hydrolase, the last enzyme in the pathway in organisms that metabolize tyrosine to fumarate and acetoacetate. HT1 is characterized by progressive liver damage beginning at infancy, and increased risk for liver cancer (Endo, F. et al. (1997) J. Biol. Chem. 272:24426-24432).

### Exemplary Agricultural Enzyme Uses

[0595] Enzymes with known function are useful in a solving a number of different agricultural problems. The following list of exemplary problems does not purport to be exhaustive.

[0596] One exemplary problem is fixation of soil nitrogen. Enzymatic solutions to this problem are described in, for example, “Management of Biological Nitrogen Fixation for the Development of More Productive and Sustainable Agricultural Systems” which presents extended versions of papers presented in the Symposium on Biological Nitrogen Fixation for Sustainable Agriculture at the 15th Congress of Soil Science, Acapulco, Mexico 1994. (Developments in Plant and Soil Sciences, Vol. 65 Ladha, J. K.; Peoples, M. B. (Eds.) published by Springer-Verlag: Reprinted from PLANT AND SOIL (1995)174:1-2, ISBN: 978-0-7923-3413-2).

[0597] Another exemplary problem is feed digestibility, for example in poultry and swine. Enzymatic solutions to this problem are described in, for example, “Enzymes in Poultry and Swine Nutrition” By Marquardt and Han (Proceedings of the first Chinese Symposium on Feed Enzymes, Nanjing Agricultural University, Nanjing, People's Republic of China, 6-8 May 1996; International Research and Development Center, Ottawa;. ISBN 088936821X). Papers presented in this reference indicate that many exciting developments can be expected regarding use of enzymes in feeds, particularly with the use of recombinant enzymes for a wide range of animals and animal feedstuffs. Enzymes not only will enable livestock and poultry producers to economically use new feedstuffs, but will also prove to be environmentally friendly, as they reduce the pollution associated with animal production.

[0598] “Enzymes in the Environment: Activity, Ecology, and Applications” edited by Burns and Dick (Books in Soils, Plants, and the Environment (2002) Volume: 84 CRC Press; ISBN: 9780824706142) points out the great unmet need for a reliable means of classifying enzymes functionally as disclosed hereinabove.

[0599] According to the Food and Agricultural Organization of the United Nations:
[0600] “Bioprocessing which involves the use of enzymes and microorganisms for the conversion of raw food materials into a diversity of products, offers tremendous opportunity for stimulating agro-industrial development in developing countries. The processes involved are scaleable, environmentally friendly, and can be economically applied and linked to existing practices in these countries. Many of the traditional food bioprocessing techniques used in developing countries however require considerable scientific and technological improvement.”

[0601] The Food and Agricultural Organization of the United Nations has also published a pamphlet entitled “SMALL-SCALE PROCESSING OF MICROBIAL PESTICIDES” Taborsky (1992) FAO AGRICULTURAL SERVICES BULLETIN No. 96; Food and Agriculture Organization of the United Nations Rome 1992) describes use of chitinase and/or other enzymes in decomposition of insect integuments.

[0602] Optionally, a bacterial polypeptide toxin, optionally an enzyme, is overpressed in plants. This strategy has previously been employed with Bacillus thurigens toxins. In an exemplary embodiment of the invention, toxins from other bacteria are identified using exemplary methods disclosed herein.

### Exemplary Formulations

[0603] In an exemplary embodiment of the invention, a polypeptide according to one or more of SEQ ID Nos.: 77,838 to 198,923 is formulated so that the enzyme(s) are efficiently presented to their substrates for substrate processing. Formulation optionally reflects intended use. In an exemplary embodiment of the invention, the formulation includes pH adjusters (e.g. buffering agents) and/or osmotic adjusters (e.g. specific salts and/or ions) to contribute to enzymatic activity The following listing of exemplary formulations does not limit the scope of the invention.

[0604] Optionally, the formulation is provided as a pharmaceutical composition.

[0605] As used herein a “pharmaceutical composition” refers to a preparation of one or more of the active ingredients described herein with other chemical components such as physiologically suitable carriers and excipients. The purpose of a pharmaceutical composition is to facilitate administration of a compound to an organism.

[0606] Herein the term “active ingredient” refers to the nucleic acid construct accountable for the biological effect.

[0607] Hereinafter, the phrases “physiologically acceptable carrier” and “pharmaceutically acceptable carrier” which may be interchangeably used refer to a carrier or a diluent that does not cause significant irritation to an organism and does not abrogate the biological activity and properties of the administered compound. An adjuvant is included under these phrases.

[0608] Herein the term “excipient” refers to an inert substance added to a pharmaceutical composition to further facilitate administration of an active ingredient. Examples, without limitation, of excipients include calcium carbonate, calcium phosphate, various sugars and types of starch, cellulose derivatives, gelatin, vegetable oils and polyethylene glycols.

[0609] Techniques for formulation and administration of drugs may be found in “Remington's Pharmaceutical Sciences,” Mack Publishing Co., Easton, Pa., latest edition, which is incorporated herein by reference.

[0610] Suitable routes of administration may, for example, include oral, rectal, transmucosal, especially transnasal, intestinal or parenteral delivery, including intramuscular, subcutaneous and intramedullary injections as well as intrathecal, direct intraventricular, intravenous, inrtaperitoneal, intranasal, or intraocular injections.

[0611] Alternately, one may administer the pharmaceutical composition in a local rather than systemic manner, for example, via injection of the pharmaceutical composition directly into a tissue region of a patient.

[0612] Pharmaceutical compositions of the present invention may be manufactured by processes well known in the art, e.g., by means of conventional mixing, dissolving, granulating, dragee-making, levigating, emulsifying, encapsulating, entrapping or lyophilizing processes.

[0613] Pharmaceutical compositions for use in accordance with the present invention thus may be formulated in conventional manner using one or more physiologically acceptable carriers comprising excipients and auxiliaries, which facilitate processing of the active ingredients into preparations which, can be used pharmaceutically. Proper formulation is dependent upon the route of administration chosen.

[0614] For injection, the active ingredients of the pharmaceutical composition may be formulated in aqueous solutions, preferably in physiologically compatible buffers such as Hank's solution, Ringer's solution, or physiological salt buffer. For transmucosal administration, penetrants appropriate to the barrier to be permeated are used in the formulation. Such penetrants are generally known in the art.

[0615] For oral administration, the pharmaceutical composition can be formulated readily by combining the active compounds with pharmaceutically acceptable carriers well known in the art. Such carriers enable the pharmaceutical composition to be formulated as tablets, pills, dragees, capsules, liquids, gels, syrups, slurries, suspensions, and the like, for oral ingestion by a patient. Pharmacological preparations for oral use can be made using a solid excipient, optionally grinding the resulting mixture, and processing the mixture of granules, after adding suitable auxiliaries if desired, to obtain tablets or dragee cores. Suitable excipients are, in particular, fillers such as sugars, including lactose, sucrose, mannitol, or sorbitol; cellulose preparations such as, for example, maize starch, wheat starch, rice starch, potato starch, gelatin, gum tragacanth, methyl cellulose, hydroxypropylmethyl-cellulose, sodium carbomethylcellulose; and/or physiologically acceptable polymers such as polyvinylpyrrolidone (PVP). If desired, disintegrating agents may be added, such as cross-linked polyvinyl pyrrolidone, agar, or alginic acid or a salt thereof such as sodium alginate.

[0616] Dragee cores are provided with suitable coatings. For this purpose, concentrated sugar solutions may be used which may optionally contain gum arabic, talc, polyvinyl pyrrolidone, carbopol gel, polyethylene glycol, titanium dioxide, lacquer solutions and suitable organic solvents or solvent mixtures. Dyestuffs or pigments may be added to the tablets or dragee coatings for identification or to characterize different combinations of active compound doses.

[0617] Pharmaceutical compositions which can be used orally, include push-fit capsules made of gelatin as well as soft, sealed capsules made of gelatin and a plasticizer, such as glycerol or sorbitol. The push-fit capsules may contain the active ingredients in admixture with filler such as lactose, binders such as starches, lubricants such as talc or magnesium stearate and, optionally, stabilizers. In soft capsules, the active ingredients may be dissolved or suspended in suitable liquids, such as fatty oils, liquid paraffin, or liquid polyethylene glycols. In addition, stabilizers may be added. All formulations for oral administration should be in dosages suitable for the chosen route of administration.

[0618] For buccal administration, the compositions may take the form of tablets or lozenges formulated in conventional manner.

[0619] For administration by nasal inhalation, the active ingredients for use according to the present invention are conveniently delivered in the form of an aerosol spray presentation from a pressurized pack or a nebulizer with the use of a suitable propellant, e.g., dichlorodifluoromethane, trichlorofluoromethane, dichloro-tetrafluoroethane or carbon dioxide. In the case of a pressurized aerosol, the dosage unit may be determined by providing a valve to deliver a metered amount. Capsules and cartridges of, e.g., gelatin for use in a dispenser may be formulated containing a powder mix of the compound and a suitable powder base such as lactose or starch.

[0620] The pharmaceutical composition described herein may be formulated for parenteral administration, e.g., by bolus injection or continuos infusion. Formulations for injection may be presented in unit dosage form, e.g., in ampoules or in multidose containers with optionally, an added preservative. The compositions may be suspensions, solutions or emulsions in oily or aqueous vehicles, and may contain formulatory agents such as suspending, stabilizing and/or dispersing agents.

[0621] Pharmaceutical compositions for parenteral administration include aqueous solutions of the active preparation in water-soluble form. Additionally, suspensions of the active ingredients may be prepared as appropriate oily or water based injection suspensions. Suitable lipophilic solvents or vehicles include fatty oils such as sesame oil, or synthetic fatty acids esters such as ethyl oleate, triglycerides or liposomes. Aqueous injection suspensions may contain substances, which increase the viscosity of the suspension, such as sodium carboxymethyl cellulose, sorbitol or dextran. Optionally, the suspension may also contain suitable stabilizers or agents which increase the solubility of the active ingredients to allow for the preparation of highly concentrated solutions.

[0622] Alternatively, the active ingredient may be in powder form for constitution with a suitable vehicle, e.g., sterile, pyrogen-free water based solution, before use.

[0623] The pharmaceutical composition of the present invention may also be formulated in rectal compositions such as suppositories or retention enemas, using, e.g., conventional suppository bases such as cocoa butter or other glycerides.

[0624] Pharmaceutical compositions suitable for use in context of the present invention include compositions wherein the active ingredients are contained in an amount effective to achieve the intended purpose. More specifically, a therapeutically effective amount means an amount of active ingredients (nucleic acid construct) effective to prevent, alleviate or ameliorate symptoms of a disorder (e.g., ischemia) or prolong the survival of the subject being treated.

[0625] Determination of a therapeutically effective amount is well within the capability of those skilled in the art, especially in light of the detailed disclosure provided herein.

[0626] For any preparation used in the methods of the invention, the therapeutically effective amount or dose can be estimated initially from in vitro and cell culture assays. For example, a dose can be formulated in animal models to achieve a desired concentration or titer. Such information can be used to more accurately determine useful doses in humans.

[0627] Toxicity and therapeutic efficacy of the active ingredients described herein can be determined by standard pharmaceutical procedures in vitro, in cell cultures or experimental animals. The data obtained from these in vitro and cell culture assays and animal studies can be used in formulating a range of dosage for use in human. The dosage may vary depending upon the dosage form employed and the route of administration utilized. The exact formulation, route of administration and dosage can be chosen by the individual physician in view of the patient's condition. (See e.g., Fingl, et al., 1975, in “The Pharmacological Basis of Therapeutics”, Ch. 1 p. 1).

[0628] Dosage amount and interval may be adjusted individually to provide plasma or brain levels of the active ingredient are sufficient to induce or suppress angiogenesis (minimal effective concentration, MEC). The MEC will vary for each preparation, but can be estimated from in vitro data. Dosages necessary to achieve the MEC will depend on individual characteristics and route of administration. Detection assays can be used to determine plasma concentrations.

[0629] Depending on the severity and responsiveness of the condition to be treated, dosing can be of a single or a plurality of administrations, with course of treatment lasting from several days to several weeks or until cure is effected or diminution of the disease state is achieved.

[0630] The amount of a composition to be administered will, of course, be dependent on the subject being treated, the severity of the affliction, the manner of administration, the judgment of the prescribing physician, etc.

[0631] Compositions of the present invention may, if desired, be presented in a pack or dispenser device, such as an FDA approved kit, which may contain one or more unit dosage forms containing the active ingredient. The pack may, for example, comprise metal or plastic foil, such as a blister pack. The pack or dispenser device may be accompanied by instructions for administration. The pack or dispenser may also be accommodated by a notice associated with the container in a form prescribed by a governmental agency regulating the manufacture, use or sale of pharmaceuticals, which notice is reflective of approval by the agency of the form of the compositions or human or veterinary administration. Such notice, for example, may be of labeling approved by the U.S. Food and Drug Administration for prescription drugs or of an approved product insert. Compositions comprising a preparation of the invention formulated in a compatible pharmaceutical carrier may also be prepared, placed in an appropriate container, and labeled for treatment of an indicated condition, as if further detailed above.

[0632] Optionally, the formulation is provided as a cosmetic preparation. The cosmetic preparation can comprise one or more topically applicable materials including, but not limited to, penetrating agents, oils, scents, colors powders. According to various exemplary embodiments of the invention, a cosmetic preparation can be provided as a cream, a lotion, a gel, an eye-shadow, foundation makeup, rouge mail polish, mascara, lip-liner or lipstick.

[0633] Optionally, the formulation is provided as an agricultural preparation. Agricultural preparations include, but are not limited to, feed additives, veterinary medications, sprays, liquids and foams.

[0634] Formulation of feed additives and veterinary medications involves similar considerations to those described hereinabove for pharmaceutical compositions.

[0635] Optionally, sprays are formulated for close application (e.g. from a tractor or using a handheld sprayer) or for application from a distance (e.g. via an irrigation system or from an airplane). In exemplary embodiments of the invention, sprays are applied to animals (e.g. for vaccination or parasite removal) or to plants (e.g. as herbicides or pesticides).

[0636] Optionally, the formulation is provided as a cleaning preparation. Cleaning preparations can include, in addition to the active polypeptide, one or more of a soap, a detergent, a surfactant, a wetting agent, an emulsifier and a solvent. The cleaning preparation can be provided in a wide variety of forms, including but not limited to, a spray (optionally with aerosol propellant), a cream, a gel and a liquid. In an exemplary embodiment of the invention, the cleaning preparation is provided in a package with dilution instructions. In other exemplary embodiments, the cleaning preparation is provided in a package at a “ready to use” concentration.

[0637] Additional objects, advantages and novel features of the present invention will become apparent to one ordinarily skilled in the art upon examination of the following examples, which are not intended to be limiting. Additionally, each of the various embodiments and aspects of the present invention as delineated hereinabove and as claimed in the claims section below finds experimental support in the following examples.

### EXAMPLES

[0638] Reference is now made to the following examples, which together with the above descriptions illustrate the invention in a non limiting fashion.

[0639] The teachings of the present embodiments were used for predicting the function and/or affinity of an enzyme from its amino-acid sequence by searching therein for a motif of amino acids matching a predicting sequence of an enzyme database, and attributing to the unclassified enzyme a classifier in the form of an EC number. Example 1 below describes the procedure for the construction of an exemplary enzyme database. Example 2 below describes the procedure of classification of an first exemplary set of unclassified enzymes. Example 3 below describes the procedure for the construction of an additional exemplary enzyme database. Example 4 below describes theoretical considerations for characterization an additional set of peptides using the database of Example 3. Example 5 below describes characterization of the metagenomic dataset of Example 3. Example 6 below presents an analysis of enzyme size. Example 7 below presents a characterization of the unknown enzyme set of example 4 according to the database of example 3. Example 8 below presents a correlation of predicting sequence (PS) sequences to EC functional classifications of known enzymes. Example 9 below describes exemplary detergent compositions. Example 10 below presents exemplary food processing compositions. Example 11 below presents exemplary compositions from ethanol production. Example 12 below presents a comparison of exemplary methods according to the invention to Prosite.

### Example 1

### Exemplary Enzyme Searchable Database

### Methods

[0640] The motif extraction procedure described above was used for defining predicting sequences for almost all known enzymes and at all levels of the EC hierarchical classification. The procedure was separately applied to each one of the six EC main classes. The decrease functions D_{R} and D_{L} were defined as described hereinabove using the values η_{R}=η_{L}=0.8. The statistical significance threshold a was 0.01.

[0641] Protein sequences annotated with EC numbers were extracted from the UniProt/Swiss-Prot database (Release 48.3, Oct. 25, 2005). The following sequences were removed from the database: (i) sequences shorter than 100 amino acids or longer than 1200 amino acids; (ii) sequences with imprecise annotation (e.g., indicated as “probable”/“hypothetical”/“putative” or partially specified EC number); (iii) enzymes that catalyze more than one reaction (e.g., indicated as “bi-functional” or annotated with more than one EC number).

[0642] Table 2 summarizes the statistics of the dataset.

TABLE 2

| | | No. of | No. of |
|---|---|---|---|
| EC class | No. of sequences | subclasses | subsubclasses |
| oxidoreductases | 9437 | 21 | 81 |
| transferases | 16196 | 9 | 26 |
| hydrolases | 10901 | 10 | 47 |
| lyases | 5299 | 7 | 15 |
| isomerases | 2887 | 6 | 17 |
| ligases | 6048 | 6 | 10 |
| total | 50698 | 59 | 196 |

[0643] The motif extraction procedure was used to define predicting sequences that are specific to one, and only one, branch of the EC hierarchical classification, excluding uniqueness within its descending branches. The procedures were also applied to an older release of Swiss-Prot, release 45 dated October, 2004, with the statistics which is summarized in Table 3.

TABLE 3

| | | No. of | No. of |
|---|---|---|---|
| EC class | No. of sequences | subclasses | subsubclasses |
| oxidoreductases | 7918 | 21 | 79 |
| transferases | 12807 | 9 | 26 |
| hydrolases | 8982 | 10 | 47 |
| lyases | 4632 | 7 | 15 |
| isomerases | 2234 | 6 | 17 |
| ligases | 4692 | 6 | 10 |
| total | 41265 | 59 | 194 |

### Results

[0644] Following is a description of analysis performed to the enzyme database constructed from the data summarized in Tables 2 and 3 above. The entire enzyme database, as constructed from the 50,698 enzymes summarized in Table 2 is provided in Appendix 1 below and further in Table 11 on enclosed CD-ROM (files “Table-11. txt”). Below, a predicting sequence of level N, is conveniently denoted PSN, and is referred to a sequence which predicts its location on the EC tree at level N.

[0645] In some of the priority documents of the instant Application, PSN is referred to as SPN. Thus, SP1, SP2, SP3 and SP4 in some of the priority documents correspond to PS1, PS2, PS3 and PS4 in the instant Application, respectively.

[0646] The procedure extracted of many motifs. The procedure has been applied to each main EC class and to all the enzymes specified by the main EC class. Nonetheless, more than half of all motifs turn out to belong uniquely to single branches of the fourth level of the hierarchy, to be denoted as predicting sequence of level 4 (PS4).

[0647] It should be realized that, at the fourth level, one encounters strong homology between all amino-acid sequences. The PS4 stretches are specific motifs that are extracted from these homologs. The lower levels of predicting sequences, PS3, PS2 and PS1 do not include any of their descendants. Thus PS3 does not include predicting sequences of PS4 belonging to branches of the same subsubclass. The numbers of predicting sequences found are listed below in Tables 4 and 5 for the datasets presented in Tables 2 and 3, respectively.

TABLE 4

| EC class | No. of PS4 | No. of PS3 | No. of PS2 | No. of PS1 |
|---|---|---|---|---|
| oxidoreductases | 12781 | 868 | 379 | 1311 |
| transferases | 20043 | 918 | 488 | 2123 |
| hydrolases | 10822 | 1120 | 197 | 1153 |
| lyases | 7886 | 200 | 59 | 300 |
| isomerases | 4080 | 54 | 26 | 154 |
| ligases | 11695 | 573 | 99 | 508 |
| total | 67307 | 3733 | 1248 | 5549 |

TABLE 5

| EC class | No. of PS4 | No. of PS3 | No. of PS2 | No. of PS1 |
|---|---|---|---|---|
| oxidoreductases | 10312 | 719 | 375 | 1087 |
| transferases | 15032 | 750 | 351 | 1576 |
| hydrolases | 8575 | 920 | 159 | 962 |
| lyases | 6613 | 180 | 49 | 286 |
| isomerases | 2939 | 43 | 17 | 98 |
| ligases | 8572 | 422 | 81 | 369 |
| total | 52043 | 3034 | 1058 | 4378 |

[0648] The lists of predicting sequences in Tables 4 and 5 above contain overlaps, e.g., stretches which are parts of other stretches. No attempt was made to obtain a minimal set of predicting sequences.

[0649] To determine the usefulness of the predicting sequences the coverage of the predicting sequences as well as their cumulants was investigated. The latter were defined as unions of the former CPS3=PS3∪PS4, CPS2=PS2∪CPS3 and CPS1=PS1∪CPS2.

[0650] In some of the priority documents of the instant Application, the cumulants CPS3, CPS2 and CPS1 are referred to as CSP1, CSP2 and CSP3.

[0651] Table 6 summarizes the coverage of the 48 dataset per enzyme class.

TABLE 6

| EC class | PS4 | CPS3 | CPS2 | CPS1 |
|---|---|---|---|---|
| oxidoreductases | 8122 | 8403 | 8565 | 8859 |
| transferases | 14318 | 14695 | 14798 | 15180 |
| hydrolases | 8581 | 9067 | 9149 | 9528 |
| lyases | 4780 | 4826 | 4837 | 4886 |
| isomerases | 2643 | 2661 | 2666 | 2691 |
| ligases | 5812 | 5869 | 5879 | 5909 |
| total | 44256 | 45521 | 45894 | 47053 |

[0652] As shown in Table 6 above, functional classification at the third level of EC is provided by the 71,040 CPS3 (see Table 4) for 89.8% of the data.

[0653] Similar success values were obtained for the 45 dataset, shown in Table 7.

TABLE 7

| EC class | PS4 | CPS3 | CPS2 | CPS1 |
|---|---|---|---|---|
| oxido- | 83.2% (6587) | 86.5% (6850) | 88.3% (6995) | 91.8% (7266) |
| reduc- | | | | |
| tases | | | | |
| trans- | 85.3% (10925) | 88.1% (11281) | 88.8% (11376) | 91.8% (11753) |
| ferases | | | | |
| hydro- | 77% (6920) | 81.6% (7332) | 82.4% (7398) | 85.6% (7720) |
| lases | | | | |
| lyases | 90.2% (4180) | 91.2% (4226) | 91.4% (4235) | 92.5% (4287) |
| isom- | 89.4% (1998) | 89.8% (2007) | 90% (2010) | 91.1% (2035) |
| erases | | | | |
| ligases | 95.3% (4470) | 96.4% (4523) | 96.6% (4531) | 97.2% (4562) |
| total | 85% (35080) | 87.8% (36219) | 88.6% (36545) | 91.2% (37623) |

[0654] It is therefore demonstrated that a large fraction of the coverage is provided by the predicting sequences of level 4.

[0655] Tables 8 and 9 summarize the differential coverage of the other predicting sequences.

TABLE 8

| EC class | PS3 | PS2 | PS1 |
|---|---|---|---|
| oxidoreductases | 18% (1697) | 8.4% (792) | 41% (3869) |
| transferases | 17% (2754) | 10.3% (1668) | 39.6% (6412) |
| hydrolases | 19.9% (2172) | 6.8% (738) | 32% (3487) |
| lyases | 12.1% (631) | 4.5% (238) | 17.95% (939) |
| isomerases | 6.5% (187) | 4.3% (124) | 16.5% (476) |
| ligases | 31.25% (1889) | 6.65% (403) | 27.88% (1686) |
| total | 18.4% (9330) | 7.8% (3963) | 33.25% (16869) |

TABLE 9

| EC class | PS3 | PS2 | PS1 |
|---|---|---|---|
| oxidoreductases | 18.8% (1489) | 8.8% (699) | 39.4% (3121) |
| transferases | 16.95% (2200) | 9% (1157) | 37.75% (4836) |
| hydrolases | 19.3% (1736) | 6% (546) | 32.65% (2931) |
| lyases | 10.75% (498) | 3.45% (161) | 20.55% (953) |
| isomerases | 7.7% (172) | 4.75% (106) | 15.35% (343) |
| ligases | 30.35% (1425) | 7.1% (334) | 26.5% (1243) |
| total | 18.2% (7520) | 7.25% (3003) | 32.55% (13427) |

[0656] The motif extraction procedure is not limited by the length of the motifs it extracts. The resulting distribution of motif length is displayed in FIG. 8 for all six main classes of the EC hierarchical classification.

[0657] It is recognized that the longer peptides are in principle more strongly associated with homologies. This is borne out by a test carried out on randomly chosen 100 predicting sequences of the cumulant CPS3. For each predicting sequence, the set of all the enzymes on which it occurs has been extracted, and the percentages of identity along sequences of all pairs were calculated.

[0658] The results are shown in FIGS. 9a-c, for predicting sequences shorter than 9 amino-acids (FIG. 9a), between 9 and 12 amino-acids (FIG. 9b) and longer than 12 amino-acids (FIG. 9c). As shown in FIG. 9a, the histogram of motifs shorter than 9 amino-acids exhibits a peak at about 60% with a tail that extends well below 40%. It is thus demonstrated that short predicting sequences are useful for predicting the class to which the enzyme belongs.

### Example 2

### Classification of Unclassified Enzymes Using Predicting Sequences

[0659] In this example, the ability of the predicting sequences of the present embodiments of the invention to classify unclassified enzymes is demonstrated. To mimic a situation in which an unclassified enzyme is to be classified using the enzyme database, a reduced enzyme database was constructed solely from the dataset of release 45 (see Table 3). All sequences of the dataset of release 48.3 that did not appear in the dataset of release 45 were considered, for the sake of demonstration, as “unclassified sequences”.

[0660] The reduced enzyme database was constructed from 41,265 sequences and the group of “unclassified sequences” included 10,730 sequences (26% of the number of sequences from which the reduced database was constructed). Each unclassified sequence was searched for a motif of amino acids matching a predicting sequence present in the reduced database, and the classifier corresponding to the matched predicting sequence was used for determining the EC number of the respective enzyme.

[0661] The classification quality was quantified by means of recall-precision analysis. Recall and precision are effectiveness measures known in the art. Recall was defined as the number of novel sequences that included at least one of the PSNs, while precision was defined as the percentage of predictions, based on the PSNs of the 45 dataset that were corroborated by the assignment of the 48.3 dataset. Less than 54% of all PSNs were needed for the analysis. Precision can be defined at the predicting sequence, e.g., to what extent did the EC of a particular predicting sequence matches the true EC of the enzyme that it hits. Precision can also be defined at the enzyme level: how many enzymes are correctly identified by all predicting sequences that hit them. In other words, demanding the EC assignments of all predicting sequences to be consistent with one-another as well as with the “48.3” annotation of the enzyme. The classification method of the present embodiments classified the “unclassified sequences” with a total precision value at predicting sequence level of more than 98%, a total precision value at predicting enzyme level of more than 81%, and total recall value of more than 84%, corresponding to a success rate of about 84%. The reason form the difference between the two precision levels is that typically there is more than one predicting sequence hitting each enzyme, and the small error at the predicting sequence level is magnified by the requirement that the EC labels of all predicting sequences on the same enzyme are consistent with each other.

[0662] The results of the analysis are summarized in Table 10.

TABLE 10

| | No. of | No. of | | Precision | Precision |
|---|---|---|---|---|---|
| EC class | PSNs | sequences | Recall | (sequence) | (enzyme) |
| oxidoreductases | 5967 | 1661 | 1235 | 99.35% | 78.2% |
| | | | (74.35%) | | |
| transferases | 9680 | 3722 | 3253 | 99.3% | 84.6% |
| | | | (87.4%) | | |
| hydrolases | 4466 | 2173 | 1614 | 98.45% | 71.8% |
| | | | (74.25%) | | |
| lyases | 3838 | 1089 | 930 | 99.65% | 91.2% |
| | | | (85.4%) | | |
| isomerases | 1774 | 686 | 611 | 83% | 79.0% |
| | | | (89%) | | |
| ligases | 6685 | 1399 | 1385 | 99.55% | 87.1% |
| | | | (99%) | | |
| total | 32410 | 10730 | 9028 | 98.5% | 81.7% |
| | (53.55%) | | (84.15%) | | |

### Example 3

### An Enzyme Searchable Database for Thermophilic Bacteria

[0663] In order to establish that the predictive methods described hereinabove are generally applicable, a dataset of predicting sequences for the genomes of 25 thermophilic bacteria with genomic sequence data available at the National Center for Biotechnology Information (NCBI) of the National Institutes of Health (NIH) was compiled. The 25 thermophilic bacteria are listed in table 12.

TABLE 12

| No. | Thermophile |
|---|---|
| 1. | Aeropyrum pernix |
| 2. | Aquifex aeolicus |
| 3. | Archaeoglobus fulgidus |
| 4. | Deinococcus geothermalis DSM 11300 |
| 5. | Methanobacterium thermoautotrophicum |
| 6. | Methanosaeta thermophila PT |
| 7. | Moorella thermoacetica ATCC 39073 |
| 8. | Nanoarchaeum equitans |
| 9. | Picrophilus torridus DSM 9790 |
| 10. | Pyrobaculum aerophilum |
| 11. | Pyrococcus abyssi |
| 12. | Pyrococcus furiosus |
| 13. | Pyrococcus horikoshii |
| 14. | Sulfolobus acidocaldarius DSM 639 |
| 15. | Sulfolobus solfataricus |
| 16. | Sulfolobus tokodaii |
| 17. | Thermoanaerobacter tengcongensis |
| 18. | Thermobifida fusca YX |
| 19. | Thermococcus kodakaraensis KOD1 |
| 20. | Thermoplasma acidophilum |
| 21. | Thermoplasma volcanium |
| 22. | Thermosynechococcus elongatus |
| 23. | Thermotoga maritima |
| 24. | Thermus thermophilus HB27 |
| 25. | Thermus thermophilus HB8 |

[0664] The dataset of predicting sequences for the organisms listed in Table 12 comprises a ‘metagenomic’ set on which the methods described above can be tested. The Thermophile metagenomic dataset consists of 52,481 proteins with average length of 295±196 amino-acids.

### Example 4

### Theoretical Considerations for Characterization of Sargasso Sea Bacterial Peptides Using the Metagenomic Dataset

[0665] Venter et al (2004; Environmental Genome Shotgun Sequencing of the Sargasso Sea, Science 304: 66-74; fully incorporated herein by reference) has compiled and made publicly available genomic sequence data for bacteria isolated from the Sargasso Sea.

[0666] In order to demonstrate the utility of the metagenomic data set of Example 3, predicting sequences from the metagenomic data set were used to classify Sargasso Sea sequence data according to standard EC classification hierarchy.

[0667] The finding of predicting sequences on proteins that do not have enzymatic functions (to be termed ‘accidentals’) is modeled by predicting sequence hits on random protein sequences. For each dataset being considered (Thermophiles metagenomic set and Sargasso Sea genomic sequence data in this exemplary embodiment of the invention) ‘random protein sets’ were generated by scrambling the order of the amino-acids in every protein, thus conserving only first-order statistics.

[0668] Five such sets were produced for the Thermophiles metagenomic data set (including one that consists of inverting the sequence of each protein) in order to measure the expected accidental hits.

[0669] The outcome is presented in Table 13. The notation for 2 matches and more, distinguishes between the possibilities that some matches are consistent with one another (i.e. their EC assignments are either identical or obey parent-child relationships) and others are inconsistent.

[0670] Two consistent predicting sequence matches are denoted 2_{C} and two inconsistent ones 2_{I}. Similarly 3 hits with 2 consistent and one inconsistent are denoted 2_{C}1_{I}. For a number of predicting sequence matches n; n is denoted as X_{c}Y_{I} where X+Y=n.

TABLE 13
Probability estimates of random predicting sequence matches
Thermophiles data

| Number of predicting | | | Standard |
|---|---|---|---|
| sequence matches | | Probability | Deviation |
| | 0 | 0.78804 | 0.00253 |
| | 1 | 0.17772 | 0.00223 |
| | 2_{I} | 0.02279 | 0.00076 |
| | 2_{C} | 0.00636 | 0.00076 |
| | 3_{I} | 0.00219 | 0.00002 |
| | 2_{C}1_{I} | 0.00189 | 0.00023 |
| | 3_{C} | 0.00017 | 0.00002 |
| | 2_{C}2_{I} | 0.00042 | 0.00004 |
| | 4_{I} | 0.00019 | 0.00011 |

[0671] Table 14 contains probability estimates of random predicting sequence hits on the Sargasso Sea data. This is based on three sets of 100,000 scrambled sequences randomly chosen from the over 1 million proteins in the Sargasso Sea data using notation similar to that employed in table 13.

TABLE 14
Probability estimates of
random predicting sequence matches Sargasso Sea data

| Number of predicting | | | |
|---|---|---|---|
| sequence matches | | Probability | Standard Deviation |
| | 0 | 0.8626 | 0.0010 |
| | 1 | 0.1233 | 0.0006 |
| | 2_{C} | 0.0026 | 0.0002 |
| | 2_{I} | 0.0102 | 0.0002 |
| | 3_{I} | 0.00057 | 0.00003 |
| | 2_{C}1_{I} | 0.00052 | 0.00002 |

[0672] Both tables 13 and 14 reflect the fact that the overwhelming majority of sequences contain no predicting sequence matches (78% in table 13 and 86% in table 14). This is reflective of the fact that most proteins are not characterized by an enzymatic function.

### Error Model

[0673] Although the occurrence of accidental predicting sequence matches is low, it is desirable to know which matches are accidental. The following model for estimating the expected errors on enzyme predictions based on predicting sequence matches is proposed to distinguish between predicting sequence matches that are consistent with one-another (i.e. their EC assignments are either identical or obey parent-child relationships according to the EC tree) or not. From 4 matches onwards there is also the (rare) possibility of combinations with internal consistency and external inconsistency; two such pairs of matches are denoted as 2_{C}2_{C}.

[0674] The proposed error model presumes that, in a given dataset, there exists a prior distribution of enzymes with n (consistent) matches whose numbers are denoted by tₙ, on which there exist additional accidental predicting sequence matches according to the distribution displayed in Tables 13 or 14. According to this model, the observed predicting sequence matches Oₙ in general and/or the observed matches with internal consistency or inconsistency according to equations such as Equations 4 to 7 below

O₀=t₀*P0 (EQ. 4)

O₁=t₀*P1+t₁*P0 (EQ. 5)

O_{2C}=t₂*P0+t₀*P2_{C} (EQ. 6)

O₂₁=t₁*P1+t₀*P2_{I} (EQ. 7)
[0675] etc,
   where, in Equation 7, a simplistic assumption is made that the matches of t₁ and those created by P1 are inconsistent with each other. The data at hand have various inter-relationships among the different genes brought about by evolution. Therefore results may not always follow this model which assumes independent occurrences of accidental predicting sequence matches exactly. However, the proposed error model provides an estimate for the amount of errors involved when turning observations into predictions.

[0676] For example, in the Thermophiles data O₀=36,064 and O₁=9,377 which indicates that that t₀=45,725 (+/−105) and t₁=1,668 (+/−100). Since t₀*P1=8,064 accounts for almost all 9,377 observations of single matches, single matches are preferably insufficient for identification of a protein as an enzyme.

[0677] Continuing similarly to n=2, in Thermophiles O_{2C}=1,142, whereas the component of t₀*P2_{C}=272, hence the expected error on assigning correctly the enzyme from the observation of two consistent predicting sequence matches in this dataset is 272/1,142≈24%.

[0678] The proposed error model works well for low values of n, e.g. n<5. For higher n values it overestimates the number of inconsistent hits. This is to be expected if enzyme sequences with very low n values have undergone stronger evolutionary changes, e.g. through mutations. These changes could be the reason for the observation of low n, because they have eliminated relevant predicting sequences and, at the same time, may have inserted accidental (and inconsistent) short predicting sequences into the sequence.

### Fisher Distance Criterion

[0679] If two different enzyme domains with different activities exist within the protein, or if one enzyme domain exists and another non-enzymatic domain comprises accidental predicting sequence matches, groups of predicting sequences that are not consistent with one another are expected to result. An example of such a case would be 2_{C}2_{C}, signifying two pairs of predicting sequences that are consistent within themselves but inconsistent with each other. In these cases a two-domain hypothesis can be checked by calculating a Fisher distance between the two groups of predicting sequence matches (EQ 8).

F=2(μ₁−μ₂)/(Δ₁+Δ₂) (EQ 8)

The parameters in EQ 8 are defined as follows: determine the first index of the left-most predicting sequence match of one group of consistent predicting sequences and the last index of the right-most predicting sequence of this group on the sequence of the protein. The mean of these indices is μ₁ and the difference between them defines the total length Δ₁ of this group of consistent predicting sequences. μ₂ and Δ₂ are defined analogously using the left and right indices of the second group(s) of predicting sequences.

[0680] For data that match the description of two or more domains the Fisher distance (F) is expected to have an absolute value greater than 1, indicating that the two predicting sequence groups occupy mutually exclusive regions on the protein sequence. Strictly speaking this is not a necessary condition, since the two enzymatic domains can be spatially distinct in the folded protein as a result of secondary and/or tertiary structure even if the predicting sequences occur in overlapping domains on the primary structure. Nonetheless, The Fisher model is based upon clear separation of the predicting sequences along the primary structure of the peptide sequence which probably occurs more frequently in nature.

### Example 5

### Characterization of the Metagenomic Dataset

[0681] A predicting sequence search on the metagenomic thermophile dataset of Example 3 produced a distribution of predicting sequence matches summarized graphically in FIG. 10.

[0682] FIG. 10 clearly demonstrates that predicting sequence matches are present on 16,417 proteins, whereas random predicting sequence matches account for 11,124 proteins (±133) as described hereinabove. This suggests that the metagenomic thermophile dataset includes more than 5,000 enzymes.

[0683] Using preferred embodiments of the present invention, resolution of which of these proteins should be recognized as enzymes and what the EC assignments of these enzymes should be was undertaken. Low numbers of predicting sequence matches (n<5) and high numbers (n≧5) were handled separately.

[0684] For n<5, the similarity between the exponential drop observed in the random case (Table 13) and in the real data (FIG. 10), where O0:O1:02 is of order 4. These data clearly indicate that most of the n=1 data are accidentals, and the n=2 to 4 data need special study to decide which are indeed enzymes.

[0685] There is a smaller number of peptides characterized by five or more predicting sequence matches which appear to indicate bona fide enzymes. No combinations of more than five predicting sequence matches occur completely at random, and most predicting sequence hits are consistent with one another, i.e. the different EC labels of the predicting sequences observed on these proteins are consistent with there being a unique EC-number assignment to the protein. There are a smaller number of cases with two potential EC numbers, suggesting that the protein in question is characterized by two domains with two different catalytic activities.

[0686] FIGS. 11 and 12 indicate graphically how many consistent matches there are and how many matches with one inconsistent predicting sequence, i.e., matches where at least one predicting sequence has an EC assignment different from the rest. In FIGS. 11 and 12, grey or red bars correspond to n consistent matches per protein, where n is shown on the horizontal axis, empty or yellow bars indicate n−1 consistent and n inconsistent matches per protein, and dark or blue bars indicate other combinations adding to n matches per protein. In FIG. 11, 2≦n≦25, and FIG. 12 is a “zoom in” of FIG. 11 for 5≦n≦15.

[0687] FIGS. 11 and 12 demonstrate that about 85% of all predicting sequence matches are completely consistent, and may therefore serve as prediction of enzymatic functions for 2,418 proteins.

[0688] FIG. 13 displays the relative percentages of the different cases of predicting sequence matches, showing n consistent matches per protein (grey or red bars), n consistent matches and 1 inconsistent match (empty or yellow bars), and all other combinations adding to n matches per protein (dark or blue bars).

[0689] According to a preferred embodiment of the present invention when the number of motifs of the target protein which match predicting sequences in the database is sufficiently large (e.g., larger than 4) and when the number of inconsistent matches is sufficiently small (e.g., all matches but one being consistent), the inconsistent matches are disregarded for the purpose of classification.

[0690] For example, in the present example, there are altogether 419 inconsistent matches for n>4, 331 of which contain a single predicting sequence that does not match the rest. According to the presently preferred embodiment of the invention for n>4, most of the (n−1)_{C}1_{I} predicting sequence matches depicted in FIGS. 11, 12 and 13 can still serve as valid predictions by disregarding the EC assignment of the one predicting sequence that disagrees with the others. This procedure is based on the assumption that, through random evolutionary processes a subsequence has been created at a location that has nothing to do with the EC function of the enzymes. The overall ratio 331/2,418=0.14 of (single inconsistent)/(all consistent) data is smaller but not very far from P1/P0=0.22 of Table 13, the model of independent accidental predicting sequence matches. In an exemplary embodiment of the invention, 2,749 EC assignments from the data of predicting sequence n>4 can be achieved by ignoring inconsistent matches in all (n−1)_{C}1_{I}, hence basing the classifications on (n−1)_{C} predicting sequence matches.

[0691] In cases where the number of predicting sequence matches is less than 5, only predicting sequence matches that are fully consistent with one another are considered indicative of enzymatic activity and/or EC classification.

[0692] Table 15 lists the results for n=2, 3 and 4 as well as error estimates based on the error model described hereinabove. Data presented in table 15 indicate that data of fully consistent predicting sequences for n=3 and 4 are meaningful predictors of enzymatic activity with a high degree of accuracy.

TABLE 15
Match results and error estimates based on the error model (n = 2, 3 and 4)

| n | 2_{C} | 3_{C} | 4_{C} |
|---|---|---|---|
| Observations | 1,142 | 569 | 438 |
| Error estimate | 270 | 8 | 1 |

### Verification of Results

[0693] There is a group of 3,756 proteins for which EC assignments can be made with a high degree of accuracy. The group includes all n>4 predicting sequence matches which are either fully consistent or have one inconsistent predicting sequence, and all n=3 and n=4 fully consistent predicting sequences.

[0694] Comparison can be drawn for all enzymes for which NCBI annotations provide EC assignments. The agreement between the NCBI annotations and predictions based on predicting sequence matching is summarized in Table 16 with 96% true positives. In Table 16, the levels 1, 2, 3 and 4 of the EC hierarchy, are denoted EC L-1, EC L-2, EC L-3 and EC L-4, respectively.

TABLE 16
Thermophiles Analysis
Summary of EC Predictions against NCBI

| | | | | | | | | | | No EC |
|---|---|---|---|---|---|---|---|---|---|---|
| | | | | | | | | | | Avail- |
| | | | | | | | | | | able - |
| | | | True Predictions | | | | | | | Potential |
| | | | T1 | T2 | T3 | T4 | | False | EC | for |
| | TP | FP | EC | EC | EC | EC | | Posi- | Avail- | New |
| Category | [%] | [%] | L-1 | L-2 | L-3 | L-4 | Total | tives | able | Pred. |
| Total | 96 | 4 | 33 | 32 | 130 | 1,064 | 1,259 | 54 | 1,313 | 3,977 |
| 2C | 90 | 10 | 18 | 9 | 38 | 131 | 196 | 21 | 217 | 931 |
| 2C 1I | 85 | 15 | 3 | 3 | 10 | 24 | 40 | 7 | 47 | 229 |
| 3C | 98 | 2 | 4 | 4 | 14 | 105 | 127 | 2 | 129 | 442 |
| 3C 1I | 93 | 7 | 1 | 0 | 5 | 21 | 27 | 2 | 29 | 90 |
| 4C | 97 | 3 | 2 | 4 | 14 | 98 | 118 | 4 | 122 | 323 |
| 4C 1I | 86 | 14 | 0 | 1 | 1 | 17 | 19 | 3 | 22 | 42 |
| 5C | 97 | 3 | 0 | 4 | 11 | 87 | 102 | 3 | 105 | 255 |
| 5C 1I | 100 | 0 | 1 | 0 | 4 | 8 | 13 | 0 | 13 | 31 |
| 6C | 95 | 5 | 2 | 0 | 5 | 70 | 77 | 4 | 81 | 213 |
| 6C 1I | 100 | 0 | 0 | 0 | 0 | 11 | 11 | 0 | 11 | 29 |
| 7C | 100 | 0 | 0 | 0 | 5 | 60 | 65 | 0 | 65 | 172 |
| 7C 1I | 100 | 0 | 0 | 0 | 1 | 10 | 11 | 0 | 11 | 18 |
| 8C | 100 | 0 | 0 | 0 | 2 | 42 | 44 | 0 | 44 | 158 |
| 8C 1I | 100 | 0 | 0 | 1 | 1 | 8 | 10 | 0 | 10 | 10 |
| 9C | 98 | 2 | 0 | 0 | 1 | 50 | 51 | 1 | 52 | 121 |
| 9C 1I | 100 | 0 | 0 | 0 | 0 | 5 | 5 | 0 | 5 | 8 |
| 10C | 100 | 0 | 0 | 0 | 3 | 45 | 48 | 0 | 48 | 110 |
| 10C 1I | 100 | 0 | 0 | 0 | 1 | 4 | 5 | 0 | 5 | 8 |
| 11C | 97 | 3 | 0 | 1 | 0 | 37 | 38 | 1 | 39 | 77 |
| 11C 1I | 100 | 0 | 0 | 0 | 0 | 4 | 4 | 0 | 4 | 5 |
| 12C | 97 | 3 | 0 | 0 | 1 | 29 | 30 | 1 | 31 | 94 |
| 12C 1I | 100 | 0 | 0 | 1 | 0 | 4 | 5 | 0 | 5 | 6 |
| 13C | 95 | 5 | 0 | 0 | 0 | 19 | 19 | 1 | 20 | 52 |
| 13C 1I | 100 | 0 | 0 | 0 | 0 | 3 | 3 | 0 | 3 | 5 |
| 14C | 96 | 4 | 0 | 1 | 0 | 26 | 27 | 1 | 28 | 54 |
| 14C 1I | 100 | 0 | 0 | 0 | 0 | 1 | 1 | 0 | 1 | 6 |
| 15C | 100 | 0 | 1 | 0 | 0 | 13 | 14 | 0 | 14 | 33 |
| 15C 1I | | | 0 | 0 | 0 | 0 | 0 | 0 | 0 | 3 |
| 16C | 87 | 13 | 0 | 0 | 0 | 13 | 13 | 2 | 15 | 30 |
| 16C 1I | 100 | 0 | 0 | 0 | 0 | 4 | 4 | 0 | 4 | 2 |
| 17C | 100 | 0 | 1 | 0 | 3 | 11 | 15 | 0 | 15 | 50 |
| I7C 1I | 100 | 0 | 0 | 0 | 0 | 3 | 3 | 0 | 3 | 1 |
| 18C | 100 | 0 | 0 | 1 | 0 | 13 | 14 | 0 | 14 | 38 |
| 18C 1I | | | 0 | 0 | 0 | 0 | 0 | 0 | 0 | 1 |
| 19C | 89 | 11 | 0 | 1 | 1 | 6 | 8 | 1 | 9 | 29 |
| 19C 1I | 100 | 0 | 0 | 0 | 0 | 1 | 1 | 0 | 1 | 3 |
| 20C | 100 | 0 | 0 | 1 | 1 | 7 | 9 | 0 | 9 | 18 |
| 21C | 100 | 0 | 0 | 0 | 0 | 5 | 5 | 0 | 5 | 27 |
| 21C 1I | 100 | 0 | 0 | 0 | 1 | 0 | 1 | 0 | 1 | 0 |
| 22C | 100 | 0 | 0 | 0 | 1 | 6 | 7 | 0 | 7 | 11 |
| 22C 1I | 100 | 0 | 0 | 0 | 0 | 1 | 1 | 0 | 1 | 1 |
| 23C | 100 | 0 | 0 | 0 | 0 | 2 | 2 | 0 | 2 | 22 |
| 23C 1I | | | 0 | 0 | 0 | 0 | 0 | 0 | 0 | 1 |
| 24C | 100 | 0 | 0 | 0 | 0 | 5 | 5 | 0 | 5 | 28 |
| 25C | 100 | 0 | 0 | 0 | 1 | 5 | 6 | 0 | 6 | 17 |
| 25C 1I | | | 0 | 0 | 0 | 0 | 0 | 0 | 0 | 2 |
| 26C | 100 | 0 | 0 | 0 | 0 | 7 | 7 | 0 | 7 | 14 |
| 26C 1I | 100 | 0 | 0 | 0 | 0 | 2 | 2 | 0 | 2 | 2 |
| 27C | 100 | 0 | 0 | 0 | 1 | 7 | 8 | 0 | 8 | 17 |
| 27C 1I | 100 | 0 | 0 | 0 | 0 | 1 | 1 | 0 | 1 | 2 |
| 28C | 100 | 0 | 0 | 0 | 0 | 2 | 2 | 0 | 2 | 13 |
| 28C 1I | | | 0 | 0 | 0 | 0 | 0 | 0 | 0 | 1 |
| 29C | 100 | 0 | 0 | 0 | 0 | 3 | 3 | 0 | 3 | 13 |
| 29C 1I | 100 | 0 | 0 | 0 | 1 | 0 | 1 | 0 | 1 | 0 |
| 30C | 100 | 0 | 0 | 0 | 0 | 2 | 2 | 0 | 2 | 6 |
| 30C 1I | 100 | 0 | 0 | 0 | 0 | 1 | 1 | 0 | 1 | 1 |
| 31C | 100 | 0 | 0 | 0 | 0 | 2 | 2 | 0 | 2 | 12 |
| 32C | 100 | 0 | 0 | 0 | 0 | 2 | 2 | 0 | 2 | 8 |
| 33C | | | 0 | 0 | 0 | 0 | 0 | 0 | 0 | 7 |
| 33C 1I | 100 | 0 | 0 | 0 | 1 | 0 | 1 | 0 | 1 | 0 |
| 34C | 100 | 0 | 0 | 0 | 0 | 3 | 3 | 0 | 3 | 10 |
| 34C 1I | 100 | 0 | 0 | 0 | 0 | 1 | 1 | 0 | 1 | 0 |
| 35C | | | 0 | 0 | 0 | 0 | 0 | 0 | 0 | 11 |
| 36C | 100 | 0 | 0 | 0 | 0 | 1 | 1 | 0 | 1 | 7 |
| 36C 1I | | | 0 | 0 | 0 | 0 | 0 | 0 | 0 | 3 |
| 37C | | | 0 | 0 | 0 | 0 | 0 | 0 | 0 | 2 |
| 38C | 100 | 0 | 0 | 0 | 0 | 1 | 1 | 0 | 1 | 3 |
| 38C 1I | 100 | 0 | 0 | 0 | 0 | 1 | 1 | 0 | 1 | 0 |
| 39C | 100 | 0 | 0 | 0 | 0 | 1 | 1 | 0 | 1 | 8 |
| 40C | 100 | 0 | 0 | 0 | 0 | 2 | 2 | 0 | 2 | 3 |
| 41C | 100 | 0 | 0 | 0 | 0 | 2 | 2 | 0 | 2 | 3 |
| 42C | 100 | 0 | 0 | 0 | 1 | 0 | 1 | 0 | 1 | 1 |
| 43C | 100 | 0 | 0 | 0 | 0 | 3 | 3 | 0 | 3 | 5 |
| 43C 1I | 100 | 0 | 0 | 0 | 0 | 1 | 1 | 0 | 1 | 0 |
| 45C | | | 0 | 0 | 0 | 0 | 0 | 0 | 0 | 2 |
| 46C | 100 | 0 | 0 | 0 | 0 | 1 | 1 | 0 | 1 | 2 |
| 47C | | | 0 | 0 | 0 | 0 | 0 | 0 | 0 | 2 |
| 48C | 100 | 0 | 0 | 0 | 0 | 1 | 1 | 0 | 1 | 1 |
| 50C | | | 0 | 0 | 0 | 0 | 0 | 0 | 0 | 3 |
| 51C | | | 0 | 0 | 0 | 0 | 0 | 0 | 0 | 2 |
| 51C 1I | 100 | 0 | 0 | 0 | 0 | 1 | 1 | 0 | 1 | 0 |
| 52C | | | 0 | 0 | 0 | 0 | 0 | 0 | 0 | 1 |
| 53C | | | 0 | 0 | 0 | 0 | 0 | 0 | 0 | 2 |
| 55C | 100 | 0 | 0 | 0 | 0 | 1 | 1 | 0 | 1 | 1 |
| 56C | 100 | 0 | 0 | 0 | 0 | 1 | 1 | 0 | 1 | 1 |
| 62C | | | 0 | 0 | 0 | 0 | 0 | 0 | 0 | 1 |
| 63C | 100 | 0 | 0 | 0 | 1 | 0 | 1 | 0 | 1 | 0 |
| 73C | | | 0 | 0 | 0 | 0 | 0 | 0 | 0 | 1 |

The true predictions can be divided into 4 classes:

[0695] 1. Correct (true positive) predictions at EC level 4 “TP4”

[0696] 2. Correct (true positive) predictions at EC level 3 “TP3”

[0697] 3. Correct (true positive) predictions at EC level 2 “TP2”

[0698] 4. Correct (true positive) predictions at EC level 1 “TP1”

[0699] FIG. 14 depicts the True Predictions as a function of the different matches' categories (consistent vs. inconsistent for each value of n). A detailed comparison of predictions based on predicting sequence matching with annotations of NCBI is provided in Table 17 (provided on enclosed CD-ROM, file “Table-17.txt”).

[0700] The n=2 results have an estimated possible error of 24%. In an exemplary embodiment of the invention, putative EC assignments based on n=2 and/or the 2_{C}1_{I} cases of n=3 and/or the 3_{C}1_{I} cases of n=4 data can be further checked using sequence similarity and/or experimental tools to increase the number of enzymes correctly characterized. Table 18 exemplifies the 2_{C}1_{I} and 3_{C}1_{I} cases and expected errors. According to the aforementioned notations, 2_{C}1_{I} denotes 2 matches that are consistent with one another and 1 which is inconsistent with the other two. Similarly, the notation 3_{C}1_{I} denotes 3 matches that are consistent with one another and 1 which is inconsistent with the other three.

TABLE 18

| predicting sequence matches | 2_{C}1_{I} | 3_{C}1_{I} |
|---|---|---|
| Observations | 268 | 136 |
| Error estimate | 87 | 10 |

[0701] A list of all 2_{C}, 2_{C}1_{I} and 3_{C}1_{I} results is provided in Table 17 on enclosed CD-ROM, together with their NCBI assignments. The accumulated data confirm the theoretical error estimate described above.

### Example 6

### Analysis of Enzyme Size

[0702] In order to determine the size of observed enzymatic domains, the total number of amino-acids covered by consistent predicting sequence matches on a protein was analyzed. This quantity is referred to as ‘length of coverage’ (L). FIG. 15 is a histogram indicating number of proteins as a function of coverage L for the classes 2_{C} (empty or yellow bars), 3_{C} (grey or red bars) and 4_{C} (dark or blue bars). In general, L increases as n increases. The parameter L is also listed in Tables 16 and 17.

[0703] Comparison of EC assignments based on predicting sequence matches to NCBI annotations in tables 16 and 17 reveals a break point at approximately L=12. Above this point, the number of correct identifications is increased. This distribution correlates well with the distributions in FIG. 10 and the expected errors in Table 20 for the different n_{C} classes. The n_{C}1_{I} classes (not depicted) have distributions similar to those of the n_{C} classes in FIG. 15 but with much lower rates of occurrence.

### Example 7

### Characterization of Sargasso Sea Bacterial Peptides Using the Metagenomic Dataset

[0704] There are 1,001,986 records in the Sargasso Sea protein data (Venter et al., 2004). The average length of the proteins is 194 amino-acids, with s.d.=109. Using three random sets of 100,000 proteins selected from these data, we have generated the randomized proteins from which we have calculated the probabilities of accidental matches in Table 14. The different statistics of the Sargasso Sea set compared to the Thermophiles set are responsible for the different corresponding probabilities observed between Tables 13 and 14.

[0705] There are predicting sequence matches on 283,835 proteins of the Sargasso Sea data. Using the error model described above, it is predicted that some 130,000 of these predicting sequence matches are accidentals (i.e. do not indicate actual enzymes), leaving over 150,000 actual enzymes.

[0706] FIG. 16 graphically summarizes categories of predicting sequence matches in terms of number of matches n and consistency (c) or inconsistency (i) of predicting sequence matches within a single peptide sequence.

[0707] As indicated in FIG. 16, there is a first group of 52,615 proteins with n>4 and zero or one inconsistent predicting sequence matches. Proteins in this first group are believed to accurately reflect enzymatic activity according to the EC class indicated by the relevant predicting sequences.

[0708] FIG. 16 also indicates a second group with slightly less certainty about the prediction of enzymatic activity. This second group includes an additional 45,450 proteins with 3c or 4c predicting sequence matches. which also have a high probability of indicating an enzymatic activity corresponding to the EC class indicate by the “c” predicting sequences of the peptide based upon the error analyses described above.

[0709] The first and second groups together comprise 98,065 peptides with specific enzymatic activities predicted with a reasonable degree of certainty.

[0710] FIG. 16 also indicates a third group comprising, peptides with predicting sequence matches designated as 2_{C}, 2_{C}1_{I} and 3_{C}1_{I}. This third group comprises 34,268 peptides for which a specific enzymatic activity is predicted with a lower degree of certainty. In an exemplary embodiment of the invention, verification by alternative methods can be employed to determine which peptides actually have the predicted enzymatic activity. Table 19 summarizes the expected error rates for each type of predicting sequence matching in the third group of peptides.

TABLE 19
Expected error rates for predicting sequence match types 2_{C}, 2_{C}1_{I} and 3_{C}1_{I}

| predicting sequence | | | |
|---|---|---|---|
| Match Type | 2_{C} | 2_{C}1_{I} | 3_{C}1_{I} |
| Number of Matches | 28,811 | 3,507 | 1,950 |
| Expected errors | 1,870 | 868 | 557 |
| Expected accuracy (%) | 93.5 | 75.3 | 71.4 |

[0711] Data summarized in Table 19 suggests that even the “unreliable” predictions of the third group are valuable. For any peptide in this group it is possible to use the EC class suggested by the predicting sequence matches and screen for activity using a single suitable substrate. Results of a screening conducted in this way are expected to produce at least 71.4% verified enzymes (for 3c1i predicting sequence matches) and as much as 93.5% verified enzymes (for 2c predicting sequence matches).

[0712] These degrees of expected verification are high for any enzyme screening process. They are unprecedentedly high for a screening plan in which each candidate enzyme is assayed against a single substrate.

[0713] Table 20 summarizes peptides with two putative enzymatic activities based upon EC classifications suggested by predicting sequence matches. (predicting sequence match types suggesting multiple enzymatic activities with less than 10 peptides are not presented)

TABLE 20
Multiple consistent set of predicting sequence matches on Sargasso Sea data

| predicting sequence | |
|---|---|
| Match Type | Peptides |
| 2_{C} 2_{C} | 86 |
| 2_{C} 3_{C} | 88 |
| 2_{C} 4_{C} | 48 |
| 2_{C} 5_{C} | 39 |
| 2_{C} 6_{C} | 31 |
| 2_{C} 7_{C} | 21 |
| 2_{C}8_{C} | 17 |
| 2_{C} 11_{C} | 13 |
| 2_{C} 13_{C} | 10 |
| 3_{C} 3_{C} | 10 |
| 2_{C} 2_{C} 1_{I} | 21 |
| 2_{C} 3_{C} 1_{I} | 10 |

[0714] Peptides with putative multiple enzymatic activities are of special interest. In The positions of the different predicting sequence matches on the protein sequence have been evaluated using the Fisher distance model described above. Those peptides with a sufficient Fisher distance are believed to comprise two enzymatically active domains on the same peptide. In many cases, the molecules characterized by two EC classifications are large proteins (as opposed to peptides), which makes the multiple domains with separate functions seems plausible.

[0715] Table 21, provided on enclosed CD-ROM (file “Table-21.txt”), presents Predictions for Sargasso Sea data, with predicting sequence matches n>4: Categories 5_{C}, 5_{C}1_{I}, 6_{C}, 6_{C}1_{I} and up

[0716] Table 22, provided on enclosed CD-ROM (file “Table-22.txt”), presents Predictions for Sargasso Sea data, with predicting sequence matches in Categories 3_{C}, 3_{C}1_{I}, 4_{C} and 4_{C}1_{I}

[0717] Table 23, provided on enclosed CD-ROM (file “Table-23.txt”), presents Predictions for Sargasso Sea data, with predicting sequence matches in Categories 2c and 2c1i.

[0718] In each of Tables 21-23, the first column from the left lists the Sargasso ID numbers of the proteins, the second column from the left lists the EC numbers found according to a preferred embodiment of the present invention, the third column from the left lists the descriptions of the EC classifications, the forth column from the left lists the coherent predicting sequence coverages and the rightmost columns lists the TAU protein number.

### Example 8

### Correlation of Predicting Sequence (PS) Sequences to EC Functional Classifications of Known Enzymes

[0719] The motif extraction procedure described above was used for defining predicting sequences from the Swiss-Prot enzymes as described in Example 1, using the values η=0.8 and α=0.01.

[0720] The deterministic sequence-motifs extracted by the motif extraction procedure were further subjected to a screening process, selecting predicting sequences (PS) that are specific to a single branch of the EC hierarchical classification and can be used as predicting sequences. More than half of all motifs turn out to belong uniquely to single branches of the fourth level of the hierarchy, to be denoted as predicting sequences of level 4 (PS4) (see FIG. 17) and predicting sequences of higher hierarchy (lower N; i.e. PS3, PS2 and PS1) do not include PS4s isolated from non-relevant classes. Thus if a peptide is shared by two or more level 4 groups that belong to the same 3rd EC level, and appears no where else, it is assigned to predicting sequence level 3. The predicting sequences were further screened to eliminate any peptide that includes within its sequence another peptide carrying the same predicting sequence N(N=1,2,3,4) label. The majority of predicting sequences occur at level 4 of the EC hierarchy, probably due to high homology within this level, that often includes orthologous genes). Thousands of predicting sequences occur at higher levels of hierarchy, reflecting functional similarity within enzymes with lower sequence similarity.

[0721] The occurrence of any one predicting sequence on the sequence of an enzyme specifies its EC functionality according to the specific branch N of its PSN. For example, enzyme P45048 (see FIG. 18) contains SSAATYG, a PS3 specific to 5.1.3, and LNVYGYSK, a PS4 specific to 5.1.3.20. The relationship of these predicting sequences to the EC hierarchy of predicting sequence families is shown in FIG. 17. Table 24 shows that the predicting sequences cover (i.e., appear on the sequence of) most enzymes in of Swiss-Prot release 48.3. The coverage columns display the cumulative coverage of all predicting sequences to their left. Coverage is a measure of the success of the predicting sequence approach of the present embodiments. Thus, from the sixth column one can deduce that functional classification at the third level of EC is specified by 45,819 peptides of PS3 PS4, covering 89.8% of the data. Information about the separate coverage of each PSN group is provided in Table 27, hereinunder.

TABLE 24
Occurrences of predicting sequences in all six EC classes in the analysis of all
enzymes in Swiss-Prot release 48.3.

| | No. of | | coverage | | coverage | | coverage | | coverage |
|---|---|---|---|---|---|---|---|---|---|
| ECclass | enzymes | SP4 | [%] | SP3 | [%] | SP2 | [%] | SP1 | [%] |
| oxidoreductases | 9,437 | 8,314 | 86.1 | 681 | 89 | 310 | 90.8 | 1,260 | 93.9 |
| transferases | 16,196 | 12,708 | 88.4 | 726 | 90.7 | 476 | 91.4 | 2,068 | 93.7 |
| hydrolases | 10,901 | 7,535 | 78.7 | 809 | 83.2 | 196 | 83.9 | 1,136 | 87.4 |
| lyases | 5,229 | 4,728 | 91.4 | 186 | 92.3 | 59 | 92.3 | 296 | 93.4 |
| isomerases | 2,887 | 2,588 | 91.5 | 48 | 92.2 | 25 | 92.3 | 154 | 93.2 |
| ligases | 6,048 | 6,974 | 96.1 | 495 | 97.1 | 93 | 97.3 | 500 | 98.2 |
| total | 50,698 | 42,874 | 87.3 | 2,945 | 89.8 | 1,159 | 90.5 | 5,414 | 92.9 |

### Coverage

[0722] The occurrence of any one predicting sequence on the sequence of an enzyme specifies its EC functionality according to the specific branch N of the predicting sequence N. Tables 25 and 26 demonstrate that the predicting sequences cover (i.e. appear on the sequence of) most enzymes in the dataset. Shown in Tables 26 and 26 are the coverage in percentage of both the predicting sequences per EC level (Table 25) and of their cumulants (Table 26). The latter are defined as unions of the former CPS3=PS3∪PS4, CPS2=PS2∪CPS3 and CPS1=PS1∪CPS2, and are relevant for functional assignments. Thus, for instance, the functional classification at the third level of EC is specified by 45,819 peptides of CPS3=PS3∪PS4, covering about 89.8% of the data. Note that the coverages of the various predicting sequence at levels N are not additive (e.g., the coverage of CPS3 is much smaller than the sum of the coverages of PS3 and PS4) because predicting sequences on higher branches of the hierarchy (lower N) are encountered on sequences that possess already sites of lower branches (higher N).

[0723] The distribution of the length of predicting sequences is displayed in FIG. 8 for all enzyme classes. The average length of the predicting sequences is 8.4±4.5. Enzymes that share large predicting sequences are highly homologous, while enzymes sharing shorter predicting sequences are characterized by a lower degree of sequence similarity. This is displayed, for short, medium and long motifs, in FIGS. 9a-c.

[0724] The distribution of the number of predicting sequences occurring on enzymes is given in FIG. 21. FIG. 23 is a histogram indicating distribution of the numbers of PSs occurring on enzymes with mean and median indicated.

TABLE 25
Coverage by predicting sequences of enzymes in Swiss-Prot release 48.3

| EC class | PS4 | PS3 | PS2 | PS1 |
|---|---|---|---|---|
| oxidoreductases | 86.1% | 27.6% | 18% | 75% |
| transferases | 88.4% | 33.7% | 27.4% | 70% |
| hydrolases | 78.7% | 27.7% | 19% | 57.8% |
| lyases | 91.4% | 29.7% | 15.5% | 48.2% |
| isomerases | 91.5% | 16.8% | 9.7% | 39.9% |
| ligases | 96.1% | 55% | 18.2% | 64.1% |
| total | 87.3% | 32.47% | 20.52% | 63.8% |

TABLE 26
Coverage by cumulants

| EC class | PS4 | CPS3 | CPS2 | CPS1 |
|---|---|---|---|---|
| oxidoreductases | 86.1% | 89% | 90.8% | 93.9% |
| transferases | 88.4% | 90.7% | 91.4% | 93.7% |
| hydrolases | 78.7% | 83.2% | 83.9% | 87.4% |
| lyases | 91.4% | 92.3% | 92.3% | 93.4% |
| isomerases | 91.5% | 92.2% | 92.3% | 93.2% |
| ligases | 96.1% | 97.1% | 97.3% | 94.2% |
| total | 87.3% | 89.8% | 90.5% | 92.8% |

### Generalization of Enzyme Class Prediction

[0725] The SwissProt 48.3 dataset contains 260 enzymes that have more than one annotation, and, therefore, have been excluded from the training set. Using them as a test set, 849 hits of PSs on 157 of these enzymes were found. 711 of the 849 hits agree with one of the given annotations and 138 do not, thus obtaining an accuracy of 84%. The results are displayed in Table 27, comparing the Swiss-Prot EC annotations with PS predictions. For example, the first protein on the list, has Swiss-Prot EC annotations of 2.7.2.4 and 1.1.1.3. Its sequence matches two PSs, one PS1 of class 1 and one PS4 of 2.7.2.4. This is counted as two correct matches. The columns in Table 27 indicate the protein id according to Swiss-Prot, its two EC assignments, the EC assignments according to SP predictions, and the number of SP matches that have the same EC prediction (separated into correct and false predictions)

TABLE 27

| | | | PS | # correct | # false |
|---|---|---|---|---|---|
| ID | EC1 | EC2 | Prediction | matches | matches |
| P00561 | 2.7.2.4 | 1.1.1.3 | 1 | 1 | |
| P00561 | 2.7.2.4 | 1.1.1.3 | 2.7.2.4 | 1 | |
| P00561 Total | | | | 2 | 0 |
| P27725 | 2.7.2.4 | 1.1.1.3 | 1 | 1 | |
| P27725 | 2.7.2.4 | 1.1.1.3 | 2.7.2.4 | 1 | |
| P27725 | 2.7.2.4 | 1.1.1.3 | 6.3.4.2 | 0 | 1 |
| P27725 Total | | | | 2 | 1 |
| P44505 | 2.7.2.4 | 1.1.1.3 | 1 | 1 | |
| P44505 Total | | | | 1 | 0 |
| Q9K3D6 | 4.3.2.1 | 2.3.1.1 | 4 | 1 | |
| Q9K3D6 | 4.3.2.1 | 2.3.1.1 | 4.3.2.1 | 27 | |
| Q9K3D6 Total | | | | 28 | 0 |
| Q9K3D7 | 4.3.2.1 | 2.3.1.1 | 4 | 1 | |
| Q9K3D7 | 4.3.2.1 | 2.3.1.1 | 4.3.2.1 | 27 | |
| Q9K3D7 Total | | | | 28 | 0 |
| Q5E2E8 | 4.3.2.1 | 2.3.1 | 4 | 1 | |
| Q5E2E8 | 4.3.2.1 | 2.3.1 | 4.3.2.1 | 22 | |
| Q5E2E8 Total | | | | 23 | 0 |
| P59620 | 4.3.2.1 | 2.3.1 | 4 | 1 | |
| P59620 | 4.3.2.1 | 2.3.1 | 4.3.2.1 | 27 | |
| P59620 Total | | | | 28 | 0 |
| Q8DCM9 | 4.3.2.1 | 2.3.1 | 4 | 1 | |
| Q8DCM9 | 4.3.2.1 | 2.3.1 | 4.3.2.1 | 27 | |
| Q8DCM9 Total | | | | 28 | 0 |
| Q7MH73 | 4.3.2.1 | 2.3.1 | 4 | 1 | |
| Q7MH73 | 4.3.2.1 | 2.3.1 | 4.3.2.1 | 27 | |
| Q7MH73 Total | | | | 28 | 0 |
| Q8XDZ3 | 4.1.1 | 2.1.2 | 2.1.2.9 | 2 | |
| Q8XDZ3 Total | | | | 2 | 0 |
| P77398 | 4.1.1 | 2.1.2 | 2.1.2.9 | 2 | |
| P77398 Total | | | | 2 | 0 |
| Q8Z540 | 4.1.1 | 2.1.2 | 2 | 1 | |
| Q8Z540 | 4.1.1 | 2.1.2 | 2.1.2.9 | 1 | |
| Q8Z540 | 4.1.1 | 2.1.2 | 3 | 0 | 1 |
| Q8Z540 Total | | | | 2 | 1 |
| O52325 | 4.1.1 | 2.1.2 | 2 | 1 | |
| O52325 | 4.1.1 | 2.1.2 | 2.1.2.9 | 1 | |
| O52325 | 4.1.1 | 2.1.2 | 3 | 0 | 1 |
| O52325 Total | | | | 2 | 1 |
| Q8RF47 | 4.2.3.4 | 3.6.1 | 3.6.1.11 | 1 | |
| Q8RF47 | 4.2.3.4 | 3.6.1 | 4.2.3.4 | 2 | |
| Q8RF47 Total | | | | 3 | 0 |
| Q8G5X4 | 2.7.1.71 | 4.2.3.4 | 4.2 | 1 | |
| Q8G5X4 | 2.7.1.71 | 4.2.3.4 | 4.2.3.4 | 6 | |
| Q8G5X4 Total | | | | 7 | 0 |
| Q9WYI3 | 2.7.1.71 | 4.2.3.4 | 4 | 1 | |
| Q9WYI3 | 2.7.1.71 | 4.2.3.4 | 4.2 | 1 | |
| Q9WYI3 | 2.7.1.71 | 4.2.3.4 | 4.2.3.4 | 2 | |
| Q9WYI3 Total | | | | 4 | 0 |
| P52081 | 3.5.1.28 | 3.2.1.96 | 2.7.2.3 | 0 | 1 |
| P52081 | 3.5.1.28 | 3.2.1.96 | 3 | 1 | |
| P52081 Total | | | | 1 | 1 |
| Q9Y8G7 | 1.14.14.1 | 1.6.2.4 | 1 | 1 | |
| Q9Y8G7 | 1.14.14.1 | 1.6.2.4 | 1.4 | 0 | 1 |
| Q9Y8G7 Total | | | | 1 | 1 |
| P23473 | 3.2.1.14 | 3.2.1.17 | 3.2.1 | 1 | |
| P23473 Total | | | | 1 | 0 |
| Q13057 | 2.7.7.3 | 2.7.1.24 | 2 | 1 | |
| Q13057 Total | | | | 1 | 0 |
| Q9DBL7 | 2.7.7.3 | 2.7.1.24 | 1 | 0 | 1 |
| Q9DBL7 | 2.7.7.3 | 2.7.1.24 | 2 | 1 | |
| Q9DBL7 | 2.7.7.3 | 2.7.1.24 | 3 | 0 | 1 |
| Q9DBL7 Total | | | | 1 | 2 |
| P14779 | 1.14.14.1 | 1.6.2.4 | 1 | 4 | |
| P14779 Total | | | | 4 | 0 |
| Q9ACU1 | 2.5.1 | 2.5.1.31 | 2 | 2 | |
| Q9ACU1 | 2.5.1 | 2.5.1.31 | 2.5.1.31 | 2 | |
| Q9ACU1 Total | | | | 4 | 0 |
| Q57506 | 4.6.1.1 | | 3.6.3.14 | 0 | 1 |
| Q57506 Total | | | | 0 | 1 |
| P15318 | 4.6.1.1 | | 3.6.3.14 | 0 | 1 |
| P15318 Total | | | | 0 | 1 |
| Q05762 | 1.5.1.3 | 2.1.1.45 | 2 | 3 | |
| Q05762 | 1.5.1.3 | 2.1.1.45 | 2.1.1 | 1 | |
| Q05762 | 1.5.1.3 | 2.1.1.45 | 2.1.1.45 | 8 | |
| Q05762 Total | | | | 12 | 0 |
| Q05763 | 1.5.1.3 | 2.1.1.45 | 2 | 2 | |
| Q05763 | 1.5.1.3 | 2.1.1.45 | 2.1.1 | 1 | |
| Q05763 | 1.5.1.3 | 2.1.1.45 | 2.1.1.45 | 8 | |
| Q05763 | 1.5.1.3 | 2.1.1.45 | 5.1.1.7 | 0 | 1 |
| Q05763 Total | | | | 11 | 1 |
| Q23695 | 1.5.1.3 | 2.1.1.45 | 2.1.1 | 1 | |
| Q23695 | 1.5.1.3 | 2.1.1.45 | 2.1.1.45 | 5 | |
| Q23695 Total | | | | 6 | 0 |
| P45350 | 1.5.1.3 | 2.1.1.45 | 1.5.1.3 | 1 | |
| P45350 | 1.5.1.3 | 2.1.1.45 | 2 | 3 | |
| P45350 | 1.5.1.3 | 2.1.1.45 | 2.1.1.45 | 9 | |
| P45350 | 1.5.1.3 | 2.1.1.45 | 5.1.1.7 | 0 | 1 |
| P45350 Total | | | | 13 | 1 |
| P16126 | 1.5.1.3 | 2.1.1.45 | 2 | 2 | |
| P16126 | 1.5.1.3 | 2.1.1.45 | 2.1 | 1 | |
| P16126 | 1.5.1.3 | 2.1.1.45 | 2.1.1 | 1 | |
| P16126 | 1.5.1.3 | 2.1.1.45 | 2.1.1.45 | 8 | |
| P16126 Total | | | | 12 | 0 |
| P07382 | 1.5.1.3 | 2.1.1.45 | 2 | 2 | |
| P07382 | 1.5.1.3 | 2.1.1.45 | 2.1.1 | 1 | |
| P07382 | 1.5.1.3 | 2.1.1.45 | 2.1.1.45 | 8 | |
| P07382 | 1.5.1.3 | 2.1.1.45 | 6.1.1 | 0 | 1 |
| P07382 Total | | | | 11 | 1 |
| O81395 | 1.5.1.3 | 2.1.1.45 | 1.5.1.3 | 1 | |
| O81395 | 1.5.1.3 | 2.1.1.45 | 2 | 2 | |
| O81395 | 1.5.1.3 | 2.1.1.45 | 2.1 | 1 | |
| O81395 | 1.5.1.3 | 2.1.1.45 | 2.1.1 | 1 | |
| O81395 | 1.5.1.3 | 2.1.1.45 | 2.1.1.45 | 9 | |
| O81395 Total | | | | 14 | 0 |
| Q5UQG3 | 1.5.1.3 | 2.1.1.45 | 2.1.1.45 | 1 | |
| Q5UQG3 Total | | | | 1 | 0 |
| Q27828 | 1.5.1.3 | 2.1.1.45 | 1.5.1.3 | 1 | |
| Q27828 | 1.5.1.3 | 2.1.1.45 | 2 | 1 | |
| Q27828 | 1.5.1.3 | 2.1.1.45 | 2.1.1 | 1 | |
| Q27828 | 1.5.1.3 | 2.1.1.45 | 2.1.1.45 | 8 | |
| Q27828 Total | | | | 11 | 0 |
| Q27713 | 1.5.1.3 | 2.1.1.45 | 1.5.1.3 | 1 | |
| Q27713 | 1.5.1.3 | 2.1.1.45 | 2 | 2 | |
| Q27713 | 1.5.1.3 | 2.1.1.45 | 2.1 | 1 | |
| Q27713 | 1.5.1.3 | 2.1.1.45 | 2.1.1 | 1 | |
| Q27713 | 1.5.1.3 | 2.1.1.45 | 2.1.1.45 | 8 | |
| Q27713 Total | | | | 13 | 0 |
| P20712 | 1.5.1.3 | 2.1.1.45 | 2 | 2 | |
| P20712 | 1.5.1.3 | 2.1.1.45 | 2.1 | 1 | |
| P20712 | 1.5.1.3 | 2.1.1.45 | 2.1.1 | 1 | |
| P20712 | 1.5.1.3 | 2.1.1.45 | 2.1.1.45 | 8 | |
| P20712 Total | | | | 12 | 0 |
| P13922 | 1.5.1.3 | 2.1.1.45 | 2 | 2 | |
| P13922 | 1.5.1.3 | 2.1.1.45 | 2.1 | 1 | |
| P13922 | 1.5.1.3 | 2.1.1.45 | 2.1.1 | 1 | |
| P13922 | 1.5.1.3 | 2.1.1.45 | 2.1.1.45 | 8 | |
| P13922 Total | | | | 12 | 0 |
| O02604 | 1.5.1.3 | 2.1.1.45 | 2 | 1 | |
| O02604 | 1.5.1.3 | 2.1.1.45 | 2.1 | 1 | |
| O02604 | 1.5.1.3 | 2.1.1.45 | 2.1.1 | 1 | |
| O02604 | 1.5.1.3 | 2.1.1.45 | 2.1.1.45 | 8 | |
| O02604 | 1.5.1.3 | 2.1.1.45 | 4 | 0 | 1 |
| O02604 Total | | | | 11 | 1 |
| P51820 | 1.5.1.3 | 2.1.1.45 | 2 | 3 | |
| P51820 | 1.5.1.3 | 2.1.1.45 | 2.1.1 | 1 | |
| P51820 | 1.5.1.3 | 2.1.1.45 | 2.1.1.45 | 11 | |
| P51820 | 1.5.1.3 | 2.1.1.45 | 5.1.1.7 | 0 | 1 |
| P51820 Total | | | | 15 | 1 |
| Q07422 | 1.5.1.3 | 2.1.1.45 | 1.1.1.1 | 0 | 1 |
| Q07422 | 1.5.1.3 | 2.1.1.45 | 2 | 1 | |
| Q07422 | 1.5.1.3 | 2.1.1.45 | 2.1.1 | 1 | |
| Q07422 | 1.5.1.3 | 2.1.1.45 | 2.1.1.45 | 7 | |
| Q07422 Total | | | | 9 | 1 |
| Q27783 | 1.5.1.3 | 2.1.1.45 | 2 | 2 | |
| Q27783 | 1.5.1.3 | 2.1.1.45 | 2.1.1 | 1 | |
| Q27783 | 1.5.1.3 | 2.1.1.45 | 2.1.1.45 | 7 | |
| Q27783 Total | | | | 10 | 0 |
| Q27793 | 1.5.1.3 | 2.1.1.45 | 2 | 2 | |
| Q27793 | 1.5.1.3 | 2.1.1.45 | 2.1.1 | 1 | |
| Q27793 | 1.5.1.3 | 2.1.1.45 | 2.1.1.45 | 7 | |
| Q27793 Total | | | | 10 | 0 |
| Q9CGE3 | 2.7.6.3 | 3.5.4.16 | 3.5.4.16 | 3 | |
| Q9CGE3 Total | | | | 3 | 0 |
| Q8GJP4 | 2.7.6.3 | 3.5.4.16 | 3.5.4.16 | 3 | |
| Q8GJP4 Total | | | | 3 | 0 |
| Q10663 | 4.1.3.1 | 2.3.3.9 | 2 | 1 | |
| Q10663 | 4.1.3.1 | 2.3.3.9 | 2.3 | 1 | |
| Q10663 | 4.1.3.1 | 2.3.3.9 | 2.3.3.9 | 5 | |
| Q10663 | 4.1.3.1 | 2.3.3.9 | 4.1 | 1 | |
| Q10663 | 4.1.3.1 | 2.3.3.9 | 4.1.3 | 1 | |
| Q10663 | 4.1.3.1 | 2.3.3.9 | 4.1.3.1 | 4 | |
| Q10663 Total | | | | 13 | 0 |
| Q7TQ49 | 5.1.3.14 | 2.7.1.60 | 2.7.1 | 1 | |
| Q7TQ49 Total | | | | 1 | 0 |
| Q9Y223 | 5.1.3.14 | 2.7.1.60 | 2.7.1 | 1 | |
| Q9Y223 Total | | | | 1 | 0 |
| Q91WG8 | 5.1.3.14 | 2.7.1.60 | 2.7.1 | 1 | |
| Q91WG8 Total | | | | 1 | 0 |
| O35826 | 5.1.3.14 | 2.7.1.60 | 2.7.1 | 1 | |
| O35826 Total | | | | 1 | 0 |
| P17114 | 2.7.7.23 | 2.3.1.157 | 2.7.1.40 | 0 | 1 |
| P17114 Total | | | | 0 | 1 |
| P43675 | 6.3.1.8 | 3.5.1.78 | 2 | 0 | 1 |
| P43675 Total | | | | 0 | 1 |
| Q92G13 | 2.1.1 | 2.1.1.33 | 2 | 2 | |
| Q92G13 | 2.1.1 | 2.1.1.33 | 2.1.1.33 | 2 | |
| Q92G13 | 2.1.1 | 2.1.1.33 | 2.4 | 0 | 1 |
| Q92G13 | 2.1.1 | 2.1.1.33 | 3.1.3.48 | 0 | 1 |
| Q92G13 Total | | | | 4 | 2 |
| Q9ZCB3 | 2.1.1 | 2.1.1.33 | 2 | 1 | |
| Q9ZCB3 | 2.1.1 | 2.1.1.33 | 2.1.1.33 | 2 | |
| Q9ZCB3 Total | | | | 3 | 0 |
| Q83B60 | 2.7.1 | 2.7.7 | 2.1.2.9 | 0 | 1 |
| Q83B60 Total | | | | 0 | 1 |
| Q7AAQ7 | 2.7.1 | 2.7.7 | 3.6.3 | 0 | 1 |
| Q7AAQ7 Total | | | | 0 | 1 |
| Q8FDH5 | 2.7.1 | 2.7.7 | 3.6.3 | 0 | 1 |
| Q8FDH5 Total | | | | 0 | 1 |
| P76658 | 2.7.1 | 2.7.7 | 3.6.3 | 0 | 1 |
| P76658 Total | | | | 0 | 1 |
| Q74BF6 | 2.7.1 | 2.7.7 | 5 | 0 | 1 |
| Q74BF6 | 2.7.1 | 2.7.7 | 6 | 0 | 1 |
| Q74BF6 Total | | | | 0 | 2 |
| Q9ZKZ0 | 2.7.1 | 2.7.7 | 1 | 0 | 1 |
| Q9ZKZ0 Total | | | | 0 | 1 |
| Q9CME6 | 2.7.1 | 2.7.7 | 3.4.21 | 0 | 1 |
| Q9CME6 Total | | | | 0 | 1 |
| Q88D93 | 2.7.1 | 2.7.7 | 2.7 | 1 | |
| Q88D93 Total | | | | 1 | 0 |
| Q87VF4 | 2.7.1 | 2.7.7 | 2.7 | 1 | |
| Q87VF4 Total | | | | 1 | 0 |
| Q98I54 | 2.7.1 | 2.7.7 | 1 | 0 | 1 |
| Q98I54 Total | | | | 0 | 1 |
| Q6N2R5 | 2.7.1 | 2.7.7 | 1.18.6.1 | 0 | 1 |
| Q6N2R5 Total | | | | 0 | 1 |
| Q8XEW9 | 2.7.1 | 2.7.7 | 3.6.3 | 0 | 1 |
| Q8XEW9 Total | | | | 0 | 1 |
| Q7CPR9 | 2.7.1 | 2.7.7 | 3.6.3 | 0 | 1 |
| Q7CPR9 Total | | | | 0 | 1 |
| Q7UBI8 | 2.7.1 | 2.7.7 | 3.6.3 | 0 | 1 |
| Q7UBI8 Total | | | | 0 | 1 |
| Q9Z5B5 | 2.7.1 | 2.7.7 | 6.1.1.7 | 0 | 1 |
| Q9Z5B5 Total | | | | 0 | 1 |
| Q8YD09 | 3.5.2.7 | 4.3.1.3 | 3 | 1 | |
| Q8YD09 | 3.5.2.7 | 4.3.1.3 | 3.5.2.7 | 10 | |
| Q8YD09 | 3.5.2.7 | 4.3.1.3 | 4 | 1 | |
| Q8YD09 | 3.5.2.7 | 4.3.1.3 | 4.3.1 | 1 | |
| Q8YD09 | 3.5.2.7 | 4.3.1.3 | 4.3.1.3 | 16 | |
| Q8YD09 Total | | | | 29 | 0 |
| Q58270 | 2.5.1.1 | 2.5.1.10 | 6.1.1.19 | 0 | 1 |
| Q58270 Total | | | | 0 | 1 |
| Q58999 | 2.7.1.147 | 2.7.1.146 | 2 | 1 | |
| Q58999 | 2.7.1.147 | 2.7.1.146 | 2.7.1 | 1 | |
| Q58999 | 2.7.1.147 | 2.7.1.146 | 2.7.1.146 | 1 | |
| Q58999 Total | | | | 3 | 0 |
| Q55928 | 2.7.7.1 | 3.6.1 | 2 | 1 | |
| Q55928 | 2.7.7.1 | 3.6.1 | 2.7.7.1 | 1 | |
| Q55928 Total | | | | 2 | 0 |
| O54820 | 2.7.7.4 | 2.7.1.25 | 2.7.1.25 | 1 | |
| O54820 | 2.7.7.4 | 2.7.1.25 | 3.4.11.18 | 0 | 1 |
| O54820 | 2.7.7.4 | 2.7.1.25 | 6 | 0 | 1 |
| O54820 Total | | | | 1 | 2 |
| O43252 | 2.7.7.4 | 2.7.1.25 | 2.7.1.25 | 1 | |
| O43252 | 2.7.7.4 | 2.7.1.25 | 3.4.11.18 | 0 | 1 |
| O43252 | 2.7.7.4 | 2.7.1.25 | 6 | 0 | 1 |
| O043252 Total | | | | 1 | 2 |
| Q60967 | 2.7.7.4 | 2.7.1.25 | 2.7.1.25 | 1 | |
| Q60967 | 2.7.7.4 | 2.7.1.25 | 3.4.11.18 | 0 | 1 |
| Q60967 | 2.7.7.4 | 2.7.1.25 | 6 | 0 | 1 |
| Q60967 Total | | | | 1 | 2 |
| O95340 | 2.7.7.4 | 2.7.1.25 | 2.7 | 1 | |
| O95340 | 2.7.7.4 | 2.7.1.25 | 2.7.1.25 | 2 | |
| O95340 | 2.7.7.4 | 2.7.1.25 | 6 | 0 | 1 |
| O95340 Total | | | | 3 | 1 |
| O88428 | 2.7.7.4 | 2.7.1.25 | 2.7 | 1 | |
| O88428 | 2.7.7.4 | 2.7.1.25 | 2.7.1.25 | 2 | |
| O88428 | 2.7.7.4 | 2.7.1.25 | 6 | 0 | 1 |
| O88428 Total | | | | 3 | 1 |
| Q27128 | 2.7.7.4 | 2.7.1.25 | 2.7 | 1 | |
| Q27128 | 2.7.7.4 | 2.7.1.25 | 2.7.1 | 1 | |
| Q27128 | 2.7.7.4 | 2.7.1.25 | 2.7.1.25 | 4 | |
| Q27128 | 2.7.7.4 | 2.7.1.25 | 3.1 | 0 | 1 |
| Q27128 | 2.7.7.4 | 2.7.1.25 | 6 | 0 | 1 |
| Q27128 Total | | | | 6 | 2 |
| P36204 | 2.7.2.3 | 5.3.1.1 | 2 | 4 | |
| P36204 | 2.7.2.3 | 5.3.1.1 | 2.7 | 4 | |
| P36204 | 2.7.2.3 | 5.3.1.1 | 2.7.2.3 | 29 | |
| P36204 | 2.7.2.3 | 5.3.1.1 | 5.3.1.1 | 11 | |
| P36204 Total | | | | 48 | 0 |
| O13911 | 3.1.3.32 | 2.7.1.78 | 3 | 1 | |
| O13911 | 3.1.3.32 | 2.7.1.78 | 3.1.3.18 | 0 | 1 |
| O13911 Total | | | | 1 | 1 |
| Q96T60 | 3.1.3.32 | 2.7.1.78 | 1.17.4.3 | 0 | 1 |
| Q96T60 | 3.1.3.32 | 2.7.1.78 | 3 | 1 | |
| Q96T60 Total | | | | 1 | 1 |
| Q9JLV6 | 3.1.3.32 | 2.7.1.78 | 3 | 1 | |
| Q9JLV6 | 3.1.3.32 | 2.7.1.78 | 3.1.3.18 | 0 | 1 |
| Q9JLV6 Total | | | | 1 | 1 |
| P20772 | 6.3.4.13 | 6.3.3.1 | 2.6.1.52 | 0 | 1 |
| P20772 | 6.3.4.13 | 6.3.3.1 | 6 | 1 | |
| P20772 | 6.3.4.13 | 6.3.3.1 | 6.3 | 1 | |
| P20772 | 6.3.4.13 | 6.3.3.1 | 6.3.3.1 | 9 | |
| P20772 | 6.3.4.13 | 6.3.3.1 | 6.3.4.13 | 6 | |
| P20772 Total | | | | 17 | 1 |
| Q99148 | 6.3.4.13 | 6.3.3.1 | 6 | 1 | |
| Q99148 | 6.3.4.13 | 6.3.3.1 | 6.3 | 1 | |
| Q99148 | 6.3.4.13 | 6.3.3.1 | 6.3.3.1 | 10 | |
| Q99148 | 6.3.4.13 | 6.3.3.1 | 6.3.4.13 | 6 | |
| Q99148 Total | | | | 18 | 0 |
| P07244 | 6.3.4.13 | 6.3.3.1 | 6 | 1 | |
| P07244 | 6.3.4.13 | 6.3.3.1 | 6.3.3.1 | 11 | |
| P07244 | 6.3.4.13 | 6.3.3.1 | 6.3.4.13 | 4 | |
| P07244 Total | | | | 16 | 0 |
| Q8A155 | 2.1.2.3 | 3.5.4.10 | 2 | 1 | |
| Q8A155 Total | | | | 1 | 0 |
| Q89WU7 | 2.1.2.3 | 3.5.4.10 | 4.2.1.24 | 0 | 1 |
| Q89WU7 Total | | | | 0 | 1 |
| P57143 | 2.1.2.3 | 3.5.4.10 | 2 | 1 | |
| P57143 Total | | | | 1 | 0 |
| Q8KA70 | 2.1.2.3 | 3.5.4.10 | 2 | 1 | |
| Q8KA70 Total | | | | 1 | 0 |
| Q9ABY4 | 2.1.2.3 | 3.5.4.10 | 4.2.1.24 | 0 | 1 |
| Q9ABY4 Total | | | | 0 | 1 |
| P31335 | 2.1.2.3 | 3.5.4.10 | 2 | 1 | |
| P31335 Total | | | | 1 | 0 |
| Q892X3 | 2.1.2.3 | 3.5.4.10 | 2.7.1.37 | 0 | 1 |
| Q892X3 Total | | | | 0 | 1 |
| Q9RHX6 | 2.1.2.3 | 3.5.4.10 | 3.6.3.14 | 0 | 1 |
| Q9RHX6 | 2.1.2.3 | 3.5.4.10 | 5.3.1.16 | 0 | 1 |
| Q9RHX6 Total | | | | 0 | 2 |
| Q8X611 | 2.1.2.3 | 3.5.4.10 | 2 | 1 | |
| Q8X611 | 2.1.2.3 | 3.5.4.10 | 2.5.1 | 0 | 1 |
| Q8X611 | 2.1.2.3 | 3.5.4.10 | 4.2.1.24 | 0 | 1 |
| Q8X611 | 2.1.2.3 | 3.5.4.10 | 5 | 0 | 1 |
| Q8X611 Total | | | | 1 | 3 |
| Q8FB68 | 2.1.2.3 | 3.5.4.10 | 2 | 1 | |
| Q8FB68 | 2.1.2.3 | 3.5.4.10 | 2.5.1 | 0 | 1 |
| Q8FB68 | 2.1.2.3 | 3.5.4.10 | 4.2.1.24 | 0 | 1 |
| Q8FB68 | 2.1.2.3 | 3.5.4.10 | 5 | 0 | 1 |
| Q8FB68 Total | | | | 1 | 3 |
| P15639 | 2.1.2.3 | 3.5.4.10 | 2 | 1 | |
| P15639 | 2.1.2.3 | 3.5.4.10 | 2.5.1 | 0 | 1 |
| P15639 | 2.1.2.3 | 3.5.4.10 | 4.2.1.24 | 0 | 1 |
| P15639 | 2.1.2.3 | 3.5.4.10 | 5 | 0 | 1 |
| P15639 Total | | | | 1 | 3 |
| P43852 | 2.1.2.3 | 3.5.4.10 | 2 | 1 | |
| P43852 | 2.1.2.3 | 3.5.4.10 | 4.2.1.24 | 0 | 1 |
| P43852 | 2.1.2.3 | 3.5.4.10 | 5.3.1.9 | 0 | 1 |
| P43852 Total | | | | 1 | 2 |
| P31939 | 2.1.2.3 | 3.5.4.10 | 2 | 1 | |
| P31939 | 2.1.2.3 | 3.5.4.10 | 5.99.1.3 | 0 | 1 |
| P31939 Total | | | | 1 | 1 |
| Q9CWJ9 | 2.1.2.3 | 3.5.4.10 | 2 | 1 | |
| Q9CWJ9 Total | | | | 1 | 0 |
| P67542 | 2.1.2.3 | 3.5.4.10 | 6.1.1.20 | 0 | 1 |
| P67542 Total | | | | 0 | 1 |
| Q9RAJ5 | 2.1.2.3 | 3.5.4.10 | 2.7.1.37 | 0 | 1 |
| Q9RAJ5 | 2.1.2.3 | 3.5.4.10 | 6.1.1.20 | 0 | 1 |
| Q9RAJ5 Total | | | | 0 | 2 |
| P67541 | 2.1.2.3 | 3.5.4.10 | 6.1.1.20 | 0 | 1 |
| P67541 Total | | | | 0 | 1 |
| P57828 | 2.1.2.3 | 3.5.4.10 | 2 | 1 | |
| P57828 | 2.1.2.3 | 3.5.4.10 | 4.2.1.24 | 0 | 1 |
| P57828 Total | | | | 1 | 1 |
| Q9HUV9 | 2.1.2.3 | 3.5.4.10 | 4.2.1.24 | 0 | 1 |
| Q9HUV9 Total | | | | 0 | 1 |
| Q88DK3 | 2.1.2.3 | 3.5.4.10 | 4.2.1.24 | 0 | 1 |
| Q88DK3 Total | | | | 0 | 1 |
| Q87VR9 | 2.1.2.3 | 3.5.4.10 | 4.2.1.24 | 0 | 1 |
| Q87VR9 Total | | | | 0 | 1 |
| Q8Z335 | 2.1.2.3 | 3.5.4.10 | 2 | 1 | |
| Q8Z335 | 2.1.2.3 | 3.5.4.10 | 2.5.1 | 0 | 1 |
| Q8Z335 | 2.1.2.3 | 3.5.4.10 | 4.2.1.24 | 0 | 1 |
| Q8Z335 | 2.1.2.3 | 3.5.4.10 | 5 | 0 | 1 |
| Q8Z335 Total | | | | 1 | 3 |
| P26978 | 2.1.2.3 | 3.5.4.10 | 2 | 1 | |
| P26978 | 2.1.2.3 | 3.5.4.10 | 2.5.1 | 0 | 1 |
| P26978 | 2.1.2.3 | 3.5.4.10 | 4.2.1.24 | 0 | 1 |
| P26978 | 2.1.2.3 | 3.5.4.10 | 5 | 0 | 1 |
| P26978 Total | | | | 1 | 3 |
| O74928 | 2.1.2.3 | 3.5.4.10 | 4.2.1.11 | 0 | 1 |
| O74928 Total | | | | 0 | 1 |
| Q5HH11 | 2.1.2.3 | 3.5.4.10 | 2.1 | 1 | |
| Q5HH11 Total | | | | 1 | 0 |
| P67543 | 2.1.2.3 | 3.5.4.10 | 2.1 | 1 | |
| P67543 Total | | | | 1 | 0 |
| P67544 | 2.1.2.3 | 3.5.4.10 | 2.1 | 1 | |
| P67544 Total | | | | 1 | 0 |
| Q6GI11 | 2.1.2.3 | 3.5.4.10 | 2.1 | 1 | |
| Q6GI11 Total | | | | 1 | 0 |
| Q6GAE0 | 2.1.2.3 | 3.5.4.10 | 2.1 | 1 | |
| Q6GAE0 Total | | | | 1 | 0 |
| Q8NX88 | 2.1.2.3 | 3.5.4.10 | 2.1 | 1 | |
| Q8NX88 Total | | | | 1 | 0 |
| P67545 | 2.1.2.3 | 3.5.4.10 | 4.2.1.24 | 0 | 1 |
| P67545 Total | | | | 0 | 1 |
| P67546 | 2.1.2.3 | 3.5.4.10 | 4.2.1.24 | 0 | 1 |
| P67546 Total | | | | 0 | 1 |
| Q8DWK8 | 2.1.2.3 | 3.5.4.10 | 4.2.1.24 | 0 | 1 |
| Q8DWK8 Total | | | | 0 | 1 |
| Q8K8Y6 | 2.1.2.3 | 3.5.4.10 | 4.2.1.24 | 0 | 1 |
| Q8K8Y6 Total | | | | 0 | 1 |
| Q5XEF2 | 2.1.2.3 | 3.5.4.10 | 4.2.1.24 | 0 | 1 |
| Q5XEF2 Total | | | | 0 | 1 |
| Q8P310 | 2.1.2.3 | 3.5.4.10 | 4.2.1.24 | 0 | 1 |
| Q8P310 Total | | | | 0 | 1 |
| Q97T99 | 2.1.2.3 | 3.5.4.10 | 4.2.1.24 | 0 | 1 |
| Q97T99 Total | | | | 0 | 1 |
| Q8DRM1 | 2.1.2.3 | 3.5.4.10 | 4.2.1.24 | 0 | 1 |
| Q8DRM1 Total | | | | 0 | 1 |
| Q9F1T4 | 2.1.2.3 | 3.5.4.10 | 4.2.1.24 | 0 | 1 |
| Q9F1T4 Total | | | | 0 | 1 |
| Q9KV80 | 2.1.2.3 | 3.5.4.10 | 2 | 1 | |
| Q9KV80 | 2.1.2.3 | 3.5.4.10 | 4.2.1.24 | 0 | 1 |
| Q9KV80 Total | | | | 1 | 1 |
| Q5E257 | 2.1.2.3 | 3.5.4.10 | 4.2.1.24 | 0 | 1 |
| Q5E257 Total | | | | 0 | 1 |
| Q87KT0 | 2.1.2.3 | 3.5.4.10 | 4.2.1.24 | 0 | 1 |
| Q87KT0 Total | | | | 0 | 1 |
| Q8DD06 | 2.1.2.3 | 3.5.4.10 | 4.2.1.24 | 0 | 1 |
| Q8DD06 Total | | | | 0 | 1 |
| Q7MGT5 | 2.1.2.3 | 3.5.4.10 | 4.2.1.24 | 0 | 1 |
| Q7MGT5 Total | | | | 0 | 1 |
| Q8PQ19 | 2.1.2.3 | 3.5.4.10 | 4.2.1.24 | 0 | 1 |
| Q8PQ19 | 2.1.2.3 | 3.5.4.10 | 6.3.4.5 | 0 | 1 |
| Q8PQ19 Total | | | | 0 | 2 |
| Q8PD47 | 2.1.2.3 | 3.5.4.10 | 4.2.1.24 | 0 | 1 |
| Q8PD47 Total | | | | 0 | 1 |
| Q9PC10 | 2.1.2.3 | 3.5.4.10 | 2 | 1 | |
| Q9PC10 | 2.1.2.3 | 3.5.4.10 | 4.2.1.24 | 0 | 1 |
| Q9PC10 Total | | | | 1 | 1 |
| Q87D58 | 2.1.2.3 | 3.5.4.10 | 2 | 1 | |
| Q87D58 | 2.1.2.3 | 3.5.4.10 | 4.2.1.24 | 0 | 1 |
| Q87D58 Total | | | | 1 | 1 |
| Q8ZAR3 | 2.1.2.3 | 3.5.4.10 | 2 | 1 | |
| Q8ZAR3 | 2.1.2.3 | 3.5.4.10 | 4.2.1.24 | 0 | 1 |
| Q8ZAR3 Total | | | | 1 | 1 |
| P09546 | 1.5.99.8 | 1.5.1.12 | 1 | 1 | |
| P09546 | 1.5.99.8 | 1.5.1.12 | 1.2.1 | 0 | 2 |
| P09546 Total | | | | 1 | 2 |
| O52485 | 1.5.99.8 | 1.5.1.12 | 1 | 1 | |
| O52485 | 1.5.99.8 | 1.5.1.12 | 1.2.1 | 0 | 2 |
| O52485 | 1.5.99.8 | 1.5.1.12 | 4.2.1.20 | 0 | 1 |
| O52485 Total | | | | 1 | 3 |
| P95629 | 1.5.99.8 | 1.5.1.12 | 1 | 1 | |
| P95629 | 1.5.99.8 | 1.5.1.12 | 1.2.1 | 0 | 1 |
| P95629 | 1.5.99.8 | 1.5.1.12 | 2 | 0 | 1 |
| P95629 Total | | | | 1 | 2 |
| P10503 | 1.5.99.8 | 1.5.1.12 | 1 | 1 | |
| P10503 | 1.5.99.8 | 1.5.1.12 | 1.2.1 | 0 | 1 |
| P10503 Total | | | | 1 | 1 |
| Q7VJ82 | 2.7.7.6 | | 1 | 0 | 1 |
| Q7VJ82 | 2.7.7.6 | | 2 | 2 | |
| Q7VJ82 | 2.7.7.6 | | 2.4.1.1 | 0 | 1 |
| Q7VJ82 | 2.7.7.6 | | 2.7 | 3 | |
| Q7VJ82 | 2.7.7.6 | | 2.7.7.6 | 9 | |
| Q7VJ82 Total | | | | 14 | 2 |
| Q9ZK23 | 2.7.7.6 | | 1 | 0 | 2 |
| Q9ZK23 | 2.7.7.6 | | 2 | 1 | |
| Q9ZK23 | 2.7.7.6 | | 2.4.1.1 | 0 | 1 |
| Q9ZK23 | 2.7.7.6 | | 2.7 | 3 | |
| Q9ZK23 | 2.7.7.6 | | 2.7.7.6 | 9 | |
| Q9ZK23 | 2.7.7.6 | | 5.3.1.16 | 0 | 1 |
| Q9ZK23 | 2.7.7.6 | | 6.1.1.4 | 0 | 1 |
| Q9ZK23 | 2.7.7.6 | | 6.2.1.1 | 0 | 1 |
| Q9ZK23 Total | | | | 13 | 6 |
| O25806 | 2.7.7.6 | | 1 | 0 | 2 |
| O25806 | 2.7.7.6 | | 2 | 1 | |
| O25806 | 2.7.7.6 | | 2.4.1.1 | 0 | 1 |
| O25806 | 2.7.7.6 | | 2.7 | 3 | |
| O25806 | 2.7.7.6 | | 2.7.7.6 | 9 | |
| O25806 | 2.7.7.6 | | 5.3.1.16 | 0 | 1 |
| O25806 | 2.7.7.6 | | 6.1.1.4 | 0 | 1 |
| O25806 Total | | | | 13 | 5 |
| Q7MA56 | 2.7.7.6 | | 1 | 0 | 1 |
| Q7MA56 | 2.7.7.6 | | 2 | 1 | |
| Q7MA56 | 2.7.7.6 | | 2.7 | 3 | |
| Q7MA56 | 2.7.7.6 | | 2.7.7.6 | 9 | |
| Q7MA56 | 2.7.7.6 | | 6.2.1.1 | 0 | 1 |
| Q7MA56 Total | | | | 13 | 2 |
| Q85FR6 | 2.7.7.6 | | 2 | 2 | |
| Q85FR6 | 2.7.7.6 | | 2.7 | 4 | |
| Q85FR6 | 2.7.7.6 | | 2.7.1 | 0 | 1 |
| Q85FR6 | 2.7.7.6 | | 2.7.7.6 | 24 | |
| Q85FR6 Total | | | | 30 | 1 |
| P28668 | 6.1.1.17 | 6.1.1.15 | 2 | 0 | 1 |
| P28668 | 6.1.1.17 | 6.1.1.15 | 2.4.2.29 | 0 | 1 |
| P28668 | 6.1.1.17 | 6.1.1.15 | 6 | 1 | |
| P28668 | 6.1.1.17 | 6.1.1.15 | 6.1.1 | 3 | |
| P28668 Total | | | | 4 | 2 |
| P07814 | 6.1.1.17 | 6.1.1.15 | 2 | 0 | 1 |
| P07814 | 6.1.1.17 | 6.1.1.15 | 6 | 1 | |
| P07814 | 6.1.1.17 | 6.1.1.15 | 6.1.1 | 2 | |
| P07814 | 6.1.1.17 | 6.1.1.15 | 6.1.1.18 | 0 | 1 |
| P07814 Total | | | | 3 | 2 |
| Q8CGC7 | 6.1.1.17 | 6.1.1.15 | 2 | 0 | 1 |
| Q8CGC7 | 6.1.1.17 | 6.1.1.15 | 6 | 1 | |
| Q8CGC7 | 6.1.1.17 | 6.1.1.15 | 6.1.1 | 2 | |
| Q8CGC7 | 6.1.1.17 | 6.1.1.15 | 6.1.1.18 | 0 | 1 |
| Q8CGC7 Total | | | | 3 | 2 |
| Q58635 | 6.1.1.15 | 6.1.1.16 | 6.1.1 | 1 | |
| Q58635 Total | | | | 1 | 0 |
| P61422 | 2.5.1.3 | 2.7.4.7 | 2.5.1.3 | 1 | |
| P61422 | 2.5.1.3 | 2.7.4.7 | 2.7.4.7 | 1 | |
| P61422 Total | | | | 2 | 0 |
| Q8YRC9 | 1.5.3 | | 1 | 1 | |
| Q8YRC9 Total | | | | 1 | 0 |
| Q92F56 | 6.3.4 | 2.4.2.8 | 2 | 1 | |
| Q92F56 | 6.3.4 | 2.4.2.8 | 2.4.2.8 | 4 | |
| Q92F56 Total | | | | 5 | 0 |
| Q724J4 | 6.3.4 | 2.4.2.8 | 2 | 1 | |
| Q724J4 | 6.3.4 | 2.4.2.8 | 2.4.2.8 | 4 | |
| Q724J4 Total | | | | 5 | 0 |
| Q8YAC7 | 6.3.4 | 2.4.2.8 | 2 | 1 | |
| Q8YAC7 | 6.3.4 | 2.4.2.8 | 2.4.2.8 | 4 | |
| Q8YAC7 Total | | | | 5 | 0 |
| Q8R6G8 | 2 | 2.1.1.33 | 2.1.1.33 | 1 | |
| Q8R6G8 Total | | | | 1 | 0 |
| P46843 | 1.8.1.9 | 1.6.4.5 | 1 | 1 | |
| P46843 | 1.8.1.9 | 1.6.4.5 | 1.8.1.9 | 4 | |
| P46843 Total | | | | 5 | 0 |
| P31625 | 3.4.23 | 3.6.1.23 | 3.6.1.23 | 1 | |
| P31625 Total | | | | 1 | 0 |
| P29127 | 3.2.1.8 | | 3.2.1.8 | 2 | |
| P29127 | 3.2.1.8 | | 6.3.5.2 | 0 | 2 |
| P29127 Total | | | | 2 | 2 |
| P29126 | 3.2.1.8 | | 3 | 1 | |
| P29126 | 3.2.1.8 | | 3.2.1.8 | 1 | |
| P29126 Total | | | | 2 | 0 |
| Grand Total | | | | 719 | 132 |

[0726] The ability to generalize using the exemplary MEX algorithm was tested on several cross-validation choices of training and test sets within the class of oxidoreductases and found to be of the order of 85% (see Table 28).

TABLE 28
generalization tests on Oxidoreductase class.

| test set size | level 2 Jaccard score | level 3 Jaccard score |
|---|---|---|
| 10% | 0.86 ± 0.04 | 0.86 ± 0.07 |
| 20% | 0.86 ± 0.03 | 0.85 ± 0.05 |
| 25% | 0.85 ± 0.03 | 0.85 ± 0.04 |

[0727] Additionally, MEX was run on the Swiss-Prot 45 release (October 2004) and testing its predictions on 10,000 novel enzymes that are listed in the Swiss-Prot 48.3 release (for the relation between these two sets see FIG. 22 and Table 29.) results were similar to those described above, as shown in Table 31).

TABLE 29
Numbers of enzymes in Swiss-Prot release 48.3and Swiss-Prot
release 45.

| EC class | R45 ∩ R48 | R48 ∩ not in R45 | R45 ∩ not in R48 |
|---|---|---|---|
| Oxidoreductases | 7776 | 1661 | 142 |
| Transferases | 12474 | 3722 | 333 |
| Hydrolases | 8728 | 2173 | 254 |
| Lyases | 4140 | 1089 | 492 |
| Isomerases | 2348 | 541 | 33 |
| Ligases | 4649 | 1399 | 43 |
| Total | 40115 | 10585 | 1297 |

[0728] Table 30 summarizes results of a generalization test on all levels of the EC hierarchy. Recall specifies the coverage of the novel sequences (i.e. R48 ∩ not in R45) by PSs extracted from Swiss-Prot release 45. Precision denotes the number of correct assignments according to the EC hierarchy.

TABLE 30
Generalization test on all levels of EC.

| EC class | # of sequences | Recall | Precision |
|---|---|---|---|
| Oxidoreductases | 1661 | 1235 (74.35%) | 99.35% |
| Transferases | 3722 | 3253 (87.4%) | 99.3% |
| Hydrolases | 2173 | 1614 (74.25%) | 98.45% |
| Lyases | 1089 | 930 (85.4%) | 99.65% |
| Isomerases | 686 | 611 (89%) | 83% |
| Ligases | 1399 | 1385 (99%) | 99.55% |
| Total | 10730 | 9028 (84.15%) | 98.5% |

[0729] Both generalization tests suffer from a bias problem, i.e., there exist enzymes in the test sets that have high sequence similarity to some enzymes in the training sets.

[0730] In conventional machine-learning approaches to analysis of sequence to function problems bias in data sets is often accounted for by by avoiding high sequence similarity between proteins in the test set and proteins in the training set. In this case, this type of avoidance is practically infeasible, because such avoidance effectively calls for eliminating all enzymes that have the same 4-digit EC number as the one being tested from the training set.

[0731] Therefore, bias was handled by the following procedure:

[0732] (a) start with the test set consisting of all sequences of SwissProt release 48.3 that do not appear in release 45.

[0733] (b) blast each sequence with the sequences of the training set (SwissProt release 45) that do not have the same 4-digit EC number.

[0734] (c) include in the non-redundant test set only sequences whose BLAST score (Altschul et al.(1997) Gapped blast and psi-blst: a new generation of protein database search programs. Nucl. Acids Res., 25:3389-3402). with all other training sequences (including those with the same first 3 EC digits) is larger than 10⁻³. A representative Example of a non-redundant database is provided in Appendix 1 below and further in Table 37 on enclosed CD-ROM. (d) test generalization on this non-redundant set only for motifs in PS1, PS2, and PS3, thus avoiding the PS4 motifs that were extracted from the same 4th level EC sequences as those of the non-redundant test set. The results of this non-biased generalization test are presented in Table 34 which indicates that 440 (about 40%) of the test-set enzymes contain predicting sequences that fit the correct classification with an accuracy of 88%.

[0735] In table 34, numbers in the three PSN columns indicate the number of sequences been covered by PSs. Numbers in brackets indicate the numbers of PSs observed to occur on the sequences. Columns of tp and fp display true-positive and false-positive predictions, where tp corresponds to the PS indicating correctly the EC classification and fp indicates contradiction with the EC classification.

TABLE 34
Coverage of non-redundant test set by motifs in PS1, PS2 and PS3.

| class | # of seq | PS1 | tp₁ | fp₁ | PS2 | tp₂ | fp₂ | PS3 | tp₃ | fp₃ |
|---|---|---|---|---|---|---|---|---|---|---|
| Oxidoreductases | 36 | 15(35) | 34 | 1 | 0 | 0 | 0 | 0 | 0 | 0 |
| Transferases | 15 | 7(13) | 13 | 0 | 2(2) | 2 | 0 | 2(2) | 2 | 0 |
| Hydrolases | 98 | 30(41) | 39 | 2 | 5(5) | 4 | 1 | 4(4) | 2 | 2 |
| Lyases | 134 | 22(23) | 23 | 0 | 10(12) | 11 | 1 | 13(18) | 18 | 0 |
| Isomerases | 147 | 38(42) | 26 | 16 | 6(6) | 6 | 0 | 9(14) | 8 | 6 |
| Ligases | 10 | 3(5) | 5 | 0 | 4(10) | 10 | 0 | 0 | 0 | 0 |
| total | 440 | 115(159) | 140 | 19 | 27(35) | 33 | 2 | 28(38) | 30 | 8 |

### Remote Homology

[0736] Results presented hereinabove suggest that short predictive sequence motifs, although often extracted from homology, may be better alternatives for functional specification of proteins. Data summarized in Table 35 suggests that Relying on sequence identity within long aligned sections may turn out to be fortuitous, while shorter motifs appear to tell the true story. Table 35 displays pairs of enzymes that have large sequence identity yet different functional assignments. All displayed EC assignments are substantiated by corresponding predictive sequences located on these enzymes, most belonging to PS4. The numbers of predictive sequences per enzyme varies from one (in the cases of GTFB_STRMU and GABT_ECOLI, the latter having only one PS3 peptide) to 24 for AMY3B_ORYSA. Thus the pair of enzymes GTFB_STRMU and AMY3B_ORYSA contains both extremes. Note that in spite of the reported 42% sequence identity along an alignment of 105 amino-acids, none of the 24 predicting sequences occurring on AMY3B_ORYSA had an exact match on GTFB_STRMU, and a single PS4 (GGAFLE; SEQ ID No.: 29308) found on the latter determines correctly its EC classification. Table 35 summarizes data for enzymes with high sequence similarity and different EC assignments. Alignment and identity were calculated according to the Smith-Waterman method. EC assignments agree with PSs occurring on the enzymes.

TABLE 35
Enzymes with high sequence similarity and different EC assignments.

| | | sequence | alignment | |
|---|---|---|---|---|
| enzyme 1 | enzyme 2 | identity | length | e-value |
| GUNA_PSEFL | MDHP_FLABI | 71% | 28 | 1.6e−03 |
| EC 3.2.1.4 | EC 1.1.1.82 | | | |
| PLB1_YEAST | METB_ARATH | 60% | 30 | 5.9e−05 |
| EC 3.1.1.5 | EC 2.5.1.48 | | | |
| RPB1_PLAFD | UBC2_YEAST | 63% | 27 | 18e−05 |
| EC 2.7.7.6 | EC 6.3.2.19 | | | |
| CHIB_POPTR | KDGE_DROME | 58% | 24 | 6.0e−06 |
| EC 3.2.1.14 | EC 2.7.1.107 | | | |
| ODO2_FUGRU | PP2BB_HUMAN | 53% | 39 | 1.1e−06 |
| EC 2.3.1.61 | EC 3.1.3.16 | | | |
| GTFB_STRMU | AMY3B_ORYSA | 42% | 105 | 7.4e−08 |
| EC 2.4.1.5 | EC 3.2.1.1 | | | |
| RPB1_PLAFD | BDE3B_RAT | 58% | 36 | 84e−08 |
| EC 2.7.7.6 | EC 3.1.4.17 | | | |
| IGF1R_HUMAN | PTPRU_HUMAN | 34% | 157 | 1.5e−09 |
| EC 2.7.10.1 | EC 3.1.3.48 | | | |

### Biological Roles of Predicting Sequences

[0737] An analysis of correlation between predictive sequences and previously characterized active sites was undertaken in order to ascertain whether the predictive sequences play an important role in the active and binding sites of enzymes.

[0738] The Inventors of the present invention have constructed a database of 26,931 predicting sequence from 21,228 enzymes the Swiss-Prot 48.3 dataset which carry annotations of loci of active sites and binding sites. These enzymes constitute about 42% of the 48.3 dataset. It was found by the present Inventors that 65% of all active and binding sites are covered by predicting sequences. This can be compared with the coverage of random positions on the same enzyme sequences which, on average, is only 27%. Such average was found to be off by about 80 standard deviations. To validate the ability of the database of the present embodiments to cover binding and active sites a non-redundant database was constructed from a reduced set of 582 enzymes, one enzyme for each EC number. This non-redundant database included 6,660 predicting sequences which covered about 52% of the active and binding sites. The coverage of random positions on the same enzyme sequences was, on average, 21% (off by about 33 standard deviations). It is recognized that the non-redundant database is unbiased and therefore allows estimating active and binding site coverage had the annotations existed for all enzymes (rather than 42%). The present Inventors have succeeded to estimate a 12% coverage with a high statistical significance.

[0739] In analyzing the significance of predicting sequence coverage of active and/or binding sites, the coverage was compared with that of randomly chosen residues on enzyme sequences. This was carried out on all annotated enzymes with predicting sequence hits, as well as on the non-redundant set. The deviations of the measurements from random distributions were very high, and are quoted below in quanta of standard deviations (SDs). The corresponding p-values were found to be practically zero (bellow 10⁻³⁰⁸).

[0740] The results are presented in Table 31.

TABLE 31

| | | active | random | | | PSs |
|---|---|---|---|---|---|---|
| | | sites hit | sites hit | No. of | No. of | hitting |
| database | enzymes | by SPs | by SPs | SDs | PSs | sites |
| all | 21,228 | 65% | 27% | 80 | 26,931 | 8% |
| non redundant | 582 | 52% | 21% | 33 | 6,660 | 12% |

[0741] FIG. 19 displays aligned subsequences of enzymes, belonging to the same 3rd level but to different 4th levels of the EC hierarchy: 6 out of 35 enzymes of 5.1.3.2 and 7 out of 29 enzymes of 5.1.3.20. Shown are strings belonging to the sequences that include active sites and binding sites as indicated in Swiss-Prot annotations with bold-faced substrings denoting predicting sequences from our lists. Whereas in 5.1.3.20 most active sites are flanked by predicting sequences, this is not the case for the active site of 5.1.3.2. FIG. 19 displays a 3D picture of one of the enzymes of 5.1.3.20. The motif RYFNV (SEQ ID No.: 64741) can be seen to lie in proximity to both the S and Y active sites, sharing the same pocket.

[0742] An example stressing the relationships among predicting sequence and spatial structures is presented in FIGS. 20a-c. This enzyme belongs to 5.4.9.12 and it contains many predictive sequences. Shown here are predictive sequences that maintain a fixed sequence-distance from the active site for many of the enzymes in this level 4 class. Two predicting sequences flank the active site, one—HMVRNI-(SEQ ID no.: 64382) shares a pocket with the active site and the two binding sites, and the other—FHARF-(SEQ ID No.: 64294) plays the role of RNA binding in this tRNA pseudouridine synthase I. FHARF (SEQ ID No.: 64294) is one example of previously discovered motifs. Some other examples are: a. GFGRIG (SEQ ID No.: 14612; predicting sequence of 1) a conserved region of GAPDH that is active in the glycolytic pathway; b. HRDLKP (SEQ ID No.: 35399; predicting sequence of 2.7.1) appearing in protein kinases; c. IFIDEID (SEQ ID No.: 44623; predicting sequence of 3.6.4.3), the Walker B motif of ATPase; to name a few. However, most of the predicting sequences have not been studied before.

[0743] These results raise the question how many predicting sequences can be found in the neighborhood of active sites, as defined by the pockets in the spatial structures of enzymes. The statistical significance of the occurrence of predicting sequences in 3D pockets that include active sites was analyzed using the database of CASTp (Binkowski et al (2003) Castp: computed atlas of surface topography of proteins. Nucleic Acid Research, 31:3352-3355).

[0744] CASTp lists all amino-acids belonging to pockets appearing in spatial structures of proteins. 1031 enzymes that possess pockets including active (or binding) site annotations were selected. There are 8860 predicting sequences that occur on these enzymes, 31% of which lie within the active pockets in the sense that they have at least four amino-acids that reside in the pocket. Defining a background model of random peptides selected for each event of an predicting sequence hitting an active pocket in a particular enzyme, an estimate of 11% of all predicting sequences belong to events that pass an FDR [P. Bork and E. V. Koonin. Protein sequence motifs. Curr. Op. Structural Biology, 6:366-376, 1996] limit of 0.05 was obtained. Most of them (about 70%) do not contain an active site, hence they are of potential interest for experimental verification of their importance in defining and maintaining the enzymatic function.

[0745] Table 32 lists the number of enzymes that were analyzed and the number of SPs that are located on these enzymes. This is followed by numbers of predicting sequences lying (with at least four residues) in pockets including active sites. Requiring high significance of the latter, through a background model, and using the FDR limit of 0.05, the results displayed in the following column were obtained. The last column displays the number of significant predicting sequences that lie in the pocket but do not contain the amino-acid with active site annotation.

TABLE 32

| | | | | Significant |
|---|---|---|---|---|
| | | | Significant PSs | PSs without |
| enzymes | PS | PS in pockets | (FDR = 0.05) | sites |
| 1031 | 8860 | 2487 (28%) | 1622 (18%) | 1422 (16%) |

[0746] A list of these predicting sequences and the enzymes on which they occur is provided in Table 33.

TABLE 33
PSs found in 3D pockets shared by active sites.
Lines marked by asterisk denote the
occurence of an active site within the PS.

| | P-value | PDB id | Predicting Sequence |
|---|---|---|---|
| | 0.00e+00 | 1cy0 | AHEAIRP |
| * | 0.00e+00 | 1a0e | FHDRD |
| * | 0.00e+00 | 1cy0 | ITYMRTD |
| * | 0.00e+00 | 1pmi | SDNVVRAG |
| * | 4.80e−11 | 1pmi | RAGFTPKFKDV |
| * | 1.17e−10 | 1btm | GNWKMH |
| * | 2.46e−08 | 1btm | IAGNWKM |
| | 1.50e−07 | 1a0e | AQVKKALE |
| * | 6.25e−07 | 1btm | PIIAGNWK |
| * | 7.90e−07 | 1ejj | MGNSE |
| | 8.10e−07 | 1bq3 | NLFTGW |
| | 8.29e−07 | 1gzd | DWVGGR |
| | 8.29e−07 | 1iat | DWVGGR |
| | 8.29e−07 | 1gzd | SKTFTT |
| | 8.29e−07 | 1iat | SKTFTT |
| | 8.29e−07 | 1gzd | TEDRAV |
| | 1.34e−06 | 1q50 | DWVGGR |
| | 1.34e−06 | 1q50 | SKTFTT |
| | 5.03e−06 | 1fzt | NLFTGW |
| | 7.88e−06 | 1gzd | WVGGRYS |
| | 7.88e−06 | 1iat | WVGGRYS |
| | 9.03e−06 | 1ejj | VYQSLT |
| | 9.48e−06 | 1q50 | WVGGRYS |
| | 2.62e−05 | 1rii | NLFTGW |
| * | 3.05e−05 | 1bq3 | LVLVRHG |
| | 3.81e−05 | 1dxi | IEPKP |
| | 3.95e−05 | 1q50 | VNIGIGGS |
| | 5.90e−05 | 1bwz | MGNPH |
| * | 8.04e−05 | 1ejj | GNSEVGH |
| | 8.05e−05 | 1muw | IEPKP |
| * | 1.05e−04 | 1hg3 | LLNHSE |
| * | 1.07e−04 | 1aw1 | NWKLNG |
| | 1.11e−04 | 1b0z | SKSGTT |
| | 1.13e−04 | 1c47 | GTSGLR |
| | 1.13e−04 | 1c47 | HPDPNL |
| | 1.13e−04 | 1c47 | RYDYEE |
| * | 1.13e−04 | 1c47 | TASHNP |
| * | 1.15e−04 | 1fzt | AHGNSLR |
| * | 1.42e−04 | 1r2r | GHSERRH |
| * | 1.42e−04 | 1r2r | GNWKMNG |
| | 1.42e−04 | 1r2r | LGHSERR |
| | 1.70e−04 | 1fui | GFQGQRHWTD |
| | 1.76e−04 | 1dqr | DWVGGR |
| | 1.76e−04 | 1dqr | SKTFTT |
| | 1.76e−04 | 1dqr | TEDRAV |
| | 1.98e−04 | 1ag1 | LYGGSV |
| | 1.98e−04 | 1ag1 | YGGSVN |
| | 2.12e−04 | 1m6j | YGGSVN |
| * | 2.16e−04 | 1hti | GHSERRH |
| * | 2.16e−04 | 1hti | GNWKMNG |
| * | 2.16e−04 | 1hti | LGHSERR |
| * | 2.22e−04 | 1mo0 | GHSERRH |
| * | 2.22e−04 | 1mo0 | GNWKMNG |
| * | 2.22e−04 | 1mo0 | LGHSERR |
| * | 2.22e−04 | 1mo0 | VILGHSE |
| * | 2.36e−04 | 1bq3 | RHGQSEWN |
| * | 3.06e−04 | 1rii | LVLLRHG |
| | 3.24e−04 | 1btm | LVGGASLEPASFL |
| | 3.85e−04 | 1c47 | GATIRLY |
| | 3.85e−04 | 1c47 | PTGWKFF |
| | 3.85e−04 | 1c47 | RLSGTGS |
| | 4.56e−04 | 1r2r | LVGGASLK |
| | 5.05e−04 | 1tmh | GGASLKA |
| * | 5.05e−04 | 1tmh | IGHSERR |
| | 5.36e−04 | 1vzw | ASGGVS |
| | 5.42e−04 | 1nu5 | WTLASGDT |
| * | 6.10e−04 | 1dqr | QHAFYQL |
| | 6.10e−04 | 1dqr | WVGGRYS |
| | 6.20e−04 | 1hti | LVGGASLK |
| | 6.66e−04 | 1eq2 | NNYQY |
| | 6.66e−04 | 1eq2 | RYFNV |
| * | 7.15e−04 | 1bwz | ACGSGA |
| | 7.15e−04 | 1bwz | GLGNDF |
| * | 7.64e−04 | 1ag1 | LGHSERR |
| | 7.97e−04 | 1d6m | GRVQTP |
| * | 7.97e−04 | 1d6m | ITYPRS |
| | 7.97e−04 | 1d6m | PEKWQL |
| | 8.04e−04 | 1b0z | EPAIAFR |
| | 8.04e−04 | 1b0z | NPFDQPG |
| | 8.20e−04 | 1dxi | WGGREG |
| | 8.43e−04 | 1mo0 | LVGGASLK |
| * | 8.60e−04 | 1aw1 | IGHSERR |
| | 8.60e−04 | 1aw1 | YGGSVKP |
| * | 9.29e−04 | 1fzt | RHGESEWN |
| | 9.53e−04 | 6xia | DQDLRFG |
| | 9.53e−04 | 6xia | GRDPFGD |
| * | 9.53e−04 | 6xia | TFHDDDL |
| * | 9.55e−04 | 1c47 | ASHNPGGP |
| | 9.67e−04 | 1gw9 | IEPKP |
| | 9.68e−04 | 1e58 | RFTGW |
| * | 9.82e−04 | 1m6j | LGHSERR |
| * | 9.82e−04 | 1m6j | VILGHSE |
| * | 1.06e−03 | 1spq | GHSERRH |
| * | 1.06e−03 | 1spq | GNWKMNG |
| * | 1.06e−03 | 1spq | LGHSERR |
| | 1.06e−03 | 1spq | VIACIGE |
| * | 1.06e−03 | 1spq | VILGHSE |
| | 1.20e−03 | 1ci1 | LYGGSV |
| | 1.20e−03 | 1ci1 | YGGSVT |
| * | 1.35e−03 | 1hg3 | EPPELIG |
| | 1.35e−03 | 1muw | WGGREG |
| | 1.44e−03 | 1tmh | LVGGASLK |
| * | 1.54e−03 | 1amk | LGHSERR |
| * | 1.54e−03 | 1amk | VILGHSE |
| | 1.97e−03 | 1ag1 | LVGGASLK |
| | 2.09e−03 | 1c47 | CGEESFGTG |
| * | 2.15e−03 | 1a41 | VGHTPSISKRAY |
| | 2.39e−03 | 1vzw | IVGKALY |
| * | 2.56e−03 | 1dqr | DQWGVELGK |
| * | 2.61e−03 | 1dj0 | CAGRTD |
| | 2.76e−03 | 1hx3 | WPGVWTNS |
| * | 3.00e−03 | 1aw1 | GHSERREY |
| | 3.29e−03 | 1b0z | GIGGSYLGA |
| | 3.36e−03 | 1bwz | ERGAGET |
| | 3.84e−03 | 1dxi | DQDLRFG |
| | 3.84e−03 | 1dxi | GRDPFGD |
| * | 3.84e−03 | 1dxi | TFHDDDL |
| | 4.23e−03 | 1tmh | GALVGGASL |
| * | 4.23e−03 | 1tmh | GHSERRTYH |
| | 4.52e−03 | 1bd0 | ICMDQ |
| | 4.73e−03 | 1muw | DQDLRFG |
| | 4.73e−03 | 1muw | GRDPFGD |
| * | 4.73e−03 | 1muw | TFHDDDL |
| | 4.79e−03 | 1spq | LVGGASLK |
| | 5.42e−03 | 1clk | WGGREG |
| | 5.48e−03 | 1gw9 | WGGREG |
| | 5.49e−03 | 1rcq | GRVSMD |
| | 5.49e−03 | 1rcq | LRPVMT |
| * | 5.73e−03 | 1ci1 | LGHSERR |
| | 6.26e−03 | 1c47 | DQKPGTSGLRK |
| | 6.90e−03 | 1u0e | DWVGGR |
| | 6.90e−03 | 1u0e | GEPGTN |
| * | 6.90e−03 | 1u0e | GTNGQH |
| | 6.90e−03 | 1u0e | KINYTE |
| | 6.90e−03 | 1u0e | SKTFTT |
| | 6.90e−03 | 1u0e | TEALKP |
| | 6.90e−03 | 1u0e | TEDRAV |
| | 7.03e−03 | 1vzw | HLVDLDAA |
| | 7.10e−03 | 1fui | WGFNGTERPGAVYLAA |
| | 8.06e−03 | 1bhw | WGGREG |
| | 8.27e−03 | 1dj0 | HHMVRNI |
| * | 8.27e−03 | 1dj0 | RTDAGVH |
| * | 9.57e−03 | 1bwz | QCGNGARC |
| | 1.05e−02 | 1eq2 | LKGRYQ |
| * | 1.18e−02 | 1snz | VNLTNHSYFNL |
| | 1.21e−02 | 1ci1 | LVGGASLK |
| | 1.24e−02 | 1gw9 | DQDLRFG |
| | 1.24e−02 | 1gw9 | GRDPFGD |
| * | 1.24e−02 | lgw9 | TFHDDDL |
| * | 1.25e−02 | 1e58 | RHGESQWN |
| * | 1.27e−02 | 1i45 | LGHSERR |
| * | 1.27e−02 | 1i45 | VILGHSE |
| | 1.30e−02 | 1clk | GRDPFGD |
| * | 1.30e−02 | 1clk | TFHDDDL |
| * | 1.33e−02 | 1w0m | IINFKAY |
| | 1.55e−02 | 6xia | EPKPNEPRGDI |
| | 1.66e−02 | 1a9y | GIPNNL |
| * | 1.69e−02 | 1snz | YPKHSGFCLETQ |
| | 1.75e−02 | 1d6m | VTWCIGHLLEQ |
| | 1.79e−02 | 1bwz | DFHYRIFNA |
| * | 1.84e−02 | 1bhw | TFHDDDL |
| | 1.92e−02 | 1u0e | GGSDLGP |
| * | 1.92e−02 | 1u0e | QHAFYQL |
| | 1.92e−02 | 1u0e | WVGGRYS |
| | 2.45e−02 | 1i45 | LVGGASLK |
| | 2.55e−02 | 1eq2 | FHEGACS |
| | 2.55e−02 | 1eq2 | MASVAFH |
| | 2.55e−02 | 1eq2 | PKLFEGS |
| * | 2.55e−02 | 1eq2 | SSAATYG |
| | 2.67e−02 | 1a9y | LLRYFNP |
| | 2.83e−02 | 1a41 | KDLRTYGVNYTFLYNFWTNVKS |
| | 2.88e−02 | 1qo2 | QIGGGI |
| | 2.93e−02 | 1e58 | SEAKAAGKLLK |
| | 2.99e−02 | 1xfc | DTGLNRNGV |
| | 3.12e−02 | 1bxc | DQDLRFG |
| | 3.12e−02 | 1bxc | GRDPFGD |
| | 3.15e−02 | 1bwz | YRIFNADGSEV |

### Statistical Significance

[0747] The results presented in Example 8 use enzymes preciously classified functionally (by the EC system) as an example of how to approach the general problem of predicting function from sequence. Application of the exemplary MEX algorithm to the data, and filtering the results by requiring predicting sequences within the EC hierarchy, classification of all enzymes by predicting sequences occurring on them produces a coverage between 87% to 93% depending on the EC level that is being looked for (see Table 26).

[0748] Classification success of novel sequences that belong to the same type of data is of order 84-86% (see Tables 28 and 30), similar to what is expected from function assignments based on Smith-Waterman sequence similarity (Liao and Noble (2003) Combining pairwise sequence analysis and support vector machines for detecting remote protein evolutionary and structural relationships. J. of Comp. Biology, 10:857-868).

[0749] Even when a low bias restriction is imposed, as in the analysis of Table 34, precision of 88% on the enzymes that are covered by predicting sequences is achieved.

[0750] It should be noted that all the predicting sequences were extracted by an unsupervised motif-search algorithm, applied to each one of the six EC classes. The supervised selection of classification specificity is imposed on the motifs extracted by MEX, thus leading to the predicting sequences. Conventional classification methods rely on homology. While homology is also at the root of success for most predicting sequences of level 4, (see some examples in FIG. 19) Table 35 demonstrates that predicting sequences can also be of importance in remote homology, where straightforward comparison of an enzyme to another one with large sequence similarity is often misleading.

[0751] Alternatively, or additionally, Example 8 demonstrates that predicting sequences of level 4 are well correlated to active and binding sites at the level of primary sequence. Moreover, the occurrence of predicting sequences in pockets of active sites has been established. An analysis of randomly chosen isomerases whose 3D structure is known has shown that these results are highly significant.

[0752] In conclusion, Example 8 establishes a comprehensive and accurate classification scheme for enzymes based on the occurrence of predicting sequences on their sequences. The predicting sequences contain, on average, just 8.5 amino acids, and yet they suffice to correctly classify an overwhelming majority of the known enzymes. Many of these predicting sequences are located at active sites or in their 3D proximity, suggesting important functional roles. Hence it seems that PSs distill some of the essence of homology, and represent what evolution has regarded to be of importance.

### Significance of Predicting Sequence Occurrence in Active Pockets

[0753] In order to evaluate the biological significance of predicting sequences, as indicated by their occurrence in active 3D pockets of enzymes, a background model for each enzyme and each predicting sequence of length k, based on random drawings of k-mers existing on the sequence of this enzyme was prepared and used to calculat their probability of lying (with at least four amino-acids) within active pockets. For each event of a predicting sequence lying within an active pocket a p-value on the basis of the background model was calculated (i.e. a probability that this event could be random). The data included 1098 events of predicting sequences occurring on specific enzymes, out of which there were 271 events in which the predicting sequences lie within active pockets.

### Example 9

### Exemplary Detergent Compositions

[0754] In an exemplary embodiment of the invention, detergent compositions comprise a detergent and an enzyme, Optionally, the enzyme is provided as an enzyme additive (e.g. a protease, such as a serine protease). All enzymes identified according to the present invention may be found in Table 38 and Table 39 of enclosed CD-ROM (files “Table 38 complete protein part 1.txt” and “Table complete protein part 2.txt” respectively). Tables 38 and 39 provide, for each entry, a Sargasso sea database ID number, a Tel-Aviv University (TAU) ID number, an EC classification number, a EC description, a corresponding SEQ ID No. and a complete polynucleotide sequence.

[0755] Table 38 comprises SEQ ID Nos.: 77,838 to 137,952; and

[0756] Table 39 comprises SEQ ID Nos.: 137,953 to 198,923.

[0757] Table 40 and Table 41 provided on CD-ROM (files “Table 40 complete nucleic acid sequence part 1.txt” and “Table 41 complete nucleic acid sequence part 2.txt” respectively) are similar to Tables 38 and 39 respectively except that they present nucleid acid sequences corresponding to the polypeptide sequences and the Sargasso protein ID and the corresponding expression contig ID no.

[0758] Table 40 comprises SEQ ID Nos.: 198,933 to 259039; and

[0759] Table 41 comprises SEQ ID Nos.: 259,040 to 320,010.

[0760] Tables 38 to 41 establish that, using exemplary embodiments of analytic methods according to the invention, it is possible to classify a large body of sequence data with unknown function according to a functional classification system (e.g. the EC hierarchy). While analysis of enzymes is presented as an illustrative example, according to various embodiments of the invention polypeptide and/or polynucleotide sequences which do cont comprise or encode enzymatic activity can be classified in a similar fashion

### XXX SEQ ID Numbers of Those Relative to Detergents.

[0761] Proteases: Suitable proteases include those of animal, vegetable or microbial origin. Microbial origin is preferred. Chemically or genetically modified mutants are included. The protease may be a serine protease, preferably an alkaline microbial protease or a trypsin-like protease.

[0762] Examples of alkaline proteases are subtilisins, especially those derived from Bacillus, e.g., subtilisin Novo, subtilisin Carlsberg, subtilisin 309, subtilisin 147 and subtilisin 168 (described in WO 89/06279). Examples of trypsin-like proteases are tryp-sin(e.g. of porcine or bovine origin) and the Fusarium pro-tease described in WO 89/06270. In a particular embodiment of the present invention the protease is a serine protease. Serine proteases or serine endopeptidases (newer name) are a class of peptidases which are characterized by the presence of a serine residue in the active center of the enzyme.

[0763] Serine proteases: A serine protease is an enzyme which catalyzes the hydrolysis of peptide bonds, and in which there is an essential serine residue at the active site (White, Handler, and Smith, 1973 “Principles of Biochemistry,” Fifth Edition, McGraw-Hill Book Company, NY, pp. 271-272). The bacterial serine proteases have molecular weights in the 20,000 to 45,000 Daltons range. They are inhibited by diisopropylfluorophosphate. They hydrolyze simple terminal esters and are similar in activity to eukaryotic chymotrypsin, also a serine protease. A more narrow term, alkaline protease, covering a sub group, reflects the high pH optimum of some of the serine proteases, from pH 9.0 to 11.0 (for review, see Priest (1977) Bacteriological Rev. 41 711-753).

[0764] Subtilases: A sub-group of the serine proteases tentatively designated subtilases has been proposed by Siezen et al. (1991), Protein Eng., 4 719-737. They are defined by homology analysis of more than 40 amino acid sequences of serine proteases previously referred to as subtilisin-like proteases. A subtilisin was previously defined as a serine protease produced by Gram-positive bacteria or fungi, and according to Siezen et al. now is a subgroup of the subtilases. A wide variety of subtilisins have been identified, and the amino acid sequence of a number of subtilisins have been determined. These include more than six subtilisins from Bacillus strains, namely, subtilisin 168, subtilisin BPN′, subtilisin Carlsberg, subtilisin Y, subtitisin amylosacchariticus, and mesentericopeptidase (Kurihara et at. (1972) J. Biol. Chem. 247 5629-5631; Wells et at. (1983) Nucleic Acids Res. 11 7911-7925; Stahl and Ferrari (1984) J. Bacteriol. 159 811-819, Jacobs et at. (1985) Nucl. Acids Res. 13 8913-8926; Nedkov et al. (1985) Biot. Chem. Hoppe-Seyler 366 421-430, Svendsen et at. (1986) FEBS Lett. 196 228-232), one subtilisin from an actinomycetales, thermitase from Thermoactinomyces vulgaris (Meloun et at. (1985) FEBS Lett. 198 195-200), and one fungal subtitisin, proteinase K from Tritirachium album (Jany and Mayer (1985) Biol. Chem. Hoppe-Seyler 366 584-492). for further reference Table I from Siezen et at. has been reproduced below.

[0765] Subtilisins are well-characterized physically and chemically. In addition to knowledge of the primary structure (amino acid sequence) of these enzymes, over 50 high resolution X-ray structures of subtitisins have been determined which delineate the binding of substrate, transition state, products, at least three different protease inhibitors, and define the structural consequences for natural variation (Kraut (1977) Ann. Rev. Biochem. 46 331-358).

[0766] One subgroup of the subtilases, I-SI, comprises the “classical” subtitisins, such as subtilisin 168, subtilisin BPN′, subtitisin Carlsberg (ALCALASE®, Novozymes A/S), and subtitisin DY.

[0767] A further subgroup of the subtilases I-S2, is recognised by Siezen et at. (supra). Sub-group I-S2 proteases are described as highly alkaline subtitisins and comprise enzymes such as subtilisin PB92 (MAXACAL®, Gist-Brocades NV), subtilisin 309 (SAVINASE®, Novozymes NS), subtilisin 147 (ESPERASE®, Novozymes NS), and alkaline elastase YaB.

[0768] Lipases: Suitable lipases include those of bacterial or fungal origin. Chemically or genetically modified mutants are included.

[0769] Other types of lipolytic enzymes such as cutinases may also be useful.

[0770] Amylases: Suitable amylases (a and/or R) include those of bacterial or fungal origin.

[0771] Cellulases: Suitable cellulases include those of bacterial or fungal origin. Chemically or genetically modified mu-tants are included. Suitable cellulases are disclosed in U.S. Pat. No. 4,435,307, which discloses fungal cellulases produced from Humicola insolens. Especially suitable cellulases are the cellulases having color care benefits. Examples of such cellulases are cellulases described in European patent application No. 0 495 257.

[0772] Oxidoreductases: Any oxidoreductase suitable for use in a liquid composition, e.g., peroxidases or oxidases such as laccases, can be used herein. Suitable peroxidases herein include those of plant, bacterial or fungal origin. Suitable laccases herein include those of bacterial or fungal origin. Chemically or genetically modified mutants are included.

[0773] The types of enzymes which may be present in the liquid of the invention include oxidoreductases (EC I.-.-.-), transferases (EC 2.-.-.-), hydrolases (EC 3.-.-.-), lyases (EC 4.-.-20.-), isomerases (EC 5.-.-.-) and ligases (EC 6.-.-.-).

[0774] Preferred oxidoreductases in the context of the invention are peroxidases (EC 1.11.1), laccases (EC 1.10.3.2) and glucose oxidases (EC 1.1.3.4). An Example of a commercially available oxidoreductase (EC 1.-.-.-) is Gluzyme™ (enzyme available from Novozymes A/S).

[0775] Further oxidoreductases are available from other suppliers. Preferred transferases are transferases in any of the following sub-classes: a Transferases transferring one-carbon groups (EC 2.1); b transferases transferring aldehyde or ketone residues (EC 2.2); acyltransferases (EC 2.3); c glycosyltransferases (EC 2.4); d transferases transferring alkyl or aryl groups, other that methyl groups (EC 2.5); and e transferases transferring nitrogeneous groups (EC 2.6).

[0776] A most preferred type of transferase in the context of the invention is a transglutaminase (protein-glutamine y-glutamyltransferase; EC 2.3.2.13).

[0777] Preferred hydrolases in the context of the invention are: carboxylic ester hydrolases (EC 3.1.1.-) such as lipases (EC 3.1.1.3); phytases (EC 3.1.3.-), e.g. 3-phytases (EC 3.1.3.8) and 6-phytases (EC 3.1.3.26); glycosidases (EC 3.2, which fall within a group denoted herein as “carbohydrases”), such as a-amylases (EC 3.2.1.1); peptidases (EC 3.4, also known as proteases); and other carbonyl hydrolases.

[0778] In the present context, the term “carbohydrase” is used to denote not only enzymes capable of breaking down carbohydrate chains (e.g. starches or cellulose) of especially five- and six-membered ring structures (i.e. glycosidases, EC 3.2), but also enzymes capable of isomerizing carbohydrates, e.g. six-membered ring structures such as D-glucose to five-membered ring structures such as D-fructose.

[0779] Carbohydrases of relevance include the following (EC numbers in parentheses): a-amylases (EC 3.2.1.1), 3-amylases (EC 3.2.1.2), glucan 1,4-a-glucosidases (EC 3.2.1.3), endo-1,4-beta-glucanase (cellulases, EC 3.2.1.4), endo-1,3(4)-3-glucanases (EC 3.2.1.6), endo-1, 4-3-xylanases (EC 3.2.1.8), dextranases (EC 3.2.1.11), chitinases (EC 3.2.1.14), poly-galacturonases (EC 3.2.1.15), lysozymes (EC 3.2.1.17), f3-glucosidases (EC 3.2.1.21), a-galactosidases (EC 3.2.1.22), 3-galactosidases (EC 3.2.1.23), amylo-1,6-glucosidases (EC 3.2.1.33), xylan 1,4-f3-xylosidases (EC 3.2.1.37), glucan endo-1, 3-3-D-glucosidases (EC 3.2.1.39), a-dextrin endo-1,6-a-glucosidases (EC3.2.1.41), sucrose a-glucosidases (EC 3.2.1.48), glucan endo-1,3-a-glucosidases (EC 3.2.1.59), glucan 1,4-3-glucosidases (EC 3.2.1.74), glucan endo-1, 6-3-glucosidases (EC 3.2.1.75), galactanases (EC 3.2.1.89), arabinan endo-1,5-a-L-arabinosidases (EC 3.2.1.99), laccases (EC 3.2.1.108), chitosanases (EC 3.2.1.132) and xylose isomerases (EC 5.3.1.5).

[0780] Surfactant—Suitable surfactants to avoid precipitation in the enzyme additive may be any surfactant.

[0781] The surfactant of the present invention may be anionic, nonionic, cationic, or amphoteric (zwitterionic).

[0782] It has been found that particularly surfactants with a HLB value above 8 are suitable. In a particular embodiment of the present invention the HLB value of the surfactant is at least 9 such as at least 10. In a more particular embodiment the HLB value is between 10 and 20. In a more particular embodiment the HLB value of the surfactant is between 11 and 15.

[0783] In a particular embodiment of the present invention the surfactant is soluble in the enzyme liquid additive in the temperature range of 0 to 40° C. and do not phase separate. In a more particular embodiment the surfactant can be added as a mixture of two or more surfactants.

[0784] The amount of surfactant added is in particular 0.1 to 10% w/w of the total liquid additive more particular 0.25 to 8% w/w such as even more particular 0.5 to 5% w/w.

[0785] In a particular embodiment of the present invention the amount of surfactant is less than 1% w/w of the total enzyme additive. In a particular embodiment of the present invention the amount of surfactant is less than 0.7% w/w of the total enzyme additive.

[0786] In a particular embodiment of the present invention the amount of surfactant added to the enzyme additive is at least 0.1% w/w. In a more particular embodiment of the present invention the surfactant is added to the enzyme additive is at least 0.25% w/w.

[0787] In an even more particular embodiment the surfactant is added to the enzyme additive is at least 0.5% w/w. In a most particular embodiment of the present invention the surfactant is added to the enzyme additive is at least 1% w/w.

[0788] In a particular embodiment of the present invention the amount of surfactant added to the enzyme additive is less than 20% w/w. In a more particular embodiment of the present invention the amount of surfactant added to the enzyme additive is less than 15% w/w. In an even more particular embodiment of the present invention the amount of surfactant added to the enzyme liquid additive is less than 10% w/w. In a most particular embodiment of the present invention the amount of surfactant added to the enzyme liquid additive is less than 5%.

[0789] In a particular embodiment of the present invention the surfactant is a non-ionic surfactant.

[0790] The nonionic surfactants are alcohol ethoxylate (AEO or AE), alcohol propoxylate, carboxylated alcohol ethoxylates, nonylphenol ethoxylate, alkylpolyglycoside, alkyldimethylamine oxide, ethoxylated fatty acid monoethanolamide, fatty acid monoethanolamide, or polyhydroxy alkyl fatty acid amide (e.g. as described in WO 92/06154).

[0791] Polyethylene, polypropylene, and polybutylene oxide condensates of alkyl phenols. These compounds include the condensation products of alkyl phenols having an alkyl group containing from about 6 to about 14 carbon atoms, preferably from about 8 to about 14 carbon atoms, in either a straight chain or branched-chain configuration with the alkylene oxide. In a preferred embodiment, the ethylene oxide is present in an amount equal to from about 2 to about 25 moles, more preferably from about 3 to about 15 moles, of ethylene oxide per mole of alkyl phenol. Commercially available nonionic surfactants of this type include Triton™ X-45, X-114, X-100 and X-102, all marketed by the Rohm & Haas Company. These surfactants are commonly referred to as alkylphenol alkoxylates (e.g., alkyl phenol ethoxylates).

[0792] The condensation products of primary and secondary atiphatic alcohols with about 1 to about moles of ethylene oxide are preferred as the nonionic surfactant. The alkyl chain of the aliphatic alcohol can either be straight or branched, primary or secondary, and generally contains from about 8 to about 22 carbon atoms. Preferred are the condensation products of alcohols having an alkyl group containing from about 8 to about 20 carbon atoms, more preferably from about 10 to about 18 carbon atoms, with from about 3 moles of ethylene oxide per mole of alcohol. Examples of commercially available nonionic surfactants of this type include Tergitol™ 15-S-9 (The condensation product of C11-C15 linear alcohol with 9 moles ethylene oxide), Tergitol™ 24-L-6 NMW (the condensation product of C12-C14 primary alcohol with 6 moles ethylene oxide with a narrow molecular weight distribution), both marketed by Union Carbide Corporation; Neodol™ 45-9 (the condensation product of C14-C 15 linear alcohol with 9 moles of ethylene oxide), Neodol™ 23-3 (the condensation product of C12-C13 linear alcohol with 3.0 moles of ethylene oxide), Neodol™ 45-7 (the condensation product of C14-C15 linear alcohol with 7 moles of ethylene oxide), Neodol™ 45-5 (the condensation product of C14-C15 linear alcohol with 5 moles of ethylene oxide) marketed by Shell Chemical Company, Kyro™ EOB (the condensation product of C13-C15 alcohol with 9 moles ethylene oxide), marketed by The Procter & Gamble Company, and Genapol LA 050 (the condensation product of C12-C14 alcohol with 5 moles of ethylene oxide) marketed by Hoechst. Lutensol® AN, AT, AO and TO types marketed by BASF. Preferred range of HLB in these products is from 8-20 and most preferred from 8-18.

[0793] Examples of other commercially available nonionic surfactants include Softanol® from Ineos Oxide, Belgium.

[0794] Also useful as the nonionic surfactant of the present invention are alkylpolysaccharides disclosed in U.S. Pat. No. 4,565,647, having a hydrophobic group containing from about 6 to about 30 carbon atoms, preferably from about 10 to about 16 carbon atoms and a polysaccharide, e.g. a polyglycoside, hydrophilic group containing from about 1.3 to about 10, preferably from about 1.3 to about 3, most preferably from about 1.3 to about 2.7 saccharide units. Any reducing saccharide containing 5 or 6 carbon atoms can be used, e.g., glucose, galactose and galactosyl moieties can be substituted for the glucosyl moieties (optionally the hydrophobic group is attached at the 2-, 3-, 4-, etc. positions thus giving a glucose or galactose as opposed to a glucoside or galactoside). The intersaccharide bonds can be, e.g., between the one position of the additional saccharide units and the 2-, 3-, 4-, and/or 6-positions on the preceding saccharide units.

[0795] The condensation products of ethylene oxide with a hydrophobic base formed by the condensation of propylene oxide with propylene glycol are also suitable as surfactant. The hydrophobic portion of these compounds will preferably have a molecular weight from about 1500 to about 1800 and will exhibit water insolubility. The addition of polyoxyethylene moieties to this hydrophobic portion tends to increase the water solubility of the molecule as a whole, and the liquid character of the product is retained up to the point where the polyoxyethylene content is about 50% of the total weight of the condensation product, which corresponds to condensation with up to about 40 moles of ethylene oxide. Examples of compounds of this type include certain of the commercially available Pluronic™ surfactants, marketed by BASF.

[0796] Also suitable for use as the nonionic surfactant of the nonionic surfactant system of the present invention, are the condensation products of ethylene oxide with the product resulting from the reaction of propylene oxide and ethylenediamine. The hydrophobic moiety of these products consists of the reaction product of ethylenediamine and excess propylene oxide, and generally has a molecular weight of from about 2500 to about 3000. This hydrophobic moiety is condensed with ethylene oxide to the extent that the condensation product contains from about 40% to about 80% by weight of polyoxyethylene and has a molecular weight of from about 5,000 to about 11,000. Examples of this type of nonionic surfactant include certain of the commercially available Tetronic™ compounds, marketed by BASF.

[0797] Other suitable surfactants may be polyethylene oxide condensates of alkyl phenols, condensation products of primary and secondary aliphatic alcohols with from about 1 to about 25 moles of ethyleneoxide, alkylpolysaccharides, and mixtures hereof. Most preferred are C8-C14 alkyl phenol ethoxylates having from 3 to 15 ethoxy groups.

[0798] Other suitable nonionic surfactants may be polyhydroxy fatty acid amide surfactants.

[0799] Exemplary compositions for dishwashing detergent and/or clothes detergent may be found for example in US20070093400, hereby incorporated by reference as if fully set forth herein, or any other suitable composition.

### Example 10

### Exemplary Food Processing Compositions

[0800] Food processing compositions which use enzymes are known in the art. Exemplary classifications of enzymes which may optionally and preferably be used to prepare compositions for use in food processing include but are not limited to oxidative enzymes, proteases, lipases, cell wall degrading enzymes (pectinases, cellulases) as well as transferases. For example with regard to oxidoreductases, non-limiting examples of enzyme categories include peroxidases, laccases and tyrosinase. With regard to transferases, a non-limiting example is transglutaminase. Non-limiting examples of hydrolases include pectinase, xylanase and lactase (beta-galactosidase). Non-limiting examples of lyases include pectinylase. Non-limiting examples of isomerases include glucose isomerase. Non-limiting examples of at least some of these enzyme classifications with regard to these categories are given above.

[0801] XXX Add SEQ Id Nos of Relevant Enzymes

[0802] Food processing enzymes are preferably selected for being stable in the pH range of from about 3 to about 9, although certain food processes fall outside of this range as is known to one of ordinary skill in the art. The preferred temperature range is from about 15 C to about 8° C.

[0803] As a non-limiting example of a use of such enzymes, a cross-linking enzyme, preferably a transglutaminase, may optionally be used in baking, particularly for “weak” flours (a term in the art relating to flours which do not rise well). The use of this enzyme improves the structure of the resultant product and also improves the process as well. The enzyme is added to the batter (dough) as part of the baking process.

[0804] Table 36 provides non-limiting examples of enzymes used in the commercial baking industry.

TABLE 36
enzymes used in the commercial baking industry

| Enzyme type | Enzyme name | Mode of action | E3xpected result |
|---|---|---|---|
| Poteolytic | Protease | Protein cleavage | Aroma formation; |
| | peptidase | to peptides | gluten network |
| | | | modification |
| | | | Aroma formation |
| Crosslinking | Transglutaminase | Isopeptide Bond | Structure |
| | Polyphemol | Formation | strengthening |
| | oxidase, peroxidase | Oxidation of | Protein and |
| | Hexose oxidase | Tyrosine Residues | carbohydrate |
| | Glucose oxidase | Oxidation of | crosslinking |
| | | glucose and | Protein |
| | | maltose to lactone | crosslinking |
| | | and hydrogen | |
| | | peroxide | |
| Hydrolytic | Xylanase; β- | Hydrolysis of | Structure softening |
| | glucanase | pentosans and | of rye based |
| | | glucans | products |
| Lipid | Lipase | Hydrolysis of | Bleaching of flour; |
| modifying | Lipoxygenase | triglycerides | indirect protein |
| | | Oxidation of | crosslinking |
| | | conjugated fatty | |
| | | acids | |

### Example 11

### Compositions for Ethanol Production

[0805] Some exemplary embodiments of the invention relate to compositions for production of ethanol and use of these compositions thereof, for the production of desired end-products of in vitro and/or in vivo bioconversion of biomass-based feed stock substrates, including but not limited to such materials as starch and cellulose. In particularly preferred embodiments, the methods of the present invention do not require gelatinization and/or liquefaction of the substrate. In particularly preferred embodiments, the present invention provides means for the production of ethanol. In some particularly preferred embodiments, the present invention provides means for the production of ethanol directly from granular starch, in which altered catabolite repression is involved.

[0806] XXX Add Seq ID Nos of Relevant Enzymes

[0807] In particular, the present invention provides means for making ethanol in a manner that is characterized by having altered levels of catabolite repression and enzymatic inhibition, thus increasing the process efficiency. The methods of the present invention comprise the steps of contacting a carbon substrate and a substrate converting enzyme to produce an intermediate; and contacting the intermediate with an intermediate producing enzyme in a reactor vessel, wherein the intermediate is substantially all bioconverted by an end-product producing microorganism. By maintaining a low concentration of the intermediate in a conversion medium, the catabolite repressive or enzymatic inhibitive effects of the intermediate on the process are altered.

[0808] The present invention also provides methods in which starches or biomass and hydrolyzing enzymes are used to convert starch or cellulose to glucose. In addition, the present invention provides methods in which these substrates are provided at such a rate that the conversion of starch to glucose matches the glucose feed rate required for the respective fermentative product formation. Thus, the present invention provides key glucose-limited fermentative conditions, as well as avoiding many of the metabolic regulations and inhibitions.

[0809] In some preferred embodiments, the present invention provides means for making desired end-products, in which a continuous supply of glucose is provided under controlled rate conditions, providing such benefits as reduced raw material cost, lower viscosity, improved oxygen transfer for metabolic efficiency, improved bioconversion efficiency, higher yields, altered levels of catabolite repression and enzymatic inhibition, and lowered overall manufacturing costs.

[0810] Starch is a plant-based fermentation carbon source. Corn starch and wheat starch are carbon sources that are much cheaper than glucose carbon feedstock for fermentation. Conversion of liquefied starch to glucose is known in the art and is generally carried out using enzymes such alpha-amylase, pullulanase, and glucoamylase. A large number of processes have been described for converting liquefied starch to the monosaccharide, glucose. Glucose has value in itself, and also as a precursor for other saccharides such as fructose. In addition, glucose may also be fermented to ethanol or other fermentation products. However the ability of the enzymatic conversion of a first carbon source to the intermediate, especially glucose, may be impaired by the presence of the intermediate.

Exemplary carbon substrates include, but are not limited to biomass, starches, dextrins and sugars.

[0811] As used herein, “biomass” refers to cellulose- and/or starch-containing raw materials, including but not limited to wood chips, corn stover, rice, grasses, forages, perrie-grass, potatoes, tubers, roots, whole ground corn, cobs, grains, wheat, barley, rye, milo, brans, cereals, sugar-containing raw materials (e.g., molasses, fruit materials, sugar cane or sugar beets), wood, and plant residues. Indeed, it is not intended that the present invention be limited to any particular material used as biomass. In preferred embodiments of the present invention, the raw materials are starch-containing raw materials (e.g., cobs, whole ground corns, corns, grains, milo, and/or cereals, and mixtures thereof). In particularly preferred embodiments, the term refers to any starch-containing material originally obtained from any plant source.

[0812] As used herein, “starch” refers to any starch-containing materials. In particular, the term refers to various plant-based materials, including but not limited to wheat, barley, potato, sweet potato, tapioca, corn, maize, cassaya, milo, rye, and brans. Indeed, it is not intended that the present invention be limited to any particular type and/or source of starch. In general, the term refers to any material comprised of the complex polysaccharide carbohydrates of plants, comprised of amylose and amylopectin, with the formula (C6H10O5)x, wherein “x” can be any number.

[0813] As used herein, “cellulose” refers to any cellulose-containing materials. In particular, the term refers to the polymer of glucose (or “cellobiose”).

[0814] As used herein, the term “substrate converting enzyme” refers to any enzyme that converts the substrate (e.g., granular starch) to an intermediate, (e.g., glucose). Substrate converting enzymes include, but are not limited to alpha-amylases, glucoamylases, pullulanases, starch hydrolyzing enzymes, and various combinations thereof.

[0815] As used herein, the term “intermediate converting enzyme” refers to any enzyme that converts an intermediate (e.g., D-glucose, D-fructose, etc.), to the desired end-product. In preferred embodiments, this conversion is accomplished through hydrolysis, while in other embodiments, the conversion involves the metabolism of the intermediate to the end-product by a microorganism. However, it is not intended that the present invention be limited to any particular enzyme or means of conversion. Indeed, it is intended that any appropriate enzyme will find use in the various embodiments of the present invention.

[0816] Enzymes that find use in some embodiments of the present invention to convert a carbon substrate to an intermediate include, but are not limited to alpha-amylase, glucoamylase, starch hydrolyzing glucoamylase, and pullulanase. Enzymes that find use in the conversion of an intermediate to an end-product depend largely on the actual desired end-product. For example enzymes useful for the conversion of a sugar to 1,3-propanediol include, but are not limited to enzymes produced by E. coli and other microorganisms. For example enzymes useful for the conversion of a sugar to lactic acid include, but are not limited to those produced by Lactobacillus and Zymomonas. Enzymes useful for the conversion of a sugar to ethanol include, but are not limited to alcohol dehydrogenase and pyruvate decarboxylase. Enzymes useful for the conversion of a sugar to ascorbic acid intermediates include, but are not limited to glucose dehydrogenase, gluconic acid dehydrogenase, 2,5-diketo-D-gluconate reductase, and various other enzymes. Enzymes useful for the conversion of a sugar to gluconic acid include, but are not limited to glucose oxidase and catalase.

[0817] Non-limiting examples of these enzymes are given above.

### Example 12

### Exemplary Methods of the Invention Vs. Prosite

[0818] In order to give an idea of the utility of exemplary analytic methods of the invention, a comparison between Pro-Site date available in Swiss-Prot and enzymatic characterization as described above was conducted.

[0819] FIG. 24 is a Venn diagram illustrating the intersection of enzymes characterized by an exemplary embodiment of the invention and ProSite motifs listed in the Swiss-Prot data-base as standard motif annotations on 63% of the enzymes. The ProSite motifs are expressed as regular expressions or weight matrices (of average length 18.3 amino-acids) while the predicting sequences of the present embodiments are deterministic motifs (with average length of 8.4). All appearances of ProSite regular expression motifs on enzymes were searched. Each such appearance was noted on the enzyme sequence and checked whether it is also (partially) covered by a predicting sequence. The diagram clearly illustrates that there to is a good correlation between the two systems (30,893 enzymes classified by both systems). A small number of enzymes (1521) include Prosite notations but were not classified using exemplary methods according to the invention. Exemplary methods according to the invention classified 14,990 enzymes for which no Prosite classification is available.

[0820] FIG. 25 is a histogram illustrating the relative coverage of ProSite motifs the by predicting sequences of the present embodiments as function of the minimal percentage of amino-acids belonging to the ProSite motif that are also located on the predicting sequences.

[0821] It was found that, if at least 40% of the amino acids of the ProSite motif also belong to predicting sequences, which may be appropriate for an average predicting sequence to be located within an average ProSite motif, then the predicting sequences cover 48% of all ProSite motif occurrences.

[0822] In accordance with preferred embodiments of the present invention a random model was developed to assess of the statistical significance of predicting sequence hit on the ProSite motifs. In the random model, for each given enzyme, random peptides are selected with the same lengths as those of the predicting sequences that hit this enzyme. The random model provides a probability distribution which serves as a zero-model for calculating the statistical significance. This comparison was made for each enzyme and for varying fractions of amino-acids that are shared by the predicting sequence with the ProSite motif. It was found that the random model of the present embodiments covered on average only 24% of ProSite motif occurrences, with a standard deviation of 0.06%. This results is extremely significant (400 standard deviations) compared to the 48% coverage quoted above. The random coverage is also shown in FIG. 29.

[0823] It is therefore demonstrated that the predicting sequences of the present embodiments carry information that is highly correlated with that of ProSite motifs.

[0824] This example illustrate the power of analytic methods described hereinabove and claimed hereinbelow in attributing function to polypeptide sequences without exhausting assays of activity using numerous substrates.

### APPENDIX 1

[0825] Table 11 on enclosed CD-ROM (file “Table-11.txt”) presents an to exemplified database prepared in accordance with a preferred embodiment of the present invention using enzyme sequences obtained from the UniProt/Swiss-Prot database, Release 48.3, Oct. 25, 2005.

[0826] Table 11 includes 77,837 entries. The middle column in Table 11 lists the predicting sequences Sⱼ (j=1, 2, . . . , 77,837), and the right column lists the classifiers Cⱼ which respectively correspond to the predicting sequences Sⱼ. The classifiers are expressed in the form of EC numbers as explained throughout the specification (see also Appendix 2 below).

[0827] The left column in Table 11 lists the SEQ IDs of the respective predicting sequences. The sequence listing is provided on enclosed CD-ROM (file “38280 (final)_ST25.txt”).

[0828] Table 11 or any portion thereof is contemplated as a protein database according to an embodiment of the present invention. “Portion of Table 11” refers to any number of consecutive or non-consecutive entries of Table 11. For example, a protein database according to an embodiment of the present invention can comprise all the entries of Table 11 for which the predicting sequence has a sufficiently short length, e.g., a length shorter then L, where L is an integer which is typically not larger than 15, as further detailed hereinabove.

[0829] Yet, it is to be understood that Table 11 serves for illustrating the protein database of the present embodiments in a non limiting fashion, and it is not intended to limit the scope of the present invention to the entries presented in Table 11 in any way. Many modifications can be made to the database presented in Table 11. In various exemplary embodiments of the invention another database which is a reduced version of a larger database presented in is provided. For example, a larger database can be reduced by keeping only entries corresponding to sequences which cover binding and active sites in known proteins while removing all other entries.

[0830] Thus, in accordance with preferred embodiments of the present invention an enzyme database of 52,365 predicting sequences and corresponding protein classifiers was extracted from 50,698 enzymes of the SwissProt, Release 48.3, Oct. 25, 2005 dataset. During the construction of the database, the handling procedure described hereinabove was employed. The obtained database is provided in Table 37 on enclosed CD-ROM (file “Table-37.txt”).

[0831] Table 37 includes 52,365 entries. The middle column lists the predicting sequences Sⱼ (j=1, 2, . . . , 52,365), and the right column lists the classifiers Cⱼ which respectively correspond to the predicting sequences Sⱼ. The classifiers are expressed in the form of EC numbers as explained throughout the specification (see also Appendix 2 below). The left column in Table 37 lists the SEQ IDs of the respective predicting sequences. The sequence listing is provided on enclosed CD-ROM (file “38280 (final)_ST25.txt”).

[0832] The predicting sequences provided coverage of about 93% of all 50,698 enzymes of the dataset. 21,228 enzymes of the 48.3 dataset carry active or binding site annotations. Of the 52,365 predicting sequences, 26,931 predicting sequences hit the 21,228 enzymes carrying active or binding site annotations, and 2,337 predicting sequences (about 8.6% of 26,931) the cover the active or binding sites. These 2,337 predicting sequence are found to occur on 79% of the 21,228 enzymes. Thus, a database of size 52,365 was reduced to a database of size 2,337 while maintaining a similar level of classification accuracy. In terms of ratios, instead of the approximately 1:1 ratio between the number of entries and the number of enzymes they cover, an order of magnitude parsimonious ratio, of about 1:8, was obtained.

[0833] The obtained database with 2,337 entries is provided in Table 42 on enclosed CD-ROM (file “Table-42.txt”). The predicting sequences listed in Table 42 constitute about 4.5% of the total number of extracted predicting sequences (52,365) but cover 36% of the 50,698 enzymes of the 48.3 dataset.

[0834] Performing a similar analysis on Release 45 of Swiss-Prot (dated October 2004), it was found by the present Inventors that the 2,014 predicting sequences (out of 21,676 predicting sequences, about 9.3%) covering the 17,005 annotated enzymes in it, hit 75% of the relevant set of enzymes. Moreover, using the same predicting sequence to classify the 10,585 novel enzymes contained in the 48.3 release and absent from the 45 release, one obtains coverage of 28% of them. This demonstrates that the relatively large coverage reached by the reduced database is not limited to the training set from which the dataset was extracted.

[0835] Many other replacements, modifications, deletions and/or additions to the entries presented in Tables 11, 37 and 42 will be apparent to those skilled in the art provided with the details described herein, and it is intended to embrace all the replacements, modifications and/or additions that fall within the spirit and broad scope of the appended claims.

### APPENDIX 2

### The EC Hierarchical Classification (EC Tree)

[0836] During the late 1950's, in a period when the number of newly discovered enzymes was increasing rapidly, researchers and scientific unions and committees became aware of the absence of any guiding authority which will handle the nomenclature of enzymology. The naming of enzymes by individual researchers had proved far from satisfactory in practice, as in many cases some enzymes became known by several different names, while conversely the same name was sometimes given to different enzymes. Many of the names conveyed little or no idea of the nature of the reactions these enzymes catalyzed, while misleadingly similar names were given to enzymes of quite different biochemical activities. In view of this state of affairs, the General Assembly of the International Union of Biochemistry (IUB) decided, in consultation with the International Union of Pure and Applied Chemistry (IUPAC) in August, 1955, to set up an internationally recognized authority to mitigate the confusing situation pertaining to nomenclature of enzymes. The International Commission on Enzymes, also known as the Enzyme Commission (EC) was hence established in 1956. The mission of the EC included the objectives formulating of a code of systematic rules for the classification and nomenclature of enzymes and coenzymes, their units of activity and standard methods of assay, together with the symbols used in the description of enzyme kinetics. The first version of the EC database, accompanied by a set of rules which are referred to as “recommendations”, became official and publicly available in 1961 and included 712 enzymes, and have been profoundly revised and updated over the years.

[0837] The first Enzyme Commission, in its report in 1961, devised a hierarchical classification system for enzymes. The hierarchical classification also serves as a basis for assigning a systematic name and corresponding code numbers, also known as EC numbers, to the enzymes so as to correlate the names to the enzymatic activity of each member. These code numbers, prefixed by EC, which are now widely in use, contain four numbers separated by points and represent a progressively finer classification of the enzyme, with the following meaning. The first number in the EC hierarchical classification represents the class of the enzyme. Each class represents a type of a chemical reaction which the enzyme catalyzes. There are six classes in the EC hierarchical classification as further detailed hereinunder. The second number in the EC hierarchical classification indicates the subclass of the reaction, namely a type of bond or moiety which undergoes the chemical reaction. The third number in the EC hierarchical classification indicates the sub-subclass, relating to the family of substrate which undergo the chemical reaction. The fourth number in number in the EC hierarchical classification is the serial number of the enzyme in its sub-subclass, relating to a specific substrate.

[0838] Thus for example, the enzyme cyanuric acid amidohydrolase has the code EC 3.5.2.15 which is constructed as follows: 3 stands for hydrolases (enzymes that use water to break up some other molecule), 3.5 for hydrolases that act on carbon-nitrogen bonds, other than peptide bonds, 3.5.2 for those that act on carbon-nitrogen bonds in cyclic amides, and 3.5.2.15 for those that act on the carbon-nitrogen bond in the cyclic amide in cyanuric acid.

[0839] Following are the main classes and subclasses of the EC hierarchical classification.

### Class 1: Oxidoreductases

[0840] To this class belong all enzymes catalyzing oxidoreduction reactions. The substrate that is oxidized is regarded as hydrogen donor. The systematic name is based on donor:acceptor oxidoreductase.

[0841] The second number in the code number of the oxidoreductases, unless it is 11, 13, 14 or 15, indicates the group in the hydrogen (or electron) donor that undergoes oxidation. For example, the number 1 denotes a —CHOH— group, the number 2 denotes a —CHO or —CO—COOH group or carbon monoxide, and so on, as specified in the EC key.

[0842] The third number, except in subclasses EC 1.11, EC 1.13, EC 1.14 and EC 1.15, indicates the type of acceptor involved. For example, the number 1 denotes NAD(P)+, the number 2 denotes a cytochrome, the number 3 denotes molecular oxygen, the number 4 denotes a disulfide, the number 5 denotes a quinone or similar compound, the number 6 denotes a nitrogenous group, the number 7 denotes an iron-sulfur protein and the number 8 denotes a flavin.

[0843] In subclasses EC 1.13 and EC 1.14 a different classification scheme is used and sub-subclasses are numbered from 11 onwards.

[0844] Scheme 1 illustrates a reaction catalyzed by an exemplary enzyme from the first class of oxidoreductases, having the systematic name β-D-glucose:oxygen 1-oxidoreductase and the code number EC 1.1.3.4.

[chemical structure]

### Class 2—Transferases

[0845] Transferases are enzymes which catalyze the transferring of a group, such as a methyl group or a glycosyl group, from one compound, generally regarded as donor, to another compound, generally regarded as acceptor. The systematic names are formed according to the scheme donor:acceptor group-transferase.

[0846] The second number in the code number of transferases indicates the group transferred. For example, a one-carbon group in EC 2.1, an aldehyde or ketone group in EC 2.2, an acyl group in EC 2.3 and so on.

[0847] The third number gives further information on the group transferred, such as subclass EC 2.1 is subdivided into methyltransferases (EC 2.1.1), hydroxymethyl- and formyltransferases (EC 2.1.2) and so on. Only in subclass EC 2.7, does the third number indicate the nature of the acceptor group.

[0848] Scheme 2 illustrates a reaction catalyzed by an exemplary enzyme from the second class of transferases, having the systematic name L-aspartate:2-oxoglutarate aminotransferase and also called by its common name aspartate aminotransferase or glutamic-oxaloacetic transaminase (GOT), and the code number EC 2.6.1.1.

[chemical structure]

### Class 3—Hydrolases

[0849] These enzymes catalyze the hydrolytic cleavage of C—O, C—N, C—C and some other bonds, including phosphoric anhydride bonds. The systematic name always includes hydrolase and the name of the substrate with this suffix means a hydrolytic enzyme. A number of hydrolases acting on ester, glycosyl, peptide, amide or other bonds are known to catalyze not only hydrolytic removal of a particular group from their substrates, but likewise the transfer of this group to suitable acceptor molecules. In principle, all hydrolytic enzymes might be classified as transferases, since hydrolysis itself can be regarded as transfer of a specific group to water as the acceptor. Yet, in most cases, the reaction with water as the acceptor was discovered earlier and is considered as the main physiological function of the enzyme. This is why such enzymes are classified as hydrolases rather than as transferases.

[0850] The second number in the code number of the hydrolases indicates the nature of the bond hydrolysed. For example, enzymes codes which start with EC 3.1 represent esterases, enzymes codes which start with EC 3.2 represent glycosylases, and so on.

[0851] The third number normally specifies the nature of the substrate, for example, in the esterases the carboxylic ester hydrolases (EC 3.1.1), thiolester hydrolases (EC 3.1.2), phosphoric monoester hydrolases (EC 3.1.3), O-glycosidases (EC 3.2.1), N-glycosylases (EC 3.2.2) and so on. Exceptionally, in the case of the peptidyl-peptide hydrolases the third number is based on the catalytic mechanism as shown by active centre studies or the effect of pH.

[0852] Scheme 3 illustrates a reaction catalyzed by an exemplary enzyme from the third class of hydrolases, having the common name chymosin and also called rennin (no systematic name declared), and the code number EC 3.4.23.4.

[chemical structure]

[0853] Class 4—Lyases

[0854] Lyases are enzymes cleaving C—C, C—O, C—N, and other bonds by elimination, leaving double bonds or rings, or conversely adding groups to double bonds. The systematic name is formed according to the pattern substrate group-lyase.

[0855] The second number in the code number indicates the bond broken. For example, EC 4.1 are carbon-carbon lyases, EC 4.2 carbon-oxygen lyases and so on.

[0856] The third number gives further information on the group eliminated, such as CO2 in EC 4.1.1 or H2O in EC 4.2.1.

[0857] Scheme 4 illustrates a reaction catalyzed by an exemplary enzyme from the fourth class of lyases, having the systematic name L-histidine ammonia-lyase and also called by its common name histidine ammonia-lyase or histidase, and the code number EC 4.3.1.3.

[chemical structure]

### Class 5—Isomerases

[0858] These enzymes catalyze geometric or structural changes within one molecule. According to the type of isomerism, they may be called racemases, epimerases, cis-trans-isomerases, isomerases, tautomerases, mutases or cycloisomerases. In some cases, the interconversion in the substrate is brought about by an intramolecular oxidoreduction (EC 5.3). Since the hydrogen donor and the acceptor are the same molecule, and no oxidized product is formed, they are not classified as oxidoreductases, even though they may contain firmly bound NAD(P)+.

[0859] The subclasses are formed according to the type of isomerism, the sub-subclasses to the type of substrates.

[0860] Scheme 5 illustrates a reaction catalyzed by an exemplary enzyme from the fifth class of isomerases, having the systematic name D-xylose ketol-isomerase and also called by its common name xylose isomerase or glucose isomerase, and the code number EC 5.3.1.5.

[chemical structure]

### Class 6—Ligases

[0861] Ligases are enzymes catalyzing the joining together of two molecules coupled with the hydrolysis of a diphosphate bond in ATP or a similar triphosphate. The systematic names are formed on the system X:Y ligase (ADP-forming).

[0862] The second number in the code number indicates the bond formed. For example, EC 6.1 for C—O bonds (enzymes acylating tRNA), EC 6.2 for C—S bonds (acyl-CoA derivatives) and so on. Sub-subclasses are only in use in the C—N ligases.

[0863] Scheme 6 illustrates a reaction catalyzed by an exemplary enzyme from the sixth class of ligases, having the systematic name □-L-glutamyl-L-cysteine:glycine ligase (ADP-forming) and also called by its common name glutathione synthase or glutathione synthetase, and the code number EC 6.3.2.3.

[chemical structure]

[0864] In an attempt to achieve practical classification and nomenclature of enzymes by the reactions they catalyze, the EC issued and maintains a set of rules pertaining to the systematic and common names of enzymes, with accordance to the code numbers, which considers and refers to historical, trivial and other factors which influence the names of various enzymes.

[0865] It is appreciated that certain features of the invention, which are, for clarity, described in the context of separate embodiments, may also be provided in combination in a single embodiment. Conversely, various features of the invention, which are, for brevity, described in the context of a single embodiment, may also be provided separately or in any suitable subcombination.

[0866] Alternatively, or additionally, the sequence of described processes within a claim is exemplary only so that if multiple processes are recited, performance of the processes in any order is within the scope of the claim unless otherwise stated in the claims.

[0867] Optionally, features described in the context of a method can be used to characterize an apparatus and features described in the context of an apparatus can be used to characterize a method.

[0868] Optionally, functions described or depicted as being performed by a single component can be divided among two or more alternate components which act in concert to perform the described/depicted function and/or functions described or depicted as being performed by a two or more components can be integrated and performed by a single alternate component.

[0869] Although the invention has been described in conjunction with specific embodiments thereof, it is evident that many alternatives, modifications and variations will be apparent to those skilled in the art. Accordingly, it is intended to embrace all such alternatives, modifications and variations that fall within the spirit and broad scope of the appended claims and Annex 1. All publications, patents and patent applications mentioned in this specification are herein incorporated in their entirety by reference into the specification, to the same extent as if each individual publication, patent or patent application was specifically and individually indicated to be incorporated herein by reference. In addition, citation or identification of any reference in this application shall not be construed as an admission that such reference is available as prior art to the present invention.

1-10. (canceled)

11. A method of classifying a protein sequence, comprising searching the protein sequence for a motif of amino acids matching a predicting sequence present in a protein database, and using the protein classifier corresponding to said predicting sequence for classifying the protein sequence;
said protein database having a plurality of entries, each having a predicting sequence which comprises less than L amino acids and a protein classifier corresponding to said predicting sequence.

12. The method of claim 11, further comprising repeating said step of searching at least once, thereby providing a plurality of motifs of amino acids matching predicting sequences present in said protein database.

13. The method of claim 11, further comprising issuing a report containing classification of the protein sequence.

14. The method of claim 11, wherein said classifying the protein sequence comprises determining presence or absence of at least one active pocket or active site on the protein sequence.

15. The method of claim 14, further comprising determining the location of said at least one active pocket or active site.

16. Apparatus for classifying a protein sequence, comprising:
a searcher, capable of accessing a protein database, said searcher being operable to search the protein sequence for a motif of amino acids matching a predicting sequence present in said protein database, said protein database having a plurality of entries, each having a predicting sequence which comprises less than L amino acids and a protein classifier corresponding to said predicting sequence; and
a classification functionality capable of accessing said protein database and providing a protein classifier corresponding to said predicting sequence, so as to classify the protein sequence by said protein classifier.

17. The apparatus of claim 16, wherein said classification functionality is operable to determine presence or absence of at least one active pocket or active site on the protein sequence.

18. The apparatus of claim 17, wherein said classification functionality is operable to determine the location of said at least one active pocket or active site.

19. A method of characterizing a predetermined collection of protein classes defining a classification system for classifying a plurality of proteins, the method comprising:
(a) extracting repeatedly occurring motifs from amino acid sequences of the plurality of proteins, thereby providing a set of motifs; and
(b) for each protein class:
searching said set of motifs for at least one motif which comprises less than L amino acids, said at least one motif being present in at least a few proteins belonging to said protein class but not in proteins belonging to other protein classes, and
defining said at least one motif as a predicting sequence characterizing said protein class;
thereby characterizing the collection of protein classes.

20. The method of claim 19, wherein said plurality of proteins comprises a plurality of enzymes.

21. The method of claim 20, wherein the classification system is an EC hierarchical classification system, hence said protein class is a branch of said EC hierarchical classification system.

22. The method of claim 19, further comprising employing a screening procedure for reducing the number of predicting sequences.

23. A method of classifying a plurality of proteins into protein classes, comprising:
(a) extracting repeatedly occurring motifs from the sequences of the plurality of proteins, thereby providing a set of motifs; and
(b) using said set of motifs for defining protein classes, each being characterized by at least one motif which comprises less than L amino acids;
thereby classifying the plurality of proteins according to said protein classes.

24. The method of claim 23, wherein said plurality of proteins comprises a plurality of enzymes.

25. The method of claim 24, wherein said protein classes are branches of an EC hierarchical classification system.

26. The method of claim 19, wherein said L is selected from the group consisting of 5, 6, 7, 8, 9, 10, 11, 12, 13, 14 and 15.

27. The method of claim 19, wherein said protein classes comprise affinity classes, and said predicting sequence predicts protein affinity.

28. The method of claim 19, wherein said protein classes comprise functional classes, and said predicting sequence predicts protein function.

29. The method of claim 19, wherein said extracting said repeatedly occurring motifs comprises, for each sequence of the plurality of proteins: searching for partial overlaps between said sequence and other sequences, applying a significance test on said partial overlaps, and defining a most significant partial overlap as a repeatedly occurring motif.

30-33. (canceled)

34. Apparatus for characterizing a predetermined protein class being a member of a collection of protein classes defining a classification system for classifying a plurality of proteins, the apparatus comprising:
(a) a motif extraction unit capable of extracting repeatedly occurring motifs from amino acid sequences of the plurality of proteins, thereby providing a set of motifs;
(b) a searcher capable of searching said set of motifs for at least one motif which comprises less than L amino acids, said at least one motif being present in at least a few proteins belonging to the predetermined protein class but not in proteins belonging to other protein classes of said collection; and
(c) a characterization unit capable of defining said at least one motif as a predicting sequence characterizing the predetermined protein class.

35-36. (canceled)

37. Apparatus for classifying a plurality of proteins into protein classes, comprising:
(a) a motif extraction unit capable of extracting repeatedly occurring motifs from amino acid sequences of the plurality of proteins, thereby providing a set of motifs; and
(b) a protein class definition unit, capable of defining protein classes using said set of motifs, wherein each protein class is characterized by at least one motif which comprises less than L amino acids.

38-42. (canceled)

43. The apparatus of claim 34, wherein said motif extraction unit is operable to search each sequence for partial overlaps between said sequence and other sequences, to apply a significance test on said partial overlaps, and to define a most significant partial overlap as a repeatedly occurring motif.

44-77. (canceled)

78. The method of claim 11, wherein said protein database comprises at least one table or a portion thereof, said table being selected from the group consisting of Table 11, Table 37 and Table 42 in enclosed CD-ROM 1.

79. The apparatus of claim 16, wherein said protein database comprises at least one table or a portion thereof, said table being selected from the group consisting of Table 11, Table 37 and Table 42 in enclosed CD-ROM 1.

The application's sequence listing, which the Patent Office published only in electronic form, follows.

SEQUENCE LISTING (320030 sequences)

SEQ ID NO: 1 - protein, 7 aa, Artificial sequence
  Protein classification predicting sequence
EIRVLDK

SEQ ID NO: 2 - protein, 10 aa, Artificial sequence
  Protein classification predicting sequence
AEKAVLAANG

SEQ ID NO: 3 - protein, 12 aa, Artificial sequence
  Protein classification predicting sequence
TCALRPMYIYGE

SEQ ID NO: 4 - protein, 6 aa, Artificial sequence
  Protein classification predicting sequence
PPFNRH

SEQ ID NO: 5 - protein, 9 aa, Artificial sequence
  Protein classification predicting sequence
LDKVFRPET

SEQ ID NO: 6 - protein, 11 aa, Artificial sequence
  Protein classification predicting sequence
LLEACVQASVP

SEQ ID NO: 7 - protein, 11 aa, Artificial sequence
  Protein classification predicting sequence
GKFSTVNPVYV

SEQ ID NO: 8 - protein, 7 aa, Artificial sequence
  Protein classification predicting sequence
AWAHILA

SEQ ID NO: 9 - protein, 8 aa, Artificial sequence
  Protein classification predicting sequence
QASVPAFI

SEQ ID NO: 10 - protein, 10 aa, Artificial sequence
  Protein classification predicting sequence
VDVAGPNSYK

SEQ ID NO: 11 - protein, 7 aa, Artificial sequence
  Protein classification predicting sequence
LKNGGTL

SEQ ID NO: 12 - protein, 9 aa, Artificial sequence
  Protein classification predicting sequence
NVAWAHILA

SEQ ID NO: 13 - protein, 19 aa, Artificial sequence
  Protein classification predicting sequence
NVAWAHILAARGLRDPKKS

SEQ ID NO: 14 - protein, 18 aa, Artificial sequence
  Protein classification predicting sequence
FTFSYKKAQRDLGYEPLV

SEQ ID NO: 15 - protein, 14 aa, Artificial sequence
  Protein classification predicting sequence
WEEAKQKTSEWIGT

SEQ ID NO: 16 - protein, 7 aa, Artificial sequence
  Protein classification predicting sequence
LEGDILD

SEQ ID NO: 17 - protein, 15 aa, Artificial sequence
  Protein classification predicting sequence
PRQTILDVNLKGTQN

SEQ ID NO: 18 - protein, 7 aa, Artificial sequence
  Protein classification predicting sequence
ASVPAFI

SEQ ID NO: 19 - protein, 7 aa, Artificial sequence
  Protein classification predicting sequence
SVVIHTA

SEQ ID NO: 20 - protein, 6 aa, Artificial sequence
  Protein classification predicting sequence
PYPYSK

SEQ ID NO: 21 - protein, 12 aa, Artificial sequence
  Protein classification predicting sequence
MAEKAVLAANGS

SEQ ID NO: 22 - protein, 9 aa, Artificial sequence
  Protein classification predicting sequence
GWSCLVTGA

SEQ ID NO: 23 - protein, 7 aa, Artificial sequence
  Protein classification predicting sequence
GFLGQRI

SEQ ID NO: 24 - protein, 15 aa, Artificial sequence
  Protein classification predicting sequence
LRRACQGISVVIHTA

SEQ ID NO: 25 - protein, 8 aa, Artificial sequence
  Protein classification predicting sequence
VAGPNSYK

SEQ ID NO: 26 - protein, 7 aa, Artificial sequence
  Protein classification predicting sequence
EEEHHES

SEQ ID NO: 27 - protein, 7 aa, Artificial sequence
  Protein classification predicting sequence
TCALRPM

SEQ ID NO: 28 - protein, 8 aa, Artificial sequence
  Protein classification predicting sequence
GWSCLVTG

SEQ ID NO: 29 - protein, 8 aa, Artificial sequence
  Protein classification predicting sequence
LDKVFRPE

SEQ ID NO: 30 - protein, 25 aa, Artificial sequence
  Protein classification predicting sequence
IMNVNVKGTQLLLEACVQASVPVFI

SEQ ID NO: 31 - protein, 8 aa, Artificial sequence
  Protein classification predicting sequence
YWLAFLLE

SEQ ID NO: 32 - protein, 12 aa, Artificial sequence
  Protein classification predicting sequence
FTFSYKKAQRDL

SEQ ID NO: 33 - protein, 8 aa, Artificial sequence
  Protein classification predicting sequence
WEEAKQKT

SEQ ID NO: 34 - protein, 6 aa, Artificial sequence
  Protein classification predicting sequence
TCALRP

SEQ ID NO: 35 - protein, 7 aa, Artificial sequence
  Protein classification predicting sequence
VAGPNSY

SEQ ID NO: 36 - protein, 7 aa, Artificial sequence
  Protein classification predicting sequence
LNNNGIL

SEQ ID NO: 37 - protein, 7 aa, Artificial sequence
  Protein classification predicting sequence
NPVYVGN

SEQ ID NO: 38 - protein, 11 aa, Artificial sequence
  Protein classification predicting sequence
FTFSYKKAQRD

SEQ ID NO: 39 - protein, 22 aa, Artificial sequence
  Protein classification predicting sequence
VNVKGTQLLLEACVQASVPVFI

SEQ ID NO: 40 - protein, 18 aa, Artificial sequence
  Protein classification predicting sequence
NGGTLHTCALRPMYIYGE

SEQ ID NO: 41 - protein, 8 aa, Artificial sequence
  Protein classification predicting sequence
VYVGNVAW

SEQ ID NO: 42 - protein, 16 aa, Artificial sequence
  Protein classification predicting sequence
VKMVHNGIEYGDMQLI

SEQ ID NO: 43 - protein, 7 aa, Artificial sequence
  Protein classification predicting sequence
RCLSALK

SEQ ID NO: 44 - protein, 13 aa, Artificial sequence
  Protein classification predicting sequence
ASKIISYAQGFML

SEQ ID NO: 45 - protein, 17 aa, Artificial sequence
  Protein classification predicting sequence
ASKIISYAQGFMLIREA

SEQ ID NO: 46 - protein, 8 aa, Artificial sequence
  Protein classification predicting sequence
PRKILLMV

SEQ ID NO: 47 - protein, 8 aa, Artificial sequence
  Protein classification predicting sequence
ILLMVKAG

SEQ ID NO: 48 - protein, 7 aa, Artificial sequence
  Protein classification predicting sequence
SYLIEIT

SEQ ID NO: 49 - protein, 7 aa, Artificial sequence
  Protein classification predicting sequence
LVDVILD

SEQ ID NO: 50 - protein, 15 aa, Artificial sequence
  Protein classification predicting sequence
KGTGKWTSQSALDLG

SEQ ID NO: 51 - protein, 12 aa, Artificial sequence
  Protein classification predicting sequence
IITESVFARFIS

SEQ ID NO: 52 - protein, 8 aa, Artificial sequence
  Protein classification predicting sequence
ITESVFAR

SEQ ID NO: 53 - protein, 14 aa, Artificial sequence
  Protein classification predicting sequence
MSKICSYAQGFAQM

SEQ ID NO: 54 - protein, 12 aa, Artificial sequence
  Protein classification predicting sequence
QAQRDYFGAHTY

SEQ ID NO: 55 - protein, 16 aa, Artificial sequence
  Protein classification predicting sequence
IALMWRGGCIIRSVFL

SEQ ID NO: 56 - protein, 6 aa, Artificial sequence
  Protein classification predicting sequence
FYDGYR

SEQ ID NO: 57 - protein, 19 aa, Artificial sequence
  Protein classification predicting sequence
EFVESLETPRRILLMVKAG

SEQ ID NO: 58 - protein, 9 aa, Artificial sequence
  Protein classification predicting sequence
GDIIIDGGN

SEQ ID NO: 59 - protein, 12 aa, Artificial sequence
  Protein classification predicting sequence
DITKDIFTKKDE

SEQ ID NO: 60 - protein, 25 aa, Artificial sequence
  Protein classification predicting sequence
EIAKIFRAGCIIRAQFLQKITDAYA

SEQ ID NO: 61 - protein, 8 aa, Artificial sequence
  Protein classification predicting sequence
DKEGVFHT

SEQ ID NO: 62 - protein, 25 aa, Artificial sequence
  Protein classification predicting sequence
GAGHFVKMVHNGIEYGDMQLICEAY

SEQ ID NO: 63 - protein, 13 aa, Artificial sequence
  Protein classification predicting sequence
QAQRDYFGAHTYE

SEQ ID NO: 64 - protein, 8 aa, Artificial sequence
  Protein classification predicting sequence
LSSLKDER

SEQ ID NO: 65 - protein, 9 aa, Artificial sequence
  Protein classification predicting sequence
GCIIRAQFL

SEQ ID NO: 66 - protein, 7 aa, Artificial sequence
  Protein classification predicting sequence
ANLLQAQ

SEQ ID NO: 67 - protein, 6 aa, Artificial sequence
  Protein classification predicting sequence
EGVFHT

SEQ ID NO: 68 - protein, 9 aa, Artificial sequence
  Protein classification predicting sequence
KMVHNGIEY

SEQ ID NO: 69 - protein, 6 aa, Artificial sequence
  Protein classification predicting sequence
KGTGKW

SEQ ID NO: 70 - protein, 10 aa, Artificial sequence
  Protein classification predicting sequence
VRRALYLGKI

SEQ ID NO: 71 - protein, 9 aa, Artificial sequence
  Protein classification predicting sequence
KIISYAQGF

SEQ ID NO: 72 - protein, 6 aa, Artificial sequence
  Protein classification predicting sequence
SYAQGF

SEQ ID NO: 73 - protein, 6 aa, Artificial sequence
  Protein classification predicting sequence
GCIIRA

SEQ ID NO: 74 - protein, 7 aa, Artificial sequence
  Protein classification predicting sequence
FLQKITD

SEQ ID NO: 75 - protein, 8 aa, Artificial sequence
  Protein classification predicting sequence
QAQRDYFG

SEQ ID NO: 76 - protein, 8 aa, Artificial sequence
  Protein classification predicting sequence
YTVSIFNR

SEQ ID NO: 77 - protein, 6 aa, Artificial sequence
  Protein classification predicting sequence
IDGGNT

SEQ ID NO: 78 - protein, 13 aa, Artificial sequence
  Protein classification predicting sequence
YIGPNGAGHYVKM

SEQ ID NO: 79 - protein, 8 aa, Artificial sequence
  Protein classification predicting sequence
GAGHYVKM

SEQ ID NO: 80 - protein, 12 aa, Artificial sequence
  Protein classification predicting sequence
GMAVMGRNLALN

SEQ ID NO: 81 - protein, 8 aa, Artificial sequence
  Protein classification predicting sequence
GPSIMPGG

SEQ ID NO: 82 - protein, 6 aa, Artificial sequence
  Protein classification predicting sequence
CVTYIG

SEQ ID NO: 83 - protein, 7 aa, Artificial sequence
  Protein classification predicting sequence
RYLSSLK

SEQ ID NO: 84 - protein, 6 aa, Artificial sequence
  Protein classification predicting sequence
FGAHTY

SEQ ID NO: 85 - protein, 8 aa, Artificial sequence
  Protein classification predicting sequence
VCAFNRTV

SEQ ID NO: 86 - protein, 10 aa, Artificial sequence
  Protein classification predicting sequence
GDIIIDGGNS

SEQ ID NO: 87 - protein, 16 aa, Artificial sequence
  Protein classification predicting sequence
PKIRDSAGQKGTGKWT

SEQ ID NO: 88 - protein, 8 aa, Artificial sequence
  Protein classification predicting sequence
NEAKGKSI

SEQ ID NO: 89 - protein, 6 aa, Artificial sequence
  Protein classification predicting sequence
AWPHIK

SEQ ID NO: 90 - protein, 12 aa, Artificial sequence
  Protein classification predicting sequence
DTAGQKGTGKWT

SEQ ID NO: 91 - protein, 16 aa, Artificial sequence
  Protein classification predicting sequence
PVTLIGEAVFSRCLSA

SEQ ID NO: 92 - protein, 7 aa, Artificial sequence
  Protein classification predicting sequence
IHINWTG

SEQ ID NO: 93 - protein, 7 aa, Artificial sequence
  Protein classification predicting sequence
NWTGRGG

SEQ ID NO: 94 - protein, 15 aa, Artificial sequence
  Protein classification predicting sequence
ADIALIGLAVMGQNL

SEQ ID NO: 95 - protein, 9 aa, Artificial sequence
  Protein classification predicting sequence
LDSFLIEIT

SEQ ID NO: 96 - protein, 10 aa, Artificial sequence
  Protein classification predicting sequence
AGQKGTGKWT

SEQ ID NO: 97 - protein, 6 aa, Artificial sequence
  Protein classification predicting sequence
IDGGNS

SEQ ID NO: 98 - protein, 7 aa, Artificial sequence
  Protein classification predicting sequence
GAGHFVK

SEQ ID NO: 99 - protein, 7 aa, Artificial sequence
  Protein classification predicting sequence
AGQKGTG

SEQ ID NO: 100 - protein, 7 aa, Artificial sequence
  Protein classification predicting sequence
RDYFGAH

SEQ ID NO: 101 - protein, 7 aa, Artificial sequence
  Protein classification predicting sequence
SGGEEGA

SEQ ID NO: 102 - protein, 7 aa, Artificial sequence
  Protein classification predicting sequence
GAGHYVK

SEQ ID NO: 103 - protein, 7 aa, Artificial sequence
  Protein classification predicting sequence
ELESYLI

SEQ ID NO: 104 - protein, 9 aa, Artificial sequence
  Protein classification predicting sequence
GQKGTGKWT

SEQ ID NO: 105 - protein, 8 aa, Artificial sequence
  Protein classification predicting sequence
LIGLAVMG

SEQ ID NO: 106 - protein, 24 aa, Artificial sequence
  Protein classification predicting sequence
LIGLAVMGQNLILNMNDHGFVVCA

SEQ ID NO: 107 - protein, 6 aa, Artificial sequence
  Protein classification predicting sequence
GFVVCA

SEQ ID NO: 108 - protein, 6 aa, Artificial sequence
  Protein classification predicting sequence
CCEWVG

SEQ ID NO: 109 - protein, 9 aa, Artificial sequence
  Protein classification predicting sequence
PVTLIGEAV

SEQ ID NO: 110 - protein, 8 aa, Artificial sequence
  Protein classification predicting sequence
KIVSYAQG

SEQ ID NO: 111 - protein, 20 aa, Artificial sequence
  Protein classification predicting sequence
QADIALIGLAVMGQNLILNM

SEQ ID NO: 112 - protein, 16 aa, Artificial sequence
  Protein classification predicting sequence
IGLAVMGQNLILNMND

SEQ ID NO: 113 - protein, 10 aa, Artificial sequence
  Protein classification predicting sequence
PVTLIGEAVF

SEQ ID NO: 114 - protein, 7 aa, Artificial sequence
  Protein classification predicting sequence
LQNLLLD

SEQ ID NO: 115 - protein, 6 aa, Artificial sequence
  Protein classification predicting sequence
HTNWTG

SEQ ID NO: 116 - protein, 43 aa, Artificial sequence
  Protein classification predicting sequence
IAAVAEDGEPCVTYIGADGAGHYVKMVHNGIEYGDMQLIAEAY

SEQ ID NO: 117 - protein, 22 aa, Artificial sequence
  Protein classification predicting sequence
YLVDVILDEAANKGTGKWTSQS

SEQ ID NO: 118 - protein, 8 aa, Artificial sequence
  Protein classification predicting sequence
KGTGKWTS

SEQ ID NO: 119 - protein, 8 aa, Artificial sequence
  Protein classification predicting sequence
EKIRKALY

SEQ ID NO: 120 - protein, 6 aa, Artificial sequence
  Protein classification predicting sequence
YYDSYR

SEQ ID NO: 121 - protein, 54 aa, Artificial sequence
  Protein classification predicting sequence
KGDIIIDGGNTFFQDTIRRNRELSAEGFNFIGTGVSGGEEGALKGPSIMPGGQK

SEQ ID NO: 122 - protein, 11 aa, Artificial sequence
  Protein classification predicting sequence
IANLLLAPYFK

SEQ ID NO: 123 - protein, 6 aa, Artificial sequence
  Protein classification predicting sequence
YNRTTS

SEQ ID NO: 124 - protein, 8 aa, Artificial sequence
  Protein classification predicting sequence
SYAQGFML

SEQ ID NO: 125 - protein, 17 aa, Artificial sequence
  Protein classification predicting sequence
LPANLLQAQRDYFGAHT

SEQ ID NO: 126 - protein, 10 aa, Artificial sequence
  Protein classification predicting sequence
NPGLQNLLLD

SEQ ID NO: 127 - protein, 12 aa, Artificial sequence
  Protein classification predicting sequence
AGDKAEFIEKVR

SEQ ID NO: 128 - protein, 21 aa, Artificial sequence
  Protein classification predicting sequence
ALYLGKIVSYAQGFSQLRAAS

SEQ ID NO: 129 - protein, 6 aa, Artificial sequence
  Protein classification predicting sequence
GLAVMG

SEQ ID NO: 130 - protein, 22 aa, Artificial sequence
  Protein classification predicting sequence
GLAVMGKNLAWNIESRGYSVSV

SEQ ID NO: 131 - protein, 9 aa, Artificial sequence
  Protein classification predicting sequence
PTYSLEEFV

SEQ ID NO: 132 - protein, 22 aa, Artificial sequence
  Protein classification predicting sequence
DILIDGGNTNYQDTIRRNKALA

SEQ ID NO: 133 - protein, 26 aa, Artificial sequence
  Protein classification predicting sequence
INFIGMGVSGGEIGALTGPSLMPGGQ

SEQ ID NO: 134 - protein, 10 aa, Artificial sequence
  Protein classification predicting sequence
DILDAIAAKA

SEQ ID NO: 135 - protein, 41 aa, Artificial sequence
  Protein classification predicting sequence
DGASCVTYIGPNGAGHYVKMVHNGIEYADMQLIAESYAMMK

SEQ ID NO: 136 - protein, 18 aa, Artificial sequence
  Protein classification predicting sequence
WNAGELESYLIEITGDIF

SEQ ID NO: 137 - protein, 28 aa, Artificial sequence
  Protein classification predicting sequence
EALVEKILDTAGQKGTGKWTSINALELG

SEQ ID NO: 138 - protein, 22 aa, Artificial sequence
  Protein classification predicting sequence
PLTIITESVFARFISSIKEERV

SEQ ID NO: 139 - protein, 38 aa, Artificial sequence
  Protein classification predicting sequence
FLEKIRKALYMSKICSYAQGFAQMRKASEDNEWNLKLG

SEQ ID NO: 140 - protein, 26 aa, Artificial sequence
  Protein classification predicting sequence
LAMIWREGCIIRAQFLQKIKDAYDNN

SEQ ID NO: 141 - protein, 7 aa, Artificial sequence
  Protein classification predicting sequence
EYQDALR

SEQ ID NO: 142 - protein, 9 aa, Artificial sequence
  Protein classification predicting sequence
NGVPTPGFS

SEQ ID NO: 143 - protein, 23 aa, Artificial sequence
  Protein classification predicting sequence
DLPANLIQAQRDYFGAHTYERKD

SEQ ID NO: 144 - protein, 8 aa, Artificial sequence
  Protein classification predicting sequence
GPSLMPGG

SEQ ID NO: 145 - protein, 7 aa, Artificial sequence
  Protein classification predicting sequence
IGLAVMG

SEQ ID NO: 146 - protein, 7 aa, Artificial sequence
  Protein classification predicting sequence
PCCDWVG

SEQ ID NO: 147 - protein, 6 aa, Artificial sequence
  Protein classification predicting sequence
FRAGCI

SEQ ID NO: 148 - protein, 14 aa, Artificial sequence
  Protein classification predicting sequence
YKAYLGVGLGPLSF

SEQ ID NO: 149 - protein, 21 aa, Artificial sequence
  Protein classification predicting sequence
KFDTFTPAVERGLPVTRVISR

SEQ ID NO: 150 - protein, 18 aa, Artificial sequence
  Protein classification predicting sequence
YSGYTCYTGIADFVPADI

SEQ ID NO: 151 - protein, 12 aa, Artificial sequence
  Protein classification predicting sequence
EDAILRRDIYDR

SEQ ID NO: 152 - protein, 14 aa, Artificial sequence
  Protein classification predicting sequence
VTLLGDSVHAMQPN

SEQ ID NO: 153 - protein, 10 aa, Artificial sequence
  Protein classification predicting sequence
GQGGCMAIED

SEQ ID NO: 154 - protein, 12 aa, Artificial sequence
  Protein classification predicting sequence
MPLMLSWVLGGN

SEQ ID NO: 155 - protein, 6 aa, Artificial sequence
  Protein classification predicting sequence
EHDIFR

SEQ ID NO: 156 - protein, 11 aa, Artificial sequence
  Protein classification predicting sequence
EWEKAGEVSRE

SEQ ID NO: 157 - protein, 7 aa, Artificial sequence
  Protein classification predicting sequence
KGRKLHK

SEQ ID NO: 158 - protein, 11 aa, Artificial sequence
  Protein classification predicting sequence
EFMFEETRNYV

SEQ ID NO: 159 - protein, 15 aa, Artificial sequence
  Protein classification predicting sequence
EELAYGCTGVQTAIE

SEQ ID NO: 160 - protein, 18 aa, Artificial sequence
  Protein classification predicting sequence
GAVGLAQRALDEATKYAL

SEQ ID NO: 161 - protein, 9 aa, Artificial sequence
  Protein classification predicting sequence
MCAYCVTEP

SEQ ID NO: 162 - protein, 12 aa, Artificial sequence
  Protein classification predicting sequence
IKTKAEKKGDEY

SEQ ID NO: 163 - protein, 8 aa, Artificial sequence
  Protein classification predicting sequence
RKTFGKLL

SEQ ID NO: 164 - protein, 15 aa, Artificial sequence
  Protein classification predicting sequence
DSGRRNTYYASIAKA

SEQ ID NO: 165 - protein, 12 aa, Artificial sequence
  Protein classification predicting sequence
DIANQLATDAVQ

SEQ ID NO: 166 - protein, 13 aa, Artificial sequence
  Protein classification predicting sequence
ARKFAREEIIPVA

SEQ ID NO: 167 - protein, 19 aa, Artificial sequence
  Protein classification predicting sequence
AGSDVAGIKTKAEKKGDEY

SEQ ID NO: 168 - protein, 11 aa, Artificial sequence
  Protein classification predicting sequence
QTCRDFAEKEL

SEQ ID NO: 169 - protein, 15 aa, Artificial sequence
  Protein classification predicting sequence
SSTANLIFEDCRIPK

SEQ ID NO: 170 - protein, 17 aa, Artificial sequence
  Protein classification predicting sequence
GCFALSEPGNGSDAGAA

SEQ ID NO: 171 - protein, 11 aa, Artificial sequence
  Protein classification predicting sequence
TLDMGRIGIAS

SEQ ID NO: 172 - protein, 30 aa, Artificial sequence
  Protein classification predicting sequence
IQFKLADMALALESARLLTWRAAMLKDNKK

SEQ ID NO: 173 - protein, 10 aa, Artificial sequence
  Protein classification predicting sequence
DACENWGFFE

SEQ ID NO: 174 - protein, 6 aa, Artificial sequence
  Protein classification predicting sequence
DWESTF

SEQ ID NO: 175 - protein, 11 aa, Artificial sequence
  Protein classification predicting sequence
PTFGTKVSNYP

SEQ ID NO: 176 - protein, 6 aa, Artificial sequence
  Protein classification predicting sequence
WIDVPP

SEQ ID NO: 177 - protein, 7 aa, Artificial sequence
  Protein classification predicting sequence
FPIINLE

SEQ ID NO: 178 - protein, 15 aa, Artificial sequence
  Protein classification predicting sequence
NWGFFELVNHGIPHE

SEQ ID NO: 179 - protein, 7 aa, Artificial sequence
  Protein classification predicting sequence
HYKKCME

SEQ ID NO: 180 - protein, 12 aa, Artificial sequence
  Protein classification predicting sequence
DWESTFFLRHLP

SEQ ID NO: 181 - protein, 12 aa, Artificial sequence
  Protein classification predicting sequence
NLGDQLEVITNG

SEQ ID NO: 182 - protein, 8 aa, Artificial sequence
  Protein classification predicting sequence
YKSVMHRV

SEQ ID NO: 183 - protein, 6 aa, Artificial sequence
  Protein classification predicting sequence
EQRFKE

SEQ ID NO: 184 - protein, 15 aa, Artificial sequence
  Protein classification predicting sequence
GDQLEVITNGKYKSV

SEQ ID NO: 185 - protein, 6 aa, Artificial sequence
  Protein classification predicting sequence
YPKFVF

SEQ ID NO: 186 - protein, 13 aa, Artificial sequence
  Protein classification predicting sequence
LDWESTFFLRHLP

SEQ ID NO: 187 - protein, 7 aa, Artificial sequence
  Protein classification predicting sequence
MEQRFKE

SEQ ID NO: 188 - protein, 11 aa, Artificial sequence
  Protein classification predicting sequence
KFEAKEPRFEA

SEQ ID NO: 189 - protein, 8 aa, Artificial sequence
  Protein classification predicting sequence
YREVMRDF

SEQ ID NO: 190 - protein, 22 aa, Artificial sequence
  Protein classification predicting sequence
KRLEKLAEELLDLLCENLGLEK

SEQ ID NO: 191 - protein, 8 aa, Artificial sequence
  Protein classification predicting sequence
IYPAPALV

SEQ ID NO: 192 - protein, 7 aa, Artificial sequence
  Protein classification predicting sequence
MHRVIAQ

SEQ ID NO: 193 - protein, 9 aa, Artificial sequence
  Protein classification predicting sequence
KCMEQRFKE

SEQ ID NO: 194 - protein, 13 aa, Artificial sequence
  Protein classification predicting sequence
LIKGLRAHTDAGG

SEQ ID NO: 195 - protein, 6 aa, Artificial sequence
  Protein classification predicting sequence
HRVIAQ

SEQ ID NO: 196 - protein, 6 aa, Artificial sequence
  Protein classification predicting sequence
ASFYNP

SEQ ID NO: 197 - protein, 7 aa, Artificial sequence
  Protein classification predicting sequence
HRVVAQT

SEQ ID NO: 198 - protein, 5 aa, Artificial sequence
  Protein classification predicting sequence
DWEST

SEQ ID NO: 199 - protein, 9 aa, Artificial sequence
  Protein classification predicting sequence
KGPNFGTKV

SEQ ID NO: 200 - protein, 6 aa, Artificial sequence
  Protein classification predicting sequence
NGRYKS

SEQ ID NO: 201 - protein, 7 aa, Artificial sequence
  Protein classification predicting sequence
KEPRFEA

SEQ ID NO: 202 - protein, 11 aa, Artificial sequence
  Protein classification predicting sequence
RMSIASFYNPG

SEQ ID NO: 203 - protein, 12 aa, Artificial sequence
  Protein classification predicting sequence
FGTKVSNYPPCP

SEQ ID NO: 204 - protein, 10 aa, Artificial sequence
  Protein classification predicting sequence
HSIVINLGDQ

SEQ ID NO: 205 - protein, 12 aa, Artificial sequence
  Protein classification predicting sequence
ASFYNPGSDAVI

SEQ ID NO: 206 - protein, 16 aa, Artificial sequence
  Protein classification predicting sequence
EQRFKELVASKGLEAV

SEQ ID NO: 207 - protein, 9 aa, Artificial sequence
  Protein classification predicting sequence
SNISEVPDL

SEQ ID NO: 208 - protein, 7 aa, Artificial sequence
  Protein classification predicting sequence
ASFYNPG

SEQ ID NO: 209 - protein, 6 aa, Artificial sequence
  Protein classification predicting sequence
DHVGME

SEQ ID NO: 210 - protein, 6 aa, Artificial sequence
  Protein classification predicting sequence
AMDIGM

SEQ ID NO: 211 - protein, 6 aa, Artificial sequence
  Protein classification predicting sequence
NTGSCV

SEQ ID NO: 212 - protein, 6 aa, Artificial sequence
  Protein classification predicting sequence
ACHAAH

SEQ ID NO: 213 - protein, 9 aa, Artificial sequence
  Protein classification predicting sequence
EIADYILNR

SEQ ID NO: 214 - protein, 13 aa, Artificial sequence
  Protein classification predicting sequence
DFPKADPEAPLIE

SEQ ID NO: 215 - protein, 18 aa, Artificial sequence
  Protein classification predicting sequence
CIGCRRCEQVCKKEIPIL

SEQ ID NO: 216 - protein, 7 aa, Artificial sequence
  Protein classification predicting sequence
PEDWWKF

SEQ ID NO: 217 - protein, 22 aa, Artificial sequence
  Protein classification predicting sequence
PDVIVVDEQCVRGDIVPEAQKL

SEQ ID NO: 218 - protein, 8 aa, Artificial sequence
  Protein classification predicting sequence
LDYDKLGE

SEQ ID NO: 219 - protein, 9 aa, Artificial sequence
  Protein classification predicting sequence
IPPAPEFLL

SEQ ID NO: 220 - protein, 6 aa, Artificial sequence
  Protein classification predicting sequence
RCEQVC

SEQ ID NO: 221 - protein, 8 aa, Artificial sequence
  Protein classification predicting sequence
LNRVGACG

SEQ ID NO: 222 - protein, 8 aa, Artificial sequence
  Protein classification predicting sequence
GRSIKLTH

SEQ ID NO: 223 - protein, 22 aa, Artificial sequence
  Protein classification predicting sequence
EGLNLVMGTTPGIIAIIGCPNY

SEQ ID NO: 224 - protein, 9 aa, Artificial sequence
  Protein classification predicting sequence
GNLAEIADY

SEQ ID NO: 225 - protein, 10 aa, Artificial sequence
  Protein classification predicting sequence
GITAIPTDEE

SEQ ID NO: 226 - protein, 31 aa, Artificial sequence
  Protein classification predicting sequence
KLTTGSFSIEDLESVQITINNIVGAAKEAAE

SEQ ID NO: 227 - protein, 6 aa, Artificial sequence
  Protein classification predicting sequence
DRYEPV

SEQ ID NO: 228 - protein, 11 aa, Artificial sequence
  Protein classification predicting sequence
TPMCDQCCYCT

SEQ ID NO: 229 - protein, 9 aa, Artificial sequence
  Protein classification predicting sequence
AHGRHLLDH

SEQ ID NO: 230 - protein, 11 aa, Artificial sequence
  Protein classification predicting sequence
QLLATVHAGQE

SEQ ID NO: 231 - protein, 6 aa, Artificial sequence
  Protein classification predicting sequence
GLCCTA

SEQ ID NO: 232 - protein, 6 aa, Artificial sequence
  Protein classification predicting sequence
DEQCVR

SEQ ID NO: 233 - protein, 9 aa, Artificial sequence
  Protein classification predicting sequence
IPGCVMLDY

SEQ ID NO: 234 - protein, 9 aa, Artificial sequence
  Protein classification predicting sequence
GCRRCEQVC

SEQ ID NO: 235 - protein, 26 aa, Artificial sequence
  Protein classification predicting sequence
RAGRGQVSDAEIRAEGLNLVMGTTPG

SEQ ID NO: 236 - protein, 11 aa, Artificial sequence
  Protein classification predicting sequence
KYRRALIAKTY

SEQ ID NO: 237 - protein, 6 aa, Artificial sequence
  Protein classification predicting sequence
KWKVYD

SEQ ID NO: 238 - protein, 25 aa, Artificial sequence
  Protein classification predicting sequence
GREFFLRVITGTACHAAHGRHLLDH

SEQ ID NO: 239 - protein, 27 aa, Artificial sequence
  Protein classification predicting sequence
HAGQESAEIDYDSKALFSGSLDHVGME

SEQ ID NO: 240 - protein, 7 aa, Artificial sequence
  Protein classification predicting sequence
GWEIDWK

SEQ ID NO: 241 - protein, 6 aa, Artificial sequence
  Protein classification predicting sequence
DEQCIR

SEQ ID NO: 242 - protein, 8 aa, Artificial sequence
  Protein classification predicting sequence
CTYGPCDL

SEQ ID NO: 243 - protein, 6 aa, Artificial sequence
  Protein classification predicting sequence
VDEQCV

SEQ ID NO: 244 - protein, 7 aa, Artificial sequence
  Protein classification predicting sequence
IPVIASN

SEQ ID NO: 245 - protein, 9 aa, Artificial sequence
  Protein classification predicting sequence
KLGIRASST

SEQ ID NO: 246 - protein, 10 aa, Artificial sequence
  Protein classification predicting sequence
ITEIYEGTSE

SEQ ID NO: 247 - protein, 7 aa, Artificial sequence
  Protein classification predicting sequence
HRLWSHR

SEQ ID NO: 248 - protein, 9 aa, Artificial sequence
  Protein classification predicting sequence
LEEDIRPEM

SEQ ID NO: 249 - protein, 24 aa, Artificial sequence
  Protein classification predicting sequence
VLNATWLVNSAAHLYGYRPYDKNI

SEQ ID NO: 250 - protein, 9 aa, Artificial sequence
  Protein classification predicting sequence
NTMAFQNDV

SEQ ID NO: 251 - protein, 12 aa, Artificial sequence
  Protein classification predicting sequence
RDHRAHHKFSET

SEQ ID NO: 252 - protein, 9 aa, Artificial sequence
  Protein classification predicting sequence
TWLVNSAAH

SEQ ID NO: 253 - protein, 8 aa, Artificial sequence
  Protein classification predicting sequence
LARIKRTG

SEQ ID NO: 254 - protein, 6 aa, Artificial sequence
  Protein classification predicting sequence
MAFQND

SEQ ID NO: 255 - protein, 17 aa, Artificial sequence
  Protein classification predicting sequence
RGFFFSHVGWLLVRKHP

SEQ ID NO: 256 - protein, 6 aa, Artificial sequence
  Protein classification predicting sequence
VMFQRR

SEQ ID NO: 257 - protein, 13 aa, Artificial sequence
  Protein classification predicting sequence
VLNATWLVNSAAH

SEQ ID NO: 258 - protein, 9 aa, Artificial sequence
  Protein classification predicting sequence
GEGFHNYHH

SEQ ID NO: 259 - protein, 8 aa, Artificial sequence
  Protein classification predicting sequence
YKARLPLR

SEQ ID NO: 260 - protein, 9 aa, Artificial sequence
  Protein classification predicting sequence
LLHLGALYG

SEQ ID NO: 261 - protein, 48 aa, Artificial sequence
  Protein classification predicting sequence
SRRGFFFSHVGWLLVRKHPAVKEKGGKLDMSDLKAEKLVMFQRRYYKP

SEQ ID NO: 262 - protein, 14 aa, Artificial sequence
  Protein classification predicting sequence
FLIIANTMAFQNDV

SEQ ID NO: 263 - protein, 26 aa, Artificial sequence
  Protein classification predicting sequence
ADPHNSRRGFFFSHVGWLLVRKHPAV

SEQ ID NO: 264 - protein, 7 aa, Artificial sequence
  Protein classification predicting sequence
GLETTAT

SEQ ID NO: 265 - protein, 9 aa, Artificial sequence
  Protein classification predicting sequence
KWWPGGLGK

SEQ ID NO: 266 - protein, 7 aa, Artificial sequence
  Protein classification predicting sequence
ITVGDIG

SEQ ID NO: 267 - protein, 6 aa, Artificial sequence
  Protein classification predicting sequence
ARFLMK

SEQ ID NO: 268 - protein, 7 aa, Artificial sequence
  Protein classification predicting sequence
DPDFQHE

SEQ ID NO: 269 - protein, 18 aa, Artificial sequence
  Protein classification predicting sequence
SNKLTYGTMVFVRSFLVG

SEQ ID NO: 270 - protein, 12 aa, Artificial sequence
  Protein classification predicting sequence
LDFQTQQYKLFP

SEQ ID NO: 271 - protein, 12 aa, Artificial sequence
  Protein classification predicting sequence
ACGGHGYSHCSG

SEQ ID NO: 272 - protein, 22 aa, Artificial sequence
  Protein classification predicting sequence
VSYLNDLPSQRIQPQQVAVWPT

SEQ ID NO: 273 - protein, 23 aa, Artificial sequence
  Protein classification predicting sequence
IGQGDLSELPELHALTAGLKAFT

SEQ ID NO: 274 - protein, 13 aa, Artificial sequence
  Protein classification predicting sequence
MVKKMREFGIADP

SEQ ID NO: 275 - protein, 9 aa, Artificial sequence
  Protein classification predicting sequence
PNIYVTFTP

SEQ ID NO: 276 - protein, 11 aa, Artificial sequence
  Protein classification predicting sequence
FEWAKKSPLNK

SEQ ID NO: 277 - protein, 6 aa, Artificial sequence
  Protein classification predicting sequence
YMKETY

SEQ ID NO: 278 - protein, 21 aa, Artificial sequence
  Protein classification predicting sequence
LTEAYKLRAARLVEIAAKNLQ

SEQ ID NO: 279 - protein, 6 aa, Artificial sequence
  Protein classification predicting sequence
FVVPLR

SEQ ID NO: 280 - protein, 7 aa, Artificial sequence
  Protein classification predicting sequence
HQRRLLP

SEQ ID NO: 281 - protein, 8 aa, Artificial sequence
  Protein classification predicting sequence
GCFAMTEL

SEQ ID NO: 282 - protein, 5 aa, Artificial sequence
  Protein classification predicting sequence
KWWIG

SEQ ID NO: 283 - protein, 9 aa, Artificial sequence
  Protein classification predicting sequence
YGCFGMTEL

SEQ ID NO: 284 - protein, 7 aa, Artificial sequence
  Protein classification predicting sequence
DYGVKTF

SEQ ID NO: 285 - protein, 7 aa, Artificial sequence
  Protein classification predicting sequence
PRFFMLQ

SEQ ID NO: 286 - protein, 6 aa, Artificial sequence
  Protein classification predicting sequence
TYAQTE

SEQ ID NO: 287 - protein, 5 aa, Artificial sequence
  Protein classification predicting sequence
KWWPG

SEQ ID NO: 288 - protein, 13 aa, Artificial sequence
  Protein classification predicting sequence
PLPGITVGDIGPK

SEQ ID NO: 289 - protein, 6 aa, Artificial sequence
  Protein classification predicting sequence
HAFIVP

SEQ ID NO: 290 - protein, 8 aa, Artificial sequence
  Protein classification predicting sequence
RLRPSDPE

SEQ ID NO: 291 - protein, 11 aa, Artificial sequence
  Protein classification predicting sequence
ATKWWIGGAAH

SEQ ID NO: 292 - protein, 7 aa, Artificial sequence
  Protein classification predicting sequence
DNGWIQF

SEQ ID NO: 293 - protein, 13 aa, Artificial sequence
  Protein classification predicting sequence
DWVVQCTWEGDNN

SEQ ID NO: 294 - protein, 6 aa, Artificial sequence
  Protein classification predicting sequence
IAIRYS

SEQ ID NO: 295 - protein, 7 aa, Artificial sequence
  Protein classification predicting sequence
RLLPYLA

SEQ ID NO: 296 - protein, 7 aa, Artificial sequence
  Protein classification predicting sequence
AVALVDA

SEQ ID NO: 297 - protein, 6 aa, Artificial sequence
  Protein classification predicting sequence
HGSNVA

SEQ ID NO: 298 - protein, 13 aa, Artificial sequence
  Protein classification predicting sequence
HGSNVAGLETTAT

SEQ ID NO: 299 - protein, 7 aa, Artificial sequence
  Protein classification predicting sequence
GKDYGVK

SEQ ID NO: 300 - protein, 6 aa, Artificial sequence
  Protein classification predicting sequence
ACGGHG

SEQ ID NO: 301 - protein, 8 aa, Artificial sequence
  Protein classification predicting sequence
LTKDQQRE

SEQ ID NO: 302 - protein, 8 aa, Artificial sequence
  Protein classification predicting sequence
EQLSYSAL

SEQ ID NO: 303 - protein, 15 aa, Artificial sequence
  Protein classification predicting sequence
ATKWWIGGAAHSATH

SEQ ID NO: 304 - protein, 7 aa, Artificial sequence
  Protein classification predicting sequence
CGGHGYS

SEQ ID NO: 305 - protein, 10 aa, Artificial sequence
  Protein classification predicting sequence
CGGHGYSGYN

SEQ ID NO: 306 - protein, 8 aa, Artificial sequence
  Protein classification predicting sequence
CTWEGDNN

SEQ ID NO: 307 - protein, 8 aa, Artificial sequence
  Protein classification predicting sequence
LIDYPLHQ

SEQ ID NO: 308 - protein, 7 aa, Artificial sequence
  Protein classification predicting sequence
IGLTDSF

SEQ ID NO: 309 - protein, 6 aa, Artificial sequence
  Protein classification predicting sequence
LWSRFF

SEQ ID NO: 310 - protein, 7 aa, Artificial sequence
  Protein classification predicting sequence
TNETAGR

SEQ ID NO: 311 - protein, 7 aa, Artificial sequence
  Protein classification predicting sequence
AILEEFR

SEQ ID NO: 312 - protein, 12 aa, Artificial sequence
  Protein classification predicting sequence
DFNLSLDLGFLT

SEQ ID NO: 313 - protein, 9 aa, Artificial sequence
  Protein classification predicting sequence
DYNRHHFVR

SEQ ID NO: 314 - protein, 7 aa, Artificial sequence
  Protein classification predicting sequence
FLERSCT

SEQ ID NO: 315 - protein, 8 aa, Artificial sequence
  Protein classification predicting sequence
SEFSGFLL

SEQ ID NO: 316 - protein, 9 aa, Artificial sequence
  Protein classification predicting sequence
RDEARHAGF

SEQ ID NO: 317 - protein, 6 aa, Artificial sequence
  Protein classification predicting sequence
RIYPIF

SEQ ID NO: 318 - protein, 7 aa, Artificial sequence
  Protein classification predicting sequence
DYNQTHF

SEQ ID NO: 319 - protein, 20 aa, Artificial sequence
  Protein classification predicting sequence
EFLERSCTAEFSGFLLYKEL

SEQ ID NO: 320 - protein, 6 aa, Artificial sequence
  Protein classification predicting sequence
FYTTDF

SEQ ID NO: 321 - protein, 8 aa, Artificial sequence
  Protein classification predicting sequence
HFVRNKEF

SEQ ID NO: 322 - protein, 7 aa, Artificial sequence
  Protein classification predicting sequence
LDLGFLT

SEQ ID NO: 323 - protein, 10 aa, Artificial sequence
  Protein classification predicting sequence
SEKIGYWRYI

SEQ ID NO: 324 - protein, 13 aa, Artificial sequence
  Protein classification predicting sequence
IFYATYLSEKIGY

SEQ ID NO: 325 - protein, 7 aa, Artificial sequence
  Protein classification predicting sequence
RYITIYR

SEQ ID NO: 326 - protein, 12 aa, Artificial sequence
  Protein classification predicting sequence
RDEARHAGFLNK

SEQ ID NO: 327 - protein, 8 aa, Artificial sequence
  Protein classification predicting sequence
SVIVGVPP

SEQ ID NO: 328 - protein, 6 aa, Artificial sequence
  Protein classification predicting sequence
KINEGF

SEQ ID NO: 329 - protein, 7 aa, Artificial sequence
  Protein classification predicting sequence
EVAPPKA

SEQ ID NO: 330 - protein, 9 aa, Artificial sequence
  Protein classification predicting sequence
CLSTKGNLC

SEQ ID NO: 331 - protein, 6 aa, Artificial sequence
  Protein classification predicting sequence
SFEVIG

SEQ ID NO: 332 - protein, 12 aa, Artificial sequence
  Protein classification predicting sequence
AAVAWEAGKPLV

SEQ ID NO: 333 - protein, 11 aa, Artificial sequence
  Protein classification predicting sequence
AAVAWEAGKPL

SEQ ID NO: 334 - protein, 13 aa, Artificial sequence
  Protein classification predicting sequence
STGLGATLNVAKP

SEQ ID NO: 335 - protein, 6 aa, Artificial sequence
  Protein classification predicting sequence
RCIITM

SEQ ID NO: 336 - protein, 6 aa, Artificial sequence
  Protein classification predicting sequence
IPVPKP

SEQ ID NO: 337 - protein, 7 aa, Artificial sequence
  Protein classification predicting sequence
GAGGGLG

SEQ ID NO: 338 - protein, 8 aa, Artificial sequence
  Protein classification predicting sequence
ELMEQGKI

SEQ ID NO: 339 - protein, 11 aa, Artificial sequence
  Protein classification predicting sequence
GGLGSLAIQYA

SEQ ID NO: 340 - protein, 8 aa, Artificial sequence
  Protein classification predicting sequence
GGPHGVIN

SEQ ID NO: 341 - protein, 12 aa, Artificial sequence
  Protein classification predicting sequence
ADLSGYTHDGSF

SEQ ID NO: 342 - protein, 7 aa, Artificial sequence
  Protein classification predicting sequence
WVAISGA

SEQ ID NO: 343 - protein, 11 aa, Artificial sequence
  Protein classification predicting sequence
GGLGSLAVQYA

SEQ ID NO: 344 - protein, 7 aa, Artificial sequence
  Protein classification predicting sequence
INVSVSE

SEQ ID NO: 345 - protein, 8 aa, Artificial sequence
  Protein classification predicting sequence
GKILGRYV

SEQ ID NO: 346 - protein, 8 aa, Artificial sequence
  Protein classification predicting sequence
LINGAGIL

SEQ ID NO: 347 - protein, 12 aa, Artificial sequence
  Protein classification predicting sequence
NIIFVAGLGGIG

SEQ ID NO: 348 - protein, 12 aa, Artificial sequence
  Protein classification predicting sequence
KNLVILDRIDNP

SEQ ID NO: 349 - protein, 7 aa, Artificial sequence
  Protein classification predicting sequence
LDRIDNP

SEQ ID NO: 350 - protein, 16 aa, Artificial sequence
  Protein classification predicting sequence
VEPRVAELLLEHPTQT

SEQ ID NO: 351 - protein, 9 aa, Artificial sequence
  Protein classification predicting sequence
IEWTKHWDS

SEQ ID NO: 352 - protein, 10 aa, Artificial sequence
  Protein classification predicting sequence
ANICSVTGFN

SEQ ID NO: 353 - protein, 5 aa, Artificial sequence
  Protein classification predicting sequence
NGAIW

SEQ ID NO: 354 - protein, 8 aa, Artificial sequence
  Protein classification predicting sequence
EWTKHWDS

SEQ ID NO: 355 - protein, 14 aa, Artificial sequence
  Protein classification predicting sequence
YDVTVSVAESTKLL

SEQ ID NO: 356 - protein, 16 aa, Artificial sequence
  Protein classification predicting sequence
QIERTIAVNFTGTVNT

SEQ ID NO: 357 - protein, 30 aa, Artificial sequence
  Protein classification predicting sequence
CSVTGFNAIYQVPVYSASKAAALSFTNSLA

SEQ ID NO: 358 - protein, 10 aa, Artificial sequence
  Protein classification predicting sequence
ELLLEHPTQT

SEQ ID NO: 359 - protein, 12 aa, Artificial sequence
  Protein classification predicting sequence
CAQNFVKAIEAN

SEQ ID NO: 360 - protein, 8 aa, Artificial sequence
  Protein classification predicting sequence
KNLVILDR

SEQ ID NO: 361 - protein, 13 aa, Artificial sequence
  Protein classification predicting sequence
AIAELKAINPKVT

SEQ ID NO: 362 - protein, 9 aa, Artificial sequence
  Protein classification predicting sequence
TFYPYDVTV

SEQ ID NO: 363 - protein, 23 aa, Artificial sequence
  Protein classification predicting sequence
FWDKRKGGPGGVIANICSVTGFN

SEQ ID NO: 364 - protein, 14 aa, Artificial sequence
  Protein classification predicting sequence
IYQVPVYSASKAAA

SEQ ID NO: 365 - protein, 13 aa, Artificial sequence
  Protein classification predicting sequence
NPAAIAELKALNP

SEQ ID NO: 366 - protein, 40 aa, Artificial sequence
  Protein classification predicting sequence
FWDKRKGGPGGVIANICSVTGFNAIYQVPVYSASKAAALS

SEQ ID NO: 367 - protein, 8 aa, Artificial sequence
  Protein classification predicting sequence
EEVEVAPP

SEQ ID NO: 368 - protein, 18 aa, Artificial sequence
  Protein classification predicting sequence
GKPIYHFVGTSTFSEYTV

SEQ ID NO: 369 - protein, 7 aa, Artificial sequence
  Protein classification predicting sequence
APLDKVC

SEQ ID NO: 370 - protein, 6 aa, Artificial sequence
  Protein classification predicting sequence
EKFITH

SEQ ID NO: 371 - protein, 9 aa, Artificial sequence
  Protein classification predicting sequence
GTDLAEVAP

SEQ ID NO: 372 - protein, 8 aa, Artificial sequence
  Protein classification predicting sequence
VVAMGENV

SEQ ID NO: 373 - protein, 24 aa, Artificial sequence
  Protein classification predicting sequence
ADLSGYTHDGSFQQYATADAVQAA

SEQ ID NO: 374 - protein, 12 aa, Artificial sequence
  Protein classification predicting sequence
FPRIFGHEAGGI

SEQ ID NO: 375 - protein, 7 aa, Artificial sequence
  Protein classification predicting sequence
GHEAGGI

SEQ ID NO: 376 - protein, 6 aa, Artificial sequence
  Protein classification predicting sequence
CAHCKS

SEQ ID NO: 377 - protein, 10 aa, Artificial sequence
  Protein classification predicting sequence
HVGCVAKINP

SEQ ID NO: 378 - protein, 12 aa, Artificial sequence
  Protein classification predicting sequence
APLDKVCVLSCG

SEQ ID NO: 379 - protein, 8 aa, Artificial sequence
  Protein classification predicting sequence
ATGVCRSD

SEQ ID NO: 380 - protein, 7 aa, Artificial sequence
  Protein classification predicting sequence
VGVPPNA

SEQ ID NO: 381 - protein, 15 aa, Artificial sequence
  Protein classification predicting sequence
KKFVLDPLITHTLPF

SEQ ID NO: 382 - protein, 8 aa, Artificial sequence
  Protein classification predicting sequence
GAGGGLGS

SEQ ID NO: 383 - protein, 6 aa, Artificial sequence
  Protein classification predicting sequence
EFVNPK

SEQ ID NO: 384 - protein, 6 aa, Artificial sequence
  Protein classification predicting sequence
VVEKYM

SEQ ID NO: 385 - protein, 16 aa, Artificial sequence
  Protein classification predicting sequence
TSLCHTDVYFWEAKGQ

SEQ ID NO: 386 - protein, 12 aa, Artificial sequence
  Protein classification predicting sequence
ESNMCDLLRINT

SEQ ID NO: 387 - protein, 5 aa, Artificial sequence
  Protein classification predicting sequence
KFGCT

SEQ ID NO: 388 - protein, 11 aa, Artificial sequence
  Protein classification predicting sequence
KPRTDLPNVVE

SEQ ID NO: 389 - protein, 14 aa, Artificial sequence
  Protein classification predicting sequence
VAPPQKMEVRLKIL

SEQ ID NO: 390 - protein, 11 aa, Artificial sequence
  Protein classification predicting sequence
GGVDRSVECTG

SEQ ID NO: 391 - protein, 11 aa, Artificial sequence
  Protein classification predicting sequence
KDDAFKTHPMN

SEQ ID NO: 392 - protein, 7 aa, Artificial sequence
  Protein classification predicting sequence
FKTHPMN

SEQ ID NO: 393 - protein, 7 aa, Artificial sequence
  Protein classification predicting sequence
YMKKELE

SEQ ID NO: 394 - protein, 7 aa, Artificial sequence
  Protein classification predicting sequence
APILCAG

SEQ ID NO: 395 - protein, 7 aa, Artificial sequence
  Protein classification predicting sequence
TVYKALK

SEQ ID NO: 396 - protein, 7 aa, Artificial sequence
  Protein classification predicting sequence
VVKSISI

SEQ ID NO: 397 - protein, 8 aa, Artificial sequence
  Protein classification predicting sequence
PIKVVGLS

SEQ ID NO: 398 - protein, 13 aa, Artificial sequence
  Protein classification predicting sequence
EVAPPKAHEVRIK

SEQ ID NO: 399 - protein, 12 aa, Artificial sequence
  Protein classification predicting sequence
ILGHEAAGIVES

SEQ ID NO: 400 - protein, 10 aa, Artificial sequence
  Protein classification predicting sequence
GHEAAGIVES

SEQ ID NO: 401 - protein, 17 aa, Artificial sequence
  Protein classification predicting sequence
PLEKVCLIGCGFSTGYG

SEQ ID NO: 402 - protein, 11 aa, Artificial sequence
  Protein classification predicting sequence
ATGICRSDDHV

SEQ ID NO: 403 - protein, 7 aa, Artificial sequence
  Protein classification predicting sequence
CKNPESN

SEQ ID NO: 404 - protein, 8 aa, Artificial sequence
  Protein classification predicting sequence
GATECINP

SEQ ID NO: 405 - protein, 9 aa, Artificial sequence
  Protein classification predicting sequence
VFGGWKSKD

SEQ ID NO: 406 - protein, 6 aa, Artificial sequence
  Protein classification predicting sequence
DPLITH

SEQ ID NO: 407 - protein, 12 aa, Artificial sequence
  Protein classification predicting sequence
VIAEMTDGGVDR

SEQ ID NO: 408 - protein, 10 aa, Artificial sequence
  Protein classification predicting sequence
ELELEKFITH

SEQ ID NO: 409 - protein, 9 aa, Artificial sequence
  Protein classification predicting sequence
KDIPVPKPK

SEQ ID NO: 410 - protein, 20 aa, Artificial sequence
  Protein classification predicting sequence
NELLINVKYSGVCHTDLHAW

SEQ ID NO: 411 - protein, 10 aa, Artificial sequence
  Protein classification predicting sequence
HGVINVSVSE

SEQ ID NO: 412 - protein, 9 aa, Artificial sequence
  Protein classification predicting sequence
CAGVTTYKA

SEQ ID NO: 413 - protein, 17 aa, Artificial sequence
  Protein classification predicting sequence
LAPITGVTAYSINPGIT

SEQ ID NO: 414 - protein, 21 aa, Artificial sequence
  Protein classification predicting sequence
QIERTIAVNFTGTVNTTTAIM

SEQ ID NO: 415 - protein, 10 aa, Artificial sequence
  Protein classification predicting sequence
GTVNTTTAIM

SEQ ID NO: 416 - protein, 12 aa, Artificial sequence
  Protein classification predicting sequence
FWDKRKGGPGGV

SEQ ID NO: 417 - protein, 10 aa, Artificial sequence
  Protein classification predicting sequence
LKTVDLLING

SEQ ID NO: 418 - protein, 19 aa, Artificial sequence
  Protein classification predicting sequence
VPVYSASKAAALSFTNSLA

SEQ ID NO: 419 - protein, 9 aa, Artificial sequence
  Protein classification predicting sequence
CAQNFVKAI

SEQ ID NO: 420 - protein, 13 aa, Artificial sequence
  Protein classification predicting sequence
ANQNGAIWKLDLG

SEQ ID NO: 421 - protein, 16 aa, Artificial sequence
  Protein classification predicting sequence
IANKNIIFVAGLGGIG

SEQ ID NO: 422 - protein, 11 aa, Artificial sequence
  Protein classification predicting sequence
FWDKRKGGPGG

SEQ ID NO: 423 - protein, 13 aa, Artificial sequence
  Protein classification predicting sequence
FWDKRKGGPGGII

SEQ ID NO: 424 - protein, 14 aa, Artificial sequence
  Protein classification predicting sequence
KLLKTIFDKLKTVD

SEQ ID NO: 425 - protein, 11 aa, Artificial sequence
  Protein classification predicting sequence
LCHTDVYFWEA

SEQ ID NO: 426 - protein, 7 aa, Artificial sequence
  Protein classification predicting sequence
CDLLRIN

SEQ ID NO: 427 - protein, 6 aa, Artificial sequence
  Protein classification predicting sequence
DRGVMI

SEQ ID NO: 428 - protein, 10 aa, Artificial sequence
  Protein classification predicting sequence
GTSTFSEYTV

SEQ ID NO: 429 - protein, 15 aa, Artificial sequence
  Protein classification predicting sequence
GTSTFSEYTVIHVGC

SEQ ID NO: 430 - protein, 14 aa, Artificial sequence
  Protein classification predicting sequence
TVAIFGLGAVGLAA

SEQ ID NO: 431 - protein, 10 aa, Artificial sequence
  Protein classification predicting sequence
GASRIIGVDL

SEQ ID NO: 432 - protein, 16 aa, Artificial sequence
  Protein classification predicting sequence
AMISAFECVHDGWGVA

SEQ ID NO: 433 - protein, 19 aa, Artificial sequence
  Protein classification predicting sequence
TKLPLVGGHEGAGVVVAMG

SEQ ID NO: 434 - protein, 9 aa, Artificial sequence
  Protein classification predicting sequence
GTVVLVGLP

SEQ ID NO: 435 - protein, 18 aa, Artificial sequence
  Protein classification predicting sequence
ILGHEAAGIVESVGEGVT

SEQ ID NO: 436 - protein, 11 aa, Artificial sequence
  Protein classification predicting sequence
GIVESVGEGVT

SEQ ID NO: 437 - protein, 11 aa, Artificial sequence
  Protein classification predicting sequence
LLRINTDRGVM

SEQ ID NO: 438 - protein, 7 aa, Artificial sequence
  Protein classification predicting sequence
SRFSING

SEQ ID NO: 439 - protein, 47 aa, Artificial sequence
  Protein classification predicting sequence
PIYHFVGTSTFSEYTVVHVGCVAKINPLAPLDKVCVLSCGISTGLGA

SEQ ID NO: 440 - protein, 19 aa, Artificial sequence
  Protein classification predicting sequence
APLDKVCVLSCGISTGLGA

SEQ ID NO: 441 - protein, 122 aa, Artificial sequence
  Protein classification predicting sequence
LNVAKPTKGSSVAIFGLGAVGLAAAEGARIAGASRIIGVDLNASRFEQAKKFGVTEFVNPKDYSKPVQEVIAEMTDGGVDRSVECTGHIDAMISAFECVHDGWGVAVLVGVPHKEAVFKTHP

SEQ ID NO: 442 - protein, 44 aa, Artificial sequence
  Protein classification predicting sequence
VVEKYMNKELELEKFITHTLPFAEINKAFDLMLKGEGLRCIITM

SEQ ID NO: 443 - protein, 8 aa, Artificial sequence
  Protein classification predicting sequence
TAGKVIKC

SEQ ID NO: 444 - protein, 7 aa, Artificial sequence
  Protein classification predicting sequence
WEAGKPL

SEQ ID NO: 445 - protein, 14 aa, Artificial sequence
  Protein classification predicting sequence
LCHTDVYFWEAKGQ

SEQ ID NO: 446 - protein, 16 aa, Artificial sequence
  Protein classification predicting sequence
GHEAGGIVESVGEGVT

SEQ ID NO: 447 - protein, 9 aa, Artificial sequence
  Protein classification predicting sequence
AFDLMLKGE

SEQ ID NO: 448 - protein, 11 aa, Artificial sequence
  Protein classification predicting sequence
VECTGNINAMI

SEQ ID NO: 449 - protein, 17 aa, Artificial sequence
  Protein classification predicting sequence
FECVHDGWGVAVLVGVP

SEQ ID NO: 450 - protein, 9 aa, Artificial sequence
  Protein classification predicting sequence
NKDKFAKAK

SEQ ID NO: 451 - protein, 6 aa, Artificial sequence
  Protein classification predicting sequence
GATECI

SEQ ID NO: 452 - protein, 20 aa, Artificial sequence
  Protein classification predicting sequence
ADLSGYTHDGSFQQYATADA

SEQ ID NO: 453 - protein, 11 aa, Artificial sequence
  Protein classification predicting sequence
SGAAGGLGSLA

SEQ ID NO: 454 - protein, 7 aa, Artificial sequence
  Protein classification predicting sequence
GSYVGNR

SEQ ID NO: 455 - protein, 9 aa, Artificial sequence
  Protein classification predicting sequence
GKVIKCKAA

SEQ ID NO: 456 - protein, 7 aa, Artificial sequence
  Protein classification predicting sequence
GKPIYHF

SEQ ID NO: 457 - protein, 7 aa, Artificial sequence
  Protein classification predicting sequence
DINKDKF

SEQ ID NO: 458 - protein, 9 aa, Artificial sequence
  Protein classification predicting sequence
TFFGGWKSV

SEQ ID NO: 459 - protein, 10 aa, Artificial sequence
  Protein classification predicting sequence
YATADAVQAA

SEQ ID NO: 460 - protein, 10 aa, Artificial sequence
  Protein classification predicting sequence
GGHEGAGVVV

SEQ ID NO: 461 - protein, 9 aa, Artificial sequence
  Protein classification predicting sequence
LCAGITVYK

SEQ ID NO: 462 - protein, 8 aa, Artificial sequence
  Protein classification predicting sequence
HCKSEESN

SEQ ID NO: 463 - protein, 11 aa, Artificial sequence
  Protein classification predicting sequence
VECTGHIDAMI

SEQ ID NO: 464 - protein, 8 aa, Artificial sequence
  Protein classification predicting sequence
GRYVVDTS

SEQ ID NO: 465 - protein, 17 aa, Artificial sequence
  Protein classification predicting sequence
LINVKYSGVCHTDLHAW

SEQ ID NO: 466 - protein, 20 aa, Artificial sequence
  Protein classification predicting sequence
ESNCPDADLSGYTHDGSFQQ

SEQ ID NO: 467 - protein, 8 aa, Artificial sequence
  Protein classification predicting sequence
AWEAGKPL

SEQ ID NO: 468 - protein, 7 aa, Artificial sequence
  Protein classification predicting sequence
TSLCHTD

SEQ ID NO: 469 - protein, 9 aa, Artificial sequence
  Protein classification predicting sequence
FPVIVGHEA

SEQ ID NO: 470 - protein, 9 aa, Artificial sequence
  Protein classification predicting sequence
GCGFSTGYG

SEQ ID NO: 471 - protein, 16 aa, Artificial sequence
  Protein classification predicting sequence
PGSTCAVFGLGGVGLS

SEQ ID NO: 472 - protein, 14 aa, Artificial sequence
  Protein classification predicting sequence
KAKALGATDCLNPR

SEQ ID NO: 473 - protein, 6 aa, Artificial sequence
  Protein classification predicting sequence
THTLPF

SEQ ID NO: 474 - protein, 8 aa, Artificial sequence
  Protein classification predicting sequence
GGEVFIDF

SEQ ID NO: 475 - protein, 7 aa, Artificial sequence
  Protein classification predicting sequence
GIVESVG

SEQ ID NO: 476 - protein, 6 aa, Artificial sequence
  Protein classification predicting sequence
GGVDFS

SEQ ID NO: 477 - protein, 6 aa, Artificial sequence
  Protein classification predicting sequence
KGTFFG

SEQ ID NO: 478 - protein, 7 aa, Artificial sequence
  Protein classification predicting sequence
GKLEYKD

SEQ ID NO: 479 - protein, 10 aa, Artificial sequence
  Protein classification predicting sequence
DLHAWHGDWP

SEQ ID NO: 480 - protein, 8 aa, Artificial sequence
  Protein classification predicting sequence
AGIKWLNG

SEQ ID NO: 481 - protein, 8 aa, Artificial sequence
  Protein classification predicting sequence
PLEKVCLI

SEQ ID NO: 482 - protein, 8 aa, Artificial sequence
  Protein classification predicting sequence
PKLVADYM

SEQ ID NO: 483 - protein, 6 aa, Artificial sequence
  Protein classification predicting sequence
PFSIEE

SEQ ID NO: 484 - protein, 16 aa, Artificial sequence
  Protein classification predicting sequence
VFGLGGVGLSVIMGCK

SEQ ID NO: 485 - protein, 8 aa, Artificial sequence
  Protein classification predicting sequence
GICRTDDH

SEQ ID NO: 486 - protein, 6 aa, Artificial sequence
  Protein classification predicting sequence
AAVLWE

SEQ ID NO: 487 - protein, 7 aa, Artificial sequence
  Protein classification predicting sequence
TFSEYTV

SEQ ID NO: 488 - protein, 20 aa, Artificial sequence
  Protein classification predicting sequence
EMTDGGVDFSFEVIGRLDTM

SEQ ID NO: 489 - protein, 7 aa, Artificial sequence
  Protein classification predicting sequence
DDHVVSG

SEQ ID NO: 490 - protein, 8 aa, Artificial sequence
  Protein classification predicting sequence
MGCKAAGA

SEQ ID NO: 491 - protein, 6 aa, Artificial sequence
  Protein classification predicting sequence
NPMLLL

SEQ ID NO: 492 - protein, 14 aa, Artificial sequence
  Protein classification predicting sequence
NPMLLLTGRTWKGA

SEQ ID NO: 493 - protein, 12 aa, Artificial sequence
  Protein classification predicting sequence
PKLVADFMAKKF

SEQ ID NO: 494 - protein, 9 aa, Artificial sequence
  Protein classification predicting sequence
KINEGFDLL

SEQ ID NO: 495 - protein, 6 aa, Artificial sequence
  Protein classification predicting sequence
PQCGEC

SEQ ID NO: 496 - protein, 6 aa, Artificial sequence
  Protein classification predicting sequence
PLDKVC

SEQ ID NO: 497 - protein, 14 aa, Artificial sequence
  Protein classification predicting sequence
KVCLIGCGFSTGYG

SEQ ID NO: 498 - protein, 17 aa, Artificial sequence
  Protein classification predicting sequence
KVCLIGCGFSTGYGSAV

SEQ ID NO: 499 - protein, 11 aa, Artificial sequence
  Protein classification predicting sequence
QNLSMNPMLLL

SEQ ID NO: 500 - protein, 13 aa, Artificial sequence
  Protein classification predicting sequence
VPKLVADFMAKKF

SEQ ID NO: 501 - protein, 7 aa, Artificial sequence
  Protein classification predicting sequence
LDPLITH

SEQ ID NO: 502 - protein, 7 aa, Artificial sequence
  Protein classification predicting sequence
DFMAKKF

SEQ ID NO: 503 - protein, 6 aa, Artificial sequence
  Protein classification predicting sequence
LGATDC

SEQ ID NO: 504 - protein, 7 aa, Artificial sequence
  Protein classification predicting sequence
CINPQDY

SEQ ID NO: 505 - protein, 8 aa, Artificial sequence
  Protein classification predicting sequence
TVYKGLKE

SEQ ID NO: 506 - protein, 9 aa, Artificial sequence
  Protein classification predicting sequence
FTEYTVVHE

SEQ ID NO: 507 - protein, 7 aa, Artificial sequence
  Protein classification predicting sequence
KSKDSVP

SEQ ID NO: 508 - protein, 9 aa, Artificial sequence
  Protein classification predicting sequence
LLRAGKSIR

SEQ ID NO: 509 - protein, 8 aa, Artificial sequence
  Protein classification predicting sequence
ILGHEAAG

SEQ ID NO: 510 - protein, 13 aa, Artificial sequence
  Protein classification predicting sequence
LITHVLPFEKINE

SEQ ID NO: 511 - protein, 6 aa, Artificial sequence
  Protein classification predicting sequence
GICRSD

SEQ ID NO: 512 - protein, 6 aa, Artificial sequence
  Protein classification predicting sequence
GGFKSK

SEQ ID NO: 513 - protein, 10 aa, Artificial sequence
  Protein classification predicting sequence
SIEEVEVAPP

SEQ ID NO: 514 - protein, 8 aa, Artificial sequence
  Protein classification predicting sequence
AGIVESVG

SEQ ID NO: 515 - protein, 6 aa, Artificial sequence
  Protein classification predicting sequence
PQCGKC

SEQ ID NO: 516 - protein, 7 aa, Artificial sequence
  Protein classification predicting sequence
PLEKVCL

SEQ ID NO: 517 - protein, 18 aa, Artificial sequence
  Protein classification predicting sequence
GCGFSTGYGSAVKVAKVT

SEQ ID NO: 518 - protein, 7 aa, Artificial sequence
  Protein classification predicting sequence
KLLKTIF

SEQ ID NO: 519 - protein, 9 aa, Artificial sequence
  Protein classification predicting sequence
LVHKFNSWL

SEQ ID NO: 520 - protein, 20 aa, Artificial sequence
  Protein classification predicting sequence
VEPRVAELLLEHPTQTTLQC

SEQ ID NO: 521 - protein, 10 aa, Artificial sequence
  Protein classification predicting sequence
QNFVKAIEAN

SEQ ID NO: 522 - protein, 26 aa, Artificial sequence
  Protein classification predicting sequence
IFVAGLGGIGLDTSREIVKSGPKNLV

SEQ ID NO: 523 - protein, 25 aa, Artificial sequence
  Protein classification predicting sequence
NPAAIAELKAINPKVTVTFYPYDVT

SEQ ID NO: 524 - protein, 12 aa, Artificial sequence
  Protein classification predicting sequence
DVLINGAGILDD

SEQ ID NO: 525 - protein, 10 aa, Artificial sequence
  Protein classification predicting sequence
LINGAGILDD

SEQ ID NO: 526 - protein, 55 aa, Artificial sequence
  Protein classification predicting sequence
QIERTIAVNYTGLVNTTTAILDFWDKRKGGPGGIICNIGSVTGFNAIYQVPVYSG

SEQ ID NO: 527 - protein, 33 aa, Artificial sequence
  Protein classification predicting sequence
VAEKLLEHPTQTSQQCAENFVKAIELNKNGAIW

SEQ ID NO: 528 - protein, 8 aa, Artificial sequence
  Protein classification predicting sequence
LLEHPTQT

SEQ ID NO: 529 - protein, 7 aa, Artificial sequence
  Protein classification predicting sequence
LDLGTLE

SEQ ID NO: 530 - protein, 9 aa, Artificial sequence
  Protein classification predicting sequence
LDLGTLEPI

SEQ ID NO: 531 - protein, 24 aa, Artificial sequence
  Protein classification predicting sequence
AIAELKAINPKVTVTFYPYDVTVP

SEQ ID NO: 532 - protein, 16 aa, Artificial sequence
  Protein classification predicting sequence
NPKVTVTFYPYDVTVP

SEQ ID NO: 533 - protein, 11 aa, Artificial sequence
  Protein classification predicting sequence
FNSWLDVEPRV

SEQ ID NO: 534 - protein, 8 aa, Artificial sequence
  Protein classification predicting sequence
NPAAIAEL

SEQ ID NO: 535 - protein, 6 aa, Artificial sequence
  Protein classification predicting sequence
NPKVTV

SEQ ID NO: 536 - protein, 12 aa, Artificial sequence
  Protein classification predicting sequence
DLLINGAGILDD

SEQ ID NO: 537 - protein, 18 aa, Artificial sequence
  Protein classification predicting sequence
IYQVPVYSASKAAALSFT

SEQ ID NO: 538 - protein, 8 aa, Artificial sequence
  Protein classification predicting sequence
YSINPGIT

SEQ ID NO: 539 - protein, 8 aa, Artificial sequence
  Protein classification predicting sequence
KLLKTIFD

SEQ ID NO: 540 - protein, 29 aa, Artificial sequence
  Protein classification predicting sequence
ANICSVTGFNSIYQVPVYSASKAAALSFT

SEQ ID NO: 541 - protein, 14 aa, Artificial sequence
  Protein classification predicting sequence
TTLVHKFNSWLDVE

SEQ ID NO: 542 - protein, 9 aa, Artificial sequence
  Protein classification predicting sequence
KNLVILDRI

SEQ ID NO: 543 - protein, 15 aa, Artificial sequence
  Protein classification predicting sequence
NGAIWKLDLGTLEAI

SEQ ID NO: 544 - protein, 11 aa, Artificial sequence
  Protein classification predicting sequence
DNPAAIAELKA

SEQ ID NO: 545 - protein, 17 aa, Artificial sequence
  Protein classification predicting sequence
DNPAAIAELKALNPKVT

SEQ ID NO: 546 - protein, 16 aa, Artificial sequence
  Protein classification predicting sequence
NPAAIAELKALNPKVT

SEQ ID NO: 547 - protein, 7 aa, Artificial sequence
  Protein classification predicting sequence
VNTTTAI

SEQ ID NO: 548 - protein, 10 aa, Artificial sequence
  Protein classification predicting sequence
NPAAIAELKA

SEQ ID NO: 549 - protein, 7 aa, Artificial sequence
  Protein classification predicting sequence
WTKHWDS

SEQ ID NO: 550 - protein, 12 aa, Artificial sequence
  Protein classification predicting sequence
QIERTIAVNFTG

SEQ ID NO: 551 - protein, 9 aa, Artificial sequence
  Protein classification predicting sequence
FWDKRKGGP

SEQ ID NO: 552 - protein, 51 aa, Artificial sequence
  Protein classification predicting sequence
VEPRVAELLLEHPTQTTLQCAQNFVKAIEANQNGAIWKLDLGRLDAIEWTK

SEQ ID NO: 553 - protein, 31 aa, Artificial sequence
  Protein classification predicting sequence
ANICSVTGFNSIYQVPVYSASKAAALSFTTS

SEQ ID NO: 554 - protein, 10 aa, Artificial sequence
  Protein classification predicting sequence
YSINPGITKT

SEQ ID NO: 555 - protein, 14 aa, Artificial sequence
  Protein classification predicting sequence
FTSSLAKLAPITGV

SEQ ID NO: 556 - protein, 11 aa, Artificial sequence
  Protein classification predicting sequence
AYSINPGITKT

SEQ ID NO: 557 - protein, 17 aa, Artificial sequence
  Protein classification predicting sequence
AIANKNIIFVAGLGGIG

SEQ ID NO: 558 - protein, 15 aa, Artificial sequence
  Protein classification predicting sequence
LGGIGLDTSRELVKR

SEQ ID NO: 559 - protein, 7 aa, Artificial sequence
  Protein classification predicting sequence
QIERTIA

SEQ ID NO: 560 - protein, 16 aa, Artificial sequence
  Protein classification predicting sequence
QVPVYSASKAAVVSFT

SEQ ID NO: 561 - protein, 23 aa, Artificial sequence
  Protein classification predicting sequence
LAPITGVTAYSINPGITRTPLVH

SEQ ID NO: 562 - protein, 13 aa, Artificial sequence
  Protein classification predicting sequence
NGAIWKLDLGTLE

SEQ ID NO: 563 - protein, 18 aa, Artificial sequence
  Protein classification predicting sequence
AINPKVTVTFYPYDVTVP

SEQ ID NO: 564 - protein, 9 aa, Artificial sequence
  Protein classification predicting sequence
NGAIWKLDL

SEQ ID NO: 565 - protein, 13 aa, Artificial sequence
  Protein classification predicting sequence
KRDLKNLVILDRI

SEQ ID NO: 566 - protein, 11 aa, Artificial sequence
  Protein classification predicting sequence
ETTKLLKTIFA

SEQ ID NO: 567 - protein, 16 aa, Artificial sequence
  Protein classification predicting sequence
LKTVDLLINGAGILDD

SEQ ID NO: 568 - protein, 5 aa, Artificial sequence
  Protein classification predicting sequence
FWDKR

SEQ ID NO: 569 - protein, 12 aa, Artificial sequence
  Protein classification predicting sequence
LEAIEWTKHWDS

SEQ ID NO: 570 - protein, 10 aa, Artificial sequence
  Protein classification predicting sequence
LDRIDNPAAI

SEQ ID NO: 571 - protein, 10 aa, Artificial sequence
  Protein classification predicting sequence
VEPRVAELLL

SEQ ID NO: 572 - protein, 6 aa, Artificial sequence
  Protein classification predicting sequence
HPTQTT

SEQ ID NO: 573 - protein, 15 aa, Artificial sequence
  Protein classification predicting sequence
TTLVHKFNSWLDVEP

SEQ ID NO: 574 - protein, 19 aa, Artificial sequence
  Protein classification predicting sequence
TTLVHKFNSWLDVEPRVAE

SEQ ID NO: 575 - protein, 10 aa, Artificial sequence
  Protein classification predicting sequence
TFYPYDVTVP

SEQ ID NO: 576 - protein, 10 aa, Artificial sequence
  Protein classification predicting sequence
QIERTIAVNF

SEQ ID NO: 577 - protein, 9 aa, Artificial sequence
  Protein classification predicting sequence
GTVNTTTAI

SEQ ID NO: 578 - protein, 44 aa, Artificial sequence
  Protein classification predicting sequence
GLVNTTTAILDFWDKRKGGPGGIICNIGSVTGFNAIYQVPVYSG

SEQ ID NO: 579 - protein, 30 aa, Artificial sequence
  Protein classification predicting sequence
KAAVVNFTSSLAKLAPITGVTAYTVNPGIT

SEQ ID NO: 580 - protein, 13 aa, Artificial sequence
  Protein classification predicting sequence
FVAGLGGIGLDTS

SEQ ID NO: 581 - protein, 16 aa, Artificial sequence
  Protein classification predicting sequence
ELVKRDLKNLVILDRI

SEQ ID NO: 582 - protein, 12 aa, Artificial sequence
  Protein classification predicting sequence
CAENFVKAIELN

SEQ ID NO: 583 - protein, 8 aa, Artificial sequence
  Protein classification predicting sequence
NGAIWKLD

SEQ ID NO: 584 - protein, 9 aa, Artificial sequence
  Protein classification predicting sequence
HFVGTSTFS

SEQ ID NO: 585 - protein, 10 aa, Artificial sequence
  Protein classification predicting sequence
HVGCLAKINP

SEQ ID NO: 586 - protein, 15 aa, Artificial sequence
  Protein classification predicting sequence
FGLGAVGLAAAEGAR

SEQ ID NO: 587 - protein, 12 aa, Artificial sequence
  Protein classification predicting sequence
INKAFDYMLKGE

SEQ ID NO: 588 - protein, 9 aa, Artificial sequence
  Protein classification predicting sequence
KGEGIRCII

SEQ ID NO: 589 - protein, 7 aa, Artificial sequence
  Protein classification predicting sequence
KPLVIEE

SEQ ID NO: 590 - protein, 7 aa, Artificial sequence
  Protein classification predicting sequence
GVCHTDL

SEQ ID NO: 591 - protein, 7 aa, Artificial sequence
  Protein classification predicting sequence
MTNGGVD

SEQ ID NO: 592 - protein, 23 aa, Artificial sequence
  Protein classification predicting sequence
KPFSIEDVEVAPPKAYEVRIKMV

SEQ ID NO: 593 - protein, 10 aa, Artificial sequence
  Protein classification predicting sequence
PQCGKCRICK

SEQ ID NO: 594 - protein, 7 aa, Artificial sequence
  Protein classification predicting sequence
NYCLKND

SEQ ID NO: 595 - protein, 22 aa, Artificial sequence
  Protein classification predicting sequence
STFSQYTVVDENAVAKIDAASP

SEQ ID NO: 596 - protein, 13 aa, Artificial sequence
  Protein classification predicting sequence
AKKFGVTEFVNPK

SEQ ID NO: 597 - protein, 12 aa, Artificial sequence
  Protein classification predicting sequence
CAVFGLGGVGLS

SEQ ID NO: 598 - protein, 22 aa, Artificial sequence
  Protein classification predicting sequence
CAVFGLGGVGLSAVMGCKAAGA

SEQ ID NO: 599 - protein, 12 aa, Artificial sequence
  Protein classification predicting sequence
REIVKSGPKNLV

SEQ ID NO: 600 - protein, 8 aa, Artificial sequence
  Protein classification predicting sequence
NGAGILDD

SEQ ID NO: 601 - protein, 18 aa, Artificial sequence
  Protein classification predicting sequence
NGAGILDDHQIERTIAVN

SEQ ID NO: 602 - protein, 8 aa, Artificial sequence
  Protein classification predicting sequence
LAPITGVT

SEQ ID NO: 603 - protein, 11 aa, Artificial sequence
  Protein classification predicting sequence
AIEANKNGAIW

SEQ ID NO: 604 - protein, 8 aa, Artificial sequence
  Protein classification predicting sequence
ATNGGAHG

SEQ ID NO: 605 - protein, 14 aa, Artificial sequence
  Protein classification predicting sequence
IFVAGLGGIGLDTS

SEQ ID NO: 606 - protein, 20 aa, Artificial sequence
  Protein classification predicting sequence
SVTGFNAIYQVPVYSASKAA

SEQ ID NO: 607 - protein, 10 aa, Artificial sequence
  Protein classification predicting sequence
NQNGAIWKLD

SEQ ID NO: 608 - protein, 9 aa, Artificial sequence
  Protein classification predicting sequence
IPGEELPGV

SEQ ID NO: 609 - protein, 15 aa, Artificial sequence
  Protein classification predicting sequence
SARAFVGWYNGLPEN

SEQ ID NO: 610 - protein, 6 aa, Artificial sequence
  Protein classification predicting sequence
RPRKRL

SEQ ID NO: 611 - protein, 8 aa, Artificial sequence
  Protein classification predicting sequence
LPSGPRPG

SEQ ID NO: 612 - protein, 8 aa, Artificial sequence
  Protein classification predicting sequence
VGRRGPLQ

SEQ ID NO: 613 - protein, 9 aa, Artificial sequence
  Protein classification predicting sequence
AHVDIYEKQ

SEQ ID NO: 614 - protein, 24 aa, Artificial sequence
  Protein classification predicting sequence
VGRRGPLQVAFTIKELREMIQLPG

SEQ ID NO: 615 - protein, 11 aa, Artificial sequence
  Protein classification predicting sequence
GPAGFYTAQHL

SEQ ID NO: 616 - protein, 16 aa, Artificial sequence
  Protein classification predicting sequence
TAVILGQGNVALDVAR

SEQ ID NO: 617 - protein, 16 aa, Artificial sequence
  Protein classification predicting sequence
GLYCSGWVKRGPTGVI

SEQ ID NO: 618 - protein, 9 aa, Artificial sequence
  Protein classification predicting sequence
PVSFSDWEK

SEQ ID NO: 619 - protein, 19 aa, Artificial sequence
  Protein classification predicting sequence
CFYPADFSFVCPTELEDLQ

SEQ ID NO: 620 - protein, 6 aa, Artificial sequence
  Protein classification predicting sequence
ISKITY

SEQ ID NO: 621 - protein, 7 aa, Artificial sequence
  Protein classification predicting sequence
YAMIGDP

SEQ ID NO: 622 - protein, 9 aa, Artificial sequence
  Protein classification predicting sequence
MIGDPSQTI

SEQ ID NO: 623 - protein, 8 aa, Artificial sequence
  Protein classification predicting sequence
RNFDVLDE

SEQ ID NO: 624 - protein, 11 aa, Artificial sequence
  Protein classification predicting sequence
RGTFIIDPDGV

SEQ ID NO: 625 - protein, 7 aa, Artificial sequence
  Protein classification predicting sequence
GIGRDAS

SEQ ID NO: 626 - protein, 9 aa, Artificial sequence
  Protein classification predicting sequence
YEELQKLGV

SEQ ID NO: 627 - protein, 7 aa, Artificial sequence
  Protein classification predicting sequence
VSTDTHF

SEQ ID NO: 628 - protein, 9 aa, Artificial sequence
  Protein classification predicting sequence
PGEVCPAKW

SEQ ID NO: 629 - protein, 8 aa, Artificial sequence
  Protein classification predicting sequence
FKEVTQED

SEQ ID NO: 630 - protein, 24 aa, Artificial sequence
  Protein classification predicting sequence
VVCFYPADFSFVCPTELEDLQNQY

SEQ ID NO: 631 - protein, 22 aa, Artificial sequence
  Protein classification predicting sequence
SVSTDTHFVHKAWHDHSDAISK

SEQ ID NO: 632 - protein, 18 aa, Artificial sequence
  Protein classification predicting sequence
GLAQRGTFIIDPDGVVQA

SEQ ID NO: 633 - protein, 14 aa, Artificial sequence
  Protein classification predicting sequence
EINADGIGRDASTL

SEQ ID NO: 634 - protein, 14 aa, Artificial sequence
  Protein classification predicting sequence
VFDFTFSPEEMKQL

SEQ ID NO: 635 - protein, 10 aa, Artificial sequence
  Protein classification predicting sequence
EPVLLEEPVV

SEQ ID NO: 636 - protein, 22 aa, Artificial sequence
  Protein classification predicting sequence
RSPAQILLRWQVQRKVICIPKS

SEQ ID NO: 637 - protein, 28 aa, Artificial sequence
  Protein classification predicting sequence
GKAVPREELFVTSKLWNTKHHPEDVEPA

SEQ ID NO: 638 - protein, 16 aa, Artificial sequence
  Protein classification predicting sequence
GSPWRTMDASERGRLL

SEQ ID NO: 639 - protein, 14 aa, Artificial sequence
  Protein classification predicting sequence
KPAEQTPLSALYMG

SEQ ID NO: 640 - protein, 30 aa, Artificial sequence
  Protein classification predicting sequence
AARQAFQIGSPWRTMDASERGRLLYKLADL

SEQ ID NO: 641 - protein, 8 aa, Artificial sequence
  Protein classification predicting sequence
FYHQGQCC

SEQ ID NO: 642 - protein, 21 aa, Artificial sequence
  Protein classification predicting sequence
AARLAFSLGSVWRRMDASERG

SEQ ID NO: 643 - protein, 72 aa, Artificial sequence
  Protein classification predicting sequence
GIDKIAFTGSTEVGKLIQEAAGRSNLKRVTLELGGKSPNIIFADADLDYAVEQAHQGVFFNQGQCCTAGSRI

SEQ ID NO: 644 - protein, 50 aa, Artificial sequence
  Protein classification predicting sequence
EGAKLECGGKGLGRKGFFIEPTVFSNVTDDMRIAKEEIFGPVQEILRFKT

SEQ ID NO: 645 - protein, 12 aa, Artificial sequence
  Protein classification predicting sequence
GLREYSEVKTVT

SEQ ID NO: 646 - protein, 13 aa, Artificial sequence
  Protein classification predicting sequence
DAVSKKTFPTVNP

SEQ ID NO: 647 - protein, 9 aa, Artificial sequence
  Protein classification predicting sequence
LETLDNGKP

SEQ ID NO: 648 - protein, 11 aa, Artificial sequence
  Protein classification predicting sequence
VVMKVAEQTPL

SEQ ID NO: 649 - protein, 20 aa, Artificial sequence
  Protein classification predicting sequence
LRFRLQQLEALRRMVQEREK

SEQ ID NO: 650 - protein, 9 aa, Artificial sequence
  Protein classification predicting sequence
GQTCVAPDY

SEQ ID NO: 651 - protein, 10 aa, Artificial sequence
  Protein classification predicting sequence
SGMGRYHGKF

SEQ ID NO: 652 - protein, 7 aa, Artificial sequence
  Protein classification predicting sequence
YGLTGAV

SEQ ID NO: 653 - protein, 10 aa, Artificial sequence
  Protein classification predicting sequence
IVRQIGDALR

SEQ ID NO: 654 - protein, 47 aa, Artificial sequence
  Protein classification predicting sequence
GSDCGIVNVNIPTNGAEIGGAFGGEKATGGGREAGSDSWKQYMRRST

SEQ ID NO: 655 - protein, 7 aa, Artificial sequence
  Protein classification predicting sequence
WKGAPTT

SEQ ID NO: 656 - protein, 9 aa, Artificial sequence
  Protein classification predicting sequence
QGLSSSIFT

SEQ ID NO: 657 - protein, 13 aa, Artificial sequence
  Protein classification predicting sequence
GSDCGIVNVNIPT

SEQ ID NO: 658 - protein, 12 aa, Artificial sequence
  Protein classification predicting sequence
GAEIGGAFGGEK

SEQ ID NO: 659 - protein, 14 aa, Artificial sequence
  Protein classification predicting sequence
WKQYMRRSTCTINY

SEQ ID NO: 660 - protein, 9 aa, Artificial sequence
  Protein classification predicting sequence
LLELSGNNA

SEQ ID NO: 661 - protein, 7 aa, Artificial sequence
  Protein classification predicting sequence
IVMDDAD

SEQ ID NO: 662 - protein, 10 aa, Artificial sequence
  Protein classification predicting sequence
HPYLTQEKLI

SEQ ID NO: 663 - protein, 12 aa, Artificial sequence
  Protein classification predicting sequence
AKPEDPSLLEDP

SEQ ID NO: 664 - protein, 7 aa, Artificial sequence
  Protein classification predicting sequence
PNQQPEV

SEQ ID NO: 665 - protein, 34 aa, Artificial sequence
  Protein classification predicting sequence
ISYLVDLDMVLKCLRYYAGWADKYHGKTIPIDGD

SEQ ID NO: 666 - protein, 7 aa, Artificial sequence
  Protein classification predicting sequence
LGYIKSG

SEQ ID NO: 667 - protein, 16 aa, Artificial sequence
  Protein classification predicting sequence
NCYDVFGAQSPFGGYK

SEQ ID NO: 668 - protein, 30 aa, Artificial sequence
  Protein classification predicting sequence
KLGPALATGNVVVMKVAEQTPLTALYVANL

SEQ ID NO: 669 - protein, 24 aa, Artificial sequence
  Protein classification predicting sequence
SDADMDWAVEQAHFALFFNQGQCC

SEQ ID NO: 670 - protein, 21 aa, Artificial sequence
  Protein classification predicting sequence
EFVERSVARAKSRVVGNPFDS

SEQ ID NO: 671 - protein, 12 aa, Artificial sequence
  Protein classification predicting sequence
TEQGPQVDETQF

SEQ ID NO: 672 - protein, 28 aa, Artificial sequence
  Protein classification predicting sequence
YGLAAAVFTKDLDKANYLSQALQAGTVW

SEQ ID NO: 673 - protein, 9 aa, Artificial sequence
  Protein classification predicting sequence
GQCCCAGSR

SEQ ID NO: 674 - protein, 9 aa, Artificial sequence
  Protein classification predicting sequence
DASDRGRLL

SEQ ID NO: 675 - protein, 6 aa, Artificial sequence
  Protein classification predicting sequence
CCAGSR

SEQ ID NO: 676 - protein, 8 aa, Artificial sequence
  Protein classification predicting sequence
GQTCIAPD

SEQ ID NO: 677 - protein, 20 aa, Artificial sequence
  Protein classification predicting sequence
YPAHAAFGGYKQSGIGRENH

SEQ ID NO: 678 - protein, 11 aa, Artificial sequence
  Protein classification predicting sequence
YPAHAAFGGYK

SEQ ID NO: 679 - protein, 14 aa, Artificial sequence
  Protein classification predicting sequence
TLLSYNRNWRVCAL

SEQ ID NO: 680 - protein, 13 aa, Artificial sequence
  Protein classification predicting sequence
HPYLTQEKLIEYC

SEQ ID NO: 681 - protein, 8 aa, Artificial sequence
  Protein classification predicting sequence
LVDEGLVK

SEQ ID NO: 682 - protein, 33 aa, Artificial sequence
  Protein classification predicting sequence
KGIVVTAYSPLGSPDRPWAKPEDPSLLEDPRIK

SEQ ID NO: 683 - protein, 10 aa, Artificial sequence
  Protein classification predicting sequence
NGDLELDYIE

SEQ ID NO: 684 - protein, 11 aa, Artificial sequence
  Protein classification predicting sequence
VVRSTVLPGTV

SEQ ID NO: 685 - protein, 8 aa, Artificial sequence
  Protein classification predicting sequence
NVVIPILE

SEQ ID NO: 686 - protein, 27 aa, Artificial sequence
  Protein classification predicting sequence
SGKKAGVDFGVAVNPEFLRESTAIKDY

SEQ ID NO: 687 - protein, 11 aa, Artificial sequence
  Protein classification predicting sequence
AFGGSCLPKDV

SEQ ID NO: 688 - protein, 21 aa, Artificial sequence
  Protein classification predicting sequence
RKVALLGLSFKAGTDDLRESP

SEQ ID NO: 689 - protein, 12 aa, Artificial sequence
  Protein classification predicting sequence
LSIFDSNVEYAR

SEQ ID NO: 690 - protein, 9 aa, Artificial sequence
  Protein classification predicting sequence
SSTKIDLIN

SEQ ID NO: 691 - protein, 13 aa, Artificial sequence
  Protein classification predicting sequence
ICVGTPSKKNGDL

SEQ ID NO: 692 - protein, 9 aa, Artificial sequence
  Protein classification predicting sequence
ELDAPIIRK

SEQ ID NO: 693 - protein, 14 aa, Artificial sequence
  Protein classification predicting sequence
VAEMIKYTCNVWHA

SEQ ID NO: 694 - protein, 25 aa, Artificial sequence
  Protein classification predicting sequence
KVTFANEIGNIAKAVGVDGREVMDV

SEQ ID NO: 695 - protein, 25 aa, Artificial sequence
  Protein classification predicting sequence
YYMRPGFAFGGSCLPKDVRALTYRA

SEQ ID NO: 696 - protein, 13 aa, Artificial sequence
  Protein classification predicting sequence
YIESKIPHVSSLL

SEQ ID NO: 697 - protein, 13 aa, Artificial sequence
  Protein classification predicting sequence
LRGTTDFAEAIRA

SEQ ID NO: 698 - protein, 15 aa, Artificial sequence
  Protein classification predicting sequence
YIESVCREIGYVLRD

SEQ ID NO: 699 - protein, 15 aa, Artificial sequence
  Protein classification predicting sequence
RHTIVVRSTVLPGTV

SEQ ID NO: 700 - protein, 24 aa, Artificial sequence
  Protein classification predicting sequence
YARVHGANKDYIESKIPHVSSLLN

SEQ ID NO: 701 - protein, 7 aa, Artificial sequence
  Protein classification predicting sequence
NWAGIYS

SEQ ID NO: 702 - protein, 8 aa, Artificial sequence
  Protein classification predicting sequence
LGSISEQS

SEQ ID NO: 703 - protein, 10 aa, Artificial sequence
  Protein classification predicting sequence
FRSPLSVFKR

SEQ ID NO: 704 - protein, 9 aa, Artificial sequence
  Protein classification predicting sequence
HHMLLFGCN

SEQ ID NO: 705 - protein, 8 aa, Artificial sequence
  Protein classification predicting sequence
GVGFRVGG

SEQ ID NO: 706 - protein, 9 aa, Artificial sequence
  Protein classification predicting sequence
YFVLQVHYG

SEQ ID NO: 707 - protein, 8 aa, Artificial sequence
  Protein classification predicting sequence
FAYRVHTH

SEQ ID NO: 708 - protein, 12 aa, Artificial sequence
  Protein classification predicting sequence
DEMCNLYIMYYM

SEQ ID NO: 709 - protein, 7 aa, Artificial sequence
  Protein classification predicting sequence
FVYQQRG

SEQ ID NO: 710 - protein, 16 aa, Artificial sequence
  Protein classification predicting sequence
DGNYWVTDVALHQVFK

SEQ ID NO: 711 - protein, 12 aa, Artificial sequence
  Protein classification predicting sequence
EHRSVKKAGIEV

SEQ ID NO: 712 - protein, 29 aa, Artificial sequence
  Protein classification predicting sequence
DEEAFVIDFKPRASMDTVHHMLLFGCNMP

SEQ ID NO: 713 - protein, 9 aa, Artificial sequence
  Protein classification predicting sequence
VPHSLALVP

SEQ ID NO: 714 - protein, 12 aa, Artificial sequence
  Protein classification predicting sequence
GDAHTNTVWKFT

SEQ ID NO: 715 - protein, 9 aa, Artificial sequence
  Protein classification predicting sequence
EANIPIPVK

SEQ ID NO: 716 - protein, 11 aa, Artificial sequence
  Protein classification predicting sequence
GNAILVRDRIH

SEQ ID NO: 717 - protein, 8 aa, Artificial sequence
  Protein classification predicting sequence
LDWYKERL

SEQ ID NO: 718 - protein, 7 aa, Artificial sequence
  Protein classification predicting sequence
WDRERQN

SEQ ID NO: 719 - protein, 7 aa, Artificial sequence
  Protein classification predicting sequence
EILKKTK

SEQ ID NO: 720 - protein, 11 aa, Artificial sequence
  Protein classification predicting sequence
LLCGEPVDLST

SEQ ID NO: 721 - protein, 11 aa, Artificial sequence
  Protein classification predicting sequence
DYIMKNCLWQF

SEQ ID NO: 722 - protein, 7 aa, Artificial sequence
  Protein classification predicting sequence
VHGGQGC

SEQ ID NO: 723 - protein, 9 aa, Artificial sequence
  Protein classification predicting sequence
PIITTCSTE

SEQ ID NO: 724 - protein, 8 aa, Artificial sequence
  Protein classification predicting sequence
HTPSFVGS

SEQ ID NO: 725 - protein, 9 aa, Artificial sequence
  Protein classification predicting sequence
PMVRVGFPT

SEQ ID NO: 726 - protein, 8 aa, Artificial sequence
  Protein classification predicting sequence
AYEVSVQE

SEQ ID NO: 727 - protein, 7 aa, Artificial sequence
  Protein classification predicting sequence
RGVDCPY

SEQ ID NO: 728 - protein, 15 aa, Artificial sequence
  Protein classification predicting sequence
FLHIPHAEDIPNTVT

SEQ ID NO: 729 - protein, 10 aa, Artificial sequence
  Protein classification predicting sequence
PPPAREALAI

SEQ ID NO: 730 - protein, 7 aa, Artificial sequence
  Protein classification predicting sequence
PRYLYLA

SEQ ID NO: 731 - protein, 7 aa, Artificial sequence
  Protein classification predicting sequence
LRPYNFF

SEQ ID NO: 732 - protein, 8 aa, Artificial sequence
  Protein classification predicting sequence
SADSIYFR

SEQ ID NO: 733 - protein, 7 aa, Artificial sequence
  Protein classification predicting sequence
NYDYIWD

SEQ ID NO: 734 - protein, 24 aa, Artificial sequence
  Protein classification predicting sequence
DLVAWVTAGFLHIPHAEDIPNTVT

SEQ ID NO: 735 - protein, 8 aa, Artificial sequence
  Protein classification predicting sequence
ELVVGPLP

SEQ ID NO: 736 - protein, 8 aa, Artificial sequence
  Protein classification predicting sequence
RVGGRTYT

SEQ ID NO: 737 - protein, 6 aa, Artificial sequence
  Protein classification predicting sequence
ETYKVN

SEQ ID NO: 738 - protein, 8 aa, Artificial sequence
  Protein classification predicting sequence
PVTYVDQS

SEQ ID NO: 739 - protein, 8 aa, Artificial sequence
  Protein classification predicting sequence
YVISAIPP

SEQ ID NO: 740 - protein, 13 aa, Artificial sequence
  Protein classification predicting sequence
ERNQLIQRLPMGA

SEQ ID NO: 741 - protein, 10 aa, Artificial sequence
  Protein classification predicting sequence
PVHYEEKNWC

SEQ ID NO: 742 - protein, 8 aa, Artificial sequence
  Protein classification predicting sequence
DVPAVEIT

SEQ ID NO: 743 - protein, 6 aa, Artificial sequence
  Protein classification predicting sequence
ETLNHE

SEQ ID NO: 744 - protein, 8 aa, Artificial sequence
  Protein classification predicting sequence
YGRVIRQP

SEQ ID NO: 745 - protein, 14 aa, Artificial sequence
  Protein classification predicting sequence
WSGYMEGAVEAGER

SEQ ID NO: 746 - protein, 5 aa, Artificial sequence
  Protein classification predicting sequence
YPFRG

SEQ ID NO: 747 - protein, 12 aa, Artificial sequence
  Protein classification predicting sequence
LFVNINVTSEPH

SEQ ID NO: 748 - protein, 19 aa, Artificial sequence
  Protein classification predicting sequence
VSALWFLWYVKQCGGTTRI

SEQ ID NO: 749 - protein, 27 aa, Artificial sequence
  Protein classification predicting sequence
KPDGSLPAIMGFILARKADRLAKLHKE

SEQ ID NO: 750 - protein, 11 aa, Artificial sequence
  Protein classification predicting sequence
GLLKIIGFSTS

SEQ ID NO: 751 - protein, 14 aa, Artificial sequence
  Protein classification predicting sequence
VLEARDRVGGRTYT

SEQ ID NO: 752 - protein, 6 aa, Artificial sequence
  Protein classification predicting sequence
NNLWRT

SEQ ID NO: 753 - protein, 8 aa, Artificial sequence
  Protein classification predicting sequence
DNMGKEIP

SEQ ID NO: 754 - protein, 7 aa, Artificial sequence
  Protein classification predicting sequence
WDKMTMK

SEQ ID NO: 755 - protein, 17 aa, Artificial sequence
  Protein classification predicting sequence
AIPPTLTAKIHFRPELP

SEQ ID NO: 756 - protein, 20 aa, Artificial sequence
  Protein classification predicting sequence
VDVGGAYVGPTQNRILRLSK

SEQ ID NO: 757 - protein, 7 aa, Artificial sequence
  Protein classification predicting sequence
FPPVWNP

SEQ ID NO: 758 - protein, 12 aa, Artificial sequence
  Protein classification predicting sequence
HEVSALWFLWYV

SEQ ID NO: 759 - protein, 8 aa, Artificial sequence
  Protein classification predicting sequence
LPSVPGLL

SEQ ID NO: 760 - protein, 8 aa, Artificial sequence
  Protein classification predicting sequence
LVQYVKGK

SEQ ID NO: 761 - protein, 8 aa, Artificial sequence
  Protein classification predicting sequence
FAGTETAT

SEQ ID NO: 762 - protein, 9 aa, Artificial sequence
  Protein classification predicting sequence
EPESKDVPA

SEQ ID NO: 763 - protein, 7 aa, Artificial sequence
  Protein classification predicting sequence
YVGPTQN

SEQ ID NO: 764 - protein, 9 aa, Artificial sequence
  Protein classification predicting sequence
YEAKYVISA

SEQ ID NO: 765 - protein, 9 aa, Artificial sequence
  Protein classification predicting sequence
EPESVDVPA

SEQ ID NO: 766 - protein, 7 aa, Artificial sequence
  Protein classification predicting sequence
RNQKVKY

SEQ ID NO: 767 - protein, 8 aa, Artificial sequence
  Protein classification predicting sequence
FPPVWNPI

SEQ ID NO: 768 - protein, 12 aa, Artificial sequence
  Protein classification predicting sequence
FPPVWNPIAYLD

SEQ ID NO: 769 - protein, 8 aa, Artificial sequence
  Protein classification predicting sequence
AIMGFILA

SEQ ID NO: 770 - protein, 10 aa, Artificial sequence
  Protein classification predicting sequence
CELYAKVLGS

SEQ ID NO: 771 - protein, 20 aa, Artificial sequence
  Protein classification predicting sequence
PVHYEEKNWCEEQYSGGCYT

SEQ ID NO: 772 - protein, 13 aa, Artificial sequence
  Protein classification predicting sequence
KCDVVVVGGGISG

SEQ ID NO: 773 - protein, 11 aa, Artificial sequence
  Protein classification predicting sequence
VGGRTYTLRNQ

SEQ ID NO: 774 - protein, 17 aa, Artificial sequence
  Protein classification predicting sequence
IHHVKGKSYPFRGPFPP

SEQ ID NO: 775 - protein, 15 aa, Artificial sequence
  Protein classification predicting sequence
RVPLGSVIKCIVYYK

SEQ ID NO: 776 - protein, 7 aa, Artificial sequence
  Protein classification predicting sequence
RQPVGRI

SEQ ID NO: 777 - protein, 18 aa, Artificial sequence
  Protein classification predicting sequence
WSGYMEGAVEAGERAARE

SEQ ID NO: 778 - protein, 12 aa, Artificial sequence
  Protein classification predicting sequence
YVGPTQNRILRL

SEQ ID NO: 779 - protein, 6 aa, Artificial sequence
  Protein classification predicting sequence
YFPPGI

SEQ ID NO: 780 - protein, 6 aa, Artificial sequence
  Protein classification predicting sequence
TQYGRV

SEQ ID NO: 781 - protein, 46 aa, Artificial sequence
  Protein classification predicting sequence
ATLFVNLCVTAETHEVSALWFLWYVKQCGGTTRIISTTNGGQERKF

SEQ ID NO: 782 - protein, 8 aa, Artificial sequence
  Protein classification predicting sequence
RLTKEERL

SEQ ID NO: 783 - protein, 8 aa, Artificial sequence
  Protein classification predicting sequence
CELYAKVL

SEQ ID NO: 784 - protein, 18 aa, Artificial sequence
  Protein classification predicting sequence
KELGLETYKVNEVERLIH

SEQ ID NO: 785 - protein, 19 aa, Artificial sequence
  Protein classification predicting sequence
DDMGREIPSDAPWKAPLAE

SEQ ID NO: 786 - protein, 11 aa, Artificial sequence
  Protein classification predicting sequence
GCYTTYFPPGI

SEQ ID NO: 787 - protein, 10 aa, Artificial sequence
  Protein classification predicting sequence
VGGRTYTIRN

SEQ ID NO: 788 - protein, 11 aa, Artificial sequence
  Protein classification predicting sequence
SATALGFLAHK

SEQ ID NO: 789 - protein, 15 aa, Artificial sequence
  Protein classification predicting sequence
VIGGGISGLSAAKLL

SEQ ID NO: 790 - protein, 7 aa, Artificial sequence
  Protein classification predicting sequence
KYVDLGG

SEQ ID NO: 791 - protein, 15 aa, Artificial sequence
  Protein classification predicting sequence
YVGPTQNRILRLAKE

SEQ ID NO: 792 - protein, 10 aa, Artificial sequence
  Protein classification predicting sequence
GSVIKCIVYY

SEQ ID NO: 793 - protein, 11 aa, Artificial sequence
  Protein classification predicting sequence
PAIMGFILARK

SEQ ID NO: 794 - protein, 9 aa, Artificial sequence
  Protein classification predicting sequence
WSGYMEGAV

SEQ ID NO: 795 - protein, 8 aa, Artificial sequence
  Protein classification predicting sequence
AGERAARE

SEQ ID NO: 796 - protein, 20 aa, Artificial sequence
  Protein classification predicting sequence
WALGANLGINDLASIIEANH

SEQ ID NO: 797 - protein, 9 aa, Artificial sequence
  Protein classification predicting sequence
LNAALGWDF

SEQ ID NO: 798 - protein, 20 aa, Artificial sequence
  Protein classification predicting sequence
VRLKEMLPRYYKLRGWTEDG

SEQ ID NO: 799 - protein, 11 aa, Artificial sequence
  Protein classification predicting sequence
FTTFGLGADDY

SEQ ID NO: 800 - protein, 9 aa, Artificial sequence
  Protein classification predicting sequence
AYEQSGEAM

SEQ ID NO: 801 - protein, 8 aa, Artificial sequence
  Protein classification predicting sequence
TEGPEYES

SEQ ID NO: 802 - protein, 11 aa, Artificial sequence
  Protein classification predicting sequence
RLAWHSAGTFD

SEQ ID NO: 803 - protein, 7 aa, Artificial sequence
  Protein classification predicting sequence
IVDAKSG

SEQ ID NO: 804 - protein, 7 aa, Artificial sequence
  Protein classification predicting sequence
HRHLPEI

SEQ ID NO: 805 - protein, 7 aa, Artificial sequence
  Protein classification predicting sequence
ELLAAGT

SEQ ID NO: 806 - protein, 7 aa, Artificial sequence
  Protein classification predicting sequence
PGCYPTA

SEQ ID NO: 807 - protein, 14 aa, Artificial sequence
  Protein classification predicting sequence
LIADCKSGVSGAGR

SEQ ID NO: 808 - protein, 10 aa, Artificial sequence
  Protein classification predicting sequence
SVIDNLVKGA

SEQ ID NO: 809 - protein, 6 aa, Artificial sequence
  Protein classification predicting sequence
GQAVQN

SEQ ID NO: 810 - protein, 11 aa, Artificial sequence
  Protein classification predicting sequence
IANPGCYATAT

SEQ ID NO: 811 - protein, 7 aa, Artificial sequence
  Protein classification predicting sequence
LCLPDDA

SEQ ID NO: 812 - protein, 7 aa, Artificial sequence
  Protein classification predicting sequence
NPGCYPT

SEQ ID NO: 813 - protein, 10 aa, Artificial sequence
  Protein classification predicting sequence
NPGCYPTGAI

SEQ ID NO: 814 - protein, 14 aa, Artificial sequence
  Protein classification predicting sequence
DNLGKGASGAAVQN

SEQ ID NO: 815 - protein, 8 aa, Artificial sequence
  Protein classification predicting sequence
GNPGCYPT

SEQ ID NO: 816 - protein, 6 aa, Artificial sequence
  Protein classification predicting sequence
PHLVPM

SEQ ID NO: 817 - protein, 11 aa, Artificial sequence
  Protein classification predicting sequence
DNLVKGASGQA

SEQ ID NO: 818 - protein, 9 aa, Artificial sequence
  Protein classification predicting sequence
CDVVFFATP

SEQ ID NO: 819 - protein, 8 aa, Artificial sequence
  Protein classification predicting sequence
IDLAADFR

SEQ ID NO: 820 - protein, 9 aa, Artificial sequence
  Protein classification predicting sequence
KGAAGQAVQ

SEQ ID NO: 821 - protein, 8 aa, Artificial sequence
  Protein classification predicting sequence
QAVQCMNI

SEQ ID NO: 822 - protein, 7 aa, Artificial sequence
  Protein classification predicting sequence
GATGYGG

SEQ ID NO: 823 - protein, 7 aa, Artificial sequence
  Protein classification predicting sequence
HTPEIEQ

SEQ ID NO: 824 - protein, 6 aa, Artificial sequence
  Protein classification predicting sequence
RGIMAT

SEQ ID NO: 825 - protein, 10 aa, Artificial sequence
  Protein classification predicting sequence
DAKSGVSGAG

SEQ ID NO: 826 - protein, 7 aa, Artificial sequence
  Protein classification predicting sequence
RLLSQHP

SEQ ID NO: 827 - protein, 8 aa, Artificial sequence
  Protein classification predicting sequence
HFSEMNEN

SEQ ID NO: 828 - protein, 7 aa, Artificial sequence
  Protein classification predicting sequence
GVSGAGR

SEQ ID NO: 829 - protein, 7 aa, Artificial sequence
  Protein classification predicting sequence
IIGATGY

SEQ ID NO: 830 - protein, 8 aa, Artificial sequence
  Protein classification predicting sequence
PTAALLAL

SEQ ID NO: 831 - protein, 6 aa, Artificial sequence
  Protein classification predicting sequence
VFFATP

SEQ ID NO: 832 - protein, 6 aa, Artificial sequence
  Protein classification predicting sequence
PMTRGI

SEQ ID NO: 833 - protein, 7 aa, Artificial sequence
  Protein classification predicting sequence
GSNFCDI

SEQ ID NO: 834 - protein, 6 aa, Artificial sequence
  Protein classification predicting sequence
YGLPEL

SEQ ID NO: 835 - protein, 7 aa, Artificial sequence
  Protein classification predicting sequence
KGASGQA

SEQ ID NO: 836 - protein, 8 aa, Artificial sequence
  Protein classification predicting sequence
KGASGQAV

SEQ ID NO: 837 - protein, 7 aa, Artificial sequence
  Protein classification predicting sequence
HRHQPEI

SEQ ID NO: 838 - protein, 7 aa, Artificial sequence
  Protein classification predicting sequence
PETRSVR

SEQ ID NO: 839 - protein, 15 aa, Artificial sequence
  Protein classification predicting sequence
EDNLLKGAAAQAVQC

SEQ ID NO: 840 - protein, 7 aa, Artificial sequence
  Protein classification predicting sequence
GASGYAG

SEQ ID NO: 841 - protein, 7 aa, Artificial sequence
  Protein classification predicting sequence
WAYGFAE

SEQ ID NO: 842 - protein, 11 aa, Artificial sequence
  Protein classification predicting sequence
NAVSGYTGGGK

SEQ ID NO: 843 - protein, 6 aa, Artificial sequence
  Protein classification predicting sequence
HKHVPE

SEQ ID NO: 844 - protein, 6 aa, Artificial sequence
  Protein classification predicting sequence
ISNPGC

SEQ ID NO: 845 - protein, 6 aa, Artificial sequence
  Protein classification predicting sequence
NAPFVR

SEQ ID NO: 846 - protein, 11 aa, Artificial sequence
  Protein classification predicting sequence
FKAYGVAGHRH

SEQ ID NO: 847 - protein, 10 aa, Artificial sequence
  Protein classification predicting sequence
PETRSVRGAN

SEQ ID NO: 848 - protein, 14 aa, Artificial sequence
  Protein classification predicting sequence
PETRSVRGANLCRI

SEQ ID NO: 849 - protein, 15 aa, Artificial sequence
  Protein classification predicting sequence
GASGYAGGEILRLLL

SEQ ID NO: 850 - protein, 6 aa, Artificial sequence
  Protein classification predicting sequence
IAVPGC

SEQ ID NO: 851 - protein, 6 aa, Artificial sequence
  Protein classification predicting sequence
PGCFPT

SEQ ID NO: 852 - protein, 7 aa, Artificial sequence
  Protein classification predicting sequence
VSFTPVL

SEQ ID NO: 853 - protein, 9 aa, Artificial sequence
  Protein classification predicting sequence
KGTAGAAVQ

SEQ ID NO: 854 - protein, 6 aa, Artificial sequence
  Protein classification predicting sequence
YGLAEW

SEQ ID NO: 855 - protein, 7 aa, Artificial sequence
  Protein classification predicting sequence
VIFTPHL

SEQ ID NO: 856 - protein, 6 aa, Artificial sequence
  Protein classification predicting sequence
CRLKPG

SEQ ID NO: 857 - protein, 19 aa, Artificial sequence
  Protein classification predicting sequence
FYEKYYGFTHQYPELLEQA

SEQ ID NO: 858 - protein, 16 aa, Artificial sequence
  Protein classification predicting sequence
DAGKLISDLHPQLKGI

SEQ ID NO: 859 - protein, 7 aa, Artificial sequence
  Protein classification predicting sequence
VSHDLAP

SEQ ID NO: 860 - protein, 11 aa, Artificial sequence
  Protein classification predicting sequence
LIAVPGCYPTA

SEQ ID NO: 861 - protein, 7 aa, Artificial sequence
  Protein classification predicting sequence
QLALKPL

SEQ ID NO: 862 - protein, 15 aa, Artificial sequence
  Protein classification predicting sequence
KPLVRLYDKGVPALK

SEQ ID NO: 863 - protein, 18 aa, Artificial sequence
  Protein classification predicting sequence
VATEDNLLKGAAAQAVQC

SEQ ID NO: 864 - protein, 7 aa, Artificial sequence
  Protein classification predicting sequence
GASGYTG

SEQ ID NO: 865 - protein, 13 aa, Artificial sequence
  Protein classification predicting sequence
GCPGCYPTASLLA

SEQ ID NO: 866 - protein, 6 aa, Artificial sequence
  Protein classification predicting sequence
DNLVKG

SEQ ID NO: 867 - protein, 7 aa, Artificial sequence
  Protein classification predicting sequence
INAVSGV

SEQ ID NO: 868 - protein, 7 aa, Artificial sequence
  Protein classification predicting sequence
HQHIPEI

SEQ ID NO: 869 - protein, 7 aa, Artificial sequence
  Protein classification predicting sequence
RGILSTI

SEQ ID NO: 870 - protein, 7 aa, Artificial sequence
  Protein classification predicting sequence
SNYCDIG

SEQ ID NO: 871 - protein, 7 aa, Artificial sequence
  Protein classification predicting sequence
VYGLVEL

SEQ ID NO: 872 - protein, 7 aa, Artificial sequence
  Protein classification predicting sequence
GYTGAEL

SEQ ID NO: 873 - protein, 9 aa, Artificial sequence
  Protein classification predicting sequence
HRHLPEIRQ

SEQ ID NO: 874 - protein, 8 aa, Artificial sequence
  Protein classification predicting sequence
LIEPAVTV

SEQ ID NO: 875 - protein, 9 aa, Artificial sequence
  Protein classification predicting sequence
YLMPEGQLP

SEQ ID NO: 876 - protein, 8 aa, Artificial sequence
  Protein classification predicting sequence
AIDNLVKG

SEQ ID NO: 877 - protein, 25 aa, Artificial sequence
  Protein classification predicting sequence
AIDNLVKGTAGAAVQSMNLALGWPE

SEQ ID NO: 878 - protein, 12 aa, Artificial sequence
  Protein classification predicting sequence
LGEHHPHLTPLA

SEQ ID NO: 879 - protein, 7 aa, Artificial sequence
  Protein classification predicting sequence
DNFKAYG

SEQ ID NO: 880 - protein, 9 aa, Artificial sequence
  Protein classification predicting sequence
WYGMTHAAP

SEQ ID NO: 881 - protein, 7 aa, Artificial sequence
  Protein classification predicting sequence
AVYGLPE

SEQ ID NO: 882 - protein, 7 aa, Artificial sequence
  Protein classification predicting sequence
EASDNFK

SEQ ID NO: 883 - protein, 8 aa, Artificial sequence
  Protein classification predicting sequence
CRIAVHRP

SEQ ID NO: 884 - protein, 11 aa, Artificial sequence
  Protein classification predicting sequence
GYGAIELIRLL

SEQ ID NO: 885 - protein, 10 aa, Artificial sequence
  Protein classification predicting sequence
IVFLATPAGV

SEQ ID NO: 886 - protein, 10 aa, Artificial sequence
  Protein classification predicting sequence
VFDLSGAFRV

SEQ ID NO: 887 - protein, 6 aa, Artificial sequence
  Protein classification predicting sequence
YGFEHQ

SEQ ID NO: 888 - protein, 8 aa, Artificial sequence
  Protein classification predicting sequence
QLSLKPLI

SEQ ID NO: 889 - protein, 10 aa, Artificial sequence
  Protein classification predicting sequence
VIFTPHLGNF

SEQ ID NO: 890 - protein, 19 aa, Artificial sequence
  Protein classification predicting sequence
EDNLLKGAAAQAVQCANIR

SEQ ID NO: 891 - protein, 6 aa, Artificial sequence
  Protein classification predicting sequence
SDLHPQ

SEQ ID NO: 892 - protein, 10 aa, Artificial sequence
  Protein classification predicting sequence
KGIVDLPLQP

SEQ ID NO: 893 - protein, 7 aa, Artificial sequence
  Protein classification predicting sequence
VFDLSGA

SEQ ID NO: 894 - protein, 17 aa, Artificial sequence
  Protein classification predicting sequence
WPVINATSGVSGAGRKA

SEQ ID NO: 895 - protein, 6 aa, Artificial sequence
  Protein classification predicting sequence
SLQPYG

SEQ ID NO: 896 - protein, 8 aa, Artificial sequence
  Protein classification predicting sequence
FTPHLGNF

SEQ ID NO: 897 - protein, 16 aa, Artificial sequence
  Protein classification predicting sequence
TEDNLLKGAAAQAVQC

SEQ ID NO: 898 - protein, 9 aa, Artificial sequence
  Protein classification predicting sequence
VGIVGGSGY

SEQ ID NO: 899 - protein, 7 aa, Artificial sequence
  Protein classification predicting sequence
DLSADYR

SEQ ID NO: 900 - protein, 7 aa, Artificial sequence
  Protein classification predicting sequence
DLSADFR

SEQ ID NO: 901 - protein, 7 aa, Artificial sequence
  Protein classification predicting sequence
GTSGGGR

SEQ ID NO: 902 - protein, 6 aa, Artificial sequence
  Protein classification predicting sequence
PGCYPT

SEQ ID NO: 903 - protein, 8 aa, Artificial sequence
  Protein classification predicting sequence
GLTFVPHL

SEQ ID NO: 904 - protein, 5 aa, Artificial sequence
  Protein classification predicting sequence
PMIRG

SEQ ID NO: 905 - protein, 6 aa, Artificial sequence
  Protein classification predicting sequence
AVQCMN

SEQ ID NO: 906 - protein, 12 aa, Artificial sequence
  Protein classification predicting sequence
LCLPDDASKEAV

SEQ ID NO: 907 - protein, 9 aa, Artificial sequence
  Protein classification predicting sequence
QGMIVQVPL

SEQ ID NO: 908 - protein, 8 aa, Artificial sequence
  Protein classification predicting sequence
KSGVSGAG

SEQ ID NO: 909 - protein, 6 aa, Artificial sequence
  Protein classification predicting sequence
AVQNMN

SEQ ID NO: 910 - protein, 8 aa, Artificial sequence
  Protein classification predicting sequence
HRHQPEIA

SEQ ID NO: 911 - protein, 44 aa, Artificial sequence
  Protein classification predicting sequence
QWPVINATSGVSGAGRKAAISNSFCEVSLQPYGVFTHRHQPEIA

SEQ ID NO: 912 - protein, 23 aa, Artificial sequence
  Protein classification predicting sequence
VIFTPHLGNFPRGILETITCRLK

SEQ ID NO: 913 - protein, 35 aa, Artificial sequence
  Protein classification predicting sequence
KPLVRLYDKGVPALKNVVGLPFCDIGFAVQGEHLI

SEQ ID NO: 914 - protein, 24 aa, Artificial sequence
  Protein classification predicting sequence
VATEDNLLKGAAAQAVQCANIRFG

SEQ ID NO: 915 - protein, 7 aa, Artificial sequence
  Protein classification predicting sequence
SFCEVSL

SEQ ID NO: 916 - protein, 6 aa, Artificial sequence
  Protein classification predicting sequence
RGILAT

SEQ ID NO: 917 - protein, 7 aa, Artificial sequence
  Protein classification predicting sequence
DLSGAFR

SEQ ID NO: 918 - protein, 101 aa, Artificial sequence
  Protein classification predicting sequence
DNNGTKLISNPGCFPTATLLALHPLISEKIVDLSSIIIDAKTGVSGAGRSLSQRVHFSEMNENLSAYAIGNHKHKPEIEQYLSIIAGQDVSVIFTPHLVPM

SEQ ID NO: 919 - protein, 8 aa, Artificial sequence
  Protein classification predicting sequence
FTPHLVPM

SEQ ID NO: 920 - protein, 10 aa, Artificial sequence
  Protein classification predicting sequence
RGILSTIYVK

SEQ ID NO: 921 - protein, 8 aa, Artificial sequence
  Protein classification predicting sequence
SIVGITGY

SEQ ID NO: 922 - protein, 7 aa, Artificial sequence
  Protein classification predicting sequence
KGAAGQA

SEQ ID NO: 923 - protein, 6 aa, Artificial sequence
  Protein classification predicting sequence
GQAIQN

SEQ ID NO: 924 - protein, 6 aa, Artificial sequence
  Protein classification predicting sequence
ADEPFV

SEQ ID NO: 925 - protein, 8 aa, Artificial sequence
  Protein classification predicting sequence
RLLLGHPA

SEQ ID NO: 926 - protein, 11 aa, Artificial sequence
  Protein classification predicting sequence
AVSGTSGAGRA

SEQ ID NO: 927 - protein, 7 aa, Artificial sequence
  Protein classification predicting sequence
HRHTPEI

SEQ ID NO: 928 - protein, 8 aa, Artificial sequence
  Protein classification predicting sequence
QSMNLALG

SEQ ID NO: 929 - protein, 6 aa, Artificial sequence
  Protein classification predicting sequence
HRHTPE

SEQ ID NO: 930 - protein, 9 aa, Artificial sequence
  Protein classification predicting sequence
SIIVDAKSG

SEQ ID NO: 931 - protein, 15 aa, Artificial sequence
  Protein classification predicting sequence
SIIVDAKSGLTGAGK

SEQ ID NO: 932 - protein, 7 aa, Artificial sequence
  Protein classification predicting sequence
IQFSTSL

SEQ ID NO: 933 - protein, 8 aa, Artificial sequence
  Protein classification predicting sequence
AYNEKTNV

SEQ ID NO: 934 - protein, 8 aa, Artificial sequence
  Protein classification predicting sequence
DLSADYRF

SEQ ID NO: 935 - protein, 7 aa, Artificial sequence
  Protein classification predicting sequence
YPQTKWA

SEQ ID NO: 936 - protein, 7 aa, Artificial sequence
  Protein classification predicting sequence
DERTGRV

SEQ ID NO: 937 - protein, 7 aa, Artificial sequence
  Protein classification predicting sequence
GASGYGG

SEQ ID NO: 938 - protein, 14 aa, Artificial sequence
  Protein classification predicting sequence
GASGYGGVQLVRLL

SEQ ID NO: 939 - protein, 6 aa, Artificial sequence
  Protein classification predicting sequence
QCLNLM

SEQ ID NO: 940 - protein, 8 aa, Artificial sequence
  Protein classification predicting sequence
GQAVQNMN

SEQ ID NO: 941 - protein, 7 aa, Artificial sequence
  Protein classification predicting sequence
QNMNIMF

SEQ ID NO: 942 - protein, 10 aa, Artificial sequence
  Protein classification predicting sequence
GCYPTASQLA

SEQ ID NO: 943 - protein, 7 aa, Artificial sequence
  Protein classification predicting sequence
QWPVINA

SEQ ID NO: 944 - protein, 9 aa, Artificial sequence
  Protein classification predicting sequence
LATAHEVSH

SEQ ID NO: 945 - protein, 7 aa, Artificial sequence
  Protein classification predicting sequence
VQGEHLI

SEQ ID NO: 946 - protein, 17 aa, Artificial sequence
  Protein classification predicting sequence
SAIDNLLKGASSQAMQC

SEQ ID NO: 947 - protein, 5 aa, Artificial sequence
  Protein classification predicting sequence
NPGCY

SEQ ID NO: 948 - protein, 7 aa, Artificial sequence
  Protein classification predicting sequence
KPLVRLY

SEQ ID NO: 949 - protein, 6 aa, Artificial sequence
  Protein classification predicting sequence
DGLGML

SEQ ID NO: 950 - protein, 8 aa, Artificial sequence
  Protein classification predicting sequence
HSLSPVMH

SEQ ID NO: 951 - protein, 8 aa, Artificial sequence
  Protein classification predicting sequence
LGLDYVYL

SEQ ID NO: 952 - protein, 6 aa, Artificial sequence
  Protein classification predicting sequence
VTIPHK

SEQ ID NO: 953 - protein, 7 aa, Artificial sequence
  Protein classification predicting sequence
NVTVPFK

SEQ ID NO: 954 - protein, 10 aa, Artificial sequence
  Protein classification predicting sequence
QGAKAFEIWT

SEQ ID NO: 955 - protein, 6 aa, Artificial sequence
  Protein classification predicting sequence
VIGNPI

SEQ ID NO: 956 - protein, 7 aa, Artificial sequence
  Protein classification predicting sequence
SRAEELA

SEQ ID NO: 957 - protein, 7 aa, Artificial sequence
  Protein classification predicting sequence
YAVFGNP

SEQ ID NO: 958 - protein, 6 aa, Artificial sequence
  Protein classification predicting sequence
PFKQEA

SEQ ID NO: 959 - protein, 7 aa, Artificial sequence
  Protein classification predicting sequence
GVLLPLL

SEQ ID NO: 960 - protein, 6 aa, Artificial sequence
  Protein classification predicting sequence
GGAVRG

SEQ ID NO: 961 - protein, 6 aa, Artificial sequence
  Protein classification predicting sequence
GDNTDG

SEQ ID NO: 962 - protein, 7 aa, Artificial sequence
  Protein classification predicting sequence
DGLGMLV

SEQ ID NO: 963 - protein, 14 aa, Artificial sequence
  Protein classification predicting sequence
RLEDGRLLGDNTDG

SEQ ID NO: 964 - protein, 10 aa, Artificial sequence
  Protein classification predicting sequence
GNPIAHSKSP

SEQ ID NO: 965 - protein, 9 aa, Artificial sequence
  Protein classification predicting sequence
NTLKKLDDG

SEQ ID NO: 966 - protein, 9 aa, Artificial sequence
  Protein classification predicting sequence
GMLVAQAAH

SEQ ID NO: 967 - protein, 8 aa, Artificial sequence
  Protein classification predicting sequence
NVTLPFKE

SEQ ID NO: 968 - protein, 6 aa, Artificial sequence
  Protein classification predicting sequence
NTDGIG

SEQ ID NO: 969 - protein, 6 aa, Artificial sequence
  Protein classification predicting sequence
TIPHKE

SEQ ID NO: 970 - protein, 7 aa, Artificial sequence
  Protein classification predicting sequence
AKLGLDY

SEQ ID NO: 971 - protein, 7 aa, Artificial sequence
  Protein classification predicting sequence
YQGAEAF

SEQ ID NO: 972 - protein, 12 aa, Artificial sequence
  Protein classification predicting sequence
NDITQVKNIAIE

SEQ ID NO: 973 - protein, 14 aa, Artificial sequence
  Protein classification predicting sequence
DGLGMLVGQAAASY

SEQ ID NO: 974 - protein, 8 aa, Artificial sequence
  Protein classification predicting sequence
QFALQEGV

SEQ ID NO: 975 - protein, 29 aa, Artificial sequence
  Protein classification predicting sequence
KTILLLGAGGAVRGVIPVLKEHRPARIVI

SEQ ID NO: 976 - protein, 9 aa, Artificial sequence
  Protein classification predicting sequence
AHSKSPQIH

SEQ ID NO: 977 - protein, 7 aa, Artificial sequence
  Protein classification predicting sequence
LAYDMVY

SEQ ID NO: 978 - protein, 8 aa, Artificial sequence
  Protein classification predicting sequence
PDIRPVIE

SEQ ID NO: 979 - protein, 10 aa, Artificial sequence
  Protein classification predicting sequence
PARIVIANRT

SEQ ID NO: 980 - protein, 9 aa, Artificial sequence
  Protein classification predicting sequence
IEYERICAD

SEQ ID NO: 981 - protein, 6 aa, Artificial sequence
  Protein classification predicting sequence
RICADI

SEQ ID NO: 982 - protein, 28 aa, Artificial sequence
  Protein classification predicting sequence
GFAQAVSTFFETGGCGANVTVPFKQEAF

SEQ ID NO: 983 - protein, 12 aa, Artificial sequence
  Protein classification predicting sequence
LLLGAGGAVRGV

SEQ ID NO: 984 - protein, 12 aa, Artificial sequence
  Protein classification predicting sequence
DGLGMLVEQAAE

SEQ ID NO: 985 - protein, 6 aa, Artificial sequence
  Protein classification predicting sequence
VNTVVN

SEQ ID NO: 986 - protein, 24 aa, Artificial sequence
  Protein classification predicting sequence
YAVFGNPIAHSKSPFIHQQFAQQL

SEQ ID NO: 987 - protein, 11 aa, Artificial sequence
  Protein classification predicting sequence
HPYGRVLAPIN

SEQ ID NO: 988 - protein, 37 aa, Artificial sequence
  Protein classification predicting sequence
FIRPGLRILLIGAGGASRGVLLPLLSLDCAVTITNRT

SEQ ID NO: 989 - protein, 13 aa, Artificial sequence
  Protein classification predicting sequence
EFDLIINATSSGI

SEQ ID NO: 990 - protein, 8 aa, Artificial sequence
  Protein classification predicting sequence
LLWHGVLP

SEQ ID NO: 991 - protein, 15 aa, Artificial sequence
  Protein classification predicting sequence
KFAVIGNPISHSLSP

SEQ ID NO: 992 - protein, 13 aa, Artificial sequence
  Protein classification predicting sequence
TIPHKERIIPYLD

SEQ ID NO: 993 - protein, 16 aa, Artificial sequence
  Protein classification predicting sequence
AYILILGAGGASKGIA

SEQ ID NO: 994 - protein, 8 aa, Artificial sequence
  Protein classification predicting sequence
LTVANRTM

SEQ ID NO: 995 - protein, 8 aa, Artificial sequence
  Protein classification predicting sequence
INTTPAGM

SEQ ID NO: 996 - protein, 9 aa, Artificial sequence
  Protein classification predicting sequence
IYNGLDMFV

SEQ ID NO: 997 - protein, 11 aa, Artificial sequence
  Protein classification predicting sequence
QGAESFKIWTN

SEQ ID NO: 998 - protein, 15 aa, Artificial sequence
  Protein classification predicting sequence
HSKSPFIHTLFARQT

SEQ ID NO: 999 - protein, 8 aa, Artificial sequence
  Protein classification predicting sequence
YDMMYGKG

SEQ ID NO: 1000 - protein, 11 aa, Artificial sequence
  Protein classification predicting sequence
DGLGMLVGQAA

SEQ ID NO: 1001 - protein, 23 aa, Artificial sequence
  Protein classification predicting sequence
DGLGMLVGQAAESFMLWRGLRPG

SEQ ID NO: 1002 - protein, 13 aa, Artificial sequence
  Protein classification predicting sequence
KQILRELRKNLEG

SEQ ID NO: 1003 - protein, 7 aa, Artificial sequence
  Protein classification predicting sequence
GNPISHS

SEQ ID NO: 1004 - protein, 7 aa, Artificial sequence
  Protein classification predicting sequence
CYDMFYQ

SEQ ID NO: 1005 - protein, 15 aa, Artificial sequence
  Protein classification predicting sequence
CGTSRNTLEMIRNSG

SEQ ID NO: 1006 - protein, 8 aa, Artificial sequence
  Protein classification predicting sequence
HWGFDDPA

SEQ ID NO: 1007 - protein, 14 aa, Artificial sequence
  Protein classification predicting sequence
CTGNSCRSQMAEGW

SEQ ID NO: 1008 - protein, 8 aa, Artificial sequence
  Protein classification predicting sequence
FQRVRDEI

SEQ ID NO: 1009 - protein, 38 aa, Artificial sequence
  Protein classification predicting sequence
WNVYSAGIETHGVNPKAIEAMKEVDIDISNHTSDLIDN

SEQ ID NO: 1010 - protein, 16 aa, Artificial sequence
  Protein classification predicting sequence
ILKQSDLVVTLCSDAD

SEQ ID NO: 1011 - protein, 15 aa, Artificial sequence
  Protein classification predicting sequence
NCPILPPNVKKEHWG

SEQ ID NO: 1012 - protein, 22 aa, Artificial sequence
  Protein classification predicting sequence
DPAGKEWSEFQRVRDEIKLAIE

SEQ ID NO: 1013 - protein, 8 aa, Artificial sequence
  Protein classification predicting sequence
INGQFPGP

SEQ ID NO: 1014 - protein, 7 aa, Artificial sequence
  Protein classification predicting sequence
RWIGEPQ

SEQ ID NO: 1015 - protein, 12 aa, Artificial sequence
  Protein classification predicting sequence
ISQCAINPGETF

SEQ ID NO: 1016 - protein, 14 aa, Artificial sequence
  Protein classification predicting sequence
GMQRSAGLYGSLIV

SEQ ID NO: 1017 - protein, 9 aa, Artificial sequence
  Protein classification predicting sequence
NLLLSDWWH

SEQ ID NO: 1018 - protein, 12 aa, Artificial sequence
  Protein classification predicting sequence
VVEADGNYVQPF

SEQ ID NO: 1019 - protein, 11 aa, Artificial sequence
  Protein classification predicting sequence
DIYSGESYSVL

SEQ ID NO: 1020 - protein, 7 aa, Artificial sequence
  Protein classification predicting sequence
MGSPKPP

SEQ ID NO: 1021 - protein, 10 aa, Artificial sequence
  Protein classification predicting sequence
NLKNPPLRNT

SEQ ID NO: 1022 - protein, 22 aa, Artificial sequence
  Protein classification predicting sequence
DNPGVWAFHCHIEPHLHMGMGV

SEQ ID NO: 1023 - protein, 16 aa, Artificial sequence
  Protein classification predicting sequence
GVVGLITPWNYPLLMA

SEQ ID NO: 1024 - protein, 8 aa, Artificial sequence
  Protein classification predicting sequence
AAQLVKPV

SEQ ID NO: 1025 - protein, 14 aa, Artificial sequence
  Protein classification predicting sequence
KFISTAKSEGATIL

SEQ ID NO: 1026 - protein, 7 aa, Artificial sequence
  Protein classification predicting sequence
NCSQPCF

SEQ ID NO: 1027 - protein, 13 aa, Artificial sequence
  Protein classification predicting sequence
KRSGFGRELGEWG

SEQ ID NO: 1028 - protein, 8 aa, Artificial sequence
  Protein classification predicting sequence
PWGWYKSP

SEQ ID NO: 1029 - protein, 12 aa, Artificial sequence
  Protein classification predicting sequence
RQLFIDGEWREP

SEQ ID NO: 1030 - protein, 6 aa, Artificial sequence
  Protein classification predicting sequence
TSMQIW

SEQ ID NO: 1031 - protein, 9 aa, Artificial sequence
  Protein classification predicting sequence
EGARVLCGG

SEQ ID NO: 1032 - protein, 7 aa, Artificial sequence
  Protein classification predicting sequence
SEGATIL

SEQ ID NO: 1033 - protein, 13 aa, Artificial sequence
  Protein classification predicting sequence
ELGGKSPLIVFDD

SEQ ID NO: 1034 - protein, 9 aa, Artificial sequence
  Protein classification predicting sequence
NYLNIKQVT

SEQ ID NO: 1035 - protein, 9 aa, Artificial sequence
  Protein classification predicting sequence
EVLGVSVDS

SEQ ID NO: 1036 - protein, 10 aa, Artificial sequence
  Protein classification predicting sequence
LLRNGPGMHT

SEQ ID NO: 1037 - protein, 25 aa, Artificial sequence
  Protein classification predicting sequence
NIEANRIVVSEFGTMAYPDPCKNIF

SEQ ID NO: 1038 - protein, 11 aa, Artificial sequence
  Protein classification predicting sequence
KAFSYLSHTIP

SEQ ID NO: 1039 - protein, 11 aa, Artificial sequence
  Protein classification predicting sequence
FTDNCLINIMK

SEQ ID NO: 1040 - protein, 15 aa, Artificial sequence
  Protein classification predicting sequence
KYVAVNLATSHPHYD

SEQ ID NO: 1041 - protein, 8 aa, Artificial sequence
  Protein classification predicting sequence
PSYYHSFG

SEQ ID NO: 1042 - protein, 7 aa, Artificial sequence
  Protein classification predicting sequence
NAYEEDG

SEQ ID NO: 1043 - protein, 9 aa, Artificial sequence
  Protein classification predicting sequence
PFLLILDAK

SEQ ID NO: 1044 - protein, 10 aa, Artificial sequence
  Protein classification predicting sequence
KGRVVNISSM

SEQ ID NO: 1045 - protein, 24 aa, Artificial sequence
  Protein classification predicting sequence
PARSPYCITKFGVEAFSDCLRYEM

SEQ ID NO: 1046 - protein, 8 aa, Artificial sequence
  Protein classification predicting sequence
VEPGNFIA

SEQ ID NO: 1047 - protein, 11 aa, Artificial sequence
  Protein classification predicting sequence
VAEVNLWGTVR

SEQ ID NO: 1048 - protein, 8 aa, Artificial sequence
  Protein classification predicting sequence
GGSSSING

SEQ ID NO: 1049 - protein, 7 aa, Artificial sequence
  Protein classification predicting sequence
VYVRGHA

SEQ ID NO: 1050 - protein, 6 aa, Artificial sequence
  Protein classification predicting sequence
NPLFHA

SEQ ID NO: 1051 - protein, 8 aa, Artificial sequence
  Protein classification predicting sequence
HGFQAHVG

SEQ ID NO: 1052 - protein, 6 aa, Artificial sequence
  Protein classification predicting sequence
HPCGTC

SEQ ID NO: 1053 - protein, 8 aa, Artificial sequence
  Protein classification predicting sequence
DPMAVVDP

SEQ ID NO: 1054 - protein, 22 aa, Artificial sequence
  Protein classification predicting sequence
FDYIIIGAGSAGNVLATRLTED

SEQ ID NO: 1055 - protein, 10 aa, Artificial sequence
  Protein classification predicting sequence
PLQGKRYNWA

SEQ ID NO: 1056 - protein, 7 aa, Artificial sequence
  Protein classification predicting sequence
GPVSVTT

SEQ ID NO: 1057 - protein, 7 aa, Artificial sequence
  Protein classification predicting sequence
GASNQFE

SEQ ID NO: 1058 - protein, 9 aa, Artificial sequence
  Protein classification predicting sequence
TREIIAQPA

SEQ ID NO: 1059 - protein, 6 aa, Artificial sequence
  Protein classification predicting sequence
AYHPCG

SEQ ID NO: 1060 - protein, 15 aa, Artificial sequence
  Protein classification predicting sequence
GRVHGLEGLRVVDAS

SEQ ID NO: 1061 - protein, 7 aa, Artificial sequence
  Protein classification predicting sequence
RKAETRD

SEQ ID NO: 1062 - protein, 7 aa, Artificial sequence
  Protein classification predicting sequence
LQRSGVG

SEQ ID NO: 1063 - protein, 7 aa, Artificial sequence
  Protein classification predicting sequence
NLQDHLE

SEQ ID NO: 1064 - protein, 9 aa, Artificial sequence
  Protein classification predicting sequence
WWNQPAIGA

SEQ ID NO: 1065 - protein, 6 aa, Artificial sequence
  Protein classification predicting sequence
HGFQAH

SEQ ID NO: 1066 - protein, 17 aa, Artificial sequence
  Protein classification predicting sequence
ILFNYMSHEQDWQEFRD

SEQ ID NO: 1067 - protein, 11 aa, Artificial sequence
  Protein classification predicting sequence
QPALDPYRGRE

SEQ ID NO: 1068 - protein, 12 aa, Artificial sequence
  Protein classification predicting sequence
IITGNLNATTIM

SEQ ID NO: 1069 - protein, 8 aa, Artificial sequence
  Protein classification predicting sequence
LATRLTED

SEQ ID NO: 1070 - protein, 27 aa, Artificial sequence
  Protein classification predicting sequence
RRMECGRGKGLGGSSLINGMCYIRGNA

SEQ ID NO: 1071 - protein, 18 aa, Artificial sequence
  Protein classification predicting sequence
DLNGYQQEGFGPMDRTVT

SEQ ID NO: 1072 - protein, 8 aa, Artificial sequence
  Protein classification predicting sequence
STARGYLD

SEQ ID NO: 1073 - protein, 6 aa, Artificial sequence
  Protein classification predicting sequence
GSMRSP

SEQ ID NO: 1074 - protein, 7 aa, Artificial sequence
  Protein classification predicting sequence
QTDEQLD

SEQ ID NO: 1075 - protein, 7 aa, Artificial sequence
  Protein classification predicting sequence
IRGRKPL

SEQ ID NO: 1076 - protein, 12 aa, Artificial sequence
  Protein classification predicting sequence
DYIIIGAGSAGN

SEQ ID NO: 1077 - protein, 12 aa, Artificial sequence
  Protein classification predicting sequence
VLLLEAGGPDYR

SEQ ID NO: 1078 - protein, 23 aa, Artificial sequence
  Protein classification predicting sequence
PRTDDLNGYQQEGFGPMDRTVTP

SEQ ID NO: 1079 - protein, 8 aa, Artificial sequence
  Protein classification predicting sequence
QDWQEFRD

SEQ ID NO: 1080 - protein, 11 aa, Artificial sequence
  Protein classification predicting sequence
ADVLPYFKRME

SEQ ID NO: 1081 - protein, 9 aa, Artificial sequence
  Protein classification predicting sequence
AYLKPALKR

SEQ ID NO: 1082 - protein, 11 aa, Artificial sequence
  Protein classification predicting sequence
VVDPECRVIGV

SEQ ID NO: 1083 - protein, 14 aa, Artificial sequence
  Protein classification predicting sequence
ADFVIIGSGSAGSA

SEQ ID NO: 1084 - protein, 7 aa, Artificial sequence
  Protein classification predicting sequence
VQTDEEI

SEQ ID NO: 1085 - protein, 11 aa, Artificial sequence
  Protein classification predicting sequence
GLRVADSSIFP

SEQ ID NO: 1086 - protein, 17 aa, Artificial sequence
  Protein classification predicting sequence
SYDYVIIGGGSAGSVLG

SEQ ID NO: 1087 - protein, 8 aa, Artificial sequence
  Protein classification predicting sequence
RLSEDKDK

SEQ ID NO: 1088 - protein, 29 aa, Artificial sequence
  Protein classification predicting sequence
VLVLEAGRSDYFWDLFIQMPAALMFPSGN

SEQ ID NO: 1089 - protein, 15 aa, Artificial sequence
  Protein classification predicting sequence
TWDFAHCLPYFKKLE

SEQ ID NO: 1090 - protein, 9 aa, Artificial sequence
  Protein classification predicting sequence
TYGAAPYDK

SEQ ID NO: 1091 - protein, 19 aa, Artificial sequence
  Protein classification predicting sequence
RGHDGPIKLKRGPATNPLF

SEQ ID NO: 1092 - protein, 10 aa, Artificial sequence
  Protein classification predicting sequence
AGVEAGYHKT

SEQ ID NO: 1093 - protein, 13 aa, Artificial sequence
  Protein classification predicting sequence
RQEGFGPFDSQVH

SEQ ID NO: 1094 - protein, 22 aa, Artificial sequence
  Protein classification predicting sequence
HLPGVGENFEDHLEVYIQHKCK

SEQ ID NO: 1095 - protein, 9 aa, Artificial sequence
  Protein classification predicting sequence
PVSLQPSLD

SEQ ID NO: 1096 - protein, 12 aa, Artificial sequence
  Protein classification predicting sequence
KRMPFIGLQWIF

SEQ ID NO: 1097 - protein, 17 aa, Artificial sequence
  Protein classification predicting sequence
GAAASNHFEGGGFVRSN

SEQ ID NO: 1098 - protein, 33 aa, Artificial sequence
  Protein classification predicting sequence
VAHGYQVHVGPMYSNSRGSLKIKSKDPFEKPSI

SEQ ID NO: 1099 - protein, 12 aa, Artificial sequence
  Protein classification predicting sequence
VQTDEEILDWVR

SEQ ID NO: 1100 - protein, 78 aa, Artificial sequence
  Protein classification predicting sequence
DGETALHPSCSAKMGPASDPMAVVDPLTMKVHGMENLRVVDASAMPRTTNGNIHAPVLMLAEKAADIIRGRKPLEPQY

SEQ ID NO: 1101 - protein, 12 aa, Artificial sequence
  Protein classification predicting sequence
IIGGGSAGSVLG

SEQ ID NO: 1102 - protein, 11 aa, Artificial sequence
  Protein classification predicting sequence
VLVLEAGRSDY

SEQ ID NO: 1103 - protein, 7 aa, Artificial sequence
  Protein classification predicting sequence
IQMPAAL

SEQ ID NO: 1104 - protein, 27 aa, Artificial sequence
  Protein classification predicting sequence
HARGKVLGGSSSINGMIYQRGNPMDYE

SEQ ID NO: 1105 - protein, 10 aa, Artificial sequence
  Protein classification predicting sequence
FFDAGVEAGY

SEQ ID NO: 1106 - protein, 21 aa, Artificial sequence
  Protein classification predicting sequence
KTPDVNGFRQEGFGPFDSQVH

SEQ ID NO: 1107 - protein, 16 aa, Artificial sequence
  Protein classification predicting sequence
SASRAYLHPAMKRKNL

SEQ ID NO: 1108 - protein, 8 aa, Artificial sequence
  Protein classification predicting sequence
EVILSGGA

SEQ ID NO: 1109 - protein, 13 aa, Artificial sequence
  Protein classification predicting sequence
PQLLQLSGIGDSE

SEQ ID NO: 1110 - protein, 16 aa, Artificial sequence
  Protein classification predicting sequence
HLPGVGENFEDHLEVY

SEQ ID NO: 1111 - protein, 9 aa, Artificial sequence
  Protein classification predicting sequence
MPFIGLQWI

SEQ ID NO: 1112 - protein, 19 aa, Artificial sequence
  Protein classification predicting sequence
VDYPNLMFHFLPIAVRYDG

SEQ ID NO: 1113 - protein, 17 aa, Artificial sequence
  Protein classification predicting sequence
AHGYQVHVGPMYSNSRG

SEQ ID NO: 1114 - protein, 12 aa, Artificial sequence
  Protein classification predicting sequence
LKIKSKDPFEKP

SEQ ID NO: 1115 - protein, 14 aa, Artificial sequence
  Protein classification predicting sequence
KVHGMENLRVVDAS

SEQ ID NO: 1116 - protein, 10 aa, Artificial sequence
  Protein classification predicting sequence
MPRTTNGNIH

SEQ ID NO: 1117 - protein, 8 aa, Artificial sequence
  Protein classification predicting sequence
VLLLEAGG

SEQ ID NO: 1118 - protein, 11 aa, Artificial sequence
  Protein classification predicting sequence
NGYQQEGFGPM

SEQ ID NO: 1119 - protein, 9 aa, Artificial sequence
  Protein classification predicting sequence
QLLQLSGIG

SEQ ID NO: 1120 - protein, 13 aa, Artificial sequence
  Protein classification predicting sequence
LPYFRKAETRDIG

SEQ ID NO: 1121 - protein, 12 aa, Artificial sequence
  Protein classification predicting sequence
NDYHGGDGPVSV

SEQ ID NO: 1122 - protein, 12 aa, Artificial sequence
  Protein classification predicting sequence
GRRASTARGYLD

SEQ ID NO: 1123 - protein, 7 aa, Artificial sequence
  Protein classification predicting sequence
GAIASPQ

SEQ ID NO: 1124 - protein, 5 aa, Artificial sequence
  Protein classification predicting sequence
WWNQP

SEQ ID NO: 1125 - protein, 8 aa, Artificial sequence
  Protein classification predicting sequence
YRGREISP

SEQ ID NO: 1126 - protein, 6 aa, Artificial sequence
  Protein classification predicting sequence
DASIMP

SEQ ID NO: 1127 - protein, 6 aa, Artificial sequence
  Protein classification predicting sequence
NDYHGG

SEQ ID NO: 1128 - protein, 16 aa, Artificial sequence
  Protein classification predicting sequence
DFRTQMPAALAFPLQG

SEQ ID NO: 1129 - protein, 8 aa, Artificial sequence
  Protein classification predicting sequence
RYNWAYET

SEQ ID NO: 1130 - protein, 8 aa, Artificial sequence
  Protein classification predicting sequence
FEAGGFIR

SEQ ID NO: 1131 - protein, 12 aa, Artificial sequence
  Protein classification predicting sequence
MAVVDGQGRVHG

SEQ ID NO: 1132 - protein, 13 aa, Artificial sequence
  Protein classification predicting sequence
IITGNLNATTIMI

SEQ ID NO: 1133 - protein, 8 aa, Artificial sequence
  Protein classification predicting sequence
DTGKPIQE

SEQ ID NO: 1134 - protein, 7 aa, Artificial sequence
  Protein classification predicting sequence
EVIARAN

SEQ ID NO: 1135 - protein, 9 aa, Artificial sequence
  Protein classification predicting sequence
AKVSLTGSV

SEQ ID NO: 1136 - protein, 6 aa, Artificial sequence
  Protein classification predicting sequence
NGTRVF

SEQ ID NO: 1137 - protein, 9 aa, Artificial sequence
  Protein classification predicting sequence
WINAYNLTP

SEQ ID NO: 1138 - protein, 16 aa, Artificial sequence
  Protein classification predicting sequence
VDIVTGADVLEYYAGL

SEQ ID NO: 1139 - protein, 18 aa, Artificial sequence
  Protein classification predicting sequence
MANFFSSGQVCTNGTRVF

SEQ ID NO: 1140 - protein, 7 aa, Artificial sequence
  Protein classification predicting sequence
WKAAPAL

SEQ ID NO: 1141 - protein, 10 aa, Artificial sequence
  Protein classification predicting sequence
GGAMLGNFYS

SEQ ID NO: 1142 - protein, 8 aa, Artificial sequence
  Protein classification predicting sequence
WKSAPALA

SEQ ID NO: 1143 - protein, 6 aa, Artificial sequence
  Protein classification predicting sequence
IFKPSE

SEQ ID NO: 1144 - protein, 9 aa, Artificial sequence
  Protein classification predicting sequence
RSRILRRAV

SEQ ID NO: 1145 - protein, 6 aa, Artificial sequence
  Protein classification predicting sequence
LRERND

SEQ ID NO: 1146 - protein, 10 aa, Artificial sequence
  Protein classification predicting sequence
AADIAMMANF

SEQ ID NO: 1147 - protein, 15 aa, Artificial sequence
  Protein classification predicting sequence
SSGQVCTNGTRVFVP

SEQ ID NO: 1148 - protein, 6 aa, Artificial sequence
  Protein classification predicting sequence
PVGGYK

SEQ ID NO: 1149 - protein, 12 aa, Artificial sequence
  Protein classification predicting sequence
HPGIAKVSFTGG

SEQ ID NO: 1150 - protein, 8 aa, Artificial sequence
  Protein classification predicting sequence
SGVGRENG

SEQ ID NO: 1151 - protein, 8 aa, Artificial sequence
  Protein classification predicting sequence
VDIVTGAD

SEQ ID NO: 1152 - protein, 11 aa, Artificial sequence
  Protein classification predicting sequence
IGAWNYPIQIA

SEQ ID NO: 1153 - protein, 8 aa, Artificial sequence
  Protein classification predicting sequence
NFGPLVSF

SEQ ID NO: 1154 - protein, 7 aa, Artificial sequence
  Protein classification predicting sequence
EVIRRAN

SEQ ID NO: 1155 - protein, 7 aa, Artificial sequence
  Protein classification predicting sequence
WAAMTAM

SEQ ID NO: 1156 - protein, 29 aa, Artificial sequence
  Protein classification predicting sequence
QIPLRETSFVYTRREPLGVVAGIGAWNYP

SEQ ID NO: 1157 - protein, 25 aa, Artificial sequence
  Protein classification predicting sequence
QIALWKSAPALAAGNAMIFKPSEVT

SEQ ID NO: 1158 - protein, 12 aa, Artificial sequence
  Protein classification predicting sequence
VTMELGGKSPLI

SEQ ID NO: 1159 - protein, 13 aa, Artificial sequence
  Protein classification predicting sequence
SSGQVCTNGTRVF

SEQ ID NO: 1160 - protein, 11 aa, Artificial sequence
  Protein classification predicting sequence
EEIFGPVMSIL

SEQ ID NO: 1161 - protein, 7 aa, Artificial sequence
  Protein classification predicting sequence
YIAKGKE

SEQ ID NO: 1162 - protein, 7 aa, Artificial sequence
  Protein classification predicting sequence
MPVGGYK

SEQ ID NO: 1163 - protein, 8 aa, Artificial sequence
  Protein classification predicting sequence
YTRIKSVQ

SEQ ID NO: 1164 - protein, 15 aa, Artificial sequence
  Protein classification predicting sequence
AIGGAMLGNFYSTGQ

SEQ ID NO: 1165 - protein, 6 aa, Artificial sequence
  Protein classification predicting sequence
RAHRVI

SEQ ID NO: 1166 - protein, 8 aa, Artificial sequence
  Protein classification predicting sequence
YTRREPLG

SEQ ID NO: 1167 - protein, 24 aa, Artificial sequence
  Protein classification predicting sequence
TPLTALKLAEIYSEAGLPDGVFNV

SEQ ID NO: 1168 - protein, 6 aa, Artificial sequence
  Protein classification predicting sequence
VAPTVF

SEQ ID NO: 1169 - protein, 6 aa, Artificial sequence
  Protein classification predicting sequence
DTGKPI

SEQ ID NO: 1170 - protein, 10 aa, Artificial sequence
  Protein classification predicting sequence
AGICWINTWG

SEQ ID NO: 1171 - protein, 12 aa, Artificial sequence
  Protein classification predicting sequence
VTGADVLEYYAG

SEQ ID NO: 1172 - protein, 10 aa, Artificial sequence
  Protein classification predicting sequence
IHRLEAGICW

SEQ ID NO: 1173 - protein, 7 aa, Artificial sequence
  Protein classification predicting sequence
LEAGICW

SEQ ID NO: 1174 - protein, 15 aa, Artificial sequence
  Protein classification predicting sequence
VDIVTGADVLEYYAG

SEQ ID NO: 1175 - protein, 12 aa, Artificial sequence
  Protein classification predicting sequence
KVMASASSSSLK

SEQ ID NO: 1176 - protein, 15 aa, Artificial sequence
  Protein classification predicting sequence
LKDVTMELGGKSPLI

SEQ ID NO: 1177 - protein, 9 aa, Artificial sequence
  Protein classification predicting sequence
ASGKKVMAN

SEQ ID NO: 1178 - protein, 20 aa, Artificial sequence
  Protein classification predicting sequence
FGKIDTLIPNAGIWDYSTAL

SEQ ID NO: 1179 - protein, 17 aa, Artificial sequence
  Protein classification predicting sequence
VPLADMLKSVLPIGRMP

SEQ ID NO: 1180 - protein, 11 aa, Artificial sequence
  Protein classification predicting sequence
LIPNAGIWDYS

SEQ ID NO: 1181 - protein, 15 aa, Artificial sequence
  Protein classification predicting sequence
DAAFDEVFHINVKGY

SEQ ID NO: 1182 - protein, 10 aa, Artificial sequence
  Protein classification predicting sequence
AVKACLPALV

SEQ ID NO: 1183 - protein, 18 aa, Artificial sequence
  Protein classification predicting sequence
FTISNAGFYPNGGGPLYT

SEQ ID NO: 1184 - protein, 14 aa, Artificial sequence
  Protein classification predicting sequence
EYTGAYVFFATRGD

SEQ ID NO: 1185 - protein, 18 aa, Artificial sequence
  Protein classification predicting sequence
IVGGGLIGCEVATTARKL

SEQ ID NO: 1186 - protein, 16 aa, Artificial sequence
  Protein classification predicting sequence
VTILEAGDELLVRVLG

SEQ ID NO: 1187 - protein, 9 aa, Artificial sequence
  Protein classification predicting sequence
SWTEIAGHR

SEQ ID NO: 1188 - protein, 10 aa, Artificial sequence
  Protein classification predicting sequence
GVFLLNGPEW

SEQ ID NO: 1189 - protein, 7 aa, Artificial sequence
  Protein classification predicting sequence
PRSLSRW

SEQ ID NO: 1190 - protein, 9 aa, Artificial sequence
  Protein classification predicting sequence
VQQALRQES

SEQ ID NO: 1191 - protein, 9 aa, Artificial sequence
  Protein classification predicting sequence
LYSLGRNPA

SEQ ID NO: 1192 - protein, 7 aa, Artificial sequence
  Protein classification predicting sequence
GRNPAVF

SEQ ID NO: 1193 - protein, 13 aa, Artificial sequence
  Protein classification predicting sequence
RGHKCGVFLLNGP

SEQ ID NO: 1194 - protein, 18 aa, Artificial sequence
  Protein classification predicting sequence
LPLLRAALKETLRLYPVG

SEQ ID NO: 1195 - protein, 10 aa, Artificial sequence
  Protein classification predicting sequence
GIGTASNYYN

SEQ ID NO: 1196 - protein, 7 aa, Artificial sequence
  Protein classification predicting sequence
MEMEYLD

SEQ ID NO: 1197 - protein, 7 aa, Artificial sequence
  Protein classification predicting sequence
LRLYPIA

SEQ ID NO: 1198 - protein, 7 aa, Artificial sequence
  Protein classification predicting sequence
PEKFKPE

SEQ ID NO: 1199 - protein, 9 aa, Artificial sequence
  Protein classification predicting sequence
PERFSKENK

SEQ ID NO: 1200 - protein, 12 aa, Artificial sequence
  Protein classification predicting sequence
NEFKDMVVELMT

SEQ ID NO: 1201 - protein, 10 aa, Artificial sequence
  Protein classification predicting sequence
AAKAFLKTLD

SEQ ID NO: 1202 - protein, 13 aa, Artificial sequence
  Protein classification predicting sequence
NFSNRPPNAGATH

SEQ ID NO: 1203 - protein, 10 aa, Artificial sequence
  Protein classification predicting sequence
AYNAQDMVFA

SEQ ID NO: 1204 - protein, 6 aa, Artificial sequence
  Protein classification predicting sequence
LHKKFD

SEQ ID NO: 1205 - protein, 13 aa, Artificial sequence
  Protein classification predicting sequence
FRKHPSTPLNLPR

SEQ ID NO: 1206 - protein, 8 aa, Artificial sequence
  Protein classification predicting sequence
VEYILGTL

SEQ ID NO: 1207 - protein, 22 aa, Artificial sequence
  Protein classification predicting sequence
WKLLRKLSNLHMLGGKALENWA

SEQ ID NO: 1208 - protein, 10 aa, Artificial sequence
  Protein classification predicting sequence
EMLTYAMANM

SEQ ID NO: 1209 - protein, 7 aa, Artificial sequence
  Protein classification predicting sequence
AMANMIG

SEQ ID NO: 1210 - protein, 8 aa, Artificial sequence
  Protein classification predicting sequence
SDIPNLPY

SEQ ID NO: 1211 - protein, 9 aa, Artificial sequence
  Protein classification predicting sequence
EQYCNKKIW

SEQ ID NO: 1212 - protein, 6 aa, Artificial sequence
  Protein classification predicting sequence
FVVKIP

SEQ ID NO: 1213 - protein, 11 aa, Artificial sequence
  Protein classification predicting sequence
HVTVISSSDKK

SEQ ID NO: 1214 - protein, 12 aa, Artificial sequence
  Protein classification predicting sequence
HLGADAYLVSSD

SEQ ID NO: 1215 - protein, 7 aa, Artificial sequence
  Protein classification predicting sequence
HPLEPYL

SEQ ID NO: 1216 - protein, 9 aa, Artificial sequence
  Protein classification predicting sequence
VGDVVGVGV

SEQ ID NO: 1217 - protein, 6 aa, Artificial sequence
  Protein classification predicting sequence
EQYCNK

SEQ ID NO: 1218 - protein, 6 aa, Artificial sequence
  Protein classification predicting sequence
GSFIGS

SEQ ID NO: 1219 - protein, 11 aa, Artificial sequence
  Protein classification predicting sequence
NDVRYRFVVDV

SEQ ID NO: 1220 - protein, 14 aa, Artificial sequence
  Protein classification predicting sequence
NDVRYRFVVDVAGS

SEQ ID NO: 1221 - protein, 42 aa, Artificial sequence
  Protein classification predicting sequence
FDTIPVVHPLEPYLALLKLDGKLILTGVINAPLQFISPMVML

SEQ ID NO: 1222 - protein, 9 aa, Artificial sequence
  Protein classification predicting sequence
LGADAYLVS

SEQ ID NO: 1223 - protein, 7 aa, Artificial sequence
  Protein classification predicting sequence
KNDLGMS

SEQ ID NO: 1224 - protein, 10 aa, Artificial sequence
  Protein classification predicting sequence
VPGHEVVGEV

SEQ ID NO: 1225 - protein, 36 aa, Artificial sequence
  Protein classification predicting sequence
KQSGLRGGILGLGGVGHMGVKIAKAMGHHVTVISSS

SEQ ID NO: 1226 - protein, 8 aa, Artificial sequence
  Protein classification predicting sequence
ERLEKNDV

SEQ ID NO: 1227 - protein, 10 aa, Artificial sequence
  Protein classification predicting sequence
YRFVVDVAGS

SEQ ID NO: 1228 - protein, 38 aa, Artificial sequence
  Protein classification predicting sequence
PCNSDQEQYCNKKIWNYNDVYTDGKPTQGGFAGEIVVG

SEQ ID NO: 1229 - protein, 14 aa, Artificial sequence
  Protein classification predicting sequence
RFVVKIPDGLESEQ

SEQ ID NO: 1230 - protein, 16 aa, Artificial sequence
  Protein classification predicting sequence
ERLEKNDVRYRFVVDV

SEQ ID NO: 1231 - protein, 9 aa, Artificial sequence
  Protein classification predicting sequence
KGLTSQIEV

SEQ ID NO: 1232 - protein, 7 aa, Artificial sequence
  Protein classification predicting sequence
PTQGGFA

SEQ ID NO: 1233 - protein, 14 aa, Artificial sequence
  Protein classification predicting sequence
PMVMLGRKSITGSF

SEQ ID NO: 1234 - protein, 11 aa, Artificial sequence
  Protein classification predicting sequence
YPMVPGHEVVG

SEQ ID NO: 1235 - protein, 7 aa, Artificial sequence
  Protein classification predicting sequence
GVKIAKA

SEQ ID NO: 1236 - protein, 14 aa, Artificial sequence
  Protein classification predicting sequence
LILGRRSIAGSFIG

SEQ ID NO: 1237 - protein, 7 aa, Artificial sequence
  Protein classification predicting sequence
PYTYSLR

SEQ ID NO: 1238 - protein, 13 aa, Artificial sequence
  Protein classification predicting sequence
YPMVPGHEVVGEV

SEQ ID NO: 1239 - protein, 9 aa, Artificial sequence
  Protein classification predicting sequence
GVINAPLQF

SEQ ID NO: 1240 - protein, 8 aa, Artificial sequence
  Protein classification predicting sequence
IEVIKMDY

SEQ ID NO: 1241 - protein, 7 aa, Artificial sequence
  Protein classification predicting sequence
PYTYTLR

SEQ ID NO: 1242 - protein, 8 aa, Artificial sequence
  Protein classification predicting sequence
MVVDQKFV

SEQ ID NO: 1243 - protein, 13 aa, Artificial sequence
  Protein classification predicting sequence
ILGLGGVGHMGVK

SEQ ID NO: 1244 - protein, 9 aa, Artificial sequence
  Protein classification predicting sequence
RGFAVKFYT

SEQ ID NO: 1245 - protein, 8 aa, Artificial sequence
  Protein classification predicting sequence
DTQISRLG

SEQ ID NO: 1246 - protein, 6 aa, Artificial sequence
  Protein classification predicting sequence
ERVPER

SEQ ID NO: 1247 - protein, 10 aa, Artificial sequence
  Protein classification predicting sequence
ITSGLEVTWT

SEQ ID NO: 1248 - protein, 7 aa, Artificial sequence
  Protein classification predicting sequence
TKSPAGA

SEQ ID NO: 1249 - protein, 9 aa, Artificial sequence
  Protein classification predicting sequence
AFARAWFKL

SEQ ID NO: 1250 - protein, 11 aa, Artificial sequence
  Protein classification predicting sequence
TLLEDFIFRQK

SEQ ID NO: 1251 - protein, 6 aa, Artificial sequence
  Protein classification predicting sequence
YRHMDG

SEQ ID NO: 1252 - protein, 8 aa, Artificial sequence
  Protein classification predicting sequence
DPLLQGRL

SEQ ID NO: 1253 - protein, 7 aa, Artificial sequence
  Protein classification predicting sequence
HNNHRDG

SEQ ID NO: 1254 - protein, 12 aa, Artificial sequence
  Protein classification predicting sequence
DKFDFDPLDVTK

SEQ ID NO: 1255 - protein, 10 aa, Artificial sequence
  Protein classification predicting sequence
QRHRLGPNYL

SEQ ID NO: 1256 - protein, 18 aa, Artificial sequence
  Protein classification predicting sequence
GFMNFMHRDEEVNYFPSR

SEQ ID NO: 1257 - protein, 7 aa, Artificial sequence
  Protein classification predicting sequence
SLGQKLA

SEQ ID NO: 1258 - protein, 6 aa, Artificial sequence
  Protein classification predicting sequence
RLNVRP

SEQ ID NO: 1259 - protein, 7 aa, Artificial sequence
  Protein classification predicting sequence
FEVTHDI

SEQ ID NO: 1260 - protein, 8 aa, Artificial sequence
  Protein classification predicting sequence
GESGSADT

SEQ ID NO: 1261 - protein, 9 aa, Artificial sequence
  Protein classification predicting sequence
DPDYSIRDL

SEQ ID NO: 1262 - protein, 6 aa, Artificial sequence
  Protein classification predicting sequence
IQVMTF

SEQ ID NO: 1263 - protein, 7 aa, Artificial sequence
  Protein classification predicting sequence
RPSSAFN

SEQ ID NO: 1264 - protein, 8 aa, Artificial sequence
  Protein classification predicting sequence
MFSFLFDD

SEQ ID NO: 1265 - protein, 5 aa, Artificial sequence
  Protein classification predicting sequence
PTCGV

SEQ ID NO: 1266 - protein, 6 aa, Artificial sequence
  Protein classification predicting sequence
PTCGVK

SEQ ID NO: 1267 - protein, 7 aa, Artificial sequence
  Protein classification predicting sequence
PLQPVGR

SEQ ID NO: 1268 - protein, 8 aa, Artificial sequence
  Protein classification predicting sequence
RWVDALSD

SEQ ID NO: 1269 - protein, 10 aa, Artificial sequence
  Protein classification predicting sequence
VPGIYYSDDK

SEQ ID NO: 1270 - protein, 9 aa, Artificial sequence
  Protein classification predicting sequence
MNFMHRDEE

SEQ ID NO: 1271 - protein, 6 aa, Artificial sequence
  Protein classification predicting sequence
NYFPSR

SEQ ID NO: 1272 - protein, 16 aa, Artificial sequence
  Protein classification predicting sequence
DSIAAGNYPEWKLFIQ

SEQ ID NO: 1273 - protein, 7 aa, Artificial sequence
  Protein classification predicting sequence
FDFDPLD

SEQ ID NO: 1274 - protein, 21 aa, Artificial sequence
  Protein classification predicting sequence
VLNKNIDNFFAENEQLAFCPA

SEQ ID NO: 1275 - protein, 12 aa, Artificial sequence
  Protein classification predicting sequence
DTQRHRLGPNYL

SEQ ID NO: 1276 - protein, 7 aa, Artificial sequence
  Protein classification predicting sequence
KENNFKQ

SEQ ID NO: 1277 - protein, 6 aa, Artificial sequence
  Protein classification predicting sequence
RWVDAL

SEQ ID NO: 1278 - protein, 10 aa, Artificial sequence
  Protein classification predicting sequence
IPERVVHARG

SEQ ID NO: 1279 - protein, 11 aa, Artificial sequence
  Protein classification predicting sequence
LTCADFLRAPG

SEQ ID NO: 1280 - protein, 37 aa, Artificial sequence
  Protein classification predicting sequence
YYSEDKLLQTRIFAYADTQRHRIGPNYMQLPVNAPKC

SEQ ID NO: 1281 - protein, 11 aa, Artificial sequence
  Protein classification predicting sequence
HHNNHRDGAMN

SEQ ID NO: 1282 - protein, 8 aa, Artificial sequence
  Protein classification predicting sequence
HRDEEVDY

SEQ ID NO: 1283 - protein, 6 aa, Artificial sequence
  Protein classification predicting sequence
NVDNFF

SEQ ID NO: 1284 - protein, 6 aa, Artificial sequence
  Protein classification predicting sequence
PRVTHE

SEQ ID NO: 1285 - protein, 19 aa, Artificial sequence
  Protein classification predicting sequence
TPVIVRFSTVIHERGSPET

SEQ ID NO: 1286 - protein, 7 aa, Artificial sequence
  Protein classification predicting sequence
TKTWPED

SEQ ID NO: 1287 - protein, 7 aa, Artificial sequence
  Protein classification predicting sequence
ENEQLAF

SEQ ID NO: 1288 - protein, 11 aa, Artificial sequence
  Protein classification predicting sequence
RGPILLEDYHL

SEQ ID NO: 1289 - protein, 7 aa, Artificial sequence
  Protein classification predicting sequence
KPNPKSH

SEQ ID NO: 1290 - protein, 6 aa, Artificial sequence
  Protein classification predicting sequence
QENWRI

SEQ ID NO: 1291 - protein, 9 aa, Artificial sequence
  Protein classification predicting sequence
PQDYRHMEG

SEQ ID NO: 1292 - protein, 7 aa, Artificial sequence
  Protein classification predicting sequence
EAIKVGG

SEQ ID NO: 1293 - protein, 11 aa, Artificial sequence
  Protein classification predicting sequence
DKLLQTRIFSY

SEQ ID NO: 1294 - protein, 6 aa, Artificial sequence
  Protein classification predicting sequence
RDIRGF

SEQ ID NO: 1295 - protein, 38 aa, Artificial sequence
  Protein classification predicting sequence
GNFDLVGNNVPVFFNRDAKSFPDTIRALKPNPKSHIQE

SEQ ID NO: 1296 - protein, 12 aa, Artificial sequence
  Protein classification predicting sequence
ALKPNPKSHIQE

SEQ ID NO: 1297 - protein, 5 aa, Artificial sequence
  Protein classification predicting sequence
YFPSR

SEQ ID NO: 1298 - protein, 9 aa, Artificial sequence
  Protein classification predicting sequence
PQDYRHMDG

SEQ ID NO: 1299 - protein, 7 aa, Artificial sequence
  Protein classification predicting sequence
YVKFHWK

SEQ ID NO: 1300 - protein, 7 aa, Artificial sequence
  Protein classification predicting sequence
EAIRVGG

SEQ ID NO: 1301 - protein, 6 aa, Artificial sequence
  Protein classification predicting sequence
KFRPSS

SEQ ID NO: 1302 - protein, 7 aa, Artificial sequence
  Protein classification predicting sequence
LLEDYHL

SEQ ID NO: 1303 - protein, 7 aa, Artificial sequence
  Protein classification predicting sequence
LSDPRVT

SEQ ID NO: 1304 - protein, 9 aa, Artificial sequence
  Protein classification predicting sequence
EIRSIWISY

SEQ ID NO: 1305 - protein, 10 aa, Artificial sequence
  Protein classification predicting sequence
TNSGAPVWNN

SEQ ID NO: 1306 - protein, 10 aa, Artificial sequence
  Protein classification predicting sequence
AKGFFEVTHD

SEQ ID NO: 1307 - protein, 7 aa, Artificial sequence
  Protein classification predicting sequence
RDPRGFA

SEQ ID NO: 1308 - protein, 8 aa, Artificial sequence
  Protein classification predicting sequence
KFYTREGN

SEQ ID NO: 1309 - protein, 7 aa, Artificial sequence
  Protein classification predicting sequence
DYRHMDG

SEQ ID NO: 1310 - protein, 8 aa, Artificial sequence
  Protein classification predicting sequence
EAVTVGGT

SEQ ID NO: 1311 - protein, 6 aa, Artificial sequence
  Protein classification predicting sequence
WTFYIQ

SEQ ID NO: 1312 - protein, 6 aa, Artificial sequence
  Protein classification predicting sequence
YYSDDK

SEQ ID NO: 1313 - protein, 5 aa, Artificial sequence
  Protein classification predicting sequence
HHNNH

SEQ ID NO: 1314 - protein, 7 aa, Artificial sequence
  Protein classification predicting sequence
DALSDPR

SEQ ID NO: 1315 - protein, 8 aa, Artificial sequence
  Protein classification predicting sequence
MFTFLFDD

SEQ ID NO: 1316 - protein, 6 aa, Artificial sequence
  Protein classification predicting sequence
NHSHAT

SEQ ID NO: 1317 - protein, 6 aa, Artificial sequence
  Protein classification predicting sequence
VRFSTV

SEQ ID NO: 1318 - protein, 8 aa, Artificial sequence
  Protein classification predicting sequence
VRFSTVAG

SEQ ID NO: 1319 - protein, 22 aa, Artificial sequence
  Protein classification predicting sequence
VRFSTVAGESGSADTVRDPRGF

SEQ ID NO: 1320 - protein, 9 aa, Artificial sequence
  Protein classification predicting sequence
GNWDLVGNN

SEQ ID NO: 1321 - protein, 11 aa, Artificial sequence
  Protein classification predicting sequence
GNWDLVGNNTP

SEQ ID NO: 1322 - protein, 7 aa, Artificial sequence
  Protein classification predicting sequence
TTNSGAP

SEQ ID NO: 1323 - protein, 11 aa, Artificial sequence
  Protein classification predicting sequence
TTNSGAPIWNN

SEQ ID NO: 1324 - protein, 9 aa, Artificial sequence
  Protein classification predicting sequence
RGPILLEDY

SEQ ID NO: 1325 - protein, 12 aa, Artificial sequence
  Protein classification predicting sequence
RDPRGFAVKFYT

SEQ ID NO: 1326 - protein, 12 aa, Artificial sequence
  Protein classification predicting sequence
VKFHWKPTCGVK

SEQ ID NO: 1327 - protein, 10 aa, Artificial sequence
  Protein classification predicting sequence
NHSHATQDLY

SEQ ID NO: 1328 - protein, 10 aa, Artificial sequence
  Protein classification predicting sequence
VPGIHYSDDK

SEQ ID NO: 1329 - protein, 7 aa, Artificial sequence
  Protein classification predicting sequence
CVIPKEN

SEQ ID NO: 1330 - protein, 6 aa, Artificial sequence
  Protein classification predicting sequence
NFKQAG

SEQ ID NO: 1331 - protein, 15 aa, Artificial sequence
  Protein classification predicting sequence
LTCADFLRAPGVQTP

SEQ ID NO: 1332 - protein, 45 aa, Artificial sequence
  Protein classification predicting sequence
IVRFSTVIHERGSPETLRDPRGFAVKFYTREGNFDLVGNNFPVFF

SEQ ID NO: 1333 - protein, 19 aa, Artificial sequence
  Protein classification predicting sequence
DLYDSIAAGNYPEWKLFIQ

SEQ ID NO: 1334 - protein, 8 aa, Artificial sequence
  Protein classification predicting sequence
LPVNAPKC

SEQ ID NO: 1335 - protein, 6 aa, Artificial sequence
  Protein classification predicting sequence
NNHYDG

SEQ ID NO: 1336 - protein, 7 aa, Artificial sequence
  Protein classification predicting sequence
KYRPSSA

SEQ ID NO: 1337 - protein, 9 aa, Artificial sequence
  Protein classification predicting sequence
NNNSSLTVG

SEQ ID NO: 1338 - protein, 8 aa, Artificial sequence
  Protein classification predicting sequence
ERVVHARG

SEQ ID NO: 1339 - protein, 9 aa, Artificial sequence
  Protein classification predicting sequence
VLNKNIDNF

SEQ ID NO: 1340 - protein, 8 aa, Artificial sequence
  Protein classification predicting sequence
LQTRIFSY

SEQ ID NO: 1341 - protein, 10 aa, Artificial sequence
  Protein classification predicting sequence
RLGPNYLQLP

SEQ ID NO: 1342 - protein, 11 aa, Artificial sequence
  Protein classification predicting sequence
NAPKCAHHNNH

SEQ ID NO: 1343 - protein, 6 aa, Artificial sequence
  Protein classification predicting sequence
YWSQAD

SEQ ID NO: 1344 - protein, 12 aa, Artificial sequence
  Protein classification predicting sequence
GNNFPVFFIRDG

SEQ ID NO: 1345 - protein, 6 aa, Artificial sequence
  Protein classification predicting sequence
MNFMHR

SEQ ID NO: 1346 - protein, 13 aa, Artificial sequence
  Protein classification predicting sequence
RFSTVVHERGSPE

SEQ ID NO: 1347 - protein, 6 aa, Artificial sequence
  Protein classification predicting sequence
YRHMEG

SEQ ID NO: 1348 - protein, 8 aa, Artificial sequence
  Protein classification predicting sequence
WPEDILPL

SEQ ID NO: 1349 - protein, 13 aa, Artificial sequence
  Protein classification predicting sequence
DFFSHHPESLHMF

SEQ ID NO: 1350 - protein, 9 aa, Artificial sequence
  Protein classification predicting sequence
FLFDDVGIP

SEQ ID NO: 1351 - protein, 8 aa, Artificial sequence
  Protein classification predicting sequence
HSHATKDL

SEQ ID NO: 1352 - protein, 9 aa, Artificial sequence
  Protein classification predicting sequence
LPVNAPKCA

SEQ ID NO: 1353 - protein, 6 aa, Artificial sequence
  Protein classification predicting sequence
NAPKCA

SEQ ID NO: 1354 - protein, 8 aa, Artificial sequence
  Protein classification predicting sequence
GNNFPVFF

SEQ ID NO: 1355 - protein, 7 aa, Artificial sequence
  Protein classification predicting sequence
SHHPESL

SEQ ID NO: 1356 - protein, 7 aa, Artificial sequence
  Protein classification predicting sequence
LINKAGK

SEQ ID NO: 1357 - protein, 13 aa, Artificial sequence
  Protein classification predicting sequence
PVGRLVLNRNIDN

SEQ ID NO: 1358 - protein, 7 aa, Artificial sequence
  Protein classification predicting sequence
VPGVYYS

SEQ ID NO: 1359 - protein, 12 aa, Artificial sequence
  Protein classification predicting sequence
HRDEEVNYFPSR

SEQ ID NO: 1360 - protein, 10 aa, Artificial sequence
  Protein classification predicting sequence
LLEDYHLIEK

SEQ ID NO: 1361 - protein, 9 aa, Artificial sequence
  Protein classification predicting sequence
RFSTVVHER

SEQ ID NO: 1362 - protein, 20 aa, Artificial sequence
  Protein classification predicting sequence
RGFAVKFYTREGNFDLVGNN

SEQ ID NO: 1363 - protein, 7 aa, Artificial sequence
  Protein classification predicting sequence
SHLPESL

SEQ ID NO: 1364 - protein, 7 aa, Artificial sequence
  Protein classification predicting sequence
VKFHWKP

SEQ ID NO: 1365 - protein, 10 aa, Artificial sequence
  Protein classification predicting sequence
VKFHWKPTCG

SEQ ID NO: 1366 - protein, 11 aa, Artificial sequence
  Protein classification predicting sequence
GNYPEWKLFIQ

SEQ ID NO: 1367 - protein, 8 aa, Artificial sequence
  Protein classification predicting sequence
PVGRLVLN

SEQ ID NO: 1368 - protein, 11 aa, Artificial sequence
  Protein classification predicting sequence
GFMNFMHRDEE

SEQ ID NO: 1369 - protein, 7 aa, Artificial sequence
  Protein classification predicting sequence
DPCRHAE

SEQ ID NO: 1370 - protein, 8 aa, Artificial sequence
  Protein classification predicting sequence
ASRLNVRP

SEQ ID NO: 1371 - protein, 7 aa, Artificial sequence
  Protein classification predicting sequence
PESLHTF

SEQ ID NO: 1372 - protein, 7 aa, Artificial sequence
  Protein classification predicting sequence
FLFDDVG

SEQ ID NO: 1373 - protein, 14 aa, Artificial sequence
  Protein classification predicting sequence
RLGPNYLMLPVNAP

SEQ ID NO: 1374 - protein, 6 aa, Artificial sequence
  Protein classification predicting sequence
LPVNAP

SEQ ID NO: 1375 - protein, 16 aa, Artificial sequence
  Protein classification predicting sequence
FDFDPLDVTKTWPEDI

SEQ ID NO: 1376 - protein, 7 aa, Artificial sequence
  Protein classification predicting sequence
AEQYPIP

SEQ ID NO: 1377 - protein, 8 aa, Artificial sequence
  Protein classification predicting sequence
KCLLDDEA

SEQ ID NO: 1378 - protein, 18 aa, Artificial sequence
  Protein classification predicting sequence
RDGMKFPDMVHALKPNPK

SEQ ID NO: 1379 - protein, 9 aa, Artificial sequence
  Protein classification predicting sequence
GVPQDYRHM

SEQ ID NO: 1380 - protein, 13 aa, Artificial sequence
  Protein classification predicting sequence
QRHRLGPNYLQLP

SEQ ID NO: 1381 - protein, 7 aa, Artificial sequence
  Protein classification predicting sequence
RLLWPIK

SEQ ID NO: 1382 - protein, 11 aa, Artificial sequence
  Protein classification predicting sequence
MGLIYVNPEGP

SEQ ID NO: 1383 - protein, 6 aa, Artificial sequence
  Protein classification predicting sequence
WQDPLP

SEQ ID NO: 1384 - protein, 7 aa, Artificial sequence
  Protein classification predicting sequence
AWASAST

SEQ ID NO: 1385 - protein, 6 aa, Artificial sequence
  Protein classification predicting sequence
GFFEVT

SEQ ID NO: 1386 - protein, 16 aa, Artificial sequence
  Protein classification predicting sequence
SPDKMLQGRLFAYPDT

SEQ ID NO: 1387 - protein, 6 aa, Artificial sequence
  Protein classification predicting sequence
DIVGNN

SEQ ID NO: 1388 - protein, 9 aa, Artificial sequence
  Protein classification predicting sequence
RGPVLLEDY

SEQ ID NO: 1389 - protein, 17 aa, Artificial sequence
  Protein classification predicting sequence
SHLTCADFLRAPGVQTP

SEQ ID NO: 1390 - protein, 6 aa, Artificial sequence
  Protein classification predicting sequence
WRILDF

SEQ ID NO: 1391 - protein, 6 aa, Artificial sequence
  Protein classification predicting sequence
DDVGIP

SEQ ID NO: 1392 - protein, 6 aa, Artificial sequence
  Protein classification predicting sequence
LQTRIF

SEQ ID NO: 1393 - protein, 6 aa, Artificial sequence
  Protein classification predicting sequence
EIRSIW

SEQ ID NO: 1394 - protein, 7 aa, Artificial sequence
  Protein classification predicting sequence
TAGPRGP

SEQ ID NO: 1395 - protein, 9 aa, Artificial sequence
  Protein classification predicting sequence
EKLAHFDRE

SEQ ID NO: 1396 - protein, 7 aa, Artificial sequence
  Protein classification predicting sequence
RFSTVAG

SEQ ID NO: 1397 - protein, 6 aa, Artificial sequence
  Protein classification predicting sequence
LHQVTI

SEQ ID NO: 1398 - protein, 7 aa, Artificial sequence
  Protein classification predicting sequence
RYRLGVN

SEQ ID NO: 1399 - protein, 6 aa, Artificial sequence
  Protein classification predicting sequence
HRDGAM

SEQ ID NO: 1400 - protein, 12 aa, Artificial sequence
  Protein classification predicting sequence
QRFAPLNSWPDN

SEQ ID NO: 1401 - protein, 7 aa, Artificial sequence
  Protein classification predicting sequence
KISWADL

SEQ ID NO: 1402 - protein, 20 aa, Artificial sequence
  Protein classification predicting sequence
LENPLAAVQMGLIYVNPEGP

SEQ ID NO: 1403 - protein, 9 aa, Artificial sequence
  Protein classification predicting sequence
PERVVHAKG

SEQ ID NO: 1404 - protein, 12 aa, Artificial sequence
  Protein classification predicting sequence
PERVVHAKGAGA

SEQ ID NO: 1405 - protein, 8 aa, Artificial sequence
  Protein classification predicting sequence
AIENGDYP

SEQ ID NO: 1406 - protein, 6 aa, Artificial sequence
  Protein classification predicting sequence
NYQRDG

SEQ ID NO: 1407 - protein, 17 aa, Artificial sequence
  Protein classification predicting sequence
LLQDVWFLEKLAHFDRE

SEQ ID NO: 1408 - protein, 8 aa, Artificial sequence
  Protein classification predicting sequence
GAADAERD

SEQ ID NO: 1409 - protein, 6 aa, Artificial sequence
  Protein classification predicting sequence
DNFFAE

SEQ ID NO: 1410 - protein, 6 aa, Artificial sequence
  Protein classification predicting sequence
FFIRDA

SEQ ID NO: 1411 - protein, 5 aa, Artificial sequence
  Protein classification predicting sequence
RHMDG

SEQ ID NO: 1412 - protein, 27 aa, Artificial sequence
  Protein classification predicting sequence
GEAVYCKFHYKTDQGIKNLSVEDAARL

SEQ ID NO: 1413 - protein, 5 aa, Artificial sequence
  Protein classification predicting sequence
YPSWT

SEQ ID NO: 1414 - protein, 8 aa, Artificial sequence
  Protein classification predicting sequence
NYFAEVEQ

SEQ ID NO: 1415 - protein, 5 aa, Artificial sequence
  Protein classification predicting sequence
GNNTP

SEQ ID NO: 1416 - protein, 12 aa, Artificial sequence
  Protein classification predicting sequence
PSWTFYIQVMTF

SEQ ID NO: 1417 - protein, 7 aa, Artificial sequence
  Protein classification predicting sequence
PERAVHA

SEQ ID NO: 1418 - protein, 7 aa, Artificial sequence
  Protein classification predicting sequence
PVFFVRD

SEQ ID NO: 1419 - protein, 6 aa, Artificial sequence
  Protein classification predicting sequence
NPENYF

SEQ ID NO: 1420 - protein, 7 aa, Artificial sequence
  Protein classification predicting sequence
SPDKMLQ

SEQ ID NO: 1421 - protein, 7 aa, Artificial sequence
  Protein classification predicting sequence
RIFSYAD

SEQ ID NO: 1422 - protein, 11 aa, Artificial sequence
  Protein classification predicting sequence
KFPDFIHTQKR

SEQ ID NO: 1423 - protein, 6 aa, Artificial sequence
  Protein classification predicting sequence
WDFWSL

SEQ ID NO: 1424 - protein, 9 aa, Artificial sequence
  Protein classification predicting sequence
ERFWVKFHF

SEQ ID NO: 1425 - protein, 10 aa, Artificial sequence
  Protein classification predicting sequence
FPKWKVQVQI

SEQ ID NO: 1426 - protein, 8 aa, Artificial sequence
  Protein classification predicting sequence
FNPFDLTK

SEQ ID NO: 1427 - protein, 7 aa, Artificial sequence
  Protein classification predicting sequence
NPFDLTK

SEQ ID NO: 1428 - protein, 7 aa, Artificial sequence
  Protein classification predicting sequence
LMNDDQK

SEQ ID NO: 1429 - protein, 6 aa, Artificial sequence
  Protein classification predicting sequence
YTEEGN

SEQ ID NO: 1430 - protein, 7 aa, Artificial sequence
  Protein classification predicting sequence
IAAGNYP

SEQ ID NO: 1431 - protein, 7 aa, Artificial sequence
  Protein classification predicting sequence
GNYPSWT

SEQ ID NO: 1432 - protein, 7 aa, Artificial sequence
  Protein classification predicting sequence
MNGYSGH

SEQ ID NO: 1433 - protein, 8 aa, Artificial sequence
  Protein classification predicting sequence
DLTKVWPH

SEQ ID NO: 1434 - protein, 8 aa, Artificial sequence
  Protein classification predicting sequence
FEVTHDIT

SEQ ID NO: 1435 - protein, 6 aa, Artificial sequence
  Protein classification predicting sequence
VTHDIT

SEQ ID NO: 1436 - protein, 25 aa, Artificial sequence
  Protein classification predicting sequence
RERIPERVVHARGASAKGFFEVTHD

SEQ ID NO: 1437 - protein, 11 aa, Artificial sequence
  Protein classification predicting sequence
THEIRSIWISY

SEQ ID NO: 1438 - protein, 7 aa, Artificial sequence
  Protein classification predicting sequence
EKISRRF

SEQ ID NO: 1439 - protein, 7 aa, Artificial sequence
  Protein classification predicting sequence
VPFAPGR

SEQ ID NO: 1440 - protein, 6 aa, Artificial sequence
  Protein classification predicting sequence
DGFRNY

SEQ ID NO: 1441 - protein, 7 aa, Artificial sequence
  Protein classification predicting sequence
TVGPRGP

SEQ ID NO: 1442 - protein, 13 aa, Artificial sequence
  Protein classification predicting sequence
RDPRGFAVKFYTE

SEQ ID NO: 1443 - protein, 9 aa, Artificial sequence
  Protein classification predicting sequence
WDLVGNNTP

SEQ ID NO: 1444 - protein, 12 aa, Artificial sequence
  Protein classification predicting sequence
RVANYQRDGPMC

SEQ ID NO: 1445 - protein, 7 aa, Artificial sequence
  Protein classification predicting sequence
DNVTQVR

SEQ ID NO: 1446 - protein, 13 aa, Artificial sequence
  Protein classification predicting sequence
FDRERIPERVVHA

SEQ ID NO: 1447 - protein, 6 aa, Artificial sequence
  Protein classification predicting sequence
HATQDL

SEQ ID NO: 1448 - protein, 6 aa, Artificial sequence
  Protein classification predicting sequence
LTTNAG

SEQ ID NO: 1449 - protein, 7 aa, Artificial sequence
  Protein classification predicting sequence
IERGDFP

SEQ ID NO: 1450 - protein, 11 aa, Artificial sequence
  Protein classification predicting sequence
PLIEVGVLELN

SEQ ID NO: 1451 - protein, 7 aa, Artificial sequence
  Protein classification predicting sequence
KADPAYG

SEQ ID NO: 1452 - protein, 15 aa, Artificial sequence
  Protein classification predicting sequence
NNTPVFFIRDPSKFP

SEQ ID NO: 1453 - protein, 6 aa, Artificial sequence
  Protein classification predicting sequence
PGIEPS

SEQ ID NO: 1454 - protein, 16 aa, Artificial sequence
  Protein classification predicting sequence
HFDRERIPERVVHAKG

SEQ ID NO: 1455 - protein, 6 aa, Artificial sequence
  Protein classification predicting sequence
YIQVMT

SEQ ID NO: 1456 - protein, 6 aa, Artificial sequence
  Protein classification predicting sequence
SPDKML

SEQ ID NO: 1457 - protein, 6 aa, Artificial sequence
  Protein classification predicting sequence
GRLFSY

SEQ ID NO: 1458 - protein, 8 aa, Artificial sequence
  Protein classification predicting sequence
DTHRHRLG

SEQ ID NO: 1459 - protein, 7 aa, Artificial sequence
  Protein classification predicting sequence
PEAAPIE

SEQ ID NO: 1460 - protein, 6 aa, Artificial sequence
  Protein classification predicting sequence
LNRNID

SEQ ID NO: 1461 - protein, 8 aa, Artificial sequence
  Protein classification predicting sequence
VHARGAGA

SEQ ID NO: 1462 - protein, 7 aa, Artificial sequence
  Protein classification predicting sequence
GAYGTFT

SEQ ID NO: 1463 - protein, 8 aa, Artificial sequence
  Protein classification predicting sequence
NITAASFL

SEQ ID NO: 1464 - protein, 12 aa, Artificial sequence
  Protein classification predicting sequence
GSRGSADTVRDV

SEQ ID NO: 1465 - protein, 7 aa, Artificial sequence
  Protein classification predicting sequence
FPDLVHA

SEQ ID NO: 1466 - protein, 8 aa, Artificial sequence
  Protein classification predicting sequence
GVAKALGL

SEQ ID NO: 1467 - protein, 16 aa, Artificial sequence
  Protein classification predicting sequence
NSWPDNANLDKARRLL

SEQ ID NO: 1468 - protein, 7 aa, Artificial sequence
  Protein classification predicting sequence
PIKQKYG

SEQ ID NO: 1469 - protein, 7 aa, Artificial sequence
  Protein classification predicting sequence
ILAGNVA

SEQ ID NO: 1470 - protein, 7 aa, Artificial sequence
  Protein classification predicting sequence
DWWPNQL

SEQ ID NO: 1471 - protein, 10 aa, Artificial sequence
  Protein classification predicting sequence
GNVALESMGF

SEQ ID NO: 1472 - protein, 26 aa, Artificial sequence
  Protein classification predicting sequence
VLNKNIDNFFAENEQLAFCPAIIVPG

SEQ ID NO: 1473 - protein, 7 aa, Artificial sequence
  Protein classification predicting sequence
WFLEKLA

SEQ ID NO: 1474 - protein, 11 aa, Artificial sequence
  Protein classification predicting sequence
MLQGRLFSYGD

SEQ ID NO: 1475 - protein, 11 aa, Artificial sequence
  Protein classification predicting sequence
NYFAEVEQAAF

SEQ ID NO: 1476 - protein, 12 aa, Artificial sequence
  Protein classification predicting sequence
AFDPSNMPPGIE

SEQ ID NO: 1477 - protein, 9 aa, Artificial sequence
  Protein classification predicting sequence
RHRLGPNYL

SEQ ID NO: 1478 - protein, 6 aa, Artificial sequence
  Protein classification predicting sequence
IPVNCP

SEQ ID NO: 1479 - protein, 14 aa, Artificial sequence
  Protein classification predicting sequence
DNQGGAPNYYPNSF

SEQ ID NO: 1480 - protein, 10 aa, Artificial sequence
  Protein classification predicting sequence
FIQKKAVKNF

SEQ ID NO: 1481 - protein, 6 aa, Artificial sequence
  Protein classification predicting sequence
KYRPSS

SEQ ID NO: 1482 - protein, 16 aa, Artificial sequence
  Protein classification predicting sequence
IVRFSTVIHERGSPET

SEQ ID NO: 1483 - protein, 9 aa, Artificial sequence
  Protein classification predicting sequence
RDPRGFAVK

SEQ ID NO: 1484 - protein, 7 aa, Artificial sequence
  Protein classification predicting sequence
PTDYRHM

SEQ ID NO: 1485 - protein, 9 aa, Artificial sequence
  Protein classification predicting sequence
QADRSLGQK

SEQ ID NO: 1486 - protein, 8 aa, Artificial sequence
  Protein classification predicting sequence
GQKVASRL

SEQ ID NO: 1487 - protein, 7 aa, Artificial sequence
  Protein classification predicting sequence
FIHSQKR

SEQ ID NO: 1488 - protein, 11 aa, Artificial sequence
  Protein classification predicting sequence
HQVTILMSDRG

SEQ ID NO: 1489 - protein, 7 aa, Artificial sequence
  Protein classification predicting sequence
ESMGFKT

SEQ ID NO: 1490 - protein, 6 aa, Artificial sequence
  Protein classification predicting sequence
AWVKVM

SEQ ID NO: 1491 - protein, 7 aa, Artificial sequence
  Protein classification predicting sequence
GPTLLED

SEQ ID NO: 1492 - protein, 7 aa, Artificial sequence
  Protein classification predicting sequence
PVFFIRD

SEQ ID NO: 1493 - protein, 6 aa, Artificial sequence
  Protein classification predicting sequence
DTQRHR

SEQ ID NO: 1494 - protein, 6 aa, Artificial sequence
  Protein classification predicting sequence
GDNQNS

SEQ ID NO: 1495 - protein, 7 aa, Artificial sequence
  Protein classification predicting sequence
QNSLTAG

SEQ ID NO: 1496 - protein, 6 aa, Artificial sequence
  Protein classification predicting sequence
GYFEVT

SEQ ID NO: 1497 - protein, 8 aa, Artificial sequence
  Protein classification predicting sequence
RFSTVGGE

SEQ ID NO: 1498 - protein, 6 aa, Artificial sequence
  Protein classification predicting sequence
HQVTIL

SEQ ID NO: 1499 - protein, 6 aa, Artificial sequence
  Protein classification predicting sequence
PVNAPK

SEQ ID NO: 1500 - protein, 7 aa, Artificial sequence
  Protein classification predicting sequence
HAKGSGA

SEQ ID NO: 1501 - protein, 7 aa, Artificial sequence
  Protein classification predicting sequence
RDVRGFA

SEQ ID NO: 1502 - protein, 19 aa, Artificial sequence
  Protein classification predicting sequence
GEAVYCKFHYKTDQGIKNL

SEQ ID NO: 1503 - protein, 8 aa, Artificial sequence
  Protein classification predicting sequence
RDLFNAIA

SEQ ID NO: 1504 - protein, 11 aa, Artificial sequence
  Protein classification predicting sequence
NPVNYFAEVEQ

SEQ ID NO: 1505 - protein, 6 aa, Artificial sequence
  Protein classification predicting sequence
NSWPDN

SEQ ID NO: 1506 - protein, 8 aa, Artificial sequence
  Protein classification predicting sequence
GRTDASQE

SEQ ID NO: 1507 - protein, 26 aa, Artificial sequence
  Protein classification predicting sequence
GMQRFAPLNSWPDNASLDKARRLLWP

SEQ ID NO: 1508 - protein, 8 aa, Artificial sequence
  Protein classification predicting sequence
GREDVWEP

SEQ ID NO: 1509 - protein, 10 aa, Artificial sequence
  Protein classification predicting sequence
ETAALIVGGH

SEQ ID NO: 1510 - protein, 11 aa, Artificial sequence
  Protein classification predicting sequence
TPTKWDNSFLE

SEQ ID NO: 1511 - protein, 7 aa, Artificial sequence
  Protein classification predicting sequence
PTMLVTD

SEQ ID NO: 1512 - protein, 8 aa, Artificial sequence
  Protein classification predicting sequence
SLADLIVL

SEQ ID NO: 1513 - protein, 6 aa, Artificial sequence
  Protein classification predicting sequence
AHGKFV

SEQ ID NO: 1514 - protein, 6 aa, Artificial sequence
  Protein classification predicting sequence
RMAMND

SEQ ID NO: 1515 - protein, 7 aa, Artificial sequence
  Protein classification predicting sequence
LSAPEMT

SEQ ID NO: 1516 - protein, 8 aa, Artificial sequence
  Protein classification predicting sequence
LVGGLRVL

SEQ ID NO: 1517 - protein, 9 aa, Artificial sequence
  Protein classification predicting sequence
LRALAEVYA

SEQ ID NO: 1518 - protein, 6 aa, Artificial sequence
  Protein classification predicting sequence
DFVAAW

SEQ ID NO: 1519 - protein, 7 aa, Artificial sequence
  Protein classification predicting sequence
DYPLIEV

SEQ ID NO: 1520 - protein, 5 aa, Artificial sequence
  Protein classification predicting sequence
WDFWS

SEQ ID NO: 1521 - protein, 6 aa, Artificial sequence
  Protein classification predicting sequence
LFSDRG

SEQ ID NO: 1522 - protein, 6 aa, Artificial sequence
  Protein classification predicting sequence
DVTKTW

SEQ ID NO: 1523 - protein, 11 aa, Artificial sequence
  Protein classification predicting sequence
DLVGNNFPVFF

SEQ ID NO: 1524 - protein, 13 aa, Artificial sequence
  Protein classification predicting sequence
GVNTYTLINKAGK

SEQ ID NO: 1525 - protein, 11 aa, Artificial sequence
  Protein classification predicting sequence
HHNNHHEGFMN

SEQ ID NO: 1526 - protein, 6 aa, Artificial sequence
  Protein classification predicting sequence
WAPDRQ

SEQ ID NO: 1527 - protein, 6 aa, Artificial sequence
  Protein classification predicting sequence
FAEVEQ

SEQ ID NO: 1528 - protein, 27 aa, Artificial sequence
  Protein classification predicting sequence
FDRERIPERVVHARGASAKGFFEVTHD

SEQ ID NO: 1529 - protein, 7 aa, Artificial sequence
  Protein classification predicting sequence
LPANAPK

SEQ ID NO: 1530 - protein, 8 aa, Artificial sequence
  Protein classification predicting sequence
RSWAPDRQ

SEQ ID NO: 1531 - protein, 8 aa, Artificial sequence
  Protein classification predicting sequence
NMFWDYLT

SEQ ID NO: 1532 - protein, 7 aa, Artificial sequence
  Protein classification predicting sequence
GTPASYR

SEQ ID NO: 1533 - protein, 10 aa, Artificial sequence
  Protein classification predicting sequence
YPDTHRHRLG

SEQ ID NO: 1534 - protein, 6 aa, Artificial sequence
  Protein classification predicting sequence
RDGPMC

SEQ ID NO: 1535 - protein, 24 aa, Artificial sequence
  Protein classification predicting sequence
AFDPSNMPPGIEPSPDKMLQGRLF

SEQ ID NO: 1536 - protein, 11 aa, Artificial sequence
  Protein classification predicting sequence
SPDKMLQGRLF

SEQ ID NO: 1537 - protein, 10 aa, Artificial sequence
  Protein classification predicting sequence
NYLQIPVNCP

SEQ ID NO: 1538 - protein, 9 aa, Artificial sequence
  Protein classification predicting sequence
LTTAAGAPV

SEQ ID NO: 1539 - protein, 12 aa, Artificial sequence
  Protein classification predicting sequence
LRDPLKFPDLNH

SEQ ID NO: 1540 - protein, 6 aa, Artificial sequence
  Protein classification predicting sequence
QGIKNL

SEQ ID NO: 1541 - protein, 8 aa, Artificial sequence
  Protein classification predicting sequence
YTRAKIFS

SEQ ID NO: 1542 - protein, 6 aa, Artificial sequence
  Protein classification predicting sequence
VQIMPE

SEQ ID NO: 1543 - protein, 9 aa, Artificial sequence
  Protein classification predicting sequence
NHHQIPVNA

SEQ ID NO: 1544 - protein, 6 aa, Artificial sequence
  Protein classification predicting sequence
WNHRVD

SEQ ID NO: 1545 - protein, 15 aa, Artificial sequence
  Protein classification predicting sequence
RDPLKFPDFIHTQKR

SEQ ID NO: 1546 - protein, 8 aa, Artificial sequence
  Protein classification predicting sequence
RFSTVAGE

SEQ ID NO: 1547 - protein, 5 aa, Artificial sequence
  Protein classification predicting sequence
GNWDL

SEQ ID NO: 1548 - protein, 9 aa, Artificial sequence
  Protein classification predicting sequence
DNQGGAPNY

SEQ ID NO: 1549 - protein, 10 aa, Artificial sequence
  Protein classification predicting sequence
HLKDAQLFIQ

SEQ ID NO: 1550 - protein, 8 aa, Artificial sequence
  Protein classification predicting sequence
KPKNAIHT

SEQ ID NO: 1551 - protein, 6 aa, Artificial sequence
  Protein classification predicting sequence
FFIRDP

SEQ ID NO: 1552 - protein, 9 aa, Artificial sequence
  Protein classification predicting sequence
LRSATAMWD

SEQ ID NO: 1553 - protein, 7 aa, Artificial sequence
  Protein classification predicting sequence
NGYGSHT

SEQ ID NO: 1554 - protein, 26 aa, Artificial sequence
  Protein classification predicting sequence
NGYGSHTYSFWNDAGERYWVKFHFKT

SEQ ID NO: 1555 - protein, 8 aa, Artificial sequence
  Protein classification predicting sequence
AIENGEFP

SEQ ID NO: 1556 - protein, 10 aa, Artificial sequence
  Protein classification predicting sequence
VQVQIMPELD

SEQ ID NO: 1557 - protein, 20 aa, Artificial sequence
  Protein classification predicting sequence
KTPYNPFDLTKVWPHADYPP

SEQ ID NO: 1558 - protein, 10 aa, Artificial sequence
  Protein classification predicting sequence
VPGIGFSPDK

SEQ ID NO: 1559 - protein, 16 aa, Artificial sequence
  Protein classification predicting sequence
TGNPDAYYEPNSFNGP

SEQ ID NO: 1560 - protein, 10 aa, Artificial sequence
  Protein classification predicting sequence
RLFSNIAAAM

SEQ ID NO: 1561 - protein, 9 aa, Artificial sequence
  Protein classification predicting sequence
HPEYEAGVR

SEQ ID NO: 1562 - protein, 6 aa, Artificial sequence
  Protein classification predicting sequence
IRMAWH

SEQ ID NO: 1563 - protein, 11 aa, Artificial sequence
  Protein classification predicting sequence
RFAPLNSWPDN

SEQ ID NO: 1564 - protein, 12 aa, Artificial sequence
  Protein classification predicting sequence
LDKARRLLWPIK

SEQ ID NO: 1565 - protein, 18 aa, Artificial sequence
  Protein classification predicting sequence
ENPLAAVQMGLIYVNPEG

SEQ ID NO: 1566 - protein, 9 aa, Artificial sequence
  Protein classification predicting sequence
MNDEETVAL

SEQ ID NO: 1567 - protein, 9 aa, Artificial sequence
  Protein classification predicting sequence
RGFALKFYT

SEQ ID NO: 1568 - protein, 8 aa, Artificial sequence
  Protein classification predicting sequence
ASAKGFFE

SEQ ID NO: 1569 - protein, 7 aa, Artificial sequence
  Protein classification predicting sequence
LTCADFL

SEQ ID NO: 1570 - protein, 7 aa, Artificial sequence
  Protein classification predicting sequence
DPVRHAE

SEQ ID NO: 1571 - protein, 31 aa, Artificial sequence
  Protein classification predicting sequence
PFLTTNAGGPVYNNVSSLTVGPRGPVLLEDY

SEQ ID NO: 1572 - protein, 17 aa, Artificial sequence
  Protein classification predicting sequence
LTCADFLRAPGVQTPVI

SEQ ID NO: 1573 - protein, 17 aa, Artificial sequence
  Protein classification predicting sequence
DKFDFDPLDVTKTWPED

SEQ ID NO: 1574 - protein, 13 aa, Artificial sequence
  Protein classification predicting sequence
KENNFKQAGERYR

SEQ ID NO: 1575 - protein, 7 aa, Artificial sequence
  Protein classification predicting sequence
HLIEKLA

SEQ ID NO: 1576 - protein, 7 aa, Artificial sequence
  Protein classification predicting sequence
KFPDFIH

SEQ ID NO: 1577 - protein, 6 aa, Artificial sequence
  Protein classification predicting sequence
TKVWPH

SEQ ID NO: 1578 - protein, 6 aa, Artificial sequence
  Protein classification predicting sequence
VGNNTP

SEQ ID NO: 1579 - protein, 7 aa, Artificial sequence
  Protein classification predicting sequence
KFPDMVH

SEQ ID NO: 1580 - protein, 7 aa, Artificial sequence
  Protein classification predicting sequence
GFGVHAY

SEQ ID NO: 1581 - protein, 8 aa, Artificial sequence
  Protein classification predicting sequence
WDLYVQVL

SEQ ID NO: 1582 - protein, 6 aa, Artificial sequence
  Protein classification predicting sequence
DITKYT

SEQ ID NO: 1583 - protein, 9 aa, Artificial sequence
  Protein classification predicting sequence
DRESHQRDL

SEQ ID NO: 1584 - protein, 11 aa, Artificial sequence
  Protein classification predicting sequence
NPFDLTKVWPH

SEQ ID NO: 1585 - protein, 10 aa, Artificial sequence
  Protein classification predicting sequence
DFNHLTNDLY

SEQ ID NO: 1586 - protein, 9 aa, Artificial sequence
  Protein classification predicting sequence
FIHTQKRNP

SEQ ID NO: 1587 - protein, 7 aa, Artificial sequence
  Protein classification predicting sequence
FIRMAWH

SEQ ID NO: 1588 - protein, 9 aa, Artificial sequence
  Protein classification predicting sequence
KVMNLDRFD

SEQ ID NO: 1589 - protein, 8 aa, Artificial sequence
  Protein classification predicting sequence
FDLLDPTK

SEQ ID NO: 1590 - protein, 7 aa, Artificial sequence
  Protein classification predicting sequence
DPLLQGR

SEQ ID NO: 1591 - protein, 6 aa, Artificial sequence
  Protein classification predicting sequence
VKFHWK

SEQ ID NO: 1592 - protein, 6 aa, Artificial sequence
  Protein classification predicting sequence
GFFTAP

SEQ ID NO: 1593 - protein, 11 aa, Artificial sequence
  Protein classification predicting sequence
RERIPERVVHA

SEQ ID NO: 1594 - protein, 13 aa, Artificial sequence
  Protein classification predicting sequence
RERIPERVVHARG

SEQ ID NO: 1595 - protein, 8 aa, Artificial sequence
  Protein classification predicting sequence
TPVFVRFS

SEQ ID NO: 1596 - protein, 7 aa, Artificial sequence
  Protein classification predicting sequence
FAYADTQ

SEQ ID NO: 1597 - protein, 8 aa, Artificial sequence
  Protein classification predicting sequence
TLTRDNGA

SEQ ID NO: 1598 - protein, 8 aa, Artificial sequence
  Protein classification predicting sequence
SPETLRDP

SEQ ID NO: 1599 - protein, 8 aa, Artificial sequence
  Protein classification predicting sequence
GFATKFYT

SEQ ID NO: 1600 - protein, 16 aa, Artificial sequence
  Protein classification predicting sequence
LDKARRLLWPVKKKYG

SEQ ID NO: 1601 - protein, 7 aa, Artificial sequence
  Protein classification predicting sequence
ADGFRNY

SEQ ID NO: 1602 - protein, 7 aa, Artificial sequence
  Protein classification predicting sequence
DLVFGSN

SEQ ID NO: 1603 - protein, 6 aa, Artificial sequence
  Protein classification predicting sequence
AFARAW

SEQ ID NO: 1604 - protein, 8 aa, Artificial sequence
  Protein classification predicting sequence
GSADTVRD

SEQ ID NO: 1605 - protein, 7 aa, Artificial sequence
  Protein classification predicting sequence
DAIKFPD

SEQ ID NO: 1606 - protein, 7 aa, Artificial sequence
  Protein classification predicting sequence
KPEPHNE

SEQ ID NO: 1607 - protein, 8 aa, Artificial sequence
  Protein classification predicting sequence
LQGRLFSY

SEQ ID NO: 1608 - protein, 10 aa, Artificial sequence
  Protein classification predicting sequence
TPVFVRFSTV

SEQ ID NO: 1609 - protein, 9 aa, Artificial sequence
  Protein classification predicting sequence
GNYDLVGNN

SEQ ID NO: 1610 - protein, 6 aa, Artificial sequence
  Protein classification predicting sequence
DGIKFP

SEQ ID NO: 1611 - protein, 7 aa, Artificial sequence
  Protein classification predicting sequence
TKIIPEE

SEQ ID NO: 1612 - protein, 7 aa, Artificial sequence
  Protein classification predicting sequence
ANVVPGI

SEQ ID NO: 1613 - protein, 10 aa, Artificial sequence
  Protein classification predicting sequence
EGNFDLVGNN

SEQ ID NO: 1614 - protein, 7 aa, Artificial sequence
  Protein classification predicting sequence
FVRFSTV

SEQ ID NO: 1615 - protein, 9 aa, Artificial sequence
  Protein classification predicting sequence
MSDRAIPRS

SEQ ID NO: 1616 - protein, 6 aa, Artificial sequence
  Protein classification predicting sequence
DKFDFD

SEQ ID NO: 1617 - protein, 6 aa, Artificial sequence
  Protein classification predicting sequence
AGPRGP

SEQ ID NO: 1618 - protein, 6 aa, Artificial sequence
  Protein classification predicting sequence
GAYGTF

SEQ ID NO: 1619 - protein, 8 aa, Artificial sequence
  Protein classification predicting sequence
DTARDPRG

SEQ ID NO: 1620 - protein, 6 aa, Artificial sequence
  Protein classification predicting sequence
QRDGPM

SEQ ID NO: 1621 - protein, 8 aa, Artificial sequence
  Protein classification predicting sequence
RDPLKFPD

SEQ ID NO: 1622 - protein, 7 aa, Artificial sequence
  Protein classification predicting sequence
SDDKLLQ

SEQ ID NO: 1623 - protein, 6 aa, Artificial sequence
  Protein classification predicting sequence
YSDTQR

SEQ ID NO: 1624 - protein, 6 aa, Artificial sequence
  Protein classification predicting sequence
NYLQLP

SEQ ID NO: 1625 - protein, 11 aa, Artificial sequence
  Protein classification predicting sequence
NYLQLPINSPK

SEQ ID NO: 1626 - protein, 14 aa, Artificial sequence
  Protein classification predicting sequence
AKFDQYRYTRNLVD

SEQ ID NO: 1627 - protein, 10 aa, Artificial sequence
  Protein classification predicting sequence
ENQCAYINDS

SEQ ID NO: 1628 - protein, 7 aa, Artificial sequence
  Protein classification predicting sequence
FDQRTGH

SEQ ID NO: 1629 - protein, 7 aa, Artificial sequence
  Protein classification predicting sequence
YTRNLVD

SEQ ID NO: 1630 - protein, 7 aa, Artificial sequence
  Protein classification predicting sequence
TFHSKFG

SEQ ID NO: 1631 - protein, 7 aa, Artificial sequence
  Protein classification predicting sequence
ATGIKPN

SEQ ID NO: 1632 - protein, 25 aa, Artificial sequence
  Protein classification predicting sequence
FYDRKQITVKTYHEVIAINDERQTV

SEQ ID NO: 1633 - protein, 44 aa, Artificial sequence
  Protein classification predicting sequence
ERGLHPTLIHRSDKINKLMDADMNQPILDELDKREIPYRLNEEI

SEQ ID NO: 1634 - protein, 21 aa, Artificial sequence
  Protein classification predicting sequence
VGAVAGGATCASQIRRLDKES

SEQ ID NO: 1635 - protein, 16 aa, Artificial sequence
  Protein classification predicting sequence
FEKDRDMSFANCALPY

SEQ ID NO: 1636 - protein, 12 aa, Artificial sequence
  Protein classification predicting sequence
KQITVKTYHEVI

SEQ ID NO: 1637 - protein, 6 aa, Artificial sequence
  Protein classification predicting sequence
FEESYD

SEQ ID NO: 1638 - protein, 10 aa, Artificial sequence
  Protein classification predicting sequence
LILSPGASAN

SEQ ID NO: 1639 - protein, 6 aa, Artificial sequence
  Protein classification predicting sequence
RNLEDT

SEQ ID NO: 1640 - protein, 8 aa, Artificial sequence
  Protein classification predicting sequence
SLEVLENL

SEQ ID NO: 1641 - protein, 6 aa, Artificial sequence
  Protein classification predicting sequence
DMNQPI

SEQ ID NO: 1642 - protein, 11 aa, Artificial sequence
  Protein classification predicting sequence
IIEGVGTHPNS

SEQ ID NO: 1643 - protein, 7 aa, Artificial sequence
  Protein classification predicting sequence
TSHYRHV

SEQ ID NO: 1644 - protein, 9 aa, Artificial sequence
  Protein classification predicting sequence
VPLAWGAHR

SEQ ID NO: 1645 - protein, 12 aa, Artificial sequence
  Protein classification predicting sequence
LGNNIVKFFDYT

SEQ ID NO: 1646 - protein, 13 aa, Artificial sequence
  Protein classification predicting sequence
YYPGNSPLHLRVY

SEQ ID NO: 1647 - protein, 15 aa, Artificial sequence
  Protein classification predicting sequence
GADKRIDVLSMAMMN

SEQ ID NO: 1648 - protein, 20 aa, Artificial sequence
  Protein classification predicting sequence
LTEFEVAYAPPYSHPKDLIN

SEQ ID NO: 1649 - protein, 7 aa, Artificial sequence
  Protein classification predicting sequence
AHCLPYF

SEQ ID NO: 1650 - protein, 6 aa, Artificial sequence
  Protein classification predicting sequence
AYHPSC

SEQ ID NO: 1651 - protein, 7 aa, Artificial sequence
  Protein classification predicting sequence
TIMIAEK

SEQ ID NO: 1652 - protein, 14 aa, Artificial sequence
  Protein classification predicting sequence
GKKSCFVCPYHGWV

SEQ ID NO: 1653 - protein, 9 aa, Artificial sequence
  Protein classification predicting sequence
VLGGLGQFG

SEQ ID NO: 1654 - protein, 15 aa, Artificial sequence
  Protein classification predicting sequence
VLGGLGQFGIITRAR

SEQ ID NO: 1655 - protein, 15 aa, Artificial sequence
  Protein classification predicting sequence
DPWLIGPAFARGWWL

SEQ ID NO: 1656 - protein, 8 aa, Artificial sequence
  Protein classification predicting sequence
PDIPIYVG

SEQ ID NO: 1657 - protein, 6 aa, Artificial sequence
  Protein classification predicting sequence
MDGVHP

SEQ ID NO: 1658 - protein, 15 aa, Artificial sequence
  Protein classification predicting sequence
GPAFARGWWLLHEPP

SEQ ID NO: 1659 - protein, 10 aa, Artificial sequence
  Protein classification predicting sequence
LTNINVVPFG

SEQ ID NO: 1660 - protein, 17 aa, Artificial sequence
  Protein classification predicting sequence
LRFMILMDGVHPEMDTC

SEQ ID NO: 1661 - protein, 11 aa, Artificial sequence
  Protein classification predicting sequence
ILNTVDCTRPN

SEQ ID NO: 1662 - protein, 9 aa, Artificial sequence
  Protein classification predicting sequence
YIKETNTKN

SEQ ID NO: 1663 - protein, 7 aa, Artificial sequence
  Protein classification predicting sequence
GTKIYKD

SEQ ID NO: 1664 - protein, 6 aa, Artificial sequence
  Protein classification predicting sequence
FWNHFQ

SEQ ID NO: 1665 - protein, 13 aa, Artificial sequence
  Protein classification predicting sequence
TYLTHACMDLKLG

SEQ ID NO: 1666 - protein, 23 aa, Artificial sequence
  Protein classification predicting sequence
MVFDPWLIGPAFARGWWLLHEPP

SEQ ID NO: 1667 - protein, 7 aa, Artificial sequence
  Protein classification predicting sequence
DWLERLC

SEQ ID NO: 1668 - protein, 7 aa, Artificial sequence
  Protein classification predicting sequence
TERPVFW

SEQ ID NO: 1669 - protein, 14 aa, Artificial sequence
  Protein classification predicting sequence
KILNTVDCTRPNGG

SEQ ID NO: 1670 - protein, 29 aa, Artificial sequence
  Protein classification predicting sequence
VALMMSDFAGGASGFPMTFSGGKFTEEWK

SEQ ID NO: 1671 - protein, 11 aa, Artificial sequence
  Protein classification predicting sequence
HPSDKYIKETN

SEQ ID NO: 1672 - protein, 13 aa, Artificial sequence
  Protein classification predicting sequence
SWIKEYFTWAGFK

SEQ ID NO: 1673 - protein, 7 aa, Artificial sequence
  Protein classification predicting sequence
RMIETDE

SEQ ID NO: 1674 - protein, 11 aa, Artificial sequence
  Protein classification predicting sequence
YLVDFLDLSFP

SEQ ID NO: 1675 - protein, 14 aa, Artificial sequence
  Protein classification predicting sequence
FWNHFQIKLPLTPP

SEQ ID NO: 1676 - protein, 8 aa, Artificial sequence
  Protein classification predicting sequence
NVIDNLTN

SEQ ID NO: 1677 - protein, 7 aa, Artificial sequence
  Protein classification predicting sequence
NSAILRY

SEQ ID NO: 1678 - protein, 13 aa, Artificial sequence
  Protein classification predicting sequence
APGAPHPFHLHGH

SEQ ID NO: 1679 - protein, 9 aa, Artificial sequence
  Protein classification predicting sequence
PHPFHLHGH

SEQ ID NO: 1680 - protein, 9 aa, Artificial sequence
  Protein classification predicting sequence
LTTVDHKKI

SEQ ID NO: 1681 - protein, 10 aa, Artificial sequence
  Protein classification predicting sequence
VWAHHMFTVG

SEQ ID NO: 1682 - protein, 8 aa, Artificial sequence
  Protein classification predicting sequence
YFVVAHFH

SEQ ID NO: 1683 - protein, 7 aa, Artificial sequence
  Protein classification predicting sequence
SILGAIN

SEQ ID NO: 1684 - protein, 10 aa, Artificial sequence
  Protein classification predicting sequence
LGFIVWAHHM

SEQ ID NO: 1685 - protein, 5 aa, Artificial sequence
  Protein classification predicting sequence
HHMYT

SEQ ID NO: 1686 - protein, 8 aa, Artificial sequence
  Protein classification predicting sequence
IAVPTGIK

SEQ ID NO: 1687 - protein, 5 aa, Artificial sequence
  Protein classification predicting sequence
KVFSW

SEQ ID NO: 1688 - protein, 7 aa, Artificial sequence
  Protein classification predicting sequence
FLFTVGG

SEQ ID NO: 1689 - protein, 6 aa, Artificial sequence
  Protein classification predicting sequence
VWAHHM

SEQ ID NO: 1690 - protein, 10 aa, Artificial sequence
  Protein classification predicting sequence
TAHAFVMIFF

SEQ ID NO: 1691 - protein, 26 aa, Artificial sequence
  Protein classification predicting sequence
GGGDPILYQHLFWFFGHPEVYILILP

SEQ ID NO: 1692 - protein, 6 aa, Artificial sequence
  Protein classification predicting sequence
GMVYAM

SEQ ID NO: 1693 - protein, 8 aa, Artificial sequence
  Protein classification predicting sequence
GGLTGIVL

SEQ ID NO: 1694 - protein, 5 aa, Artificial sequence
  Protein classification predicting sequence
GMPRR

SEQ ID NO: 1695 - protein, 7 aa, Artificial sequence
  Protein classification predicting sequence
HGTTIEI

SEQ ID NO: 1696 - protein, 6 aa, Artificial sequence
  Protein classification predicting sequence
WTILPA

SEQ ID NO: 1697 - protein, 7 aa, Artificial sequence
  Protein classification predicting sequence
PSFALLY

SEQ ID NO: 1698 - protein, 6 aa, Artificial sequence
  Protein classification predicting sequence
PGRLNQ

SEQ ID NO: 1699 - protein, 7 aa, Artificial sequence
  Protein classification predicting sequence
NHAFMPI

SEQ ID NO: 1700 - protein, 8 aa, Artificial sequence
  Protein classification predicting sequence
MIFFMVMP

SEQ ID NO: 1701 - protein, 6 aa, Artificial sequence
  Protein classification predicting sequence
ATMIIA

SEQ ID NO: 1702 - protein, 7 aa, Artificial sequence
  Protein classification predicting sequence
GFIFLFT

SEQ ID NO: 1703 - protein, 11 aa, Artificial sequence
  Protein classification predicting sequence
GGLTGIVLANS

SEQ ID NO: 1704 - protein, 6 aa, Artificial sequence
  Protein classification predicting sequence
IGAPDM

SEQ ID NO: 1705 - protein, 6 aa, Artificial sequence
  Protein classification predicting sequence
GASVDL

SEQ ID NO: 1706 - protein, 7 aa, Artificial sequence
  Protein classification predicting sequence
YAMISIG

SEQ ID NO: 1707 - protein, 9 aa, Artificial sequence
  Protein classification predicting sequence
DVDTRAYFT

SEQ ID NO: 1708 - protein, 6 aa, Artificial sequence
  Protein classification predicting sequence
KVFSWL

SEQ ID NO: 1709 - protein, 6 aa, Artificial sequence
  Protein classification predicting sequence
NSSLDI

SEQ ID NO: 1710 - protein, 7 aa, Artificial sequence
  Protein classification predicting sequence
STNAKDI

SEQ ID NO: 1711 - protein, 6 aa, Artificial sequence
  Protein classification predicting sequence
FSVLIR

SEQ ID NO: 1712 - protein, 6 aa, Artificial sequence
  Protein classification predicting sequence
PLFVWS

SEQ ID NO: 1713 - protein, 9 aa, Artificial sequence
  Protein classification predicting sequence
ITMLLTDRN

SEQ ID NO: 1714 - protein, 14 aa, Artificial sequence
  Protein classification predicting sequence
ITMLLTDRNLNTTF

SEQ ID NO: 1715 - protein, 8 aa, Artificial sequence
  Protein classification predicting sequence
DPAGGGDP

SEQ ID NO: 1716 - protein, 7 aa, Artificial sequence
  Protein classification predicting sequence
PGFGIIS

SEQ ID NO: 1717 - protein, 7 aa, Artificial sequence
  Protein classification predicting sequence
STFSRKP

SEQ ID NO: 1718 - protein, 10 aa, Artificial sequence
  Protein classification predicting sequence
FGYLGMVYAM

SEQ ID NO: 1719 - protein, 5 aa, Artificial sequence
  Protein classification predicting sequence
MVYAM

SEQ ID NO: 1720 - protein, 16 aa, Artificial sequence
  Protein classification predicting sequence
TVGLDVDTRAYFTAAT

SEQ ID NO: 1721 - protein, 6 aa, Artificial sequence
  Protein classification predicting sequence
FSWLAT

SEQ ID NO: 1722 - protein, 7 aa, Artificial sequence
  Protein classification predicting sequence
FLFTIGG

SEQ ID NO: 1723 - protein, 6 aa, Artificial sequence
  Protein classification predicting sequence
MFIGVN

SEQ ID NO: 1724 - protein, 6 aa, Artificial sequence
  Protein classification predicting sequence
SPPAFH

SEQ ID NO: 1725 - protein, 9 aa, Artificial sequence
  Protein classification predicting sequence
GAPDMAFPR

SEQ ID NO: 1726 - protein, 16 aa, Artificial sequence
  Protein classification predicting sequence
GAPDMAFPRMNNMSFW

SEQ ID NO: 1727 - protein, 6 aa, Artificial sequence
  Protein classification predicting sequence
SSILGA

SEQ ID NO: 1728 - protein, 10 aa, Artificial sequence
  Protein classification predicting sequence
LLLLSLPVLA

SEQ ID NO: 1729 - protein, 9 aa, Artificial sequence
  Protein classification predicting sequence
FSWLATLHG

SEQ ID NO: 1730 - protein, 7 aa, Artificial sequence
  Protein classification predicting sequence
SPAMLWA

SEQ ID NO: 1731 - protein, 8 aa, Artificial sequence
  Protein classification predicting sequence
FFDPAGGG

SEQ ID NO: 1732 - protein, 6 aa, Artificial sequence
  Protein classification predicting sequence
MFVGVN

SEQ ID NO: 1733 - protein, 5 aa, Artificial sequence
  Protein classification predicting sequence
STNHK

SEQ ID NO: 1734 - protein, 12 aa, Artificial sequence
  Protein classification predicting sequence
IGGFGNWLIPLM

SEQ ID NO: 1735 - protein, 7 aa, Artificial sequence
  Protein classification predicting sequence
NTSFFDP

SEQ ID NO: 1736 - protein, 6 aa, Artificial sequence
  Protein classification predicting sequence
GGLTGI

SEQ ID NO: 1737 - protein, 10 aa, Artificial sequence
  Protein classification predicting sequence
MPRRYSDYPD

SEQ ID NO: 1738 - protein, 7 aa, Artificial sequence
  Protein classification predicting sequence
GVSSILG

SEQ ID NO: 1739 - protein, 11 aa, Artificial sequence
  Protein classification predicting sequence
STNHKDIGTLY

SEQ ID NO: 1740 - protein, 26 aa, Artificial sequence
  Protein classification predicting sequence
STNHKDIGTLYFIFGAWAGMVGTSLS

SEQ ID NO: 1741 - protein, 9 aa, Artificial sequence
  Protein classification predicting sequence
MIFFMVMPI

SEQ ID NO: 1742 - protein, 10 aa, Artificial sequence
  Protein classification predicting sequence
IGGFGNWLVP

SEQ ID NO: 1743 - protein, 9 aa, Artificial sequence
  Protein classification predicting sequence
LLLASSMVE

SEQ ID NO: 1744 - protein, 6 aa, Artificial sequence
  Protein classification predicting sequence
VDLAIF

SEQ ID NO: 1745 - protein, 9 aa, Artificial sequence
  Protein classification predicting sequence
NFITTIINM

SEQ ID NO: 1746 - protein, 9 aa, Artificial sequence
  Protein classification predicting sequence
PTGIKIFSW

SEQ ID NO: 1747 - protein, 9 aa, Artificial sequence
  Protein classification predicting sequence
NHKDIGTLY

SEQ ID NO: 1748 - protein, 9 aa, Artificial sequence
  Protein classification predicting sequence
PLMLGAPDM

SEQ ID NO: 1749 - protein, 7 aa, Artificial sequence
  Protein classification predicting sequence
WTVYPPL

SEQ ID NO: 1750 - protein, 6 aa, Artificial sequence
  Protein classification predicting sequence
LGMVYA

SEQ ID NO: 1751 - protein, 7 aa, Artificial sequence
  Protein classification predicting sequence
HHMYTVG

SEQ ID NO: 1752 - protein, 5 aa, Artificial sequence
  Protein classification predicting sequence
RAYFT

SEQ ID NO: 1753 - protein, 7 aa, Artificial sequence
  Protein classification predicting sequence
HFHYVLS

SEQ ID NO: 1754 - protein, 9 aa, Artificial sequence
  Protein classification predicting sequence
LNMRTNGMT

SEQ ID NO: 1755 - protein, 6 aa, Artificial sequence
  Protein classification predicting sequence
SHIVST

SEQ ID NO: 1756 - protein, 7 aa, Artificial sequence
  Protein classification predicting sequence
HDTYYVV

SEQ ID NO: 1757 - protein, 8 aa, Artificial sequence
  Protein classification predicting sequence
QIQFWLIF

SEQ ID NO: 1758 - protein, 7 aa, Artificial sequence
  Protein classification predicting sequence
GWNLVSS

SEQ ID NO: 1759 - protein, 16 aa, Artificial sequence
  Protein classification predicting sequence
RWFFSTNHKDIGTLYL

SEQ ID NO: 1760 - protein, 13 aa, Artificial sequence
  Protein classification predicting sequence
FSTNHKDIGTLYL

SEQ ID NO: 1761 - protein, 21 aa, Artificial sequence
  Protein classification predicting sequence
PLMIGAPDMAFPRMNNMSFWL

SEQ ID NO: 1762 - protein, 10 aa, Artificial sequence
  Protein classification predicting sequence
PPSFLLLLAS

SEQ ID NO: 1763 - protein, 6 aa, Artificial sequence
  Protein classification predicting sequence
INFITT

SEQ ID NO: 1764 - protein, 7 aa, Artificial sequence
  Protein classification predicting sequence
SIGILGF

SEQ ID NO: 1765 - protein, 6 aa, Artificial sequence
  Protein classification predicting sequence
LWALGF

SEQ ID NO: 1766 - protein, 11 aa, Artificial sequence
  Protein classification predicting sequence
SFPPSHHTFDE

SEQ ID NO: 1767 - protein, 12 aa, Artificial sequence
  Protein classification predicting sequence
FGHPEVYILILP

SEQ ID NO: 1768 - protein, 7 aa, Artificial sequence
  Protein classification predicting sequence
PTGIKIF

SEQ ID NO: 1769 - protein, 12 aa, Artificial sequence
  Protein classification predicting sequence
QYQTPLFVWSVL

SEQ ID NO: 1770 - protein, 10 aa, Artificial sequence
  Protein classification predicting sequence
WALGFIFLFT

SEQ ID NO: 1771 - protein, 6 aa, Artificial sequence
  Protein classification predicting sequence
TNLEWL

SEQ ID NO: 1772 - protein, 115 aa, Artificial sequence
  Protein classification predicting sequence
GGLTGIVLANSGLDIALHDTYYVVAHFHYVLSMGAVFALFAGFYYWVGKIFGRTYPETLGQIHFWITFFGVNLTFFPMHFLGLSGMPRRIPDYPDAYAGWNALSSFGSYISVVGI

SEQ ID NO: 1773 - protein, 9 aa, Artificial sequence
  Protein classification predicting sequence
SSGKNKRCA

SEQ ID NO: 1774 - protein, 5 aa, Artificial sequence
  Protein classification predicting sequence
NKRCA

SEQ ID NO: 1775 - protein, 15 aa, Artificial sequence
  Protein classification predicting sequence
RWLFSTNHKDIGTLY

SEQ ID NO: 1776 - protein, 11 aa, Artificial sequence
  Protein classification predicting sequence
QYQTPLFVWSV

SEQ ID NO: 1777 - protein, 7 aa, Artificial sequence
  Protein classification predicting sequence
PLFVWSV

SEQ ID NO: 1778 - protein, 7 aa, Artificial sequence
  Protein classification predicting sequence
IMFVGVN

SEQ ID NO: 1779 - protein, 12 aa, Artificial sequence
  Protein classification predicting sequence
GCPPPYHTFEEP

SEQ ID NO: 1780 - protein, 6 aa, Artificial sequence
  Protein classification predicting sequence
SLHLAG

SEQ ID NO: 1781 - protein, 7 aa, Artificial sequence
  Protein classification predicting sequence
WFPKMTG

SEQ ID NO: 1782 - protein, 6 aa, Artificial sequence
  Protein classification predicting sequence
GMPRRY

SEQ ID NO: 1783 - protein, 10 aa, Artificial sequence
  Protein classification predicting sequence
DYPDAFAGWN

SEQ ID NO: 1784 - protein, 6 aa, Artificial sequence
  Protein classification predicting sequence
INMKPP

SEQ ID NO: 1785 - protein, 15 aa, Artificial sequence
  Protein classification predicting sequence
GKKEPFGYMGMVWAM

SEQ ID NO: 1786 - protein, 6 aa, Artificial sequence
  Protein classification predicting sequence
IKWETP

SEQ ID NO: 1787 - protein, 12 aa, Artificial sequence
  Protein classification predicting sequence
FSTNHKDIGTLY

SEQ ID NO: 1788 - protein, 10 aa, Artificial sequence
  Protein classification predicting sequence
FGAWAGMVGT

SEQ ID NO: 1789 - protein, 18 aa, Artificial sequence
  Protein classification predicting sequence
DTRAYFTSATMIIAIPTG

SEQ ID NO: 1790 - protein, 9 aa, Artificial sequence
  Protein classification predicting sequence
AGFTHWFPL

SEQ ID NO: 1791 - protein, 6 aa, Artificial sequence
  Protein classification predicting sequence
HFGVMF

SEQ ID NO: 1792 - protein, 8 aa, Artificial sequence
  Protein classification predicting sequence
SSIGSLIS

SEQ ID NO: 1793 - protein, 9 aa, Artificial sequence
  Protein classification predicting sequence
IWEAFASKR

SEQ ID NO: 1794 - protein, 5 aa, Artificial sequence
  Protein classification predicting sequence
TNVEW

SEQ ID NO: 1795 - protein, 9 aa, Artificial sequence
  Protein classification predicting sequence
EWIHGCPPP

SEQ ID NO: 1796 - protein, 10 aa, Artificial sequence
  Protein classification predicting sequence
FIGVNLTFFP

SEQ ID NO: 1797 - protein, 6 aa, Artificial sequence
  Protein classification predicting sequence
WNTVSS

SEQ ID NO: 1798 - protein, 13 aa, Artificial sequence
  Protein classification predicting sequence
MIFMIWEAFASKR

SEQ ID NO: 1799 - protein, 6 aa, Artificial sequence
  Protein classification predicting sequence
DMAFPR

SEQ ID NO: 1800 - protein, 40 aa, Artificial sequence
  Protein classification predicting sequence
GAGTGWTVYPPLSSIQAHSGPSVDLAIFALHLTSISSLLG

SEQ ID NO: 1801 - protein, 32 aa, Artificial sequence
  Protein classification predicting sequence
TGVALANASLDVAFHDTYYVVGHFHYVLSMGA

SEQ ID NO: 1802 - protein, 10 aa, Artificial sequence
  Protein classification predicting sequence
HFHYVLSMGA

SEQ ID NO: 1803 - protein, 12 aa, Artificial sequence
  Protein classification predicting sequence
HFHYVLSMGAVF

SEQ ID NO: 1804 - protein, 6 aa, Artificial sequence
  Protein classification predicting sequence
PMHFLG

SEQ ID NO: 1805 - protein, 9 aa, Artificial sequence
  Protein classification predicting sequence
LFIYILYDQ

SEQ ID NO: 1806 - protein, 7 aa, Artificial sequence
  Protein classification predicting sequence
PDFVESN

SEQ ID NO: 1807 - protein, 19 aa, Artificial sequence
  Protein classification predicting sequence
WALGFIFLFTVGGLTGIVL

SEQ ID NO: 1808 - protein, 21 aa, Artificial sequence
  Protein classification predicting sequence
MDVDTRAYFTSATMIIAIPTG

SEQ ID NO: 1809 - protein, 7 aa, Artificial sequence
  Protein classification predicting sequence
PDMAFPR

SEQ ID NO: 1810 - protein, 7 aa, Artificial sequence
  Protein classification predicting sequence
SALVEVG

SEQ ID NO: 1811 - protein, 9 aa, Artificial sequence
  Protein classification predicting sequence
VDLAIFSLH

SEQ ID NO: 1812 - protein, 7 aa, Artificial sequence
  Protein classification predicting sequence
KTPMLFA

SEQ ID NO: 1813 - protein, 8 aa, Artificial sequence
  Protein classification predicting sequence
FIGVNLTF

SEQ ID NO: 1814 - protein, 6 aa, Artificial sequence
  Protein classification predicting sequence
AFPRLN

SEQ ID NO: 1815 - protein, 5 aa, Artificial sequence
  Protein classification predicting sequence
AHFHY

SEQ ID NO: 1816 - protein, 20 aa, Artificial sequence
  Protein classification predicting sequence
FGAWAGMVGTALSLLIRAEL

SEQ ID NO: 1817 - protein, 16 aa, Artificial sequence
  Protein classification predicting sequence
IGGFGNWLVPLMIGAP

SEQ ID NO: 1818 - protein, 10 aa, Artificial sequence
  Protein classification predicting sequence
SQYQTPLFVW

SEQ ID NO: 1819 - protein, 12 aa, Artificial sequence
  Protein classification predicting sequence
KVFSWLATLHGG

SEQ ID NO: 1820 - protein, 8 aa, Artificial sequence
  Protein classification predicting sequence
WEAFASKR

SEQ ID NO: 1821 - protein, 17 aa, Artificial sequence
  Protein classification predicting sequence
FSTNHKDIGTLYLIFGA

SEQ ID NO: 1822 - protein, 6 aa, Artificial sequence
  Protein classification predicting sequence
GGFGNW

SEQ ID NO: 1823 - protein, 11 aa, Artificial sequence
  Protein classification predicting sequence
PLFVWSVLVTA

SEQ ID NO: 1824 - protein, 8 aa, Artificial sequence
  Protein classification predicting sequence
PVLAGAIT

SEQ ID NO: 1825 - protein, 17 aa, Artificial sequence
  Protein classification predicting sequence
LFQHLFWFFGHPEVYIL

SEQ ID NO: 1826 - protein, 8 aa, Artificial sequence
  Protein classification predicting sequence
FSWIATMW

SEQ ID NO: 1827 - protein, 7 aa, Artificial sequence
  Protein classification predicting sequence
ANSGLDI

SEQ ID NO: 1828 - protein, 8 aa, Artificial sequence
  Protein classification predicting sequence
GVNLTFFP

SEQ ID NO: 1829 - protein, 6 aa, Artificial sequence
  Protein classification predicting sequence
GAGTGW

SEQ ID NO: 1830 - protein, 12 aa, Artificial sequence
  Protein classification predicting sequence
MPRRYSDYPDAY

SEQ ID NO: 1831 - protein, 8 aa, Artificial sequence
  Protein classification predicting sequence
GDDQIYNV

SEQ ID NO: 1832 - protein, 20 aa, Artificial sequence
  Protein classification predicting sequence
SSILGAINFITTIINMKPPA

SEQ ID NO: 1833 - protein, 34 aa, Artificial sequence
  Protein classification predicting sequence
SSILGAINFITTIINMKPPAMTQYQTPLFVWSVL

SEQ ID NO: 1834 - protein, 7 aa, Artificial sequence
  Protein classification predicting sequence
TWAKIHF

SEQ ID NO: 1835 - protein, 9 aa, Artificial sequence
  Protein classification predicting sequence
AHAGASVDL

SEQ ID NO: 1836 - protein, 6 aa, Artificial sequence
  Protein classification predicting sequence
HWFPLF

SEQ ID NO: 1837 - protein, 6 aa, Artificial sequence
  Protein classification predicting sequence
WAKIHF

SEQ ID NO: 1838 - protein, 10 aa, Artificial sequence
  Protein classification predicting sequence
GCPPPYHTFE

SEQ ID NO: 1839 - protein, 6 aa, Artificial sequence
  Protein classification predicting sequence
VTAHAF

SEQ ID NO: 1840 - protein, 7 aa, Artificial sequence
  Protein classification predicting sequence
SVDLAIF

SEQ ID NO: 1841 - protein, 6 aa, Artificial sequence
  Protein classification predicting sequence
WAMMSI

SEQ ID NO: 1842 - protein, 6 aa, Artificial sequence
  Protein classification predicting sequence
PPPYHT

SEQ ID NO: 1843 - protein, 13 aa, Artificial sequence
  Protein classification predicting sequence
GAGTGWTVYPPLS

SEQ ID NO: 1844 - protein, 11 aa, Artificial sequence
  Protein classification predicting sequence
GTGWTVYPPLS

SEQ ID NO: 1845 - protein, 10 aa, Artificial sequence
  Protein classification predicting sequence
LIRAELGQPG

SEQ ID NO: 1846 - protein, 20 aa, Artificial sequence
  Protein classification predicting sequence
EAGAGTGWTVYPPLAGNLAH

SEQ ID NO: 1847 - protein, 12 aa, Artificial sequence
  Protein classification predicting sequence
SSMGSFISLTAV

SEQ ID NO: 1848 - protein, 10 aa, Artificial sequence
  Protein classification predicting sequence
WEAFASKREV

SEQ ID NO: 1849 - protein, 16 aa, Artificial sequence
  Protein classification predicting sequence
WEAFASKREVSTVELT

SEQ ID NO: 1850 - protein, 7 aa, Artificial sequence
  Protein classification predicting sequence
YHTFEEP

SEQ ID NO: 1851 - protein, 41 aa, Artificial sequence
  Protein classification predicting sequence
MIFFMVMPALIGGFGNFLLPLLVGGPDMAFPRLNNISFWLL

SEQ ID NO: 1852 - protein, 16 aa, Artificial sequence
  Protein classification predicting sequence
PDMAFPRLNNISFWLL

SEQ ID NO: 1853 - protein, 6 aa, Artificial sequence
  Protein classification predicting sequence
NFITTI

SEQ ID NO: 1854 - protein, 9 aa, Artificial sequence
  Protein classification predicting sequence
DRNFNTSFF

SEQ ID NO: 1855 - protein, 7 aa, Artificial sequence
  Protein classification predicting sequence
VWSHHMY

SEQ ID NO: 1856 - protein, 6 aa, Artificial sequence
  Protein classification predicting sequence
FTIGGL

SEQ ID NO: 1857 - protein, 9 aa, Artificial sequence
  Protein classification predicting sequence
GSFISLTAV

SEQ ID NO: 1858 - protein, 14 aa, Artificial sequence
  Protein classification predicting sequence
GSFISLTAVMLMIF

SEQ ID NO: 1859 - protein, 16 aa, Artificial sequence
  Protein classification predicting sequence
EWLHGCPPPYHTFEEP

SEQ ID NO: 1860 - protein, 26 aa, Artificial sequence
  Protein classification predicting sequence
LLGDDQIYNVIVTAHAFVMIFFMVMP

SEQ ID NO: 1861 - protein, 12 aa, Artificial sequence
  Protein classification predicting sequence
ITMLLTDRNLNT

SEQ ID NO: 1862 - protein, 14 aa, Artificial sequence
  Protein classification predicting sequence
GVNLTFFPQHFLGL

SEQ ID NO: 1863 - protein, 10 aa, Artificial sequence
  Protein classification predicting sequence
TFFPQHFLGL

SEQ ID NO: 1864 - protein, 5 aa, Artificial sequence
  Protein classification predicting sequence
MIWEA

SEQ ID NO: 1865 - protein, 8 aa, Artificial sequence
  Protein classification predicting sequence
LTTTNLEW

SEQ ID NO: 1866 - protein, 6 aa, Artificial sequence
  Protein classification predicting sequence
TTVDHK

SEQ ID NO: 1867 - protein, 6 aa, Artificial sequence
  Protein classification predicting sequence
FWLLPP

SEQ ID NO: 1868 - protein, 6 aa, Artificial sequence
  Protein classification predicting sequence
GAINFI

SEQ ID NO: 1869 - protein, 8 aa, Artificial sequence
  Protein classification predicting sequence
MLLLDRNF

SEQ ID NO: 1870 - protein, 9 aa, Artificial sequence
  Protein classification predicting sequence
LSLLIRAEL

SEQ ID NO: 1871 - protein, 13 aa, Artificial sequence
  Protein classification predicting sequence
LSLLIRAELGQPG

SEQ ID NO: 1872 - protein, 23 aa, Artificial sequence
  Protein classification predicting sequence
LYQHLFWFFGHPEVYILILPGFG

SEQ ID NO: 1873 - protein, 6 aa, Artificial sequence
  Protein classification predicting sequence
FGAWAG

SEQ ID NO: 1874 - protein, 8 aa, Artificial sequence
  Protein classification predicting sequence
SFWLLPPS

SEQ ID NO: 1875 - protein, 47 aa, Artificial sequence
  Protein classification predicting sequence
LGFIVWAHHMFTVGMDVDTRAYFTSATMIIAIPTGVKVFSWLATLHG

SEQ ID NO: 1876 - protein, 9 aa, Artificial sequence
  Protein classification predicting sequence
AKIHFTIMF

SEQ ID NO: 1877 - protein, 7 aa, Artificial sequence
  Protein classification predicting sequence
LGAINFI

SEQ ID NO: 1878 - protein, 14 aa, Artificial sequence
  Protein classification predicting sequence
QPGALLGDDQIYNV

SEQ ID NO: 1879 - protein, 10 aa, Artificial sequence
  Protein classification predicting sequence
LLGDDQIYNV

SEQ ID NO: 1880 - protein, 7 aa, Artificial sequence
  Protein classification predicting sequence
LLLLASS

SEQ ID NO: 1881 - protein, 7 aa, Artificial sequence
  Protein classification predicting sequence
QYQTPLF

SEQ ID NO: 1882 - protein, 12 aa, Artificial sequence
  Protein classification predicting sequence
TNVEWLHGCPPP

SEQ ID NO: 1883 - protein, 7 aa, Artificial sequence
  Protein classification predicting sequence
EEPAFVQ

SEQ ID NO: 1884 - protein, 6 aa, Artificial sequence
  Protein classification predicting sequence
FPRLNN

SEQ ID NO: 1885 - protein, 6 aa, Artificial sequence
  Protein classification predicting sequence
NNMSFW

SEQ ID NO: 1886 - protein, 6 aa, Artificial sequence
  Protein classification predicting sequence
GWTLYP

SEQ ID NO: 1887 - protein, 6 aa, Artificial sequence
  Protein classification predicting sequence
VGMDVD

SEQ ID NO: 1888 - protein, 5 aa, Artificial sequence
  Protein classification predicting sequence
FFPMH

SEQ ID NO: 1889 - protein, 9 aa, Artificial sequence
  Protein classification predicting sequence
IRAELGQPG

SEQ ID NO: 1890 - protein, 12 aa, Artificial sequence
  Protein classification predicting sequence
ATMIIAVPTGIK

SEQ ID NO: 1891 - protein, 6 aa, Artificial sequence
  Protein classification predicting sequence
WAGMVG

SEQ ID NO: 1892 - protein, 6 aa, Artificial sequence
  Protein classification predicting sequence
ELSQPG

SEQ ID NO: 1893 - protein, 6 aa, Artificial sequence
  Protein classification predicting sequence
FVMIFF

SEQ ID NO: 1894 - protein, 9 aa, Artificial sequence
  Protein classification predicting sequence
NFITTVINM

SEQ ID NO: 1895 - protein, 6 aa, Artificial sequence
  Protein classification predicting sequence
WEAFAS

SEQ ID NO: 1896 - protein, 40 aa, Artificial sequence
  Protein classification predicting sequence
DVDTRAYFTSATMIIAIPTGVKVFSWLATLHGGNIKWSPA

SEQ ID NO: 1897 - protein, 11 aa, Artificial sequence
  Protein classification predicting sequence
LWALGFIFLFT

SEQ ID NO: 1898 - protein, 41 aa, Artificial sequence
  Protein classification predicting sequence
NSSLDIVLHDTYYVVAHFHYVLSMGAVFAIMGGFVHWFPLF

SEQ ID NO: 1899 - protein, 6 aa, Artificial sequence
  Protein classification predicting sequence
GYTLND

SEQ ID NO: 1900 - protein, 22 aa, Artificial sequence
  Protein classification predicting sequence
IFGAIAGVMGTCFSVLIRMELA

SEQ ID NO: 1901 - protein, 7 aa, Artificial sequence
  Protein classification predicting sequence
LIRMELA

SEQ ID NO: 1902 - protein, 44 aa, Artificial sequence
  Protein classification predicting sequence
QILGGNHQLYNVLITAHAFLMIFFMVMPAMIGGFGNWFVPILIG

SEQ ID NO: 1903 - protein, 17 aa, Artificial sequence
  Protein classification predicting sequence
GWTVYPPLSGITSHSGG

SEQ ID NO: 1904 - protein, 10 aa, Artificial sequence
  Protein classification predicting sequence
VDLAIFSLHL

SEQ ID NO: 1905 - protein, 21 aa, Artificial sequence
  Protein classification predicting sequence
KPVFGYLGMVYAMISIGVLGF

SEQ ID NO: 1906 - protein, 20 aa, Artificial sequence
  Protein classification predicting sequence
VWAHHMFTVGLDVDTRAYFT

SEQ ID NO: 1907 - protein, 6 aa, Artificial sequence
  Protein classification predicting sequence
SSFGSY

SEQ ID NO: 1908 - protein, 7 aa, Artificial sequence
  Protein classification predicting sequence
HSGGAVD

SEQ ID NO: 1909 - protein, 12 aa, Artificial sequence
  Protein classification predicting sequence
TAFLLLLSLPVL

SEQ ID NO: 1910 - protein, 15 aa, Artificial sequence
  Protein classification predicting sequence
NTTFFDPAGGGDPIL

SEQ ID NO: 1911 - protein, 20 aa, Artificial sequence
  Protein classification predicting sequence
VWAHHMFTVGMDVDTRAYFT

SEQ ID NO: 1912 - protein, 7 aa, Artificial sequence
  Protein classification predicting sequence
GFVFLFT

SEQ ID NO: 1913 - protein, 6 aa, Artificial sequence
  Protein classification predicting sequence
PRRYSD

SEQ ID NO: 1914 - protein, 6 aa, Artificial sequence
  Protein classification predicting sequence
DVDTRA

SEQ ID NO: 1915 - protein, 12 aa, Artificial sequence
  Protein classification predicting sequence
MLWALGFIFLFT

SEQ ID NO: 1916 - protein, 8 aa, Artificial sequence
  Protein classification predicting sequence
FGNWLIPL

SEQ ID NO: 1917 - protein, 6 aa, Artificial sequence
  Protein classification predicting sequence
DRNFNT

SEQ ID NO: 1918 - protein, 13 aa, Artificial sequence
  Protein classification predicting sequence
NTTFFDPAGGGDP

SEQ ID NO: 1919 - protein, 13 aa, Artificial sequence
  Protein classification predicting sequence
YSGKKEPFGYMGM

SEQ ID NO: 1920 - protein, 28 aa, Artificial sequence
  Protein classification predicting sequence
GVNLTFFPQHFLGLAGMPRRYSDYPDAY

SEQ ID NO: 1921 - protein, 5 aa, Artificial sequence
  Protein classification predicting sequence
IRMEL

SEQ ID NO: 1922 - protein, 15 aa, Artificial sequence
  Protein classification predicting sequence
HSGPSVDLAIFALHL

SEQ ID NO: 1923 - protein, 7 aa, Artificial sequence
  Protein classification predicting sequence
LANASLD

SEQ ID NO: 1924 - protein, 6 aa, Artificial sequence
  Protein classification predicting sequence
GMTMHR

SEQ ID NO: 1925 - protein, 25 aa, Artificial sequence
  Protein classification predicting sequence
KIFSWIATMWGGSIQYKTPMLFAVG

SEQ ID NO: 1926 - protein, 15 aa, Artificial sequence
  Protein classification predicting sequence
VQSPPAFHTFGELPA

SEQ ID NO: 1927 - protein, 48 aa, Artificial sequence
  Protein classification predicting sequence
TAVLLLLSLPVLAAGITMLLTDRNLNTTFFDPAGGGDPILYQHLFWFF

SEQ ID NO: 1928 - protein, 13 aa, Artificial sequence
  Protein classification predicting sequence
HPEVYILILPGFG

SEQ ID NO: 1929 - protein, 6 aa, Artificial sequence
  Protein classification predicting sequence
WNALSS

SEQ ID NO: 1930 - protein, 10 aa, Artificial sequence
  Protein classification predicting sequence
KREVLSVELT

SEQ ID NO: 1931 - protein, 14 aa, Artificial sequence
  Protein classification predicting sequence
EWLHGCPPPYHTFE

SEQ ID NO: 1932 - protein, 16 aa, Artificial sequence
  Protein classification predicting sequence
NRWLFSTNHKDIGTLY

SEQ ID NO: 1933 - protein, 44 aa, Artificial sequence
  Protein classification predicting sequence
LGFIVWAHHMFTVGMDVDTRAYFTSATMIIAIPTGVKVFSWLAT

SEQ ID NO: 1934 - protein, 15 aa, Artificial sequence
  Protein classification predicting sequence
TWAKIHFTIMFVGVN

SEQ ID NO: 1935 - protein, 14 aa, Artificial sequence
  Protein classification predicting sequence
GMPRRYSDYPDAYT

SEQ ID NO: 1936 - protein, 52 aa, Artificial sequence
  Protein classification predicting sequence
VTAHAFVMIFFMVMPIMIGGFGNWLVPLMIGAPDMAFPRMNNMSFWLLPPSF

SEQ ID NO: 1937 - protein, 9 aa, Artificial sequence
  Protein classification predicting sequence
LMVFMIWEA

SEQ ID NO: 1938 - protein, 21 aa, Artificial sequence
  Protein classification predicting sequence
GGNIKWSPAMLWALGFIFLFT

SEQ ID NO: 1939 - protein, 16 aa, Artificial sequence
  Protein classification predicting sequence
ITALLLLLSLPVLAGA

SEQ ID NO: 1940 - protein, 7 aa, Artificial sequence
  Protein classification predicting sequence
TDRNLNT

SEQ ID NO: 1941 - protein, 7 aa, Artificial sequence
  Protein classification predicting sequence
FFDPAGG

SEQ ID NO: 1942 - protein, 32 aa, Artificial sequence
  Protein classification predicting sequence
DTRAYFTSATMIIAVPTGIKIFSWLATLHGTQ

SEQ ID NO: 1943 - protein, 7 aa, Artificial sequence
  Protein classification predicting sequence
PPAEHSY

SEQ ID NO: 1944 - protein, 15 aa, Artificial sequence
  Protein classification predicting sequence
GASVDLTIFSLHLAG

SEQ ID NO: 1945 - protein, 8 aa, Artificial sequence
  Protein classification predicting sequence
LTSTNLEW

SEQ ID NO: 1946 - protein, 23 aa, Artificial sequence
  Protein classification predicting sequence
RWLFSTNHKDIGTLYLLFGAWAG

SEQ ID NO: 1947 - protein, 14 aa, Artificial sequence
  Protein classification predicting sequence
ALSLLIRAELGQPG

SEQ ID NO: 1948 - protein, 44 aa, Artificial sequence
  Protein classification predicting sequence
IYNVIVTAHAFVMIFFMVMPIMIGGFGNWLVPLMIGAPDMAFPR

SEQ ID NO: 1949 - protein, 9 aa, Artificial sequence
  Protein classification predicting sequence
SHPGASVDL

SEQ ID NO: 1950 - protein, 8 aa, Artificial sequence
  Protein classification predicting sequence
IFSLHLAG

SEQ ID NO: 1951 - protein, 10 aa, Artificial sequence
  Protein classification predicting sequence
QYQTPLFVWS

SEQ ID NO: 1952 - protein, 32 aa, Artificial sequence
  Protein classification predicting sequence
GVNLTFFPQHFLGLSGMPRRYSDYPDAYTTWN

SEQ ID NO: 1953 - protein, 8 aa, Artificial sequence
  Protein classification predicting sequence
GSFISLTA

SEQ ID NO: 1954 - protein, 10 aa, Artificial sequence
  Protein classification predicting sequence
MIWEAFASKR

SEQ ID NO: 1955 - protein, 6 aa, Artificial sequence
  Protein classification predicting sequence
GGDPIL

SEQ ID NO: 1956 - protein, 13 aa, Artificial sequence
  Protein classification predicting sequence
MIFFMVMPAMIGG

SEQ ID NO: 1957 - protein, 16 aa, Artificial sequence
  Protein classification predicting sequence
SLHLSGVSSILGSINF

SEQ ID NO: 1958 - protein, 11 aa, Artificial sequence
  Protein classification predicting sequence
NMRGPGMTMHR

SEQ ID NO: 1959 - protein, 11 aa, Artificial sequence
  Protein classification predicting sequence
GIISHIVSTFS

SEQ ID NO: 1960 - protein, 16 aa, Artificial sequence
  Protein classification predicting sequence
YWVGKIFGRTYPETLG

SEQ ID NO: 1961 - protein, 7 aa, Artificial sequence
  Protein classification predicting sequence
PWAVEQN

SEQ ID NO: 1962 - protein, 19 aa, Artificial sequence
  Protein classification predicting sequence
YNVIVTAHAFVMIFFMVMP

SEQ ID NO: 1963 - protein, 13 aa, Artificial sequence
  Protein classification predicting sequence
GAGTGWTVYPPLA

SEQ ID NO: 1964 - protein, 11 aa, Artificial sequence
  Protein classification predicting sequence
PLFVWSVLITA

SEQ ID NO: 1965 - protein, 7 aa, Artificial sequence
  Protein classification predicting sequence
KKEPFGY

SEQ ID NO: 1966 - protein, 7 aa, Artificial sequence
  Protein classification predicting sequence
FGYIGMV

SEQ ID NO: 1967 - protein, 6 aa, Artificial sequence
  Protein classification predicting sequence
GMVWAM

SEQ ID NO: 1968 - protein, 6 aa, Artificial sequence
  Protein classification predicting sequence
TRAYFT

SEQ ID NO: 1969 - protein, 7 aa, Artificial sequence
  Protein classification predicting sequence
AGFTHWF

SEQ ID NO: 1970 - protein, 7 aa, Artificial sequence
  Protein classification predicting sequence
LLGDDQI

SEQ ID NO: 1971 - protein, 22 aa, Artificial sequence
  Protein classification predicting sequence
MIFFMVMPIMIGGFGNWLVPLM

SEQ ID NO: 1972 - protein, 9 aa, Artificial sequence
  Protein classification predicting sequence
NFITTIFNM

SEQ ID NO: 1973 - protein, 14 aa, Artificial sequence
  Protein classification predicting sequence
TAVLLLLSLPVLAA

SEQ ID NO: 1974 - protein, 48 aa, Artificial sequence
  Protein classification predicting sequence
LGFIVWAHHMFTVGMDVDTRAYFTSATMIIAIPTGVKVFSWLATLHGG

SEQ ID NO: 1975 - protein, 24 aa, Artificial sequence
  Protein classification predicting sequence
LHDTYYVVAHFHYVLSMGAVFAIM

SEQ ID NO: 1976 - protein, 7 aa, Artificial sequence
  Protein classification predicting sequence
TWAKAHF

SEQ ID NO: 1977 - protein, 12 aa, Artificial sequence
  Protein classification predicting sequence
EWLHGCPPPYHT

SEQ ID NO: 1978 - protein, 9 aa, Artificial sequence
  Protein classification predicting sequence
HWFPLFSGY

SEQ ID NO: 1979 - protein, 6 aa, Artificial sequence
  Protein classification predicting sequence
IGGFGN

SEQ ID NO: 1980 - protein, 11 aa, Artificial sequence
  Protein classification predicting sequence
HSGPSVDLAIF

SEQ ID NO: 1981 - protein, 6 aa, Artificial sequence
  Protein classification predicting sequence
NMRAPG

SEQ ID NO: 1982 - protein, 8 aa, Artificial sequence
  Protein classification predicting sequence
PLFVWSVL

SEQ ID NO: 1983 - protein, 7 aa, Artificial sequence
  Protein classification predicting sequence
NSGLDIA

SEQ ID NO: 1984 - protein, 7 aa, Artificial sequence
  Protein classification predicting sequence
LGQIHFW

SEQ ID NO: 1985 - protein, 8 aa, Artificial sequence
  Protein classification predicting sequence
SSFGSYIS

SEQ ID NO: 1986 - protein, 6 aa, Artificial sequence
  Protein classification predicting sequence
IVTAHA

SEQ ID NO: 1987 - protein, 11 aa, Artificial sequence
  Protein classification predicting sequence
VMPALIGGFGN

SEQ ID NO: 1988 - protein, 11 aa, Artificial sequence
  Protein classification predicting sequence
IFSLHLAGVSS

SEQ ID NO: 1989 - protein, 11 aa, Artificial sequence
  Protein classification predicting sequence
QLFNVLVVGHA

SEQ ID NO: 1990 - protein, 7 aa, Artificial sequence
  Protein classification predicting sequence
NMRTNGM

SEQ ID NO: 1991 - protein, 17 aa, Artificial sequence
  Protein classification predicting sequence
DRNFNTSFFEVAGGGDP

SEQ ID NO: 1992 - protein, 25 aa, Artificial sequence
  Protein classification predicting sequence
LGFLVWSHHMYIVGLDADTRAYFTS

SEQ ID NO: 1993 - protein, 6 aa, Artificial sequence
  Protein classification predicting sequence
GMPRRI

SEQ ID NO: 1994 - protein, 17 aa, Artificial sequence
  Protein classification predicting sequence
GMPRRIPDYPDAYAGWN

SEQ ID NO: 1995 - protein, 16 aa, Artificial sequence
  Protein classification predicting sequence
WNTISSMGSFISLTAV

SEQ ID NO: 1996 - protein, 9 aa, Artificial sequence
  Protein classification predicting sequence
GDPILYQHL

SEQ ID NO: 1997 - protein, 7 aa, Artificial sequence
  Protein classification predicting sequence
PQHFLGL

SEQ ID NO: 1998 - protein, 18 aa, Artificial sequence
  Protein classification predicting sequence
VEAGAGTGWTVYPPLAGN

SEQ ID NO: 1999 - protein, 37 aa, Artificial sequence
  Protein classification predicting sequence
VEAGAGTGWTVYPPLAGNYSHPGASVDLTIFSLHLAG

SEQ ID NO: 2000 - protein, 6 aa, Artificial sequence
  Protein classification predicting sequence
ITAHAF

SEQ ID NO: 2001 - protein, 5 aa, Artificial sequence
  Protein classification predicting sequence
MIFFM

SEQ ID NO: 2002 - protein, 29 aa, Artificial sequence
  Protein classification predicting sequence
PILIGAPDMAFPRLNNISFWLLPPSLLLL

SEQ ID NO: 2003 - protein, 12 aa, Artificial sequence
  Protein classification predicting sequence
SFWLLPPSLLLL

SEQ ID NO: 2004 - protein, 8 aa, Artificial sequence
  Protein classification predicting sequence
ATMWGGSI

SEQ ID NO: 2005 - protein, 12 aa, Artificial sequence
  Protein classification predicting sequence
LDVAFHDTYYVV

SEQ ID NO: 2006 - protein, 20 aa, Artificial sequence
  Protein classification predicting sequence
MMSIGFLGFIVWAHHMFTVG

SEQ ID NO: 2007 - protein, 21 aa, Artificial sequence
  Protein classification predicting sequence
MLWALGFIFLFTVGGLTGIVL

SEQ ID NO: 2008 - protein, 10 aa, Artificial sequence
  Protein classification predicting sequence
GYTLNDTWAK

SEQ ID NO: 2009 - protein, 7 aa, Artificial sequence
  Protein classification predicting sequence
HHMYIVG

SEQ ID NO: 2010 - protein, 6 aa, Artificial sequence
  Protein classification predicting sequence
FIFLFT

SEQ ID NO: 2011 - protein, 6 aa, Artificial sequence
  Protein classification predicting sequence
FIGVNL

SEQ ID NO: 2012 - protein, 6 aa, Artificial sequence
  Protein classification predicting sequence
LIRMEL

SEQ ID NO: 2013 - protein, 6 aa, Artificial sequence
  Protein classification predicting sequence
DQIYNV

SEQ ID NO: 2014 - protein, 20 aa, Artificial sequence
  Protein classification predicting sequence
MIFFMVMPIMIGGFGNWLVP

SEQ ID NO: 2015 - protein, 35 aa, Artificial sequence
  Protein classification predicting sequence
AIGLLGFIVWAHHMFTVGMDVDTRAYFTSATMIIA

SEQ ID NO: 2016 - protein, 24 aa, Artificial sequence
  Protein classification predicting sequence
DIVLHDTYYVVAHFHYVLSMGAVF

SEQ ID NO: 2017 - protein, 6 aa, Artificial sequence
  Protein classification predicting sequence
ISLTAV

SEQ ID NO: 2018 - protein, 6 aa, Artificial sequence
  Protein classification predicting sequence
WNTISS

SEQ ID NO: 2019 - protein, 8 aa, Artificial sequence
  Protein classification predicting sequence
GWTVYPPL

SEQ ID NO: 2020 - protein, 9 aa, Artificial sequence
  Protein classification predicting sequence
LFTIGGLTG

SEQ ID NO: 2021 - protein, 13 aa, Artificial sequence
  Protein classification predicting sequence
SVDLTIFSLHLAG

SEQ ID NO: 2022 - protein, 8 aa, Artificial sequence
  Protein classification predicting sequence
ISHVVAYY

SEQ ID NO: 2023 - protein, 21 aa, Artificial sequence
  Protein classification predicting sequence
NSSLDIVLHDTYYVVAHFHYV

SEQ ID NO: 2024 - protein, 11 aa, Artificial sequence
  Protein classification predicting sequence
MGAVFAIMAGF

SEQ ID NO: 2025 - protein, 5 aa, Artificial sequence
  Protein classification predicting sequence
GFIHW

SEQ ID NO: 2026 - protein, 25 aa, Artificial sequence
  Protein classification predicting sequence
TFFPQHFLGLSGMPRRYSDYPDAYT

SEQ ID NO: 2027 - protein, 47 aa, Artificial sequence
  Protein classification predicting sequence
FPMHFLGLSGMPRRIPDYPDAYAGWNALSSFGSYISVVGIRRFFVVV

SEQ ID NO: 2028 - protein, 11 aa, Artificial sequence
  Protein classification predicting sequence
HWFPLFSGYTL

SEQ ID NO: 2029 - protein, 6 aa, Artificial sequence
  Protein classification predicting sequence
IWEAFA

SEQ ID NO: 2030 - protein, 16 aa, Artificial sequence
  Protein classification predicting sequence
RWLFSTNHKDIGTLYL

SEQ ID NO: 2031 - protein, 21 aa, Artificial sequence
  Protein classification predicting sequence
IFSLHLAGVSSILGAINFITT

SEQ ID NO: 2032 - protein, 20 aa, Artificial sequence
  Protein classification predicting sequence
LWALGFIFLFTIGGLTGIVL

SEQ ID NO: 2033 - protein, 9 aa, Artificial sequence
  Protein classification predicting sequence
LLLASAGVE

SEQ ID NO: 2034 - protein, 7 aa, Artificial sequence
  Protein classification predicting sequence
GAGTGWT

SEQ ID NO: 2035 - protein, 5 aa, Artificial sequence
  Protein classification predicting sequence
QHLFW

SEQ ID NO: 2036 - protein, 15 aa, Artificial sequence
  Protein classification predicting sequence
FGHPEVYILILPGFG

SEQ ID NO: 2037 - protein, 20 aa, Artificial sequence
  Protein classification predicting sequence
DVDTRAYFTAATMIIAVPTG

SEQ ID NO: 2038 - protein, 6 aa, Artificial sequence
  Protein classification predicting sequence
PVLAAG

SEQ ID NO: 2039 - protein, 6 aa, Artificial sequence
  Protein classification predicting sequence
HFHYVL

SEQ ID NO: 2040 - protein, 13 aa, Artificial sequence
  Protein classification predicting sequence
QHLFWFFGHPEVY

SEQ ID NO: 2041 - protein, 6 aa, Artificial sequence
  Protein classification predicting sequence
WSHHMY

SEQ ID NO: 2042 - protein, 12 aa, Artificial sequence
  Protein classification predicting sequence
TVGLDVDTRAYF

SEQ ID NO: 2043 - protein, 21 aa, Artificial sequence
  Protein classification predicting sequence
HDTYYVVAHFHYVLSMGAVFA

SEQ ID NO: 2044 - protein, 13 aa, Artificial sequence
  Protein classification predicting sequence
VGTALSLLIRAEL

SEQ ID NO: 2045 - protein, 12 aa, Artificial sequence
  Protein classification predicting sequence
SSILGAINFITT

SEQ ID NO: 2046 - protein, 10 aa, Artificial sequence
  Protein classification predicting sequence
WEAFAAKREV

SEQ ID NO: 2047 - protein, 7 aa, Artificial sequence
  Protein classification predicting sequence
IIRLELA

SEQ ID NO: 2048 - protein, 6 aa, Artificial sequence
  Protein classification predicting sequence
LYQHLF

SEQ ID NO: 2049 - protein, 8 aa, Artificial sequence
  Protein classification predicting sequence
HPEVYILI

SEQ ID NO: 2050 - protein, 6 aa, Artificial sequence
  Protein classification predicting sequence
GMIYAM

SEQ ID NO: 2051 - protein, 6 aa, Artificial sequence
  Protein classification predicting sequence
VWSHHM

SEQ ID NO: 2052 - protein, 6 aa, Artificial sequence
  Protein classification predicting sequence
IKIFSW

SEQ ID NO: 2053 - protein, 28 aa, Artificial sequence
  Protein classification predicting sequence
VEAGAGTGWTVYPPLAGNLAHAGASVDL

SEQ ID NO: 2054 - protein, 58 aa, Artificial sequence
  Protein classification predicting sequence
VEAGAGTGWTVYPPLAGNLAHAGASVDLTIFSLHLAGVSSILGAINFITTIINMKPPA

SEQ ID NO: 2055 - protein, 24 aa, Artificial sequence
  Protein classification predicting sequence
TFFPQHFLGLAGMPRRYSDYPDAY

SEQ ID NO: 2056 - protein, 17 aa, Artificial sequence
  Protein classification predicting sequence
TWNTISSMGSFISLTAV

SEQ ID NO: 2057 - protein, 7 aa, Artificial sequence
  Protein classification predicting sequence
SPLMEQL

SEQ ID NO: 2058 - protein, 7 aa, Artificial sequence
  Protein classification predicting sequence
IWTILPA

SEQ ID NO: 2059 - protein, 7 aa, Artificial sequence
  Protein classification predicting sequence
LGVKTDA

SEQ ID NO: 2060 - protein, 7 aa, Artificial sequence
  Protein classification predicting sequence
KNFINWI

SEQ ID NO: 2061 - protein, 24 aa, Artificial sequence
  Protein classification predicting sequence
FHDHTLMIVFLISSLVLYIISSML

SEQ ID NO: 2062 - protein, 7 aa, Artificial sequence
  Protein classification predicting sequence
LCFDSYM

SEQ ID NO: 2063 - protein, 14 aa, Artificial sequence
  Protein classification predicting sequence
RPGLFYGQCSEICG

SEQ ID NO: 2064 - protein, 6 aa, Artificial sequence
  Protein classification predicting sequence
IALPSL

SEQ ID NO: 2065 - protein, 7 aa, Artificial sequence
  Protein classification predicting sequence
IGHQWYW

SEQ ID NO: 2066 - protein, 8 aa, Artificial sequence
  Protein classification predicting sequence
TWANLGLQ

SEQ ID NO: 2067 - protein, 6 aa, Artificial sequence
  Protein classification predicting sequence
FHDHTL

SEQ ID NO: 2068 - protein, 7 aa, Artificial sequence
  Protein classification predicting sequence
MFMLFFN

SEQ ID NO: 2069 - protein, 9 aa, Artificial sequence
  Protein classification predicting sequence
WTILPAIIL

SEQ ID NO: 2070 - protein, 6 aa, Artificial sequence
  Protein classification predicting sequence
EFDSYM

SEQ ID NO: 2071 - protein, 9 aa, Artificial sequence
  Protein classification predicting sequence
FRLLDVDNR

SEQ ID NO: 2072 - protein, 8 aa, Artificial sequence
  Protein classification predicting sequence
DAVPGRLN

SEQ ID NO: 2073 - protein, 7 aa, Artificial sequence
  Protein classification predicting sequence
NHSFMPI

SEQ ID NO: 2074 - protein, 6 aa, Artificial sequence
  Protein classification predicting sequence
LGFQDA

SEQ ID NO: 2075 - protein, 8 aa, Artificial sequence
  Protein classification predicting sequence
FHDHTLMI

SEQ ID NO: 2076 - protein, 11 aa, Artificial sequence
  Protein classification predicting sequence
GHFRLLEVDHR

SEQ ID NO: 2077 - protein, 10 aa, Artificial sequence
  Protein classification predicting sequence
DVLHSWAIPS

SEQ ID NO: 2078 - protein, 6 aa, Artificial sequence
  Protein classification predicting sequence
FHDHAL

SEQ ID NO: 2079 - protein, 9 aa, Artificial sequence
  Protein classification predicting sequence
FLISSLVLY

SEQ ID NO: 2080 - protein, 8 aa, Artificial sequence
  Protein classification predicting sequence
FDSYMIPT

SEQ ID NO: 2081 - protein, 14 aa, Artificial sequence
  Protein classification predicting sequence
FYGQCSEICGANHS

SEQ ID NO: 2082 - protein, 8 aa, Artificial sequence
  Protein classification predicting sequence
NRFLLHGQ

SEQ ID NO: 2083 - protein, 7 aa, Artificial sequence
  Protein classification predicting sequence
INRPGLF

SEQ ID NO: 2084 - protein, 7 aa, Artificial sequence
  Protein classification predicting sequence
IILMFIA

SEQ ID NO: 2085 - protein, 8 aa, Artificial sequence
  Protein classification predicting sequence
PSLRLLYL

SEQ ID NO: 2086 - protein, 13 aa, Artificial sequence
  Protein classification predicting sequence
NNQIRILVTATDV

SEQ ID NO: 2087 - protein, 5 aa, Artificial sequence
  Protein classification predicting sequence
WSASM

SEQ ID NO: 2088 - protein, 5 aa, Artificial sequence
  Protein classification predicting sequence
IEIIW

SEQ ID NO: 2089 - protein, 6 aa, Artificial sequence
  Protein classification predicting sequence
FNNIEF

SEQ ID NO: 2090 - protein, 5 aa, Artificial sequence
  Protein classification predicting sequence
FENWS

SEQ ID NO: 2091 - protein, 13 aa, Artificial sequence
  Protein classification predicting sequence
IPQRIVHGTTIEI

SEQ ID NO: 2092 - protein, 6 aa, Artificial sequence
  Protein classification predicting sequence
LTFDSY

SEQ ID NO: 2093 - protein, 7 aa, Artificial sequence
  Protein classification predicting sequence
FDSYMIP

SEQ ID NO: 2094 - protein, 6 aa, Artificial sequence
  Protein classification predicting sequence
VSNQLI

SEQ ID NO: 2095 - protein, 6 aa, Artificial sequence
  Protein classification predicting sequence
FQLGLQ

SEQ ID NO: 2096 - protein, 14 aa, Artificial sequence
  Protein classification predicting sequence
QEGILELHDNIMFY

SEQ ID NO: 2097 - protein, 8 aa, Artificial sequence
  Protein classification predicting sequence
YKYIKHGQ

SEQ ID NO: 2098 - protein, 6 aa, Artificial sequence
  Protein classification predicting sequence
SYMIPE

SEQ ID NO: 2099 - protein, 7 aa, Artificial sequence
  Protein classification predicting sequence
DVLHSWA

SEQ ID NO: 2100 - protein, 9 aa, Artificial sequence
  Protein classification predicting sequence
FDSYMIPTS

SEQ ID NO: 2101 - protein, 9 aa, Artificial sequence
  Protein classification predicting sequence
YGQCSEICG

SEQ ID NO: 2102 - protein, 29 aa, Artificial sequence
  Protein classification predicting sequence
SPIMEELLHFHDHTLMIVFLISSLVLYII

SEQ ID NO: 2103 - protein, 15 aa, Artificial sequence
  Protein classification predicting sequence
NPIPQRIVHGTTIEI

SEQ ID NO: 2104 - protein, 7 aa, Artificial sequence
  Protein classification predicting sequence
TIFPSII

SEQ ID NO: 2105 - protein, 10 aa, Artificial sequence
  Protein classification predicting sequence
TIKAIGHQWY

SEQ ID NO: 2106 - protein, 17 aa, Artificial sequence
  Protein classification predicting sequence
MGHQWYWSYEYTDYEDL

SEQ ID NO: 2107 - protein, 19 aa, Artificial sequence
  Protein classification predicting sequence
VPSLGLKTDAIPGRLNQTT

SEQ ID NO: 2108 - protein, 27 aa, Artificial sequence
  Protein classification predicting sequence
VPSLGLKTDAIPGRLNQTTLMSTRPGL

SEQ ID NO: 2109 - protein, 10 aa, Artificial sequence
  Protein classification predicting sequence
QLGFQDAASP

SEQ ID NO: 2110 - protein, 8 aa, Artificial sequence
  Protein classification predicting sequence
LMIVFLIS

SEQ ID NO: 2111 - protein, 6 aa, Artificial sequence
  Protein classification predicting sequence
LVLYII

SEQ ID NO: 2112 - protein, 12 aa, Artificial sequence
  Protein classification predicting sequence
ILDSQEIEIVWT

SEQ ID NO: 2113 - protein, 6 aa, Artificial sequence
  Protein classification predicting sequence
WTVLPA

SEQ ID NO: 2114 - protein, 8 aa, Artificial sequence
  Protein classification predicting sequence
FDSYMVPT

SEQ ID NO: 2115 - protein, 11 aa, Artificial sequence
  Protein classification predicting sequence
KMDAVPGRLNQ

SEQ ID NO: 2116 - protein, 9 aa, Artificial sequence
  Protein classification predicting sequence
AFPSFILLY

SEQ ID NO: 2117 - protein, 6 aa, Artificial sequence
  Protein classification predicting sequence
YEYSDF

SEQ ID NO: 2118 - protein, 7 aa, Artificial sequence
  Protein classification predicting sequence
IPEDLLE

SEQ ID NO: 2119 - protein, 7 aa, Artificial sequence
  Protein classification predicting sequence
KIEAVSL

SEQ ID NO: 2120 - protein, 9 aa, Artificial sequence
  Protein classification predicting sequence
GETIEFESY

SEQ ID NO: 2121 - protein, 22 aa, Artificial sequence
  Protein classification predicting sequence
QDATSPIMEELLHFHDHTLMIV

SEQ ID NO: 2122 - protein, 6 aa, Artificial sequence
  Protein classification predicting sequence
YFETWS

SEQ ID NO: 2123 - protein, 23 aa, Artificial sequence
  Protein classification predicting sequence
ELKPGELRLLEVDNRVVLPMEMT

SEQ ID NO: 2124 - protein, 20 aa, Artificial sequence
  Protein classification predicting sequence
YGQCSEICGSNHSFMPIVLE

SEQ ID NO: 2125 - protein, 10 aa, Artificial sequence
  Protein classification predicting sequence
MEELLHFHDH

SEQ ID NO: 2126 - protein, 14 aa, Artificial sequence
  Protein classification predicting sequence
ILVLIALPSLRILY

SEQ ID NO: 2127 - protein, 6 aa, Artificial sequence
  Protein classification predicting sequence
LTTKLT

SEQ ID NO: 2128 - protein, 6 aa, Artificial sequence
  Protein classification predicting sequence
GHQWYW

SEQ ID NO: 2129 - protein, 10 aa, Artificial sequence
  Protein classification predicting sequence
DAVPGRLNQT

SEQ ID NO: 2130 - protein, 7 aa, Artificial sequence
  Protein classification predicting sequence
PGRLNQT

SEQ ID NO: 2131 - protein, 27 aa, Artificial sequence
  Protein classification predicting sequence
FTATRPGVYYGQCSEICGANHSFMPIV

SEQ ID NO: 2132 - protein, 6 aa, Artificial sequence
  Protein classification predicting sequence
DAQEME

SEQ ID NO: 2133 - protein, 18 aa, Artificial sequence
  Protein classification predicting sequence
LKPGELRLLEVDNRVVLP

SEQ ID NO: 2134 - protein, 22 aa, Artificial sequence
  Protein classification predicting sequence
ISLMLTTKLTHTSTMDAQEVET

SEQ ID NO: 2135 - protein, 11 aa, Artificial sequence
  Protein classification predicting sequence
FLISSLVLYII

SEQ ID NO: 2136 - protein, 17 aa, Artificial sequence
  Protein classification predicting sequence
FLISSLVLYIISLMLTT

SEQ ID NO: 2137 - protein, 19 aa, Artificial sequence
  Protein classification predicting sequence
ILILIALPSLRILYMMDEI

SEQ ID NO: 2138 - protein, 15 aa, Artificial sequence
  Protein classification predicting sequence
KTDAIPGRLNQATLM

SEQ ID NO: 2139 - protein, 9 aa, Artificial sequence
  Protein classification predicting sequence
KAIGHQWYW

SEQ ID NO: 2140 - protein, 7 aa, Artificial sequence
  Protein classification predicting sequence
VPALGVK

SEQ ID NO: 2141 - protein, 14 aa, Artificial sequence
  Protein classification predicting sequence
LGVKTDAIPGRLNQ

SEQ ID NO: 2142 - protein, 40 aa, Artificial sequence
  Protein classification predicting sequence
ILIMITILVGYLMISLFFNSYINRFLLEGQMIELIWTILP

SEQ ID NO: 2143 - protein, 6 aa, Artificial sequence
  Protein classification predicting sequence
LFFNSY

SEQ ID NO: 2144 - protein, 8 aa, Artificial sequence
  Protein classification predicting sequence
ELIWTILP

SEQ ID NO: 2145 - protein, 72 aa, Artificial sequence
  Protein classification predicting sequence
ITLIFIALPSLRLLYLLDELNNPLITLKSIGHQWYWSYEYSDFQNIQFDSYMIPINEMKNNNFRLLDVDNRI

SEQ ID NO: 2146 - protein, 10 aa, Artificial sequence
  Protein classification predicting sequence
FRLLDVDNRI

SEQ ID NO: 2147 - protein, 7 aa, Artificial sequence
  Protein classification predicting sequence
DVIHSWT

SEQ ID NO: 2148 - protein, 15 aa, Artificial sequence
  Protein classification predicting sequence
FRLLDVDNRIVLPMN

SEQ ID NO: 2149 - protein, 16 aa, Artificial sequence
  Protein classification predicting sequence
NIQFDSYMIPINEMKN

SEQ ID NO: 2150 - protein, 26 aa, Artificial sequence
  Protein classification predicting sequence
NNPSLTVKTMGHQWYWSYEYTDYEDL

SEQ ID NO: 2151 - protein, 11 aa, Artificial sequence
  Protein classification predicting sequence
FWVPEFLFKRD

SEQ ID NO: 2152 - protein, 7 aa, Artificial sequence
  Protein classification predicting sequence
PMESPIR

SEQ ID NO: 2153 - protein, 9 aa, Artificial sequence
  Protein classification predicting sequence
DVLHSWAVP

SEQ ID NO: 2154 - protein, 8 aa, Artificial sequence
  Protein classification predicting sequence
RLLEVDNR

SEQ ID NO: 2155 - protein, 12 aa, Artificial sequence
  Protein classification predicting sequence
RLLEVDNRVVLP

SEQ ID NO: 2156 - protein, 27 aa, Artificial sequence
  Protein classification predicting sequence
SSEDVLHSWAVPSLGLKTDAIPGRLNQ

SEQ ID NO: 2157 - protein, 6 aa, Artificial sequence
  Protein classification predicting sequence
SSRPGL

SEQ ID NO: 2158 - protein, 8 aa, Artificial sequence
  Protein classification predicting sequence
NHSFMPIV

SEQ ID NO: 2159 - protein, 7 aa, Artificial sequence
  Protein classification predicting sequence
TSDLKPG

SEQ ID NO: 2160 - protein, 7 aa, Artificial sequence
  Protein classification predicting sequence
VSTKLTN

SEQ ID NO: 2161 - protein, 7 aa, Artificial sequence
  Protein classification predicting sequence
NFNLQNS

SEQ ID NO: 2162 - protein, 7 aa, Artificial sequence
  Protein classification predicting sequence
ITILVGY

SEQ ID NO: 2163 - protein, 7 aa, Artificial sequence
  Protein classification predicting sequence
NSQIRIL

SEQ ID NO: 2164 - protein, 5 aa, Artificial sequence
  Protein classification predicting sequence
FHDHT

SEQ ID NO: 2165 - protein, 6 aa, Artificial sequence
  Protein classification predicting sequence
NYFIKW

SEQ ID NO: 2166 - protein, 8 aa, Artificial sequence
  Protein classification predicting sequence
DPAITIKA

SEQ ID NO: 2167 - protein, 5 aa, Artificial sequence
  Protein classification predicting sequence
HTSTM

SEQ ID NO: 2168 - protein, 6 aa, Artificial sequence
  Protein classification predicting sequence
DEINNP

SEQ ID NO: 2169 - protein, 6 aa, Artificial sequence
  Protein classification predicting sequence
YEYTDY

SEQ ID NO: 2170 - protein, 10 aa, Artificial sequence
  Protein classification predicting sequence
WTILPAIILI

SEQ ID NO: 2171 - protein, 22 aa, Artificial sequence
  Protein classification predicting sequence
LKPGELRLLEVDNRVVLPMEMT

SEQ ID NO: 2172 - protein, 21 aa, Artificial sequence
  Protein classification predicting sequence
LTHTSTMDAQEVETVWTILPA

SEQ ID NO: 2173 - protein, 10 aa, Artificial sequence
  Protein classification predicting sequence
CDAAEPWQLG

SEQ ID NO: 2174 - protein, 21 aa, Artificial sequence
  Protein classification predicting sequence
VQREGVYYGQCSEICGTNHAF

SEQ ID NO: 2175 - protein, 7 aa, Artificial sequence
  Protein classification predicting sequence
ISSLVLY

SEQ ID NO: 2176 - protein, 8 aa, Artificial sequence
  Protein classification predicting sequence
WTILPAII

SEQ ID NO: 2177 - protein, 9 aa, Artificial sequence
  Protein classification predicting sequence
SSEDVLHSW

SEQ ID NO: 2178 - protein, 10 aa, Artificial sequence
  Protein classification predicting sequence
YYGQCSEICG

SEQ ID NO: 2179 - protein, 22 aa, Artificial sequence
  Protein classification predicting sequence
APAMTIKAMGLQWYWKYEYSDF

SEQ ID NO: 2180 - protein, 13 aa, Artificial sequence
  Protein classification predicting sequence
GLQWYWKYEYSDF

SEQ ID NO: 2181 - protein, 8 aa, Artificial sequence
  Protein classification predicting sequence
VTAADVIH

SEQ ID NO: 2182 - protein, 11 aa, Artificial sequence
  Protein classification predicting sequence
QDATSPIMEEL

SEQ ID NO: 2183 - protein, 9 aa, Artificial sequence
  Protein classification predicting sequence
GHQWYWSYE

SEQ ID NO: 2184 - protein, 11 aa, Artificial sequence
  Protein classification predicting sequence
RMLISSEDVLH

SEQ ID NO: 2185 - protein, 12 aa, Artificial sequence
  Protein classification predicting sequence
GVFYGQCSEICG

SEQ ID NO: 2186 - protein, 12 aa, Artificial sequence
  Protein classification predicting sequence
EFDSYMIPTNEL

SEQ ID NO: 2187 - protein, 6 aa, Artificial sequence
  Protein classification predicting sequence
LVGYLM

SEQ ID NO: 2188 - protein, 63 aa, Artificial sequence
  Protein classification predicting sequence
NRFLLHGQLIEMIWTILPAIILLFIAMPSLRLLYLLDEINEPSITLKSIGHQWYWSYEYSDFN

SEQ ID NO: 2189 - protein, 52 aa, Artificial sequence
  Protein classification predicting sequence
PALGVKVDGTPGRLNQTNFFINRPGLFYGQCSEICGANHSFMPIVIESVPVN

SEQ ID NO: 2190 - protein, 6 aa, Artificial sequence
  Protein classification predicting sequence
FIKWIS

SEQ ID NO: 2191 - protein, 13 aa, Artificial sequence
  Protein classification predicting sequence
NDGFRLLDVDNRI

SEQ ID NO: 2192 - protein, 12 aa, Artificial sequence
  Protein classification predicting sequence
ETVWTILPAIIL

SEQ ID NO: 2193 - protein, 6 aa, Artificial sequence
  Protein classification predicting sequence
NIMFYL

SEQ ID NO: 2194 - protein, 6 aa, Artificial sequence
  Protein classification predicting sequence
IAFPSF

SEQ ID NO: 2195 - protein, 6 aa, Artificial sequence
  Protein classification predicting sequence
ADVIHS

SEQ ID NO: 2196 - protein, 19 aa, Artificial sequence
  Protein classification predicting sequence
MLTTKLTHTSTMDAQEVET

SEQ ID NO: 2197 - protein, 12 aa, Artificial sequence
  Protein classification predicting sequence
HTSTMDAQEVET

SEQ ID NO: 2198 - protein, 19 aa, Artificial sequence
  Protein classification predicting sequence
YYGQCSEICGANHSFMPIV

SEQ ID NO: 2199 - protein, 22 aa, Artificial sequence
  Protein classification predicting sequence
YYGQCSEICGANHSFMPIVLEL

SEQ ID NO: 2200 - protein, 10 aa, Artificial sequence
  Protein classification predicting sequence
MEQLIFFHDH

SEQ ID NO: 2201 - protein, 8 aa, Artificial sequence
  Protein classification predicting sequence
PSLKILYL

SEQ ID NO: 2202 - protein, 7 aa, Artificial sequence
  Protein classification predicting sequence
PMNNQIR

SEQ ID NO: 2203 - protein, 9 aa, Artificial sequence
  Protein classification predicting sequence
FGQCSEICG

SEQ ID NO: 2204 - protein, 6 aa, Artificial sequence
  Protein classification predicting sequence
IEIIWT

SEQ ID NO: 2205 - protein, 7 aa, Artificial sequence
  Protein classification predicting sequence
DHRMVVP

SEQ ID NO: 2206 - protein, 26 aa, Artificial sequence
  Protein classification predicting sequence
TWSNFNLQNSASPLMEQIIFFHDHTL

SEQ ID NO: 2207 - protein, 14 aa, Artificial sequence
  Protein classification predicting sequence
IGHQWYWSYEYSDF

SEQ ID NO: 2208 - protein, 16 aa, Artificial sequence
  Protein classification predicting sequence
IGHQWYWSYEYSDFNN

SEQ ID NO: 2209 - protein, 24 aa, Artificial sequence
  Protein classification predicting sequence
IGHQWYWSYEYSDFNNIEFDSYMI

SEQ ID NO: 2210 - protein, 6 aa, Artificial sequence
  Protein classification predicting sequence
FDSYMI

SEQ ID NO: 2211 - protein, 6 aa, Artificial sequence
  Protein classification predicting sequence
PIMEEL

SEQ ID NO: 2212 - protein, 13 aa, Artificial sequence
  Protein classification predicting sequence
YGQCSEICGANHS

SEQ ID NO: 2213 - protein, 27 aa, Artificial sequence
  Protein classification predicting sequence
ELKPGELRLLEVDNRVVLPMEMTIRML

SEQ ID NO: 2214 - protein, 12 aa, Artificial sequence
  Protein classification predicting sequence
LTVKTMGHQWYW

SEQ ID NO: 2215 - protein, 7 aa, Artificial sequence
  Protein classification predicting sequence
DAQEMET

SEQ ID NO: 2216 - protein, 17 aa, Artificial sequence
  Protein classification predicting sequence
EAPVRMMITSQDVLHSW

SEQ ID NO: 2217 - protein, 23 aa, Artificial sequence
  Protein classification predicting sequence
LGLKTDAIPGRLNQTTFTATRPG

SEQ ID NO: 2218 - protein, 7 aa, Artificial sequence
  Protein classification predicting sequence
FHDHALM

SEQ ID NO: 2219 - protein, 12 aa, Artificial sequence
  Protein classification predicting sequence
FHDHALMIIFLI

SEQ ID NO: 2220 - protein, 16 aa, Artificial sequence
  Protein classification predicting sequence
LGLKTDAIPGRLNQTT

SEQ ID NO: 2221 - protein, 13 aa, Artificial sequence
  Protein classification predicting sequence
GLQDATSPIMEEL

SEQ ID NO: 2222 - protein, 25 aa, Artificial sequence
  Protein classification predicting sequence
RPGLYYGQCSEICGSNHSFMPIVLE

SEQ ID NO: 2223 - protein, 20 aa, Artificial sequence
  Protein classification predicting sequence
FHDHTLMIVFLISSLVLYII

SEQ ID NO: 2224 - protein, 8 aa, Artificial sequence
  Protein classification predicting sequence
PTSDLKPG

SEQ ID NO: 2225 - protein, 24 aa, Artificial sequence
  Protein classification predicting sequence
YGQCSEICGSNHSFMPIVLELVPL

SEQ ID NO: 2226 - protein, 33 aa, Artificial sequence
  Protein classification predicting sequence
TIKSIGHQWYWTYEYTDYGGLIFNSYMLPPLFL

SEQ ID NO: 2227 - protein, 8 aa, Artificial sequence
  Protein classification predicting sequence
VDNRVVLP

SEQ ID NO: 2228 - protein, 13 aa, Artificial sequence
  Protein classification predicting sequence
RMMITSQDVLHSW

SEQ ID NO: 2229 - protein, 21 aa, Artificial sequence
  Protein classification predicting sequence
YEYTDYGGLIFNSYMLPPLFL

SEQ ID NO: 2230 - protein, 18 aa, Artificial sequence
  Protein classification predicting sequence
EAPVRMMITSQDVLHSWT

SEQ ID NO: 2231 - protein, 7 aa, Artificial sequence
  Protein classification predicting sequence
DVLHSWT

SEQ ID NO: 2232 - protein, 6 aa, Artificial sequence
  Protein classification predicting sequence
NDVPTP

SEQ ID NO: 2233 - protein, 8 aa, Artificial sequence
  Protein classification predicting sequence
QEIEIVWT

SEQ ID NO: 2234 - protein, 9 aa, Artificial sequence
  Protein classification predicting sequence
ALPSLRILY

SEQ ID NO: 2235 - protein, 6 aa, Artificial sequence
  Protein classification predicting sequence
YGQCSE

SEQ ID NO: 2236 - protein, 17 aa, Artificial sequence
  Protein classification predicting sequence
KTMGHQWYWSYEYTDYE

SEQ ID NO: 2237 - protein, 10 aa, Artificial sequence
  Protein classification predicting sequence
PSLRLLYLLD

SEQ ID NO: 2238 - protein, 6 aa, Artificial sequence
  Protein classification predicting sequence
QDATSP

SEQ ID NO: 2239 - protein, 10 aa, Artificial sequence
  Protein classification predicting sequence
ILILIALPSL

SEQ ID NO: 2240 - protein, 7 aa, Artificial sequence
  Protein classification predicting sequence
KTMGHQW

SEQ ID NO: 2241 - protein, 5 aa, Artificial sequence
  Protein classification predicting sequence
WSYEY

SEQ ID NO: 2242 - protein, 6 aa, Artificial sequence
  Protein classification predicting sequence
FQDAAS

SEQ ID NO: 2243 - protein, 6 aa, Artificial sequence
  Protein classification predicting sequence
PAMTIK

SEQ ID NO: 2244 - protein, 7 aa, Artificial sequence
  Protein classification predicting sequence
EMTIRML

SEQ ID NO: 2245 - protein, 11 aa, Artificial sequence
  Protein classification predicting sequence
ILILIALPSLR

SEQ ID NO: 2246 - protein, 8 aa, Artificial sequence
  Protein classification predicting sequence
TDEVNDPS

SEQ ID NO: 2247 - protein, 9 aa, Artificial sequence
  Protein classification predicting sequence
TLTTKLTNT

SEQ ID NO: 2248 - protein, 36 aa, Artificial sequence
  Protein classification predicting sequence
PSFTIKSIGHQWYWTYEYTDYGGLIFNSYMLPPLFL

SEQ ID NO: 2249 - protein, 7 aa, Artificial sequence
  Protein classification predicting sequence
WTVPSLG

SEQ ID NO: 2250 - protein, 9 aa, Artificial sequence
  Protein classification predicting sequence
DAIPGRLNQ

SEQ ID NO: 2251 - protein, 12 aa, Artificial sequence
  Protein classification predicting sequence
GVYYGQCSEICG

SEQ ID NO: 2252 - protein, 8 aa, Artificial sequence
  Protein classification predicting sequence
LVRALWHF

SEQ ID NO: 2253 - protein, 11 aa, Artificial sequence
  Protein classification predicting sequence
PSLRILYMTDE

SEQ ID NO: 2254 - protein, 6 aa, Artificial sequence
  Protein classification predicting sequence
QLGFQD

SEQ ID NO: 2255 - protein, 12 aa, Artificial sequence
  Protein classification predicting sequence
ATPMMQGIIDLH

SEQ ID NO: 2256 - protein, 11 aa, Artificial sequence
  Protein classification predicting sequence
LVRALWHFHYK

SEQ ID NO: 2257 - protein, 10 aa, Artificial sequence
  Protein classification predicting sequence
GHQWYWSYEY

SEQ ID NO: 2258 - protein, 7 aa, Artificial sequence
  Protein classification predicting sequence
QLGLQDA

SEQ ID NO: 2259 - protein, 18 aa, Artificial sequence
  Protein classification predicting sequence
IALPSLRILYMMDEINNP

SEQ ID NO: 2260 - protein, 7 aa, Artificial sequence
  Protein classification predicting sequence
VPLKYFE

SEQ ID NO: 2261 - protein, 8 aa, Artificial sequence
  Protein classification predicting sequence
QWNWKFGY

SEQ ID NO: 2262 - protein, 9 aa, Artificial sequence
  Protein classification predicting sequence
CAEMCGTYH

SEQ ID NO: 2263 - protein, 6 aa, Artificial sequence
  Protein classification predicting sequence
DAIPGR

SEQ ID NO: 2264 - protein, 8 aa, Artificial sequence
  Protein classification predicting sequence
ILDSQEIE

SEQ ID NO: 2265 - protein, 6 aa, Artificial sequence
  Protein classification predicting sequence
SEDVLH

SEQ ID NO: 2266 - protein, 16 aa, Artificial sequence
  Protein classification predicting sequence
GQCSEICGANHSFMPI

SEQ ID NO: 2267 - protein, 7 aa, Artificial sequence
  Protein classification predicting sequence
ELHDNIM

SEQ ID NO: 2268 - protein, 8 aa, Artificial sequence
  Protein classification predicting sequence
AVPSLGVK

SEQ ID NO: 2269 - protein, 7 aa, Artificial sequence
  Protein classification predicting sequence
QLGFQDA

SEQ ID NO: 2270 - protein, 15 aa, Artificial sequence
  Protein classification predicting sequence
LKPGELRLLEVDNRV

SEQ ID NO: 2271 - protein, 6 aa, Artificial sequence
  Protein classification predicting sequence
LPMEMT

SEQ ID NO: 2272 - protein, 10 aa, Artificial sequence
  Protein classification predicting sequence
FFLILILVFV

SEQ ID NO: 2273 - protein, 20 aa, Artificial sequence
  Protein classification predicting sequence
GQCSEICGANHSFMPIVIES

SEQ ID NO: 2274 - protein, 9 aa, Artificial sequence
  Protein classification predicting sequence
TMDAQEVET

SEQ ID NO: 2275 - protein, 7 aa, Artificial sequence
  Protein classification predicting sequence
RLLEVDN

SEQ ID NO: 2276 - protein, 15 aa, Artificial sequence
  Protein classification predicting sequence
VDPAITIKAIGHQWY

SEQ ID NO: 2277 - protein, 8 aa, Artificial sequence
  Protein classification predicting sequence
RLLDVDNR

SEQ ID NO: 2278 - protein, 11 aa, Artificial sequence
  Protein classification predicting sequence
IGHQWYWSYEY

SEQ ID NO: 2279 - protein, 12 aa, Artificial sequence
  Protein classification predicting sequence
DVLHSWAVPSLG

SEQ ID NO: 2280 - protein, 14 aa, Artificial sequence
  Protein classification predicting sequence
DVLHSWAVPSLGVK

SEQ ID NO: 2281 - protein, 14 aa, Artificial sequence
  Protein classification predicting sequence
FIAIPSFALLYSMD

SEQ ID NO: 2282 - protein, 21 aa, Artificial sequence
  Protein classification predicting sequence
FIAIPSFALLYSMDGVLVDPA

SEQ ID NO: 2283 - protein, 10 aa, Artificial sequence
  Protein classification predicting sequence
IPEDDLELGQ

SEQ ID NO: 2284 - protein, 9 aa, Artificial sequence
  Protein classification predicting sequence
LLEVDNRVV

SEQ ID NO: 2285 - protein, 17 aa, Artificial sequence
  Protein classification predicting sequence
LLEVDNRVVVPAKTHLR

SEQ ID NO: 2286 - protein, 9 aa, Artificial sequence
  Protein classification predicting sequence
HSWAVPSLG

SEQ ID NO: 2287 - protein, 7 aa, Artificial sequence
  Protein classification predicting sequence
FQDAASP

SEQ ID NO: 2288 - protein, 6 aa, Artificial sequence
  Protein classification predicting sequence
ASPLME

SEQ ID NO: 2289 - protein, 6 aa, Artificial sequence
  Protein classification predicting sequence
TKLTHT

SEQ ID NO: 2290 - protein, 7 aa, Artificial sequence
  Protein classification predicting sequence
LQDSASP

SEQ ID NO: 2291 - protein, 14 aa, Artificial sequence
  Protein classification predicting sequence
YINRFLLEGQMIEL

SEQ ID NO: 2292 - protein, 15 aa, Artificial sequence
  Protein classification predicting sequence
LRLLEVDNRVVLPME

SEQ ID NO: 2293 - protein, 7 aa, Artificial sequence
  Protein classification predicting sequence
SPIMEEL

SEQ ID NO: 2294 - protein, 7 aa, Artificial sequence
  Protein classification predicting sequence
PHLTIKA

SEQ ID NO: 2295 - protein, 10 aa, Artificial sequence
  Protein classification predicting sequence
FHDHTLMIVF

SEQ ID NO: 2296 - protein, 5 aa, Artificial sequence
  Protein classification predicting sequence
PMEMT

SEQ ID NO: 2297 - protein, 8 aa, Artificial sequence
  Protein classification predicting sequence
LEVDNRVV

SEQ ID NO: 2298 - protein, 6 aa, Artificial sequence
  Protein classification predicting sequence
AADVIH

SEQ ID NO: 2299 - protein, 9 aa, Artificial sequence
  Protein classification predicting sequence
SALIQREGV

SEQ ID NO: 2300 - protein, 14 aa, Artificial sequence
  Protein classification predicting sequence
RLLEVDNRVVLPME

SEQ ID NO: 2301 - protein, 20 aa, Artificial sequence
  Protein classification predicting sequence
RLLEVDNRVVLPMEMTIRML

SEQ ID NO: 2302 - protein, 9 aa, Artificial sequence
  Protein classification predicting sequence
PSLGIKVDA

SEQ ID NO: 2303 - protein, 12 aa, Artificial sequence
  Protein classification predicting sequence
QREGVYYGQCSE

SEQ ID NO: 2304 - protein, 9 aa, Artificial sequence
  Protein classification predicting sequence
GVYYGQCSE

SEQ ID NO: 2305 - protein, 10 aa, Artificial sequence
  Protein classification predicting sequence
YGQCSELCGV

SEQ ID NO: 2306 - protein, 7 aa, Artificial sequence
  Protein classification predicting sequence
LEVDNRV

SEQ ID NO: 2307 - protein, 10 aa, Artificial sequence
  Protein classification predicting sequence
IALPSLRILY

SEQ ID NO: 2308 - protein, 7 aa, Artificial sequence
  Protein classification predicting sequence
PGQFRLL

SEQ ID NO: 2309 - protein, 19 aa, Artificial sequence
  Protein classification predicting sequence
GELRLLEVDNRVVLPMEMT

SEQ ID NO: 2310 - protein, 31 aa, Artificial sequence
  Protein classification predicting sequence
VPSLGLKTDAIPGRLNQTTLMAMRPGLYYGQ

SEQ ID NO: 2311 - protein, 16 aa, Artificial sequence
  Protein classification predicting sequence
SEICGSNHSFMPIVLE

SEQ ID NO: 2312 - protein, 20 aa, Artificial sequence
  Protein classification predicting sequence
SEICGSNHSFMPIVLEMVPL

SEQ ID NO: 2313 - protein, 28 aa, Artificial sequence
  Protein classification predicting sequence
SEICGSNHSFMPIVLEMVPLSYFETWSA

SEQ ID NO: 2314 - protein, 13 aa, Artificial sequence
  Protein classification predicting sequence
GHQWYWSYEYTDY

SEQ ID NO: 2315 - protein, 16 aa, Artificial sequence
  Protein classification predicting sequence
GHQWYWSYEYTDYEDL

SEQ ID NO: 2316 - protein, 16 aa, Artificial sequence
  Protein classification predicting sequence
PGDLRLLEVDNRVVLP

SEQ ID NO: 2317 - protein, 13 aa, Artificial sequence
  Protein classification predicting sequence
KTDAIPGRLNQAT

SEQ ID NO: 2318 - protein, 14 aa, Artificial sequence
  Protein classification predicting sequence
RMLISSEDVLHSWA

SEQ ID NO: 2319 - protein, 10 aa, Artificial sequence
  Protein classification predicting sequence
SSEDVLHSWA

SEQ ID NO: 2320 - protein, 16 aa, Artificial sequence
  Protein classification predicting sequence
PSLGLKTDAIPGRLNQ

SEQ ID NO: 2321 - protein, 9 aa, Artificial sequence
  Protein classification predicting sequence
PAITLIFIA

SEQ ID NO: 2322 - protein, 9 aa, Artificial sequence
  Protein classification predicting sequence
DAVPGRLNQ

SEQ ID NO: 2323 - protein, 19 aa, Artificial sequence
  Protein classification predicting sequence
KTMGHQWYWSYEYTDYEDL

SEQ ID NO: 2324 - protein, 24 aa, Artificial sequence
  Protein classification predicting sequence
YFQDSATPNQEGILELHDNIMFYL

SEQ ID NO: 2325 - protein, 10 aa, Artificial sequence
  Protein classification predicting sequence
ELHDNIMFYL

SEQ ID NO: 2326 - protein, 10 aa, Artificial sequence
  Protein classification predicting sequence
PGRLNQTAFI

SEQ ID NO: 2327 - protein, 20 aa, Artificial sequence
  Protein classification predicting sequence
LKPGELRLLEVDNRVVLPME

SEQ ID NO: 2328 - protein, 7 aa, Artificial sequence
  Protein classification predicting sequence
SPVMEEL

SEQ ID NO: 2329 - protein, 18 aa, Artificial sequence
  Protein classification predicting sequence
YGQCSEICGANHSFMPIV

SEQ ID NO: 2330 - protein, 28 aa, Artificial sequence
  Protein classification predicting sequence
YGQCSEICGANHSFMPIVVEAVPLEHFE

SEQ ID NO: 2331 - protein, 7 aa, Artificial sequence
  Protein classification predicting sequence
WSSLMLE

SEQ ID NO: 2332 - protein, 17 aa, Artificial sequence
  Protein classification predicting sequence
GQCSEICGANHSFMPIV

SEQ ID NO: 2333 - protein, 7 aa, Artificial sequence
  Protein classification predicting sequence
QIRILVT

SEQ ID NO: 2334 - protein, 7 aa, Artificial sequence
  Protein classification predicting sequence
NQLIPQT

SEQ ID NO: 2335 - protein, 49 aa, Artificial sequence
  Protein classification predicting sequence
GHQWYWSYEYTDYEDLNFDSYMIPTQELKPGELRLLEVDNRVVLPMEMT

SEQ ID NO: 2336 - protein, 23 aa, Artificial sequence
  Protein classification predicting sequence
RPGVYYGQCSEICGANHSFMPIV

SEQ ID NO: 2337 - protein, 25 aa, Artificial sequence
  Protein classification predicting sequence
FYGQCSEICGANHSYMPIVVESTPL

SEQ ID NO: 2338 - protein, 11 aa, Artificial sequence
  Protein classification predicting sequence
PSLRLLYLLDE

SEQ ID NO: 2339 - protein, 9 aa, Artificial sequence
  Protein classification predicting sequence
FFINRPGIF

SEQ ID NO: 2340 - protein, 10 aa, Artificial sequence
  Protein classification predicting sequence
FFGQCSEICG

SEQ ID NO: 2341 - protein, 14 aa, Artificial sequence
  Protein classification predicting sequence
ILILIALPSLRILY

SEQ ID NO: 2342 - protein, 7 aa, Artificial sequence
  Protein classification predicting sequence
VPLKHFE

SEQ ID NO: 2343 - protein, 9 aa, Artificial sequence
  Protein classification predicting sequence
WTILPAVIL

SEQ ID NO: 2344 - protein, 14 aa, Artificial sequence
  Protein classification predicting sequence
LTHTSTMDAQEVET

SEQ ID NO: 2345 - protein, 7 aa, Artificial sequence
  Protein classification predicting sequence
FQDSATP

SEQ ID NO: 2346 - protein, 7 aa, Artificial sequence
  Protein classification predicting sequence
AADVIHS

SEQ ID NO: 2347 - protein, 9 aa, Artificial sequence
  Protein classification predicting sequence
VPLKHFENW

SEQ ID NO: 2348 - protein, 20 aa, Artificial sequence
  Protein classification predicting sequence
LMLTTKLTHTSTMDAQEVET

SEQ ID NO: 2349 - protein, 7 aa, Artificial sequence
  Protein classification predicting sequence
TPNQEGI

SEQ ID NO: 2350 - protein, 6 aa, Artificial sequence
  Protein classification predicting sequence
LYLMDE

SEQ ID NO: 2351 - protein, 16 aa, Artificial sequence
  Protein classification predicting sequence
IAFPSFILLYLCDEVI

SEQ ID NO: 2352 - protein, 8 aa, Artificial sequence
  Protein classification predicting sequence
EFESYVIP

SEQ ID NO: 2353 - protein, 15 aa, Artificial sequence
  Protein classification predicting sequence
PGRLNQTNFFINRPG

SEQ ID NO: 2354 - protein, 22 aa, Artificial sequence
  Protein classification predicting sequence
FYGQCSEICGANHSFMPIVIES

SEQ ID NO: 2355 - protein, 6 aa, Artificial sequence
  Protein classification predicting sequence
WINNYS

SEQ ID NO: 2356 - protein, 7 aa, Artificial sequence
  Protein classification predicting sequence
LYLMDEI

SEQ ID NO: 2357 - protein, 7 aa, Artificial sequence
  Protein classification predicting sequence
FRLLETD

SEQ ID NO: 2358 - protein, 6 aa, Artificial sequence
  Protein classification predicting sequence
INRPGL

SEQ ID NO: 2359 - protein, 6 aa, Artificial sequence
  Protein classification predicting sequence
FWAFFH

SEQ ID NO: 2360 - protein, 8 aa, Artificial sequence
  Protein classification predicting sequence
DGVYGSTF

SEQ ID NO: 2361 - protein, 8 aa, Artificial sequence
  Protein classification predicting sequence
HGLHVIIG

SEQ ID NO: 2362 - protein, 5 aa, Artificial sequence
  Protein classification predicting sequence
NHHFG

SEQ ID NO: 2363 - protein, 5 aa, Artificial sequence
  Protein classification predicting sequence
PSPWP

SEQ ID NO: 2364 - protein, 6 aa, Artificial sequence
  Protein classification predicting sequence
ATGFHG

SEQ ID NO: 2365 - protein, 8 aa, Artificial sequence
  Protein classification predicting sequence
CGIRQYLG

SEQ ID NO: 2366 - protein, 8 aa, Artificial sequence
  Protein classification predicting sequence
WWRDIVRE

SEQ ID NO: 2367 - protein, 5 aa, Artificial sequence
  Protein classification predicting sequence
QGHHT

SEQ ID NO: 2368 - protein, 7 aa, Artificial sequence
  Protein classification predicting sequence
LFILSEV

SEQ ID NO: 2369 - protein, 7 aa, Artificial sequence
  Protein classification predicting sequence
FWAYFHS

SEQ ID NO: 2370 - protein, 10 aa, Artificial sequence
  Protein classification predicting sequence
VPLLNTSVLL

SEQ ID NO: 2371 - protein, 5 aa, Artificial sequence
  Protein classification predicting sequence
TWAHH

SEQ ID NO: 2372 - protein, 6 aa, Artificial sequence
  Protein classification predicting sequence
YGSTFF

SEQ ID NO: 2373 - protein, 6 aa, Artificial sequence
  Protein classification predicting sequence
HPYHLV

SEQ ID NO: 2374 - protein, 8 aa, Artificial sequence
  Protein classification predicting sequence
WWRDVIRE

SEQ ID NO: 2375 - protein, 7 aa, Artificial sequence
  Protein classification predicting sequence
EVPLLNT

SEQ ID NO: 2376 - protein, 4 aa, Artificial sequence
  Protein classification predicting sequence
WYWH

SEQ ID NO: 2377 - protein, 7 aa, Artificial sequence
  Protein classification predicting sequence
WLFLYVS

SEQ ID NO: 2378 - protein, 6 aa, Artificial sequence
  Protein classification predicting sequence
SEVFFF

SEQ ID NO: 2379 - protein, 13 aa, Artificial sequence
  Protein classification predicting sequence
LLASGVTVTWAHH

SEQ ID NO: 2380 - protein, 6 aa, Artificial sequence
  Protein classification predicting sequence
EAPFTI

SEQ ID NO: 2381 - protein, 6 aa, Artificial sequence
  Protein classification predicting sequence
VYGSTF

SEQ ID NO: 2382 - protein, 9 aa, Artificial sequence
  Protein classification predicting sequence
LTMYQWWRD

SEQ ID NO: 2383 - protein, 10 aa, Artificial sequence
  Protein classification predicting sequence
HMLQALFITI

SEQ ID NO: 2384 - protein, 8 aa, Artificial sequence
  Protein classification predicting sequence
LLSLGLIF

SEQ ID NO: 2385 - protein, 8 aa, Artificial sequence
  Protein classification predicting sequence
VLDPWEIP

SEQ ID NO: 2386 - protein, 7 aa, Artificial sequence
  Protein classification predicting sequence
APFTISD

SEQ ID NO: 2387 - protein, 6 aa, Artificial sequence
  Protein classification predicting sequence
FFHSSL

SEQ ID NO: 2388 - protein, 9 aa, Artificial sequence
  Protein classification predicting sequence
ATGFHGLHV

SEQ ID NO: 2389 - protein, 6 aa, Artificial sequence
  Protein classification predicting sequence
VPLLNT

SEQ ID NO: 2390 - protein, 7 aa, Artificial sequence
  Protein classification predicting sequence
TYLGDHT

SEQ ID NO: 2391 - protein, 10 aa, Artificial sequence
  Protein classification predicting sequence
AVRKGINLGF

SEQ ID NO: 2392 - protein, 24 aa, Artificial sequence
  Protein classification predicting sequence
YHMVNPSPWPLTGALSALLMTSGL

SEQ ID NO: 2393 - protein, 10 aa, Artificial sequence
  Protein classification predicting sequence
YFTLLQASEY

SEQ ID NO: 2394 - protein, 20 aa, Artificial sequence
  Protein classification predicting sequence
YFTLLQASEYYEAPFTISDG

SEQ ID NO: 2395 - protein, 9 aa, Artificial sequence
  Protein classification predicting sequence
EAPFTISDG

SEQ ID NO: 2396 - protein, 6 aa, Artificial sequence
  Protein classification predicting sequence
HHFGFE

SEQ ID NO: 2397 - protein, 26 aa, Artificial sequence
  Protein classification predicting sequence
GFFWAFYHSSLAPTPELGGCWPPTGI

SEQ ID NO: 2398 - protein, 15 aa, Artificial sequence
  Protein classification predicting sequence
GLTTNMLTMYQWWRD

SEQ ID NO: 2399 - protein, 10 aa, Artificial sequence
  Protein classification predicting sequence
SGVTVTWAHH

SEQ ID NO: 2400 - protein, 6 aa, Artificial sequence
  Protein classification predicting sequence
HAYHMV

SEQ ID NO: 2401 - protein, 8 aa, Artificial sequence
  Protein classification predicting sequence
SGLAIWFH

SEQ ID NO: 2402 - protein, 14 aa, Artificial sequence
  Protein classification predicting sequence
LLASGVTVTWAHHS

SEQ ID NO: 2403 - protein, 6 aa, Artificial sequence
  Protein classification predicting sequence
TWAHHS

SEQ ID NO: 2404 - protein, 7 aa, Artificial sequence
  Protein classification predicting sequence
MEGERKQ

SEQ ID NO: 2405 - protein, 8 aa, Artificial sequence
  Protein classification predicting sequence
TFQGHHTP

SEQ ID NO: 2406 - protein, 9 aa, Artificial sequence
  Protein classification predicting sequence
VQKGLRYGM

SEQ ID NO: 2407 - protein, 10 aa, Artificial sequence
  Protein classification predicting sequence
LFIVSEVFFF

SEQ ID NO: 2408 - protein, 15 aa, Artificial sequence
  Protein classification predicting sequence
LGVYFTLLQASEYYE

SEQ ID NO: 2409 - protein, 6 aa, Artificial sequence
  Protein classification predicting sequence
HHVGFE

SEQ ID NO: 2410 - protein, 6 aa, Artificial sequence
  Protein classification predicting sequence
WPPVGI

SEQ ID NO: 2411 - protein, 11 aa, Artificial sequence
  Protein classification predicting sequence
ELPLLNTIILL

SEQ ID NO: 2412 - protein, 8 aa, Artificial sequence
  Protein classification predicting sequence
ALLMTSGL

SEQ ID NO: 2413 - protein, 10 aa, Artificial sequence
  Protein classification predicting sequence
YFTALQAMEY

SEQ ID NO: 2414 - protein, 10 aa, Artificial sequence
  Protein classification predicting sequence
RESTFQGHHT

SEQ ID NO: 2415 - protein, 17 aa, Artificial sequence
  Protein classification predicting sequence
VQKGLRYGMILFIISEV

SEQ ID NO: 2416 - protein, 9 aa, Artificial sequence
  Protein classification predicting sequence
TSGLIMWFH

SEQ ID NO: 2417 - protein, 11 aa, Artificial sequence
  Protein classification predicting sequence
RESTFQGHHTP

SEQ ID NO: 2418 - protein, 7 aa, Artificial sequence
  Protein classification predicting sequence
GGVMYMH

SEQ ID NO: 2419 - protein, 9 aa, Artificial sequence
  Protein classification predicting sequence
SDGIYGSTF

SEQ ID NO: 2420 - protein, 8 aa, Artificial sequence
  Protein classification predicting sequence
SPWPLTGA

SEQ ID NO: 2421 - protein, 5 aa, Artificial sequence
  Protein classification predicting sequence
WWRDV

SEQ ID NO: 2422 - protein, 21 aa, Artificial sequence
  Protein classification predicting sequence
LTMYQWWRDIIRESTFQGHHT

SEQ ID NO: 2423 - protein, 6 aa, Artificial sequence
  Protein classification predicting sequence
LGLTTN

SEQ ID NO: 2424 - protein, 15 aa, Artificial sequence
  Protein classification predicting sequence
GFFWAFYHSSLAPTP

SEQ ID NO: 2425 - protein, 23 aa, Artificial sequence
  Protein classification predicting sequence
YGSTFFVATGFHGLHVIIGSSFL

SEQ ID NO: 2426 - protein, 6 aa, Artificial sequence
  Protein classification predicting sequence
FLIVCF

SEQ ID NO: 2427 - protein, 11 aa, Artificial sequence
  Protein classification predicting sequence
LLTMYQWWRDI

SEQ ID NO: 2428 - protein, 10 aa, Artificial sequence
  Protein classification predicting sequence
LTMYQWWRDI

SEQ ID NO: 2429 - protein, 6 aa, Artificial sequence
  Protein classification predicting sequence
ITISLG

SEQ ID NO: 2430 - protein, 9 aa, Artificial sequence
  Protein classification predicting sequence
HLVDPSPWP

SEQ ID NO: 2431 - protein, 8 aa, Artificial sequence
  Protein classification predicting sequence
RYGMILFI

SEQ ID NO: 2432 - protein, 6 aa, Artificial sequence
  Protein classification predicting sequence
PTPELG

SEQ ID NO: 2433 - protein, 10 aa, Artificial sequence
  Protein classification predicting sequence
VPLLNTAVLL

SEQ ID NO: 2434 - protein, 6 aa, Artificial sequence
  Protein classification predicting sequence
YQWWRD

SEQ ID NO: 2435 - protein, 7 aa, Artificial sequence
  Protein classification predicting sequence
REGTYQG

SEQ ID NO: 2436 - protein, 6 aa, Artificial sequence
  Protein classification predicting sequence
SEVLFF

SEQ ID NO: 2437 - protein, 5 aa, Artificial sequence
  Protein classification predicting sequence
IYWWG

SEQ ID NO: 2438 - protein, 5 aa, Artificial sequence
  Protein classification predicting sequence
MWFHY

SEQ ID NO: 2439 - protein, 9 aa, Artificial sequence
  Protein classification predicting sequence
QWWRDVVRE

SEQ ID NO: 2440 - protein, 9 aa, Artificial sequence
  Protein classification predicting sequence
MLQALFITI

SEQ ID NO: 2441 - protein, 16 aa, Artificial sequence
  Protein classification predicting sequence
ATGFHGLHVIIGSTFL

SEQ ID NO: 2442 - protein, 7 aa, Artificial sequence
  Protein classification predicting sequence
LLSSGVT

SEQ ID NO: 2443 - protein, 7 aa, Artificial sequence
  Protein classification predicting sequence
MWFHFNS

SEQ ID NO: 2444 - protein, 29 aa, Artificial sequence
  Protein classification predicting sequence
EVPLLNTSVLLASGVSITWAHHSLMEGNR

SEQ ID NO: 2445 - protein, 19 aa, Artificial sequence
  Protein classification predicting sequence
HQAHAYHMVDPSPWPLTGA

SEQ ID NO: 2446 - protein, 6 aa, Artificial sequence
  Protein classification predicting sequence
WFHFHS

SEQ ID NO: 2447 - protein, 8 aa, Artificial sequence
  Protein classification predicting sequence
GFFWAFYH

SEQ ID NO: 2448 - protein, 7 aa, Artificial sequence
  Protein classification predicting sequence
APFTIAD

SEQ ID NO: 2449 - protein, 16 aa, Artificial sequence
  Protein classification predicting sequence
LGLTTNMLTMYQWWRD

SEQ ID NO: 2450 - protein, 47 aa, Artificial sequence
  Protein classification predicting sequence
VQKGLRYGMILFIISEVLFFTGFFWAFYHSSLAPTPELGGCWPPTGI

SEQ ID NO: 2451 - protein, 15 aa, Artificial sequence
  Protein classification predicting sequence
LLMTSGLIMWFHFNS

SEQ ID NO: 2452 - protein, 9 aa, Artificial sequence
  Protein classification predicting sequence
PSPWPLTGA

SEQ ID NO: 2453 - protein, 9 aa, Artificial sequence
  Protein classification predicting sequence
STTLLMLGL

SEQ ID NO: 2454 - protein, 7 aa, Artificial sequence
  Protein classification predicting sequence
PFTISDG

SEQ ID NO: 2455 - protein, 12 aa, Artificial sequence
  Protein classification predicting sequence
TNTLTMYQWWRD

SEQ ID NO: 2456 - protein, 10 aa, Artificial sequence
  Protein classification predicting sequence
FQGMEYYQAP

SEQ ID NO: 2457 - protein, 12 aa, Artificial sequence
  Protein classification predicting sequence
TNILTMYQWWRD

SEQ ID NO: 2458 - protein, 20 aa, Artificial sequence
  Protein classification predicting sequence
LLASGVSITWAHHSLMEGNR

SEQ ID NO: 2459 - protein, 9 aa, Artificial sequence
  Protein classification predicting sequence
RQLKFHFTS

SEQ ID NO: 2460 - protein, 14 aa, Artificial sequence
  Protein classification predicting sequence
PSPWPLTGALSALL

SEQ ID NO: 2461 - protein, 6 aa, Artificial sequence
  Protein classification predicting sequence
LFITSE

SEQ ID NO: 2462 - protein, 19 aa, Artificial sequence
  Protein classification predicting sequence
FFFAGFFWAFYHSSLAPTP

SEQ ID NO: 2463 - protein, 6 aa, Artificial sequence
  Protein classification predicting sequence
LGIYFT

SEQ ID NO: 2464 - protein, 6 aa, Artificial sequence
  Protein classification predicting sequence
YFTLLQ

SEQ ID NO: 2465 - protein, 10 aa, Artificial sequence
  Protein classification predicting sequence
YHMVDPSPWP

SEQ ID NO: 2466 - protein, 6 aa, Artificial sequence
  Protein classification predicting sequence
WFHFNS

SEQ ID NO: 2467 - protein, 13 aa, Artificial sequence
  Protein classification predicting sequence
LTMYQWWRDIIRE

SEQ ID NO: 2468 - protein, 9 aa, Artificial sequence
  Protein classification predicting sequence
LRYGMILFI

SEQ ID NO: 2469 - protein, 9 aa, Artificial sequence
  Protein classification predicting sequence
WPPTGITPL

SEQ ID NO: 2470 - protein, 18 aa, Artificial sequence
  Protein classification predicting sequence
LDPFEVPLLNTAVLLASG

SEQ ID NO: 2471 - protein, 6 aa, Artificial sequence
  Protein classification predicting sequence
QYHFTS

SEQ ID NO: 2472 - protein, 6 aa, Artificial sequence
  Protein classification predicting sequence
YWHFVD

SEQ ID NO: 2473 - protein, 7 aa, Artificial sequence
  Protein classification predicting sequence
TFQGHHT

SEQ ID NO: 2474 - protein, 12 aa, Artificial sequence
  Protein classification predicting sequence
PLNPLEVPLLNT

SEQ ID NO: 2475 - protein, 7 aa, Artificial sequence
  Protein classification predicting sequence
QALLITI

SEQ ID NO: 2476 - protein, 7 aa, Artificial sequence
  Protein classification predicting sequence
VCFFRQL

SEQ ID NO: 2477 - protein, 19 aa, Artificial sequence
  Protein classification predicting sequence
LLMLGLTTNMLTMYQWWRD

SEQ ID NO: 2478 - protein, 15 aa, Artificial sequence
  Protein classification predicting sequence
VDYSPWPLTGAIGAM

SEQ ID NO: 2479 - protein, 6 aa, Artificial sequence
  Protein classification predicting sequence
SSLAPT

SEQ ID NO: 2480 - protein, 9 aa, Artificial sequence
  Protein classification predicting sequence
TWAHHSIME

SEQ ID NO: 2481 - protein, 20 aa, Artificial sequence
  Protein classification predicting sequence
VYGSTFFVATGFHGLHVIIG

SEQ ID NO: 2482 - protein, 7 aa, Artificial sequence
  Protein classification predicting sequence
SPWPLTG

SEQ ID NO: 2483 - protein, 7 aa, Artificial sequence
  Protein classification predicting sequence
IADSVYG

SEQ ID NO: 2484 - protein, 6 aa, Artificial sequence
  Protein classification predicting sequence
SPWPLT

SEQ ID NO: 2485 - protein, 6 aa, Artificial sequence
  Protein classification predicting sequence
TFLIVC

SEQ ID NO: 2486 - protein, 6 aa, Artificial sequence
  Protein classification predicting sequence
FTISDG

SEQ ID NO: 2487 - protein, 9 aa, Artificial sequence
  Protein classification predicting sequence
ILFIVSEVM

SEQ ID NO: 2488 - protein, 11 aa, Artificial sequence
  Protein classification predicting sequence
TISDSIYGSTF

SEQ ID NO: 2489 - protein, 9 aa, Artificial sequence
  Protein classification predicting sequence
FVSIYWWGG

SEQ ID NO: 2490 - protein, 9 aa, Artificial sequence
  Protein classification predicting sequence
HSSLAPTVE

SEQ ID NO: 2491 - protein, 6 aa, Artificial sequence
  Protein classification predicting sequence
HVIIGT

SEQ ID NO: 2492 - protein, 9 aa, Artificial sequence
  Protein classification predicting sequence
LLSSGATVT

SEQ ID NO: 2493 - protein, 7 aa, Artificial sequence
  Protein classification predicting sequence
EYYEAPF

SEQ ID NO: 2494 - protein, 18 aa, Artificial sequence
  Protein classification predicting sequence
SEVFFFAGFFWAFYHSSL

SEQ ID NO: 2495 - protein, 6 aa, Artificial sequence
  Protein classification predicting sequence
HFGFEA

SEQ ID NO: 2496 - protein, 13 aa, Artificial sequence
  Protein classification predicting sequence
HMVNPSPWPLTGA

SEQ ID NO: 2497 - protein, 6 aa, Artificial sequence
  Protein classification predicting sequence
FYHSSL

SEQ ID NO: 2498 - protein, 22 aa, Artificial sequence
  Protein classification predicting sequence
HHFGFEAAAWYWHFVDVVWLFL

SEQ ID NO: 2499 - protein, 19 aa, Artificial sequence
  Protein classification predicting sequence
GFEAAAWYWHFVDVVWLFL

SEQ ID NO: 2500 - protein, 23 aa, Artificial sequence
  Protein classification predicting sequence
YGSTFFVATGFHGLHVIIGSTFL

SEQ ID NO: 2501 - protein, 6 aa, Artificial sequence
  Protein classification predicting sequence
FTGFQG

SEQ ID NO: 2502 - protein, 14 aa, Artificial sequence
  Protein classification predicting sequence
FQGGATLLSLGLIF

SEQ ID NO: 2503 - protein, 14 aa, Artificial sequence
  Protein classification predicting sequence
SLAPTPELGGCWPP

SEQ ID NO: 2504 - protein, 6 aa, Artificial sequence
  Protein classification predicting sequence
ITIALG

SEQ ID NO: 2505 - protein, 26 aa, Artificial sequence
  Protein classification predicting sequence
FTISDGVYGSTFFVATGFHGLHVIIG

SEQ ID NO: 2506 - protein, 22 aa, Artificial sequence
  Protein classification predicting sequence
DGVYGSTFFVATGFHGLHVIIG

SEQ ID NO: 2507 - protein, 23 aa, Artificial sequence
  Protein classification predicting sequence
LYTMFVWWRDVLRESTLEGHHTK

SEQ ID NO: 2508 - protein, 29 aa, Artificial sequence
  Protein classification predicting sequence
SSGAAVTWAHHAILAGKEKRAVYALVATV

SEQ ID NO: 2509 - protein, 5 aa, Artificial sequence
  Protein classification predicting sequence
HHFGF

SEQ ID NO: 2510 - protein, 12 aa, Artificial sequence
  Protein classification predicting sequence
PSPWPLTGALSA

SEQ ID NO: 2511 - protein, 20 aa, Artificial sequence
  Protein classification predicting sequence
PLNPLEVPLLNTSVLLASGV

SEQ ID NO: 2512 - protein, 8 aa, Artificial sequence
  Protein classification predicting sequence
RKQTIQAL

SEQ ID NO: 2513 - protein, 17 aa, Artificial sequence
  Protein classification predicting sequence
HHFGFEAAAWYWHFVDV

SEQ ID NO: 2514 - protein, 17 aa, Artificial sequence
  Protein classification predicting sequence
HVGFEAAAWYWHFVDVV

SEQ ID NO: 2515 - protein, 9 aa, Artificial sequence
  Protein classification predicting sequence
QWWRDIVRE

SEQ ID NO: 2516 - protein, 15 aa, Artificial sequence
  Protein classification predicting sequence
LFFTGFFWAFYHSSL

SEQ ID NO: 2517 - protein, 11 aa, Artificial sequence
  Protein classification predicting sequence
GFFWAFYHSSL

SEQ ID NO: 2518 - protein, 7 aa, Artificial sequence
  Protein classification predicting sequence
QALTLTI

SEQ ID NO: 2519 - protein, 11 aa, Artificial sequence
  Protein classification predicting sequence
FFAGFFWAFYH

SEQ ID NO: 2520 - protein, 9 aa, Artificial sequence
  Protein classification predicting sequence
SLAPTPELG

SEQ ID NO: 2521 - protein, 11 aa, Artificial sequence
  Protein classification predicting sequence
FWAYFHSAMSP

SEQ ID NO: 2522 - protein, 6 aa, Artificial sequence
  Protein classification predicting sequence
EGNRNH

SEQ ID NO: 2523 - protein, 9 aa, Artificial sequence
  Protein classification predicting sequence
CQYIEYTNA

SEQ ID NO: 2524 - protein, 10 aa, Artificial sequence
  Protein classification predicting sequence
AGTGLHFLHM

SEQ ID NO: 2525 - protein, 8 aa, Artificial sequence
  Protein classification predicting sequence
HHFGFEAA

SEQ ID NO: 2526 - protein, 5 aa, Artificial sequence
  Protein classification predicting sequence
YWHFV

SEQ ID NO: 2527 - protein, 7 aa, Artificial sequence
  Protein classification predicting sequence
FWAFFHS

SEQ ID NO: 2528 - protein, 13 aa, Artificial sequence
  Protein classification predicting sequence
YWHFVDVVWLFLY

SEQ ID NO: 2529 - protein, 23 aa, Artificial sequence
  Protein classification predicting sequence
YFTALQAMEYYEAPFTIADGVYG

SEQ ID NO: 2530 - protein, 24 aa, Artificial sequence
  Protein classification predicting sequence
HQSHAYHMVKPSPWPLTGALSALL

SEQ ID NO: 2531 - protein, 5 aa, Artificial sequence
  Protein classification predicting sequence
MWFHF

SEQ ID NO: 2532 - protein, 21 aa, Artificial sequence
  Protein classification predicting sequence
PVQKGLRYGMILFITSEVFFF

SEQ ID NO: 2533 - protein, 6 aa, Artificial sequence
  Protein classification predicting sequence
WPPTGI

SEQ ID NO: 2534 - protein, 31 aa, Artificial sequence
  Protein classification predicting sequence
PLNPLEVPLLNTSVLLASGVSITWAHHSLME

SEQ ID NO: 2535 - protein, 6 aa, Artificial sequence
  Protein classification predicting sequence
GLRYGM

SEQ ID NO: 2536 - protein, 6 aa, Artificial sequence
  Protein classification predicting sequence
VTWAHH

SEQ ID NO: 2537 - protein, 11 aa, Artificial sequence
  Protein classification predicting sequence
VTWAHHAILAG

SEQ ID NO: 2538 - protein, 10 aa, Artificial sequence
  Protein classification predicting sequence
GFEAAAWYWH

SEQ ID NO: 2539 - protein, 8 aa, Artificial sequence
  Protein classification predicting sequence
VDVVWLFL

SEQ ID NO: 2540 - protein, 6 aa, Artificial sequence
  Protein classification predicting sequence
VCLLRQ

SEQ ID NO: 2541 - protein, 37 aa, Artificial sequence
  Protein classification predicting sequence
PLNPLEVPLLNTSVLLASGVSITWAHHSLMEGNRNHM

SEQ ID NO: 2542 - protein, 7 aa, Artificial sequence
  Protein classification predicting sequence
VFTGFQG

SEQ ID NO: 2543 - protein, 13 aa, Artificial sequence
  Protein classification predicting sequence
VQKGLRYGMILFI

SEQ ID NO: 2544 - protein, 6 aa, Artificial sequence
  Protein classification predicting sequence
LMEGNR

SEQ ID NO: 2545 - protein, 20 aa, Artificial sequence
  Protein classification predicting sequence
TFFVATGFHGLHVIIGSTFL

SEQ ID NO: 2546 - protein, 23 aa, Artificial sequence
  Protein classification predicting sequence
HHFGFEAAAWYWHFVDVVWLFLY

SEQ ID NO: 2547 - protein, 9 aa, Artificial sequence
  Protein classification predicting sequence
QWWRDIIRE

SEQ ID NO: 2548 - protein, 8 aa, Artificial sequence
  Protein classification predicting sequence
ELGAQWPP

SEQ ID NO: 2549 - protein, 6 aa, Artificial sequence
  Protein classification predicting sequence
MWFHFN

SEQ ID NO: 2550 - protein, 10 aa, Artificial sequence
  Protein classification predicting sequence
LLASGVSITW

SEQ ID NO: 2551 - protein, 9 aa, Artificial sequence
  Protein classification predicting sequence
HHSLMEGNR

SEQ ID NO: 2552 - protein, 10 aa, Artificial sequence
  Protein classification predicting sequence
GLIMWFHFNS

SEQ ID NO: 2553 - protein, 10 aa, Artificial sequence
  Protein classification predicting sequence
YWHFVDVVWL

SEQ ID NO: 2554 - protein, 13 aa, Artificial sequence
  Protein classification predicting sequence
FIVSEVMFLFAFF

SEQ ID NO: 2555 - protein, 7 aa, Artificial sequence
  Protein classification predicting sequence
GFFWAFY

SEQ ID NO: 2556 - protein, 8 aa, Artificial sequence
  Protein classification predicting sequence
LTLTILLG

SEQ ID NO: 2557 - protein, 7 aa, Artificial sequence
  Protein classification predicting sequence
HHVGYET

SEQ ID NO: 2558 - protein, 6 aa, Artificial sequence
  Protein classification predicting sequence
LWFRDI

SEQ ID NO: 2559 - protein, 6 aa, Artificial sequence
  Protein classification predicting sequence
WLFLYV

SEQ ID NO: 2560 - protein, 8 aa, Artificial sequence
  Protein classification predicting sequence
RAISTSVC

SEQ ID NO: 2561 - protein, 6 aa, Artificial sequence
  Protein classification predicting sequence
NEWKTV

SEQ ID NO: 2562 - protein, 13 aa, Artificial sequence
  Protein classification predicting sequence
DRRDYPLPDVAHV

SEQ ID NO: 2563 - protein, 10 aa, Artificial sequence
  Protein classification predicting sequence
QKALKEKEKA

SEQ ID NO: 2564 - protein, 8 aa, Artificial sequence
  Protein classification predicting sequence
FFIGFTAL

SEQ ID NO: 2565 - protein, 7 aa, Artificial sequence
  Protein classification predicting sequence
ALKEKEK

SEQ ID NO: 2566 - protein, 8 aa, Artificial sequence
  Protein classification predicting sequence
GFSAKWDY

SEQ ID NO: 2567 - protein, 8 aa, Artificial sequence
  Protein classification predicting sequence
EQATGLER

SEQ ID NO: 2568 - protein, 7 aa, Artificial sequence
  Protein classification predicting sequence
RCYSHGS

SEQ ID NO: 2569 - protein, 27 aa, Artificial sequence
  Protein classification predicting sequence
ETDEEFDARWVTYFNKPDIDAWELRKG

SEQ ID NO: 2570 - protein, 22 aa, Artificial sequence
  Protein classification predicting sequence
VPEPKIIDAALRACRRLNDFAS

SEQ ID NO: 2571 - protein, 6 aa, Artificial sequence
  Protein classification predicting sequence
IIAIPT

SEQ ID NO: 2572 - protein, 10 aa, Artificial sequence
  Protein classification predicting sequence
EIPSPGDNGW

SEQ ID NO: 2573 - protein, 7 aa, Artificial sequence
  Protein classification predicting sequence
MFHTSVP

SEQ ID NO: 2574 - protein, 7 aa, Artificial sequence
  Protein classification predicting sequence
NLYHFWR

SEQ ID NO: 2575 - protein, 7 aa, Artificial sequence
  Protein classification predicting sequence
QQGSGKF

SEQ ID NO: 2576 - protein, 8 aa, Artificial sequence
  Protein classification predicting sequence
IKNFIPLL

SEQ ID NO: 2577 - protein, 14 aa, Artificial sequence
  Protein classification predicting sequence
FIDAVYKMFHTSVP

SEQ ID NO: 2578 - protein, 17 aa, Artificial sequence
  Protein classification predicting sequence
RLFRTKTWRDHVAAWDT

SEQ ID NO: 2579 - protein, 13 aa, Artificial sequence
  Protein classification predicting sequence
TEMLAGGVDTTSM

SEQ ID NO: 2580 - protein, 7 aa, Artificial sequence
  Protein classification predicting sequence
LQWHLYE

SEQ ID NO: 2581 - protein, 17 aa, Artificial sequence
  Protein classification predicting sequence
VPLLKASIKETLRLHPI

SEQ ID NO: 2582 - protein, 6 aa, Artificial sequence
  Protein classification predicting sequence
VTLQRY

SEQ ID NO: 2583 - protein, 9 aa, Artificial sequence
  Protein classification predicting sequence
IPAKTLVQV

SEQ ID NO: 2584 - protein, 7 aa, Artificial sequence
  Protein classification predicting sequence
FDPTRWL

SEQ ID NO: 2585 - protein, 10 aa, Artificial sequence
  Protein classification predicting sequence
GRRIAELEMT

SEQ ID NO: 2586 - protein, 20 aa, Artificial sequence
  Protein classification predicting sequence
GRRIAELEMTLFLIHILENF

SEQ ID NO: 2587 - protein, 6 aa, Artificial sequence
  Protein classification predicting sequence
AWKKDR

SEQ ID NO: 2588 - protein, 7 aa, Artificial sequence
  Protein classification predicting sequence
EVMAPEA

SEQ ID NO: 2589 - protein, 7 aa, Artificial sequence
  Protein classification predicting sequence
VLHRRIK

SEQ ID NO: 2590 - protein, 7 aa, Artificial sequence
  Protein classification predicting sequence
DHVAAWD

SEQ ID NO: 2591 - protein, 7 aa, Artificial sequence
  Protein classification predicting sequence
YTQNFYW

SEQ ID NO: 2592 - protein, 10 aa, Artificial sequence
  Protein classification predicting sequence
MLRAEVLAAR

SEQ ID NO: 2593 - protein, 13 aa, Artificial sequence
  Protein classification predicting sequence
IPAKTLVQVAIYA

SEQ ID NO: 2594 - protein, 13 aa, Artificial sequence
  Protein classification predicting sequence
FRNLGFGWGVRQC

SEQ ID NO: 2595 - protein, 11 aa, Artificial sequence
  Protein classification predicting sequence
EVMAPEAIKNF

SEQ ID NO: 2596 - protein, 9 aa, Artificial sequence
  Protein classification predicting sequence
VLHRRIKQQ

SEQ ID NO: 2597 - protein, 8 aa, Artificial sequence
  Protein classification predicting sequence
FGWGVRQC

SEQ ID NO: 2598 - protein, 6 aa, Artificial sequence
  Protein classification predicting sequence
AMGRDP

SEQ ID NO: 2599 - protein, 8 aa, Artificial sequence
  Protein classification predicting sequence
RVGTGEGA

SEQ ID NO: 2600 - protein, 15 aa, Artificial sequence
  Protein classification predicting sequence
NFQKYGPIYREKLGN

SEQ ID NO: 2601 - protein, 22 aa, Artificial sequence
  Protein classification predicting sequence
NFQKYGPIYREKLGNLESVYII

SEQ ID NO: 2602 - protein, 8 aa, Artificial sequence
  Protein classification predicting sequence
PPWVAYHQ

SEQ ID NO: 2603 - protein, 19 aa, Artificial sequence
  Protein classification predicting sequence
VLNTEVMAPEAIKNFIPLL

SEQ ID NO: 2604 - protein, 26 aa, Artificial sequence
  Protein classification predicting sequence
RLFRTKTWRDHVAAWDTIFNKAEKYT

SEQ ID NO: 2605 - protein, 7 aa, Artificial sequence
  Protein classification predicting sequence
NYPGILY

SEQ ID NO: 2606 - protein, 8 aa, Artificial sequence
  Protein classification predicting sequence
ARRQAQGD

SEQ ID NO: 2607 - protein, 9 aa, Artificial sequence
  Protein classification predicting sequence
TLFELARNP

SEQ ID NO: 2608 - protein, 10 aa, Artificial sequence
  Protein classification predicting sequence
NYHIPAGTLV

SEQ ID NO: 2609 - protein, 5 aa, Artificial sequence
  Protein classification predicting sequence
WQLHR

SEQ ID NO: 2610 - protein, 7 aa, Artificial sequence
  Protein classification predicting sequence
NLWALHH

SEQ ID NO: 2611 - protein, 17 aa, Artificial sequence
  Protein classification predicting sequence
VFLLTLAYLFWPKTKHS

SEQ ID NO: 2612 - protein, 9 aa, Artificial sequence
  Protein classification predicting sequence
RTPTISDRN

SEQ ID NO: 2613 - protein, 12 aa, Artificial sequence
  Protein classification predicting sequence
NLWALHHNEKEW

SEQ ID NO: 2614 - protein, 6 aa, Artificial sequence
  Protein classification predicting sequence
KYPKSL

SEQ ID NO: 2615 - protein, 8 aa, Artificial sequence
  Protein classification predicting sequence
VGSLPFLP

SEQ ID NO: 2616 - protein, 7 aa, Artificial sequence
  Protein classification predicting sequence
KYGPIYS

SEQ ID NO: 2617 - protein, 9 aa, Artificial sequence
  Protein classification predicting sequence
IGHHQLARE

SEQ ID NO: 2618 - protein, 7 aa, Artificial sequence
  Protein classification predicting sequence
KGIAFAD

SEQ ID NO: 2619 - protein, 8 aa, Artificial sequence
  Protein classification predicting sequence
KEKFRSDS

SEQ ID NO: 2620 - protein, 12 aa, Artificial sequence
  Protein classification predicting sequence
AFLLHNPQVKKK

SEQ ID NO: 2621 - protein, 16 aa, Artificial sequence
  Protein classification predicting sequence
LEATIREVLRIRPVAP

SEQ ID NO: 2622 - protein, 12 aa, Artificial sequence
  Protein classification predicting sequence
SYLPFGAGPRSC

SEQ ID NO: 2623 - protein, 10 aa, Artificial sequence
  Protein classification predicting sequence
AWKEAQAEGS

SEQ ID NO: 2624 - protein, 7 aa, Artificial sequence
  Protein classification predicting sequence
EAQAEGS

SEQ ID NO: 2625 - protein, 6 aa, Artificial sequence
  Protein classification predicting sequence
LRIRPV

SEQ ID NO: 2626 - protein, 7 aa, Artificial sequence
  Protein classification predicting sequence
HHDEKEW

SEQ ID NO: 2627 - protein, 6 aa, Artificial sequence
  Protein classification predicting sequence
GTKTTV

SEQ ID NO: 2628 - protein, 10 aa, Artificial sequence
  Protein classification predicting sequence
KKGKEFSGRP

SEQ ID NO: 2629 - protein, 11 aa, Artificial sequence
  Protein classification predicting sequence
ATFALFKDGDQ

SEQ ID NO: 2630 - protein, 7 aa, Artificial sequence
  Protein classification predicting sequence
LAVTNII

SEQ ID NO: 2631 - protein, 6 aa, Artificial sequence
  Protein classification predicting sequence
LVDIFP

SEQ ID NO: 2632 - protein, 7 aa, Artificial sequence
  Protein classification predicting sequence
GFSRTPT

SEQ ID NO: 2633 - protein, 10 aa, Artificial sequence
  Protein classification predicting sequence
FMPERFLDPT

SEQ ID NO: 2634 - protein, 19 aa, Artificial sequence
  Protein classification predicting sequence
MAWLLQRFDLEVPDDGQLP

SEQ ID NO: 2635 - protein, 12 aa, Artificial sequence
  Protein classification predicting sequence
LPLVGSLPFLPR

SEQ ID NO: 2636 - protein, 8 aa, Artificial sequence
  Protein classification predicting sequence
ILSDNQKG

SEQ ID NO: 2637 - protein, 7 aa, Artificial sequence
  Protein classification predicting sequence
AFADHGA

SEQ ID NO: 2638 - protein, 9 aa, Artificial sequence
  Protein classification predicting sequence
AFALFKDGN

SEQ ID NO: 2639 - protein, 6 aa, Artificial sequence
  Protein classification predicting sequence
GPDQDS

SEQ ID NO: 2640 - protein, 11 aa, Artificial sequence
  Protein classification predicting sequence
VFLIDSFKVKI

SEQ ID NO: 2641 - protein, 6 aa, Artificial sequence
  Protein classification predicting sequence
FSGRPQ

SEQ ID NO: 2642 - protein, 11 aa, Artificial sequence
  Protein classification predicting sequence
SNNRKGIAFAD

SEQ ID NO: 2643 - protein, 10 aa, Artificial sequence
  Protein classification predicting sequence
IDISFPVFVA

SEQ ID NO: 2644 - protein, 10 aa, Artificial sequence
  Protein classification predicting sequence
TNVISLICFN

SEQ ID NO: 2645 - protein, 9 aa, Artificial sequence
  Protein classification predicting sequence
SYKNGDPEL

SEQ ID NO: 2646 - protein, 10 aa, Artificial sequence
  Protein classification predicting sequence
LEATIREVLR

SEQ ID NO: 2647 - protein, 7 aa, Artificial sequence
  Protein classification predicting sequence
AFLLHNP

SEQ ID NO: 2648 - protein, 6 aa, Artificial sequence
  Protein classification predicting sequence
RSCIGE

SEQ ID NO: 2649 - protein, 7 aa, Artificial sequence
  Protein classification predicting sequence
LLQRFDL

SEQ ID NO: 2650 - protein, 14 aa, Artificial sequence
  Protein classification predicting sequence
NFFKLQEKYGPIYS

SEQ ID NO: 2651 - protein, 6 aa, Artificial sequence
  Protein classification predicting sequence
ICFNIS

SEQ ID NO: 2652 - protein, 10 aa, Artificial sequence
  Protein classification predicting sequence
VIINLWALHH

SEQ ID NO: 2653 - protein, 7 aa, Artificial sequence
  Protein classification predicting sequence
LARQELF

SEQ ID NO: 2654 - protein, 8 aa, Artificial sequence
  Protein classification predicting sequence
PKVVFLID

SEQ ID NO: 2655 - protein, 8 aa, Artificial sequence
  Protein classification predicting sequence
EVLLKKGK

SEQ ID NO: 2656 - protein, 8 aa, Artificial sequence
  Protein classification predicting sequence
IAFADYGA

SEQ ID NO: 2657 - protein, 46 aa, Artificial sequence
  Protein classification predicting sequence
GAHWQLHRRLAMATFALFKDGDQKLEKIICQEISTLCDMLATHNGQ

SEQ ID NO: 2658 - protein, 48 aa, Artificial sequence
  Protein classification predicting sequence
LMQAKMNSDNGNAGPDQDSELLSDNHILTTIGDIFGAGVETTTSVVKW

SEQ ID NO: 2659 - protein, 38 aa, Artificial sequence
  Protein classification predicting sequence
VIINLWALHHNEKEWHQPDQFMPERFLNPAGTQLISPS

SEQ ID NO: 2660 - protein, 48 aa, Artificial sequence
  Protein classification predicting sequence
SYLPFGAGPRSCIGEILARQELFLIMAWLLQRFDLEVPDDGQLPSLEG

SEQ ID NO: 2661 - protein, 8 aa, Artificial sequence
  Protein classification predicting sequence
EVLIKKGK

SEQ ID NO: 2662 - protein, 7 aa, Artificial sequence
  Protein classification predicting sequence
DSSIGEF

SEQ ID NO: 2663 - protein, 8 aa, Artificial sequence
  Protein classification predicting sequence
FMPERFLD

SEQ ID NO: 2664 - protein, 6 aa, Artificial sequence
  Protein classification predicting sequence
YLFWPK

SEQ ID NO: 2665 - protein, 6 aa, Artificial sequence
  Protein classification predicting sequence
NFFKLQ

SEQ ID NO: 2666 - protein, 10 aa, Artificial sequence
  Protein classification predicting sequence
SFRLGSKTTV

SEQ ID NO: 2667 - protein, 18 aa, Artificial sequence
  Protein classification predicting sequence
TLDILSDNQKGIAFADHG

SEQ ID NO: 2668 - protein, 10 aa, Artificial sequence
  Protein classification predicting sequence
SFICFNFSFK

SEQ ID NO: 2669 - protein, 6 aa, Artificial sequence
  Protein classification predicting sequence
RHMLAT

SEQ ID NO: 2670 - protein, 9 aa, Artificial sequence
  Protein classification predicting sequence
DIFGAGVET

SEQ ID NO: 2671 - protein, 47 aa, Artificial sequence
  Protein classification predicting sequence
PDLFMPERFLDPTGTQLISPSLSYLPFGAGPRSCVGEMLARQELFLF

SEQ ID NO: 2672 - protein, 7 aa, Artificial sequence
  Protein classification predicting sequence
PDDGQLP

SEQ ID NO: 2673 - protein, 9 aa, Artificial sequence
  Protein classification predicting sequence
GRPRTVTTD

SEQ ID NO: 2674 - protein, 8 aa, Artificial sequence
  Protein classification predicting sequence
QAKMNSDN

SEQ ID NO: 2675 - protein, 9 aa, Artificial sequence
  Protein classification predicting sequence
ETTTTVLKW

SEQ ID NO: 2676 - protein, 7 aa, Artificial sequence
  Protein classification predicting sequence
TVAKDSL

SEQ ID NO: 2677 - protein, 6 aa, Artificial sequence
  Protein classification predicting sequence
DIFPWL

SEQ ID NO: 2678 - protein, 7 aa, Artificial sequence
  Protein classification predicting sequence
VIINLWA

SEQ ID NO: 2679 - protein, 9 aa, Artificial sequence
  Protein classification predicting sequence
RVWISGEET

SEQ ID NO: 2680 - protein, 7 aa, Artificial sequence
  Protein classification predicting sequence
GLQCIGM

SEQ ID NO: 2681 - protein, 9 aa, Artificial sequence
  Protein classification predicting sequence
EQGIIFNSN

SEQ ID NO: 2682 - protein, 8 aa, Artificial sequence
  Protein classification predicting sequence
ILNIGRMH

SEQ ID NO: 2683 - protein, 6 aa, Artificial sequence
  Protein classification predicting sequence
LWKAVR

SEQ ID NO: 2684 - protein, 6 aa, Artificial sequence
  Protein classification predicting sequence
QCVLEM

SEQ ID NO: 2685 - protein, 7 aa, Artificial sequence
  Protein classification predicting sequence
GTNIILN

SEQ ID NO: 2686 - protein, 6 aa, Artificial sequence
  Protein classification predicting sequence
AMVMMK

SEQ ID NO: 2687 - protein, 7 aa, Artificial sequence
  Protein classification predicting sequence
LEMLNPM

SEQ ID NO: 2688 - protein, 9 aa, Artificial sequence
  Protein classification predicting sequence
TSMVSEVVP

SEQ ID NO: 2689 - protein, 9 aa, Artificial sequence
  Protein classification predicting sequence
LLLTGFLLL

SEQ ID NO: 2690 - protein, 6 aa, Artificial sequence
  Protein classification predicting sequence
SVKDLK

SEQ ID NO: 2691 - protein, 8 aa, Artificial sequence
  Protein classification predicting sequence
RFGSKLGL

SEQ ID NO: 2692 - protein, 29 aa, Artificial sequence
  Protein classification predicting sequence
FNNNPALWKAVRPFFTKALSGPGLVRMVT

SEQ ID NO: 2693 - protein, 15 aa, Artificial sequence
  Protein classification predicting sequence
CVEKMQKKNDLSLHP

SEQ ID NO: 2694 - protein, 14 aa, Artificial sequence
  Protein classification predicting sequence
YGDIVRVWINGEET

SEQ ID NO: 2695 - protein, 6 aa, Artificial sequence
  Protein classification predicting sequence
QCILEM

SEQ ID NO: 2696 - protein, 8 aa, Artificial sequence
  Protein classification predicting sequence
SISLFFML

SEQ ID NO: 2697 - protein, 7 aa, Artificial sequence
  Protein classification predicting sequence
ELDTVIG

SEQ ID NO: 2698 - protein, 5 aa, Artificial sequence
  Protein classification predicting sequence
MVMMK

SEQ ID NO: 2699 - protein, 6 aa, Artificial sequence
  Protein classification predicting sequence
ACNYYN

SEQ ID NO: 2700 - protein, 5 aa, Artificial sequence
  Protein classification predicting sequence
IGMHE

SEQ ID NO: 2701 - protein, 6 aa, Artificial sequence
  Protein classification predicting sequence
MLDTSN

SEQ ID NO: 2702 - protein, 7 aa, Artificial sequence
  Protein classification predicting sequence
DFATELI

SEQ ID NO: 2703 - protein, 6 aa, Artificial sequence
  Protein classification predicting sequence
ENVNQC

SEQ ID NO: 2704 - protein, 11 aa, Artificial sequence
  Protein classification predicting sequence
FFMLFLIAKHP

SEQ ID NO: 2705 - protein, 23 aa, Artificial sequence
  Protein classification predicting sequence
ILLLTGFLLLVWNYEDTSSIPGP

SEQ ID NO: 2706 - protein, 7 aa, Artificial sequence
  Protein classification predicting sequence
TSSIPGP

SEQ ID NO: 2707 - protein, 25 aa, Artificial sequence
  Protein classification predicting sequence
RFLWMGIGSACNYYNKMYGEFMRVW

SEQ ID NO: 2708 - protein, 6 aa, Artificial sequence
  Protein classification predicting sequence
MKHSHY

SEQ ID NO: 2709 - protein, 9 aa, Artificial sequence
  Protein classification predicting sequence
GLQCIGMHE

SEQ ID NO: 2710 - protein, 8 aa, Artificial sequence
  Protein classification predicting sequence
GIIFNNNP

SEQ ID NO: 2711 - protein, 12 aa, Artificial sequence
  Protein classification predicting sequence
KYEKSVKDLKDA

SEQ ID NO: 2712 - protein, 8 aa, Artificial sequence
  Protein classification predicting sequence
LSLHPDET

SEQ ID NO: 2713 - protein, 6 aa, Artificial sequence
  Protein classification predicting sequence
RFLWMG

SEQ ID NO: 2714 - protein, 16 aa, Artificial sequence
  Protein classification predicting sequence
RPFFTKALSGPGLVRM

SEQ ID NO: 2715 - protein, 8 aa, Artificial sequence
  Protein classification predicting sequence
HLDKLEEV

SEQ ID NO: 2716 - protein, 11 aa, Artificial sequence
  Protein classification predicting sequence
LMRRIMLDTSN

SEQ ID NO: 2717 - protein, 11 aa, Artificial sequence
  Protein classification predicting sequence
RYFQPFGFGPR

SEQ ID NO: 2718 - protein, 14 aa, Artificial sequence
  Protein classification predicting sequence
GSACNYYNKMYGEF

SEQ ID NO: 2719 - protein, 6 aa, Artificial sequence
  Protein classification predicting sequence
FHIMKH

SEQ ID NO: 2720 - protein, 8 aa, Artificial sequence
  Protein classification predicting sequence
HYSSRFGS

SEQ ID NO: 2721 - protein, 8 aa, Artificial sequence
  Protein classification predicting sequence
IFFKISWL

SEQ ID NO: 2722 - protein, 7 aa, Artificial sequence
  Protein classification predicting sequence
EEKRHRI

SEQ ID NO: 2723 - protein, 10 aa, Artificial sequence
  Protein classification predicting sequence
ESMRYQPVVD

SEQ ID NO: 2724 - protein, 8 aa, Artificial sequence
  Protein classification predicting sequence
MIFTPRNS

SEQ ID NO: 2725 - protein, 8 aa, Artificial sequence
  Protein classification predicting sequence
RPFFMKAL

SEQ ID NO: 2726 - protein, 7 aa, Artificial sequence
  Protein classification predicting sequence
IAMVMMK

SEQ ID NO: 2727 - protein, 10 aa, Artificial sequence
  Protein classification predicting sequence
TWQTVLIKPD

SEQ ID NO: 2728 - protein, 10 aa, Artificial sequence
  Protein classification predicting sequence
LEVLNPRHYN

SEQ ID NO: 2729 - protein, 27 aa, Artificial sequence
  Protein classification predicting sequence
ASIAILLLTGFLLLVWNYEDTSSIPGP

SEQ ID NO: 2730 - protein, 9 aa, Artificial sequence
  Protein classification predicting sequence
RFLWMGIGS

SEQ ID NO: 2731 - protein, 13 aa, Artificial sequence
  Protein classification predicting sequence
KALSGPGLVRMVT

SEQ ID NO: 2732 - protein, 10 aa, Artificial sequence
  Protein classification predicting sequence
CADSITKHLD

SEQ ID NO: 2733 - protein, 9 aa, Artificial sequence
  Protein classification predicting sequence
LFLGIPLDE

SEQ ID NO: 2734 - protein, 15 aa, Artificial sequence
  Protein classification predicting sequence
NVPYRYFQPFGFGPR

SEQ ID NO: 2735 - protein, 8 aa, Artificial sequence
  Protein classification predicting sequence
KALTGPGL

SEQ ID NO: 2736 - protein, 8 aa, Artificial sequence
  Protein classification predicting sequence
GPGLVRMV

SEQ ID NO: 2737 - protein, 6 aa, Artificial sequence
  Protein classification predicting sequence
AWQALL

SEQ ID NO: 2738 - protein, 8 aa, Artificial sequence
  Protein classification predicting sequence
LKVVENFI

SEQ ID NO: 2739 - protein, 12 aa, Artificial sequence
  Protein classification predicting sequence
FPKPNEFTLENF

SEQ ID NO: 2740 - protein, 6 aa, Artificial sequence
  Protein classification predicting sequence
PRNSDK

SEQ ID NO: 2741 - protein, 8 aa, Artificial sequence
  Protein classification predicting sequence
IAAPDTLS

SEQ ID NO: 2742 - protein, 13 aa, Artificial sequence
  Protein classification predicting sequence
FHPVVDFTMRRAL

SEQ ID NO: 2743 - protein, 5 aa, Artificial sequence
  Protein classification predicting sequence
GRMHR

SEQ ID NO: 2744 - protein, 8 aa, Artificial sequence
  Protein classification predicting sequence
NEFSLENF

SEQ ID NO: 2745 - protein, 7 aa, Artificial sequence
  Protein classification predicting sequence
RYFQPFG

SEQ ID NO: 2746 - protein, 18 aa, Artificial sequence
  Protein classification predicting sequence
TSSIPGPGYCMGIGPLIS

SEQ ID NO: 2747 - protein, 7 aa, Artificial sequence
  Protein classification predicting sequence
GIGPLIS

SEQ ID NO: 2748 - protein, 8 aa, Artificial sequence
  Protein classification predicting sequence
LIFAEKRG

SEQ ID NO: 2749 - protein, 13 aa, Artificial sequence
  Protein classification predicting sequence
GEETLIISKSSSM

SEQ ID NO: 2750 - protein, 6 aa, Artificial sequence
  Protein classification predicting sequence
HVMKHS

SEQ ID NO: 2751 - protein, 12 aa, Artificial sequence
  Protein classification predicting sequence
AEKLEDCMDFAT

SEQ ID NO: 2752 - protein, 11 aa, Artificial sequence
  Protein classification predicting sequence
RYQPVVDLVMR

SEQ ID NO: 2753 - protein, 10 aa, Artificial sequence
  Protein classification predicting sequence
EAFILETFRH

SEQ ID NO: 2754 - protein, 9 aa, Artificial sequence
  Protein classification predicting sequence
IRDITDSLI

SEQ ID NO: 2755 - protein, 8 aa, Artificial sequence
  Protein classification predicting sequence
TTAISWSL

SEQ ID NO: 2756 - protein, 12 aa, Artificial sequence
  Protein classification predicting sequence
TTAISWSLLYLV

SEQ ID NO: 2757 - protein, 8 aa, Artificial sequence
  Protein classification predicting sequence
LPYMEAFI

SEQ ID NO: 2758 - protein, 14 aa, Artificial sequence
  Protein classification predicting sequence
FVNQWQINHDQKLW

SEQ ID NO: 2759 - protein, 7 aa, Artificial sequence
  Protein classification predicting sequence
PGPKPLP

SEQ ID NO: 2760 - protein, 11 aa, Artificial sequence
  Protein classification predicting sequence
LVNLSDEFGQV

SEQ ID NO: 2761 - protein, 16 aa, Artificial sequence
  Protein classification predicting sequence
LDMTPEYGLTMKHKRC

SEQ ID NO: 2762 - protein, 8 aa, Artificial sequence
  Protein classification predicting sequence
ATMRARNE

SEQ ID NO: 2763 - protein, 7 aa, Artificial sequence
  Protein classification predicting sequence
TEIPEGL

SEQ ID NO: 2764 - protein, 8 aa, Artificial sequence
  Protein classification predicting sequence
IGNVLEVG

SEQ ID NO: 2765 - protein, 8 aa, Artificial sequence
  Protein classification predicting sequence
LSGSETVR

SEQ ID NO: 2766 - protein, 13 aa, Artificial sequence
  Protein classification predicting sequence
FINDGKSLAFSTD

SEQ ID NO: 2767 - protein, 7 aa, Artificial sequence
  Protein classification predicting sequence
SCVLEEH

SEQ ID NO: 2768 - protein, 12 aa, Artificial sequence
  Protein classification predicting sequence
VVGSGNPADFIP

SEQ ID NO: 2769 - protein, 10 aa, Artificial sequence
  Protein classification predicting sequence
FVQKIVSEHY

SEQ ID NO: 2770 - protein, 9 aa, Artificial sequence
  Protein classification predicting sequence
DLFGAGFDT

SEQ ID NO: 2771 - protein, 8 aa, Artificial sequence
  Protein classification predicting sequence
GKRRCIGE

SEQ ID NO: 2772 - protein, 13 aa, Artificial sequence
  Protein classification predicting sequence
GKRRCIGEVIARN

SEQ ID NO: 2773 - protein, 16 aa, Artificial sequence
  Protein classification predicting sequence
LTLGKNPHLALSRMSQ

SEQ ID NO: 2774 - protein, 9 aa, Artificial sequence
  Protein classification predicting sequence
NVICAICFG

SEQ ID NO: 2775 - protein, 8 aa, Artificial sequence
  Protein classification predicting sequence
CFGRRYDH

SEQ ID NO: 2776 - protein, 7 aa, Artificial sequence
  Protein classification predicting sequence
QLSDEKI

SEQ ID NO: 2777 - protein, 10 aa, Artificial sequence
  Protein classification predicting sequence
GKRKCIGETI

SEQ ID NO: 2778 - protein, 9 aa, Artificial sequence
  Protein classification predicting sequence
GKSLAFSTD

SEQ ID NO: 2779 - protein, 13 aa, Artificial sequence
  Protein classification predicting sequence
STALSWSVMYLVA

SEQ ID NO: 2780 - protein, 7 aa, Artificial sequence
  Protein classification predicting sequence
EYLIKQL

SEQ ID NO: 2781 - protein, 13 aa, Artificial sequence
  Protein classification predicting sequence
TVMKADGSFDPFR

SEQ ID NO: 2782 - protein, 11 aa, Artificial sequence
  Protein classification predicting sequence
VGIVNDLFGAG

SEQ ID NO: 2783 - protein, 6 aa, Artificial sequence
  Protein classification predicting sequence
DLFGAG

SEQ ID NO: 2784 - protein, 8 aa, Artificial sequence
  Protein classification predicting sequence
SVSESLVA

SEQ ID NO: 2785 - protein, 14 aa, Artificial sequence
  Protein classification predicting sequence
VGIVNDLFGAGFDT

SEQ ID NO: 2786 - protein, 6 aa, Artificial sequence
  Protein classification predicting sequence
FGMGKR

SEQ ID NO: 2787 - protein, 13 aa, Artificial sequence
  Protein classification predicting sequence
VLSGLDTIRQALV

SEQ ID NO: 2788 - protein, 7 aa, Artificial sequence
  Protein classification predicting sequence
LYSFTLI

SEQ ID NO: 2789 - protein, 8 aa, Artificial sequence
  Protein classification predicting sequence
SATELLLA

SEQ ID NO: 2790 - protein, 17 aa, Artificial sequence
  Protein classification predicting sequence
YSFTLITNGKSMTFNPD

SEQ ID NO: 2791 - protein, 21 aa, Artificial sequence
  Protein classification predicting sequence
VQRKIQEELDTVIGRSRRPRL

SEQ ID NO: 2792 - protein, 6 aa, Artificial sequence
  Protein classification predicting sequence
FRHSSF

SEQ ID NO: 2793 - protein, 6 aa, Artificial sequence
  Protein classification predicting sequence
PFTIPH

SEQ ID NO: 2794 - protein, 7 aa, Artificial sequence
  Protein classification predicting sequence
NQWQINH

SEQ ID NO: 2795 - protein, 6 aa, Artificial sequence
  Protein classification predicting sequence
KHARCE

SEQ ID NO: 2796 - protein, 7 aa, Artificial sequence
  Protein classification predicting sequence
QIQIGMR

SEQ ID NO: 2797 - protein, 7 aa, Artificial sequence
  Protein classification predicting sequence
PEIQERL

SEQ ID NO: 2798 - protein, 6 aa, Artificial sequence
  Protein classification predicting sequence
PADFIP

SEQ ID NO: 2799 - protein, 6 aa, Artificial sequence
  Protein classification predicting sequence
LRYLPN

SEQ ID NO: 2800 - protein, 7 aa, Artificial sequence
  Protein classification predicting sequence
DRKLDEN

SEQ ID NO: 2801 - protein, 8 aa, Artificial sequence
  Protein classification predicting sequence
LDENANVQ

SEQ ID NO: 2802 - protein, 6 aa, Artificial sequence
  Protein classification predicting sequence
DTSLNG

SEQ ID NO: 2803 - protein, 8 aa, Artificial sequence
  Protein classification predicting sequence
NQWQVNHD

SEQ ID NO: 2804 - protein, 7 aa, Artificial sequence
  Protein classification predicting sequence
LSLTAMS

SEQ ID NO: 2805 - protein, 8 aa, Artificial sequence
  Protein classification predicting sequence
GRPDLYSF

SEQ ID NO: 2806 - protein, 8 aa, Artificial sequence
  Protein classification predicting sequence
LFLAILLQ

SEQ ID NO: 2807 - protein, 17 aa, Artificial sequence
  Protein classification predicting sequence
PLDMTPEYGLTMKHKRC

SEQ ID NO: 2808 - protein, 6 aa, Artificial sequence
  Protein classification predicting sequence
GRPDLY

SEQ ID NO: 2809 - protein, 7 aa, Artificial sequence
  Protein classification predicting sequence
GSFDPFR

SEQ ID NO: 2810 - protein, 10 aa, Artificial sequence
  Protein classification predicting sequence
PEIQERLYQE

SEQ ID NO: 2811 - protein, 7 aa, Artificial sequence
  Protein classification predicting sequence
RMPLLSD

SEQ ID NO: 2812 - protein, 6 aa, Artificial sequence
  Protein classification predicting sequence
FGLGKR

SEQ ID NO: 2813 - protein, 11 aa, Artificial sequence
  Protein classification predicting sequence
FGLGKRRCIGE

SEQ ID NO: 2814 - protein, 8 aa, Artificial sequence
  Protein classification predicting sequence
EVFLFLAI

SEQ ID NO: 2815 - protein, 11 aa, Artificial sequence
  Protein classification predicting sequence
ETVRQALIKQG

SEQ ID NO: 2816 - protein, 6 aa, Artificial sequence
  Protein classification predicting sequence
YLVAYP

SEQ ID NO: 2817 - protein, 7 aa, Artificial sequence
  Protein classification predicting sequence
TTRDTSL

SEQ ID NO: 2818 - protein, 6 aa, Artificial sequence
  Protein classification predicting sequence
EHVSKE

SEQ ID NO: 2819 - protein, 11 aa, Artificial sequence
  Protein classification predicting sequence
SGNPADFIPIL

SEQ ID NO: 2820 - protein, 17 aa, Artificial sequence
  Protein classification predicting sequence
KDNIRDITDSLIDHCED

SEQ ID NO: 2821 - protein, 10 aa, Artificial sequence
  Protein classification predicting sequence
LEGTTPEYSC

SEQ ID NO: 2822 - protein, 16 aa, Artificial sequence
  Protein classification predicting sequence
VFQIQIGMRPVVVLSG

SEQ ID NO: 2823 - protein, 23 aa, Artificial sequence
  Protein classification predicting sequence
KDNIRDITDSLIDHCEDRKLDEN

SEQ ID NO: 2824 - protein, 8 aa, Artificial sequence
  Protein classification predicting sequence
LTLGKNPH

SEQ ID NO: 2825 - protein, 13 aa, Artificial sequence
  Protein classification predicting sequence
RRYGDVFQIRLGS

SEQ ID NO: 2826 - protein, 9 aa, Artificial sequence
  Protein classification predicting sequence
RYDHDDQEL

SEQ ID NO: 2827 - protein, 14 aa, Artificial sequence
  Protein classification predicting sequence
FEKGHIRDITDSLI

SEQ ID NO: 2828 - protein, 8 aa, Artificial sequence
  Protein classification predicting sequence
CVFVNQWQ

SEQ ID NO: 2829 - protein, 7 aa, Artificial sequence
  Protein classification predicting sequence
EVFLFLA

SEQ ID NO: 2830 - protein, 6 aa, Artificial sequence
  Protein classification predicting sequence
PPGPWG

SEQ ID NO: 2831 - protein, 9 aa, Artificial sequence
  Protein classification predicting sequence
WAARRRLAQ

SEQ ID NO: 2832 - protein, 11 aa, Artificial sequence
  Protein classification predicting sequence
SFVPFTIPHST

SEQ ID NO: 2833 - protein, 20 aa, Artificial sequence
  Protein classification predicting sequence
LSEKVILFGLGKRKCIGETI

SEQ ID NO: 2834 - protein, 14 aa, Artificial sequence
  Protein classification predicting sequence
LFGLGKRKCIGETI

SEQ ID NO: 2835 - protein, 10 aa, Artificial sequence
  Protein classification predicting sequence
YGDVLQIRIG

SEQ ID NO: 2836 - protein, 8 aa, Artificial sequence
  Protein classification predicting sequence
RYDHDDQE

SEQ ID NO: 2837 - protein, 11 aa, Artificial sequence
  Protein classification predicting sequence
TLEGTTPEYSC

SEQ ID NO: 2838 - protein, 7 aa, Artificial sequence
  Protein classification predicting sequence
EYLVKQL

SEQ ID NO: 2839 - protein, 8 aa, Artificial sequence
  Protein classification predicting sequence
NVQMSDEK

SEQ ID NO: 2840 - protein, 12 aa, Artificial sequence
  Protein classification predicting sequence
DGTELNKLEGEK

SEQ ID NO: 2841 - protein, 12 aa, Artificial sequence
  Protein classification predicting sequence
GKRRCIGEVIAR

SEQ ID NO: 2842 - protein, 7 aa, Artificial sequence
  Protein classification predicting sequence
GRPDLYS

SEQ ID NO: 2843 - protein, 8 aa, Artificial sequence
  Protein classification predicting sequence
RRLAQNAL

SEQ ID NO: 2844 - protein, 7 aa, Artificial sequence
  Protein classification predicting sequence
FSIASDP

SEQ ID NO: 2845 - protein, 6 aa, Artificial sequence
  Protein classification predicting sequence
SVANVI

SEQ ID NO: 2846 - protein, 6 aa, Artificial sequence
  Protein classification predicting sequence
GFYIPK

SEQ ID NO: 2847 - protein, 10 aa, Artificial sequence
  Protein classification predicting sequence
TPIYGLTMKH

SEQ ID NO: 2848 - protein, 7 aa, Artificial sequence
  Protein classification predicting sequence
YGLTMKH

SEQ ID NO: 2849 - protein, 6 aa, Artificial sequence
  Protein classification predicting sequence
YGLTMK

SEQ ID NO: 2850 - protein, 10 aa, Artificial sequence
  Protein classification predicting sequence
DITGALFKHS

SEQ ID NO: 2851 - protein, 6 aa, Artificial sequence
  Protein classification predicting sequence
PRLSDR

SEQ ID NO: 2852 - protein, 14 aa, Artificial sequence
  Protein classification predicting sequence
YGDVLQIRIGSTPV

SEQ ID NO: 2853 - protein, 7 aa, Artificial sequence
  Protein classification predicting sequence
FGAGFDT

SEQ ID NO: 2854 - protein, 6 aa, Artificial sequence
  Protein classification predicting sequence
SSCYLE

SEQ ID NO: 2855 - protein, 9 aa, Artificial sequence
  Protein classification predicting sequence
INQWQVNHD

SEQ ID NO: 2856 - protein, 8 aa, Artificial sequence
  Protein classification predicting sequence
VIGAMCFG

SEQ ID NO: 2857 - protein, 6 aa, Artificial sequence
  Protein classification predicting sequence
MCFGRR

SEQ ID NO: 2858 - protein, 8 aa, Artificial sequence
  Protein classification predicting sequence
PILRYLPN

SEQ ID NO: 2859 - protein, 15 aa, Artificial sequence
  Protein classification predicting sequence
ARWEVFLFLAILLQR

SEQ ID NO: 2860 - protein, 7 aa, Artificial sequence
  Protein classification predicting sequence
PLPIIGN

SEQ ID NO: 2861 - protein, 7 aa, Artificial sequence
  Protein classification predicting sequence
YLVAYPE

SEQ ID NO: 2862 - protein, 13 aa, Artificial sequence
  Protein classification predicting sequence
LPFTIPHCTTKDT

SEQ ID NO: 2863 - protein, 13 aa, Artificial sequence
  Protein classification predicting sequence
IPKDTCVFINQWQ

SEQ ID NO: 2864 - protein, 9 aa, Artificial sequence
  Protein classification predicting sequence
FLFLTTILQ

SEQ ID NO: 2865 - protein, 7 aa, Artificial sequence
  Protein classification predicting sequence
PMLGSVL

SEQ ID NO: 2866 - protein, 11 aa, Artificial sequence
  Protein classification predicting sequence
FGAGFDTVTTA

SEQ ID NO: 2867 - protein, 12 aa, Artificial sequence
  Protein classification predicting sequence
PFTIPHSTTRDT

SEQ ID NO: 2868 - protein, 9 aa, Artificial sequence
  Protein classification predicting sequence
LNGYYIPKD

SEQ ID NO: 2869 - protein, 8 aa, Artificial sequence
  Protein classification predicting sequence
LLQQLEFS

SEQ ID NO: 2870 - protein, 6 aa, Artificial sequence
  Protein classification predicting sequence
MKHKRC

SEQ ID NO: 2871 - protein, 6 aa, Artificial sequence
  Protein classification predicting sequence
VFVNQW

SEQ ID NO: 2872 - protein, 11 aa, Artificial sequence
  Protein classification predicting sequence
QLTQEFCERMR

SEQ ID NO: 2873 - protein, 16 aa, Artificial sequence
  Protein classification predicting sequence
TLSWAVAFLLHHPEIQ

SEQ ID NO: 2874 - protein, 10 aa, Artificial sequence
  Protein classification predicting sequence
LARLELFVVL

SEQ ID NO: 2875 - protein, 8 aa, Artificial sequence
  Protein classification predicting sequence
VAGQWRDM

SEQ ID NO: 2876 - protein, 10 aa, Artificial sequence
  Protein classification predicting sequence
GQLLEGHVHM

SEQ ID NO: 2877 - protein, 9 aa, Artificial sequence
  Protein classification predicting sequence
KWVDFAGRP

SEQ ID NO: 2878 - protein, 9 aa, Artificial sequence
  Protein classification predicting sequence
PFQVRLQPR

SEQ ID NO: 2879 - protein, 8 aa, Artificial sequence
  Protein classification predicting sequence
LLHHPEIQ

SEQ ID NO: 2880 - protein, 10 aa, Artificial sequence
  Protein classification predicting sequence
HVHMSVVDLF

SEQ ID NO: 2881 - protein, 14 aa, Artificial sequence
  Protein classification predicting sequence
ATIAEVLRLRPVVP

SEQ ID NO: 2882 - protein, 17 aa, Artificial sequence
  Protein classification predicting sequence
FGCGARVCLGEPLARLE

SEQ ID NO: 2883 - protein, 9 aa, Artificial sequence
  Protein classification predicting sequence
LPPGPTPLP

SEQ ID NO: 2884 - protein, 7 aa, Artificial sequence
  Protein classification predicting sequence
EIEQVIG

SEQ ID NO: 2885 - protein, 9 aa, Artificial sequence
  Protein classification predicting sequence
EEIERVIGR

SEQ ID NO: 2886 - protein, 7 aa, Artificial sequence
  Protein classification predicting sequence
PFSIGKR

SEQ ID NO: 2887 - protein, 11 aa, Artificial sequence
  Protein classification predicting sequence
GKLPPGPTPLP

SEQ ID NO: 2888 - protein, 21 aa, Artificial sequence
  Protein classification predicting sequence
NQRTLDPNSPRDFIDSFLIRM

SEQ ID NO: 2889 - protein, 6 aa, Artificial sequence
  Protein classification predicting sequence
PRDFID

SEQ ID NO: 2890 - protein, 7 aa, Artificial sequence
  Protein classification predicting sequence
VGFATIP

SEQ ID NO: 2891 - protein, 9 aa, Artificial sequence
  Protein classification predicting sequence
FKGYGVVFS

SEQ ID NO: 2892 - protein, 13 aa, Artificial sequence
  Protein classification predicting sequence
DKEFLSLLRMMLG

SEQ ID NO: 2893 - protein, 7 aa, Artificial sequence
  Protein classification predicting sequence
LLLMKHP

SEQ ID NO: 2894 - protein, 7 aa, Artificial sequence
  Protein classification predicting sequence
DRAKMPY

SEQ ID NO: 2895 - protein, 6 aa, Artificial sequence
  Protein classification predicting sequence
YGPVFT

SEQ ID NO: 2896 - protein, 7 aa, Artificial sequence
  Protein classification predicting sequence
GERAKQL

SEQ ID NO: 2897 - protein, 10 aa, Artificial sequence
  Protein classification predicting sequence
NQRTLDPNSP

SEQ ID NO: 2898 - protein, 7 aa, Artificial sequence
  Protein classification predicting sequence
DRTKMPY

SEQ ID NO: 2899 - protein, 12 aa, Artificial sequence
  Protein classification predicting sequence
GEGLARMELFLF

SEQ ID NO: 2900 - protein, 8 aa, Artificial sequence
  Protein classification predicting sequence
GKRGIEER

SEQ ID NO: 2901 - protein, 6 aa, Artificial sequence
  Protein classification predicting sequence
RFEYDD

SEQ ID NO: 2902 - protein, 8 aa, Artificial sequence
  Protein classification predicting sequence
SVMKHLPG

SEQ ID NO: 2903 - protein, 7 aa, Artificial sequence
  Protein classification predicting sequence
LLLMKYP

SEQ ID NO: 2904 - protein, 7 aa, Artificial sequence
  Protein classification predicting sequence
EIDQVIG

SEQ ID NO: 2905 - protein, 7 aa, Artificial sequence
  Protein classification predicting sequence
LSSVLKD

SEQ ID NO: 2906 - protein, 8 aa, Artificial sequence
  Protein classification predicting sequence
GKRYCFGE

SEQ ID NO: 2907 - protein, 8 aa, Artificial sequence
  Protein classification predicting sequence
QAPQDIDV

SEQ ID NO: 2908 - protein, 23 aa, Artificial sequence
  Protein classification predicting sequence
GQLYDMFHSVMKYLPGPQQQIIK

SEQ ID NO: 2909 - protein, 7 aa, Artificial sequence
  Protein classification predicting sequence
FIDSFLI

SEQ ID NO: 2910 - protein, 9 aa, Artificial sequence
  Protein classification predicting sequence
KMPYTEAVI

SEQ ID NO: 2911 - protein, 6 aa, Artificial sequence
  Protein classification predicting sequence
AFVPFS

SEQ ID NO: 2912 - protein, 11 aa, Artificial sequence
  Protein classification predicting sequence
AVKEALVDQAE

SEQ ID NO: 2913 - protein, 8 aa, Artificial sequence
  Protein classification predicting sequence
DFIAKKVE

SEQ ID NO: 2914 - protein, 22 aa, Artificial sequence
  Protein classification predicting sequence
MKNLVLTTLNLFFAGTETVSTT

SEQ ID NO: 2915 - protein, 7 aa, Artificial sequence
  Protein classification predicting sequence
TTILQNF

SEQ ID NO: 2916 - protein, 16 aa, Artificial sequence
  Protein classification predicting sequence
GERAKQLRRFSIATLR

SEQ ID NO: 2917 - protein, 9 aa, Artificial sequence
  Protein classification predicting sequence
AVIHEIQRF

SEQ ID NO: 2918 - protein, 7 aa, Artificial sequence
  Protein classification predicting sequence
PEHFLDA

SEQ ID NO: 2919 - protein, 6 aa, Artificial sequence
  Protein classification predicting sequence
CLVEEL

SEQ ID NO: 2920 - protein, 9 aa, Artificial sequence
  Protein classification predicting sequence
LDPTFLFQC

SEQ ID NO: 2921 - protein, 8 aa, Artificial sequence
  Protein classification predicting sequence
DRQFLRLL

SEQ ID NO: 2922 - protein, 8 aa, Artificial sequence
  Protein classification predicting sequence
CLGEGIAR

SEQ ID NO: 2923 - protein, 7 aa, Artificial sequence
  Protein classification predicting sequence
ELFLFFT

SEQ ID NO: 2924 - protein, 8 aa, Artificial sequence
  Protein classification predicting sequence
EALVDQAE

SEQ ID NO: 2925 - protein, 11 aa, Artificial sequence
  Protein classification predicting sequence
VEKHRATLDPS

SEQ ID NO: 2926 - protein, 7 aa, Artificial sequence
  Protein classification predicting sequence
YLLRMEK

SEQ ID NO: 2927 - protein, 7 aa, Artificial sequence
  Protein classification predicting sequence
EFHHQNL

SEQ ID NO: 2928 - protein, 7 aa, Artificial sequence
  Protein classification predicting sequence
QVIGSHR

SEQ ID NO: 2929 - protein, 8 aa, Artificial sequence
  Protein classification predicting sequence
FRGYVIPK

SEQ ID NO: 2930 - protein, 6 aa, Artificial sequence
  Protein classification predicting sequence
PKNTEV

SEQ ID NO: 2931 - protein, 8 aa, Artificial sequence
  Protein classification predicting sequence
LSSALHDP

SEQ ID NO: 2932 - protein, 6 aa, Artificial sequence
  Protein classification predicting sequence
PGHFLD

SEQ ID NO: 2933 - protein, 5 aa, Artificial sequence
  Protein classification predicting sequence
FMPFS

SEQ ID NO: 2934 - protein, 8 aa, Artificial sequence
  Protein classification predicting sequence
LFFAGTET

SEQ ID NO: 2935 - protein, 8 aa, Artificial sequence
  Protein classification predicting sequence
AEAFSGRG

SEQ ID NO: 2936 - protein, 7 aa, Artificial sequence
  Protein classification predicting sequence
MEKEKSN

SEQ ID NO: 2937 - protein, 14 aa, Artificial sequence
  Protein classification predicting sequence
GDVFTVHLGPRPVV

SEQ ID NO: 2938 - protein, 9 aa, Artificial sequence
  Protein classification predicting sequence
LRRFSLATM

SEQ ID NO: 2939 - protein, 12 aa, Artificial sequence
  Protein classification predicting sequence
FGMGKRSVEERI

SEQ ID NO: 2940 - protein, 15 aa, Artificial sequence
  Protein classification predicting sequence
IDTYLLRMEKEKSNH

SEQ ID NO: 2941 - protein, 6 aa, Artificial sequence
  Protein classification predicting sequence
GTETTS

SEQ ID NO: 2942 - protein, 7 aa, Artificial sequence
  Protein classification predicting sequence
FGERFEY

SEQ ID NO: 2943 - protein, 8 aa, Artificial sequence
  Protein classification predicting sequence
PKGTEVFP

SEQ ID NO: 2944 - protein, 6 aa, Artificial sequence
  Protein classification predicting sequence
RFDYKD

SEQ ID NO: 2945 - protein, 7 aa, Artificial sequence
  Protein classification predicting sequence
PFSTGKR

SEQ ID NO: 2946 - protein, 7 aa, Artificial sequence
  Protein classification predicting sequence
ELFIFFT

SEQ ID NO: 2947 - protein, 8 aa, Artificial sequence
  Protein classification predicting sequence
AVKEALVD

SEQ ID NO: 2948 - protein, 6 aa, Artificial sequence
  Protein classification predicting sequence
MPYTDA

SEQ ID NO: 2949 - protein, 9 aa, Artificial sequence
  Protein classification predicting sequence
KSDYFMPFS

SEQ ID NO: 2950 - protein, 11 aa, Artificial sequence
  Protein classification predicting sequence
NQQSEFTIENL

SEQ ID NO: 2951 - protein, 9 aa, Artificial sequence
  Protein classification predicting sequence
TSLSSVLHD

SEQ ID NO: 2952 - protein, 8 aa, Artificial sequence
  Protein classification predicting sequence
LRNLGMGK

SEQ ID NO: 2953 - protein, 13 aa, Artificial sequence
  Protein classification predicting sequence
LRKTNASPCDPTF

SEQ ID NO: 2954 - protein, 7 aa, Artificial sequence
  Protein classification predicting sequence
PCNVICS

SEQ ID NO: 2955 - protein, 7 aa, Artificial sequence
  Protein classification predicting sequence
EHQESLD

SEQ ID NO: 2956 - protein, 27 aa, Artificial sequence
  Protein classification predicting sequence
FDPGHFLDESGNFKKSDYFMPFSAGKR

SEQ ID NO: 2957 - protein, 17 aa, Artificial sequence
  Protein classification predicting sequence
GNFKKSDYFMPFSAGKR

SEQ ID NO: 2958 - protein, 6 aa, Artificial sequence
  Protein classification predicting sequence
VVLHGY

SEQ ID NO: 2959 - protein, 18 aa, Artificial sequence
  Protein classification predicting sequence
PCDPTFILGCAPCNVICS

SEQ ID NO: 2960 - protein, 8 aa, Artificial sequence
  Protein classification predicting sequence
YGPVFTVY

SEQ ID NO: 2961 - protein, 14 aa, Artificial sequence
  Protein classification predicting sequence
NENVRILSSPWLQV

SEQ ID NO: 2962 - protein, 10 aa, Artificial sequence
  Protein classification predicting sequence
FRNYFIPKGT

SEQ ID NO: 2963 - protein, 6 aa, Artificial sequence
  Protein classification predicting sequence
GNIFQL

SEQ ID NO: 2964 - protein, 9 aa, Artificial sequence
  Protein classification predicting sequence
IEDRVQEEA

SEQ ID NO: 2965 - protein, 10 aa, Artificial sequence
  Protein classification predicting sequence
SVLHDSKEFP

SEQ ID NO: 2966 - protein, 6 aa, Artificial sequence
  Protein classification predicting sequence
EFPDPE

SEQ ID NO: 2967 - protein, 8 aa, Artificial sequence
  Protein classification predicting sequence
NGFASLPP

SEQ ID NO: 2968 - protein, 6 aa, Artificial sequence
  Protein classification predicting sequence
STTLRY

SEQ ID NO: 2969 - protein, 8 aa, Artificial sequence
  Protein classification predicting sequence
EEIDRVIG

SEQ ID NO: 2970 - protein, 9 aa, Artificial sequence
  Protein classification predicting sequence
GNFKKSDYF

SEQ ID NO: 2971 - protein, 10 aa, Artificial sequence
  Protein classification predicting sequence
HGYEAVKEAL

SEQ ID NO: 2972 - protein, 6 aa, Artificial sequence
  Protein classification predicting sequence
TLRNFG

SEQ ID NO: 2973 - protein, 7 aa, Artificial sequence
  Protein classification predicting sequence
LTSVLHD

SEQ ID NO: 2974 - protein, 8 aa, Artificial sequence
  Protein classification predicting sequence
LVLTLSSL

SEQ ID NO: 2975 - protein, 6 aa, Artificial sequence
  Protein classification predicting sequence
RIQEEA

SEQ ID NO: 2976 - protein, 6 aa, Artificial sequence
  Protein classification predicting sequence
PFDPTF

SEQ ID NO: 2977 - protein, 7 aa, Artificial sequence
  Protein classification predicting sequence
LLLLLKH

SEQ ID NO: 2978 - protein, 5 aa, Artificial sequence
  Protein classification predicting sequence
RSPCM

SEQ ID NO: 2979 - protein, 7 aa, Artificial sequence
  Protein classification predicting sequence
DIKFRNY

SEQ ID NO: 2980 - protein, 7 aa, Artificial sequence
  Protein classification predicting sequence
GNFLQID

SEQ ID NO: 2981 - protein, 6 aa, Artificial sequence
  Protein classification predicting sequence
IHEVQR

SEQ ID NO: 2982 - protein, 11 aa, Artificial sequence
  Protein classification predicting sequence
KFRDYFIPKGT

SEQ ID NO: 2983 - protein, 8 aa, Artificial sequence
  Protein classification predicting sequence
TSLTSVLH

SEQ ID NO: 2984 - protein, 7 aa, Artificial sequence
  Protein classification predicting sequence
CVGEGLA

SEQ ID NO: 2985 - protein, 6 aa, Artificial sequence
  Protein classification predicting sequence
QLCFIP

SEQ ID NO: 2986 - protein, 6 aa, Artificial sequence
  Protein classification predicting sequence
KEALVD

SEQ ID NO: 2987 - protein, 6 aa, Artificial sequence
  Protein classification predicting sequence
QNRFDY

SEQ ID NO: 2988 - protein, 10 aa, Artificial sequence
  Protein classification predicting sequence
VTAKVQEEID

SEQ ID NO: 2989 - protein, 7 aa, Artificial sequence
  Protein classification predicting sequence
PFSAGKR

SEQ ID NO: 2990 - protein, 7 aa, Artificial sequence
  Protein classification predicting sequence
LVDPKDI

SEQ ID NO: 2991 - protein, 8 aa, Artificial sequence
  Protein classification predicting sequence
VVLVLCLS

SEQ ID NO: 2992 - protein, 7 aa, Artificial sequence
  Protein classification predicting sequence
KDISKSL

SEQ ID NO: 2993 - protein, 7 aa, Artificial sequence
  Protein classification predicting sequence
GMKPTVV

SEQ ID NO: 2994 - protein, 9 aa, Artificial sequence
  Protein classification predicting sequence
GYEAVKEAL

SEQ ID NO: 2995 - protein, 11 aa, Artificial sequence
  Protein classification predicting sequence
GYQAVKEALVD

SEQ ID NO: 2996 - protein, 9 aa, Artificial sequence
  Protein classification predicting sequence
CAPCNVICS

SEQ ID NO: 2997 - protein, 9 aa, Artificial sequence
  Protein classification predicting sequence
NGFVSVPPS

SEQ ID NO: 2998 - protein, 14 aa, Artificial sequence
  Protein classification predicting sequence
LSCLFLLSLWRQSS

SEQ ID NO: 2999 - protein, 7 aa, Artificial sequence
  Protein classification predicting sequence
FLNLMEK

SEQ ID NO: 3000 - protein, 7 aa, Artificial sequence
  Protein classification predicting sequence
QVCNNFP

SEQ ID NO: 3001 - protein, 7 aa, Artificial sequence
  Protein classification predicting sequence
VDPKDID

SEQ ID NO: 3002 - protein, 9 aa, Artificial sequence
  Protein classification predicting sequence
CLVEELRKT

SEQ ID NO: 3003 - protein, 8 aa, Artificial sequence
  Protein classification predicting sequence
LLEALRKT

SEQ ID NO: 3004 - protein, 8 aa, Artificial sequence
  Protein classification predicting sequence
DFIDYFLI

SEQ ID NO: 3005 - protein, 6 aa, Artificial sequence
  Protein classification predicting sequence
VIGRHR

SEQ ID NO: 3006 - protein, 6 aa, Artificial sequence
  Protein classification predicting sequence
PCMQDR

SEQ ID NO: 3007 - protein, 6 aa, Artificial sequence
  Protein classification predicting sequence
DPTFIL

SEQ ID NO: 3008 - protein, 6 aa, Artificial sequence
  Protein classification predicting sequence
PYTDAV

SEQ ID NO: 3009 - protein, 9 aa, Artificial sequence
  Protein classification predicting sequence
LVEPKDLDI

SEQ ID NO: 3010 - protein, 10 aa, Artificial sequence
  Protein classification predicting sequence
GSPCDPTFIL

SEQ ID NO: 3011 - protein, 7 aa, Artificial sequence
  Protein classification predicting sequence
NPRDFID

SEQ ID NO: 3012 - protein, 8 aa, Artificial sequence
  Protein classification predicting sequence
LLLLLKHP

SEQ ID NO: 3013 - protein, 7 aa, Artificial sequence
  Protein classification predicting sequence
KEFPNPE

SEQ ID NO: 3014 - protein, 7 aa, Artificial sequence
  Protein classification predicting sequence
DPTFFLS

SEQ ID NO: 3015 - protein, 6 aa, Artificial sequence
  Protein classification predicting sequence
VTAKVQ

SEQ ID NO: 3016 - protein, 6 aa, Artificial sequence
  Protein classification predicting sequence
LMTLRN

SEQ ID NO: 3017 - protein, 6 aa, Artificial sequence
  Protein classification predicting sequence
QRFIDL

SEQ ID NO: 3018 - protein, 7 aa, Artificial sequence
  Protein classification predicting sequence
FDPGHFL

SEQ ID NO: 3019 - protein, 8 aa, Artificial sequence
  Protein classification predicting sequence
LTTILQNF

SEQ ID NO: 3020 - protein, 7 aa, Artificial sequence
  Protein classification predicting sequence
WKETRRF

SEQ ID NO: 3021 - protein, 6 aa, Artificial sequence
  Protein classification predicting sequence
RFEYND

SEQ ID NO: 3022 - protein, 6 aa, Artificial sequence
  Protein classification predicting sequence
LTTILQ

SEQ ID NO: 3023 - protein, 17 aa, Artificial sequence
  Protein classification predicting sequence
YGPEWREQRRFSVSTLR

SEQ ID NO: 3024 - protein, 8 aa, Artificial sequence
  Protein classification predicting sequence
WALLLMIL

SEQ ID NO: 3025 - protein, 12 aa, Artificial sequence
  Protein classification predicting sequence
RFHPEHFLDAQG

SEQ ID NO: 3026 - protein, 6 aa, Artificial sequence
  Protein classification predicting sequence
GQPRPS

SEQ ID NO: 3027 - protein, 9 aa, Artificial sequence
  Protein classification predicting sequence
NMPYSLYKL

SEQ ID NO: 3028 - protein, 8 aa, Artificial sequence
  Protein classification predicting sequence
VVINGLKA

SEQ ID NO: 3029 - protein, 12 aa, Artificial sequence
  Protein classification predicting sequence
LLVDLMHRRQRW

SEQ ID NO: 3030 - protein, 7 aa, Artificial sequence
  Protein classification predicting sequence
RVQQEID

SEQ ID NO: 3031 - protein, 6 aa, Artificial sequence
  Protein classification predicting sequence
PYQLCA

SEQ ID NO: 3032 - protein, 9 aa, Artificial sequence
  Protein classification predicting sequence
LARYGPAWR

SEQ ID NO: 3033 - protein, 6 aa, Artificial sequence
  Protein classification predicting sequence
EEARCL

SEQ ID NO: 3034 - protein, 8 aa, Artificial sequence
  Protein classification predicting sequence
LDELLTEH

SEQ ID NO: 3035 - protein, 12 aa, Artificial sequence
  Protein classification predicting sequence
AVIHEVQRFADI

SEQ ID NO: 3036 - protein, 9 aa, Artificial sequence
  Protein classification predicting sequence
NLSSVLKDE

SEQ ID NO: 3037 - protein, 8 aa, Artificial sequence
  Protein classification predicting sequence
LLVDLMHR

SEQ ID NO: 3038 - protein, 9 aa, Artificial sequence
  Protein classification predicting sequence
HLCDAFTAQ

SEQ ID NO: 3039 - protein, 6 aa, Artificial sequence
  Protein classification predicting sequence
FSFSVP

SEQ ID NO: 3040 - protein, 10 aa, Artificial sequence
  Protein classification predicting sequence
VIGQVRRPEM

SEQ ID NO: 3041 - protein, 7 aa, Artificial sequence
  Protein classification predicting sequence
PFSAGRR

SEQ ID NO: 3042 - protein, 18 aa, Artificial sequence
  Protein classification predicting sequence
CNVIASLIFARRFEYEDP

SEQ ID NO: 3043 - protein, 8 aa, Artificial sequence
  Protein classification predicting sequence
AVIHEVQR

SEQ ID NO: 3044 - protein, 18 aa, Artificial sequence
  Protein classification predicting sequence
VWEKPLRFHPEHFLDAQG

SEQ ID NO: 3045 - protein, 11 aa, Artificial sequence
  Protein classification predicting sequence
LARMELFLFFT

SEQ ID NO: 3046 - protein, 8 aa, Artificial sequence
  Protein classification predicting sequence
TSRDIEVQ

SEQ ID NO: 3047 - protein, 7 aa, Artificial sequence
  Protein classification predicting sequence
NLSSVLK

SEQ ID NO: 3048 - protein, 8 aa, Artificial sequence
  Protein classification predicting sequence
WREQRRFS

SEQ ID NO: 3049 - protein, 7 aa, Artificial sequence
  Protein classification predicting sequence
VSNVISS

SEQ ID NO: 3050 - protein, 9 aa, Artificial sequence
  Protein classification predicting sequence
PEHFLDAQG

SEQ ID NO: 3051 - protein, 15 aa, Artificial sequence
  Protein classification predicting sequence
FVKHEAFMPFSAGRR

SEQ ID NO: 3052 - protein, 6 aa, Artificial sequence
  Protein classification predicting sequence
RYPPGP

SEQ ID NO: 3053 - protein, 10 aa, Artificial sequence
  Protein classification predicting sequence
WREQRRFSVS

SEQ ID NO: 3054 - protein, 7 aa, Artificial sequence
  Protein classification predicting sequence
AGMVTTS

SEQ ID NO: 3055 - protein, 6 aa, Artificial sequence
  Protein classification predicting sequence
VQEEID

SEQ ID NO: 3056 - protein, 7 aa, Artificial sequence
  Protein classification predicting sequence
PEMADQA

SEQ ID NO: 3057 - protein, 7 aa, Artificial sequence
  Protein classification predicting sequence
SFNEENL

SEQ ID NO: 3058 - protein, 7 aa, Artificial sequence
  Protein classification predicting sequence
ENLRMVV

SEQ ID NO: 3059 - protein, 20 aa, Artificial sequence
  Protein classification predicting sequence
LLVDLMHRRQRWAARYPPGP

SEQ ID NO: 3060 - protein, 8 aa, Artificial sequence
  Protein classification predicting sequence
GMGKQGNE

SEQ ID NO: 3061 - protein, 9 aa, Artificial sequence
  Protein classification predicting sequence
HEEIDRVIG

SEQ ID NO: 3062 - protein, 8 aa, Artificial sequence
  Protein classification predicting sequence
HGYKAVKE

SEQ ID NO: 3063 - protein, 12 aa, Artificial sequence
  Protein classification predicting sequence
GIIFNNGPTWKD

SEQ ID NO: 3064 - protein, 9 aa, Artificial sequence
  Protein classification predicting sequence
AILQHFNLK

SEQ ID NO: 3065 - protein, 8 aa, Artificial sequence
  Protein classification predicting sequence
LVDPKDID

SEQ ID NO: 3066 - protein, 6 aa, Artificial sequence
  Protein classification predicting sequence
PEHFLD

SEQ ID NO: 3067 - protein, 7 aa, Artificial sequence
  Protein classification predicting sequence
HFLDESG

SEQ ID NO: 3068 - protein, 6 aa, Artificial sequence
  Protein classification predicting sequence
LMKYPE

SEQ ID NO: 3069 - protein, 12 aa, Artificial sequence
  Protein classification predicting sequence
PSNLPHEATRDT

SEQ ID NO: 3070 - protein, 10 aa, Artificial sequence
  Protein classification predicting sequence
SWNLPPGPFP

SEQ ID NO: 3071 - protein, 8 aa, Artificial sequence
  Protein classification predicting sequence
IFNNGPTW

SEQ ID NO: 3072 - protein, 18 aa, Artificial sequence
  Protein classification predicting sequence
GQPFDPTFLIGCAPCNVI

SEQ ID NO: 3073 - protein, 14 aa, Artificial sequence
  Protein classification predicting sequence
EEKLHEEIDRVIGP

SEQ ID NO: 3074 - protein, 7 aa, Artificial sequence
  Protein classification predicting sequence
IPKGTVV

SEQ ID NO: 3075 - protein, 13 aa, Artificial sequence
  Protein classification predicting sequence
IPKGTVVIPTLDS

SEQ ID NO: 3076 - protein, 13 aa, Artificial sequence
  Protein classification predicting sequence
CVGEGLARMELFL

SEQ ID NO: 3077 - protein, 8 aa, Artificial sequence
  Protein classification predicting sequence
KLCVIPRS

SEQ ID NO: 3078 - protein, 7 aa, Artificial sequence
  Protein classification predicting sequence
HEIQRFI

SEQ ID NO: 3079 - protein, 6 aa, Artificial sequence
  Protein classification predicting sequence
AFMPFS

SEQ ID NO: 3080 - protein, 9 aa, Artificial sequence
  Protein classification predicting sequence
LGPRRVVVL

SEQ ID NO: 3081 - protein, 9 aa, Artificial sequence
  Protein classification predicting sequence
LRNFGMGKR

SEQ ID NO: 3082 - protein, 6 aa, Artificial sequence
  Protein classification predicting sequence
ICSVIF

SEQ ID NO: 3083 - protein, 10 aa, Artificial sequence
  Protein classification predicting sequence
FNPEHFLDAN

SEQ ID NO: 3084 - protein, 21 aa, Artificial sequence
  Protein classification predicting sequence
SFKKSPAFMPFSAGRRLCLGE

SEQ ID NO: 3085 - protein, 7 aa, Artificial sequence
  Protein classification predicting sequence
VKEALVD

SEQ ID NO: 3086 - protein, 13 aa, Artificial sequence
  Protein classification predicting sequence
FFNFTKGNGIAFS

SEQ ID NO: 3087 - protein, 5 aa, Artificial sequence
  Protein classification predicting sequence
TTLRY

SEQ ID NO: 3088 - protein, 7 aa, Artificial sequence
  Protein classification predicting sequence
LPPGPTP

SEQ ID NO: 3089 - protein, 7 aa, Artificial sequence
  Protein classification predicting sequence
FGMGKRS

SEQ ID NO: 3090 - protein, 9 aa, Artificial sequence
  Protein classification predicting sequence
FGMGKRSIE

SEQ ID NO: 3091 - protein, 17 aa, Artificial sequence
  Protein classification predicting sequence
IDPTFFLSRTVSNVISS

SEQ ID NO: 3092 - protein, 7 aa, Artificial sequence
  Protein classification predicting sequence
FLSLLRM

SEQ ID NO: 3093 - protein, 19 aa, Artificial sequence
  Protein classification predicting sequence
KNLVLTTLNLFFAGTETVS

SEQ ID NO: 3094 - protein, 8 aa, Artificial sequence
  Protein classification predicting sequence
TLRYGFLL

SEQ ID NO: 3095 - protein, 10 aa, Artificial sequence
  Protein classification predicting sequence
TDAVIHEIQR

SEQ ID NO: 3096 - protein, 8 aa, Artificial sequence
  Protein classification predicting sequence
FRGYLLPK

SEQ ID NO: 3097 - protein, 15 aa, Artificial sequence
  Protein classification predicting sequence
IDPTFYLSRTVSNVI

SEQ ID NO: 3098 - protein, 6 aa, Artificial sequence
  Protein classification predicting sequence
KMEQEK

SEQ ID NO: 3099 - protein, 9 aa, Artificial sequence
  Protein classification predicting sequence
PYTDAVIHE

SEQ ID NO: 3100 - protein, 8 aa, Artificial sequence
  Protein classification predicting sequence
GEGLARME

SEQ ID NO: 3101 - protein, 7 aa, Artificial sequence
  Protein classification predicting sequence
AGTETTS

SEQ ID NO: 3102 - protein, 7 aa, Artificial sequence
  Protein classification predicting sequence
FNPEHFL

SEQ ID NO: 3103 - protein, 11 aa, Artificial sequence
  Protein classification predicting sequence
GKRACLGEQLA

SEQ ID NO: 3104 - protein, 11 aa, Artificial sequence
  Protein classification predicting sequence
AGTETTSTTLR

SEQ ID NO: 3105 - protein, 6 aa, Artificial sequence
  Protein classification predicting sequence
YLPGSH

SEQ ID NO: 3106 - protein, 7 aa, Artificial sequence
  Protein classification predicting sequence
GLPLIKE

SEQ ID NO: 3107 - protein, 7 aa, Artificial sequence
  Protein classification predicting sequence
EERIQEE

SEQ ID NO: 3108 - protein, 7 aa, Artificial sequence
  Protein classification predicting sequence
ETTSSTL

SEQ ID NO: 3109 - protein, 6 aa, Artificial sequence
  Protein classification predicting sequence
YPEIQE

SEQ ID NO: 3110 - protein, 7 aa, Artificial sequence
  Protein classification predicting sequence
EIDRVIG

SEQ ID NO: 3111 - protein, 5 aa, Artificial sequence
  Protein classification predicting sequence
PPGPW

SEQ ID NO: 3112 - protein, 6 aa, Artificial sequence
  Protein classification predicting sequence
AVIHEV

SEQ ID NO: 3113 - protein, 6 aa, Artificial sequence
  Protein classification predicting sequence
FSAGRR

SEQ ID NO: 3114 - protein, 7 aa, Artificial sequence
  Protein classification predicting sequence
EIDEVIG

SEQ ID NO: 3115 - protein, 6 aa, Artificial sequence
  Protein classification predicting sequence
RPVVVL

SEQ ID NO: 3116 - protein, 6 aa, Artificial sequence
  Protein classification predicting sequence
TWVLLA

SEQ ID NO: 3117 - protein, 7 aa, Artificial sequence
  Protein classification predicting sequence
KDEEWKR

SEQ ID NO: 3118 - protein, 7 aa, Artificial sequence
  Protein classification predicting sequence
LFPFLTP

SEQ ID NO: 3119 - protein, 15 aa, Artificial sequence
  Protein classification predicting sequence
PERFSKENKGSIDPY

SEQ ID NO: 3120 - protein, 7 aa, Artificial sequence
  Protein classification predicting sequence
MDVITGT

SEQ ID NO: 3121 - protein, 7 aa, Artificial sequence
  Protein classification predicting sequence
KESRLKD

SEQ ID NO: 3122 - protein, 7 aa, Artificial sequence
  Protein classification predicting sequence
GTVLNYY

SEQ ID NO: 3123 - protein, 10 aa, Artificial sequence
  Protein classification predicting sequence
FTSGRLKEMF

SEQ ID NO: 3124 - protein, 8 aa, Artificial sequence
  Protein classification predicting sequence
KPIILKVV

SEQ ID NO: 3125 - protein, 12 aa, Artificial sequence
  Protein classification predicting sequence
SFGVNVDSLNNP

SEQ ID NO: 3126 - protein, 7 aa, Artificial sequence
  Protein classification predicting sequence
GNVLSYR

SEQ ID NO: 3127 - protein, 20 aa, Artificial sequence
  Protein classification predicting sequence
QYGDVLVKNLRQEAEKGKPV

SEQ ID NO: 3128 - protein, 15 aa, Artificial sequence
  Protein classification predicting sequence
EPDEFRPERFSKKNK

SEQ ID NO: 3129 - protein, 7 aa, Artificial sequence
  Protein classification predicting sequence
LKVVSRD

SEQ ID NO: 3130 - protein, 9 aa, Artificial sequence
  Protein classification predicting sequence
GIPGPKPLP

SEQ ID NO: 3131 - protein, 9 aa, Artificial sequence
  Protein classification predicting sequence
LKVVSRDET

SEQ ID NO: 3132 - protein, 9 aa, Artificial sequence
  Protein classification predicting sequence
NETLRLYPI

SEQ ID NO: 3133 - protein, 9 aa, Artificial sequence
  Protein classification predicting sequence
PFGNGPRNC

SEQ ID NO: 3134 - protein, 7 aa, Artificial sequence
  Protein classification predicting sequence
EEWKRIR

SEQ ID NO: 3135 - protein, 11 aa, Artificial sequence
  Protein classification predicting sequence
FGVNVDSLNNP

SEQ ID NO: 3136 - protein, 11 aa, Artificial sequence
  Protein classification predicting sequence
PFGNGPRNCIG

SEQ ID NO: 3137 - protein, 7 aa, Artificial sequence
  Protein classification predicting sequence
PVGIMSK

SEQ ID NO: 3138 - protein, 8 aa, Artificial sequence
  Protein classification predicting sequence
YDGRQPVL

SEQ ID NO: 3139 - protein, 6 aa, Artificial sequence
  Protein classification predicting sequence
EWKRIR

SEQ ID NO: 3140 - protein, 6 aa, Artificial sequence
  Protein classification predicting sequence
GPRPLP

SEQ ID NO: 3141 - protein, 10 aa, Artificial sequence
  Protein classification predicting sequence
FGNVLSYRKG

SEQ ID NO: 3142 - protein, 15 aa, Artificial sequence
  Protein classification predicting sequence
AQSVIFIFAGYETTS

SEQ ID NO: 3143 - protein, 8 aa, Artificial sequence
  Protein classification predicting sequence
PYVYLPFG

SEQ ID NO: 3144 - protein, 7 aa, Artificial sequence
  Protein classification predicting sequence
QYGDILV

SEQ ID NO: 3145 - protein, 13 aa, Artificial sequence
  Protein classification predicting sequence
LFPFLTPIYEMLN

SEQ ID NO: 3146 - protein, 19 aa, Artificial sequence
  Protein classification predicting sequence
RIRSVLSPSFTSGRLKEMF

SEQ ID NO: 3147 - protein, 9 aa, Artificial sequence
  Protein classification predicting sequence
FLAYNLATN

SEQ ID NO: 3148 - protein, 7 aa, Artificial sequence
  Protein classification predicting sequence
YIYGTYS

SEQ ID NO: 3149 - protein, 6 aa, Artificial sequence
  Protein classification predicting sequence
YGKMWG

SEQ ID NO: 3150 - protein, 6 aa, Artificial sequence
  Protein classification predicting sequence
YDGRQP

SEQ ID NO: 3151 - protein, 7 aa, Artificial sequence
  Protein classification predicting sequence
VLNYYKG

SEQ ID NO: 3152 - protein, 7 aa, Artificial sequence
  Protein classification predicting sequence
MFPKDSI

SEQ ID NO: 3153 - protein, 7 aa, Artificial sequence
  Protein classification predicting sequence
RQWLLKA

SEQ ID NO: 3154 - protein, 20 aa, Artificial sequence
  Protein classification predicting sequence
QHRKLLTPGFHYDVLKPYVA

SEQ ID NO: 3155 - protein, 8 aa, Artificial sequence
  Protein classification predicting sequence
TLMKCTFG

SEQ ID NO: 3156 - protein, 9 aa, Artificial sequence
  Protein classification predicting sequence
RKAALQDEK

SEQ ID NO: 3157 - protein, 7 aa, Artificial sequence
  Protein classification predicting sequence
HRRLLTP

SEQ ID NO: 3158 - protein, 7 aa, Artificial sequence
  Protein classification predicting sequence
VFDPLRF

SEQ ID NO: 3159 - protein, 12 aa, Artificial sequence
  Protein classification predicting sequence
GPRNCIGQQFAM

SEQ ID NO: 3160 - protein, 21 aa, Artificial sequence
  Protein classification predicting sequence
SPIPFLGHAIAFGKSPIEFLE

SEQ ID NO: 3161 - protein, 24 aa, Artificial sequence
  Protein classification predicting sequence
AYEKYGPVFSFTMVGKTFTYLLGS

SEQ ID NO: 3162 - protein, 16 aa, Artificial sequence
  Protein classification predicting sequence
AAALLFNSKNEDLNAE

SEQ ID NO: 3163 - protein, 39 aa, Artificial sequence
  Protein classification predicting sequence
TVAGYTIPPGHQVCVSPTVNQRLKDSWVERLDFNPDRYL

SEQ ID NO: 3164 - protein, 62 aa, Artificial sequence
  Protein classification predicting sequence
PASGEKFAYVPFGAGRHRCIGENFAYVQIKTIWSTMLRLYEFDLIDGYFPTVNYTTMIHTPE

SEQ ID NO: 3165 - protein, 46 aa, Artificial sequence
  Protein classification predicting sequence
RSQLNEKVAQLYADLDGGFSHAAWLLPGWLPLPSFRRRDRAHREIK

SEQ ID NO: 3166 - protein, 17 aa, Artificial sequence
  Protein classification predicting sequence
RLTTPVFGKGVAYDVPN

SEQ ID NO: 3167 - protein, 30 aa, Artificial sequence
  Protein classification predicting sequence
AGMLIGLLLAGQHTSSTTSAWMGFFLARDK

SEQ ID NO: 3168 - protein, 10 aa, Artificial sequence
  Protein classification predicting sequence
YKDGVKMTDQ

SEQ ID NO: 3169 - protein, 8 aa, Artificial sequence
  Protein classification predicting sequence
GRHRCIGE

SEQ ID NO: 3170 - protein, 8 aa, Artificial sequence
  Protein classification predicting sequence
LYSLRKDR

SEQ ID NO: 3171 - protein, 21 aa, Artificial sequence
  Protein classification predicting sequence
SKGVSSPYLPFGGGRHRCIGE

SEQ ID NO: 3172 - protein, 17 aa, Artificial sequence
  Protein classification predicting sequence
HLTTPVFGKGVIYDCPN

SEQ ID NO: 3173 - protein, 6 aa, Artificial sequence
  Protein classification predicting sequence
SFRRRD

SEQ ID NO: 3174 - protein, 6 aa, Artificial sequence
  Protein classification predicting sequence
GEKFAY

SEQ ID NO: 3175 - protein, 7 aa, Artificial sequence
  Protein classification predicting sequence
LTTPVFG

SEQ ID NO: 3176 - protein, 8 aa, Artificial sequence
  Protein classification predicting sequence
LTTPVFGK

SEQ ID NO: 3177 - protein, 14 aa, Artificial sequence
  Protein classification predicting sequence
YFTRTFNYWKKRNV

SEQ ID NO: 3178 - protein, 7 aa, Artificial sequence
  Protein classification predicting sequence
LRNRFTP

SEQ ID NO: 3179 - protein, 7 aa, Artificial sequence
  Protein classification predicting sequence
YWKKRNV

SEQ ID NO: 3180 - protein, 9 aa, Artificial sequence
  Protein classification predicting sequence
MDLILELRQ

SEQ ID NO: 3181 - protein, 9 aa, Artificial sequence
  Protein classification predicting sequence
GIHYDPKYY

SEQ ID NO: 3182 - protein, 10 aa, Artificial sequence
  Protein classification predicting sequence
AGYETSATTM

SEQ ID NO: 3183 - protein, 9 aa, Artificial sequence
  Protein classification predicting sequence
DGNTTENIN

SEQ ID NO: 3184 - protein, 21 aa, Artificial sequence
  Protein classification predicting sequence
LWASQANTIPATFWSLFQMIR

SEQ ID NO: 3185 - protein, 7 aa, Artificial sequence
  Protein classification predicting sequence
YVHFITN

SEQ ID NO: 3186 - protein, 12 aa, Artificial sequence
  Protein classification predicting sequence
LSYHKVLCHGKY

SEQ ID NO: 3187 - protein, 12 aa, Artificial sequence
  Protein classification predicting sequence
SAKAFGHRSIDP

SEQ ID NO: 3188 - protein, 8 aa, Artificial sequence
  Protein classification predicting sequence
FLNDTLST

SEQ ID NO: 3189 - protein, 14 aa, Artificial sequence
  Protein classification predicting sequence
LWASQANTIPATFW

SEQ ID NO: 3190 - protein, 8 aa, Artificial sequence
  Protein classification predicting sequence
FLRANQRK

SEQ ID NO: 3191 - protein, 18 aa, Artificial sequence
  Protein classification predicting sequence
SELIRLRMFLNDTLSTFD

SEQ ID NO: 3192 - protein, 6 aa, Artificial sequence
  Protein classification predicting sequence
DHGEEF

SEQ ID NO: 3193 - protein, 7 aa, Artificial sequence
  Protein classification predicting sequence
DYCPGSH

SEQ ID NO: 3194 - protein, 8 aa, Artificial sequence
  Protein classification predicting sequence
FDPGHFLD

SEQ ID NO: 3195 - protein, 13 aa, Artificial sequence
  Protein classification predicting sequence
CAPCNVICSIIFQ

SEQ ID NO: 3196 - protein, 13 aa, Artificial sequence
  Protein classification predicting sequence
CAGEGLARMELFL

SEQ ID NO: 3197 - protein, 13 aa, Artificial sequence
  Protein classification predicting sequence
VIGRHRSPCMQDR

SEQ ID NO: 3198 - protein, 7 aa, Artificial sequence
  Protein classification predicting sequence
GNFKKSD

SEQ ID NO: 3199 - protein, 6 aa, Artificial sequence
  Protein classification predicting sequence
ICSIVF

SEQ ID NO: 3200 - protein, 7 aa, Artificial sequence
  Protein classification predicting sequence
FQNRFDY

SEQ ID NO: 3201 - protein, 8 aa, Artificial sequence
  Protein classification predicting sequence
YGPVFTLY

SEQ ID NO: 3202 - protein, 7 aa, Artificial sequence
  Protein classification predicting sequence
WKEMRRF

SEQ ID NO: 3203 - protein, 6 aa, Artificial sequence
  Protein classification predicting sequence
PCDPTF

SEQ ID NO: 3204 - protein, 12 aa, Artificial sequence
  Protein classification predicting sequence
ESGSVDFAEFEP

SEQ ID NO: 3205 - protein, 8 aa, Artificial sequence
  Protein classification predicting sequence
LDLGFLTK

SEQ ID NO: 3206 - protein, 6 aa, Artificial sequence
  Protein classification predicting sequence
FKPKFI

SEQ ID NO: 3207 - protein, 11 aa, Artificial sequence
  Protein classification predicting sequence
LSEKIGYWRYI

SEQ ID NO: 3208 - protein, 10 aa, Artificial sequence
  Protein classification predicting sequence
GPLRQIFVEF

SEQ ID NO: 3209 - protein, 17 aa, Artificial sequence
  Protein classification predicting sequence
ERSCTAEFSGFLLYKEL

SEQ ID NO: 3210 - protein, 13 aa, Artificial sequence
  Protein classification predicting sequence
ETNRTTARIFPAV

SEQ ID NO: 3211 - protein, 9 aa, Artificial sequence
  Protein classification predicting sequence
TNPVVAEIF

SEQ ID NO: 3212 - protein, 14 aa, Artificial sequence
  Protein classification predicting sequence
SDFNLALDLGFLTK

SEQ ID NO: 3213 - protein, 7 aa, Artificial sequence
  Protein classification predicting sequence
DVENPEF

SEQ ID NO: 3214 - protein, 7 aa, Artificial sequence
  Protein classification predicting sequence
PWGDGNH

SEQ ID NO: 3215 - protein, 7 aa, Artificial sequence
  Protein classification predicting sequence
GLRREQS

SEQ ID NO: 3216 - protein, 7 aa, Artificial sequence
  Protein classification predicting sequence
CPLIHWT

SEQ ID NO: 3217 - protein, 7 aa, Artificial sequence
  Protein classification predicting sequence
SSSFGIQ

SEQ ID NO: 3218 - protein, 10 aa, Artificial sequence
  Protein classification predicting sequence
DTGYLFPETY

SEQ ID NO: 3219 - protein, 12 aa, Artificial sequence
  Protein classification predicting sequence
INKVEPMNRALK

SEQ ID NO: 3220 - protein, 6 aa, Artificial sequence
  Protein classification predicting sequence
QRGVFK

SEQ ID NO: 3221 - protein, 9 aa, Artificial sequence
  Protein classification predicting sequence
LPIIDWDNR

SEQ ID NO: 3222 - protein, 9 aa, Artificial sequence
  Protein classification predicting sequence
YHPLWEQGY

SEQ ID NO: 3223 - protein, 6 aa, Artificial sequence
  Protein classification predicting sequence
KWEPGM

SEQ ID NO: 3224 - protein, 14 aa, Artificial sequence
  Protein classification predicting sequence
LDLNALNELPKVDR

SEQ ID NO: 3225 - protein, 45 aa, Artificial sequence
  Protein classification predicting sequence
NLPGEYVLSSSFGIQAAVSLHLVNQIRPDIPVILTDTGYLFPETY

SEQ ID NO: 3226 - protein, 18 aa, Artificial sequence
  Protein classification predicting sequence
FIDELTDKLKLNLKVYRA

SEQ ID NO: 3227 - protein, 23 aa, Artificial sequence
  Protein classification predicting sequence
LPVLAIQRGVFKVLPIIDWDNRT

SEQ ID NO: 3228 - protein, 11 aa, Artificial sequence
  Protein classification predicting sequence
GYLSVGDTHTT

SEQ ID NO: 3229 - protein, 17 aa, Artificial sequence
  Protein classification predicting sequence
AQTWFAGLRREQSGSRA

SEQ ID NO: 3230 - protein, 6 aa, Artificial sequence
  Protein classification predicting sequence
AWQEAR

SEQ ID NO: 3231 - protein, 6 aa, Artificial sequence
  Protein classification predicting sequence
PDIPVI

SEQ ID NO: 3232 - protein, 9 aa, Artificial sequence
  Protein classification predicting sequence
KVEPMNRAL

SEQ ID NO: 3233 - protein, 8 aa, Artificial sequence
  Protein classification predicting sequence
SFGIQAAV

SEQ ID NO: 3234 - protein, 7 aa, Artificial sequence
  Protein classification predicting sequence
SPAWQEA

SEQ ID NO: 3235 - protein, 8 aa, Artificial sequence
  Protein classification predicting sequence
EEETRFFG

SEQ ID NO: 3236 - protein, 6 aa, Artificial sequence
  Protein classification predicting sequence
YHPLWE

SEQ ID NO: 3237 - protein, 7 aa, Artificial sequence
  Protein classification predicting sequence
EGIEKYN

SEQ ID NO: 3238 - protein, 9 aa, Artificial sequence
  Protein classification predicting sequence
KVEPMRRAL

SEQ ID NO: 3239 - protein, 8 aa, Artificial sequence
  Protein classification predicting sequence
SNFLRGTI

SEQ ID NO: 3240 - protein, 12 aa, Artificial sequence
  Protein classification predicting sequence
DNFQLIRFHGMY

SEQ ID NO: 3241 - protein, 8 aa, Artificial sequence
  Protein classification predicting sequence
LIRFHGMY

SEQ ID NO: 3242 - protein, 10 aa, Artificial sequence
  Protein classification predicting sequence
QDDRDIRAER

SEQ ID NO: 3243 - protein, 10 aa, Artificial sequence
  Protein classification predicting sequence
AKKISEHLLP

SEQ ID NO: 3244 - protein, 6 aa, Artificial sequence
  Protein classification predicting sequence
ANDLNF

SEQ ID NO: 3245 - protein, 6 aa, Artificial sequence
  Protein classification predicting sequence
RPYEFT

SEQ ID NO: 3246 - protein, 21 aa, Artificial sequence
  Protein classification predicting sequence
TGCPNGCGRAMLAEIGLVGKA

SEQ ID NO: 3247 - protein, 7 aa, Artificial sequence
  Protein classification predicting sequence
FGDFVIR

SEQ ID NO: 3248 - protein, 8 aa, Artificial sequence
  Protein classification predicting sequence
LRCRLPGG

SEQ ID NO: 3249 - protein, 9 aa, Artificial sequence
  Protein classification predicting sequence
KKISEHLLP

SEQ ID NO: 3250 - protein, 7 aa, Artificial sequence
  Protein classification predicting sequence
AKTKYTL

SEQ ID NO: 3251 - protein, 9 aa, Artificial sequence
  Protein classification predicting sequence
RVTGCPNGC

SEQ ID NO: 3252 - protein, 11 aa, Artificial sequence
  Protein classification predicting sequence
RIPRLYKENIT

SEQ ID NO: 3253 - protein, 6 aa, Artificial sequence
  Protein classification predicting sequence
YKENIT

SEQ ID NO: 3254 - protein, 10 aa, Artificial sequence
  Protein classification predicting sequence
LRCRLPGGVI

SEQ ID NO: 3255 - protein, 6 aa, Artificial sequence
  Protein classification predicting sequence
LATAND

SEQ ID NO: 3256 - protein, 10 aa, Artificial sequence
  Protein classification predicting sequence
NRNVLCTSNP

SEQ ID NO: 3257 - protein, 8 aa, Artificial sequence
  Protein classification predicting sequence
HQEAYEWA

SEQ ID NO: 3258 - protein, 6 aa, Artificial sequence
  Protein classification predicting sequence
GGNRIG

SEQ ID NO: 3259 - protein, 7 aa, Artificial sequence
  Protein classification predicting sequence
QTFQFHG

SEQ ID NO: 3260 - protein, 7 aa, Artificial sequence
  Protein classification predicting sequence
AYAEIWL

SEQ ID NO: 3261 - protein, 6 aa, Artificial sequence
  Protein classification predicting sequence
RKNAKT

SEQ ID NO: 3262 - protein, 18 aa, Artificial sequence
  Protein classification predicting sequence
GLVGKAPGRYNLHLGGNR

SEQ ID NO: 3263 - protein, 14 aa, Artificial sequence
  Protein classification predicting sequence
RPLKTGLLEIAKIH

SEQ ID NO: 3264 - protein, 19 aa, Artificial sequence
  Protein classification predicting sequence
QKLEPRHAMLLRCRLPGGV

SEQ ID NO: 3265 - protein, 15 aa, Artificial sequence
  Protein classification predicting sequence
IDKFAGENTIYGSIR

SEQ ID NO: 3266 - protein, 7 aa, Artificial sequence
  Protein classification predicting sequence
TNRQTFQ

SEQ ID NO: 3267 - protein, 9 aa, Artificial sequence
  Protein classification predicting sequence
NVKPVHQML

SEQ ID NO: 3268 - protein, 12 aa, Artificial sequence
  Protein classification predicting sequence
DMNRNVLCTSNP

SEQ ID NO: 3269 - protein, 6 aa, Artificial sequence
  Protein classification predicting sequence
AYEWAK

SEQ ID NO: 3270 - protein, 7 aa, Artificial sequence
  Protein classification predicting sequence
ISEHLLP

SEQ ID NO: 3271 - protein, 7 aa, Artificial sequence
  Protein classification predicting sequence
PPQNDVD

SEQ ID NO: 3272 - protein, 10 aa, Artificial sequence
  Protein classification predicting sequence
GFNVLVGGGL

SEQ ID NO: 3273 - protein, 6 aa, Artificial sequence
  Protein classification predicting sequence
LVGGGL

SEQ ID NO: 3274 - protein, 15 aa, Artificial sequence
  Protein classification predicting sequence
AEAVVTTQRDWGNRT

SEQ ID NO: 3275 - protein, 10 aa, Artificial sequence
  Protein classification predicting sequence
RKNAKTKYTL

SEQ ID NO: 3276 - protein, 6 aa, Artificial sequence
  Protein classification predicting sequence
NSMACV

SEQ ID NO: 3277 - protein, 11 aa, Artificial sequence
  Protein classification predicting sequence
IIRPVLDPARD

SEQ ID NO: 3278 - protein, 16 aa, Artificial sequence
  Protein classification predicting sequence
KFMLLRCRLPGGIIKP

SEQ ID NO: 3279 - protein, 6 aa, Artificial sequence
  Protein classification predicting sequence
NRNVLC

SEQ ID NO: 3280 - protein, 6 aa, Artificial sequence
  Protein classification predicting sequence
NDMNFV

SEQ ID NO: 3281 - protein, 6 aa, Artificial sequence
  Protein classification predicting sequence
VTTQRD

SEQ ID NO: 3282 - protein, 8 aa, Artificial sequence
  Protein classification predicting sequence
RQTFQFHG

SEQ ID NO: 3283 - protein, 6 aa, Artificial sequence
  Protein classification predicting sequence
GRYNLH

SEQ ID NO: 3284 - protein, 7 aa, Artificial sequence
  Protein classification predicting sequence
YGSIRLT

SEQ ID NO: 3285 - protein, 13 aa, Artificial sequence
  Protein classification predicting sequence
EKVATTDEEPILG

SEQ ID NO: 3286 - protein, 11 aa, Artificial sequence
  Protein classification predicting sequence
IRPYEFTGRGD

SEQ ID NO: 3287 - protein, 7 aa, Artificial sequence
  Protein classification predicting sequence
TANQNLI

SEQ ID NO: 3288 - protein, 6 aa, Artificial sequence
  Protein classification predicting sequence
RAMLAE

SEQ ID NO: 3289 - protein, 16 aa, Artificial sequence
  Protein classification predicting sequence
LIRFHGMYQQDDRDIR

SEQ ID NO: 3290 - protein, 17 aa, Artificial sequence
  Protein classification predicting sequence
YLPRKFKTTVVIPPQND

SEQ ID NO: 3291 - protein, 31 aa, Artificial sequence
  Protein classification predicting sequence
VAAAVVTTQRDWGNRSNRKNAKTKYTLDRVG

SEQ ID NO: 3292 - protein, 8 aa, Artificial sequence
  Protein classification predicting sequence
RGDRIGWV

SEQ ID NO: 3293 - protein, 17 aa, Artificial sequence
  Protein classification predicting sequence
RGDRIGWVEGIDGKHHL

SEQ ID NO: 3294 - protein, 7 aa, Artificial sequence
  Protein classification predicting sequence
LFIENGR

SEQ ID NO: 3295 - protein, 7 aa, Artificial sequence
  Protein classification predicting sequence
FVTDVEG

SEQ ID NO: 3296 - protein, 7 aa, Artificial sequence
  Protein classification predicting sequence
FGDFTVR

SEQ ID NO: 3297 - protein, 9 aa, Artificial sequence
  Protein classification predicting sequence
QWQAIDKFA

SEQ ID NO: 3298 - protein, 18 aa, Artificial sequence
  Protein classification predicting sequence
TYLPRKFKTTVVIPPQND

SEQ ID NO: 3299 - protein, 16 aa, Artificial sequence
  Protein classification predicting sequence
RVTGCPNGCGRAMLAE

SEQ ID NO: 3300 - protein, 34 aa, Artificial sequence
  Protein classification predicting sequence
LIGRWAKEREAGEGFGDFTVRAGIIRPVLDPARD

SEQ ID NO: 3301 - protein, 17 aa, Artificial sequence
  Protein classification predicting sequence
LRGTIAEDLNDGLTGGF

SEQ ID NO: 3302 - protein, 25 aa, Artificial sequence
  Protein classification predicting sequence
GDNFLLIRFHGMYQQDDRDIRAERA

SEQ ID NO: 3303 - protein, 6 aa, Artificial sequence
  Protein classification predicting sequence
AIDKFA

SEQ ID NO: 3304 - protein, 5 aa, Artificial sequence
  Protein classification predicting sequence
ANDMN

SEQ ID NO: 3305 - protein, 10 aa, Artificial sequence
  Protein classification predicting sequence
PGPLVVEGKL

SEQ ID NO: 3306 - protein, 59 aa, Artificial sequence
  Protein classification predicting sequence
NTIYGSIRLTNRQTFQFHGILKKNVKPVHQMLHSVGLDALATANDMNRNVLCTSNPYES

SEQ ID NO: 3307 - protein, 22 aa, Artificial sequence
  Protein classification predicting sequence
QKLEPRHAMLLRCRLPGGVITT

SEQ ID NO: 3308 - protein, 7 aa, Artificial sequence
  Protein classification predicting sequence
YQQDDRD

SEQ ID NO: 3309 - protein, 6 aa, Artificial sequence
  Protein classification predicting sequence
TPKQWL

SEQ ID NO: 3310 - protein, 7 aa, Artificial sequence
  Protein classification predicting sequence
QRDWGNR

SEQ ID NO: 3311 - protein, 6 aa, Artificial sequence
  Protein classification predicting sequence
FKAEVE

SEQ ID NO: 3312 - protein, 8 aa, Artificial sequence
  Protein classification predicting sequence
WHLTLFIE

SEQ ID NO: 3313 - protein, 6 aa, Artificial sequence
  Protein classification predicting sequence
RLTTRQ

SEQ ID NO: 3314 - protein, 9 aa, Artificial sequence
  Protein classification predicting sequence
AEAVVTTQR

SEQ ID NO: 3315 - protein, 6 aa, Artificial sequence
  Protein classification predicting sequence
GDFRIT

SEQ ID NO: 3316 - protein, 6 aa, Artificial sequence
  Protein classification predicting sequence
FLRGTI

SEQ ID NO: 3317 - protein, 23 aa, Artificial sequence
  Protein classification predicting sequence
KQKLEPLHNVMLRARMPGGIITP

SEQ ID NO: 3318 - protein, 9 aa, Artificial sequence
  Protein classification predicting sequence
DVNRNVLCT

SEQ ID NO: 3319 - protein, 14 aa, Artificial sequence
  Protein classification predicting sequence
AYEWAKKISEHLLP

SEQ ID NO: 3320 - protein, 14 aa, Artificial sequence
  Protein classification predicting sequence
YLPRKFKTTVVIPP

SEQ ID NO: 3321 - protein, 8 aa, Artificial sequence
  Protein classification predicting sequence
TQRDWGNR

SEQ ID NO: 3322 - protein, 24 aa, Artificial sequence
  Protein classification predicting sequence
TQRDWGNRSNRKNAKTKYTLDRVG

SEQ ID NO: 3323 - protein, 14 aa, Artificial sequence
  Protein classification predicting sequence
PGKPLKTGVAEIAK

SEQ ID NO: 3324 - protein, 6 aa, Artificial sequence
  Protein classification predicting sequence
HQGDFR

SEQ ID NO: 3325 - protein, 16 aa, Artificial sequence
  Protein classification predicting sequence
FPTCPLAMAEAERFLP

SEQ ID NO: 3326 - protein, 18 aa, Artificial sequence
  Protein classification predicting sequence
FPTCPLAMAEAERFLPSF

SEQ ID NO: 3327 - protein, 11 aa, Artificial sequence
  Protein classification predicting sequence
DLQDRITGGFT

SEQ ID NO: 3328 - protein, 20 aa, Artificial sequence
  Protein classification predicting sequence
FPTCPLAMAEAERFLPEFVT

SEQ ID NO: 3329 - protein, 10 aa, Artificial sequence
  Protein classification predicting sequence
SEKAKIEKIA

SEQ ID NO: 3330 - protein, 7 aa, Artificial sequence
  Protein classification predicting sequence
RAGIKFE

SEQ ID NO: 3331 - protein, 21 aa, Artificial sequence
  Protein classification predicting sequence
MACVAFPTCPLAMAEAERFLP

SEQ ID NO: 3332 - protein, 9 aa, Artificial sequence
  Protein classification predicting sequence
EKHPGPLVV

SEQ ID NO: 3333 - protein, 10 aa, Artificial sequence
  Protein classification predicting sequence
LRGTIAEDLN

SEQ ID NO: 3334 - protein, 9 aa, Artificial sequence
  Protein classification predicting sequence
IDKFAADNT

SEQ ID NO: 3335 - protein, 10 aa, Artificial sequence
  Protein classification predicting sequence
GLDALATAND

SEQ ID NO: 3336 - protein, 18 aa, Artificial sequence
  Protein classification predicting sequence
LHQEAYEWAKKISEHLLP

SEQ ID NO: 3337 - protein, 15 aa, Artificial sequence
  Protein classification predicting sequence
EAYEWAKKISEHLLP

SEQ ID NO: 3338 - protein, 6 aa, Artificial sequence
  Protein classification predicting sequence
EIAKIH

SEQ ID NO: 3339 - protein, 7 aa, Artificial sequence
  Protein classification predicting sequence
LVGFNVL

SEQ ID NO: 3340 - protein, 7 aa, Artificial sequence
  Protein classification predicting sequence
GWVKGID

SEQ ID NO: 3341 - protein, 6 aa, Artificial sequence
  Protein classification predicting sequence
HKGDFR

SEQ ID NO: 3342 - protein, 6 aa, Artificial sequence
  Protein classification predicting sequence
AGKDFD

SEQ ID NO: 3343 - protein, 6 aa, Artificial sequence
  Protein classification predicting sequence
AWSRDQ

SEQ ID NO: 3344 - protein, 12 aa, Artificial sequence
  Protein classification predicting sequence
ITIISASQTGNA

SEQ ID NO: 3345 - protein, 7 aa, Artificial sequence
  Protein classification predicting sequence
HITVGVV

SEQ ID NO: 3346 - protein, 8 aa, Artificial sequence
  Protein classification predicting sequence
PGDALGVW

SEQ ID NO: 3347 - protein, 11 aa, Artificial sequence
  Protein classification predicting sequence
PGDALGVWYQN

SEQ ID NO: 3348 - protein, 6 aa, Artificial sequence
  Protein classification predicting sequence
PRLYSI

SEQ ID NO: 3349 - protein, 7 aa, Artificial sequence
  Protein classification predicting sequence
EWQKYLK

SEQ ID NO: 3350 - protein, 7 aa, Artificial sequence
  Protein classification predicting sequence
LAWSRDQ

SEQ ID NO: 3351 - protein, 8 aa, Artificial sequence
  Protein classification predicting sequence
EKIYVQDK

SEQ ID NO: 3352 - protein, 21 aa, Artificial sequence
  Protein classification predicting sequence
ISASQTGNARRVAEALRDDLL

SEQ ID NO: 3353 - protein, 7 aa, Artificial sequence
  Protein classification predicting sequence
SYEFFCQ

SEQ ID NO: 3354 - protein, 6 aa, Artificial sequence
  Protein classification predicting sequence
IHTSPY

SEQ ID NO: 3355 - protein, 9 aa, Artificial sequence
  Protein classification predicting sequence
LLPLVGDKA

SEQ ID NO: 3356 - protein, 16 aa, Artificial sequence
  Protein classification predicting sequence
LLRPLTPRLYSIASSQ

SEQ ID NO: 3357 - protein, 13 aa, Artificial sequence
  Protein classification predicting sequence
RIDLAWSRDQKEK

SEQ ID NO: 3358 - protein, 29 aa, Artificial sequence
  Protein classification predicting sequence
YVQDKLREQGAELWRWINDGAHIYVCGDA

SEQ ID NO: 3359 - protein, 41 aa, Artificial sequence
  Protein classification predicting sequence
VTSTQGEGEPPEEAVALHKFLFSKKAPKLENTAFAVFSLGD

SEQ ID NO: 3360 - protein, 8 aa, Artificial sequence
  Protein classification predicting sequence
LRDDLLAA

SEQ ID NO: 3361 - protein, 7 aa, Artificial sequence
  Protein classification predicting sequence
STQGEGE

SEQ ID NO: 3362 - protein, 7 aa, Artificial sequence
  Protein classification predicting sequence
GDALGVW

SEQ ID NO: 3363 - protein, 12 aa, Artificial sequence
  Protein classification predicting sequence
LLRPLTPRLYSI

SEQ ID NO: 3364 - protein, 8 aa, Artificial sequence
  Protein classification predicting sequence
FLADRVEE

SEQ ID NO: 3365 - protein, 15 aa, Artificial sequence
  Protein classification predicting sequence
VTSTQGEGEPPEEAV

SEQ ID NO: 3366 - protein, 10 aa, Artificial sequence
  Protein classification predicting sequence
KDVRHIEIDL

SEQ ID NO: 3367 - protein, 16 aa, Artificial sequence
  Protein classification predicting sequence
PGDALGVWFDNDPALV

SEQ ID NO: 3368 - protein, 10 aa, Artificial sequence
  Protein classification predicting sequence
EGRARAGGAS

SEQ ID NO: 3369 - protein, 6 aa, Artificial sequence
  Protein classification predicting sequence
FGNPHF

SEQ ID NO: 3370 - protein, 6 aa, Artificial sequence
  Protein classification predicting sequence
SGYFWG

SEQ ID NO: 3371 - protein, 16 aa, Artificial sequence
  Protein classification predicting sequence
ASTQGEGEPAEEAVAL

SEQ ID NO: 3372 - protein, 9 aa, Artificial sequence
  Protein classification predicting sequence
FCQAGKDFD

SEQ ID NO: 3373 - protein, 6 aa, Artificial sequence
  Protein classification predicting sequence
QKITGR

SEQ ID NO: 3374 - protein, 10 aa, Artificial sequence
  Protein classification predicting sequence
YQPGDALGVW

SEQ ID NO: 3375 - protein, 7 aa, Artificial sequence
  Protein classification predicting sequence
TVGVVRY

SEQ ID NO: 3376 - protein, 27 aa, Artificial sequence
  Protein classification predicting sequence
GKNWLFFGNPHFTEDFLYQVEWQRYVK

SEQ ID NO: 3377 - protein, 9 aa, Artificial sequence
  Protein classification predicting sequence
ADEFLSELR

SEQ ID NO: 3378 - protein, 7 aa, Artificial sequence
  Protein classification predicting sequence
SPQQLAW

SEQ ID NO: 3379 - protein, 7 aa, Artificial sequence
  Protein classification predicting sequence
ASQTGNA

SEQ ID NO: 3380 - protein, 7 aa, Artificial sequence
  Protein classification predicting sequence
AKETHVI

SEQ ID NO: 3381 - protein, 12 aa, Artificial sequence
  Protein classification predicting sequence
ATLLTSQKITGR

SEQ ID NO: 3382 - protein, 12 aa, Artificial sequence
  Protein classification predicting sequence
LLRRLTPRLYSI

SEQ ID NO: 3383 - protein, 7 aa, Artificial sequence
  Protein classification predicting sequence
GGASSFL

SEQ ID NO: 3384 - protein, 10 aa, Artificial sequence
  Protein classification predicting sequence
AEGKNWLFFG

SEQ ID NO: 3385 - protein, 8 aa, Artificial sequence
  Protein classification predicting sequence
GKNWLFFG

SEQ ID NO: 3386 - protein, 9 aa, Artificial sequence
  Protein classification predicting sequence
DFLYQVEWQ

SEQ ID NO: 3387 - protein, 23 aa, Artificial sequence
  Protein classification predicting sequence
LQHYAATTPIVDMVRFSPAQLDA

SEQ ID NO: 3388 - protein, 12 aa, Artificial sequence
  Protein classification predicting sequence
EVHVTVGVVRYD

SEQ ID NO: 3389 - protein, 8 aa, Artificial sequence
  Protein classification predicting sequence
TVGVVRYD

SEQ ID NO: 3390 - protein, 10 aa, Artificial sequence
  Protein classification predicting sequence
ALLEVIAEFG

SEQ ID NO: 3391 - protein, 26 aa, Artificial sequence
  Protein classification predicting sequence
VTSTQGEGEPPEEAVALHKFLFSKKA

SEQ ID NO: 3392 - protein, 14 aa, Artificial sequence
  Protein classification predicting sequence
EGRARAGGASSFLA

SEQ ID NO: 3393 - protein, 7 aa, Artificial sequence
  Protein classification predicting sequence
QLAWVSG

SEQ ID NO: 3394 - protein, 6 aa, Artificial sequence
  Protein classification predicting sequence
FWGVLN

SEQ ID NO: 3395 - protein, 8 aa, Artificial sequence
  Protein classification predicting sequence
LKSRAPVA

SEQ ID NO: 3396 - protein, 10 aa, Artificial sequence
  Protein classification predicting sequence
GPGTGIAPFR

SEQ ID NO: 3397 - protein, 11 aa, Artificial sequence
  Protein classification predicting sequence
SRDQAHKIYVQ

SEQ ID NO: 3398 - protein, 6 aa, Artificial sequence
  Protein classification predicting sequence
RMAKDV

SEQ ID NO: 3399 - protein, 21 aa, Artificial sequence
  Protein classification predicting sequence
LLPLNPEQLARLQAATTDLTP

SEQ ID NO: 3400 - protein, 29 aa, Artificial sequence
  Protein classification predicting sequence
SYEFFCQSGKDFDSKLAELGGERLLDRVD

SEQ ID NO: 3401 - protein, 56 aa, Artificial sequence
  Protein classification predicting sequence
LSVNQKITGRNSEKDVRHIEIDLGDSGLRYQPGDALGVWYQNDPALVKELVELLWL

SEQ ID NO: 3402 - protein, 61 aa, Artificial sequence
  Protein classification predicting sequence
GDEPVTVEGKTLPLNEALQWHFELTVNTANIVENYATLTRSETLLPLVGDKAKLQHYAATT

SEQ ID NO: 3403 - protein, 23 aa, Artificial sequence
  Protein classification predicting sequence
WHFELTVNTANIVENYATLTRSE

SEQ ID NO: 3404 - protein, 8 aa, Artificial sequence
  Protein classification predicting sequence
QLAWVSGY

SEQ ID NO: 3405 - protein, 6 aa, Artificial sequence
  Protein classification predicting sequence
SQTGNA

SEQ ID NO: 3406 - protein, 6 aa, Artificial sequence
  Protein classification predicting sequence
LGDSSY

SEQ ID NO: 3407 - protein, 14 aa, Artificial sequence
  Protein classification predicting sequence
VASTNGEGEAPDNA

SEQ ID NO: 3408 - protein, 7 aa, Artificial sequence
  Protein classification predicting sequence
SKKAPKL

SEQ ID NO: 3409 - protein, 10 aa, Artificial sequence
  Protein classification predicting sequence
SKKAPKLPNL

SEQ ID NO: 3410 - protein, 10 aa, Artificial sequence
  Protein classification predicting sequence
FFCQTGKDFD

SEQ ID NO: 3411 - protein, 12 aa, Artificial sequence
  Protein classification predicting sequence
LTPRLYSIASSQ

SEQ ID NO: 3412 - protein, 11 aa, Artificial sequence
  Protein classification predicting sequence
QLAWVSGYFWG

SEQ ID NO: 3413 - protein, 10 aa, Artificial sequence
  Protein classification predicting sequence
LFDASDYKGK

SEQ ID NO: 3414 - protein, 11 aa, Artificial sequence
  Protein classification predicting sequence
EVDEEVHLTVG

SEQ ID NO: 3415 - protein, 12 aa, Artificial sequence
  Protein classification predicting sequence
AEGKNWLFFGDR

SEQ ID NO: 3416 - protein, 13 aa, Artificial sequence
  Protein classification predicting sequence
YVCGDANRMAKDV

SEQ ID NO: 3417 - protein, 10 aa, Artificial sequence
  Protein classification predicting sequence
PEQLARLQAA

SEQ ID NO: 3418 - protein, 12 aa, Artificial sequence
  Protein classification predicting sequence
GKDFDSKLAELG

SEQ ID NO: 3419 - protein, 13 aa, Artificial sequence
  Protein classification predicting sequence
RLLDRVDADVEYQ

SEQ ID NO: 3420 - protein, 19 aa, Artificial sequence
  Protein classification predicting sequence
GAHIYVCGDANRMAKDVEQ

SEQ ID NO: 3421 - protein, 9 aa, Artificial sequence
  Protein classification predicting sequence
ADEYLSELR

SEQ ID NO: 3422 - protein, 8 aa, Artificial sequence
  Protein classification predicting sequence
SASQTGNA

SEQ ID NO: 3423 - protein, 8 aa, Artificial sequence
  Protein classification predicting sequence
GDYKFKQI

SEQ ID NO: 3424 - protein, 8 aa, Artificial sequence
  Protein classification predicting sequence
ELGGERLL

SEQ ID NO: 3425 - protein, 10 aa, Artificial sequence
  Protein classification predicting sequence
LSVNQKITGR

SEQ ID NO: 3426 - protein, 15 aa, Artificial sequence
  Protein classification predicting sequence
KDVRHIEIDLGDSGL

SEQ ID NO: 3427 - protein, 6 aa, Artificial sequence
  Protein classification predicting sequence
FELTVN

SEQ ID NO: 3428 - protein, 6 aa, Artificial sequence
  Protein classification predicting sequence
TPIVDM

SEQ ID NO: 3429 - protein, 12 aa, Artificial sequence
  Protein classification predicting sequence
RAGGASSFLADR

SEQ ID NO: 3430 - protein, 7 aa, Artificial sequence
  Protein classification predicting sequence
EAADEFL

SEQ ID NO: 3431 - protein, 8 aa, Artificial sequence
  Protein classification predicting sequence
ETSFANAG

SEQ ID NO: 3432 - protein, 6 aa, Artificial sequence
  Protein classification predicting sequence
LRLPND

SEQ ID NO: 3433 - protein, 8 aa, Artificial sequence
  Protein classification predicting sequence
TGDCQLFT

SEQ ID NO: 3434 - protein, 6 aa, Artificial sequence
  Protein classification predicting sequence
AITRFD

SEQ ID NO: 3435 - protein, 7 aa, Artificial sequence
  Protein classification predicting sequence
RRETLEM

SEQ ID NO: 3436 - protein, 9 aa, Artificial sequence
  Protein classification predicting sequence
ETSFANAGQ

SEQ ID NO: 3437 - protein, 6 aa, Artificial sequence
  Protein classification predicting sequence
QMLRNC

SEQ ID NO: 3438 - protein, 5 aa, Artificial sequence
  Protein classification predicting sequence
TGDCQ

SEQ ID NO: 3439 - protein, 12 aa, Artificial sequence
  Protein classification predicting sequence
RMVRLAEYSRDC

SEQ ID NO: 3440 - protein, 7 aa, Artificial sequence
  Protein classification predicting sequence
PVYPLKG

SEQ ID NO: 3441 - protein, 6 aa, Artificial sequence
  Protein classification predicting sequence
LDETYK

SEQ ID NO: 3442 - protein, 8 aa, Artificial sequence
  Protein classification predicting sequence
RIRVGGMA

SEQ ID NO: 3443 - protein, 11 aa, Artificial sequence
  Protein classification predicting sequence
NTGHGTLGWTM

SEQ ID NO: 3444 - protein, 7 aa, Artificial sequence
  Protein classification predicting sequence
PLKAIKW

SEQ ID NO: 3445 - protein, 6 aa, Artificial sequence
  Protein classification predicting sequence
ALGSYS

SEQ ID NO: 3446 - protein, 13 aa, Artificial sequence
  Protein classification predicting sequence
AITRLGDRIRVGG

SEQ ID NO: 3447 - protein, 6 aa, Artificial sequence
  Protein classification predicting sequence
RIRVGG

SEQ ID NO: 3448 - protein, 7 aa, Artificial sequence
  Protein classification predicting sequence
GHEVTVI

SEQ ID NO: 3449 - protein, 7 aa, Artificial sequence
  Protein classification predicting sequence
ANGGQLS

SEQ ID NO: 3450 - protein, 8 aa, Artificial sequence
  Protein classification predicting sequence
PWAAPGIP

SEQ ID NO: 3451 - protein, 6 aa, Artificial sequence
  Protein classification predicting sequence
KVAITR

SEQ ID NO: 3452 - protein, 12 aa, Artificial sequence
  Protein classification predicting sequence
LNTGHGTLGWTM

SEQ ID NO: 3453 - protein, 9 aa, Artificial sequence
  Protein classification predicting sequence
NAGQVSPGY

SEQ ID NO: 3454 - protein, 5 aa, Artificial sequence
  Protein classification predicting sequence
KWMFQ

SEQ ID NO: 3455 - protein, 6 aa, Artificial sequence
  Protein classification predicting sequence
KGYSLT

SEQ ID NO: 3456 - protein, 9 aa, Artificial sequence
  Protein classification predicting sequence
STILDETYK

SEQ ID NO: 3457 - protein, 8 aa, Artificial sequence
  Protein classification predicting sequence
GLRPMTPD

SEQ ID NO: 3458 - protein, 7 aa, Artificial sequence
  Protein classification predicting sequence
GYSSPWA

SEQ ID NO: 3459 - protein, 7 aa, Artificial sequence
  Protein classification predicting sequence
GTLQLFR

SEQ ID NO: 3460 - protein, 6 aa, Artificial sequence
  Protein classification predicting sequence
DETGDC

SEQ ID NO: 3461 - protein, 7 aa, Artificial sequence
  Protein classification predicting sequence
YVLALGS

SEQ ID NO: 3462 - protein, 11 aa, Artificial sequence
  Protein classification predicting sequence
FWSGLRPMTPD

SEQ ID NO: 3463 - protein, 13 aa, Artificial sequence
  Protein classification predicting sequence
GGLRLPNDETGDC

SEQ ID NO: 3464 - protein, 7 aa, Artificial sequence
  Protein classification predicting sequence
YKIAITR

SEQ ID NO: 3465 - protein, 9 aa, Artificial sequence
  Protein classification predicting sequence
GHGTLGWTM

SEQ ID NO: 3466 - protein, 9 aa, Artificial sequence
  Protein classification predicting sequence
NAGQISPGY

SEQ ID NO: 3467 - protein, 11 aa, Artificial sequence
  Protein classification predicting sequence
KWMFQRHAPLA

SEQ ID NO: 3468 - protein, 9 aa, Artificial sequence
  Protein classification predicting sequence
LPNDETGDC

SEQ ID NO: 3469 - protein, 8 aa, Artificial sequence
  Protein classification predicting sequence
GTLQLFRT

SEQ ID NO: 3470 - protein, 23 aa, Artificial sequence
  Protein classification predicting sequence
QYENATRDIAVLEDAGVPYQLLE

SEQ ID NO: 3471 - protein, 12 aa, Artificial sequence
  Protein classification predicting sequence
RLAEVEPALAEV

SEQ ID NO: 3472 - protein, 17 aa, Artificial sequence
  Protein classification predicting sequence
DAYVMAFGSYSTAMLKG

SEQ ID NO: 3473 - protein, 30 aa, Artificial sequence
  Protein classification predicting sequence
VDIPVYPLKGYSLTIPIAQEDGAPVSTILD

SEQ ID NO: 3474 - protein, 14 aa, Artificial sequence
  Protein classification predicting sequence
RIRVGGMAEIVGFN

SEQ ID NO: 3475 - protein, 7 aa, Artificial sequence
  Protein classification predicting sequence
NKERMVR

SEQ ID NO: 3476 - protein, 7 aa, Artificial sequence
  Protein classification predicting sequence
YPVKGYS

SEQ ID NO: 3477 - protein, 7 aa, Artificial sequence
  Protein classification predicting sequence
VVNDLFP

SEQ ID NO: 3478 - protein, 9 aa, Artificial sequence
  Protein classification predicting sequence
GHEVTVIDR

SEQ ID NO: 3479 - protein, 15 aa, Artificial sequence
  Protein classification predicting sequence
ETSAANAGQISPGYA

SEQ ID NO: 3480 - protein, 13 aa, Artificial sequence
  Protein classification predicting sequence
LPNDETGDCQLFT

SEQ ID NO: 3481 - protein, 9 aa, Artificial sequence
  Protein classification predicting sequence
RIRVGGMAE

SEQ ID NO: 3482 - protein, 7 aa, Artificial sequence
  Protein classification predicting sequence
FWTGLRP

SEQ ID NO: 3483 - protein, 5 aa, Artificial sequence
  Protein classification predicting sequence
NKSRM

SEQ ID NO: 3484 - protein, 21 aa, Artificial sequence
  Protein classification predicting sequence
HYMENKGRMVRLAEYSRDCLK

SEQ ID NO: 3485 - protein, 21 aa, Artificial sequence
  Protein classification predicting sequence
SRLAEVEPALAEVAHKLTGGL

SEQ ID NO: 3486 - protein, 7 aa, Artificial sequence
  Protein classification predicting sequence
DLSVARY

SEQ ID NO: 3487 - protein, 38 aa, Artificial sequence
  Protein classification predicting sequence
IKADAYVMAFGSYSTAMLKGIVDIPVYPLKGYSLTIPI

SEQ ID NO: 3488 - protein, 62 aa, Artificial sequence
  Protein classification predicting sequence
PALAEVAHKLTGGLQLPNDETGDCQLFTQNLARMAEQAGVKFRFNTPVDQLLCDGEQIYGVK

SEQ ID NO: 3489 - protein, 7 aa, Artificial sequence
  Protein classification predicting sequence
LETSYAN

SEQ ID NO: 3490 - protein, 6 aa, Artificial sequence
  Protein classification predicting sequence
YSRDCL

SEQ ID NO: 3491 - protein, 6 aa, Artificial sequence
  Protein classification predicting sequence
QLFRTQ

SEQ ID NO: 3492 - protein, 9 aa, Artificial sequence
  Protein classification predicting sequence
STVLDESYK

SEQ ID NO: 3493 - protein, 7 aa, Artificial sequence
  Protein classification predicting sequence
RLSEYSR

SEQ ID NO: 3494 - protein, 9 aa, Artificial sequence
  Protein classification predicting sequence
GSGRYLADL

SEQ ID NO: 3495 - protein, 34 aa, Artificial sequence
  Protein classification predicting sequence
NAGQISPGYAAPWAAPGVPLKAIKWMFQRHAPLA

SEQ ID NO: 3496 - protein, 15 aa, Artificial sequence
  Protein classification predicting sequence
WMWQMLRNCDTSHYM

SEQ ID NO: 3497 - protein, 9 aa, Artificial sequence
  Protein classification predicting sequence
MAEQAGVKF

SEQ ID NO: 3498 - protein, 10 aa, Artificial sequence
  Protein classification predicting sequence
SAEVIELHHP

SEQ ID NO: 3499 - protein, 6 aa, Artificial sequence
  Protein classification predicting sequence
APSGTA

SEQ ID NO: 3500 - protein, 11 aa, Artificial sequence
  Protein classification predicting sequence
IGFATLRGGSV

SEQ ID NO: 3501 - protein, 9 aa, Artificial sequence
  Protein classification predicting sequence
DRSIFARGA

SEQ ID NO: 3502 - protein, 9 aa, Artificial sequence
  Protein classification predicting sequence
GMVLLQQAA

SEQ ID NO: 3503 - protein, 7 aa, Artificial sequence
  Protein classification predicting sequence
DVLIDFT

SEQ ID NO: 3504 - protein, 6 aa, Artificial sequence
  Protein classification predicting sequence
VVGTTG

SEQ ID NO: 3505 - protein, 9 aa, Artificial sequence
  Protein classification predicting sequence
IHSVRLPGL

SEQ ID NO: 3506 - protein, 6 aa, Artificial sequence
  Protein classification predicting sequence
LVYGLE

SEQ ID NO: 3507 - protein, 9 aa, Artificial sequence
  Protein classification predicting sequence
KLDAPSGTA

SEQ ID NO: 3508 - protein, 5 aa, Artificial sequence
  Protein classification predicting sequence
HHNKK

SEQ ID NO: 3509 - protein, 7 aa, Artificial sequence
  Protein classification predicting sequence
EAHHNKK

SEQ ID NO: 3510 - protein, 6 aa, Artificial sequence
  Protein classification predicting sequence
DAPSGT

SEQ ID NO: 3511 - protein, 9 aa, Artificial sequence
  Protein classification predicting sequence
IGFSVVRGG

SEQ ID NO: 3512 - protein, 7 aa, Artificial sequence
  Protein classification predicting sequence
HHRYKKD

SEQ ID NO: 3513 - protein, 7 aa, Artificial sequence
  Protein classification predicting sequence
LIEAVLD

SEQ ID NO: 3514 - protein, 7 aa, Artificial sequence
  Protein classification predicting sequence
NFSVGVN

SEQ ID NO: 3515 - protein, 15 aa, Artificial sequence
  Protein classification predicting sequence
KVDAPSGTALRMGEV

SEQ ID NO: 3516 - protein, 7 aa, Artificial sequence
  Protein classification predicting sequence
IGFATVR

SEQ ID NO: 3517 - protein, 8 aa, Artificial sequence
  Protein classification predicting sequence
GDVVGDHT

SEQ ID NO: 3518 - protein, 6 aa, Artificial sequence
  Protein classification predicting sequence
HKASSR

SEQ ID NO: 3519 - protein, 10 aa, Artificial sequence
  Protein classification predicting sequence
EIGIHAVRGG

SEQ ID NO: 3520 - protein, 6 aa, Artificial sequence
  Protein classification predicting sequence
GAVLMM

SEQ ID NO: 3521 - protein, 11 aa, Artificial sequence
  Protein classification predicting sequence
DAPSGTAIKTA

SEQ ID NO: 3522 - protein, 6 aa, Artificial sequence
  Protein classification predicting sequence
LTIRHD

SEQ ID NO: 3523 - protein, 7 aa, Artificial sequence
  Protein classification predicting sequence
NTRFALE

SEQ ID NO: 3524 - protein, 6 aa, Artificial sequence
  Protein classification predicting sequence
GTTGFT

SEQ ID NO: 3525 - protein, 11 aa, Artificial sequence
  Protein classification predicting sequence
IAPNFAIGAVL

SEQ ID NO: 3526 - protein, 13 aa, Artificial sequence
  Protein classification predicting sequence
GAVLMMQFAQKAA

SEQ ID NO: 3527 - protein, 8 aa, Artificial sequence
  Protein classification predicting sequence
VEIIELHH

SEQ ID NO: 3528 - protein, 7 aa, Artificial sequence
  Protein classification predicting sequence
RHDSYDR

SEQ ID NO: 3529 - protein, 7 aa, Artificial sequence
  Protein classification predicting sequence
APNFAIG

SEQ ID NO: 3530 - protein, 13 aa, Artificial sequence
  Protein classification predicting sequence
YFDHVEIIELHHN

SEQ ID NO: 3531 - protein, 7 aa, Artificial sequence
  Protein classification predicting sequence
YTLRHDT

SEQ ID NO: 3532 - protein, 11 aa, Artificial sequence
  Protein classification predicting sequence
LKSLVYGLEKI

SEQ ID NO: 3533 - protein, 11 aa, Artificial sequence
  Protein classification predicting sequence
KLLEKAAKVMG

SEQ ID NO: 3534 - protein, 8 aa, Artificial sequence
  Protein classification predicting sequence
DAPSGTAL

SEQ ID NO: 3535 - protein, 9 aa, Artificial sequence
  Protein classification predicting sequence
RAGDIVGEH

SEQ ID NO: 3536 - protein, 6 aa, Artificial sequence
  Protein classification predicting sequence
SRMTFA

SEQ ID NO: 3537 - protein, 7 aa, Artificial sequence
  Protein classification predicting sequence
GAGGRMG

SEQ ID NO: 3538 - protein, 8 aa, Artificial sequence
  Protein classification predicting sequence
REGITGER

SEQ ID NO: 3539 - protein, 12 aa, Artificial sequence
  Protein classification predicting sequence
PKPLVIGTTGLD

SEQ ID NO: 3540 - protein, 8 aa, Artificial sequence
  Protein classification predicting sequence
VMSLRGGD

SEQ ID NO: 3541 - protein, 13 aa, Artificial sequence
  Protein classification predicting sequence
GEGLTLRHDSYDR

SEQ ID NO: 3542 - protein, 8 aa, Artificial sequence
  Protein classification predicting sequence
KLDAPSGT

SEQ ID NO: 3543 - protein, 9 aa, Artificial sequence
  Protein classification predicting sequence
FAKGAVRAA

SEQ ID NO: 3544 - protein, 9 aa, Artificial sequence
  Protein classification predicting sequence
ERIELTHRA

SEQ ID NO: 3545 - protein, 6 aa, Artificial sequence
  Protein classification predicting sequence
VYGREG

SEQ ID NO: 3546 - protein, 9 aa, Artificial sequence
  Protein classification predicting sequence
KKDAPSGTA

SEQ ID NO: 3547 - protein, 9 aa, Artificial sequence
  Protein classification predicting sequence
APNMSVGVN

SEQ ID NO: 3548 - protein, 9 aa, Artificial sequence
  Protein classification predicting sequence
EITHKASSR

SEQ ID NO: 3549 - protein, 12 aa, Artificial sequence
  Protein classification predicting sequence
AAKYFPNVEIIE

SEQ ID NO: 3550 - protein, 8 aa, Artificial sequence
  Protein classification predicting sequence
IGFATIRA

SEQ ID NO: 3551 - protein, 7 aa, Artificial sequence
  Protein classification predicting sequence
VIGTTGF

SEQ ID NO: 3552 - protein, 25 aa, Artificial sequence
  Protein classification predicting sequence
DIEIIEAHHRHKVDAPSGTALAMGE

SEQ ID NO: 3553 - protein, 7 aa, Artificial sequence
  Protein classification predicting sequence
AVYAREG

SEQ ID NO: 3554 - protein, 10 aa, Artificial sequence
  Protein classification predicting sequence
GERVEITHKA

SEQ ID NO: 3555 - protein, 6 aa, Artificial sequence
  Protein classification predicting sequence
VLIDFT

SEQ ID NO: 3556 - protein, 7 aa, Artificial sequence
  Protein classification predicting sequence
HSVRLPG

SEQ ID NO: 3557 - protein, 17 aa, Artificial sequence
  Protein classification predicting sequence
EFDVLIDFTHPSVTLKN

SEQ ID NO: 3558 - protein, 6 aa, Artificial sequence
  Protein classification predicting sequence
GLYDMQ

SEQ ID NO: 3559 - protein, 7 aa, Artificial sequence
  Protein classification predicting sequence
GAAGRMG

SEQ ID NO: 3560 - protein, 12 aa, Artificial sequence
  Protein classification predicting sequence
DAPSGTALRMGE

SEQ ID NO: 3561 - protein, 8 aa, Artificial sequence
  Protein classification predicting sequence
IVFAANFS

SEQ ID NO: 3562 - protein, 6 aa, Artificial sequence
  Protein classification predicting sequence
TIGFAT

SEQ ID NO: 3563 - protein, 15 aa, Artificial sequence
  Protein classification predicting sequence
IAIAGASGRMGQMLI

SEQ ID NO: 3564 - protein, 7 aa, Artificial sequence
  Protein classification predicting sequence
ALDRAGS

SEQ ID NO: 3565 - protein, 8 aa, Artificial sequence
  Protein classification predicting sequence
PLVVATTG

SEQ ID NO: 3566 - protein, 8 aa, Artificial sequence
  Protein classification predicting sequence
SDVIIDFS

SEQ ID NO: 3567 - protein, 7 aa, Artificial sequence
  Protein classification predicting sequence
KLLEKAA

SEQ ID NO: 3568 - protein, 20 aa, Artificial sequence
  Protein classification predicting sequence
IRVAIAGAGGRMGRQLIQAA

SEQ ID NO: 3569 - protein, 10 aa, Artificial sequence
  Protein classification predicting sequence
IDFTRPEGTL

SEQ ID NO: 3570 - protein, 20 aa, Artificial sequence
  Protein classification predicting sequence
HLAFCRQHGKGMVIGTTGFD

SEQ ID NO: 3571 - protein, 6 aa, Artificial sequence
  Protein classification predicting sequence
IAIVFA

SEQ ID NO: 3572 - protein, 13 aa, Artificial sequence
  Protein classification predicting sequence
KLLEKAAKVMGDY

SEQ ID NO: 3573 - protein, 16 aa, Artificial sequence
  Protein classification predicting sequence
ALDKDLKDCAVYSREG

SEQ ID NO: 3574 - protein, 19 aa, Artificial sequence
  Protein classification predicting sequence
RAGDIVGEHTAMFADIGER

SEQ ID NO: 3575 - protein, 29 aa, Artificial sequence
  Protein classification predicting sequence
EGVQLGAALEREGSSLLGSDAGELAGAGK

SEQ ID NO: 3576 - protein, 30 aa, Artificial sequence
  Protein classification predicting sequence
IAIVFAANFSVGVNVMLKLLEKAAKVMGDY

SEQ ID NO: 3577 - protein, 11 aa, Artificial sequence
  Protein classification predicting sequence
LKDCAVYSREG

SEQ ID NO: 3578 - protein, 12 aa, Artificial sequence
  Protein classification predicting sequence
VMGDYTDIEIIE

SEQ ID NO: 3579 - protein, 14 aa, Artificial sequence
  Protein classification predicting sequence
VGEHTAMFADIGER

SEQ ID NO: 3580 - protein, 19 aa, Artificial sequence
  Protein classification predicting sequence
ADVAIDFSNPNLLFPLLDE

SEQ ID NO: 3581 - protein, 24 aa, Artificial sequence
  Protein classification predicting sequence
FHLPLVVATTGEKEKLLNKLDELS

SEQ ID NO: 3582 - protein, 27 aa, Artificial sequence
  Protein classification predicting sequence
PVFFSANMSYGVHALTKILAAAVPLLD

SEQ ID NO: 3583 - protein, 18 aa, Artificial sequence
  Protein classification predicting sequence
ILLIGYGAMNQRVARLAE

SEQ ID NO: 3584 - protein, 9 aa, Artificial sequence
  Protein classification predicting sequence
KGHEIVGVI

SEQ ID NO: 3585 - protein, 7 aa, Artificial sequence
  Protein classification predicting sequence
ATTGEKE

SEQ ID NO: 3586 - protein, 19 aa, Artificial sequence
  Protein classification predicting sequence
PVFFSANMSYGVHALTKIL

SEQ ID NO: 3587 - protein, 7 aa, Artificial sequence
  Protein classification predicting sequence
PVYDRHE

SEQ ID NO: 3588 - protein, 9 aa, Artificial sequence
  Protein classification predicting sequence
LFAGTDETI

SEQ ID NO: 3589 - protein, 12 aa, Artificial sequence
  Protein classification predicting sequence
AQSKDIFANGAI

SEQ ID NO: 3590 - protein, 11 aa, Artificial sequence
  Protein classification predicting sequence
ILLIGYGAMNQ

SEQ ID NO: 3591 - protein, 15 aa, Artificial sequence
  Protein classification predicting sequence
EAHHRHKVDAPSGTA

SEQ ID NO: 3592 - protein, 23 aa, Artificial sequence
  Protein classification predicting sequence
EAHHRHKVDAPSGTAIGMGEAIA

SEQ ID NO: 3593 - protein, 9 aa, Artificial sequence
  Protein classification predicting sequence
KVDAPSGTA

SEQ ID NO: 3594 - protein, 7 aa, Artificial sequence
  Protein classification predicting sequence
DAPSGTA

SEQ ID NO: 3595 - protein, 16 aa, Artificial sequence
  Protein classification predicting sequence
LSDVAVYAREGITGER

SEQ ID NO: 3596 - protein, 34 aa, Artificial sequence
  Protein classification predicting sequence
GEHTAMFADIGERVEITHKATDRMTFANGAVKAA

SEQ ID NO: 3597 - protein, 7 aa, Artificial sequence
  Protein classification predicting sequence
DVAIDFS

SEQ ID NO: 3598 - protein, 7 aa, Artificial sequence
  Protein classification predicting sequence
GASGRMG

SEQ ID NO: 3599 - protein, 7 aa, Artificial sequence
  Protein classification predicting sequence
GDIVGDH

SEQ ID NO: 3600 - protein, 7 aa, Artificial sequence
  Protein classification predicting sequence
DAGELAG

SEQ ID NO: 3601 - protein, 22 aa, Artificial sequence
  Protein classification predicting sequence
MALELGPHKIRVNAVNPTVVMT

SEQ ID NO: 3602 - protein, 8 aa, Artificial sequence
  Protein classification predicting sequence
WSDPHKAK

SEQ ID NO: 3603 - protein, 16 aa, Artificial sequence
  Protein classification predicting sequence
VCVDLADWEATEQALS

SEQ ID NO: 3604 - protein, 10 aa, Artificial sequence
  Protein classification predicting sequence
ITGGGSGIGF

SEQ ID NO: 3605 - protein, 17 aa, Artificial sequence
  Protein classification predicting sequence
VAFITGGGSGIGFRIAE

SEQ ID NO: 3606 - protein, 8 aa, Artificial sequence
  Protein classification predicting sequence
INNAAGNF

SEQ ID NO: 3607 - protein, 9 aa, Artificial sequence
  Protein classification predicting sequence
AAGNFLCPA

SEQ ID NO: 3608 - protein, 13 aa, Artificial sequence
  Protein classification predicting sequence
DAMTRHLAVEWGP

SEQ ID NO: 3609 - protein, 10 aa, Artificial sequence
  Protein classification predicting sequence
DPENEVIKPT

SEQ ID NO: 3610 - protein, 9 aa, Artificial sequence
  Protein classification predicting sequence
PPSLITALS

SEQ ID NO: 3611 - protein, 8 aa, Artificial sequence
  Protein classification predicting sequence
TSSAGTVN

SEQ ID NO: 3612 - protein, 7 aa, Artificial sequence
  Protein classification predicting sequence
WMYFVSK

SEQ ID NO: 3613 - protein, 8 aa, Artificial sequence
  Protein classification predicting sequence
LAEKAAME

SEQ ID NO: 3614 - protein, 12 aa, Artificial sequence
  Protein classification predicting sequence
SIIPPLVVGPFI

SEQ ID NO: 3615 - protein, 7 aa, Artificial sequence
  Protein classification predicting sequence
LVVGPFI

SEQ ID NO: 3616 - protein, 8 aa, Artificial sequence
  Protein classification predicting sequence
MRLLERGY

SEQ ID NO: 3617 - protein, 14 aa, Artificial sequence
  Protein classification predicting sequence
ATPMDFESKDPENE

SEQ ID NO: 3618 - protein, 11 aa, Artificial sequence
  Protein classification predicting sequence
GVFHVATPMDF

SEQ ID NO: 3619 - protein, 8 aa, Artificial sequence
  Protein classification predicting sequence
PPSLITAL

SEQ ID NO: 3620 - protein, 14 aa, Artificial sequence
  Protein classification predicting sequence
GFIGSWLVMRLLER

SEQ ID NO: 3621 - protein, 8 aa, Artificial sequence
  Protein classification predicting sequence
EGSFDEAI

SEQ ID NO: 3622 - protein, 9 aa, Artificial sequence
  Protein classification predicting sequence
GRYICSSHD

SEQ ID NO: 3623 - protein, 43 aa, Artificial sequence
  Protein classification predicting sequence
YFKEGLVLFTYLHLANEEKLTQALIDRKVISIAYETVQLPDRS

SEQ ID NO: 3624 - protein, 9 aa, Artificial sequence
  Protein classification predicting sequence
PGAVPRTST

SEQ ID NO: 3625 - protein, 8 aa, Artificial sequence
  Protein classification predicting sequence
GIIANPNC

SEQ ID NO: 3626 - protein, 7 aa, Artificial sequence
  Protein classification predicting sequence
IIANPNC

SEQ ID NO: 3627 - protein, 6 aa, Artificial sequence
  Protein classification predicting sequence
NPNCTT

SEQ ID NO: 3628 - protein, 11 aa, Artificial sequence
  Protein classification predicting sequence
GGNCTVSLMLM

SEQ ID NO: 3629 - protein, 8 aa, Artificial sequence
  Protein classification predicting sequence
FSAGGSVS

SEQ ID NO: 3630 - protein, 14 aa, Artificial sequence
  Protein classification predicting sequence
GIIANPNCSTIQMV

SEQ ID NO: 3631 - protein, 14 aa, Artificial sequence
  Protein classification predicting sequence
GWRGMVGSVLMQRM

SEQ ID NO: 3632 - protein, 6 aa, Artificial sequence
  Protein classification predicting sequence
QGGDYT

SEQ ID NO: 3633 - protein, 6 aa, Artificial sequence
  Protein classification predicting sequence
WIDAAS

SEQ ID NO: 3634 - protein, 8 aa, Artificial sequence
  Protein classification predicting sequence
HMRELLTQ

SEQ ID NO: 3635 - protein, 6 aa, Artificial sequence
  Protein classification predicting sequence
SREEWK

SEQ ID NO: 3636 - protein, 7 aa, Artificial sequence
  Protein classification predicting sequence
WAKVVPN

SEQ ID NO: 3637 - protein, 10 aa, Artificial sequence
  Protein classification predicting sequence
GWRGMVGSVL

SEQ ID NO: 3638 - protein, 8 aa, Artificial sequence
  Protein classification predicting sequence
GYWIDAAS

SEQ ID NO: 3639 - protein, 11 aa, Artificial sequence
  Protein classification predicting sequence
SLMLMSLGGLF

SEQ ID NO: 3640 - protein, 6 aa, Artificial sequence
  Protein classification predicting sequence
FFSTSQ

SEQ ID NO: 3641 - protein, 6 aa, Artificial sequence
  Protein classification predicting sequence
IYPKLR

SEQ ID NO: 3642 - protein, 10 aa, Artificial sequence
  Protein classification predicting sequence
WQGYWIDAAS

SEQ ID NO: 3643 - protein, 5 aa, Artificial sequence
  Protein classification predicting sequence
RCHSQ

SEQ ID NO: 3644 - protein, 7 aa, Artificial sequence
  Protein classification predicting sequence
TYQAASG

SEQ ID NO: 3645 - protein, 11 aa, Artificial sequence
  Protein classification predicting sequence
ELTPAAVTGTL

SEQ ID NO: 3646 - protein, 7 aa, Artificial sequence
  Protein classification predicting sequence
EPLRRML

SEQ ID NO: 3647 - protein, 21 aa, Artificial sequence
  Protein classification predicting sequence
VSGDNLRKGAALNTIQIAELL

SEQ ID NO: 3648 - protein, 15 aa, Artificial sequence
  Protein classification predicting sequence
LDIIVTCQGGDYTNE

SEQ ID NO: 3649 - protein, 9 aa, Artificial sequence
  Protein classification predicting sequence
LRMKDDAII

SEQ ID NO: 3650 - protein, 9 aa, Artificial sequence
  Protein classification predicting sequence
ILDIERKVT

SEQ ID NO: 3651 - protein, 6 aa, Artificial sequence
  Protein classification predicting sequence
DGLCVR

SEQ ID NO: 3652 - protein, 15 aa, Artificial sequence
  Protein classification predicting sequence
AFTVGDQLLWGAAEP

SEQ ID NO: 3653 - protein, 9 aa, Artificial sequence
  Protein classification predicting sequence
EEMKMVWET

SEQ ID NO: 3654 - protein, 8 aa, Artificial sequence
  Protein classification predicting sequence
DRPQPRLD

SEQ ID NO: 3655 - protein, 10 aa, Artificial sequence
  Protein classification predicting sequence
DVPLVIPEVN

SEQ ID NO: 3656 - protein, 12 aa, Artificial sequence
  Protein classification predicting sequence
LVDVPTPLAAAG

SEQ ID NO: 3657 - protein, 12 aa, Artificial sequence
  Protein classification predicting sequence
DIIVTCQGGDYT

SEQ ID NO: 3658 - protein, 15 aa, Artificial sequence
  Protein classification predicting sequence
NFGVPLAGSLIPWID

SEQ ID NO: 3659 - protein, 6 aa, Artificial sequence
  Protein classification predicting sequence
RCHSQA

SEQ ID NO: 3660 - protein, 6 aa, Artificial sequence
  Protein classification predicting sequence
IANPNC

SEQ ID NO: 3661 - protein, 7 aa, Artificial sequence
  Protein classification predicting sequence
RKGAALN

SEQ ID NO: 3662 - protein, 7 aa, Artificial sequence
  Protein classification predicting sequence
TYQSVSG

SEQ ID NO: 3663 - protein, 10 aa, Artificial sequence
  Protein classification predicting sequence
TGTLQDAFDL

SEQ ID NO: 3664 - protein, 38 aa, Artificial sequence
  Protein classification predicting sequence
ALKALDIIVTCQGGDYTNEIYPKLRESGWQGYWIDAAS

SEQ ID NO: 3665 - protein, 26 aa, Artificial sequence
  Protein classification predicting sequence
LRMKDDAIIILDPVNQDVITDGLNNG

SEQ ID NO: 3666 - protein, 29 aa, Artificial sequence
  Protein classification predicting sequence
LVDWVSVATYQAASGGGARHMRELLTQMG

SEQ ID NO: 3667 - protein, 49 aa, Artificial sequence
  Protein classification predicting sequence
LTRSGELPVDNFGVPLAGSLIPWIDKQLDNGQSREEWKGQAETNKILNT

SEQ ID NO: 3668 - protein, 28 aa, Artificial sequence
  Protein classification predicting sequence
SVIPVDGLCVRVGALRCHSQAFTIKLKK

SEQ ID NO: 3669 - protein, 24 aa, Artificial sequence
  Protein classification predicting sequence
VSIPTVEELLAAHNPWAKVVPNDR

SEQ ID NO: 3670 - protein, 9 aa, Artificial sequence
  Protein classification predicting sequence
VPLVVSEVN

SEQ ID NO: 3671 - protein, 6 aa, Artificial sequence
  Protein classification predicting sequence
YQAVSG

SEQ ID NO: 3672 - protein, 7 aa, Artificial sequence
  Protein classification predicting sequence
DNTSHFR

SEQ ID NO: 3673 - protein, 6 aa, Artificial sequence
  Protein classification predicting sequence
TCVRVP

SEQ ID NO: 3674 - protein, 7 aa, Artificial sequence
  Protein classification predicting sequence
VPLVVPE

SEQ ID NO: 3675 - protein, 8 aa, Artificial sequence
  Protein classification predicting sequence
LFTYLHLA

SEQ ID NO: 3676 - protein, 7 aa, Artificial sequence
  Protein classification predicting sequence
PMSEVAG

SEQ ID NO: 3677 - protein, 7 aa, Artificial sequence
  Protein classification predicting sequence
GILLGGV

SEQ ID NO: 3678 - protein, 8 aa, Artificial sequence
  Protein classification predicting sequence
TTHDDPTY

SEQ ID NO: 3679 - protein, 10 aa, Artificial sequence
  Protein classification predicting sequence
GILLGGVPGV

SEQ ID NO: 3680 - protein, 8 aa, Artificial sequence
  Protein classification predicting sequence
AGTNAAKI

SEQ ID NO: 3681 - protein, 21 aa, Artificial sequence
  Protein classification predicting sequence
KHGVVHYAVANMPGAVPRTST

SEQ ID NO: 3682 - protein, 8 aa, Artificial sequence
  Protein classification predicting sequence
DIAIDQGG

SEQ ID NO: 3683 - protein, 7 aa, Artificial sequence
  Protein classification predicting sequence
YKEAGAE

SEQ ID NO: 3684 - protein, 10 aa, Artificial sequence
  Protein classification predicting sequence
AAKIALGLGA

SEQ ID NO: 3685 - protein, 6 aa, Artificial sequence
  Protein classification predicting sequence
HYAVAN

SEQ ID NO: 3686 - protein, 7 aa, Artificial sequence
  Protein classification predicting sequence
PGAVPRT

SEQ ID NO: 3687 - protein, 9 aa, Artificial sequence
  Protein classification predicting sequence
EIKNNENRV

SEQ ID NO: 3688 - protein, 20 aa, Artificial sequence
  Protein classification predicting sequence
EIKNNENRVGLSPSGVHALV

SEQ ID NO: 3689 - protein, 8 aa, Artificial sequence
  Protein classification predicting sequence
VLVETNAG

SEQ ID NO: 3690 - protein, 17 aa, Artificial sequence
  Protein classification predicting sequence
WDVDMVIKVKEPLESEY

SEQ ID NO: 3691 - protein, 14 aa, Artificial sequence
  Protein classification predicting sequence
KVISIAYETVQLPD

SEQ ID NO: 3692 - protein, 8 aa, Artificial sequence
  Protein classification predicting sequence
QVGAEFLQ

SEQ ID NO: 3693 - protein, 29 aa, Artificial sequence
  Protein classification predicting sequence
PGVPKGKVTIIGGGQAGTNAAKIALGLGA

SEQ ID NO: 3694 - protein, 11 aa, Artificial sequence
  Protein classification predicting sequence
VTILDVNPKRL

SEQ ID NO: 3695 - protein, 10 aa, Artificial sequence
  Protein classification predicting sequence
TIMSNPLNIE

SEQ ID NO: 3696 - protein, 16 aa, Artificial sequence
  Protein classification predicting sequence
SDLVIGAVLIPGAKAP

SEQ ID NO: 3697 - protein, 8 aa, Artificial sequence
  Protein classification predicting sequence
LVTEDMIK

SEQ ID NO: 3698 - protein, 20 aa, Artificial sequence
  Protein classification predicting sequence
DIAIDQGGIFETTDKITTHD

SEQ ID NO: 3699 - protein, 9 aa, Artificial sequence
  Protein classification predicting sequence
LNNATLPYA

SEQ ID NO: 3700 - protein, 11 aa, Artificial sequence
  Protein classification predicting sequence
LANKGYREAFK

SEQ ID NO: 3701 - protein, 8 aa, Artificial sequence
  Protein classification predicting sequence
GVTVLSRI

SEQ ID NO: 3702 - protein, 8 aa, Artificial sequence
  Protein classification predicting sequence
FIMACDQY

SEQ ID NO: 3703 - protein, 9 aa, Artificial sequence
  Protein classification predicting sequence
LPGYVGGVQ

SEQ ID NO: 3704 - protein, 9 aa, Artificial sequence
  Protein classification predicting sequence
DNWIPLLWC

SEQ ID NO: 3705 - protein, 13 aa, Artificial sequence
  Protein classification predicting sequence
VTNSMILVNVLQA

SEQ ID NO: 3706 - protein, 26 aa, Artificial sequence
  Protein classification predicting sequence
WYLKTIDICHDHFGWYLGWGDCVWLP

SEQ ID NO: 3707 - protein, 11 aa, Artificial sequence
  Protein classification predicting sequence
TNHQKDLFRRT

SEQ ID NO: 3708 - protein, 9 aa, Artificial sequence
  Protein classification predicting sequence
SGFWGVARH

SEQ ID NO: 3709 - protein, 17 aa, Artificial sequence
  Protein classification predicting sequence
NYTGDLMGSLAYCLACG

SEQ ID NO: 3710 - protein, 9 aa, Artificial sequence
  Protein classification predicting sequence
AVPYRLLPG

SEQ ID NO: 3711 - protein, 7 aa, Artificial sequence
  Protein classification predicting sequence
PLLWCAN

SEQ ID NO: 3712 - protein, 10 aa, Artificial sequence
  Protein classification predicting sequence
IECSYTSADG

SEQ ID NO: 3713 - protein, 12 aa, Artificial sequence
  Protein classification predicting sequence
IPYGGAKGGIGC

SEQ ID NO: 3714 - protein, 15 aa, Artificial sequence
  Protein classification predicting sequence
QTMAWILDEYSKFHG

SEQ ID NO: 3715 - protein, 7 aa, Artificial sequence
  Protein classification predicting sequence
KVVAVSD

SEQ ID NO: 3716 - protein, 9 aa, Artificial sequence
  Protein classification predicting sequence
EAANHPTDP

SEQ ID NO: 3717 - protein, 19 aa, Artificial sequence
  Protein classification predicting sequence
GGVTVSYFEWVQNIQGFMW

SEQ ID NO: 3718 - protein, 9 aa, Artificial sequence
  Protein classification predicting sequence
DCDILIPAA

SEQ ID NO: 3719 - protein, 9 aa, Artificial sequence
  Protein classification predicting sequence
EEQKRNRVR

SEQ ID NO: 3720 - protein, 23 aa, Artificial sequence
  Protein classification predicting sequence
NELEKITRRFTMELAKKGFIGPG

SEQ ID NO: 3721 - protein, 7 aa, Artificial sequence
  Protein classification predicting sequence
DVPAPDM

SEQ ID NO: 3722 - protein, 8 aa, Artificial sequence
  Protein classification predicting sequence
VPTAEFQD

SEQ ID NO: 3723 - protein, 60 aa, Artificial sequence
  Protein classification predicting sequence
VPTAEFQDRISGASEKDIVHSGLAYTMERSARQIMRTAMKYNLGLDLRTAAYVNAIEKVF

SEQ ID NO: 3724 - protein, 6 aa, Artificial sequence
  Protein classification predicting sequence
DDPNFF

SEQ ID NO: 3725 - protein, 18 aa, Artificial sequence
  Protein classification predicting sequence
MVEGFFDRGASIVEDKLV

SEQ ID NO: 3726 - protein, 25 aa, Artificial sequence
  Protein classification predicting sequence
WEVIEGYRAQHSQHRTPCKGGIRYS

SEQ ID NO: 3727 - protein, 32 aa, Artificial sequence
  Protein classification predicting sequence
DVSVDEVKALASLMTYKCAVVDVPFGGAKAGV

SEQ ID NO: 3728 - protein, 11 aa, Artificial sequence
  Protein classification predicting sequence
ELAKKGFIGPG

SEQ ID NO: 3729 - protein, 36 aa, Artificial sequence
  Protein classification predicting sequence
DINAHACVTGKPISQGGIHGRISATGRGVFHGIENF

SEQ ID NO: 3730 - protein, 7 aa, Artificial sequence
  Protein classification predicting sequence
NEASYMS

SEQ ID NO: 3731 - protein, 21 aa, Artificial sequence
  Protein classification predicting sequence
QGFGNVGLHSMRYLHRFGAKC

SEQ ID NO: 3732 - protein, 15 aa, Artificial sequence
  Protein classification predicting sequence
KAKIIAEGANGPTTP

SEQ ID NO: 3733 - protein, 7 aa, Artificial sequence
  Protein classification predicting sequence
IPVVPTA

SEQ ID NO: 3734 - protein, 10 aa, Artificial sequence
  Protein classification predicting sequence
GASEKDIVHS

SEQ ID NO: 3735 - protein, 16 aa, Artificial sequence
  Protein classification predicting sequence
RTAAYVNAIEKVFKVY

SEQ ID NO: 3736 - protein, 12 aa, Artificial sequence
  Protein classification predicting sequence
WEVIEGYRAQHS

SEQ ID NO: 3737 - protein, 11 aa, Artificial sequence
  Protein classification predicting sequence
RTPCKGGIRYS

SEQ ID NO: 3738 - protein, 29 aa, Artificial sequence
  Protein classification predicting sequence
TGEREMSWIADTYASTIGHYDINAHACVT

SEQ ID NO: 3739 - protein, 16 aa, Artificial sequence
  Protein classification predicting sequence
ISQGGIHGRISATGRG

SEQ ID NO: 3740 - protein, 17 aa, Artificial sequence
  Protein classification predicting sequence
DGSIWNPDGIDPKELED

SEQ ID NO: 3741 - protein, 11 aa, Artificial sequence
  Protein classification predicting sequence
VDVPFGGAKAG

SEQ ID NO: 3742 - protein, 14 aa, Artificial sequence
  Protein classification predicting sequence
TGEREMSWIADTYA

SEQ ID NO: 3743 - protein, 13 aa, Artificial sequence
  Protein classification predicting sequence
DINAHACVTGKPI

SEQ ID NO: 3744 - protein, 10 aa, Artificial sequence
  Protein classification predicting sequence
SATGRGVFHG

SEQ ID NO: 3745 - protein, 21 aa, Artificial sequence
  Protein classification predicting sequence
FEWLKNLNHVSYGRLTFKYER

SEQ ID NO: 3746 - protein, 8 aa, Artificial sequence
  Protein classification predicting sequence
SVQESLER

SEQ ID NO: 3747 - protein, 8 aa, Artificial sequence
  Protein classification predicting sequence
YTMERSAR

SEQ ID NO: 3748 - protein, 18 aa, Artificial sequence
  Protein classification predicting sequence
TAMKYNLGLDLRTAAYVN

SEQ ID NO: 3749 - protein, 7 aa, Artificial sequence
  Protein classification predicting sequence
MTWKTAV

SEQ ID NO: 3750 - protein, 25 aa, Artificial sequence
  Protein classification predicting sequence
LKGKTIAIQGYGNAGYYLAKIMSED

SEQ ID NO: 3751 - protein, 15 aa, Artificial sequence
  Protein classification predicting sequence
NWARGPTKGGIRWHP

SEQ ID NO: 3752 - protein, 10 aa, Artificial sequence
  Protein classification predicting sequence
ETLSTVKALA

SEQ ID NO: 3753 - protein, 7 aa, Artificial sequence
  Protein classification predicting sequence
EHGSVKD

SEQ ID NO: 3754 - protein, 13 aa, Artificial sequence
  Protein classification predicting sequence
NITNEELLELEVD

SEQ ID NO: 3755 - protein, 28 aa, Artificial sequence
  Protein classification predicting sequence
EKGILQIPDFLCNAGGVTVSYFEWVQNI

SEQ ID NO: 3756 - protein, 18 aa, Artificial sequence
  Protein classification predicting sequence
ISEEALEFLKRPQRIVEV

SEQ ID NO: 3757 - protein, 12 aa, Artificial sequence
  Protein classification predicting sequence
SDREKERLARGY

SEQ ID NO: 3758 - protein, 10 aa, Artificial sequence
  Protein classification predicting sequence
RAIYDVISPY

SEQ ID NO: 3759 - protein, 9 aa, Artificial sequence
  Protein classification predicting sequence
ATARGASYT

SEQ ID NO: 3760 - protein, 16 aa, Artificial sequence
  Protein classification predicting sequence
KGGIYNPDGLNADEVL

SEQ ID NO: 3761 - protein, 27 aa, Artificial sequence
  Protein classification predicting sequence
GSVKDFPGATNITNEELLELEVDVLAP

SEQ ID NO: 3762 - protein, 6 aa, Artificial sequence
  Protein classification predicting sequence
RVYQAM

SEQ ID NO: 3763 - protein, 14 aa, Artificial sequence
  Protein classification predicting sequence
ITGKPLSIGGSLGR

SEQ ID NO: 3764 - protein, 9 aa, Artificial sequence
  Protein classification predicting sequence
QGYGNAGYY

SEQ ID NO: 3765 - protein, 19 aa, Artificial sequence
  Protein classification predicting sequence
SELERLTRVFTQKIHDLIG

SEQ ID NO: 3766 - protein, 8 aa, Artificial sequence
  Protein classification predicting sequence
LRMGAFTL

SEQ ID NO: 3767 - protein, 8 aa, Artificial sequence
  Protein classification predicting sequence
FKNALTGL

SEQ ID NO: 3768 - protein, 7 aa, Artificial sequence
  Protein classification predicting sequence
SLSDSKG

SEQ ID NO: 3769 - protein, 7 aa, Artificial sequence
  Protein classification predicting sequence
ATQNEVS

SEQ ID NO: 3770 - protein, 13 aa, Artificial sequence
  Protein classification predicting sequence
SNLPSEPEFEQAY

SEQ ID NO: 3771 - protein, 9 aa, Artificial sequence
  Protein classification predicting sequence
DFDPKGKSD

SEQ ID NO: 3772 - protein, 16 aa, Artificial sequence
  Protein classification predicting sequence
ALPCATQNEVSKEEAE

SEQ ID NO: 3773 - protein, 14 aa, Artificial sequence
  Protein classification predicting sequence
EVDEKLKDIMKNAF

SEQ ID NO: 3774 - protein, 8 aa, Artificial sequence
  Protein classification predicting sequence
VNRGFRVQ

SEQ ID NO: 3775 - protein, 11 aa, Artificial sequence
  Protein classification predicting sequence
KFLGFEQIFKN

SEQ ID NO: 3776 - protein, 8 aa, Artificial sequence
  Protein classification predicting sequence
ATNGKESF

SEQ ID NO: 3777 - protein, 13 aa, Artificial sequence
  Protein classification predicting sequence
SGSGNVAQYAALK

SEQ ID NO: 3778 - protein, 7 aa, Artificial sequence
  Protein classification predicting sequence
AEGSNMG

SEQ ID NO: 3779 - protein, 8 aa, Artificial sequence
  Protein classification predicting sequence
EAIDVFEA

SEQ ID NO: 3780 - protein, 12 aa, Artificial sequence
  Protein classification predicting sequence
NSALGPYKGGLR

SEQ ID NO: 3781 - protein, 24 aa, Artificial sequence
  Protein classification predicting sequence
MGGGKGGADFDPKGKSDAEIRRFC

SEQ ID NO: 3782 - protein, 9 aa, Artificial sequence
  Protein classification predicting sequence
VVSLSDSKG

SEQ ID NO: 3783 - protein, 7 aa, Artificial sequence
  Protein classification predicting sequence
WYAPGKA

SEQ ID NO: 3784 - protein, 18 aa, Artificial sequence
  Protein classification predicting sequence
NCGGVAVSGLEMAQNSQR

SEQ ID NO: 3785 - protein, 7 aa, Artificial sequence
  Protein classification predicting sequence
EGELPSL

SEQ ID NO: 3786 - protein, 7 aa, Artificial sequence
  Protein classification predicting sequence
AGFIKVA

SEQ ID NO: 3787 - protein, 8 aa, Artificial sequence
  Protein classification predicting sequence
AMHDQGDW

SEQ ID NO: 3788 - protein, 16 aa, Artificial sequence
  Protein classification predicting sequence
AALGSAANHSAALLGR

SEQ ID NO: 3789 - protein, 30 aa, Artificial sequence
  Protein classification predicting sequence
EKQLTKSNAPRVKAKIIAEGANGPTTPEAD

SEQ ID NO: 3790 - protein, 12 aa, Artificial sequence
  Protein classification predicting sequence
ISGASEKDIVHS

SEQ ID NO: 3791 - protein, 13 aa, Artificial sequence
  Protein classification predicting sequence
LAYTMERSARQIM

SEQ ID NO: 3792 - protein, 10 aa, Artificial sequence
  Protein classification predicting sequence
LLERLVEPER

SEQ ID NO: 3793 - protein, 7 aa, Artificial sequence
  Protein classification predicting sequence
RVQFNSA

SEQ ID NO: 3794 - protein, 14 aa, Artificial sequence
  Protein classification predicting sequence
GGSLIRPEATGYGL

SEQ ID NO: 3795 - protein, 10 aa, Artificial sequence
  Protein classification predicting sequence
IRPEATGYGL

SEQ ID NO: 3796 - protein, 7 aa, Artificial sequence
  Protein classification predicting sequence
SGLEMAQ

SEQ ID NO: 3797 - protein, 7 aa, Artificial sequence
  Protein classification predicting sequence
EPEFQQA

SEQ ID NO: 3798 - protein, 11 aa, Artificial sequence
  Protein classification predicting sequence
LTGKGLTWGGS

SEQ ID NO: 3799 - protein, 8 aa, Artificial sequence
  Protein classification predicting sequence
REIGYLFG

SEQ ID NO: 3800 - protein, 12 aa, Artificial sequence
  Protein classification predicting sequence
NRFEGVLTGKGL

SEQ ID NO: 3801 - protein, 8 aa, Artificial sequence
  Protein classification predicting sequence
GVLTGKGL

SEQ ID NO: 3802 - protein, 8 aa, Artificial sequence
  Protein classification predicting sequence
SGLEMAQN

SEQ ID NO: 3803 - protein, 9 aa, Artificial sequence
  Protein classification predicting sequence
AGPAALGSA

SEQ ID NO: 3804 - protein, 25 aa, Artificial sequence
  Protein classification predicting sequence
DDPNFFKMVEGFFDRGASIVEDKLV

SEQ ID NO: 3805 - protein, 27 aa, Artificial sequence
  Protein classification predicting sequence
TAMKYNLGLDLRTAAYVNAIEKVFKVY

SEQ ID NO: 3806 - protein, 8 aa, Artificial sequence
  Protein classification predicting sequence
NIAGFVKV

SEQ ID NO: 3807 - protein, 6 aa, Artificial sequence
  Protein classification predicting sequence
RRHYSE

SEQ ID NO: 3808 - protein, 13 aa, Artificial sequence
  Protein classification predicting sequence
ALGPYKGGLRFHP

SEQ ID NO: 3809 - protein, 8 aa, Artificial sequence
  Protein classification predicting sequence
CYAFMREL

SEQ ID NO: 3810 - protein, 7 aa, Artificial sequence
  Protein classification predicting sequence
RVQYNSA

SEQ ID NO: 3811 - protein, 18 aa, Artificial sequence
  Protein classification predicting sequence
WGGSLIRPEATGYGLVYY

SEQ ID NO: 3812 - protein, 13 aa, Artificial sequence
  Protein classification predicting sequence
GGVAVSGLEMAQN

SEQ ID NO: 3813 - protein, 9 aa, Artificial sequence
  Protein classification predicting sequence
PERVIQFRV

SEQ ID NO: 3814 - protein, 11 aa, Artificial sequence
  Protein classification predicting sequence
AEGELPSLVAG

SEQ ID NO: 3815 - protein, 7 aa, Artificial sequence
  Protein classification predicting sequence
VAEGANM

SEQ ID NO: 3816 - protein, 8 aa, Artificial sequence
  Protein classification predicting sequence
AVSDITGA

SEQ ID NO: 3817 - protein, 7 aa, Artificial sequence
  Protein classification predicting sequence
PEADEIL

SEQ ID NO: 3818 - protein, 8 aa, Artificial sequence
  Protein classification predicting sequence
LDTNRGQE

SEQ ID NO: 3819 - protein, 6 aa, Artificial sequence
  Protein classification predicting sequence
YWNGKV

SEQ ID NO: 3820 - protein, 7 aa, Artificial sequence
  Protein classification predicting sequence
GTFDGRL

SEQ ID NO: 3821 - protein, 17 aa, Artificial sequence
  Protein classification predicting sequence
NGKQYVAVEVGWGGIYP

SEQ ID NO: 3822 - protein, 10 aa, Artificial sequence
  Protein classification predicting sequence
RTSGWTVNHS

SEQ ID NO: 3823 - protein, 8 aa, Artificial sequence
  Protein classification predicting sequence
HKGPWNGG

SEQ ID NO: 3824 - protein, 17 aa, Artificial sequence
  Protein classification predicting sequence
FQGLANGEFHAYDATNG

SEQ ID NO: 3825 - protein, 9 aa, Artificial sequence
  Protein classification predicting sequence
VINMSSVHE

SEQ ID NO: 3826 - protein, 16 aa, Artificial sequence
  Protein classification predicting sequence
ASYVTGITLFADGGMT

SEQ ID NO: 3827 - protein, 13 aa, Artificial sequence
  Protein classification predicting sequence
GLGRAMAVRFGQE

SEQ ID NO: 3828 - protein, 8 aa, Artificial sequence
  Protein classification predicting sequence
KVVVNYRS

SEQ ID NO: 3829 - protein, 10 aa, Artificial sequence
  Protein classification predicting sequence
EEAGGQAIIV

SEQ ID NO: 3830 - protein, 13 aa, Artificial sequence
  Protein classification predicting sequence
GDVTKEEDVVNLV

SEQ ID NO: 3831 - protein, 21 aa, Artificial sequence
  Protein classification predicting sequence
LDVMINNAGVENPVPSHELSL

SEQ ID NO: 3832 - protein, 7 aa, Artificial sequence
  Protein classification predicting sequence
FGTLDVM

SEQ ID NO: 3833 - protein, 23 aa, Artificial sequence
  Protein classification predicting sequence
MTETLALEYAPKGIRVNNIGPGA

SEQ ID NO: 3834 - protein, 8 aa, Artificial sequence
  Protein classification predicting sequence
AKVVINYY

SEQ ID NO: 3835 - protein, 12 aa, Artificial sequence
  Protein classification predicting sequence
VQTAIKEFGTLD

SEQ ID NO: 3836 - protein, 8 aa, Artificial sequence
  Protein classification predicting sequence
ENPVPSHE

SEQ ID NO: 3837 - protein, 15 aa, Artificial sequence
  Protein classification predicting sequence
IPWPLFVHYAASKGG

SEQ ID NO: 3838 - protein, 13 aa, Artificial sequence
  Protein classification predicting sequence
ADVESMIPMGYIG

SEQ ID NO: 3839 - protein, 8 aa, Artificial sequence
  Protein classification predicting sequence
MEDMTFAE

SEQ ID NO: 3840 - protein, 10 aa, Artificial sequence
  Protein classification predicting sequence
MEVNFLSYVV

SEQ ID NO: 3841 - protein, 11 aa, Artificial sequence
  Protein classification predicting sequence
MGAHVVVTARS

SEQ ID NO: 3842 - protein, 15 aa, Artificial sequence
  Protein classification predicting sequence
GMTYKNAAAGLNLGG

SEQ ID NO: 3843 - protein, 12 aa, Artificial sequence
  Protein classification predicting sequence
KTVIIGDPRKDK

SEQ ID NO: 3844 - protein, 7 aa, Artificial sequence
  Protein classification predicting sequence
GMKAAAK

SEQ ID NO: 3845 - protein, 10 aa, Artificial sequence
  Protein classification predicting sequence
AVQGVGNVAY

SEQ ID NO: 3846 - protein, 18 aa, Artificial sequence
  Protein classification predicting sequence
IQGLNGRYITAEDVGTTV

SEQ ID NO: 3847 - protein, 9 aa, Artificial sequence
  Protein classification predicting sequence
FGSSGNPSP

SEQ ID NO: 3848 - protein, 18 aa, Artificial sequence
  Protein classification predicting sequence
TAYGVYRGMKAAAKEAFG

SEQ ID NO: 3849 - protein, 12 aa, Artificial sequence
  Protein classification predicting sequence
CQDKESGLKAII

SEQ ID NO: 3850 - protein, 8 aa, Artificial sequence
  Protein classification predicting sequence
AIEDALRL

SEQ ID NO: 3851 - protein, 13 aa, Artificial sequence
  Protein classification predicting sequence
EGAKLIVTDINKE

SEQ ID NO: 3852 - protein, 22 aa, Artificial sequence
  Protein classification predicting sequence
GIVYAPDYVINAGGVINVADEL

SEQ ID NO: 3853 - protein, 7 aa, Artificial sequence
  Protein classification predicting sequence
KVGSTLT

SEQ ID NO: 3854 - protein, 9 aa, Artificial sequence
  Protein classification predicting sequence
SGAELGVRG

SEQ ID NO: 3855 - protein, 25 aa, Artificial sequence
  Protein classification predicting sequence
NHICMDWEPFMLPYRAGQFFVGATL

SEQ ID NO: 3856 - protein, 22 aa, Artificial sequence
  Protein classification predicting sequence
TWEGDAWKIGGGTNWGWYAYDP

SEQ ID NO: 3857 - protein, 9 aa, Artificial sequence
  Protein classification predicting sequence
VPDCYHIFP

SEQ ID NO: 3858 - protein, 8 aa, Artificial sequence
  Protein classification predicting sequence
MHCRDGSL

SEQ ID NO: 3859 - protein, 10 aa, Artificial sequence
  Protein classification predicting sequence
GELPVYRPEF

SEQ ID NO: 3860 - protein, 8 aa, Artificial sequence
  Protein classification predicting sequence
DAMTYHCT

SEQ ID NO: 3861 - protein, 8 aa, Artificial sequence
  Protein classification predicting sequence
PLLPVDRR

SEQ ID NO: 3862 - protein, 8 aa, Artificial sequence
  Protein classification predicting sequence
GIVNGTTN

SEQ ID NO: 3863 - protein, 15 aa, Artificial sequence
  Protein classification predicting sequence
VDLYFEAAVAGAIPV

SEQ ID NO: 3864 - protein, 20 aa, Artificial sequence
  Protein classification predicting sequence
KAAILASIAFHTRVTADDVY

SEQ ID NO: 3865 - protein, 13 aa, Artificial sequence
  Protein classification predicting sequence
VEAEAAGRLMFYG

SEQ ID NO: 3866 - protein, 7 aa, Artificial sequence
  Protein classification predicting sequence
IVVELMG

SEQ ID NO: 3867 - protein, 8 aa, Artificial sequence
  Protein classification predicting sequence
NGTTNYIL

SEQ ID NO: 3868 - protein, 9 aa, Artificial sequence
  Protein classification predicting sequence
TLYYGAGAG

SEQ ID NO: 3869 - protein, 8 aa, Artificial sequence
  Protein classification predicting sequence
LGYAEADP

SEQ ID NO: 3870 - protein, 10 aa, Artificial sequence
  Protein classification predicting sequence
DVVENEEASA

SEQ ID NO: 3871 - protein, 20 aa, Artificial sequence
  Protein classification predicting sequence
ADFSSWTPLEFLVETFHDWI

SEQ ID NO: 3872 - protein, 11 aa, Artificial sequence
  Protein classification predicting sequence
VCHVGKAEDRE

SEQ ID NO: 3873 - protein, 14 aa, Artificial sequence
  Protein classification predicting sequence
GIVSFLCSEDASYI

SEQ ID NO: 3874 - protein, 7 aa, Artificial sequence
  Protein classification predicting sequence
FGKGGQA

SEQ ID NO: 3875 - protein, 43 aa, Artificial sequence
  Protein classification predicting sequence
HLKTFDRGMVWNTDLVETLELQNLMLCALQTIYGAEARKESRG

SEQ ID NO: 3876 - protein, 9 aa, Artificial sequence
  Protein classification predicting sequence
DCATVPPAI

SEQ ID NO: 3877 - protein, 27 aa, Artificial sequence
  Protein classification predicting sequence
DNWRWHFYDTVKGSDWLGDQDAIHYMT

SEQ ID NO: 3878 - protein, 12 aa, Artificial sequence
  Protein classification predicting sequence
ELENYGMPFSRT

SEQ ID NO: 3879 - protein, 17 aa, Artificial sequence
  Protein classification predicting sequence
CCVADRTGHSLLHTLYG

SEQ ID NO: 3880 - protein, 20 aa, Artificial sequence
  Protein classification predicting sequence
EFVQFHPTGIYGAGCLITEG

SEQ ID NO: 3881 - protein, 8 aa, Artificial sequence
  Protein classification predicting sequence
YLQLHHLP

SEQ ID NO: 3882 - protein, 9 aa, Artificial sequence
  Protein classification predicting sequence
PTNYKGQVL

SEQ ID NO: 3883 - protein, 8 aa, Artificial sequence
  Protein classification predicting sequence
ETLELQNL

SEQ ID NO: 3884 - protein, 7 aa, Artificial sequence
  Protein classification predicting sequence
QYPVVDH

SEQ ID NO: 3885 - protein, 16 aa, Artificial sequence
  Protein classification predicting sequence
GPEKDHVYLQLHHLPP

SEQ ID NO: 3886 - protein, 8 aa, Artificial sequence
  Protein classification predicting sequence
IYQRPFGG

SEQ ID NO: 3887 - protein, 25 aa, Artificial sequence
  Protein classification predicting sequence
ATGGYGRTYFSCTSAHTSTGDGTAM

SEQ ID NO: 3888 - protein, 36 aa, Artificial sequence
  Protein classification predicting sequence
QYPVVDHEFDAVVVGAGGAGLRAAFGLSEAGFNTAC

SEQ ID NO: 3889 - protein, 8 aa, Artificial sequence
  Protein classification predicting sequence
FYKQYKSI

SEQ ID NO: 3890 - protein, 13 aa, Artificial sequence
  Protein classification predicting sequence
YLGPAVLMQAYRW

SEQ ID NO: 3891 - protein, 7 aa, Artificial sequence
  Protein classification predicting sequence
AIAEIKK

SEQ ID NO: 3892 - protein, 7 aa, Artificial sequence
  Protein classification predicting sequence
YLGPAVL

SEQ ID NO: 3893 - protein, 7 aa, Artificial sequence
  Protein classification predicting sequence
QYKSIEP

SEQ ID NO: 3894 - protein, 9 aa, Artificial sequence
  Protein classification predicting sequence
KALEVGYRS

SEQ ID NO: 3895 - protein, 19 aa, Artificial sequence
  Protein classification predicting sequence
PVINQIELHPLMQQRQLHA

SEQ ID NO: 3896 - protein, 10 aa, Artificial sequence
  Protein classification predicting sequence
HLQRLIDETG

SEQ ID NO: 3897 - protein, 12 aa, Artificial sequence
  Protein classification predicting sequence
QQRQLHAWNATH

SEQ ID NO: 3898 - protein, 8 aa, Artificial sequence
  Protein classification predicting sequence
GKRLGPDP

SEQ ID NO: 3899 - protein, 9 aa, Artificial sequence
  Protein classification predicting sequence
LIDETGVTP

SEQ ID NO: 3900 - protein, 8 aa, Artificial sequence
  Protein classification predicting sequence
TESWSPLA

SEQ ID NO: 3901 - protein, 8 aa, Artificial sequence
  Protein classification predicting sequence
FGLGTFRL

SEQ ID NO: 3902 - protein, 11 aa, Artificial sequence
  Protein classification predicting sequence
NLSKDKLIPSL

SEQ ID NO: 3903 - protein, 8 aa, Artificial sequence
  Protein classification predicting sequence
IGISNFTI

SEQ ID NO: 3904 - protein, 10 aa, Artificial sequence
  Protein classification predicting sequence
IATNQIELSP

SEQ ID NO: 3905 - protein, 12 aa, Artificial sequence
  Protein classification predicting sequence
TSYMTLAYGKAL

SEQ ID NO: 3906 - protein, 43 aa, Artificial sequence
  Protein classification predicting sequence
GAGPGGYVAAIRAAQLGQKVTIVEKGNLGGVCLNVGCIPSKAL

SEQ ID NO: 3907 - protein, 12 aa, Artificial sequence
  Protein classification predicting sequence
CLNVGCIPSKAL

SEQ ID NO: 3908 - protein, 8 aa, Artificial sequence
  Protein classification predicting sequence
GCIPSKAL

SEQ ID NO: 3909 - protein, 15 aa, Artificial sequence
  Protein classification predicting sequence
KLTGGVEGLLKGNKV

SEQ ID NO: 3910 - protein, 14 aa, Artificial sequence
  Protein classification predicting sequence
FKNAIIATGSRPIE

SEQ ID NO: 3911 - protein, 8 aa, Artificial sequence
  Protein classification predicting sequence
DSTGALNL

SEQ ID NO: 3912 - protein, 6 aa, Artificial sequence
  Protein classification predicting sequence
GFEKQM

SEQ ID NO: 3913 - protein, 20 aa, Artificial sequence
  Protein classification predicting sequence
ADYVLVTVGRRPNTDELGLE

SEQ ID NO: 3914 - protein, 8 aa, Artificial sequence
  Protein classification predicting sequence
AIGDIVPG

SEQ ID NO: 3915 - protein, 7 aa, Artificial sequence
  Protein classification predicting sequence
KVAAEAI

SEQ ID NO: 3916 - protein, 7 aa, Artificial sequence
  Protein classification predicting sequence
AANGRAL

SEQ ID NO: 3917 - protein, 10 aa, Artificial sequence
  Protein classification predicting sequence
ELGLAIEAGM

SEQ ID NO: 3918 - protein, 10 aa, Artificial sequence
  Protein classification predicting sequence
SVVNKLTGGV

SEQ ID NO: 3919 - protein, 8 aa, Artificial sequence
  Protein classification predicting sequence
GLLKGNKV

SEQ ID NO: 3920 - protein, 9 aa, Artificial sequence
  Protein classification predicting sequence
VKGEAYFVD

SEQ ID NO: 3921 - protein, 14 aa, Artificial sequence
  Protein classification predicting sequence
TVGRRPNTDELGLE

SEQ ID NO: 3922 - protein, 9 aa, Artificial sequence
  Protein classification predicting sequence
EAQAKEEGL

SEQ ID NO: 3923 - protein, 9 aa, Artificial sequence
  Protein classification predicting sequence
AANGRALSL

SEQ ID NO: 3924 - protein, 8 aa, Artificial sequence
  Protein classification predicting sequence
TIHAHPTL

SEQ ID NO: 3925 - protein, 7 aa, Artificial sequence
  Protein classification predicting sequence
GGYVAAI

SEQ ID NO: 3926 - protein, 6 aa, Artificial sequence
  Protein classification predicting sequence
GGTCLN

SEQ ID NO: 3927 - protein, 10 aa, Artificial sequence
  Protein classification predicting sequence
PAAVFTDPEI

SEQ ID NO: 3928 - protein, 9 aa, Artificial sequence
  Protein classification predicting sequence
GPGGYVAAI

SEQ ID NO: 3929 - protein, 6 aa, Artificial sequence
  Protein classification predicting sequence
TNVPHI

SEQ ID NO: 3930 - protein, 6 aa, Artificial sequence
  Protein classification predicting sequence
PMLAHK

SEQ ID NO: 3931 - protein, 8 aa, Artificial sequence
  Protein classification predicting sequence
VAAEVIAG

SEQ ID NO: 3932 - protein, 10 aa, Artificial sequence
  Protein classification predicting sequence
LGGTCLNVGC

SEQ ID NO: 3933 - protein, 7 aa, Artificial sequence
  Protein classification predicting sequence
KFPFTAN

SEQ ID NO: 3934 - protein, 7 aa, Artificial sequence
  Protein classification predicting sequence
AEDIALT

SEQ ID NO: 3935 - protein, 7 aa, Artificial sequence
  Protein classification predicting sequence
VIYTHPE

SEQ ID NO: 3936 - protein, 16 aa, Artificial sequence
  Protein classification predicting sequence
GPAGYSAAFRCADLGL

SEQ ID NO: 3937 - protein, 10 aa, Artificial sequence
  Protein classification predicting sequence
CLNVGCIPSK

SEQ ID NO: 3938 - protein, 9 aa, Artificial sequence
  Protein classification predicting sequence
RIWDSTDAL

SEQ ID NO: 3939 - protein, 12 aa, Artificial sequence
  Protein classification predicting sequence
PMLAHKGVHEGH

SEQ ID NO: 3940 - protein, 8 aa, Artificial sequence
  Protein classification predicting sequence
ASGRAIAS

SEQ ID NO: 3941 - protein, 23 aa, Artificial sequence
  Protein classification predicting sequence
GLAIEMGCDAEDIALTIHAHPTL

SEQ ID NO: 3942 - protein, 14 aa, Artificial sequence
  Protein classification predicting sequence
AEDIALTIHAHPTL

SEQ ID NO: 3943 - protein, 19 aa, Artificial sequence
  Protein classification predicting sequence
GPAGYSAAFRCADLGLETV

SEQ ID NO: 3944 - protein, 7 aa, Artificial sequence
  Protein classification predicting sequence
GMTKLIF

SEQ ID NO: 3945 - protein, 6 aa, Artificial sequence
  Protein classification predicting sequence
HPTLSE

SEQ ID NO: 3946 - protein, 8 aa, Artificial sequence
  Protein classification predicting sequence
GYSAAFRC

SEQ ID NO: 3947 - protein, 7 aa, Artificial sequence
  Protein classification predicting sequence
TKLIFDK

SEQ ID NO: 3948 - protein, 11 aa, Artificial sequence
  Protein classification predicting sequence
LAIEMGCDAED

SEQ ID NO: 3949 - protein, 7 aa, Artificial sequence
  Protein classification predicting sequence
LGLEELG

SEQ ID NO: 3950 - protein, 7 aa, Artificial sequence
  Protein classification predicting sequence
PEVAWVG

SEQ ID NO: 3951 - protein, 35 aa, Artificial sequence
  Protein classification predicting sequence
EIKTQVVVLGAGPAGYSAAFRCADLGLETVIVERY

SEQ ID NO: 3952 - protein, 28 aa, Artificial sequence
  Protein classification predicting sequence
TLGGVCLNVGCIPSKALLHVAKVIEEAK

SEQ ID NO: 3953 - protein, 10 aa, Artificial sequence
  Protein classification predicting sequence
LTGGLAGMAK

SEQ ID NO: 3954 - protein, 13 aa, Artificial sequence
  Protein classification predicting sequence
LMLETKVTAVEAK

SEQ ID NO: 3955 - protein, 16 aa, Artificial sequence
  Protein classification predicting sequence
RYDAVLVAIGRVPNGK

SEQ ID NO: 3956 - protein, 15 aa, Artificial sequence
  Protein classification predicting sequence
DAGKAGVEVDDRGFI

SEQ ID NO: 3957 - protein, 23 aa, Artificial sequence
  Protein classification predicting sequence
KHYFDPKVIPSIAYTEPEVAWVG

SEQ ID NO: 3958 - protein, 7 aa, Artificial sequence
  Protein classification predicting sequence
TGSRPIE

SEQ ID NO: 3959 - protein, 7 aa, Artificial sequence
  Protein classification predicting sequence
ELGLAIE

SEQ ID NO: 3960 - protein, 10 aa, Artificial sequence
  Protein classification predicting sequence
AVKALTGGIA

SEQ ID NO: 3961 - protein, 17 aa, Artificial sequence
  Protein classification predicting sequence
TKNILIATGSEVTPFPG

SEQ ID NO: 3962 - protein, 9 aa, Artificial sequence
  Protein classification predicting sequence
QRLGADVTA

SEQ ID NO: 3963 - protein, 25 aa, Artificial sequence
  Protein classification predicting sequence
QGFKFKLNTKVTGATKKSDGKIDVS

SEQ ID NO: 3964 - protein, 25 aa, Artificial sequence
  Protein classification predicting sequence
GKFPFAANSRAKTNADTDGMVKILG

SEQ ID NO: 3965 - protein, 57 aa, Artificial sequence
  Protein classification predicting sequence
KSTDRVLGAHILGPGAGEMVNEAALALEYGASCEDIARVCHAHPTLSEAFREANLAA

SEQ ID NO: 3966 - protein, 8 aa, Artificial sequence
  Protein classification predicting sequence
CLNVGCIP

SEQ ID NO: 3967 - protein, 14 aa, Artificial sequence
  Protein classification predicting sequence
CLNVGCIPSKALLH

SEQ ID NO: 3968 - protein, 12 aa, Artificial sequence
  Protein classification predicting sequence
EDIARVCHAHPT

SEQ ID NO: 3969 - protein, 8 aa, Artificial sequence
  Protein classification predicting sequence
GATKKSDG

SEQ ID NO: 3970 - protein, 8 aa, Artificial sequence
  Protein classification predicting sequence
AIGDVVRG

SEQ ID NO: 3971 - protein, 6 aa, Artificial sequence
  Protein classification predicting sequence
GPGGYV

SEQ ID NO: 3972 - protein, 6 aa, Artificial sequence
  Protein classification predicting sequence
CVEKRG

SEQ ID NO: 3973 - protein, 8 aa, Artificial sequence
  Protein classification predicting sequence
LALEYGAS

SEQ ID NO: 3974 - protein, 7 aa, Artificial sequence
  Protein classification predicting sequence
HPTLSEA

SEQ ID NO: 3975 - protein, 7 aa, Artificial sequence
  Protein classification predicting sequence
GPGGYVA

SEQ ID NO: 3976 - protein, 7 aa, Artificial sequence
  Protein classification predicting sequence
IKAAQLG

SEQ ID NO: 3977 - protein, 15 aa, Artificial sequence
  Protein classification predicting sequence
EHGIVFGEPKTDIDK

SEQ ID NO: 3978 - protein, 18 aa, Artificial sequence
  Protein classification predicting sequence
WKEKVINQLTGGLAGMAK

SEQ ID NO: 3979 - protein, 7 aa, Artificial sequence
  Protein classification predicting sequence
IPAADKD

SEQ ID NO: 3980 - protein, 22 aa, Artificial sequence
  Protein classification predicting sequence
KFNLMLETKVTAVEAKEDGIYV

SEQ ID NO: 3981 - protein, 9 aa, Artificial sequence
  Protein classification predicting sequence
RGFIRVDKQ

SEQ ID NO: 3982 - protein, 9 aa, Artificial sequence
  Protein classification predicting sequence
MEGKKAPAE

SEQ ID NO: 3983 - protein, 16 aa, Artificial sequence
  Protein classification predicting sequence
ATFPWAASGRAIASDC

SEQ ID NO: 3984 - protein, 11 aa, Artificial sequence
  Protein classification predicting sequence
DGMTKLIFDKE

SEQ ID NO: 3985 - protein, 10 aa, Artificial sequence
  Protein classification predicting sequence
LLGLIEMDRD

SEQ ID NO: 3986 - protein, 10 aa, Artificial sequence
  Protein classification predicting sequence
PGMDFMGFKV

SEQ ID NO: 3987 - protein, 7 aa, Artificial sequence
  Protein classification predicting sequence
EVYEQQT

SEQ ID NO: 3988 - protein, 8 aa, Artificial sequence
  Protein classification predicting sequence
HWMLVTLA

SEQ ID NO: 3989 - protein, 13 aa, Artificial sequence
  Protein classification predicting sequence
MLGQIGLPGGGFG

SEQ ID NO: 3990 - protein, 8 aa, Artificial sequence
  Protein classification predicting sequence
HHQDRNRM

SEQ ID NO: 3991 - protein, 9 aa, Artificial sequence
  Protein classification predicting sequence
ADIVLPATT

SEQ ID NO: 3992 - protein, 7 aa, Artificial sequence
  Protein classification predicting sequence
RGQILTG

SEQ ID NO: 3993 - protein, 9 aa, Artificial sequence
  Protein classification predicting sequence
SVPWNSFNR

SEQ ID NO: 3994 - protein, 15 aa, Artificial sequence
  Protein classification predicting sequence
IFASQLHTHLTGRKV

SEQ ID NO: 3995 - protein, 21 aa, Artificial sequence
  Protein classification predicting sequence
ATVGGFGILEEMCVNYVHYYP

SEQ ID NO: 3996 - protein, 6 aa, Artificial sequence
  Protein classification predicting sequence
CYPPET

SEQ ID NO: 3997 - protein, 8 aa, Artificial sequence
  Protein classification predicting sequence
FTPCVLPM

SEQ ID NO: 3998 - protein, 6 aa, Artificial sequence
  Protein classification predicting sequence
YADWCV

SEQ ID NO: 3999 - protein, 8 aa, Artificial sequence
  Protein classification predicting sequence
FVPVDQAF

SEQ ID NO: 4000 - protein, 10 aa, Artificial sequence
  Protein classification predicting sequence
YVQGMALTYT

SEQ ID NO: 4001 - protein, 28 aa, Artificial sequence
  Protein classification predicting sequence
TLQLPSSLQTRLTLMSNRQQGGSPGGVF

SEQ ID NO: 4002 - protein, 8 aa, Artificial sequence
  Protein classification predicting sequence
GFCYPPET

SEQ ID NO: 4003 - protein, 6 aa, Artificial sequence
  Protein classification predicting sequence
SMFGLF

SEQ ID NO: 4004 - protein, 14 aa, Artificial sequence
  Protein classification predicting sequence
APLSGALLYVAQSG

SEQ ID NO: 4005 - protein, 21 aa, Artificial sequence
  Protein classification predicting sequence
VMLDLYADWCVACKEFEKYTF

SEQ ID NO: 4006 - protein, 8 aa, Artificial sequence
  Protein classification predicting sequence
IGLSILFV

SEQ ID NO: 4007 - protein, 8 aa, Artificial sequence
  Protein classification predicting sequence
RVTGFMDA

SEQ ID NO: 4008 - protein, 5 aa, Artificial sequence
  Protein classification predicting sequence
YADWC

SEQ ID NO: 4009 - protein, 9 aa, Artificial sequence
  Protein classification predicting sequence
LLPKSGPWM

SEQ ID NO: 4010 - protein, 12 aa, Artificial sequence
  Protein classification predicting sequence
FGFVILALPVFL

SEQ ID NO: 4011 - protein, 8 aa, Artificial sequence
  Protein classification predicting sequence
RPLQDWAF

SEQ ID NO: 4012 - protein, 5 aa, Artificial sequence
  Protein classification predicting sequence
GYYLY

SEQ ID NO: 4013 - protein, 7 aa, Artificial sequence
  Protein classification predicting sequence
GGVFVMG

SEQ ID NO: 4014 - protein, 12 aa, Artificial sequence
  Protein classification predicting sequence
YADWCVACKEFE

SEQ ID NO: 4015 - protein, 10 aa, Artificial sequence
  Protein classification predicting sequence
WQVKEGYYLY

SEQ ID NO: 4016 - protein, 16 aa, Artificial sequence
  Protein classification predicting sequence
YADWCVACKEFEKYTF

SEQ ID NO: 4017 - protein, 34 aa, Artificial sequence
  Protein classification predicting sequence
NWWTPLLFLALGVGLAFTPCVLPMYPILTSIVLG

SEQ ID NO: 4018 - protein, 37 aa, Artificial sequence
  Protein classification predicting sequence
GVFAMGAISGLVCSPCTTAPLSGALLYVAQSGDLLTG

SEQ ID NO: 4019 - protein, 21 aa, Artificial sequence
  Protein classification predicting sequence
GMGIPLILVAVFGNKLLPKAG

SEQ ID NO: 4020 - protein, 8 aa, Artificial sequence
  Protein classification predicting sequence
AGLQFQAA

SEQ ID NO: 4021 - protein, 8 aa, Artificial sequence
  Protein classification predicting sequence
TLILLLCS

SEQ ID NO: 4022 - protein, 24 aa, Artificial sequence
  Protein classification predicting sequence
LWALLIGIGIAFTPCVLPMYPLIS

SEQ ID NO: 4023 - protein, 25 aa, Artificial sequence
  Protein classification predicting sequence
LGLVVAAAGLQFQAALQHPYVLIGL

SEQ ID NO: 4024 - protein, 9 aa, Artificial sequence
  Protein classification predicting sequence
QHPYVLIGL

SEQ ID NO: 4025 - protein, 8 aa, Artificial sequence
  Protein classification predicting sequence
LALSMFGL

SEQ ID NO: 4026 - protein, 12 aa, Artificial sequence
  Protein classification predicting sequence
LQLPSSLQTRLT

SEQ ID NO: 4027 - protein, 26 aa, Artificial sequence
  Protein classification predicting sequence
AGLICSPCTTAPLSAILLYIAQSGNM

SEQ ID NO: 4028 - protein, 13 aa, Artificial sequence
  Protein classification predicting sequence
GGGTLYLYALGMG

SEQ ID NO: 4029 - protein, 8 aa, Artificial sequence
  Protein classification predicting sequence
VAFFGWAF

SEQ ID NO: 4030 - protein, 11 aa, Artificial sequence
  Protein classification predicting sequence
PVDSEHSAIFQ

SEQ ID NO: 4031 - protein, 17 aa, Artificial sequence
  Protein classification predicting sequence
PVDSEHSAIFQCLNGEN

SEQ ID NO: 4032 - protein, 8 aa, Artificial sequence
  Protein classification predicting sequence
HKESIIHS

SEQ ID NO: 4033 - protein, 13 aa, Artificial sequence
  Protein classification predicting sequence
PVDSEHSAIFQCL

SEQ ID NO: 4034 - protein, 11 aa, Artificial sequence
  Protein classification predicting sequence
DSEHSAIFQCL

SEQ ID NO: 4035 - protein, 7 aa, Artificial sequence
  Protein classification predicting sequence
GENNKEI

SEQ ID NO: 4036 - protein, 16 aa, Artificial sequence
  Protein classification predicting sequence
KLIVTASGGAFRDKTR

SEQ ID NO: 4037 - protein, 44 aa, Artificial sequence
  Protein classification predicting sequence
TLQAKDALKHPNWLMGAKLTIDSATLMNKGFEVMEARWLFDIPY

SEQ ID NO: 4038 - protein, 7 aa, Artificial sequence
  Protein classification predicting sequence
HPNWSMG

SEQ ID NO: 4039 - protein, 8 aa, Artificial sequence
  Protein classification predicting sequence
KHPNWSMG

SEQ ID NO: 4040 - protein, 7 aa, Artificial sequence
  Protein classification predicting sequence
VVVHPQS

SEQ ID NO: 4041 - protein, 6 aa, Artificial sequence
  Protein classification predicting sequence
LNAANE

SEQ ID NO: 4042 - protein, 9 aa, Artificial sequence
  Protein classification predicting sequence
LNAANEIAV

SEQ ID NO: 4043 - protein, 6 aa, Artificial sequence
  Protein classification predicting sequence
YALTYP

SEQ ID NO: 4044 - protein, 9 aa, Artificial sequence
  Protein classification predicting sequence
GSTGSIGTQ

SEQ ID NO: 4045 - protein, 7 aa, Artificial sequence
  Protein classification predicting sequence
SVLAQLG

SEQ ID NO: 4046 - protein, 10 aa, Artificial sequence
  Protein classification predicting sequence
MPAVLNAANE

SEQ ID NO: 4047 - protein, 11 aa, Artificial sequence
  Protein classification predicting sequence
TIDSATLMNKG

SEQ ID NO: 4048 - protein, 9 aa, Artificial sequence
  Protein classification predicting sequence
KITVDSATL

SEQ ID NO: 4049 - protein, 56 aa, Artificial sequence
  Protein classification predicting sequence
GGSMPAVMNAANEVAVEAFLQKRIGFLTVEDLIEKAMNHHNVIARPSLEEILEIDA

SEQ ID NO: 4050 - protein, 7 aa, Artificial sequence
  Protein classification predicting sequence
IALANKE

SEQ ID NO: 4051 - protein, 9 aa, Artificial sequence
  Protein classification predicting sequence
IALANKETL

SEQ ID NO: 4052 - protein, 13 aa, Artificial sequence
  Protein classification predicting sequence
LHKESIIHSMVEF

SEQ ID NO: 4053 - protein, 6 aa, Artificial sequence
  Protein classification predicting sequence
HSMVEF

SEQ ID NO: 4054 - protein, 13 aa, Artificial sequence
  Protein classification predicting sequence
GGTMPTVLNAANE

SEQ ID NO: 4055 - protein, 7 aa, Artificial sequence
  Protein classification predicting sequence
VDQETRA

SEQ ID NO: 4056 - protein, 9 aa, Artificial sequence
  Protein classification predicting sequence
GSIGTQTLD

SEQ ID NO: 4057 - protein, 6 aa, Artificial sequence
  Protein classification predicting sequence
GLLPTL

SEQ ID NO: 4058 - protein, 7 aa, Artificial sequence
  Protein classification predicting sequence
ANKETLV

SEQ ID NO: 4059 - protein, 10 aa, Artificial sequence
  Protein classification predicting sequence
TASGGSFRDK

SEQ ID NO: 4060 - protein, 7 aa, Artificial sequence
  Protein classification predicting sequence
VTVEQAL

SEQ ID NO: 4061 - protein, 7 aa, Artificial sequence
  Protein classification predicting sequence
LFGLDYD

SEQ ID NO: 4062 - protein, 12 aa, Artificial sequence
  Protein classification predicting sequence
TASGGSFRDKTR

SEQ ID NO: 4063 - protein, 22 aa, Artificial sequence
  Protein classification predicting sequence
IPYEQIDVVLHKESIIHSMVEF

SEQ ID NO: 4064 - protein, 19 aa, Artificial sequence
  Protein classification predicting sequence
PDMRVPIQYALTYPDRLPL

SEQ ID NO: 4065 - protein, 7 aa, Artificial sequence
  Protein classification predicting sequence
QASPPDM

SEQ ID NO: 4066 - protein, 9 aa, Artificial sequence
  Protein classification predicting sequence
DSEHNAIFQ

SEQ ID NO: 4067 - protein, 9 aa, Artificial sequence
  Protein classification predicting sequence
KISVDSATM

SEQ ID NO: 4068 - protein, 9 aa, Artificial sequence
  Protein classification predicting sequence
IDVLVHPQS

SEQ ID NO: 4069 - protein, 11 aa, Artificial sequence
  Protein classification predicting sequence
NAANEVAVAAF

SEQ ID NO: 4070 - protein, 7 aa, Artificial sequence
  Protein classification predicting sequence
AGLLPTL

SEQ ID NO: 4071 - protein, 7 aa, Artificial sequence
  Protein classification predicting sequence
LANKESL

SEQ ID NO: 4072 - protein, 12 aa, Artificial sequence
  Protein classification predicting sequence
LLANKEALVMSG

SEQ ID NO: 4073 - protein, 14 aa, Artificial sequence
  Protein classification predicting sequence
PSERIDVLIHPQSV

SEQ ID NO: 4074 - protein, 7 aa, Artificial sequence
  Protein classification predicting sequence
VEYVDGS

SEQ ID NO: 4075 - protein, 8 aa, Artificial sequence
  Protein classification predicting sequence
NAANEVAV

SEQ ID NO: 4076 - protein, 6 aa, Artificial sequence
  Protein classification predicting sequence
VVHPQS

SEQ ID NO: 4077 - protein, 6 aa, Artificial sequence
  Protein classification predicting sequence
VIHPQS

SEQ ID NO: 4078 - protein, 7 aa, Artificial sequence
  Protein classification predicting sequence
SIIHSMV

SEQ ID NO: 4079 - protein, 7 aa, Artificial sequence
  Protein classification predicting sequence
IVGAAGL

SEQ ID NO: 4080 - protein, 19 aa, Artificial sequence
  Protein classification predicting sequence
ACRHPNWSMGRKISVDSAT

SEQ ID NO: 4081 - protein, 16 aa, Artificial sequence
  Protein classification predicting sequence
HPNWSMGRKISVDSAT

SEQ ID NO: 4082 - protein, 7 aa, Artificial sequence
  Protein classification predicting sequence
SVMAQLG

SEQ ID NO: 4083 - protein, 9 aa, Artificial sequence
  Protein classification predicting sequence
AQLGSPDMR

SEQ ID NO: 4084 - protein, 6 aa, Artificial sequence
  Protein classification predicting sequence
PIQYAL

SEQ ID NO: 4085 - protein, 7 aa, Artificial sequence
  Protein classification predicting sequence
PDMKLPI

SEQ ID NO: 4086 - protein, 9 aa, Artificial sequence
  Protein classification predicting sequence
TGSIGTQTL

SEQ ID NO: 4087 - protein, 6 aa, Artificial sequence
  Protein classification predicting sequence
AIFQCL

SEQ ID NO: 4088 - protein, 7 aa, Artificial sequence
  Protein classification predicting sequence
ALKHPNW

SEQ ID NO: 4089 - protein, 7 aa, Artificial sequence
  Protein classification predicting sequence
IEVVVHP

SEQ ID NO: 4090 - protein, 8 aa, Artificial sequence
  Protein classification predicting sequence
FPAVELAR

SEQ ID NO: 4091 - protein, 8 aa, Artificial sequence
  Protein classification predicting sequence
AHPTWAMG

SEQ ID NO: 4092 - protein, 7 aa, Artificial sequence
  Protein classification predicting sequence
HPNWNMG

SEQ ID NO: 4093 - protein, 6 aa, Artificial sequence
  Protein classification predicting sequence
SGGPFR

SEQ ID NO: 4094 - protein, 19 aa, Artificial sequence
  Protein classification predicting sequence
AQLLPIDSEHNAIFQSLPE

SEQ ID NO: 4095 - protein, 6 aa, Artificial sequence
  Protein classification predicting sequence
TPDQAC

SEQ ID NO: 4096 - protein, 10 aa, Artificial sequence
  Protein classification predicting sequence
HPNWSMGKKI

SEQ ID NO: 4097 - protein, 6 aa, Artificial sequence
  Protein classification predicting sequence
KITIDS

SEQ ID NO: 4098 - protein, 10 aa, Artificial sequence
  Protein classification predicting sequence
NKGLEVIEAH

SEQ ID NO: 4099 - protein, 10 aa, Artificial sequence
  Protein classification predicting sequence
VDYDDIEVVI

SEQ ID NO: 4100 - protein, 18 aa, Artificial sequence
  Protein classification predicting sequence
SMPAVMNAANEVAVEAFL

SEQ ID NO: 4101 - protein, 6 aa, Artificial sequence
  Protein classification predicting sequence
ALANKE

SEQ ID NO: 4102 - protein, 10 aa, Artificial sequence
  Protein classification predicting sequence
MNKGLEVIEA

SEQ ID NO: 4103 - protein, 11 aa, Artificial sequence
  Protein classification predicting sequence
MNKGLEVIEAH

SEQ ID NO: 4104 - protein, 10 aa, Artificial sequence
  Protein classification predicting sequence
LTGSGGPFRE

SEQ ID NO: 4105 - protein, 8 aa, Artificial sequence
  Protein classification predicting sequence
AHPNWSMG

SEQ ID NO: 4106 - protein, 7 aa, Artificial sequence
  Protein classification predicting sequence
GQYATTA

SEQ ID NO: 4107 - protein, 11 aa, Artificial sequence
  Protein classification predicting sequence
AGKRVLLANKE

SEQ ID NO: 4108 - protein, 9 aa, Artificial sequence
  Protein classification predicting sequence
LTGSGGPFR

SEQ ID NO: 4109 - protein, 7 aa, Artificial sequence
  Protein classification predicting sequence
LKLAIDA

SEQ ID NO: 4110 - protein, 8 aa, Artificial sequence
  Protein classification predicting sequence
ASGGAFRD

SEQ ID NO: 4111 - protein, 9 aa, Artificial sequence
  Protein classification predicting sequence
KITIDSASM

SEQ ID NO: 4112 - protein, 7 aa, Artificial sequence
  Protein classification predicting sequence
KITIDSA

SEQ ID NO: 4113 - protein, 8 aa, Artificial sequence
  Protein classification predicting sequence
TASGGPFR

SEQ ID NO: 4114 - protein, 8 aa, Artificial sequence
  Protein classification predicting sequence
PVDSEHSA

SEQ ID NO: 4115 - protein, 8 aa, Artificial sequence
  Protein classification predicting sequence
TLVNKGLE

SEQ ID NO: 4116 - protein, 9 aa, Artificial sequence
  Protein classification predicting sequence
GSVGLLPTL

SEQ ID NO: 4117 - protein, 8 aa, Artificial sequence
  Protein classification predicting sequence
IANKETLV

SEQ ID NO: 4118 - protein, 15 aa, Artificial sequence
  Protein classification predicting sequence
IANKETLVTAGHLVM

SEQ ID NO: 4119 - protein, 9 aa, Artificial sequence
  Protein classification predicting sequence
PVDSEHSAI

SEQ ID NO: 4120 - protein, 6 aa, Artificial sequence
  Protein classification predicting sequence
EAHWLF

SEQ ID NO: 4121 - protein, 7 aa, Artificial sequence
  Protein classification predicting sequence
SIVHSMV

SEQ ID NO: 4122 - protein, 25 aa, Artificial sequence
  Protein classification predicting sequence
KISVDSATMMNKGLEYIEARWLFNA

SEQ ID NO: 4123 - protein, 15 aa, Artificial sequence
  Protein classification predicting sequence
DSATMMNKGLEVIEA

SEQ ID NO: 4124 - protein, 8 aa, Artificial sequence
  Protein classification predicting sequence
NKGLEVIE

SEQ ID NO: 4125 - protein, 9 aa, Artificial sequence
  Protein classification predicting sequence
LDTLLRQRA

SEQ ID NO: 4126 - protein, 7 aa, Artificial sequence
  Protein classification predicting sequence
HPTWSMG

SEQ ID NO: 4127 - protein, 7 aa, Artificial sequence
  Protein classification predicting sequence
WEFEPLD

SEQ ID NO: 4128 - protein, 10 aa, Artificial sequence
  Protein classification predicting sequence
LPISLALGWP

SEQ ID NO: 4129 - protein, 12 aa, Artificial sequence
  Protein classification predicting sequence
VDDVLDAQRWAR

SEQ ID NO: 4130 - protein, 7 aa, Artificial sequence
  Protein classification predicting sequence
IEAHWLF

SEQ ID NO: 4131 - protein, 6 aa, Artificial sequence
  Protein classification predicting sequence
PCLKLA

SEQ ID NO: 4132 - protein, 7 aa, Artificial sequence
  Protein classification predicting sequence
ILLANKE

SEQ ID NO: 4133 - protein, 7 aa, Artificial sequence
  Protein classification predicting sequence
VVIHPQS

SEQ ID NO: 4134 - protein, 9 aa, Artificial sequence
  Protein classification predicting sequence
PAVLNAANE

SEQ ID NO: 4135 - protein, 8 aa, Artificial sequence
  Protein classification predicting sequence
LGSTGSIG

SEQ ID NO: 4136 - protein, 17 aa, Artificial sequence
  Protein classification predicting sequence
RLALANKESLVAGGSLV

SEQ ID NO: 4137 - protein, 8 aa, Artificial sequence
  Protein classification predicting sequence
AQASPPDM

SEQ ID NO: 4138 - protein, 6 aa, Artificial sequence
  Protein classification predicting sequence
LTYPDR

SEQ ID NO: 4139 - protein, 10 aa, Artificial sequence
  Protein classification predicting sequence
HPQSVIHSMV

SEQ ID NO: 4140 - protein, 12 aa, Artificial sequence
  Protein classification predicting sequence
HPQSVIHSMVRY

SEQ ID NO: 4141 - protein, 19 aa, Artificial sequence
  Protein classification predicting sequence
KISVDSATMMNKGLEYIEA

SEQ ID NO: 4142 - protein, 7 aa, Artificial sequence
  Protein classification predicting sequence
DGSVLAQ

SEQ ID NO: 4143 - protein, 7 aa, Artificial sequence
  Protein classification predicting sequence
IEAKWLF

SEQ ID NO: 4144 - protein, 7 aa, Artificial sequence
  Protein classification predicting sequence
GLRPTLA

SEQ ID NO: 4145 - protein, 7 aa, Artificial sequence
  Protein classification predicting sequence
HPTWNMG

SEQ ID NO: 4146 - protein, 7 aa, Artificial sequence
  Protein classification predicting sequence
LVNKGLE

SEQ ID NO: 4147 - protein, 6 aa, Artificial sequence
  Protein classification predicting sequence
LTASGG

SEQ ID NO: 4148 - protein, 7 aa, Artificial sequence
  Protein classification predicting sequence
VLNAANE

SEQ ID NO: 4149 - protein, 10 aa, Artificial sequence
  Protein classification predicting sequence
MGRKISVDSA

SEQ ID NO: 4150 - protein, 9 aa, Artificial sequence
  Protein classification predicting sequence
LNAANEVAV

SEQ ID NO: 4151 - protein, 13 aa, Artificial sequence
  Protein classification predicting sequence
LNAANEVAVAAFL

SEQ ID NO: 4152 - protein, 12 aa, Artificial sequence
  Protein classification predicting sequence
STLDVIARHPDR

SEQ ID NO: 4153 - protein, 8 aa, Artificial sequence
  Protein classification predicting sequence
HPQSVIHS

SEQ ID NO: 4154 - protein, 8 aa, Artificial sequence
  Protein classification predicting sequence
PDMRTPIA

SEQ ID NO: 4155 - protein, 8 aa, Artificial sequence
  Protein classification predicting sequence
QACAHPNW

SEQ ID NO: 4156 - protein, 9 aa, Artificial sequence
  Protein classification predicting sequence
DGSVLAQLG

SEQ ID NO: 4157 - protein, 7 aa, Artificial sequence
  Protein classification predicting sequence
VMAAIVG

SEQ ID NO: 4158 - protein, 8 aa, Artificial sequence
  Protein classification predicting sequence
ALANKETL

SEQ ID NO: 4159 - protein, 15 aa, Artificial sequence
  Protein classification predicting sequence
EQCLEFSPRYAVMDD

SEQ ID NO: 4160 - protein, 14 aa, Artificial sequence
  Protein classification predicting sequence
GSRTEVLSGQQAAC

SEQ ID NO: 4161 - protein, 15 aa, Artificial sequence
  Protein classification predicting sequence
IQHNLGYADLEQNGV

SEQ ID NO: 4162 - protein, 12 aa, Artificial sequence
  Protein classification predicting sequence
PLDFCKLSALTF

SEQ ID NO: 4163 - protein, 41 aa, Artificial sequence
  Protein classification predicting sequence
VMAAIVGAAGLLPTLAAIRAGKTILLANKESLVTCGRLFMD

SEQ ID NO: 4164 - protein, 46 aa, Artificial sequence
  Protein classification predicting sequence
QMEVLIHPQSVIHSMVRYQDGSVLAQLGEPDMRTPIAHTMAWPNRV

SEQ ID NO: 4165 - protein, 44 aa, Artificial sequence
  Protein classification predicting sequence
RYPCLKLAMEAFEQGQAATTALNAANEITVAAFLAQQIRFTDIA

SEQ ID NO: 4166 - protein, 9 aa, Artificial sequence
  Protein classification predicting sequence
ILGATGSIG

SEQ ID NO: 4167 - protein, 8 aa, Artificial sequence
  Protein classification predicting sequence
LTGSGGPF

SEQ ID NO: 4168 - protein, 15 aa, Artificial sequence
  Protein classification predicting sequence
KISVDSATMMNKGLE

SEQ ID NO: 4169 - protein, 11 aa, Artificial sequence
  Protein classification predicting sequence
DSATMMNKGLE

SEQ ID NO: 4170 - protein, 7 aa, Artificial sequence
  Protein classification predicting sequence
DGSVIAQ

SEQ ID NO: 4171 - protein, 8 aa, Artificial sequence
  Protein classification predicting sequence
RYPCLKLA

SEQ ID NO: 4172 - protein, 7 aa, Artificial sequence
  Protein classification predicting sequence
VTVEDAL

SEQ ID NO: 4173 - protein, 8 aa, Artificial sequence
  Protein classification predicting sequence
DSATLMNK

SEQ ID NO: 4174 - protein, 12 aa, Artificial sequence
  Protein classification predicting sequence
PADSEHSAIFQC

SEQ ID NO: 4175 - protein, 16 aa, Artificial sequence
  Protein classification predicting sequence
PADSEHSAIFQCIQGL

SEQ ID NO: 4176 - protein, 24 aa, Artificial sequence
  Protein classification predicting sequence
DTSVLAQLGWPDMRLPLLYALSWP

SEQ ID NO: 4177 - protein, 6 aa, Artificial sequence
  Protein classification predicting sequence
VDSATM

SEQ ID NO: 4178 - protein, 8 aa, Artificial sequence
  Protein classification predicting sequence
EVAVEAFL

SEQ ID NO: 4179 - protein, 6 aa, Artificial sequence
  Protein classification predicting sequence
VLIHPQ

SEQ ID NO: 4180 - protein, 8 aa, Artificial sequence
  Protein classification predicting sequence
IQYALNYP

SEQ ID NO: 4181 - protein, 7 aa, Artificial sequence
  Protein classification predicting sequence
ALANKET

SEQ ID NO: 4182 - protein, 7 aa, Artificial sequence
  Protein classification predicting sequence
TASGGPF

SEQ ID NO: 4183 - protein, 8 aa, Artificial sequence
  Protein classification predicting sequence
KISVDSAT

SEQ ID NO: 4184 - protein, 7 aa, Artificial sequence
  Protein classification predicting sequence
GSTGSIG

SEQ ID NO: 4185 - protein, 9 aa, Artificial sequence
  Protein classification predicting sequence
TEADVVLNA

SEQ ID NO: 4186 - protein, 6 aa, Artificial sequence
  Protein classification predicting sequence
YALSWP

SEQ ID NO: 4187 - protein, 9 aa, Artificial sequence
  Protein classification predicting sequence
GEPDMATPI

SEQ ID NO: 4188 - protein, 8 aa, Artificial sequence
  Protein classification predicting sequence
LESLLELD

SEQ ID NO: 4189 - protein, 10 aa, Artificial sequence
  Protein classification predicting sequence
ATTALNAANE

SEQ ID NO: 4190 - protein, 9 aa, Artificial sequence
  Protein classification predicting sequence
DSATMMNKG

SEQ ID NO: 4191 - protein, 5 aa, Artificial sequence
  Protein classification predicting sequence
RYPCL

SEQ ID NO: 4192 - protein, 9 aa, Artificial sequence
  Protein classification predicting sequence
AAIVGAAGL

SEQ ID NO: 4193 - protein, 7 aa, Artificial sequence
  Protein classification predicting sequence
GATGSIG

SEQ ID NO: 4194 - protein, 10 aa, Artificial sequence
  Protein classification predicting sequence
QCLEFSPRYA

SEQ ID NO: 4195 - protein, 9 aa, Artificial sequence
  Protein classification predicting sequence
TLAAIRAGK

SEQ ID NO: 4196 - protein, 24 aa, Artificial sequence
  Protein classification predicting sequence
HPNWSMGRKISVDSATMMNKGLEY

SEQ ID NO: 4197 - protein, 16 aa, Artificial sequence
  Protein classification predicting sequence
KISVDSATMMNKGLEY

SEQ ID NO: 4198 - protein, 7 aa, Artificial sequence
  Protein classification predicting sequence
PDMRTPI

SEQ ID NO: 4199 - protein, 10 aa, Artificial sequence
  Protein classification predicting sequence
VIGNGPDIPW

SEQ ID NO: 4200 - protein, 17 aa, Artificial sequence
  Protein classification predicting sequence
VMGRKTFESIGKPLPNR

SEQ ID NO: 4201 - protein, 8 aa, Artificial sequence
  Protein classification predicting sequence
GDTHFPDY

SEQ ID NO: 4202 - protein, 8 aa, Artificial sequence
  Protein classification predicting sequence
GEQLLFKA

SEQ ID NO: 4203 - protein, 13 aa, Artificial sequence
  Protein classification predicting sequence
TYNQWLLVGRKTF

SEQ ID NO: 4204 - protein, 12 aa, Artificial sequence
  Protein classification predicting sequence
LPNRKYAVVTRS

SEQ ID NO: 4205 - protein, 9 aa, Artificial sequence
  Protein classification predicting sequence
LPNRKYAVV

SEQ ID NO: 4206 - protein, 7 aa, Artificial sequence
  Protein classification predicting sequence
VIMGRKT

SEQ ID NO: 4207 - protein, 6 aa, Artificial sequence
  Protein classification predicting sequence
IMGRKT

SEQ ID NO: 4208 - protein, 13 aa, Artificial sequence
  Protein classification predicting sequence
NQLPWHLPNDLKH

SEQ ID NO: 4209 - protein, 15 aa, Artificial sequence
  Protein classification predicting sequence
SIGKPLPNRRNVVLT

SEQ ID NO: 4210 - protein, 11 aa, Artificial sequence
  Protein classification predicting sequence
GHVFIFGGQTL

SEQ ID NO: 4211 - protein, 9 aa, Artificial sequence
  Protein classification predicting sequence
VDDMYITVI

SEQ ID NO: 4212 - protein, 11 aa, Artificial sequence
  Protein classification predicting sequence
GDTFFPPYTFE

SEQ ID NO: 4213 - protein, 14 aa, Artificial sequence
  Protein classification predicting sequence
LDEKNTIPHTFLHL

SEQ ID NO: 4214 - protein, 10 aa, Artificial sequence
  Protein classification predicting sequence
MGRKTFESIG

SEQ ID NO: 4215 - protein, 8 aa, Artificial sequence
  Protein classification predicting sequence
ESIGRPLP

SEQ ID NO: 4216 - protein, 8 aa, Artificial sequence
  Protein classification predicting sequence
KLYLTHID

SEQ ID NO: 4217 - protein, 9 aa, Artificial sequence
  Protein classification predicting sequence
LPWPPLRNE

SEQ ID NO: 4218 - protein, 27 aa, Artificial sequence
  Protein classification predicting sequence
KTWFSIPEKNRPLKDRINIVLSRELKE

SEQ ID NO: 4219 - protein, 6 aa, Artificial sequence
  Protein classification predicting sequence
LFVTRI

SEQ ID NO: 4220 - protein, 8 aa, Artificial sequence
  Protein classification predicting sequence
LPADLAWF

SEQ ID NO: 4221 - protein, 7 aa, Artificial sequence
  Protein classification predicting sequence
MGRRTWD

SEQ ID NO: 4222 - protein, 8 aa, Artificial sequence
  Protein classification predicting sequence
KQNLVIMG

SEQ ID NO: 4223 - protein, 7 aa, Artificial sequence
  Protein classification predicting sequence
PLPGRRN

SEQ ID NO: 4224 - protein, 7 aa, Artificial sequence
  Protein classification predicting sequence
LNCIVAV

SEQ ID NO: 4225 - protein, 7 aa, Artificial sequence
  Protein classification predicting sequence
KVDMVWI

SEQ ID NO: 4226 - protein, 8 aa, Artificial sequence
  Protein classification predicting sequence
DLEKYKLL

SEQ ID NO: 4227 - protein, 7 aa, Artificial sequence
  Protein classification predicting sequence
GGSSVYK

SEQ ID NO: 4228 - protein, 17 aa, Artificial sequence
  Protein classification predicting sequence
AGSTRPASGSEHLFAHA

SEQ ID NO: 4229 - protein, 7 aa, Artificial sequence
  Protein classification predicting sequence
GVGTIMM

SEQ ID NO: 4230 - protein, 10 aa, Artificial sequence
  Protein classification predicting sequence
IRPERYTILG

SEQ ID NO: 4231 - protein, 8 aa, Artificial sequence
  Protein classification predicting sequence
GSSRPASG

SEQ ID NO: 4232 - protein, 7 aa, Artificial sequence
  Protein classification predicting sequence
GVAMSIA

SEQ ID NO: 4233 - protein, 6 aa, Artificial sequence
  Protein classification predicting sequence
EHLFSH

SEQ ID NO: 4234 - protein, 7 aa, Artificial sequence
  Protein classification predicting sequence
LHGEQCG

SEQ ID NO: 4235 - protein, 7 aa, Artificial sequence
  Protein classification predicting sequence
SGSEHLF

SEQ ID NO: 4236 - protein, 12 aa, Artificial sequence
  Protein classification predicting sequence
ERYTILGDRGLT

SEQ ID NO: 4237 - protein, 7 aa, Artificial sequence
  Protein classification predicting sequence
SHDGIAS

SEQ ID NO: 4238 - protein, 7 aa, Artificial sequence
  Protein classification predicting sequence
IAGSSRP

SEQ ID NO: 4239 - protein, 9 aa, Artificial sequence
  Protein classification predicting sequence
RYLAAGVGD

SEQ ID NO: 4240 - protein, 8 aa, Artificial sequence
  Protein classification predicting sequence
AVRDWKLA

SEQ ID NO: 4241 - protein, 13 aa, Artificial sequence
  Protein classification predicting sequence
GTIIMAYLHGINW

SEQ ID NO: 4242 - protein, 17 aa, Artificial sequence
  Protein classification predicting sequence
ALTIAHTIRPERYTILG

SEQ ID NO: 4243 - protein, 31 aa, Artificial sequence
  Protein classification predicting sequence
DVIIVGAGVGGSALAYALAKDGRRVHVIERD

SEQ ID NO: 4244 - protein, 10 aa, Artificial sequence
  Protein classification predicting sequence
LGDAFNMRHP

SEQ ID NO: 4245 - protein, 12 aa, Artificial sequence
  Protein classification predicting sequence
STDEAKEAMRQG

SEQ ID NO: 4246 - protein, 9 aa, Artificial sequence
  Protein classification predicting sequence
VIERDLKEP

SEQ ID NO: 4247 - protein, 5 aa, Artificial sequence
  Protein classification predicting sequence
NMRHP

SEQ ID NO: 4248 - protein, 8 aa, Artificial sequence
  Protein classification predicting sequence
AEYAHPLE

SEQ ID NO: 4249 - protein, 11 aa, Artificial sequence
  Protein classification predicting sequence
SYEGSKRLVDL

SEQ ID NO: 4250 - protein, 10 aa, Artificial sequence
  Protein classification predicting sequence
FQANVFGPYY

SEQ ID NO: 4251 - protein, 15 aa, Artificial sequence
  Protein classification predicting sequence
DVVIVGAGPAGLSAA

SEQ ID NO: 4252 - protein, 8 aa, Artificial sequence
  Protein classification predicting sequence
ELFPDWKE

SEQ ID NO: 4253 - protein, 9 aa, Artificial sequence
  Protein classification predicting sequence
GAPLNTPVT

SEQ ID NO: 4254 - protein, 8 aa, Artificial sequence
  Protein classification predicting sequence
GGSFLYHL

SEQ ID NO: 4255 - protein, 7 aa, Artificial sequence
  Protein classification predicting sequence
HTAMKSG

SEQ ID NO: 4256 - protein, 7 aa, Artificial sequence
  Protein classification predicting sequence
CPAGVYE

SEQ ID NO: 4257 - protein, 18 aa, Artificial sequence
  Protein classification predicting sequence
QINAQNCVHCKTCDIKDP

SEQ ID NO: 4258 - protein, 8 aa, Artificial sequence
  Protein classification predicting sequence
NAVAPGFI

SEQ ID NO: 4259 - protein, 9 aa, Artificial sequence
  Protein classification predicting sequence
RGIGRAIAE

SEQ ID NO: 4260 - protein, 8 aa, Artificial sequence
  Protein classification predicting sequence
KVESPVVV

SEQ ID NO: 4261 - protein, 14 aa, Artificial sequence
  Protein classification predicting sequence
YGGQAITFGGDVSK

SEQ ID NO: 4262 - protein, 23 aa, Artificial sequence
  Protein classification predicting sequence
WGTIDVVVNNAGITRDTLLIRMK

SEQ ID NO: 4263 - protein, 18 aa, Artificial sequence
  Protein classification predicting sequence
SVVGLIGNIGQANYAAAK

SEQ ID NO: 4264 - protein, 30 aa, Artificial sequence
  Protein classification predicting sequence
FSKTAAREGASRNINVNVVCPGFIASDMTA

SEQ ID NO: 4265 - protein, 19 aa, Artificial sequence
  Protein classification predicting sequence
LGEDMEKKILGTIPLGRYG

SEQ ID NO: 4266 - protein, 14 aa, Artificial sequence
  Protein classification predicting sequence
VTGASRGIGRSIAL

SEQ ID NO: 4267 - protein, 6 aa, Artificial sequence
  Protein classification predicting sequence
EWDDVI

SEQ ID NO: 4268 - protein, 8 aa, Artificial sequence
  Protein classification predicting sequence
AAKAGVIG

SEQ ID NO: 4269 - protein, 8 aa, Artificial sequence
  Protein classification predicting sequence
QIPLARFG

SEQ ID NO: 4270 - protein, 15 aa, Artificial sequence
  Protein classification predicting sequence
GTIDVVVNNAGITRD

SEQ ID NO: 4271 - protein, 8 aa, Artificial sequence
  Protein classification predicting sequence
NYAAAKAG

SEQ ID NO: 4272 - protein, 10 aa, Artificial sequence
  Protein classification predicting sequence
APGFIETDMT

SEQ ID NO: 4273 - protein, 7 aa, Artificial sequence
  Protein classification predicting sequence
RSGAIIN

SEQ ID NO: 4274 - protein, 30 aa, Artificial sequence
  Protein classification predicting sequence
VTGASRGIGKAIALSLGKAGCKVLVNYARS

SEQ ID NO: 4275 - protein, 6 aa, Artificial sequence
  Protein classification predicting sequence
LLMRMK

SEQ ID NO: 4276 - protein, 7 aa, Artificial sequence
  Protein classification predicting sequence
RMKKSQW

SEQ ID NO: 4277 - protein, 13 aa, Artificial sequence
  Protein classification predicting sequence
KGRIINIASVVGL

SEQ ID NO: 4278 - protein, 8 aa, Artificial sequence
  Protein classification predicting sequence
GKIALVTG

SEQ ID NO: 4279 - protein, 7 aa, Artificial sequence
  Protein classification predicting sequence
TLHVNGG

SEQ ID NO: 4280 - protein, 10 aa, Artificial sequence
  Protein classification predicting sequence
QANYAAAKAG

SEQ ID NO: 4281 - protein, 6 aa, Artificial sequence
  Protein classification predicting sequence
QANYAA

SEQ ID NO: 4282 - protein, 7 aa, Artificial sequence
  Protein classification predicting sequence
TDMTRAL

SEQ ID NO: 4283 - protein, 7 aa, Artificial sequence
  Protein classification predicting sequence
VNGGMYM

SEQ ID NO: 4284 - protein, 35 aa, Artificial sequence
  Protein classification predicting sequence
KSALVTGASRGIGRSIALQLAEEGYNVAVNYAGSK

SEQ ID NO: 4285 - protein, 14 aa, Artificial sequence
  Protein classification predicting sequence
KAEAVVEEIKAKGV

SEQ ID NO: 4286 - protein, 9 aa, Artificial sequence
  Protein classification predicting sequence
SFAIQANVA

SEQ ID NO: 4287 - protein, 11 aa, Artificial sequence
  Protein classification predicting sequence
MIKEVVSQFGS

SEQ ID NO: 4288 - protein, 29 aa, Artificial sequence
  Protein classification predicting sequence
DNLLMRMKEQEWDDVIDTNLKGVFNCIQK

SEQ ID NO: 4289 - protein, 15 aa, Artificial sequence
  Protein classification predicting sequence
TPQMLRQRSGAIINL

SEQ ID NO: 4290 - protein, 25 aa, Artificial sequence
  Protein classification predicting sequence
AARELASRGITVNAVAPGFIVSDMT

SEQ ID NO: 4291 - protein, 20 aa, Artificial sequence
  Protein classification predicting sequence
EGKIALVTGASRGIGRAIAE

SEQ ID NO: 4292 - protein, 7 aa, Artificial sequence
  Protein classification predicting sequence
NAISAGP

SEQ ID NO: 4293 - protein, 8 aa, Artificial sequence
  Protein classification predicting sequence
LPIMNPGG

SEQ ID NO: 4294 - protein, 6 aa, Artificial sequence
  Protein classification predicting sequence
PNYNVM

SEQ ID NO: 4295 - protein, 14 aa, Artificial sequence
  Protein classification predicting sequence
SAGPIRTLAASGIK

SEQ ID NO: 4296 - protein, 14 aa, Artificial sequence
  Protein classification predicting sequence
VSVAEDELMRILIL

SEQ ID NO: 4297 - protein, 9 aa, Artificial sequence
  Protein classification predicting sequence
LLLQRLKPF

SEQ ID NO: 4298 - protein, 7 aa, Artificial sequence
  Protein classification predicting sequence
GSDHIDL

SEQ ID NO: 4299 - protein, 9 aa, Artificial sequence
  Protein classification predicting sequence
MTPHISGTT

SEQ ID NO: 4300 - protein, 8 aa, Artificial sequence
  Protein classification predicting sequence
CLLNTKIT

SEQ ID NO: 4301 - protein, 7 aa, Artificial sequence
  Protein classification predicting sequence
KAPENFR

SEQ ID NO: 4302 - protein, 11 aa, Artificial sequence
  Protein classification predicting sequence
GEKMYIQTRMA

SEQ ID NO: 4303 - protein, 7 aa, Artificial sequence
  Protein classification predicting sequence
EGQSIGI

SEQ ID NO: 4304 - protein, 11 aa, Artificial sequence
  Protein classification predicting sequence
IMLATGTGIAP

SEQ ID NO: 4305 - protein, 9 aa, Artificial sequence
  Protein classification predicting sequence
TGTGIAPFR

SEQ ID NO: 4306 - protein, 6 aa, Artificial sequence
  Protein classification predicting sequence
HEDYKF

SEQ ID NO: 4307 - protein, 11 aa, Artificial sequence
  Protein classification predicting sequence
IPPGENPKKPG

SEQ ID NO: 4308 - protein, 9 aa, Artificial sequence
  Protein classification predicting sequence
GAHIYFCGL

SEQ ID NO: 4309 - protein, 7 aa, Artificial sequence
  Protein classification predicting sequence
GMMPGIQ

SEQ ID NO: 4310 - protein, 8 aa, Artificial sequence
  Protein classification predicting sequence
PNATHIMI

SEQ ID NO: 4311 - protein, 9 aa, Artificial sequence
  Protein classification predicting sequence
GLAWLFLGV

SEQ ID NO: 4312 - protein, 9 aa, Artificial sequence
  Protein classification predicting sequence
KLRLYSIAS

SEQ ID NO: 4313 - protein, 14 aa, Artificial sequence
  Protein classification predicting sequence
KLRLYSIASTRHGD

SEQ ID NO: 4314 - protein, 7 aa, Artificial sequence
  Protein classification predicting sequence
AGQFTKL

SEQ ID NO: 4315 - protein, 9 aa, Artificial sequence
  Protein classification predicting sequence
SHVMLCGNP

SEQ ID NO: 4316 - protein, 6 aa, Artificial sequence
  Protein classification predicting sequence
GETCHI

SEQ ID NO: 4317 - protein, 12 aa, Artificial sequence
  Protein classification predicting sequence
WEGQSYGVIPPG

SEQ ID NO: 4318 - protein, 14 aa, Artificial sequence
  Protein classification predicting sequence
YFCGLKGMMPGIQD

SEQ ID NO: 4319 - protein, 7 aa, Artificial sequence
  Protein classification predicting sequence
VKGVCSN

SEQ ID NO: 4320 - protein, 7 aa, Artificial sequence
  Protein classification predicting sequence
YAISREQ

SEQ ID NO: 4321 - protein, 9 aa, Artificial sequence
  Protein classification predicting sequence
TGPVGKEML

SEQ ID NO: 4322 - protein, 8 aa, Artificial sequence
  Protein classification predicting sequence
VSLCVKRL

SEQ ID NO: 4323 - protein, 14 aa, Artificial sequence
  Protein classification predicting sequence
KGVCSNFLCDLKPG

SEQ ID NO: 4324 - protein, 7 aa, Artificial sequence
  Protein classification predicting sequence
KTVSLCV

SEQ ID NO: 4325 - protein, 10 aa, Artificial sequence
  Protein classification predicting sequence
ATGTGIAPFR

SEQ ID NO: 4326 - protein, 15 aa, Artificial sequence
  Protein classification predicting sequence
ATGTGIAPFRAFLWR

SEQ ID NO: 4327 - protein, 8 aa, Artificial sequence
  Protein classification predicting sequence
THTYICGL

SEQ ID NO: 4328 - protein, 8 aa, Artificial sequence
  Protein classification predicting sequence
IGKVISNE

SEQ ID NO: 4329 - protein, 10 aa, Artificial sequence
  Protein classification predicting sequence
RMNQEMQRIT

SEQ ID NO: 4330 - protein, 12 aa, Artificial sequence
  Protein classification predicting sequence
VKITGPVGKEML

SEQ ID NO: 4331 - protein, 6 aa, Artificial sequence
  Protein classification predicting sequence
RMNQEM

SEQ ID NO: 4332 - protein, 7 aa, Artificial sequence
  Protein classification predicting sequence
GGRMYIQ

SEQ ID NO: 4333 - protein, 7 aa, Artificial sequence
  Protein classification predicting sequence
ELLNIFN

SEQ ID NO: 4334 - protein, 9 aa, Artificial sequence
  Protein classification predicting sequence
VKQIGHKHR

SEQ ID NO: 4335 - protein, 11 aa, Artificial sequence
  Protein classification predicting sequence
IGHVHSGALGW

SEQ ID NO: 4336 - protein, 22 aa, Artificial sequence
  Protein classification predicting sequence
VNSLSHYTDWTIGHVHSGALGW

SEQ ID NO: 4337 - protein, 8 aa, Artificial sequence
  Protein classification predicting sequence
ACVDMDQK

SEQ ID NO: 4338 - protein, 10 aa, Artificial sequence
  Protein classification predicting sequence
RDYSRWPDKP

SEQ ID NO: 4339 - protein, 17 aa, Artificial sequence
  Protein classification predicting sequence
LSNGRFKNADHQAVVNS

SEQ ID NO: 4340 - protein, 12 aa, Artificial sequence
  Protein classification predicting sequence
DLELARLKKLAK

SEQ ID NO: 4341 - protein, 14 aa, Artificial sequence
  Protein classification predicting sequence
VQDWREIVTYFSYP

SEQ ID NO: 4342 - protein, 11 aa, Artificial sequence
  Protein classification predicting sequence
SRLSIATFQNP

SEQ ID NO: 4343 - protein, 25 aa, Artificial sequence
  Protein classification predicting sequence
CPQPDLTLGLKRHTDPGTITLLLQD

SEQ ID NO: 4344 - protein, 15 aa, Artificial sequence
  Protein classification predicting sequence
SNGRFKNADHQAVVN

SEQ ID NO: 4345 - protein, 9 aa, Artificial sequence
  Protein classification predicting sequence
ACEDWGIFQ

SEQ ID NO: 4346 - protein, 9 aa, Artificial sequence
  Protein classification predicting sequence
LAREFFALP

SEQ ID NO: 4347 - protein, 7 aa, Artificial sequence
  Protein classification predicting sequence
GQWEVVT

SEQ ID NO: 4348 - protein, 6 aa, Artificial sequence
  Protein classification predicting sequence
GMGNSG

SEQ ID NO: 4349 - protein, 12 aa, Artificial sequence
  Protein classification predicting sequence
GMGNSGTDIAVE

SEQ ID NO: 4350 - protein, 6 aa, Artificial sequence
  Protein classification predicting sequence
PYQFRL

SEQ ID NO: 4351 - protein, 11 aa, Artificial sequence
  Protein classification predicting sequence
PSIKEVKENSV

SEQ ID NO: 4352 - protein, 32 aa, Artificial sequence
  Protein classification predicting sequence
KRVAIVGAGVSGLASIKCCLEEGLEPTCFERS

SEQ ID NO: 4353 - protein, 10 aa, Artificial sequence
  Protein classification predicting sequence
DFPFPEDYPN

SEQ ID NO: 4354 - protein, 6 aa, Artificial sequence
  Protein classification predicting sequence
GYPWDM

SEQ ID NO: 4355 - protein, 6 aa, Artificial sequence
  Protein classification predicting sequence
TGQWDV

SEQ ID NO: 4356 - protein, 9 aa, Artificial sequence
  Protein classification predicting sequence
FDAVMVCTG

SEQ ID NO: 4357 - protein, 14 aa, Artificial sequence
  Protein classification predicting sequence
FDAVMVCTGFLTNP

SEQ ID NO: 4358 - protein, 15 aa, Artificial sequence
  Protein classification predicting sequence
KPTLAVIGLIKPLGS

SEQ ID NO: 4359 - protein, 6 aa, Artificial sequence
  Protein classification predicting sequence
EPVLND

SEQ ID NO: 4360 - protein, 8 aa, Artificial sequence
  Protein classification predicting sequence
PTGETQAR

SEQ ID NO: 4361 - protein, 20 aa, Artificial sequence
  Protein classification predicting sequence
DLGGLWRFTEHVEEGRASLY

SEQ ID NO: 4362 - protein, 5 aa, Artificial sequence
  Protein classification predicting sequence
KEMSC

SEQ ID NO: 4363 - protein, 11 aa, Artificial sequence
  Protein classification predicting sequence
KEMSCYSDFPF

SEQ ID NO: 4364 - protein, 15 aa, Artificial sequence
  Protein classification predicting sequence
FKGQYFHSRQYKHPD

SEQ ID NO: 4365 - protein, 7 aa, Artificial sequence
  Protein classification predicting sequence
FATGYSF

SEQ ID NO: 4366 - protein, 19 aa, Artificial sequence
  Protein classification predicting sequence
VKVEDGQASLYKYIFPAHL

SEQ ID NO: 4367 - protein, 9 aa, Artificial sequence
  Protein classification predicting sequence
PDFSSSGQW

SEQ ID NO: 4368 - protein, 14 aa, Artificial sequence
  Protein classification predicting sequence
FKGQYFHSRQYKHP

SEQ ID NO: 4369 - protein, 7 aa, Artificial sequence
  Protein classification predicting sequence
WFNHANY

SEQ ID NO: 4370 - protein, 8 aa, Artificial sequence
  Protein classification predicting sequence
NKYLMKEP

SEQ ID NO: 4371 - protein, 8 aa, Artificial sequence
  Protein classification predicting sequence
FEDGTVEE

SEQ ID NO: 4372 - protein, 8 aa, Artificial sequence
  Protein classification predicting sequence
NMVSLYKY

SEQ ID NO: 4373 - protein, 7 aa, Artificial sequence
  Protein classification predicting sequence
GLIQPLG

SEQ ID NO: 4374 - protein, 12 aa, Artificial sequence
  Protein classification predicting sequence
GLIQPLGSIFPT

SEQ ID NO: 4375 - protein, 19 aa, Artificial sequence
  Protein classification predicting sequence
DIIKRNEKRIDLFGESQSQ

SEQ ID NO: 4376 - protein, 20 aa, Artificial sequence
  Protein classification predicting sequence
QTNYVDYLDELALEIGAKPD

SEQ ID NO: 4377 - protein, 13 aa, Artificial sequence
  Protein classification predicting sequence
TQKQRILKPLKTR

SEQ ID NO: 4378 - protein, 9 aa, Artificial sequence
  Protein classification predicting sequence
AVFDAVMVC

SEQ ID NO: 4379 - protein, 5 aa, Artificial sequence
  Protein classification predicting sequence
GYPWD

SEQ ID NO: 4380 - protein, 6 aa, Artificial sequence
  Protein classification predicting sequence
VFHTRF

SEQ ID NO: 4381 - protein, 17 aa, Artificial sequence
  Protein classification predicting sequence
AAQVFISTRHGTWVMSR

SEQ ID NO: 4382 - protein, 5 aa, Artificial sequence
  Protein classification predicting sequence
WVMSR

SEQ ID NO: 4383 - protein, 10 aa, Artificial sequence
  Protein classification predicting sequence
VKWMIEQQMN

SEQ ID NO: 4384 - protein, 99 aa, Artificial sequence
  Protein classification predicting sequence
WFNHENYGLEPQNKYIMKEPVLNDDVPSRLLCGAIKVKSTVKELTETSAIFEDGTVEENIDVIIFATGYSFSFPFLEDSLVKVENNMVSLYKYIFPAHL

SEQ ID NO: 4385 - protein, 8 aa, Artificial sequence
  Protein classification predicting sequence
TRVFKGLC

SEQ ID NO: 4386 - protein, 11 aa, Artificial sequence
  Protein classification predicting sequence
FGPCNSYQYRL

SEQ ID NO: 4387 - protein, 9 aa, Artificial sequence
  Protein classification predicting sequence
GPGQWEGAR

SEQ ID NO: 4388 - protein, 10 aa, Artificial sequence
  Protein classification predicting sequence
VSFLLKILGL

SEQ ID NO: 4389 - protein, 8 aa, Artificial sequence
  Protein classification predicting sequence
VFDAVMVC

SEQ ID NO: 4390 - protein, 7 aa, Artificial sequence
  Protein classification predicting sequence
GQYFHSR

SEQ ID NO: 4391 - protein, 9 aa, Artificial sequence
  Protein classification predicting sequence
MKEPVLNDD

SEQ ID NO: 4392 - protein, 9 aa, Artificial sequence
  Protein classification predicting sequence
IVFATGYTF

SEQ ID NO: 4393 - protein, 10 aa, Artificial sequence
  Protein classification predicting sequence
FLEDSLVKVE

SEQ ID NO: 4394 - protein, 22 aa, Artificial sequence
  Protein classification predicting sequence
LQTNYVDYLDELALEIGAKPDF

SEQ ID NO: 4395 - protein, 51 aa, Artificial sequence
  Protein classification predicting sequence
TNTSKEMSCFSDFPMPEDFPNFLHNSKLLEYFRIFAKKFDLLKYIQFQTTV

SEQ ID NO: 4396 - protein, 15 aa, Artificial sequence
  Protein classification predicting sequence
WRFKENVEDGRASIY

SEQ ID NO: 4397 - protein, 9 aa, Artificial sequence
  Protein classification predicting sequence
SDIAVELSK

SEQ ID NO: 4398 - protein, 9 aa, Artificial sequence
  Protein classification predicting sequence
SMLRNVLPR

SEQ ID NO: 4399 - protein, 6 aa, Artificial sequence
  Protein classification predicting sequence
AIFEDG

SEQ ID NO: 4400 - protein, 7 aa, Artificial sequence
  Protein classification predicting sequence
DIIKRNE

SEQ ID NO: 4401 - protein, 15 aa, Artificial sequence
  Protein classification predicting sequence
DYLDELALEIGAKPD

SEQ ID NO: 4402 - protein, 19 aa, Artificial sequence
  Protein classification predicting sequence
CVDEGLEPTCFERTEDIGG

SEQ ID NO: 4403 - protein, 7 aa, Artificial sequence
  Protein classification predicting sequence
QSNGKEQ

SEQ ID NO: 4404 - protein, 13 aa, Artificial sequence
  Protein classification predicting sequence
QMNRWFNHENYGL

SEQ ID NO: 4405 - protein, 6 aa, Artificial sequence
  Protein classification predicting sequence
TRVFKG

SEQ ID NO: 4406 - protein, 10 aa, Artificial sequence
  Protein classification predicting sequence
RNEKRIDLFG

SEQ ID NO: 4407 - protein, 12 aa, Artificial sequence
  Protein classification predicting sequence
CLEEGLEPTCFE

SEQ ID NO: 4408 - protein, 9 aa, Artificial sequence
  Protein classification predicting sequence
FKGKCFHSR

SEQ ID NO: 4409 - protein, 6 aa, Artificial sequence
  Protein classification predicting sequence
HENYGL

SEQ ID NO: 4410 - protein, 10 aa, Artificial sequence
  Protein classification predicting sequence
LEKPTMAVIG

SEQ ID NO: 4411 - protein, 7 aa, Artificial sequence
  Protein classification predicting sequence
EVFFGPC

SEQ ID NO: 4412 - protein, 12 aa, Artificial sequence
  Protein classification predicting sequence
GARNAILTQWDR

SEQ ID NO: 4413 - protein, 13 aa, Artificial sequence
  Protein classification predicting sequence
NSSKEMMCFPDFP

SEQ ID NO: 4414 - protein, 9 aa, Artificial sequence
  Protein classification predicting sequence
GGLWKFSDH

SEQ ID NO: 4415 - protein, 8 aa, Artificial sequence
  Protein classification predicting sequence
EEGRASIY

SEQ ID NO: 4416 - protein, 7 aa, Artificial sequence
  Protein classification predicting sequence
LLKYIQF

SEQ ID NO: 4417 - protein, 5 aa, Artificial sequence
  Protein classification predicting sequence
CSGHH

SEQ ID NO: 4418 - protein, 15 aa, Artificial sequence
  Protein classification predicting sequence
FKGKCFHSRDYKEPG

SEQ ID NO: 4419 - protein, 13 aa, Artificial sequence
  Protein classification predicting sequence
QMNARFKHENYGL

SEQ ID NO: 4420 - protein, 9 aa, Artificial sequence
  Protein classification predicting sequence
LFLKDPRLA

SEQ ID NO: 4421 - protein, 6 aa, Artificial sequence
  Protein classification predicting sequence
DIGGLW

SEQ ID NO: 4422 - protein, 7 aa, Artificial sequence
  Protein classification predicting sequence
AVFDAVM

SEQ ID NO: 4423 - protein, 6 aa, Artificial sequence
  Protein classification predicting sequence
FKHENY

SEQ ID NO: 4424 - protein, 10 aa, Artificial sequence
  Protein classification predicting sequence
YMDELASFIG

SEQ ID NO: 4425 - protein, 10 aa, Artificial sequence
  Protein classification predicting sequence
NIPWLFLTDP

SEQ ID NO: 4426 - protein, 8 aa, Artificial sequence
  Protein classification predicting sequence
AILTQWDR

SEQ ID NO: 4427 - protein, 14 aa, Artificial sequence
  Protein classification predicting sequence
ISSRSGSWVMSRVW

SEQ ID NO: 4428 - protein, 13 aa, Artificial sequence
  Protein classification predicting sequence
FEGIDCVIFATGY

SEQ ID NO: 4429 - protein, 6 aa, Artificial sequence
  Protein classification predicting sequence
KCCVDE

SEQ ID NO: 4430 - protein, 7 aa, Artificial sequence
  Protein classification predicting sequence
EFTETSA

SEQ ID NO: 4431 - protein, 5 aa, Artificial sequence
  Protein classification predicting sequence
FFGPC

SEQ ID NO: 4432 - protein, 7 aa, Artificial sequence
  Protein classification predicting sequence
QVFLSTR

SEQ ID NO: 4433 - protein, 21 aa, Artificial sequence
  Protein classification predicting sequence
KDPRLAWEVFFGPCTPYQYRL

SEQ ID NO: 4434 - protein, 18 aa, Artificial sequence
  Protein classification predicting sequence
SLVTNVCKEMSCYSDFPF

SEQ ID NO: 4435 - protein, 7 aa, Artificial sequence
  Protein classification predicting sequence
VKEFTET

SEQ ID NO: 4436 - protein, 7 aa, Artificial sequence
  Protein classification predicting sequence
SKEMMCF

SEQ ID NO: 4437 - protein, 7 aa, Artificial sequence
  Protein classification predicting sequence
FFGPCTP

SEQ ID NO: 4438 - protein, 11 aa, Artificial sequence
  Protein classification predicting sequence
EEGLEPVCFER

SEQ ID NO: 4439 - protein, 6 aa, Artificial sequence
  Protein classification predicting sequence
PNFMHN

SEQ ID NO: 4440 - protein, 7 aa, Artificial sequence
  Protein classification predicting sequence
FDLLKYI

SEQ ID NO: 4441 - protein, 15 aa, Artificial sequence
  Protein classification predicting sequence
IGIGNSGGDLAVEIS

SEQ ID NO: 4442 - protein, 12 aa, Artificial sequence
  Protein classification predicting sequence
SLYKKVFPPNLE

SEQ ID NO: 4443 - protein, 16 aa, Artificial sequence
  Protein classification predicting sequence
AHLPLESFPGIEKFKG

SEQ ID NO: 4444 - protein, 8 aa, Artificial sequence
  Protein classification predicting sequence
IFATGYSF

SEQ ID NO: 4445 - protein, 11 aa, Artificial sequence
  Protein classification predicting sequence
SQRHTIQGDYI

SEQ ID NO: 4446 - protein, 10 aa, Artificial sequence
  Protein classification predicting sequence
SFPGIEKFKG

SEQ ID NO: 4447 - protein, 11 aa, Artificial sequence
  Protein classification predicting sequence
FPFLEDSVKVV

SEQ ID NO: 4448 - protein, 7 aa, Artificial sequence
  Protein classification predicting sequence
GVAPDHP

SEQ ID NO: 4449 - protein, 7 aa, Artificial sequence
  Protein classification predicting sequence
GNVALDV

SEQ ID NO: 4450 - protein, 7 aa, Artificial sequence
  Protein classification predicting sequence
WGCPWSR

SEQ ID NO: 4451 - protein, 13 aa, Artificial sequence
  Protein classification predicting sequence
DMEFVQYHPTGLP

SEQ ID NO: 4452 - protein, 7 aa, Artificial sequence
  Protein classification predicting sequence
MELGPRD

SEQ ID NO: 4453 - protein, 6 aa, Artificial sequence
  Protein classification predicting sequence
HYMMGG

SEQ ID NO: 4454 - protein, 10 aa, Artificial sequence
  Protein classification predicting sequence
GANRLGSNSL

SEQ ID NO: 4455 - protein, 6 aa, Artificial sequence
  Protein classification predicting sequence
RWSCRM

SEQ ID NO: 4456 - protein, 7 aa, Artificial sequence
  Protein classification predicting sequence
PFEEVKK

SEQ ID NO: 4457 - protein, 9 aa, Artificial sequence
  Protein classification predicting sequence
NEQINVEYN

SEQ ID NO: 4458 - protein, 9 aa, Artificial sequence
  Protein classification predicting sequence
LEKLVNEKL

SEQ ID NO: 4459 - protein, 8 aa, Artificial sequence
  Protein classification predicting sequence
DFIESEFL

SEQ ID NO: 4460 - protein, 10 aa, Artificial sequence
  Protein classification predicting sequence
INEQINVEYN

SEQ ID NO: 4461 - protein, 18 aa, Artificial sequence
  Protein classification predicting sequence
EKGDALYAMELALSLEKL

SEQ ID NO: 4462 - protein, 6 aa, Artificial sequence
  Protein classification predicting sequence
ELYASY

SEQ ID NO: 4463 - protein, 6 aa, Artificial sequence
  Protein classification predicting sequence
AKFFKE

SEQ ID NO: 4464 - protein, 7 aa, Artificial sequence
  Protein classification predicting sequence
QNKRGGR

SEQ ID NO: 4465 - protein, 7 aa, Artificial sequence
  Protein classification predicting sequence
DPHLCDF

SEQ ID NO: 4466 - protein, 7 aa, Artificial sequence
  Protein classification predicting sequence
QINVEYN

SEQ ID NO: 4467 - protein, 8 aa, Artificial sequence
  Protein classification predicting sequence
LKGFAKFF

SEQ ID NO: 4468 - protein, 17 aa, Artificial sequence
  Protein classification predicting sequence
AMELALSLEKLTNEKLL

SEQ ID NO: 4469 - protein, 8 aa, Artificial sequence
  Protein classification predicting sequence
SQVRQNYH

SEQ ID NO: 4470 - protein, 7 aa, Artificial sequence
  Protein classification predicting sequence
LQDIKKP

SEQ ID NO: 4471 - protein, 8 aa, Artificial sequence
  Protein classification predicting sequence
LHKLATDK

SEQ ID NO: 4472 - protein, 11 aa, Artificial sequence
  Protein classification predicting sequence
NGMGEYLFDKH

SEQ ID NO: 4473 - protein, 7 aa, Artificial sequence
  Protein classification predicting sequence
EYLFDKH

SEQ ID NO: 4474 - protein, 7 aa, Artificial sequence
  Protein classification predicting sequence
GVIFEPF

SEQ ID NO: 4475 - protein, 7 aa, Artificial sequence
  Protein classification predicting sequence
EQVKSIK

SEQ ID NO: 4476 - protein, 7 aa, Artificial sequence
  Protein classification predicting sequence
EYVAQLR

SEQ ID NO: 4477 - protein, 7 aa, Artificial sequence
  Protein classification predicting sequence
LVPTVPQ

SEQ ID NO: 4478 - protein, 6 aa, Artificial sequence
  Protein classification predicting sequence
HAEKLM

SEQ ID NO: 4479 - protein, 7 aa, Artificial sequence
  Protein classification predicting sequence
DVQLADF

SEQ ID NO: 4480 - protein, 5 aa, Artificial sequence
  Protein classification predicting sequence
WHFDQ

SEQ ID NO: 4481 - protein, 15 aa, Artificial sequence
  Protein classification predicting sequence
SYVYHSLFAYFDRDN

SEQ ID NO: 4482 - protein, 12 aa, Artificial sequence
  Protein classification predicting sequence
VGKGHGVWHFDQ

SEQ ID NO: 4483 - protein, 7 aa, Artificial sequence
  Protein classification predicting sequence
GVVFEPF

SEQ ID NO: 4484 - protein, 11 aa, Artificial sequence
  Protein classification predicting sequence
EVKKELDLVPT

SEQ ID NO: 4485 - protein, 7 aa, Artificial sequence
  Protein classification predicting sequence
SLARQKY

SEQ ID NO: 4486 - protein, 7 aa, Artificial sequence
  Protein classification predicting sequence
AYFDRDN

SEQ ID NO: 4487 - protein, 10 aa, Artificial sequence
  Protein classification predicting sequence
MELALSLEKL

SEQ ID NO: 4488 - protein, 9 aa, Artificial sequence
  Protein classification predicting sequence
ISEYVAQLR

SEQ ID NO: 4489 - protein, 9 aa, Artificial sequence
  Protein classification predicting sequence
GHGVWHFDQ

SEQ ID NO: 4490 - protein, 5 aa, Artificial sequence
  Protein classification predicting sequence
RQNYH

SEQ ID NO: 4491 - protein, 7 aa, Artificial sequence
  Protein classification predicting sequence
EAAINRQ

SEQ ID NO: 4492 - protein, 7 aa, Artificial sequence
  Protein classification predicting sequence
EEREHAE

SEQ ID NO: 4493 - protein, 13 aa, Artificial sequence
  Protein classification predicting sequence
VNQSLLELHKLAT

SEQ ID NO: 4494 - protein, 14 aa, Artificial sequence
  Protein classification predicting sequence
LGDHVTNLRKMGAP

SEQ ID NO: 4495 - protein, 7 aa, Artificial sequence
  Protein classification predicting sequence
IKELGDH

SEQ ID NO: 4496 - protein, 7 aa, Artificial sequence
  Protein classification predicting sequence
CALHLEK

SEQ ID NO: 4497 - protein, 21 aa, Artificial sequence
  Protein classification predicting sequence
EAAINRQINLELYASYVYLSM

SEQ ID NO: 4498 - protein, 9 aa, Artificial sequence
  Protein classification predicting sequence
LMKLQNQRG

SEQ ID NO: 4499 - protein, 16 aa, Artificial sequence
  Protein classification predicting sequence
RIFLQDIKKPDRDDWE

SEQ ID NO: 4500 - protein, 8 aa, Artificial sequence
  Protein classification predicting sequence
TNLRKMGA

SEQ ID NO: 4501 - protein, 10 aa, Artificial sequence
  Protein classification predicting sequence
VNQALLDLHK

SEQ ID NO: 4502 - protein, 8 aa, Artificial sequence
  Protein classification predicting sequence
LGDHITNL

SEQ ID NO: 4503 - protein, 6 aa, Artificial sequence
  Protein classification predicting sequence
YASYVY

SEQ ID NO: 4504 - protein, 9 aa, Artificial sequence
  Protein classification predicting sequence
FEPFEEVKK

SEQ ID NO: 4505 - protein, 8 aa, Artificial sequence
  Protein classification predicting sequence
VHSVADRN

SEQ ID NO: 4506 - protein, 15 aa, Artificial sequence
  Protein classification predicting sequence
MEQHQEELATIEALD

SEQ ID NO: 4507 - protein, 7 aa, Artificial sequence
  Protein classification predicting sequence
DDWESGL

SEQ ID NO: 4508 - protein, 6 aa, Artificial sequence
  Protein classification predicting sequence
RDDVAL

SEQ ID NO: 4509 - protein, 6 aa, Artificial sequence
  Protein classification predicting sequence
QMSAWC

SEQ ID NO: 4510 - protein, 8 aa, Artificial sequence
  Protein classification predicting sequence
FNFLQWYV

SEQ ID NO: 4511 - protein, 11 aa, Artificial sequence
  Protein classification predicting sequence
YRGDWRGMSGG

SEQ ID NO: 4512 - protein, 12 aa, Artificial sequence
  Protein classification predicting sequence
LQVMTNGRFKSV

SEQ ID NO: 4513 - protein, 7 aa, Artificial sequence
  Protein classification predicting sequence
VAVNDPF

SEQ ID NO: 4514 - protein, 7 aa, Artificial sequence
  Protein classification predicting sequence
LAKVIND

SEQ ID NO: 4515 - protein, 8 aa, Artificial sequence
  Protein classification predicting sequence
TATQKTVD

SEQ ID NO: 4516 - protein, 7 aa, Artificial sequence
  Protein classification predicting sequence
AAQNIIP

SEQ ID NO: 4517 - protein, 16 aa, Artificial sequence
  Protein classification predicting sequence
AAQNIIPSSTGAAKAV

SEQ ID NO: 4518 - protein, 6 aa, Artificial sequence
  Protein classification predicting sequence
GILGYT

SEQ ID NO: 4519 - protein, 6 aa, Artificial sequence
  Protein classification predicting sequence
VVSTDF

SEQ ID NO: 4520 - protein, 7 aa, Artificial sequence
  Protein classification predicting sequence
EVVAVND

SEQ ID NO: 4521 - protein, 6 aa, Artificial sequence
  Protein classification predicting sequence
YDSVHG

SEQ ID NO: 4522 - protein, 7 aa, Artificial sequence
  Protein classification predicting sequence
GVNEDKY

SEQ ID NO: 4523 - protein, 7 aa, Artificial sequence
  Protein classification predicting sequence
EKASAHL

SEQ ID NO: 4524 - protein, 33 aa, Artificial sequence
  Protein classification predicting sequence
SNASCTTNCLAPLAKVINDNFGIIEGLMTTVHA

SEQ ID NO: 4525 - protein, 23 aa, Artificial sequence
  Protein classification predicting sequence
LNGKLTGMAFRVPTPDVSVVDLT

SEQ ID NO: 4526 - protein, 6 aa, Artificial sequence
  Protein classification predicting sequence
KVLPEL

SEQ ID NO: 4527 - protein, 8 aa, Artificial sequence
  Protein classification predicting sequence
YTEDAVVS

SEQ ID NO: 4528 - protein, 11 aa, Artificial sequence
  Protein classification predicting sequence
FVKLVSWYDNE

SEQ ID NO: 4529 - protein, 9 aa, Artificial sequence
  Protein classification predicting sequence
DSTHGRFKG

SEQ ID NO: 4530 - protein, 12 aa, Artificial sequence
  Protein classification predicting sequence
TGAAKAVGKVIP

SEQ ID NO: 4531 - protein, 10 aa, Artificial sequence
  Protein classification predicting sequence
VSVVDLTVRL

SEQ ID NO: 4532 - protein, 7 aa, Artificial sequence
  Protein classification predicting sequence
PEEIPWG

SEQ ID NO: 4533 - protein, 16 aa, Artificial sequence
  Protein classification predicting sequence
IPSSTGAAKAVGKVLP

SEQ ID NO: 4534 - protein, 6 aa, Artificial sequence
  Protein classification predicting sequence
YMVYMF

SEQ ID NO: 4535 - protein, 6 aa, Artificial sequence
  Protein classification predicting sequence
YDSTHG

SEQ ID NO: 4536 - protein, 22 aa, Artificial sequence
  Protein classification predicting sequence
FGIVEGLMTTVHAITATQKTVD

SEQ ID NO: 4537 - protein, 7 aa, Artificial sequence
  Protein classification predicting sequence
PSGKLWR

SEQ ID NO: 4538 - protein, 7 aa, Artificial sequence
  Protein classification predicting sequence
GRGAAQN

SEQ ID NO: 4539 - protein, 8 aa, Artificial sequence
  Protein classification predicting sequence
YDSTHGKF

SEQ ID NO: 4540 - protein, 7 aa, Artificial sequence
  Protein classification predicting sequence
VIISAPS

SEQ ID NO: 4541 - protein, 6 aa, Artificial sequence
  Protein classification predicting sequence
DAPMFV

SEQ ID NO: 4542 - protein, 15 aa, Artificial sequence
  Protein classification predicting sequence
DAPMFVMGVNHEKYD

SEQ ID NO: 4543 - protein, 8 aa, Artificial sequence
  Protein classification predicting sequence
GVNHEKYD

SEQ ID NO: 4544 - protein, 14 aa, Artificial sequence
  Protein classification predicting sequence
LNGKLTGMAFRVPT

SEQ ID NO: 4545 - protein, 21 aa, Artificial sequence
  Protein classification predicting sequence
NVSVVDLTCRLEKPAKYDDIK

SEQ ID NO: 4546 - protein, 15 aa, Artificial sequence
  Protein classification predicting sequence
HSSTFDAGAGIALND

SEQ ID NO: 4547 - protein, 11 aa, Artificial sequence
  Protein classification predicting sequence
DVSVVDLTVKL

SEQ ID NO: 4548 - protein, 8 aa, Artificial sequence
  Protein classification predicting sequence
IFDASAGI

SEQ ID NO: 4549 - protein, 5 aa, Artificial sequence
  Protein classification predicting sequence
YMVYM

SEQ ID NO: 4550 - protein, 59 aa, Artificial sequence
  Protein classification predicting sequence
YMAYMLKYDSTHGRFDGTVEVKDGHLIVNGKKIRVTAERDPANLKWDEVGVDVVAEATG

SEQ ID NO: 4551 - protein, 20 aa, Artificial sequence
  Protein classification predicting sequence
TGPSKDNTPMFVKGANFDKY

SEQ ID NO: 4552 - protein, 7 aa, Artificial sequence
  Protein classification predicting sequence
KYDSTHG

SEQ ID NO: 4553 - protein, 8 aa, Artificial sequence
  Protein classification predicting sequence
AHLKGGAK

SEQ ID NO: 4554 - protein, 6 aa, Artificial sequence
  Protein classification predicting sequence
DAPMYV

SEQ ID NO: 4555 - protein, 16 aa, Artificial sequence
  Protein classification predicting sequence
INGFGRIGRLAFRRIQ

SEQ ID NO: 4556 - protein, 37 aa, Artificial sequence
  Protein classification predicting sequence
VEGLEVVAVNDLTDDDMLAHLLKYDTMQGRFTGEVEV

SEQ ID NO: 4557 - protein, 9 aa, Artificial sequence
  Protein classification predicting sequence
GGFRVNGKE

SEQ ID NO: 4558 - protein, 14 aa, Artificial sequence
  Protein classification predicting sequence
IDVVLECTGFYTDK

SEQ ID NO: 4559 - protein, 9 aa, Artificial sequence
  Protein classification predicting sequence
HIDAGAKKV

SEQ ID NO: 4560 - protein, 6 aa, Artificial sequence
  Protein classification predicting sequence
VFNTNH

SEQ ID NO: 4561 - protein, 25 aa, Artificial sequence
  Protein classification predicting sequence
LDGSETVVSGASCTTNSLAPVAKVL

SEQ ID NO: 4562 - protein, 11 aa, Artificial sequence
  Protein classification predicting sequence
MTTIHAYTGDQ

SEQ ID NO: 4563 - protein, 76 aa, Artificial sequence
  Protein classification predicting sequence
MTTIHAYTGDQNTQDAPHRKGDKRRARAAAENIIPNSTGAAKAIGKVIPEIDGKLDGGAQRVPVATGSLTELTVVL

SEQ ID NO: 4564 - protein, 17 aa, Artificial sequence
  Protein classification predicting sequence
VGMTYGSLFDATQTRVM

SEQ ID NO: 4565 - protein, 28 aa, Artificial sequence
  Protein classification predicting sequence
VGDRQLVKVAAWYDNEMSYTAQLVRTLA

SEQ ID NO: 4566 - protein, 7 aa, Artificial sequence
  Protein classification predicting sequence
ISAPSKD

SEQ ID NO: 4567 - protein, 14 aa, Artificial sequence
  Protein classification predicting sequence
IVSNASCTTNCLAP

SEQ ID NO: 4568 - protein, 8 aa, Artificial sequence
  Protein classification predicting sequence
EGELKGIL

SEQ ID NO: 4569 - protein, 9 aa, Artificial sequence
  Protein classification predicting sequence
KVVSWYDNE

SEQ ID NO: 4570 - protein, 10 aa, Artificial sequence
  Protein classification predicting sequence
NDPFIEPHYA

SEQ ID NO: 4571 - protein, 7 aa, Artificial sequence
  Protein classification predicting sequence
IVEGLMT

SEQ ID NO: 4572 - protein, 8 aa, Artificial sequence
  Protein classification predicting sequence
QKTVDGPS

SEQ ID NO: 4573 - protein, 7 aa, Artificial sequence
  Protein classification predicting sequence
LNKNFVK

SEQ ID NO: 4574 - protein, 6 aa, Artificial sequence
  Protein classification predicting sequence
GYSRRV

SEQ ID NO: 4575 - protein, 13 aa, Artificial sequence
  Protein classification predicting sequence
INGFGRIGRLVLR

SEQ ID NO: 4576 - protein, 10 aa, Artificial sequence
  Protein classification predicting sequence
DSTGVFKELD

SEQ ID NO: 4577 - protein, 19 aa, Artificial sequence
  Protein classification predicting sequence
AQKHIDAGAKKVVITAPSS

SEQ ID NO: 4578 - protein, 9 aa, Artificial sequence
  Protein classification predicting sequence
APMFVVGVN

SEQ ID NO: 4579 - protein, 11 aa, Artificial sequence
  Protein classification predicting sequence
TATQKTVDGPS

SEQ ID NO: 4580 - protein, 6 aa, Artificial sequence
  Protein classification predicting sequence
VVAVND

SEQ ID NO: 4581 - protein, 10 aa, Artificial sequence
  Protein classification predicting sequence
NDPFIDLEYM

SEQ ID NO: 4582 - protein, 10 aa, Artificial sequence
  Protein classification predicting sequence
ISAPSADAPM

SEQ ID NO: 4583 - protein, 7 aa, Artificial sequence
  Protein classification predicting sequence
VCGVNLD

SEQ ID NO: 4584 - protein, 7 aa, Artificial sequence
  Protein classification predicting sequence
LAKVIHD

SEQ ID NO: 4585 - protein, 7 aa, Artificial sequence
  Protein classification predicting sequence
LNGKLTG

SEQ ID NO: 4586 - protein, 7 aa, Artificial sequence
  Protein classification predicting sequence
PELKGKL

SEQ ID NO: 4587 - protein, 15 aa, Artificial sequence
  Protein classification predicting sequence
VGINGFGRIGRLVLR

SEQ ID NO: 4588 - protein, 14 aa, Artificial sequence
  Protein classification predicting sequence
GINGFGRIGRLVLR

SEQ ID NO: 4589 - protein, 13 aa, Artificial sequence
  Protein classification predicting sequence
EGKSQHKIKVYNS

SEQ ID NO: 4590 - protein, 9 aa, Artificial sequence
  Protein classification predicting sequence
GYSNRVVDL

SEQ ID NO: 4591 - protein, 7 aa, Artificial sequence
  Protein classification predicting sequence
AVNDPFI

SEQ ID NO: 4592 - protein, 17 aa, Artificial sequence
  Protein classification predicting sequence
SNASCTTNCLAPLAKVI

SEQ ID NO: 4593 - protein, 6 aa, Artificial sequence
  Protein classification predicting sequence
TYDEIK

SEQ ID NO: 4594 - protein, 7 aa, Artificial sequence
  Protein classification predicting sequence
SEGKLKG

SEQ ID NO: 4595 - protein, 19 aa, Artificial sequence
  Protein classification predicting sequence
SNASCTTNCLAPLAKVIHD

SEQ ID NO: 4596 - protein, 10 aa, Artificial sequence
  Protein classification predicting sequence
GYSNRVVDLM

SEQ ID NO: 4597 - protein, 9 aa, Artificial sequence
  Protein classification predicting sequence
KDWRGGRTA

SEQ ID NO: 4598 - protein, 9 aa, Artificial sequence
  Protein classification predicting sequence
WYDNEYGYS

SEQ ID NO: 4599 - protein, 9 aa, Artificial sequence
  Protein classification predicting sequence
GYTEDAVVS

SEQ ID NO: 4600 - protein, 9 aa, Artificial sequence
  Protein classification predicting sequence
GYSTRVVDL

SEQ ID NO: 4601 - protein, 13 aa, Artificial sequence
  Protein classification predicting sequence
NGYGTIGKRVADA

SEQ ID NO: 4602 - protein, 6 aa, Artificial sequence
  Protein classification predicting sequence
QTKVME

SEQ ID NO: 4603 - protein, 10 aa, Artificial sequence
  Protein classification predicting sequence
NDPFIDLDYM

SEQ ID NO: 4604 - protein, 11 aa, Artificial sequence
  Protein classification predicting sequence
VSWYDNEWGYS

SEQ ID NO: 4605 - protein, 20 aa, Artificial sequence
  Protein classification predicting sequence
TNIAINGMGRIGRMVLRIAL

SEQ ID NO: 4606 - protein, 14 aa, Artificial sequence
  Protein classification predicting sequence
AINASYPPETIAHL

SEQ ID NO: 4607 - protein, 6 aa, Artificial sequence
  Protein classification predicting sequence
KVEPIE

SEQ ID NO: 4608 - protein, 11 aa, Artificial sequence
  Protein classification predicting sequence
ATGKFNHGDKA

SEQ ID NO: 4609 - protein, 15 aa, Artificial sequence
  Protein classification predicting sequence
AGAKKVLLTGPSKGG

SEQ ID NO: 4610 - protein, 11 aa, Artificial sequence
  Protein classification predicting sequence
VKGVNDNQLDI

SEQ ID NO: 4611 - protein, 21 aa, Artificial sequence
  Protein classification predicting sequence
DIFSNASCTTNCIGPVAKVLN

SEQ ID NO: 4612 - protein, 51 aa, Artificial sequence
  Protein classification predicting sequence
NGLMTTVHAITNDQKNIDNPHKDLRRARSCNESIIPTSTGAAKALKEVLPE

SEQ ID NO: 4613 - protein, 26 aa, Artificial sequence
  Protein classification predicting sequence
EGKLHGMALRVPTKNVSLVDLVVDLE

SEQ ID NO: 4614 - protein, 20 aa, Artificial sequence
  Protein classification predicting sequence
NKVKVIAWYDNEWGYSNRVV

SEQ ID NO: 4615 - protein, 18 aa, Artificial sequence
  Protein classification predicting sequence
KVGINGFGRIGRIVFRNA

SEQ ID NO: 4616 - protein, 21 aa, Artificial sequence
  Protein classification predicting sequence
AAQNIIPSSTGAAKAVGKVIP

SEQ ID NO: 4617 - protein, 8 aa, Artificial sequence
  Protein classification predicting sequence
LNGKLTGM

SEQ ID NO: 4618 - protein, 7 aa, Artificial sequence
  Protein classification predicting sequence
KAGISLN

SEQ ID NO: 4619 - protein, 6 aa, Artificial sequence
  Protein classification predicting sequence
ERDPAN

SEQ ID NO: 4620 - protein, 19 aa, Artificial sequence
  Protein classification predicting sequence
IVSNASCTTNCLAPLAKVI

SEQ ID NO: 4621 - protein, 7 aa, Artificial sequence
  Protein classification predicting sequence
ECTGFYT

SEQ ID NO: 4622 - protein, 17 aa, Artificial sequence
  Protein classification predicting sequence
ASCTTNCLAPMAKALHD

SEQ ID NO: 4623 - protein, 7 aa, Artificial sequence
  Protein classification predicting sequence
NESFGYT

SEQ ID NO: 4624 - protein, 6 aa, Artificial sequence
  Protein classification predicting sequence
FDATQT

SEQ ID NO: 4625 - protein, 16 aa, Artificial sequence
  Protein classification predicting sequence
ELGIDIVIEGTGVFVD

SEQ ID NO: 4626 - protein, 10 aa, Artificial sequence
  Protein classification predicting sequence
VIEGTGVFVD

SEQ ID NO: 4627 - protein, 7 aa, Artificial sequence
  Protein classification predicting sequence
NDSGGVK

SEQ ID NO: 4628 - protein, 8 aa, Artificial sequence
  Protein classification predicting sequence
VIEGTGVF

SEQ ID NO: 4629 - protein, 9 aa, Artificial sequence
  Protein classification predicting sequence
ASHLLKYDS

SEQ ID NO: 4630 - protein, 56 aa, Artificial sequence
  Protein classification predicting sequence
IISNASCTTNCLAPFVKVLDQKFGIIKGTMTTTHSYTGDQRLLDASHRDLRRARAA

SEQ ID NO: 4631 - protein, 30 aa, Artificial sequence
  Protein classification predicting sequence
KGTMTTTHSYTGDQRLLDASHRDLRRARAA

SEQ ID NO: 4632 - protein, 12 aa, Artificial sequence
  Protein classification predicting sequence
HLLKYDSILGTF

SEQ ID NO: 4633 - protein, 7 aa, Artificial sequence
  Protein classification predicting sequence
RNPEEIP

SEQ ID NO: 4634 - protein, 8 aa, Artificial sequence
  Protein classification predicting sequence
VESTGVFT

SEQ ID NO: 4635 - protein, 29 aa, Artificial sequence
  Protein classification predicting sequence
KDWRGGRAASFNIIPSSTGAAKAVGKVLP

SEQ ID NO: 4636 - protein, 14 aa, Artificial sequence
  Protein classification predicting sequence
KIGINGFGRIGRLV

SEQ ID NO: 4637 - protein, 7 aa, Artificial sequence
  Protein classification predicting sequence
KGVLAYT

SEQ ID NO: 4638 - protein, 8 aa, Artificial sequence
  Protein classification predicting sequence
KYDSTHGR

SEQ ID NO: 4639 - protein, 7 aa, Artificial sequence
  Protein classification predicting sequence
KDKAAAH

SEQ ID NO: 4640 - protein, 7 aa, Artificial sequence
  Protein classification predicting sequence
KGGAKKV

SEQ ID NO: 4641 - protein, 8 aa, Artificial sequence
  Protein classification predicting sequence
KDWRGGRG

SEQ ID NO: 4642 - protein, 8 aa, Artificial sequence
  Protein classification predicting sequence
DLIAHISK

SEQ ID NO: 4643 - protein, 6 aa, Artificial sequence
  Protein classification predicting sequence
YMFKYD

SEQ ID NO: 4644 - protein, 10 aa, Artificial sequence
  Protein classification predicting sequence
YVVESTGVFT

SEQ ID NO: 4645 - protein, 13 aa, Artificial sequence
  Protein classification predicting sequence
KAAAHLKGGAKKV

SEQ ID NO: 4646 - protein, 13 aa, Artificial sequence
  Protein classification predicting sequence
RSSIFDAKAGIAL

SEQ ID NO: 4647 - protein, 12 aa, Artificial sequence
  Protein classification predicting sequence
WYDNEWGYSSRV

SEQ ID NO: 4648 - protein, 12 aa, Artificial sequence
  Protein classification predicting sequence
ELVAVNDPFITT

SEQ ID NO: 4649 - protein, 10 aa, Artificial sequence
  Protein classification predicting sequence
ELVAVNDPFI

SEQ ID NO: 4650 - protein, 6 aa, Artificial sequence
  Protein classification predicting sequence
DSTHGR

SEQ ID NO: 4651 - protein, 27 aa, Artificial sequence
  Protein classification predicting sequence
KDWRGGRGAGANIIPSSTGAAKAVGKV

SEQ ID NO: 4652 - protein, 7 aa, Artificial sequence
  Protein classification predicting sequence
FDAGAGI

SEQ ID NO: 4653 - protein, 8 aa, Artificial sequence
  Protein classification predicting sequence
LKYDSTHG

SEQ ID NO: 4654 - protein, 9 aa, Artificial sequence
  Protein classification predicting sequence
GRFDGTVEV

SEQ ID NO: 4655 - protein, 9 aa, Artificial sequence
  Protein classification predicting sequence
KDWRGGRGA

SEQ ID NO: 4656 - protein, 6 aa, Artificial sequence
  Protein classification predicting sequence
KAVGKV

SEQ ID NO: 4657 - protein, 6 aa, Artificial sequence
  Protein classification predicting sequence
VVSSDF

SEQ ID NO: 4658 - protein, 19 aa, Artificial sequence
  Protein classification predicting sequence
FNIIPSSTGAAKAVGKVLP

SEQ ID NO: 4659 - protein, 7 aa, Artificial sequence
  Protein classification predicting sequence
DVVSTDF

SEQ ID NO: 4660 - protein, 10 aa, Artificial sequence
  Protein classification predicting sequence
APMFVVGVNE

SEQ ID NO: 4661 - protein, 12 aa, Artificial sequence
  Protein classification predicting sequence
VSVVDLTVRIEK

SEQ ID NO: 4662 - protein, 9 aa, Artificial sequence
  Protein classification predicting sequence
RNPEEIPWG

SEQ ID NO: 4663 - protein, 14 aa, Artificial sequence
  Protein classification predicting sequence
GDNRSSIFDAKAGI

SEQ ID NO: 4664 - protein, 10 aa, Artificial sequence
  Protein classification predicting sequence
GVNEDKYTSD

SEQ ID NO: 4665 - protein, 8 aa, Artificial sequence
  Protein classification predicting sequence
EGLMTTVH

SEQ ID NO: 4666 - protein, 6 aa, Artificial sequence
  Protein classification predicting sequence
KPVTVF

SEQ ID NO: 4667 - protein, 17 aa, Artificial sequence
  Protein classification predicting sequence
ISAPSKDAPMFVVGVNE

SEQ ID NO: 4668 - protein, 19 aa, Artificial sequence
  Protein classification predicting sequence
SNASCTTNCLAPLAKVIND

SEQ ID NO: 4669 - protein, 14 aa, Artificial sequence
  Protein classification predicting sequence
APMFVVGVNEKEYK

SEQ ID NO: 4670 - protein, 18 aa, Artificial sequence
  Protein classification predicting sequence
IVSNASCTTNCLAPLAKV

SEQ ID NO: 4671 - protein, 7 aa, Artificial sequence
  Protein classification predicting sequence
KTVDGPS

SEQ ID NO: 4672 - protein, 8 aa, Artificial sequence
  Protein classification predicting sequence
RLEKAATY

SEQ ID NO: 4673 - protein, 5 aa, Artificial sequence
  Protein classification predicting sequence
HGQWK

SEQ ID NO: 4674 - protein, 10 aa, Artificial sequence
  Protein classification predicting sequence
TGAAKAVGKV

SEQ ID NO: 4675 - protein, 11 aa, Artificial sequence
  Protein classification predicting sequence
VNDPFISTDYM

SEQ ID NO: 4676 - protein, 7 aa, Artificial sequence
  Protein classification predicting sequence
LTVRLEK

SEQ ID NO: 4677 - protein, 6 aa, Artificial sequence
  Protein classification predicting sequence
AIKEES

SEQ ID NO: 4678 - protein, 13 aa, Artificial sequence
  Protein classification predicting sequence
GAEYVVESTGVFT

SEQ ID NO: 4679 - protein, 8 aa, Artificial sequence
  Protein classification predicting sequence
AIKAASEG

SEQ ID NO: 4680 - protein, 18 aa, Artificial sequence
  Protein classification predicting sequence
NIIPSSTGAAKAVGKVLP

SEQ ID NO: 4681 - protein, 25 aa, Artificial sequence
  Protein classification predicting sequence
LNGKLTGMSFRVPTVDVSVVDLTVR

SEQ ID NO: 4682 - protein, 11 aa, Artificial sequence
  Protein classification predicting sequence
TDYMTYMFKYD

SEQ ID NO: 4683 - protein, 10 aa, Artificial sequence
  Protein classification predicting sequence
KVVSWYDNEW

SEQ ID NO: 4684 - protein, 13 aa, Artificial sequence
  Protein classification predicting sequence
IKVGINGFGRIGR

SEQ ID NO: 4685 - protein, 7 aa, Artificial sequence
  Protein classification predicting sequence
KVVISAP

SEQ ID NO: 4686 - protein, 6 aa, Artificial sequence
  Protein classification predicting sequence
YDTVHG

SEQ ID NO: 4687 - protein, 12 aa, Artificial sequence
  Protein classification predicting sequence
FGIVEGLMTTVH

SEQ ID NO: 4688 - protein, 9 aa, Artificial sequence
  Protein classification predicting sequence
YMTYMFKYD

SEQ ID NO: 4689 - protein, 9 aa, Artificial sequence
  Protein classification predicting sequence
EGLMTTVHA

SEQ ID NO: 4690 - protein, 9 aa, Artificial sequence
  Protein classification predicting sequence
VSVVDLTVR

SEQ ID NO: 4691 - protein, 10 aa, Artificial sequence
  Protein classification predicting sequence
VMGVNEKTYD

SEQ ID NO: 4692 - protein, 9 aa, Artificial sequence
  Protein classification predicting sequence
TATQKTVDG

SEQ ID NO: 4693 - protein, 18 aa, Artificial sequence
  Protein classification predicting sequence
NIIPSSTGAAKAVGKVIP

SEQ ID NO: 4694 - protein, 7 aa, Artificial sequence
  Protein classification predicting sequence
LDLPHKD

SEQ ID NO: 4695 - protein, 8 aa, Artificial sequence
  Protein classification predicting sequence
PSHHGPDV

SEQ ID NO: 4696 - protein, 10 aa, Artificial sequence
  Protein classification predicting sequence
YMFKYDSTHG

SEQ ID NO: 4697 - protein, 30 aa, Artificial sequence
  Protein classification predicting sequence
LSPKFVKLVSWYDNEYGYSTRVVDLVEHVA

SEQ ID NO: 4698 - protein, 19 aa, Artificial sequence
  Protein classification predicting sequence
KVGINGFGRIGRIVFRNAI

SEQ ID NO: 4699 - protein, 11 aa, Artificial sequence
  Protein classification predicting sequence
YIVESTGVFTT

SEQ ID NO: 4700 - protein, 8 aa, Artificial sequence
  Protein classification predicting sequence
NVSVVDLT

SEQ ID NO: 4701 - protein, 8 aa, Artificial sequence
  Protein classification predicting sequence
AYMLKYDS

SEQ ID NO: 4702 - protein, 9 aa, Artificial sequence
  Protein classification predicting sequence
KGILGYTED

SEQ ID NO: 4703 - protein, 16 aa, Artificial sequence
  Protein classification predicting sequence
KGILGYTEDDVVSTDF

SEQ ID NO: 4704 - protein, 10 aa, Artificial sequence
  Protein classification predicting sequence
SSIFDAKAGI

SEQ ID NO: 4705 - protein, 10 aa, Artificial sequence
  Protein classification predicting sequence
VMGVNQDKYD

SEQ ID NO: 4706 - protein, 10 aa, Artificial sequence
  Protein classification predicting sequence
LVLPELKGKL

SEQ ID NO: 4707 - protein, 11 aa, Artificial sequence
  Protein classification predicting sequence
FLTDETARKHI

SEQ ID NO: 4708 - protein, 6 aa, Artificial sequence
  Protein classification predicting sequence
SAPSKD

SEQ ID NO: 4709 - protein, 7 aa, Artificial sequence
  Protein classification predicting sequence
EINAAMK

SEQ ID NO: 4710 - protein, 7 aa, Artificial sequence
  Protein classification predicting sequence
SIYDSKA

SEQ ID NO: 4711 - protein, 6 aa, Artificial sequence
  Protein classification predicting sequence
GYSNKV

SEQ ID NO: 4712 - protein, 7 aa, Artificial sequence
  Protein classification predicting sequence
EVVAIND

SEQ ID NO: 4713 - protein, 8 aa, Artificial sequence
  Protein classification predicting sequence
LAHLLKYD

SEQ ID NO: 4714 - protein, 9 aa, Artificial sequence
  Protein classification predicting sequence
IDVVIESTG

SEQ ID NO: 4715 - protein, 8 aa, Artificial sequence
  Protein classification predicting sequence
RVPVPTGS

SEQ ID NO: 4716 - protein, 10 aa, Artificial sequence
  Protein classification predicting sequence
SWYDNEFGYS

SEQ ID NO: 4717 - protein, 9 aa, Artificial sequence
  Protein classification predicting sequence
AQKRSDIEI

SEQ ID NO: 4718 - protein, 7 aa, Artificial sequence
  Protein classification predicting sequence
VNGKKIR

SEQ ID NO: 4719 - protein, 8 aa, Artificial sequence
  Protein classification predicting sequence
KDNTPMFV

SEQ ID NO: 4720 - protein, 7 aa, Artificial sequence
  Protein classification predicting sequence
AVGKVLP

SEQ ID NO: 4721 - protein, 9 aa, Artificial sequence
  Protein classification predicting sequence
KLVSWYDNE

SEQ ID NO: 4722 - protein, 7 aa, Artificial sequence
  Protein classification predicting sequence
ESTGVFT

SEQ ID NO: 4723 - protein, 8 aa, Artificial sequence
  Protein classification predicting sequence
APSADAPM

SEQ ID NO: 4724 - protein, 7 aa, Artificial sequence
  Protein classification predicting sequence
IFQERDP

SEQ ID NO: 4725 - protein, 13 aa, Artificial sequence
  Protein classification predicting sequence
TATQKTVDGPSGK

SEQ ID NO: 4726 - protein, 7 aa, Artificial sequence
  Protein classification predicting sequence
WRDGRGA

SEQ ID NO: 4727 - protein, 56 aa, Artificial sequence
  Protein classification predicting sequence
WRDGRGAAQNIIPASTGAAKAVGKVIPELNGKLTGMAFRVPTPNVSVVDLTCRLEK

SEQ ID NO: 4728 - protein, 7 aa, Artificial sequence
  Protein classification predicting sequence
AKYDDIK

SEQ ID NO: 4729 - protein, 10 aa, Artificial sequence
  Protein classification predicting sequence
VAINDPFIDL

SEQ ID NO: 4730 - protein, 12 aa, Artificial sequence
  Protein classification predicting sequence
YLFKFDSTHGRF

SEQ ID NO: 4731 - protein, 13 aa, Artificial sequence
  Protein classification predicting sequence
VESTGVFTTTEKA

SEQ ID NO: 4732 - protein, 12 aa, Artificial sequence
  Protein classification predicting sequence
WYDNEWGYSRRV

SEQ ID NO: 4733 - protein, 10 aa, Artificial sequence
  Protein classification predicting sequence
IDVVLECTGF

SEQ ID NO: 4734 - protein, 10 aa, Artificial sequence
  Protein classification predicting sequence
PNSTGAAKAI

SEQ ID NO: 4735 - protein, 8 aa, Artificial sequence
  Protein classification predicting sequence
YGSLFDAT

SEQ ID NO: 4736 - protein, 8 aa, Artificial sequence
  Protein classification predicting sequence
MTTIHAYT

SEQ ID NO: 4737 - protein, 8 aa, Artificial sequence
  Protein classification predicting sequence
VDGSQLVK

SEQ ID NO: 4738 - protein, 9 aa, Artificial sequence
  Protein classification predicting sequence
WYDNEMSYT

SEQ ID NO: 4739 - protein, 6 aa, Artificial sequence
  Protein classification predicting sequence
QLVRTL

SEQ ID NO: 4740 - protein, 10 aa, Artificial sequence
  Protein classification predicting sequence
IVAVNDPFIE

SEQ ID NO: 4741 - protein, 7 aa, Artificial sequence
  Protein classification predicting sequence
DPANIPW

SEQ ID NO: 4742 - protein, 8 aa, Artificial sequence
  Protein classification predicting sequence
HSYTATQK

SEQ ID NO: 4743 - protein, 13 aa, Artificial sequence
  Protein classification predicting sequence
STGAAKAVGKVIP

SEQ ID NO: 4744 - protein, 12 aa, Artificial sequence
  Protein classification predicting sequence
ESTGVFTTTEKA

SEQ ID NO: 4745 - protein, 12 aa, Artificial sequence
  Protein classification predicting sequence
KVGINGFGRIGR

SEQ ID NO: 4746 - protein, 16 aa, Artificial sequence
  Protein classification predicting sequence
KVGINGFGRIGRIVFR

SEQ ID NO: 4747 - protein, 7 aa, Artificial sequence
  Protein classification predicting sequence
TATQKTV

SEQ ID NO: 4748 - protein, 11 aa, Artificial sequence
  Protein classification predicting sequence
GPSAKDWRGGR

SEQ ID NO: 4749 - protein, 8 aa, Artificial sequence
  Protein classification predicting sequence
RIEKGASY

SEQ ID NO: 4750 - protein, 14 aa, Artificial sequence
  Protein classification predicting sequence
GTVKAENGKLVING

SEQ ID NO: 4751 - protein, 8 aa, Artificial sequence
  Protein classification predicting sequence
YTEDQVVS

SEQ ID NO: 4752 - protein, 12 aa, Artificial sequence
  Protein classification predicting sequence
AAQNIIPSSTGA

SEQ ID NO: 4753 - protein, 8 aa, Artificial sequence
  Protein classification predicting sequence
KAVGKVIP

SEQ ID NO: 4754 - protein, 7 aa, Artificial sequence
  Protein classification predicting sequence
ATYDEIK

SEQ ID NO: 4755 - protein, 17 aa, Artificial sequence
  Protein classification predicting sequence
VISGASCTTNCLAPMAK

SEQ ID NO: 4756 - protein, 8 aa, Artificial sequence
  Protein classification predicting sequence
VAINDPFI

SEQ ID NO: 4757 - protein, 21 aa, Artificial sequence
  Protein classification predicting sequence
IVSNASCTTNCLAPLAKVIHD

SEQ ID NO: 4758 - protein, 21 aa, Artificial sequence
  Protein classification predicting sequence
EGLMTTVHATTATQKTVDGPS

SEQ ID NO: 4759 - protein, 7 aa, Artificial sequence
  Protein classification predicting sequence
FDAKAGI

SEQ ID NO: 4760 - protein, 6 aa, Artificial sequence
  Protein classification predicting sequence
AGIALN

SEQ ID NO: 4761 - protein, 10 aa, Artificial sequence
  Protein classification predicting sequence
YAAYMLKYDS

SEQ ID NO: 4762 - protein, 10 aa, Artificial sequence
  Protein classification predicting sequence
AHLKGGAKKV

SEQ ID NO: 4763 - protein, 7 aa, Artificial sequence
  Protein classification predicting sequence
IPWGKAG

SEQ ID NO: 4764 - protein, 16 aa, Artificial sequence
  Protein classification predicting sequence
GINGFGRIGRLVLRAA

SEQ ID NO: 4765 - protein, 9 aa, Artificial sequence
  Protein classification predicting sequence
VVAVNDPFI

SEQ ID NO: 4766 - protein, 7 aa, Artificial sequence
  Protein classification predicting sequence
YMFKYDS

SEQ ID NO: 4767 - protein, 6 aa, Artificial sequence
  Protein classification predicting sequence
HGRYKG

SEQ ID NO: 4768 - protein, 21 aa, Artificial sequence
  Protein classification predicting sequence
SNASCTTNCLAPLAKVINDNF

SEQ ID NO: 4769 - protein, 8 aa, Artificial sequence
  Protein classification predicting sequence
GRTAAQNI

SEQ ID NO: 4770 - protein, 7 aa, Artificial sequence
  Protein classification predicting sequence
AGIALND

SEQ ID NO: 4771 - protein, 10 aa, Artificial sequence
  Protein classification predicting sequence
IIEGLMTTVH

SEQ ID NO: 4772 - protein, 10 aa, Artificial sequence
  Protein classification predicting sequence
KDWRGGRTAA

SEQ ID NO: 4773 - protein, 9 aa, Artificial sequence
  Protein classification predicting sequence
LNDNFVKLV

SEQ ID NO: 4774 - protein, 9 aa, Artificial sequence
  Protein classification predicting sequence
ITIFQERDP

SEQ ID NO: 4775 - protein, 14 aa, Artificial sequence
  Protein classification predicting sequence
GINGFGRIGRIVFR

SEQ ID NO: 4776 - protein, 6 aa, Artificial sequence
  Protein classification predicting sequence
TGPSKD

SEQ ID NO: 4777 - protein, 16 aa, Artificial sequence
  Protein classification predicting sequence
IVSNASCTTNCLAPLA

SEQ ID NO: 4778 - protein, 14 aa, Artificial sequence
  Protein classification predicting sequence
SNASCTTNCLAPLA

SEQ ID NO: 4779 - protein, 21 aa, Artificial sequence
  Protein classification predicting sequence
FVKLVSWYDNETGYSNKVLDL

SEQ ID NO: 4780 - protein, 6 aa, Artificial sequence
  Protein classification predicting sequence
TLMHMH

SEQ ID NO: 4781 - protein, 7 aa, Artificial sequence
  Protein classification predicting sequence
TTIHSYT

SEQ ID NO: 4782 - protein, 6 aa, Artificial sequence
  Protein classification predicting sequence
ASEGPL

SEQ ID NO: 4783 - protein, 15 aa, Artificial sequence
  Protein classification predicting sequence
INGFGRIGRLAFRRI

SEQ ID NO: 4784 - protein, 14 aa, Artificial sequence
  Protein classification predicting sequence
VVKVGINGFGRIGR

SEQ ID NO: 4785 - protein, 15 aa, Artificial sequence
  Protein classification predicting sequence
MLAHLLKYDTTQGRF

SEQ ID NO: 4786 - protein, 7 aa, Artificial sequence
  Protein classification predicting sequence
GRFKGTV

SEQ ID NO: 4787 - protein, 13 aa, Artificial sequence
  Protein classification predicting sequence
GVEIVLEATGFFA

SEQ ID NO: 4788 - protein, 18 aa, Artificial sequence
  Protein classification predicting sequence
ITAPGGNDVKTVVFNTNH

SEQ ID NO: 4789 - protein, 7 aa, Artificial sequence
  Protein classification predicting sequence
DEIVSSD

SEQ ID NO: 4790 - protein, 11 aa, Artificial sequence
  Protein classification predicting sequence
VGINGFGRIGR

SEQ ID NO: 4791 - protein, 13 aa, Artificial sequence
  Protein classification predicting sequence
VGINGFGRIGRIV

SEQ ID NO: 4792 - protein, 13 aa, Artificial sequence
  Protein classification predicting sequence
SNASCTTNCLAPL

SEQ ID NO: 4793 - protein, 8 aa, Artificial sequence
  Protein classification predicting sequence
NDPFITTD

SEQ ID NO: 4794 - protein, 7 aa, Artificial sequence
  Protein classification predicting sequence
GKRVADA

SEQ ID NO: 4795 - protein, 8 aa, Artificial sequence
  Protein classification predicting sequence
GIKKVRAV

SEQ ID NO: 4796 - protein, 7 aa, Artificial sequence
  Protein classification predicting sequence
VPTTLMH

SEQ ID NO: 4797 - protein, 10 aa, Artificial sequence
  Protein classification predicting sequence
VPTTLMHQHN

SEQ ID NO: 4798 - protein, 6 aa, Artificial sequence
  Protein classification predicting sequence
FQGGEK

SEQ ID NO: 4799 - protein, 10 aa, Artificial sequence
  Protein classification predicting sequence
RVVSCNTTGL

SEQ ID NO: 4800 - protein, 6 aa, Artificial sequence
  Protein classification predicting sequence
VSCNTT

SEQ ID NO: 4801 - protein, 11 aa, Artificial sequence
  Protein classification predicting sequence
PSHHGPDVKTV

SEQ ID NO: 4802 - protein, 7 aa, Artificial sequence
  Protein classification predicting sequence
PSHHGPD

SEQ ID NO: 4803 - protein, 9 aa, Artificial sequence
  Protein classification predicting sequence
HQESIVVPE

SEQ ID NO: 4804 - protein, 8 aa, Artificial sequence
  Protein classification predicting sequence
KTKPDFEA

SEQ ID NO: 4805 - protein, 29 aa, Artificial sequence
  Protein classification predicting sequence
KDWRGGRTAAQNIIPSSTGAAKAVGKVIP

SEQ ID NO: 4806 - protein, 14 aa, Artificial sequence
  Protein classification predicting sequence
AGAEYVVESTGVFT

SEQ ID NO: 4807 - protein, 7 aa, Artificial sequence
  Protein classification predicting sequence
LKGKLDG

SEQ ID NO: 4808 - protein, 8 aa, Artificial sequence
  Protein classification predicting sequence
SVDEINAA

SEQ ID NO: 4809 - protein, 7 aa, Artificial sequence
  Protein classification predicting sequence
GMSLRVP

SEQ ID NO: 4810 - protein, 8 aa, Artificial sequence
  Protein classification predicting sequence
EDPIVSSD

SEQ ID NO: 4811 - protein, 12 aa, Artificial sequence
  Protein classification predicting sequence
LLKFDSILGRLP

SEQ ID NO: 4812 - protein, 22 aa, Artificial sequence
  Protein classification predicting sequence
GVDVVVESTGLFTNAAKAKGHL

SEQ ID NO: 4813 - protein, 16 aa, Artificial sequence
  Protein classification predicting sequence
VPTSTGAAKAIGLVMP

SEQ ID NO: 4814 - protein, 12 aa, Artificial sequence
  Protein classification predicting sequence
AAEGRLKGILKY

SEQ ID NO: 4815 - protein, 26 aa, Artificial sequence
  Protein classification predicting sequence
DAPIVSSDIVTDPHSSIFDSGLTKVI

SEQ ID NO: 4816 - protein, 22 aa, Artificial sequence
  Protein classification predicting sequence
QAKVVSWYDNEWGYSNRLVDLV

SEQ ID NO: 4817 - protein, 8 aa, Artificial sequence
  Protein classification predicting sequence
EDEIVSSD

SEQ ID NO: 4818 - protein, 6 aa, Artificial sequence
  Protein classification predicting sequence
YAAYML

SEQ ID NO: 4819 - protein, 6 aa, Artificial sequence
  Protein classification predicting sequence
DSVHGR

SEQ ID NO: 4820 - protein, 7 aa, Artificial sequence
  Protein classification predicting sequence
NDNFVKL

SEQ ID NO: 4821 - protein, 20 aa, Artificial sequence
  Protein classification predicting sequence
GINGFGRIGRLVLRAAVEKD

SEQ ID NO: 4822 - protein, 8 aa, Artificial sequence
  Protein classification predicting sequence
VSTDLNGD

SEQ ID NO: 4823 - protein, 11 aa, Artificial sequence
  Protein classification predicting sequence
FVKLISWYDNE

SEQ ID NO: 4824 - protein, 16 aa, Artificial sequence
  Protein classification predicting sequence
SWYDNEWGYSRRVLDL

SEQ ID NO: 4825 - protein, 12 aa, Artificial sequence
  Protein classification predicting sequence
GINGFGRIGRIV

SEQ ID NO: 4826 - protein, 6 aa, Artificial sequence
  Protein classification predicting sequence
HGRFKG

SEQ ID NO: 4827 - protein, 7 aa, Artificial sequence
  Protein classification predicting sequence
ASYDEIK

SEQ ID NO: 4828 - protein, 16 aa, Artificial sequence
  Protein classification predicting sequence
NIIPSSTGAAKAVGKV

SEQ ID NO: 4829 - protein, 16 aa, Artificial sequence
  Protein classification predicting sequence
TATQKTVDGPSHKDWR

SEQ ID NO: 4830 - protein, 9 aa, Artificial sequence
  Protein classification predicting sequence
YMFKYDSTH

SEQ ID NO: 4831 - protein, 16 aa, Artificial sequence
  Protein classification predicting sequence
SNASCTTNCLAPLAKV

SEQ ID NO: 4832 - protein, 19 aa, Artificial sequence
  Protein classification predicting sequence
TATQKTVDGPSHKDWRGGR

SEQ ID NO: 4833 - protein, 39 aa, Artificial sequence
  Protein classification predicting sequence
TATQKTVDGPSHKDWRGGRTASGNIIPSSTGAAKAVGKV

SEQ ID NO: 4834 - protein, 9 aa, Artificial sequence
  Protein classification predicting sequence
PELNGKLTG

SEQ ID NO: 4835 - protein, 8 aa, Artificial sequence
  Protein classification predicting sequence
PENIDAIR

SEQ ID NO: 4836 - protein, 10 aa, Artificial sequence
  Protein classification predicting sequence
YMVYMFKYDS

SEQ ID NO: 4837 - protein, 6 aa, Artificial sequence
  Protein classification predicting sequence
AHLKGG

SEQ ID NO: 4838 - protein, 8 aa, Artificial sequence
  Protein classification predicting sequence
PLAKVIHD

SEQ ID NO: 4839 - protein, 7 aa, Artificial sequence
  Protein classification predicting sequence
FGIVEGL

SEQ ID NO: 4840 - protein, 12 aa, Artificial sequence
  Protein classification predicting sequence
VIISAPSADAPM

SEQ ID NO: 4841 - protein, 6 aa, Artificial sequence
  Protein classification predicting sequence
RLEKPA

SEQ ID NO: 4842 - protein, 12 aa, Artificial sequence
  Protein classification predicting sequence
NFVKLVSWYDNE

SEQ ID NO: 4843 - protein, 7 aa, Artificial sequence
  Protein classification predicting sequence
DKAAAHL

SEQ ID NO: 4844 - protein, 11 aa, Artificial sequence
  Protein classification predicting sequence
NGYGTIGKRVA

SEQ ID NO: 4845 - protein, 21 aa, Artificial sequence
  Protein classification predicting sequence
KTKPDFEAYRAKELGIPVYAA

SEQ ID NO: 4846 - protein, 10 aa, Artificial sequence
  Protein classification predicting sequence
VSFVAQANYE

SEQ ID NO: 4847 - protein, 18 aa, Artificial sequence
  Protein classification predicting sequence
PSHHGPDVQTVIPINIET

SEQ ID NO: 4848 - protein, 10 aa, Artificial sequence
  Protein classification predicting sequence
KRGPINAIKP

SEQ ID NO: 4849 - protein, 16 aa, Artificial sequence
  Protein classification predicting sequence
DYVYAVMIRRAADPND

SEQ ID NO: 4850 - protein, 10 aa, Artificial sequence
  Protein classification predicting sequence
DAPMFVMGVN

SEQ ID NO: 4851 - protein, 10 aa, Artificial sequence
  Protein classification predicting sequence
VKLISWYDNE

SEQ ID NO: 4852 - protein, 10 aa, Artificial sequence
  Protein classification predicting sequence
GRGAGANIIP

SEQ ID NO: 4853 - protein, 22 aa, Artificial sequence
  Protein classification predicting sequence
NIIPSSTGAAKAVGKVIPSLNG

SEQ ID NO: 4854 - protein, 10 aa, Artificial sequence
  Protein classification predicting sequence
IVEGLMTTVH

SEQ ID NO: 4855 - protein, 7 aa, Artificial sequence
  Protein classification predicting sequence
VDGPSSK

SEQ ID NO: 4856 - protein, 14 aa, Artificial sequence
  Protein classification predicting sequence
LNGKLTGMSMRVPT

SEQ ID NO: 4857 - protein, 8 aa, Artificial sequence
  Protein classification predicting sequence
VAKVDASK

SEQ ID NO: 4858 - protein, 7 aa, Artificial sequence
  Protein classification predicting sequence
EIVAVND

SEQ ID NO: 4859 - protein, 11 aa, Artificial sequence
  Protein classification predicting sequence
HAYTQDQNLQD

SEQ ID NO: 4860 - protein, 12 aa, Artificial sequence
  Protein classification predicting sequence
WYDNEWGYSNRL

SEQ ID NO: 4861 - protein, 7 aa, Artificial sequence
  Protein classification predicting sequence
AHLLKYD

SEQ ID NO: 4862 - protein, 6 aa, Artificial sequence
  Protein classification predicting sequence
IVSSDI

SEQ ID NO: 4863 - protein, 84 aa, Artificial sequence
  Protein classification predicting sequence
EGVEVTRINDLTDPNMLAHLLKYDTTQGRFDGTVEVKEGGFEVNGNFIKVSAERDPENIDWATDGVEIVLEATGFFAKKEAAEK

SEQ ID NO: 4864 - protein, 49 aa, Artificial sequence
  Protein classification predicting sequence
ILDGTETVISGASCTTNCLAPMAKALHDAFGIQKGLMTTIHAYTGDQMI

SEQ ID NO: 4865 - protein, 21 aa, Artificial sequence
  Protein classification predicting sequence
GGDLRRARAGAANIVPNSTGA

SEQ ID NO: 4866 - protein, 16 aa, Artificial sequence
  Protein classification predicting sequence
WYDNEMSYTAQLVRTL

SEQ ID NO: 4867 - protein, 6 aa, Artificial sequence
  Protein classification predicting sequence
TVPSHH

SEQ ID NO: 4868 - protein, 6 aa, Artificial sequence
  Protein classification predicting sequence
PTTLMH

SEQ ID NO: 4869 - protein, 6 aa, Artificial sequence
  Protein classification predicting sequence
AVHQES

SEQ ID NO: 4870 - protein, 7 aa, Artificial sequence
  Protein classification predicting sequence
NGYGTIG

SEQ ID NO: 4871 - protein, 8 aa, Artificial sequence
  Protein classification predicting sequence
RVVSCNTT

SEQ ID NO: 4872 - protein, 11 aa, Artificial sequence
  Protein classification predicting sequence
ASCTTNSLAPV

SEQ ID NO: 4873 - protein, 8 aa, Artificial sequence
  Protein classification predicting sequence
GILAYTED

SEQ ID NO: 4874 - protein, 7 aa, Artificial sequence
  Protein classification predicting sequence
TTVHSYT

SEQ ID NO: 4875 - protein, 6 aa, Artificial sequence
  Protein classification predicting sequence
GVNEHE

SEQ ID NO: 4876 - protein, 8 aa, Artificial sequence
  Protein classification predicting sequence
TGAAKAVG

SEQ ID NO: 4877 - protein, 8 aa, Artificial sequence
  Protein classification predicting sequence
ATLQNNLP

SEQ ID NO: 4878 - protein, 13 aa, Artificial sequence
  Protein classification predicting sequence
VESTGVFTTIDKA

SEQ ID NO: 4879 - protein, 8 aa, Artificial sequence
  Protein classification predicting sequence
DLTVRLEK

SEQ ID NO: 4880 - protein, 7 aa, Artificial sequence
  Protein classification predicting sequence
RNPAELP

SEQ ID NO: 4881 - protein, 6 aa, Artificial sequence
  Protein classification predicting sequence
GVNHEK

SEQ ID NO: 4882 - protein, 6 aa, Artificial sequence
  Protein classification predicting sequence
FQERDP

SEQ ID NO: 4883 - protein, 7 aa, Artificial sequence
  Protein classification predicting sequence
HLKGGAK

SEQ ID NO: 4884 - protein, 7 aa, Artificial sequence
  Protein classification predicting sequence
GVNHEKY

SEQ ID NO: 4885 - protein, 21 aa, Artificial sequence
  Protein classification predicting sequence
TATQKTVDGPSGKLWRDGRGA

SEQ ID NO: 4886 - protein, 9 aa, Artificial sequence
  Protein classification predicting sequence
NDPFISTDY

SEQ ID NO: 4887 - protein, 22 aa, Artificial sequence
  Protein classification predicting sequence
GKLTGMAFRVPTVDVSVVDLTV

SEQ ID NO: 4888 - protein, 8 aa, Artificial sequence
  Protein classification predicting sequence
VSVVDLTV

SEQ ID NO: 4889 - protein, 11 aa, Artificial sequence
  Protein classification predicting sequence
INGFGRIGRLA

SEQ ID NO: 4890 - protein, 7 aa, Artificial sequence
  Protein classification predicting sequence
ERDPANL

SEQ ID NO: 4891 - protein, 8 aa, Artificial sequence
  Protein classification predicting sequence
TNDQRILD

SEQ ID NO: 4892 - protein, 6 aa, Artificial sequence
  Protein classification predicting sequence
GVLGYT

SEQ ID NO: 4893 - protein, 33 aa, Artificial sequence
  Protein classification predicting sequence
YGIIRDIMQNHLLQILALFAMETPVSLDAEDIR

SEQ ID NO: 4894 - protein, 31 aa, Artificial sequence
  Protein classification predicting sequence
EIPDAYERLLLDAIEGERRLFIRSDELDAAW

SEQ ID NO: 4895 - protein, 8 aa, Artificial sequence
  Protein classification predicting sequence
YPYGSRGP

SEQ ID NO: 4896 - protein, 16 aa, Artificial sequence
  Protein classification predicting sequence
LSRTQVCGILREELYQ

SEQ ID NO: 4897 - protein, 39 aa, Artificial sequence
  Protein classification predicting sequence
DAFHQADTHIFIIMGASGDLAKKKIYPTIWWLFRDGLLP

SEQ ID NO: 4898 - protein, 8 aa, Artificial sequence
  Protein classification predicting sequence
LFYLALPP

SEQ ID NO: 4899 - protein, 11 aa, Artificial sequence
  Protein classification predicting sequence
EDQIYRIDHYL

SEQ ID NO: 4900 - protein, 30 aa, Artificial sequence
  Protein classification predicting sequence
CVILTFKEPFGTEGRGGYFDEFGIIRDVMQ

SEQ ID NO: 4901 - protein, 9 aa, Artificial sequence
  Protein classification predicting sequence
CKRNELVIR

SEQ ID NO: 4902 - protein, 23 aa, Artificial sequence
  Protein classification predicting sequence
MMTKKPGMFFNPEESELDLTYGN

SEQ ID NO: 4903 - protein, 12 aa, Artificial sequence
  Protein classification predicting sequence
AYERLILDVFCG

SEQ ID NO: 4904 - protein, 7 aa, Artificial sequence
  Protein classification predicting sequence
QIYRIDH

SEQ ID NO: 4905 - protein, 7 aa, Artificial sequence
  Protein classification predicting sequence
YGIIRDI

SEQ ID NO: 4906 - protein, 13 aa, Artificial sequence
  Protein classification predicting sequence
EDIRNEKVKVLRS

SEQ ID NO: 4907 - protein, 11 aa, Artificial sequence
  Protein classification predicting sequence
VQFRHVPGNLY

SEQ ID NO: 4908 - protein, 7 aa, Artificial sequence
  Protein classification predicting sequence
VLRFANR

SEQ ID NO: 4909 - protein, 11 aa, Artificial sequence
  Protein classification predicting sequence
FGTEGRGGYFD

SEQ ID NO: 4910 - protein, 6 aa, Artificial sequence
  Protein classification predicting sequence
GVPFIL

SEQ ID NO: 4911 - protein, 13 aa, Artificial sequence
  Protein classification predicting sequence
GDQQHFVRRDELK

SEQ ID NO: 4912 - protein, 14 aa, Artificial sequence
  Protein classification predicting sequence
GWTRVIVEKPFGRD

SEQ ID NO: 4913 - protein, 9 aa, Artificial sequence
  Protein classification predicting sequence
IVEKPFGRD

SEQ ID NO: 4914 - protein, 7 aa, Artificial sequence
  Protein classification predicting sequence
EKPFGRD

SEQ ID NO: 4915 - protein, 20 aa, Artificial sequence
  Protein classification predicting sequence
VVGASGDLAKKKIFPALFAL

SEQ ID NO: 4916 - protein, 25 aa, Artificial sequence
  Protein classification predicting sequence
EIPDAYERLLLDAIEGERRLFIRSD

SEQ ID NO: 4917 - protein, 9 aa, Artificial sequence
  Protein classification predicting sequence
NELVIRVQP

SEQ ID NO: 4918 - protein, 7 aa, Artificial sequence
  Protein classification predicting sequence
IVEKPFG

SEQ ID NO: 4919 - protein, 11 aa, Artificial sequence
  Protein classification predicting sequence
RFANAIFEPLW

SEQ ID NO: 4920 - protein, 8 aa, Artificial sequence
  Protein classification predicting sequence
RWAGVPFY

SEQ ID NO: 4921 - protein, 6 aa, Artificial sequence
  Protein classification predicting sequence
DMVQNH

SEQ ID NO: 4922 - protein, 16 aa, Artificial sequence
  Protein classification predicting sequence
DTHIFIIMGASGDLAK

SEQ ID NO: 4923 - protein, 8 aa, Artificial sequence
  Protein classification predicting sequence
GASGDLAK

SEQ ID NO: 4924 - protein, 9 aa, Artificial sequence
  Protein classification predicting sequence
IYPTIWWLF

SEQ ID NO: 4925 - protein, 9 aa, Artificial sequence
  Protein classification predicting sequence
VQNLMVLRF

SEQ ID NO: 4926 - protein, 6 aa, Artificial sequence
  Protein classification predicting sequence
FGTEGR

SEQ ID NO: 4927 - protein, 7 aa, Artificial sequence
  Protein classification predicting sequence
PDAYERL

SEQ ID NO: 4928 - protein, 6 aa, Artificial sequence
  Protein classification predicting sequence
QNHLLQ

SEQ ID NO: 4929 - protein, 11 aa, Artificial sequence
  Protein classification predicting sequence
DLVIFGAKGDL

SEQ ID NO: 4930 - protein, 9 aa, Artificial sequence
  Protein classification predicting sequence
LFVRRDEVE

SEQ ID NO: 4931 - protein, 6 aa, Artificial sequence
  Protein classification predicting sequence
WWLFRD

SEQ ID NO: 4932 - protein, 6 aa, Artificial sequence
  Protein classification predicting sequence
GTYKWV

SEQ ID NO: 4933 - protein, 8 aa, Artificial sequence
  Protein classification predicting sequence
GYLDDPTV

SEQ ID NO: 4934 - protein, 6 aa, Artificial sequence
  Protein classification predicting sequence
GVPFYL

SEQ ID NO: 4935 - protein, 12 aa, Artificial sequence
  Protein classification predicting sequence
IDHYLGKETVQN

SEQ ID NO: 4936 - protein, 7 aa, Artificial sequence
  Protein classification predicting sequence
RWQGVPF

SEQ ID NO: 4937 - protein, 20 aa, Artificial sequence
  Protein classification predicting sequence
GVPFILRCGKALNERKAEVR

SEQ ID NO: 4938 - protein, 6 aa, Artificial sequence
  Protein classification predicting sequence
FTPLLH

SEQ ID NO: 4939 - protein, 14 aa, Artificial sequence
  Protein classification predicting sequence
GASGDLAKKKIYPT

SEQ ID NO: 4940 - protein, 7 aa, Artificial sequence
  Protein classification predicting sequence
GRGGYFD

SEQ ID NO: 4941 - protein, 28 aa, Artificial sequence
  Protein classification predicting sequence
NERWDGVPFILRCGKALNERKAEVRLQF

SEQ ID NO: 4942 - protein, 11 aa, Artificial sequence
  Protein classification predicting sequence
YEGTYKWVNPH

SEQ ID NO: 4943 - protein, 6 aa, Artificial sequence
  Protein classification predicting sequence
QPDEAI

SEQ ID NO: 4944 - protein, 11 aa, Artificial sequence
  Protein classification predicting sequence
QIFRIDHYLGK

SEQ ID NO: 4945 - protein, 9 aa, Artificial sequence
  Protein classification predicting sequence
VCGILREEL

SEQ ID NO: 4946 - protein, 7 aa, Artificial sequence
  Protein classification predicting sequence
QGDAFHQ

SEQ ID NO: 4947 - protein, 22 aa, Artificial sequence
  Protein classification predicting sequence
QANRLFYLALPPTVYEAVTKNI

SEQ ID NO: 4948 - protein, 6 aa, Artificial sequence
  Protein classification predicting sequence
NELVIR

SEQ ID NO: 4949 - protein, 6 aa, Artificial sequence
  Protein classification predicting sequence
RIQPNE

SEQ ID NO: 4950 - protein, 6 aa, Artificial sequence
  Protein classification predicting sequence
DMIQNH

SEQ ID NO: 4951 - protein, 10 aa, Artificial sequence
  Protein classification predicting sequence
RNSYVAGQYD

SEQ ID NO: 4952 - protein, 17 aa, Artificial sequence
  Protein classification predicting sequence
NRIFGPIWNRDNIACVI

SEQ ID NO: 4953 - protein, 22 aa, Artificial sequence
  Protein classification predicting sequence
GRGGYFDEFGIIRDVMQNHLLQ

SEQ ID NO: 4954 - protein, 8 aa, Artificial sequence
  Protein classification predicting sequence
RDEKVKVL

SEQ ID NO: 4955 - protein, 6 aa, Artificial sequence
  Protein classification predicting sequence
DDPTVP

SEQ ID NO: 4956 - protein, 7 aa, Artificial sequence
  Protein classification predicting sequence
IFTPLLH

SEQ ID NO: 4957 - protein, 6 aa, Artificial sequence
  Protein classification predicting sequence
VIRVQP

SEQ ID NO: 4958 - protein, 7 aa, Artificial sequence
  Protein classification predicting sequence
MDFSYGS

SEQ ID NO: 4959 - protein, 8 aa, Artificial sequence
  Protein classification predicting sequence
KKTFPALF

SEQ ID NO: 4960 - protein, 9 aa, Artificial sequence
  Protein classification predicting sequence
RIDHYLGKE

SEQ ID NO: 4961 - protein, 7 aa, Artificial sequence
  Protein classification predicting sequence
NLLVLRF

SEQ ID NO: 4962 - protein, 8 aa, Artificial sequence
  Protein classification predicting sequence
EAIYLKIN

SEQ ID NO: 4963 - protein, 10 aa, Artificial sequence
  Protein classification predicting sequence
HSNFVRDDEL

SEQ ID NO: 4964 - protein, 13 aa, Artificial sequence
  Protein classification predicting sequence
RIDHYLGKETVQN

SEQ ID NO: 4965 - protein, 11 aa, Artificial sequence
  Protein classification predicting sequence
GVPFYLRTGKR

SEQ ID NO: 4966 - protein, 7 aa, Artificial sequence
  Protein classification predicting sequence
IVGYARS

SEQ ID NO: 4967 - protein, 10 aa, Artificial sequence
  Protein classification predicting sequence
GTEGRGGYFD

SEQ ID NO: 4968 - protein, 6 aa, Artificial sequence
  Protein classification predicting sequence
EIRVQF

SEQ ID NO: 4969 - protein, 8 aa, Artificial sequence
  Protein classification predicting sequence
SNTPTFAT

SEQ ID NO: 4970 - protein, 6 aa, Artificial sequence
  Protein classification predicting sequence
RTGKRL

SEQ ID NO: 4971 - protein, 12 aa, Artificial sequence
  Protein classification predicting sequence
QIFRIDHYLGKE

SEQ ID NO: 4972 - protein, 8 aa, Artificial sequence
  Protein classification predicting sequence
QPNEGISL

SEQ ID NO: 4973 - protein, 6 aa, Artificial sequence
  Protein classification predicting sequence
GALRDM

SEQ ID NO: 4974 - protein, 10 aa, Artificial sequence
  Protein classification predicting sequence
GASGDLAKKK

SEQ ID NO: 4975 - protein, 6 aa, Artificial sequence
  Protein classification predicting sequence
WNRDNI

SEQ ID NO: 4976 - protein, 6 aa, Artificial sequence
  Protein classification predicting sequence
IDHVQI

SEQ ID NO: 4977 - protein, 7 aa, Artificial sequence
  Protein classification predicting sequence
RDEKVKV

SEQ ID NO: 4978 - protein, 10 aa, Artificial sequence
  Protein classification predicting sequence
YSGQRCTAVK

SEQ ID NO: 4979 - protein, 11 aa, Artificial sequence
  Protein classification predicting sequence
AWEEPFGPVLP

SEQ ID NO: 4980 - protein, 7 aa, Artificial sequence
  Protein classification predicting sequence
HPQTLDV

SEQ ID NO: 4981 - protein, 7 aa, Artificial sequence
  Protein classification predicting sequence
EMIPVTW

SEQ ID NO: 4982 - protein, 20 aa, Artificial sequence
  Protein classification predicting sequence
ERLAALMITYPSTHGVFEEA

SEQ ID NO: 4983 - protein, 19 aa, Artificial sequence
  Protein classification predicting sequence
NLHKTFCIPHGGGGPGVGP

SEQ ID NO: 4984 - protein, 8 aa, Artificial sequence
  Protein classification predicting sequence
GSASILPI

SEQ ID NO: 4985 - protein, 8 aa, Artificial sequence
  Protein classification predicting sequence
WMYIRMMG

SEQ ID NO: 4986 - protein, 6 aa, Artificial sequence
  Protein classification predicting sequence
AVYHGP

SEQ ID NO: 4987 - protein, 12 aa, Artificial sequence
  Protein classification predicting sequence
HPVFNRYHSETE

SEQ ID NO: 4988 - protein, 13 aa, Artificial sequence
  Protein classification predicting sequence
LRRLADKDLALDR

SEQ ID NO: 4989 - protein, 14 aa, Artificial sequence
  Protein classification predicting sequence
QGEYAGLLAIRAYH

SEQ ID NO: 4990 - protein, 7 aa, Artificial sequence
  Protein classification predicting sequence
SRGEGHR

SEQ ID NO: 4991 - protein, 13 aa, Artificial sequence
  Protein classification predicting sequence
MITYPSTHGVFEE

SEQ ID NO: 4992 - protein, 6 aa, Artificial sequence
  Protein classification predicting sequence
ELDRFC

SEQ ID NO: 4993 - protein, 7 aa, Artificial sequence
  Protein classification predicting sequence
GDRNLVC

SEQ ID NO: 4994 - protein, 11 aa, Artificial sequence
  Protein classification predicting sequence
QGRLEALLNFQ

SEQ ID NO: 4995 - protein, 7 aa, Artificial sequence
  Protein classification predicting sequence
LLTPPGE

SEQ ID NO: 4996 - protein, 9 aa, Artificial sequence
  Protein classification predicting sequence
QTREQHIRR

SEQ ID NO: 4997 - protein, 12 aa, Artificial sequence
  Protein classification predicting sequence
QTREQHIRREKA

SEQ ID NO: 4998 - protein, 7 aa, Artificial sequence
  Protein classification predicting sequence
SNICTAQ

SEQ ID NO: 4999 - protein, 13 aa, Artificial sequence
  Protein classification predicting sequence
MIPLGSCTMKLNA

SEQ ID NO: 5000 - protein, 7 aa, Artificial sequence
  Protein classification predicting sequence
LSANYLA

SEQ ID NO: 5001 - protein, 6 aa, Artificial sequence
  Protein classification predicting sequence
VAHECI

SEQ ID NO: 5002 - protein, 11 aa, Artificial sequence
  Protein classification predicting sequence
GTLMVEPTESE

SEQ ID NO: 5003 - protein, 8 aa, Artificial sequence
  Protein classification predicting sequence
GYGGPHAA

SEQ ID NO: 5004 - protein, 8 aa, Artificial sequence
  Protein classification predicting sequence
GNTALRMA

SEQ ID NO: 5005 - protein, 10 aa, Artificial sequence
  Protein classification predicting sequence
RYLKQLENKD

SEQ ID NO: 5006 - protein, 15 aa, Artificial sequence
  Protein classification predicting sequence
CMQPNSGAQGEYAGL

SEQ ID NO: 5007 - protein, 7 aa, Artificial sequence
  Protein classification predicting sequence
QGEYAGL

SEQ ID NO: 5008 - protein, 10 aa, Artificial sequence
  Protein classification predicting sequence
GGQVYMDGAN

SEQ ID NO: 5009 - protein, 6 aa, Artificial sequence
  Protein classification predicting sequence
WDRPYS

SEQ ID NO: 5010 - protein, 7 aa, Artificial sequence
  Protein classification predicting sequence
KRSMPGR

SEQ ID NO: 5011 - protein, 14 aa, Artificial sequence
  Protein classification predicting sequence
QPNSGAQGEYAGLL

SEQ ID NO: 5012 - protein, 21 aa, Artificial sequence
  Protein classification predicting sequence
DVSHLNLHKTFCIPHGGGGPG

SEQ ID NO: 5013 - protein, 8 aa, Artificial sequence
  Protein classification predicting sequence
GFHAPTMS

SEQ ID NO: 5014 - protein, 14 aa, Artificial sequence
  Protein classification predicting sequence
PVAGTLMIEPTESE

SEQ ID NO: 5015 - protein, 6 aa, Artificial sequence
  Protein classification predicting sequence
EPTESE

SEQ ID NO: 5016 - protein, 11 aa, Artificial sequence
  Protein classification predicting sequence
DLTGLEIANAS

SEQ ID NO: 5017 - protein, 14 aa, Artificial sequence
  Protein classification predicting sequence
MIPLGSCTMKLNAT

SEQ ID NO: 5018 - protein, 20 aa, Artificial sequence
  Protein classification predicting sequence
EITGFAGVSLQPNAGSQGEY

SEQ ID NO: 5019 - protein, 7 aa, Artificial sequence
  Protein classification predicting sequence
RNVCLIP

SEQ ID NO: 5020 - protein, 13 aa, Artificial sequence
  Protein classification predicting sequence
IDIDDLKAKAEKH

SEQ ID NO: 5021 - protein, 8 aa, Artificial sequence
  Protein classification predicting sequence
TYPSTHGV

SEQ ID NO: 5022 - protein, 10 aa, Artificial sequence
  Protein classification predicting sequence
DGANMNAQVG

SEQ ID NO: 5023 - protein, 6 aa, Artificial sequence
  Protein classification predicting sequence
GADVCH

SEQ ID NO: 5024 - protein, 8 aa, Artificial sequence
  Protein classification predicting sequence
MVEPTESE

SEQ ID NO: 5025 - protein, 8 aa, Artificial sequence
  Protein classification predicting sequence
ELDRFCEA

SEQ ID NO: 5026 - protein, 6 aa, Artificial sequence
  Protein classification predicting sequence
HPYSRE

SEQ ID NO: 5027 - protein, 9 aa, Artificial sequence
  Protein classification predicting sequence
WYTSYTPYQ

SEQ ID NO: 5028 - protein, 8 aa, Artificial sequence
  Protein classification predicting sequence
YKRNMPGR

SEQ ID NO: 5029 - protein, 6 aa, Artificial sequence
  Protein classification predicting sequence
YAVYHG

SEQ ID NO: 5030 - protein, 12 aa, Artificial sequence
  Protein classification predicting sequence
ITGFAGVSLQPN

SEQ ID NO: 5031 - protein, 6 aa, Artificial sequence
  Protein classification predicting sequence
QPNSGA

SEQ ID NO: 5032 - protein, 9 aa, Artificial sequence
  Protein classification predicting sequence
MITYPSTHG

SEQ ID NO: 5033 - protein, 8 aa, Artificial sequence
  Protein classification predicting sequence
HLNLHKTF

SEQ ID NO: 5034 - protein, 8 aa, Artificial sequence
  Protein classification predicting sequence
PHGGGGPG

SEQ ID NO: 5035 - protein, 6 aa, Artificial sequence
  Protein classification predicting sequence
YIRMMG

SEQ ID NO: 5036 - protein, 7 aa, Artificial sequence
  Protein classification predicting sequence
EETGISE

SEQ ID NO: 5037 - protein, 8 aa, Artificial sequence
  Protein classification predicting sequence
LRNVLENP

SEQ ID NO: 5038 - protein, 10 aa, Artificial sequence
  Protein classification predicting sequence
SAHGTNPASA

SEQ ID NO: 5039 - protein, 7 aa, Artificial sequence
  Protein classification predicting sequence
EDIAKRL

SEQ ID NO: 5040 - protein, 7 aa, Artificial sequence
  Protein classification predicting sequence
TRAEPLG

SEQ ID NO: 5041 - protein, 7 aa, Artificial sequence
  Protein classification predicting sequence
HRSETEM

SEQ ID NO: 5042 - protein, 7 aa, Artificial sequence
  Protein classification predicting sequence
RVAHECI

SEQ ID NO: 5043 - protein, 6 aa, Artificial sequence
  Protein classification predicting sequence
AMIAIR

SEQ ID NO: 5044 - protein, 10 aa, Artificial sequence
  Protein classification predicting sequence
KATSNICTAQ

SEQ ID NO: 5045 - protein, 7 aa, Artificial sequence
  Protein classification predicting sequence
MITYPST

SEQ ID NO: 5046 - protein, 16 aa, Artificial sequence
  Protein classification predicting sequence
NLHKTFCIPHGGGGPG

SEQ ID NO: 5047 - protein, 14 aa, Artificial sequence
  Protein classification predicting sequence
ASLLDEATAAAEAM

SEQ ID NO: 5048 - protein, 7 aa, Artificial sequence
  Protein classification predicting sequence
EMGADIA

SEQ ID NO: 5049 - protein, 8 aa, Artificial sequence
  Protein classification predicting sequence
PGRIIGVS

SEQ ID NO: 5050 - protein, 8 aa, Artificial sequence
  Protein classification predicting sequence
QVLLANIA

SEQ ID NO: 5051 - protein, 7 aa, Artificial sequence
  Protein classification predicting sequence
LTHPVFN

SEQ ID NO: 5052 - protein, 10 aa, Artificial sequence
  Protein classification predicting sequence
LGSCTMKLNA

SEQ ID NO: 5053 - protein, 7 aa, Artificial sequence
  Protein classification predicting sequence
DLKAKAE

SEQ ID NO: 5054 - protein, 6 aa, Artificial sequence
  Protein classification predicting sequence
NAQVGL

SEQ ID NO: 5055 - protein, 9 aa, Artificial sequence
  Protein classification predicting sequence
RPADIGADV

SEQ ID NO: 5056 - protein, 7 aa, Artificial sequence
  Protein classification predicting sequence
KAHLAPF

SEQ ID NO: 5057 - protein, 11 aa, Artificial sequence
  Protein classification predicting sequence
GTLMIEPTESE

SEQ ID NO: 5058 - protein, 8 aa, Artificial sequence
  Protein classification predicting sequence
NPLVNAPH

SEQ ID NO: 5059 - protein, 14 aa, Artificial sequence
  Protein classification predicting sequence
LENPGWYTAYTPYQ

SEQ ID NO: 5060 - protein, 6 aa, Artificial sequence
  Protein classification predicting sequence
LLNFQQ

SEQ ID NO: 5061 - protein, 9 aa, Artificial sequence
  Protein classification predicting sequence
MPGRVIGVS

SEQ ID NO: 5062 - protein, 18 aa, Artificial sequence
  Protein classification predicting sequence
ALRMAMQTREQHIRREKA

SEQ ID NO: 5063 - protein, 17 aa, Artificial sequence
  Protein classification predicting sequence
KATSNICTAQALLANMA

SEQ ID NO: 5064 - protein, 7 aa, Artificial sequence
  Protein classification predicting sequence
YAVWHGP

SEQ ID NO: 5065 - protein, 7 aa, Artificial sequence
  Protein classification predicting sequence
SLDETVT

SEQ ID NO: 5066 - protein, 18 aa, Artificial sequence
  Protein classification predicting sequence
SLTHGMIPLGSCTMKLNA

SEQ ID NO: 5067 - protein, 13 aa, Artificial sequence
  Protein classification predicting sequence
GGQVYLDGANMNA

SEQ ID NO: 5068 - protein, 11 aa, Artificial sequence
  Protein classification predicting sequence
DVSHLNLHKTF

SEQ ID NO: 5069 - protein, 9 aa, Artificial sequence
  Protein classification predicting sequence
IPHGGGGPG

SEQ ID NO: 5070 - protein, 7 aa, Artificial sequence
  Protein classification predicting sequence
GAVSAAP

SEQ ID NO: 5071 - protein, 15 aa, Artificial sequence
  Protein classification predicting sequence
TQVALLNANYIAKRL

SEQ ID NO: 5072 - protein, 7 aa, Artificial sequence
  Protein classification predicting sequence
LNANYIA

SEQ ID NO: 5073 - protein, 18 aa, Artificial sequence
  Protein classification predicting sequence
AKRLMDYGFHAPTMSFPV

SEQ ID NO: 5074 - protein, 8 aa, Artificial sequence
  Protein classification predicting sequence
PLKHAPHT

SEQ ID NO: 5075 - protein, 7 aa, Artificial sequence
  Protein classification predicting sequence
TAAAEAM

SEQ ID NO: 5076 - protein, 7 aa, Artificial sequence
  Protein classification predicting sequence
GFGGPHA

SEQ ID NO: 5077 - protein, 10 aa, Artificial sequence
  Protein classification predicting sequence
LQTREQHIRR

SEQ ID NO: 5078 - protein, 7 aa, Artificial sequence
  Protein classification predicting sequence
GITLDET

SEQ ID NO: 5079 - protein, 15 aa, Artificial sequence
  Protein classification predicting sequence
DGANMNAQVGLTSPG

SEQ ID NO: 5080 - protein, 7 aa, Artificial sequence
  Protein classification predicting sequence
VYIALMG

SEQ ID NO: 5081 - protein, 10 aa, Artificial sequence
  Protein classification predicting sequence
DYGFHAPTMS

SEQ ID NO: 5082 - protein, 7 aa, Artificial sequence
  Protein classification predicting sequence
YHGPEGL

SEQ ID NO: 5083 - protein, 26 aa, Artificial sequence
  Protein classification predicting sequence
WLCEITGFAGVSLQPNAGSQGEYAGL

SEQ ID NO: 5084 - protein, 7 aa, Artificial sequence
  Protein classification predicting sequence
DLLALTL

SEQ ID NO: 5085 - protein, 15 aa, Artificial sequence
  Protein classification predicting sequence
KATSNICTAQVLLAV

SEQ ID NO: 5086 - protein, 6 aa, Artificial sequence
  Protein classification predicting sequence
TWPEFG

SEQ ID NO: 5087 - protein, 10 aa, Artificial sequence
  Protein classification predicting sequence
QGEYAGLLAI

SEQ ID NO: 5088 - protein, 6 aa, Artificial sequence
  Protein classification predicting sequence
SAHGTN

SEQ ID NO: 5089 - protein, 6 aa, Artificial sequence
  Protein classification predicting sequence
FCEAMI

SEQ ID NO: 5090 - protein, 14 aa, Artificial sequence
  Protein classification predicting sequence
YTPYQPEISQGRLE

SEQ ID NO: 5091 - protein, 11 aa, Artificial sequence
  Protein classification predicting sequence
CLIPSSAHGTN

SEQ ID NO: 5092 - protein, 13 aa, Artificial sequence
  Protein classification predicting sequence
DYGFHAPTMSFPV

SEQ ID NO: 5093 - protein, 6 aa, Artificial sequence
  Protein classification predicting sequence
PQTLDV

SEQ ID NO: 5094 - protein, 7 aa, Artificial sequence
  Protein classification predicting sequence
ELGADIA

SEQ ID NO: 5095 - protein, 11 aa, Artificial sequence
  Protein classification predicting sequence
TREQHIRREKA

SEQ ID NO: 5096 - protein, 10 aa, Artificial sequence
  Protein classification predicting sequence
QPNSGAQGEY

SEQ ID NO: 5097 - protein, 10 aa, Artificial sequence
  Protein classification predicting sequence
MITYPSTHGV

SEQ ID NO: 5098 - protein, 7 aa, Artificial sequence
  Protein classification predicting sequence
YPILYTG

SEQ ID NO: 5099 - protein, 7 aa, Artificial sequence
  Protein classification predicting sequence
KAELDRF

SEQ ID NO: 5100 - protein, 8 aa, Artificial sequence
  Protein classification predicting sequence
WAHPYSRE

SEQ ID NO: 5101 - protein, 7 aa, Artificial sequence
  Protein classification predicting sequence
REEAVFP

SEQ ID NO: 5102 - protein, 9 aa, Artificial sequence
  Protein classification predicting sequence
TQTLSQLEN

SEQ ID NO: 5103 - protein, 7 aa, Artificial sequence
  Protein classification predicting sequence
SYIGMGY

SEQ ID NO: 5104 - protein, 9 aa, Artificial sequence
  Protein classification predicting sequence
ILRNLLENP

SEQ ID NO: 5105 - protein, 16 aa, Artificial sequence
  Protein classification predicting sequence
LENPGWYTAYTPYQPE

SEQ ID NO: 5106 - protein, 6 aa, Artificial sequence
  Protein classification predicting sequence
SQGRLE

SEQ ID NO: 5107 - protein, 8 aa, Artificial sequence
  Protein classification predicting sequence
LLNFQQVT

SEQ ID NO: 5108 - protein, 30 aa, Artificial sequence
  Protein classification predicting sequence
DAAGNTALRMAMQTREQHIRREKANSNICT

SEQ ID NO: 5109 - protein, 10 aa, Artificial sequence
  Protein classification predicting sequence
RIHRLTDILA

SEQ ID NO: 5110 - protein, 8 aa, Artificial sequence
  Protein classification predicting sequence
FNRYHSET

SEQ ID NO: 5111 - protein, 6 aa, Artificial sequence
  Protein classification predicting sequence
MMRYMH

SEQ ID NO: 5112 - protein, 11 aa, Artificial sequence
  Protein classification predicting sequence
ELHPFCPPEQA

SEQ ID NO: 5113 - protein, 6 aa, Artificial sequence
  Protein classification predicting sequence
GYQQMI

SEQ ID NO: 5114 - protein, 17 aa, Artificial sequence
  Protein classification predicting sequence
QPNSGAQGEYAGLLAIR

SEQ ID NO: 5115 - protein, 6 aa, Artificial sequence
  Protein classification predicting sequence
RYHESR

SEQ ID NO: 5116 - protein, 20 aa, Artificial sequence
  Protein classification predicting sequence
LSCIMVTYPSTHGVYEETIR

SEQ ID NO: 5117 - protein, 7 aa, Artificial sequence
  Protein classification predicting sequence
PGHSVVQ

SEQ ID NO: 5118 - protein, 13 aa, Artificial sequence
  Protein classification predicting sequence
VKRLDDVYGDRNL

SEQ ID NO: 5119 - protein, 7 aa, Artificial sequence
  Protein classification predicting sequence
ENPAWYT

SEQ ID NO: 5120 - protein, 8 aa, Artificial sequence
  Protein classification predicting sequence
YTPYQAEI

SEQ ID NO: 5121 - protein, 7 aa, Artificial sequence
  Protein classification predicting sequence
QGRLEAL

SEQ ID NO: 5122 - protein, 13 aa, Artificial sequence
  Protein classification predicting sequence
RLALQTREQHIRR

SEQ ID NO: 5123 - protein, 7 aa, Artificial sequence
  Protein classification predicting sequence
ETELMRY

SEQ ID NO: 5124 - protein, 6 aa, Artificial sequence
  Protein classification predicting sequence
HGGQVY

SEQ ID NO: 5125 - protein, 11 aa, Artificial sequence
  Protein classification predicting sequence
HGGQVYLDGAN

SEQ ID NO: 5126 - protein, 8 aa, Artificial sequence
  Protein classification predicting sequence
DYGFHAPT

SEQ ID NO: 5127 - protein, 5 aa, Artificial sequence
  Protein classification predicting sequence
WDRPY

SEQ ID NO: 5128 - protein, 7 aa, Artificial sequence
  Protein classification predicting sequence
VGQSVDA

SEQ ID NO: 5129 - protein, 6 aa, Artificial sequence
  Protein classification predicting sequence
LHPFAP

SEQ ID NO: 5130 - protein, 8 aa, Artificial sequence
  Protein classification predicting sequence
SAHGTNPA

SEQ ID NO: 5131 - protein, 8 aa, Artificial sequence
  Protein classification predicting sequence
RMMGAEGL

SEQ ID NO: 5132 - protein, 7 aa, Artificial sequence
  Protein classification predicting sequence
WDRPYSR

SEQ ID NO: 5133 - protein, 6 aa, Artificial sequence
  Protein classification predicting sequence
YGDRNL

SEQ ID NO: 5134 - protein, 18 aa, Artificial sequence
  Protein classification predicting sequence
WYTAYTPYQPEISQGRLE

SEQ ID NO: 5135 - protein, 8 aa, Artificial sequence
  Protein classification predicting sequence
EISQGRLE

SEQ ID NO: 5136 - protein, 29 aa, Artificial sequence
  Protein classification predicting sequence
RYLRKLADKDLALDRTMIPLGSCTMKLNA

SEQ ID NO: 5137 - protein, 17 aa, Artificial sequence
  Protein classification predicting sequence
RNILENPAWYTAYTPYQ

SEQ ID NO: 5138 - protein, 13 aa, Artificial sequence
  Protein classification predicting sequence
ENPAWYTAYTPYQ

SEQ ID NO: 5139 - protein, 13 aa, Artificial sequence
  Protein classification predicting sequence
KATSNICTAQVLL

SEQ ID NO: 5140 - protein, 10 aa, Artificial sequence
  Protein classification predicting sequence
LADKDLALDR

SEQ ID NO: 5141 - protein, 8 aa, Artificial sequence
  Protein classification predicting sequence
QGEYAGLL

SEQ ID NO: 5142 - protein, 7 aa, Artificial sequence
  Protein classification predicting sequence
VVVVACD

SEQ ID NO: 5143 - protein, 10 aa, Artificial sequence
  Protein classification predicting sequence
GGQVYVDGAN

SEQ ID NO: 5144 - protein, 7 aa, Artificial sequence
  Protein classification predicting sequence
MMGAAGL

SEQ ID NO: 5145 - protein, 12 aa, Artificial sequence
  Protein classification predicting sequence
VAHECILDIRPL

SEQ ID NO: 5146 - protein, 11 aa, Artificial sequence
  Protein classification predicting sequence
GFHAPTMSFPV

SEQ ID NO: 5147 - protein, 10 aa, Artificial sequence
  Protein classification predicting sequence
QAAYPVASLR

SEQ ID NO: 5148 - protein, 12 aa, Artificial sequence
  Protein classification predicting sequence
KSFIGAGYHGVH

SEQ ID NO: 5149 - protein, 22 aa, Artificial sequence
  Protein classification predicting sequence
PPVIQRNLFENPAWYTAYTPYQ

SEQ ID NO: 5150 - protein, 8 aa, Artificial sequence
  Protein classification predicting sequence
ELTGLPVA

SEQ ID NO: 5151 - protein, 9 aa, Artificial sequence
  Protein classification predicting sequence
ASLLDEATA

SEQ ID NO: 5152 - protein, 13 aa, Artificial sequence
  Protein classification predicting sequence
ASLLDEATAVAEA

SEQ ID NO: 5153 - protein, 7 aa, Artificial sequence
  Protein classification predicting sequence
RHHRDKR

SEQ ID NO: 5154 - protein, 7 aa, Artificial sequence
  Protein classification predicting sequence
GADIAVG

SEQ ID NO: 5155 - protein, 14 aa, Artificial sequence
  Protein classification predicting sequence
YRLALQTREQHIRR

SEQ ID NO: 5156 - protein, 13 aa, Artificial sequence
  Protein classification predicting sequence
AIWHGPAGLQAIA

SEQ ID NO: 5157 - protein, 22 aa, Artificial sequence
  Protein classification predicting sequence
MIPLGSCTMKLNAAAEMMPVSW

SEQ ID NO: 5158 - protein, 9 aa, Artificial sequence
  Protein classification predicting sequence
MAGMSVVVV

SEQ ID NO: 5159 - protein, 9 aa, Artificial sequence
  Protein classification predicting sequence
DGANLNALV

SEQ ID NO: 5160 - protein, 22 aa, Artificial sequence
  Protein classification predicting sequence
NLHKTFCIPHGGGGPGVGPIGV

SEQ ID NO: 5161 - protein, 9 aa, Artificial sequence
  Protein classification predicting sequence
GPIGVKAHL

SEQ ID NO: 5162 - protein, 32 aa, Artificial sequence
  Protein classification predicting sequence
LENPAWYTAYTPYQPEISQGRLEALLNYQTMV

SEQ ID NO: 5163 - protein, 9 aa, Artificial sequence
  Protein classification predicting sequence
HLAPFLPGH

SEQ ID NO: 5164 - protein, 10 aa, Artificial sequence
  Protein classification predicting sequence
GSASILPISW

SEQ ID NO: 5165 - protein, 14 aa, Artificial sequence
  Protein classification predicting sequence
ATEYAALAELKAIA

SEQ ID NO: 5166 - protein, 16 aa, Artificial sequence
  Protein classification predicting sequence
NAVGITLDETTTRENV

SEQ ID NO: 5167 - protein, 7 aa, Artificial sequence
  Protein classification predicting sequence
TLDKDVA

SEQ ID NO: 5168 - protein, 6 aa, Artificial sequence
  Protein classification predicting sequence
PVLYTG

SEQ ID NO: 5169 - protein, 24 aa, Artificial sequence
  Protein classification predicting sequence
GAFIERHIGPDAAQQQEMLNAVGA

SEQ ID NO: 5170 - protein, 23 aa, Artificial sequence
  Protein classification predicting sequence
SLNALTGQIVPKDIQLATPPQVG

SEQ ID NO: 5171 - protein, 23 aa, Artificial sequence
  Protein classification predicting sequence
LDHQDVFGVLLQQVGTTGEIHDY

SEQ ID NO: 5172 - protein, 43 aa, Artificial sequence
  Protein classification predicting sequence
MALVLLTAPGKQGADIVFGSAQRFGVPMGYGGPHAAFFAAKDE

SEQ ID NO: 5173 - protein, 88 aa, Artificial sequence
  Protein classification predicting sequence
ELDRFIDAMLAIRAEIDQVKAGVWPLEDNPLVNAPHIQSELVAEWAHPYSREVAVFPAGVADKYWPTVKRLDDVYGDRNLFCSCVPIS

SEQ ID NO: 5174 - protein, 7 aa, Artificial sequence
  Protein classification predicting sequence
QQQEMLN

SEQ ID NO: 5175 - protein, 9 aa, Artificial sequence
  Protein classification predicting sequence
EIAQGRLEA

SEQ ID NO: 5176 - protein, 11 aa, Artificial sequence
  Protein classification predicting sequence
GSAQRFGVPMG

SEQ ID NO: 5177 - protein, 8 aa, Artificial sequence
  Protein classification predicting sequence
QRFGVPMG

SEQ ID NO: 5178 - protein, 8 aa, Artificial sequence
  Protein classification predicting sequence
DILAAGLQ

SEQ ID NO: 5179 - protein, 16 aa, Artificial sequence
  Protein classification predicting sequence
GGQVYLDGANMNAQVG

SEQ ID NO: 5180 - protein, 8 aa, Artificial sequence
  Protein classification predicting sequence
GSAGILPI

SEQ ID NO: 5181 - protein, 5 aa, Artificial sequence
  Protein classification predicting sequence
NAPHT

SEQ ID NO: 5182 - protein, 10 aa, Artificial sequence
  Protein classification predicting sequence
PYSREVAVFP

SEQ ID NO: 5183 - protein, 9 aa, Artificial sequence
  Protein classification predicting sequence
VYGDRNLFC

SEQ ID NO: 5184 - protein, 7 aa, Artificial sequence
  Protein classification predicting sequence
PPVILRN

SEQ ID NO: 5185 - protein, 11 aa, Artificial sequence
  Protein classification predicting sequence
VAADLLALTLL

SEQ ID NO: 5186 - protein, 6 aa, Artificial sequence
  Protein classification predicting sequence
IARRTH

SEQ ID NO: 5187 - protein, 6 aa, Artificial sequence
  Protein classification predicting sequence
LTHPVF

SEQ ID NO: 5188 - protein, 8 aa, Artificial sequence
  Protein classification predicting sequence
ANYIAKRL

SEQ ID NO: 5189 - protein, 6 aa, Artificial sequence
  Protein classification predicting sequence
NAPHTA

SEQ ID NO: 5190 - protein, 6 aa, Artificial sequence
  Protein classification predicting sequence
KYWPPV

SEQ ID NO: 5191 - protein, 6 aa, Artificial sequence
  Protein classification predicting sequence
RTRAEP

SEQ ID NO: 5192 - protein, 8 aa, Artificial sequence
  Protein classification predicting sequence
WPADDNPL

SEQ ID NO: 5193 - protein, 8 aa, Artificial sequence
  Protein classification predicting sequence
LENPGWYT

SEQ ID NO: 5194 - protein, 8 aa, Artificial sequence
  Protein classification predicting sequence
PGRLVGVS

SEQ ID NO: 5195 - protein, 12 aa, Artificial sequence
  Protein classification predicting sequence
MITYPSTHGVFE

SEQ ID NO: 5196 - protein, 9 aa, Artificial sequence
  Protein classification predicting sequence
GSAQRFGVP

SEQ ID NO: 5197 - protein, 6 aa, Artificial sequence
  Protein classification predicting sequence
RMMGAE

SEQ ID NO: 5198 - protein, 8 aa, Artificial sequence
  Protein classification predicting sequence
VAHECILD

SEQ ID NO: 5199 - protein, 18 aa, Artificial sequence
  Protein classification predicting sequence
HLNLHKTFCIPHGGGGPG

SEQ ID NO: 5200 - protein, 6 aa, Artificial sequence
  Protein classification predicting sequence
GFHAPT

SEQ ID NO: 5201 - protein, 11 aa, Artificial sequence
  Protein classification predicting sequence
DNPLKNAPHTA

SEQ ID NO: 5202 - protein, 7 aa, Artificial sequence
  Protein classification predicting sequence
RNILENP

SEQ ID NO: 5203 - protein, 7 aa, Artificial sequence
  Protein classification predicting sequence
GSAQRFG

SEQ ID NO: 5204 - protein, 10 aa, Artificial sequence
  Protein classification predicting sequence
MVTYPSTHGV

SEQ ID NO: 5205 - protein, 6 aa, Artificial sequence
  Protein classification predicting sequence
HPFAPA

SEQ ID NO: 5206 - protein, 7 aa, Artificial sequence
  Protein classification predicting sequence
TSPGFIG

SEQ ID NO: 5207 - protein, 6 aa, Artificial sequence
  Protein classification predicting sequence
YIAMMG

SEQ ID NO: 5208 - protein, 10 aa, Artificial sequence
  Protein classification predicting sequence
HPVFNTHHSE

SEQ ID NO: 5209 - protein, 6 aa, Artificial sequence
  Protein classification predicting sequence
EISQGR

SEQ ID NO: 5210 - protein, 6 aa, Artificial sequence
  Protein classification predicting sequence
TRAEPL

SEQ ID NO: 5211 - protein, 6 aa, Artificial sequence
  Protein classification predicting sequence
LDETTT

SEQ ID NO: 5212 - protein, 7 aa, Artificial sequence
  Protein classification predicting sequence
LADKDLA

SEQ ID NO: 5213 - protein, 7 aa, Artificial sequence
  Protein classification predicting sequence
DGANMNA

SEQ ID NO: 5214 - protein, 9 aa, Artificial sequence
  Protein classification predicting sequence
ELDRFIDAM

SEQ ID NO: 5215 - protein, 7 aa, Artificial sequence
  Protein classification predicting sequence
FIGQGYY

SEQ ID NO: 5216 - protein, 7 aa, Artificial sequence
  Protein classification predicting sequence
HLAPFLP

SEQ ID NO: 5217 - protein, 8 aa, Artificial sequence
  Protein classification predicting sequence
RVDNVYGD

SEQ ID NO: 5218 - protein, 14 aa, Artificial sequence
  Protein classification predicting sequence
LENPAWYTAYTPYQ

SEQ ID NO: 5219 - protein, 5 aa, Artificial sequence
  Protein classification predicting sequence
SWMYI

SEQ ID NO: 5220 - protein, 38 aa, Artificial sequence
  Protein classification predicting sequence
PPVILRNMLENPGWYTAYTPYQPEVSQGRLEALLNFQQ

SEQ ID NO: 5221 - protein, 6 aa, Artificial sequence
  Protein classification predicting sequence
DVHPQT

SEQ ID NO: 5222 - protein, 8 aa, Artificial sequence
  Protein classification predicting sequence
TRAETFGF

SEQ ID NO: 5223 - protein, 13 aa, Artificial sequence
  Protein classification predicting sequence
FGVLLQQVGTTGE

SEQ ID NO: 5224 - protein, 16 aa, Artificial sequence
  Protein classification predicting sequence
SVAADIMALVLLTAPG

SEQ ID NO: 5225 - protein, 21 aa, Artificial sequence
  Protein classification predicting sequence
ILTHPVFNRYHSETEMMRYMH

SEQ ID NO: 5226 - protein, 26 aa, Artificial sequence
  Protein classification predicting sequence
LTGYDAVCMQPNSGAQGEYAGLLAIR

SEQ ID NO: 5227 - protein, 46 aa, Artificial sequence
  Protein classification predicting sequence
IGADVSHLNLHKTFCIPHGGGGPGMGPIGVKAHLAPFVPGHSVVQI

SEQ ID NO: 5228 - protein, 27 aa, Artificial sequence
  Protein classification predicting sequence
QGAVSAAPFGSASILPISWMYIRMMGA

SEQ ID NO: 5229 - protein, 16 aa, Artificial sequence
  Protein classification predicting sequence
GFHAPTMSFPVAGTLM

SEQ ID NO: 5230 - protein, 23 aa, Artificial sequence
  Protein classification predicting sequence
GFHAPTMSFPVAGTLMVEPTESE

SEQ ID NO: 5231 - protein, 26 aa, Artificial sequence
  Protein classification predicting sequence
KYWPTVKRLDDVYGDRNLFCSCVPIS

SEQ ID NO: 5232 - protein, 20 aa, Artificial sequence
  Protein classification predicting sequence
PLQDFCVADLDGKAVSVNGH

SEQ ID NO: 5233 - protein, 11 aa, Artificial sequence
  Protein classification predicting sequence
GHSPSDIACTD

SEQ ID NO: 5234 - protein, 7 aa, Artificial sequence
  Protein classification predicting sequence
GTHNTGI

SEQ ID NO: 5235 - protein, 10 aa, Artificial sequence
  Protein classification predicting sequence
NIIMYRPYGK

SEQ ID NO: 5236 - protein, 10 aa, Artificial sequence
  Protein classification predicting sequence
GGRPHWAKAH

SEQ ID NO: 5237 - protein, 11 aa, Artificial sequence
  Protein classification predicting sequence
GGGKTLDTAKA

SEQ ID NO: 5238 - protein, 22 aa, Artificial sequence
  Protein classification predicting sequence
DVIIIGGGATGAGIARDCALRG

SEQ ID NO: 5239 - protein, 22 aa, Artificial sequence
  Protein classification predicting sequence
DIATGATGRNHGLLHSGARYAV

SEQ ID NO: 5240 - protein, 9 aa, Artificial sequence
  Protein classification predicting sequence
GLFITLPED

SEQ ID NO: 5241 - protein, 8 aa, Artificial sequence
  Protein classification predicting sequence
VINRCRKP

SEQ ID NO: 5242 - protein, 11 aa, Artificial sequence
  Protein classification predicting sequence
DADILVPGDTI

SEQ ID NO: 5243 - protein, 8 aa, Artificial sequence
  Protein classification predicting sequence
REGEKLAP

SEQ ID NO: 5244 - protein, 55 aa, Artificial sequence
  Protein classification predicting sequence
GVRPLVASDDDPSGRNVSRGIVLLDHAERDGLDGFITITGGKLMTYRLMAEWATD

SEQ ID NO: 5245 - protein, 12 aa, Artificial sequence
  Protein classification predicting sequence
VCECEAVTAGEV

SEQ ID NO: 5246 - protein, 8 aa, Artificial sequence
  Protein classification predicting sequence
RVGMGTCQ

SEQ ID NO: 5247 - protein, 10 aa, Artificial sequence
  Protein classification predicting sequence
ELCACRAAGL

SEQ ID NO: 5248 - protein, 101 aa, Artificial sequence
  Protein classification predicting sequence
DALIPVANTCEMILMPACFGLADDKLWRWLNEKLPCSLMLLPTLPPSVLGIRLQNQLQRQFVRQGGVWMPGDEVKKVTCKNGVVNEIWTRNHADIPLRPRF

SEQ ID NO: 5249 - protein, 16 aa, Artificial sequence
  Protein classification predicting sequence
VLASGSFFSGGLVAER

SEQ ID NO: 5250 - protein, 9 aa, Artificial sequence
  Protein classification predicting sequence
VLASGSFFS

SEQ ID NO: 5251 - protein, 9 aa, Artificial sequence
  Protein classification predicting sequence
FSSGSLDLL

SEQ ID NO: 5252 - protein, 26 aa, Artificial sequence
  Protein classification predicting sequence
HGLRCAIVTRGQSALHFSSGSLDLLS

SEQ ID NO: 5253 - protein, 12 aa, Artificial sequence
  Protein classification predicting sequence
DFQAHLAAASLR

SEQ ID NO: 5254 - protein, 8 aa, Artificial sequence
  Protein classification predicting sequence
LPELDVLR

SEQ ID NO: 5255 - protein, 8 aa, Artificial sequence
  Protein classification predicting sequence
MPACFGLA

SEQ ID NO: 5256 - protein, 14 aa, Artificial sequence
  Protein classification predicting sequence
LLPTLPPSVLGIRL

SEQ ID NO: 5257 - protein, 12 aa, Artificial sequence
  Protein classification predicting sequence
NQLQRQFVRQGG

SEQ ID NO: 5258 - protein, 12 aa, Artificial sequence
  Protein classification predicting sequence
WMPGDEVKKVTC

SEQ ID NO: 5259 - protein, 11 aa, Artificial sequence
  Protein classification predicting sequence
GIREPILGLDV

SEQ ID NO: 5260 - protein, 9 aa, Artificial sequence
  Protein classification predicting sequence
PQPWQQFGV

SEQ ID NO: 5261 - protein, 12 aa, Artificial sequence
  Protein classification predicting sequence
GCGGGVCAVSAL

SEQ ID NO: 5262 - protein, 11 aa, Artificial sequence
  Protein classification predicting sequence
GQSALHFSSGS

SEQ ID NO: 5263 - protein, 9 aa, Artificial sequence
  Protein classification predicting sequence
EFRAVNIAR

SEQ ID NO: 5264 - protein, 9 aa, Artificial sequence
  Protein classification predicting sequence
ALDAATRGL

SEQ ID NO: 5265 - protein, 8 aa, Artificial sequence
  Protein classification predicting sequence
GGKLTTYR

SEQ ID NO: 5266 - protein, 13 aa, Artificial sequence
  Protein classification predicting sequence
LIIGGGITGAGVA

SEQ ID NO: 5267 - protein, 23 aa, Artificial sequence
  Protein classification predicting sequence
GGGVYLDFRNNDARLVIENIKRA

SEQ ID NO: 5268 - protein, 10 aa, Artificial sequence
  Protein classification predicting sequence
VTQEDVDYLL

SEQ ID NO: 5269 - protein, 11 aa, Artificial sequence
  Protein classification predicting sequence
TLAGGKITDYR

SEQ ID NO: 5270 - protein, 8 aa, Artificial sequence
  Protein classification predicting sequence
TYPVSGGE

SEQ ID NO: 5271 - protein, 17 aa, Artificial sequence
  Protein classification predicting sequence
FDVEVVSDTVSERAVVQ

SEQ ID NO: 5272 - protein, 9 aa, Artificial sequence
  Protein classification predicting sequence
RNNDARLVI

SEQ ID NO: 5273 - protein, 8 aa, Artificial sequence
  Protein classification predicting sequence
KAKLVINT

SEQ ID NO: 5274 - protein, 12 aa, Artificial sequence
  Protein classification predicting sequence
MRPTKGVHLVVD

SEQ ID NO: 5275 - protein, 11 aa, Artificial sequence
  Protein classification predicting sequence
KTYFGTTDTDY

SEQ ID NO: 5276 - protein, 14 aa, Artificial sequence
  Protein classification predicting sequence
TLAGGKITDYRKMA

SEQ ID NO: 5277 - protein, 10 aa, Artificial sequence
  Protein classification predicting sequence
IIGVKARDLL

SEQ ID NO: 5278 - protein, 90 aa, Artificial sequence
  Protein classification predicting sequence
DQEIIIKAKLVINTTGPWSDEIRQFSHKGQPIHQMRPTKGVHLVVDRQKLPVSQPVYVDTGLNDGRMVFVLPREEKTYFGTTDTDYTGDL

SEQ ID NO: 5279 - protein, 28 aa, Artificial sequence
  Protein classification predicting sequence
DIESSWAGLRPLLSGNSASDYNGGNSGK

SEQ ID NO: 5280 - protein, 8 aa, Artificial sequence
  Protein classification predicting sequence
SDDSFDHL

SEQ ID NO: 5281 - protein, 38 aa, Artificial sequence
  Protein classification predicting sequence
EAYAQLGTLSGLSMDDARYLANLYGSNAPKVFALTRQL

SEQ ID NO: 5282 - protein, 47 aa, Artificial sequence
  Protein classification predicting sequence
AAEGLSLAETLSLHYAMDYEMALKPTDYFLRRTNHLLFMRDSLDALI

SEQ ID NO: 5283 - protein, 24 aa, Artificial sequence
  Protein classification predicting sequence
LDLLIIGGGITGAGVALQAAASGL

SEQ ID NO: 5284 - protein, 44 aa, Artificial sequence
  Protein classification predicting sequence
GTSSRSTKLVHGGLRYLKQFDVEVVSDTVSERAVVQQIAPHIPK

SEQ ID NO: 5285 - protein, 10 aa, Artificial sequence
  Protein classification predicting sequence
DPMLLPVYDE

SEQ ID NO: 5286 - protein, 11 aa, Artificial sequence
  Protein classification predicting sequence
GNSASDYNGGN

SEQ ID NO: 5287 - protein, 11 aa, Artificial sequence
  Protein classification predicting sequence
LDPSAVSRGSS

SEQ ID NO: 5288 - protein, 16 aa, Artificial sequence
  Protein classification predicting sequence
YLANLYGSNAPKVFAL

SEQ ID NO: 5289 - protein, 8 aa, Artificial sequence
  Protein classification predicting sequence
TLSLHYAM

SEQ ID NO: 5290 - protein, 8 aa, Artificial sequence
  Protein classification predicting sequence
LFMRDSLD

SEQ ID NO: 5291 - protein, 14 aa, Artificial sequence
  Protein classification predicting sequence
KLDFKDVLLRPKRS

SEQ ID NO: 5292 - protein, 11 aa, Artificial sequence
  Protein classification predicting sequence
DVANGYSEHFV

SEQ ID NO: 5293 - protein, 10 aa, Artificial sequence
  Protein classification predicting sequence
GADFVMLGGM

SEQ ID NO: 5294 - protein, 8 aa, Artificial sequence
  Protein classification predicting sequence
DILGGLRS

SEQ ID NO: 5295 - protein, 10 aa, Artificial sequence
  Protein classification predicting sequence
FRNSKQTYSG

SEQ ID NO: 5296 - protein, 16 aa, Artificial sequence
  Protein classification predicting sequence
SGVPIIAANMDTVGTF

SEQ ID NO: 5297 - protein, 18 aa, Artificial sequence
  Protein classification predicting sequence
ICLDVANGYSEHFVEFVK

SEQ ID NO: 5298 - protein, 28 aa, Artificial sequence
  Protein classification predicting sequence
HTIMAGNVVTGEMVEELILSGADIIKVG

SEQ ID NO: 5299 - protein, 9 aa, Artificial sequence
  Protein classification predicting sequence
ECADAAHGL

SEQ ID NO: 5300 - protein, 14 aa, Artificial sequence
  Protein classification predicting sequence
GADFVMLGGMLAGH

SEQ ID NO: 5301 - protein, 7 aa, Artificial sequence
  Protein classification predicting sequence
LFYGMSS

SEQ ID NO: 5302 - protein, 18 aa, Artificial sequence
  Protein classification predicting sequence
AGGVAEYRASEGKTVEVP

SEQ ID NO: 5303 - protein, 7 aa, Artificial sequence
  Protein classification predicting sequence
RTTFIRV

SEQ ID NO: 5304 - protein, 8 aa, Artificial sequence
  Protein classification predicting sequence
NMDTVGTF

SEQ ID NO: 5305 - protein, 6 aa, Artificial sequence
  Protein classification predicting sequence
SDGGCT

SEQ ID NO: 5306 - protein, 9 aa, Artificial sequence
  Protein classification predicting sequence
EELILSGAD

SEQ ID NO: 5307 - protein, 7 aa, Artificial sequence
  Protein classification predicting sequence
GSVCTTR

SEQ ID NO: 5308 - protein, 11 aa, Artificial sequence
  Protein classification predicting sequence
RPKRSTLKSRS

SEQ ID NO: 5309 - protein, 11 aa, Artificial sequence
  Protein classification predicting sequence
ICLDVANGYSE

SEQ ID NO: 5310 - protein, 6 aa, Artificial sequence
  Protein classification predicting sequence
FYGMSS

SEQ ID NO: 5311 - protein, 9 aa, Artificial sequence
  Protein classification predicting sequence
RSTCTYVGA

SEQ ID NO: 5312 - protein, 6 aa, Artificial sequence
  Protein classification predicting sequence
CTYVGA

SEQ ID NO: 5313 - protein, 17 aa, Artificial sequence
  Protein classification predicting sequence
ETYYQESAGVADLITTC

SEQ ID NO: 5314 - protein, 7 aa, Artificial sequence
  Protein classification predicting sequence
SETTVAY

SEQ ID NO: 5315 - protein, 6 aa, Artificial sequence
  Protein classification predicting sequence
MWVFEE

SEQ ID NO: 5316 - protein, 5 aa, Artificial sequence
  Protein classification predicting sequence
VPHQF

SEQ ID NO: 5317 - protein, 9 aa, Artificial sequence
  Protein classification predicting sequence
PLFEAVYQI

SEQ ID NO: 5318 - protein, 9 aa, Artificial sequence
  Protein classification predicting sequence
TVLLGVPAQ

SEQ ID NO: 5319 - protein, 7 aa, Artificial sequence
  Protein classification predicting sequence
GDLVATC

SEQ ID NO: 5320 - protein, 6 aa, Artificial sequence
  Protein classification predicting sequence
GLPTAI

SEQ ID NO: 5321 - protein, 7 aa, Artificial sequence
  Protein classification predicting sequence
KNVIAIA

SEQ ID NO: 5322 - protein, 8 aa, Artificial sequence
  Protein classification predicting sequence
GLSGAGDL

SEQ ID NO: 5323 - protein, 6 aa, Artificial sequence
  Protein classification predicting sequence
DLSRNR

SEQ ID NO: 5324 - protein, 19 aa, Artificial sequence
  Protein classification predicting sequence
GDLIVTCTSVHSRNWRAGN

SEQ ID NO: 5325 - protein, 39 aa, Artificial sequence
  Protein classification predicting sequence
ELMDEINTKHENSRYLPGITLPSTIVAYSSLEEALVDVN

SEQ ID NO: 5326 - protein, 27 aa, Artificial sequence
  Protein classification predicting sequence
TWIHASKGIEPGTSKRISEVIEEEIPE

SEQ ID NO: 5327 - protein, 6 aa, Artificial sequence
  Protein classification predicting sequence
QDLFMN

SEQ ID NO: 5328 - protein, 6 aa, Artificial sequence
  Protein classification predicting sequence
GAGSWG

SEQ ID NO: 5329 - protein, 14 aa, Artificial sequence
  Protein classification predicting sequence
ALAMVLADNGHDVR

SEQ ID NO: 5330 - protein, 7 aa, Artificial sequence
  Protein classification predicting sequence
DNGHDVR

SEQ ID NO: 5331 - protein, 7 aa, Artificial sequence
  Protein classification predicting sequence
PTKAMRE

SEQ ID NO: 5332 - protein, 8 aa, Artificial sequence
  Protein classification predicting sequence
GAGSWGTA

SEQ ID NO: 5333 - protein, 6 aa, Artificial sequence
  Protein classification predicting sequence
GSWGTA

SEQ ID NO: 5334 - protein, 9 aa, Artificial sequence
  Protein classification predicting sequence
VHVSKGIEP

SEQ ID NO: 5335 - protein, 12 aa, Artificial sequence
  Protein classification predicting sequence
VVLSGPSHAEEV

SEQ ID NO: 5336 - protein, 9 aa, Artificial sequence
  Protein classification predicting sequence
AAEEVQDLF

SEQ ID NO: 5337 - protein, 19 aa, Artificial sequence
  Protein classification predicting sequence
GGALKNIIALAAGITDGLG

SEQ ID NO: 5338 - protein, 9 aa, Artificial sequence
  Protein classification predicting sequence
KMGGNPLTF

SEQ ID NO: 5339 - protein, 6 aa, Artificial sequence
  Protein classification predicting sequence
VPSHVF

SEQ ID NO: 5340 - protein, 6 aa, Artificial sequence
  Protein classification predicting sequence
KSFRVY

SEQ ID NO: 5341 - protein, 15 aa, Artificial sequence
  Protein classification predicting sequence
QLGGAVKNVIAIGAG

SEQ ID NO: 5342 - protein, 9 aa, Artificial sequence
  Protein classification predicting sequence
KNVIAIGAG

SEQ ID NO: 5343 - protein, 8 aa, Artificial sequence
  Protein classification predicting sequence
GLGDLVLT

SEQ ID NO: 5344 - protein, 8 aa, Artificial sequence
  Protein classification predicting sequence
GLAGVGDL

SEQ ID NO: 5345 - protein, 6 aa, Artificial sequence
  Protein classification predicting sequence
SGPTFA

SEQ ID NO: 5346 - protein, 8 aa, Artificial sequence
  Protein classification predicting sequence
GDLVLTCT

SEQ ID NO: 5347 - protein, 7 aa, Artificial sequence
  Protein classification predicting sequence
TFAGLTG

SEQ ID NO: 5348 - protein, 7 aa, Artificial sequence
  Protein classification predicting sequence
GARPETL

SEQ ID NO: 5349 - protein, 8 aa, Artificial sequence
  Protein classification predicting sequence
KGIEQNTG

SEQ ID NO: 5350 - protein, 7 aa, Artificial sequence
  Protein classification predicting sequence
AALVTRG

SEQ ID NO: 5351 - protein, 8 aa, Artificial sequence
  Protein classification predicting sequence
TGDLSRNR

SEQ ID NO: 5352 - protein, 11 aa, Artificial sequence
  Protein classification predicting sequence
PITEAVCAVLF

SEQ ID NO: 5353 - protein, 8 aa, Artificial sequence
  Protein classification predicting sequence
TGLLLSEI

SEQ ID NO: 5354 - protein, 12 aa, Artificial sequence
  Protein classification predicting sequence
TLNGLAGLGDLC

SEQ ID NO: 5355 - protein, 7 aa, Artificial sequence
  Protein classification predicting sequence
TRGLAEI

SEQ ID NO: 5356 - protein, 6 aa, Artificial sequence
  Protein classification predicting sequence
VDMPIT

SEQ ID NO: 5357 - protein, 7 aa, Artificial sequence
  Protein classification predicting sequence
KNIIALA

SEQ ID NO: 5358 - protein, 9 aa, Artificial sequence
  Protein classification predicting sequence
GDLIVTCTS

SEQ ID NO: 5359 - protein, 7 aa, Artificial sequence
  Protein classification predicting sequence
LMERDKK

SEQ ID NO: 5360 - protein, 6 aa, Artificial sequence
  Protein classification predicting sequence
FRVYTN

SEQ ID NO: 5361 - protein, 8 aa, Artificial sequence
  Protein classification predicting sequence
KAALMTRG

SEQ ID NO: 5362 - protein, 7 aa, Artificial sequence
  Protein classification predicting sequence
ALYRVLF

SEQ ID NO: 5363 - protein, 11 aa, Artificial sequence
  Protein classification predicting sequence
ATLVSLAKGIE

SEQ ID NO: 5364 - protein, 8 aa, Artificial sequence
  Protein classification predicting sequence
LITRGLAE

SEQ ID NO: 5365 - protein, 8 aa, Artificial sequence
  Protein classification predicting sequence
VKNILAIA

SEQ ID NO: 5366 - protein, 11 aa, Artificial sequence
  Protein classification predicting sequence
AGLGDLVLTCT

SEQ ID NO: 5367 - protein, 25 aa, Artificial sequence
  Protein classification predicting sequence
AGLGDLVLTCTDNQSRNRRFGLALG

SEQ ID NO: 5368 - protein, 6 aa, Artificial sequence
  Protein classification predicting sequence
LKNIVA

SEQ ID NO: 5369 - protein, 12 aa, Artificial sequence
  Protein classification predicting sequence
ESCGVADLITTC

SEQ ID NO: 5370 - protein, 12 aa, Artificial sequence
  Protein classification predicting sequence
GGRNRKVAEAFA

SEQ ID NO: 5371 - protein, 6 aa, Artificial sequence
  Protein classification predicting sequence
GQKLQG

SEQ ID NO: 5372 - protein, 9 aa, Artificial sequence
  Protein classification predicting sequence
ENSRYLPGI

SEQ ID NO: 5373 - protein, 11 aa, Artificial sequence
  Protein classification predicting sequence
NARAGLITRGL

SEQ ID NO: 5374 - protein, 89 aa, Artificial sequence
  Protein classification predicting sequence
AVEVCGALKNIVACGAGFVDGLKLGDNTKAAVIRLGLMEMIRFVDVFYPGSKLSTFFESCGVADLITTCYGGRNRRVSEAFVTSGKTIE

SEQ ID NO: 5375 - protein, 19 aa, Artificial sequence
  Protein classification predicting sequence
NQLKPKDLIDCIRNHPEHM

SEQ ID NO: 5376 - protein, 6 aa, Artificial sequence
  Protein classification predicting sequence
NHPEHM

SEQ ID NO: 5377 - protein, 26 aa, Artificial sequence
  Protein classification predicting sequence
IDGKKLTEIINETHENVKYLKGHKLP

SEQ ID NO: 5378 - protein, 7 aa, Artificial sequence
  Protein classification predicting sequence
NVVAVPD

SEQ ID NO: 5379 - protein, 13 aa, Artificial sequence
  Protein classification predicting sequence
DLIDCIRNHPEHM

SEQ ID NO: 5380 - protein, 24 aa, Artificial sequence
  Protein classification predicting sequence
KVNVCIVGSGNWGSAIAKIVGANA

SEQ ID NO: 5381 - protein, 121 aa, Artificial sequence
  Protein classification predicting sequence
NVVAVPDLVEAAKNADILIFVVPHQFIPNFCKQLLGKIKPNAIAISLIKGFDKAEGGGIDLISHIITRHLKIPCAVLMGANLANEVAEGNFCETTIGCTDKKYGKVLRDLFQANHFRVVVV

SEQ ID NO: 5382 - protein, 7 aa, Artificial sequence
  Protein classification predicting sequence
ALKNIIA

SEQ ID NO: 5383 - protein, 7 aa, Artificial sequence
  Protein classification predicting sequence
GSWGTAL

SEQ ID NO: 5384 - protein, 6 aa, Artificial sequence
  Protein classification predicting sequence
EINTKH

SEQ ID NO: 5385 - protein, 7 aa, Artificial sequence
  Protein classification predicting sequence
LFVVPTK

SEQ ID NO: 5386 - protein, 6 aa, Artificial sequence
  Protein classification predicting sequence
LFMNDY

SEQ ID NO: 5387 - protein, 24 aa, Artificial sequence
  Protein classification predicting sequence
ASMTVIGAGSYGTALAITLARNGH

SEQ ID NO: 5388 - protein, 10 aa, Artificial sequence
  Protein classification predicting sequence
AFLPDVPFPD

SEQ ID NO: 5389 - protein, 12 aa, Artificial sequence
  Protein classification predicting sequence
SGPTFAKELAAG

SEQ ID NO: 5390 - protein, 10 aa, Artificial sequence
  Protein classification predicting sequence
ALITRGLAEM

SEQ ID NO: 5391 - protein, 10 aa, Artificial sequence
  Protein classification predicting sequence
RLGAALGADP

SEQ ID NO: 5392 - protein, 6 aa, Artificial sequence
  Protein classification predicting sequence
GSGNWG

SEQ ID NO: 5393 - protein, 7 aa, Artificial sequence
  Protein classification predicting sequence
HENVKYL

SEQ ID NO: 5394 - protein, 17 aa, Artificial sequence
  Protein classification predicting sequence
GDNTKAAVIRLGLMEMI

SEQ ID NO: 5395 - protein, 18 aa, Artificial sequence
  Protein classification predicting sequence
ESCGVADLITTCYGGRNR

SEQ ID NO: 5396 - protein, 9 aa, Artificial sequence
  Protein classification predicting sequence
IEELEKEML

SEQ ID NO: 5397 - protein, 6 aa, Artificial sequence
  Protein classification predicting sequence
DKFPLF

SEQ ID NO: 5398 - protein, 7 aa, Artificial sequence
  Protein classification predicting sequence
TFYGLTG

SEQ ID NO: 5399 - protein, 8 aa, Artificial sequence
  Protein classification predicting sequence
NMVVEGIY

SEQ ID NO: 5400 - protein, 8 aa, Artificial sequence
  Protein classification predicting sequence
LALVLADN

SEQ ID NO: 5401 - protein, 11 aa, Artificial sequence
  Protein classification predicting sequence
VLSGPSHAEEV

SEQ ID NO: 5402 - protein, 8 aa, Artificial sequence
  Protein classification predicting sequence
GDNAKAAL

SEQ ID NO: 5403 - protein, 19 aa, Artificial sequence
  Protein classification predicting sequence
EVLESMGMVVEGVRTTKAA

SEQ ID NO: 5404 - protein, 7 aa, Artificial sequence
  Protein classification predicting sequence
ALYDVLF

SEQ ID NO: 5405 - protein, 6 aa, Artificial sequence
  Protein classification predicting sequence
YTNTDV

SEQ ID NO: 5406 - protein, 8 aa, Artificial sequence
  Protein classification predicting sequence
AALITRGL

SEQ ID NO: 5407 - protein, 10 aa, Artificial sequence
  Protein classification predicting sequence
AALITRGLAE

SEQ ID NO: 5408 - protein, 20 aa, Artificial sequence
  Protein classification predicting sequence
AALITRGLAEMTRLGLSMGA

SEQ ID NO: 5409 - protein, 7 aa, Artificial sequence
  Protein classification predicting sequence
IGQVVEG

SEQ ID NO: 5410 - protein, 11 aa, Artificial sequence
  Protein classification predicting sequence
GAGSYGTALAI

SEQ ID NO: 5411 - protein, 10 aa, Artificial sequence
  Protein classification predicting sequence
SGPTFAKELA

SEQ ID NO: 5412 - protein, 15 aa, Artificial sequence
  Protein classification predicting sequence
ETFLGLSGAGDLFLT

SEQ ID NO: 5413 - protein, 7 aa, Artificial sequence
  Protein classification predicting sequence
KLTEIIN

SEQ ID NO: 5414 - protein, 8 aa, Artificial sequence
  Protein classification predicting sequence
EKELLNGQ

SEQ ID NO: 5415 - protein, 6 aa, Artificial sequence
  Protein classification predicting sequence
VVVPSH

SEQ ID NO: 5416 - protein, 8 aa, Artificial sequence
  Protein classification predicting sequence
GMAGLGDL

SEQ ID NO: 5417 - protein, 14 aa, Artificial sequence
  Protein classification predicting sequence
LTCTDNQSRNRRFG

SEQ ID NO: 5418 - protein, 7 aa, Artificial sequence
  Protein classification predicting sequence
SRNWRAG

SEQ ID NO: 5419 - protein, 6 aa, Artificial sequence
  Protein classification predicting sequence
VRIWGN

SEQ ID NO: 5420 - protein, 13 aa, Artificial sequence
  Protein classification predicting sequence
LFVVPTKVTRLVA

SEQ ID NO: 5421 - protein, 7 aa, Artificial sequence
  Protein classification predicting sequence
VLYENLD

SEQ ID NO: 5422 - protein, 11 aa, Artificial sequence
  Protein classification predicting sequence
TSVHSRNWRAG

SEQ ID NO: 5423 - protein, 6 aa, Artificial sequence
  Protein classification predicting sequence
EMPITE

SEQ ID NO: 5424 - protein, 7 aa, Artificial sequence
  Protein classification predicting sequence
KGIENGT

SEQ ID NO: 5425 - protein, 15 aa, Artificial sequence
  Protein classification predicting sequence
PLAVLSGPTFAKELA

SEQ ID NO: 5426 - protein, 6 aa, Artificial sequence
  Protein classification predicting sequence
KNVIAI

SEQ ID NO: 5427 - protein, 20 aa, Artificial sequence
  Protein classification predicting sequence
GLGDLVLTCTDNQSRNRRFG

SEQ ID NO: 5428 - protein, 26 aa, Artificial sequence
  Protein classification predicting sequence
GLGDLVLTCTDNQSRNRRFGMMLGQG

SEQ ID NO: 5429 - protein, 7 aa, Artificial sequence
  Protein classification predicting sequence
GFGANAR

SEQ ID NO: 5430 - protein, 8 aa, Artificial sequence
  Protein classification predicting sequence
MRANLERW

SEQ ID NO: 5431 - protein, 6 aa, Artificial sequence
  Protein classification predicting sequence
QPAATV

SEQ ID NO: 5432 - protein, 9 aa, Artificial sequence
  Protein classification predicting sequence
DVVGTEIGG

SEQ ID NO: 5433 - protein, 6 aa, Artificial sequence
  Protein classification predicting sequence
SPLSRN

SEQ ID NO: 5434 - protein, 7 aa, Artificial sequence
  Protein classification predicting sequence
YFRPYTN

SEQ ID NO: 5435 - protein, 14 aa, Artificial sequence
  Protein classification predicting sequence
VEMPLTDAVHRVCH

SEQ ID NO: 5436 - protein, 8 aa, Artificial sequence
  Protein classification predicting sequence
KRVSEMIE

SEQ ID NO: 5437 - protein, 10 aa, Artificial sequence
  Protein classification predicting sequence
MGMVVEGVRT

SEQ ID NO: 5438 - protein, 9 aa, Artificial sequence
  Protein classification predicting sequence
VITSKGIEQ

SEQ ID NO: 5439 - protein, 7 aa, Artificial sequence
  Protein classification predicting sequence
LSGPSFA

SEQ ID NO: 5440 - protein, 7 aa, Artificial sequence
  Protein classification predicting sequence
AEISRLG

SEQ ID NO: 5441 - protein, 14 aa, Artificial sequence
  Protein classification predicting sequence
QSRNRRFGIMLGQG

SEQ ID NO: 5442 - protein, 10 aa, Artificial sequence
  Protein classification predicting sequence
LAITLARNGH

SEQ ID NO: 5443 - protein, 9 aa, Artificial sequence
  Protein classification predicting sequence
HCGKSFRVY

SEQ ID NO: 5444 - protein, 14 aa, Artificial sequence
  Protein classification predicting sequence
GFGANARTALITRG

SEQ ID NO: 5445 - protein, 18 aa, Artificial sequence
  Protein classification predicting sequence
AVQASRDLLVVVPSHVFG

SEQ ID NO: 5446 - protein, 10 aa, Artificial sequence
  Protein classification predicting sequence
LVVVPSHVFG

SEQ ID NO: 5447 - protein, 15 aa, Artificial sequence
  Protein classification predicting sequence
DLQEKIHCSKTFRVY

SEQ ID NO: 5448 - protein, 8 aa, Artificial sequence
  Protein classification predicting sequence
RLGAALGA

SEQ ID NO: 5449 - protein, 6 aa, Artificial sequence
  Protein classification predicting sequence
GVEMPI

SEQ ID NO: 5450 - protein, 8 aa, Artificial sequence
  Protein classification predicting sequence
DLLARDKK

SEQ ID NO: 5451 - protein, 6 aa, Artificial sequence
  Protein classification predicting sequence
SGPNLA

SEQ ID NO: 5452 - protein, 7 aa, Artificial sequence
  Protein classification predicting sequence
SRNYQVG

SEQ ID NO: 5453 - protein, 10 aa, Artificial sequence
  Protein classification predicting sequence
WGSAIAKIVG

SEQ ID NO: 5454 - protein, 7 aa, Artificial sequence
  Protein classification predicting sequence
KGHLKAN

SEQ ID NO: 5455 - protein, 11 aa, Artificial sequence
  Protein classification predicting sequence
GLKLISEVIGE

SEQ ID NO: 5456 - protein, 9 aa, Artificial sequence
  Protein classification predicting sequence
LMQTPNFRI

SEQ ID NO: 5457 - protein, 10 aa, Artificial sequence
  Protein classification predicting sequence
VAVGAGFCDG

SEQ ID NO: 5458 - protein, 11 aa, Artificial sequence
  Protein classification predicting sequence
TRGLAEMTRLG

SEQ ID NO: 5459 - protein, 7 aa, Artificial sequence
  Protein classification predicting sequence
AKLFCSG

SEQ ID NO: 5460 - protein, 10 aa, Artificial sequence
  Protein classification predicting sequence
DVARGLPTAV

SEQ ID NO: 5461 - protein, 7 aa, Artificial sequence
  Protein classification predicting sequence
GVQLGGA

SEQ ID NO: 5462 - protein, 7 aa, Artificial sequence
  Protein classification predicting sequence
GVELGGA

SEQ ID NO: 5463 - protein, 7 aa, Artificial sequence
  Protein classification predicting sequence
ALITRGL

SEQ ID NO: 5464 - protein, 37 aa, Artificial sequence
  Protein classification predicting sequence
AFLPDVPFPDTLHLESDLATALAASRNILVVVPSHVF

SEQ ID NO: 5465 - protein, 55 aa, Artificial sequence
  Protein classification predicting sequence
KIGQVVEGYRNTKEVRELAHRFGVEMPITEEIYQVLYCGKNAREAALTLLGRARK

SEQ ID NO: 5466 - protein, 8 aa, Artificial sequence
  Protein classification predicting sequence
FVVPHQFI

SEQ ID NO: 5467 - protein, 7 aa, Artificial sequence
  Protein classification predicting sequence
FCETTIG

SEQ ID NO: 5468 - protein, 8 aa, Artificial sequence
  Protein classification predicting sequence
FPLFTAVY

SEQ ID NO: 5469 - protein, 16 aa, Artificial sequence
  Protein classification predicting sequence
VWATKGLEAETGRLLQ

SEQ ID NO: 5470 - protein, 7 aa, Artificial sequence
  Protein classification predicting sequence
VAREALG

SEQ ID NO: 5471 - protein, 26 aa, Artificial sequence
  Protein classification predicting sequence
TFMGMAGLGDLVLTCTDNQSRNRRFG

SEQ ID NO: 5472 - protein, 7 aa, Artificial sequence
  Protein classification predicting sequence
CNQAFLP

SEQ ID NO: 5473 - protein, 7 aa, Artificial sequence
  Protein classification predicting sequence
WATKGLE

SEQ ID NO: 5474 - protein, 35 aa, Artificial sequence
  Protein classification predicting sequence
QLGGAVKNVIAIGAGMSDGIGFGANARTALITRGL

SEQ ID NO: 5475 - protein, 14 aa, Artificial sequence
  Protein classification predicting sequence
IGQVVEGYRNTKEV

SEQ ID NO: 5476 - protein, 8 aa, Artificial sequence
  Protein classification predicting sequence
GALKNIIA

SEQ ID NO: 5477 - protein, 7 aa, Artificial sequence
  Protein classification predicting sequence
GDLIVTC

SEQ ID NO: 5478 - protein, 35 aa, Artificial sequence
  Protein classification predicting sequence
AVDELNTCHTNKKYLKYAKLDVNIIATSDMTKAIQ

SEQ ID NO: 5479 - protein, 22 aa, Artificial sequence
  Protein classification predicting sequence
VSKLTQDLFMNDYLRVYTNDDL

SEQ ID NO: 5480 - protein, 13 aa, Artificial sequence
  Protein classification predicting sequence
GVELGGALKNIIA

SEQ ID NO: 5481 - protein, 7 aa, Artificial sequence
  Protein classification predicting sequence
QIEEINT

SEQ ID NO: 5482 - protein, 15 aa, Artificial sequence
  Protein classification predicting sequence
RSDIVVVSGPSHAEE

SEQ ID NO: 5483 - protein, 15 aa, Artificial sequence
  Protein classification predicting sequence
LFSNHYFRLYTNTDV

SEQ ID NO: 5484 - protein, 12 aa, Artificial sequence
  Protein classification predicting sequence
ALGRGEKLEDIE

SEQ ID NO: 5485 - protein, 10 aa, Artificial sequence
  Protein classification predicting sequence
AIYKSIYEGA

SEQ ID NO: 5486 - protein, 9 aa, Artificial sequence
  Protein classification predicting sequence
GPNLAREIA

SEQ ID NO: 5487 - protein, 6 aa, Artificial sequence
  Protein classification predicting sequence
GADPLT

SEQ ID NO: 5488 - protein, 6 aa, Artificial sequence
  Protein classification predicting sequence
RMSEVI

SEQ ID NO: 5489 - protein, 16 aa, Artificial sequence
  Protein classification predicting sequence
LFVVPTKVTRLVAKQV

SEQ ID NO: 5490 - protein, 9 aa, Artificial sequence
  Protein classification predicting sequence
MHASKGLEP

SEQ ID NO: 5491 - protein, 7 aa, Artificial sequence
  Protein classification predicting sequence
EAAKYVQ

SEQ ID NO: 5492 - protein, 7 aa, Artificial sequence
  Protein classification predicting sequence
YFRLYTN

SEQ ID NO: 5493 - protein, 9 aa, Artificial sequence
  Protein classification predicting sequence
GYGDNAKAA

SEQ ID NO: 5494 - protein, 47 aa, Artificial sequence
  Protein classification predicting sequence
GYGDNAKAAVITRGLAEITRLGVKLGADPLTYSGLSGVGDLIVTGTS

SEQ ID NO: 5495 - protein, 19 aa, Artificial sequence
  Protein classification predicting sequence
PLTYSGLSGVGDLIVTGTS

SEQ ID NO: 5496 - protein, 9 aa, Artificial sequence
  Protein classification predicting sequence
NMGMVIEGI

SEQ ID NO: 5497 - protein, 7 aa, Artificial sequence
  Protein classification predicting sequence
TTKVAYE

SEQ ID NO: 5498 - protein, 7 aa, Artificial sequence
  Protein classification predicting sequence
MMSNEFR

SEQ ID NO: 5499 - protein, 16 aa, Artificial sequence
  Protein classification predicting sequence
VVVSGPSHAEETIVRD

SEQ ID NO: 5500 - protein, 9 aa, Artificial sequence
  Protein classification predicting sequence
TLITAASKD

SEQ ID NO: 5501 - protein, 7 aa, Artificial sequence
  Protein classification predicting sequence
GGAVKNV

SEQ ID NO: 5502 - protein, 9 aa, Artificial sequence
  Protein classification predicting sequence
GGALKNIIA

SEQ ID NO: 5503 - protein, 6 aa, Artificial sequence
  Protein classification predicting sequence
SGPSHA

SEQ ID NO: 5504 - protein, 11 aa, Artificial sequence
  Protein classification predicting sequence
MTVIGAGSYGT

SEQ ID NO: 5505 - protein, 22 aa, Artificial sequence
  Protein classification predicting sequence
KAVQASRDLLVVVPSHVFGIVL

SEQ ID NO: 5506 - protein, 19 aa, Artificial sequence
  Protein classification predicting sequence
DSRICWATKGLEPETGRLL

SEQ ID NO: 5507 - protein, 9 aa, Artificial sequence
  Protein classification predicting sequence
RMGVEMPIV

SEQ ID NO: 5508 - protein, 25 aa, Artificial sequence
  Protein classification predicting sequence
QIYQVLYQGKDARLAAQDLLARDKK

SEQ ID NO: 5509 - protein, 11 aa, Artificial sequence
  Protein classification predicting sequence
PTAISVASPDA

SEQ ID NO: 5510 - protein, 6 aa, Artificial sequence
  Protein classification predicting sequence
GMSDGI

SEQ ID NO: 5511 - protein, 6 aa, Artificial sequence
  Protein classification predicting sequence
SGPSFA

SEQ ID NO: 5512 - protein, 7 aa, Artificial sequence
  Protein classification predicting sequence
LVVVPSH

SEQ ID NO: 5513 - protein, 23 aa, Artificial sequence
  Protein classification predicting sequence
IPLAVISGPTFAKELAAGLPTAI

SEQ ID NO: 5514 - protein, 17 aa, Artificial sequence
  Protein classification predicting sequence
SGPTFAKELAAGLPTAI

SEQ ID NO: 5515 - protein, 13 aa, Artificial sequence
  Protein classification predicting sequence
KNAREAALTLLGR

SEQ ID NO: 5516 - protein, 10 aa, Artificial sequence
  Protein classification predicting sequence
THENVKYLKG

SEQ ID NO: 5517 - protein, 7 aa, Artificial sequence
  Protein classification predicting sequence
KFGRMFF

SEQ ID NO: 5518 - protein, 7 aa, Artificial sequence
  Protein classification predicting sequence
ADLITTC

SEQ ID NO: 5519 - protein, 8 aa, Artificial sequence
  Protein classification predicting sequence
GGKWTTYR

SEQ ID NO: 5520 - protein, 8 aa, Artificial sequence
  Protein classification predicting sequence
RRTRLAFL

SEQ ID NO: 5521 - protein, 15 aa, Artificial sequence
  Protein classification predicting sequence
LAAAAAQSVYAFSAR

SEQ ID NO: 5522 - protein, 9 aa, Artificial sequence
  Protein classification predicting sequence
LVVLGFPCN

SEQ ID NO: 5523 - protein, 8 aa, Artificial sequence
  Protein classification predicting sequence
EVNGAGAH

SEQ ID NO: 5524 - protein, 8 aa, Artificial sequence
  Protein classification predicting sequence
LMTDPKLI

SEQ ID NO: 5525 - protein, 24 aa, Artificial sequence
  Protein classification predicting sequence
WSPVCRNDVAWNFEKFLVGPDGVP

SEQ ID NO: 5526 - protein, 14 aa, Artificial sequence
  Protein classification predicting sequence
WNFEKFLVGPDGVP

SEQ ID NO: 5527 - protein, 7 aa, Artificial sequence
  Protein classification predicting sequence
RRYSRRF

SEQ ID NO: 5528 - protein, 25 aa, Artificial sequence
  Protein classification predicting sequence
RRYSRRFQTIDIEPDIEALLSQGPS

SEQ ID NO: 5529 - protein, 9 aa, Artificial sequence
  Protein classification predicting sequence
LFEKCEVNG

SEQ ID NO: 5530 - protein, 6 aa, Artificial sequence
  Protein classification predicting sequence
IIWSPV

SEQ ID NO: 5531 - protein, 8 aa, Artificial sequence
  Protein classification predicting sequence
AWNFEKFL

SEQ ID NO: 5532 - protein, 16 aa, Artificial sequence
  Protein classification predicting sequence
LVVLGFPCNQFGHQEN

SEQ ID NO: 5533 - protein, 6 aa, Artificial sequence
  Protein classification predicting sequence
KCEVNG

SEQ ID NO: 5534 - protein, 10 aa, Artificial sequence
  Protein classification predicting sequence
FEKFLVGPDG

SEQ ID NO: 5535 - protein, 12 aa, Artificial sequence
  Protein classification predicting sequence
LIENVASLCGTT

SEQ ID NO: 5536 - protein, 8 aa, Artificial sequence
  Protein classification predicting sequence
ALPAPSDD

SEQ ID NO: 5537 - protein, 11 aa, Artificial sequence
  Protein classification predicting sequence
DDPFSLMTDPK

SEQ ID NO: 5538 - protein, 6 aa, Artificial sequence
  Protein classification predicting sequence
WSPVCR

SEQ ID NO: 5539 - protein, 11 aa, Artificial sequence
  Protein classification predicting sequence
IAKSFYDLSAI

SEQ ID NO: 5540 - protein, 25 aa, Artificial sequence
  Protein classification predicting sequence
DFNTFRGRAVLIENVASLCGTTTRD

SEQ ID NO: 5541 - protein, 14 aa, Artificial sequence
  Protein classification predicting sequence
NEEILNSLKYVRPG

SEQ ID NO: 5542 - protein, 12 aa, Artificial sequence
  Protein classification predicting sequence
NEEILNSLKYVR

SEQ ID NO: 5543 - protein, 12 aa, Artificial sequence
  Protein classification predicting sequence
ASCLLSLLLAGF

SEQ ID NO: 5544 - protein, 10 aa, Artificial sequence
  Protein classification predicting sequence
LKYVRPGGGF

SEQ ID NO: 5545 - protein, 34 aa, Artificial sequence
  Protein classification predicting sequence
GKYVLFVNVASYCGLTGQYIELNALQEELAPFGL

SEQ ID NO: 5546 - protein, 8 aa, Artificial sequence
  Protein classification predicting sequence
MRWHHRTT

SEQ ID NO: 5547 - protein, 12 aa, Artificial sequence
  Protein classification predicting sequence
LFVNVASYCGLT

SEQ ID NO: 5548 - protein, 16 aa, Artificial sequence
  Protein classification predicting sequence
HDIRWNFEKFLVGPDG

SEQ ID NO: 5549 - protein, 22 aa, Artificial sequence
  Protein classification predicting sequence
HRTTVSNVKMDILSYMRRQAAL

SEQ ID NO: 5550 - protein, 18 aa, Artificial sequence
  Protein classification predicting sequence
HDIRWNFEKFLVGPDGIP

SEQ ID NO: 5551 - protein, 9 aa, Artificial sequence
  Protein classification predicting sequence
AKDIDGHMV

SEQ ID NO: 5552 - protein, 14 aa, Artificial sequence
  Protein classification predicting sequence
VCIVTNVASQCGKT

SEQ ID NO: 5553 - protein, 10 aa, Artificial sequence
  Protein classification predicting sequence
VKRYGPMEEP

SEQ ID NO: 5554 - protein, 6 aa, Artificial sequence
  Protein classification predicting sequence
QEPGSN

SEQ ID NO: 5555 - protein, 18 aa, Artificial sequence
  Protein classification predicting sequence
SKICVNGDDAHPLWKWMK

SEQ ID NO: 5556 - protein, 30 aa, Artificial sequence
  Protein classification predicting sequence
LGNAIKWNFTKFLIDKNGCVVKRYGPMEEP

SEQ ID NO: 5557 - protein, 7 aa, Artificial sequence
  Protein classification predicting sequence
VIEKDLP

SEQ ID NO: 5558 - protein, 13 aa, Artificial sequence
  Protein classification predicting sequence
LGNAIKWNFTKFL

SEQ ID NO: 5559 - protein, 16 aa, Artificial sequence
  Protein classification predicting sequence
DKNGCVVKRYGPMEEP

SEQ ID NO: 5560 - protein, 17 aa, Artificial sequence
  Protein classification predicting sequence
VNYTQLVDLHARYAECG

SEQ ID NO: 5561 - protein, 29 aa, Artificial sequence
  Protein classification predicting sequence
VNYTQLVDLHARYAECGLRILAFPCNQFG

SEQ ID NO: 5562 - protein, 35 aa, Artificial sequence
  Protein classification predicting sequence
VNYTQLVDLHARYAECGLRILAFPCNQFGRQEPGS

SEQ ID NO: 5563 - protein, 12 aa, Artificial sequence
  Protein classification predicting sequence
EILPGLKYVRPG

SEQ ID NO: 5564 - protein, 16 aa, Artificial sequence
  Protein classification predicting sequence
FQLFEKGDVNGEKEQK

SEQ ID NO: 5565 - protein, 6 aa, Artificial sequence
  Protein classification predicting sequence
IPFKQY

SEQ ID NO: 5566 - protein, 6 aa, Artificial sequence
  Protein classification predicting sequence
PNFQLF

SEQ ID NO: 5567 - protein, 7 aa, Artificial sequence
  Protein classification predicting sequence
KGDVNGE

SEQ ID NO: 5568 - protein, 8 aa, Artificial sequence
  Protein classification predicting sequence
KMDCYKDV

SEQ ID NO: 5569 - protein, 7 aa, Artificial sequence
  Protein classification predicting sequence
FKQYAGK

SEQ ID NO: 5570 - protein, 9 aa, Artificial sequence
  Protein classification predicting sequence
QYPELNALQ

SEQ ID NO: 5571 - protein, 10 aa, Artificial sequence
  Protein classification predicting sequence
KGDVNGEKEQ

SEQ ID NO: 5572 - protein, 10 aa, Artificial sequence
  Protein classification predicting sequence
WNFEKFLVGP

SEQ ID NO: 5573 - protein, 11 aa, Artificial sequence
  Protein classification predicting sequence
NSEILLGLKYV

SEQ ID NO: 5574 - protein, 7 aa, Artificial sequence
  Protein classification predicting sequence
VNVATYC

SEQ ID NO: 5575 - protein, 7 aa, Artificial sequence
  Protein classification predicting sequence
NMHIFGK

SEQ ID NO: 5576 - protein, 9 aa, Artificial sequence
  Protein classification predicting sequence
HPLYKFLKE

SEQ ID NO: 5577 - protein, 8 aa, Artificial sequence
  Protein classification predicting sequence
AEEFVTMR

SEQ ID NO: 5578 - protein, 11 aa, Artificial sequence
  Protein classification predicting sequence
ICELPFHPISS

SEQ ID NO: 5579 - protein, 13 aa, Artificial sequence
  Protein classification predicting sequence
GGTCVIRGCVPKK

SEQ ID NO: 5580 - protein, 14 aa, Artificial sequence
  Protein classification predicting sequence
RKELPLRGFDDEMR

SEQ ID NO: 5581 - protein, 7 aa, Artificial sequence
  Protein classification predicting sequence
PTKPDYR

SEQ ID NO: 5582 - protein, 10 aa, Artificial sequence
  Protein classification predicting sequence
FDSTVGIHPS

SEQ ID NO: 5583 - protein, 9 aa, Artificial sequence
  Protein classification predicting sequence
NLTPVALME

SEQ ID NO: 5584 - protein, 6 aa, Artificial sequence
  Protein classification predicting sequence
AMYYAM

SEQ ID NO: 5585 - protein, 11 aa, Artificial sequence
  Protein classification predicting sequence
DFDNTVAIHPT

SEQ ID NO: 5586 - protein, 6 aa, Artificial sequence
  Protein classification predicting sequence
RAASYG

SEQ ID NO: 5587 - protein, 8 aa, Artificial sequence
  Protein classification predicting sequence
EKVVGLHI

SEQ ID NO: 5588 - protein, 9 aa, Artificial sequence
  Protein classification predicting sequence
EILQGFGVA

SEQ ID NO: 5589 - protein, 8 aa, Artificial sequence
  Protein classification predicting sequence
FSHPPIGT

SEQ ID NO: 5590 - protein, 7 aa, Artificial sequence
  Protein classification predicting sequence
PDIPGKE

SEQ ID NO: 5591 - protein, 9 aa, Artificial sequence
  Protein classification predicting sequence
RLNGIYERN

SEQ ID NO: 5592 - protein, 8 aa, Artificial sequence
  Protein classification predicting sequence
AIAAGRKL

SEQ ID NO: 5593 - protein, 12 aa, Artificial sequence
  Protein classification predicting sequence
SAEILQGFGVAI

SEQ ID NO: 5594 - protein, 10 aa, Artificial sequence
  Protein classification predicting sequence
FSHPEAGSIG

SEQ ID NO: 5595 - protein, 8 aa, Artificial sequence
  Protein classification predicting sequence
YFYIMHRF

SEQ ID NO: 5596 - protein, 14 aa, Artificial sequence
  Protein classification predicting sequence
KTGFGTGGWQLAAL

SEQ ID NO: 5597 - protein, 11 aa, Artificial sequence
  Protein classification predicting sequence
KPIIADGGIRT

SEQ ID NO: 5598 - protein, 6 aa, Artificial sequence
  Protein classification predicting sequence
HEESPG

SEQ ID NO: 5599 - protein, 16 aa, Artificial sequence
  Protein classification predicting sequence
KNVEGKKMFVEHKGSL

SEQ ID NO: 5600 - protein, 11 aa, Artificial sequence
  Protein classification predicting sequence
GLIASISVGVK

SEQ ID NO: 5601 - protein, 60 aa, Artificial sequence
  Protein classification predicting sequence
DGKLYKEYFGSASEFQKGEKKNVEGKKMFVEHKGSLEDTLIEMEQDLQSSISYAGGTKLD

SEQ ID NO: 5602 - protein, 7 aa, Artificial sequence
  Protein classification predicting sequence
SRSECDT

SEQ ID NO: 5603 - protein, 8 aa, Artificial sequence
  Protein classification predicting sequence
LAENGYFY

SEQ ID NO: 5604 - protein, 7 aa, Artificial sequence
  Protein classification predicting sequence
SISVGVK

SEQ ID NO: 5605 - protein, 30 aa, Artificial sequence
  Protein classification predicting sequence
LTPEYITIDIAHGHSNAVINMIQHIKKHLP

SEQ ID NO: 5606 - protein, 18 aa, Artificial sequence
  Protein classification predicting sequence
TIEKDGKLYKEYFGSASE

SEQ ID NO: 5607 - protein, 10 aa, Artificial sequence
  Protein classification predicting sequence
GSASEYQKGE

SEQ ID NO: 5608 - protein, 10 aa, Artificial sequence
  Protein classification predicting sequence
VDYVIVKNSI

SEQ ID NO: 5609 - protein, 6 aa, Artificial sequence
  Protein classification predicting sequence
ECDTSV

SEQ ID NO: 5610 - protein, 8 aa, Artificial sequence
  Protein classification predicting sequence
TIDIAHGH

SEQ ID NO: 5611 - protein, 19 aa, Artificial sequence
  Protein classification predicting sequence
AGADATKVGIGPGKVCITK

SEQ ID NO: 5612 - protein, 7 aa, Artificial sequence
  Protein classification predicting sequence
VEHKGSL

SEQ ID NO: 5613 - protein, 9 aa, Artificial sequence
  Protein classification predicting sequence
VKNSIFNGD

SEQ ID NO: 5614 - protein, 9 aa, Artificial sequence
  Protein classification predicting sequence
PIIAANMDT

SEQ ID NO: 5615 - protein, 9 aa, Artificial sequence
  Protein classification predicting sequence
AGNVVTGEM

SEQ ID NO: 5616 - protein, 30 aa, Artificial sequence
  Protein classification predicting sequence
GADIVKVGIGPGSVCTTRVKTGVGYPQLSA

SEQ ID NO: 5617 - protein, 24 aa, Artificial sequence
  Protein classification predicting sequence
EELILSGADIVKVGIGPGSVCTTR

SEQ ID NO: 5618 - protein, 7 aa, Artificial sequence
  Protein classification predicting sequence
GYPQLSA

SEQ ID NO: 5619 - protein, 7 aa, Artificial sequence
  Protein classification predicting sequence
YRASEGK

SEQ ID NO: 5620 - protein, 7 aa, Artificial sequence
  Protein classification predicting sequence
LKSRSQV

SEQ ID NO: 5621 - protein, 10 aa, Artificial sequence
  Protein classification predicting sequence
CIDVANGYSE

SEQ ID NO: 5622 - protein, 11 aa, Artificial sequence
  Protein classification predicting sequence
GYPQLSAVIEC

SEQ ID NO: 5623 - protein, 11 aa, Artificial sequence
  Protein classification predicting sequence
VFDYEDIQLIP

SEQ ID NO: 5624 - protein, 8 aa, Artificial sequence
  Protein classification predicting sequence
AKSIRFGA

SEQ ID NO: 5625 - protein, 15 aa, Artificial sequence
  Protein classification predicting sequence
EMEQDLQSSISYAGG

SEQ ID NO: 5626 - protein, 6 aa, Artificial sequence
  Protein classification predicting sequence
RTVDYV

SEQ ID NO: 5627 - protein, 6 aa, Artificial sequence
  Protein classification predicting sequence
VDYVIV

SEQ ID NO: 5628 - protein, 7 aa, Artificial sequence
  Protein classification predicting sequence
NSIFNGD

SEQ ID NO: 5629 - protein, 8 aa, Artificial sequence
  Protein classification predicting sequence
GGVAEYRA

SEQ ID NO: 5630 - protein, 19 aa, Artificial sequence
  Protein classification predicting sequence
KCIVNSRSECDTTVTLGKH

SEQ ID NO: 5631 - protein, 6 aa, Artificial sequence
  Protein classification predicting sequence
PANMQT

SEQ ID NO: 5632 - protein, 10 aa, Artificial sequence
  Protein classification predicting sequence
PANMQTIIDE

SEQ ID NO: 5633 - protein, 10 aa, Artificial sequence
  Protein classification predicting sequence
YFYIMHRFDE

SEQ ID NO: 5634 - protein, 18 aa, Artificial sequence
  Protein classification predicting sequence
TIDIAHGHSNAVINMIQH

SEQ ID NO: 5635 - protein, 37 aa, Artificial sequence
  Protein classification predicting sequence
FVIAGNVGTPEAVRELENAGADATKVGIGPGKVCITK

SEQ ID NO: 5636 - protein, 7 aa, Artificial sequence
  Protein classification predicting sequence
KNVEGKK

SEQ ID NO: 5637 - protein, 15 aa, Artificial sequence
  Protein classification predicting sequence
EMQQDLQSSISYAGG

SEQ ID NO: 5638 - protein, 21 aa, Artificial sequence
  Protein classification predicting sequence
KTGFGTGGWQLAALRWCAKAA

SEQ ID NO: 5639 - protein, 6 aa, Artificial sequence
  Protein classification predicting sequence
AGHEES

SEQ ID NO: 5640 - protein, 12 aa, Artificial sequence
  Protein classification predicting sequence
IADGGIRTHGDI

SEQ ID NO: 5641 - protein, 7 aa, Artificial sequence
  Protein classification predicting sequence
KSIRFGA

SEQ ID NO: 5642 - protein, 7 aa, Artificial sequence
  Protein classification predicting sequence
PVVPANM

SEQ ID NO: 5643 - protein, 6 aa, Artificial sequence
  Protein classification predicting sequence
ASISVG

SEQ ID NO: 5644 - protein, 7 aa, Artificial sequence
  Protein classification predicting sequence
PEYITID

SEQ ID NO: 5645 - protein, 15 aa, Artificial sequence
  Protein classification predicting sequence
VRELENAGADATKVG

SEQ ID NO: 5646 - protein, 11 aa, Artificial sequence
  Protein classification predicting sequence
GDIAKSVRFGA

SEQ ID NO: 5647 - protein, 6 aa, Artificial sequence
  Protein classification predicting sequence
MVMIGS

SEQ ID NO: 5648 - protein, 5 aa, Artificial sequence
  Protein classification predicting sequence
PNKCI

SEQ ID NO: 5649 - protein, 14 aa, Artificial sequence
  Protein classification predicting sequence
ITIDIAHGHADSVI

SEQ ID NO: 5650 - protein, 13 aa, Artificial sequence
  Protein classification predicting sequence
KTGFGTGGWQLAA

SEQ ID NO: 5651 - protein, 6 aa, Artificial sequence
  Protein classification predicting sequence
WCAKAA

SEQ ID NO: 5652 - protein, 9 aa, Artificial sequence
  Protein classification predicting sequence
KEYFGSASE

SEQ ID NO: 5653 - protein, 11 aa, Artificial sequence
  Protein classification predicting sequence
DLQSSISYAGG

SEQ ID NO: 5654 - protein, 13 aa, Artificial sequence
  Protein classification predicting sequence
FDYEDIQLIPNKC

SEQ ID NO: 5655 - protein, 9 aa, Artificial sequence
  Protein classification predicting sequence
ITIDIAHGH

SEQ ID NO: 5656 - protein, 7 aa, Artificial sequence
  Protein classification predicting sequence
RWCAKAA

SEQ ID NO: 5657 - protein, 11 aa, Artificial sequence
  Protein classification predicting sequence
QKGEHKNVEGK

SEQ ID NO: 5658 - protein, 7 aa, Artificial sequence
  Protein classification predicting sequence
DTSVTLG

SEQ ID NO: 5659 - protein, 11 aa, Artificial sequence
  Protein classification predicting sequence
MVMIGSLFAGH

SEQ ID NO: 5660 - protein, 14 aa, Artificial sequence
  Protein classification predicting sequence
KEYFGSASEFQKGE

SEQ ID NO: 5661 - protein, 16 aa, Artificial sequence
  Protein classification predicting sequence
FDILTAVHKHYSVEEW

SEQ ID NO: 5662 - protein, 32 aa, Artificial sequence
  Protein classification predicting sequence
LNPALNFVCIDVANGYSEHFVQFVAKAREAWP

SEQ ID NO: 5663 - protein, 20 aa, Artificial sequence
  Protein classification predicting sequence
VEENGEKFMLFYGMSSESAM

SEQ ID NO: 5664 - protein, 22 aa, Artificial sequence
  Protein classification predicting sequence
SADVLKHVMVSTGTSDADFEKT

SEQ ID NO: 5665 - protein, 6 aa, Artificial sequence
  Protein classification predicting sequence
MIKHIK

SEQ ID NO: 5666 - protein, 12 aa, Artificial sequence
  Protein classification predicting sequence
FKLPVVPANMQT

SEQ ID NO: 5667 - protein, 14 aa, Artificial sequence
  Protein classification predicting sequence
WFAENDYFYIMHRF

SEQ ID NO: 5668 - protein, 7 aa, Artificial sequence
  Protein classification predicting sequence
HIKKHLP

SEQ ID NO: 5669 - protein, 12 aa, Artificial sequence
  Protein classification predicting sequence
SFVIAGNVGTPE

SEQ ID NO: 5670 - protein, 12 aa, Artificial sequence
  Protein classification predicting sequence
QKGEHKNVEGKK

SEQ ID NO: 5671 - protein, 12 aa, Artificial sequence
  Protein classification predicting sequence
QDLQSSISYAGG

SEQ ID NO: 5672 - protein, 50 aa, Artificial sequence
  Protein classification predicting sequence
SFVIAGNVGTPEGVRELENAGADATKVGIGPGRVCITKIKTGFGTGGWQL

SEQ ID NO: 5673 - protein, 24 aa, Artificial sequence
  Protein classification predicting sequence
MVMIGSLFAAHEESPGETVELDGK

SEQ ID NO: 5674 - protein, 9 aa, Artificial sequence
  Protein classification predicting sequence
SRSQADTSV

SEQ ID NO: 5675 - protein, 6 aa, Artificial sequence
  Protein classification predicting sequence
MIQHIK

SEQ ID NO: 5676 - protein, 17 aa, Artificial sequence
  Protein classification predicting sequence
KTGFGTGGWQLAALRWC

SEQ ID NO: 5677 - protein, 6 aa, Artificial sequence
  Protein classification predicting sequence
KAARKP

SEQ ID NO: 5678 - protein, 9 aa, Artificial sequence
  Protein classification predicting sequence
FKEYYGSAS

SEQ ID NO: 5679 - protein, 16 aa, Artificial sequence
  Protein classification predicting sequence
EMQQDLQSSISYAGGK

SEQ ID NO: 5680 - protein, 7 aa, Artificial sequence
  Protein classification predicting sequence
PFIKRMH

SEQ ID NO: 5681 - protein, 22 aa, Artificial sequence
  Protein classification predicting sequence
IADGGIRTHGDIAKSIRFGASM

SEQ ID NO: 5682 - protein, 9 aa, Artificial sequence
  Protein classification predicting sequence
MIGSLFAGH

SEQ ID NO: 5683 - protein, 8 aa, Artificial sequence
  Protein classification predicting sequence
EMEQDLQS

SEQ ID NO: 5684 - protein, 15 aa, Artificial sequence
  Protein classification predicting sequence
HVDYVIVKNSIWNGD

SEQ ID NO: 5685 - protein, 7 aa, Artificial sequence
  Protein classification predicting sequence
FTFKHSG

SEQ ID NO: 5686 - protein, 6 aa, Artificial sequence
  Protein classification predicting sequence
IAANMD

SEQ ID NO: 5687 - protein, 8 aa, Artificial sequence
  Protein classification predicting sequence
VMVSTGTS

SEQ ID NO: 5688 - protein, 9 aa, Artificial sequence
  Protein classification predicting sequence
YRAAEGKTV

SEQ ID NO: 5689 - protein, 11 aa, Artificial sequence
  Protein classification predicting sequence
ELTKRTTFIRV

SEQ ID NO: 5690 - protein, 11 aa, Artificial sequence
  Protein classification predicting sequence
MALSDELIFIC

SEQ ID NO: 5691 - protein, 16 aa, Artificial sequence
  Protein classification predicting sequence
FPDKVISAGNVVTGDM

SEQ ID NO: 5692 - protein, 11 aa, Artificial sequence
  Protein classification predicting sequence
SAMDKHSGGVA

SEQ ID NO: 5693 - protein, 8 aa, Artificial sequence
  Protein classification predicting sequence
RGSVHGTI

SEQ ID NO: 5694 - protein, 10 aa, Artificial sequence
  Protein classification predicting sequence
RSTCTYVGAA

SEQ ID NO: 5695 - protein, 8 aa, Artificial sequence
  Protein classification predicting sequence
GDVAKAFG

SEQ ID NO: 5696 - protein, 11 aa, Artificial sequence
  Protein classification predicting sequence
ICAGNVVTGEM

SEQ ID NO: 5697 - protein, 15 aa, Artificial sequence
  Protein classification predicting sequence
YRAAEGKTVKLPLRG

SEQ ID NO: 5698 - protein, 8 aa, Artificial sequence
  Protein classification predicting sequence
APRLRIVA

SEQ ID NO: 5699 - protein, 13 aa, Artificial sequence
  Protein classification predicting sequence
VDALVTMLSERID

SEQ ID NO: 5700 - protein, 15 aa, Artificial sequence
  Protein classification predicting sequence
LRIVANYAVGYDNID

SEQ ID NO: 5701 - protein, 8 aa, Artificial sequence
  Protein classification predicting sequence
MRILYYSR

SEQ ID NO: 5702 - protein, 15 aa, Artificial sequence
  Protein classification predicting sequence
KALKEGWIAGAGLDV

SEQ ID NO: 5703 - protein, 9 aa, Artificial sequence
  Protein classification predicting sequence
YAVGYDNID

SEQ ID NO: 5704 - protein, 8 aa, Artificial sequence
  Protein classification predicting sequence
NTASVAAF

SEQ ID NO: 5705 - protein, 24 aa, Artificial sequence
  Protein classification predicting sequence
LGKHPVSCKDTPGFIVNRLLVPYL

SEQ ID NO: 5706 - protein, 20 aa, Artificial sequence
  Protein classification predicting sequence
ANATTRQDRFAGLHFFNPVP

SEQ ID NO: 5707 - protein, 9 aa, Artificial sequence
  Protein classification predicting sequence
KTPMTSQKT

SEQ ID NO: 5708 - protein, 8 aa, Artificial sequence
  Protein classification predicting sequence
ATEKAKDL

SEQ ID NO: 5709 - protein, 7 aa, Artificial sequence
  Protein classification predicting sequence
ILAPKMV

SEQ ID NO: 5710 - protein, 7 aa, Artificial sequence
  Protein classification predicting sequence
QGPKDIP

SEQ ID NO: 5711 - protein, 6 aa, Artificial sequence
  Protein classification predicting sequence
HEPTFR

SEQ ID NO: 5712 - protein, 9 aa, Artificial sequence
  Protein classification predicting sequence
AACSPRLHE

SEQ ID NO: 5713 - protein, 8 aa, Artificial sequence
  Protein classification predicting sequence
CNGCYGSL

SEQ ID NO: 5714 - protein, 10 aa, Artificial sequence
  Protein classification predicting sequence
MCCGAGGGVR

SEQ ID NO: 5715 - protein, 8 aa, Artificial sequence
  Protein classification predicting sequence
LWMCTTCY

SEQ ID NO: 5716 - protein, 9 aa, Artificial sequence
  Protein classification predicting sequence
CTGSCPSGR

SEQ ID NO: 5717 - protein, 5 aa, Artificial sequence
  Protein classification predicting sequence
CTTCY

SEQ ID NO: 5718 - protein, 8 aa, Artificial sequence
  Protein classification predicting sequence
CCGAGGGV

SEQ ID NO: 5719 - protein, 18 aa, Artificial sequence
  Protein classification predicting sequence
GAVSVSSAAVELALMKLP

SEQ ID NO: 5720 - protein, 9 aa, Artificial sequence
  Protein classification predicting sequence
NVDDLKEVV

SEQ ID NO: 5721 - protein, 12 aa, Artificial sequence
  Protein classification predicting sequence
ETLENMHALNRM

SEQ ID NO: 5722 - protein, 7 aa, Artificial sequence
  Protein classification predicting sequence
SIVVIGL

SEQ ID NO: 5723 - protein, 9 aa, Artificial sequence
  Protein classification predicting sequence
REKLAIPEA

SEQ ID NO: 5724 - protein, 15 aa, Artificial sequence
  Protein classification predicting sequence
LNHIEEAAVLSTCNR

SEQ ID NO: 5725 - protein, 8 aa, Artificial sequence
  Protein classification predicting sequence
EIYVVALS

SEQ ID NO: 5726 - protein, 21 aa, Artificial sequence
  Protein classification predicting sequence
ISGLFKHAITVGKRVRTETNI

SEQ ID NO: 5727 - protein, 7 aa, Artificial sequence
  Protein classification predicting sequence
NKLLHGP

SEQ ID NO: 5728 - protein, 7 aa, Artificial sequence
  Protein classification predicting sequence
QHLRCDG

SEQ ID NO: 5729 - protein, 9 aa, Artificial sequence
  Protein classification predicting sequence
STCNRTEVY

SEQ ID NO: 5730 - protein, 7 aa, Artificial sequence
  Protein classification predicting sequence
KRVRSET

SEQ ID NO: 5731 - protein, 8 aa, Artificial sequence
  Protein classification predicting sequence
DISVPRNV

SEQ ID NO: 5732 - protein, 6 aa, Artificial sequence
  Protein classification predicting sequence
DIAVPR

SEQ ID NO: 5733 - protein, 7 aa, Artificial sequence
  Protein classification predicting sequence
LLVGAGE

SEQ ID NO: 5734 - protein, 7 aa, Artificial sequence
  Protein classification predicting sequence
DIAVPRD

SEQ ID NO: 5735 - protein, 10 aa, Artificial sequence
  Protein classification predicting sequence
MAEKYMGHAK

SEQ ID NO: 5736 - protein, 21 aa, Artificial sequence
  Protein classification predicting sequence
LSELQCALLEADILISSTGAS

SEQ ID NO: 5737 - protein, 106 aa, Artificial sequence
  Protein classification predicting sequence
YVITKEMMTKVEKMRSGRPLFMVDIAVPRDIDPAIDELEGSFLYDIDDLQGVVEANRAERLKEAEKIQFMIEEEIVLFKTWLSTLGVVPLISALRDKALAIQSETM

SEQ ID NO: 5738 - protein, 31 aa, Artificial sequence
  Protein classification predicting sequence
KVISKHTKSIINQLLKDPILVAKEIAAEEGA

SEQ ID NO: 5739 - protein, 13 aa, Artificial sequence
  Protein classification predicting sequence
EKLALFAKIFDLE

SEQ ID NO: 5740 - protein, 6 aa, Artificial sequence
  Protein classification predicting sequence
FLADWF

SEQ ID NO: 5741 - protein, 11 aa, Artificial sequence
  Protein classification predicting sequence
ITLAKRAHSET

SEQ ID NO: 5742 - protein, 6 aa, Artificial sequence
  Protein classification predicting sequence
HTGRYY

SEQ ID NO: 5743 - protein, 8 aa, Artificial sequence
  Protein classification predicting sequence
GETQILGQ

SEQ ID NO: 5744 - protein, 6 aa, Artificial sequence
  Protein classification predicting sequence
IQAETM

SEQ ID NO: 5745 - protein, 7 aa, Artificial sequence
  Protein classification predicting sequence
SIDRKLP

SEQ ID NO: 5746 - protein, 7 aa, Artificial sequence
  Protein classification predicting sequence
QILGQVK

SEQ ID NO: 5747 - protein, 7 aa, Artificial sequence
  Protein classification predicting sequence
AVSVSYA

SEQ ID NO: 5748 - protein, 34 aa, Artificial sequence
  Protein classification predicting sequence
IVSTCNRTEIYAVVDQLHTGRYYIKKFLADWFQL

SEQ ID NO: 5749 - protein, 10 aa, Artificial sequence
  Protein classification predicting sequence
GTIFNELFKQ

SEQ ID NO: 5750 - protein, 10 aa, Artificial sequence
  Protein classification predicting sequence
KALAIQSETM

SEQ ID NO: 5751 - protein, 7 aa, Artificial sequence
  Protein classification predicting sequence
LTNKLIH

SEQ ID NO: 5752 - protein, 6 aa, Artificial sequence
  Protein classification predicting sequence
IGAGEM

SEQ ID NO: 5753 - protein, 13 aa, Artificial sequence
  Protein classification predicting sequence
GETEIQGQVKRAY

SEQ ID NO: 5754 - protein, 6 aa, Artificial sequence
  Protein classification predicting sequence
NHKTAP

SEQ ID NO: 5755 - protein, 7 aa, Artificial sequence
  Protein classification predicting sequence
LAFGLNH

SEQ ID NO: 5756 - protein, 12 aa, Artificial sequence
  Protein classification predicting sequence
TAPLSIREKLAF

SEQ ID NO: 5757 - protein, 6 aa, Artificial sequence
  Protein classification predicting sequence
VAKEVR

SEQ ID NO: 5758 - protein, 9 aa, Artificial sequence
  Protein classification predicting sequence
VKLAEQIFP

SEQ ID NO: 5759 - protein, 8 aa, Artificial sequence
  Protein classification predicting sequence
GAGEMIEL

SEQ ID NO: 5760 - protein, 7 aa, Artificial sequence
  Protein classification predicting sequence
DLAVPRD

SEQ ID NO: 5761 - protein, 6 aa, Artificial sequence
  Protein classification predicting sequence
TCNRTE

SEQ ID NO: 5762 - protein, 8 aa, Artificial sequence
  Protein classification predicting sequence
TCNRTEIY

SEQ ID NO: 5763 - protein, 7 aa, Artificial sequence
  Protein classification predicting sequence
SHRSAPV

SEQ ID NO: 5764 - protein, 6 aa, Artificial sequence
  Protein classification predicting sequence
GLDSMV

SEQ ID NO: 5765 - protein, 11 aa, Artificial sequence
  Protein classification predicting sequence
GKRVHSETAID

SEQ ID NO: 5766 - protein, 7 aa, Artificial sequence
  Protein classification predicting sequence
PRDIEPE

SEQ ID NO: 5767 - protein, 6 aa, Artificial sequence
  Protein classification predicting sequence
GEGQIL

SEQ ID NO: 5768 - protein, 8 aa, Artificial sequence
  Protein classification predicting sequence
GLNHQTAP

SEQ ID NO: 5769 - protein, 8 aa, Artificial sequence
  Protein classification predicting sequence
TCNRTEVY

SEQ ID NO: 5770 - protein, 8 aa, Artificial sequence
  Protein classification predicting sequence
LDSMVVGE

SEQ ID NO: 5771 - protein, 6 aa, Artificial sequence
  Protein classification predicting sequence
LVGAGE

SEQ ID NO: 5772 - protein, 7 aa, Artificial sequence
  Protein classification predicting sequence
DIIISST

SEQ ID NO: 5773 - protein, 9 aa, Artificial sequence
  Protein classification predicting sequence
SYAAVELAK

SEQ ID NO: 5774 - protein, 6 aa, Artificial sequence
  Protein classification predicting sequence
LSTCNR

SEQ ID NO: 5775 - protein, 17 aa, Artificial sequence
  Protein classification predicting sequence
SEFMAWLRAQSASETIR

SEQ ID NO: 5776 - protein, 33 aa, Artificial sequence
  Protein classification predicting sequence
VAKRVRTETDIGASAVSVAFAACTLARQIFESL

SEQ ID NO: 5777 - protein, 10 aa, Artificial sequence
  Protein classification predicting sequence
IANRTRERAQ

SEQ ID NO: 5778 - protein, 7 aa, Artificial sequence
  Protein classification predicting sequence
EVGAEVI

SEQ ID NO: 5779 - protein, 7 aa, Artificial sequence
  Protein classification predicting sequence
RRNQPML

SEQ ID NO: 5780 - protein, 8 aa, Artificial sequence
  Protein classification predicting sequence
AVPRDIEP

SEQ ID NO: 5781 - protein, 21 aa, Artificial sequence
  Protein classification predicting sequence
LTNRLIHAPTKSLQQAARDGD

SEQ ID NO: 5782 - protein, 5 aa, Artificial sequence
  Protein classification predicting sequence
STCNR

SEQ ID NO: 5783 - protein, 11 aa, Artificial sequence
  Protein classification predicting sequence
FSVAKRVRTET

SEQ ID NO: 5784 - protein, 7 aa, Artificial sequence
  Protein classification predicting sequence
IVNKLLH

SEQ ID NO: 5785 - protein, 7 aa, Artificial sequence
  Protein classification predicting sequence
LLHPPTA

SEQ ID NO: 5786 - protein, 8 aa, Artificial sequence
  Protein classification predicting sequence
TAPVEIRE

SEQ ID NO: 5787 - protein, 8 aa, Artificial sequence
  Protein classification predicting sequence
VLGEGQIL

SEQ ID NO: 5788 - protein, 8 aa, Artificial sequence
  Protein classification predicting sequence
LEAVPTIN

SEQ ID NO: 5789 - protein, 12 aa, Artificial sequence
  Protein classification predicting sequence
AITVGKRVRTET

SEQ ID NO: 5790 - protein, 7 aa, Artificial sequence
  Protein classification predicting sequence
EADILIS

SEQ ID NO: 5791 - protein, 8 aa, Artificial sequence
  Protein classification predicting sequence
KSILENVI

SEQ ID NO: 5792 - protein, 12 aa, Artificial sequence
  Protein classification predicting sequence
AVVDQIHTGRYY

SEQ ID NO: 5793 - protein, 7 aa, Artificial sequence
  Protein classification predicting sequence
ELALQNL

SEQ ID NO: 5794 - protein, 7 aa, Artificial sequence
  Protein classification predicting sequence
LYDIDDL

SEQ ID NO: 5795 - protein, 14 aa, Artificial sequence
  Protein classification predicting sequence
LGVVPVIRALREKA

SEQ ID NO: 5796 - protein, 9 aa, Artificial sequence
  Protein classification predicting sequence
GLDSLVLGE

SEQ ID NO: 5797 - protein, 7 aa, Artificial sequence
  Protein classification predicting sequence
KRVRTET

SEQ ID NO: 5798 - protein, 7 aa, Artificial sequence
  Protein classification predicting sequence
LARQIFE

SEQ ID NO: 5799 - protein, 16 aa, Artificial sequence
  Protein classification predicting sequence
LLVGAGETIELVARHL

SEQ ID NO: 5800 - protein, 8 aa, Artificial sequence
  Protein classification predicting sequence
VDIAVPRD

SEQ ID NO: 5801 - protein, 6 aa, Artificial sequence
  Protein classification predicting sequence
YTVDDL

SEQ ID NO: 5802 - protein, 7 aa, Artificial sequence
  Protein classification predicting sequence
ILSTCNR

SEQ ID NO: 5803 - protein, 9 aa, Artificial sequence
  Protein classification predicting sequence
LGEPQILGQ

SEQ ID NO: 5804 - protein, 7 aa, Artificial sequence
  Protein classification predicting sequence
VSVAFAA

SEQ ID NO: 5805 - protein, 6 aa, Artificial sequence
  Protein classification predicting sequence
TCNRVE

SEQ ID NO: 5806 - protein, 9 aa, Artificial sequence
  Protein classification predicting sequence
TCNRVEVYA

SEQ ID NO: 5807 - protein, 6 aa, Artificial sequence
  Protein classification predicting sequence
HLFRVA

SEQ ID NO: 5808 - protein, 7 aa, Artificial sequence
  Protein classification predicting sequence
ERAETLA

SEQ ID NO: 5809 - protein, 7 aa, Artificial sequence
  Protein classification predicting sequence
VASGLDS

SEQ ID NO: 5810 - protein, 14 aa, Artificial sequence
  Protein classification predicting sequence
GEQQVLGQVRRAYA

SEQ ID NO: 5811 - protein, 21 aa, Artificial sequence
  Protein classification predicting sequence
AQRALSVGKRVHSETAIDAAG

SEQ ID NO: 5812 - protein, 18 aa, Artificial sequence
  Protein classification predicting sequence
PLVICDLGMPRDVDPAVA

SEQ ID NO: 5813 - protein, 8 aa, Artificial sequence
  Protein classification predicting sequence
AQEQESMG

SEQ ID NO: 5814 - protein, 68 aa, Artificial sequence
  Protein classification predicting sequence
KLNALFQKTFSVAKEVRTDTAVGENSVSMASASVKLAEQIFPDIGDLNVLFIGAGEMIELVATYFAAK

SEQ ID NO: 5815 - protein, 9 aa, Artificial sequence
  Protein classification predicting sequence
DLAVPRDIE

SEQ ID NO: 5816 - protein, 8 aa, Artificial sequence
  Protein classification predicting sequence
STASPLPI

SEQ ID NO: 5817 - protein, 8 aa, Artificial sequence
  Protein classification predicting sequence
STCNRTEI

SEQ ID NO: 5818 - protein, 7 aa, Artificial sequence
  Protein classification predicting sequence
ERKIPNL

SEQ ID NO: 5819 - protein, 9 aa, Artificial sequence
  Protein classification predicting sequence
KHTKSIINQ

SEQ ID NO: 5820 - protein, 8 aa, Artificial sequence
  Protein classification predicting sequence
NYRTAPVE

SEQ ID NO: 5821 - protein, 7 aa, Artificial sequence
  Protein classification predicting sequence
KRAHSET

SEQ ID NO: 5822 - protein, 7 aa, Artificial sequence
  Protein classification predicting sequence
SYAAVEL

SEQ ID NO: 5823 - protein, 9 aa, Artificial sequence
  Protein classification predicting sequence
ETEIQGQVK

SEQ ID NO: 5824 - protein, 7 aa, Artificial sequence
  Protein classification predicting sequence
LHFLFQK

SEQ ID NO: 5825 - protein, 9 aa, Artificial sequence
  Protein classification predicting sequence
ACSLARQIF

SEQ ID NO: 5826 - protein, 12 aa, Artificial sequence
  Protein classification predicting sequence
PMLLVDIAVPRD

SEQ ID NO: 5827 - protein, 6 aa, Artificial sequence
  Protein classification predicting sequence
FSVAKR

SEQ ID NO: 5828 - protein, 7 aa, Artificial sequence
  Protein classification predicting sequence
RTETEIG

SEQ ID NO: 5829 - protein, 8 aa, Artificial sequence
  Protein classification predicting sequence
ADIVISST

SEQ ID NO: 5830 - protein, 8 aa, Artificial sequence
  Protein classification predicting sequence
YLYSVDDL

SEQ ID NO: 5831 - protein, 10 aa, Artificial sequence
  Protein classification predicting sequence
NLAQRKAAAV

SEQ ID NO: 5832 - protein, 15 aa, Artificial sequence
  Protein classification predicting sequence
NRLIHAPTKSLQQAA

SEQ ID NO: 5833 - protein, 27 aa, Artificial sequence
  Protein classification predicting sequence
VAKRVRTETDIGGNAVSVAYAACTLAK

SEQ ID NO: 5834 - protein, 7 aa, Artificial sequence
  Protein classification predicting sequence
QIFESLS

SEQ ID NO: 5835 - protein, 6 aa, Artificial sequence
  Protein classification predicting sequence
GKGMVE

SEQ ID NO: 5836 - protein, 9 aa, Artificial sequence
  Protein classification predicting sequence
EAEVGDLND

SEQ ID NO: 5837 - protein, 7 aa, Artificial sequence
  Protein classification predicting sequence
AIQAEAI

SEQ ID NO: 5838 - protein, 6 aa, Artificial sequence
  Protein classification predicting sequence
LIHAPT

SEQ ID NO: 5839 - protein, 13 aa, Artificial sequence
  Protein classification predicting sequence
GLDSLVLGEGQIL

SEQ ID NO: 5840 - protein, 9 aa, Artificial sequence
  Protein classification predicting sequence
IDIGVPRNI

SEQ ID NO: 5841 - protein, 13 aa, Artificial sequence
  Protein classification predicting sequence
KGIINKILHTPVT

SEQ ID NO: 5842 - protein, 8 aa, Artificial sequence
  Protein classification predicting sequence
RVASGLDS

SEQ ID NO: 5843 - protein, 6 aa, Artificial sequence
  Protein classification predicting sequence
GAGETI

SEQ ID NO: 5844 - protein, 7 aa, Artificial sequence
  Protein classification predicting sequence
ALKQRRH

SEQ ID NO: 5845 - protein, 7 aa, Artificial sequence
  Protein classification predicting sequence
LREKVAF

SEQ ID NO: 5846 - protein, 7 aa, Artificial sequence
  Protein classification predicting sequence
LTNKLLH

SEQ ID NO: 5847 - protein, 54 aa, Artificial sequence
  Protein classification predicting sequence
LDQALDSLLAQPMVQGGVVLSTCNRTELYLSVEEQDNLQEALIRWLCDYHNLNE

SEQ ID NO: 5848 - protein, 10 aa, Artificial sequence
  Protein classification predicting sequence
AAAVEAETIV

SEQ ID NO: 5849 - protein, 72 aa, Artificial sequence
  Protein classification predicting sequence
ADIIISSTASPLPIIGKGMVERALKSRRNQPMLLVDIAVPRDVEPEVGKLANAYLYSVDDLQSIISHNLAQR

SEQ ID NO: 5850 - protein, 7 aa, Artificial sequence
  Protein classification predicting sequence
GINHKTA

SEQ ID NO: 5851 - protein, 9 aa, Artificial sequence
  Protein classification predicting sequence
STCNRTELY

SEQ ID NO: 5852 - protein, 10 aa, Artificial sequence
  Protein classification predicting sequence
GAGETIELVA

SEQ ID NO: 5853 - protein, 13 aa, Artificial sequence
  Protein classification predicting sequence
GAGETIELVAKHL

SEQ ID NO: 5854 - protein, 7 aa, Artificial sequence
  Protein classification predicting sequence
LYTVDDL

SEQ ID NO: 5855 - protein, 11 aa, Artificial sequence
  Protein classification predicting sequence
ELFQNIFDIEA

SEQ ID NO: 5856 - protein, 11 aa, Artificial sequence
  Protein classification predicting sequence
AISINHRTADV

SEQ ID NO: 5857 - protein, 13 aa, Artificial sequence
  Protein classification predicting sequence
LREQVAFRDDALR

SEQ ID NO: 5858 - protein, 9 aa, Artificial sequence
  Protein classification predicting sequence
AHEDLYETK

SEQ ID NO: 5859 - protein, 13 aa, Artificial sequence
  Protein classification predicting sequence
HTGRYYIQRFLAR

SEQ ID NO: 5860 - protein, 9 aa, Artificial sequence
  Protein classification predicting sequence
FGFEVDDIK

SEQ ID NO: 5861 - protein, 10 aa, Artificial sequence
  Protein classification predicting sequence
VLGETQILGQ

SEQ ID NO: 5862 - protein, 8 aa, Artificial sequence
  Protein classification predicting sequence
RDAFFLAQ

SEQ ID NO: 5863 - protein, 20 aa, Artificial sequence
  Protein classification predicting sequence
TGTTGTIFNHLFKQAITFAK

SEQ ID NO: 5864 - protein, 12 aa, Artificial sequence
  Protein classification predicting sequence
ELSLLNLLGSGI

SEQ ID NO: 5865 - protein, 7 aa, Artificial sequence
  Protein classification predicting sequence
DIVISST

SEQ ID NO: 5866 - protein, 18 aa, Artificial sequence
  Protein classification predicting sequence
DSLVLIDIAVPRDIEPGI

SEQ ID NO: 5867 - protein, 14 aa, Artificial sequence
  Protein classification predicting sequence
AITNIFNYDVDDLK

SEQ ID NO: 5868 - protein, 13 aa, Artificial sequence
  Protein classification predicting sequence
LVDANLRERQLAA

SEQ ID NO: 5869 - protein, 16 aa, Artificial sequence
  Protein classification predicting sequence
MLGVVPVIRALREKAM

SEQ ID NO: 5870 - protein, 20 aa, Artificial sequence
  Protein classification predicting sequence
DKKSNEKLELFQNIFDIEAE

SEQ ID NO: 5871 - protein, 8 aa, Artificial sequence
  Protein classification predicting sequence
MSEVKVGD

SEQ ID NO: 5872 - protein, 25 aa, Artificial sequence
  Protein classification predicting sequence
AVEHLLRVTSGLDSIVLGETQILGQ

SEQ ID NO: 5873 - protein, 29 aa, Artificial sequence
  Protein classification predicting sequence
ETDIADNAVSVSYAAVELAKKVFGKLKSK

SEQ ID NO: 5874 - protein, 24 aa, Artificial sequence
  Protein classification predicting sequence
ISKHTKSIINQMLKDPIKQAKELS

SEQ ID NO: 5875 - protein, 13 aa, Artificial sequence
  Protein classification predicting sequence
RVVDKLLHAPTVR

SEQ ID NO: 5876 - protein, 6 aa, Artificial sequence
  Protein classification predicting sequence
HLMRVA

SEQ ID NO: 5877 - protein, 7 aa, Artificial sequence
  Protein classification predicting sequence
LFKQAIT

SEQ ID NO: 5878 - protein, 6 aa, Artificial sequence
  Protein classification predicting sequence
RVRTET

SEQ ID NO: 5879 - protein, 8 aa, Artificial sequence
  Protein classification predicting sequence
SLETVPTI

SEQ ID NO: 5880 - protein, 8 aa, Artificial sequence
  Protein classification predicting sequence
LDSLVVGE

SEQ ID NO: 5881 - protein, 8 aa, Artificial sequence
  Protein classification predicting sequence
AVSVAYAA

SEQ ID NO: 5882 - protein, 10 aa, Artificial sequence
  Protein classification predicting sequence
AAEQGEPAKL

SEQ ID NO: 5883 - protein, 9 aa, Artificial sequence
  Protein classification predicting sequence
DAYLYTVDD

SEQ ID NO: 5884 - protein, 10 aa, Artificial sequence
  Protein classification predicting sequence
DLAVPRDIEA

SEQ ID NO: 5885 - protein, 8 aa, Artificial sequence
  Protein classification predicting sequence
GAGETIEL

SEQ ID NO: 5886 - protein, 15 aa, Artificial sequence
  Protein classification predicting sequence
EAALLSTCNRTELYA

SEQ ID NO: 5887 - protein, 9 aa, Artificial sequence
  Protein classification predicting sequence
GLDSMVLGE

SEQ ID NO: 5888 - protein, 11 aa, Artificial sequence
  Protein classification predicting sequence
LAAKHLSEGRV

SEQ ID NO: 5889 - protein, 12 aa, Artificial sequence
  Protein classification predicting sequence
RKRKPMLLFDLA

SEQ ID NO: 5890 - protein, 8 aa, Artificial sequence
  Protein classification predicting sequence
DDLERAVE

SEQ ID NO: 5891 - protein, 7 aa, Artificial sequence
  Protein classification predicting sequence
VLEQLAH

SEQ ID NO: 5892 - protein, 14 aa, Artificial sequence
  Protein classification predicting sequence
LTNRLLHPPTAALR

SEQ ID NO: 5893 - protein, 10 aa, Artificial sequence
  Protein classification predicting sequence
VLGEPQILGQ

SEQ ID NO: 5894 - protein, 12 aa, Artificial sequence
  Protein classification predicting sequence
VLGEPQILGQVK

SEQ ID NO: 5895 - protein, 7 aa, Artificial sequence
  Protein classification predicting sequence
LRDSLGL

SEQ ID NO: 5896 - protein, 8 aa, Artificial sequence
  Protein classification predicting sequence
GGGGRSRV

SEQ ID NO: 5897 - protein, 9 aa, Artificial sequence
  Protein classification predicting sequence
FEQAGVNFS

SEQ ID NO: 5898 - protein, 7 aa, Artificial sequence
  Protein classification predicting sequence
GVNFSEV

SEQ ID NO: 5899 - protein, 8 aa, Artificial sequence
  Protein classification predicting sequence
VLHPRNPY

SEQ ID NO: 5900 - protein, 11 aa, Artificial sequence
  Protein classification predicting sequence
VLHPRNPYVPT

SEQ ID NO: 5901 - protein, 6 aa, Artificial sequence
  Protein classification predicting sequence
PIVERR

SEQ ID NO: 5902 - protein, 6 aa, Artificial sequence
  Protein classification predicting sequence
GGIFFD

SEQ ID NO: 5903 - protein, 12 aa, Artificial sequence
  Protein classification predicting sequence
GRTESILMSLPP

SEQ ID NO: 5904 - protein, 8 aa, Artificial sequence
  Protein classification predicting sequence
PEAGSPEA

SEQ ID NO: 5905 - protein, 6 aa, Artificial sequence
  Protein classification predicting sequence
NYRYFE

SEQ ID NO: 5906 - protein, 6 aa, Artificial sequence
  Protein classification predicting sequence
WWFGGG

SEQ ID NO: 5907 - protein, 10 aa, Artificial sequence
  Protein classification predicting sequence
RRGRYVEFNL

SEQ ID NO: 5908 - protein, 7 aa, Artificial sequence
  Protein classification predicting sequence
NVRFFIA

SEQ ID NO: 5909 - protein, 7 aa, Artificial sequence
  Protein classification predicting sequence
EPRGVGG

SEQ ID NO: 5910 - protein, 18 aa, Artificial sequence
  Protein classification predicting sequence
DRGTLFGLQSGGRTESIL

SEQ ID NO: 5911 - protein, 8 aa, Artificial sequence
  Protein classification predicting sequence
PGSAEARL

SEQ ID NO: 5912 - protein, 7 aa, Artificial sequence
  Protein classification predicting sequence
DARHFHR

SEQ ID NO: 5913 - protein, 7 aa, Artificial sequence
  Protein classification predicting sequence
HRNETRG

SEQ ID NO: 5914 - protein, 9 aa, Artificial sequence
  Protein classification predicting sequence
VPAVHMNTR

SEQ ID NO: 5915 - protein, 7 aa, Artificial sequence
  Protein classification predicting sequence
EARGIGG

SEQ ID NO: 5916 - protein, 7 aa, Artificial sequence
  Protein classification predicting sequence
RGIGGIF

SEQ ID NO: 5917 - protein, 7 aa, Artificial sequence
  Protein classification predicting sequence
GGADLTP

SEQ ID NO: 5918 - protein, 5 aa, Artificial sequence
  Protein classification predicting sequence
HMNVR

SEQ ID NO: 5919 - protein, 9 aa, Artificial sequence
  Protein classification predicting sequence
RGRYVEFNL

SEQ ID NO: 5920 - protein, 9 aa, Artificial sequence
  Protein classification predicting sequence
GGGGRSRVL

SEQ ID NO: 5921 - protein, 11 aa, Artificial sequence
  Protein classification predicting sequence
FEQAGVNFSHV

SEQ ID NO: 5922 - protein, 6 aa, Artificial sequence
  Protein classification predicting sequence
WCDEYF

SEQ ID NO: 5923 - protein, 7 aa, Artificial sequence
  Protein classification predicting sequence
GGGGRTR

SEQ ID NO: 5924 - protein, 9 aa, Artificial sequence
  Protein classification predicting sequence
HPRNPYVPT

SEQ ID NO: 5925 - protein, 8 aa, Artificial sequence
  Protein classification predicting sequence
DLTPYYGF

SEQ ID NO: 5926 - protein, 6 aa, Artificial sequence
  Protein classification predicting sequence
HWHRVA

SEQ ID NO: 5927 - protein, 9 aa, Artificial sequence
  Protein classification predicting sequence
WERPEGGGG

SEQ ID NO: 5928 - protein, 17 aa, Artificial sequence
  Protein classification predicting sequence
PTSHANVRFFIAEKPGA

SEQ ID NO: 5929 - protein, 13 aa, Artificial sequence
  Protein classification predicting sequence
PVWWFGGGFDLTP

SEQ ID NO: 5930 - protein, 9 aa, Artificial sequence
  Protein classification predicting sequence
WQRAEGGGG

SEQ ID NO: 5931 - protein, 11 aa, Artificial sequence
  Protein classification predicting sequence
PYIPTSHANVR

SEQ ID NO: 5932 - protein, 8 aa, Artificial sequence
  Protein classification predicting sequence
PTSHANVR

SEQ ID NO: 5933 - protein, 7 aa, Artificial sequence
  Protein classification predicting sequence
EDAVHWH

SEQ ID NO: 5934 - protein, 29 aa, Artificial sequence
  Protein classification predicting sequence
DLCQPFGDDVYPRYKKWCDDYFFLKHRNE

SEQ ID NO: 5935 - protein, 9 aa, Artificial sequence
  Protein classification predicting sequence
YFFLKHRNE

SEQ ID NO: 5936 - protein, 8 aa, Artificial sequence
  Protein classification predicting sequence
GERERDFQ

SEQ ID NO: 5937 - protein, 20 aa, Artificial sequence
  Protein classification predicting sequence
FQLYRRGRYVEFNLVWDRGT

SEQ ID NO: 5938 - protein, 13 aa, Artificial sequence
  Protein classification predicting sequence
DRGTIFGLQTNGR

SEQ ID NO: 5939 - protein, 6 aa, Artificial sequence
  Protein classification predicting sequence
ESILMS

SEQ ID NO: 5940 - protein, 9 aa, Artificial sequence
  Protein classification predicting sequence
EDVWSRPGG

SEQ ID NO: 5941 - protein, 16 aa, Artificial sequence
  Protein classification predicting sequence
RRGRYVEFNLVYDRGT

SEQ ID NO: 5942 - protein, 7 aa, Artificial sequence
  Protein classification predicting sequence
VFEKAGV

SEQ ID NO: 5943 - protein, 7 aa, Artificial sequence
  Protein classification predicting sequence
GGGGRSR

SEQ ID NO: 5944 - protein, 7 aa, Artificial sequence
  Protein classification predicting sequence
VFEQGGV

SEQ ID NO: 5945 - protein, 7 aa, Artificial sequence
  Protein classification predicting sequence
YFFLKHR

SEQ ID NO: 5946 - protein, 14 aa, Artificial sequence
  Protein classification predicting sequence
GGRTESILMSMPPL

SEQ ID NO: 5947 - protein, 6 aa, Artificial sequence
  Protein classification predicting sequence
EDSWQR

SEQ ID NO: 5948 - protein, 7 aa, Artificial sequence
  Protein classification predicting sequence
HANVRFF

SEQ ID NO: 5949 - protein, 7 aa, Artificial sequence
  Protein classification predicting sequence
GGLFFDD

SEQ ID NO: 5950 - protein, 8 aa, Artificial sequence
  Protein classification predicting sequence
GVSLVIHP

SEQ ID NO: 5951 - protein, 8 aa, Artificial sequence
  Protein classification predicting sequence
PVWWFGGG

SEQ ID NO: 5952 - protein, 6 aa, Artificial sequence
  Protein classification predicting sequence
FFDDLN

SEQ ID NO: 5953 - protein, 15 aa, Artificial sequence
  Protein classification predicting sequence
FQAYRRGRYVEFNLV

SEQ ID NO: 5954 - protein, 12 aa, Artificial sequence
  Protein classification predicting sequence
YRRGRYVEFNLV

SEQ ID NO: 5955 - protein, 20 aa, Artificial sequence
  Protein classification predicting sequence
DRGTLFGLQSGGRTESILMS

SEQ ID NO: 5956 - protein, 6 aa, Artificial sequence
  Protein classification predicting sequence
NPYIPT

SEQ ID NO: 5957 - protein, 7 aa, Artificial sequence
  Protein classification predicting sequence
YFYIKHR

SEQ ID NO: 5958 - protein, 8 aa, Artificial sequence
  Protein classification predicting sequence
DDLNTPDF

SEQ ID NO: 5959 - protein, 9 aa, Artificial sequence
  Protein classification predicting sequence
FEAMGVSLV

SEQ ID NO: 5960 - protein, 11 aa, Artificial sequence
  Protein classification predicting sequence
WWFGGGFDLTP

SEQ ID NO: 5961 - protein, 13 aa, Artificial sequence
  Protein classification predicting sequence
WWFGGGFDLTPFY

SEQ ID NO: 5962 - protein, 7 aa, Artificial sequence
  Protein classification predicting sequence
DLTPYYP

SEQ ID NO: 5963 - protein, 6 aa, Artificial sequence
  Protein classification predicting sequence
NPYVPT

SEQ ID NO: 5964 - protein, 23 aa, Artificial sequence
  Protein classification predicting sequence
HLNYRYFEAGPVWWFGGGADLTP

SEQ ID NO: 5965 - protein, 13 aa, Artificial sequence
  Protein classification predicting sequence
LHKVFKPWCDEYF

SEQ ID NO: 5966 - protein, 7 aa, Artificial sequence
  Protein classification predicting sequence
ETRGVGG

SEQ ID NO: 5967 - protein, 6 aa, Artificial sequence
  Protein classification predicting sequence
PIVEKR

SEQ ID NO: 5968 - protein, 9 aa, Artificial sequence
  Protein classification predicting sequence
FQLYRRGRY

SEQ ID NO: 5969 - protein, 7 aa, Artificial sequence
  Protein classification predicting sequence
REEGGGG

SEQ ID NO: 5970 - protein, 6 aa, Artificial sequence
  Protein classification predicting sequence
GGIFYD

SEQ ID NO: 5971 - protein, 8 aa, Artificial sequence
  Protein classification predicting sequence
REAGGGGR

SEQ ID NO: 5972 - protein, 7 aa, Artificial sequence
  Protein classification predicting sequence
DVYPRYK

SEQ ID NO: 5973 - protein, 6 aa, Artificial sequence
  Protein classification predicting sequence
AYLPIV

SEQ ID NO: 5974 - protein, 8 aa, Artificial sequence
  Protein classification predicting sequence
GVSLVFHP

SEQ ID NO: 5975 - protein, 5 aa, Artificial sequence
  Protein classification predicting sequence
KQWCD

SEQ ID NO: 5976 - protein, 6 aa, Artificial sequence
  Protein classification predicting sequence
WCDDYF

SEQ ID NO: 5977 - protein, 7 aa, Artificial sequence
  Protein classification predicting sequence
YFYLKHR

SEQ ID NO: 5978 - protein, 8 aa, Artificial sequence
  Protein classification predicting sequence
GGRTESIL

SEQ ID NO: 5979 - protein, 8 aa, Artificial sequence
  Protein classification predicting sequence
GEFSPEFR

SEQ ID NO: 5980 - protein, 16 aa, Artificial sequence
  Protein classification predicting sequence
RRGRYVEFNLLYDRGT

SEQ ID NO: 5981 - protein, 6 aa, Artificial sequence
  Protein classification predicting sequence
PPLVRW

SEQ ID NO: 5982 - protein, 52 aa, Artificial sequence
  Protein classification predicting sequence
GERERNFQLYRRGRYVEFNLVWDRGTLFGLQTGGRTESILMSMPPLVRWEYD

SEQ ID NO: 5983 - protein, 11 aa, Artificial sequence
  Protein classification predicting sequence
GSPEAALSEFI

SEQ ID NO: 5984 - protein, 17 aa, Artificial sequence
  Protein classification predicting sequence
GGLFFDDLNTPDFDHCF

SEQ ID NO: 5985 - protein, 7 aa, Artificial sequence
  Protein classification predicting sequence
RAEGGGG

SEQ ID NO: 5986 - protein, 9 aa, Artificial sequence
  Protein classification predicting sequence
DRGTLFGLQ

SEQ ID NO: 5987 - protein, 10 aa, Artificial sequence
  Protein classification predicting sequence
HWHRTARDLC

SEQ ID NO: 5988 - protein, 9 aa, Artificial sequence
  Protein classification predicting sequence
RGIGGIFFD

SEQ ID NO: 5989 - protein, 15 aa, Artificial sequence
  Protein classification predicting sequence
FQLYRRGRYVEFNLV

SEQ ID NO: 5990 - protein, 8 aa, Artificial sequence
  Protein classification predicting sequence
YPRFKKWC

SEQ ID NO: 5991 - protein, 7 aa, Artificial sequence
  Protein classification predicting sequence
GGIFFDD

SEQ ID NO: 5992 - protein, 9 aa, Artificial sequence
  Protein classification predicting sequence
QPQAGTPEA

SEQ ID NO: 5993 - protein, 14 aa, Artificial sequence
  Protein classification predicting sequence
FQLYRRGRYVEFNL

SEQ ID NO: 5994 - protein, 7 aa, Artificial sequence
  Protein classification predicting sequence
DRGTLFG

SEQ ID NO: 5995 - protein, 14 aa, Artificial sequence
  Protein classification predicting sequence
LPPSASAHRPELAG

SEQ ID NO: 5996 - protein, 8 aa, Artificial sequence
  Protein classification predicting sequence
AHRPELAG

SEQ ID NO: 5997 - protein, 8 aa, Artificial sequence
  Protein classification predicting sequence
GGLFFDDL

SEQ ID NO: 5998 - protein, 13 aa, Artificial sequence
  Protein classification predicting sequence
WFGGGFDLTPFYP

SEQ ID NO: 5999 - protein, 6 aa, Artificial sequence
  Protein classification predicting sequence
HWHRTA

SEQ ID NO: 6000 - protein, 6 aa, Artificial sequence
  Protein classification predicting sequence
RPELAG

SEQ ID NO: 6001 - protein, 13 aa, Artificial sequence
  Protein classification predicting sequence
DRGTLFGLQSGGR

SEQ ID NO: 6002 - protein, 9 aa, Artificial sequence
  Protein classification predicting sequence
GVNVSVVYG

SEQ ID NO: 6003 - protein, 14 aa, Artificial sequence
  Protein classification predicting sequence
PTSHANVRFFIAEK

SEQ ID NO: 6004 - protein, 7 aa, Artificial sequence
  Protein classification predicting sequence
YGFEEDA

SEQ ID NO: 6005 - protein, 8 aa, Artificial sequence
  Protein classification predicting sequence
KKWCDDYF

SEQ ID NO: 6006 - protein, 7 aa, Artificial sequence
  Protein classification predicting sequence
RNFQGYT

SEQ ID NO: 6007 - protein, 7 aa, Artificial sequence
  Protein classification predicting sequence
GRLLIRN

SEQ ID NO: 6008 - protein, 6 aa, Artificial sequence
  Protein classification predicting sequence
DHFARP

SEQ ID NO: 6009 - protein, 11 aa, Artificial sequence
  Protein classification predicting sequence
PLSLYVHIPFC

SEQ ID NO: 6010 - protein, 7 aa, Artificial sequence
  Protein classification predicting sequence
DLIYGLP

SEQ ID NO: 6011 - protein, 11 aa, Artificial sequence
  Protein classification predicting sequence
DLIYGLPKQTP

SEQ ID NO: 6012 - protein, 13 aa, Artificial sequence
  Protein classification predicting sequence
PDRLSVFNYAHLP

SEQ ID NO: 6013 - protein, 7 aa, Artificial sequence
  Protein classification predicting sequence
IGMDHFA

SEQ ID NO: 6014 - protein, 6 aa, Artificial sequence
  Protein classification predicting sequence
RNFQGY

SEQ ID NO: 6015 - protein, 7 aa, Artificial sequence
  Protein classification predicting sequence
PRYTSYP

SEQ ID NO: 6016 - protein, 7 aa, Artificial sequence
  Protein classification predicting sequence
CYFCGCN

SEQ ID NO: 6017 - protein, 11 aa, Artificial sequence
  Protein classification predicting sequence
LHRNFQGYTTQ

SEQ ID NO: 6018 - protein, 7 aa, Artificial sequence
  Protein classification predicting sequence
FSVEIDP

SEQ ID NO: 6019 - protein, 7 aa, Artificial sequence
  Protein classification predicting sequence
TMAFMFE

SEQ ID NO: 6020 - protein, 8 aa, Artificial sequence
  Protein classification predicting sequence
EALPGALP

SEQ ID NO: 6021 - protein, 6 aa, Artificial sequence
  Protein classification predicting sequence
SLHNCM

SEQ ID NO: 6022 - protein, 14 aa, Artificial sequence
  Protein classification predicting sequence
TFRPPYYHRNCMSE

SEQ ID NO: 6023 - protein, 7 aa, Artificial sequence
  Protein classification predicting sequence
FYNADGE

SEQ ID NO: 6024 - protein, 12 aa, Artificial sequence
  Protein classification predicting sequence
HSPLDVVAWHGN

SEQ ID NO: 6025 - protein, 9 aa, Artificial sequence
  Protein classification predicting sequence
DFVIFPPRW

SEQ ID NO: 6026 - protein, 7 aa, Artificial sequence
  Protein classification predicting sequence
GAYDAKA

SEQ ID NO: 6027 - protein, 9 aa, Artificial sequence
  Protein classification predicting sequence
LPVGQNSPQ

SEQ ID NO: 6028 - protein, 8 aa, Artificial sequence
  Protein classification predicting sequence
LYAEQLSG

SEQ ID NO: 6029 - protein, 9 aa, Artificial sequence
  Protein classification predicting sequence
DPSIFTVLT

SEQ ID NO: 6030 - protein, 7 aa, Artificial sequence
  Protein classification predicting sequence
LSGTAFT

SEQ ID NO: 6031 - protein, 10 aa, Artificial sequence
  Protein classification predicting sequence
LSGTAFTAPR

SEQ ID NO: 6032 - protein, 6 aa, Artificial sequence
  Protein classification predicting sequence
PYKYDL

SEQ ID NO: 6033 - protein, 7 aa, Artificial sequence
  Protein classification predicting sequence
DHPDPSI

SEQ ID NO: 6034 - protein, 9 aa, Artificial sequence
  Protein classification predicting sequence
GLYAEQLSG

SEQ ID NO: 6035 - protein, 7 aa, Artificial sequence
  Protein classification predicting sequence
NGLANPR

SEQ ID NO: 6036 - protein, 5 aa, Artificial sequence
  Protein classification predicting sequence
WHGNY

SEQ ID NO: 6037 - protein, 8 aa, Artificial sequence
  Protein classification predicting sequence
LPDLGPIG

SEQ ID NO: 6038 - protein, 11 aa, Artificial sequence
  Protein classification predicting sequence
HSPLDVVAWHG

SEQ ID NO: 6039 - protein, 14 aa, Artificial sequence
  Protein classification predicting sequence
DHPDPSIFTVLTSP

SEQ ID NO: 6040 - protein, 6 aa, Artificial sequence
  Protein classification predicting sequence
GQNSPQ

SEQ ID NO: 6041 - protein, 7 aa, Artificial sequence
  Protein classification predicting sequence
WLYRIRP

SEQ ID NO: 6042 - protein, 8 aa, Artificial sequence
  Protein classification predicting sequence
DHPDPSIF

SEQ ID NO: 6043 - protein, 9 aa, Artificial sequence
  Protein classification predicting sequence
FRPPWFHRN

SEQ ID NO: 6044 - protein, 8 aa, Artificial sequence
  Protein classification predicting sequence
YDAKAEGF

SEQ ID NO: 6045 - protein, 8 aa, Artificial sequence
  Protein classification predicting sequence
PRGVRFRV

SEQ ID NO: 6046 - protein, 7 aa, Artificial sequence
  Protein classification predicting sequence
YDLRRFN

SEQ ID NO: 6047 - protein, 18 aa, Artificial sequence
  Protein classification predicting sequence
IGHSPLDVVAWHGNYAPY

SEQ ID NO: 6048 - protein, 6 aa, Artificial sequence
  Protein classification predicting sequence
IFPPRW

SEQ ID NO: 6049 - protein, 8 aa, Artificial sequence
  Protein classification predicting sequence
NRRSWLYR

SEQ ID NO: 6050 - protein, 6 aa, Artificial sequence
  Protein classification predicting sequence
RSWLYR

SEQ ID NO: 6051 - protein, 9 aa, Artificial sequence
  Protein classification predicting sequence
NGLANPRDF

SEQ ID NO: 6052 - protein, 8 aa, Artificial sequence
  Protein classification predicting sequence
DLLSQAEH

SEQ ID NO: 6053 - protein, 6 aa, Artificial sequence
  Protein classification predicting sequence
NHVLPT

SEQ ID NO: 6054 - protein, 7 aa, Artificial sequence
  Protein classification predicting sequence
YTQRFDR

SEQ ID NO: 6055 - protein, 10 aa, Artificial sequence
  Protein classification predicting sequence
ASYPSSVLMN

SEQ ID NO: 6056 - protein, 8 aa, Artificial sequence
  Protein classification predicting sequence
EIYRVGGA

SEQ ID NO: 6057 - protein, 15 aa, Artificial sequence
  Protein classification predicting sequence
KIVGPGNAYVAAAKR

SEQ ID NO: 6058 - protein, 7 aa, Artificial sequence
  Protein classification predicting sequence
DVRARGD

SEQ ID NO: 6059 - protein, 9 aa, Artificial sequence
  Protein classification predicting sequence
YPSSVLMNA

SEQ ID NO: 6060 - protein, 11 aa, Artificial sequence
  Protein classification predicting sequence
AGPSEVLVIAD

SEQ ID NO: 6061 - protein, 7 aa, Artificial sequence
  Protein classification predicting sequence
GLYVPGG

SEQ ID NO: 6062 - protein, 8 aa, Artificial sequence
  Protein classification predicting sequence
VLMNAIPA

SEQ ID NO: 6063 - protein, 10 aa, Artificial sequence
  Protein classification predicting sequence
YGTETIPKVD

SEQ ID NO: 6064 - protein, 11 aa, Artificial sequence
  Protein classification predicting sequence
AGPSEVLIIAD

SEQ ID NO: 6065 - protein, 6 aa, Artificial sequence
  Protein classification predicting sequence
NHTLPT

SEQ ID NO: 6066 - protein, 6 aa, Artificial sequence
  Protein classification predicting sequence
KIVGPG

SEQ ID NO: 6067 - protein, 14 aa, Artificial sequence
  Protein classification predicting sequence
GDYCAGPNHVLPTS

SEQ ID NO: 6068 - protein, 10 aa, Artificial sequence
  Protein classification predicting sequence
AGPNHVLPTS

SEQ ID NO: 6069 - protein, 7 aa, Artificial sequence
  Protein classification predicting sequence
NHVLPTS

SEQ ID NO: 6070 - protein, 8 aa, Artificial sequence
  Protein classification predicting sequence
AQSILITD

SEQ ID NO: 6071 - protein, 8 aa, Artificial sequence
  Protein classification predicting sequence
GPGNIYVA

SEQ ID NO: 6072 - protein, 9 aa, Artificial sequence
  Protein classification predicting sequence
IDMIAGPSE

SEQ ID NO: 6073 - protein, 6 aa, Artificial sequence
  Protein classification predicting sequence
EPLGDY

SEQ ID NO: 6074 - protein, 8 aa, Artificial sequence
  Protein classification predicting sequence
GPNHTLPT

SEQ ID NO: 6075 - protein, 8 aa, Artificial sequence
  Protein classification predicting sequence
SPLGVYDF

SEQ ID NO: 6076 - protein, 7 aa, Artificial sequence
  Protein classification predicting sequence
LMLAIPA

SEQ ID NO: 6077 - protein, 11 aa, Artificial sequence
  Protein classification predicting sequence
IAADLLSQAEH

SEQ ID NO: 6078 - protein, 6 aa, Artificial sequence
  Protein classification predicting sequence
EGLDAH

SEQ ID NO: 6079 - protein, 11 aa, Artificial sequence
  Protein classification predicting sequence
EGLDAHKRAVT

SEQ ID NO: 6080 - protein, 7 aa, Artificial sequence
  Protein classification predicting sequence
AGSIFLG

SEQ ID NO: 6081 - protein, 7 aa, Artificial sequence
  Protein classification predicting sequence
GVYVPGG

SEQ ID NO: 6082 - protein, 9 aa, Artificial sequence
  Protein classification predicting sequence
GVYVPGGTA

SEQ ID NO: 6083 - protein, 37 aa, Artificial sequence
  Protein classification predicting sequence
GVYVPGGTASYPSSVLMNVLPAKLAGVKKIVMVTPPR

SEQ ID NO: 6084 - protein, 8 aa, Artificial sequence
  Protein classification predicting sequence
GGIDPHIL

SEQ ID NO: 6085 - protein, 12 aa, Artificial sequence
  Protein classification predicting sequence
IDMIAGPSEIVV

SEQ ID NO: 6086 - protein, 32 aa, Artificial sequence
  Protein classification predicting sequence
ADETGNAKYIAADLLSQAEHDERATAICITTN

SEQ ID NO: 6087 - protein, 28 aa, Artificial sequence
  Protein classification predicting sequence
ERQLETLPRSEIARESINRNGAIFIVPS

SEQ ID NO: 6088 - protein, 21 aa, Artificial sequence
  Protein classification predicting sequence
LSNEIAPEHLELHIKEPMNAL

SEQ ID NO: 6089 - protein, 13 aa, Artificial sequence
  Protein classification predicting sequence
YVKHAGSIFLGPY

SEQ ID NO: 6090 - protein, 38 aa, Artificial sequence
  Protein classification predicting sequence
PEPLGDYLAGPNHVLPTSGTARFFSPLSVDDFVKKSSF

SEQ ID NO: 6091 - protein, 11 aa, Artificial sequence
  Protein classification predicting sequence
APLFSTVLMLA

SEQ ID NO: 6092 - protein, 6 aa, Artificial sequence
  Protein classification predicting sequence
YAPEHL

SEQ ID NO: 6093 - protein, 6 aa, Artificial sequence
  Protein classification predicting sequence
AAYPSS

SEQ ID NO: 6094 - protein, 6 aa, Artificial sequence
  Protein classification predicting sequence
ITGPGN

SEQ ID NO: 6095 - protein, 18 aa, Artificial sequence
  Protein classification predicting sequence
VDIDMIAGPSEIVVLADE

SEQ ID NO: 6096 - protein, 9 aa, Artificial sequence
  Protein classification predicting sequence
VDDFVKKSS

SEQ ID NO: 6097 - protein, 8 aa, Artificial sequence
  Protein classification predicting sequence
HAGAIFLG

SEQ ID NO: 6098 - protein, 13 aa, Artificial sequence
  Protein classification predicting sequence
PESAGDYASGTNH

SEQ ID NO: 6099 - protein, 7 aa, Artificial sequence
  Protein classification predicting sequence
AVYPSSV

SEQ ID NO: 6100 - protein, 6 aa, Artificial sequence
  Protein classification predicting sequence
MNAVPA

SEQ ID NO: 6101 - protein, 6 aa, Artificial sequence
  Protein classification predicting sequence
AGPTEI

SEQ ID NO: 6102 - protein, 7 aa, Artificial sequence
  Protein classification predicting sequence
LCSPPPI

SEQ ID NO: 6103 - protein, 21 aa, Artificial sequence
  Protein classification predicting sequence
WSPESAGDYASGTNHVLPTYG

SEQ ID NO: 6104 - protein, 7 aa, Artificial sequence
  Protein classification predicting sequence
YTEADGT

SEQ ID NO: 6105 - protein, 7 aa, Artificial sequence
  Protein classification predicting sequence
PAKVAGV

SEQ ID NO: 6106 - protein, 15 aa, Artificial sequence
  Protein classification predicting sequence
DWIAMDLFSQAEHDE

SEQ ID NO: 6107 - protein, 13 aa, Artificial sequence
  Protein classification predicting sequence
IANDIAPEHLEIS

SEQ ID NO: 6108 - protein, 6 aa, Artificial sequence
  Protein classification predicting sequence
APEHLE

SEQ ID NO: 6109 - protein, 15 aa, Artificial sequence
  Protein classification predicting sequence
LGDYCAGPNHVLPTS

SEQ ID NO: 6110 - protein, 7 aa, Artificial sequence
  Protein classification predicting sequence
IGDYVGG

SEQ ID NO: 6111 - protein, 7 aa, Artificial sequence
  Protein classification predicting sequence
EGLDAHA

SEQ ID NO: 6112 - protein, 7 aa, Artificial sequence
  Protein classification predicting sequence
GPGNAYV

SEQ ID NO: 6113 - protein, 8 aa, Artificial sequence
  Protein classification predicting sequence
SQVILLTP

SEQ ID NO: 6114 - protein, 6 aa, Artificial sequence
  Protein classification predicting sequence
AHKNAV

SEQ ID NO: 6115 - protein, 10 aa, Artificial sequence
  Protein classification predicting sequence
GGAQAIAALA

SEQ ID NO: 6116 - protein, 10 aa, Artificial sequence
  Protein classification predicting sequence
AADLLSQAEH

SEQ ID NO: 6117 - protein, 12 aa, Artificial sequence
  Protein classification predicting sequence
STVLMLAIPAKI

SEQ ID NO: 6118 - protein, 7 aa, Artificial sequence
  Protein classification predicting sequence
PEHLIIQ

SEQ ID NO: 6119 - protein, 8 aa, Artificial sequence
  Protein classification predicting sequence
GTNHVLPT

SEQ ID NO: 6120 - protein, 14 aa, Artificial sequence
  Protein classification predicting sequence
VGIDMIAGPSEILV

SEQ ID NO: 6121 - protein, 8 aa, Artificial sequence
  Protein classification predicting sequence
DGTVLGQK

SEQ ID NO: 6122 - protein, 7 aa, Artificial sequence
  Protein classification predicting sequence
IGGAQAV

SEQ ID NO: 6123 - protein, 7 aa, Artificial sequence
  Protein classification predicting sequence
AGSVFLG

SEQ ID NO: 6124 - protein, 25 aa, Artificial sequence
  Protein classification predicting sequence
FLGAYSPESMGDYASGTNHVLPTYG

SEQ ID NO: 6125 - protein, 8 aa, Artificial sequence
  Protein classification predicting sequence
KRMTVQEL

SEQ ID NO: 6126 - protein, 6 aa, Artificial sequence
  Protein classification predicting sequence
AALAYG

SEQ ID NO: 6127 - protein, 7 aa, Artificial sequence
  Protein classification predicting sequence
IAPEHLE

SEQ ID NO: 6128 - protein, 7 aa, Artificial sequence
  Protein classification predicting sequence
RHAGAIF

SEQ ID NO: 6129 - protein, 5 aa, Artificial sequence
  Protein classification predicting sequence
AGPNH

SEQ ID NO: 6130 - protein, 11 aa, Artificial sequence
  Protein classification predicting sequence
GTARFFSPLSV

SEQ ID NO: 6131 - protein, 9 aa, Artificial sequence
  Protein classification predicting sequence
AGPSEILVI

SEQ ID NO: 6132 - protein, 8 aa, Artificial sequence
  Protein classification predicting sequence
GRGALIQV

SEQ ID NO: 6133 - protein, 8 aa, Artificial sequence
  Protein classification predicting sequence
TARFSSPL

SEQ ID NO: 6134 - protein, 8 aa, Artificial sequence
  Protein classification predicting sequence
YPSSVIMN

SEQ ID NO: 6135 - protein, 9 aa, Artificial sequence
  Protein classification predicting sequence
RVGLYVPGG

SEQ ID NO: 6136 - protein, 8 aa, Artificial sequence
  Protein classification predicting sequence
PHPTILAA

SEQ ID NO: 6137 - protein, 8 aa, Artificial sequence
  Protein classification predicting sequence
VPAQEAGV

SEQ ID NO: 6138 - protein, 5 aa, Artificial sequence
  Protein classification predicting sequence
QAEHG

SEQ ID NO: 6139 - protein, 11 aa, Artificial sequence
  Protein classification predicting sequence
LGVDEVWAVGG

SEQ ID NO: 6140 - protein, 8 aa, Artificial sequence
  Protein classification predicting sequence
EAALKDVS

SEQ ID NO: 6141 - protein, 6 aa, Artificial sequence
  Protein classification predicting sequence
EALGDY

SEQ ID NO: 6142 - protein, 6 aa, Artificial sequence
  Protein classification predicting sequence
SSVLMN

SEQ ID NO: 6143 - protein, 7 aa, Artificial sequence
  Protein classification predicting sequence
LMNAIPA

SEQ ID NO: 6144 - protein, 26 aa, Artificial sequence
  Protein classification predicting sequence
QQRQLLMRPAISASESITRTVNDILD

SEQ ID NO: 6145 - protein, 8 aa, Artificial sequence
  Protein classification predicting sequence
SSLGLADF

SEQ ID NO: 6146 - protein, 6 aa, Artificial sequence
  Protein classification predicting sequence
FHNAQK

SEQ ID NO: 6147 - protein, 12 aa, Artificial sequence
  Protein classification predicting sequence
VGLYIPGGSAPL

SEQ ID NO: 6148 - protein, 20 aa, Artificial sequence
  Protein classification predicting sequence
VGLYIPGGSAPLPSTVLMLG

SEQ ID NO: 6149 - protein, 9 aa, Artificial sequence
  Protein classification predicting sequence
VTEAKRQVS

SEQ ID NO: 6150 - protein, 25 aa, Artificial sequence
  Protein classification predicting sequence
LDGAAIDMPAGPSEVLVIADSGATP

SEQ ID NO: 6151 - protein, 12 aa, Artificial sequence
  Protein classification predicting sequence
LTAHKNAVTLRV

SEQ ID NO: 6152 - protein, 7 aa, Artificial sequence
  Protein classification predicting sequence
PARVAGV

SEQ ID NO: 6153 - protein, 13 aa, Artificial sequence
  Protein classification predicting sequence
PARVAGVGEIVMV

SEQ ID NO: 6154 - protein, 11 aa, Artificial sequence
  Protein classification predicting sequence
GPGNIYVATAK

SEQ ID NO: 6155 - protein, 8 aa, Artificial sequence
  Protein classification predicting sequence
AGPSEILV

SEQ ID NO: 6156 - protein, 7 aa, Artificial sequence
  Protein classification predicting sequence
AGAIFLG

SEQ ID NO: 6157 - protein, 7 aa, Artificial sequence
  Protein classification predicting sequence
GLYIPGG

SEQ ID NO: 6158 - protein, 10 aa, Artificial sequence
  Protein classification predicting sequence
EIYRIGGAQA

SEQ ID NO: 6159 - protein, 7 aa, Artificial sequence
  Protein classification predicting sequence
GDYLAGP

SEQ ID NO: 6160 - protein, 8 aa, Artificial sequence
  Protein classification predicting sequence
VTEAKRQV

SEQ ID NO: 6161 - protein, 10 aa, Artificial sequence
  Protein classification predicting sequence
IDMVAGPSEI

SEQ ID NO: 6162 - protein, 6 aa, Artificial sequence
  Protein classification predicting sequence
AGPSEI

SEQ ID NO: 6163 - protein, 7 aa, Artificial sequence
  Protein classification predicting sequence
ARFFSPL

SEQ ID NO: 6164 - protein, 10 aa, Artificial sequence
  Protein classification predicting sequence
IRGQIIRPLE

SEQ ID NO: 6165 - protein, 13 aa, Artificial sequence
  Protein classification predicting sequence
YPSSVLMNVLPAK

SEQ ID NO: 6166 - protein, 9 aa, Artificial sequence
  Protein classification predicting sequence
VDKIVGPGN

SEQ ID NO: 6167 - protein, 11 aa, Artificial sequence
  Protein classification predicting sequence
KVDKIFGPGNA

SEQ ID NO: 6168 - protein, 8 aa, Artificial sequence
  Protein classification predicting sequence
TLPRSEIA

SEQ ID NO: 6169 - protein, 13 aa, Artificial sequence
  Protein classification predicting sequence
GDYASGTNHVLPT

SEQ ID NO: 6170 - protein, 7 aa, Artificial sequence
  Protein classification predicting sequence
YPSTVLM

SEQ ID NO: 6171 - protein, 9 aa, Artificial sequence
  Protein classification predicting sequence
SGTNHVLPT

SEQ ID NO: 6172 - protein, 7 aa, Artificial sequence
  Protein classification predicting sequence
AGCREVV

SEQ ID NO: 6173 - protein, 8 aa, Artificial sequence
  Protein classification predicting sequence
AGPSEVLI

SEQ ID NO: 6174 - protein, 8 aa, Artificial sequence
  Protein classification predicting sequence
LMTVIPAR

SEQ ID NO: 6175 - protein, 10 aa, Artificial sequence
  Protein classification predicting sequence
IDLRGAELTA

SEQ ID NO: 6176 - protein, 27 aa, Artificial sequence
  Protein classification predicting sequence
PVDMITGPGNIYVTAAKRLCRSRVGID

SEQ ID NO: 6177 - protein, 17 aa, Artificial sequence
  Protein classification predicting sequence
EAGPTEIAILADHTADP

SEQ ID NO: 6178 - protein, 7 aa, Artificial sequence
  Protein classification predicting sequence
PVSLGDY

SEQ ID NO: 6179 - protein, 19 aa, Artificial sequence
  Protein classification predicting sequence
PVSLGDYCAGSNHVLPTAG

SEQ ID NO: 6180 - protein, 14 aa, Artificial sequence
  Protein classification predicting sequence
GLSVQTFLRGIHVV

SEQ ID NO: 6181 - protein, 19 aa, Artificial sequence
  Protein classification predicting sequence
ARHSSGLSVQTFLRGIHVV

SEQ ID NO: 6182 - protein, 38 aa, Artificial sequence
  Protein classification predicting sequence
PGATVTERWVPVERVGLYVPGGNAVYPSSVVMNVVPAQ

SEQ ID NO: 6183 - protein, 7 aa, Artificial sequence
  Protein classification predicting sequence
GPGNAFV

SEQ ID NO: 6184 - protein, 9 aa, Artificial sequence
  Protein classification predicting sequence
TARFSSPLG

SEQ ID NO: 6185 - protein, 26 aa, Artificial sequence
  Protein classification predicting sequence
LDRVGLYVPGGKAAYPSSVLMNAIPA

SEQ ID NO: 6186 - protein, 9 aa, Artificial sequence
  Protein classification predicting sequence
ELIMVTPTP

SEQ ID NO: 6187 - protein, 9 aa, Artificial sequence
  Protein classification predicting sequence
AQSILLCPD

SEQ ID NO: 6188 - protein, 8 aa, Artificial sequence
  Protein classification predicting sequence
VRDLEEAC

SEQ ID NO: 6189 - protein, 6 aa, Artificial sequence
  Protein classification predicting sequence
HAGAIF

SEQ ID NO: 6190 - protein, 7 aa, Artificial sequence
  Protein classification predicting sequence
GDYFAGP

SEQ ID NO: 6191 - protein, 9 aa, Artificial sequence
  Protein classification predicting sequence
DLLSQAEHG

SEQ ID NO: 6192 - protein, 17 aa, Artificial sequence
  Protein classification predicting sequence
SSLGLADFSKRMTVQEL

SEQ ID NO: 6193 - protein, 9 aa, Artificial sequence
  Protein classification predicting sequence
TVVWQSLSE

SEQ ID NO: 6194 - protein, 12 aa, Artificial sequence
  Protein classification predicting sequence
RPAITEGANITA

SEQ ID NO: 6195 - protein, 29 aa, Artificial sequence
  Protein classification predicting sequence
VGLYIPGGSAPLPSTVLMLGVPAQIAGCR

SEQ ID NO: 6196 - protein, 7 aa, Artificial sequence
  Protein classification predicting sequence
LMLGVPA

SEQ ID NO: 6197 - protein, 15 aa, Artificial sequence
  Protein classification predicting sequence
VVLCSPPPIADEILY

SEQ ID NO: 6198 - protein, 31 aa, Artificial sequence
  Protein classification predicting sequence
VTEAKRQVSNDFRGAAIDMPAGPSEVLVIAD

SEQ ID NO: 6199 - protein, 9 aa, Artificial sequence
  Protein classification predicting sequence
RADIARQAL

SEQ ID NO: 6200 - protein, 20 aa, Artificial sequence
  Protein classification predicting sequence
PESVGDYASGTNHVLPTYGY

SEQ ID NO: 6201 - protein, 24 aa, Artificial sequence
  Protein classification predicting sequence
LAPTVVTMAEAEGLDAHKRAVTIR

SEQ ID NO: 6202 - protein, 6 aa, Artificial sequence
  Protein classification predicting sequence
GLYVPG

SEQ ID NO: 6203 - protein, 6 aa, Artificial sequence
  Protein classification predicting sequence
SSVIMN

SEQ ID NO: 6204 - protein, 8 aa, Artificial sequence
  Protein classification predicting sequence
LGDYSAGS

SEQ ID NO: 6205 - protein, 6 aa, Artificial sequence
  Protein classification predicting sequence
LTEKFD

SEQ ID NO: 6206 - protein, 6 aa, Artificial sequence
  Protein classification predicting sequence
GQVGID

SEQ ID NO: 6207 - protein, 6 aa, Artificial sequence
  Protein classification predicting sequence
AQVAGV

SEQ ID NO: 6208 - protein, 8 aa, Artificial sequence
  Protein classification predicting sequence
GGAQAIAA

SEQ ID NO: 6209 - protein, 7 aa, Artificial sequence
  Protein classification predicting sequence
AGPSEVL

SEQ ID NO: 6210 - protein, 7 aa, Artificial sequence
  Protein classification predicting sequence
AADLLAQ

SEQ ID NO: 6211 - protein, 10 aa, Artificial sequence
  Protein classification predicting sequence
GIDSLAGPSE

SEQ ID NO: 6212 - protein, 7 aa, Artificial sequence
  Protein classification predicting sequence
AALAYGT

SEQ ID NO: 6213 - protein, 8 aa, Artificial sequence
  Protein classification predicting sequence
IRHAGAIF

SEQ ID NO: 6214 - protein, 14 aa, Artificial sequence
  Protein classification predicting sequence
GGAQAVAALAYGTE

SEQ ID NO: 6215 - protein, 8 aa, Artificial sequence
  Protein classification predicting sequence
AALAYGTE

SEQ ID NO: 6216 - protein, 6 aa, Artificial sequence
  Protein classification predicting sequence
ADLLSQ

SEQ ID NO: 6217 - protein, 7 aa, Artificial sequence
  Protein classification predicting sequence
YVPGGKA

SEQ ID NO: 6218 - protein, 44 aa, Artificial sequence
  Protein classification predicting sequence
TVPAVDKIVGPGNAYVAAAKRRVFGTVGIDMIAGPSEILVICDG

SEQ ID NO: 6219 - protein, 7 aa, Artificial sequence
  Protein classification predicting sequence
CDGTTDP

SEQ ID NO: 6220 - protein, 14 aa, Artificial sequence
  Protein classification predicting sequence
WVAMDLFSQAEHDE

SEQ ID NO: 6221 - protein, 8 aa, Artificial sequence
  Protein classification predicting sequence
DLLAQAEH

SEQ ID NO: 6222 - protein, 7 aa, Artificial sequence
  Protein classification predicting sequence
YVPGGTA

SEQ ID NO: 6223 - protein, 15 aa, Artificial sequence
  Protein classification predicting sequence
VAEAVERQLAELPRA

SEQ ID NO: 6224 - protein, 14 aa, Artificial sequence
  Protein classification predicting sequence
ASRLIVTKDLAQCV

SEQ ID NO: 6225 - protein, 10 aa, Artificial sequence
  Protein classification predicting sequence
RLSDELKQAM

SEQ ID NO: 6226 - protein, 12 aa, Artificial sequence
  Protein classification predicting sequence
PAGPSEVLVIAD

SEQ ID NO: 6227 - protein, 9 aa, Artificial sequence
  Protein classification predicting sequence
GDYASGTNH

SEQ ID NO: 6228 - protein, 6 aa, Artificial sequence
  Protein classification predicting sequence
LPTYGY

SEQ ID NO: 6229 - protein, 8 aa, Artificial sequence
  Protein classification predicting sequence
VGLYIPGG

SEQ ID NO: 6230 - protein, 7 aa, Artificial sequence
  Protein classification predicting sequence
STVLMLA

SEQ ID NO: 6231 - protein, 15 aa, Artificial sequence
  Protein classification predicting sequence
IDMPAGPSEVLVIAD

SEQ ID NO: 6232 - protein, 11 aa, Artificial sequence
  Protein classification predicting sequence
YGPEHLIIQTR

SEQ ID NO: 6233 - protein, 18 aa, Artificial sequence
  Protein classification predicting sequence
IETFHTAQKLPPVDVETQ

SEQ ID NO: 6234 - protein, 7 aa, Artificial sequence
  Protein classification predicting sequence
AGPTEIA

SEQ ID NO: 6235 - protein, 93 aa, Artificial sequence
  Protein classification predicting sequence
MLNAQQFLNQFSLEAPLDESLYPIIRDICQEVKVHGDKALKMYNLTFDHTKTDHLEISHEQIKAAFDTLDEKTKQALQQSYERIKAYQESIKQ

SEQ ID NO: 6236 - protein, 129 aa, Artificial sequence
  Protein classification predicting sequence
EDAQVLKDLESRIAKALPNVDRYDIVSKSIANQHYLIHASNFDEACHVMNTIAPEHASIQTVNPQPYIEKVKYVGALFIGHYSPEVIGDYVAGPSHVLPTNRTARFTNGLSVNDFLTRNTVIHLSKDTF

SEQ ID NO: 6237 - protein, 8 aa, Artificial sequence
  Protein classification predicting sequence
VGIYVPGG

SEQ ID NO: 6238 - protein, 10 aa, Artificial sequence
  Protein classification predicting sequence
VGIYVPGGKA

SEQ ID NO: 6239 - protein, 28 aa, Artificial sequence
  Protein classification predicting sequence
VGIYVPGGKASYPSTVLMTATLAQVAGV

SEQ ID NO: 6240 - protein, 6 aa, Artificial sequence
  Protein classification predicting sequence
VVTPPQ

SEQ ID NO: 6241 - protein, 10 aa, Artificial sequence
  Protein classification predicting sequence
QEVLAACYIT

SEQ ID NO: 6242 - protein, 20 aa, Artificial sequence
  Protein classification predicting sequence
FGQVGIDQIAGPTEIALIID

SEQ ID NO: 6243 - protein, 11 aa, Artificial sequence
  Protein classification predicting sequence
YDVFAQAEHDE

SEQ ID NO: 6244 - protein, 6 aa, Artificial sequence
  Protein classification predicting sequence
QAEHDE

SEQ ID NO: 6245 - protein, 13 aa, Artificial sequence
  Protein classification predicting sequence
MNTIAPEHASIQT

SEQ ID NO: 6246 - protein, 9 aa, Artificial sequence
  Protein classification predicting sequence
KVKYVGALF

SEQ ID NO: 6247 - protein, 13 aa, Artificial sequence
  Protein classification predicting sequence
TARFTNGLSVNDF

SEQ ID NO: 6248 - protein, 12 aa, Artificial sequence
  Protein classification predicting sequence
GIDAEAGPTEIA

SEQ ID NO: 6249 - protein, 8 aa, Artificial sequence
  Protein classification predicting sequence
TADPVHVA

SEQ ID NO: 6250 - protein, 14 aa, Artificial sequence
  Protein classification predicting sequence
WVPVERVGLYVPGG

SEQ ID NO: 6251 - protein, 6 aa, Artificial sequence
  Protein classification predicting sequence
PAKIAG

SEQ ID NO: 6252 - protein, 6 aa, Artificial sequence
  Protein classification predicting sequence
PKVDKI

SEQ ID NO: 6253 - protein, 6 aa, Artificial sequence
  Protein classification predicting sequence
AYGTES

SEQ ID NO: 6254 - protein, 7 aa, Artificial sequence
  Protein classification predicting sequence
GPGNIFV

SEQ ID NO: 6255 - protein, 11 aa, Artificial sequence
  Protein classification predicting sequence
IDGIEGPTELV

SEQ ID NO: 6256 - protein, 9 aa, Artificial sequence
  Protein classification predicting sequence
ANDIAPEHL

SEQ ID NO: 6257 - protein, 7 aa, Artificial sequence
  Protein classification predicting sequence
KIVGPGN

SEQ ID NO: 6258 - protein, 7 aa, Artificial sequence
  Protein classification predicting sequence
VAGVKEI

SEQ ID NO: 6259 - protein, 7 aa, Artificial sequence
  Protein classification predicting sequence
GPGNIYV

SEQ ID NO: 6260 - protein, 8 aa, Artificial sequence
  Protein classification predicting sequence
NEIAPEHL

SEQ ID NO: 6261 - protein, 7 aa, Artificial sequence
  Protein classification predicting sequence
IDMLAGP

SEQ ID NO: 6262 - protein, 13 aa, Artificial sequence
  Protein classification predicting sequence
PLESVGIYVPGGK

SEQ ID NO: 6263 - protein, 6 aa, Artificial sequence
  Protein classification predicting sequence
YVPGGK

SEQ ID NO: 6264 - protein, 6 aa, Artificial sequence
  Protein classification predicting sequence
GTVGID

SEQ ID NO: 6265 - protein, 8 aa, Artificial sequence
  Protein classification predicting sequence
PTSGTARF

SEQ ID NO: 6266 - protein, 8 aa, Artificial sequence
  Protein classification predicting sequence
YPSSVLMN

SEQ ID NO: 6267 - protein, 29 aa, Artificial sequence
  Protein classification predicting sequence
PEPLGDYLAGPNHVLPTSGTARFFSPLSV

SEQ ID NO: 6268 - protein, 9 aa, Artificial sequence
  Protein classification predicting sequence
MKQALEQAY

SEQ ID NO: 6269 - protein, 6 aa, Artificial sequence
  Protein classification predicting sequence
PGVVCE

SEQ ID NO: 6270 - protein, 18 aa, Artificial sequence
  Protein classification predicting sequence
FIAADLLSQAEHGPDSQV

SEQ ID NO: 6271 - protein, 7 aa, Artificial sequence
  Protein classification predicting sequence
AASERLS

SEQ ID NO: 6272 - protein, 26 aa, Artificial sequence
  Protein classification predicting sequence
IAGCRKVVLCSPPPIADEILYVAKLC

SEQ ID NO: 6273 - protein, 9 aa, Artificial sequence
  Protein classification predicting sequence
ADQVTDAVQ

SEQ ID NO: 6274 - protein, 10 aa, Artificial sequence
  Protein classification predicting sequence
KALASSLIII

SEQ ID NO: 6275 - protein, 8 aa, Artificial sequence
  Protein classification predicting sequence
GSAPLPST

SEQ ID NO: 6276 - protein, 7 aa, Artificial sequence
  Protein classification predicting sequence
KIFGPGN

SEQ ID NO: 6277 - protein, 36 aa, Artificial sequence
  Protein classification predicting sequence
VTEAKRQVSQRLDGAAIDMPAGPSEVLVIADSGATP

SEQ ID NO: 6278 - protein, 14 aa, Artificial sequence
  Protein classification predicting sequence
DLLSQAEHGPDSQV

SEQ ID NO: 6279 - protein, 6 aa, Artificial sequence
  Protein classification predicting sequence
KRMTVQ

SEQ ID NO: 6280 - protein, 9 aa, Artificial sequence
  Protein classification predicting sequence
LASTIETLA

SEQ ID NO: 6281 - protein, 8 aa, Artificial sequence
  Protein classification predicting sequence
MVTPTPDG

SEQ ID NO: 6282 - protein, 6 aa, Artificial sequence
  Protein classification predicting sequence
GSVFLG

SEQ ID NO: 6283 - protein, 9 aa, Artificial sequence
  Protein classification predicting sequence
IYLLGFFGI

SEQ ID NO: 6284 - protein, 8 aa, Artificial sequence
  Protein classification predicting sequence
LGDCKRAA

SEQ ID NO: 6285 - protein, 8 aa, Artificial sequence
  Protein classification predicting sequence
IRREALQR

SEQ ID NO: 6286 - protein, 7 aa, Artificial sequence
  Protein classification predicting sequence
SRFARLQ

SEQ ID NO: 6287 - protein, 9 aa, Artificial sequence
  Protein classification predicting sequence
TGDAMGMNM

SEQ ID NO: 6288 - protein, 7 aa, Artificial sequence
  Protein classification predicting sequence
CITMMEA

SEQ ID NO: 6289 - protein, 7 aa, Artificial sequence
  Protein classification predicting sequence
LATIVAG

SEQ ID NO: 6290 - protein, 18 aa, Artificial sequence
  Protein classification predicting sequence
VLAGELSLMSAIAAGQLV

SEQ ID NO: 6291 - protein, 5 aa, Artificial sequence
  Protein classification predicting sequence
GQCCE

SEQ ID NO: 6292 - protein, 8 aa, Artificial sequence
  Protein classification predicting sequence
CCENVIGY

SEQ ID NO: 6293 - protein, 7 aa, Artificial sequence
  Protein classification predicting sequence
AQNVESS

SEQ ID NO: 6294 - protein, 15 aa, Artificial sequence
  Protein classification predicting sequence
VTMPSIEVGTVGGGT

SEQ ID NO: 6295 - protein, 6 aa, Artificial sequence
  Protein classification predicting sequence
DCKRAA

SEQ ID NO: 6296 - protein, 12 aa, Artificial sequence
  Protein classification predicting sequence
QIPVGIAGPLLL

SEQ ID NO: 6297 - protein, 10 aa, Artificial sequence
  Protein classification predicting sequence
VRFGTAKRAA

SEQ ID NO: 6298 - protein, 9 aa, Artificial sequence
  Protein classification predicting sequence
KIRNSTPLH

SEQ ID NO: 6299 - protein, 8 aa, Artificial sequence
  Protein classification predicting sequence
AIVSLIAS

SEQ ID NO: 6300 - protein, 19 aa, Artificial sequence
  Protein classification predicting sequence
GKIPSYSLESKLGDCKRAA

SEQ ID NO: 6301 - protein, 15 aa, Artificial sequence
  Protein classification predicting sequence
GYVQIPVGIAGPLLL

SEQ ID NO: 6302 - protein, 7 aa, Artificial sequence
  Protein classification predicting sequence
IAGKNLY

SEQ ID NO: 6303 - protein, 10 aa, Artificial sequence
  Protein classification predicting sequence
LVELNMLKNL

SEQ ID NO: 6304 - protein, 12 aa, Artificial sequence
  Protein classification predicting sequence
PSYSLESKLGDC

SEQ ID NO: 6305 - protein, 10 aa, Artificial sequence
  Protein classification predicting sequence
EEVVKKVLKT

SEQ ID NO: 6306 - protein, 14 aa, Artificial sequence
  Protein classification predicting sequence
AGQLVKSHMKYNRS

SEQ ID NO: 6307 - protein, 6 aa, Artificial sequence
  Protein classification predicting sequence
IYLLGF

SEQ ID NO: 6308 - protein, 8 aa, Artificial sequence
  Protein classification predicting sequence
QRITGKSL

SEQ ID NO: 6309 - protein, 20 aa, Artificial sequence
  Protein classification predicting sequence
EYSVPMATTEGCLVASTNRG

SEQ ID NO: 6310 - protein, 9 aa, Artificial sequence
  Protein classification predicting sequence
MTRAPVVRF

SEQ ID NO: 6311 - protein, 7 aa, Artificial sequence
  Protein classification predicting sequence
GSAMAGS

SEQ ID NO: 6312 - protein, 10 aa, Artificial sequence
  Protein classification predicting sequence
ASDALPLPLY

SEQ ID NO: 6313 - protein, 8 aa, Artificial sequence
  Protein classification predicting sequence
DMDVIGIS

SEQ ID NO: 6314 - protein, 27 aa, Artificial sequence
  Protein classification predicting sequence
NFCSDKKPAAVNWIEGRGKSVVCEAII

SEQ ID NO: 6315 - protein, 14 aa, Artificial sequence
  Protein classification predicting sequence
LVELNMLKNLTGSA

SEQ ID NO: 6316 - protein, 8 aa, Artificial sequence
  Protein classification predicting sequence
SHMKYNRS

SEQ ID NO: 6317 - protein, 9 aa, Artificial sequence
  Protein classification predicting sequence
LRDGMTRAP

SEQ ID NO: 6318 - protein, 7 aa, Artificial sequence
  Protein classification predicting sequence
RWREKIR

SEQ ID NO: 6319 - protein, 15 aa, Artificial sequence
  Protein classification predicting sequence
ASVIYLLGFFGIGFV

SEQ ID NO: 6320 - protein, 14 aa, Artificial sequence
  Protein classification predicting sequence
CSTGDAMGMNMVSK

SEQ ID NO: 6321 - protein, 12 aa, Artificial sequence
  Protein classification predicting sequence
TGDAMGMNMVSK

SEQ ID NO: 6322 - protein, 6 aa, Artificial sequence
  Protein classification predicting sequence
LVELNM

SEQ ID NO: 6323 - protein, 24 aa, Artificial sequence
  Protein classification predicting sequence
GTVGGGTQLASQSACLNLLGVKGA

SEQ ID NO: 6324 - protein, 22 aa, Artificial sequence
  Protein classification predicting sequence
RLLATIVAGSVLAGELSLMSAI

SEQ ID NO: 6325 - protein, 8 aa, Artificial sequence
  Protein classification predicting sequence
SILGQCCE

SEQ ID NO: 6326 - protein, 8 aa, Artificial sequence
  Protein classification predicting sequence
QNVLDYLQ

SEQ ID NO: 6327 - protein, 8 aa, Artificial sequence
  Protein classification predicting sequence
VVKKVLKT

SEQ ID NO: 6328 - protein, 8 aa, Artificial sequence
  Protein classification predicting sequence
ESSHCITM

SEQ ID NO: 6329 - protein, 10 aa, Artificial sequence
  Protein classification predicting sequence
PGSNARLLAT

SEQ ID NO: 6330 - protein, 7 aa, Artificial sequence
  Protein classification predicting sequence
GNNDSWD

SEQ ID NO: 6331 - protein, 9 aa, Artificial sequence
  Protein classification predicting sequence
GKSLEGLPL

SEQ ID NO: 6332 - protein, 14 aa, Artificial sequence
  Protein classification predicting sequence
AKRAAELKFFVEDP

SEQ ID NO: 6333 - protein, 19 aa, Artificial sequence
  Protein classification predicting sequence
FYIPLATTEGALVASVNRG

SEQ ID NO: 6334 - protein, 6 aa, Artificial sequence
  Protein classification predicting sequence
DKKPAA

SEQ ID NO: 6335 - protein, 9 aa, Artificial sequence
  Protein classification predicting sequence
AIFIATGQD

SEQ ID NO: 6336 - protein, 8 aa, Artificial sequence
  Protein classification predicting sequence
SAIAAGQL

SEQ ID NO: 6337 - protein, 7 aa, Artificial sequence
  Protein classification predicting sequence
QRVKMIM

SEQ ID NO: 6338 - protein, 7 aa, Artificial sequence
  Protein classification predicting sequence
PMATTEG

SEQ ID NO: 6339 - protein, 8 aa, Artificial sequence
  Protein classification predicting sequence
LVASTNRG

SEQ ID NO: 6340 - protein, 7 aa, Artificial sequence
  Protein classification predicting sequence
VTAIYIA

SEQ ID NO: 6341 - protein, 9 aa, Artificial sequence
  Protein classification predicting sequence
EVGTVGGGT

SEQ ID NO: 6342 - protein, 9 aa, Artificial sequence
  Protein classification predicting sequence
AQNVGSSNC

SEQ ID NO: 6343 - protein, 11 aa, Artificial sequence
  Protein classification predicting sequence
SCTMPSIEIGT

SEQ ID NO: 6344 - protein, 6 aa, Artificial sequence
  Protein classification predicting sequence
TMPSIE

SEQ ID NO: 6345 - protein, 7 aa, Artificial sequence
  Protein classification predicting sequence
LESKLGD

SEQ ID NO: 6346 - protein, 11 aa, Artificial sequence
  Protein classification predicting sequence
CSTGDAMGMNM

SEQ ID NO: 6347 - protein, 7 aa, Artificial sequence
  Protein classification predicting sequence
NDGKDLH

SEQ ID NO: 6348 - protein, 12 aa, Artificial sequence
  Protein classification predicting sequence
PVGIAGPLLLDG

SEQ ID NO: 6349 - protein, 7 aa, Artificial sequence
  Protein classification predicting sequence
KNLAGSA

SEQ ID NO: 6350 - protein, 8 aa, Artificial sequence
  Protein classification predicting sequence
LGIAGLFT

SEQ ID NO: 6351 - protein, 6 aa, Artificial sequence
  Protein classification predicting sequence
ACCENV

SEQ ID NO: 6352 - protein, 6 aa, Artificial sequence
  Protein classification predicting sequence
GMTRAP

SEQ ID NO: 6353 - protein, 7 aa, Artificial sequence
  Protein classification predicting sequence
FDSTSRF

SEQ ID NO: 6354 - protein, 12 aa, Artificial sequence
  Protein classification predicting sequence
GACCENVIGYMP

SEQ ID NO: 6355 - protein, 8 aa, Artificial sequence
  Protein classification predicting sequence
ATGQDPAQ

SEQ ID NO: 6356 - protein, 8 aa, Artificial sequence
  Protein classification predicting sequence
ALAAGHLV

SEQ ID NO: 6357 - protein, 8 aa, Artificial sequence
  Protein classification predicting sequence
ASVNRGCS

SEQ ID NO: 6358 - protein, 7 aa, Artificial sequence
  Protein classification predicting sequence
DAMGMNM

SEQ ID NO: 6359 - protein, 8 aa, Artificial sequence
  Protein classification predicting sequence
DKKPAAIN

SEQ ID NO: 6360 - protein, 12 aa, Artificial sequence
  Protein classification predicting sequence
EPRPNEECLQIL

SEQ ID NO: 6361 - protein, 8 aa, Artificial sequence
  Protein classification predicting sequence
GDAMGMNM

SEQ ID NO: 6362 - protein, 6 aa, Artificial sequence
  Protein classification predicting sequence
MTRAPV

SEQ ID NO: 6363 - protein, 33 aa, Artificial sequence
  Protein classification predicting sequence
VSKRIEPSVSLWQFYLSKMISMDIEQVITLSLA

SEQ ID NO: 6364 - protein, 10 aa, Artificial sequence
  Protein classification predicting sequence
RKVEVIKPLV

SEQ ID NO: 6365 - protein, 19 aa, Artificial sequence
  Protein classification predicting sequence
ESSHCITMMEAVNDGKDLH

SEQ ID NO: 6366 - protein, 7 aa, Artificial sequence
  Protein classification predicting sequence
GRGKSVV

SEQ ID NO: 6367 - protein, 8 aa, Artificial sequence
  Protein classification predicting sequence
MPSIEVGT

SEQ ID NO: 6368 - protein, 9 aa, Artificial sequence
  Protein classification predicting sequence
PGENARQLA

SEQ ID NO: 6369 - protein, 6 aa, Artificial sequence
  Protein classification predicting sequence
CCRREP

SEQ ID NO: 6370 - protein, 28 aa, Artificial sequence
  Protein classification predicting sequence
AKHIPAYKLETLMETHERGVSIRRQLLS

SEQ ID NO: 6371 - protein, 7 aa, Artificial sequence
  Protein classification predicting sequence
GRGKTVV

SEQ ID NO: 6372 - protein, 8 aa, Artificial sequence
  Protein classification predicting sequence
VLAGELSL

SEQ ID NO: 6373 - protein, 11 aa, Artificial sequence
  Protein classification predicting sequence
LLAVKYIFFEQ

SEQ ID NO: 6374 - protein, 18 aa, Artificial sequence
  Protein classification predicting sequence
EPSSLQYLPYRDYNYSLV

SEQ ID NO: 6375 - protein, 17 aa, Artificial sequence
  Protein classification predicting sequence
GACCENVIGYMPIPVGV

SEQ ID NO: 6376 - protein, 8 aa, Artificial sequence
  Protein classification predicting sequence
NWIEGRGK

SEQ ID NO: 6377 - protein, 30 aa, Artificial sequence
  Protein classification predicting sequence
VTAIYIACGQDAAQNVGSSNCITLMEASGP

SEQ ID NO: 6378 - protein, 33 aa, Artificial sequence
  Protein classification predicting sequence
PGENARQLARIVCGTVMAGELSLMAALAAGHLV

SEQ ID NO: 6379 - protein, 11 aa, Artificial sequence
  Protein classification predicting sequence
HNRSKINLQDL

SEQ ID NO: 6380 - protein, 9 aa, Artificial sequence
  Protein classification predicting sequence
RATFVLGAS

SEQ ID NO: 6381 - protein, 14 aa, Artificial sequence
  Protein classification predicting sequence
LGGGASSRVLADGM

SEQ ID NO: 6382 - protein, 17 aa, Artificial sequence
  Protein classification predicting sequence
RGPVVRLPRACDSAEVK

SEQ ID NO: 6383 - protein, 10 aa, Artificial sequence
  Protein classification predicting sequence
WLETPEGFAV

SEQ ID NO: 6384 - protein, 10 aa, Artificial sequence
  Protein classification predicting sequence
VIGYMPIPVG

SEQ ID NO: 6385 - protein, 7 aa, Artificial sequence
  Protein classification predicting sequence
MTRAPVV

SEQ ID NO: 6386 - protein, 6 aa, Artificial sequence
  Protein classification predicting sequence
GRGKSV

SEQ ID NO: 6387 - protein, 8 aa, Artificial sequence
  Protein classification predicting sequence
ELSLMAAL

SEQ ID NO: 6388 - protein, 8 aa, Artificial sequence
  Protein classification predicting sequence
SHPWEVIV

SEQ ID NO: 6389 - protein, 6 aa, Artificial sequence
  Protein classification predicting sequence
TLTICM

SEQ ID NO: 6390 - protein, 18 aa, Artificial sequence
  Protein classification predicting sequence
GSKYILGIAGLFTIFSSF

SEQ ID NO: 6391 - protein, 18 aa, Artificial sequence
  Protein classification predicting sequence
ELTGLNEALPFFLLLIDL

SEQ ID NO: 6392 - protein, 12 aa, Artificial sequence
  Protein classification predicting sequence
NIARGMAILGPT

SEQ ID NO: 6393 - protein, 13 aa, Artificial sequence
  Protein classification predicting sequence
ANYFVFMTFFPAC

SEQ ID NO: 6394 - protein, 9 aa, Artificial sequence
  Protein classification predicting sequence
GLVLVHAHS

SEQ ID NO: 6395 - protein, 10 aa, Artificial sequence
  Protein classification predicting sequence
AKHIPAYKLE

SEQ ID NO: 6396 - protein, 21 aa, Artificial sequence
  Protein classification predicting sequence
QVPMATTEGCLVASTNRGCRA

SEQ ID NO: 6397 - protein, 6 aa, Artificial sequence
  Protein classification predicting sequence
STSRFA

SEQ ID NO: 6398 - protein, 9 aa, Artificial sequence
  Protein classification predicting sequence
SGNYCTDKK

SEQ ID NO: 6399 - protein, 14 aa, Artificial sequence
  Protein classification predicting sequence
NWIEGRGKSVVCEA

SEQ ID NO: 6400 - protein, 7 aa, Artificial sequence
  Protein classification predicting sequence
GQDAAQN

SEQ ID NO: 6401 - protein, 6 aa, Artificial sequence
  Protein classification predicting sequence
LVKSHM

SEQ ID NO: 6402 - protein, 29 aa, Artificial sequence
  Protein classification predicting sequence
FVASHPWEVIVGTVTLTICMMSMNMFTGN

SEQ ID NO: 6403 - protein, 86 aa, Artificial sequence
  Protein classification predicting sequence
CPKFEEDVLSSDIIILTITRCIAILYIYFQFQNLRQLGSKYILGIAGLFTIFSSFVFSTVVIHFLDKELTGLNEALPFFLLLIDLS

SEQ ID NO: 6404 - protein, 35 aa, Artificial sequence
  Protein classification predicting sequence
ALVECLVIGVGTMSGVRQLEIMCCFGCMSVLANYF

SEQ ID NO: 6405 - protein, 7 aa, Artificial sequence
  Protein classification predicting sequence
LWQFYLS

SEQ ID NO: 6406 - protein, 28 aa, Artificial sequence
  Protein classification predicting sequence
YNYSLVMGACCENVIGYMPIPVGVAGPL

SEQ ID NO: 6407 - protein, 8 aa, Artificial sequence
  Protein classification predicting sequence
PVGVAGPL

SEQ ID NO: 6408 - protein, 11 aa, Artificial sequence
  Protein classification predicting sequence
AGRNLYIRFQS

SEQ ID NO: 6409 - protein, 11 aa, Artificial sequence
  Protein classification predicting sequence
IPAKVVREVLK

SEQ ID NO: 6410 - protein, 23 aa, Artificial sequence
  Protein classification predicting sequence
EDLYISCTMPSIEIGTVGGGTNL

SEQ ID NO: 6411 - protein, 14 aa, Artificial sequence
  Protein classification predicting sequence
PQQACLQMLGVQGA

SEQ ID NO: 6412 - protein, 15 aa, Artificial sequence
  Protein classification predicting sequence
SHMVHNRSKINLQDL

SEQ ID NO: 6413 - protein, 13 aa, Artificial sequence
  Protein classification predicting sequence
AILGAGCYRTHAA

SEQ ID NO: 6414 - protein, 8 aa, Artificial sequence
  Protein classification predicting sequence
AKELPKPP

SEQ ID NO: 6415 - protein, 15 aa, Artificial sequence
  Protein classification predicting sequence
GAIVTHACTIPTTKF

SEQ ID NO: 6416 - protein, 8 aa, Artificial sequence
  Protein classification predicting sequence
TADSMNFG

SEQ ID NO: 6417 - protein, 19 aa, Artificial sequence
  Protein classification predicting sequence
LDPGALLGTADSMNFGASA

SEQ ID NO: 6418 - protein, 12 aa, Artificial sequence
  Protein classification predicting sequence
MTHSTITMGAEL

SEQ ID NO: 6419 - protein, 12 aa, Artificial sequence
  Protein classification predicting sequence
GAIVTHACTIPT

SEQ ID NO: 6420 - protein, 14 aa, Artificial sequence
  Protein classification predicting sequence
SYHPGAVPEMKGQV

SEQ ID NO: 6421 - protein, 61 aa, Artificial sequence
  Protein classification predicting sequence
IMPQIREKVNEVAKELPKPPEGAIHFTHPEDLGFEITTDDREAVADADFIMTWFPKGDMQP

SEQ ID NO: 6422 - protein, 8 aa, Artificial sequence
  Protein classification predicting sequence
GITNFSRA

SEQ ID NO: 6423 - protein, 12 aa, Artificial sequence
  Protein classification predicting sequence
PELLVAHAYTRY

SEQ ID NO: 6424 - protein, 13 aa, Artificial sequence
  Protein classification predicting sequence
GFKLVMASLYHIY

SEQ ID NO: 6425 - protein, 11 aa, Artificial sequence
  Protein classification predicting sequence
GDLSGGQVLKK

SEQ ID NO: 6426 - protein, 15 aa, Artificial sequence
  Protein classification predicting sequence
QDLSEALKEATKEVH

SEQ ID NO: 6427 - protein, 14 aa, Artificial sequence
  Protein classification predicting sequence
LPSSGEGLAFFTFP

SEQ ID NO: 6428 - protein, 6 aa, Artificial sequence
  Protein classification predicting sequence
FKQLYR

SEQ ID NO: 6429 - protein, 8 aa, Artificial sequence
  Protein classification predicting sequence
PVHDGKGD

SEQ ID NO: 6430 - protein, 13 aa, Artificial sequence
  Protein classification predicting sequence
FVKDFLKGNIKKE

SEQ ID NO: 6431 - protein, 9 aa, Artificial sequence
  Protein classification predicting sequence
LLKEGTKEA

SEQ ID NO: 6432 - protein, 29 aa, Artificial sequence
  Protein classification predicting sequence
DRAENTQFVKDFLKGNIKKELFKLATTAL

SEQ ID NO: 6433 - protein, 7 aa, Artificial sequence
  Protein classification predicting sequence
EHYPIVG

SEQ ID NO: 6434 - protein, 6 aa, Artificial sequence
  Protein classification predicting sequence
YRISVK

SEQ ID NO: 6435 - protein, 7 aa, Artificial sequence
  Protein classification predicting sequence
DLGVKQE

SEQ ID NO: 6436 - protein, 25 aa, Artificial sequence
  Protein classification predicting sequence
KTIEIVKSTVPLLQEKGVEITTRFY

SEQ ID NO: 6437 - protein, 48 aa, Artificial sequence
  Protein classification predicting sequence
QINIEGETYTHNRQYSLSDAPGKEYYRISVKKEKGVDTPDGKVSNYLH

SEQ ID NO: 6438 - protein, 48 aa, Artificial sequence
  Protein classification predicting sequence
LPVSAPAGDFVLNMDSTLPVVLISGGVGITPMMSMLNTLIEQDSKRNV

SEQ ID NO: 6439 - protein, 14 aa, Artificial sequence
  Protein classification predicting sequence
VKQEHIHYEFFGPA

SEQ ID NO: 6440 - protein, 6 aa, Artificial sequence
  Protein classification predicting sequence
IKPEQY

SEQ ID NO: 6441 - protein, 6 aa, Artificial sequence
  Protein classification predicting sequence
VSNYLH

SEQ ID NO: 6442 - protein, 6 aa, Artificial sequence
  Protein classification predicting sequence
APAGDF

SEQ ID NO: 6443 - protein, 6 aa, Artificial sequence
  Protein classification predicting sequence
FYDRMF

SEQ ID NO: 6444 - protein, 14 aa, Artificial sequence
  Protein classification predicting sequence
IIPVVKQIGHKHRS

SEQ ID NO: 6445 - protein, 10 aa, Artificial sequence
  Protein classification predicting sequence
AYGVIADAFI

SEQ ID NO: 6446 - protein, 12 aa, Artificial sequence
  Protein classification predicting sequence
IVGKHLLASIRE

SEQ ID NO: 6447 - protein, 7 aa, Artificial sequence
  Protein classification predicting sequence
PGQYVSV

SEQ ID NO: 6448 - protein, 6 aa, Artificial sequence
  Protein classification predicting sequence
RQYSLS

SEQ ID NO: 6449 - protein, 7 aa, Artificial sequence
  Protein classification predicting sequence
RISVKRE

SEQ ID NO: 6450 - protein, 12 aa, Artificial sequence
  Protein classification predicting sequence
LPDADYYLCGPL

SEQ ID NO: 6451 - protein, 8 aa, Artificial sequence
  Protein classification predicting sequence
RIHYEVFG

SEQ ID NO: 6452 - protein, 7 aa, Artificial sequence
  Protein classification predicting sequence
GGWEGTR

SEQ ID NO: 6453 - protein, 17 aa, Artificial sequence
  Protein classification predicting sequence
FRIVAKTPRSALITSFE

SEQ ID NO: 6454 - protein, 19 aa, Artificial sequence
  Protein classification predicting sequence
VAEYRPGQYLGVWLKPEGF

SEQ ID NO: 6455 - protein, 25 aa, Artificial sequence
  Protein classification predicting sequence
HQEIRQYSLTRKPDGKGYRIAVKRE

SEQ ID NO: 6456 - protein, 9 aa, Artificial sequence
  Protein classification predicting sequence
GGQVSNWLH

SEQ ID NO: 6457 - protein, 11 aa, Artificial sequence
  Protein classification predicting sequence
LPRFTAHTWYR

SEQ ID NO: 6458 - protein, 20 aa, Artificial sequence
  Protein classification predicting sequence
MQFYLCGPVGFMQFAAKQLV

SEQ ID NO: 6459 - protein, 14 aa, Artificial sequence
  Protein classification predicting sequence
SLPRFTAHTWYRQP

SEQ ID NO: 6460 - protein, 14 aa, Artificial sequence
  Protein classification predicting sequence
MQFYLCGPVGFMQF

SEQ ID NO: 6461 - protein, 9 aa, Artificial sequence
  Protein classification predicting sequence
PGQAVLDAW

SEQ ID NO: 6462 - protein, 9 aa, Artificial sequence
  Protein classification predicting sequence
YGVLANVFI

SEQ ID NO: 6463 - protein, 8 aa, Artificial sequence
  Protein classification predicting sequence
YRIAVKRE

SEQ ID NO: 6464 - protein, 6 aa, Artificial sequence
  Protein classification predicting sequence
FMQFAA

SEQ ID NO: 6465 - protein, 11 aa, Artificial sequence
  Protein classification predicting sequence
ETGPKLTAHFY

SEQ ID NO: 6466 - protein, 22 aa, Artificial sequence
  Protein classification predicting sequence
ETGPKLTAHFYDRMFTHNPELK

SEQ ID NO: 6467 - protein, 21 aa, Artificial sequence
  Protein classification predicting sequence
PGQEVLDAWGKAYGVLANVFI

SEQ ID NO: 6468 - protein, 7 aa, Artificial sequence
  Protein classification predicting sequence
LISGGVG

SEQ ID NO: 6469 - protein, 10 aa, Artificial sequence
  Protein classification predicting sequence
HYECFGPHKV

SEQ ID NO: 6470 - protein, 10 aa, Artificial sequence
  Protein classification predicting sequence
TGPKLTAHFY

SEQ ID NO: 6471 - protein, 6 aa, Artificial sequence
  Protein classification predicting sequence
HNPELK

SEQ ID NO: 6472 - protein, 7 aa, Artificial sequence
  Protein classification predicting sequence
GGWRGLR

SEQ ID NO: 6473 - protein, 7 aa, Artificial sequence
  Protein classification predicting sequence
LISAGVG

SEQ ID NO: 6474 - protein, 7 aa, Artificial sequence
  Protein classification predicting sequence
TPMMSML

SEQ ID NO: 6475 - protein, 31 aa, Artificial sequence
  Protein classification predicting sequence
HNPELKDIFNMSNQRNGDQREALFNAICAYA

SEQ ID NO: 6476 - protein, 8 aa, Artificial sequence
  Protein classification predicting sequence
QEIRQYSL

SEQ ID NO: 6477 - protein, 7 aa, Artificial sequence
  Protein classification predicting sequence
APAGDFF

SEQ ID NO: 6478 - protein, 15 aa, Artificial sequence
  Protein classification predicting sequence
LISAGVGLTPTLSML

SEQ ID NO: 6479 - protein, 8 aa, Artificial sequence
  Protein classification predicting sequence
CGPVGFMQ

SEQ ID NO: 6480 - protein, 8 aa, Artificial sequence
  Protein classification predicting sequence
VLISGGVG

SEQ ID NO: 6481 - protein, 7 aa, Artificial sequence
  Protein classification predicting sequence
CGPVPFM

SEQ ID NO: 6482 - protein, 10 aa, Artificial sequence
  Protein classification predicting sequence
HLLATLDEMF

SEQ ID NO: 6483 - protein, 8 aa, Artificial sequence
  Protein classification predicting sequence
FDSEGLMD

SEQ ID NO: 6484 - protein, 16 aa, Artificial sequence
  Protein classification predicting sequence
GVGQTPMLAMLDTLAK

SEQ ID NO: 6485 - protein, 32 aa, Artificial sequence
  Protein classification predicting sequence
GVGQTPMLAMLDTLAKAGHTAQVNWFHAAENG

SEQ ID NO: 6486 - protein, 14 aa, Artificial sequence
  Protein classification predicting sequence
HTAQVNWFHAAENG

SEQ ID NO: 6487 - protein, 9 aa, Artificial sequence
  Protein classification predicting sequence
PGQEVLDAW

SEQ ID NO: 6488 - protein, 7 aa, Artificial sequence
  Protein classification predicting sequence
IFNMSNQ

SEQ ID NO: 6489 - protein, 11 aa, Artificial sequence
  Protein classification predicting sequence
GDQREALFNAI

SEQ ID NO: 6490 - protein, 7 aa, Artificial sequence
  Protein classification predicting sequence
IAQKHTS

SEQ ID NO: 6491 - protein, 8 aa, Artificial sequence
  Protein classification predicting sequence
CGPLPFMQ

SEQ ID NO: 6492 - protein, 7 aa, Artificial sequence
  Protein classification predicting sequence
PELLVAH

SEQ ID NO: 6493 - protein, 10 aa, Artificial sequence
  Protein classification predicting sequence
ALEEEIERNK

SEQ ID NO: 6494 - protein, 9 aa, Artificial sequence
  Protein classification predicting sequence
GEGLAFFTF

SEQ ID NO: 6495 - protein, 9 aa, Artificial sequence
  Protein classification predicting sequence
ALEEEMDRN

SEQ ID NO: 6496 - protein, 7 aa, Artificial sequence
  Protein classification predicting sequence
AHAYTRY

SEQ ID NO: 6497 - protein, 7 aa, Artificial sequence
  Protein classification predicting sequence
LYRSRMN

SEQ ID NO: 6498 - protein, 8 aa, Artificial sequence
  Protein classification predicting sequence
LLQIFTKP

SEQ ID NO: 6499 - protein, 8 aa, Artificial sequence
  Protein classification predicting sequence
VGNAKQAA

SEQ ID NO: 6500 - protein, 9 aa, Artificial sequence
  Protein classification predicting sequence
FHRFWSVDD

SEQ ID NO: 6501 - protein, 7 aa, Artificial sequence
  Protein classification predicting sequence
GFGAGNF

SEQ ID NO: 6502 - protein, 7 aa, Artificial sequence
  Protein classification predicting sequence
HGDGVKD

SEQ ID NO: 6503 - protein, 6 aa, Artificial sequence
  Protein classification predicting sequence
PINEPA

SEQ ID NO: 6504 - protein, 9 aa, Artificial sequence
  Protein classification predicting sequence
DHIVGNQPD

SEQ ID NO: 6505 - protein, 7 aa, Artificial sequence
  Protein classification predicting sequence
KRKSQIQ

SEQ ID NO: 6506 - protein, 6 aa, Artificial sequence
  Protein classification predicting sequence
DRPTLF

SEQ ID NO: 6507 - protein, 7 aa, Artificial sequence
  Protein classification predicting sequence
RIAKFAF

SEQ ID NO: 6508 - protein, 7 aa, Artificial sequence
  Protein classification predicting sequence
RTRDMGG

SEQ ID NO: 6509 - protein, 7 aa, Artificial sequence
  Protein classification predicting sequence
DGDEMTR

SEQ ID NO: 6510 - protein, 12 aa, Artificial sequence
  Protein classification predicting sequence
KCATITPDEARV

SEQ ID NO: 6511 - protein, 8 aa, Artificial sequence
  Protein classification predicting sequence
STKNTILK

SEQ ID NO: 6512 - protein, 7 aa, Artificial sequence
  Protein classification predicting sequence
KGPLTTP

SEQ ID NO: 6513 - protein, 9 aa, Artificial sequence
  Protein classification predicting sequence
GVPSPVKRP

SEQ ID NO: 6514 - protein, 9 aa, Artificial sequence
  Protein classification predicting sequence
AIQYAIDNN

SEQ ID NO: 6515 - protein, 6 aa, Artificial sequence
  Protein classification predicting sequence
NLNGDY

SEQ ID NO: 6516 - protein, 13 aa, Artificial sequence
  Protein classification predicting sequence
ILSAEMMLRHMGW

SEQ ID NO: 6517 - protein, 8 aa, Artificial sequence
  Protein classification predicting sequence
AVHKANIM

SEQ ID NO: 6518 - protein, 15 aa, Artificial sequence
  Protein classification predicting sequence
AVHKANIMKLGDGLF

SEQ ID NO: 6519 - protein, 10 aa, Artificial sequence
  Protein classification predicting sequence
IVDNASMQAV

SEQ ID NO: 6520 - protein, 9 aa, Artificial sequence
  Protein classification predicting sequence
TVTLIPGDG

SEQ ID NO: 6521 - protein, 10 aa, Artificial sequence
  Protein classification predicting sequence
GGPGLVAGAN

SEQ ID NO: 6522 - protein, 10 aa, Artificial sequence
  Protein classification predicting sequence
VEMDGDEMTR

SEQ ID NO: 6523 - protein, 17 aa, Artificial sequence
  Protein classification predicting sequence
VEMDGDEMTRIIWQFIK

SEQ ID NO: 6524 - protein, 8 aa, Artificial sequence
  Protein classification predicting sequence
VDLKYYDL

SEQ ID NO: 6525 - protein, 9 aa, Artificial sequence
  Protein classification predicting sequence
KPIIIGRHA

SEQ ID NO: 6526 - protein, 12 aa, Artificial sequence
  Protein classification predicting sequence
AQGFGSLGLMTS

SEQ ID NO: 6527 - protein, 10 aa, Artificial sequence
  Protein classification predicting sequence
ETSTNSIASI

SEQ ID NO: 6528 - protein, 7 aa, Artificial sequence
  Protein classification predicting sequence
MTKDLAL

SEQ ID NO: 6529 - protein, 10 aa, Artificial sequence
  Protein classification predicting sequence
GVVQSIKLIT

SEQ ID NO: 6530 - protein, 9 aa, Artificial sequence
  Protein classification predicting sequence
ANVRPCVSI

SEQ ID NO: 6531 - protein, 6 aa, Artificial sequence
  Protein classification predicting sequence
GYKTPY

SEQ ID NO: 6532 - protein, 35 aa, Artificial sequence
  Protein classification predicting sequence
DVNIVTIRENTEGEYSGIEHVIVDGVVQSIKLITE

SEQ ID NO: 6533 - protein, 19 aa, Artificial sequence
  Protein classification predicting sequence
ACFATIKDGKSLTKDLGGN

SEQ ID NO: 6534 - protein, 7 aa, Artificial sequence
  Protein classification predicting sequence
KQVTRGF

SEQ ID NO: 6535 - protein, 12 aa, Artificial sequence
  Protein classification predicting sequence
SKVSRLLGAFHN

SEQ ID NO: 6536 - protein, 92 aa, Artificial sequence
  Protein classification predicting sequence
MIIDNCCMQLVQNPYQFDVLVMPNLYGNIIDNLAAGLVGGAGVVPGESYSAEYAVFETGARHPFAQAVGRNIANPTAMLLSASNMLRHLNLE

SEQ ID NO: 6537 - protein, 34 aa, Artificial sequence
  Protein classification predicting sequence
EHHLSEVQNMASEEKLEQVLSSMKENKVAIIGKI

SEQ ID NO: 6538 - protein, 14 aa, Artificial sequence
  Protein classification predicting sequence
TPMEYKGELASYDM

SEQ ID NO: 6539 - protein, 25 aa, Artificial sequence
  Protein classification predicting sequence
GGSVVEMQGDEMTRIIWELIKEKLI

SEQ ID NO: 6540 - protein, 9 aa, Artificial sequence
  Protein classification predicting sequence
GDEMTRIIW

SEQ ID NO: 6541 - protein, 34 aa, Artificial sequence
  Protein classification predicting sequence
PYVELDLHSYDLGIENRDATNDQVTKDAAEAIKK

SEQ ID NO: 6542 - protein, 54 aa, Artificial sequence
  Protein classification predicting sequence
NVGVKCATITPDEKRVEEFKLKQMWKSPNGTIRNILGGTVFREAIICKNIPRLV

SEQ ID NO: 6543 - protein, 8 aa, Artificial sequence
  Protein classification predicting sequence
QKVTYLVH

SEQ ID NO: 6544 - protein, 12 aa, Artificial sequence
  Protein classification predicting sequence
MTSVLVCPDGKT

SEQ ID NO: 6545 - protein, 12 aa, Artificial sequence
  Protein classification predicting sequence
TSTNPIASIFAW

SEQ ID NO: 6546 - protein, 11 aa, Artificial sequence
  Protein classification predicting sequence
IASIFAWTRGL

SEQ ID NO: 6547 - protein, 43 aa, Artificial sequence
  Protein classification predicting sequence
IETIEAGFMTKDLAACIKGLPNVQRSDYLNTFEFMDKLGENLK

SEQ ID NO: 6548 - protein, 8 aa, Artificial sequence
  Protein classification predicting sequence
YKSQFEAQ

SEQ ID NO: 6549 - protein, 10 aa, Artificial sequence
  Protein classification predicting sequence
SPNGTIRNIL

SEQ ID NO: 6550 - protein, 8 aa, Artificial sequence
  Protein classification predicting sequence
CKNIPRLV

SEQ ID NO: 6551 - protein, 7 aa, Artificial sequence
  Protein classification predicting sequence
MYNTDES

SEQ ID NO: 6552 - protein, 6 aa, Artificial sequence
  Protein classification predicting sequence
MTKDLA

SEQ ID NO: 6553 - protein, 13 aa, Artificial sequence
  Protein classification predicting sequence
MWKSPNGTIRNIL

SEQ ID NO: 6554 - protein, 12 aa, Artificial sequence
  Protein classification predicting sequence
EAEAAHGTVTRH

SEQ ID NO: 6555 - protein, 8 aa, Artificial sequence
  Protein classification predicting sequence
KYFDLGLP

SEQ ID NO: 6556 - protein, 6 aa, Artificial sequence
  Protein classification predicting sequence
TNDQVT

SEQ ID NO: 6557 - protein, 11 aa, Artificial sequence
  Protein classification predicting sequence
TKNTILKKYDG

SEQ ID NO: 6558 - protein, 10 aa, Artificial sequence
  Protein classification predicting sequence
EAAHGTVTRH

SEQ ID NO: 6559 - protein, 7 aa, Artificial sequence
  Protein classification predicting sequence
TKNTILK

SEQ ID NO: 6560 - protein, 10 aa, Artificial sequence
  Protein classification predicting sequence
VKCATITPDE

SEQ ID NO: 6561 - protein, 16 aa, Artificial sequence
  Protein classification predicting sequence
VKCATITPDEARVEEF

SEQ ID NO: 6562 - protein, 17 aa, Artificial sequence
  Protein classification predicting sequence
SPNGTIRNILGGTVFRE

SEQ ID NO: 6563 - protein, 12 aa, Artificial sequence
  Protein classification predicting sequence
EAAHGTVTRHYR

SEQ ID NO: 6564 - protein, 18 aa, Artificial sequence
  Protein classification predicting sequence
EAAHGTVTRHYREHQKGR

SEQ ID NO: 6565 - protein, 10 aa, Artificial sequence
  Protein classification predicting sequence
YDGRFKDIFQ

SEQ ID NO: 6566 - protein, 10 aa, Artificial sequence
  Protein classification predicting sequence
KNYDGDVQSD

SEQ ID NO: 6567 - protein, 13 aa, Artificial sequence
  Protein classification predicting sequence
WPLYLSTKNTILK

SEQ ID NO: 6568 - protein, 10 aa, Artificial sequence
  Protein classification predicting sequence
YLSTKNTILK

SEQ ID NO: 6569 - protein, 11 aa, Artificial sequence
  Protein classification predicting sequence
WEKPIIIGRHA

SEQ ID NO: 6570 - protein, 21 aa, Artificial sequence
  Protein classification predicting sequence
LSTKNTILKKYDGRFKDIFQE

SEQ ID NO: 6571 - protein, 25 aa, Artificial sequence
  Protein classification predicting sequence
LSTKNTILKKYDGRFKDIFQEVYEA

SEQ ID NO: 6572 - protein, 11 aa, Artificial sequence
  Protein classification predicting sequence
IASIFAWSRGL

SEQ ID NO: 6573 - protein, 13 aa, Artificial sequence
  Protein classification predicting sequence
GGGIRSLNVALRQ

SEQ ID NO: 6574 - protein, 7 aa, Artificial sequence
  Protein classification predicting sequence
GWQEAAD

SEQ ID NO: 6575 - protein, 6 aa, Artificial sequence
  Protein classification predicting sequence
KGNIMK

SEQ ID NO: 6576 - protein, 6 aa, Artificial sequence
  Protein classification predicting sequence
QQILTR

SEQ ID NO: 6577 - protein, 11 aa, Artificial sequence
  Protein classification predicting sequence
VETRDISLAGR

SEQ ID NO: 6578 - protein, 21 aa, Artificial sequence
  Protein classification predicting sequence
VPNVGLMAQKAEEYGSHDKTF

SEQ ID NO: 6579 - protein, 15 aa, Artificial sequence
  Protein classification predicting sequence
IRFPETSGIGIKPVS

SEQ ID NO: 6580 - protein, 21 aa, Artificial sequence
  Protein classification predicting sequence
GKIIIKDSIADIFLQQILTRP

SEQ ID NO: 6581 - protein, 18 aa, Artificial sequence
  Protein classification predicting sequence
TIASKVVTYDFARLMDGA

SEQ ID NO: 6582 - protein, 7 aa, Artificial sequence
  Protein classification predicting sequence
HKGNIMK

SEQ ID NO: 6583 - protein, 15 aa, Artificial sequence
  Protein classification predicting sequence
VNPVLREGNSDRRAP

SEQ ID NO: 6584 - protein, 6 aa, Artificial sequence
  Protein classification predicting sequence
CLRPVR

SEQ ID NO: 6585 - protein, 8 aa, Artificial sequence
  Protein classification predicting sequence
DMVIFREN

SEQ ID NO: 6586 - protein, 8 aa, Artificial sequence
  Protein classification predicting sequence
EDIYAGIE

SEQ ID NO: 6587 - protein, 6 aa, Artificial sequence
  Protein classification predicting sequence
GIGIKP

SEQ ID NO: 6588 - protein, 27 aa, Artificial sequence
  Protein classification predicting sequence
MNLNGDYISDALAAQVGGIGIAPGANI

SEQ ID NO: 6589 - protein, 9 aa, Artificial sequence
  Protein classification predicting sequence
RSLNVALRQ

SEQ ID NO: 6590 - protein, 10 aa, Artificial sequence
  Protein classification predicting sequence
SKEGTERLVR

SEQ ID NO: 6591 - protein, 11 aa, Artificial sequence
  Protein classification predicting sequence
VGGIGIAPGAN

SEQ ID NO: 6592 - protein, 12 aa, Artificial sequence
  Protein classification predicting sequence
VTYDFARLMDGA

SEQ ID NO: 6593 - protein, 7 aa, Artificial sequence
  Protein classification predicting sequence
GDQYRAT

SEQ ID NO: 6594 - protein, 13 aa, Artificial sequence
  Protein classification predicting sequence
WACKNYDGDVQSD

SEQ ID NO: 6595 - protein, 9 aa, Artificial sequence
  Protein classification predicting sequence
VAQGYGSLG

SEQ ID NO: 6596 - protein, 19 aa, Artificial sequence
  Protein classification predicting sequence
DGKTVEAEAAHGTVTRHYR

SEQ ID NO: 6597 - protein, 14 aa, Artificial sequence
  Protein classification predicting sequence
EAEAAHGTVTRHYR

SEQ ID NO: 6598 - protein, 15 aa, Artificial sequence
  Protein classification predicting sequence
MWKSPNGTIRNILGG

SEQ ID NO: 6599 - protein, 9 aa, Artificial sequence
  Protein classification predicting sequence
GRHAFGDQY

SEQ ID NO: 6600 - protein, 8 aa, Artificial sequence
  Protein classification predicting sequence
GDQYKATD

SEQ ID NO: 6601 - protein, 7 aa, Artificial sequence
  Protein classification predicting sequence
YDGRFKD

SEQ ID NO: 6602 - protein, 12 aa, Artificial sequence
  Protein classification predicting sequence
VFTWQQYDEIVE

SEQ ID NO: 6603 - protein, 8 aa, Artificial sequence
  Protein classification predicting sequence
FADELIKN

SEQ ID NO: 6604 - protein, 55 aa, Artificial sequence
  Protein classification predicting sequence
GLNVPNEPIIPFIIGDGIGPDIWKAASRVIDAAVEKAYNGEKRIEWKEVLAGQKA

SEQ ID NO: 6605 - protein, 54 aa, Artificial sequence
  Protein classification predicting sequence
TIKEYLIAVKGPLTTPIGGGIRSLNVALRQELDLFTCLRPVRWFKGVPSPVKRP

SEQ ID NO: 6606 - protein, 21 aa, Artificial sequence
  Protein classification predicting sequence
DVDMVIFRENTEDIYAGIEFK

SEQ ID NO: 6607 - protein, 47 aa, Artificial sequence
  Protein classification predicting sequence
EVKKVIDFLQNEMGATNIRFPETSGIGIKPVSKEGTERLVRAAIQYA

SEQ ID NO: 6608 - protein, 31 aa, Artificial sequence
  Protein classification predicting sequence
DNNRKSVTLVHKGNIMKFTEGSFKQWGYDLA

SEQ ID NO: 6609 - protein, 25 aa, Artificial sequence
  Protein classification predicting sequence
ILSSVLMLEHLGWQEAADKITDSIE

SEQ ID NO: 6610 - protein, 7 aa, Artificial sequence
  Protein classification predicting sequence
FKGVPSP

SEQ ID NO: 6611 - protein, 9 aa, Artificial sequence
  Protein classification predicting sequence
VTLVHKGNI

SEQ ID NO: 6612 - protein, 6 aa, Artificial sequence
  Protein classification predicting sequence
FLQQIL

SEQ ID NO: 6613 - protein, 13 aa, Artificial sequence
  Protein classification predicting sequence
SDALAAQVGGIGI

SEQ ID NO: 6614 - protein, 7 aa, Artificial sequence
  Protein classification predicting sequence
PGANINY

SEQ ID NO: 6615 - protein, 10 aa, Artificial sequence
  Protein classification predicting sequence
PIIPFIEGDG

SEQ ID NO: 6616 - protein, 15 aa, Artificial sequence
  Protein classification predicting sequence
AYFECLHELKLIVDL

SEQ ID NO: 6617 - protein, 7 aa, Artificial sequence
  Protein classification predicting sequence
LREMMPF

SEQ ID NO: 6618 - protein, 19 aa, Artificial sequence
  Protein classification predicting sequence
VDVFLVAPKGPGHLVRRTF

SEQ ID NO: 6619 - protein, 6 aa, Artificial sequence
  Protein classification predicting sequence
HGFNIH

SEQ ID NO: 6620 - protein, 10 aa, Artificial sequence
  Protein classification predicting sequence
ALVKAGFETL

SEQ ID NO: 6621 - protein, 7 aa, Artificial sequence
  Protein classification predicting sequence
PEIAYFE

SEQ ID NO: 6622 - protein, 6 aa, Artificial sequence
  Protein classification predicting sequence
APKGPG

SEQ ID NO: 6623 - protein, 6 aa, Artificial sequence
  Protein classification predicting sequence
FETLVE

SEQ ID NO: 6624 - protein, 15 aa, Artificial sequence
  Protein classification predicting sequence
GKTVAVIGYGSQGHA

SEQ ID NO: 6625 - protein, 8 aa, Artificial sequence
  Protein classification predicting sequence
EKVGAELR

SEQ ID NO: 6626 - protein, 8 aa, Artificial sequence
  Protein classification predicting sequence
GYGSQGHA

SEQ ID NO: 6627 - protein, 7 aa, Artificial sequence
  Protein classification predicting sequence
TAQYGDY

SEQ ID NO: 6628 - protein, 7 aa, Artificial sequence
  Protein classification predicting sequence
GIIETNF

SEQ ID NO: 6629 - protein, 16 aa, Artificial sequence
  Protein classification predicting sequence
EAGYAPEMAYFECLHE

SEQ ID NO: 6630 - protein, 7 aa, Artificial sequence
  Protein classification predicting sequence
GEYVTGP

SEQ ID NO: 6631 - protein, 9 aa, Artificial sequence
  Protein classification predicting sequence
YAKGIGGTR

SEQ ID NO: 6632 - protein, 7 aa, Artificial sequence
  Protein classification predicting sequence
GVLETTF

SEQ ID NO: 6633 - protein, 13 aa, Artificial sequence
  Protein classification predicting sequence
FREETETDLFGEQ

SEQ ID NO: 6634 - protein, 8 aa, Artificial sequence
  Protein classification predicting sequence
AYFECLHE

SEQ ID NO: 6635 - protein, 6 aa, Artificial sequence
  Protein classification predicting sequence
YAKGIG

SEQ ID NO: 6636 - protein, 9 aa, Artificial sequence
  Protein classification predicting sequence
VLCGGVTAL

SEQ ID NO: 6637 - protein, 6 aa, Artificial sequence
  Protein classification predicting sequence
AGYQPE

SEQ ID NO: 6638 - protein, 6 aa, Artificial sequence
  Protein classification predicting sequence
MRYSIS

SEQ ID NO: 6639 - protein, 6 aa, Artificial sequence
  Protein classification predicting sequence
NLKDSG

SEQ ID NO: 6640 - protein, 8 aa, Artificial sequence
  Protein classification predicting sequence
FAHGFNIH

SEQ ID NO: 6641 - protein, 15 aa, Artificial sequence
  Protein classification predicting sequence
FAHGFNIHYNQIVPP

SEQ ID NO: 6642 - protein, 7 aa, Artificial sequence
  Protein classification predicting sequence
ALAYAKG

SEQ ID NO: 6643 - protein, 8 aa, Artificial sequence
  Protein classification predicting sequence
AYFEVLHE

SEQ ID NO: 6644 - protein, 14 aa, Artificial sequence
  Protein classification predicting sequence
VAIIGYGSQGHAHA

SEQ ID NO: 6645 - protein, 7 aa, Artificial sequence
  Protein classification predicting sequence
MILLPDE

SEQ ID NO: 6646 - protein, 8 aa, Artificial sequence
  Protein classification predicting sequence
AVYQDATG

SEQ ID NO: 6647 - protein, 9 aa, Artificial sequence
  Protein classification predicting sequence
RAGVIETTF

SEQ ID NO: 6648 - protein, 7 aa, Artificial sequence
  Protein classification predicting sequence
DIQTGKF

SEQ ID NO: 6649 - protein, 7 aa, Artificial sequence
  Protein classification predicting sequence
LFAIYQD

SEQ ID NO: 6650 - protein, 12 aa, Artificial sequence
  Protein classification predicting sequence
DLFGEQAVLCGG

SEQ ID NO: 6651 - protein, 7 aa, Artificial sequence
  Protein classification predicting sequence
EAGYQPE

SEQ ID NO: 6652 - protein, 7 aa, Artificial sequence
  Protein classification predicting sequence
VSGPRVV

SEQ ID NO: 6653 - protein, 17 aa, Artificial sequence
  Protein classification predicting sequence
DITVIMVAPKCPGTEVR

SEQ ID NO: 6654 - protein, 12 aa, Artificial sequence
  Protein classification predicting sequence
MVAPKCPGTEVR

SEQ ID NO: 6655 - protein, 13 aa, Artificial sequence
  Protein classification predicting sequence
VISDTAEYGNYLF

SEQ ID NO: 6656 - protein, 6 aa, Artificial sequence
  Protein classification predicting sequence
FAHGFN

SEQ ID NO: 6657 - protein, 7 aa, Artificial sequence
  Protein classification predicting sequence
PRADLDV

SEQ ID NO: 6658 - protein, 10 aa, Artificial sequence
  Protein classification predicting sequence
GGGRAGIIET

SEQ ID NO: 6659 - protein, 7 aa, Artificial sequence
  Protein classification predicting sequence
YVTGPRI

SEQ ID NO: 6660 - protein, 9 aa, Artificial sequence
  Protein classification predicting sequence
IEEVGAKLR

SEQ ID NO: 6661 - protein, 5 aa, Artificial sequence
  Protein classification predicting sequence
MMPWI

SEQ ID NO: 6662 - protein, 15 aa, Artificial sequence
  Protein classification predicting sequence
RDGAAIAFAHGLNVH

SEQ ID NO: 6663 - protein, 8 aa, Artificial sequence
  Protein classification predicting sequence
FAHGLNVH

SEQ ID NO: 6664 - protein, 11 aa, Artificial sequence
  Protein classification predicting sequence
KLIVDLIYEGG

SEQ ID NO: 6665 - protein, 7 aa, Artificial sequence
  Protein classification predicting sequence
GGGVPCL

SEQ ID NO: 6666 - protein, 7 aa, Artificial sequence
  Protein classification predicting sequence
NYFNTLN

SEQ ID NO: 6667 - protein, 6 aa, Artificial sequence
  Protein classification predicting sequence
VIVGCG

SEQ ID NO: 6668 - protein, 7 aa, Artificial sequence
  Protein classification predicting sequence
IRKDITV

SEQ ID NO: 6669 - protein, 12 aa, Artificial sequence
  Protein classification predicting sequence
GGITLMMDRLSN

SEQ ID NO: 6670 - protein, 9 aa, Artificial sequence
  Protein classification predicting sequence
VISDTAEYG

SEQ ID NO: 6671 - protein, 8 aa, Artificial sequence
  Protein classification predicting sequence
LNMRDSGL

SEQ ID NO: 6672 - protein, 13 aa, Artificial sequence
  Protein classification predicting sequence
KRGFGVPTLIAVH

SEQ ID NO: 6673 - protein, 6 aa, Artificial sequence
  Protein classification predicting sequence
IAKAWA

SEQ ID NO: 6674 - protein, 20 aa, Artificial sequence
  Protein classification predicting sequence
SSFIAEVKSDLMGEQTILCG

SEQ ID NO: 6675 - protein, 9 aa, Artificial sequence
  Protein classification predicting sequence
KHMDDIISG

SEQ ID NO: 6676 - protein, 7 aa, Artificial sequence
  Protein classification predicting sequence
ELAFETM

SEQ ID NO: 6677 - protein, 7 aa, Artificial sequence
  Protein classification predicting sequence
FGVPTLI

SEQ ID NO: 6678 - protein, 16 aa, Artificial sequence
  Protein classification predicting sequence
AEVKSDLMGEQTILCG

SEQ ID NO: 6679 - protein, 13 aa, Artificial sequence
  Protein classification predicting sequence
ITESLKHGGITLM

SEQ ID NO: 6680 - protein, 6 aa, Artificial sequence
  Protein classification predicting sequence
GGITLM

SEQ ID NO: 6681 - protein, 8 aa, Artificial sequence
  Protein classification predicting sequence
AGVELAFE

SEQ ID NO: 6682 - protein, 21 aa, Artificial sequence
  Protein classification predicting sequence
MVAPKCPGTEVREEYKRGFGV

SEQ ID NO: 6683 - protein, 19 aa, Artificial sequence
  Protein classification predicting sequence
AEVKSDLMGEQTILCGMLQ

SEQ ID NO: 6684 - protein, 6 aa, Artificial sequence
  Protein classification predicting sequence
SHGFNI

SEQ ID NO: 6685 - protein, 6 aa, Artificial sequence
  Protein classification predicting sequence
EQEYFD

SEQ ID NO: 6686 - protein, 8 aa, Artificial sequence
  Protein classification predicting sequence
ELQPGDLG

SEQ ID NO: 6687 - protein, 12 aa, Artificial sequence
  Protein classification predicting sequence
ADLVINLTPDKQ

SEQ ID NO: 6688 - protein, 7 aa, Artificial sequence
  Protein classification predicting sequence
LGFSHGF

SEQ ID NO: 6689 - protein, 6 aa, Artificial sequence
  Protein classification predicting sequence
HRAGVL

SEQ ID NO: 6690 - protein, 8 aa, Artificial sequence
  Protein classification predicting sequence
GSQGHAHA

SEQ ID NO: 6691 - protein, 6 aa, Artificial sequence
  Protein classification predicting sequence
NLRDNG

SEQ ID NO: 6692 - protein, 10 aa, Artificial sequence
  Protein classification predicting sequence
APKAPGHTVR

SEQ ID NO: 6693 - protein, 13 aa, Artificial sequence
  Protein classification predicting sequence
GGGRTGIIETTFK

SEQ ID NO: 6694 - protein, 6 aa, Artificial sequence
  Protein classification predicting sequence
IETTFK

SEQ ID NO: 6695 - protein, 15 aa, Artificial sequence
  Protein classification predicting sequence
FAHGLNVHFGLIEPK

SEQ ID NO: 6696 - protein, 9 aa, Artificial sequence
  Protein classification predicting sequence
MVAPKGPGH

SEQ ID NO: 6697 - protein, 10 aa, Artificial sequence
  Protein classification predicting sequence
APKGPGHTVR

SEQ ID NO: 6698 - protein, 9 aa, Artificial sequence
  Protein classification predicting sequence
YASAIGGGR

SEQ ID NO: 6699 - protein, 14 aa, Artificial sequence
  Protein classification predicting sequence
ETDLFGEQAVLCGG

SEQ ID NO: 6700 - protein, 11 aa, Artificial sequence
  Protein classification predicting sequence
AGFETLVEAGY

SEQ ID NO: 6701 - protein, 14 aa, Artificial sequence
  Protein classification predicting sequence
YEGGIANMNYSISN

SEQ ID NO: 6702 - protein, 8 aa, Artificial sequence
  Protein classification predicting sequence
QIVPPADV

SEQ ID NO: 6703 - protein, 7 aa, Artificial sequence
  Protein classification predicting sequence
PGHLVRR

SEQ ID NO: 6704 - protein, 8 aa, Artificial sequence
  Protein classification predicting sequence
AVHQDATG

SEQ ID NO: 6705 - protein, 7 aa, Artificial sequence
  Protein classification predicting sequence
AKGIGGT

SEQ ID NO: 6706 - protein, 6 aa, Artificial sequence
  Protein classification predicting sequence
AGVIET

SEQ ID NO: 6707 - protein, 6 aa, Artificial sequence
  Protein classification predicting sequence
ELAYFE

SEQ ID NO: 6708 - protein, 7 aa, Artificial sequence
  Protein classification predicting sequence
SDTAEYG

SEQ ID NO: 6709 - protein, 6 aa, Artificial sequence
  Protein classification predicting sequence
GPRVVT

SEQ ID NO: 6710 - protein, 7 aa, Artificial sequence
  Protein classification predicting sequence
DADLSII

SEQ ID NO: 6711 - protein, 10 aa, Artificial sequence
  Protein classification predicting sequence
GYGSQGHAHA

SEQ ID NO: 6712 - protein, 8 aa, Artificial sequence
  Protein classification predicting sequence
GVPTLIAV

SEQ ID NO: 6713 - protein, 9 aa, Artificial sequence
  Protein classification predicting sequence
ARDVALSYA

SEQ ID NO: 6714 - protein, 17 aa, Artificial sequence
  Protein classification predicting sequence
EETETDLFGEQAVLCGG

SEQ ID NO: 6715 - protein, 63 aa, Artificial sequence
  Protein classification predicting sequence
VELVKAGFETLVEAGYAPEMAYFECLHELKLIVDLMYEGGIANMNYSISNNAEYGEYVTGPEV

SEQ ID NO: 6716 - protein, 8 aa, Artificial sequence
  Protein classification predicting sequence
GEYAKMFI

SEQ ID NO: 6717 - protein, 10 aa, Artificial sequence
  Protein classification predicting sequence
YTEGGGVPCL

SEQ ID NO: 6718 - protein, 6 aa, Artificial sequence
  Protein classification predicting sequence
KGIGGT

SEQ ID NO: 6719 - protein, 5 aa, Artificial sequence
  Protein classification predicting sequence
AYFEC

SEQ ID NO: 6720 - protein, 8 aa, Artificial sequence
  Protein classification predicting sequence
TAEYGDYV

SEQ ID NO: 6721 - protein, 13 aa, Artificial sequence
  Protein classification predicting sequence
AVIGYGSQGHAHA

SEQ ID NO: 6722 - protein, 6 aa, Artificial sequence
  Protein classification predicting sequence
GPRIIT

SEQ ID NO: 6723 - protein, 9 aa, Artificial sequence
  Protein classification predicting sequence
VKENMKAVL

SEQ ID NO: 6724 - protein, 10 aa, Artificial sequence
  Protein classification predicting sequence
GFEVLTEAGY

SEQ ID NO: 6725 - protein, 7 aa, Artificial sequence
  Protein classification predicting sequence
KLIVDLM

SEQ ID NO: 6726 - protein, 5 aa, Artificial sequence
  Protein classification predicting sequence
NMNYS

SEQ ID NO: 6727 - protein, 6 aa, Artificial sequence
  Protein classification predicting sequence
IQDGTF

SEQ ID NO: 6728 - protein, 9 aa, Artificial sequence
  Protein classification predicting sequence
GYGSQGHAH

SEQ ID NO: 6729 - protein, 7 aa, Artificial sequence
  Protein classification predicting sequence
HAHAQNL

SEQ ID NO: 6730 - protein, 7 aa, Artificial sequence
  Protein classification predicting sequence
SISNTAE

SEQ ID NO: 6731 - protein, 6 aa, Artificial sequence
  Protein classification predicting sequence
TKAEMK

SEQ ID NO: 6732 - protein, 7 aa, Artificial sequence
  Protein classification predicting sequence
KVYYEKD

SEQ ID NO: 6733 - protein, 9 aa, Artificial sequence
  Protein classification predicting sequence
PPKDVDVFM

SEQ ID NO: 6734 - protein, 7 aa, Artificial sequence
  Protein classification predicting sequence
GVIETTF

SEQ ID NO: 6735 - protein, 15 aa, Artificial sequence
  Protein classification predicting sequence
AYFECLHEVKLIVDL

SEQ ID NO: 6736 - protein, 10 aa, Artificial sequence
  Protein classification predicting sequence
MRDSISNTAE

SEQ ID NO: 6737 - protein, 28 aa, Artificial sequence
  Protein classification predicting sequence
VIVGCGAQGLNQGLNMRDSGLDISYALR

SEQ ID NO: 6738 - protein, 9 aa, Artificial sequence
  Protein classification predicting sequence
EAIAEKRAS

SEQ ID NO: 6739 - protein, 6 aa, Artificial sequence
  Protein classification predicting sequence
VMPLMK

SEQ ID NO: 6740 - protein, 7 aa, Artificial sequence
  Protein classification predicting sequence
MMADWAN

SEQ ID NO: 6741 - protein, 8 aa, Artificial sequence
  Protein classification predicting sequence
ISEQEYFD

SEQ ID NO: 6742 - protein, 16 aa, Artificial sequence
  Protein classification predicting sequence
GVLMIAMVKAGVELAF

SEQ ID NO: 6743 - protein, 13 aa, Artificial sequence
  Protein classification predicting sequence
LRGYMTDMKRIAV

SEQ ID NO: 6744 - protein, 7 aa, Artificial sequence
  Protein classification predicting sequence
ADVIMIL

SEQ ID NO: 6745 - protein, 7 aa, Artificial sequence
  Protein classification predicting sequence
PDELQAD

SEQ ID NO: 6746 - protein, 7 aa, Artificial sequence
  Protein classification predicting sequence
VIMVAPK

SEQ ID NO: 6747 - protein, 7 aa, Artificial sequence
  Protein classification predicting sequence
ADVIMVL

SEQ ID NO: 6748 - protein, 12 aa, Artificial sequence
  Protein classification predicting sequence
KAGRPKLTAYRE

SEQ ID NO: 6749 - protein, 8 aa, Artificial sequence
  Protein classification predicting sequence
DDDAFKIY

SEQ ID NO: 6750 - protein, 7 aa, Artificial sequence
  Protein classification predicting sequence
RAGILET

SEQ ID NO: 6751 - protein, 7 aa, Artificial sequence
  Protein classification predicting sequence
DLIYEGG

SEQ ID NO: 6752 - protein, 8 aa, Artificial sequence
  Protein classification predicting sequence
AGILETTF

SEQ ID NO: 6753 - protein, 13 aa, Artificial sequence
  Protein classification predicting sequence
GFETLVEAGYQPE

SEQ ID NO: 6754 - protein, 9 aa, Artificial sequence
  Protein classification predicting sequence
DNKNGFKEF

SEQ ID NO: 6755 - protein, 8 aa, Artificial sequence
  Protein classification predicting sequence
LVFAHGFN

SEQ ID NO: 6756 - protein, 8 aa, Artificial sequence
  Protein classification predicting sequence
VVVGLRKG

SEQ ID NO: 6757 - protein, 10 aa, Artificial sequence
  Protein classification predicting sequence
LVFAHGFNIH

SEQ ID NO: 6758 - protein, 8 aa, Artificial sequence
  Protein classification predicting sequence
VRRTYTEG

SEQ ID NO: 6759 - protein, 5 aa, Artificial sequence
  Protein classification predicting sequence
MVAPK

SEQ ID NO: 6760 - protein, 9 aa, Artificial sequence
  Protein classification predicting sequence
FETLVEAGY

SEQ ID NO: 6761 - protein, 6 aa, Artificial sequence
  Protein classification predicting sequence
NLRDSG

SEQ ID NO: 6762 - protein, 6 aa, Artificial sequence
  Protein classification predicting sequence
TRAGVI

SEQ ID NO: 6763 - protein, 8 aa, Artificial sequence
  Protein classification predicting sequence
ETDLFGEQ

SEQ ID NO: 6764 - protein, 7 aa, Artificial sequence
  Protein classification predicting sequence
VAPKGPG

SEQ ID NO: 6765 - protein, 10 aa, Artificial sequence
  Protein classification predicting sequence
EQGLDVDTPA

SEQ ID NO: 6766 - protein, 34 aa, Artificial sequence
  Protein classification predicting sequence
ALALSYAKAIGGTRAGVIKTTFKDETETDLFGEQ

SEQ ID NO: 6767 - protein, 7 aa, Artificial sequence
  Protein classification predicting sequence
LVKAGFE

SEQ ID NO: 6768 - protein, 10 aa, Artificial sequence
  Protein classification predicting sequence
LHELKLIVDL

SEQ ID NO: 6769 - protein, 15 aa, Artificial sequence
  Protein classification predicting sequence
LHELKLIVDLMYEGG

SEQ ID NO: 6770 - protein, 7 aa, Artificial sequence
  Protein classification predicting sequence
TVAEATK

SEQ ID NO: 6771 - protein, 13 aa, Artificial sequence
  Protein classification predicting sequence
EGGIANMNYSISN

SEQ ID NO: 6772 - protein, 10 aa, Artificial sequence
  Protein classification predicting sequence
AMRNALKRIQ

SEQ ID NO: 6773 - protein, 9 aa, Artificial sequence
  Protein classification predicting sequence
GLRKGGASW

SEQ ID NO: 6774 - protein, 11 aa, Artificial sequence
  Protein classification predicting sequence
EETETDLFGEQ

SEQ ID NO: 6775 - protein, 15 aa, Artificial sequence
  Protein classification predicting sequence
KLIVDLIYEGGIANM

SEQ ID NO: 6776 - protein, 7 aa, Artificial sequence
  Protein classification predicting sequence
SNNAEYG

SEQ ID NO: 6777 - protein, 7 aa, Artificial sequence
  Protein classification predicting sequence
IQTGEYA

SEQ ID NO: 6778 - protein, 7 aa, Artificial sequence
  Protein classification predicting sequence
MVLLPDE

SEQ ID NO: 6779 - protein, 11 aa, Artificial sequence
  Protein classification predicting sequence
YEGGLENMRYS

SEQ ID NO: 6780 - protein, 9 aa, Artificial sequence
  Protein classification predicting sequence
EADYLKGKK

SEQ ID NO: 6781 - protein, 11 aa, Artificial sequence
  Protein classification predicting sequence
ATENGFKVGTY

SEQ ID NO: 6782 - protein, 6 aa, Artificial sequence
  Protein classification predicting sequence
LMVAMV

SEQ ID NO: 6783 - protein, 11 aa, Artificial sequence
  Protein classification predicting sequence
AMVKAGVELAF

SEQ ID NO: 6784 - protein, 22 aa, Artificial sequence
  Protein classification predicting sequence
ANYFNTLNLRQQLAQLGKCRFM

SEQ ID NO: 6785 - protein, 26 aa, Artificial sequence
  Protein classification predicting sequence
GKKVVIVGCGAQGLNQGLNMRDSGLD

SEQ ID NO: 6786 - protein, 8 aa, Artificial sequence
  Protein classification predicting sequence
YALRKEAI

SEQ ID NO: 6787 - protein, 14 aa, Artificial sequence
  Protein classification predicting sequence
EKRASWRKATENGF

SEQ ID NO: 6788 - protein, 6 aa, Artificial sequence
  Protein classification predicting sequence
VQPLMK

SEQ ID NO: 6789 - protein, 14 aa, Artificial sequence
  Protein classification predicting sequence
PLMKEGAALGYSHG

SEQ ID NO: 6790 - protein, 9 aa, Artificial sequence
  Protein classification predicting sequence
GAALGYSHG

SEQ ID NO: 6791 - protein, 10 aa, Artificial sequence
  Protein classification predicting sequence
IAKAWAAATG

SEQ ID NO: 6792 - protein, 43 aa, Artificial sequence
  Protein classification predicting sequence
KLIQFGWETITEALKQGGITLMMDRLSNPAKLRAYALSEQLKE

SEQ ID NO: 6793 - protein, 31 aa, Artificial sequence
  Protein classification predicting sequence
PLFQKHMDDIISGEFSSGMMADWANDDKKLL

SEQ ID NO: 6794 - protein, 23 aa, Artificial sequence
  Protein classification predicting sequence
NVVETVMPLMKEGAALGYSHGFN

SEQ ID NO: 6795 - protein, 11 aa, Artificial sequence
  Protein classification predicting sequence
GAALGYSHGFN

SEQ ID NO: 6796 - protein, 10 aa, Artificial sequence
  Protein classification predicting sequence
MMDRLSNPAK

SEQ ID NO: 6797 - protein, 22 aa, Artificial sequence
  Protein classification predicting sequence
KAFELSEELKDLMRPLYNKHMD

SEQ ID NO: 6798 - protein, 15 aa, Artificial sequence
  Protein classification predicting sequence
GHFSSTMMADWANDD

SEQ ID NO: 6799 - protein, 9 aa, Artificial sequence
  Protein classification predicting sequence
MMADWANDD

SEQ ID NO: 6800 - protein, 11 aa, Artificial sequence
  Protein classification predicting sequence
ETGETAFENYP

SEQ ID NO: 6801 - protein, 7 aa, Artificial sequence
  Protein classification predicting sequence
EGGIANM

SEQ ID NO: 6802 - protein, 7 aa, Artificial sequence
  Protein classification predicting sequence
GDYVSGP

SEQ ID NO: 6803 - protein, 11 aa, Artificial sequence
  Protein classification predicting sequence
YAKGIGGTRAG

SEQ ID NO: 6804 - protein, 18 aa, Artificial sequence
  Protein classification predicting sequence
GFETLVEAGYQPELAYFE

SEQ ID NO: 6805 - protein, 35 aa, Artificial sequence
  Protein classification predicting sequence
GFETLVEAGYQPELAYFECLHEVKLIVDLMVKGGL

SEQ ID NO: 6806 - protein, 12 aa, Artificial sequence
  Protein classification predicting sequence
DIQDGTFAKNFV

SEQ ID NO: 6807 - protein, 7 aa, Artificial sequence
  Protein classification predicting sequence
DLSIIQG

SEQ ID NO: 6808 - protein, 16 aa, Artificial sequence
  Protein classification predicting sequence
ETETDLFGEQAVLCGG

SEQ ID NO: 6809 - protein, 9 aa, Artificial sequence
  Protein classification predicting sequence
KLRAMMPWI

SEQ ID NO: 6810 - protein, 6 aa, Artificial sequence
  Protein classification predicting sequence
NMRDSG

SEQ ID NO: 6811 - protein, 10 aa, Artificial sequence
  Protein classification predicting sequence
TRAGVIETTF

SEQ ID NO: 6812 - protein, 6 aa, Artificial sequence
  Protein classification predicting sequence
VKENMK

SEQ ID NO: 6813 - protein, 7 aa, Artificial sequence
  Protein classification predicting sequence
NVHFGLI

SEQ ID NO: 6814 - protein, 11 aa, Artificial sequence
  Protein classification predicting sequence
QGGGVPHLIAV

SEQ ID NO: 6815 - protein, 9 aa, Artificial sequence
  Protein classification predicting sequence
QDKSGSARD

SEQ ID NO: 6816 - protein, 41 aa, Artificial sequence
  Protein classification predicting sequence
ANGGGRAGIIETNFREETETDLFGEQAVLCGGTVELIKAGF

SEQ ID NO: 6817 - protein, 12 aa, Artificial sequence
  Protein classification predicting sequence
KLIVDLIYEGGI

SEQ ID NO: 6818 - protein, 13 aa, Artificial sequence
  Protein classification predicting sequence
GYGSQGRAHALNL

SEQ ID NO: 6819 - protein, 18 aa, Artificial sequence
  Protein classification predicting sequence
GYGSQGRAHALNLKDSGA

SEQ ID NO: 6820 - protein, 6 aa, Artificial sequence
  Protein classification predicting sequence
YVSGPR

SEQ ID NO: 6821 - protein, 7 aa, Artificial sequence
  Protein classification predicting sequence
RFKGIRR

SEQ ID NO: 6822 - protein, 9 aa, Artificial sequence
  Protein classification predicting sequence
YVTGPRIIT

SEQ ID NO: 6823 - protein, 9 aa, Artificial sequence
  Protein classification predicting sequence
TKAEMKRVL

SEQ ID NO: 6824 - protein, 10 aa, Artificial sequence
  Protein classification predicting sequence
HGFNIHFGQI

SEQ ID NO: 6825 - protein, 7 aa, Artificial sequence
  Protein classification predicting sequence
ELVKAGF

SEQ ID NO: 6826 - protein, 12 aa, Artificial sequence
  Protein classification predicting sequence
KAGFDTLVEAGY

SEQ ID NO: 6827 - protein, 8 aa, Artificial sequence
  Protein classification predicting sequence
EIQQGEFA

SEQ ID NO: 6828 - protein, 7 aa, Artificial sequence
  Protein classification predicting sequence
APKGPGH

SEQ ID NO: 6829 - protein, 10 aa, Artificial sequence
  Protein classification predicting sequence
SISNTAEYGD

SEQ ID NO: 6830 - protein, 6 aa, Artificial sequence
  Protein classification predicting sequence
VLADIQ

SEQ ID NO: 6831 - protein, 7 aa, Artificial sequence
  Protein classification predicting sequence
NYFNSLN

SEQ ID NO: 6832 - protein, 6 aa, Artificial sequence
  Protein classification predicting sequence
CRFMDR

SEQ ID NO: 6833 - protein, 33 aa, Artificial sequence
  Protein classification predicting sequence
MVAPKCPGTEVREEYKRGFGVPTLIAVHPENDP

SEQ ID NO: 6834 - protein, 6 aa, Artificial sequence
  Protein classification predicting sequence
DWANDD

SEQ ID NO: 6835 - protein, 10 aa, Artificial sequence
  Protein classification predicting sequence
ESAYYESLHE

SEQ ID NO: 6836 - protein, 9 aa, Artificial sequence
  Protein classification predicting sequence
LRGYMTDMK

SEQ ID NO: 6837 - protein, 22 aa, Artificial sequence
  Protein classification predicting sequence
RKRLYEMNVVISDTAEYGNYLF

SEQ ID NO: 6838 - protein, 11 aa, Artificial sequence
  Protein classification predicting sequence
KLIVDLMYEGG

SEQ ID NO: 6839 - protein, 13 aa, Artificial sequence
  Protein classification predicting sequence
GYGSQGHAHAQNL

SEQ ID NO: 6840 - protein, 23 aa, Artificial sequence
  Protein classification predicting sequence
GYGSQGHAHAQNLKDNGYDVVIG

SEQ ID NO: 6841 - protein, 9 aa, Artificial sequence
  Protein classification predicting sequence
FAHGFNIHF

SEQ ID NO: 6842 - protein, 11 aa, Artificial sequence
  Protein classification predicting sequence
EDNKNGFKEFY

SEQ ID NO: 6843 - protein, 7 aa, Artificial sequence
  Protein classification predicting sequence
QHGHQIE

SEQ ID NO: 6844 - protein, 23 aa, Artificial sequence
  Protein classification predicting sequence
DVDVFLVAPKGPGHLVRRTFVEG

SEQ ID NO: 6845 - protein, 7 aa, Artificial sequence
  Protein classification predicting sequence
IQDGTFA

SEQ ID NO: 6846 - protein, 9 aa, Artificial sequence
  Protein classification predicting sequence
DLFGEQAVL

SEQ ID NO: 6847 - protein, 16 aa, Artificial sequence
  Protein classification predicting sequence
LAYFEVLHEMKLIVDL

SEQ ID NO: 6848 - protein, 28 aa, Artificial sequence
  Protein classification predicting sequence
LAYFEVLHEMKLIVDLIYEGGFKKMRQS

SEQ ID NO: 6849 - protein, 7 aa, Artificial sequence
  Protein classification predicting sequence
PADVDVF

SEQ ID NO: 6850 - protein, 12 aa, Artificial sequence
  Protein classification predicting sequence
AVIGYGSQGHAH

SEQ ID NO: 6851 - protein, 11 aa, Artificial sequence
  Protein classification predicting sequence
VIGYGSQGHAH

SEQ ID NO: 6852 - protein, 7 aa, Artificial sequence
  Protein classification predicting sequence
IVDLIYE

SEQ ID NO: 6853 - protein, 7 aa, Artificial sequence
  Protein classification predicting sequence
FAHGFNI

SEQ ID NO: 6854 - protein, 7 aa, Artificial sequence
  Protein classification predicting sequence
TLVEAGY

SEQ ID NO: 6855 - protein, 7 aa, Artificial sequence
  Protein classification predicting sequence
KAGFETL

SEQ ID NO: 6856 - protein, 8 aa, Artificial sequence
  Protein classification predicting sequence
KAGFETLV

SEQ ID NO: 6857 - protein, 7 aa, Artificial sequence
  Protein classification predicting sequence
PEMAYFE

SEQ ID NO: 6858 - protein, 7 aa, Artificial sequence
  Protein classification predicting sequence
HPIEEVG

SEQ ID NO: 6859 - protein, 8 aa, Artificial sequence
  Protein classification predicting sequence
GFDVVVGL

SEQ ID NO: 6860 - protein, 6 aa, Artificial sequence
  Protein classification predicting sequence
IQTGKF

SEQ ID NO: 6861 - protein, 10 aa, Artificial sequence
  Protein classification predicting sequence
ANYFNTLNLR

SEQ ID NO: 6862 - protein, 15 aa, Artificial sequence
  Protein classification predicting sequence
IAKAWAAATGGHRAG

SEQ ID NO: 6863 - protein, 26 aa, Artificial sequence
  Protein classification predicting sequence
SSFVAEVKSDLMGEQTILCGMLQAGS

SEQ ID NO: 6864 - protein, 10 aa, Artificial sequence
  Protein classification predicting sequence
GWETITEALK

SEQ ID NO: 6865 - protein, 8 aa, Artificial sequence
  Protein classification predicting sequence
ETAFENYP

SEQ ID NO: 6866 - protein, 38 aa, Artificial sequence
  Protein classification predicting sequence
AMVRAGVELAFEAMTASGIIDESAYYESLHELPLIANT

SEQ ID NO: 6867 - protein, 17 aa, Artificial sequence
  Protein classification predicting sequence
ESAYYESLHELPLIANT

SEQ ID NO: 6868 - protein, 11 aa, Artificial sequence
  Protein classification predicting sequence
VGTDVIGKGLG

SEQ ID NO: 6869 - protein, 10 aa, Artificial sequence
  Protein classification predicting sequence
SNQVDNATLI

SEQ ID NO: 6870 - protein, 17 aa, Artificial sequence
  Protein classification predicting sequence
IRNHPVEYIGEELRGYM

SEQ ID NO: 6871 - protein, 7 aa, Artificial sequence
  Protein classification predicting sequence
DMKRIAV

SEQ ID NO: 6872 - protein, 8 aa, Artificial sequence
  Protein classification predicting sequence
NLTPDKQH

SEQ ID NO: 6873 - protein, 11 aa, Artificial sequence
  Protein classification predicting sequence
SGPRVIDAGTK

SEQ ID NO: 6874 - protein, 8 aa, Artificial sequence
  Protein classification predicting sequence
VLTDIQNG

SEQ ID NO: 6875 - protein, 9 aa, Artificial sequence
  Protein classification predicting sequence
LVEAGYQPE

SEQ ID NO: 6876 - protein, 33 aa, Artificial sequence
  Protein classification predicting sequence
SFVAEVKSDLMGEQTILCGMLQAGSLLCFDKLV

SEQ ID NO: 6877 - protein, 7 aa, Artificial sequence
  Protein classification predicting sequence
HGLNIHF

SEQ ID NO: 6878 - protein, 9 aa, Artificial sequence
  Protein classification predicting sequence
EAGYAPEMA

SEQ ID NO: 6879 - protein, 7 aa, Artificial sequence
  Protein classification predicting sequence
NKLVDKA

SEQ ID NO: 6880 - protein, 6 aa, Artificial sequence
  Protein classification predicting sequence
ACGRPQ

SEQ ID NO: 6881 - protein, 6 aa, Artificial sequence
  Protein classification predicting sequence
YRGMGS

SEQ ID NO: 6882 - protein, 7 aa, Artificial sequence
  Protein classification predicting sequence
VAQGVSG

SEQ ID NO: 6883 - protein, 8 aa, Artificial sequence
  Protein classification predicting sequence
QHSCQDIG

SEQ ID NO: 6884 - protein, 10 aa, Artificial sequence
  Protein classification predicting sequence
LGASTVMMGS

SEQ ID NO: 6885 - protein, 8 aa, Artificial sequence
  Protein classification predicting sequence
AQVEGGVH

SEQ ID NO: 6886 - protein, 9 aa, Artificial sequence
  Protein classification predicting sequence
DGLTAQQLF

SEQ ID NO: 6887 - protein, 8 aa, Artificial sequence
  Protein classification predicting sequence
KITLKTPL

SEQ ID NO: 6888 - protein, 6 aa, Artificial sequence
  Protein classification predicting sequence
VRKVKK

SEQ ID NO: 6889 - protein, 13 aa, Artificial sequence
  Protein classification predicting sequence
EQGFITDPVVLSP

SEQ ID NO: 6890 - protein, 10 aa, Artificial sequence
  Protein classification predicting sequence
EDDKYRLDLL

SEQ ID NO: 6891 - protein, 12 aa, Artificial sequence
  Protein classification predicting sequence
KFVPYLIAGIQH

SEQ ID NO: 6892 - protein, 6 aa, Artificial sequence
  Protein classification predicting sequence
CQDIGA

SEQ ID NO: 6893 - protein, 13 aa, Artificial sequence
  Protein classification predicting sequence
MMYSGELKFEKRT

SEQ ID NO: 6894 - protein, 24 aa, Artificial sequence
  Protein classification predicting sequence
GGIGFIHHNCTPEFQANEVRKVKK

SEQ ID NO: 6895 - protein, 24 aa, Artificial sequence
  Protein classification predicting sequence
DELVAIIARTDLKKNRDYPLASKD

SEQ ID NO: 6896 - protein, 31 aa, Artificial sequence
  Protein classification predicting sequence
KALALGASTVMMGSLLAATTEAPGEYFFSDG

SEQ ID NO: 6897 - protein, 8 aa, Artificial sequence
  Protein classification predicting sequence
GLITIKDI

SEQ ID NO: 6898 - protein, 7 aa, Artificial sequence
  Protein classification predicting sequence
DTAHGHS

SEQ ID NO: 6899 - protein, 8 aa, Artificial sequence
  Protein classification predicting sequence
AGNVATAE

SEQ ID NO: 6900 - protein, 9 aa, Artificial sequence
  Protein classification predicting sequence
GPGSICTTR

SEQ ID NO: 6901 - protein, 8 aa, Artificial sequence
  Protein classification predicting sequence
VAGVGVPQ

SEQ ID NO: 6902 - protein, 7 aa, Artificial sequence
  Protein classification predicting sequence
LLAGTEE

SEQ ID NO: 6903 - protein, 10 aa, Artificial sequence
  Protein classification predicting sequence
YRGMGSLGAM

SEQ ID NO: 6904 - protein, 8 aa, Artificial sequence
  Protein classification predicting sequence
VPEGIEGR

SEQ ID NO: 6905 - protein, 7 aa, Artificial sequence
  Protein classification predicting sequence
GMGYVGA

SEQ ID NO: 6906 - protein, 7 aa, Artificial sequence
  Protein classification predicting sequence
ESHVHDV

SEQ ID NO: 6907 - protein, 8 aa, Artificial sequence
  Protein classification predicting sequence
LTFDDVLL

SEQ ID NO: 6908 - protein, 7 aa, Artificial sequence
  Protein classification predicting sequence
IEKLPLV

SEQ ID NO: 6909 - protein, 6 aa, Artificial sequence
  Protein classification predicting sequence
EARKHG

SEQ ID NO: 6910 - protein, 7 aa, Artificial sequence
  Protein classification predicting sequence
EIFQGRQ

SEQ ID NO: 6911 - protein, 17 aa, Artificial sequence
  Protein classification predicting sequence
KLNIPVISAGMDTVTES

SEQ ID NO: 6912 - protein, 7 aa, Artificial sequence
  Protein classification predicting sequence
MDTVTES

SEQ ID NO: 6913 - protein, 12 aa, Artificial sequence
  Protein classification predicting sequence
MAIAMARQGGLG

SEQ ID NO: 6914 - protein, 17 aa, Artificial sequence
  Protein classification predicting sequence
EAEKILQKHKIEKLPLV

SEQ ID NO: 6915 - protein, 23 aa, Artificial sequence
  Protein classification predicting sequence
VKVGIGPGSICTTRVVAGVGVPQ

SEQ ID NO: 6916 - protein, 14 aa, Artificial sequence
  Protein classification predicting sequence
VKVGIGPGSICTTR

SEQ ID NO: 6917 - protein, 10 aa, Artificial sequence
  Protein classification predicting sequence
PGETEIYQGR

SEQ ID NO: 6918 - protein, 6 aa, Artificial sequence
  Protein classification predicting sequence
AMEKGS

SEQ ID NO: 6919 - protein, 11 aa, Artificial sequence
  Protein classification predicting sequence
IADGGIRFSGD

SEQ ID NO: 6920 - protein, 7 aa, Artificial sequence
  Protein classification predicting sequence
VPEGIEG

SEQ ID NO: 6921 - protein, 7 aa, Artificial sequence
  Protein classification predicting sequence
ESHPHDV

SEQ ID NO: 6922 - protein, 12 aa, Artificial sequence
  Protein classification predicting sequence
IADGGIKYSGDI

SEQ ID NO: 6923 - protein, 8 aa, Artificial sequence
  Protein classification predicting sequence
GSSDRYFQ

SEQ ID NO: 6924 - protein, 18 aa, Artificial sequence
  Protein classification predicting sequence
GLTYNDFLILPGYIDFTA

SEQ ID NO: 6925 - protein, 8 aa, Artificial sequence
  Protein classification predicting sequence
IARTDLKK

SEQ ID NO: 6926 - protein, 8 aa, Artificial sequence
  Protein classification predicting sequence
VMMGSLLA

SEQ ID NO: 6927 - protein, 7 aa, Artificial sequence
  Protein classification predicting sequence
YRGMGSL

SEQ ID NO: 6928 - protein, 6 aa, Artificial sequence
  Protein classification predicting sequence
GNVATA

SEQ ID NO: 6929 - protein, 15 aa, Artificial sequence
  Protein classification predicting sequence
KLVPEGIEGRVAYKG

SEQ ID NO: 6930 - protein, 8 aa, Artificial sequence
  Protein classification predicting sequence
ITKESPNY

SEQ ID NO: 6931 - protein, 7 aa, Artificial sequence
  Protein classification predicting sequence
KDEFGRL

SEQ ID NO: 6932 - protein, 7 aa, Artificial sequence
  Protein classification predicting sequence
GILTNRD

SEQ ID NO: 6933 - protein, 8 aa, Artificial sequence
  Protein classification predicting sequence
KHKIEKLP

SEQ ID NO: 6934 - protein, 7 aa, Artificial sequence
  Protein classification predicting sequence
AGLKESH

SEQ ID NO: 6935 - protein, 9 aa, Artificial sequence
  Protein classification predicting sequence
QAKNLIDAG

SEQ ID NO: 6936 - protein, 12 aa, Artificial sequence
  Protein classification predicting sequence
EGGVHSLHSYEK

SEQ ID NO: 6937 - protein, 9 aa, Artificial sequence
  Protein classification predicting sequence
TFDDVLLVP

SEQ ID NO: 6938 - protein, 7 aa, Artificial sequence
  Protein classification predicting sequence
GGLGVIH

SEQ ID NO: 6939 - protein, 13 aa, Artificial sequence
  Protein classification predicting sequence
KVGIGPGSICTTR

SEQ ID NO: 6940 - protein, 8 aa, Artificial sequence
  Protein classification predicting sequence
AGTDEAPG

SEQ ID NO: 6941 - protein, 18 aa, Artificial sequence
  Protein classification predicting sequence
INGRKYKQYRGMGSLGAM

SEQ ID NO: 6942 - protein, 18 aa, Artificial sequence
  Protein classification predicting sequence
ESHPHDIIITNEAPNYPL

SEQ ID NO: 6943 - protein, 6 aa, Artificial sequence
  Protein classification predicting sequence
PQITAI

SEQ ID NO: 6944 - protein, 7 aa, Artificial sequence
  Protein classification predicting sequence
QVIGGNV

SEQ ID NO: 6945 - protein, 10 aa, Artificial sequence
  Protein classification predicting sequence
CTTRVVAGVG

SEQ ID NO: 6946 - protein, 6 aa, Artificial sequence
  Protein classification predicting sequence
IHHNCT

SEQ ID NO: 6947 - protein, 8 aa, Artificial sequence
  Protein classification predicting sequence
GFSGIPIT

SEQ ID NO: 6948 - protein, 8 aa, Artificial sequence
  Protein classification predicting sequence
GIPITDTG

SEQ ID NO: 6949 - protein, 8 aa, Artificial sequence
  Protein classification predicting sequence
KKGKLPIV

SEQ ID NO: 6950 - protein, 9 aa, Artificial sequence
  Protein classification predicting sequence
TFDDVLLIP

SEQ ID NO: 6951 - protein, 9 aa, Artificial sequence
  Protein classification predicting sequence
SAAMDTVTE

SEQ ID NO: 6952 - protein, 7 aa, Artificial sequence
  Protein classification predicting sequence
GLITVKD

SEQ ID NO: 6953 - protein, 7 aa, Artificial sequence
  Protein classification predicting sequence
ADAVKVG

SEQ ID NO: 6954 - protein, 12 aa, Artificial sequence
  Protein classification predicting sequence
IIADGGIKFSGD

SEQ ID NO: 6955 - protein, 8 aa, Artificial sequence
  Protein classification predicting sequence
FVRISGAG

SEQ ID NO: 6956 - protein, 6 aa, Artificial sequence
  Protein classification predicting sequence
MDTVTE

SEQ ID NO: 6957 - protein, 12 aa, Artificial sequence
  Protein classification predicting sequence
VIADGGIQNVGH

SEQ ID NO: 6958 - protein, 17 aa, Artificial sequence
  Protein classification predicting sequence
KFAKESLTFDDVLLIPA

SEQ ID NO: 6959 - protein, 10 aa, Artificial sequence
  Protein classification predicting sequence
TFDDVLLIPA

SEQ ID NO: 6960 - protein, 88 aa, Artificial sequence
  Protein classification predicting sequence
KLNIPVISAGMDTVTESKMAIAMARQGGLGVIHKNMGVEEQADEVQKVKRSENGVISNPFFLTPEESVYEAEALMGKYRISGVPIVDN

SEQ ID NO: 6961 - protein, 18 aa, Artificial sequence
  Protein classification predicting sequence
GILTNRDLRFIEDFSIKI

SEQ ID NO: 6962 - protein, 7 aa, Artificial sequence
  Protein classification predicting sequence
NLITAPV

SEQ ID NO: 6963 - protein, 13 aa, Artificial sequence
  Protein classification predicting sequence
ILQKHKIEKLPLV

SEQ ID NO: 6964 - protein, 11 aa, Artificial sequence
  Protein classification predicting sequence
GLITIKDIEKV

SEQ ID NO: 6965 - protein, 10 aa, Artificial sequence
  Protein classification predicting sequence
AAKDEHGRLL

SEQ ID NO: 6966 - protein, 12 aa, Artificial sequence
  Protein classification predicting sequence
IRAQKLVEAGVD

SEQ ID NO: 6967 - protein, 8 aa, Artificial sequence
  Protein classification predicting sequence
IDTAHGHS

SEQ ID NO: 6968 - protein, 54 aa, Artificial sequence
  Protein classification predicting sequence
YDCATEARKHGKAIIADGGIKFSGDIIKALAAGGHAVMLGSLLAGTEESPGATE

SEQ ID NO: 6969 - protein, 31 aa, Artificial sequence
  Protein classification predicting sequence
FQGRQYKVYRGMGSLGAMEKGSNDRYFQEDK

SEQ ID NO: 6970 - protein, 6 aa, Artificial sequence
  Protein classification predicting sequence
KFVPEG

SEQ ID NO: 6971 - protein, 15 aa, Artificial sequence
  Protein classification predicting sequence
KFVPEGIEGRTAYKG

SEQ ID NO: 6972 - protein, 21 aa, Artificial sequence
  Protein classification predicting sequence
LQDTIYQLMGGVRAGMGYTGS

SEQ ID NO: 6973 - protein, 22 aa, Artificial sequence
  Protein classification predicting sequence
LREEAQFTRMGPAGLAESHPHN

SEQ ID NO: 6974 - protein, 7 aa, Artificial sequence
  Protein classification predicting sequence
AAMDTVT

SEQ ID NO: 6975 - protein, 10 aa, Artificial sequence
  Protein classification predicting sequence
GGLGVIHKNM

SEQ ID NO: 6976 - protein, 9 aa, Artificial sequence
  Protein classification predicting sequence
YRISGVPIV

SEQ ID NO: 6977 - protein, 15 aa, Artificial sequence
  Protein classification predicting sequence
GLITIKDIEKVIEFP

SEQ ID NO: 6978 - protein, 10 aa, Artificial sequence
  Protein classification predicting sequence
ELDVQNEEHL

SEQ ID NO: 6979 - protein, 17 aa, Artificial sequence
  Protein classification predicting sequence
GVRSNLVAAGPIRTLAM

SEQ ID NO: 6980 - protein, 9 aa, Artificial sequence
  Protein classification predicting sequence
LVLTGFDRL

SEQ ID NO: 6981 - protein, 9 aa, Artificial sequence
  Protein classification predicting sequence
QYFWFVLKV

SEQ ID NO: 6982 - protein, 30 aa, Artificial sequence
  Protein classification predicting sequence
DLLITLQILPVFFSNCLFLALYDSVILLKH

SEQ ID NO: 6983 - protein, 7 aa, Artificial sequence
  Protein classification predicting sequence
CHLLDFA

SEQ ID NO: 6984 - protein, 14 aa, Artificial sequence
  Protein classification predicting sequence
FFSNCLFLALYDSV

SEQ ID NO: 6985 - protein, 13 aa, Artificial sequence
  Protein classification predicting sequence
GEWRRMLTSEGLR

SEQ ID NO: 6986 - protein, 8 aa, Artificial sequence
  Protein classification predicting sequence
WNSFLLDA

SEQ ID NO: 6987 - protein, 18 aa, Artificial sequence
  Protein classification predicting sequence
VADFLLVYIDEAHPSDGW

SEQ ID NO: 6988 - protein, 9 aa, Artificial sequence
  Protein classification predicting sequence
NQEDRCAAA

SEQ ID NO: 6989 - protein, 12 aa, Artificial sequence
  Protein classification predicting sequence
QLLERFSLPPQC

SEQ ID NO: 6990 - protein, 15 aa, Artificial sequence
  Protein classification predicting sequence
EVKKHRNQEDRCAAA

SEQ ID NO: 6991 - protein, 9 aa, Artificial sequence
  Protein classification predicting sequence
AVWHGQKLD

SEQ ID NO: 6992 - protein, 13 aa, Artificial sequence
  Protein classification predicting sequence
NFGSCTCPPFMAR

SEQ ID NO: 6993 - protein, 10 aa, Artificial sequence
  Protein classification predicting sequence
AYGAYFERLY

SEQ ID NO: 6994 - protein, 7 aa, Artificial sequence
  Protein classification predicting sequence
NEKVAFE

SEQ ID NO: 6995 - protein, 7 aa, Artificial sequence
  Protein classification predicting sequence
SSQNEQD

SEQ ID NO: 6996 - protein, 9 aa, Artificial sequence
  Protein classification predicting sequence
MKHVGLNVA

SEQ ID NO: 6997 - protein, 7 aa, Artificial sequence
  Protein classification predicting sequence
RPPSLCP

SEQ ID NO: 6998 - protein, 8 aa, Artificial sequence
  Protein classification predicting sequence
DIGCYTLG

SEQ ID NO: 6999 - protein, 9 aa, Artificial sequence
  Protein classification predicting sequence
HEVNVWPDE

SEQ ID NO: 7000 - protein, 7 aa, Artificial sequence
  Protein classification predicting sequence
VSLIRYP

SEQ ID NO: 7001 - protein, 10 aa, Artificial sequence
  Protein classification predicting sequence
DVSLITVLYQ

SEQ ID NO: 7002 - protein, 6 aa, Artificial sequence
  Protein classification predicting sequence
FRPFCE

SEQ ID NO: 7003 - protein, 8 aa, Artificial sequence
  Protein classification predicting sequence
DVSMITVL

SEQ ID NO: 7004 - protein, 12 aa, Artificial sequence
  Protein classification predicting sequence
VQNLQVETVDGW

SEQ ID NO: 7005 - protein, 7 aa, Artificial sequence
  Protein classification predicting sequence
HVRNGYY

SEQ ID NO: 7006 - protein, 8 aa, Artificial sequence
  Protein classification predicting sequence
RGSGFFYA

SEQ ID NO: 7007 - protein, 7 aa, Artificial sequence
  Protein classification predicting sequence
CYLNPSF

SEQ ID NO: 7008 - protein, 6 aa, Artificial sequence
  Protein classification predicting sequence
SGFFYA

SEQ ID NO: 7009 - protein, 9 aa, Artificial sequence
  Protein classification predicting sequence
FLVNCGTYM

SEQ ID NO: 7010 - protein, 10 aa, Artificial sequence
  Protein classification predicting sequence
GCQIVRVACP

SEQ ID NO: 7011 - protein, 11 aa, Artificial sequence
  Protein classification predicting sequence
GIGDTIRVSLS

SEQ ID NO: 7012 - protein, 39 aa, Artificial sequence
  Protein classification predicting sequence
ADIHFQPKYVFAAIEAGCAAVRVNPGNIKQFDDKVKEIA

SEQ ID NO: 7013 - protein, 17 aa, Artificial sequence
  Protein classification predicting sequence
LEIVSCPSCGRAQVDVY

SEQ ID NO: 7014 - protein, 10 aa, Artificial sequence
  Protein classification predicting sequence
GIGDTIRVSL

SEQ ID NO: 7015 - protein, 6 aa, Artificial sequence
  Protein classification predicting sequence
QSMTNT

SEQ ID NO: 7016 - protein, 9 aa, Artificial sequence
  Protein classification predicting sequence
PLVADIHFD

SEQ ID NO: 7017 - protein, 11 aa, Artificial sequence
  Protein classification predicting sequence
DCLRINPGNIG

SEQ ID NO: 7018 - protein, 8 aa, Artificial sequence
  Protein classification predicting sequence
RINPGNIG

SEQ ID NO: 7019 - protein, 10 aa, Artificial sequence
  Protein classification predicting sequence
IRIGVNAGSL

SEQ ID NO: 7020 - protein, 15 aa, Artificial sequence
  Protein classification predicting sequence
IRIGVNAGSLEKDLQ

SEQ ID NO: 7021 - protein, 8 aa, Artificial sequence
  Protein classification predicting sequence
FKVSVKAS

SEQ ID NO: 7022 - protein, 8 aa, Artificial sequence
  Protein classification predicting sequence
GFDILKSL

SEQ ID NO: 7023 - protein, 8 aa, Artificial sequence
  Protein classification predicting sequence
GINFIACP

SEQ ID NO: 7024 - protein, 6 aa, Artificial sequence
  Protein classification predicting sequence
CSRQEF

SEQ ID NO: 7025 - protein, 7 aa, Artificial sequence
  Protein classification predicting sequence
GDRTREV

SEQ ID NO: 7026 - protein, 6 aa, Artificial sequence
  Protein classification predicting sequence
VAVMGC

SEQ ID NO: 7027 - protein, 17 aa, Artificial sequence
  Protein classification predicting sequence
VAVMGCIVNGPGESKHA

SEQ ID NO: 7028 - protein, 7 aa, Artificial sequence
  Protein classification predicting sequence
PVVVQSM

SEQ ID NO: 7029 - protein, 6 aa, Artificial sequence
  Protein classification predicting sequence
RINPGN

SEQ ID NO: 7030 - protein, 7 aa, Artificial sequence
  Protein classification predicting sequence
GFGDKRD

SEQ ID NO: 7031 - protein, 9 aa, Artificial sequence
  Protein classification predicting sequence
RIGVNHGSL

SEQ ID NO: 7032 - protein, 5 aa, Artificial sequence
  Protein classification predicting sequence
ADIHF

SEQ ID NO: 7033 - protein, 6 aa, Artificial sequence
  Protein classification predicting sequence
GITEAG

SEQ ID NO: 7034 - protein, 7 aa, Artificial sequence
  Protein classification predicting sequence
VMGCVVN

SEQ ID NO: 7035 - protein, 7 aa, Artificial sequence
  Protein classification predicting sequence
GEAREAD

SEQ ID NO: 7036 - protein, 18 aa, Artificial sequence
  Protein classification predicting sequence
ACRHDKPVRIGVNWGSLD

SEQ ID NO: 7037 - protein, 8 aa, Artificial sequence
  Protein classification predicting sequence
PLHLGITE

SEQ ID NO: 7038 - protein, 7 aa, Artificial sequence
  Protein classification predicting sequence
VRKVPEE

SEQ ID NO: 7039 - protein, 10 aa, Artificial sequence
  Protein classification predicting sequence
MVEELKKEID

SEQ ID NO: 7040 - protein, 10 aa, Artificial sequence
  Protein classification predicting sequence
MGCIVNGPGE

SEQ ID NO: 7041 - protein, 20 aa, Artificial sequence
  Protein classification predicting sequence
MGCIVNGPGEMADADYGYVG

SEQ ID NO: 7042 - protein, 18 aa, Artificial sequence
  Protein classification predicting sequence
QSMTTTKTHDVEATVAEI

SEQ ID NO: 7043 - protein, 32 aa, Artificial sequence
  Protein classification predicting sequence
QSMTTTKTHDVEATVAEIKRLEEAGCQVVRVA

SEQ ID NO: 7044 - protein, 6 aa, Artificial sequence
  Protein classification predicting sequence
DIHFDY

SEQ ID NO: 7045 - protein, 49 aa, Artificial sequence
  Protein classification predicting sequence
KYGYPTADGMVESALHHIKILEDLDFHDIIVSMKASDVNLAIEAYEKAA

SEQ ID NO: 7046 - protein, 9 aa, Artificial sequence
  Protein classification predicting sequence
SLSADPVEE

SEQ ID NO: 7047 - protein, 12 aa, Artificial sequence
  Protein classification predicting sequence
THRTKTRPVKVG

SEQ ID NO: 7048 - protein, 8 aa, Artificial sequence
  Protein classification predicting sequence
LTIGGNNE

SEQ ID NO: 7049 - protein, 6 aa, Artificial sequence
  Protein classification predicting sequence
KVEAVV

SEQ ID NO: 7050 - protein, 8 aa, Artificial sequence
  Protein classification predicting sequence
ALKAIEGG

SEQ ID NO: 7051 - protein, 9 aa, Artificial sequence
  Protein classification predicting sequence
GIPIRIGVN

SEQ ID NO: 7052 - protein, 13 aa, Artificial sequence
  Protein classification predicting sequence
GIPIRIGVNAGSL

SEQ ID NO: 7053 - protein, 14 aa, Artificial sequence
  Protein classification predicting sequence
GIPIRIGVNAGSLE

SEQ ID NO: 7054 - protein, 16 aa, Artificial sequence
  Protein classification predicting sequence
GIPIRIGVNAGSLERH

SEQ ID NO: 7055 - protein, 9 aa, Artificial sequence
  Protein classification predicting sequence
MVESALHHI

SEQ ID NO: 7056 - protein, 30 aa, Artificial sequence
  Protein classification predicting sequence
NAATLISCPTCGRIEIDLISIANEVEEYIS

SEQ ID NO: 7057 - protein, 6 aa, Artificial sequence
  Protein classification predicting sequence
IRIGVN

SEQ ID NO: 7058 - protein, 7 aa, Artificial sequence
  Protein classification predicting sequence
PIRIGVN

SEQ ID NO: 7059 - protein, 10 aa, Artificial sequence
  Protein classification predicting sequence
RIGVNWGSLD

SEQ ID NO: 7060 - protein, 8 aa, Artificial sequence
  Protein classification predicting sequence
IILSAKVS

SEQ ID NO: 7061 - protein, 10 aa, Artificial sequence
  Protein classification predicting sequence
ALHLGLTEAG

SEQ ID NO: 7062 - protein, 12 aa, Artificial sequence
  Protein classification predicting sequence
ALHLGLTEAGMG

SEQ ID NO: 7063 - protein, 7 aa, Artificial sequence
  Protein classification predicting sequence
GIGDTIR

SEQ ID NO: 7064 - protein, 7 aa, Artificial sequence
  Protein classification predicting sequence
VAQELLQ

SEQ ID NO: 7065 - protein, 10 aa, Artificial sequence
  Protein classification predicting sequence
ACPGCGRTTS

SEQ ID NO: 7066 - protein, 14 aa, Artificial sequence
  Protein classification predicting sequence
ACPGCGRTTSTVFQ

SEQ ID NO: 7067 - protein, 10 aa, Artificial sequence
  Protein classification predicting sequence
IPVIADIHFQ

SEQ ID NO: 7068 - protein, 16 aa, Artificial sequence
  Protein classification predicting sequence
AIDAGCAAVRVNPGNI

SEQ ID NO: 7069 - protein, 9 aa, Artificial sequence
  Protein classification predicting sequence
RIGVNAGSL

SEQ ID NO: 7070 - protein, 12 aa, Artificial sequence
  Protein classification predicting sequence
PLHLGVTEAGPA

SEQ ID NO: 7071 - protein, 6 aa, Artificial sequence
  Protein classification predicting sequence
QGTIKS

SEQ ID NO: 7072 - protein, 7 aa, Artificial sequence
  Protein classification predicting sequence
SCPSCGR

SEQ ID NO: 7073 - protein, 12 aa, Artificial sequence
  Protein classification predicting sequence
SCPSCGRAQVDV

SEQ ID NO: 7074 - protein, 12 aa, Artificial sequence
  Protein classification predicting sequence
AVMGCVVNGPGE

SEQ ID NO: 7075 - protein, 16 aa, Artificial sequence
  Protein classification predicting sequence
AVMGCVVNGPGESRHA

SEQ ID NO: 7076 - protein, 12 aa, Artificial sequence
  Protein classification predicting sequence
VVQSMTNTDTAD

SEQ ID NO: 7077 - protein, 7 aa, Artificial sequence
  Protein classification predicting sequence
AGSEMVR

SEQ ID NO: 7078 - protein, 6 aa, Artificial sequence
  Protein classification predicting sequence
KPVRIG

SEQ ID NO: 7079 - protein, 10 aa, Artificial sequence
  Protein classification predicting sequence
HLGLTEAGMG

SEQ ID NO: 7080 - protein, 13 aa, Artificial sequence
  Protein classification predicting sequence
HANIGISLPGTGE

SEQ ID NO: 7081 - protein, 7 aa, Artificial sequence
  Protein classification predicting sequence
APVFVDG

SEQ ID NO: 7082 - protein, 7 aa, Artificial sequence
  Protein classification predicting sequence
PACAEAL

SEQ ID NO: 7083 - protein, 10 aa, Artificial sequence
  Protein classification predicting sequence
KYRINPGNVG

SEQ ID NO: 7084 - protein, 7 aa, Artificial sequence
  Protein classification predicting sequence
VQSMTNT

SEQ ID NO: 7085 - protein, 6 aa, Artificial sequence
  Protein classification predicting sequence
ESAMRH

SEQ ID NO: 7086 - protein, 6 aa, Artificial sequence
  Protein classification predicting sequence
GITESG

SEQ ID NO: 7087 - protein, 9 aa, Artificial sequence
  Protein classification predicting sequence
VPIGDGAPI

SEQ ID NO: 7088 - protein, 7 aa, Artificial sequence
  Protein classification predicting sequence
GIGDTLR

SEQ ID NO: 7089 - protein, 11 aa, Artificial sequence
  Protein classification predicting sequence
ALSKYRINPGN

SEQ ID NO: 7090 - protein, 9 aa, Artificial sequence
  Protein classification predicting sequence
LHLGLTEAG

SEQ ID NO: 7091 - protein, 17 aa, Artificial sequence
  Protein classification predicting sequence
EVVVGQEILQTMGLRSF

SEQ ID NO: 7092 - protein, 12 aa, Artificial sequence
  Protein classification predicting sequence
PMVVACPGCGRT

SEQ ID NO: 7093 - protein, 8 aa, Artificial sequence
  Protein classification predicting sequence
HLGVTEAG

SEQ ID NO: 7094 - protein, 10 aa, Artificial sequence
  Protein classification predicting sequence
KERGIPIRIG

SEQ ID NO: 7095 - protein, 6 aa, Artificial sequence
  Protein classification predicting sequence
VKSAIG

SEQ ID NO: 7096 - protein, 6 aa, Artificial sequence
  Protein classification predicting sequence
IACPSC

SEQ ID NO: 7097 - protein, 6 aa, Artificial sequence
  Protein classification predicting sequence
QSMTTT

SEQ ID NO: 7098 - protein, 8 aa, Artificial sequence
  Protein classification predicting sequence
PLVADIHF

SEQ ID NO: 7099 - protein, 16 aa, Artificial sequence
  Protein classification predicting sequence
IAVMGCIVNGPGEMAD

SEQ ID NO: 7100 - protein, 8 aa, Artificial sequence
  Protein classification predicting sequence
KVRINPGN

SEQ ID NO: 7101 - protein, 13 aa, Artificial sequence
  Protein classification predicting sequence
EGLGDTIRCSLTG

SEQ ID NO: 7102 - protein, 9 aa, Artificial sequence
  Protein classification predicting sequence
GALLLDGLG

SEQ ID NO: 7103 - protein, 6 aa, Artificial sequence
  Protein classification predicting sequence
EYISCP

SEQ ID NO: 7104 - protein, 9 aa, Artificial sequence
  Protein classification predicting sequence
YGDTIEGMV

SEQ ID NO: 7105 - protein, 6 aa, Artificial sequence
  Protein classification predicting sequence
CGRTLF

SEQ ID NO: 7106 - protein, 15 aa, Artificial sequence
  Protein classification predicting sequence
MGCIVNGPGEMADAD

SEQ ID NO: 7107 - protein, 11 aa, Artificial sequence
  Protein classification predicting sequence
YPLHLGVTEAG

SEQ ID NO: 7108 - protein, 25 aa, Artificial sequence
  Protein classification predicting sequence
SHLKGLKIGIMGCIVNGPGEMADAD

SEQ ID NO: 7109 - protein, 6 aa, Artificial sequence
  Protein classification predicting sequence
VKSAVG

SEQ ID NO: 7110 - protein, 8 aa, Artificial sequence
  Protein classification predicting sequence
SCPGCGRT

SEQ ID NO: 7111 - protein, 11 aa, Artificial sequence
  Protein classification predicting sequence
VRITVNSPEAA

SEQ ID NO: 7112 - protein, 8 aa, Artificial sequence
  Protein classification predicting sequence
VPLVGDFH

SEQ ID NO: 7113 - protein, 9 aa, Artificial sequence
  Protein classification predicting sequence
KFAFMIRTA

SEQ ID NO: 7114 - protein, 6 aa, Artificial sequence
  Protein classification predicting sequence
VRIGVN

SEQ ID NO: 7115 - protein, 12 aa, Artificial sequence
  Protein classification predicting sequence
VRIGVNWGSLDQ

SEQ ID NO: 7116 - protein, 7 aa, Artificial sequence
  Protein classification predicting sequence
NWGSLDQ

SEQ ID NO: 7117 - protein, 6 aa, Artificial sequence
  Protein classification predicting sequence
RMMDAN

SEQ ID NO: 7118 - protein, 15 aa, Artificial sequence
  Protein classification predicting sequence
EALIVSALESAEKAV

SEQ ID NO: 7119 - protein, 12 aa, Artificial sequence
  Protein classification predicting sequence
GIGDTIRISLTP

SEQ ID NO: 7120 - protein, 8 aa, Artificial sequence
  Protein classification predicting sequence
STFFQELA

SEQ ID NO: 7121 - protein, 13 aa, Artificial sequence
  Protein classification predicting sequence
VAVMGCVVNGPGE

SEQ ID NO: 7122 - protein, 15 aa, Artificial sequence
  Protein classification predicting sequence
VAVMGCVVNGPGESK

SEQ ID NO: 7123 - protein, 12 aa, Artificial sequence
  Protein classification predicting sequence
ADIGISLPGTGE

SEQ ID NO: 7124 - protein, 10 aa, Artificial sequence
  Protein classification predicting sequence
IGISLPGTGE

SEQ ID NO: 7125 - protein, 9 aa, Artificial sequence
  Protein classification predicting sequence
PVAPVYVDG

SEQ ID NO: 7126 - protein, 11 aa, Artificial sequence
  Protein classification predicting sequence
VNGPGEAREAD

SEQ ID NO: 7127 - protein, 9 aa, Artificial sequence
  Protein classification predicting sequence
LRINPGNIG

SEQ ID NO: 7128 - protein, 12 aa, Artificial sequence
  Protein classification predicting sequence
MGCVVNGPGEAR

SEQ ID NO: 7129 - protein, 7 aa, Artificial sequence
  Protein classification predicting sequence
ADIGIAG

SEQ ID NO: 7130 - protein, 7 aa, Artificial sequence
  Protein classification predicting sequence
TRQLMVG

SEQ ID NO: 7131 - protein, 23 aa, Artificial sequence
  Protein classification predicting sequence
AIDAGCAAVRVNPGNIKEFDGRV

SEQ ID NO: 7132 - protein, 7 aa, Artificial sequence
  Protein classification predicting sequence
WEAGLFE

SEQ ID NO: 7133 - protein, 16 aa, Artificial sequence
  Protein classification predicting sequence
ADLGVASGNGKGQIFV

SEQ ID NO: 7134 - protein, 11 aa, Artificial sequence
  Protein classification predicting sequence
PLHLGVTEAGP

SEQ ID NO: 7135 - protein, 8 aa, Artificial sequence
  Protein classification predicting sequence
VAFGALLS

SEQ ID NO: 7136 - protein, 7 aa, Artificial sequence
  Protein classification predicting sequence
SLNLRPR

SEQ ID NO: 7137 - protein, 6 aa, Artificial sequence
  Protein classification predicting sequence
TLQQIA

SEQ ID NO: 7138 - protein, 9 aa, Artificial sequence
  Protein classification predicting sequence
TPEALVESA

SEQ ID NO: 7139 - protein, 22 aa, Artificial sequence
  Protein classification predicting sequence
GMEVPLRVAVMGCVVNGPGEAR

SEQ ID NO: 7140 - protein, 7 aa, Artificial sequence
  Protein classification predicting sequence
LARAGSE

SEQ ID NO: 7141 - protein, 8 aa, Artificial sequence
  Protein classification predicting sequence
ISCPTCGR

SEQ ID NO: 7142 - protein, 10 aa, Artificial sequence
  Protein classification predicting sequence
VNGPGEAKEA

SEQ ID NO: 7143 - protein, 9 aa, Artificial sequence
  Protein classification predicting sequence
VQSMTNTDT

SEQ ID NO: 7144 - protein, 6 aa, Artificial sequence
  Protein classification predicting sequence
GVTEAG

SEQ ID NO: 7145 - protein, 10 aa, Artificial sequence
  Protein classification predicting sequence
GIGDTLRVSL

SEQ ID NO: 7146 - protein, 9 aa, Artificial sequence
  Protein classification predicting sequence
QIKALERVG

SEQ ID NO: 7147 - protein, 6 aa, Artificial sequence
  Protein classification predicting sequence
VVDCAR

SEQ ID NO: 7148 - protein, 7 aa, Artificial sequence
  Protein classification predicting sequence
NIPIRIG

SEQ ID NO: 7149 - protein, 6 aa, Artificial sequence
  Protein classification predicting sequence
SYRLLA

SEQ ID NO: 7150 - protein, 13 aa, Artificial sequence
  Protein classification predicting sequence
KVGFDILKSLRIR

SEQ ID NO: 7151 - protein, 19 aa, Artificial sequence
  Protein classification predicting sequence
ALAKYRINPGNVGFGKKKD

SEQ ID NO: 7152 - protein, 7 aa, Artificial sequence
  Protein classification predicting sequence
PVEEIKV

SEQ ID NO: 7153 - protein, 13 aa, Artificial sequence
  Protein classification predicting sequence
INIPLVADIHFDY

SEQ ID NO: 7154 - protein, 10 aa, Artificial sequence
  Protein classification predicting sequence
PLVADIHFDY

SEQ ID NO: 7155 - protein, 11 aa, Artificial sequence
  Protein classification predicting sequence
PIRIGVNAGSL

SEQ ID NO: 7156 - protein, 7 aa, Artificial sequence
  Protein classification predicting sequence
GTIKSAV

SEQ ID NO: 7157 - protein, 13 aa, Artificial sequence
  Protein classification predicting sequence
GLGAILSKGIGNT

SEQ ID NO: 7158 - protein, 24 aa, Artificial sequence
  Protein classification predicting sequence
FGLASNAATLISCPTCGRIEIDLI

SEQ ID NO: 7159 - protein, 6 aa, Artificial sequence
  Protein classification predicting sequence
NPGNIG

SEQ ID NO: 7160 - protein, 8 aa, Artificial sequence
  Protein classification predicting sequence
GDTPEGMV

SEQ ID NO: 7161 - protein, 11 aa, Artificial sequence
  Protein classification predicting sequence
YPFHLGVTEAG

SEQ ID NO: 7162 - protein, 8 aa, Artificial sequence
  Protein classification predicting sequence
ILQALGLR

SEQ ID NO: 7163 - protein, 19 aa, Artificial sequence
  Protein classification predicting sequence
TMVEYVACPSCGRTLFNLE

SEQ ID NO: 7164 - protein, 18 aa, Artificial sequence
  Protein classification predicting sequence
IAVMGCIVNGPGEMADAD

SEQ ID NO: 7165 - protein, 24 aa, Artificial sequence
  Protein classification predicting sequence
IAVMGCIVNGPGEMADADYGYVGK

SEQ ID NO: 7166 - protein, 9 aa, Artificial sequence
  Protein classification predicting sequence
RINPGNIGS

SEQ ID NO: 7167 - protein, 8 aa, Artificial sequence
  Protein classification predicting sequence
PEALVESA

SEQ ID NO: 7168 - protein, 8 aa, Artificial sequence
  Protein classification predicting sequence
SVKASDVF

SEQ ID NO: 7169 - protein, 7 aa, Artificial sequence
  Protein classification predicting sequence
GDTMRVS

SEQ ID NO: 7170 - protein, 7 aa, Artificial sequence
  Protein classification predicting sequence
IYVGNVP

SEQ ID NO: 7171 - protein, 15 aa, Artificial sequence
  Protein classification predicting sequence
ALLESALRHVEILDR

SEQ ID NO: 7172 - protein, 18 aa, Artificial sequence
  Protein classification predicting sequence
NFDQFKVSVKASDVFLAV

SEQ ID NO: 7173 - protein, 13 aa, Artificial sequence
  Protein classification predicting sequence
HLGITEAGGARAG

SEQ ID NO: 7174 - protein, 9 aa, Artificial sequence
  Protein classification predicting sequence
ACPTCSRQE

SEQ ID NO: 7175 - protein, 21 aa, Artificial sequence
  Protein classification predicting sequence
TPMDVSIIGCVVNGPGEALVS

SEQ ID NO: 7176 - protein, 27 aa, Artificial sequence
  Protein classification predicting sequence
TPMDVSIIGCVVNGPGEALVSDLGVTG

SEQ ID NO: 7177 - protein, 13 aa, Artificial sequence
  Protein classification predicting sequence
GVDCLRINPGNIG

SEQ ID NO: 7178 - protein, 9 aa, Artificial sequence
  Protein classification predicting sequence
QEKYGEPTP

SEQ ID NO: 7179 - protein, 6 aa, Artificial sequence
  Protein classification predicting sequence
EGIGDT

SEQ ID NO: 7180 - protein, 8 aa, Artificial sequence
  Protein classification predicting sequence
EGIGDTLR

SEQ ID NO: 7181 - protein, 11 aa, Artificial sequence
  Protein classification predicting sequence
LGVTGGNKKSG

SEQ ID NO: 7182 - protein, 7 aa, Artificial sequence
  Protein classification predicting sequence
SCPTCGR

SEQ ID NO: 7183 - protein, 7 aa, Artificial sequence
  Protein classification predicting sequence
ESAMRHV

SEQ ID NO: 7184 - protein, 7 aa, Artificial sequence
  Protein classification predicting sequence
RSGAVKS

SEQ ID NO: 7185 - protein, 32 aa, Artificial sequence
  Protein classification predicting sequence
EGIGDTLRVSLAADPVEEIKVGFDILKSLRIR

SEQ ID NO: 7186 - protein, 9 aa, Artificial sequence
  Protein classification predicting sequence
RGINFIACP

SEQ ID NO: 7187 - protein, 9 aa, Artificial sequence
  Protein classification predicting sequence
CSRQEFDVI

SEQ ID NO: 7188 - protein, 9 aa, Artificial sequence
  Protein classification predicting sequence
WEASLFEEH

SEQ ID NO: 7189 - protein, 6 aa, Artificial sequence
  Protein classification predicting sequence
KISVKH

SEQ ID NO: 7190 - protein, 9 aa, Artificial sequence
  Protein classification predicting sequence
DIIVSMKAS

SEQ ID NO: 7191 - protein, 8 aa, Artificial sequence
  Protein classification predicting sequence
VGNLTIGG

SEQ ID NO: 7192 - protein, 7 aa, Artificial sequence
  Protein classification predicting sequence
KYGYPTA

SEQ ID NO: 7193 - protein, 10 aa, Artificial sequence
  Protein classification predicting sequence
HIKILEDLDF

SEQ ID NO: 7194 - protein, 15 aa, Artificial sequence
  Protein classification predicting sequence
LISCPTCGRIEIDLI

SEQ ID NO: 7195 - protein, 26 aa, Artificial sequence
  Protein classification predicting sequence
PIKVAVLGCAVNGPGEAREADIGIAG

SEQ ID NO: 7196 - protein, 7 aa, Artificial sequence
  Protein classification predicting sequence
GEGLLFR

SEQ ID NO: 7197 - protein, 7 aa, Artificial sequence
  Protein classification predicting sequence
ELKKEID

SEQ ID NO: 7198 - protein, 7 aa, Artificial sequence
  Protein classification predicting sequence
RVSVPTM

SEQ ID NO: 7199 - protein, 9 aa, Artificial sequence
  Protein classification predicting sequence
AAEAFKLIK

SEQ ID NO: 7200 - protein, 11 aa, Artificial sequence
  Protein classification predicting sequence
VRIGVNWGSLD

SEQ ID NO: 7201 - protein, 9 aa, Artificial sequence
  Protein classification predicting sequence
SALESAEKA

SEQ ID NO: 7202 - protein, 6 aa, Artificial sequence
  Protein classification predicting sequence
IVLSCK

SEQ ID NO: 7203 - protein, 11 aa, Artificial sequence
  Protein classification predicting sequence
LHLGLTEAGMG

SEQ ID NO: 7204 - protein, 10 aa, Artificial sequence
  Protein classification predicting sequence
QEILQTMGLR

SEQ ID NO: 7205 - protein, 7 aa, Artificial sequence
  Protein classification predicting sequence
APRRATR

SEQ ID NO: 7206 - protein, 7 aa, Artificial sequence
  Protein classification predicting sequence
PVEEVKV

SEQ ID NO: 7207 - protein, 9 aa, Artificial sequence
  Protein classification predicting sequence
AGCDIVRVA

SEQ ID NO: 7208 - protein, 26 aa, Artificial sequence
  Protein classification predicting sequence
AGCDIVRVACPRQEDADALAEIARHS

SEQ ID NO: 7209 - protein, 8 aa, Artificial sequence
  Protein classification predicting sequence
DIHFQPKY

SEQ ID NO: 7210 - protein, 7 aa, Artificial sequence
  Protein classification predicting sequence
EALVESA

SEQ ID NO: 7211 - protein, 8 aa, Artificial sequence
  Protein classification predicting sequence
PVEEIKVG

SEQ ID NO: 7212 - protein, 16 aa, Artificial sequence
  Protein classification predicting sequence
EIVSCPSCGRAQVDVY

SEQ ID NO: 7213 - protein, 14 aa, Artificial sequence
  Protein classification predicting sequence
AVMGCVVNGPGEAR

SEQ ID NO: 7214 - protein, 9 aa, Artificial sequence
  Protein classification predicting sequence
GEVIKTVPE

SEQ ID NO: 7215 - protein, 11 aa, Artificial sequence
  Protein classification predicting sequence
IPVIADIHFQP

SEQ ID NO: 7216 - protein, 6 aa, Artificial sequence
  Protein classification predicting sequence
GTIKSA

SEQ ID NO: 7217 - protein, 7 aa, Artificial sequence
  Protein classification predicting sequence
KSAAGLG

SEQ ID NO: 7218 - protein, 11 aa, Artificial sequence
  Protein classification predicting sequence
LGCAVNGPGEA

SEQ ID NO: 7219 - protein, 7 aa, Artificial sequence
  Protein classification predicting sequence
PLIGDFH

SEQ ID NO: 7220 - protein, 7 aa, Artificial sequence
  Protein classification predicting sequence
GDFHFNG

SEQ ID NO: 7221 - protein, 10 aa, Artificial sequence
  Protein classification predicting sequence
SLTPEPGGDR

SEQ ID NO: 7222 - protein, 13 aa, Artificial sequence
  Protein classification predicting sequence
AVMGCVVNGPGES

SEQ ID NO: 7223 - protein, 10 aa, Artificial sequence
  Protein classification predicting sequence
VNGPGESKHA

SEQ ID NO: 7224 - protein, 10 aa, Artificial sequence
  Protein classification predicting sequence
GCDIVRVACP

SEQ ID NO: 7225 - protein, 19 aa, Artificial sequence
  Protein classification predicting sequence
GCDIVRVACPRQEDADALA

SEQ ID NO: 7226 - protein, 9 aa, Artificial sequence
  Protein classification predicting sequence
GMVESALEF

SEQ ID NO: 7227 - protein, 9 aa, Artificial sequence
  Protein classification predicting sequence
NIPIRIGVN

SEQ ID NO: 7228 - protein, 13 aa, Artificial sequence
  Protein classification predicting sequence
ARDKNIPIRIGVN

SEQ ID NO: 7229 - protein, 10 aa, Artificial sequence
  Protein classification predicting sequence
ESAMRHVDIL

SEQ ID NO: 7230 - protein, 8 aa, Artificial sequence
  Protein classification predicting sequence
RLNFDQFK

SEQ ID NO: 7231 - protein, 8 aa, Artificial sequence
  Protein classification predicting sequence
KVGFDILK

SEQ ID NO: 7232 - protein, 10 aa, Artificial sequence
  Protein classification predicting sequence
GCVVNGPGEA

SEQ ID NO: 7233 - protein, 7 aa, Artificial sequence
  Protein classification predicting sequence
STRIYVG

SEQ ID NO: 7234 - protein, 17 aa, Artificial sequence
  Protein classification predicting sequence
VPIGDGAPIAVQSMTNT

SEQ ID NO: 7235 - protein, 38 aa, Artificial sequence
  Protein classification predicting sequence
PLVADIHFDYRIALKVAEYGVDCLRINPGNIGNEERIR

SEQ ID NO: 7236 - protein, 18 aa, Artificial sequence
  Protein classification predicting sequence
TPMDVSIIGCVVNGPGEA

SEQ ID NO: 7237 - protein, 7 aa, Artificial sequence
  Protein classification predicting sequence
KVRINPG

SEQ ID NO: 7238 - protein, 12 aa, Artificial sequence
  Protein classification predicting sequence
RIGVNHGSLSER

SEQ ID NO: 7239 - protein, 8 aa, Artificial sequence
  Protein classification predicting sequence
GVTEAGDG

SEQ ID NO: 7240 - protein, 8 aa, Artificial sequence
  Protein classification predicting sequence
GDTIRVSL

SEQ ID NO: 7241 - protein, 8 aa, Artificial sequence
  Protein classification predicting sequence
CPSCGRTL

SEQ ID NO: 7242 - protein, 7 aa, Artificial sequence
  Protein classification predicting sequence
LAPRRKT

SEQ ID NO: 7243 - protein, 13 aa, Artificial sequence
  Protein classification predicting sequence
SQIPVIADIHFQP

SEQ ID NO: 7244 - protein, 9 aa, Artificial sequence
  Protein classification predicting sequence
AVRVNPGNI

SEQ ID NO: 7245 - protein, 27 aa, Artificial sequence
  Protein classification predicting sequence
CDYPLHLGVTEAGPAFQGTIKSAVAFG

SEQ ID NO: 7246 - protein, 6 aa, Artificial sequence
  Protein classification predicting sequence
GCEIVR

SEQ ID NO: 7247 - protein, 7 aa, Artificial sequence
  Protein classification predicting sequence
YGRIKST

SEQ ID NO: 7248 - protein, 9 aa, Artificial sequence
  Protein classification predicting sequence
GLRKTMVEY

SEQ ID NO: 7249 - protein, 8 aa, Artificial sequence
  Protein classification predicting sequence
ILQSIGLR

SEQ ID NO: 7250 - protein, 7 aa, Artificial sequence
  Protein classification predicting sequence
ISLYRGR

SEQ ID NO: 7251 - protein, 11 aa, Artificial sequence
  Protein classification predicting sequence
ERMLFTYGDTP

SEQ ID NO: 7252 - protein, 10 aa, Artificial sequence
  Protein classification predicting sequence
RRKSTRIYVG

SEQ ID NO: 7253 - protein, 10 aa, Artificial sequence
  Protein classification predicting sequence
KYGEPTPEAL

SEQ ID NO: 7254 - protein, 7 aa, Artificial sequence
  Protein classification predicting sequence
KYGEPTP

SEQ ID NO: 7255 - protein, 18 aa, Artificial sequence
  Protein classification predicting sequence
EGIGDTLRISLAADPVEE

SEQ ID NO: 7256 - protein, 7 aa, Artificial sequence
  Protein classification predicting sequence
MDAAEAF

SEQ ID NO: 7257 - protein, 21 aa, Artificial sequence
  Protein classification predicting sequence
IKQQVNVPLVADIHFDYRIAL

SEQ ID NO: 7258 - protein, 8 aa, Artificial sequence
  Protein classification predicting sequence
DIVRVSVP

SEQ ID NO: 7259 - protein, 8 aa, Artificial sequence
  Protein classification predicting sequence
ESALRHVE

SEQ ID NO: 7260 - protein, 11 aa, Artificial sequence
  Protein classification predicting sequence
RISLAADPVEE

SEQ ID NO: 7261 - protein, 7 aa, Artificial sequence
  Protein classification predicting sequence
DILKSLR

SEQ ID NO: 7262 - protein, 8 aa, Artificial sequence
  Protein classification predicting sequence
VYRELARR

SEQ ID NO: 7263 - protein, 15 aa, Artificial sequence
  Protein classification predicting sequence
GIGDTIRISLTPEPG

SEQ ID NO: 7264 - protein, 30 aa, Artificial sequence
  Protein classification predicting sequence
TVAQVAALHRAGSEIVRITVDRDESAAAVP

SEQ ID NO: 7265 - protein, 14 aa, Artificial sequence
  Protein classification predicting sequence
DKPVRIGVNWGSLD

SEQ ID NO: 7266 - protein, 9 aa, Artificial sequence
  Protein classification predicting sequence
KGIVASSAA

SEQ ID NO: 7267 - protein, 14 aa, Artificial sequence
  Protein classification predicting sequence
GIGDTIRISLTPEP

SEQ ID NO: 7268 - protein, 45 aa, Artificial sequence
  Protein classification predicting sequence
GDRTREVQVAQELLQTMGFRQFVPIVAACPGCGRTTSTVFQELAQ

SEQ ID NO: 7269 - protein, 25 aa, Artificial sequence
  Protein classification predicting sequence
EMAIRYDKPVRIGVNWGSLDQELLT

SEQ ID NO: 7270 - protein, 8 aa, Artificial sequence
  Protein classification predicting sequence
VQDLIAVY

SEQ ID NO: 7271 - protein, 8 aa, Artificial sequence
  Protein classification predicting sequence
KGIVASSA

SEQ ID NO: 7272 - protein, 9 aa, Artificial sequence
  Protein classification predicting sequence
WREKYPGVE

SEQ ID NO: 7273 - protein, 7 aa, Artificial sequence
  Protein classification predicting sequence
APVFIDG

SEQ ID NO: 7274 - protein, 8 aa, Artificial sequence
  Protein classification predicting sequence
PIAVQSMT

SEQ ID NO: 7275 - protein, 7 aa, Artificial sequence
  Protein classification predicting sequence
ILSAKVS

SEQ ID NO: 7276 - protein, 23 aa, Artificial sequence
  Protein classification predicting sequence
SLAADPVEEIKVGFDILKSLRIR

SEQ ID NO: 7277 - protein, 17 aa, Artificial sequence
  Protein classification predicting sequence
RIRAKASQLDEARRIDV

SEQ ID NO: 7278 - protein, 11 aa, Artificial sequence
  Protein classification predicting sequence
SQLDEARRIDV

SEQ ID NO: 7279 - protein, 14 aa, Artificial sequence
  Protein classification predicting sequence
CARDKNIPIRIGVN

SEQ ID NO: 7280 - protein, 14 aa, Artificial sequence
  Protein classification predicting sequence
QPLHLGITEAGGAR

SEQ ID NO: 7281 - protein, 16 aa, Artificial sequence
  Protein classification predicting sequence
MDVSIIGCVVNGPGEA

SEQ ID NO: 7282 - protein, 7 aa, Artificial sequence
  Protein classification predicting sequence
RRKSRQI

SEQ ID NO: 7283 - protein, 5 aa, Artificial sequence
  Protein classification predicting sequence
VQSMT

SEQ ID NO: 7284 - protein, 7 aa, Artificial sequence
  Protein classification predicting sequence
PLVADVH

SEQ ID NO: 7285 - protein, 13 aa, Artificial sequence
  Protein classification predicting sequence
VRINPGLYVFEKP

SEQ ID NO: 7286 - protein, 13 aa, Artificial sequence
  Protein classification predicting sequence
YPLHLGVTEAGDG

SEQ ID NO: 7287 - protein, 13 aa, Artificial sequence
  Protein classification predicting sequence
GDTIRVSLTEAPE

SEQ ID NO: 7288 - protein, 7 aa, Artificial sequence
  Protein classification predicting sequence
AGSEIVR

SEQ ID NO: 7289 - protein, 10 aa, Artificial sequence
  Protein classification predicting sequence
GDTIRVSLTE

SEQ ID NO: 7290 - protein, 10 aa, Artificial sequence
  Protein classification predicting sequence
LHRAGSEIVR

SEQ ID NO: 7291 - protein, 9 aa, Artificial sequence
  Protein classification predicting sequence
CPGCGRTTS

SEQ ID NO: 7292 - protein, 13 aa, Artificial sequence
  Protein classification predicting sequence
IPIRIGVNAGSLE

SEQ ID NO: 7293 - protein, 10 aa, Artificial sequence
  Protein classification predicting sequence
PLHLGVTEAG

SEQ ID NO: 7294 - protein, 19 aa, Artificial sequence
  Protein classification predicting sequence
PLHLGVTEAGPAFQGTIKS

SEQ ID NO: 7295 - protein, 7 aa, Artificial sequence
  Protein classification predicting sequence
ESPIKRR

SEQ ID NO: 7296 - protein, 8 aa, Artificial sequence
  Protein classification predicting sequence
GSLEKDLQ

SEQ ID NO: 7297 - protein, 16 aa, Artificial sequence
  Protein classification predicting sequence
QPLHLGITEAGGARAG

SEQ ID NO: 7298 - protein, 38 aa, Artificial sequence
  Protein classification predicting sequence
TPMDVSIIGCVVNGPGEAEVSHLGLAGSNKKSAFYEDG

SEQ ID NO: 7299 - protein, 11 aa, Artificial sequence
  Protein classification predicting sequence
VKSAVGLGMLL

SEQ ID NO: 7300 - protein, 7 aa, Artificial sequence
  Protein classification predicting sequence
LEQRLED

SEQ ID NO: 7301 - protein, 11 aa, Artificial sequence
  Protein classification predicting sequence
IGCVVNGPGEA

SEQ ID NO: 7302 - protein, 8 aa, Artificial sequence
  Protein classification predicting sequence
ESAMRHVD

SEQ ID NO: 7303 - protein, 22 aa, Artificial sequence
  Protein classification predicting sequence
LDRLNFDQFKVSVKASDVFLAV

SEQ ID NO: 7304 - protein, 8 aa, Artificial sequence
  Protein classification predicting sequence
RQKERFDN

SEQ ID NO: 7305 - protein, 24 aa, Artificial sequence
  Protein classification predicting sequence
RLEDIITPMDVSIIGCVVNGPGEA

SEQ ID NO: 7306 - protein, 6 aa, Artificial sequence
  Protein classification predicting sequence
IIRRKS

SEQ ID NO: 7307 - protein, 8 aa, Artificial sequence
  Protein classification predicting sequence
GDFHYNGH

SEQ ID NO: 7308 - protein, 9 aa, Artificial sequence
  Protein classification predicting sequence
LAAQLMDEN

SEQ ID NO: 7309 - protein, 12 aa, Artificial sequence
  Protein classification predicting sequence
VTACPGCGRTTS

SEQ ID NO: 7310 - protein, 8 aa, Artificial sequence
  Protein classification predicting sequence
AALSVLLQ

SEQ ID NO: 7311 - protein, 7 aa, Artificial sequence
  Protein classification predicting sequence
LRGENIA

SEQ ID NO: 7312 - protein, 8 aa, Artificial sequence
  Protein classification predicting sequence
SAAAIPRI

SEQ ID NO: 7313 - protein, 12 aa, Artificial sequence
  Protein classification predicting sequence
SAERAVELGLPR

SEQ ID NO: 7314 - protein, 8 aa, Artificial sequence
  Protein classification predicting sequence
GSKGIVAS

SEQ ID NO: 7315 - protein, 30 aa, Artificial sequence
  Protein classification predicting sequence
MTLAVMGCVVNGPGESRHANIGISLPGTGE

SEQ ID NO: 7316 - protein, 13 aa, Artificial sequence
  Protein classification predicting sequence
PLHLGITEAGGAR

SEQ ID NO: 7317 - protein, 7 aa, Artificial sequence
  Protein classification predicting sequence
VGYDILK

SEQ ID NO: 7318 - protein, 6 aa, Artificial sequence
  Protein classification predicting sequence
VSCPSC

SEQ ID NO: 7319 - protein, 8 aa, Artificial sequence
  Protein classification predicting sequence
PRGFCAGV

SEQ ID NO: 7320 - protein, 12 aa, Artificial sequence
  Protein classification predicting sequence
PRGFCAGVVRAI

SEQ ID NO: 7321 - protein, 8 aa, Artificial sequence
  Protein classification predicting sequence
GAIFVEEL

SEQ ID NO: 7322 - protein, 11 aa, Artificial sequence
  Protein classification predicting sequence
DATCPLVTKVH

SEQ ID NO: 7323 - protein, 6 aa, Artificial sequence
  Protein classification predicting sequence
DICYAT

SEQ ID NO: 7324 - protein, 12 aa, Artificial sequence
  Protein classification predicting sequence
PRGFCAGVDRAI

SEQ ID NO: 7325 - protein, 10 aa, Artificial sequence
  Protein classification predicting sequence
VTQTTLSVDD

SEQ ID NO: 7326 - protein, 10 aa, Artificial sequence
  Protein classification predicting sequence
DICYATQNRQ

SEQ ID NO: 7327 - protein, 7 aa, Artificial sequence
  Protein classification predicting sequence
QTTLSVD

SEQ ID NO: 7328 - protein, 8 aa, Artificial sequence
  Protein classification predicting sequence
PEVLVRGV

SEQ ID NO: 7329 - protein, 11 aa, Artificial sequence
  Protein classification predicting sequence
LAQPRGFCAGV

SEQ ID NO: 7330 - protein, 10 aa, Artificial sequence
  Protein classification predicting sequence
NSSNSNRLRE

SEQ ID NO: 7331 - protein, 11 aa, Artificial sequence
  Protein classification predicting sequence
PVYVRKQIVHN

SEQ ID NO: 7332 - protein, 6 aa, Artificial sequence
  Protein classification predicting sequence
IGHAGH

SEQ ID NO: 7333 - protein, 10 aa, Artificial sequence
  Protein classification predicting sequence
NSSNSRRLVE

SEQ ID NO: 7334 - protein, 14 aa, Artificial sequence
  Protein classification predicting sequence
PVVFSAHGVPKSVP

SEQ ID NO: 7335 - protein, 11 aa, Artificial sequence
  Protein classification predicting sequence
GPRKDDICYAT

SEQ ID NO: 7336 - protein, 7 aa, Artificial sequence
  Protein classification predicting sequence
DDICYAT

SEQ ID NO: 7337 - protein, 11 aa, Artificial sequence
  Protein classification predicting sequence
DDICYATQNRQ

SEQ ID NO: 7338 - protein, 14 aa, Artificial sequence
  Protein classification predicting sequence
DDICYATQNRQDAV

SEQ ID NO: 7339 - protein, 15 aa, Artificial sequence
  Protein classification predicting sequence
DDICYATQNRQDAVR

SEQ ID NO: 7340 - protein, 13 aa, Artificial sequence
  Protein classification predicting sequence
VVGSPNSSNSNRL

SEQ ID NO: 7341 - protein, 17 aa, Artificial sequence
  Protein classification predicting sequence
NLGFVTQTTLSVDDTAG

SEQ ID NO: 7342 - protein, 9 aa, Artificial sequence
  Protein classification predicting sequence
ICYATTNRQ

SEQ ID NO: 7343 - protein, 6 aa, Artificial sequence
  Protein classification predicting sequence
HEIVHN

SEQ ID NO: 7344 - protein, 11 aa, Artificial sequence
  Protein classification predicting sequence
IGITAGASAPE

SEQ ID NO: 7345 - protein, 19 aa, Artificial sequence
  Protein classification predicting sequence
AFGFCWGVERAVAMAYETR

SEQ ID NO: 7346 - protein, 10 aa, Artificial sequence
  Protein classification predicting sequence
DVVILPAFGA

SEQ ID NO: 7347 - protein, 8 aa, Artificial sequence
  Protein classification predicting sequence
ANQTTMLK

SEQ ID NO: 7348 - protein, 13 aa, Artificial sequence
  Protein classification predicting sequence
ILLANPRGFCAGV

SEQ ID NO: 7349 - protein, 11 aa, Artificial sequence
  Protein classification predicting sequence
LANPRGFCAGV

SEQ ID NO: 7350 - protein, 8 aa, Artificial sequence
  Protein classification predicting sequence
GHPEVEGT

SEQ ID NO: 7351 - protein, 18 aa, Artificial sequence
  Protein classification predicting sequence
DICYATQNRQDAVKFMAP

SEQ ID NO: 7352 - protein, 6 aa, Artificial sequence
  Protein classification predicting sequence
AHGVSP

SEQ ID NO: 7353 - protein, 11 aa, Artificial sequence
  Protein classification predicting sequence
TNQTTMSQWDV

SEQ ID NO: 7354 - protein, 18 aa, Artificial sequence
  Protein classification predicting sequence
IVVGDPKSNNSNRLAQVS

SEQ ID NO: 7355 - protein, 8 aa, Artificial sequence
  Protein classification predicting sequence
VTAGASTP

SEQ ID NO: 7356 - protein, 6 aa, Artificial sequence
  Protein classification predicting sequence
IDATCP

SEQ ID NO: 7357 - protein, 7 aa, Artificial sequence
  Protein classification predicting sequence
HPEPEGA

SEQ ID NO: 7358 - protein, 7 aa, Artificial sequence
  Protein classification predicting sequence
APDIVHL

SEQ ID NO: 7359 - protein, 6 aa, Artificial sequence
  Protein classification predicting sequence
HVTDAF

SEQ ID NO: 7360 - protein, 7 aa, Artificial sequence
  Protein classification predicting sequence
TSGASTP

SEQ ID NO: 7361 - protein, 13 aa, Artificial sequence
  Protein classification predicting sequence
GASTPTPITKEVI

SEQ ID NO: 7362 - protein, 12 aa, Artificial sequence
  Protein classification predicting sequence
IDATCPDVTKTH

SEQ ID NO: 7363 - protein, 10 aa, Artificial sequence
  Protein classification predicting sequence
GYHVIYIGKK

SEQ ID NO: 7364 - protein, 27 aa, Artificial sequence
  Protein classification predicting sequence
LALKKYGAPVYVRHEIVHNRYVVEGLQ

SEQ ID NO: 7365 - protein, 18 aa, Artificial sequence
  Protein classification predicting sequence
HRNQPVVFSAHGVPKSVP

SEQ ID NO: 7366 - protein, 8 aa, Artificial sequence
  Protein classification predicting sequence
RHVILIGH

SEQ ID NO: 7367 - protein, 10 aa, Artificial sequence
  Protein classification predicting sequence
VTLIETVEDA

SEQ ID NO: 7368 - protein, 14 aa, Artificial sequence
  Protein classification predicting sequence
PAAESICYATTNRQ

SEQ ID NO: 7369 - protein, 16 aa, Artificial sequence
  Protein classification predicting sequence
LSAGASAPEIIVDEII

SEQ ID NO: 7370 - protein, 11 aa, Artificial sequence
  Protein classification predicting sequence
LGFVTQTTLSV

SEQ ID NO: 7371 - protein, 7 aa, Artificial sequence
  Protein classification predicting sequence
IVHNKHV

SEQ ID NO: 7372 - protein, 6 aa, Artificial sequence
  Protein classification predicting sequence
IGHKGH

SEQ ID NO: 7373 - protein, 10 aa, Artificial sequence
  Protein classification predicting sequence
SQTTLSVDET

SEQ ID NO: 7374 - protein, 6 aa, Artificial sequence
  Protein classification predicting sequence
NRQDAV

SEQ ID NO: 7375 - protein, 8 aa, Artificial sequence
  Protein classification predicting sequence
NSSNSNRL

SEQ ID NO: 7376 - protein, 10 aa, Artificial sequence
  Protein classification predicting sequence
ATCPLVTKVH

SEQ ID NO: 7377 - protein, 11 aa, Artificial sequence
  Protein classification predicting sequence
TAGASAPDILV

SEQ ID NO: 7378 - protein, 7 aa, Artificial sequence
  Protein classification predicting sequence
IIRTHGI

SEQ ID NO: 7379 - protein, 10 aa, Artificial sequence
  Protein classification predicting sequence
AGASTPDWII

SEQ ID NO: 7380 - protein, 14 aa, Artificial sequence
  Protein classification predicting sequence
PHKEDICYATTNRQ

SEQ ID NO: 7381 - protein, 10 aa, Artificial sequence
  Protein classification predicting sequence
VVGSKNSSNS

SEQ ID NO: 7382 - protein, 8 aa, Artificial sequence
  Protein classification predicting sequence
NSSNSVRL

SEQ ID NO: 7383 - protein, 9 aa, Artificial sequence
  Protein classification predicting sequence
SSNSNRLRE

SEQ ID NO: 7384 - protein, 6 aa, Artificial sequence
  Protein classification predicting sequence
GAIFIE

SEQ ID NO: 7385 - protein, 5 aa, Artificial sequence
  Protein classification predicting sequence
IDATC

SEQ ID NO: 7386 - protein, 7 aa, Artificial sequence
  Protein classification predicting sequence
FVYVIGD

SEQ ID NO: 7387 - protein, 10 aa, Artificial sequence
  Protein classification predicting sequence
HEIVHNRHVV

SEQ ID NO: 7388 - protein, 12 aa, Artificial sequence
  Protein classification predicting sequence
PIYVRHEVVHNR

SEQ ID NO: 7389 - protein, 8 aa, Artificial sequence
  Protein classification predicting sequence
GHEGHEEV

SEQ ID NO: 7390 - protein, 13 aa, Artificial sequence
  Protein classification predicting sequence
WLSQTTLSVDETM

SEQ ID NO: 7391 - protein, 22 aa, Artificial sequence
  Protein classification predicting sequence
LQDPPSDDICYATQNRQVAVKA

SEQ ID NO: 7392 - protein, 8 aa, Artificial sequence
  Protein classification predicting sequence
CPLVTKVH

SEQ ID NO: 7393 - protein, 7 aa, Artificial sequence
  Protein classification predicting sequence
EVEGTMG

SEQ ID NO: 7394 - protein, 6 aa, Artificial sequence
  Protein classification predicting sequence
ATQNRQ

SEQ ID NO: 7395 - protein, 8 aa, Artificial sequence
  Protein classification predicting sequence
GTPAYLID

SEQ ID NO: 7396 - protein, 7 aa, Artificial sequence
  Protein classification predicting sequence
RGAIFIE

SEQ ID NO: 7397 - protein, 7 aa, Artificial sequence
  Protein classification predicting sequence
AFLIDDA

SEQ ID NO: 7398 - protein, 18 aa, Artificial sequence
  Protein classification predicting sequence
CVGVTAGASAPDILVQNV

SEQ ID NO: 7399 - protein, 19 aa, Artificial sequence
  Protein classification predicting sequence
LEGREENIVFEVPKELRVD

SEQ ID NO: 7400 - protein, 6 aa, Artificial sequence
  Protein classification predicting sequence
SAHGVS

SEQ ID NO: 7401 - protein, 7 aa, Artificial sequence
  Protein classification predicting sequence
PDKLAYV

SEQ ID NO: 7402 - protein, 7 aa, Artificial sequence
  Protein classification predicting sequence
TAGASAP

SEQ ID NO: 7403 - protein, 7 aa, Artificial sequence
  Protein classification predicting sequence
GGMYLVE

SEQ ID NO: 7404 - protein, 12 aa, Artificial sequence
  Protein classification predicting sequence
FMTQTTLSVDDT

SEQ ID NO: 7405 - protein, 16 aa, Artificial sequence
  Protein classification predicting sequence
GREENIVFEVPKELRV

SEQ ID NO: 7406 - protein, 7 aa, Artificial sequence
  Protein classification predicting sequence
RAVETVE

SEQ ID NO: 7407 - protein, 9 aa, Artificial sequence
  Protein classification predicting sequence
YVRHEVVHN

SEQ ID NO: 7408 - protein, 9 aa, Artificial sequence
  Protein classification predicting sequence
QTTLSVDET

SEQ ID NO: 7409 - protein, 6 aa, Artificial sequence
  Protein classification predicting sequence
VFDATC

SEQ ID NO: 7410 - protein, 21 aa, Artificial sequence
  Protein classification predicting sequence
PRGYCYGVVDAMVIARNAALD

SEQ ID NO: 7411 - protein, 9 aa, Artificial sequence
  Protein classification predicting sequence
HKEICLATQ

SEQ ID NO: 7412 - protein, 7 aa, Artificial sequence
  Protein classification predicting sequence
TIVVGDP

SEQ ID NO: 7413 - protein, 11 aa, Artificial sequence
  Protein classification predicting sequence
SNNSNRLAQVS

SEQ ID NO: 7414 - protein, 9 aa, Artificial sequence
  Protein classification predicting sequence
GFCFGVKRA

SEQ ID NO: 7415 - protein, 7 aa, Artificial sequence
  Protein classification predicting sequence
VIGGFNS

SEQ ID NO: 7416 - protein, 10 aa, Artificial sequence
  Protein classification predicting sequence
WITNEIIHNP

SEQ ID NO: 7417 - protein, 6 aa, Artificial sequence
  Protein classification predicting sequence
TICDAT

SEQ ID NO: 7418 - protein, 12 aa, Artificial sequence
  Protein classification predicting sequence
NSSNTTHLQEIA

SEQ ID NO: 7419 - protein, 18 aa, Artificial sequence
  Protein classification predicting sequence
IVIFSAHGVSQAVRQEAK

SEQ ID NO: 7420 - protein, 15 aa, Artificial sequence
  Protein classification predicting sequence
LKVFDATCPLVTKVH

SEQ ID NO: 7421 - protein, 22 aa, Artificial sequence
  Protein classification predicting sequence
LKVFDATCPLVTKVHMQVARAS

SEQ ID NO: 7422 - protein, 10 aa, Artificial sequence
  Protein classification predicting sequence
KGTKAILIGH

SEQ ID NO: 7423 - protein, 7 aa, Artificial sequence
  Protein classification predicting sequence
LVETVED

SEQ ID NO: 7424 - protein, 8 aa, Artificial sequence
  Protein classification predicting sequence
FMTQTTLS

SEQ ID NO: 7425 - protein, 6 aa, Artificial sequence
  Protein classification predicting sequence
IQGPRK

SEQ ID NO: 7426 - protein, 8 aa, Artificial sequence
  Protein classification predicting sequence
LRERGAIF

SEQ ID NO: 7427 - protein, 11 aa, Artificial sequence
  Protein classification predicting sequence
GHPEVEGTMGQ

SEQ ID NO: 7428 - protein, 6 aa, Artificial sequence
  Protein classification predicting sequence
TQTTLS

SEQ ID NO: 7429 - protein, 8 aa, Artificial sequence
  Protein classification predicting sequence
KYPAIQGP

SEQ ID NO: 7430 - protein, 10 aa, Artificial sequence
  Protein classification predicting sequence
DICYATTNRQ

SEQ ID NO: 7431 - protein, 15 aa, Artificial sequence
  Protein classification predicting sequence
LANPRGFCAGVDRAI

SEQ ID NO: 7432 - protein, 7 aa, Artificial sequence
  Protein classification predicting sequence
VHNKYVV

SEQ ID NO: 7433 - protein, 6 aa, Artificial sequence
  Protein classification predicting sequence
YLVESP

SEQ ID NO: 7434 - protein, 9 aa, Artificial sequence
  Protein classification predicting sequence
GREENITFS

SEQ ID NO: 7435 - protein, 6 aa, Artificial sequence
  Protein classification predicting sequence
IGHEGH

SEQ ID NO: 7436 - protein, 6 aa, Artificial sequence
  Protein classification predicting sequence
QTTLSV

SEQ ID NO: 7437 - protein, 13 aa, Artificial sequence
  Protein classification predicting sequence
KGLTTIDATCPDV

SEQ ID NO: 7438 - protein, 10 aa, Artificial sequence
  Protein classification predicting sequence
ADLTIVVGDP

SEQ ID NO: 7439 - protein, 7 aa, Artificial sequence
  Protein classification predicting sequence
AGTKAYR

SEQ ID NO: 7440 - protein, 10 aa, Artificial sequence
  Protein classification predicting sequence
TQTTLSIDDT

SEQ ID NO: 7441 - protein, 13 aa, Artificial sequence
  Protein classification predicting sequence
VVGSKNSSNSNRL

SEQ ID NO: 7442 - protein, 9 aa, Artificial sequence
  Protein classification predicting sequence
FVEELSEVP

SEQ ID NO: 7443 - protein, 25 aa, Artificial sequence
  Protein classification predicting sequence
RKRVLLAEPRGYCAGVDRAVETVER

SEQ ID NO: 7444 - protein, 7 aa, Artificial sequence
  Protein classification predicting sequence
HVQLVDG

SEQ ID NO: 7445 - protein, 8 aa, Artificial sequence
  Protein classification predicting sequence
LVFALPRE

SEQ ID NO: 7446 - protein, 7 aa, Artificial sequence
  Protein classification predicting sequence
VQPVTTA

SEQ ID NO: 7447 - protein, 19 aa, Artificial sequence
  Protein classification predicting sequence
LANPRGFCAGVDRAISIVE

SEQ ID NO: 7448 - protein, 12 aa, Artificial sequence
  Protein classification predicting sequence
KVGVTAGASAPE

SEQ ID NO: 7449 - protein, 8 aa, Artificial sequence
  Protein classification predicting sequence
TAGASAPE

SEQ ID NO: 7450 - protein, 15 aa, Artificial sequence
  Protein classification predicting sequence
PRGFCAGVDRAIEIV

SEQ ID NO: 7451 - protein, 6 aa, Artificial sequence
  Protein classification predicting sequence
EIVHNR

SEQ ID NO: 7452 - protein, 7 aa, Artificial sequence
  Protein classification predicting sequence
GITSGAS

SEQ ID NO: 7453 - protein, 9 aa, Artificial sequence
  Protein classification predicting sequence
RGAIFVEEL

SEQ ID NO: 7454 - protein, 12 aa, Artificial sequence
  Protein classification predicting sequence
FDATCPLVTKVH

SEQ ID NO: 7455 - protein, 22 aa, Artificial sequence
  Protein classification predicting sequence
VVLVVGSKNSSNSNRLAELAQR

SEQ ID NO: 7456 - protein, 23 aa, Artificial sequence
  Protein classification predicting sequence
LANPRGFCAGVDRAISIVERALE

SEQ ID NO: 7457 - protein, 11 aa, Artificial sequence
  Protein classification predicting sequence
PIYVRHEVVHN

SEQ ID NO: 7458 - protein, 12 aa, Artificial sequence
  Protein classification predicting sequence
IFSAHGVSQAVR

SEQ ID NO: 7459 - protein, 25 aa, Artificial sequence
  Protein classification predicting sequence
VKDPSNLHYVSQTTLSVDETADVID

SEQ ID NO: 7460 - protein, 8 aa, Artificial sequence
  Protein classification predicting sequence
GHEEVEGT

SEQ ID NO: 7461 - protein, 8 aa, Artificial sequence
  Protein classification predicting sequence
FNTICDAT

SEQ ID NO: 7462 - protein, 12 aa, Artificial sequence
  Protein classification predicting sequence
KHEETLATSSFA

SEQ ID NO: 7463 - protein, 7 aa, Artificial sequence
  Protein classification predicting sequence
LIGHEGH

SEQ ID NO: 7464 - protein, 7 aa, Artificial sequence
  Protein classification predicting sequence
VTQTTLS

SEQ ID NO: 7465 - protein, 10 aa, Artificial sequence
  Protein classification predicting sequence
VIDALRKRFP

SEQ ID NO: 7466 - protein, 21 aa, Artificial sequence
  Protein classification predicting sequence
ADAEVLLAQPRGFCAGVDRAI

SEQ ID NO: 7467 - protein, 9 aa, Artificial sequence
  Protein classification predicting sequence
GAPIYVRHE

SEQ ID NO: 7468 - protein, 15 aa, Artificial sequence
  Protein classification predicting sequence
VVGSPNSSNSNRLRE

SEQ ID NO: 7469 - protein, 20 aa, Artificial sequence
  Protein classification predicting sequence
GLSAGASAPEIIVDEIIDAF

SEQ ID NO: 7470 - protein, 25 aa, Artificial sequence
  Protein classification predicting sequence
IRLCGPRGFCAGVDRAIQIVVLALK

SEQ ID NO: 7471 - protein, 20 aa, Artificial sequence
  Protein classification predicting sequence
GAPVYVRHEIVHNRYVVEGL

SEQ ID NO: 7472 - protein, 22 aa, Artificial sequence
  Protein classification predicting sequence
NLFYLDATCPLVSKVHKQAMRH

SEQ ID NO: 7473 - protein, 8 aa, Artificial sequence
  Protein classification predicting sequence
LVEDEADV

SEQ ID NO: 7474 - protein, 9 aa, Artificial sequence
  Protein classification predicting sequence
TQTTLSVDD

SEQ ID NO: 7475 - protein, 8 aa, Artificial sequence
  Protein classification predicting sequence
CYATQNRQ

SEQ ID NO: 7476 - protein, 90 aa, Artificial sequence
  Protein classification predicting sequence
RGAIFIEQISEVPDGAILIFSAHGVSQAVRNEAKSRDLTVFDATCPLVTKVHMEVARASRRGEESILIGHAGHPEVEGTMGQYSNPEGGM

SEQ ID NO: 7477 - protein, 7 aa, Artificial sequence
  Protein classification predicting sequence
DATCPLV

SEQ ID NO: 7478 - protein, 11 aa, Artificial sequence
  Protein classification predicting sequence
DATCPLVSKVH

SEQ ID NO: 7479 - protein, 9 aa, Artificial sequence
  Protein classification predicting sequence
VGAPNSSNS

SEQ ID NO: 7480 - protein, 14 aa, Artificial sequence
  Protein classification predicting sequence
PPSDDICYATQNRQ

SEQ ID NO: 7481 - protein, 5 aa, Artificial sequence
  Protein classification predicting sequence
PRGYC

SEQ ID NO: 7482 - protein, 12 aa, Artificial sequence
  Protein classification predicting sequence
GTVIFTAHGVSP

SEQ ID NO: 7483 - protein, 7 aa, Artificial sequence
  Protein classification predicting sequence
EICLATQ

SEQ ID NO: 7484 - protein, 7 aa, Artificial sequence
  Protein classification predicting sequence
AFKRSLH

SEQ ID NO: 7485 - protein, 11 aa, Artificial sequence
  Protein classification predicting sequence
DTTCPWVSKVW

SEQ ID NO: 7486 - protein, 10 aa, Artificial sequence
  Protein classification predicting sequence
ATSSFAGTYL

SEQ ID NO: 7487 - protein, 6 aa, Artificial sequence
  Protein classification predicting sequence
ATSSFA

SEQ ID NO: 7488 - protein, 12 aa, Artificial sequence
  Protein classification predicting sequence
ANQTTMLKSETE

SEQ ID NO: 7489 - protein, 5 aa, Artificial sequence
  Protein classification predicting sequence
FNTIC

SEQ ID NO: 7490 - protein, 12 aa, Artificial sequence
  Protein classification predicting sequence
PRGYCAGVDRAV

SEQ ID NO: 7491 - protein, 16 aa, Artificial sequence
  Protein classification predicting sequence
QDPPSDDICYATQNRQ

SEQ ID NO: 7492 - protein, 9 aa, Artificial sequence
  Protein classification predicting sequence
GVTAGASAP

SEQ ID NO: 7493 - protein, 7 aa, Artificial sequence
  Protein classification predicting sequence
FEVPKEL

SEQ ID NO: 7494 - protein, 15 aa, Artificial sequence
  Protein classification predicting sequence
PIYVRHEVVHNRFVV

SEQ ID NO: 7495 - protein, 6 aa, Artificial sequence
  Protein classification predicting sequence
GMYLVE

SEQ ID NO: 7496 - protein, 17 aa, Artificial sequence
  Protein classification predicting sequence
GREENMFFEVPKELQIK

SEQ ID NO: 7497 - protein, 17 aa, Artificial sequence
  Protein classification predicting sequence
LIGHAGHPEVEGTMGQY

SEQ ID NO: 7498 - protein, 18 aa, Artificial sequence
  Protein classification predicting sequence
LHYVSQTTLSVDETADVI

SEQ ID NO: 7499 - protein, 10 aa, Artificial sequence
  Protein classification predicting sequence
KVALVSQTTK

SEQ ID NO: 7500 - protein, 7 aa, Artificial sequence
  Protein classification predicting sequence
NHPEVKG

SEQ ID NO: 7501 - protein, 13 aa, Artificial sequence
  Protein classification predicting sequence
VIFSAHGVSQAVR

SEQ ID NO: 7502 - protein, 12 aa, Artificial sequence
  Protein classification predicting sequence
LKQRGAIFVEEL

SEQ ID NO: 7503 - protein, 13 aa, Artificial sequence
  Protein classification predicting sequence
VFDATCPLVTKVH

SEQ ID NO: 7504 - protein, 10 aa, Artificial sequence
  Protein classification predicting sequence
TQTTLSVDDT

SEQ ID NO: 7505 - protein, 13 aa, Artificial sequence
  Protein classification predicting sequence
DICYATQNRQDAV

SEQ ID NO: 7506 - protein, 9 aa, Artificial sequence
  Protein classification predicting sequence
CDLVLVVGS

SEQ ID NO: 7507 - protein, 22 aa, Artificial sequence
  Protein classification predicting sequence
CDLVLVVGSPNSSNSNRLSELA

SEQ ID NO: 7508 - protein, 10 aa, Artificial sequence
  Protein classification predicting sequence
PESMVFALPK

SEQ ID NO: 7509 - protein, 7 aa, Artificial sequence
  Protein classification predicting sequence
VHNRYVV

SEQ ID NO: 7510 - protein, 25 aa, Artificial sequence
  Protein classification predicting sequence
RFPKIVGPRKDDICYATTNRQEAVR

SEQ ID NO: 7511 - protein, 9 aa, Artificial sequence
  Protein classification predicting sequence
KYLPKLISG

SEQ ID NO: 7512 - protein, 10 aa, Artificial sequence
  Protein classification predicting sequence
KLDKLGMRGS

SEQ ID NO: 7513 - protein, 18 aa, Artificial sequence
  Protein classification predicting sequence
KGVYVLMSGLDLERLVLA

SEQ ID NO: 7514 - protein, 14 aa, Artificial sequence
  Protein classification predicting sequence
AQKEKYLPKLISGE

SEQ ID NO: 7515 - protein, 15 aa, Artificial sequence
  Protein classification predicting sequence
GALAMSEPNAGSDVV

SEQ ID NO: 7516 - protein, 15 aa, Artificial sequence
  Protein classification predicting sequence
LRDAKLYEIGAGTSE

SEQ ID NO: 7517 - protein, 9 aa, Artificial sequence
  Protein classification predicting sequence
KDCAGVILY

SEQ ID NO: 7518 - protein, 18 aa, Artificial sequence
  Protein classification predicting sequence
IGALAMSEPNAGSDVVSM

SEQ ID NO: 7519 - protein, 22 aa, Artificial sequence
  Protein classification predicting sequence
AGADGVEIHSANGYLLNQFLDP

SEQ ID NO: 7520 - protein, 7 aa, Artificial sequence
  Protein classification predicting sequence
LVEPRVT

SEQ ID NO: 7521 - protein, 9 aa, Artificial sequence
  Protein classification predicting sequence
SIHWHGFFQ

SEQ ID NO: 7522 - protein, 6 aa, Artificial sequence
  Protein classification predicting sequence
FVNQCP

SEQ ID NO: 7523 - protein, 19 aa, Artificial sequence
  Protein classification predicting sequence
GTFWYHSHLSTQYCDGLRG

SEQ ID NO: 7524 - protein, 7 aa, Artificial sequence
  Protein classification predicting sequence
NPPRRDV

SEQ ID NO: 7525 - protein, 12 aa, Artificial sequence
  Protein classification predicting sequence
WFLHCHIDWHLE

SEQ ID NO: 7526 - protein, 7 aa, Artificial sequence
  Protein classification predicting sequence
TECPIPP

SEQ ID NO: 7527 - protein, 5 aa, Artificial sequence
  Protein classification predicting sequence
WYHSH

SEQ ID NO: 7528 - protein, 8 aa, Artificial sequence
  Protein classification predicting sequence
GVFPGPLI

SEQ ID NO: 7529 - protein, 8 aa, Artificial sequence
  Protein classification predicting sequence
IHWHGFFQ

SEQ ID NO: 7530 - protein, 10 aa, Artificial sequence
  Protein classification predicting sequence
GKRYRFRLVS

SEQ ID NO: 7531 - protein, 6 aa, Artificial sequence
  Protein classification predicting sequence
SFLYDF

SEQ ID NO: 7532 - protein, 8 aa, Artificial sequence
  Protein classification predicting sequence
VDSIQIFA

SEQ ID NO: 7533 - protein, 7 aa, Artificial sequence
  Protein classification predicting sequence
DNVTIRF

SEQ ID NO: 7534 - protein, 12 aa, Artificial sequence
  Protein classification predicting sequence
NPGPWFLHCHID

SEQ ID NO: 7535 - protein, 6 aa, Artificial sequence
  Protein classification predicting sequence
NYWIRA

SEQ ID NO: 7536 - protein, 12 aa, Artificial sequence
  Protein classification predicting sequence
FPLGADATLING

SEQ ID NO: 7537 - protein, 10 aa, Artificial sequence
  Protein classification predicting sequence
GGINSAILRY

SEQ ID NO: 7538 - protein, 7 aa, Artificial sequence
  Protein classification predicting sequence
QRYSFVL

SEQ ID NO: 7539 - protein, 18 aa, Artificial sequence
  Protein classification predicting sequence
QYGTSWYHSHFSAQYGNG

SEQ ID NO: 7540 - protein, 6 aa, Artificial sequence
  Protein classification predicting sequence
DGLRGP

SEQ ID NO: 7541 - protein, 6 aa, Artificial sequence
  Protein classification predicting sequence
WYHSHL

SEQ ID NO: 7542 - protein, 12 aa, Artificial sequence
  Protein classification predicting sequence
DGLRGPLVIYDP

SEQ ID NO: 7543 - protein, 12 aa, Artificial sequence
  Protein classification predicting sequence
PNYVNPPRRDVV

SEQ ID NO: 7544 - protein, 5 aa, Artificial sequence
  Protein classification predicting sequence
HCHID

SEQ ID NO: 7545 - protein, 23 aa, Artificial sequence
  Protein classification predicting sequence
DQAGTFWYHSHLSTQYCDGLRGP

SEQ ID NO: 7546 - protein, 7 aa, Artificial sequence
  Protein classification predicting sequence
DWYHTAA

SEQ ID NO: 7547 - protein, 12 aa, Artificial sequence
  Protein classification predicting sequence
FSIDGHNMTIIE

SEQ ID NO: 7548 - protein, 6 aa, Artificial sequence
  Protein classification predicting sequence
VDSIQI

SEQ ID NO: 7549 - protein, 8 aa, Artificial sequence
  Protein classification predicting sequence
GDNVTIRF

SEQ ID NO: 7550 - protein, 17 aa, Artificial sequence
  Protein classification predicting sequence
TDNPGPWFLHCHIDFHL

SEQ ID NO: 7551 - protein, 7 aa, Artificial sequence
  Protein classification predicting sequence
MDSGFDG

SEQ ID NO: 7552 - protein, 6 aa, Artificial sequence
  Protein classification predicting sequence
DCKDAD

SEQ ID NO: 7553 - protein, 8 aa, Artificial sequence
  Protein classification predicting sequence
QKPGETRL

SEQ ID NO: 7554 - protein, 19 aa, Artificial sequence
  Protein classification predicting sequence
KVILVGDGAVGSSYAFALV

SEQ ID NO: 7555 - protein, 26 aa, Artificial sequence
  Protein classification predicting sequence
KVILVGDGAVGSSYAFALVTQNIAQE

SEQ ID NO: 7556 - protein, 9 aa, Artificial sequence
  Protein classification predicting sequence
DCHDADLVV

SEQ ID NO: 7557 - protein, 16 aa, Artificial sequence
  Protein classification predicting sequence
TAGAPQKPGETRLDLV

SEQ ID NO: 7558 - protein, 31 aa, Artificial sequence
  Protein classification predicting sequence
LTYSTWKFSGFPKERVIGSGTSLDSARFRQA

SEQ ID NO: 7559 - protein, 9 aa, Artificial sequence
  Protein classification predicting sequence
GEHGDTEFP

SEQ ID NO: 7560 - protein, 8 aa, Artificial sequence
  Protein classification predicting sequence
KKGATFYG

SEQ ID NO: 7561 - protein, 15 aa, Artificial sequence
  Protein classification predicting sequence
YGIAVALARITKAIL

SEQ ID NO: 7562 - protein, 7 aa, Artificial sequence
  Protein classification predicting sequence
NPVDILT

SEQ ID NO: 7563 - protein, 18 aa, Artificial sequence
  Protein classification predicting sequence
IVASGFKGIFLVAANPVD

SEQ ID NO: 7564 - protein, 11 aa, Artificial sequence
  Protein classification predicting sequence
GIFLVAANPVD

SEQ ID NO: 7565 - protein, 7 aa, Artificial sequence
  Protein classification predicting sequence
GSGTSLD

SEQ ID NO: 7566 - protein, 10 aa, Artificial sequence
  Protein classification predicting sequence
ARFRQALAEK

SEQ ID NO: 7567 - protein, 18 aa, Artificial sequence
  Protein classification predicting sequence
QLKAIIDEAFAKEEFASA

SEQ ID NO: 7568 - protein, 10 aa, Artificial sequence
  Protein classification predicting sequence
DADLVVITAG

SEQ ID NO: 7569 - protein, 10 aa, Artificial sequence
  Protein classification predicting sequence
GTSLDSSRLR

SEQ ID NO: 7570 - protein, 6 aa, Artificial sequence
  Protein classification predicting sequence
PRSVDA

SEQ ID NO: 7571 - protein, 7 aa, Artificial sequence
  Protein classification predicting sequence
DENAVLP

SEQ ID NO: 7572 - protein, 8 aa, Artificial sequence
  Protein classification predicting sequence
PVVLGANG

SEQ ID NO: 7573 - protein, 6 aa, Artificial sequence
  Protein classification predicting sequence
NPVDIL

SEQ ID NO: 7574 - protein, 7 aa, Artificial sequence
  Protein classification predicting sequence
KGATYYG

SEQ ID NO: 7575 - protein, 20 aa, Artificial sequence
  Protein classification predicting sequence
YAFSLVNQSIVDELVIIDLD

SEQ ID NO: 7576 - protein, 5 aa, Artificial sequence
  Protein classification predicting sequence
VWSHA

SEQ ID NO: 7577 - protein, 7 aa, Artificial sequence
  Protein classification predicting sequence
NVRDAAY

SEQ ID NO: 7578 - protein, 6 aa, Artificial sequence
  Protein classification predicting sequence
KLKGYT

SEQ ID NO: 7579 - protein, 8 aa, Artificial sequence
  Protein classification predicting sequence
AGANQKPG

SEQ ID NO: 7580 - protein, 6 aa, Artificial sequence
  Protein classification predicting sequence
LTYVAW

SEQ ID NO: 7581 - protein, 8 aa, Artificial sequence
  Protein classification predicting sequence
GTSLDTAR

SEQ ID NO: 7582 - protein, 7 aa, Artificial sequence
  Protein classification predicting sequence
KGATFYG

SEQ ID NO: 7583 - protein, 8 aa, Artificial sequence
  Protein classification predicting sequence
WSHTTVGG

SEQ ID NO: 7584 - protein, 6 aa, Artificial sequence
  Protein classification predicting sequence
YEDCKD

SEQ ID NO: 7585 - protein, 7 aa, Artificial sequence
  Protein classification predicting sequence
ACAISIL

SEQ ID NO: 7586 - protein, 6 aa, Artificial sequence
  Protein classification predicting sequence
TAGARQ

SEQ ID NO: 7587 - protein, 9 aa, Artificial sequence
  Protein classification predicting sequence
NPVDILTYV

SEQ ID NO: 7588 - protein, 6 aa, Artificial sequence
  Protein classification predicting sequence
RVIGSG

SEQ ID NO: 7589 - protein, 6 aa, Artificial sequence
  Protein classification predicting sequence
KGYTSW

SEQ ID NO: 7590 - protein, 8 aa, Artificial sequence
  Protein classification predicting sequence
KNLRRVHP

SEQ ID NO: 7591 - protein, 6 aa, Artificial sequence
  Protein classification predicting sequence
FLSVPC

SEQ ID NO: 7592 - protein, 7 aa, Artificial sequence
  Protein classification predicting sequence
DELALVD

SEQ ID NO: 7593 - protein, 7 aa, Artificial sequence
  Protein classification predicting sequence
EDKLKGE

SEQ ID NO: 7594 - protein, 7 aa, Artificial sequence
  Protein classification predicting sequence
YSPHCKL

SEQ ID NO: 7595 - protein, 8 aa, Artificial sequence
  Protein classification predicting sequence
IGSGCNLD

SEQ ID NO: 7596 - protein, 12 aa, Artificial sequence
  Protein classification predicting sequence
CKLLVVSNPVDI

SEQ ID NO: 7597 - protein, 6 aa, Artificial sequence
  Protein classification predicting sequence
TYVAWK

SEQ ID NO: 7598 - protein, 9 aa, Artificial sequence
  Protein classification predicting sequence
MKNLRRVHP

SEQ ID NO: 7599 - protein, 7 aa, Artificial sequence
  Protein classification predicting sequence
VFLSVPC

SEQ ID NO: 7600 - protein, 16 aa, Artificial sequence
  Protein classification predicting sequence
NKITVVGVGAVGMACA

SEQ ID NO: 7601 - protein, 16 aa, Artificial sequence
  Protein classification predicting sequence
SILMKDLADELALVDV

SEQ ID NO: 7602 - protein, 5 aa, Artificial sequence
  Protein classification predicting sequence
SCHGW

SEQ ID NO: 7603 - protein, 25 aa, Artificial sequence
  Protein classification predicting sequence
SAYEVIKLKGYTSWAIGLSVADLAE

SEQ ID NO: 7604 - protein, 8 aa, Artificial sequence
  Protein classification predicting sequence
MTLKPEEE

SEQ ID NO: 7605 - protein, 14 aa, Artificial sequence
  Protein classification predicting sequence
VSNPVDILTYVAWK

SEQ ID NO: 7606 - protein, 6 aa, Artificial sequence
  Protein classification predicting sequence
WKAVHK

SEQ ID NO: 7607 - protein, 7 aa, Artificial sequence
  Protein classification predicting sequence
STKEKLI

SEQ ID NO: 7608 - protein, 7 aa, Artificial sequence
  Protein classification predicting sequence
SILLKDL

SEQ ID NO: 7609 - protein, 6 aa, Artificial sequence
  Protein classification predicting sequence
HPSSCH

SEQ ID NO: 7610 - protein, 7 aa, Artificial sequence
  Protein classification predicting sequence
HPVSTLV

SEQ ID NO: 7611 - protein, 15 aa, Artificial sequence
  Protein classification predicting sequence
RVIGSGCNLDSARFR

SEQ ID NO: 7612 - protein, 7 aa, Artificial sequence
  Protein classification predicting sequence
LMGERLG

SEQ ID NO: 7613 - protein, 6 aa, Artificial sequence
  Protein classification predicting sequence
WKEVHK

SEQ ID NO: 7614 - protein, 8 aa, Artificial sequence
  Protein classification predicting sequence
KVTVVGVG

SEQ ID NO: 7615 - protein, 9 aa, Artificial sequence
  Protein classification predicting sequence
DLQHGSLFL

SEQ ID NO: 7616 - protein, 9 aa, Artificial sequence
  Protein classification predicting sequence
SGKDYSVTA

SEQ ID NO: 7617 - protein, 7 aa, Artificial sequence
  Protein classification predicting sequence
KDYSVTA

SEQ ID NO: 7618 - protein, 20 aa, Artificial sequence
  Protein classification predicting sequence
VSNPVDILTYVAWKISGFPK

SEQ ID NO: 7619 - protein, 12 aa, Artificial sequence
  Protein classification predicting sequence
GIKDDVFLSVPC

SEQ ID NO: 7620 - protein, 12 aa, Artificial sequence
  Protein classification predicting sequence
GIKEDVFLSVPC

SEQ ID NO: 7621 - protein, 12 aa, Artificial sequence
  Protein classification predicting sequence
GEKLHLHPSSCH

SEQ ID NO: 7622 - protein, 6 aa, Artificial sequence
  Protein classification predicting sequence
DSENWK

SEQ ID NO: 7623 - protein, 10 aa, Artificial sequence
  Protein classification predicting sequence
HKVHPVSTLV

SEQ ID NO: 7624 - protein, 6 aa, Artificial sequence
  Protein classification predicting sequence
LQGLNP

SEQ ID NO: 7625 - protein, 9 aa, Artificial sequence
  Protein classification predicting sequence
LGNSGLTDV

SEQ ID NO: 7626 - protein, 17 aa, Artificial sequence
  Protein classification predicting sequence
EEKQLVKSAETLWGVQK

SEQ ID NO: 7627 - protein, 22 aa, Artificial sequence
  Protein classification predicting sequence
VLGNSGLTDVIHMTLKAEEEKQ

SEQ ID NO: 7628 - protein, 24 aa, Artificial sequence
  Protein classification predicting sequence
VDVMEDKLKGEVMDLQHGSLFLKT

SEQ ID NO: 7629 - protein, 14 aa, Artificial sequence
  Protein classification predicting sequence
KIVGDKDYSVTANS

SEQ ID NO: 7630 - protein, 9 aa, Artificial sequence
  Protein classification predicting sequence
KDYSVTANS

SEQ ID NO: 7631 - protein, 7 aa, Artificial sequence
  Protein classification predicting sequence
LHPSSCH

SEQ ID NO: 7632 - protein, 10 aa, Artificial sequence
  Protein classification predicting sequence
LHPSSCHAWI

SEQ ID NO: 7633 - protein, 9 aa, Artificial sequence
  Protein classification predicting sequence
EGDSENWKA

SEQ ID NO: 7634 - protein, 14 aa, Artificial sequence
  Protein classification predicting sequence
EKLISHVMKEEPVG

SEQ ID NO: 7635 - protein, 10 aa, Artificial sequence
  Protein classification predicting sequence
LLKDLCDELA

SEQ ID NO: 7636 - protein, 6 aa, Artificial sequence
  Protein classification predicting sequence
MDLQHG

SEQ ID NO: 7637 - protein, 18 aa, Artificial sequence
  Protein classification predicting sequence
VVSNPVDILTYVAWKLSG

SEQ ID NO: 7638 - protein, 15 aa, Artificial sequence
  Protein classification predicting sequence
VVSNPVDILTYVAWK

SEQ ID NO: 7639 - protein, 8 aa, Artificial sequence
  Protein classification predicting sequence
GEHGDSSV

SEQ ID NO: 7640 - protein, 30 aa, Artificial sequence
  Protein classification predicting sequence
VVDGAYEVIKLKGYTSWAIGMSVADLVESI

SEQ ID NO: 7641 - protein, 53 aa, Artificial sequence
  Protein classification predicting sequence
GSGTNLDSARFRHLIGEKLHLHPSSCHAWIVGEHGDSSVPVWSGVNVAGVSLQ

SEQ ID NO: 7642 - protein, 13 aa, Artificial sequence
  Protein classification predicting sequence
VWSGVNVAGVSLQ

SEQ ID NO: 7643 - protein, 13 aa, Artificial sequence
  Protein classification predicting sequence
FLRTPKIVSGKDY

SEQ ID NO: 7644 - protein, 26 aa, Artificial sequence
  Protein classification predicting sequence
TAGARQQEGESRLNLVQRNVNIFKFI

SEQ ID NO: 7645 - protein, 8 aa, Artificial sequence
  Protein classification predicting sequence
PNVVKYSP

SEQ ID NO: 7646 - protein, 6 aa, Artificial sequence
  Protein classification predicting sequence
EKLGIH

SEQ ID NO: 7647 - protein, 10 aa, Artificial sequence
  Protein classification predicting sequence
STMIKGLYGI

SEQ ID NO: 7648 - protein, 29 aa, Artificial sequence
  Protein classification predicting sequence
TAGARQQEGESRLNLVQRNVNIFKFIIPN

SEQ ID NO: 7649 - protein, 9 aa, Artificial sequence
  Protein classification predicting sequence
WKEVHKQVV

SEQ ID NO: 7650 - protein, 19 aa, Artificial sequence
  Protein classification predicting sequence
GSRNKVTVVGVGMVGMASA

SEQ ID NO: 7651 - protein, 12 aa, Artificial sequence
  Protein classification predicting sequence
SILLKDLCDELA

SEQ ID NO: 7652 - protein, 32 aa, Artificial sequence
  Protein classification predicting sequence
GMHGVKDEVFLSVPCVLGNSGLTDVIHMTLKA

SEQ ID NO: 7653 - protein, 8 aa, Artificial sequence
  Protein classification predicting sequence
LKAEEEKQ

SEQ ID NO: 7654 - protein, 6 aa, Artificial sequence
  Protein classification predicting sequence
PDLGTD

SEQ ID NO: 7655 - protein, 8 aa, Artificial sequence
  Protein classification predicting sequence
DVFLSVPC

SEQ ID NO: 7656 - protein, 22 aa, Artificial sequence
  Protein classification predicting sequence
NKITVVGVGAVGMACAISILMK

SEQ ID NO: 7657 - protein, 7 aa, Artificial sequence
  Protein classification predicting sequence
NVHKEEH

SEQ ID NO: 7658 - protein, 10 aa, Artificial sequence
  Protein classification predicting sequence
TAGARQQEGE

SEQ ID NO: 7659 - protein, 6 aa, Artificial sequence
  Protein classification predicting sequence
HPLSCH

SEQ ID NO: 7660 - protein, 8 aa, Artificial sequence
  Protein classification predicting sequence
LHPELGTD

SEQ ID NO: 7661 - protein, 7 aa, Artificial sequence
  Protein classification predicting sequence
STMVKGM

SEQ ID NO: 7662 - protein, 7 aa, Artificial sequence
  Protein classification predicting sequence
GMHGVKD

SEQ ID NO: 7663 - protein, 13 aa, Artificial sequence
  Protein classification predicting sequence
LKDQLIHNLLKEE

SEQ ID NO: 7664 - protein, 9 aa, Artificial sequence
  Protein classification predicting sequence
LGEHGDSSV

SEQ ID NO: 7665 - protein, 14 aa, Artificial sequence
  Protein classification predicting sequence
LGEHGDSSVPVWSG

SEQ ID NO: 7666 - protein, 27 aa, Artificial sequence
  Protein classification predicting sequence
LGEHGDSSVPVWSGMNVAGVSLKTLHP

SEQ ID NO: 7667 - protein, 10 aa, Artificial sequence
  Protein classification predicting sequence
WAIGLSVADL

SEQ ID NO: 7668 - protein, 12 aa, Artificial sequence
  Protein classification predicting sequence
WAIGLSVADLAE

SEQ ID NO: 7669 - protein, 11 aa, Artificial sequence
  Protein classification predicting sequence
VKVTLTSEEEA

SEQ ID NO: 7670 - protein, 17 aa, Artificial sequence
  Protein classification predicting sequence
KVTVVGVGMVGMASAIS

SEQ ID NO: 7671 - protein, 25 aa, Artificial sequence
  Protein classification predicting sequence
WIVGEHGDSSVPVWSGVNVAGVSLQ

SEQ ID NO: 7672 - protein, 6 aa, Artificial sequence
  Protein classification predicting sequence
LNPKMG

SEQ ID NO: 7673 - protein, 9 aa, Artificial sequence
  Protein classification predicting sequence
VVDGAYEVI

SEQ ID NO: 7674 - protein, 20 aa, Artificial sequence
  Protein classification predicting sequence
LKGYTSWAIGMSVADLVESI

SEQ ID NO: 7675 - protein, 6 aa, Artificial sequence
  Protein classification predicting sequence
LMGERL

SEQ ID NO: 7676 - protein, 8 aa, Artificial sequence
  Protein classification predicting sequence
EDKLKGEM

SEQ ID NO: 7677 - protein, 21 aa, Artificial sequence
  Protein classification predicting sequence
GEHGDSSVPVWSGVNVAGVSL

SEQ ID NO: 7678 - protein, 22 aa, Artificial sequence
  Protein classification predicting sequence
GEHGDSSVPVWSGVNVAGVSLK

SEQ ID NO: 7679 - protein, 19 aa, Artificial sequence
  Protein classification predicting sequence
VHKQVVDSAYEVIKLKGYT

SEQ ID NO: 7680 - protein, 11 aa, Artificial sequence
  Protein classification predicting sequence
VDVMEDKLKGE

SEQ ID NO: 7681 - protein, 31 aa, Artificial sequence
  Protein classification predicting sequence
GMHGVKDEVFLSVPCVLGNSGLTDVIHMTLK

SEQ ID NO: 7682 - protein, 8 aa, Artificial sequence
  Protein classification predicting sequence
KIVSGKDY

SEQ ID NO: 7683 - protein, 8 aa, Artificial sequence
  Protein classification predicting sequence
LVVSNPVD

SEQ ID NO: 7684 - protein, 23 aa, Artificial sequence
  Protein classification predicting sequence
IGSGCNLDSARFRYLMGERLGVH

SEQ ID NO: 7685 - protein, 13 aa, Artificial sequence
  Protein classification predicting sequence
GEHGDSSVPVWSG

SEQ ID NO: 7686 - protein, 8 aa, Artificial sequence
  Protein classification predicting sequence
NVAGVSLK

SEQ ID NO: 7687 - protein, 6 aa, Artificial sequence
  Protein classification predicting sequence
DKENWK

SEQ ID NO: 7688 - protein, 10 aa, Artificial sequence
  Protein classification predicting sequence
RVHPVSTMVK

SEQ ID NO: 7689 - protein, 6 aa, Artificial sequence
  Protein classification predicting sequence
QLQKSA

SEQ ID NO: 7690 - protein, 7 aa, Artificial sequence
  Protein classification predicting sequence
NLRRVHP

SEQ ID NO: 7691 - protein, 6 aa, Artificial sequence
  Protein classification predicting sequence
VGMACA

SEQ ID NO: 7692 - protein, 15 aa, Artificial sequence
  Protein classification predicting sequence
VVDSAYEVIKLKGYT

SEQ ID NO: 7693 - protein, 13 aa, Artificial sequence
  Protein classification predicting sequence
TVVGVGQVGMACA

SEQ ID NO: 7694 - protein, 6 aa, Artificial sequence
  Protein classification predicting sequence
FKFIIP

SEQ ID NO: 7695 - protein, 6 aa, Artificial sequence
  Protein classification predicting sequence
SADTLW

SEQ ID NO: 7696 - protein, 30 aa, Artificial sequence
  Protein classification predicting sequence
VTANSKIVVVTAGVRQQEGESRLNLVQRNV

SEQ ID NO: 7697 - protein, 10 aa, Artificial sequence
  Protein classification predicting sequence
LKGYTNWAIG

SEQ ID NO: 7698 - protein, 9 aa, Artificial sequence
  Protein classification predicting sequence
VFLSLPCVL

SEQ ID NO: 7699 - protein, 8 aa, Artificial sequence
  Protein classification predicting sequence
NLDSARFR

SEQ ID NO: 7700 - protein, 7 aa, Artificial sequence
  Protein classification predicting sequence
LSLPCVL

SEQ ID NO: 7701 - protein, 18 aa, Artificial sequence
  Protein classification predicting sequence
TIVGVGQVGMACAVSVLL

SEQ ID NO: 7702 - protein, 13 aa, Artificial sequence
  Protein classification predicting sequence
IVADKDYSVTANS

SEQ ID NO: 7703 - protein, 7 aa, Artificial sequence
  Protein classification predicting sequence
SVPVWSG

SEQ ID NO: 7704 - protein, 17 aa, Artificial sequence
  Protein classification predicting sequence
SAYEVIKLKGYTNWAIG

SEQ ID NO: 7705 - protein, 10 aa, Artificial sequence
  Protein classification predicting sequence
LCDELALVDV

SEQ ID NO: 7706 - protein, 7 aa, Artificial sequence
  Protein classification predicting sequence
ARFRYLM

SEQ ID NO: 7707 - protein, 8 aa, Artificial sequence
  Protein classification predicting sequence
WAIGLSVA

SEQ ID NO: 7708 - protein, 9 aa, Artificial sequence
  Protein classification predicting sequence
GWVLGEHGD

SEQ ID NO: 7709 - protein, 26 aa, Artificial sequence
  Protein classification predicting sequence
DELALVDVLEDKLKGEMMDLQHGSLF

SEQ ID NO: 7710 - protein, 21 aa, Artificial sequence
  Protein classification predicting sequence
PKHRVIGSGCNLDSARFRYLM

SEQ ID NO: 7711 - protein, 10 aa, Artificial sequence
  Protein classification predicting sequence
DSENWKEVHK

SEQ ID NO: 7712 - protein, 18 aa, Artificial sequence
  Protein classification predicting sequence
GLTSVINQKLKDDEVAQL

SEQ ID NO: 7713 - protein, 9 aa, Artificial sequence
  Protein classification predicting sequence
THKIVADKD

SEQ ID NO: 7714 - protein, 32 aa, Artificial sequence
  Protein classification predicting sequence
VVSNPVDILTYVTWKLSGLPKHRVIGSGCNLD

SEQ ID NO: 7715 - protein, 8 aa, Artificial sequence
  Protein classification predicting sequence
DELALVDV

SEQ ID NO: 7716 - protein, 7 aa, Artificial sequence
  Protein classification predicting sequence
LMAEKLG

SEQ ID NO: 7717 - protein, 6 aa, Artificial sequence
  Protein classification predicting sequence
SCHGWI

SEQ ID NO: 7718 - protein, 30 aa, Artificial sequence
  Protein classification predicting sequence
SCHGWILGEHGDSSVAVWSGVNVAGVSLQE

SEQ ID NO: 7719 - protein, 10 aa, Artificial sequence
  Protein classification predicting sequence
WAIGMSVADL

SEQ ID NO: 7720 - protein, 18 aa, Artificial sequence
  Protein classification predicting sequence
EDKLKGEMMDLQHGSLFL

SEQ ID NO: 7721 - protein, 7 aa, Artificial sequence
  Protein classification predicting sequence
KDYAVTA

SEQ ID NO: 7722 - protein, 12 aa, Artificial sequence
  Protein classification predicting sequence
GLTSVINQKLKD

SEQ ID NO: 7723 - protein, 6 aa, Artificial sequence
  Protein classification predicting sequence
HGSLFL

SEQ ID NO: 7724 - protein, 8 aa, Artificial sequence
  Protein classification predicting sequence
HGSLFLKT

SEQ ID NO: 7725 - protein, 17 aa, Artificial sequence
  Protein classification predicting sequence
IIVVSNPVDILTYVTWK

SEQ ID NO: 7726 - protein, 15 aa, Artificial sequence
  Protein classification predicting sequence
VVSNPVDILTYVTWK

SEQ ID NO: 7727 - protein, 18 aa, Artificial sequence
  Protein classification predicting sequence
RVIGSGCNLDSARFRYLM

SEQ ID NO: 7728 - protein, 9 aa, Artificial sequence
  Protein classification predicting sequence
LKDDEVAQL

SEQ ID NO: 7729 - protein, 7 aa, Artificial sequence
  Protein classification predicting sequence
KSAETLW

SEQ ID NO: 7730 - protein, 13 aa, Artificial sequence
  Protein classification predicting sequence
SVADLIESMLKNL

SEQ ID NO: 7731 - protein, 7 aa, Artificial sequence
  Protein classification predicting sequence
TLWGIQK

SEQ ID NO: 7732 - protein, 8 aa, Artificial sequence
  Protein classification predicting sequence
QRNVNIFK

SEQ ID NO: 7733 - protein, 12 aa, Artificial sequence
  Protein classification predicting sequence
LTYVTWKLSGLP

SEQ ID NO: 7734 - protein, 6 aa, Artificial sequence
  Protein classification predicting sequence
KGMYGI

SEQ ID NO: 7735 - protein, 9 aa, Artificial sequence
  Protein classification predicting sequence
TLWDIQKDL

SEQ ID NO: 7736 - protein, 9 aa, Artificial sequence
  Protein classification predicting sequence
WSGVNVAGV

SEQ ID NO: 7737 - protein, 6 aa, Artificial sequence
  Protein classification predicting sequence
DKEHWK

SEQ ID NO: 7738 - protein, 15 aa, Artificial sequence
  Protein classification predicting sequence
IKLKGYTSWAIGLSV

SEQ ID NO: 7739 - protein, 7 aa, Artificial sequence
  Protein classification predicting sequence
WAIGLSV

SEQ ID NO: 7740 - protein, 16 aa, Artificial sequence
  Protein classification predicting sequence
SCHGWVLGEHGDSSVP

SEQ ID NO: 7741 - protein, 9 aa, Artificial sequence
  Protein classification predicting sequence
GEHGDSSVP

SEQ ID NO: 7742 - protein, 6 aa, Artificial sequence
  Protein classification predicting sequence
DKLKGE

SEQ ID NO: 7743 - protein, 6 aa, Artificial sequence
  Protein classification predicting sequence
DKEQWK

SEQ ID NO: 7744 - protein, 13 aa, Artificial sequence
  Protein classification predicting sequence
TAGARQQEGESRL

SEQ ID NO: 7745 - protein, 14 aa, Artificial sequence
  Protein classification predicting sequence
GSGCNLDSARFRYL

SEQ ID NO: 7746 - protein, 7 aa, Artificial sequence
  Protein classification predicting sequence
LGTDADK

SEQ ID NO: 7747 - protein, 7 aa, Artificial sequence
  Protein classification predicting sequence
TLWNVQK

SEQ ID NO: 7748 - protein, 6 aa, Artificial sequence
  Protein classification predicting sequence
WGKKNN

SEQ ID NO: 7749 - protein, 20 aa, Artificial sequence
  Protein classification predicting sequence
TVDQLKDYDGVTTMQFGKLE

SEQ ID NO: 7750 - protein, 25 aa, Artificial sequence
  Protein classification predicting sequence
VYPKLESYGIKQIAQRTAGFDMYDL

SEQ ID NO: 7751 - protein, 21 aa, Artificial sequence
  Protein classification predicting sequence
PSYSPETIAEYSVSIALQLVR

SEQ ID NO: 7752 - protein, 19 aa, Artificial sequence
  Protein classification predicting sequence
PVKNMTVAIIGTGRIGAAT

SEQ ID NO: 7753 - protein, 8 aa, Artificial sequence
  Protein classification predicting sequence
KIYAGFGA

SEQ ID NO: 7754 - protein, 16 aa, Artificial sequence
  Protein classification predicting sequence
AIKDADIISLHVPANK

SEQ ID NO: 7755 - protein, 16 aa, Artificial sequence
  Protein classification predicting sequence
LVNAARGAVINTPDLI

SEQ ID NO: 7756 - protein, 11 aa, Artificial sequence
  Protein classification predicting sequence
GAAIDTYENEA

SEQ ID NO: 7757 - protein, 7 aa, Artificial sequence
  Protein classification predicting sequence
GIKQIAQ

SEQ ID NO: 7758 - protein, 12 aa, Artificial sequence
  Protein classification predicting sequence
MTVAIIGTGRIG

SEQ ID NO: 7759 - protein, 8 aa, Artificial sequence
  Protein classification predicting sequence
RTAGFDMY

SEQ ID NO: 7760 - protein, 7 aa, Artificial sequence
  Protein classification predicting sequence
NVPSYSP

SEQ ID NO: 7761 - protein, 10 aa, Artificial sequence
  Protein classification predicting sequence
YEFEGPYIPK

SEQ ID NO: 7762 - protein, 8 aa, Artificial sequence
  Protein classification predicting sequence
VGSSYAFA

SEQ ID NO: 7763 - protein, 7 aa, Artificial sequence
  Protein classification predicting sequence
ELVIIDL

SEQ ID NO: 7764 - protein, 14 aa, Artificial sequence
  Protein classification predicting sequence
QKPGETRLDLVEKN

SEQ ID NO: 7765 - protein, 9 aa, Artificial sequence
  Protein classification predicting sequence
LARITKAIL

SEQ ID NO: 7766 - protein, 9 aa, Artificial sequence
  Protein classification predicting sequence
TKAILNNEN

SEQ ID NO: 7767 - protein, 8 aa, Artificial sequence
  Protein classification predicting sequence
KAILNNEN

SEQ ID NO: 7768 - protein, 19 aa, Artificial sequence
  Protein classification predicting sequence
YATWKFSGLPKERVIGSGT

SEQ ID NO: 7769 - protein, 9 aa, Artificial sequence
  Protein classification predicting sequence
DVYIGVPAV

SEQ ID NO: 7770 - protein, 6 aa, Artificial sequence
  Protein classification predicting sequence
VMASGF

SEQ ID NO: 7771 - protein, 16 aa, Artificial sequence
  Protein classification predicting sequence
DVYIGVPAVINRNGIR

SEQ ID NO: 7772 - protein, 6 aa, Artificial sequence
  Protein classification predicting sequence
VGSSYA

SEQ ID NO: 7773 - protein, 11 aa, Artificial sequence
  Protein classification predicting sequence
QKPGETRLDLV

SEQ ID NO: 7774 - protein, 10 aa, Artificial sequence
  Protein classification predicting sequence
PKERVIGSGT

SEQ ID NO: 7775 - protein, 7 aa, Artificial sequence
  Protein classification predicting sequence
RVIGSGT

SEQ ID NO: 7776 - protein, 8 aa, Artificial sequence
  Protein classification predicting sequence
DVYIGVPA

SEQ ID NO: 7777 - protein, 7 aa, Artificial sequence
  Protein classification predicting sequence
VGSSYAF

SEQ ID NO: 7778 - protein, 7 aa, Artificial sequence
  Protein classification predicting sequence
GEHGDTE

SEQ ID NO: 7779 - protein, 8 aa, Artificial sequence
  Protein classification predicting sequence
KGATYYGI

SEQ ID NO: 7780 - protein, 7 aa, Artificial sequence
  Protein classification predicting sequence
RITKAIL

SEQ ID NO: 7781 - protein, 8 aa, Artificial sequence
  Protein classification predicting sequence
ENSILTVS

SEQ ID NO: 7782 - protein, 8 aa, Artificial sequence
  Protein classification predicting sequence
SGFDGIFL

SEQ ID NO: 7783 - protein, 13 aa, Artificial sequence
  Protein classification predicting sequence
SGLPKERVIGSGT

SEQ ID NO: 7784 - protein, 7 aa, Artificial sequence
  Protein classification predicting sequence
SGFDGIF

SEQ ID NO: 7785 - protein, 9 aa, Artificial sequence
  Protein classification predicting sequence
AYEVIKLKG

SEQ ID NO: 7786 - protein, 6 aa, Artificial sequence
  Protein classification predicting sequence
KGATYY

SEQ ID NO: 7787 - protein, 7 aa, Artificial sequence
  Protein classification predicting sequence
WKLSGLP

SEQ ID NO: 7788 - protein, 7 aa, Artificial sequence
  Protein classification predicting sequence
VVDSAYE

SEQ ID NO: 7789 - protein, 7 aa, Artificial sequence
  Protein classification predicting sequence
KPGETRL

SEQ ID NO: 7790 - protein, 8 aa, Artificial sequence
  Protein classification predicting sequence
ENAILTVS

SEQ ID NO: 7791 - protein, 8 aa, Artificial sequence
  Protein classification predicting sequence
GNKVVLIG

SEQ ID NO: 7792 - protein, 7 aa, Artificial sequence
  Protein classification predicting sequence
LPVSAYL

SEQ ID NO: 7793 - protein, 8 aa, Artificial sequence
  Protein classification predicting sequence
ALVNQGIA

SEQ ID NO: 7794 - protein, 9 aa, Artificial sequence
  Protein classification predicting sequence
NPVDILTYA

SEQ ID NO: 7795 - protein, 10 aa, Artificial sequence
  Protein classification predicting sequence
VSAYLEGQYG

SEQ ID NO: 7796 - protein, 8 aa, Artificial sequence
  Protein classification predicting sequence
DIYIGTPA

SEQ ID NO: 7797 - protein, 6 aa, Artificial sequence
  Protein classification predicting sequence
PAVVNR

SEQ ID NO: 7798 - protein, 7 aa, Artificial sequence
  Protein classification predicting sequence
IVLIDAN

SEQ ID NO: 7799 - protein, 6 aa, Artificial sequence
  Protein classification predicting sequence
LSLPCV

SEQ ID NO: 7800 - protein, 6 aa, Artificial sequence
  Protein classification predicting sequence
GQVGMA

SEQ ID NO: 7801 - protein, 7 aa, Artificial sequence
  Protein classification predicting sequence
VTAGVRQ

SEQ ID NO: 7802 - protein, 6 aa, Artificial sequence
  Protein classification predicting sequence
SNPVDI

SEQ ID NO: 7803 - protein, 8 aa, Artificial sequence
  Protein classification predicting sequence
YIIGEHGD

SEQ ID NO: 7804 - protein, 8 aa, Artificial sequence
  Protein classification predicting sequence
FTSPKKIY

SEQ ID NO: 7805 - protein, 12 aa, Artificial sequence
  Protein classification predicting sequence
NPVDILTYATWK

SEQ ID NO: 7806 - protein, 16 aa, Artificial sequence
  Protein classification predicting sequence
VDARSVHAYIMGEHGD

SEQ ID NO: 7807 - protein, 8 aa, Artificial sequence
  Protein classification predicting sequence
KGATFYGI

SEQ ID NO: 7808 - protein, 7 aa, Artificial sequence
  Protein classification predicting sequence
ELGIIDI

SEQ ID NO: 7809 - protein, 6 aa, Artificial sequence
  Protein classification predicting sequence
GTSLDS

SEQ ID NO: 7810 - protein, 11 aa, Artificial sequence
  Protein classification predicting sequence
NHQKVVLVGDG

SEQ ID NO: 7811 - protein, 8 aa, Artificial sequence
  Protein classification predicting sequence
EHGDSEFA

SEQ ID NO: 7812 - protein, 17 aa, Artificial sequence
  Protein classification predicting sequence
QKPGETRLDLVSKNLKI

SEQ ID NO: 7813 - protein, 8 aa, Artificial sequence
  Protein classification predicting sequence
GEMLDLQH

SEQ ID NO: 7814 - protein, 12 aa, Artificial sequence
  Protein classification predicting sequence
GEHGDSSVAVWS

SEQ ID NO: 7815 - protein, 16 aa, Artificial sequence
  Protein classification predicting sequence
VITAGRPQKPGETRLE

SEQ ID NO: 7816 - protein, 6 aa, Artificial sequence
  Protein classification predicting sequence
MDLNHG

SEQ ID NO: 7817 - protein, 11 aa, Artificial sequence
  Protein classification predicting sequence
GETRLDLVEKN

SEQ ID NO: 7818 - protein, 14 aa, Artificial sequence
  Protein classification predicting sequence
HAYIIGEHGDTELP

SEQ ID NO: 7819 - protein, 11 aa, Artificial sequence
  Protein classification predicting sequence
IIGEHGDTELP

SEQ ID NO: 7820 - protein, 9 aa, Artificial sequence
  Protein classification predicting sequence
VGVGQVGMA

SEQ ID NO: 7821 - protein, 6 aa, Artificial sequence
  Protein classification predicting sequence
VQKELT

SEQ ID NO: 7822 - protein, 7 aa, Artificial sequence
  Protein classification predicting sequence
FGKKVVL

SEQ ID NO: 7823 - protein, 17 aa, Artificial sequence
  Protein classification predicting sequence
GDGSVGSSYAFAMVTQG

SEQ ID NO: 7824 - protein, 14 aa, Artificial sequence
  Protein classification predicting sequence
ADEFVIIDIAKDKV

SEQ ID NO: 7825 - protein, 44 aa, Artificial sequence
  Protein classification predicting sequence
VKAGEYEDCKDADLVVITAGAPQKPGETRLQLVEKNTKIMKSIV

SEQ ID NO: 7826 - protein, 13 aa, Artificial sequence
  Protein classification predicting sequence
FLIAANPVDILTR

SEQ ID NO: 7827 - protein, 19 aa, Artificial sequence
  Protein classification predicting sequence
TGLPAERVIGSGTVLDSAR

SEQ ID NO: 7828 - protein, 10 aa, Artificial sequence
  Protein classification predicting sequence
ELAVWSQANV

SEQ ID NO: 7829 - protein, 6 aa, Artificial sequence
  Protein classification predicting sequence
TRDAAY

SEQ ID NO: 7830 - protein, 16 aa, Artificial sequence
  Protein classification predicting sequence
IIQAKGSTYYGIALAL

SEQ ID NO: 7831 - protein, 30 aa, Artificial sequence
  Protein classification predicting sequence
NRDIDEQGLVDLFISVRDAAYSIINKKGAT

SEQ ID NO: 7832 - protein, 26 aa, Artificial sequence
  Protein classification predicting sequence
YGIAVALARITKAILDDENAVLPLSV

SEQ ID NO: 7833 - protein, 14 aa, Artificial sequence
  Protein classification predicting sequence
GIVRPVNIPLNDAE

SEQ ID NO: 7834 - protein, 38 aa, Artificial sequence
  Protein classification predicting sequence
DCADADLVVITAGAPQKPGETRLDLVGKNLAINKSIVT

SEQ ID NO: 7835 - protein, 6 aa, Artificial sequence
  Protein classification predicting sequence
VRDAAY

SEQ ID NO: 7836 - protein, 16 aa, Artificial sequence
  Protein classification predicting sequence
DENAVLPLSVFQEGQY

SEQ ID NO: 7837 - protein, 9 aa, Artificial sequence
  Protein classification predicting sequence
IGQPAIVGA

SEQ ID NO: 7838 - protein, 9 aa, Artificial sequence
  Protein classification predicting sequence
LKAIIDEAF

SEQ ID NO: 7839 - protein, 7 aa, Artificial sequence
  Protein classification predicting sequence
LPLSVFQ

SEQ ID NO: 7840 - protein, 7 aa, Artificial sequence
  Protein classification predicting sequence
QKMQASA

SEQ ID NO: 7841 - protein, 6 aa, Artificial sequence
  Protein classification predicting sequence
VWSHAN

SEQ ID NO: 7842 - protein, 8 aa, Artificial sequence
  Protein classification predicting sequence
IINKKGAT

SEQ ID NO: 7843 - protein, 7 aa, Artificial sequence
  Protein classification predicting sequence
GSGTILD

SEQ ID NO: 7844 - protein, 7 aa, Artificial sequence
  Protein classification predicting sequence
GSGTVLD

SEQ ID NO: 7845 - protein, 9 aa, Artificial sequence
  Protein classification predicting sequence
VSNPVDILT

SEQ ID NO: 7846 - protein, 10 aa, Artificial sequence
  Protein classification predicting sequence
GPQVPTIDLK

SEQ ID NO: 7847 - protein, 7 aa, Artificial sequence
  Protein classification predicting sequence
LHRGLVN

SEQ ID NO: 7848 - protein, 7 aa, Artificial sequence
  Protein classification predicting sequence
FPPRTFA

SEQ ID NO: 7849 - protein, 6 aa, Artificial sequence
  Protein classification predicting sequence
DLSIWP

SEQ ID NO: 7850 - protein, 25 aa, Artificial sequence
  Protein classification predicting sequence
EAHTDVSALTFILHNMVPGLQLFYE

SEQ ID NO: 7851 - protein, 15 aa, Artificial sequence
  Protein classification predicting sequence
EILSNGKYKSILHRG

SEQ ID NO: 7852 - protein, 16 aa, Artificial sequence
  Protein classification predicting sequence
GGAALDLVGVPLPEET

SEQ ID NO: 7853 - protein, 7 aa, Artificial sequence
  Protein classification predicting sequence
FGDILSD

SEQ ID NO: 7854 - protein, 7 aa, Artificial sequence
  Protein classification predicting sequence
DAVLLGA

SEQ ID NO: 7855 - protein, 10 aa, Artificial sequence
  Protein classification predicting sequence
RELTGGIYFG

SEQ ID NO: 7856 - protein, 8 aa, Artificial sequence
  Protein classification predicting sequence
SVDKANVL

SEQ ID NO: 7857 - protein, 16 aa, Artificial sequence
  Protein classification predicting sequence
KLVGCKEMGEEVLKSV

SEQ ID NO: 7858 - protein, 7 aa, Artificial sequence
  Protein classification predicting sequence
DKANVLA

SEQ ID NO: 7859 - protein, 8 aa, Artificial sequence
  Protein classification predicting sequence
GKGIVNPV

SEQ ID NO: 7860 - protein, 6 aa, Artificial sequence
  Protein classification predicting sequence
YANLRP

SEQ ID NO: 7861 - protein, 7 aa, Artificial sequence
  Protein classification predicting sequence
DFVVVRE

SEQ ID NO: 7862 - protein, 7 aa, Artificial sequence
  Protein classification predicting sequence
AAMLTGS

SEQ ID NO: 7863 - protein, 8 aa, Artificial sequence
  Protein classification predicting sequence
LFANLRPA

SEQ ID NO: 7864 - protein, 8 aa, Artificial sequence
  Protein classification predicting sequence
GMLPSASL

SEQ ID NO: 7865 - protein, 7 aa, Artificial sequence
  Protein classification predicting sequence
LSAAMML

SEQ ID NO: 7866 - protein, 7 aa, Artificial sequence
  Protein classification predicting sequence
DAILLGA

SEQ ID NO: 7867 - protein, 9 aa, Artificial sequence
  Protein classification predicting sequence
NIFGDILSD

SEQ ID NO: 7868 - protein, 6 aa, Artificial sequence
  Protein classification predicting sequence
NMFGDI

SEQ ID NO: 7869 - protein, 7 aa, Artificial sequence
  Protein classification predicting sequence
LYANLRP

SEQ ID NO: 7870 - protein, 6 aa, Artificial sequence
  Protein classification predicting sequence
GGIYFG

SEQ ID NO: 7871 - protein, 7 aa, Artificial sequence
  Protein classification predicting sequence
AWDTEKY

SEQ ID NO: 7872 - protein, 16 aa, Artificial sequence
  Protein classification predicting sequence
AFGLYEPCHGSAPDLP

SEQ ID NO: 7873 - protein, 10 aa, Artificial sequence
  Protein classification predicting sequence
EDEGDGVAWD

SEQ ID NO: 7874 - protein, 19 aa, Artificial sequence
  Protein classification predicting sequence
WSLDKANVLASSRLWRKTV

SEQ ID NO: 7875 - protein, 22 aa, Artificial sequence
  Protein classification predicting sequence
WSLDKANVLASSRLWRKTVEET

SEQ ID NO: 7876 - protein, 7 aa, Artificial sequence
  Protein classification predicting sequence
EVGDAIA

SEQ ID NO: 7877 - protein, 18 aa, Artificial sequence
  Protein classification predicting sequence
LPGDGIGPEIMAEAVKVL

SEQ ID NO: 7878 - protein, 8 aa, Artificial sequence
  Protein classification predicting sequence
FDVIVTDN

SEQ ID NO: 7879 - protein, 7 aa, Artificial sequence
  Protein classification predicting sequence
YEPCHGS

SEQ ID NO: 7880 - protein, 20 aa, Artificial sequence
  Protein classification predicting sequence
GIANPLATILSVSMMLRYSF

SEQ ID NO: 7881 - protein, 9 aa, Artificial sequence
  Protein classification predicting sequence
RELTGGIYF

SEQ ID NO: 7882 - protein, 12 aa, Artificial sequence
  Protein classification predicting sequence
YRIAVLPGDGIG

SEQ ID NO: 7883 - protein, 7 aa, Artificial sequence
  Protein classification predicting sequence
GPSLYEP

SEQ ID NO: 7884 - protein, 9 aa, Artificial sequence
  Protein classification predicting sequence
YTREEIERI

SEQ ID NO: 7885 - protein, 7 aa, Artificial sequence
  Protein classification predicting sequence
QFDVIVT

SEQ ID NO: 7886 - protein, 10 aa, Artificial sequence
  Protein classification predicting sequence
FGDILSDEAS

SEQ ID NO: 7887 - protein, 10 aa, Artificial sequence
  Protein classification predicting sequence
LSAALMLRYS

SEQ ID NO: 7888 - protein, 9 aa, Artificial sequence
  Protein classification predicting sequence
LCIRELTGG

SEQ ID NO: 7889 - protein, 9 aa, Artificial sequence
  Protein classification predicting sequence
DKANVLASS

SEQ ID NO: 7890 - protein, 6 aa, Artificial sequence
  Protein classification predicting sequence
EPIHGS

SEQ ID NO: 7891 - protein, 8 aa, Artificial sequence
  Protein classification predicting sequence
LADASTLK

SEQ ID NO: 7892 - protein, 6 aa, Artificial sequence
  Protein classification predicting sequence
YFGEPR

SEQ ID NO: 7893 - protein, 7 aa, Artificial sequence
  Protein classification predicting sequence
ANPLATI

SEQ ID NO: 7894 - protein, 7 aa, Artificial sequence
  Protein classification predicting sequence
GYRTADI

SEQ ID NO: 7895 - protein, 7 aa, Artificial sequence
  Protein classification predicting sequence
LEHMLVD

SEQ ID NO: 7896 - protein, 6 aa, Artificial sequence
  Protein classification predicting sequence
PLPEET

SEQ ID NO: 7897 - protein, 10 aa, Artificial sequence
  Protein classification predicting sequence
YHRFEIERIA

SEQ ID NO: 7898 - protein, 7 aa, Artificial sequence
  Protein classification predicting sequence
FESARKR

SEQ ID NO: 7899 - protein, 12 aa, Artificial sequence
  Protein classification predicting sequence
TGSIGMLPSASL

SEQ ID NO: 7900 - protein, 8 aa, Artificial sequence
  Protein classification predicting sequence
DLGNGQKR

SEQ ID NO: 7901 - protein, 13 aa, Artificial sequence
  Protein classification predicting sequence
ANLRPAICYPALA

SEQ ID NO: 7902 - protein, 5 aa, Artificial sequence
  Protein classification predicting sequence
AMCLR

SEQ ID NO: 7903 - protein, 7 aa, Artificial sequence
  Protein classification predicting sequence
SSILWRE

SEQ ID NO: 7904 - protein, 10 aa, Artificial sequence
  Protein classification predicting sequence
FGDIISDECA

SEQ ID NO: 7905 - protein, 14 aa, Artificial sequence
  Protein classification predicting sequence
FGLYEPAGGSAPDI

SEQ ID NO: 7906 - protein, 8 aa, Artificial sequence
  Protein classification predicting sequence
LLPLRKHF

SEQ ID NO: 7907 - protein, 12 aa, Artificial sequence
  Protein classification predicting sequence
RELTGGIYFGKP

SEQ ID NO: 7908 - protein, 7 aa, Artificial sequence
  Protein classification predicting sequence
KVCSIDK

SEQ ID NO: 7909 - protein, 8 aa, Artificial sequence
  Protein classification predicting sequence
FGDIISDE

SEQ ID NO: 7910 - protein, 10 aa, Artificial sequence
  Protein classification predicting sequence
SDECAMITGS

SEQ ID NO: 7911 - protein, 7 aa, Artificial sequence
  Protein classification predicting sequence
KTNEMGD

SEQ ID NO: 7912 - protein, 7 aa, Artificial sequence
  Protein classification predicting sequence
ALPKKTL

SEQ ID NO: 7913 - protein, 6 aa, Artificial sequence
  Protein classification predicting sequence
LFSNLR

SEQ ID NO: 7914 - protein, 7 aa, Artificial sequence
  Protein classification predicting sequence
AFDTEVY

SEQ ID NO: 7915 - protein, 14 aa, Artificial sequence
  Protein classification predicting sequence
IAVLPGDGIGPEVM

SEQ ID NO: 7916 - protein, 9 aa, Artificial sequence
  Protein classification predicting sequence
GCENSDAIL

SEQ ID NO: 7917 - protein, 15 aa, Artificial sequence
  Protein classification predicting sequence
RPERASLLPLRKHFN

SEQ ID NO: 7918 - protein, 6 aa, Artificial sequence
  Protein classification predicting sequence
GFDILC

SEQ ID NO: 7919 - protein, 6 aa, Artificial sequence
  Protein classification predicting sequence
LWREIV

SEQ ID NO: 7920 - protein, 10 aa, Artificial sequence
  Protein classification predicting sequence
LLCSNLFGDI

SEQ ID NO: 7921 - protein, 16 aa, Artificial sequence
  Protein classification predicting sequence
ITGSIGMLPSASLNEK

SEQ ID NO: 7922 - protein, 16 aa, Artificial sequence
  Protein classification predicting sequence
KIDQSVISVLKKGYRT

SEQ ID NO: 7923 - protein, 11 aa, Artificial sequence
  Protein classification predicting sequence
LKTNEMGDVIA

SEQ ID NO: 7924 - protein, 7 aa, Artificial sequence
  Protein classification predicting sequence
LSHLYID

SEQ ID NO: 7925 - protein, 7 aa, Artificial sequence
  Protein classification predicting sequence
LKKGYRT

SEQ ID NO: 7926 - protein, 7 aa, Artificial sequence
  Protein classification predicting sequence
YIDNATM

SEQ ID NO: 7927 - protein, 7 aa, Artificial sequence
  Protein classification predicting sequence
IGGAAID

SEQ ID NO: 7928 - protein, 13 aa, Artificial sequence
  Protein classification predicting sequence
ITGSIGMLPSASL

SEQ ID NO: 7929 - protein, 13 aa, Artificial sequence
  Protein classification predicting sequence
GKNIANPIAQILS

SEQ ID NO: 7930 - protein, 10 aa, Artificial sequence
  Protein classification predicting sequence
RELTGGLYFG

SEQ ID NO: 7931 - protein, 6 aa, Artificial sequence
  Protein classification predicting sequence
DKSNVL

SEQ ID NO: 7932 - protein, 9 aa, Artificial sequence
  Protein classification predicting sequence
LCSNLFGDI

SEQ ID NO: 7933 - protein, 19 aa, Artificial sequence
  Protein classification predicting sequence
GKNIANPIAQILSVSMLVR

SEQ ID NO: 7934 - protein, 7 aa, Artificial sequence
  Protein classification predicting sequence
EMGDIIA

SEQ ID NO: 7935 - protein, 9 aa, Artificial sequence
  Protein classification predicting sequence
LPGDGIGPE

SEQ ID NO: 7936 - protein, 11 aa, Artificial sequence
  Protein classification predicting sequence
LPGDGIGPEVM

SEQ ID NO: 7937 - protein, 7 aa, Artificial sequence
  Protein classification predicting sequence
EYAFDTE

SEQ ID NO: 7938 - protein, 10 aa, Artificial sequence
  Protein classification predicting sequence
GSAPDIAGKN

SEQ ID NO: 7939 - protein, 9 aa, Artificial sequence
  Protein classification predicting sequence
ANPIAQILS

SEQ ID NO: 7940 - protein, 13 aa, Artificial sequence
  Protein classification predicting sequence
ANPIAQILSLSML

SEQ ID NO: 7941 - protein, 7 aa, Artificial sequence
  Protein classification predicting sequence
GKNIANP

SEQ ID NO: 7942 - protein, 11 aa, Artificial sequence
  Protein classification predicting sequence
NLRPAQLYSEL

SEQ ID NO: 7943 - protein, 11 aa, Artificial sequence
  Protein classification predicting sequence
LFGAVGDWKYD

SEQ ID NO: 7944 - protein, 11 aa, Artificial sequence
  Protein classification predicting sequence
RPEQAILGLRK

SEQ ID NO: 7945 - protein, 7 aa, Artificial sequence
  Protein classification predicting sequence
FAGEREG

SEQ ID NO: 7946 - protein, 11 aa, Artificial sequence
  Protein classification predicting sequence
NVLETSQFWRD

SEQ ID NO: 7947 - protein, 11 aa, Artificial sequence
  Protein classification predicting sequence
VRELVGGIYFG

SEQ ID NO: 7948 - protein, 13 aa, Artificial sequence
  Protein classification predicting sequence
VRELVGGIYFGER

SEQ ID NO: 7949 - protein, 7 aa, Artificial sequence
  Protein classification predicting sequence
ATILSAA

SEQ ID NO: 7950 - protein, 7 aa, Artificial sequence
  Protein classification predicting sequence
LPGDHVG

SEQ ID NO: 7951 - protein, 14 aa, Artificial sequence
  Protein classification predicting sequence
VRPEQGLLKIRKEL

SEQ ID NO: 7952 - protein, 6 aa, Artificial sequence
  Protein classification predicting sequence
EDDGSG

SEQ ID NO: 7953 - protein, 10 aa, Artificial sequence
  Protein classification predicting sequence
IVVLPGDHVG

SEQ ID NO: 7954 - protein, 31 aa, Artificial sequence
  Protein classification predicting sequence
NMFGDIISDEASVIPGSLGLLPSASLASLPD

SEQ ID NO: 7955 - protein, 13 aa, Artificial sequence
  Protein classification predicting sequence
RPEQGLLKIRKEL

SEQ ID NO: 7956 - protein, 6 aa, Artificial sequence
  Protein classification predicting sequence
PTKLNG

SEQ ID NO: 7957 - protein, 7 aa, Artificial sequence
  Protein classification predicting sequence
RITRMAA

SEQ ID NO: 7958 - protein, 15 aa, Artificial sequence
  Protein classification predicting sequence
VQHQLIDSAAMILVK

SEQ ID NO: 7959 - protein, 18 aa, Artificial sequence
  Protein classification predicting sequence
VQHQLIDSAAMILVKNPT

SEQ ID NO: 7960 - protein, 7 aa, Artificial sequence
  Protein classification predicting sequence
ALQHNPP

SEQ ID NO: 7961 - protein, 7 aa, Artificial sequence
  Protein classification predicting sequence
RPEAGLL

SEQ ID NO: 7962 - protein, 7 aa, Artificial sequence
  Protein classification predicting sequence
FANLRPA

SEQ ID NO: 7963 - protein, 7 aa, Artificial sequence
  Protein classification predicting sequence
ASSLKPE

SEQ ID NO: 7964 - protein, 6 aa, Artificial sequence
  Protein classification predicting sequence
GMLPSA

SEQ ID NO: 7965 - protein, 6 aa, Artificial sequence
  Protein classification predicting sequence
FANLRP

SEQ ID NO: 7966 - protein, 10 aa, Artificial sequence
  Protein classification predicting sequence
EPVHGSAPDI

SEQ ID NO: 7967 - protein, 8 aa, Artificial sequence
  Protein classification predicting sequence
LLKIRKEL

SEQ ID NO: 7968 - protein, 8 aa, Artificial sequence
  Protein classification predicting sequence
ESEVRRIA

SEQ ID NO: 7969 - protein, 11 aa, Artificial sequence
  Protein classification predicting sequence
FGDILSDEASM

SEQ ID NO: 7970 - protein, 6 aa, Artificial sequence
  Protein classification predicting sequence
SVDKAN

SEQ ID NO: 7971 - protein, 8 aa, Artificial sequence
  Protein classification predicting sequence
GGIYFGDR

SEQ ID NO: 7972 - protein, 6 aa, Artificial sequence
  Protein classification predicting sequence
AMQLVR

SEQ ID NO: 7973 - protein, 23 aa, Artificial sequence
  Protein classification predicting sequence
TNNIFGDILSDEASMITGSIGML

SEQ ID NO: 7974 - protein, 12 aa, Artificial sequence
  Protein classification predicting sequence
IDFVVVREGTEG

SEQ ID NO: 7975 - protein, 9 aa, Artificial sequence
  Protein classification predicting sequence
GIADPTAAI

SEQ ID NO: 7976 - protein, 7 aa, Artificial sequence
  Protein classification predicting sequence
GIRTGDL

SEQ ID NO: 7977 - protein, 9 aa, Artificial sequence
  Protein classification predicting sequence
NLFGDILSD

SEQ ID NO: 7978 - protein, 8 aa, Artificial sequence
  Protein classification predicting sequence
VIPGSLGL

SEQ ID NO: 7979 - protein, 13 aa, Artificial sequence
  Protein classification predicting sequence
EPIHGSAPDIAGQ

SEQ ID NO: 7980 - protein, 7 aa, Artificial sequence
  Protein classification predicting sequence
EYPDVEL

SEQ ID NO: 7981 - protein, 7 aa, Artificial sequence
  Protein classification predicting sequence
LGAVGGP

SEQ ID NO: 7982 - protein, 11 aa, Artificial sequence
  Protein classification predicting sequence
LGAVGGPQWDT

SEQ ID NO: 7983 - protein, 8 aa, Artificial sequence
  Protein classification predicting sequence
EVVEGVDI

SEQ ID NO: 7984 - protein, 6 aa, Artificial sequence
  Protein classification predicting sequence
HMYVDN

SEQ ID NO: 7985 - protein, 16 aa, Artificial sequence
  Protein classification predicting sequence
AAMLTGSIGMLPSASL

SEQ ID NO: 7986 - protein, 10 aa, Artificial sequence
  Protein classification predicting sequence
LFGSVGGPKW

SEQ ID NO: 7987 - protein, 17 aa, Artificial sequence
  Protein classification predicting sequence
QPERGALLPLRKHFKLF

SEQ ID NO: 7988 - protein, 8 aa, Artificial sequence
  Protein classification predicting sequence
FDVLLCSN

SEQ ID NO: 7989 - protein, 7 aa, Artificial sequence
  Protein classification predicting sequence
GVRTGDL

SEQ ID NO: 7990 - protein, 8 aa, Artificial sequence
  Protein classification predicting sequence
FDVIVTEN

SEQ ID NO: 7991 - protein, 9 aa, Artificial sequence
  Protein classification predicting sequence
GDGIGPEVM

SEQ ID NO: 7992 - protein, 6 aa, Artificial sequence
  Protein classification predicting sequence
FGLYEP

SEQ ID NO: 7993 - protein, 8 aa, Artificial sequence
  Protein classification predicting sequence
DFVVVREL

SEQ ID NO: 7994 - protein, 7 aa, Artificial sequence
  Protein classification predicting sequence
AEAVKVL

SEQ ID NO: 7995 - protein, 9 aa, Artificial sequence
  Protein classification predicting sequence
LGAIGGPKW

SEQ ID NO: 7996 - protein, 8 aa, Artificial sequence
  Protein classification predicting sequence
WSLDKANV

SEQ ID NO: 7997 - protein, 7 aa, Artificial sequence
  Protein classification predicting sequence
LIDSAAM

SEQ ID NO: 7998 - protein, 10 aa, Artificial sequence
  Protein classification predicting sequence
YSESEIRRIA

SEQ ID NO: 7999 - protein, 7 aa, Artificial sequence
  Protein classification predicting sequence
ASTLKPE

SEQ ID NO: 8000 - protein, 7 aa, Artificial sequence
  Protein classification predicting sequence
LLGAVGG

SEQ ID NO: 8001 - protein, 14 aa, Artificial sequence
  Protein classification predicting sequence
VAGLDILIVRELTG

SEQ ID NO: 8002 - protein, 6 aa, Artificial sequence
  Protein classification predicting sequence
LCSVDK

SEQ ID NO: 8003 - protein, 10 aa, Artificial sequence
  Protein classification predicting sequence
VDNAAMQLVR

SEQ ID NO: 8004 - protein, 8 aa, Artificial sequence
  Protein classification predicting sequence
FDVVVTGN

SEQ ID NO: 8005 - protein, 8 aa, Artificial sequence
  Protein classification predicting sequence
VNHLLVDA

SEQ ID NO: 8006 - protein, 7 aa, Artificial sequence
  Protein classification predicting sequence
LFGSVGG

SEQ ID NO: 8007 - protein, 14 aa, Artificial sequence
  Protein classification predicting sequence
QPERGALLPLRKHF

SEQ ID NO: 8008 - protein, 18 aa, Artificial sequence
  Protein classification predicting sequence
VRELTGGIYFGQPKGREG

SEQ ID NO: 8009 - protein, 6 aa, Artificial sequence
  Protein classification predicting sequence
LWREVV

SEQ ID NO: 8010 - protein, 10 aa, Artificial sequence
  Protein classification predicting sequence
GMLPSASLNE

SEQ ID NO: 8011 - protein, 8 aa, Artificial sequence
  Protein classification predicting sequence
NFASDSLL

SEQ ID NO: 8012 - protein, 7 aa, Artificial sequence
  Protein classification predicting sequence
YFGERKE

SEQ ID NO: 8013 - protein, 15 aa, Artificial sequence
  Protein classification predicting sequence
HGSAPDIAGQGIANP

SEQ ID NO: 8014 - protein, 7 aa, Artificial sequence
  Protein classification predicting sequence
GCEQADA

SEQ ID NO: 8015 - protein, 8 aa, Artificial sequence
  Protein classification predicting sequence
LFSNLRPA

SEQ ID NO: 8016 - protein, 9 aa, Artificial sequence
  Protein classification predicting sequence
LCSNIFGDI

SEQ ID NO: 8017 - protein, 6 aa, Artificial sequence
  Protein classification predicting sequence
NIFGDI

SEQ ID NO: 8018 - protein, 7 aa, Artificial sequence
  Protein classification predicting sequence
LEQGYRT

SEQ ID NO: 8019 - protein, 8 aa, Artificial sequence
  Protein classification predicting sequence
LYANLRPC

SEQ ID NO: 8020 - protein, 8 aa, Artificial sequence
  Protein classification predicting sequence
ATILSAAM

SEQ ID NO: 8021 - protein, 10 aa, Artificial sequence
  Protein classification predicting sequence
ATILSAAMML

SEQ ID NO: 8022 - protein, 7 aa, Artificial sequence
  Protein classification predicting sequence
EVGDAVA

SEQ ID NO: 8023 - protein, 41 aa, Artificial sequence
  Protein classification predicting sequence
NKAFGLYEPCHGSAPDLPANKVNPIATILSAAMMLKLSLDL

SEQ ID NO: 8024 - protein, 16 aa, Artificial sequence
  Protein classification predicting sequence
DAVLLGAVGGPKWGTG

SEQ ID NO: 8025 - protein, 11 aa, Artificial sequence
  Protein classification predicting sequence
EPVHGSAPDIA

SEQ ID NO: 8026 - protein, 7 aa, Artificial sequence
  Protein classification predicting sequence
LFANLRP

SEQ ID NO: 8027 - protein, 8 aa, Artificial sequence
  Protein classification predicting sequence
KYDTLPRE

SEQ ID NO: 8028 - protein, 6 aa, Artificial sequence
  Protein classification predicting sequence
AMITGS

SEQ ID NO: 8029 - protein, 10 aa, Artificial sequence
  Protein classification predicting sequence
LCSVDKANVL

SEQ ID NO: 8030 - protein, 17 aa, Artificial sequence
  Protein classification predicting sequence
LCSVDKANVLASSQLWR

SEQ ID NO: 8031 - protein, 6 aa, Artificial sequence
  Protein classification predicting sequence
PKQFDV

SEQ ID NO: 8032 - protein, 12 aa, Artificial sequence
  Protein classification predicting sequence
GLDILIVRELTG

SEQ ID NO: 8033 - protein, 17 aa, Artificial sequence
  Protein classification predicting sequence
ASMLTGSIGMLPSASLD

SEQ ID NO: 8034 - protein, 7 aa, Artificial sequence
  Protein classification predicting sequence
AISDADM

SEQ ID NO: 8035 - protein, 8 aa, Artificial sequence
  Protein classification predicting sequence
VLDQGLRT

SEQ ID NO: 8036 - protein, 12 aa, Artificial sequence
  Protein classification predicting sequence
EPVHGSAPDIAG

SEQ ID NO: 8037 - protein, 6 aa, Artificial sequence
  Protein classification predicting sequence
RITRMA

SEQ ID NO: 8038 - protein, 33 aa, Artificial sequence
  Protein classification predicting sequence
NMFGDIISDEASVIPGSLGLLPSASLASLPDTN

SEQ ID NO: 8039 - protein, 8 aa, Artificial sequence
  Protein classification predicting sequence
AMMLKLSL

SEQ ID NO: 8040 - protein, 7 aa, Artificial sequence
  Protein classification predicting sequence
RTADLRG

SEQ ID NO: 8041 - protein, 11 aa, Artificial sequence
  Protein classification predicting sequence
KVTSIDKANVL

SEQ ID NO: 8042 - protein, 9 aa, Artificial sequence
  Protein classification predicting sequence
AINRALEEG

SEQ ID NO: 8043 - protein, 12 aa, Artificial sequence
  Protein classification predicting sequence
MRITTSHYDVGG

SEQ ID NO: 8044 - protein, 8 aa, Artificial sequence
  Protein classification predicting sequence
LDKANVLA

SEQ ID NO: 8045 - protein, 8 aa, Artificial sequence
  Protein classification predicting sequence
SRLWRKTV

SEQ ID NO: 8046 - protein, 11 aa, Artificial sequence
  Protein classification predicting sequence
QPERGALLPLR

SEQ ID NO: 8047 - protein, 13 aa, Artificial sequence
  Protein classification predicting sequence
LCVRELTGGIYFG

SEQ ID NO: 8048 - protein, 8 aa, Artificial sequence
  Protein classification predicting sequence
RIARIAFE

SEQ ID NO: 8049 - protein, 12 aa, Artificial sequence
  Protein classification predicting sequence
KKVTSVDKANVL

SEQ ID NO: 8050 - protein, 106 aa, Artificial sequence
  Protein classification predicting sequence
AVRNRFAMRITTSHYDVGGAAIDNHGQPLPPATVEGCEQADAVLFGSVGGPKWEHLPPDQQPERGALLPLRKHFKLFSNLRPAKLYQGLEAFCPLRADIAANGFDI

SEQ ID NO: 8051 - protein, 9 aa, Artificial sequence
  Protein classification predicting sequence
RKELNLYAN

SEQ ID NO: 8052 - protein, 14 aa, Artificial sequence
  Protein classification predicting sequence
IVALPGDGIGPEIL

SEQ ID NO: 8053 - protein, 14 aa, Artificial sequence
  Protein classification predicting sequence
ADAILLGAIGGPKW

SEQ ID NO: 8054 - protein, 22 aa, Artificial sequence
  Protein classification predicting sequence
ADAILLGAIGGPKWTDPNNRPE

SEQ ID NO: 8055 - protein, 18 aa, Artificial sequence
  Protein classification predicting sequence
GLLKLRKSLNLFANIRPT

SEQ ID NO: 8056 - protein, 7 aa, Artificial sequence
  Protein classification predicting sequence
GIYFGEP

SEQ ID NO: 8057 - protein, 11 aa, Artificial sequence
  Protein classification predicting sequence
KLTSVDKENVL

SEQ ID NO: 8058 - protein, 11 aa, Artificial sequence
  Protein classification predicting sequence
LVDACSMHLIT

SEQ ID NO: 8059 - protein, 27 aa, Artificial sequence
  Protein classification predicting sequence
ENLFGDILSDEASVIPGSLGLSPSASF

SEQ ID NO: 8060 - protein, 13 aa, Artificial sequence
  Protein classification predicting sequence
LYEPIHGSAPDIA

SEQ ID NO: 8061 - protein, 8 aa, Artificial sequence
  Protein classification predicting sequence
CLRESLNQ

SEQ ID NO: 8062 - protein, 11 aa, Artificial sequence
  Protein classification predicting sequence
EVATEVSVNTA

SEQ ID NO: 8063 - protein, 22 aa, Artificial sequence
  Protein classification predicting sequence
RFDVIVTDNLFGDIITDLAAAV

SEQ ID NO: 8064 - protein, 7 aa, Artificial sequence
  Protein classification predicting sequence
KVTSIDK

SEQ ID NO: 8065 - protein, 13 aa, Artificial sequence
  Protein classification predicting sequence
VTENLFGDILSDE

SEQ ID NO: 8066 - protein, 10 aa, Artificial sequence
  Protein classification predicting sequence
NLFGDILSDE

SEQ ID NO: 8067 - protein, 16 aa, Artificial sequence
  Protein classification predicting sequence
GPSLYEPIHGSAPDIA

SEQ ID NO: 8068 - protein, 11 aa, Artificial sequence
  Protein classification predicting sequence
EPIHGSAPDIA

SEQ ID NO: 8069 - protein, 9 aa, Artificial sequence
  Protein classification predicting sequence
DAVLLAAIG

SEQ ID NO: 8070 - protein, 18 aa, Artificial sequence
  Protein classification predicting sequence
VAVLPGDGIGPEVTEAAL

SEQ ID NO: 8071 - protein, 7 aa, Artificial sequence
  Protein classification predicting sequence
VGGPKWD

SEQ ID NO: 8072 - protein, 74 aa, Artificial sequence
  Protein classification predicting sequence
LRKSQDLFANLRPAKVFPGLERLSPLKEEIARGVDVLIVRELTGGIYFGEPRGMSEAEAWNTERYSKPEVERVA

SEQ ID NO: 8073 - protein, 21 aa, Artificial sequence
  Protein classification predicting sequence
SVDKANVLEVGEFWRKTVEEV

SEQ ID NO: 8074 - protein, 9 aa, Artificial sequence
  Protein classification predicting sequence
LWRKVVNEV

SEQ ID NO: 8075 - protein, 11 aa, Artificial sequence
  Protein classification predicting sequence
PGSLGLLPSAS

SEQ ID NO: 8076 - protein, 12 aa, Artificial sequence
  Protein classification predicting sequence
LYEPAGGSAPDI

SEQ ID NO: 8077 - protein, 8 aa, Artificial sequence
  Protein classification predicting sequence
VSTSQMGD

SEQ ID NO: 8078 - protein, 14 aa, Artificial sequence
  Protein classification predicting sequence
EPVHGSAPDIAGKG

SEQ ID NO: 8079 - protein, 6 aa, Artificial sequence
  Protein classification predicting sequence
SSRLWR

SEQ ID NO: 8080 - protein, 24 aa, Artificial sequence
  Protein classification predicting sequence
EPIHGSAPDIAGQDKANPLATILS

SEQ ID NO: 8081 - protein, 9 aa, Artificial sequence
  Protein classification predicting sequence
ANPLATILS

SEQ ID NO: 8082 - protein, 18 aa, Artificial sequence
  Protein classification predicting sequence
DAVLFGSVGGPKWEHLPP

SEQ ID NO: 8083 - protein, 26 aa, Artificial sequence
  Protein classification predicting sequence
QPERGALLPLRKHFQLFCNLRPAQIH

SEQ ID NO: 8084 - protein, 13 aa, Artificial sequence
  Protein classification predicting sequence
GLEAFSPLRADIS

SEQ ID NO: 8085 - protein, 28 aa, Artificial sequence
  Protein classification predicting sequence
RGFDIVVVRELTGGIYFGQPKGREGEGA

SEQ ID NO: 8086 - protein, 32 aa, Artificial sequence
  Protein classification predicting sequence
IAFESARLRRKKVCSIDKANVLQSSILWREVV

SEQ ID NO: 8087 - protein, 5 aa, Artificial sequence
  Protein classification predicting sequence
LSHMY

SEQ ID NO: 8088 - protein, 15 aa, Artificial sequence
  Protein classification predicting sequence
HMYIDNATMQLIKDP

SEQ ID NO: 8089 - protein, 7 aa, Artificial sequence
  Protein classification predicting sequence
GMLPSAS

SEQ ID NO: 8090 - protein, 47 aa, Artificial sequence
  Protein classification predicting sequence
NESKFGLYEPAGGSAPDIAGKNIANPVAQILSAALMLRYSLGEEAAA

SEQ ID NO: 8091 - protein, 9 aa, Artificial sequence
  Protein classification predicting sequence
AGELTADLA

SEQ ID NO: 8092 - protein, 7 aa, Artificial sequence
  Protein classification predicting sequence
GVPLPDE

SEQ ID NO: 8093 - protein, 6 aa, Artificial sequence
  Protein classification predicting sequence
PKGREG

SEQ ID NO: 8094 - protein, 16 aa, Artificial sequence
  Protein classification predicting sequence
CSVDKANVLDVSQLWR

SEQ ID NO: 8095 - protein, 7 aa, Artificial sequence
  Protein classification predicting sequence
HMYIDNA

SEQ ID NO: 8096 - protein, 7 aa, Artificial sequence
  Protein classification predicting sequence
GLLPSAS

SEQ ID NO: 8097 - protein, 12 aa, Artificial sequence
  Protein classification predicting sequence
ADAVLLGAVGGP

SEQ ID NO: 8098 - protein, 7 aa, Artificial sequence
  Protein classification predicting sequence
LPGDGIG

SEQ ID NO: 8099 - protein, 7 aa, Artificial sequence
  Protein classification predicting sequence
AKDYPDV

SEQ ID NO: 8100 - protein, 9 aa, Artificial sequence
  Protein classification predicting sequence
NMFGDILSD

SEQ ID NO: 8101 - protein, 7 aa, Artificial sequence
  Protein classification predicting sequence
LIGGAAI

SEQ ID NO: 8102 - protein, 16 aa, Artificial sequence
  Protein classification predicting sequence
VRELVGGIYFGERKED

SEQ ID NO: 8103 - protein, 15 aa, Artificial sequence
  Protein classification predicting sequence
AFGLYEPCHGSAPDL

SEQ ID NO: 8104 - protein, 13 aa, Artificial sequence
  Protein classification predicting sequence
RITRMAAFMALQH

SEQ ID NO: 8105 - protein, 8 aa, Artificial sequence
  Protein classification predicting sequence
SIDKANVL

SEQ ID NO: 8106 - protein, 11 aa, Artificial sequence
  Protein classification predicting sequence
KFNFQHHLIGG

SEQ ID NO: 8107 - protein, 12 aa, Artificial sequence
  Protein classification predicting sequence
LYANLRPCNFAS

SEQ ID NO: 8108 - protein, 8 aa, Artificial sequence
  Protein classification predicting sequence
IVVLPGDH

SEQ ID NO: 8109 - protein, 22 aa, Artificial sequence
  Protein classification predicting sequence
AFGLYEPCHGSAPDLPKGKVNP

SEQ ID NO: 8110 - protein, 30 aa, Artificial sequence
  Protein classification predicting sequence
FHGGQCGAEAHESIRLVFHDSIAISPAMEA

SEQ ID NO: 8111 - protein, 13 aa, Artificial sequence
  Protein classification predicting sequence
IETAFHPNIGLDE

SEQ ID NO: 8112 - protein, 13 aa, Artificial sequence
  Protein classification predicting sequence
FPGSGGNQGEVES

SEQ ID NO: 8113 - protein, 10 aa, Artificial sequence
  Protein classification predicting sequence
VFHDSIAISP

SEQ ID NO: 8114 - protein, 18 aa, Artificial sequence
  Protein classification predicting sequence
FDSQFFVETQLRGTAFPG

SEQ ID NO: 8115 - protein, 8 aa, Artificial sequence
  Protein classification predicting sequence
SFFPAGKT

SEQ ID NO: 8116 - protein, 8 aa, Artificial sequence
  Protein classification predicting sequence
IAISPAME

SEQ ID NO: 8117 - protein, 21 aa, Artificial sequence
  Protein classification predicting sequence
DAGEFDELELVWMLSAHSVAA

SEQ ID NO: 8118 - protein, 6 aa, Artificial sequence
  Protein classification predicting sequence
AMTDCS

SEQ ID NO: 8119 - protein, 16 aa, Artificial sequence
  Protein classification predicting sequence
QCGAEAHESIRLVFHD

SEQ ID NO: 8120 - protein, 20 aa, Artificial sequence
  Protein classification predicting sequence
SNCPGAPQMNFFTGRAPATQ

SEQ ID NO: 8121 - protein, 6 aa, Artificial sequence
  Protein classification predicting sequence
FDSTPG

SEQ ID NO: 8122 - protein, 33 aa, Artificial sequence
  Protein classification predicting sequence
FDSQFFVETQLRGTAFPGSGGNQGEVESPLPGE

SEQ ID NO: 8123 - protein, 13 aa, Artificial sequence
  Protein classification predicting sequence
DFQFIFLALTQLG

SEQ ID NO: 8124 - protein, 27 aa, Artificial sequence
  Protein classification predicting sequence
DVEQACAETPFPTLTTLPGPETSVQRI

SEQ ID NO: 8125 - protein, 29 aa, Artificial sequence
  Protein classification predicting sequence
IAISPAMEAQGKFGGGGADGSIMIFDDIE

SEQ ID NO: 8126 - protein, 8 aa, Artificial sequence
  Protein classification predicting sequence
QQNLFHGG

SEQ ID NO: 8127 - protein, 20 aa, Artificial sequence
  Protein classification predicting sequence
QSDHTIARDSRTACEWQSFV

SEQ ID NO: 8128 - protein, 15 aa, Artificial sequence
  Protein classification predicting sequence
ATQAAPDGLVPEPFH

SEQ ID NO: 8129 - protein, 11 aa, Artificial sequence
  Protein classification predicting sequence
APDGLVPEPFH

SEQ ID NO: 8130 - protein, 6 aa, Artificial sequence
  Protein classification predicting sequence
AHSVAA

SEQ ID NO: 8131 - protein, 7 aa, Artificial sequence
  Protein classification predicting sequence
QHIALNT

SEQ ID NO: 8132 - protein, 7 aa, Artificial sequence
  Protein classification predicting sequence
ELQAWCR

SEQ ID NO: 8133 - protein, 9 aa, Artificial sequence
  Protein classification predicting sequence
YGNQNSTIT

SEQ ID NO: 8134 - protein, 7 aa, Artificial sequence
  Protein classification predicting sequence
HQLISHW

SEQ ID NO: 8135 - protein, 10 aa, Artificial sequence
  Protein classification predicting sequence
DYPYAVDGLE

SEQ ID NO: 8136 - protein, 8 aa, Artificial sequence
  Protein classification predicting sequence
ELQAWWKE

SEQ ID NO: 8137 - protein, 6 aa, Artificial sequence
  Protein classification predicting sequence
CTIIIW

SEQ ID NO: 8138 - protein, 8 aa, Artificial sequence
  Protein classification predicting sequence
YDVYNDLG

SEQ ID NO: 8139 - protein, 6 aa, Artificial sequence
  Protein classification predicting sequence
EFPPKS

SEQ ID NO: 8140 - protein, 9 aa, Artificial sequence
  Protein classification predicting sequence
MSAVVYKDW

SEQ ID NO: 8141 - protein, 6 aa, Artificial sequence
  Protein classification predicting sequence
QAWWKE

SEQ ID NO: 8142 - protein, 6 aa, Artificial sequence
  Protein classification predicting sequence
PGAFYI

SEQ ID NO: 8143 - protein, 11 aa, Artificial sequence
  Protein classification predicting sequence
VYLPRDEAFGH

SEQ ID NO: 8144 - protein, 7 aa, Artificial sequence
  Protein classification predicting sequence
IWLLAKA

SEQ ID NO: 8145 - protein, 7 aa, Artificial sequence
  Protein classification predicting sequence
HPIHKLL

SEQ ID NO: 8146 - protein, 6 aa, Artificial sequence
  Protein classification predicting sequence
ILNRPT

SEQ ID NO: 8147 - protein, 6 aa, Artificial sequence
  Protein classification predicting sequence
RIFFAN

SEQ ID NO: 8148 - protein, 7 aa, Artificial sequence
  Protein classification predicting sequence
EFDSFED

SEQ ID NO: 8149 - protein, 8 aa, Artificial sequence
  Protein classification predicting sequence
YNDLGNPD

SEQ ID NO: 8150 - protein, 10 aa, Artificial sequence
  Protein classification predicting sequence
EFFLKSLTLE

SEQ ID NO: 8151 - protein, 9 aa, Artificial sequence
  Protein classification predicting sequence
YATRTILFL

SEQ ID NO: 8152 - protein, 8 aa, Artificial sequence
  Protein classification predicting sequence
SHWLNTHA

SEQ ID NO: 8153 - protein, 15 aa, Artificial sequence
  Protein classification predicting sequence
ASALHAAVNFGQYPY

SEQ ID NO: 8154 - protein, 8 aa, Artificial sequence
  Protein classification predicting sequence
KAYLRTIT

SEQ ID NO: 8155 - protein, 8 aa, Artificial sequence
  Protein classification predicting sequence
LSVIEILS

SEQ ID NO: 8156 - protein, 7 aa, Artificial sequence
  Protein classification predicting sequence
IEDYPYA

SEQ ID NO: 8157 - protein, 6 aa, Artificial sequence
  Protein classification predicting sequence
ELQAWW

SEQ ID NO: 8158 - protein, 8 aa, Artificial sequence
  Protein classification predicting sequence
IATNRQLS

SEQ ID NO: 8159 - protein, 9 aa, Artificial sequence
  Protein classification predicting sequence
DLVKRGVAV

SEQ ID NO: 8160 - protein, 7 aa, Artificial sequence
  Protein classification predicting sequence
YLPSETP

SEQ ID NO: 8161 - protein, 8 aa, Artificial sequence
  Protein classification predicting sequence
MNINALAR

SEQ ID NO: 8162 - protein, 9 aa, Artificial sequence
  Protein classification predicting sequence
WVFTDQALP

SEQ ID NO: 8163 - protein, 17 aa, Artificial sequence
  Protein classification predicting sequence
ASALHAAVNFGQYPYGG

SEQ ID NO: 8164 - protein, 6 aa, Artificial sequence
  Protein classification predicting sequence
LQEFPP

SEQ ID NO: 8165 - protein, 9 aa, Artificial sequence
  Protein classification predicting sequence
VNDSCYHQL

SEQ ID NO: 8166 - protein, 8 aa, Artificial sequence
  Protein classification predicting sequence
VYKNWVFT

SEQ ID NO: 8167 - protein, 12 aa, Artificial sequence
  Protein classification predicting sequence
EMSAVVYKDWVF

SEQ ID NO: 8168 - protein, 6 aa, Artificial sequence
  Protein classification predicting sequence
DGLEIW

SEQ ID NO: 8169 - protein, 11 aa, Artificial sequence
  Protein classification predicting sequence
GHGDLKDKPWW

SEQ ID NO: 8170 - protein, 13 aa, Artificial sequence
  Protein classification predicting sequence
GSAGCSEKHLLDK

SEQ ID NO: 8171 - protein, 22 aa, Artificial sequence
  Protein classification predicting sequence
NHWQEDLMFGYQFLNGCNPVLI

SEQ ID NO: 8172 - protein, 15 aa, Artificial sequence
  Protein classification predicting sequence
ELLDGIDANKTDPCT

SEQ ID NO: 8173 - protein, 27 aa, Artificial sequence
  Protein classification predicting sequence
QFLAAPICLLYKNLANKIVPIAIQLNQ

SEQ ID NO: 8174 - protein, 21 aa, Artificial sequence
  Protein classification predicting sequence
GLFDKANATGGGGHVQMVQRA

SEQ ID NO: 8175 - protein, 13 aa, Artificial sequence
  Protein classification predicting sequence
SLCFPEAIKARGM

SEQ ID NO: 8176 - protein, 15 aa, Artificial sequence
  Protein classification predicting sequence
KLPVTTEMVECSLER

SEQ ID NO: 8177 - protein, 12 aa, Artificial sequence
  Protein classification predicting sequence
TAKGVVTIEQIV

SEQ ID NO: 8178 - protein, 45 aa, Artificial sequence
  Protein classification predicting sequence
TLPDRGRSCWHLGAVWALSQFQENELFLGMYPEEHFIEKPVKEAM

SEQ ID NO: 8179 - protein, 11 aa, Artificial sequence
  Protein classification predicting sequence
PRDENFGHLKS

SEQ ID NO: 8180 - protein, 9 aa, Artificial sequence
  Protein classification predicting sequence
REMLAGVNP

SEQ ID NO: 8181 - protein, 10 aa, Artificial sequence
  Protein classification predicting sequence
PYPRRGRTGR

SEQ ID NO: 8182 - protein, 7 aa, Artificial sequence
  Protein classification predicting sequence
LLHPHFR

SEQ ID NO: 8183 - protein, 7 aa, Artificial sequence
  Protein classification predicting sequence
WWPKLQT

SEQ ID NO: 8184 - protein, 7 aa, Artificial sequence
  Protein classification predicting sequence
SRHASDE

SEQ ID NO: 8185 - protein, 8 aa, Artificial sequence
  Protein classification predicting sequence
RGDGTGER

SEQ ID NO: 8186 - protein, 11 aa, Artificial sequence
  Protein classification predicting sequence
PYPRRCRTGRP

SEQ ID NO: 8187 - protein, 9 aa, Artificial sequence
  Protein classification predicting sequence
LPADLIKRG

SEQ ID NO: 8188 - protein, 9 aa, Artificial sequence
  Protein classification predicting sequence
SHWLNTHAV

SEQ ID NO: 8189 - protein, 6 aa, Artificial sequence
  Protein classification predicting sequence
PHYRDT

SEQ ID NO: 8190 - protein, 5 aa, Artificial sequence
  Protein classification predicting sequence
PWWPK

SEQ ID NO: 8191 - protein, 13 aa, Artificial sequence
  Protein classification predicting sequence
MNSSGSTGLPKGV

SEQ ID NO: 8192 - protein, 9 aa, Artificial sequence
  Protein classification predicting sequence
EIASGGAPL

SEQ ID NO: 8193 - protein, 16 aa, Artificial sequence
  Protein classification predicting sequence
IVDRLKSLIKYKGYQV

SEQ ID NO: 8194 - protein, 11 aa, Artificial sequence
  Protein classification predicting sequence
ITPEGDDKPGA

SEQ ID NO: 8195 - protein, 12 aa, Artificial sequence
  Protein classification predicting sequence
FVDEVPKGLTGK

SEQ ID NO: 8196 - protein, 8 aa, Artificial sequence
  Protein classification predicting sequence
TKKLNVGT

SEQ ID NO: 8197 - protein, 6 aa, Artificial sequence
  Protein classification predicting sequence
LLDQMS

SEQ ID NO: 8198 - protein, 7 aa, Artificial sequence
  Protein classification predicting sequence
KDFRVFG

SEQ ID NO: 8199 - protein, 9 aa, Artificial sequence
  Protein classification predicting sequence
GHDIHNIDH

SEQ ID NO: 8200 - protein, 9 aa, Artificial sequence
  Protein classification predicting sequence
KGQWRDFVL

SEQ ID NO: 8201 - protein, 9 aa, Artificial sequence
  Protein classification predicting sequence
LEHHFTEFG

SEQ ID NO: 8202 - protein, 8 aa, Artificial sequence
  Protein classification predicting sequence
PTCMTAES

SEQ ID NO: 8203 - protein, 21 aa, Artificial sequence
  Protein classification predicting sequence
WLLEHHFTEFGLLGNPYVAAA

SEQ ID NO: 8204 - protein, 8 aa, Artificial sequence
  Protein classification predicting sequence
FGICRGLY

SEQ ID NO: 8205 - protein, 10 aa, Artificial sequence
  Protein classification predicting sequence
KDFRVFGTDM

SEQ ID NO: 8206 - protein, 7 aa, Artificial sequence
  Protein classification predicting sequence
DNEHIKF

SEQ ID NO: 8207 - protein, 10 aa, Artificial sequence
  Protein classification predicting sequence
NICCGFEANG

SEQ ID NO: 8208 - protein, 9 aa, Artificial sequence
  Protein classification predicting sequence
WYDSYVNAT

SEQ ID NO: 8209 - protein, 9 aa, Artificial sequence
  Protein classification predicting sequence
AESASTTEW

SEQ ID NO: 8210 - protein, 10 aa, Artificial sequence
  Protein classification predicting sequence
GLPMVLSWII

SEQ ID NO: 8211 - protein, 18 aa, Artificial sequence
  Protein classification predicting sequence
LNVGTAAIVLPTAHPVRQ

SEQ ID NO: 8212 - protein, 12 aa, Artificial sequence
  Protein classification predicting sequence
GLPMILSWIINT

SEQ ID NO: 8213 - protein, 6 aa, Artificial sequence
  Protein classification predicting sequence
NPVGTP

SEQ ID NO: 8214 - protein, 8 aa, Artificial sequence
  Protein classification predicting sequence
FGLFFLNF

SEQ ID NO: 8215 - protein, 7 aa, Artificial sequence
  Protein classification predicting sequence
ITTHHPV

SEQ ID NO: 8216 - protein, 6 aa, Artificial sequence
  Protein classification predicting sequence
ISVNPH

SEQ ID NO: 8217 - protein, 7 aa, Artificial sequence
  Protein classification predicting sequence
LLSFESM

SEQ ID NO: 8218 - protein, 13 aa, Artificial sequence
  Protein classification predicting sequence
SEGRFILGFSDCE

SEQ ID NO: 8219 - protein, 10 aa, Artificial sequence
  Protein classification predicting sequence
SILRAILTKN

SEQ ID NO: 8220 - protein, 9 aa, Artificial sequence
  Protein classification predicting sequence
AHDICFYDQ

SEQ ID NO: 8221 - protein, 17 aa, Artificial sequence
  Protein classification predicting sequence
HLLAGNVPLSGVTSILR

SEQ ID NO: 8222 - protein, 6 aa, Artificial sequence
  Protein classification predicting sequence
ACFSTQ

SEQ ID NO: 8223 - protein, 8 aa, Artificial sequence
  Protein classification predicting sequence
MRPLQRLV

SEQ ID NO: 8224 - protein, 9 aa, Artificial sequence
  Protein classification predicting sequence
IQWENNGQV

SEQ ID NO: 8225 - protein, 16 aa, Artificial sequence
  Protein classification predicting sequence
DDNPYYNYYDTYERPR

SEQ ID NO: 8226 - protein, 20 aa, Artificial sequence
  Protein classification predicting sequence
VAEGHKASFCLEDTSCDYGY

SEQ ID NO: 8227 - protein, 17 aa, Artificial sequence
  Protein classification predicting sequence
ACTAHTQGLSPGCYDTY

SEQ ID NO: 8228 - protein, 7 aa, Artificial sequence
  Protein classification predicting sequence
LYDLEFL

SEQ ID NO: 8229 - protein, 8 aa, Artificial sequence
  Protein classification predicting sequence
GRRVAAFG

SEQ ID NO: 8230 - protein, 7 aa, Artificial sequence
  Protein classification predicting sequence
LRAETKP

SEQ ID NO: 8231 - protein, 6 aa, Artificial sequence
  Protein classification predicting sequence
FAHCYK

SEQ ID NO: 8232 - protein, 9 aa, Artificial sequence
  Protein classification predicting sequence
DVSADTTNP

SEQ ID NO: 8233 - protein, 16 aa, Artificial sequence
  Protein classification predicting sequence
LSVISIDHLPSLLPRE

SEQ ID NO: 8234 - protein, 7 aa, Artificial sequence
  Protein classification predicting sequence
DVSADTT

SEQ ID NO: 8235 - protein, 13 aa, Artificial sequence
  Protein classification predicting sequence
HEHIQFAHCYKDQ

SEQ ID NO: 8236 - protein, 8 aa, Artificial sequence
  Protein classification predicting sequence
PTTYAGSE

SEQ ID NO: 8237 - protein, 7 aa, Artificial sequence
  Protein classification predicting sequence
THTVVLP

SEQ ID NO: 8238 - protein, 14 aa, Artificial sequence
  Protein classification predicting sequence
VYTPTVGEACQKYG

SEQ ID NO: 8239 - protein, 9 aa, Artificial sequence
  Protein classification predicting sequence
PQGLYISLK

SEQ ID NO: 8240 - protein, 14 aa, Artificial sequence
  Protein classification predicting sequence
GMGIPVGKLALYTA

SEQ ID NO: 8241 - protein, 12 aa, Artificial sequence
  Protein classification predicting sequence
ERLFYKLLIDNV

SEQ ID NO: 8242 - protein, 8 aa, Artificial sequence
  Protein classification predicting sequence
EFMSAVKQ

SEQ ID NO: 8243 - protein, 7 aa, Artificial sequence
  Protein classification predicting sequence
DSKGLIV

SEQ ID NO: 8244 - protein, 10 aa, Artificial sequence
  Protein classification predicting sequence
FASGSPFDPV

SEQ ID NO: 8245 - protein, 7 aa, Artificial sequence
  Protein classification predicting sequence
VGEACQK

SEQ ID NO: 8246 - protein, 11 aa, Artificial sequence
  Protein classification predicting sequence
FNDDIQGTASV

SEQ ID NO: 8247 - protein, 15 aa, Artificial sequence
  Protein classification predicting sequence
FNDDIQGTASVAVAG

SEQ ID NO: 8248 - protein, 7 aa, Artificial sequence
  Protein classification predicting sequence
LAALRIT

SEQ ID NO: 8249 - protein, 8 aa, Artificial sequence
  Protein classification predicting sequence
FQGAGEAA

SEQ ID NO: 8250 - protein, 17 aa, Artificial sequence
  Protein classification predicting sequence
FMPIVYTPTVGLACQQY

SEQ ID NO: 8251 - protein, 11 aa, Artificial sequence
  Protein classification predicting sequence
IFASGSPFDPV

SEQ ID NO: 8252 - protein, 15 aa, Artificial sequence
  Protein classification predicting sequence
FMPIVYTPTVGLACQ

SEQ ID NO: 8253 - protein, 8 aa, Artificial sequence
  Protein classification predicting sequence
YIGLRQRR

SEQ ID NO: 8254 - protein, 9 aa, Artificial sequence
  Protein classification predicting sequence
LIQFEDFAN

SEQ ID NO: 8255 - protein, 11 aa, Artificial sequence
  Protein classification predicting sequence
NAFRLLNKYRN

SEQ ID NO: 8256 - protein, 8 aa, Artificial sequence
  Protein classification predicting sequence
VDSKGLIV

SEQ ID NO: 8257 - protein, 11 aa, Artificial sequence
  Protein classification predicting sequence
QFEDFANHNAF

SEQ ID NO: 8258 - protein, 8 aa, Artificial sequence
  Protein classification predicting sequence
PWAHEHEP

SEQ ID NO: 8259 - protein, 6 aa, Artificial sequence
  Protein classification predicting sequence
AESCMY

SEQ ID NO: 8260 - protein, 22 aa, Artificial sequence
  Protein classification predicting sequence
IQVIVVTDGERILGLGDLGCQG

SEQ ID NO: 8261 - protein, 7 aa, Artificial sequence
  Protein classification predicting sequence
HNKGLAF

SEQ ID NO: 8262 - protein, 10 aa, Artificial sequence
  Protein classification predicting sequence
DAWAFVERIC

SEQ ID NO: 8263 - protein, 13 aa, Artificial sequence
  Protein classification predicting sequence
HSFDPCLACSTHV

SEQ ID NO: 8264 - protein, 9 aa, Artificial sequence
  Protein classification predicting sequence
NGYWDNPAY

SEQ ID NO: 8265 - protein, 9 aa, Artificial sequence
  Protein classification predicting sequence
GRTLARALE

SEQ ID NO: 8266 - protein, 7 aa, Artificial sequence
  Protein classification predicting sequence
HYLEALD

SEQ ID NO: 8267 - protein, 9 aa, Artificial sequence
  Protein classification predicting sequence
ERICGVCTG

SEQ ID NO: 8268 - protein, 16 aa, Artificial sequence
  Protein classification predicting sequence
NYQCVVPTTWNGSPRD

SEQ ID NO: 8269 - protein, 12 aa, Artificial sequence
  Protein classification predicting sequence
TRIEGHMRCEVN

SEQ ID NO: 8270 - protein, 9 aa, Artificial sequence
  Protein classification predicting sequence
FGGKNPHPN

SEQ ID NO: 8271 - protein, 10 aa, Artificial sequence
  Protein classification predicting sequence
YQCVVPTTWN

SEQ ID NO: 8272 - protein, 19 aa, Artificial sequence
  Protein classification predicting sequence
EILRTLHSFDPCLACSTHV

SEQ ID NO: 8273 - protein, 6 aa, Artificial sequence
  Protein classification predicting sequence
SSPGYF

SEQ ID NO: 8274 - protein, 11 aa, Artificial sequence
  Protein classification predicting sequence
VPTTWNGSPRD

SEQ ID NO: 8275 - protein, 7 aa, Artificial sequence
  Protein classification predicting sequence
WLYGGGL

SEQ ID NO: 8276 - protein, 12 aa, Artificial sequence
  Protein classification predicting sequence
THYLEALDLQKE

SEQ ID NO: 8277 - protein, 12 aa, Artificial sequence
  Protein classification predicting sequence
HTIFGGKNPHPN

SEQ ID NO: 8278 - protein, 10 aa, Artificial sequence
  Protein classification predicting sequence
IFGGKNPHPN

SEQ ID NO: 8279 - protein, 8 aa, Artificial sequence
  Protein classification predicting sequence
IGAFEASL

SEQ ID NO: 8280 - protein, 12 aa, Artificial sequence
  Protein classification predicting sequence
YILAVEGNPPLN

SEQ ID NO: 8281 - protein, 6 aa, Artificial sequence
  Protein classification predicting sequence
PNPTQA

SEQ ID NO: 8282 - protein, 10 aa, Artificial sequence
  Protein classification predicting sequence
MFYGQRIHDK

SEQ ID NO: 8283 - protein, 13 aa, Artificial sequence
  Protein classification predicting sequence
YRRPHFDAGQFVE

SEQ ID NO: 8284 - protein, 10 aa, Artificial sequence
  Protein classification predicting sequence
CASWGCVQAA

SEQ ID NO: 8285 - protein, 22 aa, Artificial sequence
  Protein classification predicting sequence
KVPGCPPIAEVMTGVITYMLTF

SEQ ID NO: 8286 - protein, 10 aa, Artificial sequence
  Protein classification predicting sequence
RRQGITRRSF

SEQ ID NO: 8287 - protein, 5 aa, Artificial sequence
  Protein classification predicting sequence
GMFCI

SEQ ID NO: 8288 - protein, 12 aa, Artificial sequence
  Protein classification predicting sequence
NNEETFYQAMRR

SEQ ID NO: 8289 - protein, 10 aa, Artificial sequence
  Protein classification predicting sequence
RRSFLKYCSL

SEQ ID NO: 8290 - protein, 19 aa, Artificial sequence
  Protein classification predicting sequence
RRSFLKYCSLAATSLGLGA

SEQ ID NO: 8291 - protein, 31 aa, Artificial sequence
  Protein classification predicting sequence
IAWALENKPRIPVVWIHGLECTCCTESFIRS

SEQ ID NO: 8292 - protein, 8 aa, Artificial sequence
  Protein classification predicting sequence
HGLECTCC

SEQ ID NO: 8293 - protein, 6 aa, Artificial sequence
  Protein classification predicting sequence
ESFIRS

SEQ ID NO: 8294 - protein, 35 aa, Artificial sequence
  Protein classification predicting sequence
HPLAKDVILSLISLDYDDTLMAAAGTQAEEVFEDI

SEQ ID NO: 8295 - protein, 20 aa, Artificial sequence
  Protein classification predicting sequence
YILAVEGNPPLGEQGMFCIS

SEQ ID NO: 8296 - protein, 44 aa, Artificial sequence
  Protein classification predicting sequence
KRAAAGASAIIAWGTCASWGCVQAARPNPTQATPIDKVITDKPI

SEQ ID NO: 8297 - protein, 8 aa, Artificial sequence
  Protein classification predicting sequence
KVPGCPPI

SEQ ID NO: 8298 - protein, 26 aa, Artificial sequence
  Protein classification predicting sequence
KVPGCPPIPDVMSAIITYMVTFDRLP

SEQ ID NO: 8299 - protein, 27 aa, Artificial sequence
  Protein classification predicting sequence
GRPLMFYGQRIHDKCYRRAHFDAGEFV

SEQ ID NO: 8300 - protein, 28 aa, Artificial sequence
  Protein classification predicting sequence
SWDDDAARKGYCLYKMGCKGPTTYNACS

SEQ ID NO: 8301 - protein, 38 aa, Artificial sequence
  Protein classification predicting sequence
ENGFWDRGSFYSRVVDIPQMGTHSTADTVGLTALGVVA

SEQ ID NO: 8302 - protein, 11 aa, Artificial sequence
  Protein classification predicting sequence
ETFYEVMRRQG

SEQ ID NO: 8303 - protein, 7 aa, Artificial sequence
  Protein classification predicting sequence
GFWDKGS

SEQ ID NO: 8304 - protein, 5 aa, Artificial sequence
  Protein classification predicting sequence
SFPIQ

SEQ ID NO: 8305 - protein, 9 aa, Artificial sequence
  Protein classification predicting sequence
MAAAGHQAE

SEQ ID NO: 8306 - protein, 13 aa, Artificial sequence
  Protein classification predicting sequence
PNPTQATPIDKVI

SEQ ID NO: 8307 - protein, 10 aa, Artificial sequence
  Protein classification predicting sequence
AMETKPRTPV

SEQ ID NO: 8308 - protein, 9 aa, Artificial sequence
  Protein classification predicting sequence
PELDRQGRP

SEQ ID NO: 8309 - protein, 24 aa, Artificial sequence
  Protein classification predicting sequence
MFYSQRIHDKCYRRPHFDAGQFVE

SEQ ID NO: 8310 - protein, 9 aa, Artificial sequence
  Protein classification predicting sequence
FPIQSGHGC

SEQ ID NO: 8311 - protein, 9 aa, Artificial sequence
  Protein classification predicting sequence
WNEGTSFPI

SEQ ID NO: 8312 - protein, 8 aa, Artificial sequence
  Protein classification predicting sequence
RRPHFDAG

SEQ ID NO: 8313 - protein, 7 aa, Artificial sequence
  Protein classification predicting sequence
SHDTRRF

SEQ ID NO: 8314 - protein, 8 aa, Artificial sequence
  Protein classification predicting sequence
APYERPAL

SEQ ID NO: 8315 - protein, 10 aa, Artificial sequence
  Protein classification predicting sequence
YDYLPYFYSR

SEQ ID NO: 8316 - protein, 7 aa, Artificial sequence
  Protein classification predicting sequence
GMSREDL

SEQ ID NO: 8317 - protein, 7 aa, Artificial sequence
  Protein classification predicting sequence
HGDLMVP

SEQ ID NO: 8318 - protein, 6 aa, Artificial sequence
  Protein classification predicting sequence
GMERKD

SEQ ID NO: 8319 - protein, 8 aa, Artificial sequence
  Protein classification predicting sequence
QYPDVNHA

SEQ ID NO: 8320 - protein, 6 aa, Artificial sequence
  Protein classification predicting sequence
RGAAII

SEQ ID NO: 8321 - protein, 8 aa, Artificial sequence
  Protein classification predicting sequence
IVQGLPID

SEQ ID NO: 8322 - protein, 6 aa, Artificial sequence
  Protein classification predicting sequence
QYPDVN

SEQ ID NO: 8323 - protein, 7 aa, Artificial sequence
  Protein classification predicting sequence
TGAAGQI

SEQ ID NO: 8324 - protein, 8 aa, Artificial sequence
  Protein classification predicting sequence
GMERRDLL

SEQ ID NO: 8325 - protein, 9 aa, Artificial sequence
  Protein classification predicting sequence
VVGNPANTN

SEQ ID NO: 8326 - protein, 9 aa, Artificial sequence
  Protein classification predicting sequence
APSIPKENF

SEQ ID NO: 8327 - protein, 9 aa, Artificial sequence
  Protein classification predicting sequence
IKARKLSSA

SEQ ID NO: 8328 - protein, 27 aa, Artificial sequence
  Protein classification predicting sequence
NCKVLVVANPANTNALILKEFAPSIPE

SEQ ID NO: 8329 - protein, 13 aa, Artificial sequence
  Protein classification predicting sequence
GEFITTVQQRGAA

SEQ ID NO: 8330 - protein, 8 aa, Artificial sequence
  Protein classification predicting sequence
TVQQRGAA

SEQ ID NO: 8331 - protein, 11 aa, Artificial sequence
  Protein classification predicting sequence
AILGAAGGIGQ

SEQ ID NO: 8332 - protein, 9 aa, Artificial sequence
  Protein classification predicting sequence
DLFNVNAGI

SEQ ID NO: 8333 - protein, 7 aa, Artificial sequence
  Protein classification predicting sequence
ISNPVNS

SEQ ID NO: 8334 - protein, 6 aa, Artificial sequence
  Protein classification predicting sequence
PRKPGM

SEQ ID NO: 8335 - protein, 8 aa, Artificial sequence
  Protein classification predicting sequence
PRKPGMTR

SEQ ID NO: 8336 - protein, 12 aa, Artificial sequence
  Protein classification predicting sequence
PRKPGMTRDDLF

SEQ ID NO: 8337 - protein, 6 aa, Artificial sequence
  Protein classification predicting sequence
GVTTLD

SEQ ID NO: 8338 - protein, 9 aa, Artificial sequence
  Protein classification predicting sequence
ISNPVNSTV

SEQ ID NO: 8339 - protein, 9 aa, Artificial sequence
  Protein classification predicting sequence
LMKMNPLVS

SEQ ID NO: 8340 - protein, 15 aa, Artificial sequence
  Protein classification predicting sequence
LHLYDVVNAPGVTAD

SEQ ID NO: 8341 - protein, 26 aa, Artificial sequence
  Protein classification predicting sequence
VPVVGGHAGVTILPLLSQVKPPSSFT

SEQ ID NO: 8342 - protein, 7 aa, Artificial sequence
  Protein classification predicting sequence
TELPFFA

SEQ ID NO: 8343 - protein, 12 aa, Artificial sequence
  Protein classification predicting sequence
GGIGQPLALLMK

SEQ ID NO: 8344 - protein, 8 aa, Artificial sequence
  Protein classification predicting sequence
LHLYDVVN

SEQ ID NO: 8345 - protein, 10 aa, Artificial sequence
  Protein classification predicting sequence
DLFNINAGIV

SEQ ID NO: 8346 - protein, 5 aa, Artificial sequence
  Protein classification predicting sequence
AKCCP

SEQ ID NO: 8347 - protein, 27 aa, Artificial sequence
  Protein classification predicting sequence
RIQNGGTEVVEAKAGAGSATLSMAYAA

SEQ ID NO: 8348 - protein, 8 aa, Artificial sequence
  Protein classification predicting sequence
TILPLLSQ

SEQ ID NO: 8349 - protein, 8 aa, Artificial sequence
  Protein classification predicting sequence
VASQVTEL

SEQ ID NO: 8350 - protein, 12 aa, Artificial sequence
  Protein classification predicting sequence
LGAAGGIGQPLA

SEQ ID NO: 8351 - protein, 22 aa, Artificial sequence
  Protein classification predicting sequence
LGAAGGIGQPLALLMKLNPLVS

SEQ ID NO: 8352 - protein, 10 aa, Artificial sequence
  Protein classification predicting sequence
GHAGVTILPL

SEQ ID NO: 8353 - protein, 11 aa, Artificial sequence
  Protein classification predicting sequence
TKRTQDGGTEV

SEQ ID NO: 8354 - protein, 16 aa, Artificial sequence
  Protein classification predicting sequence
RKVAVLGAAGGIGQPL

SEQ ID NO: 8355 - protein, 7 aa, Artificial sequence
  Protein classification predicting sequence
GVYDKRK

SEQ ID NO: 8356 - protein, 14 aa, Artificial sequence
  Protein classification predicting sequence
ALTKRTQDGGTEVV

SEQ ID NO: 8357 - protein, 10 aa, Artificial sequence
  Protein classification predicting sequence
GSATLSMAYA

SEQ ID NO: 8358 - protein, 9 aa, Artificial sequence
  Protein classification predicting sequence
LGAAGGIGQ

SEQ ID NO: 8359 - protein, 14 aa, Artificial sequence
  Protein classification predicting sequence
ISNPVNSTVPIAAE

SEQ ID NO: 8360 - protein, 7 aa, Artificial sequence
  Protein classification predicting sequence
FKKAGTY

SEQ ID NO: 8361 - protein, 7 aa, Artificial sequence
  Protein classification predicting sequence
GVTTLDV

SEQ ID NO: 8362 - protein, 10 aa, Artificial sequence
  Protein classification predicting sequence
TELPFFASKV

SEQ ID NO: 8363 - protein, 12 aa, Artificial sequence
  Protein classification predicting sequence
ISNPVNSTVPIA

SEQ ID NO: 8364 - protein, 6 aa, Artificial sequence
  Protein classification predicting sequence
FADACL

SEQ ID NO: 8365 - protein, 6 aa, Artificial sequence
  Protein classification predicting sequence
NPVNST

SEQ ID NO: 8366 - protein, 15 aa, Artificial sequence
  Protein classification predicting sequence
AKAGAGSATLSMAYA

SEQ ID NO: 8367 - protein, 6 aa, Artificial sequence
  Protein classification predicting sequence
FEEKMI

SEQ ID NO: 8368 - protein, 57 aa, Artificial sequence
  Protein classification predicting sequence
VKGYLGPEQLPDCLKGCDVVVIPAGVPRKPGMTRDDLFNTNATIVATLTAACAQHCP

SEQ ID NO: 8369 - protein, 13 aa, Artificial sequence
  Protein classification predicting sequence
FVAELKGLDPARV

SEQ ID NO: 8370 - protein, 7 aa, Artificial sequence
  Protein classification predicting sequence
VPVIGGH

SEQ ID NO: 8371 - protein, 30 aa, Artificial sequence
  Protein classification predicting sequence
VPVIGGHAGKTIIPLISQCTPKVDFPQDQL

SEQ ID NO: 8372 - protein, 7 aa, Artificial sequence
  Protein classification predicting sequence
VIGGHSG

SEQ ID NO: 8373 - protein, 8 aa, Artificial sequence
  Protein classification predicting sequence
GSATLSMA

SEQ ID NO: 8374 - protein, 18 aa, Artificial sequence
  Protein classification predicting sequence
MELEDSLYPLLREVSIGI

SEQ ID NO: 8375 - protein, 16 aa, Artificial sequence
  Protein classification predicting sequence
VVGNPCNTNALICLKN

SEQ ID NO: 8376 - protein, 7 aa, Artificial sequence
  Protein classification predicting sequence
DTMLPGE

SEQ ID NO: 8377 - protein, 24 aa, Artificial sequence
  Protein classification predicting sequence
AVSGAAGMISNHLLFKLASGEVFG

SEQ ID NO: 8378 - protein, 17 aa, Artificial sequence
  Protein classification predicting sequence
WALLIGAKPRGPGMERA

SEQ ID NO: 8379 - protein, 14 aa, Artificial sequence
  Protein classification predicting sequence
FCLTYDLKAEEETK

SEQ ID NO: 8380 - protein, 8 aa, Artificial sequence
  Protein classification predicting sequence
VSIGIDPY

SEQ ID NO: 8381 - protein, 8 aa, Artificial sequence
  Protein classification predicting sequence
KWLEEEFT

SEQ ID NO: 8382 - protein, 12 aa, Artificial sequence
  Protein classification predicting sequence
ISNHLLFKLASG

SEQ ID NO: 8383 - protein, 7 aa, Artificial sequence
  Protein classification predicting sequence
AHLTGEG

SEQ ID NO: 8384 - protein, 9 aa, Artificial sequence
  Protein classification predicting sequence
GQPLSLLLK

SEQ ID NO: 8385 - protein, 6 aa, Artificial sequence
  Protein classification predicting sequence
TRDDLF

SEQ ID NO: 8386 - protein, 12 aa, Artificial sequence
  Protein classification predicting sequence
VAVTGAAGQIGY

SEQ ID NO: 8387 - protein, 8 aa, Artificial sequence
  Protein classification predicting sequence
LLFRIASG

SEQ ID NO: 8388 - protein, 14 aa, Artificial sequence
  Protein classification predicting sequence
VKVLVVGNPANTNA

SEQ ID NO: 8389 - protein, 24 aa, Artificial sequence
  Protein classification predicting sequence
VKVLVVGNPANTNAYIAMKSAPDL

SEQ ID NO: 8390 - protein, 15 aa, Artificial sequence
  Protein classification predicting sequence
KNFTAMLRLDHNRAL

SEQ ID NO: 8391 - protein, 8 aa, Artificial sequence
  Protein classification predicting sequence
RLDHNRAL

SEQ ID NO: 8392 - protein, 6 aa, Artificial sequence
  Protein classification predicting sequence
VWGNHS

SEQ ID NO: 8393 - protein, 15 aa, Artificial sequence
  Protein classification predicting sequence
CENGEYKRVEGLEID

SEQ ID NO: 8394 - protein, 8 aa, Artificial sequence
  Protein classification predicting sequence
APVTPGVA

SEQ ID NO: 8395 - protein, 7 aa, Artificial sequence
  Protein classification predicting sequence
IITNPVN

SEQ ID NO: 8396 - protein, 6 aa, Artificial sequence
  Protein classification predicting sequence
AGVYDK

SEQ ID NO: 8397 - protein, 11 aa, Artificial sequence
  Protein classification predicting sequence
AGVYDKRKLFG

SEQ ID NO: 8398 - protein, 16 aa, Artificial sequence
  Protein classification predicting sequence
VIGGHSGVTILPLLSQ

SEQ ID NO: 8399 - protein, 12 aa, Artificial sequence
  Protein classification predicting sequence
DVTAFVLGGHGD

SEQ ID NO: 8400 - protein, 7 aa, Artificial sequence
  Protein classification predicting sequence
DLVKMGW

SEQ ID NO: 8401 - protein, 6 aa, Artificial sequence
  Protein classification predicting sequence
YAPAAS

SEQ ID NO: 8402 - protein, 7 aa, Artificial sequence
  Protein classification predicting sequence
LSGQYGV

SEQ ID NO: 8403 - protein, 8 aa, Artificial sequence
  Protein classification predicting sequence
GMERKDLL

SEQ ID NO: 8404 - protein, 14 aa, Artificial sequence
  Protein classification predicting sequence
VWGNHSPTMYADYR

SEQ ID NO: 8405 - protein, 11 aa, Artificial sequence
  Protein classification predicting sequence
INDDAWNRDTF

SEQ ID NO: 8406 - protein, 13 aa, Artificial sequence
  Protein classification predicting sequence
SSAASAANAAIDH

SEQ ID NO: 8407 - protein, 11 aa, Artificial sequence
  Protein classification predicting sequence
PTVGKRGAAII

SEQ ID NO: 8408 - protein, 15 aa, Artificial sequence
  Protein classification predicting sequence
LLGNGSAYYAPAASL

SEQ ID NO: 8409 - protein, 7 aa, Artificial sequence
  Protein classification predicting sequence
SDVVVIT

SEQ ID NO: 8410 - protein, 8 aa, Artificial sequence
  Protein classification predicting sequence
SPNAIIVV

SEQ ID NO: 8411 - protein, 23 aa, Artificial sequence
  Protein classification predicting sequence
DSDVVVITAGIARKPGMSRDDLV

SEQ ID NO: 8412 - protein, 7 aa, Artificial sequence
  Protein classification predicting sequence
VTKEVVK

SEQ ID NO: 8413 - protein, 7 aa, Artificial sequence
  Protein classification predicting sequence
IIVLTNP

SEQ ID NO: 8414 - protein, 11 aa, Artificial sequence
  Protein classification predicting sequence
RYSYAGGIPLE

SEQ ID NO: 8415 - protein, 8 aa, Artificial sequence
  Protein classification predicting sequence
GVPTILGG

SEQ ID NO: 8416 - protein, 10 aa, Artificial sequence
  Protein classification predicting sequence
GFDANIIGTS

SEQ ID NO: 8417 - protein, 38 aa, Artificial sequence
  Protein classification predicting sequence
AQELNLSVKDITGFVLGGHGDDMVPLVRYSYAGGIPLE

SEQ ID NO: 8418 - protein, 22 aa, Artificial sequence
  Protein classification predicting sequence
LIPKERLEAIVERTRKGGGEIV

SEQ ID NO: 8419 - protein, 14 aa, Artificial sequence
  Protein classification predicting sequence
AIVERTRKGGGEIV

SEQ ID NO: 8420 - protein, 18 aa, Artificial sequence
  Protein classification predicting sequence
LLGNGSAYYAPAASLVEM

SEQ ID NO: 8421 - protein, 9 aa, Artificial sequence
  Protein classification predicting sequence
IAYLEGEYG

SEQ ID NO: 8422 - protein, 19 aa, Artificial sequence
  Protein classification predicting sequence
VVITAGIARKPGMSRDDLV

SEQ ID NO: 8423 - protein, 9 aa, Artificial sequence
  Protein classification predicting sequence
LDTARFRTF

SEQ ID NO: 8424 - protein, 8 aa, Artificial sequence
  Protein classification predicting sequence
GFTGATTA

SEQ ID NO: 8425 - protein, 8 aa, Artificial sequence
  Protein classification predicting sequence
KELGDVVL

SEQ ID NO: 8426 - protein, 13 aa, Artificial sequence
  Protein classification predicting sequence
IVERTRKGGGEIV

SEQ ID NO: 8427 - protein, 6 aa, Artificial sequence
  Protein classification predicting sequence
LKDKKR

SEQ ID NO: 8428 - protein, 7 aa, Artificial sequence
  Protein classification predicting sequence
DLYLGVP

SEQ ID NO: 8429 - protein, 19 aa, Artificial sequence
  Protein classification predicting sequence
RKKVSVIGAGFTGATTAFL

SEQ ID NO: 8430 - protein, 9 aa, Artificial sequence
  Protein classification predicting sequence
ILGGNGIEK

SEQ ID NO: 8431 - protein, 6 aa, Artificial sequence
  Protein classification predicting sequence
LCEACI

SEQ ID NO: 8432 - protein, 8 aa, Artificial sequence
  Protein classification predicting sequence
YAPAASAI

SEQ ID NO: 8433 - protein, 7 aa, Artificial sequence
  Protein classification predicting sequence
GEYGVKD

SEQ ID NO: 8434 - protein, 13 aa, Artificial sequence
  Protein classification predicting sequence
RVAVTGAAGQIGY

SEQ ID NO: 8435 - protein, 10 aa, Artificial sequence
  Protein classification predicting sequence
MLGADQPVIL

SEQ ID NO: 8436 - protein, 23 aa, Artificial sequence
  Protein classification predicting sequence
DQPVILQLLEIPDEKAQKALKGV

SEQ ID NO: 8437 - protein, 6 aa, Artificial sequence
  Protein classification predicting sequence
DHIRDW

SEQ ID NO: 8438 - protein, 7 aa, Artificial sequence
  Protein classification predicting sequence
DKKRVLP

SEQ ID NO: 8439 - protein, 8 aa, Artificial sequence
  Protein classification predicting sequence
FVLGGHGD

SEQ ID NO: 8440 - protein, 12 aa, Artificial sequence
  Protein classification predicting sequence
TDDPKVAFKDAD

SEQ ID NO: 8441 - protein, 10 aa, Artificial sequence
  Protein classification predicting sequence
PSDGSYGIPE

SEQ ID NO: 8442 - protein, 9 aa, Artificial sequence
  Protein classification predicting sequence
ELLEERDGV

SEQ ID NO: 8443 - protein, 18 aa, Artificial sequence
  Protein classification predicting sequence
AFVICITNPLDAMVWALQ

SEQ ID NO: 8444 - protein, 10 aa, Artificial sequence
  Protein classification predicting sequence
MLRLDQNRMH

SEQ ID NO: 8445 - protein, 7 aa, Artificial sequence
  Protein classification predicting sequence
LKDKKRV

SEQ ID NO: 8446 - protein, 7 aa, Artificial sequence
  Protein classification predicting sequence
MELDDCA

SEQ ID NO: 8447 - protein, 15 aa, Artificial sequence
  Protein classification predicting sequence
WGNHSAKQVPDFTQA

SEQ ID NO: 8448 - protein, 8 aa, Artificial sequence
  Protein classification predicting sequence
DRDWLENI

SEQ ID NO: 8449 - protein, 7 aa, Artificial sequence
  Protein classification predicting sequence
QEKASVS

SEQ ID NO: 8450 - protein, 11 aa, Artificial sequence
  Protein classification predicting sequence
VLGGHGDAMVP

SEQ ID NO: 8451 - protein, 8 aa, Artificial sequence
  Protein classification predicting sequence
LAHGDVFG

SEQ ID NO: 8452 - protein, 7 aa, Artificial sequence
  Protein classification predicting sequence
KRVLPCA

SEQ ID NO: 8453 - protein, 8 aa, Artificial sequence
  Protein classification predicting sequence
LLDLPQAQ

SEQ ID NO: 8454 - protein, 9 aa, Artificial sequence
  Protein classification predicting sequence
LEIDAFSRE

SEQ ID NO: 8455 - protein, 7 aa, Artificial sequence
  Protein classification predicting sequence
LQLLEIP

SEQ ID NO: 8456 - protein, 6 aa, Artificial sequence
  Protein classification predicting sequence
RLDHNR

SEQ ID NO: 8457 - protein, 8 aa, Artificial sequence
  Protein classification predicting sequence
VTGAAGQI

SEQ ID NO: 8458 - protein, 12 aa, Artificial sequence
  Protein classification predicting sequence
RLDHNRAISQLA

SEQ ID NO: 8459 - protein, 7 aa, Artificial sequence
  Protein classification predicting sequence
EFIPRVA

SEQ ID NO: 8460 - protein, 7 aa, Artificial sequence
  Protein classification predicting sequence
DCAFPLL

SEQ ID NO: 8461 - protein, 8 aa, Artificial sequence
  Protein classification predicting sequence
LLEIEPAL

SEQ ID NO: 8462 - protein, 7 aa, Artificial sequence
  Protein classification predicting sequence
TQYPDFY

SEQ ID NO: 8463 - protein, 12 aa, Artificial sequence
  Protein classification predicting sequence
IPTVAKRGAAII

SEQ ID NO: 8464 - protein, 16 aa, Artificial sequence
  Protein classification predicting sequence
MLGKDQPVILQLLEIP

SEQ ID NO: 8465 - protein, 10 aa, Artificial sequence
  Protein classification predicting sequence
ELEDCAFPLL

SEQ ID NO: 8466 - protein, 7 aa, Artificial sequence
  Protein classification predicting sequence
VSMGVYS

SEQ ID NO: 8467 - protein, 9 aa, Artificial sequence
  Protein classification predicting sequence
MLDTLKKDI

SEQ ID NO: 8468 - protein, 9 aa, Artificial sequence
  Protein classification predicting sequence
KYAPNAFVI

SEQ ID NO: 8469 - protein, 35 aa, Artificial sequence
  Protein classification predicting sequence
QLPSGSELSLYDIAPVTPGVAVDLSHIPTAVKIKG

SEQ ID NO: 8470 - protein, 20 aa, Artificial sequence
  Protein classification predicting sequence
VLISAGVARKPGMDRSDLFN

SEQ ID NO: 8471 - protein, 27 aa, Artificial sequence
  Protein classification predicting sequence
DVVLVDIPQLENPTKGKALDMLEASPV

SEQ ID NO: 8472 - protein, 9 aa, Artificial sequence
  Protein classification predicting sequence
EAILKDQRR

SEQ ID NO: 8473 - protein, 8 aa, Artificial sequence
  Protein classification predicting sequence
SAIAMAES

SEQ ID NO: 8474 - protein, 8 aa, Artificial sequence
  Protein classification predicting sequence
TNDYAQTA

SEQ ID NO: 8475 - protein, 6 aa, Artificial sequence
  Protein classification predicting sequence
TNPVNT

SEQ ID NO: 8476 - protein, 7 aa, Artificial sequence
  Protein classification predicting sequence
TFVSELK

SEQ ID NO: 8477 - protein, 6 aa, Artificial sequence
  Protein classification predicting sequence
PLNEYE

SEQ ID NO: 8478 - protein, 7 aa, Artificial sequence
  Protein classification predicting sequence
KGFSGED

SEQ ID NO: 8479 - protein, 26 aa, Artificial sequence
  Protein classification predicting sequence
GIITNPVNTTVAIAAEVLKKAGVYDK

SEQ ID NO: 8480 - protein, 14 aa, Artificial sequence
  Protein classification predicting sequence
IAAEVLKKAGVYDK

SEQ ID NO: 8481 - protein, 12 aa, Artificial sequence
  Protein classification predicting sequence
AKAGGGSATLSM

SEQ ID NO: 8482 - protein, 12 aa, Artificial sequence
  Protein classification predicting sequence
YVEGDGKYARFF

SEQ ID NO: 8483 - protein, 9 aa, Artificial sequence
  Protein classification predicting sequence
RIQNAGTEV

SEQ ID NO: 8484 - protein, 6 aa, Artificial sequence
  Protein classification predicting sequence
DYADTA

SEQ ID NO: 8485 - protein, 8 aa, Artificial sequence
  Protein classification predicting sequence
LLLKTQLP

SEQ ID NO: 8486 - protein, 8 aa, Artificial sequence
  Protein classification predicting sequence
GSELSLYD

SEQ ID NO: 8487 - protein, 12 aa, Artificial sequence
  Protein classification predicting sequence
PGVAVDLSHIPT

SEQ ID NO: 8488 - protein, 12 aa, Artificial sequence
  Protein classification predicting sequence
RKPGMDRSDLFN

SEQ ID NO: 8489 - protein, 11 aa, Artificial sequence
  Protein classification predicting sequence
GIITNPVNTTV

SEQ ID NO: 8490 - protein, 9 aa, Artificial sequence
  Protein classification predicting sequence
TTLDVIRSE

SEQ ID NO: 8491 - protein, 6 aa, Artificial sequence
  Protein classification predicting sequence
FRIASG

SEQ ID NO: 8492 - protein, 10 aa, Artificial sequence
  Protein classification predicting sequence
FRIASGQMFG

SEQ ID NO: 8493 - protein, 12 aa, Artificial sequence
  Protein classification predicting sequence
IWGNHSATQYPD

SEQ ID NO: 8494 - protein, 15 aa, Artificial sequence
  Protein classification predicting sequence
IWGNHSATQYPDFYN

SEQ ID NO: 8495 - protein, 7 aa, Artificial sequence
  Protein classification predicting sequence
DLSHIPT

SEQ ID NO: 8496 - protein, 13 aa, Artificial sequence
  Protein classification predicting sequence
VLISAGVARKPGM

SEQ ID NO: 8497 - protein, 8 aa, Artificial sequence
  Protein classification predicting sequence
AELKGLDP

SEQ ID NO: 8498 - protein, 6 aa, Artificial sequence
  Protein classification predicting sequence
YVEGDG

SEQ ID NO: 8499 - protein, 6 aa, Artificial sequence
  Protein classification predicting sequence
GEDFIN

SEQ ID NO: 8500 - protein, 7 aa, Artificial sequence
  Protein classification predicting sequence
GSAFYAP

SEQ ID NO: 8501 - protein, 17 aa, Artificial sequence
  Protein classification predicting sequence
IVTAGVPRKPGMSRDDL

SEQ ID NO: 8502 - protein, 7 aa, Artificial sequence
  Protein classification predicting sequence
HGDTMVP

SEQ ID NO: 8503 - protein, 14 aa, Artificial sequence
  Protein classification predicting sequence
VTPGVAVDLSHIPT

SEQ ID NO: 8504 - protein, 16 aa, Artificial sequence
  Protein classification predicting sequence
AAARFGLSLVRALQGE

SEQ ID NO: 8505 - protein, 7 aa, Artificial sequence
  Protein classification predicting sequence
LPAGSDL

SEQ ID NO: 8506 - protein, 8 aa, Artificial sequence
  Protein classification predicting sequence
PDLFHAEV

SEQ ID NO: 8507 - protein, 28 aa, Artificial sequence
  Protein classification predicting sequence
PLKVAVTGAAGQIGYSLLFRLASGSLLG

SEQ ID NO: 8508 - protein, 8 aa, Artificial sequence
  Protein classification predicting sequence
MELDDCAF

SEQ ID NO: 8509 - protein, 8 aa, Artificial sequence
  Protein classification predicting sequence
GMERGDLL

SEQ ID NO: 8510 - protein, 7 aa, Artificial sequence
  Protein classification predicting sequence
QLAKKTG

SEQ ID NO: 8511 - protein, 8 aa, Artificial sequence
  Protein classification predicting sequence
TAELADER

SEQ ID NO: 8512 - protein, 8 aa, Artificial sequence
  Protein classification predicting sequence
QPVILQLL

SEQ ID NO: 8513 - protein, 13 aa, Artificial sequence
  Protein classification predicting sequence
VLDGVLMELQDCA

SEQ ID NO: 8514 - protein, 11 aa, Artificial sequence
  Protein classification predicting sequence
WGNHSATQYPD

SEQ ID NO: 8515 - protein, 6 aa, Artificial sequence
  Protein classification predicting sequence
TVQQRG

SEQ ID NO: 8516 - protein, 8 aa, Artificial sequence
  Protein classification predicting sequence
DVVLVDIP

SEQ ID NO: 8517 - protein, 7 aa, Artificial sequence
  Protein classification predicting sequence
PVQGFDA

SEQ ID NO: 8518 - protein, 15 aa, Artificial sequence
  Protein classification predicting sequence
TGFVLGGHGDDMVPL

SEQ ID NO: 8519 - protein, 10 aa, Artificial sequence
  Protein classification predicting sequence
IAYLEGEYGY

SEQ ID NO: 8520 - protein, 9 aa, Artificial sequence
  Protein classification predicting sequence
AGQIAYSLL

SEQ ID NO: 8521 - protein, 7 aa, Artificial sequence
  Protein classification predicting sequence
KRGAAII

SEQ ID NO: 8522 - protein, 9 aa, Artificial sequence
  Protein classification predicting sequence
KLFGVTTLD

SEQ ID NO: 8523 - protein, 7 aa, Artificial sequence
  Protein classification predicting sequence
TPALEGA

SEQ ID NO: 8524 - protein, 21 aa, Artificial sequence
  Protein classification predicting sequence
VVLISAGVARKPGMDRSDLFN

SEQ ID NO: 8525 - protein, 8 aa, Artificial sequence
  Protein classification predicting sequence
LFGVTTLD

SEQ ID NO: 8526 - protein, 13 aa, Artificial sequence
  Protein classification predicting sequence
IRSNTFVAELKGK

SEQ ID NO: 8527 - protein, 8 aa, Artificial sequence
  Protein classification predicting sequence
LGKNGVEE

SEQ ID NO: 8528 - protein, 15 aa, Artificial sequence
  Protein classification predicting sequence
GAAGGIGQALALLLK

SEQ ID NO: 8529 - protein, 12 aa, Artificial sequence
  Protein classification predicting sequence
LYDIAPVTPGVA

SEQ ID NO: 8530 - protein, 8 aa, Artificial sequence
  Protein classification predicting sequence
TTLDIIRS

SEQ ID NO: 8531 - protein, 27 aa, Artificial sequence
  Protein classification predicting sequence
RIQNAGTEVVEAKAGGGSATLSMGQAA

SEQ ID NO: 8532 - protein, 13 aa, Artificial sequence
  Protein classification predicting sequence
RFGLSLVRALQGE

SEQ ID NO: 8533 - protein, 9 aa, Artificial sequence
  Protein classification predicting sequence
GGHGDDMVP

SEQ ID NO: 8534 - protein, 8 aa, Artificial sequence
  Protein classification predicting sequence
PRKAGMER

SEQ ID NO: 8535 - protein, 11 aa, Artificial sequence
  Protein classification predicting sequence
GNPANTNALIA

SEQ ID NO: 8536 - protein, 11 aa, Artificial sequence
  Protein classification predicting sequence
ARGASSAASAA

SEQ ID NO: 8537 - protein, 18 aa, Artificial sequence
  Protein classification predicting sequence
GEMLGKDQPVILQLLEIP

SEQ ID NO: 8538 - protein, 21 aa, Artificial sequence
  Protein classification predicting sequence
DVALLVGARPRGPGMERKDLL

SEQ ID NO: 8539 - protein, 7 aa, Artificial sequence
  Protein classification predicting sequence
VTMGIPS

SEQ ID NO: 8540 - protein, 7 aa, Artificial sequence
  Protein classification predicting sequence
FGFPVTT

SEQ ID NO: 8541 - protein, 24 aa, Artificial sequence
  Protein classification predicting sequence
AFVICITNPLDAMVWALQKFSGLP

SEQ ID NO: 8542 - protein, 7 aa, Artificial sequence
  Protein classification predicting sequence
ELGDVVL

SEQ ID NO: 8543 - protein, 6 aa, Artificial sequence
  Protein classification predicting sequence
RTRKGG

SEQ ID NO: 8544 - protein, 9 aa, Artificial sequence
  Protein classification predicting sequence
MVPLARYST

SEQ ID NO: 8545 - protein, 8 aa, Artificial sequence
  Protein classification predicting sequence
DIKIKGTN

SEQ ID NO: 8546 - protein, 39 aa, Artificial sequence
  Protein classification predicting sequence
GVVECAYVEGDGQYARFFSQPLLLGKNGVEERKSIGTLS

SEQ ID NO: 8547 - protein, 8 aa, Artificial sequence
  Protein classification predicting sequence
KKAGVYDK

SEQ ID NO: 8548 - protein, 9 aa, Artificial sequence
  Protein classification predicting sequence
YVDGGSEHA

SEQ ID NO: 8549 - protein, 7 aa, Artificial sequence
  Protein classification predicting sequence
PDLIKMG

SEQ ID NO: 8550 - protein, 9 aa, Artificial sequence
  Protein classification predicting sequence
RTFIAQELN

SEQ ID NO: 8551 - protein, 12 aa, Artificial sequence
  Protein classification predicting sequence
VTGAAGQIGYAL

SEQ ID NO: 8552 - protein, 10 aa, Artificial sequence
  Protein classification predicting sequence
SDGSYGVPEG

SEQ ID NO: 8553 - protein, 6 aa, Artificial sequence
  Protein classification predicting sequence
GTSDYA

SEQ ID NO: 8554 - protein, 17 aa, Artificial sequence
  Protein classification predicting sequence
RVIGQSGVLDTARFRTF

SEQ ID NO: 8555 - protein, 6 aa, Artificial sequence
  Protein classification predicting sequence
GVVMEL

SEQ ID NO: 8556 - protein, 8 aa, Artificial sequence
  Protein classification predicting sequence
TRLDHNRA

SEQ ID NO: 8557 - protein, 7 aa, Artificial sequence
  Protein classification predicting sequence
WGNHSST

SEQ ID NO: 8558 - protein, 11 aa, Artificial sequence
  Protein classification predicting sequence
TPALEGADVVL

SEQ ID NO: 8559 - protein, 12 aa, Artificial sequence
  Protein classification predicting sequence
SAGVARKPGMDR

SEQ ID NO: 8560 - protein, 11 aa, Artificial sequence
  Protein classification predicting sequence
DLFNVNAGIVK

SEQ ID NO: 8561 - protein, 7 aa, Artificial sequence
  Protein classification predicting sequence
RFGLSLV

SEQ ID NO: 8562 - protein, 12 aa, Artificial sequence
  Protein classification predicting sequence
TTLDVIRSETFV

SEQ ID NO: 8563 - protein, 8 aa, Artificial sequence
  Protein classification predicting sequence
LVRALQGE

SEQ ID NO: 8564 - protein, 19 aa, Artificial sequence
  Protein classification predicting sequence
GIITNPVNTTVPIAAEVLK

SEQ ID NO: 8565 - protein, 6 aa, Artificial sequence
  Protein classification predicting sequence
GIPQGK

SEQ ID NO: 8566 - protein, 10 aa, Artificial sequence
  Protein classification predicting sequence
MLESYLKDKR

SEQ ID NO: 8567 - protein, 6 aa, Artificial sequence
  Protein classification predicting sequence
RTRNGG

SEQ ID NO: 8568 - protein, 7 aa, Artificial sequence
  Protein classification predicting sequence
DVALLVG

SEQ ID NO: 8569 - protein, 6 aa, Artificial sequence
  Protein classification predicting sequence
IFTAQG

SEQ ID NO: 8570 - protein, 12 aa, Artificial sequence
  Protein classification predicting sequence
VWGNHSPTMYPD

SEQ ID NO: 8571 - protein, 7 aa, Artificial sequence
  Protein classification predicting sequence
GKWVTMG

SEQ ID NO: 8572 - protein, 14 aa, Artificial sequence
  Protein classification predicting sequence
VRVAVTGAAGQIGY

SEQ ID NO: 8573 - protein, 7 aa, Artificial sequence
  Protein classification predicting sequence
LGSNGKW

SEQ ID NO: 8574 - protein, 13 aa, Artificial sequence
  Protein classification predicting sequence
YIDKTLAELEEER

SEQ ID NO: 8575 - protein, 26 aa, Artificial sequence
  Protein classification predicting sequence
EKAQAALKGVMMELEDCAFPLLAGMV

SEQ ID NO: 8576 - protein, 13 aa, Artificial sequence
  Protein classification predicting sequence
IKGFSGEDATPAL

SEQ ID NO: 8577 - protein, 9 aa, Artificial sequence
  Protein classification predicting sequence
PGVSFTEQE

SEQ ID NO: 8578 - protein, 11 aa, Artificial sequence
  Protein classification predicting sequence
GLGTWRTEAVF

SEQ ID NO: 8579 - protein, 10 aa, Artificial sequence
  Protein classification predicting sequence
LPAVGGNEGV

SEQ ID NO: 8580 - protein, 16 aa, Artificial sequence
  Protein classification predicting sequence
SAATLGVNPCTAYRML

SEQ ID NO: 8581 - protein, 7 aa, Artificial sequence
  Protein classification predicting sequence
TELLRHL

SEQ ID NO: 8582 - protein, 8 aa, Artificial sequence
  Protein classification predicting sequence
ALEKVPGV

SEQ ID NO: 8583 - protein, 9 aa, Artificial sequence
  Protein classification predicting sequence
SALVSYPKG

SEQ ID NO: 8584 - protein, 15 aa, Artificial sequence
  Protein classification predicting sequence
GAAMAAALKAVEQGA

SEQ ID NO: 8585 - protein, 8 aa, Artificial sequence
  Protein classification predicting sequence
PQFVYVAA

SEQ ID NO: 8586 - protein, 15 aa, Artificial sequence
  Protein classification predicting sequence
AHIAHLRRESPFDGG

SEQ ID NO: 8587 - protein, 32 aa, Artificial sequence
  Protein classification predicting sequence
FDRCLVATGASPAVPPIPGLKESPYWTSTEAL

SEQ ID NO: 8588 - protein, 15 aa, Artificial sequence
  Protein classification predicting sequence
HGELRADKLLVATGR

SEQ ID NO: 8589 - protein, 19 aa, Artificial sequence
  Protein classification predicting sequence
RLIGVQAVAPEAGELIQTA

SEQ ID NO: 8590 - protein, 33 aa, Artificial sequence
  Protein classification predicting sequence
LAIRNRMTVQELADQLFPYLTMVEGLKLAAQTF

SEQ ID NO: 8591 - protein, 10 aa, Artificial sequence
  Protein classification predicting sequence
VIGSSVVALE

SEQ ID NO: 8592 - protein, 10 aa, Artificial sequence
  Protein classification predicting sequence
FTDPQVATVG

SEQ ID NO: 8593 - protein, 9 aa, Artificial sequence
  Protein classification predicting sequence
NVPRALANF

SEQ ID NO: 8594 - protein, 9 aa, Artificial sequence
  Protein classification predicting sequence
LAIRNRMTV

SEQ ID NO: 8595 - protein, 18 aa, Artificial sequence
  Protein classification predicting sequence
ELADQLFPYLTMVEGLKL

SEQ ID NO: 8596 - protein, 9 aa, Artificial sequence
  Protein classification predicting sequence
AQTFNKDVK

SEQ ID NO: 8597 - protein, 15 aa, Artificial sequence
  Protein classification predicting sequence
ATGASPAVPPIPGLK

SEQ ID NO: 8598 - protein, 22 aa, Artificial sequence
  Protein classification predicting sequence
RLAVIGSSVVALELAQAFARLG

SEQ ID NO: 8599 - protein, 9 aa, Artificial sequence
  Protein classification predicting sequence
EHTQASQVA

SEQ ID NO: 8600 - protein, 29 aa, Artificial sequence
  Protein classification predicting sequence
LTAMPAVVFTDPQVATVGYSEAEAHHDGI

SEQ ID NO: 8601 - protein, 24 aa, Artificial sequence
  Protein classification predicting sequence
EEGSGRLIGVQAVAPEAGELIQTA

SEQ ID NO: 8602 - protein, 6 aa, Artificial sequence
  Protein classification predicting sequence
GCVPSK

SEQ ID NO: 8603 - protein, 9 aa, Artificial sequence
  Protein classification predicting sequence
ATGASPAVP

SEQ ID NO: 8604 - protein, 7 aa, Artificial sequence
  Protein classification predicting sequence
PYLTMAE

SEQ ID NO: 8605 - protein, 8 aa, Artificial sequence
  Protein classification predicting sequence
LKLAAQTF

SEQ ID NO: 8606 - protein, 7 aa, Artificial sequence
  Protein classification predicting sequence
ITGMTCD

SEQ ID NO: 8607 - protein, 27 aa, Artificial sequence
  Protein classification predicting sequence
GCVPSKIMIRAAHIAHLRRESPFDGGI

SEQ ID NO: 8608 - protein, 9 aa, Artificial sequence
  Protein classification predicting sequence
LNDGGERVV

SEQ ID NO: 8609 - protein, 7 aa, Artificial sequence
  Protein classification predicting sequence
PYWTSTE

SEQ ID NO: 8610 - protein, 8 aa, Artificial sequence
  Protein classification predicting sequence
TRGFIKLV

SEQ ID NO: 8611 - protein, 9 aa, Artificial sequence
  Protein classification predicting sequence
GSGRLIGVQ

SEQ ID NO: 8612 - protein, 12 aa, Artificial sequence
  Protein classification predicting sequence
VAPEAGELIQTA

SEQ ID NO: 8613 - protein, 8 aa, Artificial sequence
  Protein classification predicting sequence
GAQGPKML

SEQ ID NO: 8614 - protein, 11 aa, Artificial sequence
  Protein classification predicting sequence
YMGAQGPKMLE

SEQ ID NO: 8615 - protein, 9 aa, Artificial sequence
  Protein classification predicting sequence
GPGDKATFD

SEQ ID NO: 8616 - protein, 7 aa, Artificial sequence
  Protein classification predicting sequence
YMGAQGP

SEQ ID NO: 8617 - protein, 9 aa, Artificial sequence
  Protein classification predicting sequence
NASNPKDFE

SEQ ID NO: 8618 - protein, 7 aa, Artificial sequence
  Protein classification predicting sequence
CFSIDKD

SEQ ID NO: 8619 - protein, 8 aa, Artificial sequence
  Protein classification predicting sequence
VAGSPIGP

SEQ ID NO: 8620 - protein, 8 aa, Artificial sequence
  Protein classification predicting sequence
WITDHYNN

SEQ ID NO: 8621 - protein, 6 aa, Artificial sequence
  Protein classification predicting sequence
HFYTLN

SEQ ID NO: 8622 - protein, 11 aa, Artificial sequence
  Protein classification predicting sequence
SVTYGANSGER

SEQ ID NO: 8623 - protein, 7 aa, Artificial sequence
  Protein classification predicting sequence
SFEFFPP

SEQ ID NO: 8624 - protein, 13 aa, Artificial sequence
  Protein classification predicting sequence
ISVAAYPEVHPEA

SEQ ID NO: 8625 - protein, 21 aa, Artificial sequence
  Protein classification predicting sequence
LKPKFVSVTYGANSGERDRTH

SEQ ID NO: 8626 - protein, 10 aa, Artificial sequence
  Protein classification predicting sequence
TGLEAAPHLT

SEQ ID NO: 8627 - protein, 8 aa, Artificial sequence
  Protein classification predicting sequence
YLRFRDRC

SEQ ID NO: 8628 - protein, 13 aa, Artificial sequence
  Protein classification predicting sequence
AMDMVKILSREGV

SEQ ID NO: 8629 - protein, 9 aa, Artificial sequence
  Protein classification predicting sequence
MKFNKFSLP

SEQ ID NO: 8630 - protein, 15 aa, Artificial sequence
  Protein classification predicting sequence
LRPYYQGLIDKYCPG

SEQ ID NO: 8631 - protein, 7 aa, Artificial sequence
  Protein classification predicting sequence
TYKLMHT

SEQ ID NO: 8632 - protein, 38 aa, Artificial sequence
  Protein classification predicting sequence
GEPQWAVVGDTFPVGCRPQASVVFCDSTFQDNPDLQDP

SEQ ID NO: 8633 - protein, 9 aa, Artificial sequence
  Protein classification predicting sequence
AKICNNMLL

SEQ ID NO: 8634 - protein, 5 aa, Artificial sequence
  Protein classification predicting sequence
GCFWG

SEQ ID NO: 8635 - protein, 8 aa, Artificial sequence
  Protein classification predicting sequence
SGCGWPSF

SEQ ID NO: 8636 - protein, 7 aa, Artificial sequence
  Protein classification predicting sequence
EVRSRSG

SEQ ID NO: 8637 - protein, 7 aa, Artificial sequence
  Protein classification predicting sequence
NSASLRF

SEQ ID NO: 8638 - protein, 6 aa, Artificial sequence
  Protein classification predicting sequence
NKQGND

SEQ ID NO: 8639 - protein, 7 aa, Artificial sequence
  Protein classification predicting sequence
DVGTQYR

SEQ ID NO: 8640 - protein, 7 aa, Artificial sequence
  Protein classification predicting sequence
SKYPKPS

SEQ ID NO: 8641 - protein, 6 aa, Artificial sequence
  Protein classification predicting sequence
DKFESG

SEQ ID NO: 8642 - protein, 9 aa, Artificial sequence
  Protein classification predicting sequence
GFSGHGFKF

SEQ ID NO: 8643 - protein, 7 aa, Artificial sequence
  Protein classification predicting sequence
TGHAEVV

SEQ ID NO: 8644 - protein, 7 aa, Artificial sequence
  Protein classification predicting sequence
FWENHDP

SEQ ID NO: 8645 - protein, 11 aa, Artificial sequence
  Protein classification predicting sequence
FWENHDPTQGM

SEQ ID NO: 8646 - protein, 7 aa, Artificial sequence
  Protein classification predicting sequence
HDPTQGM

SEQ ID NO: 8647 - protein, 8 aa, Artificial sequence
  Protein classification predicting sequence
GHTEAVEI

SEQ ID NO: 8648 - protein, 8 aa, Artificial sequence
  Protein classification predicting sequence
SYRSAIYY

SEQ ID NO: 8649 - protein, 6 aa, Artificial sequence
  Protein classification predicting sequence
TPNPTY

SEQ ID NO: 8650 - protein, 12 aa, Artificial sequence
  Protein classification predicting sequence
HDPTQGMRQGND

SEQ ID NO: 8651 - protein, 6 aa, Artificial sequence
  Protein classification predicting sequence
YRSAIY

SEQ ID NO: 8652 - protein, 8 aa, Artificial sequence
  Protein classification predicting sequence
GTGVSCPI

SEQ ID NO: 8653 - protein, 6 aa, Artificial sequence
  Protein classification predicting sequence
TAVGYA

SEQ ID NO: 8654 - protein, 8 aa, Artificial sequence
  Protein classification predicting sequence
ASRDAYQQ

SEQ ID NO: 8655 - protein, 19 aa, Artificial sequence
  Protein classification predicting sequence
ERAIFAGGCFWCMVQPFEE

SEQ ID NO: 8656 - protein, 6 aa, Artificial sequence
  Protein classification predicting sequence
AEDYHQ

SEQ ID NO: 8657 - protein, 6 aa, Artificial sequence
  Protein classification predicting sequence
GTQYRS

SEQ ID NO: 8658 - protein, 7 aa, Artificial sequence
  Protein classification predicting sequence
PIVTTIE

SEQ ID NO: 8659 - protein, 6 aa, Artificial sequence
  Protein classification predicting sequence
AGGCFW

SEQ ID NO: 8660 - protein, 6 aa, Artificial sequence
  Protein classification predicting sequence
GYSGGH

SEQ ID NO: 8661 - protein, 5 aa, Artificial sequence
  Protein classification predicting sequence
HDPTQ

SEQ ID NO: 8662 - protein, 6 aa, Artificial sequence
  Protein classification predicting sequence
QYRSAI

SEQ ID NO: 8663 - protein, 6 aa, Artificial sequence
  Protein classification predicting sequence
SYRSAI

SEQ ID NO: 8664 - protein, 10 aa, Artificial sequence
  Protein classification predicting sequence
HAETVKVTYD

SEQ ID NO: 8665 - protein, 8 aa, Artificial sequence
  Protein classification predicting sequence
KPSDAELK

SEQ ID NO: 8666 - protein, 6 aa, Artificial sequence
  Protein classification predicting sequence
GIYVDV

SEQ ID NO: 8667 - protein, 6 aa, Artificial sequence
  Protein classification predicting sequence
FRIIDP

SEQ ID NO: 8668 - protein, 6 aa, Artificial sequence
  Protein classification predicting sequence
QGNDVG

SEQ ID NO: 8669 - protein, 8 aa, Artificial sequence
  Protein classification predicting sequence
QYRTGIYY

SEQ ID NO: 8670 - protein, 8 aa, Artificial sequence
  Protein classification predicting sequence
NSHLGHVF

SEQ ID NO: 8671 - protein, 14 aa, Artificial sequence
  Protein classification predicting sequence
NSHLGHVFTDGPKD

SEQ ID NO: 8672 - protein, 14 aa, Artificial sequence
  Protein classification predicting sequence
DGPKDKGGLRYCIN

SEQ ID NO: 8673 - protein, 20 aa, Artificial sequence
  Protein classification predicting sequence
DKGGLRYCINGASLKFIPLE

SEQ ID NO: 8674 - protein, 7 aa, Artificial sequence
  Protein classification predicting sequence
LAGGCFW

SEQ ID NO: 8675 - protein, 8 aa, Artificial sequence
  Protein classification predicting sequence
LAGGCFWG

SEQ ID NO: 8676 - protein, 7 aa, Artificial sequence
  Protein classification predicting sequence
EAYMERI

SEQ ID NO: 8677 - protein, 11 aa, Artificial sequence
  Protein classification predicting sequence
GIYVDITTGEP

SEQ ID NO: 8678 - protein, 10 aa, Artificial sequence
  Protein classification predicting sequence
IYLAGGCFWG

SEQ ID NO: 8679 - protein, 20 aa, Artificial sequence
  Protein classification predicting sequence
GEPLFSSADKYDSGCGWPSF

SEQ ID NO: 8680 - protein, 10 aa, Artificial sequence
  Protein classification predicting sequence
HLGHVFNDGP

SEQ ID NO: 8681 - protein, 9 aa, Artificial sequence
  Protein classification predicting sequence
DAVSGYANG

SEQ ID NO: 8682 - protein, 7 aa, Artificial sequence
  Protein classification predicting sequence
KNPNGYC

SEQ ID NO: 8683 - protein, 10 aa, Artificial sequence
  Protein classification predicting sequence
DKGGLRYCIN

SEQ ID NO: 8684 - protein, 9 aa, Artificial sequence
  Protein classification predicting sequence
TNYQLIHQT

SEQ ID NO: 8685 - protein, 7 aa, Artificial sequence
  Protein classification predicting sequence
AEDYHQD

SEQ ID NO: 8686 - protein, 47 aa, Artificial sequence
  Protein classification predicting sequence
GCFWGVEEYFSQVDGVLDAVSGYANGRGDTTNYQLIHQTGHAETVEV

SEQ ID NO: 8687 - protein, 40 aa, Artificial sequence
  Protein classification predicting sequence
YHQDYLKKNPNGYCHIDINQATYPVIDESKYPKPSATEIK

SEQ ID NO: 8688 - protein, 8 aa, Artificial sequence
  Protein classification predicting sequence
VCTGTTGH

SEQ ID NO: 8689 - protein, 7 aa, Artificial sequence
  Protein classification predicting sequence
DPTDDQG

SEQ ID NO: 8690 - protein, 8 aa, Artificial sequence
  Protein classification predicting sequence
DVGTQYRS

SEQ ID NO: 8691 - protein, 13 aa, Artificial sequence
  Protein classification predicting sequence
FAGGCFWCMVQPF

SEQ ID NO: 8692 - protein, 6 aa, Artificial sequence
  Protein classification predicting sequence
DRGPQY

SEQ ID NO: 8693 - protein, 16 aa, Artificial sequence
  Protein classification predicting sequence
ATFAGGCFWCMVKPFD

SEQ ID NO: 8694 - protein, 12 aa, Artificial sequence
  Protein classification predicting sequence
AGGCFWCMVKPF

SEQ ID NO: 8695 - protein, 11 aa, Artificial sequence
  Protein classification predicting sequence
GCFWGAERKFW

SEQ ID NO: 8696 - protein, 8 aa, Artificial sequence
  Protein classification predicting sequence
QGMRQGND

SEQ ID NO: 8697 - protein, 7 aa, Artificial sequence
  Protein classification predicting sequence
QYRSAIY

SEQ ID NO: 8698 - protein, 9 aa, Artificial sequence
  Protein classification predicting sequence
AEDYHQQYL

SEQ ID NO: 8699 - protein, 6 aa, Artificial sequence
  Protein classification predicting sequence
GGCFWC

SEQ ID NO: 8700 - protein, 11 aa, Artificial sequence
  Protein classification predicting sequence
HTEIVEVVYDP

SEQ ID NO: 8701 - protein, 6 aa, Artificial sequence
  Protein classification predicting sequence
HDPTQG

SEQ ID NO: 8702 - protein, 9 aa, Artificial sequence
  Protein classification predicting sequence
HQQYLHKNP

SEQ ID NO: 8703 - protein, 9 aa, Artificial sequence
  Protein classification predicting sequence
GYCPHHSTG

SEQ ID NO: 8704 - protein, 8 aa, Artificial sequence
  Protein classification predicting sequence
TGHAEAVR

SEQ ID NO: 8705 - protein, 9 aa, Artificial sequence
  Protein classification predicting sequence
GVYSTAAGY

SEQ ID NO: 8706 - protein, 96 aa, Artificial sequence
  Protein classification predicting sequence
YTGGYTPNPTYREVCSGDTGHAEAVRIVYDPSVISYEQLLQVFWENHDPAQGMRQGNDHGTQYRSAIYPLTPEQDAAARASLERFQAAMLAADDDR

SEQ ID NO: 8707 - protein, 5 aa, Artificial sequence
  Protein classification predicting sequence
FWENH

SEQ ID NO: 8708 - protein, 7 aa, Artificial sequence
  Protein classification predicting sequence
GYCGLGG

SEQ ID NO: 8709 - protein, 7 aa, Artificial sequence
  Protein classification predicting sequence
YSTAAGY

SEQ ID NO: 8710 - protein, 6 aa, Artificial sequence
  Protein classification predicting sequence
QGMRQG

SEQ ID NO: 8711 - protein, 8 aa, Artificial sequence
  Protein classification predicting sequence
YHQDFYKK

SEQ ID NO: 8712 - protein, 6 aa, Artificial sequence
  Protein classification predicting sequence
PTYEQV

SEQ ID NO: 8713 - protein, 11 aa, Artificial sequence
  Protein classification predicting sequence
IHDPTTKDRQG

SEQ ID NO: 8714 - protein, 7 aa, Artificial sequence
  Protein classification predicting sequence
RQGPDVG

SEQ ID NO: 8715 - protein, 7 aa, Artificial sequence
  Protein classification predicting sequence
GCFWGAE

SEQ ID NO: 8716 - protein, 7 aa, Artificial sequence
  Protein classification predicting sequence
GCFWGVE

SEQ ID NO: 8717 - protein, 33 aa, Artificial sequence
  Protein classification predicting sequence
KQVLFGMGCFWGAERLFWQVPGVYVTAVGYAGG

SEQ ID NO: 8718 - protein, 8 aa, Artificial sequence
  Protein classification predicting sequence
TPNPTYEE

SEQ ID NO: 8719 - protein, 29 aa, Artificial sequence
  Protein classification predicting sequence
TPNPTYEETCTGLTGHAEVVLVVYDPKVV

SEQ ID NO: 8720 - protein, 29 aa, Artificial sequence
  Protein classification predicting sequence
LFWEEHDPTQGMRQGNDIGTTYRSVIYTF

SEQ ID NO: 8721 - protein, 8 aa, Artificial sequence
  Protein classification predicting sequence
NPTYKEVC

SEQ ID NO: 8722 - protein, 8 aa, Artificial sequence
  Protein classification predicting sequence
GGIGVCLP

SEQ ID NO: 8723 - protein, 12 aa, Artificial sequence
  Protein classification predicting sequence
PYKNFYPAEDYH

SEQ ID NO: 8724 - protein, 8 aa, Artificial sequence
  Protein classification predicting sequence
GCFWGAER

SEQ ID NO: 8725 - protein, 7 aa, Artificial sequence
  Protein classification predicting sequence
PTYEEVC

SEQ ID NO: 8726 - protein, 9 aa, Artificial sequence
  Protein classification predicting sequence
GTQYRSAIY

SEQ ID NO: 8727 - protein, 7 aa, Artificial sequence
  Protein classification predicting sequence
LLKVFWE

SEQ ID NO: 8728 - protein, 10 aa, Artificial sequence
  Protein classification predicting sequence
YHQQYLAKNP

SEQ ID NO: 8729 - protein, 5 aa, Artificial sequence
  Protein classification predicting sequence
QYRSA

SEQ ID NO: 8730 - protein, 6 aa, Artificial sequence
  Protein classification predicting sequence
AEDEHQ

SEQ ID NO: 8731 - protein, 24 aa, Artificial sequence
  Protein classification predicting sequence
SFEELLKVFWENHDPTQGMRQGND

SEQ ID NO: 8732 - protein, 9 aa, Artificial sequence
  Protein classification predicting sequence
SLFDKKHLV

SEQ ID NO: 8733 - protein, 12 aa, Artificial sequence
  Protein classification predicting sequence
ADALPGRNTPMP

SEQ ID NO: 8734 - protein, 7 aa, Artificial sequence
  Protein classification predicting sequence
HSMTNVP

SEQ ID NO: 8735 - protein, 6 aa, Artificial sequence
  Protein classification predicting sequence
FYYAED

SEQ ID NO: 8736 - protein, 24 aa, Artificial sequence
  Protein classification predicting sequence
HQQYLHKNPYGYCGIGGIGVCLPP

SEQ ID NO: 8737 - protein, 9 aa, Artificial sequence
  Protein classification predicting sequence
VISYEQLLQ

SEQ ID NO: 8738 - protein, 8 aa, Artificial sequence
  Protein classification predicting sequence
LQASGRFD

SEQ ID NO: 8739 - protein, 13 aa, Artificial sequence
  Protein classification predicting sequence
GILSVRSGYTGGH

SEQ ID NO: 8740 - protein, 7 aa, Artificial sequence
  Protein classification predicting sequence
SGYTGGH

SEQ ID NO: 8741 - protein, 6 aa, Artificial sequence
  Protein classification predicting sequence
QTDPTD

SEQ ID NO: 8742 - protein, 15 aa, Artificial sequence
  Protein classification predicting sequence
FGQFEDRGDNYRPVI

SEQ ID NO: 8743 - protein, 13 aa, Artificial sequence
  Protein classification predicting sequence
IAEQSKANLQASG

SEQ ID NO: 8744 - protein, 6 aa, Artificial sequence
  Protein classification predicting sequence
LVELYW

SEQ ID NO: 8745 - protein, 5 aa, Artificial sequence
  Protein classification predicting sequence
AEDYH

SEQ ID NO: 8746 - protein, 6 aa, Artificial sequence
  Protein classification predicting sequence
YHNEEQ

SEQ ID NO: 8747 - protein, 8 aa, Artificial sequence
  Protein classification predicting sequence
PTTLNRQG

SEQ ID NO: 8748 - protein, 5 aa, Artificial sequence
  Protein classification predicting sequence
YEQVC

SEQ ID NO: 8749 - protein, 6 aa, Artificial sequence
  Protein classification predicting sequence
SLNKQG

SEQ ID NO: 8750 - protein, 8 aa, Artificial sequence
  Protein classification predicting sequence
TAVGYAGG

SEQ ID NO: 8751 - protein, 6 aa, Artificial sequence
  Protein classification predicting sequence
STAAGY

SEQ ID NO: 8752 - protein, 9 aa, Artificial sequence
  Protein classification predicting sequence
EQLLQTFWE

SEQ ID NO: 8753 - protein, 12 aa, Artificial sequence
  Protein classification predicting sequence
TFWESHDPTQGM

SEQ ID NO: 8754 - protein, 7 aa, Artificial sequence
  Protein classification predicting sequence
HQQYLAK

SEQ ID NO: 8755 - protein, 12 aa, Artificial sequence
  Protein classification predicting sequence
PNGYCGLGGTGV

SEQ ID NO: 8756 - protein, 10 aa, Artificial sequence
  Protein classification predicting sequence
GYCGLGGTGV

SEQ ID NO: 8757 - protein, 6 aa, Artificial sequence
  Protein classification predicting sequence
IHDPTT

SEQ ID NO: 8758 - protein, 9 aa, Artificial sequence
  Protein classification predicting sequence
EVCSGRTGH

SEQ ID NO: 8759 - protein, 9 aa, Artificial sequence
  Protein classification predicting sequence
MVRTEIRCA

SEQ ID NO: 8760 - protein, 7 aa, Artificial sequence
  Protein classification predicting sequence
PTGLRYC

SEQ ID NO: 8761 - protein, 8 aa, Artificial sequence
  Protein classification predicting sequence
DSHLGHVF

SEQ ID NO: 8762 - protein, 10 aa, Artificial sequence
  Protein classification predicting sequence
HLGHVFPDGP

SEQ ID NO: 8763 - protein, 6 aa, Artificial sequence
  Protein classification predicting sequence
GCGWPS

SEQ ID NO: 8764 - protein, 7 aa, Artificial sequence
  Protein classification predicting sequence
GLRYCIN

SEQ ID NO: 8765 - protein, 8 aa, Artificial sequence
  Protein classification predicting sequence
PLFSSKDK

SEQ ID NO: 8766 - protein, 7 aa, Artificial sequence
  Protein classification predicting sequence
YVDIVSG

SEQ ID NO: 8767 - protein, 8 aa, Artificial sequence
  Protein classification predicting sequence
SGKPLFTS

SEQ ID NO: 8768 - protein, 10 aa, Artificial sequence
  Protein classification predicting sequence
CGWPSFTKPI

SEQ ID NO: 8769 - protein, 8 aa, Artificial sequence
  Protein classification predicting sequence
VTQENGTE

SEQ ID NO: 8770 - protein, 8 aa, Artificial sequence
  Protein classification predicting sequence
GHVFPDGP

SEQ ID NO: 8771 - protein, 14 aa, Artificial sequence
  Protein classification predicting sequence
EGIYVDITTGEPLF

SEQ ID NO: 8772 - protein, 10 aa, Artificial sequence
  Protein classification predicting sequence
CGWPAFSKPI

SEQ ID NO: 8773 - protein, 7 aa, Artificial sequence
  Protein classification predicting sequence
LFSSLDK

SEQ ID NO: 8774 - protein, 8 aa, Artificial sequence
  Protein classification predicting sequence
GCGWPSFT

SEQ ID NO: 8775 - protein, 11 aa, Artificial sequence
  Protein classification predicting sequence
KYDSGCGWPSF

SEQ ID NO: 8776 - protein, 6 aa, Artificial sequence
  Protein classification predicting sequence
RTEVRS

SEQ ID NO: 8777 - protein, 12 aa, Artificial sequence
  Protein classification predicting sequence
LRYCINSAALRF

SEQ ID NO: 8778 - protein, 7 aa, Artificial sequence
  Protein classification predicting sequence
SHLGHVF

SEQ ID NO: 8779 - protein, 11 aa, Artificial sequence
  Protein classification predicting sequence
SHLGHVFPDGP

SEQ ID NO: 8780 - protein, 6 aa, Artificial sequence
  Protein classification predicting sequence
DLSHGM

SEQ ID NO: 8781 - protein, 6 aa, Artificial sequence
  Protein classification predicting sequence
GTEPPF

SEQ ID NO: 8782 - protein, 9 aa, Artificial sequence
  Protein classification predicting sequence
CDAHLGHVF

SEQ ID NO: 8783 - protein, 6 aa, Artificial sequence
  Protein classification predicting sequence
SGCGWP

SEQ ID NO: 8784 - protein, 6 aa, Artificial sequence
  Protein classification predicting sequence
SHGMVR

SEQ ID NO: 8785 - protein, 10 aa, Artificial sequence
  Protein classification predicting sequence
LSEMQFYVTQ

SEQ ID NO: 8786 - protein, 22 aa, Artificial sequence
  Protein classification predicting sequence
GTEPPFTGRLLHNKRDGVYHCL

SEQ ID NO: 8787 - protein, 6 aa, Artificial sequence
  Protein classification predicting sequence
SHGMQR

SEQ ID NO: 8788 - protein, 7 aa, Artificial sequence
  Protein classification predicting sequence
NEYWNHF

SEQ ID NO: 8789 - protein, 6 aa, Artificial sequence
  Protein classification predicting sequence
CGWPSF

SEQ ID NO: 8790 - protein, 10 aa, Artificial sequence
  Protein classification predicting sequence
CGWPSFSKAL

SEQ ID NO: 8791 - protein, 9 aa, Artificial sequence
  Protein classification predicting sequence
ELVDKSFGM

SEQ ID NO: 8792 - protein, 17 aa, Artificial sequence
  Protein classification predicting sequence
GGLRYCINSAAIQFIPY

SEQ ID NO: 8793 - protein, 11 aa, Artificial sequence
  Protein classification predicting sequence
KLEELGYGDLI

SEQ ID NO: 8794 - protein, 10 aa, Artificial sequence
  Protein classification predicting sequence
YQVTQNSATE

SEQ ID NO: 8795 - protein, 7 aa, Artificial sequence
  Protein classification predicting sequence
DGPKTTG

SEQ ID NO: 8796 - protein, 15 aa, Artificial sequence
  Protein classification predicting sequence
NKYDSGCGWPSFDAP

SEQ ID NO: 8797 - protein, 11 aa, Artificial sequence
  Protein classification predicting sequence
CVNSVSLIFNK

SEQ ID NO: 8798 - protein, 10 aa, Artificial sequence
  Protein classification predicting sequence
LLHNKRDGVY

SEQ ID NO: 8799 - protein, 8 aa, Artificial sequence
  Protein classification predicting sequence
NPYAKAKA

SEQ ID NO: 8800 - protein, 6 aa, Artificial sequence
  Protein classification predicting sequence
HLTCTN

SEQ ID NO: 8801 - protein, 7 aa, Artificial sequence
  Protein classification predicting sequence
DEFPNGR

SEQ ID NO: 8802 - protein, 13 aa, Artificial sequence
  Protein classification predicting sequence
NAVTWGIFPGREI

SEQ ID NO: 8803 - protein, 9 aa, Artificial sequence
  Protein classification predicting sequence
EDVRPIFWA

SEQ ID NO: 8804 - protein, 6 aa, Artificial sequence
  Protein classification predicting sequence
NAVTWG

SEQ ID NO: 8805 - protein, 8 aa, Artificial sequence
  Protein classification predicting sequence
VEPFYEWV

SEQ ID NO: 8806 - protein, 7 aa, Artificial sequence
  Protein classification predicting sequence
PYIERKL

SEQ ID NO: 8807 - protein, 6 aa, Artificial sequence
  Protein classification predicting sequence
TTAVGP

SEQ ID NO: 8808 - protein, 6 aa, Artificial sequence
  Protein classification predicting sequence
DRLIKP

SEQ ID NO: 8809 - protein, 6 aa, Artificial sequence
  Protein classification predicting sequence
IIACEN

SEQ ID NO: 8810 - protein, 32 aa, Artificial sequence
  Protein classification predicting sequence
AMHFRSEDDPQAQELAALIADKGPQAALAQIS

SEQ ID NO: 8811 - protein, 14 aa, Artificial sequence
  Protein classification predicting sequence
VHFGAGNIGRGFIG

SEQ ID NO: 8812 - protein, 6 aa, Artificial sequence
  Protein classification predicting sequence
DLVTTA

SEQ ID NO: 8813 - protein, 7 aa, Artificial sequence
  Protein classification predicting sequence
AVDRIVP

SEQ ID NO: 8814 - protein, 10 aa, Artificial sequence
  Protein classification predicting sequence
ERFIRPIREL

SEQ ID NO: 8815 - protein, 8 aa, Artificial sequence
  Protein classification predicting sequence
LTFADVNQ

SEQ ID NO: 8816 - protein, 18 aa, Artificial sequence
  Protein classification predicting sequence
VLDALNARHSYQVHVVGE

SEQ ID NO: 8817 - protein, 18 aa, Artificial sequence
  Protein classification predicting sequence
GFVDSAVDRIVPPSASAT

SEQ ID NO: 8818 - protein, 25 aa, Artificial sequence
  Protein classification predicting sequence
DPLEVTVETFSEWIVDKTQFKGALP

SEQ ID NO: 8819 - protein, 14 aa, Artificial sequence
  Protein classification predicting sequence
GAMEESGAVLIKRY

SEQ ID NO: 8820 - protein, 15 aa, Artificial sequence
  Protein classification predicting sequence
IGFPNAAVDRIVPAQ

SEQ ID NO: 8821 - protein, 12 aa, Artificial sequence
  Protein classification predicting sequence
GFPNAAVDRIVP

SEQ ID NO: 8822 - protein, 8 aa, Artificial sequence
  Protein classification predicting sequence
DEVTRVGR

SEQ ID NO: 8823 - protein, 8 aa, Artificial sequence
  Protein classification predicting sequence
HFGAGNIG

SEQ ID NO: 8824 - protein, 7 aa, Artificial sequence
  Protein classification predicting sequence
WIVDKTQ

SEQ ID NO: 8825 - protein, 11 aa, Artificial sequence
  Protein classification predicting sequence
PLNIIACENMV

SEQ ID NO: 8826 - protein, 7 aa, Artificial sequence
  Protein classification predicting sequence
YEWVVEK

SEQ ID NO: 8827 - protein, 13 aa, Artificial sequence
  Protein classification predicting sequence
GFVDSAVDRIVPP

SEQ ID NO: 8828 - protein, 7 aa, Artificial sequence
  Protein classification predicting sequence
FSEWIVD

SEQ ID NO: 8829 - protein, 13 aa, Artificial sequence
  Protein classification predicting sequence
FSEWIVDKTQFKG

SEQ ID NO: 8830 - protein, 7 aa, Artificial sequence
  Protein classification predicting sequence
TAYLGKL

SEQ ID NO: 8831 - protein, 7 aa, Artificial sequence
  Protein classification predicting sequence
DRLIKPL

SEQ ID NO: 8832 - protein, 24 aa, Artificial sequence
  Protein classification predicting sequence
TTAVGPVVLERIAPAIAKGLVKRK

SEQ ID NO: 8833 - protein, 15 aa, Artificial sequence
  Protein classification predicting sequence
PLNIIACENMVRGTT

SEQ ID NO: 8834 - protein, 11 aa, Artificial sequence
  Protein classification predicting sequence
DPQAQELAALI

SEQ ID NO: 8835 - protein, 31 aa, Artificial sequence
  Protein classification predicting sequence
DSSIEAGLRRVLAETSQYITNEFDFTEAEQA

SEQ ID NO: 8836 - protein, 20 aa, Artificial sequence
  Protein classification predicting sequence
HQYDVILADESKTTTRVNNV

SEQ ID NO: 8837 - protein, 9 aa, Artificial sequence
  Protein classification predicting sequence
AINSMQPSE

SEQ ID NO: 8838 - protein, 7 aa, Artificial sequence
  Protein classification predicting sequence
RFENPYL

SEQ ID NO: 8839 - protein, 13 aa, Artificial sequence
  Protein classification predicting sequence
HFGAGNIGRGFIG

SEQ ID NO: 8840 - protein, 19 aa, Artificial sequence
  Protein classification predicting sequence
HFGAGNIGRGFIGKLLADA

SEQ ID NO: 8841 - protein, 8 aa, Artificial sequence
  Protein classification predicting sequence
PLVDQLSH

SEQ ID NO: 8842 - protein, 10 aa, Artificial sequence
  Protein classification predicting sequence
HVTAVNSASE

SEQ ID NO: 8843 - protein, 8 aa, Artificial sequence
  Protein classification predicting sequence
DPLEVTVE

SEQ ID NO: 8844 - protein, 12 aa, Artificial sequence
  Protein classification predicting sequence
RVGRQPLRKLSA

SEQ ID NO: 8845 - protein, 10 aa, Artificial sequence
  Protein classification predicting sequence
DRLIKPLLGT

SEQ ID NO: 8846 - protein, 11 aa, Artificial sequence
  Protein classification predicting sequence
LLKGIAAALKY

SEQ ID NO: 8847 - protein, 17 aa, Artificial sequence
  Protein classification predicting sequence
NLMAFVERKLFTLNTGH

SEQ ID NO: 8848 - protein, 6 aa, Artificial sequence
  Protein classification predicting sequence
PIRKLG

SEQ ID NO: 8849 - protein, 12 aa, Artificial sequence
  Protein classification predicting sequence
VTVETFSEWIVD

SEQ ID NO: 8850 - protein, 30 aa, Artificial sequence
  Protein classification predicting sequence
GMELTDNLMAFVERKLFTLNTGHAITAYLG

SEQ ID NO: 8851 - protein, 13 aa, Artificial sequence
  Protein classification predicting sequence
LAGHQTIRDAILD

SEQ ID NO: 8852 - protein, 30 aa, Artificial sequence
  Protein classification predicting sequence
DDVERVGRQPLRKLSAGDRLIKPLLGTLEY

SEQ ID NO: 8853 - protein, 9 aa, Artificial sequence
  Protein classification predicting sequence
GIPGSVGGA

SEQ ID NO: 8854 - protein, 7 aa, Artificial sequence
  Protein classification predicting sequence
HANFIVN

SEQ ID NO: 8855 - protein, 7 aa, Artificial sequence
  Protein classification predicting sequence
AKMDDLT

SEQ ID NO: 8856 - protein, 8 aa, Artificial sequence
  Protein classification predicting sequence
RIGGVEVS

SEQ ID NO: 8857 - protein, 14 aa, Artificial sequence
  Protein classification predicting sequence
KHAGFMVNVDNGTA

SEQ ID NO: 8858 - protein, 7 aa, Artificial sequence
  Protein classification predicting sequence
EVRIIGE

SEQ ID NO: 8859 - protein, 9 aa, Artificial sequence
  Protein classification predicting sequence
FAGKLIQDS

SEQ ID NO: 8860 - protein, 22 aa, Artificial sequence
  Protein classification predicting sequence
ECLSGIPGSAGATPVQNVGAYG

SEQ ID NO: 8861 - protein, 9 aa, Artificial sequence
  Protein classification predicting sequence
ETRERVVEV

SEQ ID NO: 8862 - protein, 7 aa, Artificial sequence
  Protein classification predicting sequence
LEWEIKR

SEQ ID NO: 8863 - protein, 5 aa, Artificial sequence
  Protein classification predicting sequence
AGWLI

SEQ ID NO: 8864 - protein, 6 aa, Artificial sequence
  Protein classification predicting sequence
FSYRTS

SEQ ID NO: 8865 - protein, 10 aa, Artificial sequence
  Protein classification predicting sequence
LIPGTVGAAP

SEQ ID NO: 8866 - protein, 9 aa, Artificial sequence
  Protein classification predicting sequence
KLAAGWLID

SEQ ID NO: 8867 - protein, 10 aa, Artificial sequence
  Protein classification predicting sequence
AWYLHVGAGE

SEQ ID NO: 8868 - protein, 7 aa, Artificial sequence
  Protein classification predicting sequence
GSFFKNP

SEQ ID NO: 8869 - protein, 10 aa, Artificial sequence
  Protein classification predicting sequence
GNAGSFFKNP

SEQ ID NO: 8870 - protein, 10 aa, Artificial sequence
  Protein classification predicting sequence
GLENLALIPG

SEQ ID NO: 8871 - protein, 12 aa, Artificial sequence
  Protein classification predicting sequence
APIQNIGAYGVE

SEQ ID NO: 8872 - protein, 9 aa, Artificial sequence
  Protein classification predicting sequence
GGAVFMNAG

SEQ ID NO: 8873 - protein, 13 aa, Artificial sequence
  Protein classification predicting sequence
VEAAAGENWHGFV

SEQ ID NO: 8874 - protein, 10 aa, Artificial sequence
  Protein classification predicting sequence
GSNLLVRDGG

SEQ ID NO: 8875 - protein, 7 aa, Artificial sequence
  Protein classification predicting sequence
LGNGSNI

SEQ ID NO: 8876 - protein, 6 aa, Artificial sequence
  Protein classification predicting sequence
EVRIIG

SEQ ID NO: 8877 - protein, 8 aa, Artificial sequence
  Protein classification predicting sequence
VRDGGIRG

SEQ ID NO: 8878 - protein, 6 aa, Artificial sequence
  Protein classification predicting sequence
GGSNLV

SEQ ID NO: 8879 - protein, 6 aa, Artificial sequence
  Protein classification predicting sequence
SCGSVF

SEQ ID NO: 8880 - protein, 7 aa, Artificial sequence
  Protein classification predicting sequence
EVSEKHA

SEQ ID NO: 8881 - protein, 11 aa, Artificial sequence
  Protein classification predicting sequence
GLENLALIPGC

SEQ ID NO: 8882 - protein, 9 aa, Artificial sequence
  Protein classification predicting sequence
EFACGIPGS

SEQ ID NO: 8883 - protein, 10 aa, Artificial sequence
  Protein classification predicting sequence
GIPGSVGGAV

SEQ ID NO: 8884 - protein, 9 aa, Artificial sequence
  Protein classification predicting sequence
MNAGAYGGE

SEQ ID NO: 8885 - protein, 7 aa, Artificial sequence
  Protein classification predicting sequence
NRGGATA

SEQ ID NO: 8886 - protein, 18 aa, Artificial sequence
  Protein classification predicting sequence
PQADGSVKLAAGWLIDQC

SEQ ID NO: 8887 - protein, 7 aa, Artificial sequence
  Protein classification predicting sequence
LAHHVRQ

SEQ ID NO: 8888 - protein, 11 aa, Artificial sequence
  Protein classification predicting sequence
NEPLSKYTYTK

SEQ ID NO: 8889 - protein, 31 aa, Artificial sequence
  Protein classification predicting sequence
SLTGFEFACGIPGSIGGAVFMNAGAYGGEIS

SEQ ID NO: 8890 - protein, 11 aa, Artificial sequence
  Protein classification predicting sequence
MNAGAYGGEIS

SEQ ID NO: 8891 - protein, 6 aa, Artificial sequence
  Protein classification predicting sequence
EMNRLN

SEQ ID NO: 8892 - protein, 16 aa, Artificial sequence
  Protein classification predicting sequence
KQPLEYPSCGSVFKRP

SEQ ID NO: 8893 - protein, 8 aa, Artificial sequence
  Protein classification predicting sequence
GNASNLIV

SEQ ID NO: 8894 - protein, 7 aa, Artificial sequence
  Protein classification predicting sequence
LTGLEFA

SEQ ID NO: 8895 - protein, 6 aa, Artificial sequence
  Protein classification predicting sequence
FGYRHS

SEQ ID NO: 8896 - protein, 6 aa, Artificial sequence
  Protein classification predicting sequence
IHYVQK

SEQ ID NO: 8897 - protein, 7 aa, Artificial sequence
  Protein classification predicting sequence
QNIGAYG

SEQ ID NO: 8898 - protein, 9 aa, Artificial sequence
  Protein classification predicting sequence
GIPGSIGGA

SEQ ID NO: 8899 - protein, 6 aa, Artificial sequence
  Protein classification predicting sequence
IQAKMD

SEQ ID NO: 8900 - protein, 6 aa, Artificial sequence
  Protein classification predicting sequence
DHDTWS

SEQ ID NO: 8901 - protein, 7 aa, Artificial sequence
  Protein classification predicting sequence
GSFFTNP

SEQ ID NO: 8902 - protein, 6 aa, Artificial sequence
  Protein classification predicting sequence
CRFAYR

SEQ ID NO: 8903 - protein, 7 aa, Artificial sequence
  Protein classification predicting sequence
GGIRGIV

SEQ ID NO: 8904 - protein, 8 aa, Artificial sequence
  Protein classification predicting sequence
ENLSLIPG

SEQ ID NO: 8905 - protein, 7 aa, Artificial sequence
  Protein classification predicting sequence
GNAGSFF

SEQ ID NO: 8906 - protein, 7 aa, Artificial sequence
  Protein classification predicting sequence
PSCGSVF

SEQ ID NO: 8907 - protein, 6 aa, Artificial sequence
  Protein classification predicting sequence
GHRIGG

SEQ ID NO: 8908 - protein, 10 aa, Artificial sequence
  Protein classification predicting sequence
FIVNIGGATA

SEQ ID NO: 8909 - protein, 8 aa, Artificial sequence
  Protein classification predicting sequence
CRFGYRDS

SEQ ID NO: 8910 - protein, 7 aa, Artificial sequence
  Protein classification predicting sequence
QNVGAYG

SEQ ID NO: 8911 - protein, 6 aa, Artificial sequence
  Protein classification predicting sequence
KLAAGW

SEQ ID NO: 8912 - protein, 9 aa, Artificial sequence
  Protein classification predicting sequence
LGETVRARV

SEQ ID NO: 8913 - protein, 8 aa, Artificial sequence
  Protein classification predicting sequence
RLSAKGFG

SEQ ID NO: 8914 - protein, 9 aa, Artificial sequence
  Protein classification predicting sequence
SNLIVRDGG

SEQ ID NO: 8915 - protein, 7 aa, Artificial sequence
  Protein classification predicting sequence
GSNIIIR

SEQ ID NO: 8916 - protein, 7 aa, Artificial sequence
  Protein classification predicting sequence
HCNFMIN

SEQ ID NO: 8917 - protein, 7 aa, Artificial sequence
  Protein classification predicting sequence
WEIKRIG

SEQ ID NO: 8918 - protein, 13 aa, Artificial sequence
  Protein classification predicting sequence
HSLKPWNTFGIDH

SEQ ID NO: 8919 - protein, 9 aa, Artificial sequence
  Protein classification predicting sequence
AIVAVGLRL

SEQ ID NO: 8920 - protein, 25 aa, Artificial sequence
  Protein classification predicting sequence
LAHHVRQKVGEKFNVWLEPEVRFIG

SEQ ID NO: 8921 - protein, 11 aa, Artificial sequence
  Protein classification predicting sequence
WQPVLTYGDLT

SEQ ID NO: 8922 - protein, 13 aa, Artificial sequence
  Protein classification predicting sequence
IKVDEPLKRYTYT

SEQ ID NO: 8923 - protein, 17 aa, Artificial sequence
  Protein classification predicting sequence
SDDAIIAGSGAAIIDVS

SEQ ID NO: 8924 - protein, 14 aa, Artificial sequence
  Protein classification predicting sequence
EFACGIPGSIGGAV

SEQ ID NO: 8925 - protein, 9 aa, Artificial sequence
  Protein classification predicting sequence
ELELDYRNS

SEQ ID NO: 8926 - protein, 11 aa, Artificial sequence
  Protein classification predicting sequence
HLVVLEAAFTL

SEQ ID NO: 8927 - protein, 20 aa, Artificial sequence
  Protein classification predicting sequence
EIQAKMDDLTERRESKQPLE

SEQ ID NO: 8928 - protein, 23 aa, Artificial sequence
  Protein classification predicting sequence
IPVTYLGNGSNIIIREGGIRGIV

SEQ ID NO: 8929 - protein, 22 aa, Artificial sequence
  Protein classification predicting sequence
MNAGAYGGEVKDCIDYALCVNE

SEQ ID NO: 8930 - protein, 26 aa, Artificial sequence
  Protein classification predicting sequence
PSCGSVFQRPPGHFAGKLIQDSNLQG

SEQ ID NO: 8931 - protein, 27 aa, Artificial sequence
  Protein classification predicting sequence
RIGGVEVSTKHAGFMVNVDNGTATDYE

SEQ ID NO: 8932 - protein, 17 aa, Artificial sequence
  Protein classification predicting sequence
IVRDGGIRGFVIMFDKL

SEQ ID NO: 8933 - protein, 12 aa, Artificial sequence
  Protein classification predicting sequence
EAEAGANLIETT

SEQ ID NO: 8934 - protein, 14 aa, Artificial sequence
  Protein classification predicting sequence
GDIVISAKFALKPG

SEQ ID NO: 8935 - protein, 10 aa, Artificial sequence
  Protein classification predicting sequence
PSCGSVFKRP

SEQ ID NO: 8936 - protein, 10 aa, Artificial sequence
  Protein classification predicting sequence
GIPGSAGATP

SEQ ID NO: 8937 - protein, 11 aa, Artificial sequence
  Protein classification predicting sequence
YTYTKVGGPAD

SEQ ID NO: 8938 - protein, 10 aa, Artificial sequence
  Protein classification predicting sequence
PWMVLGNASN

SEQ ID NO: 8939 - protein, 28 aa, Artificial sequence
  Protein classification predicting sequence
VLGNASNLIVRDGGIRGFVIMFDKLNAV

SEQ ID NO: 8940 - protein, 15 aa, Artificial sequence
  Protein classification predicting sequence
HSLTGFEFACGIPGS

SEQ ID NO: 8941 - protein, 8 aa, Artificial sequence
  Protein classification predicting sequence
GHFAGQLI

SEQ ID NO: 8942 - protein, 11 aa, Artificial sequence
  Protein classification predicting sequence
AFGYRHSAIQE

SEQ ID NO: 8943 - protein, 6 aa, Artificial sequence
  Protein classification predicting sequence
VMNAGA

SEQ ID NO: 8944 - protein, 6 aa, Artificial sequence
  Protein classification predicting sequence
FGYRDS

SEQ ID NO: 8945 - protein, 7 aa, Artificial sequence
  Protein classification predicting sequence
GSVFKRP

SEQ ID NO: 8946 - protein, 11 aa, Artificial sequence
  Protein classification predicting sequence
YPSAGSTFKRP

SEQ ID NO: 8947 - protein, 7 aa, Artificial sequence
  Protein classification predicting sequence
PGSVGGA

SEQ ID NO: 8948 - protein, 8 aa, Artificial sequence
  Protein classification predicting sequence
AAGWLIDQ

SEQ ID NO: 8949 - protein, 17 aa, Artificial sequence
  Protein classification predicting sequence
IPGCAGSAPIQNIGAYG

SEQ ID NO: 8950 - protein, 11 aa, Artificial sequence
  Protein classification predicting sequence
PIQNIGAYGVE

SEQ ID NO: 8951 - protein, 9 aa, Artificial sequence
  Protein classification predicting sequence
QNIGAYGVE

SEQ ID NO: 8952 - protein, 9 aa, Artificial sequence
  Protein classification predicting sequence
AAGWLIDQC

SEQ ID NO: 8953 - protein, 9 aa, Artificial sequence
  Protein classification predicting sequence
FGYRDSVFK

SEQ ID NO: 8954 - protein, 6 aa, Artificial sequence
  Protein classification predicting sequence
GSNVLF

SEQ ID NO: 8955 - protein, 7 aa, Artificial sequence
  Protein classification predicting sequence
EVSTKHA

SEQ ID NO: 8956 - protein, 8 aa, Artificial sequence
  Protein classification predicting sequence
DTLIAGAG

SEQ ID NO: 8957 - protein, 11 aa, Artificial sequence
  Protein classification predicting sequence
VPAAHYTCGGV

SEQ ID NO: 8958 - protein, 7 aa, Artificial sequence
  Protein classification predicting sequence
YVGIVRT

SEQ ID NO: 8959 - protein, 8 aa, Artificial sequence
  Protein classification predicting sequence
IAMAWRAG

SEQ ID NO: 8960 - protein, 7 aa, Artificial sequence
  Protein classification predicting sequence
EAVRGEG

SEQ ID NO: 8961 - protein, 6 aa, Artificial sequence
  Protein classification predicting sequence
ELAPRD

SEQ ID NO: 8962 - protein, 11 aa, Artificial sequence
  Protein classification predicting sequence
GLEAAHSRRRI

SEQ ID NO: 8963 - protein, 8 aa, Artificial sequence
  Protein classification predicting sequence
SEAVRGEG

SEQ ID NO: 8964 - protein, 7 aa, Artificial sequence
  Protein classification predicting sequence
LAPRDVV

SEQ ID NO: 8965 - protein, 8 aa, Artificial sequence
  Protein classification predicting sequence
GERFVNEL

SEQ ID NO: 8966 - protein, 13 aa, Artificial sequence
  Protein classification predicting sequence
HGANRLASNSLLE

SEQ ID NO: 8967 - protein, 8 aa, Artificial sequence
  Protein classification predicting sequence
EFIQFHPT

SEQ ID NO: 8968 - protein, 7 aa, Artificial sequence
  Protein classification predicting sequence
LAPRDIV

SEQ ID NO: 8969 - protein, 9 aa, Artificial sequence
  Protein classification predicting sequence
TEALRGEGA

SEQ ID NO: 8970 - protein, 8 aa, Artificial sequence
  Protein classification predicting sequence
IGTGVAGL

SEQ ID NO: 8971 - protein, 7 aa, Artificial sequence
  Protein classification predicting sequence
ASNSLLE

SEQ ID NO: 8972 - protein, 6 aa, Artificial sequence
  Protein classification predicting sequence
HYTCGG

SEQ ID NO: 8973 - protein, 12 aa, Artificial sequence
  Protein classification predicting sequence
IGSGAAGLSLAL

SEQ ID NO: 8974 - protein, 7 aa, Artificial sequence
  Protein classification predicting sequence
SHVEDTL

SEQ ID NO: 8975 - protein, 14 aa, Artificial sequence
  Protein classification predicting sequence
YHLTREGGHSHRRI

SEQ ID NO: 8976 - protein, 7 aa, Artificial sequence
  Protein classification predicting sequence
GGASKVY

SEQ ID NO: 8977 - protein, 10 aa, Artificial sequence
  Protein classification predicting sequence
NLEFNQFHPT

SEQ ID NO: 8978 - protein, 6 aa, Artificial sequence
  Protein classification predicting sequence
LYHPQA

SEQ ID NO: 8979 - protein, 8 aa, Artificial sequence
  Protein classification predicting sequence
TGLHGANR

SEQ ID NO: 8980 - protein, 8 aa, Artificial sequence
  Protein classification predicting sequence
ASNSLLEC

SEQ ID NO: 8981 - protein, 8 aa, Artificial sequence
  Protein classification predicting sequence
RDIVARAI

SEQ ID NO: 8982 - protein, 8 aa, Artificial sequence
  Protein classification predicting sequence
SSAWAQGG

SEQ ID NO: 8983 - protein, 7 aa, Artificial sequence
  Protein classification predicting sequence
LTREGGH

SEQ ID NO: 8984 - protein, 14 aa, Artificial sequence
  Protein classification predicting sequence
TFYAQGGIAAVFDE

SEQ ID NO: 8985 - protein, 11 aa, Artificial sequence
  Protein classification predicting sequence
DTLIAGAGICD

SEQ ID NO: 8986 - protein, 7 aa, Artificial sequence
  Protein classification predicting sequence
CVQWLID

SEQ ID NO: 8987 - protein, 15 aa, Artificial sequence
  Protein classification predicting sequence
VVLATGGASKVYQYT

SEQ ID NO: 8988 - protein, 27 aa, Artificial sequence
  Protein classification predicting sequence
SSGDGIAMAWRAGCRVANLEFNQFHPT

SEQ ID NO: 8989 - protein, 17 aa, Artificial sequence
  Protein classification predicting sequence
ARNFLLTEALRGEGAYL

SEQ ID NO: 8990 - protein, 10 aa, Artificial sequence
  Protein classification predicting sequence
EMKRLGADCM

SEQ ID NO: 8991 - protein, 26 aa, Artificial sequence
  Protein classification predicting sequence
LYAIGEVSYTGLHGANRMASNSLLEC

SEQ ID NO: 8992 - protein, 14 aa, Artificial sequence
  Protein classification predicting sequence
QHNWHELRLFMWDY

SEQ ID NO: 8993 - protein, 19 aa, Artificial sequence
  Protein classification predicting sequence
DVLIIGSGAAGLSLALRLA

SEQ ID NO: 8994 - protein, 18 aa, Artificial sequence
  Protein classification predicting sequence
TFYAQGGIAAVFDETDSI

SEQ ID NO: 8995 - protein, 38 aa, Artificial sequence
  Protein classification predicting sequence
KVYQYTTNPDISSGDGIAMAWRAGCRVANLEFNQFHPT

SEQ ID NO: 8996 - protein, 22 aa, Artificial sequence
  Protein classification predicting sequence
SNNLLELRNLVQVAELIVRCAM

SEQ ID NO: 8997 - protein, 29 aa, Artificial sequence
  Protein classification predicting sequence
TWEDVLRAADLISMTDTSIDIGPTRHGLT

SEQ ID NO: 8998 - protein, 13 aa, Artificial sequence
  Protein classification predicting sequence
GKTIYFFDPSGNR

SEQ ID NO: 8999 - protein, 28 aa, Artificial sequence
  Protein classification predicting sequence
LFSPYTIKDVTLKNRIVMSPMCMYSSEN

SEQ ID NO: 9000 - protein, 32 aa, Artificial sequence
  Protein classification predicting sequence
LIEGLHKTTTFIHDNGAKAAIQLAHAGRKAEL

SEQ ID NO: 9001 - protein, 11 aa, Artificial sequence
  Protein classification predicting sequence
RSKQAGFDVIE

SEQ ID NO: 9002 - protein, 18 aa, Artificial sequence
  Protein classification predicting sequence
IDVYPGYQVQYAKHIKEH

SEQ ID NO: 9003 - protein, 17 aa, Artificial sequence
  Protein classification predicting sequence
GAKAAIQLAHAGRKAEL

SEQ ID NO: 9004 - protein, 7 aa, Artificial sequence
  Protein classification predicting sequence
VYPGYQV

SEQ ID NO: 9005 - protein, 8 aa, Artificial sequence
  Protein classification predicting sequence
RELLRNPY

SEQ ID NO: 9006 - protein, 39 aa, Artificial sequence
  Protein classification predicting sequence
RYRFLREIIDSINEVWNGPLFVRISANDYHPDGLTVQDY

SEQ ID NO: 9007 - protein, 64 aa, Artificial sequence
  Protein classification predicting sequence
QYTKWMKEQGVDLIDCSSGAVVPARIDVYPGYQVQYAKHIKEHANIATGAVGLITTGAQAEQIL

SEQ ID NO: 9008 - protein, 22 aa, Artificial sequence
  Protein classification predicting sequence
IEIHGAHGYLINEFLSPLSNKR

SEQ ID NO: 9009 - protein, 12 aa, Artificial sequence
  Protein classification predicting sequence
KWMKEQGVDLID

SEQ ID NO: 9010 - protein, 8 aa, Artificial sequence
  Protein classification predicting sequence
SSGAVVPA

SEQ ID NO: 9011 - protein, 8 aa, Artificial sequence
  Protein classification predicting sequence
TGAVGLIT

SEQ ID NO: 9012 - protein, 12 aa, Artificial sequence
  Protein classification predicting sequence
ADLIFIGRELLR

SEQ ID NO: 9013 - protein, 15 aa, Artificial sequence
  Protein classification predicting sequence
TLKNRIVMSPMCMYS

SEQ ID NO: 9014 - protein, 9 aa, Artificial sequence
  Protein classification predicting sequence
IQLAHAGRK

SEQ ID NO: 9015 - protein, 20 aa, Artificial sequence
  Protein classification predicting sequence
RAKEAGFDVIEIHAAHGYLI

SEQ ID NO: 9016 - protein, 8 aa, Artificial sequence
  Protein classification predicting sequence
DYHPDGLT

SEQ ID NO: 9017 - protein, 8 aa, Artificial sequence
  Protein classification predicting sequence
MKEQGVDL

SEQ ID NO: 9018 - protein, 8 aa, Artificial sequence
  Protein classification predicting sequence
PGYQVPFA

SEQ ID NO: 9019 - protein, 7 aa, Artificial sequence
  Protein classification predicting sequence
CGTGCGV

SEQ ID NO: 9020 - protein, 13 aa, Artificial sequence
  Protein classification predicting sequence
KAPCRFCGTGCGV

SEQ ID NO: 9021 - protein, 9 aa, Artificial sequence
  Protein classification predicting sequence
TGRVLEHWH

SEQ ID NO: 9022 - protein, 9 aa, Artificial sequence
  Protein classification predicting sequence
TDFKKCAVK

SEQ ID NO: 9023 - protein, 9 aa, Artificial sequence
  Protein classification predicting sequence
QKGLFEEYA

SEQ ID NO: 9024 - protein, 11 aa, Artificial sequence
  Protein classification predicting sequence
FGRGHGHDLAP

SEQ ID NO: 9025 - protein, 17 aa, Artificial sequence
  Protein classification predicting sequence
NLDKCIGCHTCSVTCKN

SEQ ID NO: 9026 - protein, 7 aa, Artificial sequence
  Protein classification predicting sequence
FMMYLPR

SEQ ID NO: 9027 - protein, 14 aa, Artificial sequence
  Protein classification predicting sequence
CSETCVGRIRYLGV

SEQ ID NO: 9028 - protein, 16 aa, Artificial sequence
  Protein classification predicting sequence
ALPLHPEYRTLPMVWY

SEQ ID NO: 9029 - protein, 7 aa, Artificial sequence
  Protein classification predicting sequence
VIRPYTP

SEQ ID NO: 9030 - protein, 9 aa, Artificial sequence
  Protein classification predicting sequence
GITPMLQVI

SEQ ID NO: 9031 - protein, 11 aa, Artificial sequence
  Protein classification predicting sequence
PDIKYPLRLID

SEQ ID NO: 9032 - protein, 10 aa, Artificial sequence
  Protein classification predicting sequence
IGDTIEFRGP

SEQ ID NO: 9033 - protein, 7 aa, Artificial sequence
  Protein classification predicting sequence
GQHIYLS

SEQ ID NO: 9034 - protein, 22 aa, Artificial sequence
  Protein classification predicting sequence
KVYFKDTHPKFPAGGKMSQYLE

SEQ ID NO: 9035 - protein, 8 aa, Artificial sequence
  Protein classification predicting sequence
VVLSPVWF

SEQ ID NO: 9036 - protein, 6 aa, Artificial sequence
  Protein classification predicting sequence
TYEHYN

SEQ ID NO: 9037 - protein, 9 aa, Artificial sequence
  Protein classification predicting sequence
NKGVATSWL

SEQ ID NO: 9038 - protein, 11 aa, Artificial sequence
  Protein classification predicting sequence
PPFDAKNPFLA

SEQ ID NO: 9039 - protein, 8 aa, Artificial sequence
  Protein classification predicting sequence
CELLPRLQ

SEQ ID NO: 9040 - protein, 8 aa, Artificial sequence
  Protein classification predicting sequence
RKSQFRLP

SEQ ID NO: 9041 - protein, 8 aa, Artificial sequence
  Protein classification predicting sequence
KEPAGENG

SEQ ID NO: 9042 - protein, 6 aa, Artificial sequence
  Protein classification predicting sequence
DPEEYD

SEQ ID NO: 9043 - protein, 10 aa, Artificial sequence
  Protein classification predicting sequence
FGLGNKTYEH

SEQ ID NO: 9044 - protein, 9 aa, Artificial sequence
  Protein classification predicting sequence
VAEEVSLFS

SEQ ID NO: 9045 - protein, 11 aa, Artificial sequence
  Protein classification predicting sequence
RLEQLGAQRIF

SEQ ID NO: 9046 - protein, 24 aa, Artificial sequence
  Protein classification predicting sequence
GEMGRLKSYENQKPPFDAKNPFLA

SEQ ID NO: 9047 - protein, 27 aa, Artificial sequence
  Protein classification predicting sequence
YRTALTYYLDITNPPRTNVLYELAQYA

SEQ ID NO: 9048 - protein, 10 aa, Artificial sequence
  Protein classification predicting sequence
EDYLYREELA

SEQ ID NO: 9049 - protein, 7 aa, Artificial sequence
  Protein classification predicting sequence
SQTGTAE

SEQ ID NO: 9050 - protein, 6 aa, Artificial sequence
  Protein classification predicting sequence
TYGEGD

SEQ ID NO: 9051 - protein, 20 aa, Artificial sequence
  Protein classification predicting sequence
GLKEVARVESFHGFIYGCFD

SEQ ID NO: 9052 - protein, 12 aa, Artificial sequence
  Protein classification predicting sequence
IKANWKAPAENF

SEQ ID NO: 9053 - protein, 10 aa, Artificial sequence
  Protein classification predicting sequence
LTCSGVFKVW

SEQ ID NO: 9054 - protein, 13 aa, Artificial sequence
  Protein classification predicting sequence
PIDANTTEVWTYA

SEQ ID NO: 9055 - protein, 13 aa, Artificial sequence
  Protein classification predicting sequence
VEKDMPEDLKRRL

SEQ ID NO: 9056 - protein, 18 aa, Artificial sequence
  Protein classification predicting sequence
VGKSAIGETSYRGFYRAY

SEQ ID NO: 9057 - protein, 19 aa, Artificial sequence
  Protein classification predicting sequence
DGSIRAFLNVCRHRGKTLV

SEQ ID NO: 9058 - protein, 17 aa, Artificial sequence
  Protein classification predicting sequence
ARIYRSHLNCTVFPNNS

SEQ ID NO: 9059 - protein, 7 aa, Artificial sequence
  Protein classification predicting sequence
RCGIYSR

SEQ ID NO: 9060 - protein, 11 aa, Artificial sequence
  Protein classification predicting sequence
GEIGIVFEHPT

SEQ ID NO: 9061 - protein, 10 aa, Artificial sequence
  Protein classification predicting sequence
FRFALPSEDQ

SEQ ID NO: 9062 - protein, 9 aa, Artificial sequence
  Protein classification predicting sequence
KGPLGHIEY

SEQ ID NO: 9063 - protein, 7 aa, Artificial sequence
  Protein classification predicting sequence
DSPVRGC

SEQ ID NO: 9064 - protein, 7 aa, Artificial sequence
  Protein classification predicting sequence
RDEGTAD

SEQ ID NO: 9065 - protein, 12 aa, Artificial sequence
  Protein classification predicting sequence
RDIILAYMQNGE

SEQ ID NO: 9066 - protein, 6 aa, Artificial sequence
  Protein classification predicting sequence
YHYKDN

SEQ ID NO: 9067 - protein, 11 aa, Artificial sequence
  Protein classification predicting sequence
DVKGPLGHIEY

SEQ ID NO: 9068 - protein, 10 aa, Artificial sequence
  Protein classification predicting sequence
TRFLKDHPGG

SEQ ID NO: 9069 - protein, 8 aa, Artificial sequence
  Protein classification predicting sequence
VGKHIFLC

SEQ ID NO: 9070 - protein, 20 aa, Artificial sequence
  Protein classification predicting sequence
RLMHHGFITPVPLHYVRNHG

SEQ ID NO: 9071 - protein, 11 aa, Artificial sequence
  Protein classification predicting sequence
GSKYGTSIKKE

SEQ ID NO: 9072 - protein, 22 aa, Artificial sequence
  Protein classification predicting sequence
PYTLKGYAYSGGGKKVTRVEVT

SEQ ID NO: 9073 - protein, 21 aa, Artificial sequence
  Protein classification predicting sequence
LDHQEKPNKYGKFWCWCFWSL

SEQ ID NO: 9074 - protein, 7 aa, Artificial sequence
  Protein classification predicting sequence
STPFMNT

SEQ ID NO: 9075 - protein, 8 aa, Artificial sequence
  Protein classification predicting sequence
KMYSMSEV

SEQ ID NO: 9076 - protein, 7 aa, Artificial sequence
  Protein classification predicting sequence
YDCTRFL

SEQ ID NO: 9077 - protein, 6 aa, Artificial sequence
  Protein classification predicting sequence
TADNWI

SEQ ID NO: 9078 - protein, 7 aa, Artificial sequence
  Protein classification predicting sequence
WEDWTVE

SEQ ID NO: 9079 - protein, 7 aa, Artificial sequence
  Protein classification predicting sequence
GGWMAKE

SEQ ID NO: 9080 - protein, 6 aa, Artificial sequence
  Protein classification predicting sequence
KIPCKL

SEQ ID NO: 9081 - protein, 9 aa, Artificial sequence
  Protein classification predicting sequence
KVYFKDVHP

SEQ ID NO: 9082 - protein, 7 aa, Artificial sequence
  Protein classification predicting sequence
FPSREFP

SEQ ID NO: 9083 - protein, 12 aa, Artificial sequence
  Protein classification predicting sequence
GLPVGKHIFLCA

SEQ ID NO: 9084 - protein, 7 aa, Artificial sequence
  Protein classification predicting sequence
RSVALIP

SEQ ID NO: 9085 - protein, 7 aa, Artificial sequence
  Protein classification predicting sequence
PKFPNGG

SEQ ID NO: 9086 - protein, 8 aa, Artificial sequence
  Protein classification predicting sequence
VHGKQKFA

SEQ ID NO: 9087 - protein, 13 aa, Artificial sequence
  Protein classification predicting sequence
RDEGTADNWIERN

SEQ ID NO: 9088 - protein, 14 aa, Artificial sequence
  Protein classification predicting sequence
YSGGGKKVTRVEVT

SEQ ID NO: 9089 - protein, 7 aa, Artificial sequence
  Protein classification predicting sequence
ERHLEIS

SEQ ID NO: 9090 - protein, 8 aa, Artificial sequence
  Protein classification predicting sequence
VHGKPRFA

SEQ ID NO: 9091 - protein, 8 aa, Artificial sequence
  Protein classification predicting sequence
PGQIGGRS

SEQ ID NO: 9092 - protein, 13 aa, Artificial sequence
  Protein classification predicting sequence
WDDWTVEVTGLVK

SEQ ID NO: 9093 - protein, 7 aa, Artificial sequence
  Protein classification predicting sequence
AMDPSRD

SEQ ID NO: 9094 - protein, 7 aa, Artificial sequence
  Protein classification predicting sequence
FAKKLAM

SEQ ID NO: 9095 - protein, 14 aa, Artificial sequence
  Protein classification predicting sequence
LALACGPPPMIQFA

SEQ ID NO: 9096 - protein, 26 aa, Artificial sequence
  Protein classification predicting sequence
PVTLVCAGNRRKEQNMVKQTIGFNWG

SEQ ID NO: 9097 - protein, 8 aa, Artificial sequence
  Protein classification predicting sequence
FALPSEDQ

SEQ ID NO: 9098 - protein, 9 aa, Artificial sequence
  Protein classification predicting sequence
FLEGHPGGA

SEQ ID NO: 9099 - protein, 7 aa, Artificial sequence
  Protein classification predicting sequence
SISHDVR

SEQ ID NO: 9100 - protein, 6 aa, Artificial sequence
  Protein classification predicting sequence
LRFEHP

SEQ ID NO: 9101 - protein, 7 aa, Artificial sequence
  Protein classification predicting sequence
RSDSPVR

SEQ ID NO: 9102 - protein, 11 aa, Artificial sequence
  Protein classification predicting sequence
LLEDFRIGELI

SEQ ID NO: 9103 - protein, 12 aa, Artificial sequence
  Protein classification predicting sequence
TEMHVVYANRTE

SEQ ID NO: 9104 - protein, 7 aa, Artificial sequence
  Protein classification predicting sequence
QPRDMYW

SEQ ID NO: 9105 - protein, 7 aa, Artificial sequence
  Protein classification predicting sequence
EYNFFGP

SEQ ID NO: 9106 - protein, 7 aa, Artificial sequence
  Protein classification predicting sequence
FTSDFQE

SEQ ID NO: 9107 - protein, 10 aa, Artificial sequence
  Protein classification predicting sequence
DIVFGGDKKL

SEQ ID NO: 9108 - protein, 9 aa, Artificial sequence
  Protein classification predicting sequence
VGGLRPRHV

SEQ ID NO: 9109 - protein, 13 aa, Artificial sequence
  Protein classification predicting sequence
VGGLRPRHVVPAF

SEQ ID NO: 9110 - protein, 8 aa, Artificial sequence
  Protein classification predicting sequence
YEFEEFVK

SEQ ID NO: 9111 - protein, 36 aa, Artificial sequence
  Protein classification predicting sequence
DCGVKSNIKSIPGVMTIRGCAYAGSKGVVWGPIKDM

SEQ ID NO: 9112 - protein, 19 aa, Artificial sequence
  Protein classification predicting sequence
RGCAYAGSKGVVWGPIKDM

SEQ ID NO: 9113 - protein, 8 aa, Artificial sequence
  Protein classification predicting sequence
QSECPIGL

SEQ ID NO: 9114 - protein, 7 aa, Artificial sequence
  Protein classification predicting sequence
SRILLEE

SEQ ID NO: 9115 - protein, 7 aa, Artificial sequence
  Protein classification predicting sequence
YRSMNYI

SEQ ID NO: 9116 - protein, 11 aa, Artificial sequence
  Protein classification predicting sequence
RHMEEKFGIPW

SEQ ID NO: 9117 - protein, 14 aa, Artificial sequence
  Protein classification predicting sequence
QSECPIGLIGDDIE

SEQ ID NO: 9118 - protein, 7 aa, Artificial sequence
  Protein classification predicting sequence
AQWSGDG

SEQ ID NO: 9119 - protein, 12 aa, Artificial sequence
  Protein classification predicting sequence
MHSWDYSGPYHG

SEQ ID NO: 9120 - protein, 6 aa, Artificial sequence
  Protein classification predicting sequence
GTGYEF

SEQ ID NO: 9121 - protein, 7 aa, Artificial sequence
  Protein classification predicting sequence
RGCAYAG

SEQ ID NO: 9122 - protein, 6 aa, Artificial sequence
  Protein classification predicting sequence
GHHIAN

SEQ ID NO: 9123 - protein, 7 aa, Artificial sequence
  Protein classification predicting sequence
DCGVKSN

SEQ ID NO: 9124 - protein, 10 aa, Artificial sequence
  Protein classification predicting sequence
HISHGPVGCG

SEQ ID NO: 9125 - protein, 5 aa, Artificial sequence
  Protein classification predicting sequence
QSECP

SEQ ID NO: 9126 - protein, 9 aa, Artificial sequence
  Protein classification predicting sequence
HCYRSMNYI

SEQ ID NO: 9127 - protein, 14 aa, Artificial sequence
  Protein classification predicting sequence
IAKYRPRLEGKTVM

SEQ ID NO: 9128 - protein, 10 aa, Artificial sequence
  Protein classification predicting sequence
KEKYIFQKMG

SEQ ID NO: 9129 - protein, 7 aa, Artificial sequence
  Protein classification predicting sequence
VKSNIKS

SEQ ID NO: 9130 - protein, 17 aa, Artificial sequence
  Protein classification predicting sequence
CAYAGSKGVVWGPIKDM

SEQ ID NO: 9131 - protein, 21 aa, Artificial sequence
  Protein classification predicting sequence
HISHGPVGCGQYSWGSRRNYY

SEQ ID NO: 9132 - protein, 22 aa, Artificial sequence
  Protein classification predicting sequence
LHCYRSMNYISRHMEEKFGIPW

SEQ ID NO: 9133 - protein, 13 aa, Artificial sequence
  Protein classification predicting sequence
FDDKIKEGAERVI

SEQ ID NO: 9134 - protein, 6 aa, Artificial sequence
  Protein classification predicting sequence
GPIKDM

SEQ ID NO: 9135 - protein, 6 aa, Artificial sequence
  Protein classification predicting sequence
HISHGP

SEQ ID NO: 9136 - protein, 15 aa, Artificial sequence
  Protein classification predicting sequence
VKLNLVHCYRSMNYI

SEQ ID NO: 9137 - protein, 6 aa, Artificial sequence
  Protein classification predicting sequence
RHMEEK

SEQ ID NO: 9138 - protein, 6 aa, Artificial sequence
  Protein classification predicting sequence
RGVSQS

SEQ ID NO: 9139 - protein, 6 aa, Artificial sequence
  Protein classification predicting sequence
YNIGGD

SEQ ID NO: 9140 - protein, 6 aa, Artificial sequence
  Protein classification predicting sequence
TKRYPT

SEQ ID NO: 9141 - protein, 6 aa, Artificial sequence
  Protein classification predicting sequence
GLIGDD

SEQ ID NO: 9142 - protein, 6 aa, Artificial sequence
  Protein classification predicting sequence
GIKEKY

SEQ ID NO: 9143 - protein, 7 aa, Artificial sequence
  Protein classification predicting sequence
SGIKEKY

SEQ ID NO: 9144 - protein, 13 aa, Artificial sequence
  Protein classification predicting sequence
GLRVVAQWSGDGT

SEQ ID NO: 9145 - protein, 15 aa, Artificial sequence
  Protein classification predicting sequence
HCYRSMNYISRHMEE

SEQ ID NO: 9146 - protein, 28 aa, Artificial sequence
  Protein classification predicting sequence
PFRQMHSWDYSGPYHGYDGFAIFARDMD

SEQ ID NO: 9147 - protein, 11 aa, Artificial sequence
  Protein classification predicting sequence
IGDYNIGGDAW

SEQ ID NO: 9148 - protein, 8 aa, Artificial sequence
  Protein classification predicting sequence
ILLEEIGL

SEQ ID NO: 9149 - protein, 14 aa, Artificial sequence
  Protein classification predicting sequence
KDMIHISHGPVGCG

SEQ ID NO: 9150 - protein, 19 aa, Artificial sequence
  Protein classification predicting sequence
RCEGFRGVSQSLGHHIAND

SEQ ID NO: 9151 - protein, 16 aa, Artificial sequence
  Protein classification predicting sequence
PFRQMHSWDYSGPYHG

SEQ ID NO: 9152 - protein, 10 aa, Artificial sequence
  Protein classification predicting sequence
EVMLTGFRGV

SEQ ID NO: 9153 - protein, 14 aa, Artificial sequence
  Protein classification predicting sequence
GGVRLGGLICNSRK

SEQ ID NO: 9154 - protein, 7 aa, Artificial sequence
  Protein classification predicting sequence
DREDELI

SEQ ID NO: 9155 - protein, 7 aa, Artificial sequence
  Protein classification predicting sequence
KLTIPTP

SEQ ID NO: 9156 - protein, 13 aa, Artificial sequence
  Protein classification predicting sequence
EMDELEALLIEYG

SEQ ID NO: 9157 - protein, 17 aa, Artificial sequence
  Protein classification predicting sequence
CVESGGPEPGVGCAGRG

SEQ ID NO: 9158 - protein, 20 aa, Artificial sequence
  Protein classification predicting sequence
CVESGGPEPGVGCAGRGIIT

SEQ ID NO: 9159 - protein, 25 aa, Artificial sequence
  Protein classification predicting sequence
LRQIAFYGKGGIGKSTTSQNTLAAL

SEQ ID NO: 9160 - protein, 7 aa, Artificial sequence
  Protein classification predicting sequence
VEDLELE

SEQ ID NO: 9161 - protein, 10 aa, Artificial sequence
  Protein classification predicting sequence
INFLEENGAY

SEQ ID NO: 9162 - protein, 38 aa, Artificial sequence
  Protein classification predicting sequence
DYVSYDVLGDVVCGGFAMPIRENKAQEIYIVMSGEMMA

SEQ ID NO: 9163 - protein, 8 aa, Artificial sequence
  Protein classification predicting sequence
GGVRLGGL

SEQ ID NO: 9164 - protein, 14 aa, Artificial sequence
  Protein classification predicting sequence
CNERQTDKELELAE

SEQ ID NO: 9165 - protein, 9 aa, Artificial sequence
  Protein classification predicting sequence
VEDLELEDV

SEQ ID NO: 9166 - protein, 8 aa, Artificial sequence
  Protein classification predicting sequence
PITMDELE

SEQ ID NO: 9167 - protein, 6 aa, Artificial sequence
  Protein classification predicting sequence
SGEMMA

SEQ ID NO: 9168 - protein, 6 aa, Artificial sequence
  Protein classification predicting sequence
YAANNI

SEQ ID NO: 9169 - protein, 8 aa, Artificial sequence
  Protein classification predicting sequence
EYRELARK

SEQ ID NO: 9170 - protein, 13 aa, Artificial sequence
  Protein classification predicting sequence
QEYRALAKKIINN

SEQ ID NO: 9171 - protein, 11 aa, Artificial sequence
  Protein classification predicting sequence
YGKGGIGKSTT

SEQ ID NO: 9172 - protein, 15 aa, Artificial sequence
  Protein classification predicting sequence
YGKGGIGKSTTQQNT

SEQ ID NO: 9173 - protein, 7 aa, Artificial sequence
  Protein classification predicting sequence
GCDPKAD

SEQ ID NO: 9174 - protein, 14 aa, Artificial sequence
  Protein classification predicting sequence
DVLGDVVCGGFAMP

SEQ ID NO: 9175 - protein, 16 aa, Artificial sequence
  Protein classification predicting sequence
DVLGDVVCGGFAMPIR

SEQ ID NO: 9176 - protein, 9 aa, Artificial sequence
  Protein classification predicting sequence
FVPRDNIVQ

SEQ ID NO: 9177 - protein, 10 aa, Artificial sequence
  Protein classification predicting sequence
GCDPKADSTR

SEQ ID NO: 9178 - protein, 9 aa, Artificial sequence
  Protein classification predicting sequence
ELARKIIEN

SEQ ID NO: 9179 - protein, 13 aa, Artificial sequence
  Protein classification predicting sequence
AIYGKGGIGKSTT

SEQ ID NO: 9180 - protein, 16 aa, Artificial sequence
  Protein classification predicting sequence
AIYGKGGIGKSTTTQN

SEQ ID NO: 9181 - protein, 7 aa, Artificial sequence
  Protein classification predicting sequence
AQEIYIV

SEQ ID NO: 9182 - protein, 21 aa, Artificial sequence
  Protein classification predicting sequence
SGEMMALYAANNIAKGILKYA

SEQ ID NO: 9183 - protein, 12 aa, Artificial sequence
  Protein classification predicting sequence
QSGVRLGGIICN

SEQ ID NO: 9184 - protein, 6 aa, Artificial sequence
  Protein classification predicting sequence
RNVDGE

SEQ ID NO: 9185 - protein, 6 aa, Artificial sequence
  Protein classification predicting sequence
GILKYA

SEQ ID NO: 9186 - protein, 11 aa, Artificial sequence
  Protein classification predicting sequence
VRLGGLICNSR

SEQ ID NO: 9187 - protein, 9 aa, Artificial sequence
  Protein classification predicting sequence
RLNTQMIHF

SEQ ID NO: 9188 - protein, 14 aa, Artificial sequence
  Protein classification predicting sequence
KLTIPTPIEMDELE

SEQ ID NO: 9189 - protein, 13 aa, Artificial sequence
  Protein classification predicting sequence
GGPEPGVGCAGRG

SEQ ID NO: 9190 - protein, 7 aa, Artificial sequence
  Protein classification predicting sequence
KGILKYA

SEQ ID NO: 9191 - protein, 9 aa, Artificial sequence
  Protein classification predicting sequence
ELELAEALA

SEQ ID NO: 9192 - protein, 13 aa, Artificial sequence
  Protein classification predicting sequence
IVGCDPKADSTRL

SEQ ID NO: 9193 - protein, 16 aa, Artificial sequence
  Protein classification predicting sequence
IVGCDPKADSTRLMLH

SEQ ID NO: 9194 - protein, 33 aa, Artificial sequence
  Protein classification predicting sequence
CVESGGPEPGVGCAGRGIITAINFLEENGAYQD

SEQ ID NO: 9195 - protein, 7 aa, Artificial sequence
  Protein classification predicting sequence
GILKYAH

SEQ ID NO: 9196 - protein, 5 aa, Artificial sequence
  Protein classification predicting sequence
TQMIH

SEQ ID NO: 9197 - protein, 8 aa, Artificial sequence
  Protein classification predicting sequence
VPRDNIVQ

SEQ ID NO: 9198 - protein, 20 aa, Artificial sequence
  Protein classification predicting sequence
RQIAFYGKGGIGKSTTSQNT

SEQ ID NO: 9199 - protein, 27 aa, Artificial sequence
  Protein classification predicting sequence
YDVLGDVVCGGFAMPIREGKAQEIYIV

SEQ ID NO: 9200 - protein, 9 aa, Artificial sequence
  Protein classification predicting sequence
TQMIHFVPR

SEQ ID NO: 9201 - protein, 11 aa, Artificial sequence
  Protein classification predicting sequence
VQHAELRRMTV

SEQ ID NO: 9202 - protein, 26 aa, Artificial sequence
  Protein classification predicting sequence
RQCAIYGKGGIGKSTTTQNLVAALAE

SEQ ID NO: 9203 - protein, 8 aa, Artificial sequence
  Protein classification predicting sequence
EDLELEDV

SEQ ID NO: 9204 - protein, 7 aa, Artificial sequence
  Protein classification predicting sequence
KGIVKYA

SEQ ID NO: 9205 - protein, 6 aa, Artificial sequence
  Protein classification predicting sequence
YGKGGI

SEQ ID NO: 9206 - protein, 7 aa, Artificial sequence
  Protein classification predicting sequence
KSTTTQN

SEQ ID NO: 9207 - protein, 19 aa, Artificial sequence
  Protein classification predicting sequence
VLDTLREEGEDVELDSILK

SEQ ID NO: 9208 - protein, 20 aa, Artificial sequence
  Protein classification predicting sequence
VFYDVLGDVVCGGFAMPIRE

SEQ ID NO: 9209 - protein, 13 aa, Artificial sequence
  Protein classification predicting sequence
FVIPKPMTQERLE

SEQ ID NO: 9210 - protein, 8 aa, Artificial sequence
  Protein classification predicting sequence
TVLHLAAE

SEQ ID NO: 9211 - protein, 7 aa, Artificial sequence
  Protein classification predicting sequence
SGEMMAM

SEQ ID NO: 9212 - protein, 10 aa, Artificial sequence
  Protein classification predicting sequence
RLGGIICNSR

SEQ ID NO: 9213 - protein, 8 aa, Artificial sequence
  Protein classification predicting sequence
ELLDAFAK

SEQ ID NO: 9214 - protein, 7 aa, Artificial sequence
  Protein classification predicting sequence
PRDNIVQ

SEQ ID NO: 9215 - protein, 10 aa, Artificial sequence
  Protein classification predicting sequence
YGKGGIGKST

SEQ ID NO: 9216 - protein, 7 aa, Artificial sequence
  Protein classification predicting sequence
YIVTSGE

SEQ ID NO: 9217 - protein, 6 aa, Artificial sequence
  Protein classification predicting sequence
GCAGRG

SEQ ID NO: 9218 - protein, 7 aa, Artificial sequence
  Protein classification predicting sequence
YAANNIC

SEQ ID NO: 9219 - protein, 7 aa, Artificial sequence
  Protein classification predicting sequence
TVIEYDP

SEQ ID NO: 9220 - protein, 12 aa, Artificial sequence
  Protein classification predicting sequence
PGVGCAGRGIIT

SEQ ID NO: 9221 - protein, 20 aa, Artificial sequence
  Protein classification predicting sequence
CVESGGPEPGVGCAGRGVIT

SEQ ID NO: 9222 - protein, 8 aa, Artificial sequence
  Protein classification predicting sequence
GAYTDDLD

SEQ ID NO: 9223 - protein, 18 aa, Artificial sequence
  Protein classification predicting sequence
LGDVVCGGFAMPIRDGKA

SEQ ID NO: 9224 - protein, 16 aa, Artificial sequence
  Protein classification predicting sequence
RKIAIYGKGGIGKSTT

SEQ ID NO: 9225 - protein, 6 aa, Artificial sequence
  Protein classification predicting sequence
TQMIHF

SEQ ID NO: 9226 - protein, 18 aa, Artificial sequence
  Protein classification predicting sequence
AIYGKGGIGKSTTTQNLT

SEQ ID NO: 9227 - protein, 39 aa, Artificial sequence
  Protein classification predicting sequence
GIRCVESGGPEPGVGCAGRGIITSINMLEQLGAYTDDLD

SEQ ID NO: 9228 - protein, 11 aa, Artificial sequence
  Protein classification predicting sequence
GGVRLGGLICN

SEQ ID NO: 9229 - protein, 9 aa, Artificial sequence
  Protein classification predicting sequence
NIVQHAELR

SEQ ID NO: 9230 - protein, 25 aa, Artificial sequence
  Protein classification predicting sequence
YDVLGDVVCGGFAMPIRENKAQEIY

SEQ ID NO: 9231 - protein, 15 aa, Artificial sequence
  Protein classification predicting sequence
VCSGEMMAMYAANNI

SEQ ID NO: 9232 - protein, 10 aa, Artificial sequence
  Protein classification predicting sequence
QMIHFVPRDN

SEQ ID NO: 9233 - protein, 19 aa, Artificial sequence
  Protein classification predicting sequence
QKILIVGCDPKADSTRLIL

SEQ ID NO: 9234 - protein, 17 aa, Artificial sequence
  Protein classification predicting sequence
ILIVGCDPKADSTRLIL

SEQ ID NO: 9235 - protein, 9 aa, Artificial sequence
  Protein classification predicting sequence
QDTVLHLAA

SEQ ID NO: 9236 - protein, 11 aa, Artificial sequence
  Protein classification predicting sequence
IPTPITMEELE

SEQ ID NO: 9237 - protein, 30 aa, Artificial sequence
  Protein classification predicting sequence
ILIVGCDPKADSTRLILHAKAQDTILSLAA

SEQ ID NO: 9238 - protein, 8 aa, Artificial sequence
  Protein classification predicting sequence
YAPDSKQA

SEQ ID NO: 9239 - protein, 19 aa, Artificial sequence
  Protein classification predicting sequence
MVVGCDPKADSTRLLLGGL

SEQ ID NO: 9240 - protein, 19 aa, Artificial sequence
  Protein classification predicting sequence
VFYDVLGDVVCGGFAMPIR

SEQ ID NO: 9241 - protein, 13 aa, Artificial sequence
  Protein classification predicting sequence
SGEMMAMYAANNI

SEQ ID NO: 9242 - protein, 7 aa, Artificial sequence
  Protein classification predicting sequence
ICNSRKV

SEQ ID NO: 9243 - protein, 11 aa, Artificial sequence
  Protein classification predicting sequence
LGTQLIYFVPR

SEQ ID NO: 9244 - protein, 8 aa, Artificial sequence
  Protein classification predicting sequence
AELRRMTV

SEQ ID NO: 9245 - protein, 15 aa, Artificial sequence
  Protein classification predicting sequence
ESGGPEPGVGCAGRG

SEQ ID NO: 9246 - protein, 18 aa, Artificial sequence
  Protein classification predicting sequence
ESGGPEPGVGCAGRGIIT

SEQ ID NO: 9247 - protein, 9 aa, Artificial sequence
  Protein classification predicting sequence
GKAQEIYIV

SEQ ID NO: 9248 - protein, 16 aa, Artificial sequence
  Protein classification predicting sequence
VRLGGLICNSRKTDRE

SEQ ID NO: 9249 - protein, 8 aa, Artificial sequence
  Protein classification predicting sequence
RRMTVIEY

SEQ ID NO: 9250 - protein, 6 aa, Artificial sequence
  Protein classification predicting sequence
QADEYR

SEQ ID NO: 9251 - protein, 7 aa, Artificial sequence
  Protein classification predicting sequence
AAMAEMG

SEQ ID NO: 9252 - protein, 7 aa, Artificial sequence
  Protein classification predicting sequence
NVVQHAE

SEQ ID NO: 9253 - protein, 9 aa, Artificial sequence
  Protein classification predicting sequence
CVESGGPEP

SEQ ID NO: 9254 - protein, 7 aa, Artificial sequence
  Protein classification predicting sequence
VGCAGRG

SEQ ID NO: 9255 - protein, 10 aa, Artificial sequence
  Protein classification predicting sequence
INFLEEEGAY

SEQ ID NO: 9256 - protein, 8 aa, Artificial sequence
  Protein classification predicting sequence
TDKELELA

SEQ ID NO: 9257 - protein, 21 aa, Artificial sequence
  Protein classification predicting sequence
LNSKLIHFVPRDNIVQHAELR

SEQ ID NO: 9258 - protein, 16 aa, Artificial sequence
  Protein classification predicting sequence
IHFVPRDNIVQHAELR

SEQ ID NO: 9259 - protein, 6 aa, Artificial sequence
  Protein classification predicting sequence
EYRTLA

SEQ ID NO: 9260 - protein, 16 aa, Artificial sequence
  Protein classification predicting sequence
IVGCDPKADSTRLILH

SEQ ID NO: 9261 - protein, 12 aa, Artificial sequence
  Protein classification predicting sequence
KAQNTIMEMAAE

SEQ ID NO: 9262 - protein, 8 aa, Artificial sequence
  Protein classification predicting sequence
TDREDELI

SEQ ID NO: 9263 - protein, 11 aa, Artificial sequence
  Protein classification predicting sequence
LGSQLIHFVPR

SEQ ID NO: 9264 - protein, 13 aa, Artificial sequence
  Protein classification predicting sequence
GCDPKADSTRLIL

SEQ ID NO: 9265 - protein, 8 aa, Artificial sequence
  Protein classification predicting sequence
EVMLTGFR

SEQ ID NO: 9266 - protein, 22 aa, Artificial sequence
  Protein classification predicting sequence
VPRDNIVQHAELRRMTVNEYAP

SEQ ID NO: 9267 - protein, 7 aa, Artificial sequence
  Protein classification predicting sequence
AALAEMG

SEQ ID NO: 9268 - protein, 7 aa, Artificial sequence
  Protein classification predicting sequence
YAANNIA

SEQ ID NO: 9269 - protein, 14 aa, Artificial sequence
  Protein classification predicting sequence
VRLGGLICNERQTD

SEQ ID NO: 9270 - protein, 7 aa, Artificial sequence
  Protein classification predicting sequence
TVLHLAA

SEQ ID NO: 9271 - protein, 26 aa, Artificial sequence
  Protein classification predicting sequence
LIHFVPRDNIVQHAELRKMTVIQYAP

SEQ ID NO: 9272 - protein, 6 aa, Artificial sequence
  Protein classification predicting sequence
EYRALA

SEQ ID NO: 9273 - protein, 7 aa, Artificial sequence
  Protein classification predicting sequence
PTPITME

SEQ ID NO: 9274 - protein, 7 aa, Artificial sequence
  Protein classification predicting sequence
LMEFGIM

SEQ ID NO: 9275 - protein, 8 aa, Artificial sequence
  Protein classification predicting sequence
FGIMKSDE

SEQ ID NO: 9276 - protein, 8 aa, Artificial sequence
  Protein classification predicting sequence
VQHAELRR

SEQ ID NO: 9277 - protein, 18 aa, Artificial sequence
  Protein classification predicting sequence
RQIAFYGKGGIGKSTTSQ

SEQ ID NO: 9278 - protein, 15 aa, Artificial sequence
  Protein classification predicting sequence
IVGCDPKADSTRLIL

SEQ ID NO: 9279 - protein, 7 aa, Artificial sequence
  Protein classification predicting sequence
KAQDTVL

SEQ ID NO: 9280 - protein, 12 aa, Artificial sequence
  Protein classification predicting sequence
AGSVEDLELEDV

SEQ ID NO: 9281 - protein, 7 aa, Artificial sequence
  Protein classification predicting sequence
IHFVPRD

SEQ ID NO: 9282 - protein, 20 aa, Artificial sequence
  Protein classification predicting sequence
IVGCDPKADSTRLILNAKAQ

SEQ ID NO: 9283 - protein, 8 aa, Artificial sequence
  Protein classification predicting sequence
KAQTTVLH

SEQ ID NO: 9284 - protein, 9 aa, Artificial sequence
  Protein classification predicting sequence
AAERGAVED

SEQ ID NO: 9285 - protein, 16 aa, Artificial sequence
  Protein classification predicting sequence
SGEMMAMYAANNIARG

SEQ ID NO: 9286 - protein, 13 aa, Artificial sequence
  Protein classification predicting sequence
GGVRLGGLICNSR

SEQ ID NO: 9287 - protein, 9 aa, Artificial sequence
  Protein classification predicting sequence
GFEGTLPFV

SEQ ID NO: 9288 - protein, 7 aa, Artificial sequence
  Protein classification predicting sequence
RMYDGGT

SEQ ID NO: 9289 - protein, 7 aa, Artificial sequence
  Protein classification predicting sequence
PIFDRHH

SEQ ID NO: 9290 - protein, 7 aa, Artificial sequence
  Protein classification predicting sequence
IGNSYGK

SEQ ID NO: 9291 - protein, 6 aa, Artificial sequence
  Protein classification predicting sequence
PFAHTP

SEQ ID NO: 9292 - protein, 7 aa, Artificial sequence
  Protein classification predicting sequence
VSSSMTE

SEQ ID NO: 9293 - protein, 6 aa, Artificial sequence
  Protein classification predicting sequence
RHFKEP

SEQ ID NO: 9294 - protein, 8 aa, Artificial sequence
  Protein classification predicting sequence
FDRHHLHR

SEQ ID NO: 9295 - protein, 8 aa, Artificial sequence
  Protein classification predicting sequence
EDAAVFGG

SEQ ID NO: 9296 - protein, 10 aa, Artificial sequence
  Protein classification predicting sequence
RSLLFTEPVD

SEQ ID NO: 9297 - protein, 7 aa, Artificial sequence
  Protein classification predicting sequence
LWHLRSL

SEQ ID NO: 9298 - protein, 7 aa, Artificial sequence
  Protein classification predicting sequence
KACQPLG

SEQ ID NO: 9299 - protein, 7 aa, Artificial sequence
  Protein classification predicting sequence
HGKKFAI

SEQ ID NO: 9300 - protein, 7 aa, Artificial sequence
  Protein classification predicting sequence
DRHHHHR

SEQ ID NO: 9301 - protein, 17 aa, Artificial sequence
  Protein classification predicting sequence
YAYVNHNLIEAFELGAA

SEQ ID NO: 9302 - protein, 7 aa, Artificial sequence
  Protein classification predicting sequence
GMVPWHV

SEQ ID NO: 9303 - protein, 11 aa, Artificial sequence
  Protein classification predicting sequence
PHNVDFHAATG

SEQ ID NO: 9304 - protein, 7 aa, Artificial sequence
  Protein classification predicting sequence
DFHAATG

SEQ ID NO: 9305 - protein, 11 aa, Artificial sequence
  Protein classification predicting sequence
VFNGAVGALTG

SEQ ID NO: 9306 - protein, 9 aa, Artificial sequence
  Protein classification predicting sequence
QSGMDNVRN

SEQ ID NO: 9307 - protein, 26 aa, Artificial sequence
  Protein classification predicting sequence
HSQANRDTRPHLIGGHGDYVWATGKF

SEQ ID NO: 9308 - protein, 7 aa, Artificial sequence
  Protein classification predicting sequence
FVYHCAP

SEQ ID NO: 9309 - protein, 8 aa, Artificial sequence
  Protein classification predicting sequence
PWHVVSGM

SEQ ID NO: 9310 - protein, 11 aa, Artificial sequence
  Protein classification predicting sequence
YAYVNHNLIEA

SEQ ID NO: 9311 - protein, 9 aa, Artificial sequence
  Protein classification predicting sequence
GEGAYFAPE

SEQ ID NO: 9312 - protein, 8 aa, Artificial sequence
  Protein classification predicting sequence
PGELDEYY

SEQ ID NO: 9313 - protein, 7 aa, Artificial sequence
  Protein classification predicting sequence
YQPGHNH

SEQ ID NO: 9314 - protein, 11 aa, Artificial sequence
  Protein classification predicting sequence
PENDQLIDISG

SEQ ID NO: 9315 - protein, 16 aa, Artificial sequence
  Protein classification predicting sequence
HWYYCSWFCHALHMEM

SEQ ID NO: 9316 - protein, 8 aa, Artificial sequence
  Protein classification predicting sequence
PSMRELMR

SEQ ID NO: 9317 - protein, 7 aa, Artificial sequence
  Protein classification predicting sequence
TDGKYDG

SEQ ID NO: 9318 - protein, 8 aa, Artificial sequence
  Protein classification predicting sequence
YVFCNGED

SEQ ID NO: 9319 - protein, 9 aa, Artificial sequence
  Protein classification predicting sequence
FDGRGNAYT

SEQ ID NO: 9320 - protein, 8 aa, Artificial sequence
  Protein classification predicting sequence
KFSKDRFL

SEQ ID NO: 9321 - protein, 10 aa, Artificial sequence
  Protein classification predicting sequence
WFCHALHMEM

SEQ ID NO: 9322 - protein, 11 aa, Artificial sequence
  Protein classification predicting sequence
SFTDGTYDGRY

SEQ ID NO: 9323 - protein, 10 aa, Artificial sequence
  Protein classification predicting sequence
NDKANSRVAR

SEQ ID NO: 9324 - protein, 11 aa, Artificial sequence
  Protein classification predicting sequence
LPNQHTVHGLR

SEQ ID NO: 9325 - protein, 7 aa, Artificial sequence
  Protein classification predicting sequence
GNLDNVD

SEQ ID NO: 9326 - protein, 8 aa, Artificial sequence
  Protein classification predicting sequence
GNAYTTLF

SEQ ID NO: 9327 - protein, 7 aa, Artificial sequence
  Protein classification predicting sequence
GVYWYYC

SEQ ID NO: 9328 - protein, 10 aa, Artificial sequence
  Protein classification predicting sequence
WYYCSWFCHA

SEQ ID NO: 9329 - protein, 12 aa, Artificial sequence
  Protein classification predicting sequence
GNAYTTLFIDSQ

SEQ ID NO: 9330 - protein, 6 aa, Artificial sequence
  Protein classification predicting sequence
KFSKDR

SEQ ID NO: 9331 - protein, 7 aa, Artificial sequence
  Protein classification predicting sequence
KWNIEDA

SEQ ID NO: 9332 - protein, 7 aa, Artificial sequence
  Protein classification predicting sequence
GEKVDPI

SEQ ID NO: 9333 - protein, 16 aa, Artificial sequence
  Protein classification predicting sequence
DLGGMMRNERDWVVVF

SEQ ID NO: 9334 - protein, 11 aa, Artificial sequence
  Protein classification predicting sequence
EPELGLGPLHT

SEQ ID NO: 9335 - protein, 6 aa, Artificial sequence
  Protein classification predicting sequence
FAEPHD

SEQ ID NO: 9336 - protein, 7 aa, Artificial sequence
  Protein classification predicting sequence
VPKNPHG

SEQ ID NO: 9337 - protein, 7 aa, Artificial sequence
  Protein classification predicting sequence
QLIDISG

SEQ ID NO: 9338 - protein, 6 aa, Artificial sequence
  Protein classification predicting sequence
FCHALH

SEQ ID NO: 9339 - protein, 9 aa, Artificial sequence
  Protein classification predicting sequence
LDVHYQPGH

SEQ ID NO: 9340 - protein, 17 aa, Artificial sequence
  Protein classification predicting sequence
PVFNRCSATGWGQTNES

SEQ ID NO: 9341 - protein, 11 aa, Artificial sequence
  Protein classification predicting sequence
FAEPHDATIVH

SEQ ID NO: 9342 - protein, 5 aa, Artificial sequence
  Protein classification predicting sequence
WFCHA

SEQ ID NO: 9343 - protein, 8 aa, Artificial sequence
  Protein classification predicting sequence
ILWPIQSG

SEQ ID NO: 9344 - protein, 10 aa, Artificial sequence
  Protein classification predicting sequence
GLSVGHHLGK

SEQ ID NO: 9345 - protein, 11 aa, Artificial sequence
  Protein classification predicting sequence
FCGFQVLEPQL

SEQ ID NO: 9346 - protein, 7 aa, Artificial sequence
  Protein classification predicting sequence
NADESEP

SEQ ID NO: 9347 - protein, 9 aa, Artificial sequence
  Protein classification predicting sequence
RRALIVLAH

SEQ ID NO: 9348 - protein, 15 aa, Artificial sequence
  Protein classification predicting sequence
WFGVPAILKGWFERV

SEQ ID NO: 9349 - protein, 19 aa, Artificial sequence
  Protein classification predicting sequence
PLYFAPSSLFDLNFQAGFL

SEQ ID NO: 9350 - protein, 7 aa, Artificial sequence
  Protein classification predicting sequence
GLWGKPT

SEQ ID NO: 9351 - protein, 7 aa, Artificial sequence
  Protein classification predicting sequence
PGGSSTP

SEQ ID NO: 9352 - protein, 7 aa, Artificial sequence
  Protein classification predicting sequence
CTPCREG

SEQ ID NO: 9353 - protein, 11 aa, Artificial sequence
  Protein classification predicting sequence
TTGGTAEMYTK

SEQ ID NO: 9354 - protein, 6 aa, Artificial sequence
  Protein classification predicting sequence
CPVGAL

SEQ ID NO: 9355 - protein, 6 aa, Artificial sequence
  Protein classification predicting sequence
CRMCLV

SEQ ID NO: 9356 - protein, 7 aa, Artificial sequence
  Protein classification predicting sequence
NHPLDCP

SEQ ID NO: 9357 - protein, 5 aa, Artificial sequence
  Protein classification predicting sequence
RCVRY

SEQ ID NO: 9358 - protein, 7 aa, Artificial sequence
  Protein classification predicting sequence
ANWYERE

SEQ ID NO: 9359 - protein, 14 aa, Artificial sequence
  Protein classification predicting sequence
RCIFCGLCEEACPT

SEQ ID NO: 9360 - protein, 22 aa, Artificial sequence
  Protein classification predicting sequence
DPNYDIKQLALECASKRMYPDI

SEQ ID NO: 9361 - protein, 8 aa, Artificial sequence
  Protein classification predicting sequence
PMGCRSFL

SEQ ID NO: 9362 - protein, 9 aa, Artificial sequence
  Protein classification predicting sequence
SLGYIGIHE

SEQ ID NO: 9363 - protein, 9 aa, Artificial sequence
  Protein classification predicting sequence
LLNENANKD

SEQ ID NO: 9364 - protein, 7 aa, Artificial sequence
  Protein classification predicting sequence
CHVEYYF

SEQ ID NO: 9365 - protein, 8 aa, Artificial sequence
  Protein classification predicting sequence
PMLKAQHP

SEQ ID NO: 9366 - protein, 10 aa, Artificial sequence
  Protein classification predicting sequence
DIRHAQWRWD

SEQ ID NO: 9367 - protein, 8 aa, Artificial sequence
  Protein classification predicting sequence
ADARTKLA

SEQ ID NO: 9368 - protein, 12 aa, Artificial sequence
  Protein classification predicting sequence
PMACWSCKSPDV

SEQ ID NO: 9369 - protein, 12 aa, Artificial sequence
  Protein classification predicting sequence
VTCIDCHMPKVQ

SEQ ID NO: 9370 - protein, 11 aa, Artificial sequence
  Protein classification predicting sequence
SKTPMLKAQHP

SEQ ID NO: 9371 - protein, 7 aa, Artificial sequence
  Protein classification predicting sequence
IRHAQWR

SEQ ID NO: 9372 - protein, 7 aa, Artificial sequence
  Protein classification predicting sequence
ESELVSG

SEQ ID NO: 9373 - protein, 11 aa, Artificial sequence
  Protein classification predicting sequence
EGESELVSGFN

SEQ ID NO: 9374 - protein, 8 aa, Artificial sequence
  Protein classification predicting sequence
MWSPLPMP

SEQ ID NO: 9375 - protein, 9 aa, Artificial sequence
  Protein classification predicting sequence
LLLTMSFLW

SEQ ID NO: 9376 - protein, 22 aa, Artificial sequence
  Protein classification predicting sequence
RASYPRFRYDQLMHLLWKNFLP

SEQ ID NO: 9377 - protein, 6 aa, Artificial sequence
  Protein classification predicting sequence
VAFLTL

SEQ ID NO: 9378 - protein, 10 aa, Artificial sequence
  Protein classification predicting sequence
VAFLTLLERK

SEQ ID NO: 9379 - protein, 14 aa, Artificial sequence
  Protein classification predicting sequence
VAFLTLLERKVLGY

SEQ ID NO: 9380 - protein, 7 aa, Artificial sequence
  Protein classification predicting sequence
ERKVLGY

SEQ ID NO: 9381 - protein, 15 aa, Artificial sequence
  Protein classification predicting sequence
KLFTKEQTYPLLSNY

SEQ ID NO: 9382 - protein, 8 aa, Artificial sequence
  Protein classification predicting sequence
KLYSFNLG

SEQ ID NO: 9383 - protein, 6 aa, Artificial sequence
  Protein classification predicting sequence
NLGVLF

SEQ ID NO: 9384 - protein, 15 aa, Artificial sequence
  Protein classification predicting sequence
LFFLCCTSLGVYTVM

SEQ ID NO: 9385 - protein, 7 aa, Artificial sequence
  Protein classification predicting sequence
AGWSSNS

SEQ ID NO: 9386 - protein, 6 aa, Artificial sequence
  Protein classification predicting sequence
PRFRYD

SEQ ID NO: 9387 - protein, 14 aa, Artificial sequence
  Protein classification predicting sequence
PFDFAEGESELVSG

SEQ ID NO: 9388 - protein, 9 aa, Artificial sequence
  Protein classification predicting sequence
EGESELVSG

SEQ ID NO: 9389 - protein, 9 aa, Artificial sequence
  Protein classification predicting sequence
RKGPNIVGP

SEQ ID NO: 9390 - protein, 6 aa, Artificial sequence
  Protein classification predicting sequence
GWSSNS

SEQ ID NO: 9391 - protein, 8 aa, Artificial sequence
  Protein classification predicting sequence
GWSSNSNY

SEQ ID NO: 9392 - protein, 9 aa, Artificial sequence
  Protein classification predicting sequence
LLMSGSFNL

SEQ ID NO: 9393 - protein, 5 aa, Artificial sequence
  Protein classification predicting sequence
AMMWF

SEQ ID NO: 9394 - protein, 11 aa, Artificial sequence
  Protein classification predicting sequence
FLPLTLALCMW

SEQ ID NO: 9395 - protein, 17 aa, Artificial sequence
  Protein classification predicting sequence
VGPYGLLQPIADAIKLF

SEQ ID NO: 9396 - protein, 7 aa, Artificial sequence
  Protein classification predicting sequence
LLMSGSF

SEQ ID NO: 9397 - protein, 9 aa, Artificial sequence
  Protein classification predicting sequence
GSFTLSTLI

SEQ ID NO: 9398 - protein, 10 aa, Artificial sequence
  Protein classification predicting sequence
AEYANIIMMN

SEQ ID NO: 9399 - protein, 8 aa, Artificial sequence
  Protein classification predicting sequence
GALRAVAQ

SEQ ID NO: 9400 - protein, 6 aa, Artificial sequence
  Protein classification predicting sequence
MWFIST

SEQ ID NO: 9401 - protein, 5 aa, Artificial sequence
  Protein classification predicting sequence
PMPYP

SEQ ID NO: 9402 - protein, 7 aa, Artificial sequence
  Protein classification predicting sequence
NILLMNT

SEQ ID NO: 9403 - protein, 6 aa, Artificial sequence
  Protein classification predicting sequence
WKNFLP

SEQ ID NO: 9404 - protein, 12 aa, Artificial sequence
  Protein classification predicting sequence
ALPIALAGLPPQ

SEQ ID NO: 9405 - protein, 11 aa, Artificial sequence
  Protein classification predicting sequence
PILLAVAFLTL

SEQ ID NO: 9406 - protein, 6 aa, Artificial sequence
  Protein classification predicting sequence
ERKILG

SEQ ID NO: 9407 - protein, 6 aa, Artificial sequence
  Protein classification predicting sequence
MFIIAP

SEQ ID NO: 9408 - protein, 8 aa, Artificial sequence
  Protein classification predicting sequence
LAMSSLAV

SEQ ID NO: 9409 - protein, 9 aa, Artificial sequence
  Protein classification predicting sequence
NGSFTLSTL

SEQ ID NO: 9410 - protein, 9 aa, Artificial sequence
  Protein classification predicting sequence
FLPLTLALC

SEQ ID NO: 9411 - protein, 6 aa, Artificial sequence
  Protein classification predicting sequence
PAWPLA

SEQ ID NO: 9412 - protein, 16 aa, Artificial sequence
  Protein classification predicting sequence
YALIGALRAVAQTISY

SEQ ID NO: 9413 - protein, 6 aa, Artificial sequence
  Protein classification predicting sequence
LITTQE

SEQ ID NO: 9414 - protein, 6 aa, Artificial sequence
  Protein classification predicting sequence
LFLWIR

SEQ ID NO: 9415 - protein, 18 aa, Artificial sequence
  Protein classification predicting sequence
LFLWIRTAYPRFRYDQLM

SEQ ID NO: 9416 - protein, 10 aa, Artificial sequence
  Protein classification predicting sequence
YPRFRYDQLM

SEQ ID NO: 9417 - protein, 10 aa, Artificial sequence
  Protein classification predicting sequence
AETNRAPFDL

SEQ ID NO: 9418 - protein, 14 aa, Artificial sequence
  Protein classification predicting sequence
EGESELVSGFNVEY

SEQ ID NO: 9419 - protein, 9 aa, Artificial sequence
  Protein classification predicting sequence
LFLGAFHNP

SEQ ID NO: 9420 - protein, 11 aa, Artificial sequence
  Protein classification predicting sequence
ADGVKLFIKEP

SEQ ID NO: 9421 - protein, 10 aa, Artificial sequence
  Protein classification predicting sequence
LALTIWVPLP

SEQ ID NO: 9422 - protein, 7 aa, Artificial sequence
  Protein classification predicting sequence
WPLAMMW

SEQ ID NO: 9423 - protein, 16 aa, Artificial sequence
  Protein classification predicting sequence
FFLAEYANIMLMNTLT

SEQ ID NO: 9424 - protein, 7 aa, Artificial sequence
  Protein classification predicting sequence
MASMQRR

SEQ ID NO: 9425 - protein, 7 aa, Artificial sequence
  Protein classification predicting sequence
FLPLTLA

SEQ ID NO: 9426 - protein, 8 aa, Artificial sequence
  Protein classification predicting sequence
LAERKVMA

SEQ ID NO: 9427 - protein, 5 aa, Artificial sequence
  Protein classification predicting sequence
IMFYI

SEQ ID NO: 9428 - protein, 9 aa, Artificial sequence
  Protein classification predicting sequence
PLPMPYPLI

SEQ ID NO: 9429 - protein, 11 aa, Artificial sequence
  Protein classification predicting sequence
SEIVMAQKQIW

SEQ ID NO: 9430 - protein, 14 aa, Artificial sequence
  Protein classification predicting sequence
GIPLFPVLVMFFIS

SEQ ID NO: 9431 - protein, 6 aa, Artificial sequence
  Protein classification predicting sequence
YIIPIL

SEQ ID NO: 9432 - protein, 13 aa, Artificial sequence
  Protein classification predicting sequence
VGPYGLLQPIADG

SEQ ID NO: 9433 - protein, 9 aa, Artificial sequence
  Protein classification predicting sequence
GLLQPIADG

SEQ ID NO: 9434 - protein, 5 aa, Artificial sequence
  Protein classification predicting sequence
PMPHP

SEQ ID NO: 9435 - protein, 9 aa, Artificial sequence
  Protein classification predicting sequence
SSLAVYSIL

SEQ ID NO: 9436 - protein, 8 aa, Artificial sequence
  Protein classification predicting sequence
FLAEYANI

SEQ ID NO: 9437 - protein, 22 aa, Artificial sequence
  Protein classification predicting sequence
FLWVRASYPRFRYDQLMHLVWK

SEQ ID NO: 9438 - protein, 6 aa, Artificial sequence
  Protein classification predicting sequence
EYTNII

SEQ ID NO: 9439 - protein, 9 aa, Artificial sequence
  Protein classification predicting sequence
WLIIPSWPL

SEQ ID NO: 9440 - protein, 5 aa, Artificial sequence
  Protein classification predicting sequence
PSWPL

SEQ ID NO: 9441 - protein, 7 aa, Artificial sequence
  Protein classification predicting sequence
LTISFLW

SEQ ID NO: 9442 - protein, 9 aa, Artificial sequence
  Protein classification predicting sequence
AETNRTPFD

SEQ ID NO: 9443 - protein, 11 aa, Artificial sequence
  Protein classification predicting sequence
TLPRFRYDKLM

SEQ ID NO: 9444 - protein, 9 aa, Artificial sequence
  Protein classification predicting sequence
ERKILGYMQ

SEQ ID NO: 9445 - protein, 6 aa, Artificial sequence
  Protein classification predicting sequence
PMPYPL

SEQ ID NO: 9446 - protein, 10 aa, Artificial sequence
  Protein classification predicting sequence
FLPLTLALCM

SEQ ID NO: 9447 - protein, 13 aa, Artificial sequence
  Protein classification predicting sequence
IIPILLAVAFLTL

SEQ ID NO: 9448 - protein, 12 aa, Artificial sequence
  Protein classification predicting sequence
LFMLAMSSLAVY

SEQ ID NO: 9449 - protein, 10 aa, Artificial sequence
  Protein classification predicting sequence
ILWSGWASNS

SEQ ID NO: 9450 - protein, 7 aa, Artificial sequence
  Protein classification predicting sequence
WPLTMMW

SEQ ID NO: 9451 - protein, 17 aa, Artificial sequence
  Protein classification predicting sequence
FLWIRASYPRFRYDQLM

SEQ ID NO: 9452 - protein, 7 aa, Artificial sequence
  Protein classification predicting sequence
TLALCLW

SEQ ID NO: 9453 - protein, 7 aa, Artificial sequence
  Protein classification predicting sequence
TQEHMWL

SEQ ID NO: 9454 - protein, 8 aa, Artificial sequence
  Protein classification predicting sequence
FLAEYTNI

SEQ ID NO: 9455 - protein, 7 aa, Artificial sequence
  Protein classification predicting sequence
TINLMTK

SEQ ID NO: 9456 - protein, 10 aa, Artificial sequence
  Protein classification predicting sequence
KLFTKEPLRP

SEQ ID NO: 9457 - protein, 26 aa, Artificial sequence
  Protein classification predicting sequence
SGWASNSKYALIGALRAVAQTISYEV

SEQ ID NO: 9458 - protein, 19 aa, Artificial sequence
  Protein classification predicting sequence
STLAETNRAPFDLTEGESE

SEQ ID NO: 9459 - protein, 7 aa, Artificial sequence
  Protein classification predicting sequence
WTPLPMP

SEQ ID NO: 9460 - protein, 10 aa, Artificial sequence
  Protein classification predicting sequence
KEPLRPLTSS

SEQ ID NO: 9461 - protein, 8 aa, Artificial sequence
  Protein classification predicting sequence
PMPHPLIN

SEQ ID NO: 9462 - protein, 8 aa, Artificial sequence
  Protein classification predicting sequence
TTTLFLGA

SEQ ID NO: 9463 - protein, 7 aa, Artificial sequence
  Protein classification predicting sequence
LFFGAFH

SEQ ID NO: 9464 - protein, 27 aa, Artificial sequence
  Protein classification predicting sequence
LFVLALSSLAVYSILGSGWASNSKYAL

SEQ ID NO: 9465 - protein, 8 aa, Artificial sequence
  Protein classification predicting sequence
GGFTLQTF

SEQ ID NO: 9466 - protein, 7 aa, Artificial sequence
  Protein classification predicting sequence
MWYISTL

SEQ ID NO: 9467 - protein, 40 aa, Artificial sequence
  Protein classification predicting sequence
ETNRAPFDLTEGESELVSGFNVEYAGGPFALFFLAEYANI

SEQ ID NO: 9468 - protein, 9 aa, Artificial sequence
  Protein classification predicting sequence
LMTKAALLS

SEQ ID NO: 9469 - protein, 7 aa, Artificial sequence
  Protein classification predicting sequence
TQEHLWL

SEQ ID NO: 9470 - protein, 6 aa, Artificial sequence
  Protein classification predicting sequence
EYAAGP

SEQ ID NO: 9471 - protein, 8 aa, Artificial sequence
  Protein classification predicting sequence
ALFFMAEY

SEQ ID NO: 9472 - protein, 6 aa, Artificial sequence
  Protein classification predicting sequence
NIIMMN

SEQ ID NO: 9473 - protein, 5 aa, Artificial sequence
  Protein classification predicting sequence
MWYIS

SEQ ID NO: 9474 - protein, 6 aa, Artificial sequence
  Protein classification predicting sequence
RPSTSS

SEQ ID NO: 9475 - protein, 18 aa, Artificial sequence
  Protein classification predicting sequence
RASYPRFRYDQLMHLLWK

SEQ ID NO: 9476 - protein, 6 aa, Artificial sequence
  Protein classification predicting sequence
IMTSSI

SEQ ID NO: 9477 - protein, 14 aa, Artificial sequence
  Protein classification predicting sequence
KLFTKEPLRPLTSS

SEQ ID NO: 9478 - protein, 8 aa, Artificial sequence
  Protein classification predicting sequence
KLFTKEPL

SEQ ID NO: 9479 - protein, 17 aa, Artificial sequence
  Protein classification predicting sequence
WPLAMMWFISTLAETNR

SEQ ID NO: 9480 - protein, 11 aa, Artificial sequence
  Protein classification predicting sequence
EYAAGPFALFF

SEQ ID NO: 9481 - protein, 6 aa, Artificial sequence
  Protein classification predicting sequence
AIILLS

SEQ ID NO: 9482 - protein, 8 aa, Artificial sequence
  Protein classification predicting sequence
STLAETNR

SEQ ID NO: 9483 - protein, 7 aa, Artificial sequence
  Protein classification predicting sequence
KLFIKEP

SEQ ID NO: 9484 - protein, 5 aa, Artificial sequence
  Protein classification predicting sequence
WIPLP

SEQ ID NO: 9485 - protein, 13 aa, Artificial sequence
  Protein classification predicting sequence
VYSILWSGWASNS

SEQ ID NO: 9486 - protein, 8 aa, Artificial sequence
  Protein classification predicting sequence
LLLIICVL

SEQ ID NO: 9487 - protein, 6 aa, Artificial sequence
  Protein classification predicting sequence
DAIKLF

SEQ ID NO: 9488 - protein, 7 aa, Artificial sequence
  Protein classification predicting sequence
FLCCTSL

SEQ ID NO: 9489 - protein, 11 aa, Artificial sequence
  Protein classification predicting sequence
VAQTISYEVSL

SEQ ID NO: 9490 - protein, 8 aa, Artificial sequence
  Protein classification predicting sequence
RKGPNKVG

SEQ ID NO: 9491 - protein, 11 aa, Artificial sequence
  Protein classification predicting sequence
RKGPNKVGLMG

SEQ ID NO: 9492 - protein, 8 aa, Artificial sequence
  Protein classification predicting sequence
WVRASYPR

SEQ ID NO: 9493 - protein, 7 aa, Artificial sequence
  Protein classification predicting sequence
ADAIKLF

SEQ ID NO: 9494 - protein, 10 aa, Artificial sequence
  Protein classification predicting sequence
LAETNRTPFD

SEQ ID NO: 9495 - protein, 6 aa, Artificial sequence
  Protein classification predicting sequence
FMAEYA

SEQ ID NO: 9496 - protein, 6 aa, Artificial sequence
  Protein classification predicting sequence
AEYANI

SEQ ID NO: 9497 - protein, 9 aa, Artificial sequence
  Protein classification predicting sequence
TIWTPLPMP

SEQ ID NO: 9498 - protein, 8 aa, Artificial sequence
  Protein classification predicting sequence
TWPLAMMW

SEQ ID NO: 9499 - protein, 9 aa, Artificial sequence
  Protein classification predicting sequence
FFLAEYANI

SEQ ID NO: 9500 - protein, 6 aa, Artificial sequence
  Protein classification predicting sequence
LALTMW

SEQ ID NO: 9501 - protein, 18 aa, Artificial sequence
  Protein classification predicting sequence
PLLLGVAFLVLAERKVMA

SEQ ID NO: 9502 - protein, 52 aa, Artificial sequence
  Protein classification predicting sequence
MFFISCLAETNRAPFDLPEAEAELVAGYNVEYSSMGFALFFLGEYANMILMS

SEQ ID NO: 9503 - protein, 17 aa, Artificial sequence
  Protein classification predicting sequence
YIWVRAAFPRYRYDQLM

SEQ ID NO: 9504 - protein, 9 aa, Artificial sequence
  Protein classification predicting sequence
YMQARKGPN

SEQ ID NO: 9505 - protein, 5 aa, Artificial sequence
  Protein classification predicting sequence
WVRAS

SEQ ID NO: 9506 - protein, 24 aa, Artificial sequence
  Protein classification predicting sequence
LGYMQLRKGPNIVGPYGLLQPIAD

SEQ ID NO: 9507 - protein, 7 aa, Artificial sequence
  Protein classification predicting sequence
FTIKTLL

SEQ ID NO: 9508 - protein, 5 aa, Artificial sequence
  Protein classification predicting sequence
MWHVS

SEQ ID NO: 9509 - protein, 7 aa, Artificial sequence
  Protein classification predicting sequence
AVAFLTL

SEQ ID NO: 9510 - protein, 6 aa, Artificial sequence
  Protein classification predicting sequence
FFLAEY

SEQ ID NO: 9511 - protein, 15 aa, Artificial sequence
  Protein classification predicting sequence
ERKVLGYMQFRKGPN

SEQ ID NO: 9512 - protein, 11 aa, Artificial sequence
  Protein classification predicting sequence
LGYMQFRKGPN

SEQ ID NO: 9513 - protein, 11 aa, Artificial sequence
  Protein classification predicting sequence
ALTIWTPLPMP

SEQ ID NO: 9514 - protein, 24 aa, Artificial sequence
  Protein classification predicting sequence
GALRAVAQTISYEVTLAIILLSIM

SEQ ID NO: 9515 - protein, 6 aa, Artificial sequence
  Protein classification predicting sequence
MNALTT

SEQ ID NO: 9516 - protein, 38 aa, Artificial sequence
  Protein classification predicting sequence
WPLAMMWFISTLAETNRAPFDLTEGESELVSGFNVEYA

SEQ ID NO: 9517 - protein, 9 aa, Artificial sequence
  Protein classification predicting sequence
NIIMMNALT

SEQ ID NO: 9518 - protein, 4 aa, Artificial sequence
  Protein classification predicting sequence
CMWH

SEQ ID NO: 9519 - protein, 7 aa, Artificial sequence
  Protein classification predicting sequence
WHTALPI

SEQ ID NO: 9520 - protein, 6 aa, Artificial sequence
  Protein classification predicting sequence
KLFIKE

SEQ ID NO: 9521 - protein, 14 aa, Artificial sequence
  Protein classification predicting sequence
LRAVAQTISYEVSL

SEQ ID NO: 9522 - protein, 8 aa, Artificial sequence
  Protein classification predicting sequence
RKGPNIVG

SEQ ID NO: 9523 - protein, 7 aa, Artificial sequence
  Protein classification predicting sequence
WIPLPMP

SEQ ID NO: 9524 - protein, 12 aa, Artificial sequence
  Protein classification predicting sequence
YALIGALRAVAQ

SEQ ID NO: 9525 - protein, 8 aa, Artificial sequence
  Protein classification predicting sequence
WPLAMMWF

SEQ ID NO: 9526 - protein, 9 aa, Artificial sequence
  Protein classification predicting sequence
FALFFMAEY

SEQ ID NO: 9527 - protein, 15 aa, Artificial sequence
  Protein classification predicting sequence
YPRFRYDQLMHLLWK

SEQ ID NO: 9528 - protein, 8 aa, Artificial sequence
  Protein classification predicting sequence
FLPLTLAL

SEQ ID NO: 9529 - protein, 9 aa, Artificial sequence
  Protein classification predicting sequence
LLAVAFLTL

SEQ ID NO: 9530 - protein, 7 aa, Artificial sequence
  Protein classification predicting sequence
GPFALFF

SEQ ID NO: 9531 - protein, 6 aa, Artificial sequence
  Protein classification predicting sequence
TLVERK

SEQ ID NO: 9532 - protein, 13 aa, Artificial sequence
  Protein classification predicting sequence
GALRAVAQTISYE

SEQ ID NO: 9533 - protein, 17 aa, Artificial sequence
  Protein classification predicting sequence
MWYISTLAETNRAPFDL

SEQ ID NO: 9534 - protein, 6 aa, Artificial sequence
  Protein classification predicting sequence
FFMAEY

SEQ ID NO: 9535 - protein, 13 aa, Artificial sequence
  Protein classification predicting sequence
IVPILLAVAFLTL

SEQ ID NO: 9536 - protein, 6 aa, Artificial sequence
  Protein classification predicting sequence
CLWFIS

SEQ ID NO: 9537 - protein, 13 aa, Artificial sequence
  Protein classification predicting sequence
AVVPFDYGMVLSD

SEQ ID NO: 9538 - protein, 42 aa, Artificial sequence
  Protein classification predicting sequence
NIGLLYLFAISSLGVYGIIIAGWSSNSKYAFLGALRSAAQMV

SEQ ID NO: 9539 - protein, 18 aa, Artificial sequence
  Protein classification predicting sequence
YEVSIGLILITVLICVGS

SEQ ID NO: 9540 - protein, 7 aa, Artificial sequence
  Protein classification predicting sequence
ALTLALT

SEQ ID NO: 9541 - protein, 7 aa, Artificial sequence
  Protein classification predicting sequence
LIDLNLG

SEQ ID NO: 9542 - protein, 6 aa, Artificial sequence
  Protein classification predicting sequence
LSITLI

SEQ ID NO: 9543 - protein, 10 aa, Artificial sequence
  Protein classification predicting sequence
MFIMAPILAL

SEQ ID NO: 9544 - protein, 6 aa, Artificial sequence
  Protein classification predicting sequence
GPNIVG

SEQ ID NO: 9545 - protein, 13 aa, Artificial sequence
  Protein classification predicting sequence
VGPYGLLQPIADA

SEQ ID NO: 9546 - protein, 12 aa, Artificial sequence
  Protein classification predicting sequence
LRAVAQTISYEV

SEQ ID NO: 9547 - protein, 8 aa, Artificial sequence
  Protein classification predicting sequence
LTERKILG

SEQ ID NO: 9548 - protein, 19 aa, Artificial sequence
  Protein classification predicting sequence
VYSILWSGWASNSNYALIG

SEQ ID NO: 9549 - protein, 7 aa, Artificial sequence
  Protein classification predicting sequence
IIPILLA

SEQ ID NO: 9550 - protein, 11 aa, Artificial sequence
  Protein classification predicting sequence
LGYMQLRKGPN

SEQ ID NO: 9551 - protein, 11 aa, Artificial sequence
  Protein classification predicting sequence
KEPLRPLTSSK

SEQ ID NO: 9552 - protein, 6 aa, Artificial sequence
  Protein classification predicting sequence
PMPHPL

SEQ ID NO: 9553 - protein, 22 aa, Artificial sequence
  Protein classification predicting sequence
RAVAQTISYEVTLAIILLSVLL

SEQ ID NO: 9554 - protein, 7 aa, Artificial sequence
  Protein classification predicting sequence
AEYTNII

SEQ ID NO: 9555 - protein, 6 aa, Artificial sequence
  Protein classification predicting sequence
STSSQL

SEQ ID NO: 9556 - protein, 7 aa, Artificial sequence
  Protein classification predicting sequence
LTLVERK

SEQ ID NO: 9557 - protein, 34 aa, Artificial sequence
  Protein classification predicting sequence
MMWFISTLAETNRAPFDLTEGESELVSGFNVEYA

SEQ ID NO: 9558 - protein, 11 aa, Artificial sequence
  Protein classification predicting sequence
RKGPNIVGPYG

SEQ ID NO: 9559 - protein, 26 aa, Artificial sequence
  Protein classification predicting sequence
YALIGALRAVAQTISYEVTLAIILLS

SEQ ID NO: 9560 - protein, 6 aa, Artificial sequence
  Protein classification predicting sequence
NLLLYI

SEQ ID NO: 9561 - protein, 9 aa, Artificial sequence
  Protein classification predicting sequence
VGPYGLLQP

SEQ ID NO: 9562 - protein, 7 aa, Artificial sequence
  Protein classification predicting sequence
LAIILLS

SEQ ID NO: 9563 - protein, 7 aa, Artificial sequence
  Protein classification predicting sequence
TTILFLG

SEQ ID NO: 9564 - protein, 15 aa, Artificial sequence
  Protein classification predicting sequence
RASYPRFRYDQLMHL

SEQ ID NO: 9565 - protein, 17 aa, Artificial sequence
  Protein classification predicting sequence
YAAGPFAMFFLAEYANI

SEQ ID NO: 9566 - protein, 9 aa, Artificial sequence
  Protein classification predicting sequence
FALFFLAEY

SEQ ID NO: 9567 - protein, 9 aa, Artificial sequence
  Protein classification predicting sequence
TPILALLLA

SEQ ID NO: 9568 - protein, 9 aa, Artificial sequence
  Protein classification predicting sequence
IMLSGNYTL

SEQ ID NO: 9569 - protein, 8 aa, Artificial sequence
  Protein classification predicting sequence
NLLLLIVP

SEQ ID NO: 9570 - protein, 8 aa, Artificial sequence
  Protein classification predicting sequence
LLTSLFLW

SEQ ID NO: 9571 - protein, 6 aa, Artificial sequence
  Protein classification predicting sequence
PLINMN

SEQ ID NO: 9572 - protein, 7 aa, Artificial sequence
  Protein classification predicting sequence
MWHVSLP

SEQ ID NO: 9573 - protein, 7 aa, Artificial sequence
  Protein classification predicting sequence
TLIITQE

SEQ ID NO: 9574 - protein, 30 aa, Artificial sequence
  Protein classification predicting sequence
ISTLAETNRAPFDLTEGESELVSGFNVEYA

SEQ ID NO: 9575 - protein, 29 aa, Artificial sequence
  Protein classification predicting sequence
RASYPRFRYDQLMHLLWKSFLPLTLALCM

SEQ ID NO: 9576 - protein, 33 aa, Artificial sequence
  Protein classification predicting sequence
RASYPRFRYDQLMHLLWKSFLPLTLALCMLHVS

SEQ ID NO: 9577 - protein, 12 aa, Artificial sequence
  Protein classification predicting sequence
VYSILWSGWASN

SEQ ID NO: 9578 - protein, 17 aa, Artificial sequence
  Protein classification predicting sequence
FLWVRASYPRFRYDQLM

SEQ ID NO: 9579 - protein, 7 aa, Artificial sequence
  Protein classification predicting sequence
NLNLGLL

SEQ ID NO: 9580 - protein, 8 aa, Artificial sequence
  Protein classification predicting sequence
NSKYALIG

SEQ ID NO: 9581 - protein, 22 aa, Artificial sequence
  Protein classification predicting sequence
FLWIRASYPRFRYDQLMHLLWK

SEQ ID NO: 9582 - protein, 9 aa, Artificial sequence
  Protein classification predicting sequence
FLWIRASYP

SEQ ID NO: 9583 - protein, 12 aa, Artificial sequence
  Protein classification predicting sequence
FRYDQLMHLLWK

SEQ ID NO: 9584 - protein, 11 aa, Artificial sequence
  Protein classification predicting sequence
GPFALFFLAEY

SEQ ID NO: 9585 - protein, 7 aa, Artificial sequence
  Protein classification predicting sequence
LALTIAL

SEQ ID NO: 9586 - protein, 34 aa, Artificial sequence
  Protein classification predicting sequence
STLAETNRAPFDLTEGESELVSGFNVEYAAGPFA

SEQ ID NO: 9587 - protein, 9 aa, Artificial sequence
  Protein classification predicting sequence
ERKVLGYMQ

SEQ ID NO: 9588 - protein, 9 aa, Artificial sequence
  Protein classification predicting sequence
VYTILGSGW

SEQ ID NO: 9589 - protein, 6 aa, Artificial sequence
  Protein classification predicting sequence
ILGSGW

SEQ ID NO: 9590 - protein, 6 aa, Artificial sequence
  Protein classification predicting sequence
GPFALF

SEQ ID NO: 9591 - protein, 6 aa, Artificial sequence
  Protein classification predicting sequence
PFDLTE

SEQ ID NO: 9592 - protein, 8 aa, Artificial sequence
  Protein classification predicting sequence
HHPRAVEA

SEQ ID NO: 9593 - protein, 6 aa, Artificial sequence
  Protein classification predicting sequence
GLNQTQ

SEQ ID NO: 9594 - protein, 7 aa, Artificial sequence
  Protein classification predicting sequence
IIQELTK

SEQ ID NO: 9595 - protein, 8 aa, Artificial sequence
  Protein classification predicting sequence
LSLGGLPP

SEQ ID NO: 9596 - protein, 9 aa, Artificial sequence
  Protein classification predicting sequence
LLSLAGLPP

SEQ ID NO: 9597 - protein, 7 aa, Artificial sequence
  Protein classification predicting sequence
WVGLEMN

SEQ ID NO: 9598 - protein, 10 aa, Artificial sequence
  Protein classification predicting sequence
PRATEASTKY

SEQ ID NO: 9599 - protein, 14 aa, Artificial sequence
  Protein classification predicting sequence
IINLMHSGQWTITK

SEQ ID NO: 9600 - protein, 6 aa, Artificial sequence
  Protein classification predicting sequence
SSHWLL

SEQ ID NO: 9601 - protein, 6 aa, Artificial sequence
  Protein classification predicting sequence
LAIIPI

SEQ ID NO: 9602 - protein, 7 aa, Artificial sequence
  Protein classification predicting sequence
ALAMKLG

SEQ ID NO: 9603 - protein, 8 aa, Artificial sequence
  Protein classification predicting sequence
KLGLAPFH

SEQ ID NO: 9604 - protein, 9 aa, Artificial sequence
  Protein classification predicting sequence
GLEINTLAI

SEQ ID NO: 9605 - protein, 6 aa, Artificial sequence
  Protein classification predicting sequence
APMHFW

SEQ ID NO: 9606 - protein, 22 aa, Artificial sequence
  Protein classification predicting sequence
GLNQTQLRKILAYSSIAHMGWM

SEQ ID NO: 9607 - protein, 9 aa, Artificial sequence
  Protein classification predicting sequence
LSLGGLPPL

SEQ ID NO: 9608 - protein, 12 aa, Artificial sequence
  Protein classification predicting sequence
LSLGGLPPLTGF

SEQ ID NO: 9609 - protein, 7 aa, Artificial sequence
  Protein classification predicting sequence
ALTMKLG

SEQ ID NO: 9610 - protein, 6 aa, Artificial sequence
  Protein classification predicting sequence
TFMLFM

SEQ ID NO: 9611 - protein, 6 aa, Artificial sequence
  Protein classification predicting sequence
RLTYST

SEQ ID NO: 9612 - protein, 6 aa, Artificial sequence
  Protein classification predicting sequence
KMKWQF

SEQ ID NO: 9613 - protein, 6 aa, Artificial sequence
  Protein classification predicting sequence
IYITMT

SEQ ID NO: 9614 - protein, 14 aa, Artificial sequence
  Protein classification predicting sequence
TLLSMGGLPPLSGF

SEQ ID NO: 9615 - protein, 10 aa, Artificial sequence
  Protein classification predicting sequence
LAIIPILMKK

SEQ ID NO: 9616 - protein, 6 aa, Artificial sequence
  Protein classification predicting sequence
QWTITK

SEQ ID NO: 9617 - protein, 11 aa, Artificial sequence
  Protein classification predicting sequence
ALLNLYFYMRL

SEQ ID NO: 9618 - protein, 8 aa, Artificial sequence
  Protein classification predicting sequence
ITISSNHW

SEQ ID NO: 9619 - protein, 6 aa, Artificial sequence
  Protein classification predicting sequence
KYFLTQ

SEQ ID NO: 9620 - protein, 16 aa, Artificial sequence
  Protein classification predicting sequence
TGQWDITQLNHPTSCL

SEQ ID NO: 9621 - protein, 10 aa, Artificial sequence
  Protein classification predicting sequence
TALLLSTLMK

SEQ ID NO: 9622 - protein, 7 aa, Artificial sequence
  Protein classification predicting sequence
LYTIMTS

SEQ ID NO: 9623 - protein, 6 aa, Artificial sequence
  Protein classification predicting sequence
SWTKTP

SEQ ID NO: 9624 - protein, 30 aa, Artificial sequence
  Protein classification predicting sequence
LLSLAGLPPLTGFMPKWLIIQELTKQEMTP

SEQ ID NO: 9625 - protein, 30 aa, Artificial sequence
  Protein classification predicting sequence
MLSLLSLFFYLRLAYHSTITLPPNSSNHMK

SEQ ID NO: 9626 - protein, 8 aa, Artificial sequence
  Protein classification predicting sequence
SLNPALLT

SEQ ID NO: 9627 - protein, 24 aa, Artificial sequence
  Protein classification predicting sequence
LFFYLRLAYHSTITLPPNSSNHMK

SEQ ID NO: 9628 - protein, 6 aa, Artificial sequence
  Protein classification predicting sequence
EASTKY

SEQ ID NO: 9629 - protein, 7 aa, Artificial sequence
  Protein classification predicting sequence
ILLTWQK

SEQ ID NO: 9630 - protein, 6 aa, Artificial sequence
  Protein classification predicting sequence
GLEMNM

SEQ ID NO: 9631 - protein, 7 aa, Artificial sequence
  Protein classification predicting sequence
PRSTEAA

SEQ ID NO: 9632 - protein, 13 aa, Artificial sequence
  Protein classification predicting sequence
APFHFWVPEVTQG

SEQ ID NO: 9633 - protein, 9 aa, Artificial sequence
  Protein classification predicting sequence
YSTSLTMFP

SEQ ID NO: 9634 - protein, 5 aa, Artificial sequence
  Protein classification predicting sequence
PLAMM

SEQ ID NO: 9635 - protein, 6 aa, Artificial sequence
  Protein classification predicting sequence
EAATKY

SEQ ID NO: 9636 - protein, 8 aa, Artificial sequence
  Protein classification predicting sequence
LNQTQLRK

SEQ ID NO: 9637 - protein, 6 aa, Artificial sequence
  Protein classification predicting sequence
YMRLTY

SEQ ID NO: 9638 - protein, 14 aa, Artificial sequence
  Protein classification predicting sequence
GGWGGLNQTQLRKI

SEQ ID NO: 9639 - protein, 9 aa, Artificial sequence
  Protein classification predicting sequence
TWNKAPLIT

SEQ ID NO: 9640 - protein, 7 aa, Artificial sequence
  Protein classification predicting sequence
WIGFEMN

SEQ ID NO: 9641 - protein, 7 aa, Artificial sequence
  Protein classification predicting sequence
NPRAMEA

SEQ ID NO: 9642 - protein, 7 aa, Artificial sequence
  Protein classification predicting sequence
ASMILMM

SEQ ID NO: 9643 - protein, 6 aa, Artificial sequence
  Protein classification predicting sequence
TWNKTP

SEQ ID NO: 9644 - protein, 11 aa, Artificial sequence
  Protein classification predicting sequence
SLGGLPPLSGF

SEQ ID NO: 9645 - protein, 6 aa, Artificial sequence
  Protein classification predicting sequence
MLTMAL

SEQ ID NO: 9646 - protein, 13 aa, Artificial sequence
  Protein classification predicting sequence
GGLPPLSGFMPKW

SEQ ID NO: 9647 - protein, 8 aa, Artificial sequence
  Protein classification predicting sequence
ILQELTKQ

SEQ ID NO: 9648 - protein, 6 aa, Artificial sequence
  Protein classification predicting sequence
LYQISP

SEQ ID NO: 9649 - protein, 11 aa, Artificial sequence
  Protein classification predicting sequence
AYSSIAHMGWM

SEQ ID NO: 9650 - protein, 7 aa, Artificial sequence
  Protein classification predicting sequence
PLITSLI

SEQ ID NO: 9651 - protein, 12 aa, Artificial sequence
  Protein classification predicting sequence
LSLGGLPPLSGF

SEQ ID NO: 9652 - protein, 12 aa, Artificial sequence
  Protein classification predicting sequence
PKWMIIQELTKN

SEQ ID NO: 9653 - protein, 16 aa, Artificial sequence
  Protein classification predicting sequence
PKWMIIQELTKNEMII

SEQ ID NO: 9654 - protein, 42 aa, Artificial sequence
  Protein classification predicting sequence
SSTTTLLLSRTWNKLTWLTPLIPSTLLSLGGLPPLTGFLPKW

SEQ ID NO: 9655 - protein, 6 aa, Artificial sequence
  Protein classification predicting sequence
GFLPKW

SEQ ID NO: 9656 - protein, 9 aa, Artificial sequence
  Protein classification predicting sequence
IIEEFTKNN

SEQ ID NO: 9657 - protein, 7 aa, Artificial sequence
  Protein classification predicting sequence
LLNLYFY

SEQ ID NO: 9658 - protein, 5 aa, Artificial sequence
  Protein classification predicting sequence
KMKWQ

SEQ ID NO: 9659 - protein, 7 aa, Artificial sequence
  Protein classification predicting sequence
PRATEAS

SEQ ID NO: 9660 - protein, 12 aa, Artificial sequence
  Protein classification predicting sequence
PFHFWVPEVTQG

SEQ ID NO: 9661 - protein, 6 aa, Artificial sequence
  Protein classification predicting sequence
GGLPPL

SEQ ID NO: 9662 - protein, 12 aa, Artificial sequence
  Protein classification predicting sequence
PKWMIIQEMTKN

SEQ ID NO: 9663 - protein, 13 aa, Artificial sequence
  Protein classification predicting sequence
ALLNLYFYMRLTY

SEQ ID NO: 9664 - protein, 15 aa, Artificial sequence
  Protein classification predicting sequence
ALLNLYFYMRLTYST

SEQ ID NO: 9665 - protein, 11 aa, Artificial sequence
  Protein classification predicting sequence
GWMMAVLPYNP

SEQ ID NO: 9666 - protein, 7 aa, Artificial sequence
  Protein classification predicting sequence
WNKLTWL

SEQ ID NO: 9667 - protein, 8 aa, Artificial sequence
  Protein classification predicting sequence
NLYFYMRL

SEQ ID NO: 9668 - protein, 6 aa, Artificial sequence
  Protein classification predicting sequence
NLTIYI

SEQ ID NO: 9669 - protein, 6 aa, Artificial sequence
  Protein classification predicting sequence
GLEINT

SEQ ID NO: 9670 - protein, 7 aa, Artificial sequence
  Protein classification predicting sequence
EATTKYF

SEQ ID NO: 9671 - protein, 7 aa, Artificial sequence
  Protein classification predicting sequence
TWQKLAP

SEQ ID NO: 9672 - protein, 10 aa, Artificial sequence
  Protein classification predicting sequence
GLNQTQTRKI

SEQ ID NO: 9673 - protein, 7 aa, Artificial sequence
  Protein classification predicting sequence
LLSLFFY

SEQ ID NO: 9674 - protein, 6 aa, Artificial sequence
  Protein classification predicting sequence
LGTTIT

SEQ ID NO: 9675 - protein, 9 aa, Artificial sequence
  Protein classification predicting sequence
KYFLTQATA

SEQ ID NO: 9676 - protein, 13 aa, Artificial sequence
  Protein classification predicting sequence
LLSLGGLPPLTGF

SEQ ID NO: 9677 - protein, 7 aa, Artificial sequence
  Protein classification predicting sequence
WMGLEIN

SEQ ID NO: 9678 - protein, 6 aa, Artificial sequence
  Protein classification predicting sequence
AWMGLE

SEQ ID NO: 9679 - protein, 7 aa, Artificial sequence
  Protein classification predicting sequence
GLEMNML

SEQ ID NO: 9680 - protein, 7 aa, Artificial sequence
  Protein classification predicting sequence
LNLTIYI

SEQ ID NO: 9681 - protein, 6 aa, Artificial sequence
  Protein classification predicting sequence
YFYMRL

SEQ ID NO: 9682 - protein, 7 aa, Artificial sequence
  Protein classification predicting sequence
NLLSFIP

SEQ ID NO: 9683 - protein, 6 aa, Artificial sequence
  Protein classification predicting sequence
WQKLAP

SEQ ID NO: 9684 - protein, 6 aa, Artificial sequence
  Protein classification predicting sequence
NQTQLR

SEQ ID NO: 9685 - protein, 7 aa, Artificial sequence
  Protein classification predicting sequence
TWQKIAP

SEQ ID NO: 9686 - protein, 32 aa, Artificial sequence
  Protein classification predicting sequence
SITMFSYAGIPPLAGFCSKFYLFFAALGCGAY

SEQ ID NO: 9687 - protein, 6 aa, Artificial sequence
  Protein classification predicting sequence
PEVTQG

SEQ ID NO: 9688 - protein, 21 aa, Artificial sequence
  Protein classification predicting sequence
ALAMKLGLAPFHFWVPEVTQG

SEQ ID NO: 9689 - protein, 12 aa, Artificial sequence
  Protein classification predicting sequence
ILLTWQKIAPLS

SEQ ID NO: 9690 - protein, 37 aa, Artificial sequence
  Protein classification predicting sequence
LAITALLNLYFYMRLTYATALTMFPSTNNMKMKWQFE

SEQ ID NO: 9691 - protein, 17 aa, Artificial sequence
  Protein classification predicting sequence
LTMFPSTNNMKMKWQFE

SEQ ID NO: 9692 - protein, 7 aa, Artificial sequence
  Protein classification predicting sequence
KMKWQFE

SEQ ID NO: 9693 - protein, 17 aa, Artificial sequence
  Protein classification predicting sequence
GGWGGLNQTQLRKILAY

SEQ ID NO: 9694 - protein, 7 aa, Artificial sequence
  Protein classification predicting sequence
IAHLGWM

SEQ ID NO: 9695 - protein, 6 aa, Artificial sequence
  Protein classification predicting sequence
LLTWQK

SEQ ID NO: 9696 - protein, 9 aa, Artificial sequence
  Protein classification predicting sequence
LLTWQKLAP

SEQ ID NO: 9697 - protein, 8 aa, Artificial sequence
  Protein classification predicting sequence
AITALLNL

SEQ ID NO: 9698 - protein, 19 aa, Artificial sequence
  Protein classification predicting sequence
SGLLLLTWQKLAPISIMYQ

SEQ ID NO: 9699 - protein, 7 aa, Artificial sequence
  Protein classification predicting sequence
KYFLTQA

SEQ ID NO: 9700 - protein, 11 aa, Artificial sequence
  Protein classification predicting sequence
KYFLTQATASM

SEQ ID NO: 9701 - protein, 6 aa, Artificial sequence
  Protein classification predicting sequence
LSSHWF

SEQ ID NO: 9702 - protein, 18 aa, Artificial sequence
  Protein classification predicting sequence
MKLGMAPFHFWVPEVTQG

SEQ ID NO: 9703 - protein, 21 aa, Artificial sequence
  Protein classification predicting sequence
MKLGMAPFHFWVPEVTQGTPL

SEQ ID NO: 9704 - protein, 6 aa, Artificial sequence
  Protein classification predicting sequence
IIPTIM

SEQ ID NO: 9705 - protein, 10 aa, Artificial sequence
  Protein classification predicting sequence
WIGFEMNMLA

SEQ ID NO: 9706 - protein, 8 aa, Artificial sequence
  Protein classification predicting sequence
EASTKYFL

SEQ ID NO: 9707 - protein, 7 aa, Artificial sequence
  Protein classification predicting sequence
LSQTWNK

SEQ ID NO: 9708 - protein, 10 aa, Artificial sequence
  Protein classification predicting sequence
GGWGGLNQTQ

SEQ ID NO: 9709 - protein, 7 aa, Artificial sequence
  Protein classification predicting sequence
LLTFYLY

SEQ ID NO: 9710 - protein, 7 aa, Artificial sequence
  Protein classification predicting sequence
TMMLLNL

SEQ ID NO: 9711 - protein, 8 aa, Artificial sequence
  Protein classification predicting sequence
GLPPLTGF

SEQ ID NO: 9712 - protein, 9 aa, Artificial sequence
  Protein classification predicting sequence
RKILAYSSI

SEQ ID NO: 9713 - protein, 25 aa, Artificial sequence
  Protein classification predicting sequence
EASTKYFLTQATASMLLMMGIIINL

SEQ ID NO: 9714 - protein, 6 aa, Artificial sequence
  Protein classification predicting sequence
PRATEA

SEQ ID NO: 9715 - protein, 9 aa, Artificial sequence
  Protein classification predicting sequence
LMMAIIINL

SEQ ID NO: 9716 - protein, 6 aa, Artificial sequence
  Protein classification predicting sequence
AVLPYN

SEQ ID NO: 9717 - protein, 12 aa, Artificial sequence
  Protein classification predicting sequence
TTTLSLSHTWNK

SEQ ID NO: 9718 - protein, 8 aa, Artificial sequence
  Protein classification predicting sequence
GGWGGLNQ

SEQ ID NO: 9719 - protein, 7 aa, Artificial sequence
  Protein classification predicting sequence
EAATKYF

SEQ ID NO: 9720 - protein, 7 aa, Artificial sequence
  Protein classification predicting sequence
AIAIKLG

SEQ ID NO: 9721 - protein, 16 aa, Artificial sequence
  Protein classification predicting sequence
GLEMNMLAFIPVLTKK

SEQ ID NO: 9722 - protein, 12 aa, Artificial sequence
  Protein classification predicting sequence
WGGLNQTQLRKI

SEQ ID NO: 9723 - protein, 18 aa, Artificial sequence
  Protein classification predicting sequence
WGGLNQTQLRKILAYSSI

SEQ ID NO: 9724 - protein, 8 aa, Artificial sequence
  Protein classification predicting sequence
KILAYSSI

SEQ ID NO: 9725 - protein, 5 aa, Artificial sequence
  Protein classification predicting sequence
SSHWL

SEQ ID NO: 9726 - protein, 6 aa, Artificial sequence
  Protein classification predicting sequence
HWLLAW

SEQ ID NO: 9727 - protein, 11 aa, Artificial sequence
  Protein classification predicting sequence
EAATKYFLTQA

SEQ ID NO: 9728 - protein, 7 aa, Artificial sequence
  Protein classification predicting sequence
MKLGLAP

SEQ ID NO: 9729 - protein, 17 aa, Artificial sequence
  Protein classification predicting sequence
LLSLGGLPPLTGFLPKW

SEQ ID NO: 9730 - protein, 7 aa, Artificial sequence
  Protein classification predicting sequence
MAIMALL

SEQ ID NO: 9731 - protein, 6 aa, Artificial sequence
  Protein classification predicting sequence
FSSISH

SEQ ID NO: 9732 - protein, 6 aa, Artificial sequence
  Protein classification predicting sequence
SILYQI

SEQ ID NO: 9733 - protein, 8 aa, Artificial sequence
  Protein classification predicting sequence
GLGTTLTF

SEQ ID NO: 9734 - protein, 10 aa, Artificial sequence
  Protein classification predicting sequence
ALALKIGLAP

SEQ ID NO: 9735 - protein, 8 aa, Artificial sequence
  Protein classification predicting sequence
LTLSILSI

SEQ ID NO: 9736 - protein, 15 aa, Artificial sequence
  Protein classification predicting sequence
GFMPKWLILQELTKQ

SEQ ID NO: 9737 - protein, 12 aa, Artificial sequence
  Protein classification predicting sequence
LGTTITISSNHW

SEQ ID NO: 9738 - protein, 25 aa, Artificial sequence
  Protein classification predicting sequence
LLTAAIAIKLGLVPFHFWFPEVLQG

SEQ ID NO: 9739 - protein, 28 aa, Artificial sequence
  Protein classification predicting sequence
MALASAALGGWMGLNQTQTRKILAFSSI

SEQ ID NO: 9740 - protein, 7 aa, Artificial sequence
  Protein classification predicting sequence
NHMKQWY

SEQ ID NO: 9741 - protein, 7 aa, Artificial sequence
  Protein classification predicting sequence
NTLAIIP

SEQ ID NO: 9742 - protein, 5 aa, Artificial sequence
  Protein classification predicting sequence
HHPRA

SEQ ID NO: 9743 - protein, 6 aa, Artificial sequence
  Protein classification predicting sequence
GGLNQT

SEQ ID NO: 9744 - protein, 7 aa, Artificial sequence
  Protein classification predicting sequence
TTTLSLS

SEQ ID NO: 9745 - protein, 6 aa, Artificial sequence
  Protein classification predicting sequence
IIQELT

SEQ ID NO: 9746 - protein, 6 aa, Artificial sequence
  Protein classification predicting sequence
ECGFDP

SEQ ID NO: 9747 - protein, 7 aa, Artificial sequence
  Protein classification predicting sequence
FLIFDVE

SEQ ID NO: 9748 - protein, 7 aa, Artificial sequence
  Protein classification predicting sequence
PIFIYLV

SEQ ID NO: 9749 - protein, 10 aa, Artificial sequence
  Protein classification predicting sequence
SLLVSLILLG

SEQ ID NO: 9750 - protein, 9 aa, Artificial sequence
  Protein classification predicting sequence
FLLFDLEIA

SEQ ID NO: 9751 - protein, 11 aa, Artificial sequence
  Protein classification predicting sequence
RLPFSLRFFLI

SEQ ID NO: 9752 - protein, 7 aa, Artificial sequence
  Protein classification predicting sequence
EIALLLP

SEQ ID NO: 9753 - protein, 13 aa, Artificial sequence
  Protein classification predicting sequence
ILLIGLYHEWNQG

SEQ ID NO: 9754 - protein, 7 aa, Artificial sequence
  Protein classification predicting sequence
MLEFAPI

SEQ ID NO: 9755 - protein, 9 aa, Artificial sequence
  Protein classification predicting sequence
ILFLIFDLE

SEQ ID NO: 9756 - protein, 14 aa, Artificial sequence
  Protein classification predicting sequence
DREKSSPFECGFDP

SEQ ID NO: 9757 - protein, 7 aa, Artificial sequence
  Protein classification predicting sequence
PFSIRFF

SEQ ID NO: 9758 - protein, 6 aa, Artificial sequence
  Protein classification predicting sequence
FFLVAI

SEQ ID NO: 9759 - protein, 8 aa, Artificial sequence
  Protein classification predicting sequence
AFWLPQLN

SEQ ID NO: 9760 - protein, 5 aa, Artificial sequence
  Protein classification predicting sequence
PWAIQ

SEQ ID NO: 9761 - protein, 7 aa, Artificial sequence
  Protein classification predicting sequence
YECGFDP

SEQ ID NO: 9762 - protein, 11 aa, Artificial sequence
  Protein classification predicting sequence
ARLPFSLRFFL

SEQ ID NO: 9763 - protein, 13 aa, Artificial sequence
  Protein classification predicting sequence
AILFLLFDLEIAL

SEQ ID NO: 9764 - protein, 5 aa, Artificial sequence
  Protein classification predicting sequence
FWLPQ

SEQ ID NO: 9765 - protein, 18 aa, Artificial sequence
  Protein classification predicting sequence
LFDLEIALLLPLPWGDQL

SEQ ID NO: 9766 - protein, 7 aa, Artificial sequence
  Protein classification predicting sequence
TMLIMAL

SEQ ID NO: 9767 - protein, 26 aa, Artificial sequence
  Protein classification predicting sequence
MKFFLVAITFLLFDLEIALLLPLPWA

SEQ ID NO: 9768 - protein, 21 aa, Artificial sequence
  Protein classification predicting sequence
EKLSPYECGFDPLGSARLPFS

SEQ ID NO: 9769 - protein, 7 aa, Artificial sequence
  Protein classification predicting sequence
LPWGDQL

SEQ ID NO: 9770 - protein, 6 aa, Artificial sequence
  Protein classification predicting sequence
ILTIGF

SEQ ID NO: 9771 - protein, 9 aa, Artificial sequence
  Protein classification predicting sequence
SPYECGFDP

SEQ ID NO: 9772 - protein, 6 aa, Artificial sequence
  Protein classification predicting sequence
QGGLEW

SEQ ID NO: 9773 - protein, 7 aa, Artificial sequence
  Protein classification predicting sequence
LLLPLPW

SEQ ID NO: 9774 - protein, 8 aa, Artificial sequence
  Protein classification predicting sequence
FLLFDLEI

SEQ ID NO: 9775 - protein, 7 aa, Artificial sequence
  Protein classification predicting sequence
TMLTMAL

SEQ ID NO: 9776 - protein, 14 aa, Artificial sequence
  Protein classification predicting sequence
LISLLAASLAYEWT

SEQ ID NO: 9777 - protein, 6 aa, Artificial sequence
  Protein classification predicting sequence
LAYEWT

SEQ ID NO: 9778 - protein, 6 aa, Artificial sequence
  Protein classification predicting sequence
FWLPQL

SEQ ID NO: 9779 - protein, 10 aa, Artificial sequence
  Protein classification predicting sequence
LLTLGLIYEW

SEQ ID NO: 9780 - protein, 7 aa, Artificial sequence
  Protein classification predicting sequence
FWLPQLN

SEQ ID NO: 9781 - protein, 5 aa, Artificial sequence
  Protein classification predicting sequence
LAYEW

SEQ ID NO: 9782 - protein, 7 aa, Artificial sequence
  Protein classification predicting sequence
FLLFDLE

SEQ ID NO: 9783 - protein, 6 aa, Artificial sequence
  Protein classification predicting sequence
QKGLDW

SEQ ID NO: 9784 - protein, 8 aa, Artificial sequence
  Protein classification predicting sequence
PYECGFDP

SEQ ID NO: 9785 - protein, 6 aa, Artificial sequence
  Protein classification predicting sequence
IAFWLP

SEQ ID NO: 9786 - protein, 19 aa, Artificial sequence
  Protein classification predicting sequence
AILFLLFDLEIALLLPLPW

SEQ ID NO: 9787 - protein, 16 aa, Artificial sequence
  Protein classification predicting sequence
FLLFDLEIALLLPLPW

SEQ ID NO: 9788 - protein, 6 aa, Artificial sequence
  Protein classification predicting sequence
GLAYEW

SEQ ID NO: 9789 - protein, 7 aa, Artificial sequence
  Protein classification predicting sequence
YLVISLL

SEQ ID NO: 9790 - protein, 15 aa, Artificial sequence
  Protein classification predicting sequence
YPEKLSAYECGFDPF

SEQ ID NO: 9791 - protein, 10 aa, Artificial sequence
  Protein classification predicting sequence
FPWAVSLNKI

SEQ ID NO: 9792 - protein, 10 aa, Artificial sequence
  Protein classification predicting sequence
YEWLKGGLEW

SEQ ID NO: 9793 - protein, 35 aa, Artificial sequence
  Protein classification predicting sequence
GFDPMSSARLPFSMKFFLVAITFLLFDLEIALLLP

SEQ ID NO: 9794 - protein, 7 aa, Artificial sequence
  Protein classification predicting sequence
SARLPFS

SEQ ID NO: 9795 - protein, 6 aa, Artificial sequence
  Protein classification predicting sequence
SFWLPQ

SEQ ID NO: 9796 - protein, 9 aa, Artificial sequence
  Protein classification predicting sequence
IAFWLPQLN

SEQ ID NO: 9797 - protein, 7 aa, Artificial sequence
  Protein classification predicting sequence
LLPIPWA

SEQ ID NO: 9798 - protein, 15 aa, Artificial sequence
  Protein classification predicting sequence
ITFLLFDLEIALLLP

SEQ ID NO: 9799 - protein, 8 aa, Artificial sequence
  Protein classification predicting sequence
LYEWKRGA

SEQ ID NO: 9800 - protein, 24 aa, Artificial sequence
  Protein classification predicting sequence
PFSMKFFLVAITFLLFDLEIALLL

SEQ ID NO: 9801 - protein, 6 aa, Artificial sequence
  Protein classification predicting sequence
TIITIT

SEQ ID NO: 9802 - protein, 10 aa, Artificial sequence
  Protein classification predicting sequence
SFWLPQISPD

SEQ ID NO: 9803 - protein, 13 aa, Artificial sequence
  Protein classification predicting sequence
GSARLPFSLRFFL

SEQ ID NO: 9804 - protein, 15 aa, Artificial sequence
  Protein classification predicting sequence
DLEIALLLPLPWAIQ

SEQ ID NO: 9805 - protein, 9 aa, Artificial sequence
  Protein classification predicting sequence
LALGLAYEW

SEQ ID NO: 9806 - protein, 15 aa, Artificial sequence
  Protein classification predicting sequence
YTEKANPYECGFDPM

SEQ ID NO: 9807 - protein, 16 aa, Artificial sequence
  Protein classification predicting sequence
AILFLLFDLEIALLLP

SEQ ID NO: 9808 - protein, 7 aa, Artificial sequence
  Protein classification predicting sequence
EWTQGGL

SEQ ID NO: 9809 - protein, 6 aa, Artificial sequence
  Protein classification predicting sequence
GLIYEW

SEQ ID NO: 9810 - protein, 8 aa, Artificial sequence
  Protein classification predicting sequence
MLTAFILV

SEQ ID NO: 9811 - protein, 10 aa, Artificial sequence
  Protein classification predicting sequence
VLALGLAYEW

SEQ ID NO: 9812 - protein, 45 aa, Artificial sequence
  Protein classification predicting sequence
YTEKANPYECGFDPMSSARLPFSMKFFLVAITFLLFDLEIALLLP

SEQ ID NO: 9813 - protein, 8 aa, Artificial sequence
  Protein classification predicting sequence
FILVSVLA

SEQ ID NO: 9814 - protein, 7 aa, Artificial sequence
  Protein classification predicting sequence
IAFWLPQ

SEQ ID NO: 9815 - protein, 18 aa, Artificial sequence
  Protein classification predicting sequence
ITITLSAVLATISFWLPQ

SEQ ID NO: 9816 - protein, 11 aa, Artificial sequence
  Protein classification predicting sequence
ITITLSAVLAT

SEQ ID NO: 9817 - protein, 7 aa, Artificial sequence
  Protein classification predicting sequence
YTLLGSL

SEQ ID NO: 9818 - protein, 6 aa, Artificial sequence
  Protein classification predicting sequence
AHVEAP

SEQ ID NO: 9819 - protein, 8 aa, Artificial sequence
  Protein classification predicting sequence
LLKLGTYG

SEQ ID NO: 9820 - protein, 8 aa, Artificial sequence
  Protein classification predicting sequence
NIQGIGGS

SEQ ID NO: 9821 - protein, 7 aa, Artificial sequence
  Protein classification predicting sequence
GLVSTMP

SEQ ID NO: 9822 - protein, 7 aa, Artificial sequence
  Protein classification predicting sequence
WGYQPER

SEQ ID NO: 9823 - protein, 5 aa, Artificial sequence
  Protein classification predicting sequence
YSLYM

SEQ ID NO: 9824 - protein, 7 aa, Artificial sequence
  Protein classification predicting sequence
TLVPTLI

SEQ ID NO: 9825 - protein, 6 aa, Artificial sequence
  Protein classification predicting sequence
RQTDLK

SEQ ID NO: 9826 - protein, 14 aa, Artificial sequence
  Protein classification predicting sequence
RQTDLKALIAYSSV

SEQ ID NO: 9827 - protein, 7 aa, Artificial sequence
  Protein classification predicting sequence
FFSDPLS

SEQ ID NO: 9828 - protein, 7 aa, Artificial sequence
  Protein classification predicting sequence
VKMPLYG

SEQ ID NO: 9829 - protein, 13 aa, Artificial sequence
  Protein classification predicting sequence
LLKLGGYGMLRIT

SEQ ID NO: 9830 - protein, 12 aa, Artificial sequence
  Protein classification predicting sequence
HSRTMILARGLQ

SEQ ID NO: 9831 - protein, 18 aa, Artificial sequence
  Protein classification predicting sequence
WWLLASLTNLALPPTINL

SEQ ID NO: 9832 - protein, 6 aa, Artificial sequence
  Protein classification predicting sequence
PSFTRE

SEQ ID NO: 9833 - protein, 16 aa, Artificial sequence
  Protein classification predicting sequence
LWLPKAHVEAPIAGSM

SEQ ID NO: 9834 - protein, 7 aa, Artificial sequence
  Protein classification predicting sequence
HSRTMIL

SEQ ID NO: 9835 - protein, 7 aa, Artificial sequence
  Protein classification predicting sequence
LIMTFTA

SEQ ID NO: 9836 - protein, 9 aa, Artificial sequence
  Protein classification predicting sequence
FYILFEATL

SEQ ID NO: 9837 - protein, 8 aa, Artificial sequence
  Protein classification predicting sequence
WLACMMAF

SEQ ID NO: 9838 - protein, 7 aa, Artificial sequence
  Protein classification predicting sequence
TQRGKYT

SEQ ID NO: 9839 - protein, 12 aa, Artificial sequence
  Protein classification predicting sequence
PTLIIITRWGNQ

SEQ ID NO: 9840 - protein, 10 aa, Artificial sequence
  Protein classification predicting sequence
AFLVKMPLYG

SEQ ID NO: 9841 - protein, 8 aa, Artificial sequence
  Protein classification predicting sequence
AGSMILAA

SEQ ID NO: 9842 - protein, 8 aa, Artificial sequence
  Protein classification predicting sequence
CLRQTDLK

SEQ ID NO: 9843 - protein, 7 aa, Artificial sequence
  Protein classification predicting sequence
LFCLANT

SEQ ID NO: 9844 - protein, 9 aa, Artificial sequence
  Protein classification predicting sequence
RGLQMVLPL

SEQ ID NO: 9845 - protein, 7 aa, Artificial sequence
  Protein classification predicting sequence
WEMFFIL

SEQ ID NO: 9846 - protein, 7 aa, Artificial sequence
  Protein classification predicting sequence
SLMFFSD

SEQ ID NO: 9847 - protein, 9 aa, Artificial sequence
  Protein classification predicting sequence
GSLPLLVAL

SEQ ID NO: 9848 - protein, 13 aa, Artificial sequence
  Protein classification predicting sequence
LLKLGGYGMMRIT

SEQ ID NO: 9849 - protein, 7 aa, Artificial sequence
  Protein classification predicting sequence
MLSLWGM

SEQ ID NO: 9850 - protein, 12 aa, Artificial sequence
  Protein classification predicting sequence
HLWLPKAHVEAP

SEQ ID NO: 9851 - protein, 15 aa, Artificial sequence
  Protein classification predicting sequence
LAAVLLKLGGYGMMR

SEQ ID NO: 9852 - protein, 18 aa, Artificial sequence
  Protein classification predicting sequence
SICLRQTDLKSLIAYSSV

SEQ ID NO: 9853 - protein, 6 aa, Artificial sequence
  Protein classification predicting sequence
NMAAPP

SEQ ID NO: 9854 - protein, 18 aa, Artificial sequence
  Protein classification predicting sequence
LNLLGEISLLNSIVSWSW

SEQ ID NO: 9855 - protein, 14 aa, Artificial sequence
  Protein classification predicting sequence
MIWINTTAYSLLIS

SEQ ID NO: 9856 - protein, 7 aa, Artificial sequence
  Protein classification predicting sequence
SLTFFSD

SEQ ID NO: 9857 - protein, 9 aa, Artificial sequence
  Protein classification predicting sequence
LTTWLLPLM

SEQ ID NO: 9858 - protein, 23 aa, Artificial sequence
  Protein classification predicting sequence
LIQTPWSYMGATALMIAHGLTSS

SEQ ID NO: 9859 - protein, 8 aa, Artificial sequence
  Protein classification predicting sequence
PLLVLSCW

SEQ ID NO: 9860 - protein, 9 aa, Artificial sequence
  Protein classification predicting sequence
LPLMIMASQ

SEQ ID NO: 9861 - protein, 7 aa, Artificial sequence
  Protein classification predicting sequence
ITRWGNQ

SEQ ID NO: 9862 - protein, 10 aa, Artificial sequence
  Protein classification predicting sequence
AAYQFFLYTL

SEQ ID NO: 9863 - protein, 9 aa, Artificial sequence
  Protein classification predicting sequence
PGTSSFIGE

SEQ ID NO: 9864 - protein, 18 aa, Artificial sequence
  Protein classification predicting sequence
LAAVLLKLGGYGMMRMMV

SEQ ID NO: 9865 - protein, 7 aa, Artificial sequence
  Protein classification predicting sequence
DPLSTPL

SEQ ID NO: 9866 - protein, 7 aa, Artificial sequence
  Protein classification predicting sequence
GSLPLLV

SEQ ID NO: 9867 - protein, 9 aa, Artificial sequence
  Protein classification predicting sequence
ITALYSLYM

SEQ ID NO: 9868 - protein, 7 aa, Artificial sequence
  Protein classification predicting sequence
NPKIILG

SEQ ID NO: 9869 - protein, 6 aa, Artificial sequence
  Protein classification predicting sequence
YPFIIL

SEQ ID NO: 9870 - protein, 7 aa, Artificial sequence
  Protein classification predicting sequence
AHGLTSS

SEQ ID NO: 9871 - protein, 10 aa, Artificial sequence
  Protein classification predicting sequence
ASLANLALPP

SEQ ID NO: 9872 - protein, 10 aa, Artificial sequence
  Protein classification predicting sequence
PTLIIITRWG

SEQ ID NO: 9873 - protein, 6 aa, Artificial sequence
  Protein classification predicting sequence
LMIAHG

SEQ ID NO: 9874 - protein, 8 aa, Artificial sequence
  Protein classification predicting sequence
LITASYSL

SEQ ID NO: 9875 - protein, 11 aa, Artificial sequence
  Protein classification predicting sequence
AFLVKMPMFLV

SEQ ID NO: 9876 - protein, 11 aa, Artificial sequence
  Protein classification predicting sequence
LINKGLLNFMP

SEQ ID NO: 9877 - protein, 6 aa, Artificial sequence
  Protein classification predicting sequence
ILFLLF

SEQ ID NO: 9878 - protein, 26 aa, Artificial sequence
  Protein classification predicting sequence
SLVCLRQTDLKALIAYSSVAHMGIVL

SEQ ID NO: 9879 - protein, 8 aa, Artificial sequence
  Protein classification predicting sequence
MASQHHLS

SEQ ID NO: 9880 - protein, 8 aa, Artificial sequence
  Protein classification predicting sequence
FEATLIPT

SEQ ID NO: 9881 - protein, 14 aa, Artificial sequence
  Protein classification predicting sequence
ERLNAGLYFLFYTL

SEQ ID NO: 9882 - protein, 9 aa, Artificial sequence
  Protein classification predicting sequence
AILIQTPWS

SEQ ID NO: 9883 - protein, 15 aa, Artificial sequence
  Protein classification predicting sequence
MGATALMIAHGLTSS

SEQ ID NO: 9884 - protein, 11 aa, Artificial sequence
  Protein classification predicting sequence
LYMLITTQRGK

SEQ ID NO: 9885 - protein, 7 aa, Artificial sequence
  Protein classification predicting sequence
IIPTIML

SEQ ID NO: 9886 - protein, 7 aa, Artificial sequence
  Protein classification predicting sequence
PLTWLSK

SEQ ID NO: 9887 - protein, 9 aa, Artificial sequence
  Protein classification predicting sequence
RKKLYITML

SEQ ID NO: 9888 - protein, 30 aa, Artificial sequence
  Protein classification predicting sequence
MTSSICLRQTDLKSLIAYSSVSHMALVIVA

SEQ ID NO: 9889 - protein, 13 aa, Artificial sequence
  Protein classification predicting sequence
HSRTMILARGLQT

SEQ ID NO: 9890 - protein, 10 aa, Artificial sequence
  Protein classification predicting sequence
TQRGKYTHHI

SEQ ID NO: 9891 - protein, 11 aa, Artificial sequence
  Protein classification predicting sequence
PLLLLSLNPKI

SEQ ID NO: 9892 - protein, 6 aa, Artificial sequence
  Protein classification predicting sequence
ITRWGN

SEQ ID NO: 9893 - protein, 10 aa, Artificial sequence
  Protein classification predicting sequence
GSLPLLVALL

SEQ ID NO: 9894 - protein, 29 aa, Artificial sequence
  Protein classification predicting sequence
MAFMVKMPLYGLHLWLPKAHVEAPIAGSM

SEQ ID NO: 9895 - protein, 6 aa, Artificial sequence
  Protein classification predicting sequence
SHMALV

SEQ ID NO: 9896 - protein, 10 aa, Artificial sequence
  Protein classification predicting sequence
GLQTLLPLMA

SEQ ID NO: 9897 - protein, 7 aa, Artificial sequence
  Protein classification predicting sequence
LLLSLNP

SEQ ID NO: 9898 - protein, 7 aa, Artificial sequence
  Protein classification predicting sequence
MLMPLTW

SEQ ID NO: 9899 - protein, 19 aa, Artificial sequence
  Protein classification predicting sequence
PTLIIITRWGNQTERLNAG

SEQ ID NO: 9900 - protein, 7 aa, Artificial sequence
  Protein classification predicting sequence
LYSLYML

SEQ ID NO: 9901 - protein, 8 aa, Artificial sequence
  Protein classification predicting sequence
IITRWGNQ

SEQ ID NO: 9902 - protein, 8 aa, Artificial sequence
  Protein classification predicting sequence
TALYSLYM

SEQ ID NO: 9903 - protein, 8 aa, Artificial sequence
  Protein classification predicting sequence
IPLLFFNQ

SEQ ID NO: 9904 - protein, 10 aa, Artificial sequence
  Protein classification predicting sequence
RKKLYLSMLI

SEQ ID NO: 9905 - protein, 10 aa, Artificial sequence
  Protein classification predicting sequence
LIMTFTATEL

SEQ ID NO: 9906 - protein, 10 aa, Artificial sequence
  Protein classification predicting sequence
LLPLMAFWWL

SEQ ID NO: 9907 - protein, 8 aa, Artificial sequence
  Protein classification predicting sequence
DPLSTPLL

SEQ ID NO: 9908 - protein, 6 aa, Artificial sequence
  Protein classification predicting sequence
YFLFYT

SEQ ID NO: 9909 - protein, 10 aa, Artificial sequence
  Protein classification predicting sequence
HSRTMILARG

SEQ ID NO: 9910 - protein, 6 aa, Artificial sequence
  Protein classification predicting sequence
IPTIML

SEQ ID NO: 9911 - protein, 7 aa, Artificial sequence
  Protein classification predicting sequence
MIWINTT

SEQ ID NO: 9912 - protein, 10 aa, Artificial sequence
  Protein classification predicting sequence
LMIAHGLTSS

SEQ ID NO: 9913 - protein, 5 aa, Artificial sequence
  Protein classification predicting sequence
HSRTM

SEQ ID NO: 9914 - protein, 14 aa, Artificial sequence
  Protein classification predicting sequence
WWLLASLTNLALPP

SEQ ID NO: 9915 - protein, 8 aa, Artificial sequence
  Protein classification predicting sequence
LTMWLLPL

SEQ ID NO: 9916 - protein, 17 aa, Artificial sequence
  Protein classification predicting sequence
HLWLPKAHVEAPIAGSM

SEQ ID NO: 9917 - protein, 34 aa, Artificial sequence
  Protein classification predicting sequence
ICLRQTDLKSLIAYSSVSHMALVIVAILIQTPWS

SEQ ID NO: 9918 - protein, 8 aa, Artificial sequence
  Protein classification predicting sequence
INLIGELF

SEQ ID NO: 9919 - protein, 7 aa, Artificial sequence
  Protein classification predicting sequence
AFLVKMP

SEQ ID NO: 9920 - protein, 7 aa, Artificial sequence
  Protein classification predicting sequence
FLSFFSA

SEQ ID NO: 9921 - protein, 6 aa, Artificial sequence
  Protein classification predicting sequence
LIMFYI

SEQ ID NO: 9922 - protein, 12 aa, Artificial sequence
  Protein classification predicting sequence
LAAILLKLGGYG

SEQ ID NO: 9923 - protein, 7 aa, Artificial sequence
  Protein classification predicting sequence
ELIMFYI

SEQ ID NO: 9924 - protein, 7 aa, Artificial sequence
  Protein classification predicting sequence
YFLFYTL

SEQ ID NO: 9925 - protein, 7 aa, Artificial sequence
  Protein classification predicting sequence
ITALYSL

SEQ ID NO: 9926 - protein, 10 aa, Artificial sequence
  Protein classification predicting sequence
IAIIYTSLTT

SEQ ID NO: 9927 - protein, 18 aa, Artificial sequence
  Protein classification predicting sequence
RQIDLKKIIAYSSVAHMN

SEQ ID NO: 9928 - protein, 8 aa, Artificial sequence
  Protein classification predicting sequence
LYDRHKTR

SEQ ID NO: 9929 - protein, 15 aa, Artificial sequence
  Protein classification predicting sequence
CMHTSVSNLVQHGKF

SEQ ID NO: 9930 - protein, 10 aa, Artificial sequence
  Protein classification predicting sequence
AHVEAPVSGS

SEQ ID NO: 9931 - protein, 11 aa, Artificial sequence
  Protein classification predicting sequence
WLLPLMLMASQ

SEQ ID NO: 9932 - protein, 8 aa, Artificial sequence
  Protein classification predicting sequence
KLYISMLI

SEQ ID NO: 9933 - protein, 9 aa, Artificial sequence
  Protein classification predicting sequence
ATELIMFYI

SEQ ID NO: 9934 - protein, 6 aa, Artificial sequence
  Protein classification predicting sequence
KMPLYG

SEQ ID NO: 9935 - protein, 9 aa, Artificial sequence
  Protein classification predicting sequence
LAAILLKLG

SEQ ID NO: 9936 - protein, 11 aa, Artificial sequence
  Protein classification predicting sequence
LFCLANSNYER

SEQ ID NO: 9937 - protein, 10 aa, Artificial sequence
  Protein classification predicting sequence
NLALPPSINL

SEQ ID NO: 9938 - protein, 6 aa, Artificial sequence
  Protein classification predicting sequence
TIILMG

SEQ ID NO: 9939 - protein, 9 aa, Artificial sequence
  Protein classification predicting sequence
HGLCSSGLF

SEQ ID NO: 9940 - protein, 6 aa, Artificial sequence
  Protein classification predicting sequence
FYILFE

SEQ ID NO: 9941 - protein, 5 aa, Artificial sequence
  Protein classification predicting sequence
RWGNQ

SEQ ID NO: 9942 - protein, 7 aa, Artificial sequence
  Protein classification predicting sequence
LANSNYE

SEQ ID NO: 9943 - protein, 6 aa, Artificial sequence
  Protein classification predicting sequence
LIQTPW

SEQ ID NO: 9944 - protein, 7 aa, Artificial sequence
  Protein classification predicting sequence
LPPTINL

SEQ ID NO: 9945 - protein, 14 aa, Artificial sequence
  Protein classification predicting sequence
MIWINTTTHSLIIS

SEQ ID NO: 9946 - protein, 13 aa, Artificial sequence
  Protein classification predicting sequence
CLANSNYERTHSR

SEQ ID NO: 9947 - protein, 6 aa, Artificial sequence
  Protein classification predicting sequence
LITRWG

SEQ ID NO: 9948 - protein, 6 aa, Artificial sequence
  Protein classification predicting sequence
GSMILA

SEQ ID NO: 9949 - protein, 7 aa, Artificial sequence
  Protein classification predicting sequence
QTLLPLM

SEQ ID NO: 9950 - protein, 7 aa, Artificial sequence
  Protein classification predicting sequence
WWLLASL

SEQ ID NO: 9951 - protein, 6 aa, Artificial sequence
  Protein classification predicting sequence
NITIIL

SEQ ID NO: 9952 - protein, 8 aa, Artificial sequence
  Protein classification predicting sequence
WLLPLTIM

SEQ ID NO: 9953 - protein, 13 aa, Artificial sequence
  Protein classification predicting sequence
TSSICLRQTDLKS

SEQ ID NO: 9954 - protein, 10 aa, Artificial sequence
  Protein classification predicting sequence
ITALYSLYML

SEQ ID NO: 9955 - protein, 9 aa, Artificial sequence
  Protein classification predicting sequence
SFTRENALM

SEQ ID NO: 9956 - protein, 18 aa, Artificial sequence
  Protein classification predicting sequence
RQTDLKALIAYSSVGHMS

SEQ ID NO: 9957 - protein, 9 aa, Artificial sequence
  Protein classification predicting sequence
LIMAFSATE

SEQ ID NO: 9958 - protein, 14 aa, Artificial sequence
  Protein classification predicting sequence
ALPPLPNLMGELMI

SEQ ID NO: 9959 - protein, 7 aa, Artificial sequence
  Protein classification predicting sequence
LMIAHGL

SEQ ID NO: 9960 - protein, 10 aa, Artificial sequence
  Protein classification predicting sequence
NLALPPTINL

SEQ ID NO: 9961 - protein, 6 aa, Artificial sequence
  Protein classification predicting sequence
LYSLYM

SEQ ID NO: 9962 - protein, 17 aa, Artificial sequence
  Protein classification predicting sequence
ALFLCVGVLYDRHKTRL

SEQ ID NO: 9963 - protein, 5 aa, Artificial sequence
  Protein classification predicting sequence
MIWIN

SEQ ID NO: 9964 - protein, 6 aa, Artificial sequence
  Protein classification predicting sequence
ASQHHL

SEQ ID NO: 9965 - protein, 7 aa, Artificial sequence
  Protein classification predicting sequence
MTFSATE

SEQ ID NO: 9966 - protein, 9 aa, Artificial sequence
  Protein classification predicting sequence
LPLMAAWWL

SEQ ID NO: 9967 - protein, 14 aa, Artificial sequence
  Protein classification predicting sequence
NLALPPTINLLGEL

SEQ ID NO: 9968 - protein, 6 aa, Artificial sequence
  Protein classification predicting sequence
TTQRGK

SEQ ID NO: 9969 - protein, 6 aa, Artificial sequence
  Protein classification predicting sequence
PKIILG

SEQ ID NO: 9970 - protein, 11 aa, Artificial sequence
  Protein classification predicting sequence
LLKLGGYGMMR

SEQ ID NO: 9971 - protein, 11 aa, Artificial sequence
  Protein classification predicting sequence
LFCLANTNYER

SEQ ID NO: 9972 - protein, 9 aa, Artificial sequence
  Protein classification predicting sequence
LMALHIIPL

SEQ ID NO: 9973 - protein, 6 aa, Artificial sequence
  Protein classification predicting sequence
WLACMM

SEQ ID NO: 9974 - protein, 9 aa, Artificial sequence
  Protein classification predicting sequence
LTCWLLPLM

SEQ ID NO: 9975 - protein, 8 aa, Artificial sequence
  Protein classification predicting sequence
DPLSAPLL

SEQ ID NO: 9976 - protein, 12 aa, Artificial sequence
  Protein classification predicting sequence
IAYSSVSHMGLV

SEQ ID NO: 9977 - protein, 8 aa, Artificial sequence
  Protein classification predicting sequence
LANLALPP

SEQ ID NO: 9978 - protein, 7 aa, Artificial sequence
  Protein classification predicting sequence
IQTPWSF

SEQ ID NO: 9979 - protein, 9 aa, Artificial sequence
  Protein classification predicting sequence
NTTTYSLLI

SEQ ID NO: 9980 - protein, 7 aa, Artificial sequence
  Protein classification predicting sequence
SAPLLVL

SEQ ID NO: 9981 - protein, 7 aa, Artificial sequence
  Protein classification predicting sequence
GSLPLLI

SEQ ID NO: 9982 - protein, 8 aa, Artificial sequence
  Protein classification predicting sequence
LANTNYER

SEQ ID NO: 9983 - protein, 7 aa, Artificial sequence
  Protein classification predicting sequence
LWGIIMT

SEQ ID NO: 9984 - protein, 7 aa, Artificial sequence
  Protein classification predicting sequence
YERTHSR

SEQ ID NO: 9985 - protein, 7 aa, Artificial sequence
  Protein classification predicting sequence
KPELIWG

SEQ ID NO: 9986 - protein, 6 aa, Artificial sequence
  Protein classification predicting sequence
SHMGLV

SEQ ID NO: 9987 - protein, 10 aa, Artificial sequence
  Protein classification predicting sequence
WWLLASLTNL

SEQ ID NO: 9988 - protein, 7 aa, Artificial sequence
  Protein classification predicting sequence
YSLYMLI

SEQ ID NO: 9989 - protein, 15 aa, Artificial sequence
  Protein classification predicting sequence
WLPSAMEGPTPVSAL

SEQ ID NO: 9990 - protein, 11 aa, Artificial sequence
  Protein classification predicting sequence
DEQDMRKMGGL

SEQ ID NO: 9991 - protein, 9 aa, Artificial sequence
  Protein classification predicting sequence
TKSAQIPFS

SEQ ID NO: 9992 - protein, 11 aa, Artificial sequence
  Protein classification predicting sequence
LVHSSTLVTAG

SEQ ID NO: 9993 - protein, 13 aa, Artificial sequence
  Protein classification predicting sequence
WLPAAMAAPTPVS

SEQ ID NO: 9994 - protein, 6 aa, Artificial sequence
  Protein classification predicting sequence
LFMCSG

SEQ ID NO: 9995 - protein, 7 aa, Artificial sequence
  Protein classification predicting sequence
SKDLIIE

SEQ ID NO: 9996 - protein, 12 aa, Artificial sequence
  Protein classification predicting sequence
FWFTRIAANQSS

SEQ ID NO: 9997 - protein, 6 aa, Artificial sequence
  Protein classification predicting sequence
LGAITT

SEQ ID NO: 9998 - protein, 6 aa, Artificial sequence
  Protein classification predicting sequence
WSILEF

SEQ ID NO: 9999 - protein, 9 aa, Artificial sequence
  Protein classification predicting sequence
HSSTMVVAG

SEQ ID NO: 10000 - protein, 8 aa, Artificial sequence
  Protein classification predicting sequence
SQLGLMMV

SEQ ID NO: 10001 - protein, 6 aa, Artificial sequence
  Protein classification predicting sequence
SGSIIH

SEQ ID NO: 10002 - protein, 6 aa, Artificial sequence
  Protein classification predicting sequence
ISNWHW

SEQ ID NO: 10003 - protein, 7 aa, Artificial sequence
  Protein classification predicting sequence
TIQTLKL

SEQ ID NO: 10004 - protein, 16 aa, Artificial sequence
  Protein classification predicting sequence
AFSTSSQLGLMMVTIG

SEQ ID NO: 10005 - protein, 7 aa, Artificial sequence
  Protein classification predicting sequence
CSGSIIH

SEQ ID NO: 10006 - protein, 10 aa, Artificial sequence
  Protein classification predicting sequence
PFLTGFYSKD

SEQ ID NO: 10007 - protein, 6 aa, Artificial sequence
  Protein classification predicting sequence
TLIATS

SEQ ID NO: 10008 - protein, 8 aa, Artificial sequence
  Protein classification predicting sequence
ISYAFITS

SEQ ID NO: 10009 - protein, 12 aa, Artificial sequence
  Protein classification predicting sequence
IPTMMFIHSGQE

SEQ ID NO: 10010 - protein, 6 aa, Artificial sequence
  Protein classification predicting sequence
LSLSFK

SEQ ID NO: 10011 - protein, 9 aa, Artificial sequence
  Protein classification predicting sequence
DANTAALQA

SEQ ID NO: 10012 - protein, 8 aa, Artificial sequence
  Protein classification predicting sequence
VTIGINQP

SEQ ID NO: 10013 - protein, 8 aa, Artificial sequence
  Protein classification predicting sequence
GQPRFPTL

SEQ ID NO: 10014 - protein, 8 aa, Artificial sequence
  Protein classification predicting sequence
LLDLIWLE

SEQ ID NO: 10015 - protein, 11 aa, Artificial sequence
  Protein classification predicting sequence
LLHSSTMVVAG

SEQ ID NO: 10016 - protein, 6 aa, Artificial sequence
  Protein classification predicting sequence
SQLGLM

SEQ ID NO: 10017 - protein, 7 aa, Artificial sequence
  Protein classification predicting sequence
LAFLHIC

SEQ ID NO: 10018 - protein, 6 aa, Artificial sequence
  Protein classification predicting sequence
PFLAGF

SEQ ID NO: 10019 - protein, 12 aa, Artificial sequence
  Protein classification predicting sequence
TWSILEFASWYM

SEQ ID NO: 10020 - protein, 7 aa, Artificial sequence
  Protein classification predicting sequence
KYLLLFL

SEQ ID NO: 10021 - protein, 7 aa, Artificial sequence
  Protein classification predicting sequence
GDIGFIL

SEQ ID NO: 10022 - protein, 7 aa, Artificial sequence
  Protein classification predicting sequence
PFSSWLP

SEQ ID NO: 10023 - protein, 7 aa, Artificial sequence
  Protein classification predicting sequence
IPTMMFI

SEQ ID NO: 10024 - protein, 10 aa, Artificial sequence
  Protein classification predicting sequence
FFKYLLLFLI

SEQ ID NO: 10025 - protein, 6 aa, Artificial sequence
  Protein classification predicting sequence
LVTANN

SEQ ID NO: 10026 - protein, 21 aa, Artificial sequence
  Protein classification predicting sequence
FQLFIGWEGVGIMSFLLIGWW

SEQ ID NO: 10027 - protein, 12 aa, Artificial sequence
  Protein classification predicting sequence
GRTDANTAALQA

SEQ ID NO: 10028 - protein, 9 aa, Artificial sequence
  Protein classification predicting sequence
CALTQNDIK

SEQ ID NO: 10029 - protein, 8 aa, Artificial sequence
  Protein classification predicting sequence
PFTTTSLI

SEQ ID NO: 10030 - protein, 7 aa, Artificial sequence
  Protein classification predicting sequence
PTIMHRL

SEQ ID NO: 10031 - protein, 6 aa, Artificial sequence
  Protein classification predicting sequence
YMSHDP

SEQ ID NO: 10032 - protein, 10 aa, Artificial sequence
  Protein classification predicting sequence
RFFKYLLTFL

SEQ ID NO: 10033 - protein, 7 aa, Artificial sequence
  Protein classification predicting sequence
MGTPRFL

SEQ ID NO: 10034 - protein, 7 aa, Artificial sequence
  Protein classification predicting sequence
AYSTRMI

SEQ ID NO: 10035 - protein, 6 aa, Artificial sequence
  Protein classification predicting sequence
SQKSAS

SEQ ID NO: 10036 - protein, 9 aa, Artificial sequence
  Protein classification predicting sequence
IKLYFLSFL

SEQ ID NO: 10037 - protein, 6 aa, Artificial sequence
  Protein classification predicting sequence
LAFLHI

SEQ ID NO: 10038 - protein, 8 aa, Artificial sequence
  Protein classification predicting sequence
EQDIRKMG

SEQ ID NO: 10039 - protein, 9 aa, Artificial sequence
  Protein classification predicting sequence
GDIGLILSM

SEQ ID NO: 10040 - protein, 6 aa, Artificial sequence
  Protein classification predicting sequence
NLNSWE

SEQ ID NO: 10041 - protein, 9 aa, Artificial sequence
  Protein classification predicting sequence
NQPYLAFLH

SEQ ID NO: 10042 - protein, 11 aa, Artificial sequence
  Protein classification predicting sequence
CTHAFFKAMLF

SEQ ID NO: 10043 - protein, 6 aa, Artificial sequence
  Protein classification predicting sequence
FSNMLG

SEQ ID NO: 10044 - protein, 9 aa, Artificial sequence
  Protein classification predicting sequence
PLTYSVMLI

SEQ ID NO: 10045 - protein, 10 aa, Artificial sequence
  Protein classification predicting sequence
WGFLFDSLTV

SEQ ID NO: 10046 - protein, 6 aa, Artificial sequence
  Protein classification predicting sequence
FDSLTV

SEQ ID NO: 10047 - protein, 6 aa, Artificial sequence
  Protein classification predicting sequence
YSISYM

SEQ ID NO: 10048 - protein, 21 aa, Artificial sequence
  Protein classification predicting sequence
AMEGPTPVSALLHSSTMVVAG

SEQ ID NO: 10049 - protein, 8 aa, Artificial sequence
  Protein classification predicting sequence
LSLSFKLD

SEQ ID NO: 10050 - protein, 5 aa, Artificial sequence
  Protein classification predicting sequence
FLITM

SEQ ID NO: 10051 - protein, 8 aa, Artificial sequence
  Protein classification predicting sequence
IGSLALTG

SEQ ID NO: 10052 - protein, 7 aa, Artificial sequence
  Protein classification predicting sequence
EFSLWYM

SEQ ID NO: 10053 - protein, 28 aa, Artificial sequence
  Protein classification predicting sequence
LHPWLPSAMEGPTPVSALLHSSTMVVAG

SEQ ID NO: 10054 - protein, 9 aa, Artificial sequence
  Protein classification predicting sequence
TTLFTAMCA

SEQ ID NO: 10055 - protein, 7 aa, Artificial sequence
  Protein classification predicting sequence
QNDIKKI

SEQ ID NO: 10056 - protein, 6 aa, Artificial sequence
  Protein classification predicting sequence
NTSYTN

SEQ ID NO: 10057 - protein, 7 aa, Artificial sequence
  Protein classification predicting sequence
KYLLTFL

SEQ ID NO: 10058 - protein, 20 aa, Artificial sequence
  Protein classification predicting sequence
QLFIGWEGVGIMSFLLIGWW

SEQ ID NO: 10059 - protein, 6 aa, Artificial sequence
  Protein classification predicting sequence
IGLNQP

SEQ ID NO: 10060 - protein, 11 aa, Artificial sequence
  Protein classification predicting sequence
IHNLNNEQDIR

SEQ ID NO: 10061 - protein, 18 aa, Artificial sequence
  Protein classification predicting sequence
FHLLTHALFKALLFMCAG

SEQ ID NO: 10062 - protein, 10 aa, Artificial sequence
  Protein classification predicting sequence
PFLAGFYSKD

SEQ ID NO: 10063 - protein, 6 aa, Artificial sequence
  Protein classification predicting sequence
YNRIGD

SEQ ID NO: 10064 - protein, 12 aa, Artificial sequence
  Protein classification predicting sequence
EVGFNNIPVTIN

SEQ ID NO: 10065 - protein, 8 aa, Artificial sequence
  Protein classification predicting sequence
ILESAYGQ

SEQ ID NO: 10066 - protein, 9 aa, Artificial sequence
  Protein classification predicting sequence
LNDEQDIRK

SEQ ID NO: 10067 - protein, 11 aa, Artificial sequence
  Protein classification predicting sequence
AFSTSSQLGLM

SEQ ID NO: 10068 - protein, 10 aa, Artificial sequence
  Protein classification predicting sequence
GFILALELNL

SEQ ID NO: 10069 - protein, 7 aa, Artificial sequence
  Protein classification predicting sequence
KLYFLSF

SEQ ID NO: 10070 - protein, 7 aa, Artificial sequence
  Protein classification predicting sequence
WYMHSDP

SEQ ID NO: 10071 - protein, 8 aa, Artificial sequence
  Protein classification predicting sequence
NRFFKYLL

SEQ ID NO: 10072 - protein, 22 aa, Artificial sequence
  Protein classification predicting sequence
LAFLHICTHAFFKAMLFLCSGS

SEQ ID NO: 10073 - protein, 8 aa, Artificial sequence
  Protein classification predicting sequence
WHWATTQT

SEQ ID NO: 10074 - protein, 12 aa, Artificial sequence
  Protein classification predicting sequence
LSLSFKLDYFSM

SEQ ID NO: 10075 - protein, 8 aa, Artificial sequence
  Protein classification predicting sequence
RTDANTAA

SEQ ID NO: 10076 - protein, 29 aa, Artificial sequence
  Protein classification predicting sequence
GLHPWLPSAMEGPTPVSALLHSSTMVVAG

SEQ ID NO: 10077 - protein, 6 aa, Artificial sequence
  Protein classification predicting sequence
TNAWAL

SEQ ID NO: 10078 - protein, 7 aa, Artificial sequence
  Protein classification predicting sequence
LIATSLT

SEQ ID NO: 10079 - protein, 7 aa, Artificial sequence
  Protein classification predicting sequence
GQPRFPT

SEQ ID NO: 10080 - protein, 11 aa, Artificial sequence
  Protein classification predicting sequence
SQNLPLLLLDL

SEQ ID NO: 10081 - protein, 6 aa, Artificial sequence
  Protein classification predicting sequence
LSFKLD

SEQ ID NO: 10082 - protein, 6 aa, Artificial sequence
  Protein classification predicting sequence
PQMTMP

SEQ ID NO: 10083 - protein, 10 aa, Artificial sequence
  Protein classification predicting sequence
QAILYNRIGD

SEQ ID NO: 10084 - protein, 10 aa, Artificial sequence
  Protein classification predicting sequence
LIIGSLALTG

SEQ ID NO: 10085 - protein, 14 aa, Artificial sequence
  Protein classification predicting sequence
PFLTGFYSKDLIIE

SEQ ID NO: 10086 - protein, 6 aa, Artificial sequence
  Protein classification predicting sequence
INENNP

SEQ ID NO: 10087 - protein, 6 aa, Artificial sequence
  Protein classification predicting sequence
DANTAA

SEQ ID NO: 10088 - protein, 11 aa, Artificial sequence
  Protein classification predicting sequence
LHSNSWDPQQM

SEQ ID NO: 10089 - protein, 8 aa, Artificial sequence
  Protein classification predicting sequence
SYTNAWAL

SEQ ID NO: 10090 - protein, 6 aa, Artificial sequence
  Protein classification predicting sequence
NPIKRL

SEQ ID NO: 10091 - protein, 7 aa, Artificial sequence
  Protein classification predicting sequence
ILVTANN

SEQ ID NO: 10092 - protein, 25 aa, Artificial sequence
  Protein classification predicting sequence
LAFLHICTHAFFKAMLFMCSGSIIH

SEQ ID NO: 10093 - protein, 8 aa, Artificial sequence
  Protein classification predicting sequence
LTNKLKMK

SEQ ID NO: 10094 - protein, 8 aa, Artificial sequence
  Protein classification predicting sequence
QKGMIKLY

SEQ ID NO: 10095 - protein, 13 aa, Artificial sequence
  Protein classification predicting sequence
GKSAQFGLHPWLP

SEQ ID NO: 10096 - protein, 9 aa, Artificial sequence
  Protein classification predicting sequence
ATSFTAVYS

SEQ ID NO: 10097 - protein, 6 aa, Artificial sequence
  Protein classification predicting sequence
FFKYLL

SEQ ID NO: 10098 - protein, 14 aa, Artificial sequence
  Protein classification predicting sequence
QAILYNRIGDIGFI

SEQ ID NO: 10099 - protein, 6 aa, Artificial sequence
  Protein classification predicting sequence
LLDLIW

SEQ ID NO: 10100 - protein, 6 aa, Artificial sequence
  Protein classification predicting sequence
YFLSFL

SEQ ID NO: 10101 - protein, 32 aa, Artificial sequence
  Protein classification predicting sequence
GLGANFEFDLKKIIALSTLSQLGLMMSILSMG

SEQ ID NO: 10102 - protein, 5 aa, Artificial sequence
  Protein classification predicting sequence
GSIIH

SEQ ID NO: 10103 - protein, 8 aa, Artificial sequence
  Protein classification predicting sequence
AAMTKSAQ

SEQ ID NO: 10104 - protein, 6 aa, Artificial sequence
  Protein classification predicting sequence
SQLGMM

SEQ ID NO: 10105 - protein, 19 aa, Artificial sequence
  Protein classification predicting sequence
ANNLFQLFIGWEGVGIMSF

SEQ ID NO: 10106 - protein, 5 aa, Artificial sequence
  Protein classification predicting sequence
LIGWW

SEQ ID NO: 10107 - protein, 7 aa, Artificial sequence
  Protein classification predicting sequence
LYNRIGD

SEQ ID NO: 10108 - protein, 20 aa, Artificial sequence
  Protein classification predicting sequence
AFSTSSQLGLMMVTIGLNQP

SEQ ID NO: 10109 - protein, 13 aa, Artificial sequence
  Protein classification predicting sequence
LNDEQDIRKMGGL

SEQ ID NO: 10110 - protein, 10 aa, Artificial sequence
  Protein classification predicting sequence
EQDIRKMGGL

SEQ ID NO: 10111 - protein, 8 aa, Artificial sequence
  Protein classification predicting sequence
IAFYEVAL

SEQ ID NO: 10112 - protein, 7 aa, Artificial sequence
  Protein classification predicting sequence
YSISYMS

SEQ ID NO: 10113 - protein, 15 aa, Artificial sequence
  Protein classification predicting sequence
YSISYMSEDPHSPRF

SEQ ID NO: 10114 - protein, 12 aa, Artificial sequence
  Protein classification predicting sequence
NRVGDFGLALGI

SEQ ID NO: 10115 - protein, 46 aa, Artificial sequence
  Protein classification predicting sequence
AATTGILQNDLKRVIAYSTCSQLGYMIFACGISNYSVSVFHLMNHA

SEQ ID NO: 10116 - protein, 30 aa, Artificial sequence
  Protein classification predicting sequence
FKALLFLSAGSVIHAMSDEQDMRKMGGLAS

SEQ ID NO: 10117 - protein, 15 aa, Artificial sequence
  Protein classification predicting sequence
FTSYYSFRLLFLTFL

SEQ ID NO: 10118 - protein, 13 aa, Artificial sequence
  Protein classification predicting sequence
LPKNEILAESEFA

SEQ ID NO: 10119 - protein, 9 aa, Artificial sequence
  Protein classification predicting sequence
FFNKRWFFD

SEQ ID NO: 10120 - protein, 18 aa, Artificial sequence
  Protein classification predicting sequence
ALDKGAIEILGPYGISYT

SEQ ID NO: 10121 - protein, 9 aa, Artificial sequence
  Protein classification predicting sequence
PLILLALGS

SEQ ID NO: 10122 - protein, 13 aa, Artificial sequence
  Protein classification predicting sequence
HICTHAFFKAMLF

SEQ ID NO: 10123 - protein, 12 aa, Artificial sequence
  Protein classification predicting sequence
LTGFYSKDLIIE

SEQ ID NO: 10124 - protein, 8 aa, Artificial sequence
  Protein classification predicting sequence
TLIATSLT

SEQ ID NO: 10125 - protein, 7 aa, Artificial sequence
  Protein classification predicting sequence
YSTRIIF

SEQ ID NO: 10126 - protein, 9 aa, Artificial sequence
  Protein classification predicting sequence
IALSTLSQL

SEQ ID NO: 10127 - protein, 5 aa, Artificial sequence
  Protein classification predicting sequence
TWSIM

SEQ ID NO: 10128 - protein, 6 aa, Artificial sequence
  Protein classification predicting sequence
FSLWYM

SEQ ID NO: 10129 - protein, 8 aa, Artificial sequence
  Protein classification predicting sequence
GIMSFLLI

SEQ ID NO: 10130 - protein, 6 aa, Artificial sequence
  Protein classification predicting sequence
MIILVT

SEQ ID NO: 10131 - protein, 9 aa, Artificial sequence
  Protein classification predicting sequence
NLNSWEIQQ

SEQ ID NO: 10132 - protein, 12 aa, Artificial sequence
  Protein classification predicting sequence
LNDEQDIRKMGG

SEQ ID NO: 10133 - protein, 9 aa, Artificial sequence
  Protein classification predicting sequence
EQDIRKMGG

SEQ ID NO: 10134 - protein, 8 aa, Artificial sequence
  Protein classification predicting sequence
TWSIMEFS

SEQ ID NO: 10135 - protein, 7 aa, Artificial sequence
  Protein classification predicting sequence
TAVYSTR

SEQ ID NO: 10136 - protein, 8 aa, Artificial sequence
  Protein classification predicting sequence
PVALFVTW

SEQ ID NO: 10137 - protein, 9 aa, Artificial sequence
  Protein classification predicting sequence
IMEFSLWYM

SEQ ID NO: 10138 - protein, 13 aa, Artificial sequence
  Protein classification predicting sequence
QAILYNRIGDIGF

SEQ ID NO: 10139 - protein, 23 aa, Artificial sequence
  Protein classification predicting sequence
TANNLFQLFIGWEGVGIMSFLLI

SEQ ID NO: 10140 - protein, 7 aa, Artificial sequence
  Protein classification predicting sequence
TIGINQP

SEQ ID NO: 10141 - protein, 7 aa, Artificial sequence
  Protein classification predicting sequence
LGYFPTI

SEQ ID NO: 10142 - protein, 6 aa, Artificial sequence
  Protein classification predicting sequence
AVIYNR

SEQ ID NO: 10143 - protein, 6 aa, Artificial sequence
  Protein classification predicting sequence
KSAQFG

SEQ ID NO: 10144 - protein, 6 aa, Artificial sequence
  Protein classification predicting sequence
KILAYS

SEQ ID NO: 10145 - protein, 6 aa, Artificial sequence
  Protein classification predicting sequence
LLISWW

SEQ ID NO: 10146 - protein, 5 aa, Artificial sequence
  Protein classification predicting sequence
WWHGR

SEQ ID NO: 10147 - protein, 7 aa, Artificial sequence
  Protein classification predicting sequence
QAILYNR

SEQ ID NO: 10148 - protein, 6 aa, Artificial sequence
  Protein classification predicting sequence
DIGFIL

SEQ ID NO: 10149 - protein, 8 aa, Artificial sequence
  Protein classification predicting sequence
KKIIAFST

SEQ ID NO: 10150 - protein, 9 aa, Artificial sequence
  Protein classification predicting sequence
CMHAFFKAM

SEQ ID NO: 10151 - protein, 7 aa, Artificial sequence
  Protein classification predicting sequence
EQDIRKM

SEQ ID NO: 10152 - protein, 6 aa, Artificial sequence
  Protein classification predicting sequence
PFLTGF

SEQ ID NO: 10153 - protein, 12 aa, Artificial sequence
  Protein classification predicting sequence
FFKYLLLFLITM

SEQ ID NO: 10154 - protein, 6 aa, Artificial sequence
  Protein classification predicting sequence
WDLQQI

SEQ ID NO: 10155 - protein, 8 aa, Artificial sequence
  Protein classification predicting sequence
KSAQFGLH

SEQ ID NO: 10156 - protein, 8 aa, Artificial sequence
  Protein classification predicting sequence
YLLMRSSP

SEQ ID NO: 10157 - protein, 7 aa, Artificial sequence
  Protein classification predicting sequence
RSSPILE

SEQ ID NO: 10158 - protein, 9 aa, Artificial sequence
  Protein classification predicting sequence
GSLALTGMP

SEQ ID NO: 10159 - protein, 6 aa, Artificial sequence
  Protein classification predicting sequence
NFLPLT

SEQ ID NO: 10160 - protein, 7 aa, Artificial sequence
  Protein classification predicting sequence
DTEFAVP

SEQ ID NO: 10161 - protein, 9 aa, Artificial sequence
  Protein classification predicting sequence
MMILVTANN

SEQ ID NO: 10162 - protein, 17 aa, Artificial sequence
  Protein classification predicting sequence
LAATGKSAQFGLHPWLP

SEQ ID NO: 10163 - protein, 8 aa, Artificial sequence
  Protein classification predicting sequence
GTPFLAGF

SEQ ID NO: 10164 - protein, 7 aa, Artificial sequence
  Protein classification predicting sequence
ETIVTNW

SEQ ID NO: 10165 - protein, 10 aa, Artificial sequence
  Protein classification predicting sequence
LFMCSGSIIH

SEQ ID NO: 10166 - protein, 13 aa, Artificial sequence
  Protein classification predicting sequence
LFMCSGSIIHNLN

SEQ ID NO: 10167 - protein, 10 aa, Artificial sequence
  Protein classification predicting sequence
SLALAGMPFL

SEQ ID NO: 10168 - protein, 10 aa, Artificial sequence
  Protein classification predicting sequence
GFYSKDLIIE

SEQ ID NO: 10169 - protein, 6 aa, Artificial sequence
  Protein classification predicting sequence
MLGFYP

SEQ ID NO: 10170 - protein, 10 aa, Artificial sequence
  Protein classification predicting sequence
LCLGAITTLF

SEQ ID NO: 10171 - protein, 14 aa, Artificial sequence
  Protein classification predicting sequence
LAFLHICTHAFFKA

SEQ ID NO: 10172 - protein, 6 aa, Artificial sequence
  Protein classification predicting sequence
YPHYVK

SEQ ID NO: 10173 - protein, 17 aa, Artificial sequence
  Protein classification predicting sequence
LAFLHICTHAFFKAMLF

SEQ ID NO: 10174 - protein, 6 aa, Artificial sequence
  Protein classification predicting sequence
LTIGSL

SEQ ID NO: 10175 - protein, 6 aa, Artificial sequence
  Protein classification predicting sequence
IRFHPL

SEQ ID NO: 10176 - protein, 32 aa, Artificial sequence
  Protein classification predicting sequence
WLPAAMAAPTPVSALVHSSTLVTAGVYLLIRF

SEQ ID NO: 10177 - protein, 6 aa, Artificial sequence
  Protein classification predicting sequence
LVHIYS

SEQ ID NO: 10178 - protein, 8 aa, Artificial sequence
  Protein classification predicting sequence
DPHNQRFF

SEQ ID NO: 10179 - protein, 9 aa, Artificial sequence
  Protein classification predicting sequence
ALFHLVNHA

SEQ ID NO: 10180 - protein, 5 aa, Artificial sequence
  Protein classification predicting sequence
NDEQD

SEQ ID NO: 10181 - protein, 6 aa, Artificial sequence
  Protein classification predicting sequence
VGPYGL

SEQ ID NO: 10182 - protein, 14 aa, Artificial sequence
  Protein classification predicting sequence
PVALFVTWSIMEFS

SEQ ID NO: 10183 - protein, 11 aa, Artificial sequence
  Protein classification predicting sequence
TLCLGAITTLF

SEQ ID NO: 10184 - protein, 7 aa, Artificial sequence
  Protein classification predicting sequence
TSLIIGS

SEQ ID NO: 10185 - protein, 9 aa, Artificial sequence
  Protein classification predicting sequence
TLIATSLTA

SEQ ID NO: 10186 - protein, 25 aa, Artificial sequence
  Protein classification predicting sequence
NSIKRLLIGSIFAGFFISNNIYPTT

SEQ ID NO: 10187 - protein, 11 aa, Artificial sequence
  Protein classification predicting sequence
IKLYFLSFLIT

SEQ ID NO: 10188 - protein, 13 aa, Artificial sequence
  Protein classification predicting sequence
GSIFAGFFISNNI

SEQ ID NO: 10189 - protein, 8 aa, Artificial sequence
  Protein classification predicting sequence
LLGYFPTI

SEQ ID NO: 10190 - protein, 6 aa, Artificial sequence
  Protein classification predicting sequence
LQPLTS

SEQ ID NO: 10191 - protein, 8 aa, Artificial sequence
  Protein classification predicting sequence
GAMAKSSQ

SEQ ID NO: 10192 - protein, 6 aa, Artificial sequence
  Protein classification predicting sequence
IIAFST

SEQ ID NO: 10193 - protein, 7 aa, Artificial sequence
  Protein classification predicting sequence
TTYALYI

SEQ ID NO: 10194 - protein, 11 aa, Artificial sequence
  Protein classification predicting sequence
CALTQNDIKKI

SEQ ID NO: 10195 - protein, 6 aa, Artificial sequence
  Protein classification predicting sequence
TLMKFP

SEQ ID NO: 10196 - protein, 9 aa, Artificial sequence
  Protein classification predicting sequence
ATSFTAIYS

SEQ ID NO: 10197 - protein, 10 aa, Artificial sequence
  Protein classification predicting sequence
SNWHWMTIQT

SEQ ID NO: 10198 - protein, 7 aa, Artificial sequence
  Protein classification predicting sequence
WELQQIF

SEQ ID NO: 10199 - protein, 7 aa, Artificial sequence
  Protein classification predicting sequence
LQQIFML

SEQ ID NO: 10200 - protein, 11 aa, Artificial sequence
  Protein classification predicting sequence
GSLALTGTPFL

SEQ ID NO: 10201 - protein, 6 aa, Artificial sequence
  Protein classification predicting sequence
LSFKMD

SEQ ID NO: 10202 - protein, 7 aa, Artificial sequence
  Protein classification predicting sequence
LFLIFLG

SEQ ID NO: 10203 - protein, 5 aa, Artificial sequence
  Protein classification predicting sequence
HIWLP

SEQ ID NO: 10204 - protein, 8 aa, Artificial sequence
  Protein classification predicting sequence
VTAGVYLL

SEQ ID NO: 10205 - protein, 7 aa, Artificial sequence
  Protein classification predicting sequence
YLSIFTF

SEQ ID NO: 10206 - protein, 10 aa, Artificial sequence
  Protein classification predicting sequence
INLFRWIDSE

SEQ ID NO: 10207 - protein, 5 aa, Artificial sequence
  Protein classification predicting sequence
YLLMF

SEQ ID NO: 10208 - protein, 6 aa, Artificial sequence
  Protein classification predicting sequence
FTTLYS

SEQ ID NO: 10209 - protein, 9 aa, Artificial sequence
  Protein classification predicting sequence
KLIPILFST

SEQ ID NO: 10210 - protein, 18 aa, Artificial sequence
  Protein classification predicting sequence
FIGWEGVGIMSFLLIGWW

SEQ ID NO: 10211 - protein, 7 aa, Artificial sequence
  Protein classification predicting sequence
NTAALQA

SEQ ID NO: 10212 - protein, 7 aa, Artificial sequence
  Protein classification predicting sequence
LAFFHIC

SEQ ID NO: 10213 - protein, 6 aa, Artificial sequence
  Protein classification predicting sequence
TLIIIT

SEQ ID NO: 10214 - protein, 6 aa, Artificial sequence
  Protein classification predicting sequence
VHIYSI

SEQ ID NO: 10215 - protein, 14 aa, Artificial sequence
  Protein classification predicting sequence
TVDSVGMFSVRLDF

SEQ ID NO: 10216 - protein, 7 aa, Artificial sequence
  Protein classification predicting sequence
GGMLVVF

SEQ ID NO: 10217 - protein, 9 aa, Artificial sequence
  Protein classification predicting sequence
GDWVIYDTG

SEQ ID NO: 10218 - protein, 7 aa, Artificial sequence
  Protein classification predicting sequence
YIVFILS

SEQ ID NO: 10219 - protein, 15 aa, Artificial sequence
  Protein classification predicting sequence
FVGFSSKPSPIYGGL

SEQ ID NO: 10220 - protein, 12 aa, Artificial sequence
  Protein classification predicting sequence
VVFGYTTAMATE

SEQ ID NO: 10221 - protein, 16 aa, Artificial sequence
  Protein classification predicting sequence
VVFGYTTAMATEQYPE

SEQ ID NO: 10222 - protein, 10 aa, Artificial sequence
  Protein classification predicting sequence
ASNPAPYFAA

SEQ ID NO: 10223 - protein, 15 aa, Artificial sequence
  Protein classification predicting sequence
KPSPIYGGLVLIISG

SEQ ID NO: 10224 - protein, 6 aa, Artificial sequence
  Protein classification predicting sequence
VTGWSL

SEQ ID NO: 10225 - protein, 10 aa, Artificial sequence
  Protein classification predicting sequence
VTGWSLLIGV

SEQ ID NO: 10226 - protein, 7 aa, Artificial sequence
  Protein classification predicting sequence
AALAAEP

SEQ ID NO: 10227 - protein, 6 aa, Artificial sequence
  Protein classification predicting sequence
ALYSYG

SEQ ID NO: 10228 - protein, 8 aa, Artificial sequence
  Protein classification predicting sequence
RLDFSGVA

SEQ ID NO: 10229 - protein, 9 aa, Artificial sequence
  Protein classification predicting sequence
YLGGMLVVF

SEQ ID NO: 10230 - protein, 12 aa, Artificial sequence
  Protein classification predicting sequence
GVAMFYSCGVGM

SEQ ID NO: 10231 - protein, 6 aa, Artificial sequence
  Protein classification predicting sequence
YNFPTN

SEQ ID NO: 10232 - protein, 32 aa, Artificial sequence
  Protein classification predicting sequence
GDWVIYDTGDSGFFSEEAMGIAALYSYGTWLV

SEQ ID NO: 10233 - protein, 9 aa, Artificial sequence
  Protein classification predicting sequence
VVGYGVGFV

SEQ ID NO: 10234 - protein, 9 aa, Artificial sequence
  Protein classification predicting sequence
PYFAALGLV

SEQ ID NO: 10235 - protein, 29 aa, Artificial sequence
  Protein classification predicting sequence
GGGYMGLMVFLIYLGGMMVVFGYTTAMAI

SEQ ID NO: 10236 - protein, 8 aa, Artificial sequence
  Protein classification predicting sequence
VIMEVTRG

SEQ ID NO: 10237 - protein, 18 aa, Artificial sequence
  Protein classification predicting sequence
FVGFSSKPSPIYGGLVLI

SEQ ID NO: 10238 - protein, 8 aa, Artificial sequence
  Protein classification predicting sequence
IYDTGDSG

SEQ ID NO: 10239 - protein, 7 aa, Artificial sequence
  Protein classification predicting sequence
AALYSYG

SEQ ID NO: 10240 - protein, 12 aa, Artificial sequence
  Protein classification predicting sequence
GLMVFLIYLGGM

SEQ ID NO: 10241 - protein, 39 aa, Artificial sequence
  Protein classification predicting sequence
GLMVFLIYLGGMMVVFGYTTAMAIEEYPEAWGSGVEVLV

SEQ ID NO: 10242 - protein, 6 aa, Artificial sequence
  Protein classification predicting sequence
LFVVLE

SEQ ID NO: 10243 - protein, 6 aa, Artificial sequence
  Protein classification predicting sequence
LGGMMV

SEQ ID NO: 10244 - protein, 8 aa, Artificial sequence
  Protein classification predicting sequence
GFSSKPSP

SEQ ID NO: 10245 - protein, 6 aa, Artificial sequence
  Protein classification predicting sequence
VVFGYT

SEQ ID NO: 10246 - protein, 9 aa, Artificial sequence
  Protein classification predicting sequence
SKPSPVYGG

SEQ ID NO: 10247 - protein, 9 aa, Artificial sequence
  Protein classification predicting sequence
AMATEEYPE

SEQ ID NO: 10248 - protein, 14 aa, Artificial sequence
  Protein classification predicting sequence
SWTNLETLGNLLYT

SEQ ID NO: 10249 - protein, 10 aa, Artificial sequence
  Protein classification predicting sequence
TTKVKRQDVF

SEQ ID NO: 10250 - protein, 7 aa, Artificial sequence
  Protein classification predicting sequence
LIYLGGM

SEQ ID NO: 10251 - protein, 7 aa, Artificial sequence
  Protein classification predicting sequence
FWGGWYE

SEQ ID NO: 10252 - protein, 9 aa, Artificial sequence
  Protein classification predicting sequence
MEVGLVLWV

SEQ ID NO: 10253 - protein, 16 aa, Artificial sequence
  Protein classification predicting sequence
IGAGALYDYGRWLVVV

SEQ ID NO: 10254 - protein, 9 aa, Artificial sequence
  Protein classification predicting sequence
GWTLFVGVY

SEQ ID NO: 10255 - protein, 10 aa, Artificial sequence
  Protein classification predicting sequence
VVFGYTTAMA

SEQ ID NO: 10256 - protein, 8 aa, Artificial sequence
  Protein classification predicting sequence
ALAAEPYP

SEQ ID NO: 10257 - protein, 10 aa, Artificial sequence
  Protein classification predicting sequence
FVGFSSKPSP

SEQ ID NO: 10258 - protein, 6 aa, Artificial sequence
  Protein classification predicting sequence
DSGFFS

SEQ ID NO: 10259 - protein, 8 aa, Artificial sequence
  Protein classification predicting sequence
FLIYLGGM

SEQ ID NO: 10260 - protein, 12 aa, Artificial sequence
  Protein classification predicting sequence
FLIYLGGMLVVF

SEQ ID NO: 10261 - protein, 14 aa, Artificial sequence
  Protein classification predicting sequence
FVGFSSKPSPIYGG

SEQ ID NO: 10262 - protein, 6 aa, Artificial sequence
  Protein classification predicting sequence
GDWVIY

SEQ ID NO: 10263 - protein, 8 aa, Artificial sequence
  Protein classification predicting sequence
VVLEVTRG

SEQ ID NO: 10264 - protein, 7 aa, Artificial sequence
  Protein classification predicting sequence
PEAWGDW

SEQ ID NO: 10265 - protein, 17 aa, Artificial sequence
  Protein classification predicting sequence
PYFAALGLVVAAGVGCG

SEQ ID NO: 10266 - protein, 7 aa, Artificial sequence
  Protein classification predicting sequence
TVDSVGM

SEQ ID NO: 10267 - protein, 6 aa, Artificial sequence
  Protein classification predicting sequence
ASNPSP

SEQ ID NO: 10268 - protein, 8 aa, Artificial sequence
  Protein classification predicting sequence
SGGVGCGI

SEQ ID NO: 10269 - protein, 19 aa, Artificial sequence
  Protein classification predicting sequence
AGWGLLLTLFVVLELVRGL

SEQ ID NO: 10270 - protein, 7 aa, Artificial sequence
  Protein classification predicting sequence
ACCAIEM

SEQ ID NO: 10271 - protein, 8 aa, Artificial sequence
  Protein classification predicting sequence
YDQMPEPR

SEQ ID NO: 10272 - protein, 12 aa, Artificial sequence
  Protein classification predicting sequence
YIPGCPPRPEAY

SEQ ID NO: 10273 - protein, 18 aa, Artificial sequence
  Protein classification predicting sequence
IQRLYDQMLEPKWVISMG

SEQ ID NO: 10274 - protein, 7 aa, Artificial sequence
  Protein classification predicting sequence
RKNSLWP

SEQ ID NO: 10275 - protein, 7 aa, Artificial sequence
  Protein classification predicting sequence
DLMIVAG

SEQ ID NO: 10276 - protein, 13 aa, Artificial sequence
  Protein classification predicting sequence
LFPNANWYERETW

SEQ ID NO: 10277 - protein, 6 aa, Artificial sequence
  Protein classification predicting sequence
GHPLRK

SEQ ID NO: 10278 - protein, 18 aa, Artificial sequence
  Protein classification predicting sequence
IVDCVPDIGYHHRGAEKM

SEQ ID NO: 10279 - protein, 24 aa, Artificial sequence
  Protein classification predicting sequence
ERQSWHSYIPYTDRIEYLGGCVNE

SEQ ID NO: 10280 - protein, 17 aa, Artificial sequence
  Protein classification predicting sequence
MTPVFFAFTDRQKIYDL

SEQ ID NO: 10281 - protein, 9 aa, Artificial sequence
  Protein classification predicting sequence
TGAGLRATG

SEQ ID NO: 10282 - protein, 12 aa, Artificial sequence
  Protein classification predicting sequence
ITHFLQVSWGPV

SEQ ID NO: 10283 - protein, 12 aa, Artificial sequence
  Protein classification predicting sequence
PLRKDYPARATE

SEQ ID NO: 10284 - protein, 27 aa, Artificial sequence
  Protein classification predicting sequence
VIRVMLSELFRINSHLLYISTFIQDVG

SEQ ID NO: 10285 - protein, 8 aa, Artificial sequence
  Protein classification predicting sequence
NMPEGPFK

SEQ ID NO: 10286 - protein, 12 aa, Artificial sequence
  Protein classification predicting sequence
DHPLTTPPPKER

SEQ ID NO: 10287 - protein, 7 aa, Artificial sequence
  Protein classification predicting sequence
GHPLRKD

SEQ ID NO: 10288 - protein, 7 aa, Artificial sequence
  Protein classification predicting sequence
YIPYTDR

SEQ ID NO: 10289 - protein, 15 aa, Artificial sequence
  Protein classification predicting sequence
ISTFIQDVGAMTPVF

SEQ ID NO: 10290 - protein, 11 aa, Artificial sequence
  Protein classification predicting sequence
RMHPAWFRIGG

SEQ ID NO: 10291 - protein, 6 aa, Artificial sequence
  Protein classification predicting sequence
WMPKRL

SEQ ID NO: 10292 - protein, 8 aa, Artificial sequence
  Protein classification predicting sequence
RTLQHIET

SEQ ID NO: 10293 - protein, 6 aa, Artificial sequence
  Protein classification predicting sequence
LQLDGE

SEQ ID NO: 10294 - protein, 7 aa, Artificial sequence
  Protein classification predicting sequence
RVNVIRV

SEQ ID NO: 10295 - protein, 10 aa, Artificial sequence
  Protein classification predicting sequence
SIEALKIVQK

SEQ ID NO: 10296 - protein, 15 aa, Artificial sequence
  Protein classification predicting sequence
SDVEGVATFYSQIFR

SEQ ID NO: 10297 - protein, 8 aa, Artificial sequence
  Protein classification predicting sequence
DGRFTLLP

SEQ ID NO: 10298 - protein, 7 aa, Artificial sequence
  Protein classification predicting sequence
YCDSVVC

SEQ ID NO: 10299 - protein, 8 aa, Artificial sequence
  Protein classification predicting sequence
CCLGNCDK

SEQ ID NO: 10300 - protein, 12 aa, Artificial sequence
  Protein classification predicting sequence
GAGAYICGEETA

SEQ ID NO: 10301 - protein, 7 aa, Artificial sequence
  Protein classification predicting sequence
AAGSMLG

SEQ ID NO: 10302 - protein, 9 aa, Artificial sequence
  Protein classification predicting sequence
FCALGDGAA

SEQ ID NO: 10303 - protein, 6 aa, Artificial sequence
  Protein classification predicting sequence
PRLKPP

SEQ ID NO: 10304 - protein, 11 aa, Artificial sequence
  Protein classification predicting sequence
EPLQSAIKYFR

SEQ ID NO: 10305 - protein, 11 aa, Artificial sequence
  Protein classification predicting sequence
WQPGGAGTDFL

SEQ ID NO: 10306 - protein, 9 aa, Artificial sequence
  Protein classification predicting sequence
ETHPLTWRL

SEQ ID NO: 10307 - protein, 27 aa, Artificial sequence
  Protein classification predicting sequence
HTGAGRYICGEETALINSLEGRRANPR

SEQ ID NO: 10308 - protein, 9 aa, Artificial sequence
  Protein classification predicting sequence
TFCAHAPGA

SEQ ID NO: 10309 - protein, 13 aa, Artificial sequence
  Protein classification predicting sequence
WGKPTCVNNVETL

SEQ ID NO: 10310 - protein, 7 aa, Artificial sequence
  Protein classification predicting sequence
GLYGCPT

SEQ ID NO: 10311 - protein, 5 aa, Artificial sequence
  Protein classification predicting sequence
HESCG

SEQ ID NO: 10312 - protein, 7 aa, Artificial sequence
  Protein classification predicting sequence
CDKGGEC

SEQ ID NO: 10313 - protein, 13 aa, Artificial sequence
  Protein classification predicting sequence
NHPHDCPVCEEGG

SEQ ID NO: 10314 - protein, 6 aa, Artificial sequence
  Protein classification predicting sequence
CHLQDM

SEQ ID NO: 10315 - protein, 10 aa, Artificial sequence
  Protein classification predicting sequence
RRYRFTKRTH

SEQ ID NO: 10316 - protein, 7 aa, Artificial sequence
  Protein classification predicting sequence
HEMNRCI

SEQ ID NO: 10317 - protein, 7 aa, Artificial sequence
  Protein classification predicting sequence
ESNFALR

SEQ ID NO: 10318 - protein, 8 aa, Artificial sequence
  Protein classification predicting sequence
LGEDVTQT

SEQ ID NO: 10319 - protein, 8 aa, Artificial sequence
  Protein classification predicting sequence
EGRAQRFF

SEQ ID NO: 10320 - protein, 10 aa, Artificial sequence
  Protein classification predicting sequence
TMFTFSMEGN

SEQ ID NO: 10321 - protein, 9 aa, Artificial sequence
  Protein classification predicting sequence
DNLLQACLS

SEQ ID NO: 10322 - protein, 6 aa, Artificial sequence
  Protein classification predicting sequence
MSCMTP

SEQ ID NO: 10323 - protein, 14 aa, Artificial sequence
  Protein classification predicting sequence
TNHPHDCPVCEEGG

SEQ ID NO: 10324 - protein, 8 aa, Artificial sequence
  Protein classification predicting sequence
YNRKWDMQ

SEQ ID NO: 10325 - protein, 7 aa, Artificial sequence
  Protein classification predicting sequence
PYYHLFG

SEQ ID NO: 10326 - protein, 10 aa, Artificial sequence
  Protein classification predicting sequence
CHLQDMTVMT

SEQ ID NO: 10327 - protein, 8 aa, Artificial sequence
  Protein classification predicting sequence
CYRCVRYY

SEQ ID NO: 10328 - protein, 8 aa, Artificial sequence
  Protein classification predicting sequence
DYADGTDL

SEQ ID NO: 10329 - protein, 7 aa, Artificial sequence
  Protein classification predicting sequence
ALAVRQA

SEQ ID NO: 10330 - protein, 6 aa, Artificial sequence
  Protein classification predicting sequence
CRQCAV

SEQ ID NO: 10331 - protein, 7 aa, Artificial sequence
  Protein classification predicting sequence
NHPHDCP

SEQ ID NO: 10332 - protein, 9 aa, Artificial sequence
  Protein classification predicting sequence
CHLQDMTVM

SEQ ID NO: 10333 - protein, 10 aa, Artificial sequence
  Protein classification predicting sequence
CPTGVFTDKT

SEQ ID NO: 10334 - protein, 6 aa, Artificial sequence
  Protein classification predicting sequence
RKWDMQ

SEQ ID NO: 10335 - protein, 6 aa, Artificial sequence
  Protein classification predicting sequence
APSICQ

SEQ ID NO: 10336 - protein, 7 aa, Artificial sequence
  Protein classification predicting sequence
NHYFLCD

SEQ ID NO: 10337 - protein, 8 aa, Artificial sequence
  Protein classification predicting sequence
RASVESNF

SEQ ID NO: 10338 - protein, 8 aa, Artificial sequence
  Protein classification predicting sequence
ATIHVDGK

SEQ ID NO: 10339 - protein, 8 aa, Artificial sequence
  Protein classification predicting sequence
DEEAKQFR

SEQ ID NO: 10340 - protein, 21 aa, Artificial sequence
  Protein classification predicting sequence
SVVEWLMTNHPHDCPVCEEGG

SEQ ID NO: 10341 - protein, 12 aa, Artificial sequence
  Protein classification predicting sequence
GCNISPGERYGE

SEQ ID NO: 10342 - protein, 15 aa, Artificial sequence
  Protein classification predicting sequence
YFLCDRGRFGYGYVN

SEQ ID NO: 10343 - protein, 6 aa, Artificial sequence
  Protein classification predicting sequence
DRPRQP

SEQ ID NO: 10344 - protein, 8 aa, Artificial sequence
  Protein classification predicting sequence
GIGSPRAS

SEQ ID NO: 10345 - protein, 11 aa, Artificial sequence
  Protein classification predicting sequence
ESNFALRELVG

SEQ ID NO: 10346 - protein, 25 aa, Artificial sequence
  Protein classification predicting sequence
KLAREPHRYSGRTAMRANISVHEPR

SEQ ID NO: 10347 - protein, 10 aa, Artificial sequence
  Protein classification predicting sequence
ADRLGVNDGA

SEQ ID NO: 10348 - protein, 14 aa, Artificial sequence
  Protein classification predicting sequence
HEMNRCIACYRCVR

SEQ ID NO: 10349 - protein, 10 aa, Artificial sequence
  Protein classification predicting sequence
GAHDNVYFGR

SEQ ID NO: 10350 - protein, 23 aa, Artificial sequence
  Protein classification predicting sequence
CPTGVFTDKTHSERYNRKWDMQF

SEQ ID NO: 10351 - protein, 7 aa, Artificial sequence
  Protein classification predicting sequence
VVLENDL

SEQ ID NO: 10352 - protein, 8 aa, Artificial sequence
  Protein classification predicting sequence
DWTQLDHV

SEQ ID NO: 10353 - protein, 10 aa, Artificial sequence
  Protein classification predicting sequence
RYSGRTAMRA

SEQ ID NO: 10354 - protein, 7 aa, Artificial sequence
  Protein classification predicting sequence
ISVHEPR

SEQ ID NO: 10355 - protein, 6 aa, Artificial sequence
  Protein classification predicting sequence
GADNLL

SEQ ID NO: 10356 - protein, 7 aa, Artificial sequence
  Protein classification predicting sequence
ISIDDEE

SEQ ID NO: 10357 - protein, 8 aa, Artificial sequence
  Protein classification predicting sequence
NQDLGPFI

SEQ ID NO: 10358 - protein, 8 aa, Artificial sequence
  Protein classification predicting sequence
RQAVKGKA

SEQ ID NO: 10359 - protein, 7 aa, Artificial sequence
  Protein classification predicting sequence
HLFGSDE

SEQ ID NO: 10360 - protein, 32 aa, Artificial sequence
  Protein classification predicting sequence
ACLSLGLDIPYFCWHPALGSVGACRQCAVKQY

SEQ ID NO: 10361 - protein, 8 aa, Artificial sequence
  Protein classification predicting sequence
ENFYTGIA

SEQ ID NO: 10362 - protein, 14 aa, Artificial sequence
  Protein classification predicting sequence
MLESWRWLHSLHST

SEQ ID NO: 10363 - protein, 15 aa, Artificial sequence
  Protein classification predicting sequence
REVDWTQLDHVIDAV

SEQ ID NO: 10364 - protein, 18 aa, Artificial sequence
  Protein classification predicting sequence
WRIAPYYHLFGSDELSQR

SEQ ID NO: 10365 - protein, 35 aa, Artificial sequence
  Protein classification predicting sequence
EVIQAAANVAKALKGRGADVGITMIARSVNSMGLG

SEQ ID NO: 10366 - protein, 26 aa, Artificial sequence
  Protein classification predicting sequence
PFAWAPGWNSPQAWNKFQDEVGGKLR

SEQ ID NO: 10367 - protein, 8 aa, Artificial sequence
  Protein classification predicting sequence
VDGKEYEV

SEQ ID NO: 10368 - protein, 15 aa, Artificial sequence
  Protein classification predicting sequence
GADNLLQACLSLGLD

SEQ ID NO: 10369 - protein, 12 aa, Artificial sequence
  Protein classification predicting sequence
CHLQDMTVMTGH

SEQ ID NO: 10370 - protein, 15 aa, Artificial sequence
  Protein classification predicting sequence
DLGVYGAHDNVYFGR

SEQ ID NO: 10371 - protein, 10 aa, Artificial sequence
  Protein classification predicting sequence
DQARLGFAIA

SEQ ID NO: 10372 - protein, 6 aa, Artificial sequence
  Protein classification predicting sequence
PGWNSP

SEQ ID NO: 10373 - protein, 19 aa, Artificial sequence
  Protein classification predicting sequence
AWNKFQDEVGGHLRAGDPG

SEQ ID NO: 10374 - protein, 6 aa, Artificial sequence
  Protein classification predicting sequence
GACRQC

SEQ ID NO: 10375 - protein, 9 aa, Artificial sequence
  Protein classification predicting sequence
DGTFISIDD

SEQ ID NO: 10376 - protein, 49 aa, Artificial sequence
  Protein classification predicting sequence
FRESVVEWLMTNHPHDCPVCEEGGNCHLQDMTVMTGHSFRRYRFTKRTH

SEQ ID NO: 10377 - protein, 47 aa, Artificial sequence
  Protein classification predicting sequence
NQDLGPFISHEMNRCIACYRCVRYYKDYADGTDLGVYGAHDNVYFGR

SEQ ID NO: 10378 - protein, 20 aa, Artificial sequence
  Protein classification predicting sequence
CDRGRFGYGYVNLKDRPRQP

SEQ ID NO: 10379 - protein, 10 aa, Artificial sequence
  Protein classification predicting sequence
MQGAADILRQ

SEQ ID NO: 10380 - protein, 24 aa, Artificial sequence
  Protein classification predicting sequence
LKVLREGGIYTPALREIESYDAVL

SEQ ID NO: 10381 - protein, 8 aa, Artificial sequence
  Protein classification predicting sequence
LGEDLTQT

SEQ ID NO: 10382 - protein, 26 aa, Artificial sequence
  Protein classification predicting sequence
VRQAVKGKAREMAAAQKVADWQIAAI

SEQ ID NO: 10383 - protein, 14 aa, Artificial sequence
  Protein classification predicting sequence
IVQALAGAKKPLII

SEQ ID NO: 10384 - protein, 10 aa, Artificial sequence
  Protein classification predicting sequence
AAANVAKALK

SEQ ID NO: 10385 - protein, 10 aa, Artificial sequence
  Protein classification predicting sequence
VVDHQRTAIM

SEQ ID NO: 10386 - protein, 10 aa, Artificial sequence
  Protein classification predicting sequence
EGRAQRFFQV

SEQ ID NO: 10387 - protein, 12 aa, Artificial sequence
  Protein classification predicting sequence
AAPDATFRIRGQ

SEQ ID NO: 10388 - protein, 14 aa, Artificial sequence
  Protein classification predicting sequence
ISVHEPRQPQDIDT

SEQ ID NO: 10389 - protein, 7 aa, Artificial sequence
  Protein classification predicting sequence
GDPGVRL

SEQ ID NO: 10390 - protein, 10 aa, Artificial sequence
  Protein classification predicting sequence
IAPYYHLFGS

SEQ ID NO: 10391 - protein, 7 aa, Artificial sequence
  Protein classification predicting sequence
FKEDWIP

SEQ ID NO: 10392 - protein, 7 aa, Artificial sequence
  Protein classification predicting sequence
SPGERYG

SEQ ID NO: 10393 - protein, 7 aa, Artificial sequence
  Protein classification predicting sequence
PYVLAVE

SEQ ID NO: 10394 - protein, 7 aa, Artificial sequence
  Protein classification predicting sequence
YTFRMIF

SEQ ID NO: 10395 - protein, 7 aa, Artificial sequence
  Protein classification predicting sequence
SYLLIGF

SEQ ID NO: 10396 - protein, 15 aa, Artificial sequence
  Protein classification predicting sequence
SLDDKPQFPGASAEF

SEQ ID NO: 10397 - protein, 17 aa, Artificial sequence
  Protein classification predicting sequence
SMTLLNTMDRILYESQR

SEQ ID NO: 10398 - protein, 23 aa, Artificial sequence
  Protein classification predicting sequence
GRISFYMTNYGEEGTHVGSAAAL

SEQ ID NO: 10399 - protein, 25 aa, Artificial sequence
  Protein classification predicting sequence
TDLVFGQYREAGVLMYRDYPLELFM

SEQ ID NO: 10400 - protein, 62 aa, Artificial sequence
  Protein classification predicting sequence
VICYFGEGAASEGDAHAGFNFAATLECPIIFFCRNNGYAISTPTSEQYRGDGIAARGPGYGI

SEQ ID NO: 10401 - protein, 71 aa, Artificial sequence
  Protein classification predicting sequence
SIRVDGNDVFAVYNATKEARRRAVAENQPFLIEAMTYRIGHHSTSDDSSAYRSVDEVNYWDKQDHPISRLR

SEQ ID NO: 10402 - protein, 8 aa, Artificial sequence
  Protein classification predicting sequence
GDFANGAQ

SEQ ID NO: 10403 - protein, 6 aa, Artificial sequence
  Protein classification predicting sequence
PKSLLR

SEQ ID NO: 10404 - protein, 6 aa, Artificial sequence
  Protein classification predicting sequence
WCQEEP

SEQ ID NO: 10405 - protein, 7 aa, Artificial sequence
  Protein classification predicting sequence
KRFSIEG

SEQ ID NO: 10406 - protein, 9 aa, Artificial sequence
  Protein classification predicting sequence
RGTFFHRHA

SEQ ID NO: 10407 - protein, 7 aa, Artificial sequence
  Protein classification predicting sequence
GQGVVQE

SEQ ID NO: 10408 - protein, 9 aa, Artificial sequence
  Protein classification predicting sequence
NNQIGFTTS

SEQ ID NO: 10409 - protein, 7 aa, Artificial sequence
  Protein classification predicting sequence
LPHGYEG

SEQ ID NO: 10410 - protein, 9 aa, Artificial sequence
  Protein classification predicting sequence
GMAHRGRLN

SEQ ID NO: 10411 - protein, 6 aa, Artificial sequence
  Protein classification predicting sequence
GDVKYH

SEQ ID NO: 10412 - protein, 9 aa, Artificial sequence
  Protein classification predicting sequence
CSGKVYYDL

SEQ ID NO: 10413 - protein, 9 aa, Artificial sequence
  Protein classification predicting sequence
KFPGAKRFS

SEQ ID NO: 10414 - protein, 9 aa, Artificial sequence
  Protein classification predicting sequence
AEGKNIAHQ

SEQ ID NO: 10415 - protein, 14 aa, Artificial sequence
  Protein classification predicting sequence
KGQILQEGINELGA

SEQ ID NO: 10416 - protein, 10 aa, Artificial sequence
  Protein classification predicting sequence
CNLQRLDGPV

SEQ ID NO: 10417 - protein, 15 aa, Artificial sequence
  Protein classification predicting sequence
IADEARTFGMEGLFR

SEQ ID NO: 10418 - protein, 8 aa, Artificial sequence
  Protein classification predicting sequence
YSMFGFQR

SEQ ID NO: 10419 - protein, 24 aa, Artificial sequence
  Protein classification predicting sequence
GGTSGRTTLNGEGLQHEDGHSHIQ

SEQ ID NO: 10420 - protein, 12 aa, Artificial sequence
  Protein classification predicting sequence
FLGDGEMDEPES

SEQ ID NO: 10421 - protein, 7 aa, Artificial sequence
  Protein classification predicting sequence
LGTDGFG

SEQ ID NO: 10422 - protein, 8 aa, Artificial sequence
  Protein classification predicting sequence
NFRQEVDG

SEQ ID NO: 10423 - protein, 18 aa, Artificial sequence
  Protein classification predicting sequence
GRTTLNGEGLQHEDGHSH

SEQ ID NO: 10424 - protein, 6 aa, Artificial sequence
  Protein classification predicting sequence
SSYPHP

SEQ ID NO: 10425 - protein, 8 aa, Artificial sequence
  Protein classification predicting sequence
LNRGGHDP

SEQ ID NO: 10426 - protein, 8 aa, Artificial sequence
  Protein classification predicting sequence
AAATSYST

SEQ ID NO: 10427 - protein, 11 aa, Artificial sequence
  Protein classification predicting sequence
VLGTDGFGRSD

SEQ ID NO: 10428 - protein, 12 aa, Artificial sequence
  Protein classification predicting sequence
NDATFEIKKCDL

SEQ ID NO: 10429 - protein, 13 aa, Artificial sequence
  Protein classification predicting sequence
LEEGPPVTTVLTR

SEQ ID NO: 10430 - protein, 8 aa, Artificial sequence
  Protein classification predicting sequence
GLKYYRMM

SEQ ID NO: 10431 - protein, 12 aa, Artificial sequence
  Protein classification predicting sequence
PLGAGIALACKY

SEQ ID NO: 10432 - protein, 15 aa, Artificial sequence
  Protein classification predicting sequence
CLTLYGDGAANQGQI

SEQ ID NO: 10433 - protein, 42 aa, Artificial sequence
  Protein classification predicting sequence
YCRSGKGPILMELQTYRYHGHSMSDPGVSYRTREEIQEVRSK

SEQ ID NO: 10434 - protein, 6 aa, Artificial sequence
  Protein classification predicting sequence
HIYSSD

SEQ ID NO: 10435 - protein, 7 aa, Artificial sequence
  Protein classification predicting sequence
RLEEGPP

SEQ ID NO: 10436 - protein, 14 aa, Artificial sequence
  Protein classification predicting sequence
RRMELKADQLYKQK

SEQ ID NO: 10437 - protein, 8 aa, Artificial sequence
  Protein classification predicting sequence
CRSGKGPI

SEQ ID NO: 10438 - protein, 11 aa, Artificial sequence
  Protein classification predicting sequence
VRSKSDPIMLL

SEQ ID NO: 10439 - protein, 7 aa, Artificial sequence
  Protein classification predicting sequence
EELKEID

SEQ ID NO: 10440 - protein, 14 aa, Artificial sequence
  Protein classification predicting sequence
IRGFCHLCDGQEAC

SEQ ID NO: 10441 - protein, 9 aa, Artificial sequence
  Protein classification predicting sequence
VREATKFAA

SEQ ID NO: 10442 - protein, 7 aa, Artificial sequence
  Protein classification predicting sequence
SYRTREE

SEQ ID NO: 10443 - protein, 6 aa, Artificial sequence
  Protein classification predicting sequence
YYKRGD

SEQ ID NO: 10444 - protein, 13 aa, Artificial sequence
  Protein classification predicting sequence
TYRYHGHSMSDPG

SEQ ID NO: 10445 - protein, 6 aa, Artificial sequence
  Protein classification predicting sequence
RGFCHL

SEQ ID NO: 10446 - protein, 30 aa, Artificial sequence
  Protein classification predicting sequence
TRILDQRSISLNRQGRLGFYAPTAGQEASQ

SEQ ID NO: 10447 - protein, 18 aa, Artificial sequence
  Protein classification predicting sequence
ILPGYRDVPQIIWHGLPL

SEQ ID NO: 10448 - protein, 9 aa, Artificial sequence
  Protein classification predicting sequence
AFLFSRGHF

SEQ ID NO: 10449 - protein, 16 aa, Artificial sequence
  Protein classification predicting sequence
PQIIIGAQYIQAAGVA

SEQ ID NO: 10450 - protein, 11 aa, Artificial sequence
  Protein classification predicting sequence
AVAITYTGDGG

SEQ ID NO: 10451 - protein, 12 aa, Artificial sequence
  Protein classification predicting sequence
SQGDFYEGINFA

SEQ ID NO: 10452 - protein, 11 aa, Artificial sequence
  Protein classification predicting sequence
GIPGIQVDGMD

SEQ ID NO: 10453 - protein, 7 aa, Artificial sequence
  Protein classification predicting sequence
RYGPHTM

SEQ ID NO: 10454 - protein, 8 aa, Artificial sequence
  Protein classification predicting sequence
GDDPTRYR

SEQ ID NO: 10455 - protein, 27 aa, Artificial sequence
  Protein classification predicting sequence
LDQRSISLNRQGRLGFYAPTAGQEASQ

SEQ ID NO: 10456 - protein, 9 aa, Artificial sequence
  Protein classification predicting sequence
LPGYRDVPQ

SEQ ID NO: 10457 - protein, 7 aa, Artificial sequence
  Protein classification predicting sequence
IWHGLPL

SEQ ID NO: 10458 - protein, 16 aa, Artificial sequence
  Protein classification predicting sequence
VNALSPQIIIGAQYIQ

SEQ ID NO: 10459 - protein, 13 aa, Artificial sequence
  Protein classification predicting sequence
RYGPHTMAGDDPT

SEQ ID NO: 10460 - protein, 8 aa, Artificial sequence
  Protein classification predicting sequence
KDPLVRFR

SEQ ID NO: 10461 - protein, 8 aa, Artificial sequence
  Protein classification predicting sequence
FLENKGLW

SEQ ID NO: 10462 - protein, 6 aa, Artificial sequence
  Protein classification predicting sequence
IRGFCH

SEQ ID NO: 10463 - protein, 6 aa, Artificial sequence
  Protein classification predicting sequence
LAVYQA

SEQ ID NO: 10464 - protein, 8 aa, Artificial sequence
  Protein classification predicting sequence
TYRTRDEI

SEQ ID NO: 10465 - protein, 14 aa, Artificial sequence
  Protein classification predicting sequence
GNGIVGAQVPLGAG

SEQ ID NO: 10466 - protein, 37 aa, Artificial sequence
  Protein classification predicting sequence
GNGIVGAQVPLGAGIALACKYNGKDEVCLTLYGDGAA

SEQ ID NO: 10467 - protein, 8 aa, Artificial sequence
  Protein classification predicting sequence
ILAELTGR

SEQ ID NO: 10468 - protein, 109 aa, Artificial sequence
  Protein classification predicting sequence
QKPASRVLVASRNFANDATFEIKKCDLHRLEEGPPVTTVLTREDGLKYYRMMQTVRRMELKADQLYKQKIIRGFCHLCDGQEACCVGLEAGINPTDHLITAYRAHGFTF

SEQ ID NO: 10469 - protein, 12 aa, Artificial sequence
  Protein classification predicting sequence
FYGGHGIVGAQV

SEQ ID NO: 10470 - protein, 9 aa, Artificial sequence
  Protein classification predicting sequence
GDGAANQGQ

SEQ ID NO: 10471 - protein, 7 aa, Artificial sequence
  Protein classification predicting sequence
GHSMSDP

SEQ ID NO: 10472 - protein, 6 aa, Artificial sequence
  Protein classification predicting sequence
NMAALW

SEQ ID NO: 10473 - protein, 7 aa, Artificial sequence
  Protein classification predicting sequence
GKGGSMH

SEQ ID NO: 10474 - protein, 13 aa, Artificial sequence
  Protein classification predicting sequence
TQSKFEMVQILDE

SEQ ID NO: 10475 - protein, 33 aa, Artificial sequence
  Protein classification predicting sequence
AFLFSRGHFKGNQFPEGVNALSPQIIIGAQYIQ

SEQ ID NO: 10476 - protein, 31 aa, Artificial sequence
  Protein classification predicting sequence
LKKRGKNAVAITYTGDGGSSQGDFYEGINFA

SEQ ID NO: 10477 - protein, 35 aa, Artificial sequence
  Protein classification predicting sequence
AYKAPAIFVIQNNNYAISTPRSKQTAAETLAQKAI

SEQ ID NO: 10478 - protein, 20 aa, Artificial sequence
  Protein classification predicting sequence
VGIPGIQVDGMDALAVYQAT

SEQ ID NO: 10479 - protein, 37 aa, Artificial sequence
  Protein classification predicting sequence
TYRYGPHTMAGDDPTRYRTSDEDAEWEKKDPLVRFRK

SEQ ID NO: 10480 - protein, 12 aa, Artificial sequence
  Protein classification predicting sequence
KGLWNEDKENEV

SEQ ID NO: 10481 - protein, 20 aa, Artificial sequence
  Protein classification predicting sequence
IKAAIKEADNTEKQTVTSLM

SEQ ID NO: 10482 - protein, 12 aa, Artificial sequence
  Protein classification predicting sequence
GFCHLYIGQEAV

SEQ ID NO: 10483 - protein, 7 aa, Artificial sequence
  Protein classification predicting sequence
GGVFRVT

SEQ ID NO: 10484 - protein, 6 aa, Artificial sequence
  Protein classification predicting sequence
RVFDTP

SEQ ID NO: 10485 - protein, 6 aa, Artificial sequence
  Protein classification predicting sequence
DTPITE

SEQ ID NO: 10486 - protein, 6 aa, Artificial sequence
  Protein classification predicting sequence
PVVFLE

SEQ ID NO: 10487 - protein, 12 aa, Artificial sequence
  Protein classification predicting sequence
GEEVAQYDGAYK

SEQ ID NO: 10488 - protein, 8 aa, Artificial sequence
  Protein classification predicting sequence
GLWKKYGD

SEQ ID NO: 10489 - protein, 9 aa, Artificial sequence
  Protein classification predicting sequence
GLRPICEFM

SEQ ID NO: 10490 - protein, 6 aa, Artificial sequence
  Protein classification predicting sequence
PIVFRG

SEQ ID NO: 10491 - protein, 10 aa, Artificial sequence
  Protein classification predicting sequence
EDARGLLKAA

SEQ ID NO: 10492 - protein, 8 aa, Artificial sequence
  Protein classification predicting sequence
LENEILYG

SEQ ID NO: 10493 - protein, 21 aa, Artificial sequence
  Protein classification predicting sequence
EFGEDRVFDTPLAESGIGGLA

SEQ ID NO: 10494 - protein, 7 aa, Artificial sequence
  Protein classification predicting sequence
KLYRSFR

SEQ ID NO: 10495 - protein, 7 aa, Artificial sequence
  Protein classification predicting sequence
DLRTVQP

SEQ ID NO: 10496 - protein, 8 aa, Artificial sequence
  Protein classification predicting sequence
SVEKTGRA

SEQ ID NO: 10497 - protein, 10 aa, Artificial sequence
  Protein classification predicting sequence
VVQEAQRQAG

SEQ ID NO: 10498 - protein, 13 aa, Artificial sequence
  Protein classification predicting sequence
FGEDVGVNGGVFR

SEQ ID NO: 10499 - protein, 20 aa, Artificial sequence
  Protein classification predicting sequence
PVTIRSPFGGGVHTPELHAD

SEQ ID NO: 10500 - protein, 11 aa, Artificial sequence
  Protein classification predicting sequence
LEHMKLYRSFR

SEQ ID NO: 10501 - protein, 9 aa, Artificial sequence
  Protein classification predicting sequence
SIITYGAMV

SEQ ID NO: 10502 - protein, 9 aa, Artificial sequence
  Protein classification predicting sequence
RAILSLEAP

SEQ ID NO: 10503 - protein, 12 aa, Artificial sequence
  Protein classification predicting sequence
EMGFAGIAVGAA

SEQ ID NO: 10504 - protein, 10 aa, Artificial sequence
  Protein classification predicting sequence
PIVFRGPNGA

SEQ ID NO: 10505 - protein, 7 aa, Artificial sequence
  Protein classification predicting sequence
RVIDTPI

SEQ ID NO: 10506 - protein, 9 aa, Artificial sequence
  Protein classification predicting sequence
EYQGAYKVT

SEQ ID NO: 10507 - protein, 7 aa, Artificial sequence
  Protein classification predicting sequence
EFMTFNF

SEQ ID NO: 10508 - protein, 7 aa, Artificial sequence
  Protein classification predicting sequence
GEEVAQY

SEQ ID NO: 10509 - protein, 20 aa, Artificial sequence
  Protein classification predicting sequence
AGLRPICEFMTFNFSMQAID

SEQ ID NO: 10510 - protein, 9 aa, Artificial sequence
  Protein classification predicting sequence
PIVFRGPNG

SEQ ID NO: 10511 - protein, 13 aa, Artificial sequence
  Protein classification predicting sequence
AEVINLRSIRPLD

SEQ ID NO: 10512 - protein, 15 aa, Artificial sequence
  Protein classification predicting sequence
AGQIARTRFRSGGTK

SEQ ID NO: 10513 - protein, 6 aa, Artificial sequence
  Protein classification predicting sequence
APVTIR

SEQ ID NO: 10514 - protein, 45 aa, Artificial sequence
  Protein classification predicting sequence
PFGGGVHTPELHADNLEGILAQSPGLKVVIPSGPYDAKGLLISSI

SEQ ID NO: 10515 - protein, 26 aa, Artificial sequence
  Protein classification predicting sequence
SNDPVVYLEHMKLYRSFREEVPEEEY

SEQ ID NO: 10516 - protein, 15 aa, Artificial sequence
  Protein classification predicting sequence
IDIGKANVKKEGNDI

SEQ ID NO: 10517 - protein, 8 aa, Artificial sequence
  Protein classification predicting sequence
YGAMVQES

SEQ ID NO: 10518 - protein, 25 aa, Artificial sequence
  Protein classification predicting sequence
KAAEELEKDGYSVEVIDLRTVQPID

SEQ ID NO: 10519 - protein, 24 aa, Artificial sequence
  Protein classification predicting sequence
VASVEKTGRAVVVQEAQRQAGVGA

SEQ ID NO: 10520 - protein, 17 aa, Artificial sequence
  Protein classification predicting sequence
DTIYPFTQAENVWLPNK

SEQ ID NO: 10521 - protein, 8 aa, Artificial sequence
  Protein classification predicting sequence
RVTGADVP

SEQ ID NO: 10522 - protein, 8 aa, Artificial sequence
  Protein classification predicting sequence
NFSMQAID

SEQ ID NO: 10523 - protein, 9 aa, Artificial sequence
  Protein classification predicting sequence
LFGKILEEK

SEQ ID NO: 10524 - protein, 8 aa, Artificial sequence
  Protein classification predicting sequence
LISGYNLF

SEQ ID NO: 10525 - protein, 8 aa, Artificial sequence
  Protein classification predicting sequence
YGWFNTSL

SEQ ID NO: 10526 - protein, 9 aa, Artificial sequence
  Protein classification predicting sequence
KHFILTHDP

SEQ ID NO: 10527 - protein, 7 aa, Artificial sequence
  Protein classification predicting sequence
TGFRPVR

SEQ ID NO: 10528 - protein, 20 aa, Artificial sequence
  Protein classification predicting sequence
EVIHNYGHGGYGLTIHWGCA

SEQ ID NO: 10529 - protein, 11 aa, Artificial sequence
  Protein classification predicting sequence
GIYNSPYIIPG

SEQ ID NO: 10530 - protein, 6 aa, Artificial sequence
  Protein classification predicting sequence
DHNTIW

SEQ ID NO: 10531 - protein, 11 aa, Artificial sequence
  Protein classification predicting sequence
WLTERLTERGV

SEQ ID NO: 10532 - protein, 7 aa, Artificial sequence
  Protein classification predicting sequence
PSNPQEA

SEQ ID NO: 10533 - protein, 6 aa, Artificial sequence
  Protein classification predicting sequence
WNQQTF

SEQ ID NO: 10534 - protein, 8 aa, Artificial sequence
  Protein classification predicting sequence
VTLGGIFQ

SEQ ID NO: 10535 - protein, 31 aa, Artificial sequence
  Protein classification predicting sequence
VMKGELLVGILGSLDSGNKLYSRVVRAGETF

SEQ ID NO: 10536 - protein, 17 aa, Artificial sequence
  Protein classification predicting sequence
IPRGLMHFQFNVGKTEA

SEQ ID NO: 10537 - protein, 9 aa, Artificial sequence
  Protein classification predicting sequence
LARDGLRYD

SEQ ID NO: 10538 - protein, 16 aa, Artificial sequence
  Protein classification predicting sequence
PWHTQIHRDAFSYGAV

SEQ ID NO: 10539 - protein, 10 aa, Artificial sequence
  Protein classification predicting sequence
VGGMSTHWTC

SEQ ID NO: 10540 - protein, 8 aa, Artificial sequence
  Protein classification predicting sequence
SIRHNLVL

SEQ ID NO: 10541 - protein, 7 aa, Artificial sequence
  Protein classification predicting sequence
DPEPQVT

SEQ ID NO: 10542 - protein, 12 aa, Artificial sequence
  Protein classification predicting sequence
QIHRDAFSYGAV

SEQ ID NO: 10543 - protein, 11 aa, Artificial sequence
  Protein classification predicting sequence
IGEIDSGLKIG

SEQ ID NO: 10544 - protein, 7 aa, Artificial sequence
  Protein classification predicting sequence
QRPLLVK

SEQ ID NO: 10545 - protein, 10 aa, Artificial sequence
  Protein classification predicting sequence
RFNLFPAVAC

SEQ ID NO: 10546 - protein, 13 aa, Artificial sequence
  Protein classification predicting sequence
LVFCQTVMSTELI

SEQ ID NO: 10547 - protein, 21 aa, Artificial sequence
  Protein classification predicting sequence
HQEDPLPIPFEDPEPQVTTLF

SEQ ID NO: 10548 - protein, 24 aa, Artificial sequence
  Protein classification predicting sequence
HKKNTVEYQKNIDKFVNVIQGQLM

SEQ ID NO: 10549 - protein, 33 aa, Artificial sequence
  Protein classification predicting sequence
NPEQDPLRNLSGQAVTRVVGGMSTHWTCATPRF

SEQ ID NO: 10550 - protein, 23 aa, Artificial sequence
  Protein classification predicting sequence
EAEDMMTDMCVMSAKIGGFLPGS

SEQ ID NO: 10551 - protein, 9 aa, Artificial sequence
  Protein classification predicting sequence
YRISKSAWL

SEQ ID NO: 10552 - protein, 5 aa, Artificial sequence
  Protein classification predicting sequence
FWYNL

SEQ ID NO: 10553 - protein, 7 aa, Artificial sequence
  Protein classification predicting sequence
KWVSNKW

SEQ ID NO: 10554 - protein, 6 aa, Artificial sequence
  Protein classification predicting sequence
EFRRPC

SEQ ID NO: 10555 - protein, 9 aa, Artificial sequence
  Protein classification predicting sequence
LKDYIKAEE

SEQ ID NO: 10556 - protein, 13 aa, Artificial sequence
  Protein classification predicting sequence
KLEQIKKWAEKLD

SEQ ID NO: 10557 - protein, 9 aa, Artificial sequence
  Protein classification predicting sequence
TATKDPEGF

SEQ ID NO: 10558 - protein, 13 aa, Artificial sequence
  Protein classification predicting sequence
NAFKLMKRLNTEW

SEQ ID NO: 10559 - protein, 7 aa, Artificial sequence
  Protein classification predicting sequence
FPNDEDQ

SEQ ID NO: 10560 - protein, 22 aa, Artificial sequence
  Protein classification predicting sequence
GNLPGVKHKSFLTAEDCFELGK

SEQ ID NO: 10561 - protein, 17 aa, Artificial sequence
  Protein classification predicting sequence
YTEADYYHTELWMEQAL

SEQ ID NO: 10562 - protein, 14 aa, Artificial sequence
  Protein classification predicting sequence
LDYLSYAVYQQGDL

SEQ ID NO: 10563 - protein, 14 aa, Artificial sequence
  Protein classification predicting sequence
LLELDPEHQRANGN

SEQ ID NO: 10564 - protein, 10 aa, Artificial sequence
  Protein classification predicting sequence
KYEMLCRGEG

SEQ ID NO: 10565 - protein, 11 aa, Artificial sequence
  Protein classification predicting sequence
KQEDEWDKPRI

SEQ ID NO: 10566 - protein, 10 aa, Artificial sequence
  Protein classification predicting sequence
SKSAWLSGYE

SEQ ID NO: 10567 - protein, 33 aa, Artificial sequence
  Protein classification predicting sequence
RIQDLTGLDVSTAEELQVANYGVGGQYEPHFDF

SEQ ID NO: 10568 - protein, 34 aa, Artificial sequence
  Protein classification predicting sequence
HKSFLTAEDCFELGKVAYTEADYYHTELWMEQAL

SEQ ID NO: 10569 - protein, 8 aa, Artificial sequence
  Protein classification predicting sequence
PHFDFARK

SEQ ID NO: 10570 - protein, 9 aa, Artificial sequence
  Protein classification predicting sequence
TRHAACPVL

SEQ ID NO: 10571 - protein, 12 aa, Artificial sequence
  Protein classification predicting sequence
FFTSIGQMTDLI

SEQ ID NO: 10572 - protein, 7 aa, Artificial sequence
  Protein classification predicting sequence
NLTIQRQ

SEQ ID NO: 10573 - protein, 7 aa, Artificial sequence
  Protein classification predicting sequence
LWMEQAL

SEQ ID NO: 10574 - protein, 8 aa, Artificial sequence
  Protein classification predicting sequence
LDYLSYAV

SEQ ID NO: 10575 - protein, 7 aa, Artificial sequence
  Protein classification predicting sequence
LQVANYG

SEQ ID NO: 10576 - protein, 10 aa, Artificial sequence
  Protein classification predicting sequence
GGQYEPHFDF

SEQ ID NO: 10577 - protein, 8 aa, Artificial sequence
  Protein classification predicting sequence
AGGATVFP

SEQ ID NO: 10578 - protein, 13 aa, Artificial sequence
  Protein classification predicting sequence
WPKKGTAVFWYNL

SEQ ID NO: 10579 - protein, 6 aa, Artificial sequence
  Protein classification predicting sequence
LFCRYH

SEQ ID NO: 10580 - protein, 6 aa, Artificial sequence
  Protein classification predicting sequence
GFIGAG

SEQ ID NO: 10581 - protein, 11 aa, Artificial sequence
  Protein classification predicting sequence
SPGGATIHALH

SEQ ID NO: 10582 - protein, 31 aa, Artificial sequence
  Protein classification predicting sequence
LESGGFRSLLINAVEASCIRTRELQSMADQE

SEQ ID NO: 10583 - protein, 23 aa, Artificial sequence
  Protein classification predicting sequence
HSDVLFLAVKPHIIPFILDEIGA

SEQ ID NO: 10584 - protein, 9 aa, Artificial sequence
  Protein classification predicting sequence
TVYATGTHA

SEQ ID NO: 10585 - protein, 25 aa, Artificial sequence
  Protein classification predicting sequence
LESGGFRSLLINAVEASCIRTRELQ

SEQ ID NO: 10586 - protein, 19 aa, Artificial sequence
  Protein classification predicting sequence
ALDALADGGVKMGLPRRLA

SEQ ID NO: 10587 - protein, 8 aa, Artificial sequence
  Protein classification predicting sequence
GFTAAGVL

SEQ ID NO: 10588 - protein, 10 aa, Artificial sequence
  Protein classification predicting sequence
TGLSGSGPAY

SEQ ID NO: 10589 - protein, 15 aa, Artificial sequence
  Protein classification predicting sequence
RNNGCLVVLPGTHKG

SEQ ID NO: 10590 - protein, 16 aa, Artificial sequence
  Protein classification predicting sequence
VQGWLRVPQPYCSVNL

SEQ ID NO: 10591 - protein, 14 aa, Artificial sequence
  Protein classification predicting sequence
FNESLTANDPDFLA

SEQ ID NO: 10592 - protein, 15 aa, Artificial sequence
  Protein classification predicting sequence
LLLVTLKAWQVSDAV

SEQ ID NO: 10593 - protein, 8 aa, Artificial sequence
  Protein classification predicting sequence
LASTLPVT

SEQ ID NO: 10594 - protein, 16 aa, Artificial sequence
  Protein classification predicting sequence
PILLIHNGMGTIEELQ

SEQ ID NO: 10595 - protein, 9 aa, Artificial sequence
  Protein classification predicting sequence
THAARRDGN

SEQ ID NO: 10596 - protein, 7 aa, Artificial sequence
  Protein classification predicting sequence
THIGPAR

SEQ ID NO: 10597 - protein, 9 aa, Artificial sequence
  Protein classification predicting sequence
QDGDYSYLA

SEQ ID NO: 10598 - protein, 14 aa, Artificial sequence
  Protein classification predicting sequence
VLPDVAWHNNIRAE

SEQ ID NO: 10599 - protein, 11 aa, Artificial sequence
  Protein classification predicting sequence
WNCPNGELRHH

SEQ ID NO: 10600 - protein, 13 aa, Artificial sequence
  Protein classification predicting sequence
ICEEVAAVIEREG

SEQ ID NO: 10601 - protein, 11 aa, Artificial sequence
  Protein classification predicting sequence
TAENISSMLQD

SEQ ID NO: 10602 - protein, 15 aa, Artificial sequence
  Protein classification predicting sequence
RLFEMVKRKESEYER

SEQ ID NO: 10603 - protein, 21 aa, Artificial sequence
  Protein classification predicting sequence
PILLIHNGMGTIEELQNIQQP

SEQ ID NO: 10604 - protein, 13 aa, Artificial sequence
  Protein classification predicting sequence
QDGDYSYLADILQ

SEQ ID NO: 10605 - protein, 6 aa, Artificial sequence
  Protein classification predicting sequence
HNGMGT

SEQ ID NO: 10606 - protein, 8 aa, Artificial sequence
  Protein classification predicting sequence
LPDVAWHN

SEQ ID NO: 10607 - protein, 12 aa, Artificial sequence
  Protein classification predicting sequence
KLAVNCVINPLT

SEQ ID NO: 10608 - protein, 9 aa, Artificial sequence
  Protein classification predicting sequence
SAAIVDLSP

SEQ ID NO: 10609 - protein, 12 aa, Artificial sequence
  Protein classification predicting sequence
NDKTRRVLEKAF

SEQ ID NO: 10610 - protein, 12 aa, Artificial sequence
  Protein classification predicting sequence
FEREEVGGRLAT

SEQ ID NO: 10611 - protein, 23 aa, Artificial sequence
  Protein classification predicting sequence
INVIKLVWRYGFQSLRMHMWVED

SEQ ID NO: 10612 - protein, 23 aa, Artificial sequence
  Protein classification predicting sequence
LDKFMRIYRYQSHDYAFSSVEKL

SEQ ID NO: 10613 - protein, 10 aa, Artificial sequence
  Protein classification predicting sequence
FLNEMIAPVM

SEQ ID NO: 10614 - protein, 9 aa, Artificial sequence
  Protein classification predicting sequence
SNLISGSVM

SEQ ID NO: 10615 - protein, 12 aa, Artificial sequence
  Protein classification predicting sequence
TGNPTKMYEVVY

SEQ ID NO: 10616 - protein, 11 aa, Artificial sequence
  Protein classification predicting sequence
PLNRKMSNITF

SEQ ID NO: 10617 - protein, 9 aa, Artificial sequence
  Protein classification predicting sequence
NFDPPIEEF

SEQ ID NO: 10618 - protein, 10 aa, Artificial sequence
  Protein classification predicting sequence
KLFLSYDYAV

SEQ ID NO: 10619 - protein, 18 aa, Artificial sequence
  Protein classification predicting sequence
KCPSIILHDRLYYLNGIE

SEQ ID NO: 10620 - protein, 7 aa, Artificial sequence
  Protein classification predicting sequence
KMYEVVY

SEQ ID NO: 10621 - protein, 9 aa, Artificial sequence
  Protein classification predicting sequence
TAPLNKEAL

SEQ ID NO: 10622 - protein, 7 aa, Artificial sequence
  Protein classification predicting sequence
LNPHAGE

SEQ ID NO: 10623 - protein, 7 aa, Artificial sequence
  Protein classification predicting sequence
AMYHDQG

SEQ ID NO: 10624 - protein, 8 aa, Artificial sequence
  Protein classification predicting sequence
PVHKGVIN

SEQ ID NO: 10625 - protein, 17 aa, Artificial sequence
  Protein classification predicting sequence
DAVLAMYHDQGLPVLKY

SEQ ID NO: 10626 - protein, 6 aa, Artificial sequence
  Protein classification predicting sequence
PAGIGP

SEQ ID NO: 10627 - protein, 6 aa, Artificial sequence
  Protein classification predicting sequence
DHGTAF

SEQ ID NO: 10628 - protein, 7 aa, Artificial sequence
  Protein classification predicting sequence
TTHLPLR

SEQ ID NO: 10629 - protein, 36 aa, Artificial sequence
  Protein classification predicting sequence
YVVETLARACDGCLNGEFAALITGPVHKGVINDAGI

SEQ ID NO: 10630 - protein, 38 aa, Artificial sequence
  Protein classification predicting sequence
FTGHTEFFEERSQAKKVVMMLATEELRVALATTHLPLR

SEQ ID NO: 10631 - protein, 8 aa, Artificial sequence
  Protein classification predicting sequence
VNVTLGLP

SEQ ID NO: 10632 - protein, 7 aa, Artificial sequence
  Protein classification predicting sequence
GPYPADT

SEQ ID NO: 10633 - protein, 9 aa, Artificial sequence
  Protein classification predicting sequence
RTSVDHGTA

SEQ ID NO: 10634 - protein, 8 aa, Artificial sequence
  Protein classification predicting sequence
GLPFIRTS

SEQ ID NO: 10635 - protein, 7 aa, Artificial sequence
  Protein classification predicting sequence
GLNPHAG

SEQ ID NO: 10636 - protein, 6 aa, Artificial sequence
  Protein classification predicting sequence
YHDQGL

SEQ ID NO: 10637 - protein, 7 aa, Artificial sequence
  Protein classification predicting sequence
FGIAEPR

SEQ ID NO: 10638 - protein, 8 aa, Artificial sequence
  Protein classification predicting sequence
RTSPDHGT

SEQ ID NO: 10639 - protein, 6 aa, Artificial sequence
  Protein classification predicting sequence
ILHHDL

SEQ ID NO: 10640 - protein, 6 aa, Artificial sequence
  Protein classification predicting sequence
NPHAGE

SEQ ID NO: 10641 - protein, 5 aa, Artificial sequence
  Protein classification predicting sequence
MYHDQ

SEQ ID NO: 10642 - protein, 6 aa, Artificial sequence
  Protein classification predicting sequence
HGTAFD

SEQ ID NO: 10643 - protein, 14 aa, Artificial sequence
  Protein classification predicting sequence
PRILVCGLNPHAGE

SEQ ID NO: 10644 - protein, 8 aa, Artificial sequence
  Protein classification predicting sequence
GLNPHAGE

SEQ ID NO: 10645 - protein, 7 aa, Artificial sequence
  Protein classification predicting sequence
DAIVTGP

SEQ ID NO: 10646 - protein, 12 aa, Artificial sequence
  Protein classification predicting sequence
TPGEPAGIGPDL

SEQ ID NO: 10647 - protein, 7 aa, Artificial sequence
  Protein classification predicting sequence
VALVTTH

SEQ ID NO: 10648 - protein, 13 aa, Artificial sequence
  Protein classification predicting sequence
VALVTTHIPLAYV

SEQ ID NO: 10649 - protein, 10 aa, Artificial sequence
  Protein classification predicting sequence
GLNPHAGEDG

SEQ ID NO: 10650 - protein, 14 aa, Artificial sequence
  Protein classification predicting sequence
GPLPADTLFQPKYL

SEQ ID NO: 10651 - protein, 8 aa, Artificial sequence
  Protein classification predicting sequence
VNITLGLP

SEQ ID NO: 10652 - protein, 6 aa, Artificial sequence
  Protein classification predicting sequence
GLNPHA

SEQ ID NO: 10653 - protein, 9 aa, Artificial sequence
  Protein classification predicting sequence
GDPAGIGPE

SEQ ID NO: 10654 - protein, 18 aa, Artificial sequence
  Protein classification predicting sequence
VTAGEPAGIGPDLVLALS

SEQ ID NO: 10655 - protein, 31 aa, Artificial sequence
  Protein classification predicting sequence
EFDAIVTGPVHKGVINRAGVAFSGHTEFFAE

SEQ ID NO: 10656 - protein, 6 aa, Artificial sequence
  Protein classification predicting sequence
TGPVHK

SEQ ID NO: 10657 - protein, 14 aa, Artificial sequence
  Protein classification predicting sequence
TPLVVMMLATEGLR

SEQ ID NO: 10658 - protein, 9 aa, Artificial sequence
  Protein classification predicting sequence
EIETITPTL

SEQ ID NO: 10659 - protein, 7 aa, Artificial sequence
  Protein classification predicting sequence
GPLPADT

SEQ ID NO: 10660 - protein, 20 aa, Artificial sequence
  Protein classification predicting sequence
VNITLGLPFIRTSVDHGTAL

SEQ ID NO: 10661 - protein, 12 aa, Artificial sequence
  Protein classification predicting sequence
AMYHDQGLPVLK

SEQ ID NO: 10662 - protein, 10 aa, Artificial sequence
  Protein classification predicting sequence
WPVELVVCAD

SEQ ID NO: 10663 - protein, 8 aa, Artificial sequence
  Protein classification predicting sequence
INDAGIPF

SEQ ID NO: 10664 - protein, 6 aa, Artificial sequence
  Protein classification predicting sequence
TTHLPL

SEQ ID NO: 10665 - protein, 10 aa, Artificial sequence
  Protein classification predicting sequence
VCGLNPHAGE

SEQ ID NO: 10666 - protein, 17 aa, Artificial sequence
  Protein classification predicting sequence
ADVGSFITALNLAIKMI

SEQ ID NO: 10667 - protein, 8 aa, Artificial sequence
  Protein classification predicting sequence
RFLHEFLF

SEQ ID NO: 10668 - protein, 10 aa, Artificial sequence
  Protein classification predicting sequence
FLVNNGGGQF

SEQ ID NO: 10669 - protein, 7 aa, Artificial sequence
  Protein classification predicting sequence
PDHDNWP

SEQ ID NO: 10670 - protein, 9 aa, Artificial sequence
  Protein classification predicting sequence
RLHFHDCFV

SEQ ID NO: 10671 - protein, 6 aa, Artificial sequence
  Protein classification predicting sequence
GAHTIG

SEQ ID NO: 10672 - protein, 7 aa, Artificial sequence
  Protein classification predicting sequence
FDNKYYV

SEQ ID NO: 10673 - protein, 7 aa, Artificial sequence
  Protein classification predicting sequence
GLFTSDQ

SEQ ID NO: 10674 - protein, 6 aa, Artificial sequence
  Protein classification predicting sequence
AMIKMG

SEQ ID NO: 10675 - protein, 9 aa, Artificial sequence
  Protein classification predicting sequence
LTGTQGEIR

SEQ ID NO: 10676 - protein, 6 aa, Artificial sequence
  Protein classification predicting sequence
VSCADI

SEQ ID NO: 10677 - protein, 7 aa, Artificial sequence
  Protein classification predicting sequence
RLYNQSG

SEQ ID NO: 10678 - protein, 6 aa, Artificial sequence
  Protein classification predicting sequence
NCRVVN

SEQ ID NO: 10679 - protein, 10 aa, Artificial sequence
  Protein classification predicting sequence
ACPRTVSCAD

SEQ ID NO: 10680 - protein, 7 aa, Artificial sequence
  Protein classification predicting sequence
VPLGRRD

SEQ ID NO: 10681 - protein, 7 aa, Artificial sequence
  Protein classification predicting sequence
NANSARG

SEQ ID NO: 10682 - protein, 6 aa, Artificial sequence
  Protein classification predicting sequence
AARDSV

SEQ ID NO: 10683 - protein, 8 aa, Artificial sequence
  Protein classification predicting sequence
TFYDTSCP

SEQ ID NO: 10684 - protein, 8 aa, Artificial sequence
  Protein classification predicting sequence
RLHFHDCF

SEQ ID NO: 10685 - protein, 7 aa, Artificial sequence
  Protein classification predicting sequence
PLTGTQG

SEQ ID NO: 10686 - protein, 7 aa, Artificial sequence
  Protein classification predicting sequence
DPRIAAS

SEQ ID NO: 10687 - protein, 8 aa, Artificial sequence
  Protein classification predicting sequence
KGLIQSDQ

SEQ ID NO: 10688 - protein, 7 aa, Artificial sequence
  Protein classification predicting sequence
CPGIVSC

SEQ ID NO: 10689 - protein, 8 aa, Artificial sequence
  Protein classification predicting sequence
SEKNAGPN

SEQ ID NO: 10690 - protein, 8 aa, Artificial sequence
  Protein classification predicting sequence
VPTGRRDG

SEQ ID NO: 10691 - protein, 7 aa, Artificial sequence
  Protein classification predicting sequence
GGPSWTV

SEQ ID NO: 10692 - protein, 9 aa, Artificial sequence
  Protein classification predicting sequence
LGRRDSTTA

SEQ ID NO: 10693 - protein, 7 aa, Artificial sequence
  Protein classification predicting sequence
GCDGSVL

SEQ ID NO: 10694 - protein, 5 aa, Artificial sequence
  Protein classification predicting sequence
FHDCF

SEQ ID NO: 10695 - protein, 9 aa, Artificial sequence
  Protein classification predicting sequence
IGFSHCKEF

SEQ ID NO: 10696 - protein, 19 aa, Artificial sequence
  Protein classification predicting sequence
NANSARGFPVIDRMKAAVE

SEQ ID NO: 10697 - protein, 7 aa, Artificial sequence
  Protein classification predicting sequence
LTIAAQQ

SEQ ID NO: 10698 - protein, 18 aa, Artificial sequence
  Protein classification predicting sequence
DQELFSSPNATDTIPLVR

SEQ ID NO: 10699 - protein, 7 aa, Artificial sequence
  Protein classification predicting sequence
DLVALSG

SEQ ID NO: 10700 - protein, 8 aa, Artificial sequence
  Protein classification predicting sequence
HTFGKNQC

SEQ ID NO: 10701 - protein, 9 aa, Artificial sequence
  Protein classification predicting sequence
AQLTPTFYD

SEQ ID NO: 10702 - protein, 8 aa, Artificial sequence
  Protein classification predicting sequence
SLAGDGFD

SEQ ID NO: 10703 - protein, 9 aa, Artificial sequence
  Protein classification predicting sequence
NLPAPFFTL

SEQ ID NO: 10704 - protein, 12 aa, Artificial sequence
  Protein classification predicting sequence
QCQFIMDRLYNF

SEQ ID NO: 10705 - protein, 6 aa, Artificial sequence
  Protein classification predicting sequence
VIDRMK

SEQ ID NO: 10706 - protein, 7 aa, Artificial sequence
  Protein classification predicting sequence
AARDSVV

SEQ ID NO: 10707 - protein, 7 aa, Artificial sequence
  Protein classification predicting sequence
EIRKNCR

SEQ ID NO: 10708 - protein, 7 aa, Artificial sequence
  Protein classification predicting sequence
CPGVVSC

SEQ ID NO: 10709 - protein, 6 aa, Artificial sequence
  Protein classification predicting sequence
TGRRDG

SEQ ID NO: 10710 - protein, 9 aa, Artificial sequence
  Protein classification predicting sequence
GEIRRVCSA

SEQ ID NO: 10711 - protein, 7 aa, Artificial sequence
  Protein classification predicting sequence
PTGRRDG

SEQ ID NO: 10712 - protein, 5 aa, Artificial sequence
  Protein classification predicting sequence
RQNCR

SEQ ID NO: 10713 - protein, 6 aa, Artificial sequence
  Protein classification predicting sequence
FHDCFV

SEQ ID NO: 10714 - protein, 12 aa, Artificial sequence
  Protein classification predicting sequence
FHDCFVNGCDAS

SEQ ID NO: 10715 - protein, 10 aa, Artificial sequence
  Protein classification predicting sequence
FHDCFVNGCD

SEQ ID NO: 10716 - protein, 9 aa, Artificial sequence
  Protein classification predicting sequence
GCDGSLLLD

SEQ ID NO: 10717 - protein, 8 aa, Artificial sequence
  Protein classification predicting sequence
QSDQELFS

SEQ ID NO: 10718 - protein, 7 aa, Artificial sequence
  Protein classification predicting sequence
VSCADIL

SEQ ID NO: 10719 - protein, 7 aa, Artificial sequence
  Protein classification predicting sequence
AMIRMGN

SEQ ID NO: 10720 - protein, 9 aa, Artificial sequence
  Protein classification predicting sequence
RMHFHDCFV

SEQ ID NO: 10721 - protein, 9 aa, Artificial sequence
  Protein classification predicting sequence
FIMDRLYNF

SEQ ID NO: 10722 - protein, 5 aa, Artificial sequence
  Protein classification predicting sequence
HDCFV

SEQ ID NO: 10723 - protein, 8 aa, Artificial sequence
  Protein classification predicting sequence
HTLGFAHC

SEQ ID NO: 10724 - protein, 8 aa, Artificial sequence
  Protein classification predicting sequence
HTIGFSHC

SEQ ID NO: 10725 - protein, 17 aa, Artificial sequence
  Protein classification predicting sequence
GLSTRDMVALSGAHTIG

SEQ ID NO: 10726 - protein, 8 aa, Artificial sequence
  Protein classification predicting sequence
LSGAHTIG

SEQ ID NO: 10727 - protein, 6 aa, Artificial sequence
  Protein classification predicting sequence
SDQVLF

SEQ ID NO: 10728 - protein, 7 aa, Artificial sequence
  Protein classification predicting sequence
HFHDCFV

SEQ ID NO: 10729 - protein, 10 aa, Artificial sequence
  Protein classification predicting sequence
LRLHFHDCFV

SEQ ID NO: 10730 - protein, 9 aa, Artificial sequence
  Protein classification predicting sequence
GCDASILLD

SEQ ID NO: 10731 - protein, 8 aa, Artificial sequence
  Protein classification predicting sequence
SFRTEKDA

SEQ ID NO: 10732 - protein, 11 aa, Artificial sequence
  Protein classification predicting sequence
SFRTEKDAAPN

SEQ ID NO: 10733 - protein, 6 aa, Artificial sequence
  Protein classification predicting sequence
PDPTLN

SEQ ID NO: 10734 - protein, 11 aa, Artificial sequence
  Protein classification predicting sequence
EGGIDPILRGL

SEQ ID NO: 10735 - protein, 8 aa, Artificial sequence
  Protein classification predicting sequence
QINALTSF

SEQ ID NO: 10736 - protein, 7 aa, Artificial sequence
  Protein classification predicting sequence
YFKQPVA

SEQ ID NO: 10737 - protein, 9 aa, Artificial sequence
  Protein classification predicting sequence
RFQDNGRAL

SEQ ID NO: 10738 - protein, 6 aa, Artificial sequence
  Protein classification predicting sequence
NSVRGF

SEQ ID NO: 10739 - protein, 14 aa, Artificial sequence
  Protein classification predicting sequence
QLMNEELTERLFVL

SEQ ID NO: 10740 - protein, 9 aa, Artificial sequence
  Protein classification predicting sequence
ARTGPLFAC

SEQ ID NO: 10741 - protein, 11 aa, Artificial sequence
  Protein classification predicting sequence
NLQRGRDHGLP

SEQ ID NO: 10742 - protein, 12 aa, Artificial sequence
  Protein classification predicting sequence
DNIDVWLGGLAE

SEQ ID NO: 10743 - protein, 8 aa, Artificial sequence
  Protein classification predicting sequence
TCLANKYR

SEQ ID NO: 10744 - protein, 10 aa, Artificial sequence
  Protein classification predicting sequence
PLPPVREVTR

SEQ ID NO: 10745 - protein, 12 aa, Artificial sequence
  Protein classification predicting sequence
CLPFYRSSAACG

SEQ ID NO: 10746 - protein, 14 aa, Artificial sequence
  Protein classification predicting sequence
YQEARKVVGALHQI

SEQ ID NO: 10747 - protein, 12 aa, Artificial sequence
  Protein classification predicting sequence
SDQVLFNGGSTD

SEQ ID NO: 10748 - protein, 7 aa, Artificial sequence
  Protein classification predicting sequence
CHNPDTW

SEQ ID NO: 10749 - protein, 6 aa, Artificial sequence
  Protein classification predicting sequence
ELLPYH

SEQ ID NO: 10750 - protein, 20 aa, Artificial sequence
  Protein classification predicting sequence
GRIHSFESCGTVDGPGIRFI

SEQ ID NO: 10751 - protein, 7 aa, Artificial sequence
  Protein classification predicting sequence
QGCLMRC

SEQ ID NO: 10752 - protein, 9 aa, Artificial sequence
  Protein classification predicting sequence
YCHNRDTWD

SEQ ID NO: 10753 - protein, 17 aa, Artificial sequence
  Protein classification predicting sequence
VEDLMKEVVTYRHFMNA

SEQ ID NO: 10754 - protein, 11 aa, Artificial sequence
  Protein classification predicting sequence
GGGVTASGGEA

SEQ ID NO: 10755 - protein, 14 aa, Artificial sequence
  Protein classification predicting sequence
LQAEFVRDWFRACK

SEQ ID NO: 10756 - protein, 10 aa, Artificial sequence
  Protein classification predicting sequence
TCLDTNGFVR

SEQ ID NO: 10757 - protein, 9 aa, Artificial sequence
  Protein classification predicting sequence
RTLEFAKYL

SEQ ID NO: 10758 - protein, 9 aa, Artificial sequence
  Protein classification predicting sequence
WIRYVVVPG

SEQ ID NO: 10759 - protein, 11 aa, Artificial sequence
  Protein classification predicting sequence
GTVDGPGIRFI

SEQ ID NO: 10760 - protein, 7 aa, Artificial sequence
  Protein classification predicting sequence
LPYHTMG

SEQ ID NO: 10761 - protein, 7 aa, Artificial sequence
  Protein classification predicting sequence
LGHGVDL

SEQ ID NO: 10762 - protein, 17 aa, Artificial sequence
  Protein classification predicting sequence
LRLFKDGKLKYQVLDGE

SEQ ID NO: 10763 - protein, 10 aa, Artificial sequence
  Protein classification predicting sequence
WLREHNRVCD

SEQ ID NO: 10764 - protein, 9 aa, Artificial sequence
  Protein classification predicting sequence
LKFDPELLF

SEQ ID NO: 10765 - protein, 7 aa, Artificial sequence
  Protein classification predicting sequence
LYHWHPL

SEQ ID NO: 10766 - protein, 9 aa, Artificial sequence
  Protein classification predicting sequence
AGRIGGGRN

SEQ ID NO: 10767 - protein, 9 aa, Artificial sequence
  Protein classification predicting sequence
GAPFSLKGL

SEQ ID NO: 10768 - protein, 17 aa, Artificial sequence
  Protein classification predicting sequence
QMAVGQEVFGLLPGLML

SEQ ID NO: 10769 - protein, 8 aa, Artificial sequence
  Protein classification predicting sequence
YVQHLSGY

SEQ ID NO: 10770 - protein, 9 aa, Artificial sequence
  Protein classification predicting sequence
YWKPSTFGG

SEQ ID NO: 10771 - protein, 7 aa, Artificial sequence
  Protein classification predicting sequence
PVNPCCY

SEQ ID NO: 10772 - protein, 9 aa, Artificial sequence
  Protein classification predicting sequence
FSNVSYYTR

SEQ ID NO: 10773 - protein, 9 aa, Artificial sequence
  Protein classification predicting sequence
FIPDPQGTN

SEQ ID NO: 10774 - protein, 6 aa, Artificial sequence
  Protein classification predicting sequence
LKFDPE

SEQ ID NO: 10775 - protein, 14 aa, Artificial sequence
  Protein classification predicting sequence
TVRSNLIPSPPTYN

SEQ ID NO: 10776 - protein, 39 aa, Artificial sequence
  Protein classification predicting sequence
FAFFAQHFTHQFFKTSGKMGPGFTKALGHGVDLGHIYGD

SEQ ID NO: 10777 - protein, 11 aa, Artificial sequence
  Protein classification predicting sequence
RLILIGETIKI

SEQ ID NO: 10778 - protein, 8 aa, Artificial sequence
  Protein classification predicting sequence
FNEYRKRF

SEQ ID NO: 10779 - protein, 8 aa, Artificial sequence
  Protein classification predicting sequence
FVNATFIR

SEQ ID NO: 10780 - protein, 24 aa, Artificial sequence
  Protein classification predicting sequence
AHDYISWESFSNVSYYTRILPSVP

SEQ ID NO: 10781 - protein, 7 aa, Artificial sequence
  Protein classification predicting sequence
DCPTPMG

SEQ ID NO: 10782 - protein, 6 aa, Artificial sequence
  Protein classification predicting sequence
GEVYPP

SEQ ID NO: 10783 - protein, 14 aa, Artificial sequence
  Protein classification predicting sequence
RLILIGETIKIVIE

SEQ ID NO: 10784 - protein, 28 aa, Artificial sequence
  Protein classification predicting sequence
YSYEQFLFNTSMLVDYGVEALVDAFSRQ

SEQ ID NO: 10785 - protein, 16 aa, Artificial sequence
  Protein classification predicting sequence
MFAFFAQHFTHQFFKT

SEQ ID NO: 10786 - protein, 9 aa, Artificial sequence
  Protein classification predicting sequence
AGRVAGGRN

SEQ ID NO: 10787 - protein, 6 aa, Artificial sequence
  Protein classification predicting sequence
PCQNRG

SEQ ID NO: 10788 - protein, 7 aa, Artificial sequence
  Protein classification predicting sequence
CDCTRTG

SEQ ID NO: 10789 - protein, 6 aa, Artificial sequence
  Protein classification predicting sequence
YPPTVK

SEQ ID NO: 10790 - protein, 13 aa, Artificial sequence
  Protein classification predicting sequence
QIAGRVAGGRNVP

SEQ ID NO: 10791 - protein, 8 aa, Artificial sequence
  Protein classification predicting sequence
KTVTINAS

SEQ ID NO: 10792 - protein, 9 aa, Artificial sequence
  Protein classification predicting sequence
PCQNRGVCM

SEQ ID NO: 10793 - protein, 10 aa, Artificial sequence
  Protein classification predicting sequence
YGENCTTPEF

SEQ ID NO: 10794 - protein, 6 aa, Artificial sequence
  Protein classification predicting sequence
YKSWEA

SEQ ID NO: 10795 - protein, 8 aa, Artificial sequence
  Protein classification predicting sequence
SNLSYYTR

SEQ ID NO: 10796 - protein, 14 aa, Artificial sequence
  Protein classification predicting sequence
LLRRKFIPDPQGTN

SEQ ID NO: 10797 - protein, 7 aa, Artificial sequence
  Protein classification predicting sequence
GPGFTKA

SEQ ID NO: 10798 - protein, 6 aa, Artificial sequence
  Protein classification predicting sequence
GHGVDL

SEQ ID NO: 10799 - protein, 7 aa, Artificial sequence
  Protein classification predicting sequence
AGRVAGG

SEQ ID NO: 10800 - protein, 11 aa, Artificial sequence
  Protein classification predicting sequence
YQSLNEYRKRF

SEQ ID NO: 10801 - protein, 7 aa, Artificial sequence
  Protein classification predicting sequence
LYGDIDA

SEQ ID NO: 10802 - protein, 8 aa, Artificial sequence
  Protein classification predicting sequence
LLVEKPRP

SEQ ID NO: 10803 - protein, 9 aa, Artificial sequence
  Protein classification predicting sequence
AIFGETMVE

SEQ ID NO: 10804 - protein, 16 aa, Artificial sequence
  Protein classification predicting sequence
PCQNRGVCMSVGFDQY

SEQ ID NO: 10805 - protein, 6 aa, Artificial sequence
  Protein classification predicting sequence
SPPTYN

SEQ ID NO: 10806 - protein, 7 aa, Artificial sequence
  Protein classification predicting sequence
YGYKSWE

SEQ ID NO: 10807 - protein, 9 aa, Artificial sequence
  Protein classification predicting sequence
CPTPMGVKG

SEQ ID NO: 10808 - protein, 7 aa, Artificial sequence
  Protein classification predicting sequence
GNPICSP

SEQ ID NO: 10809 - protein, 6 aa, Artificial sequence
  Protein classification predicting sequence
ANPCCS

SEQ ID NO: 10810 - protein, 17 aa, Artificial sequence
  Protein classification predicting sequence
LKPTPNTVHYILTHFKG

SEQ ID NO: 10811 - protein, 12 aa, Artificial sequence
  Protein classification predicting sequence
LLRRKFIPDPQG

SEQ ID NO: 10812 - protein, 6 aa, Artificial sequence
  Protein classification predicting sequence
EMIYPP

SEQ ID NO: 10813 - protein, 10 aa, Artificial sequence
  Protein classification predicting sequence
YNNSILLEHG

SEQ ID NO: 10814 - protein, 7 aa, Artificial sequence
  Protein classification predicting sequence
ASIDQSR

SEQ ID NO: 10815 - protein, 11 aa, Artificial sequence
  Protein classification predicting sequence
SFEELTGEKEM

SEQ ID NO: 10816 - protein, 7 aa, Artificial sequence
  Protein classification predicting sequence
FIPDPQG

SEQ ID NO: 10817 - protein, 8 aa, Artificial sequence
  Protein classification predicting sequence
LRLFKDGK

SEQ ID NO: 10818 - protein, 8 aa, Artificial sequence
  Protein classification predicting sequence
LKQEHPEW

SEQ ID NO: 10819 - protein, 9 aa, Artificial sequence
  Protein classification predicting sequence
RTGFYGENC

SEQ ID NO: 10820 - protein, 7 aa, Artificial sequence
  Protein classification predicting sequence
TPEFLTR

SEQ ID NO: 10821 - protein, 8 aa, Artificial sequence
  Protein classification predicting sequence
PPTYNVHY

SEQ ID NO: 10822 - protein, 6 aa, Artificial sequence
  Protein classification predicting sequence
GPGFTK

SEQ ID NO: 10823 - protein, 8 aa, Artificial sequence
  Protein classification predicting sequence
EWDDERLF

SEQ ID NO: 10824 - protein, 7 aa, Artificial sequence
  Protein classification predicting sequence
HLSGYHF

SEQ ID NO: 10825 - protein, 19 aa, Artificial sequence
  Protein classification predicting sequence
GFDQYKCDCTRTGFYGENC

SEQ ID NO: 10826 - protein, 9 aa, Artificial sequence
  Protein classification predicting sequence
WDDEQLFQT

SEQ ID NO: 10827 - protein, 30 aa, Artificial sequence
  Protein classification predicting sequence
FAVGQEVFGLVPGLMMYATIWLREHNRVCD

SEQ ID NO: 10828 - protein, 11 aa, Artificial sequence
  Protein classification predicting sequence
RLFKDGKMKYQ

SEQ ID NO: 10829 - protein, 10 aa, Artificial sequence
  Protein classification predicting sequence
DQSREMKYQS

SEQ ID NO: 10830 - protein, 7 aa, Artificial sequence
  Protein classification predicting sequence
DYLQEPD

SEQ ID NO: 10831 - protein, 6 aa, Artificial sequence
  Protein classification predicting sequence
TYNNCP

SEQ ID NO: 10832 - protein, 9 aa, Artificial sequence
  Protein classification predicting sequence
LHNAECTGC

SEQ ID NO: 10833 - protein, 10 aa, Artificial sequence
  Protein classification predicting sequence
CLYELGCKGP

SEQ ID NO: 10834 - protein, 16 aa, Artificial sequence
  Protein classification predicting sequence
KVRLLKKALEKHADKE

SEQ ID NO: 10835 - protein, 18 aa, Artificial sequence
  Protein classification predicting sequence
VCDEGLRSLKGIGDEALP

SEQ ID NO: 10836 - protein, 13 aa, Artificial sequence
  Protein classification predicting sequence
EYQSVKLVGPEVR

SEQ ID NO: 10837 - protein, 16 aa, Artificial sequence
  Protein classification predicting sequence
CTYYFSVDADVALTEP

SEQ ID NO: 10838 - protein, 6 aa, Artificial sequence
  Protein classification predicting sequence
YIHENY

SEQ ID NO: 10839 - protein, 12 aa, Artificial sequence
  Protein classification predicting sequence
PHHDASTFTINI

SEQ ID NO: 10840 - protein, 11 aa, Artificial sequence
  Protein classification predicting sequence
HPGRLTHYHEG

SEQ ID NO: 10841 - protein, 10 aa, Artificial sequence
  Protein classification predicting sequence
NLLVLTVATK

SEQ ID NO: 10842 - protein, 11 aa, Artificial sequence
  Protein classification predicting sequence
RSAQFFNYKIQ

SEQ ID NO: 10843 - protein, 7 aa, Artificial sequence
  Protein classification predicting sequence
DEVVLKF

SEQ ID NO: 10844 - protein, 6 aa, Artificial sequence
  Protein classification predicting sequence
FIHNHE

SEQ ID NO: 10845 - protein, 6 aa, Artificial sequence
  Protein classification predicting sequence
CDYYFS

SEQ ID NO: 10846 - protein, 15 aa, Artificial sequence
  Protein classification predicting sequence
DGYYARSEDYVDIVQ

SEQ ID NO: 10847 - protein, 7 aa, Artificial sequence
  Protein classification predicting sequence
WNVPYIS

SEQ ID NO: 10848 - protein, 6 aa, Artificial sequence
  Protein classification predicting sequence
DLWQIF

SEQ ID NO: 10849 - protein, 7 aa, Artificial sequence
  Protein classification predicting sequence
FSNPEDW

SEQ ID NO: 10850 - protein, 9 aa, Artificial sequence
  Protein classification predicting sequence
EKYIHENYT

SEQ ID NO: 10851 - protein, 10 aa, Artificial sequence
  Protein classification predicting sequence
TEKLYPGYYT

SEQ ID NO: 10852 - protein, 15 aa, Artificial sequence
  Protein classification predicting sequence
HPGRLTHYHEGLPTT

SEQ ID NO: 10853 - protein, 9 aa, Artificial sequence
  Protein classification predicting sequence
GTRYIAVSF

SEQ ID NO: 10854 - protein, 32 aa, Artificial sequence
  Protein classification predicting sequence
EDNLLVLTVATKETEGFRRFKRSAQFFNYKIQ

SEQ ID NO: 10855 - protein, 7 aa, Artificial sequence
  Protein classification predicting sequence
LGLGEDW

SEQ ID NO: 10856 - protein, 16 aa, Artificial sequence
  Protein classification predicting sequence
DGKRFLGSGGFIGYAP

SEQ ID NO: 10857 - protein, 9 aa, Artificial sequence
  Protein classification predicting sequence
PEKREQINI

SEQ ID NO: 10858 - protein, 7 aa, Artificial sequence
  Protein classification predicting sequence
AYDTLPV

SEQ ID NO: 10859 - protein, 16 aa, Artificial sequence
  Protein classification predicting sequence
HGNGPTKLQLNYLGNY

SEQ ID NO: 10860 - protein, 7 aa, Artificial sequence
  Protein classification predicting sequence
LWSNFWG

SEQ ID NO: 10861 - protein, 9 aa, Artificial sequence
  Protein classification predicting sequence
PHHDASTFT

SEQ ID NO: 10862 - protein, 8 aa, Artificial sequence
  Protein classification predicting sequence
NIALNRVG

SEQ ID NO: 10863 - protein, 5 aa, Artificial sequence
  Protein classification predicting sequence
PRKGW

SEQ ID NO: 10864 - protein, 6 aa, Artificial sequence
  Protein classification predicting sequence
DQLFYT

SEQ ID NO: 10865 - protein, 9 aa, Artificial sequence
  Protein classification predicting sequence
HGNGPTKLQ

SEQ ID NO: 10866 - protein, 7 aa, Artificial sequence
  Protein classification predicting sequence
PRKGWAL

SEQ ID NO: 10867 - protein, 6 aa, Artificial sequence
  Protein classification predicting sequence
EWRGGD

SEQ ID NO: 10868 - protein, 6 aa, Artificial sequence
  Protein classification predicting sequence
SGGFIG

SEQ ID NO: 10869 - protein, 6 aa, Artificial sequence
  Protein classification predicting sequence
GNGPTK

SEQ ID NO: 10870 - protein, 9 aa, Artificial sequence
  Protein classification predicting sequence
YYFSVDADV

SEQ ID NO: 10871 - protein, 9 aa, Artificial sequence
  Protein classification predicting sequence
RVGVWNVPY

SEQ ID NO: 10872 - protein, 7 aa, Artificial sequence
  Protein classification predicting sequence
DWKEKYI

SEQ ID NO: 10873 - protein, 6 aa, Artificial sequence
  Protein classification predicting sequence
DIHMKQ

SEQ ID NO: 10874 - protein, 7 aa, Artificial sequence
  Protein classification predicting sequence
GGGQKVR

SEQ ID NO: 10875 - protein, 9 aa, Artificial sequence
  Protein classification predicting sequence
PCPDVYWFP

SEQ ID NO: 10876 - protein, 12 aa, Artificial sequence
  Protein classification predicting sequence
DYEGGGCRFLRY

SEQ ID NO: 10877 - protein, 7 aa, Artificial sequence
  Protein classification predicting sequence
LIEQNRK

SEQ ID NO: 10878 - protein, 11 aa, Artificial sequence
  Protein classification predicting sequence
WGLAEQYPEVG

SEQ ID NO: 10879 - protein, 8 aa, Artificial sequence
  Protein classification predicting sequence
GKRFLNSG

SEQ ID NO: 10880 - protein, 7 aa, Artificial sequence
  Protein classification predicting sequence
IFQNLNG

SEQ ID NO: 10881 - protein, 6 aa, Artificial sequence
  Protein classification predicting sequence
WQIFEN

SEQ ID NO: 10882 - protein, 8 aa, Artificial sequence
  Protein classification predicting sequence
GGYENVPT

SEQ ID NO: 10883 - protein, 6 aa, Artificial sequence
  Protein classification predicting sequence
DIHMNQ

SEQ ID NO: 10884 - protein, 7 aa, Artificial sequence
  Protein classification predicting sequence
FVVRYKP

SEQ ID NO: 10885 - protein, 7 aa, Artificial sequence
  Protein classification predicting sequence
SLRPHHD

SEQ ID NO: 10886 - protein, 8 aa, Artificial sequence
  Protein classification predicting sequence
PHHDASTF

SEQ ID NO: 10887 - protein, 6 aa, Artificial sequence
  Protein classification predicting sequence
DYEGGG

SEQ ID NO: 10888 - protein, 11 aa, Artificial sequence
  Protein classification predicting sequence
PGRLTHLHEGL

SEQ ID NO: 10889 - protein, 12 aa, Artificial sequence
  Protein classification predicting sequence
NHLGHFLLSRLL

SEQ ID NO: 10890 - protein, 8 aa, Artificial sequence
  Protein classification predicting sequence
GKRLAQVV

SEQ ID NO: 10891 - protein, 14 aa, Artificial sequence
  Protein classification predicting sequence
SASFENQLSQEASD

SEQ ID NO: 10892 - protein, 7 aa, Artificial sequence
  Protein classification predicting sequence
LFPPFQK

SEQ ID NO: 10893 - protein, 8 aa, Artificial sequence
  Protein classification predicting sequence
NHLGHFLL

SEQ ID NO: 10894 - protein, 8 aa, Artificial sequence
  Protein classification predicting sequence
IVGSITGN

SEQ ID NO: 10895 - protein, 11 aa, Artificial sequence
  Protein classification predicting sequence
EFVANGELDAE

SEQ ID NO: 10896 - protein, 16 aa, Artificial sequence
  Protein classification predicting sequence
RTFTATASQGLALMHE

SEQ ID NO: 10897 - protein, 10 aa, Artificial sequence
  Protein classification predicting sequence
FILTHTVEPV

SEQ ID NO: 10898 - protein, 6 aa, Artificial sequence
  Protein classification predicting sequence
RPITQG

SEQ ID NO: 10899 - protein, 10 aa, Artificial sequence
  Protein classification predicting sequence
AAKLAKPKVI

SEQ ID NO: 10900 - protein, 11 aa, Artificial sequence
  Protein classification predicting sequence
TFASLYPGCIA

SEQ ID NO: 10901 - protein, 12 aa, Artificial sequence
  Protein classification predicting sequence
TGLFREHIPLFR

SEQ ID NO: 10902 - protein, 16 aa, Artificial sequence
  Protein classification predicting sequence
LFPPFQKYITKGYVSE

SEQ ID NO: 10903 - protein, 8 aa, Artificial sequence
  Protein classification predicting sequence
EKARKVWE

SEQ ID NO: 10904 - protein, 7 aa, Artificial sequence
  Protein classification predicting sequence
GEDRPKK

SEQ ID NO: 10905 - protein, 9 aa, Artificial sequence
  Protein classification predicting sequence
HRRYHEETG

SEQ ID NO: 10906 - protein, 9 aa, Artificial sequence
  Protein classification predicting sequence
KSGVYWSWN

SEQ ID NO: 10907 - protein, 7 aa, Artificial sequence
  Protein classification predicting sequence
SFENQLS

SEQ ID NO: 10908 - protein, 15 aa, Artificial sequence
  Protein classification predicting sequence
QAFPFFGVERRGAPV

SEQ ID NO: 10909 - protein, 27 aa, Artificial sequence
  Protein classification predicting sequence
EGKYVQAFPFFGVERRGAPVTAFTRID

SEQ ID NO: 10910 - protein, 6 aa, Artificial sequence
  Protein classification predicting sequence
PTAKEP

SEQ ID NO: 10911 - protein, 26 aa, Artificial sequence
  Protein classification predicting sequence
IIVGSITGNTNTLAGNVPPKANLGDL

SEQ ID NO: 10912 - protein, 10 aa, Artificial sequence
  Protein classification predicting sequence
GAKAYKDSKV

SEQ ID NO: 10913 - protein, 10 aa, Artificial sequence
  Protein classification predicting sequence
TMQEFHRRYH

SEQ ID NO: 10914 - protein, 7 aa, Artificial sequence
  Protein classification predicting sequence
AQVVSDP

SEQ ID NO: 10915 - protein, 8 aa, Artificial sequence
  Protein classification predicting sequence
WHVVMACR

SEQ ID NO: 10916 - protein, 6 aa, Artificial sequence
  Protein classification predicting sequence
SLDSVR

SEQ ID NO: 10917 - protein, 7 aa, Artificial sequence
  Protein classification predicting sequence
KAYKDSK

SEQ ID NO: 10918 - protein, 8 aa, Artificial sequence
  Protein classification predicting sequence
WHVIMACR

SEQ ID NO: 10919 - protein, 7 aa, Artificial sequence
  Protein classification predicting sequence
SEKLVGL

SEQ ID NO: 10920 - protein, 20 aa, Artificial sequence
  Protein classification predicting sequence
SWLFFPFHRWYLYFYERILG

SEQ ID NO: 10921 - protein, 6 aa, Artificial sequence
  Protein classification predicting sequence
NVDRMW

SEQ ID NO: 10922 - protein, 35 aa, Artificial sequence
  Protein classification predicting sequence
NGNQDETNSVDRRNVLLGLGGLYGVANAIPLAASA

SEQ ID NO: 10923 - protein, 13 aa, Artificial sequence
  Protein classification predicting sequence
KDWLNSEFFFYDE

SEQ ID NO: 10924 - protein, 7 aa, Artificial sequence
  Protein classification predicting sequence
VETTQLQ

SEQ ID NO: 10925 - protein, 8 aa, Artificial sequence
  Protein classification predicting sequence
FYSAGLDP

SEQ ID NO: 10926 - protein, 8 aa, Artificial sequence
  Protein classification predicting sequence
TPWRNFKP

SEQ ID NO: 10927 - protein, 10 aa, Artificial sequence
  Protein classification predicting sequence
NVDRMWNEWK

SEQ ID NO: 10928 - protein, 7 aa, Artificial sequence
  Protein classification predicting sequence
RPASSRT

SEQ ID NO: 10929 - protein, 9 aa, Artificial sequence
  Protein classification predicting sequence
RFDVFLNVD

SEQ ID NO: 10930 - protein, 18 aa, Artificial sequence
  Protein classification predicting sequence
ELDKAEFAGSYTSLPHVH

SEQ ID NO: 10931 - protein, 25 aa, Artificial sequence
  Protein classification predicting sequence
LAITELLEDIGLEDEDTIAVTLVPK

SEQ ID NO: 10932 - protein, 10 aa, Artificial sequence
  Protein classification predicting sequence
KLRIRPPAHA

SEQ ID NO: 10933 - protein, 11 aa, Artificial sequence
  Protein classification predicting sequence
HNSWLFFPFHR

SEQ ID NO: 10934 - protein, 8 aa, Artificial sequence
  Protein classification predicting sequence
RVKVRDCL

SEQ ID NO: 10935 - protein, 6 aa, Artificial sequence
  Protein classification predicting sequence
VTLVPK

SEQ ID NO: 10936 - protein, 14 aa, Artificial sequence
  Protein classification predicting sequence
FHRWYLYFYERILG

SEQ ID NO: 10937 - protein, 10 aa, Artificial sequence
  Protein classification predicting sequence
QQANIHCAYC

SEQ ID NO: 10938 - protein, 8 aa, Artificial sequence
  Protein classification predicting sequence
DRRNVLLG

SEQ ID NO: 10939 - protein, 7 aa, Artificial sequence
  Protein classification predicting sequence
EDMGNFY

SEQ ID NO: 10940 - protein, 7 aa, Artificial sequence
  Protein classification predicting sequence
IHQSRLD

SEQ ID NO: 10941 - protein, 7 aa, Artificial sequence
  Protein classification predicting sequence
RDVEHGL

SEQ ID NO: 10942 - protein, 7 aa, Artificial sequence
  Protein classification predicting sequence
RIEDHDG

SEQ ID NO: 10943 - protein, 9 aa, Artificial sequence
  Protein classification predicting sequence
APRDSDFAL

SEQ ID NO: 10944 - protein, 13 aa, Artificial sequence
  Protein classification predicting sequence
QIQGWVANRFYYQ

SEQ ID NO: 10945 - protein, 8 aa, Artificial sequence
  Protein classification predicting sequence
IPLKDAAI

SEQ ID NO: 10946 - protein, 9 aa, Artificial sequence
  Protein classification predicting sequence
SSLTELFAP

SEQ ID NO: 10947 - protein, 8 aa, Artificial sequence
  Protein classification predicting sequence
QRILDHDG

SEQ ID NO: 10948 - protein, 7 aa, Artificial sequence
  Protein classification predicting sequence
ILQFKLD

SEQ ID NO: 10949 - protein, 9 aa, Artificial sequence
  Protein classification predicting sequence
VLWAQLDAL

SEQ ID NO: 10950 - protein, 17 aa, Artificial sequence
  Protein classification predicting sequence
FKATAVMPDGQFKDISL

SEQ ID NO: 10951 - protein, 8 aa, Artificial sequence
  Protein classification predicting sequence
HLAWINTP

SEQ ID NO: 10952 - protein, 10 aa, Artificial sequence
  Protein classification predicting sequence
VNDLPVGRSV

SEQ ID NO: 10953 - protein, 10 aa, Artificial sequence
  Protein classification predicting sequence
ETLRLVQAFQ

SEQ ID NO: 10954 - protein, 14 aa, Artificial sequence
  Protein classification predicting sequence
ETLRLVQAFQYTDK

SEQ ID NO: 10955 - protein, 8 aa, Artificial sequence
  Protein classification predicting sequence
LRLVQAFQ

SEQ ID NO: 10956 - protein, 7 aa, Artificial sequence
  Protein classification predicting sequence
YKGKYVV

SEQ ID NO: 10957 - protein, 31 aa, Artificial sequence
  Protein classification predicting sequence
RLVQAFQFTDKHGEVCPAGWKPGSDTIKPDV

SEQ ID NO: 10958 - protein, 6 aa, Artificial sequence
  Protein classification predicting sequence
KGVLRQ

SEQ ID NO: 10959 - protein, 11 aa, Artificial sequence
  Protein classification predicting sequence
NDLPVGRSVDE

SEQ ID NO: 10960 - protein, 33 aa, Artificial sequence
  Protein classification predicting sequence
NDLPVGRSVDEALRLVQAFQYTDEHGEVCPAGW

SEQ ID NO: 10961 - protein, 9 aa, Artificial sequence
  Protein classification predicting sequence
HGEVCPAGW

SEQ ID NO: 10962 - protein, 8 aa, Artificial sequence
  Protein classification predicting sequence
PGSDTIKP

SEQ ID NO: 10963 - protein, 7 aa, Artificial sequence
  Protein classification predicting sequence
RGLFIID

SEQ ID NO: 10964 - protein, 20 aa, Artificial sequence
  Protein classification predicting sequence
PGAFTPGCSKTHLPGFVEQA

SEQ ID NO: 10965 - protein, 13 aa, Artificial sequence
  Protein classification predicting sequence
FGKETDLLLDDSL

SEQ ID NO: 10966 - protein, 12 aa, Artificial sequence
  Protein classification predicting sequence
FGNRRLKRFSMV

SEQ ID NO: 10967 - protein, 9 aa, Artificial sequence
  Protein classification predicting sequence
KVNLAELFK

SEQ ID NO: 10968 - protein, 10 aa, Artificial sequence
  Protein classification predicting sequence
HLAWINTPRK

SEQ ID NO: 10969 - protein, 9 aa, Artificial sequence
  Protein classification predicting sequence
NDLPVGRSV

SEQ ID NO: 10970 - protein, 23 aa, Artificial sequence
  Protein classification predicting sequence
RVPLGVVGMIYEARPNVTVDAAT

SEQ ID NO: 10971 - protein, 8 aa, Artificial sequence
  Protein classification predicting sequence
GNAVILRG

SEQ ID NO: 10972 - protein, 6 aa, Artificial sequence
  Protein classification predicting sequence
SNKALV

SEQ ID NO: 10973 - protein, 19 aa, Artificial sequence
  Protein classification predicting sequence
GAEIGISTQKLHARGPMGL

SEQ ID NO: 10974 - protein, 6 aa, Artificial sequence
  Protein classification predicting sequence
GNGQIR

SEQ ID NO: 10975 - protein, 11 aa, Artificial sequence
  Protein classification predicting sequence
YHNASTRFTDG

SEQ ID NO: 10976 - protein, 6 aa, Artificial sequence
  Protein classification predicting sequence
IKHLDG

SEQ ID NO: 10977 - protein, 6 aa, Artificial sequence
  Protein classification predicting sequence
ATEEDW

SEQ ID NO: 10978 - protein, 6 aa, Artificial sequence
  Protein classification predicting sequence
NASTRF

SEQ ID NO: 10979 - protein, 8 aa, Artificial sequence
  Protein classification predicting sequence
HARGPVGL

SEQ ID NO: 10980 - protein, 12 aa, Artificial sequence
  Protein classification predicting sequence
HARGPVGLEGLT

SEQ ID NO: 10981 - protein, 7 aa, Artificial sequence
  Protein classification predicting sequence
WDRPNGL

SEQ ID NO: 10982 - protein, 44 aa, Artificial sequence
  Protein classification predicting sequence
IERVRTPLGVIGVIYESRPNVTADAGALCLKAGNAVILRGGSDS

SEQ ID NO: 10983 - protein, 7 aa, Artificial sequence
  Protein classification predicting sequence
TDRAAVG

SEQ ID NO: 10984 - protein, 11 aa, Artificial sequence
  Protein classification predicting sequence
DVIVPRGGKSL

SEQ ID NO: 10985 - protein, 8 aa, Artificial sequence
  Protein classification predicting sequence
AAETLLVD

SEQ ID NO: 10986 - protein, 8 aa, Artificial sequence
  Protein classification predicting sequence
VDGISGAI

SEQ ID NO: 10987 - protein, 7 aa, Artificial sequence
  Protein classification predicting sequence
YIDKSAD

SEQ ID NO: 10988 - protein, 9 aa, Artificial sequence
  Protein classification predicting sequence
RGPVGLEGL

SEQ ID NO: 10989 - protein, 7 aa, Artificial sequence
  Protein classification predicting sequence
RVPLGVI

SEQ ID NO: 10990 - protein, 6 aa, Artificial sequence
  Protein classification predicting sequence
IPRGGE

SEQ ID NO: 10991 - protein, 8 aa, Artificial sequence
  Protein classification predicting sequence
AIITENYT

SEQ ID NO: 10992 - protein, 6 aa, Artificial sequence
  Protein classification predicting sequence
HARGPM

SEQ ID NO: 10993 - protein, 6 aa, Artificial sequence
  Protein classification predicting sequence
DAAALC

SEQ ID NO: 10994 - protein, 6 aa, Artificial sequence
  Protein classification predicting sequence
NAKTQR

SEQ ID NO: 10995 - protein, 7 aa, Artificial sequence
  Protein classification predicting sequence
RYGTCNT

SEQ ID NO: 10996 - protein, 17 aa, Artificial sequence
  Protein classification predicting sequence
IVLASEEDWGTEFLSLT

SEQ ID NO: 10997 - protein, 12 aa, Artificial sequence
  Protein classification predicting sequence
GAEIGISTQKLH

SEQ ID NO: 10998 - protein, 6 aa, Artificial sequence
  Protein classification predicting sequence
RGPMGL

SEQ ID NO: 10999 - protein, 9 aa, Artificial sequence
  Protein classification predicting sequence
ARELVLKST

SEQ ID NO: 11000 - protein, 10 aa, Artificial sequence
  Protein classification predicting sequence
ETAYILEENK

SEQ ID NO: 11001 - protein, 20 aa, Artificial sequence
  Protein classification predicting sequence
DIEEGKAKGFSDSLLDRLML

SEQ ID NO: 11002 - protein, 30 aa, Artificial sequence
  Protein classification predicting sequence
VILRGSSSAIHSNKAIVAVIHRALKQTSLP

SEQ ID NO: 11003 - protein, 56 aa, Artificial sequence
  Protein classification predicting sequence
ESVQLIEDTTRDSAKQLFTMNDYLDVLIPRGGKQLIDTVVREASVPVLETGAGNCH

SEQ ID NO: 11004 - protein, 11 aa, Artificial sequence
  Protein classification predicting sequence
FIDETADKQMA

SEQ ID NO: 11005 - protein, 7 aa, Artificial sequence
  Protein classification predicting sequence
KQMAIDI

SEQ ID NO: 11006 - protein, 9 aa, Artificial sequence
  Protein classification predicting sequence
RGVELRGDQ

SEQ ID NO: 11007 - protein, 8 aa, Artificial sequence
  Protein classification predicting sequence
GVIGIIYE

SEQ ID NO: 11008 - protein, 9 aa, Artificial sequence
  Protein classification predicting sequence
VDLIIPRGS

SEQ ID NO: 11009 - protein, 12 aa, Artificial sequence
  Protein classification predicting sequence
NDYLDVLIPRGG

SEQ ID NO: 11010 - protein, 8 aa, Artificial sequence
  Protein classification predicting sequence
DVLIPRGG

SEQ ID NO: 11011 - protein, 7 aa, Artificial sequence
  Protein classification predicting sequence
VPVLETG

SEQ ID NO: 11012 - protein, 8 aa, Artificial sequence
  Protein classification predicting sequence
ETGVGNCH

SEQ ID NO: 11013 - protein, 8 aa, Artificial sequence
  Protein classification predicting sequence
RPNVTVDA

SEQ ID NO: 11014 - protein, 7 aa, Artificial sequence
  Protein classification predicting sequence
GNCHVYV

SEQ ID NO: 11015 - protein, 7 aa, Artificial sequence
  Protein classification predicting sequence
RPSVCNA

SEQ ID NO: 11016 - protein, 8 aa, Artificial sequence
  Protein classification predicting sequence
DWSTEYLD

SEQ ID NO: 11017 - protein, 7 aa, Artificial sequence
  Protein classification predicting sequence
VQLIEDT

SEQ ID NO: 11018 - protein, 6 aa, Artificial sequence
  Protein classification predicting sequence
LTSTKY

SEQ ID NO: 11019 - protein, 6 aa, Artificial sequence
  Protein classification predicting sequence
TSYKWV

SEQ ID NO: 11020 - protein, 6 aa, Artificial sequence
  Protein classification predicting sequence
DPVGQV

SEQ ID NO: 11021 - protein, 9 aa, Artificial sequence
  Protein classification predicting sequence
DVIVPRGGK

SEQ ID NO: 11022 - protein, 6 aa, Artificial sequence
  Protein classification predicting sequence
RRTGIC

SEQ ID NO: 11023 - protein, 20 aa, Artificial sequence
  Protein classification predicting sequence
DSAILLHNASTQFADGGEFG

SEQ ID NO: 11024 - protein, 7 aa, Artificial sequence
  Protein classification predicting sequence
KMHARGP

SEQ ID NO: 11025 - protein, 8 aa, Artificial sequence
  Protein classification predicting sequence
GVEQLTSF

SEQ ID NO: 11026 - protein, 6 aa, Artificial sequence
  Protein classification predicting sequence
IYESRP

SEQ ID NO: 11027 - protein, 8 aa, Artificial sequence
  Protein classification predicting sequence
RRTGICGA

SEQ ID NO: 11028 - protein, 11 aa, Artificial sequence
  Protein classification predicting sequence
IYEARPNVTVD

SEQ ID NO: 11029 - protein, 7 aa, Artificial sequence
  Protein classification predicting sequence
PRGGAGL

SEQ ID NO: 11030 - protein, 6 aa, Artificial sequence
  Protein classification predicting sequence
GISTQK

SEQ ID NO: 11031 - protein, 8 aa, Artificial sequence
  Protein classification predicting sequence
HARGPMGL

SEQ ID NO: 11032 - protein, 6 aa, Artificial sequence
  Protein classification predicting sequence
ESRPNV

SEQ ID NO: 11033 - protein, 8 aa, Artificial sequence
  Protein classification predicting sequence
TEYLDAII

SEQ ID NO: 11034 - protein, 9 aa, Artificial sequence
  Protein classification predicting sequence
GAEIGIATG

SEQ ID NO: 11035 - protein, 10 aa, Artificial sequence
  Protein classification predicting sequence
EQLTSFKYRV

SEQ ID NO: 11036 - protein, 43 aa, Artificial sequence
  Protein classification predicting sequence
QMRVPLGVIGIIYESRPNVTIDAAALCLKSGNATILRGGSEAL

SEQ ID NO: 11037 - protein, 7 aa, Artificial sequence
  Protein classification predicting sequence
KLHARGP

SEQ ID NO: 11038 - protein, 6 aa, Artificial sequence
  Protein classification predicting sequence
FDTEWL

SEQ ID NO: 11039 - protein, 8 aa, Artificial sequence
  Protein classification predicting sequence
TEYLAPIL

SEQ ID NO: 11040 - protein, 8 aa, Artificial sequence
  Protein classification predicting sequence
GAEIGIAT

SEQ ID NO: 11041 - protein, 7 aa, Artificial sequence
  Protein classification predicting sequence
HARGPVG

SEQ ID NO: 11042 - protein, 9 aa, Artificial sequence
  Protein classification predicting sequence
AAADAILEA

SEQ ID NO: 11043 - protein, 6 aa, Artificial sequence
  Protein classification predicting sequence
DRLLLN

SEQ ID NO: 11044 - protein, 8 aa, Artificial sequence
  Protein classification predicting sequence
PVIETGAG

SEQ ID NO: 11045 - protein, 15 aa, Artificial sequence
  Protein classification predicting sequence
PVIETGAGIVHTYFD

SEQ ID NO: 11046 - protein, 7 aa, Artificial sequence
  Protein classification predicting sequence
STAFTDG

SEQ ID NO: 11047 - protein, 29 aa, Artificial sequence
  Protein classification predicting sequence
STAFTDGAQFGLGAEIGISTQKLHARGPM

SEQ ID NO: 11048 - protein, 8 aa, Artificial sequence
  Protein classification predicting sequence
ILRGGSEA

SEQ ID NO: 11049 - protein, 10 aa, Artificial sequence
  Protein classification predicting sequence
VDVIVPRGGK

SEQ ID NO: 11050 - protein, 6 aa, Artificial sequence
  Protein classification predicting sequence
DPIGEV

SEQ ID NO: 11051 - protein, 7 aa, Artificial sequence
  Protein classification predicting sequence
VPVIETG

SEQ ID NO: 11052 - protein, 8 aa, Artificial sequence
  Protein classification predicting sequence
DAAALCLK

SEQ ID NO: 11053 - protein, 14 aa, Artificial sequence
  Protein classification predicting sequence
AAVYVNASTRFTDG

SEQ ID NO: 11054 - protein, 7 aa, Artificial sequence
  Protein classification predicting sequence
NAKTQRP

SEQ ID NO: 11055 - protein, 8 aa, Artificial sequence
  Protein classification predicting sequence
YEARPNVT

SEQ ID NO: 11056 - protein, 11 aa, Artificial sequence
  Protein classification predicting sequence
DIAVAVVDGVD

SEQ ID NO: 11057 - protein, 11 aa, Artificial sequence
  Protein classification predicting sequence
IYESRPNVTID

SEQ ID NO: 11058 - protein, 11 aa, Artificial sequence
  Protein classification predicting sequence
ASEEDWGTEFL

SEQ ID NO: 11059 - protein, 10 aa, Artificial sequence
  Protein classification predicting sequence
GNAVILRGGS

SEQ ID NO: 11060 - protein, 7 aa, Artificial sequence
  Protein classification predicting sequence
NAKVQRP

SEQ ID NO: 11061 - protein, 7 aa, Artificial sequence
  Protein classification predicting sequence
VNASSRF

SEQ ID NO: 11062 - protein, 16 aa, Artificial sequence
  Protein classification predicting sequence
EKNRVLEKIADELEAQ

SEQ ID NO: 11063 - protein, 16 aa, Artificial sequence
  Protein classification predicting sequence
LDSGLRLERRRVPLGV

SEQ ID NO: 11064 - protein, 7 aa, Artificial sequence
  Protein classification predicting sequence
RTNAATV

SEQ ID NO: 11065 - protein, 10 aa, Artificial sequence
  Protein classification predicting sequence
AVQAIDNPDR

SEQ ID NO: 11066 - protein, 21 aa, Artificial sequence
  Protein classification predicting sequence
SFLPALSKQMAESGVTLHADA

SEQ ID NO: 11067 - protein, 6 aa, Artificial sequence
  Protein classification predicting sequence
RADERA

SEQ ID NO: 11068 - protein, 11 aa, Artificial sequence
  Protein classification predicting sequence
VKVVDSLDEAI

SEQ ID NO: 11069 - protein, 7 aa, Artificial sequence
  Protein classification predicting sequence
VDAAAVY

SEQ ID NO: 11070 - protein, 9 aa, Artificial sequence
  Protein classification predicting sequence
NASTRFTDG

SEQ ID NO: 11071 - protein, 13 aa, Artificial sequence
  Protein classification predicting sequence
GMSEALLDRLLLT

SEQ ID NO: 11072 - protein, 7 aa, Artificial sequence
  Protein classification predicting sequence
HSDAILT

SEQ ID NO: 11073 - protein, 9 aa, Artificial sequence
  Protein classification predicting sequence
ALTTYKWIG

SEQ ID NO: 11074 - protein, 8 aa, Artificial sequence
  Protein classification predicting sequence
FTDGEQFG

SEQ ID NO: 11075 - protein, 6 aa, Artificial sequence
  Protein classification predicting sequence
DPVGEV

SEQ ID NO: 11076 - protein, 7 aa, Artificial sequence
  Protein classification predicting sequence
HTEAIVT

SEQ ID NO: 11077 - protein, 7 aa, Artificial sequence
  Protein classification predicting sequence
STRFADG

SEQ ID NO: 11078 - protein, 11 aa, Artificial sequence
  Protein classification predicting sequence
LGLGAEIGIST

SEQ ID NO: 11079 - protein, 7 aa, Artificial sequence
  Protein classification predicting sequence
LCLKSGN

SEQ ID NO: 11080 - protein, 6 aa, Artificial sequence
  Protein classification predicting sequence
IVINAK

SEQ ID NO: 11081 - protein, 16 aa, Artificial sequence
  Protein classification predicting sequence
DAAAVYVNASTRFTDG

SEQ ID NO: 11082 - protein, 8 aa, Artificial sequence
  Protein classification predicting sequence
AANQKDLA

SEQ ID NO: 11083 - protein, 7 aa, Artificial sequence
  Protein classification predicting sequence
ADDFDTE

SEQ ID NO: 11084 - protein, 10 aa, Artificial sequence
  Protein classification predicting sequence
YVDMIIPRGG

SEQ ID NO: 11085 - protein, 12 aa, Artificial sequence
  Protein classification predicting sequence
NAKTQRPSTCNT

SEQ ID NO: 11086 - protein, 9 aa, Artificial sequence
  Protein classification predicting sequence
IYESRPNVT

SEQ ID NO: 11087 - protein, 9 aa, Artificial sequence
  Protein classification predicting sequence
IYEARPNVT

SEQ ID NO: 11088 - protein, 7 aa, Artificial sequence
  Protein classification predicting sequence
LCFKSGN

SEQ ID NO: 11089 - protein, 7 aa, Artificial sequence
  Protein classification predicting sequence
GNAVILR

SEQ ID NO: 11090 - protein, 9 aa, Artificial sequence
  Protein classification predicting sequence
GPMGLEALT

SEQ ID NO: 11091 - protein, 16 aa, Artificial sequence
  Protein classification predicting sequence
TNLDGLKILQKRVPLG

SEQ ID NO: 11092 - protein, 7 aa, Artificial sequence
  Protein classification predicting sequence
LCFKTGN

SEQ ID NO: 11093 - protein, 10 aa, Artificial sequence
  Protein classification predicting sequence
EFRADERALK

SEQ ID NO: 11094 - protein, 31 aa, Artificial sequence
  Protein classification predicting sequence
DAAAVYVNASTRFTDGFVFGLGAEIGISTQK

SEQ ID NO: 11095 - protein, 13 aa, Artificial sequence
  Protein classification predicting sequence
FGLGAEIGISTQK

SEQ ID NO: 11096 - protein, 7 aa, Artificial sequence
  Protein classification predicting sequence
DVLIPRG

SEQ ID NO: 11097 - protein, 7 aa, Artificial sequence
  Protein classification predicting sequence
ARLIQTV

SEQ ID NO: 11098 - protein, 6 aa, Artificial sequence
  Protein classification predicting sequence
HSEAII

SEQ ID NO: 11099 - protein, 11 aa, Artificial sequence
  Protein classification predicting sequence
IYEARPNVTID

SEQ ID NO: 11100 - protein, 15 aa, Artificial sequence
  Protein classification predicting sequence
GISTQKLHARGPMGL

SEQ ID NO: 11101 - protein, 11 aa, Artificial sequence
  Protein classification predicting sequence
PRGGEGLIRFV

SEQ ID NO: 11102 - protein, 10 aa, Artificial sequence
  Protein classification predicting sequence
KLHVRGPMGL

SEQ ID NO: 11103 - protein, 15 aa, Artificial sequence
  Protein classification predicting sequence
DVLIPRGGAKLIQTV

SEQ ID NO: 11104 - protein, 10 aa, Artificial sequence
  Protein classification predicting sequence
IDGGVLDSGL

SEQ ID NO: 11105 - protein, 7 aa, Artificial sequence
  Protein classification predicting sequence
DLIIPRG

SEQ ID NO: 11106 - protein, 6 aa, Artificial sequence
  Protein classification predicting sequence
KTQRPS

SEQ ID NO: 11107 - protein, 9 aa, Artificial sequence
  Protein classification predicting sequence
YVDLLIPRG

SEQ ID NO: 11108 - protein, 7 aa, Artificial sequence
  Protein classification predicting sequence
DLLIPRG

SEQ ID NO: 11109 - protein, 7 aa, Artificial sequence
  Protein classification predicting sequence
DWDTEYL

SEQ ID NO: 11110 - protein, 13 aa, Artificial sequence
  Protein classification predicting sequence
LHARGPVGLEGLT

SEQ ID NO: 11111 - protein, 34 aa, Artificial sequence
  Protein classification predicting sequence
GEVLRGYTLPNGLQLRQQRVPLGVVGMIYEGRPN

SEQ ID NO: 11112 - protein, 18 aa, Artificial sequence
  Protein classification predicting sequence
KSGNAALLRGSSSAAKSN

SEQ ID NO: 11113 - protein, 6 aa, Artificial sequence
  Protein classification predicting sequence
IPRGGA

SEQ ID NO: 11114 - protein, 9 aa, Artificial sequence
  Protein classification predicting sequence
AVVRDAQVP

SEQ ID NO: 11115 - protein, 12 aa, Artificial sequence
  Protein classification predicting sequence
RPSVCNAAETLL

SEQ ID NO: 11116 - protein, 8 aa, Artificial sequence
  Protein classification predicting sequence
FTDGGQFG

SEQ ID NO: 11117 - protein, 12 aa, Artificial sequence
  Protein classification predicting sequence
EVHDAARRARVA

SEQ ID NO: 11118 - protein, 6 aa, Artificial sequence
  Protein classification predicting sequence
RPSVCN

SEQ ID NO: 11119 - protein, 6 aa, Artificial sequence
  Protein classification predicting sequence
QLIEDT

SEQ ID NO: 11120 - protein, 7 aa, Artificial sequence
  Protein classification predicting sequence
FLREVDS

SEQ ID NO: 11121 - protein, 15 aa, Artificial sequence
  Protein classification predicting sequence
DKLHARGPVGLEGLT

SEQ ID NO: 11122 - protein, 8 aa, Artificial sequence
  Protein classification predicting sequence
AARRARVA

SEQ ID NO: 11123 - protein, 9 aa, Artificial sequence
  Protein classification predicting sequence
IETGTGNCH

SEQ ID NO: 11124 - protein, 17 aa, Artificial sequence
  Protein classification predicting sequence
GAEIGISTQKLHARGPM

SEQ ID NO: 11125 - protein, 10 aa, Artificial sequence
  Protein classification predicting sequence
YLDVLIPRGG

SEQ ID NO: 11126 - protein, 17 aa, Artificial sequence
  Protein classification predicting sequence
YLDVLIPRGGKQLIDTV

SEQ ID NO: 11127 - protein, 6 aa, Artificial sequence
  Protein classification predicting sequence
GNCHVY

SEQ ID NO: 11128 - protein, 6 aa, Artificial sequence
  Protein classification predicting sequence
DVRQVC

SEQ ID NO: 11129 - protein, 20 aa, Artificial sequence
  Protein classification predicting sequence
RRRVPLGVVGVIYEARPNVT

SEQ ID NO: 11130 - protein, 6 aa, Artificial sequence
  Protein classification predicting sequence
STQKLH

SEQ ID NO: 11131 - protein, 12 aa, Artificial sequence
  Protein classification predicting sequence
ALAIIADELEAN

SEQ ID NO: 11132 - protein, 41 aa, Artificial sequence
  Protein classification predicting sequence
LSRRRVPLGVVGVIYEARPNVTIDIAALCLKTGNASILRGG

SEQ ID NO: 11133 - protein, 9 aa, Artificial sequence
  Protein classification predicting sequence
GDFDTEWLS

SEQ ID NO: 11134 - protein, 51 aa, Artificial sequence
  Protein classification predicting sequence
AGSAAVYVNASTRFTDGAQFGLGAEVAVSTQKLHARGPMGLEELTSYKWVG

SEQ ID NO: 11135 - protein, 7 aa, Artificial sequence
  Protein classification predicting sequence
DRLTLTP

SEQ ID NO: 11136 - protein, 12 aa, Artificial sequence
  Protein classification predicting sequence
NAKTQRPSVCNA

SEQ ID NO: 11137 - protein, 6 aa, Artificial sequence
  Protein classification predicting sequence
HTEAIV

SEQ ID NO: 11138 - protein, 9 aa, Artificial sequence
  Protein classification predicting sequence
SLAIRSGNG

SEQ ID NO: 11139 - protein, 11 aa, Artificial sequence
  Protein classification predicting sequence
LIIPRGSNELV

SEQ ID NO: 11140 - protein, 11 aa, Artificial sequence
  Protein classification predicting sequence
VELRGDAATRA

SEQ ID NO: 11141 - protein, 7 aa, Artificial sequence
  Protein classification predicting sequence
HINTYGS

SEQ ID NO: 11142 - protein, 9 aa, Artificial sequence
  Protein classification predicting sequence
VQVVETTDR

SEQ ID NO: 11143 - protein, 8 aa, Artificial sequence
  Protein classification predicting sequence
DVIVPRGG

SEQ ID NO: 11144 - protein, 6 aa, Artificial sequence
  Protein classification predicting sequence
GSHHTD

SEQ ID NO: 11145 - protein, 8 aa, Artificial sequence
  Protein classification predicting sequence
EVDSASVM

SEQ ID NO: 11146 - protein, 17 aa, Artificial sequence
  Protein classification predicting sequence
FADGFEYGLGAEIGIST

SEQ ID NO: 11147 - protein, 8 aa, Artificial sequence
  Protein classification predicting sequence
RLALTPAR

SEQ ID NO: 11148 - protein, 16 aa, Artificial sequence
  Protein classification predicting sequence
FADGFEYGLGAEIGIS

SEQ ID NO: 11149 - protein, 9 aa, Artificial sequence
  Protein classification predicting sequence
GLGAEIGIS

SEQ ID NO: 11150 - protein, 16 aa, Artificial sequence
  Protein classification predicting sequence
TDRAAVGEMLKGLGGA

SEQ ID NO: 11151 - protein, 18 aa, Artificial sequence
  Protein classification predicting sequence
CGAAETLLVDRAVASTHL

SEQ ID NO: 11152 - protein, 63 aa, Artificial sequence
  Protein classification predicting sequence
RFFNEIDSAILLHNASTQFADGGEFGMGAEIGIATGKMHARGPVGVEQLTSFKYRVRGSGQVR

SEQ ID NO: 11153 - protein, 12 aa, Artificial sequence
  Protein classification predicting sequence
EARVPVFAHLEG

SEQ ID NO: 11154 - protein, 6 aa, Artificial sequence
  Protein classification predicting sequence
CHIYVD

SEQ ID NO: 11155 - protein, 7 aa, Artificial sequence
  Protein classification predicting sequence
HTDAIVT

SEQ ID NO: 11156 - protein, 8 aa, Artificial sequence
  Protein classification predicting sequence
AIVAEDAQ

SEQ ID NO: 11157 - protein, 11 aa, Artificial sequence
  Protein classification predicting sequence
GVIYEARPNVT

SEQ ID NO: 11158 - protein, 13 aa, Artificial sequence
  Protein classification predicting sequence
LSKQMAESGVTLH

SEQ ID NO: 11159 - protein, 67 aa, Artificial sequence
  Protein classification predicting sequence
EKNRVLEKIADELEAQMESILSANVQDVEQARANGLSEAMLDRLALTPARLKAIADDVRQVCNLADP

SEQ ID NO: 11160 - protein, 14 aa, Artificial sequence
  Protein classification predicting sequence
IADDVRQVCNLADP

SEQ ID NO: 11161 - protein, 9 aa, Artificial sequence
  Protein classification predicting sequence
VIQKALKAC

SEQ ID NO: 11162 - protein, 17 aa, Artificial sequence
  Protein classification predicting sequence
LPEAAVQAIDNPDRSLV

SEQ ID NO: 11163 - protein, 21 aa, Artificial sequence
  Protein classification predicting sequence
DVASLCLKTGNAVILRGGKET

SEQ ID NO: 11164 - protein, 13 aa, Artificial sequence
  Protein classification predicting sequence
STQKLHARGPMGL

SEQ ID NO: 11165 - protein, 6 aa, Artificial sequence
  Protein classification predicting sequence
AANAKD

SEQ ID NO: 11166 - protein, 5 aa, Artificial sequence
  Protein classification predicting sequence
DPVGE

SEQ ID NO: 11167 - protein, 8 aa, Artificial sequence
  Protein classification predicting sequence
RRRVPLGV

SEQ ID NO: 11168 - protein, 6 aa, Artificial sequence
  Protein classification predicting sequence
GICHLY

SEQ ID NO: 11169 - protein, 7 aa, Artificial sequence
  Protein classification predicting sequence
CNALDTL

SEQ ID NO: 11170 - protein, 22 aa, Artificial sequence
  Protein classification predicting sequence
ARANGLSEAMLDRLALTPARLK

SEQ ID NO: 11171 - protein, 7 aa, Artificial sequence
  Protein classification predicting sequence
QLTSFKY

SEQ ID NO: 11172 - protein, 6 aa, Artificial sequence
  Protein classification predicting sequence
DPIGQV

SEQ ID NO: 11173 - protein, 29 aa, Artificial sequence
  Protein classification predicting sequence
KRVPLGVIAMIFESRPNVSVDAFSLAFKT

SEQ ID NO: 11174 - protein, 8 aa, Artificial sequence
  Protein classification predicting sequence
NAIILRGG

SEQ ID NO: 11175 - protein, 11 aa, Artificial sequence
  Protein classification predicting sequence
NAIILRGGKDA

SEQ ID NO: 11176 - protein, 30 aa, Artificial sequence
  Protein classification predicting sequence
VAEELMQATDYVDVLIPRGGAKLIQTVKEK

SEQ ID NO: 11177 - protein, 9 aa, Artificial sequence
  Protein classification predicting sequence
PVIETGVGN

SEQ ID NO: 11178 - protein, 9 aa, Artificial sequence
  Protein classification predicting sequence
RPSVCNAAE

SEQ ID NO: 11179 - protein, 9 aa, Artificial sequence
  Protein classification predicting sequence
QSVEFRADE

SEQ ID NO: 11180 - protein, 16 aa, Artificial sequence
  Protein classification predicting sequence
ATEFLDYIMSVKVVDS

SEQ ID NO: 11181 - protein, 8 aa, Artificial sequence
  Protein classification predicting sequence
GHTEAIVT

SEQ ID NO: 11182 - protein, 12 aa, Artificial sequence
  Protein classification predicting sequence
DPIGQVVRGYTN

SEQ ID NO: 11183 - protein, 7 aa, Artificial sequence
  Protein classification predicting sequence
LIPRGGA

SEQ ID NO: 11184 - protein, 7 aa, Artificial sequence
  Protein classification predicting sequence
TEFLDYI

SEQ ID NO: 11185 - protein, 15 aa, Artificial sequence
  Protein classification predicting sequence
HARGPMGLEALTSTK

SEQ ID NO: 11186 - protein, 12 aa, Artificial sequence
  Protein classification predicting sequence
HARGPMGLEALT

SEQ ID NO: 11187 - protein, 20 aa, Artificial sequence
  Protein classification predicting sequence
HARGPMGLEALTSTKFYING

SEQ ID NO: 11188 - protein, 13 aa, Artificial sequence
  Protein classification predicting sequence
TEFLDYIMSVKVV

SEQ ID NO: 11189 - protein, 14 aa, Artificial sequence
  Protein classification predicting sequence
SNKALVKLIRQSLE

SEQ ID NO: 11190 - protein, 10 aa, Artificial sequence
  Protein classification predicting sequence
GAEIGISTQK

SEQ ID NO: 11191 - protein, 7 aa, Artificial sequence
  Protein classification predicting sequence
IVINAKT

SEQ ID NO: 11192 - protein, 10 aa, Artificial sequence
  Protein classification predicting sequence
AVVLRSGKDA

SEQ ID NO: 11193 - protein, 9 aa, Artificial sequence
  Protein classification predicting sequence
VPVIETGTG

SEQ ID NO: 11194 - protein, 12 aa, Artificial sequence
  Protein classification predicting sequence
VPVIETGTGIVH

SEQ ID NO: 11195 - protein, 10 aa, Artificial sequence
  Protein classification predicting sequence
VKVVSSLEEA

SEQ ID NO: 11196 - protein, 19 aa, Artificial sequence
  Protein classification predicting sequence
AVYVNASTRFTDGGQFGLG

SEQ ID NO: 11197 - protein, 26 aa, Artificial sequence
  Protein classification predicting sequence
KKRVAMGVIGIIYESRPNVTSDAAAL

SEQ ID NO: 11198 - protein, 30 aa, Artificial sequence
  Protein classification predicting sequence
FGLGCEMGISTQKLHARGPMGLKELTSYKY

SEQ ID NO: 11199 - protein, 14 aa, Artificial sequence
  Protein classification predicting sequence
GVIAMIFESRPNVS

SEQ ID NO: 11200 - protein, 7 aa, Artificial sequence
  Protein classification predicting sequence
DEAIEHI

SEQ ID NO: 11201 - protein, 9 aa, Artificial sequence
  Protein classification predicting sequence
GAEIGISTQ

SEQ ID NO: 11202 - protein, 9 aa, Artificial sequence
  Protein classification predicting sequence
VGRMRVPLG

SEQ ID NO: 11203 - protein, 6 aa, Artificial sequence
  Protein classification predicting sequence
IYEARP

SEQ ID NO: 11204 - protein, 7 aa, Artificial sequence
  Protein classification predicting sequence
LVPTTDR

SEQ ID NO: 11205 - protein, 10 aa, Artificial sequence
  Protein classification predicting sequence
GLGAEIGIST

SEQ ID NO: 11206 - protein, 12 aa, Artificial sequence
  Protein classification predicting sequence
HARGPMGLKELT

SEQ ID NO: 11207 - protein, 6 aa, Artificial sequence
  Protein classification predicting sequence
VYVNAS

SEQ ID NO: 11208 - protein, 8 aa, Artificial sequence
  Protein classification predicting sequence
LCLKTGNA

SEQ ID NO: 11209 - protein, 7 aa, Artificial sequence
  Protein classification predicting sequence
QRPSACN

SEQ ID NO: 11210 - protein, 17 aa, Artificial sequence
  Protein classification predicting sequence
GDFDTEWLSYTLGVKVV

SEQ ID NO: 11211 - protein, 7 aa, Artificial sequence
  Protein classification predicting sequence
HNASHSD

SEQ ID NO: 11212 - protein, 45 aa, Artificial sequence
  Protein classification predicting sequence
TRFTDGAQFGLGAEVAVSTQKLHARGPMGLEELTSYKWVGKANYL

SEQ ID NO: 11213 - protein, 10 aa, Artificial sequence
  Protein classification predicting sequence
GLSEAMLDRL

SEQ ID NO: 11214 - protein, 8 aa, Artificial sequence
  Protein classification predicting sequence
ARVPVIKH

SEQ ID NO: 11215 - protein, 6 aa, Artificial sequence
  Protein classification predicting sequence
VMVNAS

SEQ ID NO: 11216 - protein, 31 aa, Artificial sequence
  Protein classification predicting sequence
RVPLGVIAMIYEARPNVTADAAALCIKAGNG

SEQ ID NO: 11217 - protein, 17 aa, Artificial sequence
  Protein classification predicting sequence
IPRGGEGLIRFVAEHAR

SEQ ID NO: 11218 - protein, 11 aa, Artificial sequence
  Protein classification predicting sequence
ALTVERFVVRG

SEQ ID NO: 11219 - protein, 20 aa, Artificial sequence
  Protein classification predicting sequence
STRFADGFRYGFGAEVGIST

SEQ ID NO: 11220 - protein, 22 aa, Artificial sequence
  Protein classification predicting sequence
LHKLCREQSTIPVITGGIGVCH

SEQ ID NO: 11221 - protein, 7 aa, Artificial sequence
  Protein classification predicting sequence
HIREHGT

SEQ ID NO: 11222 - protein, 37 aa, Artificial sequence
  Protein classification predicting sequence
AVYVNASTRFTDGGQFGLGAEVAVSTQKLHARGPMGL

SEQ ID NO: 11223 - protein, 7 aa, Artificial sequence
  Protein classification predicting sequence
AIHSNKA

SEQ ID NO: 11224 - protein, 7 aa, Artificial sequence
  Protein classification predicting sequence
SGSSPAY

SEQ ID NO: 11225 - protein, 8 aa, Artificial sequence
  Protein classification predicting sequence
LLGAAKML

SEQ ID NO: 11226 - protein, 6 aa, Artificial sequence
  Protein classification predicting sequence
GQKCSA

SEQ ID NO: 11227 - protein, 6 aa, Artificial sequence
  Protein classification predicting sequence
YGLTGA

SEQ ID NO: 11228 - protein, 7 aa, Artificial sequence
  Protein classification predicting sequence
PLVINGE

SEQ ID NO: 11229 - protein, 10 aa, Artificial sequence
  Protein classification predicting sequence
SVAGMSIDEN

SEQ ID NO: 11230 - protein, 22 aa, Artificial sequence
  Protein classification predicting sequence
GITELNLSCPNVPGKPQVAYDF

SEQ ID NO: 11231 - protein, 9 aa, Artificial sequence
  Protein classification predicting sequence
IDVEKESVV

SEQ ID NO: 11232 - protein, 7 aa, Artificial sequence
  Protein classification predicting sequence
FFKKPLG

SEQ ID NO: 11233 - protein, 34 aa, Artificial sequence
  Protein classification predicting sequence
ESVVVKPKNGFGGIGGEYVKPTALANVRAFYTRL

SEQ ID NO: 11234 - protein, 6 aa, Artificial sequence
  Protein classification predicting sequence
AAGLDK

SEQ ID NO: 11235 - protein, 8 aa, Artificial sequence
  Protein classification predicting sequence
SNTTIQRP

SEQ ID NO: 11236 - protein, 12 aa, Artificial sequence
  Protein classification predicting sequence
FFTKPLGVKLPP

SEQ ID NO: 11237 - protein, 16 aa, Artificial sequence
  Protein classification predicting sequence
GGEYVKPTALANVRAF

SEQ ID NO: 11238 - protein, 8 aa, Artificial sequence
  Protein classification predicting sequence
FEHLLCGA

SEQ ID NO: 11239 - protein, 11 aa, Artificial sequence
  Protein classification predicting sequence
LGSINSMGLPN

SEQ ID NO: 11240 - protein, 7 aa, Artificial sequence
  Protein classification predicting sequence
GFGGIGG

SEQ ID NO: 11241 - protein, 8 aa, Artificial sequence
  Protein classification predicting sequence
YVKLSPNV

SEQ ID NO: 11242 - protein, 16 aa, Artificial sequence
  Protein classification predicting sequence
PIIGMGGVQTVDDVLE

SEQ ID NO: 11243 - protein, 6 aa, Artificial sequence
  Protein classification predicting sequence
ICPKLI

SEQ ID NO: 11244 - protein, 10 aa, Artificial sequence
  Protein classification predicting sequence
GNPTPRVAET

SEQ ID NO: 11245 - protein, 7 aa, Artificial sequence
  Protein classification predicting sequence
DLKTRKP

SEQ ID NO: 11246 - protein, 7 aa, Artificial sequence
  Protein classification predicting sequence
KPVTCMG

SEQ ID NO: 11247 - protein, 6 aa, Artificial sequence
  Protein classification predicting sequence
GNPKPR

SEQ ID NO: 11248 - protein, 9 aa, Artificial sequence
  Protein classification predicting sequence
NIGKNADTP

SEQ ID NO: 11249 - protein, 7 aa, Artificial sequence
  Protein classification predicting sequence
DDYLICL

SEQ ID NO: 11250 - protein, 9 aa, Artificial sequence
  Protein classification predicting sequence
TVNISSPNT

SEQ ID NO: 11251 - protein, 7 aa, Artificial sequence
  Protein classification predicting sequence
EAGGLSG

SEQ ID NO: 11252 - protein, 7 aa, Artificial sequence
  Protein classification predicting sequence
ELNLSCP

SEQ ID NO: 11253 - protein, 8 aa, Artificial sequence
  Protein classification predicting sequence
INRLGFNN

SEQ ID NO: 11254 - protein, 6 aa, Artificial sequence
  Protein classification predicting sequence
NTTLSR

SEQ ID NO: 11255 - protein, 8 aa, Artificial sequence
  Protein classification predicting sequence
GGLSGAPL

SEQ ID NO: 11256 - protein, 7 aa, Artificial sequence
  Protein classification predicting sequence
NRMGFNN

SEQ ID NO: 11257 - protein, 6 aa, Artificial sequence
  Protein classification predicting sequence
STEIIR

SEQ ID NO: 11258 - protein, 7 aa, Artificial sequence
  Protein classification predicting sequence
VKLSPNV

SEQ ID NO: 11259 - protein, 7 aa, Artificial sequence
  Protein classification predicting sequence
NVSSPNT

SEQ ID NO: 11260 - protein, 8 aa, Artificial sequence
  Protein classification predicting sequence
AGAVVTKS

SEQ ID NO: 11261 - protein, 7 aa, Artificial sequence
  Protein classification predicting sequence
SGPAIKP

SEQ ID NO: 11262 - protein, 8 aa, Artificial sequence
  Protein classification predicting sequence
QPGNPRPR

SEQ ID NO: 11263 - protein, 7 aa, Artificial sequence
  Protein classification predicting sequence
AGASLVQ

SEQ ID NO: 11264 - protein, 10 aa, Artificial sequence
  Protein classification predicting sequence
ELNISCPNVK

SEQ ID NO: 11265 - protein, 9 aa, Artificial sequence
  Protein classification predicting sequence
MINTLLGMR

SEQ ID NO: 11266 - protein, 9 aa, Artificial sequence
  Protein classification predicting sequence
PASGCFGFG

SEQ ID NO: 11267 - protein, 8 aa, Artificial sequence
  Protein classification predicting sequence
PIIANVAG

SEQ ID NO: 11268 - protein, 7 aa, Artificial sequence
  Protein classification predicting sequence
NISSPNT

SEQ ID NO: 11269 - protein, 6 aa, Artificial sequence
  Protein classification predicting sequence
CMGLTF

SEQ ID NO: 11270 - protein, 10 aa, Artificial sequence
  Protein classification predicting sequence
AIINRMGFNN

SEQ ID NO: 11271 - protein, 11 aa, Artificial sequence
  Protein classification predicting sequence
NISSPNTKNLR

SEQ ID NO: 11272 - protein, 11 aa, Artificial sequence
  Protein classification predicting sequence
VPLALKIAPDL

SEQ ID NO: 11273 - protein, 8 aa, Artificial sequence
  Protein classification predicting sequence
APDLTEPE

SEQ ID NO: 11274 - protein, 7 aa, Artificial sequence
  Protein classification predicting sequence
DAETAHE

SEQ ID NO: 11275 - protein, 13 aa, Artificial sequence
  Protein classification predicting sequence
NPVGLAAGLDKNG

SEQ ID NO: 11276 - protein, 19 aa, Artificial sequence
  Protein classification predicting sequence
NPVGLAAGLDKNGAHIDAL

SEQ ID NO: 11277 - protein, 8 aa, Artificial sequence
  Protein classification predicting sequence
LRQLQQGD

SEQ ID NO: 11278 - protein, 11 aa, Artificial sequence
  Protein classification predicting sequence
IDGVIATNTTL

SEQ ID NO: 11279 - protein, 6 aa, Artificial sequence
  Protein classification predicting sequence
GINIGK

SEQ ID NO: 11280 - protein, 11 aa, Artificial sequence
  Protein classification predicting sequence
NVSSPNTPGLR

SEQ ID NO: 11281 - protein, 14 aa, Artificial sequence
  Protein classification predicting sequence
NVSSPNTPGLRDLQ

SEQ ID NO: 11282 - protein, 12 aa, Artificial sequence
  Protein classification predicting sequence
LLQGYTGFIYGG

SEQ ID NO: 11283 - protein, 7 aa, Artificial sequence
  Protein classification predicting sequence
PRLFRLP

SEQ ID NO: 11284 - protein, 12 aa, Artificial sequence
  Protein classification predicting sequence
PVLVKIAPDLSD

SEQ ID NO: 11285 - protein, 14 aa, Artificial sequence
  Protein classification predicting sequence
PNPVGLAAGLDKNG

SEQ ID NO: 11286 - protein, 7 aa, Artificial sequence
  Protein classification predicting sequence
GIVATNT

SEQ ID NO: 11287 - protein, 7 aa, Artificial sequence
  Protein classification predicting sequence
EVGTVTP

SEQ ID NO: 11288 - protein, 8 aa, Artificial sequence
  Protein classification predicting sequence
INRYGFNS

SEQ ID NO: 11289 - protein, 6 aa, Artificial sequence
  Protein classification predicting sequence
NTTVSR

SEQ ID NO: 11290 - protein, 9 aa, Artificial sequence
  Protein classification predicting sequence
EALVRQKVP

SEQ ID NO: 11291 - protein, 6 aa, Artificial sequence
  Protein classification predicting sequence
HHKYVP

SEQ ID NO: 11292 - protein, 11 aa, Artificial sequence
  Protein classification predicting sequence
EEELIQVADSL

SEQ ID NO: 11293 - protein, 17 aa, Artificial sequence
  Protein classification predicting sequence
ALDDLLTAIKNKQNDLQ

SEQ ID NO: 11294 - protein, 49 aa, Artificial sequence
  Protein classification predicting sequence
EIGTVTPRPQPGNDKPRLFRLVDAEGLINRMGFNNLGVDNLVENVKKAH

SEQ ID NO: 11295 - protein, 25 aa, Artificial sequence
  Protein classification predicting sequence
RHNIDGVIATNTTLDRSLVQGMKNC

SEQ ID NO: 11296 - protein, 22 aa, Artificial sequence
  Protein classification predicting sequence
QTGGLSGRPLQLKSTEIIRRLS

SEQ ID NO: 11297 - protein, 23 aa, Artificial sequence
  Protein classification predicting sequence
LPIIGVGGIDSVIAAREKIAAGA

SEQ ID NO: 11298 - protein, 9 aa, Artificial sequence
  Protein classification predicting sequence
TFQQLRRIT

SEQ ID NO: 11299 - protein, 8 aa, Artificial sequence
  Protein classification predicting sequence
GTVTPRPQ

SEQ ID NO: 11300 - protein, 12 aa, Artificial sequence
  Protein classification predicting sequence
AEGLINRMGFNN

SEQ ID NO: 11301 - protein, 10 aa, Artificial sequence
  Protein classification predicting sequence
GVLGINIGKN

SEQ ID NO: 11302 - protein, 9 aa, Artificial sequence
  Protein classification predicting sequence
GKDDYLICM

SEQ ID NO: 11303 - protein, 6 aa, Artificial sequence
  Protein classification predicting sequence
DYLICM

SEQ ID NO: 11304 - protein, 8 aa, Artificial sequence
  Protein classification predicting sequence
AVKIAPDL

SEQ ID NO: 11305 - protein, 11 aa, Artificial sequence
  Protein classification predicting sequence
VGLAAGLDKNG

SEQ ID NO: 11306 - protein, 13 aa, Artificial sequence
  Protein classification predicting sequence
GNPQPRLFRVPEH

SEQ ID NO: 11307 - protein, 8 aa, Artificial sequence
  Protein classification predicting sequence
LGINIGKN

SEQ ID NO: 11308 - protein, 12 aa, Artificial sequence
  Protein classification predicting sequence
LGINIGKNKDTP

SEQ ID NO: 11309 - protein, 6 aa, Artificial sequence
  Protein classification predicting sequence
APDLSD

SEQ ID NO: 11310 - protein, 14 aa, Artificial sequence
  Protein classification predicting sequence
RLPESIPLIGVGGI

SEQ ID NO: 11311 - protein, 13 aa, Artificial sequence
  Protein classification predicting sequence
VVNVSSPNTPGLR

SEQ ID NO: 11312 - protein, 8 aa, Artificial sequence
  Protein classification predicting sequence
GGLSGKPL

SEQ ID NO: 11313 - protein, 6 aa, Artificial sequence
  Protein classification predicting sequence
DAEKAH

SEQ ID NO: 11314 - protein, 8 aa, Artificial sequence
  Protein classification predicting sequence
NPIGLAAG

SEQ ID NO: 11315 - protein, 11 aa, Artificial sequence
  Protein classification predicting sequence
YITVNISSPNT

SEQ ID NO: 11316 - protein, 9 aa, Artificial sequence
  Protein classification predicting sequence
DGVIATNTT

SEQ ID NO: 11317 - protein, 6 aa, Artificial sequence
  Protein classification predicting sequence
PRMFRL

SEQ ID NO: 11318 - protein, 6 aa, Artificial sequence
  Protein classification predicting sequence
FPNPVG

SEQ ID NO: 11319 - protein, 7 aa, Artificial sequence
  Protein classification predicting sequence
GGLSGAP

SEQ ID NO: 11320 - protein, 6 aa, Artificial sequence
  Protein classification predicting sequence
AAGFDK

SEQ ID NO: 11321 - protein, 7 aa, Artificial sequence
  Protein classification predicting sequence
EIGSVTP

SEQ ID NO: 11322 - protein, 7 aa, Artificial sequence
  Protein classification predicting sequence
PIIGVGG

SEQ ID NO: 11323 - protein, 8 aa, Artificial sequence
  Protein classification predicting sequence
GLTMINTL

SEQ ID NO: 11324 - protein, 8 aa, Artificial sequence
  Protein classification predicting sequence
FRIVEAEG

SEQ ID NO: 11325 - protein, 7 aa, Artificial sequence
  Protein classification predicting sequence
VVTKSIG

SEQ ID NO: 11326 - protein, 8 aa, Artificial sequence
  Protein classification predicting sequence
NAMGLPNP

SEQ ID NO: 11327 - protein, 14 aa, Artificial sequence
  Protein classification predicting sequence
NVSSPNTPGLRSLQ

SEQ ID NO: 11328 - protein, 9 aa, Artificial sequence
  Protein classification predicting sequence
SCPHAKGYG

SEQ ID NO: 11329 - protein, 6 aa, Artificial sequence
  Protein classification predicting sequence
PNVTDI

SEQ ID NO: 11330 - protein, 10 aa, Artificial sequence
  Protein classification predicting sequence
LAGIVATNTT

SEQ ID NO: 11331 - protein, 25 aa, Artificial sequence
  Protein classification predicting sequence
GPLASYLVVNVSSPNTPGLRDLQAV

SEQ ID NO: 11332 - protein, 25 aa, Artificial sequence
  Protein classification predicting sequence
TVNISSPNTKNLRALQGGDELSALL

SEQ ID NO: 11333 - protein, 6 aa, Artificial sequence
  Protein classification predicting sequence
GNPRPR

SEQ ID NO: 11334 - protein, 12 aa, Artificial sequence
  Protein classification predicting sequence
GMLNAIGLQNPG

SEQ ID NO: 11335 - protein, 6 aa, Artificial sequence
  Protein classification predicting sequence
NISSPN

SEQ ID NO: 11336 - protein, 7 aa, Artificial sequence
  Protein classification predicting sequence
LQYGEAL

SEQ ID NO: 11337 - protein, 6 aa, Artificial sequence
  Protein classification predicting sequence
KSTEII

SEQ ID NO: 11338 - protein, 9 aa, Artificial sequence
  Protein classification predicting sequence
TKPVTCMGL

SEQ ID NO: 11339 - protein, 10 aa, Artificial sequence
  Protein classification predicting sequence
GLAAGLDKDG

SEQ ID NO: 11340 - protein, 6 aa, Artificial sequence
  Protein classification predicting sequence
GFGFIE

SEQ ID NO: 11341 - protein, 9 aa, Artificial sequence
  Protein classification predicting sequence
GNDKPRLFR

SEQ ID NO: 11342 - protein, 7 aa, Artificial sequence
  Protein classification predicting sequence
AEGLINR

SEQ ID NO: 11343 - protein, 8 aa, Artificial sequence
  Protein classification predicting sequence
GFNNLGVD

SEQ ID NO: 11344 - protein, 7 aa, Artificial sequence
  Protein classification predicting sequence
TNTTLDR

SEQ ID NO: 11345 - protein, 7 aa, Artificial sequence
  Protein classification predicting sequence
IGKNKDT

SEQ ID NO: 11346 - protein, 8 aa, Artificial sequence
  Protein classification predicting sequence
NPVGLAAG

SEQ ID NO: 11347 - protein, 8 aa, Artificial sequence
  Protein classification predicting sequence
KAYAHASY

SEQ ID NO: 11348 - protein, 16 aa, Artificial sequence
  Protein classification predicting sequence
DAFELNLSCPHAKGYG

SEQ ID NO: 11349 - protein, 12 aa, Artificial sequence
  Protein classification predicting sequence
TDKPVIAKLTPN

SEQ ID NO: 11350 - protein, 7 aa, Artificial sequence
  Protein classification predicting sequence
PRMFRLP

SEQ ID NO: 11351 - protein, 10 aa, Artificial sequence
  Protein classification predicting sequence
GLPHAEEAGG

SEQ ID NO: 11352 - protein, 18 aa, Artificial sequence
  Protein classification predicting sequence
NTYENPFMNASGVHCMTT

SEQ ID NO: 11353 - protein, 34 aa, Artificial sequence
  Protein classification predicting sequence
IGTGGIKSGKDAFEHLLCGASMLQIGTELQKEGV

SEQ ID NO: 11354 - protein, 15 aa, Artificial sequence
  Protein classification predicting sequence
ELKDIMEAKGYTSID

SEQ ID NO: 11355 - protein, 15 aa, Artificial sequence
  Protein classification predicting sequence
PAIFFSVAGMSIDEN

SEQ ID NO: 11356 - protein, 8 aa, Artificial sequence
  Protein classification predicting sequence
GLRTLQYG

SEQ ID NO: 11357 - protein, 8 aa, Artificial sequence
  Protein classification predicting sequence
GCGGISSG

SEQ ID NO: 11358 - protein, 11 aa, Artificial sequence
  Protein classification predicting sequence
NIGKNKDTPVE

SEQ ID NO: 11359 - protein, 6 aa, Artificial sequence
  Protein classification predicting sequence
NIGKTK

SEQ ID NO: 11360 - protein, 15 aa, Artificial sequence
  Protein classification predicting sequence
TELNLSCPNVPGKPQ

SEQ ID NO: 11361 - protein, 12 aa, Artificial sequence
  Protein classification predicting sequence
KPLGIKLPPYFD

SEQ ID NO: 11362 - protein, 7 aa, Artificial sequence
  Protein classification predicting sequence
KLPPYFD

SEQ ID NO: 11363 - protein, 7 aa, Artificial sequence
  Protein classification predicting sequence
NSIGNGL

SEQ ID NO: 11364 - protein, 6 aa, Artificial sequence
  Protein classification predicting sequence
NVSSPN

SEQ ID NO: 11365 - protein, 7 aa, Artificial sequence
  Protein classification predicting sequence
PVGLAAG

SEQ ID NO: 11366 - protein, 7 aa, Artificial sequence
  Protein classification predicting sequence
AELGTVT

SEQ ID NO: 11367 - protein, 8 aa, Artificial sequence
  Protein classification predicting sequence
PIIGVGGI

SEQ ID NO: 11368 - protein, 6 aa, Artificial sequence
  Protein classification predicting sequence
GFGFAE

SEQ ID NO: 11369 - protein, 8 aa, Artificial sequence
  Protein classification predicting sequence
IGVGGIDS

SEQ ID NO: 11370 - protein, 11 aa, Artificial sequence
  Protein classification predicting sequence
AWERITAGASL

SEQ ID NO: 11371 - protein, 6 aa, Artificial sequence
  Protein classification predicting sequence
ALGFGF

SEQ ID NO: 11372 - protein, 6 aa, Artificial sequence
  Protein classification predicting sequence
GNPTPR

SEQ ID NO: 11373 - protein, 9 aa, Artificial sequence
  Protein classification predicting sequence
DLFYRQQLP

SEQ ID NO: 11374 - protein, 9 aa, Artificial sequence
  Protein classification predicting sequence
CMGLTFKNP

SEQ ID NO: 11375 - protein, 7 aa, Artificial sequence
  Protein classification predicting sequence
VIATNTT

SEQ ID NO: 11376 - protein, 7 aa, Artificial sequence
  Protein classification predicting sequence
LDAEKAH

SEQ ID NO: 11377 - protein, 7 aa, Artificial sequence
  Protein classification predicting sequence
AEGIINR

SEQ ID NO: 11378 - protein, 12 aa, Artificial sequence
  Protein classification predicting sequence
INRMGFNNLGVD

SEQ ID NO: 11379 - protein, 10 aa, Artificial sequence
  Protein classification predicting sequence
DYLICMEKVY

SEQ ID NO: 11380 - protein, 11 aa, Artificial sequence
  Protein classification predicting sequence
NISSPNTPGLR

SEQ ID NO: 11381 - protein, 6 aa, Artificial sequence
  Protein classification predicting sequence
YSGFIY

SEQ ID NO: 11382 - protein, 7 aa, Artificial sequence
  Protein classification predicting sequence
GINIGKN

SEQ ID NO: 11383 - protein, 11 aa, Artificial sequence
  Protein classification predicting sequence
GINIGKNKDTP

SEQ ID NO: 11384 - protein, 8 aa, Artificial sequence
  Protein classification predicting sequence
LQYGEALD

SEQ ID NO: 11385 - protein, 7 aa, Artificial sequence
  Protein classification predicting sequence
FPNPVGL

SEQ ID NO: 11386 - protein, 7 aa, Artificial sequence
  Protein classification predicting sequence
AGLDKNG

SEQ ID NO: 11387 - protein, 8 aa, Artificial sequence
  Protein classification predicting sequence
INRMGFNN

SEQ ID NO: 11388 - protein, 7 aa, Artificial sequence
  Protein classification predicting sequence
ETGGLSG

SEQ ID NO: 11389 - protein, 20 aa, Artificial sequence
  Protein classification predicting sequence
GGLSGAPLLGQSTLVLRRLR

SEQ ID NO: 11390 - protein, 12 aa, Artificial sequence
  Protein classification predicting sequence
GADAVAKMAAGA

SEQ ID NO: 11391 - protein, 11 aa, Artificial sequence
  Protein classification predicting sequence
NPVGLAAGLDK

SEQ ID NO: 11392 - protein, 8 aa, Artificial sequence
  Protein classification predicting sequence
GLAAGLDK

SEQ ID NO: 11393 - protein, 23 aa, Artificial sequence
  Protein classification predicting sequence
ADSLVRHNIDGVIATNTTLDRSL

SEQ ID NO: 11394 - protein, 6 aa, Artificial sequence
  Protein classification predicting sequence
TYIRSG

SEQ ID NO: 11395 - protein, 7 aa, Artificial sequence
  Protein classification predicting sequence
LMRAIRV

SEQ ID NO: 11396 - protein, 7 aa, Artificial sequence
  Protein classification predicting sequence
ACGVNPV

SEQ ID NO: 11397 - protein, 12 aa, Artificial sequence
  Protein classification predicting sequence
TYIRSGTYSRKP

SEQ ID NO: 11398 - protein, 8 aa, Artificial sequence
  Protein classification predicting sequence
EINPRDTM

SEQ ID NO: 11399 - protein, 17 aa, Artificial sequence
  Protein classification predicting sequence
AGESVLVHGASGGVGLA

SEQ ID NO: 11400 - protein, 12 aa, Artificial sequence
  Protein classification predicting sequence
VLQNGAHEVFNH

SEQ ID NO: 11401 - protein, 12 aa, Artificial sequence
  Protein classification predicting sequence
IEINPRDTMAKE

SEQ ID NO: 11402 - protein, 9 aa, Artificial sequence
  Protein classification predicting sequence
EAFSDSLRR

SEQ ID NO: 11403 - protein, 9 aa, Artificial sequence
  Protein classification predicting sequence
VAGLYHLVA

SEQ ID NO: 11404 - protein, 18 aa, Artificial sequence
  Protein classification predicting sequence
PTGAELLADCTAHAIRVA

SEQ ID NO: 11405 - protein, 7 aa, Artificial sequence
  Protein classification predicting sequence
CGDFSNP

SEQ ID NO: 11406 - protein, 8 aa, Artificial sequence
  Protein classification predicting sequence
ETKTMTHY

SEQ ID NO: 11407 - protein, 8 aa, Artificial sequence
  Protein classification predicting sequence
LTYAQSLD

SEQ ID NO: 11408 - protein, 7 aa, Artificial sequence
  Protein classification predicting sequence
PGLNCKW

SEQ ID NO: 11409 - protein, 6 aa, Artificial sequence
  Protein classification predicting sequence
QLSSCF

SEQ ID NO: 11410 - protein, 7 aa, Artificial sequence
  Protein classification predicting sequence
KRDGRQE

SEQ ID NO: 11411 - protein, 7 aa, Artificial sequence
  Protein classification predicting sequence
FDKITAR

SEQ ID NO: 11412 - protein, 12 aa, Artificial sequence
  Protein classification predicting sequence
LAARIAVSNLHK

SEQ ID NO: 11413 - protein, 7 aa, Artificial sequence
  Protein classification predicting sequence
IIYDRDF

SEQ ID NO: 11414 - protein, 16 aa, Artificial sequence
  Protein classification predicting sequence
VERPQHMLMRVAVGIH

SEQ ID NO: 11415 - protein, 8 aa, Artificial sequence
  Protein classification predicting sequence
GTNGTSNG

SEQ ID NO: 11416 - protein, 6 aa, Artificial sequence
  Protein classification predicting sequence
VPMLRV

SEQ ID NO: 11417 - protein, 6 aa, Artificial sequence
  Protein classification predicting sequence
LYTKYE

SEQ ID NO: 11418 - protein, 7 aa, Artificial sequence
  Protein classification predicting sequence
AVCNLAS

SEQ ID NO: 11419 - protein, 7 aa, Artificial sequence
  Protein classification predicting sequence
NLNKIID

SEQ ID NO: 11420 - protein, 14 aa, Artificial sequence
  Protein classification predicting sequence
RNSLLVAPMPTAST

SEQ ID NO: 11421 - protein, 7 aa, Artificial sequence
  Protein classification predicting sequence
QILGNNE

SEQ ID NO: 11422 - protein, 10 aa, Artificial sequence
  Protein classification predicting sequence
GLKTGMYYLR

SEQ ID NO: 11423 - protein, 9 aa, Artificial sequence
  Protein classification predicting sequence
NQNTVFFHN

SEQ ID NO: 11424 - protein, 11 aa, Artificial sequence
  Protein classification predicting sequence
DISCNLGSLNI

SEQ ID NO: 11425 - protein, 7 aa, Artificial sequence
  Protein classification predicting sequence
PTGSISY

SEQ ID NO: 11426 - protein, 7 aa, Artificial sequence
  Protein classification predicting sequence
VMTGSPF

SEQ ID NO: 11427 - protein, 8 aa, Artificial sequence
  Protein classification predicting sequence
ISLPTPIM

SEQ ID NO: 11428 - protein, 11 aa, Artificial sequence
  Protein classification predicting sequence
RTPTRQFSSCV

SEQ ID NO: 11429 - protein, 7 aa, Artificial sequence
  Protein classification predicting sequence
LLVLKNN

SEQ ID NO: 11430 - protein, 7 aa, Artificial sequence
  Protein classification predicting sequence
SNLCCEI

SEQ ID NO: 11431 - protein, 10 aa, Artificial sequence
  Protein classification predicting sequence
RNSTLSALMP

SEQ ID NO: 11432 - protein, 7 aa, Artificial sequence
  Protein classification predicting sequence
KLCYGLN

SEQ ID NO: 11433 - protein, 8 aa, Artificial sequence
  Protein classification predicting sequence
FSEVMEDL

SEQ ID NO: 11434 - protein, 10 aa, Artificial sequence
  Protein classification predicting sequence
ERPQHMLMRV

SEQ ID NO: 11435 - protein, 19 aa, Artificial sequence
  Protein classification predicting sequence
NNTARYVDQGGNKRPGAFA

SEQ ID NO: 11436 - protein, 6 aa, Artificial sequence
  Protein classification predicting sequence
YLEPWH

SEQ ID NO: 11437 - protein, 12 aa, Artificial sequence
  Protein classification predicting sequence
ALWIPDLFMKRV

SEQ ID NO: 11438 - protein, 12 aa, Artificial sequence
  Protein classification predicting sequence
NLNKIIDINYYP

SEQ ID NO: 11439 - protein, 21 aa, Artificial sequence
  Protein classification predicting sequence
SNKRHRPIGIGVQGLADAFIL

SEQ ID NO: 11440 - protein, 6 aa, Artificial sequence
  Protein classification predicting sequence
IFETIY

SEQ ID NO: 11441 - protein, 17 aa, Artificial sequence
  Protein classification predicting sequence
APMPTASTAQILGNNES

SEQ ID NO: 11442 - protein, 7 aa, Artificial sequence
  Protein classification predicting sequence
KRDGRKE

SEQ ID NO: 11443 - protein, 7 aa, Artificial sequence
  Protein classification predicting sequence
INLDKIH

SEQ ID NO: 11444 - protein, 14 aa, Artificial sequence
  Protein classification predicting sequence
IHETIIKAAADLIS

SEQ ID NO: 11445 - protein, 14 aa, Artificial sequence
  Protein classification predicting sequence
FSYAAVKQLEGKYL

SEQ ID NO: 11446 - protein, 12 aa, Artificial sequence
  Protein classification predicting sequence
IVKYVSQRAGIG

SEQ ID NO: 11447 - protein, 7 aa, Artificial sequence
  Protein classification predicting sequence
QNVDHCN

SEQ ID NO: 11448 - protein, 9 aa, Artificial sequence
  Protein classification predicting sequence
NLTHKTFEA

SEQ ID NO: 11449 - protein, 8 aa, Artificial sequence
  Protein classification predicting sequence
IFHLRKKA

SEQ ID NO: 11450 - protein, 8 aa, Artificial sequence
  Protein classification predicting sequence
NRVRHMDY

SEQ ID NO: 11451 - protein, 7 aa, Artificial sequence
  Protein classification predicting sequence
TFEAIQY

SEQ ID NO: 11452 - protein, 8 aa, Artificial sequence
  Protein classification predicting sequence
SIKASKDG

SEQ ID NO: 11453 - protein, 11 aa, Artificial sequence
  Protein classification predicting sequence
FDKITSRIQKL

SEQ ID NO: 11454 - protein, 8 aa, Artificial sequence
  Protein classification predicting sequence
QMSSCFLL

SEQ ID NO: 11455 - protein, 7 aa, Artificial sequence
  Protein classification predicting sequence
GIYDTLK

SEQ ID NO: 11456 - protein, 6 aa, Artificial sequence
  Protein classification predicting sequence
RHRPIG

SEQ ID NO: 11457 - protein, 7 aa, Artificial sequence
  Protein classification predicting sequence
GVQGLAD

SEQ ID NO: 11458 - protein, 6 aa, Artificial sequence
  Protein classification predicting sequence
LQFDMW

SEQ ID NO: 11459 - protein, 11 aa, Artificial sequence
  Protein classification predicting sequence
GLKTGMYYLRT

SEQ ID NO: 11460 - protein, 10 aa, Artificial sequence
  Protein classification predicting sequence
FKTLERSYLL

SEQ ID NO: 11461 - protein, 8 aa, Artificial sequence
  Protein classification predicting sequence
RKNHGKEE

SEQ ID NO: 11462 - protein, 7 aa, Artificial sequence
  Protein classification predicting sequence
LMCPDEC

SEQ ID NO: 11463 - protein, 7 aa, Artificial sequence
  Protein classification predicting sequence
LNKQIFE

SEQ ID NO: 11464 - protein, 8 aa, Artificial sequence
  Protein classification predicting sequence
LYKTVWEI

SEQ ID NO: 11465 - protein, 22 aa, Artificial sequence
  Protein classification predicting sequence
HPDYAILAARIAVSNLHKETKK

SEQ ID NO: 11466 - protein, 8 aa, Artificial sequence
  Protein classification predicting sequence
ETYNLLSE

SEQ ID NO: 11467 - protein, 8 aa, Artificial sequence
  Protein classification predicting sequence
ARYVDQGG

SEQ ID NO: 11468 - protein, 7 aa, Artificial sequence
  Protein classification predicting sequence
KRPGAFA

SEQ ID NO: 11469 - protein, 6 aa, Artificial sequence
  Protein classification predicting sequence
KSNQQN

SEQ ID NO: 11470 - protein, 10 aa, Artificial sequence
  Protein classification predicting sequence
AEPNYGKLTS

SEQ ID NO: 11471 - protein, 7 aa, Artificial sequence
  Protein classification predicting sequence
MVCSLEN

SEQ ID NO: 11472 - protein, 8 aa, Artificial sequence
  Protein classification predicting sequence
GLKTGMYY

SEQ ID NO: 11473 - protein, 5 aa, Artificial sequence
  Protein classification predicting sequence
LEPWH

SEQ ID NO: 11474 - protein, 7 aa, Artificial sequence
  Protein classification predicting sequence
QIETGTP

SEQ ID NO: 11475 - protein, 7 aa, Artificial sequence
  Protein classification predicting sequence
ETGTPYM

SEQ ID NO: 11476 - protein, 7 aa, Artificial sequence
  Protein classification predicting sequence
NLNRVID

SEQ ID NO: 11477 - protein, 7 aa, Artificial sequence
  Protein classification predicting sequence
EASCELA

SEQ ID NO: 11478 - protein, 12 aa, Artificial sequence
  Protein classification predicting sequence
EASCELAEKEGP

SEQ ID NO: 11479 - protein, 7 aa, Artificial sequence
  Protein classification predicting sequence
GEFQIVN

SEQ ID NO: 11480 - protein, 17 aa, Artificial sequence
  Protein classification predicting sequence
GVRTPTRQFSSCVLIEC

SEQ ID NO: 11481 - protein, 18 aa, Artificial sequence
  Protein classification predicting sequence
SAIVKYVSQRAGIGINAG

SEQ ID NO: 11482 - protein, 13 aa, Artificial sequence
  Protein classification predicting sequence
TFEAIQYYLLKAS

SEQ ID NO: 11483 - protein, 23 aa, Artificial sequence
  Protein classification predicting sequence
ALMPSETSSQISNATNGIEPPRG

SEQ ID NO: 11484 - protein, 6 aa, Artificial sequence
  Protein classification predicting sequence
VCNLAS

SEQ ID NO: 11485 - protein, 8 aa, Artificial sequence
  Protein classification predicting sequence
IKKYGLRN

SEQ ID NO: 11486 - protein, 6 aa, Artificial sequence
  Protein classification predicting sequence
LKKNTG

SEQ ID NO: 11487 - protein, 8 aa, Artificial sequence
  Protein classification predicting sequence
EPYTSNIY

SEQ ID NO: 11488 - protein, 8 aa, Artificial sequence
  Protein classification predicting sequence
PTLFNAGT

SEQ ID NO: 11489 - protein, 6 aa, Artificial sequence
  Protein classification predicting sequence
CALISK

SEQ ID NO: 11490 - protein, 6 aa, Artificial sequence
  Protein classification predicting sequence
WSLMCP

SEQ ID NO: 11491 - protein, 9 aa, Artificial sequence
  Protein classification predicting sequence
MPTASTSQI

SEQ ID NO: 11492 - protein, 16 aa, Artificial sequence
  Protein classification predicting sequence
AIETYNLLSEKWFTHA

SEQ ID NO: 11493 - protein, 21 aa, Artificial sequence
  Protein classification predicting sequence
KVIVRNLNKIIDINYYPIPEA

SEQ ID NO: 11494 - protein, 9 aa, Artificial sequence
  Protein classification predicting sequence
EDNMESIGR

SEQ ID NO: 11495 - protein, 11 aa, Artificial sequence
  Protein classification predicting sequence
RFQPATPTFLN

SEQ ID NO: 11496 - protein, 9 aa, Artificial sequence
  Protein classification predicting sequence
IPIMKLLED

SEQ ID NO: 11497 - protein, 10 aa, Artificial sequence
  Protein classification predicting sequence
RQGAGAVYLH

SEQ ID NO: 11498 - protein, 16 aa, Artificial sequence
  Protein classification predicting sequence
FLDTKRENADEKIRIK

SEQ ID NO: 11499 - protein, 7 aa, Artificial sequence
  Protein classification predicting sequence
YDVERVY

SEQ ID NO: 11500 - protein, 8 aa, Artificial sequence
  Protein classification predicting sequence
FSYANQLG

SEQ ID NO: 11501 - protein, 15 aa, Artificial sequence
  Protein classification predicting sequence
RQGAGAVYLHAHHPD

SEQ ID NO: 11502 - protein, 18 aa, Artificial sequence
  Protein classification predicting sequence
HPDYAILAARIAVSNLHK

SEQ ID NO: 11503 - protein, 7 aa, Artificial sequence
  Protein classification predicting sequence
MRVAVGI

SEQ ID NO: 11504 - protein, 10 aa, Artificial sequence
  Protein classification predicting sequence
ISKMAGGIGL

SEQ ID NO: 11505 - protein, 8 aa, Artificial sequence
  Protein classification predicting sequence
TYEGSPVS

SEQ ID NO: 11506 - protein, 7 aa, Artificial sequence
  Protein classification predicting sequence
WVPDLFM

SEQ ID NO: 11507 - protein, 6 aa, Artificial sequence
  Protein classification predicting sequence
VNPHLL

SEQ ID NO: 11508 - protein, 7 aa, Artificial sequence
  Protein classification predicting sequence
LYKDSCN

SEQ ID NO: 11509 - protein, 14 aa, Artificial sequence
  Protein classification predicting sequence
GLQSALKYEEMYLA

SEQ ID NO: 11510 - protein, 9 aa, Artificial sequence
  Protein classification predicting sequence
ERPTGVCVY

SEQ ID NO: 11511 - protein, 6 aa, Artificial sequence
  Protein classification predicting sequence
EPWHAD

SEQ ID NO: 11512 - protein, 7 aa, Artificial sequence
  Protein classification predicting sequence
SNLCTEI

SEQ ID NO: 11513 - protein, 12 aa, Artificial sequence
  Protein classification predicting sequence
FGFKTLERSYLL

SEQ ID NO: 11514 - protein, 6 aa, Artificial sequence
  Protein classification predicting sequence
ERPQHM

SEQ ID NO: 11515 - protein, 6 aa, Artificial sequence
  Protein classification predicting sequence
VWGDEF

SEQ ID NO: 11516 - protein, 8 aa, Artificial sequence
  Protein classification predicting sequence
CSNLCTEI

SEQ ID NO: 11517 - protein, 6 aa, Artificial sequence
  Protein classification predicting sequence
EPYTSN

SEQ ID NO: 11518 - protein, 9 aa, Artificial sequence
  Protein classification predicting sequence
KTLERSYLL

SEQ ID NO: 11519 - protein, 9 aa, Artificial sequence
  Protein classification predicting sequence
ISKSAGGIG

SEQ ID NO: 11520 - protein, 10 aa, Artificial sequence
  Protein classification predicting sequence
SNGLVPMLRV

SEQ ID NO: 11521 - protein, 9 aa, Artificial sequence
  Protein classification predicting sequence
TARYVDQGG

SEQ ID NO: 11522 - protein, 8 aa, Artificial sequence
  Protein classification predicting sequence
LWIPDLFM

SEQ ID NO: 11523 - protein, 14 aa, Artificial sequence
  Protein classification predicting sequence
NLGTIKCSNLCTEI

SEQ ID NO: 11524 - protein, 19 aa, Artificial sequence
  Protein classification predicting sequence
NLGTIKCSNLCTEIVEYTS

SEQ ID NO: 11525 - protein, 8 aa, Artificial sequence
  Protein classification predicting sequence
RRVLSGEF

SEQ ID NO: 11526 - protein, 9 aa, Artificial sequence
  Protein classification predicting sequence
EVAVCNLAS

SEQ ID NO: 11527 - protein, 23 aa, Artificial sequence
  Protein classification predicting sequence
DLFNYVNPKNGKHSPIISSITMD

SEQ ID NO: 11528 - protein, 100 aa, Artificial sequence
  Protein classification predicting sequence
VNKYKDKLNSVIIYERDFSYNYFGFKTLEKSYLLKINNKIVERPQHMLMRVAVGIHQWDIDSAIETYNLLSEKWFTHASPTLFNAGTSRHQMSSCFLLNM

SEQ ID NO: 11529 - protein, 12 aa, Artificial sequence
  Protein classification predicting sequence
DDSIEGIYDTLK

SEQ ID NO: 11530 - protein, 43 aa, Artificial sequence
  Protein classification predicting sequence
DDSIEGIYDTLKRCALISKMAGGIGLSISNIRASGSYISGTNG

SEQ ID NO: 11531 - protein, 29 aa, Artificial sequence
  Protein classification predicting sequence
SNGIIPMLRVYNNTARYIDQGGNKRPGVM

SEQ ID NO: 11532 - protein, 7 aa, Artificial sequence
  Protein classification predicting sequence
IYLEPWH

SEQ ID NO: 11533 - protein, 79 aa, Artificial sequence
  Protein classification predicting sequence
IYLEPWHSDIMAFLDLKKNTGNEEHRTRDLFIALWIPDLFMKRVKDDGEWSLMCPDECPGLDNVWGDEFERLYTLYERE

SEQ ID NO: 11534 - protein, 70 aa, Artificial sequence
  Protein classification predicting sequence
RYKSIIKARVVWKAIIESQIETGTPFILYKDACNKKSNQQNLGTIKCSNLCTEIIQYADANEVAVCNLAS

SEQ ID NO: 11535 - protein, 7 aa, Artificial sequence
  Protein classification predicting sequence
FIDQSQS

SEQ ID NO: 11536 - protein, 8 aa, Artificial sequence
  Protein classification predicting sequence
TSMHFYGW

SEQ ID NO: 11537 - protein, 9 aa, Artificial sequence
  Protein classification predicting sequence
TSMHFYGWK

SEQ ID NO: 11538 - protein, 11 aa, Artificial sequence
  Protein classification predicting sequence
LAFFAASDGIV

SEQ ID NO: 11539 - protein, 11 aa, Artificial sequence
  Protein classification predicting sequence
ENIHSEMYSLL

SEQ ID NO: 11540 - protein, 7 aa, Artificial sequence
  Protein classification predicting sequence
LFNAIET

SEQ ID NO: 11541 - protein, 10 aa, Artificial sequence
  Protein classification predicting sequence
VEGIFFSGSF

SEQ ID NO: 11542 - protein, 6 aa, Artificial sequence
  Protein classification predicting sequence
FVADRL

SEQ ID NO: 11543 - protein, 14 aa, Artificial sequence
  Protein classification predicting sequence
GKTNFFEKRVGEYQ

SEQ ID NO: 11544 - protein, 6 aa, Artificial sequence
  Protein classification predicting sequence
ISRDEG

SEQ ID NO: 11545 - protein, 6 aa, Artificial sequence
  Protein classification predicting sequence
KTNFFE

SEQ ID NO: 11546 - protein, 16 aa, Artificial sequence
  Protein classification predicting sequence
FYRFLFAFLSAADDLV

SEQ ID NO: 11547 - protein, 8 aa, Artificial sequence
  Protein classification predicting sequence
QKDILHYY

SEQ ID NO: 11548 - protein, 7 aa, Artificial sequence
  Protein classification predicting sequence
LMILIEG

SEQ ID NO: 11549 - protein, 8 aa, Artificial sequence
  Protein classification predicting sequence
LLDSIQGR

SEQ ID NO: 11550 - protein, 13 aa, Artificial sequence
  Protein classification predicting sequence
FSETIHSRSYTHI

SEQ ID NO: 11551 - protein, 5 aa, Artificial sequence
  Protein classification predicting sequence
YHDIW

SEQ ID NO: 11552 - protein, 14 aa, Artificial sequence
  Protein classification predicting sequence
LIEKQLSFFWRPEE

SEQ ID NO: 11553 - protein, 24 aa, Artificial sequence
  Protein classification predicting sequence
EKHIFISNLKYQTLLDSIQGRSPN

SEQ ID NO: 11554 - protein, 10 aa, Artificial sequence
  Protein classification predicting sequence
GLNKDILCQY

SEQ ID NO: 11555 - protein, 8 aa, Artificial sequence
  Protein classification predicting sequence
EYITNIRM

SEQ ID NO: 11556 - protein, 8 aa, Artificial sequence
  Protein classification predicting sequence
SNPIPWIN

SEQ ID NO: 11557 - protein, 8 aa, Artificial sequence
  Protein classification predicting sequence
EEIDLSKD

SEQ ID NO: 11558 - protein, 17 aa, Artificial sequence
  Protein classification predicting sequence
FSETIHSRSYTHIIRNI

SEQ ID NO: 11559 - protein, 8 aa, Artificial sequence
  Protein classification predicting sequence
YWHLLGEG

SEQ ID NO: 11560 - protein, 8 aa, Artificial sequence
  Protein classification predicting sequence
SSYLVGQI

SEQ ID NO: 11561 - protein, 18 aa, Artificial sequence
  Protein classification predicting sequence
SNLKYQTLLDSIQGRSPN

SEQ ID NO: 11562 - protein, 20 aa, Artificial sequence
  Protein classification predicting sequence
MEGNAKIIRLIARDEALHLT

SEQ ID NO: 11563 - protein, 10 aa, Artificial sequence
  Protein classification predicting sequence
SDNVQVAPQE

SEQ ID NO: 11564 - protein, 7 aa, Artificial sequence
  Protein classification predicting sequence
FYGFQIA

SEQ ID NO: 11565 - protein, 7 aa, Artificial sequence
  Protein classification predicting sequence
KKKADWA

SEQ ID NO: 11566 - protein, 30 aa, Artificial sequence
  Protein classification predicting sequence
AFAAVEGIFFSGSFASIFWLKKRGLMPGLT

SEQ ID NO: 11567 - protein, 12 aa, Artificial sequence
  Protein classification predicting sequence
SNELISRDEGLH

SEQ ID NO: 11568 - protein, 5 aa, Artificial sequence
  Protein classification predicting sequence
MYKKA

SEQ ID NO: 11569 - protein, 17 aa, Artificial sequence
  Protein classification predicting sequence
HVLAFFAASDGIVNENL

SEQ ID NO: 11570 - protein, 6 aa, Artificial sequence
  Protein classification predicting sequence
WALRWI

SEQ ID NO: 11571 - protein, 11 aa, Artificial sequence
  Protein classification predicting sequence
MYKKAEASFWT

SEQ ID NO: 11572 - protein, 8 aa, Artificial sequence
  Protein classification predicting sequence
EEVDLSKD

SEQ ID NO: 11573 - protein, 6 aa, Artificial sequence
  Protein classification predicting sequence
HSEMYS

SEQ ID NO: 11574 - protein, 6 aa, Artificial sequence
  Protein classification predicting sequence
MYKKAE

SEQ ID NO: 11575 - protein, 8 aa, Artificial sequence
  Protein classification predicting sequence
SFWTVEEV

SEQ ID NO: 11576 - protein, 15 aa, Artificial sequence
  Protein classification predicting sequence
ENIHSEMYSLLIDTY

SEQ ID NO: 11577 - protein, 8 aa, Artificial sequence
  Protein classification predicting sequence
VEGIFFSG

SEQ ID NO: 11578 - protein, 9 aa, Artificial sequence
  Protein classification predicting sequence
VFDDIVTNE

SEQ ID NO: 11579 - protein, 29 aa, Artificial sequence
  Protein classification predicting sequence
LYLCLMSVNALEAIRFYVSFACSFAFAER

SEQ ID NO: 11580 - protein, 15 aa, Artificial sequence
  Protein classification predicting sequence
DDPEMAEIAEECKQE

SEQ ID NO: 11581 - protein, 8 aa, Artificial sequence
  Protein classification predicting sequence
DGSMIGLN

SEQ ID NO: 11582 - protein, 16 aa, Artificial sequence
  Protein classification predicting sequence
QYVEYITNIRMQAVGL

SEQ ID NO: 11583 - protein, 14 aa, Artificial sequence
  Protein classification predicting sequence
LPFQTRSNPIPWIN

SEQ ID NO: 11584 - protein, 26 aa, Artificial sequence
  Protein classification predicting sequence
WLVSDNVQVAPQEVEVSSYLVGQIDS

SEQ ID NO: 11585 - protein, 10 aa, Artificial sequence
  Protein classification predicting sequence
FIKHVLAFFA

SEQ ID NO: 11586 - protein, 7 aa, Artificial sequence
  Protein classification predicting sequence
HVLAFFA

SEQ ID NO: 11587 - protein, 9 aa, Artificial sequence
  Protein classification predicting sequence
ENIHSETYS

SEQ ID NO: 11588 - protein, 6 aa, Artificial sequence
  Protein classification predicting sequence
PFDFME

SEQ ID NO: 11589 - protein, 11 aa, Artificial sequence
  Protein classification predicting sequence
LFNAIETMPCV

SEQ ID NO: 11590 - protein, 38 aa, Artificial sequence
  Protein classification predicting sequence
EQEFLTEALPVKLIGMNCTLMKQYIEFVADRLMLELGF

SEQ ID NO: 11591 - protein, 6 aa, Artificial sequence
  Protein classification predicting sequence
KKKADW

SEQ ID NO: 11592 - protein, 6 aa, Artificial sequence
  Protein classification predicting sequence
NFFEKR

SEQ ID NO: 11593 - protein, 7 aa, Artificial sequence
  Protein classification predicting sequence
GSSYVMG

SEQ ID NO: 11594 - protein, 7 aa, Artificial sequence
  Protein classification predicting sequence
NFWLPEK

SEQ ID NO: 11595 - protein, 18 aa, Artificial sequence
  Protein classification predicting sequence
IRLIIRDEAVHGYYIGYK

SEQ ID NO: 11596 - protein, 15 aa, Artificial sequence
  Protein classification predicting sequence
LAFFAASDGIVNENL

SEQ ID NO: 11597 - protein, 10 aa, Artificial sequence
  Protein classification predicting sequence
QYIEFVADRL

SEQ ID NO: 11598 - protein, 10 aa, Artificial sequence
  Protein classification predicting sequence
FSGSFCAIFW

SEQ ID NO: 11599 - protein, 6 aa, Artificial sequence
  Protein classification predicting sequence
YKKAEA

SEQ ID NO: 11600 - protein, 6 aa, Artificial sequence
  Protein classification predicting sequence
FWTAEE

SEQ ID NO: 11601 - protein, 9 aa, Artificial sequence
  Protein classification predicting sequence
YFYTSQCPD

SEQ ID NO: 11602 - protein, 7 aa, Artificial sequence
  Protein classification predicting sequence
VTCQSND

SEQ ID NO: 11603 - protein, 7 aa, Artificial sequence
  Protein classification predicting sequence
IYNNYLG

SEQ ID NO: 11604 - protein, 7 aa, Artificial sequence
  Protein classification predicting sequence
AFAAVEG

SEQ ID NO: 11605 - protein, 7 aa, Artificial sequence
  Protein classification predicting sequence
IFWLKKR

SEQ ID NO: 11606 - protein, 6 aa, Artificial sequence
  Protein classification predicting sequence
NPFDFM

SEQ ID NO: 11607 - protein, 7 aa, Artificial sequence
  Protein classification predicting sequence
GKTNFFE

SEQ ID NO: 11608 - protein, 7 aa, Artificial sequence
  Protein classification predicting sequence
EYQRMGV

SEQ ID NO: 11609 - protein, 6 aa, Artificial sequence
  Protein classification predicting sequence
RDEGLH

SEQ ID NO: 11610 - protein, 6 aa, Artificial sequence
  Protein classification predicting sequence
VEGIFF

SEQ ID NO: 11611 - protein, 35 aa, Artificial sequence
  Protein classification predicting sequence
EVQVTEARCFYGFQIAMENIHSEMYSLLIDTYIKD

SEQ ID NO: 11612 - protein, 7 aa, Artificial sequence
  Protein classification predicting sequence
FLTEALP

SEQ ID NO: 11613 - protein, 24 aa, Artificial sequence
  Protein classification predicting sequence
ISLEGKTNFFEKRVGEYQKMGVMS

SEQ ID NO: 11614 - protein, 8 aa, Artificial sequence
  Protein classification predicting sequence
DEKYFIKH

SEQ ID NO: 11615 - protein, 9 aa, Artificial sequence
  Protein classification predicting sequence
SDGIVNENL

SEQ ID NO: 11616 - protein, 8 aa, Artificial sequence
  Protein classification predicting sequence
LFNAIETM

SEQ ID NO: 11617 - protein, 9 aa, Artificial sequence
  Protein classification predicting sequence
CVKKKADWA

SEQ ID NO: 11618 - protein, 15 aa, Artificial sequence
  Protein classification predicting sequence
AFAAVEGIFFSGSFA

SEQ ID NO: 11619 - protein, 34 aa, Artificial sequence
  Protein classification predicting sequence
KKRGLMPGLTFSNELISRDEGLHCDFACLMFKHL

SEQ ID NO: 11620 - protein, 8 aa, Artificial sequence
  Protein classification predicting sequence
ASFWTAEE

SEQ ID NO: 11621 - protein, 8 aa, Artificial sequence
  Protein classification predicting sequence
GKTNFFEK

SEQ ID NO: 11622 - protein, 13 aa, Artificial sequence
  Protein classification predicting sequence
EVQITEARCFYGF

SEQ ID NO: 11623 - protein, 23 aa, Artificial sequence
  Protein classification predicting sequence
PPSEETVRSIITDAVSIEQEFLT

SEQ ID NO: 11624 - protein, 11 aa, Artificial sequence
  Protein classification predicting sequence
ALPVKLIGMNC

SEQ ID NO: 11625 - protein, 17 aa, Artificial sequence
  Protein classification predicting sequence
ALPVKLIGMNCEMMKTY

SEQ ID NO: 11626 - protein, 7 aa, Artificial sequence
  Protein classification predicting sequence
EFVADRL

SEQ ID NO: 11627 - protein, 14 aa, Artificial sequence
  Protein classification predicting sequence
EFVADRLISELGFK

SEQ ID NO: 11628 - protein, 23 aa, Artificial sequence
  Protein classification predicting sequence
DFMENISLEGKTNFFEKRVGEYQ

SEQ ID NO: 11629 - protein, 9 aa, Artificial sequence
  Protein classification predicting sequence
FLSAADDLV

SEQ ID NO: 11630 - protein, 7 aa, Artificial sequence
  Protein classification predicting sequence
HYYIEQE

SEQ ID NO: 11631 - protein, 9 aa, Artificial sequence
  Protein classification predicting sequence
SFAAIAYLR

SEQ ID NO: 11632 - protein, 10 aa, Artificial sequence
  Protein classification predicting sequence
AEASFWTAEE

SEQ ID NO: 11633 - protein, 7 aa, Artificial sequence
  Protein classification predicting sequence
EVQIPEA

SEQ ID NO: 11634 - protein, 6 aa, Artificial sequence
  Protein classification predicting sequence
FYGFQI

SEQ ID NO: 11635 - protein, 11 aa, Artificial sequence
  Protein classification predicting sequence
MPGLTFSNELI

SEQ ID NO: 11636 - protein, 11 aa, Artificial sequence
  Protein classification predicting sequence
NPFDFMENISL

SEQ ID NO: 11637 - protein, 10 aa, Artificial sequence
  Protein classification predicting sequence
GKTNFFEKRV

SEQ ID NO: 11638 - protein, 13 aa, Artificial sequence
  Protein classification predicting sequence
DYHALNAMLNLYD

SEQ ID NO: 11639 - protein, 16 aa, Artificial sequence
  Protein classification predicting sequence
YTSYTLKTFDGKRYLE

SEQ ID NO: 11640 - protein, 10 aa, Artificial sequence
  Protein classification predicting sequence
EDTVNRANPI

SEQ ID NO: 11641 - protein, 8 aa, Artificial sequence
  Protein classification predicting sequence
TMDSPDFA

SEQ ID NO: 11642 - protein, 8 aa, Artificial sequence
  Protein classification predicting sequence
GRVYYPAP

SEQ ID NO: 11643 - protein, 12 aa, Artificial sequence
  Protein classification predicting sequence
HVDQGLSLTLFF

SEQ ID NO: 11644 - protein, 7 aa, Artificial sequence
  Protein classification predicting sequence
DTATTRD

SEQ ID NO: 11645 - protein, 29 aa, Artificial sequence
  Protein classification predicting sequence
NKAQIYAWRKGIKTLYYIRLRQMALEGTE

SEQ ID NO: 11646 - protein, 29 aa, Artificial sequence
  Protein classification predicting sequence
LEDAFSYANQLGARQGAGAVYLHAHHPDI

SEQ ID NO: 11647 - protein, 21 aa, Artificial sequence
  Protein classification predicting sequence
GIYNQNLQAVPPTGSISYINH

SEQ ID NO: 11648 - protein, 13 aa, Artificial sequence
  Protein classification predicting sequence
NKAQIYAWRKGIK

SEQ ID NO: 11649 - protein, 8 aa, Artificial sequence
  Protein classification predicting sequence
LYYIRLRQ

SEQ ID NO: 11650 - protein, 8 aa, Artificial sequence
  Protein classification predicting sequence
FDKITSRI

SEQ ID NO: 11651 - protein, 8 aa, Artificial sequence
  Protein classification predicting sequence
GVTTVELD

SEQ ID NO: 11652 - protein, 7 aa, Artificial sequence
  Protein classification predicting sequence
QIFETIY

SEQ ID NO: 11653 - protein, 10 aa, Artificial sequence
  Protein classification predicting sequence
LESFLFYSGF

SEQ ID NO: 11654 - protein, 9 aa, Artificial sequence
  Protein classification predicting sequence
FPIKYHEIW

SEQ ID NO: 11655 - protein, 7 aa, Artificial sequence
  Protein classification predicting sequence
YIEFVAD

SEQ ID NO: 11656 - protein, 7 aa, Artificial sequence
  Protein classification predicting sequence
AIIRRRK

SEQ ID NO: 11657 - protein, 12 aa, Artificial sequence
  Protein classification predicting sequence
EADADTAEAIDF

SEQ ID NO: 11658 - protein, 14 aa, Artificial sequence
  Protein classification predicting sequence
LKPASTTPVVAAKF

SEQ ID NO: 11659 - protein, 10 aa, Artificial sequence
  Protein classification predicting sequence
EVGDYLVDHP

SEQ ID NO: 11660 - protein, 12 aa, Artificial sequence
  Protein classification predicting sequence
SAFGFSGQKCSA

SEQ ID NO: 11661 - protein, 11 aa, Artificial sequence
  Protein classification predicting sequence
HKDVYDEVLEK

SEQ ID NO: 11662 - protein, 11 aa, Artificial sequence
  Protein classification predicting sequence
IMQEEIFGPVV

SEQ ID NO: 11663 - protein, 8 aa, Artificial sequence
  Protein classification predicting sequence
CTGAIVGY

SEQ ID NO: 11664 - protein, 9 aa, Artificial sequence
  Protein classification predicting sequence
DKIVSVNPA

SEQ ID NO: 11665 - protein, 7 aa, Artificial sequence
  Protein classification predicting sequence
VSKASRE

SEQ ID NO: 11666 - protein, 6 aa, Artificial sequence
  Protein classification predicting sequence
EAGKPW

SEQ ID NO: 11667 - protein, 7 aa, Artificial sequence
  Protein classification predicting sequence
AIMAGTT

SEQ ID NO: 11668 - protein, 8 aa, Artificial sequence
  Protein classification predicting sequence
FTGSRDVG

SEQ ID NO: 11669 - protein, 15 aa, Artificial sequence
  Protein classification predicting sequence
IVTSAFGFSGQKCSA

SEQ ID NO: 11670 - protein, 9 aa, Artificial sequence
  Protein classification predicting sequence
GGEGDDSKG

SEQ ID NO: 11671 - protein, 12 aa, Artificial sequence
  Protein classification predicting sequence
RIMQEEIFGPVV

SEQ ID NO: 11672 - protein, 10 aa, Artificial sequence
  Protein classification predicting sequence
FHVGNLYFNR

SEQ ID NO: 11673 - protein, 8 aa, Artificial sequence
  Protein classification predicting sequence
VGRVSKAS

SEQ ID NO: 11674 - protein, 26 aa, Artificial sequence
  Protein classification predicting sequence
LVKEAGKPWNEADADTAEAIDFMEYY

SEQ ID NO: 11675 - protein, 11 aa, Artificial sequence
  Protein classification predicting sequence
GQKCSAGSRAV

SEQ ID NO: 11676 - protein, 7 aa, Artificial sequence
  Protein classification predicting sequence
DDSKGYF

SEQ ID NO: 11677 - protein, 12 aa, Artificial sequence
  Protein classification predicting sequence
YGLTGAVITNNR

SEQ ID NO: 11678 - protein, 8 aa, Artificial sequence
  Protein classification predicting sequence
GVVNFVPG

SEQ ID NO: 11679 - protein, 195 aa, Artificial sequence
  Protein classification predicting sequence
SFTGSRDVGIRIYERAAKVNPGQIWLKRVIAEMGGKDTIVVDKEADLELAAKSIVASAFGFSGQKCSACSRAVIHEDVYDHVLNRAVELTKELTVANPAVLGTNMGPVNDQAAFDKVMSYVAIGKEEGRILAGGEGDDSKGWFIQPTIVADVAEDARLMKEEIFGPVVAFCKAKDFDHALAIANNTEYGLTGAVI

SEQ ID NO: 11680 - protein, 8 aa, Artificial sequence
  Protein classification predicting sequence
YGLTGAVI

SEQ ID NO: 11681 - protein, 6 aa, Artificial sequence
  Protein classification predicting sequence
VYDEVL

SEQ ID NO: 11682 - protein, 7 aa, Artificial sequence
  Protein classification predicting sequence
HEPFTDF

SEQ ID NO: 11683 - protein, 8 aa, Artificial sequence
  Protein classification predicting sequence
RRRKHEFS

SEQ ID NO: 11684 - protein, 44 aa, Artificial sequence
  Protein classification predicting sequence
AREDFHVGNLYFNRGCTGAIVGYQPFGGFNMSGTDSKAGGPDYL

SEQ ID NO: 11685 - protein, 15 aa, Artificial sequence
  Protein classification predicting sequence
RAAAIVRRRKHEFSA

SEQ ID NO: 11686 - protein, 8 aa, Artificial sequence
  Protein classification predicting sequence
GTTVAPIV

SEQ ID NO: 11687 - protein, 14 aa, Artificial sequence
  Protein classification predicting sequence
EIGDYLVDHKDTHF

SEQ ID NO: 11688 - protein, 7 aa, Artificial sequence
  Protein classification predicting sequence
AEMGGKD

SEQ ID NO: 11689 - protein, 16 aa, Artificial sequence
  Protein classification predicting sequence
SAFGFSGQKCSACSRA

SEQ ID NO: 11690 - protein, 18 aa, Artificial sequence
  Protein classification predicting sequence
IANNTEYGLTGAVISNNR

SEQ ID NO: 11691 - protein, 11 aa, Artificial sequence
  Protein classification predicting sequence
AIVGYQPFGGF

SEQ ID NO: 11692 - protein, 14 aa, Artificial sequence
  Protein classification predicting sequence
MSGTDSKAGGPDYL

SEQ ID NO: 11693 - protein, 17 aa, Artificial sequence
  Protein classification predicting sequence
VLLKPAEDTPYIAYKLM

SEQ ID NO: 11694 - protein, 13 aa, Artificial sequence
  Protein classification predicting sequence
LGQDIPLVINGEK

SEQ ID NO: 11695 - protein, 33 aa, Artificial sequence
  Protein classification predicting sequence
AIMVYEAGKPWDEAVGDAAEGIDFIEYYARSMM

SEQ ID NO: 11696 - protein, 12 aa, Artificial sequence
  Protein classification predicting sequence
GKPVLDREGEHN

SEQ ID NO: 11697 - protein, 14 aa, Artificial sequence
  Protein classification predicting sequence
AYKLMEILEEAGLP

SEQ ID NO: 11698 - protein, 49 aa, Artificial sequence
  Protein classification predicting sequence
GVVNFVPGDPKEIGDYLVDHKDTHFVTFTGSRATGTRIYERSAVVQEGQ

SEQ ID NO: 11699 - protein, 18 aa, Artificial sequence
  Protein classification predicting sequence
FLKRVIAEMGGKDAIVVD

SEQ ID NO: 11700 - protein, 26 aa, Artificial sequence
  Protein classification predicting sequence
AAEAIVTSAFGFSGQKCSACSRAIVH

SEQ ID NO: 11701 - protein, 14 aa, Artificial sequence
  Protein classification predicting sequence
KQFDKIKNYIEIGK

SEQ ID NO: 11702 - protein, 7 aa, Artificial sequence
  Protein classification predicting sequence
GGGTDDS

SEQ ID NO: 11703 - protein, 15 aa, Artificial sequence
  Protein classification predicting sequence
DRIMQEEIFGPVVGF

SEQ ID NO: 11704 - protein, 23 aa, Artificial sequence
  Protein classification predicting sequence
DFDEAIEVANDTDYGLTGAVITN

SEQ ID NO: 11705 - protein, 23 aa, Artificial sequence
  Protein classification predicting sequence
REHWIKAVNEFDVGNLYLNRGCT

SEQ ID NO: 11706 - protein, 27 aa, Artificial sequence
  Protein classification predicting sequence
AVVGYHPFGGFKMSGTDAKTGSPDYLL

SEQ ID NO: 11707 - protein, 8 aa, Artificial sequence
  Protein classification predicting sequence
GYALATWS

SEQ ID NO: 11708 - protein, 12 aa, Artificial sequence
  Protein classification predicting sequence
INASRGTVVDIP

SEQ ID NO: 11709 - protein, 7 aa, Artificial sequence
  Protein classification predicting sequence
LVVNAPT

SEQ ID NO: 11710 - protein, 11 aa, Artificial sequence
  Protein classification predicting sequence
PHLGASTKEAQ

SEQ ID NO: 11711 - protein, 8 aa, Artificial sequence
  Protein classification predicting sequence
ARGGIVDE

SEQ ID NO: 11712 - protein, 9 aa, Artificial sequence
  Protein classification predicting sequence
DALLVRSAT

SEQ ID NO: 11713 - protein, 43 aa, Artificial sequence
  Protein classification predicting sequence
VVNCARGGIVDEGALLRALQSGQCAGAALDVFTEEPPRDRALV

SEQ ID NO: 11714 - protein, 26 aa, Artificial sequence
  Protein classification predicting sequence
HENVISCPHLGASTKEAQSRCGEEIA

SEQ ID NO: 11715 - protein, 9 aa, Artificial sequence
  Protein classification predicting sequence
QFVDMVKGK

SEQ ID NO: 11716 - protein, 6 aa, Artificial sequence
  Protein classification predicting sequence
PHTKPW

SEQ ID NO: 11717 - protein, 12 aa, Artificial sequence
  Protein classification predicting sequence
LNGAVFRPEVPL

SEQ ID NO: 11718 - protein, 10 aa, Artificial sequence
  Protein classification predicting sequence
VSDGETWHVM

SEQ ID NO: 11719 - protein, 12 aa, Artificial sequence
  Protein classification predicting sequence
HFIGLRSRTHLT

SEQ ID NO: 11720 - protein, 12 aa, Artificial sequence
  Protein classification predicting sequence
GCFCIGTNQVDL

SEQ ID NO: 11721 - protein, 20 aa, Artificial sequence
  Protein classification predicting sequence
RGIPVFNAPFSNTRSVAELV

SEQ ID NO: 11722 - protein, 7 aa, Artificial sequence
  Protein classification predicting sequence
HRGVWNK

SEQ ID NO: 11723 - protein, 15 aa, Artificial sequence
  Protein classification predicting sequence
VYFYDIENKLPLGNA

SEQ ID NO: 11724 - protein, 9 aa, Artificial sequence
  Protein classification predicting sequence
DVVSLHVPE

SEQ ID NO: 11725 - protein, 7 aa, Artificial sequence
  Protein classification predicting sequence
RGTVVDI

SEQ ID NO: 11726 - protein, 8 aa, Artificial sequence
  Protein classification predicting sequence
GAAIDVFP

SEQ ID NO: 11727 - protein, 7 aa, Artificial sequence
  Protein classification predicting sequence
EAQENIG

SEQ ID NO: 11728 - protein, 10 aa, Artificial sequence
  Protein classification predicting sequence
KYSDNGSTLS

SEQ ID NO: 11729 - protein, 8 aa, Artificial sequence
  Protein classification predicting sequence
HIHENRPG

SEQ ID NO: 11730 - protein, 9 aa, Artificial sequence
  Protein classification predicting sequence
NIAAQYLQT

SEQ ID NO: 11731 - protein, 10 aa, Artificial sequence
  Protein classification predicting sequence
GYDPIISPEV

SEQ ID NO: 11732 - protein, 10 aa, Artificial sequence
  Protein classification predicting sequence
TQGTSLKNAG

SEQ ID NO: 11733 - protein, 11 aa, Artificial sequence
  Protein classification predicting sequence
CLSPAVIVGLL

SEQ ID NO: 11734 - protein, 7 aa, Artificial sequence
  Protein classification predicting sequence
LLSYQTS

SEQ ID NO: 11735 - protein, 7 aa, Artificial sequence
  Protein classification predicting sequence
PHLGAST

SEQ ID NO: 11736 - protein, 83 aa, Artificial sequence
  Protein classification predicting sequence
LISDSLDPCCRKILQDGGLQVVEKQNLSKEELIAELQDCEGLIVRSATKVTADVINAAEKLQVVGRAGTGVDNVDLEAATRKG

SEQ ID NO: 11737 - protein, 20 aa, Artificial sequence
  Protein classification predicting sequence
LVMNTPNGNSLSAAELTCGM

SEQ ID NO: 11738 - protein, 9 aa, Artificial sequence
  Protein classification predicting sequence
RNEGQWALG

SEQ ID NO: 11739 - protein, 8 aa, Artificial sequence
  Protein classification predicting sequence
VPEIWRRL

SEQ ID NO: 11740 - protein, 25 aa, Artificial sequence
  Protein classification predicting sequence
HPEHGPGLDLWVGGGLSTNPMLAQR

SEQ ID NO: 11741 - protein, 19 aa, Artificial sequence
  Protein classification predicting sequence
KNGLNAVGVAPIAGRVSGT

SEQ ID NO: 11742 - protein, 15 aa, Artificial sequence
  Protein classification predicting sequence
GIEFCKLSFAETRVR

SEQ ID NO: 11743 - protein, 11 aa, Artificial sequence
  Protein classification predicting sequence
SVEGFQVHLGG

SEQ ID NO: 11744 - protein, 8 aa, Artificial sequence
  Protein classification predicting sequence
FARDTADI

SEQ ID NO: 11745 - protein, 8 aa, Artificial sequence
  Protein classification predicting sequence
GRAVVVHA

SEQ ID NO: 11746 - protein, 6 aa, Artificial sequence
  Protein classification predicting sequence
GNDANA

SEQ ID NO: 11747 - protein, 9 aa, Artificial sequence
  Protein classification predicting sequence
ESKKTGNAG

SEQ ID NO: 11748 - protein, 8 aa, Artificial sequence
  Protein classification predicting sequence
RPACGVIG

SEQ ID NO: 11749 - protein, 8 aa, Artificial sequence
  Protein classification predicting sequence
SSEGVSGT

SEQ ID NO: 11750 - protein, 7 aa, Artificial sequence
  Protein classification predicting sequence
TGNAGGR

SEQ ID NO: 11751 - protein, 16 aa, Artificial sequence
  Protein classification predicting sequence
HALGDTTNGCMSTGPH

SEQ ID NO: 11752 - protein, 7 aa, Artificial sequence
  Protein classification predicting sequence
HGAPEDE

SEQ ID NO: 11753 - protein, 8 aa, Artificial sequence
  Protein classification predicting sequence
RHAGDLGN

SEQ ID NO: 11754 - protein, 6 aa, Artificial sequence
  Protein classification predicting sequence
HGFHVH

SEQ ID NO: 11755 - protein, 9 aa, Artificial sequence
  Protein classification predicting sequence
GGDNYSDKP

SEQ ID NO: 11756 - protein, 15 aa, Artificial sequence
  Protein classification predicting sequence
PLGGGGARFACGVIE

SEQ ID NO: 11757 - protein, 6 aa, Artificial sequence
  Protein classification predicting sequence
SIIGRT

SEQ ID NO: 11758 - protein, 9 aa, Artificial sequence
  Protein classification predicting sequence
MSTGPHFNP

SEQ ID NO: 11759 - protein, 6 aa, Artificial sequence
  Protein classification predicting sequence
HGAPED

SEQ ID NO: 11760 - protein, 7 aa, Artificial sequence
  Protein classification predicting sequence
VKGTIFF

SEQ ID NO: 11761 - protein, 7 aa, Artificial sequence
  Protein classification predicting sequence
LAGPHSI

SEQ ID NO: 11762 - protein, 6 aa, Artificial sequence
  Protein classification predicting sequence
QIPLTG

SEQ ID NO: 11763 - protein, 8 aa, Artificial sequence
  Protein classification predicting sequence
GPNSIIGR

SEQ ID NO: 11764 - protein, 14 aa, Artificial sequence
  Protein classification predicting sequence
VVHEKADDLGKGGN

SEQ ID NO: 11765 - protein, 8 aa, Artificial sequence
  Protein classification predicting sequence
DDLGKGGN

SEQ ID NO: 11766 - protein, 7 aa, Artificial sequence
  Protein classification predicting sequence
GDTTNGC

SEQ ID NO: 11767 - protein, 7 aa, Artificial sequence
  Protein classification predicting sequence
PGLHGFH

SEQ ID NO: 11768 - protein, 9 aa, Artificial sequence
  Protein classification predicting sequence
RHAGDLGNI

SEQ ID NO: 11769 - protein, 7 aa, Artificial sequence
  Protein classification predicting sequence
HGFHLHE

SEQ ID NO: 11770 - protein, 17 aa, Artificial sequence
  Protein classification predicting sequence
TGNAGGRLACGVVGLTP

SEQ ID NO: 11771 - protein, 6 aa, Artificial sequence
  Protein classification predicting sequence
DGPTTV

SEQ ID NO: 11772 - protein, 8 aa, Artificial sequence
  Protein classification predicting sequence
QIPLTGPN

SEQ ID NO: 11773 - protein, 7 aa, Artificial sequence
  Protein classification predicting sequence
DDLGKGG

SEQ ID NO: 11774 - protein, 11 aa, Artificial sequence
  Protein classification predicting sequence
DDLGKGGHELS

SEQ ID NO: 11775 - protein, 7 aa, Artificial sequence
  Protein classification predicting sequence
VEGVVTL

SEQ ID NO: 11776 - protein, 7 aa, Artificial sequence
  Protein classification predicting sequence
TVGEDGT

SEQ ID NO: 11777 - protein, 6 aa, Artificial sequence
  Protein classification predicting sequence
DSQIPL

SEQ ID NO: 11778 - protein, 6 aa, Artificial sequence
  Protein classification predicting sequence
TNGCTS

SEQ ID NO: 11779 - protein, 6 aa, Artificial sequence
  Protein classification predicting sequence
GGNEES

SEQ ID NO: 11780 - protein, 8 aa, Artificial sequence
  Protein classification predicting sequence
RHVGDLGN

SEQ ID NO: 11781 - protein, 8 aa, Artificial sequence
  Protein classification predicting sequence
HAGTDDLG

SEQ ID NO: 11782 - protein, 7 aa, Artificial sequence
  Protein classification predicting sequence
GRTLVVH

SEQ ID NO: 11783 - protein, 7 aa, Artificial sequence
  Protein classification predicting sequence
GTVTFEQ

SEQ ID NO: 11784 - protein, 6 aa, Artificial sequence
  Protein classification predicting sequence
DDLGKG

SEQ ID NO: 11785 - protein, 7 aa, Artificial sequence
  Protein classification predicting sequence
GDNTNGC

SEQ ID NO: 11786 - protein, 9 aa, Artificial sequence
  Protein classification predicting sequence
GPNSIVGRA

SEQ ID NO: 11787 - protein, 20 aa, Artificial sequence
  Protein classification predicting sequence
DDLGKGGHELSLSTGNAGGR

SEQ ID NO: 11788 - protein, 8 aa, Artificial sequence
  Protein classification predicting sequence
SAGPHFNP

SEQ ID NO: 11789 - protein, 9 aa, Artificial sequence
  Protein classification predicting sequence
ESLKTGNAG

SEQ ID NO: 11790 - protein, 26 aa, Artificial sequence
  Protein classification predicting sequence
PVQGTINFEQKESNGPVKVWGSITGL

SEQ ID NO: 11791 - protein, 6 aa, Artificial sequence
  Protein classification predicting sequence
GSITGL

SEQ ID NO: 11792 - protein, 14 aa, Artificial sequence
  Protein classification predicting sequence
DEERHVGDLGNVTA

SEQ ID NO: 11793 - protein, 6 aa, Artificial sequence
  Protein classification predicting sequence
GNDPNA

SEQ ID NO: 11794 - protein, 8 aa, Artificial sequence
  Protein classification predicting sequence
VVHAGTDD

SEQ ID NO: 11795 - protein, 12 aa, Artificial sequence
  Protein classification predicting sequence
ERHVGDLGNVTA

SEQ ID NO: 11796 - protein, 12 aa, Artificial sequence
  Protein classification predicting sequence
RHAGDLGNITVG

SEQ ID NO: 11797 - protein, 7 aa, Artificial sequence
  Protein classification predicting sequence
GTIFFTQ

SEQ ID NO: 11798 - protein, 12 aa, Artificial sequence
  Protein classification predicting sequence
SIIGRTMVVHEK

SEQ ID NO: 11799 - protein, 11 aa, Artificial sequence
  Protein classification predicting sequence
DDLGKGGNEES

SEQ ID NO: 11800 - protein, 23 aa, Artificial sequence
  Protein classification predicting sequence
IIGRTLVVHEKADDLGKGGNEES

SEQ ID NO: 11801 - protein, 8 aa, Artificial sequence
  Protein classification predicting sequence
FGDNTNGC

SEQ ID NO: 11802 - protein, 12 aa, Artificial sequence
  Protein classification predicting sequence
GGNEESTKTGNA

SEQ ID NO: 11803 - protein, 11 aa, Artificial sequence
  Protein classification predicting sequence
RHVGDLGNVTA

SEQ ID NO: 11804 - protein, 7 aa, Artificial sequence
  Protein classification predicting sequence
DDLGRGG

SEQ ID NO: 11805 - protein, 14 aa, Artificial sequence
  Protein classification predicting sequence
KAVCVINGDAKGTV

SEQ ID NO: 11806 - protein, 24 aa, Artificial sequence
  Protein classification predicting sequence
HGFHVHEFGDNTNGCMSSGPHFNP

SEQ ID NO: 11807 - protein, 8 aa, Artificial sequence
  Protein classification predicting sequence
DSKITLFG

SEQ ID NO: 11808 - protein, 10 aa, Artificial sequence
  Protein classification predicting sequence
FEQESESAPT

SEQ ID NO: 11809 - protein, 6 aa, Artificial sequence
  Protein classification predicting sequence
RGFHIH

SEQ ID NO: 11810 - protein, 7 aa, Artificial sequence
  Protein classification predicting sequence
GRTVVVH

SEQ ID NO: 11811 - protein, 7 aa, Artificial sequence
  Protein classification predicting sequence
NAERGFH

SEQ ID NO: 11812 - protein, 5 aa, Artificial sequence
  Protein classification predicting sequence
GFHVH

SEQ ID NO: 11813 - protein, 14 aa, Artificial sequence
  Protein classification predicting sequence
TPVKVSGEVCGLAK

SEQ ID NO: 11814 - protein, 7 aa, Artificial sequence
  Protein classification predicting sequence
GKEHGAP

SEQ ID NO: 11815 - protein, 30 aa, Artificial sequence
  Protein classification predicting sequence
GKEHGAPVDENRHLGDLGNIEATGDCPTKV

SEQ ID NO: 11816 - protein, 13 aa, Artificial sequence
  Protein classification predicting sequence
GGHELSKSTGNAG

SEQ ID NO: 11817 - protein, 24 aa, Artificial sequence
  Protein classification predicting sequence
ITLFGADSIIGRTVVVHADADDLG

SEQ ID NO: 11818 - protein, 6 aa, Artificial sequence
  Protein classification predicting sequence
KEHGAP

SEQ ID NO: 11819 - protein, 6 aa, Artificial sequence
  Protein classification predicting sequence
GDLGNI

SEQ ID NO: 11820 - protein, 7 aa, Artificial sequence
  Protein classification predicting sequence
TGNAGAR

SEQ ID NO: 11821 - protein, 6 aa, Artificial sequence
  Protein classification predicting sequence
HLGDLP

SEQ ID NO: 11822 - protein, 6 aa, Artificial sequence
  Protein classification predicting sequence
DDLGRG

SEQ ID NO: 11823 - protein, 7 aa, Artificial sequence
  Protein classification predicting sequence
AGGHWDP

SEQ ID NO: 11824 - protein, 6 aa, Artificial sequence
  Protein classification predicting sequence
HGGPKD

SEQ ID NO: 11825 - protein, 10 aa, Artificial sequence
  Protein classification predicting sequence
RLACGVIGIA

SEQ ID NO: 11826 - protein, 7 aa, Artificial sequence
  Protein classification predicting sequence
CGVIGIA

SEQ ID NO: 11827 - protein, 12 aa, Artificial sequence
  Protein classification predicting sequence
GLTEGLHGFHVH

SEQ ID NO: 11828 - protein, 8 aa, Artificial sequence
  Protein classification predicting sequence
GLHGFHVH

SEQ ID NO: 11829 - protein, 13 aa, Artificial sequence
  Protein classification predicting sequence
GCTSAGPHFNPLS

SEQ ID NO: 11830 - protein, 7 aa, Artificial sequence
  Protein classification predicting sequence
DPNAERG

SEQ ID NO: 11831 - protein, 16 aa, Artificial sequence
  Protein classification predicting sequence
HQFGDNTNGCTSAGPH

SEQ ID NO: 11832 - protein, 6 aa, Artificial sequence
  Protein classification predicting sequence
GPHYNP

SEQ ID NO: 11833 - protein, 14 aa, Artificial sequence
  Protein classification predicting sequence
INFEQKESNGPVKV

SEQ ID NO: 11834 - protein, 10 aa, Artificial sequence
  Protein classification predicting sequence
NPAGKEHGAP

SEQ ID NO: 11835 - protein, 17 aa, Artificial sequence
  Protein classification predicting sequence
FGDNTNGCTSAGPHFNP

SEQ ID NO: 11836 - protein, 10 aa, Artificial sequence
  Protein classification predicting sequence
HGFHVHQYGD

SEQ ID NO: 11837 - protein, 11 aa, Artificial sequence
  Protein classification predicting sequence
GCTSAGPHFNP

SEQ ID NO: 11838 - protein, 6 aa, Artificial sequence
  Protein classification predicting sequence
ACGVIG

SEQ ID NO: 11839 - protein, 13 aa, Artificial sequence
  Protein classification predicting sequence
KTAIIIHAGADNF

SEQ ID NO: 11840 - protein, 6 aa, Artificial sequence
  Protein classification predicting sequence
PTTVTG

SEQ ID NO: 11841 - protein, 8 aa, Artificial sequence
  Protein classification predicting sequence
DKLIKLIG

SEQ ID NO: 11842 - protein, 11 aa, Artificial sequence
  Protein classification predicting sequence
TGNAGGRLACG

SEQ ID NO: 11843 - protein, 8 aa, Artificial sequence
  Protein classification predicting sequence
STGPHFNP

SEQ ID NO: 11844 - protein, 6 aa, Artificial sequence
  Protein classification predicting sequence
DKQIPL

SEQ ID NO: 11845 - protein, 24 aa, Artificial sequence
  Protein classification predicting sequence
HGFHVHQFGDNTQGCTSAGPHFNP

SEQ ID NO: 11846 - protein, 9 aa, Artificial sequence
  Protein classification predicting sequence
RLACGVIGI

SEQ ID NO: 11847 - protein, 8 aa, Artificial sequence
  Protein classification predicting sequence
RGDSKVSG

SEQ ID NO: 11848 - protein, 9 aa, Artificial sequence
  Protein classification predicting sequence
KAVCVLKGD

SEQ ID NO: 11849 - protein, 7 aa, Artificial sequence
  Protein classification predicting sequence
INFEQKE

SEQ ID NO: 11850 - protein, 40 aa, Artificial sequence
  Protein classification predicting sequence
GCTSAGPHFNPLSRKHGGPKDEERHVGDLGNVTADKDGVA

SEQ ID NO: 11851 - protein, 7 aa, Artificial sequence
  Protein classification predicting sequence
ACGVIGI

SEQ ID NO: 11852 - protein, 14 aa, Artificial sequence
  Protein classification predicting sequence
KAVCVLKGDGPVQG

SEQ ID NO: 11853 - protein, 8 aa, Artificial sequence
  Protein classification predicting sequence
TNGCTSAG

SEQ ID NO: 11854 - protein, 12 aa, Artificial sequence
  Protein classification predicting sequence
DEERHVGDLGNV

SEQ ID NO: 11855 - protein, 9 aa, Artificial sequence
  Protein classification predicting sequence
RHVGDLGNV

SEQ ID NO: 11856 - protein, 7 aa, Artificial sequence
  Protein classification predicting sequence
GPTTVTG

SEQ ID NO: 11857 - protein, 9 aa, Artificial sequence
  Protein classification predicting sequence
GRAVVVHAD

SEQ ID NO: 11858 - protein, 8 aa, Artificial sequence
  Protein classification predicting sequence
HEKADDLG

SEQ ID NO: 11859 - protein, 6 aa, Artificial sequence
  Protein classification predicting sequence
NSIVGR

SEQ ID NO: 11860 - protein, 7 aa, Artificial sequence
  Protein classification predicting sequence
NSVVGRA

SEQ ID NO: 11861 - protein, 8 aa, Artificial sequence
  Protein classification predicting sequence
SKTTGNAG

SEQ ID NO: 11862 - protein, 11 aa, Artificial sequence
  Protein classification predicting sequence
TGNAGSRLACG

SEQ ID NO: 11863 - protein, 7 aa, Artificial sequence
  Protein classification predicting sequence
HVHQFGD

SEQ ID NO: 11864 - protein, 7 aa, Artificial sequence
  Protein classification predicting sequence
HVHEFGD

SEQ ID NO: 11865 - protein, 10 aa, Artificial sequence
  Protein classification predicting sequence
GLTPGLHGFH

SEQ ID NO: 11866 - protein, 8 aa, Artificial sequence
  Protein classification predicting sequence
RLACCVVG

SEQ ID NO: 11867 - protein, 7 aa, Artificial sequence
  Protein classification predicting sequence
AGPHFNP

SEQ ID NO: 11868 - protein, 7 aa, Artificial sequence
  Protein classification predicting sequence
GSFEKFK

SEQ ID NO: 11869 - protein, 7 aa, Artificial sequence
  Protein classification predicting sequence
KHHNTYV

SEQ ID NO: 11870 - protein, 6 aa, Artificial sequence
  Protein classification predicting sequence
WEHAYY

SEQ ID NO: 11871 - protein, 7 aa, Artificial sequence
  Protein classification predicting sequence
GSGWGWL

SEQ ID NO: 11872 - protein, 8 aa, Artificial sequence
  Protein classification predicting sequence
FGSGWAWL

SEQ ID NO: 11873 - protein, 8 aa, Artificial sequence
  Protein classification predicting sequence
WLVKKADG

SEQ ID NO: 11874 - protein, 7 aa, Artificial sequence
  Protein classification predicting sequence
TYVTNLN

SEQ ID NO: 11875 - protein, 7 aa, Artificial sequence
  Protein classification predicting sequence
NWEFVAK

SEQ ID NO: 11876 - protein, 7 aa, Artificial sequence
  Protein classification predicting sequence
WNHTFYW

SEQ ID NO: 11877 - protein, 10 aa, Artificial sequence
  Protein classification predicting sequence
DVWEHAYYID

SEQ ID NO: 11878 - protein, 6 aa, Artificial sequence
  Protein classification predicting sequence
WNVVNW

SEQ ID NO: 11879 - protein, 7 aa, Artificial sequence
  Protein classification predicting sequence
KHHQTYV

SEQ ID NO: 11880 - protein, 6 aa, Artificial sequence
  Protein classification predicting sequence
AFKEQF

SEQ ID NO: 11881 - protein, 7 aa, Artificial sequence
  Protein classification predicting sequence
TSNAGTP

SEQ ID NO: 11882 - protein, 6 aa, Artificial sequence
  Protein classification predicting sequence
GGHANH

SEQ ID NO: 11883 - protein, 6 aa, Artificial sequence
  Protein classification predicting sequence
DFGSFE

SEQ ID NO: 11884 - protein, 6 aa, Artificial sequence
  Protein classification predicting sequence
NVRPDY

SEQ ID NO: 11885 - protein, 6 aa, Artificial sequence
  Protein classification predicting sequence
YDALEP

SEQ ID NO: 11886 - protein, 7 aa, Artificial sequence
  Protein classification predicting sequence
DYGALEP

SEQ ID NO: 11887 - protein, 7 aa, Artificial sequence
  Protein classification predicting sequence
KHHATYV

SEQ ID NO: 11888 - protein, 8 aa, Artificial sequence
  Protein classification predicting sequence
AKLEEARA

SEQ ID NO: 11889 - protein, 8 aa, Artificial sequence
  Protein classification predicting sequence
LNEKNLAF

SEQ ID NO: 11890 - protein, 7 aa, Artificial sequence
  Protein classification predicting sequence
FELPALP

SEQ ID NO: 11891 - protein, 11 aa, Artificial sequence
  Protein classification predicting sequence
WEHAYYIDYRN

SEQ ID NO: 11892 - protein, 7 aa, Artificial sequence
  Protein classification predicting sequence
FWALVNW

SEQ ID NO: 11893 - protein, 7 aa, Artificial sequence
  Protein classification predicting sequence
KHHAAYV

SEQ ID NO: 11894 - protein, 12 aa, Artificial sequence
  Protein classification predicting sequence
FNNAAQVWNHTF

SEQ ID NO: 11895 - protein, 5 aa, Artificial sequence
  Protein classification predicting sequence
HHGKH

SEQ ID NO: 11896 - protein, 7 aa, Artificial sequence
  Protein classification predicting sequence
GSGWVWL

SEQ ID NO: 11897 - protein, 5 aa, Artificial sequence
  Protein classification predicting sequence
HSIFW

SEQ ID NO: 11898 - protein, 9 aa, Artificial sequence
  Protein classification predicting sequence
GKGGGKPGG

SEQ ID NO: 11899 - protein, 6 aa, Artificial sequence
  Protein classification predicting sequence
HHDKHH

SEQ ID NO: 11900 - protein, 5 aa, Artificial sequence
  Protein classification predicting sequence
DVWEH

SEQ ID NO: 11901 - protein, 7 aa, Artificial sequence
  Protein classification predicting sequence
YYIDYRN

SEQ ID NO: 11902 - protein, 6 aa, Artificial sequence
  Protein classification predicting sequence
GIFNNA

SEQ ID NO: 11903 - protein, 6 aa, Artificial sequence
  Protein classification predicting sequence
LPDLPY

SEQ ID NO: 11904 - protein, 10 aa, Artificial sequence
  Protein classification predicting sequence
FNNAAQVWNH

SEQ ID NO: 11905 - protein, 6 aa, Artificial sequence
  Protein classification predicting sequence
RDFGSF

SEQ ID NO: 11906 - protein, 8 aa, Artificial sequence
  Protein classification predicting sequence
QNRRPDYI

SEQ ID NO: 11907 - protein, 6 aa, Artificial sequence
  Protein classification predicting sequence
LPELPY

SEQ ID NO: 11908 - protein, 8 aa, Artificial sequence
  Protein classification predicting sequence
EKNLAFHL

SEQ ID NO: 11909 - protein, 6 aa, Artificial sequence
  Protein classification predicting sequence
YLQYKN

SEQ ID NO: 11910 - protein, 9 aa, Artificial sequence
  Protein classification predicting sequence
KHHAAYVNN

SEQ ID NO: 11911 - protein, 7 aa, Artificial sequence
  Protein classification predicting sequence
PSGALAD

SEQ ID NO: 11912 - protein, 7 aa, Artificial sequence
  Protein classification predicting sequence
IHHTKHH

SEQ ID NO: 11913 - protein, 7 aa, Artificial sequence
  Protein classification predicting sequence
LSPNGGG

SEQ ID NO: 11914 - protein, 10 aa, Artificial sequence
  Protein classification predicting sequence
RFGSGWAWLV

SEQ ID NO: 11915 - protein, 6 aa, Artificial sequence
  Protein classification predicting sequence
NQDSPL

SEQ ID NO: 11916 - protein, 8 aa, Artificial sequence
  Protein classification predicting sequence
PLTEGKTP

SEQ ID NO: 11917 - protein, 6 aa, Artificial sequence
  Protein classification predicting sequence
AFWNVV

SEQ ID NO: 11918 - protein, 9 aa, Artificial sequence
  Protein classification predicting sequence
PYAYDALEP

SEQ ID NO: 11919 - protein, 7 aa, Artificial sequence
  Protein classification predicting sequence
LHHQKHH

SEQ ID NO: 11920 - protein, 9 aa, Artificial sequence
  Protein classification predicting sequence
AIKFNGGGH

SEQ ID NO: 11921 - protein, 7 aa, Artificial sequence
  Protein classification predicting sequence
DYAALEP

SEQ ID NO: 11922 - protein, 6 aa, Artificial sequence
  Protein classification predicting sequence
HHGKHH

SEQ ID NO: 11923 - protein, 7 aa, Artificial sequence
  Protein classification predicting sequence
NLNAALE

SEQ ID NO: 11924 - protein, 13 aa, Artificial sequence
  Protein classification predicting sequence
DVWEHAYYLKYQN

SEQ ID NO: 11925 - protein, 15 aa, Artificial sequence
  Protein classification predicting sequence
DVWEHAYYLKYQNRR

SEQ ID NO: 11926 - protein, 7 aa, Artificial sequence
  Protein classification predicting sequence
IKRDFGS

SEQ ID NO: 11927 - protein, 9 aa, Artificial sequence
  Protein classification predicting sequence
TWHHDTHHQ

SEQ ID NO: 11928 - protein, 8 aa, Artificial sequence
  Protein classification predicting sequence
GWALLVYD

SEQ ID NO: 11929 - protein, 6 aa, Artificial sequence
  Protein classification predicting sequence
NHSIFW

SEQ ID NO: 11930 - protein, 9 aa, Artificial sequence
  Protein classification predicting sequence
NLKPISEGG

SEQ ID NO: 11931 - protein, 10 aa, Artificial sequence
  Protein classification predicting sequence
LPYAYDALEP

SEQ ID NO: 11932 - protein, 9 aa, Artificial sequence
  Protein classification predicting sequence
LSPNSEEKG

SEQ ID NO: 11933 - protein, 21 aa, Artificial sequence
  Protein classification predicting sequence
LEIVTTPNQDNPLTEGKTPIL

SEQ ID NO: 11934 - protein, 5 aa, Artificial sequence
  Protein classification predicting sequence
HATYV

SEQ ID NO: 11935 - protein, 6 aa, Artificial sequence
  Protein classification predicting sequence
HYGKHH

SEQ ID NO: 11936 - protein, 8 aa, Artificial sequence
  Protein classification predicting sequence
VRNNGGGH

SEQ ID NO: 11937 - protein, 6 aa, Artificial sequence
  Protein classification predicting sequence
NHTFFW

SEQ ID NO: 11938 - protein, 6 aa, Artificial sequence
  Protein classification predicting sequence
NHSLFW

SEQ ID NO: 11939 - protein, 7 aa, Artificial sequence
  Protein classification predicting sequence
EGGGEPP

SEQ ID NO: 11940 - protein, 5 aa, Artificial sequence
  Protein classification predicting sequence
QGSGW

SEQ ID NO: 11941 - protein, 11 aa, Artificial sequence
  Protein classification predicting sequence
GIDVWEHAYYL

SEQ ID NO: 11942 - protein, 6 aa, Artificial sequence
  Protein classification predicting sequence
GSFDKF

SEQ ID NO: 11943 - protein, 8 aa, Artificial sequence
  Protein classification predicting sequence
AFWNIVNW

SEQ ID NO: 11944 - protein, 12 aa, Artificial sequence
  Protein classification predicting sequence
RFGSGWAWLVVN

SEQ ID NO: 11945 - protein, 14 aa, Artificial sequence
  Protein classification predicting sequence
PILGLDVWEHAYYL

SEQ ID NO: 11946 - protein, 6 aa, Artificial sequence
  Protein classification predicting sequence
HHSKHH

SEQ ID NO: 11947 - protein, 7 aa, Artificial sequence
  Protein classification predicting sequence
INAAFGS

SEQ ID NO: 11948 - protein, 9 aa, Artificial sequence
  Protein classification predicting sequence
DVWEHAYYL

SEQ ID NO: 11949 - protein, 8 aa, Artificial sequence
  Protein classification predicting sequence
KFKEKLTA

SEQ ID NO: 11950 - protein, 17 aa, Artificial sequence
  Protein classification predicting sequence
SVGVQGSGWGWLGFNKE

SEQ ID NO: 11951 - protein, 11 aa, Artificial sequence
  Protein classification predicting sequence
WEHAYYLKYQN

SEQ ID NO: 11952 - protein, 8 aa, Artificial sequence
  Protein classification predicting sequence
YAYNALEP

SEQ ID NO: 11953 - protein, 7 aa, Artificial sequence
  Protein classification predicting sequence
FWNVVNW

SEQ ID NO: 11954 - protein, 7 aa, Artificial sequence
  Protein classification predicting sequence
LEPFFDE

SEQ ID NO: 11955 - protein, 7 aa, Artificial sequence
  Protein classification predicting sequence
ISGQINE

SEQ ID NO: 11956 - protein, 6 aa, Artificial sequence
  Protein classification predicting sequence
WKNLAP

SEQ ID NO: 11957 - protein, 5 aa, Artificial sequence
  Protein classification predicting sequence
TANQD

SEQ ID NO: 11958 - protein, 8 aa, Artificial sequence
  Protein classification predicting sequence
YDYGALEP

SEQ ID NO: 11959 - protein, 11 aa, Artificial sequence
  Protein classification predicting sequence
AIDTNFGSLEA

SEQ ID NO: 11960 - protein, 6 aa, Artificial sequence
  Protein classification predicting sequence
YVNNLN

SEQ ID NO: 11961 - protein, 17 aa, Artificial sequence
  Protein classification predicting sequence
GIDVWEHAYYLQYKNVR

SEQ ID NO: 11962 - protein, 7 aa, Artificial sequence
  Protein classification predicting sequence
GSGWAWL

SEQ ID NO: 11963 - protein, 8 aa, Artificial sequence
  Protein classification predicting sequence
PALRFNGG

SEQ ID NO: 11964 - protein, 6 aa, Artificial sequence
  Protein classification predicting sequence
ALEPHI

SEQ ID NO: 11965 - protein, 6 aa, Artificial sequence
  Protein classification predicting sequence
LSPNGG

SEQ ID NO: 11966 - protein, 9 aa, Artificial sequence
  Protein classification predicting sequence
LSPNGGGEP

SEQ ID NO: 11967 - protein, 13 aa, Artificial sequence
  Protein classification predicting sequence
GLQGSGWAVLGYD

SEQ ID NO: 11968 - protein, 15 aa, Artificial sequence
  Protein classification predicting sequence
DMWEHAFYLQYKNVK

SEQ ID NO: 11969 - protein, 11 aa, Artificial sequence
  Protein classification predicting sequence
DVWEHAYYLNY

SEQ ID NO: 11970 - protein, 9 aa, Artificial sequence
  Protein classification predicting sequence
FNGGGHINH

SEQ ID NO: 11971 - protein, 8 aa, Artificial sequence
  Protein classification predicting sequence
SLEEFKKE

SEQ ID NO: 11972 - protein, 13 aa, Artificial sequence
  Protein classification predicting sequence
VQGSGWGWLGFNK

SEQ ID NO: 11973 - protein, 6 aa, Artificial sequence
  Protein classification predicting sequence
TGLIPL

SEQ ID NO: 11974 - protein, 9 aa, Artificial sequence
  Protein classification predicting sequence
KHHQTYVNN

SEQ ID NO: 11975 - protein, 6 aa, Artificial sequence
  Protein classification predicting sequence
GSVDNF

SEQ ID NO: 11976 - protein, 8 aa, Artificial sequence
  Protein classification predicting sequence
YAYDALEP

SEQ ID NO: 11977 - protein, 6 aa, Artificial sequence
  Protein classification predicting sequence
TAVRNN

SEQ ID NO: 11978 - protein, 7 aa, Artificial sequence
  Protein classification predicting sequence
LFWKGLK

SEQ ID NO: 11979 - protein, 8 aa, Artificial sequence
  Protein classification predicting sequence
VVSTANQD

SEQ ID NO: 11980 - protein, 7 aa, Artificial sequence
  Protein classification predicting sequence
PNGGGEP

SEQ ID NO: 11981 - protein, 9 aa, Artificial sequence
  Protein classification predicting sequence
NYNKALEQL

SEQ ID NO: 11982 - protein, 12 aa, Artificial sequence
  Protein classification predicting sequence
LGSRQKHSLPDL

SEQ ID NO: 11983 - protein, 7 aa, Artificial sequence
  Protein classification predicting sequence
KHSLPDL

SEQ ID NO: 11984 - protein, 6 aa, Artificial sequence
  Protein classification predicting sequence
ALEPYI

SEQ ID NO: 11985 - protein, 57 aa, Artificial sequence
  Protein classification predicting sequence
INAQIMQLHHSKHHAAYVNNLNVTEEKYQEALAKGDVTAQIALQPALKFNGGGHINH

SEQ ID NO: 11986 - protein, 9 aa, Artificial sequence
  Protein classification predicting sequence
AIKRDFGSF

SEQ ID NO: 11987 - protein, 10 aa, Artificial sequence
  Protein classification predicting sequence
TAVRNNGGGH

SEQ ID NO: 11988 - protein, 11 aa, Artificial sequence
  Protein classification predicting sequence
RFGSGWAWLVV

SEQ ID NO: 11989 - protein, 7 aa, Artificial sequence
  Protein classification predicting sequence
ELPKLPY

SEQ ID NO: 11990 - protein, 7 aa, Artificial sequence
  Protein classification predicting sequence
FDKETME

SEQ ID NO: 11991 - protein, 7 aa, Artificial sequence
  Protein classification predicting sequence
HHNTYVT

SEQ ID NO: 11992 - protein, 8 aa, Artificial sequence
  Protein classification predicting sequence
VANLDSVP

SEQ ID NO: 11993 - protein, 8 aa, Artificial sequence
  Protein classification predicting sequence
QNRRPEYI

SEQ ID NO: 11994 - protein, 9 aa, Artificial sequence
  Protein classification predicting sequence
FDKETMEIH

SEQ ID NO: 11995 - protein, 6 aa, Artificial sequence
  Protein classification predicting sequence
WNVINW

SEQ ID NO: 11996 - protein, 6 aa, Artificial sequence
  Protein classification predicting sequence
LQIAAC

SEQ ID NO: 11997 - protein, 16 aa, Artificial sequence
  Protein classification predicting sequence
ALQPALKFNGGGHINH

SEQ ID NO: 11998 - protein, 20 aa, Artificial sequence
  Protein classification predicting sequence
GGGEPKGELLEAIKRDFGSF

SEQ ID NO: 11999 - protein, 10 aa, Artificial sequence
  Protein classification predicting sequence
AIDDAFGSFD

SEQ ID NO: 12000 - protein, 8 aa, Artificial sequence
  Protein classification predicting sequence
LHHSKHHA

SEQ ID NO: 12001 - protein, 52 aa, Artificial sequence
  Protein classification predicting sequence
RLLTFQLYDQQANVPLGIIPLLQVDMWEHAFYLQYKNVKADYVKAFWNVVNW

SEQ ID NO: 12002 - protein, 11 aa, Artificial sequence
  Protein classification predicting sequence
INEIHHTKHHA

SEQ ID NO: 12003 - protein, 12 aa, Artificial sequence
  Protein classification predicting sequence
YVKGVNDALAKL

SEQ ID NO: 12004 - protein, 7 aa, Artificial sequence
  Protein classification predicting sequence
FGSFDKF

SEQ ID NO: 12005 - protein, 13 aa, Artificial sequence
  Protein classification predicting sequence
LLTFQLYDQQANV

SEQ ID NO: 12006 - protein, 19 aa, Artificial sequence
  Protein classification predicting sequence
DHAAIFLNEKNLAFHLGGH

SEQ ID NO: 12007 - protein, 6 aa, Artificial sequence
  Protein classification predicting sequence
IMQLHH

SEQ ID NO: 12008 - protein, 8 aa, Artificial sequence
  Protein classification predicting sequence
HHQTYVTN

SEQ ID NO: 12009 - protein, 11 aa, Artificial sequence
  Protein classification predicting sequence
FGSFDKFRAQF

SEQ ID NO: 12010 - protein, 8 aa, Artificial sequence
  Protein classification predicting sequence
AFWNVVNW

SEQ ID NO: 12011 - protein, 12 aa, Artificial sequence
  Protein classification predicting sequence
AFWNVVNWADVQ

SEQ ID NO: 12012 - protein, 7 aa, Artificial sequence
  Protein classification predicting sequence
EALAKGD

SEQ ID NO: 12013 - protein, 6 aa, Artificial sequence
  Protein classification predicting sequence
GGHINH

SEQ ID NO: 12014 - protein, 7 aa, Artificial sequence
  Protein classification predicting sequence
TTGLIPL

SEQ ID NO: 12015 - protein, 18 aa, Artificial sequence
  Protein classification predicting sequence
KLGWAIDEDFGSFEALVK

SEQ ID NO: 12016 - protein, 19 aa, Artificial sequence
  Protein classification predicting sequence
AEGAALQGSGWVWLALDKE

SEQ ID NO: 12017 - protein, 6 aa, Artificial sequence
  Protein classification predicting sequence
RDFGSV

SEQ ID NO: 12018 - protein, 24 aa, Artificial sequence
  Protein classification predicting sequence
PLLGIDVWEHAYYLQYKNVRPDYL

SEQ ID NO: 12019 - protein, 6 aa, Artificial sequence
  Protein classification predicting sequence
LEIVTT

SEQ ID NO: 12020 - protein, 6 aa, Artificial sequence
  Protein classification predicting sequence
IMELHH

SEQ ID NO: 12021 - protein, 6 aa, Artificial sequence
  Protein classification predicting sequence
GHVNHS

SEQ ID NO: 12022 - protein, 6 aa, Artificial sequence
  Protein classification predicting sequence
NNGGGH

SEQ ID NO: 12023 - protein, 7 aa, Artificial sequence
  Protein classification predicting sequence
GGGHANH

SEQ ID NO: 12024 - protein, 32 aa, Artificial sequence
  Protein classification predicting sequence
KHSLPDLPYDYGALEPHINAQIMQLHHSKHHA

SEQ ID NO: 12025 - protein, 12 aa, Artificial sequence
  Protein classification predicting sequence
YVNNLNVTEEKY

SEQ ID NO: 12026 - protein, 48 aa, Artificial sequence
  Protein classification predicting sequence
NQDPLQGTTGLIPLLGIDVWEHAYYLQYKNVRPDYLKAIWNVINWENV

SEQ ID NO: 12027 - protein, 12 aa, Artificial sequence
  Protein classification predicting sequence
LPVEELITKLDQ

SEQ ID NO: 12028 - protein, 58 aa, Artificial sequence
  Protein classification predicting sequence
PADKKTVLRNNAGGHANHSLFWKGLKKGTTLQGDLKAAIERDFGSVDNFKAEFEKAAA

SEQ ID NO: 12029 - protein, 7 aa, Artificial sequence
  Protein classification predicting sequence
NHSLFWK

SEQ ID NO: 12030 - protein, 8 aa, Artificial sequence
  Protein classification predicting sequence
AVEGTDLE

SEQ ID NO: 12031 - protein, 14 aa, Artificial sequence
  Protein classification predicting sequence
KSIEEIVANLDSVP

SEQ ID NO: 12032 - protein, 31 aa, Artificial sequence
  Protein classification predicting sequence
NIQTAVRNNGGGHLNHSLFWELLSPNSEEKG

SEQ ID NO: 12033 - protein, 9 aa, Artificial sequence
  Protein classification predicting sequence
KIKEQWGSL

SEQ ID NO: 12034 - protein, 39 aa, Artificial sequence
  Protein classification predicting sequence
EFKKEFADKAAARFGSGWAWLVVNNGQLEIVTTPNQDNP

SEQ ID NO: 12035 - protein, 29 aa, Artificial sequence
  Protein classification predicting sequence
TEGKTPILGLDVWEHAYYLKYQNKRPDYI

SEQ ID NO: 12036 - protein, 7 aa, Artificial sequence
  Protein classification predicting sequence
NANAALE

SEQ ID NO: 12037 - protein, 16 aa, Artificial sequence
  Protein classification predicting sequence
INNGGGHLNHALFWEL

SEQ ID NO: 12038 - protein, 9 aa, Artificial sequence
  Protein classification predicting sequence
STANQDTPI

SEQ ID NO: 12039 - protein, 7 aa, Artificial sequence
  Protein classification predicting sequence
EGKKPIL

SEQ ID NO: 12040 - protein, 12 aa, Artificial sequence
  Protein classification predicting sequence
LDVWEHAYYLNY

SEQ ID NO: 12041 - protein, 29 aa, Artificial sequence
  Protein classification predicting sequence
LDVWEHAYYLNYRNVRPNYIKAFFEIINW

SEQ ID NO: 12042 - protein, 22 aa, Artificial sequence
  Protein classification predicting sequence
LINNGGGHLNHALFWELLSPEK

SEQ ID NO: 12043 - protein, 11 aa, Artificial sequence
  Protein classification predicting sequence
TSTANQDTPIS

SEQ ID NO: 12044 - protein, 30 aa, Artificial sequence
  Protein classification predicting sequence
KPILALDVWEHAYYLNYRNVRPNYIKAFFE

SEQ ID NO: 12045 - protein, 19 aa, Artificial sequence
  Protein classification predicting sequence
DAETMTLHHDKHHATYVAN

SEQ ID NO: 12046 - protein, 12 aa, Artificial sequence
  Protein classification predicting sequence
NAALEKHPEIGE

SEQ ID NO: 12047 - protein, 23 aa, Artificial sequence
  Protein classification predicting sequence
NANAALEKHPEIGEDLEALLADV

SEQ ID NO: 12048 - protein, 22 aa, Artificial sequence
  Protein classification predicting sequence
DIRQALINNGGGHLNHALFWEL

SEQ ID NO: 12049 - protein, 13 aa, Artificial sequence
  Protein classification predicting sequence
PILGLDVWEHAYY

SEQ ID NO: 12050 - protein, 8 aa, Artificial sequence
  Protein classification predicting sequence
DVWEHAYY

SEQ ID NO: 12051 - protein, 20 aa, Artificial sequence
  Protein classification predicting sequence
AALEKHPEIGENLEELLADV

SEQ ID NO: 12052 - protein, 6 aa, Artificial sequence
  Protein classification predicting sequence
TMEIHH

SEQ ID NO: 12053 - protein, 6 aa, Artificial sequence
  Protein classification predicting sequence
HHQKHH

SEQ ID NO: 12054 - protein, 9 aa, Artificial sequence
  Protein classification predicting sequence
AVRNNGGGH

SEQ ID NO: 12055 - protein, 19 aa, Artificial sequence
  Protein classification predicting sequence
IQTAVRNNGGGHLNHSLFW

SEQ ID NO: 12056 - protein, 9 aa, Artificial sequence
  Protein classification predicting sequence
RFGSGWAWL

SEQ ID NO: 12057 - protein, 13 aa, Artificial sequence
  Protein classification predicting sequence
RFGSGWAWLSVTP

SEQ ID NO: 12058 - protein, 6 aa, Artificial sequence
  Protein classification predicting sequence
STANQD

SEQ ID NO: 12059 - protein, 36 aa, Artificial sequence
  Protein classification predicting sequence
LPSLPYAYDALEPHFDKQTMEIHHTKHHQTYVNNAN

SEQ ID NO: 12060 - protein, 8 aa, Artificial sequence
  Protein classification predicting sequence
SGASGFPI

SEQ ID NO: 12061 - protein, 10 aa, Artificial sequence
  Protein classification predicting sequence
VGKEIPHPNT

SEQ ID NO: 12062 - protein, 10 aa, Artificial sequence
  Protein classification predicting sequence
EARAAVRAAY

SEQ ID NO: 12063 - protein, 6 aa, Artificial sequence
  Protein classification predicting sequence
LLRKWY

SEQ ID NO: 12064 - protein, 13 aa, Artificial sequence
  Protein classification predicting sequence
IITAESGKPLKEA

SEQ ID NO: 12065 - protein, 7 aa, Artificial sequence
  Protein classification predicting sequence
GEILYSA

SEQ ID NO: 12066 - protein, 11 aa, Artificial sequence
  Protein classification predicting sequence
FLEWFSEEARR

SEQ ID NO: 12067 - protein, 7 aa, Artificial sequence
  Protein classification predicting sequence
YGDIIYT

SEQ ID NO: 12068 - protein, 10 aa, Artificial sequence
  Protein classification predicting sequence
GVYNVIPCSR

SEQ ID NO: 12069 - protein, 15 aa, Artificial sequence
  Protein classification predicting sequence
CTDPLVSKISFTGST

SEQ ID NO: 12070 - protein, 9 aa, Artificial sequence
  Protein classification predicting sequence
FLVQRGIHD

SEQ ID NO: 12071 - protein, 7 aa, Artificial sequence
  Protein classification predicting sequence
FAEAMKK

SEQ ID NO: 12072 - protein, 33 aa, Artificial sequence
  Protein classification predicting sequence
LRVGNGFEEGTTQGPLINEKAVEKVEKQVNDAV

SEQ ID NO: 12073 - protein, 63 aa, Artificial sequence
  Protein classification predicting sequence
VGLAGYFYSQDPAQIWRVAEQLEVGMVGVNEGLISSVECPFGGVKQSGLGREGSKYGIDEYLE

SEQ ID NO: 12074 - protein, 22 aa, Artificial sequence
  Protein classification predicting sequence
RLGSTFPGCRLRPRAGGLVPAS

SEQ ID NO: 12075 - protein, 9 aa, Artificial sequence
  Protein classification predicting sequence
PAPGPAQLR

SEQ ID NO: 12076 - protein, 17 aa, Artificial sequence
  Protein classification predicting sequence
WREVSAKERSSLLRKWY

SEQ ID NO: 12077 - protein, 43 aa, Artificial sequence
  Protein classification predicting sequence
VTGGKRHQLGKNFFEPTLLCNVTQDMLCTHEETFGPLAPVIKF

SEQ ID NO: 12078 - protein, 10 aa, Artificial sequence
  Protein classification predicting sequence
DSFVGGRWLP

SEQ ID NO: 12079 - protein, 11 aa, Artificial sequence
  Protein classification predicting sequence
KERSSLLRKWY

SEQ ID NO: 12080 - protein, 34 aa, Artificial sequence
  Protein classification predicting sequence
ITPWNFPSAMITRKVGAALAAGCTVVVKPAEDTP

SEQ ID NO: 12081 - protein, 48 aa, Artificial sequence
  Protein classification predicting sequence
TGKILLHHAANSVKRVSMELGGLAPFIVFDSANVDQAVAGAMASKFRN

SEQ ID NO: 12082 - protein, 27 aa, Artificial sequence
  Protein classification predicting sequence
LRVGNGFEEGTTQGPLINEKAVEKVEK

SEQ ID NO: 12083 - protein, 70 aa, Artificial sequence
  Protein classification predicting sequence
AIANAADVGLAGYFYSQDPAQIWRVAEQLEVGMVGVNEGLISSVECPFGGVKQSGLGREGSKYGIDEYLE

SEQ ID NO: 12084 - protein, 8 aa, Artificial sequence
  Protein classification predicting sequence
WFLPTHGD

SEQ ID NO: 12085 - protein, 6 aa, Artificial sequence
  Protein classification predicting sequence
VTGGDP

SEQ ID NO: 12086 - protein, 9 aa, Artificial sequence
  Protein classification predicting sequence
YLTWGEPPA

SEQ ID NO: 12087 - protein, 8 aa, Artificial sequence
  Protein classification predicting sequence
RETTEEAW

SEQ ID NO: 12088 - protein, 7 aa, Artificial sequence
  Protein classification predicting sequence
GVLLPTG

SEQ ID NO: 12089 - protein, 5 aa, Artificial sequence
  Protein classification predicting sequence
CEDSW

SEQ ID NO: 12090 - protein, 9 aa, Artificial sequence
  Protein classification predicting sequence
PPLYFGGSS

SEQ ID NO: 12091 - protein, 7 aa, Artificial sequence
  Protein classification predicting sequence
RFGIRLH

SEQ ID NO: 12092 - protein, 8 aa, Artificial sequence
  Protein classification predicting sequence
GAGTALVG

SEQ ID NO: 12093 - protein, 8 aa, Artificial sequence
  Protein classification predicting sequence
AQAADRLG

SEQ ID NO: 12094 - protein, 13 aa, Artificial sequence
  Protein classification predicting sequence
AQAADRLGYTGVL

SEQ ID NO: 12095 - protein, 8 aa, Artificial sequence
  Protein classification predicting sequence
PTGRSCED

SEQ ID NO: 12096 - protein, 8 aa, Artificial sequence
  Protein classification predicting sequence
GRLLINVV

SEQ ID NO: 12097 - protein, 8 aa, Artificial sequence
  Protein classification predicting sequence
FGIRLHVI

SEQ ID NO: 12098 - protein, 6 aa, Artificial sequence
  Protein classification predicting sequence
GQQRMA

SEQ ID NO: 12099 - protein, 12 aa, Artificial sequence
  Protein classification predicting sequence
FGIRLHVIVRET

SEQ ID NO: 12100 - protein, 17 aa, Artificial sequence
  Protein classification predicting sequence
FGIRLHVIVRETNEEAW

SEQ ID NO: 12101 - protein, 8 aa, Artificial sequence
  Protein classification predicting sequence
DDTIARAQ

SEQ ID NO: 12102 - protein, 6 aa, Artificial sequence
  Protein classification predicting sequence
GIDTFI

SEQ ID NO: 12103 - protein, 8 aa, Artificial sequence
  Protein classification predicting sequence
SGYPHLEE

SEQ ID NO: 12104 - protein, 27 aa, Artificial sequence
  Protein classification predicting sequence
SPTVAARQAATLDRLSNGRALFNLVTG

SEQ ID NO: 12105 - protein, 16 aa, Artificial sequence
  Protein classification predicting sequence
DHGYLQQIAQAADRLG

SEQ ID NO: 12106 - protein, 9 aa, Artificial sequence
  Protein classification predicting sequence
RLHVIVRET

SEQ ID NO: 12107 - protein, 10 aa, Artificial sequence
  Protein classification predicting sequence
PTGRSCEDSW

SEQ ID NO: 12108 - protein, 7 aa, Artificial sequence
  Protein classification predicting sequence
GKHIQVK

SEQ ID NO: 12109 - protein, 24 aa, Artificial sequence
  Protein classification predicting sequence
QQPRPPLYFGGSSEAAQDLAAEQV

SEQ ID NO: 12110 - protein, 22 aa, Artificial sequence
  Protein classification predicting sequence
KAAAQGREVRFGIRLHVIVRET

SEQ ID NO: 12111 - protein, 19 aa, Artificial sequence
  Protein classification predicting sequence
GLVRGGAGTALVGDGPTVA

SEQ ID NO: 12112 - protein, 14 aa, Artificial sequence
  Protein classification predicting sequence
ERYEASVEFTRIWR

SEQ ID NO: 12113 - protein, 16 aa, Artificial sequence
  Protein classification predicting sequence
GYVSPFGEMVANDILP

SEQ ID NO: 12114 - protein, 8 aa, Artificial sequence
  Protein classification predicting sequence
YLTWGEPP

SEQ ID NO: 12115 - protein, 12 aa, Artificial sequence
  Protein classification predicting sequence
DSVGQQRMAALH

SEQ ID NO: 12116 - protein, 9 aa, Artificial sequence
  Protein classification predicting sequence
FLDHSERYE

SEQ ID NO: 12117 - protein, 47 aa, Artificial sequence
  Protein classification predicting sequence
GARAVDHGYLQQIAQAADRLGFGGVLIPTGRSCEDSWLVAASLIPVT

SEQ ID NO: 12118 - protein, 8 aa, Artificial sequence
  Protein classification predicting sequence
RYEASAEF

SEQ ID NO: 12119 - protein, 6 aa, Artificial sequence
  Protein classification predicting sequence
LFPPVQ

SEQ ID NO: 12120 - protein, 11 aa, Artificial sequence
  Protein classification predicting sequence
SGYPHLEEAYR

SEQ ID NO: 12121 - protein, 8 aa, Artificial sequence
  Protein classification predicting sequence
DSVGQQRM

SEQ ID NO: 12122 - protein, 7 aa, Artificial sequence
  Protein classification predicting sequence
NLVTGGD

SEQ ID NO: 12123 - protein, 7 aa, Artificial sequence
  Protein classification predicting sequence
AVAEKIA

SEQ ID NO: 12124 - protein, 16 aa, Artificial sequence
  Protein classification predicting sequence
LGIDTFIFSGYPHLEE

SEQ ID NO: 12125 - protein, 8 aa, Artificial sequence
  Protein classification predicting sequence
WRKVLEGE

SEQ ID NO: 12126 - protein, 12 aa, Artificial sequence
  Protein classification predicting sequence
GKHIQVKGAKLL

SEQ ID NO: 12127 - protein, 32 aa, Artificial sequence
  Protein classification predicting sequence
DNLEISPNLWAGVGLVRGGAGTALVGDGPTVA

SEQ ID NO: 12128 - protein, 27 aa, Artificial sequence
  Protein classification predicting sequence
SPNLWAGVGLVRGGAGTALVGDGPTVA

SEQ ID NO: 12129 - protein, 8 aa, Artificial sequence
  Protein classification predicting sequence
ELLFPHLD

SEQ ID NO: 12130 - protein, 18 aa, Artificial sequence
  Protein classification predicting sequence
AAQDLAAEQVELYLTWGE

SEQ ID NO: 12131 - protein, 6 aa, Artificial sequence
  Protein classification predicting sequence
YLTWGE

SEQ ID NO: 12132 - protein, 7 aa, Artificial sequence
  Protein classification predicting sequence
SHGNTAR

SEQ ID NO: 12133 - protein, 19 aa, Artificial sequence
  Protein classification predicting sequence
IAADEKRHETAYTKIVEKL

SEQ ID NO: 12134 - protein, 8 aa, Artificial sequence
  Protein classification predicting sequence
EIDPDGTV

SEQ ID NO: 12135 - protein, 16 aa, Artificial sequence
  Protein classification predicting sequence
WTRAWTAEENRHGDLL

SEQ ID NO: 12136 - protein, 17 aa, Artificial sequence
  Protein classification predicting sequence
KTIQYLIGSGMDPRTEN

SEQ ID NO: 12137 - protein, 16 aa, Artificial sequence
  Protein classification predicting sequence
PYLGFIYTSFQERATF

SEQ ID NO: 12138 - protein, 7 aa, Artificial sequence
  Protein classification predicting sequence
NILVHLK

SEQ ID NO: 12139 - protein, 10 aa, Artificial sequence
  Protein classification predicting sequence
TAYTKIVEKL

SEQ ID NO: 12140 - protein, 7 aa, Artificial sequence
  Protein classification predicting sequence
TGLSGEG

SEQ ID NO: 12141 - protein, 6 aa, Artificial sequence
  Protein classification predicting sequence
PPREVH

SEQ ID NO: 12142 - protein, 8 aa, Artificial sequence
  Protein classification predicting sequence
LVHLKPVE

SEQ ID NO: 12143 - protein, 28 aa, Artificial sequence
  Protein classification predicting sequence
WTRAWTAEENRHGDLLNKYLYLSGRVDM

SEQ ID NO: 12144 - protein, 7 aa, Artificial sequence
  Protein classification predicting sequence
KIEIFKS

SEQ ID NO: 12145 - protein, 11 aa, Artificial sequence
  Protein classification predicting sequence
TYQTMLNTLDG

SEQ ID NO: 12146 - protein, 22 aa, Artificial sequence
  Protein classification predicting sequence
DEKRHETAYTKIVEKLFEIDPD

SEQ ID NO: 12147 - protein, 8 aa, Artificial sequence
  Protein classification predicting sequence
GVYTAKDY

SEQ ID NO: 12148 - protein, 8 aa, Artificial sequence
  Protein classification predicting sequence
PFSWIFDR

SEQ ID NO: 12149 - protein, 12 aa, Artificial sequence
  Protein classification predicting sequence
PPREVHVQVTHS

SEQ ID NO: 12150 - protein, 5 aa, Artificial sequence
  Protein classification predicting sequence
KCWQP

SEQ ID NO: 12151 - protein, 8 aa, Artificial sequence
  Protein classification predicting sequence
KEIPDDYF

SEQ ID NO: 12152 - protein, 6 aa, Artificial sequence
  Protein classification predicting sequence
AKEHGD

SEQ ID NO: 12153 - protein, 22 aa, Artificial sequence
  Protein classification predicting sequence
GRVDMKQIEKTIQYLIGSGMDP

SEQ ID NO: 12154 - protein, 18 aa, Artificial sequence
  Protein classification predicting sequence
YTSFQERATFISHGNTAR

SEQ ID NO: 12155 - protein, 7 aa, Artificial sequence
  Protein classification predicting sequence
AHLMYDG

SEQ ID NO: 12156 - protein, 10 aa, Artificial sequence
  Protein classification predicting sequence
HLKPVEKCWQ

SEQ ID NO: 12157 - protein, 8 aa, Artificial sequence
  Protein classification predicting sequence
DFLPDPAS

SEQ ID NO: 12158 - protein, 8 aa, Artificial sequence
  Protein classification predicting sequence
ERAQARAK

SEQ ID NO: 12159 - protein, 12 aa, Artificial sequence
  Protein classification predicting sequence
NTLDGVRDETGA

SEQ ID NO: 12160 - protein, 5 aa, Artificial sequence
  Protein classification predicting sequence
DMMRK

SEQ ID NO: 12161 - protein, 6 aa, Artificial sequence
  Protein classification predicting sequence
AQDYVC

SEQ ID NO: 12162 - protein, 18 aa, Artificial sequence
  Protein classification predicting sequence
DEKRHETAYTKIVEKLFE

SEQ ID NO: 12163 - protein, 15 aa, Artificial sequence
  Protein classification predicting sequence
MPAHLMYDGRDDNLF

SEQ ID NO: 12164 - protein, 11 aa, Artificial sequence
  Protein classification predicting sequence
GPAGEGAAMNA

SEQ ID NO: 12165 - protein, 7 aa, Artificial sequence
  Protein classification predicting sequence
KAGRKVA

SEQ ID NO: 12166 - protein, 9 aa, Artificial sequence
  Protein classification predicting sequence
IGEPRWFSF

SEQ ID NO: 12167 - protein, 8 aa, Artificial sequence
  Protein classification predicting sequence
HPRIYDSD

SEQ ID NO: 12168 - protein, 7 aa, Artificial sequence
  Protein classification predicting sequence
SDSLSYH

SEQ ID NO: 12169 - protein, 10 aa, Artificial sequence
  Protein classification predicting sequence
NGRTGNTDKL

SEQ ID NO: 12170 - protein, 12 aa, Artificial sequence
  Protein classification predicting sequence
PSLASAAYDQGR

SEQ ID NO: 12171 - protein, 7 aa, Artificial sequence
  Protein classification predicting sequence
KVPYEVG

SEQ ID NO: 12172 - protein, 17 aa, Artificial sequence
  Protein classification predicting sequence
NTTFNYPTMAEAYRVAA

SEQ ID NO: 12173 - protein, 16 aa, Artificial sequence
  Protein classification predicting sequence
VINQQTRMRQGFYERN

SEQ ID NO: 12174 - protein, 11 aa, Artificial sequence
  Protein classification predicting sequence
LLAFLDQEMSD

SEQ ID NO: 12175 - protein, 20 aa, Artificial sequence
  Protein classification predicting sequence
VGGNCTHLGTIPSKALRHSV

SEQ ID NO: 12176 - protein, 8 aa, Artificial sequence
  Protein classification predicting sequence
FNTNPMFR

SEQ ID NO: 12177 - protein, 7 aa, Artificial sequence
  Protein classification predicting sequence
SDALSYH

SEQ ID NO: 12178 - protein, 12 aa, Artificial sequence
  Protein classification predicting sequence
PTGIYTIPEISS

SEQ ID NO: 12179 - protein, 20 aa, Artificial sequence
  Protein classification predicting sequence
YFVNTTFNYPTMAEAYRVAA

SEQ ID NO: 12180 - protein, 7 aa, Artificial sequence
  Protein classification predicting sequence
PSLASAA

SEQ ID NO: 12181 - protein, 13 aa, Artificial sequence
  Protein classification predicting sequence
GMLKILFHRETLE

SEQ ID NO: 12182 - protein, 14 aa, Artificial sequence
  Protein classification predicting sequence
YGAGVIGCEYASIF

SEQ ID NO: 12183 - protein, 6 aa, Artificial sequence
  Protein classification predicting sequence
RIYDSD

SEQ ID NO: 12184 - protein, 7 aa, Artificial sequence
  Protein classification predicting sequence
LGVHCFG

SEQ ID NO: 12185 - protein, 13 aa, Artificial sequence
  Protein classification predicting sequence
QASEIVHIGQAIM

SEQ ID NO: 12186 - protein, 28 aa, Artificial sequence
  Protein classification predicting sequence
VIGSGPGGEGAAMGLVKQGARVAVIERY

SEQ ID NO: 12187 - protein, 20 aa, Artificial sequence
  Protein classification predicting sequence
VETLTAEKFVIACGSRPYHP

SEQ ID NO: 12188 - protein, 17 aa, Artificial sequence
  Protein classification predicting sequence
IYGAGVIGCEYASIFRG

SEQ ID NO: 12189 - protein, 21 aa, Artificial sequence
  Protein classification predicting sequence
NIGLETDSRGQLKVNSMYQTA

SEQ ID NO: 12190 - protein, 7 aa, Artificial sequence
  Protein classification predicting sequence
GSRPYHP

SEQ ID NO: 12191 - protein, 25 aa, Artificial sequence
  Protein classification predicting sequence
HDPRHIIIYGAGVIGCEYASIFRGL

SEQ ID NO: 12192 - protein, 13 aa, Artificial sequence
  Protein classification predicting sequence
VKTDLINTRDRLL

SEQ ID NO: 12193 - protein, 27 aa, Artificial sequence
  Protein classification predicting sequence
FLDNEVSDALSYHFWNSGVVIRNDETY

SEQ ID NO: 12194 - protein, 8 aa, Artificial sequence
  Protein classification predicting sequence
KVPYEVGR

SEQ ID NO: 12195 - protein, 9 aa, Artificial sequence
  Protein classification predicting sequence
FKHLARAQI

SEQ ID NO: 12196 - protein, 16 aa, Artificial sequence
  Protein classification predicting sequence
VIDKQTRLRQGFYDRN

SEQ ID NO: 12197 - protein, 21 aa, Artificial sequence
  Protein classification predicting sequence
YAVGDVIGYPSLASAAYDQGR

SEQ ID NO: 12198 - protein, 27 aa, Artificial sequence
  Protein classification predicting sequence
VGGGCTHWGTIPSKALRHAVSRIIEFN

SEQ ID NO: 12199 - protein, 11 aa, Artificial sequence
  Protein classification predicting sequence
SSFADILNHAD

SEQ ID NO: 12200 - protein, 13 aa, Artificial sequence
  Protein classification predicting sequence
VINQQTRMRQGFY

SEQ ID NO: 12201 - protein, 22 aa, Artificial sequence
  Protein classification predicting sequence
VKVDLINTRDRLLAFLDQEMSD

SEQ ID NO: 12202 - protein, 7 aa, Artificial sequence
  Protein classification predicting sequence
LSYHFWN

SEQ ID NO: 12203 - protein, 9 aa, Artificial sequence
  Protein classification predicting sequence
GVVIRHNEE

SEQ ID NO: 12204 - protein, 10 aa, Artificial sequence
  Protein classification predicting sequence
LKVNSMYQTA

SEQ ID NO: 12205 - protein, 10 aa, Artificial sequence
  Protein classification predicting sequence
LKILFHRETK

SEQ ID NO: 12206 - protein, 26 aa, Artificial sequence
  Protein classification predicting sequence
ILGIHCFGERAAEIIHIGQAIMEQKG

SEQ ID NO: 12207 - protein, 9 aa, Artificial sequence
  Protein classification predicting sequence
VLLAYEMNG

SEQ ID NO: 12208 - protein, 7 aa, Artificial sequence
  Protein classification predicting sequence
RVVVPGV

SEQ ID NO: 12209 - protein, 11 aa, Artificial sequence
  Protein classification predicting sequence
LEPFWALYAVH

SEQ ID NO: 12210 - protein, 10 aa, Artificial sequence
  Protein classification predicting sequence
FFTRNHLPVP

SEQ ID NO: 12211 - protein, 8 aa, Artificial sequence
  Protein classification predicting sequence
GAISTARW

SEQ ID NO: 12212 - protein, 14 aa, Artificial sequence
  Protein classification predicting sequence
FPVRVVVPGVVGAR

SEQ ID NO: 12213 - protein, 7 aa, Artificial sequence
  Protein classification predicting sequence
DYKGFSP

SEQ ID NO: 12214 - protein, 10 aa, Artificial sequence
  Protein classification predicting sequence
KGYAWSGGGR

SEQ ID NO: 12215 - protein, 12 aa, Artificial sequence
  Protein classification predicting sequence
VAPIWNLRGVLS

SEQ ID NO: 12216 - protein, 21 aa, Artificial sequence
  Protein classification predicting sequence
YITPNPIFFTRNHLPVPNLDP

SEQ ID NO: 12217 - protein, 19 aa, Artificial sequence
  Protein classification predicting sequence
IKGYAWSGGGRAVIRVDVS

SEQ ID NO: 12218 - protein, 16 aa, Artificial sequence
  Protein classification predicting sequence
FGNWLQVGDDLNHRNL

SEQ ID NO: 12219 - protein, 7 aa, Artificial sequence
  Protein classification predicting sequence
YFVDERK

SEQ ID NO: 12220 - protein, 15 aa, Artificial sequence
  Protein classification predicting sequence
EEESHVEANGNDFRY

SEQ ID NO: 12221 - protein, 11 aa, Artificial sequence
  Protein classification predicting sequence
RIMFDRRFESE

SEQ ID NO: 12222 - protein, 16 aa, Artificial sequence
  Protein classification predicting sequence
RIMFDRRFESEDDPLF

SEQ ID NO: 12223 - protein, 12 aa, Artificial sequence
  Protein classification predicting sequence
KETLRLRMAIPL

SEQ ID NO: 12224 - protein, 12 aa, Artificial sequence
  Protein classification predicting sequence
PHMNLHDAKLGG

SEQ ID NO: 12225 - protein, 13 aa, Artificial sequence
  Protein classification predicting sequence
DIPAESKILVNAW

SEQ ID NO: 12226 - protein, 14 aa, Artificial sequence
  Protein classification predicting sequence
SKLRGKRFKLPPGP

SEQ ID NO: 12227 - protein, 19 aa, Artificial sequence
  Protein classification predicting sequence
MRRIMTVPFFTNKVVQQYR

SEQ ID NO: 12228 - protein, 55 aa, Artificial sequence
  Protein classification predicting sequence
MYRIMFDRRFESEEDPLFVKLKALNGERSRLAQSFEYNYGDFIPILRPFLKGYLK

SEQ ID NO: 12229 - protein, 19 aa, Artificial sequence
  Protein classification predicting sequence
DIPAESKILVNAWWLANNP

SEQ ID NO: 12230 - protein, 8 aa, Artificial sequence
  Protein classification predicting sequence
RLQLMMYN

SEQ ID NO: 12231 - protein, 15 aa, Artificial sequence
  Protein classification predicting sequence
DIPAESKILVNAWWL

SEQ ID NO: 12232 - protein, 10 aa, Artificial sequence
  Protein classification predicting sequence
RRRLQLMMYN

SEQ ID NO: 12233 - protein, 26 aa, Artificial sequence
  Protein classification predicting sequence
KETLRLRMAIPLLVPHMNLHDAKLGG

SEQ ID NO: 12234 - protein, 12 aa, Artificial sequence
  Protein classification predicting sequence
FGNWLQVGDDLN

SEQ ID NO: 12235 - protein, 11 aa, Artificial sequence
  Protein classification predicting sequence
GDFIPILRPFL

SEQ ID NO: 12236 - protein, 21 aa, Artificial sequence
  Protein classification predicting sequence
PFGVGRRSCPGIILALPILGI

SEQ ID NO: 12237 - protein, 8 aa, Artificial sequence
  Protein classification predicting sequence
EKGGQFSL

SEQ ID NO: 12238 - protein, 21 aa, Artificial sequence
  Protein classification predicting sequence
PVPIFGNWLQVGDDLNHRNLT

SEQ ID NO: 12239 - protein, 21 aa, Artificial sequence
  Protein classification predicting sequence
FGNWLQVGDDLNHRNLTDLAK

SEQ ID NO: 12240 - protein, 14 aa, Artificial sequence
  Protein classification predicting sequence
YNYGDFIPILRPFL

SEQ ID NO: 12241 - protein, 7 aa, Artificial sequence
  Protein classification predicting sequence
LFKDYFV

SEQ ID NO: 12242 - protein, 10 aa, Artificial sequence
  Protein classification predicting sequence
VEANGNDFRY

SEQ ID NO: 12243 - protein, 7 aa, Artificial sequence
  Protein classification predicting sequence
FKLPPGP

SEQ ID NO: 12244 - protein, 30 aa, Artificial sequence
  Protein classification predicting sequence
KGEINEDNVLYIVENINVAAIETTLWSIEW

SEQ ID NO: 12245 - protein, 11 aa, Artificial sequence
  Protein classification predicting sequence
IAELVNHPEIQ

SEQ ID NO: 12246 - protein, 21 aa, Artificial sequence
  Protein classification predicting sequence
EKGGQFSLHILKHSTIVAKPR

SEQ ID NO: 12247 - protein, 7 aa, Artificial sequence
  Protein classification predicting sequence
GPIGLMA

SEQ ID NO: 12248 - protein, 9 aa, Artificial sequence
  Protein classification predicting sequence
FKGLTVQGI

SEQ ID NO: 12249 - protein, 8 aa, Artificial sequence
  Protein classification predicting sequence
QKTIPVPM

SEQ ID NO: 12250 - protein, 7 aa, Artificial sequence
  Protein classification predicting sequence
CRNCRAG

SEQ ID NO: 12251 - protein, 6 aa, Artificial sequence
  Protein classification predicting sequence
GVGVNR

SEQ ID NO: 12252 - protein, 8 aa, Artificial sequence
  Protein classification predicting sequence
IFDPFGNA

SEQ ID NO: 12253 - protein, 7 aa, Artificial sequence
  Protein classification predicting sequence
AKHVGAR

SEQ ID NO: 12254 - protein, 8 aa, Artificial sequence
  Protein classification predicting sequence
DVMADLHM

SEQ ID NO: 12255 - protein, 7 aa, Artificial sequence
  Protein classification predicting sequence
TAICGTD

SEQ ID NO: 12256 - protein, 14 aa, Artificial sequence
  Protein classification predicting sequence
NWDEWSQKTIPVPM

SEQ ID NO: 12257 - protein, 7 aa, Artificial sequence
  Protein classification predicting sequence
VGHEYVG

SEQ ID NO: 12258 - protein, 11 aa, Artificial sequence
  Protein classification predicting sequence
RVSGEGHITCG

SEQ ID NO: 12259 - protein, 22 aa, Artificial sequence
  Protein classification predicting sequence
ISDDLASIFDPFGNAVHTALSF

SEQ ID NO: 12260 - protein, 15 aa, Artificial sequence
  Protein classification predicting sequence
IFDPFGNAVHTALSF

SEQ ID NO: 12261 - protein, 11 aa, Artificial sequence
  Protein classification predicting sequence
EGFDVGLEMSG

SEQ ID NO: 12262 - protein, 6 aa, Artificial sequence
  Protein classification predicting sequence
TMNHGG

SEQ ID NO: 12263 - protein, 6 aa, Artificial sequence
  Protein classification predicting sequence
SPIITH

SEQ ID NO: 12264 - protein, 8 aa, Artificial sequence
  Protein classification predicting sequence
KTAICGTD

SEQ ID NO: 12265 - protein, 12 aa, Artificial sequence
  Protein classification predicting sequence
KTAICGTDLHIY

SEQ ID NO: 12266 - protein, 12 aa, Artificial sequence
  Protein classification predicting sequence
AAILDPFGNAAH

SEQ ID NO: 12267 - protein, 6 aa, Artificial sequence
  Protein classification predicting sequence
IDWNQV

SEQ ID NO: 12268 - protein, 7 aa, Artificial sequence
  Protein classification predicting sequence
PAFNAFK

SEQ ID NO: 12269 - protein, 6 aa, Artificial sequence
  Protein classification predicting sequence
EGFDVG

SEQ ID NO: 12270 - protein, 9 aa, Artificial sequence
  Protein classification predicting sequence
GHNDLLIKI

SEQ ID NO: 12271 - protein, 8 aa, Artificial sequence
  Protein classification predicting sequence
GVGVNRPG

SEQ ID NO: 12272 - protein, 11 aa, Artificial sequence
  Protein classification predicting sequence
VVITDVNEYRL

SEQ ID NO: 12273 - protein, 16 aa, Artificial sequence
  Protein classification predicting sequence
ELGMTEGFDVGLEMSG

SEQ ID NO: 12274 - protein, 33 aa, Artificial sequence
  Protein classification predicting sequence
GVGVNRPGCFAEYLVIPAFNAFKIPDNISDDLA

SEQ ID NO: 12275 - protein, 23 aa, Artificial sequence
  Protein classification predicting sequence
IFDPFGNAVHTALSFDLVGEDVL

SEQ ID NO: 12276 - protein, 6 aa, Artificial sequence
  Protein classification predicting sequence
EEGIWM

SEQ ID NO: 12277 - protein, 14 aa, Artificial sequence
  Protein classification predicting sequence
CRNCRAGRRHLCRN

SEQ ID NO: 12278 - protein, 7 aa, Artificial sequence
  Protein classification predicting sequence
IPDNISD

SEQ ID NO: 12279 - protein, 6 aa, Artificial sequence
  Protein classification predicting sequence
GLEMSG

SEQ ID NO: 12280 - protein, 8 aa, Artificial sequence
  Protein classification predicting sequence
GLEMSGAP

SEQ ID NO: 12281 - protein, 9 aa, Artificial sequence
  Protein classification predicting sequence
SGQSGKVIL

SEQ ID NO: 12282 - protein, 6 aa, Artificial sequence
  Protein classification predicting sequence
HIYNWD

SEQ ID NO: 12283 - protein, 6 aa, Artificial sequence
  Protein classification predicting sequence
TIPVPM

SEQ ID NO: 12284 - protein, 6 aa, Artificial sequence
  Protein classification predicting sequence
HTALSF

SEQ ID NO: 12285 - protein, 6 aa, Artificial sequence
  Protein classification predicting sequence
PIITHR

SEQ ID NO: 12286 - protein, 7 aa, Artificial sequence
  Protein classification predicting sequence
GKVILDW

SEQ ID NO: 12287 - protein, 7 aa, Artificial sequence
  Protein classification predicting sequence
GIWMTDV

SEQ ID NO: 12288 - protein, 7 aa, Artificial sequence
  Protein classification predicting sequence
NDLLIKI

SEQ ID NO: 12289 - protein, 23 aa, Artificial sequence
  Protein classification predicting sequence
WDDWSQKTIPVPMVVGHEYVGEV

SEQ ID NO: 12290 - protein, 20 aa, Artificial sequence
  Protein classification predicting sequence
IGDRVSGEGHITCGHCRNCR

SEQ ID NO: 12291 - protein, 11 aa, Artificial sequence
  Protein classification predicting sequence
LARKMGVTRAV

SEQ ID NO: 12292 - protein, 8 aa, Artificial sequence
  Protein classification predicting sequence
DVMTELGM

SEQ ID NO: 12293 - protein, 16 aa, Artificial sequence
  Protein classification predicting sequence
EGFDVGLEMSGVPSAF

SEQ ID NO: 12294 - protein, 10 aa, Artificial sequence
  Protein classification predicting sequence
HGGKIAMLGI

SEQ ID NO: 12295 - protein, 14 aa, Artificial sequence
  Protein classification predicting sequence
GVGVNRPGCFAEYL

SEQ ID NO: 12296 - protein, 6 aa, Artificial sequence
  Protein classification predicting sequence
GCFAEY

SEQ ID NO: 12297 - protein, 14 aa, Artificial sequence
  Protein classification predicting sequence
GEDVLITGAGPIGI

SEQ ID NO: 12298 - protein, 13 aa, Artificial sequence
  Protein classification predicting sequence
GEDVLITGAGPIG

SEQ ID NO: 12299 - protein, 6 aa, Artificial sequence
  Protein classification predicting sequence
VITDVN

SEQ ID NO: 12300 - protein, 7 aa, Artificial sequence
  Protein classification predicting sequence
KGIYGRE

SEQ ID NO: 12301 - protein, 19 aa, Artificial sequence
  Protein classification predicting sequence
IKIRKTAICGTDVHIYNWD

SEQ ID NO: 12302 - protein, 21 aa, Artificial sequence
  Protein classification predicting sequence
WSQKTIPVPMVVGHEYVGEVV

SEQ ID NO: 12303 - protein, 15 aa, Artificial sequence
  Protein classification predicting sequence
CRNCRGGRTHLCRNT

SEQ ID NO: 12304 - protein, 18 aa, Artificial sequence
  Protein classification predicting sequence
KHVGARHVVITDVNEYRL

SEQ ID NO: 12305 - protein, 13 aa, Artificial sequence
  Protein classification predicting sequence
LARKMGVTRAVNV

SEQ ID NO: 12306 - protein, 8 aa, Artificial sequence
  Protein classification predicting sequence
LGIPPSDM

SEQ ID NO: 12307 - protein, 11 aa, Artificial sequence
  Protein classification predicting sequence
MRSGQSGKVIL

SEQ ID NO: 12308 - protein, 7 aa, Artificial sequence
  Protein classification predicting sequence
KALSKLK

SEQ ID NO: 12309 - protein, 7 aa, Artificial sequence
  Protein classification predicting sequence
GHNDLLI

SEQ ID NO: 12310 - protein, 30 aa, Artificial sequence
  Protein classification predicting sequence
IGDRVSGEGHITCGHCRNCRGGRTHLCRNT

SEQ ID NO: 12311 - protein, 14 aa, Artificial sequence
  Protein classification predicting sequence
LARKMGVTRAVNVA

SEQ ID NO: 12312 - protein, 7 aa, Artificial sequence
  Protein classification predicting sequence
TRAVNVA

SEQ ID NO: 12313 - protein, 7 aa, Artificial sequence
  Protein classification predicting sequence
QVIFKGL

SEQ ID NO: 12314 - protein, 10 aa, Artificial sequence
  Protein classification predicting sequence
GAGPIGIMAA

SEQ ID NO: 12315 - protein, 9 aa, Artificial sequence
  Protein classification predicting sequence
GARNVVVTD

SEQ ID NO: 12316 - protein, 8 aa, Artificial sequence
  Protein classification predicting sequence
RVSGEGHI

SEQ ID NO: 12317 - protein, 8 aa, Artificial sequence
  Protein classification predicting sequence
CGHCRNCR

SEQ ID NO: 12318 - protein, 6 aa, Artificial sequence
  Protein classification predicting sequence
HLCRNT

SEQ ID NO: 12319 - protein, 18 aa, Artificial sequence
  Protein classification predicting sequence
GNAVHTALSFDLVGEDVL

SEQ ID NO: 12320 - protein, 8 aa, Artificial sequence
  Protein classification predicting sequence
GFDAMRSG

SEQ ID NO: 12321 - protein, 12 aa, Artificial sequence
  Protein classification predicting sequence
GVGVNRPGSFAE

SEQ ID NO: 12322 - protein, 25 aa, Artificial sequence
  Protein classification predicting sequence
GHNDLLIKIRKTAICGTDVHIYNWD

SEQ ID NO: 12323 - protein, 15 aa, Artificial sequence
  Protein classification predicting sequence
KTAICGTDVHIYNWD

SEQ ID NO: 12324 - protein, 27 aa, Artificial sequence
  Protein classification predicting sequence
WSQKTIPVPMVVGHEYVGEVVGIGQEV

SEQ ID NO: 12325 - protein, 12 aa, Artificial sequence
  Protein classification predicting sequence
GAGPIGIMAAAV

SEQ ID NO: 12326 - protein, 6 aa, Artificial sequence
  Protein classification predicting sequence
VIFKGL

SEQ ID NO: 12327 - protein, 7 aa, Artificial sequence
  Protein classification predicting sequence
RVSGEGH

SEQ ID NO: 12328 - protein, 9 aa, Artificial sequence
  Protein classification predicting sequence
GARHVVITD

SEQ ID NO: 12329 - protein, 10 aa, Artificial sequence
  Protein classification predicting sequence
GFDVGLEMSG

SEQ ID NO: 12330 - protein, 7 aa, Artificial sequence
  Protein classification predicting sequence
ALLGIPP

SEQ ID NO: 12331 - protein, 12 aa, Artificial sequence
  Protein classification predicting sequence
YGREMFETWYKM

SEQ ID NO: 12332 - protein, 8 aa, Artificial sequence
  Protein classification predicting sequence
AGRRHLCR

SEQ ID NO: 12333 - protein, 12 aa, Artificial sequence
  Protein classification predicting sequence
SIQEPLGNAVHT

SEQ ID NO: 12334 - protein, 6 aa, Artificial sequence
  Protein classification predicting sequence
GPIGIM

SEQ ID NO: 12335 - protein, 7 aa, Artificial sequence
  Protein classification predicting sequence
LEMSGNP

SEQ ID NO: 12336 - protein, 9 aa, Artificial sequence
  Protein classification predicting sequence
ICGTDVHIY

SEQ ID NO: 12337 - protein, 5 aa, Artificial sequence
  Protein classification predicting sequence
PIITH

SEQ ID NO: 12338 - protein, 7 aa, Artificial sequence
  Protein classification predicting sequence
LIQSGLD

SEQ ID NO: 12339 - protein, 10 aa, Artificial sequence
  Protein classification predicting sequence
DWNQVIFKGL

SEQ ID NO: 12340 - protein, 24 aa, Artificial sequence
  Protein classification predicting sequence
MAAAVAKHVGARHVVITDVNEYRL

SEQ ID NO: 12341 - protein, 20 aa, Artificial sequence
  Protein classification predicting sequence
DVMAELGMTEGFDVGLEMSG

SEQ ID NO: 12342 - protein, 9 aa, Artificial sequence
  Protein classification predicting sequence
TMNHGGRIA

SEQ ID NO: 12343 - protein, 6 aa, Artificial sequence
  Protein classification predicting sequence
WDEWSQ

SEQ ID NO: 12344 - protein, 6 aa, Artificial sequence
  Protein classification predicting sequence
ETWYKM

SEQ ID NO: 12345 - protein, 6 aa, Artificial sequence
  Protein classification predicting sequence
FQKGFD

SEQ ID NO: 12346 - protein, 7 aa, Artificial sequence
  Protein classification predicting sequence
DVNEYRL

SEQ ID NO: 12347 - protein, 21 aa, Artificial sequence
  Protein classification predicting sequence
MNHGGRIAMLGIPPSDMSIDW

SEQ ID NO: 12348 - protein, 8 aa, Artificial sequence
  Protein classification predicting sequence
LIQSGLDL

SEQ ID NO: 12349 - protein, 7 aa, Artificial sequence
  Protein classification predicting sequence
PIITHRF

SEQ ID NO: 12350 - protein, 7 aa, Artificial sequence
  Protein classification predicting sequence
GKVVLSW

SEQ ID NO: 12351 - protein, 7 aa, Artificial sequence
  Protein classification predicting sequence
VGRSVDE

SEQ ID NO: 12352 - protein, 14 aa, Artificial sequence
  Protein classification predicting sequence
FYPLDFTFVCPTEI

SEQ ID NO: 12353 - protein, 6 aa, Artificial sequence
  Protein classification predicting sequence
FSHLAW

SEQ ID NO: 12354 - protein, 12 aa, Artificial sequence
  Protein classification predicting sequence
ASVDSHFCHLAW

SEQ ID NO: 12355 - protein, 7 aa, Artificial sequence
  Protein classification predicting sequence
RKEGGLG

SEQ ID NO: 12356 - protein, 6 aa, Artificial sequence
  Protein classification predicting sequence
GEVCPA

SEQ ID NO: 12357 - protein, 10 aa, Artificial sequence
  Protein classification predicting sequence
KSKEYFSKQK

SEQ ID NO: 12358 - protein, 7 aa, Artificial sequence
  Protein classification predicting sequence
SRDYGVL

SEQ ID NO: 12359 - protein, 14 aa, Artificial sequence
  Protein classification predicting sequence
AFQFTDKHGEVCPA

SEQ ID NO: 12360 - protein, 8 aa, Artificial sequence
  Protein classification predicting sequence
PVGRSVEE

SEQ ID NO: 12361 - protein, 12 aa, Artificial sequence
  Protein classification predicting sequence
AVMPDGQFKDIS

SEQ ID NO: 12362 - protein, 26 aa, Artificial sequence
  Protein classification predicting sequence
GKYVVFFFYPLDFTFVCPTEIIAFSD

SEQ ID NO: 12363 - protein, 6 aa, Artificial sequence
  Protein classification predicting sequence
GLFIID

SEQ ID NO: 12364 - protein, 10 aa, Artificial sequence
  Protein classification predicting sequence
GGGSTIGLAK

SEQ ID NO: 12365 - protein, 8 aa, Artificial sequence
  Protein classification predicting sequence
LPHALAYN

SEQ ID NO: 12366 - protein, 12 aa, Artificial sequence
  Protein classification predicting sequence
HYQQTKNLLVSY

SEQ ID NO: 12367 - protein, 7 aa, Artificial sequence
  Protein classification predicting sequence
HTDTTYF

SEQ ID NO: 12368 - protein, 9 aa, Artificial sequence
  Protein classification predicting sequence
DNWRVLHGR

SEQ ID NO: 12369 - protein, 9 aa, Artificial sequence
  Protein classification predicting sequence
ARIRYPMVR

SEQ ID NO: 12370 - protein, 8 aa, Artificial sequence
  Protein classification predicting sequence
RAVGMHGN

SEQ ID NO: 12371 - protein, 7 aa, Artificial sequence
  Protein classification predicting sequence
GDYSTGA

SEQ ID NO: 12372 - protein, 8 aa, Artificial sequence
  Protein classification predicting sequence
LALAHTLY

SEQ ID NO: 12373 - protein, 16 aa, Artificial sequence
  Protein classification predicting sequence
WTATCRFSDIVLPACT

SEQ ID NO: 12374 - protein, 9 aa, Artificial sequence
  Protein classification predicting sequence
PWVRHADFR

SEQ ID NO: 12375 - protein, 7 aa, Artificial sequence
  Protein classification predicting sequence
ERSHGGP

SEQ ID NO: 12376 - protein, 17 aa, Artificial sequence
  Protein classification predicting sequence
KEGILTGSHWGAIRATV

SEQ ID NO: 12377 - protein, 11 aa, Artificial sequence
  Protein classification predicting sequence
DGRFVAAKPFE

SEQ ID NO: 12378 - protein, 9 aa, Artificial sequence
  Protein classification predicting sequence
WDEALDLFY

SEQ ID NO: 12379 - protein, 9 aa, Artificial sequence
  Protein classification predicting sequence
AIALHGNSV

SEQ ID NO: 12380 - protein, 15 aa, Artificial sequence
  Protein classification predicting sequence
KNQQANWWCPDHDVY

SEQ ID NO: 12381 - protein, 19 aa, Artificial sequence
  Protein classification predicting sequence
NPQTDVPLQLALAHTLYSE

SEQ ID NO: 12382 - protein, 19 aa, Artificial sequence
  Protein classification predicting sequence
RTQIIAGWCVQRMQHGEQW

SEQ ID NO: 12383 - protein, 9 aa, Artificial sequence
  Protein classification predicting sequence
ILSGFSGST

SEQ ID NO: 12384 - protein, 14 aa, Artificial sequence
  Protein classification predicting sequence
DYKGYSSTIPIARF

SEQ ID NO: 12385 - protein, 8 aa, Artificial sequence
  Protein classification predicting sequence
DAILEPGK

SEQ ID NO: 12386 - protein, 16 aa, Artificial sequence
  Protein classification predicting sequence
INWNGKSVKLPPLKMC

SEQ ID NO: 12387 - protein, 15 aa, Artificial sequence
  Protein classification predicting sequence
GNHSNRGIIAMKQVV

SEQ ID NO: 12388 - protein, 13 aa, Artificial sequence
  Protein classification predicting sequence
PQFEARNDFDIFR

SEQ ID NO: 12389 - protein, 8 aa, Artificial sequence
  Protein classification predicting sequence
LCRRFNRE

SEQ ID NO: 12390 - protein, 19 aa, Artificial sequence
  Protein classification predicting sequence
AFTEGLDEMGWLKRIWQEG

SEQ ID NO: 12391 - protein, 7 aa, Artificial sequence
  Protein classification predicting sequence
QQGKGRG

SEQ ID NO: 12392 - protein, 12 aa, Artificial sequence
  Protein classification predicting sequence
ALCKYGNPNVLT

SEQ ID NO: 12393 - protein, 13 aa, Artificial sequence
  Protein classification predicting sequence
EMVAQCEYVPASQ

SEQ ID NO: 12394 - protein, 30 aa, Artificial sequence
  Protein classification predicting sequence
DKYPSKMIAGLPDHVHNAARIRYPMVRVDW

SEQ ID NO: 12395 - protein, 21 aa, Artificial sequence
  Protein classification predicting sequence
SDTSQRGDNRFVRVSWDEALD

SEQ ID NO: 12396 - protein, 25 aa, Artificial sequence
  Protein classification predicting sequence
GPSALLTASGWQSTGMFHNASGMLA

SEQ ID NO: 12397 - protein, 46 aa, Artificial sequence
  Protein classification predicting sequence
TGGDYSTGAAQVILPRVVGSMEVYEQQTSWPLVLQNSKTIVLWGSD

SEQ ID NO: 12398 - protein, 23 aa, Artificial sequence
  Protein classification predicting sequence
QFLPYLLGEKDGQPKDAAWAEKL

SEQ ID NO: 12399 - protein, 33 aa, Artificial sequence
  Protein classification predicting sequence
VVLAAMLGQIGLPGGGFGFGWHYNGAGTPGRKG

SEQ ID NO: 12400 - protein, 40 aa, Artificial sequence
  Protein classification predicting sequence
EFDHPQMFVRHQAFREDPDLEPLGTPSGLIEIYSKTIADM

SEQ ID NO: 12401 - protein, 24 aa, Artificial sequence
  Protein classification predicting sequence
YDDCQGHPMWFEKIERSHGGPGSQ

SEQ ID NO: 12402 - protein, 27 aa, Artificial sequence
  Protein classification predicting sequence
PLHLQSVHPDFRLHSQLCESETLRQQY

SEQ ID NO: 12403 - protein, 12 aa, Artificial sequence
  Protein classification predicting sequence
PSRVRYPMVRLD

SEQ ID NO: 12404 - protein, 8 aa, Artificial sequence
  Protein classification predicting sequence
RFVRVTWD

SEQ ID NO: 12405 - protein, 8 aa, Artificial sequence
  Protein classification predicting sequence
LHAGQTGW

SEQ ID NO: 12406 - protein, 8 aa, Artificial sequence
  Protein classification predicting sequence
KNLQVGWN

SEQ ID NO: 12407 - protein, 9 aa, Artificial sequence
  Protein classification predicting sequence
VISIDPVVT

SEQ ID NO: 12408 - protein, 9 aa, Artificial sequence
  Protein classification predicting sequence
GQIGLPGGG

SEQ ID NO: 12409 - protein, 9 aa, Artificial sequence
  Protein classification predicting sequence
ERNDIDVYG

SEQ ID NO: 12410 - protein, 11 aa, Artificial sequence
  Protein classification predicting sequence
PLGTPSGLIEI

SEQ ID NO: 12411 - protein, 9 aa, Artificial sequence
  Protein classification predicting sequence
ERSHGGPGS

SEQ ID NO: 12412 - protein, 15 aa, Artificial sequence
  Protein classification predicting sequence
VRVFNDRGQLLAGAV

SEQ ID NO: 12413 - protein, 8 aa, Artificial sequence
  Protein classification predicting sequence
LAGAVVSD

SEQ ID NO: 12414 - protein, 10 aa, Artificial sequence
  Protein classification predicting sequence
YDDCQGHPMW

SEQ ID NO: 12415 - protein, 8 aa, Artificial sequence
  Protein classification predicting sequence
WLQSCHPD

SEQ ID NO: 12416 - protein, 23 aa, Artificial sequence
  Protein classification predicting sequence
YSPSRVRYPMVRLDWLKKHKYSA

SEQ ID NO: 12417 - protein, 12 aa, Artificial sequence
  Protein classification predicting sequence
DLFYRELERVQK

SEQ ID NO: 12418 - protein, 7 aa, Artificial sequence
  Protein classification predicting sequence
ELERVQK

SEQ ID NO: 12419 - protein, 17 aa, Artificial sequence
  Protein classification predicting sequence
YGPWALHAGQTGWNQTG

SEQ ID NO: 12420 - protein, 11 aa, Artificial sequence
  Protein classification predicting sequence
SVDPVKNKTQR

SEQ ID NO: 12421 - protein, 12 aa, Artificial sequence
  Protein classification predicting sequence
KDKVEKTPEWAA

SEQ ID NO: 12422 - protein, 7 aa, Artificial sequence
  Protein classification predicting sequence
HGEQPYW

SEQ ID NO: 12423 - protein, 23 aa, Artificial sequence
  Protein classification predicting sequence
KPKWDNNDFNGYSRTIPVARWID

SEQ ID NO: 12424 - protein, 19 aa, Artificial sequence
  Protein classification predicting sequence
FKMMVISGCNPWHHHQDRN

SEQ ID NO: 12425 - protein, 24 aa, Artificial sequence
  Protein classification predicting sequence
WTATCRFSDIVLPACTQWERNDID

SEQ ID NO: 12426 - protein, 32 aa, Artificial sequence
  Protein classification predicting sequence
LGTPSGFIEITSRKIGRYGYEHCQEHPMWFEK

SEQ ID NO: 12427 - protein, 7 aa, Artificial sequence
  Protein classification predicting sequence
HPMWFEK

SEQ ID NO: 12428 - protein, 19 aa, Artificial sequence
  Protein classification predicting sequence
DSYPRGVIRIEEGAWYGPL

SEQ ID NO: 12429 - protein, 19 aa, Artificial sequence
  Protein classification predicting sequence
SELAQATSANTCIVDFEKF

SEQ ID NO: 12430 - protein, 13 aa, Artificial sequence
  Protein classification predicting sequence
VPPVTSFGGPIEV

SEQ ID NO: 12431 - protein, 6 aa, Artificial sequence
  Protein classification predicting sequence
GSHWGA

SEQ ID NO: 12432 - protein, 12 aa, Artificial sequence
  Protein classification predicting sequence
LKEKVAKGEINV

SEQ ID NO: 12433 - protein, 9 aa, Artificial sequence
  Protein classification predicting sequence
ENLYDKKFI

SEQ ID NO: 12434 - protein, 10 aa, Artificial sequence
  Protein classification predicting sequence
TYCLGFEEFI

SEQ ID NO: 12435 - protein, 6 aa, Artificial sequence
  Protein classification predicting sequence
NRFVRV

SEQ ID NO: 12436 - protein, 10 aa, Artificial sequence
  Protein classification predicting sequence
PQFEARNDFD

SEQ ID NO: 12437 - protein, 6 aa, Artificial sequence
  Protein classification predicting sequence
LGTPSG

SEQ ID NO: 12438 - protein, 8 aa, Artificial sequence
  Protein classification predicting sequence
IFAGSYGW

SEQ ID NO: 12439 - protein, 8 aa, Artificial sequence
  Protein classification predicting sequence
TLLQRYMN

SEQ ID NO: 12440 - protein, 15 aa, Artificial sequence
  Protein classification predicting sequence
GDYSTGAAQVIMPHV

SEQ ID NO: 12441 - protein, 8 aa, Artificial sequence
  Protein classification predicting sequence
SYHYSNGG

SEQ ID NO: 12442 - protein, 6 aa, Artificial sequence
  Protein classification predicting sequence
HHQDTN

SEQ ID NO: 12443 - protein, 7 aa, Artificial sequence
  Protein classification predicting sequence
ERNDLTM

SEQ ID NO: 12444 - protein, 11 aa, Artificial sequence
  Protein classification predicting sequence
MKQVVPPQFEA

SEQ ID NO: 12445 - protein, 10 aa, Artificial sequence
  Protein classification predicting sequence
LGTPSGKIEI

SEQ ID NO: 12446 - protein, 8 aa, Artificial sequence
  Protein classification predicting sequence
PKKISDLD

SEQ ID NO: 12447 - protein, 9 aa, Artificial sequence
  Protein classification predicting sequence
KYCGYREDN

SEQ ID NO: 12448 - protein, 17 aa, Artificial sequence
  Protein classification predicting sequence
RPVAGYLSPRDFLAGLA

SEQ ID NO: 12449 - protein, 6 aa, Artificial sequence
  Protein classification predicting sequence
AKEKMR

SEQ ID NO: 12450 - protein, 6 aa, Artificial sequence
  Protein classification predicting sequence
NEVGGL

SEQ ID NO: 12451 - protein, 12 aa, Artificial sequence
  Protein classification predicting sequence
RNSEFEIFVDCD

SEQ ID NO: 12452 - protein, 7 aa, Artificial sequence
  Protein classification predicting sequence
HIESRKS

SEQ ID NO: 12453 - protein, 13 aa, Artificial sequence
  Protein classification predicting sequence
RPVAGYLSPRDFL

SEQ ID NO: 12454 - protein, 11 aa, Artificial sequence
  Protein classification predicting sequence
VQKLATCYFFT

SEQ ID NO: 12455 - protein, 8 aa, Artificial sequence
  Protein classification predicting sequence
AKVKPFDP

SEQ ID NO: 12456 - protein, 7 aa, Artificial sequence
  Protein classification predicting sequence
DALNKMN

SEQ ID NO: 12457 - protein, 7 aa, Artificial sequence
  Protein classification predicting sequence
EGISELP

SEQ ID NO: 12458 - protein, 6 aa, Artificial sequence
  Protein classification predicting sequence
NSHMTG

SEQ ID NO: 12459 - protein, 24 aa, Artificial sequence
  Protein classification predicting sequence
GKGLVLISYTWEDDSHKLLAVPDK

SEQ ID NO: 12460 - protein, 9 aa, Artificial sequence
  Protein classification predicting sequence
GAIQTACNA

SEQ ID NO: 12461 - protein, 9 aa, Artificial sequence
  Protein classification predicting sequence
FPNPGTVDT

SEQ ID NO: 12462 - protein, 9 aa, Artificial sequence
  Protein classification predicting sequence
GSGGFGPVF

SEQ ID NO: 12463 - protein, 12 aa, Artificial sequence
  Protein classification predicting sequence
SYTWEDDSHKLL

SEQ ID NO: 12464 - protein, 8 aa, Artificial sequence
  Protein classification predicting sequence
LAGCSCSF

SEQ ID NO: 12465 - protein, 12 aa, Artificial sequence
  Protein classification predicting sequence
GSGPAAHTAAIY

SEQ ID NO: 12466 - protein, 7 aa, Artificial sequence
  Protein classification predicting sequence
CAVCDGA

SEQ ID NO: 12467 - protein, 8 aa, Artificial sequence
  Protein classification predicting sequence
FAAGDVQD

SEQ ID NO: 12468 - protein, 9 aa, Artificial sequence
  Protein classification predicting sequence
TAAIYASRA

SEQ ID NO: 12469 - protein, 8 aa, Artificial sequence
  Protein classification predicting sequence
GGQLTTTT

SEQ ID NO: 12470 - protein, 7 aa, Artificial sequence
  Protein classification predicting sequence
ENFPGFP

SEQ ID NO: 12471 - protein, 7 aa, Artificial sequence
  Protein classification predicting sequence
TSAGSGC

SEQ ID NO: 12472 - protein, 9 aa, Artificial sequence
  Protein classification predicting sequence
AALDAERYL

SEQ ID NO: 12473 - protein, 12 aa, Artificial sequence
  Protein classification predicting sequence
YDVIIIGAGPAG

SEQ ID NO: 12474 - protein, 7 aa, Artificial sequence
  Protein classification predicting sequence
GRGVSYC

SEQ ID NO: 12475 - protein, 10 aa, Artificial sequence
  Protein classification predicting sequence
AAGGQLTTTT

SEQ ID NO: 12476 - protein, 11 aa, Artificial sequence
  Protein classification predicting sequence
GISACAVCDGA

SEQ ID NO: 12477 - protein, 9 aa, Artificial sequence
  Protein classification predicting sequence
FLTKYGSKV

SEQ ID NO: 12478 - protein, 15 aa, Artificial sequence
  Protein classification predicting sequence
MIERGIPGGQMANTE

SEQ ID NO: 12479 - protein, 11 aa, Artificial sequence
  Protein classification predicting sequence
KMFEHAKKFGA

SEQ ID NO: 12480 - protein, 12 aa, Artificial sequence
  Protein classification predicting sequence
GAEYKKIGVPGE

SEQ ID NO: 12481 - protein, 17 aa, Artificial sequence
  Protein classification predicting sequence
LRQIVTATGDGSIAAQS

SEQ ID NO: 12482 - protein, 6 aa, Artificial sequence
  Protein classification predicting sequence
CAVCDG

SEQ ID NO: 12483 - protein, 7 aa, Artificial sequence
  Protein classification predicting sequence
FRAEKIL

SEQ ID NO: 12484 - protein, 7 aa, Artificial sequence
  Protein classification predicting sequence
GLFVAIG

SEQ ID NO: 12485 - protein, 10 aa, Artificial sequence
  Protein classification predicting sequence
EEALYLSNIA

SEQ ID NO: 12486 - protein, 9 aa, Artificial sequence
  Protein classification predicting sequence
FGTEIITET

SEQ ID NO: 12487 - protein, 10 aa, Artificial sequence
  Protein classification predicting sequence
GSGPAGYTAA

SEQ ID NO: 12488 - protein, 6 aa, Artificial sequence
  Protein classification predicting sequence
ENFPGF

SEQ ID NO: 12489 - protein, 6 aa, Artificial sequence
  Protein classification predicting sequence
GVSYCA

SEQ ID NO: 12490 - protein, 8 aa, Artificial sequence
  Protein classification predicting sequence
GGQLMTTT

SEQ ID NO: 12491 - protein, 6 aa, Artificial sequence
  Protein classification predicting sequence
GGGNTA

SEQ ID NO: 12492 - protein, 6 aa, Artificial sequence
  Protein classification predicting sequence
YRQAIT

SEQ ID NO: 12493 - protein, 9 aa, Artificial sequence
  Protein classification predicting sequence
GCMAALDAE

SEQ ID NO: 12494 - protein, 13 aa, Artificial sequence
  Protein classification predicting sequence
GCMAALDAERYLD

SEQ ID NO: 12495 - protein, 7 aa, Artificial sequence
  Protein classification predicting sequence
GCMAALD

SEQ ID NO: 12496 - protein, 9 aa, Artificial sequence
  Protein classification predicting sequence
YRQAITSAG

SEQ ID NO: 12497 - protein, 12 aa, Artificial sequence
  Protein classification predicting sequence
ILGSGPAGYTAA

SEQ ID NO: 12498 - protein, 7 aa, Artificial sequence
  Protein classification predicting sequence
GGQLTTT

SEQ ID NO: 12499 - protein, 18 aa, Artificial sequence
  Protein classification predicting sequence
KGRGVSACATCDGFFYRN

SEQ ID NO: 12500 - protein, 7 aa, Artificial sequence
  Protein classification predicting sequence
WTEFNED

SEQ ID NO: 12501 - protein, 8 aa, Artificial sequence
  Protein classification predicting sequence
ILQDRAFK

SEQ ID NO: 12502 - protein, 11 aa, Artificial sequence
  Protein classification predicting sequence
LRQIVTATGDG

SEQ ID NO: 12503 - protein, 6 aa, Artificial sequence
  Protein classification predicting sequence
VENYPG

SEQ ID NO: 12504 - protein, 8 aa, Artificial sequence
  Protein classification predicting sequence
CATCDGFF

SEQ ID NO: 12505 - protein, 6 aa, Artificial sequence
  Protein classification predicting sequence
NGLFYA

SEQ ID NO: 12506 - protein, 7 aa, Artificial sequence
  Protein classification predicting sequence
RRDKLRA

SEQ ID NO: 12507 - protein, 8 aa, Artificial sequence
  Protein classification predicting sequence
GLFYAIGH

SEQ ID NO: 12508 - protein, 8 aa, Artificial sequence
  Protein classification predicting sequence
RQAITSAG

SEQ ID NO: 12509 - protein, 29 aa, Artificial sequence
  Protein classification predicting sequence
AIIGAGPAGMTAAVYASRANLKTVMIERG

SEQ ID NO: 12510 - protein, 38 aa, Artificial sequence
  Protein classification predicting sequence
PGGQMANTEEVENFPGFEMITGPDLSTKMFEHAKKFGA

SEQ ID NO: 12511 - protein, 13 aa, Artificial sequence
  Protein classification predicting sequence
YQYGDIKSVEDKG

SEQ ID NO: 12512 - protein, 72 aa, Artificial sequence
  Protein classification predicting sequence
TGAEYKKIGVPGEQELGGRGVSYCAVCDGAFFKNKRLFVIGGGDSAVEEGTFLTKFADKVTIVHRRDELRAQ

SEQ ID NO: 12513 - protein, 7 aa, Artificial sequence
  Protein classification predicting sequence
RAFKNDK

SEQ ID NO: 12514 - protein, 9 aa, Artificial sequence
  Protein classification predicting sequence
DFIWSHTLK

SEQ ID NO: 12515 - protein, 13 aa, Artificial sequence
  Protein classification predicting sequence
INEKDGKVGSVTL

SEQ ID NO: 12516 - protein, 18 aa, Artificial sequence
  Protein classification predicting sequence
ADGVFIYIGMKPLTAPFK

SEQ ID NO: 12517 - protein, 31 aa, Artificial sequence
  Protein classification predicting sequence
GIFAAGDVRDKGLRQIVTATGDGSIAAQSAA

SEQ ID NO: 12518 - protein, 8 aa, Artificial sequence
  Protein classification predicting sequence
HRRDTLRA

SEQ ID NO: 12519 - protein, 5 aa, Artificial sequence
  Protein classification predicting sequence
VHRRD

SEQ ID NO: 12520 - protein, 26 aa, Artificial sequence
  Protein classification predicting sequence
YWQQGISACAVCDGAVPIFRNKPLAV

SEQ ID NO: 12521 - protein, 7 aa, Artificial sequence
  Protein classification predicting sequence
DSRNYGW

SEQ ID NO: 12522 - protein, 15 aa, Artificial sequence
  Protein classification predicting sequence
VGVKINEKTGKIPVT

SEQ ID NO: 12523 - protein, 16 aa, Artificial sequence
  Protein classification predicting sequence
CGLSEEKAVEKFGEEN

SEQ ID NO: 12524 - protein, 7 aa, Artificial sequence
  Protein classification predicting sequence
GGRPRYP

SEQ ID NO: 12525 - protein, 9 aa, Artificial sequence
  Protein classification predicting sequence
PGKTLVVGA

SEQ ID NO: 12526 - protein, 7 aa, Artificial sequence
  Protein classification predicting sequence
TVMVRSI

SEQ ID NO: 12527 - protein, 9 aa, Artificial sequence
  Protein classification predicting sequence
DTVLWAIGR

SEQ ID NO: 12528 - protein, 9 aa, Artificial sequence
  Protein classification predicting sequence
TTVFTPLEY

SEQ ID NO: 12529 - protein, 8 aa, Artificial sequence
  Protein classification predicting sequence
QGFAAALK

SEQ ID NO: 12530 - protein, 8 aa, Artificial sequence
  Protein classification predicting sequence
KRSGLDPT

SEQ ID NO: 12531 - protein, 18 aa, Artificial sequence
  Protein classification predicting sequence
ELTPVAIQAGRLLAQRLY

SEQ ID NO: 12532 - protein, 7 aa, Artificial sequence
  Protein classification predicting sequence
FWPLEWT

SEQ ID NO: 12533 - protein, 14 aa, Artificial sequence
  Protein classification predicting sequence
QLDSTIGIHPVCAE

SEQ ID NO: 12534 - protein, 14 aa, Artificial sequence
  Protein classification predicting sequence
CIPKKLMHQAALLG

SEQ ID NO: 12535 - protein, 9 aa, Artificial sequence
  Protein classification predicting sequence
ATNNKGKEK

SEQ ID NO: 12536 - protein, 11 aa, Artificial sequence
  Protein classification predicting sequence
EQIEAGTPGRL

SEQ ID NO: 12537 - protein, 11 aa, Artificial sequence
  Protein classification predicting sequence
PSRDNNKCYAK

SEQ ID NO: 12538 - protein, 14 aa, Artificial sequence
  Protein classification predicting sequence
AVQNHVKSLNWGHR

SEQ ID NO: 12539 - protein, 11 aa, Artificial sequence
  Protein classification predicting sequence
QLQDRKVKYFN

SEQ ID NO: 12540 - protein, 24 aa, Artificial sequence
  Protein classification predicting sequence
FWLKESPGKTLVVGASYVALECAG

SEQ ID NO: 12541 - protein, 18 aa, Artificial sequence
  Protein classification predicting sequence
PGKTLVVGASYVALECAG

SEQ ID NO: 12542 - protein, 9 aa, Artificial sequence
  Protein classification predicting sequence
AGRLLAQRL

SEQ ID NO: 12543 - protein, 19 aa, Artificial sequence
  Protein classification predicting sequence
VPTTVFTPLEYGCVGLSEE

SEQ ID NO: 12544 - protein, 8 aa, Artificial sequence
  Protein classification predicting sequence
YKPLEFTV

SEQ ID NO: 12545 - protein, 8 aa, Artificial sequence
  Protein classification predicting sequence
EATSVPHI

SEQ ID NO: 12546 - protein, 7 aa, Artificial sequence
  Protein classification predicting sequence
GRPELTP

SEQ ID NO: 12547 - protein, 13 aa, Artificial sequence
  Protein classification predicting sequence
LGPNAGEVTQGFA

SEQ ID NO: 12548 - protein, 19 aa, Artificial sequence
  Protein classification predicting sequence
DVTVMVRSILLRGFDQDMA

SEQ ID NO: 12549 - protein, 6 aa, Artificial sequence
  Protein classification predicting sequence
PKKLMH

SEQ ID NO: 12550 - protein, 16 aa, Artificial sequence
  Protein classification predicting sequence
PGKTLVVGASYVALEC

SEQ ID NO: 12551 - protein, 6 aa, Artificial sequence
  Protein classification predicting sequence
FTFVCP

SEQ ID NO: 12552 - protein, 8 aa, Artificial sequence
  Protein classification predicting sequence
GEVCPANW

SEQ ID NO: 12553 - protein, 9 aa, Artificial sequence
  Protein classification predicting sequence
PRKEGGLGP

SEQ ID NO: 12554 - protein, 12 aa, Artificial sequence
  Protein classification predicting sequence
FVCPTEIVAFSD

SEQ ID NO: 12555 - protein, 8 aa, Artificial sequence
  Protein classification predicting sequence
GYVGLVSG

SEQ ID NO: 12556 - protein, 7 aa, Artificial sequence
  Protein classification predicting sequence
PIYEPGL

SEQ ID NO: 12557 - protein, 7 aa, Artificial sequence
  Protein classification predicting sequence
GFGGSCF

SEQ ID NO: 12558 - protein, 13 aa, Artificial sequence
  Protein classification predicting sequence
CHHLVTKFDPDLD

SEQ ID NO: 12559 - protein, 20 aa, Artificial sequence
  Protein classification predicting sequence
HELLGHVPMLADRTFAQFSQ

SEQ ID NO: 12560 - protein, 7 aa, Artificial sequence
  Protein classification predicting sequence
DARKERE

SEQ ID NO: 12561 - protein, 8 aa, Artificial sequence
  Protein classification predicting sequence
KVFETFEA

SEQ ID NO: 12562 - protein, 18 aa, Artificial sequence
  Protein classification predicting sequence
GLLSARDFLASLAFRVFQ

SEQ ID NO: 12563 - protein, 6 aa, Artificial sequence
  Protein classification predicting sequence
SQDIGL

SEQ ID NO: 12564 - protein, 10 aa, Artificial sequence
  Protein classification predicting sequence
IEKLSTVYWF

SEQ ID NO: 12565 - protein, 8 aa, Artificial sequence
  Protein classification predicting sequence
AVQPYQDQ

SEQ ID NO: 12566 - protein, 22 aa, Artificial sequence
  Protein classification predicting sequence
SPRFIGRRQSLIEDARKEREAA

SEQ ID NO: 12567 - protein, 9 aa, Artificial sequence
  Protein classification predicting sequence
KGFRRAVSE

SEQ ID NO: 12568 - protein, 22 aa, Artificial sequence
  Protein classification predicting sequence
ELDKCHHLVTKFDPDLDLDHPG

SEQ ID NO: 12569 - protein, 7 aa, Artificial sequence
  Protein classification predicting sequence
GDGSPCG

SEQ ID NO: 12570 - protein, 8 aa, Artificial sequence
  Protein classification predicting sequence
NFMGFNCG

SEQ ID NO: 12571 - protein, 8 aa, Artificial sequence
  Protein classification predicting sequence
CTDEYMGG

SEQ ID NO: 12572 - protein, 24 aa, Artificial sequence
  Protein classification predicting sequence
GSANDPIFLLHHAFVDSIFEQWLR

SEQ ID NO: 12573 - protein, 10 aa, Artificial sequence
  Protein classification predicting sequence
WPSVFYNRTC

SEQ ID NO: 12574 - protein, 10 aa, Artificial sequence
  Protein classification predicting sequence
YDLFVWMHYY

SEQ ID NO: 12575 - protein, 6 aa, Artificial sequence
  Protein classification predicting sequence
FLPWHR

SEQ ID NO: 12576 - protein, 10 aa, Artificial sequence
  Protein classification predicting sequence
HNALHIYMNG

SEQ ID NO: 12577 - protein, 12 aa, Artificial sequence
  Protein classification predicting sequence
YMVPFIPLYRNG

SEQ ID NO: 12578 - protein, 6 aa, Artificial sequence
  Protein classification predicting sequence
GPQFPF

SEQ ID NO: 12579 - protein, 10 aa, Artificial sequence
  Protein classification predicting sequence
FASPLTGIAD

SEQ ID NO: 12580 - protein, 8 aa, Artificial sequence
  Protein classification predicting sequence
HYYVSRDT

SEQ ID NO: 12581 - protein, 12 aa, Artificial sequence
  Protein classification predicting sequence
NFTIPYWDWRDA

SEQ ID NO: 12582 - protein, 12 aa, Artificial sequence
  Protein classification predicting sequence
EGPLLRNPGNHD

SEQ ID NO: 12583 - protein, 7 aa, Artificial sequence
  Protein classification predicting sequence
NAPIGHN

SEQ ID NO: 12584 - protein, 7 aa, Artificial sequence
  Protein classification predicting sequence
SQSSMHN

SEQ ID NO: 12585 - protein, 8 aa, Artificial sequence
  Protein classification predicting sequence
LHHAFVDS

SEQ ID NO: 12586 - protein, 8 aa, Artificial sequence
  Protein classification predicting sequence
VYPEANAP

SEQ ID NO: 12587 - protein, 13 aa, Artificial sequence
  Protein classification predicting sequence
SPNDPVFWLHHAY

SEQ ID NO: 12588 - protein, 9 aa, Artificial sequence
  Protein classification predicting sequence
RESAGFGWE

SEQ ID NO: 12589 - protein, 7 aa, Artificial sequence
  Protein classification predicting sequence
SNEAFYL

SEQ ID NO: 12590 - protein, 26 aa, Artificial sequence
  Protein classification predicting sequence
AKISDFYNTIGVHPTSAEELCSMRTP

SEQ ID NO: 12591 - protein, 14 aa, Artificial sequence
  Protein classification predicting sequence
GAGSGGLEAGWNAA

SEQ ID NO: 12592 - protein, 12 aa, Artificial sequence
  Protein classification predicting sequence
AVFSIPPIGTCG

SEQ ID NO: 12593 - protein, 18 aa, Artificial sequence
  Protein classification predicting sequence
TIGVHPTSAEELCSMRTP

SEQ ID NO: 12594 - protein, 7 aa, Artificial sequence
  Protein classification predicting sequence
LPKEQWT

SEQ ID NO: 12595 - protein, 20 aa, Artificial sequence
  Protein classification predicting sequence
RKWYYNAAGFNKLGLMRDDT

SEQ ID NO: 12596 - protein, 6 aa, Artificial sequence
  Protein classification predicting sequence
SKIVYD

SEQ ID NO: 12597 - protein, 7 aa, Artificial sequence
  Protein classification predicting sequence
NLEVPTY

SEQ ID NO: 12598 - protein, 8 aa, Artificial sequence
  Protein classification predicting sequence
GFSSNSVS

SEQ ID NO: 12599 - protein, 6 aa, Artificial sequence
  Protein classification predicting sequence
DRVPDM

SEQ ID NO: 12600 - protein, 17 aa, Artificial sequence
  Protein classification predicting sequence
RTLTQGLKGDPTYLVVE

SEQ ID NO: 12601 - protein, 8 aa, Artificial sequence
  Protein classification predicting sequence
AKDALGND

SEQ ID NO: 12602 - protein, 6 aa, Artificial sequence
  Protein classification predicting sequence
EWLKTH

SEQ ID NO: 12603 - protein, 13 aa, Artificial sequence
  Protein classification predicting sequence
NAVCTHLGCVVPW

SEQ ID NO: 12604 - protein, 10 aa, Artificial sequence
  Protein classification predicting sequence
CTHLGCVVPW

SEQ ID NO: 12605 - protein, 12 aa, Artificial sequence
  Protein classification predicting sequence
NKFKCPCHGSQY

SEQ ID NO: 12606 - protein, 7 aa, Artificial sequence
  Protein classification predicting sequence
VVRGPAP

SEQ ID NO: 12607 - protein, 9 aa, Artificial sequence
  Protein classification predicting sequence
GDPTYLVVE

SEQ ID NO: 12608 - protein, 12 aa, Artificial sequence
  Protein classification predicting sequence
CPCHGSQYNNQG

SEQ ID NO: 12609 - protein, 7 aa, Artificial sequence
  Protein classification predicting sequence
ETDFRTG

SEQ ID NO: 12610 - protein, 17 aa, Artificial sequence
  Protein classification predicting sequence
YGINAVCTHLGCVVPWN

SEQ ID NO: 12611 - protein, 33 aa, Artificial sequence
  Protein classification predicting sequence
NAAENKFICPCHGSQYNNQGRVVRGPAPLSLAL

SEQ ID NO: 12612 - protein, 12 aa, Artificial sequence
  Protein classification predicting sequence
VVRGPAPLSLAL

SEQ ID NO: 12613 - protein, 13 aa, Artificial sequence
  Protein classification predicting sequence
INAVCTHLGCVVP

SEQ ID NO: 12614 - protein, 9 aa, Artificial sequence
  Protein classification predicting sequence
CPCHGSQYN

SEQ ID NO: 12615 - protein, 14 aa, Artificial sequence
  Protein classification predicting sequence
VVRGPAPLSLALAH

SEQ ID NO: 12616 - protein, 11 aa, Artificial sequence
  Protein classification predicting sequence
CTHLGCTFPWN

SEQ ID NO: 12617 - protein, 10 aa, Artificial sequence
  Protein classification predicting sequence
FQCPCHGSRY

SEQ ID NO: 12618 - protein, 7 aa, Artificial sequence
  Protein classification predicting sequence
ATSIPAD

SEQ ID NO: 12619 - protein, 9 aa, Artificial sequence
  Protein classification predicting sequence
QGLKGDPTY

SEQ ID NO: 12620 - protein, 8 aa, Artificial sequence
  Protein classification predicting sequence
WTETDFRT

SEQ ID NO: 12621 - protein, 8 aa, Artificial sequence
  Protein classification predicting sequence
TKSSRESS

SEQ ID NO: 12622 - protein, 10 aa, Artificial sequence
  Protein classification predicting sequence
ARKGFSYLVT

SEQ ID NO: 12623 - protein, 30 aa, Artificial sequence
  Protein classification predicting sequence
KIEIKLSDIPEGKNMAFKWRGKPLFVRHRT

SEQ ID NO: 12624 - protein, 24 aa, Artificial sequence
  Protein classification predicting sequence
LNVPASVRYSHTDIKVPDFSDYRR

SEQ ID NO: 12625 - protein, 9 aa, Artificial sequence
  Protein classification predicting sequence
EVLDSTKSS

SEQ ID NO: 12626 - protein, 11 aa, Artificial sequence
  Protein classification predicting sequence
TTVGVAYAAKN

SEQ ID NO: 12627 - protein, 14 aa, Artificial sequence
  Protein classification predicting sequence
QFVSSMSASADVLA

SEQ ID NO: 12628 - protein, 10 aa, Artificial sequence
  Protein classification predicting sequence
SQLRDPQHDL

SEQ ID NO: 12629 - protein, 10 aa, Artificial sequence
  Protein classification predicting sequence
GPAPLNLEVP

SEQ ID NO: 12630 - protein, 28 aa, Artificial sequence
  Protein classification predicting sequence
YRRLEVLDSTKSSRESSEARKGFSYLVT

SEQ ID NO: 12631 - protein, 15 aa, Artificial sequence
  Protein classification predicting sequence
SGPFAPVLSATSRGV

SEQ ID NO: 12632 - protein, 16 aa, Artificial sequence
  Protein classification predicting sequence
RRPLVASVGLNVPASV

SEQ ID NO: 12633 - protein, 9 aa, Artificial sequence
  Protein classification predicting sequence
VGLNVPASV

SEQ ID NO: 12634 - protein, 20 aa, Artificial sequence
  Protein classification predicting sequence
NHERYPPGDPSKRAFAYFVL

SEQ ID NO: 12635 - protein, 11 aa, Artificial sequence
  Protein classification predicting sequence
LVQGLKGDPTY

SEQ ID NO: 12636 - protein, 10 aa, Artificial sequence
  Protein classification predicting sequence
RGPAPLSLAL

SEQ ID NO: 12637 - protein, 8 aa, Artificial sequence
  Protein classification predicting sequence
RESLSGQA

SEQ ID NO: 12638 - protein, 10 aa, Artificial sequence
  Protein classification predicting sequence
KVPDFSDYRR

SEQ ID NO: 12639 - protein, 7 aa, Artificial sequence
  Protein classification predicting sequence
YEFTSDD

SEQ ID NO: 12640 - protein, 9 aa, Artificial sequence
  Protein classification predicting sequence
MSASADVLA

SEQ ID NO: 12641 - protein, 6 aa, Artificial sequence
  Protein classification predicting sequence
IPEGKN

SEQ ID NO: 12642 - protein, 6 aa, Artificial sequence
  Protein classification predicting sequence
KWRGKP

SEQ ID NO: 12643 - protein, 8 aa, Artificial sequence
  Protein classification predicting sequence
GPAPLNLE

SEQ ID NO: 12644 - protein, 11 aa, Artificial sequence
  Protein classification predicting sequence
CTHLGCVVPWN

SEQ ID NO: 12645 - protein, 33 aa, Artificial sequence
  Protein classification predicting sequence
VTQFVSSMSASADVLALAKIEIKLSDIPEGKNM

SEQ ID NO: 12646 - protein, 12 aa, Artificial sequence
  Protein classification predicting sequence
NKFICPCHGSQY

SEQ ID NO: 12647 - protein, 6 aa, Artificial sequence
  Protein classification predicting sequence
ETDFRT

SEQ ID NO: 12648 - protein, 14 aa, Artificial sequence
  Protein classification predicting sequence
TVKWRGKPVFIRRR

SEQ ID NO: 12649 - protein, 9 aa, Artificial sequence
  Protein classification predicting sequence
GWFCPCHGS

SEQ ID NO: 12650 - protein, 11 aa, Artificial sequence
  Protein classification predicting sequence
SSMSASADVLA

SEQ ID NO: 12651 - protein, 14 aa, Artificial sequence
  Protein classification predicting sequence
GPAPLNLEVPTYEF

SEQ ID NO: 12652 - protein, 8 aa, Artificial sequence
  Protein classification predicting sequence
SASADVLA

SEQ ID NO: 12653 - protein, 19 aa, Artificial sequence
  Protein classification predicting sequence
GGWFCPCHGSHYDISGRIR

SEQ ID NO: 12654 - protein, 34 aa, Artificial sequence
  Protein classification predicting sequence
VRLLILKFVLSMSASKDVLALASLEVDLSSIEPG

SEQ ID NO: 12655 - protein, 17 aa, Artificial sequence
  Protein classification predicting sequence
TVTVKWRGKPVFIRRRT

SEQ ID NO: 12656 - protein, 8 aa, Artificial sequence
  Protein classification predicting sequence
GVCTHLGC

SEQ ID NO: 12657 - protein, 6 aa, Artificial sequence
  Protein classification predicting sequence
KGDPTY

SEQ ID NO: 12658 - protein, 17 aa, Artificial sequence
  Protein classification predicting sequence
VTTVGVAYAAKNAVTQF

SEQ ID NO: 12659 - protein, 28 aa, Artificial sequence
  Protein classification predicting sequence
CTHLGCVPIANAGDFGGYYCPCHGSHYD

SEQ ID NO: 12660 - protein, 8 aa, Artificial sequence
  Protein classification predicting sequence
ADVLAMAK

SEQ ID NO: 12661 - protein, 10 aa, Artificial sequence
  Protein classification predicting sequence
SGRIRKGPAP

SEQ ID NO: 12662 - protein, 11 aa, Artificial sequence
  Protein classification predicting sequence
ALYDNLHPSRI

SEQ ID NO: 12663 - protein, 14 aa, Artificial sequence
  Protein classification predicting sequence
LFTDSTEAEAIKLF

SEQ ID NO: 12664 - protein, 8 aa, Artificial sequence
  Protein classification predicting sequence
GLNTRQII

SEQ ID NO: 12665 - protein, 10 aa, Artificial sequence
  Protein classification predicting sequence
GVCLDPRIGN

SEQ ID NO: 12666 - protein, 24 aa, Artificial sequence
  Protein classification predicting sequence
YNNPSFGYGGYCLPKDTKQLLANY

SEQ ID NO: 12667 - protein, 8 aa, Artificial sequence
  Protein classification predicting sequence
SPIVDKEI

SEQ ID NO: 12668 - protein, 9 aa, Artificial sequence
  Protein classification predicting sequence
IFSPEFLRE

SEQ ID NO: 12669 - protein, 20 aa, Artificial sequence
  Protein classification predicting sequence
ALYDNLHPSRIVIGERSERA

SEQ ID NO: 12670 - protein, 9 aa, Artificial sequence
  Protein classification predicting sequence
KLFANTYLA

SEQ ID NO: 12671 - protein, 9 aa, Artificial sequence
  Protein classification predicting sequence
RVAYFNELD

SEQ ID NO: 12672 - protein, 8 aa, Artificial sequence
  Protein classification predicting sequence
VIIYEPVM

SEQ ID NO: 12673 - protein, 9 aa, Artificial sequence
  Protein classification predicting sequence
DVADKVYTR

SEQ ID NO: 12674 - protein, 7 aa, Artificial sequence
  Protein classification predicting sequence
PEFLREG

SEQ ID NO: 12675 - protein, 12 aa, Artificial sequence
  Protein classification predicting sequence
KALYDNLYPSRI

SEQ ID NO: 12676 - protein, 10 aa, Artificial sequence
  Protein classification predicting sequence
FFNSRLERDL

SEQ ID NO: 12677 - protein, 14 aa, Artificial sequence
  Protein classification predicting sequence
FKQQADVIISNRMA

SEQ ID NO: 12678 - protein, 94 aa, Artificial sequence
  Protein classification predicting sequence
ESPVKVVGVYRLIMKSNSDNFRESAIKDVIDILKSKDIKIIIYEPMLNKLESEDQSVLVNDLENFKKQANIIVTNRYDNELQDVKNKVYSRDIF

SEQ ID NO: 12679 - protein, 10 aa, Artificial sequence
  Protein classification predicting sequence
AGSGYVGLSL

SEQ ID NO: 12680 - protein, 8 aa, Artificial sequence
  Protein classification predicting sequence
IIATPTNY

SEQ ID NO: 12681 - protein, 26 aa, Artificial sequence
  Protein classification predicting sequence
TDRIIFSPEFLRESKALYDNLYPSRI

SEQ ID NO: 12682 - protein, 20 aa, Artificial sequence
  Protein classification predicting sequence
YNNPSFGYGGYCLPKDTKQL

SEQ ID NO: 12683 - protein, 7 aa, Artificial sequence
  Protein classification predicting sequence
YRLIMKS

SEQ ID NO: 12684 - protein, 12 aa, Artificial sequence
  Protein classification predicting sequence
TTNTWSSELSKL

SEQ ID NO: 12685 - protein, 12 aa, Artificial sequence
  Protein classification predicting sequence
LFNTVTDKKIAI

SEQ ID NO: 12686 - protein, 10 aa, Artificial sequence
  Protein classification predicting sequence
GKGRAADLKY

SEQ ID NO: 12687 - protein, 7 aa, Artificial sequence
  Protein classification predicting sequence
DRVLIGG

SEQ ID NO: 12688 - protein, 13 aa, Artificial sequence
  Protein classification predicting sequence
ASVGFGGSCFQKD

SEQ ID NO: 12689 - protein, 9 aa, Artificial sequence
  Protein classification predicting sequence
YWQQVIDMN

SEQ ID NO: 12690 - protein, 31 aa, Artificial sequence
  Protein classification predicting sequence
TGADVEEVATAIGMDQRIGNKFLKASVGFGG

SEQ ID NO: 12691 - protein, 10 aa, Artificial sequence
  Protein classification predicting sequence
CRGKNLFFST

SEQ ID NO: 12692 - protein, 17 aa, Artificial sequence
  Protein classification predicting sequence
ELSKLAANAFLAQRISS

SEQ ID NO: 12693 - protein, 9 aa, Artificial sequence
  Protein classification predicting sequence
SALCEATGA

SEQ ID NO: 12694 - protein, 19 aa, Artificial sequence
  Protein classification predicting sequence
KKIAILGFAFKKDTGDTRE

SEQ ID NO: 12695 - protein, 8 aa, Artificial sequence
  Protein classification predicting sequence
RESELLGG

SEQ ID NO: 12696 - protein, 8 aa, Artificial sequence
  Protein classification predicting sequence
QRHGKERV

SEQ ID NO: 12697 - protein, 7 aa, Artificial sequence
  Protein classification predicting sequence
SDCVNSY

SEQ ID NO: 12698 - protein, 25 aa, Artificial sequence
  Protein classification predicting sequence
RDDNSDIVATDTMKNTVYAKAKECS

SEQ ID NO: 12699 - protein, 13 aa, Artificial sequence
  Protein classification predicting sequence
AIVNIVEKPWERV

SEQ ID NO: 12700 - protein, 8 aa, Artificial sequence
  Protein classification predicting sequence
EAIVQKSG

SEQ ID NO: 12701 - protein, 11 aa, Artificial sequence
  Protein classification predicting sequence
LQLTSGIEGLS

SEQ ID NO: 12702 - protein, 7 aa, Artificial sequence
  Protein classification predicting sequence
SGFEGFI

SEQ ID NO: 12703 - protein, 17 aa, Artificial sequence
  Protein classification predicting sequence
GVYSPSVQNTLYLMAKA

SEQ ID NO: 12704 - protein, 11 aa, Artificial sequence
  Protein classification predicting sequence
LAKFKGIKSIE

SEQ ID NO: 12705 - protein, 11 aa, Artificial sequence
  Protein classification predicting sequence
DDNSDIVATDT

SEQ ID NO: 12706 - protein, 8 aa, Artificial sequence
  Protein classification predicting sequence
TDTIKNTV

SEQ ID NO: 12707 - protein, 7 aa, Artificial sequence
  Protein classification predicting sequence
WRYSYES

SEQ ID NO: 12708 - protein, 7 aa, Artificial sequence
  Protein classification predicting sequence
DTFFGPP

SEQ ID NO: 12709 - protein, 11 aa, Artificial sequence
  Protein classification predicting sequence
PTGTHFCEVEQ

SEQ ID NO: 12710 - protein, 8 aa, Artificial sequence
  Protein classification predicting sequence
NSDIVATD

SEQ ID NO: 12711 - protein, 7 aa, Artificial sequence
  Protein classification predicting sequence
VLKTTQS

SEQ ID NO: 12712 - protein, 9 aa, Artificial sequence
  Protein classification predicting sequence
ICEHFLSSF

SEQ ID NO: 12713 - protein, 11 aa, Artificial sequence
  Protein classification predicting sequence
HVIRAQVYVEE

SEQ ID NO: 12714 - protein, 12 aa, Artificial sequence
  Protein classification predicting sequence
EKNGVKHVHAFI

SEQ ID NO: 12715 - protein, 24 aa, Artificial sequence
  Protein classification predicting sequence
NIDMSKMGLINKEEVLLPLDNPYG

SEQ ID NO: 12716 - protein, 9 aa, Artificial sequence
  Protein classification predicting sequence
ITGTVKRKL

SEQ ID NO: 12717 - protein, 10 aa, Artificial sequence
  Protein classification predicting sequence
PWKRLEKNGV

SEQ ID NO: 12718 - protein, 8 aa, Artificial sequence
  Protein classification predicting sequence
DVDFEATW

SEQ ID NO: 12719 - protein, 7 aa, Artificial sequence
  Protein classification predicting sequence
KFAGPYD

SEQ ID NO: 12720 - protein, 9 aa, Artificial sequence
  Protein classification predicting sequence
QFGEGNFLR

SEQ ID NO: 12721 - protein, 8 aa, Artificial sequence
  Protein classification predicting sequence
ILNGAHTA

SEQ ID NO: 12722 - protein, 9 aa, Artificial sequence
  Protein classification predicting sequence
DLLNEHTDL

SEQ ID NO: 12723 - protein, 15 aa, Artificial sequence
  Protein classification predicting sequence
TQDGLYTTIIRGLNE

SEQ ID NO: 12724 - protein, 10 aa, Artificial sequence
  Protein classification predicting sequence
RLIRSVNREI

SEQ ID NO: 12725 - protein, 16 aa, Artificial sequence
  Protein classification predicting sequence
RFVFSNTTEAGISYHA

SEQ ID NO: 12726 - protein, 8 aa, Artificial sequence
  Protein classification predicting sequence
PAKLTRLL

SEQ ID NO: 12727 - protein, 9 aa, Artificial sequence
  Protein classification predicting sequence
PCELIDYNG

SEQ ID NO: 12728 - protein, 15 aa, Artificial sequence
  Protein classification predicting sequence
FCSTLVDRIVTGYPR

SEQ ID NO: 12729 - protein, 16 aa, Artificial sequence
  Protein classification predicting sequence
LNGMTKFRTRILPQLL

SEQ ID NO: 12730 - protein, 10 aa, Artificial sequence
  Protein classification predicting sequence
QDDAHWLERY

SEQ ID NO: 12731 - protein, 13 aa, Artificial sequence
  Protein classification predicting sequence
DHWEQDLTQVPGL

SEQ ID NO: 12732 - protein, 9 aa, Artificial sequence
  Protein classification predicting sequence
TLNRRDFPG

SEQ ID NO: 12733 - protein, 28 aa, Artificial sequence
  Protein classification predicting sequence
IIQFGEGNFLRAFVDWQIDLLNEHTDLN

SEQ ID NO: 12734 - protein, 13 aa, Artificial sequence
  Protein classification predicting sequence
FPPSLSTQDGLYT

SEQ ID NO: 12735 - protein, 9 aa, Artificial sequence
  Protein classification predicting sequence
FYLFVIQGP

SEQ ID NO: 12736 - protein, 27 aa, Artificial sequence
  Protein classification predicting sequence
IVDDIKPYKERKVAILNGAHTALVPVA

SEQ ID NO: 12737 - protein, 17 aa, Artificial sequence
  Protein classification predicting sequence
RLTFALAALIAFYRGER

SEQ ID NO: 12738 - protein, 20 aa, Artificial sequence
  Protein classification predicting sequence
HDEHLFIITHQAYELWFKQI

SEQ ID NO: 12739 - protein, 12 aa, Artificial sequence
  Protein classification predicting sequence
PASGFQSLQFRL

SEQ ID NO: 12740 - protein, 9 aa, Artificial sequence
  Protein classification predicting sequence
WLERTPGLE

SEQ ID NO: 12741 - protein, 8 aa, Artificial sequence
  Protein classification predicting sequence
TKWRYNHV

SEQ ID NO: 12742 - protein, 7 aa, Artificial sequence
  Protein classification predicting sequence
SDRYKVF

SEQ ID NO: 12743 - protein, 30 aa, Artificial sequence
  Protein classification predicting sequence
YRALCDVGTAISCSRVFSSRWGRGFGLVEH

SEQ ID NO: 12744 - protein, 10 aa, Artificial sequence
  Protein classification predicting sequence
LNQSNSIFGC

SEQ ID NO: 12745 - protein, 24 aa, Artificial sequence
  Protein classification predicting sequence
YLAWILFFVLYDFCIVCITTYAIN

SEQ ID NO: 12746 - protein, 10 aa, Artificial sequence
  Protein classification predicting sequence
RYGIPRLDID

SEQ ID NO: 12747 - protein, 6 aa, Artificial sequence
  Protein classification predicting sequence
YHNGPY

SEQ ID NO: 12748 - protein, 8 aa, Artificial sequence
  Protein classification predicting sequence
GWVNPGDV

SEQ ID NO: 12749 - protein, 10 aa, Artificial sequence
  Protein classification predicting sequence
VLGFYLAEQV

SEQ ID NO: 12750 - protein, 9 aa, Artificial sequence
  Protein classification predicting sequence
QGRVYLKAW

SEQ ID NO: 12751 - protein, 8 aa, Artificial sequence
  Protein classification predicting sequence
KEYTGKWG

SEQ ID NO: 12752 - protein, 15 aa, Artificial sequence
  Protein classification predicting sequence
QFLSLSTKAHDVAFI

SEQ ID NO: 12753 - protein, 9 aa, Artificial sequence
  Protein classification predicting sequence
TYMAFEVDN

SEQ ID NO: 12754 - protein, 70 aa, Artificial sequence
  Protein classification predicting sequence
AIEGLKALKMRGTGVSMPNKQLACEYVDELTPAAKLVGAINTIVNDDGYLRGYNTDGTGHIRAIKESGFD

SEQ ID NO: 12755 - protein, 12 aa, Artificial sequence
  Protein classification predicting sequence
GKTMVLLGAGGA

SEQ ID NO: 12756 - protein, 8 aa, Artificial sequence
  Protein classification predicting sequence
KEIKLFNR

SEQ ID NO: 12757 - protein, 18 aa, Artificial sequence
  Protein classification predicting sequence
RVNENTDCVVTVTDLADQ

SEQ ID NO: 12758 - protein, 41 aa, Artificial sequence
  Protein classification predicting sequence
LLVTECVYNPHMTKLLQQAQQAGCKTIDGYGMLLWQGAEQF

SEQ ID NO: 12759 - protein, 8 aa, Artificial sequence
  Protein classification predicting sequence
YVKQVMGF

SEQ ID NO: 12760 - protein, 11 aa, Artificial sequence
  Protein classification predicting sequence
EMGLHVFFGCY

SEQ ID NO: 12761 - protein, 7 aa, Artificial sequence
  Protein classification predicting sequence
FDNIYKL

SEQ ID NO: 12762 - protein, 8 aa, Artificial sequence
  Protein classification predicting sequence
GWVTELQD

SEQ ID NO: 12763 - protein, 7 aa, Artificial sequence
  Protein classification predicting sequence
GQGSLLQ

SEQ ID NO: 12764 - protein, 7 aa, Artificial sequence
  Protein classification predicting sequence
VLTPGDP

SEQ ID NO: 12765 - protein, 9 aa, Artificial sequence
  Protein classification predicting sequence
NFFLAGSYT

SEQ ID NO: 12766 - protein, 11 aa, Artificial sequence
  Protein classification predicting sequence
QDYIDSMEGAT

SEQ ID NO: 12767 - protein, 8 aa, Artificial sequence
  Protein classification predicting sequence
ALVDPDGA

SEQ ID NO: 12768 - protein, 24 aa, Artificial sequence
  Protein classification predicting sequence
GLDNLLYTPDADFSCFADLALASP

SEQ ID NO: 12769 - protein, 8 aa, Artificial sequence
  Protein classification predicting sequence
DYYIEGQG

SEQ ID NO: 12770 - protein, 9 aa, Artificial sequence
  Protein classification predicting sequence
SARCMLTIF

SEQ ID NO: 12771 - protein, 40 aa, Artificial sequence
  Protein classification predicting sequence
LFPPEPEHYRGPKLKVAIIGAGLAGMSTAVELLDQGHEVD

SEQ ID NO: 12772 - protein, 7 aa, Artificial sequence
  Protein classification predicting sequence
DADFSCF

SEQ ID NO: 12773 - protein, 6 aa, Artificial sequence
  Protein classification predicting sequence
QSLYRE

SEQ ID NO: 12774 - protein, 20 aa, Artificial sequence
  Protein classification predicting sequence
GSYTKQDYIDSMEGATLSGR

SEQ ID NO: 12775 - protein, 19 aa, Artificial sequence
  Protein classification predicting sequence
YDKARNAVALALSPVVRAL

SEQ ID NO: 12776 - protein, 10 aa, Artificial sequence
  Protein classification predicting sequence
LFPSSQGLEV

SEQ ID NO: 12777 - protein, 8 aa, Artificial sequence
  Protein classification predicting sequence
FIGGKVGS

SEQ ID NO: 12778 - protein, 15 aa, Artificial sequence
  Protein classification predicting sequence
GNHIEMGLHVFFGCY

SEQ ID NO: 12779 - protein, 8 aa, Artificial sequence
  Protein classification predicting sequence
GLDNLLYT

SEQ ID NO: 12780 - protein, 9 aa, Artificial sequence
  Protein classification predicting sequence
FSCFADLAL

SEQ ID NO: 12781 - protein, 21 aa, Artificial sequence
  Protein classification predicting sequence
GNHIEMGLHVFFGCYNNLFRL

SEQ ID NO: 12782 - protein, 7 aa, Artificial sequence
  Protein classification predicting sequence
KVALVTG

SEQ ID NO: 12783 - protein, 6 aa, Artificial sequence
  Protein classification predicting sequence
RNTIGV

SEQ ID NO: 12784 - protein, 6 aa, Artificial sequence
  Protein classification predicting sequence
RQTILD

SEQ ID NO: 12785 - protein, 7 aa, Artificial sequence
  Protein classification predicting sequence
LEEFRTD

SEQ ID NO: 12786 - protein, 6 aa, Artificial sequence
  Protein classification predicting sequence
ILGHEA

SEQ ID NO: 12787 - protein, 6 aa, Artificial sequence
  Protein classification predicting sequence
GRTWKG

SEQ ID NO: 12788 - protein, 6 aa, Artificial sequence
  Protein classification predicting sequence
GICHSD

SEQ ID NO: 12789 - protein, 6 aa, Artificial sequence
  Protein classification predicting sequence
IPAGVP

SEQ ID NO: 12790 - protein, 11 aa, Artificial sequence
  Protein classification predicting sequence
VKPGDKVIPLF

SEQ ID NO: 12791 - protein, 8 aa, Artificial sequence
  Protein classification predicting sequence
AGASRIIG

SEQ ID NO: 12792 - protein, 9 aa, Artificial sequence
  Protein classification predicting sequence
TSTFTEYTV

SEQ ID NO: 12793 - protein, 7 aa, Artificial sequence
  Protein classification predicting sequence
RFTCKGK

SEQ ID NO: 12794 - protein, 7 aa, Artificial sequence
  Protein classification predicting sequence
ERPKLEE

SEQ ID NO: 12795 - protein, 7 aa, Artificial sequence
  Protein classification predicting sequence
EVRIKIL

SEQ ID NO: 12796 - protein, 7 aa, Artificial sequence
  Protein classification predicting sequence
PVILGHE

SEQ ID NO: 12797 - protein, 13 aa, Artificial sequence
  Protein classification predicting sequence
LTAATGMDALTHA

SEQ ID NO: 12798 - protein, 6 aa, Artificial sequence
  Protein classification predicting sequence
FKIGDR

SEQ ID NO: 12799 - protein, 9 aa, Artificial sequence
  Protein classification predicting sequence
AVGGGSIID

SEQ ID NO: 12800 - protein, 9 aa, Artificial sequence
  Protein classification predicting sequence
TSRFTCKGK

SEQ ID NO: 12801 - protein, 7 aa, Artificial sequence
  Protein classification predicting sequence
AGASRII

SEQ ID NO: 12802 - protein, 7 aa, Artificial sequence
  Protein classification predicting sequence
AKVTPGS

SEQ ID NO: 12803 - protein, 7 aa, Artificial sequence
  Protein classification predicting sequence
CAVFGLG

SEQ ID NO: 12804 - protein, 8 aa, Artificial sequence
  Protein classification predicting sequence
GLKVGQRV

SEQ ID NO: 12805 - protein, 6 aa, Artificial sequence
  Protein classification predicting sequence
DVRYRF

SEQ ID NO: 12806 - protein, 7 aa, Artificial sequence
  Protein classification predicting sequence
CLIGCGF

SEQ ID NO: 12807 - protein, 7 aa, Artificial sequence
  Protein classification predicting sequence
GCKAAGA

SEQ ID NO: 12808 - protein, 7 aa, Artificial sequence
  Protein classification predicting sequence
KGSVFGG

SEQ ID NO: 12809 - protein, 6 aa, Artificial sequence
  Protein classification predicting sequence
DGTSRF

SEQ ID NO: 12810 - protein, 6 aa, Artificial sequence
  Protein classification predicting sequence
FTEYTV

SEQ ID NO: 12811 - protein, 9 aa, Artificial sequence
  Protein classification predicting sequence
VGSEVTKYR

SEQ ID NO: 12812 - protein, 6 aa, Artificial sequence
  Protein classification predicting sequence
GHMGVK

SEQ ID NO: 12813 - protein, 9 aa, Artificial sequence
  Protein classification predicting sequence
PGDKVIPLF

SEQ ID NO: 12814 - protein, 7 aa, Artificial sequence
  Protein classification predicting sequence
GRTWKGA

SEQ ID NO: 12815 - protein, 7 aa, Artificial sequence
  Protein classification predicting sequence
FSQYTVV

SEQ ID NO: 12816 - protein, 6 aa, Artificial sequence
  Protein classification predicting sequence
KVIPLF

SEQ ID NO: 12817 - protein, 6 aa, Artificial sequence
  Protein classification predicting sequence
RFTCKG

SEQ ID NO: 12818 - protein, 6 aa, Artificial sequence
  Protein classification predicting sequence
LDTVCL

SEQ ID NO: 12819 - protein, 8 aa, Artificial sequence
  Protein classification predicting sequence
ICGTDVHI

SEQ ID NO: 12820 - protein, 10 aa, Artificial sequence
  Protein classification predicting sequence
IPKSVTPSRI

SEQ ID NO: 12821 - protein, 8 aa, Artificial sequence
  Protein classification predicting sequence
DVDKAVKA

SEQ ID NO: 12822 - protein, 8 aa, Artificial sequence
  Protein classification predicting sequence
LADLIERD

SEQ ID NO: 12823 - protein, 8 aa, Artificial sequence
  Protein classification predicting sequence
YTEVKTVT

SEQ ID NO: 12824 - protein, 6 aa, Artificial sequence
  Protein classification predicting sequence
CGNTVV

SEQ ID NO: 12825 - protein, 8 aa, Artificial sequence
  Protein classification predicting sequence
KPAEQTPL

SEQ ID NO: 12826 - protein, 8 aa, Artificial sequence
  Protein classification predicting sequence
GPTAGAAI

SEQ ID NO: 12827 - protein, 14 aa, Artificial sequence
  Protein classification predicting sequence
NLKRVTLELGGKSP

SEQ ID NO: 12828 - protein, 6 aa, Artificial sequence
  Protein classification predicting sequence
ERAKKY

SEQ ID NO: 12829 - protein, 19 aa, Artificial sequence
  Protein classification predicting sequence
MRIAKEEIFGPVQQIMKFK

SEQ ID NO: 12830 - protein, 8 aa, Artificial sequence
  Protein classification predicting sequence
VIKRANNT

SEQ ID NO: 12831 - protein, 8 aa, Artificial sequence
  Protein classification predicting sequence
PWNFPLLM

SEQ ID NO: 12832 - protein, 7 aa, Artificial sequence
  Protein classification predicting sequence
WKIAPAL

SEQ ID NO: 12833 - protein, 17 aa, Artificial sequence
  Protein classification predicting sequence
LIKEAGFPPGVVNIVPG

SEQ ID NO: 12834 - protein, 31 aa, Artificial sequence
  Protein classification predicting sequence
LIKEAGFPPGVVNIVPGYGPTAGAAISSHMD

SEQ ID NO: 12835 - protein, 8 aa, Artificial sequence
  Protein classification predicting sequence
FTKDLDKA

SEQ ID NO: 12836 - protein, 13 aa, Artificial sequence
  Protein classification predicting sequence
PFGGFKMSGNGRE

SEQ ID NO: 12837 - protein, 6 aa, Artificial sequence
  Protein classification predicting sequence
VEEGDK

SEQ ID NO: 12838 - protein, 13 aa, Artificial sequence
  Protein classification predicting sequence
GVCGQIIPWNFPL

SEQ ID NO: 12839 - protein, 13 aa, Artificial sequence
  Protein classification predicting sequence
VKPAEQTPLTALH

SEQ ID NO: 12840 - protein, 6 aa, Artificial sequence
  Protein classification predicting sequence
AVEFAH

SEQ ID NO: 12841 - protein, 7 aa, Artificial sequence
  Protein classification predicting sequence
FVEESIY

SEQ ID NO: 12842 - protein, 21 aa, Artificial sequence
  Protein classification predicting sequence
FVEESIYDEFVRRSVERAKKY

SEQ ID NO: 12843 - protein, 20 aa, Artificial sequence
  Protein classification predicting sequence
MRIAKEEIFGPVQQIMKFKS

SEQ ID NO: 12844 - protein, 21 aa, Artificial sequence
  Protein classification predicting sequence
KILDLIESGKKEGAKLECGGG

SEQ ID NO: 12845 - protein, 9 aa, Artificial sequence
  Protein classification predicting sequence
TKIFINNEW

SEQ ID NO: 12846 - protein, 7 aa, Artificial sequence
  Protein classification predicting sequence
MDASERG

SEQ ID NO: 12847 - protein, 7 aa, Artificial sequence
  Protein classification predicting sequence
GAAIASH

SEQ ID NO: 12848 - protein, 9 aa, Artificial sequence
  Protein classification predicting sequence
EGAKLECGG

SEQ ID NO: 12849 - protein, 9 aa, Artificial sequence
  Protein classification predicting sequence
RYYAGWADK

SEQ ID NO: 12850 - protein, 11 aa, Artificial sequence
  Protein classification predicting sequence
LIKEAGFPPGV

SEQ ID NO: 12851 - protein, 6 aa, Artificial sequence
  Protein classification predicting sequence
AGWADK

SEQ ID NO: 12852 - protein, 7 aa, Artificial sequence
  Protein classification predicting sequence
WKLAPAL

SEQ ID NO: 12853 - protein, 9 aa, Artificial sequence
  Protein classification predicting sequence
VLKPAEQTP

SEQ ID NO: 12854 - protein, 7 aa, Artificial sequence
  Protein classification predicting sequence
GAAISSH

SEQ ID NO: 12855 - protein, 15 aa, Artificial sequence
  Protein classification predicting sequence
AHQGVFFNQGQCCTA

SEQ ID NO: 12856 - protein, 16 aa, Artificial sequence
  Protein classification predicting sequence
LIESGKKEGAKLECGG

SEQ ID NO: 12857 - protein, 6 aa, Artificial sequence
  Protein classification predicting sequence
GTVWIN

SEQ ID NO: 12858 - protein, 7 aa, Artificial sequence
  Protein classification predicting sequence
TKIFINN

SEQ ID NO: 12859 - protein, 12 aa, Artificial sequence
  Protein classification predicting sequence
GFPPGVVNIVPG

SEQ ID NO: 12860 - protein, 7 aa, Artificial sequence
  Protein classification predicting sequence
VTLELGG

SEQ ID NO: 12861 - protein, 6 aa, Artificial sequence
  Protein classification predicting sequence
NPATEE

SEQ ID NO: 12862 - protein, 8 aa, Artificial sequence
  Protein classification predicting sequence
ALSCGNTV

SEQ ID NO: 12863 - protein, 11 aa, Artificial sequence
  Protein classification predicting sequence
KPAEQTPLTAL

SEQ ID NO: 12864 - protein, 11 aa, Artificial sequence
  Protein classification predicting sequence
TAGAAISSHMD

SEQ ID NO: 12865 - protein, 6 aa, Artificial sequence
  Protein classification predicting sequence
AHQGVF

SEQ ID NO: 12866 - protein, 9 aa, Artificial sequence
  Protein classification predicting sequence
QGPQIDKEQ

SEQ ID NO: 12867 - protein, 6 aa, Artificial sequence
  Protein classification predicting sequence
FINNEW

SEQ ID NO: 12868 - protein, 7 aa, Artificial sequence
  Protein classification predicting sequence
WRRMDAS

SEQ ID NO: 12869 - protein, 9 aa, Artificial sequence
  Protein classification predicting sequence
LADLVERDR

SEQ ID NO: 12870 - protein, 13 aa, Artificial sequence
  Protein classification predicting sequence
MRIAKEEIFGPVQ

SEQ ID NO: 12871 - protein, 7 aa, Artificial sequence
  Protein classification predicting sequence
AGTVWVN

SEQ ID NO: 12872 - protein, 8 aa, Artificial sequence
  Protein classification predicting sequence
KPSELSEN

SEQ ID NO: 12873 - protein, 20 aa, Artificial sequence
  Protein classification predicting sequence
AAAKHLTPVTLELGGKSPCY

SEQ ID NO: 12874 - protein, 6 aa, Artificial sequence
  Protein classification predicting sequence
RYIAPT

SEQ ID NO: 12875 - protein, 7 aa, Artificial sequence
  Protein classification predicting sequence
ETSSGGV

SEQ ID NO: 12876 - protein, 7 aa, Artificial sequence
  Protein classification predicting sequence
IGAWNYP

SEQ ID NO: 12877 - protein, 6 aa, Artificial sequence
  Protein classification predicting sequence
VGKIVM

SEQ ID NO: 12878 - protein, 8 aa, Artificial sequence
  Protein classification predicting sequence
VTLELGGK

SEQ ID NO: 12879 - protein, 7 aa, Artificial sequence
  Protein classification predicting sequence
TLELGGK

SEQ ID NO: 12880 - protein, 7 aa, Artificial sequence
  Protein classification predicting sequence
LPQYLDQ

SEQ ID NO: 12881 - protein, 13 aa, Artificial sequence
  Protein classification predicting sequence
KHLTPVTLELGGK

SEQ ID NO: 12882 - protein, 7 aa, Artificial sequence
  Protein classification predicting sequence
EKPLALY

SEQ ID NO: 12883 - protein, 7 aa, Artificial sequence
  Protein classification predicting sequence
GLGTWKS

SEQ ID NO: 12884 - protein, 6 aa, Artificial sequence
  Protein classification predicting sequence
KIQHTK

SEQ ID NO: 12885 - protein, 7 aa, Artificial sequence
  Protein classification predicting sequence
FINNEWH

SEQ ID NO: 12886 - protein, 6 aa, Artificial sequence
  Protein classification predicting sequence
VTLELG

SEQ ID NO: 12887 - protein, 13 aa, Artificial sequence
  Protein classification predicting sequence
FINNEWHDSVSGK

SEQ ID NO: 12888 - protein, 8 aa, Artificial sequence
  Protein classification predicting sequence
EGDKADVD

SEQ ID NO: 12889 - protein, 13 aa, Artificial sequence
  Protein classification predicting sequence
LIKEAGFPPGVVN

SEQ ID NO: 12890 - protein, 7 aa, Artificial sequence
  Protein classification predicting sequence
GGKSPNI

SEQ ID NO: 12891 - protein, 8 aa, Artificial sequence
  Protein classification predicting sequence
FFNQGQCC

SEQ ID NO: 12892 - protein, 6 aa, Artificial sequence
  Protein classification predicting sequence
TEQGPQ

SEQ ID NO: 12893 - protein, 8 aa, Artificial sequence
  Protein classification predicting sequence
ALQAGTVW

SEQ ID NO: 12894 - protein, 8 aa, Artificial sequence
  Protein classification predicting sequence
AAGRSNLK

SEQ ID NO: 12895 - protein, 6 aa, Artificial sequence
  Protein classification predicting sequence
HMDVDK

SEQ ID NO: 12896 - protein, 9 aa, Artificial sequence
  Protein classification predicting sequence
GATVVTGGK

SEQ ID NO: 12897 - protein, 8 aa, Artificial sequence
  Protein classification predicting sequence
LAALETLD

SEQ ID NO: 12898 - protein, 13 aa, Artificial sequence
  Protein classification predicting sequence
AGFPPGVVNIVPG

SEQ ID NO: 12899 - protein, 6 aa, Artificial sequence
  Protein classification predicting sequence
GWADKI

SEQ ID NO: 12900 - protein, 7 aa, Artificial sequence
  Protein classification predicting sequence
TNDINKA

SEQ ID NO: 12901 - protein, 6 aa, Artificial sequence
  Protein classification predicting sequence
GREMGE

SEQ ID NO: 12902 - protein, 7 aa, Artificial sequence
  Protein classification predicting sequence
YTQTKSV

SEQ ID NO: 12903 - protein, 8 aa, Artificial sequence
  Protein classification predicting sequence
GVVNIVPG

SEQ ID NO: 12904 - protein, 9 aa, Artificial sequence
  Protein classification predicting sequence
PFGGVKQSG

SEQ ID NO: 12905 - protein, 7 aa, Artificial sequence
  Protein classification predicting sequence
SERGRLL

SEQ ID NO: 12906 - protein, 10 aa, Artificial sequence
  Protein classification predicting sequence
VTLELGGKSP

SEQ ID NO: 12907 - protein, 12 aa, Artificial sequence
  Protein classification predicting sequence
MRIAKEEIFGPV

SEQ ID NO: 12908 - protein, 7 aa, Artificial sequence
  Protein classification predicting sequence
RHEPIGV

SEQ ID NO: 12909 - protein, 6 aa, Artificial sequence
  Protein classification predicting sequence
VLKPSE

SEQ ID NO: 12910 - protein, 6 aa, Artificial sequence
  Protein classification predicting sequence
FDDADL

SEQ ID NO: 12911 - protein, 8 aa, Artificial sequence
  Protein classification predicting sequence
LLNKLADL

SEQ ID NO: 12912 - protein, 6 aa, Artificial sequence
  Protein classification predicting sequence
WKIGPA

SEQ ID NO: 12913 - protein, 7 aa, Artificial sequence
  Protein classification predicting sequence
NNTTYGL

SEQ ID NO: 12914 - protein, 6 aa, Artificial sequence
  Protein classification predicting sequence
GRELGE

SEQ ID NO: 12915 - protein, 15 aa, Artificial sequence
  Protein classification predicting sequence
GVCGQIIPWNFPLLM

SEQ ID NO: 12916 - protein, 6 aa, Artificial sequence
  Protein classification predicting sequence
EPIGVC

SEQ ID NO: 12917 - protein, 6 aa, Artificial sequence
  Protein classification predicting sequence
AEQTPL

SEQ ID NO: 12918 - protein, 6 aa, Artificial sequence
  Protein classification predicting sequence
YTRHEP

SEQ ID NO: 12919 - protein, 7 aa, Artificial sequence
  Protein classification predicting sequence
IVFDDAD

SEQ ID NO: 12920 - protein, 7 aa, Artificial sequence
  Protein classification predicting sequence
TDYGLAA

SEQ ID NO: 12921 - protein, 6 aa, Artificial sequence
  Protein classification predicting sequence
PWNFPL

SEQ ID NO: 12922 - protein, 6 aa, Artificial sequence
  Protein classification predicting sequence
PFGGYK

SEQ ID NO: 12923 - protein, 6 aa, Artificial sequence
  Protein classification predicting sequence
EPLGVV

SEQ ID NO: 12924 - protein, 6 aa, Artificial sequence
  Protein classification predicting sequence
GQIIPW

SEQ ID NO: 12925 - protein, 7 aa, Artificial sequence
  Protein classification predicting sequence
APALAAG

SEQ ID NO: 12926 - protein, 8 aa, Artificial sequence
  Protein classification predicting sequence
KEQYDKIL

SEQ ID NO: 12927 - protein, 6 aa, Artificial sequence
  Protein classification predicting sequence
VWVNCY

SEQ ID NO: 12928 - protein, 6 aa, Artificial sequence
  Protein classification predicting sequence
SGIGRE

SEQ ID NO: 12929 - protein, 9 aa, Artificial sequence
  Protein classification predicting sequence
VTAYSPLGS

SEQ ID NO: 12930 - protein, 12 aa, Artificial sequence
  Protein classification predicting sequence
VLEARDRVGGRT

SEQ ID NO: 12931 - protein, 6 aa, Artificial sequence
  Protein classification predicting sequence
PETYRF

SEQ ID NO: 12932 - protein, 8 aa, Artificial sequence
  Protein classification predicting sequence
SIGCEPCT

SEQ ID NO: 12933 - protein, 6 aa, Artificial sequence
  Protein classification predicting sequence
GGHTLG

SEQ ID NO: 12934 - protein, 6 aa, Artificial sequence
  Protein classification predicting sequence
KLVIIT

SEQ ID NO: 12935 - protein, 7 aa, Artificial sequence
  Protein classification predicting sequence
DNLLKGA

SEQ ID NO: 12936 - protein, 6 aa, Artificial sequence
  Protein classification predicting sequence
AKVSFT

SEQ ID NO: 12937 - protein, 6 aa, Artificial sequence
  Protein classification predicting sequence
ETLDNG

SEQ ID NO: 12938 - protein, 5 aa, Artificial sequence
  Protein classification predicting sequence
GSPWR

SEQ ID NO: 12939 - protein, 6 aa, Artificial sequence
  Protein classification predicting sequence
YPDVEL

SEQ ID NO: 12940 - protein, 8 aa, Artificial sequence
  Protein classification predicting sequence
VGMKPLEN

SEQ ID NO: 12941 - protein, 6 aa, Artificial sequence
  Protein classification predicting sequence
MNVLPA

SEQ ID NO: 12942 - protein, 5 aa, Artificial sequence
  Protein classification predicting sequence
AWNYP

SEQ ID NO: 12943 - protein, 7 aa, Artificial sequence
  Protein classification predicting sequence
GFFIEPT

SEQ ID NO: 12944 - protein, 9 aa, Artificial sequence
  Protein classification predicting sequence
LDVMINNAG

SEQ ID NO: 12945 - protein, 6 aa, Artificial sequence
  Protein classification predicting sequence
NNAGIT

SEQ ID NO: 12946 - protein, 9 aa, Artificial sequence
  Protein classification predicting sequence
GVIINTASV

SEQ ID NO: 12947 - protein, 8 aa, Artificial sequence
  Protein classification predicting sequence
TEPGAGSD

SEQ ID NO: 12948 - protein, 10 aa, Artificial sequence
  Protein classification predicting sequence
WGLVNNAGIS

SEQ ID NO: 12949 - protein, 8 aa, Artificial sequence
  Protein classification predicting sequence
TGCDSGFG

SEQ ID NO: 12950 - protein, 6 aa, Artificial sequence
  Protein classification predicting sequence
CSYHGW

SEQ ID NO: 12951 - protein, 25 aa, Artificial sequence
  Protein classification predicting sequence
QKWVIPCNWKFAAEQFCSDMYHAGT

SEQ ID NO: 12952 - protein, 6 aa, Artificial sequence
  Protein classification predicting sequence
RVPLGV

SEQ ID NO: 12953 - protein, 6 aa, Artificial sequence
  Protein classification predicting sequence
NPATGE

SEQ ID NO: 12954 - protein, 8 aa, Artificial sequence
  Protein classification predicting sequence
LELGGKNP

SEQ ID NO: 12955 - protein, 7 aa, Artificial sequence
  Protein classification predicting sequence
GGYKQSG

SEQ ID NO: 12956 - protein, 6 aa, Artificial sequence
  Protein classification predicting sequence
EYTEVK

SEQ ID NO: 12957 - protein, 9 aa, Artificial sequence
  Protein classification predicting sequence
PTVFADVTD

SEQ ID NO: 12958 - protein, 7 aa, Artificial sequence
  Protein classification predicting sequence
DADLDKA

SEQ ID NO: 12959 - protein, 6 aa, Artificial sequence
  Protein classification predicting sequence
PLGVIG

SEQ ID NO: 12960 - protein, 9 aa, Artificial sequence
  Protein classification predicting sequence
APALAAGNA

SEQ ID NO: 12961 - protein, 7 aa, Artificial sequence
  Protein classification predicting sequence
PDGVFNV

SEQ ID NO: 12962 - protein, 6 aa, Artificial sequence
  Protein classification predicting sequence
KVSFTG

SEQ ID NO: 12963 - protein, 7 aa, Artificial sequence
  Protein classification predicting sequence
SNAGFYP

SEQ ID NO: 12964 - protein, 8 aa, Artificial sequence
  Protein classification predicting sequence
DMLKSVLP

SEQ ID NO: 12965 - protein, 13 aa, Artificial sequence
  Protein classification predicting sequence
FEQDDGENWVEIQ

SEQ ID NO: 12966 - protein, 8 aa, Artificial sequence
  Protein classification predicting sequence
FPTCSFLP

SEQ ID NO: 12967 - protein, 8 aa, Artificial sequence
  Protein classification predicting sequence
GNAKAFTC

SEQ ID NO: 12968 - protein, 9 aa, Artificial sequence
  Protein classification predicting sequence
EGARVAVLD

SEQ ID NO: 12969 - protein, 6 aa, Artificial sequence
  Protein classification predicting sequence
VNNAGI

SEQ ID NO: 12970 - protein, 7 aa, Artificial sequence
  Protein classification predicting sequence
GVNVAGV

SEQ ID NO: 12971 - protein, 7 aa, Artificial sequence
  Protein classification predicting sequence
YITGQTI

SEQ ID NO: 12972 - protein, 7 aa, Artificial sequence
  Protein classification predicting sequence
GVRQCLG

SEQ ID NO: 12973 - protein, 6 aa, Artificial sequence
  Protein classification predicting sequence
YGEHWR

SEQ ID NO: 12974 - protein, 7 aa, Artificial sequence
  Protein classification predicting sequence
FTAGTDT

SEQ ID NO: 12975 - protein, 7 aa, Artificial sequence
  Protein classification predicting sequence
CAGVTVY

SEQ ID NO: 12976 - protein, 6 aa, Artificial sequence
  Protein classification predicting sequence
CHTDLH

SEQ ID NO: 12977 - protein, 6 aa, Artificial sequence
  Protein classification predicting sequence
YLVSSD

SEQ ID NO: 12978 - protein, 6 aa, Artificial sequence
  Protein classification predicting sequence
GVCHTD

SEQ ID NO: 12979 - protein, 8 aa, Artificial sequence
  Protein classification predicting sequence
SGMGAYHG

SEQ ID NO: 12980 - protein, 6 aa, Artificial sequence
  Protein classification predicting sequence
AWHSAG

SEQ ID NO: 12981 - protein, 7 aa, Artificial sequence
  Protein classification predicting sequence
GGHTFGK

SEQ ID NO: 12982 - protein, 10 aa, Artificial sequence
  Protein classification predicting sequence
ELGPHKIRVN

SEQ ID NO: 12983 - protein, 6 aa, Artificial sequence
  Protein classification predicting sequence
DWEATE

SEQ ID NO: 12984 - protein, 7 aa, Artificial sequence
  Protein classification predicting sequence
SFNVNLR

SEQ ID NO: 12985 - protein, 7 aa, Artificial sequence
  Protein classification predicting sequence
GPIYREK

SEQ ID NO: 12986 - protein, 6 aa, Artificial sequence
  Protein classification predicting sequence
QNYHIP

SEQ ID NO: 12987 - protein, 7 aa, Artificial sequence
  Protein classification predicting sequence
RQCLGRR

SEQ ID NO: 12988 - protein, 7 aa, Artificial sequence
  Protein classification predicting sequence
AGGVDTT

SEQ ID NO: 12989 - protein, 8 aa, Artificial sequence
  Protein classification predicting sequence
EVLRLRPV

SEQ ID NO: 12990 - protein, 6 aa, Artificial sequence
  Protein classification predicting sequence
PEDFPN

SEQ ID NO: 12991 - protein, 7 aa, Artificial sequence
  Protein classification predicting sequence
LVNNAGI

SEQ ID NO: 12992 - protein, 6 aa, Artificial sequence
  Protein classification predicting sequence
GRWWWE

SEQ ID NO: 12993 - protein, 8 aa, Artificial sequence
  Protein classification predicting sequence
DQSPGTRS

SEQ ID NO: 12994 - protein, 11 aa, Artificial sequence
  Protein classification predicting sequence
QHEREGRWWWE

SEQ ID NO: 12995 - protein, 11 aa, Artificial sequence
  Protein classification predicting sequence
LVTGAGKGIGR

SEQ ID NO: 12996 - protein, 16 aa, Artificial sequence
  Protein classification predicting sequence
PGAIVNVSSQASQRAL

SEQ ID NO: 12997 - protein, 14 aa, Artificial sequence
  Protein classification predicting sequence
VGPVDLLVNNAAVA

SEQ ID NO: 12998 - protein, 8 aa, Artificial sequence
  Protein classification predicting sequence
VNPTVVMT

SEQ ID NO: 12999 - protein, 10 aa, Artificial sequence
  Protein classification predicting sequence
RIPLGKFAEV

SEQ ID NO: 13000 - protein, 6 aa, Artificial sequence
  Protein classification predicting sequence
VLPTSG

SEQ ID NO: 13001 - protein, 6 aa, Artificial sequence
  Protein classification predicting sequence
PPGVVN

SEQ ID NO: 13002 - protein, 6 aa, Artificial sequence
  Protein classification predicting sequence
GQTNYA

SEQ ID NO: 13003 - protein, 8 aa, Artificial sequence
  Protein classification predicting sequence
GRVVNISS

SEQ ID NO: 13004 - protein, 10 aa, Artificial sequence
  Protein classification predicting sequence
GGVTVSYFEW

SEQ ID NO: 13005 - protein, 14 aa, Artificial sequence
  Protein classification predicting sequence
SVNLSILKFLGFEQ

SEQ ID NO: 13006 - protein, 11 aa, Artificial sequence
  Protein classification predicting sequence
GGSLIRPEATG

SEQ ID NO: 13007 - protein, 7 aa, Artificial sequence
  Protein classification predicting sequence
GANIAGF

SEQ ID NO: 13008 - protein, 10 aa, Artificial sequence
  Protein classification predicting sequence
ANGPTTPEAD

SEQ ID NO: 13009 - protein, 9 aa, Artificial sequence
  Protein classification predicting sequence
GPYKGGLRF

SEQ ID NO: 13010 - protein, 7 aa, Artificial sequence
  Protein classification predicting sequence
PSVNLSI

SEQ ID NO: 13011 - protein, 7 aa, Artificial sequence
  Protein classification predicting sequence
KFLGFEQ

SEQ ID NO: 13012 - protein, 8 aa, Artificial sequence
  Protein classification predicting sequence
LTTLPMGG

SEQ ID NO: 13013 - protein, 8 aa, Artificial sequence
  Protein classification predicting sequence
KGGSDFDP

SEQ ID NO: 13014 - protein, 8 aa, Artificial sequence
  Protein classification predicting sequence
RPEATGYG

SEQ ID NO: 13015 - protein, 7 aa, Artificial sequence
  Protein classification predicting sequence
DIPAPDV

SEQ ID NO: 13016 - protein, 11 aa, Artificial sequence
  Protein classification predicting sequence
PAGDIGVGGRE

SEQ ID NO: 13017 - protein, 10 aa, Artificial sequence
  Protein classification predicting sequence
NSALGPYKGG

SEQ ID NO: 13018 - protein, 6 aa, Artificial sequence
  Protein classification predicting sequence
GPYKGG

SEQ ID NO: 13019 - protein, 10 aa, Artificial sequence
  Protein classification predicting sequence
PDILANAGGV

SEQ ID NO: 13020 - protein, 7 aa, Artificial sequence
  Protein classification predicting sequence
FEQTFKN

SEQ ID NO: 13021 - protein, 9 aa, Artificial sequence
  Protein classification predicting sequence
SGSGNVAQY

SEQ ID NO: 13022 - protein, 6 aa, Artificial sequence
  Protein classification predicting sequence
VSGLEM

SEQ ID NO: 13023 - protein, 7 aa, Artificial sequence
  Protein classification predicting sequence
QGFGNVG

SEQ ID NO: 13024 - protein, 7 aa, Artificial sequence
  Protein classification predicting sequence
PTKGGIR

SEQ ID NO: 13025 - protein, 8 aa, Artificial sequence
  Protein classification predicting sequence
NAGGVTVS

SEQ ID NO: 13026 - protein, 7 aa, Artificial sequence
  Protein classification predicting sequence
NEELLEL

SEQ ID NO: 13027 - protein, 6 aa, Artificial sequence
  Protein classification predicting sequence
GYRAQH

SEQ ID NO: 13028 - protein, 7 aa, Artificial sequence
  Protein classification predicting sequence
PAPDMGT

SEQ ID NO: 13029 - protein, 12 aa, Artificial sequence
  Protein classification predicting sequence
NAGGVTVSYFEW

SEQ ID NO: 13030 - protein, 13 aa, Artificial sequence
  Protein classification predicting sequence
VNLSILKFLGFEQ

SEQ ID NO: 13031 - protein, 7 aa, Artificial sequence
  Protein classification predicting sequence
MGGGKGG

SEQ ID NO: 13032 - protein, 13 aa, Artificial sequence
  Protein classification predicting sequence
DVPAGDIGVGGRE

SEQ ID NO: 13033 - protein, 7 aa, Artificial sequence
  Protein classification predicting sequence
SGSGNVA

SEQ ID NO: 13034 - protein, 16 aa, Artificial sequence
  Protein classification predicting sequence
HPSVNLSILKFLGFEQ

SEQ ID NO: 13035 - protein, 13 aa, Artificial sequence
  Protein classification predicting sequence
GGSLIRPEATGYG

SEQ ID NO: 13036 - protein, 11 aa, Artificial sequence
  Protein classification predicting sequence
MRFCQSFMTEL

SEQ ID NO: 13037 - protein, 7 aa, Artificial sequence
  Protein classification predicting sequence
GYRVQFN

SEQ ID NO: 13038 - protein, 14 aa, Artificial sequence
  Protein classification predicting sequence
TDVPAGDIGVGGRE

SEQ ID NO: 13039 - protein, 18 aa, Artificial sequence
  Protein classification predicting sequence
RFHPSVNLSILKFLGFEQ

SEQ ID NO: 13040 - protein, 8 aa, Artificial sequence
  Protein classification predicting sequence
AIGPYKGG

SEQ ID NO: 13041 - protein, 9 aa, Artificial sequence
  Protein classification predicting sequence
GKAANAGGV

SEQ ID NO: 13042 - protein, 8 aa, Artificial sequence
  Protein classification predicting sequence
GPYKGGLR

SEQ ID NO: 13043 - protein, 7 aa, Artificial sequence
  Protein classification predicting sequence
DDNGNVQ

SEQ ID NO: 13044 - protein, 10 aa, Artificial sequence
  Protein classification predicting sequence
GPYKGGLRFH

SEQ ID NO: 13045 - protein, 6 aa, Artificial sequence
  Protein classification predicting sequence
EGANMP

SEQ ID NO: 13046 - protein, 11 aa, Artificial sequence
  Protein classification predicting sequence
DIALPCATQNE

SEQ ID NO: 13047 - protein, 9 aa, Artificial sequence
  Protein classification predicting sequence
SPAVVTGKP

SEQ ID NO: 13048 - protein, 9 aa, Artificial sequence
  Protein classification predicting sequence
IGGGSAGSV

SEQ ID NO: 13049 - protein, 5 aa, Artificial sequence
  Protein classification predicting sequence
GMTYK

SEQ ID NO: 13050 - protein, 7 aa, Artificial sequence
  Protein classification predicting sequence
GAAGGIG

SEQ ID NO: 13051 - protein, 7 aa, Artificial sequence
  Protein classification predicting sequence
GTVGGGT

SEQ ID NO: 13052 - protein, 6 aa, Artificial sequence
  Protein classification predicting sequence
DIIILT

SEQ ID NO: 13053 - protein, 16 aa, Artificial sequence
  Protein classification predicting sequence
AIIAIHDTTLGPALGG

SEQ ID NO: 13054 - protein, 6 aa, Artificial sequence
  Protein classification predicting sequence
MTYKCA

SEQ ID NO: 13055 - protein, 6 aa, Artificial sequence
  Protein classification predicting sequence
VIIGDP

SEQ ID NO: 13056 - protein, 19 aa, Artificial sequence
  Protein classification predicting sequence
AIIAIHDTTLGPALGGTRM

SEQ ID NO: 13057 - protein, 7 aa, Artificial sequence
  Protein classification predicting sequence
GSANNQL

SEQ ID NO: 13058 - protein, 7 aa, Artificial sequence
  Protein classification predicting sequence
NKVALVT

SEQ ID NO: 13059 - protein, 7 aa, Artificial sequence
  Protein classification predicting sequence
PMVLGHE

SEQ ID NO: 13060 - protein, 6 aa, Artificial sequence
  Protein classification predicting sequence
GHEGAG

SEQ ID NO: 13061 - protein, 5 aa, Artificial sequence
  Protein classification predicting sequence
KFITH

SEQ ID NO: 13062 - protein, 6 aa, Artificial sequence
  Protein classification predicting sequence
TKAAVI

SEQ ID NO: 13063 - protein, 7 aa, Artificial sequence
  Protein classification predicting sequence
NQIELHP

SEQ ID NO: 13064 - protein, 8 aa, Artificial sequence
  Protein classification predicting sequence
DLYLMHWP

SEQ ID NO: 13065 - protein, 8 aa, Artificial sequence
  Protein classification predicting sequence
VIPKSVTP

SEQ ID NO: 13066 - protein, 8 aa, Artificial sequence
  Protein classification predicting sequence
IGTVGLTE

SEQ ID NO: 13067 - protein, 8 aa, Artificial sequence
  Protein classification predicting sequence
TSVPGVFA

SEQ ID NO: 13068 - protein, 6 aa, Artificial sequence
  Protein classification predicting sequence
GPNAGE

SEQ ID NO: 13069 - protein, 6 aa, Artificial sequence
  Protein classification predicting sequence
LKEQML

SEQ ID NO: 13070 - protein, 5 aa, Artificial sequence
  Protein classification predicting sequence
YQQDD

SEQ ID NO: 13071 - protein, 6 aa, Artificial sequence
  Protein classification predicting sequence
AYEVIK

SEQ ID NO: 13072 - protein, 6 aa, Artificial sequence
  Protein classification predicting sequence
LDDENA

SEQ ID NO: 13073 - protein, 6 aa, Artificial sequence
  Protein classification predicting sequence
LFGEQA

SEQ ID NO: 13074 - protein, 6 aa, Artificial sequence
  Protein classification predicting sequence
DLVGED

SEQ ID NO: 13075 - protein, 6 aa, Artificial sequence
  Protein classification predicting sequence
GYYIFR

SEQ ID NO: 13076 - protein, 6 aa, Artificial sequence
  Protein classification predicting sequence
FNIGDF

SEQ ID NO: 13077 - protein, 8 aa, Artificial sequence
  Protein classification predicting sequence
AGTDTSSS

SEQ ID NO: 13078 - protein, 5 aa, Artificial sequence
  Protein classification predicting sequence
GQANY

SEQ ID NO: 13079 - protein, 6 aa, Artificial sequence
  Protein classification predicting sequence
YITGQT

SEQ ID NO: 13080 - protein, 9 aa, Artificial sequence
  Protein classification predicting sequence
VTGGNRGIG

SEQ ID NO: 13081 - protein, 6 aa, Artificial sequence
  Protein classification predicting sequence
GQVNYS

SEQ ID NO: 13082 - protein, 9 aa, Artificial sequence
  Protein classification predicting sequence
VTGASRGIG

SEQ ID NO: 13083 - protein, 7 aa, Artificial sequence
  Protein classification predicting sequence
SKIPMKR

SEQ ID NO: 13084 - protein, 7 aa, Artificial sequence
  Protein classification predicting sequence
APGLIKT

SEQ ID NO: 13085 - protein, 9 aa, Artificial sequence
  Protein classification predicting sequence
VTGGSRGIG

SEQ ID NO: 13086 - protein, 6 aa, Artificial sequence
  Protein classification predicting sequence
VIDTNL

SEQ ID NO: 13087 - protein, 8 aa, Artificial sequence
  Protein classification predicting sequence
GKKVIVTG

SEQ ID NO: 13088 - protein, 7 aa, Artificial sequence
  Protein classification predicting sequence
VIVTGAS

SEQ ID NO: 13089 - protein, 7 aa, Artificial sequence
  Protein classification predicting sequence
SEDASYI

SEQ ID NO: 13090 - protein, 7 aa, Artificial sequence
  Protein classification predicting sequence
GIGLAIA

SEQ ID NO: 13091 - protein, 9 aa, Artificial sequence
  Protein classification predicting sequence
VNNAGITRD

SEQ ID NO: 13092 - protein, 10 aa, Artificial sequence
  Protein classification predicting sequence
LVNNAGITRD

SEQ ID NO: 13093 - protein, 6 aa, Artificial sequence
  Protein classification predicting sequence
EMTDGG

SEQ ID NO: 13094 - protein, 7 aa, Artificial sequence
  Protein classification predicting sequence
GEVVEVG

SEQ ID NO: 13095 - protein, 8 aa, Artificial sequence
  Protein classification predicting sequence
GVTSVKPG

SEQ ID NO: 13096 - protein, 7 aa, Artificial sequence
  Protein classification predicting sequence
GCGVTTG

SEQ ID NO: 13097 - protein, 7 aa, Artificial sequence
  Protein classification predicting sequence
IIGVDLN

SEQ ID NO: 13098 - protein, 6 aa, Artificial sequence
  Protein classification predicting sequence
YLIDIT

SEQ ID NO: 13099 - protein, 5 aa, Artificial sequence
  Protein classification predicting sequence
PWRTM

SEQ ID NO: 13100 - protein, 7 aa, Artificial sequence
  Protein classification predicting sequence
YPKCPQP

SEQ ID NO: 13101 - protein, 7 aa, Artificial sequence
  Protein classification predicting sequence
KDWRGGR

SEQ ID NO: 13102 - protein, 11 aa, Artificial sequence
  Protein classification predicting sequence
GKLTGMAFRVP

SEQ ID NO: 13103 - protein, 13 aa, Artificial sequence
  Protein classification predicting sequence
ISNASCTTNCLAP

SEQ ID NO: 13104 - protein, 8 aa, Artificial sequence
  Protein classification predicting sequence
RVPTPNVS

SEQ ID NO: 13105 - protein, 9 aa, Artificial sequence
  Protein classification predicting sequence
INGFGRIGR

SEQ ID NO: 13106 - protein, 6 aa, Artificial sequence
  Protein classification predicting sequence
GYSNRV

SEQ ID NO: 13107 - protein, 9 aa, Artificial sequence
  Protein classification predicting sequence
GFGRIGRLV

SEQ ID NO: 13108 - protein, 12 aa, Artificial sequence
  Protein classification predicting sequence
GKLTGMAFRVPT

SEQ ID NO: 13109 - protein, 6 aa, Artificial sequence
  Protein classification predicting sequence
SWYDNE

SEQ ID NO: 13110 - protein, 6 aa, Artificial sequence
  Protein classification predicting sequence
LMTTVH

SEQ ID NO: 13111 - protein, 7 aa, Artificial sequence
  Protein classification predicting sequence
GLMTTVH

SEQ ID NO: 13112 - protein, 6 aa, Artificial sequence
  Protein classification predicting sequence
ASCTTN

SEQ ID NO: 13113 - protein, 12 aa, Artificial sequence
  Protein classification predicting sequence
SNASCTTNCLAP

SEQ ID NO: 13114 - protein, 7 aa, Artificial sequence
  Protein classification predicting sequence
VSVVDLT

SEQ ID NO: 13115 - protein, 7 aa, Artificial sequence
  Protein classification predicting sequence
DVSVVDL

SEQ ID NO: 13116 - protein, 11 aa, Artificial sequence
  Protein classification predicting sequence
NIVPTSTGAAK

SEQ ID NO: 13117 - protein, 6 aa, Artificial sequence
  Protein classification predicting sequence
STGAAK

SEQ ID NO: 13118 - protein, 9 aa, Artificial sequence
  Protein classification predicting sequence
KVLDEEFGI

SEQ ID NO: 13119 - protein, 18 aa, Artificial sequence
  Protein classification predicting sequence
TNDQKNIDNPHKDLRRAR

SEQ ID NO: 13120 - protein, 9 aa, Artificial sequence
  Protein classification predicting sequence
PTTTGAAKA

SEQ ID NO: 13121 - protein, 8 aa, Artificial sequence
  Protein classification predicting sequence
RVVDLIRH

SEQ ID NO: 13122 - protein, 7 aa, Artificial sequence
  Protein classification predicting sequence
WYDNEWG

SEQ ID NO: 13123 - protein, 9 aa, Artificial sequence
  Protein classification predicting sequence
WYDNEWGYS

SEQ ID NO: 13124 - protein, 9 aa, Artificial sequence
  Protein classification predicting sequence
PHKDLRRAR

SEQ ID NO: 13125 - protein, 17 aa, Artificial sequence
  Protein classification predicting sequence
VAINGFGRIGRNFLRCW

SEQ ID NO: 13126 - protein, 15 aa, Artificial sequence
  Protein classification predicting sequence
KGTMTTTHSYTGDQR

SEQ ID NO: 13127 - protein, 14 aa, Artificial sequence
  Protein classification predicting sequence
VKVIAWYDNEWGYS

SEQ ID NO: 13128 - protein, 6 aa, Artificial sequence
  Protein classification predicting sequence
INGFGR

SEQ ID NO: 13129 - protein, 7 aa, Artificial sequence
  Protein classification predicting sequence
LKGKLNG

SEQ ID NO: 13130 - protein, 7 aa, Artificial sequence
  Protein classification predicting sequence
PLVSVDF

SEQ ID NO: 13131 - protein, 11 aa, Artificial sequence
  Protein classification predicting sequence
VAINGFGRIGR

SEQ ID NO: 13132 - protein, 6 aa, Artificial sequence
  Protein classification predicting sequence
VVAIND

SEQ ID NO: 13133 - protein, 7 aa, Artificial sequence
  Protein classification predicting sequence
KVLITAP

SEQ ID NO: 13134 - protein, 12 aa, Artificial sequence
  Protein classification predicting sequence
NIVPTTTGAAKA

SEQ ID NO: 13135 - protein, 12 aa, Artificial sequence
  Protein classification predicting sequence
TGAAKAVSLVLP

SEQ ID NO: 13136 - protein, 9 aa, Artificial sequence
  Protein classification predicting sequence
SNASCTTNC

SEQ ID NO: 13137 - protein, 8 aa, Artificial sequence
  Protein classification predicting sequence
KVLDDEFG

SEQ ID NO: 13138 - protein, 16 aa, Artificial sequence
  Protein classification predicting sequence
MTTTHSYTGDQRLLDA

SEQ ID NO: 13139 - protein, 8 aa, Artificial sequence
  Protein classification predicting sequence
HRDLRRAR

SEQ ID NO: 13140 - protein, 8 aa, Artificial sequence
  Protein classification predicting sequence
AALNIVPT

SEQ ID NO: 13141 - protein, 9 aa, Artificial sequence
  Protein classification predicting sequence
RVPTPNVSV

SEQ ID NO: 13142 - protein, 10 aa, Artificial sequence
  Protein classification predicting sequence
GINGFGRIGR

SEQ ID NO: 13143 - protein, 6 aa, Artificial sequence
  Protein classification predicting sequence
ESTGVF

SEQ ID NO: 13144 - protein, 13 aa, Artificial sequence
  Protein classification predicting sequence
NIIPSSTGAAKAV

SEQ ID NO: 13145 - protein, 6 aa, Artificial sequence
  Protein classification predicting sequence
AGISLN

SEQ ID NO: 13146 - protein, 8 aa, Artificial sequence
  Protein classification predicting sequence
AEEVNQAF

SEQ ID NO: 13147 - protein, 14 aa, Artificial sequence
  Protein classification predicting sequence
IISNASCTTNCLAP

SEQ ID NO: 13148 - protein, 9 aa, Artificial sequence
  Protein classification predicting sequence
NIIPSSTGA

SEQ ID NO: 13149 - protein, 9 aa, Artificial sequence
  Protein classification predicting sequence
KDWRGGRAA

SEQ ID NO: 13150 - protein, 12 aa, Artificial sequence
  Protein classification predicting sequence
GINGFGRIGRLV

SEQ ID NO: 13151 - protein, 6 aa, Artificial sequence
  Protein classification predicting sequence
KVAING

SEQ ID NO: 13152 - protein, 6 aa, Artificial sequence
  Protein classification predicting sequence
GKLTGM

SEQ ID NO: 13153 - protein, 6 aa, Artificial sequence
  Protein classification predicting sequence
VAINDL

SEQ ID NO: 13154 - protein, 7 aa, Artificial sequence
  Protein classification predicting sequence
RRARAAA

SEQ ID NO: 13155 - protein, 7 aa, Artificial sequence
  Protein classification predicting sequence
SNASCTT

SEQ ID NO: 13156 - protein, 10 aa, Artificial sequence
  Protein classification predicting sequence
TGAAKAVALV

SEQ ID NO: 13157 - protein, 9 aa, Artificial sequence
  Protein classification predicting sequence
PTSTGAAKA

SEQ ID NO: 13158 - protein, 9 aa, Artificial sequence
  Protein classification predicting sequence
APGKGDIPT

SEQ ID NO: 13159 - protein, 9 aa, Artificial sequence
  Protein classification predicting sequence
KLVAWYDNE

SEQ ID NO: 13160 - protein, 7 aa, Artificial sequence
  Protein classification predicting sequence
LIVNGKK

SEQ ID NO: 13161 - protein, 6 aa, Artificial sequence
  Protein classification predicting sequence
MTTIHA

SEQ ID NO: 13162 - protein, 7 aa, Artificial sequence
  Protein classification predicting sequence
GPLKGIL

SEQ ID NO: 13163 - protein, 13 aa, Artificial sequence
  Protein classification predicting sequence
NGFGRIGRNVFRA

SEQ ID NO: 13164 - protein, 8 aa, Artificial sequence
  Protein classification predicting sequence
SNASCTTN

SEQ ID NO: 13165 - protein, 9 aa, Artificial sequence
  Protein classification predicting sequence
RAAAENIIP

SEQ ID NO: 13166 - protein, 7 aa, Artificial sequence
  Protein classification predicting sequence
PTSTGAA

SEQ ID NO: 13167 - protein, 8 aa, Artificial sequence
  Protein classification predicting sequence
STGAAKAV

SEQ ID NO: 13168 - protein, 9 aa, Artificial sequence
  Protein classification predicting sequence
DLRRARAAA

SEQ ID NO: 13169 - protein, 10 aa, Artificial sequence
  Protein classification predicting sequence
ASCTTNCLAP

SEQ ID NO: 13170 - protein, 10 aa, Artificial sequence
  Protein classification predicting sequence
SWYDNEWGYS

SEQ ID NO: 13171 - protein, 6 aa, Artificial sequence
  Protein classification predicting sequence
KVGING

SEQ ID NO: 13172 - protein, 6 aa, Artificial sequence
  Protein classification predicting sequence
VISNAS

SEQ ID NO: 13173 - protein, 10 aa, Artificial sequence
  Protein classification predicting sequence
AINGFGRIGR

SEQ ID NO: 13174 - protein, 7 aa, Artificial sequence
  Protein classification predicting sequence
NVSLVDL

SEQ ID NO: 13175 - protein, 6 aa, Artificial sequence
  Protein classification predicting sequence
EGPLKG

SEQ ID NO: 13176 - protein, 7 aa, Artificial sequence
  Protein classification predicting sequence
DSSLTMV

SEQ ID NO: 13177 - protein, 11 aa, Artificial sequence
  Protein classification predicting sequence
WYDNEWGYSNR

SEQ ID NO: 13178 - protein, 10 aa, Artificial sequence
  Protein classification predicting sequence
IISNASCTTN

SEQ ID NO: 13179 - protein, 6 aa, Artificial sequence
  Protein classification predicting sequence
SVVDLT

SEQ ID NO: 13180 - protein, 11 aa, Artificial sequence
  Protein classification predicting sequence
NIIPSSTGAAK

SEQ ID NO: 13181 - protein, 7 aa, Artificial sequence
  Protein classification predicting sequence
GLVEFLA

SEQ ID NO: 13182 - protein, 12 aa, Artificial sequence
  Protein classification predicting sequence
TPFSALALAELA

SEQ ID NO: 13183 - protein, 12 aa, Artificial sequence
  Protein classification predicting sequence
SGLGREGSKYGI

SEQ ID NO: 13184 - protein, 10 aa, Artificial sequence
  Protein classification predicting sequence
EAGLPAGVFN

SEQ ID NO: 13185 - protein, 7 aa, Artificial sequence
  Protein classification predicting sequence
GDNAKAA

SEQ ID NO: 13186 - protein, 10 aa, Artificial sequence
  Protein classification predicting sequence
ARAALISRGL

SEQ ID NO: 13187 - protein, 7 aa, Artificial sequence
  Protein classification predicting sequence
AVAIAKH

SEQ ID NO: 13188 - protein, 6 aa, Artificial sequence
  Protein classification predicting sequence
GGALKN

SEQ ID NO: 13189 - protein, 7 aa, Artificial sequence
  Protein classification predicting sequence
KNVLAIA

SEQ ID NO: 13190 - protein, 7 aa, Artificial sequence
  Protein classification predicting sequence
GLGFGDN

SEQ ID NO: 13191 - protein, 6 aa, Artificial sequence
  Protein classification predicting sequence
DENRAK

SEQ ID NO: 13192 - protein, 6 aa, Artificial sequence
  Protein classification predicting sequence
DLLGIN

SEQ ID NO: 13193 - protein, 7 aa, Artificial sequence
  Protein classification predicting sequence
AEGVATA

SEQ ID NO: 13194 - protein, 7 aa, Artificial sequence
  Protein classification predicting sequence
GDNTKAA

SEQ ID NO: 13195 - protein, 6 aa, Artificial sequence
  Protein classification predicting sequence
NVKYLP

SEQ ID NO: 13196 - protein, 7 aa, Artificial sequence
  Protein classification predicting sequence
YVAGPSH

SEQ ID NO: 13197 - protein, 6 aa, Artificial sequence
  Protein classification predicting sequence
SGVGDL

SEQ ID NO: 13198 - protein, 8 aa, Artificial sequence
  Protein classification predicting sequence
YLPGITLP

SEQ ID NO: 13199 - protein, 6 aa, Artificial sequence
  Protein classification predicting sequence
GFNAHA

SEQ ID NO: 13200 - protein, 7 aa, Artificial sequence
  Protein classification predicting sequence
FPCNQFG

SEQ ID NO: 13201 - protein, 7 aa, Artificial sequence
  Protein classification predicting sequence
FDMFSKI

SEQ ID NO: 13202 - protein, 6 aa, Artificial sequence
  Protein classification predicting sequence
WNFEKF

SEQ ID NO: 13203 - protein, 7 aa, Artificial sequence
  Protein classification predicting sequence
WNFEKFL

SEQ ID NO: 13204 - protein, 12 aa, Artificial sequence
  Protein classification predicting sequence
FPCNQFGKQEPG

SEQ ID NO: 13205 - protein, 6 aa, Artificial sequence
  Protein classification predicting sequence
FPCNQF

SEQ ID NO: 13206 - protein, 9 aa, Artificial sequence
  Protein classification predicting sequence
NQFGKQEPG

SEQ ID NO: 13207 - protein, 7 aa, Artificial sequence
  Protein classification predicting sequence
IGAGSGG

SEQ ID NO: 13208 - protein, 9 aa, Artificial sequence
  Protein classification predicting sequence
VGLSEEEAV

SEQ ID NO: 13209 - protein, 6 aa, Artificial sequence
  Protein classification predicting sequence
TVGIHP

SEQ ID NO: 13210 - protein, 6 aa, Artificial sequence
  Protein classification predicting sequence
VAIAEN

SEQ ID NO: 13211 - protein, 7 aa, Artificial sequence
  Protein classification predicting sequence
HPTSAEE

SEQ ID NO: 13212 - protein, 7 aa, Artificial sequence
  Protein classification predicting sequence
TNVPNIY

SEQ ID NO: 13213 - protein, 7 aa, Artificial sequence
  Protein classification predicting sequence
IGGGSGG

SEQ ID NO: 13214 - protein, 6 aa, Artificial sequence
  Protein classification predicting sequence
AIGRVP

SEQ ID NO: 13215 - protein, 6 aa, Artificial sequence
  Protein classification predicting sequence
GYIAVE

SEQ ID NO: 13216 - protein, 6 aa, Artificial sequence
  Protein classification predicting sequence
GCVPKK

SEQ ID NO: 13217 - protein, 7 aa, Artificial sequence
  Protein classification predicting sequence
MDDGSVK

SEQ ID NO: 13218 - protein, 6 aa, Artificial sequence
  Protein classification predicting sequence
ANGPTT

SEQ ID NO: 13219 - protein, 6 aa, Artificial sequence
  Protein classification predicting sequence
VWDKYQ

SEQ ID NO: 13220 - protein, 7 aa, Artificial sequence
  Protein classification predicting sequence
ASNTSSL

SEQ ID NO: 13221 - protein, 7 aa, Artificial sequence
  Protein classification predicting sequence
HFFNPVP

SEQ ID NO: 13222 - protein, 8 aa, Artificial sequence
  Protein classification predicting sequence
FLNQCRHR

SEQ ID NO: 13223 - protein, 6 aa, Artificial sequence
  Protein classification predicting sequence
WHPRGP

SEQ ID NO: 13224 - protein, 7 aa, Artificial sequence
  Protein classification predicting sequence
VNVVCPG

SEQ ID NO: 13225 - protein, 6 aa, Artificial sequence
  Protein classification predicting sequence
TFSVAK

SEQ ID NO: 13226 - protein, 7 aa, Artificial sequence
  Protein classification predicting sequence
RSVERAK

SEQ ID NO: 13227 - protein, 6 aa, Artificial sequence
  Protein classification predicting sequence
SADAPM

SEQ ID NO: 13228 - protein, 6 aa, Artificial sequence
  Protein classification predicting sequence
LYASKI

SEQ ID NO: 13229 - protein, 6 aa, Artificial sequence
  Protein classification predicting sequence
GDYVTG

SEQ ID NO: 13230 - protein, 6 aa, Artificial sequence
  Protein classification predicting sequence
QVGGAQ

SEQ ID NO: 13231 - protein, 7 aa, Artificial sequence
  Protein classification predicting sequence
GVPALVA

SEQ ID NO: 13232 - protein, 6 aa, Artificial sequence
  Protein classification predicting sequence
TQTSQQ

SEQ ID NO: 13233 - protein, 6 aa, Artificial sequence
  Protein classification predicting sequence
SILLKD

SEQ ID NO: 13234 - protein, 6 aa, Artificial sequence
  Protein classification predicting sequence
DRDDQG

SEQ ID NO: 13235 - protein, 7 aa, Artificial sequence
  Protein classification predicting sequence
AFVVNLG

SEQ ID NO: 13236 - protein, 9 aa, Artificial sequence
  Protein classification predicting sequence
NVALRQELD

SEQ ID NO: 13237 - protein, 7 aa, Artificial sequence
  Protein classification predicting sequence
VMPNLYG

SEQ ID NO: 13238 - protein, 7 aa, Artificial sequence
  Protein classification predicting sequence
SLNVALR

SEQ ID NO: 13239 - protein, 6 aa, Artificial sequence
  Protein classification predicting sequence
NRKSVT

SEQ ID NO: 13240 - protein, 7 aa, Artificial sequence
  Protein classification predicting sequence
GDGVGPE

SEQ ID NO: 13241 - protein, 7 aa, Artificial sequence
  Protein classification predicting sequence
GDILSDL

SEQ ID NO: 13242 - protein, 15 aa, Artificial sequence
  Protein classification predicting sequence
HGSAPDIAGQNKANP

SEQ ID NO: 13243 - protein, 7 aa, Artificial sequence
  Protein classification predicting sequence
GDGIGPE

SEQ ID NO: 13244 - protein, 7 aa, Artificial sequence
  Protein classification predicting sequence
APDIAGK

SEQ ID NO: 13245 - protein, 7 aa, Artificial sequence
  Protein classification predicting sequence
DILIVRE

SEQ ID NO: 13246 - protein, 6 aa, Artificial sequence
  Protein classification predicting sequence
KNIANP

SEQ ID NO: 13247 - protein, 8 aa, Artificial sequence
  Protein classification predicting sequence
EPVHGSAP

SEQ ID NO: 13248 - protein, 6 aa, Artificial sequence
  Protein classification predicting sequence
GDGIGP

SEQ ID NO: 13249 - protein, 6 aa, Artificial sequence
  Protein classification predicting sequence
APDIAG

SEQ ID NO: 13250 - protein, 6 aa, Artificial sequence
  Protein classification predicting sequence
QDKANP

SEQ ID NO: 13251 - protein, 7 aa, Artificial sequence
  Protein classification predicting sequence
GLIGGLG

SEQ ID NO: 13252 - protein, 9 aa, Artificial sequence
  Protein classification predicting sequence
LLSAVMMLR

SEQ ID NO: 13253 - protein, 5 aa, Artificial sequence
  Protein classification predicting sequence
EYGDM

SEQ ID NO: 13254 - protein, 6 aa, Artificial sequence
  Protein classification predicting sequence
PFFKAT

SEQ ID NO: 13255 - protein, 6 aa, Artificial sequence
  Protein classification predicting sequence
LSIPCV

SEQ ID NO: 13256 - protein, 6 aa, Artificial sequence
  Protein classification predicting sequence
ILSAAM

SEQ ID NO: 13257 - protein, 10 aa, Artificial sequence
  Protein classification predicting sequence
FGSCTCPPFM

SEQ ID NO: 13258 - protein, 10 aa, Artificial sequence
  Protein classification predicting sequence
RPLVLNFGSC

SEQ ID NO: 13259 - protein, 8 aa, Artificial sequence
  Protein classification predicting sequence
EAHPSDGW

SEQ ID NO: 13260 - protein, 8 aa, Artificial sequence
  Protein classification predicting sequence
ADFLLVYI

SEQ ID NO: 13261 - protein, 9 aa, Artificial sequence
  Protein classification predicting sequence
RPLVVNFGS

SEQ ID NO: 13262 - protein, 7 aa, Artificial sequence
  Protein classification predicting sequence
VPKENVL

SEQ ID NO: 13263 - protein, 10 aa, Artificial sequence
  Protein classification predicting sequence
HLDPEIYPDP

SEQ ID NO: 13264 - protein, 5 aa, Artificial sequence
  Protein classification predicting sequence
IHWHG

SEQ ID NO: 13265 - protein, 5 aa, Artificial sequence
  Protein classification predicting sequence
HLHGH

SEQ ID NO: 13266 - protein, 7 aa, Artificial sequence
  Protein classification predicting sequence
LDSARFR

SEQ ID NO: 13267 - protein, 6 aa, Artificial sequence
  Protein classification predicting sequence
VSNPVD

SEQ ID NO: 13268 - protein, 8 aa, Artificial sequence
  Protein classification predicting sequence
SGFPKNRV

SEQ ID NO: 13269 - protein, 7 aa, Artificial sequence
  Protein classification predicting sequence
LDTARFR

SEQ ID NO: 13270 - protein, 6 aa, Artificial sequence
  Protein classification predicting sequence
LEGEYG

SEQ ID NO: 13271 - protein, 8 aa, Artificial sequence
  Protein classification predicting sequence
AGVPRKPG

SEQ ID NO: 13272 - protein, 6 aa, Artificial sequence
  Protein classification predicting sequence
LDGEYG

SEQ ID NO: 13273 - protein, 8 aa, Artificial sequence
  Protein classification predicting sequence
LDSARFRY

SEQ ID NO: 13274 - protein, 7 aa, Artificial sequence
  Protein classification predicting sequence
VKYSPNC

SEQ ID NO: 13275 - protein, 8 aa, Artificial sequence
  Protein classification predicting sequence
KISVIGAG

SEQ ID NO: 13276 - protein, 7 aa, Artificial sequence
  Protein classification predicting sequence
NVAGVSL

SEQ ID NO: 13277 - protein, 6 aa, Artificial sequence
  Protein classification predicting sequence
KYSPDC

SEQ ID NO: 13278 - protein, 6 aa, Artificial sequence
  Protein classification predicting sequence
IVKYSP

SEQ ID NO: 13279 - protein, 7 aa, Artificial sequence
  Protein classification predicting sequence
VVSNPVD

SEQ ID NO: 13280 - protein, 6 aa, Artificial sequence
  Protein classification predicting sequence
KYSPNC

SEQ ID NO: 13281 - protein, 6 aa, Artificial sequence
  Protein classification predicting sequence
LGEHGD

SEQ ID NO: 13282 - protein, 7 aa, Artificial sequence
  Protein classification predicting sequence
VGVDNID

SEQ ID NO: 13283 - protein, 5 aa, Artificial sequence
  Protein classification predicting sequence
QDGTF

SEQ ID NO: 13284 - protein, 7 aa, Artificial sequence
  Protein classification predicting sequence
SGLPKER

SEQ ID NO: 13285 - protein, 7 aa, Artificial sequence
  Protein classification predicting sequence
LTVSAYL

SEQ ID NO: 13286 - protein, 8 aa, Artificial sequence
  Protein classification predicting sequence
IIGEHGDS

SEQ ID NO: 13287 - protein, 8 aa, Artificial sequence
  Protein classification predicting sequence
IGGTLAHL

SEQ ID NO: 13288 - protein, 18 aa, Artificial sequence
  Protein classification predicting sequence
RKPGMSRDDLLGINLKVM

SEQ ID NO: 13289 - protein, 8 aa, Artificial sequence
  Protein classification predicting sequence
GMAGVLDS

SEQ ID NO: 13290 - protein, 7 aa, Artificial sequence
  Protein classification predicting sequence
ILGEHGD

SEQ ID NO: 13291 - protein, 8 aa, Artificial sequence
  Protein classification predicting sequence
TSNPVDLL

SEQ ID NO: 13292 - protein, 8 aa, Artificial sequence
  Protein classification predicting sequence
GARIVVVT

SEQ ID NO: 13293 - protein, 7 aa, Artificial sequence
  Protein classification predicting sequence
IIGEHGD

SEQ ID NO: 13294 - protein, 6 aa, Artificial sequence
  Protein classification predicting sequence
KIALIG

SEQ ID NO: 13295 - protein, 6 aa, Artificial sequence
  Protein classification predicting sequence
ITNPLD

SEQ ID NO: 13296 - protein, 7 aa, Artificial sequence
  Protein classification predicting sequence
GQYGVKD

SEQ ID NO: 13297 - protein, 6 aa, Artificial sequence
  Protein classification predicting sequence
DVVLFD

SEQ ID NO: 13298 - protein, 6 aa, Artificial sequence
  Protein classification predicting sequence
ILSVSM

SEQ ID NO: 13299 - protein, 14 aa, Artificial sequence
  Protein classification predicting sequence
GSAPDIAGKGIANP

SEQ ID NO: 13300 - protein, 6 aa, Artificial sequence
  Protein classification predicting sequence
FDVIVT

SEQ ID NO: 13301 - protein, 10 aa, Artificial sequence
  Protein classification predicting sequence
DIAGKGIANP

SEQ ID NO: 13302 - protein, 7 aa, Artificial sequence
  Protein classification predicting sequence
AAVLDYT

SEQ ID NO: 13303 - protein, 6 aa, Artificial sequence
  Protein classification predicting sequence
RELTGG

SEQ ID NO: 13304 - protein, 7 aa, Artificial sequence
  Protein classification predicting sequence
TFSYKKA

SEQ ID NO: 13305 - protein, 7 aa, Artificial sequence
  Protein classification predicting sequence
VRELTGG

SEQ ID NO: 13306 - protein, 9 aa, Artificial sequence
  Protein classification predicting sequence
HGSAPDIAG

SEQ ID NO: 13307 - protein, 7 aa, Artificial sequence
  Protein classification predicting sequence
VDNASMQ

SEQ ID NO: 13308 - protein, 6 aa, Artificial sequence
  Protein classification predicting sequence
DNAAMQ

SEQ ID NO: 13309 - protein, 8 aa, Artificial sequence
  Protein classification predicting sequence
PGDGIGPE

SEQ ID NO: 13310 - protein, 7 aa, Artificial sequence
  Protein classification predicting sequence
GKMTKDL

SEQ ID NO: 13311 - protein, 7 aa, Artificial sequence
  Protein classification predicting sequence
HGSAPDI

SEQ ID NO: 13312 - protein, 7 aa, Artificial sequence
  Protein classification predicting sequence
GKGLANP

SEQ ID NO: 13313 - protein, 10 aa, Artificial sequence
  Protein classification predicting sequence
HGSAPDIAGQ

SEQ ID NO: 13314 - protein, 7 aa, Artificial sequence
  Protein classification predicting sequence
LYANVRP

SEQ ID NO: 13315 - protein, 8 aa, Artificial sequence
  Protein classification predicting sequence
EMTEAILK

SEQ ID NO: 13316 - protein, 9 aa, Artificial sequence
  Protein classification predicting sequence
GSAPDIAGK

SEQ ID NO: 13317 - protein, 6 aa, Artificial sequence
  Protein classification predicting sequence
VPIEWE

SEQ ID NO: 13318 - protein, 11 aa, Artificial sequence
  Protein classification predicting sequence
IRENTEGEYSG

SEQ ID NO: 13319 - protein, 6 aa, Artificial sequence
  Protein classification predicting sequence
HKANIM

SEQ ID NO: 13320 - protein, 6 aa, Artificial sequence
  Protein classification predicting sequence
IDNCCM

SEQ ID NO: 13321 - protein, 11 aa, Artificial sequence
  Protein classification predicting sequence
FDVLVMPNLYG

SEQ ID NO: 13322 - protein, 8 aa, Artificial sequence
  Protein classification predicting sequence
FHDAIAIS

SEQ ID NO: 13323 - protein, 10 aa, Artificial sequence
  Protein classification predicting sequence
FGGGGADGSI

SEQ ID NO: 13324 - protein, 8 aa, Artificial sequence
  Protein classification predicting sequence
GEMRLQSD

SEQ ID NO: 13325 - protein, 7 aa, Artificial sequence
  Protein classification predicting sequence
RVRVSTG

SEQ ID NO: 13326 - protein, 12 aa, Artificial sequence
  Protein classification predicting sequence
LLFVKLRKRHLL

SEQ ID NO: 13327 - protein, 10 aa, Artificial sequence
  Protein classification predicting sequence
TCWKSLDDFN

SEQ ID NO: 13328 - protein, 8 aa, Artificial sequence
  Protein classification predicting sequence
GTLFEADF

SEQ ID NO: 13329 - protein, 9 aa, Artificial sequence
  Protein classification predicting sequence
GIKANVILC

SEQ ID NO: 13330 - protein, 7 aa, Artificial sequence
  Protein classification predicting sequence
FKLLIPH

SEQ ID NO: 13331 - protein, 7 aa, Artificial sequence
  Protein classification predicting sequence
HLGQLDW

SEQ ID NO: 13332 - protein, 6 aa, Artificial sequence
  Protein classification predicting sequence
YQFLNG

SEQ ID NO: 13333 - protein, 13 aa, Artificial sequence
  Protein classification predicting sequence
GMEELQAQLEKEL

SEQ ID NO: 13334 - protein, 6 aa, Artificial sequence
  Protein classification predicting sequence
LFEADF

SEQ ID NO: 13335 - protein, 11 aa, Artificial sequence
  Protein classification predicting sequence
STGGGGHVQLL

SEQ ID NO: 13336 - protein, 7 aa, Artificial sequence
  Protein classification predicting sequence
FTCTAQH

SEQ ID NO: 13337 - protein, 10 aa, Artificial sequence
  Protein classification predicting sequence
WVPNAPCTMR

SEQ ID NO: 13338 - protein, 10 aa, Artificial sequence
  Protein classification predicting sequence
QYLAAPLVML

SEQ ID NO: 13339 - protein, 9 aa, Artificial sequence
  Protein classification predicting sequence
WLLAKIWVR

SEQ ID NO: 13340 - protein, 7 aa, Artificial sequence
  Protein classification predicting sequence
FKLLVPH

SEQ ID NO: 13341 - protein, 7 aa, Artificial sequence
  Protein classification predicting sequence
CPPDDLA

SEQ ID NO: 13342 - protein, 14 aa, Artificial sequence
  Protein classification predicting sequence
FNRIFWCGQSKLAE

SEQ ID NO: 13343 - protein, 6 aa, Artificial sequence
  Protein classification predicting sequence
YTMEIN

SEQ ID NO: 13344 - protein, 7 aa, Artificial sequence
  Protein classification predicting sequence
EINVRAR

SEQ ID NO: 13345 - protein, 20 aa, Artificial sequence
  Protein classification predicting sequence
LTYSSFCPPDDLADRGLLGV

SEQ ID NO: 13346 - protein, 9 aa, Artificial sequence
  Protein classification predicting sequence
LWLVGQHGE

SEQ ID NO: 13347 - protein, 8 aa, Artificial sequence
  Protein classification predicting sequence
LLFVKLRK

SEQ ID NO: 13348 - protein, 12 aa, Artificial sequence
  Protein classification predicting sequence
DLPVDERFLEDK

SEQ ID NO: 13349 - protein, 11 aa, Artificial sequence
  Protein classification predicting sequence
LDDFNRIFWCG

SEQ ID NO: 13350 - protein, 12 aa, Artificial sequence
  Protein classification predicting sequence
WLLAKCWVRSSD

SEQ ID NO: 13351 - protein, 8 aa, Artificial sequence
  Protein classification predicting sequence
GFPTSLQS

SEQ ID NO: 13352 - protein, 7 aa, Artificial sequence
  Protein classification predicting sequence
MVPLGQH

SEQ ID NO: 13353 - protein, 7 aa, Artificial sequence
  Protein classification predicting sequence
KFREELA

SEQ ID NO: 13354 - protein, 11 aa, Artificial sequence
  Protein classification predicting sequence
LDIPYEYLRPS

SEQ ID NO: 13355 - protein, 8 aa, Artificial sequence
  Protein classification predicting sequence
YRIRVSTG

SEQ ID NO: 13356 - protein, 15 aa, Artificial sequence
  Protein classification predicting sequence
CHFVTMCIFTCTGQH

SEQ ID NO: 13357 - protein, 22 aa, Artificial sequence
  Protein classification predicting sequence
KAVLKKFREELAALDKEIEIRN

SEQ ID NO: 13358 - protein, 10 aa, Artificial sequence
  Protein classification predicting sequence
DAWFCNWISV

SEQ ID NO: 13359 - protein, 10 aa, Artificial sequence
  Protein classification predicting sequence
LYRWGNWKDG

SEQ ID NO: 13360 - protein, 12 aa, Artificial sequence
  Protein classification predicting sequence
LPARLVFPPGME

SEQ ID NO: 13361 - protein, 9 aa, Artificial sequence
  Protein classification predicting sequence
HAAVNFGQY

SEQ ID NO: 13362 - protein, 7 aa, Artificial sequence
  Protein classification predicting sequence
HPIYKLL

SEQ ID NO: 13363 - protein, 6 aa, Artificial sequence
  Protein classification predicting sequence
FPCYRW

SEQ ID NO: 13364 - protein, 8 aa, Artificial sequence
  Protein classification predicting sequence
FGYQFLNG

SEQ ID NO: 13365 - protein, 8 aa, Artificial sequence
  Protein classification predicting sequence
NPVLIRRC

SEQ ID NO: 13366 - protein, 7 aa, Artificial sequence
  Protein classification predicting sequence
HPLFKLL

SEQ ID NO: 13367 - protein, 9 aa, Artificial sequence
  Protein classification predicting sequence
YRDDGLLVW

SEQ ID NO: 13368 - protein, 14 aa, Artificial sequence
  Protein classification predicting sequence
VIFTASAQHAAVNF

SEQ ID NO: 13369 - protein, 7 aa, Artificial sequence
  Protein classification predicting sequence
PHFRYTM

SEQ ID NO: 13370 - protein, 7 aa, Artificial sequence
  Protein classification predicting sequence
DFSLLDG

SEQ ID NO: 13371 - protein, 9 aa, Artificial sequence
  Protein classification predicting sequence
LLPMVIQLQ

SEQ ID NO: 13372 - protein, 10 aa, Artificial sequence
  Protein classification predicting sequence
MCIFTCTGQH

SEQ ID NO: 13373 - protein, 14 aa, Artificial sequence
  Protein classification predicting sequence
PYEYLRPSLVENSV

SEQ ID NO: 13374 - protein, 14 aa, Artificial sequence
  Protein classification predicting sequence
WVPNAPCTMRLPPP

SEQ ID NO: 13375 - protein, 6 aa, Artificial sequence
  Protein classification predicting sequence
WCREIT

SEQ ID NO: 13376 - protein, 8 aa, Artificial sequence
  Protein classification predicting sequence
PYEYLRPS

SEQ ID NO: 13377 - protein, 6 aa, Artificial sequence
  Protein classification predicting sequence
YTPTVG

SEQ ID NO: 13378 - protein, 7 aa, Artificial sequence
  Protein classification predicting sequence
LYTACGG

SEQ ID NO: 13379 - protein, 6 aa, Artificial sequence
  Protein classification predicting sequence
DVGTNN

SEQ ID NO: 13380 - protein, 6 aa, Artificial sequence
  Protein classification predicting sequence
QFEDFA

SEQ ID NO: 13381 - protein, 13 aa, Artificial sequence
  Protein classification predicting sequence
SNGTAVLGLGNIG

SEQ ID NO: 13382 - protein, 7 aa, Artificial sequence
  Protein classification predicting sequence
IFRGALD

SEQ ID NO: 13383 - protein, 7 aa, Artificial sequence
  Protein classification predicting sequence
SHSNFGS

SEQ ID NO: 13384 - protein, 7 aa, Artificial sequence
  Protein classification predicting sequence
GDAALVE

SEQ ID NO: 13385 - protein, 7 aa, Artificial sequence
  Protein classification predicting sequence
LEPTFGG

SEQ ID NO: 13386 - protein, 6 aa, Artificial sequence
  Protein classification predicting sequence
GVARKP

SEQ ID NO: 13387 - protein, 5 aa, Artificial sequence
  Protein classification predicting sequence
MMDLQ

SEQ ID NO: 13388 - protein, 9 aa, Artificial sequence
  Protein classification predicting sequence
GMGIPVGKL

SEQ ID NO: 13389 - protein, 8 aa, Artificial sequence
  Protein classification predicting sequence
IFASGSPF

SEQ ID NO: 13390 - protein, 7 aa, Artificial sequence
  Protein classification predicting sequence
VYTPTVG

SEQ ID NO: 13391 - protein, 9 aa, Artificial sequence
  Protein classification predicting sequence
RILGLGDLG

SEQ ID NO: 13392 - protein, 6 aa, Artificial sequence
  Protein classification predicting sequence
IQFEDF

SEQ ID NO: 13393 - protein, 6 aa, Artificial sequence
  Protein classification predicting sequence
FNDDIQ

SEQ ID NO: 13394 - protein, 7 aa, Artificial sequence
  Protein classification predicting sequence
LRGLLPP

SEQ ID NO: 13395 - protein, 6 aa, Artificial sequence
  Protein classification predicting sequence
IVVTDG

SEQ ID NO: 13396 - protein, 6 aa, Artificial sequence
  Protein classification predicting sequence
ASGSPF

SEQ ID NO: 13397 - protein, 13 aa, Artificial sequence
  Protein classification predicting sequence
MPIVYTPTVGLAC

SEQ ID NO: 13398 - protein, 7 aa, Artificial sequence
  Protein classification predicting sequence
LIQFEDF

SEQ ID NO: 13399 - protein, 7 aa, Artificial sequence
  Protein classification predicting sequence
FASGSPF

SEQ ID NO: 13400 - protein, 8 aa, Artificial sequence
  Protein classification predicting sequence
NNAYIFPG

SEQ ID NO: 13401 - protein, 7 aa, Artificial sequence
  Protein classification predicting sequence
LLKDPLY

SEQ ID NO: 13402 - protein, 7 aa, Artificial sequence
  Protein classification predicting sequence
IAFESAR

SEQ ID NO: 13403 - protein, 12 aa, Artificial sequence
  Protein classification predicting sequence
IPVFHDDQHGTA

SEQ ID NO: 13404 - protein, 9 aa, Artificial sequence
  Protein classification predicting sequence
TGRSDYPNQ

SEQ ID NO: 13405 - protein, 7 aa, Artificial sequence
  Protein classification predicting sequence
NNVLCFP

SEQ ID NO: 13406 - protein, 7 aa, Artificial sequence
  Protein classification predicting sequence
RNEKLFY

SEQ ID NO: 13407 - protein, 6 aa, Artificial sequence
  Protein classification predicting sequence
PGQGNN

SEQ ID NO: 13408 - protein, 7 aa, Artificial sequence
  Protein classification predicting sequence
GIPVGKL

SEQ ID NO: 13409 - protein, 9 aa, Artificial sequence
  Protein classification predicting sequence
FNDDIQGTA

SEQ ID NO: 13410 - protein, 6 aa, Artificial sequence
  Protein classification predicting sequence
FPKNRV

SEQ ID NO: 13411 - protein, 6 aa, Artificial sequence
  Protein classification predicting sequence
ILGLGD

SEQ ID NO: 13412 - protein, 9 aa, Artificial sequence
  Protein classification predicting sequence
VKVLVVGNP

SEQ ID NO: 13413 - protein, 6 aa, Artificial sequence
  Protein classification predicting sequence
NAPDIP

SEQ ID NO: 13414 - protein, 10 aa, Artificial sequence
  Protein classification predicting sequence
QGKALNAVAS

SEQ ID NO: 13415 - protein, 12 aa, Artificial sequence
  Protein classification predicting sequence
QGKALNAVASRN

SEQ ID NO: 13416 - protein, 7 aa, Artificial sequence
  Protein classification predicting sequence
TIWGNHS

SEQ ID NO: 13417 - protein, 8 aa, Artificial sequence
  Protein classification predicting sequence
PRGPGMER

SEQ ID NO: 13418 - protein, 8 aa, Artificial sequence
  Protein classification predicting sequence
LGDIVLFD

SEQ ID NO: 13419 - protein, 6 aa, Artificial sequence
  Protein classification predicting sequence
IVTAGV

SEQ ID NO: 13420 - protein, 6 aa, Artificial sequence
  Protein classification predicting sequence
KFSGLP

SEQ ID NO: 13421 - protein, 6 aa, Artificial sequence
  Protein classification predicting sequence
GEHGDS

SEQ ID NO: 13422 - protein, 10 aa, Artificial sequence
  Protein classification predicting sequence
VVGNPCNTNA

SEQ ID NO: 13423 - protein, 7 aa, Artificial sequence
  Protein classification predicting sequence
PKERVIG

SEQ ID NO: 13424 - protein, 7 aa, Artificial sequence
  Protein classification predicting sequence
PKNRVIG

SEQ ID NO: 13425 - protein, 6 aa, Artificial sequence
  Protein classification predicting sequence
LDSSRF

SEQ ID NO: 13426 - protein, 7 aa, Artificial sequence
  Protein classification predicting sequence
IVELELN

SEQ ID NO: 13427 - protein, 7 aa, Artificial sequence
  Protein classification predicting sequence
PKHRVIG

SEQ ID NO: 13428 - protein, 6 aa, Artificial sequence
  Protein classification predicting sequence
GFDANI

SEQ ID NO: 13429 - protein, 7 aa, Artificial sequence
  Protein classification predicting sequence
IGGTLAH

SEQ ID NO: 13430 - protein, 7 aa, Artificial sequence
  Protein classification predicting sequence
KVVGMAG

SEQ ID NO: 13431 - protein, 7 aa, Artificial sequence
  Protein classification predicting sequence
LLKTGSA

SEQ ID NO: 13432 - protein, 11 aa, Artificial sequence
  Protein classification predicting sequence
RKPGMSRDDLL

SEQ ID NO: 13433 - protein, 6 aa, Artificial sequence
  Protein classification predicting sequence
LDGQYG

SEQ ID NO: 13434 - protein, 7 aa, Artificial sequence
  Protein classification predicting sequence
GMAGVLD

SEQ ID NO: 13435 - protein, 6 aa, Artificial sequence
  Protein classification predicting sequence
LEGQYG

SEQ ID NO: 13436 - protein, 6 aa, Artificial sequence
  Protein classification predicting sequence
PQGKAL

SEQ ID NO: 13437 - protein, 8 aa, Artificial sequence
  Protein classification predicting sequence
QLALKAGV

SEQ ID NO: 13438 - protein, 6 aa, Artificial sequence
  Protein classification predicting sequence
INTTPA

SEQ ID NO: 13439 - protein, 6 aa, Artificial sequence
  Protein classification predicting sequence
IWGNHS

SEQ ID NO: 13440 - protein, 11 aa, Artificial sequence
  Protein classification predicting sequence
AFVICITNPLD

SEQ ID NO: 13441 - protein, 7 aa, Artificial sequence
  Protein classification predicting sequence
NPLDAMV

SEQ ID NO: 13442 - protein, 8 aa, Artificial sequence
  Protein classification predicting sequence
PGMSRDDL

SEQ ID NO: 13443 - protein, 7 aa, Artificial sequence
  Protein classification predicting sequence
LVIITAG

SEQ ID NO: 13444 - protein, 7 aa, Artificial sequence
  Protein classification predicting sequence
IERKGAT

SEQ ID NO: 13445 - protein, 6 aa, Artificial sequence
  Protein classification predicting sequence
NPLDAM

SEQ ID NO: 13446 - protein, 6 aa, Artificial sequence
  Protein classification predicting sequence
KERVIG

SEQ ID NO: 13447 - protein, 9 aa, Artificial sequence
  Protein classification predicting sequence
VVGNPCNTN

SEQ ID NO: 13448 - protein, 8 aa, Artificial sequence
  Protein classification predicting sequence
LEGVAMEL

SEQ ID NO: 13449 - protein, 10 aa, Artificial sequence
  Protein classification predicting sequence
RKPGMSRDDL

SEQ ID NO: 13450 - protein, 7 aa, Artificial sequence
  Protein classification predicting sequence
PQGKALD

SEQ ID NO: 13451 - protein, 6 aa, Artificial sequence
  Protein classification predicting sequence
KTGSAY

SEQ ID NO: 13452 - protein, 6 aa, Artificial sequence
  Protein classification predicting sequence
DHQKVI

SEQ ID NO: 13453 - protein, 10 aa, Artificial sequence
  Protein classification predicting sequence
LEGVAMELED

SEQ ID NO: 13454 - protein, 10 aa, Artificial sequence
  Protein classification predicting sequence
SGLPKERVIG

SEQ ID NO: 13455 - protein, 6 aa, Artificial sequence
  Protein classification predicting sequence
TQVPDF

SEQ ID NO: 13456 - protein, 7 aa, Artificial sequence
  Protein classification predicting sequence
SKIVVVT

SEQ ID NO: 13457 - protein, 9 aa, Artificial sequence
  Protein classification predicting sequence
QGKALNAVA

SEQ ID NO: 13458 - protein, 7 aa, Artificial sequence
  Protein classification predicting sequence
KVTGFEP

SEQ ID NO: 13459 - protein, 5 aa, Artificial sequence
  Protein classification predicting sequence
TNPLD

SEQ ID NO: 13460 - protein, 7 aa, Artificial sequence
  Protein classification predicting sequence
VLGGHGD

SEQ ID NO: 13461 - protein, 6 aa, Artificial sequence
  Protein classification predicting sequence
ISGVPI

SEQ ID NO: 13462 - protein, 7 aa, Artificial sequence
  Protein classification predicting sequence
ALFDKSV

SEQ ID NO: 13463 - protein, 6 aa, Artificial sequence
  Protein classification predicting sequence
NTKIMK

SEQ ID NO: 13464 - protein, 6 aa, Artificial sequence
  Protein classification predicting sequence
GGGEIV

SEQ ID NO: 13465 - protein, 7 aa, Artificial sequence
  Protein classification predicting sequence
GIEKIIE

SEQ ID NO: 13466 - protein, 6 aa, Artificial sequence
  Protein classification predicting sequence
AYYAPA

SEQ ID NO: 13467 - protein, 7 aa, Artificial sequence
  Protein classification predicting sequence
GNIGGTL

SEQ ID NO: 13468 - protein, 7 aa, Artificial sequence
  Protein classification predicting sequence
VGSCRSC

SEQ ID NO: 13469 - protein, 7 aa, Artificial sequence
  Protein classification predicting sequence
APLLCAG

SEQ ID NO: 13470 - protein, 6 aa, Artificial sequence
  Protein classification predicting sequence
LIQKWG

SEQ ID NO: 13471 - protein, 7 aa, Artificial sequence
  Protein classification predicting sequence
FHRAHQA

SEQ ID NO: 13472 - protein, 7 aa, Artificial sequence
  Protein classification predicting sequence
MVDRITP

SEQ ID NO: 13473 - protein, 6 aa, Artificial sequence
  Protein classification predicting sequence
QVSDKH

SEQ ID NO: 13474 - protein, 7 aa, Artificial sequence
  Protein classification predicting sequence
NLSKEEL

SEQ ID NO: 13475 - protein, 6 aa, Artificial sequence
  Protein classification predicting sequence
LDIAES

SEQ ID NO: 13476 - protein, 6 aa, Artificial sequence
  Protein classification predicting sequence
SPKKIY

SEQ ID NO: 13477 - protein, 6 aa, Artificial sequence
  Protein classification predicting sequence
GTVGGG

SEQ ID NO: 13478 - protein, 6 aa, Artificial sequence
  Protein classification predicting sequence
LHELKL

SEQ ID NO: 13479 - protein, 15 aa, Artificial sequence
  Protein classification predicting sequence
PGFIGGRMVKWLKRI

SEQ ID NO: 13480 - protein, 8 aa, Artificial sequence
  Protein classification predicting sequence
GYAYSGGG

SEQ ID NO: 13481 - protein, 9 aa, Artificial sequence
  Protein classification predicting sequence
RLTGKHPFN

SEQ ID NO: 13482 - protein, 8 aa, Artificial sequence
  Protein classification predicting sequence
HEEILPIN

SEQ ID NO: 13483 - protein, 6 aa, Artificial sequence
  Protein classification predicting sequence
LKKSVS

SEQ ID NO: 13484 - protein, 15 aa, Artificial sequence
  Protein classification predicting sequence
DSILINAGTDCTEEF

SEQ ID NO: 13485 - protein, 7 aa, Artificial sequence
  Protein classification predicting sequence
RAYTPTS

SEQ ID NO: 13486 - protein, 7 aa, Artificial sequence
  Protein classification predicting sequence
EKPNKYG

SEQ ID NO: 13487 - protein, 9 aa, Artificial sequence
  Protein classification predicting sequence
MGMMNNCWF

SEQ ID NO: 13488 - protein, 8 aa, Artificial sequence
  Protein classification predicting sequence
DSILINAG

SEQ ID NO: 13489 - protein, 7 aa, Artificial sequence
  Protein classification predicting sequence
PEDETEM

SEQ ID NO: 13490 - protein, 10 aa, Artificial sequence
  Protein classification predicting sequence
TEMHLVYANR

SEQ ID NO: 13491 - protein, 13 aa, Artificial sequence
  Protein classification predicting sequence
TRVEVTLDGGETW

SEQ ID NO: 13492 - protein, 11 aa, Artificial sequence
  Protein classification predicting sequence
EILPINSWTTQ

SEQ ID NO: 13493 - protein, 10 aa, Artificial sequence
  Protein classification predicting sequence
NTQPEKLIWN

SEQ ID NO: 13494 - protein, 7 aa, Artificial sequence
  Protein classification predicting sequence
GHVYDCT

SEQ ID NO: 13495 - protein, 10 aa, Artificial sequence
  Protein classification predicting sequence
NAGTDCTEEF

SEQ ID NO: 13496 - protein, 7 aa, Artificial sequence
  Protein classification predicting sequence
TGKHPFN

SEQ ID NO: 13497 - protein, 9 aa, Artificial sequence
  Protein classification predicting sequence
YVRNHGPVP

SEQ ID NO: 13498 - protein, 11 aa, Artificial sequence
  Protein classification predicting sequence
TLVCAGNRRKE

SEQ ID NO: 13499 - protein, 18 aa, Artificial sequence
  Protein classification predicting sequence
FEGAEDLPGGGGSKYGTS

SEQ ID NO: 13500 - protein, 11 aa, Artificial sequence
  Protein classification predicting sequence
NVCRPHKGEIG

SEQ ID NO: 13501 - protein, 8 aa, Artificial sequence
  Protein classification predicting sequence
AIHSDKAK

SEQ ID NO: 13502 - protein, 12 aa, Artificial sequence
  Protein classification predicting sequence
MGMMNNCWFRVK

SEQ ID NO: 13503 - protein, 7 aa, Artificial sequence
  Protein classification predicting sequence
WTVEVTG

SEQ ID NO: 13504 - protein, 8 aa, Artificial sequence
  Protein classification predicting sequence
KVTRVEVT

SEQ ID NO: 13505 - protein, 8 aa, Artificial sequence
  Protein classification predicting sequence
WCWCFWSL

SEQ ID NO: 13506 - protein, 7 aa, Artificial sequence
  Protein classification predicting sequence
WIIVHGH

SEQ ID NO: 13507 - protein, 6 aa, Artificial sequence
  Protein classification predicting sequence
KGPLGH

SEQ ID NO: 13508 - protein, 6 aa, Artificial sequence
  Protein classification predicting sequence
YANRTE

SEQ ID NO: 13509 - protein, 9 aa, Artificial sequence
  Protein classification predicting sequence
DILLREELD

SEQ ID NO: 13510 - protein, 5 aa, Artificial sequence
  Protein classification predicting sequence
KVWYV

SEQ ID NO: 13511 - protein, 7 aa, Artificial sequence
  Protein classification predicting sequence
VDAELAN

SEQ ID NO: 13512 - protein, 6 aa, Artificial sequence
  Protein classification predicting sequence
EILPIN

SEQ ID NO: 13513 - protein, 6 aa, Artificial sequence
  Protein classification predicting sequence
IGFNWG

SEQ ID NO: 13514 - protein, 5 aa, Artificial sequence
  Protein classification predicting sequence
WWYKP

SEQ ID NO: 13515 - protein, 7 aa, Artificial sequence
  Protein classification predicting sequence
AYMQNGE

SEQ ID NO: 13516 - protein, 7 aa, Artificial sequence
  Protein classification predicting sequence
NSVITTP

SEQ ID NO: 13517 - protein, 7 aa, Artificial sequence
  Protein classification predicting sequence
WNLMGMM

SEQ ID NO: 13518 - protein, 13 aa, Artificial sequence
  Protein classification predicting sequence
INELNINSVITTP

SEQ ID NO: 13519 - protein, 7 aa, Artificial sequence
  Protein classification predicting sequence
TTQKPYT

SEQ ID NO: 13520 - protein, 12 aa, Artificial sequence
  Protein classification predicting sequence
KYGKYWCWCFWS

SEQ ID NO: 13521 - protein, 8 aa, Artificial sequence
  Protein classification predicting sequence
QFTMSEVR

SEQ ID NO: 13522 - protein, 11 aa, Artificial sequence
  Protein classification predicting sequence
DCTEEFDAIHS

SEQ ID NO: 13523 - protein, 6 aa, Artificial sequence
  Protein classification predicting sequence
YGTSIK

SEQ ID NO: 13524 - protein, 13 aa, Artificial sequence
  Protein classification predicting sequence
TLVCAGNRRKEQN

SEQ ID NO: 13525 - protein, 9 aa, Artificial sequence
  Protein classification predicting sequence
PLHYVRNHG

SEQ ID NO: 13526 - protein, 6 aa, Artificial sequence
  Protein classification predicting sequence
YMQNGE

SEQ ID NO: 13527 - protein, 6 aa, Artificial sequence
  Protein classification predicting sequence
SGGWMA

SEQ ID NO: 13528 - protein, 9 aa, Artificial sequence
  Protein classification predicting sequence
REGWEYSVG

SEQ ID NO: 13529 - protein, 15 aa, Artificial sequence
  Protein classification predicting sequence
PVTLVCAGNRRKEQN

SEQ ID NO: 13530 - protein, 7 aa, Artificial sequence
  Protein classification predicting sequence
ESESYYH

SEQ ID NO: 13531 - protein, 6 aa, Artificial sequence
  Protein classification predicting sequence
KVWYVV

SEQ ID NO: 13532 - protein, 9 aa, Artificial sequence
  Protein classification predicting sequence
QAILKDPED

SEQ ID NO: 13533 - protein, 5 aa, Artificial sequence
  Protein classification predicting sequence
WFRVK

SEQ ID NO: 13534 - protein, 8 aa, Artificial sequence
  Protein classification predicting sequence
LHYVRNHG

SEQ ID NO: 13535 - protein, 6 aa, Artificial sequence
  Protein classification predicting sequence
YVRNHG

SEQ ID NO: 13536 - protein, 8 aa, Artificial sequence
  Protein classification predicting sequence
WGAAGVST

SEQ ID NO: 13537 - protein, 17 aa, Artificial sequence
  Protein classification predicting sequence
PVTLVCAGNRRKEQNMV

SEQ ID NO: 13538 - protein, 15 aa, Artificial sequence
  Protein classification predicting sequence
TLVCAGNRRKEQNMV

SEQ ID NO: 13539 - protein, 8 aa, Artificial sequence
  Protein classification predicting sequence
EKPNKYGK

SEQ ID NO: 13540 - protein, 11 aa, Artificial sequence
  Protein classification predicting sequence
KLCMRAYTPTS

SEQ ID NO: 13541 - protein, 7 aa, Artificial sequence
  Protein classification predicting sequence
VKWLKRI

SEQ ID NO: 13542 - protein, 6 aa, Artificial sequence
  Protein classification predicting sequence
PDHGFP

SEQ ID NO: 13543 - protein, 7 aa, Artificial sequence
  Protein classification predicting sequence
RVEVTLD

SEQ ID NO: 13544 - protein, 6 aa, Artificial sequence
  Protein classification predicting sequence
DNRVLP

SEQ ID NO: 13545 - protein, 5 aa, Artificial sequence
  Protein classification predicting sequence
CWCFW

SEQ ID NO: 13546 - protein, 6 aa, Artificial sequence
  Protein classification predicting sequence
MRAYTP

SEQ ID NO: 13547 - protein, 10 aa, Artificial sequence
  Protein classification predicting sequence
PCHEEILPIN

SEQ ID NO: 13548 - protein, 9 aa, Artificial sequence
  Protein classification predicting sequence
KLCMRAYTP

SEQ ID NO: 13549 - protein, 8 aa, Artificial sequence
  Protein classification predicting sequence
MSQHLDSL

SEQ ID NO: 13550 - protein, 8 aa, Artificial sequence
  Protein classification predicting sequence
FLKDHPGG

SEQ ID NO: 13551 - protein, 8 aa, Artificial sequence
  Protein classification predicting sequence
PDHGFPVR

SEQ ID NO: 13552 - protein, 6 aa, Artificial sequence
  Protein classification predicting sequence
WWYKPE

SEQ ID NO: 13553 - protein, 7 aa, Artificial sequence
  Protein classification predicting sequence
YGKYWCW

SEQ ID NO: 13554 - protein, 7 aa, Artificial sequence
  Protein classification predicting sequence
GLPVGKH

SEQ ID NO: 13555 - protein, 8 aa, Artificial sequence
  Protein classification predicting sequence
CNIHGLWE

SEQ ID NO: 13556 - protein, 9 aa, Artificial sequence
  Protein classification predicting sequence
GEGPTLIET

SEQ ID NO: 13557 - protein, 7 aa, Artificial sequence
  Protein classification predicting sequence
DTPLAES

SEQ ID NO: 13558 - protein, 8 aa, Artificial sequence
  Protein classification predicting sequence
PYDAKGLL

SEQ ID NO: 13559 - protein, 6 aa, Artificial sequence
  Protein classification predicting sequence
YAISTP

SEQ ID NO: 13560 - protein, 7 aa, Artificial sequence
  Protein classification predicting sequence
EVIDLRT

SEQ ID NO: 13561 - protein, 8 aa, Artificial sequence
  Protein classification predicting sequence
TTSDVAAG

SEQ ID NO: 13562 - protein, 10 aa, Artificial sequence
  Protein classification predicting sequence
GAGVIGLSTA

SEQ ID NO: 13563 - protein, 6 aa, Artificial sequence
  Protein classification predicting sequence
RIYFAG

SEQ ID NO: 13564 - protein, 8 aa, Artificial sequence
  Protein classification predicting sequence
FLAGDAAH

SEQ ID NO: 13565 - protein, 6 aa, Artificial sequence
  Protein classification predicting sequence
YEEAKI

SEQ ID NO: 13566 - protein, 8 aa, Artificial sequence
  Protein classification predicting sequence
DIAGKGIA

SEQ ID NO: 13567 - protein, 8 aa, Artificial sequence
  Protein classification predicting sequence
DIAGQGIA

SEQ ID NO: 13568 - protein, 6 aa, Artificial sequence
  Protein classification predicting sequence
GFQYEG

SEQ ID NO: 13569 - protein, 7 aa, Artificial sequence
  Protein classification predicting sequence
DIAGKGI

SEQ ID NO: 13570 - protein, 7 aa, Artificial sequence
  Protein classification predicting sequence
GGGADGS

SEQ ID NO: 13571 - protein, 6 aa, Artificial sequence
  Protein classification predicting sequence
WQSFVN

SEQ ID NO: 13572 - protein, 6 aa, Artificial sequence
  Protein classification predicting sequence
LSGGHT

SEQ ID NO: 13573 - protein, 8 aa, Artificial sequence
  Protein classification predicting sequence
VALSGGHT

SEQ ID NO: 13574 - protein, 7 aa, Artificial sequence
  Protein classification predicting sequence
ALSGAHT

SEQ ID NO: 13575 - protein, 6 aa, Artificial sequence
  Protein classification predicting sequence
LSGAHT

SEQ ID NO: 13576 - protein, 6 aa, Artificial sequence
  Protein classification predicting sequence
GGHTIG

SEQ ID NO: 13577 - protein, 8 aa, Artificial sequence
  Protein classification predicting sequence
RDGDRFWW

SEQ ID NO: 13578 - protein, 7 aa, Artificial sequence
  Protein classification predicting sequence
TSFLDAS

SEQ ID NO: 13579 - protein, 7 aa, Artificial sequence
  Protein classification predicting sequence
PCFLAGD

SEQ ID NO: 13580 - protein, 9 aa, Artificial sequence
  Protein classification predicting sequence
RDHGLPGYN

SEQ ID NO: 13581 - protein, 6 aa, Artificial sequence
  Protein classification predicting sequence
YQEARK

SEQ ID NO: 13582 - protein, 7 aa, Artificial sequence
  Protein classification predicting sequence
WFDVLDD

SEQ ID NO: 13583 - protein, 8 aa, Artificial sequence
  Protein classification predicting sequence
ARDSRTAC

SEQ ID NO: 13584 - protein, 6 aa, Artificial sequence
  Protein classification predicting sequence
PGNKFV

SEQ ID NO: 13585 - protein, 7 aa, Artificial sequence
  Protein classification predicting sequence
RLFKDGK

SEQ ID NO: 13586 - protein, 6 aa, Artificial sequence
  Protein classification predicting sequence
GHVPML

SEQ ID NO: 13587 - protein, 9 aa, Artificial sequence
  Protein classification predicting sequence
LRPVAGLLS

SEQ ID NO: 13588 - protein, 7 aa, Artificial sequence
  Protein classification predicting sequence
CTQYIRH

SEQ ID NO: 13589 - protein, 6 aa, Artificial sequence
  Protein classification predicting sequence
YTPEPD

SEQ ID NO: 13590 - protein, 7 aa, Artificial sequence
  Protein classification predicting sequence
ESFSDAK

SEQ ID NO: 13591 - protein, 8 aa, Artificial sequence
  Protein classification predicting sequence
EGRVDVLV

SEQ ID NO: 13592 - protein, 6 aa, Artificial sequence
  Protein classification predicting sequence
NVVAPG

SEQ ID NO: 13593 - protein, 8 aa, Artificial sequence
  Protein classification predicting sequence
NNAGITRD

SEQ ID NO: 13594 - protein, 8 aa, Artificial sequence
  Protein classification predicting sequence
QGLALMHE

SEQ ID NO: 13595 - protein, 6 aa, Artificial sequence
  Protein classification predicting sequence
RLPIVM

SEQ ID NO: 13596 - protein, 7 aa, Artificial sequence
  Protein classification predicting sequence
FRPFPKE

SEQ ID NO: 13597 - protein, 7 aa, Artificial sequence
  Protein classification predicting sequence
GLALMHE

SEQ ID NO: 13598 - protein, 9 aa, Artificial sequence
  Protein classification predicting sequence
GDGGTADIG

SEQ ID NO: 13599 - protein, 14 aa, Artificial sequence
  Protein classification predicting sequence
YDNEAYMNTGIQRS

SEQ ID NO: 13600 - protein, 6 aa, Artificial sequence
  Protein classification predicting sequence
STPYGA

SEQ ID NO: 13601 - protein, 15 aa, Artificial sequence
  Protein classification predicting sequence
GDGGTADIGLQALSG

SEQ ID NO: 13602 - protein, 7 aa, Artificial sequence
  Protein classification predicting sequence
TPGADTI

SEQ ID NO: 13603 - protein, 8 aa, Artificial sequence
  Protein classification predicting sequence
RVPLGVVG

SEQ ID NO: 13604 - protein, 8 aa, Artificial sequence
  Protein classification predicting sequence
LVSEKVAE

SEQ ID NO: 13605 - protein, 7 aa, Artificial sequence
  Protein classification predicting sequence
ELGLETY

SEQ ID NO: 13606 - protein, 7 aa, Artificial sequence
  Protein classification predicting sequence
ERLERLG

SEQ ID NO: 13607 - protein, 9 aa, Artificial sequence
  Protein classification predicting sequence
NVVLTPHIG

SEQ ID NO: 13608 - protein, 6 aa, Artificial sequence
  Protein classification predicting sequence
TGASRG

SEQ ID NO: 13609 - protein, 7 aa, Artificial sequence
  Protein classification predicting sequence
ITPWNFP

SEQ ID NO: 13610 - protein, 6 aa, Artificial sequence
  Protein classification predicting sequence
VYSGSK

SEQ ID NO: 13611 - protein, 6 aa, Artificial sequence
  Protein classification predicting sequence
GAGPIG

SEQ ID NO: 13612 - protein, 7 aa, Artificial sequence
  Protein classification predicting sequence
GAGPIGI

SEQ ID NO: 13613 - protein, 6 aa, Artificial sequence
  Protein classification predicting sequence
RKILLM

SEQ ID NO: 13614 - protein, 7 aa, Artificial sequence
  Protein classification predicting sequence
SPETIAE

SEQ ID NO: 13615 - protein, 10 aa, Artificial sequence
  Protein classification predicting sequence
FTVEFGLCKQ

SEQ ID NO: 13616 - protein, 7 aa, Artificial sequence
  Protein classification predicting sequence
EFGLCKQ

SEQ ID NO: 13617 - protein, 8 aa, Artificial sequence
  Protein classification predicting sequence
FLKERTGF

SEQ ID NO: 13618 - protein, 7 aa, Artificial sequence
  Protein classification predicting sequence
GAGLLSS

SEQ ID NO: 13619 - protein, 7 aa, Artificial sequence
  Protein classification predicting sequence
PQLEDVS

SEQ ID NO: 13620 - protein, 8 aa, Artificial sequence
  Protein classification predicting sequence
RVFHCTQY

SEQ ID NO: 13621 - protein, 13 aa, Artificial sequence
  Protein classification predicting sequence
RVFHCTQYIRHGS

SEQ ID NO: 13622 - protein, 7 aa, Artificial sequence
  Protein classification predicting sequence
YFVSESF

SEQ ID NO: 13623 - protein, 6 aa, Artificial sequence
  Protein classification predicting sequence
NIVENY

SEQ ID NO: 13624 - protein, 7 aa, Artificial sequence
  Protein classification predicting sequence
ELTPVAI

SEQ ID NO: 13625 - protein, 8 aa, Artificial sequence
  Protein classification predicting sequence
GGGSGGLA

SEQ ID NO: 13626 - protein, 9 aa, Artificial sequence
  Protein classification predicting sequence
IGGGSGGLA

SEQ ID NO: 13627 - protein, 6 aa, Artificial sequence
  Protein classification predicting sequence
DLVEKN

SEQ ID NO: 13628 - protein, 6 aa, Artificial sequence
  Protein classification predicting sequence
AEMIKY

SEQ ID NO: 13629 - protein, 7 aa, Artificial sequence
  Protein classification predicting sequence
WFPKKIS

SEQ ID NO: 13630 - protein, 6 aa, Artificial sequence
  Protein classification predicting sequence
VYRQRR

SEQ ID NO: 13631 - protein, 8 aa, Artificial sequence
  Protein classification predicting sequence
HELLGHVP

SEQ ID NO: 13632 - protein, 6 aa, Artificial sequence
  Protein classification predicting sequence
FAQFSQ

SEQ ID NO: 13633 - protein, 8 aa, Artificial sequence
  Protein classification predicting sequence
IPQLEDVS

SEQ ID NO: 13634 - protein, 7 aa, Artificial sequence
  Protein classification predicting sequence
IGLASLG

SEQ ID NO: 13635 - protein, 7 aa, Artificial sequence
  Protein classification predicting sequence
SLGASDE

SEQ ID NO: 13636 - protein, 7 aa, Artificial sequence
  Protein classification predicting sequence
VEFGLCK

SEQ ID NO: 13637 - protein, 9 aa, Artificial sequence
  Protein classification predicting sequence
IGLASLGAS

SEQ ID NO: 13638 - protein, 10 aa, Artificial sequence
  Protein classification predicting sequence
KAYGAGLLSS

SEQ ID NO: 13639 - protein, 8 aa, Artificial sequence
  Protein classification predicting sequence
YKHGDPIP

SEQ ID NO: 13640 - protein, 7 aa, Artificial sequence
  Protein classification predicting sequence
LYPTHAC

SEQ ID NO: 13641 - protein, 8 aa, Artificial sequence
  Protein classification predicting sequence
FTVEFGLC

SEQ ID NO: 13642 - protein, 7 aa, Artificial sequence
  Protein classification predicting sequence
EFAGIFN

SEQ ID NO: 13643 - protein, 15 aa, Artificial sequence
  Protein classification predicting sequence
ALGGTCVNVGCVPKK

SEQ ID NO: 13644 - protein, 5 aa, Artificial sequence
  Protein classification predicting sequence
NYFNT

SEQ ID NO: 13645 - protein, 7 aa, Artificial sequence
  Protein classification predicting sequence
GSAVDDF

SEQ ID NO: 13646 - protein, 6 aa, Artificial sequence
  Protein classification predicting sequence
ANQKPG

SEQ ID NO: 13647 - protein, 7 aa, Artificial sequence
  Protein classification predicting sequence
GPLINEK

SEQ ID NO: 13648 - protein, 6 aa, Artificial sequence
  Protein classification predicting sequence
VSMPNK

SEQ ID NO: 13649 - protein, 7 aa, Artificial sequence
  Protein classification predicting sequence
FNRKDDF

SEQ ID NO: 13650 - protein, 6 aa, Artificial sequence
  Protein classification predicting sequence
GFKIAM

SEQ ID NO: 13651 - protein, 5 aa, Artificial sequence
  Protein classification predicting sequence
YPPCP

SEQ ID NO: 13652 - protein, 6 aa, Artificial sequence
  Protein classification predicting sequence
NGKYKS

SEQ ID NO: 13653 - protein, 6 aa, Artificial sequence
  Protein classification predicting sequence
SVTGFN

SEQ ID NO: 13654 - protein, 6 aa, Artificial sequence
  Protein classification predicting sequence
VNVSSP

SEQ ID NO: 13655 - protein, 6 aa, Artificial sequence
  Protein classification predicting sequence
NYIKEH

SEQ ID NO: 13656 - protein, 7 aa, Artificial sequence
  Protein classification predicting sequence
LPGVGEN

SEQ ID NO: 13657 - protein, 6 aa, Artificial sequence
  Protein classification predicting sequence
KDEDDG

SEQ ID NO: 13658 - protein, 6 aa, Artificial sequence
  Protein classification predicting sequence
RLLDRV

SEQ ID NO: 13659 - protein, 7 aa, Artificial sequence
  Protein classification predicting sequence
WAYETEP

SEQ ID NO: 13660 - protein, 6 aa, Artificial sequence
  Protein classification predicting sequence
VFIEQP

SEQ ID NO: 13661 - protein, 6 aa, Artificial sequence
  Protein classification predicting sequence
VIVRET

SEQ ID NO: 13662 - protein, 7 aa, Artificial sequence
  Protein classification predicting sequence
PFGSGPR

SEQ ID NO: 13663 - protein, 8 aa, Artificial sequence
  Protein classification predicting sequence
KKYGKVWG

SEQ ID NO: 13664 - protein, 6 aa, Artificial sequence
  Protein classification predicting sequence
VLVKEC

SEQ ID NO: 13665 - protein, 7 aa, Artificial sequence
  Protein classification predicting sequence
NIDPYIY

SEQ ID NO: 13666 - protein, 5 aa, Artificial sequence
  Protein classification predicting sequence
YMPFG

SEQ ID NO: 13667 - protein, 5 aa, Artificial sequence
  Protein classification predicting sequence
FTNRR

SEQ ID NO: 13668 - protein, 6 aa, Artificial sequence
  Protein classification predicting sequence
DFLQLM

SEQ ID NO: 13669 - protein, 7 aa, Artificial sequence
  Protein classification predicting sequence
GPRNCIG

SEQ ID NO: 13670 - protein, 6 aa, Artificial sequence
  Protein classification predicting sequence
VIGRNR

SEQ ID NO: 13671 - protein, 6 aa, Artificial sequence
  Protein classification predicting sequence
GYYIPK

SEQ ID NO: 13672 - protein, 6 aa, Artificial sequence
  Protein classification predicting sequence
DFLDIL

SEQ ID NO: 13673 - protein, 6 aa, Artificial sequence
  Protein classification predicting sequence
GPGGII

SEQ ID NO: 13674 - protein, 6 aa, Artificial sequence
  Protein classification predicting sequence
PKDVRA

SEQ ID NO: 13675 - protein, 5 aa, Artificial sequence
  Protein classification predicting sequence
YQVHV

SEQ ID NO: 13676 - protein, 7 aa, Artificial sequence
  Protein classification predicting sequence
DVELVAV

SEQ ID NO: 13677 - protein, 7 aa, Artificial sequence
  Protein classification predicting sequence
ETTSSVL

SEQ ID NO: 13678 - protein, 8 aa, Artificial sequence
  Protein classification predicting sequence
NPEMFDPG

SEQ ID NO: 13679 - protein, 6 aa, Artificial sequence
  Protein classification predicting sequence
ICAICF

SEQ ID NO: 13680 - protein, 7 aa, Artificial sequence
  Protein classification predicting sequence
PGPTPLP

SEQ ID NO: 13681 - protein, 6 aa, Artificial sequence
  Protein classification predicting sequence
PTISDR

SEQ ID NO: 13682 - protein, 9 aa, Artificial sequence
  Protein classification predicting sequence
QRKIQEELD

SEQ ID NO: 13683 - protein, 6 aa, Artificial sequence
  Protein classification predicting sequence
EVFLFL

SEQ ID NO: 13684 - protein, 5 aa, Artificial sequence
  Protein classification predicting sequence
RCIGE

SEQ ID NO: 13685 - protein, 6 aa, Artificial sequence
  Protein classification predicting sequence
RVCLGE

SEQ ID NO: 13686 - protein, 6 aa, Artificial sequence
  Protein classification predicting sequence
AFLPFS

SEQ ID NO: 13687 - protein, 8 aa, Artificial sequence
  Protein classification predicting sequence
LFIGGTET

SEQ ID NO: 13688 - protein, 6 aa, Artificial sequence
  Protein classification predicting sequence
KLPPGP

SEQ ID NO: 13689 - protein, 8 aa, Artificial sequence
  Protein classification predicting sequence
LARMELFL

SEQ ID NO: 13690 - protein, 7 aa, Artificial sequence
  Protein classification predicting sequence
PFSAGPR

SEQ ID NO: 13691 - protein, 7 aa, Artificial sequence
  Protein classification predicting sequence
FNPDRFL

SEQ ID NO: 13692 - protein, 11 aa, Artificial sequence
  Protein classification predicting sequence
PFGVGRRSCPG

SEQ ID NO: 13693 - protein, 7 aa, Artificial sequence
  Protein classification predicting sequence
SVFTNRR

SEQ ID NO: 13694 - protein, 7 aa, Artificial sequence
  Protein classification predicting sequence
RMKESRL

SEQ ID NO: 13695 - protein, 6 aa, Artificial sequence
  Protein classification predicting sequence
CKKDVE

SEQ ID NO: 13696 - protein, 9 aa, Artificial sequence
  Protein classification predicting sequence
VMIPSYALH

SEQ ID NO: 13697 - protein, 12 aa, Artificial sequence
  Protein classification predicting sequence
VLVKECYSVFTN

SEQ ID NO: 13698 - protein, 7 aa, Artificial sequence
  Protein classification predicting sequence
KEMVPII

SEQ ID NO: 13699 - protein, 6 aa, Artificial sequence
  Protein classification predicting sequence
DSLNNP

SEQ ID NO: 13700 - protein, 29 aa, Artificial sequence
  Protein classification predicting sequence
FIMYELATHPDVQQKLQEEIDAVLPNKAP

SEQ ID NO: 13701 - protein, 9 aa, Artificial sequence
  Protein classification predicting sequence
EAETGKPVT

SEQ ID NO: 13702 - protein, 7 aa, Artificial sequence
  Protein classification predicting sequence
KAPPTYD

SEQ ID NO: 13703 - protein, 11 aa, Artificial sequence
  Protein classification predicting sequence
PCKETQIPLKL

SEQ ID NO: 13704 - protein, 8 aa, Artificial sequence
  Protein classification predicting sequence
GLLQPEKP

SEQ ID NO: 13705 - protein, 6 aa, Artificial sequence
  Protein classification predicting sequence
GPVGFM

SEQ ID NO: 13706 - protein, 14 aa, Artificial sequence
  Protein classification predicting sequence
LLSPTFTSGKLKEM

SEQ ID NO: 13707 - protein, 9 aa, Artificial sequence
  Protein classification predicting sequence
FTSGKLKEM

SEQ ID NO: 13708 - protein, 6 aa, Artificial sequence
  Protein classification predicting sequence
IDPYIY

SEQ ID NO: 13709 - protein, 14 aa, Artificial sequence
  Protein classification predicting sequence
VLVKECYSVFTNRR

SEQ ID NO: 13710 - protein, 7 aa, Artificial sequence
  Protein classification predicting sequence
QYGDVLV

SEQ ID NO: 13711 - protein, 9 aa, Artificial sequence
  Protein classification predicting sequence
PERFSKKNK

SEQ ID NO: 13712 - protein, 12 aa, Artificial sequence
  Protein classification predicting sequence
PERFSKKNKDNI

SEQ ID NO: 13713 - protein, 6 aa, Artificial sequence
  Protein classification predicting sequence
QNFSFK

SEQ ID NO: 13714 - protein, 7 aa, Artificial sequence
  Protein classification predicting sequence
IDSLNNP

SEQ ID NO: 13715 - protein, 6 aa, Artificial sequence
  Protein classification predicting sequence
HKALSD

SEQ ID NO: 13716 - protein, 9 aa, Artificial sequence
  Protein classification predicting sequence
LVLLYLYGT

SEQ ID NO: 13717 - protein, 11 aa, Artificial sequence
  Protein classification predicting sequence
IKTVLVKECYS

SEQ ID NO: 13718 - protein, 8 aa, Artificial sequence
  Protein classification predicting sequence
VLVKECYS

SEQ ID NO: 13719 - protein, 9 aa, Artificial sequence
  Protein classification predicting sequence
LLSPTFTSG

SEQ ID NO: 13720 - protein, 6 aa, Artificial sequence
  Protein classification predicting sequence
DEEWKR

SEQ ID NO: 13721 - protein, 7 aa, Artificial sequence
  Protein classification predicting sequence
KALSDLE

SEQ ID NO: 13722 - protein, 8 aa, Artificial sequence
  Protein classification predicting sequence
LATHPDVQ

SEQ ID NO: 13723 - protein, 5 aa, Artificial sequence
  Protein classification predicting sequence
GPRNC

SEQ ID NO: 13724 - protein, 8 aa, Artificial sequence
  Protein classification predicting sequence
FDFLDPFF

SEQ ID NO: 13725 - protein, 15 aa, Artificial sequence
  Protein classification predicting sequence
AQSIIFIFAGYETTS

SEQ ID NO: 13726 - protein, 7 aa, Artificial sequence
  Protein classification predicting sequence
MEYLDMV

SEQ ID NO: 13727 - protein, 11 aa, Artificial sequence
  Protein classification predicting sequence
GPRNCIGMRFA

SEQ ID NO: 13728 - protein, 12 aa, Artificial sequence
  Protein classification predicting sequence
GPRNCIGMRFAL

SEQ ID NO: 13729 - protein, 7 aa, Artificial sequence
  Protein classification predicting sequence
QPVLAIT

SEQ ID NO: 13730 - protein, 6 aa, Artificial sequence
  Protein classification predicting sequence
RVDFLQ

SEQ ID NO: 13731 - protein, 6 aa, Artificial sequence
  Protein classification predicting sequence
LQNFSF

SEQ ID NO: 13732 - protein, 7 aa, Artificial sequence
  Protein classification predicting sequence
LLQPEKP

SEQ ID NO: 13733 - protein, 6 aa, Artificial sequence
  Protein classification predicting sequence
SHKALS

SEQ ID NO: 13734 - protein, 8 aa, Artificial sequence
  Protein classification predicting sequence
RVDFLQLM

SEQ ID NO: 13735 - protein, 6 aa, Artificial sequence
  Protein classification predicting sequence
PLPFLG

SEQ ID NO: 13736 - protein, 17 aa, Artificial sequence
  Protein classification predicting sequence
IKTVLVKECYSVFTNRR

SEQ ID NO: 13737 - protein, 10 aa, Artificial sequence
  Protein classification predicting sequence
YGDVLVRNLR

SEQ ID NO: 13738 - protein, 10 aa, Artificial sequence
  Protein classification predicting sequence
FGAYSMDVIT

SEQ ID NO: 13739 - protein, 6 aa, Artificial sequence
  Protein classification predicting sequence
MNMKLA

SEQ ID NO: 13740 - protein, 9 aa, Artificial sequence
  Protein classification predicting sequence
FKKLGIPGP

SEQ ID NO: 13741 - protein, 8 aa, Artificial sequence
  Protein classification predicting sequence
LVRNLRRE

SEQ ID NO: 13742 - protein, 6 aa, Artificial sequence
  Protein classification predicting sequence
LPNKAP

SEQ ID NO: 13743 - protein, 7 aa, Artificial sequence
  Protein classification predicting sequence
KLQEEID

SEQ ID NO: 13744 - protein, 7 aa, Artificial sequence
  Protein classification predicting sequence
GYETTSS

SEQ ID NO: 13745 - protein, 7 aa, Artificial sequence
  Protein classification predicting sequence
KLLRFDF

SEQ ID NO: 13746 - protein, 11 aa, Artificial sequence
  Protein classification predicting sequence
AQSIIFIFAGY

SEQ ID NO: 13747 - protein, 7 aa, Artificial sequence
  Protein classification predicting sequence
IFIFAGY

SEQ ID NO: 13748 - protein, 7 aa, Artificial sequence
  Protein classification predicting sequence
RLERVCK

SEQ ID NO: 13749 - protein, 7 aa, Artificial sequence
  Protein classification predicting sequence
RACQLAH

SEQ ID NO: 13750 - protein, 8 aa, Artificial sequence
  Protein classification predicting sequence
KRRLDFLD

SEQ ID NO: 13751 - protein, 11 aa, Artificial sequence
  Protein classification predicting sequence
DTFMFEGHDTT

SEQ ID NO: 13752 - protein, 7 aa, Artificial sequence
  Protein classification predicting sequence
LGRSDPK

SEQ ID NO: 13753 - protein, 6 aa, Artificial sequence
  Protein classification predicting sequence
ILKPYV

SEQ ID NO: 13754 - protein, 7 aa, Artificial sequence
  Protein classification predicting sequence
LLFAKME

SEQ ID NO: 13755 - protein, 14 aa, Artificial sequence
  Protein classification predicting sequence
WFQHRRMLTPAFHY

SEQ ID NO: 13756 - protein, 10 aa, Artificial sequence
  Protein classification predicting sequence
PWIGYGLLLL

SEQ ID NO: 13757 - protein, 7 aa, Artificial sequence
  Protein classification predicting sequence
RLYPPVP

SEQ ID NO: 13758 - protein, 8 aa, Artificial sequence
  Protein classification predicting sequence
PNPEVFDP

SEQ ID NO: 13759 - protein, 8 aa, Artificial sequence
  Protein classification predicting sequence
RFELLPDP

SEQ ID NO: 13760 - protein, 10 aa, Artificial sequence
  Protein classification predicting sequence
HWLLGHSREF

SEQ ID NO: 13761 - protein, 6 aa, Artificial sequence
  Protein classification predicting sequence
FPSACP

SEQ ID NO: 13762 - protein, 13 aa, Artificial sequence
  Protein classification predicting sequence
LMTLDTIMKCAFS

SEQ ID NO: 13763 - protein, 9 aa, Artificial sequence
  Protein classification predicting sequence
ALQQFPCPP

SEQ ID NO: 13764 - protein, 6 aa, Artificial sequence
  Protein classification predicting sequence
MLDKWE

SEQ ID NO: 13765 - protein, 7 aa, Artificial sequence
  Protein classification predicting sequence
AKMENGS

SEQ ID NO: 13766 - protein, 7 aa, Artificial sequence
  Protein classification predicting sequence
YALATHP

SEQ ID NO: 13767 - protein, 16 aa, Artificial sequence
  Protein classification predicting sequence
RNCIGKQFAMNELKVA

SEQ ID NO: 13768 - protein, 10 aa, Artificial sequence
  Protein classification predicting sequence
PEHQHRCREE

SEQ ID NO: 13769 - protein, 8 aa, Artificial sequence
  Protein classification predicting sequence
LTMCIKES

SEQ ID NO: 13770 - protein, 7 aa, Artificial sequence
  Protein classification predicting sequence
VWPDPEV

SEQ ID NO: 13771 - protein, 6 aa, Artificial sequence
  Protein classification predicting sequence
WDDLAQ

SEQ ID NO: 13772 - protein, 12 aa, Artificial sequence
  Protein classification predicting sequence
PFSAGPRNCIGQ

SEQ ID NO: 13773 - protein, 16 aa, Artificial sequence
  Protein classification predicting sequence
LRAEVDTFMFEGHDTT

SEQ ID NO: 13774 - protein, 9 aa, Artificial sequence
  Protein classification predicting sequence
TFMFEGHDT

SEQ ID NO: 13775 - protein, 10 aa, Artificial sequence
  Protein classification predicting sequence
HRRMLTPAFH

SEQ ID NO: 13776 - protein, 9 aa, Artificial sequence
  Protein classification predicting sequence
LPDDKEPRR

SEQ ID NO: 13777 - protein, 8 aa, Artificial sequence
  Protein classification predicting sequence
EIEWDDLA

SEQ ID NO: 13778 - protein, 7 aa, Artificial sequence
  Protein classification predicting sequence
LPFLTMC

SEQ ID NO: 13779 - protein, 6 aa, Artificial sequence
  Protein classification predicting sequence
FPQPPK

SEQ ID NO: 13780 - protein, 8 aa, Artificial sequence
  Protein classification predicting sequence
NWFLGHLG

SEQ ID NO: 13781 - protein, 10 aa, Artificial sequence
  Protein classification predicting sequence
ILKPYVKIFN

SEQ ID NO: 13782 - protein, 14 aa, Artificial sequence
  Protein classification predicting sequence
FIPFSAGPRNCIGQ

SEQ ID NO: 13783 - protein, 18 aa, Artificial sequence
  Protein classification predicting sequence
FIPFSAGPRNCIGQTFAM

SEQ ID NO: 13784 - protein, 7 aa, Artificial sequence
  Protein classification predicting sequence
LARILAW

SEQ ID NO: 13785 - protein, 11 aa, Artificial sequence
  Protein classification predicting sequence
SEYIAAILELS

SEQ ID NO: 13786 - protein, 11 aa, Artificial sequence
  Protein classification predicting sequence
KTLDFIDVLLL

SEQ ID NO: 13787 - protein, 11 aa, Artificial sequence
  Protein classification predicting sequence
DIRAEADTFMF

SEQ ID NO: 13788 - protein, 8 aa, Artificial sequence
  Protein classification predicting sequence
PFRFDPEN

SEQ ID NO: 13789 - protein, 13 aa, Artificial sequence
  Protein classification predicting sequence
LTPAFHFNILKPY

SEQ ID NO: 13790 - protein, 9 aa, Artificial sequence
  Protein classification predicting sequence
GLWLRVEPL

SEQ ID NO: 13791 - protein, 6 aa, Artificial sequence
  Protein classification predicting sequence
TYPQGF

SEQ ID NO: 13792 - protein, 13 aa, Artificial sequence
  Protein classification predicting sequence
VWPDPEVYDPFRF

SEQ ID NO: 13793 - protein, 8 aa, Artificial sequence
  Protein classification predicting sequence
ILELSALV

SEQ ID NO: 13794 - protein, 8 aa, Artificial sequence
  Protein classification predicting sequence
YTTMCIKE

SEQ ID NO: 13795 - protein, 6 aa, Artificial sequence
  Protein classification predicting sequence
LTPAFH

SEQ ID NO: 13796 - protein, 7 aa, Artificial sequence
  Protein classification predicting sequence
SLMTLDS

SEQ ID NO: 13797 - protein, 6 aa, Artificial sequence
  Protein classification predicting sequence
DGRSLP

SEQ ID NO: 13798 - protein, 6 aa, Artificial sequence
  Protein classification predicting sequence
WALHHN

SEQ ID NO: 13799 - protein, 6 aa, Artificial sequence
  Protein classification predicting sequence
IKETLR

SEQ ID NO: 13800 - protein, 6 aa, Artificial sequence
  Protein classification predicting sequence
AFIPFS

SEQ ID NO: 13801 - protein, 6 aa, Artificial sequence
  Protein classification predicting sequence
LSPTFT

SEQ ID NO: 13802 - protein, 7 aa, Artificial sequence
  Protein classification predicting sequence
FTSGKLK

SEQ ID NO: 13803 - protein, 5 aa, Artificial sequence
  Protein classification predicting sequence
RNCIG

SEQ ID NO: 13804 - protein, 5 aa, Artificial sequence
  Protein classification predicting sequence
FIFYA

SEQ ID NO: 13805 - protein, 6 aa, Artificial sequence
  Protein classification predicting sequence
FNPDRF

SEQ ID NO: 13806 - protein, 7 aa, Artificial sequence
  Protein classification predicting sequence
IKEALRL

SEQ ID NO: 13807 - protein, 8 aa, Artificial sequence
  Protein classification predicting sequence
PPHVPEHL

SEQ ID NO: 13808 - protein, 8 aa, Artificial sequence
  Protein classification predicting sequence
GTDVLKAL

SEQ ID NO: 13809 - protein, 7 aa, Artificial sequence
  Protein classification predicting sequence
TGCPNGC

SEQ ID NO: 13810 - protein, 7 aa, Artificial sequence
  Protein classification predicting sequence
LGSGVIG

SEQ ID NO: 13811 - protein, 23 aa, Artificial sequence
  Protein classification predicting sequence
LATGGYGRAYFSATSAHTCTGDG

SEQ ID NO: 13812 - protein, 7 aa, Artificial sequence
  Protein classification predicting sequence
EIREGRG

SEQ ID NO: 13813 - protein, 10 aa, Artificial sequence
  Protein classification predicting sequence
TSAHTCTGDG

SEQ ID NO: 13814 - protein, 7 aa, Artificial sequence
  Protein classification predicting sequence
RGEGGYL

SEQ ID NO: 13815 - protein, 9 aa, Artificial sequence
  Protein classification predicting sequence
PTVHYNMGG

SEQ ID NO: 13816 - protein, 7 aa, Artificial sequence
  Protein classification predicting sequence
DTVKGSD

SEQ ID NO: 13817 - protein, 8 aa, Artificial sequence
  Protein classification predicting sequence
IYQRAFGG

SEQ ID NO: 13818 - protein, 7 aa, Artificial sequence
  Protein classification predicting sequence
GCLITEG

SEQ ID NO: 13819 - protein, 8 aa, Artificial sequence
  Protein classification predicting sequence
GERFMERY

SEQ ID NO: 13820 - protein, 12 aa, Artificial sequence
  Protein classification predicting sequence
ACVSVHGANRLG

SEQ ID NO: 13821 - protein, 16 aa, Artificial sequence
  Protein classification predicting sequence
YDTVKGSDWLGDQDAI

SEQ ID NO: 13822 - protein, 9 aa, Artificial sequence
  Protein classification predicting sequence
TEGCRGEGG

SEQ ID NO: 13823 - protein, 10 aa, Artificial sequence
  Protein classification predicting sequence
GERFMERYAP

SEQ ID NO: 13824 - protein, 8 aa, Artificial sequence
  Protein classification predicting sequence
VHGANRLG

SEQ ID NO: 13825 - protein, 8 aa, Artificial sequence
  Protein classification predicting sequence
FPTRSHTV

SEQ ID NO: 13826 - protein, 7 aa, Artificial sequence
  Protein classification predicting sequence
EYFALDL

SEQ ID NO: 13827 - protein, 7 aa, Artificial sequence
  Protein classification predicting sequence
RLPGISE

SEQ ID NO: 13828 - protein, 8 aa, Artificial sequence
  Protein classification predicting sequence
IFAGVDVT

SEQ ID NO: 13829 - protein, 15 aa, Artificial sequence
  Protein classification predicting sequence
LPTVHYNMGGIPTNY

SEQ ID NO: 13830 - protein, 6 aa, Artificial sequence
  Protein classification predicting sequence
AALGNM

SEQ ID NO: 13831 - protein, 11 aa, Artificial sequence
  Protein classification predicting sequence
NSLLDLVVFGR

SEQ ID NO: 13832 - protein, 11 aa, Artificial sequence
  Protein classification predicting sequence
ATGGYGRAYFS

SEQ ID NO: 13833 - protein, 9 aa, Artificial sequence
  Protein classification predicting sequence
SVHGANRLG

SEQ ID NO: 13834 - protein, 20 aa, Artificial sequence
  Protein classification predicting sequence
TLTFRRSCREGICGSCAMNI

SEQ ID NO: 13835 - protein, 7 aa, Artificial sequence
  Protein classification predicting sequence
CPSYWWN

SEQ ID NO: 13836 - protein, 8 aa, Artificial sequence
  Protein classification predicting sequence
SCPSYWWN

SEQ ID NO: 13837 - protein, 7 aa, Artificial sequence
  Protein classification predicting sequence
DKYLGPA

SEQ ID NO: 13838 - protein, 7 aa, Artificial sequence
  Protein classification predicting sequence
LNPAKAI

SEQ ID NO: 13839 - protein, 8 aa, Artificial sequence
  Protein classification predicting sequence
GTNTLACI

SEQ ID NO: 13840 - protein, 8 aa, Artificial sequence
  Protein classification predicting sequence
FRRSCREG

SEQ ID NO: 13841 - protein, 7 aa, Artificial sequence
  Protein classification predicting sequence
CPKGLNP

SEQ ID NO: 13842 - protein, 6 aa, Artificial sequence
  Protein classification predicting sequence
IYPLPH

SEQ ID NO: 13843 - protein, 8 aa, Artificial sequence
  Protein classification predicting sequence
TCPKGLNP

SEQ ID NO: 13844 - protein, 8 aa, Artificial sequence
  Protein classification predicting sequence
LDALIKIK

SEQ ID NO: 13845 - protein, 10 aa, Artificial sequence
  Protein classification predicting sequence
YECILCACCS

SEQ ID NO: 13846 - protein, 7 aa, Artificial sequence
  Protein classification predicting sequence
CHTIMNC

SEQ ID NO: 13847 - protein, 13 aa, Artificial sequence
  Protein classification predicting sequence
DSTLTFRRSCREG

SEQ ID NO: 13848 - protein, 13 aa, Artificial sequence
  Protein classification predicting sequence
LEDPFKLYRCHTI

SEQ ID NO: 13849 - protein, 5 aa, Artificial sequence
  Protein classification predicting sequence
CPNGC

SEQ ID NO: 13850 - protein, 7 aa, Artificial sequence
  Protein classification predicting sequence
QDYYKKN

SEQ ID NO: 13851 - protein, 7 aa, Artificial sequence
  Protein classification predicting sequence
NGYFIPK

SEQ ID NO: 13852 - protein, 6 aa, Artificial sequence
  Protein classification predicting sequence
ACENWG

SEQ ID NO: 13853 - protein, 6 aa, Artificial sequence
  Protein classification predicting sequence
TEGCRG

SEQ ID NO: 13854 - protein, 9 aa, Artificial sequence
  Protein classification predicting sequence
LASRDVVSR

SEQ ID NO: 13855 - protein, 6 aa, Artificial sequence
  Protein classification predicting sequence
GICGSC

SEQ ID NO: 13856 - protein, 7 aa, Artificial sequence
  Protein classification predicting sequence
IKAAIKE

SEQ ID NO: 13857 - protein, 7 aa, Artificial sequence
  Protein classification predicting sequence
GMKVVAV

SEQ ID NO: 13858 - protein, 6 aa, Artificial sequence
  Protein classification predicting sequence
ANRLAS

SEQ ID NO: 13859 - protein, 7 aa, Artificial sequence
  Protein classification predicting sequence
HGGLRYL

SEQ ID NO: 13860 - protein, 6 aa, Artificial sequence
  Protein classification predicting sequence
GTSSRS

SEQ ID NO: 13861 - protein, 20 aa, Artificial sequence
  Protein classification predicting sequence
GTSSRSTKLVHGGLRYLKQF

SEQ ID NO: 13862 - protein, 6 aa, Artificial sequence
  Protein classification predicting sequence
AGLRPL

SEQ ID NO: 13863 - protein, 6 aa, Artificial sequence
  Protein classification predicting sequence
INGAGI

SEQ ID NO: 13864 - protein, 8 aa, Artificial sequence
  Protein classification predicting sequence
VINTTGPW

SEQ ID NO: 13865 - protein, 13 aa, Artificial sequence
  Protein classification predicting sequence
GTSSRSTKLVHGG

SEQ ID NO: 13866 - protein, 6 aa, Artificial sequence
  Protein classification predicting sequence
MKVAVL

SEQ ID NO: 13867 - protein, 7 aa, Artificial sequence
  Protein classification predicting sequence
GKGLGGS

SEQ ID NO: 13868 - protein, 7 aa, Artificial sequence
  Protein classification predicting sequence
YSPESMG

SEQ ID NO: 13869 - protein, 5 aa, Artificial sequence
  Protein classification predicting sequence
CIDCH

SEQ ID NO: 13870 - protein, 6 aa, Artificial sequence
  Protein classification predicting sequence
CPYHGW

SEQ ID NO: 13871 - protein, 6 aa, Artificial sequence
  Protein classification predicting sequence
HMYAKN

SEQ ID NO: 13872 - protein, 6 aa, Artificial sequence
  Protein classification predicting sequence
GREENI

SEQ ID NO: 13873 - protein, 6 aa, Artificial sequence
  Protein classification predicting sequence
IHRDAF

SEQ ID NO: 13874 - protein, 6 aa, Artificial sequence
  Protein classification predicting sequence
VIGSGT

SEQ ID NO: 13875 - protein, 6 aa, Artificial sequence
  Protein classification predicting sequence
NLQDHL

SEQ ID NO: 13876 - protein, 11 aa, Artificial sequence
  Protein classification predicting sequence
VVDPITRIEGH

SEQ ID NO: 13877 - protein, 6 aa, Artificial sequence
  Protein classification predicting sequence
TRIEGH

SEQ ID NO: 13878 - protein, 12 aa, Artificial sequence
  Protein classification predicting sequence
VHFYHLHALDWV

SEQ ID NO: 13879 - protein, 10 aa, Artificial sequence
  Protein classification predicting sequence
ILKGRDPRDA

SEQ ID NO: 13880 - protein, 5 aa, Artificial sequence
  Protein classification predicting sequence
CGVCT

SEQ ID NO: 13881 - protein, 7 aa, Artificial sequence
  Protein classification predicting sequence
VHFYHLH

SEQ ID NO: 13882 - protein, 6 aa, Artificial sequence
  Protein classification predicting sequence
WIKAPR

SEQ ID NO: 13883 - protein, 8 aa, Artificial sequence
  Protein classification predicting sequence
TLGRTAAR

SEQ ID NO: 13884 - protein, 8 aa, Artificial sequence
  Protein classification predicting sequence
HDHIVHFY

SEQ ID NO: 13885 - protein, 6 aa, Artificial sequence
  Protein classification predicting sequence
GYCLYK

SEQ ID NO: 13886 - protein, 9 aa, Artificial sequence
  Protein classification predicting sequence
GHGCIGCSE

SEQ ID NO: 13887 - protein, 6 aa, Artificial sequence
  Protein classification predicting sequence
CTGCSE

SEQ ID NO: 13888 - protein, 6 aa, Artificial sequence
  Protein classification predicting sequence
RRDFMK

SEQ ID NO: 13889 - protein, 7 aa, Artificial sequence
  Protein classification predicting sequence
ISLEYHE

SEQ ID NO: 13890 - protein, 9 aa, Artificial sequence
  Protein classification predicting sequence
VQAARPNPT

SEQ ID NO: 13891 - protein, 6 aa, Artificial sequence
  Protein classification predicting sequence
EKSIKL

SEQ ID NO: 13892 - protein, 6 aa, Artificial sequence
  Protein classification predicting sequence
QRSYTV

SEQ ID NO: 13893 - protein, 6 aa, Artificial sequence
  Protein classification predicting sequence
GWEGVG

SEQ ID NO: 13894 - protein, 7 aa, Artificial sequence
  Protein classification predicting sequence
AGSVIHA

SEQ ID NO: 13895 - protein, 7 aa, Artificial sequence
  Protein classification predicting sequence
SKDAIIE

SEQ ID NO: 13896 - protein, 6 aa, Artificial sequence
  Protein classification predicting sequence
SFLLIG

SEQ ID NO: 13897 - protein, 7 aa, Artificial sequence
  Protein classification predicting sequence
DIKKIVA

SEQ ID NO: 13898 - protein, 6 aa, Artificial sequence
  Protein classification predicting sequence
SQLGYM

SEQ ID NO: 13899 - protein, 6 aa, Artificial sequence
  Protein classification predicting sequence
GSVIHA

SEQ ID NO: 13900 - protein, 7 aa, Artificial sequence
  Protein classification predicting sequence
HTWLPDA

SEQ ID NO: 13901 - protein, 6 aa, Artificial sequence
  Protein classification predicting sequence
IAYSSV

SEQ ID NO: 13902 - protein, 5 aa, Artificial sequence
  Protein classification predicting sequence
LIYEW

SEQ ID NO: 13903 - protein, 6 aa, Artificial sequence
  Protein classification predicting sequence
SPRQSD

SEQ ID NO: 13904 - protein, 7 aa, Artificial sequence
  Protein classification predicting sequence
DVMIVAG

SEQ ID NO: 13905 - protein, 6 aa, Artificial sequence
  Protein classification predicting sequence
GFLYEW

SEQ ID NO: 13906 - protein, 7 aa, Artificial sequence
  Protein classification predicting sequence
LRSAAQM

SEQ ID NO: 13907 - protein, 6 aa, Artificial sequence
  Protein classification predicting sequence
RYDQLM

SEQ ID NO: 13908 - protein, 6 aa, Artificial sequence
  Protein classification predicting sequence
RTPFDL

SEQ ID NO: 13909 - protein, 8 aa, Artificial sequence
  Protein classification predicting sequence
PFDLPEAE

SEQ ID NO: 13910 - protein, 20 aa, Artificial sequence
  Protein classification predicting sequence
DGSRRTTRYDIDMTKCIYCG

SEQ ID NO: 13911 - protein, 17 aa, Artificial sequence
  Protein classification predicting sequence
CQEACPVDAIVEGPNFE

SEQ ID NO: 13912 - protein, 6 aa, Artificial sequence
  Protein classification predicting sequence
FALFFL

SEQ ID NO: 13913 - protein, 6 aa, Artificial sequence
  Protein classification predicting sequence
VWFLYS

SEQ ID NO: 13914 - protein, 6 aa, Artificial sequence
  Protein classification predicting sequence
SNSKYA

SEQ ID NO: 13915 - protein, 6 aa, Artificial sequence
  Protein classification predicting sequence
NRAPFD

SEQ ID NO: 13916 - protein, 7 aa, Artificial sequence
  Protein classification predicting sequence
PRYRYDQ

SEQ ID NO: 13917 - protein, 6 aa, Artificial sequence
  Protein classification predicting sequence
MRLGWK

SEQ ID NO: 13918 - protein, 7 aa, Artificial sequence
  Protein classification predicting sequence
SKYAFLG

SEQ ID NO: 13919 - protein, 14 aa, Artificial sequence
  Protein classification predicting sequence
GWKVFLPLSLAWVV

SEQ ID NO: 13920 - protein, 9 aa, Artificial sequence
  Protein classification predicting sequence
GLLQPIADA

SEQ ID NO: 13921 - protein, 8 aa, Artificial sequence
  Protein classification predicting sequence
PRYRYDQL

SEQ ID NO: 13922 - protein, 9 aa, Artificial sequence
  Protein classification predicting sequence
PRYRYDQLM

SEQ ID NO: 13923 - protein, 7 aa, Artificial sequence
  Protein classification predicting sequence
EAESELV

SEQ ID NO: 13924 - protein, 8 aa, Artificial sequence
  Protein classification predicting sequence
GPFGLLQP

SEQ ID NO: 13925 - protein, 12 aa, Artificial sequence
  Protein classification predicting sequence
VAGYNVEYSSMG

SEQ ID NO: 13926 - protein, 9 aa, Artificial sequence
  Protein classification predicting sequence
GWASNSKYA

SEQ ID NO: 13927 - protein, 5 aa, Artificial sequence
  Protein classification predicting sequence
PFHMW

SEQ ID NO: 13928 - protein, 5 aa, Artificial sequence
  Protein classification predicting sequence
TKYFL

SEQ ID NO: 13929 - protein, 6 aa, Artificial sequence
  Protein classification predicting sequence
APFHFW

SEQ ID NO: 13930 - protein, 6 aa, Artificial sequence
  Protein classification predicting sequence
SNKKHP

SEQ ID NO: 13931 - protein, 7 aa, Artificial sequence
  Protein classification predicting sequence
AYSSISH

SEQ ID NO: 13932 - protein, 6 aa, Artificial sequence
  Protein classification predicting sequence
YLLIGF

SEQ ID NO: 13933 - protein, 7 aa, Artificial sequence
  Protein classification predicting sequence
AYSSIAH

SEQ ID NO: 13934 - protein, 6 aa, Artificial sequence
  Protein classification predicting sequence
GFIYEW

SEQ ID NO: 13935 - protein, 7 aa, Artificial sequence
  Protein classification predicting sequence
SAYECGF

SEQ ID NO: 13936 - protein, 8 aa, Artificial sequence
  Protein classification predicting sequence
FDIRFYLV

SEQ ID NO: 13937 - protein, 6 aa, Artificial sequence
  Protein classification predicting sequence
LVAILF

SEQ ID NO: 13938 - protein, 8 aa, Artificial sequence
  Protein classification predicting sequence
YEWKKGAL

SEQ ID NO: 13939 - protein, 6 aa, Artificial sequence
  Protein classification predicting sequence
FLFPWA

SEQ ID NO: 13940 - protein, 10 aa, Artificial sequence
  Protein classification predicting sequence
SIELMLLAVN

SEQ ID NO: 13941 - protein, 6 aa, Artificial sequence
  Protein classification predicting sequence
TFRIRG

SEQ ID NO: 13942 - protein, 7 aa, Artificial sequence
  Protein classification predicting sequence
GSVILAG

SEQ ID NO: 13943 - protein, 5 aa, Artificial sequence
  Protein classification predicting sequence
LYMLI

SEQ ID NO: 13944 - protein, 6 aa, Artificial sequence
  Protein classification predicting sequence
FYLFFE

SEQ ID NO: 13945 - protein, 7 aa, Artificial sequence
  Protein classification predicting sequence
LIAYSSV

SEQ ID NO: 13946 - protein, 7 aa, Artificial sequence
  Protein classification predicting sequence
LKLGGYG

SEQ ID NO: 13947 - protein, 7 aa, Artificial sequence
  Protein classification predicting sequence
APTAGSV

SEQ ID NO: 13948 - protein, 8 aa, Artificial sequence
  Protein classification predicting sequence
LLKLGGYG

SEQ ID NO: 13949 - protein, 6 aa, Artificial sequence
  Protein classification predicting sequence
MIAHGL

SEQ ID NO: 13950 - protein, 8 aa, Artificial sequence
  Protein classification predicting sequence
LSVIAIIY

SEQ ID NO: 13951 - protein, 7 aa, Artificial sequence
  Protein classification predicting sequence
GWEGVGL

SEQ ID NO: 13952 - protein, 6 aa, Artificial sequence
  Protein classification predicting sequence
FKAMLF

SEQ ID NO: 13953 - protein, 7 aa, Artificial sequence
  Protein classification predicting sequence
VTAGVYL

SEQ ID NO: 13954 - protein, 7 aa, Artificial sequence
  Protein classification predicting sequence
STLSQLG

SEQ ID NO: 13955 - protein, 8 aa, Artificial sequence
  Protein classification predicting sequence
GFYSKDLI

SEQ ID NO: 13956 - protein, 6 aa, Artificial sequence
  Protein classification predicting sequence
HAATMV

SEQ ID NO: 13957 - protein, 11 aa, Artificial sequence
  Protein classification predicting sequence
AMEGPTPVSAL

SEQ ID NO: 13958 - protein, 7 aa, Artificial sequence
  Protein classification predicting sequence
GVCSYLL

SEQ ID NO: 13959 - protein, 6 aa, Artificial sequence
  Protein classification predicting sequence
FTFFML

SEQ ID NO: 13960 - protein, 10 aa, Artificial sequence
  Protein classification predicting sequence
HAFFKALLFL

SEQ ID NO: 13961 - protein, 6 aa, Artificial sequence
  Protein classification predicting sequence
GFYSKD

SEQ ID NO: 13962 - protein, 7 aa, Artificial sequence
  Protein classification predicting sequence
DIKKIIA

SEQ ID NO: 13963 - protein, 7 aa, Artificial sequence
  Protein classification predicting sequence
FFKAMLF

SEQ ID NO: 13964 - protein, 6 aa, Artificial sequence
  Protein classification predicting sequence
FKALLF

SEQ ID NO: 13965 - protein, 7 aa, Artificial sequence
  Protein classification predicting sequence
NRVGDFG

SEQ ID NO: 13966 - protein, 6 aa, Artificial sequence
  Protein classification predicting sequence
IGSLAL

SEQ ID NO: 13967 - protein, 7 aa, Artificial sequence
  Protein classification predicting sequence
HAFFKAM

SEQ ID NO: 13968 - protein, 6 aa, Artificial sequence
  Protein classification predicting sequence
GPTPVS

SEQ ID NO: 13969 - protein, 9 aa, Artificial sequence
  Protein classification predicting sequence
HAFFKAMLF

SEQ ID NO: 13970 - protein, 22 aa, Artificial sequence
  Protein classification predicting sequence
AMEGPTPVSALIHAATMVTAGV

SEQ ID NO: 13971 - protein, 10 aa, Artificial sequence
  Protein classification predicting sequence
THAFFKAMLF

SEQ ID NO: 13972 - protein, 10 aa, Artificial sequence
  Protein classification predicting sequence
PVSALIHAAT

SEQ ID NO: 13973 - protein, 7 aa, Artificial sequence
  Protein classification predicting sequence
FLFVVMM

SEQ ID NO: 13974 - protein, 8 aa, Artificial sequence
  Protein classification predicting sequence
LHRGTEKL

SEQ ID NO: 13975 - protein, 5 aa, Artificial sequence
  Protein classification predicting sequence
RCIAC

SEQ ID NO: 13976 - protein, 8 aa, Artificial sequence
  Protein classification predicting sequence
TFGLACCA

SEQ ID NO: 13977 - protein, 9 aa, Artificial sequence
  Protein classification predicting sequence
TNKMAPALR

SEQ ID NO: 13978 - protein, 5 aa, Artificial sequence
  Protein classification predicting sequence
PYECG

SEQ ID NO: 13979 - protein, 5 aa, Artificial sequence
  Protein classification predicting sequence
FWSMM

SEQ ID NO: 13980 - protein, 9 aa, Artificial sequence
  Protein classification predicting sequence
ILFIIFDLE

SEQ ID NO: 13981 - protein, 13 aa, Artificial sequence
  Protein classification predicting sequence
SMGSCANGGGYYH

SEQ ID NO: 13982 - protein, 15 aa, Artificial sequence
  Protein classification predicting sequence
SYSVVRGCDRIVPVD

SEQ ID NO: 13983 - protein, 8 aa, Artificial sequence
  Protein classification predicting sequence
SLSVYAIL

SEQ ID NO: 13984 - protein, 6 aa, Artificial sequence
  Protein classification predicting sequence
AGWSSN

SEQ ID NO: 13985 - protein, 8 aa, Artificial sequence
  Protein classification predicting sequence
GEHALRRY

SEQ ID NO: 13986 - protein, 7 aa, Artificial sequence
  Protein classification predicting sequence
AYSTMSQ

SEQ ID NO: 13987 - protein, 6 aa, Artificial sequence
  Protein classification predicting sequence
YLSYYI

SEQ ID NO: 13988 - protein, 6 aa, Artificial sequence
  Protein classification predicting sequence
HSSTMV

SEQ ID NO: 13989 - protein, 9 aa, Artificial sequence
  Protein classification predicting sequence
TMVTAGVYL

SEQ ID NO: 13990 - protein, 6 aa, Artificial sequence
  Protein classification predicting sequence
THAFFK

SEQ ID NO: 13991 - protein, 6 aa, Artificial sequence
  Protein classification predicting sequence
MEGPTP

SEQ ID NO: 13992 - protein, 6 aa, Artificial sequence
  Protein classification predicting sequence
LSLFTF

SEQ ID NO: 13993 - protein, 6 aa, Artificial sequence
  Protein classification predicting sequence
VTLAII

SEQ ID NO: 13994 - protein, 7 aa, Artificial sequence
  Protein classification predicting sequence
IIIGVWG

SEQ ID NO: 13995 - protein, 5 aa, Artificial sequence
  Protein classification predicting sequence
EHMWL

SEQ ID NO: 13996 - protein, 7 aa, Artificial sequence
  Protein classification predicting sequence
SSISHLG

SEQ ID NO: 13997 - protein, 7 aa, Artificial sequence
  Protein classification predicting sequence
LLLINYL

SEQ ID NO: 13998 - protein, 7 aa, Artificial sequence
  Protein classification predicting sequence
GYTSPWA

SEQ ID NO: 13999 - protein, 6 aa, Artificial sequence
  Protein classification predicting sequence
DPNSPR

SEQ ID NO: 14000 - protein, 6 aa, Artificial sequence
  Protein classification predicting sequence
YTSFQE

SEQ ID NO: 14001 - protein, 6 aa, Artificial sequence
  Protein classification predicting sequence
TLRDFG

SEQ ID NO: 14002 - protein, 7 aa, Artificial sequence
  Protein classification predicting sequence
PVEILRT

SEQ ID NO: 14003 - protein, 9 aa, Artificial sequence
  Protein classification predicting sequence
HALASVRAV

SEQ ID NO: 14004 - protein, 6 aa, Artificial sequence
  Protein classification predicting sequence
GQLGPF

SEQ ID NO: 14005 - protein, 6 aa, Artificial sequence
  Protein classification predicting sequence
HSFDPC

SEQ ID NO: 14006 - protein, 9 aa, Artificial sequence
  Protein classification predicting sequence
VQAAKPNPT

SEQ ID NO: 14007 - protein, 6 aa, Artificial sequence
  Protein classification predicting sequence
CIGCSE

SEQ ID NO: 14008 - protein, 6 aa, Artificial sequence
  Protein classification predicting sequence
GCPPNP

SEQ ID NO: 14009 - protein, 7 aa, Artificial sequence
  Protein classification predicting sequence
GRPKMFY

SEQ ID NO: 14010 - protein, 8 aa, Artificial sequence
  Protein classification predicting sequence
GCKGPETY

SEQ ID NO: 14011 - protein, 10 aa, Artificial sequence
  Protein classification predicting sequence
INIPGCPPNP

SEQ ID NO: 14012 - protein, 7 aa, Artificial sequence
  Protein classification predicting sequence
HFDAGEF

SEQ ID NO: 14013 - protein, 5 aa, Artificial sequence
  Protein classification predicting sequence
HFYHL

SEQ ID NO: 14014 - protein, 7 aa, Artificial sequence
  Protein classification predicting sequence
DDALRIA

SEQ ID NO: 14015 - protein, 6 aa, Artificial sequence
  Protein classification predicting sequence
ENRHGD

SEQ ID NO: 14016 - protein, 6 aa, Artificial sequence
  Protein classification predicting sequence
LIGETI

SEQ ID NO: 14017 - protein, 6 aa, Artificial sequence
  Protein classification predicting sequence
PEEFRP

SEQ ID NO: 14018 - protein, 9 aa, Artificial sequence
  Protein classification predicting sequence
PEEFRPERF

SEQ ID NO: 14019 - protein, 8 aa, Artificial sequence
  Protein classification predicting sequence
HPDIQKKL

SEQ ID NO: 14020 - protein, 7 aa, Artificial sequence
  Protein classification predicting sequence
FRPERFL

SEQ ID NO: 14021 - protein, 6 aa, Artificial sequence
  Protein classification predicting sequence
SRGLIA

SEQ ID NO: 14022 - protein, 6 aa, Artificial sequence
  Protein classification predicting sequence
RIRPVA

SEQ ID NO: 14023 - protein, 9 aa, Artificial sequence
  Protein classification predicting sequence
AKKGIPLIF

SEQ ID NO: 14024 - protein, 8 aa, Artificial sequence
  Protein classification predicting sequence
CPCHGSQY

SEQ ID NO: 14025 - protein, 6 aa, Artificial sequence
  Protein classification predicting sequence
RGPAPL

SEQ ID NO: 14026 - protein, 5 aa, Artificial sequence
  Protein classification predicting sequence
CPCHG

SEQ ID NO: 14027 - protein, 6 aa, Artificial sequence
  Protein classification predicting sequence
CTHLGC

SEQ ID NO: 14028 - protein, 6 aa, Artificial sequence
  Protein classification predicting sequence
CPCHGS

SEQ ID NO: 14029 - protein, 6 aa, Artificial sequence
  Protein classification predicting sequence
VIISAP

SEQ ID NO: 14030 - protein, 7 aa, Artificial sequence
  Protein classification predicting sequence
SFPLSLM

SEQ ID NO: 14031 - protein, 4 aa, Artificial sequence
  Protein classification predicting sequence
WYWS

SEQ ID NO: 14032 - protein, 6 aa, Artificial sequence
  Protein classification predicting sequence
KGTNII

SEQ ID NO: 14033 - protein, 6 aa, Artificial sequence
  Protein classification predicting sequence
NPEAWP

SEQ ID NO: 14034 - protein, 6 aa, Artificial sequence
  Protein classification predicting sequence
KAIFQG

SEQ ID NO: 14035 - protein, 5 aa, Artificial sequence
  Protein classification predicting sequence
MPGGQ

SEQ ID NO: 14036 - protein, 6 aa, Artificial sequence
  Protein classification predicting sequence
CNIGSV

SEQ ID NO: 14037 - protein, 6 aa, Artificial sequence
  Protein classification predicting sequence
TVQHQL

SEQ ID NO: 14038 - protein, 6 aa, Artificial sequence
  Protein classification predicting sequence
DYMKLY

SEQ ID NO: 14039 - protein, 6 aa, Artificial sequence
  Protein classification predicting sequence
RYAEEQ

SEQ ID NO: 14040 - protein, 6 aa, Artificial sequence
  Protein classification predicting sequence
CEAICP

SEQ ID NO: 14041 - protein, 6 aa, Artificial sequence
  Protein classification predicting sequence
ICNIGS

SEQ ID NO: 14042 - protein, 6 aa, Artificial sequence
  Protein classification predicting sequence
KDHPGG

SEQ ID NO: 14043 - protein, 6 aa, Artificial sequence
  Protein classification predicting sequence
LKPNPK

SEQ ID NO: 14044 - protein, 6 aa, Artificial sequence
  Protein classification predicting sequence
WTTNSG

SEQ ID NO: 14045 - protein, 8 aa, Artificial sequence
  Protein classification predicting sequence
SRNNILRT

SEQ ID NO: 14046 - protein, 6 aa, Artificial sequence
  Protein classification predicting sequence
IRLIAR

SEQ ID NO: 14047 - protein, 7 aa, Artificial sequence
  Protein classification predicting sequence
LPELHAL

SEQ ID NO: 14048 - protein, 6 aa, Artificial sequence
  Protein classification predicting sequence
FITIAL

SEQ ID NO: 14049 - protein, 5 aa, Artificial sequence
  Protein classification predicting sequence
SEHHF

SEQ ID NO: 14050 - protein, 6 aa, Artificial sequence
  Protein classification predicting sequence
RQSSGR

SEQ ID NO: 14051 - protein, 6 aa, Artificial sequence
  Protein classification predicting sequence
NYDGDV

SEQ ID NO: 14052 - protein, 5 aa, Artificial sequence
  Protein classification predicting sequence
WSNWT

SEQ ID NO: 14053 - protein, 6 aa, Artificial sequence
  Protein classification predicting sequence
IKGIYG

SEQ ID NO: 14054 - protein, 7 aa, Artificial sequence
  Protein classification predicting sequence
IVSGKDY

SEQ ID NO: 14055 - protein, 6 aa, Artificial sequence
  Protein classification predicting sequence
FFKALL

SEQ ID NO: 14056 - protein, 7 aa, Artificial sequence
  Protein classification predicting sequence
RFFLLAV

SEQ ID NO: 14057 - protein, 8 aa, Artificial sequence
  Protein classification predicting sequence
DTAEAIDF

SEQ ID NO: 14058 - protein, 7 aa, Artificial sequence
  Protein classification predicting sequence
LGHEAAG

SEQ ID NO: 14059 - protein, 5 aa, Artificial sequence
  Protein classification predicting sequence
GDWPL

SEQ ID NO: 14060 - protein, 6 aa, Artificial sequence
  Protein classification predicting sequence
GGPHAA

SEQ ID NO: 14061 - protein, 6 aa, Artificial sequence
  Protein classification predicting sequence
EVRVKI

SEQ ID NO: 14062 - protein, 7 aa, Artificial sequence
  Protein classification predicting sequence
LSSLPEI

SEQ ID NO: 14063 - protein, 7 aa, Artificial sequence
  Protein classification predicting sequence
GLEIVKK

SEQ ID NO: 14064 - protein, 6 aa, Artificial sequence
  Protein classification predicting sequence
LTMWTP

SEQ ID NO: 14065 - protein, 5 aa, Artificial sequence
  Protein classification predicting sequence
CTPCR

SEQ ID NO: 14066 - protein, 6 aa, Artificial sequence
  Protein classification predicting sequence
NDLGNP

SEQ ID NO: 14067 - protein, 7 aa, Artificial sequence
  Protein classification predicting sequence
IGDPRKD

SEQ ID NO: 14068 - protein, 6 aa, Artificial sequence
  Protein classification predicting sequence
VTEFQP

SEQ ID NO: 14069 - protein, 6 aa, Artificial sequence
  Protein classification predicting sequence
STASPL

SEQ ID NO: 14070 - protein, 7 aa, Artificial sequence
  Protein classification predicting sequence
IELGATV

SEQ ID NO: 14071 - protein, 8 aa, Artificial sequence
  Protein classification predicting sequence
VKPGSQGV

SEQ ID NO: 14072 - protein, 6 aa, Artificial sequence
  Protein classification predicting sequence
RGETRG

SEQ ID NO: 14073 - protein, 6 aa, Artificial sequence
  Protein classification predicting sequence
AGDYKF

SEQ ID NO: 14074 - protein, 6 aa, Artificial sequence
  Protein classification predicting sequence
VFFFYP

SEQ ID NO: 14075 - protein, 6 aa, Artificial sequence
  Protein classification predicting sequence
GYRHID

SEQ ID NO: 14076 - protein, 7 aa, Artificial sequence
  Protein classification predicting sequence
LNKPGLK

SEQ ID NO: 14077 - protein, 8 aa, Artificial sequence
  Protein classification predicting sequence
NQVECHPY

SEQ ID NO: 14078 - protein, 7 aa, Artificial sequence
  Protein classification predicting sequence
PLIGLGT

SEQ ID NO: 14079 - protein, 6 aa, Artificial sequence
  Protein classification predicting sequence
VVIPKS

SEQ ID NO: 14080 - protein, 8 aa, Artificial sequence
  Protein classification predicting sequence
LELGGKSP

SEQ ID NO: 14081 - protein, 6 aa, Artificial sequence
  Protein classification predicting sequence
PFGGFK

SEQ ID NO: 14082 - protein, 8 aa, Artificial sequence
  Protein classification predicting sequence
MQEEIFGP

SEQ ID NO: 14083 - protein, 6 aa, Artificial sequence
  Protein classification predicting sequence
EEIFGP

SEQ ID NO: 14084 - protein, 6 aa, Artificial sequence
  Protein classification predicting sequence
IISGPK

SEQ ID NO: 14085 - protein, 5 aa, Artificial sequence
  Protein classification predicting sequence
LIRFH

SEQ ID NO: 14086 - protein, 6 aa, Artificial sequence
  Protein classification predicting sequence
PTCFER

SEQ ID NO: 14087 - protein, 6 aa, Artificial sequence
  Protein classification predicting sequence
GVSNFN

SEQ ID NO: 14088 - protein, 5 aa, Artificial sequence
  Protein classification predicting sequence
ECHPY

SEQ ID NO: 14089 - protein, 7 aa, Artificial sequence
  Protein classification predicting sequence
GGFKMSG

SEQ ID NO: 14090 - protein, 5 aa, Artificial sequence
  Protein classification predicting sequence
PWNFP

SEQ ID NO: 14091 - protein, 6 aa, Artificial sequence
  Protein classification predicting sequence
EIFGPV

SEQ ID NO: 14092 - protein, 7 aa, Artificial sequence
  Protein classification predicting sequence
GNTVVLK

SEQ ID NO: 14093 - protein, 6 aa, Artificial sequence
  Protein classification predicting sequence
ESTFQG

SEQ ID NO: 14094 - protein, 6 aa, Artificial sequence
  Protein classification predicting sequence
DSSIFP

SEQ ID NO: 14095 - protein, 5 aa, Artificial sequence
  Protein classification predicting sequence
QGQCC

SEQ ID NO: 14096 - protein, 7 aa, Artificial sequence
  Protein classification predicting sequence
GYFIQPT

SEQ ID NO: 14097 - protein, 6 aa, Artificial sequence
  Protein classification predicting sequence
VTFTGS

SEQ ID NO: 14098 - protein, 7 aa, Artificial sequence
  Protein classification predicting sequence
EEIFGPV

SEQ ID NO: 14099 - protein, 8 aa, Artificial sequence
  Protein classification predicting sequence
KGYFVEPT

SEQ ID NO: 14100 - protein, 6 aa, Artificial sequence
  Protein classification predicting sequence
TTFKDE

SEQ ID NO: 14101 - protein, 7 aa, Artificial sequence
  Protein classification predicting sequence
ELGGKSP

SEQ ID NO: 14102 - protein, 11 aa, Artificial sequence
  Protein classification predicting sequence
ILNKPGLKYKP

SEQ ID NO: 14103 - protein, 6 aa, Artificial sequence
  Protein classification predicting sequence
NLVKGA

SEQ ID NO: 14104 - protein, 6 aa, Artificial sequence
  Protein classification predicting sequence
VATPMD

SEQ ID NO: 14105 - protein, 7 aa, Artificial sequence
  Protein classification predicting sequence
KVLLIEN

SEQ ID NO: 14106 - protein, 6 aa, Artificial sequence
  Protein classification predicting sequence
SNKDGP

SEQ ID NO: 14107 - protein, 6 aa, Artificial sequence
  Protein classification predicting sequence
KVKDEK

SEQ ID NO: 14108 - protein, 6 aa, Artificial sequence
  Protein classification predicting sequence
YRDFEG

SEQ ID NO: 14109 - protein, 5 aa, Artificial sequence
  Protein classification predicting sequence
QGFML

SEQ ID NO: 14110 - protein, 7 aa, Artificial sequence
  Protein classification predicting sequence
DAHANAV

SEQ ID NO: 14111 - protein, 6 aa, Artificial sequence
  Protein classification predicting sequence
QWSGDG

SEQ ID NO: 14112 - protein, 6 aa, Artificial sequence
  Protein classification predicting sequence
PQSLAH

SEQ ID NO: 14113 - protein, 6 aa, Artificial sequence
  Protein classification predicting sequence
PAGGSA

SEQ ID NO: 14114 - protein, 7 aa, Artificial sequence
  Protein classification predicting sequence
GLASSAL

SEQ ID NO: 14115 - protein, 6 aa, Artificial sequence
  Protein classification predicting sequence
MSGGAE

SEQ ID NO: 14116 - protein, 6 aa, Artificial sequence
  Protein classification predicting sequence
ALAIYG

SEQ ID NO: 14117 - protein, 6 aa, Artificial sequence
  Protein classification predicting sequence
APDLPA

SEQ ID NO: 14118 - protein, 7 aa, Artificial sequence
  Protein classification predicting sequence
GGGISGL

SEQ ID NO: 14119 - protein, 5 aa, Artificial sequence
  Protein classification predicting sequence
LCFVL

SEQ ID NO: 14120 - protein, 5 aa, Artificial sequence
  Protein classification predicting sequence
YKFKQ

SEQ ID NO: 14121 - protein, 8 aa, Artificial sequence
  Protein classification predicting sequence
VVGGGISG

SEQ ID NO: 14122 - protein, 6 aa, Artificial sequence
  Protein classification predicting sequence
LGADDY

SEQ ID NO: 14123 - protein, 6 aa, Artificial sequence
  Protein classification predicting sequence
NPYESQ

SEQ ID NO: 14124 - protein, 5 aa, Artificial sequence
  Protein classification predicting sequence
HKGNI

SEQ ID NO: 14125 - protein, 7 aa, Artificial sequence
  Protein classification predicting sequence
GGSGGLA

SEQ ID NO: 14126 - protein, 5 aa, Artificial sequence
  Protein classification predicting sequence
GYPHL

SEQ ID NO: 14127 - protein, 6 aa, Artificial sequence
  Protein classification predicting sequence
KVGIVG

SEQ ID NO: 14128 - protein, 6 aa, Artificial sequence
  Protein classification predicting sequence
NIRFGF

SEQ ID NO: 14129 - protein, 6 aa, Artificial sequence
  Protein classification predicting sequence
LLMKHP

SEQ ID NO: 14130 - protein, 6 aa, Artificial sequence
  Protein classification predicting sequence
TPDEAR

SEQ ID NO: 14131 - protein, 6 aa, Artificial sequence
  Protein classification predicting sequence
TAGLPR

SEQ ID NO: 14132 - protein, 5 aa, Artificial sequence
  Protein classification predicting sequence
HEVVH

SEQ ID NO: 14133 - protein, 6 aa, Artificial sequence
  Protein classification predicting sequence
ILQELT

SEQ ID NO: 14134 - protein, 7 aa, Artificial sequence
  Protein classification predicting sequence
LFTKEPL

SEQ ID NO: 14135 - protein, 6 aa, Artificial sequence
  Protein classification predicting sequence
KPSEVT

SEQ ID NO: 14136 - protein, 6 aa, Artificial sequence
  Protein classification predicting sequence
INAGIV

SEQ ID NO: 14137 - protein, 6 aa, Artificial sequence
  Protein classification predicting sequence
KSGTSG

SEQ ID NO: 14138 - protein, 6 aa, Artificial sequence
  Protein classification predicting sequence
DAMKLF

SEQ ID NO: 14139 - protein, 6 aa, Artificial sequence
  Protein classification predicting sequence
ENEVFL

SEQ ID NO: 14140 - protein, 7 aa, Artificial sequence
  Protein classification predicting sequence
KVDEPLK

SEQ ID NO: 14141 - protein, 7 aa, Artificial sequence
  Protein classification predicting sequence
EIGALTG

SEQ ID NO: 14142 - protein, 6 aa, Artificial sequence
  Protein classification predicting sequence
IDISGD

SEQ ID NO: 14143 - protein, 6 aa, Artificial sequence
  Protein classification predicting sequence
LLLEHP

SEQ ID NO: 14144 - protein, 5 aa, Artificial sequence
  Protein classification predicting sequence
NIHYG

SEQ ID NO: 14145 - protein, 6 aa, Artificial sequence
  Protein classification predicting sequence
PLKTPI

SEQ ID NO: 14146 - protein, 6 aa, Artificial sequence
  Protein classification predicting sequence
GAGGAG

SEQ ID NO: 14147 - protein, 6 aa, Artificial sequence
  Protein classification predicting sequence
AEEFSG

SEQ ID NO: 14148 - protein, 6 aa, Artificial sequence
  Protein classification predicting sequence
WTGLRP

SEQ ID NO: 14149 - protein, 5 aa, Artificial sequence
  Protein classification predicting sequence
GHSMS

SEQ ID NO: 14150 - protein, 6 aa, Artificial sequence
  Protein classification predicting sequence
KNFLPL

SEQ ID NO: 14151 - protein, 5 aa, Artificial sequence
  Protein classification predicting sequence
VYTPT

SEQ ID NO: 14152 - protein, 6 aa, Artificial sequence
  Protein classification predicting sequence
DSVISL

SEQ ID NO: 14153 - protein, 6 aa, Artificial sequence
  Protein classification predicting sequence
IGALRA

SEQ ID NO: 14154 - protein, 6 aa, Artificial sequence
  Protein classification predicting sequence
ARGLQT

SEQ ID NO: 14155 - protein, 6 aa, Artificial sequence
  Protein classification predicting sequence
ILYNRI

SEQ ID NO: 14156 - protein, 7 aa, Artificial sequence
  Protein classification predicting sequence
VVNRTIE

SEQ ID NO: 14157 - protein, 7 aa, Artificial sequence
  Protein classification predicting sequence
IVIANRT

SEQ ID NO: 14158 - protein, 6 aa, Artificial sequence
  Protein classification predicting sequence
IGAGGA

SEQ ID NO: 14159 - protein, 6 aa, Artificial sequence
  Protein classification predicting sequence
LEEDKF

SEQ ID NO: 14160 - protein, 6 aa, Artificial sequence
  Protein classification predicting sequence
VAIKMG

SEQ ID NO: 14161 - protein, 6 aa, Artificial sequence
  Protein classification predicting sequence
GKKEPF

SEQ ID NO: 14162 - protein, 5 aa, Artificial sequence
  Protein classification predicting sequence
RMVKW

SEQ ID NO: 14163 - protein, 6 aa, Artificial sequence
  Protein classification predicting sequence
IVVGDP

SEQ ID NO: 14164 - protein, 12 aa, Artificial sequence
  Protein classification predicting sequence
FGLASGVFTRDI

SEQ ID NO: 14165 - protein, 6 aa, Artificial sequence
  Protein classification predicting sequence
LFIENG

SEQ ID NO: 14166 - protein, 7 aa, Artificial sequence
  Protein classification predicting sequence
GTGIAPF

SEQ ID NO: 14167 - protein, 5 aa, Artificial sequence
  Protein classification predicting sequence
ATKWW

SEQ ID NO: 14168 - protein, 5 aa, Artificial sequence
  Protein classification predicting sequence
IQYHF

SEQ ID NO: 14169 - protein, 6 aa, Artificial sequence
  Protein classification predicting sequence
PETRVI

SEQ ID NO: 14170 - protein, 6 aa, Artificial sequence
  Protein classification predicting sequence
TKLIFD

SEQ ID NO: 14171 - protein, 6 aa, Artificial sequence
  Protein classification predicting sequence
RMHLPG

SEQ ID NO: 14172 - protein, 6 aa, Artificial sequence
  Protein classification predicting sequence
LNGDYI

SEQ ID NO: 14173 - protein, 9 aa, Artificial sequence
  Protein classification predicting sequence
RANATEFGL

SEQ ID NO: 14174 - protein, 6 aa, Artificial sequence
  Protein classification predicting sequence
ELGGKS

SEQ ID NO: 14175 - protein, 7 aa, Artificial sequence
  Protein classification predicting sequence
GNFYSAG

SEQ ID NO: 14176 - protein, 8 aa, Artificial sequence
  Protein classification predicting sequence
EAGLPAGV

SEQ ID NO: 14177 - protein, 6 aa, Artificial sequence
  Protein classification predicting sequence
LELGGK

SEQ ID NO: 14178 - protein, 7 aa, Artificial sequence
  Protein classification predicting sequence
KPAAVNW

SEQ ID NO: 14179 - protein, 8 aa, Artificial sequence
  Protein classification predicting sequence
ANDTDYGL

SEQ ID NO: 14180 - protein, 6 aa, Artificial sequence
  Protein classification predicting sequence
TPLTAL

SEQ ID NO: 14181 - protein, 5 aa, Artificial sequence
  Protein classification predicting sequence
AGICW

SEQ ID NO: 14182 - protein, 6 aa, Artificial sequence
  Protein classification predicting sequence
ADADDL

SEQ ID NO: 14183 - protein, 7 aa, Artificial sequence
  Protein classification predicting sequence
DADLDLA

SEQ ID NO: 14184 - protein, 10 aa, Artificial sequence
  Protein classification predicting sequence
DVDKAVAAAK

SEQ ID NO: 14185 - protein, 7 aa, Artificial sequence
  Protein classification predicting sequence
KRISFIR

SEQ ID NO: 14186 - protein, 6 aa, Artificial sequence
  Protein classification predicting sequence
DPVVMV

SEQ ID NO: 14187 - protein, 8 aa, Artificial sequence
  Protein classification predicting sequence
RVNGVGPG

SEQ ID NO: 14188 - protein, 5 aa, Artificial sequence
  Protein classification predicting sequence
CNERQ

SEQ ID NO: 14189 - protein, 7 aa, Artificial sequence
  Protein classification predicting sequence
LTQTAAR

SEQ ID NO: 14190 - protein, 6 aa, Artificial sequence
  Protein classification predicting sequence
AQFGDF

SEQ ID NO: 14191 - protein, 6 aa, Artificial sequence
  Protein classification predicting sequence
LPRTRA

SEQ ID NO: 14192 - protein, 6 aa, Artificial sequence
  Protein classification predicting sequence
RGLSRG

SEQ ID NO: 14193 - protein, 7 aa, Artificial sequence
  Protein classification predicting sequence
GKRLAQV

SEQ ID NO: 14194 - protein, 6 aa, Artificial sequence
  Protein classification predicting sequence
GEETLI

SEQ ID NO: 14195 - protein, 7 aa, Artificial sequence
  Protein classification predicting sequence
WAIGRDP

SEQ ID NO: 14196 - protein, 6 aa, Artificial sequence
  Protein classification predicting sequence
NATKNN

SEQ ID NO: 14197 - protein, 6 aa, Artificial sequence
  Protein classification predicting sequence
ASTKEA

SEQ ID NO: 14198 - protein, 6 aa, Artificial sequence
  Protein classification predicting sequence
YVIPED

SEQ ID NO: 14199 - protein, 6 aa, Artificial sequence
  Protein classification predicting sequence
VAGSNI

SEQ ID NO: 14200 - protein, 6 aa, Artificial sequence
  Protein classification predicting sequence
GHLLLR

SEQ ID NO: 14201 - protein, 6 aa, Artificial sequence
  Protein classification predicting sequence
PSLLED

SEQ ID NO: 14202 - protein, 7 aa, Artificial sequence
  Protein classification predicting sequence
PSLLEDP

SEQ ID NO: 14203 - protein, 5 aa, Artificial sequence
  Protein classification predicting sequence
VKFHW

SEQ ID NO: 14204 - protein, 6 aa, Artificial sequence
  Protein classification predicting sequence
KRVRTE

SEQ ID NO: 14205 - protein, 7 aa, Artificial sequence
  Protein classification predicting sequence
SIFNESL

SEQ ID NO: 14206 - protein, 6 aa, Artificial sequence
  Protein classification predicting sequence
SSLTVG

SEQ ID NO: 14207 - protein, 5 aa, Artificial sequence
  Protein classification predicting sequence
EHFLD

SEQ ID NO: 14208 - protein, 5 aa, Artificial sequence
  Protein classification predicting sequence
ESTFQ

SEQ ID NO: 14209 - protein, 6 aa, Artificial sequence
  Protein classification predicting sequence
AMDPAR

SEQ ID NO: 14210 - protein, 6 aa, Artificial sequence
  Protein classification predicting sequence
RREKAT

SEQ ID NO: 14211 - protein, 6 aa, Artificial sequence
  Protein classification predicting sequence
DPLGSA

SEQ ID NO: 14212 - protein, 5 aa, Artificial sequence
  Protein classification predicting sequence
YEDIQ

SEQ ID NO: 14213 - protein, 6 aa, Artificial sequence
  Protein classification predicting sequence
MVQNLM

SEQ ID NO: 14214 - protein, 6 aa, Artificial sequence
  Protein classification predicting sequence
KNTVHV

SEQ ID NO: 14215 - protein, 6 aa, Artificial sequence
  Protein classification predicting sequence
RALFNL

SEQ ID NO: 14216 - protein, 6 aa, Artificial sequence
  Protein classification predicting sequence
QHAPRS

SEQ ID NO: 14217 - protein, 6 aa, Artificial sequence
  Protein classification predicting sequence
TYKWVN

SEQ ID NO: 14218 - protein, 6 aa, Artificial sequence
  Protein classification predicting sequence
QADEVQ

SEQ ID NO: 14219 - protein, 6 aa, Artificial sequence
  Protein classification predicting sequence
ADADYG

SEQ ID NO: 14220 - protein, 6 aa, Artificial sequence
  Protein classification predicting sequence
GTTTRD

SEQ ID NO: 14221 - protein, 6 aa, Artificial sequence
  Protein classification predicting sequence
AITDPD

SEQ ID NO: 14222 - protein, 5 aa, Artificial sequence
  Protein classification predicting sequence
YMQNG

SEQ ID NO: 14223 - protein, 7 aa, Artificial sequence
  Protein classification predicting sequence
INKEGKA

SEQ ID NO: 14224 - protein, 5 aa, Artificial sequence
  Protein classification predicting sequence
WWPKM

SEQ ID NO: 14225 - protein, 6 aa, Artificial sequence
  Protein classification predicting sequence
GVFTDK

SEQ ID NO: 14226 - protein, 6 aa, Artificial sequence
  Protein classification predicting sequence
VGYFEL

SEQ ID NO: 14227 - protein, 6 aa, Artificial sequence
  Protein classification predicting sequence
PAALFH

SEQ ID NO: 14228 - protein, 6 aa, Artificial sequence
  Protein classification predicting sequence
DTISTA

SEQ ID NO: 14229 - protein, 6 aa, Artificial sequence
  Protein classification predicting sequence
WAARRR

SEQ ID NO: 14230 - protein, 7 aa, Artificial sequence
  Protein classification predicting sequence
GLSVADL

SEQ ID NO: 14231 - protein, 6 aa, Artificial sequence
  Protein classification predicting sequence
GEFECT

SEQ ID NO: 14232 - protein, 6 aa, Artificial sequence
  Protein classification predicting sequence
NEGQWA

SEQ ID NO: 14233 - protein, 6 aa, Artificial sequence
  Protein classification predicting sequence
RAAFNS

SEQ ID NO: 14234 - protein, 5 aa, Artificial sequence
  Protein classification predicting sequence
YADTQ

SEQ ID NO: 14235 - protein, 6 aa, Artificial sequence
  Protein classification predicting sequence
KEAGFP

SEQ ID NO: 14236 - protein, 5 aa, Artificial sequence
  Protein classification predicting sequence
HGFFQ

SEQ ID NO: 14237 - protein, 6 aa, Artificial sequence
  Protein classification predicting sequence
ERIPER

SEQ ID NO: 14238 - protein, 7 aa, Artificial sequence
  Protein classification predicting sequence
KAYSFEL

SEQ ID NO: 14239 - protein, 7 aa, Artificial sequence
  Protein classification predicting sequence
MLAGGTG

SEQ ID NO: 14240 - protein, 6 aa, Artificial sequence
  Protein classification predicting sequence
CGPPPM

SEQ ID NO: 14241 - protein, 7 aa, Artificial sequence
  Protein classification predicting sequence
LAIEAYE

SEQ ID NO: 14242 - protein, 6 aa, Artificial sequence
  Protein classification predicting sequence
QTEVMK

SEQ ID NO: 14243 - protein, 6 aa, Artificial sequence
  Protein classification predicting sequence
TFTSGK

SEQ ID NO: 14244 - protein, 5 aa, Artificial sequence
  Protein classification predicting sequence
CLPYF

SEQ ID NO: 14245 - protein, 6 aa, Artificial sequence
  Protein classification predicting sequence
AFSRDQ

SEQ ID NO: 14246 - protein, 5 aa, Artificial sequence
  Protein classification predicting sequence
IQYKT

SEQ ID NO: 14247 - protein, 6 aa, Artificial sequence
  Protein classification predicting sequence
ENTRLF

SEQ ID NO: 14248 - protein, 6 aa, Artificial sequence
  Protein classification predicting sequence
VLRIAL

SEQ ID NO: 14249 - protein, 6 aa, Artificial sequence
  Protein classification predicting sequence
GPGNIY

SEQ ID NO: 14250 - protein, 7 aa, Artificial sequence
  Protein classification predicting sequence
LASEYGI

SEQ ID NO: 14251 - protein, 7 aa, Artificial sequence
  Protein classification predicting sequence
VAVVKEL

SEQ ID NO: 14252 - protein, 7 aa, Artificial sequence
  Protein classification predicting sequence
DAVKLFT

SEQ ID NO: 14253 - protein, 7 aa, Artificial sequence
  Protein classification predicting sequence
HLPESFV

SEQ ID NO: 14254 - protein, 6 aa, Artificial sequence
  Protein classification predicting sequence
GEDTAD

SEQ ID NO: 14255 - protein, 6 aa, Artificial sequence
  Protein classification predicting sequence
YLLTFL

SEQ ID NO: 14256 - protein, 6 aa, Artificial sequence
  Protein classification predicting sequence
APGGND

SEQ ID NO: 14257 - protein, 5 aa, Artificial sequence
  Protein classification predicting sequence
HWFPL

SEQ ID NO: 14258 - protein, 6 aa, Artificial sequence
  Protein classification predicting sequence
HGCPPP

SEQ ID NO: 14259 - protein, 7 aa, Artificial sequence
  Protein classification predicting sequence
NINTAYF

SEQ ID NO: 14260 - protein, 6 aa, Artificial sequence
  Protein classification predicting sequence
GTMWRG

SEQ ID NO: 14261 - protein, 6 aa, Artificial sequence
  Protein classification predicting sequence
GCVVNG

SEQ ID NO: 14262 - protein, 6 aa, Artificial sequence
  Protein classification predicting sequence
DRNLNT

SEQ ID NO: 14263 - protein, 6 aa, Artificial sequence
  Protein classification predicting sequence
ELATPS

SEQ ID NO: 14264 - protein, 7 aa, Artificial sequence
  Protein classification predicting sequence
VQTLIAD

SEQ ID NO: 14265 - protein, 6 aa, Artificial sequence
  Protein classification predicting sequence
IGLLGF

SEQ ID NO: 14266 - protein, 6 aa, Artificial sequence
  Protein classification predicting sequence
NWINKQ

SEQ ID NO: 14267 - protein, 5 aa, Artificial sequence
  Protein classification predicting sequence
SYMIP

SEQ ID NO: 14268 - protein, 5 aa, Artificial sequence
  Protein classification predicting sequence
GPSHA

SEQ ID NO: 14269 - protein, 7 aa, Artificial sequence
  Protein classification predicting sequence
SLGEFLA

SEQ ID NO: 14270 - protein, 6 aa, Artificial sequence
  Protein classification predicting sequence
HPFNSE

SEQ ID NO: 14271 - protein, 5 aa, Artificial sequence
  Protein classification predicting sequence
FETWS

SEQ ID NO: 14272 - protein, 5 aa, Artificial sequence
  Protein classification predicting sequence
TMMIL

SEQ ID NO: 14273 - protein, 5 aa, Artificial sequence
  Protein classification predicting sequence
WVSNK

SEQ ID NO: 14274 - protein, 6 aa, Artificial sequence
  Protein classification predicting sequence
NRSSIF

SEQ ID NO: 14275 - protein, 5 aa, Artificial sequence
  Protein classification predicting sequence
WLFLY

SEQ ID NO: 14276 - protein, 7 aa, Artificial sequence
  Protein classification predicting sequence
ATFTITD

SEQ ID NO: 14277 - protein, 6 aa, Artificial sequence
  Protein classification predicting sequence
TDIGAS

SEQ ID NO: 14278 - protein, 6 aa, Artificial sequence
  Protein classification predicting sequence
ALFFMA

SEQ ID NO: 14279 - protein, 6 aa, Artificial sequence
  Protein classification predicting sequence
ISSIVF

SEQ ID NO: 14280 - protein, 6 aa, Artificial sequence
  Protein classification predicting sequence
VEYNVS

SEQ ID NO: 14281 - protein, 7 aa, Artificial sequence
  Protein classification predicting sequence
LARQLLF

SEQ ID NO: 14282 - protein, 6 aa, Artificial sequence
  Protein classification predicting sequence
FASIFW

SEQ ID NO: 14283 - protein, 6 aa, Artificial sequence
  Protein classification predicting sequence
REMKYQ

SEQ ID NO: 14284 - protein, 6 aa, Artificial sequence
  Protein classification predicting sequence
DLLIKI

SEQ ID NO: 14285 - protein, 6 aa, Artificial sequence
  Protein classification predicting sequence
ENFINE

SEQ ID NO: 14286 - protein, 5 aa, Artificial sequence
  Protein classification predicting sequence
HHRHK

SEQ ID NO: 14287 - protein, 7 aa, Artificial sequence
  Protein classification predicting sequence
TPVLVLS

SEQ ID NO: 14288 - protein, 6 aa, Artificial sequence
  Protein classification predicting sequence
GLLNFM

SEQ ID NO: 14289 - protein, 5 aa, Artificial sequence
  Protein classification predicting sequence
GPQHP

SEQ ID NO: 14290 - protein, 6 aa, Artificial sequence
  Protein classification predicting sequence
VVGSGN

SEQ ID NO: 14291 - protein, 6 aa, Artificial sequence
  Protein classification predicting sequence
LDGEKV

SEQ ID NO: 14292 - protein, 7 aa, Artificial sequence
  Protein classification predicting sequence
LFLAILL

SEQ ID NO: 14293 - protein, 5 aa, Artificial sequence
  Protein classification predicting sequence
LRYLP

SEQ ID NO: 14294 - protein, 5 aa, Artificial sequence
  Protein classification predicting sequence
QSMTF

SEQ ID NO: 14295 - protein, 6 aa, Artificial sequence
  Protein classification predicting sequence
GINLKV

SEQ ID NO: 14296 - protein, 5 aa, Artificial sequence
  Protein classification predicting sequence
LLLMK

SEQ ID NO: 14297 - protein, 6 aa, Artificial sequence
  Protein classification predicting sequence
LGNLLQ

SEQ ID NO: 14298 - protein, 6 aa, Artificial sequence
  Protein classification predicting sequence
QKEIEQ

SEQ ID NO: 14299 - protein, 6 aa, Artificial sequence
  Protein classification predicting sequence
FYVSFA

SEQ ID NO: 14300 - protein, 6 aa, Artificial sequence
  Protein classification predicting sequence
EIRRFC

SEQ ID NO: 14301 - protein, 6 aa, Artificial sequence
  Protein classification predicting sequence
ALKNFA

SEQ ID NO: 14302 - protein, 6 aa, Artificial sequence
  Protein classification predicting sequence
SSLLFC

SEQ ID NO: 14303 - protein, 6 aa, Artificial sequence
  Protein classification predicting sequence
RAVVVH

SEQ ID NO: 14304 - protein, 7 aa, Artificial sequence
  Protein classification predicting sequence
ELKKTNG

SEQ ID NO: 14305 - protein, 6 aa, Artificial sequence
  Protein classification predicting sequence
QEYKNK

SEQ ID NO: 14306 - protein, 7 aa, Artificial sequence
  Protein classification predicting sequence
FFAGTET

SEQ ID NO: 14307 - protein, 6 aa, Artificial sequence
  Protein classification predicting sequence
RRVVVL

SEQ ID NO: 14308 - protein, 6 aa, Artificial sequence
  Protein classification predicting sequence
QFLKPK

SEQ ID NO: 14309 - protein, 5 aa, Artificial sequence
  Protein classification predicting sequence
KYQNR

SEQ ID NO: 14310 - protein, 6 aa, Artificial sequence
  Protein classification predicting sequence
PMSVPH

SEQ ID NO: 14311 - protein, 6 aa, Artificial sequence
  Protein classification predicting sequence
AFLVKM

SEQ ID NO: 14312 - protein, 6 aa, Artificial sequence
  Protein classification predicting sequence
RGYTLP

SEQ ID NO: 14313 - protein, 6 aa, Artificial sequence
  Protein classification predicting sequence
DIEVVA

SEQ ID NO: 14314 - protein, 6 aa, Artificial sequence
  Protein classification predicting sequence
DVLVNN

SEQ ID NO: 14315 - protein, 7 aa, Artificial sequence
  Protein classification predicting sequence
VSVAEDE

SEQ ID NO: 14316 - protein, 5 aa, Artificial sequence
  Protein classification predicting sequence
STRFT

SEQ ID NO: 14317 - protein, 5 aa, Artificial sequence
  Protein classification predicting sequence
WFFGH

SEQ ID NO: 14318 - protein, 6 aa, Artificial sequence
  Protein classification predicting sequence
PKGIRV

SEQ ID NO: 14319 - protein, 6 aa, Artificial sequence
  Protein classification predicting sequence
GNKVRV

SEQ ID NO: 14320 - protein, 7 aa, Artificial sequence
  Protein classification predicting sequence
LGDGLFL

SEQ ID NO: 14321 - protein, 6 aa, Artificial sequence
  Protein classification predicting sequence
FTDAVI

SEQ ID NO: 14322 - protein, 6 aa, Artificial sequence
  Protein classification predicting sequence
AWFLLH

SEQ ID NO: 14323 - protein, 7 aa, Artificial sequence
  Protein classification predicting sequence
WNKDSAS

SEQ ID NO: 14324 - protein, 6 aa, Artificial sequence
  Protein classification predicting sequence
VQVAQE

SEQ ID NO: 14325 - protein, 6 aa, Artificial sequence
  Protein classification predicting sequence
KINNGL

SEQ ID NO: 14326 - protein, 6 aa, Artificial sequence
  Protein classification predicting sequence
IAGSGA

SEQ ID NO: 14327 - protein, 7 aa, Artificial sequence
  Protein classification predicting sequence
FVAGLGG

SEQ ID NO: 14328 - protein, 6 aa, Artificial sequence
  Protein classification predicting sequence
AYAAEH

SEQ ID NO: 14329 - protein, 6 aa, Artificial sequence
  Protein classification predicting sequence
NPALWK

SEQ ID NO: 14330 - protein, 7 aa, Artificial sequence
  Protein classification predicting sequence
PVVLTDT

SEQ ID NO: 14331 - protein, 6 aa, Artificial sequence
  Protein classification predicting sequence
QKGLEW

SEQ ID NO: 14332 - protein, 6 aa, Artificial sequence
  Protein classification predicting sequence
NSFCST

SEQ ID NO: 14333 - protein, 6 aa, Artificial sequence
  Protein classification predicting sequence
AWLSGY

SEQ ID NO: 14334 - protein, 6 aa, Artificial sequence
  Protein classification predicting sequence
KYKPAV

SEQ ID NO: 14335 - protein, 6 aa, Artificial sequence
  Protein classification predicting sequence
YVCGDA

SEQ ID NO: 14336 - protein, 6 aa, Artificial sequence
  Protein classification predicting sequence
YSISSS

SEQ ID NO: 14337 - protein, 5 aa, Artificial sequence
  Protein classification predicting sequence
ADPFP

SEQ ID NO: 14338 - protein, 6 aa, Artificial sequence
  Protein classification predicting sequence
LHYLPG

SEQ ID NO: 14339 - protein, 7 aa, Artificial sequence
  Protein classification predicting sequence
AGGASGF

SEQ ID NO: 14340 - protein, 6 aa, Artificial sequence
  Protein classification predicting sequence
APFRAF

SEQ ID NO: 14341 - protein, 10 aa, Artificial sequence
  Protein classification predicting sequence
GAHIYVCGDA

SEQ ID NO: 14342 - protein, 6 aa, Artificial sequence
  Protein classification predicting sequence
FDRRFE

SEQ ID NO: 14343 - protein, 8 aa, Artificial sequence
  Protein classification predicting sequence
GTGIAPFR

SEQ ID NO: 14344 - protein, 6 aa, Artificial sequence
  Protein classification predicting sequence
LQNGAH

SEQ ID NO: 14345 - protein, 6 aa, Artificial sequence
  Protein classification predicting sequence
GTGVAP

SEQ ID NO: 14346 - protein, 8 aa, Artificial sequence
  Protein classification predicting sequence
IMVGPGTG

SEQ ID NO: 14347 - protein, 7 aa, Artificial sequence
  Protein classification predicting sequence
QNKALEK

SEQ ID NO: 14348 - protein, 6 aa, Artificial sequence
  Protein classification predicting sequence
KDADVA

SEQ ID NO: 14349 - protein, 5 aa, Artificial sequence
  Protein classification predicting sequence
ASFWT

SEQ ID NO: 14350 - protein, 7 aa, Artificial sequence
  Protein classification predicting sequence
ARVLADL

SEQ ID NO: 14351 - protein, 7 aa, Artificial sequence
  Protein classification predicting sequence
AKDIAVL

SEQ ID NO: 14352 - protein, 5 aa, Artificial sequence
  Protein classification predicting sequence
SAWYL

SEQ ID NO: 14353 - protein, 7 aa, Artificial sequence
  Protein classification predicting sequence
GIAYDER

SEQ ID NO: 14354 - protein, 6 aa, Artificial sequence
  Protein classification predicting sequence
KADAYV

SEQ ID NO: 14355 - protein, 6 aa, Artificial sequence
  Protein classification predicting sequence
APVSTV

SEQ ID NO: 14356 - protein, 5 aa, Artificial sequence
  Protein classification predicting sequence
MEIHH

SEQ ID NO: 14357 - protein, 6 aa, Artificial sequence
  Protein classification predicting sequence
EMLGKD

SEQ ID NO: 14358 - protein, 6 aa, Artificial sequence
  Protein classification predicting sequence
EITHKA

SEQ ID NO: 14359 - protein, 6 aa, Artificial sequence
  Protein classification predicting sequence
VDFTHP

SEQ ID NO: 14360 - protein, 6 aa, Artificial sequence
  Protein classification predicting sequence
YLEGEY

SEQ ID NO: 14361 - protein, 6 aa, Artificial sequence
  Protein classification predicting sequence
GLVAHE

SEQ ID NO: 14362 - protein, 6 aa, Artificial sequence
  Protein classification predicting sequence
RAAEII

SEQ ID NO: 14363 - protein, 8 aa, Artificial sequence
  Protein classification predicting sequence
RVAIVGAG

SEQ ID NO: 14364 - protein, 6 aa, Artificial sequence
  Protein classification predicting sequence
SVGVNL

SEQ ID NO: 14365 - protein, 6 aa, Artificial sequence
  Protein classification predicting sequence
SIGGAV

SEQ ID NO: 14366 - protein, 6 aa, Artificial sequence
  Protein classification predicting sequence
AVAKHV

SEQ ID NO: 14367 - protein, 6 aa, Artificial sequence
  Protein classification predicting sequence
GHTEAV

SEQ ID NO: 14368 - protein, 6 aa, Artificial sequence
  Protein classification predicting sequence
PLNIIA

SEQ ID NO: 14369 - protein, 7 aa, Artificial sequence
  Protein classification predicting sequence
SGLDIAL

SEQ ID NO: 14370 - protein, 7 aa, Artificial sequence
  Protein classification predicting sequence
VPLAGSL

SEQ ID NO: 14371 - protein, 7 aa, Artificial sequence
  Protein classification predicting sequence
GREVRFG

SEQ ID NO: 14372 - protein, 6 aa, Artificial sequence
  Protein classification predicting sequence
GVKTFV

SEQ ID NO: 14373 - protein, 6 aa, Artificial sequence
  Protein classification predicting sequence
DIGIPQ

SEQ ID NO: 14374 - protein, 6 aa, Artificial sequence
  Protein classification predicting sequence
SMQPGS

SEQ ID NO: 14375 - protein, 6 aa, Artificial sequence
  Protein classification predicting sequence
ISNPVN

SEQ ID NO: 14376 - protein, 6 aa, Artificial sequence
  Protein classification predicting sequence
RDLGYE

SEQ ID NO: 14377 - protein, 6 aa, Artificial sequence
  Protein classification predicting sequence
PIYVKH

SEQ ID NO: 14378 - protein, 6 aa, Artificial sequence
  Protein classification predicting sequence
EAFSNL

SEQ ID NO: 14379 - protein, 6 aa, Artificial sequence
  Protein classification predicting sequence
MFSSVM

SEQ ID NO: 14380 - protein, 6 aa, Artificial sequence
  Protein classification predicting sequence
VNVAGV

SEQ ID NO: 14381 - protein, 6 aa, Artificial sequence
  Protein classification predicting sequence
RVALVT

SEQ ID NO: 14382 - protein, 6 aa, Artificial sequence
  Protein classification predicting sequence
PAGVVN

SEQ ID NO: 14383 - protein, 6 aa, Artificial sequence
  Protein classification predicting sequence
GNAGSF

SEQ ID NO: 14384 - protein, 6 aa, Artificial sequence
  Protein classification predicting sequence
FPGAKR

SEQ ID NO: 14385 - protein, 5 aa, Artificial sequence
  Protein classification predicting sequence
MHLVW

SEQ ID NO: 14386 - protein, 7 aa, Artificial sequence
  Protein classification predicting sequence
ALAVDRV

SEQ ID NO: 14387 - protein, 6 aa, Artificial sequence
  Protein classification predicting sequence
VANYQR

SEQ ID NO: 14388 - protein, 6 aa, Artificial sequence
  Protein classification predicting sequence
AYVNSI

SEQ ID NO: 14389 - protein, 6 aa, Artificial sequence
  Protein classification predicting sequence
VYFVSE

SEQ ID NO: 14390 - protein, 7 aa, Artificial sequence
  Protein classification predicting sequence
LKDIMAE

SEQ ID NO: 14391 - protein, 6 aa, Artificial sequence
  Protein classification predicting sequence
KRVADA

SEQ ID NO: 14392 - protein, 6 aa, Artificial sequence
  Protein classification predicting sequence
EEFRPE

SEQ ID NO: 14393 - protein, 6 aa, Artificial sequence
  Protein classification predicting sequence
QKVASR

SEQ ID NO: 14394 - protein, 6 aa, Artificial sequence
  Protein classification predicting sequence
QFVAKA

SEQ ID NO: 14395 - protein, 7 aa, Artificial sequence
  Protein classification predicting sequence
LKETSGI

SEQ ID NO: 14396 - protein, 6 aa, Artificial sequence
  Protein classification predicting sequence
GQFGLG

SEQ ID NO: 14397 - protein, 6 aa, Artificial sequence
  Protein classification predicting sequence
GSGNPA

SEQ ID NO: 14398 - protein, 7 aa, Artificial sequence
  Protein classification predicting sequence
AAGDCTD

SEQ ID NO: 14399 - protein, 6 aa, Artificial sequence
  Protein classification predicting sequence
DYLKKN

SEQ ID NO: 14400 - protein, 6 aa, Artificial sequence
  Protein classification predicting sequence
MSEDDW

SEQ ID NO: 14401 - protein, 7 aa, Artificial sequence
  Protein classification predicting sequence
RGEGGIL

SEQ ID NO: 14402 - protein, 7 aa, Artificial sequence
  Protein classification predicting sequence
GGGLAGL

SEQ ID NO: 14403 - protein, 6 aa, Artificial sequence
  Protein classification predicting sequence
ESRGAH

SEQ ID NO: 14404 - protein, 7 aa, Artificial sequence
  Protein classification predicting sequence
GLYAAGE

SEQ ID NO: 14405 - protein, 5 aa, Artificial sequence
  Protein classification predicting sequence
SRQYK

SEQ ID NO: 14406 - protein, 6 aa, Artificial sequence
  Protein classification predicting sequence
AQGGIA

SEQ ID NO: 14407 - protein, 7 aa, Artificial sequence
  Protein classification predicting sequence
VHGANRL

SEQ ID NO: 14408 - protein, 6 aa, Artificial sequence
  Protein classification predicting sequence
VRGLSR

SEQ ID NO: 14409 - protein, 6 aa, Artificial sequence
  Protein classification predicting sequence
LATIVA

SEQ ID NO: 14410 - protein, 5 aa, Artificial sequence
  Protein classification predicting sequence
CITKI

SEQ ID NO: 14411 - protein, 7 aa, Artificial sequence
  Protein classification predicting sequence
EFVQFHP

SEQ ID NO: 14412 - protein, 6 aa, Artificial sequence
  Protein classification predicting sequence
RDVVSR

SEQ ID NO: 14413 - protein, 6 aa, Artificial sequence
  Protein classification predicting sequence
TKEPIP

SEQ ID NO: 14414 - protein, 7 aa, Artificial sequence
  Protein classification predicting sequence
DLVPDLT

SEQ ID NO: 14415 - protein, 6 aa, Artificial sequence
  Protein classification predicting sequence
DVVLEC

SEQ ID NO: 14416 - protein, 7 aa, Artificial sequence
  Protein classification predicting sequence
YTDEEVV

SEQ ID NO: 14417 - protein, 6 aa, Artificial sequence
  Protein classification predicting sequence
TMEAAE

SEQ ID NO: 14418 - protein, 7 aa, Artificial sequence
  Protein classification predicting sequence
AGIVKNL

SEQ ID NO: 14419 - protein, 6 aa, Artificial sequence
  Protein classification predicting sequence
GVIGCE

SEQ ID NO: 14420 - protein, 7 aa, Artificial sequence
  Protein classification predicting sequence
QLTSGIE

SEQ ID NO: 14421 - protein, 6 aa, Artificial sequence
  Protein classification predicting sequence
ATKETE

SEQ ID NO: 14422 - protein, 7 aa, Artificial sequence
  Protein classification predicting sequence
LGSVWRR

SEQ ID NO: 14423 - protein, 8 aa, Artificial sequence
  Protein classification predicting sequence
FAKVIADA

SEQ ID NO: 14424 - protein, 7 aa, Artificial sequence
  Protein classification predicting sequence
KSAQLGL

SEQ ID NO: 14425 - protein, 7 aa, Artificial sequence
  Protein classification predicting sequence
FNKPDID

SEQ ID NO: 14426 - protein, 6 aa, Artificial sequence
  Protein classification predicting sequence
VRITVN

SEQ ID NO: 14427 - protein, 6 aa, Artificial sequence
  Protein classification predicting sequence
ETIEFE

SEQ ID NO: 14428 - protein, 8 aa, Artificial sequence
  Protein classification predicting sequence
VIGSGPGG

SEQ ID NO: 14429 - protein, 9 aa, Artificial sequence
  Protein classification predicting sequence
VVIGAGVIG

SEQ ID NO: 14430 - protein, 6 aa, Artificial sequence
  Protein classification predicting sequence
VGKTEQ

SEQ ID NO: 14431 - protein, 8 aa, Artificial sequence
  Protein classification predicting sequence
VIGAGVIG

SEQ ID NO: 14432 - protein, 6 aa, Artificial sequence
  Protein classification predicting sequence
EYLDAI

SEQ ID NO: 14433 - protein, 7 aa, Artificial sequence
  Protein classification predicting sequence
DLIVLGG

SEQ ID NO: 14434 - protein, 5 aa, Artificial sequence
  Protein classification predicting sequence
DEARH

SEQ ID NO: 14435 - protein, 6 aa, Artificial sequence
  Protein classification predicting sequence
PGAKYP

SEQ ID NO: 14436 - protein, 6 aa, Artificial sequence
  Protein classification predicting sequence
QRTRDG

SEQ ID NO: 14437 - protein, 6 aa, Artificial sequence
  Protein classification predicting sequence
LFLFFT

SEQ ID NO: 14438 - protein, 8 aa, Artificial sequence
  Protein classification predicting sequence
GAIAVLFL

SEQ ID NO: 14439 - protein, 5 aa, Artificial sequence
  Protein classification predicting sequence
LACCA

SEQ ID NO: 14440 - protein, 6 aa, Artificial sequence
  Protein classification predicting sequence
DHQKII

SEQ ID NO: 14441 - protein, 6 aa, Artificial sequence
  Protein classification predicting sequence
VGLAAG

SEQ ID NO: 14442 - protein, 5 aa, Artificial sequence
  Protein classification predicting sequence
GQIIP

SEQ ID NO: 14443 - protein, 6 aa, Artificial sequence
  Protein classification predicting sequence
NKGLEV

SEQ ID NO: 14444 - protein, 6 aa, Artificial sequence
  Protein classification predicting sequence
IKFEPI

SEQ ID NO: 14445 - protein, 8 aa, Artificial sequence
  Protein classification predicting sequence
GIVDTVAK

SEQ ID NO: 14446 - protein, 6 aa, Artificial sequence
  Protein classification predicting sequence
TLESEF

SEQ ID NO: 14447 - protein, 6 aa, Artificial sequence
  Protein classification predicting sequence
KQNLVI

SEQ ID NO: 14448 - protein, 6 aa, Artificial sequence
  Protein classification predicting sequence
LALGWP

SEQ ID NO: 14449 - protein, 5 aa, Artificial sequence
  Protein classification predicting sequence
PFDFM

SEQ ID NO: 14450 - protein, 6 aa, Artificial sequence
  Protein classification predicting sequence
AAAEMI

SEQ ID NO: 14451 - protein, 5 aa, Artificial sequence
  Protein classification predicting sequence
RHQPE

SEQ ID NO: 14452 - protein, 6 aa, Artificial sequence
  Protein classification predicting sequence
PQLEDV

SEQ ID NO: 14453 - protein, 6 aa, Artificial sequence
  Protein classification predicting sequence
QIALWK

SEQ ID NO: 14454 - protein, 7 aa, Artificial sequence
  Protein classification predicting sequence
VVVLGAG

SEQ ID NO: 14455 - protein, 6 aa, Artificial sequence
  Protein classification predicting sequence
QSSISY

SEQ ID NO: 14456 - protein, 6 aa, Artificial sequence
  Protein classification predicting sequence
IVISST

SEQ ID NO: 14457 - protein, 6 aa, Artificial sequence
  Protein classification predicting sequence
TKPDGS

SEQ ID NO: 14458 - protein, 5 aa, Artificial sequence
  Protein classification predicting sequence
TFFPQ

SEQ ID NO: 14459 - protein, 6 aa, Artificial sequence
  Protein classification predicting sequence
AHRAAS

SEQ ID NO: 14460 - protein, 6 aa, Artificial sequence
  Protein classification predicting sequence
IGKKGH

SEQ ID NO: 14461 - protein, 9 aa, Artificial sequence
  Protein classification predicting sequence
VTGAGKGIG

SEQ ID NO: 14462 - protein, 5 aa, Artificial sequence
  Protein classification predicting sequence
GMMVV

SEQ ID NO: 14463 - protein, 6 aa, Artificial sequence
  Protein classification predicting sequence
YQISPS

SEQ ID NO: 14464 - protein, 6 aa, Artificial sequence
  Protein classification predicting sequence
GWWLLH

SEQ ID NO: 14465 - protein, 5 aa, Artificial sequence
  Protein classification predicting sequence
FETWY

SEQ ID NO: 14466 - protein, 6 aa, Artificial sequence
  Protein classification predicting sequence
YEFFGP

SEQ ID NO: 14467 - protein, 6 aa, Artificial sequence
  Protein classification predicting sequence
VEGTEL

SEQ ID NO: 14468 - protein, 5 aa, Artificial sequence
  Protein classification predicting sequence
GCPPP

SEQ ID NO: 14469 - protein, 6 aa, Artificial sequence
  Protein classification predicting sequence
ALVLVN

SEQ ID NO: 14470 - protein, 6 aa, Artificial sequence
  Protein classification predicting sequence
GENWEE

SEQ ID NO: 14471 - protein, 7 aa, Artificial sequence
  Protein classification predicting sequence
WYFLLAR

SEQ ID NO: 14472 - protein, 6 aa, Artificial sequence
  Protein classification predicting sequence
RQQLAQ

SEQ ID NO: 14473 - protein, 6 aa, Artificial sequence
  Protein classification predicting sequence
FGGTTG

SEQ ID NO: 14474 - protein, 7 aa, Artificial sequence
  Protein classification predicting sequence
MVVAGVF

SEQ ID NO: 14475 - protein, 7 aa, Artificial sequence
  Protein classification predicting sequence
WAVAFLL

SEQ ID NO: 14476 - protein, 6 aa, Artificial sequence
  Protein classification predicting sequence
ASYITG

SEQ ID NO: 14477 - protein, 6 aa, Artificial sequence
  Protein classification predicting sequence
SKITLF

SEQ ID NO: 14478 - protein, 7 aa, Artificial sequence
  Protein classification predicting sequence
AKRAAEL

SEQ ID NO: 14479 - protein, 6 aa, Artificial sequence
  Protein classification predicting sequence
NWGSLD

SEQ ID NO: 14480 - protein, 7 aa, Artificial sequence
  Protein classification predicting sequence
NDSIILP

SEQ ID NO: 14481 - protein, 6 aa, Artificial sequence
  Protein classification predicting sequence
NSIKRL

SEQ ID NO: 14482 - protein, 7 aa, Artificial sequence
  Protein classification predicting sequence
SDLASGI

SEQ ID NO: 14483 - protein, 6 aa, Artificial sequence
  Protein classification predicting sequence
VCHTDL

SEQ ID NO: 14484 - protein, 7 aa, Artificial sequence
  Protein classification predicting sequence
GTVVLVG

SEQ ID NO: 14485 - protein, 8 aa, Artificial sequence
  Protein classification predicting sequence
GYLINEFL

SEQ ID NO: 14486 - protein, 6 aa, Artificial sequence
  Protein classification predicting sequence
GLVGKA

SEQ ID NO: 14487 - protein, 6 aa, Artificial sequence
  Protein classification predicting sequence
AYIMGE

SEQ ID NO: 14488 - protein, 4 aa, Artificial sequence
  Protein classification predicting sequence
YQWW

SEQ ID NO: 14489 - protein, 6 aa, Artificial sequence
  Protein classification predicting sequence
YGERER

SEQ ID NO: 14490 - protein, 6 aa, Artificial sequence
  Protein classification predicting sequence
VASTAA

SEQ ID NO: 14491 - protein, 7 aa, Artificial sequence
  Protein classification predicting sequence
RLYSIAS

SEQ ID NO: 14492 - protein, 6 aa, Artificial sequence
  Protein classification predicting sequence
PGQFRL

SEQ ID NO: 14493 - protein, 5 aa, Artificial sequence
  Protein classification predicting sequence
ITRWG

SEQ ID NO: 14494 - protein, 5 aa, Artificial sequence
  Protein classification predicting sequence
FQDDK

SEQ ID NO: 14495 - protein, 5 aa, Artificial sequence
  Protein classification predicting sequence
RITRM

SEQ ID NO: 14496 - protein, 9 aa, Artificial sequence
  Protein classification predicting sequence
VIGAGVSGL

SEQ ID NO: 14497 - protein, 7 aa, Artificial sequence
  Protein classification predicting sequence
FSFPFLE

SEQ ID NO: 14498 - protein, 11 aa, Artificial sequence
  Protein classification predicting sequence
VLEARDRVGGR

SEQ ID NO: 14499 - protein, 6 aa, Artificial sequence
  Protein classification predicting sequence
GEVACT

SEQ ID NO: 14500 - protein, 6 aa, Artificial sequence
  Protein classification predicting sequence
AFKLIK

SEQ ID NO: 14501 - protein, 7 aa, Artificial sequence
  Protein classification predicting sequence
SLLECVV

SEQ ID NO: 14502 - protein, 5 aa, Artificial sequence
  Protein classification predicting sequence
MFIIA

SEQ ID NO: 14503 - protein, 5 aa, Artificial sequence
  Protein classification predicting sequence
GYSNR

SEQ ID NO: 14504 - protein, 6 aa, Artificial sequence
  Protein classification predicting sequence
EETYWQ

SEQ ID NO: 14505 - protein, 6 aa, Artificial sequence
  Protein classification predicting sequence
LGFPKA

SEQ ID NO: 14506 - protein, 6 aa, Artificial sequence
  Protein classification predicting sequence
ARKRLY

SEQ ID NO: 14507 - protein, 7 aa, Artificial sequence
  Protein classification predicting sequence
FEKFLVG

SEQ ID NO: 14508 - protein, 6 aa, Artificial sequence
  Protein classification predicting sequence
CKEFEK

SEQ ID NO: 14509 - protein, 7 aa, Artificial sequence
  Protein classification predicting sequence
IVGVITA

SEQ ID NO: 14510 - protein, 6 aa, Artificial sequence
  Protein classification predicting sequence
KYQNKR

SEQ ID NO: 14511 - protein, 9 aa, Artificial sequence
  Protein classification predicting sequence
ELGGKSPLI

SEQ ID NO: 14512 - protein, 7 aa, Artificial sequence
  Protein classification predicting sequence
GGRIRLQ

SEQ ID NO: 14513 - protein, 6 aa, Artificial sequence
  Protein classification predicting sequence
IKFSGD

SEQ ID NO: 14514 - protein, 5 aa, Artificial sequence
  Protein classification predicting sequence
ESKHA

SEQ ID NO: 14515 - protein, 6 aa, Artificial sequence
  Protein classification predicting sequence
QKIAPL

SEQ ID NO: 14516 - protein, 6 aa, Artificial sequence
  Protein classification predicting sequence
KIAPLS

SEQ ID NO: 14517 - protein, 6 aa, Artificial sequence
  Protein classification predicting sequence
VKGVND

SEQ ID NO: 14518 - protein, 6 aa, Artificial sequence
  Protein classification predicting sequence
VVGVNE

SEQ ID NO: 14519 - protein, 5 aa, Artificial sequence
  Protein classification predicting sequence
DTHSS

SEQ ID NO: 14520 - protein, 6 aa, Artificial sequence
  Protein classification predicting sequence
RNAILT

SEQ ID NO: 14521 - protein, 5 aa, Artificial sequence
  Protein classification predicting sequence
NGLMT

SEQ ID NO: 14522 - protein, 5 aa, Artificial sequence
  Protein classification predicting sequence
GPMKG

SEQ ID NO: 14523 - protein, 7 aa, Artificial sequence
  Protein classification predicting sequence
DSLTVVM

SEQ ID NO: 14524 - protein, 7 aa, Artificial sequence
  Protein classification predicting sequence
IPVTQRL

SEQ ID NO: 14525 - protein, 6 aa, Artificial sequence
  Protein classification predicting sequence
FIETHY

SEQ ID NO: 14526 - protein, 7 aa, Artificial sequence
  Protein classification predicting sequence
TFDKDNI

SEQ ID NO: 14527 - protein, 5 aa, Artificial sequence
  Protein classification predicting sequence
YSRRV

SEQ ID NO: 14528 - protein, 6 aa, Artificial sequence
  Protein classification predicting sequence
KGDEPV

SEQ ID NO: 14529 - protein, 5 aa, Artificial sequence
  Protein classification predicting sequence
DSTHG

SEQ ID NO: 14530 - protein, 8 aa, Artificial sequence
  Protein classification predicting sequence
KGVDVIIE

SEQ ID NO: 14531 - protein, 6 aa, Artificial sequence
  Protein classification predicting sequence
THQIAV

SEQ ID NO: 14532 - protein, 6 aa, Artificial sequence
  Protein classification predicting sequence
SSKLWR

SEQ ID NO: 14533 - protein, 7 aa, Artificial sequence
  Protein classification predicting sequence
AGTVEDL

SEQ ID NO: 14534 - protein, 6 aa, Artificial sequence
  Protein classification predicting sequence
IRKIDP

SEQ ID NO: 14535 - protein, 5 aa, Artificial sequence
  Protein classification predicting sequence
FHQSD

SEQ ID NO: 14536 - protein, 6 aa, Artificial sequence
  Protein classification predicting sequence
LALPPT

SEQ ID NO: 14537 - protein, 6 aa, Artificial sequence
  Protein classification predicting sequence
LRPLTS

SEQ ID NO: 14538 - protein, 7 aa, Artificial sequence
  Protein classification predicting sequence
DGFRLLD

SEQ ID NO: 14539 - protein, 5 aa, Artificial sequence
  Protein classification predicting sequence
EVTQG

SEQ ID NO: 14540 - protein, 7 aa, Artificial sequence
  Protein classification predicting sequence
LFIDNWR

SEQ ID NO: 14541 - protein, 6 aa, Artificial sequence
  Protein classification predicting sequence
DETIQI

SEQ ID NO: 14542 - protein, 6 aa, Artificial sequence
  Protein classification predicting sequence
PWNYPL

SEQ ID NO: 14543 - protein, 6 aa, Artificial sequence
  Protein classification predicting sequence
LTLALC

SEQ ID NO: 14544 - protein, 7 aa, Artificial sequence
  Protein classification predicting sequence
VADRNPE

SEQ ID NO: 14545 - protein, 7 aa, Artificial sequence
  Protein classification predicting sequence
QLILETA

SEQ ID NO: 14546 - protein, 6 aa, Artificial sequence
  Protein classification predicting sequence
LHQDLH

SEQ ID NO: 14547 - protein, 5 aa, Artificial sequence
  Protein classification predicting sequence
GYYGT

SEQ ID NO: 14548 - protein, 7 aa, Artificial sequence
  Protein classification predicting sequence
PQLADAS

SEQ ID NO: 14549 - protein, 6 aa, Artificial sequence
  Protein classification predicting sequence
LQELNP

SEQ ID NO: 14550 - protein, 6 aa, Artificial sequence
  Protein classification predicting sequence
FVASHP

SEQ ID NO: 14551 - protein, 6 aa, Artificial sequence
  Protein classification predicting sequence
FAGTDE

SEQ ID NO: 14552 - protein, 6 aa, Artificial sequence
  Protein classification predicting sequence
RAFGGQ

SEQ ID NO: 14553 - protein, 6 aa, Artificial sequence
  Protein classification predicting sequence
AIPEGA

SEQ ID NO: 14554 - protein, 5 aa, Artificial sequence
  Protein classification predicting sequence
HTPPV

SEQ ID NO: 14555 - protein, 7 aa, Artificial sequence
  Protein classification predicting sequence
IHALASA

SEQ ID NO: 14556 - protein, 6 aa, Artificial sequence
  Protein classification predicting sequence
QKLASR

SEQ ID NO: 14557 - protein, 6 aa, Artificial sequence
  Protein classification predicting sequence
GGRTAA

SEQ ID NO: 14558 - protein, 5 aa, Artificial sequence
  Protein classification predicting sequence
QAAYP

SEQ ID NO: 14559 - protein, 7 aa, Artificial sequence
  Protein classification predicting sequence
LVSISCD

SEQ ID NO: 14560 - protein, 6 aa, Artificial sequence
  Protein classification predicting sequence
AGGQVY

SEQ ID NO: 14561 - protein, 5 aa, Artificial sequence
  Protein classification predicting sequence
WEHAY

SEQ ID NO: 14562 - protein, 6 aa, Artificial sequence
  Protein classification predicting sequence
FYKKNP

SEQ ID NO: 14563 - protein, 8 aa, Artificial sequence
  Protein classification predicting sequence
SKEEVLEK

SEQ ID NO: 14564 - protein, 6 aa, Artificial sequence
  Protein classification predicting sequence
RPLVAS

SEQ ID NO: 14565 - protein, 6 aa, Artificial sequence
  Protein classification predicting sequence
ILGLDV

SEQ ID NO: 14566 - protein, 6 aa, Artificial sequence
  Protein classification predicting sequence
HYAMDY

SEQ ID NO: 14567 - protein, 8 aa, Artificial sequence
  Protein classification predicting sequence
KVGIGPGS

SEQ ID NO: 14568 - protein, 6 aa, Artificial sequence
  Protein classification predicting sequence
GPGIRF

SEQ ID NO: 14569 - protein, 7 aa, Artificial sequence
  Protein classification predicting sequence
ASLANLA

SEQ ID NO: 14570 - protein, 6 aa, Artificial sequence
  Protein classification predicting sequence
ATKGLE

SEQ ID NO: 14571 - protein, 7 aa, Artificial sequence
  Protein classification predicting sequence
PVVVLSG

SEQ ID NO: 14572 - protein, 7 aa, Artificial sequence
  Protein classification predicting sequence
KATTDLN

SEQ ID NO: 14573 - protein, 6 aa, Artificial sequence
  Protein classification predicting sequence
FRPYHS

SEQ ID NO: 14574 - protein, 6 aa, Artificial sequence
  Protein classification predicting sequence
GAYKNV

SEQ ID NO: 14575 - protein, 6 aa, Artificial sequence
  Protein classification predicting sequence
FLGLSG

SEQ ID NO: 14576 - protein, 6 aa, Artificial sequence
  Protein classification predicting sequence
GRDPRD

SEQ ID NO: 14577 - protein, 6 aa, Artificial sequence
  Protein classification predicting sequence
KVAVLG

SEQ ID NO: 14578 - protein, 6 aa, Artificial sequence
  Protein classification predicting sequence
SKGIEP

SEQ ID NO: 14579 - protein, 6 aa, Artificial sequence
  Protein classification predicting sequence
ELVEEM

SEQ ID NO: 14580 - protein, 6 aa, Artificial sequence
  Protein classification predicting sequence
PMTFSG

SEQ ID NO: 14581 - protein, 6 aa, Artificial sequence
  Protein classification predicting sequence
FLGLAG

SEQ ID NO: 14582 - protein, 7 aa, Artificial sequence
  Protein classification predicting sequence
PDTLSVT

SEQ ID NO: 14583 - protein, 6 aa, Artificial sequence
  Protein classification predicting sequence
GIGDLI

SEQ ID NO: 14584 - protein, 6 aa, Artificial sequence
  Protein classification predicting sequence
RLWSHR

SEQ ID NO: 14585 - protein, 7 aa, Artificial sequence
  Protein classification predicting sequence
SADLEMA

SEQ ID NO: 14586 - protein, 7 aa, Artificial sequence
  Protein classification predicting sequence
VCIVGSG

SEQ ID NO: 14587 - protein, 5 aa, Artificial sequence
  Protein classification predicting sequence
WFPLF

SEQ ID NO: 14588 - protein, 8 aa, Artificial sequence
  Protein classification predicting sequence
PKIVVVGA

SEQ ID NO: 14589 - protein, 6 aa, Artificial sequence
  Protein classification predicting sequence
IAAPDT

SEQ ID NO: 14590 - protein, 8 aa, Artificial sequence
  Protein classification predicting sequence
FLDARQAL

SEQ ID NO: 14591 - protein, 6 aa, Artificial sequence
  Protein classification predicting sequence
ATALMI

SEQ ID NO: 14592 - protein, 6 aa, Artificial sequence
  Protein classification predicting sequence
LMTDPK

SEQ ID NO: 14593 - protein, 6 aa, Artificial sequence
  Protein classification predicting sequence
LANYFV

SEQ ID NO: 14594 - protein, 6 aa, Artificial sequence
  Protein classification predicting sequence
IAKYCP

SEQ ID NO: 14595 - protein, 6 aa, Artificial sequence
  Protein classification predicting sequence
DGFSQP

SEQ ID NO: 14596 - protein, 6 aa, Artificial sequence
  Protein classification predicting sequence
NPATWE

SEQ ID NO: 14597 - protein, 6 aa, Artificial sequence
  Protein classification predicting sequence
IEGRGK

SEQ ID NO: 14598 - protein, 6 aa, Artificial sequence
  Protein classification predicting sequence
PNTKNL

SEQ ID NO: 14599 - protein, 6 aa, Artificial sequence
  Protein classification predicting sequence
IEQYGD

SEQ ID NO: 14600 - protein, 8 aa, Artificial sequence
  Protein classification predicting sequence
VGLTEEQA

SEQ ID NO: 14601 - protein, 6 aa, Artificial sequence
  Protein classification predicting sequence
VRKNQA

SEQ ID NO: 14602 - protein, 6 aa, Artificial sequence
  Protein classification predicting sequence
KKVVIS

SEQ ID NO: 14603 - protein, 6 aa, Artificial sequence
  Protein classification predicting sequence
ELENAG

SEQ ID NO: 14604 - protein, 7 aa, Artificial sequence
  Protein classification predicting sequence
LGLENIG

SEQ ID NO: 14605 - protein, 5 aa, Artificial sequence
  Protein classification predicting sequence
WAIGR

SEQ ID NO: 14606 - protein, 7 aa, Artificial sequence
  Protein classification predicting sequence
VYAVGDV

SEQ ID NO: 14607 - protein, 10 aa, Artificial sequence
  Protein classification predicting sequence
LKDGRVLEAD

SEQ ID NO: 14608 - protein, 6 aa, Artificial sequence
  Protein classification predicting sequence
GHPLYP

SEQ ID NO: 14609 - protein, 7 aa, Artificial sequence
  Protein classification predicting sequence
SGDIAKA

SEQ ID NO: 14610 - protein, 7 aa, Artificial sequence
  Protein classification predicting sequence
KVGVGPG

SEQ ID NO: 14611 - protein, 7 aa, Artificial sequence
  Protein classification predicting sequence
IADGGIR

SEQ ID NO: 14612 - protein, 6 aa, Artificial sequence
  Protein classification predicting sequence
GFGRIG

SEQ ID NO: 14613 - protein, 6 aa, Artificial sequence
  Protein classification predicting sequence
HSGVTI

SEQ ID NO: 14614 - protein, 8 aa, Artificial sequence
  Protein classification predicting sequence
AAMLGLPL

SEQ ID NO: 14615 - protein, 8 aa, Artificial sequence
  Protein classification predicting sequence
SGLGLATA

SEQ ID NO: 14616 - protein, 6 aa, Artificial sequence
  Protein classification predicting sequence
TGGASG

SEQ ID NO: 14617 - protein, 6 aa, Artificial sequence
  Protein classification predicting sequence
QGGVWM

SEQ ID NO: 14618 - protein, 7 aa, Artificial sequence
  Protein classification predicting sequence
LAQAAES

SEQ ID NO: 14619 - protein, 6 aa, Artificial sequence
  Protein classification predicting sequence
ACQGCG

SEQ ID NO: 14620 - protein, 6 aa, Artificial sequence
  Protein classification predicting sequence
QILAQV

SEQ ID NO: 14621 - protein, 6 aa, Artificial sequence
  Protein classification predicting sequence
FGSFDK

SEQ ID NO: 14622 - protein, 7 aa, Artificial sequence
  Protein classification predicting sequence
EKFGIEL

SEQ ID NO: 14623 - protein, 6 aa, Artificial sequence
  Protein classification predicting sequence
GAGKMG

SEQ ID NO: 14624 - protein, 6 aa, Artificial sequence
  Protein classification predicting sequence
ESLERK

SEQ ID NO: 14625 - protein, 6 aa, Artificial sequence
  Protein classification predicting sequence
ERTRKG

SEQ ID NO: 14626 - protein, 6 aa, Artificial sequence
  Protein classification predicting sequence
AMSSLA

SEQ ID NO: 14627 - protein, 7 aa, Artificial sequence
  Protein classification predicting sequence
LSQRRAL

SEQ ID NO: 14628 - protein, 6 aa, Artificial sequence
  Protein classification predicting sequence
TLFNLE

SEQ ID NO: 14629 - protein, 7 aa, Artificial sequence
  Protein classification predicting sequence
TTVRDYT

SEQ ID NO: 14630 - protein, 6 aa, Artificial sequence
  Protein classification predicting sequence
VEIIFD

SEQ ID NO: 14631 - protein, 6 aa, Artificial sequence
  Protein classification predicting sequence
GFDILK

SEQ ID NO: 14632 - protein, 6 aa, Artificial sequence
  Protein classification predicting sequence
LYGLHL

SEQ ID NO: 14633 - protein, 6 aa, Artificial sequence
  Protein classification predicting sequence
AVSVAY

SEQ ID NO: 14634 - protein, 7 aa, Artificial sequence
  Protein classification predicting sequence
KIVEKLF

SEQ ID NO: 14635 - protein, 7 aa, Artificial sequence
  Protein classification predicting sequence
NRTLSKA

SEQ ID NO: 14636 - protein, 6 aa, Artificial sequence
  Protein classification predicting sequence
IGAGKM

SEQ ID NO: 14637 - protein, 7 aa, Artificial sequence
  Protein classification predicting sequence
ESMDQAL

SEQ ID NO: 14638 - protein, 6 aa, Artificial sequence
  Protein classification predicting sequence
FHRACR

SEQ ID NO: 14639 - protein, 7 aa, Artificial sequence
  Protein classification predicting sequence
DLTPIYG

SEQ ID NO: 14640 - protein, 6 aa, Artificial sequence
  Protein classification predicting sequence
SLVIHP

SEQ ID NO: 14641 - protein, 6 aa, Artificial sequence
  Protein classification predicting sequence
DPKVNG

SEQ ID NO: 14642 - protein, 6 aa, Artificial sequence
  Protein classification predicting sequence
LPFFAS

SEQ ID NO: 14643 - protein, 6 aa, Artificial sequence
  Protein classification predicting sequence
CNALET

SEQ ID NO: 14644 - protein, 6 aa, Artificial sequence
  Protein classification predicting sequence
IHPLNP

SEQ ID NO: 14645 - protein, 6 aa, Artificial sequence
  Protein classification predicting sequence
DLQDRI

SEQ ID NO: 14646 - protein, 7 aa, Artificial sequence
  Protein classification predicting sequence
SRVLADG

SEQ ID NO: 14647 - protein, 6 aa, Artificial sequence
  Protein classification predicting sequence
PAAPVF

SEQ ID NO: 14648 - protein, 5 aa, Artificial sequence
  Protein classification predicting sequence
SFGIQ

SEQ ID NO: 14649 - protein, 7 aa, Artificial sequence
  Protein classification predicting sequence
VMPIEKG

SEQ ID NO: 14650 - protein, 5 aa, Artificial sequence
  Protein classification predicting sequence
SCMTP

SEQ ID NO: 14651 - protein, 7 aa, Artificial sequence
  Protein classification predicting sequence
DGDFLIV

SEQ ID NO: 14652 - protein, 5 aa, Artificial sequence
  Protein classification predicting sequence
RASYP

SEQ ID NO: 14653 - protein, 6 aa, Artificial sequence
  Protein classification predicting sequence
QRVEFS

SEQ ID NO: 14654 - protein, 6 aa, Artificial sequence
  Protein classification predicting sequence
LRVSLA

SEQ ID NO: 14655 - protein, 6 aa, Artificial sequence
  Protein classification predicting sequence
VDIVTG

SEQ ID NO: 14656 - protein, 7 aa, Artificial sequence
  Protein classification predicting sequence
TVITLAD

SEQ ID NO: 14657 - protein, 6 aa, Artificial sequence
  Protein classification predicting sequence
CYGVVD

SEQ ID NO: 14658 - protein, 6 aa, Artificial sequence
  Protein classification predicting sequence
HAEAVR

SEQ ID NO: 14659 - protein, 6 aa, Artificial sequence
  Protein classification predicting sequence
ANQLAT

SEQ ID NO: 14660 - protein, 6 aa, Artificial sequence
  Protein classification predicting sequence
IRTHGD

SEQ ID NO: 14661 - protein, 7 aa, Artificial sequence
  Protein classification predicting sequence
VATDLLA

SEQ ID NO: 14662 - protein, 5 aa, Artificial sequence
  Protein classification predicting sequence
TCHEL

SEQ ID NO: 14663 - protein, 6 aa, Artificial sequence
  Protein classification predicting sequence
DRAGLY

SEQ ID NO: 14664 - protein, 7 aa, Artificial sequence
  Protein classification predicting sequence
IKSVVSG

SEQ ID NO: 14665 - protein, 6 aa, Artificial sequence
  Protein classification predicting sequence
SVKASD

SEQ ID NO: 14666 - protein, 7 aa, Artificial sequence
  Protein classification predicting sequence
ALKLAEI

SEQ ID NO: 14667 - protein, 7 aa, Artificial sequence
  Protein classification predicting sequence
GGTGLPG

SEQ ID NO: 14668 - protein, 6 aa, Artificial sequence
  Protein classification predicting sequence
AAGHLV

SEQ ID NO: 14669 - protein, 6 aa, Artificial sequence
  Protein classification predicting sequence
KFALSS

SEQ ID NO: 14670 - protein, 5 aa, Artificial sequence
  Protein classification predicting sequence
TQNEV

SEQ ID NO: 14671 - protein, 7 aa, Artificial sequence
  Protein classification predicting sequence
SRSSSPV

SEQ ID NO: 14672 - protein, 6 aa, Artificial sequence
  Protein classification predicting sequence
IKSTIP

SEQ ID NO: 14673 - protein, 6 aa, Artificial sequence
  Protein classification predicting sequence
TNTPVV

SEQ ID NO: 14674 - protein, 6 aa, Artificial sequence
  Protein classification predicting sequence
VGNLYF

SEQ ID NO: 14675 - protein, 7 aa, Artificial sequence
  Protein classification predicting sequence
GRGGAGF

SEQ ID NO: 14676 - protein, 13 aa, Artificial sequence
  Protein classification predicting sequence
GRGGAGFSTGLKW

SEQ ID NO: 14677 - protein, 6 aa, Artificial sequence
  Protein classification predicting sequence
TLRTYG

SEQ ID NO: 14678 - protein, 7 aa, Artificial sequence
  Protein classification predicting sequence
TAEDVGT

SEQ ID NO: 14679 - protein, 5 aa, Artificial sequence
  Protein classification predicting sequence
GHHTP

SEQ ID NO: 14680 - protein, 6 aa, Artificial sequence
  Protein classification predicting sequence
GMAFRV

SEQ ID NO: 14681 - protein, 6 aa, Artificial sequence
  Protein classification predicting sequence
FGEGNF

SEQ ID NO: 14682 - protein, 7 aa, Artificial sequence
  Protein classification predicting sequence
GGSIVNI

SEQ ID NO: 14683 - protein, 6 aa, Artificial sequence
  Protein classification predicting sequence
KPTKYG

SEQ ID NO: 14684 - protein, 6 aa, Artificial sequence
  Protein classification predicting sequence
KIIIPT

SEQ ID NO: 14685 - protein, 6 aa, Artificial sequence
  Protein classification predicting sequence
KPALLC

SEQ ID NO: 14686 - protein, 5 aa, Artificial sequence
  Protein classification predicting sequence
LKKMW

SEQ ID NO: 14687 - protein, 6 aa, Artificial sequence
  Protein classification predicting sequence
YNVIVT

SEQ ID NO: 14688 - protein, 6 aa, Artificial sequence
  Protein classification predicting sequence
RLMDGA

SEQ ID NO: 14689 - protein, 6 aa, Artificial sequence
  Protein classification predicting sequence
NPKNGK

SEQ ID NO: 14690 - protein, 6 aa, Artificial sequence
  Protein classification predicting sequence
NPEKFD

SEQ ID NO: 14691 - protein, 6 aa, Artificial sequence
  Protein classification predicting sequence
YPGTPS

SEQ ID NO: 14692 - protein, 6 aa, Artificial sequence
  Protein classification predicting sequence
IFKNAL

SEQ ID NO: 14693 - protein, 6 aa, Artificial sequence
  Protein classification predicting sequence
VLKDIQ

SEQ ID NO: 14694 - protein, 7 aa, Artificial sequence
  Protein classification predicting sequence
LIAVYQD

SEQ ID NO: 14695 - protein, 6 aa, Artificial sequence
  Protein classification predicting sequence
THLIQA

SEQ ID NO: 14696 - protein, 7 aa, Artificial sequence
  Protein classification predicting sequence
LKGKTIA

SEQ ID NO: 14697 - protein, 6 aa, Artificial sequence
  Protein classification predicting sequence
VEGGNK

SEQ ID NO: 14698 - protein, 6 aa, Artificial sequence
  Protein classification predicting sequence
LTVGPR

SEQ ID NO: 14699 - protein, 6 aa, Artificial sequence
  Protein classification predicting sequence
VLCGGL

SEQ ID NO: 14700 - protein, 7 aa, Artificial sequence
  Protein classification predicting sequence
GKALDIA

SEQ ID NO: 14701 - protein, 6 aa, Artificial sequence
  Protein classification predicting sequence
VIAGNV

SEQ ID NO: 14702 - protein, 6 aa, Artificial sequence
  Protein classification predicting sequence
AGNVAT

SEQ ID NO: 14703 - protein, 6 aa, Artificial sequence
  Protein classification predicting sequence
VVKVGI

SEQ ID NO: 14704 - protein, 9 aa, Artificial sequence
  Protein classification predicting sequence
VKVGIGPGS

SEQ ID NO: 14705 - protein, 7 aa, Artificial sequence
  Protein classification predicting sequence
IIADGGI

SEQ ID NO: 14706 - protein, 6 aa, Artificial sequence
  Protein classification predicting sequence
ESPGET

SEQ ID NO: 14707 - protein, 6 aa, Artificial sequence
  Protein classification predicting sequence
DNGYLK

SEQ ID NO: 14708 - protein, 6 aa, Artificial sequence
  Protein classification predicting sequence
IADGGI

SEQ ID NO: 14709 - protein, 8 aa, Artificial sequence
  Protein classification predicting sequence
TAEEVDLS

SEQ ID NO: 14710 - protein, 6 aa, Artificial sequence
  Protein classification predicting sequence
LVGIIT

SEQ ID NO: 14711 - protein, 6 aa, Artificial sequence
  Protein classification predicting sequence
KNKDTP

SEQ ID NO: 14712 - protein, 7 aa, Artificial sequence
  Protein classification predicting sequence
FQERATF

SEQ ID NO: 14713 - protein, 7 aa, Artificial sequence
  Protein classification predicting sequence
VIADGGI

SEQ ID NO: 14714 - protein, 5 aa, Artificial sequence
  Protein classification predicting sequence
SGQKC

SEQ ID NO: 14715 - protein, 6 aa, Artificial sequence
  Protein classification predicting sequence
YKIGEL

SEQ ID NO: 14716 - protein, 6 aa, Artificial sequence
  Protein classification predicting sequence
ASGGAF

SEQ ID NO: 14717 - protein, 7 aa, Artificial sequence
  Protein classification predicting sequence
KKNPERY

SEQ ID NO: 14718 - protein, 7 aa, Artificial sequence
  Protein classification predicting sequence
LSIALNG

SEQ ID NO: 14719 - protein, 7 aa, Artificial sequence
  Protein classification predicting sequence
PGTGETP

SEQ ID NO: 14720 - protein, 6 aa, Artificial sequence
  Protein classification predicting sequence
KKAGVY

SEQ ID NO: 14721 - protein, 6 aa, Artificial sequence
  Protein classification predicting sequence
FGDDVY

SEQ ID NO: 14722 - protein, 5 aa, Artificial sequence
  Protein classification predicting sequence
TSTMD

SEQ ID NO: 14723 - protein, 6 aa, Artificial sequence
  Protein classification predicting sequence
AESFKI

SEQ ID NO: 14724 - protein, 6 aa, Artificial sequence
  Protein classification predicting sequence
SLAADP

SEQ ID NO: 14725 - protein, 6 aa, Artificial sequence
  Protein classification predicting sequence
LDSARF

SEQ ID NO: 14726 - protein, 7 aa, Artificial sequence
  Protein classification predicting sequence
DVEATVA

SEQ ID NO: 14727 - protein, 7 aa, Artificial sequence
  Protein classification predicting sequence
GMVESAL

SEQ ID NO: 14728 - protein, 6 aa, Artificial sequence
  Protein classification predicting sequence
GSVKSA

SEQ ID NO: 14729 - protein, 6 aa, Artificial sequence
  Protein classification predicting sequence
IFRENT

SEQ ID NO: 14730 - protein, 6 aa, Artificial sequence
  Protein classification predicting sequence
VFDDAD

SEQ ID NO: 14731 - protein, 6 aa, Artificial sequence
  Protein classification predicting sequence
SKDPFE

SEQ ID NO: 14732 - protein, 6 aa, Artificial sequence
  Protein classification predicting sequence
GMVESA

SEQ ID NO: 14733 - protein, 6 aa, Artificial sequence
  Protein classification predicting sequence
QVVDSA

SEQ ID NO: 14734 - protein, 6 aa, Artificial sequence
  Protein classification predicting sequence
LWMGIG

SEQ ID NO: 14735 - protein, 7 aa, Artificial sequence
  Protein classification predicting sequence
KRMDELG

SEQ ID NO: 14736 - protein, 6 aa, Artificial sequence
  Protein classification predicting sequence
RQILRA

SEQ ID NO: 14737 - protein, 7 aa, Artificial sequence
  Protein classification predicting sequence
EKTEEVI

SEQ ID NO: 14738 - protein, 7 aa, Artificial sequence
  Protein classification predicting sequence
IFAKKFD

SEQ ID NO: 14739 - protein, 7 aa, Artificial sequence
  Protein classification predicting sequence
EIVALLK

SEQ ID NO: 14740 - protein, 7 aa, Artificial sequence
  Protein classification predicting sequence
YFVVLVG

SEQ ID NO: 14741 - protein, 6 aa, Artificial sequence
  Protein classification predicting sequence
GAPIYV

SEQ ID NO: 14742 - protein, 7 aa, Artificial sequence
  Protein classification predicting sequence
VQTVDDV

SEQ ID NO: 14743 - protein, 6 aa, Artificial sequence
  Protein classification predicting sequence
VIVVGS

SEQ ID NO: 14744 - protein, 6 aa, Artificial sequence
  Protein classification predicting sequence
KPLTYL

SEQ ID NO: 14745 - protein, 7 aa, Artificial sequence
  Protein classification predicting sequence
GVTTVGV

SEQ ID NO: 14746 - protein, 7 aa, Artificial sequence
  Protein classification predicting sequence
HSERYNR

SEQ ID NO: 14747 - protein, 6 aa, Artificial sequence
  Protein classification predicting sequence
GASTPD

SEQ ID NO: 14748 - protein, 5 aa, Artificial sequence
  Protein classification predicting sequence
RYNRK

SEQ ID NO: 14749 - protein, 6 aa, Artificial sequence
  Protein classification predicting sequence
DFSGVA

SEQ ID NO: 14750 - protein, 6 aa, Artificial sequence
  Protein classification predicting sequence
KESEYE

SEQ ID NO: 14751 - protein, 6 aa, Artificial sequence
  Protein classification predicting sequence
QGGITL

SEQ ID NO: 14752 - protein, 7 aa, Artificial sequence
  Protein classification predicting sequence
SNHGGRQ

SEQ ID NO: 14753 - protein, 7 aa, Artificial sequence
  Protein classification predicting sequence
SGARYAV

SEQ ID NO: 14754 - protein, 6 aa, Artificial sequence
  Protein classification predicting sequence
KGDNFQ

SEQ ID NO: 14755 - protein, 6 aa, Artificial sequence
  Protein classification predicting sequence
LQRFSF

SEQ ID NO: 14756 - protein, 5 aa, Artificial sequence
  Protein classification predicting sequence
KIAPD

SEQ ID NO: 14757 - protein, 5 aa, Artificial sequence
  Protein classification predicting sequence
KGDNF

SEQ ID NO: 14758 - protein, 6 aa, Artificial sequence
  Protein classification predicting sequence
PGGSAP

SEQ ID NO: 14759 - protein, 8 aa, Artificial sequence
  Protein classification predicting sequence
LPHNKVIG

SEQ ID NO: 14760 - protein, 7 aa, Artificial sequence
  Protein classification predicting sequence
DADLVVI

SEQ ID NO: 14761 - protein, 6 aa, Artificial sequence
  Protein classification predicting sequence
KEVVDG

SEQ ID NO: 14762 - protein, 6 aa, Artificial sequence
  Protein classification predicting sequence
EEAIHH

SEQ ID NO: 14763 - protein, 7 aa, Artificial sequence
  Protein classification predicting sequence
VAIVGAG

SEQ ID NO: 14764 - protein, 5 aa, Artificial sequence
  Protein classification predicting sequence
TLWSI

SEQ ID NO: 14765 - protein, 6 aa, Artificial sequence
  Protein classification predicting sequence
VTANSK

SEQ ID NO: 14766 - protein, 7 aa, Artificial sequence
  Protein classification predicting sequence
PDKRLAD

SEQ ID NO: 14767 - protein, 6 aa, Artificial sequence
  Protein classification predicting sequence
VGASYV

SEQ ID NO: 14768 - protein, 7 aa, Artificial sequence
  Protein classification predicting sequence
SGIPVSE

SEQ ID NO: 14769 - protein, 6 aa, Artificial sequence
  Protein classification predicting sequence
VGVAYA

SEQ ID NO: 14770 - protein, 7 aa, Artificial sequence
  Protein classification predicting sequence
ELEGRLE

SEQ ID NO: 14771 - protein, 7 aa, Artificial sequence
  Protein classification predicting sequence
PVSALLH

SEQ ID NO: 14772 - protein, 6 aa, Artificial sequence
  Protein classification predicting sequence
GVRQKE

SEQ ID NO: 14773 - protein, 6 aa, Artificial sequence
  Protein classification predicting sequence
RIHPVS

SEQ ID NO: 14774 - protein, 7 aa, Artificial sequence
  Protein classification predicting sequence
SKALLNN

SEQ ID NO: 14775 - protein, 6 aa, Artificial sequence
  Protein classification predicting sequence
RVVGSG

SEQ ID NO: 14776 - protein, 7 aa, Artificial sequence
  Protein classification predicting sequence
AFTLALS

SEQ ID NO: 14777 - protein, 6 aa, Artificial sequence
  Protein classification predicting sequence
NAKIIR

SEQ ID NO: 14778 - protein, 6 aa, Artificial sequence
  Protein classification predicting sequence
EVSALW

SEQ ID NO: 14779 - protein, 6 aa, Artificial sequence
  Protein classification predicting sequence
AYDTLP

SEQ ID NO: 14780 - protein, 6 aa, Artificial sequence
  Protein classification predicting sequence
VMSAVC

SEQ ID NO: 14781 - protein, 6 aa, Artificial sequence
  Protein classification predicting sequence
VSKNYP

SEQ ID NO: 14782 - protein, 6 aa, Artificial sequence
  Protein classification predicting sequence
PSQFDV

SEQ ID NO: 14783 - protein, 6 aa, Artificial sequence
  Protein classification predicting sequence
LAGASS

SEQ ID NO: 14784 - protein, 6 aa, Artificial sequence
  Protein classification predicting sequence
VGGPKW

SEQ ID NO: 14785 - protein, 6 aa, Artificial sequence
  Protein classification predicting sequence
GVYYGQ

SEQ ID NO: 14786 - protein, 6 aa, Artificial sequence
  Protein classification predicting sequence
AIGTHE

SEQ ID NO: 14787 - protein, 5 aa, Artificial sequence
  Protein classification predicting sequence
GPNHV

SEQ ID NO: 14788 - protein, 6 aa, Artificial sequence
  Protein classification predicting sequence
FAAIFW

SEQ ID NO: 14789 - protein, 7 aa, Artificial sequence
  Protein classification predicting sequence
PIADAVK

SEQ ID NO: 14790 - protein, 7 aa, Artificial sequence
  Protein classification predicting sequence
TINDLPV

SEQ ID NO: 14791 - protein, 6 aa, Artificial sequence
  Protein classification predicting sequence
FDKVMS

SEQ ID NO: 14792 - protein, 6 aa, Artificial sequence
  Protein classification predicting sequence
VFKLLE

SEQ ID NO: 14793 - protein, 6 aa, Artificial sequence
  Protein classification predicting sequence
QMPAAL

SEQ ID NO: 14794 - protein, 6 aa, Artificial sequence
  Protein classification predicting sequence
YVPRDE

SEQ ID NO: 14795 - protein, 6 aa, Artificial sequence
  Protein classification predicting sequence
NHDPEL

SEQ ID NO: 14796 - protein, 6 aa, Artificial sequence
  Protein classification predicting sequence
IIKNMH

SEQ ID NO: 14797 - protein, 6 aa, Artificial sequence
  Protein classification predicting sequence
LLNNSH

SEQ ID NO: 14798 - protein, 6 aa, Artificial sequence
  Protein classification predicting sequence
WATEYL

SEQ ID NO: 14799 - protein, 6 aa, Artificial sequence
  Protein classification predicting sequence
IVGAAG

SEQ ID NO: 14800 - protein, 7 aa, Artificial sequence
  Protein classification predicting sequence
INAGGVI

SEQ ID NO: 14801 - protein, 6 aa, Artificial sequence
  Protein classification predicting sequence
TASGGP

SEQ ID NO: 14802 - protein, 6 aa, Artificial sequence
  Protein classification predicting sequence
RFGSKL

SEQ ID NO: 14803 - protein, 6 aa, Artificial sequence
  Protein classification predicting sequence
YYNNEE

SEQ ID NO: 14804 - protein, 6 aa, Artificial sequence
  Protein classification predicting sequence
INYYDS

SEQ ID NO: 14805 - protein, 6 aa, Artificial sequence
  Protein classification predicting sequence
EIIASM

SEQ ID NO: 14806 - protein, 5 aa, Artificial sequence
  Protein classification predicting sequence
TSVDH

SEQ ID NO: 14807 - protein, 7 aa, Artificial sequence
  Protein classification predicting sequence
PLIIGGE

SEQ ID NO: 14808 - protein, 6 aa, Artificial sequence
  Protein classification predicting sequence
LNINQI

SEQ ID NO: 14809 - protein, 6 aa, Artificial sequence
  Protein classification predicting sequence
SIATFQ

SEQ ID NO: 14810 - protein, 6 aa, Artificial sequence
  Protein classification predicting sequence
QYQTPL

SEQ ID NO: 14811 - protein, 6 aa, Artificial sequence
  Protein classification predicting sequence
DGEEYI

SEQ ID NO: 14812 - protein, 5 aa, Artificial sequence
  Protein classification predicting sequence
ANNMF

SEQ ID NO: 14813 - protein, 7 aa, Artificial sequence
  Protein classification predicting sequence
KIVVVGA

SEQ ID NO: 14814 - protein, 6 aa, Artificial sequence
  Protein classification predicting sequence
DHTVLF

SEQ ID NO: 14815 - protein, 6 aa, Artificial sequence
  Protein classification predicting sequence
RLNLVQ

SEQ ID NO: 14816 - protein, 6 aa, Artificial sequence
  Protein classification predicting sequence
LGLGPL

SEQ ID NO: 14817 - protein, 5 aa, Artificial sequence
  Protein classification predicting sequence
AMFYS

SEQ ID NO: 14818 - protein, 6 aa, Artificial sequence
  Protein classification predicting sequence
TGINPL

SEQ ID NO: 14819 - protein, 5 aa, Artificial sequence
  Protein classification predicting sequence
CGPPP

SEQ ID NO: 14820 - protein, 6 aa, Artificial sequence
  Protein classification predicting sequence
STPGIF

SEQ ID NO: 14821 - protein, 5 aa, Artificial sequence
  Protein classification predicting sequence
YEGSP

SEQ ID NO: 14822 - protein, 7 aa, Artificial sequence
  Protein classification predicting sequence
REFVKQG

SEQ ID NO: 14823 - protein, 9 aa, Artificial sequence
  Protein classification predicting sequence
VVVGGGYIG

SEQ ID NO: 14824 - protein, 12 aa, Artificial sequence
  Protein classification predicting sequence
VVVGGGYIGLEL

SEQ ID NO: 14825 - protein, 6 aa, Artificial sequence
  Protein classification predicting sequence
SIPEKN

SEQ ID NO: 14826 - protein, 7 aa, Artificial sequence
  Protein classification predicting sequence
KVAILGA

SEQ ID NO: 14827 - protein, 7 aa, Artificial sequence
  Protein classification predicting sequence
VAIIGAG

SEQ ID NO: 14828 - protein, 6 aa, Artificial sequence
  Protein classification predicting sequence
IGVNAG

SEQ ID NO: 14829 - protein, 5 aa, Artificial sequence
  Protein classification predicting sequence
MEGPT

SEQ ID NO: 14830 - protein, 6 aa, Artificial sequence
  Protein classification predicting sequence
KIAPDL

SEQ ID NO: 14831 - protein, 6 aa, Artificial sequence
  Protein classification predicting sequence
GSIFAG

SEQ ID NO: 14832 - protein, 6 aa, Artificial sequence
  Protein classification predicting sequence
EEILPI

SEQ ID NO: 14833 - protein, 6 aa, Artificial sequence
  Protein classification predicting sequence
RGSSSA

SEQ ID NO: 14834 - protein, 6 aa, Artificial sequence
  Protein classification predicting sequence
TDPTDA

SEQ ID NO: 14835 - protein, 6 aa, Artificial sequence
  Protein classification predicting sequence
GKALDI

SEQ ID NO: 14836 - protein, 6 aa, Artificial sequence
  Protein classification predicting sequence
SSIGSL

SEQ ID NO: 14837 - protein, 7 aa, Artificial sequence
  Protein classification predicting sequence
GEQATFD

SEQ ID NO: 14838 - protein, 6 aa, Artificial sequence
  Protein classification predicting sequence
KELVEL

SEQ ID NO: 14839 - protein, 6 aa, Artificial sequence
  Protein classification predicting sequence
LSDEAS

SEQ ID NO: 14840 - protein, 6 aa, Artificial sequence
  Protein classification predicting sequence
EEIKVG

SEQ ID NO: 14841 - protein, 6 aa, Artificial sequence
  Protein classification predicting sequence
YDRISF

SEQ ID NO: 14842 - protein, 6 aa, Artificial sequence
  Protein classification predicting sequence
GGRSRV

SEQ ID NO: 14843 - protein, 7 aa, Artificial sequence
  Protein classification predicting sequence
VDKGTVI

SEQ ID NO: 14844 - protein, 6 aa, Artificial sequence
  Protein classification predicting sequence
NQLATD

SEQ ID NO: 14845 - protein, 6 aa, Artificial sequence
  Protein classification predicting sequence
GDFAGI

SEQ ID NO: 14846 - protein, 6 aa, Artificial sequence
  Protein classification predicting sequence
EESYRV

SEQ ID NO: 14847 - protein, 7 aa, Artificial sequence
  Protein classification predicting sequence
AGYYLAK

SEQ ID NO: 14848 - protein, 6 aa, Artificial sequence
  Protein classification predicting sequence
SGRPLQ

SEQ ID NO: 14849 - protein, 5 aa, Artificial sequence
  Protein classification predicting sequence
VFPYE

SEQ ID NO: 14850 - protein, 7 aa, Artificial sequence
  Protein classification predicting sequence
DILKSKD

SEQ ID NO: 14851 - protein, 6 aa, Artificial sequence
  Protein classification predicting sequence
VRRRGD

SEQ ID NO: 14852 - protein, 6 aa, Artificial sequence
  Protein classification predicting sequence
GRTESI

SEQ ID NO: 14853 - protein, 5 aa, Artificial sequence
  Protein classification predicting sequence
IFYEN

SEQ ID NO: 14854 - protein, 6 aa, Artificial sequence
  Protein classification predicting sequence
LCDAFT

SEQ ID NO: 14855 - protein, 6 aa, Artificial sequence
  Protein classification predicting sequence
EDESHN

SEQ ID NO: 14856 - protein, 7 aa, Artificial sequence
  Protein classification predicting sequence
KKSEAEL

SEQ ID NO: 14857 - protein, 5 aa, Artificial sequence
  Protein classification predicting sequence
SYEVT

SEQ ID NO: 14858 - protein, 7 aa, Artificial sequence
  Protein classification predicting sequence
KKPGLYS

SEQ ID NO: 14859 - protein, 6 aa, Artificial sequence
  Protein classification predicting sequence
GHGTLG

SEQ ID NO: 14860 - protein, 6 aa, Artificial sequence
  Protein classification predicting sequence
YFVDNN

SEQ ID NO: 14861 - protein, 6 aa, Artificial sequence
  Protein classification predicting sequence
YQPGDA

SEQ ID NO: 14862 - protein, 8 aa, Artificial sequence
  Protein classification predicting sequence
HIYVCGDA

SEQ ID NO: 14863 - protein, 6 aa, Artificial sequence
  Protein classification predicting sequence
KRNMPG

SEQ ID NO: 14864 - protein, 5 aa, Artificial sequence
  Protein classification predicting sequence
SQMCE

SEQ ID NO: 14865 - protein, 6 aa, Artificial sequence
  Protein classification predicting sequence
INRIIE

SEQ ID NO: 14866 - protein, 6 aa, Artificial sequence
  Protein classification predicting sequence
GYTGAE

SEQ ID NO: 14867 - protein, 6 aa, Artificial sequence
  Protein classification predicting sequence
GVIVHL

SEQ ID NO: 14868 - protein, 6 aa, Artificial sequence
  Protein classification predicting sequence
AFHTFG

SEQ ID NO: 14869 - protein, 6 aa, Artificial sequence
  Protein classification predicting sequence
DAIVTE

SEQ ID NO: 14870 - protein, 7 aa, Artificial sequence
  Protein classification predicting sequence
SGIGGLA

SEQ ID NO: 14871 - protein, 7 aa, Artificial sequence
  Protein classification predicting sequence
AQGGIAA

SEQ ID NO: 14872 - protein, 7 aa, Artificial sequence
  Protein classification predicting sequence
SRDVVSR

SEQ ID NO: 14873 - protein, 5 aa, Artificial sequence
  Protein classification predicting sequence
SLWYM

SEQ ID NO: 14874 - protein, 6 aa, Artificial sequence
  Protein classification predicting sequence
RTESRG

SEQ ID NO: 14875 - protein, 7 aa, Artificial sequence
  Protein classification predicting sequence
AAREGAS

SEQ ID NO: 14876 - protein, 6 aa, Artificial sequence
  Protein classification predicting sequence
DVSIIG

SEQ ID NO: 14877 - protein, 11 aa, Artificial sequence
  Protein classification predicting sequence
GVPLRDMEFVQ

SEQ ID NO: 14878 - protein, 7 aa, Artificial sequence
  Protein classification predicting sequence
LASRDVV

SEQ ID NO: 14879 - protein, 6 aa, Artificial sequence
  Protein classification predicting sequence
GPRRVV

SEQ ID NO: 14880 - protein, 6 aa, Artificial sequence
  Protein classification predicting sequence
PTILAA

SEQ ID NO: 14881 - protein, 8 aa, Artificial sequence
  Protein classification predicting sequence
EFVQFHPT

SEQ ID NO: 14882 - protein, 6 aa, Artificial sequence
  Protein classification predicting sequence
RKESRG

SEQ ID NO: 14883 - protein, 6 aa, Artificial sequence
  Protein classification predicting sequence
LDLSPI

SEQ ID NO: 14884 - protein, 6 aa, Artificial sequence
  Protein classification predicting sequence
GGIAID

SEQ ID NO: 14885 - protein, 6 aa, Artificial sequence
  Protein classification predicting sequence
LIENVA

SEQ ID NO: 14886 - protein, 6 aa, Artificial sequence
  Protein classification predicting sequence
IHQIKN

SEQ ID NO: 14887 - protein, 7 aa, Artificial sequence
  Protein classification predicting sequence
DLGIWDD

SEQ ID NO: 14888 - protein, 6 aa, Artificial sequence
  Protein classification predicting sequence
DEYGGS

SEQ ID NO: 14889 - protein, 7 aa, Artificial sequence
  Protein classification predicting sequence
GGSGITP

SEQ ID NO: 14890 - protein, 6 aa, Artificial sequence
  Protein classification predicting sequence
AHGYLI

SEQ ID NO: 14891 - protein, 5 aa, Artificial sequence
  Protein classification predicting sequence
WQRYV

SEQ ID NO: 14892 - protein, 6 aa, Artificial sequence
  Protein classification predicting sequence
VVFVPW

SEQ ID NO: 14893 - protein, 7 aa, Artificial sequence
  Protein classification predicting sequence
LHPDAEI

SEQ ID NO: 14894 - protein, 6 aa, Artificial sequence
  Protein classification predicting sequence
RATVRD

SEQ ID NO: 14895 - protein, 6 aa, Artificial sequence
  Protein classification predicting sequence
VTTAIS

SEQ ID NO: 14896 - protein, 6 aa, Artificial sequence
  Protein classification predicting sequence
EAGGLS

SEQ ID NO: 14897 - protein, 6 aa, Artificial sequence
  Protein classification predicting sequence
VATNPV

SEQ ID NO: 14898 - protein, 6 aa, Artificial sequence
  Protein classification predicting sequence
RLEKND

SEQ ID NO: 14899 - protein, 9 aa, Artificial sequence
  Protein classification predicting sequence
CPYCGVGCG

SEQ ID NO: 14900 - protein, 7 aa, Artificial sequence
  Protein classification predicting sequence
LAGDTRS

SEQ ID NO: 14901 - protein, 6 aa, Artificial sequence
  Protein classification predicting sequence
HLAPFL

SEQ ID NO: 14902 - protein, 9 aa, Artificial sequence
  Protein classification predicting sequence
VVEEIKAKG

SEQ ID NO: 14903 - protein, 6 aa, Artificial sequence
  Protein classification predicting sequence
FRGPNG

SEQ ID NO: 14904 - protein, 8 aa, Artificial sequence
  Protein classification predicting sequence
CGPPPMIQ

SEQ ID NO: 14905 - protein, 6 aa, Artificial sequence
  Protein classification predicting sequence
KVYVQH

SEQ ID NO: 14906 - protein, 7 aa, Artificial sequence
  Protein classification predicting sequence
NFKLPAD

SEQ ID NO: 14907 - protein, 10 aa, Artificial sequence
  Protein classification predicting sequence
PVIMIGPGTG

SEQ ID NO: 14908 - protein, 7 aa, Artificial sequence
  Protein classification predicting sequence
GEEFAGR

SEQ ID NO: 14909 - protein, 5 aa, Artificial sequence
  Protein classification predicting sequence
RSEDY

SEQ ID NO: 14910 - protein, 6 aa, Artificial sequence
  Protein classification predicting sequence
LSTKGN

SEQ ID NO: 14911 - protein, 6 aa, Artificial sequence
  Protein classification predicting sequence
QFRLLE

SEQ ID NO: 14912 - protein, 7 aa, Artificial sequence
  Protein classification predicting sequence
LPGLKYV

SEQ ID NO: 14913 - protein, 6 aa, Artificial sequence
  Protein classification predicting sequence
AIFGLG

SEQ ID NO: 14914 - protein, 5 aa, Artificial sequence
  Protein classification predicting sequence
RHMHG

SEQ ID NO: 14915 - protein, 6 aa, Artificial sequence
  Protein classification predicting sequence
YGEALD

SEQ ID NO: 14916 - protein, 6 aa, Artificial sequence
  Protein classification predicting sequence
LKTIFA

SEQ ID NO: 14917 - protein, 6 aa, Artificial sequence
  Protein classification predicting sequence
PEADEI

SEQ ID NO: 14918 - protein, 7 aa, Artificial sequence
  Protein classification predicting sequence
KPALRVA

SEQ ID NO: 14919 - protein, 5 aa, Artificial sequence
  Protein classification predicting sequence
PFMNT

SEQ ID NO: 14920 - protein, 7 aa, Artificial sequence
  Protein classification predicting sequence
CGPPPMI

SEQ ID NO: 14921 - protein, 7 aa, Artificial sequence
  Protein classification predicting sequence
GAAAVST

SEQ ID NO: 14922 - protein, 10 aa, Artificial sequence
  Protein classification predicting sequence
MIAGGTGITP

SEQ ID NO: 14923 - protein, 7 aa, Artificial sequence
  Protein classification predicting sequence
FRFALPS

SEQ ID NO: 14924 - protein, 5 aa, Artificial sequence
  Protein classification predicting sequence
STPFM

SEQ ID NO: 14925 - protein, 8 aa, Artificial sequence
  Protein classification predicting sequence
DLFGGRVH

SEQ ID NO: 14926 - protein, 6 aa, Artificial sequence
  Protein classification predicting sequence
WRVCAL

SEQ ID NO: 14927 - protein, 6 aa, Artificial sequence
  Protein classification predicting sequence
FRFALP

SEQ ID NO: 14928 - protein, 8 aa, Artificial sequence
  Protein classification predicting sequence
LVVKVYFK

SEQ ID NO: 14929 - protein, 7 aa, Artificial sequence
  Protein classification predicting sequence
GGTGITP

SEQ ID NO: 14930 - protein, 10 aa, Artificial sequence
  Protein classification predicting sequence
CGPPPMIQFA

SEQ ID NO: 14931 - protein, 8 aa, Artificial sequence
  Protein classification predicting sequence
PVRVVVPG

SEQ ID NO: 14932 - protein, 7 aa, Artificial sequence
  Protein classification predicting sequence
GLPVGQH

SEQ ID NO: 14933 - protein, 8 aa, Artificial sequence
  Protein classification predicting sequence
AGGTGITP

SEQ ID NO: 14934 - protein, 6 aa, Artificial sequence
  Protein classification predicting sequence
ASWQLA

SEQ ID NO: 14935 - protein, 6 aa, Artificial sequence
  Protein classification predicting sequence
KYGKMW

SEQ ID NO: 14936 - protein, 5 aa, Artificial sequence
  Protein classification predicting sequence
NWSMG

SEQ ID NO: 14937 - protein, 6 aa, Artificial sequence
  Protein classification predicting sequence
SDGSYG

SEQ ID NO: 14938 - protein, 6 aa, Artificial sequence
  Protein classification predicting sequence
YIDNAT

SEQ ID NO: 14939 - protein, 6 aa, Artificial sequence
  Protein classification predicting sequence
STYPEK

SEQ ID NO: 14940 - protein, 5 aa, Artificial sequence
  Protein classification predicting sequence
NFFGP

SEQ ID NO: 14941 - protein, 7 aa, Artificial sequence
  Protein classification predicting sequence
SLDELFQ

SEQ ID NO: 14942 - protein, 6 aa, Artificial sequence
  Protein classification predicting sequence
IALANK

SEQ ID NO: 14943 - protein, 5 aa, Artificial sequence
  Protein classification predicting sequence
ICNSR

SEQ ID NO: 14944 - protein, 6 aa, Artificial sequence
  Protein classification predicting sequence
GGIICN

SEQ ID NO: 14945 - protein, 6 aa, Artificial sequence
  Protein classification predicting sequence
GIENEV

SEQ ID NO: 14946 - protein, 6 aa, Artificial sequence
  Protein classification predicting sequence
EGYRNT

SEQ ID NO: 14947 - protein, 6 aa, Artificial sequence
  Protein classification predicting sequence
LAETNR

SEQ ID NO: 14948 - protein, 7 aa, Artificial sequence
  Protein classification predicting sequence
KPLSIEE

SEQ ID NO: 14949 - protein, 6 aa, Artificial sequence
  Protein classification predicting sequence
DLDFVF

SEQ ID NO: 14950 - protein, 7 aa, Artificial sequence
  Protein classification predicting sequence
LMAKDLG

SEQ ID NO: 14951 - protein, 6 aa, Artificial sequence
  Protein classification predicting sequence
TLVVHE

SEQ ID NO: 14952 - protein, 6 aa, Artificial sequence
  Protein classification predicting sequence
IPGGSA

SEQ ID NO: 14953 - protein, 5 aa, Artificial sequence
  Protein classification predicting sequence
TGCPN

SEQ ID NO: 14954 - protein, 8 aa, Artificial sequence
  Protein classification predicting sequence
GFNVLVGG

SEQ ID NO: 14955 - protein, 8 aa, Artificial sequence
  Protein classification predicting sequence
GLTKSAAR

SEQ ID NO: 14956 - protein, 6 aa, Artificial sequence
  Protein classification predicting sequence
KYDGRF

SEQ ID NO: 14957 - protein, 7 aa, Artificial sequence
  Protein classification predicting sequence
LAGLAGV

SEQ ID NO: 14958 - protein, 6 aa, Artificial sequence
  Protein classification predicting sequence
LKPGEL

SEQ ID NO: 14959 - protein, 7 aa, Artificial sequence
  Protein classification predicting sequence
DPAKYRS

SEQ ID NO: 14960 - protein, 5 aa, Artificial sequence
  Protein classification predicting sequence
VAWQV

SEQ ID NO: 14961 - protein, 7 aa, Artificial sequence
  Protein classification predicting sequence
TWQVQDK

SEQ ID NO: 14962 - protein, 6 aa, Artificial sequence
  Protein classification predicting sequence
PYAVDG

SEQ ID NO: 14963 - protein, 6 aa, Artificial sequence
  Protein classification predicting sequence
IFQFPL

SEQ ID NO: 14964 - protein, 10 aa, Artificial sequence
  Protein classification predicting sequence
ADLVIFQFPL

SEQ ID NO: 14965 - protein, 13 aa, Artificial sequence
  Protein classification predicting sequence
ADLVIFQFPLYWF

SEQ ID NO: 14966 - protein, 8 aa, Artificial sequence
  Protein classification predicting sequence
SDLYAMNF

SEQ ID NO: 14967 - protein, 8 aa, Artificial sequence
  Protein classification predicting sequence
VPAILKGW

SEQ ID NO: 14968 - protein, 6 aa, Artificial sequence
  Protein classification predicting sequence
RRVQQE

SEQ ID NO: 14969 - protein, 6 aa, Artificial sequence
  Protein classification predicting sequence
LRIRAR

SEQ ID NO: 14970 - protein, 7 aa, Artificial sequence
  Protein classification predicting sequence
PYRVKVR

SEQ ID NO: 14971 - protein, 5 aa, Artificial sequence
  Protein classification predicting sequence
PGCPP

SEQ ID NO: 14972 - protein, 7 aa, Artificial sequence
  Protein classification predicting sequence
VKDVTDK

SEQ ID NO: 14973 - protein, 6 aa, Artificial sequence
  Protein classification predicting sequence
IVEDKL

SEQ ID NO: 14974 - protein, 6 aa, Artificial sequence
  Protein classification predicting sequence
PFDLAE

SEQ ID NO: 14975 - protein, 6 aa, Artificial sequence
  Protein classification predicting sequence
GAFHNP

SEQ ID NO: 14976 - protein, 4 aa, Artificial sequence
  Protein classification predicting sequence
MMWF

SEQ ID NO: 14977 - protein, 6 aa, Artificial sequence
  Protein classification predicting sequence
ASPTLF

SEQ ID NO: 14978 - protein, 5 aa, Artificial sequence
  Protein classification predicting sequence
WLILP

SEQ ID NO: 14979 - protein, 6 aa, Artificial sequence
  Protein classification predicting sequence
LAIILL

SEQ ID NO: 14980 - protein, 6 aa, Artificial sequence
  Protein classification predicting sequence
FMNLLT

SEQ ID NO: 14981 - protein, 6 aa, Artificial sequence
  Protein classification predicting sequence
AHRPEL

SEQ ID NO: 14982 - protein, 6 aa, Artificial sequence
  Protein classification predicting sequence
QRRLGP

SEQ ID NO: 14983 - protein, 7 aa, Artificial sequence
  Protein classification predicting sequence
VGSRNSS

SEQ ID NO: 14984 - protein, 5 aa, Artificial sequence
  Protein classification predicting sequence
GYCHI

SEQ ID NO: 14985 - protein, 7 aa, Artificial sequence
  Protein classification predicting sequence
LGLIFIL

SEQ ID NO: 14986 - protein, 6 aa, Artificial sequence
  Protein classification predicting sequence
NSLLDL

SEQ ID NO: 14987 - protein, 7 aa, Artificial sequence
  Protein classification predicting sequence
LMNLLLL

SEQ ID NO: 14988 - protein, 5 aa, Artificial sequence
  Protein classification predicting sequence
VMMKV

SEQ ID NO: 14989 - protein, 5 aa, Artificial sequence
  Protein classification predicting sequence
SHWLL

SEQ ID NO: 14990 - protein, 6 aa, Artificial sequence
  Protein classification predicting sequence
VIQYAP

SEQ ID NO: 14991 - protein, 6 aa, Artificial sequence
  Protein classification predicting sequence
INSLSI

SEQ ID NO: 14992 - protein, 5 aa, Artificial sequence
  Protein classification predicting sequence
NMLTM

SEQ ID NO: 14993 - protein, 7 aa, Artificial sequence
  Protein classification predicting sequence
INSISLL

SEQ ID NO: 14994 - protein, 6 aa, Artificial sequence
  Protein classification predicting sequence
GHYSPE

SEQ ID NO: 14995 - protein, 6 aa, Artificial sequence
  Protein classification predicting sequence
VSAAPF

SEQ ID NO: 14996 - protein, 6 aa, Artificial sequence
  Protein classification predicting sequence
VKRDLK

SEQ ID NO: 14997 - protein, 6 aa, Artificial sequence
  Protein classification predicting sequence
LGTTLT

SEQ ID NO: 14998 - protein, 6 aa, Artificial sequence
  Protein classification predicting sequence
PISITL

SEQ ID NO: 14999 - protein, 5 aa, Artificial sequence
  Protein classification predicting sequence
MMITS

SEQ ID NO: 15000 - protein, 6 aa, Artificial sequence
  Protein classification predicting sequence
ANQNLI

SEQ ID NO: 15001 - protein, 5 aa, Artificial sequence
  Protein classification predicting sequence
SGQWT

SEQ ID NO: 15002 - protein, 6 aa, Artificial sequence
  Protein classification predicting sequence
LLPLTP

SEQ ID NO: 15003 - protein, 6 aa, Artificial sequence
  Protein classification predicting sequence
TQATAS

SEQ ID NO: 15004 - protein, 6 aa, Artificial sequence
  Protein classification predicting sequence
QELTKQ

SEQ ID NO: 15005 - protein, 6 aa, Artificial sequence
  Protein classification predicting sequence
TLYMIF

SEQ ID NO: 15006 - protein, 6 aa, Artificial sequence
  Protein classification predicting sequence
TTWNTI

SEQ ID NO: 15007 - protein, 6 aa, Artificial sequence
  Protein classification predicting sequence
ISAFEC

SEQ ID NO: 15008 - protein, 6 aa, Artificial sequence
  Protein classification predicting sequence
SARLPF

SEQ ID NO: 15009 - protein, 6 aa, Artificial sequence
  Protein classification predicting sequence
SLVLGE

SEQ ID NO: 15010 - protein, 6 aa, Artificial sequence
  Protein classification predicting sequence
YFVEYF

SEQ ID NO: 15011 - protein, 6 aa, Artificial sequence
  Protein classification predicting sequence
MNKGLE

SEQ ID NO: 15012 - protein, 6 aa, Artificial sequence
  Protein classification predicting sequence
ITLIFI

SEQ ID NO: 15013 - protein, 5 aa, Artificial sequence
  Protein classification predicting sequence
LMMYN

SEQ ID NO: 15014 - protein, 7 aa, Artificial sequence
  Protein classification predicting sequence
FNCNLLY

SEQ ID NO: 15015 - protein, 6 aa, Artificial sequence
  Protein classification predicting sequence
MYSLLI

SEQ ID NO: 15016 - protein, 5 aa, Artificial sequence
  Protein classification predicting sequence
FLFFT

SEQ ID NO: 15017 - protein, 5 aa, Artificial sequence
  Protein classification predicting sequence
LWMGI

SEQ ID NO: 15018 - protein, 6 aa, Artificial sequence
  Protein classification predicting sequence
RENMLM

SEQ ID NO: 15019 - protein, 5 aa, Artificial sequence
  Protein classification predicting sequence
MGMNM

SEQ ID NO: 15020 - protein, 6 aa, Artificial sequence
  Protein classification predicting sequence
GSLPLL

SEQ ID NO: 15021 - protein, 7 aa, Artificial sequence
  Protein classification predicting sequence
LLLSLPV

SEQ ID NO: 15022 - protein, 6 aa, Artificial sequence
  Protein classification predicting sequence
WLLPLM

SEQ ID NO: 15023 - protein, 7 aa, Artificial sequence
  Protein classification predicting sequence
AQLPFSA

SEQ ID NO: 15024 - protein, 6 aa, Artificial sequence
  Protein classification predicting sequence
LKRVIA

SEQ ID NO: 15025 - protein, 6 aa, Artificial sequence
  Protein classification predicting sequence
IIILTI

SEQ ID NO: 15026 - protein, 6 aa, Artificial sequence
  Protein classification predicting sequence
AFITSL

SEQ ID NO: 15027 - protein, 6 aa, Artificial sequence
  Protein classification predicting sequence
FLLIRF

SEQ ID NO: 15028 - protein, 6 aa, Artificial sequence
  Protein classification predicting sequence
RKMGGL

SEQ ID NO: 15029 - protein, 6 aa, Artificial sequence
  Protein classification predicting sequence
QFIPNF

SEQ ID NO: 15030 - protein, 6 aa, Artificial sequence
  Protein classification predicting sequence
FFTLFF

SEQ ID NO: 15031 - protein, 6 aa, Artificial sequence
  Protein classification predicting sequence
FLLTTA

SEQ ID NO: 15032 - protein, 5 aa, Artificial sequence
  Protein classification predicting sequence
IRMMG

SEQ ID NO: 15033 - protein, 5 aa, Artificial sequence
  Protein classification predicting sequence
TSPIM

SEQ ID NO: 15034 - protein, 6 aa, Artificial sequence
  Protein classification predicting sequence
FNTLNL

SEQ ID NO: 15035 - protein, 6 aa, Artificial sequence
  Protein classification predicting sequence
MTMHRL

SEQ ID NO: 15036 - protein, 6 aa, Artificial sequence
  Protein classification predicting sequence
ETLNMS

SEQ ID NO: 15037 - protein, 6 aa, Artificial sequence
  Protein classification predicting sequence
YIVENI

SEQ ID NO: 15038 - protein, 7 aa, Artificial sequence
  Protein classification predicting sequence
ILSLSML

SEQ ID NO: 15039 - protein, 6 aa, Artificial sequence
  Protein classification predicting sequence
NWNWIN

SEQ ID NO: 15040 - protein, 7 aa, Artificial sequence
  Protein classification predicting sequence
VSLITVL

SEQ ID NO: 15041 - protein, 4 aa, Artificial sequence
  Protein classification predicting sequence
GWWY

SEQ ID NO: 15042 - protein, 5 aa, Artificial sequence
  Protein classification predicting sequence
MFVMG

SEQ ID NO: 15043 - protein, 6 aa, Artificial sequence
  Protein classification predicting sequence
DSILIN

SEQ ID NO: 15044 - protein, 6 aa, Artificial sequence
  Protein classification predicting sequence
NRLFYL

SEQ ID NO: 15045 - protein, 5 aa, Artificial sequence
  Protein classification predicting sequence
YECGF

SEQ ID NO: 15046 - protein, 5 aa, Artificial sequence
  Protein classification predicting sequence
VLFMV

SEQ ID NO: 15047 - protein, 6 aa, Artificial sequence
  Protein classification predicting sequence
AKNVPY

SEQ ID NO: 15048 - protein, 6 aa, Artificial sequence
  Protein classification predicting sequence
GIIFNN

SEQ ID NO: 15049 - protein, 6 aa, Artificial sequence
  Protein classification predicting sequence
EYRYWT

SEQ ID NO: 15050 - protein, 9 aa, Artificial sequence
  Protein classification predicting sequence
LRGRGGAGF

SEQ ID NO: 15051 - protein, 6 aa, Artificial sequence
  Protein classification predicting sequence
KPPFPA

SEQ ID NO: 15052 - protein, 6 aa, Artificial sequence
  Protein classification predicting sequence
GEFMRV

SEQ ID NO: 15053 - protein, 6 aa, Artificial sequence
  Protein classification predicting sequence
VRSKSD

SEQ ID NO: 15054 - protein, 6 aa, Artificial sequence
  Protein classification predicting sequence
GVDFGV

SEQ ID NO: 15055 - protein, 6 aa, Artificial sequence
  Protein classification predicting sequence
NAGSLE

SEQ ID NO: 15056 - protein, 6 aa, Artificial sequence
  Protein classification predicting sequence
YADEPF

SEQ ID NO: 15057 - protein, 6 aa, Artificial sequence
  Protein classification predicting sequence
FSSKDK

SEQ ID NO: 15058 - protein, 7 aa, Artificial sequence
  Protein classification predicting sequence
PSTDGTY

SEQ ID NO: 15059 - protein, 7 aa, Artificial sequence
  Protein classification predicting sequence
DVVEDKL

SEQ ID NO: 15060 - protein, 6 aa, Artificial sequence
  Protein classification predicting sequence
LQQVGT

SEQ ID NO: 15061 - protein, 7 aa, Artificial sequence
  Protein classification predicting sequence
GSGVASD

SEQ ID NO: 15062 - protein, 5 aa, Artificial sequence
  Protein classification predicting sequence
QNRYG

SEQ ID NO: 15063 - protein, 6 aa, Artificial sequence
  Protein classification predicting sequence
KFGLFF

SEQ ID NO: 15064 - protein, 7 aa, Artificial sequence
  Protein classification predicting sequence
LGGVRST

SEQ ID NO: 15065 - protein, 6 aa, Artificial sequence
  Protein classification predicting sequence
INSAAL

SEQ ID NO: 15066 - protein, 6 aa, Artificial sequence
  Protein classification predicting sequence
CFALSE

SEQ ID NO: 15067 - protein, 6 aa, Artificial sequence
  Protein classification predicting sequence
DMSKMG

SEQ ID NO: 15068 - protein, 6 aa, Artificial sequence
  Protein classification predicting sequence
SSFGIQ

SEQ ID NO: 15069 - protein, 7 aa, Artificial sequence
  Protein classification predicting sequence
NATGVWT

SEQ ID NO: 15070 - protein, 7 aa, Artificial sequence
  Protein classification predicting sequence
ARRGSRS

SEQ ID NO: 15071 - protein, 7 aa, Artificial sequence
  Protein classification predicting sequence
RTMLLAR

SEQ ID NO: 15072 - protein, 7 aa, Artificial sequence
  Protein classification predicting sequence
DPSKYRP

SEQ ID NO: 15073 - protein, 6 aa, Artificial sequence
  Protein classification predicting sequence
PAVNQI

SEQ ID NO: 15074 - protein, 6 aa, Artificial sequence
  Protein classification predicting sequence
YQVGGA

SEQ ID NO: 15075 - protein, 6 aa, Artificial sequence
  Protein classification predicting sequence
QEKVAT

SEQ ID NO: 15076 - protein, 7 aa, Artificial sequence
  Protein classification predicting sequence
GDDIEAV

SEQ ID NO: 15077 - protein, 8 aa, Artificial sequence
  Protein classification predicting sequence
RQKFGKDV

SEQ ID NO: 15078 - protein, 7 aa, Artificial sequence
  Protein classification predicting sequence
PKKIYAA

SEQ ID NO: 15079 - protein, 7 aa, Artificial sequence
  Protein classification predicting sequence
SFTELAR

SEQ ID NO: 15080 - protein, 6 aa, Artificial sequence
  Protein classification predicting sequence
GSGTIL

SEQ ID NO: 15081 - protein, 5 aa, Artificial sequence
  Protein classification predicting sequence
YGMGT

SEQ ID NO: 15082 - protein, 6 aa, Artificial sequence
  Protein classification predicting sequence
NQKGLI

SEQ ID NO: 15083 - protein, 6 aa, Artificial sequence
  Protein classification predicting sequence
LQKKYG

SEQ ID NO: 15084 - protein, 6 aa, Artificial sequence
  Protein classification predicting sequence
IVSGKD

SEQ ID NO: 15085 - protein, 6 aa, Artificial sequence
  Protein classification predicting sequence
AQHSQH

SEQ ID NO: 15086 - protein, 6 aa, Artificial sequence
  Protein classification predicting sequence
DTPISE

SEQ ID NO: 15087 - protein, 7 aa, Artificial sequence
  Protein classification predicting sequence
PLNKYDR

SEQ ID NO: 15088 - protein, 7 aa, Artificial sequence
  Protein classification predicting sequence
GVLNQQP

SEQ ID NO: 15089 - protein, 6 aa, Artificial sequence
  Protein classification predicting sequence
NKITVV

SEQ ID NO: 15090 - protein, 7 aa, Artificial sequence
  Protein classification predicting sequence
RTDEYGG

SEQ ID NO: 15091 - protein, 5 aa, Artificial sequence
  Protein classification predicting sequence
KCCVD

SEQ ID NO: 15092 - protein, 6 aa, Artificial sequence
  Protein classification predicting sequence
RHIVVS

SEQ ID NO: 15093 - protein, 6 aa, Artificial sequence
  Protein classification predicting sequence
PQIVKY

SEQ ID NO: 15094 - protein, 6 aa, Artificial sequence
  Protein classification predicting sequence
AELGQP

SEQ ID NO: 15095 - protein, 8 aa, Artificial sequence
  Protein classification predicting sequence
LIIGSGAA

SEQ ID NO: 15096 - protein, 6 aa, Artificial sequence
  Protein classification predicting sequence
VVDLTV

SEQ ID NO: 15097 - protein, 6 aa, Artificial sequence
  Protein classification predicting sequence
KYRPRL

SEQ ID NO: 15098 - protein, 7 aa, Artificial sequence
  Protein classification predicting sequence
AGEMGEL

SEQ ID NO: 15099 - protein, 6 aa, Artificial sequence
  Protein classification predicting sequence
AGLNPH

SEQ ID NO: 15100 - protein, 6 aa, Artificial sequence
  Protein classification predicting sequence
IETGVG

SEQ ID NO: 15101 - protein, 7 aa, Artificial sequence
  Protein classification predicting sequence
VSAISMI

SEQ ID NO: 15102 - protein, 6 aa, Artificial sequence
  Protein classification predicting sequence
VVMMLA

SEQ ID NO: 15103 - protein, 6 aa, Artificial sequence
  Protein classification predicting sequence
AVDILR

SEQ ID NO: 15104 - protein, 6 aa, Artificial sequence
  Protein classification predicting sequence
IPSDAP

SEQ ID NO: 15105 - protein, 6 aa, Artificial sequence
  Protein classification predicting sequence
TIEGPL

SEQ ID NO: 15106 - protein, 6 aa, Artificial sequence
  Protein classification predicting sequence
PLLGID

SEQ ID NO: 15107 - protein, 6 aa, Artificial sequence
  Protein classification predicting sequence
LQPALK

SEQ ID NO: 15108 - protein, 6 aa, Artificial sequence
  Protein classification predicting sequence
LVNNAG

SEQ ID NO: 15109 - protein, 5 aa, Artificial sequence
  Protein classification predicting sequence
VSCAD

SEQ ID NO: 15110 - protein, 8 aa, Artificial sequence
  Protein classification predicting sequence
STSASLSG

SEQ ID NO: 15111 - protein, 6 aa, Artificial sequence
  Protein classification predicting sequence
TIKSAV

SEQ ID NO: 15112 - protein, 7 aa, Artificial sequence
  Protein classification predicting sequence
SGDGSLA

SEQ ID NO: 15113 - protein, 6 aa, Artificial sequence
  Protein classification predicting sequence
SILINA

SEQ ID NO: 15114 - protein, 6 aa, Artificial sequence
  Protein classification predicting sequence
DPTYLV

SEQ ID NO: 15115 - protein, 5 aa, Artificial sequence
  Protein classification predicting sequence
FAMPI

SEQ ID NO: 15116 - protein, 7 aa, Artificial sequence
  Protein classification predicting sequence
LLLLLSS

SEQ ID NO: 15117 - protein, 6 aa, Artificial sequence
  Protein classification predicting sequence
TCDGFF

SEQ ID NO: 15118 - protein, 7 aa, Artificial sequence
  Protein classification predicting sequence
VTPTVTA

SEQ ID NO: 15119 - protein, 6 aa, Artificial sequence
  Protein classification predicting sequence
RVSNNL

SEQ ID NO: 15120 - protein, 5 aa, Artificial sequence
  Protein classification predicting sequence
RRSCR

SEQ ID NO: 15121 - protein, 6 aa, Artificial sequence
  Protein classification predicting sequence
FNNGPT

SEQ ID NO: 15122 - protein, 6 aa, Artificial sequence
  Protein classification predicting sequence
TLERSY

SEQ ID NO: 15123 - protein, 6 aa, Artificial sequence
  Protein classification predicting sequence
YRDFLP

SEQ ID NO: 15124 - protein, 7 aa, Artificial sequence
  Protein classification predicting sequence
IIKDGGI

SEQ ID NO: 15125 - protein, 5 aa, Artificial sequence
  Protein classification predicting sequence
NMSNQ

SEQ ID NO: 15126 - protein, 7 aa, Artificial sequence
  Protein classification predicting sequence
AFGAGAD

SEQ ID NO: 15127 - protein, 7 aa, Artificial sequence
  Protein classification predicting sequence
SSGSLDL

SEQ ID NO: 15128 - protein, 6 aa, Artificial sequence
  Protein classification predicting sequence
AKIIRL

SEQ ID NO: 15129 - protein, 6 aa, Artificial sequence
  Protein classification predicting sequence
KKLLRF

SEQ ID NO: 15130 - protein, 7 aa, Artificial sequence
  Protein classification predicting sequence
WLREHNR

SEQ ID NO: 15131 - protein, 5 aa, Artificial sequence
  Protein classification predicting sequence
RYPPG

SEQ ID NO: 15132 - protein, 7 aa, Artificial sequence
  Protein classification predicting sequence
SKEIVEK

SEQ ID NO: 15133 - protein, 6 aa, Artificial sequence
  Protein classification predicting sequence
FWNVVN

SEQ ID NO: 15134 - protein, 6 aa, Artificial sequence
  Protein classification predicting sequence
VPLDYE

SEQ ID NO: 15135 - protein, 6 aa, Artificial sequence
  Protein classification predicting sequence
LAWCEQ

SEQ ID NO: 15136 - protein, 6 aa, Artificial sequence
  Protein classification predicting sequence
GSVILA

SEQ ID NO: 15137 - protein, 8 aa, Artificial sequence
  Protein classification predicting sequence
EDGIVLID

SEQ ID NO: 15138 - protein, 8 aa, Artificial sequence
  Protein classification predicting sequence
AGKATDAT

SEQ ID NO: 15139 - protein, 6 aa, Artificial sequence
  Protein classification predicting sequence
NQNGAI

SEQ ID NO: 15140 - protein, 7 aa, Artificial sequence
  Protein classification predicting sequence
LRFAYEA

SEQ ID NO: 15141 - protein, 6 aa, Artificial sequence
  Protein classification predicting sequence
EFEGPY

SEQ ID NO: 15142 - protein, 6 aa, Artificial sequence
  Protein classification predicting sequence
VALTEP

SEQ ID NO: 15143 - protein, 6 aa, Artificial sequence
  Protein classification predicting sequence
SFPFLE

SEQ ID NO: 15144 - protein, 6 aa, Artificial sequence
  Protein classification predicting sequence
GMVGMA

SEQ ID NO: 15145 - protein, 7 aa, Artificial sequence
  Protein classification predicting sequence
FNKGALG

SEQ ID NO: 15146 - protein, 7 aa, Artificial sequence
  Protein classification predicting sequence
LDPKRPI

SEQ ID NO: 15147 - protein, 6 aa, Artificial sequence
  Protein classification predicting sequence
RFSKEN

SEQ ID NO: 15148 - protein, 6 aa, Artificial sequence
  Protein classification predicting sequence
GAAVIK

SEQ ID NO: 15149 - protein, 6 aa, Artificial sequence
  Protein classification predicting sequence
PKVTIT

SEQ ID NO: 15150 - protein, 6 aa, Artificial sequence
  Protein classification predicting sequence
THHFKV

SEQ ID NO: 15151 - protein, 8 aa, Artificial sequence
  Protein classification predicting sequence
GAGVSGLA

SEQ ID NO: 15152 - protein, 6 aa, Artificial sequence
  Protein classification predicting sequence
KEFGED

SEQ ID NO: 15153 - protein, 6 aa, Artificial sequence
  Protein classification predicting sequence
DLQQLL

SEQ ID NO: 15154 - protein, 9 aa, Artificial sequence
  Protein classification predicting sequence
VRGSTLPNG

SEQ ID NO: 15155 - protein, 6 aa, Artificial sequence
  Protein classification predicting sequence
KDDQSL

SEQ ID NO: 15156 - protein, 6 aa, Artificial sequence
  Protein classification predicting sequence
VPGGTA

SEQ ID NO: 15157 - protein, 6 aa, Artificial sequence
  Protein classification predicting sequence
FGEQAV

SEQ ID NO: 15158 - protein, 6 aa, Artificial sequence
  Protein classification predicting sequence
AFLASD

SEQ ID NO: 15159 - protein, 6 aa, Artificial sequence
  Protein classification predicting sequence
LFFGNP

SEQ ID NO: 15160 - protein, 5 aa, Artificial sequence
  Protein classification predicting sequence
PPYHT

SEQ ID NO: 15161 - protein, 5 aa, Artificial sequence
  Protein classification predicting sequence
HYPWI

SEQ ID NO: 15162 - protein, 6 aa, Artificial sequence
  Protein classification predicting sequence
GNSASD

SEQ ID NO: 15163 - protein, 5 aa, Artificial sequence
  Protein classification predicting sequence
GNCHV

SEQ ID NO: 15164 - protein, 6 aa, Artificial sequence
  Protein classification predicting sequence
FDIIIN

SEQ ID NO: 15165 - protein, 6 aa, Artificial sequence
  Protein classification predicting sequence
YFDEFG

SEQ ID NO: 15166 - protein, 5 aa, Artificial sequence
  Protein classification predicting sequence
SVCNA

SEQ ID NO: 15167 - protein, 6 aa, Artificial sequence
  Protein classification predicting sequence
TPDELQ

SEQ ID NO: 15168 - protein, 7 aa, Artificial sequence
  Protein classification predicting sequence
GLADFSK

SEQ ID NO: 15169 - protein, 7 aa, Artificial sequence
  Protein classification predicting sequence
CPIGLIG

SEQ ID NO: 15170 - protein, 6 aa, Artificial sequence
  Protein classification predicting sequence
AERFLP

SEQ ID NO: 15171 - protein, 7 aa, Artificial sequence
  Protein classification predicting sequence
SIDVVEN

SEQ ID NO: 15172 - protein, 6 aa, Artificial sequence
  Protein classification predicting sequence
SDDLAS

SEQ ID NO: 15173 - protein, 6 aa, Artificial sequence
  Protein classification predicting sequence
LKTGNA

SEQ ID NO: 15174 - protein, 7 aa, Artificial sequence
  Protein classification predicting sequence
KLISEVI

SEQ ID NO: 15175 - protein, 6 aa, Artificial sequence
  Protein classification predicting sequence
SYAMMK

SEQ ID NO: 15176 - protein, 8 aa, Artificial sequence
  Protein classification predicting sequence
ALEKAGLP

SEQ ID NO: 15177 - protein, 6 aa, Artificial sequence
  Protein classification predicting sequence
CNAIET

SEQ ID NO: 15178 - protein, 6 aa, Artificial sequence
  Protein classification predicting sequence
HATKDL

SEQ ID NO: 15179 - protein, 7 aa, Artificial sequence
  Protein classification predicting sequence
DKEFLSL

SEQ ID NO: 15180 - protein, 6 aa, Artificial sequence
  Protein classification predicting sequence
ASKFAL

SEQ ID NO: 15181 - protein, 6 aa, Artificial sequence
  Protein classification predicting sequence
NRTLSK

SEQ ID NO: 15182 - protein, 7 aa, Artificial sequence
  Protein classification predicting sequence
VEALVDA

SEQ ID NO: 15183 - protein, 6 aa, Artificial sequence
  Protein classification predicting sequence
AGVSLQ

SEQ ID NO: 15184 - protein, 5 aa, Artificial sequence
  Protein classification predicting sequence
GCGWP

SEQ ID NO: 15185 - protein, 5 aa, Artificial sequence
  Protein classification predicting sequence
TYPST

SEQ ID NO: 15186 - protein, 7 aa, Artificial sequence
  Protein classification predicting sequence
ILVVSVN

SEQ ID NO: 15187 - protein, 6 aa, Artificial sequence
  Protein classification predicting sequence
KAHYDG

SEQ ID NO: 15188 - protein, 7 aa, Artificial sequence
  Protein classification predicting sequence
RIAKVAF

SEQ ID NO: 15189 - protein, 6 aa, Artificial sequence
  Protein classification predicting sequence
AAQNII

SEQ ID NO: 15190 - protein, 6 aa, Artificial sequence
  Protein classification predicting sequence
TGGLSG

SEQ ID NO: 15191 - protein, 5 aa, Artificial sequence
  Protein classification predicting sequence
SCPNV

SEQ ID NO: 15192 - protein, 7 aa, Artificial sequence
  Protein classification predicting sequence
LSLKNPI

SEQ ID NO: 15193 - protein, 6 aa, Artificial sequence
  Protein classification predicting sequence
LYPLLR

SEQ ID NO: 15194 - protein, 6 aa, Artificial sequence
  Protein classification predicting sequence
GTVTRH

SEQ ID NO: 15195 - protein, 6 aa, Artificial sequence
  Protein classification predicting sequence
LHQDAV

SEQ ID NO: 15196 - protein, 6 aa, Artificial sequence
  Protein classification predicting sequence
PYKTPI

SEQ ID NO: 15197 - protein, 6 aa, Artificial sequence
  Protein classification predicting sequence
GFGFVE

SEQ ID NO: 15198 - protein, 7 aa, Artificial sequence
  Protein classification predicting sequence
ENAGADA

SEQ ID NO: 15199 - protein, 6 aa, Artificial sequence
  Protein classification predicting sequence
VEGVRT

SEQ ID NO: 15200 - protein, 7 aa, Artificial sequence
  Protein classification predicting sequence
VRVPVLR

SEQ ID NO: 15201 - protein, 6 aa, Artificial sequence
  Protein classification predicting sequence
GGTIPI

SEQ ID NO: 15202 - protein, 6 aa, Artificial sequence
  Protein classification predicting sequence
SLIKYK

SEQ ID NO: 15203 - protein, 6 aa, Artificial sequence
  Protein classification predicting sequence
MGPIGV

SEQ ID NO: 15204 - protein, 5 aa, Artificial sequence
  Protein classification predicting sequence
SHKDW

SEQ ID NO: 15205 - protein, 7 aa, Artificial sequence
  Protein classification predicting sequence
LSGLDTI

SEQ ID NO: 15206 - protein, 6 aa, Artificial sequence
  Protein classification predicting sequence
IGSTFL

SEQ ID NO: 15207 - protein, 7 aa, Artificial sequence
  Protein classification predicting sequence
VKYTLQE

SEQ ID NO: 15208 - protein, 6 aa, Artificial sequence
  Protein classification predicting sequence
HFVDVV

SEQ ID NO: 15209 - protein, 6 aa, Artificial sequence
  Protein classification predicting sequence
LGSLNI

SEQ ID NO: 15210 - protein, 5 aa, Artificial sequence
  Protein classification predicting sequence
VMPIM

SEQ ID NO: 15211 - protein, 6 aa, Artificial sequence
  Protein classification predicting sequence
YVGEVV

SEQ ID NO: 15212 - protein, 6 aa, Artificial sequence
  Protein classification predicting sequence
AADLIS

SEQ ID NO: 15213 - protein, 6 aa, Artificial sequence
  Protein classification predicting sequence
KNFYDA

SEQ ID NO: 15214 - protein, 7 aa, Artificial sequence
  Protein classification predicting sequence
LMRVSCG

SEQ ID NO: 15215 - protein, 5 aa, Artificial sequence
  Protein classification predicting sequence
SCFLL

SEQ ID NO: 15216 - protein, 6 aa, Artificial sequence
  Protein classification predicting sequence
PYFDFA

SEQ ID NO: 15217 - protein, 6 aa, Artificial sequence
  Protein classification predicting sequence
DRSVEC

SEQ ID NO: 15218 - protein, 6 aa, Artificial sequence
  Protein classification predicting sequence
YMPGVL

SEQ ID NO: 15219 - protein, 6 aa, Artificial sequence
  Protein classification predicting sequence
DIFFFL

SEQ ID NO: 15220 - protein, 7 aa, Artificial sequence
  Protein classification predicting sequence
DLQAVES

SEQ ID NO: 15221 - protein, 6 aa, Artificial sequence
  Protein classification predicting sequence
NYNKAL

SEQ ID NO: 15222 - protein, 6 aa, Artificial sequence
  Protein classification predicting sequence
NRIVMS

SEQ ID NO: 15223 - protein, 5 aa, Artificial sequence
  Protein classification predicting sequence
PDLFM

SEQ ID NO: 15224 - protein, 8 aa, Artificial sequence
  Protein classification predicting sequence
AADRGYFI

SEQ ID NO: 15225 - protein, 6 aa, Artificial sequence
  Protein classification predicting sequence
GGVGLS

SEQ ID NO: 15226 - protein, 6 aa, Artificial sequence
  Protein classification predicting sequence
SPFDPV

SEQ ID NO: 15227 - protein, 7 aa, Artificial sequence
  Protein classification predicting sequence
IKNGKAE

SEQ ID NO: 15228 - protein, 6 aa, Artificial sequence
  Protein classification predicting sequence
DLGIWD

SEQ ID NO: 15229 - protein, 6 aa, Artificial sequence
  Protein classification predicting sequence
PTKNEE

SEQ ID NO: 15230 - protein, 6 aa, Artificial sequence
  Protein classification predicting sequence
MNNMSF

SEQ ID NO: 15231 - protein, 7 aa, Artificial sequence
  Protein classification predicting sequence
FFEQESS

SEQ ID NO: 15232 - protein, 7 aa, Artificial sequence
  Protein classification predicting sequence
LVNLNLG

SEQ ID NO: 15233 - protein, 7 aa, Artificial sequence
  Protein classification predicting sequence
LLGEIGL

SEQ ID NO: 15234 - protein, 6 aa, Artificial sequence
  Protein classification predicting sequence
FANQIL

SEQ ID NO: 15235 - protein, 7 aa, Artificial sequence
  Protein classification predicting sequence
ASEKQLT

SEQ ID NO: 15236 - protein, 6 aa, Artificial sequence
  Protein classification predicting sequence
TQDLYD

SEQ ID NO: 15237 - protein, 6 aa, Artificial sequence
  Protein classification predicting sequence
LLHTLY

SEQ ID NO: 15238 - protein, 6 aa, Artificial sequence
  Protein classification predicting sequence
VKSIKE

SEQ ID NO: 15239 - protein, 6 aa, Artificial sequence
  Protein classification predicting sequence
LFNAIE

SEQ ID NO: 15240 - protein, 8 aa, Artificial sequence
  Protein classification predicting sequence
EEIFGPVV

SEQ ID NO: 15241 - protein, 6 aa, Artificial sequence
  Protein classification predicting sequence
FAIMAG

SEQ ID NO: 15242 - protein, 6 aa, Artificial sequence
  Protein classification predicting sequence
KQFDKI

SEQ ID NO: 15243 - protein, 9 aa, Artificial sequence
  Protein classification predicting sequence
PFGGFKMSG

SEQ ID NO: 15244 - protein, 6 aa, Artificial sequence
  Protein classification predicting sequence
KPAEDT

SEQ ID NO: 15245 - protein, 6 aa, Artificial sequence
  Protein classification predicting sequence
LDVTKT

SEQ ID NO: 15246 - protein, 5 aa, Artificial sequence
  Protein classification predicting sequence
NNCWF

SEQ ID NO: 15247 - protein, 6 aa, Artificial sequence
  Protein classification predicting sequence
FSFLFD

SEQ ID NO: 15248 - protein, 6 aa, Artificial sequence
  Protein classification predicting sequence
TGLVKR

SEQ ID NO: 15249 - protein, 6 aa, Artificial sequence
  Protein classification predicting sequence
QATASM

SEQ ID NO: 15250 - protein, 7 aa, Artificial sequence
  Protein classification predicting sequence
VDVAEQI

SEQ ID NO: 15251 - protein, 7 aa, Artificial sequence
  Protein classification predicting sequence
HSATGAL

SEQ ID NO: 15252 - protein, 6 aa, Artificial sequence
  Protein classification predicting sequence
DAPISV

SEQ ID NO: 15253 - protein, 6 aa, Artificial sequence
  Protein classification predicting sequence
SRKGKE

SEQ ID NO: 15254 - protein, 6 aa, Artificial sequence
  Protein classification predicting sequence
GLHGFH

SEQ ID NO: 15255 - protein, 5 aa, Artificial sequence
  Protein classification predicting sequence
GFHIH

SEQ ID NO: 15256 - protein, 8 aa, Artificial sequence
  Protein classification predicting sequence
RLKKLAEV

SEQ ID NO: 15257 - protein, 6 aa, Artificial sequence
  Protein classification predicting sequence
KTGNAG

SEQ ID NO: 15258 - protein, 6 aa, Artificial sequence
  Protein classification predicting sequence
GFHGLH

SEQ ID NO: 15259 - protein, 5 aa, Artificial sequence
  Protein classification predicting sequence
DENRH

SEQ ID NO: 15260 - protein, 5 aa, Artificial sequence
  Protein classification predicting sequence
GCTSA

SEQ ID NO: 15261 - protein, 7 aa, Artificial sequence
  Protein classification predicting sequence
RLDLVEK

SEQ ID NO: 15262 - protein, 6 aa, Artificial sequence
  Protein classification predicting sequence
TSNHAI

SEQ ID NO: 15263 - protein, 5 aa, Artificial sequence
  Protein classification predicting sequence
HYNGH

SEQ ID NO: 15264 - protein, 6 aa, Artificial sequence
  Protein classification predicting sequence
PYDYSA

SEQ ID NO: 15265 - protein, 7 aa, Artificial sequence
  Protein classification predicting sequence
GANSLLD

SEQ ID NO: 15266 - protein, 6 aa, Artificial sequence
  Protein classification predicting sequence
VEKLAN

SEQ ID NO: 15267 - protein, 5 aa, Artificial sequence
  Protein classification predicting sequence
YVDNA

SEQ ID NO: 15268 - protein, 7 aa, Artificial sequence
  Protein classification predicting sequence
SAEELVT

SEQ ID NO: 15269 - protein, 6 aa, Artificial sequence
  Protein classification predicting sequence
QNRRPD

SEQ ID NO: 15270 - protein, 6 aa, Artificial sequence
  Protein classification predicting sequence
DPAYYD

SEQ ID NO: 15271 - protein, 7 aa, Artificial sequence
  Protein classification predicting sequence
LLFPLLD

SEQ ID NO: 15272 - protein, 5 aa, Artificial sequence
  Protein classification predicting sequence
HFHYV

SEQ ID NO: 15273 - protein, 6 aa, Artificial sequence
  Protein classification predicting sequence
KYGKYW

SEQ ID NO: 15274 - protein, 6 aa, Artificial sequence
  Protein classification predicting sequence
PPQKME

SEQ ID NO: 15275 - protein, 6 aa, Artificial sequence
  Protein classification predicting sequence
QIERTI

SEQ ID NO: 15276 - protein, 6 aa, Artificial sequence
  Protein classification predicting sequence
VGGNCT

SEQ ID NO: 15277 - protein, 6 aa, Artificial sequence
  Protein classification predicting sequence
FAAGDV

SEQ ID NO: 15278 - protein, 7 aa, Artificial sequence
  Protein classification predicting sequence
PFNAEPP

SEQ ID NO: 15279 - protein, 6 aa, Artificial sequence
  Protein classification predicting sequence
CAGNRR

SEQ ID NO: 15280 - protein, 6 aa, Artificial sequence
  Protein classification predicting sequence
RSVKWL

SEQ ID NO: 15281 - protein, 6 aa, Artificial sequence
  Protein classification predicting sequence
GRHRSP

SEQ ID NO: 15282 - protein, 6 aa, Artificial sequence
  Protein classification predicting sequence
VGARHV

SEQ ID NO: 15283 - protein, 6 aa, Artificial sequence
  Protein classification predicting sequence
DEKRHE

SEQ ID NO: 15284 - protein, 7 aa, Artificial sequence
  Protein classification predicting sequence
ERMKLES

SEQ ID NO: 15285 - protein, 5 aa, Artificial sequence
  Protein classification predicting sequence
QYRTG

SEQ ID NO: 15286 - protein, 6 aa, Artificial sequence
  Protein classification predicting sequence
RVKKPE

SEQ ID NO: 15287 - protein, 6 aa, Artificial sequence
  Protein classification predicting sequence
RTGICG

SEQ ID NO: 15288 - protein, 6 aa, Artificial sequence
  Protein classification predicting sequence
VCLNTK

SEQ ID NO: 15289 - protein, 6 aa, Artificial sequence
  Protein classification predicting sequence
MAIPLL

SEQ ID NO: 15290 - protein, 7 aa, Artificial sequence
  Protein classification predicting sequence
GLPILSI

SEQ ID NO: 15291 - protein, 6 aa, Artificial sequence
  Protein classification predicting sequence
FTGNNK

SEQ ID NO: 15292 - protein, 6 aa, Artificial sequence
  Protein classification predicting sequence
HHGFGM

SEQ ID NO: 15293 - protein, 5 aa, Artificial sequence
  Protein classification predicting sequence
RNFNT

SEQ ID NO: 15294 - protein, 7 aa, Artificial sequence
  Protein classification predicting sequence
AATEAVI

SEQ ID NO: 15295 - protein, 6 aa, Artificial sequence
  Protein classification predicting sequence
KEQTYP

SEQ ID NO: 15296 - protein, 6 aa, Artificial sequence
  Protein classification predicting sequence
VIAEMG

SEQ ID NO: 15297 - protein, 7 aa, Artificial sequence
  Protein classification predicting sequence
IIGSGPA

SEQ ID NO: 15298 - protein, 8 aa, Artificial sequence
  Protein classification predicting sequence
IIGAGPAG

SEQ ID NO: 15299 - protein, 6 aa, Artificial sequence
  Protein classification predicting sequence
SAVFMA

SEQ ID NO: 15300 - protein, 8 aa, Artificial sequence
  Protein classification predicting sequence
DAIVIATG

SEQ ID NO: 15301 - protein, 6 aa, Artificial sequence
  Protein classification predicting sequence
SVTLVH

SEQ ID NO: 15302 - protein, 6 aa, Artificial sequence
  Protein classification predicting sequence
KVDAPS

SEQ ID NO: 15303 - protein, 9 aa, Artificial sequence
  Protein classification predicting sequence
GGTCVNVGC

SEQ ID NO: 15304 - protein, 7 aa, Artificial sequence
  Protein classification predicting sequence
GGTCVNV

SEQ ID NO: 15305 - protein, 7 aa, Artificial sequence
  Protein classification predicting sequence
LGIQCGA

SEQ ID NO: 15306 - protein, 7 aa, Artificial sequence
  Protein classification predicting sequence
APGIPLK

SEQ ID NO: 15307 - protein, 6 aa, Artificial sequence
  Protein classification predicting sequence
YNSSDE

SEQ ID NO: 15308 - protein, 6 aa, Artificial sequence
  Protein classification predicting sequence
IAKIAF

SEQ ID NO: 15309 - protein, 6 aa, Artificial sequence
  Protein classification predicting sequence
VFSNTT

SEQ ID NO: 15310 - protein, 6 aa, Artificial sequence
  Protein classification predicting sequence
QMKNGS

SEQ ID NO: 15311 - protein, 6 aa, Artificial sequence
  Protein classification predicting sequence
QCGKCR

SEQ ID NO: 15312 - protein, 6 aa, Artificial sequence
  Protein classification predicting sequence
ECRFGY

SEQ ID NO: 15313 - protein, 5 aa, Artificial sequence
  Protein classification predicting sequence
PYWDW

SEQ ID NO: 15314 - protein, 6 aa, Artificial sequence
  Protein classification predicting sequence
HQGFGA

SEQ ID NO: 15315 - protein, 6 aa, Artificial sequence
  Protein classification predicting sequence
PYLDPY

SEQ ID NO: 15316 - protein, 6 aa, Artificial sequence
  Protein classification predicting sequence
EDATPA

SEQ ID NO: 15317 - protein, 6 aa, Artificial sequence
  Protein classification predicting sequence
LATYGI

SEQ ID NO: 15318 - protein, 6 aa, Artificial sequence
  Protein classification predicting sequence
QMNPDA

SEQ ID NO: 15319 - protein, 6 aa, Artificial sequence
  Protein classification predicting sequence
SEVPDG

SEQ ID NO: 15320 - protein, 6 aa, Artificial sequence
  Protein classification predicting sequence
KIISGP

SEQ ID NO: 15321 - protein, 7 aa, Artificial sequence
  Protein classification predicting sequence
VPIGDGA

SEQ ID NO: 15322 - protein, 6 aa, Artificial sequence
  Protein classification predicting sequence
SPSDVP

SEQ ID NO: 15323 - protein, 5 aa, Artificial sequence
  Protein classification predicting sequence
SYFEW

SEQ ID NO: 15324 - protein, 6 aa, Artificial sequence
  Protein classification predicting sequence
PVGVCG

SEQ ID NO: 15325 - protein, 6 aa, Artificial sequence
  Protein classification predicting sequence
NIKWSP

SEQ ID NO: 15326 - protein, 6 aa, Artificial sequence
  Protein classification predicting sequence
EHIVLR

SEQ ID NO: 15327 - protein, 6 aa, Artificial sequence
  Protein classification predicting sequence
IKKIVA

SEQ ID NO: 15328 - protein, 5 aa, Artificial sequence
  Protein classification predicting sequence
ICNER

SEQ ID NO: 15329 - protein, 6 aa, Artificial sequence
  Protein classification predicting sequence
TPVIVR

SEQ ID NO: 15330 - protein, 7 aa, Artificial sequence
  Protein classification predicting sequence
LRKIAEI

SEQ ID NO: 15331 - protein, 5 aa, Artificial sequence
  Protein classification predicting sequence
ACCST

SEQ ID NO: 15332 - protein, 7 aa, Artificial sequence
  Protein classification predicting sequence
PVIDESK

SEQ ID NO: 15333 - protein, 5 aa, Artificial sequence
  Protein classification predicting sequence
CHTDL

SEQ ID NO: 15334 - protein, 6 aa, Artificial sequence
  Protein classification predicting sequence
EPSEQE

SEQ ID NO: 15335 - protein, 7 aa, Artificial sequence
  Protein classification predicting sequence
RYSLGEE

SEQ ID NO: 15336 - protein, 6 aa, Artificial sequence
  Protein classification predicting sequence
IFESRP

SEQ ID NO: 15337 - protein, 6 aa, Artificial sequence
  Protein classification predicting sequence
WNPIAY

SEQ ID NO: 15338 - protein, 5 aa, Artificial sequence
  Protein classification predicting sequence
SFSDW

SEQ ID NO: 15339 - protein, 5 aa, Artificial sequence
  Protein classification predicting sequence
YESRP

SEQ ID NO: 15340 - protein, 8 aa, Artificial sequence
  Protein classification predicting sequence
HEFMALCM

SEQ ID NO: 15341 - protein, 12 aa, Artificial sequence
  Protein classification predicting sequence
LGISLLSCFPNV

SEQ ID NO: 15342 - protein, 12 aa, Artificial sequence
  Protein classification predicting sequence
LPVLSDASRIAL

SEQ ID NO: 15343 - protein, 18 aa, Artificial sequence
  Protein classification predicting sequence
WKFGGIYLDTDFIVLKNL

SEQ ID NO: 15344 - protein, 24 aa, Artificial sequence
  Protein classification predicting sequence
YNGWIWGHQGPQLLTRVFKKWCSI

SEQ ID NO: 15345 - protein, 12 aa, Artificial sequence
  Protein classification predicting sequence
LPPEAFYPIPWQ

SEQ ID NO: 15346 - protein, 15 aa, Artificial sequence
  Protein classification predicting sequence
ALLAQLHARYCPTTH

SEQ ID NO: 15347 - protein, 12 aa, Artificial sequence
  Protein classification predicting sequence
FLFMCSVESAAR

SEQ ID NO: 15348 - protein, 18 aa, Artificial sequence
  Protein classification predicting sequence
RWEPYLLPVLSDASRIAL

SEQ ID NO: 15349 - protein, 23 aa, Artificial sequence
  Protein classification predicting sequence
WKFGGIYLDTDFIVLKNLRNLTN

SEQ ID NO: 15350 - protein, 20 aa, Artificial sequence
  Protein classification predicting sequence
EATSRALLAQLHARYCPTTH

SEQ ID NO: 15351 - protein, 47 aa, Artificial sequence
  Protein classification predicting sequence
IGPVEGGAETVVAALRSAVGPTGTVMGYASWDRSPYEETLNGARLDD

SEQ ID NO: 15352 - protein, 44 aa, Artificial sequence
  Protein classification predicting sequence
ERFVRLGGKALLLGAPLNSVTALHYAEAVADIPNKRWVTYEMPM

SEQ ID NO: 15353 - protein, 9 aa, Artificial sequence
  Protein classification predicting sequence
GEVAWKTAS

SEQ ID NO: 15354 - protein, 15 aa, Artificial sequence
  Protein classification predicting sequence
YDSNGILDCFAIEGK

SEQ ID NO: 15355 - protein, 47 aa, Artificial sequence
  Protein classification predicting sequence
DAVETIANAYVKLGRHREGVVGFAQCYLFDAQDIVTFGVTYLEKHFG

SEQ ID NO: 15356 - protein, 9 aa, Artificial sequence
  Protein classification predicting sequence
TPIVPAHEA

SEQ ID NO: 15357 - protein, 19 aa, Artificial sequence
  Protein classification predicting sequence
MGYASWDRSPYEETLNGAR

SEQ ID NO: 15358 - protein, 18 aa, Artificial sequence
  Protein classification predicting sequence
ARRSAHPDASMVAVGPLA

SEQ ID NO: 15359 - protein, 10 aa, Artificial sequence
  Protein classification predicting sequence
DSNGILDCFA

SEQ ID NO: 15360 - protein, 10 aa, Artificial sequence
  Protein classification predicting sequence
GKPDAVETIA

SEQ ID NO: 15361 - protein, 8 aa, Artificial sequence
  Protein classification predicting sequence
PPFDPATA

SEQ ID NO: 15362 - protein, 7 aa, Artificial sequence
  Protein classification predicting sequence
EYHIYMT

SEQ ID NO: 15363 - protein, 7 aa, Artificial sequence
  Protein classification predicting sequence
GRISMAG

SEQ ID NO: 15364 - protein, 5 aa, Artificial sequence
  Protein classification predicting sequence
MTGWR

SEQ ID NO: 15365 - protein, 7 aa, Artificial sequence
  Protein classification predicting sequence
DPILGVT

SEQ ID NO: 15366 - protein, 7 aa, Artificial sequence
  Protein classification predicting sequence
DPTLEQW

SEQ ID NO: 15367 - protein, 7 aa, Artificial sequence
  Protein classification predicting sequence
RVESQLK

SEQ ID NO: 15368 - protein, 6 aa, Artificial sequence
  Protein classification predicting sequence
MADRII

SEQ ID NO: 15369 - protein, 6 aa, Artificial sequence
  Protein classification predicting sequence
PTWGNH

SEQ ID NO: 15370 - protein, 6 aa, Artificial sequence
  Protein classification predicting sequence
YRYYDP

SEQ ID NO: 15371 - protein, 7 aa, Artificial sequence
  Protein classification predicting sequence
LDKEYLP

SEQ ID NO: 15372 - protein, 11 aa, Artificial sequence
  Protein classification predicting sequence
ACAHNPTGVDP

SEQ ID NO: 15373 - protein, 9 aa, Artificial sequence
  Protein classification predicting sequence
IGMFTFTGL

SEQ ID NO: 15374 - protein, 7 aa, Artificial sequence
  Protein classification predicting sequence
DGRISMA

SEQ ID NO: 15375 - protein, 7 aa, Artificial sequence
  Protein classification predicting sequence
LSSKTVP

SEQ ID NO: 15376 - protein, 8 aa, Artificial sequence
  Protein classification predicting sequence
PPDPILGV

SEQ ID NO: 15377 - protein, 11 aa, Artificial sequence
  Protein classification predicting sequence
QIGMFSFTGLN

SEQ ID NO: 15378 - protein, 9 aa, Artificial sequence
  Protein classification predicting sequence
YMTKDGRIS

SEQ ID NO: 15379 - protein, 9 aa, Artificial sequence
  Protein classification predicting sequence
MTGWRIGYA

SEQ ID NO: 15380 - protein, 7 aa, Artificial sequence
  Protein classification predicting sequence
LDPGDEV

SEQ ID NO: 15381 - protein, 14 aa, Artificial sequence
  Protein classification predicting sequence
KRGLDLQGFLNDLE

SEQ ID NO: 15382 - protein, 8 aa, Artificial sequence
  Protein classification predicting sequence
PFFDSAYQ

SEQ ID NO: 15383 - protein, 13 aa, Artificial sequence
  Protein classification predicting sequence
RKVNLGVGAYRTD

SEQ ID NO: 15384 - protein, 13 aa, Artificial sequence
  Protein classification predicting sequence
QPWVLPVVRKVEQ

SEQ ID NO: 15385 - protein, 7 aa, Artificial sequence
  Protein classification predicting sequence
AGFKDIR

SEQ ID NO: 15386 - protein, 8 aa, Artificial sequence
  Protein classification predicting sequence
KRGLDLQG

SEQ ID NO: 15387 - protein, 10 aa, Artificial sequence
  Protein classification predicting sequence
LHACAHNPTG

SEQ ID NO: 15388 - protein, 6 aa, Artificial sequence
  Protein classification predicting sequence
TWSNPP

SEQ ID NO: 15389 - protein, 8 aa, Artificial sequence
  Protein classification predicting sequence
NVKTMADR

SEQ ID NO: 15390 - protein, 9 aa, Artificial sequence
  Protein classification predicting sequence
HITDQIGMF

SEQ ID NO: 15391 - protein, 5 aa, Artificial sequence
  Protein classification predicting sequence
QIGMF

SEQ ID NO: 15392 - protein, 17 aa, Artificial sequence
  Protein classification predicting sequence
QIGMFSFTGLNPKQVEY

SEQ ID NO: 15393 - protein, 12 aa, Artificial sequence
  Protein classification predicting sequence
KQIGMFTFTGLN

SEQ ID NO: 15394 - protein, 19 aa, Artificial sequence
  Protein classification predicting sequence
KIVRITWSNPPAQGARIVA

SEQ ID NO: 15395 - protein, 14 aa, Artificial sequence
  Protein classification predicting sequence
DAWAIRYFVSEGFE

SEQ ID NO: 15396 - protein, 11 aa, Artificial sequence
  Protein classification predicting sequence
YVSSPTWENHN

SEQ ID NO: 15397 - protein, 8 aa, Artificial sequence
  Protein classification predicting sequence
AYQGFASG

SEQ ID NO: 15398 - protein, 9 aa, Artificial sequence
  Protein classification predicting sequence
NLGVGAYRT

SEQ ID NO: 15399 - protein, 20 aa, Artificial sequence
  Protein classification predicting sequence
SLNHEYLPILGLAEFRSCAS

SEQ ID NO: 15400 - protein, 8 aa, Artificial sequence
  Protein classification predicting sequence
TGALRIGA

SEQ ID NO: 15401 - protein, 8 aa, Artificial sequence
  Protein classification predicting sequence
GMFSFTGL

SEQ ID NO: 15402 - protein, 8 aa, Artificial sequence
  Protein classification predicting sequence
NLGVGAYR

SEQ ID NO: 15403 - protein, 7 aa, Artificial sequence
  Protein classification predicting sequence
EDISKIP

SEQ ID NO: 15404 - protein, 9 aa, Artificial sequence
  Protein classification predicting sequence
KSGRYVTVQ

SEQ ID NO: 15405 - protein, 12 aa, Artificial sequence
  Protein classification predicting sequence
FLQRFFKFSRDV

SEQ ID NO: 15406 - protein, 17 aa, Artificial sequence
  Protein classification predicting sequence
LPKPSWGNHTPIFRDAG

SEQ ID NO: 15407 - protein, 8 aa, Artificial sequence
  Protein classification predicting sequence
RHFIEQGI

SEQ ID NO: 15408 - protein, 16 aa, Artificial sequence
  Protein classification predicting sequence
HVEMGPPDPILGVTEA

SEQ ID NO: 15409 - protein, 29 aa, Artificial sequence
  Protein classification predicting sequence
FIEQGINVCLCQSYAKNMGLYGERVGAFT

SEQ ID NO: 15410 - protein, 15 aa, Artificial sequence
  Protein classification predicting sequence
EAKRVESQLKILIRP

SEQ ID NO: 15411 - protein, 14 aa, Artificial sequence
  Protein classification predicting sequence
LLHACAHNPTGVDP

SEQ ID NO: 15412 - protein, 14 aa, Artificial sequence
  Protein classification predicting sequence
MRTQLVSNLKKEGS

SEQ ID NO: 15413 - protein, 18 aa, Artificial sequence
  Protein classification predicting sequence
AFHPGLAAAASARASSWW

SEQ ID NO: 15414 - protein, 12 aa, Artificial sequence
  Protein classification predicting sequence
SKNFGLYNERVG

SEQ ID NO: 15415 - protein, 11 aa, Artificial sequence
  Protein classification predicting sequence
KINLGIGVYKD

SEQ ID NO: 15416 - protein, 12 aa, Artificial sequence
  Protein classification predicting sequence
VQSLGGTGALRI

SEQ ID NO: 15417 - protein, 12 aa, Artificial sequence
  Protein classification predicting sequence
GWLPLFDFAYQG

SEQ ID NO: 15418 - protein, 11 aa, Artificial sequence
  Protein classification predicting sequence
QNGMFSFSGLT

SEQ ID NO: 15419 - protein, 8 aa, Artificial sequence
  Protein classification predicting sequence
RPGKINLG

SEQ ID NO: 15420 - protein, 12 aa, Artificial sequence
  Protein classification predicting sequence
LYGERVGALSIV

SEQ ID NO: 15421 - protein, 8 aa, Artificial sequence
  Protein classification predicting sequence
GEPDFDTP

SEQ ID NO: 15422 - protein, 8 aa, Artificial sequence
  Protein classification predicting sequence
VNGFSKTF

SEQ ID NO: 15423 - protein, 7 aa, Artificial sequence
  Protein classification predicting sequence
PYWVSYP

SEQ ID NO: 15424 - protein, 7 aa, Artificial sequence
  Protein classification predicting sequence
VSDEIYE

SEQ ID NO: 15425 - protein, 8 aa, Artificial sequence
  Protein classification predicting sequence
NLVQLLGV

SEQ ID NO: 15426 - protein, 6 aa, Artificial sequence
  Protein classification predicting sequence
IITEFM

SEQ ID NO: 15427 - protein, 10 aa, Artificial sequence
  Protein classification predicting sequence
IHRDLAARNC

SEQ ID NO: 15428 - protein, 8 aa, Artificial sequence
  Protein classification predicting sequence
HRDLAARN

SEQ ID NO: 15429 - protein, 9 aa, Artificial sequence
  Protein classification predicting sequence
FQRLLGDGS

SEQ ID NO: 15430 - protein, 10 aa, Artificial sequence
  Protein classification predicting sequence
LLGDGSQWGL

SEQ ID NO: 15431 - protein, 6 aa, Artificial sequence
  Protein classification predicting sequence
YGQYLL

SEQ ID NO: 15432 - protein, 6 aa, Artificial sequence
  Protein classification predicting sequence
MGTRSG

SEQ ID NO: 15433 - protein, 6 aa, Artificial sequence
  Protein classification predicting sequence
IDPSII

SEQ ID NO: 15434 - protein, 10 aa, Artificial sequence
  Protein classification predicting sequence
GVDVIVFTAG

SEQ ID NO: 15435 - protein, 6 aa, Artificial sequence
  Protein classification predicting sequence
KYYTDY

SEQ ID NO: 15436 - protein, 8 aa, Artificial sequence
  Protein classification predicting sequence
ITAHIGNG

SEQ ID NO: 15437 - protein, 8 aa, Artificial sequence
  Protein classification predicting sequence
AVLNGADA

SEQ ID NO: 15438 - protein, 8 aa, Artificial sequence
  Protein classification predicting sequence
DALVFTAG

SEQ ID NO: 15439 - protein, 6 aa, Artificial sequence
  Protein classification predicting sequence
DSIFTI

SEQ ID NO: 15440 - protein, 12 aa, Artificial sequence
  Protein classification predicting sequence
DSIFTITVDGEK

SEQ ID NO: 15441 - protein, 9 aa, Artificial sequence
  Protein classification predicting sequence
LAPLHNPAN

SEQ ID NO: 15442 - protein, 14 aa, Artificial sequence
  Protein classification predicting sequence
MGTRSGNIDPALIP

SEQ ID NO: 15443 - protein, 9 aa, Artificial sequence
  Protein classification predicting sequence
EITGVGHRV

SEQ ID NO: 15444 - protein, 7 aa, Artificial sequence
  Protein classification predicting sequence
TSMGFTP

SEQ ID NO: 15445 - protein, 5 aa, Artificial sequence
  Protein classification predicting sequence
DTSMG

SEQ ID NO: 15446 - protein, 10 aa, Artificial sequence
  Protein classification predicting sequence
MGTRSGDIDP

SEQ ID NO: 15447 - protein, 7 aa, Artificial sequence
  Protein classification predicting sequence
LNKKSGL

SEQ ID NO: 15448 - protein, 17 aa, Artificial sequence
  Protein classification predicting sequence
SKLVLVLNCGSSSLKFA

SEQ ID NO: 15449 - protein, 26 aa, Artificial sequence
  Protein classification predicting sequence
GLAECLHLPEARIKWKLDGKHEAQLG

SEQ ID NO: 15450 - protein, 13 aa, Artificial sequence
  Protein classification predicting sequence
GAAHEEALAFMVE

SEQ ID NO: 15451 - protein, 9 aa, Artificial sequence
  Protein classification predicting sequence
GHRVVHGGE

SEQ ID NO: 15452 - protein, 18 aa, Artificial sequence
  Protein classification predicting sequence
LAPLHNPAHIIGIKAAQK

SEQ ID NO: 15453 - protein, 10 aa, Artificial sequence
  Protein classification predicting sequence
YLYALPYNLY

SEQ ID NO: 15454 - protein, 7 aa, Artificial sequence
  Protein classification predicting sequence
SVDTSMG

SEQ ID NO: 15455 - protein, 43 aa, Artificial sequence
  Protein classification predicting sequence
SVDTSMGLTPLEGLVMGTRCGDIDPAIIFHLHDTLGYSVEKIN

SEQ ID NO: 15456 - protein, 13 aa, Artificial sequence
  Protein classification predicting sequence
VTSDCRFVEDNYG

SEQ ID NO: 15457 - protein, 8 aa, Artificial sequence
  Protein classification predicting sequence
TNEELVIA

SEQ ID NO: 15458 - protein, 9 aa, Artificial sequence
  Protein classification predicting sequence
INAGSSSLK

SEQ ID NO: 15459 - protein, 11 aa, Artificial sequence
  Protein classification predicting sequence
INAGSSSLKFQ

SEQ ID NO: 15460 - protein, 8 aa, Artificial sequence
  Protein classification predicting sequence
GHRVVHGG

SEQ ID NO: 15461 - protein, 6 aa, Artificial sequence
  Protein classification predicting sequence
FDTAFH

SEQ ID NO: 15462 - protein, 9 aa, Artificial sequence
  Protein classification predicting sequence
VFTAGIGEN

SEQ ID NO: 15463 - protein, 10 aa, Artificial sequence
  Protein classification predicting sequence
GIGENSAPIR

SEQ ID NO: 15464 - protein, 11 aa, Artificial sequence
  Protein classification predicting sequence
VETILASKPEL

SEQ ID NO: 15465 - protein, 19 aa, Artificial sequence
  Protein classification predicting sequence
AIGHRVVHGGEQFTQSALI

SEQ ID NO: 15466 - protein, 9 aa, Artificial sequence
  Protein classification predicting sequence
VLKGIEDCA

SEQ ID NO: 15467 - protein, 7 aa, Artificial sequence
  Protein classification predicting sequence
YLYALPY

SEQ ID NO: 15468 - protein, 10 aa, Artificial sequence
  Protein classification predicting sequence
GLTEVTSDCR

SEQ ID NO: 15469 - protein, 27 aa, Artificial sequence
  Protein classification predicting sequence
GRLDAITFTGGIGENSAPIREMVLNRL

SEQ ID NO: 15470 - protein, 8 aa, Artificial sequence
  Protein classification predicting sequence
SRIPAMVI

SEQ ID NO: 15471 - protein, 13 aa, Artificial sequence
  Protein classification predicting sequence
KWKLDGKHEAQLG

SEQ ID NO: 15472 - protein, 7 aa, Artificial sequence
  Protein classification predicting sequence
LGAGAAH

SEQ ID NO: 15473 - protein, 9 aa, Artificial sequence
  Protein classification predicting sequence
GHRIVHGGE

SEQ ID NO: 15474 - protein, 10 aa, Artificial sequence
  Protein classification predicting sequence
HLGNGASVCA

SEQ ID NO: 15475 - protein, 7 aa, Artificial sequence
  Protein classification predicting sequence
GDIDPAI

SEQ ID NO: 15476 - protein, 14 aa, Artificial sequence
  Protein classification predicting sequence
IRKYGFHGTSHKYV

SEQ ID NO: 15477 - protein, 9 aa, Artificial sequence
  Protein classification predicting sequence
CHLGNGASI

SEQ ID NO: 15478 - protein, 6 aa, Artificial sequence
  Protein classification predicting sequence
MGFTPL

SEQ ID NO: 15479 - protein, 8 aa, Artificial sequence
  Protein classification predicting sequence
NAGSSSLK

SEQ ID NO: 15480 - protein, 8 aa, Artificial sequence
  Protein classification predicting sequence
LAPLHNPA

SEQ ID NO: 15481 - protein, 7 aa, Artificial sequence
  Protein classification predicting sequence
APLHNPA

SEQ ID NO: 15482 - protein, 29 aa, Artificial sequence
  Protein classification predicting sequence
SVDTSMGFTPLSGLMMGTRCGDLDPGIIE

SEQ ID NO: 15483 - protein, 12 aa, Artificial sequence
  Protein classification predicting sequence
SGFLGVSGLTSD

SEQ ID NO: 15484 - protein, 8 aa, Artificial sequence
  Protein classification predicting sequence
SGLGECFG

SEQ ID NO: 15485 - protein, 11 aa, Artificial sequence
  Protein classification predicting sequence
HLGNGASVCAI

SEQ ID NO: 15486 - protein, 9 aa, Artificial sequence
  Protein classification predicting sequence
GDLDPGIIE

SEQ ID NO: 15487 - protein, 21 aa, Artificial sequence
  Protein classification predicting sequence
SGFLGVSGLTSDARGILEAME

SEQ ID NO: 15488 - protein, 6 aa, Artificial sequence
  Protein classification predicting sequence
DAIIFT

SEQ ID NO: 15489 - protein, 9 aa, Artificial sequence
  Protein classification predicting sequence
DLAPLHNPA

SEQ ID NO: 15490 - protein, 10 aa, Artificial sequence
  Protein classification predicting sequence
RRYGFHGTSH

SEQ ID NO: 15491 - protein, 9 aa, Artificial sequence
  Protein classification predicting sequence
ASYLAALDS

SEQ ID NO: 15492 - protein, 12 aa, Artificial sequence
  Protein classification predicting sequence
AVFDTAFHQTMP

SEQ ID NO: 15493 - protein, 10 aa, Artificial sequence
  Protein classification predicting sequence
LAFQVFTYRV

SEQ ID NO: 15494 - protein, 9 aa, Artificial sequence
  Protein classification predicting sequence
FTGGIGENS

SEQ ID NO: 15495 - protein, 7 aa, Artificial sequence
  Protein classification predicting sequence
RRYGFHG

SEQ ID NO: 15496 - protein, 7 aa, Artificial sequence
  Protein classification predicting sequence
FTAGVGE

SEQ ID NO: 15497 - protein, 10 aa, Artificial sequence
  Protein classification predicting sequence
GVDAIIFTAG

SEQ ID NO: 15498 - protein, 25 aa, Artificial sequence
  Protein classification predicting sequence
GGKSIDTSMGFTPLAGVTMGTRSGN

SEQ ID NO: 15499 - protein, 7 aa, Artificial sequence
  Protein classification predicting sequence
MGTRSGN

SEQ ID NO: 15500 - protein, 27 aa, Artificial sequence
  Protein classification predicting sequence
FPHSPVKIIVIPTDEEVMIARDVLRLG

SEQ ID NO: 15501 - protein, 9 aa, Artificial sequence
  Protein classification predicting sequence
LVLNCGSSS

SEQ ID NO: 15502 - protein, 11 aa, Artificial sequence
  Protein classification predicting sequence
VKVVVIPTDEE

SEQ ID NO: 15503 - protein, 10 aa, Artificial sequence
  Protein classification predicting sequence
MPEEELVTKG

SEQ ID NO: 15504 - protein, 6 aa, Artificial sequence
  Protein classification predicting sequence
VERIGL

SEQ ID NO: 15505 - protein, 11 aa, Artificial sequence
  Protein classification predicting sequence
CHLGNGASIAA

SEQ ID NO: 15506 - protein, 49 aa, Artificial sequence
  Protein classification predicting sequence
GNGASIAAIDGGKSIDTSMGFTPLAGVTMGTRSGNIDPALIPFIMEKTG

SEQ ID NO: 15507 - protein, 9 aa, Artificial sequence
  Protein classification predicting sequence
GNDRAELAL

SEQ ID NO: 15508 - protein, 8 aa, Artificial sequence
  Protein classification predicting sequence
IHKYIGSY

SEQ ID NO: 15509 - protein, 11 aa, Artificial sequence
  Protein classification predicting sequence
GLEFMGVYWDP

SEQ ID NO: 15510 - protein, 8 aa, Artificial sequence
  Protein classification predicting sequence
VRGKEAFI

SEQ ID NO: 15511 - protein, 8 aa, Artificial sequence
  Protein classification predicting sequence
EEVMIARD

SEQ ID NO: 15512 - protein, 22 aa, Artificial sequence
  Protein classification predicting sequence
EVLPNVPAVAVFDTAFHQTMPE

SEQ ID NO: 15513 - protein, 14 aa, Artificial sequence
  Protein classification predicting sequence
VAVFDTAFHQTMPE

SEQ ID NO: 15514 - protein, 38 aa, Artificial sequence
  Protein classification predicting sequence
LYSLPYEYYEKFGIRKYGFHGTSHKYVTERAAELLGRP

SEQ ID NO: 15515 - protein, 17 aa, Artificial sequence
  Protein classification predicting sequence
GGKSIDTSMGFTPLAGV

SEQ ID NO: 15516 - protein, 7 aa, Artificial sequence
  Protein classification predicting sequence
SSDLRDI

SEQ ID NO: 15517 - protein, 9 aa, Artificial sequence
  Protein classification predicting sequence
FTAGIGENS

SEQ ID NO: 15518 - protein, 7 aa, Artificial sequence
  Protein classification predicting sequence
VIPTNEE

SEQ ID NO: 15519 - protein, 36 aa, Artificial sequence
  Protein classification predicting sequence
EVLPNVPAVAVFDTAFHQTMPESAFLYSLPYEYYEK

SEQ ID NO: 15520 - protein, 12 aa, Artificial sequence
  Protein classification predicting sequence
GIRKYGFHGTSH

SEQ ID NO: 15521 - protein, 7 aa, Artificial sequence
  Protein classification predicting sequence
GSYAARM

SEQ ID NO: 15522 - protein, 9 aa, Artificial sequence
  Protein classification predicting sequence
PVKIIVIPT

SEQ ID NO: 15523 - protein, 8 aa, Artificial sequence
  Protein classification predicting sequence
YPHSPVKV

SEQ ID NO: 15524 - protein, 6 aa, Artificial sequence
  Protein classification predicting sequence
KYIGSY

SEQ ID NO: 15525 - protein, 6 aa, Artificial sequence
  Protein classification predicting sequence
IPTNEE

SEQ ID NO: 15526 - protein, 7 aa, Artificial sequence
  Protein classification predicting sequence
RRYGAHG

SEQ ID NO: 15527 - protein, 8 aa, Artificial sequence
  Protein classification predicting sequence
FTGGIGEN

SEQ ID NO: 15528 - protein, 8 aa, Artificial sequence
  Protein classification predicting sequence
VIPTDEEL

SEQ ID NO: 15529 - protein, 6 aa, Artificial sequence
  Protein classification predicting sequence
APLHNP

SEQ ID NO: 15530 - protein, 7 aa, Artificial sequence
  Protein classification predicting sequence
RKYGAHG

SEQ ID NO: 15531 - protein, 8 aa, Artificial sequence
  Protein classification predicting sequence
SGVSSDFR

SEQ ID NO: 15532 - protein, 7 aa, Artificial sequence
  Protein classification predicting sequence
GKEGFIN

SEQ ID NO: 15533 - protein, 8 aa, Artificial sequence
  Protein classification predicting sequence
GHRIVHGG

SEQ ID NO: 15534 - protein, 7 aa, Artificial sequence
  Protein classification predicting sequence
HLGNGAS

SEQ ID NO: 15535 - protein, 6 aa, Artificial sequence
  Protein classification predicting sequence
NKKSGV

SEQ ID NO: 15536 - protein, 8 aa, Artificial sequence
  Protein classification predicting sequence
TSMGFTPL

SEQ ID NO: 15537 - protein, 7 aa, Artificial sequence
  Protein classification predicting sequence
YGAHGTS

SEQ ID NO: 15538 - protein, 7 aa, Artificial sequence
  Protein classification predicting sequence
FHQTMPE

SEQ ID NO: 15539 - protein, 8 aa, Artificial sequence
  Protein classification predicting sequence
HLGNGASI

SEQ ID NO: 15540 - protein, 8 aa, Artificial sequence
  Protein classification predicting sequence
SAIRNGKC

SEQ ID NO: 15541 - protein, 6 aa, Artificial sequence
  Protein classification predicting sequence
NCGSSS

SEQ ID NO: 15542 - protein, 7 aa, Artificial sequence
  Protein classification predicting sequence
LAPLHNP

SEQ ID NO: 15543 - protein, 6 aa, Artificial sequence
  Protein classification predicting sequence
SGISSD

SEQ ID NO: 15544 - protein, 6 aa, Artificial sequence
  Protein classification predicting sequence
IGSYTA

SEQ ID NO: 15545 - protein, 8 aa, Artificial sequence
  Protein classification predicting sequence
GSSSLKYQ

SEQ ID NO: 15546 - protein, 8 aa, Artificial sequence
  Protein classification predicting sequence
YGFHGTSH

SEQ ID NO: 15547 - protein, 6 aa, Artificial sequence
  Protein classification predicting sequence
IGSYAA

SEQ ID NO: 15548 - protein, 8 aa, Artificial sequence
  Protein classification predicting sequence
EELMIARD

SEQ ID NO: 15549 - protein, 7 aa, Artificial sequence
  Protein classification predicting sequence
VHGGEKF

SEQ ID NO: 15550 - protein, 7 aa, Artificial sequence
  Protein classification predicting sequence
LKLITCH

SEQ ID NO: 15551 - protein, 6 aa, Artificial sequence
  Protein classification predicting sequence
YLYPIP

SEQ ID NO: 15552 - protein, 7 aa, Artificial sequence
  Protein classification predicting sequence
VSQRAAE

SEQ ID NO: 15553 - protein, 7 aa, Artificial sequence
  Protein classification predicting sequence
RKILPDV

SEQ ID NO: 15554 - protein, 7 aa, Artificial sequence
  Protein classification predicting sequence
GLVMGTR

SEQ ID NO: 15555 - protein, 7 aa, Artificial sequence
  Protein classification predicting sequence
HGVRRYG

SEQ ID NO: 15556 - protein, 9 aa, Artificial sequence
  Protein classification predicting sequence
TPLEGLIMG

SEQ ID NO: 15557 - protein, 7 aa, Artificial sequence
  Protein classification predicting sequence
ISTPESK

SEQ ID NO: 15558 - protein, 6 aa, Artificial sequence
  Protein classification predicting sequence
GSSSIK

SEQ ID NO: 15559 - protein, 7 aa, Artificial sequence
  Protein classification predicting sequence
KYQLIDM

SEQ ID NO: 15560 - protein, 7 aa, Artificial sequence
  Protein classification predicting sequence
MGTRCGD

SEQ ID NO: 15561 - protein, 6 aa, Artificial sequence
  Protein classification predicting sequence
YDEITG

SEQ ID NO: 15562 - protein, 7 aa, Artificial sequence
  Protein classification predicting sequence
FHTTMPE

SEQ ID NO: 15563 - protein, 11 aa, Artificial sequence
  Protein classification predicting sequence
DTSMGFTPLAG

SEQ ID NO: 15564 - protein, 9 aa, Artificial sequence
  Protein classification predicting sequence
AYNIFIDRI

SEQ ID NO: 15565 - protein, 13 aa, Artificial sequence
  Protein classification predicting sequence
AINAGSSSLKFQL

SEQ ID NO: 15566 - protein, 17 aa, Artificial sequence
  Protein classification predicting sequence
AINAGSSSLKFQLFEMP

SEQ ID NO: 15567 - protein, 7 aa, Artificial sequence
  Protein classification predicting sequence
ETVLTKG

SEQ ID NO: 15568 - protein, 7 aa, Artificial sequence
  Protein classification predicting sequence
AFQEVLP

SEQ ID NO: 15569 - protein, 11 aa, Artificial sequence
  Protein classification predicting sequence
SGISSDLRDLE

SEQ ID NO: 15570 - protein, 7 aa, Artificial sequence
  Protein classification predicting sequence
LNCGSSS

SEQ ID NO: 15571 - protein, 16 aa, Artificial sequence
  Protein classification predicting sequence
PHVAIFDTAFHQTMPE

SEQ ID NO: 15572 - protein, 11 aa, Artificial sequence
  Protein classification predicting sequence
FDTAFHQTMPE

SEQ ID NO: 15573 - protein, 6 aa, Artificial sequence
  Protein classification predicting sequence
ARIKWK

SEQ ID NO: 15574 - protein, 7 aa, Artificial sequence
  Protein classification predicting sequence
EALNFIV

SEQ ID NO: 15575 - protein, 9 aa, Artificial sequence
  Protein classification predicting sequence
TDEVVKGIE

SEQ ID NO: 15576 - protein, 7 aa, Artificial sequence
  Protein classification predicting sequence
VFDTAFH

SEQ ID NO: 15577 - protein, 17 aa, Artificial sequence
  Protein classification predicting sequence
DTSMGLTPLEGLVMGTR

SEQ ID NO: 15578 - protein, 8 aa, Artificial sequence
  Protein classification predicting sequence
HDTLGMSV

SEQ ID NO: 15579 - protein, 10 aa, Artificial sequence
  Protein classification predicting sequence
LNCGSSSLKF

SEQ ID NO: 15580 - protein, 9 aa, Artificial sequence
  Protein classification predicting sequence
LPEARIKWK

SEQ ID NO: 15581 - protein, 6 aa, Artificial sequence
  Protein classification predicting sequence
LYALPY

SEQ ID NO: 15582 - protein, 11 aa, Artificial sequence
  Protein classification predicting sequence
HGTSHYFVSRE

SEQ ID NO: 15583 - protein, 11 aa, Artificial sequence
  Protein classification predicting sequence
YGFHGTSHKYV

SEQ ID NO: 15584 - protein, 6 aa, Artificial sequence
  Protein classification predicting sequence
AGVGEN

SEQ ID NO: 15585 - protein, 10 aa, Artificial sequence
  Protein classification predicting sequence
KTIAINAGSS

SEQ ID NO: 15586 - protein, 9 aa, Artificial sequence
  Protein classification predicting sequence
VAVFDTAFH

SEQ ID NO: 15587 - protein, 6 aa, Artificial sequence
  Protein classification predicting sequence
TAGIGE

SEQ ID NO: 15588 - protein, 7 aa, Artificial sequence
  Protein classification predicting sequence
AINAGSS

SEQ ID NO: 15589 - protein, 13 aa, Artificial sequence
  Protein classification predicting sequence
GAAHSEALNFIVN

SEQ ID NO: 15590 - protein, 11 aa, Artificial sequence
  Protein classification predicting sequence
VFDTAFHQTMP

SEQ ID NO: 15591 - protein, 9 aa, Artificial sequence
  Protein classification predicting sequence
AKRAMDVYC

SEQ ID NO: 15592 - protein, 6 aa, Artificial sequence
  Protein classification predicting sequence
MGLTPL

SEQ ID NO: 15593 - protein, 8 aa, Artificial sequence
  Protein classification predicting sequence
HGTSHFYV

SEQ ID NO: 15594 - protein, 7 aa, Artificial sequence
  Protein classification predicting sequence
RKYGFHG

SEQ ID NO: 15595 - protein, 7 aa, Artificial sequence
  Protein classification predicting sequence
GSSSLKF

SEQ ID NO: 15596 - protein, 7 aa, Artificial sequence
  Protein classification predicting sequence
YVSERAA

SEQ ID NO: 15597 - protein, 8 aa, Artificial sequence
  Protein classification predicting sequence
FTAGIGEN

SEQ ID NO: 15598 - protein, 9 aa, Artificial sequence
  Protein classification predicting sequence
VFTGGIGEN

SEQ ID NO: 15599 - protein, 10 aa, Artificial sequence
  Protein classification predicting sequence
ELAPLHNPAN

SEQ ID NO: 15600 - protein, 7 aa, Artificial sequence
  Protein classification predicting sequence
LRLISCH

SEQ ID NO: 15601 - protein, 9 aa, Artificial sequence
  Protein classification predicting sequence
VLNKESGML

SEQ ID NO: 15602 - protein, 9 aa, Artificial sequence
  Protein classification predicting sequence
FTAGVGENS

SEQ ID NO: 15603 - protein, 6 aa, Artificial sequence
  Protein classification predicting sequence
GLEFMG

SEQ ID NO: 15604 - protein, 9 aa, Artificial sequence
  Protein classification predicting sequence
NYPHSPVKV

SEQ ID NO: 15605 - protein, 17 aa, Artificial sequence
  Protein classification predicting sequence
NYPHSPVKVIIIPTNEE

SEQ ID NO: 15606 - protein, 13 aa, Artificial sequence
  Protein classification predicting sequence
FAPLHNPAHLIGI

SEQ ID NO: 15607 - protein, 23 aa, Artificial sequence
  Protein classification predicting sequence
EAALGAGAAHSEALNFIVNTILA

SEQ ID NO: 15608 - protein, 7 aa, Artificial sequence
  Protein classification predicting sequence
VIQGIKD

SEQ ID NO: 15609 - protein, 17 aa, Artificial sequence
  Protein classification predicting sequence
KNVAVFDTAFHQTMPEE

SEQ ID NO: 15610 - protein, 19 aa, Artificial sequence
  Protein classification predicting sequence
YLYALPYNLYKEHGIRRYG

SEQ ID NO: 15611 - protein, 22 aa, Artificial sequence
  Protein classification predicting sequence
CVDTSMGLTPLEGLVMGTRSGD

SEQ ID NO: 15612 - protein, 7 aa, Artificial sequence
  Protein classification predicting sequence
EDNYATK

SEQ ID NO: 15613 - protein, 5 aa, Artificial sequence
  Protein classification predicting sequence
YALPY

SEQ ID NO: 15614 - protein, 9 aa, Artificial sequence
  Protein classification predicting sequence
GNGASIAAI

SEQ ID NO: 15615 - protein, 6 aa, Artificial sequence
  Protein classification predicting sequence
FDTSFH

SEQ ID NO: 15616 - protein, 7 aa, Artificial sequence
  Protein classification predicting sequence
KKSGLLG

SEQ ID NO: 15617 - protein, 6 aa, Artificial sequence
  Protein classification predicting sequence
FTAGVG

SEQ ID NO: 15618 - protein, 7 aa, Artificial sequence
  Protein classification predicting sequence
RLAKYIG

SEQ ID NO: 15619 - protein, 36 aa, Artificial sequence
  Protein classification predicting sequence
EALKSFPQLKDKNVAVFDTAFHQTMPEESYLYALPY

SEQ ID NO: 15620 - protein, 46 aa, Artificial sequence
  Protein classification predicting sequence
LTKESGLLGLTEVTSDCRYVEDNYATKEDAKRAMDVYCHRLAKYIG

SEQ ID NO: 15621 - protein, 16 aa, Artificial sequence
  Protein classification predicting sequence
KLVLVLNCGSSSLKFA

SEQ ID NO: 15622 - protein, 8 aa, Artificial sequence
  Protein classification predicting sequence
GSSSLKFA

SEQ ID NO: 15623 - protein, 7 aa, Artificial sequence
  Protein classification predicting sequence
SGLAECF

SEQ ID NO: 15624 - protein, 12 aa, Artificial sequence
  Protein classification predicting sequence
APLHNPAHLIGI

SEQ ID NO: 15625 - protein, 8 aa, Artificial sequence
  Protein classification predicting sequence
EHGIRRYG

SEQ ID NO: 15626 - protein, 9 aa, Artificial sequence
  Protein classification predicting sequence
ERIGLKDSI

SEQ ID NO: 15627 - protein, 25 aa, Artificial sequence
  Protein classification predicting sequence
GEKVKTVQDIKDHVEAVDIMLDAFK

SEQ ID NO: 15628 - protein, 33 aa, Artificial sequence
  Protein classification predicting sequence
RGKEGFINYPHSPVKVVVIPTDEESMIARDVMT

SEQ ID NO: 15629 - protein, 11 aa, Artificial sequence
  Protein classification predicting sequence
AYLYSLPYHYY

SEQ ID NO: 15630 - protein, 8 aa, Artificial sequence
  Protein classification predicting sequence
KESGLLGL

SEQ ID NO: 15631 - protein, 19 aa, Artificial sequence
  Protein classification predicting sequence
KVLEGLEFMGVYWDPKKNE

SEQ ID NO: 15632 - protein, 8 aa, Artificial sequence
  Protein classification predicting sequence
PTDEEVMI

SEQ ID NO: 15633 - protein, 27 aa, Artificial sequence
  Protein classification predicting sequence
IEELSELAPLHNPANLMGIRAFRKLLP

SEQ ID NO: 15634 - protein, 24 aa, Artificial sequence
  Protein classification predicting sequence
PIEDLRIISCHIGNGASIAAIDGG

SEQ ID NO: 15635 - protein, 32 aa, Artificial sequence
  Protein classification predicting sequence
FASKIHKYIGSYAARMHGVDVIVFTAGIGENS

SEQ ID NO: 15636 - protein, 12 aa, Artificial sequence
  Protein classification predicting sequence
GNGVSITANYHG

SEQ ID NO: 15637 - protein, 17 aa, Artificial sequence
  Protein classification predicting sequence
FTAGMGENAPLMRQDVI

SEQ ID NO: 15638 - protein, 9 aa, Artificial sequence
  Protein classification predicting sequence
IARDVERLK

SEQ ID NO: 15639 - protein, 27 aa, Artificial sequence
  Protein classification predicting sequence
HTYLYPIPQKYYTDYKVRKYGAHGTSH

SEQ ID NO: 15640 - protein, 29 aa, Artificial sequence
  Protein classification predicting sequence
DTSMGFTPLAGPMMGTRSGDIDPAIIPYL

SEQ ID NO: 15641 - protein, 7 aa, Artificial sequence
  Protein classification predicting sequence
GLVERIG

SEQ ID NO: 15642 - protein, 7 aa, Artificial sequence
  Protein classification predicting sequence
MGTRSGD

SEQ ID NO: 15643 - protein, 8 aa, Artificial sequence
  Protein classification predicting sequence
KGLIERIG

SEQ ID NO: 15644 - protein, 8 aa, Artificial sequence
  Protein classification predicting sequence
YGAHGTSH

SEQ ID NO: 15645 - protein, 13 aa, Artificial sequence
  Protein classification predicting sequence
GKSVDTSMGFTPL

SEQ ID NO: 15646 - protein, 10 aa, Artificial sequence
  Protein classification predicting sequence
IERIGLKDSI

SEQ ID NO: 15647 - protein, 11 aa, Artificial sequence
  Protein classification predicting sequence
GDIDPAIIPYL

SEQ ID NO: 15648 - protein, 7 aa, Artificial sequence
  Protein classification predicting sequence
SGLLGVS

SEQ ID NO: 15649 - protein, 6 aa, Artificial sequence
  Protein classification predicting sequence
LGRPLE

SEQ ID NO: 15650 - protein, 6 aa, Artificial sequence
  Protein classification predicting sequence
KYIGAY

SEQ ID NO: 15651 - protein, 13 aa, Artificial sequence
  Protein classification predicting sequence
LAPLHNPANLMGI

SEQ ID NO: 15652 - protein, 7 aa, Artificial sequence
  Protein classification predicting sequence
PYEYYEK

SEQ ID NO: 15653 - protein, 6 aa, Artificial sequence
  Protein classification predicting sequence
PTNEEL

SEQ ID NO: 15654 - protein, 8 aa, Artificial sequence
  Protein classification predicting sequence
FTAGVGEN

SEQ ID NO: 15655 - protein, 7 aa, Artificial sequence
  Protein classification predicting sequence
GDLDPAI

SEQ ID NO: 15656 - protein, 11 aa, Artificial sequence
  Protein classification predicting sequence
VAVFDTAFHQT

SEQ ID NO: 15657 - protein, 8 aa, Artificial sequence
  Protein classification predicting sequence
ITCHLGNG

SEQ ID NO: 15658 - protein, 17 aa, Artificial sequence
  Protein classification predicting sequence
SGLAECFHLPEARIKWK

SEQ ID NO: 15659 - protein, 18 aa, Artificial sequence
  Protein classification predicting sequence
LSAQLTAIGHRIVHGGEK

SEQ ID NO: 15660 - protein, 12 aa, Artificial sequence
  Protein classification predicting sequence
AIGHRIVHGGEK

SEQ ID NO: 15661 - protein, 10 aa, Artificial sequence
  Protein classification predicting sequence
GHRIVHGGEK

SEQ ID NO: 15662 - protein, 10 aa, Artificial sequence
  Protein classification predicting sequence
DPAIIFHLHD

SEQ ID NO: 15663 - protein, 13 aa, Artificial sequence
  Protein classification predicting sequence
RAMDVFCHRLAKY

SEQ ID NO: 15664 - protein, 8 aa, Artificial sequence
  Protein classification predicting sequence
AARFGKSG

SEQ ID NO: 15665 - protein, 10 aa, Artificial sequence
  Protein classification predicting sequence
IHLTITDDFP

SEQ ID NO: 15666 - protein, 7 aa, Artificial sequence
  Protein classification predicting sequence
RFAAKEA

SEQ ID NO: 15667 - protein, 13 aa, Artificial sequence
  Protein classification predicting sequence
DGKLKFMERILTE

SEQ ID NO: 15668 - protein, 35 aa, Artificial sequence
  Protein classification predicting sequence
GIGIDIIELNRIEKMLDGKLKFMERILTENERNVA

SEQ ID NO: 15669 - protein, 39 aa, Artificial sequence
  Protein classification predicting sequence
LKGSRLTEFVAGRFAAKEAYSKAVGTGIGKEVSFLDIEV

SEQ ID NO: 15670 - protein, 11 aa, Artificial sequence
  Protein classification predicting sequence
RGKPILITSTE

SEQ ID NO: 15671 - protein, 21 aa, Artificial sequence
  Protein classification predicting sequence
IVHLSISHSKEFAVAQVVLES

SEQ ID NO: 15672 - protein, 8 aa, Artificial sequence
  Protein classification predicting sequence
EFLAGRFA

SEQ ID NO: 15673 - protein, 7 aa, Artificial sequence
  Protein classification predicting sequence
KAFGTGI

SEQ ID NO: 15674 - protein, 11 aa, Artificial sequence
  Protein classification predicting sequence
YAKRFAAKEAC

SEQ ID NO: 15675 - protein, 7 aa, Artificial sequence
  Protein classification predicting sequence
KALGTGI

SEQ ID NO: 15676 - protein, 8 aa, Artificial sequence
  Protein classification predicting sequence
GTGIRNGL

SEQ ID NO: 15677 - protein, 7 aa, Artificial sequence
  Protein classification predicting sequence
IYGIGTD

SEQ ID NO: 15678 - protein, 11 aa, Artificial sequence
  Protein classification predicting sequence
AQAFVIIEALP

SEQ ID NO: 15679 - protein, 8 aa, Artificial sequence
  Protein classification predicting sequence
DIVEIARI

SEQ ID NO: 15680 - protein, 8 aa, Artificial sequence
  Protein classification predicting sequence
RFAVKEAA

SEQ ID NO: 15681 - protein, 7 aa, Artificial sequence
  Protein classification predicting sequence
KEAFSKA

SEQ ID NO: 15682 - protein, 7 aa, Artificial sequence
  Protein classification predicting sequence
NDELGKP

SEQ ID NO: 15683 - protein, 8 aa, Artificial sequence
  Protein classification predicting sequence
HVTLADER

SEQ ID NO: 15684 - protein, 9 aa, Artificial sequence
  Protein classification predicting sequence
AGRFAAKEA

SEQ ID NO: 15685 - protein, 10 aa, Artificial sequence
  Protein classification predicting sequence
FTPGERRDAS

SEQ ID NO: 15686 - protein, 17 aa, Artificial sequence
  Protein classification predicting sequence
KEAVIKAWSGSRFAQRP

SEQ ID NO: 15687 - protein, 8 aa, Artificial sequence
  Protein classification predicting sequence
ERILTENE

SEQ ID NO: 15688 - protein, 13 aa, Artificial sequence
  Protein classification predicting sequence
GLGTDIVEIARIE

SEQ ID NO: 15689 - protein, 18 aa, Artificial sequence
  Protein classification predicting sequence
PVRFLAKRFAVKEAAAKA

SEQ ID NO: 15690 - protein, 15 aa, Artificial sequence
  Protein classification predicting sequence
GTGIRNGLAFNQFEV

SEQ ID NO: 15691 - protein, 25 aa, Artificial sequence
  Protein classification predicting sequence
AAIHLTITDDFPLAQAFVIIEALPV

SEQ ID NO: 15692 - protein, 6 aa, Artificial sequence
  Protein classification predicting sequence
FLAKRF

SEQ ID NO: 15693 - protein, 8 aa, Artificial sequence
  Protein classification predicting sequence
AKEAVSKA

SEQ ID NO: 15694 - protein, 52 aa, Artificial sequence
  Protein classification predicting sequence
QPVRFLAKRFAVKEAAAKAFGTGIRNGLAFNQFEVFNDELGKPRLRLWGEAL

SEQ ID NO: 15695 - protein, 17 aa, Artificial sequence
  Protein classification predicting sequence
MHVTLADERHYACATVI

SEQ ID NO: 15696 - protein, 7 aa, Artificial sequence
  Protein classification predicting sequence
YACATVI

SEQ ID NO: 15697 - protein, 10 aa, Artificial sequence
  Protein classification predicting sequence
LAKRFAAKEA

SEQ ID NO: 15698 - protein, 14 aa, Artificial sequence
  Protein classification predicting sequence
KEAFSKALGTGLGK

SEQ ID NO: 15699 - protein, 8 aa, Artificial sequence
  Protein classification predicting sequence
SISHSGNY

SEQ ID NO: 15700 - protein, 7 aa, Artificial sequence
  Protein classification predicting sequence
GHGIDLQ

SEQ ID NO: 15701 - protein, 6 aa, Artificial sequence
  Protein classification predicting sequence
GLGTDI

SEQ ID NO: 15702 - protein, 11 aa, Artificial sequence
  Protein classification predicting sequence
GLGTDIAEIER

SEQ ID NO: 15703 - protein, 8 aa, Artificial sequence
  Protein classification predicting sequence
IHLSLSDD

SEQ ID NO: 15704 - protein, 35 aa, Artificial sequence
  Protein classification predicting sequence
QPVRFLAKRFAVKEAAAKAFGTGIRNGLAFNQFEV

SEQ ID NO: 15705 - protein, 7 aa, Artificial sequence
  Protein classification predicting sequence
VQRTVAR

SEQ ID NO: 15706 - protein, 9 aa, Artificial sequence
  Protein classification predicting sequence
VAVKIFSSR

SEQ ID NO: 15707 - protein, 18 aa, Artificial sequence
  Protein classification predicting sequence
ASGLAHLHMEIVGTQGKP

SEQ ID NO: 15708 - protein, 17 aa, Artificial sequence
  Protein classification predicting sequence
IAHRDLKSKNILVKKNG

SEQ ID NO: 15709 - protein, 42 aa, Artificial sequence
  Protein classification predicting sequence
ERSWFREAEIYQTVMLRHENILGFIAADNKDNGTWTQLWLVS

SEQ ID NO: 15710 - protein, 8 aa, Artificial sequence
  Protein classification predicting sequence
ASGLAHLH

SEQ ID NO: 15711 - protein, 6 aa, Artificial sequence
  Protein classification predicting sequence
VPSDPS

SEQ ID NO: 15712 - protein, 9 aa, Artificial sequence
  Protein classification predicting sequence
PLLVQRTIA

SEQ ID NO: 15713 - protein, 7 aa, Artificial sequence
  Protein classification predicting sequence
GSGSGLP

SEQ ID NO: 15714 - protein, 17 aa, Artificial sequence
  Protein classification predicting sequence
GSGSGLPFLVQRTVARQ

SEQ ID NO: 15715 - protein, 14 aa, Artificial sequence
  Protein classification predicting sequence
ECVGKGRYGEVWRG

SEQ ID NO: 15716 - protein, 6 aa, Artificial sequence
  Protein classification predicting sequence
LRHDNI

SEQ ID NO: 15717 - protein, 7 aa, Artificial sequence
  Protein classification predicting sequence
NILGFIA

SEQ ID NO: 15718 - protein, 13 aa, Artificial sequence
  Protein classification predicting sequence
SSTQLWLITHYHE

SEQ ID NO: 15719 - protein, 15 aa, Artificial sequence
  Protein classification predicting sequence
QCCIADLGLAVMHSQ

SEQ ID NO: 15720 - protein, 15 aa, Artificial sequence
  Protein classification predicting sequence
RVGTKRYMAPEVLDE

SEQ ID NO: 15721 - protein, 7 aa, Artificial sequence
  Protein classification predicting sequence
NGIVEDY

SEQ ID NO: 15722 - protein, 8 aa, Artificial sequence
  Protein classification predicting sequence
KVVCVDQQ

SEQ ID NO: 15723 - protein, 10 aa, Artificial sequence
  Protein classification predicting sequence
VPNDPSFEDM

SEQ ID NO: 15724 - protein, 14 aa, Artificial sequence
  Protein classification predicting sequence
TVMLRHENILGFIA

SEQ ID NO: 15725 - protein, 38 aa, Artificial sequence
  Protein classification predicting sequence
VYQKGCFQVYEQGKMTCKTPPSPGQAVECCQGDWCNRN

SEQ ID NO: 15726 - protein, 10 aa, Artificial sequence
  Protein classification predicting sequence
LPTKGKSFPG

SEQ ID NO: 15727 - protein, 20 aa, Artificial sequence
  Protein classification predicting sequence
QNFHLEVGLIILSVVFAVCL

SEQ ID NO: 15728 - protein, 18 aa, Artificial sequence
  Protein classification predicting sequence
TIEECWDHDAEARLSAGC

SEQ ID NO: 15729 - protein, 19 aa, Artificial sequence
  Protein classification predicting sequence
CYGDKDKRRHCFATWKNIS

SEQ ID NO: 15730 - protein, 36 aa, Artificial sequence
  Protein classification predicting sequence
FSYFPEMEVTQPTSNPVTPKPPYYNILLYSLVPLML

SEQ ID NO: 15731 - protein, 31 aa, Artificial sequence
  Protein classification predicting sequence
EEIGQHPSLEDMQEVVVHKKKRPVLRDYWQK

SEQ ID NO: 15732 - protein, 13 aa, Artificial sequence
  Protein classification predicting sequence
KLAFAVFLISCSS

SEQ ID NO: 15733 - protein, 10 aa, Artificial sequence
  Protein classification predicting sequence
ECIYYNANWE

SEQ ID NO: 15734 - protein, 28 aa, Artificial sequence
  Protein classification predicting sequence
HCFATWKNISGSIEIVKQGCWLDDINCY

SEQ ID NO: 15735 - protein, 7 aa, Artificial sequence
  Protein classification predicting sequence
FCCCEGN

SEQ ID NO: 15736 - protein, 14 aa, Artificial sequence
  Protein classification predicting sequence
PEMEVTQPTSNPVT

SEQ ID NO: 15737 - protein, 6 aa, Artificial sequence
  Protein classification predicting sequence
FWMYRH

SEQ ID NO: 15738 - protein, 7 aa, Artificial sequence
  Protein classification predicting sequence
SWQNEYE

SEQ ID NO: 15739 - protein, 12 aa, Artificial sequence
  Protein classification predicting sequence
YSLPGMKHENIL

SEQ ID NO: 15740 - protein, 14 aa, Artificial sequence
  Protein classification predicting sequence
DLWLITAFHEKGSL

SEQ ID NO: 15741 - protein, 12 aa, Artificial sequence
  Protein classification predicting sequence
LKANVVSWNELC

SEQ ID NO: 15742 - protein, 15 aa, Artificial sequence
  Protein classification predicting sequence
LHEDIPGLKDGHKPA

SEQ ID NO: 15743 - protein, 8 aa, Artificial sequence
  Protein classification predicting sequence
HRDIKSKN

SEQ ID NO: 15744 - protein, 6 aa, Artificial sequence
  Protein classification predicting sequence
GLVLWE

SEQ ID NO: 15745 - protein, 13 aa, Artificial sequence
  Protein classification predicting sequence
GLVLWELASRCTA

SEQ ID NO: 15746 - protein, 20 aa, Artificial sequence
  Protein classification predicting sequence
GQHPSLEDMQEVVVHKKKRP

SEQ ID NO: 15747 - protein, 11 aa, Artificial sequence
  Protein classification predicting sequence
GGSLSHHHGVG

SEQ ID NO: 15748 - protein, 9 aa, Artificial sequence
  Protein classification predicting sequence
TRASGMKKN

SEQ ID NO: 15749 - protein, 9 aa, Artificial sequence
  Protein classification predicting sequence
YGNIEDLVV

SEQ ID NO: 15750 - protein, 7 aa, Artificial sequence
  Protein classification predicting sequence
FGNETEA

SEQ ID NO: 15751 - protein, 10 aa, Artificial sequence
  Protein classification predicting sequence
KHKELFDELV

SEQ ID NO: 15752 - protein, 8 aa, Artificial sequence
  Protein classification predicting sequence
FTQGRDDT

SEQ ID NO: 15753 - protein, 10 aa, Artificial sequence
  Protein classification predicting sequence
FVGGFLSQLV

SEQ ID NO: 15754 - protein, 22 aa, Artificial sequence
  Protein classification predicting sequence
AHVDAHYYEQNEQPTGTCAACI

SEQ ID NO: 15755 - protein, 33 aa, Artificial sequence
  Protein classification predicting sequence
VMPYVDILFGNETEAATFAREQGFETKDIKEIA

SEQ ID NO: 15756 - protein, 9 aa, Artificial sequence
  Protein classification predicting sequence
DTNGAGDAF

SEQ ID NO: 15757 - protein, 7 aa, Artificial sequence
  Protein classification predicting sequence
MGNPLLD

SEQ ID NO: 15758 - protein, 7 aa, Artificial sequence
  Protein classification predicting sequence
LTVSPES

SEQ ID NO: 15759 - protein, 7 aa, Artificial sequence
  Protein classification predicting sequence
GRGGSDT

SEQ ID NO: 15760 - protein, 7 aa, Artificial sequence
  Protein classification predicting sequence
REMDMLL

SEQ ID NO: 15761 - protein, 7 aa, Artificial sequence
  Protein classification predicting sequence
KFGGTSV

SEQ ID NO: 15762 - protein, 9 aa, Artificial sequence
  Protein classification predicting sequence
TTLGRGGSD

SEQ ID NO: 15763 - protein, 14 aa, Artificial sequence
  Protein classification predicting sequence
KLLGKGTFGKVILV

SEQ ID NO: 15764 - protein, 19 aa, Artificial sequence
  Protein classification predicting sequence
KLLGKGTFGKVILVKEKAT

SEQ ID NO: 15765 - protein, 7 aa, Artificial sequence
  Protein classification predicting sequence
YYAMKIL

SEQ ID NO: 15766 - protein, 34 aa, Artificial sequence
  Protein classification predicting sequence
YYAMKILKKEVIVAKDEVAHTLTENRVLQNSRHP

SEQ ID NO: 15767 - protein, 59 aa, Artificial sequence
  Protein classification predicting sequence
LTALKYSFQTHDRLCFVMEYANGGELFFHLSRERVFSEDRARFYGAEIVSALDYLHSEK

SEQ ID NO: 15768 - protein, 8 aa, Artificial sequence
  Protein classification predicting sequence
LDYLHSEK

SEQ ID NO: 15769 - protein, 14 aa, Artificial sequence
  Protein classification predicting sequence
GLLKKDPKQRLGGG

SEQ ID NO: 15770 - protein, 23 aa, Artificial sequence
  Protein classification predicting sequence
KEGWLHKRGEYIKTWRPRYFLLK

SEQ ID NO: 15771 - protein, 8 aa, Artificial sequence
  Protein classification predicting sequence
PLNNFSVA

SEQ ID NO: 15772 - protein, 14 aa, Artificial sequence
  Protein classification predicting sequence
CQLMKTERPRPNTF

SEQ ID NO: 15773 - protein, 10 aa, Artificial sequence
  Protein classification predicting sequence
PPFKPQVTSE

SEQ ID NO: 15774 - protein, 6 aa, Artificial sequence
  Protein classification predicting sequence
DTRYFD

SEQ ID NO: 15775 - protein, 10 aa, Artificial sequence
  Protein classification predicting sequence
HFPQFSYSAS

SEQ ID NO: 15776 - protein, 17 aa, Artificial sequence
  Protein classification predicting sequence
FQTHDRLCFVMEYANGG

SEQ ID NO: 15777 - protein, 11 aa, Artificial sequence
  Protein classification predicting sequence
LFFHLSRERVF

SEQ ID NO: 15778 - protein, 20 aa, Artificial sequence
  Protein classification predicting sequence
KLENLMLDKDGHIKITDFGL

SEQ ID NO: 15779 - protein, 10 aa, Artificial sequence
  Protein classification predicting sequence
GHIKITDFGL

SEQ ID NO: 15780 - protein, 7 aa, Artificial sequence
  Protein classification predicting sequence
KRGEYIK

SEQ ID NO: 15781 - protein, 9 aa, Artificial sequence
  Protein classification predicting sequence
WRPRYFLLK

SEQ ID NO: 15782 - protein, 9 aa, Artificial sequence
  Protein classification predicting sequence
CQLMKTERP

SEQ ID NO: 15783 - protein, 12 aa, Artificial sequence
  Protein classification predicting sequence
YYAMKILKKEVI

SEQ ID NO: 15784 - protein, 9 aa, Artificial sequence
  Protein classification predicting sequence
DRLCFVMEY

SEQ ID NO: 15785 - protein, 19 aa, Artificial sequence
  Protein classification predicting sequence
NGGELFFHLSRERVFSEDR

SEQ ID NO: 15786 - protein, 9 aa, Artificial sequence
  Protein classification predicting sequence
AKSLLSGLL

SEQ ID NO: 15787 - protein, 21 aa, Artificial sequence
  Protein classification predicting sequence
PNTFIIRCLQWTTVIERTFHV

SEQ ID NO: 15788 - protein, 23 aa, Artificial sequence
  Protein classification predicting sequence
PPFKPQVTSETDTRYFDEEFTAQ

SEQ ID NO: 15789 - protein, 10 aa, Artificial sequence
  Protein classification predicting sequence
TADPRIVPNA

SEQ ID NO: 15790 - protein, 19 aa, Artificial sequence
  Protein classification predicting sequence
TTLGRGGSDTTAVALAAAL

SEQ ID NO: 15791 - protein, 10 aa, Artificial sequence
  Protein classification predicting sequence
ISYDEMLELA

SEQ ID NO: 15792 - protein, 10 aa, Artificial sequence
  Protein classification predicting sequence
VAERIVATKK

SEQ ID NO: 15793 - protein, 24 aa, Artificial sequence
  Protein classification predicting sequence
DMLLTAGERISNALVAMAIESLGA

SEQ ID NO: 15794 - protein, 7 aa, Artificial sequence
  Protein classification predicting sequence
GNDVVVV

SEQ ID NO: 15795 - protein, 14 aa, Artificial sequence
  Protein classification predicting sequence
TTLGRGGSDTTAVA

SEQ ID NO: 15796 - protein, 11 aa, Artificial sequence
  Protein classification predicting sequence
TTLGRGGSDTT

SEQ ID NO: 15797 - protein, 12 aa, Artificial sequence
  Protein classification predicting sequence
TTLGRGGSDTTA

SEQ ID NO: 15798 - protein, 6 aa, Artificial sequence
  Protein classification predicting sequence
CEIYTD

SEQ ID NO: 15799 - protein, 7 aa, Artificial sequence
  Protein classification predicting sequence
GVYTTDP

SEQ ID NO: 15800 - protein, 7 aa, Artificial sequence
  Protein classification predicting sequence
VLHPRAV

SEQ ID NO: 15801 - protein, 10 aa, Artificial sequence
  Protein classification predicting sequence
IAKVSIVGVG

SEQ ID NO: 15802 - protein, 7 aa, Artificial sequence
  Protein classification predicting sequence
YATVYKG

SEQ ID NO: 15803 - protein, 7 aa, Artificial sequence
  Protein classification predicting sequence
LKHANIV

SEQ ID NO: 15804 - protein, 10 aa, Artificial sequence
  Protein classification predicting sequence
PIPQYPLYSA

SEQ ID NO: 15805 - protein, 11 aa, Artificial sequence
  Protein classification predicting sequence
VINPGNPTGQV

SEQ ID NO: 15806 - protein, 9 aa, Artificial sequence
  Protein classification predicting sequence
VVPGSGFGQ

SEQ ID NO: 15807 - protein, 9 aa, Artificial sequence
  Protein classification predicting sequence
STSFTPDED

SEQ ID NO: 15808 - protein, 9 aa, Artificial sequence
  Protein classification predicting sequence
KLIIDWHNL

SEQ ID NO: 15809 - protein, 9 aa, Artificial sequence
  Protein classification predicting sequence
RSPRMQYHA

SEQ ID NO: 15810 - protein, 8 aa, Artificial sequence
  Protein classification predicting sequence
YGQCWVFA

SEQ ID NO: 15811 - protein, 6 aa, Artificial sequence
  Protein classification predicting sequence
WNFHVW

SEQ ID NO: 15812 - protein, 12 aa, Artificial sequence
  Protein classification predicting sequence
GGWQAVDSTPQE

SEQ ID NO: 15813 - protein, 7 aa, Artificial sequence
  Protein classification predicting sequence
PKPGILF

SEQ ID NO: 15814 - protein, 6 aa, Artificial sequence
  Protein classification predicting sequence
FVPIRK

SEQ ID NO: 15815 - protein, 7 aa, Artificial sequence
  Protein classification predicting sequence
RKPGKLP

SEQ ID NO: 15816 - protein, 8 aa, Artificial sequence
  Protein classification predicting sequence
FRDITTLL

SEQ ID NO: 15817 - protein, 7 aa, Artificial sequence
  Protein classification predicting sequence
GFIPVRK

SEQ ID NO: 15818 - protein, 15 aa, Artificial sequence
  Protein classification predicting sequence
VVGPEARGFIIGCPV

SEQ ID NO: 15819 - protein, 8 aa, Artificial sequence
  Protein classification predicting sequence
IREIPDFP

SEQ ID NO: 15820 - protein, 8 aa, Artificial sequence
  Protein classification predicting sequence
VGPEARGF

SEQ ID NO: 15821 - protein, 7 aa, Artificial sequence
  Protein classification predicting sequence
GFVPVRK

SEQ ID NO: 15822 - protein, 9 aa, Artificial sequence
  Protein classification predicting sequence
IVPDYPKEG

SEQ ID NO: 15823 - protein, 8 aa, Artificial sequence
  Protein classification predicting sequence
GKLPREVI

SEQ ID NO: 15824 - protein, 6 aa, Artificial sequence
  Protein classification predicting sequence
GIIFRD

SEQ ID NO: 15825 - protein, 6 aa, Artificial sequence
  Protein classification predicting sequence
IPNYPK

SEQ ID NO: 15826 - protein, 9 aa, Artificial sequence
  Protein classification predicting sequence
DDLIATGGT

SEQ ID NO: 15827 - protein, 9 aa, Artificial sequence
  Protein classification predicting sequence
EAAAIIDLP

SEQ ID NO: 15828 - protein, 11 aa, Artificial sequence
  Protein classification predicting sequence
TVRIAYSLEYG

SEQ ID NO: 15829 - protein, 8 aa, Artificial sequence
  Protein classification predicting sequence
IPDYPKPG

SEQ ID NO: 15830 - protein, 7 aa, Artificial sequence
  Protein classification predicting sequence
DYIAGLD

SEQ ID NO: 15831 - protein, 6 aa, Artificial sequence
  Protein classification predicting sequence
ARGFII

SEQ ID NO: 15832 - protein, 7 aa, Artificial sequence
  Protein classification predicting sequence
FRDITTL

SEQ ID NO: 15833 - protein, 6 aa, Artificial sequence
  Protein classification predicting sequence
YELEYG

SEQ ID NO: 15834 - protein, 13 aa, Artificial sequence
  Protein classification predicting sequence
LEYGNAAVEMHTD

SEQ ID NO: 15835 - protein, 10 aa, Artificial sequence
  Protein classification predicting sequence
EARGFLFGAP

SEQ ID NO: 15836 - protein, 7 aa, Artificial sequence
  Protein classification predicting sequence
FKDITTL

SEQ ID NO: 15837 - protein, 8 aa, Artificial sequence
  Protein classification predicting sequence
HKDAIKPG

SEQ ID NO: 15838 - protein, 7 aa, Artificial sequence
  Protein classification predicting sequence
IKPGQRV

SEQ ID NO: 15839 - protein, 7 aa, Artificial sequence
  Protein classification predicting sequence
FRDISPL

SEQ ID NO: 15840 - protein, 19 aa, Artificial sequence
  Protein classification predicting sequence
AEVVECVSLVELTSLKGRE

SEQ ID NO: 15841 - protein, 8 aa, Artificial sequence
  Protein classification predicting sequence
DDLLATGG

SEQ ID NO: 15842 - protein, 6 aa, Artificial sequence
  Protein classification predicting sequence
GKLPRE

SEQ ID NO: 15843 - protein, 6 aa, Artificial sequence
  Protein classification predicting sequence
DAIKPG

SEQ ID NO: 15844 - protein, 8 aa, Artificial sequence
  Protein classification predicting sequence
KGIVFRDI

SEQ ID NO: 15845 - protein, 9 aa, Artificial sequence
  Protein classification predicting sequence
VGPEARGFI

SEQ ID NO: 15846 - protein, 6 aa, Artificial sequence
  Protein classification predicting sequence
GCPVAY

SEQ ID NO: 15847 - protein, 7 aa, Artificial sequence
  Protein classification predicting sequence
GFAPVRK

SEQ ID NO: 15848 - protein, 7 aa, Artificial sequence
  Protein classification predicting sequence
KNSIKSI

SEQ ID NO: 15849 - protein, 11 aa, Artificial sequence
  Protein classification predicting sequence
DYPKPGILFRD

SEQ ID NO: 15850 - protein, 7 aa, Artificial sequence
  Protein classification predicting sequence
FGAPVAL

SEQ ID NO: 15851 - protein, 17 aa, Artificial sequence
  Protein classification predicting sequence
DAAFIINLFDLGGEQRL

SEQ ID NO: 15852 - protein, 9 aa, Artificial sequence
  Protein classification predicting sequence
DITPLLADP

SEQ ID NO: 15853 - protein, 7 aa, Artificial sequence
  Protein classification predicting sequence
FRDITPL

SEQ ID NO: 15854 - protein, 9 aa, Artificial sequence
  Protein classification predicting sequence
DITPLMNDG

SEQ ID NO: 15855 - protein, 12 aa, Artificial sequence
  Protein classification predicting sequence
DIVVGPEARGFI

SEQ ID NO: 15856 - protein, 23 aa, Artificial sequence
  Protein classification predicting sequence
HKDAIKPGQRVLITDDLLATGGT

SEQ ID NO: 15857 - protein, 9 aa, Artificial sequence
  Protein classification predicting sequence
DDLLATGGT

SEQ ID NO: 15858 - protein, 7 aa, Artificial sequence
  Protein classification predicting sequence
LGGVVAG

SEQ ID NO: 15859 - protein, 7 aa, Artificial sequence
  Protein classification predicting sequence
GIESRGF

SEQ ID NO: 15860 - protein, 7 aa, Artificial sequence
  Protein classification predicting sequence
TKVVGTE

SEQ ID NO: 15861 - protein, 14 aa, Artificial sequence
  Protein classification predicting sequence
VLVVDDLLATGGTI

SEQ ID NO: 15862 - protein, 10 aa, Artificial sequence
  Protein classification predicting sequence
DDLLATGGTI

SEQ ID NO: 15863 - protein, 8 aa, Artificial sequence
  Protein classification predicting sequence
KLIRQLGG

SEQ ID NO: 15864 - protein, 8 aa, Artificial sequence
  Protein classification predicting sequence
AYALGIGF

SEQ ID NO: 15865 - protein, 7 aa, Artificial sequence
  Protein classification predicting sequence
AAFVINL

SEQ ID NO: 15866 - protein, 9 aa, Artificial sequence
  Protein classification predicting sequence
RIRSFPDFP

SEQ ID NO: 15867 - protein, 23 aa, Artificial sequence
  Protein classification predicting sequence
IDYIAGLDSRGFLFGPSLAQELG

SEQ ID NO: 15868 - protein, 15 aa, Artificial sequence
  Protein classification predicting sequence
ECVSLVELTSLKGRE

SEQ ID NO: 15869 - protein, 6 aa, Artificial sequence
  Protein classification predicting sequence
FRDITP

SEQ ID NO: 15870 - protein, 7 aa, Artificial sequence
  Protein classification predicting sequence
LGVGFVP

SEQ ID NO: 15871 - protein, 7 aa, Artificial sequence
  Protein classification predicting sequence
GVVFRDI

SEQ ID NO: 15872 - protein, 11 aa, Artificial sequence
  Protein classification predicting sequence
FRDISPLMADG

SEQ ID NO: 15873 - protein, 6 aa, Artificial sequence
  Protein classification predicting sequence
DTLTMH

SEQ ID NO: 15874 - protein, 7 aa, Artificial sequence
  Protein classification predicting sequence
YDYKVLM

SEQ ID NO: 15875 - protein, 7 aa, Artificial sequence
  Protein classification predicting sequence
GIIFRDI

SEQ ID NO: 15876 - protein, 18 aa, Artificial sequence
  Protein classification predicting sequence
DMIVGPEARGFIVGCPVA

SEQ ID NO: 15877 - protein, 7 aa, Artificial sequence
  Protein classification predicting sequence
RKKGKLP

SEQ ID NO: 15878 - protein, 6 aa, Artificial sequence
  Protein classification predicting sequence
YDLEYG

SEQ ID NO: 15879 - protein, 10 aa, Artificial sequence
  Protein classification predicting sequence
ATDKIVEYAK

SEQ ID NO: 15880 - protein, 24 aa, Artificial sequence
  Protein classification predicting sequence
DAIKPGQRVLITDDLLATGGTIEA

SEQ ID NO: 15881 - protein, 12 aa, Artificial sequence
  Protein classification predicting sequence
VRKPRKLPRETI

SEQ ID NO: 15882 - protein, 7 aa, Artificial sequence
  Protein classification predicting sequence
KLPRETI

SEQ ID NO: 15883 - protein, 7 aa, Artificial sequence
  Protein classification predicting sequence
YLNGIEK

SEQ ID NO: 15884 - protein, 7 aa, Artificial sequence
  Protein classification predicting sequence
LVARRIR

SEQ ID NO: 15885 - protein, 7 aa, Artificial sequence
  Protein classification predicting sequence
GKLPGPT

SEQ ID NO: 15886 - protein, 9 aa, Artificial sequence
  Protein classification predicting sequence
FKDISPLLA

SEQ ID NO: 15887 - protein, 7 aa, Artificial sequence
  Protein classification predicting sequence
GIVFKDI

SEQ ID NO: 15888 - protein, 7 aa, Artificial sequence
  Protein classification predicting sequence
RKEGKLP

SEQ ID NO: 15889 - protein, 9 aa, Artificial sequence
  Protein classification predicting sequence
DDVLATGGT

SEQ ID NO: 15890 - protein, 7 aa, Artificial sequence
  Protein classification predicting sequence
EYSLEYG

SEQ ID NO: 15891 - protein, 6 aa, Artificial sequence
  Protein classification predicting sequence
DSRGFL

SEQ ID NO: 15892 - protein, 7 aa, Artificial sequence
  Protein classification predicting sequence
EYDLEYG

SEQ ID NO: 15893 - protein, 8 aa, Artificial sequence
  Protein classification predicting sequence
RVLLVDDL

SEQ ID NO: 15894 - protein, 7 aa, Artificial sequence
  Protein classification predicting sequence
FKDITPL

SEQ ID NO: 15895 - protein, 17 aa, Artificial sequence
  Protein classification predicting sequence
GCPVSYALEVGFAPVRK

SEQ ID NO: 15896 - protein, 36 aa, Artificial sequence
  Protein classification predicting sequence
VLTIHKDAIKPGQRVLITDDLLATGGTIEATIKLVE

SEQ ID NO: 15897 - protein, 8 aa, Artificial sequence
  Protein classification predicting sequence
VRKPGKLP

SEQ ID NO: 15898 - protein, 13 aa, Artificial sequence
  Protein classification predicting sequence
VGTEARGFLFGAP

SEQ ID NO: 15899 - protein, 12 aa, Artificial sequence
  Protein classification predicting sequence
GTEARGFLFGAP

SEQ ID NO: 15900 - protein, 16 aa, Artificial sequence
  Protein classification predicting sequence
LGVGFVPVRKPGKLPR

SEQ ID NO: 15901 - protein, 9 aa, Artificial sequence
  Protein classification predicting sequence
PVRKPGKLP

SEQ ID NO: 15902 - protein, 10 aa, Artificial sequence
  Protein classification predicting sequence
PVRKPGKLPR

SEQ ID NO: 15903 - protein, 10 aa, Artificial sequence
  Protein classification predicting sequence
VDDLLATGGT

SEQ ID NO: 15904 - protein, 14 aa, Artificial sequence
  Protein classification predicting sequence
VDDLLATGGTIEAT

SEQ ID NO: 15905 - protein, 13 aa, Artificial sequence
  Protein classification predicting sequence
DDLLATGGTIEAT

SEQ ID NO: 15906 - protein, 11 aa, Artificial sequence
  Protein classification predicting sequence
IIDDVLATGGT

SEQ ID NO: 15907 - protein, 6 aa, Artificial sequence
  Protein classification predicting sequence
YSLEYG

SEQ ID NO: 15908 - protein, 10 aa, Artificial sequence
  Protein classification predicting sequence
DDLIATGGTL

SEQ ID NO: 15909 - protein, 12 aa, Artificial sequence
  Protein classification predicting sequence
GFVPIRKKGKLP

SEQ ID NO: 15910 - protein, 19 aa, Artificial sequence
  Protein classification predicting sequence
LEYGKAELEIQKDALEPGQ

SEQ ID NO: 15911 - protein, 9 aa, Artificial sequence
  Protein classification predicting sequence
IDLPDLGGR

SEQ ID NO: 15912 - protein, 11 aa, Artificial sequence
  Protein classification predicting sequence
LGVGFVPVRKP

SEQ ID NO: 15913 - protein, 23 aa, Artificial sequence
  Protein classification predicting sequence
DAAFIINLFDLGGEQRLEKQGIT

SEQ ID NO: 15914 - protein, 8 aa, Artificial sequence
  Protein classification predicting sequence
EARGFILG

SEQ ID NO: 15915 - protein, 16 aa, Artificial sequence
  Protein classification predicting sequence
EARGFILGGAIAHQLS

SEQ ID NO: 15916 - protein, 20 aa, Artificial sequence
  Protein classification predicting sequence
LGGIVVGIAFIIELKYLNGI

SEQ ID NO: 15917 - protein, 22 aa, Artificial sequence
  Protein classification predicting sequence
GVSFKDITTIMDNGEAYGYATD

SEQ ID NO: 15918 - protein, 43 aa, Artificial sequence
  Protein classification predicting sequence
DIVVGPEARGFIIGCPVAYSMGIGFAPVRKEGKLPREVIRYEY

SEQ ID NO: 15919 - protein, 42 aa, Artificial sequence
  Protein classification predicting sequence
LEYGTNVLTMHKDAIKPGQRVLITDDLLATGGTIEAAIKLVE

SEQ ID NO: 15920 - protein, 14 aa, Artificial sequence
  Protein classification predicting sequence
GVLFRDISPLLKDP

SEQ ID NO: 15921 - protein, 28 aa, Artificial sequence
  Protein classification predicting sequence
QLRAEVVECVSLVELTSLKGRERLGPIP

SEQ ID NO: 15922 - protein, 20 aa, Artificial sequence
  Protein classification predicting sequence
GITFRDISPLMADGKAYSYA

SEQ ID NO: 15923 - protein, 11 aa, Artificial sequence
  Protein classification predicting sequence
REIVQYATDKK

SEQ ID NO: 15924 - protein, 33 aa, Artificial sequence
  Protein classification predicting sequence
MHADAIKPGQRVLIVDDLLATGGTVKATIEMIE

SEQ ID NO: 15925 - protein, 9 aa, Artificial sequence
  Protein classification predicting sequence
IELEGLNGR

SEQ ID NO: 15926 - protein, 6 aa, Artificial sequence
  Protein classification predicting sequence
YALEYG

SEQ ID NO: 15927 - protein, 6 aa, Artificial sequence
  Protein classification predicting sequence
AFIIEL

SEQ ID NO: 15928 - protein, 6 aa, Artificial sequence
  Protein classification predicting sequence
FKDITP

SEQ ID NO: 15929 - protein, 11 aa, Artificial sequence
  Protein classification predicting sequence
IVDDLLATGGT

SEQ ID NO: 15930 - protein, 10 aa, Artificial sequence
  Protein classification predicting sequence
SIKSIPDYPK

SEQ ID NO: 15931 - protein, 20 aa, Artificial sequence
  Protein classification predicting sequence
GDKVLVVDDLLATGGTIEAT

SEQ ID NO: 15932 - protein, 7 aa, Artificial sequence
  Protein classification predicting sequence
FRDVTSL

SEQ ID NO: 15933 - protein, 32 aa, Artificial sequence
  Protein classification predicting sequence
DTLEIHTDAIVEGDKVLVVDDLLATGGTIEAT

SEQ ID NO: 15934 - protein, 9 aa, Artificial sequence
  Protein classification predicting sequence
LIKSSIKSI

SEQ ID NO: 15935 - protein, 24 aa, Artificial sequence
  Protein classification predicting sequence
SIKSIQDYPKPGILFRDVTSLLED

SEQ ID NO: 15936 - protein, 21 aa, Artificial sequence
  Protein classification predicting sequence
LGVGFVPVRKPGKLPRETISE

SEQ ID NO: 15937 - protein, 8 aa, Artificial sequence
  Protein classification predicting sequence
DTLEIHTD

SEQ ID NO: 15938 - protein, 7 aa, Artificial sequence
  Protein classification predicting sequence
AAFIINL

SEQ ID NO: 15939 - protein, 7 aa, Artificial sequence
  Protein classification predicting sequence
VKLWKHH

SEQ ID NO: 15940 - protein, 47 aa, Artificial sequence
  Protein classification predicting sequence
GQFCDAPNNQFRHHPRDYIESMEAALKTVLAELSVEQRAAVVGIGVD

SEQ ID NO: 15941 - protein, 75 aa, Artificial sequence
  Protein classification predicting sequence
TGSTPAPIDADGNVLALRPEFAENPNAMFVLWKDHTAVEEAEEITRLCHAPGNVDYSRYIGGIYSSEWFWAKILH

SEQ ID NO: 15942 - protein, 33 aa, Artificial sequence
  Protein classification predicting sequence
EQAQRFEQLYRRYQQWAMSAEQHYLPTSAPAQA

SEQ ID NO: 15943 - protein, 17 aa, Artificial sequence
  Protein classification predicting sequence
IGLDFGSDSVRALAVDC

SEQ ID NO: 15944 - protein, 15 aa, Artificial sequence
  Protein classification predicting sequence
GIGVDSTGSTPAPID

SEQ ID NO: 15945 - protein, 16 aa, Artificial sequence
  Protein classification predicting sequence
SWIELCDWVPALLSGT

SEQ ID NO: 15946 - protein, 9 aa, Artificial sequence
  Protein classification predicting sequence
PLFTDTWTA

SEQ ID NO: 15947 - protein, 7 aa, Artificial sequence
  Protein classification predicting sequence
GGAFDCH

SEQ ID NO: 15948 - protein, 7 aa, Artificial sequence
  Protein classification predicting sequence
VGAGAQP

SEQ ID NO: 15949 - protein, 16 aa, Artificial sequence
  Protein classification predicting sequence
LVKVIGTSTCDILIAD

SEQ ID NO: 15950 - protein, 12 aa, Artificial sequence
  Protein classification predicting sequence
GICGQVDGSVVP

SEQ ID NO: 15951 - protein, 11 aa, Artificial sequence
  Protein classification predicting sequence
VLDWFNGRRTP

SEQ ID NO: 15952 - protein, 15 aa, Artificial sequence
  Protein classification predicting sequence
IAATAFGARAIMECF

SEQ ID NO: 15953 - protein, 8 aa, Artificial sequence
  Protein classification predicting sequence
ALGGIARK

SEQ ID NO: 15954 - protein, 25 aa, Artificial sequence
  Protein classification predicting sequence
NRPLQIVASDQCCALGAAIFAAVAA

SEQ ID NO: 15955 - protein, 9 aa, Artificial sequence
  Protein classification predicting sequence
EIATSVEWY

SEQ ID NO: 15956 - protein, 12 aa, Artificial sequence
  Protein classification predicting sequence
PNNQFRHHPRDY

SEQ ID NO: 15957 - protein, 7 aa, Artificial sequence
  Protein classification predicting sequence
EITRLCH

SEQ ID NO: 15958 - protein, 32 aa, Artificial sequence
  Protein classification predicting sequence
VDYSRYIGGIYSSEWFWAKILHVTRQDSAVAQ

SEQ ID NO: 15959 - protein, 20 aa, Artificial sequence
  Protein classification predicting sequence
LWHESWGGLPPASFFDELDP

SEQ ID NO: 15960 - protein, 18 aa, Artificial sequence
  Protein classification predicting sequence
FIGLEAGQSAFGDIYAWF

SEQ ID NO: 15961 - protein, 14 aa, Artificial sequence
  Protein classification predicting sequence
WPLEQLAAQHPELK

SEQ ID NO: 15962 - protein, 8 aa, Artificial sequence
  Protein classification predicting sequence
TAFGARAI

SEQ ID NO: 15963 - protein, 23 aa, Artificial sequence
  Protein classification predicting sequence
QGIAVNNVMALGGIARKNQVIMQ

SEQ ID NO: 15964 - protein, 6 aa, Artificial sequence
  Protein classification predicting sequence
VIMQVC

SEQ ID NO: 15965 - protein, 9 aa, Artificial sequence
  Protein classification predicting sequence
LYRRYQQWA

SEQ ID NO: 15966 - protein, 9 aa, Artificial sequence
  Protein classification predicting sequence
SAEQHYLPT

SEQ ID NO: 15967 - protein, 13 aa, Artificial sequence
  Protein classification predicting sequence
EIATSVEWYPRWQ

SEQ ID NO: 15968 - protein, 32 aa, Artificial sequence
  Protein classification predicting sequence
SWIELCDWVPALLSGTTRPQDIRRGRCSAGHK

SEQ ID NO: 15969 - protein, 26 aa, Artificial sequence
  Protein classification predicting sequence
LPESVVISGGAFDCHMGAVGAGAQPN

SEQ ID NO: 15970 - protein, 21 aa, Artificial sequence
  Protein classification predicting sequence
LVKVIGTSTCDILIADKQSVG

SEQ ID NO: 15971 - protein, 7 aa, Artificial sequence
  Protein classification predicting sequence
GTASGRV

SEQ ID NO: 15972 - protein, 9 aa, Artificial sequence
  Protein classification predicting sequence
DFTSSTIIF

SEQ ID NO: 15973 - protein, 14 aa, Artificial sequence
  Protein classification predicting sequence
NPHAYVKLWKHHGA

SEQ ID NO: 15974 - protein, 7 aa, Artificial sequence
  Protein classification predicting sequence
YIMEAGD

SEQ ID NO: 15975 - protein, 9 aa, Artificial sequence
  Protein classification predicting sequence
VSPFIIDAH

SEQ ID NO: 15976 - protein, 5 aa, Artificial sequence
  Protein classification predicting sequence
GTSTC

SEQ ID NO: 15977 - protein, 9 aa, Artificial sequence
  Protein classification predicting sequence
GTSTCHLML

SEQ ID NO: 15978 - protein, 8 aa, Artificial sequence
  Protein classification predicting sequence
AVGDLFEY

SEQ ID NO: 15979 - protein, 8 aa, Artificial sequence
  Protein classification predicting sequence
IYANVLNK

SEQ ID NO: 15980 - protein, 13 aa, Artificial sequence
  Protein classification predicting sequence
IGLDFGSDSVRAL

SEQ ID NO: 15981 - protein, 6 aa, Artificial sequence
  Protein classification predicting sequence
QFRHHP

SEQ ID NO: 15982 - protein, 9 aa, Artificial sequence
  Protein classification predicting sequence
TGSTPAPID

SEQ ID NO: 15983 - protein, 13 aa, Artificial sequence
  Protein classification predicting sequence
NPNAMFVLWKDHT

SEQ ID NO: 15984 - protein, 9 aa, Artificial sequence
  Protein classification predicting sequence
YSSEWFWAK

SEQ ID NO: 15985 - protein, 9 aa, Artificial sequence
  Protein classification predicting sequence
WHESWGGLP

SEQ ID NO: 15986 - protein, 12 aa, Artificial sequence
  Protein classification predicting sequence
FDCHMGAVGAGA

SEQ ID NO: 15987 - protein, 13 aa, Artificial sequence
  Protein classification predicting sequence
LVKVIGTSTCDIL

SEQ ID NO: 15988 - protein, 6 aa, Artificial sequence
  Protein classification predicting sequence
NGRRTP

SEQ ID NO: 15989 - protein, 17 aa, Artificial sequence
  Protein classification predicting sequence
SDQCCALGAAIFAAVAA

SEQ ID NO: 15990 - protein, 10 aa, Artificial sequence
  Protein classification predicting sequence
GLDFGSDSVR

SEQ ID NO: 15991 - protein, 18 aa, Artificial sequence
  Protein classification predicting sequence
SGGAFDCHMGAVGAGAQP

SEQ ID NO: 15992 - protein, 35 aa, Artificial sequence
  Protein classification predicting sequence
NPSLDHLPVVLDWFNGRRTPNANQRLKGVITDLNL

SEQ ID NO: 15993 - protein, 9 aa, Artificial sequence
  Protein classification predicting sequence
LPNKQRTVV

SEQ ID NO: 15994 - protein, 14 aa, Artificial sequence
  Protein classification predicting sequence
RSTSTPNVHMVSTT

SEQ ID NO: 15995 - protein, 6 aa, Artificial sequence
  Protein classification predicting sequence
GTGSFG

SEQ ID NO: 15996 - protein, 8 aa, Artificial sequence
  Protein classification predicting sequence
WHGDVAVK

SEQ ID NO: 15997 - protein, 15 aa, Artificial sequence
  Protein classification predicting sequence
VLRKTRHVNILLFMG

SEQ ID NO: 15998 - protein, 14 aa, Artificial sequence
  Protein classification predicting sequence
TQWCEGSSLYHHLH

SEQ ID NO: 15999 - protein, 11 aa, Artificial sequence
  Protein classification predicting sequence
NPYSFQSDVYA

SEQ ID NO: 16000 - protein, 8 aa, Artificial sequence
  Protein classification predicting sequence
VLYELMTG

SEQ ID NO: 16001 - protein, 12 aa, Artificial sequence
  Protein classification predicting sequence
RDQIIFMVGRGY

SEQ ID NO: 16002 - protein, 19 aa, Artificial sequence
  Protein classification predicting sequence
RDQIIFMVGRGYLSPDLSK

SEQ ID NO: 16003 - protein, 6 aa, Artificial sequence
  Protein classification predicting sequence
NCPKAM

SEQ ID NO: 16004 - protein, 23 aa, Artificial sequence
  Protein classification predicting sequence
RSREIFDSYIMKELLACSHPFSK

SEQ ID NO: 16005 - protein, 49 aa, Artificial sequence
  Protein classification predicting sequence
LQCDSDPELVQWKKELRDAYREAQQLVQRVPKMKNKPRSPVVELSKVPL

SEQ ID NO: 16006 - protein, 29 aa, Artificial sequence
  Protein classification predicting sequence
LSFILDLMNGGDLHYHLSQHGVFSEADMR

SEQ ID NO: 16007 - protein, 7 aa, Artificial sequence
  Protein classification predicting sequence
CSHPFSK

SEQ ID NO: 16008 - protein, 10 aa, Artificial sequence
  Protein classification predicting sequence
LFQPYIEEIC

SEQ ID NO: 16009 - protein, 9 aa, Artificial sequence
  Protein classification predicting sequence
YAFHTPDKL

SEQ ID NO: 16010 - protein, 11 aa, Artificial sequence
  Protein classification predicting sequence
SLLEGLLQRDV

SEQ ID NO: 16011 - protein, 7 aa, Artificial sequence
  Protein classification predicting sequence
QSLLTME

SEQ ID NO: 16012 - protein, 8 aa, Artificial sequence
  Protein classification predicting sequence
SVEETQIK

SEQ ID NO: 16013 - protein, 9 aa, Artificial sequence
  Protein classification predicting sequence
GGKQFVLQC

SEQ ID NO: 16014 - protein, 23 aa, Artificial sequence
  Protein classification predicting sequence
ESDKFTRFCQWKNVELNIHLTMN

SEQ ID NO: 16015 - protein, 8 aa, Artificial sequence
  Protein classification predicting sequence
EIILGLEH

SEQ ID NO: 16016 - protein, 22 aa, Artificial sequence
  Protein classification predicting sequence
HNRFVVYRDLKPANILLDEHGH

SEQ ID NO: 16017 - protein, 11 aa, Artificial sequence
  Protein classification predicting sequence
LPEPSIRSVMQ

SEQ ID NO: 16018 - protein, 17 aa, Artificial sequence
  Protein classification predicting sequence
KFTRFCQWKNVELNIHL

SEQ ID NO: 16019 - protein, 30 aa, Artificial sequence
  Protein classification predicting sequence
KMKQGETLALNERIMLSLVSTGDCPFIVCM

SEQ ID NO: 16020 - protein, 10 aa, Artificial sequence
  Protein classification predicting sequence
FILDLMNGGD

SEQ ID NO: 16021 - protein, 12 aa, Artificial sequence
  Protein classification predicting sequence
HYHLSQHGVFSE

SEQ ID NO: 16022 - protein, 16 aa, Artificial sequence
  Protein classification predicting sequence
FVVYRDLKPANILLDE

SEQ ID NO: 16023 - protein, 41 aa, Artificial sequence
  Protein classification predicting sequence
YDSSADWFSLGCMLFKLLRGHSPFRQHKTKDKHEIDRMTLT

SEQ ID NO: 16024 - protein, 17 aa, Artificial sequence
  Protein classification predicting sequence
FSPELRSLLEGLLQRDV

SEQ ID NO: 16025 - protein, 9 aa, Artificial sequence
  Protein classification predicting sequence
ISERWQQEV

SEQ ID NO: 16026 - protein, 11 aa, Artificial sequence
  Protein classification predicting sequence
EARKKAKNKQL

SEQ ID NO: 16027 - protein, 10 aa, Artificial sequence
  Protein classification predicting sequence
GKDCIMHGYM

SEQ ID NO: 16028 - protein, 8 aa, Artificial sequence
  Protein classification predicting sequence
VVALGGNA

SEQ ID NO: 16029 - protein, 6 aa, Artificial sequence
  Protein classification predicting sequence
ALGGNA

SEQ ID NO: 16030 - protein, 9 aa, Artificial sequence
  Protein classification predicting sequence
GVEAVIDKD

SEQ ID NO: 16031 - protein, 11 aa, Artificial sequence
  Protein classification predicting sequence
KPIGPFYTKEE

SEQ ID NO: 16032 - protein, 10 aa, Artificial sequence
  Protein classification predicting sequence
GSMLPKIEAA

SEQ ID NO: 16033 - protein, 7 aa, Artificial sequence
  Protein classification predicting sequence
ALGGNAI

SEQ ID NO: 16034 - protein, 9 aa, Artificial sequence
  Protein classification predicting sequence
ALGGNAIQT

SEQ ID NO: 16035 - protein, 9 aa, Artificial sequence
  Protein classification predicting sequence
VFKEDAGRG

SEQ ID NO: 16036 - protein, 7 aa, Artificial sequence
  Protein classification predicting sequence
GGGGVPV

SEQ ID NO: 16037 - protein, 6 aa, Artificial sequence
  Protein classification predicting sequence
GSMLPK

SEQ ID NO: 16038 - protein, 7 aa, Artificial sequence
  Protein classification predicting sequence
NPTKPIG

SEQ ID NO: 16039 - protein, 7 aa, Artificial sequence
  Protein classification predicting sequence
RRVVASP

SEQ ID NO: 16040 - protein, 7 aa, Artificial sequence
  Protein classification predicting sequence
GGGGIPV

SEQ ID NO: 16041 - protein, 13 aa, Artificial sequence
  Protein classification predicting sequence
HGNGPQVGLLALQ

SEQ ID NO: 16042 - protein, 7 aa, Artificial sequence
  Protein classification predicting sequence
GSMGPKV

SEQ ID NO: 16043 - protein, 7 aa, Artificial sequence
  Protein classification predicting sequence
PAMPLDT

SEQ ID NO: 16044 - protein, 11 aa, Artificial sequence
  Protein classification predicting sequence
VAMTQGSIGYW

SEQ ID NO: 16045 - protein, 8 aa, Artificial sequence
  Protein classification predicting sequence
EDAGRGYR

SEQ ID NO: 16046 - protein, 7 aa, Artificial sequence
  Protein classification predicting sequence
EAVIDKD

SEQ ID NO: 16047 - protein, 14 aa, Artificial sequence
  Protein classification predicting sequence
EAVIDKDFASEKLA

SEQ ID NO: 16048 - protein, 7 aa, Artificial sequence
  Protein classification predicting sequence
RRVVPSP

SEQ ID NO: 16049 - protein, 8 aa, Artificial sequence
  Protein classification predicting sequence
HGNGPQVG

SEQ ID NO: 16050 - protein, 6 aa, Artificial sequence
  Protein classification predicting sequence
FQNPTK

SEQ ID NO: 16051 - protein, 6 aa, Artificial sequence
  Protein classification predicting sequence
HGNGPQ

SEQ ID NO: 16052 - protein, 66 aa, Artificial sequence
  Protein classification predicting sequence
LLIQQAKSNSDTTPAMPLDTCGAMSQGMIGYWLETEINRILTEMNSDRTVGTIVTRVEVDKDDPRF

SEQ ID NO: 16053 - protein, 23 aa, Artificial sequence
  Protein classification predicting sequence
NPTKPIGPFYTKEEVEELQKEQP

SEQ ID NO: 16054 - protein, 12 aa, Artificial sequence
  Protein classification predicting sequence
EATAEAQQTAIR

SEQ ID NO: 16055 - protein, 9 aa, Artificial sequence
  Protein classification predicting sequence
FNNPTKPIG

SEQ ID NO: 16056 - protein, 6 aa, Artificial sequence
  Protein classification predicting sequence
GGGGIP

SEQ ID NO: 16057 - protein, 14 aa, Artificial sequence
  Protein classification predicting sequence
EAVIDKDLAAALLA

SEQ ID NO: 16058 - protein, 8 aa, Artificial sequence
  Protein classification predicting sequence
AFYNGYLW

SEQ ID NO: 16059 - protein, 13 aa, Artificial sequence
  Protein classification predicting sequence
VHKFLLRHVYHSS

SEQ ID NO: 16060 - protein, 10 aa, Artificial sequence
  Protein classification predicting sequence
GFRHSVPYIN

SEQ ID NO: 16061 - protein, 7 aa, Artificial sequence
  Protein classification predicting sequence
PYINAHR

SEQ ID NO: 16062 - protein, 7 aa, Artificial sequence
  Protein classification predicting sequence
NTPLQGA

SEQ ID NO: 16063 - protein, 8 aa, Artificial sequence
  Protein classification predicting sequence
VVSGNFII

SEQ ID NO: 16064 - protein, 10 aa, Artificial sequence
  Protein classification predicting sequence
LKAEKMIGFC

SEQ ID NO: 16065 - protein, 7 aa, Artificial sequence
  Protein classification predicting sequence
RSHLISY

SEQ ID NO: 16066 - protein, 7 aa, Artificial sequence
  Protein classification predicting sequence
AVHPDYR

SEQ ID NO: 16067 - protein, 13 aa, Artificial sequence
  Protein classification predicting sequence
LPESKKKMYNYQR

SEQ ID NO: 16068 - protein, 12 aa, Artificial sequence
  Protein classification predicting sequence
DYCHSGRIRRID

SEQ ID NO: 16069 - protein, 7 aa, Artificial sequence
  Protein classification predicting sequence
KTFVIML

SEQ ID NO: 16070 - protein, 7 aa, Artificial sequence
  Protein classification predicting sequence
RSREQLE

SEQ ID NO: 16071 - protein, 6 aa, Artificial sequence
  Protein classification predicting sequence
EMACVA

SEQ ID NO: 16072 - protein, 7 aa, Artificial sequence
  Protein classification predicting sequence
WFQERGF

SEQ ID NO: 16073 - protein, 8 aa, Artificial sequence
  Protein classification predicting sequence
PLEEQGIL

SEQ ID NO: 16074 - protein, 9 aa, Artificial sequence
  Protein classification predicting sequence
FRQSTPYVN

SEQ ID NO: 16075 - protein, 7 aa, Artificial sequence
  Protein classification predicting sequence
LELVKQA

SEQ ID NO: 16076 - protein, 14 aa, Artificial sequence
  Protein classification predicting sequence
LELIRPLEQQGILV

SEQ ID NO: 16077 - protein, 15 aa, Artificial sequence
  Protein classification predicting sequence
TELVEGFRHSVPYIN

SEQ ID NO: 16078 - protein, 11 aa, Artificial sequence
  Protein classification predicting sequence
LQLDITARLSM

SEQ ID NO: 16079 - protein, 14 aa, Artificial sequence
  Protein classification predicting sequence
GPVAVSVTGESFNL

SEQ ID NO: 16080 - protein, 8 aa, Artificial sequence
  Protein classification predicting sequence
ATQLAIKL

SEQ ID NO: 16081 - protein, 26 aa, Artificial sequence
  Protein classification predicting sequence
LLQELFSRDGIGTQIVMESAEQIRRA

SEQ ID NO: 16082 - protein, 7 aa, Artificial sequence
  Protein classification predicting sequence
ACLAVNP

SEQ ID NO: 16083 - protein, 13 aa, Artificial sequence
  Protein classification predicting sequence
RLVLVHGSRPQIE

SEQ ID NO: 16084 - protein, 7 aa, Artificial sequence
  Protein classification predicting sequence
RSHIVSY

SEQ ID NO: 16085 - protein, 14 aa, Artificial sequence
  Protein classification predicting sequence
PLEEQGILVRRSRE

SEQ ID NO: 16086 - protein, 18 aa, Artificial sequence
  Protein classification predicting sequence
TLFVLTTRTAHWFRERGF

SEQ ID NO: 16087 - protein, 26 aa, Artificial sequence
  Protein classification predicting sequence
GELACLAVNPEYRHGGRGDELLERIE

SEQ ID NO: 16088 - protein, 9 aa, Artificial sequence
  Protein classification predicting sequence
VLVHGSRPQ

SEQ ID NO: 16089 - protein, 8 aa, Artificial sequence
  Protein classification predicting sequence
IVLLSPLG

SEQ ID NO: 16090 - protein, 6 aa, Artificial sequence
  Protein classification predicting sequence
CAALYP

SEQ ID NO: 16091 - protein, 30 aa, Artificial sequence
  Protein classification predicting sequence
LQLDITARLSMSLNNTPLQGAHINVVSGNF

SEQ ID NO: 16092 - protein, 13 aa, Artificial sequence
  Protein classification predicting sequence
SELFPNEAQARVE

SEQ ID NO: 16093 - protein, 37 aa, Artificial sequence
  Protein classification predicting sequence
KERKTELVEGFRHSVPYINTHRGKTFVIMLGGEAIEH

SEQ ID NO: 16094 - protein, 33 aa, Artificial sequence
  Protein classification predicting sequence
DIGLLHSLGIRLVVVYGARPQIDANLAAHHHEP

SEQ ID NO: 16095 - protein, 9 aa, Artificial sequence
  Protein classification predicting sequence
LELVKQAAG

SEQ ID NO: 16096 - protein, 30 aa, Artificial sequence
  Protein classification predicting sequence
GAIVLMGPVAVSVTGESFNLTSEEIATQLA

SEQ ID NO: 16097 - protein, 28 aa, Artificial sequence
  Protein classification predicting sequence
EEKIGEMACVAVHPDYRSSSRGEVLLER

SEQ ID NO: 16098 - protein, 7 aa, Artificial sequence
  Protein classification predicting sequence
NAHRGKT

SEQ ID NO: 16099 - protein, 7 aa, Artificial sequence
  Protein classification predicting sequence
HRGKTFV

SEQ ID NO: 16100 - protein, 8 aa, Artificial sequence
  Protein classification predicting sequence
IAQPLGVD

SEQ ID NO: 16101 - protein, 12 aa, Artificial sequence
  Protein classification predicting sequence
ATQVAIKLKADK

SEQ ID NO: 16102 - protein, 7 aa, Artificial sequence
  Protein classification predicting sequence
GIGTQIV

SEQ ID NO: 16103 - protein, 9 aa, Artificial sequence
  Protein classification predicting sequence
LTTRSIHWF

SEQ ID NO: 16104 - protein, 7 aa, Artificial sequence
  Protein classification predicting sequence
MLGGEAI

SEQ ID NO: 16105 - protein, 6 aa, Artificial sequence
  Protein classification predicting sequence
GARPQI

SEQ ID NO: 16106 - protein, 9 aa, Artificial sequence
  Protein classification predicting sequence
VMQAAGQLQ

SEQ ID NO: 16107 - protein, 7 aa, Artificial sequence
  Protein classification predicting sequence
NVVSGNF

SEQ ID NO: 16108 - protein, 11 aa, Artificial sequence
  Protein classification predicting sequence
ACRAGVPRSHL

SEQ ID NO: 16109 - protein, 8 aa, Artificial sequence
  Protein classification predicting sequence
VIMLGGEA

SEQ ID NO: 16110 - protein, 9 aa, Artificial sequence
  Protein classification predicting sequence
LSMSLNNTP

SEQ ID NO: 16111 - protein, 40 aa, Artificial sequence
  Protein classification predicting sequence
MLGGEAIEHENFSSIVNDIGLLHSLGIRLVVVYGARPQID

SEQ ID NO: 16112 - protein, 7 aa, Artificial sequence
  Protein classification predicting sequence
AIHRQLD

SEQ ID NO: 16113 - protein, 10 aa, Artificial sequence
  Protein classification predicting sequence
RQLDNGAIVL

SEQ ID NO: 16114 - protein, 24 aa, Artificial sequence
  Protein classification predicting sequence
GDYNSGTVRFLRGAVKACRSGVRR

SEQ ID NO: 16115 - protein, 8 aa, Artificial sequence
  Protein classification predicting sequence
SYQEDGAL

SEQ ID NO: 16116 - protein, 10 aa, Artificial sequence
  Protein classification predicting sequence
DGALIQELFS

SEQ ID NO: 16117 - protein, 20 aa, Artificial sequence
  Protein classification predicting sequence
QELFSRDGIGTQIVMESAEQ

SEQ ID NO: 16118 - protein, 42 aa, Artificial sequence
  Protein classification predicting sequence
RRATINDIGGILELIRPLEQQGILVRRSREQLEMEIDKFTII

SEQ ID NO: 16119 - protein, 20 aa, Artificial sequence
  Protein classification predicting sequence
IGEMACVAVHPDYRSSSRGE

SEQ ID NO: 16120 - protein, 9 aa, Artificial sequence
  Protein classification predicting sequence
HIVDGRVPH

SEQ ID NO: 16121 - protein, 6 aa, Artificial sequence
  Protein classification predicting sequence
DGRVPH

SEQ ID NO: 16122 - protein, 7 aa, Artificial sequence
  Protein classification predicting sequence
LLEIFTD

SEQ ID NO: 16123 - protein, 7 aa, Artificial sequence
  Protein classification predicting sequence
TYNINAD

SEQ ID NO: 16124 - protein, 8 aa, Artificial sequence
  Protein classification predicting sequence
DGTISGGM

SEQ ID NO: 16125 - protein, 8 aa, Artificial sequence
  Protein classification predicting sequence
VHGGGPQI

SEQ ID NO: 16126 - protein, 7 aa, Artificial sequence
  Protein classification predicting sequence
DGLRVTP

SEQ ID NO: 16127 - protein, 7 aa, Artificial sequence
  Protein classification predicting sequence
QLNDVFF

SEQ ID NO: 16128 - protein, 9 aa, Artificial sequence
  Protein classification predicting sequence
AVGCSGCDG

SEQ ID NO: 16129 - protein, 9 aa, Artificial sequence
  Protein classification predicting sequence
ASLKMGVQK

SEQ ID NO: 16130 - protein, 6 aa, Artificial sequence
  Protein classification predicting sequence
VHGGGP

SEQ ID NO: 16131 - protein, 7 aa, Artificial sequence
  Protein classification predicting sequence
NADTVAG

SEQ ID NO: 16132 - protein, 7 aa, Artificial sequence
  Protein classification predicting sequence
GKTVVIK

SEQ ID NO: 16133 - protein, 11 aa, Artificial sequence
  Protein classification predicting sequence
PVVVHGGGPQI

SEQ ID NO: 16134 - protein, 8 aa, Artificial sequence
  Protein classification predicting sequence
KTVIDPDS

SEQ ID NO: 16135 - protein, 9 aa, Artificial sequence
  Protein classification predicting sequence
APVAPGRDG

SEQ ID NO: 16136 - protein, 9 aa, Artificial sequence
  Protein classification predicting sequence
VVKYGGNAM

SEQ ID NO: 16137 - protein, 7 aa, Artificial sequence
  Protein classification predicting sequence
AHVIDGR

SEQ ID NO: 16138 - protein, 6 aa, Artificial sequence
  Protein classification predicting sequence
KKNGLR

SEQ ID NO: 16139 - protein, 18 aa, Artificial sequence
  Protein classification predicting sequence
IITGALAGTANKTLLAWA

SEQ ID NO: 16140 - protein, 7 aa, Artificial sequence
  Protein classification predicting sequence
LMNVNAD

SEQ ID NO: 16141 - protein, 8 aa, Artificial sequence
  Protein classification predicting sequence
RPVDIASW

SEQ ID NO: 16142 - protein, 10 aa, Artificial sequence
  Protein classification predicting sequence
PAVVKALQDD

SEQ ID NO: 16143 - protein, 8 aa, Artificial sequence
  Protein classification predicting sequence
SVHIVDGR

SEQ ID NO: 16144 - protein, 8 aa, Artificial sequence
  Protein classification predicting sequence
PIIVHGGG

SEQ ID NO: 16145 - protein, 8 aa, Artificial sequence
  Protein classification predicting sequence
FTDEGIGT

SEQ ID NO: 16146 - protein, 7 aa, Artificial sequence
  Protein classification predicting sequence
EALPYIR

SEQ ID NO: 16147 - protein, 9 aa, Artificial sequence
  Protein classification predicting sequence
DVVLLKLVG

SEQ ID NO: 16148 - protein, 7 aa, Artificial sequence
  Protein classification predicting sequence
QGMRVTD

SEQ ID NO: 16149 - protein, 9 aa, Artificial sequence
  Protein classification predicting sequence
AVGLTGKDG

SEQ ID NO: 16150 - protein, 10 aa, Artificial sequence
  Protein classification predicting sequence
MTNTPGVLDK

SEQ ID NO: 16151 - protein, 20 aa, Artificial sequence
  Protein classification predicting sequence
IDELFADGTISGGMLPKISS

SEQ ID NO: 16152 - protein, 7 aa, Artificial sequence
  Protein classification predicting sequence
PVIAPIG

SEQ ID NO: 16153 - protein, 6 aa, Artificial sequence
  Protein classification predicting sequence
YNINAD

SEQ ID NO: 16154 - protein, 8 aa, Artificial sequence
  Protein classification predicting sequence
FKGGFRVT

SEQ ID NO: 16155 - protein, 7 aa, Artificial sequence
  Protein classification predicting sequence
GLCGKDG

SEQ ID NO: 16156 - protein, 7 aa, Artificial sequence
  Protein classification predicting sequence
KYGGHAM

SEQ ID NO: 16157 - protein, 114 aa, Artificial sequence
  Protein classification predicting sequence
LVIVHGGGCVVDELMKGLNLPVKKKNGLRVTPADQIDIITGALAGTANKTLLAWAKKHQIAAVGLFLGDGDSVKVTQLDEELGHVGLAQPGSPKLINSLLENGYLPVVSSIGVT

SEQ ID NO: 16158 - protein, 13 aa, Artificial sequence
  Protein classification predicting sequence
HQRPLVIVHGGGC

SEQ ID NO: 16159 - protein, 6 aa, Artificial sequence
  Protein classification predicting sequence
ANKTLL

SEQ ID NO: 16160 - protein, 8 aa, Artificial sequence
  Protein classification predicting sequence
INAVGLCL

SEQ ID NO: 16161 - protein, 28 aa, Artificial sequence
  Protein classification predicting sequence
TLGADLILLSDVSGILDGKGQRIAEMTA

SEQ ID NO: 16162 - protein, 7 aa, Artificial sequence
  Protein classification predicting sequence
GGMIPKV

SEQ ID NO: 16163 - protein, 11 aa, Artificial sequence
  Protein classification predicting sequence
GGMIPKVTCCV

SEQ ID NO: 16164 - protein, 6 aa, Artificial sequence
  Protein classification predicting sequence
VVKYGG

SEQ ID NO: 16165 - protein, 9 aa, Artificial sequence
  Protein classification predicting sequence
PVVVHGGGP

SEQ ID NO: 16166 - protein, 7 aa, Artificial sequence
  Protein classification predicting sequence
KYGGSAM

SEQ ID NO: 16167 - protein, 7 aa, Artificial sequence
  Protein classification predicting sequence
AHIIDGR

SEQ ID NO: 16168 - protein, 7 aa, Artificial sequence
  Protein classification predicting sequence
KYGGNAM

SEQ ID NO: 16169 - protein, 11 aa, Artificial sequence
  Protein classification predicting sequence
DGRVPHALLLE

SEQ ID NO: 16170 - protein, 6 aa, Artificial sequence
  Protein classification predicting sequence
EALPYI

SEQ ID NO: 16171 - protein, 9 aa, Artificial sequence
  Protein classification predicting sequence
ITDGMIVKV

SEQ ID NO: 16172 - protein, 16 aa, Artificial sequence
  Protein classification predicting sequence
VGINPVVVHGGGPQIG

SEQ ID NO: 16173 - protein, 8 aa, Artificial sequence
  Protein classification predicting sequence
ISGGMIPK

SEQ ID NO: 16174 - protein, 38 aa, Artificial sequence
  Protein classification predicting sequence
LRRAFAADMAFLRNCGIHPVVVHGGGPQITAMLRRLGI

SEQ ID NO: 16175 - protein, 53 aa, Artificial sequence
  Protein classification predicting sequence
DFKGGFRVTTPEVLDVARMVLFGQVGRELVNLINAHGPYAVGITGEDAQLFTA

SEQ ID NO: 16176 - protein, 11 aa, Artificial sequence
  Protein classification predicting sequence
RIPVVSTLAPD

SEQ ID NO: 16177 - protein, 9 aa, Artificial sequence
  Protein classification predicting sequence
AEKLLMMTN

SEQ ID NO: 16178 - protein, 7 aa, Artificial sequence
  Protein classification predicting sequence
GGMLPKI

SEQ ID NO: 16179 - protein, 6 aa, Artificial sequence
  Protein classification predicting sequence
HIIDGR

SEQ ID NO: 16180 - protein, 9 aa, Artificial sequence
  Protein classification predicting sequence
EALPYIRRF

SEQ ID NO: 16181 - protein, 7 aa, Artificial sequence
  Protein classification predicting sequence
HGGGPQI

SEQ ID NO: 16182 - protein, 17 aa, Artificial sequence
  Protein classification predicting sequence
DELFADGTISGGMLPKI

SEQ ID NO: 16183 - protein, 11 aa, Artificial sequence
  Protein classification predicting sequence
RAFAADMAFLR

SEQ ID NO: 16184 - protein, 10 aa, Artificial sequence
  Protein classification predicting sequence
GGFRVTTPEV

SEQ ID NO: 16185 - protein, 8 aa, Artificial sequence
  Protein classification predicting sequence
MDVVRMVL

SEQ ID NO: 16186 - protein, 10 aa, Artificial sequence
  Protein classification predicting sequence
RMVLFGQVGR

SEQ ID NO: 16187 - protein, 7 aa, Artificial sequence
  Protein classification predicting sequence
GMVPKME

SEQ ID NO: 16188 - protein, 7 aa, Artificial sequence
  Protein classification predicting sequence
VVVHGGG

SEQ ID NO: 16189 - protein, 10 aa, Artificial sequence
  Protein classification predicting sequence
GLRVTPADQI

SEQ ID NO: 16190 - protein, 7 aa, Artificial sequence
  Protein classification predicting sequence
SSIGVTD

SEQ ID NO: 16191 - protein, 7 aa, Artificial sequence
  Protein classification predicting sequence
LLSDVSG

SEQ ID NO: 16192 - protein, 8 aa, Artificial sequence
  Protein classification predicting sequence
PLVIKLGG

SEQ ID NO: 16193 - protein, 9 aa, Artificial sequence
  Protein classification predicting sequence
GALAGTANK

SEQ ID NO: 16194 - protein, 7 aa, Artificial sequence
  Protein classification predicting sequence
VEMVLVG

SEQ ID NO: 16195 - protein, 6 aa, Artificial sequence
  Protein classification predicting sequence
VIKYGG

SEQ ID NO: 16196 - protein, 7 aa, Artificial sequence
  Protein classification predicting sequence
HGGGPEI

SEQ ID NO: 16197 - protein, 10 aa, Artificial sequence
  Protein classification predicting sequence
AEKLILLTDT

SEQ ID NO: 16198 - protein, 11 aa, Artificial sequence
  Protein classification predicting sequence
ECCIRALAQGV

SEQ ID NO: 16199 - protein, 11 aa, Artificial sequence
  Protein classification predicting sequence
PHALLLEVFTD

SEQ ID NO: 16200 - protein, 6 aa, Artificial sequence
  Protein classification predicting sequence
GMRVTD

SEQ ID NO: 16201 - protein, 8 aa, Artificial sequence
  Protein classification predicting sequence
AEKLILLT

SEQ ID NO: 16202 - protein, 12 aa, Artificial sequence
  Protein classification predicting sequence
NPVVVHGGGPQI

SEQ ID NO: 16203 - protein, 7 aa, Artificial sequence
  Protein classification predicting sequence
AYNINAD

SEQ ID NO: 16204 - protein, 9 aa, Artificial sequence
  Protein classification predicting sequence
DIALLKQSG

SEQ ID NO: 16205 - protein, 9 aa, Artificial sequence
  Protein classification predicting sequence
GVVILNGKT

SEQ ID NO: 16206 - protein, 8 aa, Artificial sequence
  Protein classification predicting sequence
PVVVHGGG

SEQ ID NO: 16207 - protein, 10 aa, Artificial sequence
  Protein classification predicting sequence
GLCGKDGNMV

SEQ ID NO: 16208 - protein, 11 aa, Artificial sequence
  Protein classification predicting sequence
VGLFLGDGDSV

SEQ ID NO: 16209 - protein, 16 aa, Artificial sequence
  Protein classification predicting sequence
LGHVGLAQPGSPKLIN

SEQ ID NO: 16210 - protein, 11 aa, Artificial sequence
  Protein classification predicting sequence
LGRPVDIASWR

SEQ ID NO: 16211 - protein, 17 aa, Artificial sequence
  Protein classification predicting sequence
QCSAIGLCGLDAQLFEI

SEQ ID NO: 16212 - protein, 12 aa, Artificial sequence
  Protein classification predicting sequence
FDQQYGYVGVPT

SEQ ID NO: 16213 - protein, 35 aa, Artificial sequence
  Protein classification predicting sequence
YLCTKFVPIINSIGFNNHDGEFYNINADTLAYFIA

SEQ ID NO: 16214 - protein, 24 aa, Artificial sequence
  Protein classification predicting sequence
APIYVLSNIAGVLINDVVIPQLPL

SEQ ID NO: 16215 - protein, 23 aa, Artificial sequence
  Protein classification predicting sequence
QYIEHGDIYGGMIPKVLDAKNAI

SEQ ID NO: 16216 - protein, 18 aa, Artificial sequence
  Protein classification predicting sequence
NGCPKVIIASGNKPNIIE

SEQ ID NO: 16217 - protein, 12 aa, Artificial sequence
  Protein classification predicting sequence
IYNNDFVGTTIL

SEQ ID NO: 16218 - protein, 7 aa, Artificial sequence
  Protein classification predicting sequence
GRIPVVS

SEQ ID NO: 16219 - protein, 6 aa, Artificial sequence
  Protein classification predicting sequence
NADTAA

SEQ ID NO: 16220 - protein, 9 aa, Artificial sequence
  Protein classification predicting sequence
AVGITGEDA

SEQ ID NO: 16221 - protein, 6 aa, Artificial sequence
  Protein classification predicting sequence
HALLLE

SEQ ID NO: 16222 - protein, 7 aa, Artificial sequence
  Protein classification predicting sequence
VIVHGGG

SEQ ID NO: 16223 - protein, 11 aa, Artificial sequence
  Protein classification predicting sequence
GLRVTPYDQIP

SEQ ID NO: 16224 - protein, 7 aa, Artificial sequence
  Protein classification predicting sequence
PIISSIG

SEQ ID NO: 16225 - protein, 18 aa, Artificial sequence
  Protein classification predicting sequence
IKLGGVLLDSEEALERLF

SEQ ID NO: 16226 - protein, 7 aa, Artificial sequence
  Protein classification predicting sequence
HGTTFGG

SEQ ID NO: 16227 - protein, 13 aa, Artificial sequence
  Protein classification predicting sequence
HGRTLATLAATGS

SEQ ID NO: 16228 - protein, 8 aa, Artificial sequence
  Protein classification predicting sequence
YSDGFGPK

SEQ ID NO: 16229 - protein, 7 aa, Artificial sequence
  Protein classification predicting sequence
LQAGPDV

SEQ ID NO: 16230 - protein, 35 aa, Artificial sequence
  Protein classification predicting sequence
VKGITDGQVEIIAMNNNFHGRTLGSLSLSNHDAYK

SEQ ID NO: 16231 - protein, 9 aa, Artificial sequence
  Protein classification predicting sequence
GFHPLLQGT

SEQ ID NO: 16232 - protein, 26 aa, Artificial sequence
  Protein classification predicting sequence
RGILCKDTHRTIIRLSPPLVIDKEEI

SEQ ID NO: 16233 - protein, 25 aa, Artificial sequence
  Protein classification predicting sequence
IIQALKDQADKVTLVSRAFHSDNLG

SEQ ID NO: 16234 - protein, 77 aa, Artificial sequence
  Protein classification predicting sequence
EKICKLAGKDKALPMNTGAEAVETALKAARRWAYDVKGIEPNKAEIIAFNGNFHGRTMAPVSLSSEAEYQRGYGPLL

SEQ ID NO: 16235 - protein, 23 aa, Artificial sequence
  Protein classification predicting sequence
LFIADEIQAGLGRSGKLFATDWD

SEQ ID NO: 16236 - protein, 25 aa, Artificial sequence
  Protein classification predicting sequence
VKPDVYILGKALGGGVFPISVVLAD

SEQ ID NO: 16237 - protein, 12 aa, Artificial sequence
  Protein classification predicting sequence
DEDLPGRSLELG

SEQ ID NO: 16238 - protein, 12 aa, Artificial sequence
  Protein classification predicting sequence
ESARPYCEALKE

SEQ ID NO: 16239 - protein, 13 aa, Artificial sequence
  Protein classification predicting sequence
KRYLDFVQGWAVN

SEQ ID NO: 16240 - protein, 10 aa, Artificial sequence
  Protein classification predicting sequence
LRFMPALNVT

SEQ ID NO: 16241 - protein, 6 aa, Artificial sequence
  Protein classification predicting sequence
HTSNLY

SEQ ID NO: 16242 - protein, 8 aa, Artificial sequence
  Protein classification predicting sequence
GLLINVTR

SEQ ID NO: 16243 - protein, 55 aa, Artificial sequence
  Protein classification predicting sequence
NTAAVLVEPIQGEAGINIPPEGYLKAIRELCDEHNVLFIADEIQAGLGRSGKLFA

SEQ ID NO: 16244 - protein, 6 aa, Artificial sequence
  Protein classification predicting sequence
FFCNSG

SEQ ID NO: 16245 - protein, 7 aa, Artificial sequence
  Protein classification predicting sequence
AVNSLGH

SEQ ID NO: 16246 - protein, 11 aa, Artificial sequence
  Protein classification predicting sequence
FGDVDALKAAI

SEQ ID NO: 16247 - protein, 7 aa, Artificial sequence
  Protein classification predicting sequence
VFFCNSG

SEQ ID NO: 16248 - protein, 9 aa, Artificial sequence
  Protein classification predicting sequence
HASTFGGNP

SEQ ID NO: 16249 - protein, 7 aa, Artificial sequence
  Protein classification predicting sequence
VFFANSG

SEQ ID NO: 16250 - protein, 5 aa, Artificial sequence
  Protein classification predicting sequence
FCNSG

SEQ ID NO: 16251 - protein, 8 aa, Artificial sequence
  Protein classification predicting sequence
KLWHLSNV

SEQ ID NO: 16252 - protein, 6 aa, Artificial sequence
  Protein classification predicting sequence
DEIQCG

SEQ ID NO: 16253 - protein, 8 aa, Artificial sequence
  Protein classification predicting sequence
PDIFTSAK

SEQ ID NO: 16254 - protein, 7 aa, Artificial sequence
  Protein classification predicting sequence
TGQPKYQ

SEQ ID NO: 16255 - protein, 6 aa, Artificial sequence
  Protein classification predicting sequence
GFPIGA

SEQ ID NO: 16256 - protein, 8 aa, Artificial sequence
  Protein classification predicting sequence
NSGAEANE

SEQ ID NO: 16257 - protein, 9 aa, Artificial sequence
  Protein classification predicting sequence
IWHTSNLYE

SEQ ID NO: 16258 - protein, 7 aa, Artificial sequence
  Protein classification predicting sequence
AIKLARK

SEQ ID NO: 16259 - protein, 6 aa, Artificial sequence
  Protein classification predicting sequence
GMGRTG

SEQ ID NO: 16260 - protein, 9 aa, Artificial sequence
  Protein classification predicting sequence
PLPGDVTHV

SEQ ID NO: 16261 - protein, 7 aa, Artificial sequence
  Protein classification predicting sequence
FADKVFF

SEQ ID NO: 16262 - protein, 18 aa, Artificial sequence
  Protein classification predicting sequence
NSGAEANEAALKLARRYA

SEQ ID NO: 16263 - protein, 6 aa, Artificial sequence
  Protein classification predicting sequence
SFHGRT

SEQ ID NO: 16264 - protein, 7 aa, Artificial sequence
  Protein classification predicting sequence
PPLIITK

SEQ ID NO: 16265 - protein, 16 aa, Artificial sequence
  Protein classification predicting sequence
AKSLGGGFPIGAMLTT

SEQ ID NO: 16266 - protein, 8 aa, Artificial sequence
  Protein classification predicting sequence
FHGRTLAT

SEQ ID NO: 16267 - protein, 14 aa, Artificial sequence
  Protein classification predicting sequence
FHGRTLATMSASGK

SEQ ID NO: 16268 - protein, 12 aa, Artificial sequence
  Protein classification predicting sequence
GDQGGTYNGNPL

SEQ ID NO: 16269 - protein, 20 aa, Artificial sequence
  Protein classification predicting sequence
ITFEGAFHGRTLATIAAGGQ

SEQ ID NO: 16270 - protein, 16 aa, Artificial sequence
  Protein classification predicting sequence
KYLEGFGPKVEGFDQV

SEQ ID NO: 16271 - protein, 7 aa, Artificial sequence
  Protein classification predicting sequence
EFMQGLR

SEQ ID NO: 16272 - protein, 15 aa, Artificial sequence
  Protein classification predicting sequence
KLWHLSNVMTNEPAL

SEQ ID NO: 16273 - protein, 9 aa, Artificial sequence
  Protein classification predicting sequence
FHGRTFFTV

SEQ ID NO: 16274 - protein, 8 aa, Artificial sequence
  Protein classification predicting sequence
FTVSVGGQ

SEQ ID NO: 16275 - protein, 15 aa, Artificial sequence
  Protein classification predicting sequence
VGGQAAYSDGFGPKP

SEQ ID NO: 16276 - protein, 21 aa, Artificial sequence
  Protein classification predicting sequence
AEHLKVGTHGSTYGGNPLACA

SEQ ID NO: 16277 - protein, 9 aa, Artificial sequence
  Protein classification predicting sequence
RGKGLLLGA

SEQ ID NO: 16278 - protein, 12 aa, Artificial sequence
  Protein classification predicting sequence
FCNSGAEANEAA

SEQ ID NO: 16279 - protein, 10 aa, Artificial sequence
  Protein classification predicting sequence
LLVLDEVQTG

SEQ ID NO: 16280 - protein, 18 aa, Artificial sequence
  Protein classification predicting sequence
SAFGPGSHGSTFGGNKLA

SEQ ID NO: 16281 - protein, 9 aa, Artificial sequence
  Protein classification predicting sequence
LDAVAGIAT

SEQ ID NO: 16282 - protein, 8 aa, Artificial sequence
  Protein classification predicting sequence
SFHGRTLA

SEQ ID NO: 16283 - protein, 9 aa, Artificial sequence
  Protein classification predicting sequence
GIAVNVLGH

SEQ ID NO: 16284 - protein, 13 aa, Artificial sequence
  Protein classification predicting sequence
FDEVMVPCYNPME

SEQ ID NO: 16285 - protein, 7 aa, Artificial sequence
  Protein classification predicting sequence
GSRIWDQ

SEQ ID NO: 16286 - protein, 22 aa, Artificial sequence
  Protein classification predicting sequence
EYIDFAGGIAVSCLGHCHPVMV

SEQ ID NO: 16287 - protein, 12 aa, Artificial sequence
  Protein classification predicting sequence
VFFANSGAEANE

SEQ ID NO: 16288 - protein, 19 aa, Artificial sequence
  Protein classification predicting sequence
TAKSLGGGFPIGAMLTTAK

SEQ ID NO: 16289 - protein, 8 aa, Artificial sequence
  Protein classification predicting sequence
VVRFTPSL

SEQ ID NO: 16290 - protein, 7 aa, Artificial sequence
  Protein classification predicting sequence
AIKIARK

SEQ ID NO: 16291 - protein, 12 aa, Artificial sequence
  Protein classification predicting sequence
AKGLAGGVPIGA

SEQ ID NO: 16292 - protein, 8 aa, Artificial sequence
  Protein classification predicting sequence
PDIVTLAK

SEQ ID NO: 16293 - protein, 9 aa, Artificial sequence
  Protein classification predicting sequence
AAVFTRNRV

SEQ ID NO: 16294 - protein, 8 aa, Artificial sequence
  Protein classification predicting sequence
GNANACNG

SEQ ID NO: 16295 - protein, 6 aa, Artificial sequence
  Protein classification predicting sequence
IMTTDT

SEQ ID NO: 16296 - protein, 14 aa, Artificial sequence
  Protein classification predicting sequence
TLDIDGSTSTNDTV

SEQ ID NO: 16297 - protein, 11 aa, Artificial sequence
  Protein classification predicting sequence
QADAEGVTKRV

SEQ ID NO: 16298 - protein, 8 aa, Artificial sequence
  Protein classification predicting sequence
DGDTSTND

SEQ ID NO: 16299 - protein, 7 aa, Artificial sequence
  Protein classification predicting sequence
PNMATML

SEQ ID NO: 16300 - protein, 6 aa, Artificial sequence
  Protein classification predicting sequence
DPNWGR

SEQ ID NO: 16301 - protein, 6 aa, Artificial sequence
  Protein classification predicting sequence
WSLGVL

SEQ ID NO: 16302 - protein, 15 aa, Artificial sequence
  Protein classification predicting sequence
GFLPGADCLSTISCF

SEQ ID NO: 16303 - protein, 9 aa, Artificial sequence
  Protein classification predicting sequence
LDVGNSGTT

SEQ ID NO: 16304 - protein, 7 aa, Artificial sequence
  Protein classification predicting sequence
SIGKRPM

SEQ ID NO: 16305 - protein, 5 aa, Artificial sequence
  Protein classification predicting sequence
RDHTE

SEQ ID NO: 16306 - protein, 10 aa, Artificial sequence
  Protein classification predicting sequence
VPGDISSAAF

SEQ ID NO: 16307 - protein, 12 aa, Artificial sequence
  Protein classification predicting sequence
ELKVKETNRIDT

SEQ ID NO: 16308 - protein, 7 aa, Artificial sequence
  Protein classification predicting sequence
SYPSFFD

SEQ ID NO: 16309 - protein, 7 aa, Artificial sequence
  Protein classification predicting sequence
PYVEMTL

SEQ ID NO: 16310 - protein, 9 aa, Artificial sequence
  Protein classification predicting sequence
SYFLAAAAI

SEQ ID NO: 16311 - protein, 6 aa, Artificial sequence
  Protein classification predicting sequence
DHRIAM

SEQ ID NO: 16312 - protein, 10 aa, Artificial sequence
  Protein classification predicting sequence
LPGSKSLSNR

SEQ ID NO: 16313 - protein, 29 aa, Artificial sequence
  Protein classification predicting sequence
IRDVASWRVKETERMIAICTELRKLGATV

SEQ ID NO: 16314 - protein, 6 aa, Artificial sequence
  Protein classification predicting sequence
TYDDHR

SEQ ID NO: 16315 - protein, 7 aa, Artificial sequence
  Protein classification predicting sequence
PGDKSIS

SEQ ID NO: 16316 - protein, 6 aa, Artificial sequence
  Protein classification predicting sequence
LLDSDD

SEQ ID NO: 16317 - protein, 7 aa, Artificial sequence
  Protein classification predicting sequence
IPDAAMT

SEQ ID NO: 16318 - protein, 9 aa, Artificial sequence
  Protein classification predicting sequence
LDFGNAGTG

SEQ ID NO: 16319 - protein, 7 aa, Artificial sequence
  Protein classification predicting sequence
SLSKRPM

SEQ ID NO: 16320 - protein, 11 aa, Artificial sequence
  Protein classification predicting sequence
GDRMPLTLIGP

SEQ ID NO: 16321 - protein, 9 aa, Artificial sequence
  Protein classification predicting sequence
EKPVTVDDS

SEQ ID NO: 16322 - protein, 13 aa, Artificial sequence
  Protein classification predicting sequence
GELVSKPYIDITL

SEQ ID NO: 16323 - protein, 11 aa, Artificial sequence
  Protein classification predicting sequence
LVSKPYIDITL

SEQ ID NO: 16324 - protein, 15 aa, Artificial sequence
  Protein classification predicting sequence
LVEGDASSASYFLAA

SEQ ID NO: 16325 - protein, 20 aa, Artificial sequence
  Protein classification predicting sequence
LVEGDASSASYFLAAGAIKG

SEQ ID NO: 16326 - protein, 8 aa, Artificial sequence
  Protein classification predicting sequence
ITWGDDFI

SEQ ID NO: 16327 - protein, 20 aa, Artificial sequence
  Protein classification predicting sequence
IDVPGDPSSTAFPLVAALLV

SEQ ID NO: 16328 - protein, 11 aa, Artificial sequence
  Protein classification predicting sequence
LDGVPRMRERP

SEQ ID NO: 16329 - protein, 7 aa, Artificial sequence
  Protein classification predicting sequence
SAQVKSA

SEQ ID NO: 16330 - protein, 24 aa, Artificial sequence
  Protein classification predicting sequence
GGLPGGKVKLSGSISSQYLTALLM

SEQ ID NO: 16331 - protein, 12 aa, Artificial sequence
  Protein classification predicting sequence
APLALGDVEIEI

SEQ ID NO: 16332 - protein, 16 aa, Artificial sequence
  Protein classification predicting sequence
SLQGDVKFAEVLEKMG

SEQ ID NO: 16333 - protein, 7 aa, Artificial sequence
  Protein classification predicting sequence
KTFPDYF

SEQ ID NO: 16334 - protein, 7 aa, Artificial sequence
  Protein classification predicting sequence
DHRIGMM

SEQ ID NO: 16335 - protein, 7 aa, Artificial sequence
  Protein classification predicting sequence
SIAKRPM

SEQ ID NO: 16336 - protein, 55 aa, Artificial sequence
  Protein classification predicting sequence
SPVASAQVKSAILLAGLRAEGVTAVTEPHISRDHTERMLEAFGVKVTREGKTVKL

SEQ ID NO: 16337 - protein, 26 aa, Artificial sequence
  Protein classification predicting sequence
QVPGDVSSAAFFLVAGAIIPNSKLVL

SEQ ID NO: 16338 - protein, 24 aa, Artificial sequence
  Protein classification predicting sequence
NVGMNPTRTGIIDVLEKMGATFTV

SEQ ID NO: 16339 - protein, 23 aa, Artificial sequence
  Protein classification predicting sequence
LKGNTVNSYGDHRIGMMLAIAGC

SEQ ID NO: 16340 - protein, 8 aa, Artificial sequence
  Protein classification predicting sequence
NSGTSMRL

SEQ ID NO: 16341 - protein, 6 aa, Artificial sequence
  Protein classification predicting sequence
DCLSTI

SEQ ID NO: 16342 - protein, 8 aa, Artificial sequence
  Protein classification predicting sequence
RDHTERML

SEQ ID NO: 16343 - protein, 7 aa, Artificial sequence
  Protein classification predicting sequence
VGLNPTR

SEQ ID NO: 16344 - protein, 7 aa, Artificial sequence
  Protein classification predicting sequence
SHGDHRI

SEQ ID NO: 16345 - protein, 11 aa, Artificial sequence
  Protein classification predicting sequence
FLPGADCLSTI

SEQ ID NO: 16346 - protein, 9 aa, Artificial sequence
  Protein classification predicting sequence
KSAVLLAGL

SEQ ID NO: 16347 - protein, 10 aa, Artificial sequence
  Protein classification predicting sequence
PIIALLATQA

SEQ ID NO: 16348 - protein, 9 aa, Artificial sequence
  Protein classification predicting sequence
LFLGNAGTA

SEQ ID NO: 16349 - protein, 5 aa, Artificial sequence
  Protein classification predicting sequence
SKPYI

SEQ ID NO: 16350 - protein, 6 aa, Artificial sequence
  Protein classification predicting sequence
ASYFLA

SEQ ID NO: 16351 - protein, 6 aa, Artificial sequence
  Protein classification predicting sequence
PVASAQ

SEQ ID NO: 16352 - protein, 8 aa, Artificial sequence
  Protein classification predicting sequence
LRVRASKL

SEQ ID NO: 16353 - protein, 8 aa, Artificial sequence
  Protein classification predicting sequence
GGGTVATH

SEQ ID NO: 16354 - protein, 6 aa, Artificial sequence
  Protein classification predicting sequence
HMLNAL

SEQ ID NO: 16355 - protein, 7 aa, Artificial sequence
  Protein classification predicting sequence
LGNAGTA

SEQ ID NO: 16356 - protein, 7 aa, Artificial sequence
  Protein classification predicting sequence
RMHERPI

SEQ ID NO: 16357 - protein, 6 aa, Artificial sequence
  Protein classification predicting sequence
HLVDAL

SEQ ID NO: 16358 - protein, 6 aa, Artificial sequence
  Protein classification predicting sequence
NRALLL

SEQ ID NO: 16359 - protein, 7 aa, Artificial sequence
  Protein classification predicting sequence
QGDVKFA

SEQ ID NO: 16360 - protein, 7 aa, Artificial sequence
  Protein classification predicting sequence
SYGDHRI

SEQ ID NO: 16361 - protein, 6 aa, Artificial sequence
  Protein classification predicting sequence
GNAGTG

SEQ ID NO: 16362 - protein, 7 aa, Artificial sequence
  Protein classification predicting sequence
VPGDPSS

SEQ ID NO: 16363 - protein, 8 aa, Artificial sequence
  Protein classification predicting sequence
AFPLVAAL

SEQ ID NO: 16364 - protein, 19 aa, Artificial sequence
  Protein classification predicting sequence
LKGVVVPPERAPSMIDEYP

SEQ ID NO: 16365 - protein, 7 aa, Artificial sequence
  Protein classification predicting sequence
RVKESDR

SEQ ID NO: 16366 - protein, 7 aa, Artificial sequence
  Protein classification predicting sequence
MIATSFP

SEQ ID NO: 16367 - protein, 7 aa, Artificial sequence
  Protein classification predicting sequence
DKSISHR

SEQ ID NO: 16368 - protein, 7 aa, Artificial sequence
  Protein classification predicting sequence
KRPMKRV

SEQ ID NO: 16369 - protein, 9 aa, Artificial sequence
  Protein classification predicting sequence
VPGDISSAA

SEQ ID NO: 16370 - protein, 10 aa, Artificial sequence
  Protein classification predicting sequence
GIAHLRGHET

SEQ ID NO: 16371 - protein, 42 aa, Artificial sequence
  Protein classification predicting sequence
TYNDHRMAMCFSLVALSDTPVTILDPKCTAKTFPDYFEQLAR

SEQ ID NO: 16372 - protein, 21 aa, Artificial sequence
  Protein classification predicting sequence
ELFLGNAGTAMRPLAAALCLG

SEQ ID NO: 16373 - protein, 6 aa, Artificial sequence
  Protein classification predicting sequence
IRITPP

SEQ ID NO: 16374 - protein, 50 aa, Artificial sequence
  Protein classification predicting sequence
FAEIATYNDHRMAMCFSLVALSDTPVTILDPKCTAKTFPDYFEQLARISQ

SEQ ID NO: 16375 - protein, 7 aa, Artificial sequence
  Protein classification predicting sequence
NLLDSDD

SEQ ID NO: 16376 - protein, 12 aa, Artificial sequence
  Protein classification predicting sequence
LTGEPRMKERPI

SEQ ID NO: 16377 - protein, 7 aa, Artificial sequence
  Protein classification predicting sequence
LVSKPYI

SEQ ID NO: 16378 - protein, 13 aa, Artificial sequence
  Protein classification predicting sequence
VEGDASSASYFLA

SEQ ID NO: 16379 - protein, 7 aa, Artificial sequence
  Protein classification predicting sequence
VRVTGIG

SEQ ID NO: 16380 - protein, 6 aa, Artificial sequence
  Protein classification predicting sequence
SMQGDI

SEQ ID NO: 16381 - protein, 6 aa, Artificial sequence
  Protein classification predicting sequence
IDMDMN

SEQ ID NO: 16382 - protein, 8 aa, Artificial sequence
  Protein classification predicting sequence
LFLGNAGT

SEQ ID NO: 16383 - protein, 12 aa, Artificial sequence
  Protein classification predicting sequence
IDGSISSQFLTA

SEQ ID NO: 16384 - protein, 7 aa, Artificial sequence
  Protein classification predicting sequence
NHIPDAA

SEQ ID NO: 16385 - protein, 11 aa, Artificial sequence
  Protein classification predicting sequence
YNWRVKETDRL

SEQ ID NO: 16386 - protein, 6 aa, Artificial sequence
  Protein classification predicting sequence
AMCFSL

SEQ ID NO: 16387 - protein, 6 aa, Artificial sequence
  Protein classification predicting sequence
VTILDP

SEQ ID NO: 16388 - protein, 8 aa, Artificial sequence
  Protein classification predicting sequence
TNLLDSDD

SEQ ID NO: 16389 - protein, 7 aa, Artificial sequence
  Protein classification predicting sequence
RHMLNAL

SEQ ID NO: 16390 - protein, 14 aa, Artificial sequence
  Protein classification predicting sequence
AMATELRKVGAEVE

SEQ ID NO: 16391 - protein, 7 aa, Artificial sequence
  Protein classification predicting sequence
VKVTGIG

SEQ ID NO: 16392 - protein, 10 aa, Artificial sequence
  Protein classification predicting sequence
VKVTGIGRNS

SEQ ID NO: 16393 - protein, 9 aa, Artificial sequence
  Protein classification predicting sequence
GAEVEEGED

SEQ ID NO: 16394 - protein, 6 aa, Artificial sequence
  Protein classification predicting sequence
TYNDHR

SEQ ID NO: 16395 - protein, 7 aa, Artificial sequence
  Protein classification predicting sequence
CTAKTFP

SEQ ID NO: 16396 - protein, 19 aa, Artificial sequence
  Protein classification predicting sequence
NLPGSKSVSNRALLLAALA

SEQ ID NO: 16397 - protein, 18 aa, Artificial sequence
  Protein classification predicting sequence
IDYLEQENYPPLRLRGGF

SEQ ID NO: 16398 - protein, 8 aa, Artificial sequence
  Protein classification predicting sequence
LMKTFGVE

SEQ ID NO: 16399 - protein, 16 aa, Artificial sequence
  Protein classification predicting sequence
QGDIRFADVLEKMGAT

SEQ ID NO: 16400 - protein, 6 aa, Artificial sequence
  Protein classification predicting sequence
CTRGEL

SEQ ID NO: 16401 - protein, 30 aa, Artificial sequence
  Protein classification predicting sequence
CTRGELNAIDMDMNHIPDAAMTIATAALFA

SEQ ID NO: 16402 - protein, 16 aa, Artificial sequence
  Protein classification predicting sequence
AMATELRKVGAEVEEG

SEQ ID NO: 16403 - protein, 8 aa, Artificial sequence
  Protein classification predicting sequence
DYIRITPP

SEQ ID NO: 16404 - protein, 37 aa, Artificial sequence
  Protein classification predicting sequence
TYNDHRMAMCFSLVALSDTPVTILDPKCTAKTFPDYF

SEQ ID NO: 16405 - protein, 7 aa, Artificial sequence
  Protein classification predicting sequence
GEDVLST

SEQ ID NO: 16406 - protein, 7 aa, Artificial sequence
  Protein classification predicting sequence
MGNSGTS

SEQ ID NO: 16407 - protein, 14 aa, Artificial sequence
  Protein classification predicting sequence
FGDDSLSKRPMDRV

SEQ ID NO: 16408 - protein, 9 aa, Artificial sequence
  Protein classification predicting sequence
IFAALQAEG

SEQ ID NO: 16409 - protein, 7 aa, Artificial sequence
  Protein classification predicting sequence
ELKVKET

SEQ ID NO: 16410 - protein, 8 aa, Artificial sequence
  Protein classification predicting sequence
GLLAGQPF

SEQ ID NO: 16411 - protein, 9 aa, Artificial sequence
  Protein classification predicting sequence
VASAQVKSA

SEQ ID NO: 16412 - protein, 6 aa, Artificial sequence
  Protein classification predicting sequence
SSAAFF

SEQ ID NO: 16413 - protein, 9 aa, Artificial sequence
  Protein classification predicting sequence
SSAAFFIVA

SEQ ID NO: 16414 - protein, 11 aa, Artificial sequence
  Protein classification predicting sequence
ELKVKETNRID

SEQ ID NO: 16415 - protein, 8 aa, Artificial sequence
  Protein classification predicting sequence
DHRIGMML

SEQ ID NO: 16416 - protein, 16 aa, Artificial sequence
  Protein classification predicting sequence
GDIIPRLIDEIPVIAL

SEQ ID NO: 16417 - protein, 5 aa, Artificial sequence
  Protein classification predicting sequence
DPKCT

SEQ ID NO: 16418 - protein, 5 aa, Artificial sequence
  Protein classification predicting sequence
RNHTE

SEQ ID NO: 16419 - protein, 7 aa, Artificial sequence
  Protein classification predicting sequence
ALLATQA

SEQ ID NO: 16420 - protein, 8 aa, Artificial sequence
  Protein classification predicting sequence
GTTIIKDA

SEQ ID NO: 16421 - protein, 12 aa, Artificial sequence
  Protein classification predicting sequence
IKDAEELKVKET

SEQ ID NO: 16422 - protein, 7 aa, Artificial sequence
  Protein classification predicting sequence
SNRALLL

SEQ ID NO: 16423 - protein, 9 aa, Artificial sequence
  Protein classification predicting sequence
LTNLLDSDD

SEQ ID NO: 16424 - protein, 8 aa, Artificial sequence
  Protein classification predicting sequence
GKNSIQGD

SEQ ID NO: 16425 - protein, 8 aa, Artificial sequence
  Protein classification predicting sequence
DHRMAMCF

SEQ ID NO: 16426 - protein, 11 aa, Artificial sequence
  Protein classification predicting sequence
LGNAGTAMRPL

SEQ ID NO: 16427 - protein, 7 aa, Artificial sequence
  Protein classification predicting sequence
SSQFLTA

SEQ ID NO: 16428 - protein, 12 aa, Artificial sequence
  Protein classification predicting sequence
LVSKPYIDITLN

SEQ ID NO: 16429 - protein, 17 aa, Artificial sequence
  Protein classification predicting sequence
NHIPDAAMTIATAALFA

SEQ ID NO: 16430 - protein, 8 aa, Artificial sequence
  Protein classification predicting sequence
AMATELRK

SEQ ID NO: 16431 - protein, 7 aa, Artificial sequence
  Protein classification predicting sequence
TVEGCGT

SEQ ID NO: 16432 - protein, 11 aa, Artificial sequence
  Protein classification predicting sequence
IDTYDDHRMAM

SEQ ID NO: 16433 - protein, 27 aa, Artificial sequence
  Protein classification predicting sequence
ALTGEIRIPGDKSISHRSFMFGGLASG

SEQ ID NO: 16434 - protein, 23 aa, Artificial sequence
  Protein classification predicting sequence
IRKEGDVWIINGVGNGCLLQPEA

SEQ ID NO: 16435 - protein, 54 aa, Artificial sequence
  Protein classification predicting sequence
LDFGNAGTGARLTMGLVGTYDMKTSFIGDASLSKRPMGRVLNPLREMGVQVEAA

SEQ ID NO: 16436 - protein, 23 aa, Artificial sequence
  Protein classification predicting sequence
YRVPMASAQVKSAVLLAGLNTPG

SEQ ID NO: 16437 - protein, 12 aa, Artificial sequence
  Protein classification predicting sequence
NIGSWRVKETDR

SEQ ID NO: 16438 - protein, 8 aa, Artificial sequence
  Protein classification predicting sequence
WRVKETDR

SEQ ID NO: 16439 - protein, 17 aa, Artificial sequence
  Protein classification predicting sequence
IDTYDDHRMAMAFSLAA

SEQ ID NO: 16440 - protein, 9 aa, Artificial sequence
  Protein classification predicting sequence
PGDKSISHR

SEQ ID NO: 16441 - protein, 12 aa, Artificial sequence
  Protein classification predicting sequence
RLTMGLVGTYDM

SEQ ID NO: 16442 - protein, 7 aa, Artificial sequence
  Protein classification predicting sequence
RPMGRVL

SEQ ID NO: 16443 - protein, 17 aa, Artificial sequence
  Protein classification predicting sequence
TTVIEPVMTRDHTEKML

SEQ ID NO: 16444 - protein, 7 aa, Artificial sequence
  Protein classification predicting sequence
FPLVAAL

SEQ ID NO: 16445 - protein, 9 aa, Artificial sequence
  Protein classification predicting sequence
NGVDCTEGE

SEQ ID NO: 16446 - protein, 16 aa, Artificial sequence
  Protein classification predicting sequence
IDVPGDPSSTAFPLVA

SEQ ID NO: 16447 - protein, 20 aa, Artificial sequence
  Protein classification predicting sequence
NVLMNPTRTGLILTLQEMGA

SEQ ID NO: 16448 - protein, 11 aa, Artificial sequence
  Protein classification predicting sequence
VRGRPGGKGLG

SEQ ID NO: 16449 - protein, 21 aa, Artificial sequence
  Protein classification predicting sequence
LVSKPYIDITLNLMKTFGVEI

SEQ ID NO: 16450 - protein, 11 aa, Artificial sequence
  Protein classification predicting sequence
HYQQFVVKGGQ

SEQ ID NO: 16451 - protein, 19 aa, Artificial sequence
  Protein classification predicting sequence
SMQGDIRFADVLEKMGATI

SEQ ID NO: 16452 - protein, 50 aa, Artificial sequence
  Protein classification predicting sequence
ALFAKGTTTLRNIYNWRVKETDRLFAMATELRKVGAEVEEGHDYIRITPP

SEQ ID NO: 16453 - protein, 17 aa, Artificial sequence
  Protein classification predicting sequence
LTNLLDSDDVRHMLNAL

SEQ ID NO: 16454 - protein, 7 aa, Artificial sequence
  Protein classification predicting sequence
LTGEPRM

SEQ ID NO: 16455 - protein, 7 aa, Artificial sequence
  Protein classification predicting sequence
LVDALRQ

SEQ ID NO: 16456 - protein, 10 aa, Artificial sequence
  Protein classification predicting sequence
FADVLEKMGA

SEQ ID NO: 16457 - protein, 6 aa, Artificial sequence
  Protein classification predicting sequence
WGDDYI

SEQ ID NO: 16458 - protein, 22 aa, Artificial sequence
  Protein classification predicting sequence
ALGVSYTLSADRTRCEIIGNGG

SEQ ID NO: 16459 - protein, 15 aa, Artificial sequence
  Protein classification predicting sequence
VDGSVSSQFLTALLM

SEQ ID NO: 16460 - protein, 15 aa, Artificial sequence
  Protein classification predicting sequence
IKELDVSRNHTETMF

SEQ ID NO: 16461 - protein, 9 aa, Artificial sequence
  Protein classification predicting sequence
HFNIPIEAE

SEQ ID NO: 16462 - protein, 26 aa, Artificial sequence
  Protein classification predicting sequence
IKPADFHVPGDISSAAFFIVAALITP

SEQ ID NO: 16463 - protein, 25 aa, Artificial sequence
  Protein classification predicting sequence
ANIEGIEDNYTPLIIKPSVIKGINY

SEQ ID NO: 16464 - protein, 20 aa, Artificial sequence
  Protein classification predicting sequence
LGVEIKEDDEKLVVTSPGYQ

SEQ ID NO: 16465 - protein, 26 aa, Artificial sequence
  Protein classification predicting sequence
TPHQVLYTGNSGTTTRLLAGLLSGLG

SEQ ID NO: 16466 - protein, 28 aa, Artificial sequence
  Protein classification predicting sequence
LSSEPVKIKQFDAVNVSFPGFLPKLKLL

SEQ ID NO: 16467 - protein, 11 aa, Artificial sequence
  Protein classification predicting sequence
GEDCRRTMDIF

SEQ ID NO: 16468 - protein, 20 aa, Artificial sequence
  Protein classification predicting sequence
IKGINYQMEVASAQVKSAIL

SEQ ID NO: 16469 - protein, 11 aa, Artificial sequence
  Protein classification predicting sequence
VASAQVKSAIL

SEQ ID NO: 16470 - protein, 15 aa, Artificial sequence
  Protein classification predicting sequence
AIDELPVIALLCTQA

SEQ ID NO: 16471 - protein, 10 aa, Artificial sequence
  Protein classification predicting sequence
DGLIIHPSEF

SEQ ID NO: 16472 - protein, 23 aa, Artificial sequence
  Protein classification predicting sequence
QFDAVNVSFPGFLPKLKLLENEG

SEQ ID NO: 16473 - protein, 23 aa, Artificial sequence
  Protein classification predicting sequence
KGEIEVPGDKSMTHRAIMLASLA

SEQ ID NO: 16474 - protein, 24 aa, Artificial sequence
  Protein classification predicting sequence
AEELKVKETNRIDTTADMLNLLGF

SEQ ID NO: 16475 - protein, 13 aa, Artificial sequence
  Protein classification predicting sequence
MGNSGTSMRLIAG

SEQ ID NO: 16476 - protein, 22 aa, Artificial sequence
  Protein classification predicting sequence
IPRLIDELPIIALLATQAQGTT

SEQ ID NO: 16477 - protein, 6 aa, Artificial sequence
  Protein classification predicting sequence
TRNHTE

SEQ ID NO: 16478 - protein, 7 aa, Artificial sequence
  Protein classification predicting sequence
IPRLIDE

SEQ ID NO: 16479 - protein, 6 aa, Artificial sequence
  Protein classification predicting sequence
SYPTFF

SEQ ID NO: 16480 - protein, 215 aa, Artificial sequence
  Protein classification predicting sequence
APCQTLNMGNSGTSMRLIAGLLAGQPFSVKMIGDESLSKRPMDRIVYPLKQMGVEISGETDRQFPPLQLQGNRNLQPITYTLPISSAQVKSAILLAALQAKGTTQVVEKEITRNHTEEMIQQFGGRLIVDGKRITLVGPQQLTAQEITVPGDISSAAFWLVAGLIIPGSELLLKNVGVNPTRTGILEVVEKMGAQIVYEDMNKKEQVTSIRVVYS

SEQ ID NO: 16481 - protein, 10 aa, Artificial sequence
  Protein classification predicting sequence
VKETDRIQVV

SEQ ID NO: 16482 - protein, 11 aa, Artificial sequence
  Protein classification predicting sequence
NVGINETRTGI

SEQ ID NO: 16483 - protein, 10 aa, Artificial sequence
  Protein classification predicting sequence
PGDKSISHRA

SEQ ID NO: 16484 - protein, 12 aa, Artificial sequence
  Protein classification predicting sequence
NVGVNPTRTGIL

SEQ ID NO: 16485 - protein, 7 aa, Artificial sequence
  Protein classification predicting sequence
VADLRVR

SEQ ID NO: 16486 - protein, 6 aa, Artificial sequence
  Protein classification predicting sequence
DHRMAM

SEQ ID NO: 16487 - protein, 8 aa, Artificial sequence
  Protein classification predicting sequence
NVGINPTR

SEQ ID NO: 16488 - protein, 6 aa, Artificial sequence
  Protein classification predicting sequence
NPTRTG

SEQ ID NO: 16489 - protein, 8 aa, Artificial sequence
  Protein classification predicting sequence
ASAQVKSA

SEQ ID NO: 16490 - protein, 7 aa, Artificial sequence
  Protein classification predicting sequence
NPTRTGI

SEQ ID NO: 16491 - protein, 5 aa, Artificial sequence
  Protein classification predicting sequence
YNDHR

SEQ ID NO: 16492 - protein, 15 aa, Artificial sequence
  Protein classification predicting sequence
NLPGSKSVSNRALLL

SEQ ID NO: 16493 - protein, 9 aa, Artificial sequence
  Protein classification predicting sequence
ALSDTPVTI

SEQ ID NO: 16494 - protein, 11 aa, Artificial sequence
  Protein classification predicting sequence
SNRALLLAALA

SEQ ID NO: 16495 - protein, 7 aa, Artificial sequence
  Protein classification predicting sequence
SHRAVMF

SEQ ID NO: 16496 - protein, 7 aa, Artificial sequence
  Protein classification predicting sequence
SLTLQPI

SEQ ID NO: 16497 - protein, 19 aa, Artificial sequence
  Protein classification predicting sequence
IVLTGEPRMKERPIGHLVD

SEQ ID NO: 16498 - protein, 22 aa, Artificial sequence
  Protein classification predicting sequence
IVLTGEPRMKERPIGHLVDALR

SEQ ID NO: 16499 - protein, 7 aa, Artificial sequence
  Protein classification predicting sequence
QGDTKFA

SEQ ID NO: 16500 - protein, 15 aa, Artificial sequence
  Protein classification predicting sequence
IPDAAMTIATTALFA

SEQ ID NO: 16501 - protein, 7 aa, Artificial sequence
  Protein classification predicting sequence
YLEQENY

SEQ ID NO: 16502 - protein, 11 aa, Artificial sequence
  Protein classification predicting sequence
VSSQFLTALLM

SEQ ID NO: 16503 - protein, 15 aa, Artificial sequence
  Protein classification predicting sequence
IRNIYNWRVKETDRL

SEQ ID NO: 16504 - protein, 11 aa, Artificial sequence
  Protein classification predicting sequence
YLEQENYPPLR

SEQ ID NO: 16505 - protein, 11 aa, Artificial sequence
  Protein classification predicting sequence
FPPIVFAGEAR

SEQ ID NO: 16506 - protein, 7 aa, Artificial sequence
  Protein classification predicting sequence
NIRDTFR

SEQ ID NO: 16507 - protein, 18 aa, Artificial sequence
  Protein classification predicting sequence
PVIKVGRMAGQFAKPRSD

SEQ ID NO: 16508 - protein, 19 aa, Artificial sequence
  Protein classification predicting sequence
QSAATLNLLRAFATGGYAA

SEQ ID NO: 16509 - protein, 20 aa, Artificial sequence
  Protein classification predicting sequence
RMGAENMRVKLPHLIRAVRR

SEQ ID NO: 16510 - protein, 7 aa, Artificial sequence
  Protein classification predicting sequence
GQIVTWV

SEQ ID NO: 16511 - protein, 9 aa, Artificial sequence
  Protein classification predicting sequence
DVHEQEGSH

SEQ ID NO: 16512 - protein, 22 aa, Artificial sequence
  Protein classification predicting sequence
MRAYLEKPRTTVGWKGLINDPD

SEQ ID NO: 16513 - protein, 11 aa, Artificial sequence
  Protein classification predicting sequence
GAIGARTTESQ

SEQ ID NO: 16514 - protein, 7 aa, Artificial sequence
  Protein classification predicting sequence
GPCSIHD

SEQ ID NO: 16515 - protein, 31 aa, Artificial sequence
  Protein classification predicting sequence
AFLLQGGDCAESFKEFNANNIRDTFRILLQM

SEQ ID NO: 16516 - protein, 9 aa, Artificial sequence
  Protein classification predicting sequence
ANPLGIKVS

SEQ ID NO: 16517 - protein, 11 aa, Artificial sequence
  Protein classification predicting sequence
AFLLQGGDCAE

SEQ ID NO: 16518 - protein, 7 aa, Artificial sequence
  Protein classification predicting sequence
DPMHGNT

SEQ ID NO: 16519 - protein, 9 aa, Artificial sequence
  Protein classification predicting sequence
RVDEALGFM

SEQ ID NO: 16520 - protein, 8 aa, Artificial sequence
  Protein classification predicting sequence
GERTRQLD

SEQ ID NO: 16521 - protein, 8 aa, Artificial sequence
  Protein classification predicting sequence
GFKNGTDG

SEQ ID NO: 16522 - protein, 8 aa, Artificial sequence
  Protein classification predicting sequence
GPCSVHDP

SEQ ID NO: 16523 - protein, 7 aa, Artificial sequence
  Protein classification predicting sequence
YFEKPRT

SEQ ID NO: 16524 - protein, 7 aa, Artificial sequence
  Protein classification predicting sequence
VGWKGLI

SEQ ID NO: 16525 - protein, 6 aa, Artificial sequence
  Protein classification predicting sequence
LEIVMR

SEQ ID NO: 16526 - protein, 25 aa, Artificial sequence
  Protein classification predicting sequence
VMRVYFEKPRTTVGWKGLINDPHMD

SEQ ID NO: 16527 - protein, 14 aa, Artificial sequence
  Protein classification predicting sequence
EKPRTTVGWKGLIN

SEQ ID NO: 16528 - protein, 8 aa, Artificial sequence
  Protein classification predicting sequence
SHGNSNKD

SEQ ID NO: 16529 - protein, 14 aa, Artificial sequence
  Protein classification predicting sequence
TSGNPYGHIIMRGG

SEQ ID NO: 16530 - protein, 7 aa, Artificial sequence
  Protein classification predicting sequence
DFSHGNC

SEQ ID NO: 16531 - protein, 8 aa, Artificial sequence
  Protein classification predicting sequence
ATEFLDMV

SEQ ID NO: 16532 - protein, 6 aa, Artificial sequence
  Protein classification predicting sequence
GWKGLI

SEQ ID NO: 16533 - protein, 7 aa, Artificial sequence
  Protein classification predicting sequence
YGKSITD

SEQ ID NO: 16534 - protein, 10 aa, Artificial sequence
  Protein classification predicting sequence
RLLVVIGPCS

SEQ ID NO: 16535 - protein, 20 aa, Artificial sequence
  Protein classification predicting sequence
YFEKPRTVVGWKGLISDPDL

SEQ ID NO: 16536 - protein, 43 aa, Artificial sequence
  Protein classification predicting sequence
GQFIADLISWGAIGARTTESQIHREMASALSCPVGFKNGTDGN

SEQ ID NO: 16537 - protein, 12 aa, Artificial sequence
  Protein classification predicting sequence
GQMTIYQTSGNP

SEQ ID NO: 16538 - protein, 11 aa, Artificial sequence
  Protein classification predicting sequence
GVMIESFLEEG

SEQ ID NO: 16539 - protein, 17 aa, Artificial sequence
  Protein classification predicting sequence
HVTDSRRRIEKILNGED

SEQ ID NO: 16540 - protein, 7 aa, Artificial sequence
  Protein classification predicting sequence
AAMEYAT

SEQ ID NO: 16541 - protein, 32 aa, Artificial sequence
  Protein classification predicting sequence
LLLQVNELGVPTATEFLDMVTGQFIADLISWG

SEQ ID NO: 16542 - protein, 9 aa, Artificial sequence
  Protein classification predicting sequence
IGARTTESQ

SEQ ID NO: 16543 - protein, 11 aa, Artificial sequence
  Protein classification predicting sequence
RASHMFLSPDK

SEQ ID NO: 16544 - protein, 35 aa, Artificial sequence
  Protein classification predicting sequence
DIAAACDTLHEFDLPEHLVVDFSHGNCQKQHRRQL

SEQ ID NO: 16545 - protein, 28 aa, Artificial sequence
  Protein classification predicting sequence
GQMTIYQTSGNPYGHIIMRGGKKPNYHA

SEQ ID NO: 16546 - protein, 7 aa, Artificial sequence
  Protein classification predicting sequence
RGVVVYL

SEQ ID NO: 16547 - protein, 7 aa, Artificial sequence
  Protein classification predicting sequence
QQLNMEF

SEQ ID NO: 16548 - protein, 15 aa, Artificial sequence
  Protein classification predicting sequence
VVYLETTIEKQLART

SEQ ID NO: 16549 - protein, 7 aa, Artificial sequence
  Protein classification predicting sequence
TDDQSAK

SEQ ID NO: 16550 - protein, 12 aa, Artificial sequence
  Protein classification predicting sequence
GPMGAGKSTIGR

SEQ ID NO: 16551 - protein, 10 aa, Artificial sequence
  Protein classification predicting sequence
YLETTIEKQL

SEQ ID NO: 16552 - protein, 7 aa, Artificial sequence
  Protein classification predicting sequence
EKRNIFL

SEQ ID NO: 16553 - protein, 6 aa, Artificial sequence
  Protein classification predicting sequence
GFRKRE

SEQ ID NO: 16554 - protein, 7 aa, Artificial sequence
  Protein classification predicting sequence
EGEEGFR

SEQ ID NO: 16555 - protein, 21 aa, Artificial sequence
  Protein classification predicting sequence
AEKRNIFLVGPMGAGKSTIGR

SEQ ID NO: 16556 - protein, 7 aa, Artificial sequence
  Protein classification predicting sequence
GKSTIGR

SEQ ID NO: 16557 - protein, 6 aa, Artificial sequence
  Protein classification predicting sequence
FDVEGE

SEQ ID NO: 16558 - protein, 11 aa, Artificial sequence
  Protein classification predicting sequence
RTGADVGWVFD

SEQ ID NO: 16559 - protein, 8 aa, Artificial sequence
  Protein classification predicting sequence
WVFDVEGE

SEQ ID NO: 16560 - protein, 7 aa, Artificial sequence
  Protein classification predicting sequence
RYNEIAF

SEQ ID NO: 16561 - protein, 8 aa, Artificial sequence
  Protein classification predicting sequence
RNRLSARG

SEQ ID NO: 16562 - protein, 22 aa, Artificial sequence
  Protein classification predicting sequence
TVRTDDQSAKVVANQIVKMLEE

SEQ ID NO: 16563 - protein, 8 aa, Artificial sequence
  Protein classification predicting sequence
VVYLETTI

SEQ ID NO: 16564 - protein, 8 aa, Artificial sequence
  Protein classification predicting sequence
GPMGAGKS

SEQ ID NO: 16565 - protein, 7 aa, Artificial sequence
  Protein classification predicting sequence
DSDQEIE

SEQ ID NO: 16566 - protein, 62 aa, Artificial sequence
  Protein classification predicting sequence
REEKVINELTEKQGIVLATGGGSVKSRETRNRLSARGVVVYLETTIEKQLARTQRDKKRPLL

SEQ ID NO: 16567 - protein, 8 aa, Artificial sequence
  Protein classification predicting sequence
RDKKRPLL

SEQ ID NO: 16568 - protein, 10 aa, Artificial sequence
  Protein classification predicting sequence
PPREVLEALA

SEQ ID NO: 16569 - protein, 13 aa, Artificial sequence
  Protein classification predicting sequence
GFRARETAALEAV

SEQ ID NO: 16570 - protein, 7 aa, Artificial sequence
  Protein classification predicting sequence
YLCAPVS

SEQ ID NO: 16571 - protein, 15 aa, Artificial sequence
  Protein classification predicting sequence
DLRPTLTGKPLSEEV

SEQ ID NO: 16572 - protein, 8 aa, Artificial sequence
  Protein classification predicting sequence
ILQHQIRA

SEQ ID NO: 16573 - protein, 10 aa, Artificial sequence
  Protein classification predicting sequence
PFENLNIHCG

SEQ ID NO: 16574 - protein, 9 aa, Artificial sequence
  Protein classification predicting sequence
RGGWCLQVN

SEQ ID NO: 16575 - protein, 18 aa, Artificial sequence
  Protein classification predicting sequence
PRTIEDFESMNTYLQTSP

SEQ ID NO: 16576 - protein, 7 aa, Artificial sequence
  Protein classification predicting sequence
SFCSLQT

SEQ ID NO: 16577 - protein, 7 aa, Artificial sequence
  Protein classification predicting sequence
GVHCLVG

SEQ ID NO: 16578 - protein, 7 aa, Artificial sequence
  Protein classification predicting sequence
RRFSYKD

SEQ ID NO: 16579 - protein, 9 aa, Artificial sequence
  Protein classification predicting sequence
IHCGESMEL

SEQ ID NO: 16580 - protein, 9 aa, Artificial sequence
  Protein classification predicting sequence
GFETTMLGG

SEQ ID NO: 16581 - protein, 7 aa, Artificial sequence
  Protein classification predicting sequence
SGKDQPQ

SEQ ID NO: 16582 - protein, 8 aa, Artificial sequence
  Protein classification predicting sequence
QMWEPLEL

SEQ ID NO: 16583 - protein, 5 aa, Artificial sequence
  Protein classification predicting sequence
SYQMW

SEQ ID NO: 16584 - protein, 19 aa, Artificial sequence
  Protein classification predicting sequence
WEPLELTSGKDQPQVPAIF

SEQ ID NO: 16585 - protein, 8 aa, Artificial sequence
  Protein classification predicting sequence
KSICSLQT

SEQ ID NO: 16586 - protein, 16 aa, Artificial sequence
  Protein classification predicting sequence
KIDENVAREIINHRSL

SEQ ID NO: 16587 - protein, 9 aa, Artificial sequence
  Protein classification predicting sequence
REIINHRSL

SEQ ID NO: 16588 - protein, 10 aa, Artificial sequence
  Protein classification predicting sequence
HPNIIRFKEV

SEQ ID NO: 16589 - protein, 7 aa, Artificial sequence
  Protein classification predicting sequence
LKICDFG

SEQ ID NO: 16590 - protein, 6 aa, Artificial sequence
  Protein classification predicting sequence
KPQNLL

SEQ ID NO: 16591 - protein, 16 aa, Artificial sequence
  Protein classification predicting sequence
AETLCGSPLYMAPEIL

SEQ ID NO: 16592 - protein, 12 aa, Artificial sequence
  Protein classification predicting sequence
KYNAKADLWSVG

SEQ ID NO: 16593 - protein, 6 aa, Artificial sequence
  Protein classification predicting sequence
YVVVEK

SEQ ID NO: 16594 - protein, 7 aa, Artificial sequence
  Protein classification predicting sequence
WMLEALL

SEQ ID NO: 16595 - protein, 7 aa, Artificial sequence
  Protein classification predicting sequence
GSFATVY

SEQ ID NO: 16596 - protein, 7 aa, Artificial sequence
  Protein classification predicting sequence
KPQNLLL

SEQ ID NO: 16597 - protein, 15 aa, Artificial sequence
  Protein classification predicting sequence
ATRSDVVYGFAEVKY

SEQ ID NO: 16598 - protein, 11 aa, Artificial sequence
  Protein classification predicting sequence
LSEEALVLYVK

SEQ ID NO: 16599 - protein, 11 aa, Artificial sequence
  Protein classification predicting sequence
AKADLWSVGAV

SEQ ID NO: 16600 - protein, 14 aa, Artificial sequence
  Protein classification predicting sequence
DYVVVEKRAVEVNA

SEQ ID NO: 16601 - protein, 6 aa, Artificial sequence
  Protein classification predicting sequence
DFYLVM

SEQ ID NO: 16602 - protein, 11 aa, Artificial sequence
  Protein classification predicting sequence
HRDIKPQNLLL

SEQ ID NO: 16603 - protein, 21 aa, Artificial sequence
  Protein classification predicting sequence
VGIYNLPILKIADFGFARFLP

SEQ ID NO: 16604 - protein, 19 aa, Artificial sequence
  Protein classification predicting sequence
TSLAETLCGSPLYMAPEIL

SEQ ID NO: 16605 - protein, 10 aa, Artificial sequence
  Protein classification predicting sequence
MEYCELGDLS

SEQ ID NO: 16606 - protein, 17 aa, Artificial sequence
  Protein classification predicting sequence
TLCGSPLYMAPEILRYE

SEQ ID NO: 16607 - protein, 8 aa, Artificial sequence
  Protein classification predicting sequence
DRALEMSR

SEQ ID NO: 16608 - protein, 7 aa, Artificial sequence
  Protein classification predicting sequence
SALKFLR

SEQ ID NO: 16609 - protein, 6 aa, Artificial sequence
  Protein classification predicting sequence
VGKPPF

SEQ ID NO: 16610 - protein, 21 aa, Artificial sequence
  Protein classification predicting sequence
AETLCGSPLYMAPEILRYEKY

SEQ ID NO: 16611 - protein, 11 aa, Artificial sequence
  Protein classification predicting sequence
AKADLWSVGTV

SEQ ID NO: 16612 - protein, 7 aa, Artificial sequence
  Protein classification predicting sequence
RTPIGSF

SEQ ID NO: 16613 - protein, 7 aa, Artificial sequence
  Protein classification predicting sequence
GGMENMS

SEQ ID NO: 16614 - protein, 8 aa, Artificial sequence
  Protein classification predicting sequence
NPSNPCGS

SEQ ID NO: 16615 - protein, 7 aa, Artificial sequence
  Protein classification predicting sequence
EHQLRRE

SEQ ID NO: 16616 - protein, 8 aa, Artificial sequence
  Protein classification predicting sequence
YLILEYAP

SEQ ID NO: 16617 - protein, 19 aa, Artificial sequence
  Protein classification predicting sequence
YLILEYAPRGELYKELQKS

SEQ ID NO: 16618 - protein, 20 aa, Artificial sequence
  Protein classification predicting sequence
PSLRRKTMCGTLDYLPPEMI

SEQ ID NO: 16619 - protein, 12 aa, Artificial sequence
  Protein classification predicting sequence
CGTLDYLPPEMI

SEQ ID NO: 16620 - protein, 6 aa, Artificial sequence
  Protein classification predicting sequence
WNELCH

SEQ ID NO: 16621 - protein, 8 aa, Artificial sequence
  Protein classification predicting sequence
QEVVVHKK

SEQ ID NO: 16622 - protein, 10 aa, Artificial sequence
  Protein classification predicting sequence
DPGPPPPSPL

SEQ ID NO: 16623 - protein, 15 aa, Artificial sequence
  Protein classification predicting sequence
ETRECIYYNANWELE

SEQ ID NO: 16624 - protein, 21 aa, Artificial sequence
  Protein classification predicting sequence
IELVKKGCWLDDFNCYDRQEC

SEQ ID NO: 16625 - protein, 12 aa, Artificial sequence
  Protein classification predicting sequence
LLAFWMYRHRKP

SEQ ID NO: 16626 - protein, 8 aa, Artificial sequence
  Protein classification predicting sequence
GLKPLQLL

SEQ ID NO: 16627 - protein, 12 aa, Artificial sequence
  Protein classification predicting sequence
KARGRFGCVWKA

SEQ ID NO: 16628 - protein, 12 aa, Artificial sequence
  Protein classification predicting sequence
LLNEYVAVKIFP

SEQ ID NO: 16629 - protein, 7 aa, Artificial sequence
  Protein classification predicting sequence
VAVKIFP

SEQ ID NO: 16630 - protein, 7 aa, Artificial sequence
  Protein classification predicting sequence
QDKQSWQ

SEQ ID NO: 16631 - protein, 10 aa, Artificial sequence
  Protein classification predicting sequence
TPGMKHENLL

SEQ ID NO: 16632 - protein, 21 aa, Artificial sequence
  Protein classification predicting sequence
ELWLITAFHDKGSLTDYLKGN

SEQ ID NO: 16633 - protein, 13 aa, Artificial sequence
  Protein classification predicting sequence
ETMARGLAYLHED

SEQ ID NO: 16634 - protein, 5 aa, Artificial sequence
  Protein classification predicting sequence
YLHED

SEQ ID NO: 16635 - protein, 7 aa, Artificial sequence
  Protein classification predicting sequence
YLHEDVP

SEQ ID NO: 16636 - protein, 8 aa, Artificial sequence
  Protein classification predicting sequence
KPAIAHRD

SEQ ID NO: 16637 - protein, 7 aa, Artificial sequence
  Protein classification predicting sequence
KSKNVLL

SEQ ID NO: 16638 - protein, 27 aa, Artificial sequence
  Protein classification predicting sequence
GDTHGQVGTRRYMAPEVLEGAINFQRD

SEQ ID NO: 16639 - protein, 13 aa, Artificial sequence
  Protein classification predicting sequence
SRCTAADGPVDEY

SEQ ID NO: 16640 - protein, 14 aa, Artificial sequence
  Protein classification predicting sequence
LPFEEEIGQHPSLE

SEQ ID NO: 16641 - protein, 37 aa, Artificial sequence
  Protein classification predicting sequence
KDHWLKHPGLAQLCVTIEECWDHDAEARLSAGCVEER

SEQ ID NO: 16642 - protein, 12 aa, Artificial sequence
  Protein classification predicting sequence
SVNGTTSDCLVS

SEQ ID NO: 16643 - protein, 6 aa, Artificial sequence
  Protein classification predicting sequence
WPVGLV

SEQ ID NO: 16644 - protein, 64 aa, Artificial sequence
  Protein classification predicting sequence
DAPRRTPLTARLLRDTGLNYTHLHVETPRNYKLRGDARDPRIPRGTMQRNLALRWLRETFPRNS

SEQ ID NO: 16645 - protein, 15 aa, Artificial sequence
  Protein classification predicting sequence
TPTYSRPVQKAELTR

SEQ ID NO: 16646 - protein, 12 aa, Artificial sequence
  Protein classification predicting sequence
RPFAIDMAGFAV

SEQ ID NO: 16647 - protein, 7 aa, Artificial sequence
  Protein classification predicting sequence
DMAGFAV

SEQ ID NO: 16648 - protein, 9 aa, Artificial sequence
  Protein classification predicting sequence
LVWHTRTEK

SEQ ID NO: 16649 - protein, 8 aa, Artificial sequence
  Protein classification predicting sequence
PRGVEQRN

SEQ ID NO: 16650 - protein, 9 aa, Artificial sequence
  Protein classification predicting sequence
VWPVGLVGG

SEQ ID NO: 16651 - protein, 18 aa, Artificial sequence
  Protein classification predicting sequence
LRSCQEVFDKLARVAQPG

SEQ ID NO: 16652 - protein, 8 aa, Artificial sequence
  Protein classification predicting sequence
LREMLDQS

SEQ ID NO: 16653 - protein, 17 aa, Artificial sequence
  Protein classification predicting sequence
QYFEFFPPSPRSVDQVK

SEQ ID NO: 16654 - protein, 13 aa, Artificial sequence
  Protein classification predicting sequence
SYPNNLLRNLARE

SEQ ID NO: 16655 - protein, 13 aa, Artificial sequence
  Protein classification predicting sequence
GTALVVPAFEIRR

SEQ ID NO: 16656 - protein, 39 aa, Artificial sequence
  Protein classification predicting sequence
DPWEPFYVAGGKVPTFDERFRQYGFNRISQACELHVAGF

SEQ ID NO: 16657 - protein, 14 aa, Artificial sequence
  Protein classification predicting sequence
NKILYRQFKQELKA

SEQ ID NO: 16658 - protein, 10 aa, Artificial sequence
  Protein classification predicting sequence
FTLREHSNCS

SEQ ID NO: 16659 - protein, 28 aa, Artificial sequence
  Protein classification predicting sequence
LYGDIIRQDFLDTYNNLTLKTIMAFRWV

SEQ ID NO: 16660 - protein, 12 aa, Artificial sequence
  Protein classification predicting sequence
GEELLSLSLASL

SEQ ID NO: 16661 - protein, 12 aa, Artificial sequence
  Protein classification predicting sequence
PLLYLGRVHWRV

SEQ ID NO: 16662 - protein, 25 aa, Artificial sequence
  Protein classification predicting sequence
CVKLAGATHYPLDRCCYGKFLLTSH

SEQ ID NO: 16663 - protein, 14 aa, Artificial sequence
  Protein classification predicting sequence
LPLEDVFVGVSARR

SEQ ID NO: 16664 - protein, 6 aa, Artificial sequence
  Protein classification predicting sequence
GLAYLH

SEQ ID NO: 16665 - protein, 7 aa, Artificial sequence
  Protein classification predicting sequence
NILLDEE

SEQ ID NO: 16666 - protein, 8 aa, Artificial sequence
  Protein classification predicting sequence
EVFCTGTA

SEQ ID NO: 16667 - protein, 7 aa, Artificial sequence
  Protein classification predicting sequence
QVLWLYG

SEQ ID NO: 16668 - protein, 6 aa, Artificial sequence
  Protein classification predicting sequence
FTDHML

SEQ ID NO: 16669 - protein, 19 aa, Artificial sequence
  Protein classification predicting sequence
EWVPYSTSASLYIRPTFIG

SEQ ID NO: 16670 - protein, 7 aa, Artificial sequence
  Protein classification predicting sequence
WKGGTGD

SEQ ID NO: 16671 - protein, 15 aa, Artificial sequence
  Protein classification predicting sequence
ITEVGTMNLFLYWIN

SEQ ID NO: 16672 - protein, 7 aa, Artificial sequence
  Protein classification predicting sequence
TEVGTMN

SEQ ID NO: 16673 - protein, 15 aa, Artificial sequence
  Protein classification predicting sequence
ELATPPLDGIILPGV

SEQ ID NO: 16674 - protein, 10 aa, Artificial sequence
  Protein classification predicting sequence
LTEVGTMNIF

SEQ ID NO: 16675 - protein, 11 aa, Artificial sequence
  Protein classification predicting sequence
EMFGSGTACVV

SEQ ID NO: 16676 - protein, 9 aa, Artificial sequence
  Protein classification predicting sequence
ETVTEDAHT

SEQ ID NO: 16677 - protein, 7 aa, Artificial sequence
  Protein classification predicting sequence
DWPKDKL

SEQ ID NO: 16678 - protein, 8 aa, Artificial sequence
  Protein classification predicting sequence
FFSPDPFE

SEQ ID NO: 16679 - protein, 11 aa, Artificial sequence
  Protein classification predicting sequence
LFYGLVQDGND

SEQ ID NO: 16680 - protein, 9 aa, Artificial sequence
  Protein classification predicting sequence
YETVLAWYI

SEQ ID NO: 16681 - protein, 7 aa, Artificial sequence
  Protein classification predicting sequence
WPTVDIF

SEQ ID NO: 16682 - protein, 9 aa, Artificial sequence
  Protein classification predicting sequence
VSCRYIWWR

SEQ ID NO: 16683 - protein, 8 aa, Artificial sequence
  Protein classification predicting sequence
LVLGYFQV

SEQ ID NO: 16684 - protein, 8 aa, Artificial sequence
  Protein classification predicting sequence
DCDHIPTR

SEQ ID NO: 16685 - protein, 7 aa, Artificial sequence
  Protein classification predicting sequence
PTRSFLQ

SEQ ID NO: 16686 - protein, 6 aa, Artificial sequence
  Protein classification predicting sequence
GKFNVT

SEQ ID NO: 16687 - protein, 7 aa, Artificial sequence
  Protein classification predicting sequence
PGSESHA

SEQ ID NO: 16688 - protein, 8 aa, Artificial sequence
  Protein classification predicting sequence
TLSAVQIL

SEQ ID NO: 16689 - protein, 12 aa, Artificial sequence
  Protein classification predicting sequence
KLPDVCYSWWVL

SEQ ID NO: 16690 - protein, 7 aa, Artificial sequence
  Protein classification predicting sequence
CFMHGPT

SEQ ID NO: 16691 - protein, 6 aa, Artificial sequence
  Protein classification predicting sequence
HIWHPY

SEQ ID NO: 16692 - protein, 7 aa, Artificial sequence
  Protein classification predicting sequence
AMSVCDP

SEQ ID NO: 16693 - protein, 5 aa, Artificial sequence
  Protein classification predicting sequence
IWHPY

SEQ ID NO: 16694 - protein, 6 aa, Artificial sequence
  Protein classification predicting sequence
HVMFGG

SEQ ID NO: 16695 - protein, 12 aa, Artificial sequence
  Protein classification predicting sequence
HVMFGGLTHEPA

SEQ ID NO: 16696 - protein, 8 aa, Artificial sequence
  Protein classification predicting sequence
VQGAGGMR

SEQ ID NO: 16697 - protein, 11 aa, Artificial sequence
  Protein classification predicting sequence
VQGAGGMRFHD

SEQ ID NO: 16698 - protein, 11 aa, Artificial sequence
  Protein classification predicting sequence
DEIATGFGRTG

SEQ ID NO: 16699 - protein, 13 aa, Artificial sequence
  Protein classification predicting sequence
PDIMCVGKALTGG

SEQ ID NO: 16700 - protein, 19 aa, Artificial sequence
  Protein classification predicting sequence
GALMHGPTFMANPLACAVS

SEQ ID NO: 16701 - protein, 7 aa, Artificial sequence
  Protein classification predicting sequence
MHGPTFM

SEQ ID NO: 16702 - protein, 6 aa, Artificial sequence
  Protein classification predicting sequence
HGYNHP

SEQ ID NO: 16703 - protein, 10 aa, Artificial sequence
  Protein classification predicting sequence
EPVVQGAGGM

SEQ ID NO: 16704 - protein, 7 aa, Artificial sequence
  Protein classification predicting sequence
KMALQYW

SEQ ID NO: 16705 - protein, 23 aa, Artificial sequence
  Protein classification predicting sequence
LLIADEIATGFGRTGKLFACEHA

SEQ ID NO: 16706 - protein, 7 aa, Artificial sequence
  Protein classification predicting sequence
GKALTGG

SEQ ID NO: 16707 - protein, 10 aa, Artificial sequence
  Protein classification predicting sequence
MTLSATLTTR

SEQ ID NO: 16708 - protein, 8 aa, Artificial sequence
  Protein classification predicting sequence
TLLSIKTG

SEQ ID NO: 16709 - protein, 6 aa, Artificial sequence
  Protein classification predicting sequence
VCSGGI

SEQ ID NO: 16710 - protein, 12 aa, Artificial sequence
  Protein classification predicting sequence
NIITTRTYQERL

SEQ ID NO: 16711 - protein, 21 aa, Artificial sequence
  Protein classification predicting sequence
TQAMCFMAGANSIFYGCKLLT

SEQ ID NO: 16712 - protein, 13 aa, Artificial sequence
  Protein classification predicting sequence
PINMLVKVKGTPL

SEQ ID NO: 16713 - protein, 17 aa, Artificial sequence
  Protein classification predicting sequence
GANSIFYGCKLLTTPNP

SEQ ID NO: 16714 - protein, 10 aa, Artificial sequence
  Protein classification predicting sequence
LVEAAKQTAK

SEQ ID NO: 16715 - protein, 11 aa, Artificial sequence
  Protein classification predicting sequence
GATEFCIVAAV

SEQ ID NO: 16716 - protein, 7 aa, Artificial sequence
  Protein classification predicting sequence
GPDERLM

SEQ ID NO: 16717 - protein, 14 aa, Artificial sequence
  Protein classification predicting sequence
GVHRYNHNLETARS

SEQ ID NO: 16718 - protein, 12 aa, Artificial sequence
  Protein classification predicting sequence
IVGNYLTTLGRP

SEQ ID NO: 16719 - protein, 7 aa, Artificial sequence
  Protein classification predicting sequence
CMTLGTL

SEQ ID NO: 16720 - protein, 13 aa, Artificial sequence
  Protein classification predicting sequence
QLFRKLGLNPQQT

SEQ ID NO: 16721 - protein, 8 aa, Artificial sequence
  Protein classification predicting sequence
RFCMGAAW

SEQ ID NO: 16722 - protein, 7 aa, Artificial sequence
  Protein classification predicting sequence
YNHNLDT

SEQ ID NO: 16723 - protein, 9 aa, Artificial sequence
  Protein classification predicting sequence
SYVRLSAGR

SEQ ID NO: 16724 - protein, 7 aa, Artificial sequence
  Protein classification predicting sequence
VGNYLTT

SEQ ID NO: 16725 - protein, 24 aa, Artificial sequence
  Protein classification predicting sequence
EGIISLKTGGCPEDCHFCSQSGLF

SEQ ID NO: 16726 - protein, 7 aa, Artificial sequence
  Protein classification predicting sequence
ETCMTLG

SEQ ID NO: 16727 - protein, 17 aa, Artificial sequence
  Protein classification predicting sequence
AGIKVCSGGIVGLGETV

SEQ ID NO: 16728 - protein, 18 aa, Artificial sequence
  Protein classification predicting sequence
AGLDYYNHNLDTSPEFYG

SEQ ID NO: 16729 - protein, 25 aa, Artificial sequence
  Protein classification predicting sequence
PPESVPINMLVKVKGTPLADNDDVD

SEQ ID NO: 16730 - protein, 15 aa, Artificial sequence
  Protein classification predicting sequence
FDFIRTIAVARIMMP

SEQ ID NO: 16731 - protein, 8 aa, Artificial sequence
  Protein classification predicting sequence
LNPRPGTP

SEQ ID NO: 16732 - protein, 6 aa, Artificial sequence
  Protein classification predicting sequence
GSTRFC

SEQ ID NO: 16733 - protein, 7 aa, Artificial sequence
  Protein classification predicting sequence
LLFSSGY

SEQ ID NO: 16734 - protein, 7 aa, Artificial sequence
  Protein classification predicting sequence
AIRPPTV

SEQ ID NO: 16735 - protein, 9 aa, Artificial sequence
  Protein classification predicting sequence
RPPTVPAGT

SEQ ID NO: 16736 - protein, 6 aa, Artificial sequence
  Protein classification predicting sequence
GDWWLA

SEQ ID NO: 16737 - protein, 6 aa, Artificial sequence
  Protein classification predicting sequence
KHYKIR

SEQ ID NO: 16738 - protein, 5 aa, Artificial sequence
  Protein classification predicting sequence
WEIPR

SEQ ID NO: 16739 - protein, 9 aa, Artificial sequence
  Protein classification predicting sequence
GTMSPEAFL

SEQ ID NO: 16740 - protein, 7 aa, Artificial sequence
  Protein classification predicting sequence
DFYTATE

SEQ ID NO: 16741 - protein, 22 aa, Artificial sequence
  Protein classification predicting sequence
KHYKIRSLDNGGYYISPRITFP

SEQ ID NO: 16742 - protein, 9 aa, Artificial sequence
  Protein classification predicting sequence
AQVAEGMAY

SEQ ID NO: 16743 - protein, 12 aa, Artificial sequence
  Protein classification predicting sequence
CCIADLGLAVKF

SEQ ID NO: 16744 - protein, 8 aa, Artificial sequence
  Protein classification predicting sequence
RVGTKRYM

SEQ ID NO: 16745 - protein, 12 aa, Artificial sequence
  Protein classification predicting sequence
VPSDPSYEDMRE

SEQ ID NO: 16746 - protein, 26 aa, Artificial sequence
  Protein classification predicting sequence
QSQSSGSGSGLPLLVQRTIAKQIQMV

SEQ ID NO: 16747 - protein, 79 aa, Artificial sequence
  Protein classification predicting sequence
GKGRYGEVWMGKWRGEKVAVKVFFTTEEASWFRETEIYQTVLMRHENILGFIAADIKGTGSWTQLYLITDYHENGSLYD

SEQ ID NO: 16748 - protein, 7 aa, Artificial sequence
  Protein classification predicting sequence
LSYYEYD

SEQ ID NO: 16749 - protein, 8 aa, Artificial sequence
  Protein classification predicting sequence
YHQHNSAG

SEQ ID NO: 16750 - protein, 6 aa, Artificial sequence
  Protein classification predicting sequence
GQFGVV

SEQ ID NO: 16751 - protein, 7 aa, Artificial sequence
  Protein classification predicting sequence
VKFYGVC

SEQ ID NO: 16752 - protein, 7 aa, Artificial sequence
  Protein classification predicting sequence
SDVWAFG

SEQ ID NO: 16753 - protein, 6 aa, Artificial sequence
  Protein classification predicting sequence
SQQKKK

SEQ ID NO: 16754 - protein, 6 aa, Artificial sequence
  Protein classification predicting sequence
KMIKEG

SEQ ID NO: 16755 - protein, 7 aa, Artificial sequence
  Protein classification predicting sequence
LAFCDFC

SEQ ID NO: 16756 - protein, 20 aa, Artificial sequence
  Protein classification predicting sequence
LTVKIGDFGLATVKSRWSGS

SEQ ID NO: 16757 - protein, 8 aa, Artificial sequence
  Protein classification predicting sequence
RSASEPSL

SEQ ID NO: 16758 - protein, 5 aa, Artificial sequence
  Protein classification predicting sequence
WSCGV

SEQ ID NO: 16759 - protein, 8 aa, Artificial sequence
  Protein classification predicting sequence
LVQLYGVC

SEQ ID NO: 16760 - protein, 6 aa, Artificial sequence
  Protein classification predicting sequence
KFPIKW

SEQ ID NO: 16761 - protein, 6 aa, Artificial sequence
  Protein classification predicting sequence
GVLMWE

SEQ ID NO: 16762 - protein, 8 aa, Artificial sequence
  Protein classification predicting sequence
HEKLVQLY

SEQ ID NO: 16763 - protein, 6 aa, Artificial sequence
  Protein classification predicting sequence
IITEYM

SEQ ID NO: 16764 - protein, 7 aa, Artificial sequence
  Protein classification predicting sequence
MEYLESK

SEQ ID NO: 16765 - protein, 9 aa, Artificial sequence
  Protein classification predicting sequence
HRDLAARNC

SEQ ID NO: 16766 - protein, 15 aa, Artificial sequence
  Protein classification predicting sequence
SSKSDVWSFGVLMWE

SEQ ID NO: 16767 - protein, 6 aa, Artificial sequence
  Protein classification predicting sequence
EERPTF

SEQ ID NO: 16768 - protein, 14 aa, Artificial sequence
  Protein classification predicting sequence
LLIINPGSTSTKIG

SEQ ID NO: 16769 - protein, 10 aa, Artificial sequence
  Protein classification predicting sequence
INPGSTSTKI

SEQ ID NO: 16770 - protein, 8 aa, Artificial sequence
  Protein classification predicting sequence
WWLKTAYL

SEQ ID NO: 16771 - protein, 13 aa, Artificial sequence
  Protein classification predicting sequence
QGQLRFAAKLIEG

SEQ ID NO: 16772 - protein, 14 aa, Artificial sequence
  Protein classification predicting sequence
NSGNRWFDKTLQFI

SEQ ID NO: 16773 - protein, 13 aa, Artificial sequence
  Protein classification predicting sequence
EYTKKPELVRSPM

SEQ ID NO: 16774 - protein, 12 aa, Artificial sequence
  Protein classification predicting sequence
CATYESASLRMF

SEQ ID NO: 16775 - protein, 9 aa, Artificial sequence
  Protein classification predicting sequence
LGRTDTIRS

SEQ ID NO: 16776 - protein, 17 aa, Artificial sequence
  Protein classification predicting sequence
DRHLLGLKLQAIEDLVS

SEQ ID NO: 16777 - protein, 12 aa, Artificial sequence
  Protein classification predicting sequence
AHYLEKALLDMR

SEQ ID NO: 16778 - protein, 7 aa, Artificial sequence
  Protein classification predicting sequence
YQVAKGM

SEQ ID NO: 16779 - protein, 6 aa, Artificial sequence
  Protein classification predicting sequence
LPIRWM

SEQ ID NO: 16780 - protein, 9 aa, Artificial sequence
  Protein classification predicting sequence
TGYSLLATA

SEQ ID NO: 16781 - protein, 12 aa, Artificial sequence
  Protein classification predicting sequence
DFIFVDADKDNY

SEQ ID NO: 16782 - protein, 21 aa, Artificial sequence
  Protein classification predicting sequence
RKYVRYYRDFVLELNKALAAD

SEQ ID NO: 16783 - protein, 8 aa, Artificial sequence
  Protein classification predicting sequence
EVGHKSLL

SEQ ID NO: 16784 - protein, 14 aa, Artificial sequence
  Protein classification predicting sequence
MTTSADEGQFLNML

SEQ ID NO: 16785 - protein, 6 aa, Artificial sequence
  Protein classification predicting sequence
TMEIGV

SEQ ID NO: 16786 - protein, 8 aa, Artificial sequence
  Protein classification predicting sequence
LNKALAAD

SEQ ID NO: 16787 - protein, 10 aa, Artificial sequence
  Protein classification predicting sequence
EICQLPVGDG

SEQ ID NO: 16788 - protein, 17 aa, Artificial sequence
  Protein classification predicting sequence
MTTSADEGQFLNMLLKL

SEQ ID NO: 16789 - protein, 7 aa, Artificial sequence
  Protein classification predicting sequence
NYHKRLI

SEQ ID NO: 16790 - protein, 13 aa, Artificial sequence
  Protein classification predicting sequence
KLINAKNTMEIGV

SEQ ID NO: 16791 - protein, 16 aa, Artificial sequence
  Protein classification predicting sequence
EIGLPVIEKAGLAHKI

SEQ ID NO: 16792 - protein, 12 aa, Artificial sequence
  Protein classification predicting sequence
LPVGDGITLCRR

SEQ ID NO: 16793 - protein, 7 aa, Artificial sequence
  Protein classification predicting sequence
TAKHPWN

SEQ ID NO: 16794 - protein, 11 aa, Artificial sequence
  Protein classification predicting sequence
TGYSLLATALA

SEQ ID NO: 16795 - protein, 22 aa, Artificial sequence
  Protein classification predicting sequence
LVKVGGLIGYDNTLWNGSVVAP

SEQ ID NO: 16796 - protein, 13 aa, Artificial sequence
  Protein classification predicting sequence
LPVGDGITLCRRI

SEQ ID NO: 16797 - protein, 10 aa, Artificial sequence
  Protein classification predicting sequence
IEKAGLAHKI

SEQ ID NO: 16798 - protein, 11 aa, Artificial sequence
  Protein classification predicting sequence
MTTSADEGQFL

SEQ ID NO: 16799 - protein, 15 aa, Artificial sequence
  Protein classification predicting sequence
ALPDDGKILAMDINR

SEQ ID NO: 16800 - protein, 7 aa, Artificial sequence
  Protein classification predicting sequence
NYEIGLP

SEQ ID NO: 16801 - protein, 8 aa, Artificial sequence
  Protein classification predicting sequence
KAGVAHKI

SEQ ID NO: 16802 - protein, 9 aa, Artificial sequence
  Protein classification predicting sequence
AKNTMEIGV

SEQ ID NO: 16803 - protein, 19 aa, Artificial sequence
  Protein classification predicting sequence
IGYDNTLWNGSVVAPPDAP

SEQ ID NO: 16804 - protein, 6 aa, Artificial sequence
  Protein classification predicting sequence
LQSDAL

SEQ ID NO: 16805 - protein, 11 aa, Artificial sequence
  Protein classification predicting sequence
TSADEGQFLNM

SEQ ID NO: 16806 - protein, 9 aa, Artificial sequence
  Protein classification predicting sequence
YSLLATALA

SEQ ID NO: 16807 - protein, 7 aa, Artificial sequence
  Protein classification predicting sequence
DAPMRKY

SEQ ID NO: 16808 - protein, 7 aa, Artificial sequence
  Protein classification predicting sequence
RDFVLEL

SEQ ID NO: 16809 - protein, 10 aa, Artificial sequence
  Protein classification predicting sequence
DGKILAMDIN

SEQ ID NO: 16810 - protein, 15 aa, Artificial sequence
  Protein classification predicting sequence
HQEVGHKSLLQSDAL

SEQ ID NO: 16811 - protein, 9 aa, Artificial sequence
  Protein classification predicting sequence
FVDADKDNY

SEQ ID NO: 16812 - protein, 11 aa, Artificial sequence
  Protein classification predicting sequence
NYHKRLIDLVK

SEQ ID NO: 16813 - protein, 11 aa, Artificial sequence
  Protein classification predicting sequence
RKYVRYYRDFV

SEQ ID NO: 16814 - protein, 7 aa, Artificial sequence
  Protein classification predicting sequence
EDGKYHG

SEQ ID NO: 16815 - protein, 6 aa, Artificial sequence
  Protein classification predicting sequence
FVDADK

SEQ ID NO: 16816 - protein, 6 aa, Artificial sequence
  Protein classification predicting sequence
YDNTLW

SEQ ID NO: 16817 - protein, 9 aa, Artificial sequence
  Protein classification predicting sequence
EGPALPVLD

SEQ ID NO: 16818 - protein, 5 aa, Artificial sequence
  Protein classification predicting sequence
RIEIC

SEQ ID NO: 16819 - protein, 8 aa, Artificial sequence
  Protein classification predicting sequence
LPVGDGIT

SEQ ID NO: 16820 - protein, 8 aa, Artificial sequence
  Protein classification predicting sequence
DINRENYE

SEQ ID NO: 16821 - protein, 12 aa, Artificial sequence
  Protein classification predicting sequence
DINRENYEIGLP

SEQ ID NO: 16822 - protein, 11 aa, Artificial sequence
  Protein classification predicting sequence
IGYDNTLWNGS

SEQ ID NO: 16823 - protein, 26 aa, Artificial sequence
  Protein classification predicting sequence
IPAAGLGTRFLPATKALAKEMLPIVD

SEQ ID NO: 16824 - protein, 12 aa, Artificial sequence
  Protein classification predicting sequence
PRGLGDAVLQAK

SEQ ID NO: 16825 - protein, 14 aa, Artificial sequence
  Protein classification predicting sequence
PFVVMLGDDLMDIT

SEQ ID NO: 16826 - protein, 7 aa, Artificial sequence
  Protein classification predicting sequence
ASTIAVM

SEQ ID NO: 16827 - protein, 9 aa, Artificial sequence
  Protein classification predicting sequence
EDVSSYGVI

SEQ ID NO: 16828 - protein, 14 aa, Artificial sequence
  Protein classification predicting sequence
LAIIGRYLLTPEIF

SEQ ID NO: 16829 - protein, 13 aa, Artificial sequence
  Protein classification predicting sequence
QLTDAIDTLNKTQ

SEQ ID NO: 16830 - protein, 8 aa, Artificial sequence
  Protein classification predicting sequence
RYDVGDKF

SEQ ID NO: 16831 - protein, 10 aa, Artificial sequence
  Protein classification predicting sequence
FMKTSIDYAL

SEQ ID NO: 16832 - protein, 43 aa, Artificial sequence
  Protein classification predicting sequence
IPAAGLGTRFLPATKALAKEMLPIVDKPTIQFIVEEALKSGIE

SEQ ID NO: 16833 - protein, 18 aa, Artificial sequence
  Protein classification predicting sequence
KRSIEDHFDSNFELEYNL

SEQ ID NO: 16834 - protein, 6 aa, Artificial sequence
  Protein classification predicting sequence
LHFIRQ

SEQ ID NO: 16835 - protein, 8 aa, Artificial sequence
  Protein classification predicting sequence
YGVIAPQG

SEQ ID NO: 16836 - protein, 22 aa, Artificial sequence
  Protein classification predicting sequence
QLTDAIDTLNKTQRVFAREFKG

SEQ ID NO: 16837 - protein, 14 aa, Artificial sequence
  Protein classification predicting sequence
DYALKHPQVKDDLK

SEQ ID NO: 16838 - protein, 9 aa, Artificial sequence
  Protein classification predicting sequence
QVHHAVCDG

SEQ ID NO: 16839 - protein, 7 aa, Artificial sequence
  Protein classification predicting sequence
KFYPAFI

SEQ ID NO: 16840 - protein, 8 aa, Artificial sequence
  Protein classification predicting sequence
TETFSSLW

SEQ ID NO: 16841 - protein, 6 aa, Artificial sequence
  Protein classification predicting sequence
PEFRMA

SEQ ID NO: 16842 - protein, 7 aa, Artificial sequence
  Protein classification predicting sequence
FAPVFTM

SEQ ID NO: 16843 - protein, 11 aa, Artificial sequence
  Protein classification predicting sequence
QVHHAVCDGFH

SEQ ID NO: 16844 - protein, 7 aa, Artificial sequence
  Protein classification predicting sequence
HHAVCDG

SEQ ID NO: 16845 - protein, 13 aa, Artificial sequence
  Protein classification predicting sequence
YSYYSGYYHGHSF

SEQ ID NO: 16846 - protein, 11 aa, Artificial sequence
  Protein classification predicting sequence
IGSFCSIGSGA

SEQ ID NO: 16847 - protein, 10 aa, Artificial sequence
  Protein classification predicting sequence
FIMAGNQGHR

SEQ ID NO: 16848 - protein, 7 aa, Artificial sequence
  Protein classification predicting sequence
PDRDDVD

SEQ ID NO: 16849 - protein, 10 aa, Artificial sequence
  Protein classification predicting sequence
HYFNQQTTYS

SEQ ID NO: 16850 - protein, 11 aa, Artificial sequence
  Protein classification predicting sequence
NKVFRTGINSE

SEQ ID NO: 16851 - protein, 8 aa, Artificial sequence
  Protein classification predicting sequence
PLYTVFNK

SEQ ID NO: 16852 - protein, 12 aa, Artificial sequence
  Protein classification predicting sequence
EMFPKKPIPENT

SEQ ID NO: 16853 - protein, 21 aa, Artificial sequence
  Protein classification predicting sequence
PISMIPWIDFSSFNLNIGNNS

SEQ ID NO: 16854 - protein, 13 aa, Artificial sequence
  Protein classification predicting sequence
FLLPIITIGKFYS

SEQ ID NO: 16855 - protein, 7 aa, Artificial sequence
  Protein classification predicting sequence
PCYTVFH

SEQ ID NO: 16856 - protein, 6 aa, Artificial sequence
  Protein classification predicting sequence
IQVHHA

SEQ ID NO: 16857 - protein, 17 aa, Artificial sequence
  Protein classification predicting sequence
EFRMAMKDGELVIWDSV

SEQ ID NO: 16858 - protein, 13 aa, Artificial sequence
  Protein classification predicting sequence
FHEQTETFSSLWS

SEQ ID NO: 16859 - protein, 19 aa, Artificial sequence
  Protein classification predicting sequence
FIENMFFVSANPWVSFTSF

SEQ ID NO: 16860 - protein, 8 aa, Artificial sequence
  Protein classification predicting sequence
NFFAPVFT

SEQ ID NO: 16861 - protein, 30 aa, Artificial sequence
  Protein classification predicting sequence
GKYYTQGDKVLMPLAIQVHHAVCDGFHVGR

SEQ ID NO: 16862 - protein, 6 aa, Artificial sequence
  Protein classification predicting sequence
QQYCDE

SEQ ID NO: 16863 - protein, 15 aa, Artificial sequence
  Protein classification predicting sequence
GAFGEVRLVQKKDTG

SEQ ID NO: 16864 - protein, 15 aa, Artificial sequence
  Protein classification predicting sequence
VIGKGAFGEVRLVQK

SEQ ID NO: 16865 - protein, 7 aa, Artificial sequence
  Protein classification predicting sequence
CDWWSLG

SEQ ID NO: 16866 - protein, 10 aa, Artificial sequence
  Protein classification predicting sequence
CDWWSLGAIM

SEQ ID NO: 16867 - protein, 9 aa, Artificial sequence
  Protein classification predicting sequence
SEERKNRQL

SEQ ID NO: 16868 - protein, 8 aa, Artificial sequence
  Protein classification predicting sequence
TRFYMAEC

SEQ ID NO: 16869 - protein, 41 aa, Artificial sequence
  Protein classification predicting sequence
IHKLGFIHRDIKPDNILIDIRGHIKLSDFGLSTGFHKTHDS

SEQ ID NO: 16870 - protein, 16 aa, Artificial sequence
  Protein classification predicting sequence
DTGKIYAMKTLLKSEM

SEQ ID NO: 16871 - protein, 7 aa, Artificial sequence
  Protein classification predicting sequence
EDVTRFY

SEQ ID NO: 16872 - protein, 17 aa, Artificial sequence
  Protein classification predicting sequence
MAYSTVGTPDYIAPEIF

SEQ ID NO: 16873 - protein, 7 aa, Artificial sequence
  Protein classification predicting sequence
HPFFRGV

SEQ ID NO: 16874 - protein, 19 aa, Artificial sequence
  Protein classification predicting sequence
YLYLIMEFLPGGDLMTMLI

SEQ ID NO: 16875 - protein, 7 aa, Artificial sequence
  Protein classification predicting sequence
TAIREIS

SEQ ID NO: 16876 - protein, 7 aa, Artificial sequence
  Protein classification predicting sequence
DLKKYMD

SEQ ID NO: 16877 - protein, 10 aa, Artificial sequence
  Protein classification predicting sequence
EVVTLWYRSP

SEQ ID NO: 16878 - protein, 6 aa, Artificial sequence
  Protein classification predicting sequence
WSVGCI

SEQ ID NO: 16879 - protein, 6 aa, Artificial sequence
  Protein classification predicting sequence
GEGSYG

SEQ ID NO: 16880 - protein, 6 aa, Artificial sequence
  Protein classification predicting sequence
GCIFAE

SEQ ID NO: 16881 - protein, 8 aa, Artificial sequence
  Protein classification predicting sequence
RISAKAAL

SEQ ID NO: 16882 - protein, 8 aa, Artificial sequence
  Protein classification predicting sequence
EKEGFPIT

SEQ ID NO: 16883 - protein, 7 aa, Artificial sequence
  Protein classification predicting sequence
ILHRDLK

SEQ ID NO: 16884 - protein, 13 aa, Artificial sequence
  Protein classification predicting sequence
TPVVVTLWYRAPE

SEQ ID NO: 16885 - protein, 27 aa, Artificial sequence
  Protein classification predicting sequence
PPEGGLGYSQLGDDDLKETGFHLTTTN

SEQ ID NO: 16886 - protein, 6 aa, Artificial sequence
  Protein classification predicting sequence
YSTPVD

SEQ ID NO: 16887 - protein, 10 aa, Artificial sequence
  Protein classification predicting sequence
WSVGCIFAEM

SEQ ID NO: 16888 - protein, 21 aa, Artificial sequence
  Protein classification predicting sequence
YTKIEKIGEGTYGVVYKGRHK

SEQ ID NO: 16889 - protein, 13 aa, Artificial sequence
  Protein classification predicting sequence
TGQVVAMKKIRLE

SEQ ID NO: 16890 - protein, 9 aa, Artificial sequence
  Protein classification predicting sequence
VAMKKIRLE

SEQ ID NO: 16891 - protein, 21 aa, Artificial sequence
  Protein classification predicting sequence
ATKKPLFHGDSEIDQLFRIFR

SEQ ID NO: 16892 - protein, 6 aa, Artificial sequence
  Protein classification predicting sequence
LYLVFE

SEQ ID NO: 16893 - protein, 6 aa, Artificial sequence
  Protein classification predicting sequence
FLYQIL

SEQ ID NO: 16894 - protein, 12 aa, Artificial sequence
  Protein classification predicting sequence
KLADFGLARAFG

SEQ ID NO: 16895 - protein, 16 aa, Artificial sequence
  Protein classification predicting sequence
KLADFGLARAFGIPVR

SEQ ID NO: 16896 - protein, 15 aa, Artificial sequence
  Protein classification predicting sequence
KVEKIGEGTYGVVYK

SEQ ID NO: 16897 - protein, 13 aa, Artificial sequence
  Protein classification predicting sequence
EKIGEGTYGVVYK

SEQ ID NO: 16898 - protein, 16 aa, Artificial sequence
  Protein classification predicting sequence
PLFPGDSEIDELFKIF

SEQ ID NO: 16899 - protein, 8 aa, Artificial sequence
  Protein classification predicting sequence
KKYLDSIP

SEQ ID NO: 16900 - protein, 16 aa, Artificial sequence
  Protein classification predicting sequence
KGVIKLADFGLARAFG

SEQ ID NO: 16901 - protein, 15 aa, Artificial sequence
  Protein classification predicting sequence
HKLYLVFEFLDLDLK

SEQ ID NO: 16902 - protein, 9 aa, Artificial sequence
  Protein classification predicting sequence
DFGLARAFG

SEQ ID NO: 16903 - protein, 7 aa, Artificial sequence
  Protein classification predicting sequence
LYQILRG

SEQ ID NO: 16904 - protein, 7 aa, Artificial sequence
  Protein classification predicting sequence
DLLSKML

SEQ ID NO: 16905 - protein, 7 aa, Artificial sequence
  Protein classification predicting sequence
LFPGDSE

SEQ ID NO: 16906 - protein, 7 aa, Artificial sequence
  Protein classification predicting sequence
IADLGLA

SEQ ID NO: 16907 - protein, 15 aa, Artificial sequence
  Protein classification predicting sequence
EGVPSTAIREISLLK

SEQ ID NO: 16908 - protein, 7 aa, Artificial sequence
  Protein classification predicting sequence
AMEHPYF

SEQ ID NO: 16909 - protein, 7 aa, Artificial sequence
  Protein classification predicting sequence
EIVALKR

SEQ ID NO: 16910 - protein, 7 aa, Artificial sequence
  Protein classification predicting sequence
DQDLKKY

SEQ ID NO: 16911 - protein, 7 aa, Artificial sequence
  Protein classification predicting sequence
DLKKYLD

SEQ ID NO: 16912 - protein, 6 aa, Artificial sequence
  Protein classification predicting sequence
FMYQLL

SEQ ID NO: 16913 - protein, 13 aa, Artificial sequence
  Protein classification predicting sequence
VLHRDLKPQNLLI

SEQ ID NO: 16914 - protein, 10 aa, Artificial sequence
  Protein classification predicting sequence
EVVTLWYRAP

SEQ ID NO: 16915 - protein, 6 aa, Artificial sequence
  Protein classification predicting sequence
LLSKML

SEQ ID NO: 16916 - protein, 6 aa, Artificial sequence
  Protein classification predicting sequence
GIAYCH

SEQ ID NO: 16917 - protein, 7 aa, Artificial sequence
  Protein classification predicting sequence
PEVLLGS

SEQ ID NO: 16918 - protein, 9 aa, Artificial sequence
  Protein classification predicting sequence
EKIGEGTYG

SEQ ID NO: 16919 - protein, 13 aa, Artificial sequence
  Protein classification predicting sequence
RVYTHEVVTLWYR

SEQ ID NO: 16920 - protein, 7 aa, Artificial sequence
  Protein classification predicting sequence
ATKKPLF

SEQ ID NO: 16921 - protein, 6 aa, Artificial sequence
  Protein classification predicting sequence
LFRIFR

SEQ ID NO: 16922 - protein, 6 aa, Artificial sequence
  Protein classification predicting sequence
LGTPTE

SEQ ID NO: 16923 - protein, 8 aa, Artificial sequence
  Protein classification predicting sequence
VESLPDYK

SEQ ID NO: 16924 - protein, 5 aa, Artificial sequence
  Protein classification predicting sequence
TFPKW

SEQ ID NO: 16925 - protein, 23 aa, Artificial sequence
  Protein classification predicting sequence
TGQVVAMKKIRLESEEEGVPSTA

SEQ ID NO: 16926 - protein, 7 aa, Artificial sequence
  Protein classification predicting sequence
EGVPSTA

SEQ ID NO: 16927 - protein, 7 aa, Artificial sequence
  Protein classification predicting sequence
HPNVVRL

SEQ ID NO: 16928 - protein, 15 aa, Artificial sequence
  Protein classification predicting sequence
HPNVVRLLDVLMQES

SEQ ID NO: 16929 - protein, 17 aa, Artificial sequence
  Protein classification predicting sequence
MDPMLVKSYLYQILEGI

SEQ ID NO: 16930 - protein, 28 aa, Artificial sequence
  Protein classification predicting sequence
GTIFAELATKKPLFHGDSEIDQLFRIFR

SEQ ID NO: 16931 - protein, 8 aa, Artificial sequence
  Protein classification predicting sequence
VKNLDKNG

SEQ ID NO: 16932 - protein, 7 aa, Artificial sequence
  Protein classification predicting sequence
KMLIYDP

SEQ ID NO: 16933 - protein, 9 aa, Artificial sequence
  Protein classification predicting sequence
VKSYLYQIL

SEQ ID NO: 16934 - protein, 15 aa, Artificial sequence
  Protein classification predicting sequence
PVRVYTHEVVTLWYR

SEQ ID NO: 16935 - protein, 22 aa, Artificial sequence
  Protein classification predicting sequence
RVYTHEVVTLWYRSPEVLLGSA

SEQ ID NO: 16936 - protein, 45 aa, Artificial sequence
  Protein classification predicting sequence
YSTPVDIWSIGTIFAELATKKPLFHGDSEIDQLFRIFRALGTPNN

SEQ ID NO: 16937 - protein, 9 aa, Artificial sequence
  Protein classification predicting sequence
GLDLLSKML

SEQ ID NO: 16938 - protein, 28 aa, Artificial sequence
  Protein classification predicting sequence
GLDLLSKMLIYDPAKRISGKMALNHPYF

SEQ ID NO: 16939 - protein, 7 aa, Artificial sequence
  Protein classification predicting sequence
ALNHPYF

SEQ ID NO: 16940 - protein, 8 aa, Artificial sequence
  Protein classification predicting sequence
REISLLKE

SEQ ID NO: 16941 - protein, 7 aa, Artificial sequence
  Protein classification predicting sequence
LHRDLKP

SEQ ID NO: 16942 - protein, 6 aa, Artificial sequence
  Protein classification predicting sequence
RVYTHE

SEQ ID NO: 16943 - protein, 7 aa, Artificial sequence
  Protein classification predicting sequence
WSVGCIF

SEQ ID NO: 16944 - protein, 20 aa, Artificial sequence
  Protein classification predicting sequence
FCHRRRVLHRDLKPQNLLID

SEQ ID NO: 16945 - protein, 6 aa, Artificial sequence
  Protein classification predicting sequence
FGIPVR

SEQ ID NO: 16946 - protein, 12 aa, Artificial sequence
  Protein classification predicting sequence
VTLWYRAPEVLL

SEQ ID NO: 16947 - protein, 7 aa, Artificial sequence
  Protein classification predicting sequence
VDIWSIG

SEQ ID NO: 16948 - protein, 7 aa, Artificial sequence
  Protein classification predicting sequence
DYKNTFP

SEQ ID NO: 16949 - protein, 11 aa, Artificial sequence
  Protein classification predicting sequence
YTHEVVTLWYR

SEQ ID NO: 16950 - protein, 6 aa, Artificial sequence
  Protein classification predicting sequence
TFPKWK

SEQ ID NO: 16951 - protein, 13 aa, Artificial sequence
  Protein classification predicting sequence
YDPAKRISGKMAL

SEQ ID NO: 16952 - protein, 8 aa, Artificial sequence
  Protein classification predicting sequence
HPYFDDLD

SEQ ID NO: 16953 - protein, 9 aa, Artificial sequence
  Protein classification predicting sequence
DYKNTFPKW

SEQ ID NO: 16954 - protein, 67 aa, Artificial sequence
  Protein classification predicting sequence
MKKIRLESEEEGVPSTAIREISLLKELRHPNIVSLQDVLMQDSRLYLIFEFLSMDLKKYLDSIPPGQ

SEQ ID NO: 16955 - protein, 11 aa, Artificial sequence
  Protein classification predicting sequence
GDSEIDQLFRI

SEQ ID NO: 16956 - protein, 7 aa, Artificial sequence
  Protein classification predicting sequence
EHEYFKD

SEQ ID NO: 16957 - protein, 7 aa, Artificial sequence
  Protein classification predicting sequence
DVWSVGC

SEQ ID NO: 16958 - protein, 5 aa, Artificial sequence
  Protein classification predicting sequence
WSVGC

SEQ ID NO: 16959 - protein, 6 aa, Artificial sequence
  Protein classification predicting sequence
CGTPNY

SEQ ID NO: 16960 - protein, 7 aa, Artificial sequence
  Protein classification predicting sequence
GHSFEVD

SEQ ID NO: 16961 - protein, 6 aa, Artificial sequence
  Protein classification predicting sequence
KIGEGT

SEQ ID NO: 16962 - protein, 6 aa, Artificial sequence
  Protein classification predicting sequence
VALKKI

SEQ ID NO: 16963 - protein, 6 aa, Artificial sequence
  Protein classification predicting sequence
VFRDNT

SEQ ID NO: 16964 - protein, 7 aa, Artificial sequence
  Protein classification predicting sequence
TAVWQYT

SEQ ID NO: 16965 - protein, 8 aa, Artificial sequence
  Protein classification predicting sequence
VRFVVNNA

SEQ ID NO: 16966 - protein, 9 aa, Artificial sequence
  Protein classification predicting sequence
VTFIDNHDM

SEQ ID NO: 16967 - protein, 8 aa, Artificial sequence
  Protein classification predicting sequence
TIDGRGFG

SEQ ID NO: 16968 - protein, 10 aa, Artificial sequence
  Protein classification predicting sequence
WYYDVSVPAG

SEQ ID NO: 16969 - protein, 10 aa, Artificial sequence
  Protein classification predicting sequence
VAVVAVNRNL

SEQ ID NO: 16970 - protein, 10 aa, Artificial sequence
  Protein classification predicting sequence
DVLGGLLNGN

SEQ ID NO: 16971 - protein, 10 aa, Artificial sequence
  Protein classification predicting sequence
DNTDNMYGLK

SEQ ID NO: 16972 - protein, 11 aa, Artificial sequence
  Protein classification predicting sequence
DQVTFIDNHDM

SEQ ID NO: 16973 - protein, 15 aa, Artificial sequence
  Protein classification predicting sequence
DQVTFIDNHDMERFH

SEQ ID NO: 16974 - protein, 14 aa, Artificial sequence
  Protein classification predicting sequence
FTLAAGGTAVWQYT

SEQ ID NO: 16975 - protein, 8 aa, Artificial sequence
  Protein classification predicting sequence
KINDGYLT

SEQ ID NO: 16976 - protein, 28 aa, Artificial sequence
  Protein classification predicting sequence
CTNLRLYCGGDWQGIINKINDGYLTGMG

SEQ ID NO: 16977 - protein, 19 aa, Artificial sequence
  Protein classification predicting sequence
ENGIYKNLYDLADLNHNNS

SEQ ID NO: 16978 - protein, 19 aa, Artificial sequence
  Protein classification predicting sequence
TIEFKFLKKQGSTVTWEGG

SEQ ID NO: 16979 - protein, 14 aa, Artificial sequence
  Protein classification predicting sequence
HKPVFTFGEWFLGS

SEQ ID NO: 16980 - protein, 6 aa, Artificial sequence
  Protein classification predicting sequence
ELGNWD

SEQ ID NO: 16981 - protein, 7 aa, Artificial sequence
  Protein classification predicting sequence
NNYKPVF

SEQ ID NO: 16982 - protein, 10 aa, Artificial sequence
  Protein classification predicting sequence
FGEWFLGVNE

SEQ ID NO: 16983 - protein, 7 aa, Artificial sequence
  Protein classification predicting sequence
VGPMMAK

SEQ ID NO: 16984 - protein, 16 aa, Artificial sequence
  Protein classification predicting sequence
IKVIIDFAPNHTSPAS

SEQ ID NO: 16985 - protein, 20 aa, Artificial sequence
  Protein classification predicting sequence
GIDGIRMDAVKHMPFGWQKS

SEQ ID NO: 16986 - protein, 8 aa, Artificial sequence
  Protein classification predicting sequence
AYQVIQKL

SEQ ID NO: 16987 - protein, 13 aa, Artificial sequence
  Protein classification predicting sequence
TDRFSDGNPANNP

SEQ ID NO: 16988 - protein, 6 aa, Artificial sequence
  Protein classification predicting sequence
NDGYLT

SEQ ID NO: 16989 - protein, 11 aa, Artificial sequence
  Protein classification predicting sequence
LFHHNGGTDFS

SEQ ID NO: 16990 - protein, 13 aa, Artificial sequence
  Protein classification predicting sequence
GGYTNDTNGYFHH

SEQ ID NO: 16991 - protein, 10 aa, Artificial sequence
  Protein classification predicting sequence
GGTDFSSYED

SEQ ID NO: 16992 - protein, 8 aa, Artificial sequence
  Protein classification predicting sequence
TDEIVALK

SEQ ID NO: 16993 - protein, 6 aa, Artificial sequence
  Protein classification predicting sequence
TSIDMW

SEQ ID NO: 16994 - protein, 37 aa, Artificial sequence
  Protein classification predicting sequence
VALKKIRLDTETEGVPSTAIREISLLKELNHPNIVKL

SEQ ID NO: 16995 - protein, 7 aa, Artificial sequence
  Protein classification predicting sequence
ALKKIRL

SEQ ID NO: 16996 - protein, 56 aa, Artificial sequence
  Protein classification predicting sequence
IKLADFGLARAFGVPVRTYTHEVVTLWYRAPEILLGCKYYSTAVDIWSLGCIFAEM

SEQ ID NO: 16997 - protein, 21 aa, Artificial sequence
  Protein classification predicting sequence
WPGVTSMPDYKPSFPKWARQD

SEQ ID NO: 16998 - protein, 12 aa, Artificial sequence
  Protein classification predicting sequence
SKVVPPLDEDGR

SEQ ID NO: 16999 - protein, 10 aa, Artificial sequence
  Protein classification predicting sequence
YDPNKRISAK

SEQ ID NO: 17000 - protein, 7 aa, Artificial sequence
  Protein classification predicting sequence
LVFEFCD

SEQ ID NO: 17001 - protein, 16 aa, Artificial sequence
  Protein classification predicting sequence
KVEKIGEGTYGVVYKA

SEQ ID NO: 17002 - protein, 13 aa, Artificial sequence
  Protein classification predicting sequence
LHQDLKKFMDASA

SEQ ID NO: 17003 - protein, 7 aa, Artificial sequence
  Protein classification predicting sequence
GCIFAEM

SEQ ID NO: 17004 - protein, 32 aa, Artificial sequence
  Protein classification predicting sequence
KSYLFQLLQGLAFCHSHRVLHRDLKPQNLLIN

SEQ ID NO: 17005 - protein, 22 aa, Artificial sequence
  Protein classification predicting sequence
PVRTFTHEVVTLWYRAPEILLG

SEQ ID NO: 17006 - protein, 17 aa, Artificial sequence
  Protein classification predicting sequence
YSTAVDIWSLGCIFAEM

SEQ ID NO: 17007 - protein, 28 aa, Artificial sequence
  Protein classification predicting sequence
TRRALFPGDSEIDQLFRIFRTLGTPDEV

SEQ ID NO: 17008 - protein, 6 aa, Artificial sequence
  Protein classification predicting sequence
CHSHRV

SEQ ID NO: 17009 - protein, 17 aa, Artificial sequence
  Protein classification predicting sequence
THEVVTLWYRAPEILLG

SEQ ID NO: 17010 - protein, 13 aa, Artificial sequence
  Protein classification predicting sequence
GDSEIDQLFRIFR

SEQ ID NO: 17011 - protein, 6 aa, Artificial sequence
  Protein classification predicting sequence
MLTFNP

SEQ ID NO: 17012 - protein, 20 aa, Artificial sequence
  Protein classification predicting sequence
YEPVAEIGVGAYGTVYKARD

SEQ ID NO: 17013 - protein, 7 aa, Artificial sequence
  Protein classification predicting sequence
ETIKDLM

SEQ ID NO: 17014 - protein, 29 aa, Artificial sequence
  Protein classification predicting sequence
QMALTPVVVTLWYRAPEVLLQSTYATPVD

SEQ ID NO: 17015 - protein, 7 aa, Artificial sequence
  Protein classification predicting sequence
TPVDVWS

SEQ ID NO: 17016 - protein, 14 aa, Artificial sequence
  Protein classification predicting sequence
RKPLFCGNSEADQL

SEQ ID NO: 17017 - protein, 9 aa, Artificial sequence
  Protein classification predicting sequence
WSAGCIFAE

SEQ ID NO: 17018 - protein, 11 aa, Artificial sequence
  Protein classification predicting sequence
EIVALKRVRLD

SEQ ID NO: 17019 - protein, 27 aa, Artificial sequence
  Protein classification predicting sequence
DDEGVPSSALREICLLKELKHKNIVRL

SEQ ID NO: 17020 - protein, 14 aa, Artificial sequence
  Protein classification predicting sequence
DVLHSDKKLTLVFE

SEQ ID NO: 17021 - protein, 11 aa, Artificial sequence
  Protein classification predicting sequence
CDQDLKKYFDS

SEQ ID NO: 17022 - protein, 6 aa, Artificial sequence
  Protein classification predicting sequence
WSAGCI

SEQ ID NO: 17023 - protein, 6 aa, Artificial sequence
  Protein classification predicting sequence
GCILAE

SEQ ID NO: 17024 - protein, 7 aa, Artificial sequence
  Protein classification predicting sequence
GRPLFPG

SEQ ID NO: 17025 - protein, 29 aa, Artificial sequence
  Protein classification predicting sequence
SLVNVVPKLNATGRDLLQNLLKCNPVQRI

SEQ ID NO: 17026 - protein, 11 aa, Artificial sequence
  Protein classification predicting sequence
TLVFEHVDQDL

SEQ ID NO: 17027 - protein, 17 aa, Artificial sequence
  Protein classification predicting sequence
WSVGCIFAEMFRRKPLF

SEQ ID NO: 17028 - protein, 21 aa, Artificial sequence
  Protein classification predicting sequence
YEKLDFLGEGQFATVYKARDK

SEQ ID NO: 17029 - protein, 7 aa, Artificial sequence
  Protein classification predicting sequence
LREIKLL

SEQ ID NO: 17030 - protein, 12 aa, Artificial sequence
  Protein classification predicting sequence
ILAELLLRVPFL

SEQ ID NO: 17031 - protein, 9 aa, Artificial sequence
  Protein classification predicting sequence
GDSDLDQLT

SEQ ID NO: 17032 - protein, 7 aa, Artificial sequence
  Protein classification predicting sequence
LGTPTEE

SEQ ID NO: 17033 - protein, 6 aa, Artificial sequence
  Protein classification predicting sequence
VAIKKI

SEQ ID NO: 17034 - protein, 6 aa, Artificial sequence
  Protein classification predicting sequence
REIKIL

SEQ ID NO: 17035 - protein, 11 aa, Artificial sequence
  Protein classification predicting sequence
LHRDLKPNNLL

SEQ ID NO: 17036 - protein, 8 aa, Artificial sequence
  Protein classification predicting sequence
WILHRDLK

SEQ ID NO: 17037 - protein, 11 aa, Artificial sequence
  Protein classification predicting sequence
YTHQVVTRWYR

SEQ ID NO: 17038 - protein, 7 aa, Artificial sequence
  Protein classification predicting sequence
VVTRWYR

SEQ ID NO: 17039 - protein, 5 aa, Artificial sequence
  Protein classification predicting sequence
TRWYR

SEQ ID NO: 17040 - protein, 16 aa, Artificial sequence
  Protein classification predicting sequence
SMSACREIALLRELKH

SEQ ID NO: 17041 - protein, 16 aa, Artificial sequence
  Protein classification predicting sequence
DYAEHDLWHIIKFHRA

SEQ ID NO: 17042 - protein, 17 aa, Artificial sequence
  Protein classification predicting sequence
NWVLHRDLKPANILVMG

SEQ ID NO: 17043 - protein, 17 aa, Artificial sequence
  Protein classification predicting sequence
ERGRVKIADMGFARLFN

SEQ ID NO: 17044 - protein, 7 aa, Artificial sequence
  Protein classification predicting sequence
VVTLWYR

SEQ ID NO: 17045 - protein, 7 aa, Artificial sequence
  Protein classification predicting sequence
YALKRIL

SEQ ID NO: 17046 - protein, 9 aa, Artificial sequence
  Protein classification predicting sequence
LDHPNVVKL

SEQ ID NO: 17047 - protein, 24 aa, Artificial sequence
  Protein classification predicting sequence
FGFFFGRTPLIKLSPKKTWEGFIG

SEQ ID NO: 17048 - protein, 19 aa, Artificial sequence
  Protein classification predicting sequence
PFGGFFASGFKRAFKIKDF

SEQ ID NO: 17049 - protein, 11 aa, Artificial sequence
  Protein classification predicting sequence
KCFHEIITIGY

SEQ ID NO: 17050 - protein, 9 aa, Artificial sequence
  Protein classification predicting sequence
PFGGFFASG

SEQ ID NO: 17051 - protein, 11 aa, Artificial sequence
  Protein classification predicting sequence
YHRFISFALYL

SEQ ID NO: 17052 - protein, 7 aa, Artificial sequence
  Protein classification predicting sequence
LSWYFLL

SEQ ID NO: 17053 - protein, 7 aa, Artificial sequence
  Protein classification predicting sequence
NYFFYGE

SEQ ID NO: 17054 - protein, 8 aa, Artificial sequence
  Protein classification predicting sequence
FVLSLVKK

SEQ ID NO: 17055 - protein, 8 aa, Artificial sequence
  Protein classification predicting sequence
LLIVVTQS

SEQ ID NO: 17056 - protein, 6 aa, Artificial sequence
  Protein classification predicting sequence
IWFIVP

SEQ ID NO: 17057 - protein, 14 aa, Artificial sequence
  Protein classification predicting sequence
IPGHGGIMDRFDCQ

SEQ ID NO: 17058 - protein, 10 aa, Artificial sequence
  Protein classification predicting sequence
LMATFVNVYI

SEQ ID NO: 17059 - protein, 10 aa, Artificial sequence
  Protein classification predicting sequence
KLAPKVSPGK

SEQ ID NO: 17060 - protein, 14 aa, Artificial sequence
  Protein classification predicting sequence
SVLGDLTESMFKRE

SEQ ID NO: 17061 - protein, 7 aa, Artificial sequence
  Protein classification predicting sequence
HTYQLDV

SEQ ID NO: 17062 - protein, 16 aa, Artificial sequence
  Protein classification predicting sequence
ERSPHRPILQAGLPAN

SEQ ID NO: 17063 - protein, 8 aa, Artificial sequence
  Protein classification predicting sequence
TVAVKMLK

SEQ ID NO: 17064 - protein, 30 aa, Artificial sequence
  Protein classification predicting sequence
SEMEMMKMIGKHKNIINLLGACTQDGPLYV

SEQ ID NO: 17065 - protein, 13 aa, Artificial sequence
  Protein classification predicting sequence
VEYASKGNLREYL

SEQ ID NO: 17066 - protein, 9 aa, Artificial sequence
  Protein classification predicting sequence
ARGMEYLAS

SEQ ID NO: 17067 - protein, 16 aa, Artificial sequence
  Protein classification predicting sequence
KCIHRDLAARNVLVTE

SEQ ID NO: 17068 - protein, 13 aa, Artificial sequence
  Protein classification predicting sequence
YTHQSDVWSFGVL

SEQ ID NO: 17069 - protein, 13 aa, Artificial sequence
  Protein classification predicting sequence
WEIFTLGGSPYPG

SEQ ID NO: 17070 - protein, 21 aa, Artificial sequence
  Protein classification predicting sequence
CWHAVPSQRPTFKQLVEDLDR

SEQ ID NO: 17071 - protein, 8 aa, Artificial sequence
  Protein classification predicting sequence
AVPAANTV

SEQ ID NO: 17072 - protein, 15 aa, Artificial sequence
  Protein classification predicting sequence
PMLAGVSEYELPEDP

SEQ ID NO: 17073 - protein, 10 aa, Artificial sequence
  Protein classification predicting sequence
DATEKDLSDL

SEQ ID NO: 17074 - protein, 6 aa, Artificial sequence
  Protein classification predicting sequence
AGLGTR

SEQ ID NO: 17075 - protein, 7 aa, Artificial sequence
  Protein classification predicting sequence
NSFGFGG

SEQ ID NO: 17076 - protein, 10 aa, Artificial sequence
  Protein classification predicting sequence
TEIFPGGRLP

SEQ ID NO: 17077 - protein, 10 aa, Artificial sequence
  Protein classification predicting sequence
SLKRQIAQLK

SEQ ID NO: 17078 - protein, 8 aa, Artificial sequence
  Protein classification predicting sequence
SSGQEPYS

SEQ ID NO: 17079 - protein, 8 aa, Artificial sequence
  Protein classification predicting sequence
GRGLSPER

SEQ ID NO: 17080 - protein, 10 aa, Artificial sequence
  Protein classification predicting sequence
FCRNVLIYFS

SEQ ID NO: 17081 - protein, 9 aa, Artificial sequence
  Protein classification predicting sequence
CRNVMIYFD

SEQ ID NO: 17082 - protein, 8 aa, Artificial sequence
  Protein classification predicting sequence
CRNVLIYF

SEQ ID NO: 17083 - protein, 8 aa, Artificial sequence
  Protein classification predicting sequence
CSSGEEPY

SEQ ID NO: 17084 - protein, 8 aa, Artificial sequence
  Protein classification predicting sequence
VQTLGEGA

SEQ ID NO: 17085 - protein, 6 aa, Artificial sequence
  Protein classification predicting sequence
FFQQLI

SEQ ID NO: 17086 - protein, 20 aa, Artificial sequence
  Protein classification predicting sequence
RERLLNKMCGTLPYVAPELL

SEQ ID NO: 17087 - protein, 27 aa, Artificial sequence
  Protein classification predicting sequence
VLTAMLAGELPWDQPSDSCQEYSDWKE

SEQ ID NO: 17088 - protein, 14 aa, Artificial sequence
  Protein classification predicting sequence
KIDSAPLALLHKIL

SEQ ID NO: 17089 - protein, 14 aa, Artificial sequence
  Protein classification predicting sequence
ARITIPDIKKDRWY

SEQ ID NO: 17090 - protein, 7 aa, Artificial sequence
  Protein classification predicting sequence
EYAAGGE

SEQ ID NO: 17091 - protein, 10 aa, Artificial sequence
  Protein classification predicting sequence
CGTLPYVAPE

SEQ ID NO: 17092 - protein, 13 aa, Artificial sequence
  Protein classification predicting sequence
STTDRRNNKLIFK

SEQ ID NO: 17093 - protein, 10 aa, Artificial sequence
  Protein classification predicting sequence
DRRNNKLIFK

SEQ ID NO: 17094 - protein, 9 aa, Artificial sequence
  Protein classification predicting sequence
GSPPYAAPE

SEQ ID NO: 17095 - protein, 12 aa, Artificial sequence
  Protein classification predicting sequence
TEEAVAVKIVDM

SEQ ID NO: 17096 - protein, 13 aa, Artificial sequence
  Protein classification predicting sequence
DCPENIKKEICIN

SEQ ID NO: 17097 - protein, 19 aa, Artificial sequence
  Protein classification predicting sequence
IGITHRDIKPENLLLDERD

SEQ ID NO: 17098 - protein, 18 aa, Artificial sequence
  Protein classification predicting sequence
ERLLNKMCGTLPYVAPEL

SEQ ID NO: 17099 - protein, 6 aa, Artificial sequence
  Protein classification predicting sequence
PVDVWS

SEQ ID NO: 17100 - protein, 24 aa, Artificial sequence
  Protein classification predicting sequence
PVDVWSCGIVLTAMLAGELPWDQP

SEQ ID NO: 17101 - protein, 12 aa, Artificial sequence
  Protein classification predicting sequence
RITIPDIKKDRW

SEQ ID NO: 17102 - protein, 14 aa, Artificial sequence
  Protein classification predicting sequence
WQRLVKRMTRFFTK

SEQ ID NO: 17103 - protein, 20 aa, Artificial sequence
  Protein classification predicting sequence
DFRLSKGDGLEFKRHFLKIK

SEQ ID NO: 17104 - protein, 8 aa, Artificial sequence
  Protein classification predicting sequence
KKINSHRW

SEQ ID NO: 17105 - protein, 13 aa, Artificial sequence
  Protein classification predicting sequence
KKINSHRWLFNAF

SEQ ID NO: 17106 - protein, 6 aa, Artificial sequence
  Protein classification predicting sequence
LWKAFD

SEQ ID NO: 17107 - protein, 6 aa, Artificial sequence
  Protein classification predicting sequence
QNFEYK

SEQ ID NO: 17108 - protein, 5 aa, Artificial sequence
  Protein classification predicting sequence
DPWHM

SEQ ID NO: 17109 - protein, 10 aa, Artificial sequence
  Protein classification predicting sequence
AIGTATPPNC

SEQ ID NO: 17110 - protein, 22 aa, Artificial sequence
  Protein classification predicting sequence
TAVTFRGPSDTHLDSLVGQALF

SEQ ID NO: 17111 - protein, 11 aa, Artificial sequence
  Protein classification predicting sequence
GAIDGHLREVG

SEQ ID NO: 17112 - protein, 6 aa, Artificial sequence
  Protein classification predicting sequence
QSTYPD

SEQ ID NO: 17113 - protein, 11 aa, Artificial sequence
  Protein classification predicting sequence
KFQRMCDKSMI

SEQ ID NO: 17114 - protein, 9 aa, Artificial sequence
  Protein classification predicting sequence
CEYMAPSLD

SEQ ID NO: 17115 - protein, 10 aa, Artificial sequence
  Protein classification predicting sequence
RQDMVVVEVP

SEQ ID NO: 17116 - protein, 6 aa, Artificial sequence
  Protein classification predicting sequence
EAFQPL

SEQ ID NO: 17117 - protein, 7 aa, Artificial sequence
  Protein classification predicting sequence
IDGHLRE

SEQ ID NO: 17118 - protein, 7 aa, Artificial sequence
  Protein classification predicting sequence
DYYFRIT

SEQ ID NO: 17119 - protein, 7 aa, Artificial sequence
  Protein classification predicting sequence
RYMHLTE

SEQ ID NO: 17120 - protein, 7 aa, Artificial sequence
  Protein classification predicting sequence
SLDARQD

SEQ ID NO: 17121 - protein, 6 aa, Artificial sequence
  Protein classification predicting sequence
YEYTTQ

SEQ ID NO: 17122 - protein, 7 aa, Artificial sequence
  Protein classification predicting sequence
NSHRWFF

SEQ ID NO: 17123 - protein, 7 aa, Artificial sequence
  Protein classification predicting sequence
LLNPLVA

SEQ ID NO: 17124 - protein, 10 aa, Artificial sequence
  Protein classification predicting sequence
SNILDKPLES

SEQ ID NO: 17125 - protein, 9 aa, Artificial sequence
  Protein classification predicting sequence
CAYMAPSLD

SEQ ID NO: 17126 - protein, 8 aa, Artificial sequence
  Protein classification predicting sequence
AQTILPDS

SEQ ID NO: 17127 - protein, 6 aa, Artificial sequence
  Protein classification predicting sequence
TVEEVR

SEQ ID NO: 17128 - protein, 6 aa, Artificial sequence
  Protein classification predicting sequence
RMCDKS

SEQ ID NO: 17129 - protein, 12 aa, Artificial sequence
  Protein classification predicting sequence
AAQKAIKEWGQP

SEQ ID NO: 17130 - protein, 7 aa, Artificial sequence
  Protein classification predicting sequence
QTILPDS

SEQ ID NO: 17131 - protein, 9 aa, Artificial sequence
  Protein classification predicting sequence
WNSVFWIAH

SEQ ID NO: 17132 - protein, 19 aa, Artificial sequence
  Protein classification predicting sequence
HLDSLVGQALFGDGAAAII

SEQ ID NO: 17133 - protein, 7 aa, Artificial sequence
  Protein classification predicting sequence
ATREVLS

SEQ ID NO: 17134 - protein, 17 aa, Artificial sequence
  Protein classification predicting sequence
GPATVLAIGTATPANCV

SEQ ID NO: 17135 - protein, 12 aa, Artificial sequence
  Protein classification predicting sequence
LAIGTATPANCV

SEQ ID NO: 17136 - protein, 9 aa, Artificial sequence
  Protein classification predicting sequence
AENNRGARV

SEQ ID NO: 17137 - protein, 12 aa, Artificial sequence
  Protein classification predicting sequence
GAIDGHLREVGL

SEQ ID NO: 17138 - protein, 14 aa, Artificial sequence
  Protein classification predicting sequence
EIRQAQRAEGPATI

SEQ ID NO: 17139 - protein, 7 aa, Artificial sequence
  Protein classification predicting sequence
TYPDFYF

SEQ ID NO: 17140 - protein, 11 aa, Artificial sequence
  Protein classification predicting sequence
RYMYLTEEILK

SEQ ID NO: 17141 - protein, 8 aa, Artificial sequence
  Protein classification predicting sequence
CEYMAPSL

SEQ ID NO: 17142 - protein, 26 aa, Artificial sequence
  Protein classification predicting sequence
VTFRGPSDTHLDSLVGQALFGDGAAA

SEQ ID NO: 17143 - protein, 8 aa, Artificial sequence
  Protein classification predicting sequence
KLGLKPEK

SEQ ID NO: 17144 - protein, 8 aa, Artificial sequence
  Protein classification predicting sequence
DYPVPSAI

SEQ ID NO: 17145 - protein, 10 aa, Artificial sequence
  Protein classification predicting sequence
MRYTAATCDP

SEQ ID NO: 17146 - protein, 16 aa, Artificial sequence
  Protein classification predicting sequence
GGPAWQKIVVCLVFDG

SEQ ID NO: 17147 - protein, 14 aa, Artificial sequence
  Protein classification predicting sequence
LDVLATIGVYQDGV

SEQ ID NO: 17148 - protein, 7 aa, Artificial sequence
  Protein classification predicting sequence
FCLKQKN

SEQ ID NO: 17149 - protein, 31 aa, Artificial sequence
  Protein classification predicting sequence
KKINSHRWLFNAFGRILNPEVCILLDAGTKP

SEQ ID NO: 17150 - protein, 15 aa, Artificial sequence
  Protein classification predicting sequence
LQFILALGNRPKGSK

SEQ ID NO: 17151 - protein, 15 aa, Artificial sequence
  Protein classification predicting sequence
NWHDVSWGTKGSDKA

SEQ ID NO: 17152 - protein, 7 aa, Artificial sequence
  Protein classification predicting sequence
ITNSEHK

SEQ ID NO: 17153 - protein, 14 aa, Artificial sequence
  Protein classification predicting sequence
LKEKFQRMCDKSMI

SEQ ID NO: 17154 - protein, 17 aa, Artificial sequence
  Protein classification predicting sequence
CTTSGVDMPGADYQLTK

SEQ ID NO: 17155 - protein, 13 aa, Artificial sequence
  Protein classification predicting sequence
PDSEGAIDGHLRE

SEQ ID NO: 17156 - protein, 22 aa, Artificial sequence
  Protein classification predicting sequence
ATREVLSEYGNMSSACVLFILD

SEQ ID NO: 17157 - protein, 14 aa, Artificial sequence
  Protein classification predicting sequence
TELFIVLTMYNEDE

SEQ ID NO: 17158 - protein, 11 aa, Artificial sequence
  Protein classification predicting sequence
SVLPGAFSAYR

SEQ ID NO: 17159 - protein, 7 aa, Artificial sequence
  Protein classification predicting sequence
RYTAATC

SEQ ID NO: 17160 - protein, 12 aa, Artificial sequence
  Protein classification predicting sequence
ANMYLAEDRILC

SEQ ID NO: 17161 - protein, 12 aa, Artificial sequence
  Protein classification predicting sequence
LAEDRILCFELV

SEQ ID NO: 17162 - protein, 6 aa, Artificial sequence
  Protein classification predicting sequence
GNRPQG

SEQ ID NO: 17163 - protein, 7 aa, Artificial sequence
  Protein classification predicting sequence
EKLRATR

SEQ ID NO: 17164 - protein, 10 aa, Artificial sequence
  Protein classification predicting sequence
MRYSAATCDP

SEQ ID NO: 17165 - protein, 7 aa, Artificial sequence
  Protein classification predicting sequence
EYTTQLS

SEQ ID NO: 17166 - protein, 6 aa, Artificial sequence
  Protein classification predicting sequence
WFFQAF

SEQ ID NO: 17167 - protein, 14 aa, Artificial sequence
  Protein classification predicting sequence
QNFEYKMSNILDKP

SEQ ID NO: 17168 - protein, 6 aa, Artificial sequence
  Protein classification predicting sequence
MHLTEE

SEQ ID NO: 17169 - protein, 16 aa, Artificial sequence
  Protein classification predicting sequence
VGQALFGDGAAAVIVG

SEQ ID NO: 17170 - protein, 7 aa, Artificial sequence
  Protein classification predicting sequence
VWTAQTI

SEQ ID NO: 17171 - protein, 14 aa, Artificial sequence
  Protein classification predicting sequence
RYMYLTEEILKENP

SEQ ID NO: 17172 - protein, 8 aa, Artificial sequence
  Protein classification predicting sequence
AQRADGPA

SEQ ID NO: 17173 - protein, 9 aa, Artificial sequence
  Protein classification predicting sequence
ERPLYQLVS

SEQ ID NO: 17174 - protein, 6 aa, Artificial sequence
  Protein classification predicting sequence
KFKRMC

SEQ ID NO: 17175 - protein, 10 aa, Artificial sequence
  Protein classification predicting sequence
SAAQTILPDS

SEQ ID NO: 17176 - protein, 7 aa, Artificial sequence
  Protein classification predicting sequence
EKMRATR

SEQ ID NO: 17177 - protein, 7 aa, Artificial sequence
  Protein classification predicting sequence
EFTHMRY

SEQ ID NO: 17178 - protein, 7 aa, Artificial sequence
  Protein classification predicting sequence
TMYNEDE

SEQ ID NO: 17179 - protein, 9 aa, Artificial sequence
  Protein classification predicting sequence
VVCIVSDGR

SEQ ID NO: 17180 - protein, 7 aa, Artificial sequence
  Protein classification predicting sequence
GPLEKYF

SEQ ID NO: 17181 - protein, 6 aa, Artificial sequence
  Protein classification predicting sequence
GETDVP

SEQ ID NO: 17182 - protein, 7 aa, Artificial sequence
  Protein classification predicting sequence
DPWHMFT

SEQ ID NO: 17183 - protein, 7 aa, Artificial sequence
  Protein classification predicting sequence
HLDSLVG

SEQ ID NO: 17184 - protein, 12 aa, Artificial sequence
  Protein classification predicting sequence
FQLVSASQTILP

SEQ ID NO: 17185 - protein, 9 aa, Artificial sequence
  Protein classification predicting sequence
SEGAIDGHL

SEQ ID NO: 17186 - protein, 36 aa, Artificial sequence
  Protein classification predicting sequence
PSVKRLMMYQQGCFAGGTVLRLAKDLAENNKGARVL

SEQ ID NO: 17187 - protein, 20 aa, Artificial sequence
  Protein classification predicting sequence
YGNMSSACVLFILDEMRKAS

SEQ ID NO: 17188 - protein, 17 aa, Artificial sequence
  Protein classification predicting sequence
YQADYPDYYFRITKSEH

SEQ ID NO: 17189 - protein, 10 aa, Artificial sequence
  Protein classification predicting sequence
VVVEVPKLGK

SEQ ID NO: 17190 - protein, 26 aa, Artificial sequence
  Protein classification predicting sequence
GARVLVVCSEITAVTFRGPSESHLDS

SEQ ID NO: 17191 - protein, 8 aa, Artificial sequence
  Protein classification predicting sequence
GQATTGEG

SEQ ID NO: 17192 - protein, 23 aa, Artificial sequence
  Protein classification predicting sequence
CTTSGVDMPGADYQLTKLLGLRP

SEQ ID NO: 17193 - protein, 8 aa, Artificial sequence
  Protein classification predicting sequence
ITNSEHKT

SEQ ID NO: 17194 - protein, 7 aa, Artificial sequence
  Protein classification predicting sequence
RYMYLTE

SEQ ID NO: 17195 - protein, 13 aa, Artificial sequence
  Protein classification predicting sequence
MMYQQGCFAGGTV

SEQ ID NO: 17196 - protein, 25 aa, Artificial sequence
  Protein classification predicting sequence
SKITHLVFCTTSGVDMPGADYQLTK

SEQ ID NO: 17197 - protein, 27 aa, Artificial sequence
  Protein classification predicting sequence
RLAKDLAENNKGARVLVVCSEITAVTF

SEQ ID NO: 17198 - protein, 9 aa, Artificial sequence
  Protein classification predicting sequence
GPSDTHLDS

SEQ ID NO: 17199 - protein, 20 aa, Artificial sequence
  Protein classification predicting sequence
IAHPGGPAILDQVEAKLGLK

SEQ ID NO: 17200 - protein, 6 aa, Artificial sequence
  Protein classification predicting sequence
TMYNED

SEQ ID NO: 17201 - protein, 9 aa, Artificial sequence
  Protein classification predicting sequence
HDVSWGTKG

SEQ ID NO: 17202 - protein, 6 aa, Artificial sequence
  Protein classification predicting sequence
AFKPLG

SEQ ID NO: 17203 - protein, 7 aa, Artificial sequence
  Protein classification predicting sequence
QMIFCLK

SEQ ID NO: 17204 - protein, 10 aa, Artificial sequence
  Protein classification predicting sequence
QRRRWLNGSF

SEQ ID NO: 17205 - protein, 8 aa, Artificial sequence
  Protein classification predicting sequence
RMYKSGHN

SEQ ID NO: 17206 - protein, 15 aa, Artificial sequence
  Protein classification predicting sequence
DKPQADIDSQFEATV

SEQ ID NO: 17207 - protein, 6 aa, Artificial sequence
  Protein classification predicting sequence
VERPLF

SEQ ID NO: 17208 - protein, 6 aa, Artificial sequence
  Protein classification predicting sequence
TPANCV

SEQ ID NO: 17209 - protein, 17 aa, Artificial sequence
  Protein classification predicting sequence
HLDSLVGQALFGDGAAA

SEQ ID NO: 17210 - protein, 21 aa, Artificial sequence
  Protein classification predicting sequence
HLDSLVGQALFGDGAAAVIVG

SEQ ID NO: 17211 - protein, 19 aa, Artificial sequence
  Protein classification predicting sequence
GARVLVVCSEITAVTFRGP

SEQ ID NO: 17212 - protein, 12 aa, Artificial sequence
  Protein classification predicting sequence
LKEKFKRMCDKS

SEQ ID NO: 17213 - protein, 24 aa, Artificial sequence
  Protein classification predicting sequence
LKEKFKRMCDKSQIRKRYMHLTEE

SEQ ID NO: 17214 - protein, 15 aa, Artificial sequence
  Protein classification predicting sequence
QTILPDSEGAIDGHL

SEQ ID NO: 17215 - protein, 15 aa, Artificial sequence
  Protein classification predicting sequence
RYMYLTEEILKENPS

SEQ ID NO: 17216 - protein, 11 aa, Artificial sequence
  Protein classification predicting sequence
LTEEILKENPS

SEQ ID NO: 17217 - protein, 8 aa, Artificial sequence
  Protein classification predicting sequence
PEIEKPIF

SEQ ID NO: 17218 - protein, 22 aa, Artificial sequence
  Protein classification predicting sequence
QSTYPDYYFRITNSEHKTELKE

SEQ ID NO: 17219 - protein, 10 aa, Artificial sequence
  Protein classification predicting sequence
FQRMCDKSMI

SEQ ID NO: 17220 - protein, 17 aa, Artificial sequence
  Protein classification predicting sequence
IVSKNIDKALVEAFQPL

SEQ ID NO: 17221 - protein, 17 aa, Artificial sequence
  Protein classification predicting sequence
RLMMYQQGCFAGGTVLR

SEQ ID NO: 17222 - protein, 7 aa, Artificial sequence
  Protein classification predicting sequence
MAPSLDA

SEQ ID NO: 17223 - protein, 28 aa, Artificial sequence
  Protein classification predicting sequence
TTGEGLEWGVLFGFGPGLTIETVVLHSV

SEQ ID NO: 17224 - protein, 18 aa, Artificial sequence
  Protein classification predicting sequence
NCVDQSTYPDYYFRITNS

SEQ ID NO: 17225 - protein, 22 aa, Artificial sequence
  Protein classification predicting sequence
ELKEKFKRMCDKSMIKKRYMYL

SEQ ID NO: 17226 - protein, 8 aa, Artificial sequence
  Protein classification predicting sequence
PSLDARQD

SEQ ID NO: 17227 - protein, 8 aa, Artificial sequence
  Protein classification predicting sequence
EKPLFELV

SEQ ID NO: 17228 - protein, 8 aa, Artificial sequence
  Protein classification predicting sequence
LVWTAQTI

SEQ ID NO: 17229 - protein, 18 aa, Artificial sequence
  Protein classification predicting sequence
GLTFHLLKDVPGLISKNI

SEQ ID NO: 17230 - protein, 9 aa, Artificial sequence
  Protein classification predicting sequence
GLGTTGEGL

SEQ ID NO: 17231 - protein, 15 aa, Artificial sequence
  Protein classification predicting sequence
TYPDFYFKITNSEHK

SEQ ID NO: 17232 - protein, 16 aa, Artificial sequence
  Protein classification predicting sequence
ELKEKFQRMCDKSMIK

SEQ ID NO: 17233 - protein, 9 aa, Artificial sequence
  Protein classification predicting sequence
RMCDKSMIK

SEQ ID NO: 17234 - protein, 15 aa, Artificial sequence
  Protein classification predicting sequence
AIKEWGQPKSKITHV

SEQ ID NO: 17235 - protein, 6 aa, Artificial sequence
  Protein classification predicting sequence
ITNSEH

SEQ ID NO: 17236 - protein, 15 aa, Artificial sequence
  Protein classification predicting sequence
MMYQQGCFAGGTVLR

SEQ ID NO: 17237 - protein, 6 aa, Artificial sequence
  Protein classification predicting sequence
WTAQTI

SEQ ID NO: 17238 - protein, 20 aa, Artificial sequence
  Protein classification predicting sequence
VGQALFGDGAAAVIVGADPD

SEQ ID NO: 17239 - protein, 5 aa, Artificial sequence
  Protein classification predicting sequence
RYMYL

SEQ ID NO: 17240 - protein, 9 aa, Artificial sequence
  Protein classification predicting sequence
GAIDGHLRE

SEQ ID NO: 17241 - protein, 23 aa, Artificial sequence
  Protein classification predicting sequence
PEIEKPIFEMVWTAQTIAPDSEG

SEQ ID NO: 17242 - protein, 18 aa, Artificial sequence
  Protein classification predicting sequence
ATREVLSEYGNMSSACVL

SEQ ID NO: 17243 - protein, 10 aa, Artificial sequence
  Protein classification predicting sequence
GLKTTGEGLE

SEQ ID NO: 17244 - protein, 10 aa, Artificial sequence
  Protein classification predicting sequence
VLPGAFSAYR

SEQ ID NO: 17245 - protein, 7 aa, Artificial sequence
  Protein classification predicting sequence
MMYQQGC

SEQ ID NO: 17246 - protein, 13 aa, Artificial sequence
  Protein classification predicting sequence
NCVEQSTYPDFYF

SEQ ID NO: 17247 - protein, 7 aa, Artificial sequence
  Protein classification predicting sequence
YFRITNS

SEQ ID NO: 17248 - protein, 9 aa, Artificial sequence
  Protein classification predicting sequence
HKTELKEKF

SEQ ID NO: 17249 - protein, 20 aa, Artificial sequence
  Protein classification predicting sequence
CEYMAPSLDARQDMVVVEVP

SEQ ID NO: 17250 - protein, 18 aa, Artificial sequence
  Protein classification predicting sequence
YMAPSLDARQDMVVVEVP

SEQ ID NO: 17251 - protein, 11 aa, Artificial sequence
  Protein classification predicting sequence
GLTFHLLKDVP

SEQ ID NO: 17252 - protein, 10 aa, Artificial sequence
  Protein classification predicting sequence
KALVEAFQPL

SEQ ID NO: 17253 - protein, 19 aa, Artificial sequence
  Protein classification predicting sequence
NSIFWIAHPGGPAILDQVE

SEQ ID NO: 17254 - protein, 16 aa, Artificial sequence
  Protein classification predicting sequence
FWIAHPGGPAILDQVE

SEQ ID NO: 17255 - protein, 9 aa, Artificial sequence
  Protein classification predicting sequence
KSMIKKRYM

SEQ ID NO: 17256 - protein, 11 aa, Artificial sequence
  Protein classification predicting sequence
FCTTSGVDMPG

SEQ ID NO: 17257 - protein, 17 aa, Artificial sequence
  Protein classification predicting sequence
DTHLDSLVGQALFGDGA

SEQ ID NO: 17258 - protein, 6 aa, Artificial sequence
  Protein classification predicting sequence
GSDPIP

SEQ ID NO: 17259 - protein, 8 aa, Artificial sequence
  Protein classification predicting sequence
EAFKPLGI

SEQ ID NO: 17260 - protein, 22 aa, Artificial sequence
  Protein classification predicting sequence
YMAPSLDARQDIVVVEVPKLGK

SEQ ID NO: 17261 - protein, 8 aa, Artificial sequence
  Protein classification predicting sequence
MMYQQGCF

SEQ ID NO: 17262 - protein, 17 aa, Artificial sequence
  Protein classification predicting sequence
KALVEAFQPLGISDYNS

SEQ ID NO: 17263 - protein, 21 aa, Artificial sequence
  Protein classification predicting sequence
LGTTGEGLEWGVLFGFGPGLT

SEQ ID NO: 17264 - protein, 15 aa, Artificial sequence
  Protein classification predicting sequence
NGYNLRPAMYNRHTE

SEQ ID NO: 17265 - protein, 31 aa, Artificial sequence
  Protein classification predicting sequence
RDIVNLKKSEFWNKGGPAWQKIVVCLVFDGI

SEQ ID NO: 17266 - protein, 13 aa, Artificial sequence
  Protein classification predicting sequence
LGGACGEIHAMLG

SEQ ID NO: 17267 - protein, 20 aa, Artificial sequence
  Protein classification predicting sequence
RAIMGRPLEQYFHGDHTLSK

SEQ ID NO: 17268 - protein, 33 aa, Artificial sequence
  Protein classification predicting sequence
LGKKGIEGMNIFKKNMFLAEDRILCFELVAKAG

SEQ ID NO: 17269 - protein, 11 aa, Artificial sequence
  Protein classification predicting sequence
TWFSLASYWLT

SEQ ID NO: 17270 - protein, 14 aa, Artificial sequence
  Protein classification predicting sequence
CEYMAPSLDARQDI

SEQ ID NO: 17271 - protein, 12 aa, Artificial sequence
  Protein classification predicting sequence
YMAPSLDARQDI

SEQ ID NO: 17272 - protein, 13 aa, Artificial sequence
  Protein classification predicting sequence
VVEVPKLGKEAAQ

SEQ ID NO: 17273 - protein, 57 aa, Artificial sequence
  Protein classification predicting sequence
FWIAHPGGPAILDQVEDKLGLKPEKLRATRHVLSEYGNMSSACVLFILDEMRKASSN

SEQ ID NO: 17274 - protein, 7 aa, Artificial sequence
  Protein classification predicting sequence
SVKRFMM

SEQ ID NO: 17275 - protein, 15 aa, Artificial sequence
  Protein classification predicting sequence
DSLVGQALFGDGAAA

SEQ ID NO: 17276 - protein, 17 aa, Artificial sequence
  Protein classification predicting sequence
DSLVGQALFGDGAAAVI

SEQ ID NO: 17277 - protein, 10 aa, Artificial sequence
  Protein classification predicting sequence
GLTFHLLKDV

SEQ ID NO: 17278 - protein, 10 aa, Artificial sequence
  Protein classification predicting sequence
GPATIMAIGT

SEQ ID NO: 17279 - protein, 12 aa, Artificial sequence
  Protein classification predicting sequence
GADYQLTKLLGL

SEQ ID NO: 17280 - protein, 11 aa, Artificial sequence
  Protein classification predicting sequence
PLFELVSAAQT

SEQ ID NO: 17281 - protein, 6 aa, Artificial sequence
  Protein classification predicting sequence
FQPLGI

SEQ ID NO: 17282 - protein, 12 aa, Artificial sequence
  Protein classification predicting sequence
NPLVAAQNFEYK

SEQ ID NO: 17283 - protein, 6 aa, Artificial sequence
  Protein classification predicting sequence
PLFELV

SEQ ID NO: 17284 - protein, 8 aa, Artificial sequence
  Protein classification predicting sequence
PLFELVSA

SEQ ID NO: 17285 - protein, 21 aa, Artificial sequence
  Protein classification predicting sequence
WGVLFGFGPGLTVETVVLHSV

SEQ ID NO: 17286 - protein, 15 aa, Artificial sequence
  Protein classification predicting sequence
SIAIQYTAIRTFTAK

SEQ ID NO: 17287 - protein, 13 aa, Artificial sequence
  Protein classification predicting sequence
DVFYLFEPLYHVQ

SEQ ID NO: 17288 - protein, 16 aa, Artificial sequence
  Protein classification predicting sequence
RRVMLGASRDLLRSLY

SEQ ID NO: 17289 - protein, 20 aa, Artificial sequence
  Protein classification predicting sequence
EDPRLNLKVIQLVRDPRGIL

SEQ ID NO: 17290 - protein, 11 aa, Artificial sequence
  Protein classification predicting sequence
ETFRDTYRLWR

SEQ ID NO: 17291 - protein, 10 aa, Artificial sequence
  Protein classification predicting sequence
GSALVYRDVL

SEQ ID NO: 17292 - protein, 10 aa, Artificial sequence
  Protein classification predicting sequence
EVQRLRGNCE

SEQ ID NO: 17293 - protein, 19 aa, Artificial sequence
  Protein classification predicting sequence
LLMATTRTGSSFVGEFFNQ

SEQ ID NO: 17294 - protein, 10 aa, Artificial sequence
  Protein classification predicting sequence
IFYLFEPLWH

SEQ ID NO: 17295 - protein, 9 aa, Artificial sequence
  Protein classification predicting sequence
SSEQFEKWR

SEQ ID NO: 17296 - protein, 8 aa, Artificial sequence
  Protein classification predicting sequence
PVMRRNPF

SEQ ID NO: 17297 - protein, 7 aa, Artificial sequence
  Protein classification predicting sequence
CCRKGSR

SEQ ID NO: 17298 - protein, 9 aa, Artificial sequence
  Protein classification predicting sequence
SRKRRVLTP

SEQ ID NO: 17299 - protein, 28 aa, Artificial sequence
  Protein classification predicting sequence
DLKHLVVDEDHELIYCYVPKVACTNWKR

SEQ ID NO: 17300 - protein, 15 aa, Artificial sequence
  Protein classification predicting sequence
IYCYVPKVACTNWKR

SEQ ID NO: 17301 - protein, 11 aa, Artificial sequence
  Protein classification predicting sequence
NLKTLNQYSIP

SEQ ID NO: 17302 - protein, 21 aa, Artificial sequence
  Protein classification predicting sequence
KFLFVREPFERLVSAYRNKFT

SEQ ID NO: 17303 - protein, 28 aa, Artificial sequence
  Protein classification predicting sequence
NEHWQTVYSLCHPCHIHYDLVGKYETLE

SEQ ID NO: 17304 - protein, 8 aa, Artificial sequence
  Protein classification predicting sequence
AKSTRTTD

SEQ ID NO: 17305 - protein, 6 aa, Artificial sequence
  Protein classification predicting sequence
PFNEHW

SEQ ID NO: 17306 - protein, 11 aa, Artificial sequence
  Protein classification predicting sequence
FLFVREPFERL

SEQ ID NO: 17307 - protein, 6 aa, Artificial sequence
  Protein classification predicting sequence
SNILDK

SEQ ID NO: 17308 - protein, 6 aa, Artificial sequence
  Protein classification predicting sequence
IKRRYM

SEQ ID NO: 17309 - protein, 32 aa, Artificial sequence
  Protein classification predicting sequence
GAIDGHLREVGLTFHLLKDVPGLISKNIEKSL

SEQ ID NO: 17310 - protein, 8 aa, Artificial sequence
  Protein classification predicting sequence
EIRKAQRA

SEQ ID NO: 17311 - protein, 11 aa, Artificial sequence
  Protein classification predicting sequence
YPDYYFRITNS

SEQ ID NO: 17312 - protein, 17 aa, Artificial sequence
  Protein classification predicting sequence
RQDIVVVEVPKLGKEAA

SEQ ID NO: 17313 - protein, 33 aa, Artificial sequence
  Protein classification predicting sequence
RQDIVVVEVPKLGKEAAVKAIKEWGQPKSKITH

SEQ ID NO: 17314 - protein, 8 aa, Artificial sequence
  Protein classification predicting sequence
KLGLKAEK

SEQ ID NO: 17315 - protein, 8 aa, Artificial sequence
  Protein classification predicting sequence
EIRQAQRA

SEQ ID NO: 17316 - protein, 28 aa, Artificial sequence
  Protein classification predicting sequence
GAIDGHLREVGLTFHLLKDVPGLISKNI

SEQ ID NO: 17317 - protein, 14 aa, Artificial sequence
  Protein classification predicting sequence
QADYPDYYFRITKS

SEQ ID NO: 17318 - protein, 13 aa, Artificial sequence
  Protein classification predicting sequence
VVVEVPKLGKEAA

SEQ ID NO: 17319 - protein, 9 aa, Artificial sequence
  Protein classification predicting sequence
ISKNIEKSL

SEQ ID NO: 17320 - protein, 11 aa, Artificial sequence
  Protein classification predicting sequence
IRKRYMHLTEE

SEQ ID NO: 17321 - protein, 13 aa, Artificial sequence
  Protein classification predicting sequence
CEYMAPSLDARQD

SEQ ID NO: 17322 - protein, 19 aa, Artificial sequence
  Protein classification predicting sequence
VFCTTSGVDMPGADYQLTK

SEQ ID NO: 17323 - protein, 8 aa, Artificial sequence
  Protein classification predicting sequence
LAIGTSTP

SEQ ID NO: 17324 - protein, 11 aa, Artificial sequence
  Protein classification predicting sequence
TELKEKFKRMC

SEQ ID NO: 17325 - protein, 9 aa, Artificial sequence
  Protein classification predicting sequence
LKEKFKRMC

SEQ ID NO: 17326 - protein, 12 aa, Artificial sequence
  Protein classification predicting sequence
CAYMAPSLDARQ

SEQ ID NO: 17327 - protein, 19 aa, Artificial sequence
  Protein classification predicting sequence
RADGPATILAIGTATPPNA

SEQ ID NO: 17328 - protein, 6 aa, Artificial sequence
  Protein classification predicting sequence
RQDMVV

SEQ ID NO: 17329 - protein, 22 aa, Artificial sequence
  Protein classification predicting sequence
GAIDGHLREVGLTFHLLKDVPG

SEQ ID NO: 17330 - protein, 6 aa, Artificial sequence
  Protein classification predicting sequence
YPDFYF

SEQ ID NO: 17331 - protein, 6 aa, Artificial sequence
  Protein classification predicting sequence
KRYMHL

SEQ ID NO: 17332 - protein, 24 aa, Artificial sequence
  Protein classification predicting sequence
MMYQQGCFAGGTVLRLAKDLAENN

SEQ ID NO: 17333 - protein, 16 aa, Artificial sequence
  Protein classification predicting sequence
AQRAEGPATVMAIGTA

SEQ ID NO: 17334 - protein, 19 aa, Artificial sequence
  Protein classification predicting sequence
DTHLDSLVGQALFGDGAAA

SEQ ID NO: 17335 - protein, 8 aa, Artificial sequence
  Protein classification predicting sequence
IGTANPAN

SEQ ID NO: 17336 - protein, 5 aa, Artificial sequence
  Protein classification predicting sequence
MHLTE

SEQ ID NO: 17337 - protein, 22 aa, Artificial sequence
  Protein classification predicting sequence
FWIAHPGGPAILDQVEIKLGLK

SEQ ID NO: 17338 - protein, 30 aa, Artificial sequence
  Protein classification predicting sequence
VVEVPRLGKEAAVKAIKEWGQPKSKITHLI

SEQ ID NO: 17339 - protein, 39 aa, Artificial sequence
  Protein classification predicting sequence
VKRYMMYQQGCFAGGTVLRLAKDLAENNKGARVLVVCSE

SEQ ID NO: 17340 - protein, 7 aa, Artificial sequence
  Protein classification predicting sequence
EKPLFEL

SEQ ID NO: 17341 - protein, 7 aa, Artificial sequence
  Protein classification predicting sequence
VTVEEVR

SEQ ID NO: 17342 - protein, 13 aa, Artificial sequence
  Protein classification predicting sequence
VCSEITAVTFRGP

SEQ ID NO: 17343 - protein, 20 aa, Artificial sequence
  Protein classification predicting sequence
VCSEITAVTFRGPSESHLDS

SEQ ID NO: 17344 - protein, 24 aa, Artificial sequence
  Protein classification predicting sequence
NSIFWVAHPGGPAILDQVEAKVGL

SEQ ID NO: 17345 - protein, 9 aa, Artificial sequence
  Protein classification predicting sequence
TPPNAVDQS

SEQ ID NO: 17346 - protein, 5 aa, Artificial sequence
  Protein classification predicting sequence
FKRMC

SEQ ID NO: 17347 - protein, 13 aa, Artificial sequence
  Protein classification predicting sequence
VPGLISKNIEKSL

SEQ ID NO: 17348 - protein, 9 aa, Artificial sequence
  Protein classification predicting sequence
YPDYYFRIT

SEQ ID NO: 17349 - protein, 22 aa, Artificial sequence
  Protein classification predicting sequence
YQQGCFAGGTVLRLAKDLAENN

SEQ ID NO: 17350 - protein, 15 aa, Artificial sequence
  Protein classification predicting sequence
KAIKEWGQPKSKITH

SEQ ID NO: 17351 - protein, 18 aa, Artificial sequence
  Protein classification predicting sequence
GLTFHLLKDVPGIVSKNI

SEQ ID NO: 17352 - protein, 14 aa, Artificial sequence
  Protein classification predicting sequence
ACVLFILDEMRRKS

SEQ ID NO: 17353 - protein, 6 aa, Artificial sequence
  Protein classification predicting sequence
ENPSVC

SEQ ID NO: 17354 - protein, 13 aa, Artificial sequence
  Protein classification predicting sequence
VLSDYGNMSSACV

SEQ ID NO: 17355 - protein, 31 aa, Artificial sequence
  Protein classification predicting sequence
GEKPIFEMVSAAQTILPDSDGAIDGHLREVG

SEQ ID NO: 17356 - protein, 20 aa, Artificial sequence
  Protein classification predicting sequence
TFHLLKDVPGLISKNIEKSL

SEQ ID NO: 17357 - protein, 11 aa, Artificial sequence
  Protein classification predicting sequence
NMYLAEDRILC

SEQ ID NO: 17358 - protein, 22 aa, Artificial sequence
  Protein classification predicting sequence
ISDYNSIFWIAHPGGPAILDQV

SEQ ID NO: 17359 - protein, 6 aa, Artificial sequence
  Protein classification predicting sequence
WFFNAF

SEQ ID NO: 17360 - protein, 8 aa, Artificial sequence
  Protein classification predicting sequence
FEYKISNI

SEQ ID NO: 17361 - protein, 6 aa, Artificial sequence
  Protein classification predicting sequence
YLLIYG

SEQ ID NO: 17362 - protein, 11 aa, Artificial sequence
  Protein classification predicting sequence
APTIAAAAYLR

SEQ ID NO: 17363 - protein, 19 aa, Artificial sequence
  Protein classification predicting sequence
RSYKPNPRLARVLDILFIL

SEQ ID NO: 17364 - protein, 7 aa, Artificial sequence
  Protein classification predicting sequence
YKNYDPR

SEQ ID NO: 17365 - protein, 8 aa, Artificial sequence
  Protein classification predicting sequence
AKLPTIAA

SEQ ID NO: 17366 - protein, 14 aa, Artificial sequence
  Protein classification predicting sequence
YFIERKLYPNVDFY

SEQ ID NO: 17367 - protein, 7 aa, Artificial sequence
  Protein classification predicting sequence
MFTVLFA

SEQ ID NO: 17368 - protein, 7 aa, Artificial sequence
  Protein classification predicting sequence
HGGANEA

SEQ ID NO: 17369 - protein, 21 aa, Artificial sequence
  Protein classification predicting sequence
LMRLYLTIHSDHEGGNVSAHT

SEQ ID NO: 17370 - protein, 8 aa, Artificial sequence
  Protein classification predicting sequence
QREFALKH

SEQ ID NO: 17371 - protein, 6 aa, Artificial sequence
  Protein classification predicting sequence
HSGVLL

SEQ ID NO: 17372 - protein, 10 aa, Artificial sequence
  Protein classification predicting sequence
HSGVLLQYYG

SEQ ID NO: 17373 - protein, 7 aa, Artificial sequence
  Protein classification predicting sequence
YTVLFGV

SEQ ID NO: 17374 - protein, 14 aa, Artificial sequence
  Protein classification predicting sequence
GFGHRVYKNYDPRA

SEQ ID NO: 17375 - protein, 7 aa, Artificial sequence
  Protein classification predicting sequence
PNVDFYS

SEQ ID NO: 17376 - protein, 11 aa, Artificial sequence
  Protein classification predicting sequence
LWGPAHGGANE

SEQ ID NO: 17377 - protein, 9 aa, Artificial sequence
  Protein classification predicting sequence
SKQVRDKQI

SEQ ID NO: 17378 - protein, 7 aa, Artificial sequence
  Protein classification predicting sequence
EGIRFRG

SEQ ID NO: 17379 - protein, 7 aa, Artificial sequence
  Protein classification predicting sequence
WEPTYED

SEQ ID NO: 17380 - protein, 11 aa, Artificial sequence
  Protein classification predicting sequence
CQREFALKHLP

SEQ ID NO: 17381 - protein, 17 aa, Artificial sequence
  Protein classification predicting sequence
GGMRGMTGLLWETSLLD

SEQ ID NO: 17382 - protein, 11 aa, Artificial sequence
  Protein classification predicting sequence
LLWLLLTGKVP

SEQ ID NO: 17383 - protein, 14 aa, Artificial sequence
  Protein classification predicting sequence
TIHSDHEGGNVSAH

SEQ ID NO: 17384 - protein, 9 aa, Artificial sequence
  Protein classification predicting sequence
VLRKTDPRY

SEQ ID NO: 17385 - protein, 8 aa, Artificial sequence
  Protein classification predicting sequence
GVFTFDPG

SEQ ID NO: 17386 - protein, 10 aa, Artificial sequence
  Protein classification predicting sequence
GFRRDAHPMA

SEQ ID NO: 17387 - protein, 9 aa, Artificial sequence
  Protein classification predicting sequence
VNPVLARAM

SEQ ID NO: 17388 - protein, 8 aa, Artificial sequence
  Protein classification predicting sequence
DPRAKIMQ

SEQ ID NO: 17389 - protein, 6 aa, Artificial sequence
  Protein classification predicting sequence
RPRQLY

SEQ ID NO: 17390 - protein, 8 aa, Artificial sequence
  Protein classification predicting sequence
LLHRGYPI

SEQ ID NO: 17391 - protein, 6 aa, Artificial sequence
  Protein classification predicting sequence
PIDQLA

SEQ ID NO: 17392 - protein, 7 aa, Artificial sequence
  Protein classification predicting sequence
GQPFIYP

SEQ ID NO: 17393 - protein, 15 aa, Artificial sequence
  Protein classification predicting sequence
LHADHEQNASTSTVR

SEQ ID NO: 17394 - protein, 19 aa, Artificial sequence
  Protein classification predicting sequence
LHADHEQNASTSTVRLAGS

SEQ ID NO: 17395 - protein, 8 aa, Artificial sequence
  Protein classification predicting sequence
RPRQLYTG

SEQ ID NO: 17396 - protein, 11 aa, Artificial sequence
  Protein classification predicting sequence
EPLPEGLFWLL

SEQ ID NO: 17397 - protein, 6 aa, Artificial sequence
  Protein classification predicting sequence
QREFAL

SEQ ID NO: 17398 - protein, 11 aa, Artificial sequence
  Protein classification predicting sequence
PNVDAHSGVLL

SEQ ID NO: 17399 - protein, 7 aa, Artificial sequence
  Protein classification predicting sequence
HTMVHEQ

SEQ ID NO: 17400 - protein, 11 aa, Artificial sequence
  Protein classification predicting sequence
FRRDSHPMAVM

SEQ ID NO: 17401 - protein, 11 aa, Artificial sequence
  Protein classification predicting sequence
FVYPRNDLSYA

SEQ ID NO: 17402 - protein, 7 aa, Artificial sequence
  Protein classification predicting sequence
NFLRMCF

SEQ ID NO: 17403 - protein, 7 aa, Artificial sequence
  Protein classification predicting sequence
RAKDKND

SEQ ID NO: 17404 - protein, 13 aa, Artificial sequence
  Protein classification predicting sequence
QKISRPRQLYTGY

SEQ ID NO: 17405 - protein, 9 aa, Artificial sequence
  Protein classification predicting sequence
RPRQLYTGY

SEQ ID NO: 17406 - protein, 7 aa, Artificial sequence
  Protein classification predicting sequence
STASCQS

SEQ ID NO: 17407 - protein, 7 aa, Artificial sequence
  Protein classification predicting sequence
CYLLLYG

SEQ ID NO: 17408 - protein, 9 aa, Artificial sequence
  Protein classification predicting sequence
HHTMVHEQM

SEQ ID NO: 17409 - protein, 6 aa, Artificial sequence
  Protein classification predicting sequence
AFYHDS

SEQ ID NO: 17410 - protein, 8 aa, Artificial sequence
  Protein classification predicting sequence
RMIAKIPT

SEQ ID NO: 17411 - protein, 10 aa, Artificial sequence
  Protein classification predicting sequence
MCFAVPCEEY

SEQ ID NO: 17412 - protein, 17 aa, Artificial sequence
  Protein classification predicting sequence
RLMGFGHRVYKNYDPRA

SEQ ID NO: 17413 - protein, 6 aa, Artificial sequence
  Protein classification predicting sequence
EMIEDP

SEQ ID NO: 17414 - protein, 20 aa, Artificial sequence
  Protein classification predicting sequence
MDLIAKLPCVAAKIYRNLYR

SEQ ID NO: 17415 - protein, 14 aa, Artificial sequence
  Protein classification predicting sequence
NPWPNVDAHSGVLL

SEQ ID NO: 17416 - protein, 11 aa, Artificial sequence
  Protein classification predicting sequence
LDPDEGIRFRG

SEQ ID NO: 17417 - protein, 7 aa, Artificial sequence
  Protein classification predicting sequence
RDAHPMA

SEQ ID NO: 17418 - protein, 10 aa, Artificial sequence
  Protein classification predicting sequence
GLIYRAMGFP

SEQ ID NO: 17419 - protein, 6 aa, Artificial sequence
  Protein classification predicting sequence
CESKIT

SEQ ID NO: 17420 - protein, 6 aa, Artificial sequence
  Protein classification predicting sequence
DAHPMA

SEQ ID NO: 17421 - protein, 13 aa, Artificial sequence
  Protein classification predicting sequence
AAMSYKYSIGQPF

SEQ ID NO: 17422 - protein, 14 aa, Artificial sequence
  Protein classification predicting sequence
IFILHADHEQNAST

SEQ ID NO: 17423 - protein, 8 aa, Artificial sequence
  Protein classification predicting sequence
IGQPFVYP

SEQ ID NO: 17424 - protein, 12 aa, Artificial sequence
  Protein classification predicting sequence
LWGPAHGGANEA

SEQ ID NO: 17425 - protein, 16 aa, Artificial sequence
  Protein classification predicting sequence
CQREFALKHLPDDPLF

SEQ ID NO: 17426 - protein, 8 aa, Artificial sequence
  Protein classification predicting sequence
TVLFGVSR

SEQ ID NO: 17427 - protein, 14 aa, Artificial sequence
  Protein classification predicting sequence
TALNSESNFARAYA

SEQ ID NO: 17428 - protein, 15 aa, Artificial sequence
  Protein classification predicting sequence
LDWSHNFTNMLGYTD

SEQ ID NO: 17429 - protein, 19 aa, Artificial sequence
  Protein classification predicting sequence
RLYLTIHSDHEGGNVSAHT

SEQ ID NO: 17430 - protein, 12 aa, Artificial sequence
  Protein classification predicting sequence
LIPKEQARIKTF

SEQ ID NO: 17431 - protein, 16 aa, Artificial sequence
  Protein classification predicting sequence
DPMFKLVAQLYKIVPN

SEQ ID NO: 17432 - protein, 7 aa, Artificial sequence
  Protein classification predicting sequence
RLYLTIH

SEQ ID NO: 17433 - protein, 10 aa, Artificial sequence
  Protein classification predicting sequence
DPGFMSTASC

SEQ ID NO: 17434 - protein, 10 aa, Artificial sequence
  Protein classification predicting sequence
LYPNVDFYSG

SEQ ID NO: 17435 - protein, 8 aa, Artificial sequence
  Protein classification predicting sequence
LLHRGFPI

SEQ ID NO: 17436 - protein, 9 aa, Artificial sequence
  Protein classification predicting sequence
LLEVAMELE

SEQ ID NO: 17437 - protein, 6 aa, Artificial sequence
  Protein classification predicting sequence
DEYFIE

SEQ ID NO: 17438 - protein, 10 aa, Artificial sequence
  Protein classification predicting sequence
YFIEKKLYPN

SEQ ID NO: 17439 - protein, 7 aa, Artificial sequence
  Protein classification predicting sequence
FTYDPGF

SEQ ID NO: 17440 - protein, 10 aa, Artificial sequence
  Protein classification predicting sequence
PRYTCQREFA

SEQ ID NO: 17441 - protein, 13 aa, Artificial sequence
  Protein classification predicting sequence
DPLFQLVSKLYEV

SEQ ID NO: 17442 - protein, 13 aa, Artificial sequence
  Protein classification predicting sequence
PWPNVDAHSGVLL

SEQ ID NO: 17443 - protein, 10 aa, Artificial sequence
  Protein classification predicting sequence
YYTVLFGVSR

SEQ ID NO: 17444 - protein, 9 aa, Artificial sequence
  Protein classification predicting sequence
EDSMDLIAK

SEQ ID NO: 17445 - protein, 16 aa, Artificial sequence
  Protein classification predicting sequence
NGLAGPLHGLANQEVL

SEQ ID NO: 17446 - protein, 9 aa, Artificial sequence
  Protein classification predicting sequence
GLTGARGEA

SEQ ID NO: 17447 - protein, 9 aa, Artificial sequence
  Protein classification predicting sequence
EGEPPYLNE

SEQ ID NO: 17448 - protein, 12 aa, Artificial sequence
  Protein classification predicting sequence
NFTHKVHVGFDP

SEQ ID NO: 17449 - protein, 10 aa, Artificial sequence
  Protein classification predicting sequence
NIVNFLDSYL

SEQ ID NO: 17450 - protein, 6 aa, Artificial sequence
  Protein classification predicting sequence
LWVVME

SEQ ID NO: 17451 - protein, 7 aa, Artificial sequence
  Protein classification predicting sequence
GRVDNIR

SEQ ID NO: 17452 - protein, 40 aa, Artificial sequence
  Protein classification predicting sequence
MPEPEHVIVACCNQFFVLDVVINFRRLSEGDLFTQLRKIV

SEQ ID NO: 17453 - protein, 9 aa, Artificial sequence
  Protein classification predicting sequence
LASSAEKLQ

SEQ ID NO: 17454 - protein, 7 aa, Artificial sequence
  Protein classification predicting sequence
IVKNLDF

SEQ ID NO: 17455 - protein, 14 aa, Artificial sequence
  Protein classification predicting sequence
RLVPTYESASIRRF

SEQ ID NO: 17456 - protein, 15 aa, Artificial sequence
  Protein classification predicting sequence
EGRVDNIRSATPEAL

SEQ ID NO: 17457 - protein, 9 aa, Artificial sequence
  Protein classification predicting sequence
LISGVLSYK

SEQ ID NO: 17458 - protein, 7 aa, Artificial sequence
  Protein classification predicting sequence
NHSCSPN

SEQ ID NO: 17459 - protein, 9 aa, Artificial sequence
  Protein classification predicting sequence
HVEASQLLF

SEQ ID NO: 17460 - protein, 8 aa, Artificial sequence
  Protein classification predicting sequence
KGFPESYD

SEQ ID NO: 17461 - protein, 6 aa, Artificial sequence
  Protein classification predicting sequence
APVYSH

SEQ ID NO: 17462 - protein, 6 aa, Artificial sequence
  Protein classification predicting sequence
TTDGFL

SEQ ID NO: 17463 - protein, 7 aa, Artificial sequence
  Protein classification predicting sequence
EGINVLQ

SEQ ID NO: 17464 - protein, 6 aa, Artificial sequence
  Protein classification predicting sequence
PDSYFH

SEQ ID NO: 17465 - protein, 26 aa, Artificial sequence
  Protein classification predicting sequence
IIGVAGSVAVGKSTTARVLQALLARW

SEQ ID NO: 17466 - protein, 13 aa, Artificial sequence
  Protein classification predicting sequence
AGSVAVGKSTTAR

SEQ ID NO: 17467 - protein, 7 aa, Artificial sequence
  Protein classification predicting sequence
SDFFDFS

SEQ ID NO: 17468 - protein, 16 aa, Artificial sequence
  Protein classification predicting sequence
PFIIGVAGSVAVGKST

SEQ ID NO: 17469 - protein, 13 aa, Artificial sequence
  Protein classification predicting sequence
IGVAGSVAVGKST

SEQ ID NO: 17470 - protein, 7 aa, Artificial sequence
  Protein classification predicting sequence
EGLNVLQ

SEQ ID NO: 17471 - protein, 21 aa, Artificial sequence
  Protein classification predicting sequence
EGLNVLQTGPTLMVSDLFDFS

SEQ ID NO: 17472 - protein, 11 aa, Artificial sequence
  Protein classification predicting sequence
PNLVENILPTR

SEQ ID NO: 17473 - protein, 10 aa, Artificial sequence
  Protein classification predicting sequence
GSVAVGKSTT

SEQ ID NO: 17474 - protein, 6 aa, Artificial sequence
  Protein classification predicting sequence
KWYIDR

SEQ ID NO: 17475 - protein, 10 aa, Artificial sequence
  Protein classification predicting sequence
ARNVWKTVNL

SEQ ID NO: 17476 - protein, 9 aa, Artificial sequence
  Protein classification predicting sequence
KFVSDLKSG

SEQ ID NO: 17477 - protein, 8 aa, Artificial sequence
  Protein classification predicting sequence
DFSIYVDA

SEQ ID NO: 17478 - protein, 6 aa, Artificial sequence
  Protein classification predicting sequence
RFLKFR

SEQ ID NO: 17479 - protein, 16 aa, Artificial sequence
  Protein classification predicting sequence
PYIISIAGSVAVGKST

SEQ ID NO: 17480 - protein, 13 aa, Artificial sequence
  Protein classification predicting sequence
PDILILEGLNVLQ

SEQ ID NO: 17481 - protein, 14 aa, Artificial sequence
  Protein classification predicting sequence
FVSDFVDFSIYVDA

SEQ ID NO: 17482 - protein, 12 aa, Artificial sequence
  Protein classification predicting sequence
GSVAVGKSTTAR

SEQ ID NO: 17483 - protein, 9 aa, Artificial sequence
  Protein classification predicting sequence
LVTTDGFLY

SEQ ID NO: 17484 - protein, 7 aa, Artificial sequence
  Protein classification predicting sequence
TTDGFLY

SEQ ID NO: 17485 - protein, 8 aa, Artificial sequence
  Protein classification predicting sequence
PDILIVEG

SEQ ID NO: 17486 - protein, 14 aa, Artificial sequence
  Protein classification predicting sequence
PFIIGVSGSVAVGK

SEQ ID NO: 17487 - protein, 8 aa, Artificial sequence
  Protein classification predicting sequence
DFSVYVDA

SEQ ID NO: 17488 - protein, 6 aa, Artificial sequence
  Protein classification predicting sequence
PTRNRA

SEQ ID NO: 17489 - protein, 9 aa, Artificial sequence
  Protein classification predicting sequence
LVLRKDADH

SEQ ID NO: 17490 - protein, 11 aa, Artificial sequence
  Protein classification predicting sequence
LVTTDGFLYPN

SEQ ID NO: 17491 - protein, 8 aa, Artificial sequence
  Protein classification predicting sequence
RKGFPESY

SEQ ID NO: 17492 - protein, 10 aa, Artificial sequence
  Protein classification predicting sequence
APVYSHLIYD

SEQ ID NO: 17493 - protein, 11 aa, Artificial sequence
  Protein classification predicting sequence
ERGLMKKKGFP

SEQ ID NO: 17494 - protein, 42 aa, Artificial sequence
  Protein classification predicting sequence
QPDILILEGLNVLQSGMDYPHDPHHVFVSDFVDFSIYVDAPE

SEQ ID NO: 17495 - protein, 13 aa, Artificial sequence
  Protein classification predicting sequence
QNILPTRERASLI

SEQ ID NO: 17496 - protein, 8 aa, Artificial sequence
  Protein classification predicting sequence
LITTDGFL

SEQ ID NO: 17497 - protein, 10 aa, Artificial sequence
  Protein classification predicting sequence
RFMRLRETAF

SEQ ID NO: 17498 - protein, 6 aa, Artificial sequence
  Protein classification predicting sequence
LRETAF

SEQ ID NO: 17499 - protein, 31 aa, Artificial sequence
  Protein classification predicting sequence
LLQTWYINRFLKFREGAFTDPDSYFHNYAKL

SEQ ID NO: 17500 - protein, 24 aa, Artificial sequence
  Protein classification predicting sequence
LWKEINWLNLKQNILPTRERASLI

SEQ ID NO: 17501 - protein, 7 aa, Artificial sequence
  Protein classification predicting sequence
VPMTLSE

SEQ ID NO: 17502 - protein, 10 aa, Artificial sequence
  Protein classification predicting sequence
LVTTDGFLYP

SEQ ID NO: 17503 - protein, 8 aa, Artificial sequence
  Protein classification predicting sequence
TTDGFLYP

SEQ ID NO: 17504 - protein, 6 aa, Artificial sequence
  Protein classification predicting sequence
PTRERA

SEQ ID NO: 17505 - protein, 14 aa, Artificial sequence
  Protein classification predicting sequence
DVIDIYLPLINLIQ

SEQ ID NO: 17506 - protein, 8 aa, Artificial sequence
  Protein classification predicting sequence
QENLSFSK

SEQ ID NO: 17507 - protein, 25 aa, Artificial sequence
  Protein classification predicting sequence
RPFIIGISGSVAVGKSTTSRLLQLL

SEQ ID NO: 17508 - protein, 11 aa, Artificial sequence
  Protein classification predicting sequence
EGINVFQNQQN

SEQ ID NO: 17509 - protein, 9 aa, Artificial sequence
  Protein classification predicting sequence
FDFSIYIDA

SEQ ID NO: 17510 - protein, 11 aa, Artificial sequence
  Protein classification predicting sequence
LQALLSRWPEH

SEQ ID NO: 17511 - protein, 8 aa, Artificial sequence
  Protein classification predicting sequence
EGINVFQN

SEQ ID NO: 17512 - protein, 9 aa, Artificial sequence
  Protein classification predicting sequence
QNNRLYMSD

SEQ ID NO: 17513 - protein, 16 aa, Artificial sequence
  Protein classification predicting sequence
SGSVAVGKSTTSRLLQ

SEQ ID NO: 17514 - protein, 7 aa, Artificial sequence
  Protein classification predicting sequence
APVYSHL

SEQ ID NO: 17515 - protein, 17 aa, Artificial sequence
  Protein classification predicting sequence
EGLNVLQSGMDYPHDPH

SEQ ID NO: 17516 - protein, 10 aa, Artificial sequence
  Protein classification predicting sequence
QWAALRDSVP

SEQ ID NO: 17517 - protein, 29 aa, Artificial sequence
  Protein classification predicting sequence
IYLPLSRLLNFYISSNLRRQAVLEQFLGT

SEQ ID NO: 17518 - protein, 13 aa, Artificial sequence
  Protein classification predicting sequence
VELITTDGFLHPN

SEQ ID NO: 17519 - protein, 17 aa, Artificial sequence
  Protein classification predicting sequence
ERGLMKKKGFPESYDMH

SEQ ID NO: 17520 - protein, 11 aa, Artificial sequence
  Protein classification predicting sequence
PDSYFHNYAKL

SEQ ID NO: 17521 - protein, 17 aa, Artificial sequence
  Protein classification predicting sequence
LRGLRAVSDFEYEFQLA

SEQ ID NO: 17522 - protein, 23 aa, Artificial sequence
  Protein classification predicting sequence
LRGLRAVSDFEYEFQLANMNRQL

SEQ ID NO: 17523 - protein, 6 aa, Artificial sequence
  Protein classification predicting sequence
LVREIA

SEQ ID NO: 17524 - protein, 6 aa, Artificial sequence
  Protein classification predicting sequence
TNGHLD

SEQ ID NO: 17525 - protein, 6 aa, Artificial sequence
  Protein classification predicting sequence
QMAGMN

SEQ ID NO: 17526 - protein, 7 aa, Artificial sequence
  Protein classification predicting sequence
VAVLRNP

SEQ ID NO: 17527 - protein, 8 aa, Artificial sequence
  Protein classification predicting sequence
TKHLPNVE

SEQ ID NO: 17528 - protein, 7 aa, Artificial sequence
  Protein classification predicting sequence
YPGTFDP

SEQ ID NO: 17529 - protein, 8 aa, Artificial sequence
  Protein classification predicting sequence
GHLDIVKR

SEQ ID NO: 17530 - protein, 9 aa, Artificial sequence
  Protein classification predicting sequence
VLNNSSKKP

SEQ ID NO: 17531 - protein, 7 aa, Artificial sequence
  Protein classification predicting sequence
SSTIVRE

SEQ ID NO: 17532 - protein, 9 aa, Artificial sequence
  Protein classification predicting sequence
ATAIVRGLR

SEQ ID NO: 17533 - protein, 14 aa, Artificial sequence
  Protein classification predicting sequence
RGLRAVSDFEYEMQ

SEQ ID NO: 17534 - protein, 20 aa, Artificial sequence
  Protein classification predicting sequence
MTNNQYSFLSSSIVKEVARY

SEQ ID NO: 17535 - protein, 12 aa, Artificial sequence
  Protein classification predicting sequence
MAPELQTVFLPA

SEQ ID NO: 17536 - protein, 12 aa, Artificial sequence
  Protein classification predicting sequence
TLVRQIASMGGD

SEQ ID NO: 17537 - protein, 6 aa, Artificial sequence
  Protein classification predicting sequence
GHLDII

SEQ ID NO: 17538 - protein, 9 aa, Artificial sequence
  Protein classification predicting sequence
AVYPGTFDP

SEQ ID NO: 17539 - protein, 9 aa, Artificial sequence
  Protein classification predicting sequence
EVLGHYPNV

SEQ ID NO: 17540 - protein, 43 aa, Artificial sequence
  Protein classification predicting sequence
LLPDVETMFMTPSDQYQFISGTIVREIAQLGGDVSKFVFPSVE

SEQ ID NO: 17541 - protein, 7 aa, Artificial sequence
  Protein classification predicting sequence
DFEYEFQ

SEQ ID NO: 17542 - protein, 6 aa, Artificial sequence
  Protein classification predicting sequence
LGGDVS

SEQ ID NO: 17543 - protein, 9 aa, Artificial sequence
  Protein classification predicting sequence
LGGDVSKFV

SEQ ID NO: 17544 - protein, 12 aa, Artificial sequence
  Protein classification predicting sequence
RGLRAVSDFEYE

SEQ ID NO: 17545 - protein, 8 aa, Artificial sequence
  Protein classification predicting sequence
GHLDIIKR

SEQ ID NO: 17546 - protein, 8 aa, Artificial sequence
  Protein classification predicting sequence
FDKVVVGI

SEQ ID NO: 17547 - protein, 8 aa, Artificial sequence
  Protein classification predicting sequence
KEVARYGG

SEQ ID NO: 17548 - protein, 9 aa, Artificial sequence
  Protein classification predicting sequence
RGLRAVSDF

SEQ ID NO: 17549 - protein, 12 aa, Artificial sequence
  Protein classification predicting sequence
YPGTFDPITNGH

SEQ ID NO: 17550 - protein, 6 aa, Artificial sequence
  Protein classification predicting sequence
GFSDLM

SEQ ID NO: 17551 - protein, 8 aa, Artificial sequence
  Protein classification predicting sequence
GDVTHFLP

SEQ ID NO: 17552 - protein, 25 aa, Artificial sequence
  Protein classification predicting sequence
ANAILRGLRAVSDFEYEMQITSMNR

SEQ ID NO: 17553 - protein, 9 aa, Artificial sequence
  Protein classification predicting sequence
LDENIETFF

SEQ ID NO: 17554 - protein, 7 aa, Artificial sequence
  Protein classification predicting sequence
IIRGLRA

SEQ ID NO: 17555 - protein, 10 aa, Artificial sequence
  Protein classification predicting sequence
RGLRAVSDFE

SEQ ID NO: 17556 - protein, 6 aa, Artificial sequence
  Protein classification predicting sequence
PGTFDP

SEQ ID NO: 17557 - protein, 8 aa, Artificial sequence
  Protein classification predicting sequence
GHLDIIER

SEQ ID NO: 17558 - protein, 8 aa, Artificial sequence
  Protein classification predicting sequence
FDPVTNGH

SEQ ID NO: 17559 - protein, 7 aa, Artificial sequence
  Protein classification predicting sequence
DLIERAA

SEQ ID NO: 17560 - protein, 14 aa, Artificial sequence
  Protein classification predicting sequence
RGLRAVSDFEYEFQ

SEQ ID NO: 17561 - protein, 16 aa, Artificial sequence
  Protein classification predicting sequence
RGLRAVSDFEYEFQLA

SEQ ID NO: 17562 - protein, 20 aa, Artificial sequence
  Protein classification predicting sequence
RGLRAVSDFEYEFQLANMNR

SEQ ID NO: 17563 - protein, 9 aa, Artificial sequence
  Protein classification predicting sequence
SSSLVKEVA

SEQ ID NO: 17564 - protein, 9 aa, Artificial sequence
  Protein classification predicting sequence
AIYPGTFDP

SEQ ID NO: 17565 - protein, 11 aa, Artificial sequence
  Protein classification predicting sequence
GFSDLMANFAR

SEQ ID NO: 17566 - protein, 26 aa, Artificial sequence
  Protein classification predicting sequence
LIRGLRAVADFEYEMQLAHMNRHLMP

SEQ ID NO: 17567 - protein, 21 aa, Artificial sequence
  Protein classification predicting sequence
KEWSFISSSLVKEVARHQGDV

SEQ ID NO: 17568 - protein, 9 aa, Artificial sequence
  Protein classification predicting sequence
IETFFIMTN

SEQ ID NO: 17569 - protein, 7 aa, Artificial sequence
  Protein classification predicting sequence
NVEVVGF

SEQ ID NO: 17570 - protein, 15 aa, Artificial sequence
  Protein classification predicting sequence
KVVVGGTFDRLHLGH

SEQ ID NO: 17571 - protein, 36 aa, Artificial sequence
  Protein classification predicting sequence
DFEYELQMAQMNKHIAGVDTFFVATAPRYSFVSSSL

SEQ ID NO: 17572 - protein, 16 aa, Artificial sequence
  Protein classification predicting sequence
KEVAMLGGDVSELLPE

SEQ ID NO: 17573 - protein, 7 aa, Artificial sequence
  Protein classification predicting sequence
AIYPGSF

SEQ ID NO: 17574 - protein, 12 aa, Artificial sequence
  Protein classification predicting sequence
MTNNQYSFLSSS

SEQ ID NO: 17575 - protein, 7 aa, Artificial sequence
  Protein classification predicting sequence
QLANMNR

SEQ ID NO: 17576 - protein, 7 aa, Artificial sequence
  Protein classification predicting sequence
ILRGLRA

SEQ ID NO: 17577 - protein, 8 aa, Artificial sequence
  Protein classification predicting sequence
GHLDLIER

SEQ ID NO: 17578 - protein, 12 aa, Artificial sequence
  Protein classification predicting sequence
TPSDQYQFISGT

SEQ ID NO: 17579 - protein, 7 aa, Artificial sequence
  Protein classification predicting sequence
GSFDPVT

SEQ ID NO: 17580 - protein, 7 aa, Artificial sequence
  Protein classification predicting sequence
DLDYEMQ

SEQ ID NO: 17581 - protein, 8 aa, Artificial sequence
  Protein classification predicting sequence
FDPITNGH

SEQ ID NO: 17582 - protein, 21 aa, Artificial sequence
  Protein classification predicting sequence
DIVTRATQMFDHVILAIAASP

SEQ ID NO: 17583 - protein, 7 aa, Artificial sequence
  Protein classification predicting sequence
KKPMFTL

SEQ ID NO: 17584 - protein, 22 aa, Artificial sequence
  Protein classification predicting sequence
ATAHLGNVEVVGFSDLMANFAR

SEQ ID NO: 17585 - protein, 14 aa, Artificial sequence
  Protein classification predicting sequence
DRFDEIHVCVLKNS

SEQ ID NO: 17586 - protein, 16 aa, Artificial sequence
  Protein classification predicting sequence
NYSFISSSIVKEVAAY

SEQ ID NO: 17587 - protein, 21 aa, Artificial sequence
  Protein classification predicting sequence
AVIPGSFDPITYGHLDIIERS

SEQ ID NO: 17588 - protein, 31 aa, Artificial sequence
  Protein classification predicting sequence
QVGAKTIIRGLRAVSDFEYELRLTSMNKKLN

SEQ ID NO: 17589 - protein, 9 aa, Artificial sequence
  Protein classification predicting sequence
YELQMAQMN

SEQ ID NO: 17590 - protein, 7 aa, Artificial sequence
  Protein classification predicting sequence
GSFDPIT

SEQ ID NO: 17591 - protein, 7 aa, Artificial sequence
  Protein classification predicting sequence
SSSLVKE

SEQ ID NO: 17592 - protein, 7 aa, Artificial sequence
  Protein classification predicting sequence
YSFLSSS

SEQ ID NO: 17593 - protein, 7 aa, Artificial sequence
  Protein classification predicting sequence
SSSIVKE

SEQ ID NO: 17594 - protein, 7 aa, Artificial sequence
  Protein classification predicting sequence
MFTLEER

SEQ ID NO: 17595 - protein, 7 aa, Artificial sequence
  Protein classification predicting sequence
YPGSFDP

SEQ ID NO: 17596 - protein, 7 aa, Artificial sequence
  Protein classification predicting sequence
GLRAVSD

SEQ ID NO: 17597 - protein, 7 aa, Artificial sequence
  Protein classification predicting sequence
RYSFVSS

SEQ ID NO: 17598 - protein, 7 aa, Artificial sequence
  Protein classification predicting sequence
DIIKRGA

SEQ ID NO: 17599 - protein, 7 aa, Artificial sequence
  Protein classification predicting sequence
TKDIPNV

SEQ ID NO: 17600 - protein, 9 aa, Artificial sequence
  Protein classification predicting sequence
VREVAIHGG

SEQ ID NO: 17601 - protein, 6 aa, Artificial sequence
  Protein classification predicting sequence
LESVFL

SEQ ID NO: 17602 - protein, 23 aa, Artificial sequence
  Protein classification predicting sequence
VLIRGLRTTVDFEYEFGLTNMYR

SEQ ID NO: 17603 - protein, 9 aa, Artificial sequence
  Protein classification predicting sequence
YPGTFDPIT

SEQ ID NO: 17604 - protein, 15 aa, Artificial sequence
  Protein classification predicting sequence
WSFISSSLVKEVARH

SEQ ID NO: 17605 - protein, 8 aa, Artificial sequence
  Protein classification predicting sequence
FDPVTLGH

SEQ ID NO: 17606 - protein, 7 aa, Artificial sequence
  Protein classification predicting sequence
LEAITHP

SEQ ID NO: 17607 - protein, 8 aa, Artificial sequence
  Protein classification predicting sequence
TGGIGSGK

SEQ ID NO: 17608 - protein, 9 aa, Artificial sequence
  Protein classification predicting sequence
VVEPGAPAL

SEQ ID NO: 17609 - protein, 6 aa, Artificial sequence
  Protein classification predicting sequence
IVHPLV

SEQ ID NO: 17610 - protein, 7 aa, Artificial sequence
  Protein classification predicting sequence
IVHPAVR

SEQ ID NO: 17611 - protein, 8 aa, Artificial sequence
  Protein classification predicting sequence
VIDADIIA

SEQ ID NO: 17612 - protein, 8 aa, Artificial sequence
  Protein classification predicting sequence
SQMPLEEK

SEQ ID NO: 17613 - protein, 7 aa, Artificial sequence
  Protein classification predicting sequence
IGITGGI

SEQ ID NO: 17614 - protein, 8 aa, Artificial sequence
  Protein classification predicting sequence
VVLDIPLL

SEQ ID NO: 17615 - protein, 7 aa, Artificial sequence
  Protein classification predicting sequence
LWVVPLL

SEQ ID NO: 17616 - protein, 6 aa, Artificial sequence
  Protein classification predicting sequence
GLTGGI

SEQ ID NO: 17617 - protein, 8 aa, Artificial sequence
  Protein classification predicting sequence
ELRVRRLV

SEQ ID NO: 17618 - protein, 8 aa, Artificial sequence
  Protein classification predicting sequence
ADDVIVND

SEQ ID NO: 17619 - protein, 7 aa, Artificial sequence
  Protein classification predicting sequence
DIPLLFE

SEQ ID NO: 17620 - protein, 7 aa, Artificial sequence
  Protein classification predicting sequence
IGLTGGI

SEQ ID NO: 17621 - protein, 10 aa, Artificial sequence
  Protein classification predicting sequence
HASADPGRPT

SEQ ID NO: 17622 - protein, 7 aa, Artificial sequence
  Protein classification predicting sequence
LLFVDWL

SEQ ID NO: 17623 - protein, 9 aa, Artificial sequence
  Protein classification predicting sequence
LNGIVHPLV

SEQ ID NO: 17624 - protein, 7 aa, Artificial sequence
  Protein classification predicting sequence
DADIIAR

SEQ ID NO: 17625 - protein, 10 aa, Artificial sequence
  Protein classification predicting sequence
SGKTTVANLF

SEQ ID NO: 17626 - protein, 7 aa, Artificial sequence
  Protein classification predicting sequence
IIHPIVR

SEQ ID NO: 17627 - protein, 7 aa, Artificial sequence
  Protein classification predicting sequence
PLLVESG

SEQ ID NO: 17628 - protein, 8 aa, Artificial sequence
  Protein classification predicting sequence
FYLTLRGG

SEQ ID NO: 17629 - protein, 13 aa, Artificial sequence
  Protein classification predicting sequence
AARWVVEPGRPAL

SEQ ID NO: 17630 - protein, 16 aa, Artificial sequence
  Protein classification predicting sequence
PWILGLTGGIGSGKSA

SEQ ID NO: 17631 - protein, 12 aa, Artificial sequence
  Protein classification predicting sequence
GLTGGIGSGKSA

SEQ ID NO: 17632 - protein, 7 aa, Artificial sequence
  Protein classification predicting sequence
VVPLLVE

SEQ ID NO: 17633 - protein, 17 aa, Artificial sequence
  Protein classification predicting sequence
QATREARLAVADDVIDN

SEQ ID NO: 17634 - protein, 13 aa, Artificial sequence
  Protein classification predicting sequence
LTGGIGSGKSTVA

SEQ ID NO: 17635 - protein, 7 aa, Artificial sequence
  Protein classification predicting sequence
RVLVVDV

SEQ ID NO: 17636 - protein, 14 aa, Artificial sequence
  Protein classification predicting sequence
RTMQRDDVTREHVE

SEQ ID NO: 17637 - protein, 37 aa, Artificial sequence
  Protein classification predicting sequence
ILAAQATREARLAVADDVIDNNGAPDAIASDVARLHA

SEQ ID NO: 17638 - protein, 29 aa, Artificial sequence
  Protein classification predicting sequence
NMIAADGTLQRRALRERIFANPEEKNWLN

SEQ ID NO: 17639 - protein, 11 aa, Artificial sequence
  Protein classification predicting sequence
REAVKKGSKGL

SEQ ID NO: 17640 - protein, 11 aa, Artificial sequence
  Protein classification predicting sequence
EAIDENGEMNR

SEQ ID NO: 17641 - protein, 8 aa, Artificial sequence
  Protein classification predicting sequence
VIMDIPLL

SEQ ID NO: 17642 - protein, 15 aa, Artificial sequence
  Protein classification predicting sequence
TVDEVWVVYTSESIQ

SEQ ID NO: 17643 - protein, 26 aa, Artificial sequence
  Protein classification predicting sequence
RNNLSLEDAKARVYSQISIDKKSRMA

SEQ ID NO: 17644 - protein, 16 aa, Artificial sequence
  Protein classification predicting sequence
HVIDNLGDKLELKQNL

SEQ ID NO: 17645 - protein, 8 aa, Artificial sequence
  Protein classification predicting sequence
LLEEEGYI

SEQ ID NO: 17646 - protein, 9 aa, Artificial sequence
  Protein classification predicting sequence
VIDADQVVH

SEQ ID NO: 17647 - protein, 6 aa, Artificial sequence
  Protein classification predicting sequence
DGELDR

SEQ ID NO: 17648 - protein, 9 aa, Artificial sequence
  Protein classification predicting sequence
IFFMDIPLL

SEQ ID NO: 17649 - protein, 10 aa, Artificial sequence
  Protein classification predicting sequence
TGGIASGKST

SEQ ID NO: 17650 - protein, 15 aa, Artificial sequence
  Protein classification predicting sequence
GYQVIDADQVVHDLQ

SEQ ID NO: 17651 - protein, 10 aa, Artificial sequence
  Protein classification predicting sequence
LIKQVQSALL

SEQ ID NO: 17652 - protein, 8 aa, Artificial sequence
  Protein classification predicting sequence
RVMARSGL

SEQ ID NO: 17653 - protein, 7 aa, Artificial sequence
  Protein classification predicting sequence
LNEITHP

SEQ ID NO: 17654 - protein, 9 aa, Artificial sequence
  Protein classification predicting sequence
LTGGIASGK

SEQ ID NO: 17655 - protein, 8 aa, Artificial sequence
  Protein classification predicting sequence
WLNALLHP

SEQ ID NO: 17656 - protein, 21 aa, Artificial sequence
  Protein classification predicting sequence
YIVALTGGIGSGKSTVANAFA

SEQ ID NO: 17657 - protein, 11 aa, Artificial sequence
  Protein classification predicting sequence
LLHPLIQQETQ

SEQ ID NO: 17658 - protein, 7 aa, Artificial sequence
  Protein classification predicting sequence
VVQFIKG

SEQ ID NO: 17659 - protein, 9 aa, Artificial sequence
  Protein classification predicting sequence
SGLPFDDFR

SEQ ID NO: 17660 - protein, 6 aa, Artificial sequence
  Protein classification predicting sequence
FAGDHG

SEQ ID NO: 17661 - protein, 8 aa, Artificial sequence
  Protein classification predicting sequence
GEMGIGNT

SEQ ID NO: 17662 - protein, 9 aa, Artificial sequence
  Protein classification predicting sequence
DGFIVSVAA

SEQ ID NO: 17663 - protein, 8 aa, Artificial sequence
  Protein classification predicting sequence
LGMRLGEG

SEQ ID NO: 17664 - protein, 15 aa, Artificial sequence
  Protein classification predicting sequence
LGMRLGEGTGAALAA

SEQ ID NO: 17665 - protein, 6 aa, Artificial sequence
  Protein classification predicting sequence
ANTTPA

SEQ ID NO: 17666 - protein, 8 aa, Artificial sequence
  Protein classification predicting sequence
LHNGMATF

SEQ ID NO: 17667 - protein, 6 aa, Artificial sequence
  Protein classification predicting sequence
MRLGEG

SEQ ID NO: 17668 - protein, 6 aa, Artificial sequence
  Protein classification predicting sequence
GIGNTT

SEQ ID NO: 17669 - protein, 7 aa, Artificial sequence
  Protein classification predicting sequence
NTTPAAA

SEQ ID NO: 17670 - protein, 9 aa, Artificial sequence
  Protein classification predicting sequence
AQAAVRRTP

SEQ ID NO: 17671 - protein, 61 aa, Artificial sequence
  Protein classification predicting sequence
AGVMLGAASCGLPVLLDGFLSYAAALAACQMSPAIKPYLIPSHLSAEKGARIALSHLGLEP

SEQ ID NO: 17672 - protein, 13 aa, Artificial sequence
  Protein classification predicting sequence
MRLGEGSGAALAM

SEQ ID NO: 17673 - protein, 56 aa, Artificial sequence
  Protein classification predicting sequence
QAGANVHVIDVGIDTAEPIPGLINMRVARGSGNIASAPAMSRRQAEKLLLDVICYT

SEQ ID NO: 17674 - protein, 14 aa, Artificial sequence
  Protein classification predicting sequence
DLLCIGEMGIGNTT

SEQ ID NO: 17675 - protein, 9 aa, Artificial sequence
  Protein classification predicting sequence
GEMGIGNTT

SEQ ID NO: 17676 - protein, 7 aa, Artificial sequence
  Protein classification predicting sequence
DHCLIGH

SEQ ID NO: 17677 - protein, 9 aa, Artificial sequence
  Protein classification predicting sequence
GAALAAGIV

SEQ ID NO: 17678 - protein, 17 aa, Artificial sequence
  Protein classification predicting sequence
LFGVGELGMANTTPAAA

SEQ ID NO: 17679 - protein, 9 aa, Artificial sequence
  Protein classification predicting sequence
AGVMLGAAS

SEQ ID NO: 17680 - protein, 9 aa, Artificial sequence
  Protein classification predicting sequence
SYAAALAAC

SEQ ID NO: 17681 - protein, 12 aa, Artificial sequence
  Protein classification predicting sequence
YLIPSHLSAEKG

SEQ ID NO: 17682 - protein, 8 aa, Artificial sequence
  Protein classification predicting sequence
LGLRLGEG

SEQ ID NO: 17683 - protein, 7 aa, Artificial sequence
  Protein classification predicting sequence
VLVDGFI

SEQ ID NO: 17684 - protein, 6 aa, Artificial sequence
  Protein classification predicting sequence
VTAQMV

SEQ ID NO: 17685 - protein, 7 aa, Artificial sequence
  Protein classification predicting sequence
FAGNHGV

SEQ ID NO: 17686 - protein, 13 aa, Artificial sequence
  Protein classification predicting sequence
KAVLVMCADHGVW

SEQ ID NO: 17687 - protein, 14 aa, Artificial sequence
  Protein classification predicting sequence
GTTGVCVLAAQAGA

SEQ ID NO: 17688 - protein, 9 aa, Artificial sequence
  Protein classification predicting sequence
VHVIDVGID

SEQ ID NO: 17689 - protein, 10 aa, Artificial sequence
  Protein classification predicting sequence
EVVGIGANLP

SEQ ID NO: 17690 - protein, 13 aa, Artificial sequence
  Protein classification predicting sequence
CGLPVLLDGFLSY

SEQ ID NO: 17691 - protein, 10 aa, Artificial sequence
  Protein classification predicting sequence
SAEKGARIAL

SEQ ID NO: 17692 - protein, 13 aa, Artificial sequence
  Protein classification predicting sequence
NMGELAASNIVLP

SEQ ID NO: 17693 - protein, 7 aa, Artificial sequence
  Protein classification predicting sequence
LGEGTGA

SEQ ID NO: 17694 - protein, 13 aa, Artificial sequence
  Protein classification predicting sequence
NFLAGGAAINCFC

SEQ ID NO: 17695 - protein, 10 aa, Artificial sequence
  Protein classification predicting sequence
TPVLVDGFIV

SEQ ID NO: 17696 - protein, 7 aa, Artificial sequence
  Protein classification predicting sequence
GEMGIGN

SEQ ID NO: 17697 - protein, 7 aa, Artificial sequence
  Protein classification predicting sequence
LAKGAGF

SEQ ID NO: 17698 - protein, 30 aa, Artificial sequence
  Protein classification predicting sequence
VSDEEANLFAMQLASASVLPMVLKAAIELD

SEQ ID NO: 17699 - protein, 6 aa, Artificial sequence
  Protein classification predicting sequence
IKGINF

SEQ ID NO: 17700 - protein, 6 aa, Artificial sequence
  Protein classification predicting sequence
VMCCAF

SEQ ID NO: 17701 - protein, 9 aa, Artificial sequence
  Protein classification predicting sequence
ALPDNGKVI

SEQ ID NO: 17702 - protein, 9 aa, Artificial sequence
  Protein classification predicting sequence
ECILPVAPD

SEQ ID NO: 17703 - protein, 8 aa, Artificial sequence
  Protein classification predicting sequence
LPENGKVI

SEQ ID NO: 17704 - protein, 17 aa, Artificial sequence
  Protein classification predicting sequence
HVDVIMLAHNPGGKERT

SEQ ID NO: 17705 - protein, 15 aa, Artificial sequence
  Protein classification predicting sequence
DVIMLAHNPGGKERT

SEQ ID NO: 17706 - protein, 7 aa, Artificial sequence
  Protein classification predicting sequence
SDSPWVV

SEQ ID NO: 17707 - protein, 14 aa, Artificial sequence
  Protein classification predicting sequence
MEFLPGGDLMTMLI

SEQ ID NO: 17708 - protein, 16 aa, Artificial sequence
  Protein classification predicting sequence
HKLGFIHRDIKPDNIL

SEQ ID NO: 17709 - protein, 6 aa, Artificial sequence
  Protein classification predicting sequence
IMFECL

SEQ ID NO: 17710 - protein, 6 aa, Artificial sequence
  Protein classification predicting sequence
GWPPFC

SEQ ID NO: 17711 - protein, 6 aa, Artificial sequence
  Protein classification predicting sequence
GEGAYG

SEQ ID NO: 17712 - protein, 11 aa, Artificial sequence
  Protein classification predicting sequence
RTLREIKLLRH

SEQ ID NO: 17713 - protein, 13 aa, Artificial sequence
  Protein classification predicting sequence
TEYVATRWYRAPE

SEQ ID NO: 17714 - protein, 11 aa, Artificial sequence
  Protein classification predicting sequence
YVATRWYRAPE

SEQ ID NO: 17715 - protein, 8 aa, Artificial sequence
  Protein classification predicting sequence
TRWYRAPE

SEQ ID NO: 17716 - protein, 7 aa, Artificial sequence
  Protein classification predicting sequence
GKPLFPG

SEQ ID NO: 17717 - protein, 7 aa, Artificial sequence
  Protein classification predicting sequence
WSCGVIL

SEQ ID NO: 17718 - protein, 6 aa, Artificial sequence
  Protein classification predicting sequence
VDKDDP

SEQ ID NO: 17719 - protein, 7 aa, Artificial sequence
  Protein classification predicting sequence
DPAFQNP

SEQ ID NO: 17720 - protein, 7 aa, Artificial sequence
  Protein classification predicting sequence
AAIRFVE

SEQ ID NO: 17721 - protein, 13 aa, Artificial sequence
  Protein classification predicting sequence
AVEALEGKTGTQV

SEQ ID NO: 17722 - protein, 8 aa, Artificial sequence
  Protein classification predicting sequence
PNPTALLQ

SEQ ID NO: 17723 - protein, 12 aa, Artificial sequence
  Protein classification predicting sequence
FDYIIIDTPPIG

SEQ ID NO: 17724 - protein, 11 aa, Artificial sequence
  Protein classification predicting sequence
PMLYSFQTSLP

SEQ ID NO: 17725 - protein, 17 aa, Artificial sequence
  Protein classification predicting sequence
LKSWWATNYVSDWWEEY

SEQ ID NO: 17726 - protein, 8 aa, Artificial sequence
  Protein classification predicting sequence
IHAILLYR

SEQ ID NO: 17727 - protein, 9 aa, Artificial sequence
  Protein classification predicting sequence
KLDREEIKP

SEQ ID NO: 17728 - protein, 6 aa, Artificial sequence
  Protein classification predicting sequence
ERMFNT

SEQ ID NO: 17729 - protein, 12 aa, Artificial sequence
  Protein classification predicting sequence
RIPGEETDTIQH

SEQ ID NO: 17730 - protein, 13 aa, Artificial sequence
  Protein classification predicting sequence
GKFCLTYEASMTR

SEQ ID NO: 17731 - protein, 12 aa, Artificial sequence
  Protein classification predicting sequence
FREGRTETVRSC

SEQ ID NO: 17732 - protein, 7 aa, Artificial sequence
  Protein classification predicting sequence
YRLAMTG

SEQ ID NO: 17733 - protein, 17 aa, Artificial sequence
  Protein classification predicting sequence
TMRYSLKVLLSYHGWMF

SEQ ID NO: 17734 - protein, 9 aa, Artificial sequence
  Protein classification predicting sequence
PETDSHRFG

SEQ ID NO: 17735 - protein, 6 aa, Artificial sequence
  Protein classification predicting sequence
RWFDKS

SEQ ID NO: 17736 - protein, 16 aa, Artificial sequence
  Protein classification predicting sequence
FGKGLIKKCRTSPDAF

SEQ ID NO: 17737 - protein, 34 aa, Artificial sequence
  Protein classification predicting sequence
YLSGINSWKKRLIRIKNGILRGVYPGSPTSWLVV

SEQ ID NO: 17738 - protein, 6 aa, Artificial sequence
  Protein classification predicting sequence
YHGWMF

SEQ ID NO: 17739 - protein, 16 aa, Artificial sequence
  Protein classification predicting sequence
NYVSDWWEEYIYLRGR

SEQ ID NO: 17740 - protein, 9 aa, Artificial sequence
  Protein classification predicting sequence
PTRLQWDIP

SEQ ID NO: 17741 - protein, 23 aa, Artificial sequence
  Protein classification predicting sequence
KHQNMYRLAMTGAGIDRHLFCLY

SEQ ID NO: 17742 - protein, 9 aa, Artificial sequence
  Protein classification predicting sequence
AAFFVTLDE

SEQ ID NO: 17743 - protein, 6 aa, Artificial sequence
  Protein classification predicting sequence
FHISSK

SEQ ID NO: 17744 - protein, 7 aa, Artificial sequence
  Protein classification predicting sequence
EVLSEPW

SEQ ID NO: 17745 - protein, 9 aa, Artificial sequence
  Protein classification predicting sequence
GGGFGPVAD

SEQ ID NO: 17746 - protein, 7 aa, Artificial sequence
  Protein classification predicting sequence
LLSYHGW

SEQ ID NO: 17747 - protein, 7 aa, Artificial sequence
  Protein classification predicting sequence
YLESVRP

SEQ ID NO: 17748 - protein, 6 aa, Artificial sequence
  Protein classification predicting sequence
LKSWWA

SEQ ID NO: 17749 - protein, 9 aa, Artificial sequence
  Protein classification predicting sequence
NYVSDWWEE

SEQ ID NO: 17750 - protein, 8 aa, Artificial sequence
  Protein classification predicting sequence
FNTTRIPG

SEQ ID NO: 17751 - protein, 6 aa, Artificial sequence
  Protein classification predicting sequence
EHSWAD

SEQ ID NO: 17752 - protein, 6 aa, Artificial sequence
  Protein classification predicting sequence
FCLTYE

SEQ ID NO: 17753 - protein, 7 aa, Artificial sequence
  Protein classification predicting sequence
GIDRHLF

SEQ ID NO: 17754 - protein, 6 aa, Artificial sequence
  Protein classification predicting sequence
VFEYLD

SEQ ID NO: 17755 - protein, 11 aa, Artificial sequence
  Protein classification predicting sequence
VFEYLDLDLKK

SEQ ID NO: 17756 - protein, 7 aa, Artificial sequence
  Protein classification predicting sequence
HTDRCDE

SEQ ID NO: 17757 - protein, 8 aa, Artificial sequence
  Protein classification predicting sequence
IDPTQLPY

SEQ ID NO: 17758 - protein, 8 aa, Artificial sequence
  Protein classification predicting sequence
EALMSELK

SEQ ID NO: 17759 - protein, 10 aa, Artificial sequence
  Protein classification predicting sequence
AEAMLGPSLS

SEQ ID NO: 17760 - protein, 15 aa, Artificial sequence
  Protein classification predicting sequence
YKNIHLEKKYVRRDS

SEQ ID NO: 17761 - protein, 9 aa, Artificial sequence
  Protein classification predicting sequence
EEESSSEHL

SEQ ID NO: 17762 - protein, 7 aa, Artificial sequence
  Protein classification predicting sequence
TVTLRCV

SEQ ID NO: 17763 - protein, 8 aa, Artificial sequence
  Protein classification predicting sequence
NWTYLGPF

SEQ ID NO: 17764 - protein, 24 aa, Artificial sequence
  Protein classification predicting sequence
LLLLLLLYKYKQKPKYQVRWKIIE

SEQ ID NO: 17765 - protein, 15 aa, Artificial sequence
  Protein classification predicting sequence
KFYKLVKDGYQMAQP

SEQ ID NO: 17766 - protein, 11 aa, Artificial sequence
  Protein classification predicting sequence
FAPKNIYSIMQ

SEQ ID NO: 17767 - protein, 23 aa, Artificial sequence
  Protein classification predicting sequence
NDSNYVVKGNARLPVKWMAPESI

SEQ ID NO: 17768 - protein, 33 aa, Artificial sequence
  Protein classification predicting sequence
CVYTVQSDVWSYGILLWEIFSLGLNPYPGILVN

SEQ ID NO: 17769 - protein, 8 aa, Artificial sequence
  Protein classification predicting sequence
TLTDYDIR

SEQ ID NO: 17770 - protein, 7 aa, Artificial sequence
  Protein classification predicting sequence
IAKVLGT

SEQ ID NO: 17771 - protein, 8 aa, Artificial sequence
  Protein classification predicting sequence
RLTAKEAM

SEQ ID NO: 17772 - protein, 7 aa, Artificial sequence
  Protein classification predicting sequence
AHAYFAQ

SEQ ID NO: 17773 - protein, 9 aa, Artificial sequence
  Protein classification predicting sequence
EAMEHPYFY

SEQ ID NO: 17774 - protein, 17 aa, Artificial sequence
  Protein classification predicting sequence
PSPLGPLAGSPVIAAAN

SEQ ID NO: 17775 - protein, 9 aa, Artificial sequence
  Protein classification predicting sequence
GRGKYSEVF

SEQ ID NO: 17776 - protein, 10 aa, Artificial sequence
  Protein classification predicting sequence
SKTPALVFEY

SEQ ID NO: 17777 - protein, 16 aa, Artificial sequence
  Protein classification predicting sequence
GIMHRDVKPHNVMIDH

SEQ ID NO: 17778 - protein, 7 aa, Artificial sequence
  Protein classification predicting sequence
MLASMIF

SEQ ID NO: 17779 - protein, 6 aa, Artificial sequence
  Protein classification predicting sequence
EPFFHG

SEQ ID NO: 17780 - protein, 6 aa, Artificial sequence
  Protein classification predicting sequence
DQLVKI

SEQ ID NO: 17781 - protein, 7 aa, Artificial sequence
  Protein classification predicting sequence
LLRYDHQ

SEQ ID NO: 17782 - protein, 7 aa, Artificial sequence
  Protein classification predicting sequence
HSRKRWE

SEQ ID NO: 17783 - protein, 53 aa, Artificial sequence
  Protein classification predicting sequence
LIDTVKDPVSKTPALVFEYINNTDFKQLYQILTDFDIRFYMYELLKALDYCHS

SEQ ID NO: 17784 - protein, 9 aa, Artificial sequence
  Protein classification predicting sequence
LKALDYCHS

SEQ ID NO: 17785 - protein, 32 aa, Artificial sequence
  Protein classification predicting sequence
LDPHFNDILGQHSRKRWENFIHSENRHLVSPE

SEQ ID NO: 17786 - protein, 37 aa, Artificial sequence
  Protein classification predicting sequence
LDLLDKLLRYDHQQRLTAKEAMEHPYFYPVVKEQSQP

SEQ ID NO: 17787 - protein, 43 aa, Artificial sequence
  Protein classification predicting sequence
QEYNVRVASRYFKGPELLVDYQMYDYSLDMWSLGCMLASMIFR

SEQ ID NO: 17788 - protein, 15 aa, Artificial sequence
  Protein classification predicting sequence
DNYDQLVRIAKVLGT

SEQ ID NO: 17789 - protein, 5 aa, Artificial sequence
  Protein classification predicting sequence
YWDYE

SEQ ID NO: 17790 - protein, 10 aa, Artificial sequence
  Protein classification predicting sequence
LDKLLRYDHQ

SEQ ID NO: 17791 - protein, 9 aa, Artificial sequence
  Protein classification predicting sequence
GIMHRDVKP

SEQ ID NO: 17792 - protein, 7 aa, Artificial sequence
  Protein classification predicting sequence
KGPELLV

SEQ ID NO: 17793 - protein, 6 aa, Artificial sequence
  Protein classification predicting sequence
YDYSLD

SEQ ID NO: 17794 - protein, 6 aa, Artificial sequence
  Protein classification predicting sequence
SRARVY

SEQ ID NO: 17795 - protein, 7 aa, Artificial sequence
  Protein classification predicting sequence
REYWDYE

SEQ ID NO: 17796 - protein, 10 aa, Artificial sequence
  Protein classification predicting sequence
GRGKYSEVFE

SEQ ID NO: 17797 - protein, 9 aa, Artificial sequence
  Protein classification predicting sequence
KILENLRGG

SEQ ID NO: 17798 - protein, 6 aa, Artificial sequence
  Protein classification predicting sequence
GTDELY

SEQ ID NO: 17799 - protein, 20 aa, Artificial sequence
  Protein classification predicting sequence
LDPRFNDILGRHSRKRWERF

SEQ ID NO: 17800 - protein, 10 aa, Artificial sequence
  Protein classification predicting sequence
FEYINNTDFK

SEQ ID NO: 17801 - protein, 6 aa, Artificial sequence
  Protein classification predicting sequence
NNTDFK

SEQ ID NO: 17802 - protein, 7 aa, Artificial sequence
  Protein classification predicting sequence
ALDFCHS

SEQ ID NO: 17803 - protein, 6 aa, Artificial sequence
  Protein classification predicting sequence
NVMIDH

SEQ ID NO: 17804 - protein, 8 aa, Artificial sequence
  Protein classification predicting sequence
YNVRVASR

SEQ ID NO: 17805 - protein, 18 aa, Artificial sequence
  Protein classification predicting sequence
DYDYSLDMWSLGCMFAGM

SEQ ID NO: 17806 - protein, 6 aa, Artificial sequence
  Protein classification predicting sequence
KLLRYD

SEQ ID NO: 17807 - protein, 28 aa, Artificial sequence
  Protein classification predicting sequence
WGNQDDYQLVRKLGRGKYSEVFEAINIT

SEQ ID NO: 17808 - protein, 11 aa, Artificial sequence
  Protein classification predicting sequence
VKDPVSRTPAL

SEQ ID NO: 17809 - protein, 17 aa, Artificial sequence
  Protein classification predicting sequence
RKLRLIDWGLAEFYHPG

SEQ ID NO: 17810 - protein, 84 aa, Artificial sequence
  Protein classification predicting sequence
RKLRLIDWGLAEFYHPGQEYNVRVASRYFKGPELLVDYQMYDYSLDMWSLGCMLASMIFRKEPFFHGHDNYDQLVRIAKVLGTE

SEQ ID NO: 17811 - protein, 8 aa, Artificial sequence
  Protein classification predicting sequence
EAMAHPYF

SEQ ID NO: 17812 - protein, 6 aa, Artificial sequence
  Protein classification predicting sequence
EYWDYE

SEQ ID NO: 17813 - protein, 13 aa, Artificial sequence
  Protein classification predicting sequence
ASMIFRKEPFFHG

SEQ ID NO: 17814 - protein, 14 aa, Artificial sequence
  Protein classification predicting sequence
RKVGRGKYSEVFEG

SEQ ID NO: 17815 - protein, 7 aa, Artificial sequence
  Protein classification predicting sequence
DNYDQLV

SEQ ID NO: 17816 - protein, 40 aa, Artificial sequence
  Protein classification predicting sequence
IELDPRFNDILGRHSRKRWERFVHSENQHLVSPEALDFLD

SEQ ID NO: 17817 - protein, 6 aa, Artificial sequence
  Protein classification predicting sequence
LLRYDH

SEQ ID NO: 17818 - protein, 10 aa, Artificial sequence
  Protein classification predicting sequence
KEPFFYGHDN

SEQ ID NO: 17819 - protein, 23 aa, Artificial sequence
  Protein classification predicting sequence
WPSGTECIAKYNFHGTAEQDLPF

SEQ ID NO: 17820 - protein, 43 aa, Artificial sequence
  Protein classification predicting sequence
KGDVLTIVAVTKDPNWYKAKNKVGREGIIPANYVQKREGVKAG

SEQ ID NO: 17821 - protein, 18 aa, Artificial sequence
  Protein classification predicting sequence
RLIKPKVMEGTVAAQDEF

SEQ ID NO: 17822 - protein, 9 aa, Artificial sequence
  Protein classification predicting sequence
RSGWALNMK

SEQ ID NO: 17823 - protein, 59 aa, Artificial sequence
  Protein classification predicting sequence
IGKGEFGDVMLGDYRGNKVAVKCIKNDATAQAFLAEASVMTQLRHSNLVQLLGVIVEEK

SEQ ID NO: 17824 - protein, 19 aa, Artificial sequence
  Protein classification predicting sequence
NNFVHRDLAARNVLVSEDN

SEQ ID NO: 17825 - protein, 10 aa, Artificial sequence
  Protein classification predicting sequence
HRDLAARNVL

SEQ ID NO: 17826 - protein, 79 aa, Artificial sequence
  Protein classification predicting sequence
AKVSDFGLTKEASSTQDTGKLPVKWTAPEALREKKFSTKSDVWSFGILLWEIYSFGRVPYPRIPLKDVVPRVEKGYKMD

SEQ ID NO: 17827 - protein, 6 aa, Artificial sequence
  Protein classification predicting sequence
GRVPYP

SEQ ID NO: 17828 - protein, 7 aa, Artificial sequence
  Protein classification predicting sequence
EAMEYLE

SEQ ID NO: 17829 - protein, 6 aa, Artificial sequence
  Protein classification predicting sequence
ENIRRI

SEQ ID NO: 17830 - protein, 7 aa, Artificial sequence
  Protein classification predicting sequence
RDPKGLY

SEQ ID NO: 17831 - protein, 9 aa, Artificial sequence
  Protein classification predicting sequence
VLWFTGLSG

SEQ ID NO: 17832 - protein, 20 aa, Artificial sequence
  Protein classification predicting sequence
TYLLDGDNVRHGLCSDLGFS

SEQ ID NO: 17833 - protein, 6 aa, Artificial sequence
  Protein classification predicting sequence
FIEVFV

SEQ ID NO: 17834 - protein, 7 aa, Artificial sequence
  Protein classification predicting sequence
WFTGLSG

SEQ ID NO: 17835 - protein, 7 aa, Artificial sequence
  Protein classification predicting sequence
ENIRRIG

SEQ ID NO: 17836 - protein, 11 aa, Artificial sequence
  Protein classification predicting sequence
RDPKGLYKKAR

SEQ ID NO: 17837 - protein, 12 aa, Artificial sequence
  Protein classification predicting sequence
HLNGEQLVTNLV

SEQ ID NO: 17838 - protein, 30 aa, Artificial sequence
  Protein classification predicting sequence
HGHRGVVLWFTGLSGSGKSTVAGALEEALH

SEQ ID NO: 17839 - protein, 22 aa, Artificial sequence
  Protein classification predicting sequence
RDPKGLYKKARAGELRNFTGID

SEQ ID NO: 17840 - protein, 9 aa, Artificial sequence
  Protein classification predicting sequence
EFTGISAPY

SEQ ID NO: 17841 - protein, 8 aa, Artificial sequence
  Protein classification predicting sequence
KGLYKKAR

SEQ ID NO: 17842 - protein, 26 aa, Artificial sequence
  Protein classification predicting sequence
PAVLWFTGLSGAGKSTVAGALENRLA

SEQ ID NO: 17843 - protein, 8 aa, Artificial sequence
  Protein classification predicting sequence
ENIRRIGE

SEQ ID NO: 17844 - protein, 14 aa, Artificial sequence
  Protein classification predicting sequence
VLTAFISPHRAERQ

SEQ ID NO: 17845 - protein, 14 aa, Artificial sequence
  Protein classification predicting sequence
RDPKGLYKKARAGE

SEQ ID NO: 17846 - protein, 16 aa, Artificial sequence
  Protein classification predicting sequence
GVVLWFTGLSGSGKST

SEQ ID NO: 17847 - protein, 13 aa, Artificial sequence
  Protein classification predicting sequence
VLTAFISPHRAER

SEQ ID NO: 17848 - protein, 30 aa, Artificial sequence
  Protein classification predicting sequence
FIEVFVDTPLAICEARDPKGLYKKARAGEL

SEQ ID NO: 17849 - protein, 8 aa, Artificial sequence
  Protein classification predicting sequence
GEQLVTNL

SEQ ID NO: 17850 - protein, 7 aa, Artificial sequence
  Protein classification predicting sequence
THLRQLE

SEQ ID NO: 17851 - protein, 6 aa, Artificial sequence
  Protein classification predicting sequence
PFPLLH

SEQ ID NO: 17852 - protein, 6 aa, Artificial sequence
  Protein classification predicting sequence
QRPELW

SEQ ID NO: 17853 - protein, 11 aa, Artificial sequence
  Protein classification predicting sequence
IRVFPLSNWTE

SEQ ID NO: 17854 - protein, 17 aa, Artificial sequence
  Protein classification predicting sequence
QLEAESIHIIREVAAEF

SEQ ID NO: 17855 - protein, 10 aa, Artificial sequence
  Protein classification predicting sequence
LPFPVMHVDT

SEQ ID NO: 17856 - protein, 27 aa, Artificial sequence
  Protein classification predicting sequence
LTHLKQLEAESIHIIREVAAEFDNPVM

SEQ ID NO: 17857 - protein, 8 aa, Artificial sequence
  Protein classification predicting sequence
HVDTRWKF

SEQ ID NO: 17858 - protein, 8 aa, Artificial sequence
  Protein classification predicting sequence
HGSAKHTD

SEQ ID NO: 17859 - protein, 15 aa, Artificial sequence
  Protein classification predicting sequence
KGESIRVFPLSNWTE

SEQ ID NO: 17860 - protein, 8 aa, Artificial sequence
  Protein classification predicting sequence
PLTGAVES

SEQ ID NO: 17861 - protein, 7 aa, Artificial sequence
  Protein classification predicting sequence
TSERQGR

SEQ ID NO: 17862 - protein, 7 aa, Artificial sequence
  Protein classification predicting sequence
DQAGSME

SEQ ID NO: 17863 - protein, 8 aa, Artificial sequence
  Protein classification predicting sequence
KHTDIMKT

SEQ ID NO: 17864 - protein, 21 aa, Artificial sequence
  Protein classification predicting sequence
GFDAAFGGARRDEEKSRAKER

SEQ ID NO: 17865 - protein, 15 aa, Artificial sequence
  Protein classification predicting sequence
LYSIGKDSSVLLHLA

SEQ ID NO: 17866 - protein, 9 aa, Artificial sequence
  Protein classification predicting sequence
PFPLLHVDT

SEQ ID NO: 17867 - protein, 6 aa, Artificial sequence
  Protein classification predicting sequence
WKFREM

SEQ ID NO: 17868 - protein, 11 aa, Artificial sequence
  Protein classification predicting sequence
WKFREMIAFRD

SEQ ID NO: 17869 - protein, 6 aa, Artificial sequence
  Protein classification predicting sequence
SRAKER

SEQ ID NO: 17870 - protein, 7 aa, Artificial sequence
  Protein classification predicting sequence
NQRPELW

SEQ ID NO: 17871 - protein, 8 aa, Artificial sequence
  Protein classification predicting sequence
FPLSNWTE

SEQ ID NO: 17872 - protein, 7 aa, Artificial sequence
  Protein classification predicting sequence
RFRTLGC

SEQ ID NO: 17873 - protein, 6 aa, Artificial sequence
  Protein classification predicting sequence
SERQGR

SEQ ID NO: 17874 - protein, 7 aa, Artificial sequence
  Protein classification predicting sequence
PFPLLHV

SEQ ID NO: 17875 - protein, 14 aa, Artificial sequence
  Protein classification predicting sequence
GESVRVFPLSNWTE

SEQ ID NO: 17876 - protein, 9 aa, Artificial sequence
  Protein classification predicting sequence
RPVVERDGM

SEQ ID NO: 17877 - protein, 7 aa, Artificial sequence
  Protein classification predicting sequence
DQSGSME

SEQ ID NO: 17878 - protein, 6 aa, Artificial sequence
  Protein classification predicting sequence
FRDRTA

SEQ ID NO: 17879 - protein, 13 aa, Artificial sequence
  Protein classification predicting sequence
HRWDPKNQRPELW

SEQ ID NO: 17880 - protein, 45 aa, Artificial sequence
  Protein classification predicting sequence
NPVMLYSIGKDSSVMLHLARKAFYPGTLPFPLLHVDTGWKFREMY

SEQ ID NO: 17881 - protein, 56 aa, Artificial sequence
  Protein classification predicting sequence
NYNGQINKGESIRVFPLSNWTEQDIWQYIWLENIDIVPLYLAAERPVLERDGMLMM

SEQ ID NO: 17882 - protein, 22 aa, Artificial sequence
  Protein classification predicting sequence
AQTLPEIIEEMLVSTTSERQGR

SEQ ID NO: 17883 - protein, 13 aa, Artificial sequence
  Protein classification predicting sequence
YSIGKDSSVMLHL

SEQ ID NO: 17884 - protein, 7 aa, Artificial sequence
  Protein classification predicting sequence
RKAFYPG

SEQ ID NO: 17885 - protein, 23 aa, Artificial sequence
  Protein classification predicting sequence
RKAFYPGKIPFPLLHVDTDWKFR

SEQ ID NO: 17886 - protein, 30 aa, Artificial sequence
  Protein classification predicting sequence
GLKQALNKYGFDAAFGGARRDEEKSRAKER

SEQ ID NO: 17887 - protein, 11 aa, Artificial sequence
  Protein classification predicting sequence
WDPKNQRPELW

SEQ ID NO: 17888 - protein, 16 aa, Artificial sequence
  Protein classification predicting sequence
NKGESIRVFPLSNWTE

SEQ ID NO: 17889 - protein, 7 aa, Artificial sequence
  Protein classification predicting sequence
IVPLYLA

SEQ ID NO: 17890 - protein, 7 aa, Artificial sequence
  Protein classification predicting sequence
IIEEMLV

SEQ ID NO: 17891 - protein, 8 aa, Artificial sequence
  Protein classification predicting sequence
LEAESIHI

SEQ ID NO: 17892 - protein, 6 aa, Artificial sequence
  Protein classification predicting sequence
GKDSSV

SEQ ID NO: 17893 - protein, 15 aa, Artificial sequence
  Protein classification predicting sequence
GGARRDEEKSRAKER

SEQ ID NO: 17894 - protein, 10 aa, Artificial sequence
  Protein classification predicting sequence
RVFPLSNWTE

SEQ ID NO: 17895 - protein, 7 aa, Artificial sequence
  Protein classification predicting sequence
HTDIMKT

SEQ ID NO: 17896 - protein, 10 aa, Artificial sequence
  Protein classification predicting sequence
VMLHLARKAF

SEQ ID NO: 17897 - protein, 22 aa, Artificial sequence
  Protein classification predicting sequence
LPFPLLHVDTGWKFREMYEFRD

SEQ ID NO: 17898 - protein, 7 aa, Artificial sequence
  Protein classification predicting sequence
GCELLVH

SEQ ID NO: 17899 - protein, 8 aa, Artificial sequence
  Protein classification predicting sequence
VRFRTLGC

SEQ ID NO: 17900 - protein, 14 aa, Artificial sequence
  Protein classification predicting sequence
IGAGAKILGNIEVG

SEQ ID NO: 17901 - protein, 8 aa, Artificial sequence
  Protein classification predicting sequence
GAKIGAGS

SEQ ID NO: 17902 - protein, 7 aa, Artificial sequence
  Protein classification predicting sequence
VTLGGTG

SEQ ID NO: 17903 - protein, 11 aa, Artificial sequence
  Protein classification predicting sequence
KGFHALQAYRI

SEQ ID NO: 17904 - protein, 9 aa, Artificial sequence
  Protein classification predicting sequence
AACDIQAVR

SEQ ID NO: 17905 - protein, 10 aa, Artificial sequence
  Protein classification predicting sequence
VIENDVSILQ

SEQ ID NO: 17906 - protein, 10 aa, Artificial sequence
  Protein classification predicting sequence
TAAGVPARIV

SEQ ID NO: 17907 - protein, 8 aa, Artificial sequence
  Protein classification predicting sequence
CEELEIVW

SEQ ID NO: 17908 - protein, 34 aa, Artificial sequence
  Protein classification predicting sequence
LADCEPMLASFYHATLLKHENLGSALSYMLANKL

SEQ ID NO: 17909 - protein, 68 aa, Artificial sequence
  Protein classification predicting sequence
SPIMPAIAIREVVEEAYAADPEMIASAACDIQAVRTRDPAVDKYSTPLLYLKGFHALQAYRIGHWLWN

SEQ ID NO: 17910 - protein, 15 aa, Artificial sequence
  Protein classification predicting sequence
GRRALAIFLQNQVSV

SEQ ID NO: 17911 - protein, 32 aa, Artificial sequence
  Protein classification predicting sequence
FQVDIHPAAKIGRGIMLDHATGIVVGETAVIE

SEQ ID NO: 17912 - protein, 15 aa, Artificial sequence
  Protein classification predicting sequence
DVSILQSVTLGGTGK

SEQ ID NO: 17913 - protein, 8 aa, Artificial sequence
  Protein classification predicting sequence
VTLGGTGK

SEQ ID NO: 17914 - protein, 58 aa, Artificial sequence
  Protein classification predicting sequence
GDRHPKIREGVMIGAGAKILGNIEVGRGAKIGAGSVVLQPVPPHTTAAGVPARIVGKP

SEQ ID NO: 17915 - protein, 15 aa, Artificial sequence
  Protein classification predicting sequence
SDKPSMDMDQHFNGI

SEQ ID NO: 17916 - protein, 53 aa, Artificial sequence
  Protein classification predicting sequence
SRFFTGIEIHPGAKIGKRLFIDHGMGVVIGETCTIGDNVTIYQGVTLGGTGKE

SEQ ID NO: 17917 - protein, 16 aa, Artificial sequence
  Protein classification predicting sequence
GKRHPDIGDNVLIAAG

SEQ ID NO: 17918 - protein, 18 aa, Artificial sequence
  Protein classification predicting sequence
SNVNIGANSVVLQSVPSY

SEQ ID NO: 17919 - protein, 7 aa, Artificial sequence
  Protein classification predicting sequence
GKTFDHR

SEQ ID NO: 17920 - protein, 13 aa, Artificial sequence
  Protein classification predicting sequence
YEQIKHLERQLEK

SEQ ID NO: 17921 - protein, 10 aa, Artificial sequence
  Protein classification predicting sequence
MVFEQDPAAR

SEQ ID NO: 17922 - protein, 10 aa, Artificial sequence
  Protein classification predicting sequence
HAVWSHLIAH

SEQ ID NO: 17923 - protein, 43 aa, Artificial sequence
  Protein classification predicting sequence
IGDNVTIYQGVTLGGTGKERGKRHPDIGDNVLIAAGAKVLGNI

SEQ ID NO: 17924 - protein, 11 aa, Artificial sequence
  Protein classification predicting sequence
NVNIGANSVVL

SEQ ID NO: 17925 - protein, 20 aa, Artificial sequence
  Protein classification predicting sequence
SVPSYSTVVGIPGHIVKQDG

SEQ ID NO: 17926 - protein, 13 aa, Artificial sequence
  Protein classification predicting sequence
FIDHGMGVVIGET

SEQ ID NO: 17927 - protein, 9 aa, Artificial sequence
  Protein classification predicting sequence
AGAKVLGNI

SEQ ID NO: 17928 - protein, 7 aa, Artificial sequence
  Protein classification predicting sequence
TVVGIPG

SEQ ID NO: 17929 - protein, 12 aa, Artificial sequence
  Protein classification predicting sequence
MEPCSSVKDRIG

SEQ ID NO: 17930 - protein, 8 aa, Artificial sequence
  Protein classification predicting sequence
RPENAGKL

SEQ ID NO: 17931 - protein, 6 aa, Artificial sequence
  Protein classification predicting sequence
GERYLS

SEQ ID NO: 17932 - protein, 11 aa, Artificial sequence
  Protein classification predicting sequence
GCVGRVAAKLE

SEQ ID NO: 17933 - protein, 10 aa, Artificial sequence
  Protein classification predicting sequence
HYETTGPEIW

SEQ ID NO: 17934 - protein, 11 aa, Artificial sequence
  Protein classification predicting sequence
SGIGTGGTITG

SEQ ID NO: 17935 - protein, 8 aa, Artificial sequence
  Protein classification predicting sequence
LTMPASMS

SEQ ID NO: 17936 - protein, 7 aa, Artificial sequence
  Protein classification predicting sequence
GIGTGGT

SEQ ID NO: 17937 - protein, 10 aa, Artificial sequence
  Protein classification predicting sequence
DEVVQVSSDE

SEQ ID NO: 17938 - protein, 7 aa, Artificial sequence
  Protein classification predicting sequence
QFENPAN

SEQ ID NO: 17939 - protein, 6 aa, Artificial sequence
  Protein classification predicting sequence
TGPEIW

SEQ ID NO: 17940 - protein, 17 aa, Artificial sequence
  Protein classification predicting sequence
NPANPKIHYETTGPEIW

SEQ ID NO: 17941 - protein, 7 aa, Artificial sequence
  Protein classification predicting sequence
TPMVYLN

SEQ ID NO: 17942 - protein, 15 aa, Artificial sequence
  Protein classification predicting sequence
SVKDRIGFSMISDAE

SEQ ID NO: 17943 - protein, 8 aa, Artificial sequence
  Protein classification predicting sequence
DAEEKGLI

SEQ ID NO: 17944 - protein, 9 aa, Artificial sequence
  Protein classification predicting sequence
VANIAAKLE

SEQ ID NO: 17945 - protein, 7 aa, Artificial sequence
  Protein classification predicting sequence
AAARGYK

SEQ ID NO: 17946 - protein, 8 aa, Artificial sequence
  Protein classification predicting sequence
GIGTGGTI

SEQ ID NO: 17947 - protein, 7 aa, Artificial sequence
  Protein classification predicting sequence
QGLGAGF

SEQ ID NO: 17948 - protein, 8 aa, Artificial sequence
  Protein classification predicting sequence
TELIGNTP

SEQ ID NO: 17949 - protein, 6 aa, Artificial sequence
  Protein classification predicting sequence
AYGAEL

SEQ ID NO: 17950 - protein, 11 aa, Artificial sequence
  Protein classification predicting sequence
AYGAELVLTPG

SEQ ID NO: 17951 - protein, 6 aa, Artificial sequence
  Protein classification predicting sequence
GMKGAI

SEQ ID NO: 17952 - protein, 8 aa, Artificial sequence
  Protein classification predicting sequence
MKGAIKKA

SEQ ID NO: 17953 - protein, 7 aa, Artificial sequence
  Protein classification predicting sequence
GISSGAA

SEQ ID NO: 17954 - protein, 11 aa, Artificial sequence
  Protein classification predicting sequence
GISSGAAIYAA

SEQ ID NO: 17955 - protein, 13 aa, Artificial sequence
  Protein classification predicting sequence
PSNGERYLSTPLY

SEQ ID NO: 17956 - protein, 19 aa, Artificial sequence
  Protein classification predicting sequence
ESRNPSFSVKCRIGANMIW

SEQ ID NO: 17957 - protein, 10 aa, Artificial sequence
  Protein classification predicting sequence
MSIERRKLLK

SEQ ID NO: 17958 - protein, 7 aa, Artificial sequence
  Protein classification predicting sequence
TTGPEIW

SEQ ID NO: 17959 - protein, 18 aa, Artificial sequence
  Protein classification predicting sequence
NKNIVVILPSSGERYLST

SEQ ID NO: 17960 - protein, 7 aa, Artificial sequence
  Protein classification predicting sequence
GERYLST

SEQ ID NO: 17961 - protein, 10 aa, Artificial sequence
  Protein classification predicting sequence
KDRIALAMIE

SEQ ID NO: 17962 - protein, 10 aa, Artificial sequence
  Protein classification predicting sequence
SVKCRIGANM

SEQ ID NO: 17963 - protein, 15 aa, Artificial sequence
  Protein classification predicting sequence
NLVLTEGAKGMKGAI

SEQ ID NO: 17964 - protein, 8 aa, Artificial sequence
  Protein classification predicting sequence
AKGMKGAI

SEQ ID NO: 17965 - protein, 14 aa, Artificial sequence
  Protein classification predicting sequence
AKGMKGAIAKAEEI

SEQ ID NO: 17966 - protein, 7 aa, Artificial sequence
  Protein classification predicting sequence
DTDGKVD

SEQ ID NO: 17967 - protein, 13 aa, Artificial sequence
  Protein classification predicting sequence
EEGILAGISSGAA

SEQ ID NO: 17968 - protein, 6 aa, Artificial sequence
  Protein classification predicting sequence
ERYLST

SEQ ID NO: 17969 - protein, 8 aa, Artificial sequence
  Protein classification predicting sequence
AAAKGYKL

SEQ ID NO: 17970 - protein, 9 aa, Artificial sequence
  Protein classification predicting sequence
GYKLTLTMP

SEQ ID NO: 17971 - protein, 8 aa, Artificial sequence
  Protein classification predicting sequence
IQGIGAGF

SEQ ID NO: 17972 - protein, 8 aa, Artificial sequence
  Protein classification predicting sequence
LTMPETMS

SEQ ID NO: 17973 - protein, 8 aa, Artificial sequence
  Protein classification predicting sequence
EGLLVGIS

SEQ ID NO: 17974 - protein, 25 aa, Artificial sequence
  Protein classification predicting sequence
KGLIKPGESVLIEPTSGNTGVGLAF

SEQ ID NO: 17975 - protein, 13 aa, Artificial sequence
  Protein classification predicting sequence
AAAKGYKLIITMP

SEQ ID NO: 17976 - protein, 10 aa, Artificial sequence
  Protein classification predicting sequence
FPSFGERYLS

SEQ ID NO: 17977 - protein, 7 aa, Artificial sequence
  Protein classification predicting sequence
TPLVYLN

SEQ ID NO: 17978 - protein, 7 aa, Artificial sequence
  Protein classification predicting sequence
SMITDAE

SEQ ID NO: 17979 - protein, 12 aa, Artificial sequence
  Protein classification predicting sequence
SVLIEPTSGNTG

SEQ ID NO: 17980 - protein, 12 aa, Artificial sequence
  Protein classification predicting sequence
TPVVKLRNVVDD

SEQ ID NO: 17981 - protein, 121 aa, Artificial sequence
  Protein classification predicting sequence
YVKLEYQNPGGSVKDRIALAMIEKAEREGKIKPGDTIVEPTSGNTGIGLAFVCAAKGYKAVFTMPETMSQERRNLLKAYGAELVLTPGSEAMKGAIKKAKELKEEHGYFEPQQFENPANPE

SEQ ID NO: 17982 - protein, 9 aa, Artificial sequence
  Protein classification predicting sequence
HELTTGPEL

SEQ ID NO: 17983 - protein, 27 aa, Artificial sequence
  Protein classification predicting sequence
IDAFLAGVGTGGTLSGVGKVLKKEYPN

SEQ ID NO: 17984 - protein, 30 aa, Artificial sequence
  Protein classification predicting sequence
EIVAIEPEASPVLSGGEPGPHKLQGLGAGF

SEQ ID NO: 17985 - protein, 13 aa, Artificial sequence
  Protein classification predicting sequence
YDSIIKVGNDTAM

SEQ ID NO: 17986 - protein, 50 aa, Artificial sequence
  Protein classification predicting sequence
EEGILAGISSGAAIYAAIQKAKELGKGKTVVTVLPSNGERYLSTPLYSFD

SEQ ID NO: 17987 - protein, 9 aa, Artificial sequence
  Protein classification predicting sequence
TPLVRLNRI

SEQ ID NO: 17988 - protein, 10 aa, Artificial sequence
  Protein classification predicting sequence
AAAIKVAKRP

SEQ ID NO: 17989 - protein, 15 aa, Artificial sequence
  Protein classification predicting sequence
ANPKIHYETTGPEIW

SEQ ID NO: 17990 - protein, 9 aa, Artificial sequence
  Protein classification predicting sequence
NPGGSVKDR

SEQ ID NO: 17991 - protein, 10 aa, Artificial sequence
  Protein classification predicting sequence
TSGNTGIALA

SEQ ID NO: 17992 - protein, 7 aa, Artificial sequence
  Protein classification predicting sequence
GGEPGPH

SEQ ID NO: 17993 - protein, 7 aa, Artificial sequence
  Protein classification predicting sequence
IGNTPLV

SEQ ID NO: 17994 - protein, 15 aa, Artificial sequence
  Protein classification predicting sequence
GSVDDGKSTLIGRLL

SEQ ID NO: 17995 - protein, 8 aa, Artificial sequence
  Protein classification predicting sequence
RPNLDFRG

SEQ ID NO: 17996 - protein, 21 aa, Artificial sequence
  Protein classification predicting sequence
FLTCGSVDDGKSTLIGRLLHD

SEQ ID NO: 17997 - protein, 6 aa, Artificial sequence
  Protein classification predicting sequence
RFPVQY

SEQ ID NO: 17998 - protein, 17 aa, Artificial sequence
  Protein classification predicting sequence
TCGSVDDGKSTLIGRLL

SEQ ID NO: 17999 - protein, 6 aa, Artificial sequence
  Protein classification predicting sequence
QTRRHS

SEQ ID NO: 18000 - protein, 10 aa, Artificial sequence
  Protein classification predicting sequence
YDIKIAGKKT

SEQ ID NO: 18001 - protein, 16 aa, Artificial sequence
  Protein classification predicting sequence
GTQGEKLDLALLVDGL

SEQ ID NO: 18002 - protein, 9 aa, Artificial sequence
  Protein classification predicting sequence
DLALLVDGL

SEQ ID NO: 18003 - protein, 18 aa, Artificial sequence
  Protein classification predicting sequence
AEREQGITIDVAYRYFST

SEQ ID NO: 18004 - protein, 5 aa, Artificial sequence
  Protein classification predicting sequence
QTRRH

SEQ ID NO: 18005 - protein, 7 aa, Artificial sequence
  Protein classification predicting sequence
NVTVGAG

SEQ ID NO: 18006 - protein, 14 aa, Artificial sequence
  Protein classification predicting sequence
RRHFPHWGARDLLG

SEQ ID NO: 18007 - protein, 7 aa, Artificial sequence
  Protein classification predicting sequence
QIYEDQL

SEQ ID NO: 18008 - protein, 10 aa, Artificial sequence
  Protein classification predicting sequence
RIREDYLTFA

SEQ ID NO: 18009 - protein, 17 aa, Artificial sequence
  Protein classification predicting sequence
LDIRFVPLSALEGDNVA

SEQ ID NO: 18010 - protein, 9 aa, Artificial sequence
  Protein classification predicting sequence
KVLPSGVES

SEQ ID NO: 18011 - protein, 10 aa, Artificial sequence
  Protein classification predicting sequence
DVVWMAEQPL

SEQ ID NO: 18012 - protein, 8 aa, Artificial sequence
  Protein classification predicting sequence
AGKKTRAR

SEQ ID NO: 18013 - protein, 8 aa, Artificial sequence
  Protein classification predicting sequence
DINNLTQR

SEQ ID NO: 18014 - protein, 8 aa, Artificial sequence
  Protein classification predicting sequence
ARDLLGDK

SEQ ID NO: 18015 - protein, 53 aa, Artificial sequence
  Protein classification predicting sequence
QIYEDQLSSLHNDSKRHGTQGEKLDLALLVDGLQAEREQGITIDVAYRYFSTE

SEQ ID NO: 18016 - protein, 43 aa, Artificial sequence
  Protein classification predicting sequence
LAILLIDARKGVLDQTRRHSFISTLLGIKHLVVAINKMDLVDY

SEQ ID NO: 18017 - protein, 26 aa, Artificial sequence
  Protein classification predicting sequence
YQQNPVTGGLIFIDRLSNVTVGAGMV

SEQ ID NO: 18018 - protein, 24 aa, Artificial sequence
  Protein classification predicting sequence
LLRFLTCGSVDDGKSTLIGRLLHD

SEQ ID NO: 18019 - protein, 32 aa, Artificial sequence
  Protein classification predicting sequence
KRKFIIADTPGHEQYTRNMATGASTCDLAVIL

SEQ ID NO: 18020 - protein, 39 aa, Artificial sequence
  Protein classification predicting sequence
TLLEVLETVEIQRVVDAQPMRFPVQYVNRPNLDFRGYAG

SEQ ID NO: 18021 - protein, 35 aa, Artificial sequence
  Protein classification predicting sequence
LASGRVEVGQRVKVLPSGVESNVARIVTFDGDREE

SEQ ID NO: 18022 - protein, 8 aa, Artificial sequence
  Protein classification predicting sequence
SALEGDNV

SEQ ID NO: 18023 - protein, 8 aa, Artificial sequence
  Protein classification predicting sequence
LPLNGIGL

SEQ ID NO: 18024 - protein, 22 aa, Artificial sequence
  Protein classification predicting sequence
DCADTGGFIIIDRLTNVTVGAG

SEQ ID NO: 18025 - protein, 62 aa, Artificial sequence
  Protein classification predicting sequence
PDLALLVDGLQAEREQGITIDVAYRYFSTQKRKFIIADTPGHEQYTRNMATGASTCDLAVIL

SEQ ID NO: 18026 - protein, 11 aa, Artificial sequence
  Protein classification predicting sequence
AQAGLAVTLTL

SEQ ID NO: 18027 - protein, 5 aa, Artificial sequence
  Protein classification predicting sequence
HFPHW

SEQ ID NO: 18028 - protein, 33 aa, Artificial sequence
  Protein classification predicting sequence
LRFLTCGSVDDGKSTLIGRLLHDTRQIYEDQLS

SEQ ID NO: 18029 - protein, 9 aa, Artificial sequence
  Protein classification predicting sequence
WYSGPTLLE

SEQ ID NO: 18030 - protein, 14 aa, Artificial sequence
  Protein classification predicting sequence
IFIDRLSNVTVGAG

SEQ ID NO: 18031 - protein, 13 aa, Artificial sequence
  Protein classification predicting sequence
RWLRCDIKSLNLL

SEQ ID NO: 18032 - protein, 10 aa, Artificial sequence
  Protein classification predicting sequence
EDRGYQFGDG

SEQ ID NO: 18033 - protein, 14 aa, Artificial sequence
  Protein classification predicting sequence
RWLRCDIKSLNLLG

SEQ ID NO: 18034 - protein, 7 aa, Artificial sequence
  Protein classification predicting sequence
ILNGITR

SEQ ID NO: 18035 - protein, 11 aa, Artificial sequence
  Protein classification predicting sequence
NEHIDRLYASA

SEQ ID NO: 18036 - protein, 9 aa, Artificial sequence
  Protein classification predicting sequence
TVTEGSSSN

SEQ ID NO: 18037 - protein, 15 aa, Artificial sequence
  Protein classification predicting sequence
DRGYVFGDGIYEYIR

SEQ ID NO: 18038 - protein, 7 aa, Artificial sequence
  Protein classification predicting sequence
ERFLRSA

SEQ ID NO: 18039 - protein, 8 aa, Artificial sequence
  Protein classification predicting sequence
RNHSFPTP

SEQ ID NO: 18040 - protein, 30 aa, Artificial sequence
  Protein classification predicting sequence
EDIRWLRCDIKSLNLLGNVLAKEYAVKYNA

SEQ ID NO: 18041 - protein, 7 aa, Artificial sequence
  Protein classification predicting sequence
EAIQHRG

SEQ ID NO: 18042 - protein, 12 aa, Artificial sequence
  Protein classification predicting sequence
YAIKDGVIYTHP

SEQ ID NO: 18043 - protein, 6 aa, Artificial sequence
  Protein classification predicting sequence
GFEKYI

SEQ ID NO: 18044 - protein, 13 aa, Artificial sequence
  Protein classification predicting sequence
EAIQHRGETVTEG

SEQ ID NO: 18045 - protein, 10 aa, Artificial sequence
  Protein classification predicting sequence
IPFKEETFTV

SEQ ID NO: 18046 - protein, 8 aa, Artificial sequence
  Protein classification predicting sequence
KSKNILVK

SEQ ID NO: 18047 - protein, 7 aa, Artificial sequence
  Protein classification predicting sequence
LVHKIAG

SEQ ID NO: 18048 - protein, 9 aa, Artificial sequence
  Protein classification predicting sequence
SGGGSGHEP

SEQ ID NO: 18049 - protein, 9 aa, Artificial sequence
  Protein classification predicting sequence
FASPSTKQI

SEQ ID NO: 18050 - protein, 7 aa, Artificial sequence
  Protein classification predicting sequence
GMGIHNE

SEQ ID NO: 18051 - protein, 11 aa, Artificial sequence
  Protein classification predicting sequence
MGGTSGGLYSI

SEQ ID NO: 18052 - protein, 13 aa, Artificial sequence
  Protein classification predicting sequence
VHQWLKKAVLLSF

SEQ ID NO: 18053 - protein, 15 aa, Artificial sequence
  Protein classification predicting sequence
VLMPSYVNIGAYVDE

SEQ ID NO: 18054 - protein, 6 aa, Artificial sequence
  Protein classification predicting sequence
LPSKDG

SEQ ID NO: 18055 - protein, 7 aa, Artificial sequence
  Protein classification predicting sequence
IVKKVDA

SEQ ID NO: 18056 - protein, 28 aa, Artificial sequence
  Protein classification predicting sequence
QIGKNVHLSGGVGIGGVLEPLQANPTII

SEQ ID NO: 18057 - protein, 12 aa, Artificial sequence
  Protein classification predicting sequence
VRVAEKQADGNW

SEQ ID NO: 18058 - protein, 7 aa, Artificial sequence
  Protein classification predicting sequence
AGFRAVP

SEQ ID NO: 18059 - protein, 28 aa, Artificial sequence
  Protein classification predicting sequence
QAGPTIIEDNCFIGARSEVVEGCIVREG

SEQ ID NO: 18060 - protein, 18 aa, Artificial sequence
  Protein classification predicting sequence
YGEVPPYSVVVAGTMPGK

SEQ ID NO: 18061 - protein, 8 aa, Artificial sequence
  Protein classification predicting sequence
QWIKKAVL

SEQ ID NO: 18062 - protein, 10 aa, Artificial sequence
  Protein classification predicting sequence
SMGVYIGQST

SEQ ID NO: 18063 - protein, 8 aa, Artificial sequence
  Protein classification predicting sequence
QSTKIYDR

SEQ ID NO: 18064 - protein, 9 aa, Artificial sequence
  Protein classification predicting sequence
WWDKVPSKF

SEQ ID NO: 18065 - protein, 12 aa, Artificial sequence
  Protein classification predicting sequence
CFIGARSEVVEG

SEQ ID NO: 18066 - protein, 8 aa, Artificial sequence
  Protein classification predicting sequence
VHLSGGVG

SEQ ID NO: 18067 - protein, 9 aa, Artificial sequence
  Protein classification predicting sequence
GTMIDTWAT

SEQ ID NO: 18068 - protein, 11 aa, Artificial sequence
  Protein classification predicting sequence
EENSVLAMGVF

SEQ ID NO: 18069 - protein, 9 aa, Artificial sequence
  Protein classification predicting sequence
MGVFISQST

SEQ ID NO: 18070 - protein, 7 aa, Artificial sequence
  Protein classification predicting sequence
VPSGSVV

SEQ ID NO: 18071 - protein, 7 aa, Artificial sequence
  Protein classification predicting sequence
SINDLLR

SEQ ID NO: 18072 - protein, 9 aa, Artificial sequence
  Protein classification predicting sequence
CAVIVKRVD

SEQ ID NO: 18073 - protein, 7 aa, Artificial sequence
  Protein classification predicting sequence
YSVVVPG

SEQ ID NO: 18074 - protein, 9 aa, Artificial sequence
  Protein classification predicting sequence
GSCAQIGKN

SEQ ID NO: 18075 - protein, 11 aa, Artificial sequence
  Protein classification predicting sequence
GSCAQIGKNVH

SEQ ID NO: 18076 - protein, 15 aa, Artificial sequence
  Protein classification predicting sequence
GSCAQIGKNVHISGG

SEQ ID NO: 18077 - protein, 9 aa, Artificial sequence
  Protein classification predicting sequence
IVKKVDAKT

SEQ ID NO: 18078 - protein, 8 aa, Artificial sequence
  Protein classification predicting sequence
YDKIPLKY

SEQ ID NO: 18079 - protein, 10 aa, Artificial sequence
  Protein classification predicting sequence
EEGSVISMGV

SEQ ID NO: 18080 - protein, 8 aa, Artificial sequence
  Protein classification predicting sequence
AVIVKRVD

SEQ ID NO: 18081 - protein, 7 aa, Artificial sequence
  Protein classification predicting sequence
MIDTWAT

SEQ ID NO: 18082 - protein, 10 aa, Artificial sequence
  Protein classification predicting sequence
LYCVVIVKQV

SEQ ID NO: 18083 - protein, 15 aa, Artificial sequence
  Protein classification predicting sequence
WTVHQWLKKAVLLSF

SEQ ID NO: 18084 - protein, 7 aa, Artificial sequence
  Protein classification predicting sequence
SVISMGV

SEQ ID NO: 18085 - protein, 16 aa, Artificial sequence
  Protein classification predicting sequence
YGRIPAGSVVVAGNLP

SEQ ID NO: 18086 - protein, 7 aa, Artificial sequence
  Protein classification predicting sequence
PAGSVVV

SEQ ID NO: 18087 - protein, 7 aa, Artificial sequence
  Protein classification predicting sequence
LMPSFVN

SEQ ID NO: 18088 - protein, 6 aa, Artificial sequence
  Protein classification predicting sequence
SMGVFI

SEQ ID NO: 18089 - protein, 8 aa, Artificial sequence
  Protein classification predicting sequence
TRSKTSIN

SEQ ID NO: 18090 - protein, 7 aa, Artificial sequence
  Protein classification predicting sequence
TKFADWS

SEQ ID NO: 18091 - protein, 6 aa, Artificial sequence
  Protein classification predicting sequence
VEGVIV

SEQ ID NO: 18092 - protein, 7 aa, Artificial sequence
  Protein classification predicting sequence
GSVVVSG

SEQ ID NO: 18093 - protein, 10 aa, Artificial sequence
  Protein classification predicting sequence
FYDKIPLKYT

SEQ ID NO: 18094 - protein, 10 aa, Artificial sequence
  Protein classification predicting sequence
QSGVRVVPHA

SEQ ID NO: 18095 - protein, 8 aa, Artificial sequence
  Protein classification predicting sequence
NTVLMPSY

SEQ ID NO: 18096 - protein, 7 aa, Artificial sequence
  Protein classification predicting sequence
NIGAYVD

SEQ ID NO: 18097 - protein, 6 aa, Artificial sequence
  Protein classification predicting sequence
PTIIED

SEQ ID NO: 18098 - protein, 8 aa, Artificial sequence
  Protein classification predicting sequence
CFIGARSE

SEQ ID NO: 18099 - protein, 6 aa, Artificial sequence
  Protein classification predicting sequence
AFERRA

SEQ ID NO: 18100 - protein, 7 aa, Artificial sequence
  Protein classification predicting sequence
IYDRETG

SEQ ID NO: 18101 - protein, 21 aa, Artificial sequence
  Protein classification predicting sequence
HYGRVPAGSVVVSGNLPSKDG

SEQ ID NO: 18102 - protein, 9 aa, Artificial sequence
  Protein classification predicting sequence
EGTMVDTWA

SEQ ID NO: 18103 - protein, 15 aa, Artificial sequence
  Protein classification predicting sequence
HISGGAGIGGVLEPL

SEQ ID NO: 18104 - protein, 13 aa, Artificial sequence
  Protein classification predicting sequence
IIEDNCFIGARSE

SEQ ID NO: 18105 - protein, 7 aa, Artificial sequence
  Protein classification predicting sequence
SMGVYIG

SEQ ID NO: 18106 - protein, 15 aa, Artificial sequence
  Protein classification predicting sequence
QQLQNIIETAFERRA

SEQ ID NO: 18107 - protein, 9 aa, Artificial sequence
  Protein classification predicting sequence
IETAFERRA

SEQ ID NO: 18108 - protein, 16 aa, Artificial sequence
  Protein classification predicting sequence
ITPANADTVTREAVNQ

SEQ ID NO: 18109 - protein, 8 aa, Artificial sequence
  Protein classification predicting sequence
WLKKAVLL

SEQ ID NO: 18110 - protein, 7 aa, Artificial sequence
  Protein classification predicting sequence
NVVLMPS

SEQ ID NO: 18111 - protein, 8 aa, Artificial sequence
  Protein classification predicting sequence
IYDRETGE

SEQ ID NO: 18112 - protein, 6 aa, Artificial sequence
  Protein classification predicting sequence
VDAKTR

SEQ ID NO: 18113 - protein, 11 aa, Artificial sequence
  Protein classification predicting sequence
GIGGVLEPLQA

SEQ ID NO: 18114 - protein, 7 aa, Artificial sequence
  Protein classification predicting sequence
VEGVIVE

SEQ ID NO: 18115 - protein, 8 aa, Artificial sequence
  Protein classification predicting sequence
RVAEKIDG

SEQ ID NO: 18116 - protein, 13 aa, Artificial sequence
  Protein classification predicting sequence
NTVLMPSYVNIGA

SEQ ID NO: 18117 - protein, 10 aa, Artificial sequence
  Protein classification predicting sequence
DNCFIGARSE

SEQ ID NO: 18118 - protein, 15 aa, Artificial sequence
  Protein classification predicting sequence
SLYCAVIVKKVDAKT

SEQ ID NO: 18119 - protein, 20 aa, Artificial sequence
  Protein classification predicting sequence
SLYCAVIVKKVDAKTLGKVG

SEQ ID NO: 18120 - protein, 7 aa, Artificial sequence
  Protein classification predicting sequence
NELLRTI

SEQ ID NO: 18121 - protein, 12 aa, Artificial sequence
  Protein classification predicting sequence
QWLKKAVLLSFR

SEQ ID NO: 18122 - protein, 16 aa, Artificial sequence
  Protein classification predicting sequence
QWLKKAVLLSFRINDN

SEQ ID NO: 18123 - protein, 15 aa, Artificial sequence
  Protein classification predicting sequence
PTIIEDNCFIGARSE

SEQ ID NO: 18124 - protein, 8 aa, Artificial sequence
  Protein classification predicting sequence
KQVDEKTR

SEQ ID NO: 18125 - protein, 8 aa, Artificial sequence
  Protein classification predicting sequence
DKVPMKFA

SEQ ID NO: 18126 - protein, 12 aa, Artificial sequence
  Protein classification predicting sequence
IVEEGSVISMGV

SEQ ID NO: 18127 - protein, 10 aa, Artificial sequence
  Protein classification predicting sequence
AFERRAEITP

SEQ ID NO: 18128 - protein, 14 aa, Artificial sequence
  Protein classification predicting sequence
VHQWIKKAVLLSFR

SEQ ID NO: 18129 - protein, 9 aa, Artificial sequence
  Protein classification predicting sequence
KKAVLLSFR

SEQ ID NO: 18130 - protein, 9 aa, Artificial sequence
  Protein classification predicting sequence
SLYCAVIVK

SEQ ID NO: 18131 - protein, 20 aa, Artificial sequence
  Protein classification predicting sequence
WVTHQWLKKAVLLSFRINDN

SEQ ID NO: 18132 - protein, 10 aa, Artificial sequence
  Protein classification predicting sequence
YYDKVPMKFA

SEQ ID NO: 18133 - protein, 13 aa, Artificial sequence
  Protein classification predicting sequence
YGRVPAGSVVVSG

SEQ ID NO: 18134 - protein, 7 aa, Artificial sequence
  Protein classification predicting sequence
AVLLSFR

SEQ ID NO: 18135 - protein, 13 aa, Artificial sequence
  Protein classification predicting sequence
VLMPSYVNIGAYV

SEQ ID NO: 18136 - protein, 8 aa, Artificial sequence
  Protein classification predicting sequence
GALRVAEK

SEQ ID NO: 18137 - protein, 12 aa, Artificial sequence
  Protein classification predicting sequence
HYGRVPAGSVVV

SEQ ID NO: 18138 - protein, 19 aa, Artificial sequence
  Protein classification predicting sequence
KPDLASLEKTIEKAFDERD

SEQ ID NO: 18139 - protein, 25 aa, Artificial sequence
  Protein classification predicting sequence
VGSCAQIGKNVHLSGGVGIGGVLEP

SEQ ID NO: 18140 - protein, 19 aa, Artificial sequence
  Protein classification predicting sequence
VNQWLKKAVLLSFRLNPME

SEQ ID NO: 18141 - protein, 14 aa, Artificial sequence
  Protein classification predicting sequence
NEFEKAGFRAVPNC

SEQ ID NO: 18142 - protein, 8 aa, Artificial sequence
  Protein classification predicting sequence
EGVIVEEG

SEQ ID NO: 18143 - protein, 6 aa, Artificial sequence
  Protein classification predicting sequence
WKVNEW

SEQ ID NO: 18144 - protein, 7 aa, Artificial sequence
  Protein classification predicting sequence
IIEDNCF

SEQ ID NO: 18145 - protein, 9 aa, Artificial sequence
  Protein classification predicting sequence
GAESRYFDK

SEQ ID NO: 18146 - protein, 8 aa, Artificial sequence
  Protein classification predicting sequence
IDGAETKY

SEQ ID NO: 18147 - protein, 6 aa, Artificial sequence
  Protein classification predicting sequence
YFDKVP

SEQ ID NO: 18148 - protein, 11 aa, Artificial sequence
  Protein classification predicting sequence
RVVPSATVRKG

SEQ ID NO: 18149 - protein, 11 aa, Artificial sequence
  Protein classification predicting sequence
VEEGSVISMGV

SEQ ID NO: 18150 - protein, 6 aa, Artificial sequence
  Protein classification predicting sequence
GKYSLY

SEQ ID NO: 18151 - protein, 6 aa, Artificial sequence
  Protein classification predicting sequence
WHVNQW

SEQ ID NO: 18152 - protein, 6 aa, Artificial sequence
  Protein classification predicting sequence
KKAVLL

SEQ ID NO: 18153 - protein, 16 aa, Artificial sequence
  Protein classification predicting sequence
NVHLSGGVGIGGVLEP

SEQ ID NO: 18154 - protein, 19 aa, Artificial sequence
  Protein classification predicting sequence
PTIIEDNCFIGARSEVVEG

SEQ ID NO: 18155 - protein, 6 aa, Artificial sequence
  Protein classification predicting sequence
STKIYD

SEQ ID NO: 18156 - protein, 7 aa, Artificial sequence
  Protein classification predicting sequence
YCAVIVK

SEQ ID NO: 18157 - protein, 6 aa, Artificial sequence
  Protein classification predicting sequence
MGVFIG

SEQ ID NO: 18158 - protein, 8 aa, Artificial sequence
  Protein classification predicting sequence
VPPYSVVV

SEQ ID NO: 18159 - protein, 10 aa, Artificial sequence
  Protein classification predicting sequence
HSLYCAVIVK

SEQ ID NO: 18160 - protein, 19 aa, Artificial sequence
  Protein classification predicting sequence
HSLYCAVIVKQVDEKTRAK

SEQ ID NO: 18161 - protein, 9 aa, Artificial sequence
  Protein classification predicting sequence
KTSINELLR

SEQ ID NO: 18162 - protein, 9 aa, Artificial sequence
  Protein classification predicting sequence
PTIIEDNCF

SEQ ID NO: 18163 - protein, 7 aa, Artificial sequence
  Protein classification predicting sequence
YDEARFQ

SEQ ID NO: 18164 - protein, 7 aa, Artificial sequence
  Protein classification predicting sequence
FIGARSE

SEQ ID NO: 18165 - protein, 8 aa, Artificial sequence
  Protein classification predicting sequence
VVVPGSLP

SEQ ID NO: 18166 - protein, 12 aa, Artificial sequence
  Protein classification predicting sequence
GEELGSGQFAIV

SEQ ID NO: 18167 - protein, 10 aa, Artificial sequence
  Protein classification predicting sequence
EYAAKFIKKR

SEQ ID NO: 18168 - protein, 20 aa, Artificial sequence
  Protein classification predicting sequence
TDVVLILELVSGGELFDFLA

SEQ ID NO: 18169 - protein, 7 aa, Artificial sequence
  Protein classification predicting sequence
KQILDGV

SEQ ID NO: 18170 - protein, 47 aa, Artificial sequence
  Protein classification predicting sequence
EFKNIFGTPEFVAPEIVNYEPLGLEADMWSIGVITYILLSGASPFLG

SEQ ID NO: 18171 - protein, 10 aa, Artificial sequence
  Protein classification predicting sequence
TSELAKDFIR

SEQ ID NO: 18172 - protein, 14 aa, Artificial sequence
  Protein classification predicting sequence
NEVSILRRVKHPNI

SEQ ID NO: 18173 - protein, 17 aa, Artificial sequence
  Protein classification predicting sequence
LVMELVKGGDLFDAITS

SEQ ID NO: 18174 - protein, 12 aa, Artificial sequence
  Protein classification predicting sequence
KSLKLGDFGLAT

SEQ ID NO: 18175 - protein, 12 aa, Artificial sequence
  Protein classification predicting sequence
IGDGNFAVVKEC

SEQ ID NO: 18176 - protein, 28 aa, Artificial sequence
  Protein classification predicting sequence
GPLYTVCGTPTYVAPEIIAETGYGLKVD

SEQ ID NO: 18177 - protein, 18 aa, Artificial sequence
  Protein classification predicting sequence
WAAGVITYILLCGFPPFR

SEQ ID NO: 18178 - protein, 8 aa, Artificial sequence
  Protein classification predicting sequence
SARYYKDG

SEQ ID NO: 18179 - protein, 13 aa, Artificial sequence
  Protein classification predicting sequence
GYVEMEFEFDRLR

SEQ ID NO: 18180 - protein, 7 aa, Artificial sequence
  Protein classification predicting sequence
AQIASGM

SEQ ID NO: 18181 - protein, 36 aa, Artificial sequence
  Protein classification predicting sequence
KGHPLLVAVKILRPDATKNARNDFLKEVKIMSRLKD

SEQ ID NO: 18182 - protein, 7 aa, Artificial sequence
  Protein classification predicting sequence
GDGAWCP

SEQ ID NO: 18183 - protein, 11 aa, Artificial sequence
  Protein classification predicting sequence
LVGTQGRHAGG

SEQ ID NO: 18184 - protein, 10 aa, Artificial sequence
  Protein classification predicting sequence
VWPGYDYVGW

SEQ ID NO: 18185 - protein, 10 aa, Artificial sequence
  Protein classification predicting sequence
ILIGCLVAII

SEQ ID NO: 18186 - protein, 10 aa, Artificial sequence
  Protein classification predicting sequence
VPHYAEADIV

SEQ ID NO: 18187 - protein, 10 aa, Artificial sequence
  Protein classification predicting sequence
LQGVTGGNTY

SEQ ID NO: 18188 - protein, 10 aa, Artificial sequence
  Protein classification predicting sequence
KNARNDFLKE

SEQ ID NO: 18189 - protein, 14 aa, Artificial sequence
  Protein classification predicting sequence
TIKIADFGMSRNLY

SEQ ID NO: 18190 - protein, 11 aa, Artificial sequence
  Protein classification predicting sequence
QGRAVLPIRWM

SEQ ID NO: 18191 - protein, 18 aa, Artificial sequence
  Protein classification predicting sequence
GKFTTASDVWAFGVTLWE

SEQ ID NO: 18192 - protein, 10 aa, Artificial sequence
  Protein classification predicting sequence
GEFFRDQGRQ

SEQ ID NO: 18193 - protein, 7 aa, Artificial sequence
  Protein classification predicting sequence
DPLCMIT

SEQ ID NO: 18194 - protein, 6 aa, Artificial sequence
  Protein classification predicting sequence
TVSDHI

SEQ ID NO: 18195 - protein, 8 aa, Artificial sequence
  Protein classification predicting sequence
GFTGTYKG

SEQ ID NO: 18196 - protein, 7 aa, Artificial sequence
  Protein classification predicting sequence
VLMPGDP

SEQ ID NO: 18197 - protein, 7 aa, Artificial sequence
  Protein classification predicting sequence
MGHGMGI

SEQ ID NO: 18198 - protein, 7 aa, Artificial sequence
  Protein classification predicting sequence
PGDPLRA

SEQ ID NO: 18199 - protein, 7 aa, Artificial sequence
  Protein classification predicting sequence
QIDGEPW

SEQ ID NO: 18200 - protein, 7 aa, Artificial sequence
  Protein classification predicting sequence
VNPKSGG

SEQ ID NO: 18201 - protein, 9 aa, Artificial sequence
  Protein classification predicting sequence
CGGDGTVGW

SEQ ID NO: 18202 - protein, 20 aa, Artificial sequence
  Protein classification predicting sequence
PLGTGNDLARCLRWGGGYEG

SEQ ID NO: 18203 - protein, 7 aa, Artificial sequence
  Protein classification predicting sequence
IINNYFS

SEQ ID NO: 18204 - protein, 7 aa, Artificial sequence
  Protein classification predicting sequence
TSETFAA

SEQ ID NO: 18205 - protein, 8 aa, Artificial sequence
  Protein classification predicting sequence
HGGSNLWG

SEQ ID NO: 18206 - protein, 11 aa, Artificial sequence
  Protein classification predicting sequence
PMQIDGEPWMQ

SEQ ID NO: 18207 - protein, 9 aa, Artificial sequence
  Protein classification predicting sequence
LEVVGLEGA

SEQ ID NO: 18208 - protein, 5 aa, Artificial sequence
  Protein classification predicting sequence
EPWMQ

SEQ ID NO: 18209 - protein, 7 aa, Artificial sequence
  Protein classification predicting sequence
PLLVLLG

SEQ ID NO: 18210 - protein, 7 aa, Artificial sequence
  Protein classification predicting sequence
VYCNLCE

SEQ ID NO: 18211 - protein, 9 aa, Artificial sequence
  Protein classification predicting sequence
LGKQGLSCN

SEQ ID NO: 18212 - protein, 16 aa, Artificial sequence
  Protein classification predicting sequence
GLHCVWCHLEIHDDCL

SEQ ID NO: 18213 - protein, 6 aa, Artificial sequence
  Protein classification predicting sequence
NPKSGG

SEQ ID NO: 18214 - protein, 12 aa, Artificial sequence
  Protein classification predicting sequence
LPMQVDGEPWMQ

SEQ ID NO: 18215 - protein, 11 aa, Artificial sequence
  Protein classification predicting sequence
DKLEFMFRLYD

SEQ ID NO: 18216 - protein, 13 aa, Artificial sequence
  Protein classification predicting sequence
GGMTTIPLLVLLG

SEQ ID NO: 18217 - protein, 16 aa, Artificial sequence
  Protein classification predicting sequence
PDFRVLACGGDGTVGW

SEQ ID NO: 18218 - protein, 16 aa, Artificial sequence
  Protein classification predicting sequence
MREKHPEKFNSRMKNK

SEQ ID NO: 18219 - protein, 11 aa, Artificial sequence
  Protein classification predicting sequence
PEKFNSRMKNK

SEQ ID NO: 18220 - protein, 11 aa, Artificial sequence
  Protein classification predicting sequence
WYFEFGTSETF

SEQ ID NO: 18221 - protein, 21 aa, Artificial sequence
  Protein classification predicting sequence
PDFRVLACGGDGTVGWILDCI

SEQ ID NO: 18222 - protein, 6 aa, Artificial sequence
  Protein classification predicting sequence
KQGLCC

SEQ ID NO: 18223 - protein, 17 aa, Artificial sequence
  Protein classification predicting sequence
NNYFSIGVDASIAHRFH

SEQ ID NO: 18224 - protein, 7 aa, Artificial sequence
  Protein classification predicting sequence
PEKFNSR

SEQ ID NO: 18225 - protein, 9 aa, Artificial sequence
  Protein classification predicting sequence
LDPGMGFFL

SEQ ID NO: 18226 - protein, 8 aa, Artificial sequence
  Protein classification predicting sequence
SVSRKSFL

SEQ ID NO: 18227 - protein, 7 aa, Artificial sequence
  Protein classification predicting sequence
CLMHMQG

SEQ ID NO: 18228 - protein, 7 aa, Artificial sequence
  Protein classification predicting sequence
SRKSMIG

SEQ ID NO: 18229 - protein, 7 aa, Artificial sequence
  Protein classification predicting sequence
TPDSFSD

SEQ ID NO: 18230 - protein, 6 aa, Artificial sequence
  Protein classification predicting sequence
GGESTR

SEQ ID NO: 18231 - protein, 15 aa, Artificial sequence
  Protein classification predicting sequence
INDQWAGLYDHRMFQ

SEQ ID NO: 18232 - protein, 8 aa, Artificial sequence
  Protein classification predicting sequence
VAKYDAEI

SEQ ID NO: 18233 - protein, 20 aa, Artificial sequence
  Protein classification predicting sequence
MIDEGVDIIDVGGVSTRPGH

SEQ ID NO: 18234 - protein, 19 aa, Artificial sequence
  Protein classification predicting sequence
KTKIMGILNVTPDSFSDGG

SEQ ID NO: 18235 - protein, 14 aa, Artificial sequence
  Protein classification predicting sequence
DIIDVGGVSTRPGH

SEQ ID NO: 18236 - protein, 19 aa, Artificial sequence
  Protein classification predicting sequence
ISVDTFRSEVAEACLKLGV

SEQ ID NO: 18237 - protein, 24 aa, Artificial sequence
  Protein classification predicting sequence
EVMARLDELVATEYPVLLATSRKR

SEQ ID NO: 18238 - protein, 14 aa, Artificial sequence
  Protein classification predicting sequence
TAATTAYGIMKGVR

SEQ ID NO: 18239 - protein, 7 aa, Artificial sequence
  Protein classification predicting sequence
DFLKENE

SEQ ID NO: 18240 - protein, 15 aa, Artificial sequence
  Protein classification predicting sequence
NKIWLDPGIGFAKTR

SEQ ID NO: 18241 - protein, 14 aa, Artificial sequence
  Protein classification predicting sequence
GILNVTPDSFSDGG

SEQ ID NO: 18242 - protein, 12 aa, Artificial sequence
  Protein classification predicting sequence
RSEVAEACLKLG

SEQ ID NO: 18243 - protein, 7 aa, Artificial sequence
  Protein classification predicting sequence
PVVEEML

SEQ ID NO: 18244 - protein, 9 aa, Artificial sequence
  Protein classification predicting sequence
RVVPVIKAI

SEQ ID NO: 18245 - protein, 7 aa, Artificial sequence
  Protein classification predicting sequence
LDPGIGF

SEQ ID NO: 18246 - protein, 27 aa, Artificial sequence
  Protein classification predicting sequence
GNAAIMGILNVTPDSFSDGGSYTTVQK

SEQ ID NO: 18247 - protein, 26 aa, Artificial sequence
  Protein classification predicting sequence
LISIDTYKTETARAALEAGADILNDV

SEQ ID NO: 18248 - protein, 9 aa, Artificial sequence
  Protein classification predicting sequence
VTQDVCDFL

SEQ ID NO: 18249 - protein, 10 aa, Artificial sequence
  Protein classification predicting sequence
NIWIDPGFGF

SEQ ID NO: 18250 - protein, 15 aa, Artificial sequence
  Protein classification predicting sequence
VCQLGYPVLFGISRK

SEQ ID NO: 18251 - protein, 32 aa, Artificial sequence
  Protein classification predicting sequence
VVDALLGGNTKAKERDGATAALSAYALGKGCQ

SEQ ID NO: 18252 - protein, 6 aa, Artificial sequence
  Protein classification predicting sequence
VRVHDV

SEQ ID NO: 18253 - protein, 6 aa, Artificial sequence
  Protein classification predicting sequence
RYLVQH

SEQ ID NO: 18254 - protein, 6 aa, Artificial sequence
  Protein classification predicting sequence
NYCKFE

SEQ ID NO: 18255 - protein, 7 aa, Artificial sequence
  Protein classification predicting sequence
KHHIANA

SEQ ID NO: 18256 - protein, 14 aa, Artificial sequence
  Protein classification predicting sequence
LMRNGADYAVYINT

SEQ ID NO: 18257 - protein, 10 aa, Artificial sequence
  Protein classification predicting sequence
LGGGLIKHHI

SEQ ID NO: 18258 - protein, 9 aa, Artificial sequence
  Protein classification predicting sequence
GGIEEDLIK

SEQ ID NO: 18259 - protein, 7 aa, Artificial sequence
  Protein classification predicting sequence
IKCLAPT

SEQ ID NO: 18260 - protein, 7 aa, Artificial sequence
  Protein classification predicting sequence
EINDESS

SEQ ID NO: 18261 - protein, 6 aa, Artificial sequence
  Protein classification predicting sequence
EFDGSD

SEQ ID NO: 18262 - protein, 10 aa, Artificial sequence
  Protein classification predicting sequence
NRIGNLLVPN

SEQ ID NO: 18263 - protein, 8 aa, Artificial sequence
  Protein classification predicting sequence
TYLGEFSL

SEQ ID NO: 18264 - protein, 17 aa, Artificial sequence
  Protein classification predicting sequence
NRIGNLLVPNDNYCKFE

SEQ ID NO: 18265 - protein, 7 aa, Artificial sequence
  Protein classification predicting sequence
MPILDQM

SEQ ID NO: 18266 - protein, 6 aa, Artificial sequence
  Protein classification predicting sequence
SVYYWA

SEQ ID NO: 18267 - protein, 7 aa, Artificial sequence
  Protein classification predicting sequence
QEFDGSD

SEQ ID NO: 18268 - protein, 7 aa, Artificial sequence
  Protein classification predicting sequence
IRYLVQH

SEQ ID NO: 18269 - protein, 9 aa, Artificial sequence
  Protein classification predicting sequence
EEDLIKCLA

SEQ ID NO: 18270 - protein, 10 aa, Artificial sequence
  Protein classification predicting sequence
DIRKINSMSM

SEQ ID NO: 18271 - protein, 9 aa, Artificial sequence
  Protein classification predicting sequence
ERWLSILTR

SEQ ID NO: 18272 - protein, 9 aa, Artificial sequence
  Protein classification predicting sequence
MEDLWTLGG

SEQ ID NO: 18273 - protein, 19 aa, Artificial sequence
  Protein classification predicting sequence
IPNEQLPSMANYTLHHNDP

SEQ ID NO: 18274 - protein, 10 aa, Artificial sequence
  Protein classification predicting sequence
NKPYLSVYLH

SEQ ID NO: 18275 - protein, 11 aa, Artificial sequence
  Protein classification predicting sequence
QRLWWHSTAPM

SEQ ID NO: 18276 - protein, 8 aa, Artificial sequence
  Protein classification predicting sequence
KSRVKIYL

SEQ ID NO: 18277 - protein, 12 aa, Artificial sequence
  Protein classification predicting sequence
AMEDLWTLGGRR

SEQ ID NO: 18278 - protein, 13 aa, Artificial sequence
  Protein classification predicting sequence
EQLPSMANYTLHH

SEQ ID NO: 18279 - protein, 7 aa, Artificial sequence
  Protein classification predicting sequence
QRLWWHS

SEQ ID NO: 18280 - protein, 7 aa, Artificial sequence
  Protein classification predicting sequence
EPFVGAG

SEQ ID NO: 18281 - protein, 7 aa, Artificial sequence
  Protein classification predicting sequence
LISNHDT

SEQ ID NO: 18282 - protein, 14 aa, Artificial sequence
  Protein classification predicting sequence
EPFVGAGSVFLNTD

SEQ ID NO: 18283 - protein, 11 aa, Artificial sequence
  Protein classification predicting sequence
RAFLKWAGGKY

SEQ ID NO: 18284 - protein, 17 aa, Artificial sequence
  Protein classification predicting sequence
LVEPFVGAGSVFLNTDF

SEQ ID NO: 18285 - protein, 10 aa, Artificial sequence
  Protein classification predicting sequence
TWQAQTEFQK

SEQ ID NO: 18286 - protein, 7 aa, Artificial sequence
  Protein classification predicting sequence
FVFVPGP

SEQ ID NO: 18287 - protein, 12 aa, Artificial sequence
  Protein classification predicting sequence
KYSVLLPTYNER

SEQ ID NO: 18288 - protein, 11 aa, Artificial sequence
  Protein classification predicting sequence
KLGLGTAYIHG

SEQ ID NO: 18289 - protein, 9 aa, Artificial sequence
  Protein classification predicting sequence
SKGYVFQME

SEQ ID NO: 18290 - protein, 9 aa, Artificial sequence
  Protein classification predicting sequence
NYTIGEVPI

SEQ ID NO: 18291 - protein, 7 aa, Artificial sequence
  Protein classification predicting sequence
YGESKLG

SEQ ID NO: 18292 - protein, 7 aa, Artificial sequence
  Protein classification predicting sequence
GIGEKTA

SEQ ID NO: 18293 - protein, 12 aa, Artificial sequence
  Protein classification predicting sequence
EEAPWPPPEGAF

SEQ ID NO: 18294 - protein, 14 aa, Artificial sequence
  Protein classification predicting sequence
NFGVLYGMSAHRLS

SEQ ID NO: 18295 - protein, 8 aa, Artificial sequence
  Protein classification predicting sequence
PKVRAWIE

SEQ ID NO: 18296 - protein, 8 aa, Artificial sequence
  Protein classification predicting sequence
VPLEVEVG

SEQ ID NO: 18297 - protein, 9 aa, Artificial sequence
  Protein classification predicting sequence
FNINSPKQL

SEQ ID NO: 18298 - protein, 7 aa, Artificial sequence
  Protein classification predicting sequence
NSPIQGS

SEQ ID NO: 18299 - protein, 6 aa, Artificial sequence
  Protein classification predicting sequence
SQIELR

SEQ ID NO: 18300 - protein, 11 aa, Artificial sequence
  Protein classification predicting sequence
AKAINFGLIYG

SEQ ID NO: 18301 - protein, 8 aa, Artificial sequence
  Protein classification predicting sequence
LIDGSSVA

SEQ ID NO: 18302 - protein, 17 aa, Artificial sequence
  Protein classification predicting sequence
TGRLSSTEPNLQNIPIR

SEQ ID NO: 18303 - protein, 9 aa, Artificial sequence
  Protein classification predicting sequence
PNLQNIPIR

SEQ ID NO: 18304 - protein, 8 aa, Artificial sequence
  Protein classification predicting sequence
DYSQIELR

SEQ ID NO: 18305 - protein, 16 aa, Artificial sequence
  Protein classification predicting sequence
FNINSPKQLGVILFEK

SEQ ID NO: 18306 - protein, 6 aa, Artificial sequence
  Protein classification predicting sequence
HTRFNQ

SEQ ID NO: 18307 - protein, 7 aa, Artificial sequence
  Protein classification predicting sequence
PNLQNIP

SEQ ID NO: 18308 - protein, 6 aa, Artificial sequence
  Protein classification predicting sequence
SDNIPG

SEQ ID NO: 18309 - protein, 7 aa, Artificial sequence
  Protein classification predicting sequence
DYSQIEL

SEQ ID NO: 18310 - protein, 7 aa, Artificial sequence
  Protein classification predicting sequence
LLQVHDE

SEQ ID NO: 18311 - protein, 9 aa, Artificial sequence
  Protein classification predicting sequence
PNLQNIPVR

SEQ ID NO: 18312 - protein, 10 aa, Artificial sequence
  Protein classification predicting sequence
IYGISAFGLA

SEQ ID NO: 18313 - protein, 9 aa, Artificial sequence
  Protein classification predicting sequence
AINAPIQGT

SEQ ID NO: 18314 - protein, 7 aa, Artificial sequence
  Protein classification predicting sequence
GRRRYVP

SEQ ID NO: 18315 - protein, 9 aa, Artificial sequence
  Protein classification predicting sequence
AERAAINAP

SEQ ID NO: 18316 - protein, 10 aa, Artificial sequence
  Protein classification predicting sequence
EADDVIGTLA

SEQ ID NO: 18317 - protein, 7 aa, Artificial sequence
  Protein classification predicting sequence
GVGEKTA

SEQ ID NO: 18318 - protein, 8 aa, Artificial sequence
  Protein classification predicting sequence
DTETDSLD

SEQ ID NO: 18319 - protein, 8 aa, Artificial sequence
  Protein classification predicting sequence
TATGRLSS

SEQ ID NO: 18320 - protein, 6 aa, Artificial sequence
  Protein classification predicting sequence
DYSQIE

SEQ ID NO: 18321 - protein, 7 aa, Artificial sequence
  Protein classification predicting sequence
AKAINFG

SEQ ID NO: 18322 - protein, 6 aa, Artificial sequence
  Protein classification predicting sequence
GYEADD

SEQ ID NO: 18323 - protein, 6 aa, Artificial sequence
  Protein classification predicting sequence
NAPIQG

SEQ ID NO: 18324 - protein, 8 aa, Artificial sequence
  Protein classification predicting sequence
LLQVHDEL

SEQ ID NO: 18325 - protein, 24 aa, Artificial sequence
  Protein classification predicting sequence
MLPLFEPKGRVLLVDGHHLAYRTF

SEQ ID NO: 18326 - protein, 15 aa, Artificial sequence
  Protein classification predicting sequence
VVFDAKAPSFRHEAY

SEQ ID NO: 18327 - protein, 21 aa, Artificial sequence
  Protein classification predicting sequence
LRAFLERLEFGSLLHEFGLLE

SEQ ID NO: 18328 - protein, 7 aa, Artificial sequence
  Protein classification predicting sequence
AFIAEEG

SEQ ID NO: 18329 - protein, 15 aa, Artificial sequence
  Protein classification predicting sequence
RVLLVDGHHLAYRTF

SEQ ID NO: 18330 - protein, 13 aa, Artificial sequence
  Protein classification predicting sequence
LEFGSLLHEFGLL

SEQ ID NO: 18331 - protein, 11 aa, Artificial sequence
  Protein classification predicting sequence
PEGVARRYGGE

SEQ ID NO: 18332 - protein, 6 aa, Artificial sequence
  Protein classification predicting sequence
KLKSTY

SEQ ID NO: 18333 - protein, 12 aa, Artificial sequence
  Protein classification predicting sequence
DYSQIELRVLAH

SEQ ID NO: 18334 - protein, 17 aa, Artificial sequence
  Protein classification predicting sequence
RGYVETLFGRRRYVPDL

SEQ ID NO: 18335 - protein, 24 aa, Artificial sequence
  Protein classification predicting sequence
SVREAAERMAFNMPVQGTAADLMK

SEQ ID NO: 18336 - protein, 9 aa, Artificial sequence
  Protein classification predicting sequence
AMVKLFPRL

SEQ ID NO: 18337 - protein, 10 aa, Artificial sequence
  Protein classification predicting sequence
AYPLDVPLEV

SEQ ID NO: 18338 - protein, 12 aa, Artificial sequence
  Protein classification predicting sequence
GFEADDLIATLA

SEQ ID NO: 18339 - protein, 9 aa, Artificial sequence
  Protein classification predicting sequence
EGRKIRQAF

SEQ ID NO: 18340 - protein, 6 aa, Artificial sequence
  Protein classification predicting sequence
YGDTDS

SEQ ID NO: 18341 - protein, 9 aa, Artificial sequence
  Protein classification predicting sequence
YGDTDSTFV

SEQ ID NO: 18342 - protein, 8 aa, Artificial sequence
  Protein classification predicting sequence
PILTGIKI

SEQ ID NO: 18343 - protein, 10 aa, Artificial sequence
  Protein classification predicting sequence
ETRPVLTGVN

SEQ ID NO: 18344 - protein, 10 aa, Artificial sequence
  Protein classification predicting sequence
CTATDSHRLA

SEQ ID NO: 18345 - protein, 10 aa, Artificial sequence
  Protein classification predicting sequence
FAVSTSETRP

SEQ ID NO: 18346 - protein, 6 aa, Artificial sequence
  Protein classification predicting sequence
LTGVNW

SEQ ID NO: 18347 - protein, 12 aa, Artificial sequence
  Protein classification predicting sequence
AIDRASLLAREG

SEQ ID NO: 18348 - protein, 9 aa, Artificial sequence
  Protein classification predicting sequence
QDVRYYLNG

SEQ ID NO: 18349 - protein, 8 aa, Artificial sequence
  Protein classification predicting sequence
PRKGVIEL

SEQ ID NO: 18350 - protein, 6 aa, Artificial sequence
  Protein classification predicting sequence
RYYLNG

SEQ ID NO: 18351 - protein, 7 aa, Artificial sequence
  Protein classification predicting sequence
GRSRFTL

SEQ ID NO: 18352 - protein, 14 aa, Artificial sequence
  Protein classification predicting sequence
LRTVATDGHRLAVC

SEQ ID NO: 18353 - protein, 12 aa, Artificial sequence
  Protein classification predicting sequence
DGRFPDYRRVLP

SEQ ID NO: 18354 - protein, 8 aa, Artificial sequence
  Protein classification predicting sequence
ENQLKITA

SEQ ID NO: 18355 - protein, 9 aa, Artificial sequence
  Protein classification predicting sequence
LDVLNALKC

SEQ ID NO: 18356 - protein, 14 aa, Artificial sequence
  Protein classification predicting sequence
GLTISGFDYEVSAE

SEQ ID NO: 18357 - protein, 9 aa, Artificial sequence
  Protein classification predicting sequence
QVAIAAGRD

SEQ ID NO: 18358 - protein, 9 aa, Artificial sequence
  Protein classification predicting sequence
TLPMLTGIR

SEQ ID NO: 18359 - protein, 10 aa, Artificial sequence
  Protein classification predicting sequence
GEPLTIAFNP

SEQ ID NO: 18360 - protein, 7 aa, Artificial sequence
  Protein classification predicting sequence
KPALLRP

SEQ ID NO: 18361 - protein, 7 aa, Artificial sequence
  Protein classification predicting sequence
RALPNKP

SEQ ID NO: 18362 - protein, 16 aa, Artificial sequence
  Protein classification predicting sequence
VVLAATDRFRLAVREL

SEQ ID NO: 18363 - protein, 9 aa, Artificial sequence
  Protein classification predicting sequence
VGKDGLLGI

SEQ ID NO: 18364 - protein, 10 aa, Artificial sequence
  Protein classification predicting sequence
VALVADRGAQ

SEQ ID NO: 18365 - protein, 15 aa, Artificial sequence
  Protein classification predicting sequence
LSAGADDVGRAEEDL

SEQ ID NO: 18366 - protein, 26 aa, Artificial sequence
  Protein classification predicting sequence
LLKPLQQVSGPLGGRPTLPILGNLLL

SEQ ID NO: 18367 - protein, 13 aa, Artificial sequence
  Protein classification predicting sequence
TLSLTGTDLEMEM

SEQ ID NO: 18368 - protein, 13 aa, Artificial sequence
  Protein classification predicting sequence
GATTVPARKFFDI

SEQ ID NO: 18369 - protein, 16 aa, Artificial sequence
  Protein classification predicting sequence
LVRSGRSRFSLSTLPA

SEQ ID NO: 18370 - protein, 20 aa, Artificial sequence
  Protein classification predicting sequence
DFPNLDDWQSEVEFTLPQAT

SEQ ID NO: 18371 - protein, 22 aa, Artificial sequence
  Protein classification predicting sequence
TQFSMAHQDVRYYLNGMLFETE

SEQ ID NO: 18372 - protein, 15 aa, Artificial sequence
  Protein classification predicting sequence
HSVIVPRKGVIELMR

SEQ ID NO: 18373 - protein, 29 aa, Artificial sequence
  Protein classification predicting sequence
RAHVGDFIFTSKLVDGRFPDYRRVLPKNP

SEQ ID NO: 18374 - protein, 14 aa, Artificial sequence
  Protein classification predicting sequence
RAAILSNEKFRGVR

SEQ ID NO: 18375 - protein, 17 aa, Artificial sequence
  Protein classification predicting sequence
QLKITANNPEQEEAEEI

SEQ ID NO: 18376 - protein, 7 aa, Artificial sequence
  Protein classification predicting sequence
AILSNEK

SEQ ID NO: 18377 - protein, 11 aa, Artificial sequence
  Protein classification predicting sequence
ANNPEQEEAEE

SEQ ID NO: 18378 - protein, 34 aa, Artificial sequence
  Protein classification predicting sequence
QPHEPGATTVPARKFFDICRGLPEGAEIAVQLEG

SEQ ID NO: 18379 - protein, 45 aa, Artificial sequence
  Protein classification predicting sequence
RMLVRSGRSRFSLSTLPAADFPNLDDWQSEVEFTLPQATMKRLIE

SEQ ID NO: 18380 - protein, 24 aa, Artificial sequence
  Protein classification predicting sequence
SLPSHSVIVPRKGVIELMRMLDGG

SEQ ID NO: 18381 - protein, 46 aa, Artificial sequence
  Protein classification predicting sequence
LKQAFARAAILSNEKFRGVRLYVSENQLKITANNPEQEEAEEILDV

SEQ ID NO: 18382 - protein, 21 aa, Artificial sequence
  Protein classification predicting sequence
EMEIGFNVSYVLDVLNALKCE

SEQ ID NO: 18383 - protein, 27 aa, Artificial sequence
  Protein classification predicting sequence
QLNDTLKAISPRTTLPILTGIKIDAKE

SEQ ID NO: 18384 - protein, 19 aa, Artificial sequence
  Protein classification predicting sequence
EVILTGSDSEISIEITIPK

SEQ ID NO: 18385 - protein, 22 aa, Artificial sequence
  Protein classification predicting sequence
ETGSVVLPGRFFVDIIKKLPGK

SEQ ID NO: 18386 - protein, 34 aa, Artificial sequence
  Protein classification predicting sequence
VKLSTNEQFQTLITSGHSEFNLSGLDPDQYPLLP

SEQ ID NO: 18387 - protein, 16 aa, Artificial sequence
  Protein classification predicting sequence
VSRDDAIQLSVKVLKN

SEQ ID NO: 18388 - protein, 25 aa, Artificial sequence
  Protein classification predicting sequence
IAQTNFAVSTSETRPVLTGVNWLIQ

SEQ ID NO: 18389 - protein, 22 aa, Artificial sequence
  Protein classification predicting sequence
NELICTATDSHRLAVRKLQLED

SEQ ID NO: 18390 - protein, 13 aa, Artificial sequence
  Protein classification predicting sequence
SENKNVIIPGKAL

SEQ ID NO: 18391 - protein, 8 aa, Artificial sequence
  Protein classification predicting sequence
ELNKIMSD

SEQ ID NO: 18392 - protein, 14 aa, Artificial sequence
  Protein classification predicting sequence
EDIDIFFASNQVLF

SEQ ID NO: 18393 - protein, 26 aa, Artificial sequence
  Protein classification predicting sequence
NFISRLLEGHYPDTTRLFPENYEIKL

SEQ ID NO: 18394 - protein, 25 aa, Artificial sequence
  Protein classification predicting sequence
FYHAIDRASLLAREGGNNVIKLSTG

SEQ ID NO: 18395 - protein, 17 aa, Artificial sequence
  Protein classification predicting sequence
VELSSTSPEIGTVKEEV

SEQ ID NO: 18396 - protein, 7 aa, Artificial sequence
  Protein classification predicting sequence
ANDVEGG

SEQ ID NO: 18397 - protein, 38 aa, Artificial sequence
  Protein classification predicting sequence
LKISFNSKYMMDALKAIDNDEVEVEFFGTMKPFILKPK

SEQ ID NO: 18398 - protein, 7 aa, Artificial sequence
  Protein classification predicting sequence
FDYEVSA

SEQ ID NO: 18399 - protein, 7 aa, Artificial sequence
  Protein classification predicting sequence
TDGKRLA

SEQ ID NO: 18400 - protein, 9 aa, Artificial sequence
  Protein classification predicting sequence
LPILGNLLL

SEQ ID NO: 18401 - protein, 10 aa, Artificial sequence
  Protein classification predicting sequence
VRSGRSRFSL

SEQ ID NO: 18402 - protein, 6 aa, Artificial sequence
  Protein classification predicting sequence
TQFSMA

SEQ ID NO: 18403 - protein, 7 aa, Artificial sequence
  Protein classification predicting sequence
VATDGHR

SEQ ID NO: 18404 - protein, 8 aa, Artificial sequence
  Protein classification predicting sequence
EIGFNVSY

SEQ ID NO: 18405 - protein, 11 aa, Artificial sequence
  Protein classification predicting sequence
IVLDTETTGMN

SEQ ID NO: 18406 - protein, 6 aa, Artificial sequence
  Protein classification predicting sequence
ETTGMN

SEQ ID NO: 18407 - protein, 10 aa, Artificial sequence
  Protein classification predicting sequence
HKIIEIGAVE

SEQ ID NO: 18408 - protein, 14 aa, Artificial sequence
  Protein classification predicting sequence
RQIVLDTETTGMNQ

SEQ ID NO: 18409 - protein, 7 aa, Artificial sequence
  Protein classification predicting sequence
GFMDYEF

SEQ ID NO: 18410 - protein, 15 aa, Artificial sequence
  Protein classification predicting sequence
IDNSKRTLHGALLDA

SEQ ID NO: 18411 - protein, 6 aa, Artificial sequence
  Protein classification predicting sequence
HNAPFD

SEQ ID NO: 18412 - protein, 29 aa, Artificial sequence
  Protein classification predicting sequence
RFKVYLIDEVHMLSRHSFNALLKTLEEPP

SEQ ID NO: 18413 - protein, 11 aa, Artificial sequence
  Protein classification predicting sequence
YLIDEVHMLSR

SEQ ID NO: 18414 - protein, 9 aa, Artificial sequence
  Protein classification predicting sequence
TILSRCLQF

SEQ ID NO: 18415 - protein, 7 aa, Artificial sequence
  Protein classification predicting sequence
VETGYTF

SEQ ID NO: 18416 - protein, 10 aa, Artificial sequence
  Protein classification predicting sequence
EKLHRLGIET

SEQ ID NO: 18417 - protein, 16 aa, Artificial sequence
  Protein classification predicting sequence
GVRSAMPMFKALEACP

SEQ ID NO: 18418 - protein, 8 aa, Artificial sequence
  Protein classification predicting sequence
ADPPDLVD

SEQ ID NO: 18419 - protein, 8 aa, Artificial sequence
  Protein classification predicting sequence
DYFFAQVE

SEQ ID NO: 18420 - protein, 6 aa, Artificial sequence
  Protein classification predicting sequence
SIDEAY

SEQ ID NO: 18421 - protein, 9 aa, Artificial sequence
  Protein classification predicting sequence
RKIIHVDMD

SEQ ID NO: 18422 - protein, 7 aa, Artificial sequence
  Protein classification predicting sequence
GVRSAMP

SEQ ID NO: 18423 - protein, 6 aa, Artificial sequence
  Protein classification predicting sequence
NKPNGQ

SEQ ID NO: 18424 - protein, 9 aa, Artificial sequence
  Protein classification predicting sequence
GIETGADLK

SEQ ID NO: 18425 - protein, 8 aa, Artificial sequence
  Protein classification predicting sequence
GIRTIGQL

SEQ ID NO: 18426 - protein, 8 aa, Artificial sequence
  Protein classification predicting sequence
GRGVVSTC

SEQ ID NO: 18427 - protein, 12 aa, Artificial sequence
  Protein classification predicting sequence
YEARKYGIHSAM

SEQ ID NO: 18428 - protein, 6 aa, Artificial sequence
  Protein classification predicting sequence
ASYEAR

SEQ ID NO: 18429 - protein, 8 aa, Artificial sequence
  Protein classification predicting sequence
DAFYASVE

SEQ ID NO: 18430 - protein, 9 aa, Artificial sequence
  Protein classification predicting sequence
AQVEEVLNP

SEQ ID NO: 18431 - protein, 13 aa, Artificial sequence
  Protein classification predicting sequence
SGAVATANYEARK

SEQ ID NO: 18432 - protein, 6 aa, Artificial sequence
  Protein classification predicting sequence
DEAYLD

SEQ ID NO: 18433 - protein, 9 aa, Artificial sequence
  Protein classification predicting sequence
NKPNGQFVI

SEQ ID NO: 18434 - protein, 6 aa, Artificial sequence
  Protein classification predicting sequence
GLSYCK

SEQ ID NO: 18435 - protein, 13 aa, Artificial sequence
  Protein classification predicting sequence
DCDAFYASVEKRD

SEQ ID NO: 18436 - protein, 7 aa, Artificial sequence
  Protein classification predicting sequence
RDDPSLR

SEQ ID NO: 18437 - protein, 7 aa, Artificial sequence
  Protein classification predicting sequence
TACYIAR

SEQ ID NO: 18438 - protein, 9 aa, Artificial sequence
  Protein classification predicting sequence
SAMPMFKAL

SEQ ID NO: 18439 - protein, 13 aa, Artificial sequence
  Protein classification predicting sequence
GLTASAGVSFNKF

SEQ ID NO: 18440 - protein, 7 aa, Artificial sequence
  Protein classification predicting sequence
RIRKSIG

SEQ ID NO: 18441 - protein, 7 aa, Artificial sequence
  Protein classification predicting sequence
LTASAGV

SEQ ID NO: 18442 - protein, 21 aa, Artificial sequence
  Protein classification predicting sequence
FPLINDTSRKIIHIDMDAFFA

SEQ ID NO: 18443 - protein, 7 aa, Artificial sequence
  Protein classification predicting sequence
DMDAFFA

SEQ ID NO: 18444 - protein, 7 aa, Artificial sequence
  Protein classification predicting sequence
IFKRYTD

SEQ ID NO: 18445 - protein, 10 aa, Artificial sequence
  Protein classification predicting sequence
KIAKLIQHDI

SEQ ID NO: 18446 - protein, 12 aa, Artificial sequence
  Protein classification predicting sequence
SAGVSYNKFLAK

SEQ ID NO: 18447 - protein, 10 aa, Artificial sequence
  Protein classification predicting sequence
LKLRYSDFTT

SEQ ID NO: 18448 - protein, 8 aa, Artificial sequence
  Protein classification predicting sequence
DEAYLDVT

SEQ ID NO: 18449 - protein, 11 aa, Artificial sequence
  Protein classification predicting sequence
ARKFGVRSAMP

SEQ ID NO: 18450 - protein, 7 aa, Artificial sequence
  Protein classification predicting sequence
IIHVDMD

SEQ ID NO: 18451 - protein, 7 aa, Artificial sequence
  Protein classification predicting sequence
KPNGQFV

SEQ ID NO: 18452 - protein, 11 aa, Artificial sequence
  Protein classification predicting sequence
DCFYAAIEMRD

SEQ ID NO: 18453 - protein, 6 aa, Artificial sequence
  Protein classification predicting sequence
EMRDNP

SEQ ID NO: 18454 - protein, 7 aa, Artificial sequence
  Protein classification predicting sequence
YEARKFG

SEQ ID NO: 18455 - protein, 7 aa, Artificial sequence
  Protein classification predicting sequence
GVGKVTA

SEQ ID NO: 18456 - protein, 8 aa, Artificial sequence
  Protein classification predicting sequence
KSVGVERT

SEQ ID NO: 18457 - protein, 11 aa, Artificial sequence
  Protein classification predicting sequence
DFDYFFAQVEE

SEQ ID NO: 18458 - protein, 7 aa, Artificial sequence
  Protein classification predicting sequence
TCSYEAR

SEQ ID NO: 18459 - protein, 6 aa, Artificial sequence
  Protein classification predicting sequence
GVRSAM

SEQ ID NO: 18460 - protein, 14 aa, Artificial sequence
  Protein classification predicting sequence
LIEPLSLDEAYLDV

SEQ ID NO: 18461 - protein, 7 aa, Artificial sequence
  Protein classification predicting sequence
TCNYEAR

SEQ ID NO: 18462 - protein, 7 aa, Artificial sequence
  Protein classification predicting sequence
GIDDRPV

SEQ ID NO: 18463 - protein, 13 aa, Artificial sequence
  Protein classification predicting sequence
EPLSLDEAYLDVT

SEQ ID NO: 18464 - protein, 12 aa, Artificial sequence
  Protein classification predicting sequence
ITVSAGVAPNKF

SEQ ID NO: 18465 - protein, 9 aa, Artificial sequence
  Protein classification predicting sequence
KFLAKIASD

SEQ ID NO: 18466 - protein, 19 aa, Artificial sequence
  Protein classification predicting sequence
TLPLAKIPGVGKVSAAKLE

SEQ ID NO: 18467 - protein, 8 aa, Artificial sequence
  Protein classification predicting sequence
MGLRTCGD

SEQ ID NO: 18468 - protein, 10 aa, Artificial sequence
  Protein classification predicting sequence
LYPELERRLA

SEQ ID NO: 18469 - protein, 23 aa, Artificial sequence
  Protein classification predicting sequence
MALKLCPHLTLLPGRFDAYKEAS

SEQ ID NO: 18470 - protein, 27 aa, Artificial sequence
  Protein classification predicting sequence
LWERSQGIDERDVNSERLRKSVGVERT

SEQ ID NO: 18471 - protein, 10 aa, Artificial sequence
  Protein classification predicting sequence
QAHKLCPNGY

SEQ ID NO: 18472 - protein, 14 aa, Artificial sequence
  Protein classification predicting sequence
VEPMSLDEAYLDIT

SEQ ID NO: 18473 - protein, 9 aa, Artificial sequence
  Protein classification predicting sequence
LVRPDLPAS

SEQ ID NO: 18474 - protein, 23 aa, Artificial sequence
  Protein classification predicting sequence
LTASAGVSYNKFLAKLASGMNKP

SEQ ID NO: 18475 - protein, 15 aa, Artificial sequence
  Protein classification predicting sequence
LDIGDFPGVGKASKK

SEQ ID NO: 18476 - protein, 7 aa, Artificial sequence
  Protein classification predicting sequence
IYTGQDL

SEQ ID NO: 18477 - protein, 24 aa, Artificial sequence
  Protein classification predicting sequence
EFELIRLFGKRGRGLYNKARGIDH

SEQ ID NO: 18478 - protein, 13 aa, Artificial sequence
  Protein classification predicting sequence
SRVRKSVGTERTF

SEQ ID NO: 18479 - protein, 12 aa, Artificial sequence
  Protein classification predicting sequence
ELSGKTAERLNK

SEQ ID NO: 18480 - protein, 11 aa, Artificial sequence
  Protein classification predicting sequence
KTVTVKIKTYQ

SEQ ID NO: 18481 - protein, 7 aa, Artificial sequence
  Protein classification predicting sequence
DIYNIAY

SEQ ID NO: 18482 - protein, 10 aa, Artificial sequence
  Protein classification predicting sequence
PIRLIGVTVG

SEQ ID NO: 18483 - protein, 45 aa, Artificial sequence
  Protein classification predicting sequence
KLHDMGIYTGQDLLAVPEMTLIDHFGRFGFDLYRKARGISNSPVK

SEQ ID NO: 18484 - protein, 30 aa, Artificial sequence
  Protein classification predicting sequence
DRIRKSIGSERTYAKLLYQETDIKAEISKN

SEQ ID NO: 18485 - protein, 22 aa, Artificial sequence
  Protein classification predicting sequence
ALLQDHKKLGKTIVLKVRYADF

SEQ ID NO: 18486 - protein, 13 aa, Artificial sequence
  Protein classification predicting sequence
TLTKRVTLPELTR

SEQ ID NO: 18487 - protein, 8 aa, Artificial sequence
  Protein classification predicting sequence
AAQIEQVA

SEQ ID NO: 18488 - protein, 15 aa, Artificial sequence
  Protein classification predicting sequence
GIRLLGVTMTNLEDK

SEQ ID NO: 18489 - protein, 10 aa, Artificial sequence
  Protein classification predicting sequence
SIDEAYLDVT

SEQ ID NO: 18490 - protein, 12 aa, Artificial sequence
  Protein classification predicting sequence
SRKIIHIDMDAF

SEQ ID NO: 18491 - protein, 14 aa, Artificial sequence
  Protein classification predicting sequence
HSAMSSKEAYERCP

SEQ ID NO: 18492 - protein, 9 aa, Artificial sequence
  Protein classification predicting sequence
FISGNYEKY

SEQ ID NO: 18493 - protein, 12 aa, Artificial sequence
  Protein classification predicting sequence
NKLGIKSAVKIA

SEQ ID NO: 18494 - protein, 9 aa, Artificial sequence
  Protein classification predicting sequence
DLYRKARGI

SEQ ID NO: 18495 - protein, 8 aa, Artificial sequence
  Protein classification predicting sequence
SYNKFLAK

SEQ ID NO: 18496 - protein, 7 aa, Artificial sequence
  Protein classification predicting sequence
GSATLIA

SEQ ID NO: 18497 - protein, 10 aa, Artificial sequence
  Protein classification predicting sequence
ERERKSVGVE

SEQ ID NO: 18498 - protein, 7 aa, Artificial sequence
  Protein classification predicting sequence
RKSVGVE

SEQ ID NO: 18499 - protein, 6 aa, Artificial sequence
  Protein classification predicting sequence
DFQQTT

SEQ ID NO: 18500 - protein, 16 aa, Artificial sequence
  Protein classification predicting sequence
GREIRLLGLSVMLKPE

SEQ ID NO: 18501 - protein, 6 aa, Artificial sequence
  Protein classification predicting sequence
IFSRYT

SEQ ID NO: 18502 - protein, 9 aa, Artificial sequence
  Protein classification predicting sequence
CHGSATLIA

SEQ ID NO: 18503 - protein, 6 aa, Artificial sequence
  Protein classification predicting sequence
LTASAG

SEQ ID NO: 18504 - protein, 7 aa, Artificial sequence
  Protein classification predicting sequence
AAVEMRD

SEQ ID NO: 18505 - protein, 14 aa, Artificial sequence
  Protein classification predicting sequence
ERRGVISTANYPAR

SEQ ID NO: 18506 - protein, 10 aa, Artificial sequence
  Protein classification predicting sequence
IARQGVKLKF

SEQ ID NO: 18507 - protein, 9 aa, Artificial sequence
  Protein classification predicting sequence
RFLGTSGQN

SEQ ID NO: 18508 - protein, 9 aa, Artificial sequence
  Protein classification predicting sequence
TQTACLVNL

SEQ ID NO: 18509 - protein, 11 aa, Artificial sequence
  Protein classification predicting sequence
SRVILAGNLLS

SEQ ID NO: 18510 - protein, 20 aa, Artificial sequence
  Protein classification predicting sequence
KKTQAASVEAVKMLDEILLQ

SEQ ID NO: 18511 - protein, 12 aa, Artificial sequence
  Protein classification predicting sequence
TPLKEALEAYRR

SEQ ID NO: 18512 - protein, 9 aa, Artificial sequence
  Protein classification predicting sequence
MLNSLYGKF

SEQ ID NO: 18513 - protein, 6 aa, Artificial sequence
  Protein classification predicting sequence
IHIDLY

SEQ ID NO: 18514 - protein, 6 aa, Artificial sequence
  Protein classification predicting sequence
SLYPSI

SEQ ID NO: 18515 - protein, 10 aa, Artificial sequence
  Protein classification predicting sequence
TVARHCREIL

SEQ ID NO: 18516 - protein, 8 aa, Artificial sequence
  Protein classification predicting sequence
KGRIHFDL

SEQ ID NO: 18517 - protein, 25 aa, Artificial sequence
  Protein classification predicting sequence
YGYYGYAKARWYCKECAESVTAWGR

SEQ ID NO: 18518 - protein, 20 aa, Artificial sequence
  Protein classification predicting sequence
TRGLEIVRRDWSEIAKETQA

SEQ ID NO: 18519 - protein, 17 aa, Artificial sequence
  Protein classification predicting sequence
LYPSIIITHNVSPDTLN

SEQ ID NO: 18520 - protein, 9 aa, Artificial sequence
  Protein classification predicting sequence
PGFIPSLLG

SEQ ID NO: 18521 - protein, 7 aa, Artificial sequence
  Protein classification predicting sequence
LLEERQK

SEQ ID NO: 18522 - protein, 14 aa, Artificial sequence
  Protein classification predicting sequence
KLPGLLELEYEGFY

SEQ ID NO: 18523 - protein, 7 aa, Artificial sequence
  Protein classification predicting sequence
GLPKPDL

SEQ ID NO: 18524 - protein, 6 aa, Artificial sequence
  Protein classification predicting sequence
VAVKIF

SEQ ID NO: 18525 - protein, 5 aa, Artificial sequence
  Protein classification predicting sequence
DTGHQ

SEQ ID NO: 18526 - protein, 8 aa, Artificial sequence
  Protein classification predicting sequence
GHQAYVHK

SEQ ID NO: 18527 - protein, 8 aa, Artificial sequence
  Protein classification predicting sequence
IENSHAST

SEQ ID NO: 18528 - protein, 7 aa, Artificial sequence
  Protein classification predicting sequence
LMDVALH

SEQ ID NO: 18529 - protein, 10 aa, Artificial sequence
  Protein classification predicting sequence
IVVNDNERSY

SEQ ID NO: 18530 - protein, 7 aa, Artificial sequence
  Protein classification predicting sequence
GPIDGHD

SEQ ID NO: 18531 - protein, 8 aa, Artificial sequence
  Protein classification predicting sequence
LQVVPGLR

SEQ ID NO: 18532 - protein, 26 aa, Artificial sequence
  Protein classification predicting sequence
HVVAVIGDGALTGGMAWEALNNIAAA

SEQ ID NO: 18533 - protein, 8 aa, Artificial sequence
  Protein classification predicting sequence
FEDLGLKY

SEQ ID NO: 18534 - protein, 8 aa, Artificial sequence
  Protein classification predicting sequence
VGPAVPAV

SEQ ID NO: 18535 - protein, 7 aa, Artificial sequence
  Protein classification predicting sequence
HRVFDSP

SEQ ID NO: 18536 - protein, 19 aa, Artificial sequence
  Protein classification predicting sequence
DTGHQSYVHKLLTGRQDFS

SEQ ID NO: 18537 - protein, 5 aa, Artificial sequence
  Protein classification predicting sequence
ESEHD

SEQ ID NO: 18538 - protein, 7 aa, Artificial sequence
  Protein classification predicting sequence
LHGAKKG

SEQ ID NO: 18539 - protein, 7 aa, Artificial sequence
  Protein classification predicting sequence
VAITAAM

SEQ ID NO: 18540 - protein, 7 aa, Artificial sequence
  Protein classification predicting sequence
GLHPVVA

SEQ ID NO: 18541 - protein, 7 aa, Artificial sequence
  Protein classification predicting sequence
DAPTVVR

SEQ ID NO: 18542 - protein, 12 aa, Artificial sequence
  Protein classification predicting sequence
TVVDPRWVKPVD

SEQ ID NO: 18543 - protein, 9 aa, Artificial sequence
  Protein classification predicting sequence
YVGPIDGHD

SEQ ID NO: 18544 - protein, 6 aa, Artificial sequence
  Protein classification predicting sequence
TGGHLG

SEQ ID NO: 18545 - protein, 6 aa, Artificial sequence
  Protein classification predicting sequence
GPIDGH

SEQ ID NO: 18546 - protein, 7 aa, Artificial sequence
  Protein classification predicting sequence
GYKPFCA

SEQ ID NO: 18547 - protein, 7 aa, Artificial sequence
  Protein classification predicting sequence
YSTFLQR

SEQ ID NO: 18548 - protein, 6 aa, Artificial sequence
  Protein classification predicting sequence
HDVAIQ

SEQ ID NO: 18549 - protein, 18 aa, Artificial sequence
  Protein classification predicting sequence
AAGLSTTVADARFAKPLD

SEQ ID NO: 18550 - protein, 6 aa, Artificial sequence
  Protein classification predicting sequence
DRAGIV

SEQ ID NO: 18551 - protein, 8 aa, Artificial sequence
  Protein classification predicting sequence
DQVGYHAQ

SEQ ID NO: 18552 - protein, 13 aa, Artificial sequence
  Protein classification predicting sequence
GITAAMATGTGLD

SEQ ID NO: 18553 - protein, 6 aa, Artificial sequence
  Protein classification predicting sequence
IQNLPV

SEQ ID NO: 18554 - protein, 7 aa, Artificial sequence
  Protein classification predicting sequence
DRAGIVG

SEQ ID NO: 18555 - protein, 12 aa, Artificial sequence
  Protein classification predicting sequence
GPIAMRFPRGNG

SEQ ID NO: 18556 - protein, 7 aa, Artificial sequence
  Protein classification predicting sequence
RFVKPLD

SEQ ID NO: 18557 - protein, 7 aa, Artificial sequence
  Protein classification predicting sequence
EALNNAG

SEQ ID NO: 18558 - protein, 7 aa, Artificial sequence
  Protein classification predicting sequence
TKKGKGY

SEQ ID NO: 18559 - protein, 6 aa, Artificial sequence
  Protein classification predicting sequence
WDVGHQ

SEQ ID NO: 18560 - protein, 7 aa, Artificial sequence
  Protein classification predicting sequence
HKILTGR

SEQ ID NO: 18561 - protein, 9 aa, Artificial sequence
  Protein classification predicting sequence
DMIVILNDN

SEQ ID NO: 18562 - protein, 7 aa, Artificial sequence
  Protein classification predicting sequence
GPVLVHV

SEQ ID NO: 18563 - protein, 20 aa, Artificial sequence
  Protein classification predicting sequence
DERIVAITPAMPVGSKLEKF

SEQ ID NO: 18564 - protein, 9 aa, Artificial sequence
  Protein classification predicting sequence
DVGIAEQHA

SEQ ID NO: 18565 - protein, 8 aa, Artificial sequence
  Protein classification predicting sequence
AAGMATQG

SEQ ID NO: 18566 - protein, 8 aa, Artificial sequence
  Protein classification predicting sequence
LNDNEMSI

SEQ ID NO: 18567 - protein, 10 aa, Artificial sequence
  Protein classification predicting sequence
YAKKTKGPVL

SEQ ID NO: 18568 - protein, 11 aa, Artificial sequence
  Protein classification predicting sequence
YSTFLQRGYDQ

SEQ ID NO: 18569 - protein, 7 aa, Artificial sequence
  Protein classification predicting sequence
YDQVVHD

SEQ ID NO: 18570 - protein, 8 aa, Artificial sequence
  Protein classification predicting sequence
IDRAGLVG

SEQ ID NO: 18571 - protein, 7 aa, Artificial sequence
  Protein classification predicting sequence
MPKDENE

SEQ ID NO: 18572 - protein, 14 aa, Artificial sequence
  Protein classification predicting sequence
RMGIPDRFIEHGSV

SEQ ID NO: 18573 - protein, 15 aa, Artificial sequence
  Protein classification predicting sequence
SGGHIGPNLGVVELT

SEQ ID NO: 18574 - protein, 8 aa, Artificial sequence
  Protein classification predicting sequence
GHQSYVHK

SEQ ID NO: 18575 - protein, 16 aa, Artificial sequence
  Protein classification predicting sequence
RIVAITPAMPVGSKLE

SEQ ID NO: 18576 - protein, 8 aa, Artificial sequence
  Protein classification predicting sequence
DAVILTFG

SEQ ID NO: 18577 - protein, 7 aa, Artificial sequence
  Protein classification predicting sequence
IGDGSMS

SEQ ID NO: 18578 - protein, 6 aa, Artificial sequence
  Protein classification predicting sequence
LNDNDM

SEQ ID NO: 18579 - protein, 13 aa, Artificial sequence
  Protein classification predicting sequence
DVGIAEGHAVTFS

SEQ ID NO: 18580 - protein, 7 aa, Artificial sequence
  Protein classification predicting sequence
IGDGALT

SEQ ID NO: 18581 - protein, 7 aa, Artificial sequence
  Protein classification predicting sequence
PAEKDPI

SEQ ID NO: 18582 - protein, 7 aa, Artificial sequence
  Protein classification predicting sequence
DRGGIVG

SEQ ID NO: 18583 - protein, 7 aa, Artificial sequence
  Protein classification predicting sequence
DGETHQG

SEQ ID NO: 18584 - protein, 7 aa, Artificial sequence
  Protein classification predicting sequence
EAMNNAG

SEQ ID NO: 18585 - protein, 7 aa, Artificial sequence
  Protein classification predicting sequence
PQRYFDV

SEQ ID NO: 18586 - protein, 7 aa, Artificial sequence
  Protein classification predicting sequence
HYVFDTP

SEQ ID NO: 18587 - protein, 14 aa, Artificial sequence
  Protein classification predicting sequence
IAVIGDGAMSAGMA

SEQ ID NO: 18588 - protein, 10 aa, Artificial sequence
  Protein classification predicting sequence
DRAGLVGADG

SEQ ID NO: 18589 - protein, 7 aa, Artificial sequence
  Protein classification predicting sequence
THAGSFD

SEQ ID NO: 18590 - protein, 7 aa, Artificial sequence
  Protein classification predicting sequence
PNMVIMA

SEQ ID NO: 18591 - protein, 7 aa, Artificial sequence
  Protein classification predicting sequence
KPLDTEL

SEQ ID NO: 18592 - protein, 11 aa, Artificial sequence
  Protein classification predicting sequence
LPVRFPIDRAG

SEQ ID NO: 18593 - protein, 8 aa, Artificial sequence
  Protein classification predicting sequence
GHFASGLG

SEQ ID NO: 18594 - protein, 6 aa, Artificial sequence
  Protein classification predicting sequence
AITPAM

SEQ ID NO: 18595 - protein, 20 aa, Artificial sequence
  Protein classification predicting sequence
YFDVAIAEQHAVTFAAGLAI

SEQ ID NO: 18596 - protein, 7 aa, Artificial sequence
  Protein classification predicting sequence
DGQTHQG

SEQ ID NO: 18597 - protein, 7 aa, Artificial sequence
  Protein classification predicting sequence
THQGVFD

SEQ ID NO: 18598 - protein, 6 aa, Artificial sequence
  Protein classification predicting sequence
VIMTPS

SEQ ID NO: 18599 - protein, 8 aa, Artificial sequence
  Protein classification predicting sequence
WDVGHQSY

SEQ ID NO: 18600 - protein, 9 aa, Artificial sequence
  Protein classification predicting sequence
YPHKILTGR

SEQ ID NO: 18601 - protein, 6 aa, Artificial sequence
  Protein classification predicting sequence
GLHPFP

SEQ ID NO: 18602 - protein, 8 aa, Artificial sequence
  Protein classification predicting sequence
IYSTFLQR

SEQ ID NO: 18603 - protein, 9 aa, Artificial sequence
  Protein classification predicting sequence
YEALNELGD

SEQ ID NO: 18604 - protein, 12 aa, Artificial sequence
  Protein classification predicting sequence
IWDVGHQAYPHK

SEQ ID NO: 18605 - protein, 12 aa, Artificial sequence
  Protein classification predicting sequence
IAEQHAVTFAAG

SEQ ID NO: 18606 - protein, 10 aa, Artificial sequence
  Protein classification predicting sequence
ELTIALHYVF

SEQ ID NO: 18607 - protein, 7 aa, Artificial sequence
  Protein classification predicting sequence
DVGHQAY

SEQ ID NO: 18608 - protein, 10 aa, Artificial sequence
  Protein classification predicting sequence
DVGHQAYPHK

SEQ ID NO: 18609 - protein, 7 aa, Artificial sequence
  Protein classification predicting sequence
HKLLTGR

SEQ ID NO: 18610 - protein, 6 aa, Artificial sequence
  Protein classification predicting sequence
TTKGKG

SEQ ID NO: 18611 - protein, 6 aa, Artificial sequence
  Protein classification predicting sequence
DVGIAE

SEQ ID NO: 18612 - protein, 8 aa, Artificial sequence
  Protein classification predicting sequence
MSISENVG

SEQ ID NO: 18613 - protein, 7 aa, Artificial sequence
  Protein classification predicting sequence
LGVVELT

SEQ ID NO: 18614 - protein, 6 aa, Artificial sequence
  Protein classification predicting sequence
GMAFEA

SEQ ID NO: 18615 - protein, 11 aa, Artificial sequence
  Protein classification predicting sequence
LLHVITTKGKG

SEQ ID NO: 18616 - protein, 8 aa, Artificial sequence
  Protein classification predicting sequence
TAAMPSGT

SEQ ID NO: 18617 - protein, 9 aa, Artificial sequence
  Protein classification predicting sequence
ALHYVFDTP

SEQ ID NO: 18618 - protein, 13 aa, Artificial sequence
  Protein classification predicting sequence
YDTFGVGHSSTSI

SEQ ID NO: 18619 - protein, 8 aa, Artificial sequence
  Protein classification predicting sequence
LNDNDMSI

SEQ ID NO: 18620 - protein, 10 aa, Artificial sequence
  Protein classification predicting sequence
LNDNDMSISP

SEQ ID NO: 18621 - protein, 7 aa, Artificial sequence
  Protein classification predicting sequence
PGTLFEE

SEQ ID NO: 18622 - protein, 7 aa, Artificial sequence
  Protein classification predicting sequence
GFNYIGP

SEQ ID NO: 18623 - protein, 15 aa, Artificial sequence
  Protein classification predicting sequence
VAIYSTFLQRGYDQL

SEQ ID NO: 18624 - protein, 7 aa, Artificial sequence
  Protein classification predicting sequence
AVRYPRG

SEQ ID NO: 18625 - protein, 6 aa, Artificial sequence
  Protein classification predicting sequence
EQHAVT

SEQ ID NO: 18626 - protein, 16 aa, Artificial sequence
  Protein classification predicting sequence
YSTFLQRAYDQVLHDV

SEQ ID NO: 18627 - protein, 7 aa, Artificial sequence
  Protein classification predicting sequence
FAIDRAG

SEQ ID NO: 18628 - protein, 6 aa, Artificial sequence
  Protein classification predicting sequence
KILTGR

SEQ ID NO: 18629 - protein, 10 aa, Artificial sequence
  Protein classification predicting sequence
DRAGLVGEDG

SEQ ID NO: 18630 - protein, 9 aa, Artificial sequence
  Protein classification predicting sequence
GGHLASNLG

SEQ ID NO: 18631 - protein, 15 aa, Artificial sequence
  Protein classification predicting sequence
TGGHLGPNLGVVELT

SEQ ID NO: 18632 - protein, 7 aa, Artificial sequence
  Protein classification predicting sequence
KGGLSGY

SEQ ID NO: 18633 - protein, 9 aa, Artificial sequence
  Protein classification predicting sequence
VVNDNGRSY

SEQ ID NO: 18634 - protein, 9 aa, Artificial sequence
  Protein classification predicting sequence
TFLNRAFDQ

SEQ ID NO: 18635 - protein, 7 aa, Artificial sequence
  Protein classification predicting sequence
DGASHNG

SEQ ID NO: 18636 - protein, 14 aa, Artificial sequence
  Protein classification predicting sequence
TFLNRAFDQLLMDV

SEQ ID NO: 18637 - protein, 7 aa, Artificial sequence
  Protein classification predicting sequence
TVVDPRW

SEQ ID NO: 18638 - protein, 7 aa, Artificial sequence
  Protein classification predicting sequence
HQAYAHK

SEQ ID NO: 18639 - protein, 13 aa, Artificial sequence
  Protein classification predicting sequence
TPAMREGSGLVEF

SEQ ID NO: 18640 - protein, 14 aa, Artificial sequence
  Protein classification predicting sequence
VAIYSTFLQRAYDQ

SEQ ID NO: 18641 - protein, 21 aa, Artificial sequence
  Protein classification predicting sequence
VAIYSTFLQRAYDQVLHDVAI

SEQ ID NO: 18642 - protein, 7 aa, Artificial sequence
  Protein classification predicting sequence
LVVLNDN

SEQ ID NO: 18643 - protein, 12 aa, Artificial sequence
  Protein classification predicting sequence
ITPAMREGSGMV

SEQ ID NO: 18644 - protein, 10 aa, Artificial sequence
  Protein classification predicting sequence
DMRFVKPLDE

SEQ ID NO: 18645 - protein, 9 aa, Artificial sequence
  Protein classification predicting sequence
DMRFVKPLD

SEQ ID NO: 18646 - protein, 20 aa, Artificial sequence
  Protein classification predicting sequence
LNDNEMSISENVGALNNHLA

SEQ ID NO: 18647 - protein, 7 aa, Artificial sequence
  Protein classification predicting sequence
NDNEMSI

SEQ ID NO: 18648 - protein, 7 aa, Artificial sequence
  Protein classification predicting sequence
GIVGEDG

SEQ ID NO: 18649 - protein, 18 aa, Artificial sequence
  Protein classification predicting sequence
GGHLGPGLGVVELTLALY

SEQ ID NO: 18650 - protein, 7 aa, Artificial sequence
  Protein classification predicting sequence
TLDLDRD

SEQ ID NO: 18651 - protein, 16 aa, Artificial sequence
  Protein classification predicting sequence
GAGHASTSISAALGMA

SEQ ID NO: 18652 - protein, 18 aa, Artificial sequence
  Protein classification predicting sequence
IIGDGALTGGMALEALNH

SEQ ID NO: 18653 - protein, 6 aa, Artificial sequence
  Protein classification predicting sequence
NHAGHL

SEQ ID NO: 18654 - protein, 9 aa, Artificial sequence
  Protein classification predicting sequence
YHAQSAFDL

SEQ ID NO: 18655 - protein, 11 aa, Artificial sequence
  Protein classification predicting sequence
DVGIAEQHAVT

SEQ ID NO: 18656 - protein, 12 aa, Artificial sequence
  Protein classification predicting sequence
MAPKDEAELQRM

SEQ ID NO: 18657 - protein, 8 aa, Artificial sequence
  Protein classification predicting sequence
ARFAKPLD

SEQ ID NO: 18658 - protein, 9 aa, Artificial sequence
  Protein classification predicting sequence
SGHLASGLG

SEQ ID NO: 18659 - protein, 6 aa, Artificial sequence
  Protein classification predicting sequence
HPFPWR

SEQ ID NO: 18660 - protein, 8 aa, Artificial sequence
  Protein classification predicting sequence
LKGPQFLH

SEQ ID NO: 18661 - protein, 10 aa, Artificial sequence
  Protein classification predicting sequence
ITPAMREGSG

SEQ ID NO: 18662 - protein, 17 aa, Artificial sequence
  Protein classification predicting sequence
ASGLGTVELTVALHYVY

SEQ ID NO: 18663 - protein, 24 aa, Artificial sequence
  Protein classification predicting sequence
TPFDQLIWDVGHQAYPHKILTGRR

SEQ ID NO: 18664 - protein, 10 aa, Artificial sequence
  Protein classification predicting sequence
YPHKILTGRR

SEQ ID NO: 18665 - protein, 8 aa, Artificial sequence
  Protein classification predicting sequence
TAGMAFEA

SEQ ID NO: 18666 - protein, 12 aa, Artificial sequence
  Protein classification predicting sequence
TAGMAFEALNHA

SEQ ID NO: 18667 - protein, 13 aa, Artificial sequence
  Protein classification predicting sequence
TLFEELGFNYIGP

SEQ ID NO: 18668 - protein, 6 aa, Artificial sequence
  Protein classification predicting sequence
GPVDGH

SEQ ID NO: 18669 - protein, 17 aa, Artificial sequence
  Protein classification predicting sequence
KPVVAIYSTFLQRAYDQ

SEQ ID NO: 18670 - protein, 6 aa, Artificial sequence
  Protein classification predicting sequence
GHSSTS

SEQ ID NO: 18671 - protein, 6 aa, Artificial sequence
  Protein classification predicting sequence
NYIGPI

SEQ ID NO: 18672 - protein, 6 aa, Artificial sequence
  Protein classification predicting sequence
IAEQHA

SEQ ID NO: 18673 - protein, 13 aa, Artificial sequence
  Protein classification predicting sequence
TGGHLGPNLGVVE

SEQ ID NO: 18674 - protein, 9 aa, Artificial sequence
  Protein classification predicting sequence
GDGALTGGM

SEQ ID NO: 18675 - protein, 6 aa, Artificial sequence
  Protein classification predicting sequence
PVVAIY

SEQ ID NO: 18676 - protein, 6 aa, Artificial sequence
  Protein classification predicting sequence
NRAFDQ

SEQ ID NO: 18677 - protein, 13 aa, Artificial sequence
  Protein classification predicting sequence
GVTFVLDRAGVTG

SEQ ID NO: 18678 - protein, 7 aa, Artificial sequence
  Protein classification predicting sequence
EAMNHAG

SEQ ID NO: 18679 - protein, 8 aa, Artificial sequence
  Protein classification predicting sequence
DVGIAEQH

SEQ ID NO: 18680 - protein, 11 aa, Artificial sequence
  Protein classification predicting sequence
IGDGALTGGMA

SEQ ID NO: 18681 - protein, 15 aa, Artificial sequence
  Protein classification predicting sequence
MSIAPNVGALHNVLG

SEQ ID NO: 18682 - protein, 6 aa, Artificial sequence
  Protein classification predicting sequence
FEELGF

SEQ ID NO: 18683 - protein, 7 aa, Artificial sequence
  Protein classification predicting sequence
NARFIKP

SEQ ID NO: 18684 - protein, 9 aa, Artificial sequence
  Protein classification predicting sequence
MSIAPNVGA

SEQ ID NO: 18685 - protein, 13 aa, Artificial sequence
  Protein classification predicting sequence
AIYSTFLQRAYDQ

SEQ ID NO: 18686 - protein, 9 aa, Artificial sequence
  Protein classification predicting sequence
DLGLKYVGP

SEQ ID NO: 18687 - protein, 7 aa, Artificial sequence
  Protein classification predicting sequence
GGAGSAV

SEQ ID NO: 18688 - protein, 9 aa, Artificial sequence
  Protein classification predicting sequence
WEALNNIAA

SEQ ID NO: 18689 - protein, 7 aa, Artificial sequence
  Protein classification predicting sequence
SHNGMWD

SEQ ID NO: 18690 - protein, 8 aa, Artificial sequence
  Protein classification predicting sequence
GHQCYVHK

SEQ ID NO: 18691 - protein, 9 aa, Artificial sequence
  Protein classification predicting sequence
MSISPNVGA

SEQ ID NO: 18692 - protein, 7 aa, Artificial sequence
  Protein classification predicting sequence
YDQLVHD

SEQ ID NO: 18693 - protein, 7 aa, Artificial sequence
  Protein classification predicting sequence
ALQNLPV

SEQ ID NO: 18694 - protein, 8 aa, Artificial sequence
  Protein classification predicting sequence
VGADGPTH

SEQ ID NO: 18695 - protein, 8 aa, Artificial sequence
  Protein classification predicting sequence
PSDENECR

SEQ ID NO: 18696 - protein, 8 aa, Artificial sequence
  Protein classification predicting sequence
RLLLSTCY

SEQ ID NO: 18697 - protein, 6 aa, Artificial sequence
  Protein classification predicting sequence
ALHYVY

SEQ ID NO: 18698 - protein, 6 aa, Artificial sequence
  Protein classification predicting sequence
LGTVEL

SEQ ID NO: 18699 - protein, 7 aa, Artificial sequence
  Protein classification predicting sequence
LGTVELT

SEQ ID NO: 18700 - protein, 25 aa, Artificial sequence
  Protein classification predicting sequence
ESEYDAFGTAHSSTSISAALGMAVA

SEQ ID NO: 18701 - protein, 15 aa, Artificial sequence
  Protein classification predicting sequence
LNDNDMSISPPVGAL

SEQ ID NO: 18702 - protein, 6 aa, Artificial sequence
  Protein classification predicting sequence
VGALNN

SEQ ID NO: 18703 - protein, 7 aa, Artificial sequence
  Protein classification predicting sequence
QFLHVVT

SEQ ID NO: 18704 - protein, 12 aa, Artificial sequence
  Protein classification predicting sequence
ITPAMREGSGLV

SEQ ID NO: 18705 - protein, 7 aa, Artificial sequence
  Protein classification predicting sequence
PDRYFDV

SEQ ID NO: 18706 - protein, 26 aa, Artificial sequence
  Protein classification predicting sequence
SVSQSSGHLASGLGTVELTVALHYVY

SEQ ID NO: 18707 - protein, 7 aa, Artificial sequence
  Protein classification predicting sequence
DMRFVKP

SEQ ID NO: 18708 - protein, 10 aa, Artificial sequence
  Protein classification predicting sequence
DIAKYPTLAL

SEQ ID NO: 18709 - protein, 25 aa, Artificial sequence
  Protein classification predicting sequence
TEEHIKGMVVPGTLFEELGFNYIGP

SEQ ID NO: 18710 - protein, 20 aa, Artificial sequence
  Protein classification predicting sequence
KGMVVPGTLFEELGFNYIGP

SEQ ID NO: 18711 - protein, 6 aa, Artificial sequence
  Protein classification predicting sequence
GYAPAE

SEQ ID NO: 18712 - protein, 16 aa, Artificial sequence
  Protein classification predicting sequence
KLMAITPAMREGSGMV

SEQ ID NO: 18713 - protein, 7 aa, Artificial sequence
  Protein classification predicting sequence
AIQNLPV

SEQ ID NO: 18714 - protein, 7 aa, Artificial sequence
  Protein classification predicting sequence
GIVGADG

SEQ ID NO: 18715 - protein, 15 aa, Artificial sequence
  Protein classification predicting sequence
VGADGQTHQGAFDLS

SEQ ID NO: 18716 - protein, 11 aa, Artificial sequence
  Protein classification predicting sequence
PSDENECRQML

SEQ ID NO: 18717 - protein, 6 aa, Artificial sequence
  Protein classification predicting sequence
QRGYDQ

SEQ ID NO: 18718 - protein, 10 aa, Artificial sequence
  Protein classification predicting sequence
ALEAINHAGH

SEQ ID NO: 18719 - protein, 10 aa, Artificial sequence
  Protein classification predicting sequence
AIYSTFLQRA

SEQ ID NO: 18720 - protein, 9 aa, Artificial sequence
  Protein classification predicting sequence
AGYLKRSES

SEQ ID NO: 18721 - protein, 17 aa, Artificial sequence
  Protein classification predicting sequence
VVLNDNDMSISPPVGAL

SEQ ID NO: 18722 - protein, 9 aa, Artificial sequence
  Protein classification predicting sequence
LNDNDMSIS

SEQ ID NO: 18723 - protein, 7 aa, Artificial sequence
  Protein classification predicting sequence
KGPQFLH

SEQ ID NO: 18724 - protein, 6 aa, Artificial sequence
  Protein classification predicting sequence
TKKGKG

SEQ ID NO: 18725 - protein, 6 aa, Artificial sequence
  Protein classification predicting sequence
DPIGYH

SEQ ID NO: 18726 - protein, 6 aa, Artificial sequence
  Protein classification predicting sequence
MTPSDE

SEQ ID NO: 18727 - protein, 8 aa, Artificial sequence
  Protein classification predicting sequence
MTPSDENE

SEQ ID NO: 18728 - protein, 6 aa, Artificial sequence
  Protein classification predicting sequence
ALHYVF

SEQ ID NO: 18729 - protein, 11 aa, Artificial sequence
  Protein classification predicting sequence
YPHKILTGRRE

SEQ ID NO: 18730 - protein, 13 aa, Artificial sequence
  Protein classification predicting sequence
HSSTSISAALGMA

SEQ ID NO: 18731 - protein, 23 aa, Artificial sequence
  Protein classification predicting sequence
IAVIGDGAMSAGMAFEAMNNAGV

SEQ ID NO: 18732 - protein, 32 aa, Artificial sequence
  Protein classification predicting sequence
VVLNDNDMSISPPVGALNRYLARLMSGQFYAA

SEQ ID NO: 18733 - protein, 8 aa, Artificial sequence
  Protein classification predicting sequence
LYHGPGKF

SEQ ID NO: 18734 - protein, 6 aa, Artificial sequence
  Protein classification predicting sequence
RCIPNM

SEQ ID NO: 18735 - protein, 6 aa, Artificial sequence
  Protein classification predicting sequence
VRYPRG

SEQ ID NO: 18736 - protein, 8 aa, Artificial sequence
  Protein classification predicting sequence
VSRTGGHL

SEQ ID NO: 18737 - protein, 8 aa, Artificial sequence
  Protein classification predicting sequence
PVLKNVRD

SEQ ID NO: 18738 - protein, 8 aa, Artificial sequence
  Protein classification predicting sequence
VGADGATH

SEQ ID NO: 18739 - protein, 7 aa, Artificial sequence
  Protein classification predicting sequence
FDTPHDR

SEQ ID NO: 18740 - protein, 7 aa, Artificial sequence
  Protein classification predicting sequence
RFFDVGI

SEQ ID NO: 18741 - protein, 9 aa, Artificial sequence
  Protein classification predicting sequence
KGKGYAPAE

SEQ ID NO: 18742 - protein, 7 aa, Artificial sequence
  Protein classification predicting sequence
DGATHAG

SEQ ID NO: 18743 - protein, 7 aa, Artificial sequence
  Protein classification predicting sequence
PNFTVMA

SEQ ID NO: 18744 - protein, 9 aa, Artificial sequence
  Protein classification predicting sequence
STTVADARF

SEQ ID NO: 18745 - protein, 25 aa, Artificial sequence
  Protein classification predicting sequence
DMLVILNDNEMSISENVGALNNHLA

SEQ ID NO: 18746 - protein, 9 aa, Artificial sequence
  Protein classification predicting sequence
TGYHYNDGP

SEQ ID NO: 18747 - protein, 12 aa, Artificial sequence
  Protein classification predicting sequence
LTPLEKLPIGKG

SEQ ID NO: 18748 - protein, 21 aa, Artificial sequence
  Protein classification predicting sequence
GEKLAILNFGTLMPEAAKVAE

SEQ ID NO: 18749 - protein, 55 aa, Artificial sequence
  Protein classification predicting sequence
TLKNMRDLKGPQFLHIMTKKGRGYEPAEKDPITFHAVPKFDPSSGCLPKSSGGLP

SEQ ID NO: 18750 - protein, 50 aa, Artificial sequence
  Protein classification predicting sequence
KLMAITPAMREGSGMVEFSRKFPDRYFDVAIAEQHAVTFAAGLAIGGYKP

SEQ ID NO: 18751 - protein, 43 aa, Artificial sequence
  Protein classification predicting sequence
EENAIMGGAGSGVNEVLMAHRKPVPVLNIGLPDFFIPQGTQEE

SEQ ID NO: 18752 - protein, 8 aa, Artificial sequence
  Protein classification predicting sequence
GLHPFPWR

SEQ ID NO: 18753 - protein, 7 aa, Artificial sequence
  Protein classification predicting sequence
TSISAAL

SEQ ID NO: 18754 - protein, 6 aa, Artificial sequence
  Protein classification predicting sequence
TLRNMR

SEQ ID NO: 18755 - protein, 13 aa, Artificial sequence
  Protein classification predicting sequence
KPVVAIYSTFLQR

SEQ ID NO: 18756 - protein, 9 aa, Artificial sequence
  Protein classification predicting sequence
THQGAFDLS

SEQ ID NO: 18757 - protein, 14 aa, Artificial sequence
  Protein classification predicting sequence
PSDENECRQMLYTG

SEQ ID NO: 18758 - protein, 23 aa, Artificial sequence
  Protein classification predicting sequence
SFDIAKYPTLALVDSTQELRLLP

SEQ ID NO: 18759 - protein, 7 aa, Artificial sequence
  Protein classification predicting sequence
ALTGGMA

SEQ ID NO: 18760 - protein, 8 aa, Artificial sequence
  Protein classification predicting sequence
FEELGFTY

SEQ ID NO: 18761 - protein, 15 aa, Artificial sequence
  Protein classification predicting sequence
FDHFGAGHASTSISA

SEQ ID NO: 18762 - protein, 17 aa, Artificial sequence
  Protein classification predicting sequence
LTGGMALEAINHAGHLP

SEQ ID NO: 18763 - protein, 13 aa, Artificial sequence
  Protein classification predicting sequence
QYIDVGIAEQHAV

SEQ ID NO: 18764 - protein, 10 aa, Artificial sequence
  Protein classification predicting sequence
DVGIAEQHAV

SEQ ID NO: 18765 - protein, 9 aa, Artificial sequence
  Protein classification predicting sequence
VTFVLDRAG

SEQ ID NO: 18766 - protein, 7 aa, Artificial sequence
  Protein classification predicting sequence
AGLSTTV

SEQ ID NO: 18767 - protein, 14 aa, Artificial sequence
  Protein classification predicting sequence
GGHLGPGLGVVELT

SEQ ID NO: 18768 - protein, 7 aa, Artificial sequence
  Protein classification predicting sequence
VPKVGAV

SEQ ID NO: 18769 - protein, 10 aa, Artificial sequence
  Protein classification predicting sequence
MAPKDEAELQ

SEQ ID NO: 18770 - protein, 8 aa, Artificial sequence
  Protein classification predicting sequence
MSISPNVG

SEQ ID NO: 18771 - protein, 7 aa, Artificial sequence
  Protein classification predicting sequence
VELTLAL

SEQ ID NO: 18772 - protein, 6 aa, Artificial sequence
  Protein classification predicting sequence
MSISPN

SEQ ID NO: 18773 - protein, 10 aa, Artificial sequence
  Protein classification predicting sequence
FDVGIAEQHA

SEQ ID NO: 18774 - protein, 13 aa, Artificial sequence
  Protein classification predicting sequence
LTGGMCWEALNNI

SEQ ID NO: 18775 - protein, 9 aa, Artificial sequence
  Protein classification predicting sequence
PVVAIYSTF

SEQ ID NO: 18776 - protein, 6 aa, Artificial sequence
  Protein classification predicting sequence
MDVALH

SEQ ID NO: 18777 - protein, 7 aa, Artificial sequence
  Protein classification predicting sequence
KYPTLAL

SEQ ID NO: 18778 - protein, 6 aa, Artificial sequence
  Protein classification predicting sequence
LCDELR

SEQ ID NO: 18779 - protein, 10 aa, Artificial sequence
  Protein classification predicting sequence
VGHSSTSISA

SEQ ID NO: 18780 - protein, 27 aa, Artificial sequence
  Protein classification predicting sequence
PDMLVVLNDNEMSISENVGALNNHLAQ

SEQ ID NO: 18781 - protein, 6 aa, Artificial sequence
  Protein classification predicting sequence
PPIKEL

SEQ ID NO: 18782 - protein, 8 aa, Artificial sequence
  Protein classification predicting sequence
PAEKDPIG

SEQ ID NO: 18783 - protein, 14 aa, Artificial sequence
  Protein classification predicting sequence
QYFDVAIAEQHAVT

SEQ ID NO: 18784 - protein, 13 aa, Artificial sequence
  Protein classification predicting sequence
YFDVAIAEQHAVT

SEQ ID NO: 18785 - protein, 8 aa, Artificial sequence
  Protein classification predicting sequence
IAEQHAVT

SEQ ID NO: 18786 - protein, 11 aa, Artificial sequence
  Protein classification predicting sequence
GEKVAILSFGT

SEQ ID NO: 18787 - protein, 12 aa, Artificial sequence
  Protein classification predicting sequence
LSVGHSSTSISA

SEQ ID NO: 18788 - protein, 9 aa, Artificial sequence
  Protein classification predicting sequence
SGVPPIKEL

SEQ ID NO: 18789 - protein, 12 aa, Artificial sequence
  Protein classification predicting sequence
KGMVVPGTLFEE

SEQ ID NO: 18790 - protein, 10 aa, Artificial sequence
  Protein classification predicting sequence
GYEPAEKDPI

SEQ ID NO: 18791 - protein, 14 aa, Artificial sequence
  Protein classification predicting sequence
TIRQKGGLHPFPWR

SEQ ID NO: 18792 - protein, 8 aa, Artificial sequence
  Protein classification predicting sequence
VIGDGAIT

SEQ ID NO: 18793 - protein, 25 aa, Artificial sequence
  Protein classification predicting sequence
YFDVAIAEQHAVTFAAGLAIGGYKP

SEQ ID NO: 18794 - protein, 11 aa, Artificial sequence
  Protein classification predicting sequence
IMTPSDENECR

SEQ ID NO: 18795 - protein, 10 aa, Artificial sequence
  Protein classification predicting sequence
GPSAVRYPRG

SEQ ID NO: 18796 - protein, 7 aa, Artificial sequence
  Protein classification predicting sequence
VLFAIDR

SEQ ID NO: 18797 - protein, 6 aa, Artificial sequence
  Protein classification predicting sequence
ECRQML

SEQ ID NO: 18798 - protein, 8 aa, Artificial sequence
  Protein classification predicting sequence
LVWDVGHQ

SEQ ID NO: 18799 - protein, 11 aa, Artificial sequence
  Protein classification predicting sequence
YFDVAIAEQHA

SEQ ID NO: 18800 - protein, 7 aa, Artificial sequence
  Protein classification predicting sequence
TLAAGMA

SEQ ID NO: 18801 - protein, 28 aa, Artificial sequence
  Protein classification predicting sequence
GLHPFPWRGESEYDVLSVGHSSTSISAG

SEQ ID NO: 18802 - protein, 9 aa, Artificial sequence
  Protein classification predicting sequence
HSSTSISAG

SEQ ID NO: 18803 - protein, 8 aa, Artificial sequence
  Protein classification predicting sequence
HSSTSISA

SEQ ID NO: 18804 - protein, 6 aa, Artificial sequence
  Protein classification predicting sequence
LNNHLA

SEQ ID NO: 18805 - protein, 5 aa, Artificial sequence
  Protein classification predicting sequence
RTEEH

SEQ ID NO: 18806 - protein, 12 aa, Artificial sequence
  Protein classification predicting sequence
RTEEHLKGMVVP

SEQ ID NO: 18807 - protein, 8 aa, Artificial sequence
  Protein classification predicting sequence
LHIMTKKG

SEQ ID NO: 18808 - protein, 9 aa, Artificial sequence
  Protein classification predicting sequence
WLCETAAKD

SEQ ID NO: 18809 - protein, 11 aa, Artificial sequence
  Protein classification predicting sequence
TPAMREGSGMV

SEQ ID NO: 18810 - protein, 9 aa, Artificial sequence
  Protein classification predicting sequence
YDESDVPAE

SEQ ID NO: 18811 - protein, 7 aa, Artificial sequence
  Protein classification predicting sequence
LGKGGYG

SEQ ID NO: 18812 - protein, 32 aa, Artificial sequence
  Protein classification predicting sequence
CMKVLREVKVLAGLQHPNIVGYHTAWIEHVHV

SEQ ID NO: 18813 - protein, 49 aa, Artificial sequence
  Protein classification predicting sequence
VATKIFQELVEGVFYIHNMGIVHRDLKPRNIFLHGPDQQVKIGDFGLAC

SEQ ID NO: 18814 - protein, 20 aa, Artificial sequence
  Protein classification predicting sequence
THTSRVGTCLYASPEQLEGS

SEQ ID NO: 18815 - protein, 8 aa, Artificial sequence
  Protein classification predicting sequence
ERVRQDPC

SEQ ID NO: 18816 - protein, 30 aa, Artificial sequence
  Protein classification predicting sequence
VVVDGVRTPFLLSGTSYKDLMPHDLARAAL

SEQ ID NO: 18817 - protein, 10 aa, Artificial sequence
  Protein classification predicting sequence
GLLHRTSVPK

SEQ ID NO: 18818 - protein, 30 aa, Artificial sequence
  Protein classification predicting sequence
QMAKLKPAFIKPYGTVTAANSSFLTDGASA

SEQ ID NO: 18819 - protein, 56 aa, Artificial sequence
  Protein classification predicting sequence
LIMAEEKALAMGYKPKAYLRDFMYVSQDPKDQLLLGPTYATPKVLEKAGLTMNDID

SEQ ID NO: 18820 - protein, 14 aa, Artificial sequence
  Protein classification predicting sequence
FEFHEAFSGQILAN

SEQ ID NO: 18821 - protein, 7 aa, Artificial sequence
  Protein classification predicting sequence
APAVQTK

SEQ ID NO: 18822 - protein, 20 aa, Artificial sequence
  Protein classification predicting sequence
EQDEYALRSHSLAKKAQDEG

SEQ ID NO: 18823 - protein, 15 aa, Artificial sequence
  Protein classification predicting sequence
ALAMGYKPKAYLRDF

SEQ ID NO: 18824 - protein, 7 aa, Artificial sequence
  Protein classification predicting sequence
PPLEKFN

SEQ ID NO: 18825 - protein, 28 aa, Artificial sequence
  Protein classification predicting sequence
WGGSLSLGHPFGATGCRLVMAAANRLRK

SEQ ID NO: 18826 - protein, 8 aa, Artificial sequence
  Protein classification predicting sequence
RPLSCSSQ

SEQ ID NO: 18827 - protein, 16 aa, Artificial sequence
  Protein classification predicting sequence
YALRSHSLAKKAQDEG

SEQ ID NO: 18828 - protein, 58 aa, Artificial sequence
  Protein classification predicting sequence
YVSQDPKDQLLLGPTYATPKVLEKAGLTMNDIDAFEFHEAFSGQILANFKAMDSDWFA

SEQ ID NO: 18829 - protein, 10 aa, Artificial sequence
  Protein classification predicting sequence
GRTGTFFSFE

SEQ ID NO: 18830 - protein, 7 aa, Artificial sequence
  Protein classification predicting sequence
LNYGHNN

SEQ ID NO: 18831 - protein, 7 aa, Artificial sequence
  Protein classification predicting sequence
ARKVTGR

SEQ ID NO: 18832 - protein, 14 aa, Artificial sequence
  Protein classification predicting sequence
ILETVQGEGGINAA

SEQ ID NO: 18833 - protein, 18 aa, Artificial sequence
  Protein classification predicting sequence
PAAVIVETVQGEGGINVA

SEQ ID NO: 18834 - protein, 7 aa, Artificial sequence
  Protein classification predicting sequence
ESEVRSY

SEQ ID NO: 18835 - protein, 7 aa, Artificial sequence
  Protein classification predicting sequence
MFPGPTG

SEQ ID NO: 18836 - protein, 8 aa, Artificial sequence
  Protein classification predicting sequence
SGLDKPAA

SEQ ID NO: 18837 - protein, 7 aa, Artificial sequence
  Protein classification predicting sequence
DFFAGAG

SEQ ID NO: 18838 - protein, 7 aa, Artificial sequence
  Protein classification predicting sequence
LFKPELD

SEQ ID NO: 18839 - protein, 18 aa, Artificial sequence
  Protein classification predicting sequence
PGEHNGTFRGNNPAFVTA

SEQ ID NO: 18840 - protein, 6 aa, Artificial sequence
  Protein classification predicting sequence
LNYGHN

SEQ ID NO: 18841 - protein, 12 aa, Artificial sequence
  Protein classification predicting sequence
PGEHNGTFRGNN

SEQ ID NO: 18842 - protein, 7 aa, Artificial sequence
  Protein classification predicting sequence
GTFRGNN

SEQ ID NO: 18843 - protein, 7 aa, Artificial sequence
  Protein classification predicting sequence
GPTGTNA

SEQ ID NO: 18844 - protein, 7 aa, Artificial sequence
  Protein classification predicting sequence
FTNAFHG

SEQ ID NO: 18845 - protein, 7 aa, Artificial sequence
  Protein classification predicting sequence
SLVEVRG

SEQ ID NO: 18846 - protein, 10 aa, Artificial sequence
  Protein classification predicting sequence
SLVEVRGSCV

SEQ ID NO: 18847 - protein, 8 aa, Artificial sequence
  Protein classification predicting sequence
GEWLVPIG

SEQ ID NO: 18848 - protein, 8 aa, Artificial sequence
  Protein classification predicting sequence
AHTNYTFE

SEQ ID NO: 18849 - protein, 8 aa, Artificial sequence
  Protein classification predicting sequence
TTNQAAPS

SEQ ID NO: 18850 - protein, 9 aa, Artificial sequence
  Protein classification predicting sequence
DIKGLNPLT

SEQ ID NO: 18851 - protein, 14 aa, Artificial sequence
  Protein classification predicting sequence
YVFHVRARTAAGYG

SEQ ID NO: 18852 - protein, 9 aa, Artificial sequence
  Protein classification predicting sequence
RARTAAGYG

SEQ ID NO: 18853 - protein, 8 aa, Artificial sequence
  Protein classification predicting sequence
FTVIQLVG

SEQ ID NO: 18854 - protein, 16 aa, Artificial sequence
  Protein classification predicting sequence
MLDKLIRNPNSLKRTG

SEQ ID NO: 18855 - protein, 8 aa, Artificial sequence
  Protein classification predicting sequence
LLDPSSPE

SEQ ID NO: 18856 - protein, 10 aa, Artificial sequence
  Protein classification predicting sequence
HQNKILSSVQ

SEQ ID NO: 18857 - protein, 48 aa, Artificial sequence
  Protein classification predicting sequence
EVTLLDSRSVQGELGWIASPLEGGWEEVSIMDEKNTPIRTYQVCNVME

SEQ ID NO: 18858 - protein, 30 aa, Artificial sequence
  Protein classification predicting sequence
NSEEKDVPKMYCGADGEWLVPIGNCLCNAG

SEQ ID NO: 18859 - protein, 36 aa, Artificial sequence
  Protein classification predicting sequence
VLVVILIAAFVISRRRSKYSKAKQEADEEKHLNQGV

SEQ ID NO: 18860 - protein, 54 aa, Artificial sequence
  Protein classification predicting sequence
TYVDPFTYEDPNQAVREFAKEIDASCIKIEKVIGVGEFGEVCSGRLKVPGKREI

SEQ ID NO: 18861 - protein, 11 aa, Artificial sequence
  Protein classification predicting sequence
LHQLMLDCWQK

SEQ ID NO: 18862 - protein, 11 aa, Artificial sequence
  Protein classification predicting sequence
RYKDNFTAAGY

SEQ ID NO: 18863 - protein, 5 aa, Artificial sequence
  Protein classification predicting sequence
QNNWL

SEQ ID NO: 18864 - protein, 8 aa, Artificial sequence
  Protein classification predicting sequence
GFYLAFQD

SEQ ID NO: 18865 - protein, 9 aa, Artificial sequence
  Protein classification predicting sequence
PNGIILDYE

SEQ ID NO: 18866 - protein, 15 aa, Artificial sequence
  Protein classification predicting sequence
VKIEEVIGAGEFGEV

SEQ ID NO: 18867 - protein, 10 aa, Artificial sequence
  Protein classification predicting sequence
VIGAGEFGEV

SEQ ID NO: 18868 - protein, 7 aa, Artificial sequence
  Protein classification predicting sequence
MSNQDVI

SEQ ID NO: 18869 - protein, 9 aa, Artificial sequence
  Protein classification predicting sequence
ALVSVRVFY

SEQ ID NO: 18870 - protein, 7 aa, Artificial sequence
  Protein classification predicting sequence
LAQFPDT

SEQ ID NO: 18871 - protein, 6 aa, Artificial sequence
  Protein classification predicting sequence
GEFGEV

SEQ ID NO: 18872 - protein, 8 aa, Artificial sequence
  Protein classification predicting sequence
FTTASDVW

SEQ ID NO: 18873 - protein, 7 aa, Artificial sequence
  Protein classification predicting sequence
GIVMWEV

SEQ ID NO: 18874 - protein, 7 aa, Artificial sequence
  Protein classification predicting sequence
NWLRTNW

SEQ ID NO: 18875 - protein, 9 aa, Artificial sequence
  Protein classification predicting sequence
CKETFNLYY

SEQ ID NO: 18876 - protein, 6 aa, Artificial sequence
  Protein classification predicting sequence
KIDTIA

SEQ ID NO: 18877 - protein, 6 aa, Artificial sequence
  Protein classification predicting sequence
VYYKKC

SEQ ID NO: 18878 - protein, 8 aa, Artificial sequence
  Protein classification predicting sequence
CTRPPSAP

SEQ ID NO: 18879 - protein, 7 aa, Artificial sequence
  Protein classification predicting sequence
GYTEKQR

SEQ ID NO: 18880 - protein, 8 aa, Artificial sequence
  Protein classification predicting sequence
NIIRLEGV

SEQ ID NO: 18881 - protein, 10 aa, Artificial sequence
  Protein classification predicting sequence
SRVLEDDPEA

SEQ ID NO: 18882 - protein, 8 aa, Artificial sequence
  Protein classification predicting sequence
EASIMGQF

SEQ ID NO: 18883 - protein, 6 aa, Artificial sequence
  Protein classification predicting sequence
GWEEIS

SEQ ID NO: 18884 - protein, 6 aa, Artificial sequence
  Protein classification predicting sequence
YLAFQD

SEQ ID NO: 18885 - protein, 7 aa, Artificial sequence
  Protein classification predicting sequence
FPDTVTG

SEQ ID NO: 18886 - protein, 6 aa, Artificial sequence
  Protein classification predicting sequence
WLVPIG

SEQ ID NO: 18887 - protein, 6 aa, Artificial sequence
  Protein classification predicting sequence
HTNYTF

SEQ ID NO: 18888 - protein, 9 aa, Artificial sequence
  Protein classification predicting sequence
TYEDPNQAV

SEQ ID NO: 18889 - protein, 10 aa, Artificial sequence
  Protein classification predicting sequence
TEYMENGSLD

SEQ ID NO: 18890 - protein, 9 aa, Artificial sequence
  Protein classification predicting sequence
DGQFTVIQL

SEQ ID NO: 18891 - protein, 10 aa, Artificial sequence
  Protein classification predicting sequence
GMLRGIAAGM

SEQ ID NO: 18892 - protein, 14 aa, Artificial sequence
  Protein classification predicting sequence
YVHRDLAARNILVN

SEQ ID NO: 18893 - protein, 42 aa, Artificial sequence
  Protein classification predicting sequence
NEVNLLDSKTIQGELGWISYPSHGWEEISGVDEHYTPIRTYQ

SEQ ID NO: 18894 - protein, 15 aa, Artificial sequence
  Protein classification predicting sequence
NVMDHSQNNWLRTNW

SEQ ID NO: 18895 - protein, 7 aa, Artificial sequence
  Protein classification predicting sequence
QNNWLRT

SEQ ID NO: 18896 - protein, 9 aa, Artificial sequence
  Protein classification predicting sequence
QNNWLRTNW

SEQ ID NO: 18897 - protein, 9 aa, Artificial sequence
  Protein classification predicting sequence
KFTLRDCNS

SEQ ID NO: 18898 - protein, 7 aa, Artificial sequence
  Protein classification predicting sequence
KLNTEVR

SEQ ID NO: 18899 - protein, 57 aa, Artificial sequence
  Protein classification predicting sequence
KKGFYLAFQDVGACVALVSVRVYFKKCPFTVKNLAMFPDTVPMDSQSLVEVRGSCVN

SEQ ID NO: 18900 - protein, 16 aa, Artificial sequence
  Protein classification predicting sequence
MYCSTEGEWLVPIGKC

SEQ ID NO: 18901 - protein, 8 aa, Artificial sequence
  Protein classification predicting sequence
NVRFLPRQ

SEQ ID NO: 18902 - protein, 9 aa, Artificial sequence
  Protein classification predicting sequence
GLTNTTVTV

SEQ ID NO: 18903 - protein, 8 aa, Artificial sequence
  Protein classification predicting sequence
KDRTSRNS

SEQ ID NO: 18904 - protein, 8 aa, Artificial sequence
  Protein classification predicting sequence
YEVKYYEK

SEQ ID NO: 18905 - protein, 11 aa, Artificial sequence
  Protein classification predicting sequence
GYTEKQRRDFL

SEQ ID NO: 18906 - protein, 8 aa, Artificial sequence
  Protein classification predicting sequence
RPKFEQIV

SEQ ID NO: 18907 - protein, 8 aa, Artificial sequence
  Protein classification predicting sequence
LDKLIRNP

SEQ ID NO: 18908 - protein, 14 aa, Artificial sequence
  Protein classification predicting sequence
AAARPSNLLLDQSN

SEQ ID NO: 18909 - protein, 35 aa, Artificial sequence
  Protein classification predicting sequence
IFTGVEYSSCDTIAKISTDDMKKVGVTVVGPQKKI

SEQ ID NO: 18910 - protein, 7 aa, Artificial sequence
  Protein classification predicting sequence
AAVSITT

SEQ ID NO: 18911 - protein, 11 aa, Artificial sequence
  Protein classification predicting sequence
WEVMSYGERPY

SEQ ID NO: 18912 - protein, 6 aa, Artificial sequence
  Protein classification predicting sequence
KCPPHS

SEQ ID NO: 18913 - protein, 20 aa, Artificial sequence
  Protein classification predicting sequence
SRVLEDDPEAAYTTRGGKIP

SEQ ID NO: 18914 - protein, 9 aa, Artificial sequence
  Protein classification predicting sequence
GGKIPVRWT

SEQ ID NO: 18915 - protein, 8 aa, Artificial sequence
  Protein classification predicting sequence
CNAGYEER

SEQ ID NO: 18916 - protein, 11 aa, Artificial sequence
  Protein classification predicting sequence
SQNNWLRTDWI

SEQ ID NO: 18917 - protein, 7 aa, Artificial sequence
  Protein classification predicting sequence
KLNTEIR

SEQ ID NO: 18918 - protein, 16 aa, Artificial sequence
  Protein classification predicting sequence
NLISNVNETSVNLEWS

SEQ ID NO: 18919 - protein, 13 aa, Artificial sequence
  Protein classification predicting sequence
VSVTVTTNQAAPS

SEQ ID NO: 18920 - protein, 7 aa, Artificial sequence
  Protein classification predicting sequence
TTNTVPS

SEQ ID NO: 18921 - protein, 8 aa, Artificial sequence
  Protein classification predicting sequence
SQNNWLRT

SEQ ID NO: 18922 - protein, 11 aa, Artificial sequence
  Protein classification predicting sequence
DTIAADESFTQ

SEQ ID NO: 18923 - protein, 24 aa, Artificial sequence
  Protein classification predicting sequence
DTIAADESFTQVDIGDRIMKLNTE

SEQ ID NO: 18924 - protein, 8 aa, Artificial sequence
  Protein classification predicting sequence
MKLNTEVR

SEQ ID NO: 18925 - protein, 16 aa, Artificial sequence
  Protein classification predicting sequence
MHCSAEGEWLVPIGKC

SEQ ID NO: 18926 - protein, 7 aa, Artificial sequence
  Protein classification predicting sequence
EPDRPNG

SEQ ID NO: 18927 - protein, 7 aa, Artificial sequence
  Protein classification predicting sequence
QETSYTI

SEQ ID NO: 18928 - protein, 7 aa, Artificial sequence
  Protein classification predicting sequence
YVFQIRA

SEQ ID NO: 18929 - protein, 14 aa, Artificial sequence
  Protein classification predicting sequence
EASIMGQFDHPNII

SEQ ID NO: 18930 - protein, 7 aa, Artificial sequence
  Protein classification predicting sequence
LEGVVTK

SEQ ID NO: 18931 - protein, 8 aa, Artificial sequence
  Protein classification predicting sequence
GMKYLSDM

SEQ ID NO: 18932 - protein, 7 aa, Artificial sequence
  Protein classification predicting sequence
NQDVIKA

SEQ ID NO: 18933 - protein, 7 aa, Artificial sequence
  Protein classification predicting sequence
EEGYRLP

SEQ ID NO: 18934 - protein, 12 aa, Artificial sequence
  Protein classification predicting sequence
QLMLDCWQKDRN

SEQ ID NO: 18935 - protein, 24 aa, Artificial sequence
  Protein classification predicting sequence
GPLSKKGFYLAFQDVGACIALVSV

SEQ ID NO: 18936 - protein, 80 aa, Artificial sequence
  Protein classification predicting sequence
YYRAPSDPPYVACTRPPSAPQNLIFNINQTTVSLEWSPPADNGGRNDVTYRILCKRCSWEQGECVPCGSNIGYMPQQTGL

SEQ ID NO: 18937 - protein, 7 aa, Artificial sequence
  Protein classification predicting sequence
KYYEKDQ

SEQ ID NO: 18938 - protein, 8 aa, Artificial sequence
  Protein classification predicting sequence
DASCIKIE

SEQ ID NO: 18939 - protein, 12 aa, Artificial sequence
  Protein classification predicting sequence
EASIMGQFDHPN

SEQ ID NO: 18940 - protein, 7 aa, Artificial sequence
  Protein classification predicting sequence
MENGALD

SEQ ID NO: 18941 - protein, 15 aa, Artificial sequence
  Protein classification predicting sequence
DMGYVHRDLAARNIL

SEQ ID NO: 18942 - protein, 10 aa, Artificial sequence
  Protein classification predicting sequence
HRDLAARNIL

SEQ ID NO: 18943 - protein, 8 aa, Artificial sequence
  Protein classification predicting sequence
LDKMIRNP

SEQ ID NO: 18944 - protein, 6 aa, Artificial sequence
  Protein classification predicting sequence
GHQKKI

SEQ ID NO: 18945 - protein, 11 aa, Artificial sequence
  Protein classification predicting sequence
LSWQEPEHPNG

SEQ ID NO: 18946 - protein, 7 aa, Artificial sequence
  Protein classification predicting sequence
LKLPGKR

SEQ ID NO: 18947 - protein, 8 aa, Artificial sequence
  Protein classification predicting sequence
RWTAPEAI

SEQ ID NO: 18948 - protein, 22 aa, Artificial sequence
  Protein classification predicting sequence
YRKFTSASDVWSYGIVMWEVMS

SEQ ID NO: 18949 - protein, 24 aa, Artificial sequence
  Protein classification predicting sequence
NDGQFTVIQLVGMLRGIAAGMKYL

SEQ ID NO: 18950 - protein, 11 aa, Artificial sequence
  Protein classification predicting sequence
CKETFNLYYYE

SEQ ID NO: 18951 - protein, 7 aa, Artificial sequence
  Protein classification predicting sequence
DTIAADE

SEQ ID NO: 18952 - protein, 9 aa, Artificial sequence
  Protein classification predicting sequence
NTEVRSFGP

SEQ ID NO: 18953 - protein, 8 aa, Artificial sequence
  Protein classification predicting sequence
GAESTSLV

SEQ ID NO: 18954 - protein, 11 aa, Artificial sequence
  Protein classification predicting sequence
QVRARTVAGYG

SEQ ID NO: 18955 - protein, 6 aa, Artificial sequence
  Protein classification predicting sequence
LDSFLR

SEQ ID NO: 18956 - protein, 17 aa, Artificial sequence
  Protein classification predicting sequence
LVNSNLVCKVSDFGLSR

SEQ ID NO: 18957 - protein, 19 aa, Artificial sequence
  Protein classification predicting sequence
NAEEVDVPIKLYCNGDGEW

SEQ ID NO: 18958 - protein, 22 aa, Artificial sequence
  Protein classification predicting sequence
YIDPFTYEDPNEAVREFAKEID

SEQ ID NO: 18959 - protein, 11 aa, Artificial sequence
  Protein classification predicting sequence
SGWEEVSGYDE

SEQ ID NO: 18960 - protein, 7 aa, Artificial sequence
  Protein classification predicting sequence
CKETFNL

SEQ ID NO: 18961 - protein, 6 aa, Artificial sequence
  Protein classification predicting sequence
TEFMEN

SEQ ID NO: 18962 - protein, 14 aa, Artificial sequence
  Protein classification predicting sequence
GERPYWDMSNQDVI

SEQ ID NO: 18963 - protein, 21 aa, Artificial sequence
  Protein classification predicting sequence
QRRDFLSEASIMGQFDHPNII

SEQ ID NO: 18964 - protein, 35 aa, Artificial sequence
  Protein classification predicting sequence
QRRDFLSEASIMGQFDHPNIIRLEGVVTKSRPVMI

SEQ ID NO: 18965 - protein, 5 aa, Artificial sequence
  Protein classification predicting sequence
RDCNS

SEQ ID NO: 18966 - protein, 6 aa, Artificial sequence
  Protein classification predicting sequence
CKETFN

SEQ ID NO: 18967 - protein, 8 aa, Artificial sequence
  Protein classification predicting sequence
KLYCNGDG

SEQ ID NO: 18968 - protein, 8 aa, Artificial sequence
  Protein classification predicting sequence
CSRCDDNV

SEQ ID NO: 18969 - protein, 15 aa, Artificial sequence
  Protein classification predicting sequence
YIDPFTYEDPNEAVR

SEQ ID NO: 18970 - protein, 7 aa, Artificial sequence
  Protein classification predicting sequence
SDPTYTS

SEQ ID NO: 18971 - protein, 14 aa, Artificial sequence
  Protein classification predicting sequence
GGKIPIRWTAPEAI

SEQ ID NO: 18972 - protein, 7 aa, Artificial sequence
  Protein classification predicting sequence
LDYEVKY

SEQ ID NO: 18973 - protein, 25 aa, Artificial sequence
  Protein classification predicting sequence
YVHRDLAARNILVNSNLVCKVSDFG

SEQ ID NO: 18974 - protein, 8 aa, Artificial sequence
  Protein classification predicting sequence
RKFTSASD

SEQ ID NO: 18975 - protein, 13 aa, Artificial sequence
  Protein classification predicting sequence
SDPTYTSSLGGKI

SEQ ID NO: 18976 - protein, 9 aa, Artificial sequence
  Protein classification predicting sequence
YTHQSDVWS

SEQ ID NO: 18977 - protein, 10 aa, Artificial sequence
  Protein classification predicting sequence
VTDFYEYGWG

SEQ ID NO: 18978 - protein, 8 aa, Artificial sequence
  Protein classification predicting sequence
ARHEHYLA

SEQ ID NO: 18979 - protein, 7 aa, Artificial sequence
  Protein classification predicting sequence
GDGIPKM

SEQ ID NO: 18980 - protein, 6 aa, Artificial sequence
  Protein classification predicting sequence
VKGDFM

SEQ ID NO: 18981 - protein, 8 aa, Artificial sequence
  Protein classification predicting sequence
IEATVHAP

SEQ ID NO: 18982 - protein, 7 aa, Artificial sequence
  Protein classification predicting sequence
KGDFMQM

SEQ ID NO: 18983 - protein, 8 aa, Artificial sequence
  Protein classification predicting sequence
IEVGDGIP

SEQ ID NO: 18984 - protein, 6 aa, Artificial sequence
  Protein classification predicting sequence
PWYYPL

SEQ ID NO: 18985 - protein, 11 aa, Artificial sequence
  Protein classification predicting sequence
ELMDTDLHQII

SEQ ID NO: 18986 - protein, 9 aa, Artificial sequence
  Protein classification predicting sequence
WSVGCIFAE

SEQ ID NO: 18987 - protein, 6 aa, Artificial sequence
  Protein classification predicting sequence
ALAHPY

SEQ ID NO: 18988 - protein, 13 aa, Artificial sequence
  Protein classification predicting sequence
LMETDLYKLLKTQ

SEQ ID NO: 18989 - protein, 13 aa, Artificial sequence
  Protein classification predicting sequence
TCDLKICDFGLAR

SEQ ID NO: 18990 - protein, 13 aa, Artificial sequence
  Protein classification predicting sequence
ALAHPYLEQYYDP

SEQ ID NO: 18991 - protein, 7 aa, Artificial sequence
  Protein classification predicting sequence
QNFITSK

SEQ ID NO: 18992 - protein, 8 aa, Artificial sequence
  Protein classification predicting sequence
KWVNREYR

SEQ ID NO: 18993 - protein, 7 aa, Artificial sequence
  Protein classification predicting sequence
LSIFNSY

SEQ ID NO: 18994 - protein, 48 aa, Artificial sequence
  Protein classification predicting sequence
RCNFVTAIEIDHKLCKTTENKLVDHDNFQVLNKDILQFKFPKNQSYKI

SEQ ID NO: 18995 - protein, 11 aa, Artificial sequence
  Protein classification predicting sequence
GNIPYNISTDI

SEQ ID NO: 18996 - protein, 21 aa, Artificial sequence
  Protein classification predicting sequence
GNIPYNISTDIIRKIVFDSIA

SEQ ID NO: 18997 - protein, 11 aa, Artificial sequence
  Protein classification predicting sequence
RCNFVTAIEID

SEQ ID NO: 18998 - protein, 7 aa, Artificial sequence
  Protein classification predicting sequence
VTAIEID

SEQ ID NO: 18999 - protein, 7 aa, Artificial sequence
  Protein classification predicting sequence
IPYNIST

SEQ ID NO: 19000 - protein, 7 aa, Artificial sequence
  Protein classification predicting sequence
IIRKIVF

SEQ ID NO: 19001 - protein, 13 aa, Artificial sequence
  Protein classification predicting sequence
YLIVEYGFAKRLL

SEQ ID NO: 19002 - protein, 7 aa, Artificial sequence
  Protein classification predicting sequence
FHPKPKV

SEQ ID NO: 19003 - protein, 10 aa, Artificial sequence
  Protein classification predicting sequence
FVMKWVNKEY

SEQ ID NO: 19004 - protein, 8 aa, Artificial sequence
  Protein classification predicting sequence
NNISFEQF

SEQ ID NO: 19005 - protein, 12 aa, Artificial sequence
  Protein classification predicting sequence
NKDILQFKFPKN

SEQ ID NO: 19006 - protein, 22 aa, Artificial sequence
  Protein classification predicting sequence
SYKIFGNIPYNISTDIIRKIVF

SEQ ID NO: 19007 - protein, 23 aa, Artificial sequence
  Protein classification predicting sequence
IDDLNNISFEQFLSLFNSYKLFN

SEQ ID NO: 19008 - protein, 11 aa, Artificial sequence
  Protein classification predicting sequence
KNIKYSQNFLT

SEQ ID NO: 19009 - protein, 13 aa, Artificial sequence
  Protein classification predicting sequence
KLFLDHKTLYYDV

SEQ ID NO: 19010 - protein, 10 aa, Artificial sequence
  Protein classification predicting sequence
LEEHGISVYA

SEQ ID NO: 19011 - protein, 10 aa, Artificial sequence
  Protein classification predicting sequence
LRTSLHFAMM

SEQ ID NO: 19012 - protein, 13 aa, Artificial sequence
  Protein classification predicting sequence
RGQVPPNPSELLM

SEQ ID NO: 19013 - protein, 8 aa, Artificial sequence
  Protein classification predicting sequence
KAVIPVAG

SEQ ID NO: 19014 - protein, 7 aa, Artificial sequence
  Protein classification predicting sequence
FAEVNSD

SEQ ID NO: 19015 - protein, 13 aa, Artificial sequence
  Protein classification predicting sequence
LIETEEHAKARGA

SEQ ID NO: 19016 - protein, 8 aa, Artificial sequence
  Protein classification predicting sequence
IDLDVVAG

SEQ ID NO: 19017 - protein, 7 aa, Artificial sequence
  Protein classification predicting sequence
TKSMTGH

SEQ ID NO: 19018 - protein, 9 aa, Artificial sequence
  Protein classification predicting sequence
NSFGFGGTN

SEQ ID NO: 19019 - protein, 6 aa, Artificial sequence
  Protein classification predicting sequence
HCIGNA

SEQ ID NO: 19020 - protein, 12 aa, Artificial sequence
  Protein classification predicting sequence
SSACATSAHCIG

SEQ ID NO: 19021 - protein, 8 aa, Artificial sequence
  Protein classification predicting sequence
RGAKIYAE

SEQ ID NO: 19022 - protein, 7 aa, Artificial sequence
  Protein classification predicting sequence
GHSLGEY

SEQ ID NO: 19023 - protein, 15 aa, Artificial sequence
  Protein classification predicting sequence
VFPGQGSQTVGMLAD

SEQ ID NO: 19024 - protein, 19 aa, Artificial sequence
  Protein classification predicting sequence
QQGPAEELNKTWQTQPALL

SEQ ID NO: 19025 - protein, 17 aa, Artificial sequence
  Protein classification predicting sequence
MAGHSLGEYSALVCAGV

SEQ ID NO: 19026 - protein, 13 aa, Artificial sequence
  Protein classification predicting sequence
VNFNSPGQVVIAG

SEQ ID NO: 19027 - protein, 9 aa, Artificial sequence
  Protein classification predicting sequence
AGAKRALPL

SEQ ID NO: 19028 - protein, 14 aa, Artificial sequence
  Protein classification predicting sequence
VSVPSHCALMKPAA

SEQ ID NO: 19029 - protein, 7 aa, Artificial sequence
  Protein classification predicting sequence
GLTKRIV

SEQ ID NO: 19030 - protein, 48 aa, Artificial sequence
  Protein classification predicting sequence
YPIVEETFAEASAALGYDLWALTQQGPAEELNKTWQTQPALLTASVAL

SEQ ID NO: 19031 - protein, 24 aa, Artificial sequence
  Protein classification predicting sequence
FADAVRLVEMRGKFMQEAVPEGTG

SEQ ID NO: 19032 - protein, 71 aa, Artificial sequence
  Protein classification predicting sequence
AEGQVVSPVNFNSPGQVVIAGHKEAVERAGAACKAAGAKRALPLPVSVPSHCALMKPAADKLAVELAKITF

SEQ ID NO: 19033 - protein, 16 aa, Artificial sequence
  Protein classification predicting sequence
APTVPVVNNVDVKCET

SEQ ID NO: 19034 - protein, 21 aa, Artificial sequence
  Protein classification predicting sequence
AIRDALVRQLYNPVQWTKSVE

SEQ ID NO: 19035 - protein, 36 aa, Artificial sequence
  Protein classification predicting sequence
AAQGVEHLYEVGPGKVLTGLTKRIVDTLTASALNEP

SEQ ID NO: 19036 - protein, 8 aa, Artificial sequence
  Protein classification predicting sequence
RVVVTGLG

SEQ ID NO: 19037 - protein, 13 aa, Artificial sequence
  Protein classification predicting sequence
VSSTKSMTGHLLG

SEQ ID NO: 19038 - protein, 7 aa, Artificial sequence
  Protein classification predicting sequence
VPPTINL

SEQ ID NO: 19039 - protein, 12 aa, Artificial sequence
  Protein classification predicting sequence
GMLSPVGNTVES

SEQ ID NO: 19040 - protein, 11 aa, Artificial sequence
  Protein classification predicting sequence
WKALLAGQSGI

SEQ ID NO: 19041 - protein, 12 aa, Artificial sequence
  Protein classification predicting sequence
SPFFVPSTIVNM

SEQ ID NO: 19042 - protein, 8 aa, Artificial sequence
  Protein classification predicting sequence
HNIGHAAR

SEQ ID NO: 19043 - protein, 14 aa, Artificial sequence
  Protein classification predicting sequence
MVAGGAEKASTPLG

SEQ ID NO: 19044 - protein, 8 aa, Artificial sequence
  Protein classification predicting sequence
DKDRDGFV

SEQ ID NO: 19045 - protein, 18 aa, Artificial sequence
  Protein classification predicting sequence
VLVSSTKSMTGHLLGAAG

SEQ ID NO: 19046 - protein, 16 aa, Artificial sequence
  Protein classification predicting sequence
CNSFGFGGTNGSLIFK

SEQ ID NO: 19047 - protein, 11 aa, Artificial sequence
  Protein classification predicting sequence
DSGLEITEENA

SEQ ID NO: 19048 - protein, 14 aa, Artificial sequence
  Protein classification predicting sequence
GYVNAHGTSTPAGD

SEQ ID NO: 19049 - protein, 11 aa, Artificial sequence
  Protein classification predicting sequence
TAVLFGDGAGA

SEQ ID NO: 19050 - protein, 9 aa, Artificial sequence
  Protein classification predicting sequence
VLFGDGAGA

SEQ ID NO: 19051 - protein, 8 aa, Artificial sequence
  Protein classification predicting sequence
PHQANIRI

SEQ ID NO: 19052 - protein, 16 aa, Artificial sequence
  Protein classification predicting sequence
PHQANIRIMESARERL

SEQ ID NO: 19053 - protein, 6 aa, Artificial sequence
  Protein classification predicting sequence
TSDEWI

SEQ ID NO: 19054 - protein, 15 aa, Artificial sequence
  Protein classification predicting sequence
TAVLFGDGAGAVVMG

SEQ ID NO: 19055 - protein, 8 aa, Artificial sequence
  Protein classification predicting sequence
IDLILVAT

SEQ ID NO: 19056 - protein, 8 aa, Artificial sequence
  Protein classification predicting sequence
FAVRQMGE

SEQ ID NO: 19057 - protein, 7 aa, Artificial sequence
  Protein classification predicting sequence
LIPHQAN

SEQ ID NO: 19058 - protein, 7 aa, Artificial sequence
  Protein classification predicting sequence
HQANQRI

SEQ ID NO: 19059 - protein, 11 aa, Artificial sequence
  Protein classification predicting sequence
IIDNAYFEQFL

SEQ ID NO: 19060 - protein, 19 aa, Artificial sequence
  Protein classification predicting sequence
TSDEWISKMTGIKERHWAD

SEQ ID NO: 19061 - protein, 17 aa, Artificial sequence
  Protein classification predicting sequence
DIDMIIVATATGDMPFP

SEQ ID NO: 19062 - protein, 11 aa, Artificial sequence
  Protein classification predicting sequence
LQERLGTGKVA

SEQ ID NO: 19063 - protein, 20 aa, Artificial sequence
  Protein classification predicting sequence
MDQLAACSGFMYSMITAKQY

SEQ ID NO: 19064 - protein, 6 aa, Artificial sequence
  Protein classification predicting sequence
AACSGF

SEQ ID NO: 19065 - protein, 14 aa, Artificial sequence
  Protein classification predicting sequence
ILVVGADKLSKITD

SEQ ID NO: 19066 - protein, 12 aa, Artificial sequence
  Protein classification predicting sequence
TAVLFGDGAGAV

SEQ ID NO: 19067 - protein, 10 aa, Artificial sequence
  Protein classification predicting sequence
GSDGSGGKYL

SEQ ID NO: 19068 - protein, 30 aa, Artificial sequence
  Protein classification predicting sequence
TGKLKMNGREVFKFAVRIMGDASTRVVEKA

SEQ ID NO: 19069 - protein, 21 aa, Artificial sequence
  Protein classification predicting sequence
KMSVSVNKYGNTSAASIPLSI

SEQ ID NO: 19070 - protein, 7 aa, Artificial sequence
  Protein classification predicting sequence
RTGIRER

SEQ ID NO: 19071 - protein, 19 aa, Artificial sequence
  Protein classification predicting sequence
KLGIKGCPAFDLAAACSGF

SEQ ID NO: 19072 - protein, 23 aa, Artificial sequence
  Protein classification predicting sequence
DKWLHMAGNEVFKVAVTQLSKLV

SEQ ID NO: 19073 - protein, 12 aa, Artificial sequence
  Protein classification predicting sequence
MAGNEVFKVAVT

SEQ ID NO: 19074 - protein, 10 aa, Artificial sequence
  Protein classification predicting sequence
RIISATAKKL

SEQ ID NO: 19075 - protein, 7 aa, Artificial sequence
  Protein classification predicting sequence
TSDEWIV

SEQ ID NO: 19076 - protein, 34 aa, Artificial sequence
  Protein classification predicting sequence
MHKSELDWLVPHQANYRIISATAKKLSMSLDQVV

SEQ ID NO: 19077 - protein, 26 aa, Artificial sequence
  Protein classification predicting sequence
TLDRHGNTSAATVPTALDEAVRDGRI

SEQ ID NO: 19078 - protein, 10 aa, Artificial sequence
  Protein classification predicting sequence
RTNADLEKMV

SEQ ID NO: 19079 - protein, 7 aa, Artificial sequence
  Protein classification predicting sequence
ASEEPGI

SEQ ID NO: 19080 - protein, 8 aa, Artificial sequence
  Protein classification predicting sequence
GREVYKWA

SEQ ID NO: 19081 - protein, 6 aa, Artificial sequence
  Protein classification predicting sequence
IPLALD

SEQ ID NO: 19082 - protein, 7 aa, Artificial sequence
  Protein classification predicting sequence
TCVLFGD

SEQ ID NO: 19083 - protein, 6 aa, Artificial sequence
  Protein classification predicting sequence
DWFVPH

SEQ ID NO: 19084 - protein, 7 aa, Artificial sequence
  Protein classification predicting sequence
GFGGGLT

SEQ ID NO: 19085 - protein, 8 aa, Artificial sequence
  Protein classification predicting sequence
IVATTTPD

SEQ ID NO: 19086 - protein, 7 aa, Artificial sequence
  Protein classification predicting sequence
ALDEAVR

SEQ ID NO: 19087 - protein, 5 aa, Artificial sequence
  Protein classification predicting sequence
ACSGF

SEQ ID NO: 19088 - protein, 7 aa, Artificial sequence
  Protein classification predicting sequence
HQANLRI

SEQ ID NO: 19089 - protein, 9 aa, Artificial sequence
  Protein classification predicting sequence
FLDTSDEWI

SEQ ID NO: 19090 - protein, 9 aa, Artificial sequence
  Protein classification predicting sequence
IGAERLSFY

SEQ ID NO: 19091 - protein, 7 aa, Artificial sequence
  Protein classification predicting sequence
YGNTSAA

SEQ ID NO: 19092 - protein, 16 aa, Artificial sequence
  Protein classification predicting sequence
YGNTSAATVPIALCEA

SEQ ID NO: 19093 - protein, 6 aa, Artificial sequence
  Protein classification predicting sequence
GLTWGA

SEQ ID NO: 19094 - protein, 6 aa, Artificial sequence
  Protein classification predicting sequence
AVCSGF

SEQ ID NO: 19095 - protein, 7 aa, Artificial sequence
  Protein classification predicting sequence
FDLGSDG

SEQ ID NO: 19096 - protein, 7 aa, Artificial sequence
  Protein classification predicting sequence
CSGFVYA

SEQ ID NO: 19097 - protein, 6 aa, Artificial sequence
  Protein classification predicting sequence
VPHQAN

SEQ ID NO: 19098 - protein, 7 aa, Artificial sequence
  Protein classification predicting sequence
RTGIRQR

SEQ ID NO: 19099 - protein, 7 aa, Artificial sequence
  Protein classification predicting sequence
TKIIGTG

SEQ ID NO: 19100 - protein, 9 aa, Artificial sequence
  Protein classification predicting sequence
TSTPDDLFG

SEQ ID NO: 19101 - protein, 6 aa, Artificial sequence
  Protein classification predicting sequence
STHLHA

SEQ ID NO: 19102 - protein, 8 aa, Artificial sequence
  Protein classification predicting sequence
NTSAASVP

SEQ ID NO: 19103 - protein, 14 aa, Artificial sequence
  Protein classification predicting sequence
TCVLFGDGAGAVVL

SEQ ID NO: 19104 - protein, 7 aa, Artificial sequence
  Protein classification predicting sequence
GGGFTWG

SEQ ID NO: 19105 - protein, 9 aa, Artificial sequence
  Protein classification predicting sequence
LVIGAETFS

SEQ ID NO: 19106 - protein, 12 aa, Artificial sequence
  Protein classification predicting sequence
AFGGGFTWGSAL

SEQ ID NO: 19107 - protein, 8 aa, Artificial sequence
  Protein classification predicting sequence
RTGIRQRH

SEQ ID NO: 19108 - protein, 14 aa, Artificial sequence
  Protein classification predicting sequence
DRGTCVLFGDGAGA

SEQ ID NO: 19109 - protein, 11 aa, Artificial sequence
  Protein classification predicting sequence
TCVLFGDGAGA

SEQ ID NO: 19110 - protein, 8 aa, Artificial sequence
  Protein classification predicting sequence
NTSAASIP

SEQ ID NO: 19111 - protein, 9 aa, Artificial sequence
  Protein classification predicting sequence
DGRIKKGDL

SEQ ID NO: 19112 - protein, 15 aa, Artificial sequence
  Protein classification predicting sequence
MEGKEVFKHAVRRME

SEQ ID NO: 19113 - protein, 10 aa, Artificial sequence
  Protein classification predicting sequence
KYGNTAASSV

SEQ ID NO: 19114 - protein, 6 aa, Artificial sequence
  Protein classification predicting sequence
TGSYLP

SEQ ID NO: 19115 - protein, 8 aa, Artificial sequence
  Protein classification predicting sequence
NADLEKMV

SEQ ID NO: 19116 - protein, 12 aa, Artificial sequence
  Protein classification predicting sequence
VPHQANERIIDA

SEQ ID NO: 19117 - protein, 8 aa, Artificial sequence
  Protein classification predicting sequence
AFDVQAVC

SEQ ID NO: 19118 - protein, 6 aa, Artificial sequence
  Protein classification predicting sequence
GFVYAL

SEQ ID NO: 19119 - protein, 8 aa, Artificial sequence
  Protein classification predicting sequence
IDLIIVAT

SEQ ID NO: 19120 - protein, 7 aa, Artificial sequence
  Protein classification predicting sequence
VATVTPD

SEQ ID NO: 19121 - protein, 6 aa, Artificial sequence
  Protein classification predicting sequence
AACTGF

SEQ ID NO: 19122 - protein, 5 aa, Artificial sequence
  Protein classification predicting sequence
MNGRE

SEQ ID NO: 19123 - protein, 7 aa, Artificial sequence
  Protein classification predicting sequence
DLIIVAT

SEQ ID NO: 19124 - protein, 10 aa, Artificial sequence
  Protein classification predicting sequence
YGNTSAASIP

SEQ ID NO: 19125 - protein, 7 aa, Artificial sequence
  Protein classification predicting sequence
GFVYALS

SEQ ID NO: 19126 - protein, 9 aa, Artificial sequence
  Protein classification predicting sequence
DWLIPHQAN

SEQ ID NO: 19127 - protein, 9 aa, Artificial sequence
  Protein classification predicting sequence
GFGGGLTWG

SEQ ID NO: 19128 - protein, 10 aa, Artificial sequence
  Protein classification predicting sequence
LDWLVPHQAN

SEQ ID NO: 19129 - protein, 11 aa, Artificial sequence
  Protein classification predicting sequence
ALDEAVRDGRI

SEQ ID NO: 19130 - protein, 7 aa, Artificial sequence
  Protein classification predicting sequence
TAACSGF

SEQ ID NO: 19131 - protein, 6 aa, Artificial sequence
  Protein classification predicting sequence
GFGAGL

SEQ ID NO: 19132 - protein, 8 aa, Artificial sequence
  Protein classification predicting sequence
PSAACQIQ

SEQ ID NO: 19133 - protein, 7 aa, Artificial sequence
  Protein classification predicting sequence
TMGFEAA

SEQ ID NO: 19134 - protein, 6 aa, Artificial sequence
  Protein classification predicting sequence
PSAACQ

SEQ ID NO: 19135 - protein, 7 aa, Artificial sequence
  Protein classification predicting sequence
FDLAAAC

SEQ ID NO: 19136 - protein, 8 aa, Artificial sequence
  Protein classification predicting sequence
TSDLAYEA

SEQ ID NO: 19137 - protein, 8 aa, Artificial sequence
  Protein classification predicting sequence
RTGIKERR

SEQ ID NO: 19138 - protein, 10 aa, Artificial sequence
  Protein classification predicting sequence
DRGTCILFGD

SEQ ID NO: 19139 - protein, 7 aa, Artificial sequence
  Protein classification predicting sequence
TCILFGD

SEQ ID NO: 19140 - protein, 12 aa, Artificial sequence
  Protein classification predicting sequence
DRSTAVLFGDGA

SEQ ID NO: 19141 - protein, 11 aa, Artificial sequence
  Protein classification predicting sequence
VVGADKLSKIT

SEQ ID NO: 19142 - protein, 7 aa, Artificial sequence
  Protein classification predicting sequence
ASVPLAL

SEQ ID NO: 19143 - protein, 6 aa, Artificial sequence
  Protein classification predicting sequence
MNGREV

SEQ ID NO: 19144 - protein, 8 aa, Artificial sequence
  Protein classification predicting sequence
ARERLGIS

SEQ ID NO: 19145 - protein, 15 aa, Artificial sequence
  Protein classification predicting sequence
LIVVATTSATHAFPS

SEQ ID NO: 19146 - protein, 9 aa, Artificial sequence
  Protein classification predicting sequence
DWLVPHQAN

SEQ ID NO: 19147 - protein, 6 aa, Artificial sequence
  Protein classification predicting sequence
GNEVFK

SEQ ID NO: 19148 - protein, 6 aa, Artificial sequence
  Protein classification predicting sequence
TWGSAL

SEQ ID NO: 19149 - protein, 7 aa, Artificial sequence
  Protein classification predicting sequence
GIKERRI

SEQ ID NO: 19150 - protein, 7 aa, Artificial sequence
  Protein classification predicting sequence
HQANIRI

SEQ ID NO: 19151 - protein, 9 aa, Artificial sequence
  Protein classification predicting sequence
DGRIKPGQL

SEQ ID NO: 19152 - protein, 6 aa, Artificial sequence
  Protein classification predicting sequence
LATSTP

SEQ ID NO: 19153 - protein, 7 aa, Artificial sequence
  Protein classification predicting sequence
WISSRTG

SEQ ID NO: 19154 - protein, 6 aa, Artificial sequence
  Protein classification predicting sequence
FPSAAC

SEQ ID NO: 19155 - protein, 14 aa, Artificial sequence
  Protein classification predicting sequence
ALVIGAEVFSRILD

SEQ ID NO: 19156 - protein, 8 aa, Artificial sequence
  Protein classification predicting sequence
NTFPATAV

SEQ ID NO: 19157 - protein, 10 aa, Artificial sequence
  Protein classification predicting sequence
LVIGAETFSR

SEQ ID NO: 19158 - protein, 8 aa, Artificial sequence
  Protein classification predicting sequence
LHQANQRI

SEQ ID NO: 19159 - protein, 10 aa, Artificial sequence
  Protein classification predicting sequence
LHQANQRIID

SEQ ID NO: 19160 - protein, 8 aa, Artificial sequence
  Protein classification predicting sequence
KAIADAGI

SEQ ID NO: 19161 - protein, 6 aa, Artificial sequence
  Protein classification predicting sequence
GFVYGL

SEQ ID NO: 19162 - protein, 13 aa, Artificial sequence
  Protein classification predicting sequence
DRTTCVLFGDGAG

SEQ ID NO: 19163 - protein, 8 aa, Artificial sequence
  Protein classification predicting sequence
WIRTRTGI

SEQ ID NO: 19164 - protein, 10 aa, Artificial sequence
  Protein classification predicting sequence
TCVLFGDGAG

SEQ ID NO: 19165 - protein, 8 aa, Artificial sequence
  Protein classification predicting sequence
ADQYVKSG

SEQ ID NO: 19166 - protein, 15 aa, Artificial sequence
  Protein classification predicting sequence
ALVVGSDVLARTCDP

SEQ ID NO: 19167 - protein, 17 aa, Artificial sequence
  Protein classification predicting sequence
DRGTIIIFGDGAGAAVL

SEQ ID NO: 19168 - protein, 8 aa, Artificial sequence
  Protein classification predicting sequence
STHLHADG

SEQ ID NO: 19169 - protein, 15 aa, Artificial sequence
  Protein classification predicting sequence
YGELLTLPNADRVNP

SEQ ID NO: 19170 - protein, 15 aa, Artificial sequence
  Protein classification predicting sequence
LLEAFGGGFTWGSAL

SEQ ID NO: 19171 - protein, 10 aa, Artificial sequence
  Protein classification predicting sequence
RHIAAPNETV

SEQ ID NO: 19172 - protein, 32 aa, Artificial sequence
  Protein classification predicting sequence
LTMAGNEVFKVAVTELAHIVDETLAANNLDRS

SEQ ID NO: 19173 - protein, 7 aa, Artificial sequence
  Protein classification predicting sequence
VFKVAVT

SEQ ID NO: 19174 - protein, 9 aa, Artificial sequence
  Protein classification predicting sequence
LGLVSAACH

SEQ ID NO: 19175 - protein, 110 aa, Artificial sequence
  Protein classification predicting sequence
KAIADAGIQPEDIDMIIVATATGDMPFPTVANMLQERLGTGKVASMDQLAACSGFMYSMITAKQYVQSGDYHNILVVGADKLSKITDLTDRSTAVLFGDGAGAVIIGEVS

SEQ ID NO: 19176 - protein, 10 aa, Artificial sequence
  Protein classification predicting sequence
AACSGFVFAL

SEQ ID NO: 19177 - protein, 11 aa, Artificial sequence
  Protein classification predicting sequence
MDGRAIFDFAI

SEQ ID NO: 19178 - protein, 11 aa, Artificial sequence
  Protein classification predicting sequence
LHQANRRILDK

SEQ ID NO: 19179 - protein, 7 aa, Artificial sequence
  Protein classification predicting sequence
DTSDEWI

SEQ ID NO: 19180 - protein, 16 aa, Artificial sequence
  Protein classification predicting sequence
TAVLFGDGAGGVLLEA

SEQ ID NO: 19181 - protein, 18 aa, Artificial sequence
  Protein classification predicting sequence
MDGRAIFDFAIRDVSKSI

SEQ ID NO: 19182 - protein, 6 aa, Artificial sequence
  Protein classification predicting sequence
LLHQAN

SEQ ID NO: 19183 - protein, 8 aa, Artificial sequence
  Protein classification predicting sequence
FDFAIRDV

SEQ ID NO: 19184 - protein, 8 aa, Artificial sequence
  Protein classification predicting sequence
TCVLFGDG

SEQ ID NO: 19185 - protein, 7 aa, Artificial sequence
  Protein classification predicting sequence
FGAGLTW

SEQ ID NO: 19186 - protein, 6 aa, Artificial sequence
  Protein classification predicting sequence
GREVFK

SEQ ID NO: 19187 - protein, 9 aa, Artificial sequence
  Protein classification predicting sequence
EWIFSRTGI

SEQ ID NO: 19188 - protein, 7 aa, Artificial sequence
  Protein classification predicting sequence
DRHGNTS

SEQ ID NO: 19189 - protein, 7 aa, Artificial sequence
  Protein classification predicting sequence
PLALDEA

SEQ ID NO: 19190 - protein, 6 aa, Artificial sequence
  Protein classification predicting sequence
DLAYEA

SEQ ID NO: 19191 - protein, 14 aa, Artificial sequence
  Protein classification predicting sequence
STHLHADGRYGELL

SEQ ID NO: 19192 - protein, 23 aa, Artificial sequence
  Protein classification predicting sequence
LDWLVPHQANLRIISATAKKLGM

SEQ ID NO: 19193 - protein, 11 aa, Artificial sequence
  Protein classification predicting sequence
TLDRHGNTSAA

SEQ ID NO: 19194 - protein, 10 aa, Artificial sequence
  Protein classification predicting sequence
RTPMGRSKGG

SEQ ID NO: 19195 - protein, 7 aa, Artificial sequence
  Protein classification predicting sequence
RLCGSSM

SEQ ID NO: 19196 - protein, 10 aa, Artificial sequence
  Protein classification predicting sequence
GMMGLTAEML

SEQ ID NO: 19197 - protein, 12 aa, Artificial sequence
  Protein classification predicting sequence
VRAEDLSAHLMR

SEQ ID NO: 19198 - protein, 22 aa, Artificial sequence
  Protein classification predicting sequence
DDIYWGCVQQTLEQGFNIARNA

SEQ ID NO: 19199 - protein, 8 aa, Artificial sequence
  Protein classification predicting sequence
HGVDFHPG

SEQ ID NO: 19200 - protein, 8 aa, Artificial sequence
  Protein classification predicting sequence
HELRRRGG

SEQ ID NO: 19201 - protein, 7 aa, Artificial sequence
  Protein classification predicting sequence
NKRSIEL

SEQ ID NO: 19202 - protein, 9 aa, Artificial sequence
  Protein classification predicting sequence
TTGFWDGPP

SEQ ID NO: 19203 - protein, 8 aa, Artificial sequence
  Protein classification predicting sequence
MQDAVLNL

SEQ ID NO: 19204 - protein, 8 aa, Artificial sequence
  Protein classification predicting sequence
KLRDQQRL

SEQ ID NO: 19205 - protein, 15 aa, Artificial sequence
  Protein classification predicting sequence
VPRGGNAGGGGQPGW

SEQ ID NO: 19206 - protein, 9 aa, Artificial sequence
  Protein classification predicting sequence
LKCKGWETD

SEQ ID NO: 19207 - protein, 19 aa, Artificial sequence
  Protein classification predicting sequence
NSMGLFLQKTNIIRDYLED

SEQ ID NO: 19208 - protein, 6 aa, Artificial sequence
  Protein classification predicting sequence
FCAIPQ

SEQ ID NO: 19209 - protein, 6 aa, Artificial sequence
  Protein classification predicting sequence
VKIRKG

SEQ ID NO: 19210 - protein, 10 aa, Artificial sequence
  Protein classification predicting sequence
FYLVLRALDT

SEQ ID NO: 19211 - protein, 10 aa, Artificial sequence
  Protein classification predicting sequence
YCHYVAGLVG

SEQ ID NO: 19212 - protein, 7 aa, Artificial sequence
  Protein classification predicting sequence
DGRSFWP

SEQ ID NO: 19213 - protein, 9 aa, Artificial sequence
  Protein classification predicting sequence
FCAIPQVMA

SEQ ID NO: 19214 - protein, 7 aa, Artificial sequence
  Protein classification predicting sequence
YVAGLVG

SEQ ID NO: 19215 - protein, 18 aa, Artificial sequence
  Protein classification predicting sequence
KYCHYVAGLVGIGLSRLF

SEQ ID NO: 19216 - protein, 14 aa, Artificial sequence
  Protein classification predicting sequence
MGLFLQKTNIIRDY

SEQ ID NO: 19217 - protein, 8 aa, Artificial sequence
  Protein classification predicting sequence
MGNGMADY

SEQ ID NO: 19218 - protein, 8 aa, Artificial sequence
  Protein classification predicting sequence
SMGLFLQK

SEQ ID NO: 19219 - protein, 7 aa, Artificial sequence
  Protein classification predicting sequence
FWPREIW

SEQ ID NO: 19220 - protein, 14 aa, Artificial sequence
  Protein classification predicting sequence
ELLNLTSRSFAAVI

SEQ ID NO: 19221 - protein, 12 aa, Artificial sequence
  Protein classification predicting sequence
KFLQEAKILKQY

SEQ ID NO: 19222 - protein, 9 aa, Artificial sequence
  Protein classification predicting sequence
GGDFLTFLR

SEQ ID NO: 19223 - protein, 57 aa, Artificial sequence
  Protein classification predicting sequence
LGPGEPPPVLLLQDDRHSTSSSEQEREGGRTPTLEILKSHISGIFRPKFSLPPPLQL

SEQ ID NO: 19224 - protein, 5 aa, Artificial sequence
  Protein classification predicting sequence
WYHGA

SEQ ID NO: 19225 - protein, 12 aa, Artificial sequence
  Protein classification predicting sequence
SQSWAEITSQTE

SEQ ID NO: 19226 - protein, 11 aa, Artificial sequence
  Protein classification predicting sequence
LLQDDRHSTSS

SEQ ID NO: 19227 - protein, 16 aa, Artificial sequence
  Protein classification predicting sequence
EREGGRTPTLEILKSH

SEQ ID NO: 19228 - protein, 9 aa, Artificial sequence
  Protein classification predicting sequence
SGIFRPKFS

SEQ ID NO: 19229 - protein, 14 aa, Artificial sequence
  Protein classification predicting sequence
PPPLQLVPEVQKPL

SEQ ID NO: 19230 - protein, 8 aa, Artificial sequence
  Protein classification predicting sequence
EQLWYHGA

SEQ ID NO: 19231 - protein, 18 aa, Artificial sequence
  Protein classification predicting sequence
GDFLVRESQGKQEYVLSV

SEQ ID NO: 19232 - protein, 28 aa, Artificial sequence
  Protein classification predicting sequence
HEDLVLGEQIGRGNFGEVFSGRLRADNT

SEQ ID NO: 19233 - protein, 11 aa, Artificial sequence
  Protein classification predicting sequence
NQQTREFVEKG

SEQ ID NO: 19234 - protein, 31 aa, Artificial sequence
  Protein classification predicting sequence
RLPCPELCPDAVFRLMEQCWAYEPGQRPSFS

SEQ ID NO: 19235 - protein, 21 aa, Artificial sequence
  Protein classification predicting sequence
HPGDLLQLRCRLRDDVQSINW

SEQ ID NO: 19236 - protein, 14 aa, Artificial sequence
  Protein classification predicting sequence
TTYFSVNVSDALPS

SEQ ID NO: 19237 - protein, 23 aa, Artificial sequence
  Protein classification predicting sequence
PEKMEKKLHAVPAAKTVKFKCPS

SEQ ID NO: 19238 - protein, 6 aa, Artificial sequence
  Protein classification predicting sequence
CKVYSD

SEQ ID NO: 19239 - protein, 16 aa, Artificial sequence
  Protein classification predicting sequence
FEDAGEYTCLAGNSIG

SEQ ID NO: 19240 - protein, 36 aa, Artificial sequence
  Protein classification predicting sequence
LVRPSRLSSSGTPMLAGVSEYELPEDPRWELPRDRL

SEQ ID NO: 19241 - protein, 14 aa, Artificial sequence
  Protein classification predicting sequence
LGKPLGEGCFGQVV

SEQ ID NO: 19242 - protein, 6 aa, Artificial sequence
  Protein classification predicting sequence
EYCYNP

SEQ ID NO: 19243 - protein, 6 aa, Artificial sequence
  Protein classification predicting sequence
STDYYR

SEQ ID NO: 19244 - protein, 6 aa, Artificial sequence
  Protein classification predicting sequence
KWMAPE

SEQ ID NO: 19245 - protein, 36 aa, Artificial sequence
  Protein classification predicting sequence
PGVPVEELFKLLKEGHRMDKPSNCTNELYMMMRDCW

SEQ ID NO: 19246 - protein, 9 aa, Artificial sequence
  Protein classification predicting sequence
NRTRITGEE

SEQ ID NO: 19247 - protein, 10 aa, Artificial sequence
  Protein classification predicting sequence
SVNVSDALPS

SEQ ID NO: 19248 - protein, 19 aa, Artificial sequence
  Protein classification predicting sequence
PEKMEKKLHAVPAAKTVKF

SEQ ID NO: 19249 - protein, 8 aa, Artificial sequence
  Protein classification predicting sequence
TVKFRCPA

SEQ ID NO: 19250 - protein, 8 aa, Artificial sequence
  Protein classification predicting sequence
RIGGYKVR

SEQ ID NO: 19251 - protein, 26 aa, Artificial sequence
  Protein classification predicting sequence
INHTYQLDVVERSPHRPILQAGLPAN

SEQ ID NO: 19252 - protein, 7 aa, Artificial sequence
  Protein classification predicting sequence
QPHIQWL

SEQ ID NO: 19253 - protein, 9 aa, Artificial sequence
  Protein classification predicting sequence
MEVLHLRNV

SEQ ID NO: 19254 - protein, 10 aa, Artificial sequence
  Protein classification predicting sequence
LEIIIYCTGA

SEQ ID NO: 19255 - protein, 10 aa, Artificial sequence
  Protein classification predicting sequence
AVHKLAKSIP

SEQ ID NO: 19256 - protein, 7 aa, Artificial sequence
  Protein classification predicting sequence
RRQVTVS

SEQ ID NO: 19257 - protein, 10 aa, Artificial sequence
  Protein classification predicting sequence
RLSSSGTPML

SEQ ID NO: 19258 - protein, 12 aa, Artificial sequence
  Protein classification predicting sequence
SEYELPEDPRWE

SEQ ID NO: 19259 - protein, 13 aa, Artificial sequence
  Protein classification predicting sequence
VTKVAVKMLKSDA

SEQ ID NO: 19260 - protein, 9 aa, Artificial sequence
  Protein classification predicting sequence
SKGNLREYL

SEQ ID NO: 19261 - protein, 18 aa, Artificial sequence
  Protein classification predicting sequence
KCIHRDLAARNVLVTEDN

SEQ ID NO: 19262 - protein, 69 aa, Artificial sequence
  Protein classification predicting sequence
MKIADFGLARDIHHIDYYKKTTNGRLPVKWMAPEALFDRIYTHQSDVWSFGVLLWEIFTLGGSPYPGVP

SEQ ID NO: 19263 - protein, 16 aa, Artificial sequence
  Protein classification predicting sequence
EELFKLLKEGHRMDKP

SEQ ID NO: 19264 - protein, 10 aa, Artificial sequence
  Protein classification predicting sequence
NCTNELYMMM

SEQ ID NO: 19265 - protein, 5 aa, Artificial sequence
  Protein classification predicting sequence
GNYTC

SEQ ID NO: 19266 - protein, 12 aa, Artificial sequence
  Protein classification predicting sequence
VENEYGSINHTY

SEQ ID NO: 19267 - protein, 7 aa, Artificial sequence
  Protein classification predicting sequence
DSGLYAC

SEQ ID NO: 19268 - protein, 37 aa, Artificial sequence
  Protein classification predicting sequence
WLKNGKEFKQEHRIGGYKVRNQHWSLIMESVVPSDKG

SEQ ID NO: 19269 - protein, 8 aa, Artificial sequence
  Protein classification predicting sequence
SVVPSDKG

SEQ ID NO: 19270 - protein, 7 aa, Artificial sequence
  Protein classification predicting sequence
GSINHTY

SEQ ID NO: 19271 - protein, 12 aa, Artificial sequence
  Protein classification predicting sequence
HRPILQAGLPAN

SEQ ID NO: 19272 - protein, 10 aa, Artificial sequence
  Protein classification predicting sequence
VHKLTKRIPL

SEQ ID NO: 19273 - protein, 10 aa, Artificial sequence
  Protein classification predicting sequence
TPLVRITTRL

SEQ ID NO: 19274 - protein, 24 aa, Artificial sequence
  Protein classification predicting sequence
SEMEMMKMIGKHKNIINLLGACTQ

SEQ ID NO: 19275 - protein, 14 aa, Artificial sequence
  Protein classification predicting sequence
EQMTFKDLVSCTYQ

SEQ ID NO: 19276 - protein, 13 aa, Artificial sequence
  Protein classification predicting sequence
NVMKIADFGLARD

SEQ ID NO: 19277 - protein, 17 aa, Artificial sequence
  Protein classification predicting sequence
NGRLPVKWMAPEALFDR

SEQ ID NO: 19278 - protein, 8 aa, Artificial sequence
  Protein classification predicting sequence
PLEQYSPS

SEQ ID NO: 19279 - protein, 14 aa, Artificial sequence
  Protein classification predicting sequence
SSGDDSVFSPDPMP

SEQ ID NO: 19280 - protein, 6 aa, Artificial sequence
  Protein classification predicting sequence
NTTDKE

SEQ ID NO: 19281 - protein, 7 aa, Artificial sequence
  Protein classification predicting sequence
SHHSAWL

SEQ ID NO: 19282 - protein, 8 aa, Artificial sequence
  Protein classification predicting sequence
SNTPLVRI

SEQ ID NO: 19283 - protein, 36 aa, Artificial sequence
  Protein classification predicting sequence
WEIFTLGGSPYPGIPVEELFKLLKEGHRMDKPANCT

SEQ ID NO: 19284 - protein, 8 aa, Artificial sequence
  Protein classification predicting sequence
SSGDDSVF

SEQ ID NO: 19285 - protein, 8 aa, Artificial sequence
  Protein classification predicting sequence
WLKNGKEF

SEQ ID NO: 19286 - protein, 12 aa, Artificial sequence
  Protein classification predicting sequence
SSMNSNTPLVRI

SEQ ID NO: 19287 - protein, 8 aa, Artificial sequence
  Protein classification predicting sequence
LRARRPPG

SEQ ID NO: 19288 - protein, 14 aa, Artificial sequence
  Protein classification predicting sequence
WSLVMESVVPSDRG

SEQ ID NO: 19289 - protein, 15 aa, Artificial sequence
  Protein classification predicting sequence
EDAGEYTCLAGNSIG

SEQ ID NO: 19290 - protein, 20 aa, Artificial sequence
  Protein classification predicting sequence
PRDRLVLGKPLGEGCFGQVV

SEQ ID NO: 19291 - protein, 12 aa, Artificial sequence
  Protein classification predicting sequence
LVSCAYQVARGM

SEQ ID NO: 19292 - protein, 9 aa, Artificial sequence
  Protein classification predicting sequence
HHIDYYKKT

SEQ ID NO: 19293 - protein, 6 aa, Artificial sequence
  Protein classification predicting sequence
EGHRMD

SEQ ID NO: 19294 - protein, 10 aa, Artificial sequence
  Protein classification predicting sequence
YTHQSDVWSF

SEQ ID NO: 19295 - protein, 6 aa, Artificial sequence
  Protein classification predicting sequence
RKDAER

SEQ ID NO: 19296 - protein, 10 aa, Artificial sequence
  Protein classification predicting sequence
RESETTKGAY

SEQ ID NO: 19297 - protein, 7 aa, Artificial sequence
  Protein classification predicting sequence
LRHDKLV

SEQ ID NO: 19298 - protein, 9 aa, Artificial sequence
  Protein classification predicting sequence
KLVQLYAVV

SEQ ID NO: 19299 - protein, 10 aa, Artificial sequence
  Protein classification predicting sequence
CKIADFGLAR

SEQ ID NO: 19300 - protein, 9 aa, Artificial sequence
  Protein classification predicting sequence
KGRVPYPGM

SEQ ID NO: 19301 - protein, 9 aa, Artificial sequence
  Protein classification predicting sequence
ALYDYEART

SEQ ID NO: 19302 - protein, 8 aa, Artificial sequence
  Protein classification predicting sequence
NNTEGDWW

SEQ ID NO: 19303 - protein, 5 aa, Artificial sequence
  Protein classification predicting sequence
EGDWW

SEQ ID NO: 19304 - protein, 8 aa, Artificial sequence
  Protein classification predicting sequence
GGYYITTR

SEQ ID NO: 19305 - protein, 6 aa, Artificial sequence
  Protein classification predicting sequence
EAQVMK

SEQ ID NO: 19306 - protein, 8 aa, Artificial sequence
  Protein classification predicting sequence
GRIPYPGM

SEQ ID NO: 19307 - protein, 5 aa, Artificial sequence
  Protein classification predicting sequence
PYPGM

SEQ ID NO: 19308 - protein, 7 aa, Artificial sequence
  Protein classification predicting sequence
DWWEARS

SEQ ID NO: 19309 - protein, 11 aa, Artificial sequence
  Protein classification predicting sequence
GGYYITTRAQF

SEQ ID NO: 19310 - protein, 17 aa, Artificial sequence
  Protein classification predicting sequence
CKIADFGLARLIEDNEY

SEQ ID NO: 19311 - protein, 8 aa, Artificial sequence
  Protein classification predicting sequence
KSDVWSFG

SEQ ID NO: 19312 - protein, 6 aa, Artificial sequence
  Protein classification predicting sequence
IHRDIK

SEQ ID NO: 19313 - protein, 7 aa, Artificial sequence
  Protein classification predicting sequence
DIWALGC

SEQ ID NO: 19314 - protein, 6 aa, Artificial sequence
  Protein classification predicting sequence
KWEFPR

SEQ ID NO: 19315 - protein, 10 aa, Artificial sequence
  Protein classification predicting sequence
EYCCYGDLLN

SEQ ID NO: 19316 - protein, 14 aa, Artificial sequence
  Protein classification predicting sequence
GNARLPVKWMAPES

SEQ ID NO: 19317 - protein, 7 aa, Artificial sequence
  Protein classification predicting sequence
LTPSPVK

SEQ ID NO: 19318 - protein, 8 aa, Artificial sequence
  Protein classification predicting sequence
AYGLILPQ

SEQ ID NO: 19319 - protein, 6 aa, Artificial sequence
  Protein classification predicting sequence
GCLNIH

SEQ ID NO: 19320 - protein, 7 aa, Artificial sequence
  Protein classification predicting sequence
AGDAETG

SEQ ID NO: 19321 - protein, 6 aa, Artificial sequence
  Protein classification predicting sequence
KPAGRG

SEQ ID NO: 19322 - protein, 6 aa, Artificial sequence
  Protein classification predicting sequence
GCINVH

SEQ ID NO: 19323 - protein, 7 aa, Artificial sequence
  Protein classification predicting sequence
RGAAPIQ

SEQ ID NO: 19324 - protein, 7 aa, Artificial sequence
  Protein classification predicting sequence
IVVVAYG

SEQ ID NO: 19325 - protein, 9 aa, Artificial sequence
  Protein classification predicting sequence
SLLPKYRGA

SEQ ID NO: 19326 - protein, 10 aa, Artificial sequence
  Protein classification predicting sequence
RGAAPIQRAI

SEQ ID NO: 19327 - protein, 7 aa, Artificial sequence
  Protein classification predicting sequence
AYGLILP

SEQ ID NO: 19328 - protein, 6 aa, Artificial sequence
  Protein classification predicting sequence
GDTETG

SEQ ID NO: 19329 - protein, 6 aa, Artificial sequence
  Protein classification predicting sequence
TGITIM

SEQ ID NO: 19330 - protein, 6 aa, Artificial sequence
  Protein classification predicting sequence
TIMQMD

SEQ ID NO: 19331 - protein, 12 aa, Artificial sequence
  Protein classification predicting sequence
VPVLRRLIEDGY

SEQ ID NO: 19332 - protein, 8 aa, Artificial sequence
  Protein classification predicting sequence
VVTQPDRP

SEQ ID NO: 19333 - protein, 6 aa, Artificial sequence
  Protein classification predicting sequence
IRGLSP

SEQ ID NO: 19334 - protein, 7 aa, Artificial sequence
  Protein classification predicting sequence
FMGTPDF

SEQ ID NO: 19335 - protein, 6 aa, Artificial sequence
  Protein classification predicting sequence
TPPPVK

SEQ ID NO: 19336 - protein, 7 aa, Artificial sequence
  Protein classification predicting sequence
AFGQILP

SEQ ID NO: 19337 - protein, 9 aa, Artificial sequence
  Protein classification predicting sequence
INVHASLLP

SEQ ID NO: 19338 - protein, 18 aa, Artificial sequence
  Protein classification predicting sequence
INVHASLLPKYRGGAPIH

SEQ ID NO: 19339 - protein, 12 aa, Artificial sequence
  Protein classification predicting sequence
EKLDAGDILTQV

SEQ ID NO: 19340 - protein, 6 aa, Artificial sequence
  Protein classification predicting sequence
AGKKRM

SEQ ID NO: 19341 - protein, 6 aa, Artificial sequence
  Protein classification predicting sequence
TQPDRP

SEQ ID NO: 19342 - protein, 8 aa, Artificial sequence
  Protein classification predicting sequence
ETDNVGTL

SEQ ID NO: 19343 - protein, 8 aa, Artificial sequence
  Protein classification predicting sequence
GRKKVLTP

SEQ ID NO: 19344 - protein, 8 aa, Artificial sequence
  Protein classification predicting sequence
RGGAPIHY

SEQ ID NO: 19345 - protein, 13 aa, Artificial sequence
  Protein classification predicting sequence
TIMYMVEKLDAGD

SEQ ID NO: 19346 - protein, 6 aa, Artificial sequence
  Protein classification predicting sequence
VVAYGL

SEQ ID NO: 19347 - protein, 16 aa, Artificial sequence
  Protein classification predicting sequence
ETGMMIMKMDEGLDTG

SEQ ID NO: 19348 - protein, 14 aa, Artificial sequence
  Protein classification predicting sequence
LPRWRGAAPIQRAI

SEQ ID NO: 19349 - protein, 8 aa, Artificial sequence
  Protein classification predicting sequence
MVKKLDAG

SEQ ID NO: 19350 - protein, 6 aa, Artificial sequence
  Protein classification predicting sequence
WRGAAP

SEQ ID NO: 19351 - protein, 6 aa, Artificial sequence
  Protein classification predicting sequence
GCINIH

SEQ ID NO: 19352 - protein, 8 aa, Artificial sequence
  Protein classification predicting sequence
SLLPRWRG

SEQ ID NO: 19353 - protein, 6 aa, Artificial sequence
  Protein classification predicting sequence
APIQRA

SEQ ID NO: 19354 - protein, 8 aa, Artificial sequence
  Protein classification predicting sequence
SLLPKYRG

SEQ ID NO: 19355 - protein, 8 aa, Artificial sequence
  Protein classification predicting sequence
FMGTPDFS

SEQ ID NO: 19356 - protein, 9 aa, Artificial sequence
  Protein classification predicting sequence
GLSPFPGAW

SEQ ID NO: 19357 - protein, 9 aa, Artificial sequence
  Protein classification predicting sequence
SLLPRWRGA

SEQ ID NO: 19358 - protein, 8 aa, Artificial sequence
  Protein classification predicting sequence
YGKLIPKE

SEQ ID NO: 19359 - protein, 6 aa, Artificial sequence
  Protein classification predicting sequence
LHDKLA

SEQ ID NO: 19360 - protein, 10 aa, Artificial sequence
  Protein classification predicting sequence
GTPQFAATVL

SEQ ID NO: 19361 - protein, 8 aa, Artificial sequence
  Protein classification predicting sequence
RGAAPIQR

SEQ ID NO: 19362 - protein, 7 aa, Artificial sequence
  Protein classification predicting sequence
DMTAGEL

SEQ ID NO: 19363 - protein, 16 aa, Artificial sequence
  Protein classification predicting sequence
SGNTVIRMDAGMDTGD

SEQ ID NO: 19364 - protein, 7 aa, Artificial sequence
  Protein classification predicting sequence
LGTFNLH

SEQ ID NO: 19365 - protein, 7 aa, Artificial sequence
  Protein classification predicting sequence
NWAIING

SEQ ID NO: 19366 - protein, 10 aa, Artificial sequence
  Protein classification predicting sequence
ADVFIVVAYG

SEQ ID NO: 19367 - protein, 6 aa, Artificial sequence
  Protein classification predicting sequence
IFAGTP

SEQ ID NO: 19368 - protein, 8 aa, Artificial sequence
  Protein classification predicting sequence
PKGRGKKL

SEQ ID NO: 19369 - protein, 10 aa, Artificial sequence
  Protein classification predicting sequence
GTPDFAVPSL

SEQ ID NO: 19370 - protein, 8 aa, Artificial sequence
  Protein classification predicting sequence
NLHFSLLP

SEQ ID NO: 19371 - protein, 7 aa, Artificial sequence
  Protein classification predicting sequence
IQPTDTA

SEQ ID NO: 19372 - protein, 10 aa, Artificial sequence
  Protein classification predicting sequence
LGQIQPPGKK

SEQ ID NO: 19373 - protein, 7 aa, Artificial sequence
  Protein classification predicting sequence
IVFAGTP

SEQ ID NO: 19374 - protein, 7 aa, Artificial sequence
  Protein classification predicting sequence
AYGKILP

SEQ ID NO: 19375 - protein, 6 aa, Artificial sequence
  Protein classification predicting sequence
GTPDFA

SEQ ID NO: 19376 - protein, 5 aa, Artificial sequence
  Protein classification predicting sequence
GKKRM

SEQ ID NO: 19377 - protein, 7 aa, Artificial sequence
  Protein classification predicting sequence
GTPDFAA

SEQ ID NO: 19378 - protein, 10 aa, Artificial sequence
  Protein classification predicting sequence
CPITAEDTSG

SEQ ID NO: 19379 - protein, 34 aa, Artificial sequence
  Protein classification predicting sequence
AEKLSKEEARIDWSLSAAQLERCIRAFNPWPMSW

SEQ ID NO: 19380 - protein, 29 aa, Artificial sequence
  Protein classification predicting sequence
GILNLLSLQPAGKKAMSAQDLLNSRREWF

SEQ ID NO: 19381 - protein, 9 aa, Artificial sequence
  Protein classification predicting sequence
AEKLSKEEA

SEQ ID NO: 19382 - protein, 27 aa, Artificial sequence
  Protein classification predicting sequence
AAPGTILEANKQGIQVATGDGILNLLS

SEQ ID NO: 19383 - protein, 11 aa, Artificial sequence
  Protein classification predicting sequence
QDLLNSRREWF

SEQ ID NO: 19384 - protein, 6 aa, Artificial sequence
  Protein classification predicting sequence
YRGGAP

SEQ ID NO: 19385 - protein, 8 aa, Artificial sequence
  Protein classification predicting sequence
VGTMFEKL

SEQ ID NO: 19386 - protein, 5 aa, Artificial sequence
  Protein classification predicting sequence
IMQMD

SEQ ID NO: 19387 - protein, 14 aa, Artificial sequence
  Protein classification predicting sequence
IVVVAYGKILPKEV

SEQ ID NO: 19388 - protein, 7 aa, Artificial sequence
  Protein classification predicting sequence
TIMYMVE

SEQ ID NO: 19389 - protein, 9 aa, Artificial sequence
  Protein classification predicting sequence
KVWWGEKVP

SEQ ID NO: 19390 - protein, 7 aa, Artificial sequence
  Protein classification predicting sequence
HASLLPR

SEQ ID NO: 19391 - protein, 9 aa, Artificial sequence
  Protein classification predicting sequence
MEAGLDTGP

SEQ ID NO: 19392 - protein, 6 aa, Artificial sequence
  Protein classification predicting sequence
GLDTGP

SEQ ID NO: 19393 - protein, 6 aa, Artificial sequence
  Protein classification predicting sequence
RPAGRG

SEQ ID NO: 19394 - protein, 16 aa, Artificial sequence
  Protein classification predicting sequence
GCLNIHASLLPRWRGA

SEQ ID NO: 19395 - protein, 11 aa, Artificial sequence
  Protein classification predicting sequence
HASLLPRWRGA

SEQ ID NO: 19396 - protein, 8 aa, Artificial sequence
  Protein classification predicting sequence
PAGRGKKL

SEQ ID NO: 19397 - protein, 6 aa, Artificial sequence
  Protein classification predicting sequence
PVKQLA

SEQ ID NO: 19398 - protein, 7 aa, Artificial sequence
  Protein classification predicting sequence
NIPVYQP

SEQ ID NO: 19399 - protein, 24 aa, Artificial sequence
  Protein classification predicting sequence
NVHGSILPRWRGAAPIQRSIWAGD

SEQ ID NO: 19400 - protein, 8 aa, Artificial sequence
  Protein classification predicting sequence
MSAQDLLN

SEQ ID NO: 19401 - protein, 6 aa, Artificial sequence
  Protein classification predicting sequence
LPRWRG

SEQ ID NO: 19402 - protein, 8 aa, Artificial sequence
  Protein classification predicting sequence
MVVVAYGL

SEQ ID NO: 19403 - protein, 14 aa, Artificial sequence
  Protein classification predicting sequence
IERCVRAFNPWPMS

SEQ ID NO: 19404 - protein, 9 aa, Artificial sequence
  Protein classification predicting sequence
RAFNPWPMS

SEQ ID NO: 19405 - protein, 7 aa, Artificial sequence
  Protein classification predicting sequence
KLSGSEE

SEQ ID NO: 19406 - protein, 7 aa, Artificial sequence
  Protein classification predicting sequence
DLIVTAA

SEQ ID NO: 19407 - protein, 7 aa, Artificial sequence
  Protein classification predicting sequence
EDTSGTL

SEQ ID NO: 19408 - protein, 8 aa, Artificial sequence
  Protein classification predicting sequence
QPEKLSGS

SEQ ID NO: 19409 - protein, 10 aa, Artificial sequence
  Protein classification predicting sequence
HASLLPKYRG

SEQ ID NO: 19410 - protein, 15 aa, Artificial sequence
  Protein classification predicting sequence
HASLLPKYRGGAPIH

SEQ ID NO: 19411 - protein, 18 aa, Artificial sequence
  Protein classification predicting sequence
HASLLPKYRGGAPIHYAI

SEQ ID NO: 19412 - protein, 9 aa, Artificial sequence
  Protein classification predicting sequence
TFSPNISPE

SEQ ID NO: 19413 - protein, 9 aa, Artificial sequence
  Protein classification predicting sequence
TGTMFDKLS

SEQ ID NO: 19414 - protein, 13 aa, Artificial sequence
  Protein classification predicting sequence
AVYTQPDRPAGRG

SEQ ID NO: 19415 - protein, 11 aa, Artificial sequence
  Protein classification predicting sequence
AYGLILPKAVL

SEQ ID NO: 19416 - protein, 8 aa, Artificial sequence
  Protein classification predicting sequence
KEEARINW

SEQ ID NO: 19417 - protein, 6 aa, Artificial sequence
  Protein classification predicting sequence
LTPSPV

SEQ ID NO: 19418 - protein, 8 aa, Artificial sequence
  Protein classification predicting sequence
PWPVAYTT

SEQ ID NO: 19419 - protein, 8 aa, Artificial sequence
  Protein classification predicting sequence
QPAGKPKM

SEQ ID NO: 19420 - protein, 27 aa, Artificial sequence
  Protein classification predicting sequence
LQADVMVVVAYGLILPKAVLEMPRLGC

SEQ ID NO: 19421 - protein, 12 aa, Artificial sequence
  Protein classification predicting sequence
LPRWRGAAPIQR

SEQ ID NO: 19422 - protein, 11 aa, Artificial sequence
  Protein classification predicting sequence
DWSLSAAQLER

SEQ ID NO: 19423 - protein, 6 aa, Artificial sequence
  Protein classification predicting sequence
IRAFNP

SEQ ID NO: 19424 - protein, 9 aa, Artificial sequence
  Protein classification predicting sequence
QPDRPVGRK

SEQ ID NO: 19425 - protein, 8 aa, Artificial sequence
  Protein classification predicting sequence
RIVFAGTP

SEQ ID NO: 19426 - protein, 7 aa, Artificial sequence
  Protein classification predicting sequence
VKKMDAG

SEQ ID NO: 19427 - protein, 7 aa, Artificial sequence
  Protein classification predicting sequence
PQPAEGV

SEQ ID NO: 19428 - protein, 6 aa, Artificial sequence
  Protein classification predicting sequence
VVTQPD

SEQ ID NO: 19429 - protein, 8 aa, Artificial sequence
  Protein classification predicting sequence
NVHGSLLP

SEQ ID NO: 19430 - protein, 10 aa, Artificial sequence
  Protein classification predicting sequence
ITGATTFQIE

SEQ ID NO: 19431 - protein, 8 aa, Artificial sequence
  Protein classification predicting sequence
RRIRAVTP

SEQ ID NO: 19432 - protein, 11 aa, Artificial sequence
  Protein classification predicting sequence
GCINVHASLLP

SEQ ID NO: 19433 - protein, 6 aa, Artificial sequence
  Protein classification predicting sequence
TGVTIM

SEQ ID NO: 19434 - protein, 7 aa, Artificial sequence
  Protein classification predicting sequence
IIFAGTP

SEQ ID NO: 19435 - protein, 8 aa, Artificial sequence
  Protein classification predicting sequence
GLDTGDML

SEQ ID NO: 19436 - protein, 7 aa, Artificial sequence
  Protein classification predicting sequence
ETGVTIM

SEQ ID NO: 19437 - protein, 10 aa, Artificial sequence
  Protein classification predicting sequence
ETGVTIMQMD

SEQ ID NO: 19438 - protein, 11 aa, Artificial sequence
  Protein classification predicting sequence
AEKLSKEEARI

SEQ ID NO: 19439 - protein, 9 aa, Artificial sequence
  Protein classification predicting sequence
KLSKEEARI

SEQ ID NO: 19440 - protein, 11 aa, Artificial sequence
  Protein classification predicting sequence
LQPAGKKAMSA

SEQ ID NO: 19441 - protein, 8 aa, Artificial sequence
  Protein classification predicting sequence
LNSRREWF

SEQ ID NO: 19442 - protein, 11 aa, Artificial sequence
  Protein classification predicting sequence
LQIVVAFRMLP

SEQ ID NO: 19443 - protein, 6 aa, Artificial sequence
  Protein classification predicting sequence
HGSLLP

SEQ ID NO: 19444 - protein, 8 aa, Artificial sequence
  Protein classification predicting sequence
RPAPKIFK

SEQ ID NO: 19445 - protein, 9 aa, Artificial sequence
  Protein classification predicting sequence
LHDRLAALG

SEQ ID NO: 19446 - protein, 6 aa, Artificial sequence
  Protein classification predicting sequence
EARIDW

SEQ ID NO: 19447 - protein, 7 aa, Artificial sequence
  Protein classification predicting sequence
RAFNPWP

SEQ ID NO: 19448 - protein, 14 aa, Artificial sequence
  Protein classification predicting sequence
DVMVVAAYGLILPQ

SEQ ID NO: 19449 - protein, 6 aa, Artificial sequence
  Protein classification predicting sequence
AVYTQP

SEQ ID NO: 19450 - protein, 9 aa, Artificial sequence
  Protein classification predicting sequence
AGRRGLELT

SEQ ID NO: 19451 - protein, 7 aa, Artificial sequence
  Protein classification predicting sequence
PRLGCIN

SEQ ID NO: 19452 - protein, 27 aa, Artificial sequence
  Protein classification predicting sequence
GCYNGHASLLPRWRGAAPIQRAIMAGD

SEQ ID NO: 19453 - protein, 6 aa, Artificial sequence
  Protein classification predicting sequence
GCYNLH

SEQ ID NO: 19454 - protein, 7 aa, Artificial sequence
  Protein classification predicting sequence
EEFLRGT

SEQ ID NO: 19455 - protein, 10 aa, Artificial sequence
  Protein classification predicting sequence
TLANIDNIVP

SEQ ID NO: 19456 - protein, 13 aa, Artificial sequence
  Protein classification predicting sequence
KLQQESKKALNIE

SEQ ID NO: 19457 - protein, 16 aa, Artificial sequence
  Protein classification predicting sequence
GLPVFQPVSLRPQENQ

SEQ ID NO: 19458 - protein, 45 aa, Artificial sequence
  Protein classification predicting sequence
HGSLLPRWRGAAPIQRSLWAGDAETGVTIMQMDVGLDTGDMLYKL

SEQ ID NO: 19459 - protein, 22 aa, Artificial sequence
  Protein classification predicting sequence
KLAELGPQGLITTLKQLADGTA

SEQ ID NO: 19460 - protein, 8 aa, Artificial sequence
  Protein classification predicting sequence
QPPRPAGR

SEQ ID NO: 19461 - protein, 19 aa, Artificial sequence
  Protein classification predicting sequence
GCLNIHASLLPRWRGAAPI

SEQ ID NO: 19462 - protein, 16 aa, Artificial sequence
  Protein classification predicting sequence
NIHASLLPRWRGAAPI

SEQ ID NO: 19463 - protein, 14 aa, Artificial sequence
  Protein classification predicting sequence
HASLLPRWRGAAPI

SEQ ID NO: 19464 - protein, 12 aa, Artificial sequence
  Protein classification predicting sequence
SLLPRWRGAAPI

SEQ ID NO: 19465 - protein, 6 aa, Artificial sequence
  Protein classification predicting sequence
YQPEKL

SEQ ID NO: 19466 - protein, 8 aa, Artificial sequence
  Protein classification predicting sequence
KIIFMGTP

SEQ ID NO: 19467 - protein, 8 aa, Artificial sequence
  Protein classification predicting sequence
LEMLIAEH

SEQ ID NO: 19468 - protein, 10 aa, Artificial sequence
  Protein classification predicting sequence
DLIVTAAFGQ

SEQ ID NO: 19469 - protein, 17 aa, Artificial sequence
  Protein classification predicting sequence
DLIVTAAFGQLLPESLL

SEQ ID NO: 19470 - protein, 22 aa, Artificial sequence
  Protein classification predicting sequence
ETGITIMYMVKKLDAGNIISQQ

SEQ ID NO: 19471 - protein, 13 aa, Artificial sequence
  Protein classification predicting sequence
ATFASNIRREDER

SEQ ID NO: 19472 - protein, 8 aa, Artificial sequence
  Protein classification predicting sequence
FSATVLKG

SEQ ID NO: 19473 - protein, 20 aa, Artificial sequence
  Protein classification predicting sequence
NVHASLLPKYRGGAPIHYAI

SEQ ID NO: 19474 - protein, 23 aa, Artificial sequence
  Protein classification predicting sequence
NVHASLLPKYRGGAPIHYAIING

SEQ ID NO: 19475 - protein, 10 aa, Artificial sequence
  Protein classification predicting sequence
RGGAPIHYAI

SEQ ID NO: 19476 - protein, 11 aa, Artificial sequence
  Protein classification predicting sequence
TPVKQLALEHG

SEQ ID NO: 19477 - protein, 8 aa, Artificial sequence
  Protein classification predicting sequence
AGVTIMEM

SEQ ID NO: 19478 - protein, 7 aa, Artificial sequence
  Protein classification predicting sequence
AKASTPI

SEQ ID NO: 19479 - protein, 13 aa, Artificial sequence
  Protein classification predicting sequence
FEKLAIIGRDLLL

SEQ ID NO: 19480 - protein, 7 aa, Artificial sequence
  Protein classification predicting sequence
PWPVAHT

SEQ ID NO: 19481 - protein, 13 aa, Artificial sequence
  Protein classification predicting sequence
VVTQPDRAVGRKK

SEQ ID NO: 19482 - protein, 11 aa, Artificial sequence
  Protein classification predicting sequence
DNVGTLFEKLA

SEQ ID NO: 19483 - protein, 6 aa, Artificial sequence
  Protein classification predicting sequence
FNQIRG

SEQ ID NO: 19484 - protein, 14 aa, Artificial sequence
  Protein classification predicting sequence
IRGMNPWPVAHTFL

SEQ ID NO: 19485 - protein, 8 aa, Artificial sequence
  Protein classification predicting sequence
AVVTQPDR

SEQ ID NO: 19486 - protein, 9 aa, Artificial sequence
  Protein classification predicting sequence
YQPEKLSGS

SEQ ID NO: 19487 - protein, 8 aa, Artificial sequence
  Protein classification predicting sequence
KEMDAGDM

SEQ ID NO: 19488 - protein, 8 aa, Artificial sequence
  Protein classification predicting sequence
NVHASLLP

SEQ ID NO: 19489 - protein, 7 aa, Artificial sequence
  Protein classification predicting sequence
HGSLLPR

SEQ ID NO: 19490 - protein, 6 aa, Artificial sequence
  Protein classification predicting sequence
AGLDTG

SEQ ID NO: 19491 - protein, 6 aa, Artificial sequence
  Protein classification predicting sequence
DTGPML

SEQ ID NO: 19492 - protein, 8 aa, Artificial sequence
  Protein classification predicting sequence
QDHSQATF

SEQ ID NO: 19493 - protein, 8 aa, Artificial sequence
  Protein classification predicting sequence
KLAELGPQ

SEQ ID NO: 19494 - protein, 8 aa, Artificial sequence
  Protein classification predicting sequence
ALEHNIPV

SEQ ID NO: 19495 - protein, 6 aa, Artificial sequence
  Protein classification predicting sequence
GKKAMS

SEQ ID NO: 19496 - protein, 6 aa, Artificial sequence
  Protein classification predicting sequence
VVAAYG

SEQ ID NO: 19497 - protein, 8 aa, Artificial sequence
  Protein classification predicting sequence
FAGTPDFA

SEQ ID NO: 19498 - protein, 11 aa, Artificial sequence
  Protein classification predicting sequence
MVVVAYGLILP

SEQ ID NO: 19499 - protein, 14 aa, Artificial sequence
  Protein classification predicting sequence
AVYTQPDRPAGRGR

SEQ ID NO: 19500 - protein, 11 aa, Artificial sequence
  Protein classification predicting sequence
LSDGLGLLRAG

SEQ ID NO: 19501 - protein, 10 aa, Artificial sequence
  Protein classification predicting sequence
LQREGGKAIT

SEQ ID NO: 19502 - protein, 10 aa, Artificial sequence
  Protein classification predicting sequence
ADYLNARRDL

SEQ ID NO: 19503 - protein, 14 aa, Artificial sequence
  Protein classification predicting sequence
VGVFTQPDRPAGRG

SEQ ID NO: 19504 - protein, 13 aa, Artificial sequence
  Protein classification predicting sequence
LPRWRGAAPIQRS

SEQ ID NO: 19505 - protein, 10 aa, Artificial sequence
  Protein classification predicting sequence
DLLNSRREWF

SEQ ID NO: 19506 - protein, 7 aa, Artificial sequence
  Protein classification predicting sequence
AYGLLLP

SEQ ID NO: 19507 - protein, 8 aa, Artificial sequence
  Protein classification predicting sequence
QRAILAGD

SEQ ID NO: 19508 - protein, 7 aa, Artificial sequence
  Protein classification predicting sequence
DDDNYVN

SEQ ID NO: 19509 - protein, 11 aa, Artificial sequence
  Protein classification predicting sequence
FWFATGGAGFC

SEQ ID NO: 19510 - protein, 6 aa, Artificial sequence
  Protein classification predicting sequence
FHSHLE

SEQ ID NO: 19511 - protein, 8 aa, Artificial sequence
  Protein classification predicting sequence
KSDREYAG

SEQ ID NO: 19512 - protein, 10 aa, Artificial sequence
  Protein classification predicting sequence
KDKWVLNHED

SEQ ID NO: 19513 - protein, 19 aa, Artificial sequence
  Protein classification predicting sequence
IGRGNFGEVFSGRLRADNT

SEQ ID NO: 19514 - protein, 12 aa, Artificial sequence
  Protein classification predicting sequence
VAVKSCRETLPP

SEQ ID NO: 19515 - protein, 30 aa, Artificial sequence
  Protein classification predicting sequence
HPNIVRLIGVCTQKQPIYIVMELVQGGDFL

SEQ ID NO: 19516 - protein, 10 aa, Artificial sequence
  Protein classification predicting sequence
CIHRDLAARN

SEQ ID NO: 19517 - protein, 10 aa, Artificial sequence
  Protein classification predicting sequence
RKYQEASKDK

SEQ ID NO: 19518 - protein, 16 aa, Artificial sequence
  Protein classification predicting sequence
YSSESDVWSFGILLWE

SEQ ID NO: 19519 - protein, 6 aa, Artificial sequence
  Protein classification predicting sequence
EAQIMK

SEQ ID NO: 19520 - protein, 6 aa, Artificial sequence
  Protein classification predicting sequence
ERPTFE

SEQ ID NO: 19521 - protein, 13 aa, Artificial sequence
  Protein classification predicting sequence
GVFGAYFNVLINL

SEQ ID NO: 19522 - protein, 11 aa, Artificial sequence
  Protein classification predicting sequence
QTPGCVLLDVD

SEQ ID NO: 19523 - protein, 13 aa, Artificial sequence
  Protein classification predicting sequence
GPSTNRTVYTFVG

SEQ ID NO: 19524 - protein, 20 aa, Artificial sequence
  Protein classification predicting sequence
GEHPRMGALDVCPFIPVRGV

SEQ ID NO: 19525 - protein, 18 aa, Artificial sequence
  Protein classification predicting sequence
LREQGRGKDQPGRLKKVQ

SEQ ID NO: 19526 - protein, 9 aa, Artificial sequence
  Protein classification predicting sequence
IKIARVLIT

SEQ ID NO: 19527 - protein, 7 aa, Artificial sequence
  Protein classification predicting sequence
GFKLKFF

SEQ ID NO: 19528 - protein, 7 aa, Artificial sequence
  Protein classification predicting sequence
AGGNFFI

SEQ ID NO: 19529 - protein, 10 aa, Artificial sequence
  Protein classification predicting sequence
GANKYKFLKA

SEQ ID NO: 19530 - protein, 7 aa, Artificial sequence
  Protein classification predicting sequence
PFPGGIV

SEQ ID NO: 19531 - protein, 7 aa, Artificial sequence
  Protein classification predicting sequence
TPDGRPG

SEQ ID NO: 19532 - protein, 6 aa, Artificial sequence
  Protein classification predicting sequence
RIGQCV

SEQ ID NO: 19533 - protein, 9 aa, Artificial sequence
  Protein classification predicting sequence
LTAPTTAVF

SEQ ID NO: 19534 - protein, 9 aa, Artificial sequence
  Protein classification predicting sequence
VTTFGVDGA

SEQ ID NO: 19535 - protein, 12 aa, Artificial sequence
  Protein classification predicting sequence
PVLSSGTWEILM

SEQ ID NO: 19536 - protein, 7 aa, Artificial sequence
  Protein classification predicting sequence
RTLREIK

SEQ ID NO: 19537 - protein, 6 aa, Artificial sequence
  Protein classification predicting sequence
RPIFPG

SEQ ID NO: 19538 - protein, 9 aa, Artificial sequence
  Protein classification predicting sequence
LCPDRRLVT

SEQ ID NO: 19539 - protein, 6 aa, Artificial sequence
  Protein classification predicting sequence
TPWREL

SEQ ID NO: 19540 - protein, 7 aa, Artificial sequence
  Protein classification predicting sequence
WCRENID

SEQ ID NO: 19541 - protein, 26 aa, Artificial sequence
  Protein classification predicting sequence
AYLREAMDWFRARHEAPVFVVTSNGM

SEQ ID NO: 19542 - protein, 24 aa, Artificial sequence
  Protein classification predicting sequence
AMDWFRARHEAPVFVVTSNGMEWC

SEQ ID NO: 19543 - protein, 18 aa, Artificial sequence
  Protein classification predicting sequence
LAPVFRITLPVLAPEVDS

SEQ ID NO: 19544 - protein, 5 aa, Artificial sequence
  Protein classification predicting sequence
LCPDR

SEQ ID NO: 19545 - protein, 8 aa, Artificial sequence
  Protein classification predicting sequence
FAGDGQEA

SEQ ID NO: 19546 - protein, 12 aa, Artificial sequence
  Protein classification predicting sequence
LHDWMSEEYADL

SEQ ID NO: 19547 - protein, 6 aa, Artificial sequence
  Protein classification predicting sequence
HGLGLS

SEQ ID NO: 19548 - protein, 23 aa, Artificial sequence
  Protein classification predicting sequence
DPFLKLSGFPCSWTFFHHLREQI

SEQ ID NO: 19549 - protein, 11 aa, Artificial sequence
  Protein classification predicting sequence
MHAALAPVFRI

SEQ ID NO: 19550 - protein, 9 aa, Artificial sequence
  Protein classification predicting sequence
LHDWMSEEY

SEQ ID NO: 19551 - protein, 8 aa, Artificial sequence
  Protein classification predicting sequence
FVVTSNGM

SEQ ID NO: 19552 - protein, 7 aa, Artificial sequence
  Protein classification predicting sequence
GDVVFAG

SEQ ID NO: 19553 - protein, 7 aa, Artificial sequence
  Protein classification predicting sequence
LHDWMSE

SEQ ID NO: 19554 - protein, 9 aa, Artificial sequence
  Protein classification predicting sequence
GGDTIYLAN

SEQ ID NO: 19555 - protein, 9 aa, Artificial sequence
  Protein classification predicting sequence
LCLAFLLVC

SEQ ID NO: 19556 - protein, 7 aa, Artificial sequence
  Protein classification predicting sequence
LEDPFLK

SEQ ID NO: 19557 - protein, 11 aa, Artificial sequence
  Protein classification predicting sequence
GFPCSWTFFHH

SEQ ID NO: 19558 - protein, 13 aa, Artificial sequence
  Protein classification predicting sequence
EFTLHDHLREEAQ

SEQ ID NO: 19559 - protein, 12 aa, Artificial sequence
  Protein classification predicting sequence
KDFALLTQCNHT

SEQ ID NO: 19560 - protein, 26 aa, Artificial sequence
  Protein classification predicting sequence
GRFGNQMGQYATLLALAQLNGRRAFI

SEQ ID NO: 19561 - protein, 7 aa, Artificial sequence
  Protein classification predicting sequence
LAPVFRI

SEQ ID NO: 19562 - protein, 10 aa, Artificial sequence
  Protein classification predicting sequence
EFTLHDHLRE

SEQ ID NO: 19563 - protein, 20 aa, Artificial sequence
  Protein classification predicting sequence
SHRHLCLAFLLVCVLSAISF

SEQ ID NO: 19564 - protein, 13 aa, Artificial sequence
  Protein classification predicting sequence
CPQHPASLSGTWT

SEQ ID NO: 19565 - protein, 8 aa, Artificial sequence
  Protein classification predicting sequence
FRITLPVL

SEQ ID NO: 19566 - protein, 13 aa, Artificial sequence
  Protein classification predicting sequence
PWQNYHLNDWMEE

SEQ ID NO: 19567 - protein, 14 aa, Artificial sequence
  Protein classification predicting sequence
TGYPCSWTFYHHLR

SEQ ID NO: 19568 - protein, 7 aa, Artificial sequence
  Protein classification predicting sequence
HVREEAQ

SEQ ID NO: 19569 - protein, 10 aa, Artificial sequence
  Protein classification predicting sequence
VGVHVRRGDY

SEQ ID NO: 19570 - protein, 15 aa, Artificial sequence
  Protein classification predicting sequence
VGVHVRRGDYVHVMP

SEQ ID NO: 19571 - protein, 6 aa, Artificial sequence
  Protein classification predicting sequence
DWFRAR

SEQ ID NO: 19572 - protein, 6 aa, Artificial sequence
  Protein classification predicting sequence
WCRENI

SEQ ID NO: 19573 - protein, 6 aa, Artificial sequence
  Protein classification predicting sequence
ADLSPL

SEQ ID NO: 19574 - protein, 7 aa, Artificial sequence
  Protein classification predicting sequence
EFTLHDH

SEQ ID NO: 19575 - protein, 43 aa, Artificial sequence
  Protein classification predicting sequence
SQLRGMWTINAIGRLGNQMGEYATLYALAKMNGRPAFIPAQMH

SEQ ID NO: 19576 - protein, 10 aa, Artificial sequence
  Protein classification predicting sequence
NYHLNDWMEE

SEQ ID NO: 19577 - protein, 10 aa, Artificial sequence
  Protein classification predicting sequence
YRHIPGEYVR

SEQ ID NO: 19578 - protein, 7 aa, Artificial sequence
  Protein classification predicting sequence
LAPIFRI

SEQ ID NO: 19579 - protein, 27 aa, Artificial sequence
  Protein classification predicting sequence
TFVGVHVRRGDYVHVMPKVWKGVVADR

SEQ ID NO: 19580 - protein, 7 aa, Artificial sequence
  Protein classification predicting sequence
AAFLPEW

SEQ ID NO: 19581 - protein, 15 aa, Artificial sequence
  Protein classification predicting sequence
FLKIFKPEAAFLPEW

SEQ ID NO: 19582 - protein, 9 aa, Artificial sequence
  Protein classification predicting sequence
MNGRPAFIP

SEQ ID NO: 19583 - protein, 17 aa, Artificial sequence
  Protein classification predicting sequence
MHSTLAPIFRITLPVLH

SEQ ID NO: 19584 - protein, 16 aa, Artificial sequence
  Protein classification predicting sequence
TIYLANYTLPDSPFLK

SEQ ID NO: 19585 - protein, 15 aa, Artificial sequence
  Protein classification predicting sequence
AHFILFVFTVSTIFH

SEQ ID NO: 19586 - protein, 14 aa, Artificial sequence
  Protein classification predicting sequence
QQRLAKIQAMWELP

SEQ ID NO: 19587 - protein, 19 aa, Artificial sequence
  Protein classification predicting sequence
QIPVLASTSKALGPSQLRG

SEQ ID NO: 19588 - protein, 53 aa, Artificial sequence
  Protein classification predicting sequence
WTINAIGRLGNQMGEYATLYALAKMNGRPAFIPAQMHSTLAPIFRITLPVLHS

SEQ ID NO: 19589 - protein, 28 aa, Artificial sequence
  Protein classification predicting sequence
EILQEFTLHDHVREEAQKFLRGLQVNGS

SEQ ID NO: 19590 - protein, 12 aa, Artificial sequence
  Protein classification predicting sequence
TFVGVHVRRGDY

SEQ ID NO: 19591 - protein, 7 aa, Artificial sequence
  Protein classification predicting sequence
GMWTINA

SEQ ID NO: 19592 - protein, 19 aa, Artificial sequence
  Protein classification predicting sequence
PWQNYHLNDWMEERYRHIP

SEQ ID NO: 19593 - protein, 9 aa, Artificial sequence
  Protein classification predicting sequence
VWKGVVADR

SEQ ID NO: 19594 - protein, 13 aa, Artificial sequence
  Protein classification predicting sequence
MTIGTFGFWAAYL

SEQ ID NO: 19595 - protein, 9 aa, Artificial sequence
  Protein classification predicting sequence
GGDTVYLAN

SEQ ID NO: 19596 - protein, 7 aa, Artificial sequence
  Protein classification predicting sequence
CFFSYLR

SEQ ID NO: 19597 - protein, 9 aa, Artificial sequence
  Protein classification predicting sequence
PVALSRCSE

SEQ ID NO: 19598 - protein, 10 aa, Artificial sequence
  Protein classification predicting sequence
WFSMESPSNC

SEQ ID NO: 19599 - protein, 8 aa, Artificial sequence
  Protein classification predicting sequence
PYGWLEPW

SEQ ID NO: 19600 - protein, 12 aa, Artificial sequence
  Protein classification predicting sequence
AWAVPVVLGPSR

SEQ ID NO: 19601 - protein, 9 aa, Artificial sequence
  Protein classification predicting sequence
DFQSPKDLA

SEQ ID NO: 19602 - protein, 12 aa, Artificial sequence
  Protein classification predicting sequence
ITADRKVYPQAD

SEQ ID NO: 19603 - protein, 9 aa, Artificial sequence
  Protein classification predicting sequence
VIVHHWDIM

SEQ ID NO: 19604 - protein, 12 aa, Artificial sequence
  Protein classification predicting sequence
RCSEMVPGAADC

SEQ ID NO: 19605 - protein, 12 aa, Artificial sequence
  Protein classification predicting sequence
VYPQADAVIVHH

SEQ ID NO: 19606 - protein, 22 aa, Artificial sequence
  Protein classification predicting sequence
YYQSLQAHLKVDVYGRSHKPLP

SEQ ID NO: 19607 - protein, 18 aa, Artificial sequence
  Protein classification predicting sequence
LLFQLLVAVCFFSYLRVS

SEQ ID NO: 19608 - protein, 10 aa, Artificial sequence
  Protein classification predicting sequence
APNGSRCQDS

SEQ ID NO: 19609 - protein, 7 aa, Artificial sequence
  Protein classification predicting sequence
ADCNITA

SEQ ID NO: 19610 - protein, 6 aa, Artificial sequence
  Protein classification predicting sequence
MYNPSA

SEQ ID NO: 19611 - protein, 10 aa, Artificial sequence
  Protein classification predicting sequence
SARVRYYQSL

SEQ ID NO: 19612 - protein, 9 aa, Artificial sequence
  Protein classification predicting sequence
AHLKVDVYG

SEQ ID NO: 19613 - protein, 21 aa, Artificial sequence
  Protein classification predicting sequence
GTMMETLSRYKFYLAFENSLH

SEQ ID NO: 19614 - protein, 6 aa, Artificial sequence
  Protein classification predicting sequence
WRRCLA

SEQ ID NO: 19615 - protein, 20 aa, Artificial sequence
  Protein classification predicting sequence
HPPLNLSAKTELVAWAVSNW

SEQ ID NO: 19616 - protein, 5 aa, Artificial sequence
  Protein classification predicting sequence
AKPQW

SEQ ID NO: 19617 - protein, 19 aa, Artificial sequence
  Protein classification predicting sequence
GTMMETLSRYKFYLAFENS

SEQ ID NO: 19618 - protein, 21 aa, Artificial sequence
  Protein classification predicting sequence
LLFQLLVAVCFFSYLRVSRDD

SEQ ID NO: 19619 - protein, 15 aa, Artificial sequence
  Protein classification predicting sequence
SIPLILLWTWPFNKP

SEQ ID NO: 19620 - protein, 8 aa, Artificial sequence
  Protein classification predicting sequence
ALPRCSEM

SEQ ID NO: 19621 - protein, 9 aa, Artificial sequence
  Protein classification predicting sequence
FCKACWKLQ

SEQ ID NO: 19622 - protein, 6 aa, Artificial sequence
  Protein classification predicting sequence
ESRYQT

SEQ ID NO: 19623 - protein, 11 aa, Artificial sequence
  Protein classification predicting sequence
AVCFFSYLRVS

SEQ ID NO: 19624 - protein, 8 aa, Artificial sequence
  Protein classification predicting sequence
QGQRWIWF

SEQ ID NO: 19625 - protein, 14 aa, Artificial sequence
  Protein classification predicting sequence
SWALDFCKACWKLQ

SEQ ID NO: 19626 - protein, 25 aa, Artificial sequence
  Protein classification predicting sequence
NWRYATGGWETVFRPVSETCTDRSG

SEQ ID NO: 19627 - protein, 17 aa, Artificial sequence
  Protein classification predicting sequence
NKGCGYGCQLHHVVYCF

SEQ ID NO: 19628 - protein, 15 aa, Artificial sequence
  Protein classification predicting sequence
PRPPYLPLAVPEDLA

SEQ ID NO: 19629 - protein, 7 aa, Artificial sequence
  Protein classification predicting sequence
GGQNAHN

SEQ ID NO: 19630 - protein, 8 aa, Artificial sequence
  Protein classification predicting sequence
VAGNHWDG

SEQ ID NO: 19631 - protein, 36 aa, Artificial sequence
  Protein classification predicting sequence
WTGSWRWIMLILFAWGTLLFYIGGHLVRDNDHPDHS

SEQ ID NO: 19632 - protein, 37 aa, Artificial sequence
  Protein classification predicting sequence
RELSKILAKLERLKQQNEDLRRMAESLRIPEGPIDQG

SEQ ID NO: 19633 - protein, 12 aa, Artificial sequence
  Protein classification predicting sequence
LEGNELQRHADE

SEQ ID NO: 19634 - protein, 9 aa, Artificial sequence
  Protein classification predicting sequence
STGHWSGEV

SEQ ID NO: 19635 - protein, 70 aa, Artificial sequence
  Protein classification predicting sequence
RVHGDPAVWWVSQFVKYLIRPQPWLEKEIEEATKKLGFKHPVIGVHVRRTDKVGTEAAFHPIEEYMVHVE

SEQ ID NO: 19636 - protein, 10 aa, Artificial sequence
  Protein classification predicting sequence
EAAFHPIEEY

SEQ ID NO: 19637 - protein, 22 aa, Artificial sequence
  Protein classification predicting sequence
FQLLARRMQVDKKRVYLATDDP

SEQ ID NO: 19638 - protein, 57 aa, Artificial sequence
  Protein classification predicting sequence
YEFISDNSISWSAGLHNRYTENSLRGVILDIHFLSQADFLVCTFSSQVCRVAYEIMQ

SEQ ID NO: 19639 - protein, 9 aa, Artificial sequence
  Protein classification predicting sequence
LHPDASANF

SEQ ID NO: 19640 - protein, 20 aa, Artificial sequence
  Protein classification predicting sequence
EIPMEPGDIIGVAGNHWDGY

SEQ ID NO: 19641 - protein, 47 aa, Artificial sequence
  Protein classification predicting sequence
GTWNGNTKVAIKTLKPGTMSPESFLEEAQIMKKLKHDKLVQLYAVVS

SEQ ID NO: 19642 - protein, 10 aa, Artificial sequence
  Protein classification predicting sequence
KLVQLYAVVS

SEQ ID NO: 19643 - protein, 6 aa, Artificial sequence
  Protein classification predicting sequence
FLIRES

SEQ ID NO: 19644 - protein, 14 aa, Artificial sequence
  Protein classification predicting sequence
TTKGAYSLSIRDWD

SEQ ID NO: 19645 - protein, 16 aa, Artificial sequence
  Protein classification predicting sequence
GYRYGTDPTPQHYPSF

SEQ ID NO: 19646 - protein, 7 aa, Artificial sequence
  Protein classification predicting sequence
DLSFQKG

SEQ ID NO: 19647 - protein, 24 aa, Artificial sequence
  Protein classification predicting sequence
KGEKFQILNSSEGDWWEARSLTTG

SEQ ID NO: 19648 - protein, 11 aa, Artificial sequence
  Protein classification predicting sequence
TGYIPSNYVAP

SEQ ID NO: 19649 - protein, 43 aa, Artificial sequence
  Protein classification predicting sequence
TGYIPSNYVAPVDSIQAEEWYFGKLGRKDAERQLLSFGNPRGT

SEQ ID NO: 19650 - protein, 16 aa, Artificial sequence
  Protein classification predicting sequence
GMAYIERMNYIHRDLR

SEQ ID NO: 19651 - protein, 6 aa, Artificial sequence
  Protein classification predicting sequence
SLHELM

SEQ ID NO: 19652 - protein, 6 aa, Artificial sequence
  Protein classification predicting sequence
CWKKDP

SEQ ID NO: 19653 - protein, 9 aa, Artificial sequence
  Protein classification predicting sequence
IPNYNNFHA

SEQ ID NO: 19654 - protein, 7 aa, Artificial sequence
  Protein classification predicting sequence
TVFGGVN

SEQ ID NO: 19655 - protein, 9 aa, Artificial sequence
  Protein classification predicting sequence
RESETTKGA

SEQ ID NO: 19656 - protein, 8 aa, Artificial sequence
  Protein classification predicting sequence
SLSIRDWD

SEQ ID NO: 19657 - protein, 10 aa, Artificial sequence
  Protein classification predicting sequence
VKHYKIRKLD

SEQ ID NO: 19658 - protein, 11 aa, Artificial sequence
  Protein classification predicting sequence
KTLKPGTMSPE

SEQ ID NO: 19659 - protein, 8 aa, Artificial sequence
  Protein classification predicting sequence
EAQIMKKL

SEQ ID NO: 19660 - protein, 6 aa, Artificial sequence
  Protein classification predicting sequence
FELLKV

SEQ ID NO: 19661 - protein, 7 aa, Artificial sequence
  Protein classification predicting sequence
GVLLYEM

SEQ ID NO: 19662 - protein, 6 aa, Artificial sequence
  Protein classification predicting sequence
PCAINY

SEQ ID NO: 19663 - protein, 9 aa, Artificial sequence
  Protein classification predicting sequence
SMRDDFEIT

SEQ ID NO: 19664 - protein, 7 aa, Artificial sequence
  Protein classification predicting sequence
TGIKETF

SEQ ID NO: 19665 - protein, 12 aa, Artificial sequence
  Protein classification predicting sequence
NLIGEHTDYNGG

SEQ ID NO: 19666 - protein, 10 aa, Artificial sequence
  Protein classification predicting sequence
RMTGAGFGGC

SEQ ID NO: 19667 - protein, 5 aa, Artificial sequence
  Protein classification predicting sequence
GIMDQ

SEQ ID NO: 19668 - protein, 11 aa, Artificial sequence
  Protein classification predicting sequence
GIMDQFAIGMG

SEQ ID NO: 19669 - protein, 8 aa, Artificial sequence
  Protein classification predicting sequence
PGRVNLIG

SEQ ID NO: 19670 - protein, 6 aa, Artificial sequence
  Protein classification predicting sequence
FFSPGR

SEQ ID NO: 19671 - protein, 6 aa, Artificial sequence
  Protein classification predicting sequence
GIMDQF

SEQ ID NO: 19672 - protein, 9 aa, Artificial sequence
  Protein classification predicting sequence
DYNGGHVFP

SEQ ID NO: 19673 - protein, 10 aa, Artificial sequence
  Protein classification predicting sequence
IMNTNKRREL

SEQ ID NO: 19674 - protein, 8 aa, Artificial sequence
  Protein classification predicting sequence
DSKYNERR

SEQ ID NO: 19675 - protein, 17 aa, Artificial sequence
  Protein classification predicting sequence
GGVRMTGGGFGGCIVAL

SEQ ID NO: 19676 - protein, 20 aa, Artificial sequence
  Protein classification predicting sequence
VIMNTNKRRELADSKYNERR

SEQ ID NO: 19677 - protein, 24 aa, Artificial sequence
  Protein classification predicting sequence
VIMNTNKRRELADSKYNERRAECE

SEQ ID NO: 19678 - protein, 7 aa, Artificial sequence
  Protein classification predicting sequence
VISGNVP

SEQ ID NO: 19679 - protein, 9 aa, Artificial sequence
  Protein classification predicting sequence
MDQLISALG

SEQ ID NO: 19680 - protein, 9 aa, Artificial sequence
  Protein classification predicting sequence
FGVKALRDV

SEQ ID NO: 19681 - protein, 7 aa, Artificial sequence
  Protein classification predicting sequence
AKRARHV

SEQ ID NO: 19682 - protein, 14 aa, Artificial sequence
  Protein classification predicting sequence
SMRDDFEITVPQID

SEQ ID NO: 19683 - protein, 7 aa, Artificial sequence
  Protein classification predicting sequence
KETFYVC

SEQ ID NO: 19684 - protein, 8 aa, Artificial sequence
  Protein classification predicting sequence
FFSPGRIN

SEQ ID NO: 19685 - protein, 6 aa, Artificial sequence
  Protein classification predicting sequence
DYEVTG

SEQ ID NO: 19686 - protein, 7 aa, Artificial sequence
  Protein classification predicting sequence
GVLGARM

SEQ ID NO: 19687 - protein, 7 aa, Artificial sequence
  Protein classification predicting sequence
YEEVVGY

SEQ ID NO: 19688 - protein, 7 aa, Artificial sequence
  Protein classification predicting sequence
WTNYPKG

SEQ ID NO: 19689 - protein, 7 aa, Artificial sequence
  Protein classification predicting sequence
YVRGVVK

SEQ ID NO: 19690 - protein, 10 aa, Artificial sequence
  Protein classification predicting sequence
EYNTRRQQCE

SEQ ID NO: 19691 - protein, 8 aa, Artificial sequence
  Protein classification predicting sequence
VAKRARHV

SEQ ID NO: 19692 - protein, 7 aa, Artificial sequence
  Protein classification predicting sequence
TGAGFGG

SEQ ID NO: 19693 - protein, 13 aa, Artificial sequence
  Protein classification predicting sequence
ENARTVEAASALE

SEQ ID NO: 19694 - protein, 10 aa, Artificial sequence
  Protein classification predicting sequence
RMTGGGFGGC

SEQ ID NO: 19695 - protein, 31 aa, Artificial sequence
  Protein classification predicting sequence
FGGVDMVISGNVPQGAGLSSSASLEVAVGTV

SEQ ID NO: 19696 - protein, 51 aa, Artificial sequence
  Protein classification predicting sequence
QQLYHLPLDGAQIALNGQEAENQFVGCNCGIMDQLISALGKKDHALLIDCR

SEQ ID NO: 19697 - protein, 49 aa, Artificial sequence
  Protein classification predicting sequence
KAVSMPKGVAVVIINSNFKRTLVGSEYNTRREQCETGARFFQQPALRDV

SEQ ID NO: 19698 - protein, 24 aa, Artificial sequence
  Protein classification predicting sequence
LMAESHASMRDDFEITVPQIDTLV

SEQ ID NO: 19699 - protein, 7 aa, Artificial sequence
  Protein classification predicting sequence
WANYPKG

SEQ ID NO: 19700 - protein, 6 aa, Artificial sequence
  Protein classification predicting sequence
SKYNER

SEQ ID NO: 19701 - protein, 12 aa, Artificial sequence
  Protein classification predicting sequence
DYEVTGIELDTL

SEQ ID NO: 19702 - protein, 12 aa, Artificial sequence
  Protein classification predicting sequence
GVLGARMTGAGF

SEQ ID NO: 19703 - protein, 7 aa, Artificial sequence
  Protein classification predicting sequence
GCAIALV

SEQ ID NO: 19704 - protein, 12 aa, Artificial sequence
  Protein classification predicting sequence
IGEHTDYNDGFV

SEQ ID NO: 19705 - protein, 9 aa, Artificial sequence
  Protein classification predicting sequence
RMTGGGFGG

SEQ ID NO: 19706 - protein, 9 aa, Artificial sequence
  Protein classification predicting sequence
RLDLVKIGK

SEQ ID NO: 19707 - protein, 9 aa, Artificial sequence
  Protein classification predicting sequence
GAGLSSSAS

SEQ ID NO: 19708 - protein, 12 aa, Artificial sequence
  Protein classification predicting sequence
NIIGEHTDYNDG

SEQ ID NO: 19709 - protein, 6 aa, Artificial sequence
  Protein classification predicting sequence
GKKDHA

SEQ ID NO: 19710 - protein, 10 aa, Artificial sequence
  Protein classification predicting sequence
KRARHVITEN

SEQ ID NO: 19711 - protein, 26 aa, Artificial sequence
  Protein classification predicting sequence
VSGNVPQGAGLSSSAALEVVIGQTFK

SEQ ID NO: 19712 - protein, 8 aa, Artificial sequence
  Protein classification predicting sequence
GAGLSSSA

SEQ ID NO: 19713 - protein, 15 aa, Artificial sequence
  Protein classification predicting sequence
ISQAEIALNGQQAEN

SEQ ID NO: 19714 - protein, 11 aa, Artificial sequence
  Protein classification predicting sequence
FVGCNCGIMDQ

SEQ ID NO: 19715 - protein, 11 aa, Artificial sequence
  Protein classification predicting sequence
NHAMLLDCRSL

SEQ ID NO: 19716 - protein, 9 aa, Artificial sequence
  Protein classification predicting sequence
NSNKKRGLV

SEQ ID NO: 19717 - protein, 13 aa, Artificial sequence
  Protein classification predicting sequence
SHASMRDDFEITV

SEQ ID NO: 19718 - protein, 23 aa, Artificial sequence
  Protein classification predicting sequence
SHASMRDDFEITVKEIDTLVEIV

SEQ ID NO: 19719 - protein, 8 aa, Artificial sequence
  Protein classification predicting sequence
IDTLVEIV

SEQ ID NO: 19720 - protein, 13 aa, Artificial sequence
  Protein classification predicting sequence
GGVRMTGGGFGGC

SEQ ID NO: 19721 - protein, 7 aa, Artificial sequence
  Protein classification predicting sequence
DEFDITQ

SEQ ID NO: 19722 - protein, 10 aa, Artificial sequence
  Protein classification predicting sequence
NYIRGVVKCL

SEQ ID NO: 19723 - protein, 33 aa, Artificial sequence
  Protein classification predicting sequence
ISQAEIALNGQQAENEFVGCNCGIMDQMISAEG

SEQ ID NO: 19724 - protein, 14 aa, Artificial sequence
  Protein classification predicting sequence
ENHAMLLDCRSLET

SEQ ID NO: 19725 - protein, 7 aa, Artificial sequence
  Protein classification predicting sequence
VVIINSN

SEQ ID NO: 19726 - protein, 21 aa, Artificial sequence
  Protein classification predicting sequence
VVIINSNKKRGLVDSEYNTRR

SEQ ID NO: 19727 - protein, 20 aa, Artificial sequence
  Protein classification predicting sequence
QCEEAARIFGVKALRDVTIE

SEQ ID NO: 19728 - protein, 20 aa, Artificial sequence
  Protein classification predicting sequence
ELDEMVAKRARHVITENDRT

SEQ ID NO: 19729 - protein, 12 aa, Artificial sequence
  Protein classification predicting sequence
TGLKESIYVCQA

SEQ ID NO: 19730 - protein, 22 aa, Artificial sequence
  Protein classification predicting sequence
KRMGELMAESHASMRDDFEITV

SEQ ID NO: 19731 - protein, 15 aa, Artificial sequence
  Protein classification predicting sequence
APGRVNLIGEHTDYN

SEQ ID NO: 19732 - protein, 24 aa, Artificial sequence
  Protein classification predicting sequence
APGRVNLIGEHTDYNDGFVLPCAI

SEQ ID NO: 19733 - protein, 8 aa, Artificial sequence
  Protein classification predicting sequence
FSLDAPIV

SEQ ID NO: 19734 - protein, 13 aa, Artificial sequence
  Protein classification predicting sequence
GNVPQGAGLSSSA

SEQ ID NO: 19735 - protein, 38 aa, Artificial sequence
  Protein classification predicting sequence
ALNGQEAENQFVGCNCGIMDQLISALGKKDHALLIDCR

SEQ ID NO: 19736 - protein, 7 aa, Artificial sequence
  Protein classification predicting sequence
SFPYSMG

SEQ ID NO: 19737 - protein, 12 aa, Artificial sequence
  Protein classification predicting sequence
SFPYSMGWHGAP

SEQ ID NO: 19738 - protein, 7 aa, Artificial sequence
  Protein classification predicting sequence
HRRYNPL

SEQ ID NO: 19739 - protein, 6 aa, Artificial sequence
  Protein classification predicting sequence
KRPWQG

SEQ ID NO: 19740 - protein, 7 aa, Artificial sequence
  Protein classification predicting sequence
QIFENKG

SEQ ID NO: 19741 - protein, 10 aa, Artificial sequence
  Protein classification predicting sequence
QRDLTAEQAA

SEQ ID NO: 19742 - protein, 12 aa, Artificial sequence
  Protein classification predicting sequence
HFYPPLLRSATV

SEQ ID NO: 19743 - protein, 10 aa, Artificial sequence
  Protein classification predicting sequence
KEMLPIVDKP

SEQ ID NO: 19744 - protein, 16 aa, Artificial sequence
  Protein classification predicting sequence
SKNAVENHFDTSYELE

SEQ ID NO: 19745 - protein, 15 aa, Artificial sequence
  Protein classification predicting sequence
LLEQRVKRQLLAEVQ

SEQ ID NO: 19746 - protein, 11 aa, Artificial sequence
  Protein classification predicting sequence
GDNPFVVVLPD

SEQ ID NO: 19747 - protein, 43 aa, Artificial sequence
  Protein classification predicting sequence
ADPLRYNLAAMIARFNETGRSQVLAKRMPGDLSEYSVIQTKEP

SEQ ID NO: 19748 - protein, 10 aa, Artificial sequence
  Protein classification predicting sequence
RIVEFIEKPD

SEQ ID NO: 19749 - protein, 15 aa, Artificial sequence
  Protein classification predicting sequence
SYDCGKKMGYMQAFV

SEQ ID NO: 19750 - protein, 10 aa, Artificial sequence
  Protein classification predicting sequence
RNLKEGAKFR

SEQ ID NO: 19751 - protein, 16 aa, Artificial sequence
  Protein classification predicting sequence
ARFNETGRSQVLAKRM

SEQ ID NO: 19752 - protein, 23 aa, Artificial sequence
  Protein classification predicting sequence
EGKVSRIVEFIEKPDQPQTLDSD

SEQ ID NO: 19753 - protein, 60 aa, Artificial sequence
  Protein classification predicting sequence
PGAWGRIQLTDAIAELAKKQSVDAMLMTGDSYDCGKKMGYMQAFVKYGLRNLKEGAKFRK

SEQ ID NO: 19754 - protein, 9 aa, Artificial sequence
  Protein classification predicting sequence
GLSSSASLE

SEQ ID NO: 19755 - protein, 6 aa, Artificial sequence
  Protein classification predicting sequence
CGIMDQ

SEQ ID NO: 19756 - protein, 5 aa, Artificial sequence
  Protein classification predicting sequence
WANYV

SEQ ID NO: 19757 - protein, 10 aa, Artificial sequence
  Protein classification predicting sequence
GWLEPLLARI

SEQ ID NO: 19758 - protein, 69 aa, Artificial sequence
  Protein classification predicting sequence
TVVCPIIDVISDDTFEYMAGSDMTYGGFNWKLNFRWYPVPQREMDRRKGDRTLPVRTPTMAGGLFSIDR

SEQ ID NO: 19759 - protein, 11 aa, Artificial sequence
  Protein classification predicting sequence
EDSQVPSIRDC

SEQ ID NO: 19760 - protein, 14 aa, Artificial sequence
  Protein classification predicting sequence
DCSGSRSQQWLLRN

SEQ ID NO: 19761 - protein, 11 aa, Artificial sequence
  Protein classification predicting sequence
GSRSQQWLLRN

SEQ ID NO: 19762 - protein, 7 aa, Artificial sequence
  Protein classification predicting sequence
FLDAHCE

SEQ ID NO: 19763 - protein, 7 aa, Artificial sequence
  Protein classification predicting sequence
WGGENLE

SEQ ID NO: 19764 - protein, 18 aa, Artificial sequence
  Protein classification predicting sequence
WVLLDMFLLLYFSECNKC

SEQ ID NO: 19765 - protein, 11 aa, Artificial sequence
  Protein classification predicting sequence
ERGLPAGDVLE

SEQ ID NO: 19766 - protein, 19 aa, Artificial sequence
  Protein classification predicting sequence
NRSLPDVRLEGCKTKVYPD

SEQ ID NO: 19767 - protein, 8 aa, Artificial sequence
  Protein classification predicting sequence
PGYFAGSN

SEQ ID NO: 19768 - protein, 7 aa, Artificial sequence
  Protein classification predicting sequence
SVLNRSP

SEQ ID NO: 19769 - protein, 7 aa, Artificial sequence
  Protein classification predicting sequence
EIVLVDD

SEQ ID NO: 19770 - protein, 12 aa, Artificial sequence
  Protein classification predicting sequence
VLTFLDSHVECN

SEQ ID NO: 19771 - protein, 7 aa, Artificial sequence
  Protein classification predicting sequence
VVCPVID

SEQ ID NO: 19772 - protein, 5 aa, Artificial sequence
  Protein classification predicting sequence
WQCGG

SEQ ID NO: 19773 - protein, 8 aa, Artificial sequence
  Protein classification predicting sequence
RAAEVWMD

SEQ ID NO: 19774 - protein, 9 aa, Artificial sequence
  Protein classification predicting sequence
ITFHNEARS

SEQ ID NO: 19775 - protein, 9 aa, Artificial sequence
  Protein classification predicting sequence
SPPHLIKEI

SEQ ID NO: 19776 - protein, 9 aa, Artificial sequence
  Protein classification predicting sequence
AEVWMDEYK

SEQ ID NO: 19777 - protein, 5 aa, Artificial sequence
  Protein classification predicting sequence
FKWYL

SEQ ID NO: 19778 - protein, 8 aa, Artificial sequence
  Protein classification predicting sequence
LIDLKDQL

SEQ ID NO: 19779 - protein, 7 aa, Artificial sequence
  Protein classification predicting sequence
PARSNHR

SEQ ID NO: 19780 - protein, 6 aa, Artificial sequence
  Protein classification predicting sequence
HQEWAD

SEQ ID NO: 19781 - protein, 6 aa, Artificial sequence
  Protein classification predicting sequence
KWPMSV

SEQ ID NO: 19782 - protein, 7 aa, Artificial sequence
  Protein classification predicting sequence
EIILVDD

SEQ ID NO: 19783 - protein, 7 aa, Artificial sequence
  Protein classification predicting sequence
GLIRARL

SEQ ID NO: 19784 - protein, 7 aa, Artificial sequence
  Protein classification predicting sequence
CGGSLEI

SEQ ID NO: 19785 - protein, 8 aa, Artificial sequence
  Protein classification predicting sequence
WYLENIYP

SEQ ID NO: 19786 - protein, 13 aa, Artificial sequence
  Protein classification predicting sequence
TSVIIVFHNEAWS

SEQ ID NO: 19787 - protein, 8 aa, Artificial sequence
  Protein classification predicting sequence
GDVLTFLD

SEQ ID NO: 19788 - protein, 7 aa, Artificial sequence
  Protein classification predicting sequence
GWLEPLL

SEQ ID NO: 19789 - protein, 15 aa, Artificial sequence
  Protein classification predicting sequence
IVFHNEAWSTLLRTV

SEQ ID NO: 19790 - protein, 7 aa, Artificial sequence
  Protein classification predicting sequence
AGGLFSI

SEQ ID NO: 19791 - protein, 6 aa, Artificial sequence
  Protein classification predicting sequence
IWGGEN

SEQ ID NO: 19792 - protein, 13 aa, Artificial sequence
  Protein classification predicting sequence
ERKGLITARLLGA

SEQ ID NO: 19793 - protein, 9 aa, Artificial sequence
  Protein classification predicting sequence
WLEPLLARI

SEQ ID NO: 19794 - protein, 9 aa, Artificial sequence
  Protein classification predicting sequence
SFRVWQCGG

SEQ ID NO: 19795 - protein, 8 aa, Artificial sequence
  Protein classification predicting sequence
CSHVGHVF

SEQ ID NO: 19796 - protein, 6 aa, Artificial sequence
  Protein classification predicting sequence
VCPVID

SEQ ID NO: 19797 - protein, 7 aa, Artificial sequence
  Protein classification predicting sequence
FHNEAWS

SEQ ID NO: 19798 - protein, 11 aa, Artificial sequence
  Protein classification predicting sequence
GLIRARLRGAA

SEQ ID NO: 19799 - protein, 6 aa, Artificial sequence
  Protein classification predicting sequence
LDSHCE

SEQ ID NO: 19800 - protein, 8 aa, Artificial sequence
  Protein classification predicting sequence
PTMAGGLF

SEQ ID NO: 19801 - protein, 5 aa, Artificial sequence
  Protein classification predicting sequence
VGHVF

SEQ ID NO: 19802 - protein, 11 aa, Artificial sequence
  Protein classification predicting sequence
LVDDASERDFL

SEQ ID NO: 19803 - protein, 12 aa, Artificial sequence
  Protein classification predicting sequence
VITFLDAHCECT

SEQ ID NO: 19804 - protein, 12 aa, Artificial sequence
  Protein classification predicting sequence
TVVCPIIDVISD

SEQ ID NO: 19805 - protein, 12 aa, Artificial sequence
  Protein classification predicting sequence
GGFNWKLNFRWY

SEQ ID NO: 19806 - protein, 9 aa, Artificial sequence
  Protein classification predicting sequence
MAGGLFSID

SEQ ID NO: 19807 - protein, 7 aa, Artificial sequence
  Protein classification predicting sequence
PYTFPGG

SEQ ID NO: 19808 - protein, 8 aa, Artificial sequence
  Protein classification predicting sequence
CHGLGGNQ

SEQ ID NO: 19809 - protein, 6 aa, Artificial sequence
  Protein classification predicting sequence
MAGGLF

SEQ ID NO: 19810 - protein, 10 aa, Artificial sequence
  Protein classification predicting sequence
VHSVLNRSPP

SEQ ID NO: 19811 - protein, 8 aa, Artificial sequence
  Protein classification predicting sequence
RLAEVWMD

SEQ ID NO: 19812 - protein, 6 aa, Artificial sequence
  Protein classification predicting sequence
AEVWMD

SEQ ID NO: 19813 - protein, 8 aa, Artificial sequence
  Protein classification predicting sequence
VLVFLDSH

SEQ ID NO: 19814 - protein, 7 aa, Artificial sequence
  Protein classification predicting sequence
PCSRVGH

SEQ ID NO: 19815 - protein, 12 aa, Artificial sequence
  Protein classification predicting sequence
TINLSKPEKDPK

SEQ ID NO: 19816 - protein, 11 aa, Artificial sequence
  Protein classification predicting sequence
GSNADLPIVGG

SEQ ID NO: 19817 - protein, 6 aa, Artificial sequence
  Protein classification predicting sequence
GIFHPH

SEQ ID NO: 19818 - protein, 16 aa, Artificial sequence
  Protein classification predicting sequence
HIKKENIGLIEVMGLA

SEQ ID NO: 19819 - protein, 14 aa, Artificial sequence
  Protein classification predicting sequence
GSNADLPIVGGSIL

SEQ ID NO: 19820 - protein, 7 aa, Artificial sequence
  Protein classification predicting sequence
HEHYQGG

SEQ ID NO: 19821 - protein, 12 aa, Artificial sequence
  Protein classification predicting sequence
GSNADLPIVGGS

SEQ ID NO: 19822 - protein, 7 aa, Artificial sequence
  Protein classification predicting sequence
GRHTFPM

SEQ ID NO: 19823 - protein, 10 aa, Artificial sequence
  Protein classification predicting sequence
PHHTITPIAR

SEQ ID NO: 19824 - protein, 15 aa, Artificial sequence
  Protein classification predicting sequence
IKKENIGLIEVMGLA

SEQ ID NO: 19825 - protein, 8 aa, Artificial sequence
  Protein classification predicting sequence
RVLEDAGV

SEQ ID NO: 19826 - protein, 9 aa, Artificial sequence
  Protein classification predicting sequence
MGCSNPHPH

SEQ ID NO: 19827 - protein, 14 aa, Artificial sequence
  Protein classification predicting sequence
WGFQYSPYAYFNEH

SEQ ID NO: 19828 - protein, 7 aa, Artificial sequence
  Protein classification predicting sequence
HHTVTPI

SEQ ID NO: 19829 - protein, 8 aa, Artificial sequence
  Protein classification predicting sequence
LDLVLRDN

SEQ ID NO: 19830 - protein, 9 aa, Artificial sequence
  Protein classification predicting sequence
HHTITPIAR

SEQ ID NO: 19831 - protein, 9 aa, Artificial sequence
  Protein classification predicting sequence
AGIVKWPMS

SEQ ID NO: 19832 - protein, 8 aa, Artificial sequence
  Protein classification predicting sequence
VLRDNQTS

SEQ ID NO: 19833 - protein, 15 aa, Artificial sequence
  Protein classification predicting sequence
LEITINLSKPEKDPK

SEQ ID NO: 19834 - protein, 7 aa, Artificial sequence
  Protein classification predicting sequence
YPKCQLC

SEQ ID NO: 19835 - protein, 8 aa, Artificial sequence
  Protein classification predicting sequence
PDGIYHPH

SEQ ID NO: 19836 - protein, 26 aa, Artificial sequence
  Protein classification predicting sequence
DVQHIKKENIGLIEVMGLAILPPRLK

SEQ ID NO: 19837 - protein, 13 aa, Artificial sequence
  Protein classification predicting sequence
LEITINLSKPEKD

SEQ ID NO: 19838 - protein, 7 aa, Artificial sequence
  Protein classification predicting sequence
LCMENEG

SEQ ID NO: 19839 - protein, 20 aa, Artificial sequence
  Protein classification predicting sequence
VIENSDYEELDRIYLTNKVF

SEQ ID NO: 19840 - protein, 21 aa, Artificial sequence
  Protein classification predicting sequence
VNRNFWDTYKSNPEQAIADFY

SEQ ID NO: 19841 - protein, 81 aa, Artificial sequence
  Protein classification predicting sequence
QSKRNDYVKVKAIAQNIAYKAPTKYGDLEITINLSKPEKDPKAIAAAKNAVASDYPKCQLCMENEGYLGRINHPARSNHRV

SEQ ID NO: 19842 - protein, 36 aa, Artificial sequence
  Protein classification predicting sequence
WGFQYSPYAYFNEHSIFFYGKHEPMHISPLTFGRLL

SEQ ID NO: 19843 - protein, 30 aa, Artificial sequence
  Protein classification predicting sequence
PHHTITPIARRKDGKFELDLVLRDNQTSEE

SEQ ID NO: 19844 - protein, 10 aa, Artificial sequence
  Protein classification predicting sequence
PHNTITPIAR

SEQ ID NO: 19845 - protein, 7 aa, Artificial sequence
  Protein classification predicting sequence
LAIIGRY

SEQ ID NO: 19846 - protein, 7 aa, Artificial sequence
  Protein classification predicting sequence
ENHFDTS

SEQ ID NO: 19847 - protein, 7 aa, Artificial sequence
  Protein classification predicting sequence
RVKRQLL

SEQ ID NO: 19848 - protein, 8 aa, Artificial sequence
  Protein classification predicting sequence
EVQSICPP

SEQ ID NO: 19849 - protein, 7 aa, Artificial sequence
  Protein classification predicting sequence
QLTDAID

SEQ ID NO: 19850 - protein, 7 aa, Artificial sequence
  Protein classification predicting sequence
GYMQAFV

SEQ ID NO: 19851 - protein, 7 aa, Artificial sequence
  Protein classification predicting sequence
IPAAGLG

SEQ ID NO: 19852 - protein, 34 aa, Artificial sequence
  Protein classification predicting sequence
PLPKDCPVSSYNEWDPLEEVIVGRAENACVPPFT

SEQ ID NO: 19853 - protein, 16 aa, Artificial sequence
  Protein classification predicting sequence
EVKANTYEKYWPFYQK

SEQ ID NO: 19854 - protein, 22 aa, Artificial sequence
  Protein classification predicting sequence
VLSNPDRPCHQIDLFKKAGWTI

SEQ ID NO: 19855 - protein, 44 aa, Artificial sequence
  Protein classification predicting sequence
IPDDHPLWMSSKWLSMNVLMLDEKRVMVDANEVPIQKMFEKLGI

SEQ ID NO: 19856 - protein, 13 aa, Artificial sequence
  Protein classification predicting sequence
KYKTPDFESTGLY

SEQ ID NO: 19857 - protein, 16 aa, Artificial sequence
  Protein classification predicting sequence
RFFEYRAYRSIIKDYF

SEQ ID NO: 19858 - protein, 45 aa, Artificial sequence
  Protein classification predicting sequence
SVEDRHKLAAQGKFVTTEFEPCFDAADFIRAGRDIFAQRSQVTNY

SEQ ID NO: 19859 - protein, 9 aa, Artificial sequence
  Protein classification predicting sequence
KEIPEYSHL

SEQ ID NO: 19860 - protein, 9 aa, Artificial sequence
  Protein classification predicting sequence
EGKIEFRVV

SEQ ID NO: 19861 - protein, 12 aa, Artificial sequence
  Protein classification predicting sequence
ELQNHAAAWPFL

SEQ ID NO: 19862 - protein, 13 aa, Artificial sequence
  Protein classification predicting sequence
RLVYDRSHLSMAV

SEQ ID NO: 19863 - protein, 7 aa, Artificial sequence
  Protein classification predicting sequence
PVNKEEV

SEQ ID NO: 19864 - protein, 8 aa, Artificial sequence
  Protein classification predicting sequence
LTGLKNIF

SEQ ID NO: 19865 - protein, 9 aa, Artificial sequence
  Protein classification predicting sequence
FAEIVFCAI

SEQ ID NO: 19866 - protein, 14 aa, Artificial sequence
  Protein classification predicting sequence
GYIKDYEGGTLMQC

SEQ ID NO: 19867 - protein, 8 aa, Artificial sequence
  Protein classification predicting sequence
PMDLSTME

SEQ ID NO: 19868 - protein, 7 aa, Artificial sequence
  Protein classification predicting sequence
HLMNHLK

SEQ ID NO: 19869 - protein, 11 aa, Artificial sequence
  Protein classification predicting sequence
YAIGYFKKQGF

SEQ ID NO: 19870 - protein, 8 aa, Artificial sequence
  Protein classification predicting sequence
GYIKDYEG

SEQ ID NO: 19871 - protein, 6 aa, Artificial sequence
  Protein classification predicting sequence
GGIIDD

SEQ ID NO: 19872 - protein, 7 aa, Artificial sequence
  Protein classification predicting sequence
AIQGPKA

SEQ ID NO: 19873 - protein, 10 aa, Artificial sequence
  Protein classification predicting sequence
EAGLGWLVHL

SEQ ID NO: 19874 - protein, 8 aa, Artificial sequence
  Protein classification predicting sequence
VVKRPFYR

SEQ ID NO: 19875 - protein, 9 aa, Artificial sequence
  Protein classification predicting sequence
ASEADLKKT

SEQ ID NO: 19876 - protein, 7 aa, Artificial sequence
  Protein classification predicting sequence
AHGGKMV

SEQ ID NO: 19877 - protein, 11 aa, Artificial sequence
  Protein classification predicting sequence
NCRENGSLFDV

SEQ ID NO: 19878 - protein, 9 aa, Artificial sequence
  Protein classification predicting sequence
GPPARSHSE

SEQ ID NO: 19879 - protein, 7 aa, Artificial sequence
  Protein classification predicting sequence
TSGGFSP

SEQ ID NO: 19880 - protein, 7 aa, Artificial sequence
  Protein classification predicting sequence
GYTGEDG

SEQ ID NO: 19881 - protein, 9 aa, Artificial sequence
  Protein classification predicting sequence
GYTGEDGFE

SEQ ID NO: 19882 - protein, 7 aa, Artificial sequence
  Protein classification predicting sequence
IGEVTSG

SEQ ID NO: 19883 - protein, 28 aa, Artificial sequence
  Protein classification predicting sequence
CGLGARDTLRFEATLPLYGQELSKDITP

SEQ ID NO: 19884 - protein, 82 aa, Artificial sequence
  Protein classification predicting sequence
EVAQLAIQGPKAEGILQKVVSEDLKEIKFFKFKNDILVDGIPALVSRTGYTGEDGFEIYCKSEDAAKLWEKLLEVGAEEGLK

SEQ ID NO: 19885 - protein, 13 aa, Artificial sequence
  Protein classification predicting sequence
CGLGARDTLRFEA

SEQ ID NO: 19886 - protein, 7 aa, Artificial sequence
  Protein classification predicting sequence
YLLVVNA

SEQ ID NO: 19887 - protein, 8 aa, Artificial sequence
  Protein classification predicting sequence
NASNIEKD

SEQ ID NO: 19888 - protein, 6 aa, Artificial sequence
  Protein classification predicting sequence
CLYGND

SEQ ID NO: 19889 - protein, 7 aa, Artificial sequence
  Protein classification predicting sequence
EHEAVRT

SEQ ID NO: 19890 - protein, 20 aa, Artificial sequence
  Protein classification predicting sequence
AQYTAMCYENGGTVDDLLIY

SEQ ID NO: 19891 - protein, 11 aa, Artificial sequence
  Protein classification predicting sequence
PIEAGIGFAVK

SEQ ID NO: 19892 - protein, 8 aa, Artificial sequence
  Protein classification predicting sequence
GAPRKLVG

SEQ ID NO: 19893 - protein, 6 aa, Artificial sequence
  Protein classification predicting sequence
TPFYKR

SEQ ID NO: 19894 - protein, 6 aa, Artificial sequence
  Protein classification predicting sequence
EHHAVR

SEQ ID NO: 19895 - protein, 6 aa, Artificial sequence
  Protein classification predicting sequence
DDLIVY

SEQ ID NO: 19896 - protein, 21 aa, Artificial sequence
  Protein classification predicting sequence
YGGKTIDFGGWELPVQFSSIK

SEQ ID NO: 19897 - protein, 8 aa, Artificial sequence
  Protein classification predicting sequence
AQYTAMCY

SEQ ID NO: 19898 - protein, 7 aa, Artificial sequence
  Protein classification predicting sequence
GGTVDDL

SEQ ID NO: 19899 - protein, 9 aa, Artificial sequence
  Protein classification predicting sequence
RTGYTGEDG

SEQ ID NO: 19900 - protein, 7 aa, Artificial sequence
  Protein classification predicting sequence
GTQSPTL

SEQ ID NO: 19901 - protein, 7 aa, Artificial sequence
  Protein classification predicting sequence
GLFDVSH

SEQ ID NO: 19902 - protein, 6 aa, Artificial sequence
  Protein classification predicting sequence
FDVSHM

SEQ ID NO: 19903 - protein, 7 aa, Artificial sequence
  Protein classification predicting sequence
GGIIDDL

SEQ ID NO: 19904 - protein, 6 aa, Artificial sequence
  Protein classification predicting sequence
ARMVDF

SEQ ID NO: 19905 - protein, 14 aa, Artificial sequence
  Protein classification predicting sequence
GGVIDDLIVYYFTE

SEQ ID NO: 19906 - protein, 9 aa, Artificial sequence
  Protein classification predicting sequence
LYVVSNAGC

SEQ ID NO: 19907 - protein, 15 aa, Artificial sequence
  Protein classification predicting sequence
ARDSLRLEAGLCLYG

SEQ ID NO: 19908 - protein, 8 aa, Artificial sequence
  Protein classification predicting sequence
WTLGKRRR

SEQ ID NO: 19909 - protein, 9 aa, Artificial sequence
  Protein classification predicting sequence
GLFDVSHMG

SEQ ID NO: 19910 - protein, 7 aa, Artificial sequence
  Protein classification predicting sequence
ANDVAKL

SEQ ID NO: 19911 - protein, 9 aa, Artificial sequence
  Protein classification predicting sequence
GKALYSGML

SEQ ID NO: 19912 - protein, 10 aa, Artificial sequence
  Protein classification predicting sequence
ARTGYTGEDG

SEQ ID NO: 19913 - protein, 15 aa, Artificial sequence
  Protein classification predicting sequence
PCGLGARDTLRLEAG

SEQ ID NO: 19914 - protein, 13 aa, Artificial sequence
  Protein classification predicting sequence
GLGARDTLRLEAG

SEQ ID NO: 19915 - protein, 21 aa, Artificial sequence
  Protein classification predicting sequence
GSRTREFLRYLLANDVAKLTK

SEQ ID NO: 19916 - protein, 19 aa, Artificial sequence
  Protein classification predicting sequence
PCGLGARDTLRLEAGMNLY

SEQ ID NO: 19917 - protein, 17 aa, Artificial sequence
  Protein classification predicting sequence
GLGARDTLRLEAGMNLY

SEQ ID NO: 19918 - protein, 6 aa, Artificial sequence
  Protein classification predicting sequence
KQTPLY

SEQ ID NO: 19919 - protein, 8 aa, Artificial sequence
  Protein classification predicting sequence
MPLHYGSQ

SEQ ID NO: 19920 - protein, 18 aa, Artificial sequence
  Protein classification predicting sequence
RTREFLRYLLANDVAKLT

SEQ ID NO: 19921 - protein, 10 aa, Artificial sequence
  Protein classification predicting sequence
GGVIDDLIVY

SEQ ID NO: 19922 - protein, 14 aa, Artificial sequence
  Protein classification predicting sequence
ISPLAANMGWTIAW

SEQ ID NO: 19923 - protein, 8 aa, Artificial sequence
  Protein classification predicting sequence
TEKGVLRN

SEQ ID NO: 19924 - protein, 8 aa, Artificial sequence
  Protein classification predicting sequence
SIALARVP

SEQ ID NO: 19925 - protein, 13 aa, Artificial sequence
  Protein classification predicting sequence
DERSLLALQGPLA

SEQ ID NO: 19926 - protein, 11 aa, Artificial sequence
  Protein classification predicting sequence
LQHLTKEDLSK

SEQ ID NO: 19927 - protein, 11 aa, Artificial sequence
  Protein classification predicting sequence
PVQFSSIKEEH

SEQ ID NO: 19928 - protein, 11 aa, Artificial sequence
  Protein classification predicting sequence
RTGYTGEDGFE

SEQ ID NO: 19929 - protein, 6 aa, Artificial sequence
  Protein classification predicting sequence
LKRTPL

SEQ ID NO: 19930 - protein, 7 aa, Artificial sequence
  Protein classification predicting sequence
KMPFVPT

SEQ ID NO: 19931 - protein, 7 aa, Artificial sequence
  Protein classification predicting sequence
MVDFHGW

SEQ ID NO: 19932 - protein, 6 aa, Artificial sequence
  Protein classification predicting sequence
GWDMPL

SEQ ID NO: 19933 - protein, 6 aa, Artificial sequence
  Protein classification predicting sequence
GKAQYT

SEQ ID NO: 19934 - protein, 7 aa, Artificial sequence
  Protein classification predicting sequence
VVNSATR

SEQ ID NO: 19935 - protein, 7 aa, Artificial sequence
  Protein classification predicting sequence
TSGTFSP

SEQ ID NO: 19936 - protein, 11 aa, Artificial sequence
  Protein classification predicting sequence
GYTGEDGFEIY

SEQ ID NO: 19937 - protein, 12 aa, Artificial sequence
  Protein classification predicting sequence
LYGQELSKDITP

SEQ ID NO: 19938 - protein, 7 aa, Artificial sequence
  Protein classification predicting sequence
IERGIPR

SEQ ID NO: 19939 - protein, 8 aa, Artificial sequence
  Protein classification predicting sequence
LVVNAANT

SEQ ID NO: 19940 - protein, 10 aa, Artificial sequence
  Protein classification predicting sequence
TNEKGGAIDD

SEQ ID NO: 19941 - protein, 17 aa, Artificial sequence
  Protein classification predicting sequence
LTRTGYTGEDGFEISVP

SEQ ID NO: 19942 - protein, 7 aa, Artificial sequence
  Protein classification predicting sequence
ITPIEAG

SEQ ID NO: 19943 - protein, 13 aa, Artificial sequence
  Protein classification predicting sequence
GKRRRAEGGFLGA

SEQ ID NO: 19944 - protein, 7 aa, Artificial sequence
  Protein classification predicting sequence
PLHYGSQ

SEQ ID NO: 19945 - protein, 14 aa, Artificial sequence
  Protein classification predicting sequence
GLGARDTLRLEAGM

SEQ ID NO: 19946 - protein, 6 aa, Artificial sequence
  Protein classification predicting sequence
RDFIGR

SEQ ID NO: 19947 - protein, 10 aa, Artificial sequence
  Protein classification predicting sequence
NAGCRDKDLA

SEQ ID NO: 19948 - protein, 7 aa, Artificial sequence
  Protein classification predicting sequence
RTGYTGE

SEQ ID NO: 19949 - protein, 7 aa, Artificial sequence
  Protein classification predicting sequence
IGLALID

SEQ ID NO: 19950 - protein, 20 aa, Artificial sequence
  Protein classification predicting sequence
FAEFGGWLMPVSYAGTVSEH

SEQ ID NO: 19951 - protein, 10 aa, Artificial sequence
  Protein classification predicting sequence
PGKAQYTLCC

SEQ ID NO: 19952 - protein, 9 aa, Artificial sequence
  Protein classification predicting sequence
NAANTAAVV

SEQ ID NO: 19953 - protein, 11 aa, Artificial sequence
  Protein classification predicting sequence
GYELLPPWESA

SEQ ID NO: 19954 - protein, 11 aa, Artificial sequence
  Protein classification predicting sequence
PAGLGARDTLR

SEQ ID NO: 19955 - protein, 11 aa, Artificial sequence
  Protein classification predicting sequence
AEHEAVRTDAG

SEQ ID NO: 19956 - protein, 10 aa, Artificial sequence
  Protein classification predicting sequence
DAGMFDVSHM

SEQ ID NO: 19957 - protein, 6 aa, Artificial sequence
  Protein classification predicting sequence
ATREKD

SEQ ID NO: 19958 - protein, 8 aa, Artificial sequence
  Protein classification predicting sequence
GLAWTVDL

SEQ ID NO: 19959 - protein, 6 aa, Artificial sequence
  Protein classification predicting sequence
GEITSG

SEQ ID NO: 19960 - protein, 7 aa, Artificial sequence
  Protein classification predicting sequence
FAEFGGW

SEQ ID NO: 19961 - protein, 9 aa, Artificial sequence
  Protein classification predicting sequence
GPGAAQFVN

SEQ ID NO: 19962 - protein, 12 aa, Artificial sequence
  Protein classification predicting sequence
GGVIDDLIAYYV

SEQ ID NO: 19963 - protein, 16 aa, Artificial sequence
  Protein classification predicting sequence
GAKTIDFGGWDLPVQF

SEQ ID NO: 19964 - protein, 7 aa, Artificial sequence
  Protein classification predicting sequence
PGKAQYT

SEQ ID NO: 19965 - protein, 9 aa, Artificial sequence
  Protein classification predicting sequence
GLGARDTLR

SEQ ID NO: 19966 - protein, 10 aa, Artificial sequence
  Protein classification predicting sequence
LYGQELSKDI

SEQ ID NO: 19967 - protein, 23 aa, Artificial sequence
  Protein classification predicting sequence
RLTGLGARDSLRLEAGLCLYGND

SEQ ID NO: 19968 - protein, 7 aa, Artificial sequence
  Protein classification predicting sequence
RSHSEIQ

SEQ ID NO: 19969 - protein, 18 aa, Artificial sequence
  Protein classification predicting sequence
NIGEVTSGGFSPCLKKNI

SEQ ID NO: 19970 - protein, 6 aa, Artificial sequence
  Protein classification predicting sequence
EKGVLR

SEQ ID NO: 19971 - protein, 7 aa, Artificial sequence
  Protein classification predicting sequence
FDISHMG

SEQ ID NO: 19972 - protein, 10 aa, Artificial sequence
  Protein classification predicting sequence
RDTLRLEAGM

SEQ ID NO: 19973 - protein, 7 aa, Artificial sequence
  Protein classification predicting sequence
MVPFAGW

SEQ ID NO: 19974 - protein, 9 aa, Artificial sequence
  Protein classification predicting sequence
VDFGGWDMP

SEQ ID NO: 19975 - protein, 8 aa, Artificial sequence
  Protein classification predicting sequence
ITVRDDLS

SEQ ID NO: 19976 - protein, 6 aa, Artificial sequence
  Protein classification predicting sequence
IAVQGP

SEQ ID NO: 19977 - protein, 51 aa, Artificial sequence
  Protein classification predicting sequence
GKALYSGMLNASGGVIDDLIVYYFTEDFFRLVVNSATREKDLSWITQHAEP

SEQ ID NO: 19978 - protein, 27 aa, Artificial sequence
  Protein classification predicting sequence
LVGLVMTEKGVLRNELPVRFTDAQGNQ

SEQ ID NO: 19979 - protein, 6 aa, Artificial sequence
  Protein classification predicting sequence
FVRNGK

SEQ ID NO: 19980 - protein, 7 aa, Artificial sequence
  Protein classification predicting sequence
KIVIRGK

SEQ ID NO: 19981 - protein, 9 aa, Artificial sequence
  Protein classification predicting sequence
TPLYQNYVD

SEQ ID NO: 19982 - protein, 6 aa, Artificial sequence
  Protein classification predicting sequence
VNAANT

SEQ ID NO: 19983 - protein, 17 aa, Artificial sequence
  Protein classification predicting sequence
ILSQSGYTGEDGFEIYC

SEQ ID NO: 19984 - protein, 11 aa, Artificial sequence
  Protein classification predicting sequence
PCGLGARDTLR

SEQ ID NO: 19985 - protein, 13 aa, Artificial sequence
  Protein classification predicting sequence
ESITPYEGGIAFA

SEQ ID NO: 19986 - protein, 8 aa, Artificial sequence
  Protein classification predicting sequence
FIGKSVLK

SEQ ID NO: 19987 - protein, 9 aa, Artificial sequence
  Protein classification predicting sequence
RRTVGLELL

SEQ ID NO: 19988 - protein, 8 aa, Artificial sequence
  Protein classification predicting sequence
VTSGTQSP

SEQ ID NO: 19989 - protein, 17 aa, Artificial sequence
  Protein classification predicting sequence
VTSGTQSPSSGKSIALA

SEQ ID NO: 19990 - protein, 9 aa, Artificial sequence
  Protein classification predicting sequence
AKIVKKNQI

SEQ ID NO: 19991 - protein, 28 aa, Artificial sequence
  Protein classification predicting sequence
GAKIVEFGGWAMPVQFSSIKEEHNAVRY

SEQ ID NO: 19992 - protein, 23 aa, Artificial sequence
  Protein classification predicting sequence
PCGLGARDTLRLEAGLPLHGQDL

SEQ ID NO: 19993 - protein, 7 aa, Artificial sequence
  Protein classification predicting sequence
THRALGA

SEQ ID NO: 19994 - protein, 6 aa, Artificial sequence
  Protein classification predicting sequence
MCYENG

SEQ ID NO: 19995 - protein, 14 aa, Artificial sequence
  Protein classification predicting sequence
PCGLGARDTLRLEA

SEQ ID NO: 19996 - protein, 12 aa, Artificial sequence
  Protein classification predicting sequence
GLGARDTLRLEA

SEQ ID NO: 19997 - protein, 8 aa, Artificial sequence
  Protein classification predicting sequence
LYGQDMDE

SEQ ID NO: 19998 - protein, 7 aa, Artificial sequence
  Protein classification predicting sequence
TLQRTPL

SEQ ID NO: 19999 - protein, 8 aa, Artificial sequence
  Protein classification predicting sequence
GWAMPVQF

SEQ ID NO: 20000 - protein, 7 aa, Artificial sequence
  Protein classification predicting sequence
GGVIDDL

SEQ ID NO: 20001 - protein, 10 aa, Artificial sequence
  Protein classification predicting sequence
HYGSQLDEHH

SEQ ID NO: 20002 - protein, 10 aa, Artificial sequence
  Protein classification predicting sequence
TEDFFRLVVN

SEQ ID NO: 20003 - protein, 7 aa, Artificial sequence
  Protein classification predicting sequence
ATREKDL

SEQ ID NO: 20004 - protein, 12 aa, Artificial sequence
  Protein classification predicting sequence
ARTGYTGEDGFE

SEQ ID NO: 20005 - protein, 19 aa, Artificial sequence
  Protein classification predicting sequence
GLGARDTLRLEAGMNLYGQ

SEQ ID NO: 20006 - protein, 10 aa, Artificial sequence
  Protein classification predicting sequence
HYGSQIDEHH

SEQ ID NO: 20007 - protein, 7 aa, Artificial sequence
  Protein classification predicting sequence
FFRLVVN

SEQ ID NO: 20008 - protein, 8 aa, Artificial sequence
  Protein classification predicting sequence
CMLNPQGG

SEQ ID NO: 20009 - protein, 7 aa, Artificial sequence
  Protein classification predicting sequence
LFDVSHM

SEQ ID NO: 20010 - protein, 10 aa, Artificial sequence
  Protein classification predicting sequence
ARDSLRLEAG

SEQ ID NO: 20011 - protein, 23 aa, Artificial sequence
  Protein classification predicting sequence
GLGARDTLRLEAGMNLYGQEMDE

SEQ ID NO: 20012 - protein, 13 aa, Artificial sequence
  Protein classification predicting sequence
MTEKGVLRNELPV

SEQ ID NO: 20013 - protein, 8 aa, Artificial sequence
  Protein classification predicting sequence
HTRWATHG

SEQ ID NO: 20014 - protein, 8 aa, Artificial sequence
  Protein classification predicting sequence
FLEDDDIA

SEQ ID NO: 20015 - protein, 10 aa, Artificial sequence
  Protein classification predicting sequence
VELASDFLDR

SEQ ID NO: 20016 - protein, 22 aa, Artificial sequence
  Protein classification predicting sequence
CGVHINAGPEIGVASTKAYTSQ

SEQ ID NO: 20017 - protein, 6 aa, Artificial sequence
  Protein classification predicting sequence
VASTKA

SEQ ID NO: 20018 - protein, 10 aa, Artificial sequence
  Protein classification predicting sequence
LEGALKIKEI

SEQ ID NO: 20019 - protein, 6 aa, Artificial sequence
  Protein classification predicting sequence
YMHSEG

SEQ ID NO: 20020 - protein, 6 aa, Artificial sequence
  Protein classification predicting sequence
VIPLQL

SEQ ID NO: 20021 - protein, 6 aa, Artificial sequence
  Protein classification predicting sequence
HPQRSD

SEQ ID NO: 20022 - protein, 8 aa, Artificial sequence
  Protein classification predicting sequence
GSPLLIGV

SEQ ID NO: 20023 - protein, 10 aa, Artificial sequence
  Protein classification predicting sequence
VNSHPQRSDK

SEQ ID NO: 20024 - protein, 13 aa, Artificial sequence
  Protein classification predicting sequence
VIHNGIITNYKDL

SEQ ID NO: 20025 - protein, 8 aa, Artificial sequence
  Protein classification predicting sequence
KFLESKGY

SEQ ID NO: 20026 - protein, 13 aa, Artificial sequence
  Protein classification predicting sequence
FESETDTETIAKL

SEQ ID NO: 20027 - protein, 13 aa, Artificial sequence
  Protein classification predicting sequence
TRRGSPLLIGVRS

SEQ ID NO: 20028 - protein, 7 aa, Artificial sequence
  Protein classification predicting sequence
FASDASA

SEQ ID NO: 20029 - protein, 14 aa, Artificial sequence
  Protein classification predicting sequence
IEHTNRVIFLEDDD

SEQ ID NO: 20030 - protein, 16 aa, Artificial sequence
  Protein classification predicting sequence
QTLQMELQQIMKGNFS

SEQ ID NO: 20031 - protein, 10 aa, Artificial sequence
  Protein classification predicting sequence
FMQKEIFEQP

SEQ ID NO: 20032 - protein, 13 aa, Artificial sequence
  Protein classification predicting sequence
FMQKEIFEQPESV

SEQ ID NO: 20033 - protein, 7 aa, Artificial sequence
  Protein classification predicting sequence
LGGLKDH

SEQ ID NO: 20034 - protein, 38 aa, Artificial sequence
  Protein classification predicting sequence
VATRQVLEELTELPVMVELASDFLDRNTPVFRDDVCFF

SEQ ID NO: 20035 - protein, 10 aa, Artificial sequence
  Protein classification predicting sequence
AKCQNALQQV

SEQ ID NO: 20036 - protein, 16 aa, Artificial sequence
  Protein classification predicting sequence
VDCLQGILSVIPLQLL

SEQ ID NO: 20037 - protein, 10 aa, Artificial sequence
  Protein classification predicting sequence
HTRWATHGVP

SEQ ID NO: 20038 - protein, 7 aa, Artificial sequence
  Protein classification predicting sequence
LCEVFCR

SEQ ID NO: 20039 - protein, 8 aa, Artificial sequence
  Protein classification predicting sequence
EMDDFSSP

SEQ ID NO: 20040 - protein, 11 aa, Artificial sequence
  Protein classification predicting sequence
PGKQPLSSMCP

SEQ ID NO: 20041 - protein, 23 aa, Artificial sequence
  Protein classification predicting sequence
LWFGYDVKRAVEEPRLHNQLLPN

SEQ ID NO: 20042 - protein, 13 aa, Artificial sequence
  Protein classification predicting sequence
EDGSAVAATSTIN

SEQ ID NO: 20043 - protein, 7 aa, Artificial sequence
  Protein classification predicting sequence
TVSPSYA

SEQ ID NO: 20044 - protein, 13 aa, Artificial sequence
  Protein classification predicting sequence
PSRFEPCGLTQLY

SEQ ID NO: 20045 - protein, 6 aa, Artificial sequence
  Protein classification predicting sequence
SWEKSA

SEQ ID NO: 20046 - protein, 6 aa, Artificial sequence
  Protein classification predicting sequence
WNYWKP

SEQ ID NO: 20047 - protein, 14 aa, Artificial sequence
  Protein classification predicting sequence
HCHDWHTGMIPVWM

SEQ ID NO: 20048 - protein, 14 aa, Artificial sequence
  Protein classification predicting sequence
EGLLSFISGKLSGI

SEQ ID NO: 20049 - protein, 6 aa, Artificial sequence
  Protein classification predicting sequence
RPGNPY

SEQ ID NO: 20050 - protein, 10 aa, Artificial sequence
  Protein classification predicting sequence
MPSAFEPCGL

SEQ ID NO: 20051 - protein, 6 aa, Artificial sequence
  Protein classification predicting sequence
YQGPWR

SEQ ID NO: 20052 - protein, 10 aa, Artificial sequence
  Protein classification predicting sequence
YGEKLEGLLS

SEQ ID NO: 20053 - protein, 7 aa, Artificial sequence
  Protein classification predicting sequence
GILNGID

SEQ ID NO: 20054 - protein, 18 aa, Artificial sequence
  Protein classification predicting sequence
PSRFEPCGLTQLYALRYG

SEQ ID NO: 20055 - protein, 6 aa, Artificial sequence
  Protein classification predicting sequence
VHAHDW

SEQ ID NO: 20056 - protein, 7 aa, Artificial sequence
  Protein classification predicting sequence
DLFLMPS

SEQ ID NO: 20057 - protein, 8 aa, Artificial sequence
  Protein classification predicting sequence
FGMGLEGV

SEQ ID NO: 20058 - protein, 60 aa, Artificial sequence
  Protein classification predicting sequence
NKRALQRYFGLPEKEDTPIISMVTRLTKQKGLDLVRTVFREIMEEDVQCIILGSGDSEYE

SEQ ID NO: 20059 - protein, 6 aa, Artificial sequence
  Protein classification predicting sequence
VRIILP

SEQ ID NO: 20060 - protein, 25 aa, Artificial sequence
  Protein classification predicting sequence
SYDEETGEGNGFSFTNFNAHDMLHT

SEQ ID NO: 20061 - protein, 7 aa, Artificial sequence
  Protein classification predicting sequence
WRNQYCG

SEQ ID NO: 20062 - protein, 9 aa, Artificial sequence
  Protein classification predicting sequence
PIVRETGGL

SEQ ID NO: 20063 - protein, 11 aa, Artificial sequence
  Protein classification predicting sequence
LYGHYDDGERF

SEQ ID NO: 20064 - protein, 10 aa, Artificial sequence
  Protein classification predicting sequence
VSPTYKEEIQ

SEQ ID NO: 20065 - protein, 7 aa, Artificial sequence
  Protein classification predicting sequence
NKRALQR

SEQ ID NO: 20066 - protein, 7 aa, Artificial sequence
  Protein classification predicting sequence
IDNEYYF

SEQ ID NO: 20067 - protein, 6 aa, Artificial sequence
  Protein classification predicting sequence
DDGERF

SEQ ID NO: 20068 - protein, 7 aa, Artificial sequence
  Protein classification predicting sequence
GERFAFF

SEQ ID NO: 20069 - protein, 9 aa, Artificial sequence
  Protein classification predicting sequence
HDWHTAMVN

SEQ ID NO: 20070 - protein, 17 aa, Artificial sequence
  Protein classification predicting sequence
ISMVTRLTKQKGLDLVR

SEQ ID NO: 20071 - protein, 12 aa, Artificial sequence
  Protein classification predicting sequence
FEPCGLGQLIAL

SEQ ID NO: 20072 - protein, 6 aa, Artificial sequence
  Protein classification predicting sequence
VFTIHN

SEQ ID NO: 20073 - protein, 6 aa, Artificial sequence
  Protein classification predicting sequence
CGLTQL

SEQ ID NO: 20074 - protein, 7 aa, Artificial sequence
  Protein classification predicting sequence
HDWHAGL

SEQ ID NO: 20075 - protein, 6 aa, Artificial sequence
  Protein classification predicting sequence
FTIHNL

SEQ ID NO: 20076 - protein, 9 aa, Artificial sequence
  Protein classification predicting sequence
VSRLTNQKG

SEQ ID NO: 20077 - protein, 6 aa, Artificial sequence
  Protein classification predicting sequence
VTTVSP

SEQ ID NO: 20078 - protein, 7 aa, Artificial sequence
  Protein classification predicting sequence
EPCGLTQ

SEQ ID NO: 20079 - protein, 7 aa, Artificial sequence
  Protein classification predicting sequence
HNLAYQG

SEQ ID NO: 20080 - protein, 8 aa, Artificial sequence
  Protein classification predicting sequence
KTGGLADV

SEQ ID NO: 20081 - protein, 6 aa, Artificial sequence
  Protein classification predicting sequence
GSPYHD

SEQ ID NO: 20082 - protein, 9 aa, Artificial sequence
  Protein classification predicting sequence
AMGLKVDDK

SEQ ID NO: 20083 - protein, 11 aa, Artificial sequence
  Protein classification predicting sequence
VSRLTSQKGLD

SEQ ID NO: 20084 - protein, 8 aa, Artificial sequence
  Protein classification predicting sequence
LLEQGGQL

SEQ ID NO: 20085 - protein, 10 aa, Artificial sequence
  Protein classification predicting sequence
VQRQAMAMDF

SEQ ID NO: 20086 - protein, 7 aa, Artificial sequence
  Protein classification predicting sequence
YGTLPLV

SEQ ID NO: 20087 - protein, 7 aa, Artificial sequence
  Protein classification predicting sequence
GGLADTV

SEQ ID NO: 20088 - protein, 7 aa, Artificial sequence
  Protein classification predicting sequence
GIVNGID

SEQ ID NO: 20089 - protein, 7 aa, Artificial sequence
  Protein classification predicting sequence
VRETGGL

SEQ ID NO: 20090 - protein, 7 aa, Artificial sequence
  Protein classification predicting sequence
DVVGSLP

SEQ ID NO: 20091 - protein, 8 aa, Artificial sequence
  Protein classification predicting sequence
HCHDWHTG

SEQ ID NO: 20092 - protein, 8 aa, Artificial sequence
  Protein classification predicting sequence
LVGIVSRL

SEQ ID NO: 20093 - protein, 15 aa, Artificial sequence
  Protein classification predicting sequence
YNGVGIYLIDAPHLY

SEQ ID NO: 20094 - protein, 7 aa, Artificial sequence
  Protein classification predicting sequence
PAKSVFT

SEQ ID NO: 20095 - protein, 20 aa, Artificial sequence
  Protein classification predicting sequence
DVILVPSRFEPCGLTQLYGL

SEQ ID NO: 20096 - protein, 8 aa, Artificial sequence
  Protein classification predicting sequence
PFLLKEKY

SEQ ID NO: 20097 - protein, 9 aa, Artificial sequence
  Protein classification predicting sequence
TIHNIEFQG

SEQ ID NO: 20098 - protein, 7 aa, Artificial sequence
  Protein classification predicting sequence
RLTKQKG

SEQ ID NO: 20099 - protein, 9 aa, Artificial sequence
  Protein classification predicting sequence
QGGQLALLG

SEQ ID NO: 20100 - protein, 7 aa, Artificial sequence
  Protein classification predicting sequence
HNLAFQG

SEQ ID NO: 20101 - protein, 7 aa, Artificial sequence
  Protein classification predicting sequence
TWCPWYM

SEQ ID NO: 20102 - protein, 6 aa, Artificial sequence
  Protein classification predicting sequence
VSPTYA

SEQ ID NO: 20103 - protein, 6 aa, Artificial sequence
  Protein classification predicting sequence
QKGLDL

SEQ ID NO: 20104 - protein, 6 aa, Artificial sequence
  Protein classification predicting sequence
AHDWHA

SEQ ID NO: 20105 - protein, 7 aa, Artificial sequence
  Protein classification predicting sequence
HNIAFQG

SEQ ID NO: 20106 - protein, 10 aa, Artificial sequence
  Protein classification predicting sequence
VVSRRDTFAG

SEQ ID NO: 20107 - protein, 11 aa, Artificial sequence
  Protein classification predicting sequence
RPGSPYHDTNL

SEQ ID NO: 20108 - protein, 7 aa, Artificial sequence
  Protein classification predicting sequence
LPWSFFN

SEQ ID NO: 20109 - protein, 8 aa, Artificial sequence
  Protein classification predicting sequence
HGLEFNGQ

SEQ ID NO: 20110 - protein, 9 aa, Artificial sequence
  Protein classification predicting sequence
LNGVDEKIW

SEQ ID NO: 20111 - protein, 14 aa, Artificial sequence
  Protein classification predicting sequence
DLLLASRYTRDTLE

SEQ ID NO: 20112 - protein, 16 aa, Artificial sequence
  Protein classification predicting sequence
KAENKRQLQIAMGLKV

SEQ ID NO: 20113 - protein, 13 aa, Artificial sequence
  Protein classification predicting sequence
DKVPLFAVVSRLT

SEQ ID NO: 20114 - protein, 58 aa, Artificial sequence
  Protein classification predicting sequence
GVQIGYHEAFSHRIMGGADVILVPSRFEPCGLTQLYGLKYGTLPLVRRTGGLADTVSD

SEQ ID NO: 20115 - protein, 16 aa, Artificial sequence
  Protein classification predicting sequence
AYTDNVLRFALLGWVG

SEQ ID NO: 20116 - protein, 37 aa, Artificial sequence
  Protein classification predicting sequence
SFLKAGLYYADHITAVSPTYAREITEPQFAYGMEGLL

SEQ ID NO: 20117 - protein, 41 aa, Artificial sequence
  Protein classification predicting sequence
QKGLDLVLEALPGLLEQGGQLALLGAGDPVLQEGFLAAAAE

SEQ ID NO: 20118 - protein, 62 aa, Artificial sequence
  Protein classification predicting sequence
PGQVGVQIGYHEAFSHRIMGGADVILVPSRFEPCGLTQLYGLKYGTLPLVRRTGGLADTVSD

SEQ ID NO: 20119 - protein, 10 aa, Artificial sequence
  Protein classification predicting sequence
LPLVHEVGGL

SEQ ID NO: 20120 - protein, 12 aa, Artificial sequence
  Protein classification predicting sequence
LHVHDYHTAMIP

SEQ ID NO: 20121 - protein, 7 aa, Artificial sequence
  Protein classification predicting sequence
DGTLRWN

SEQ ID NO: 20122 - protein, 12 aa, Artificial sequence
  Protein classification predicting sequence
GEDEDWRFTFFA

SEQ ID NO: 20123 - protein, 16 aa, Artificial sequence
  Protein classification predicting sequence
HCHDWHTGMIPVWMHQ

SEQ ID NO: 20124 - protein, 9 aa, Artificial sequence
  Protein classification predicting sequence
MPSRFEPCG

SEQ ID NO: 20125 - protein, 8 aa, Artificial sequence
  Protein classification predicting sequence
TVFTIHNL

SEQ ID NO: 20126 - protein, 8 aa, Artificial sequence
  Protein classification predicting sequence
GEKLDGLL

SEQ ID NO: 20127 - protein, 9 aa, Artificial sequence
  Protein classification predicting sequence
KSGGLADVA

SEQ ID NO: 20128 - protein, 8 aa, Artificial sequence
  Protein classification predicting sequence
YAENNQAY

SEQ ID NO: 20129 - protein, 8 aa, Artificial sequence
  Protein classification predicting sequence
FFSAACLD

SEQ ID NO: 20130 - protein, 5 aa, Artificial sequence
  Protein classification predicting sequence
CGLNQ

SEQ ID NO: 20131 - protein, 20 aa, Artificial sequence
  Protein classification predicting sequence
FPLLKTGGLADVIGALPAAQ

SEQ ID NO: 20132 - protein, 12 aa, Artificial sequence
  Protein classification predicting sequence
QKGLDLVLEALP

SEQ ID NO: 20133 - protein, 5 aa, Artificial sequence
  Protein classification predicting sequence
SWGYQ

SEQ ID NO: 20134 - protein, 10 aa, Artificial sequence
  Protein classification predicting sequence
SWGYQVTGYY

SEQ ID NO: 20135 - protein, 7 aa, Artificial sequence
  Protein classification predicting sequence
GLYMFDG

SEQ ID NO: 20136 - protein, 9 aa, Artificial sequence
  Protein classification predicting sequence
FDGTPTYEY

SEQ ID NO: 20137 - protein, 9 aa, Artificial sequence
  Protein classification predicting sequence
KWNMGWMND

SEQ ID NO: 20138 - protein, 5 aa, Artificial sequence
  Protein classification predicting sequence
DPIYR

SEQ ID NO: 20139 - protein, 6 aa, Artificial sequence
  Protein classification predicting sequence
GGRENL

SEQ ID NO: 20140 - protein, 12 aa, Artificial sequence
  Protein classification predicting sequence
LPISHDEVVHGK

SEQ ID NO: 20141 - protein, 8 aa, Artificial sequence
  Protein classification predicting sequence
LLFMGQEF

SEQ ID NO: 20142 - protein, 8 aa, Artificial sequence
  Protein classification predicting sequence
FAVWAPNA

SEQ ID NO: 20143 - protein, 7 aa, Artificial sequence
  Protein classification predicting sequence
SVYEVHL

SEQ ID NO: 20144 - protein, 7 aa, Artificial sequence
  Protein classification predicting sequence
LYEHSDP

SEQ ID NO: 20145 - protein, 7 aa, Artificial sequence
  Protein classification predicting sequence
AEESTAW

SEQ ID NO: 20146 - protein, 27 aa, Artificial sequence
  Protein classification predicting sequence
EMTFSMVYAYSENYVLPISHDEVVHGK

SEQ ID NO: 20147 - protein, 11 aa, Artificial sequence
  Protein classification predicting sequence
EHPFGGSWGYQ

SEQ ID NO: 20148 - protein, 7 aa, Artificial sequence
  Protein classification predicting sequence
APTARFG

SEQ ID NO: 20149 - protein, 8 aa, Artificial sequence
  Protein classification predicting sequence
DWNTLIYN

SEQ ID NO: 20150 - protein, 6 aa, Artificial sequence
  Protein classification predicting sequence
GVWELF

SEQ ID NO: 20151 - protein, 7 aa, Artificial sequence
  Protein classification predicting sequence
GSPDGFA

SEQ ID NO: 20152 - protein, 7 aa, Artificial sequence
  Protein classification predicting sequence
DPSGFAW

SEQ ID NO: 20153 - protein, 6 aa, Artificial sequence
  Protein classification predicting sequence
GDFNNW

SEQ ID NO: 20154 - protein, 8 aa, Artificial sequence
  Protein classification predicting sequence
LDWVPSHF

SEQ ID NO: 20155 - protein, 10 aa, Artificial sequence
  Protein classification predicting sequence
HVDGLRVDAV

SEQ ID NO: 20156 - protein, 8 aa, Artificial sequence
  Protein classification predicting sequence
DGLRVDAV

SEQ ID NO: 20157 - protein, 6 aa, Artificial sequence
  Protein classification predicting sequence
MLYLDY

SEQ ID NO: 20158 - protein, 7 aa, Artificial sequence
  Protein classification predicting sequence
PNEFGGR

SEQ ID NO: 20159 - protein, 11 aa, Artificial sequence
  Protein classification predicting sequence
LVSKMPGDWWQ

SEQ ID NO: 20160 - protein, 29 aa, Artificial sequence
  Protein classification predicting sequence
RAYLGFMWAHPGKQLLFMGQEFAQGAEWS

SEQ ID NO: 20161 - protein, 7 aa, Artificial sequence
  Protein classification predicting sequence
PNTASVV

SEQ ID NO: 20162 - protein, 7 aa, Artificial sequence
  Protein classification predicting sequence
LTYRELA

SEQ ID NO: 20163 - protein, 8 aa, Artificial sequence
  Protein classification predicting sequence
SWGYQVTG

SEQ ID NO: 20164 - protein, 18 aa, Artificial sequence
  Protein classification predicting sequence
DGLRVDAVASMLYLDYSR

SEQ ID NO: 20165 - protein, 6 aa, Artificial sequence
  Protein classification predicting sequence
WELFLP

SEQ ID NO: 20166 - protein, 6 aa, Artificial sequence
  Protein classification predicting sequence
SIYEVH

SEQ ID NO: 20167 - protein, 10 aa, Artificial sequence
  Protein classification predicting sequence
GSWGYQPLGL

SEQ ID NO: 20168 - protein, 9 aa, Artificial sequence
  Protein classification predicting sequence
GIGVILDWV

SEQ ID NO: 20169 - protein, 8 aa, Artificial sequence
  Protein classification predicting sequence
GGRENLEA

SEQ ID NO: 20170 - protein, 13 aa, Artificial sequence
  Protein classification predicting sequence
FVLPLSHDEVVHG

SEQ ID NO: 20171 - protein, 9 aa, Artificial sequence
  Protein classification predicting sequence
KWNMGWMHD

SEQ ID NO: 20172 - protein, 11 aa, Artificial sequence
  Protein classification predicting sequence
LPISHDEVVHG

SEQ ID NO: 20173 - protein, 7 aa, Artificial sequence
  Protein classification predicting sequence
SLDWHLL

SEQ ID NO: 20174 - protein, 6 aa, Artificial sequence
  Protein classification predicting sequence
WDGRRH

SEQ ID NO: 20175 - protein, 7 aa, Artificial sequence
  Protein classification predicting sequence
GGRENLE

SEQ ID NO: 20176 - protein, 8 aa, Artificial sequence
  Protein classification predicting sequence
WQKFANLR

SEQ ID NO: 20177 - protein, 7 aa, Artificial sequence
  Protein classification predicting sequence
RLVRDLN

SEQ ID NO: 20178 - protein, 11 aa, Artificial sequence
  Protein classification predicting sequence
RLVRDLNLTYR

SEQ ID NO: 20179 - protein, 8 aa, Artificial sequence
  Protein classification predicting sequence
WREILNTD

SEQ ID NO: 20180 - protein, 7 aa, Artificial sequence
  Protein classification predicting sequence
FAVWAPN

SEQ ID NO: 20181 - protein, 9 aa, Artificial sequence
  Protein classification predicting sequence
YDPYAFRSP

SEQ ID NO: 20182 - protein, 8 aa, Artificial sequence
  Protein classification predicting sequence
WDGRKHQM

SEQ ID NO: 20183 - protein, 8 aa, Artificial sequence
  Protein classification predicting sequence
YEVHLGSW

SEQ ID NO: 20184 - protein, 10 aa, Artificial sequence
  Protein classification predicting sequence
DWVPGHFPKD

SEQ ID NO: 20185 - protein, 9 aa, Artificial sequence
  Protein classification predicting sequence
GEHKEWGTL

SEQ ID NO: 20186 - protein, 15 aa, Artificial sequence
  Protein classification predicting sequence
FNYSRNEVRNFLVAN

SEQ ID NO: 20187 - protein, 11 aa, Artificial sequence
  Protein classification predicting sequence
RNEVRNFLVAN

SEQ ID NO: 20188 - protein, 18 aa, Artificial sequence
  Protein classification predicting sequence
HIDGIRVDAVASMLYLDY

SEQ ID NO: 20189 - protein, 13 aa, Artificial sequence
  Protein classification predicting sequence
RVDAVASMLYLDY

SEQ ID NO: 20190 - protein, 6 aa, Artificial sequence
  Protein classification predicting sequence
RKEGEW

SEQ ID NO: 20191 - protein, 9 aa, Artificial sequence
  Protein classification predicting sequence
WPMVSWPTY

SEQ ID NO: 20192 - protein, 5 aa, Artificial sequence
  Protein classification predicting sequence
CNFTP

SEQ ID NO: 20193 - protein, 7 aa, Artificial sequence
  Protein classification predicting sequence
GDFNEWD

SEQ ID NO: 20194 - protein, 7 aa, Artificial sequence
  Protein classification predicting sequence
LSYRELA

SEQ ID NO: 20195 - protein, 11 aa, Artificial sequence
  Protein classification predicting sequence
EHPFYGSWGYQ

SEQ ID NO: 20196 - protein, 13 aa, Artificial sequence
  Protein classification predicting sequence
DGLRVDAVASMLY

SEQ ID NO: 20197 - protein, 7 aa, Artificial sequence
  Protein classification predicting sequence
DPIYRKY

SEQ ID NO: 20198 - protein, 5 aa, Artificial sequence
  Protein classification predicting sequence
RKYHH

SEQ ID NO: 20199 - protein, 7 aa, Artificial sequence
  Protein classification predicting sequence
KMPGDYW

SEQ ID NO: 20200 - protein, 10 aa, Artificial sequence
  Protein classification predicting sequence
HPGKKLLFMG

SEQ ID NO: 20201 - protein, 15 aa, Artificial sequence
  Protein classification predicting sequence
HPGKKLLFMGGEFGQ

SEQ ID NO: 20202 - protein, 7 aa, Artificial sequence
  Protein classification predicting sequence
MGNLGGK

SEQ ID NO: 20203 - protein, 14 aa, Artificial sequence
  Protein classification predicting sequence
FDGFRFDGVTSMLY

SEQ ID NO: 20204 - protein, 18 aa, Artificial sequence
  Protein classification predicting sequence
FDGFRFDGVTSMLYHHHG

SEQ ID NO: 20205 - protein, 9 aa, Artificial sequence
  Protein classification predicting sequence
GFDYRLAMA

SEQ ID NO: 20206 - protein, 8 aa, Artificial sequence
  Protein classification predicting sequence
DRGIALHK

SEQ ID NO: 20207 - protein, 8 aa, Artificial sequence
  Protein classification predicting sequence
SSRYGTPE

SEQ ID NO: 20208 - protein, 6 aa, Artificial sequence
  Protein classification predicting sequence
SFTDYR

SEQ ID NO: 20209 - protein, 7 aa, Artificial sequence
  Protein classification predicting sequence
HLGSWRR

SEQ ID NO: 20210 - protein, 8 aa, Artificial sequence
  Protein classification predicting sequence
SWGYQTTG

SEQ ID NO: 20211 - protein, 8 aa, Artificial sequence
  Protein classification predicting sequence
LYEHADPR

SEQ ID NO: 20212 - protein, 6 aa, Artificial sequence
  Protein classification predicting sequence
GEWVPN

SEQ ID NO: 20213 - protein, 9 aa, Artificial sequence
  Protein classification predicting sequence
LPLSHDEVV

SEQ ID NO: 20214 - protein, 6 aa, Artificial sequence
  Protein classification predicting sequence
GFQWID

SEQ ID NO: 20215 - protein, 7 aa, Artificial sequence
  Protein classification predicting sequence
LTLPPLA

SEQ ID NO: 20216 - protein, 10 aa, Artificial sequence
  Protein classification predicting sequence
DGRVLLKADP

SEQ ID NO: 20217 - protein, 7 aa, Artificial sequence
  Protein classification predicting sequence
DWVPGHF

SEQ ID NO: 20218 - protein, 10 aa, Artificial sequence
  Protein classification predicting sequence
DWVPGHFCKD

SEQ ID NO: 20219 - protein, 15 aa, Artificial sequence
  Protein classification predicting sequence
DWVPGHFCKDAHGLY

SEQ ID NO: 20220 - protein, 9 aa, Artificial sequence
  Protein classification predicting sequence
FLISNALFW

SEQ ID NO: 20221 - protein, 14 aa, Artificial sequence
  Protein classification predicting sequence
DGFRVDAVANMLYW

SEQ ID NO: 20222 - protein, 11 aa, Artificial sequence
  Protein classification predicting sequence
SHDEVVHGKKS

SEQ ID NO: 20223 - protein, 6 aa, Artificial sequence
  Protein classification predicting sequence
QFDEWK

SEQ ID NO: 20224 - protein, 5 aa, Artificial sequence
  Protein classification predicting sequence
VCNFT

SEQ ID NO: 20225 - protein, 48 aa, Artificial sequence
  Protein classification predicting sequence
GVRFTVWAPHAKAMSVVGDFNEWDYEQHKMLQVTEEGIWSLFIPHIEE

SEQ ID NO: 20226 - protein, 9 aa, Artificial sequence
  Protein classification predicting sequence
EIYKYAIET

SEQ ID NO: 20227 - protein, 32 aa, Artificial sequence
  Protein classification predicting sequence
KADPYAVYAEVRPNTASVVFDIKGYEWNDKNW

SEQ ID NO: 20228 - protein, 6 aa, Artificial sequence
  Protein classification predicting sequence
PTSRYG

SEQ ID NO: 20229 - protein, 8 aa, Artificial sequence
  Protein classification predicting sequence
HGLYLFDG

SEQ ID NO: 20230 - protein, 7 aa, Artificial sequence
  Protein classification predicting sequence
FLISNAL

SEQ ID NO: 20231 - protein, 22 aa, Artificial sequence
  Protein classification predicting sequence
PTYEGGLGFNYKWNMGWMNDVL

SEQ ID NO: 20232 - protein, 6 aa, Artificial sequence
  Protein classification predicting sequence
THPGKK

SEQ ID NO: 20233 - protein, 24 aa, Artificial sequence
  Protein classification predicting sequence
THPGKKLLFMGGEFGQFDEWKDLE

SEQ ID NO: 20234 - protein, 6 aa, Artificial sequence
  Protein classification predicting sequence
VMMIAE

SEQ ID NO: 20235 - protein, 10 aa, Artificial sequence
  Protein classification predicting sequence
YKWNMGWMND

SEQ ID NO: 20236 - protein, 16 aa, Artificial sequence
  Protein classification predicting sequence
YKWNMGWMNDVLKYME

SEQ ID NO: 20237 - protein, 6 aa, Artificial sequence
  Protein classification predicting sequence
HPGKKL

SEQ ID NO: 20238 - protein, 9 aa, Artificial sequence
  Protein classification predicting sequence
EQSIFSFIR

SEQ ID NO: 20239 - protein, 10 aa, Artificial sequence
  Protein classification predicting sequence
TFSMVYAYSE

SEQ ID NO: 20240 - protein, 8 aa, Artificial sequence
  Protein classification predicting sequence
ADPFSVLG

SEQ ID NO: 20241 - protein, 8 aa, Artificial sequence
  Protein classification predicting sequence
PISIYEVH

SEQ ID NO: 20242 - protein, 10 aa, Artificial sequence
  Protein classification predicting sequence
HPFGGSWGYQ

SEQ ID NO: 20243 - protein, 6 aa, Artificial sequence
  Protein classification predicting sequence
FVDRCH

SEQ ID NO: 20244 - protein, 11 aa, Artificial sequence
  Protein classification predicting sequence
DWNTLIYNYGR

SEQ ID NO: 20245 - protein, 7 aa, Artificial sequence
  Protein classification predicting sequence
LYEHADP

SEQ ID NO: 20246 - protein, 7 aa, Artificial sequence
  Protein classification predicting sequence
GRHADPF

SEQ ID NO: 20247 - protein, 9 aa, Artificial sequence
  Protein classification predicting sequence
RVSVVGDFN

SEQ ID NO: 20248 - protein, 6 aa, Artificial sequence
  Protein classification predicting sequence
RRHPMR

SEQ ID NO: 20249 - protein, 6 aa, Artificial sequence
  Protein classification predicting sequence
WELFIP

SEQ ID NO: 20250 - protein, 5 aa, Artificial sequence
  Protein classification predicting sequence
MGFTH

SEQ ID NO: 20251 - protein, 19 aa, Artificial sequence
  Protein classification predicting sequence
EHPFDGSWGYQPTGLYAPT

SEQ ID NO: 20252 - protein, 8 aa, Artificial sequence
  Protein classification predicting sequence
TLIYNYGR

SEQ ID NO: 20253 - protein, 8 aa, Artificial sequence
  Protein classification predicting sequence
AEESTAWP

SEQ ID NO: 20254 - protein, 10 aa, Artificial sequence
  Protein classification predicting sequence
WQRFANLRAY

SEQ ID NO: 20255 - protein, 9 aa, Artificial sequence
  Protein classification predicting sequence
DSAHYGGSN

SEQ ID NO: 20256 - protein, 6 aa, Artificial sequence
  Protein classification predicting sequence
FAVWAP

SEQ ID NO: 20257 - protein, 8 aa, Artificial sequence
  Protein classification predicting sequence
RRHPMRLR

SEQ ID NO: 20258 - protein, 9 aa, Artificial sequence
  Protein classification predicting sequence
PFGGSWGYQ

SEQ ID NO: 20259 - protein, 6 aa, Artificial sequence
  Protein classification predicting sequence
EHADPR

SEQ ID NO: 20260 - protein, 10 aa, Artificial sequence
  Protein classification predicting sequence
RVDAVASMLY

SEQ ID NO: 20261 - protein, 7 aa, Artificial sequence
  Protein classification predicting sequence
MPGDAWQ

SEQ ID NO: 20262 - protein, 6 aa, Artificial sequence
  Protein classification predicting sequence
KADPYA

SEQ ID NO: 20263 - protein, 6 aa, Artificial sequence
  Protein classification predicting sequence
YMKLDP

SEQ ID NO: 20264 - protein, 7 aa, Artificial sequence
  Protein classification predicting sequence
SHDEVVH

SEQ ID NO: 20265 - protein, 8 aa, Artificial sequence
  Protein classification predicting sequence
GKKLLFMG

SEQ ID NO: 20266 - protein, 7 aa, Artificial sequence
  Protein classification predicting sequence
HSHASKN

SEQ ID NO: 20267 - protein, 17 aa, Artificial sequence
  Protein classification predicting sequence
HSHASKNSEDGLNMFDG

SEQ ID NO: 20268 - protein, 8 aa, Artificial sequence
  Protein classification predicting sequence
DGLNMFDG

SEQ ID NO: 20269 - protein, 14 aa, Artificial sequence
  Protein classification predicting sequence
YHQNGLLAHDPYAF

SEQ ID NO: 20270 - protein, 7 aa, Artificial sequence
  Protein classification predicting sequence
THVELLP

SEQ ID NO: 20271 - protein, 10 aa, Artificial sequence
  Protein classification predicting sequence
HIDGLRVDAV

SEQ ID NO: 20272 - protein, 6 aa, Artificial sequence
  Protein classification predicting sequence
GWMHDT

SEQ ID NO: 20273 - protein, 5 aa, Artificial sequence
  Protein classification predicting sequence
WAPHA

SEQ ID NO: 20274 - protein, 7 aa, Artificial sequence
  Protein classification predicting sequence
LNYRELA

SEQ ID NO: 20275 - protein, 8 aa, Artificial sequence
  Protein classification predicting sequence
YRELADQL

SEQ ID NO: 20276 - protein, 6 aa, Artificial sequence
  Protein classification predicting sequence
MPGDAW

SEQ ID NO: 20277 - protein, 9 aa, Artificial sequence
  Protein classification predicting sequence
PGKKLLFMG

SEQ ID NO: 20278 - protein, 6 aa, Artificial sequence
  Protein classification predicting sequence
WELFVP

SEQ ID NO: 20279 - protein, 16 aa, Artificial sequence
  Protein classification predicting sequence
DGLRVDAVASMLYRDY

SEQ ID NO: 20280 - protein, 6 aa, Artificial sequence
  Protein classification predicting sequence
GDFNGW

SEQ ID NO: 20281 - protein, 13 aa, Artificial sequence
  Protein classification predicting sequence
EGRHERLWEVLGA

SEQ ID NO: 20282 - protein, 15 aa, Artificial sequence
  Protein classification predicting sequence
HPGVMTIAEESTSWP

SEQ ID NO: 20283 - protein, 7 aa, Artificial sequence
  Protein classification predicting sequence
TIAEEST

SEQ ID NO: 20284 - protein, 10 aa, Artificial sequence
  Protein classification predicting sequence
TIAEESTSWP

SEQ ID NO: 20285 - protein, 14 aa, Artificial sequence
  Protein classification predicting sequence
GGLGFSMKWNMGWM

SEQ ID NO: 20286 - protein, 9 aa, Artificial sequence
  Protein classification predicting sequence
SHDEVVHGK

SEQ ID NO: 20287 - protein, 7 aa, Artificial sequence
  Protein classification predicting sequence
DWGTYVF

SEQ ID NO: 20288 - protein, 8 aa, Artificial sequence
  Protein classification predicting sequence
ARRAELAP

SEQ ID NO: 20289 - protein, 6 aa, Artificial sequence
  Protein classification predicting sequence
DRMPGD

SEQ ID NO: 20290 - protein, 7 aa, Artificial sequence
  Protein classification predicting sequence
FFAASSR

SEQ ID NO: 20291 - protein, 12 aa, Artificial sequence
  Protein classification predicting sequence
FDGFRFDGVTSM

SEQ ID NO: 20292 - protein, 14 aa, Artificial sequence
  Protein classification predicting sequence
YLNFEGNEFGHPEW

SEQ ID NO: 20293 - protein, 6 aa, Artificial sequence
  Protein classification predicting sequence
DGLNMF

SEQ ID NO: 20294 - protein, 8 aa, Artificial sequence
  Protein classification predicting sequence
FSGDYNEY

SEQ ID NO: 20295 - protein, 6 aa, Artificial sequence
  Protein classification predicting sequence
PDMWIK

SEQ ID NO: 20296 - protein, 7 aa, Artificial sequence
  Protein classification predicting sequence
EMYTNMS

SEQ ID NO: 20297 - protein, 9 aa, Artificial sequence
  Protein classification predicting sequence
LHKMIRLIT

SEQ ID NO: 20298 - protein, 11 aa, Artificial sequence
  Protein classification predicting sequence
EHPFDGSWGYQ

SEQ ID NO: 20299 - protein, 9 aa, Artificial sequence
  Protein classification predicting sequence
LDWVPGHFP

SEQ ID NO: 20300 - protein, 8 aa, Artificial sequence
  Protein classification predicting sequence
GLGFDYKW

SEQ ID NO: 20301 - protein, 9 aa, Artificial sequence
  Protein classification predicting sequence
GFTHLELLP

SEQ ID NO: 20302 - protein, 12 aa, Artificial sequence
  Protein classification predicting sequence
GVILDWVPAHFP

SEQ ID NO: 20303 - protein, 8 aa, Artificial sequence
  Protein classification predicting sequence
DAVASMLY

SEQ ID NO: 20304 - protein, 10 aa, Artificial sequence
  Protein classification predicting sequence
PNRHGGRENL

SEQ ID NO: 20305 - protein, 11 aa, Artificial sequence
  Protein classification predicting sequence
TFSMLYAFSEN

SEQ ID NO: 20306 - protein, 6 aa, Artificial sequence
  Protein classification predicting sequence
YAFSEN

SEQ ID NO: 20307 - protein, 10 aa, Artificial sequence
  Protein classification predicting sequence
SHDEVVHGKG

SEQ ID NO: 20308 - protein, 7 aa, Artificial sequence
  Protein classification predicting sequence
TYRHHKA

SEQ ID NO: 20309 - protein, 25 aa, Artificial sequence
  Protein classification predicting sequence
GGLGFWYKWNLGWMHDTLDYMKLDP

SEQ ID NO: 20310 - protein, 11 aa, Artificial sequence
  Protein classification predicting sequence
GLEVRALLPDA

SEQ ID NO: 20311 - protein, 6 aa, Artificial sequence
  Protein classification predicting sequence
GSWGYQ

SEQ ID NO: 20312 - protein, 5 aa, Artificial sequence
  Protein classification predicting sequence
NALYW

SEQ ID NO: 20313 - protein, 7 aa, Artificial sequence
  Protein classification predicting sequence
LDRMPGD

SEQ ID NO: 20314 - protein, 8 aa, Artificial sequence
  Protein classification predicting sequence
WREVLNTD

SEQ ID NO: 20315 - protein, 6 aa, Artificial sequence
  Protein classification predicting sequence
RGFFCG

SEQ ID NO: 20316 - protein, 10 aa, Artificial sequence
  Protein classification predicting sequence
GQLYKYEMID

SEQ ID NO: 20317 - protein, 9 aa, Artificial sequence
  Protein classification predicting sequence
GFEWLVVDD

SEQ ID NO: 20318 - protein, 11 aa, Artificial sequence
  Protein classification predicting sequence
RIYESHVGISS

SEQ ID NO: 20319 - protein, 11 aa, Artificial sequence
  Protein classification predicting sequence
ESHDQALVGDK

SEQ ID NO: 20320 - protein, 7 aa, Artificial sequence
  Protein classification predicting sequence
FIFNFHP

SEQ ID NO: 20321 - protein, 7 aa, Artificial sequence
  Protein classification predicting sequence
LILQNVD

SEQ ID NO: 20322 - protein, 6 aa, Artificial sequence
  Protein classification predicting sequence
FLISNA

SEQ ID NO: 20323 - protein, 7 aa, Artificial sequence
  Protein classification predicting sequence
THIEIMP

SEQ ID NO: 20324 - protein, 9 aa, Artificial sequence
  Protein classification predicting sequence
PFDGSWGYQ

SEQ ID NO: 20325 - protein, 10 aa, Artificial sequence
  Protein classification predicting sequence
SWGYQGTGYY

SEQ ID NO: 20326 - protein, 8 aa, Artificial sequence
  Protein classification predicting sequence
DAVSNMLY

SEQ ID NO: 20327 - protein, 6 aa, Artificial sequence
  Protein classification predicting sequence
AWPLVT

SEQ ID NO: 20328 - protein, 7 aa, Artificial sequence
  Protein classification predicting sequence
LPLSHDE

SEQ ID NO: 20329 - protein, 5 aa, Artificial sequence
  Protein classification predicting sequence
LNFMG

SEQ ID NO: 20330 - protein, 6 aa, Artificial sequence
  Protein classification predicting sequence
FMGNEF

SEQ ID NO: 20331 - protein, 8 aa, Artificial sequence
  Protein classification predicting sequence
DKFSRGYE

SEQ ID NO: 20332 - protein, 9 aa, Artificial sequence
  Protein classification predicting sequence
EVLRFLLSN

SEQ ID NO: 20333 - protein, 7 aa, Artificial sequence
  Protein classification predicting sequence
EDVSGMP

SEQ ID NO: 20334 - protein, 6 aa, Artificial sequence
  Protein classification predicting sequence
LIPYVK

SEQ ID NO: 20335 - protein, 10 aa, Artificial sequence
  Protein classification predicting sequence
HFPKDGHGLA

SEQ ID NO: 20336 - protein, 9 aa, Artificial sequence
  Protein classification predicting sequence
GGLGFNLKW

SEQ ID NO: 20337 - protein, 13 aa, Artificial sequence
  Protein classification predicting sequence
HPGKKTLFMGMEF

SEQ ID NO: 20338 - protein, 6 aa, Artificial sequence
  Protein classification predicting sequence
EIFNSD

SEQ ID NO: 20339 - protein, 6 aa, Artificial sequence
  Protein classification predicting sequence
LGMHET

SEQ ID NO: 20340 - protein, 9 aa, Artificial sequence
  Protein classification predicting sequence
WDGRRHPMR

SEQ ID NO: 20341 - protein, 6 aa, Artificial sequence
  Protein classification predicting sequence
PTSRFG

SEQ ID NO: 20342 - protein, 8 aa, Artificial sequence
  Protein classification predicting sequence
RVDAVASM

SEQ ID NO: 20343 - protein, 6 aa, Artificial sequence
  Protein classification predicting sequence
YRQYHH

SEQ ID NO: 20344 - protein, 12 aa, Artificial sequence
  Protein classification predicting sequence
LPLSHDEVVHGK

SEQ ID NO: 20345 - protein, 13 aa, Artificial sequence
  Protein classification predicting sequence
MWGYPGKKLLFMG

SEQ ID NO: 20346 - protein, 7 aa, Artificial sequence
  Protein classification predicting sequence
LGYNCIQ

SEQ ID NO: 20347 - protein, 21 aa, Artificial sequence
  Protein classification predicting sequence
YSSWEVLRFLLSNIRWWLEEY

SEQ ID NO: 20348 - protein, 15 aa, Artificial sequence
  Protein classification predicting sequence
RGEHPLWDSRLFNYG

SEQ ID NO: 20349 - protein, 6 aa, Artificial sequence
  Protein classification predicting sequence
MIYRDY

SEQ ID NO: 20350 - protein, 6 aa, Artificial sequence
  Protein classification predicting sequence
TFSFMY

SEQ ID NO: 20351 - protein, 6 aa, Artificial sequence
  Protein classification predicting sequence
VVGDFN

SEQ ID NO: 20352 - protein, 14 aa, Artificial sequence
  Protein classification predicting sequence
GGLGFNYKWNMGWM

SEQ ID NO: 20353 - protein, 8 aa, Artificial sequence
  Protein classification predicting sequence
GDRYNQFA

SEQ ID NO: 20354 - protein, 8 aa, Artificial sequence
  Protein classification predicting sequence
YELHFGSW

SEQ ID NO: 20355 - protein, 6 aa, Artificial sequence
  Protein classification predicting sequence
IAEEST

SEQ ID NO: 20356 - protein, 12 aa, Artificial sequence
  Protein classification predicting sequence
SHDEVVHGKGSL

SEQ ID NO: 20357 - protein, 14 aa, Artificial sequence
  Protein classification predicting sequence
SHDEVVHGKGSLLG

SEQ ID NO: 20358 - protein, 6 aa, Artificial sequence
  Protein classification predicting sequence
VTNFFA

SEQ ID NO: 20359 - protein, 8 aa, Artificial sequence
  Protein classification predicting sequence
YFHSGPRG

SEQ ID NO: 20360 - protein, 7 aa, Artificial sequence
  Protein classification predicting sequence
RWWLEEY

SEQ ID NO: 20361 - protein, 6 aa, Artificial sequence
  Protein classification predicting sequence
TLTNRR

SEQ ID NO: 20362 - protein, 15 aa, Artificial sequence
  Protein classification predicting sequence
IDRGIALHKMIRLIT

SEQ ID NO: 20363 - protein, 7 aa, Artificial sequence
  Protein classification predicting sequence
AFFDGTH

SEQ ID NO: 20364 - protein, 6 aa, Artificial sequence
  Protein classification predicting sequence
HLRPYE

SEQ ID NO: 20365 - protein, 6 aa, Artificial sequence
  Protein classification predicting sequence
GIWELF

SEQ ID NO: 20366 - protein, 7 aa, Artificial sequence
  Protein classification predicting sequence
NYGRHEV

SEQ ID NO: 20367 - protein, 7 aa, Artificial sequence
  Protein classification predicting sequence
EILNTDS

SEQ ID NO: 20368 - protein, 16 aa, Artificial sequence
  Protein classification predicting sequence
YCKEWAPGAEGVFLTG

SEQ ID NO: 20369 - protein, 6 aa, Artificial sequence
  Protein classification predicting sequence
WAHPGK

SEQ ID NO: 20370 - protein, 6 aa, Artificial sequence
  Protein classification predicting sequence
LDWHLL

SEQ ID NO: 20371 - protein, 8 aa, Artificial sequence
  Protein classification predicting sequence
LTLPPLAT

SEQ ID NO: 20372 - protein, 8 aa, Artificial sequence
  Protein classification predicting sequence
AEESTSWP

SEQ ID NO: 20373 - protein, 14 aa, Artificial sequence
  Protein classification predicting sequence
LPLSHDEVVHGKKS

SEQ ID NO: 20374 - protein, 8 aa, Artificial sequence
  Protein classification predicting sequence
GSWGYQVT

SEQ ID NO: 20375 - protein, 16 aa, Artificial sequence
  Protein classification predicting sequence
RGEQLDWGTYVFDFGR

SEQ ID NO: 20376 - protein, 9 aa, Artificial sequence
  Protein classification predicting sequence
HGGRENLEA

SEQ ID NO: 20377 - protein, 17 aa, Artificial sequence
  Protein classification predicting sequence
SENYVLPISHDEVVHGK

SEQ ID NO: 20378 - protein, 7 aa, Artificial sequence
  Protein classification predicting sequence
YYASFGY

SEQ ID NO: 20379 - protein, 8 aa, Artificial sequence
  Protein classification predicting sequence
RLAMAIPD

SEQ ID NO: 20380 - protein, 15 aa, Artificial sequence
  Protein classification predicting sequence
GYLNFMGNEFGHPEW

SEQ ID NO: 20381 - protein, 6 aa, Artificial sequence
  Protein classification predicting sequence
AWMEQR

SEQ ID NO: 20382 - protein, 9 aa, Artificial sequence
  Protein classification predicting sequence
WAPNAKRVS

SEQ ID NO: 20383 - protein, 6 aa, Artificial sequence
  Protein classification predicting sequence
KANQFD

SEQ ID NO: 20384 - protein, 8 aa, Artificial sequence
  Protein classification predicting sequence
SNFTPVPR

SEQ ID NO: 20385 - protein, 14 aa, Artificial sequence
  Protein classification predicting sequence
SNFTPVPRHDYRFG

SEQ ID NO: 20386 - protein, 8 aa, Artificial sequence
  Protein classification predicting sequence
WDGRRHPM

SEQ ID NO: 20387 - protein, 9 aa, Artificial sequence
  Protein classification predicting sequence
LPHKADPWG

SEQ ID NO: 20388 - protein, 13 aa, Artificial sequence
  Protein classification predicting sequence
EALSFYELHAGSW

SEQ ID NO: 20389 - protein, 7 aa, Artificial sequence
  Protein classification predicting sequence
WMNEEVY

SEQ ID NO: 20390 - protein, 13 aa, Artificial sequence
  Protein classification predicting sequence
PNAMTIAEESTAF

SEQ ID NO: 20391 - protein, 6 aa, Artificial sequence
  Protein classification predicting sequence
SENYVL

SEQ ID NO: 20392 - protein, 6 aa, Artificial sequence
  Protein classification predicting sequence
VPAHFP

SEQ ID NO: 20393 - protein, 7 aa, Artificial sequence
  Protein classification predicting sequence
FDGTHLY

SEQ ID NO: 20394 - protein, 6 aa, Artificial sequence
  Protein classification predicting sequence
FNYKWN

SEQ ID NO: 20395 - protein, 14 aa, Artificial sequence
  Protein classification predicting sequence
PGKKLLFMGNEFAQ

SEQ ID NO: 20396 - protein, 6 aa, Artificial sequence
  Protein classification predicting sequence
YEVHLG

SEQ ID NO: 20397 - protein, 10 aa, Artificial sequence
  Protein classification predicting sequence
PTSRYGSPDD

SEQ ID NO: 20398 - protein, 8 aa, Artificial sequence
  Protein classification predicting sequence
HQAGIGVI

SEQ ID NO: 20399 - protein, 9 aa, Artificial sequence
  Protein classification predicting sequence
HFPKDDWAL

SEQ ID NO: 20400 - protein, 6 aa, Artificial sequence
  Protein classification predicting sequence
PGDDWQ

SEQ ID NO: 20401 - protein, 6 aa, Artificial sequence
  Protein classification predicting sequence
FMGQEF

SEQ ID NO: 20402 - protein, 8 aa, Artificial sequence
  Protein classification predicting sequence
HGLAFFDG

SEQ ID NO: 20403 - protein, 26 aa, Artificial sequence
  Protein classification predicting sequence
FLQQANHVLFQHFPGALSIAEESTTW

SEQ ID NO: 20404 - protein, 21 aa, Artificial sequence
  Protein classification predicting sequence
GGLGFNLKWNMGWMHDMLDYF

SEQ ID NO: 20405 - protein, 7 aa, Artificial sequence
  Protein classification predicting sequence
LSHDEVV

SEQ ID NO: 20406 - protein, 7 aa, Artificial sequence
  Protein classification predicting sequence
NYKVGVP

SEQ ID NO: 20407 - protein, 9 aa, Artificial sequence
  Protein classification predicting sequence
WDGRHHPMQ

SEQ ID NO: 20408 - protein, 5 aa, Artificial sequence
  Protein classification predicting sequence
HLGSW

SEQ ID NO: 20409 - protein, 9 aa, Artificial sequence
  Protein classification predicting sequence
FDGTHLYEH

SEQ ID NO: 20410 - protein, 7 aa, Artificial sequence
  Protein classification predicting sequence
YAYTENF

SEQ ID NO: 20411 - protein, 6 aa, Artificial sequence
  Protein classification predicting sequence
WQKFAN

SEQ ID NO: 20412 - protein, 5 aa, Artificial sequence
  Protein classification predicting sequence
DPYGF

SEQ ID NO: 20413 - protein, 6 aa, Artificial sequence
  Protein classification predicting sequence
IYEVHA

SEQ ID NO: 20414 - protein, 7 aa, Artificial sequence
  Protein classification predicting sequence
GFTHIEL

SEQ ID NO: 20415 - protein, 8 aa, Artificial sequence
  Protein classification predicting sequence
FDGTALYE

SEQ ID NO: 20416 - protein, 6 aa, Artificial sequence
  Protein classification predicting sequence
YRDYSR

SEQ ID NO: 20417 - protein, 7 aa, Artificial sequence
  Protein classification predicting sequence
NFTPVPR

SEQ ID NO: 20418 - protein, 7 aa, Artificial sequence
  Protein classification predicting sequence
DPYSFGP

SEQ ID NO: 20419 - protein, 8 aa, Artificial sequence
  Protein classification predicting sequence
MWTHPGKK

SEQ ID NO: 20420 - protein, 8 aa, Artificial sequence
  Protein classification predicting sequence
DWVPAHFP

SEQ ID NO: 20421 - protein, 13 aa, Artificial sequence
  Protein classification predicting sequence
FDGTALYEHADPR

SEQ ID NO: 20422 - protein, 10 aa, Artificial sequence
  Protein classification predicting sequence
HQDWNTLIYN

SEQ ID NO: 20423 - protein, 18 aa, Artificial sequence
  Protein classification predicting sequence
DGLRVDAVASMLYRDYSR

SEQ ID NO: 20424 - protein, 8 aa, Artificial sequence
  Protein classification predicting sequence
SLLGKMPG

SEQ ID NO: 20425 - protein, 6 aa, Artificial sequence
  Protein classification predicting sequence
ANLRAY

SEQ ID NO: 20426 - protein, 6 aa, Artificial sequence
  Protein classification predicting sequence
GFTHIE

SEQ ID NO: 20427 - protein, 9 aa, Artificial sequence
  Protein classification predicting sequence
PDGFARFVD

SEQ ID NO: 20428 - protein, 15 aa, Artificial sequence
  Protein classification predicting sequence
GFHPDWNTAIYNFGR

SEQ ID NO: 20429 - protein, 6 aa, Artificial sequence
  Protein classification predicting sequence
LRAYYG

SEQ ID NO: 20430 - protein, 10 aa, Artificial sequence
  Protein classification predicting sequence
SIYEVHAASW

SEQ ID NO: 20431 - protein, 12 aa, Artificial sequence
  Protein classification predicting sequence
GGLGFGFKWNMG

SEQ ID NO: 20432 - protein, 7 aa, Artificial sequence
  Protein classification predicting sequence
TLPPLAT

SEQ ID NO: 20433 - protein, 10 aa, Artificial sequence
  Protein classification predicting sequence
ELMPISEHPF

SEQ ID NO: 20434 - protein, 7 aa, Artificial sequence
  Protein classification predicting sequence
DKYHIDG

SEQ ID NO: 20435 - protein, 7 aa, Artificial sequence
  Protein classification predicting sequence
YGGRENL

SEQ ID NO: 20436 - protein, 6 aa, Artificial sequence
  Protein classification predicting sequence
GYYAPT

SEQ ID NO: 20437 - protein, 5 aa, Artificial sequence
  Protein classification predicting sequence
EWNHD

SEQ ID NO: 20438 - protein, 11 aa, Artificial sequence
  Protein classification predicting sequence
RVSVVGDFNFW

SEQ ID NO: 20439 - protein, 13 aa, Artificial sequence
  Protein classification predicting sequence
PRRKNFFRYQLAV

SEQ ID NO: 20440 - protein, 17 aa, Artificial sequence
  Protein classification predicting sequence
WHGQQNLIDDPYRFGPL

SEQ ID NO: 20441 - protein, 84 aa, Artificial sequence
  Protein classification predicting sequence
QEMDAWLLSEGTHLRPYETLGAHADTMDGVTGTRFSVWAPNARRVSVVGQFNYWDGRRHPMRLRKESGIWELFIPGAHNGQLYK

SEQ ID NO: 20442 - protein, 7 aa, Artificial sequence
  Protein classification predicting sequence
DANGNLR

SEQ ID NO: 20443 - protein, 19 aa, Artificial sequence
  Protein classification predicting sequence
AAHAAGLNVILDWVPGHFP

SEQ ID NO: 20444 - protein, 12 aa, Artificial sequence
  Protein classification predicting sequence
ERSVLIFVRRDK

SEQ ID NO: 20445 - protein, 8 aa, Artificial sequence
  Protein classification predicting sequence
SHGRQHSL

SEQ ID NO: 20446 - protein, 25 aa, Artificial sequence
  Protein classification predicting sequence
RIDRDVINALIAGHFADPFSVLGMH

SEQ ID NO: 20447 - protein, 25 aa, Artificial sequence
  Protein classification predicting sequence
AGLEVRALLPDATDVWVIEPKTGRK

SEQ ID NO: 20448 - protein, 54 aa, Artificial sequence
  Protein classification predicting sequence
KANQFDAPISIYEVHLGSWRRHTDNNFWLSYRELADQLVPYAKWMGFTHLELLP

SEQ ID NO: 20449 - protein, 29 aa, Artificial sequence
  Protein classification predicting sequence
LYEHSDPREGYHQDWNTLIYNYGRREVSN

SEQ ID NO: 20450 - protein, 51 aa, Artificial sequence
  Protein classification predicting sequence
ERFGIDALRVDAVASMIYRDYSRKEGEWIPNEFGGRENLEAIEFLRNTNRI

SEQ ID NO: 20451 - protein, 26 aa, Artificial sequence
  Protein classification predicting sequence
GNEIIVASNFTPVPRHDYRFGINQPG

SEQ ID NO: 20452 - protein, 6 aa, Artificial sequence
  Protein classification predicting sequence
GLYAPT

SEQ ID NO: 20453 - protein, 6 aa, Artificial sequence
  Protein classification predicting sequence
AHFPKD

SEQ ID NO: 20454 - protein, 9 aa, Artificial sequence
  Protein classification predicting sequence
WREILNTDS

SEQ ID NO: 20455 - protein, 8 aa, Artificial sequence
  Protein classification predicting sequence
FDGFRFDG

SEQ ID NO: 20456 - protein, 10 aa, Artificial sequence
  Protein classification predicting sequence
HIDGIRVDAV

SEQ ID NO: 20457 - protein, 12 aa, Artificial sequence
  Protein classification predicting sequence
YDFNLVTFSFMY

SEQ ID NO: 20458 - protein, 6 aa, Artificial sequence
  Protein classification predicting sequence
SWRPGL

SEQ ID NO: 20459 - protein, 12 aa, Artificial sequence
  Protein classification predicting sequence
SWRPGLSYRQLA

SEQ ID NO: 20460 - protein, 6 aa, Artificial sequence
  Protein classification predicting sequence
YAPTSR

SEQ ID NO: 20461 - protein, 14 aa, Artificial sequence
  Protein classification predicting sequence
EVRNFLVANAVYWC

SEQ ID NO: 20462 - protein, 7 aa, Artificial sequence
  Protein classification predicting sequence
LQEMNAT

SEQ ID NO: 20463 - protein, 25 aa, Artificial sequence
  Protein classification predicting sequence
RAYLGFMWAHPGKQLLFMGQEFAQG

SEQ ID NO: 20464 - protein, 10 aa, Artificial sequence
  Protein classification predicting sequence
VSNFSPVVRH

SEQ ID NO: 20465 - protein, 6 aa, Artificial sequence
  Protein classification predicting sequence
HAGSWK

SEQ ID NO: 20466 - protein, 17 aa, Artificial sequence
  Protein classification predicting sequence
DGIRVDAVSNMLYLDYD

SEQ ID NO: 20467 - protein, 7 aa, Artificial sequence
  Protein classification predicting sequence
THIELLP

SEQ ID NO: 20468 - protein, 10 aa, Artificial sequence
  Protein classification predicting sequence
RKEGEWIPNE

SEQ ID NO: 20469 - protein, 31 aa, Artificial sequence
  Protein classification predicting sequence
GGLGFNLKWNMGWMHDMLDYFSMDPWFRQFH

SEQ ID NO: 20470 - protein, 8 aa, Artificial sequence
  Protein classification predicting sequence
DPWFRQFH

SEQ ID NO: 20471 - protein, 13 aa, Artificial sequence
  Protein classification predicting sequence
YGGSNMGNLGGKW

SEQ ID NO: 20472 - protein, 6 aa, Artificial sequence
  Protein classification predicting sequence
EVRNFL

SEQ ID NO: 20473 - protein, 14 aa, Artificial sequence
  Protein classification predicting sequence
EHPFDGSWGYQVTG

SEQ ID NO: 20474 - protein, 20 aa, Artificial sequence
  Protein classification predicting sequence
WFEQFHIDGIRVDAVASMLY

SEQ ID NO: 20475 - protein, 8 aa, Artificial sequence
  Protein classification predicting sequence
EFGQRAEW

SEQ ID NO: 20476 - protein, 14 aa, Artificial sequence
  Protein classification predicting sequence
EGNHHRIYEKLGAH

SEQ ID NO: 20477 - protein, 13 aa, Artificial sequence
  Protein classification predicting sequence
GEHKEWGTLIFNY

SEQ ID NO: 20478 - protein, 17 aa, Artificial sequence
  Protein classification predicting sequence
WDGRRHPMQRLDYGIWG

SEQ ID NO: 20479 - protein, 8 aa, Artificial sequence
  Protein classification predicting sequence
ALSFYELH

SEQ ID NO: 20480 - protein, 11 aa, Artificial sequence
  Protein classification predicting sequence
YRELADQLVPY

SEQ ID NO: 20481 - protein, 7 aa, Artificial sequence
  Protein classification predicting sequence
MGYTHVE

SEQ ID NO: 20482 - protein, 8 aa, Artificial sequence
  Protein classification predicting sequence
THVELMPV

SEQ ID NO: 20483 - protein, 29 aa, Artificial sequence
  Protein classification predicting sequence
EHPFYGSWGYQPVGLFAPTSRYGSPDDFK

SEQ ID NO: 20484 - protein, 16 aa, Artificial sequence
  Protein classification predicting sequence
FHIDGIRVDAVASMLY

SEQ ID NO: 20485 - protein, 8 aa, Artificial sequence
  Protein classification predicting sequence
ENYDAIAT

SEQ ID NO: 20486 - protein, 16 aa, Artificial sequence
  Protein classification predicting sequence
KMPGDEWQQTANLRAY

SEQ ID NO: 20487 - protein, 15 aa, Artificial sequence
  Protein classification predicting sequence
GYMYGQPGKKLNFMG

SEQ ID NO: 20488 - protein, 8 aa, Artificial sequence
  Protein classification predicting sequence
GFEWRLQD

SEQ ID NO: 20489 - protein, 16 aa, Artificial sequence
  Protein classification predicting sequence
GIGVVLDWVPAHFPSD

SEQ ID NO: 20490 - protein, 9 aa, Artificial sequence
  Protein classification predicting sequence
HGLANFDGT

SEQ ID NO: 20491 - protein, 9 aa, Artificial sequence
  Protein classification predicting sequence
DPDPRRGWH

SEQ ID NO: 20492 - protein, 21 aa, Artificial sequence
  Protein classification predicting sequence
PNAMTIAEESTAFPGVSAPTF

SEQ ID NO: 20493 - protein, 7 aa, Artificial sequence
  Protein classification predicting sequence
LVYAFSE

SEQ ID NO: 20494 - protein, 7 aa, Artificial sequence
  Protein classification predicting sequence
DDPYQYH

SEQ ID NO: 20495 - protein, 8 aa, Artificial sequence
  Protein classification predicting sequence
EQYPSFAS

SEQ ID NO: 20496 - protein, 6 aa, Artificial sequence
  Protein classification predicting sequence
DHQYFH

SEQ ID NO: 20497 - protein, 15 aa, Artificial sequence
  Protein classification predicting sequence
DPYAFEAQMRPETAS

SEQ ID NO: 20498 - protein, 14 aa, Artificial sequence
  Protein classification predicting sequence
NVILDWVPGHFPSD

SEQ ID NO: 20499 - protein, 12 aa, Artificial sequence
  Protein classification predicting sequence
YWMERFGIDALR

SEQ ID NO: 20500 - protein, 13 aa, Artificial sequence
  Protein classification predicting sequence
VTMAEESTDFPGV

SEQ ID NO: 20501 - protein, 21 aa, Artificial sequence
  Protein classification predicting sequence
SILDRMPGDAWQKFANLRAYY

SEQ ID NO: 20502 - protein, 9 aa, Artificial sequence
  Protein classification predicting sequence
EFAQGREWN

SEQ ID NO: 20503 - protein, 7 aa, Artificial sequence
  Protein classification predicting sequence
HMKKGWN

SEQ ID NO: 20504 - protein, 9 aa, Artificial sequence
  Protein classification predicting sequence
LTVSALRMP

SEQ ID NO: 20505 - protein, 8 aa, Artificial sequence
  Protein classification predicting sequence
SSHDFGKD

SEQ ID NO: 20506 - protein, 7 aa, Artificial sequence
  Protein classification predicting sequence
YWRDVGT

SEQ ID NO: 20507 - protein, 11 aa, Artificial sequence
  Protein classification predicting sequence
KSVLGFRSNIA

SEQ ID NO: 20508 - protein, 5 aa, Artificial sequence
  Protein classification predicting sequence
SMGNY

SEQ ID NO: 20509 - protein, 12 aa, Artificial sequence
  Protein classification predicting sequence
SSHDFGKDIIPK

SEQ ID NO: 20510 - protein, 14 aa, Artificial sequence
  Protein classification predicting sequence
YWRDVGTIDAYWQA

SEQ ID NO: 20511 - protein, 11 aa, Artificial sequence
  Protein classification predicting sequence
GWSIFNPELGE

SEQ ID NO: 20512 - protein, 7 aa, Artificial sequence
  Protein classification predicting sequence
EKPADPP

SEQ ID NO: 20513 - protein, 14 aa, Artificial sequence
  Protein classification predicting sequence
DCYWRDVGTIDSFY

SEQ ID NO: 20514 - protein, 9 aa, Artificial sequence
  Protein classification predicting sequence
VPPQMRKGG

SEQ ID NO: 20515 - protein, 7 aa, Artificial sequence
  Protein classification predicting sequence
GTADAIY

SEQ ID NO: 20516 - protein, 6 aa, Artificial sequence
  Protein classification predicting sequence
GDHIYK

SEQ ID NO: 20517 - protein, 8 aa, Artificial sequence
  Protein classification predicting sequence
DFGKDIIP

SEQ ID NO: 20518 - protein, 14 aa, Artificial sequence
  Protein classification predicting sequence
WFQGTADAVRQYLW

SEQ ID NO: 20519 - protein, 7 aa, Artificial sequence
  Protein classification predicting sequence
FGLMKID

SEQ ID NO: 20520 - protein, 7 aa, Artificial sequence
  Protein classification predicting sequence
PYIASMG

SEQ ID NO: 20521 - protein, 7 aa, Artificial sequence
  Protein classification predicting sequence
ASMGIYV

SEQ ID NO: 20522 - protein, 8 aa, Artificial sequence
  Protein classification predicting sequence
AGGEGSRL

SEQ ID NO: 20523 - protein, 9 aa, Artificial sequence
  Protein classification predicting sequence
DFVLSNLVN

SEQ ID NO: 20524 - protein, 7 aa, Artificial sequence
  Protein classification predicting sequence
WFQGTAD

SEQ ID NO: 20525 - protein, 52 aa, Artificial sequence
  Protein classification predicting sequence
DVSISVIEVPWDEASRFGIMNTNEEMEIVEFEEKPQFPRSNLASMGIYIFNW

SEQ ID NO: 20526 - protein, 9 aa, Artificial sequence
  Protein classification predicting sequence
LAGGEGKRL

SEQ ID NO: 20527 - protein, 10 aa, Artificial sequence
  Protein classification predicting sequence
AKPAVYFGGK

SEQ ID NO: 20528 - protein, 9 aa, Artificial sequence
  Protein classification predicting sequence
GGVTVLPPY

SEQ ID NO: 20529 - protein, 8 aa, Artificial sequence
  Protein classification predicting sequence
ISVIEVPW

SEQ ID NO: 20530 - protein, 10 aa, Artificial sequence
  Protein classification predicting sequence
EASRFGIMNT

SEQ ID NO: 20531 - protein, 8 aa, Artificial sequence
  Protein classification predicting sequence
GYWKDVGT

SEQ ID NO: 20532 - protein, 14 aa, Artificial sequence
  Protein classification predicting sequence
CVAMLLAGGKGSRL

SEQ ID NO: 20533 - protein, 6 aa, Artificial sequence
  Protein classification predicting sequence
YRIIDF

SEQ ID NO: 20534 - protein, 6 aa, Artificial sequence
  Protein classification predicting sequence
WYKGTA

SEQ ID NO: 20535 - protein, 7 aa, Artificial sequence
  Protein classification predicting sequence
SSGVKWY

SEQ ID NO: 20536 - protein, 6 aa, Artificial sequence
  Protein classification predicting sequence
WYEGTA

SEQ ID NO: 20537 - protein, 6 aa, Artificial sequence
  Protein classification predicting sequence
MLDYHI

SEQ ID NO: 20538 - protein, 19 aa, Artificial sequence
  Protein classification predicting sequence
EASRFGIMNTNEEMEIVEF

SEQ ID NO: 20539 - protein, 25 aa, Artificial sequence
  Protein classification predicting sequence
AYPFEGYWKDVGTVKSLWEANMDLL

SEQ ID NO: 20540 - protein, 7 aa, Artificial sequence
  Protein classification predicting sequence
SVLFQGV

SEQ ID NO: 20541 - protein, 8 aa, Artificial sequence
  Protein classification predicting sequence
TQYQPLEL

SEQ ID NO: 20542 - protein, 13 aa, Artificial sequence
  Protein classification predicting sequence
GGVTVLPPYAESS

SEQ ID NO: 20543 - protein, 9 aa, Artificial sequence
  Protein classification predicting sequence
KMLDYHIEK

SEQ ID NO: 20544 - protein, 10 aa, Artificial sequence
  Protein classification predicting sequence
HSVLFQGVTV

SEQ ID NO: 20545 - protein, 6 aa, Artificial sequence
  Protein classification predicting sequence
ADAIYQ

SEQ ID NO: 20546 - protein, 7 aa, Artificial sequence
  Protein classification predicting sequence
HDMGGDI

SEQ ID NO: 20547 - protein, 16 aa, Artificial sequence
  Protein classification predicting sequence
ELTDRRAKPAVYFGGK

SEQ ID NO: 20548 - protein, 10 aa, Artificial sequence
  Protein classification predicting sequence
QHVDSGADVT

SEQ ID NO: 20549 - protein, 12 aa, Artificial sequence
  Protein classification predicting sequence
YWRDVGTVDAYW

SEQ ID NO: 20550 - protein, 8 aa, Artificial sequence
  Protein classification predicting sequence
MILAGGQG

SEQ ID NO: 20551 - protein, 12 aa, Artificial sequence
  Protein classification predicting sequence
ILSGDHIYKMDY

SEQ ID NO: 20552 - protein, 17 aa, Artificial sequence
  Protein classification predicting sequence
ILSGDHIYKMDYSKMLD

SEQ ID NO: 20553 - protein, 21 aa, Artificial sequence
  Protein classification predicting sequence
LTKNLAKPAVPFGGKYRIIDF

SEQ ID NO: 20554 - protein, 6 aa, Artificial sequence
  Protein classification predicting sequence
EFEEKP

SEQ ID NO: 20555 - protein, 7 aa, Artificial sequence
  Protein classification predicting sequence
VRNSVLS

SEQ ID NO: 20556 - protein, 7 aa, Artificial sequence
  Protein classification predicting sequence
KPAVPFG

SEQ ID NO: 20557 - protein, 17 aa, Artificial sequence
  Protein classification predicting sequence
YVLTQYKAQSLTEHIQR

SEQ ID NO: 20558 - protein, 8 aa, Artificial sequence
  Protein classification predicting sequence
LVPAQMYR

SEQ ID NO: 20559 - protein, 7 aa, Artificial sequence
  Protein classification predicting sequence
SMGNYIF

SEQ ID NO: 20560 - protein, 6 aa, Artificial sequence
  Protein classification predicting sequence
EANMDL

SEQ ID NO: 20561 - protein, 10 aa, Artificial sequence
  Protein classification predicting sequence
FSPPAKFVHE

SEQ ID NO: 20562 - protein, 9 aa, Artificial sequence
  Protein classification predicting sequence
GVVVVPKGY

SEQ ID NO: 20563 - protein, 10 aa, Artificial sequence
  Protein classification predicting sequence
RIIDFALSNC

SEQ ID NO: 20564 - protein, 15 aa, Artificial sequence
  Protein classification predicting sequence
AYAHPFPLSCVQSDP

SEQ ID NO: 20565 - protein, 12 aa, Artificial sequence
  Protein classification predicting sequence
ISGSVVVQSVLF

SEQ ID NO: 20566 - protein, 24 aa, Artificial sequence
  Protein classification predicting sequence
MLARQLPLKSVALILAGGRGTRLK

SEQ ID NO: 20567 - protein, 20 aa, Artificial sequence
  Protein classification predicting sequence
GVITQYQSHTLVQHIQRGWS

SEQ ID NO: 20568 - protein, 14 aa, Artificial sequence
  Protein classification predicting sequence
EMNEFVDLLPAQQR

SEQ ID NO: 20569 - protein, 9 aa, Artificial sequence
  Protein classification predicting sequence
QNLDIIRRY

SEQ ID NO: 20570 - protein, 9 aa, Artificial sequence
  Protein classification predicting sequence
GDHIYKMDY

SEQ ID NO: 20571 - protein, 13 aa, Artificial sequence
  Protein classification predicting sequence
ANLDLASVTPELD

SEQ ID NO: 20572 - protein, 8 aa, Artificial sequence
  Protein classification predicting sequence
RVRVNSFC

SEQ ID NO: 20573 - protein, 15 aa, Artificial sequence
  Protein classification predicting sequence
RRFYRSEEGIVLVTR

SEQ ID NO: 20574 - protein, 12 aa, Artificial sequence
  Protein classification predicting sequence
FGGKYRIIDFTL

SEQ ID NO: 20575 - protein, 8 aa, Artificial sequence
  Protein classification predicting sequence
YWRDVGTI

SEQ ID NO: 20576 - protein, 9 aa, Artificial sequence
  Protein classification predicting sequence
ILAGDHIYK

SEQ ID NO: 20577 - protein, 7 aa, Artificial sequence
  Protein classification predicting sequence
SHDFGKD

SEQ ID NO: 20578 - protein, 8 aa, Artificial sequence
  Protein classification predicting sequence
DFGKNVIP

SEQ ID NO: 20579 - protein, 7 aa, Artificial sequence
  Protein classification predicting sequence
GVITQYQ

SEQ ID NO: 20580 - protein, 7 aa, Artificial sequence
  Protein classification predicting sequence
LSGDHIY

SEQ ID NO: 20581 - protein, 7 aa, Artificial sequence
  Protein classification predicting sequence
IDFALSN

SEQ ID NO: 20582 - protein, 9 aa, Artificial sequence
  Protein classification predicting sequence
GSADAILQS

SEQ ID NO: 20583 - protein, 9 aa, Artificial sequence
  Protein classification predicting sequence
YWRDVGTID

SEQ ID NO: 20584 - protein, 7 aa, Artificial sequence
  Protein classification predicting sequence
PVFNLYN

SEQ ID NO: 20585 - protein, 9 aa, Artificial sequence
  Protein classification predicting sequence
LAGGRGSRL

SEQ ID NO: 20586 - protein, 8 aa, Artificial sequence
  Protein classification predicting sequence
RIGVITQY

SEQ ID NO: 20587 - protein, 7 aa, Artificial sequence
  Protein classification predicting sequence
WYRGTAD

SEQ ID NO: 20588 - protein, 7 aa, Artificial sequence
  Protein classification predicting sequence
YWKDVGT

SEQ ID NO: 20589 - protein, 6 aa, Artificial sequence
  Protein classification predicting sequence
GIVLVT

SEQ ID NO: 20590 - protein, 10 aa, Artificial sequence
  Protein classification predicting sequence
FGGKFRIIDF

SEQ ID NO: 20591 - protein, 9 aa, Artificial sequence
  Protein classification predicting sequence
GTADAVYQN

SEQ ID NO: 20592 - protein, 7 aa, Artificial sequence
  Protein classification predicting sequence
EGIVLVT

SEQ ID NO: 20593 - protein, 52 aa, Artificial sequence
  Protein classification predicting sequence
DFVLSNLVNARYLRICVLTQYKSHSLDRHISQNWRLSGLAGEYITPVPAQQR

SEQ ID NO: 20594 - protein, 15 aa, Artificial sequence
  Protein classification predicting sequence
TFVSMGNYIFTTKVL

SEQ ID NO: 20595 - protein, 12 aa, Artificial sequence
  Protein classification predicting sequence
DAIRADADDDHS

SEQ ID NO: 20596 - protein, 9 aa, Artificial sequence
  Protein classification predicting sequence
GMAAVYDFS

SEQ ID NO: 20597 - protein, 29 aa, Artificial sequence
  Protein classification predicting sequence
PVFNLYNKRWPIRGESENLAPAKFVNGGS

SEQ ID NO: 20598 - protein, 28 aa, Artificial sequence
  Protein classification predicting sequence
QESVVGAGSIISAASVRNSVLSSNVVVD

SEQ ID NO: 20599 - protein, 20 aa, Artificial sequence
  Protein classification predicting sequence
RHAILDKNVVVGPGEMVGVD

SEQ ID NO: 20600 - protein, 9 aa, Artificial sequence
  Protein classification predicting sequence
FAISAGGVV

SEQ ID NO: 20601 - protein, 8 aa, Artificial sequence
  Protein classification predicting sequence
AKPAVPFG

SEQ ID NO: 20602 - protein, 7 aa, Artificial sequence
  Protein classification predicting sequence
KYRIIDF

SEQ ID NO: 20603 - protein, 7 aa, Artificial sequence
  Protein classification predicting sequence
EASRFGI

SEQ ID NO: 20604 - protein, 9 aa, Artificial sequence
  Protein classification predicting sequence
PKSTKASMG

SEQ ID NO: 20605 - protein, 9 aa, Artificial sequence
  Protein classification predicting sequence
GYWKDVGTI

SEQ ID NO: 20606 - protein, 10 aa, Artificial sequence
  Protein classification predicting sequence
YWRDVGTLDA

SEQ ID NO: 20607 - protein, 7 aa, Artificial sequence
  Protein classification predicting sequence
ALILAGG

SEQ ID NO: 20608 - protein, 8 aa, Artificial sequence
  Protein classification predicting sequence
TQYKAQSL

SEQ ID NO: 20609 - protein, 8 aa, Artificial sequence
  Protein classification predicting sequence
AFGVMAVD

SEQ ID NO: 20610 - protein, 11 aa, Artificial sequence
  Protein classification predicting sequence
IVLAGGEGKRL

SEQ ID NO: 20611 - protein, 26 aa, Artificial sequence
  Protein classification predicting sequence
AGEYITPVPAQQRLGPRWYTGSADAI

SEQ ID NO: 20612 - protein, 31 aa, Artificial sequence
  Protein classification predicting sequence
QSLNLIYDEDPDYIVVFGADHVYRMDPEQMV

SEQ ID NO: 20613 - protein, 8 aa, Artificial sequence
  Protein classification predicting sequence
VPGATDRD

SEQ ID NO: 20614 - protein, 22 aa, Artificial sequence
  Protein classification predicting sequence
DAFYDAHMDLVSVHPVFNLYNK

SEQ ID NO: 20615 - protein, 6 aa, Artificial sequence
  Protein classification predicting sequence
WEANMD

SEQ ID NO: 20616 - protein, 12 aa, Artificial sequence
  Protein classification predicting sequence
IYVLTQFKSQSL

SEQ ID NO: 20617 - protein, 15 aa, Artificial sequence
  Protein classification predicting sequence
GITDRFIDPIPAQMR

SEQ ID NO: 20618 - protein, 8 aa, Artificial sequence
  Protein classification predicting sequence
MVGFEEKP

SEQ ID NO: 20619 - protein, 11 aa, Artificial sequence
  Protein classification predicting sequence
DRAKPAVPFGG

SEQ ID NO: 20620 - protein, 11 aa, Artificial sequence
  Protein classification predicting sequence
YRLIDFVLSNL

SEQ ID NO: 20621 - protein, 13 aa, Artificial sequence
  Protein classification predicting sequence
GSADAIYQSLNLI

SEQ ID NO: 20622 - protein, 8 aa, Artificial sequence
  Protein classification predicting sequence
EKPADPPG

SEQ ID NO: 20623 - protein, 8 aa, Artificial sequence
  Protein classification predicting sequence
DRARGFTV

SEQ ID NO: 20624 - protein, 38 aa, Artificial sequence
  Protein classification predicting sequence
RPERNESFDILPASQRVSETQWYEGTADAVYQNIDIIE

SEQ ID NO: 20625 - protein, 8 aa, Artificial sequence
  Protein classification predicting sequence
ASMGIYVF

SEQ ID NO: 20626 - protein, 8 aa, Artificial sequence
  Protein classification predicting sequence
RRGSAVSS

SEQ ID NO: 20627 - protein, 10 aa, Artificial sequence
  Protein classification predicting sequence
EYMVILAGDH

SEQ ID NO: 20628 - protein, 10 aa, Artificial sequence
  Protein classification predicting sequence
ALASMGIYVF

SEQ ID NO: 20629 - protein, 5 aa, Artificial sequence
  Protein classification predicting sequence
WPIWT

SEQ ID NO: 20630 - protein, 7 aa, Artificial sequence
  Protein classification predicting sequence
PPAKFVH

SEQ ID NO: 20631 - protein, 7 aa, Artificial sequence
  Protein classification predicting sequence
IDFVLSN

SEQ ID NO: 20632 - protein, 8 aa, Artificial sequence
  Protein classification predicting sequence
DFGKNIIP

SEQ ID NO: 20633 - protein, 14 aa, Artificial sequence
  Protein classification predicting sequence
AMAYVLAGGRGSRL

SEQ ID NO: 20634 - protein, 7 aa, Artificial sequence
  Protein classification predicting sequence
SMGIYVF

SEQ ID NO: 20635 - protein, 8 aa, Artificial sequence
  Protein classification predicting sequence
SLLFTGVR

SEQ ID NO: 20636 - protein, 9 aa, Artificial sequence
  Protein classification predicting sequence
DAKRFRRTE

SEQ ID NO: 20637 - protein, 7 aa, Artificial sequence
  Protein classification predicting sequence
EKPANPP

SEQ ID NO: 20638 - protein, 6 aa, Artificial sequence
  Protein classification predicting sequence
PPAKFV

SEQ ID NO: 20639 - protein, 10 aa, Artificial sequence
  Protein classification predicting sequence
RIIDFALSNA

SEQ ID NO: 20640 - protein, 12 aa, Artificial sequence
  Protein classification predicting sequence
ATQYKAHSLIRH

SEQ ID NO: 20641 - protein, 9 aa, Artificial sequence
  Protein classification predicting sequence
DILPASQRV

SEQ ID NO: 20642 - protein, 9 aa, Artificial sequence
  Protein classification predicting sequence
GTADAVTQN

SEQ ID NO: 20643 - protein, 9 aa, Artificial sequence
  Protein classification predicting sequence
GADVTIGCL

SEQ ID NO: 20644 - protein, 11 aa, Artificial sequence
  Protein classification predicting sequence
EKPADPPGIPG

SEQ ID NO: 20645 - protein, 7 aa, Artificial sequence
  Protein classification predicting sequence
VSLEKND

SEQ ID NO: 20646 - protein, 9 aa, Artificial sequence
  Protein classification predicting sequence
LASMGIYVF

SEQ ID NO: 20647 - protein, 18 aa, Artificial sequence
  Protein classification predicting sequence
LASMGIYVFDADYLYELL

SEQ ID NO: 20648 - protein, 21 aa, Artificial sequence
  Protein classification predicting sequence
SKSLASMGIYVFDADYLYELL

SEQ ID NO: 20649 - protein, 37 aa, Artificial sequence
  Protein classification predicting sequence
EEMNEFVDLLPAQQRMKGENWYRGTADAVTQNLDIIR

SEQ ID NO: 20650 - protein, 42 aa, Artificial sequence
  Protein classification predicting sequence
YKAEYVVILAGDHIYKQDYSRMLIDHVEKGARCTVACMPVPI

SEQ ID NO: 20651 - protein, 55 aa, Artificial sequence
  Protein classification predicting sequence
YKAEYVVILAGDHIYKQDYSRMLIDHVEKGARCTVACMPVPIKEATAFGVMAVDE

SEQ ID NO: 20652 - protein, 14 aa, Artificial sequence
  Protein classification predicting sequence
AFGVMAVDENDKII

SEQ ID NO: 20653 - protein, 10 aa, Artificial sequence
  Protein classification predicting sequence
RAKPALYFGG

SEQ ID NO: 20654 - protein, 6 aa, Artificial sequence
  Protein classification predicting sequence
NSGIRR

SEQ ID NO: 20655 - protein, 8 aa, Artificial sequence
  Protein classification predicting sequence
TQYKSHSL

SEQ ID NO: 20656 - protein, 7 aa, Artificial sequence
  Protein classification predicting sequence
ILPASQR

SEQ ID NO: 20657 - protein, 7 aa, Artificial sequence
  Protein classification predicting sequence
DHVYRMD

SEQ ID NO: 20658 - protein, 8 aa, Artificial sequence
  Protein classification predicting sequence
SGGCIISG

SEQ ID NO: 20659 - protein, 51 aa, Artificial sequence
  Protein classification predicting sequence
MLARQLPLKSVALILAGGRGTRLKDLTNKRAKPAVHFGGKFRIIDFALSNC

SEQ ID NO: 20660 - protein, 24 aa, Artificial sequence
  Protein classification predicting sequence
AEPYWRDVGTLEAYWKANLDLASV

SEQ ID NO: 20661 - protein, 32 aa, Artificial sequence
  Protein classification predicting sequence
NSFCNIDSAVLLPEVWVGRSCRLRRCVIDRAC

SEQ ID NO: 20662 - protein, 36 aa, Artificial sequence
  Protein classification predicting sequence
IPEGMVIGENAEEDARRFYRSEEGIVLVTREMLRKL

SEQ ID NO: 20663 - protein, 13 aa, Artificial sequence
  Protein classification predicting sequence
HIGNGSSWGLDGI

SEQ ID NO: 20664 - protein, 7 aa, Artificial sequence
  Protein classification predicting sequence
SLWEANM

SEQ ID NO: 20665 - protein, 11 aa, Artificial sequence
  Protein classification predicting sequence
PLTADRAKPAV

SEQ ID NO: 20666 - protein, 14 aa, Artificial sequence
  Protein classification predicting sequence
VLTQYKSHSLDRHI

SEQ ID NO: 20667 - protein, 13 aa, Artificial sequence
  Protein classification predicting sequence
TPVPAQQRLGPRW

SEQ ID NO: 20668 - protein, 8 aa, Artificial sequence
  Protein classification predicting sequence
ASMGIYIF

SEQ ID NO: 20669 - protein, 9 aa, Artificial sequence
  Protein classification predicting sequence
LSNCANSGI

SEQ ID NO: 20670 - protein, 6 aa, Artificial sequence
  Protein classification predicting sequence
TQYQPL

SEQ ID NO: 20671 - protein, 14 aa, Artificial sequence
  Protein classification predicting sequence
GTSHAIYQNIDYID

SEQ ID NO: 20672 - protein, 10 aa, Artificial sequence
  Protein classification predicting sequence
DSLVVDGCFV

SEQ ID NO: 20673 - protein, 10 aa, Artificial sequence
  Protein classification predicting sequence
PFIASMGIYV

SEQ ID NO: 20674 - protein, 16 aa, Artificial sequence
  Protein classification predicting sequence
WFQGTADAVRQYLWLF

SEQ ID NO: 20675 - protein, 6 aa, Artificial sequence
  Protein classification predicting sequence
GLMKID

SEQ ID NO: 20676 - protein, 6 aa, Artificial sequence
  Protein classification predicting sequence
PDFSFY

SEQ ID NO: 20677 - protein, 7 aa, Artificial sequence
  Protein classification predicting sequence
RYLPPTK

SEQ ID NO: 20678 - protein, 6 aa, Artificial sequence
  Protein classification predicting sequence
LNNFVN

SEQ ID NO: 20679 - protein, 8 aa, Artificial sequence
  Protein classification predicting sequence
IDFTLSNC

SEQ ID NO: 20680 - protein, 6 aa, Artificial sequence
  Protein classification predicting sequence
HDFGKD

SEQ ID NO: 20681 - protein, 21 aa, Artificial sequence
  Protein classification predicting sequence
PAQMRTGKRWYEGTADAIYQN

SEQ ID NO: 20682 - protein, 9 aa, Artificial sequence
  Protein classification predicting sequence
GTADAIYQN

SEQ ID NO: 20683 - protein, 14 aa, Artificial sequence
  Protein classification predicting sequence
VCIFGSDHIYKMDI

SEQ ID NO: 20684 - protein, 15 aa, Artificial sequence
  Protein classification predicting sequence
DSDNGRVQIIDSLVC

SEQ ID NO: 20685 - protein, 10 aa, Artificial sequence
  Protein classification predicting sequence
IGVNLQEDKK

SEQ ID NO: 20686 - protein, 23 aa, Artificial sequence
  Protein classification predicting sequence
RRIGVITQYQSHTLVQHIQRGWS

SEQ ID NO: 20687 - protein, 7 aa, Artificial sequence
  Protein classification predicting sequence
DHVEKGA

SEQ ID NO: 20688 - protein, 7 aa, Artificial sequence
  Protein classification predicting sequence
PELDMYD

SEQ ID NO: 20689 - protein, 8 aa, Artificial sequence
  Protein classification predicting sequence
WPIRTHME

SEQ ID NO: 20690 - protein, 17 aa, Artificial sequence
  Protein classification predicting sequence
LPPAKFVQDRSGSHGMT

SEQ ID NO: 20691 - protein, 10 aa, Artificial sequence
  Protein classification predicting sequence
VGRSCRLRRC

SEQ ID NO: 20692 - protein, 8 aa, Artificial sequence
  Protein classification predicting sequence
GGAYRLID

SEQ ID NO: 20693 - protein, 8 aa, Artificial sequence
  Protein classification predicting sequence
NSASLNRH

SEQ ID NO: 20694 - protein, 7 aa, Artificial sequence
  Protein classification predicting sequence
ANDFGSE

SEQ ID NO: 20695 - protein, 6 aa, Artificial sequence
  Protein classification predicting sequence
IIDKNA

SEQ ID NO: 20696 - protein, 9 aa, Artificial sequence
  Protein classification predicting sequence
LGGGAGTRL

SEQ ID NO: 20697 - protein, 14 aa, Artificial sequence
  Protein classification predicting sequence
QPPKFEFYDPKTPF

SEQ ID NO: 20698 - protein, 8 aa, Artificial sequence
  Protein classification predicting sequence
VEVLAATQ

SEQ ID NO: 20699 - protein, 6 aa, Artificial sequence
  Protein classification predicting sequence
AMKVDT

SEQ ID NO: 20700 - protein, 15 aa, Artificial sequence
  Protein classification predicting sequence
QLFPLTSTRATPAVP

SEQ ID NO: 20701 - protein, 25 aa, Artificial sequence
  Protein classification predicting sequence
GGCYRLIDIPMSNCFNSGINKIFVM

SEQ ID NO: 20702 - protein, 11 aa, Artificial sequence
  Protein classification predicting sequence
SLNRHIHRTYL

SEQ ID NO: 20703 - protein, 8 aa, Artificial sequence
  Protein classification predicting sequence
VLAATQMP

SEQ ID NO: 20704 - protein, 11 aa, Artificial sequence
  Protein classification predicting sequence
RKFIWVLEDYY

SEQ ID NO: 20705 - protein, 10 aa, Artificial sequence
  Protein classification predicting sequence
ILSGDQLYRM

SEQ ID NO: 20706 - protein, 9 aa, Artificial sequence
  Protein classification predicting sequence
YMELVQKHV

SEQ ID NO: 20707 - protein, 9 aa, Artificial sequence
  Protein classification predicting sequence
KTPFFTSPR

SEQ ID NO: 20708 - protein, 9 aa, Artificial sequence
  Protein classification predicting sequence
SHGCFLREC

SEQ ID NO: 20709 - protein, 7 aa, Artificial sequence
  Protein classification predicting sequence
GFVEVLA

SEQ ID NO: 20710 - protein, 7 aa, Artificial sequence
  Protein classification predicting sequence
GDHLYRM

SEQ ID NO: 20711 - protein, 6 aa, Artificial sequence
  Protein classification predicting sequence
NDFGSE

SEQ ID NO: 20712 - protein, 7 aa, Artificial sequence
  Protein classification predicting sequence
YWEDIGT

SEQ ID NO: 20713 - protein, 6 aa, Artificial sequence
  Protein classification predicting sequence
SNCINS

SEQ ID NO: 20714 - protein, 7 aa, Artificial sequence
  Protein classification predicting sequence
PKFEFYD

SEQ ID NO: 20715 - protein, 6 aa, Artificial sequence
  Protein classification predicting sequence
WFQGTA

SEQ ID NO: 20716 - protein, 7 aa, Artificial sequence
  Protein classification predicting sequence
GADYYET

SEQ ID NO: 20717 - protein, 18 aa, Artificial sequence
  Protein classification predicting sequence
PIYTQPRYLPPSKMLDAD

SEQ ID NO: 20718 - protein, 16 aa, Artificial sequence
  Protein classification predicting sequence
TDSVIGEGCVIKNCKI

SEQ ID NO: 20719 - protein, 18 aa, Artificial sequence
  Protein classification predicting sequence
HSVVGLRSCISEGAIIED

SEQ ID NO: 20720 - protein, 7 aa, Artificial sequence
  Protein classification predicting sequence
DKNARIG

SEQ ID NO: 20721 - protein, 10 aa, Artificial sequence
  Protein classification predicting sequence
DNVQEAARET

SEQ ID NO: 20722 - protein, 10 aa, Artificial sequence
  Protein classification predicting sequence
GYFIKSGIVT

SEQ ID NO: 20723 - protein, 10 aa, Artificial sequence
  Protein classification predicting sequence
IVSPKAVSDS

SEQ ID NO: 20724 - protein, 12 aa, Artificial sequence
  Protein classification predicting sequence
LAGDHLYRMDYE

SEQ ID NO: 20725 - protein, 16 aa, Artificial sequence
  Protein classification predicting sequence
FPGANDFGSEVIPGAT

SEQ ID NO: 20726 - protein, 10 aa, Artificial sequence
  Protein classification predicting sequence
LLMGADYYET

SEQ ID NO: 20727 - protein, 11 aa, Artificial sequence
  Protein classification predicting sequence
RATAFGLMKID

SEQ ID NO: 20728 - protein, 14 aa, Artificial sequence
  Protein classification predicting sequence
GLRSCISEGAIIED

SEQ ID NO: 20729 - protein, 10 aa, Artificial sequence
  Protein classification predicting sequence
SQTCLDPDAS

SEQ ID NO: 20730 - protein, 11 aa, Artificial sequence
  Protein classification predicting sequence
DITVAALPMDE

SEQ ID NO: 20731 - protein, 53 aa, Artificial sequence
  Protein classification predicting sequence
SVLGIILGGGAGTRLYPLTKKRAKPAVPLGANYRLIDIPVSNCLNSNISKIYV

SEQ ID NO: 20732 - protein, 11 aa, Artificial sequence
  Protein classification predicting sequence
TQFNSASLNRH

SEQ ID NO: 20733 - protein, 9 aa, Artificial sequence
  Protein classification predicting sequence
QLLGSILWS

SEQ ID NO: 20734 - protein, 12 aa, Artificial sequence
  Protein classification predicting sequence
RIHFHTYGYYLA

SEQ ID NO: 20735 - protein, 11 aa, Artificial sequence
  Protein classification predicting sequence
YNTNIDAIKYL

SEQ ID NO: 20736 - protein, 7 aa, Artificial sequence
  Protein classification predicting sequence
DGPIYVP

SEQ ID NO: 20737 - protein, 9 aa, Artificial sequence
  Protein classification predicting sequence
NDFEAQALA

SEQ ID NO: 20738 - protein, 6 aa, Artificial sequence
  Protein classification predicting sequence
GTGLGV

SEQ ID NO: 20739 - protein, 14 aa, Artificial sequence
  Protein classification predicting sequence
PVPGEGGHIDIGPR

SEQ ID NO: 20740 - protein, 9 aa, Artificial sequence
  Protein classification predicting sequence
GLVNLYRAI

SEQ ID NO: 20741 - protein, 10 aa, Artificial sequence
  Protein classification predicting sequence
AGDLALIFMA

SEQ ID NO: 20742 - protein, 8 aa, Artificial sequence
  Protein classification predicting sequence
FRAAFEDK

SEQ ID NO: 20743 - protein, 9 aa, Artificial sequence
  Protein classification predicting sequence
GGVFIAGGI

SEQ ID NO: 20744 - protein, 9 aa, Artificial sequence
  Protein classification predicting sequence
LVGDVGGTN

SEQ ID NO: 20745 - protein, 28 aa, Artificial sequence
  Protein classification predicting sequence
CIAIACPITGDWVAMTNHTWAFSIAEMK

SEQ ID NO: 20746 - protein, 10 aa, Artificial sequence
  Protein classification predicting sequence
INDFTAVSMA

SEQ ID NO: 20747 - protein, 8 aa, Artificial sequence
  Protein classification predicting sequence
PKDITERA

SEQ ID NO: 20748 - protein, 6 aa, Artificial sequence
  Protein classification predicting sequence
GTFGGV

SEQ ID NO: 20749 - protein, 8 aa, Artificial sequence
  Protein classification predicting sequence
LPGEGGHV

SEQ ID NO: 20750 - protein, 8 aa, Artificial sequence
  Protein classification predicting sequence
DIGGTNAR

SEQ ID NO: 20751 - protein, 10 aa, Artificial sequence
  Protein classification predicting sequence
GGTNARLALC

SEQ ID NO: 20752 - protein, 8 aa, Artificial sequence
  Protein classification predicting sequence
CIAIACPI

SEQ ID NO: 20753 - protein, 12 aa, Artificial sequence
  Protein classification predicting sequence
IMGRFGGNLALN

SEQ ID NO: 20754 - protein, 10 aa, Artificial sequence
  Protein classification predicting sequence
IAGGIVPRFL

SEQ ID NO: 20755 - protein, 7 aa, Artificial sequence
  Protein classification predicting sequence
PGLLGSG

SEQ ID NO: 20756 - protein, 7 aa, Artificial sequence
  Protein classification predicting sequence
DYPSLEA

SEQ ID NO: 20757 - protein, 7 aa, Artificial sequence
  Protein classification predicting sequence
GTGLGVA

SEQ ID NO: 20758 - protein, 7 aa, Artificial sequence
  Protein classification predicting sequence
GHVSAER

SEQ ID NO: 20759 - protein, 7 aa, Artificial sequence
  Protein classification predicting sequence
FEDKGRF

SEQ ID NO: 20760 - protein, 13 aa, Artificial sequence
  Protein classification predicting sequence
VLNDFEAQALAVV

SEQ ID NO: 20761 - protein, 6 aa, Artificial sequence
  Protein classification predicting sequence
PGEGGH

SEQ ID NO: 20762 - protein, 9 aa, Artificial sequence
  Protein classification predicting sequence
DIGPRTERD

SEQ ID NO: 20763 - protein, 8 aa, Artificial sequence
  Protein classification predicting sequence
LFATYLGR

SEQ ID NO: 20764 - protein, 18 aa, Artificial sequence
  Protein classification predicting sequence
DCRRALSLFCVIMGRFGG

SEQ ID NO: 20765 - protein, 25 aa, Artificial sequence
  Protein classification predicting sequence
GKPIAVYGAGTGLGVAHLVHVDKRW

SEQ ID NO: 20766 - protein, 17 aa, Artificial sequence
  Protein classification predicting sequence
YALVGDVGGTNARLALC

SEQ ID NO: 20767 - protein, 8 aa, Artificial sequence
  Protein classification predicting sequence
QAKTYSGL

SEQ ID NO: 20768 - protein, 25 aa, Artificial sequence
  Protein classification predicting sequence
CIAIACPITGDWVAMTNHTWAFSIA

SEQ ID NO: 20769 - protein, 15 aa, Artificial sequence
  Protein classification predicting sequence
GEGGHVDFAPNSEEE

SEQ ID NO: 20770 - protein, 22 aa, Artificial sequence
  Protein classification predicting sequence
GHVSAERVLSGPGLVNLYRAIV

SEQ ID NO: 20771 - protein, 15 aa, Artificial sequence
  Protein classification predicting sequence
TFGGVYIAGGIVPRF

SEQ ID NO: 20772 - protein, 19 aa, Artificial sequence
  Protein classification predicting sequence
EFFKASGFRAAFEDKGRFK

SEQ ID NO: 20773 - protein, 7 aa, Artificial sequence
  Protein classification predicting sequence
SGFRQRF

SEQ ID NO: 20774 - protein, 7 aa, Artificial sequence
  Protein classification predicting sequence
SQTDTEV

SEQ ID NO: 20775 - protein, 9 aa, Artificial sequence
  Protein classification predicting sequence
TDTEVVAHL

SEQ ID NO: 20776 - protein, 7 aa, Artificial sequence
  Protein classification predicting sequence
GSPLVIG

SEQ ID NO: 20777 - protein, 7 aa, Artificial sequence
  Protein classification predicting sequence
LEEGDIA

SEQ ID NO: 20778 - protein, 9 aa, Artificial sequence
  Protein classification predicting sequence
ACGTSYHAG

SEQ ID NO: 20779 - protein, 15 aa, Artificial sequence
  Protein classification predicting sequence
ACGTSYHAGMIAKYW

SEQ ID NO: 20780 - protein, 6 aa, Artificial sequence
  Protein classification predicting sequence
LFLGRG

SEQ ID NO: 20781 - protein, 8 aa, Artificial sequence
  Protein classification predicting sequence
QLLSYHVA

SEQ ID NO: 20782 - protein, 7 aa, Artificial sequence
  Protein classification predicting sequence
TKTFLAQ

SEQ ID NO: 20783 - protein, 7 aa, Artificial sequence
  Protein classification predicting sequence
KHGPIAL

SEQ ID NO: 20784 - protein, 6 aa, Artificial sequence
  Protein classification predicting sequence
PRNLAK

SEQ ID NO: 20785 - protein, 13 aa, Artificial sequence
  Protein classification predicting sequence
LKRLEYRGYDSAG

SEQ ID NO: 20786 - protein, 8 aa, Artificial sequence
  Protein classification predicting sequence
RRRAEGKL

SEQ ID NO: 20787 - protein, 11 aa, Artificial sequence
  Protein classification predicting sequence
AVVHNGIIENF

SEQ ID NO: 20788 - protein, 9 aa, Artificial sequence
  Protein classification predicting sequence
PFTNEITYL

SEQ ID NO: 20789 - protein, 21 aa, Artificial sequence
  Protein classification predicting sequence
VDKGNHRHFMEKEIYEQPEVI

SEQ ID NO: 20790 - protein, 8 aa, Artificial sequence
  Protein classification predicting sequence
KGNHRHFM

SEQ ID NO: 20791 - protein, 8 aa, Artificial sequence
  Protein classification predicting sequence
EQPEVISH

SEQ ID NO: 20792 - protein, 11 aa, Artificial sequence
  Protein classification predicting sequence
LAISACGTAYL

SEQ ID NO: 20793 - protein, 10 aa, Artificial sequence
  Protein classification predicting sequence
KHGPIALIDE

SEQ ID NO: 20794 - protein, 12 aa, Artificial sequence
  Protein classification predicting sequence
ITDEKGAAASKL

SEQ ID NO: 20795 - protein, 8 aa, Artificial sequence
  Protein classification predicting sequence
QLLAYHTA

SEQ ID NO: 20796 - protein, 6 aa, Artificial sequence
  Protein classification predicting sequence
ASEFRY

SEQ ID NO: 20797 - protein, 6 aa, Artificial sequence
  Protein classification predicting sequence
DENMPV

SEQ ID NO: 20798 - protein, 8 aa, Artificial sequence
  Protein classification predicting sequence
MPVVVIAP

SEQ ID NO: 20799 - protein, 10 aa, Artificial sequence
  Protein classification predicting sequence
DVDQPRNLAK

SEQ ID NO: 20800 - protein, 11 aa, Artificial sequence
  Protein classification predicting sequence
LEYRGYDSAGI

SEQ ID NO: 20801 - protein, 13 aa, Artificial sequence
  Protein classification predicting sequence
LEYRGYDSAGIAV

SEQ ID NO: 20802 - protein, 11 aa, Artificial sequence
  Protein classification predicting sequence
TFVSETDTEVI

SEQ ID NO: 20803 - protein, 8 aa, Artificial sequence
  Protein classification predicting sequence
SETDTEVI

SEQ ID NO: 20804 - protein, 9 aa, Artificial sequence
  Protein classification predicting sequence
MLKEIDEQP

SEQ ID NO: 20805 - protein, 6 aa, Artificial sequence
  Protein classification predicting sequence
LTITNV

SEQ ID NO: 20806 - protein, 6 aa, Artificial sequence
  Protein classification predicting sequence
GELKHG

SEQ ID NO: 20807 - protein, 6 aa, Artificial sequence
  Protein classification predicting sequence
PCIISM

SEQ ID NO: 20808 - protein, 12 aa, Artificial sequence
  Protein classification predicting sequence
LQLISYYAALHR

SEQ ID NO: 20809 - protein, 20 aa, Artificial sequence
  Protein classification predicting sequence
LLKGLEKLEYRGYDSAGIAV

SEQ ID NO: 20810 - protein, 7 aa, Artificial sequence
  Protein classification predicting sequence
KEKGRIA

SEQ ID NO: 20811 - protein, 7 aa, Artificial sequence
  Protein classification predicting sequence
NAHPHQS

SEQ ID NO: 20812 - protein, 9 aa, Artificial sequence
  Protein classification predicting sequence
VHNGVIENY

SEQ ID NO: 20813 - protein, 7 aa, Artificial sequence
  Protein classification predicting sequence
KNKSPLL

SEQ ID NO: 20814 - protein, 17 aa, Artificial sequence
  Protein classification predicting sequence
NVVASDAMAMLQVTDQF

SEQ ID NO: 20815 - protein, 6 aa, Artificial sequence
  Protein classification predicting sequence
YTAELD

SEQ ID NO: 20816 - protein, 11 aa, Artificial sequence
  Protein classification predicting sequence
GTSYHAGLVGK

SEQ ID NO: 20817 - protein, 9 aa, Artificial sequence
  Protein classification predicting sequence
TRNCFFIGR

SEQ ID NO: 20818 - protein, 10 aa, Artificial sequence
  Protein classification predicting sequence
ALATQEHVNL

SEQ ID NO: 20819 - protein, 7 aa, Artificial sequence
  Protein classification predicting sequence
LTPLVSV

SEQ ID NO: 20820 - protein, 7 aa, Artificial sequence
  Protein classification predicting sequence
QLIAYYA

SEQ ID NO: 20821 - protein, 15 aa, Artificial sequence
  Protein classification predicting sequence
AELDASDIEKGTYPH

SEQ ID NO: 20822 - protein, 20 aa, Artificial sequence
  Protein classification predicting sequence
YIIACGTSYHAGLVGKQFIE

SEQ ID NO: 20823 - protein, 8 aa, Artificial sequence
  Protein classification predicting sequence
EVHVASEF

SEQ ID NO: 20824 - protein, 12 aa, Artificial sequence
  Protein classification predicting sequence
YNMPLLSEKPLF

SEQ ID NO: 20825 - protein, 9 aa, Artificial sequence
  Protein classification predicting sequence
LKLKEISYI

SEQ ID NO: 20826 - protein, 28 aa, Artificial sequence
  Protein classification predicting sequence
LKLKEISYIQAEGFAGGELKHGTIALIE

SEQ ID NO: 20827 - protein, 8 aa, Artificial sequence
  Protein classification predicting sequence
TDTEVIVQ

SEQ ID NO: 20828 - protein, 11 aa, Artificial sequence
  Protein classification predicting sequence
NVVASDAMAML

SEQ ID NO: 20829 - protein, 7 aa, Artificial sequence
  Protein classification predicting sequence
VTDQFIE

SEQ ID NO: 20830 - protein, 8 aa, Artificial sequence
  Protein classification predicting sequence
SDIEKGTY

SEQ ID NO: 20831 - protein, 8 aa, Artificial sequence
  Protein classification predicting sequence
SQSGETAD

SEQ ID NO: 20832 - protein, 14 aa, Artificial sequence
  Protein classification predicting sequence
SQSGETADSRAVLV

SEQ ID NO: 20833 - protein, 23 aa, Artificial sequence
  Protein classification predicting sequence
GHKALTITNVPGSTLSREADYTL

SEQ ID NO: 20834 - protein, 8 aa, Artificial sequence
  Protein classification predicting sequence
RNAFFIGR

SEQ ID NO: 20835 - protein, 7 aa, Artificial sequence
  Protein classification predicting sequence
HNGIIEN

SEQ ID NO: 20836 - protein, 7 aa, Artificial sequence
  Protein classification predicting sequence
KEIFEQP

SEQ ID NO: 20837 - protein, 17 aa, Artificial sequence
  Protein classification predicting sequence
ALEGALKLKEISYIHAE

SEQ ID NO: 20838 - protein, 11 aa, Artificial sequence
  Protein classification predicting sequence
LKRLEYRGYDS

SEQ ID NO: 20839 - protein, 12 aa, Artificial sequence
  Protein classification predicting sequence
KEMFEQPEVISH

SEQ ID NO: 20840 - protein, 11 aa, Artificial sequence
  Protein classification predicting sequence
SQSGETADTLA

SEQ ID NO: 20841 - protein, 16 aa, Artificial sequence
  Protein classification predicting sequence
SQSGETADTLASLRYC

SEQ ID NO: 20842 - protein, 6 aa, Artificial sequence
  Protein classification predicting sequence
SYIHAE

SEQ ID NO: 20843 - protein, 8 aa, Artificial sequence
  Protein classification predicting sequence
GRIILITD

SEQ ID NO: 20844 - protein, 11 aa, Artificial sequence
  Protein classification predicting sequence
LVSKGNHRHFM

SEQ ID NO: 20845 - protein, 11 aa, Artificial sequence
  Protein classification predicting sequence
GIAHTRWATHG

SEQ ID NO: 20846 - protein, 7 aa, Artificial sequence
  Protein classification predicting sequence
ENFLASD

SEQ ID NO: 20847 - protein, 6 aa, Artificial sequence
  Protein classification predicting sequence
ACGTSY

SEQ ID NO: 20848 - protein, 8 aa, Artificial sequence
  Protein classification predicting sequence
LLEKLKSN

SEQ ID NO: 20849 - protein, 6 aa, Artificial sequence
  Protein classification predicting sequence
SNMQEV

SEQ ID NO: 20850 - protein, 14 aa, Artificial sequence
  Protein classification predicting sequence
PFTDTISYLEDGDW

SEQ ID NO: 20851 - protein, 5 aa, Artificial sequence
  Protein classification predicting sequence
KYWFE

SEQ ID NO: 20852 - protein, 7 aa, Artificial sequence
  Protein classification predicting sequence
STIARES

SEQ ID NO: 20853 - protein, 17 aa, Artificial sequence
  Protein classification predicting sequence
EGALKLKEISYIHAEGY

SEQ ID NO: 20854 - protein, 32 aa, Artificial sequence
  Protein classification predicting sequence
EGALKLKEISYIHAEGYAAGELKHGPIALIDE

SEQ ID NO: 20855 - protein, 36 aa, Artificial sequence
  Protein classification predicting sequence
EGALKLKEISYIHAEGYAAGELKHGPIALIDETMPV

SEQ ID NO: 20856 - protein, 16 aa, Artificial sequence
  Protein classification predicting sequence
GEMFLGSDAIALAPFT

SEQ ID NO: 20857 - protein, 6 aa, Artificial sequence
  Protein classification predicting sequence
ACGTAY

SEQ ID NO: 20858 - protein, 7 aa, Artificial sequence
  Protein classification predicting sequence
ENFIASD

SEQ ID NO: 20859 - protein, 9 aa, Artificial sequence
  Protein classification predicting sequence
CDVEIASEF

SEQ ID NO: 20860 - protein, 13 aa, Artificial sequence
  Protein classification predicting sequence
ITLSQSGETADTL

SEQ ID NO: 20861 - protein, 7 aa, Artificial sequence
  Protein classification predicting sequence
YTIPLQL

SEQ ID NO: 20862 - protein, 6 aa, Artificial sequence
  Protein classification predicting sequence
AVVHNG

SEQ ID NO: 20863 - protein, 7 aa, Artificial sequence
  Protein classification predicting sequence
KEIYEQP

SEQ ID NO: 20864 - protein, 7 aa, Artificial sequence
  Protein classification predicting sequence
LGYLGSL

SEQ ID NO: 20865 - protein, 8 aa, Artificial sequence
  Protein classification predicting sequence
EIGVASTK

SEQ ID NO: 20866 - protein, 12 aa, Artificial sequence
  Protein classification predicting sequence
LFLGRGDQYPIA

SEQ ID NO: 20867 - protein, 7 aa, Artificial sequence
  Protein classification predicting sequence
PLQLLAY

SEQ ID NO: 20868 - protein, 7 aa, Artificial sequence
  Protein classification predicting sequence
VEIASEF

SEQ ID NO: 20869 - protein, 11 aa, Artificial sequence
  Protein classification predicting sequence
EGALKLKEISY

SEQ ID NO: 20870 - protein, 8 aa, Artificial sequence
  Protein classification predicting sequence
YYVALIKG

SEQ ID NO: 20871 - protein, 9 aa, Artificial sequence
  Protein classification predicting sequence
TDTEVIVQL

SEQ ID NO: 20872 - protein, 9 aa, Artificial sequence
  Protein classification predicting sequence
ISQSGETAD

SEQ ID NO: 20873 - protein, 10 aa, Artificial sequence
  Protein classification predicting sequence
ALEGALKLKE

SEQ ID NO: 20874 - protein, 8 aa, Artificial sequence
  Protein classification predicting sequence
RHFMEKEI

SEQ ID NO: 20875 - protein, 6 aa, Artificial sequence
  Protein classification predicting sequence
VHNGII

SEQ ID NO: 20876 - protein, 7 aa, Artificial sequence
  Protein classification predicting sequence
ASEFRYR

SEQ ID NO: 20877 - protein, 10 aa, Artificial sequence
  Protein classification predicting sequence
SQSGETADTL

SEQ ID NO: 20878 - protein, 14 aa, Artificial sequence
  Protein classification predicting sequence
SQSGETADTLAALR

SEQ ID NO: 20879 - protein, 7 aa, Artificial sequence
  Protein classification predicting sequence
YTHAGPE

SEQ ID NO: 20880 - protein, 6 aa, Artificial sequence
  Protein classification predicting sequence
DMPVIV

SEQ ID NO: 20881 - protein, 7 aa, Artificial sequence
  Protein classification predicting sequence
SNIEEVR

SEQ ID NO: 20882 - protein, 10 aa, Artificial sequence
  Protein classification predicting sequence
LEYRGYDSAG

SEQ ID NO: 20883 - protein, 6 aa, Artificial sequence
  Protein classification predicting sequence
NFIASD

SEQ ID NO: 20884 - protein, 13 aa, Artificial sequence
  Protein classification predicting sequence
AGPEIAVASTKAY

SEQ ID NO: 20885 - protein, 10 aa, Artificial sequence
  Protein classification predicting sequence
GELKHGPIAL

SEQ ID NO: 20886 - protein, 9 aa, Artificial sequence
  Protein classification predicting sequence
FVSETDTEV

SEQ ID NO: 20887 - protein, 7 aa, Artificial sequence
  Protein classification predicting sequence
SETDTEV

SEQ ID NO: 20888 - protein, 7 aa, Artificial sequence
  Protein classification predicting sequence
KEIHEQP

SEQ ID NO: 20889 - protein, 9 aa, Artificial sequence
  Protein classification predicting sequence
ACGTAAYAG

SEQ ID NO: 20890 - protein, 8 aa, Artificial sequence
  Protein classification predicting sequence
AICNTNGS

SEQ ID NO: 20891 - protein, 9 aa, Artificial sequence
  Protein classification predicting sequence
VLFLGRHVG

SEQ ID NO: 20892 - protein, 12 aa, Artificial sequence
  Protein classification predicting sequence
AGPEIAVASTKA

SEQ ID NO: 20893 - protein, 7 aa, Artificial sequence
  Protein classification predicting sequence
ALKLKEI

SEQ ID NO: 20894 - protein, 12 aa, Artificial sequence
  Protein classification predicting sequence
AAGELKHGPIAL

SEQ ID NO: 20895 - protein, 8 aa, Artificial sequence
  Protein classification predicting sequence
YRGYDSAG

SEQ ID NO: 20896 - protein, 26 aa, Artificial sequence
  Protein classification predicting sequence
NAHPHVSEHIVVVHNGIIENHEPLRE

SEQ ID NO: 20897 - protein, 12 aa, Artificial sequence
  Protein classification predicting sequence
GTDVDQPRNLAK

SEQ ID NO: 20898 - protein, 9 aa, Artificial sequence
  Protein classification predicting sequence
AQRDVAEIL

SEQ ID NO: 20899 - protein, 8 aa, Artificial sequence
  Protein classification predicting sequence
VHNGIIEN

SEQ ID NO: 20900 - protein, 10 aa, Artificial sequence
  Protein classification predicting sequence
VHNGIIENHE

SEQ ID NO: 20901 - protein, 8 aa, Artificial sequence
  Protein classification predicting sequence
GENFIASD

SEQ ID NO: 20902 - protein, 13 aa, Artificial sequence
  Protein classification predicting sequence
YRHYMQKEIYEQP

SEQ ID NO: 20903 - protein, 17 aa, Artificial sequence
  Protein classification predicting sequence
ACGTSYNSGMVSRYWFE

SEQ ID NO: 20904 - protein, 18 aa, Artificial sequence
  Protein classification predicting sequence
LAGIPCDVEIASEFRYRK

SEQ ID NO: 20905 - protein, 13 aa, Artificial sequence
  Protein classification predicting sequence
CDVEIASEFRYRK

SEQ ID NO: 20906 - protein, 14 aa, Artificial sequence
  Protein classification predicting sequence
ITLSQSGETADTLA

SEQ ID NO: 20907 - protein, 13 aa, Artificial sequence
  Protein classification predicting sequence
IEHDIVHGLQALP

SEQ ID NO: 20908 - protein, 6 aa, Artificial sequence
  Protein classification predicting sequence
LYVFAD

SEQ ID NO: 20909 - protein, 16 aa, Artificial sequence
  Protein classification predicting sequence
EEVIAPIFYTVPLQLL

SEQ ID NO: 20910 - protein, 13 aa, Artificial sequence
  Protein classification predicting sequence
IAPIFYTVPLQLL

SEQ ID NO: 20911 - protein, 8 aa, Artificial sequence
  Protein classification predicting sequence
VHNGVIEN

SEQ ID NO: 20912 - protein, 9 aa, Artificial sequence
  Protein classification predicting sequence
RSGSPLVIG

SEQ ID NO: 20913 - protein, 7 aa, Artificial sequence
  Protein classification predicting sequence
TAKYWIE

SEQ ID NO: 20914 - protein, 10 aa, Artificial sequence
  Protein classification predicting sequence
GELKHGPLAL

SEQ ID NO: 20915 - protein, 12 aa, Artificial sequence
  Protein classification predicting sequence
GELKHGPLALVD

SEQ ID NO: 20916 - protein, 9 aa, Artificial sequence
  Protein classification predicting sequence
PTDRNAHPH

SEQ ID NO: 20917 - protein, 10 aa, Artificial sequence
  Protein classification predicting sequence
IIYLEDGDVV

SEQ ID NO: 20918 - protein, 6 aa, Artificial sequence
  Protein classification predicting sequence
IVACGT

SEQ ID NO: 20919 - protein, 8 aa, Artificial sequence
  Protein classification predicting sequence
AKIPVEVH

SEQ ID NO: 20920 - protein, 11 aa, Artificial sequence
  Protein classification predicting sequence
ASEFSYNMPLL

SEQ ID NO: 20921 - protein, 11 aa, Artificial sequence
  Protein classification predicting sequence
ISQSGETADSR

SEQ ID NO: 20922 - protein, 15 aa, Artificial sequence
  Protein classification predicting sequence
ISQSGETADSRAVLV

SEQ ID NO: 20923 - protein, 8 aa, Artificial sequence
  Protein classification predicting sequence
IRGNVKEV

SEQ ID NO: 20924 - protein, 13 aa, Artificial sequence
  Protein classification predicting sequence
IRGNVKEVVARGA

SEQ ID NO: 20925 - protein, 7 aa, Artificial sequence
  Protein classification predicting sequence
NGIIENY

SEQ ID NO: 20926 - protein, 19 aa, Artificial sequence
  Protein classification predicting sequence
PIALEGALKLKEISYIHAE

SEQ ID NO: 20927 - protein, 7 aa, Artificial sequence
  Protein classification predicting sequence
PLAVGYG

SEQ ID NO: 20928 - protein, 8 aa, Artificial sequence
  Protein classification predicting sequence
GEMFLGSD

SEQ ID NO: 20929 - protein, 5 aa, Artificial sequence
  Protein classification predicting sequence
YRHYM

SEQ ID NO: 20930 - protein, 8 aa, Artificial sequence
  Protein classification predicting sequence
VASTKAFT

SEQ ID NO: 20931 - protein, 10 aa, Artificial sequence
  Protein classification predicting sequence
AVVHNGIIEN

SEQ ID NO: 20932 - protein, 8 aa, Artificial sequence
  Protein classification predicting sequence
SLLEAVQK

SEQ ID NO: 20933 - protein, 9 aa, Artificial sequence
  Protein classification predicting sequence
YRHYMQKEI

SEQ ID NO: 20934 - protein, 12 aa, Artificial sequence
  Protein classification predicting sequence
GYMAAMTICNVA

SEQ ID NO: 20935 - protein, 8 aa, Artificial sequence
  Protein classification predicting sequence
SSLVRESD

SEQ ID NO: 20936 - protein, 12 aa, Artificial sequence
  Protein classification predicting sequence
KSNIEEVRARGG

SEQ ID NO: 20937 - protein, 16 aa, Artificial sequence
  Protein classification predicting sequence
ALIKGTDVDQPRNLAK

SEQ ID NO: 20938 - protein, 6 aa, Artificial sequence
  Protein classification predicting sequence
MDSRHP

SEQ ID NO: 20939 - protein, 13 aa, Artificial sequence
  Protein classification predicting sequence
GENFLASDQLALL

SEQ ID NO: 20940 - protein, 19 aa, Artificial sequence
  Protein classification predicting sequence
VTRRFIFLEEGDIAEITRR

SEQ ID NO: 20941 - protein, 7 aa, Artificial sequence
  Protein classification predicting sequence
KVEHIQI

SEQ ID NO: 20942 - protein, 9 aa, Artificial sequence
  Protein classification predicting sequence
GSSLVRESD

SEQ ID NO: 20943 - protein, 9 aa, Artificial sequence
  Protein classification predicting sequence
AFMTRAGVE

SEQ ID NO: 20944 - protein, 9 aa, Artificial sequence
  Protein classification predicting sequence
GVASTKAFT

SEQ ID NO: 20945 - protein, 12 aa, Artificial sequence
  Protein classification predicting sequence
GVASTKAFTTQL

SEQ ID NO: 20946 - protein, 8 aa, Artificial sequence
  Protein classification predicting sequence
IEALAEDF

SEQ ID NO: 20947 - protein, 10 aa, Artificial sequence
  Protein classification predicting sequence
KHHALFLGRG

SEQ ID NO: 20948 - protein, 7 aa, Artificial sequence
  Protein classification predicting sequence
MKIITMP

SEQ ID NO: 20949 - protein, 6 aa, Artificial sequence
  Protein classification predicting sequence
APIFYT

SEQ ID NO: 20950 - protein, 17 aa, Artificial sequence
  Protein classification predicting sequence
VALIKGTDVDQPRNLAK

SEQ ID NO: 20951 - protein, 7 aa, Artificial sequence
  Protein classification predicting sequence
IEHTNRV

SEQ ID NO: 20952 - protein, 6 aa, Artificial sequence
  Protein classification predicting sequence
VHVASE

SEQ ID NO: 20953 - protein, 11 aa, Artificial sequence
  Protein classification predicting sequence
QSGETADTLAA

SEQ ID NO: 20954 - protein, 11 aa, Artificial sequence
  Protein classification predicting sequence
AGELKHGPLAL

SEQ ID NO: 20955 - protein, 10 aa, Artificial sequence
  Protein classification predicting sequence
IAHTRWATHG

SEQ ID NO: 20956 - protein, 10 aa, Artificial sequence
  Protein classification predicting sequence
VQIVACGTSY

SEQ ID NO: 20957 - protein, 8 aa, Artificial sequence
  Protein classification predicting sequence
IVACGTSY

SEQ ID NO: 20958 - protein, 7 aa, Artificial sequence
  Protein classification predicting sequence
VRESDLA

SEQ ID NO: 20959 - protein, 9 aa, Artificial sequence
  Protein classification predicting sequence
EEVRARGGL

SEQ ID NO: 20960 - protein, 8 aa, Artificial sequence
  Protein classification predicting sequence
YTVPLQLL

SEQ ID NO: 20961 - protein, 7 aa, Artificial sequence
  Protein classification predicting sequence
PLQLLSY

SEQ ID NO: 20962 - protein, 7 aa, Artificial sequence
  Protein classification predicting sequence
GSYAFAL

SEQ ID NO: 20963 - protein, 44 aa, Artificial sequence
  Protein classification predicting sequence
IYVAKNKSPLLIGLGEGYNMVCSDAMAMIRETSEFMEIHDKELV

SEQ ID NO: 20964 - protein, 7 aa, Artificial sequence
  Protein classification predicting sequence
GTSYHAG

SEQ ID NO: 20965 - protein, 11 aa, Artificial sequence
  Protein classification predicting sequence
LAFLAKAVGEA

SEQ ID NO: 20966 - protein, 13 aa, Artificial sequence
  Protein classification predicting sequence
MVIPTQLIAYYAS

SEQ ID NO: 20967 - protein, 10 aa, Artificial sequence
  Protein classification predicting sequence
DVDKPRNLAK

SEQ ID NO: 20968 - protein, 15 aa, Artificial sequence
  Protein classification predicting sequence
GLEKLEYRGYDSAGI

SEQ ID NO: 20969 - protein, 15 aa, Artificial sequence
  Protein classification predicting sequence
YIVAAGTSYHAGLVG

SEQ ID NO: 20970 - protein, 12 aa, Artificial sequence
  Protein classification predicting sequence
AAGTSYHAGLVG

SEQ ID NO: 20971 - protein, 7 aa, Artificial sequence
  Protein classification predicting sequence
VPTEVHV

SEQ ID NO: 20972 - protein, 7 aa, Artificial sequence
  Protein classification predicting sequence
QSGETAD

SEQ ID NO: 20973 - protein, 10 aa, Artificial sequence
  Protein classification predicting sequence
STLSREATYT

SEQ ID NO: 20974 - protein, 6 aa, Artificial sequence
  Protein classification predicting sequence
QAEGFA

SEQ ID NO: 20975 - protein, 7 aa, Artificial sequence
  Protein classification predicting sequence
QEVAARG

SEQ ID NO: 20976 - protein, 7 aa, Artificial sequence
  Protein classification predicting sequence
SLAICNV

SEQ ID NO: 20977 - protein, 8 aa, Artificial sequence
  Protein classification predicting sequence
LEYRGYDS

SEQ ID NO: 20978 - protein, 11 aa, Artificial sequence
  Protein classification predicting sequence
GIGHTRWATHG

SEQ ID NO: 20979 - protein, 8 aa, Artificial sequence
  Protein classification predicting sequence
LYTHAGPE

SEQ ID NO: 20980 - protein, 6 aa, Artificial sequence
  Protein classification predicting sequence
SEFRYR

SEQ ID NO: 20981 - protein, 10 aa, Artificial sequence
  Protein classification predicting sequence
LSLLHGSYAI

SEQ ID NO: 20982 - protein, 8 aa, Artificial sequence
  Protein classification predicting sequence
AKNKSPLL

SEQ ID NO: 20983 - protein, 8 aa, Artificial sequence
  Protein classification predicting sequence
FNVIASDA

SEQ ID NO: 20984 - protein, 8 aa, Artificial sequence
  Protein classification predicting sequence
TNVPGSTL

SEQ ID NO: 20985 - protein, 6 aa, Artificial sequence
  Protein classification predicting sequence
SEYRYR

SEQ ID NO: 20986 - protein, 9 aa, Artificial sequence
  Protein classification predicting sequence
RLEYRGYDS

SEQ ID NO: 20987 - protein, 6 aa, Artificial sequence
  Protein classification predicting sequence
NFLASD

SEQ ID NO: 20988 - protein, 7 aa, Artificial sequence
  Protein classification predicting sequence
HFMLKEI

SEQ ID NO: 20989 - protein, 9 aa, Artificial sequence
  Protein classification predicting sequence
TDTEVIAHL

SEQ ID NO: 20990 - protein, 6 aa, Artificial sequence
  Protein classification predicting sequence
RWATHG

SEQ ID NO: 20991 - protein, 8 aa, Artificial sequence
  Protein classification predicting sequence
AGPEIGVA

SEQ ID NO: 20992 - protein, 7 aa, Artificial sequence
  Protein classification predicting sequence
EYRGYDS

SEQ ID NO: 20993 - protein, 10 aa, Artificial sequence
  Protein classification predicting sequence
LTVRRRAGRL

SEQ ID NO: 20994 - protein, 19 aa, Artificial sequence
  Protein classification predicting sequence
RWATHGRPTDRNAHPHRDA

SEQ ID NO: 20995 - protein, 27 aa, Artificial sequence
  Protein classification predicting sequence
FHIDWDLAAAEKGGYEYFMLKEIAEQP

SEQ ID NO: 20996 - protein, 94 aa, Artificial sequence
  Protein classification predicting sequence
IEHWTRLPVEVELASEFRYRDPVLDRSTLVVAISQSGETADTLEAVRHAKEQKAKVLAICNTNGSQIPRECDAVLYTRAGPEIGVASTKTFLAQ

SEQ ID NO: 20997 - protein, 9 aa, Artificial sequence
  Protein classification predicting sequence
SVLAVLRRL

SEQ ID NO: 20998 - protein, 9 aa, Artificial sequence
  Protein classification predicting sequence
ELGQDQAVV

SEQ ID NO: 20999 - protein, 8 aa, Artificial sequence
  Protein classification predicting sequence
MPSPKGSA

SEQ ID NO: 21000 - protein, 13 aa, Artificial sequence
  Protein classification predicting sequence
LHAKLLSNIREIQ

SEQ ID NO: 21001 - protein, 9 aa, Artificial sequence
  Protein classification predicting sequence
EYRGYDSAG

SEQ ID NO: 21002 - protein, 21 aa, Artificial sequence
  Protein classification predicting sequence
RIVLDEQRLSDQELREIDKVF

SEQ ID NO: 21003 - protein, 19 aa, Artificial sequence
  Protein classification predicting sequence
AISQSGETADTLEAVRHAK

SEQ ID NO: 21004 - protein, 19 aa, Artificial sequence
  Protein classification predicting sequence
QKAKVLAICNTNGSQIPRE

SEQ ID NO: 21005 - protein, 13 aa, Artificial sequence
  Protein classification predicting sequence
VLYTRAGPEIGVA

SEQ ID NO: 21006 - protein, 16 aa, Artificial sequence
  Protein classification predicting sequence
GLALAQARGTKYPDEV

SEQ ID NO: 21007 - protein, 13 aa, Artificial sequence
  Protein classification predicting sequence
AAGELKHGPIALI

SEQ ID NO: 21008 - protein, 8 aa, Artificial sequence
  Protein classification predicting sequence
KHGPIALI

SEQ ID NO: 21009 - protein, 14 aa, Artificial sequence
  Protein classification predicting sequence
QPLLSTIPLQVFAA

SEQ ID NO: 21010 - protein, 12 aa, Artificial sequence
  Protein classification predicting sequence
GLKRLEYRGYDS

SEQ ID NO: 21011 - protein, 8 aa, Artificial sequence
  Protein classification predicting sequence
ARMGCPLL

SEQ ID NO: 21012 - protein, 7 aa, Artificial sequence
  Protein classification predicting sequence
VLYTRAG

SEQ ID NO: 21013 - protein, 7 aa, Artificial sequence
  Protein classification predicting sequence
YIHAEAY

SEQ ID NO: 21014 - protein, 13 aa, Artificial sequence
  Protein classification predicting sequence
GIGHTRWATHGKP

SEQ ID NO: 21015 - protein, 7 aa, Artificial sequence
  Protein classification predicting sequence
IVACGTS

SEQ ID NO: 21016 - protein, 15 aa, Artificial sequence
  Protein classification predicting sequence
VSFISETDTEVIVQL

SEQ ID NO: 21017 - protein, 11 aa, Artificial sequence
  Protein classification predicting sequence
SETDTEVIVQL

SEQ ID NO: 21018 - protein, 7 aa, Artificial sequence
  Protein classification predicting sequence
AEIDASD

SEQ ID NO: 21019 - protein, 7 aa, Artificial sequence
  Protein classification predicting sequence
EKGTYPH

SEQ ID NO: 21020 - protein, 6 aa, Artificial sequence
  Protein classification predicting sequence
IIQEYQ

SEQ ID NO: 21021 - protein, 11 aa, Artificial sequence
  Protein classification predicting sequence
ALKLKEISYIQ

SEQ ID NO: 21022 - protein, 16 aa, Artificial sequence
  Protein classification predicting sequence
ALKLKEISYIQAEGFA

SEQ ID NO: 21023 - protein, 7 aa, Artificial sequence
  Protein classification predicting sequence
EVVARGA

SEQ ID NO: 21024 - protein, 10 aa, Artificial sequence
  Protein classification predicting sequence
LLTPLASVIP

SEQ ID NO: 21025 - protein, 19 aa, Artificial sequence
  Protein classification predicting sequence
GENFLASDQLALLNVTRRF

SEQ ID NO: 21026 - protein, 12 aa, Artificial sequence
  Protein classification predicting sequence
VTRRFIFLEEGD

SEQ ID NO: 21027 - protein, 8 aa, Artificial sequence
  Protein classification predicting sequence
RHFMQKEI

SEQ ID NO: 21028 - protein, 6 aa, Artificial sequence
  Protein classification predicting sequence
VEHIQI

SEQ ID NO: 21029 - protein, 19 aa, Artificial sequence
  Protein classification predicting sequence
SCDVEIASEFRYRKFVTRP

SEQ ID NO: 21030 - protein, 11 aa, Artificial sequence
  Protein classification predicting sequence
DKHHALFLGRG

SEQ ID NO: 21031 - protein, 8 aa, Artificial sequence
  Protein classification predicting sequence
YTIPMQLL

SEQ ID NO: 21032 - protein, 15 aa, Artificial sequence
  Protein classification predicting sequence
EGLRRLEYRGYDSAG

SEQ ID NO: 21033 - protein, 20 aa, Artificial sequence
  Protein classification predicting sequence
EGLRRLEYRGYDSAGLAVVD

SEQ ID NO: 21034 - protein, 22 aa, Artificial sequence
  Protein classification predicting sequence
QYDAGDKGIYRHYMQKEIYEQP

SEQ ID NO: 21035 - protein, 14 aa, Artificial sequence
  Protein classification predicting sequence
SHGQVDLSELGPNA

SEQ ID NO: 21036 - protein, 10 aa, Artificial sequence
  Protein classification predicting sequence
LRLSKELGYL

SEQ ID NO: 21037 - protein, 13 aa, Artificial sequence
  Protein classification predicting sequence
CNVAGSSLVRESD

SEQ ID NO: 21038 - protein, 8 aa, Artificial sequence
  Protein classification predicting sequence
EEVRARGG

SEQ ID NO: 21039 - protein, 11 aa, Artificial sequence
  Protein classification predicting sequence
LYVFADQDAGF

SEQ ID NO: 21040 - protein, 18 aa, Artificial sequence
  Protein classification predicting sequence
GGTGIAHTRWATHGEPSE

SEQ ID NO: 21041 - protein, 7 aa, Artificial sequence
  Protein classification predicting sequence
NAHPHVS

SEQ ID NO: 21042 - protein, 14 aa, Artificial sequence
  Protein classification predicting sequence
EQPTALINTMEGRI

SEQ ID NO: 21043 - protein, 24 aa, Artificial sequence
  Protein classification predicting sequence
VEHVQIVACGTSYNAGMTARYWFE

SEQ ID NO: 21044 - protein, 7 aa, Artificial sequence
  Protein classification predicting sequence
AFMTRAG

SEQ ID NO: 21045 - protein, 6 aa, Artificial sequence
  Protein classification predicting sequence
YPIAME

SEQ ID NO: 21046 - protein, 7 aa, Artificial sequence
  Protein classification predicting sequence
PMQLLSY

SEQ ID NO: 21047 - protein, 19 aa, Artificial sequence
  Protein classification predicting sequence
YHVALIKGTDVDQPRNLAK

SEQ ID NO: 21048 - protein, 7 aa, Artificial sequence
  Protein classification predicting sequence
VAPNNEL

SEQ ID NO: 21049 - protein, 9 aa, Artificial sequence
  Protein classification predicting sequence
RFMYLEEGD

SEQ ID NO: 21050 - protein, 8 aa, Artificial sequence
  Protein classification predicting sequence
QLLSYYVA

SEQ ID NO: 21051 - protein, 6 aa, Artificial sequence
  Protein classification predicting sequence
GTSYHA

SEQ ID NO: 21052 - protein, 8 aa, Artificial sequence
  Protein classification predicting sequence
QSGETADT

SEQ ID NO: 21053 - protein, 11 aa, Artificial sequence
  Protein classification predicting sequence
RLEYRGYDSAG

SEQ ID NO: 21054 - protein, 7 aa, Artificial sequence
  Protein classification predicting sequence
VHNGIIE

SEQ ID NO: 21055 - protein, 7 aa, Artificial sequence
  Protein classification predicting sequence
GVGEGFN

SEQ ID NO: 21056 - protein, 22 aa, Artificial sequence
  Protein classification predicting sequence
TLYTHAGPEIGVAATKTYTTQL

SEQ ID NO: 21057 - protein, 7 aa, Artificial sequence
  Protein classification predicting sequence
DCTGKIV

SEQ ID NO: 21058 - protein, 12 aa, Artificial sequence
  Protein classification predicting sequence
MGTSYHAALVGK

SEQ ID NO: 21059 - protein, 17 aa, Artificial sequence
  Protein classification predicting sequence
HAEGLSAGELKHGPLAL

SEQ ID NO: 21060 - protein, 10 aa, Artificial sequence
  Protein classification predicting sequence
SNIEEAKARG

SEQ ID NO: 21061 - protein, 19 aa, Artificial sequence
  Protein classification predicting sequence
ELGPYRHFMQKEIFEQPRA

SEQ ID NO: 21062 - protein, 13 aa, Artificial sequence
  Protein classification predicting sequence
TAKYWLESIAKIP

SEQ ID NO: 21063 - protein, 9 aa, Artificial sequence
  Protein classification predicting sequence
VPNPNALVV

SEQ ID NO: 21064 - protein, 30 aa, Artificial sequence
  Protein classification predicting sequence
EGALKLKEISYIHAEAYPAGELKHGPLALV

SEQ ID NO: 21065 - protein, 9 aa, Artificial sequence
  Protein classification predicting sequence
MPVVTVAPN

SEQ ID NO: 21066 - protein, 7 aa, Artificial sequence
  Protein classification predicting sequence
EVRARGG

SEQ ID NO: 21067 - protein, 8 aa, Artificial sequence
  Protein classification predicting sequence
ASEFRYRE

SEQ ID NO: 21068 - protein, 12 aa, Artificial sequence
  Protein classification predicting sequence
ASEFRYREMPLS

SEQ ID NO: 21069 - protein, 12 aa, Artificial sequence
  Protein classification predicting sequence
FISQSGETADTL

SEQ ID NO: 21070 - protein, 12 aa, Artificial sequence
  Protein classification predicting sequence
RRRAEGKLVNLE

SEQ ID NO: 21071 - protein, 17 aa, Artificial sequence
  Protein classification predicting sequence
LRAIPQLRGAYGTVIMD

SEQ ID NO: 21072 - protein, 168 aa, Artificial sequence
  Protein classification predicting sequence
LLSKVEHIQILACGTSYNSGMVSRYWFESLAGIPCDVEIASEFRYRKSAVRRNSLMITLSQSGETADTLAGLRLSKELGYLGSLAICNVPGSSLVRESDLALMTNAGTEIGVASTKAFTTQLTVLLMLVAKLSRLKGLDASIEHDIVHGLQALPSRIEQMLSQDKRIE

SEQ ID NO: 21073 - protein, 60 aa, Artificial sequence
  Protein classification predicting sequence
RHPDTLLAARSGSPLVIGLGMGENFIASDQLALLPVTRRFIFLEEGDIAEITRRSVNIFD

SEQ ID NO: 21074 - protein, 6 aa, Artificial sequence
  Protein classification predicting sequence
TDTEVI

SEQ ID NO: 21075 - protein, 8 aa, Artificial sequence
  Protein classification predicting sequence
LEEGDVAE

SEQ ID NO: 21076 - protein, 6 aa, Artificial sequence
  Protein classification predicting sequence
DAGDKG

SEQ ID NO: 21077 - protein, 11 aa, Artificial sequence
  Protein classification predicting sequence
EIGVASTKAFT

SEQ ID NO: 21078 - protein, 18 aa, Artificial sequence
  Protein classification predicting sequence
EGALKLKEISYIHAEAYA

SEQ ID NO: 21079 - protein, 15 aa, Artificial sequence
  Protein classification predicting sequence
LKLKEISYIHAEAYA

SEQ ID NO: 21080 - protein, 17 aa, Artificial sequence
  Protein classification predicting sequence
GELKHGPLALIDADMPV

SEQ ID NO: 21081 - protein, 8 aa, Artificial sequence
  Protein classification predicting sequence
FKEKGRIA

SEQ ID NO: 21082 - protein, 15 aa, Artificial sequence
  Protein classification predicting sequence
FKEKGRIAELRKVAD

SEQ ID NO: 21083 - protein, 5 aa, Artificial sequence
  Protein classification predicting sequence
HPHQS

SEQ ID NO: 21084 - protein, 12 aa, Artificial sequence
  Protein classification predicting sequence
LLHGSYALGLLD

SEQ ID NO: 21085 - protein, 18 aa, Artificial sequence
  Protein classification predicting sequence
GVGEGFNVIASDALAMLQ

SEQ ID NO: 21086 - protein, 13 aa, Artificial sequence
  Protein classification predicting sequence
YKEIHDHEIVIVK

SEQ ID NO: 21087 - protein, 7 aa, Artificial sequence
  Protein classification predicting sequence
DAEKGVY

SEQ ID NO: 21088 - protein, 9 aa, Artificial sequence
  Protein classification predicting sequence
AAGTSYHAG

SEQ ID NO: 21089 - protein, 15 aa, Artificial sequence
  Protein classification predicting sequence
AAGTSYHAGLVGKEF

SEQ ID NO: 21090 - protein, 16 aa, Artificial sequence
  Protein classification predicting sequence
YISQSGETADSRAVLV

SEQ ID NO: 21091 - protein, 14 aa, Artificial sequence
  Protein classification predicting sequence
DLLRELAKVTTAIE

SEQ ID NO: 21092 - protein, 9 aa, Artificial sequence
  Protein classification predicting sequence
MEQIATDFL

SEQ ID NO: 21093 - protein, 8 aa, Artificial sequence
  Protein classification predicting sequence
VNLSIRGN

SEQ ID NO: 21094 - protein, 9 aa, Artificial sequence
  Protein classification predicting sequence
KEGDTYVIP

SEQ ID NO: 21095 - protein, 9 aa, Artificial sequence
  Protein classification predicting sequence
QLISYYAAL

SEQ ID NO: 21096 - protein, 23 aa, Artificial sequence
  Protein classification predicting sequence
HYMLKEIHEQPAVMRRIIQEYQD

SEQ ID NO: 21097 - protein, 29 aa, Artificial sequence
  Protein classification predicting sequence
EKWAGVPTEVHVASEFVYNMPLLSEKPLF

SEQ ID NO: 21098 - protein, 76 aa, Artificial sequence
  Protein classification predicting sequence
YISQSGETADSRAVLVETNKLGHKSLTITNVAGSTLSREADHTLLLHAGPEIAVASTKAYTAQIAVLSILSQIVAK

SEQ ID NO: 21099 - protein, 7 aa, Artificial sequence
  Protein classification predicting sequence
KSVGRIA

SEQ ID NO: 21100 - protein, 20 aa, Artificial sequence
  Protein classification predicting sequence
QEADRLYILAAGTSYHAGFA

SEQ ID NO: 21101 - protein, 12 aa, Artificial sequence
  Protein classification predicting sequence
TNVPGSTLSREA

SEQ ID NO: 21102 - protein, 11 aa, Artificial sequence
  Protein classification predicting sequence
EGFAAGELKHG

SEQ ID NO: 21103 - protein, 9 aa, Artificial sequence
  Protein classification predicting sequence
HTRGNIQEV

SEQ ID NO: 21104 - protein, 15 aa, Artificial sequence
  Protein classification predicting sequence
REGDDIIVNKVHPFL

SEQ ID NO: 21105 - protein, 10 aa, Artificial sequence
  Protein classification predicting sequence
FMLKEIAEQP

SEQ ID NO: 21106 - protein, 13 aa, Artificial sequence
  Protein classification predicting sequence
EVELASEFRYRDP

SEQ ID NO: 21107 - protein, 7 aa, Artificial sequence
  Protein classification predicting sequence
EFRYRDP

SEQ ID NO: 21108 - protein, 12 aa, Artificial sequence
  Protein classification predicting sequence
TLVVAISQSGET

SEQ ID NO: 21109 - protein, 7 aa, Artificial sequence
  Protein classification predicting sequence
AVASTKA

SEQ ID NO: 21110 - protein, 12 aa, Artificial sequence
  Protein classification predicting sequence
PVALEGALKLKE

SEQ ID NO: 21111 - protein, 35 aa, Artificial sequence
  Protein classification predicting sequence
LIKSVGRIADLRAKIGIDVAGSTGIGHTRWATHGQ

SEQ ID NO: 21112 - protein, 12 aa, Artificial sequence
  Protein classification predicting sequence
VLVHNGVIENYL

SEQ ID NO: 21113 - protein, 11 aa, Artificial sequence
  Protein classification predicting sequence
IYVAKNKSPLL

SEQ ID NO: 21114 - protein, 16 aa, Artificial sequence
  Protein classification predicting sequence
YTAELDLSDIGKGTYP

SEQ ID NO: 21115 - protein, 6 aa, Artificial sequence
  Protein classification predicting sequence
YMLKEI

SEQ ID NO: 21116 - protein, 10 aa, Artificial sequence
  Protein classification predicting sequence
YMLKEIDEQP

SEQ ID NO: 21117 - protein, 7 aa, Artificial sequence
  Protein classification predicting sequence
GTSYNAG

SEQ ID NO: 21118 - protein, 9 aa, Artificial sequence
  Protein classification predicting sequence
LTDTPVELG

SEQ ID NO: 21119 - protein, 8 aa, Artificial sequence
  Protein classification predicting sequence
LATSRNAF

SEQ ID NO: 21120 - protein, 8 aa, Artificial sequence
  Protein classification predicting sequence
DYYVAMEA

SEQ ID NO: 21121 - protein, 9 aa, Artificial sequence
  Protein classification predicting sequence
VLTVVEEGL

SEQ ID NO: 21122 - protein, 11 aa, Artificial sequence
  Protein classification predicting sequence
TNVPGSTLSRE

SEQ ID NO: 21123 - protein, 7 aa, Artificial sequence
  Protein classification predicting sequence
GSTLSRE

SEQ ID NO: 21124 - protein, 22 aa, Artificial sequence
  Protein classification predicting sequence
KIGIDVAGSTGIGHTRWATHGQ

SEQ ID NO: 21125 - protein, 8 aa, Artificial sequence
  Protein classification predicting sequence
LSVLEAFK

SEQ ID NO: 21126 - protein, 10 aa, Artificial sequence
  Protein classification predicting sequence
IIEGSYAFAL

SEQ ID NO: 21127 - protein, 15 aa, Artificial sequence
  Protein classification predicting sequence
FMEIHDKELVILTKD

SEQ ID NO: 21128 - protein, 18 aa, Artificial sequence
  Protein classification predicting sequence
EQLTDTPVELGVASEWGY

SEQ ID NO: 21129 - protein, 7 aa, Artificial sequence
  Protein classification predicting sequence
YNMPLLS

SEQ ID NO: 21130 - protein, 24 aa, Artificial sequence
  Protein classification predicting sequence
KPMFILLSQSGETADSRQVLVKAN

SEQ ID NO: 21131 - protein, 19 aa, Artificial sequence
  Protein classification predicting sequence
LLHAGPEIAVASTKAYTAQ

SEQ ID NO: 21132 - protein, 16 aa, Artificial sequence
  Protein classification predicting sequence
AGPEIAVASTKAYTAQ

SEQ ID NO: 21133 - protein, 6 aa, Artificial sequence
  Protein classification predicting sequence
LVHELS

SEQ ID NO: 21134 - protein, 21 aa, Artificial sequence
  Protein classification predicting sequence
LVHELSLVAQSIEATLSEKDL

SEQ ID NO: 21135 - protein, 8 aa, Artificial sequence
  Protein classification predicting sequence
LIEDGTPV

SEQ ID NO: 21136 - protein, 17 aa, Artificial sequence
  Protein classification predicting sequence
FKGQTDTEIAVHLIGKF

SEQ ID NO: 21137 - protein, 10 aa, Artificial sequence
  Protein classification predicting sequence
SQSGETADSR

SEQ ID NO: 21138 - protein, 19 aa, Artificial sequence
  Protein classification predicting sequence
HAGPEIAVASTKAYTAQIA

SEQ ID NO: 21139 - protein, 12 aa, Artificial sequence
  Protein classification predicting sequence
GELKHGTIALIE

SEQ ID NO: 21140 - protein, 7 aa, Artificial sequence
  Protein classification predicting sequence
PLVIGLG

SEQ ID NO: 21141 - protein, 8 aa, Artificial sequence
  Protein classification predicting sequence
EGALKIKE

SEQ ID NO: 21142 - protein, 5 aa, Artificial sequence
  Protein classification predicting sequence
KHGPI

SEQ ID NO: 21143 - protein, 8 aa, Artificial sequence
  Protein classification predicting sequence
QLLAYYAA

SEQ ID NO: 21144 - protein, 7 aa, Artificial sequence
  Protein classification predicting sequence
HAGLVGK

SEQ ID NO: 21145 - protein, 8 aa, Artificial sequence
  Protein classification predicting sequence
AGIEIGVA

SEQ ID NO: 21146 - protein, 9 aa, Artificial sequence
  Protein classification predicting sequence
LGITNRPES

SEQ ID NO: 21147 - protein, 9 aa, Artificial sequence
  Protein classification predicting sequence
FRSETDTEV

SEQ ID NO: 21148 - protein, 6 aa, Artificial sequence
  Protein classification predicting sequence
FYIGRG

SEQ ID NO: 21149 - protein, 6 aa, Artificial sequence
  Protein classification predicting sequence
ARGGEL

SEQ ID NO: 21150 - protein, 6 aa, Artificial sequence
  Protein classification predicting sequence
QLLAYH

SEQ ID NO: 21151 - protein, 6 aa, Artificial sequence
  Protein classification predicting sequence
KGTDVD

SEQ ID NO: 21152 - protein, 6 aa, Artificial sequence
  Protein classification predicting sequence
LVRESD

SEQ ID NO: 21153 - protein, 6 aa, Artificial sequence
  Protein classification predicting sequence
YPIALE

SEQ ID NO: 21154 - protein, 13 aa, Artificial sequence
  Protein classification predicting sequence
RRLGKVQELADAV

SEQ ID NO: 21155 - protein, 8 aa, Artificial sequence
  Protein classification predicting sequence
VVARSGSP

SEQ ID NO: 21156 - protein, 77 aa, Artificial sequence
  Protein classification predicting sequence
AGVSCDVEIASEFRYRKFVTRPNSLLITLSQSGETADTLAALRLAKEKGYMAAMTICNVAGSSLVRESDFAFMTRAG

SEQ ID NO: 21157 - protein, 14 aa, Artificial sequence
  Protein classification predicting sequence
EIGVASTKAFTTQL

SEQ ID NO: 21158 - protein, 12 aa, Artificial sequence
  Protein classification predicting sequence
EASLKLKEISYI

SEQ ID NO: 21159 - protein, 9 aa, Artificial sequence
  Protein classification predicting sequence
TRIRRLGKV

SEQ ID NO: 21160 - protein, 6 aa, Artificial sequence
  Protein classification predicting sequence
RRLGKV

SEQ ID NO: 21161 - protein, 10 aa, Artificial sequence
  Protein classification predicting sequence
ACGTSYNAGM

SEQ ID NO: 21162 - protein, 18 aa, Artificial sequence
  Protein classification predicting sequence
RISKEKEKEIVEALHALP

SEQ ID NO: 21163 - protein, 29 aa, Artificial sequence
  Protein classification predicting sequence
LKLKEISYIHAEAYAAGELKHGPLALIDA

SEQ ID NO: 21164 - protein, 7 aa, Artificial sequence
  Protein classification predicting sequence
RRLGKVQ

SEQ ID NO: 21165 - protein, 12 aa, Artificial sequence
  Protein classification predicting sequence
FESQTDTEVIAH

SEQ ID NO: 21166 - protein, 10 aa, Artificial sequence
  Protein classification predicting sequence
SQTDTEVIAH

SEQ ID NO: 21167 - protein, 8 aa, Artificial sequence
  Protein classification predicting sequence
ASDQLALL

SEQ ID NO: 21168 - protein, 7 aa, Artificial sequence
  Protein classification predicting sequence
GDIAEIT

SEQ ID NO: 21169 - protein, 6 aa, Artificial sequence
  Protein classification predicting sequence
RIEQML

SEQ ID NO: 21170 - protein, 8 aa, Artificial sequence
  Protein classification predicting sequence
AAGELKHG

SEQ ID NO: 21171 - protein, 6 aa, Artificial sequence
  Protein classification predicting sequence
GEGENF

SEQ ID NO: 21172 - protein, 7 aa, Artificial sequence
  Protein classification predicting sequence
IFLEEGD

SEQ ID NO: 21173 - protein, 8 aa, Artificial sequence
  Protein classification predicting sequence
AGMTARYW

SEQ ID NO: 21174 - protein, 8 aa, Artificial sequence
  Protein classification predicting sequence
TISQSGET

SEQ ID NO: 21175 - protein, 23 aa, Artificial sequence
  Protein classification predicting sequence
TISQSGETLDTMEALKYAKSLGH

SEQ ID NO: 21176 - protein, 15 aa, Artificial sequence
  Protein classification predicting sequence
LPGSVQHALNLEPQI

SEQ ID NO: 21177 - protein, 9 aa, Artificial sequence
  Protein classification predicting sequence
LEPQIMAWA

SEQ ID NO: 21178 - protein, 7 aa, Artificial sequence
  Protein classification predicting sequence
ALFLGRG

SEQ ID NO: 21179 - protein, 7 aa, Artificial sequence
  Protein classification predicting sequence
EANAHPH

SEQ ID NO: 21180 - protein, 8 aa, Artificial sequence
  Protein classification predicting sequence
ILACGTSY

SEQ ID NO: 21181 - protein, 9 aa, Artificial sequence
  Protein classification predicting sequence
HHALFLGRG

SEQ ID NO: 21182 - protein, 14 aa, Artificial sequence
  Protein classification predicting sequence
ICNVAGSSLVRESD

SEQ ID NO: 21183 - protein, 14 aa, Artificial sequence
  Protein classification predicting sequence
GSSLVRESDLALMT

SEQ ID NO: 21184 - protein, 7 aa, Artificial sequence
  Protein classification predicting sequence
RIEQMLS

SEQ ID NO: 21185 - protein, 17 aa, Artificial sequence
  Protein classification predicting sequence
EGALKLKEISYIHAEAY

SEQ ID NO: 21186 - protein, 8 aa, Artificial sequence
  Protein classification predicting sequence
AGMVARYW

SEQ ID NO: 21187 - protein, 32 aa, Artificial sequence
  Protein classification predicting sequence
RHRKAGDTRYLVEPNVKEGKGGLRDLHTLFWI

SEQ ID NO: 21188 - protein, 8 aa, Artificial sequence
  Protein classification predicting sequence
DFLWAVRC

SEQ ID NO: 21189 - protein, 6 aa, Artificial sequence
  Protein classification predicting sequence
TEITVL

SEQ ID NO: 21190 - protein, 8 aa, Artificial sequence
  Protein classification predicting sequence
GGYGRGEL

SEQ ID NO: 21191 - protein, 8 aa, Artificial sequence
  Protein classification predicting sequence
TIRTAILE

SEQ ID NO: 21192 - protein, 7 aa, Artificial sequence
  Protein classification predicting sequence
AKLAERD

SEQ ID NO: 21193 - protein, 6 aa, Artificial sequence
  Protein classification predicting sequence
GGLRDL

SEQ ID NO: 21194 - protein, 7 aa, Artificial sequence
  Protein classification predicting sequence
HDIAKGR

SEQ ID NO: 21195 - protein, 8 aa, Artificial sequence
  Protein classification predicting sequence
SDIDLLIL

SEQ ID NO: 21196 - protein, 24 aa, Artificial sequence
  Protein classification predicting sequence
YNDTEYNLEPNVKGSPGGLRDIQT

SEQ ID NO: 21197 - protein, 5 aa, Artificial sequence
  Protein classification predicting sequence
LWNSW

SEQ ID NO: 21198 - protein, 6 aa, Artificial sequence
  Protein classification predicting sequence
IVGQMQ

SEQ ID NO: 21199 - protein, 6 aa, Artificial sequence
  Protein classification predicting sequence
YGRGEL

SEQ ID NO: 21200 - protein, 9 aa, Artificial sequence
  Protein classification predicting sequence
RYLVEPNVK

SEQ ID NO: 21201 - protein, 7 aa, Artificial sequence
  Protein classification predicting sequence
LEDQQAK

SEQ ID NO: 21202 - protein, 10 aa, Artificial sequence
  Protein classification predicting sequence
VGPGVWNGWK

SEQ ID NO: 21203 - protein, 8 aa, Artificial sequence
  Protein classification predicting sequence
AVGGYGRG

SEQ ID NO: 21204 - protein, 7 aa, Artificial sequence
  Protein classification predicting sequence
DMTIRTA

SEQ ID NO: 21205 - protein, 15 aa, Artificial sequence
  Protein classification predicting sequence
TRYLVEPNVKEGKGG

SEQ ID NO: 21206 - protein, 9 aa, Artificial sequence
  Protein classification predicting sequence
RDLHTLFWI

SEQ ID NO: 21207 - protein, 11 aa, Artificial sequence
  Protein classification predicting sequence
KAEERLSFDIQ

SEQ ID NO: 21208 - protein, 21 aa, Artificial sequence
  Protein classification predicting sequence
VERFMKHYFLVAKDVGDLTRI

SEQ ID NO: 21209 - protein, 6 aa, Artificial sequence
  Protein classification predicting sequence
LRRMNE

SEQ ID NO: 21210 - protein, 12 aa, Artificial sequence
  Protein classification predicting sequence
AGVLGRFIPEFG

SEQ ID NO: 21211 - protein, 7 aa, Artificial sequence
  Protein classification predicting sequence
MQFNMYH

SEQ ID NO: 21212 - protein, 7 aa, Artificial sequence
  Protein classification predicting sequence
GHSVRTL

SEQ ID NO: 21213 - protein, 9 aa, Artificial sequence
  Protein classification predicting sequence
DLFHVYTVD

SEQ ID NO: 21214 - protein, 6 aa, Artificial sequence
  Protein classification predicting sequence
YTVDEH

SEQ ID NO: 21215 - protein, 8 aa, Artificial sequence
  Protein classification predicting sequence
VVRNLRRF

SEQ ID NO: 21216 - protein, 7 aa, Artificial sequence
  Protein classification predicting sequence
AVGGYGR

SEQ ID NO: 21217 - protein, 7 aa, Artificial sequence
  Protein classification predicting sequence
SPGGLRD

SEQ ID NO: 21218 - protein, 6 aa, Artificial sequence
  Protein classification predicting sequence
RFALHL

SEQ ID NO: 21219 - protein, 7 aa, Artificial sequence
  Protein classification predicting sequence
MQFDLFH

SEQ ID NO: 21220 - protein, 9 aa, Artificial sequence
  Protein classification predicting sequence
DLFHIYTVD

SEQ ID NO: 21221 - protein, 9 aa, Artificial sequence
  Protein classification predicting sequence
RVMLKLESF

SEQ ID NO: 21222 - protein, 7 aa, Artificial sequence
  Protein classification predicting sequence
TAQRRDI

SEQ ID NO: 21223 - protein, 17 aa, Artificial sequence
  Protein classification predicting sequence
LIEARTEFIDQLLQRLW

SEQ ID NO: 21224 - protein, 7 aa, Artificial sequence
  Protein classification predicting sequence
QAQKVGE

SEQ ID NO: 21225 - protein, 27 aa, Artificial sequence
  Protein classification predicting sequence
VATNLIESRLLIGDVALFLELQKHIFS

SEQ ID NO: 21226 - protein, 8 aa, Artificial sequence
  Protein classification predicting sequence
AAKVEEQN

SEQ ID NO: 21227 - protein, 20 aa, Artificial sequence
  Protein classification predicting sequence
ARRHFGATSLDEMVGFGFLT

SEQ ID NO: 21228 - protein, 7 aa, Artificial sequence
  Protein classification predicting sequence
ELNECLH

SEQ ID NO: 21229 - protein, 10 aa, Artificial sequence
  Protein classification predicting sequence
LWRIRFALHL

SEQ ID NO: 21230 - protein, 14 aa, Artificial sequence
  Protein classification predicting sequence
FRVTRRVSELNQML

SEQ ID NO: 21231 - protein, 12 aa, Artificial sequence
  Protein classification predicting sequence
FQLRGTLIDLRD

SEQ ID NO: 21232 - protein, 13 aa, Artificial sequence
  Protein classification predicting sequence
AILRMFYTMVRNS

SEQ ID NO: 21233 - protein, 12 aa, Artificial sequence
  Protein classification predicting sequence
LLMSVTAQRRDI

SEQ ID NO: 21234 - protein, 48 aa, Artificial sequence
  Protein classification predicting sequence
LWNSWKQSLLRELYFATEKQLRRGMQNTPDMRERVRHHQLQALALLRM

SEQ ID NO: 21235 - protein, 10 aa, Artificial sequence
  Protein classification predicting sequence
RCRANYFVRH

SEQ ID NO: 21236 - protein, 9 aa, Artificial sequence
  Protein classification predicting sequence
PNQLAWHAR

SEQ ID NO: 21237 - protein, 22 aa, Artificial sequence
  Protein classification predicting sequence
ATRGGTEIFIWSPDRPYLFAAV

SEQ ID NO: 21238 - protein, 42 aa, Artificial sequence
  Protein classification predicting sequence
FADLGISLHGARITTIGERVEDLFIIATADRRALNNELQQEV

SEQ ID NO: 21239 - protein, 7 aa, Artificial sequence
  Protein classification predicting sequence
LVRHHLL

SEQ ID NO: 21240 - protein, 10 aa, Artificial sequence
  Protein classification predicting sequence
PGGLRDIHTL

SEQ ID NO: 21241 - protein, 6 aa, Artificial sequence
  Protein classification predicting sequence
QHDLFH

SEQ ID NO: 21242 - protein, 8 aa, Artificial sequence
  Protein classification predicting sequence
AWLVENHL

SEQ ID NO: 21243 - protein, 10 aa, Artificial sequence
  Protein classification predicting sequence
HLLMSAVAQK

SEQ ID NO: 21244 - protein, 6 aa, Artificial sequence
  Protein classification predicting sequence
TVATNL

SEQ ID NO: 21245 - protein, 11 aa, Artificial sequence
  Protein classification predicting sequence
CLTVADICATN

SEQ ID NO: 21246 - protein, 19 aa, Artificial sequence
  Protein classification predicting sequence
CLTVADICATNETLWNSWK

SEQ ID NO: 21247 - protein, 6 aa, Artificial sequence
  Protein classification predicting sequence
LWNSWK

SEQ ID NO: 21248 - protein, 6 aa, Artificial sequence
  Protein classification predicting sequence
ITTIGE

SEQ ID NO: 21249 - protein, 9 aa, Artificial sequence
  Protein classification predicting sequence
ATNLIESRL

SEQ ID NO: 21250 - protein, 6 aa, Artificial sequence
  Protein classification predicting sequence
RHQRYH

SEQ ID NO: 21251 - protein, 8 aa, Artificial sequence
  Protein classification predicting sequence
PVERMMKD

SEQ ID NO: 21252 - protein, 8 aa, Artificial sequence
  Protein classification predicting sequence
TRRVSELN

SEQ ID NO: 21253 - protein, 13 aa, Artificial sequence
  Protein classification predicting sequence
MLLQLFDEAILAL

SEQ ID NO: 21254 - protein, 8 aa, Artificial sequence
  Protein classification predicting sequence
GIYSTTLR

SEQ ID NO: 21255 - protein, 8 aa, Artificial sequence
  Protein classification predicting sequence
PMHRHSVL

SEQ ID NO: 21256 - protein, 22 aa, Artificial sequence
  Protein classification predicting sequence
IVGQMQFDLFHAYTVDEHTIRV

SEQ ID NO: 21257 - protein, 8 aa, Artificial sequence
  Protein classification predicting sequence
GDHSELGA

SEQ ID NO: 21258 - protein, 18 aa, Artificial sequence
  Protein classification predicting sequence
WLVRHHLLMSVTAQRRDI

SEQ ID NO: 21259 - protein, 15 aa, Artificial sequence
  Protein classification predicting sequence
LWNSWKQSLLRELYF

SEQ ID NO: 21260 - protein, 7 aa, Artificial sequence
  Protein classification predicting sequence
RERIRHN

SEQ ID NO: 21261 - protein, 11 aa, Artificial sequence
  Protein classification predicting sequence
TRGGTEIFIWS

SEQ ID NO: 21262 - protein, 10 aa, Artificial sequence
  Protein classification predicting sequence
ELDRRNLSVH

SEQ ID NO: 21263 - protein, 7 aa, Artificial sequence
  Protein classification predicting sequence
VTFLPTH

SEQ ID NO: 21264 - protein, 12 aa, Artificial sequence
  Protein classification predicting sequence
ALDQPGLLARVG

SEQ ID NO: 21265 - protein, 7 aa, Artificial sequence
  Protein classification predicting sequence
AGLYHDI

SEQ ID NO: 21266 - protein, 14 aa, Artificial sequence
  Protein classification predicting sequence
PLVLIKETTQREFE

SEQ ID NO: 21267 - protein, 16 aa, Artificial sequence
  Protein classification predicting sequence
QNAKIATLGERVEDVF

SEQ ID NO: 21268 - protein, 17 aa, Artificial sequence
  Protein classification predicting sequence
LDYLYVLTVADINATNP

SEQ ID NO: 21269 - protein, 10 aa, Artificial sequence
  Protein classification predicting sequence
RALRRGLENP

SEQ ID NO: 21270 - protein, 7 aa, Artificial sequence
  Protein classification predicting sequence
EDRLLFD

SEQ ID NO: 21271 - protein, 12 aa, Artificial sequence
  Protein classification predicting sequence
KGRGGDHSELGA

SEQ ID NO: 21272 - protein, 15 aa, Artificial sequence
  Protein classification predicting sequence
KGRGGDHSELGAVDA

SEQ ID NO: 21273 - protein, 21 aa, Artificial sequence
  Protein classification predicting sequence
LEPNCKESPGGLRDLQVILWM

SEQ ID NO: 21274 - protein, 21 aa, Artificial sequence
  Protein classification predicting sequence
FRRIVGQMQHDLFHVYTVDQH

SEQ ID NO: 21275 - protein, 15 aa, Artificial sequence
  Protein classification predicting sequence
ALYLLTVADIRGTSP

SEQ ID NO: 21276 - protein, 10 aa, Artificial sequence
  Protein classification predicting sequence
TLGERVEDVF

SEQ ID NO: 21277 - protein, 7 aa, Artificial sequence
  Protein classification predicting sequence
DAQIFTT

SEQ ID NO: 21278 - protein, 10 aa, Artificial sequence
  Protein classification predicting sequence
VERFMKHYFL

SEQ ID NO: 21279 - protein, 6 aa, Artificial sequence
  Protein classification predicting sequence
HDIAKG

SEQ ID NO: 21280 - protein, 8 aa, Artificial sequence
  Protein classification predicting sequence
RTLYYETE

SEQ ID NO: 21281 - protein, 17 aa, Artificial sequence
  Protein classification predicting sequence
QAQKVGELLTLLWDVKL

SEQ ID NO: 21282 - protein, 11 aa, Artificial sequence
  Protein classification predicting sequence
VGHSVRTLEEC

SEQ ID NO: 21283 - protein, 47 aa, Artificial sequence
  Protein classification predicting sequence
AELNECLHILWRIRFALHLVVSRYDNRLLFDRQLSVAQRLNYSGEGN

SEQ ID NO: 21284 - protein, 13 aa, Artificial sequence
  Protein classification predicting sequence
LVCLTVADICATN

SEQ ID NO: 21285 - protein, 11 aa, Artificial sequence
  Protein classification predicting sequence
FLPTHTDRKSF

SEQ ID NO: 21286 - protein, 25 aa, Artificial sequence
  Protein classification predicting sequence
AEQLIEARTEFIDQLLQRLWIEAGF

SEQ ID NO: 21287 - protein, 78 aa, Artificial sequence
  Protein classification predicting sequence
LQKHIFSEGFWPSDKFYAAKVEEQNQRHQRYHGTSYNLEPDIKSSPGGLRDIHTLQWVARRHFGATSLDEMVGFGFLT

SEQ ID NO: 21288 - protein, 42 aa, Artificial sequence
  Protein classification predicting sequence
PVERMMKDYFRVTRRVSELNQMLLQLFDEAILALPADEKPRP

SEQ ID NO: 21289 - protein, 50 aa, Artificial sequence
  Protein classification predicting sequence
FAELHGLNSRETQLVAWLVRQHLLMSVTAQRRDIQDPEVIKQFAEEVQTE

SEQ ID NO: 21290 - protein, 27 aa, Artificial sequence
  Protein classification predicting sequence
RCRANYFVRHSPNQLAWHARHLLQHDL

SEQ ID NO: 21291 - protein, 23 aa, Artificial sequence
  Protein classification predicting sequence
SWQPPQPRRQPAKLRHFTVETEV

SEQ ID NO: 21292 - protein, 6 aa, Artificial sequence
  Protein classification predicting sequence
TRGGTE

SEQ ID NO: 21293 - protein, 9 aa, Artificial sequence
  Protein classification predicting sequence
ALDTPGLLA

SEQ ID NO: 21294 - protein, 7 aa, Artificial sequence
  Protein classification predicting sequence
ITTIGER

SEQ ID NO: 21295 - protein, 10 aa, Artificial sequence
  Protein classification predicting sequence
AVGGYGRGEL

SEQ ID NO: 21296 - protein, 7 aa, Artificial sequence
  Protein classification predicting sequence
EYMDLLL

SEQ ID NO: 21297 - protein, 19 aa, Artificial sequence
  Protein classification predicting sequence
LVAVGGYGRGELHPLSDID

SEQ ID NO: 21298 - protein, 8 aa, Artificial sequence
  Protein classification predicting sequence
DLTVATNL

SEQ ID NO: 21299 - protein, 43 aa, Artificial sequence
  Protein classification predicting sequence
ERHARYHDTTYNLEPDIKSTPGGLRDIHTLSWVARRHFGATSL

SEQ ID NO: 21300 - protein, 12 aa, Artificial sequence
  Protein classification predicting sequence
WVARRHFGATSL

SEQ ID NO: 21301 - protein, 15 aa, Artificial sequence
  Protein classification predicting sequence
RTLRRVAELNKMLLK

SEQ ID NO: 21302 - protein, 22 aa, Artificial sequence
  Protein classification predicting sequence
IEARKPALFQARPETILDMFLH

SEQ ID NO: 21303 - protein, 16 aa, Artificial sequence
  Protein classification predicting sequence
RQLRTARRRLNKFLHT

SEQ ID NO: 21304 - protein, 16 aa, Artificial sequence
  Protein classification predicting sequence
DFCIEHGLSKPEAKLV

SEQ ID NO: 21305 - protein, 13 aa, Artificial sequence
  Protein classification predicting sequence
HLLMSVTAQRRDI

SEQ ID NO: 21306 - protein, 12 aa, Artificial sequence
  Protein classification predicting sequence
SKKATRGGTEVF

SEQ ID NO: 21307 - protein, 14 aa, Artificial sequence
  Protein classification predicting sequence
ALFATVVAELDRRN

SEQ ID NO: 21308 - protein, 8 aa, Artificial sequence
  Protein classification predicting sequence
NVHDAQIM

SEQ ID NO: 21309 - protein, 17 aa, Artificial sequence
  Protein classification predicting sequence
AKITTIGERAEDLFILT

SEQ ID NO: 21310 - protein, 15 aa, Artificial sequence
  Protein classification predicting sequence
RYHDTTYNLEPDIKS

SEQ ID NO: 21311 - protein, 9 aa, Artificial sequence
  Protein classification predicting sequence
YNLEPDIKS

SEQ ID NO: 21312 - protein, 12 aa, Artificial sequence
  Protein classification predicting sequence
PGGLRDIHTLSW

SEQ ID NO: 21313 - protein, 16 aa, Artificial sequence
  Protein classification predicting sequence
MMKEFYRTLRRVAELN

SEQ ID NO: 21314 - protein, 11 aa, Artificial sequence
  Protein classification predicting sequence
RQLRTARRRLN

SEQ ID NO: 21315 - protein, 7 aa, Artificial sequence
  Protein classification predicting sequence
MHKLGVL

SEQ ID NO: 21316 - protein, 23 aa, Artificial sequence
  Protein classification predicting sequence
PQWSHIVGQMQFDLFHAYTVDEH

SEQ ID NO: 21317 - protein, 8 aa, Artificial sequence
  Protein classification predicting sequence
HGLSKPEA

SEQ ID NO: 21318 - protein, 14 aa, Artificial sequence
  Protein classification predicting sequence
YLVCLTVADICATN

SEQ ID NO: 21319 - protein, 6 aa, Artificial sequence
  Protein classification predicting sequence
RYDNRL

SEQ ID NO: 21320 - protein, 8 aa, Artificial sequence
  Protein classification predicting sequence
KGRGGDHS

SEQ ID NO: 21321 - protein, 21 aa, Artificial sequence
  Protein classification predicting sequence
LEYLVCLTVADICATNPELWN

SEQ ID NO: 21322 - protein, 18 aa, Artificial sequence
  Protein classification predicting sequence
IEVLWQRFKADYFLRHTH

SEQ ID NO: 21323 - protein, 6 aa, Artificial sequence
  Protein classification predicting sequence
MSVTAQ

SEQ ID NO: 21324 - protein, 7 aa, Artificial sequence
  Protein classification predicting sequence
SDSFWPS

SEQ ID NO: 21325 - protein, 16 aa, Artificial sequence
  Protein classification predicting sequence
RYDNRLLFDRQLSVAQ

SEQ ID NO: 21326 - protein, 8 aa, Artificial sequence
  Protein classification predicting sequence
LRHARRHL

SEQ ID NO: 21327 - protein, 10 aa, Artificial sequence
  Protein classification predicting sequence
LLPMHRHSVL

SEQ ID NO: 21328 - protein, 6 aa, Artificial sequence
  Protein classification predicting sequence
AYMPQW

SEQ ID NO: 21329 - protein, 6 aa, Artificial sequence
  Protein classification predicting sequence
RHPLCV

SEQ ID NO: 21330 - protein, 27 aa, Artificial sequence
  Protein classification predicting sequence
LWNSWKQSLLRELYFATEKQLRRGMQN

SEQ ID NO: 21331 - protein, 7 aa, Artificial sequence
  Protein classification predicting sequence
RERVRHH

SEQ ID NO: 21332 - protein, 18 aa, Artificial sequence
  Protein classification predicting sequence
LQALALLRMDNIDEEALH

SEQ ID NO: 21333 - protein, 7 aa, Artificial sequence
  Protein classification predicting sequence
IWSRCRA

SEQ ID NO: 21334 - protein, 15 aa, Artificial sequence
  Protein classification predicting sequence
RHSPNQLAWHARHLL

SEQ ID NO: 21335 - protein, 23 aa, Artificial sequence
  Protein classification predicting sequence
LELIALDQPGLLARVGKIFADLG

SEQ ID NO: 21336 - protein, 14 aa, Artificial sequence
  Protein classification predicting sequence
ARITTIGERVEDLF

SEQ ID NO: 21337 - protein, 6 aa, Artificial sequence
  Protein classification predicting sequence
GMGKLG

SEQ ID NO: 21338 - protein, 9 aa, Artificial sequence
  Protein classification predicting sequence
GREWERYAW

SEQ ID NO: 21339 - protein, 6 aa, Artificial sequence
  Protein classification predicting sequence
QVFQLI

SEQ ID NO: 21340 - protein, 8 aa, Artificial sequence
  Protein classification predicting sequence
GSDLDLVF

SEQ ID NO: 21341 - protein, 6 aa, Artificial sequence
  Protein classification predicting sequence
SDNVRI

SEQ ID NO: 21342 - protein, 13 aa, Artificial sequence
  Protein classification predicting sequence
YYEGRGQNWERAA

SEQ ID NO: 21343 - protein, 13 aa, Artificial sequence
  Protein classification predicting sequence
KLGRGGIREIEFF

SEQ ID NO: 21344 - protein, 10 aa, Artificial sequence
  Protein classification predicting sequence
QTQQLIAGGR

SEQ ID NO: 21345 - protein, 7 aa, Artificial sequence
  Protein classification predicting sequence
VEHRIQM

SEQ ID NO: 21346 - protein, 11 aa, Artificial sequence
  Protein classification predicting sequence
EARERLTELTP

SEQ ID NO: 21347 - protein, 6 aa, Artificial sequence
  Protein classification predicting sequence
RPFVFR

SEQ ID NO: 21348 - protein, 8 aa, Artificial sequence
  Protein classification predicting sequence
GGIREIEF

SEQ ID NO: 21349 - protein, 12 aa, Artificial sequence
  Protein classification predicting sequence
RLRPDPGSTPLA

SEQ ID NO: 21350 - protein, 8 aa, Artificial sequence
  Protein classification predicting sequence
DEQTHLLP

SEQ ID NO: 21351 - protein, 12 aa, Artificial sequence
  Protein classification predicting sequence
ELTAGSDVDLIL

SEQ ID NO: 21352 - protein, 6 aa, Artificial sequence
  Protein classification predicting sequence
WEHQAL

SEQ ID NO: 21353 - protein, 8 aa, Artificial sequence
  Protein classification predicting sequence
DLRLRPDP

SEQ ID NO: 21354 - protein, 10 aa, Artificial sequence
  Protein classification predicting sequence
WERAAMIKAR

SEQ ID NO: 21355 - protein, 6 aa, Artificial sequence
  Protein classification predicting sequence
DMRLRP

SEQ ID NO: 21356 - protein, 6 aa, Artificial sequence
  Protein classification predicting sequence
FIAQYL

SEQ ID NO: 21357 - protein, 17 aa, Artificial sequence
  Protein classification predicting sequence
DLRLRPDPGSTPLAIPV

SEQ ID NO: 21358 - protein, 6 aa, Artificial sequence
  Protein classification predicting sequence
FFTRLG

SEQ ID NO: 21359 - protein, 9 aa, Artificial sequence
  Protein classification predicting sequence
QVFQLIRGG

SEQ ID NO: 21360 - protein, 8 aa, Artificial sequence
  Protein classification predicting sequence
SDLDLIFL

SEQ ID NO: 21361 - protein, 10 aa, Artificial sequence
  Protein classification predicting sequence
WEHQALTRAR

SEQ ID NO: 21362 - protein, 9 aa, Artificial sequence
  Protein classification predicting sequence
ELNYSSDID

SEQ ID NO: 21363 - protein, 8 aa, Artificial sequence
  Protein classification predicting sequence
GQNWERAA

SEQ ID NO: 21364 - protein, 14 aa, Artificial sequence
  Protein classification predicting sequence
AAIADIHSIKRQIH

SEQ ID NO: 21365 - protein, 20 aa, Artificial sequence
  Protein classification predicting sequence
KLGRGGIREIEFFVQTQQLI

SEQ ID NO: 21366 - protein, 8 aa, Artificial sequence
  Protein classification predicting sequence
SSDIDLIF

SEQ ID NO: 21367 - protein, 10 aa, Artificial sequence
  Protein classification predicting sequence
VFRVDMRLRP

SEQ ID NO: 21368 - protein, 6 aa, Artificial sequence
  Protein classification predicting sequence
RPFVYR

SEQ ID NO: 21369 - protein, 10 aa, Artificial sequence
  Protein classification predicting sequence
QVFQLIRGGR

SEQ ID NO: 21370 - protein, 5 aa, Artificial sequence
  Protein classification predicting sequence
EFIVQ

SEQ ID NO: 21371 - protein, 22 aa, Artificial sequence
  Protein classification predicting sequence
AHPEWLTELESQPPQADEWQHY

SEQ ID NO: 21372 - protein, 10 aa, Artificial sequence
  Protein classification predicting sequence
ELDNAQFFTR

SEQ ID NO: 21373 - protein, 16 aa, Artificial sequence
  Protein classification predicting sequence
GIVTRTTYLELLSEFP

SEQ ID NO: 21374 - protein, 7 aa, Artificial sequence
  Protein classification predicting sequence
QMVARYG

SEQ ID NO: 21375 - protein, 14 aa, Artificial sequence
  Protein classification predicting sequence
ILQQLSHLAETLIV

SEQ ID NO: 21376 - protein, 7 aa, Artificial sequence
  Protein classification predicting sequence
LAETLIV

SEQ ID NO: 21377 - protein, 22 aa, Artificial sequence
  Protein classification predicting sequence
DELNRARLAWAMDFADWPQLTG

SEQ ID NO: 21378 - protein, 14 aa, Artificial sequence
  Protein classification predicting sequence
NVRRVFNELIGDDE

SEQ ID NO: 21379 - protein, 55 aa, Artificial sequence
  Protein classification predicting sequence
NVRRVFNELIGDDESETQEESLSEQWRELWQDALQEDDTTPVLAHLSEDDRKQVL

SEQ ID NO: 21380 - protein, 26 aa, Artificial sequence
  Protein classification predicting sequence
QPLLILGMGKLGGGELNFSSDIDLIF

SEQ ID NO: 21381 - protein, 20 aa, Artificial sequence
  Protein classification predicting sequence
EDYYQEQGRDWERYAMVKAR

SEQ ID NO: 21382 - protein, 30 aa, Artificial sequence
  Protein classification predicting sequence
PFVFRRYIDFSVIQSLRNMKGMIAREVRRR

SEQ ID NO: 21383 - protein, 11 aa, Artificial sequence
  Protein classification predicting sequence
NIKLGAGGIRE

SEQ ID NO: 21384 - protein, 8 aa, Artificial sequence
  Protein classification predicting sequence
DEQTQTLP

SEQ ID NO: 21385 - protein, 9 aa, Artificial sequence
  Protein classification predicting sequence
KRTIGPRGR

SEQ ID NO: 21386 - protein, 16 aa, Artificial sequence
  Protein classification predicting sequence
ASQLARYPLLLDELLD

SEQ ID NO: 21387 - protein, 7 aa, Artificial sequence
  Protein classification predicting sequence
TLYQPTA

SEQ ID NO: 21388 - protein, 7 aa, Artificial sequence
  Protein classification predicting sequence
AVVQQAW

SEQ ID NO: 21389 - protein, 6 aa, Artificial sequence
  Protein classification predicting sequence
YGKLGG

SEQ ID NO: 21390 - protein, 17 aa, Artificial sequence
  Protein classification predicting sequence
YGKLGGWELGYSSDLDL

SEQ ID NO: 21391 - protein, 30 aa, Artificial sequence
  Protein classification predicting sequence
MHLFSTRTSSGILYEVDARLRPSGAAGMLV

SEQ ID NO: 21392 - protein, 13 aa, Artificial sequence
  Protein classification predicting sequence
AWTWEHQALVRAR

SEQ ID NO: 21393 - protein, 8 aa, Artificial sequence
  Protein classification predicting sequence
QYLVLRYA

SEQ ID NO: 21394 - protein, 7 aa, Artificial sequence
  Protein classification predicting sequence
WSDNVRI

SEQ ID NO: 21395 - protein, 10 aa, Artificial sequence
  Protein classification predicting sequence
ELHHLALQEL

SEQ ID NO: 21396 - protein, 11 aa, Artificial sequence
  Protein classification predicting sequence
GMGKLGGRELN

SEQ ID NO: 21397 - protein, 12 aa, Artificial sequence
  Protein classification predicting sequence
ELNFSSDIDLIF

SEQ ID NO: 21398 - protein, 7 aa, Artificial sequence
  Protein classification predicting sequence
LVLSFAA

SEQ ID NO: 21399 - protein, 16 aa, Artificial sequence
  Protein classification predicting sequence
EDYYQEQGRDWERYAM

SEQ ID NO: 21400 - protein, 16 aa, Artificial sequence
  Protein classification predicting sequence
MLRPFVYRRYLDFSAI

SEQ ID NO: 21401 - protein, 7 aa, Artificial sequence
  Protein classification predicting sequence
ALRQFKQ

SEQ ID NO: 21402 - protein, 8 aa, Artificial sequence
  Protein classification predicting sequence
SDHLTYLA

SEQ ID NO: 21403 - protein, 9 aa, Artificial sequence
  Protein classification predicting sequence
ELGYNSDLD

SEQ ID NO: 21404 - protein, 6 aa, Artificial sequence
  Protein classification predicting sequence
ARDWLY

SEQ ID NO: 21405 - protein, 8 aa, Artificial sequence
  Protein classification predicting sequence
DMRLRPFG

SEQ ID NO: 21406 - protein, 18 aa, Artificial sequence
  Protein classification predicting sequence
EQYYQDQGRDWERYAMIK

SEQ ID NO: 21407 - protein, 13 aa, Artificial sequence
  Protein classification predicting sequence
RRYIDFSVIQSLR

SEQ ID NO: 21408 - protein, 8 aa, Artificial sequence
  Protein classification predicting sequence
REVRRRGL

SEQ ID NO: 21409 - protein, 7 aa, Artificial sequence
  Protein classification predicting sequence
PILLDEL

SEQ ID NO: 21410 - protein, 8 aa, Artificial sequence
  Protein classification predicting sequence
QFYLRLAQ

SEQ ID NO: 21411 - protein, 5 aa, Artificial sequence
  Protein classification predicting sequence
AWTWE

SEQ ID NO: 21412 - protein, 7 aa, Artificial sequence
  Protein classification predicting sequence
QALVRAR

SEQ ID NO: 21413 - protein, 14 aa, Artificial sequence
  Protein classification predicting sequence
YYQEQGRDWERYAM

SEQ ID NO: 21414 - protein, 18 aa, Artificial sequence
  Protein classification predicting sequence
YYQEQGRDWERYAMVKAR

SEQ ID NO: 21415 - protein, 8 aa, Artificial sequence
  Protein classification predicting sequence
RPFVYRRY

SEQ ID NO: 21416 - protein, 6 aa, Artificial sequence
  Protein classification predicting sequence
QLIRGG

SEQ ID NO: 21417 - protein, 7 aa, Artificial sequence
  Protein classification predicting sequence
SDLDLVF

SEQ ID NO: 21418 - protein, 6 aa, Artificial sequence
  Protein classification predicting sequence
MREKMR

SEQ ID NO: 21419 - protein, 11 aa, Artificial sequence
  Protein classification predicting sequence
LPVMKVSDHLT

SEQ ID NO: 21420 - protein, 10 aa, Artificial sequence
  Protein classification predicting sequence
ELNFSSDIDL

SEQ ID NO: 21421 - protein, 8 aa, Artificial sequence
  Protein classification predicting sequence
LRIAAADI

SEQ ID NO: 21422 - protein, 8 aa, Artificial sequence
  Protein classification predicting sequence
LRPEGRNG

SEQ ID NO: 21423 - protein, 17 aa, Artificial sequence
  Protein classification predicting sequence
DANLRPEGRNGPLVRTL

SEQ ID NO: 21424 - protein, 8 aa, Artificial sequence
  Protein classification predicting sequence
FLRDVEHR

SEQ ID NO: 21425 - protein, 6 aa, Artificial sequence
  Protein classification predicting sequence
EMREKM

SEQ ID NO: 21426 - protein, 7 aa, Artificial sequence
  Protein classification predicting sequence
ELNVSSD

SEQ ID NO: 21427 - protein, 7 aa, Artificial sequence
  Protein classification predicting sequence
QGREWER

SEQ ID NO: 21428 - protein, 6 aa, Artificial sequence
  Protein classification predicting sequence
DNIKLG

SEQ ID NO: 21429 - protein, 6 aa, Artificial sequence
  Protein classification predicting sequence
KHDRGG

SEQ ID NO: 21430 - protein, 7 aa, Artificial sequence
  Protein classification predicting sequence
GMGKLGG

SEQ ID NO: 21431 - protein, 8 aa, Artificial sequence
  Protein classification predicting sequence
QRLIKVLD

SEQ ID NO: 21432 - protein, 7 aa, Artificial sequence
  Protein classification predicting sequence
GAGGIRE

SEQ ID NO: 21433 - protein, 6 aa, Artificial sequence
  Protein classification predicting sequence
LRQFKQ

SEQ ID NO: 21434 - protein, 10 aa, Artificial sequence
  Protein classification predicting sequence
LTRWSDNVRI

SEQ ID NO: 21435 - protein, 7 aa, Artificial sequence
  Protein classification predicting sequence
TQGGRRE

SEQ ID NO: 21436 - protein, 22 aa, Artificial sequence
  Protein classification predicting sequence
ALEDYYQEQGRDWERYAMVKAR

SEQ ID NO: 21437 - protein, 25 aa, Artificial sequence
  Protein classification predicting sequence
ALEDYYQEQGRDWERYAMVKARIMG

SEQ ID NO: 21438 - protein, 20 aa, Artificial sequence
  Protein classification predicting sequence
FRRYIDFSVIQSLRNMKGMI

SEQ ID NO: 21439 - protein, 11 aa, Artificial sequence
  Protein classification predicting sequence
QVFQLIRGGRE

SEQ ID NO: 21440 - protein, 7 aa, Artificial sequence
  Protein classification predicting sequence
RTTYLEL

SEQ ID NO: 21441 - protein, 16 aa, Artificial sequence
  Protein classification predicting sequence
RQFYLRLAQRIMHLFS

SEQ ID NO: 21442 - protein, 6 aa, Artificial sequence
  Protein classification predicting sequence
RLRPSG

SEQ ID NO: 21443 - protein, 6 aa, Artificial sequence
  Protein classification predicting sequence
FDIKAD

SEQ ID NO: 21444 - protein, 20 aa, Artificial sequence
  Protein classification predicting sequence
GMGKLGGGELNFSSDIDLIF

SEQ ID NO: 21445 - protein, 26 aa, Artificial sequence
  Protein classification predicting sequence
GMGKLGGGELNFSSDIDLIFTYPENG

SEQ ID NO: 21446 - protein, 18 aa, Artificial sequence
  Protein classification predicting sequence
NAQFFTRLGQRLIKALDQ

SEQ ID NO: 21447 - protein, 11 aa, Artificial sequence
  Protein classification predicting sequence
YRVDMRLRPFG

SEQ ID NO: 21448 - protein, 7 aa, Artificial sequence
  Protein classification predicting sequence
EVRRRGL

SEQ ID NO: 21449 - protein, 7 aa, Artificial sequence
  Protein classification predicting sequence
GGWELGY

SEQ ID NO: 21450 - protein, 18 aa, Artificial sequence
  Protein classification predicting sequence
GKKEIDGRQFYLRLAQRI

SEQ ID NO: 21451 - protein, 8 aa, Artificial sequence
  Protein classification predicting sequence
GGITDIEF

SEQ ID NO: 21452 - protein, 7 aa, Artificial sequence
  Protein classification predicting sequence
IKLGAGG

SEQ ID NO: 21453 - protein, 7 aa, Artificial sequence
  Protein classification predicting sequence
FFTRLGQ

SEQ ID NO: 21454 - protein, 6 aa, Artificial sequence
  Protein classification predicting sequence
MLRPFV

SEQ ID NO: 21455 - protein, 8 aa, Artificial sequence
  Protein classification predicting sequence
PLLLDELL

SEQ ID NO: 21456 - protein, 19 aa, Artificial sequence
  Protein classification predicting sequence
RGQNWERAAMIKARPVAGD

SEQ ID NO: 21457 - protein, 6 aa, Artificial sequence
  Protein classification predicting sequence
AWTWEH

SEQ ID NO: 21458 - protein, 6 aa, Artificial sequence
  Protein classification predicting sequence
SSDIDL

SEQ ID NO: 21459 - protein, 9 aa, Artificial sequence
  Protein classification predicting sequence
VDMRLRPSG

SEQ ID NO: 21460 - protein, 22 aa, Artificial sequence
  Protein classification predicting sequence
LMRELRLFRRRIMVRIAWAQTL

SEQ ID NO: 21461 - protein, 11 aa, Artificial sequence
  Protein classification predicting sequence
ACCREWGTPCN

SEQ ID NO: 21462 - protein, 24 aa, Artificial sequence
  Protein classification predicting sequence
AYLFLRRLENLLQSINDEQTQTLP

SEQ ID NO: 21463 - protein, 9 aa, Artificial sequence
  Protein classification predicting sequence
WQDALQEDD

SEQ ID NO: 21464 - protein, 7 aa, Artificial sequence
  Protein classification predicting sequence
TPVLAHL

SEQ ID NO: 21465 - protein, 9 aa, Artificial sequence
  Protein classification predicting sequence
GGITDIEFI

SEQ ID NO: 21466 - protein, 11 aa, Artificial sequence
  Protein classification predicting sequence
QAKSVLTFSDF

SEQ ID NO: 21467 - protein, 15 aa, Artificial sequence
  Protein classification predicting sequence
FRRRIMVRIAWAQTL

SEQ ID NO: 21468 - protein, 24 aa, Artificial sequence
  Protein classification predicting sequence
TLYQPTATDAYRDELRQYLLRVPE

SEQ ID NO: 21469 - protein, 54 aa, Artificial sequence
  Protein classification predicting sequence
DEEQQLEALRQFKQAQLLRIAAADIAGTLPVMKVSDHLTWLAEAMIDAVVQQAW

SEQ ID NO: 21470 - protein, 34 aa, Artificial sequence
  Protein classification predicting sequence
GRGFAVVGYGKLGGWELGYSSDLDLIFLHDCPMD

SEQ ID NO: 21471 - protein, 23 aa, Artificial sequence
  Protein classification predicting sequence
EAWTWEHQALVRARVVYGDPQLT

SEQ ID NO: 21472 - protein, 30 aa, Artificial sequence
  Protein classification predicting sequence
QYLVLRYAHEKPKLTRWSDNVRILELLAQN

SEQ ID NO: 21473 - protein, 21 aa, Artificial sequence
  Protein classification predicting sequence
AYTTLRDELHHLALQELPGHV

SEQ ID NO: 21474 - protein, 13 aa, Artificial sequence
  Protein classification predicting sequence
QPLLILGMGKLGG

SEQ ID NO: 21475 - protein, 7 aa, Artificial sequence
  Protein classification predicting sequence
GESGPLV

SEQ ID NO: 21476 - protein, 8 aa, Artificial sequence
  Protein classification predicting sequence
LLDELIDP

SEQ ID NO: 21477 - protein, 6 aa, Artificial sequence
  Protein classification predicting sequence
KMRDHL

SEQ ID NO: 21478 - protein, 12 aa, Artificial sequence
  Protein classification predicting sequence
QVFQLIRGGREP

SEQ ID NO: 21479 - protein, 7 aa, Artificial sequence
  Protein classification predicting sequence
ELGYGSD

SEQ ID NO: 21480 - protein, 9 aa, Artificial sequence
  Protein classification predicting sequence
ERLPRGADP

SEQ ID NO: 21481 - protein, 9 aa, Artificial sequence
  Protein classification predicting sequence
EWTVQLLQL

SEQ ID NO: 21482 - protein, 12 aa, Artificial sequence
  Protein classification predicting sequence
TELRDFLARIPE

SEQ ID NO: 21483 - protein, 14 aa, Artificial sequence
  Protein classification predicting sequence
MLRPFVFRRYIDFS

SEQ ID NO: 21484 - protein, 18 aa, Artificial sequence
  Protein classification predicting sequence
LENLLQAMADKQTQTLPD

SEQ ID NO: 21485 - protein, 9 aa, Artificial sequence
  Protein classification predicting sequence
LRRLENLLQ

SEQ ID NO: 21486 - protein, 7 aa, Artificial sequence
  Protein classification predicting sequence
MRAKMRD

SEQ ID NO: 21487 - protein, 7 aa, Artificial sequence
  Protein classification predicting sequence
ELNFSSD

SEQ ID NO: 21488 - protein, 6 aa, Artificial sequence
  Protein classification predicting sequence
RLRPFG

SEQ ID NO: 21489 - protein, 19 aa, Artificial sequence
  Protein classification predicting sequence
QELRQMLRPFVFRRYIDFS

SEQ ID NO: 21490 - protein, 6 aa, Artificial sequence
  Protein classification predicting sequence
VMCYHG

SEQ ID NO: 21491 - protein, 6 aa, Artificial sequence
  Protein classification predicting sequence
VVCYHG

SEQ ID NO: 21492 - protein, 6 aa, Artificial sequence
  Protein classification predicting sequence
LVDIRD

SEQ ID NO: 21493 - protein, 16 aa, Artificial sequence
  Protein classification predicting sequence
VMCYHGISSQGAAQYL

SEQ ID NO: 21494 - protein, 7 aa, Artificial sequence
  Protein classification predicting sequence
DGGFEAW

SEQ ID NO: 21495 - protein, 7 aa, Artificial sequence
  Protein classification predicting sequence
VDIRDPQ

SEQ ID NO: 21496 - protein, 9 aa, Artificial sequence
  Protein classification predicting sequence
VYSVDGGFE

SEQ ID NO: 21497 - protein, 15 aa, Artificial sequence
  Protein classification predicting sequence
QAFHLTNDTLGAFMR

SEQ ID NO: 21498 - protein, 23 aa, Artificial sequence
  Protein classification predicting sequence
LVMCYHGISSQGAAQYLVNQGFE

SEQ ID NO: 21499 - protein, 9 aa, Artificial sequence
  Protein classification predicting sequence
LVDIRDPQS

SEQ ID NO: 21500 - protein, 9 aa, Artificial sequence
  Protein classification predicting sequence
PVYNAIVWQ

SEQ ID NO: 21501 - protein, 9 aa, Artificial sequence
  Protein classification predicting sequence
ICDELKEKG

SEQ ID NO: 21502 - protein, 7 aa, Artificial sequence
  Protein classification predicting sequence
KWILDNV

SEQ ID NO: 21503 - protein, 7 aa, Artificial sequence
  Protein classification predicting sequence
WLIWNLT

SEQ ID NO: 21504 - protein, 12 aa, Artificial sequence
  Protein classification predicting sequence
PIAGVAGDQQAA

SEQ ID NO: 21505 - protein, 7 aa, Artificial sequence
  Protein classification predicting sequence
AGDQQAA

SEQ ID NO: 21506 - protein, 7 aa, Artificial sequence
  Protein classification predicting sequence
TYGTGCF

SEQ ID NO: 21507 - protein, 24 aa, Artificial sequence
  Protein classification predicting sequence
EVPISGMAGDQQAALFGQLAFEPG

SEQ ID NO: 21508 - protein, 6 aa, Artificial sequence
  Protein classification predicting sequence
QWLRDG

SEQ ID NO: 21509 - protein, 15 aa, Artificial sequence
  Protein classification predicting sequence
NLETTALGAAFLAGL

SEQ ID NO: 21510 - protein, 8 aa, Artificial sequence
  Protein classification predicting sequence
AVKATQVF

SEQ ID NO: 21511 - protein, 10 aa, Artificial sequence
  Protein classification predicting sequence
GWVEHDPMEI

SEQ ID NO: 21512 - protein, 9 aa, Artificial sequence
  Protein classification predicting sequence
ATQSSTLVE

SEQ ID NO: 21513 - protein, 6 aa, Artificial sequence
  Protein classification predicting sequence
NAIVWQ

SEQ ID NO: 21514 - protein, 22 aa, Artificial sequence
  Protein classification predicting sequence
YALEGAVFNGGSTVQWLRDELK

SEQ ID NO: 21515 - protein, 8 aa, Artificial sequence
  Protein classification predicting sequence
QWLRDELK

SEQ ID NO: 21516 - protein, 29 aa, Artificial sequence
  Protein classification predicting sequence
KVKDSNGVYLVPAFTGLGAPYWDPYARGA

SEQ ID NO: 21517 - protein, 19 aa, Artificial sequence
  Protein classification predicting sequence
VPAFTGLGAPYWDPYARGA

SEQ ID NO: 21518 - protein, 10 aa, Artificial sequence
  Protein classification predicting sequence
DILGTRVERP

SEQ ID NO: 21519 - protein, 6 aa, Artificial sequence
  Protein classification predicting sequence
WDKNTG

SEQ ID NO: 21520 - protein, 7 aa, Artificial sequence
  Protein classification predicting sequence
FMLMNTG

SEQ ID NO: 21521 - protein, 8 aa, Artificial sequence
  Protein classification predicting sequence
VDGGMTSN

SEQ ID NO: 21522 - protein, 6 aa, Artificial sequence
  Protein classification predicting sequence
NQRETT

SEQ ID NO: 21523 - protein, 6 aa, Artificial sequence
  Protein classification predicting sequence
YNAVVW

SEQ ID NO: 21524 - protein, 8 aa, Artificial sequence
  Protein classification predicting sequence
YALEGSIF

SEQ ID NO: 21525 - protein, 6 aa, Artificial sequence
  Protein classification predicting sequence
GAAVQW

SEQ ID NO: 21526 - protein, 9 aa, Artificial sequence
  Protein classification predicting sequence
PYWDPYARG

SEQ ID NO: 21527 - protein, 7 aa, Artificial sequence
  Protein classification predicting sequence
LESIAYQ

SEQ ID NO: 21528 - protein, 10 aa, Artificial sequence
  Protein classification predicting sequence
TGLVVDPYFS

SEQ ID NO: 21529 - protein, 6 aa, Artificial sequence
  Protein classification predicting sequence
DSWLIW

SEQ ID NO: 21530 - protein, 12 aa, Artificial sequence
  Protein classification predicting sequence
VPAFVGLGAPYW

SEQ ID NO: 21531 - protein, 7 aa, Artificial sequence
  Protein classification predicting sequence
GLGAPYW

SEQ ID NO: 21532 - protein, 6 aa, Artificial sequence
  Protein classification predicting sequence
PVYNAI

SEQ ID NO: 21533 - protein, 10 aa, Artificial sequence
  Protein classification predicting sequence
TGLVLDPYFS

SEQ ID NO: 21534 - protein, 6 aa, Artificial sequence
  Protein classification predicting sequence
TTIAWG

SEQ ID NO: 21535 - protein, 7 aa, Artificial sequence
  Protein classification predicting sequence
KEHFIRA

SEQ ID NO: 21536 - protein, 7 aa, Artificial sequence
  Protein classification predicting sequence
NQRETTV

SEQ ID NO: 21537 - protein, 17 aa, Artificial sequence
  Protein classification predicting sequence
TGEPLYNAVVWLDLRTQ

SEQ ID NO: 21538 - protein, 22 aa, Artificial sequence
  Protein classification predicting sequence
NFVKSKTGLPLSTYFSAVKLRW

SEQ ID NO: 21539 - protein, 7 aa, Artificial sequence
  Protein classification predicting sequence
NASRTML

SEQ ID NO: 21540 - protein, 15 aa, Artificial sequence
  Protein classification predicting sequence
GALEGVPISGCLGDQ

SEQ ID NO: 21541 - protein, 10 aa, Artificial sequence
  Protein classification predicting sequence
AALVGQMCFQ

SEQ ID NO: 21542 - protein, 14 aa, Artificial sequence
  Protein classification predicting sequence
GQAKNTYGTGCFLL

SEQ ID NO: 21543 - protein, 8 aa, Artificial sequence
  Protein classification predicting sequence
SEHGLLTT

SEQ ID NO: 21544 - protein, 6 aa, Artificial sequence
  Protein classification predicting sequence
HGLLTT

SEQ ID NO: 21545 - protein, 25 aa, Artificial sequence
  Protein classification predicting sequence
YYALEGSVAIAGAVIRWLRDNLGII

SEQ ID NO: 21546 - protein, 28 aa, Artificial sequence
  Protein classification predicting sequence
CGLTQFTNKCHIAFAALEAVCFQTREIL

SEQ ID NO: 21547 - protein, 10 aa, Artificial sequence
  Protein classification predicting sequence
AMNRDCGIPL

SEQ ID NO: 21548 - protein, 19 aa, Artificial sequence
  Protein classification predicting sequence
MPETTALGAAMAAGAAEGV

SEQ ID NO: 21549 - protein, 8 aa, Artificial sequence
  Protein classification predicting sequence
MERFEPQI

SEQ ID NO: 21550 - protein, 6 aa, Artificial sequence
  Protein classification predicting sequence
PGWVEH

SEQ ID NO: 21551 - protein, 7 aa, Artificial sequence
  Protein classification predicting sequence
RWILDHV

SEQ ID NO: 21552 - protein, 12 aa, Artificial sequence
  Protein classification predicting sequence
GELLFGTIDTWL

SEQ ID NO: 21553 - protein, 10 aa, Artificial sequence
  Protein classification predicting sequence
LLFGTIDTWL

SEQ ID NO: 21554 - protein, 16 aa, Artificial sequence
  Protein classification predicting sequence
PISGMAGDQQAALFGQ

SEQ ID NO: 21555 - protein, 6 aa, Artificial sequence
  Protein classification predicting sequence
LLTTIA

SEQ ID NO: 21556 - protein, 7 aa, Artificial sequence
  Protein classification predicting sequence
RDVIDTM

SEQ ID NO: 21557 - protein, 7 aa, Artificial sequence
  Protein classification predicting sequence
EFKQYFP

SEQ ID NO: 21558 - protein, 6 aa, Artificial sequence
  Protein classification predicting sequence
WILDNV

SEQ ID NO: 21559 - protein, 14 aa, Artificial sequence
  Protein classification predicting sequence
VPAFTGLGAPYWDP

SEQ ID NO: 21560 - protein, 5 aa, Artificial sequence
  Protein classification predicting sequence
YQTRD

SEQ ID NO: 21561 - protein, 6 aa, Artificial sequence
  Protein classification predicting sequence
ETTALG

SEQ ID NO: 21562 - protein, 6 aa, Artificial sequence
  Protein classification predicting sequence
GDQQAA

SEQ ID NO: 21563 - protein, 6 aa, Artificial sequence
  Protein classification predicting sequence
DQGTTS

SEQ ID NO: 21564 - protein, 7 aa, Artificial sequence
  Protein classification predicting sequence
YNAIVWQ

SEQ ID NO: 21565 - protein, 8 aa, Artificial sequence
  Protein classification predicting sequence
AGLATGFW

SEQ ID NO: 21566 - protein, 9 aa, Artificial sequence
  Protein classification predicting sequence
AIVWQDRRT

SEQ ID NO: 21567 - protein, 10 aa, Artificial sequence
  Protein classification predicting sequence
NASRTMLFNI

SEQ ID NO: 21568 - protein, 9 aa, Artificial sequence
  Protein classification predicting sequence
LAGLSVGYW

SEQ ID NO: 21569 - protein, 6 aa, Artificial sequence
  Protein classification predicting sequence
DPYFSG

SEQ ID NO: 21570 - protein, 7 aa, Artificial sequence
  Protein classification predicting sequence
WKEAVKR

SEQ ID NO: 21571 - protein, 11 aa, Artificial sequence
  Protein classification predicting sequence
LDQGTTSSRAI

SEQ ID NO: 21572 - protein, 10 aa, Artificial sequence
  Protein classification predicting sequence
TGLVIDAYFS

SEQ ID NO: 21573 - protein, 12 aa, Artificial sequence
  Protein classification predicting sequence
WDDEILELLNIP

SEQ ID NO: 21574 - protein, 7 aa, Artificial sequence
  Protein classification predicting sequence
GLLTTIA

SEQ ID NO: 21575 - protein, 7 aa, Artificial sequence
  Protein classification predicting sequence
DILGVPV

SEQ ID NO: 21576 - protein, 17 aa, Artificial sequence
  Protein classification predicting sequence
ISNIKAIGVSNQRETTV

SEQ ID NO: 21577 - protein, 18 aa, Artificial sequence
  Protein classification predicting sequence
HLARATLEAICYQSRDVV

SEQ ID NO: 21578 - protein, 6 aa, Artificial sequence
  Protein classification predicting sequence
VWQDRR

SEQ ID NO: 21579 - protein, 8 aa, Artificial sequence
  Protein classification predicting sequence
GLGAPYWD

SEQ ID NO: 21580 - protein, 6 aa, Artificial sequence
  Protein classification predicting sequence
GTIDTW

SEQ ID NO: 21581 - protein, 9 aa, Artificial sequence
  Protein classification predicting sequence
GDQQAALFG

SEQ ID NO: 21582 - protein, 7 aa, Artificial sequence
  Protein classification predicting sequence
TYGTGSF

SEQ ID NO: 21583 - protein, 8 aa, Artificial sequence
  Protein classification predicting sequence
AGLAVGFW

SEQ ID NO: 21584 - protein, 7 aa, Artificial sequence
  Protein classification predicting sequence
LTGGKVH

SEQ ID NO: 21585 - protein, 6 aa, Artificial sequence
  Protein classification predicting sequence
GKVNYA

SEQ ID NO: 21586 - protein, 8 aa, Artificial sequence
  Protein classification predicting sequence
GVYFVPAF

SEQ ID NO: 21587 - protein, 9 aa, Artificial sequence
  Protein classification predicting sequence
PIYNAIVWQ

SEQ ID NO: 21588 - protein, 12 aa, Artificial sequence
  Protein classification predicting sequence
YFSGTKVKWILD

SEQ ID NO: 21589 - protein, 19 aa, Artificial sequence
  Protein classification predicting sequence
GTKVKWILDNVEGAREKAE

SEQ ID NO: 21590 - protein, 9 aa, Artificial sequence
  Protein classification predicting sequence
TDYSNASRT

SEQ ID NO: 21591 - protein, 6 aa, Artificial sequence
  Protein classification predicting sequence
TIDYHF

SEQ ID NO: 21592 - protein, 9 aa, Artificial sequence
  Protein classification predicting sequence
YALEGSIFV

SEQ ID NO: 21593 - protein, 8 aa, Artificial sequence
  Protein classification predicting sequence
GVYVVPAF

SEQ ID NO: 21594 - protein, 6 aa, Artificial sequence
  Protein classification predicting sequence
FQSDIL

SEQ ID NO: 21595 - protein, 10 aa, Artificial sequence
  Protein classification predicting sequence
VIAGVLLKTN

SEQ ID NO: 21596 - protein, 7 aa, Artificial sequence
  Protein classification predicting sequence
VWQSRQT

SEQ ID NO: 21597 - protein, 7 aa, Artificial sequence
  Protein classification predicting sequence
GAQERAE

SEQ ID NO: 21598 - protein, 12 aa, Artificial sequence
  Protein classification predicting sequence
HVTDYSNASRTL

SEQ ID NO: 21599 - protein, 6 aa, Artificial sequence
  Protein classification predicting sequence
WDDELL

SEQ ID NO: 21600 - protein, 10 aa, Artificial sequence
  Protein classification predicting sequence
WDDELLKMLN

SEQ ID NO: 21601 - protein, 16 aa, Artificial sequence
  Protein classification predicting sequence
CFEKGMAKNTYGTGCF

SEQ ID NO: 21602 - protein, 12 aa, Artificial sequence
  Protein classification predicting sequence
GMAKNTYGTGCF

SEQ ID NO: 21603 - protein, 8 aa, Artificial sequence
  Protein classification predicting sequence
LLTTIAWG

SEQ ID NO: 21604 - protein, 11 aa, Artificial sequence
  Protein classification predicting sequence
RGAVFGLTRGT

SEQ ID NO: 21605 - protein, 8 aa, Artificial sequence
  Protein classification predicting sequence
VFGLTRGT

SEQ ID NO: 21606 - protein, 12 aa, Artificial sequence
  Protein classification predicting sequence
KEHFIRATLESL

SEQ ID NO: 21607 - protein, 15 aa, Artificial sequence
  Protein classification predicting sequence
DSGISLKTLRVDGGA

SEQ ID NO: 21608 - protein, 6 aa, Artificial sequence
  Protein classification predicting sequence
GWQKAV

SEQ ID NO: 21609 - protein, 7 aa, Artificial sequence
  Protein classification predicting sequence
DTWLIWK

SEQ ID NO: 21610 - protein, 9 aa, Artificial sequence
  Protein classification predicting sequence
KNTYGTGCF

SEQ ID NO: 21611 - protein, 8 aa, Artificial sequence
  Protein classification predicting sequence
NNFLMQFQ

SEQ ID NO: 21612 - protein, 7 aa, Artificial sequence
  Protein classification predicting sequence
WDPYARG

SEQ ID NO: 21613 - protein, 9 aa, Artificial sequence
  Protein classification predicting sequence
DQGTTSSRA

SEQ ID NO: 21614 - protein, 7 aa, Artificial sequence
  Protein classification predicting sequence
IIGITRG

SEQ ID NO: 21615 - protein, 8 aa, Artificial sequence
  Protein classification predicting sequence
RAALESIA

SEQ ID NO: 21616 - protein, 10 aa, Artificial sequence
  Protein classification predicting sequence
AIVWQDRRTA

SEQ ID NO: 21617 - protein, 6 aa, Artificial sequence
  Protein classification predicting sequence
WILDHV

SEQ ID NO: 21618 - protein, 7 aa, Artificial sequence
  Protein classification predicting sequence
LDHVPGA

SEQ ID NO: 21619 - protein, 7 aa, Artificial sequence
  Protein classification predicting sequence
VYLVPAF

SEQ ID NO: 21620 - protein, 9 aa, Artificial sequence
  Protein classification predicting sequence
WLRDGLGII

SEQ ID NO: 21621 - protein, 7 aa, Artificial sequence
  Protein classification predicting sequence
GLGAPHW

SEQ ID NO: 21622 - protein, 5 aa, Artificial sequence
  Protein classification predicting sequence
LMQFQ

SEQ ID NO: 21623 - protein, 7 aa, Artificial sequence
  Protein classification predicting sequence
EFTQIYP

SEQ ID NO: 21624 - protein, 10 aa, Artificial sequence
  Protein classification predicting sequence
AEKGELLFGT

SEQ ID NO: 21625 - protein, 7 aa, Artificial sequence
  Protein classification predicting sequence
WKLTNGK

SEQ ID NO: 21626 - protein, 7 aa, Artificial sequence
  Protein classification predicting sequence
RTMLYNI

SEQ ID NO: 21627 - protein, 13 aa, Artificial sequence
  Protein classification predicting sequence
RTMLYNIKELKWD

SEQ ID NO: 21628 - protein, 8 aa, Artificial sequence
  Protein classification predicting sequence
ALFGQTCF

SEQ ID NO: 21629 - protein, 13 aa, Artificial sequence
  Protein classification predicting sequence
GLGAPYWDMYARG

SEQ ID NO: 21630 - protein, 6 aa, Artificial sequence
  Protein classification predicting sequence
NHIIRA

SEQ ID NO: 21631 - protein, 15 aa, Artificial sequence
  Protein classification predicting sequence
KYIVALDQGTTSSRA

SEQ ID NO: 21632 - protein, 11 aa, Artificial sequence
  Protein classification predicting sequence
ALDQGTTSSRA

SEQ ID NO: 21633 - protein, 12 aa, Artificial sequence
  Protein classification predicting sequence
AGDQQAALFGQA

SEQ ID NO: 21634 - protein, 7 aa, Artificial sequence
  Protein classification predicting sequence
EYFATKV

SEQ ID NO: 21635 - protein, 12 aa, Artificial sequence
  Protein classification predicting sequence
LESIAYQTRDVL

SEQ ID NO: 21636 - protein, 7 aa, Artificial sequence
  Protein classification predicting sequence
EHEQILP

SEQ ID NO: 21637 - protein, 8 aa, Artificial sequence
  Protein classification predicting sequence
ERAEKGEL

SEQ ID NO: 21638 - protein, 8 aa, Artificial sequence
  Protein classification predicting sequence
LLMQMQAD

SEQ ID NO: 21639 - protein, 8 aa, Artificial sequence
  Protein classification predicting sequence
GVYLVPAF

SEQ ID NO: 21640 - protein, 8 aa, Artificial sequence
  Protein classification predicting sequence
DAYFSGTK

SEQ ID NO: 21641 - protein, 8 aa, Artificial sequence
  Protein classification predicting sequence
FGTIDSWL

SEQ ID NO: 21642 - protein, 14 aa, Artificial sequence
  Protein classification predicting sequence
GLGAPYWDAYARGT

SEQ ID NO: 21643 - protein, 10 aa, Artificial sequence
  Protein classification predicting sequence
GASIQWLRDE

SEQ ID NO: 21644 - protein, 12 aa, Artificial sequence
  Protein classification predicting sequence
DQGTTSSRAIIF

SEQ ID NO: 21645 - protein, 16 aa, Artificial sequence
  Protein classification predicting sequence
IWNSVQSVIAGAFIES

SEQ ID NO: 21646 - protein, 7 aa, Artificial sequence
  Protein classification predicting sequence
PIADQLK

SEQ ID NO: 21647 - protein, 8 aa, Artificial sequence
  Protein classification predicting sequence
DAYFSATK

SEQ ID NO: 21648 - protein, 6 aa, Artificial sequence
  Protein classification predicting sequence
VHVTDY

SEQ ID NO: 21649 - protein, 10 aa, Artificial sequence
  Protein classification predicting sequence
MLPEVKSNSE

SEQ ID NO: 21650 - protein, 8 aa, Artificial sequence
  Protein classification predicting sequence
ETTALGAA

SEQ ID NO: 21651 - protein, 8 aa, Artificial sequence
  Protein classification predicting sequence
GWVEHNAN

SEQ ID NO: 21652 - protein, 11 aa, Artificial sequence
  Protein classification predicting sequence
IWNSVQSVIAG

SEQ ID NO: 21653 - protein, 13 aa, Artificial sequence
  Protein classification predicting sequence
PIYNAIVWQSRQT

SEQ ID NO: 21654 - protein, 9 aa, Artificial sequence
  Protein classification predicting sequence
AIVWQSRQT

SEQ ID NO: 21655 - protein, 12 aa, Artificial sequence
  Protein classification predicting sequence
FGTIDTWLVWKL

SEQ ID NO: 21656 - protein, 6 aa, Artificial sequence
  Protein classification predicting sequence
AYQVRD

SEQ ID NO: 21657 - protein, 10 aa, Artificial sequence
  Protein classification predicting sequence
PIAGVAGDQQ

SEQ ID NO: 21658 - protein, 7 aa, Artificial sequence
  Protein classification predicting sequence
GVAGDQQ

SEQ ID NO: 21659 - protein, 6 aa, Artificial sequence
  Protein classification predicting sequence
ANNFLM

SEQ ID NO: 21660 - protein, 6 aa, Artificial sequence
  Protein classification predicting sequence
TNQRET

SEQ ID NO: 21661 - protein, 6 aa, Artificial sequence
  Protein classification predicting sequence
GTIDSW

SEQ ID NO: 21662 - protein, 6 aa, Artificial sequence
  Protein classification predicting sequence
WKLTGG

SEQ ID NO: 21663 - protein, 6 aa, Artificial sequence
  Protein classification predicting sequence
VQWLRD

SEQ ID NO: 21664 - protein, 7 aa, Artificial sequence
  Protein classification predicting sequence
LMQLQAD

SEQ ID NO: 21665 - protein, 8 aa, Artificial sequence
  Protein classification predicting sequence
LGVPVERP

SEQ ID NO: 21666 - protein, 11 aa, Artificial sequence
  Protein classification predicting sequence
YGQTNIGGKGG

SEQ ID NO: 21667 - protein, 18 aa, Artificial sequence
  Protein classification predicting sequence
NGVYVVPAFTGLGAPYWD

SEQ ID NO: 21668 - protein, 16 aa, Artificial sequence
  Protein classification predicting sequence
VYVVPAFTGLGAPYWD

SEQ ID NO: 21669 - protein, 13 aa, Artificial sequence
  Protein classification predicting sequence
VPAFTGLGAPYWD

SEQ ID NO: 21670 - protein, 8 aa, Artificial sequence
  Protein classification predicting sequence
ARGAIFGL

SEQ ID NO: 21671 - protein, 12 aa, Artificial sequence
  Protein classification predicting sequence
TALGAAYLAGLA

SEQ ID NO: 21672 - protein, 8 aa, Artificial sequence
  Protein classification predicting sequence
GWKKAVKR

SEQ ID NO: 21673 - protein, 7 aa, Artificial sequence
  Protein classification predicting sequence
PEVRPSS

SEQ ID NO: 21674 - protein, 6 aa, Artificial sequence
  Protein classification predicting sequence
NGLLTT

SEQ ID NO: 21675 - protein, 8 aa, Artificial sequence
  Protein classification predicting sequence
VESTDGVY

SEQ ID NO: 21676 - protein, 7 aa, Artificial sequence
  Protein classification predicting sequence
VGMTRGT

SEQ ID NO: 21677 - protein, 13 aa, Artificial sequence
  Protein classification predicting sequence
RATLESIAYQTRD

SEQ ID NO: 21678 - protein, 8 aa, Artificial sequence
  Protein classification predicting sequence
AGLAVGYW

SEQ ID NO: 21679 - protein, 11 aa, Artificial sequence
  Protein classification predicting sequence
DIPREMLPEVR

SEQ ID NO: 21680 - protein, 6 aa, Artificial sequence
  Protein classification predicting sequence
MLPEVR

SEQ ID NO: 21681 - protein, 12 aa, Artificial sequence
  Protein classification predicting sequence
ARGTLVGMTRGT

SEQ ID NO: 21682 - protein, 6 aa, Artificial sequence
  Protein classification predicting sequence
TGKPIY

SEQ ID NO: 21683 - protein, 8 aa, Artificial sequence
  Protein classification predicting sequence
AIVWQSRQ

SEQ ID NO: 21684 - protein, 12 aa, Artificial sequence
  Protein classification predicting sequence
LTTIGYGINGKV

SEQ ID NO: 21685 - protein, 6 aa, Artificial sequence
  Protein classification predicting sequence
IQWLRD

SEQ ID NO: 21686 - protein, 8 aa, Artificial sequence
  Protein classification predicting sequence
GITNQRET

SEQ ID NO: 21687 - protein, 12 aa, Artificial sequence
  Protein classification predicting sequence
YALEGSIAVTGS

SEQ ID NO: 21688 - protein, 8 aa, Artificial sequence
  Protein classification predicting sequence
PKPGWVEH

SEQ ID NO: 21689 - protein, 7 aa, Artificial sequence
  Protein classification predicting sequence
KTGLLID

SEQ ID NO: 21690 - protein, 8 aa, Artificial sequence
  Protein classification predicting sequence
DPYFAGTK

SEQ ID NO: 21691 - protein, 10 aa, Artificial sequence
  Protein classification predicting sequence
TDYSNASRTL

SEQ ID NO: 21692 - protein, 8 aa, Artificial sequence
  Protein classification predicting sequence
SENGLLTT

SEQ ID NO: 21693 - protein, 7 aa, Artificial sequence
  Protein classification predicting sequence
FGLTRGT

SEQ ID NO: 21694 - protein, 5 aa, Artificial sequence
  Protein classification predicting sequence
ANEIW

SEQ ID NO: 21695 - protein, 18 aa, Artificial sequence
  Protein classification predicting sequence
RALFGTIDSWLIWSLTGG

SEQ ID NO: 21696 - protein, 12 aa, Artificial sequence
  Protein classification predicting sequence
QYFPQSGWVEHD

SEQ ID NO: 21697 - protein, 7 aa, Artificial sequence
  Protein classification predicting sequence
LAGLAVG

SEQ ID NO: 21698 - protein, 8 aa, Artificial sequence
  Protein classification predicting sequence
FVPAFSGL

SEQ ID NO: 21699 - protein, 6 aa, Artificial sequence
  Protein classification predicting sequence
PYWRSD

SEQ ID NO: 21700 - protein, 7 aa, Artificial sequence
  Protein classification predicting sequence
GTIDTWL

SEQ ID NO: 21701 - protein, 8 aa, Artificial sequence
  Protein classification predicting sequence
FPKSGWVE

SEQ ID NO: 21702 - protein, 11 aa, Artificial sequence
  Protein classification predicting sequence
AGDQQAALFGQ

SEQ ID NO: 21703 - protein, 7 aa, Artificial sequence
  Protein classification predicting sequence
KNTYGTG

SEQ ID NO: 21704 - protein, 7 aa, Artificial sequence
  Protein classification predicting sequence
ARGAIFG

SEQ ID NO: 21705 - protein, 7 aa, Artificial sequence
  Protein classification predicting sequence
IPRAMLP

SEQ ID NO: 21706 - protein, 7 aa, Artificial sequence
  Protein classification predicting sequence
GAREKAE

SEQ ID NO: 21707 - protein, 6 aa, Artificial sequence
  Protein classification predicting sequence
PSSEVY

SEQ ID NO: 21708 - protein, 14 aa, Artificial sequence
  Protein classification predicting sequence
AGDQQAALFGQACF

SEQ ID NO: 21709 - protein, 8 aa, Artificial sequence
  Protein classification predicting sequence
VPAFVGLG

SEQ ID NO: 21710 - protein, 8 aa, Artificial sequence
  Protein classification predicting sequence
PQAGWVEH

SEQ ID NO: 21711 - protein, 37 aa, Artificial sequence
  Protein classification predicting sequence
DQIAAIGITNQRETTIVWEKETGKPIYNAIVWQCRRT

SEQ ID NO: 21712 - protein, 8 aa, Artificial sequence
  Protein classification predicting sequence
AGDQQAAL

SEQ ID NO: 21713 - protein, 7 aa, Artificial sequence
  Protein classification predicting sequence
DSEYFAT

SEQ ID NO: 21714 - protein, 9 aa, Artificial sequence
  Protein classification predicting sequence
GWKKAVKRA

SEQ ID NO: 21715 - protein, 6 aa, Artificial sequence
  Protein classification predicting sequence
DHDANI

SEQ ID NO: 21716 - protein, 13 aa, Artificial sequence
  Protein classification predicting sequence
LLFGTVDTWLVWK

SEQ ID NO: 21717 - protein, 10 aa, Artificial sequence
  Protein classification predicting sequence
GIAGDQQAAL

SEQ ID NO: 21718 - protein, 13 aa, Artificial sequence
  Protein classification predicting sequence
EFRPGIETTERNY

SEQ ID NO: 21719 - protein, 9 aa, Artificial sequence
  Protein classification predicting sequence
GITNQRETT

SEQ ID NO: 21720 - protein, 8 aa, Artificial sequence
  Protein classification predicting sequence
YALEGAVF

SEQ ID NO: 21721 - protein, 17 aa, Artificial sequence
  Protein classification predicting sequence
LRVDGGAVANNFLMQFQ

SEQ ID NO: 21722 - protein, 7 aa, Artificial sequence
  Protein classification predicting sequence
KVKWILD

SEQ ID NO: 21723 - protein, 8 aa, Artificial sequence
  Protein classification predicting sequence
LRVDGGAV

SEQ ID NO: 21724 - protein, 8 aa, Artificial sequence
  Protein classification predicting sequence
KAVIEREF

SEQ ID NO: 21725 - protein, 6 aa, Artificial sequence
  Protein classification predicting sequence
WLLDNV

SEQ ID NO: 21726 - protein, 7 aa, Artificial sequence
  Protein classification predicting sequence
LIYKLTG

SEQ ID NO: 21727 - protein, 10 aa, Artificial sequence
  Protein classification predicting sequence
HLARATLEAI

SEQ ID NO: 21728 - protein, 9 aa, Artificial sequence
  Protein classification predicting sequence
REKLYRGWK

SEQ ID NO: 21729 - protein, 7 aa, Artificial sequence
  Protein classification predicting sequence
TNQRETT

SEQ ID NO: 21730 - protein, 7 aa, Artificial sequence
  Protein classification predicting sequence
GELAFGT

SEQ ID NO: 21731 - protein, 7 aa, Artificial sequence
  Protein classification predicting sequence
WLVWQLT

SEQ ID NO: 21732 - protein, 7 aa, Artificial sequence
  Protein classification predicting sequence
ACFEPGM

SEQ ID NO: 21733 - protein, 9 aa, Artificial sequence
  Protein classification predicting sequence
GAAVQWLRD

SEQ ID NO: 21734 - protein, 14 aa, Artificial sequence
  Protein classification predicting sequence
WDAEARGAIFGLTR

SEQ ID NO: 21735 - protein, 10 aa, Artificial sequence
  Protein classification predicting sequence
ARGAIFGLTR

SEQ ID NO: 21736 - protein, 6 aa, Artificial sequence
  Protein classification predicting sequence
AYQTRD

SEQ ID NO: 21737 - protein, 15 aa, Artificial sequence
  Protein classification predicting sequence
KSTYGTGCFALLNTG

SEQ ID NO: 21738 - protein, 10 aa, Artificial sequence
  Protein classification predicting sequence
VPAFTGLGAP

SEQ ID NO: 21739 - protein, 19 aa, Artificial sequence
  Protein classification predicting sequence
TVLRVDGGMVASDWTMQRL

SEQ ID NO: 21740 - protein, 13 aa, Artificial sequence
  Protein classification predicting sequence
IEAIGITNQRETT

SEQ ID NO: 21741 - protein, 11 aa, Artificial sequence
  Protein classification predicting sequence
AIGITNQRETT

SEQ ID NO: 21742 - protein, 6 aa, Artificial sequence
  Protein classification predicting sequence
WNLTGG

SEQ ID NO: 21743 - protein, 8 aa, Artificial sequence
  Protein classification predicting sequence
EGSIFIAG

SEQ ID NO: 21744 - protein, 6 aa, Artificial sequence
  Protein classification predicting sequence
TRGTTK

SEQ ID NO: 21745 - protein, 7 aa, Artificial sequence
  Protein classification predicting sequence
SVSQREF

SEQ ID NO: 21746 - protein, 7 aa, Artificial sequence
  Protein classification predicting sequence
QSSTLVE

SEQ ID NO: 21747 - protein, 13 aa, Artificial sequence
  Protein classification predicting sequence
GIAGDQQAALFGQ

SEQ ID NO: 21748 - protein, 14 aa, Artificial sequence
  Protein classification predicting sequence
TALGAAYLAGLAVG

SEQ ID NO: 21749 - protein, 16 aa, Artificial sequence
  Protein classification predicting sequence
GWKKAVKRAMAWEEHD

SEQ ID NO: 21750 - protein, 12 aa, Artificial sequence
  Protein classification predicting sequence
YNAIVWQCRRTA

SEQ ID NO: 21751 - protein, 39 aa, Artificial sequence
  Protein classification predicting sequence
RGELLFGTVDTWLIWKMTQGRVHVTDYTNASRTMLFNIH

SEQ ID NO: 21752 - protein, 47 aa, Artificial sequence
  Protein classification predicting sequence
GIAGDQQAALFGQLCVKEGMAKNTYGTGCFMLMNTGEKAVKSENGLL

SEQ ID NO: 21753 - protein, 28 aa, Artificial sequence
  Protein classification predicting sequence
GEVNYALEGAVFMAGASIQWLRDEMKLI

SEQ ID NO: 21754 - protein, 34 aa, Artificial sequence
  Protein classification predicting sequence
TNGVYVVPAFTGLGAPYWDPYARGAIFGLTRGVN

SEQ ID NO: 21755 - protein, 79 aa, Artificial sequence
  Protein classification predicting sequence
NHIIRATLESIAYQTRDVLEAMQADSGIRLHALRVDGGAVANNFLMQFQSDILGTRVERPEVREVTALGAAYLAGLAVG

SEQ ID NO: 21756 - protein, 30 aa, Artificial sequence
  Protein classification predicting sequence
WQNLDELQEKAVIEREFRPGIETTERNYRY

SEQ ID NO: 21757 - protein, 6 aa, Artificial sequence
  Protein classification predicting sequence
QREFTQ

SEQ ID NO: 21758 - protein, 9 aa, Artificial sequence
  Protein classification predicting sequence
TGLLLDPYF

SEQ ID NO: 21759 - protein, 9 aa, Artificial sequence
  Protein classification predicting sequence
KIKWILDNV

SEQ ID NO: 21760 - protein, 7 aa, Artificial sequence
  Protein classification predicting sequence
LFNIHSL

SEQ ID NO: 21761 - protein, 8 aa, Artificial sequence
  Protein classification predicting sequence
VDGGAVAN

SEQ ID NO: 21762 - protein, 8 aa, Artificial sequence
  Protein classification predicting sequence
DPYFSGTK

SEQ ID NO: 21763 - protein, 9 aa, Artificial sequence
  Protein classification predicting sequence
GTKVKWILD

SEQ ID NO: 21764 - protein, 6 aa, Artificial sequence
  Protein classification predicting sequence
MLPEVK

SEQ ID NO: 21765 - protein, 6 aa, Artificial sequence
  Protein classification predicting sequence
YQTRDV

SEQ ID NO: 21766 - protein, 34 aa, Artificial sequence
  Protein classification predicting sequence
YGKTIDYHFYGQEVPIAGVAGDQQAALFGQACFE

SEQ ID NO: 21767 - protein, 15 aa, Artificial sequence
  Protein classification predicting sequence
AGDQQAALFGQACFE

SEQ ID NO: 21768 - protein, 9 aa, Artificial sequence
  Protein classification predicting sequence
LAGLAVGFW

SEQ ID NO: 21769 - protein, 12 aa, Artificial sequence
  Protein classification predicting sequence
RGTEKEHFIRAT

SEQ ID NO: 21770 - protein, 13 aa, Artificial sequence
  Protein classification predicting sequence
DQGTTSSRAILFN

SEQ ID NO: 21771 - protein, 17 aa, Artificial sequence
  Protein classification predicting sequence
TGRPIYHAIVWQSRQTQ

SEQ ID NO: 21772 - protein, 10 aa, Artificial sequence
  Protein classification predicting sequence
KTGLLLDPYF

SEQ ID NO: 21773 - protein, 6 aa, Artificial sequence
  Protein classification predicting sequence
AHITDY

SEQ ID NO: 21774 - protein, 8 aa, Artificial sequence
  Protein classification predicting sequence
GQEVPIAG

SEQ ID NO: 21775 - protein, 15 aa, Artificial sequence
  Protein classification predicting sequence
AVKSESGLLTTIAYG

SEQ ID NO: 21776 - protein, 16 aa, Artificial sequence
  Protein classification predicting sequence
SVERPEIQETTALGAA

SEQ ID NO: 21777 - protein, 34 aa, Artificial sequence
  Protein classification predicting sequence
DGKVNYALEGSIFVSGSAIQWLRDGLRMINSAPQ

SEQ ID NO: 21778 - protein, 22 aa, Artificial sequence
  Protein classification predicting sequence
LRVDGGAVKNNFIMQFQADIVN

SEQ ID NO: 21779 - protein, 11 aa, Artificial sequence
  Protein classification predicting sequence
SSQKEFPQIFP

SEQ ID NO: 21780 - protein, 6 aa, Artificial sequence
  Protein classification predicting sequence
AGWVEH

SEQ ID NO: 21781 - protein, 9 aa, Artificial sequence
  Protein classification predicting sequence
IDAYFSATK

SEQ ID NO: 21782 - protein, 15 aa, Artificial sequence
  Protein classification predicting sequence
NNLLTTIGYGINGKV

SEQ ID NO: 21783 - protein, 7 aa, Artificial sequence
  Protein classification predicting sequence
QWLRDGL

SEQ ID NO: 21784 - protein, 11 aa, Artificial sequence
  Protein classification predicting sequence
LMQFQADILGI

SEQ ID NO: 21785 - protein, 13 aa, Artificial sequence
  Protein classification predicting sequence
ETTALGAAFLAGL

SEQ ID NO: 21786 - protein, 11 aa, Artificial sequence
  Protein classification predicting sequence
LKELNATGQLF

SEQ ID NO: 21787 - protein, 13 aa, Artificial sequence
  Protein classification predicting sequence
MNESRKEKLYKGW

SEQ ID NO: 21788 - protein, 30 aa, Artificial sequence
  Protein classification predicting sequence
AGWVEHNANQIWNSVQSVIAGAFIESSIKP

SEQ ID NO: 21789 - protein, 81 aa, Artificial sequence
  Protein classification predicting sequence
STSDDEVYVVPAFTGLGAPYWDSNARGSVFGLTRGTSKEDFVKATLQSIAYQVRDVIDTMQVDSGIDIQQLRVDGGAAMNN

SEQ ID NO: 21790 - protein, 11 aa, Artificial sequence
  Protein classification predicting sequence
IGITNQRETTV

SEQ ID NO: 21791 - protein, 27 aa, Artificial sequence
  Protein classification predicting sequence
FHFYGGEVPISGMAGDQQAALFGQLAF

SEQ ID NO: 21792 - protein, 11 aa, Artificial sequence
  Protein classification predicting sequence
PGMVKNTYGTG

SEQ ID NO: 21793 - protein, 19 aa, Artificial sequence
  Protein classification predicting sequence
PGMVKNTYGTGSFIIMNTG

SEQ ID NO: 21794 - protein, 32 aa, Artificial sequence
  Protein classification predicting sequence
LMQFQADILGIDIARAKNLETTALGAAFLAGL

SEQ ID NO: 21795 - protein, 11 aa, Artificial sequence
  Protein classification predicting sequence
NNLLTTIGYGI

SEQ ID NO: 21796 - protein, 12 aa, Artificial sequence
  Protein classification predicting sequence
KGEKVSSSQKEF

SEQ ID NO: 21797 - protein, 8 aa, Artificial sequence
  Protein classification predicting sequence
HVTDYSNA

SEQ ID NO: 21798 - protein, 10 aa, Artificial sequence
  Protein classification predicting sequence
SNSEIYGKTA

SEQ ID NO: 21799 - protein, 11 aa, Artificial sequence
  Protein classification predicting sequence
YALEGSIFIAG

SEQ ID NO: 21800 - protein, 12 aa, Artificial sequence
  Protein classification predicting sequence
AGSAIQWLRDGL

SEQ ID NO: 21801 - protein, 14 aa, Artificial sequence
  Protein classification predicting sequence
AGSAIQWLRDGLRM

SEQ ID NO: 21802 - protein, 18 aa, Artificial sequence
  Protein classification predicting sequence
NARGSVFGLTRGTSKEDF

SEQ ID NO: 21803 - protein, 13 aa, Artificial sequence
  Protein classification predicting sequence
KATLQSIAYQVRD

SEQ ID NO: 21804 - protein, 7 aa, Artificial sequence
  Protein classification predicting sequence
IDTMQVD

SEQ ID NO: 21805 - protein, 9 aa, Artificial sequence
  Protein classification predicting sequence
VDGGAAMNN

SEQ ID NO: 21806 - protein, 9 aa, Artificial sequence
  Protein classification predicting sequence
LMQFQADIL

SEQ ID NO: 21807 - protein, 13 aa, Artificial sequence
  Protein classification predicting sequence
TGLVLDAYFSGTK

SEQ ID NO: 21808 - protein, 6 aa, Artificial sequence
  Protein classification predicting sequence
NDFLMQ

SEQ ID NO: 21809 - protein, 8 aa, Artificial sequence
  Protein classification predicting sequence
AIDQGTTS

SEQ ID NO: 21810 - protein, 7 aa, Artificial sequence
  Protein classification predicting sequence
IDQGTTS

SEQ ID NO: 21811 - protein, 11 aa, Artificial sequence
  Protein classification predicting sequence
IDQGTTSSRAI

SEQ ID NO: 21812 - protein, 19 aa, Artificial sequence
  Protein classification predicting sequence
IDQGTTSSRAILFNQKGEI

SEQ ID NO: 21813 - protein, 6 aa, Artificial sequence
  Protein classification predicting sequence
FGQACF

SEQ ID NO: 21814 - protein, 7 aa, Artificial sequence
  Protein classification predicting sequence
ETTALGA

SEQ ID NO: 21815 - protein, 10 aa, Artificial sequence
  Protein classification predicting sequence
YLAGLAVGYW

SEQ ID NO: 21816 - protein, 7 aa, Artificial sequence
  Protein classification predicting sequence
DQGTTSS

SEQ ID NO: 21817 - protein, 8 aa, Artificial sequence
  Protein classification predicting sequence
FGTVDTWL

SEQ ID NO: 21818 - protein, 9 aa, Artificial sequence
  Protein classification predicting sequence
QADLLGVPV

SEQ ID NO: 21819 - protein, 17 aa, Artificial sequence
  Protein classification predicting sequence
QIYPKPGWVEHDPMEIW

SEQ ID NO: 21820 - protein, 11 aa, Artificial sequence
  Protein classification predicting sequence
GWVEHDPMEIW

SEQ ID NO: 21821 - protein, 7 aa, Artificial sequence
  Protein classification predicting sequence
EHDPMEI

SEQ ID NO: 21822 - protein, 22 aa, Artificial sequence
  Protein classification predicting sequence
VWNKETGKPVYNAIVWQCRRTA

SEQ ID NO: 21823 - protein, 14 aa, Artificial sequence
  Protein classification predicting sequence
NTGLVLDPYFSGTK

SEQ ID NO: 21824 - protein, 10 aa, Artificial sequence
  Protein classification predicting sequence
LLFGTVDTWL

SEQ ID NO: 21825 - protein, 36 aa, Artificial sequence
  Protein classification predicting sequence
LLFGTVDTWLVWKMTQGRVHVTDYTNASRTMLFNIN

SEQ ID NO: 21826 - protein, 7 aa, Artificial sequence
  Protein classification predicting sequence
SMMPEVK

SEQ ID NO: 21827 - protein, 25 aa, Artificial sequence
  Protein classification predicting sequence
AGQAKNTYGTGCFLLMNTGQEKVTS

SEQ ID NO: 21828 - protein, 9 aa, Artificial sequence
  Protein classification predicting sequence
DSEYFATKV

SEQ ID NO: 21829 - protein, 55 aa, Artificial sequence
  Protein classification predicting sequence
DSEYFATKVDTSNGVYVVPAFTGLGAPYWDAYARGTIVGLTRGVNSNHIIRATLE

SEQ ID NO: 21830 - protein, 9 aa, Artificial sequence
  Protein classification predicting sequence
IAYQTRDVL

SEQ ID NO: 21831 - protein, 13 aa, Artificial sequence
  Protein classification predicting sequence
IAYQTRDVLDAMQ

SEQ ID NO: 21832 - protein, 16 aa, Artificial sequence
  Protein classification predicting sequence
EVTALGAAYLAGLAVG

SEQ ID NO: 21833 - protein, 14 aa, Artificial sequence
  Protein classification predicting sequence
RRYKGWKRAVKCAQ

SEQ ID NO: 21834 - protein, 12 aa, Artificial sequence
  Protein classification predicting sequence
KWILDNVEGARE

SEQ ID NO: 21835 - protein, 13 aa, Artificial sequence
  Protein classification predicting sequence
TNIGGKGGTRIPI

SEQ ID NO: 21836 - protein, 8 aa, Artificial sequence
  Protein classification predicting sequence
AGVAQREF

SEQ ID NO: 21837 - protein, 6 aa, Artificial sequence
  Protein classification predicting sequence
IFVAGS

SEQ ID NO: 21838 - protein, 9 aa, Artificial sequence
  Protein classification predicting sequence
QWLRDGLRM

SEQ ID NO: 21839 - protein, 12 aa, Artificial sequence
  Protein classification predicting sequence
YALEGSIFVAGS

SEQ ID NO: 21840 - protein, 9 aa, Artificial sequence
  Protein classification predicting sequence
RGAVFGLTR

SEQ ID NO: 21841 - protein, 6 aa, Artificial sequence
  Protein classification predicting sequence
TTKEHF

SEQ ID NO: 21842 - protein, 7 aa, Artificial sequence
  Protein classification predicting sequence
PKPGWVE

SEQ ID NO: 21843 - protein, 6 aa, Artificial sequence
  Protein classification predicting sequence
CKSFKW

SEQ ID NO: 21844 - protein, 6 aa, Artificial sequence
  Protein classification predicting sequence
GEIRNV

SEQ ID NO: 21845 - protein, 10 aa, Artificial sequence
  Protein classification predicting sequence
PCSRVGHIFR

SEQ ID NO: 21846 - protein, 9 aa, Artificial sequence
  Protein classification predicting sequence
SFRIWQCGG

SEQ ID NO: 21847 - protein, 6 aa, Artificial sequence
  Protein classification predicting sequence
VLTFLD

SEQ ID NO: 21848 - protein, 10 aa, Artificial sequence
  Protein classification predicting sequence
YCKVVLATSL

SEQ ID NO: 21849 - protein, 8 aa, Artificial sequence
  Protein classification predicting sequence
EGPGEMGK

SEQ ID NO: 21850 - protein, 7 aa, Artificial sequence
  Protein classification predicting sequence
DQEKMKE

SEQ ID NO: 21851 - protein, 11 aa, Artificial sequence
  Protein classification predicting sequence
FKINQFNLMAS

SEQ ID NO: 21852 - protein, 19 aa, Artificial sequence
  Protein classification predicting sequence
TSVVIVFHNEAWSTLLRTV

SEQ ID NO: 21853 - protein, 7 aa, Artificial sequence
  Protein classification predicting sequence
SVINRSP

SEQ ID NO: 21854 - protein, 18 aa, Artificial sequence
  Protein classification predicting sequence
EIGTYDAGMDIWGGENLE

SEQ ID NO: 21855 - protein, 17 aa, Artificial sequence
  Protein classification predicting sequence
INKNNRRLAEVWMDEFK

SEQ ID NO: 21856 - protein, 9 aa, Artificial sequence
  Protein classification predicting sequence
FFYIISPGV

SEQ ID NO: 21857 - protein, 17 aa, Artificial sequence
  Protein classification predicting sequence
SLGEIRNVETNQCLDNM

SEQ ID NO: 21858 - protein, 13 aa, Artificial sequence
  Protein classification predicting sequence
KEIRTDDLCLDVS

SEQ ID NO: 21859 - protein, 8 aa, Artificial sequence
  Protein classification predicting sequence
GNQLWEYD

SEQ ID NO: 21860 - protein, 26 aa, Artificial sequence
  Protein classification predicting sequence
LEIVTCSHVGHVFRKATPYTFPGGTG

SEQ ID NO: 21861 - protein, 25 aa, Artificial sequence
  Protein classification predicting sequence
RKENEKVGIFNCHGMGGNQVFSYTA

SEQ ID NO: 21862 - protein, 7 aa, Artificial sequence
  Protein classification predicting sequence
FLDSHCE

SEQ ID NO: 21863 - protein, 8 aa, Artificial sequence
  Protein classification predicting sequence
CQSFKWYL

SEQ ID NO: 21864 - protein, 6 aa, Artificial sequence
  Protein classification predicting sequence
SFKWYL

SEQ ID NO: 21865 - protein, 6 aa, Artificial sequence
  Protein classification predicting sequence
WLEPLL

SEQ ID NO: 21866 - protein, 11 aa, Artificial sequence
  Protein classification predicting sequence
VRGGFNWGLHF

SEQ ID NO: 21867 - protein, 8 aa, Artificial sequence
  Protein classification predicting sequence
MDIWGGEN

SEQ ID NO: 21868 - protein, 15 aa, Artificial sequence
  Protein classification predicting sequence
PCSRVGHIFRKRRPY

SEQ ID NO: 21869 - protein, 9 aa, Artificial sequence
  Protein classification predicting sequence
NSLRLAHVW

SEQ ID NO: 21870 - protein, 6 aa, Artificial sequence
  Protein classification predicting sequence
DAHCEC

SEQ ID NO: 21871 - protein, 7 aa, Artificial sequence
  Protein classification predicting sequence
DGGEGTV

SEQ ID NO: 21872 - protein, 8 aa, Artificial sequence
  Protein classification predicting sequence
ITGEGRID

SEQ ID NO: 21873 - protein, 9 aa, Artificial sequence
  Protein classification predicting sequence
PLAEVDPDI

SEQ ID NO: 21874 - protein, 7 aa, Artificial sequence
  Protein classification predicting sequence
GGHLTHG

SEQ ID NO: 21875 - protein, 6 aa, Artificial sequence
  Protein classification predicting sequence
TTTTHK

SEQ ID NO: 21876 - protein, 8 aa, Artificial sequence
  Protein classification predicting sequence
FPGLQGGP

SEQ ID NO: 21877 - protein, 15 aa, Artificial sequence
  Protein classification predicting sequence
KNATGKRAEAALGRA

SEQ ID NO: 21878 - protein, 8 aa, Artificial sequence
  Protein classification predicting sequence
PFVTSGVR

SEQ ID NO: 21879 - protein, 10 aa, Artificial sequence
  Protein classification predicting sequence
TNKYAEGYPG

SEQ ID NO: 21880 - protein, 6 aa, Artificial sequence
  Protein classification predicting sequence
ITVNKN

SEQ ID NO: 21881 - protein, 8 aa, Artificial sequence
  Protein classification predicting sequence
AGGHLTHG

SEQ ID NO: 21882 - protein, 17 aa, Artificial sequence
  Protein classification predicting sequence
RQEEHIELIASENYTSP

SEQ ID NO: 21883 - protein, 10 aa, Artificial sequence
  Protein classification predicting sequence
LAHGGHLTHG

SEQ ID NO: 21884 - protein, 32 aa, Artificial sequence
  Protein classification predicting sequence
NSAIFPGIQGGPLMHVIAAKAVAFKEALSPEF

SEQ ID NO: 21885 - protein, 24 aa, Artificial sequence
  Protein classification predicting sequence
TLVKRGLRIVSGRTESHVMLVDLR

SEQ ID NO: 21886 - protein, 10 aa, Artificial sequence
  Protein classification predicting sequence
VEQLAIDRAK

SEQ ID NO: 21887 - protein, 18 aa, Artificial sequence
  Protein classification predicting sequence
LFGADYANVQPHSGSQAN

SEQ ID NO: 21888 - protein, 14 aa, Artificial sequence
  Protein classification predicting sequence
LAHGGHLTHGSPVN

SEQ ID NO: 21889 - protein, 11 aa, Artificial sequence
  Protein classification predicting sequence
GGHLTHGSPVN

SEQ ID NO: 21890 - protein, 7 aa, Artificial sequence
  Protein classification predicting sequence
GGFSAYS

SEQ ID NO: 21891 - protein, 36 aa, Artificial sequence
  Protein classification predicting sequence
GGFSAYSGVVDWAKMREIADSIGAYLFVDMAHVAGL

SEQ ID NO: 21892 - protein, 9 aa, Artificial sequence
  Protein classification predicting sequence
VTTTTHKTL

SEQ ID NO: 21893 - protein, 8 aa, Artificial sequence
  Protein classification predicting sequence
GPRGGLIL

SEQ ID NO: 21894 - protein, 38 aa, Artificial sequence
  Protein classification predicting sequence
KNLTGKEADAALGRANITVNKNSVPNDPKSPFVTSGIR

SEQ ID NO: 21895 - protein, 7 aa, Artificial sequence
  Protein classification predicting sequence
RGFKEAE

SEQ ID NO: 21896 - protein, 8 aa, Artificial sequence
  Protein classification predicting sequence
KVLDICAR

SEQ ID NO: 21897 - protein, 9 aa, Artificial sequence
  Protein classification predicting sequence
LEMIASENF

SEQ ID NO: 21898 - protein, 6 aa, Artificial sequence
  Protein classification predicting sequence
IASENF

SEQ ID NO: 21899 - protein, 8 aa, Artificial sequence
  Protein classification predicting sequence
VDVVENLA

SEQ ID NO: 21900 - protein, 7 aa, Artificial sequence
  Protein classification predicting sequence
IADEVGA

SEQ ID NO: 21901 - protein, 7 aa, Artificial sequence
  Protein classification predicting sequence
NSAVFPG

SEQ ID NO: 21902 - protein, 10 aa, Artificial sequence
  Protein classification predicting sequence
QGGPLMHVIA

SEQ ID NO: 21903 - protein, 15 aa, Artificial sequence
  Protein classification predicting sequence
QGGPLMHVIAGKAVA

SEQ ID NO: 21904 - protein, 7 aa, Artificial sequence
  Protein classification predicting sequence
EVGITVN

SEQ ID NO: 21905 - protein, 11 aa, Artificial sequence
  Protein classification predicting sequence
LAIDRACQLFG

SEQ ID NO: 21906 - protein, 9 aa, Artificial sequence
  Protein classification predicting sequence
YANVQPHSG

SEQ ID NO: 21907 - protein, 35 aa, Artificial sequence
  Protein classification predicting sequence
AVYMALLNPGDTVLGMSLAHGGHLTHGSPVNFSGK

SEQ ID NO: 21908 - protein, 18 aa, Artificial sequence
  Protein classification predicting sequence
LAHGGHLTHGSPVNFSGK

SEQ ID NO: 21909 - protein, 15 aa, Artificial sequence
  Protein classification predicting sequence
GGHLTHGSPVNFSGK

SEQ ID NO: 21910 - protein, 19 aa, Artificial sequence
  Protein classification predicting sequence
LALEHKPKMIIGGFSAYSQ

SEQ ID NO: 21911 - protein, 7 aa, Artificial sequence
  Protein classification predicting sequence
GFSAYSQ

SEQ ID NO: 21912 - protein, 11 aa, Artificial sequence
  Protein classification predicting sequence
GFSAYSQVVDW

SEQ ID NO: 21913 - protein, 10 aa, Artificial sequence
  Protein classification predicting sequence
FVDMAHVAGL

SEQ ID NO: 21914 - protein, 9 aa, Artificial sequence
  Protein classification predicting sequence
KEAMEPEFK

SEQ ID NO: 21915 - protein, 12 aa, Artificial sequence
  Protein classification predicting sequence
KEAMEPEFKVYQ

SEQ ID NO: 21916 - protein, 7 aa, Artificial sequence
  Protein classification predicting sequence
FLERGYK

SEQ ID NO: 21917 - protein, 10 aa, Artificial sequence
  Protein classification predicting sequence
ANAAVYLALL

SEQ ID NO: 21918 - protein, 6 aa, Artificial sequence
  Protein classification predicting sequence
NAVQYG

SEQ ID NO: 21919 - protein, 6 aa, Artificial sequence
  Protein classification predicting sequence
LTGKEA

SEQ ID NO: 21920 - protein, 9 aa, Artificial sequence
  Protein classification predicting sequence
ITVNKNAVP

SEQ ID NO: 21921 - protein, 9 aa, Artificial sequence
  Protein classification predicting sequence
GPRGGLILA

SEQ ID NO: 21922 - protein, 7 aa, Artificial sequence
  Protein classification predicting sequence
AVYLALL

SEQ ID NO: 21923 - protein, 7 aa, Artificial sequence
  Protein classification predicting sequence
GDTVLGM

SEQ ID NO: 21924 - protein, 8 aa, Artificial sequence
  Protein classification predicting sequence
SGKLYNAV

SEQ ID NO: 21925 - protein, 6 aa, Artificial sequence
  Protein classification predicting sequence
AGFSAY

SEQ ID NO: 21926 - protein, 7 aa, Artificial sequence
  Protein classification predicting sequence
AGFSAYS

SEQ ID NO: 21927 - protein, 24 aa, Artificial sequence
  Protein classification predicting sequence
AGFSAYSKTLDFPRFRAIADKVGA

SEQ ID NO: 21928 - protein, 15 aa, Artificial sequence
  Protein classification predicting sequence
LFVDMAHVAGLVAAG

SEQ ID NO: 21929 - protein, 10 aa, Artificial sequence
  Protein classification predicting sequence
ADVVTTTTHK

SEQ ID NO: 21930 - protein, 9 aa, Artificial sequence
  Protein classification predicting sequence
DVVTTTTHK

SEQ ID NO: 21931 - protein, 8 aa, Artificial sequence
  Protein classification predicting sequence
FKTYQQQV

SEQ ID NO: 21932 - protein, 7 aa, Artificial sequence
  Protein classification predicting sequence
NMSGKWF

SEQ ID NO: 21933 - protein, 13 aa, Artificial sequence
  Protein classification predicting sequence
NMSGKWFNVVSYG

SEQ ID NO: 21934 - protein, 8 aa, Artificial sequence
  Protein classification predicting sequence
KAVAFKEA

SEQ ID NO: 21935 - protein, 6 aa, Artificial sequence
  Protein classification predicting sequence
QVVKNA

SEQ ID NO: 21936 - protein, 14 aa, Artificial sequence
  Protein classification predicting sequence
RGLRIVSGRTESHV

SEQ ID NO: 21937 - protein, 8 aa, Artificial sequence
  Protein classification predicting sequence
PFVTSGIR

SEQ ID NO: 21938 - protein, 10 aa, Artificial sequence
  Protein classification predicting sequence
DEANIAAVRA

SEQ ID NO: 21939 - protein, 17 aa, Artificial sequence
  Protein classification predicting sequence
GGHLTHGSPVNMSGKWF

SEQ ID NO: 21940 - protein, 7 aa, Artificial sequence
  Protein classification predicting sequence
DHLLDMD

SEQ ID NO: 21941 - protein, 8 aa, Artificial sequence
  Protein classification predicting sequence
KRFREIAD

SEQ ID NO: 21942 - protein, 6 aa, Artificial sequence
  Protein classification predicting sequence
GVHPSP

SEQ ID NO: 21943 - protein, 8 aa, Artificial sequence
  Protein classification predicting sequence
DPEIFGAI

SEQ ID NO: 21944 - protein, 8 aa, Artificial sequence
  Protein classification predicting sequence
KPKLIIAG

SEQ ID NO: 21945 - protein, 13 aa, Artificial sequence
  Protein classification predicting sequence
LMVDMAHIAGLVA

SEQ ID NO: 21946 - protein, 14 aa, Artificial sequence
  Protein classification predicting sequence
FPGLQGGPLMHVIA

SEQ ID NO: 21947 - protein, 15 aa, Artificial sequence
  Protein classification predicting sequence
VSGGTDNHLMLVDLR

SEQ ID NO: 21948 - protein, 8 aa, Artificial sequence
  Protein classification predicting sequence
HLMLVDLR

SEQ ID NO: 21949 - protein, 5 aa, Artificial sequence
  Protein classification predicting sequence
TCNKN

SEQ ID NO: 21950 - protein, 10 aa, Artificial sequence
  Protein classification predicting sequence
TCNKNGIPFD

SEQ ID NO: 21951 - protein, 7 aa, Artificial sequence
  Protein classification predicting sequence
ELIASEN

SEQ ID NO: 21952 - protein, 10 aa, Artificial sequence
  Protein classification predicting sequence
RYYGGCEFVD

SEQ ID NO: 21953 - protein, 11 aa, Artificial sequence
  Protein classification predicting sequence
VGAYFMVDMAH

SEQ ID NO: 21954 - protein, 10 aa, Artificial sequence
  Protein classification predicting sequence
AHVTTTTTHK

SEQ ID NO: 21955 - protein, 10 aa, Artificial sequence
  Protein classification predicting sequence
LRGPRGGLIL

SEQ ID NO: 21956 - protein, 7 aa, Artificial sequence
  Protein classification predicting sequence
NSAIFPG

SEQ ID NO: 21957 - protein, 10 aa, Artificial sequence
  Protein classification predicting sequence
TTRGFGVAEF

SEQ ID NO: 21958 - protein, 20 aa, Artificial sequence
  Protein classification predicting sequence
RQEEHIELIASENYTSPRVM

SEQ ID NO: 21959 - protein, 10 aa, Artificial sequence
  Protein classification predicting sequence
KRMREIADKV

SEQ ID NO: 21960 - protein, 12 aa, Artificial sequence
  Protein classification predicting sequence
AHVVTTTTHKTL

SEQ ID NO: 21961 - protein, 22 aa, Artificial sequence
  Protein classification predicting sequence
YKKLNSAVFPGGQGGPLMHVIA

SEQ ID NO: 21962 - protein, 7 aa, Artificial sequence
  Protein classification predicting sequence
PEFKEYQ

SEQ ID NO: 21963 - protein, 9 aa, Artificial sequence
  Protein classification predicting sequence
WMCDVLDNI

SEQ ID NO: 21964 - protein, 10 aa, Artificial sequence
  Protein classification predicting sequence
VIEATKQKVL

SEQ ID NO: 21965 - protein, 7 aa, Artificial sequence
  Protein classification predicting sequence
KNAKAMV

SEQ ID NO: 21966 - protein, 6 aa, Artificial sequence
  Protein classification predicting sequence
GTENHL

SEQ ID NO: 21967 - protein, 9 aa, Artificial sequence
  Protein classification predicting sequence
GTDSHMVLV

SEQ ID NO: 21968 - protein, 6 aa, Artificial sequence
  Protein classification predicting sequence
VMQAQG

SEQ ID NO: 21969 - protein, 8 aa, Artificial sequence
  Protein classification predicting sequence
IVAGASAY

SEQ ID NO: 21970 - protein, 8 aa, Artificial sequence
  Protein classification predicting sequence
KGITGKEA

SEQ ID NO: 21971 - protein, 8 aa, Artificial sequence
  Protein classification predicting sequence
EKPFVTSG

SEQ ID NO: 21972 - protein, 14 aa, Artificial sequence
  Protein classification predicting sequence
ELIASENIVSRAVL

SEQ ID NO: 21973 - protein, 8 aa, Artificial sequence
  Protein classification predicting sequence
RLGTPAGT

SEQ ID NO: 21974 - protein, 6 aa, Artificial sequence
  Protein classification predicting sequence
GCEYVD

SEQ ID NO: 21975 - protein, 13 aa, Artificial sequence
  Protein classification predicting sequence
GMNLAQGGHLTHG

SEQ ID NO: 21976 - protein, 7 aa, Artificial sequence
  Protein classification predicting sequence
IADKVGA

SEQ ID NO: 21977 - protein, 7 aa, Artificial sequence
  Protein classification predicting sequence
AGLVAAG

SEQ ID NO: 21978 - protein, 7 aa, Artificial sequence
  Protein classification predicting sequence
RGYKIVS

SEQ ID NO: 21979 - protein, 6 aa, Artificial sequence
  Protein classification predicting sequence
GTDNHL

SEQ ID NO: 21980 - protein, 9 aa, Artificial sequence
  Protein classification predicting sequence
NKNSVPNDP

SEQ ID NO: 21981 - protein, 7 aa, Artificial sequence
  Protein classification predicting sequence
NFSGKLY

SEQ ID NO: 21982 - protein, 6 aa, Artificial sequence
  Protein classification predicting sequence
TTHKTL

SEQ ID NO: 21983 - protein, 6 aa, Artificial sequence
  Protein classification predicting sequence
DPRPPM

SEQ ID NO: 21984 - protein, 7 aa, Artificial sequence
  Protein classification predicting sequence
HVIAAKA

SEQ ID NO: 21985 - protein, 31 aa, Artificial sequence
  Protein classification predicting sequence
QIELIASENIVSKAVMQAQGTCLTNKYAEGY

SEQ ID NO: 21986 - protein, 7 aa, Artificial sequence
  Protein classification predicting sequence
NVQPHSG

SEQ ID NO: 21987 - protein, 11 aa, Artificial sequence
  Protein classification predicting sequence
NVQPHSGAQAN

SEQ ID NO: 21988 - protein, 7 aa, Artificial sequence
  Protein classification predicting sequence
EHKPKMI

SEQ ID NO: 21989 - protein, 16 aa, Artificial sequence
  Protein classification predicting sequence
EHKPKMIIAGGSAIPR

SEQ ID NO: 21990 - protein, 7 aa, Artificial sequence
  Protein classification predicting sequence
IIAGGSA

SEQ ID NO: 21991 - protein, 10 aa, Artificial sequence
  Protein classification predicting sequence
KKINSAVFPG

SEQ ID NO: 21992 - protein, 6 aa, Artificial sequence
  Protein classification predicting sequence
TSRGFG

SEQ ID NO: 21993 - protein, 9 aa, Artificial sequence
  Protein classification predicting sequence
WIGDVLDGL

SEQ ID NO: 21994 - protein, 8 aa, Artificial sequence
  Protein classification predicting sequence
AVMEAQGS

SEQ ID NO: 21995 - protein, 19 aa, Artificial sequence
  Protein classification predicting sequence
LTNKYAEGYPGKRYYGGCE

SEQ ID NO: 21996 - protein, 22 aa, Artificial sequence
  Protein classification predicting sequence
LTNKYAEGYPGKRYYGGCEYVD

SEQ ID NO: 21997 - protein, 7 aa, Artificial sequence
  Protein classification predicting sequence
SGKLYNA

SEQ ID NO: 21998 - protein, 9 aa, Artificial sequence
  Protein classification predicting sequence
YQQQVVKNA

SEQ ID NO: 21999 - protein, 11 aa, Artificial sequence
  Protein classification predicting sequence
NHLFLLSLIKQ

SEQ ID NO: 22000 - protein, 15 aa, Artificial sequence
  Protein classification predicting sequence
LDFPRFRAIADKVGA

SEQ ID NO: 22001 - protein, 5 aa, Artificial sequence
  Protein classification predicting sequence
NHLFL

SEQ ID NO: 22002 - protein, 7 aa, Artificial sequence
  Protein classification predicting sequence
VLEAQGS

SEQ ID NO: 22003 - protein, 7 aa, Artificial sequence
  Protein classification predicting sequence
LAIDRVK

SEQ ID NO: 22004 - protein, 10 aa, Artificial sequence
  Protein classification predicting sequence
PEFKTYIDSV

SEQ ID NO: 22005 - protein, 17 aa, Artificial sequence
  Protein classification predicting sequence
ALERAGITCNKNGIPFD

SEQ ID NO: 22006 - protein, 10 aa, Artificial sequence
  Protein classification predicting sequence
TSGIRLGTPA

SEQ ID NO: 22007 - protein, 7 aa, Artificial sequence
  Protein classification predicting sequence
ETLAIER

SEQ ID NO: 22008 - protein, 6 aa, Artificial sequence
  Protein classification predicting sequence
SGSPAN

SEQ ID NO: 22009 - protein, 6 aa, Artificial sequence
  Protein classification predicting sequence
ADIAHI

SEQ ID NO: 22010 - protein, 7 aa, Artificial sequence
  Protein classification predicting sequence
TGGTDNH

SEQ ID NO: 22011 - protein, 6 aa, Artificial sequence
  Protein classification predicting sequence
VTSGIR

SEQ ID NO: 22012 - protein, 10 aa, Artificial sequence
  Protein classification predicting sequence
RYYGGCQYVD

SEQ ID NO: 22013 - protein, 7 aa, Artificial sequence
  Protein classification predicting sequence
IADSVGA

SEQ ID NO: 22014 - protein, 6 aa, Artificial sequence
  Protein classification predicting sequence
PVNMSG

SEQ ID NO: 22015 - protein, 10 aa, Artificial sequence
  Protein classification predicting sequence
VVTSTTHKTL

SEQ ID NO: 22016 - protein, 16 aa, Artificial sequence
  Protein classification predicting sequence
VVTSTTHKTLRGPRGG

SEQ ID NO: 22017 - protein, 22 aa, Artificial sequence
  Protein classification predicting sequence
VVTSTTHKTLRGPRGGFVLTND

SEQ ID NO: 22018 - protein, 7 aa, Artificial sequence
  Protein classification predicting sequence
EALQPEF

SEQ ID NO: 22019 - protein, 11 aa, Artificial sequence
  Protein classification predicting sequence
NVQPHSGSQAN

SEQ ID NO: 22020 - protein, 6 aa, Artificial sequence
  Protein classification predicting sequence
DFARFR

SEQ ID NO: 22021 - protein, 22 aa, Artificial sequence
  Protein classification predicting sequence
LTNKYAEGYPGRRYYGGCEHVD

SEQ ID NO: 22022 - protein, 10 aa, Artificial sequence
  Protein classification predicting sequence
RYYGGCEHVD

SEQ ID NO: 22023 - protein, 7 aa, Artificial sequence
  Protein classification predicting sequence
TLEINYD

SEQ ID NO: 22024 - protein, 16 aa, Artificial sequence
  Protein classification predicting sequence
KKINSAVFPGLQGGPL

SEQ ID NO: 22025 - protein, 21 aa, Artificial sequence
  Protein classification predicting sequence
KKINSAVFPGLQGGPLMHVIA

SEQ ID NO: 22026 - protein, 35 aa, Artificial sequence
  Protein classification predicting sequence
KKINSAVFPGLQGGPLMHVIAAKAVAFGEALGPEF

SEQ ID NO: 22027 - protein, 9 aa, Artificial sequence
  Protein classification predicting sequence
AIERAKKLF

SEQ ID NO: 22028 - protein, 11 aa, Artificial sequence
  Protein classification predicting sequence
KRYYGGCEYVD

SEQ ID NO: 22029 - protein, 12 aa, Artificial sequence
  Protein classification predicting sequence
LFGADYANVQPH

SEQ ID NO: 22030 - protein, 6 aa, Artificial sequence
  Protein classification predicting sequence
NSAVFP

SEQ ID NO: 22031 - protein, 10 aa, Artificial sequence
  Protein classification predicting sequence
PEFKTYQQQV

SEQ ID NO: 22032 - protein, 9 aa, Artificial sequence
  Protein classification predicting sequence
EQLAIDRAK

SEQ ID NO: 22033 - protein, 8 aa, Artificial sequence
  Protein classification predicting sequence
VNFSGKTY

SEQ ID NO: 22034 - protein, 7 aa, Artificial sequence
  Protein classification predicting sequence
YNAVQYG

SEQ ID NO: 22035 - protein, 10 aa, Artificial sequence
  Protein classification predicting sequence
MIVAGFSAYS

SEQ ID NO: 22036 - protein, 8 aa, Artificial sequence
  Protein classification predicting sequence
NEEIEKKL

SEQ ID NO: 22037 - protein, 6 aa, Artificial sequence
  Protein classification predicting sequence
SAVFPG

SEQ ID NO: 22038 - protein, 14 aa, Artificial sequence
  Protein classification predicting sequence
LGMSLAHGGHLTHG

SEQ ID NO: 22039 - protein, 11 aa, Artificial sequence
  Protein classification predicting sequence
EVERLALEHKP

SEQ ID NO: 22040 - protein, 14 aa, Artificial sequence
  Protein classification predicting sequence
GAYLFVDMAHVAGL

SEQ ID NO: 22041 - protein, 9 aa, Artificial sequence
  Protein classification predicting sequence
AAGVYPNPV

SEQ ID NO: 22042 - protein, 7 aa, Artificial sequence
  Protein classification predicting sequence
MNIADYD

SEQ ID NO: 22043 - protein, 14 aa, Artificial sequence
  Protein classification predicting sequence
RQEEHIELIASENY

SEQ ID NO: 22044 - protein, 10 aa, Artificial sequence
  Protein classification predicting sequence
HIELIASENY

SEQ ID NO: 22045 - protein, 11 aa, Artificial sequence
  Protein classification predicting sequence
SPRVMQAQGSQ

SEQ ID NO: 22046 - protein, 8 aa, Artificial sequence
  Protein classification predicting sequence
RAKELFGA

SEQ ID NO: 22047 - protein, 7 aa, Artificial sequence
  Protein classification predicting sequence
KMREIAD

SEQ ID NO: 22048 - protein, 7 aa, Artificial sequence
  Protein classification predicting sequence
GLTGKAA

SEQ ID NO: 22049 - protein, 7 aa, Artificial sequence
  Protein classification predicting sequence
AHVLGLI

SEQ ID NO: 22050 - protein, 8 aa, Artificial sequence
  Protein classification predicting sequence
NKNLLPWD

SEQ ID NO: 22051 - protein, 7 aa, Artificial sequence
  Protein classification predicting sequence
PSGIRIG

SEQ ID NO: 22052 - protein, 7 aa, Artificial sequence
  Protein classification predicting sequence
PGDKIMG

SEQ ID NO: 22053 - protein, 7 aa, Artificial sequence
  Protein classification predicting sequence
AHIAGLV

SEQ ID NO: 22054 - protein, 6 aa, Artificial sequence
  Protein classification predicting sequence
GLHPNP

SEQ ID NO: 22055 - protein, 7 aa, Artificial sequence
  Protein classification predicting sequence
PAMTTRG

SEQ ID NO: 22056 - protein, 13 aa, Artificial sequence
  Protein classification predicting sequence
LAHGGHLTHGAKV

SEQ ID NO: 22057 - protein, 10 aa, Artificial sequence
  Protein classification predicting sequence
DWAKMREIAD

SEQ ID NO: 22058 - protein, 9 aa, Artificial sequence
  Protein classification predicting sequence
REIADEVGA

SEQ ID NO: 22059 - protein, 10 aa, Artificial sequence
  Protein classification predicting sequence
TTHKTLRGPR

SEQ ID NO: 22060 - protein, 6 aa, Artificial sequence
  Protein classification predicting sequence
GCKYVD

SEQ ID NO: 22061 - protein, 8 aa, Artificial sequence
  Protein classification predicting sequence
SGVVANLA

SEQ ID NO: 22062 - protein, 11 aa, Artificial sequence
  Protein classification predicting sequence
LTNKYAEGYPG

SEQ ID NO: 22063 - protein, 12 aa, Artificial sequence
  Protein classification predicting sequence
ANVQPHSGAQAN

SEQ ID NO: 22064 - protein, 7 aa, Artificial sequence
  Protein classification predicting sequence
LAHGGHL

SEQ ID NO: 22065 - protein, 7 aa, Artificial sequence
  Protein classification predicting sequence
LRGPRGG

SEQ ID NO: 22066 - protein, 9 aa, Artificial sequence
  Protein classification predicting sequence
LRGPRGGVI

SEQ ID NO: 22067 - protein, 6 aa, Artificial sequence
  Protein classification predicting sequence
GTPAIT

SEQ ID NO: 22068 - protein, 6 aa, Artificial sequence
  Protein classification predicting sequence
AVMEAQ

SEQ ID NO: 22069 - protein, 7 aa, Artificial sequence
  Protein classification predicting sequence
RYYGGCE

SEQ ID NO: 22070 - protein, 9 aa, Artificial sequence
  Protein classification predicting sequence
YNFVEYGVD

SEQ ID NO: 22071 - protein, 16 aa, Artificial sequence
  Protein classification predicting sequence
TTTTHKTLRGPRGGMI

SEQ ID NO: 22072 - protein, 28 aa, Artificial sequence
  Protein classification predicting sequence
KSIFPGIQGGPLMHVIAAKAVAFGEALQ

SEQ ID NO: 22073 - protein, 9 aa, Artificial sequence
  Protein classification predicting sequence
VSGGTDNHL

SEQ ID NO: 22074 - protein, 11 aa, Artificial sequence
  Protein classification predicting sequence
IELIASENFVS

SEQ ID NO: 22075 - protein, 6 aa, Artificial sequence
  Protein classification predicting sequence
ARDRAK

SEQ ID NO: 22076 - protein, 7 aa, Artificial sequence
  Protein classification predicting sequence
VYFTILE

SEQ ID NO: 22077 - protein, 6 aa, Artificial sequence
  Protein classification predicting sequence
FVEYGV

SEQ ID NO: 22078 - protein, 11 aa, Artificial sequence
  Protein classification predicting sequence
PKLIVAGASAY

SEQ ID NO: 22079 - protein, 7 aa, Artificial sequence
  Protein classification predicting sequence
KFREIAD

SEQ ID NO: 22080 - protein, 11 aa, Artificial sequence
  Protein classification predicting sequence
KFREIADEVGA

SEQ ID NO: 22081 - protein, 20 aa, Artificial sequence
  Protein classification predicting sequence
FVTTTTHKTLRGPRGGMILC

SEQ ID NO: 22082 - protein, 53 aa, Artificial sequence
  Protein classification predicting sequence
KIELIASENFVSEAVMEAQGSVLTNKYAEGYPGKRYYGGCEHVDVVEDIARDR

SEQ ID NO: 22083 - protein, 66 aa, Artificial sequence
  Protein classification predicting sequence
KEIFGAEHVNVQPHSGAQANMAVYFTILEQGDTVLGMNLSHGGHLTHGSPVNFSGVQYNFVEYGVD

SEQ ID NO: 22084 - protein, 6 aa, Artificial sequence
  Protein classification predicting sequence
MVDMAH

SEQ ID NO: 22085 - protein, 18 aa, Artificial sequence
  Protein classification predicting sequence
FPGIQGGPLMHVIAAKAV

SEQ ID NO: 22086 - protein, 14 aa, Artificial sequence
  Protein classification predicting sequence
QGGPLMHVIAAKAV

SEQ ID NO: 22087 - protein, 8 aa, Artificial sequence
  Protein classification predicting sequence
HVIAAKAV

SEQ ID NO: 22088 - protein, 11 aa, Artificial sequence
  Protein classification predicting sequence
LQDDFKTYAQN

SEQ ID NO: 22089 - protein, 10 aa, Artificial sequence
  Protein classification predicting sequence
LVSGGTDNHL

SEQ ID NO: 22090 - protein, 20 aa, Artificial sequence
  Protein classification predicting sequence
PGDTFMGLDLNSGGHLTHGS

SEQ ID NO: 22091 - protein, 7 aa, Artificial sequence
  Protein classification predicting sequence
HIAGLVA

SEQ ID NO: 22092 - protein, 13 aa, Artificial sequence
  Protein classification predicting sequence
GSILTNKYAEGYP

SEQ ID NO: 22093 - protein, 8 aa, Artificial sequence
  Protein classification predicting sequence
GGHLTHGS

SEQ ID NO: 22094 - protein, 8 aa, Artificial sequence
  Protein classification predicting sequence
NKNAIPFD

SEQ ID NO: 22095 - protein, 13 aa, Artificial sequence
  Protein classification predicting sequence
GMDLSHGGHLTHG

SEQ ID NO: 22096 - protein, 7 aa, Artificial sequence
  Protein classification predicting sequence
PKLIIAG

SEQ ID NO: 22097 - protein, 9 aa, Artificial sequence
  Protein classification predicting sequence
GTPALTTRG

SEQ ID NO: 22098 - protein, 6 aa, Artificial sequence
  Protein classification predicting sequence
ITGKDA

SEQ ID NO: 22099 - protein, 6 aa, Artificial sequence
  Protein classification predicting sequence
AHIAGL

SEQ ID NO: 22100 - protein, 7 aa, Artificial sequence
  Protein classification predicting sequence
HVIAGKA

SEQ ID NO: 22101 - protein, 7 aa, Artificial sequence
  Protein classification predicting sequence
NKNAIPF

SEQ ID NO: 22102 - protein, 6 aa, Artificial sequence
  Protein classification predicting sequence
FANVQP

SEQ ID NO: 22103 - protein, 11 aa, Artificial sequence
  Protein classification predicting sequence
VDMAHFAGLVA

SEQ ID NO: 22104 - protein, 6 aa, Artificial sequence
  Protein classification predicting sequence
SQANAA

SEQ ID NO: 22105 - protein, 6 aa, Artificial sequence
  Protein classification predicting sequence
VNFSGK

SEQ ID NO: 22106 - protein, 15 aa, Artificial sequence
  Protein classification predicting sequence
ADYANVQPHSGSQAN

SEQ ID NO: 22107 - protein, 23 aa, Artificial sequence
  Protein classification predicting sequence
ADYANVQPHSGSQANFAVYTALL

SEQ ID NO: 22108 - protein, 6 aa, Artificial sequence
  Protein classification predicting sequence
AHVAGL

SEQ ID NO: 22109 - protein, 8 aa, Artificial sequence
  Protein classification predicting sequence
AFKEALEP

SEQ ID NO: 22110 - protein, 7 aa, Artificial sequence
  Protein classification predicting sequence
SPFITSG

SEQ ID NO: 22111 - protein, 10 aa, Artificial sequence
  Protein classification predicting sequence
ANVQPNSGSQ

SEQ ID NO: 22112 - protein, 15 aa, Artificial sequence
  Protein classification predicting sequence
ANVQPNSGSQANQGV

SEQ ID NO: 22113 - protein, 6 aa, Artificial sequence
  Protein classification predicting sequence
KPKLIV

SEQ ID NO: 22114 - protein, 6 aa, Artificial sequence
  Protein classification predicting sequence
PHAHVV

SEQ ID NO: 22115 - protein, 10 aa, Artificial sequence
  Protein classification predicting sequence
LTNKYAEGYP

SEQ ID NO: 22116 - protein, 8 aa, Artificial sequence
  Protein classification predicting sequence
RAKALFGA

SEQ ID NO: 22117 - protein, 11 aa, Artificial sequence
  Protein classification predicting sequence
REIADSIGAYL

SEQ ID NO: 22118 - protein, 6 aa, Artificial sequence
  Protein classification predicting sequence
VQPHSG

SEQ ID NO: 22119 - protein, 10 aa, Artificial sequence
  Protein classification predicting sequence
LNSGGHLTHG

SEQ ID NO: 22120 - protein, 7 aa, Artificial sequence
  Protein classification predicting sequence
LARDRAK

SEQ ID NO: 22121 - protein, 7 aa, Artificial sequence
  Protein classification predicting sequence
RAKKLFG

SEQ ID NO: 22122 - protein, 7 aa, Artificial sequence
  Protein classification predicting sequence
YGVDKET

SEQ ID NO: 22123 - protein, 9 aa, Artificial sequence
  Protein classification predicting sequence
KAVAFGEAL

SEQ ID NO: 22124 - protein, 11 aa, Artificial sequence
  Protein classification predicting sequence
ITVNKNMVPFD

SEQ ID NO: 22125 - protein, 11 aa, Artificial sequence
  Protein classification predicting sequence
VDVVEQLAIDR

SEQ ID NO: 22126 - protein, 10 aa, Artificial sequence
  Protein classification predicting sequence
HVIAAKAVAF

SEQ ID NO: 22127 - protein, 14 aa, Artificial sequence
  Protein classification predicting sequence
HVIAAKAVAFKEAL

SEQ ID NO: 22128 - protein, 7 aa, Artificial sequence
  Protein classification predicting sequence
TTRGFKE

SEQ ID NO: 22129 - protein, 7 aa, Artificial sequence
  Protein classification predicting sequence
VMEAMGS

SEQ ID NO: 22130 - protein, 7 aa, Artificial sequence
  Protein classification predicting sequence
GASAYSR

SEQ ID NO: 22131 - protein, 15 aa, Artificial sequence
  Protein classification predicting sequence
VTTTTHKTLRGPRGG

SEQ ID NO: 22132 - protein, 12 aa, Artificial sequence
  Protein classification predicting sequence
TTHKTLRGPRGG

SEQ ID NO: 22133 - protein, 13 aa, Artificial sequence
  Protein classification predicting sequence
GFRIVSGGTDNHL

SEQ ID NO: 22134 - protein, 10 aa, Artificial sequence
  Protein classification predicting sequence
IVSGGTDNHL

SEQ ID NO: 22135 - protein, 7 aa, Artificial sequence
  Protein classification predicting sequence
ITANKNT

SEQ ID NO: 22136 - protein, 6 aa, Artificial sequence
  Protein classification predicting sequence
VSKAVM

SEQ ID NO: 22137 - protein, 15 aa, Artificial sequence
  Protein classification predicting sequence
TTHKTLRGPRGGLIL

SEQ ID NO: 22138 - protein, 6 aa, Artificial sequence
  Protein classification predicting sequence
NKNTVP

SEQ ID NO: 22139 - protein, 6 aa, Artificial sequence
  Protein classification predicting sequence
RIGTPA

SEQ ID NO: 22140 - protein, 14 aa, Artificial sequence
  Protein classification predicting sequence
ADVVSTTVHKTLGG

SEQ ID NO: 22141 - protein, 12 aa, Artificial sequence
  Protein classification predicting sequence
TVHKTLGGPRSG

SEQ ID NO: 22142 - protein, 9 aa, Artificial sequence
  Protein classification predicting sequence
GGTDVHLVL

SEQ ID NO: 22143 - protein, 7 aa, Artificial sequence
  Protein classification predicting sequence
DRAKALF

SEQ ID NO: 22144 - protein, 8 aa, Artificial sequence
  Protein classification predicting sequence
FTEVADII

SEQ ID NO: 22145 - protein, 10 aa, Artificial sequence
  Protein classification predicting sequence
ELIASENYVS

SEQ ID NO: 22146 - protein, 6 aa, Artificial sequence
  Protein classification predicting sequence
FSGKFY

SEQ ID NO: 22147 - protein, 12 aa, Artificial sequence
  Protein classification predicting sequence
TTTTHKTLRGPR

SEQ ID NO: 22148 - protein, 7 aa, Artificial sequence
  Protein classification predicting sequence
QGGPLMH

SEQ ID NO: 22149 - protein, 8 aa, Artificial sequence
  Protein classification predicting sequence
VEQLAIDR

SEQ ID NO: 22150 - protein, 10 aa, Artificial sequence
  Protein classification predicting sequence
LSHGGHLTHG

SEQ ID NO: 22151 - protein, 10 aa, Artificial sequence
  Protein classification predicting sequence
FREIADEVGA

SEQ ID NO: 22152 - protein, 6 aa, Artificial sequence
  Protein classification predicting sequence
LIASEN

SEQ ID NO: 22153 - protein, 9 aa, Artificial sequence
  Protein classification predicting sequence
EGYPGKRYY

SEQ ID NO: 22154 - protein, 10 aa, Artificial sequence
  Protein classification predicting sequence
FGAEHVNVQP

SEQ ID NO: 22155 - protein, 11 aa, Artificial sequence
  Protein classification predicting sequence
YADVVTTTTHK

SEQ ID NO: 22156 - protein, 17 aa, Artificial sequence
  Protein classification predicting sequence
VTTTTHKSLRGPRGAMI

SEQ ID NO: 22157 - protein, 6 aa, Artificial sequence
  Protein classification predicting sequence
LRGPRG

SEQ ID NO: 22158 - protein, 7 aa, Artificial sequence
  Protein classification predicting sequence
AVALKEA

SEQ ID NO: 22159 - protein, 7 aa, Artificial sequence
  Protein classification predicting sequence
AQGSVLT

SEQ ID NO: 22160 - protein, 17 aa, Artificial sequence
  Protein classification predicting sequence
FGCEYANVQPHSGSQAN

SEQ ID NO: 22161 - protein, 13 aa, Artificial sequence
  Protein classification predicting sequence
YANVQPHSGSQAN

SEQ ID NO: 22162 - protein, 5 aa, Artificial sequence
  Protein classification predicting sequence
YQQQV

SEQ ID NO: 22163 - protein, 13 aa, Artificial sequence
  Protein classification predicting sequence
PKLIVAGASAYSR

SEQ ID NO: 22164 - protein, 18 aa, Artificial sequence
  Protein classification predicting sequence
PKLIVAGASAYSRTIDFK

SEQ ID NO: 22165 - protein, 8 aa, Artificial sequence
  Protein classification predicting sequence
FREIADEV

SEQ ID NO: 22166 - protein, 7 aa, Artificial sequence
  Protein classification predicting sequence
LMADIAH

SEQ ID NO: 22167 - protein, 6 aa, Artificial sequence
  Protein classification predicting sequence
KNAKAM

SEQ ID NO: 22168 - protein, 13 aa, Artificial sequence
  Protein classification predicting sequence
FGAEHVNVQPHSG

SEQ ID NO: 22169 - protein, 19 aa, Artificial sequence
  Protein classification predicting sequence
VGAYLMVDMAHIAGLVAAG

SEQ ID NO: 22170 - protein, 9 aa, Artificial sequence
  Protein classification predicting sequence
GEALQDDFK

SEQ ID NO: 22171 - protein, 7 aa, Artificial sequence
  Protein classification predicting sequence
SGGTDNH

SEQ ID NO: 22172 - protein, 6 aa, Artificial sequence
  Protein classification predicting sequence
LVDLRP

SEQ ID NO: 22173 - protein, 18 aa, Artificial sequence
  Protein classification predicting sequence
AEKVLDEVGITVNKNTIP

SEQ ID NO: 22174 - protein, 15 aa, Artificial sequence
  Protein classification predicting sequence
VLDEVGITVNKNTIP

SEQ ID NO: 22175 - protein, 12 aa, Artificial sequence
  Protein classification predicting sequence
RGFGLEEMDEIA

SEQ ID NO: 22176 - protein, 10 aa, Artificial sequence
  Protein classification predicting sequence
ELIASENFVS

SEQ ID NO: 22177 - protein, 9 aa, Artificial sequence
  Protein classification predicting sequence
HANVQPHSG

SEQ ID NO: 22178 - protein, 6 aa, Artificial sequence
  Protein classification predicting sequence
DFAAFR

SEQ ID NO: 22179 - protein, 7 aa, Artificial sequence
  Protein classification predicting sequence
GTPAATT

SEQ ID NO: 22180 - protein, 8 aa, Artificial sequence
  Protein classification predicting sequence
ANVQPHSG

SEQ ID NO: 22181 - protein, 11 aa, Artificial sequence
  Protein classification predicting sequence
SPRVMEAQGSQ

SEQ ID NO: 22182 - protein, 8 aa, Artificial sequence
  Protein classification predicting sequence
VMEAQGSQ

SEQ ID NO: 22183 - protein, 7 aa, Artificial sequence
  Protein classification predicting sequence
GDTILGM

SEQ ID NO: 22184 - protein, 6 aa, Artificial sequence
  Protein classification predicting sequence
NHLFLV

SEQ ID NO: 22185 - protein, 8 aa, Artificial sequence
  Protein classification predicting sequence
ICKRLPVY

SEQ ID NO: 22186 - protein, 12 aa, Artificial sequence
  Protein classification predicting sequence
NVQPHSGSQANM

SEQ ID NO: 22187 - protein, 6 aa, Artificial sequence
  Protein classification predicting sequence
PFPHCH

SEQ ID NO: 22188 - protein, 13 aa, Artificial sequence
  Protein classification predicting sequence
GSVLTNKYAEGYP

SEQ ID NO: 22189 - protein, 12 aa, Artificial sequence
  Protein classification predicting sequence
LRGPRGGMILTN

SEQ ID NO: 22190 - protein, 7 aa, Artificial sequence
  Protein classification predicting sequence
AKKINSA

SEQ ID NO: 22191 - protein, 7 aa, Artificial sequence
  Protein classification predicting sequence
LVDLRPK

SEQ ID NO: 22192 - protein, 8 aa, Artificial sequence
  Protein classification predicting sequence
ALGRANIT

SEQ ID NO: 22193 - protein, 12 aa, Artificial sequence
  Protein classification predicting sequence
DWAKFREIADKV

SEQ ID NO: 22194 - protein, 9 aa, Artificial sequence
  Protein classification predicting sequence
VDMAHVAGL

SEQ ID NO: 22195 - protein, 7 aa, Artificial sequence
  Protein classification predicting sequence
GPRGGLI

SEQ ID NO: 22196 - protein, 8 aa, Artificial sequence
  Protein classification predicting sequence
RGFKEAEA

SEQ ID NO: 22197 - protein, 8 aa, Artificial sequence
  Protein classification predicting sequence
IELIASEN

SEQ ID NO: 22198 - protein, 8 aa, Artificial sequence
  Protein classification predicting sequence
AHIAGLVA

SEQ ID NO: 22199 - protein, 8 aa, Artificial sequence
  Protein classification predicting sequence
RIGTPAIT

SEQ ID NO: 22200 - protein, 11 aa, Artificial sequence
  Protein classification predicting sequence
IELIASENIVS

SEQ ID NO: 22201 - protein, 15 aa, Artificial sequence
  Protein classification predicting sequence
HSGSQANAAAYMALI

SEQ ID NO: 22202 - protein, 12 aa, Artificial sequence
  Protein classification predicting sequence
AKLMVDMAHIAG

SEQ ID NO: 22203 - protein, 10 aa, Artificial sequence
  Protein classification predicting sequence
LMVDMAHIAG

SEQ ID NO: 22204 - protein, 8 aa, Artificial sequence
  Protein classification predicting sequence
LSPFKTSG

SEQ ID NO: 22205 - protein, 8 aa, Artificial sequence
  Protein classification predicting sequence
PVPYADVV

SEQ ID NO: 22206 - protein, 6 aa, Artificial sequence
  Protein classification predicting sequence
LQPEFK

SEQ ID NO: 22207 - protein, 8 aa, Artificial sequence
  Protein classification predicting sequence
TGKEADAA

SEQ ID NO: 22208 - protein, 12 aa, Artificial sequence
  Protein classification predicting sequence
ITVNKNSVPNDP

SEQ ID NO: 22209 - protein, 23 aa, Artificial sequence
  Protein classification predicting sequence
DPRPPMVTSGLRIGTPALATRGF

SEQ ID NO: 22210 - protein, 8 aa, Artificial sequence
  Protein classification predicting sequence
HGGHLTHG

SEQ ID NO: 22211 - protein, 12 aa, Artificial sequence
  Protein classification predicting sequence
HGGHLTHGSPVN

SEQ ID NO: 22212 - protein, 9 aa, Artificial sequence
  Protein classification predicting sequence
GDTVLGMNL

SEQ ID NO: 22213 - protein, 18 aa, Artificial sequence
  Protein classification predicting sequence
GDTVLGMNLSHGGHLTHG

SEQ ID NO: 22214 - protein, 8 aa, Artificial sequence
  Protein classification predicting sequence
YNFVEYGV

SEQ ID NO: 22215 - protein, 6 aa, Artificial sequence
  Protein classification predicting sequence
HKPKMI

SEQ ID NO: 22216 - protein, 6 aa, Artificial sequence
  Protein classification predicting sequence
QGGPLE

SEQ ID NO: 22217 - protein, 8 aa, Artificial sequence
  Protein classification predicting sequence
IPFDTEKP

SEQ ID NO: 22218 - protein, 15 aa, Artificial sequence
  Protein classification predicting sequence
EAQGSIMTNKYAEGY

SEQ ID NO: 22219 - protein, 6 aa, Artificial sequence
  Protein classification predicting sequence
ANMAVY

SEQ ID NO: 22220 - protein, 7 aa, Artificial sequence
  Protein classification predicting sequence
LSHGGHL

SEQ ID NO: 22221 - protein, 12 aa, Artificial sequence
  Protein classification predicting sequence
FSGKLYNIVPYG

SEQ ID NO: 22222 - protein, 12 aa, Artificial sequence
  Protein classification predicting sequence
GASAYPRVIDFK

SEQ ID NO: 22223 - protein, 7 aa, Artificial sequence
  Protein classification predicting sequence
VDWQRFR

SEQ ID NO: 22224 - protein, 7 aa, Artificial sequence
  Protein classification predicting sequence
RFRAIAD

SEQ ID NO: 22225 - protein, 7 aa, Artificial sequence
  Protein classification predicting sequence
SPFVTSG

SEQ ID NO: 22226 - protein, 9 aa, Artificial sequence
  Protein classification predicting sequence
SPFVTSGIR

SEQ ID NO: 22227 - protein, 14 aa, Artificial sequence
  Protein classification predicting sequence
SPFVTSGIRVGTPA

SEQ ID NO: 22228 - protein, 7 aa, Artificial sequence
  Protein classification predicting sequence
LAGWMCD

SEQ ID NO: 22229 - protein, 6 aa, Artificial sequence
  Protein classification predicting sequence
RYYGGC

SEQ ID NO: 22230 - protein, 9 aa, Artificial sequence
  Protein classification predicting sequence
YAEGLPGKR

SEQ ID NO: 22231 - protein, 8 aa, Artificial sequence
  Protein classification predicting sequence
AEHANVQP

SEQ ID NO: 22232 - protein, 9 aa, Artificial sequence
  Protein classification predicting sequence
FQDPLREGA

SEQ ID NO: 22233 - protein, 11 aa, Artificial sequence
  Protein classification predicting sequence
IILNKNLLPWD

SEQ ID NO: 22234 - protein, 11 aa, Artificial sequence
  Protein classification predicting sequence
LFGAEHANVQP

SEQ ID NO: 22235 - protein, 7 aa, Artificial sequence
  Protein classification predicting sequence
GASAYPR

SEQ ID NO: 22236 - protein, 12 aa, Artificial sequence
  Protein classification predicting sequence
FREIADEVGAYL

SEQ ID NO: 22237 - protein, 9 aa, Artificial sequence
  Protein classification predicting sequence
GGPLMHVIA

SEQ ID NO: 22238 - protein, 8 aa, Artificial sequence
  Protein classification predicting sequence
AAGLHQNP

SEQ ID NO: 22239 - protein, 7 aa, Artificial sequence
  Protein classification predicting sequence
NTIPFET

SEQ ID NO: 22240 - protein, 6 aa, Artificial sequence
  Protein classification predicting sequence
TTRGFK

SEQ ID NO: 22241 - protein, 6 aa, Artificial sequence
  Protein classification predicting sequence
NKNTIP

SEQ ID NO: 22242 - protein, 9 aa, Artificial sequence
  Protein classification predicting sequence
FANVQPHSG

SEQ ID NO: 22243 - protein, 8 aa, Artificial sequence
  Protein classification predicting sequence
GLHPSPVP

SEQ ID NO: 22244 - protein, 6 aa, Artificial sequence
  Protein classification predicting sequence
GCEFVD

SEQ ID NO: 22245 - protein, 6 aa, Artificial sequence
  Protein classification predicting sequence
LEHKPK

SEQ ID NO: 22246 - protein, 6 aa, Artificial sequence
  Protein classification predicting sequence
IDFKKF

SEQ ID NO: 22247 - protein, 6 aa, Artificial sequence
  Protein classification predicting sequence
RGGLIL

SEQ ID NO: 22248 - protein, 10 aa, Artificial sequence
  Protein classification predicting sequence
RYYGGCEYVD

SEQ ID NO: 22249 - protein, 20 aa, Artificial sequence
  Protein classification predicting sequence
PGERLLGLDLANGGHLTHGM

SEQ ID NO: 22250 - protein, 8 aa, Artificial sequence
  Protein classification predicting sequence
GGHLTHGM

SEQ ID NO: 22251 - protein, 10 aa, Artificial sequence
  Protein classification predicting sequence
GITVNRNAVP

SEQ ID NO: 22252 - protein, 12 aa, Artificial sequence
  Protein classification predicting sequence
DPRPPMVTSGLR

SEQ ID NO: 22253 - protein, 10 aa, Artificial sequence
  Protein classification predicting sequence
GTPALATRGF

SEQ ID NO: 22254 - protein, 7 aa, Artificial sequence
  Protein classification predicting sequence
GGHLSHG

SEQ ID NO: 22255 - protein, 6 aa, Artificial sequence
  Protein classification predicting sequence
AHISGL

SEQ ID NO: 22256 - protein, 6 aa, Artificial sequence
  Protein classification predicting sequence
EVGAYL

SEQ ID NO: 22257 - protein, 8 aa, Artificial sequence
  Protein classification predicting sequence
GSILTNKY

SEQ ID NO: 22258 - protein, 6 aa, Artificial sequence
  Protein classification predicting sequence
GDTILG

SEQ ID NO: 22259 - protein, 6 aa, Artificial sequence
  Protein classification predicting sequence
YPNPVP

SEQ ID NO: 22260 - protein, 79 aa, Artificial sequence
  Protein classification predicting sequence
MAEELVKRGLRIVSGRTESHVFLVDLQPMKITGKAAEAALGKAHITVNKNAIPNDPEKPFVTSGIRIGSAAMTTRGFNE

SEQ ID NO: 22261 - protein, 118 aa, Artificial sequence
  Protein classification predicting sequence
YANVQPHSGSQANQAVYASVLKPGDTILGMSLAHGGHLTHGASVNISGKLYNAVTYGLDENEVLDYAEVERLALEHKPKMIVAGASAYALQIDWAKFREIADKVGAYLFVDMAHYAGL

SEQ ID NO: 22262 - protein, 9 aa, Artificial sequence
  Protein classification predicting sequence
VDMAHYAGL

SEQ ID NO: 22263 - protein, 11 aa, Artificial sequence
  Protein classification predicting sequence
VDMAHYAGLIA

SEQ ID NO: 22264 - protein, 7 aa, Artificial sequence
  Protein classification predicting sequence
YGLNPET

SEQ ID NO: 22265 - protein, 6 aa, Artificial sequence
  Protein classification predicting sequence
FRQIAD

SEQ ID NO: 22266 - protein, 10 aa, Artificial sequence
  Protein classification predicting sequence
RGLRIVSGRT

SEQ ID NO: 22267 - protein, 18 aa, Artificial sequence
  Protein classification predicting sequence
GGHLTHGMRLNFSGKLYE

SEQ ID NO: 22268 - protein, 9 aa, Artificial sequence
  Protein classification predicting sequence
LNFSGKLYE

SEQ ID NO: 22269 - protein, 15 aa, Artificial sequence
  Protein classification predicting sequence
DPRPPMVTSGLRIGT

SEQ ID NO: 22270 - protein, 6 aa, Artificial sequence
  Protein classification predicting sequence
RIGTAA

SEQ ID NO: 22271 - protein, 7 aa, Artificial sequence
  Protein classification predicting sequence
ALATRGF

SEQ ID NO: 22272 - protein, 6 aa, Artificial sequence
  Protein classification predicting sequence
NPVPHA

SEQ ID NO: 22273 - protein, 10 aa, Artificial sequence
  Protein classification predicting sequence
NPVPHADFVT

SEQ ID NO: 22274 - protein, 10 aa, Artificial sequence
  Protein classification predicting sequence
ADFVTTTTHK

SEQ ID NO: 22275 - protein, 9 aa, Artificial sequence
  Protein classification predicting sequence
LIASENFVS

SEQ ID NO: 22276 - protein, 10 aa, Artificial sequence
  Protein classification predicting sequence
EKPFVTSGIR

SEQ ID NO: 22277 - protein, 18 aa, Artificial sequence
  Protein classification predicting sequence
DTILGMSLAHGGHLTHGA

SEQ ID NO: 22278 - protein, 7 aa, Artificial sequence
  Protein classification predicting sequence
QGGPLVH

SEQ ID NO: 22279 - protein, 8 aa, Artificial sequence
  Protein classification predicting sequence
PNPVPHAH

SEQ ID NO: 22280 - protein, 6 aa, Artificial sequence
  Protein classification predicting sequence
PVPHAH

SEQ ID NO: 22281 - protein, 16 aa, Artificial sequence
  Protein classification predicting sequence
GLIAGGEFQDPLREGA

SEQ ID NO: 22282 - protein, 10 aa, Artificial sequence
  Protein classification predicting sequence
QVISNAKALA

SEQ ID NO: 22283 - protein, 7 aa, Artificial sequence
  Protein classification predicting sequence
AVMQAQG

SEQ ID NO: 22284 - protein, 9 aa, Artificial sequence
  Protein classification predicting sequence
HVIAAKAVA

SEQ ID NO: 22285 - protein, 10 aa, Artificial sequence
  Protein classification predicting sequence
FNIDVDKAEK

SEQ ID NO: 22286 - protein, 24 aa, Artificial sequence
  Protein classification predicting sequence
QIVKNAKALAEALAEEGFKVIGED

SEQ ID NO: 22287 - protein, 14 aa, Artificial sequence
  Protein classification predicting sequence
SHQVIVDVSDLHPA

SEQ ID NO: 22288 - protein, 10 aa, Artificial sequence
  Protein classification predicting sequence
EYQKVYYSFD

SEQ ID NO: 22289 - protein, 6 aa, Artificial sequence
  Protein classification predicting sequence
GDTVLG

SEQ ID NO: 22290 - protein, 7 aa, Artificial sequence
  Protein classification predicting sequence
LMVDMAH

SEQ ID NO: 22291 - protein, 6 aa, Artificial sequence
  Protein classification predicting sequence
DKVGAY

SEQ ID NO: 22292 - protein, 8 aa, Artificial sequence
  Protein classification predicting sequence
PGDTVLGM

SEQ ID NO: 22293 - protein, 14 aa, Artificial sequence
  Protein classification predicting sequence
GGHLTHGSPVNFSG

SEQ ID NO: 22294 - protein, 25 aa, Artificial sequence
  Protein classification predicting sequence
GGHLTHGSPVNFSGKLYNIVPYGID

SEQ ID NO: 22295 - protein, 18 aa, Artificial sequence
  Protein classification predicting sequence
VTTTTHKTLAGPRGGLIL

SEQ ID NO: 22296 - protein, 22 aa, Artificial sequence
  Protein classification predicting sequence
VTTTTHKTLAGPRGGLILAKGG

SEQ ID NO: 22297 - protein, 11 aa, Artificial sequence
  Protein classification predicting sequence
ELAGWMCDVLD

SEQ ID NO: 22298 - protein, 6 aa, Artificial sequence
  Protein classification predicting sequence
EHKPKM

SEQ ID NO: 22299 - protein, 15 aa, Artificial sequence
  Protein classification predicting sequence
IGAYLFVDMAHVAGL

SEQ ID NO: 22300 - protein, 27 aa, Artificial sequence
  Protein classification predicting sequence
YKKLNSAVFPGGQGGPLMHVIAGKAVA

SEQ ID NO: 22301 - protein, 10 aa, Artificial sequence
  Protein classification predicting sequence
GTPAITRRGF

SEQ ID NO: 22302 - protein, 7 aa, Artificial sequence
  Protein classification predicting sequence
CARFPVY

SEQ ID NO: 22303 - protein, 6 aa, Artificial sequence
  Protein classification predicting sequence
PVNFSG

SEQ ID NO: 22304 - protein, 6 aa, Artificial sequence
  Protein classification predicting sequence
EIADEV

SEQ ID NO: 22305 - protein, 19 aa, Artificial sequence
  Protein classification predicting sequence
EFQRQNSNIELIASENFVS

SEQ ID NO: 22306 - protein, 11 aa, Artificial sequence
  Protein classification predicting sequence
LSHGGHLTHGA

SEQ ID NO: 22307 - protein, 7 aa, Artificial sequence
  Protein classification predicting sequence
INYDEVR

SEQ ID NO: 22308 - protein, 20 aa, Artificial sequence
  Protein classification predicting sequence
QGGPLEHVIAAKAVAFGEAL

SEQ ID NO: 22309 - protein, 18 aa, Artificial sequence
  Protein classification predicting sequence
VSGGTDNHLVAVDVKGSI

SEQ ID NO: 22310 - protein, 13 aa, Artificial sequence
  Protein classification predicting sequence
VGITCNKNTIPFD

SEQ ID NO: 22311 - protein, 8 aa, Artificial sequence
  Protein classification predicting sequence
NKNTIPFD

SEQ ID NO: 22312 - protein, 10 aa, Artificial sequence
  Protein classification predicting sequence
EVAKIISLAL

SEQ ID NO: 22313 - protein, 51 aa, Artificial sequence
  Protein classification predicting sequence
RAKALFGAEHVNVQPHSGSQANMAVYLVALEMGDTVLGMNLSHGGHLTHGA

SEQ ID NO: 22314 - protein, 83 aa, Artificial sequence
  Protein classification predicting sequence
AKLMVDMAHIAGLVAAGLHPNPVEYADFVTTTTHKTLRGPRGGMILCKEEYKKDIDKTIFPGIQGGPLEHVIAAKAVAFGEAL

SEQ ID NO: 22315 - protein, 9 aa, Artificial sequence
  Protein classification predicting sequence
FSGKTYHFV

SEQ ID NO: 22316 - protein, 7 aa, Artificial sequence
  Protein classification predicting sequence
PKLIVAG

SEQ ID NO: 22317 - protein, 8 aa, Artificial sequence
  Protein classification predicting sequence
AGWSAYPR

SEQ ID NO: 22318 - protein, 10 aa, Artificial sequence
  Protein classification predicting sequence
AGLVAAGLHP

SEQ ID NO: 22319 - protein, 20 aa, Artificial sequence
  Protein classification predicting sequence
RQQNNIELIASENVVSKAVM

SEQ ID NO: 22320 - protein, 12 aa, Artificial sequence
  Protein classification predicting sequence
ANVQPHSGSQAN

SEQ ID NO: 22321 - protein, 10 aa, Artificial sequence
  Protein classification predicting sequence
GGHLTHGSPV

SEQ ID NO: 22322 - protein, 7 aa, Artificial sequence
  Protein classification predicting sequence
TSGIRIG

SEQ ID NO: 22323 - protein, 8 aa, Artificial sequence
  Protein classification predicting sequence
LEEVRQEV

SEQ ID NO: 22324 - protein, 7 aa, Artificial sequence
  Protein classification predicting sequence
HSGSQAN

SEQ ID NO: 22325 - protein, 8 aa, Artificial sequence
  Protein classification predicting sequence
LTDAFPLY

SEQ ID NO: 22326 - protein, 8 aa, Artificial sequence
  Protein classification predicting sequence
QGGPLEHV

SEQ ID NO: 22327 - protein, 10 aa, Artificial sequence
  Protein classification predicting sequence
FPHPVKELAP

SEQ ID NO: 22328 - protein, 12 aa, Artificial sequence
  Protein classification predicting sequence
STHKTFPGPQGG

SEQ ID NO: 22329 - protein, 6 aa, Artificial sequence
  Protein classification predicting sequence
NKNLLP

SEQ ID NO: 22330 - protein, 9 aa, Artificial sequence
  Protein classification predicting sequence
KALAEALAE

SEQ ID NO: 22331 - protein, 7 aa, Artificial sequence
  Protein classification predicting sequence
GFKVIGE

SEQ ID NO: 22332 - protein, 13 aa, Artificial sequence
  Protein classification predicting sequence
PSGLRIGVQEMTR

SEQ ID NO: 22333 - protein, 6 aa, Artificial sequence
  Protein classification predicting sequence
LQPGDT

SEQ ID NO: 22334 - protein, 9 aa, Artificial sequence
  Protein classification predicting sequence
YNFVPYGLD

SEQ ID NO: 22335 - protein, 8 aa, Artificial sequence
  Protein classification predicting sequence
VKNAKALA

SEQ ID NO: 22336 - protein, 7 aa, Artificial sequence
  Protein classification predicting sequence
AVMAAQG

SEQ ID NO: 22337 - protein, 9 aa, Artificial sequence
  Protein classification predicting sequence
VLTNKYAEG

SEQ ID NO: 22338 - protein, 8 aa, Artificial sequence
  Protein classification predicting sequence
NLTGKEAD

SEQ ID NO: 22339 - protein, 11 aa, Artificial sequence
  Protein classification predicting sequence
LELIASENFAS

SEQ ID NO: 22340 - protein, 7 aa, Artificial sequence
  Protein classification predicting sequence
PGDTIMG

SEQ ID NO: 22341 - protein, 10 aa, Artificial sequence
  Protein classification predicting sequence
ELIASENFTS

SEQ ID NO: 22342 - protein, 7 aa, Artificial sequence
  Protein classification predicting sequence
LLQPGDT

SEQ ID NO: 22343 - protein, 19 aa, Artificial sequence
  Protein classification predicting sequence
DVVTTTTHKTLRGPRGGLI

SEQ ID NO: 22344 - protein, 10 aa, Artificial sequence
  Protein classification predicting sequence
STHKTFPGPQ

SEQ ID NO: 22345 - protein, 9 aa, Artificial sequence
  Protein classification predicting sequence
LELIASENF

SEQ ID NO: 22346 - protein, 9 aa, Artificial sequence
  Protein classification predicting sequence
FPGIQGGPL

SEQ ID NO: 22347 - protein, 6 aa, Artificial sequence
  Protein classification predicting sequence
FREIAD

SEQ ID NO: 22348 - protein, 16 aa, Artificial sequence
  Protein classification predicting sequence
HIVTSTTHKTLRGPRG

SEQ ID NO: 22349 - protein, 7 aa, Artificial sequence
  Protein classification predicting sequence
AAKAVAF

SEQ ID NO: 22350 - protein, 8 aa, Artificial sequence
  Protein classification predicting sequence
AGLVAAGL

SEQ ID NO: 22351 - protein, 7 aa, Artificial sequence
  Protein classification predicting sequence
DKVGAYL

SEQ ID NO: 22352 - protein, 6 aa, Artificial sequence
  Protein classification predicting sequence
GCEHVD

SEQ ID NO: 22353 - protein, 7 aa, Artificial sequence
  Protein classification predicting sequence
EHKPKLI

SEQ ID NO: 22354 - protein, 10 aa, Artificial sequence
  Protein classification predicting sequence
AGLIAAGEYP

SEQ ID NO: 22355 - protein, 6 aa, Artificial sequence
  Protein classification predicting sequence
PEFKTY

SEQ ID NO: 22356 - protein, 6 aa, Artificial sequence
  Protein classification predicting sequence
NKNSVP

SEQ ID NO: 22357 - protein, 11 aa, Artificial sequence
  Protein classification predicting sequence
LTNDEEIAKKI

SEQ ID NO: 22358 - protein, 6 aa, Artificial sequence
  Protein classification predicting sequence
VNVSGK

SEQ ID NO: 22359 - protein, 15 aa, Artificial sequence
  Protein classification predicting sequence
AEAALGKAHITVNKN

SEQ ID NO: 22360 - protein, 8 aa, Artificial sequence
  Protein classification predicting sequence
AHITVNKN

SEQ ID NO: 22361 - protein, 7 aa, Artificial sequence
  Protein classification predicting sequence
EQLAIDR

SEQ ID NO: 22362 - protein, 7 aa, Artificial sequence
  Protein classification predicting sequence
FKEALEP

SEQ ID NO: 22363 - protein, 13 aa, Artificial sequence
  Protein classification predicting sequence
QGSQLTNKYAEGY

SEQ ID NO: 22364 - protein, 8 aa, Artificial sequence
  Protein classification predicting sequence
GGHLTHGA

SEQ ID NO: 22365 - protein, 7 aa, Artificial sequence
  Protein classification predicting sequence
ITVNKNA

SEQ ID NO: 22366 - protein, 11 aa, Artificial sequence
  Protein classification predicting sequence
NHLFLLDLVDK

SEQ ID NO: 22367 - protein, 8 aa, Artificial sequence
  Protein classification predicting sequence
PAITRRGF

SEQ ID NO: 22368 - protein, 10 aa, Artificial sequence
  Protein classification predicting sequence
SGKWFNAVQY

SEQ ID NO: 22369 - protein, 18 aa, Artificial sequence
  Protein classification predicting sequence
AHITTTTTHKTLRGPRGG

SEQ ID NO: 22370 - protein, 6 aa, Artificial sequence
  Protein classification predicting sequence
VTGGTD

SEQ ID NO: 22371 - protein, 16 aa, Artificial sequence
  Protein classification predicting sequence
NKYSEGYPGARYYGGN

SEQ ID NO: 22372 - protein, 13 aa, Artificial sequence
  Protein classification predicting sequence
LSGSPANLQVYQA

SEQ ID NO: 22373 - protein, 7 aa, Artificial sequence
  Protein classification predicting sequence
LVSDGTD

SEQ ID NO: 22374 - protein, 7 aa, Artificial sequence
  Protein classification predicting sequence
SGSPANF

SEQ ID NO: 22375 - protein, 8 aa, Artificial sequence
  Protein classification predicting sequence
ANFAVYTA

SEQ ID NO: 22376 - protein, 18 aa, Artificial sequence
  Protein classification predicting sequence
GRIMGLDLPDGGHLTHGF

SEQ ID NO: 22377 - protein, 8 aa, Artificial sequence
  Protein classification predicting sequence
INSAVFPG

SEQ ID NO: 22378 - protein, 10 aa, Artificial sequence
  Protein classification predicting sequence
AVFPGLQGGP

SEQ ID NO: 22379 - protein, 9 aa, Artificial sequence
  Protein classification predicting sequence
GTPALTSRG

SEQ ID NO: 22380 - protein, 11 aa, Artificial sequence
  Protein classification predicting sequence
RKISAVSTYFE

SEQ ID NO: 22381 - protein, 8 aa, Artificial sequence
  Protein classification predicting sequence
GSVLTNKY

SEQ ID NO: 22382 - protein, 7 aa, Artificial sequence
  Protein classification predicting sequence
SGIRVGT

SEQ ID NO: 22383 - protein, 32 aa, Artificial sequence
  Protein classification predicting sequence
IIKKESNRQRVGLELIASENFASRAVLEALGS

SEQ ID NO: 22384 - protein, 7 aa, Artificial sequence
  Protein classification predicting sequence
LCQKRAL

SEQ ID NO: 22385 - protein, 34 aa, Artificial sequence
  Protein classification predicting sequence
LESLINSAVFPGLQGGPHNHAIAGVAVALKQAMT

SEQ ID NO: 22386 - protein, 7 aa, Artificial sequence
  Protein classification predicting sequence
TGLIDYD

SEQ ID NO: 22387 - protein, 7 aa, Artificial sequence
  Protein classification predicting sequence
VTTTTHK

SEQ ID NO: 22388 - protein, 20 aa, Artificial sequence
  Protein classification predicting sequence
VTTTTHKSLRGPRGAMIFFR

SEQ ID NO: 22389 - protein, 9 aa, Artificial sequence
  Protein classification predicting sequence
QGGPHNHTI

SEQ ID NO: 22390 - protein, 7 aa, Artificial sequence
  Protein classification predicting sequence
RYYGGTE

SEQ ID NO: 22391 - protein, 9 aa, Artificial sequence
  Protein classification predicting sequence
DMAHISGLV

SEQ ID NO: 22392 - protein, 9 aa, Artificial sequence
  Protein classification predicting sequence
TTTHKTLRG

SEQ ID NO: 22393 - protein, 8 aa, Artificial sequence
  Protein classification predicting sequence
TDQAFVTL

SEQ ID NO: 22394 - protein, 8 aa, Artificial sequence
  Protein classification predicting sequence
TLTKLHCW

SEQ ID NO: 22395 - protein, 18 aa, Artificial sequence
  Protein classification predicting sequence
SAAPDPGWPDCFNSGVFV

SEQ ID NO: 22396 - protein, 6 aa, Artificial sequence
  Protein classification predicting sequence
VIPSPF

SEQ ID NO: 22397 - protein, 33 aa, Artificial sequence
  Protein classification predicting sequence
EDKINQAVFPGLQGGPHNHTITGLAVALKQATT

SEQ ID NO: 22398 - protein, 9 aa, Artificial sequence
  Protein classification predicting sequence
NHLVLVNLK

SEQ ID NO: 22399 - protein, 9 aa, Artificial sequence
  Protein classification predicting sequence
LIPSENFTS

SEQ ID NO: 22400 - protein, 7 aa, Artificial sequence
  Protein classification predicting sequence
INFSVFP

SEQ ID NO: 22401 - protein, 10 aa, Artificial sequence
  Protein classification predicting sequence
HQGGPHNHTI

SEQ ID NO: 22402 - protein, 9 aa, Artificial sequence
  Protein classification predicting sequence
NKYSEGYPG

SEQ ID NO: 22403 - protein, 8 aa, Artificial sequence
  Protein classification predicting sequence
RIMGLDLP

SEQ ID NO: 22404 - protein, 6 aa, Artificial sequence
  Protein classification predicting sequence
GTDTHL

SEQ ID NO: 22405 - protein, 7 aa, Artificial sequence
  Protein classification predicting sequence
IAANKNT

SEQ ID NO: 22406 - protein, 6 aa, Artificial sequence
  Protein classification predicting sequence
SENFTS

SEQ ID NO: 22407 - protein, 8 aa, Artificial sequence
  Protein classification predicting sequence
GTKLKDFV

SEQ ID NO: 22408 - protein, 18 aa, Artificial sequence
  Protein classification predicting sequence
LEALGSCLNNKYSEGYPG

SEQ ID NO: 22409 - protein, 6 aa, Artificial sequence
  Protein classification predicting sequence
TGLIDY

SEQ ID NO: 22410 - protein, 8 aa, Artificial sequence
  Protein classification predicting sequence
FPSLQGGP

SEQ ID NO: 22411 - protein, 7 aa, Artificial sequence
  Protein classification predicting sequence
AVALKQA

SEQ ID NO: 22412 - protein, 11 aa, Artificial sequence
  Protein classification predicting sequence
AKQFPTIGFEK

SEQ ID NO: 22413 - protein, 13 aa, Artificial sequence
  Protein classification predicting sequence
SATSIFFESMPYK

SEQ ID NO: 22414 - protein, 18 aa, Artificial sequence
  Protein classification predicting sequence
VTTTTHKSLRGPRGAMIF

SEQ ID NO: 22415 - protein, 10 aa, Artificial sequence
  Protein classification predicting sequence
SPEFKEYQQK

SEQ ID NO: 22416 - protein, 16 aa, Artificial sequence
  Protein classification predicting sequence
SLLGFVATVTLIPAFR

SEQ ID NO: 22417 - protein, 14 aa, Artificial sequence
  Protein classification predicting sequence
HFIAARLCGQDLNK

SEQ ID NO: 22418 - protein, 59 aa, Artificial sequence
  Protein classification predicting sequence
ILGLHLDLGILYYVYMGLLAVFCTNAINILAGINGLEAGQSLVISASIIVFNLVELEGD

SEQ ID NO: 22419 - protein, 15 aa, Artificial sequence
  Protein classification predicting sequence
KTGKLEMSYSKFKTK

SEQ ID NO: 22420 - protein, 13 aa, Artificial sequence
  Protein classification predicting sequence
LSFLGTFILKVAE

SEQ ID NO: 22421 - protein, 12 aa, Artificial sequence
  Protein classification predicting sequence
AVVGILGHFSKT

SEQ ID NO: 22422 - protein, 6 aa, Artificial sequence
  Protein classification predicting sequence
CYFAGM

SEQ ID NO: 22423 - protein, 16 aa, Artificial sequence
  Protein classification predicting sequence
FAVVGILGHFSKTMLL

SEQ ID NO: 22424 - protein, 7 aa, Artificial sequence
  Protein classification predicting sequence
NMTLINL

SEQ ID NO: 22425 - protein, 8 aa, Artificial sequence
  Protein classification predicting sequence
KVTTVVAT

SEQ ID NO: 22426 - protein, 14 aa, Artificial sequence
  Protein classification predicting sequence
KVIGNGSFGVVYQA

SEQ ID NO: 22427 - protein, 46 aa, Artificial sequence
  Protein classification predicting sequence
ELVAIKKVLQDKRFKNRELQIMRKLDHCNIVRLRYFFYSSGEKKDE

SEQ ID NO: 22428 - protein, 12 aa, Artificial sequence
  Protein classification predicting sequence
YVPETVYRVARH

SEQ ID NO: 22429 - protein, 14 aa, Artificial sequence
  Protein classification predicting sequence
YMYQLFRSLAYIHS

SEQ ID NO: 22430 - protein, 11 aa, Artificial sequence
  Protein classification predicting sequence
RTPPEAIALCS

SEQ ID NO: 22431 - protein, 14 aa, Artificial sequence
  Protein classification predicting sequence
PLEACAHSFFDELR

SEQ ID NO: 22432 - protein, 10 aa, Artificial sequence
  Protein classification predicting sequence
VIGNGSFGVV

SEQ ID NO: 22433 - protein, 8 aa, Artificial sequence
  Protein classification predicting sequence
KNRELQIM

SEQ ID NO: 22434 - protein, 9 aa, Artificial sequence
  Protein classification predicting sequence
DEVYLNLVL

SEQ ID NO: 22435 - protein, 10 aa, Artificial sequence
  Protein classification predicting sequence
LKLCDFGSAK

SEQ ID NO: 22436 - protein, 8 aa, Artificial sequence
  Protein classification predicting sequence
NVSYICSR

SEQ ID NO: 22437 - protein, 9 aa, Artificial sequence
  Protein classification predicting sequence
YRAPELIFG

SEQ ID NO: 22438 - protein, 14 aa, Artificial sequence
  Protein classification predicting sequence
DQLVEIIKVLGTPT

SEQ ID NO: 22439 - protein, 8 aa, Artificial sequence
  Protein classification predicting sequence
FFDELRDP

SEQ ID NO: 22440 - protein, 8 aa, Artificial sequence
  Protein classification predicting sequence
VPAFEDGD

SEQ ID NO: 22441 - protein, 28 aa, Artificial sequence
  Protein classification predicting sequence
NPFGQVPAFEDGDLKLFESRAITQYIAH

SEQ ID NO: 22442 - protein, 6 aa, Artificial sequence
  Protein classification predicting sequence
CLDAFP

SEQ ID NO: 22443 - protein, 7 aa, Artificial sequence
  Protein classification predicting sequence
AILRYIA

SEQ ID NO: 22444 - protein, 7 aa, Artificial sequence
  Protein classification predicting sequence
YFNGRGR

SEQ ID NO: 22445 - protein, 6 aa, Artificial sequence
  Protein classification predicting sequence
RLLLEY

SEQ ID NO: 22446 - protein, 20 aa, Artificial sequence
  Protein classification predicting sequence
GLDLPNLPYYIDDKCKLTQS

SEQ ID NO: 22447 - protein, 7 aa, Artificial sequence
  Protein classification predicting sequence
SMIEGAA

SEQ ID NO: 22448 - protein, 6 aa, Artificial sequence
  Protein classification predicting sequence
YFNARG

SEQ ID NO: 22449 - protein, 7 aa, Artificial sequence
  Protein classification predicting sequence
RYFPAFE

SEQ ID NO: 22450 - protein, 8 aa, Artificial sequence
  Protein classification predicting sequence
FLVGNQLS

SEQ ID NO: 22451 - protein, 15 aa, Artificial sequence
  Protein classification predicting sequence
LYGKDMKERALIDMY

SEQ ID NO: 22452 - protein, 8 aa, Artificial sequence
  Protein classification predicting sequence
NRYLPAFE

SEQ ID NO: 22453 - protein, 8 aa, Artificial sequence
  Protein classification predicting sequence
KYNLYGKD

SEQ ID NO: 22454 - protein, 9 aa, Artificial sequence
  Protein classification predicting sequence
VEEFDASLL

SEQ ID NO: 22455 - protein, 7 aa, Artificial sequence
  Protein classification predicting sequence
GKPVLHY

SEQ ID NO: 22456 - protein, 13 aa, Artificial sequence
  Protein classification predicting sequence
FQQVPMVEIDGMK

SEQ ID NO: 22457 - protein, 9 aa, Artificial sequence
  Protein classification predicting sequence
KERALIDMY

SEQ ID NO: 22458 - protein, 7 aa, Artificial sequence
  Protein classification predicting sequence
LVGNKLS

SEQ ID NO: 22459 - protein, 12 aa, Artificial sequence
  Protein classification predicting sequence
KKFLQPGSQRKP

SEQ ID NO: 22460 - protein, 11 aa, Artificial sequence
  Protein classification predicting sequence
LHYFNARGRME

SEQ ID NO: 22461 - protein, 18 aa, Artificial sequence
  Protein classification predicting sequence
PAFEKVLKSHGQDYLVGN

SEQ ID NO: 22462 - protein, 10 aa, Artificial sequence
  Protein classification predicting sequence
FPLLKALKTR

SEQ ID NO: 22463 - protein, 6 aa, Artificial sequence
  Protein classification predicting sequence
FPLLKA

SEQ ID NO: 22464 - protein, 14 aa, Artificial sequence
  Protein classification predicting sequence
LMFQQVPMVEIDGM

SEQ ID NO: 22465 - protein, 8 aa, Artificial sequence
  Protein classification predicting sequence
PAFEKVLK

SEQ ID NO: 22466 - protein, 12 aa, Artificial sequence
  Protein classification predicting sequence
QVPMVEIDGMKL

SEQ ID NO: 22467 - protein, 10 aa, Artificial sequence
  Protein classification predicting sequence
QTRAILNYIA

SEQ ID NO: 22468 - protein, 13 aa, Artificial sequence
  Protein classification predicting sequence
QTRAILNYIATKY

SEQ ID NO: 22469 - protein, 6 aa, Artificial sequence
  Protein classification predicting sequence
YFNGRG

SEQ ID NO: 22470 - protein, 6 aa, Artificial sequence
  Protein classification predicting sequence
GRGRME

SEQ ID NO: 22471 - protein, 10 aa, Artificial sequence
  Protein classification predicting sequence
SHGQDYLVGN

SEQ ID NO: 22472 - protein, 10 aa, Artificial sequence
  Protein classification predicting sequence
LYGKDMKERA

SEQ ID NO: 22473 - protein, 7 aa, Artificial sequence
  Protein classification predicting sequence
IDMYTEG

SEQ ID NO: 22474 - protein, 8 aa, Artificial sequence
  Protein classification predicting sequence
LAAAGVEF

SEQ ID NO: 22475 - protein, 6 aa, Artificial sequence
  Protein classification predicting sequence
VEIDGM

SEQ ID NO: 22476 - protein, 6 aa, Artificial sequence
  Protein classification predicting sequence
QTRAIL

SEQ ID NO: 22477 - protein, 7 aa, Artificial sequence
  Protein classification predicting sequence
AGVEFEE

SEQ ID NO: 22478 - protein, 10 aa, Artificial sequence
  Protein classification predicting sequence
PAFEKVLKSH

SEQ ID NO: 22479 - protein, 7 aa, Artificial sequence
  Protein classification predicting sequence
QDYLVGN

SEQ ID NO: 22480 - protein, 14 aa, Artificial sequence
  Protein classification predicting sequence
SNLPTVKKFLQPGS

SEQ ID NO: 22481 - protein, 15 aa, Artificial sequence
  Protein classification predicting sequence
QVPMVEIDGMKLVQT

SEQ ID NO: 22482 - protein, 10 aa, Artificial sequence
  Protein classification predicting sequence
AILNYIATKY

SEQ ID NO: 22483 - protein, 6 aa, Artificial sequence
  Protein classification predicting sequence
NLYGKD

SEQ ID NO: 22484 - protein, 7 aa, Artificial sequence
  Protein classification predicting sequence
LFESRAI

SEQ ID NO: 22485 - protein, 7 aa, Artificial sequence
  Protein classification predicting sequence
KVLDVYE

SEQ ID NO: 22486 - protein, 8 aa, Artificial sequence
  Protein classification predicting sequence
LGYWDIRG

SEQ ID NO: 22487 - protein, 6 aa, Artificial sequence
  Protein classification predicting sequence
DILENQ

SEQ ID NO: 22488 - protein, 7 aa, Artificial sequence
  Protein classification predicting sequence
KITFVDF

SEQ ID NO: 22489 - protein, 11 aa, Artificial sequence
  Protein classification predicting sequence
CLDAFPNLKDF

SEQ ID NO: 22490 - protein, 8 aa, Artificial sequence
  Protein classification predicting sequence
FLGKRPWF

SEQ ID NO: 22491 - protein, 9 aa, Artificial sequence
  Protein classification predicting sequence
LLEYTDSSY

SEQ ID NO: 22492 - protein, 8 aa, Artificial sequence
  Protein classification predicting sequence
CLDAFPNL

SEQ ID NO: 22493 - protein, 8 aa, Artificial sequence
  Protein classification predicting sequence
KITQSNAI

SEQ ID NO: 22494 - protein, 8 aa, Artificial sequence
  Protein classification predicting sequence
KLTFVDFL

SEQ ID NO: 22495 - protein, 8 aa, Artificial sequence
  Protein classification predicting sequence
RFEALEKI

SEQ ID NO: 22496 - protein, 8 aa, Artificial sequence
  Protein classification predicting sequence
IRLLLEYT

SEQ ID NO: 22497 - protein, 18 aa, Artificial sequence
  Protein classification predicting sequence
EKFKLGLDFPNLPYLIDG

SEQ ID NO: 22498 - protein, 9 aa, Artificial sequence
  Protein classification predicting sequence
RFEGLKKIS

SEQ ID NO: 22499 - protein, 9 aa, Artificial sequence
  Protein classification predicting sequence
LCYNPDFEK

SEQ ID NO: 22500 - protein, 7 aa, Artificial sequence
  Protein classification predicting sequence
CGETEEE

SEQ ID NO: 22501 - protein, 6 aa, Artificial sequence
  Protein classification predicting sequence
MTLGYW

SEQ ID NO: 22502 - protein, 6 aa, Artificial sequence
  Protein classification predicting sequence
DRSQWL

SEQ ID NO: 22503 - protein, 17 aa, Artificial sequence
  Protein classification predicting sequence
LGLDFPNLPYLIDGSHK

SEQ ID NO: 22504 - protein, 9 aa, Artificial sequence
  Protein classification predicting sequence
TQSNAILRY

SEQ ID NO: 22505 - protein, 6 aa, Artificial sequence
  Protein classification predicting sequence
KPEFLK

SEQ ID NO: 22506 - protein, 8 aa, Artificial sequence
  Protein classification predicting sequence
PDFEKLKP

SEQ ID NO: 22507 - protein, 22 aa, Artificial sequence
  Protein classification predicting sequence
GDKITFVDFIAYDVLERNQVFE

SEQ ID NO: 22508 - protein, 12 aa, Artificial sequence
  Protein classification predicting sequence
NLKDFISRFEGL

SEQ ID NO: 22509 - protein, 14 aa, Artificial sequence
  Protein classification predicting sequence
LGYWDIRGLAHAIR

SEQ ID NO: 22510 - protein, 10 aa, Artificial sequence
  Protein classification predicting sequence
TEEEKIRVDI

SEQ ID NO: 22511 - protein, 8 aa, Artificial sequence
  Protein classification predicting sequence
IRVDILEN

SEQ ID NO: 22512 - protein, 7 aa, Artificial sequence
  Protein classification predicting sequence
PWFAGDK

SEQ ID NO: 22513 - protein, 7 aa, Artificial sequence
  Protein classification predicting sequence
KISAYMK

SEQ ID NO: 22514 - protein, 6 aa, Artificial sequence
  Protein classification predicting sequence
YEEKRY

SEQ ID NO: 22515 - protein, 9 aa, Artificial sequence
  Protein classification predicting sequence
RMQLIMLCY

SEQ ID NO: 22516 - protein, 7 aa, Artificial sequence
  Protein classification predicting sequence
CYSPDFE

SEQ ID NO: 22517 - protein, 12 aa, Artificial sequence
  Protein classification predicting sequence
HKITQSNAILRY

SEQ ID NO: 22518 - protein, 7 aa, Artificial sequence
  Protein classification predicting sequence
FEPKCLD

SEQ ID NO: 22519 - protein, 7 aa, Artificial sequence
  Protein classification predicting sequence
FPNLKDF

SEQ ID NO: 22520 - protein, 8 aa, Artificial sequence
  Protein classification predicting sequence
TDTSYEEK

SEQ ID NO: 22521 - protein, 14 aa, Artificial sequence
  Protein classification predicting sequence
LGLDFPNLPYLIDG

SEQ ID NO: 22522 - protein, 11 aa, Artificial sequence
  Protein classification predicting sequence
DILENQLMDNR

SEQ ID NO: 22523 - protein, 7 aa, Artificial sequence
  Protein classification predicting sequence
YSMRFCP

SEQ ID NO: 22524 - protein, 9 aa, Artificial sequence
  Protein classification predicting sequence
CLYGQLPKF

SEQ ID NO: 22525 - protein, 7 aa, Artificial sequence
  Protein classification predicting sequence
DYVKALP

SEQ ID NO: 22526 - protein, 13 aa, Artificial sequence
  Protein classification predicting sequence
LLADQGQSWKEEV

SEQ ID NO: 22527 - protein, 10 aa, Artificial sequence
  Protein classification predicting sequence
DGDLTLYQSN

SEQ ID NO: 22528 - protein, 8 aa, Artificial sequence
  Protein classification predicting sequence
VLAPGCLD

SEQ ID NO: 22529 - protein, 7 aa, Artificial sequence
  Protein classification predicting sequence
RLSARPK

SEQ ID NO: 22530 - protein, 7 aa, Artificial sequence
  Protein classification predicting sequence
GLYGKDQ

SEQ ID NO: 22531 - protein, 13 aa, Artificial sequence
  Protein classification predicting sequence
QISFADYNLLDLL

SEQ ID NO: 22532 - protein, 21 aa, Artificial sequence
  Protein classification predicting sequence
FPLLSAYVARLSARPKIKAFL

SEQ ID NO: 22533 - protein, 8 aa, Artificial sequence
  Protein classification predicting sequence
NDGVEDLR

SEQ ID NO: 22534 - protein, 9 aa, Artificial sequence
  Protein classification predicting sequence
VYLVEKYGK

SEQ ID NO: 22535 - protein, 9 aa, Artificial sequence
  Protein classification predicting sequence
PADPELFKK

SEQ ID NO: 22536 - protein, 8 aa, Artificial sequence
  Protein classification predicting sequence
ELNKKLLN

SEQ ID NO: 22537 - protein, 19 aa, Artificial sequence
  Protein classification predicting sequence
PKKRAVINQRLYFDMGTLY

SEQ ID NO: 22538 - protein, 8 aa, Artificial sequence
  Protein classification predicting sequence
DLQARARV

SEQ ID NO: 22539 - protein, 6 aa, Artificial sequence
  Protein classification predicting sequence
WESRAI

SEQ ID NO: 22540 - protein, 6 aa, Artificial sequence
  Protein classification predicting sequence
KINPQH

SEQ ID NO: 22541 - protein, 8 aa, Artificial sequence
  Protein classification predicting sequence
PEFLKINP

SEQ ID NO: 22542 - protein, 22 aa, Artificial sequence
  Protein classification predicting sequence
KVRKAIIPAAGLGTRFLPATKA

SEQ ID NO: 22543 - protein, 27 aa, Artificial sequence
  Protein classification predicting sequence
ASAWALERWKGELWDTCNIGVPWYDRE

SEQ ID NO: 22544 - protein, 19 aa, Artificial sequence
  Protein classification predicting sequence
LGRYLCAGAVDFYNNLENF

SEQ ID NO: 22545 - protein, 35 aa, Artificial sequence
  Protein classification predicting sequence
VLFEVAWEVANKVGGIYTVLQTKAKVTGDEWGDNY

SEQ ID NO: 22546 - protein, 7 aa, Artificial sequence
  Protein classification predicting sequence
VDFYNNL

SEQ ID NO: 22547 - protein, 6 aa, Artificial sequence
  Protein classification predicting sequence
IYHRYC

SEQ ID NO: 22548 - protein, 6 aa, Artificial sequence
  Protein classification predicting sequence
FVRGHF

SEQ ID NO: 22549 - protein, 9 aa, Artificial sequence
  Protein classification predicting sequence
YFFIAGRYE

SEQ ID NO: 22550 - protein, 12 aa, Artificial sequence
  Protein classification predicting sequence
DRVKVIFHPEFL

SEQ ID NO: 22551 - protein, 29 aa, Artificial sequence
  Protein classification predicting sequence
EFVRGCHLGVFPSYYEPWGYTPAECTVMG

SEQ ID NO: 22552 - protein, 8 aa, Artificial sequence
  Protein classification predicting sequence
LFEVAWEV

SEQ ID NO: 22553 - protein, 18 aa, Artificial sequence
  Protein classification predicting sequence
DKEAGERQIYHRYCMERA

SEQ ID NO: 22554 - protein, 10 aa, Artificial sequence
  Protein classification predicting sequence
HCAHVFTTVS

SEQ ID NO: 22555 - protein, 13 aa, Artificial sequence
  Protein classification predicting sequence
VTPNGLNVKKFSA

SEQ ID NO: 22556 - protein, 14 aa, Artificial sequence
  Protein classification predicting sequence
FIAGRYEFSNKGAD

SEQ ID NO: 22557 - protein, 20 aa, Artificial sequence
  Protein classification predicting sequence
TNNFNVETLKGQAVRKQLWD

SEQ ID NO: 22558 - protein, 9 aa, Artificial sequence
  Protein classification predicting sequence
TIRRIGLFN

SEQ ID NO: 22559 - protein, 13 aa, Artificial sequence
  Protein classification predicting sequence
HPEFLSSTSPLLP

SEQ ID NO: 22560 - protein, 22 aa, Artificial sequence
  Protein classification predicting sequence
QSRRQRIIQRNRTERLSDLLDW

SEQ ID NO: 22561 - protein, 7 aa, Artificial sequence
  Protein classification predicting sequence
IFHPEFL

SEQ ID NO: 22562 - protein, 21 aa, Artificial sequence
  Protein classification predicting sequence
EEAAKDRRNIRAPEWPRRASC

SEQ ID NO: 22563 - protein, 12 aa, Artificial sequence
  Protein classification predicting sequence
KFSAMHEFQNLH

SEQ ID NO: 22564 - protein, 9 aa, Artificial sequence
  Protein classification predicting sequence
FVRGHFYGH

SEQ ID NO: 22565 - protein, 17 aa, Artificial sequence
  Protein classification predicting sequence
SYYEPWGYTPAECTVMG

SEQ ID NO: 22566 - protein, 8 aa, Artificial sequence
  Protein classification predicting sequence
TNLSGFGC

SEQ ID NO: 22567 - protein, 6 aa, Artificial sequence
  Protein classification predicting sequence
CCVVYR

SEQ ID NO: 22568 - protein, 6 aa, Artificial sequence
  Protein classification predicting sequence
AYQEDP

SEQ ID NO: 22569 - protein, 12 aa, Artificial sequence
  Protein classification predicting sequence
AFNVERACQSYF

SEQ ID NO: 22570 - protein, 7 aa, Artificial sequence
  Protein classification predicting sequence
CISGPLG

SEQ ID NO: 22571 - protein, 7 aa, Artificial sequence
  Protein classification predicting sequence
GWGTSGR

SEQ ID NO: 22572 - protein, 12 aa, Artificial sequence
  Protein classification predicting sequence
WGGKREVMYTAF

SEQ ID NO: 22573 - protein, 8 aa, Artificial sequence
  Protein classification predicting sequence
VEMVKVLE

SEQ ID NO: 22574 - protein, 11 aa, Artificial sequence
  Protein classification predicting sequence
YLRWLNQQTRW

SEQ ID NO: 22575 - protein, 5 aa, Artificial sequence
  Protein classification predicting sequence
WMTYE

SEQ ID NO: 22576 - protein, 7 aa, Artificial sequence
  Protein classification predicting sequence
LEHRKMK

SEQ ID NO: 22577 - protein, 6 aa, Artificial sequence
  Protein classification predicting sequence
YMMDIF

SEQ ID NO: 22578 - protein, 8 aa, Artificial sequence
  Protein classification predicting sequence
QLVLSNKS

SEQ ID NO: 22579 - protein, 9 aa, Artificial sequence
  Protein classification predicting sequence
YVQVCDSDT

SEQ ID NO: 22580 - protein, 7 aa, Artificial sequence
  Protein classification predicting sequence
WFTILLG

SEQ ID NO: 22581 - protein, 7 aa, Artificial sequence
  Protein classification predicting sequence
KCGRRKK

SEQ ID NO: 22582 - protein, 6 aa, Artificial sequence
  Protein classification predicting sequence
YACYWV

SEQ ID NO: 22583 - protein, 24 aa, Artificial sequence
  Protein classification predicting sequence
AAYIVGYQFIQTDNYYFSFGLYGA

SEQ ID NO: 22584 - protein, 10 aa, Artificial sequence
  Protein classification predicting sequence
SLETPIKLNK

SEQ ID NO: 22585 - protein, 11 aa, Artificial sequence
  Protein classification predicting sequence
VALCIAAYQED

SEQ ID NO: 22586 - protein, 6 aa, Artificial sequence
  Protein classification predicting sequence
CIMQKW

SEQ ID NO: 22587 - protein, 10 aa, Artificial sequence
  Protein classification predicting sequence
GKREVMYTAF

SEQ ID NO: 22588 - protein, 16 aa, Artificial sequence
  Protein classification predicting sequence
LDPASSVEMVKVLEED

SEQ ID NO: 22589 - protein, 8 aa, Artificial sequence
  Protein classification predicting sequence
EDWYNQEF

SEQ ID NO: 22590 - protein, 34 aa, Artificial sequence
  Protein classification predicting sequence
WFHKHHLWMTYEAVITGFFPFFLIATVIQLFYRG

SEQ ID NO: 22591 - protein, 11 aa, Artificial sequence
  Protein classification predicting sequence
LRGNIVMVFMS

SEQ ID NO: 22592 - protein, 42 aa, Artificial sequence
  Protein classification predicting sequence
YSVLYMSSLLPAKMFAIATINKAGWGTSGRKTIVVNFIGLIP

SEQ ID NO: 22593 - protein, 10 aa, Artificial sequence
  Protein classification predicting sequence
VWFTILLGGV

SEQ ID NO: 22594 - protein, 7 aa, Artificial sequence
  Protein classification predicting sequence
KKPFSES

SEQ ID NO: 22595 - protein, 11 aa, Artificial sequence
  Protein classification predicting sequence
IQSLFAFLEHR

SEQ ID NO: 22596 - protein, 7 aa, Artificial sequence
  Protein classification predicting sequence
QVCDSDT

SEQ ID NO: 22597 - protein, 18 aa, Artificial sequence
  Protein classification predicting sequence
CSFGDDRHLTNRVLSLGY

SEQ ID NO: 22598 - protein, 14 aa, Artificial sequence
  Protein classification predicting sequence
TKYTARSKCLTETP

SEQ ID NO: 22599 - protein, 12 aa, Artificial sequence
  Protein classification predicting sequence
WFHKHHLWMTYE

SEQ ID NO: 22600 - protein, 19 aa, Artificial sequence
  Protein classification predicting sequence
TGFFPFFLIATVIQLFYRG

SEQ ID NO: 22601 - protein, 15 aa, Artificial sequence
  Protein classification predicting sequence
IWNILLFLLTVQLVG

SEQ ID NO: 22602 - protein, 10 aa, Artificial sequence
  Protein classification predicting sequence
LYMSSLLPAK

SEQ ID NO: 22603 - protein, 8 aa, Artificial sequence
  Protein classification predicting sequence
FAIATINK

SEQ ID NO: 22604 - protein, 6 aa, Artificial sequence
  Protein classification predicting sequence
YLRKCL

SEQ ID NO: 22605 - protein, 31 aa, Artificial sequence
  Protein classification predicting sequence
VGGVGGDVQILNKYDSWISFLSSVRYWMAFN

SEQ ID NO: 22606 - protein, 26 aa, Artificial sequence
  Protein classification predicting sequence
ERACQSYFGCVQCISGPLGMYRNSLL

SEQ ID NO: 22607 - protein, 68 aa, Artificial sequence
  Protein classification predicting sequence
ESIISVKKILSNPIVALWTIFEVVMFMMLIVAIGNLLFNQAIQLDLIKLFAFLSIIFIVALCRNVHYM

SEQ ID NO: 22608 - protein, 44 aa, Artificial sequence
  Protein classification predicting sequence
LISILIYLNMYLFGTSTVGIYGVILITYLVIKLGLSFLYEPFKG

SEQ ID NO: 22609 - protein, 10 aa, Artificial sequence
  Protein classification predicting sequence
ELLKLVDETT

SEQ ID NO: 22610 - protein, 22 aa, Artificial sequence
  Protein classification predicting sequence
INLHFIRQSHPRGLGDAVLQAK

SEQ ID NO: 22611 - protein, 18 aa, Artificial sequence
  Protein classification predicting sequence
KAVKGLYSVDTFVEKPQP

SEQ ID NO: 22612 - protein, 14 aa, Artificial sequence
  Protein classification predicting sequence
RYDVGDKFGFMKTS

SEQ ID NO: 22613 - protein, 6 aa, Artificial sequence
  Protein classification predicting sequence
EKIGEG

SEQ ID NO: 22614 - protein, 6 aa, Artificial sequence
  Protein classification predicting sequence
VALYDY

SEQ ID NO: 22615 - protein, 11 aa, Artificial sequence
  Protein classification predicting sequence
DGLCQKLSVPC

SEQ ID NO: 22616 - protein, 6 aa, Artificial sequence
  Protein classification predicting sequence
FGEVWM

SEQ ID NO: 22617 - protein, 8 aa, Artificial sequence
  Protein classification predicting sequence
AQIAEGMA

SEQ ID NO: 22618 - protein, 12 aa, Artificial sequence
  Protein classification predicting sequence
LVCKIADFGLAR

SEQ ID NO: 22619 - protein, 10 aa, Artificial sequence
  Protein classification predicting sequence
ERPTFEYIQS

SEQ ID NO: 22620 - protein, 6 aa, Artificial sequence
  Protein classification predicting sequence
EANLMK

SEQ ID NO: 22621 - protein, 6 aa, Artificial sequence
  Protein classification predicting sequence
IVTEFM

SEQ ID NO: 22622 - protein, 6 aa, Artificial sequence
  Protein classification predicting sequence
FKTVNR

SEQ ID NO: 22623 - protein, 9 aa, Artificial sequence
  Protein classification predicting sequence
FSSCFVAND

SEQ ID NO: 22624 - protein, 18 aa, Artificial sequence
  Protein classification predicting sequence
SGTLGKAFGCVGGYIAST

SEQ ID NO: 22625 - protein, 20 aa, Artificial sequence
  Protein classification predicting sequence
EGQALRRAHQRNVKHMRQLL

SEQ ID NO: 22626 - protein, 19 aa, Artificial sequence
  Protein classification predicting sequence
IYVQAINYPTVPRGEELLR

SEQ ID NO: 22627 - protein, 6 aa, Artificial sequence
  Protein classification predicting sequence
SYFGNM

SEQ ID NO: 22628 - protein, 15 aa, Artificial sequence
  Protein classification predicting sequence
YSDAGNHASMIQGIR

SEQ ID NO: 22629 - protein, 10 aa, Artificial sequence
  Protein classification predicting sequence
LLRIAPTPHH

SEQ ID NO: 22630 - protein, 7 aa, Artificial sequence
  Protein classification predicting sequence
CNFCRRP

SEQ ID NO: 22631 - protein, 16 aa, Artificial sequence
  Protein classification predicting sequence
VSVWCSNDYLGMSRHP

SEQ ID NO: 22632 - protein, 6 aa, Artificial sequence
  Protein classification predicting sequence
SRHPRV

SEQ ID NO: 22633 - protein, 12 aa, Artificial sequence
  Protein classification predicting sequence
DHTYRVFKTVNR

SEQ ID NO: 22634 - protein, 20 aa, Artificial sequence
  Protein classification predicting sequence
IYSDAGNHASMIQGIRNSGA

SEQ ID NO: 22635 - protein, 13 aa, Artificial sequence
  Protein classification predicting sequence
AAGFIFTTSLPPM

SEQ ID NO: 22636 - protein, 6 aa, Artificial sequence
  Protein classification predicting sequence
HQRNVK

SEQ ID NO: 22637 - protein, 13 aa, Artificial sequence
  Protein classification predicting sequence
CPSHIIPIRVGNA

SEQ ID NO: 22638 - protein, 11 aa, Artificial sequence
  Protein classification predicting sequence
ELLRLAPSPHH

SEQ ID NO: 22639 - protein, 7 aa, Artificial sequence
  Protein classification predicting sequence
PKIVAFE

SEQ ID NO: 22640 - protein, 8 aa, Artificial sequence
  Protein classification predicting sequence
AFESVYSM

SEQ ID NO: 22641 - protein, 10 aa, Artificial sequence
  Protein classification predicting sequence
DEVHAVGLYG

SEQ ID NO: 22642 - protein, 6 aa, Artificial sequence
  Protein classification predicting sequence
INYPTV

SEQ ID NO: 22643 - protein, 8 aa, Artificial sequence
  Protein classification predicting sequence
GAGGTRNI

SEQ ID NO: 22644 - protein, 10 aa, Artificial sequence
  Protein classification predicting sequence
TFLDEVHAVG

SEQ ID NO: 22645 - protein, 6 aa, Artificial sequence
  Protein classification predicting sequence
GFIFTT

SEQ ID NO: 22646 - protein, 10 aa, Artificial sequence
  Protein classification predicting sequence
GAGAGGTRNI

SEQ ID NO: 22647 - protein, 11 aa, Artificial sequence
  Protein classification predicting sequence
YGPHGAGVAEH

SEQ ID NO: 22648 - protein, 7 aa, Artificial sequence
  Protein classification predicting sequence
DRVDMIT

SEQ ID NO: 22649 - protein, 8 aa, Artificial sequence
  Protein classification predicting sequence
LPPAVMAG

SEQ ID NO: 22650 - protein, 20 aa, Artificial sequence
  Protein classification predicting sequence
RGTERLRITPTPGHTNDLSD

SEQ ID NO: 22651 - protein, 6 aa, Artificial sequence
  Protein classification predicting sequence
NDYLGM

SEQ ID NO: 22652 - protein, 14 aa, Artificial sequence
  Protein classification predicting sequence
DKSYRYFNNINRLA

SEQ ID NO: 22653 - protein, 12 aa, Artificial sequence
  Protein classification predicting sequence
GAGGTRNIAGHN

SEQ ID NO: 22654 - protein, 7 aa, Artificial sequence
  Protein classification predicting sequence
ALVFSSC

SEQ ID NO: 22655 - protein, 12 aa, Artificial sequence
  Protein classification predicting sequence
PKLIAFESVYSM

SEQ ID NO: 22656 - protein, 7 aa, Artificial sequence
  Protein classification predicting sequence
SLLFYAQ

SEQ ID NO: 22657 - protein, 19 aa, Artificial sequence
  Protein classification predicting sequence
VSHLLQDNLPKSVSTFQYD

SEQ ID NO: 22658 - protein, 10 aa, Artificial sequence
  Protein classification predicting sequence
FFEKKIDEKK

SEQ ID NO: 22659 - protein, 8 aa, Artificial sequence
  Protein classification predicting sequence
PGCEIYSD

SEQ ID NO: 22660 - protein, 15 aa, Artificial sequence
  Protein classification predicting sequence
PKIVAFETVHSMDGA

SEQ ID NO: 22661 - protein, 6 aa, Artificial sequence
  Protein classification predicting sequence
CVGGYI

SEQ ID NO: 22662 - protein, 31 aa, Artificial sequence
  Protein classification predicting sequence
LIDTVRSYAAGFIFTTSLPPMLLAGALESVR

SEQ ID NO: 22663 - protein, 7 aa, Artificial sequence
  Protein classification predicting sequence
CPSHIIP

SEQ ID NO: 22664 - protein, 29 aa, Artificial sequence
  Protein classification predicting sequence
VGLELKPHSSAECNFCRRPLHFEVMSERE

SEQ ID NO: 22665 - protein, 8 aa, Artificial sequence
  Protein classification predicting sequence
FNNINRLA

SEQ ID NO: 22666 - protein, 8 aa, Artificial sequence
  Protein classification predicting sequence
APGFIFTT

SEQ ID NO: 22667 - protein, 7 aa, Artificial sequence
  Protein classification predicting sequence
IYVQAIN

SEQ ID NO: 22668 - protein, 16 aa, Artificial sequence
  Protein classification predicting sequence
GAGGTRNISGTSKFHV

SEQ ID NO: 22669 - protein, 8 aa, Artificial sequence
  Protein classification predicting sequence
NSRVPKYI

SEQ ID NO: 22670 - protein, 11 aa, Artificial sequence
  Protein classification predicting sequence
HLRELLQRSDP

SEQ ID NO: 22671 - protein, 14 aa, Artificial sequence
  Protein classification predicting sequence
TFVDEVHAVGLYGA

SEQ ID NO: 22672 - protein, 11 aa, Artificial sequence
  Protein classification predicting sequence
IYVQAINYPTV

SEQ ID NO: 22673 - protein, 25 aa, Artificial sequence
  Protein classification predicting sequence
FFEKKIDEKKNDHTYRVFKTVNRRA

SEQ ID NO: 22674 - protein, 11 aa, Artificial sequence
  Protein classification predicting sequence
DEVHAVGMYGP

SEQ ID NO: 22675 - protein, 10 aa, Artificial sequence
  Protein classification predicting sequence
IPVIPNPSHI

SEQ ID NO: 22676 - protein, 7 aa, Artificial sequence
  Protein classification predicting sequence
KCPFLAA

SEQ ID NO: 22677 - protein, 21 aa, Artificial sequence
  Protein classification predicting sequence
PKIVAFETVHSMDGAVCPLEE

SEQ ID NO: 22678 - protein, 13 aa, Artificial sequence
  Protein classification predicting sequence
TFVDEVHAVGLYG

SEQ ID NO: 22679 - protein, 7 aa, Artificial sequence
  Protein classification predicting sequence
RDGIMHK

SEQ ID NO: 22680 - protein, 13 aa, Artificial sequence
  Protein classification predicting sequence
ELLRIAPTPHHTP

SEQ ID NO: 22681 - protein, 13 aa, Artificial sequence
  Protein classification predicting sequence
VGLELKPHSSAEC

SEQ ID NO: 22682 - protein, 8 aa, Artificial sequence
  Protein classification predicting sequence
PKLIAFES

SEQ ID NO: 22683 - protein, 12 aa, Artificial sequence
  Protein classification predicting sequence
PKIIAFESVYSM

SEQ ID NO: 22684 - protein, 8 aa, Artificial sequence
  Protein classification predicting sequence
GCVGGYIA

SEQ ID NO: 22685 - protein, 6 aa, Artificial sequence
  Protein classification predicting sequence
INFPTV

SEQ ID NO: 22686 - protein, 7 aa, Artificial sequence
  Protein classification predicting sequence
VANDSTL

SEQ ID NO: 22687 - protein, 9 aa, Artificial sequence
  Protein classification predicting sequence
IAFESVYSM

SEQ ID NO: 22688 - protein, 6 aa, Artificial sequence
  Protein classification predicting sequence
TPTPGH

SEQ ID NO: 22689 - protein, 6 aa, Artificial sequence
  Protein classification predicting sequence
REDPRD

SEQ ID NO: 22690 - protein, 9 aa, Artificial sequence
  Protein classification predicting sequence
TRAAVTAER

SEQ ID NO: 22691 - protein, 11 aa, Artificial sequence
  Protein classification predicting sequence
LEAGCSAPVGA

SEQ ID NO: 22692 - protein, 7 aa, Artificial sequence
  Protein classification predicting sequence
GTSSVRR

SEQ ID NO: 22693 - protein, 6 aa, Artificial sequence
  Protein classification predicting sequence
PIAGYA

SEQ ID NO: 22694 - protein, 8 aa, Artificial sequence
  Protein classification predicting sequence
SPLALWQA

SEQ ID NO: 22695 - protein, 6 aa, Artificial sequence
  Protein classification predicting sequence
LALWQA

SEQ ID NO: 22696 - protein, 8 aa, Artificial sequence
  Protein classification predicting sequence
ILDTPLAK

SEQ ID NO: 22697 - protein, 9 aa, Artificial sequence
  Protein classification predicting sequence
GGKGLFVKE

SEQ ID NO: 22698 - protein, 7 aa, Artificial sequence
  Protein classification predicting sequence
ICEREDP

SEQ ID NO: 22699 - protein, 7 aa, Artificial sequence
  Protein classification predicting sequence
TRLAKLD

SEQ ID NO: 22700 - protein, 6 aa, Artificial sequence
  Protein classification predicting sequence
TKGDRI

SEQ ID NO: 22701 - protein, 6 aa, Artificial sequence
  Protein classification predicting sequence
DIAVHS

SEQ ID NO: 22702 - protein, 9 aa, Artificial sequence
  Protein classification predicting sequence
ELPQGAVVG

SEQ ID NO: 22703 - protein, 11 aa, Artificial sequence
  Protein classification predicting sequence
LDGSCRTPIAG

SEQ ID NO: 22704 - protein, 7 aa, Artificial sequence
  Protein classification predicting sequence
AVHSLKD

SEQ ID NO: 22705 - protein, 10 aa, Artificial sequence
  Protein classification predicting sequence
AVHSLKDLPT

SEQ ID NO: 22706 - protein, 7 aa, Artificial sequence
  Protein classification predicting sequence
GTSSLRR

SEQ ID NO: 22707 - protein, 8 aa, Artificial sequence
  Protein classification predicting sequence
NTRLAKLD

SEQ ID NO: 22708 - protein, 11 aa, Artificial sequence
  Protein classification predicting sequence
AVGQGALGIEC

SEQ ID NO: 22709 - protein, 6 aa, Artificial sequence
  Protein classification predicting sequence
VHSLKD

SEQ ID NO: 22710 - protein, 8 aa, Artificial sequence
  Protein classification predicting sequence
RLGLESRI

SEQ ID NO: 22711 - protein, 8 aa, Artificial sequence
  Protein classification predicting sequence
KEIVTKGD

SEQ ID NO: 22712 - protein, 7 aa, Artificial sequence
  Protein classification predicting sequence
AVHSMKD

SEQ ID NO: 22713 - protein, 25 aa, Artificial sequence
  Protein classification predicting sequence
TVAAERVFLHKLEGGCQVPIAGYAT

SEQ ID NO: 22714 - protein, 10 aa, Artificial sequence
  Protein classification predicting sequence
CQVPIAGYAT

SEQ ID NO: 22715 - protein, 23 aa, Artificial sequence
  Protein classification predicting sequence
VGLEAADRLIKQGAKELILAANK

SEQ ID NO: 22716 - protein, 7 aa, Artificial sequence
  Protein classification predicting sequence
SKLALTQ

SEQ ID NO: 22717 - protein, 10 aa, Artificial sequence
  Protein classification predicting sequence
SKLALTQTNW

SEQ ID NO: 22718 - protein, 6 aa, Artificial sequence
  Protein classification predicting sequence
KWIRGN

SEQ ID NO: 22719 - protein, 6 aa, Artificial sequence
  Protein classification predicting sequence
GQGALG

SEQ ID NO: 22720 - protein, 7 aa, Artificial sequence
  Protein classification predicting sequence
GGCQVPI

SEQ ID NO: 22721 - protein, 12 aa, Artificial sequence
  Protein classification predicting sequence
EIKEIVTKGDRI

SEQ ID NO: 22722 - protein, 9 aa, Artificial sequence
  Protein classification predicting sequence
IRGNIDTRL

SEQ ID NO: 22723 - protein, 7 aa, Artificial sequence
  Protein classification predicting sequence
RIATRKS

SEQ ID NO: 22724 - protein, 11 aa, Artificial sequence
  Protein classification predicting sequence
GSIIGTSSLRR

SEQ ID NO: 22725 - protein, 6 aa, Artificial sequence
  Protein classification predicting sequence
DLAVHS

SEQ ID NO: 22726 - protein, 11 aa, Artificial sequence
  Protein classification predicting sequence
DLAVHSLKDVP

SEQ ID NO: 22727 - protein, 7 aa, Artificial sequence
  Protein classification predicting sequence
KLDNGDY

SEQ ID NO: 22728 - protein, 8 aa, Artificial sequence
  Protein classification predicting sequence
GQGALGIE

SEQ ID NO: 22729 - protein, 9 aa, Artificial sequence
  Protein classification predicting sequence
GQGALGIEI

SEQ ID NO: 22730 - protein, 6 aa, Artificial sequence
  Protein classification predicting sequence
GSCQVP

SEQ ID NO: 22731 - protein, 7 aa, Artificial sequence
  Protein classification predicting sequence
YDAIILA

SEQ ID NO: 22732 - protein, 7 aa, Artificial sequence
  Protein classification predicting sequence
GCQIPIG

SEQ ID NO: 22733 - protein, 8 aa, Artificial sequence
  Protein classification predicting sequence
WQAEHVRD

SEQ ID NO: 22734 - protein, 13 aa, Artificial sequence
  Protein classification predicting sequence
KVGGKGLFVKELE

SEQ ID NO: 22735 - protein, 12 aa, Artificial sequence
  Protein classification predicting sequence
RLGLAARIRALL

SEQ ID NO: 22736 - protein, 7 aa, Artificial sequence
  Protein classification predicting sequence
AERAVSR

SEQ ID NO: 22737 - protein, 7 aa, Artificial sequence
  Protein classification predicting sequence
QGALGIE

SEQ ID NO: 22738 - protein, 7 aa, Artificial sequence
  Protein classification predicting sequence
LWTKELE

SEQ ID NO: 22739 - protein, 8 aa, Artificial sequence
  Protein classification predicting sequence
LEGGCSVP

SEQ ID NO: 22740 - protein, 6 aa, Artificial sequence
  Protein classification predicting sequence
DPRDAF

SEQ ID NO: 22741 - protein, 9 aa, Artificial sequence
  Protein classification predicting sequence
VVGTSSLRR

SEQ ID NO: 22742 - protein, 8 aa, Artificial sequence
  Protein classification predicting sequence
RGNVQTRL

SEQ ID NO: 22743 - protein, 9 aa, Artificial sequence
  Protein classification predicting sequence
LGGSCQVPL

SEQ ID NO: 22744 - protein, 8 aa, Artificial sequence
  Protein classification predicting sequence
GKGLFVKE

SEQ ID NO: 22745 - protein, 12 aa, Artificial sequence
  Protein classification predicting sequence
IGTRGSLLATTQ

SEQ ID NO: 22746 - protein, 7 aa, Artificial sequence
  Protein classification predicting sequence
RGNIDTR

SEQ ID NO: 22747 - protein, 8 aa, Artificial sequence
  Protein classification predicting sequence
RGNVGTRL

SEQ ID NO: 22748 - protein, 7 aa, Artificial sequence
  Protein classification predicting sequence
PAIGQGA

SEQ ID NO: 22749 - protein, 6 aa, Artificial sequence
  Protein classification predicting sequence
ECRSDD

SEQ ID NO: 22750 - protein, 13 aa, Artificial sequence
  Protein classification predicting sequence
GTSSLRRQSQLLA

SEQ ID NO: 22751 - protein, 20 aa, Artificial sequence
  Protein classification predicting sequence
GLGLVTICEREDPRDAFVSN

SEQ ID NO: 22752 - protein, 18 aa, Artificial sequence
  Protein classification predicting sequence
SLPAVGQGAVGIECRLDD

SEQ ID NO: 22753 - protein, 13 aa, Artificial sequence
  Protein classification predicting sequence
RADIAVHSMKDVP

SEQ ID NO: 22754 - protein, 8 aa, Artificial sequence
  Protein classification predicting sequence
VGTSSLRR

SEQ ID NO: 22755 - protein, 12 aa, Artificial sequence
  Protein classification predicting sequence
VGTSSLRRQCQL

SEQ ID NO: 22756 - protein, 7 aa, Artificial sequence
  Protein classification predicting sequence
PMSTRGD

SEQ ID NO: 22757 - protein, 8 aa, Artificial sequence
  Protein classification predicting sequence
RGNIQTRL

SEQ ID NO: 22758 - protein, 7 aa, Artificial sequence
  Protein classification predicting sequence
EIKEIVT

SEQ ID NO: 22759 - protein, 19 aa, Artificial sequence
  Protein classification predicting sequence
IDMAVHSMKDMPAVLPEGL

SEQ ID NO: 22760 - protein, 8 aa, Artificial sequence
  Protein classification predicting sequence
AGLARMGW

SEQ ID NO: 22761 - protein, 7 aa, Artificial sequence
  Protein classification predicting sequence
QGALAVE

SEQ ID NO: 22762 - protein, 6 aa, Artificial sequence
  Protein classification predicting sequence
ECRLDD

SEQ ID NO: 22763 - protein, 8 aa, Artificial sequence
  Protein classification predicting sequence
TRLRKLDE

SEQ ID NO: 22764 - protein, 16 aa, Artificial sequence
  Protein classification predicting sequence
GAKVGTTSLRRSMQIK

SEQ ID NO: 22765 - protein, 7 aa, Artificial sequence
  Protein classification predicting sequence
LFTKELE

SEQ ID NO: 22766 - protein, 11 aa, Artificial sequence
  Protein classification predicting sequence
GGKGLFVKELE

SEQ ID NO: 22767 - protein, 13 aa, Artificial sequence
  Protein classification predicting sequence
GGKGLFVKELEVA

SEQ ID NO: 22768 - protein, 17 aa, Artificial sequence
  Protein classification predicting sequence
TICEREDPRDAFVSNNY

SEQ ID NO: 22769 - protein, 8 aa, Artificial sequence
  Protein classification predicting sequence
GSVVGTSS

SEQ ID NO: 22770 - protein, 9 aa, Artificial sequence
  Protein classification predicting sequence
AIILAAAGL

SEQ ID NO: 22771 - protein, 8 aa, Artificial sequence
  Protein classification predicting sequence
GTRGSPLA

SEQ ID NO: 22772 - protein, 11 aa, Artificial sequence
  Protein classification predicting sequence
LSKVGGKGLFV

SEQ ID NO: 22773 - protein, 14 aa, Artificial sequence
  Protein classification predicting sequence
PAVGQGALAIECRE

SEQ ID NO: 22774 - protein, 11 aa, Artificial sequence
  Protein classification predicting sequence
GDVILDTPLAK

SEQ ID NO: 22775 - protein, 7 aa, Artificial sequence
  Protein classification predicting sequence
GMTTRGD

SEQ ID NO: 22776 - protein, 12 aa, Artificial sequence
  Protein classification predicting sequence
SLGVGVFTTALR

SEQ ID NO: 22777 - protein, 6 aa, Artificial sequence
  Protein classification predicting sequence
LAMWQA

SEQ ID NO: 22778 - protein, 9 aa, Artificial sequence
  Protein classification predicting sequence
GEYDAIILA

SEQ ID NO: 22779 - protein, 8 aa, Artificial sequence
  Protein classification predicting sequence
IILAAAGL

SEQ ID NO: 22780 - protein, 7 aa, Artificial sequence
  Protein classification predicting sequence
AVGQGAL

SEQ ID NO: 22781 - protein, 10 aa, Artificial sequence
  Protein classification predicting sequence
AQLRALGLGL

SEQ ID NO: 22782 - protein, 7 aa, Artificial sequence
  Protein classification predicting sequence
PLRGNLD

SEQ ID NO: 22783 - protein, 20 aa, Artificial sequence
  Protein classification predicting sequence
LEPVQMLPAPAQGALAVECR

SEQ ID NO: 22784 - protein, 9 aa, Artificial sequence
  Protein classification predicting sequence
LEAGCTAPV

SEQ ID NO: 22785 - protein, 8 aa, Artificial sequence
  Protein classification predicting sequence
EELSLRGC

SEQ ID NO: 22786 - protein, 7 aa, Artificial sequence
  Protein classification predicting sequence
VIPEGLT

SEQ ID NO: 22787 - protein, 12 aa, Artificial sequence
  Protein classification predicting sequence
GTSSLRRGAQIL

SEQ ID NO: 22788 - protein, 7 aa, Artificial sequence
  Protein classification predicting sequence
KWIRGNI

SEQ ID NO: 22789 - protein, 8 aa, Artificial sequence
  Protein classification predicting sequence
IVTKGDRI

SEQ ID NO: 22790 - protein, 8 aa, Artificial sequence
  Protein classification predicting sequence
AGLQRMGW

SEQ ID NO: 22791 - protein, 11 aa, Artificial sequence
  Protein classification predicting sequence
GAVVGTSSLRR

SEQ ID NO: 22792 - protein, 8 aa, Artificial sequence
  Protein classification predicting sequence
LPAVGQGA

SEQ ID NO: 22793 - protein, 10 aa, Artificial sequence
  Protein classification predicting sequence
GLGLVTICER

SEQ ID NO: 22794 - protein, 15 aa, Artificial sequence
  Protein classification predicting sequence
SLPAVGQGAVGIECR

SEQ ID NO: 22795 - protein, 6 aa, Artificial sequence
  Protein classification predicting sequence
AERAMN

SEQ ID NO: 22796 - protein, 14 aa, Artificial sequence
  Protein classification predicting sequence
ELEGGCQVPIGVNS

SEQ ID NO: 22797 - protein, 27 aa, Artificial sequence
  Protein classification predicting sequence
GDIILDTPLAKVGGKGLFVKELELALL

SEQ ID NO: 22798 - protein, 8 aa, Artificial sequence
  Protein classification predicting sequence
SLRRQCQL

SEQ ID NO: 22799 - protein, 9 aa, Artificial sequence
  Protein classification predicting sequence
LRGNVGTRL

SEQ ID NO: 22800 - protein, 9 aa, Artificial sequence
  Protein classification predicting sequence
GQGALGIEC

SEQ ID NO: 22801 - protein, 17 aa, Artificial sequence
  Protein classification predicting sequence
TICEREDPRDAFVSNTY

SEQ ID NO: 22802 - protein, 11 aa, Artificial sequence
  Protein classification predicting sequence
YDAIILAAAGL

SEQ ID NO: 22803 - protein, 10 aa, Artificial sequence
  Protein classification predicting sequence
GQGAVGIECR

SEQ ID NO: 22804 - protein, 9 aa, Artificial sequence
  Protein classification predicting sequence
VGTSSLRRQ

SEQ ID NO: 22805 - protein, 15 aa, Artificial sequence
  Protein classification predicting sequence
LAKVGGKGLFVKELE

SEQ ID NO: 22806 - protein, 9 aa, Artificial sequence
  Protein classification predicting sequence
GRADLAVHS

SEQ ID NO: 22807 - protein, 7 aa, Artificial sequence
  Protein classification predicting sequence
TRLSKLD

SEQ ID NO: 22808 - protein, 38 aa, Artificial sequence
  Protein classification predicting sequence
LPAGSIVGTSSLRRQCQLAERRPDLIIRSLRGNVGTRL

SEQ ID NO: 22809 - protein, 21 aa, Artificial sequence
  Protein classification predicting sequence
YDAIILAVAGLKRLGLESRIR

SEQ ID NO: 22810 - protein, 28 aa, Artificial sequence
  Protein classification predicting sequence
TALRVTAERAMNTRLEGGCQVPIGSYAE

SEQ ID NO: 22811 - protein, 8 aa, Artificial sequence
  Protein classification predicting sequence
TKGDVILD

SEQ ID NO: 22812 - protein, 9 aa, Artificial sequence
  Protein classification predicting sequence
AVHSMKDVP

SEQ ID NO: 22813 - protein, 18 aa, Artificial sequence
  Protein classification predicting sequence
AERAMNTRLEGGCQVPIG

SEQ ID NO: 22814 - protein, 10 aa, Artificial sequence
  Protein classification predicting sequence
LEGGCQVPIG

SEQ ID NO: 22815 - protein, 49 aa, Artificial sequence
  Protein classification predicting sequence
ALVGAPDGSQIIRGERRGAPQDAEQMGISLAEELLNNGAREILAEVYNG

SEQ ID NO: 22816 - protein, 13 aa, Artificial sequence
  Protein classification predicting sequence
VGSRRSKLALTQS

SEQ ID NO: 22817 - protein, 21 aa, Artificial sequence
  Protein classification predicting sequence
VGSRRSKLALTQSQQFIDKLK

SEQ ID NO: 22818 - protein, 20 aa, Artificial sequence
  Protein classification predicting sequence
IVDKQLSKVGGKGLFVKEIQ

SEQ ID NO: 22819 - protein, 13 aa, Artificial sequence
  Protein classification predicting sequence
IDMAIHSLKDVPS

SEQ ID NO: 22820 - protein, 11 aa, Artificial sequence
  Protein classification predicting sequence
GLTLGCIPDRE

SEQ ID NO: 22821 - protein, 6 aa, Artificial sequence
  Protein classification predicting sequence
CVTAER

SEQ ID NO: 22822 - protein, 9 aa, Artificial sequence
  Protein classification predicting sequence
CVTAERTFL

SEQ ID NO: 22823 - protein, 8 aa, Artificial sequence
  Protein classification predicting sequence
IEFTGLIM

SEQ ID NO: 22824 - protein, 8 aa, Artificial sequence
  Protein classification predicting sequence
GAVVGTSS

SEQ ID NO: 22825 - protein, 6 aa, Artificial sequence
  Protein classification predicting sequence
IRIATR

SEQ ID NO: 22826 - protein, 11 aa, Artificial sequence
  Protein classification predicting sequence
GGCQVPIGSYA

SEQ ID NO: 22827 - protein, 16 aa, Artificial sequence
  Protein classification predicting sequence
GGCQVPIGSYALLEGD

SEQ ID NO: 22828 - protein, 8 aa, Artificial sequence
  Protein classification predicting sequence
IWLRALVG

SEQ ID NO: 22829 - protein, 13 aa, Artificial sequence
  Protein classification predicting sequence
IWLRALVGEPDGS

SEQ ID NO: 22830 - protein, 9 aa, Artificial sequence
  Protein classification predicting sequence
GGKGLFTKE

SEQ ID NO: 22831 - protein, 7 aa, Artificial sequence
  Protein classification predicting sequence
SPLALWQ

SEQ ID NO: 22832 - protein, 7 aa, Artificial sequence
  Protein classification predicting sequence
PAPGQGA

SEQ ID NO: 22833 - protein, 10 aa, Artificial sequence
  Protein classification predicting sequence
AVGQGALGIE

SEQ ID NO: 22834 - protein, 14 aa, Artificial sequence
  Protein classification predicting sequence
RIATRQSPLALWQA

SEQ ID NO: 22835 - protein, 17 aa, Artificial sequence
  Protein classification predicting sequence
RIATRQSPLALWQAHYV

SEQ ID NO: 22836 - protein, 12 aa, Artificial sequence
  Protein classification predicting sequence
LYSLNMLVQTEG

SEQ ID NO: 22837 - protein, 8 aa, Artificial sequence
  Protein classification predicting sequence
PEADLYIL

SEQ ID NO: 22838 - protein, 6 aa, Artificial sequence
  Protein classification predicting sequence
LWICME

SEQ ID NO: 22839 - protein, 12 aa, Artificial sequence
  Protein classification predicting sequence
MEYCGAGSVSDI

SEQ ID NO: 22840 - protein, 8 aa, Artificial sequence
  Protein classification predicting sequence
NILLNTEG

SEQ ID NO: 22841 - protein, 34 aa, Artificial sequence
  Protein classification predicting sequence
AKLADFGVAGQLTDTMAKRNTVIGTPFWMAPEVI

SEQ ID NO: 22842 - protein, 11 aa, Artificial sequence
  Protein classification predicting sequence
GTPFWMAPEVI

SEQ ID NO: 22843 - protein, 7 aa, Artificial sequence
  Protein classification predicting sequence
WMAPEVI

SEQ ID NO: 22844 - protein, 9 aa, Artificial sequence
  Protein classification predicting sequence
EMAEGKPPY

SEQ ID NO: 22845 - protein, 11 aa, Artificial sequence
  Protein classification predicting sequence
IHPMRAIFMIP

SEQ ID NO: 22846 - protein, 14 aa, Artificial sequence
  Protein classification predicting sequence
IATKYWRLTQQFFS

SEQ ID NO: 22847 - protein, 7 aa, Artificial sequence
  Protein classification predicting sequence
VSTGRTL

SEQ ID NO: 22848 - protein, 8 aa, Artificial sequence
  Protein classification predicting sequence
ELAPLVGL

SEQ ID NO: 22849 - protein, 6 aa, Artificial sequence
  Protein classification predicting sequence
KRIATS

SEQ ID NO: 22850 - protein, 7 aa, Artificial sequence
  Protein classification predicting sequence
KGRILDD

SEQ ID NO: 22851 - protein, 18 aa, Artificial sequence
  Protein classification predicting sequence
KGEDVEIIKIEGSVEIAP

SEQ ID NO: 22852 - protein, 6 aa, Artificial sequence
  Protein classification predicting sequence
TYVEHG

SEQ ID NO: 22853 - protein, 7 aa, Artificial sequence
  Protein classification predicting sequence
TLKENGL

SEQ ID NO: 22854 - protein, 6 aa, Artificial sequence
  Protein classification predicting sequence
IATSYP

SEQ ID NO: 22855 - protein, 9 aa, Artificial sequence
  Protein classification predicting sequence
ILVLPIEKM

SEQ ID NO: 22856 - protein, 7 aa, Artificial sequence
  Protein classification predicting sequence
RIATSYP

SEQ ID NO: 22857 - protein, 15 aa, Artificial sequence
  Protein classification predicting sequence
RIQGVIQARESKYIM

SEQ ID NO: 22858 - protein, 14 aa, Artificial sequence
  Protein classification predicting sequence
LGFGHADVVVAVPE

SEQ ID NO: 22859 - protein, 9 aa, Artificial sequence
  Protein classification predicting sequence
VRDDDIPGL

SEQ ID NO: 22860 - protein, 7 aa, Artificial sequence
  Protein classification predicting sequence
CGIKINL

SEQ ID NO: 22861 - protein, 12 aa, Artificial sequence
  Protein classification predicting sequence
VRDDDIPGLVMD

SEQ ID NO: 22862 - protein, 11 aa, Artificial sequence
  Protein classification predicting sequence
RIATSYPHLLK

SEQ ID NO: 22863 - protein, 13 aa, Artificial sequence
  Protein classification predicting sequence
RIATSYPHLLKRY

SEQ ID NO: 22864 - protein, 6 aa, Artificial sequence
  Protein classification predicting sequence
GAERPT

SEQ ID NO: 22865 - protein, 6 aa, Artificial sequence
  Protein classification predicting sequence
ENMPID

SEQ ID NO: 22866 - protein, 7 aa, Artificial sequence
  Protein classification predicting sequence
RSKACLI

SEQ ID NO: 22867 - protein, 6 aa, Artificial sequence
  Protein classification predicting sequence
CRLSLA

SEQ ID NO: 22868 - protein, 21 aa, Artificial sequence
  Protein classification predicting sequence
DAICDLVSTGATLEANGLREV

SEQ ID NO: 22869 - protein, 18 aa, Artificial sequence
  Protein classification predicting sequence
RVAMHMVSSETLFWETME

SEQ ID NO: 22870 - protein, 16 aa, Artificial sequence
  Protein classification predicting sequence
APLTLALSKGRIFEET

SEQ ID NO: 22871 - protein, 11 aa, Artificial sequence
  Protein classification predicting sequence
ALSKGRIFEET

SEQ ID NO: 22872 - protein, 8 aa, Artificial sequence
  Protein classification predicting sequence
SRKLILPT

SEQ ID NO: 22873 - protein, 10 aa, Artificial sequence
  Protein classification predicting sequence
LYQPIDLNIA

SEQ ID NO: 22874 - protein, 9 aa, Artificial sequence
  Protein classification predicting sequence
GSVEVAPRA

SEQ ID NO: 22875 - protein, 11 aa, Artificial sequence
  Protein classification predicting sequence
ICDLVSSGATL

SEQ ID NO: 22876 - protein, 7 aa, Artificial sequence
  Protein classification predicting sequence
LFWETME

SEQ ID NO: 22877 - protein, 7 aa, Artificial sequence
  Protein classification predicting sequence
DAIVDLV

SEQ ID NO: 22878 - protein, 10 aa, Artificial sequence
  Protein classification predicting sequence
ENPESSRKLI

SEQ ID NO: 22879 - protein, 22 aa, Artificial sequence
  Protein classification predicting sequence
IVRASDVPTYVQYGAADLGIAG

SEQ ID NO: 22880 - protein, 12 aa, Artificial sequence
  Protein classification predicting sequence
DVEIIKIEGSVE

SEQ ID NO: 22881 - protein, 8 aa, Artificial sequence
  Protein classification predicting sequence
ISARMIVN

SEQ ID NO: 22882 - protein, 15 aa, Artificial sequence
  Protein classification predicting sequence
VEFFFLRPKDIAIYV

SEQ ID NO: 22883 - protein, 7 aa, Artificial sequence
  Protein classification predicting sequence
SARLIVN

SEQ ID NO: 22884 - protein, 9 aa, Artificial sequence
  Protein classification predicting sequence
LNGSVEVAP

SEQ ID NO: 22885 - protein, 10 aa, Artificial sequence
  Protein classification predicting sequence
ESKYIMLHAP

SEQ ID NO: 22886 - protein, 7 aa, Artificial sequence
  Protein classification predicting sequence
PTILPLA

SEQ ID NO: 22887 - protein, 10 aa, Artificial sequence
  Protein classification predicting sequence
DAIVDIVETG

SEQ ID NO: 22888 - protein, 7 aa, Artificial sequence
  Protein classification predicting sequence
DVATYVE

SEQ ID NO: 22889 - protein, 8 aa, Artificial sequence
  Protein classification predicting sequence
IVDLVSTG

SEQ ID NO: 22890 - protein, 6 aa, Artificial sequence
  Protein classification predicting sequence
IATKYP

SEQ ID NO: 22891 - protein, 11 aa, Artificial sequence
  Protein classification predicting sequence
LDFGITGRDLV

SEQ ID NO: 22892 - protein, 6 aa, Artificial sequence
  Protein classification predicting sequence
AVPNKG

SEQ ID NO: 22893 - protein, 17 aa, Artificial sequence
  Protein classification predicting sequence
LVAFGEPLCDSEAVLIE

SEQ ID NO: 22894 - protein, 18 aa, Artificial sequence
  Protein classification predicting sequence
QGVVFGQQYLMLDYDCPR

SEQ ID NO: 22895 - protein, 22 aa, Artificial sequence
  Protein classification predicting sequence
KGVHVDIIKLYGSMELAPLVGL

SEQ ID NO: 22896 - protein, 9 aa, Artificial sequence
  Protein classification predicting sequence
VNKAALKTK

SEQ ID NO: 22897 - protein, 9 aa, Artificial sequence
  Protein classification predicting sequence
SRKLIIGTN

SEQ ID NO: 22898 - protein, 14 aa, Artificial sequence
  Protein classification predicting sequence
DVPTYVQYGAADLG

SEQ ID NO: 22899 - protein, 8 aa, Artificial sequence
  Protein classification predicting sequence
IVDIVETG

SEQ ID NO: 22900 - protein, 7 aa, Artificial sequence
  Protein classification predicting sequence
LRRLDFG

SEQ ID NO: 22901 - protein, 7 aa, Artificial sequence
  Protein classification predicting sequence
AENMPID

SEQ ID NO: 22902 - protein, 12 aa, Artificial sequence
  Protein classification predicting sequence
PRYFTLRRLDFG

SEQ ID NO: 22903 - protein, 41 aa, Artificial sequence
  Protein classification predicting sequence
FKSCLLNGSVEVAPRAGLADAICDLVSTGATLEANGLREVE

SEQ ID NO: 22904 - protein, 15 aa, Artificial sequence
  Protein classification predicting sequence
IYRSKACLIQRDGEM

SEQ ID NO: 22905 - protein, 6 aa, Artificial sequence
  Protein classification predicting sequence
GKRIAT

SEQ ID NO: 22906 - protein, 11 aa, Artificial sequence
  Protein classification predicting sequence
GKRIATTYPQL

SEQ ID NO: 22907 - protein, 14 aa, Artificial sequence
  Protein classification predicting sequence
DLVSTGATLEANGL

SEQ ID NO: 22908 - protein, 14 aa, Artificial sequence
  Protein classification predicting sequence
LLPGAEDPTVLPLS

SEQ ID NO: 22909 - protein, 11 aa, Artificial sequence
  Protein classification predicting sequence
GSVELGPITGM

SEQ ID NO: 22910 - protein, 15 aa, Artificial sequence
  Protein classification predicting sequence
VDIIKLYGSMELAPL

SEQ ID NO: 22911 - protein, 7 aa, Artificial sequence
  Protein classification predicting sequence
GSIELAP

SEQ ID NO: 22912 - protein, 8 aa, Artificial sequence
  Protein classification predicting sequence
TGEDLVRE

SEQ ID NO: 22913 - protein, 7 aa, Artificial sequence
  Protein classification predicting sequence
VETGSTL

SEQ ID NO: 22914 - protein, 8 aa, Artificial sequence
  Protein classification predicting sequence
GATEGAPA

SEQ ID NO: 22915 - protein, 25 aa, Artificial sequence
  Protein classification predicting sequence
TLRRLDFGGCRLSLATPVDEAWDGP

SEQ ID NO: 22916 - protein, 9 aa, Artificial sequence
  Protein classification predicting sequence
GKRIATSYP

SEQ ID NO: 22917 - protein, 20 aa, Artificial sequence
  Protein classification predicting sequence
GKRIATSYPHLLKRYLDQKG

SEQ ID NO: 22918 - protein, 15 aa, Artificial sequence
  Protein classification predicting sequence
DRLLFAVPKKGRLYE

SEQ ID NO: 22919 - protein, 10 aa, Artificial sequence
  Protein classification predicting sequence
GSVEASCALG

SEQ ID NO: 22920 - protein, 7 aa, Artificial sequence
  Protein classification predicting sequence
ARESKYI

SEQ ID NO: 22921 - protein, 6 aa, Artificial sequence
  Protein classification predicting sequence
PIEKMM

SEQ ID NO: 22922 - protein, 8 aa, Artificial sequence
  Protein classification predicting sequence
ATSYVHTA

SEQ ID NO: 22923 - protein, 7 aa, Artificial sequence
  Protein classification predicting sequence
CVVDMVD

SEQ ID NO: 22924 - protein, 7 aa, Artificial sequence
  Protein classification predicting sequence
DAIVDIV

SEQ ID NO: 22925 - protein, 9 aa, Artificial sequence
  Protein classification predicting sequence
WVAVRAMVP

SEQ ID NO: 22926 - protein, 8 aa, Artificial sequence
  Protein classification predicting sequence
GKDVLIEH

SEQ ID NO: 22927 - protein, 8 aa, Artificial sequence
  Protein classification predicting sequence
KGEDVEII

SEQ ID NO: 22928 - protein, 7 aa, Artificial sequence
  Protein classification predicting sequence
GSVEIAP

SEQ ID NO: 22929 - protein, 6 aa, Artificial sequence
  Protein classification predicting sequence
DVPTYV

SEQ ID NO: 22930 - protein, 7 aa, Artificial sequence
  Protein classification predicting sequence
HGVADIG

SEQ ID NO: 22931 - protein, 15 aa, Artificial sequence
  Protein classification predicting sequence
DVPTYVEHGAADLGV

SEQ ID NO: 22932 - protein, 9 aa, Artificial sequence
  Protein classification predicting sequence
ARLIVNKAS

SEQ ID NO: 22933 - protein, 7 aa, Artificial sequence
  Protein classification predicting sequence
VNKASMK

SEQ ID NO: 22934 - protein, 7 aa, Artificial sequence
  Protein classification predicting sequence
GENVLEE

SEQ ID NO: 22935 - protein, 8 aa, Artificial sequence
  Protein classification predicting sequence
DFGGCRLS

SEQ ID NO: 22936 - protein, 39 aa, Artificial sequence
  Protein classification predicting sequence
FSTCMLTGSVEVAPRAGLADAIADLVSTGATLEANGLKE

SEQ ID NO: 22937 - protein, 10 aa, Artificial sequence
  Protein classification predicting sequence
VRDDDIPGLI

SEQ ID NO: 22938 - protein, 8 aa, Artificial sequence
  Protein classification predicting sequence
RLRIAIQK

SEQ ID NO: 22939 - protein, 7 aa, Artificial sequence
  Protein classification predicting sequence
PKKGRLY

SEQ ID NO: 22940 - protein, 20 aa, Artificial sequence
  Protein classification predicting sequence
DPRYFTLRRLDFGGCRLSLA

SEQ ID NO: 22941 - protein, 20 aa, Artificial sequence
  Protein classification predicting sequence
TRIQGVIQARESKYIMMHAP

SEQ ID NO: 22942 - protein, 6 aa, Artificial sequence
  Protein classification predicting sequence
GNGSDE

SEQ ID NO: 22943 - protein, 7 aa, Artificial sequence
  Protein classification predicting sequence
DEAYVDF

SEQ ID NO: 22944 - protein, 7 aa, Artificial sequence
  Protein classification predicting sequence
LRITVGT

SEQ ID NO: 22945 - protein, 9 aa, Artificial sequence
  Protein classification predicting sequence
PYVPGEQPK

SEQ ID NO: 22946 - protein, 7 aa, Artificial sequence
  Protein classification predicting sequence
LRLYPDP

SEQ ID NO: 22947 - protein, 7 aa, Artificial sequence
  Protein classification predicting sequence
NPNAPTG

SEQ ID NO: 22948 - protein, 8 aa, Artificial sequence
  Protein classification predicting sequence
ANFVFARH

SEQ ID NO: 22949 - protein, 12 aa, Artificial sequence
  Protein classification predicting sequence
VFIANPANPTGT

SEQ ID NO: 22950 - protein, 6 aa, Artificial sequence
  Protein classification predicting sequence
WLNANE

SEQ ID NO: 22951 - protein, 11 aa, Artificial sequence
  Protein classification predicting sequence
VFVCSPNNPTG

SEQ ID NO: 22952 - protein, 7 aa, Artificial sequence
  Protein classification predicting sequence
KVIAPYP

SEQ ID NO: 22953 - protein, 7 aa, Artificial sequence
  Protein classification predicting sequence
YSFYPVY

SEQ ID NO: 22954 - protein, 7 aa, Artificial sequence
  Protein classification predicting sequence
KNSFNSY

SEQ ID NO: 22955 - protein, 6 aa, Artificial sequence
  Protein classification predicting sequence
IRAFCE

SEQ ID NO: 22956 - protein, 8 aa, Artificial sequence
  Protein classification predicting sequence
GNYLLVKF

SEQ ID NO: 22957 - protein, 9 aa, Artificial sequence
  Protein classification predicting sequence
LWDQGIILR

SEQ ID NO: 22958 - protein, 7 aa, Artificial sequence
  Protein classification predicting sequence
LAGLRVG

SEQ ID NO: 22959 - protein, 11 aa, Artificial sequence
  Protein classification predicting sequence
QARIDQFLRIT

SEQ ID NO: 22960 - protein, 8 aa, Artificial sequence
  Protein classification predicting sequence
DEAYQPFA

SEQ ID NO: 22961 - protein, 7 aa, Artificial sequence
  Protein classification predicting sequence
VMRTVSK

SEQ ID NO: 22962 - protein, 9 aa, Artificial sequence
  Protein classification predicting sequence
PGVTVFPSA

SEQ ID NO: 22963 - protein, 6 aa, Artificial sequence
  Protein classification predicting sequence
PSAANF

SEQ ID NO: 22964 - protein, 7 aa, Artificial sequence
  Protein classification predicting sequence
YGLAGLR

SEQ ID NO: 22965 - protein, 10 aa, Artificial sequence
  Protein classification predicting sequence
YGFPNALRMT

SEQ ID NO: 22966 - protein, 8 aa, Artificial sequence
  Protein classification predicting sequence
KLVFLCSP

SEQ ID NO: 22967 - protein, 7 aa, Artificial sequence
  Protein classification predicting sequence
SKAYGLA

SEQ ID NO: 22968 - protein, 8 aa, Artificial sequence
  Protein classification predicting sequence
PYQPGKPI

SEQ ID NO: 22969 - protein, 7 aa, Artificial sequence
  Protein classification predicting sequence
LGNGSND

SEQ ID NO: 22970 - protein, 8 aa, Artificial sequence
  Protein classification predicting sequence
RQPFNVNS

SEQ ID NO: 22971 - protein, 9 aa, Artificial sequence
  Protein classification predicting sequence
VKLASNENP

SEQ ID NO: 22972 - protein, 6 aa, Artificial sequence
  Protein classification predicting sequence
NENPYG

SEQ ID NO: 22973 - protein, 8 aa, Artificial sequence
  Protein classification predicting sequence
NRVRQPFN

SEQ ID NO: 22974 - protein, 9 aa, Artificial sequence
  Protein classification predicting sequence
GLAGLRVGY

SEQ ID NO: 22975 - protein, 12 aa, Artificial sequence
  Protein classification predicting sequence
GVAKVYKLSSNE

SEQ ID NO: 22976 - protein, 7 aa, Artificial sequence
  Protein classification predicting sequence
SNENPLG

SEQ ID NO: 22977 - protein, 13 aa, Artificial sequence
  Protein classification predicting sequence
GYGFPNALRMTVG

SEQ ID NO: 22978 - protein, 7 aa, Artificial sequence
  Protein classification predicting sequence
GFEVLPS

SEQ ID NO: 22979 - protein, 7 aa, Artificial sequence
  Protein classification predicting sequence
LNTNENP

SEQ ID NO: 22980 - protein, 6 aa, Artificial sequence
  Protein classification predicting sequence
RLYPDP

SEQ ID NO: 22981 - protein, 7 aa, Artificial sequence
  Protein classification predicting sequence
NLLVVQT

SEQ ID NO: 22982 - protein, 12 aa, Artificial sequence
  Protein classification predicting sequence
LVLDAAYAEYVR

SEQ ID NO: 22983 - protein, 7 aa, Artificial sequence
  Protein classification predicting sequence
VRLPFNV

SEQ ID NO: 22984 - protein, 8 aa, Artificial sequence
  Protein classification predicting sequence
LVVLDEAY

SEQ ID NO: 22985 - protein, 8 aa, Artificial sequence
  Protein classification predicting sequence
CNPNNPTG

SEQ ID NO: 22986 - protein, 6 aa, Artificial sequence
  Protein classification predicting sequence
PSQTNF

SEQ ID NO: 22987 - protein, 6 aa, Artificial sequence
  Protein classification predicting sequence
PTYGMY

SEQ ID NO: 22988 - protein, 7 aa, Artificial sequence
  Protein classification predicting sequence
KLASNEN

SEQ ID NO: 22989 - protein, 7 aa, Artificial sequence
  Protein classification predicting sequence
DEAYVEF

SEQ ID NO: 22990 - protein, 7 aa, Artificial sequence
  Protein classification predicting sequence
RTMSKAF

SEQ ID NO: 22991 - protein, 8 aa, Artificial sequence
  Protein classification predicting sequence
NRYPECQP

SEQ ID NO: 22992 - protein, 7 aa, Artificial sequence
  Protein classification predicting sequence
DEAYIDF

SEQ ID NO: 22993 - protein, 7 aa, Artificial sequence
  Protein classification predicting sequence
SARRIGG

SEQ ID NO: 22994 - protein, 10 aa, Artificial sequence
  Protein classification predicting sequence
AFCEPGKDAI

SEQ ID NO: 22995 - protein, 7 aa, Artificial sequence
  Protein classification predicting sequence
RCGFTLA

SEQ ID NO: 22996 - protein, 8 aa, Artificial sequence
  Protein classification predicting sequence
LAGLRCGF

SEQ ID NO: 22997 - protein, 6 aa, Artificial sequence
  Protein classification predicting sequence
PYQSAR

SEQ ID NO: 22998 - protein, 5 aa, Artificial sequence
  Protein classification predicting sequence
CPPTY

SEQ ID NO: 22999 - protein, 9 aa, Artificial sequence
  Protein classification predicting sequence
TVFPSAGNF

SEQ ID NO: 23000 - protein, 7 aa, Artificial sequence
  Protein classification predicting sequence
GNFLLVR

SEQ ID NO: 23001 - protein, 8 aa, Artificial sequence
  Protein classification predicting sequence
CPPTYGMY

SEQ ID NO: 23002 - protein, 7 aa, Artificial sequence
  Protein classification predicting sequence
NLIVLRT

SEQ ID NO: 23003 - protein, 11 aa, Artificial sequence
  Protein classification predicting sequence
LDLPATLAAIE

SEQ ID NO: 23004 - protein, 7 aa, Artificial sequence
  Protein classification predicting sequence
KVRPPYN

SEQ ID NO: 23005 - protein, 12 aa, Artificial sequence
  Protein classification predicting sequence
VFVGNGSDEVLA

SEQ ID NO: 23006 - protein, 8 aa, Artificial sequence
  Protein classification predicting sequence
WAANGSNE

SEQ ID NO: 23007 - protein, 8 aa, Artificial sequence
  Protein classification predicting sequence
PSYSMHPI

SEQ ID NO: 23008 - protein, 9 aa, Artificial sequence
  Protein classification predicting sequence
LVRLPYHLS

SEQ ID NO: 23009 - protein, 6 aa, Artificial sequence
  Protein classification predicting sequence
VVDEAY

SEQ ID NO: 23010 - protein, 6 aa, Artificial sequence
  Protein classification predicting sequence
GPSPKA

SEQ ID NO: 23011 - protein, 10 aa, Artificial sequence
  Protein classification predicting sequence
IIKLGSNENP

SEQ ID NO: 23012 - protein, 7 aa, Artificial sequence
  Protein classification predicting sequence
RPPFNVT

SEQ ID NO: 23013 - protein, 6 aa, Artificial sequence
  Protein classification predicting sequence
EAYIDF

SEQ ID NO: 23014 - protein, 8 aa, Artificial sequence
  Protein classification predicting sequence
SKSRSLAG

SEQ ID NO: 23015 - protein, 10 aa, Artificial sequence
  Protein classification predicting sequence
RTFSKAYGLA

SEQ ID NO: 23016 - protein, 6 aa, Artificial sequence
  Protein classification predicting sequence
CSPNNP

SEQ ID NO: 23017 - protein, 8 aa, Artificial sequence
  Protein classification predicting sequence
KLASNENP

SEQ ID NO: 23018 - protein, 9 aa, Artificial sequence
  Protein classification predicting sequence
LLKRGVIVR

SEQ ID NO: 23019 - protein, 7 aa, Artificial sequence
  Protein classification predicting sequence
RVGYGIA

SEQ ID NO: 23020 - protein, 9 aa, Artificial sequence
  Protein classification predicting sequence
LRGKSPYGA

SEQ ID NO: 23021 - protein, 10 aa, Artificial sequence
  Protein classification predicting sequence
ALVDDVVRSV

SEQ ID NO: 23022 - protein, 11 aa, Artificial sequence
  Protein classification predicting sequence
IVDEAYGEFSS

SEQ ID NO: 23023 - protein, 19 aa, Artificial sequence
  Protein classification predicting sequence
SKAFAFAGGRLGYLIATPA

SEQ ID NO: 23024 - protein, 16 aa, Artificial sequence
  Protein classification predicting sequence
MGFRVIPSDANFVLFG

SEQ ID NO: 23025 - protein, 8 aa, Artificial sequence
  Protein classification predicting sequence
VLPSAANF

SEQ ID NO: 23026 - protein, 12 aa, Artificial sequence
  Protein classification predicting sequence
LERVKNSFNSYP

SEQ ID NO: 23027 - protein, 7 aa, Artificial sequence
  Protein classification predicting sequence
DEAYIEF

SEQ ID NO: 23028 - protein, 7 aa, Artificial sequence
  Protein classification predicting sequence
VVVDEAY

SEQ ID NO: 23029 - protein, 9 aa, Artificial sequence
  Protein classification predicting sequence
GDVWLNANE

SEQ ID NO: 23030 - protein, 16 aa, Artificial sequence
  Protein classification predicting sequence
VCSPNNPTGQLINPQD

SEQ ID NO: 23031 - protein, 13 aa, Artificial sequence
  Protein classification predicting sequence
VFDSETNYILARF

SEQ ID NO: 23032 - protein, 32 aa, Artificial sequence
  Protein classification predicting sequence
IRAFCEPGKDAILYCPPTYGMYSVSAETIGVE

SEQ ID NO: 23033 - protein, 26 aa, Artificial sequence
  Protein classification predicting sequence
RTLLELTRGKAIVVADEAYIEFCPQA

SEQ ID NO: 23034 - protein, 29 aa, Artificial sequence
  Protein classification predicting sequence
ILRTLSKAFALAGLRCGFTLANEEVINLL

SEQ ID NO: 23035 - protein, 32 aa, Artificial sequence
  Protein classification predicting sequence
VFKSLWDQGIILRDQNKQPSLSGCLRITVGTR

SEQ ID NO: 23036 - protein, 6 aa, Artificial sequence
  Protein classification predicting sequence
SRGADE

SEQ ID NO: 23037 - protein, 8 aa, Artificial sequence
  Protein classification predicting sequence
DEAIELLI

SEQ ID NO: 23038 - protein, 9 aa, Artificial sequence
  Protein classification predicting sequence
IELLIRAFC

SEQ ID NO: 23039 - protein, 6 aa, Artificial sequence
  Protein classification predicting sequence
VIAPYP

SEQ ID NO: 23040 - protein, 10 aa, Artificial sequence
  Protein classification predicting sequence
HLDELYYYPE

SEQ ID NO: 23041 - protein, 21 aa, Artificial sequence
  Protein classification predicting sequence
SRILFGAGLDEVILMISRAVL

SEQ ID NO: 23042 - protein, 14 aa, Artificial sequence
  Protein classification predicting sequence
TFGQYYHNAIVESA

SEQ ID NO: 23043 - protein, 13 aa, Artificial sequence
  Protein classification predicting sequence
VIQVPLKDGGFDL

SEQ ID NO: 23044 - protein, 23 aa, Artificial sequence
  Protein classification predicting sequence
DNAFLLRTFSKAYGLAGLRVGYV

SEQ ID NO: 23045 - protein, 22 aa, Artificial sequence
  Protein classification predicting sequence
AIEKWNIIRPPFNVTRISEYAA

SEQ ID NO: 23046 - protein, 10 aa, Artificial sequence
  Protein classification predicting sequence
ALLNVGCITR

SEQ ID NO: 23047 - protein, 8 aa, Artificial sequence
  Protein classification predicting sequence
RYPDRDAV

SEQ ID NO: 23048 - protein, 6 aa, Artificial sequence
  Protein classification predicting sequence
PSYSMH

SEQ ID NO: 23049 - protein, 7 aa, Artificial sequence
  Protein classification predicting sequence
RTLSKAF

SEQ ID NO: 23050 - protein, 9 aa, Artificial sequence
  Protein classification predicting sequence
RVGYVVASE

SEQ ID NO: 23051 - protein, 8 aa, Artificial sequence
  Protein classification predicting sequence
ILVRNFSN

SEQ ID NO: 23052 - protein, 12 aa, Artificial sequence
  Protein classification predicting sequence
LTPYLSARRIGG

SEQ ID NO: 23053 - protein, 19 aa, Artificial sequence
  Protein classification predicting sequence
VKLVFVCSPNNPTGNLVKR

SEQ ID NO: 23054 - protein, 12 aa, Artificial sequence
  Protein classification predicting sequence
ANRAYLQVGLSM

SEQ ID NO: 23055 - protein, 8 aa, Artificial sequence
  Protein classification predicting sequence
SAETIGVE

SEQ ID NO: 23056 - protein, 23 aa, Artificial sequence
  Protein classification predicting sequence
DAILYCPPTYGMYSVSAETIGVE

SEQ ID NO: 23057 - protein, 7 aa, Artificial sequence
  Protein classification predicting sequence
LRTLSKA

SEQ ID NO: 23058 - protein, 6 aa, Artificial sequence
  Protein classification predicting sequence
LRITIG

SEQ ID NO: 23059 - protein, 9 aa, Artificial sequence
  Protein classification predicting sequence
VCSPNNPTG

SEQ ID NO: 23060 - protein, 15 aa, Artificial sequence
  Protein classification predicting sequence
LWDQGIILRDQNKQP

SEQ ID NO: 23061 - protein, 8 aa, Artificial sequence
  Protein classification predicting sequence
FPSQYVDQ

SEQ ID NO: 23062 - protein, 24 aa, Artificial sequence
  Protein classification predicting sequence
GLGQARMGFCTDREDINSLCLTVV

SEQ ID NO: 23063 - protein, 11 aa, Artificial sequence
  Protein classification predicting sequence
EDINSLCLTVV

SEQ ID NO: 23064 - protein, 7 aa, Artificial sequence
  Protein classification predicting sequence
DKSKSVK

SEQ ID NO: 23065 - protein, 6 aa, Artificial sequence
  Protein classification predicting sequence
ARPTGG

SEQ ID NO: 23066 - protein, 10 aa, Artificial sequence
  Protein classification predicting sequence
VKLEDTYFDR

SEQ ID NO: 23067 - protein, 22 aa, Artificial sequence
  Protein classification predicting sequence
CWPKDVGIVALEIYFPSQYVDQ

SEQ ID NO: 23068 - protein, 19 aa, Artificial sequence
  Protein classification predicting sequence
ELEKYDGVDAGKYTIGLGQ

SEQ ID NO: 23069 - protein, 12 aa, Artificial sequence
  Protein classification predicting sequence
LMQLFEESGNTD

SEQ ID NO: 23070 - protein, 7 aa, Artificial sequence
  Protein classification predicting sequence
AQWQKEG

SEQ ID NO: 23071 - protein, 21 aa, Artificial sequence
  Protein classification predicting sequence
DVKLEDTYFDRDVEKAFMKAS

SEQ ID NO: 23072 - protein, 18 aa, Artificial sequence
  Protein classification predicting sequence
VTQDATPGSALDKITASL

SEQ ID NO: 23073 - protein, 10 aa, Artificial sequence
  Protein classification predicting sequence
APDVFAENMK

SEQ ID NO: 23074 - protein, 12 aa, Artificial sequence
  Protein classification predicting sequence
THHLANYIPQCS

SEQ ID NO: 23075 - protein, 23 aa, Artificial sequence
  Protein classification predicting sequence
LFEGTWYLVRVDEKHRRTYARRP

SEQ ID NO: 23076 - protein, 12 aa, Artificial sequence
  Protein classification predicting sequence
EHIPSPAKKVPR

SEQ ID NO: 23077 - protein, 19 aa, Artificial sequence
  Protein classification predicting sequence
VAPDVFAENMKLREDTHHL

SEQ ID NO: 23078 - protein, 18 aa, Artificial sequence
  Protein classification predicting sequence
ESSSWDGRYALVVAGDIA

SEQ ID NO: 23079 - protein, 21 aa, Artificial sequence
  Protein classification predicting sequence
GNARPTGGVGAVALLIGPNAP

SEQ ID NO: 23080 - protein, 8 aa, Artificial sequence
  Protein classification predicting sequence
LEVGTETI

SEQ ID NO: 23081 - protein, 8 aa, Artificial sequence
  Protein classification predicting sequence
QCYLSALD

SEQ ID NO: 23082 - protein, 7 aa, Artificial sequence
  Protein classification predicting sequence
WPKDVGI

SEQ ID NO: 23083 - protein, 20 aa, Artificial sequence
  Protein classification predicting sequence
SGNTDIEGIDTTNACYGGTA

SEQ ID NO: 23084 - protein, 8 aa, Artificial sequence
  Protein classification predicting sequence
GNARPTGG

SEQ ID NO: 23085 - protein, 6 aa, Artificial sequence
  Protein classification predicting sequence
YDFYKP

SEQ ID NO: 23086 - protein, 16 aa, Artificial sequence
  Protein classification predicting sequence
SEYPIVDGKLSIQCYL

SEQ ID NO: 23087 - protein, 11 aa, Artificial sequence
  Protein classification predicting sequence
VDGKLSIQCYL

SEQ ID NO: 23088 - protein, 39 aa, Artificial sequence
  Protein classification predicting sequence
VKTVLMELFQDSGNTDIEGIDTTNACYGGTASLFNAANW

SEQ ID NO: 23089 - protein, 6 aa, Artificial sequence
  Protein classification predicting sequence
QWKQAG

SEQ ID NO: 23090 - protein, 9 aa, Artificial sequence
  Protein classification predicting sequence
MIFHTPFCK

SEQ ID NO: 23091 - protein, 7 aa, Artificial sequence
  Protein classification predicting sequence
VQKSLAR

SEQ ID NO: 23092 - protein, 19 aa, Artificial sequence
  Protein classification predicting sequence
LAGSRIGAFSYGSGLAASF

SEQ ID NO: 23093 - protein, 6 aa, Artificial sequence
  Protein classification predicting sequence
KLVQKS

SEQ ID NO: 23094 - protein, 8 aa, Artificial sequence
  Protein classification predicting sequence
SEYPVVDG

SEQ ID NO: 23095 - protein, 8 aa, Artificial sequence
  Protein classification predicting sequence
GKYTIGLG

SEQ ID NO: 23096 - protein, 8 aa, Artificial sequence
  Protein classification predicting sequence
IDKSKSVK

SEQ ID NO: 23097 - protein, 9 aa, Artificial sequence
  Protein classification predicting sequence
HAYDFYKPD

SEQ ID NO: 23098 - protein, 15 aa, Artificial sequence
  Protein classification predicting sequence
GSYGAYLADGSEYSG

SEQ ID NO: 23099 - protein, 9 aa, Artificial sequence
  Protein classification predicting sequence
AGPDLIAFE

SEQ ID NO: 23100 - protein, 8 aa, Artificial sequence
  Protein classification predicting sequence
ADGSEYSG

SEQ ID NO: 23101 - protein, 12 aa, Artificial sequence
  Protein classification predicting sequence
LLWDFLTETCNF

SEQ ID NO: 23102 - protein, 8 aa, Artificial sequence
  Protein classification predicting sequence
AKRTYREL

SEQ ID NO: 23103 - protein, 8 aa, Artificial sequence
  Protein classification predicting sequence
YRAPEIML

SEQ ID NO: 23104 - protein, 15 aa, Artificial sequence
  Protein classification predicting sequence
LNPVGMGAFGLVCSA

SEQ ID NO: 23105 - protein, 16 aa, Artificial sequence
  Protein classification predicting sequence
VLAKRTYRELKLLKHL

SEQ ID NO: 23106 - protein, 9 aa, Artificial sequence
  Protein classification predicting sequence
LVFDPKKRI

SEQ ID NO: 23107 - protein, 9 aa, Artificial sequence
  Protein classification predicting sequence
YQILRGLKY

SEQ ID NO: 23108 - protein, 15 aa, Artificial sequence
  Protein classification predicting sequence
YQILRGLKYVHSAGV

SEQ ID NO: 23109 - protein, 10 aa, Artificial sequence
  Protein classification predicting sequence
HRDLKPSNIL

SEQ ID NO: 23110 - protein, 7 aa, Artificial sequence
  Protein classification predicting sequence
ALAHPYL

SEQ ID NO: 23111 - protein, 7 aa, Artificial sequence
  Protein classification predicting sequence
VCSAIDK

SEQ ID NO: 23112 - protein, 7 aa, Artificial sequence
  Protein classification predicting sequence
KKIMKPF

SEQ ID NO: 23113 - protein, 25 aa, Artificial sequence
  Protein classification predicting sequence
DIFLSPLEDIYFVTELQGTDLHRLL

SEQ ID NO: 23114 - protein, 22 aa, Artificial sequence
  Protein classification predicting sequence
EMIEGKPLFPGKDHVHQFSIIT

SEQ ID NO: 23115 - protein, 8 aa, Artificial sequence
  Protein classification predicting sequence
TICSENTL

SEQ ID NO: 23116 - protein, 7 aa, Artificial sequence
  Protein classification predicting sequence
WSAGCIF

SEQ ID NO: 23117 - protein, 8 aa, Artificial sequence
  Protein classification predicting sequence
LKTLEEPP

SEQ ID NO: 23118 - protein, 14 aa, Artificial sequence
  Protein classification predicting sequence
GVNRVGIADTVGCA

SEQ ID NO: 23119 - protein, 11 aa, Artificial sequence
  Protein classification predicting sequence
DCEAICKLGLK

SEQ ID NO: 23120 - protein, 16 aa, Artificial sequence
  Protein classification predicting sequence
RFSSEDSFRSDLVDLL

SEQ ID NO: 23121 - protein, 15 aa, Artificial sequence
  Protein classification predicting sequence
VVSCDIECHFHNDTG

SEQ ID NO: 23122 - protein, 24 aa, Artificial sequence
  Protein classification predicting sequence
CAFTHKAGIHAKAILANPSTYEIL

SEQ ID NO: 23123 - protein, 13 aa, Artificial sequence
  Protein classification predicting sequence
TGVDGVDVVIGTS

SEQ ID NO: 23124 - protein, 8 aa, Artificial sequence
  Protein classification predicting sequence
QADFLNMA

SEQ ID NO: 23125 - protein, 11 aa, Artificial sequence
  Protein classification predicting sequence
DRAAYLQKALE

SEQ ID NO: 23126 - protein, 18 aa, Artificial sequence
  Protein classification predicting sequence
LADLPQTRLLAQSSIYET

SEQ ID NO: 23127 - protein, 8 aa, Artificial sequence
  Protein classification predicting sequence
DFMDVSSY

SEQ ID NO: 23128 - protein, 7 aa, Artificial sequence
  Protein classification predicting sequence
SSGEVKI

SEQ ID NO: 23129 - protein, 9 aa, Artificial sequence
  Protein classification predicting sequence
FVVGYGLDY

SEQ ID NO: 23130 - protein, 9 aa, Artificial sequence
  Protein classification predicting sequence
VGYGIDYAQ

SEQ ID NO: 23131 - protein, 8 aa, Artificial sequence
  Protein classification predicting sequence
GFSIPDEF

SEQ ID NO: 23132 - protein, 8 aa, Artificial sequence
  Protein classification predicting sequence
LPYIGKVI

SEQ ID NO: 23133 - protein, 10 aa, Artificial sequence
  Protein classification predicting sequence
GYDLDLFCIP

SEQ ID NO: 23134 - protein, 15 aa, Artificial sequence
  Protein classification predicting sequence
IPHGLIMDRTERLAR

SEQ ID NO: 23135 - protein, 34 aa, Artificial sequence
  Protein classification predicting sequence
MGGHHIVALCVLKGGYKFFADLLDYIKALNRNSD

SEQ ID NO: 23136 - protein, 21 aa, Artificial sequence
  Protein classification predicting sequence
PDKFVVGYALDYNEYFRDLNH

SEQ ID NO: 23137 - protein, 6 aa, Artificial sequence
  Protein classification predicting sequence
LIVEDI

SEQ ID NO: 23138 - protein, 11 aa, Artificial sequence
  Protein classification predicting sequence
EDLEKVFIPHG

SEQ ID NO: 23139 - protein, 9 aa, Artificial sequence
  Protein classification predicting sequence
VLIVEDIID

SEQ ID NO: 23140 - protein, 8 aa, Artificial sequence
  Protein classification predicting sequence
LIVEDIID

SEQ ID NO: 23141 - protein, 7 aa, Artificial sequence
  Protein classification predicting sequence
ARIAELG

SEQ ID NO: 23142 - protein, 13 aa, Artificial sequence
  Protein classification predicting sequence
VGLLRGSFMFMAD

SEQ ID NO: 23143 - protein, 10 aa, Artificial sequence
  Protein classification predicting sequence
IPDEFVVGYG

SEQ ID NO: 23144 - protein, 16 aa, Artificial sequence
  Protein classification predicting sequence
IPDEFVVGYGIDYAQR

SEQ ID NO: 23145 - protein, 8 aa, Artificial sequence
  Protein classification predicting sequence
VSSYHGGT

SEQ ID NO: 23146 - protein, 7 aa, Artificial sequence
  Protein classification predicting sequence
EDIIDTG

SEQ ID NO: 23147 - protein, 6 aa, Artificial sequence
  Protein classification predicting sequence
DKPEGR

SEQ ID NO: 23148 - protein, 7 aa, Artificial sequence
  Protein classification predicting sequence
VGFGLDY

SEQ ID NO: 23149 - protein, 26 aa, Artificial sequence
  Protein classification predicting sequence
LTGKNVLIVEDIIDTGKTMQTLLSLV

SEQ ID NO: 23150 - protein, 20 aa, Artificial sequence
  Protein classification predicting sequence
PKMVKVASLLVKRTPRSVGY

SEQ ID NO: 23151 - protein, 10 aa, Artificial sequence
  Protein classification predicting sequence
VCTLLRKPDA

SEQ ID NO: 23152 - protein, 25 aa, Artificial sequence
  Protein classification predicting sequence
YVGFDIPNDFVVGYGLDYDERYRDL

SEQ ID NO: 23153 - protein, 12 aa, Artificial sequence
  Protein classification predicting sequence
FRDLNHVCVISE

SEQ ID NO: 23154 - protein, 8 aa, Artificial sequence
  Protein classification predicting sequence
VGLLRGSF

SEQ ID NO: 23155 - protein, 9 aa, Artificial sequence
  Protein classification predicting sequence
LDKPSRREV

SEQ ID NO: 23156 - protein, 23 aa, Artificial sequence
  Protein classification predicting sequence
MVLVGLLRGSFMFMADLCREVQV

SEQ ID NO: 23157 - protein, 56 aa, Artificial sequence
  Protein classification predicting sequence
HEVDFMTASSYGSGMSTTRDVKILKDLDEDIRGKDVLIVEDIIDSGNTLSKVREIL

SEQ ID NO: 23158 - protein, 25 aa, Artificial sequence
  Protein classification predicting sequence
GFSIPDEFVVGYGIDYAQRYRHLPY

SEQ ID NO: 23159 - protein, 11 aa, Artificial sequence
  Protein classification predicting sequence
VKVASLLVKRT

SEQ ID NO: 23160 - protein, 10 aa, Artificial sequence
  Protein classification predicting sequence
FVVGYALDYN

SEQ ID NO: 23161 - protein, 10 aa, Artificial sequence
  Protein classification predicting sequence
EEDIQNICKE

SEQ ID NO: 23162 - protein, 32 aa, Artificial sequence
  Protein classification predicting sequence
DLIKRIDTHLSIDFMDVSSYHGGTESTGEVQI

SEQ ID NO: 23163 - protein, 37 aa, Artificial sequence
  Protein classification predicting sequence
SIENKDVLIIEDILETGTTLKSITELLQSRKVNSLEI

SEQ ID NO: 23164 - protein, 48 aa, Artificial sequence
  Protein classification predicting sequence
TLLDKPNRRKADIEAKYVGKKIPDEFVVGYGLDYRELYRNLPYIGTLK

SEQ ID NO: 23165 - protein, 6 aa, Artificial sequence
  Protein classification predicting sequence
KHIDTH

SEQ ID NO: 23166 - protein, 16 aa, Artificial sequence
  Protein classification predicting sequence
SSGEVKILKDVDTNIE

SEQ ID NO: 23167 - protein, 27 aa, Artificial sequence
  Protein classification predicting sequence
PNEFIVGFGLDYAENYRNLPYVGVLKE

SEQ ID NO: 23168 - protein, 6 aa, Artificial sequence
  Protein classification predicting sequence
YRNLPY

SEQ ID NO: 23169 - protein, 9 aa, Artificial sequence
  Protein classification predicting sequence
GVLKEEVYS

SEQ ID NO: 23170 - protein, 6 aa, Artificial sequence
  Protein classification predicting sequence
QLTKDY

SEQ ID NO: 23171 - protein, 8 aa, Artificial sequence
  Protein classification predicting sequence
DFMVVSSY

SEQ ID NO: 23172 - protein, 10 aa, Artificial sequence
  Protein classification predicting sequence
EDIIDTGRTL

SEQ ID NO: 23173 - protein, 12 aa, Artificial sequence
  Protein classification predicting sequence
PNEFIVGFGLDY

SEQ ID NO: 23174 - protein, 10 aa, Artificial sequence
  Protein classification predicting sequence
VDFMTASSYG

SEQ ID NO: 23175 - protein, 11 aa, Artificial sequence
  Protein classification predicting sequence
REILSLREPKS

SEQ ID NO: 23176 - protein, 8 aa, Artificial sequence
  Protein classification predicting sequence
IPDEFVVG

SEQ ID NO: 23177 - protein, 7 aa, Artificial sequence
  Protein classification predicting sequence
EKIGEGT

SEQ ID NO: 23178 - protein, 8 aa, Artificial sequence
  Protein classification predicting sequence
RISAEEAL

SEQ ID NO: 23179 - protein, 7 aa, Artificial sequence
  Protein classification predicting sequence
HGKITRE

SEQ ID NO: 23180 - protein, 10 aa, Artificial sequence
  Protein classification predicting sequence
LDLGGTNFRV

SEQ ID NO: 23181 - protein, 7 aa, Artificial sequence
  Protein classification predicting sequence
AIPKWHG

SEQ ID NO: 23182 - protein, 24 aa, Artificial sequence
  Protein classification predicting sequence
KAIKKRGDYDANIVAVVNDTVGTM

SEQ ID NO: 23183 - protein, 11 aa, Artificial sequence
  Protein classification predicting sequence
VAVVNDTVGTM

SEQ ID NO: 23184 - protein, 6 aa, Artificial sequence
  Protein classification predicting sequence
GRMCIN

SEQ ID NO: 23185 - protein, 7 aa, Artificial sequence
  Protein classification predicting sequence
SLNPGKQ

SEQ ID NO: 23186 - protein, 8 aa, Artificial sequence
  Protein classification predicting sequence
TPRLRTTV

SEQ ID NO: 23187 - protein, 18 aa, Artificial sequence
  Protein classification predicting sequence
GDFLALDLGGTNFRVLLV

SEQ ID NO: 23188 - protein, 25 aa, Artificial sequence
  Protein classification predicting sequence
GDFLALDLGGTNFRVLLVKIRSGKK

SEQ ID NO: 23189 - protein, 16 aa, Artificial sequence
  Protein classification predicting sequence
GLIVGTGSNACYMEEM

SEQ ID NO: 23190 - protein, 16 aa, Artificial sequence
  Protein classification predicting sequence
QMCINMEWGAFGDNGC

SEQ ID NO: 23191 - protein, 12 aa, Artificial sequence
  Protein classification predicting sequence
MCINMEWGAFGD

SEQ ID NO: 23192 - protein, 7 aa, Artificial sequence
  Protein classification predicting sequence
EWGAFGD

SEQ ID NO: 23193 - protein, 8 aa, Artificial sequence
  Protein classification predicting sequence
MRLSDETL

SEQ ID NO: 23194 - protein, 8 aa, Artificial sequence
  Protein classification predicting sequence
GFTFSFPC

SEQ ID NO: 23195 - protein, 51 aa, Artificial sequence
  Protein classification predicting sequence
KTRGIFETKFLSQIESDRLALLQVRAILQQLGLNSTCDDSILVKTVCGVVS

SEQ ID NO: 23196 - protein, 17 aa, Artificial sequence
  Protein classification predicting sequence
LLFEGRITPELLTRGKF

SEQ ID NO: 23197 - protein, 7 aa, Artificial sequence
  Protein classification predicting sequence
PDGTEHG

SEQ ID NO: 23198 - protein, 10 aa, Artificial sequence
  Protein classification predicting sequence
PLGFTFSFPC

SEQ ID NO: 23199 - protein, 9 aa, Artificial sequence
  Protein classification predicting sequence
GSGTQLFDH

SEQ ID NO: 23200 - protein, 7 aa, Artificial sequence
  Protein classification predicting sequence
DCVSVQH

SEQ ID NO: 23201 - protein, 7 aa, Artificial sequence
  Protein classification predicting sequence
GLIVGTG

SEQ ID NO: 23202 - protein, 7 aa, Artificial sequence
  Protein classification predicting sequence
NACYMEE

SEQ ID NO: 23203 - protein, 9 aa, Artificial sequence
  Protein classification predicting sequence
DTTGTLVAS

SEQ ID NO: 23204 - protein, 9 aa, Artificial sequence
  Protein classification predicting sequence
IDEESPRPG

SEQ ID NO: 23205 - protein, 8 aa, Artificial sequence
  Protein classification predicting sequence
LKELLGDE

SEQ ID NO: 23206 - protein, 7 aa, Artificial sequence
  Protein classification predicting sequence
KLKDILE

SEQ ID NO: 23207 - protein, 12 aa, Artificial sequence
  Protein classification predicting sequence
GLIVGTGSNACY

SEQ ID NO: 23208 - protein, 9 aa, Artificial sequence
  Protein classification predicting sequence
GSGRGAALV

SEQ ID NO: 23209 - protein, 8 aa, Artificial sequence
  Protein classification predicting sequence
VEMHNKIY

SEQ ID NO: 23210 - protein, 23 aa, Artificial sequence
  Protein classification predicting sequence
RREEFDLDVVAVVNDTVGTMMTC

SEQ ID NO: 23211 - protein, 14 aa, Artificial sequence
  Protein classification predicting sequence
VAVVNDTVGTMMTC

SEQ ID NO: 23212 - protein, 9 aa, Artificial sequence
  Protein classification predicting sequence
NMEWGAFGD

SEQ ID NO: 23213 - protein, 7 aa, Artificial sequence
  Protein classification predicting sequence
STCDDSI

SEQ ID NO: 23214 - protein, 12 aa, Artificial sequence
  Protein classification predicting sequence
ALDLGGTNFRVL

SEQ ID NO: 23215 - protein, 9 aa, Artificial sequence
  Protein classification predicting sequence
DGSGIGAAL

SEQ ID NO: 23216 - protein, 12 aa, Artificial sequence
  Protein classification predicting sequence
VGVDGTLYKLHP

SEQ ID NO: 23217 - protein, 6 aa, Artificial sequence
  Protein classification predicting sequence
MLPTYV

SEQ ID NO: 23218 - protein, 8 aa, Artificial sequence
  Protein classification predicting sequence
YMGELVRL

SEQ ID NO: 23219 - protein, 6 aa, Artificial sequence
  Protein classification predicting sequence
EWGAFG

SEQ ID NO: 23220 - protein, 7 aa, Artificial sequence
  Protein classification predicting sequence
LPRTKYD

SEQ ID NO: 23221 - protein, 7 aa, Artificial sequence
  Protein classification predicting sequence
SGYYLGE

SEQ ID NO: 23222 - protein, 7 aa, Artificial sequence
  Protein classification predicting sequence
YLGEIVR

SEQ ID NO: 23223 - protein, 8 aa, Artificial sequence
  Protein classification predicting sequence
VGLIIGTG

SEQ ID NO: 23224 - protein, 11 aa, Artificial sequence
  Protein classification predicting sequence
YSSPIDVWAVG

SEQ ID NO: 23225 - protein, 7 aa, Artificial sequence
  Protein classification predicting sequence
RREVEIQ

SEQ ID NO: 23226 - protein, 12 aa, Artificial sequence
  Protein classification predicting sequence
DSFLLNHSLEYT

SEQ ID NO: 23227 - protein, 8 aa, Artificial sequence
  Protein classification predicting sequence
TAGSNFNH

SEQ ID NO: 23228 - protein, 9 aa, Artificial sequence
  Protein classification predicting sequence
HTLVTSGVY

SEQ ID NO: 23229 - protein, 8 aa, Artificial sequence
  Protein classification predicting sequence
SLIHFFGE

SEQ ID NO: 23230 - protein, 12 aa, Artificial sequence
  Protein classification predicting sequence
VPTGLPFIKGVK

SEQ ID NO: 23231 - protein, 7 aa, Artificial sequence
  Protein classification predicting sequence
DLKPDNI

SEQ ID NO: 23232 - protein, 10 aa, Artificial sequence
  Protein classification predicting sequence
QIVRLISESK

SEQ ID NO: 23233 - protein, 7 aa, Artificial sequence
  Protein classification predicting sequence
VAITGQV

SEQ ID NO: 23234 - protein, 7 aa, Artificial sequence
  Protein classification predicting sequence
LIDVPKD

SEQ ID NO: 23235 - protein, 10 aa, Artificial sequence
  Protein classification predicting sequence
DVPKDIQQQL

SEQ ID NO: 23236 - protein, 18 aa, Artificial sequence
  Protein classification predicting sequence
RFVELTGIPVASTLMGLG

SEQ ID NO: 23237 - protein, 8 aa, Artificial sequence
  Protein classification predicting sequence
LMGLGAFP

SEQ ID NO: 23238 - protein, 16 aa, Artificial sequence
  Protein classification predicting sequence
AIISTGVGQHQMWAAQ

SEQ ID NO: 23239 - protein, 20 aa, Artificial sequence
  Protein classification predicting sequence
VVDIDGDGSFIMNVQELATI

SEQ ID NO: 23240 - protein, 13 aa, Artificial sequence
  Protein classification predicting sequence
MLDTPGPYLLDVI

SEQ ID NO: 23241 - protein, 14 aa, Artificial sequence
  Protein classification predicting sequence
PHQEHVLPMIPSGG

SEQ ID NO: 23242 - protein, 14 aa, Artificial sequence
  Protein classification predicting sequence
GADILVEALERQGV

SEQ ID NO: 23243 - protein, 19 aa, Artificial sequence
  Protein classification predicting sequence
VFAYPGGASMEIHQALTRS

SEQ ID NO: 23244 - protein, 24 aa, Artificial sequence
  Protein classification predicting sequence
FAAEGYARSSGKPGICIATSGPGA

SEQ ID NO: 23245 - protein, 13 aa, Artificial sequence
  Protein classification predicting sequence
AITGQVPRRMIGT

SEQ ID NO: 23246 - protein, 8 aa, Artificial sequence
  Protein classification predicting sequence
PVLYVGGG

SEQ ID NO: 23247 - protein, 35 aa, Artificial sequence
  Protein classification predicting sequence
SDLLLAFGVRFDDRVTGKLEAFASRAKIVHIDIDS

SEQ ID NO: 23248 - protein, 13 aa, Artificial sequence
  Protein classification predicting sequence
EIGKNKTPHVSVC

SEQ ID NO: 23249 - protein, 14 aa, Artificial sequence
  Protein classification predicting sequence
TGVGQHQMWAAQFY

SEQ ID NO: 23250 - protein, 8 aa, Artificial sequence
  Protein classification predicting sequence
MGFGLPAA

SEQ ID NO: 23251 - protein, 8 aa, Artificial sequence
  Protein classification predicting sequence
NNQHLGMV

SEQ ID NO: 23252 - protein, 9 aa, Artificial sequence
  Protein classification predicting sequence
MRLPGYMSR

SEQ ID NO: 23253 - protein, 7 aa, Artificial sequence
  Protein classification predicting sequence
EIFPNML

SEQ ID NO: 23254 - protein, 6 aa, Artificial sequence
  Protein classification predicting sequence
RHEQGA

SEQ ID NO: 23255 - protein, 15 aa, Artificial sequence
  Protein classification predicting sequence
FGIPGGAVLPVYDPL

SEQ ID NO: 23256 - protein, 15 aa, Artificial sequence
  Protein classification predicting sequence
RHVLVRHEQGAGHAA

SEQ ID NO: 23257 - protein, 11 aa, Artificial sequence
  Protein classification predicting sequence
TGIPVVTTLMA

SEQ ID NO: 23258 - protein, 9 aa, Artificial sequence
  Protein classification predicting sequence
GMPGMHGTV

SEQ ID NO: 23259 - protein, 10 aa, Artificial sequence
  Protein classification predicting sequence
ALQRSDLLIA

SEQ ID NO: 23260 - protein, 8 aa, Artificial sequence
  Protein classification predicting sequence
RFDDRVTG

SEQ ID NO: 23261 - protein, 8 aa, Artificial sequence
  Protein classification predicting sequence
SGGLGTMG

SEQ ID NO: 23262 - protein, 18 aa, Artificial sequence
  Protein classification predicting sequence
EVWAIDGDGCFQMTNQEL

SEQ ID NO: 23263 - protein, 15 aa, Artificial sequence
  Protein classification predicting sequence
ALINNGNLGMVRQWQ

SEQ ID NO: 23264 - protein, 8 aa, Artificial sequence
  Protein classification predicting sequence
IFGYPGGA

SEQ ID NO: 23265 - protein, 6 aa, Artificial sequence
  Protein classification predicting sequence
GLGTMG

SEQ ID NO: 23266 - protein, 7 aa, Artificial sequence
  Protein classification predicting sequence
GMVRQWQ

SEQ ID NO: 23267 - protein, 6 aa, Artificial sequence
  Protein classification predicting sequence
ENCYPM

SEQ ID NO: 23268 - protein, 7 aa, Artificial sequence
  Protein classification predicting sequence
SGPGATN

SEQ ID NO: 23269 - protein, 8 aa, Artificial sequence
  Protein classification predicting sequence
IGTDAFQE

SEQ ID NO: 23270 - protein, 8 aa, Artificial sequence
  Protein classification predicting sequence
ITKHNYLV

SEQ ID NO: 23271 - protein, 6 aa, Artificial sequence
  Protein classification predicting sequence
MLGMHG

SEQ ID NO: 23272 - protein, 7 aa, Artificial sequence
  Protein classification predicting sequence
VGQHQMW

SEQ ID NO: 23273 - protein, 14 aa, Artificial sequence
  Protein classification predicting sequence
MLGMHGTVYANYAV

SEQ ID NO: 23274 - protein, 28 aa, Artificial sequence
  Protein classification predicting sequence
AVSECDLLIALGARFDDRVTGKLDEFAC

SEQ ID NO: 23275 - protein, 7 aa, Artificial sequence
  Protein classification predicting sequence
QMNIQEL

SEQ ID NO: 23276 - protein, 7 aa, Artificial sequence
  Protein classification predicting sequence
LVTSGPG

SEQ ID NO: 23277 - protein, 9 aa, Artificial sequence
  Protein classification predicting sequence
VTSGPGATN

SEQ ID NO: 23278 - protein, 6 aa, Artificial sequence
  Protein classification predicting sequence
RFDDRV

SEQ ID NO: 23279 - protein, 8 aa, Artificial sequence
  Protein classification predicting sequence
EHVLPMIP

SEQ ID NO: 23280 - protein, 26 aa, Artificial sequence
  Protein classification predicting sequence
LIGTDAFQEADISGITMPITKHNFLV

SEQ ID NO: 23281 - protein, 38 aa, Artificial sequence
  Protein classification predicting sequence
LGMPGMHGTVAAVAALQRSDLLIALGTRFDDRVTGKLD

SEQ ID NO: 23282 - protein, 11 aa, Artificial sequence
  Protein classification predicting sequence
RFDDRVTGKLD

SEQ ID NO: 23283 - protein, 14 aa, Artificial sequence
  Protein classification predicting sequence
GTMGFAIPAAMGAK

SEQ ID NO: 23284 - protein, 8 aa, Artificial sequence
  Protein classification predicting sequence
ERYSQTDL

SEQ ID NO: 23285 - protein, 12 aa, Artificial sequence
  Protein classification predicting sequence
TLMARGAFPDSH

SEQ ID NO: 23286 - protein, 31 aa, Artificial sequence
  Protein classification predicting sequence
AKVIHADIDPAEIGKNRHADVPIVGDVKAVI

SEQ ID NO: 23287 - protein, 6 aa, Artificial sequence
  Protein classification predicting sequence
LPRHEQ

SEQ ID NO: 23288 - protein, 6 aa, Artificial sequence
  Protein classification predicting sequence
HQMWAA

SEQ ID NO: 23289 - protein, 11 aa, Artificial sequence
  Protein classification predicting sequence
MGFGLPAAIGA

SEQ ID NO: 23290 - protein, 14 aa, Artificial sequence
  Protein classification predicting sequence
IFGYPGGAILPIYD

SEQ ID NO: 23291 - protein, 8 aa, Artificial sequence
  Protein classification predicting sequence
TSGPGATN

SEQ ID NO: 23292 - protein, 13 aa, Artificial sequence
  Protein classification predicting sequence
DIFGITLPIVKHS

SEQ ID NO: 23293 - protein, 15 aa, Artificial sequence
  Protein classification predicting sequence
GMLGMHGTAYANFAV

SEQ ID NO: 23294 - protein, 8 aa, Artificial sequence
  Protein classification predicting sequence
PGKSNAQM

SEQ ID NO: 23295 - protein, 10 aa, Artificial sequence
  Protein classification predicting sequence
VIDIDGDASF

SEQ ID NO: 23296 - protein, 8 aa, Artificial sequence
  Protein classification predicting sequence
FEGLKAYR

SEQ ID NO: 23297 - protein, 8 aa, Artificial sequence
  Protein classification predicting sequence
VLVDIPKD

SEQ ID NO: 23298 - protein, 8 aa, Artificial sequence
  Protein classification predicting sequence
RELALIKV

SEQ ID NO: 23299 - protein, 10 aa, Artificial sequence
  Protein classification predicting sequence
EQIEKQLHKL

SEQ ID NO: 23300 - protein, 12 aa, Artificial sequence
  Protein classification predicting sequence
LLENESGALSRV

SEQ ID NO: 23301 - protein, 12 aa, Artificial sequence
  Protein classification predicting sequence
RRGFNIESLAVG

SEQ ID NO: 23302 - protein, 13 aa, Artificial sequence
  Protein classification predicting sequence
GVVLVTSGPGATN

SEQ ID NO: 23303 - protein, 6 aa, Artificial sequence
  Protein classification predicting sequence
VGQHQM

SEQ ID NO: 23304 - protein, 16 aa, Artificial sequence
  Protein classification predicting sequence
TGDGSIQMNIQELSTA

SEQ ID NO: 23305 - protein, 12 aa, Artificial sequence
  Protein classification predicting sequence
GLGTMGYGLPAA

SEQ ID NO: 23306 - protein, 13 aa, Artificial sequence
  Protein classification predicting sequence
ITGIATAYMDSIP

SEQ ID NO: 23307 - protein, 7 aa, Artificial sequence
  Protein classification predicting sequence
VVISGQV

SEQ ID NO: 23308 - protein, 7 aa, Artificial sequence
  Protein classification predicting sequence
MLGMHGT

SEQ ID NO: 23309 - protein, 7 aa, Artificial sequence
  Protein classification predicting sequence
FGYPGGA

SEQ ID NO: 23310 - protein, 6 aa, Artificial sequence
  Protein classification predicting sequence
LVRHEQ

SEQ ID NO: 23311 - protein, 13 aa, Artificial sequence
  Protein classification predicting sequence
SLIGYDAFQECDM

SEQ ID NO: 23312 - protein, 8 aa, Artificial sequence
  Protein classification predicting sequence
VKHSFLVK

SEQ ID NO: 23313 - protein, 7 aa, Artificial sequence
  Protein classification predicting sequence
KKAFWLA

SEQ ID NO: 23314 - protein, 7 aa, Artificial sequence
  Protein classification predicting sequence
GVRFDDR

SEQ ID NO: 23315 - protein, 25 aa, Artificial sequence
  Protein classification predicting sequence
KPRRWINSGGLGTMGFGLPAALGVK

SEQ ID NO: 23316 - protein, 16 aa, Artificial sequence
  Protein classification predicting sequence
VLVTSGPGATNAITGI

SEQ ID NO: 23317 - protein, 9 aa, Artificial sequence
  Protein classification predicting sequence
LGMVKQWQD

SEQ ID NO: 23318 - protein, 7 aa, Artificial sequence
  Protein classification predicting sequence
IYSGRHS

SEQ ID NO: 23319 - protein, 11 aa, Artificial sequence
  Protein classification predicting sequence
GVVLVTSGPGA

SEQ ID NO: 23320 - protein, 12 aa, Artificial sequence
  Protein classification predicting sequence
RTYLEEELTKAR

SEQ ID NO: 23321 - protein, 6 aa, Artificial sequence
  Protein classification predicting sequence
LRKDMY

SEQ ID NO: 23322 - protein, 10 aa, Artificial sequence
  Protein classification predicting sequence
VDPEAPTEEE

SEQ ID NO: 23323 - protein, 15 aa, Artificial sequence
  Protein classification predicting sequence
AQRAVTKPRYMQWRE

SEQ ID NO: 23324 - protein, 11 aa, Artificial sequence
  Protein classification predicting sequence
TLGFRIEGIKK

SEQ ID NO: 23325 - protein, 10 aa, Artificial sequence
  Protein classification predicting sequence
HEVIGSSLLF

SEQ ID NO: 23326 - protein, 10 aa, Artificial sequence
  Protein classification predicting sequence
IDFGKTTPLP

SEQ ID NO: 23327 - protein, 9 aa, Artificial sequence
  Protein classification predicting sequence
EGNREDGYL

SEQ ID NO: 23328 - protein, 18 aa, Artificial sequence
  Protein classification predicting sequence
PCVLDLKMGTRQHGDDAS

SEQ ID NO: 23329 - protein, 7 aa, Artificial sequence
  Protein classification predicting sequence
GVLLEPF

SEQ ID NO: 23330 - protein, 11 aa, Artificial sequence
  Protein classification predicting sequence
VDNSDCEPKSK

SEQ ID NO: 23331 - protein, 8 aa, Artificial sequence
  Protein classification predicting sequence
FLLLENVV

SEQ ID NO: 23332 - protein, 7 aa, Artificial sequence
  Protein classification predicting sequence
CGMQVYQ

SEQ ID NO: 23333 - protein, 15 aa, Artificial sequence
  Protein classification predicting sequence
SYRFYSSSLLVIYDG

SEQ ID NO: 23334 - protein, 7 aa, Artificial sequence
  Protein classification predicting sequence
LGKGKFG

SEQ ID NO: 23335 - protein, 6 aa, Artificial sequence
  Protein classification predicting sequence
DYMHER

SEQ ID NO: 23336 - protein, 7 aa, Artificial sequence
  Protein classification predicting sequence
LDYLHTK

SEQ ID NO: 23337 - protein, 8 aa, Artificial sequence
  Protein classification predicting sequence
LVGKPPFE

SEQ ID NO: 23338 - protein, 7 aa, Artificial sequence
  Protein classification predicting sequence
TYRRIVK

SEQ ID NO: 23339 - protein, 6 aa, Artificial sequence
  Protein classification predicting sequence
WALGVL

SEQ ID NO: 23340 - protein, 7 aa, Artificial sequence
  Protein classification predicting sequence
YMPNGSL

SEQ ID NO: 23341 - protein, 9 aa, Artificial sequence
  Protein classification predicting sequence
FGNPASRSH

SEQ ID NO: 23342 - protein, 7 aa, Artificial sequence
  Protein classification predicting sequence
ADPREIV

SEQ ID NO: 23343 - protein, 6 aa, Artificial sequence
  Protein classification predicting sequence
VNNEIG

SEQ ID NO: 23344 - protein, 8 aa, Artificial sequence
  Protein classification predicting sequence
HGGGHERG

SEQ ID NO: 23345 - protein, 14 aa, Artificial sequence
  Protein classification predicting sequence
THQIVGMGEAFRIA

SEQ ID NO: 23346 - protein, 9 aa, Artificial sequence
  Protein classification predicting sequence
ASRSHKFGW

SEQ ID NO: 23347 - protein, 8 aa, Artificial sequence
  Protein classification predicting sequence
VDIARNQI

SEQ ID NO: 23348 - protein, 18 aa, Artificial sequence
  Protein classification predicting sequence
LIGADSREIVFTSGATES

SEQ ID NO: 23349 - protein, 10 aa, Artificial sequence
  Protein classification predicting sequence
FTSGATESNN

SEQ ID NO: 23350 - protein, 6 aa, Artificial sequence
  Protein classification predicting sequence
NLAIKG

SEQ ID NO: 23351 - protein, 7 aa, Artificial sequence
  Protein classification predicting sequence
TSKTEHK

SEQ ID NO: 23352 - protein, 10 aa, Artificial sequence
  Protein classification predicting sequence
HVDATQSVGK

SEQ ID NO: 23353 - protein, 6 aa, Artificial sequence
  Protein classification predicting sequence
DLMSFS

SEQ ID NO: 23354 - protein, 8 aa, Artificial sequence
  Protein classification predicting sequence
LYVRRKPR

SEQ ID NO: 23355 - protein, 24 aa, Artificial sequence
  Protein classification predicting sequence
HGGGHERGMRSGTLPVHQIVGMGE

SEQ ID NO: 23356 - protein, 8 aa, Artificial sequence
  Protein classification predicting sequence
HQIVGMGE

SEQ ID NO: 23357 - protein, 8 aa, Artificial sequence
  Protein classification predicting sequence
SSGSACTS

SEQ ID NO: 23358 - protein, 17 aa, Artificial sequence
  Protein classification predicting sequence
LVSIMHVNNEIGVIQDI

SEQ ID NO: 23359 - protein, 7 aa, Artificial sequence
  Protein classification predicting sequence
RRKPRVR

SEQ ID NO: 23360 - protein, 6 aa, Artificial sequence
  Protein classification predicting sequence
HGGGHE

SEQ ID NO: 23361 - protein, 7 aa, Artificial sequence
  Protein classification predicting sequence
HQIVGMG

SEQ ID NO: 23362 - protein, 10 aa, Artificial sequence
  Protein classification predicting sequence
LRNRLWNGIK

SEQ ID NO: 23363 - protein, 7 aa, Artificial sequence
  Protein classification predicting sequence
EEIDYTI

SEQ ID NO: 23364 - protein, 10 aa, Artificial sequence
  Protein classification predicting sequence
AEEAVDIARN

SEQ ID NO: 23365 - protein, 9 aa, Artificial sequence
  Protein classification predicting sequence
RKIIFHVDA

SEQ ID NO: 23366 - protein, 7 aa, Artificial sequence
  Protein classification predicting sequence
YGPKGIG

SEQ ID NO: 23367 - protein, 10 aa, Artificial sequence
  Protein classification predicting sequence
SFNYVEGESL

SEQ ID NO: 23368 - protein, 23 aa, Artificial sequence
  Protein classification predicting sequence
AVSSGSACTSASLEPSYVLRALG

SEQ ID NO: 23369 - protein, 6 aa, Artificial sequence
  Protein classification predicting sequence
ATESNN

SEQ ID NO: 23370 - protein, 6 aa, Artificial sequence
  Protein classification predicting sequence
SFSAHK

SEQ ID NO: 23371 - protein, 6 aa, Artificial sequence
  Protein classification predicting sequence
GPKGIG

SEQ ID NO: 23372 - protein, 20 aa, Artificial sequence
  Protein classification predicting sequence
EIVFTSGATESDNLAIKGAA

SEQ ID NO: 23373 - protein, 7 aa, Artificial sequence
  Protein classification predicting sequence
GFEVTYL

SEQ ID NO: 23374 - protein, 13 aa, Artificial sequence
  Protein classification predicting sequence
LVSIMHVNNEIGV

SEQ ID NO: 23375 - protein, 7 aa, Artificial sequence
  Protein classification predicting sequence
VNNEIGV

SEQ ID NO: 23376 - protein, 7 aa, Artificial sequence
  Protein classification predicting sequence
LKVDLMS

SEQ ID NO: 23377 - protein, 28 aa, Artificial sequence
  Protein classification predicting sequence
HGGGHERGMRSGTLPVHQIVGMGEAYRI

SEQ ID NO: 23378 - protein, 13 aa, Artificial sequence
  Protein classification predicting sequence
FGRFTTEEEIDYA

SEQ ID NO: 23379 - protein, 6 aa, Artificial sequence
  Protein classification predicting sequence
RSGTLP

SEQ ID NO: 23380 - protein, 7 aa, Artificial sequence
  Protein classification predicting sequence
EVYLNGD

SEQ ID NO: 23381 - protein, 9 aa, Artificial sequence
  Protein classification predicting sequence
VNNEIGVIQ

SEQ ID NO: 23382 - protein, 7 aa, Artificial sequence
  Protein classification predicting sequence
GGGQERG

SEQ ID NO: 23383 - protein, 12 aa, Artificial sequence
  Protein classification predicting sequence
ASSGSACTSGSL

SEQ ID NO: 23384 - protein, 9 aa, Artificial sequence
  Protein classification predicting sequence
SSGSACTSA

SEQ ID NO: 23385 - protein, 74 aa, Artificial sequence
  Protein classification predicting sequence
LVGADPREIVFTSGATESDNLAIKGAANFYQKKGKHIITSKTEHKAVLDTCRQLEREGFEVTYLAPQRNGIIDL

SEQ ID NO: 23386 - protein, 58 aa, Artificial sequence
  Protein classification predicting sequence
IGEMCRARGIIYHVDATQSVGKLPIDLSQLKVDLMSFSGHKIYGPKGIGALYVRRKPR

SEQ ID NO: 23387 - protein, 26 aa, Artificial sequence
  Protein classification predicting sequence
RLRGLRNRLWNGIKDIEEVYLNGDLE

SEQ ID NO: 23388 - protein, 10 aa, Artificial sequence
  Protein classification predicting sequence
PVDPRVAEKM

SEQ ID NO: 23389 - protein, 9 aa, Artificial sequence
  Protein classification predicting sequence
GWQAEEAVD

SEQ ID NO: 23390 - protein, 22 aa, Artificial sequence
  Protein classification predicting sequence
ADPREIVFTSGATESDNLAIKG

SEQ ID NO: 23391 - protein, 13 aa, Artificial sequence
  Protein classification predicting sequence
RQLEREGFEVTYL

SEQ ID NO: 23392 - protein, 16 aa, Artificial sequence
  Protein classification predicting sequence
YGPKGIGALYVRRKPR

SEQ ID NO: 23393 - protein, 6 aa, Artificial sequence
  Protein classification predicting sequence
GRFTTE

SEQ ID NO: 23394 - protein, 14 aa, Artificial sequence
  Protein classification predicting sequence
CRQLEREGFEVTYL

SEQ ID NO: 23395 - protein, 7 aa, Artificial sequence
  Protein classification predicting sequence
DELAHSS

SEQ ID NO: 23396 - protein, 8 aa, Artificial sequence
  Protein classification predicting sequence
AAGQGKRM

SEQ ID NO: 23397 - protein, 9 aa, Artificial sequence
  Protein classification predicting sequence
DNKPILIHT

SEQ ID NO: 23398 - protein, 7 aa, Artificial sequence
  Protein classification predicting sequence
RIIKENI

SEQ ID NO: 23399 - protein, 18 aa, Artificial sequence
  Protein classification predicting sequence
IPVRNEMYQGQTPQSFNI

SEQ ID NO: 23400 - protein, 11 aa, Artificial sequence
  Protein classification predicting sequence
ILSDACKIIVE

SEQ ID NO: 23401 - protein, 21 aa, Artificial sequence
  Protein classification predicting sequence
GELYNIKVTTPYDLKVANAII

SEQ ID NO: 23402 - protein, 19 aa, Artificial sequence
  Protein classification predicting sequence
GINDDDVIVTHDAVRPFLT

SEQ ID NO: 23403 - protein, 35 aa, Artificial sequence
  Protein classification predicting sequence
IRNVNGINNDDVIVTHDAVRPFLTQRIIKENIEVA

SEQ ID NO: 23404 - protein, 7 aa, Artificial sequence
  Protein classification predicting sequence
AIVPAAG

SEQ ID NO: 23405 - protein, 8 aa, Artificial sequence
  Protein classification predicting sequence
LWHALTPQ

SEQ ID NO: 23406 - protein, 7 aa, Artificial sequence
  Protein classification predicting sequence
GRSDNIK

SEQ ID NO: 23407 - protein, 6 aa, Artificial sequence
  Protein classification predicting sequence
QTPQGF

SEQ ID NO: 23408 - protein, 6 aa, Artificial sequence
  Protein classification predicting sequence
GQGKRM

SEQ ID NO: 23409 - protein, 7 aa, Artificial sequence
  Protein classification predicting sequence
NIKVTTP

SEQ ID NO: 23410 - protein, 19 aa, Artificial sequence
  Protein classification predicting sequence
EVPIIVHTLRAFEKDKACK

SEQ ID NO: 23411 - protein, 20 aa, Artificial sequence
  Protein classification predicting sequence
IIMAINEEERPYFEELMQKY

SEQ ID NO: 23412 - protein, 17 aa, Artificial sequence
  Protein classification predicting sequence
VQFIQGGAERQDSVYNA

SEQ ID NO: 23413 - protein, 19 aa, Artificial sequence
  Protein classification predicting sequence
VEYVLVHDGARPFVTNKVI

SEQ ID NO: 23414 - protein, 39 aa, Artificial sequence
  Protein classification predicting sequence
DVLTAAEKYGASICAVPVKDTVKKVEQGVVVETVERSQL

SEQ ID NO: 23415 - protein, 8 aa, Artificial sequence
  Protein classification predicting sequence
AVQTPQGF

SEQ ID NO: 23416 - protein, 36 aa, Artificial sequence
  Protein classification predicting sequence
AVQTPQGFSVSLLLEAHRSAKQSCFLGTDDASLVER

SEQ ID NO: 23417 - protein, 29 aa, Artificial sequence
  Protein classification predicting sequence
GKQVGVVEGSYYNIKVTTPEDLLIAESFL

SEQ ID NO: 23418 - protein, 8 aa, Artificial sequence
  Protein classification predicting sequence
VLIHDGAR

SEQ ID NO: 23419 - protein, 6 aa, Artificial sequence
  Protein classification predicting sequence
TDDASL

SEQ ID NO: 23420 - protein, 7 aa, Artificial sequence
  Protein classification predicting sequence
TTPEDLL

SEQ ID NO: 23421 - protein, 7 aa, Artificial sequence
  Protein classification predicting sequence
NIKITTP

SEQ ID NO: 23422 - protein, 6 aa, Artificial sequence
  Protein classification predicting sequence
QTPQSF

SEQ ID NO: 23423 - protein, 11 aa, Artificial sequence
  Protein classification predicting sequence
TDEASALEYCG

SEQ ID NO: 23424 - protein, 6 aa, Artificial sequence
  Protein classification predicting sequence
IHDGAR

SEQ ID NO: 23425 - protein, 7 aa, Artificial sequence
  Protein classification predicting sequence
HDGARPF

SEQ ID NO: 23426 - protein, 9 aa, Artificial sequence
  Protein classification predicting sequence
NIKITTPED

SEQ ID NO: 23427 - protein, 16 aa, Artificial sequence
  Protein classification predicting sequence
GLWLAQTPQMFRAGLL

SEQ ID NO: 23428 - protein, 6 aa, Artificial sequence
  Protein classification predicting sequence
AVQTPQ

SEQ ID NO: 23429 - protein, 7 aa, Artificial sequence
  Protein classification predicting sequence
ALPVADT

SEQ ID NO: 23430 - protein, 7 aa, Artificial sequence
  Protein classification predicting sequence
ITDEASA

SEQ ID NO: 23431 - protein, 9 aa, Artificial sequence
  Protein classification predicting sequence
ITDEASALE

SEQ ID NO: 23432 - protein, 7 aa, Artificial sequence
  Protein classification predicting sequence
ITVVDGG

SEQ ID NO: 23433 - protein, 8 aa, Artificial sequence
  Protein classification predicting sequence
GGSERQYS

SEQ ID NO: 23434 - protein, 8 aa, Artificial sequence
  Protein classification predicting sequence
LWLAQTPQ

SEQ ID NO: 23435 - protein, 7 aa, Artificial sequence
  Protein classification predicting sequence
FLGTDDA

SEQ ID NO: 23436 - protein, 9 aa, Artificial sequence
  Protein classification predicting sequence
LWAAQTPQG

SEQ ID NO: 23437 - protein, 6 aa, Artificial sequence
  Protein classification predicting sequence
GIGSRM

SEQ ID NO: 23438 - protein, 8 aa, Artificial sequence
  Protein classification predicting sequence
GKTILEHT

SEQ ID NO: 23439 - protein, 6 aa, Artificial sequence
  Protein classification predicting sequence
TPQFFP

SEQ ID NO: 23440 - protein, 7 aa, Artificial sequence
  Protein classification predicting sequence
ALSSEQK

SEQ ID NO: 23441 - protein, 7 aa, Artificial sequence
  Protein classification predicting sequence
AVVPAAG

SEQ ID NO: 23442 - protein, 7 aa, Artificial sequence
  Protein classification predicting sequence
LVHDAAR

SEQ ID NO: 23443 - protein, 8 aa, Artificial sequence
  Protein classification predicting sequence
PKQYRPLA

SEQ ID NO: 23444 - protein, 7 aa, Artificial sequence
  Protein classification predicting sequence
GGLLAVP

SEQ ID NO: 23445 - protein, 10 aa, Artificial sequence
  Protein classification predicting sequence
DNIKVTRPED

SEQ ID NO: 23446 - protein, 7 aa, Artificial sequence
  Protein classification predicting sequence
ALAEFYL

SEQ ID NO: 23447 - protein, 8 aa, Artificial sequence
  Protein classification predicting sequence
PVRDTMKR

SEQ ID NO: 23448 - protein, 7 aa, Artificial sequence
  Protein classification predicting sequence
PEDLALA

SEQ ID NO: 23449 - protein, 9 aa, Artificial sequence
  Protein classification predicting sequence
PAAGVGSRM

SEQ ID NO: 23450 - protein, 8 aa, Artificial sequence
  Protein classification predicting sequence
LVEGRADN

SEQ ID NO: 23451 - protein, 12 aa, Artificial sequence
  Protein classification predicting sequence
LVAGALRNFKVT

SEQ ID NO: 23452 - protein, 11 aa, Artificial sequence
  Protein classification predicting sequence
EPGKNAIAHTV

SEQ ID NO: 23453 - protein, 29 aa, Artificial sequence
  Protein classification predicting sequence
LDVCAVVPAAGFGRRMQTECPKQYLSIGN

SEQ ID NO: 23454 - protein, 31 aa, Artificial sequence
  Protein classification predicting sequence
LVEGRADNIKVTRPEDLALAEFYLTRTIHQE

SEQ ID NO: 23455 - protein, 9 aa, Artificial sequence
  Protein classification predicting sequence
GRADNIKVT

SEQ ID NO: 23456 - protein, 23 aa, Artificial sequence
  Protein classification predicting sequence
YAGILAGGIGSRMGNVPLPKQFL

SEQ ID NO: 23457 - protein, 6 aa, Artificial sequence
  Protein classification predicting sequence
IIIATP

SEQ ID NO: 23458 - protein, 12 aa, Artificial sequence
  Protein classification predicting sequence
IVTHDAVRPFLT

SEQ ID NO: 23459 - protein, 7 aa, Artificial sequence
  Protein classification predicting sequence
YGAVDTV

SEQ ID NO: 23460 - protein, 10 aa, Artificial sequence
  Protein classification predicting sequence
TTPYDLKVAN

SEQ ID NO: 23461 - protein, 8 aa, Artificial sequence
  Protein classification predicting sequence
YAGILAGG

SEQ ID NO: 23462 - protein, 7 aa, Artificial sequence
  Protein classification predicting sequence
YQGQTPQ

SEQ ID NO: 23463 - protein, 10 aa, Artificial sequence
  Protein classification predicting sequence
QGGAERQDSV

SEQ ID NO: 23464 - protein, 7 aa, Artificial sequence
  Protein classification predicting sequence
PVKDTIK

SEQ ID NO: 23465 - protein, 11 aa, Artificial sequence
  Protein classification predicting sequence
GGKERADSVLS

SEQ ID NO: 23466 - protein, 7 aa, Artificial sequence
  Protein classification predicting sequence
PVRDTMK

SEQ ID NO: 23467 - protein, 7 aa, Artificial sequence
  Protein classification predicting sequence
ALTPQLF

SEQ ID NO: 23468 - protein, 9 aa, Artificial sequence
  Protein classification predicting sequence
ILAAPVRDT

SEQ ID NO: 23469 - protein, 18 aa, Artificial sequence
  Protein classification predicting sequence
GGILAAPVRDTMKRAEPG

SEQ ID NO: 23470 - protein, 9 aa, Artificial sequence
  Protein classification predicting sequence
DAAATLRGL

SEQ ID NO: 23471 - protein, 7 aa, Artificial sequence
  Protein classification predicting sequence
LWNLGLT

SEQ ID NO: 23472 - protein, 6 aa, Artificial sequence
  Protein classification predicting sequence
PAKINL

SEQ ID NO: 23473 - protein, 10 aa, Artificial sequence
  Protein classification predicting sequence
DAAATLRGLN

SEQ ID NO: 23474 - protein, 18 aa, Artificial sequence
  Protein classification predicting sequence
LGAEIGSDVSFCVYGGTA

SEQ ID NO: 23475 - protein, 7 aa, Artificial sequence
  Protein classification predicting sequence
WVILAKP

SEQ ID NO: 23476 - protein, 8 aa, Artificial sequence
  Protein classification predicting sequence
QMKRFGAD

SEQ ID NO: 23477 - protein, 8 aa, Artificial sequence
  Protein classification predicting sequence
YNGLRGFC

SEQ ID NO: 23478 - protein, 15 aa, Artificial sequence
  Protein classification predicting sequence
VPDDQRNLAYQAAKL

SEQ ID NO: 23479 - protein, 17 aa, Artificial sequence
  Protein classification predicting sequence
FCVYGGTALATGRGEKI

SEQ ID NO: 23480 - protein, 6 aa, Artificial sequence
  Protein classification predicting sequence
PAKLNL

SEQ ID NO: 23481 - protein, 8 aa, Artificial sequence
  Protein classification predicting sequence
GGGSSDAA

SEQ ID NO: 23482 - protein, 8 aa, Artificial sequence
  Protein classification predicting sequence
TGTGSCVF

SEQ ID NO: 23483 - protein, 8 aa, Artificial sequence
  Protein classification predicting sequence
PAKLNLFL

SEQ ID NO: 23484 - protein, 8 aa, Artificial sequence
  Protein classification predicting sequence
LGADVPVF

SEQ ID NO: 23485 - protein, 6 aa, Artificial sequence
  Protein classification predicting sequence
DGYHLL

SEQ ID NO: 23486 - protein, 6 aa, Artificial sequence
  Protein classification predicting sequence
DIPFCI

SEQ ID NO: 23487 - protein, 8 aa, Artificial sequence
  Protein classification predicting sequence
GGSSDAAA

SEQ ID NO: 23488 - protein, 19 aa, Artificial sequence
  Protein classification predicting sequence
AGALAGIVSGSGPTCAFLC

SEQ ID NO: 23489 - protein, 9 aa, Artificial sequence
  Protein classification predicting sequence
MSGSGATCF

SEQ ID NO: 23490 - protein, 13 aa, Artificial sequence
  Protein classification predicting sequence
LRGLNKLWNLGLT

SEQ ID NO: 23491 - protein, 6 aa, Artificial sequence
  Protein classification predicting sequence
IKDRML

SEQ ID NO: 23492 - protein, 11 aa, Artificial sequence
  Protein classification predicting sequence
RIYNGLKGFCE

SEQ ID NO: 23493 - protein, 6 aa, Artificial sequence
  Protein classification predicting sequence
GLAGGS

SEQ ID NO: 23494 - protein, 12 aa, Artificial sequence
  Protein classification predicting sequence
PSPAKLNLFLYI

SEQ ID NO: 23495 - protein, 9 aa, Artificial sequence
  Protein classification predicting sequence
GGGSSNAAT

SEQ ID NO: 23496 - protein, 8 aa, Artificial sequence
  Protein classification predicting sequence
FHWVLAFA

SEQ ID NO: 23497 - protein, 6 aa, Artificial sequence
  Protein classification predicting sequence
APAKIN

SEQ ID NO: 23498 - protein, 7 aa, Artificial sequence
  Protein classification predicting sequence
APAKINL

SEQ ID NO: 23499 - protein, 8 aa, Artificial sequence
  Protein classification predicting sequence
NLYLAVGD

SEQ ID NO: 23500 - protein, 11 aa, Artificial sequence
  Protein classification predicting sequence
VTVRNADVLSL

SEQ ID NO: 23501 - protein, 7 aa, Artificial sequence
  Protein classification predicting sequence
LGSDVPF

SEQ ID NO: 23502 - protein, 29 aa, Artificial sequence
  Protein classification predicting sequence
LGSDVPFALHGGTALGTGRGEELATVLSR

SEQ ID NO: 23503 - protein, 9 aa, Artificial sequence
  Protein classification predicting sequence
QLAPLLGNE

SEQ ID NO: 23504 - protein, 9 aa, Artificial sequence
  Protein classification predicting sequence
GVCRTVRVA

SEQ ID NO: 23505 - protein, 8 aa, Artificial sequence
  Protein classification predicting sequence
AFAEGVGE

SEQ ID NO: 23506 - protein, 10 aa, Artificial sequence
  Protein classification predicting sequence
RNLAYQAAKL

SEQ ID NO: 23507 - protein, 7 aa, Artificial sequence
  Protein classification predicting sequence
AGLAGGS

SEQ ID NO: 23508 - protein, 9 aa, Artificial sequence
  Protein classification predicting sequence
MSGSGPTVF

SEQ ID NO: 23509 - protein, 6 aa, Artificial sequence
  Protein classification predicting sequence
RADGYH

SEQ ID NO: 23510 - protein, 6 aa, Artificial sequence
  Protein classification predicting sequence
DGYHEL

SEQ ID NO: 23511 - protein, 7 aa, Artificial sequence
  Protein classification predicting sequence
LQTLFQF

SEQ ID NO: 23512 - protein, 8 aa, Artificial sequence
  Protein classification predicting sequence
LVALNYLW

SEQ ID NO: 23513 - protein, 12 aa, Artificial sequence
  Protein classification predicting sequence
IRLLTPVEGVEH

SEQ ID NO: 23514 - protein, 6 aa, Artificial sequence
  Protein classification predicting sequence
EKWYLV

SEQ ID NO: 23515 - protein, 9 aa, Artificial sequence
  Protein classification predicting sequence
LQTLFQFLD

SEQ ID NO: 23516 - protein, 16 aa, Artificial sequence
  Protein classification predicting sequence
PAPAKLNLFLHVVGRR

SEQ ID NO: 23517 - protein, 10 aa, Artificial sequence
  Protein classification predicting sequence
LEKNLPIASG

SEQ ID NO: 23518 - protein, 14 aa, Artificial sequence
  Protein classification predicting sequence
EDNLIVRAARLLMK

SEQ ID NO: 23519 - protein, 27 aa, Artificial sequence
  Protein classification predicting sequence
LSWLLEYAPSRLTGTGACVFAEFDTES

SEQ ID NO: 23520 - protein, 13 aa, Artificial sequence
  Protein classification predicting sequence
ARQVLEQAPEWLN

SEQ ID NO: 23521 - protein, 32 aa, Artificial sequence
  Protein classification predicting sequence
KRLPMGGGLGGGSSNAATVLVALNHLWQCGLS

SEQ ID NO: 23522 - protein, 24 aa, Artificial sequence
  Protein classification predicting sequence
PPEKWYLVAHPGVSIPTPVIFKDP

SEQ ID NO: 23523 - protein, 24 aa, Artificial sequence
  Protein classification predicting sequence
TLLKCEFSNDCEVIARKRFREVDA

SEQ ID NO: 23524 - protein, 10 aa, Artificial sequence
  Protein classification predicting sequence
PAPAKLNLFL

SEQ ID NO: 23525 - protein, 9 aa, Artificial sequence
  Protein classification predicting sequence
GGGLGGGSS

SEQ ID NO: 23526 - protein, 7 aa, Artificial sequence
  Protein classification predicting sequence
GLGGGSS

SEQ ID NO: 23527 - protein, 9 aa, Artificial sequence
  Protein classification predicting sequence
AATTLVALN

SEQ ID NO: 23528 - protein, 9 aa, Artificial sequence
  Protein classification predicting sequence
WLLEYAPSR

SEQ ID NO: 23529 - protein, 8 aa, Artificial sequence
  Protein classification predicting sequence
TGTGACVF

SEQ ID NO: 23530 - protein, 32 aa, Artificial sequence
  Protein classification predicting sequence
IGASLEELALLGSKIGTDIPFCIYNKTALCTG

SEQ ID NO: 23531 - protein, 105 aa, Artificial sequence
  Protein classification predicting sequence
GEKIEFLNKPPSAWVILAKPNLGISSPDIFKLINLDKRYDVHTKMCYEALENRDYQQLCQSLSNRLEPISVSKHPQIDKLKNNMLKSGADGALMSGSGPTVYGLA

SEQ ID NO: 23532 - protein, 7 aa, Artificial sequence
  Protein classification predicting sequence
IEHNYVP

SEQ ID NO: 23533 - protein, 11 aa, Artificial sequence
  Protein classification predicting sequence
IGTDIPFCIYN

SEQ ID NO: 23534 - protein, 8 aa, Artificial sequence
  Protein classification predicting sequence
SLSNRLEP

SEQ ID NO: 23535 - protein, 18 aa, Artificial sequence
  Protein classification predicting sequence
GADGALMSGSGPTVYGLA

SEQ ID NO: 23536 - protein, 13 aa, Artificial sequence
  Protein classification predicting sequence
IPVAGGMAGGSAD

SEQ ID NO: 23537 - protein, 7 aa, Artificial sequence
  Protein classification predicting sequence
DQRNLAY

SEQ ID NO: 23538 - protein, 8 aa, Artificial sequence
  Protein classification predicting sequence
NLHLEVLG

SEQ ID NO: 23539 - protein, 11 aa, Artificial sequence
  Protein classification predicting sequence
GGTAIATGRGE

SEQ ID NO: 23540 - protein, 10 aa, Artificial sequence
  Protein classification predicting sequence
IGSDVPFFLG

SEQ ID NO: 23541 - protein, 10 aa, Artificial sequence
  Protein classification predicting sequence
YAPSRLTGTG

SEQ ID NO: 23542 - protein, 11 aa, Artificial sequence
  Protein classification predicting sequence
GYHELQTLFQF

SEQ ID NO: 23543 - protein, 7 aa, Artificial sequence
  Protein classification predicting sequence
RNTPKRS

SEQ ID NO: 23544 - protein, 9 aa, Artificial sequence
  Protein classification predicting sequence
AATTLIALN

SEQ ID NO: 23545 - protein, 9 aa, Artificial sequence
  Protein classification predicting sequence
AATVLVALN

SEQ ID NO: 23546 - protein, 16 aa, Artificial sequence
  Protein classification predicting sequence
WSAWPAPAKLNLFLQI

SEQ ID NO: 23547 - protein, 7 aa, Artificial sequence
  Protein classification predicting sequence
GYHELQT

SEQ ID NO: 23548 - protein, 9 aa, Artificial sequence
  Protein classification predicting sequence
IARKRFREV

SEQ ID NO: 23549 - protein, 8 aa, Artificial sequence
  Protein classification predicting sequence
GGSADAAA

SEQ ID NO: 23550 - protein, 9 aa, Artificial sequence
  Protein classification predicting sequence
KKPLPPTPE

SEQ ID NO: 23551 - protein, 7 aa, Artificial sequence
  Protein classification predicting sequence
RPPFSQL

SEQ ID NO: 23552 - protein, 7 aa, Artificial sequence
  Protein classification predicting sequence
AKRAYRE

SEQ ID NO: 23553 - protein, 15 aa, Artificial sequence
  Protein classification predicting sequence
VMELMDANLCQVIQM

SEQ ID NO: 23554 - protein, 9 aa, Artificial sequence
  Protein classification predicting sequence
TVRNYVENR

SEQ ID NO: 23555 - protein, 8 aa, Artificial sequence
  Protein classification predicting sequence
VLKRYQNL

SEQ ID NO: 23556 - protein, 19 aa, Artificial sequence
  Protein classification predicting sequence
HLHSAGIIHRDLKPSNIVV

SEQ ID NO: 23557 - protein, 6 aa, Artificial sequence
  Protein classification predicting sequence
YVENRP

SEQ ID NO: 23558 - protein, 8 aa, Artificial sequence
  Protein classification predicting sequence
RISVDDAL

SEQ ID NO: 23559 - protein, 11 aa, Artificial sequence
  Protein classification predicting sequence
PIGSGAQGIVC

SEQ ID NO: 23560 - protein, 15 aa, Artificial sequence
  Protein classification predicting sequence
DCTLKILDFGLARTA

SEQ ID NO: 23561 - protein, 8 aa, Artificial sequence
  Protein classification predicting sequence
LFPGTDHI

SEQ ID NO: 23562 - protein, 9 aa, Artificial sequence
  Protein classification predicting sequence
LLSKMLVID

SEQ ID NO: 23563 - protein, 8 aa, Artificial sequence
  Protein classification predicting sequence
RISVDEAL

SEQ ID NO: 23564 - protein, 7 aa, Artificial sequence
  Protein classification predicting sequence
YINVWYD

SEQ ID NO: 23565 - protein, 6 aa, Artificial sequence
  Protein classification predicting sequence
WKELIY

SEQ ID NO: 23566 - protein, 16 aa, Artificial sequence
  Protein classification predicting sequence
FQDVYIVMELMDANLC

SEQ ID NO: 23567 - protein, 10 aa, Artificial sequence
  Protein classification predicting sequence
LKILDFGLAR

SEQ ID NO: 23568 - protein, 16 aa, Artificial sequence
  Protein classification predicting sequence
MTPYVVTRYYRAPEVI

SEQ ID NO: 23569 - protein, 13 aa, Artificial sequence
  Protein classification predicting sequence
YKENVDIWSVGCI

SEQ ID NO: 23570 - protein, 7 aa, Artificial sequence
  Protein classification predicting sequence
IDQWNKV

SEQ ID NO: 23571 - protein, 11 aa, Artificial sequence
  Protein classification predicting sequence
IVGLVGSIDND

SEQ ID NO: 23572 - protein, 9 aa, Artificial sequence
  Protein classification predicting sequence
GADWLFIPE

SEQ ID NO: 23573 - protein, 7 aa, Artificial sequence
  Protein classification predicting sequence
SNNVPGT

SEQ ID NO: 23574 - protein, 11 aa, Artificial sequence
  Protein classification predicting sequence
CIGLPGTIDND

SEQ ID NO: 23575 - protein, 7 aa, Artificial sequence
  Protein classification predicting sequence
GTDFTIG

SEQ ID NO: 23576 - protein, 7 aa, Artificial sequence
  Protein classification predicting sequence
DKIRDTA

SEQ ID NO: 23577 - protein, 7 aa, Artificial sequence
  Protein classification predicting sequence
GIDALVV

SEQ ID NO: 23578 - protein, 7 aa, Artificial sequence
  Protein classification predicting sequence
KFNIQGL

SEQ ID NO: 23579 - protein, 6 aa, Artificial sequence
  Protein classification predicting sequence
INRGGT

SEQ ID NO: 23580 - protein, 9 aa, Artificial sequence
  Protein classification predicting sequence
LVVIGGDGS

SEQ ID NO: 23581 - protein, 10 aa, Artificial sequence
  Protein classification predicting sequence
TIGFDTALNT

SEQ ID NO: 23582 - protein, 10 aa, Artificial sequence
  Protein classification predicting sequence
HSIIVVAEGV

SEQ ID NO: 23583 - protein, 14 aa, Artificial sequence
  Protein classification predicting sequence
ETRATILGHIQRGG

SEQ ID NO: 23584 - protein, 7 aa, Artificial sequence
  Protein classification predicting sequence
RGGSPTA

SEQ ID NO: 23585 - protein, 9 aa, Artificial sequence
  Protein classification predicting sequence
GGDGSLTGA

SEQ ID NO: 23586 - protein, 9 aa, Artificial sequence
  Protein classification predicting sequence
GMNAAVRAV

SEQ ID NO: 23587 - protein, 7 aa, Artificial sequence
  Protein classification predicting sequence
RTFVVEV

SEQ ID NO: 23588 - protein, 7 aa, Artificial sequence
  Protein classification predicting sequence
PGHVQQG

SEQ ID NO: 23589 - protein, 7 aa, Artificial sequence
  Protein classification predicting sequence
PGTIDND

SEQ ID NO: 23590 - protein, 7 aa, Artificial sequence
  Protein classification predicting sequence
RVTVLGH

SEQ ID NO: 23591 - protein, 9 aa, Artificial sequence
  Protein classification predicting sequence
TSGGDAPGM

SEQ ID NO: 23592 - protein, 7 aa, Artificial sequence
  Protein classification predicting sequence
VIGGDGS

SEQ ID NO: 23593 - protein, 13 aa, Artificial sequence
  Protein classification predicting sequence
GGDGSLTGADLFR

SEQ ID NO: 23594 - protein, 7 aa, Artificial sequence
  Protein classification predicting sequence
GMNAAIR

SEQ ID NO: 23595 - protein, 9 aa, Artificial sequence
  Protein classification predicting sequence
VLGHIQRGG

SEQ ID NO: 23596 - protein, 7 aa, Artificial sequence
  Protein classification predicting sequence
AIRAVVR

SEQ ID NO: 23597 - protein, 6 aa, Artificial sequence
  Protein classification predicting sequence
GSIDND

SEQ ID NO: 23598 - protein, 9 aa, Artificial sequence
  Protein classification predicting sequence
VGAPAAGMN

SEQ ID NO: 23599 - protein, 11 aa, Artificial sequence
  Protein classification predicting sequence
VSNIIQLGGTI

SEQ ID NO: 23600 - protein, 6 aa, Artificial sequence
  Protein classification predicting sequence
GIDALV

SEQ ID NO: 23601 - protein, 12 aa, Artificial sequence
  Protein classification predicting sequence
PCIGLPGTIDND

SEQ ID NO: 23602 - protein, 7 aa, Artificial sequence
  Protein classification predicting sequence
SIVLVAE

SEQ ID NO: 23603 - protein, 8 aa, Artificial sequence
  Protein classification predicting sequence
ADYIFIPE

SEQ ID NO: 23604 - protein, 9 aa, Artificial sequence
  Protein classification predicting sequence
GGSEIGTNR

SEQ ID NO: 23605 - protein, 12 aa, Artificial sequence
  Protein classification predicting sequence
SNNVPGTEYSLG

SEQ ID NO: 23606 - protein, 8 aa, Artificial sequence
  Protein classification predicting sequence
FVVEVMGR

SEQ ID NO: 23607 - protein, 6 aa, Artificial sequence
  Protein classification predicting sequence
NVGAPA

SEQ ID NO: 23608 - protein, 6 aa, Artificial sequence
  Protein classification predicting sequence
SLGSDT

SEQ ID NO: 23609 - protein, 9 aa, Artificial sequence
  Protein classification predicting sequence
IPIGGEGTL

SEQ ID NO: 23610 - protein, 8 aa, Artificial sequence
  Protein classification predicting sequence
ATEALDRL

SEQ ID NO: 23611 - protein, 6 aa, Artificial sequence
  Protein classification predicting sequence
IGSARC

SEQ ID NO: 23612 - protein, 10 aa, Artificial sequence
  Protein classification predicting sequence
GGDGSLTGAD

SEQ ID NO: 23613 - protein, 12 aa, Artificial sequence
  Protein classification predicting sequence
PGMNAAIRAVVR

SEQ ID NO: 23614 - protein, 7 aa, Artificial sequence
  Protein classification predicting sequence
RGKKHSI

SEQ ID NO: 23615 - protein, 6 aa, Artificial sequence
  Protein classification predicting sequence
LVHHDI

SEQ ID NO: 23616 - protein, 10 aa, Artificial sequence
  Protein classification predicting sequence
GYQGLLNDDI

SEQ ID NO: 23617 - protein, 12 aa, Artificial sequence
  Protein classification predicting sequence
VVIGGDGSYHGA

SEQ ID NO: 23618 - protein, 9 aa, Artificial sequence
  Protein classification predicting sequence
SARCPEFKE

SEQ ID NO: 23619 - protein, 6 aa, Artificial sequence
  Protein classification predicting sequence
GFPAVG

SEQ ID NO: 23620 - protein, 10 aa, Artificial sequence
  Protein classification predicting sequence
VAEGVMSGNE

SEQ ID NO: 23621 - protein, 12 aa, Artificial sequence
  Protein classification predicting sequence
RVTVLGHVQRGG

SEQ ID NO: 23622 - protein, 28 aa, Artificial sequence
  Protein classification predicting sequence
RVTVLGHVQRGGSPTAFDRVLASRLGAR

SEQ ID NO: 23623 - protein, 14 aa, Artificial sequence
  Protein classification predicting sequence
VLTSGGDSPGMNAA

SEQ ID NO: 23624 - protein, 9 aa, Artificial sequence
  Protein classification predicting sequence
DRVLASRLG

SEQ ID NO: 23625 - protein, 13 aa, Artificial sequence
  Protein classification predicting sequence
INRGGTFLGSARF

SEQ ID NO: 23626 - protein, 12 aa, Artificial sequence
  Protein classification predicting sequence
GTDYTIGYFTAL

SEQ ID NO: 23627 - protein, 8 aa, Artificial sequence
  Protein classification predicting sequence
LGHIQRGG

SEQ ID NO: 23628 - protein, 12 aa, Artificial sequence
  Protein classification predicting sequence
KGKKHAIVAITE

SEQ ID NO: 23629 - protein, 9 aa, Artificial sequence
  Protein classification predicting sequence
IGVLTSGGD

SEQ ID NO: 23630 - protein, 22 aa, Artificial sequence
  Protein classification predicting sequence
IGVLTSGGDAPGMNAAIRGVVR

SEQ ID NO: 23631 - protein, 8 aa, Artificial sequence
  Protein classification predicting sequence
LDRYSVSD

SEQ ID NO: 23632 - protein, 10 aa, Artificial sequence
  Protein classification predicting sequence
GGTFLGSARF

SEQ ID NO: 23633 - protein, 9 aa, Artificial sequence
  Protein classification predicting sequence
LTEMGFPCI

SEQ ID NO: 23634 - protein, 5 aa, Artificial sequence
  Protein classification predicting sequence
VHHDI

SEQ ID NO: 23635 - protein, 7 aa, Artificial sequence
  Protein classification predicting sequence
NMKRPFK

SEQ ID NO: 23636 - protein, 19 aa, Artificial sequence
  Protein classification predicting sequence
KLRGRSFMNNWEVYKLLAH

SEQ ID NO: 23637 - protein, 7 aa, Artificial sequence
  Protein classification predicting sequence
GMNAAVR

SEQ ID NO: 23638 - protein, 28 aa, Artificial sequence
  Protein classification predicting sequence
HRIPKEQWWLKLRPILKILAKYEIDLDT

SEQ ID NO: 23639 - protein, 6 aa, Artificial sequence
  Protein classification predicting sequence
TIGFDT

SEQ ID NO: 23640 - protein, 7 aa, Artificial sequence
  Protein classification predicting sequence
MGRDCGD

SEQ ID NO: 23641 - protein, 11 aa, Artificial sequence
  Protein classification predicting sequence
TIGIPGTIDND

SEQ ID NO: 23642 - protein, 10 aa, Artificial sequence
  Protein classification predicting sequence
TVLGHIQRGG

SEQ ID NO: 23643 - protein, 9 aa, Artificial sequence
  Protein classification predicting sequence
PTAFDRVLA

SEQ ID NO: 23644 - protein, 6 aa, Artificial sequence
  Protein classification predicting sequence
IQRGGT

SEQ ID NO: 23645 - protein, 7 aa, Artificial sequence
  Protein classification predicting sequence
TIGYFTA

SEQ ID NO: 23646 - protein, 11 aa, Artificial sequence
  Protein classification predicting sequence
VIGGDGSLTGA

SEQ ID NO: 23647 - protein, 7 aa, Artificial sequence
  Protein classification predicting sequence
VGSIDND

SEQ ID NO: 23648 - protein, 7 aa, Artificial sequence
  Protein classification predicting sequence
FVVEVMG

SEQ ID NO: 23649 - protein, 6 aa, Artificial sequence
  Protein classification predicting sequence
HCGYLA

SEQ ID NO: 23650 - protein, 8 aa, Artificial sequence
  Protein classification predicting sequence
LGHLQQGG

SEQ ID NO: 23651 - protein, 7 aa, Artificial sequence
  Protein classification predicting sequence
ALHRIIE

SEQ ID NO: 23652 - protein, 10 aa, Artificial sequence
  Protein classification predicting sequence
TVLGHVQRGG

SEQ ID NO: 23653 - protein, 6 aa, Artificial sequence
  Protein classification predicting sequence
PLMECV

SEQ ID NO: 23654 - protein, 8 aa, Artificial sequence
  Protein classification predicting sequence
LGTKRTLP

SEQ ID NO: 23655 - protein, 7 aa, Artificial sequence
  Protein classification predicting sequence
GTKRRVF

SEQ ID NO: 23656 - protein, 7 aa, Artificial sequence
  Protein classification predicting sequence
GADAAYI

SEQ ID NO: 23657 - protein, 9 aa, Artificial sequence
  Protein classification predicting sequence
YDGYLGLYE

SEQ ID NO: 23658 - protein, 6 aa, Artificial sequence
  Protein classification predicting sequence
AIENMK

SEQ ID NO: 23659 - protein, 13 aa, Artificial sequence
  Protein classification predicting sequence
VVPEVEFSREDLV

SEQ ID NO: 23660 - protein, 7 aa, Artificial sequence
  Protein classification predicting sequence
IVLVAEG

SEQ ID NO: 23661 - protein, 7 aa, Artificial sequence
  Protein classification predicting sequence
DRVLASR

SEQ ID NO: 23662 - protein, 10 aa, Artificial sequence
  Protein classification predicting sequence
TSGGDSQGMN

SEQ ID NO: 23663 - protein, 7 aa, Artificial sequence
  Protein classification predicting sequence
TAQSHQR

SEQ ID NO: 23664 - protein, 8 aa, Artificial sequence
  Protein classification predicting sequence
EVMGRHCG

SEQ ID NO: 23665 - protein, 12 aa, Artificial sequence
  Protein classification predicting sequence
QQGGSPTPFDRN

SEQ ID NO: 23666 - protein, 8 aa, Artificial sequence
  Protein classification predicting sequence
QWWLKLRP

SEQ ID NO: 23667 - protein, 7 aa, Artificial sequence
  Protein classification predicting sequence
VLTSGGD

SEQ ID NO: 23668 - protein, 16 aa, Artificial sequence
  Protein classification predicting sequence
VLTSGGDAPGMNAAIR

SEQ ID NO: 23669 - protein, 20 aa, Artificial sequence
  Protein classification predicting sequence
VLTSGGDAPGMNAAIRGVVR

SEQ ID NO: 23670 - protein, 9 aa, Artificial sequence
  Protein classification predicting sequence
KILAKYEID

SEQ ID NO: 23671 - protein, 10 aa, Artificial sequence
  Protein classification predicting sequence
GLPGTIDNDI

SEQ ID NO: 23672 - protein, 7 aa, Artificial sequence
  Protein classification predicting sequence
TAVEAID

SEQ ID NO: 23673 - protein, 9 aa, Artificial sequence
  Protein classification predicting sequence
SHQRISIVE

SEQ ID NO: 23674 - protein, 6 aa, Artificial sequence
  Protein classification predicting sequence
MGRHCG

SEQ ID NO: 23675 - protein, 10 aa, Artificial sequence
  Protein classification predicting sequence
LVHHDIIDAI

SEQ ID NO: 23676 - protein, 9 aa, Artificial sequence
  Protein classification predicting sequence
DRILASRMG

SEQ ID NO: 23677 - protein, 17 aa, Artificial sequence
  Protein classification predicting sequence
GITNLCVIGGDGSLTGA

SEQ ID NO: 23678 - protein, 8 aa, Artificial sequence
  Protein classification predicting sequence
NGKPITSE

SEQ ID NO: 23679 - protein, 8 aa, Artificial sequence
  Protein classification predicting sequence
EAVMALLE

SEQ ID NO: 23680 - protein, 18 aa, Artificial sequence
  Protein classification predicting sequence
GGFEAYTGGLELMEGRKQ

SEQ ID NO: 23681 - protein, 55 aa, Artificial sequence
  Protein classification predicting sequence
TCDRIKQSAAGTKRRVFIIETMGGYCGYLATMAGLAAGADAAYIFEEPFTIRDLQ

SEQ ID NO: 23682 - protein, 28 aa, Artificial sequence
  Protein classification predicting sequence
NVEHLVQKMKTTVKRGLVLRNEKCNENY

SEQ ID NO: 23683 - protein, 36 aa, Artificial sequence
  Protein classification predicting sequence
EATWESVSMMLQLGGTVIGSARCKDFREREGRLRAA

SEQ ID NO: 23684 - protein, 26 aa, Artificial sequence
  Protein classification predicting sequence
GLVGSIDNDFCGTDMTIGTDSALHRI

SEQ ID NO: 23685 - protein, 8 aa, Artificial sequence
  Protein classification predicting sequence
FQPVAELK

SEQ ID NO: 23686 - protein, 6 aa, Artificial sequence
  Protein classification predicting sequence
RGGTFL

SEQ ID NO: 23687 - protein, 12 aa, Artificial sequence
  Protein classification predicting sequence
EGQLAGIEQLKK

SEQ ID NO: 23688 - protein, 7 aa, Artificial sequence
  Protein classification predicting sequence
GIEQLKK

SEQ ID NO: 23689 - protein, 29 aa, Artificial sequence
  Protein classification predicting sequence
GIEGVVVIGGDGSYHGAMRLTEHGFPAVG

SEQ ID NO: 23690 - protein, 7 aa, Artificial sequence
  Protein classification predicting sequence
TIGFDTA

SEQ ID NO: 23691 - protein, 7 aa, Artificial sequence
  Protein classification predicting sequence
RDTSSSH

SEQ ID NO: 23692 - protein, 7 aa, Artificial sequence
  Protein classification predicting sequence
LASRMGA

SEQ ID NO: 23693 - protein, 7 aa, Artificial sequence
  Protein classification predicting sequence
VNNPHKA

SEQ ID NO: 23694 - protein, 11 aa, Artificial sequence
  Protein classification predicting sequence
EGQLKGIEQLK

SEQ ID NO: 23695 - protein, 6 aa, Artificial sequence
  Protein classification predicting sequence
RTFIIE

SEQ ID NO: 23696 - protein, 30 aa, Artificial sequence
  Protein classification predicting sequence
NLVKRGITNLCVIGGDGSLTGADTFRSEWS

SEQ ID NO: 23697 - protein, 9 aa, Artificial sequence
  Protein classification predicting sequence
DLQKAGKIT

SEQ ID NO: 23698 - protein, 28 aa, Artificial sequence
  Protein classification predicting sequence
IKESYRNGRIFANTPDSGCVLGMRKRAL

SEQ ID NO: 23699 - protein, 7 aa, Artificial sequence
  Protein classification predicting sequence
FQPVTEL

SEQ ID NO: 23700 - protein, 9 aa, Artificial sequence
  Protein classification predicting sequence
EPLDFVARL

SEQ ID NO: 23701 - protein, 9 aa, Artificial sequence
  Protein classification predicting sequence
GDTISAGAF

SEQ ID NO: 23702 - protein, 14 aa, Artificial sequence
  Protein classification predicting sequence
PATVSNNVPGSDFS

SEQ ID NO: 23703 - protein, 9 aa, Artificial sequence
  Protein classification predicting sequence
GADTALNTI

SEQ ID NO: 23704 - protein, 5 aa, Artificial sequence
  Protein classification predicting sequence
MGRHC

SEQ ID NO: 23705 - protein, 6 aa, Artificial sequence
  Protein classification predicting sequence
GFPCIG

SEQ ID NO: 23706 - protein, 11 aa, Artificial sequence
  Protein classification predicting sequence
EYVKLRFEEAK

SEQ ID NO: 23707 - protein, 12 aa, Artificial sequence
  Protein classification predicting sequence
YSDGKDANYYLR

SEQ ID NO: 23708 - protein, 51 aa, Artificial sequence
  Protein classification predicting sequence
EIVDAITTTAQSHQRTFVLEVMGRHCGYLALVTSLSCGADWVFIPECPPDD

SEQ ID NO: 23709 - protein, 27 aa, Artificial sequence
  Protein classification predicting sequence
HLCRRLSETRTRGSRLNIIIVAEGAID

SEQ ID NO: 23710 - protein, 41 aa, Artificial sequence
  Protein classification predicting sequence
TVAVMNVGAPAAGMNAAVRSTVRIGLIQGNRVLVVHDGFEG

SEQ ID NO: 23711 - protein, 24 aa, Artificial sequence
  Protein classification predicting sequence
AKTLGIGKAIAVLTSGGDAQGMNA

SEQ ID NO: 23712 - protein, 12 aa, Artificial sequence
  Protein classification predicting sequence
VRAVVRVGIFTG

SEQ ID NO: 23713 - protein, 16 aa, Artificial sequence
  Protein classification predicting sequence
RVFFVHEGYQGLVDGG

SEQ ID NO: 23714 - protein, 9 aa, Artificial sequence
  Protein classification predicting sequence
EQISANITK

SEQ ID NO: 23715 - protein, 51 aa, Artificial sequence
  Protein classification predicting sequence
NIQGLVIIGGFEAYTGGLELMEGRKQFDELCIPFVVIPATVSNNVPGSDFS

SEQ ID NO: 23716 - protein, 66 aa, Artificial sequence
  Protein classification predicting sequence
GADTALNTICTTCDRIKQSAAGTKRRVFIIETMGGYCGYLATMAGLAAGADAAYIFEEPFTIRDLQ

SEQ ID NO: 23717 - protein, 16 aa, Artificial sequence
  Protein classification predicting sequence
PTPFDRNFATKMGAKA

SEQ ID NO: 23718 - protein, 28 aa, Artificial sequence
  Protein classification predicting sequence
RLTEMGFPCIGLPGTIDNDIKGTDYTIG

SEQ ID NO: 23719 - protein, 7 aa, Artificial sequence
  Protein classification predicting sequence
VVPEVEF

SEQ ID NO: 23720 - protein, 20 aa, Artificial sequence
  Protein classification predicting sequence
VLTSGGDAQGMNAAVRAVVR

SEQ ID NO: 23721 - protein, 10 aa, Artificial sequence
  Protein classification predicting sequence
EGYQGLVDGG

SEQ ID NO: 23722 - protein, 7 aa, Artificial sequence
  Protein classification predicting sequence
DSALHRI

SEQ ID NO: 23723 - protein, 8 aa, Artificial sequence
  Protein classification predicting sequence
ADWVFIPE

SEQ ID NO: 23724 - protein, 11 aa, Artificial sequence
  Protein classification predicting sequence
PATISNNVPGT

SEQ ID NO: 23725 - protein, 12 aa, Artificial sequence
  Protein classification predicting sequence
ETMGGYCGYLAT

SEQ ID NO: 23726 - protein, 6 aa, Artificial sequence
  Protein classification predicting sequence
SHSRAF

SEQ ID NO: 23727 - protein, 16 aa, Artificial sequence
  Protein classification predicting sequence
VDKIRDTASSHARTFI

SEQ ID NO: 23728 - protein, 15 aa, Artificial sequence
  Protein classification predicting sequence
KIEQGIKRGKKHSIV

SEQ ID NO: 23729 - protein, 15 aa, Artificial sequence
  Protein classification predicting sequence
GADRVLASRLGGYAV

SEQ ID NO: 23730 - protein, 10 aa, Artificial sequence
  Protein classification predicting sequence
QGETAKGVGI

SEQ ID NO: 23731 - protein, 22 aa, Artificial sequence
  Protein classification predicting sequence
DDIHKLELGSVGDTIQRGGTFL

SEQ ID NO: 23732 - protein, 65 aa, Artificial sequence
  Protein classification predicting sequence
AIENLRKRGIEGLVVIGGDGSYRGAQRISEECKEIQTIGIPGTIDNDINGTDFTIGFDTALNTII

SEQ ID NO: 23733 - protein, 22 aa, Artificial sequence
  Protein classification predicting sequence
MGRDCGDLALWAGLSVGAETIV

SEQ ID NO: 23734 - protein, 10 aa, Artificial sequence
  Protein classification predicting sequence
SDLRVTNLGH

SEQ ID NO: 23735 - protein, 11 aa, Artificial sequence
  Protein classification predicting sequence
RGGSPTARDRV

SEQ ID NO: 23736 - protein, 9 aa, Artificial sequence
  Protein classification predicting sequence
LASRMGAYA

SEQ ID NO: 23737 - protein, 8 aa, Artificial sequence
  Protein classification predicting sequence
SARYPEFA

SEQ ID NO: 23738 - protein, 12 aa, Artificial sequence
  Protein classification predicting sequence
GTDYTIGFDTAV

SEQ ID NO: 23739 - protein, 7 aa, Artificial sequence
  Protein classification predicting sequence
AGDIALW

SEQ ID NO: 23740 - protein, 10 aa, Artificial sequence
  Protein classification predicting sequence
RDRVIASWMG

SEQ ID NO: 23741 - protein, 8 aa, Artificial sequence
  Protein classification predicting sequence
AISEGMEV

SEQ ID NO: 23742 - protein, 14 aa, Artificial sequence
  Protein classification predicting sequence
SARYPEFAQLEGQL

SEQ ID NO: 23743 - protein, 6 aa, Artificial sequence
  Protein classification predicting sequence
DKIRDT

SEQ ID NO: 23744 - protein, 8 aa, Artificial sequence
  Protein classification predicting sequence
QKLKEAGD

SEQ ID NO: 23745 - protein, 15 aa, Artificial sequence
  Protein classification predicting sequence
PILGTAEEGALFSLT

SEQ ID NO: 23746 - protein, 37 aa, Artificial sequence
  Protein classification predicting sequence
SHGRTFVVEVMGRNAGDIALWAGIASGADQIIVPEEE

SEQ ID NO: 23747 - protein, 9 aa, Artificial sequence
  Protein classification predicting sequence
GAEAIIVPE

SEQ ID NO: 23748 - protein, 7 aa, Artificial sequence
  Protein classification predicting sequence
IIIVAEG

SEQ ID NO: 23749 - protein, 9 aa, Artificial sequence
  Protein classification predicting sequence
DNPLSEEEL

SEQ ID NO: 23750 - protein, 14 aa, Artificial sequence
  Protein classification predicting sequence
INRGGTFLGSARFP

SEQ ID NO: 23751 - protein, 21 aa, Artificial sequence
  Protein classification predicting sequence
ALVVIGGDGSYMGAKKLTEMG

SEQ ID NO: 23752 - protein, 13 aa, Artificial sequence
  Protein classification predicting sequence
PCIGLPGTIDNDI

SEQ ID NO: 23753 - protein, 8 aa, Artificial sequence
  Protein classification predicting sequence
PGTIDNDI

SEQ ID NO: 23754 - protein, 17 aa, Artificial sequence
  Protein classification predicting sequence
SAIAGGCEYIITPETGL

SEQ ID NO: 23755 - protein, 11 aa, Artificial sequence
  Protein classification predicting sequence
PTAFDRVLASR

SEQ ID NO: 23756 - protein, 21 aa, Artificial sequence
  Protein classification predicting sequence
KEQLVHHDIIDAIENMKRPVR

SEQ ID NO: 23757 - protein, 14 aa, Artificial sequence
  Protein classification predicting sequence
PGTIDNDIAGTDYT

SEQ ID NO: 23758 - protein, 7 aa, Artificial sequence
  Protein classification predicting sequence
GGRCVGI

SEQ ID NO: 23759 - protein, 8 aa, Artificial sequence
  Protein classification predicting sequence
DGYLGLYE

SEQ ID NO: 23760 - protein, 27 aa, Artificial sequence
  Protein classification predicting sequence
LDRYSVSDMINRGGTFLGSARFPEFRD

SEQ ID NO: 23761 - protein, 7 aa, Artificial sequence
  Protein classification predicting sequence
GTDYTIG

SEQ ID NO: 23762 - protein, 19 aa, Artificial sequence
  Protein classification predicting sequence
EIKAGIAKGKKHAIVAITE

SEQ ID NO: 23763 - protein, 12 aa, Artificial sequence
  Protein classification predicting sequence
AEGAIDRNGKPI

SEQ ID NO: 23764 - protein, 9 aa, Artificial sequence
  Protein classification predicting sequence
TPDTPACVV

SEQ ID NO: 23765 - protein, 15 aa, Artificial sequence
  Protein classification predicting sequence
NVGAPAAGMNAAVRS

SEQ ID NO: 23766 - protein, 8 aa, Artificial sequence
  Protein classification predicting sequence
CDRIKQSA

SEQ ID NO: 23767 - protein, 10 aa, Artificial sequence
  Protein classification predicting sequence
RGLVLRNEKC

SEQ ID NO: 23768 - protein, 7 aa, Artificial sequence
  Protein classification predicting sequence
PTPFDRN

SEQ ID NO: 23769 - protein, 6 aa, Artificial sequence
  Protein classification predicting sequence
TDFEHR

SEQ ID NO: 23770 - protein, 15 aa, Artificial sequence
  Protein classification predicting sequence
VRLPLMECVQVTKDV

SEQ ID NO: 23771 - protein, 6 aa, Artificial sequence
  Protein classification predicting sequence
AFDRVL

SEQ ID NO: 23772 - protein, 18 aa, Artificial sequence
  Protein classification predicting sequence
VLTSGGDAQGMNAAVRAV

SEQ ID NO: 23773 - protein, 10 aa, Artificial sequence
  Protein classification predicting sequence
RMGIYVGAKV

SEQ ID NO: 23774 - protein, 25 aa, Artificial sequence
  Protein classification predicting sequence
TTAQSHQRTFVLEVMGRHCGYLALV

SEQ ID NO: 23775 - protein, 7 aa, Artificial sequence
  Protein classification predicting sequence
CGADWVF

SEQ ID NO: 23776 - protein, 8 aa, Artificial sequence
  Protein classification predicting sequence
LGYDTRVT

SEQ ID NO: 23777 - protein, 8 aa, Artificial sequence
  Protein classification predicting sequence
SRMGVEAV

SEQ ID NO: 23778 - protein, 10 aa, Artificial sequence
  Protein classification predicting sequence
VGGWTGQGGS

SEQ ID NO: 23779 - protein, 7 aa, Artificial sequence
  Protein classification predicting sequence
DTALNTI

SEQ ID NO: 23780 - protein, 12 aa, Artificial sequence
  Protein classification predicting sequence
RKNVLGHMQQGG

SEQ ID NO: 23781 - protein, 7 aa, Artificial sequence
  Protein classification predicting sequence
NYTTDFI

SEQ ID NO: 23782 - protein, 10 aa, Artificial sequence
  Protein classification predicting sequence
GITNLCVIGG

SEQ ID NO: 23783 - protein, 12 aa, Artificial sequence
  Protein classification predicting sequence
LGPPGAGKGTQA

SEQ ID NO: 23784 - protein, 21 aa, Artificial sequence
  Protein classification predicting sequence
KYGYTHLSTGDLLRAEVSSGS

SEQ ID NO: 23785 - protein, 10 aa, Artificial sequence
  Protein classification predicting sequence
PTLLLYVDAG

SEQ ID NO: 23786 - protein, 27 aa, Artificial sequence
  Protein classification predicting sequence
RLLKRGETSGRVDDNEETIKKRLETYY

SEQ ID NO: 23787 - protein, 12 aa, Artificial sequence
  Protein classification predicting sequence
KRGIVRKVNAEG

SEQ ID NO: 23788 - protein, 10 aa, Artificial sequence
  Protein classification predicting sequence
VFSQVCTHLD

SEQ ID NO: 23789 - protein, 6 aa, Artificial sequence
  Protein classification predicting sequence
TGDMLR

SEQ ID NO: 23790 - protein, 6 aa, Artificial sequence
  Protein classification predicting sequence
SGRSYH

SEQ ID NO: 23791 - protein, 10 aa, Artificial sequence
  Protein classification predicting sequence
DGFPRTIPQA

SEQ ID NO: 23792 - protein, 42 aa, Artificial sequence
  Protein classification predicting sequence
NFCVCHLATGDMLRAMVASGSELGKKLKATMDAGKLVSDEMV

SEQ ID NO: 23793 - protein, 7 aa, Artificial sequence
  Protein classification predicting sequence
TGDMLRA

SEQ ID NO: 23794 - protein, 10 aa, Artificial sequence
  Protein classification predicting sequence
ELIEKNLETP

SEQ ID NO: 23795 - protein, 9 aa, Artificial sequence
  Protein classification predicting sequence
QAEMLDDLM

SEQ ID NO: 23796 - protein, 6 aa, Artificial sequence
  Protein classification predicting sequence
LLGAPG

SEQ ID NO: 23797 - protein, 14 aa, Artificial sequence
  Protein classification predicting sequence
SGRVYNIEFNPPKT

SEQ ID NO: 23798 - protein, 11 aa, Artificial sequence
  Protein classification predicting sequence
FIDQGKLIPDD

SEQ ID NO: 23799 - protein, 23 aa, Artificial sequence
  Protein classification predicting sequence
LPNILLTGTPGVGKTTLGKELAS

SEQ ID NO: 23800 - protein, 8 aa, Artificial sequence
  Protein classification predicting sequence
NVGDLARE

SEQ ID NO: 23801 - protein, 15 aa, Artificial sequence
  Protein classification predicting sequence
DNIQCEIFQVLYEEA

SEQ ID NO: 23802 - protein, 9 aa, Artificial sequence
  Protein classification predicting sequence
CPILDEDRV

SEQ ID NO: 23803 - protein, 26 aa, Artificial sequence
  Protein classification predicting sequence
GGVIVDYHGCDFFPERWFHIVFVLRT

SEQ ID NO: 23804 - protein, 12 aa, Artificial sequence
  Protein classification predicting sequence
KVVVVTGVPGVG

SEQ ID NO: 23805 - protein, 7 aa, Artificial sequence
  Protein classification predicting sequence
GYLPGLP

SEQ ID NO: 23806 - protein, 24 aa, Artificial sequence
  Protein classification predicting sequence
PSEILGRRLRDLKRDRDVETEEQI

SEQ ID NO: 23807 - protein, 7 aa, Artificial sequence
  Protein classification predicting sequence
GDLLRAE

SEQ ID NO: 23808 - protein, 12 aa, Artificial sequence
  Protein classification predicting sequence
LDGFPRTVRQAE

SEQ ID NO: 23809 - protein, 6 aa, Artificial sequence
  Protein classification predicting sequence
SGRVYH

SEQ ID NO: 23810 - protein, 8 aa, Artificial sequence
  Protein classification predicting sequence
LVKERIAQ

SEQ ID NO: 23811 - protein, 7 aa, Artificial sequence
  Protein classification predicting sequence
FDGFPRT

SEQ ID NO: 23812 - protein, 6 aa, Artificial sequence
  Protein classification predicting sequence
KYGIPQ

SEQ ID NO: 23813 - protein, 7 aa, Artificial sequence
  Protein classification predicting sequence
GGLVSDD

SEQ ID NO: 23814 - protein, 6 aa, Artificial sequence
  Protein classification predicting sequence
DCAKGF

SEQ ID NO: 23815 - protein, 10 aa, Artificial sequence
  Protein classification predicting sequence
EYREKTAPLS

SEQ ID NO: 23816 - protein, 7 aa, Artificial sequence
  Protein classification predicting sequence
RLEVYRE

SEQ ID NO: 23817 - protein, 8 aa, Artificial sequence
  Protein classification predicting sequence
DKGELVPD

SEQ ID NO: 23818 - protein, 6 aa, Artificial sequence
  Protein classification predicting sequence
HISTGD

SEQ ID NO: 23819 - protein, 9 aa, Artificial sequence
  Protein classification predicting sequence
HISTGDMFR

SEQ ID NO: 23820 - protein, 67 aa, Artificial sequence
  Protein classification predicting sequence
DCVRGFLLDGFPRTVAQASALEEIMKDLGKKIDYVLNINVDSGLLLKRLTGRRICKECGATYHLEFN

SEQ ID NO: 23821 - protein, 7 aa, Artificial sequence
  Protein classification predicting sequence
VPEEELM

SEQ ID NO: 23822 - protein, 8 aa, Artificial sequence
  Protein classification predicting sequence
ISTGDMFR

SEQ ID NO: 23823 - protein, 7 aa, Artificial sequence
  Protein classification predicting sequence
PRTVPQA

SEQ ID NO: 23824 - protein, 6 aa, Artificial sequence
  Protein classification predicting sequence
AKSYMD

SEQ ID NO: 23825 - protein, 7 aa, Artificial sequence
  Protein classification predicting sequence
SGRTYHV

SEQ ID NO: 23826 - protein, 7 aa, Artificial sequence
  Protein classification predicting sequence
NPPKVEG

SEQ ID NO: 23827 - protein, 9 aa, Artificial sequence
  Protein classification predicting sequence
GELVPDEVT

SEQ ID NO: 23828 - protein, 14 aa, Artificial sequence
  Protein classification predicting sequence
GFLLDGFPRTVAQA

SEQ ID NO: 23829 - protein, 9 aa, Artificial sequence
  Protein classification predicting sequence
TYHLVFNPP

SEQ ID NO: 23830 - protein, 6 aa, Artificial sequence
  Protein classification predicting sequence
RADDNE

SEQ ID NO: 23831 - protein, 6 aa, Artificial sequence
  Protein classification predicting sequence
INGEQD

SEQ ID NO: 23832 - protein, 13 aa, Artificial sequence
  Protein classification predicting sequence
CGTTYHLVFNPPK

SEQ ID NO: 23833 - protein, 6 aa, Artificial sequence
  Protein classification predicting sequence
KRLETY

SEQ ID NO: 23834 - protein, 6 aa, Artificial sequence
  Protein classification predicting sequence
SGRTYH

SEQ ID NO: 23835 - protein, 8 aa, Artificial sequence
  Protein classification predicting sequence
FILDGFPR

SEQ ID NO: 23836 - protein, 6 aa, Artificial sequence
  Protein classification predicting sequence
DYVLEF

SEQ ID NO: 23837 - protein, 9 aa, Artificial sequence
  Protein classification predicting sequence
QADAMKEAG

SEQ ID NO: 23838 - protein, 6 aa, Artificial sequence
  Protein classification predicting sequence
RMSGRR

SEQ ID NO: 23839 - protein, 10 aa, Artificial sequence
  Protein classification predicting sequence
QRDDDKEETV

SEQ ID NO: 23840 - protein, 16 aa, Artificial sequence
  Protein classification predicting sequence
LFLIIGAPGSGKTTDA

SEQ ID NO: 23841 - protein, 7 aa, Artificial sequence
  Protein classification predicting sequence
AGKGTQA

SEQ ID NO: 23842 - protein, 7 aa, Artificial sequence
  Protein classification predicting sequence
STGDMLR

SEQ ID NO: 23843 - protein, 10 aa, Artificial sequence
  Protein classification predicting sequence
DGFPRTVAQA

SEQ ID NO: 23844 - protein, 7 aa, Artificial sequence
  Protein classification predicting sequence
LIRRSDD

SEQ ID NO: 23845 - protein, 21 aa, Artificial sequence
  Protein classification predicting sequence
QRDDDKEETVKKRLAVYHEQT

SEQ ID NO: 23846 - protein, 8 aa, Artificial sequence
  Protein classification predicting sequence
TPLGIEAK

SEQ ID NO: 23847 - protein, 7 aa, Artificial sequence
  Protein classification predicting sequence
QDDCKNG

SEQ ID NO: 23848 - protein, 8 aa, Artificial sequence
  Protein classification predicting sequence
YHIKFNPP

SEQ ID NO: 23849 - protein, 7 aa, Artificial sequence
  Protein classification predicting sequence
IALVKER

SEQ ID NO: 23850 - protein, 7 aa, Artificial sequence
  Protein classification predicting sequence
TGRLIHP

SEQ ID NO: 23851 - protein, 18 aa, Artificial sequence
  Protein classification predicting sequence
FVVGGPGSGKGTQCEKIV

SEQ ID NO: 23852 - protein, 7 aa, Artificial sequence
  Protein classification predicting sequence
LIDGYPR

SEQ ID NO: 23853 - protein, 6 aa, Artificial sequence
  Protein classification predicting sequence
DDNEET

SEQ ID NO: 23854 - protein, 11 aa, Artificial sequence
  Protein classification predicting sequence
DDNEETIKKRL

SEQ ID NO: 23855 - protein, 7 aa, Artificial sequence
  Protein classification predicting sequence
STGDILR

SEQ ID NO: 23856 - protein, 7 aa, Artificial sequence
  Protein classification predicting sequence
ELGKQAK

SEQ ID NO: 23857 - protein, 6 aa, Artificial sequence
  Protein classification predicting sequence
YQREDD

SEQ ID NO: 23858 - protein, 22 aa, Artificial sequence
  Protein classification predicting sequence
DCRNGFLLDGFPRTIPQADAMK

SEQ ID NO: 23859 - protein, 6 aa, Artificial sequence
  Protein classification predicting sequence
RKDDQE

SEQ ID NO: 23860 - protein, 14 aa, Artificial sequence
  Protein classification predicting sequence
GAPGAGKGTQAKFI

SEQ ID NO: 23861 - protein, 6 aa, Artificial sequence
  Protein classification predicting sequence
PQISTG

SEQ ID NO: 23862 - protein, 7 aa, Artificial sequence
  Protein classification predicting sequence
RIVGRRV

SEQ ID NO: 23863 - protein, 7 aa, Artificial sequence
  Protein classification predicting sequence
RRRLEVY

SEQ ID NO: 23864 - protein, 8 aa, Artificial sequence
  Protein classification predicting sequence
GTPLGLEA

SEQ ID NO: 23865 - protein, 14 aa, Artificial sequence
  Protein classification predicting sequence
ILLGAPGAGKGTQA

SEQ ID NO: 23866 - protein, 15 aa, Artificial sequence
  Protein classification predicting sequence
DEVIVERMSGRRVHQ

SEQ ID NO: 23867 - protein, 6 aa, Artificial sequence
  Protein classification predicting sequence
RLAVYH

SEQ ID NO: 23868 - protein, 6 aa, Artificial sequence
  Protein classification predicting sequence
GELVPD

SEQ ID NO: 23869 - protein, 7 aa, Artificial sequence
  Protein classification predicting sequence
STGDLLR

SEQ ID NO: 23870 - protein, 8 aa, Artificial sequence
  Protein classification predicting sequence
AKSYIDKG

SEQ ID NO: 23871 - protein, 12 aa, Artificial sequence
  Protein classification predicting sequence
MGLPGAGKGTQA

SEQ ID NO: 23872 - protein, 6 aa, Artificial sequence
  Protein classification predicting sequence
GFLLDG

SEQ ID NO: 23873 - protein, 8 aa, Artificial sequence
  Protein classification predicting sequence
NRLDVNIK

SEQ ID NO: 23874 - protein, 9 aa, Artificial sequence
  Protein classification predicting sequence
PGAGKGTQA

SEQ ID NO: 23875 - protein, 7 aa, Artificial sequence
  Protein classification predicting sequence
LVPDEVT

SEQ ID NO: 23876 - protein, 11 aa, Artificial sequence
  Protein classification predicting sequence
LVPDEVTNGIV

SEQ ID NO: 23877 - protein, 7 aa, Artificial sequence
  Protein classification predicting sequence
LDGVINI

SEQ ID NO: 23878 - protein, 8 aa, Artificial sequence
  Protein classification predicting sequence
LVERLSGR

SEQ ID NO: 23879 - protein, 8 aa, Artificial sequence
  Protein classification predicting sequence
ISTGDIFR

SEQ ID NO: 23880 - protein, 11 aa, Artificial sequence
  Protein classification predicting sequence
GFLLDGFPRTV

SEQ ID NO: 23881 - protein, 17 aa, Artificial sequence
  Protein classification predicting sequence
LMGLPGAGKGTQAEQIV

SEQ ID NO: 23882 - protein, 9 aa, Artificial sequence
  Protein classification predicting sequence
SINGEQDIN

SEQ ID NO: 23883 - protein, 7 aa, Artificial sequence
  Protein classification predicting sequence
GGELYQR

SEQ ID NO: 23884 - protein, 14 aa, Artificial sequence
  Protein classification predicting sequence
GFLLDGFPRTVEQA

SEQ ID NO: 23885 - protein, 11 aa, Artificial sequence
  Protein classification predicting sequence
IILGLIKERIA

SEQ ID NO: 23886 - protein, 6 aa, Artificial sequence
  Protein classification predicting sequence
DDKEET

SEQ ID NO: 23887 - protein, 6 aa, Artificial sequence
  Protein classification predicting sequence
QRDDDK

SEQ ID NO: 23888 - protein, 8 aa, Artificial sequence
  Protein classification predicting sequence
FILDGYPR

SEQ ID NO: 23889 - protein, 15 aa, Artificial sequence
  Protein classification predicting sequence
EKLGIPQISTGELFR

SEQ ID NO: 23890 - protein, 7 aa, Artificial sequence
  Protein classification predicting sequence
STGDIFR

SEQ ID NO: 23891 - protein, 16 aa, Artificial sequence
  Protein classification predicting sequence
LLGAPGAGKGTQAQFI

SEQ ID NO: 23892 - protein, 7 aa, Artificial sequence
  Protein classification predicting sequence
VKERIAQ

SEQ ID NO: 23893 - protein, 9 aa, Artificial sequence
  Protein classification predicting sequence
LDAVVEIDV

SEQ ID NO: 23894 - protein, 11 aa, Artificial sequence
  Protein classification predicting sequence
EGKDDVTGEDL

SEQ ID NO: 23895 - protein, 39 aa, Artificial sequence
  Protein classification predicting sequence
LLLGAPGAGKGTQAQFITAAFGIPQISTGDMLRAAIKAG

SEQ ID NO: 23896 - protein, 89 aa, Artificial sequence
  Protein classification predicting sequence
PLGLEAKKIIDEGGLVRDDIIIGMVKERIAQDDCKNGFLFDGFPRTLAQAEAMVEAGVDLDAVVEIDVPDSVIVDRMSGRRVHLASGRT

SEQ ID NO: 23897 - protein, 7 aa, Artificial sequence
  Protein classification predicting sequence
PHISTGD

SEQ ID NO: 23898 - protein, 14 aa, Artificial sequence
  Protein classification predicting sequence
KYNIPHISTGDMFR

SEQ ID NO: 23899 - protein, 11 aa, Artificial sequence
  Protein classification predicting sequence
IPHISTGDMFR

SEQ ID NO: 23900 - protein, 6 aa, Artificial sequence
  Protein classification predicting sequence
GIVKER

SEQ ID NO: 23901 - protein, 9 aa, Artificial sequence
  Protein classification predicting sequence
YHVVYNPPK

SEQ ID NO: 23902 - protein, 7 aa, Artificial sequence
  Protein classification predicting sequence
LIQRDDD

SEQ ID NO: 23903 - protein, 6 aa, Artificial sequence
  Protein classification predicting sequence
TGDIFR

SEQ ID NO: 23904 - protein, 15 aa, Artificial sequence
  Protein classification predicting sequence
GFLLDGFPRTIPQAD

SEQ ID NO: 23905 - protein, 17 aa, Artificial sequence
  Protein classification predicting sequence
YNPPKVEGKDDVTGEDL

SEQ ID NO: 23906 - protein, 17 aa, Artificial sequence
  Protein classification predicting sequence
GKLVTDELVIALVKERI

SEQ ID NO: 23907 - protein, 14 aa, Artificial sequence
  Protein classification predicting sequence
VDYVLEFDVPDELI

SEQ ID NO: 23908 - protein, 13 aa, Artificial sequence
  Protein classification predicting sequence
VIVERMAGRRAHL

SEQ ID NO: 23909 - protein, 7 aa, Artificial sequence
  Protein classification predicting sequence
DDKEETV

SEQ ID NO: 23910 - protein, 7 aa, Artificial sequence
  Protein classification predicting sequence
ARLGVYH

SEQ ID NO: 23911 - protein, 8 aa, Artificial sequence
  Protein classification predicting sequence
YLKFDGTK

SEQ ID NO: 23912 - protein, 13 aa, Artificial sequence
  Protein classification predicting sequence
FDGFPRTIPQAEA

SEQ ID NO: 23913 - protein, 8 aa, Artificial sequence
  Protein classification predicting sequence
YREKTAPL

SEQ ID NO: 23914 - protein, 6 aa, Artificial sequence
  Protein classification predicting sequence
GRVDDN

SEQ ID NO: 23915 - protein, 18 aa, Artificial sequence
  Protein classification predicting sequence
GIPQISTGDMLRAAVKAG

SEQ ID NO: 23916 - protein, 7 aa, Artificial sequence
  Protein classification predicting sequence
KKVMDAG

SEQ ID NO: 23917 - protein, 16 aa, Artificial sequence
  Protein classification predicting sequence
TGEDLIQRDDDKEETV

SEQ ID NO: 23918 - protein, 10 aa, Artificial sequence
  Protein classification predicting sequence
LVSDDLIIGL

SEQ ID NO: 23919 - protein, 10 aa, Artificial sequence
  Protein classification predicting sequence
EIAVDDEEIV

SEQ ID NO: 23920 - protein, 10 aa, Artificial sequence
  Protein classification predicting sequence
NPPKVPGKCD

SEQ ID NO: 23921 - protein, 11 aa, Artificial sequence
  Protein classification predicting sequence
NQTRPLVDYYS

SEQ ID NO: 23922 - protein, 11 aa, Artificial sequence
  Protein classification predicting sequence
GKRAKAVMDAG

SEQ ID NO: 23923 - protein, 9 aa, Artificial sequence
  Protein classification predicting sequence
GFILDGYPR

SEQ ID NO: 23924 - protein, 30 aa, Artificial sequence
  Protein classification predicting sequence
LTTRKDDQEETVRKRLVEYHQMTAPLIGYY

SEQ ID NO: 23925 - protein, 16 aa, Artificial sequence
  Protein classification predicting sequence
KEAEAGNTKYAKVDGT

SEQ ID NO: 23926 - protein, 7 aa, Artificial sequence
  Protein classification predicting sequence
SGRVYHV

SEQ ID NO: 23927 - protein, 11 aa, Artificial sequence
  Protein classification predicting sequence
GFLLDGFPRTI

SEQ ID NO: 23928 - protein, 7 aa, Artificial sequence
  Protein classification predicting sequence
IMSELDR

SEQ ID NO: 23929 - protein, 7 aa, Artificial sequence
  Protein classification predicting sequence
KQSKPIL

SEQ ID NO: 23930 - protein, 13 aa, Artificial sequence
  Protein classification predicting sequence
KGVLKNIDGSKDI

SEQ ID NO: 23931 - protein, 46 aa, Artificial sequence
  Protein classification predicting sequence
LGKEAKSYMDRGELVPDEVTVGIVKERISEDDAKKGFLLDGFPRTI

SEQ ID NO: 23932 - protein, 25 aa, Artificial sequence
  Protein classification predicting sequence
IDAVINIEVPEEELMNRLTGRRICE

SEQ ID NO: 23933 - protein, 21 aa, Artificial sequence
  Protein classification predicting sequence
GICDIDGGKLYQREDDNPETV

SEQ ID NO: 23934 - protein, 26 aa, Artificial sequence
  Protein classification predicting sequence
AQGEPILEHYRKLGLVTDIEGNQEIT

SEQ ID NO: 23935 - protein, 20 aa, Artificial sequence
  Protein classification predicting sequence
AHISTGDMFRAAMANQTEMG

SEQ ID NO: 23936 - protein, 7 aa, Artificial sequence
  Protein classification predicting sequence
HKVFNPP

SEQ ID NO: 23937 - protein, 20 aa, Artificial sequence
  Protein classification predicting sequence
DYYQREDDKPETVKRRLDVN

SEQ ID NO: 23938 - protein, 10 aa, Artificial sequence
  Protein classification predicting sequence
EPILEHYRKL

SEQ ID NO: 23939 - protein, 18 aa, Artificial sequence
  Protein classification predicting sequence
GFLLDGYPRTIEQAHALD

SEQ ID NO: 23940 - protein, 6 aa, Artificial sequence
  Protein classification predicting sequence
VINIEV

SEQ ID NO: 23941 - protein, 8 aa, Artificial sequence
  Protein classification predicting sequence
ERLSGRII

SEQ ID NO: 23942 - protein, 38 aa, Artificial sequence
  Protein classification predicting sequence
TGETFHKVFNPPVDYKEEDYYQREDDKPETVKRRLDVN

SEQ ID NO: 23943 - protein, 6 aa, Artificial sequence
  Protein classification predicting sequence
CGATYH

SEQ ID NO: 23944 - protein, 8 aa, Artificial sequence
  Protein classification predicting sequence
CGGELYQR

SEQ ID NO: 23945 - protein, 11 aa, Artificial sequence
  Protein classification predicting sequence
CGGELYQRSDD

SEQ ID NO: 23946 - protein, 10 aa, Artificial sequence
  Protein classification predicting sequence
YMDRGELVPD

SEQ ID NO: 23947 - protein, 7 aa, Artificial sequence
  Protein classification predicting sequence
EETVRHR

SEQ ID NO: 23948 - protein, 9 aa, Artificial sequence
  Protein classification predicting sequence
LMKRLTGRW

SEQ ID NO: 23949 - protein, 7 aa, Artificial sequence
  Protein classification predicting sequence
LYQRADD

SEQ ID NO: 23950 - protein, 8 aa, Artificial sequence
  Protein classification predicting sequence
DAGQLVSD

SEQ ID NO: 23951 - protein, 7 aa, Artificial sequence
  Protein classification predicting sequence
KGFLLDG

SEQ ID NO: 23952 - protein, 52 aa, Artificial sequence
  Protein classification predicting sequence
VDYVIEFDVADDVIVERMAGRRAHLPSGRTYHVVYNPPKVEGKDDVTGEDLV

SEQ ID NO: 23953 - protein, 14 aa, Artificial sequence
  Protein classification predicting sequence
GIPQISTGDMLRAA

SEQ ID NO: 23954 - protein, 8 aa, Artificial sequence
  Protein classification predicting sequence
VIEVEVSE

SEQ ID NO: 23955 - protein, 7 aa, Artificial sequence
  Protein classification predicting sequence
REDDNPE

SEQ ID NO: 23956 - protein, 9 aa, Artificial sequence
  Protein classification predicting sequence
IMDAGKLVT

SEQ ID NO: 23957 - protein, 11 aa, Artificial sequence
  Protein classification predicting sequence
ELVIALVKERI

SEQ ID NO: 23958 - protein, 8 aa, Artificial sequence
  Protein classification predicting sequence
KFNPPKVE

SEQ ID NO: 23959 - protein, 13 aa, Artificial sequence
  Protein classification predicting sequence
EYHQQTAPLVSYY

SEQ ID NO: 23960 - protein, 11 aa, Artificial sequence
  Protein classification predicting sequence
IEGFDDISHGG

SEQ ID NO: 23961 - protein, 9 aa, Artificial sequence
  Protein classification predicting sequence
VVRREIFRL

SEQ ID NO: 23962 - protein, 12 aa, Artificial sequence
  Protein classification predicting sequence
RNVLEGERRRRT

SEQ ID NO: 23963 - protein, 21 aa, Artificial sequence
  Protein classification predicting sequence
DGINIFPLGAMRLTQRSSNAR

SEQ ID NO: 23964 - protein, 12 aa, Artificial sequence
  Protein classification predicting sequence
YPESAGLEDHLQ

SEQ ID NO: 23965 - protein, 15 aa, Artificial sequence
  Protein classification predicting sequence
AKQEEITGFFTNTTD

SEQ ID NO: 23966 - protein, 9 aa, Artificial sequence
  Protein classification predicting sequence
FDLSALIER

SEQ ID NO: 23967 - protein, 7 aa, Artificial sequence
  Protein classification predicting sequence
TAVFQQY

SEQ ID NO: 23968 - protein, 13 aa, Artificial sequence
  Protein classification predicting sequence
NNAFRQFVIGVTG

SEQ ID NO: 23969 - protein, 19 aa, Artificial sequence
  Protein classification predicting sequence
AKQEEITGFFTNTTDQFMG

SEQ ID NO: 23970 - protein, 10 aa, Artificial sequence
  Protein classification predicting sequence
LDASPDPDGQ

SEQ ID NO: 23971 - protein, 12 aa, Artificial sequence
  Protein classification predicting sequence
LKLRGTTHMKGE

SEQ ID NO: 23972 - protein, 12 aa, Artificial sequence
  Protein classification predicting sequence
LGAMRLTQRSSN

SEQ ID NO: 23973 - protein, 15 aa, Artificial sequence
  Protein classification predicting sequence
DSIILATGATGTGKT

SEQ ID NO: 23974 - protein, 10 aa, Artificial sequence
  Protein classification predicting sequence
FAYEESRAQL

SEQ ID NO: 23975 - protein, 7 aa, Artificial sequence
  Protein classification predicting sequence
SWGIDFE

SEQ ID NO: 23976 - protein, 19 aa, Artificial sequence
  Protein classification predicting sequence
NAFRQFVIGVTGYAKQEEI

SEQ ID NO: 23977 - protein, 6 aa, Artificial sequence
  Protein classification predicting sequence
GFFTNT

SEQ ID NO: 23978 - protein, 6 aa, Artificial sequence
  Protein classification predicting sequence
IEGFDD

SEQ ID NO: 23979 - protein, 9 aa, Artificial sequence
  Protein classification predicting sequence
SGTSGTGKT

SEQ ID NO: 23980 - protein, 19 aa, Artificial sequence
  Protein classification predicting sequence
RRRTVEILKLRGTTHMKGE

SEQ ID NO: 23981 - protein, 15 aa, Artificial sequence
  Protein classification predicting sequence
TGATGTGKTLLVSKF

SEQ ID NO: 23982 - protein, 12 aa, Artificial sequence
  Protein classification predicting sequence
NVFKMRGSWHDK

SEQ ID NO: 23983 - protein, 11 aa, Artificial sequence
  Protein classification predicting sequence
HMKGEFPFTMG

SEQ ID NO: 23984 - protein, 8 aa, Artificial sequence
  Protein classification predicting sequence
LDEMCGGG

SEQ ID NO: 23985 - protein, 7 aa, Artificial sequence
  Protein classification predicting sequence
GLEDHLQ

SEQ ID NO: 23986 - protein, 10 aa, Artificial sequence
  Protein classification predicting sequence
LFILDASPDP

SEQ ID NO: 23987 - protein, 7 aa, Artificial sequence
  Protein classification predicting sequence
LTQRSSN

SEQ ID NO: 23988 - protein, 19 aa, Artificial sequence
  Protein classification predicting sequence
FKPSRMAIDSLSALARGVS

SEQ ID NO: 23989 - protein, 12 aa, Artificial sequence
  Protein classification predicting sequence
NAFRQFVIGVTG

SEQ ID NO: 23990 - protein, 7 aa, Artificial sequence
  Protein classification predicting sequence
ISHGGLP

SEQ ID NO: 23991 - protein, 8 aa, Artificial sequence
  Protein classification predicting sequence
FVTFEESP

SEQ ID NO: 23992 - protein, 10 aa, Artificial sequence
  Protein classification predicting sequence
DQFMGAHSIT

SEQ ID NO: 23993 - protein, 15 aa, Artificial sequence
  Protein classification predicting sequence
HSITDSHISTITDTI

SEQ ID NO: 23994 - protein, 10 aa, Artificial sequence
  Protein classification predicting sequence
SHISTITDTI

SEQ ID NO: 23995 - protein, 11 aa, Artificial sequence
  Protein classification predicting sequence
ERIISGSPTRI

SEQ ID NO: 23996 - protein, 14 aa, Artificial sequence
  Protein classification predicting sequence
EILKLRGTTHMKGE

SEQ ID NO: 23997 - protein, 22 aa, Artificial sequence
  Protein classification predicting sequence
IFPLGAMRLTQRSSNVRVSSGV

SEQ ID NO: 23998 - protein, 11 aa, Artificial sequence
  Protein classification predicting sequence
SHISTITDTIL

SEQ ID NO: 23999 - protein, 10 aa, Artificial sequence
  Protein classification predicting sequence
LQYVEIRGEM

SEQ ID NO: 24000 - protein, 13 aa, Artificial sequence
  Protein classification predicting sequence
FDLSALIERIQYA

SEQ ID NO: 24001 - protein, 11 aa, Artificial sequence
  Protein classification predicting sequence
GVEEFVSDNVV

SEQ ID NO: 24002 - protein, 7 aa, Artificial sequence
  Protein classification predicting sequence
GRYYAMK

SEQ ID NO: 24003 - protein, 9 aa, Artificial sequence
  Protein classification predicting sequence
GHIKITDFG

SEQ ID NO: 24004 - protein, 7 aa, Artificial sequence
  Protein classification predicting sequence
GNLKNGV

SEQ ID NO: 24005 - protein, 10 aa, Artificial sequence
  Protein classification predicting sequence
TLGTGSFGRV

SEQ ID NO: 24006 - protein, 6 aa, Artificial sequence
  Protein classification predicting sequence
KQIEHT

SEQ ID NO: 24007 - protein, 6 aa, Artificial sequence
  Protein classification predicting sequence
DFGFAK

SEQ ID NO: 24008 - protein, 6 aa, Artificial sequence
  Protein classification predicting sequence
DWWSLG

SEQ ID NO: 24009 - protein, 9 aa, Artificial sequence
  Protein classification predicting sequence
LGILIFEML

SEQ ID NO: 24010 - protein, 18 aa, Artificial sequence
  Protein classification predicting sequence
RIKTLGTGSFGRVMLVKH

SEQ ID NO: 24011 - protein, 7 aa, Artificial sequence
  Protein classification predicting sequence
EKCGKEF

SEQ ID NO: 24012 - protein, 12 aa, Artificial sequence
  Protein classification predicting sequence
ESVKEFLAKAKE

SEQ ID NO: 24013 - protein, 6 aa, Artificial sequence
  Protein classification predicting sequence
FLKKWE

SEQ ID NO: 24014 - protein, 58 aa, Artificial sequence
  Protein classification predicting sequence
GNHYAMKILDKQKVVKLKQIEHTLNEKRILQAVNFPFLVKLEFSFKDNSNLYMVMEYV

SEQ ID NO: 24015 - protein, 18 aa, Artificial sequence
  Protein classification predicting sequence
GDTSNFDDYEEEEIRVSI

SEQ ID NO: 24016 - protein, 62 aa, Artificial sequence
  Protein classification predicting sequence
NAGLEDFERKKTLGTGSFGRVMLVKHKATEQYYAMKILDKQKVVKLKQIEHTLNEKRILQAV

SEQ ID NO: 24017 - protein, 25 aa, Artificial sequence
  Protein classification predicting sequence
HKWFATTDWIAIYQRKVEAPFIPKF

SEQ ID NO: 24018 - protein, 7 aa, Artificial sequence
  Protein classification predicting sequence
NPAQNTA

SEQ ID NO: 24019 - protein, 6 aa, Artificial sequence
  Protein classification predicting sequence
KQKVVK

SEQ ID NO: 24020 - protein, 9 aa, Artificial sequence
  Protein classification predicting sequence
LNEKRILQA

SEQ ID NO: 24021 - protein, 7 aa, Artificial sequence
  Protein classification predicting sequence
FSFKDNS

SEQ ID NO: 24022 - protein, 8 aa, Artificial sequence
  Protein classification predicting sequence
YLHSLDLI

SEQ ID NO: 24023 - protein, 11 aa, Artificial sequence
  Protein classification predicting sequence
RDLKPENLLID

SEQ ID NO: 24024 - protein, 15 aa, Artificial sequence
  Protein classification predicting sequence
RDLKPENLLIDQQGY

SEQ ID NO: 24025 - protein, 14 aa, Artificial sequence
  Protein classification predicting sequence
ADQPIQIYEKIVSG

SEQ ID NO: 24026 - protein, 6 aa, Artificial sequence
  Protein classification predicting sequence
SINEKC

SEQ ID NO: 24027 - protein, 8 aa, Artificial sequence
  Protein classification predicting sequence
GTGSFGRV

SEQ ID NO: 24028 - protein, 5 aa, Artificial sequence
  Protein classification predicting sequence
AVDWW

SEQ ID NO: 24029 - protein, 12 aa, Artificial sequence
  Protein classification predicting sequence
EHTLNEKRILQA

SEQ ID NO: 24030 - protein, 18 aa, Artificial sequence
  Protein classification predicting sequence
GGEMFSHLRRIGRFSEPH

SEQ ID NO: 24031 - protein, 9 aa, Artificial sequence
  Protein classification predicting sequence
RFYAAQIVL

SEQ ID NO: 24032 - protein, 22 aa, Artificial sequence
  Protein classification predicting sequence
FEYLHSLDLIYRDLKPENLLID

SEQ ID NO: 24033 - protein, 7 aa, Artificial sequence
  Protein classification predicting sequence
TDFGFAK

SEQ ID NO: 24034 - protein, 8 aa, Artificial sequence
  Protein classification predicting sequence
DIKNHKWF

SEQ ID NO: 24035 - protein, 8 aa, Artificial sequence
  Protein classification predicting sequence
TDWIAIYQ

SEQ ID NO: 24036 - protein, 8 aa, Artificial sequence
  Protein classification predicting sequence
AVDWWALG

SEQ ID NO: 24037 - protein, 12 aa, Artificial sequence
  Protein classification predicting sequence
KTLGTGSFGRVM

SEQ ID NO: 24038 - protein, 10 aa, Artificial sequence
  Protein classification predicting sequence
FKDNSNLYMV

SEQ ID NO: 24039 - protein, 7 aa, Artificial sequence
  Protein classification predicting sequence
GRFSEPH

SEQ ID NO: 24040 - protein, 16 aa, Artificial sequence
  Protein classification predicting sequence
LDLIYRDLKPENLLID

SEQ ID NO: 24041 - protein, 9 aa, Artificial sequence
  Protein classification predicting sequence
VDWWALGVL

SEQ ID NO: 24042 - protein, 33 aa, Artificial sequence
  Protein classification predicting sequence
YEMAAGYPPFFADQPIQIYEKIVSGKVRFPSHF

SEQ ID NO: 24043 - protein, 18 aa, Artificial sequence
  Protein classification predicting sequence
SDLKDLLRNLLQVDLTKR

SEQ ID NO: 24044 - protein, 7 aa, Artificial sequence
  Protein classification predicting sequence
GVNDIKN

SEQ ID NO: 24045 - protein, 6 aa, Artificial sequence
  Protein classification predicting sequence
EAPFIP

SEQ ID NO: 24046 - protein, 12 aa, Artificial sequence
  Protein classification predicting sequence
GDTSNFDDYEEE

SEQ ID NO: 24047 - protein, 7 aa, Artificial sequence
  Protein classification predicting sequence
GVLIYEM

SEQ ID NO: 24048 - protein, 7 aa, Artificial sequence
  Protein classification predicting sequence
NLYMVME

SEQ ID NO: 24049 - protein, 7 aa, Artificial sequence
  Protein classification predicting sequence
LDGDNVR

SEQ ID NO: 24050 - protein, 11 aa, Artificial sequence
  Protein classification predicting sequence
RFGLNKDLGFS

SEQ ID NO: 24051 - protein, 9 aa, Artificial sequence
  Protein classification predicting sequence
DLGFSDADR

SEQ ID NO: 24052 - protein, 8 aa, Artificial sequence
  Protein classification predicting sequence
IKEFTGIS

SEQ ID NO: 24053 - protein, 21 aa, Artificial sequence
  Protein classification predicting sequence
AYRLDGDNIRFGLNKDLGFSE

SEQ ID NO: 24054 - protein, 33 aa, Artificial sequence
  Protein classification predicting sequence
EVAEQRDPKGLYKKAREGVIKEFTGISAPYEAP

SEQ ID NO: 24055 - protein, 8 aa, Artificial sequence
  Protein classification predicting sequence
TSFISPYR

SEQ ID NO: 24056 - protein, 8 aa, Artificial sequence
  Protein classification predicting sequence
RDPKGLYK

SEQ ID NO: 24057 - protein, 14 aa, Artificial sequence
  Protein classification predicting sequence
IKEFTGISAPYEAP

SEQ ID NO: 24058 - protein, 7 aa, Artificial sequence
  Protein classification predicting sequence
NLDSGVG

SEQ ID NO: 24059 - protein, 7 aa, Artificial sequence
  Protein classification predicting sequence
GRGIYHN

SEQ ID NO: 24060 - protein, 11 aa, Artificial sequence
  Protein classification predicting sequence
NEEDHLRIISM

SEQ ID NO: 24061 - protein, 8 aa, Artificial sequence
  Protein classification predicting sequence
SGVENLDS

SEQ ID NO: 24062 - protein, 8 aa, Artificial sequence
  Protein classification predicting sequence
KSLLKKYL

SEQ ID NO: 24063 - protein, 9 aa, Artificial sequence
  Protein classification predicting sequence
STRVRCGRS

SEQ ID NO: 24064 - protein, 8 aa, Artificial sequence
  Protein classification predicting sequence
GRGIYHND

SEQ ID NO: 24065 - protein, 8 aa, Artificial sequence
  Protein classification predicting sequence
AVNEIEKR

SEQ ID NO: 24066 - protein, 32 aa, Artificial sequence
  Protein classification predicting sequence
DRLGFLTFCPTNLGTTVRASVHIKLPKLAANR

SEQ ID NO: 24067 - protein, 8 aa, Artificial sequence
  Protein classification predicting sequence
YDISNKRR

SEQ ID NO: 24068 - protein, 9 aa, Artificial sequence
  Protein classification predicting sequence
PFSHHDRLG

SEQ ID NO: 24069 - protein, 11 aa, Artificial sequence
  Protein classification predicting sequence
LTFCPTNLGTT

SEQ ID NO: 24070 - protein, 13 aa, Artificial sequence
  Protein classification predicting sequence
YDISNKRRMGLTE

SEQ ID NO: 24071 - protein, 16 aa, Artificial sequence
  Protein classification predicting sequence
LQVRGTRGEHTEAEGG

SEQ ID NO: 24072 - protein, 9 aa, Artificial sequence
  Protein classification predicting sequence
TLLDVIQSG

SEQ ID NO: 24073 - protein, 7 aa, Artificial sequence
  Protein classification predicting sequence
KVSSTLS

SEQ ID NO: 24074 - protein, 7 aa, Artificial sequence
  Protein classification predicting sequence
LEGELKG

SEQ ID NO: 24075 - protein, 7 aa, Artificial sequence
  Protein classification predicting sequence
RASVHIK

SEQ ID NO: 24076 - protein, 20 aa, Artificial sequence
  Protein classification predicting sequence
GATLLDVIQSGVENLDSGVG

SEQ ID NO: 24077 - protein, 7 aa, Artificial sequence
  Protein classification predicting sequence
DYHGGFK

SEQ ID NO: 24078 - protein, 9 aa, Artificial sequence
  Protein classification predicting sequence
GYPFNPCLT

SEQ ID NO: 24079 - protein, 6 aa, Artificial sequence
  Protein classification predicting sequence
QYKEME

SEQ ID NO: 24080 - protein, 16 aa, Artificial sequence
  Protein classification predicting sequence
LIDDHFLFKEGDRFLQ

SEQ ID NO: 24081 - protein, 8 aa, Artificial sequence
  Protein classification predicting sequence
ANACRYWP

SEQ ID NO: 24082 - protein, 12 aa, Artificial sequence
  Protein classification predicting sequence
LQVRGTRGEHTE

SEQ ID NO: 24083 - protein, 7 aa, Artificial sequence
  Protein classification predicting sequence
WPTGRGI

SEQ ID NO: 24084 - protein, 9 aa, Artificial sequence
  Protein classification predicting sequence
KLEEGFKKL

SEQ ID NO: 24085 - protein, 16 aa, Artificial sequence
  Protein classification predicting sequence
GFKQTDKHPNKDFGDV

SEQ ID NO: 24086 - protein, 8 aa, Artificial sequence
  Protein classification predicting sequence
IQSGVENL

SEQ ID NO: 24087 - protein, 7 aa, Artificial sequence
  Protein classification predicting sequence
GFKKLEA

SEQ ID NO: 24088 - protein, 9 aa, Artificial sequence
  Protein classification predicting sequence
GEHTEAEGG

SEQ ID NO: 24089 - protein, 13 aa, Artificial sequence
  Protein classification predicting sequence
DVIQSGVENLDSG

SEQ ID NO: 24090 - protein, 10 aa, Artificial sequence
  Protein classification predicting sequence
LFDPIIEDYH

SEQ ID NO: 24091 - protein, 8 aa, Artificial sequence
  Protein classification predicting sequence
PLTGMTKE

SEQ ID NO: 24092 - protein, 7 aa, Artificial sequence
  Protein classification predicting sequence
WPSGRGI

SEQ ID NO: 24093 - protein, 7 aa, Artificial sequence
  Protein classification predicting sequence
SGISLID

SEQ ID NO: 24094 - protein, 7 aa, Artificial sequence
  Protein classification predicting sequence
ASRPWDK

SEQ ID NO: 24095 - protein, 11 aa, Artificial sequence
  Protein classification predicting sequence
RPWDKERDGFV

SEQ ID NO: 24096 - protein, 6 aa, Artificial sequence
  Protein classification predicting sequence
DAYHMT

SEQ ID NO: 24097 - protein, 9 aa, Artificial sequence
  Protein classification predicting sequence
VLEEYEHAK

SEQ ID NO: 24098 - protein, 17 aa, Artificial sequence
  Protein classification predicting sequence
GVGAGAVRTINGTLDLH

SEQ ID NO: 24099 - protein, 22 aa, Artificial sequence
  Protein classification predicting sequence
TEAAIAYQSGFNCNMAAISAVM

SEQ ID NO: 24100 - protein, 24 aa, Artificial sequence
  Protein classification predicting sequence
ITDGVFSMDGDVAKLPEIVEIAEE

SEQ ID NO: 24101 - protein, 13 aa, Artificial sequence
  Protein classification predicting sequence
DFQIGTLSKAIGV

SEQ ID NO: 24102 - protein, 9 aa, Artificial sequence
  Protein classification predicting sequence
GESETPITP

SEQ ID NO: 24103 - protein, 15 aa, Artificial sequence
  Protein classification predicting sequence
GTGRVRNMPTAAHTK

SEQ ID NO: 24104 - protein, 8 aa, Artificial sequence
  Protein classification predicting sequence
YEKVGKEM

SEQ ID NO: 24105 - protein, 8 aa, Artificial sequence
  Protein classification predicting sequence
KNDAILSD

SEQ ID NO: 24106 - protein, 19 aa, Artificial sequence
  Protein classification predicting sequence
LNHASIIDGCRLSKAKIIR

SEQ ID NO: 24107 - protein, 13 aa, Artificial sequence
  Protein classification predicting sequence
KAKEAVESGQYNK

SEQ ID NO: 24108 - protein, 11 aa, Artificial sequence
  Protein classification predicting sequence
TYVDDAHGSGV

SEQ ID NO: 24109 - protein, 7 aa, Artificial sequence
  Protein classification predicting sequence
QEFSKRL

SEQ ID NO: 24110 - protein, 25 aa, Artificial sequence
  Protein classification predicting sequence
KSIVFPTVPRGTGRVRNMPTAAHTK

SEQ ID NO: 24111 - protein, 39 aa, Artificial sequence
  Protein classification predicting sequence
STELHDKLWDNAQYLKNGLSKLGYDTGESETPITPVIIG

SEQ ID NO: 24112 - protein, 7 aa, Artificial sequence
  Protein classification predicting sequence
ENEIAVL

SEQ ID NO: 24113 - protein, 8 aa, Artificial sequence
  Protein classification predicting sequence
KNFAKSKW

SEQ ID NO: 24114 - protein, 12 aa, Artificial sequence
  Protein classification predicting sequence
TACGTPGYVAPE

SEQ ID NO: 24115 - protein, 6 aa, Artificial sequence
  Protein classification predicting sequence
YEFDSP

SEQ ID NO: 24116 - protein, 7 aa, Artificial sequence
  Protein classification predicting sequence
QIQKNFA

SEQ ID NO: 24117 - protein, 8 aa, Artificial sequence
  Protein classification predicting sequence
KCIPKKAL

SEQ ID NO: 24118 - protein, 13 aa, Artificial sequence
  Protein classification predicting sequence
MQLVSGGELFDRI

SEQ ID NO: 24119 - protein, 14 aa, Artificial sequence
  Protein classification predicting sequence
SKIMISDFGLSKME

SEQ ID NO: 24120 - protein, 10 aa, Artificial sequence
  Protein classification predicting sequence
HPWIAGDTAL

SEQ ID NO: 24121 - protein, 14 aa, Artificial sequence
  Protein classification predicting sequence
KNFAKSKWRQAFNA

SEQ ID NO: 24122 - protein, 32 aa, Artificial sequence
  Protein classification predicting sequence
STACGTPGYVAPEVLAQKPYSKAVDCWSIGVI

SEQ ID NO: 24123 - protein, 48 aa, Artificial sequence
  Protein classification predicting sequence
STACGTPGYVAPEVLAQKPYSKAVDCWSIGVIAYILLCGYPPFYDEND

SEQ ID NO: 24124 - protein, 30 aa, Artificial sequence
  Protein classification predicting sequence
KLFEQILKAEYEFDSPYWDDISDSAKDFIR

SEQ ID NO: 24125 - protein, 13 aa, Artificial sequence
  Protein classification predicting sequence
QAFNATAVVRHMR

SEQ ID NO: 24126 - protein, 7 aa, Artificial sequence
  Protein classification predicting sequence
GKPVDMW

SEQ ID NO: 24127 - protein, 11 aa, Artificial sequence
  Protein classification predicting sequence
QKLEREARICR

SEQ ID NO: 24128 - protein, 21 aa, Artificial sequence
  Protein classification predicting sequence
HYLVFDLVTGGELFEDIVARE

SEQ ID NO: 24129 - protein, 15 aa, Artificial sequence
  Protein classification predicting sequence
YSEADASHCIQQILE

SEQ ID NO: 24130 - protein, 23 aa, Artificial sequence
  Protein classification predicting sequence
WACGVILYILLVGYPPFWDEDQH

SEQ ID NO: 24131 - protein, 8 aa, Artificial sequence
  Protein classification predicting sequence
QIKAGAYD

SEQ ID NO: 24132 - protein, 21 aa, Artificial sequence
  Protein classification predicting sequence
PSPEWDTVTPEAKNLINQMLT

SEQ ID NO: 24133 - protein, 7 aa, Artificial sequence
  Protein classification predicting sequence
YTKICDP

SEQ ID NO: 24134 - protein, 9 aa, Artificial sequence
  Protein classification predicting sequence
DFHKFYFEN

SEQ ID NO: 24135 - protein, 7 aa, Artificial sequence
  Protein classification predicting sequence
RLTQYID

SEQ ID NO: 24136 - protein, 9 aa, Artificial sequence
  Protein classification predicting sequence
QSEETRVWH

SEQ ID NO: 24137 - protein, 8 aa, Artificial sequence
  Protein classification predicting sequence
KWQNVHFH

SEQ ID NO: 24138 - protein, 6 aa, Artificial sequence
  Protein classification predicting sequence
TCTRFT

SEQ ID NO: 24139 - protein, 16 aa, Artificial sequence
  Protein classification predicting sequence
KGAAVKLADFGLAIEV

SEQ ID NO: 24140 - protein, 7 aa, Artificial sequence
  Protein classification predicting sequence
ACIAYIR

SEQ ID NO: 24141 - protein, 43 aa, Artificial sequence
  Protein classification predicting sequence
AKIINTKKLSARDHQKLEREARICRLLKHPNIVRLHDSISEEG

SEQ ID NO: 24142 - protein, 26 aa, Artificial sequence
  Protein classification predicting sequence
WFGFAGTPGYLSPEVLRKDPYGKPVD

SEQ ID NO: 24143 - protein, 7 aa, Artificial sequence
  Protein classification predicting sequence
LYQQIKA

SEQ ID NO: 24144 - protein, 17 aa, Artificial sequence
  Protein classification predicting sequence
AYDFPSPEWDTVTPEAK

SEQ ID NO: 24145 - protein, 58 aa, Artificial sequence
  Protein classification predicting sequence
FDLVTGGELFEDIVAREYYSEADASHCIQQILEAVLHCHQMGVVHRDLKPENLLLASK

SEQ ID NO: 24146 - protein, 26 aa, Artificial sequence
  Protein classification predicting sequence
CLKKFNARRKLKGAILTTMLATRNFS

SEQ ID NO: 24147 - protein, 8 aa, Artificial sequence
  Protein classification predicting sequence
NNGDFEAY

SEQ ID NO: 24148 - protein, 10 aa, Artificial sequence
  Protein classification predicting sequence
QSEETRVWHR

SEQ ID NO: 24149 - protein, 11 aa, Artificial sequence
  Protein classification predicting sequence
TCTRFTDEYQL

SEQ ID NO: 24150 - protein, 13 aa, Artificial sequence
  Protein classification predicting sequence
NIVRLHDSISEEG

SEQ ID NO: 24151 - protein, 15 aa, Artificial sequence
  Protein classification predicting sequence
VHRDLKPENLLLASK

SEQ ID NO: 24152 - protein, 6 aa, Artificial sequence
  Protein classification predicting sequence
MLTINP

SEQ ID NO: 24153 - protein, 12 aa, Artificial sequence
  Protein classification predicting sequence
MLTINPAKRITA

SEQ ID NO: 24154 - protein, 16 aa, Artificial sequence
  Protein classification predicting sequence
CQRSTVASMMHRQETV

SEQ ID NO: 24155 - protein, 8 aa, Artificial sequence
  Protein classification predicting sequence
NTTIEDED

SEQ ID NO: 24156 - protein, 7 aa, Artificial sequence
  Protein classification predicting sequence
RKQEIIK

SEQ ID NO: 24157 - protein, 8 aa, Artificial sequence
  Protein classification predicting sequence
TEQLIEAI

SEQ ID NO: 24158 - protein, 12 aa, Artificial sequence
  Protein classification predicting sequence
FEPEALGNLVEG

SEQ ID NO: 24159 - protein, 9 aa, Artificial sequence
  Protein classification predicting sequence
DFHRFYFEN

SEQ ID NO: 24160 - protein, 7 aa, Artificial sequence
  Protein classification predicting sequence
ILNPHVH

SEQ ID NO: 24161 - protein, 13 aa, Artificial sequence
  Protein classification predicting sequence
DAACIAYIRLTQY

SEQ ID NO: 24162 - protein, 21 aa, Artificial sequence
  Protein classification predicting sequence
QQAWFGFAGTPGYLSPEVLRK

SEQ ID NO: 24163 - protein, 12 aa, Artificial sequence
  Protein classification predicting sequence
ALEPQTTVIHNP

SEQ ID NO: 24164 - protein, 25 aa, Artificial sequence
  Protein classification predicting sequence
TEQLIEAINNGDFEAYTKICDPGLT

SEQ ID NO: 24165 - protein, 17 aa, Artificial sequence
  Protein classification predicting sequence
KFNARRKLKGAILTTML

SEQ ID NO: 24166 - protein, 15 aa, Artificial sequence
  Protein classification predicting sequence
QSEETRVWHRRDGKW

SEQ ID NO: 24167 - protein, 8 aa, Artificial sequence
  Protein classification predicting sequence
RNFSVGRQ

SEQ ID NO: 24168 - protein, 10 aa, Artificial sequence
  Protein classification predicting sequence
WDDISDSAKD

SEQ ID NO: 24169 - protein, 11 aa, Artificial sequence
  Protein classification predicting sequence
IQTGVDNPGHP

SEQ ID NO: 24170 - protein, 20 aa, Artificial sequence
  Protein classification predicting sequence
EQQQLIDDHFLFDKPVSPLL

SEQ ID NO: 24171 - protein, 8 aa, Artificial sequence
  Protein classification predicting sequence
VAGDEESY

SEQ ID NO: 24172 - protein, 9 aa, Artificial sequence
  Protein classification predicting sequence
LEKGQSIDD

SEQ ID NO: 24173 - protein, 21 aa, Artificial sequence
  Protein classification predicting sequence
NEEDHLRVISMQKGGNMKEVF

SEQ ID NO: 24174 - protein, 32 aa, Artificial sequence
  Protein classification predicting sequence
YEFMWNPHLGYILTCPSNLGTGLRAGVHIKLP

SEQ ID NO: 24175 - protein, 14 aa, Artificial sequence
  Protein classification predicting sequence
KLRFPAEDEFPDLS

SEQ ID NO: 24176 - protein, 9 aa, Artificial sequence
  Protein classification predicting sequence
TPSGFTLDD

SEQ ID NO: 24177 - protein, 12 aa, Artificial sequence
  Protein classification predicting sequence
LPPHCSRGERRA

SEQ ID NO: 24178 - protein, 12 aa, Artificial sequence
  Protein classification predicting sequence
GRYYALKSMTEA

SEQ ID NO: 24179 - protein, 39 aa, Artificial sequence
  Protein classification predicting sequence
QQLIDDHFLFDKPVSPLLLASGMARDWPDARGIWHNDNK

SEQ ID NO: 24180 - protein, 7 aa, Artificial sequence
  Protein classification predicting sequence
HNNHMAK

SEQ ID NO: 24181 - protein, 39 aa, Artificial sequence
  Protein classification predicting sequence
SNADRLGSSEVEQVQLVVDGVKLMVEMEKKLEKGQSIDD

SEQ ID NO: 24182 - protein, 8 aa, Artificial sequence
  Protein classification predicting sequence
KHNNHMAK

SEQ ID NO: 24183 - protein, 8 aa, Artificial sequence
  Protein classification predicting sequence
VFKDLFDP

SEQ ID NO: 24184 - protein, 16 aa, Artificial sequence
  Protein classification predicting sequence
TDLNHENLKGGDDLDP

SEQ ID NO: 24185 - protein, 13 aa, Artificial sequence
  Protein classification predicting sequence
YVLSSRVRTGRSI

SEQ ID NO: 24186 - protein, 24 aa, Artificial sequence
  Protein classification predicting sequence
LPPHCSRGERRAVEKLSVEALNSL

SEQ ID NO: 24187 - protein, 16 aa, Artificial sequence
  Protein classification predicting sequence
FLVWVNEEDHLRVISM

SEQ ID NO: 24188 - protein, 15 aa, Artificial sequence
  Protein classification predicting sequence
KIEEIFKKAGHPFMW

SEQ ID NO: 24189 - protein, 16 aa, Artificial sequence
  Protein classification predicting sequence
LGYILTCPSNLGTGLR

SEQ ID NO: 24190 - protein, 12 aa, Artificial sequence
  Protein classification predicting sequence
LTCPSNLGTGLR

SEQ ID NO: 24191 - protein, 12 aa, Artificial sequence
  Protein classification predicting sequence
SNADRLGFSEVE

SEQ ID NO: 24192 - protein, 41 aa, Artificial sequence
  Protein classification predicting sequence
EQQQLIDDHFLFDKPVSPLLLASGMARDWPDARGIWHNDNK

SEQ ID NO: 24193 - protein, 92 aa, Artificial sequence
  Protein classification predicting sequence
EQQQLIDDHFLFDKPVSPLLLASGMARDWPDARGIWHNDNKSFLVWVNEEDHLRVISMEKGGNMKEVFRRFCVGLQKIEEIFKKAGHPFMWN

SEQ ID NO: 24194 - protein, 30 aa, Artificial sequence
  Protein classification predicting sequence
LSKHPKFEEILTRLRLQKRGTGGVDTAAVG

SEQ ID NO: 24195 - protein, 18 aa, Artificial sequence
  Protein classification predicting sequence
RLRLQKRGTGGVDTAAVG

SEQ ID NO: 24196 - protein, 11 aa, Artificial sequence
  Protein classification predicting sequence
LPPHCSRGERR

SEQ ID NO: 24197 - protein, 15 aa, Artificial sequence
  Protein classification predicting sequence
SPLLLASGMARDWPD

SEQ ID NO: 24198 - protein, 8 aa, Artificial sequence
  Protein classification predicting sequence
GMARDWPD

SEQ ID NO: 24199 - protein, 16 aa, Artificial sequence
  Protein classification predicting sequence
KGGNMKEVFRRFCVGL

SEQ ID NO: 24200 - protein, 13 aa, Artificial sequence
  Protein classification predicting sequence
VVDGVKLMVEMEK

SEQ ID NO: 24201 - protein, 12 aa, Artificial sequence
  Protein classification predicting sequence
RLQKRGTGGVDT

SEQ ID NO: 24202 - protein, 28 aa, Artificial sequence
  Protein classification predicting sequence
LDQCIQTGVDNPGHPFIKTVGMVAGDEE

SEQ ID NO: 24203 - protein, 34 aa, Artificial sequence
  Protein classification predicting sequence
LDQCIQTGVDNPGHPFIKTVGMVAGDEESYEVFA

SEQ ID NO: 24204 - protein, 8 aa, Artificial sequence
  Protein classification predicting sequence
RHNGYDPR

SEQ ID NO: 24205 - protein, 34 aa, Artificial sequence
  Protein classification predicting sequence
LIDDHFLFDKPVSPLLTCAGMARDWPDARGIWHN

SEQ ID NO: 24206 - protein, 14 aa, Artificial sequence
  Protein classification predicting sequence
ERGWEFMWNERLGY

SEQ ID NO: 24207 - protein, 16 aa, Artificial sequence
  Protein classification predicting sequence
LTCPSNLGTGLRAGVH

SEQ ID NO: 24208 - protein, 26 aa, Artificial sequence
  Protein classification predicting sequence
GRSEVELVQIVIDGVNYLVDCEKKLE

SEQ ID NO: 24209 - protein, 12 aa, Artificial sequence
  Protein classification predicting sequence
MKHTTDLDASKI

SEQ ID NO: 24210 - protein, 15 aa, Artificial sequence
  Protein classification predicting sequence
YVLSSRVRTGRSIRG

SEQ ID NO: 24211 - protein, 14 aa, Artificial sequence
  Protein classification predicting sequence
FSKLLTGRNASLLF

SEQ ID NO: 24212 - protein, 32 aa, Artificial sequence
  Protein classification predicting sequence
GQFDERYVLSSRVRTGRSIRGLSLPPACSRAE

SEQ ID NO: 24213 - protein, 11 aa, Artificial sequence
  Protein classification predicting sequence
GLKGDLAGRYY

SEQ ID NO: 24214 - protein, 6 aa, Artificial sequence
  Protein classification predicting sequence
LSEMTE

SEQ ID NO: 24215 - protein, 18 aa, Artificial sequence
  Protein classification predicting sequence
KILENLRLQKRGTGGVDT

SEQ ID NO: 24216 - protein, 8 aa, Artificial sequence
  Protein classification predicting sequence
DNPGHPFI

SEQ ID NO: 24217 - protein, 11 aa, Artificial sequence
  Protein classification predicting sequence
VAGDEETYEVF

SEQ ID NO: 24218 - protein, 8 aa, Artificial sequence
  Protein classification predicting sequence
DRHGGYKP

SEQ ID NO: 24219 - protein, 6 aa, Artificial sequence
  Protein classification predicting sequence
HKTDLN

SEQ ID NO: 24220 - protein, 25 aa, Artificial sequence
  Protein classification predicting sequence
SSRVRTGRSIRGFCLPPHCSRGERR

SEQ ID NO: 24221 - protein, 7 aa, Artificial sequence
  Protein classification predicting sequence
RFCTGLT

SEQ ID NO: 24222 - protein, 23 aa, Artificial sequence
  Protein classification predicting sequence
EVLKRLRLQKRGTGGVDTAAVGG

SEQ ID NO: 24223 - protein, 24 aa, Artificial sequence
  Protein classification predicting sequence
SNADRLGFSEVELVQMVVDGVKLL

SEQ ID NO: 24224 - protein, 12 aa, Artificial sequence
  Protein classification predicting sequence
YPDLRKHNNCMA

SEQ ID NO: 24225 - protein, 18 aa, Artificial sequence
  Protein classification predicting sequence
NEEDHTRVISMEKGGNMK

SEQ ID NO: 24226 - protein, 26 aa, Artificial sequence
  Protein classification predicting sequence
VFDISNLDRLGKSEVELVQLVIDGVN

SEQ ID NO: 24227 - protein, 19 aa, Artificial sequence
  Protein classification predicting sequence
YPPSAEYPDLRKHNNCMAS

SEQ ID NO: 24228 - protein, 11 aa, Artificial sequence
  Protein classification predicting sequence
GRYYRLSEMTE

SEQ ID NO: 24229 - protein, 22 aa, Artificial sequence
  Protein classification predicting sequence
LTAAGMARDWPDARGIWHNNEK

SEQ ID NO: 24230 - protein, 7 aa, Artificial sequence
  Protein classification predicting sequence
GQDIRIP

SEQ ID NO: 24231 - protein, 34 aa, Artificial sequence
  Protein classification predicting sequence
LIQERGWEFMWNERLGYILTCPSNLGTGLRAGVH

SEQ ID NO: 24232 - protein, 8 aa, Artificial sequence
  Protein classification predicting sequence
LAEIKERD

SEQ ID NO: 24233 - protein, 8 aa, Artificial sequence
  Protein classification predicting sequence
ITIDGPSG

SEQ ID NO: 24234 - protein, 6 aa, Artificial sequence
  Protein classification predicting sequence
ADGRDM

SEQ ID NO: 24235 - protein, 8 aa, Artificial sequence
  Protein classification predicting sequence
DGPAAAGK

SEQ ID NO: 24236 - protein, 8 aa, Artificial sequence
  Protein classification predicting sequence
PLRPAEDA

SEQ ID NO: 24237 - protein, 6 aa, Artificial sequence
  Protein classification predicting sequence
VVEGRD

SEQ ID NO: 24238 - protein, 14 aa, Artificial sequence
  Protein classification predicting sequence
LSYVYIDTGAMYRT

SEQ ID NO: 24239 - protein, 6 aa, Artificial sequence
  Protein classification predicting sequence
TGAMYR

SEQ ID NO: 24240 - protein, 7 aa, Artificial sequence
  Protein classification predicting sequence
TGAMYRT

SEQ ID NO: 24241 - protein, 24 aa, Artificial sequence
  Protein classification predicting sequence
TYAALEQKVDIENEEQLMEVVKNV

SEQ ID NO: 24242 - protein, 26 aa, Artificial sequence
  Protein classification predicting sequence
IEFQQGENTQLVFLNGQDVSEVIRTP

SEQ ID NO: 24243 - protein, 26 aa, Artificial sequence
  Protein classification predicting sequence
VTNRVSIVAKHRLVREEMVRRQQELA

SEQ ID NO: 24244 - protein, 40 aa, Artificial sequence
  Protein classification predicting sequence
KGGVVMDGRDIGTHVLPDAEVKIFMLASVEERAERRHLEN

SEQ ID NO: 24245 - protein, 54 aa, Artificial sequence
  Protein classification predicting sequence
NKGFDSNLEQLKEEIAQRDKLDSEREVSPLKKADDALELDTTSLSIEEVVQKIM

SEQ ID NO: 24246 - protein, 13 aa, Artificial sequence
  Protein classification predicting sequence
REVSPLKKADDAL

SEQ ID NO: 24247 - protein, 7 aa, Artificial sequence
  Protein classification predicting sequence
DGRDIGT

SEQ ID NO: 24248 - protein, 7 aa, Artificial sequence
  Protein classification predicting sequence
ASVEERA

SEQ ID NO: 24249 - protein, 16 aa, Artificial sequence
  Protein classification predicting sequence
IAIDGPAAAGKSTVAK

SEQ ID NO: 24250 - protein, 13 aa, Artificial sequence
  Protein classification predicting sequence
RDKLDSEREVSPL

SEQ ID NO: 24251 - protein, 9 aa, Artificial sequence
  Protein classification predicting sequence
SPLRKADDA

SEQ ID NO: 24252 - protein, 8 aa, Artificial sequence
  Protein classification predicting sequence
LDTGLTYR

SEQ ID NO: 24253 - protein, 6 aa, Artificial sequence
  Protein classification predicting sequence
GTVVFP

SEQ ID NO: 24254 - protein, 7 aa, Artificial sequence
  Protein classification predicting sequence
LKIFLVA

SEQ ID NO: 24255 - protein, 7 aa, Artificial sequence
  Protein classification predicting sequence
ADGRDMG

SEQ ID NO: 24256 - protein, 8 aa, Artificial sequence
  Protein classification predicting sequence
PVITIDGP

SEQ ID NO: 24257 - protein, 9 aa, Artificial sequence
  Protein classification predicting sequence
TQEVANAAS

SEQ ID NO: 24258 - protein, 6 aa, Artificial sequence
  Protein classification predicting sequence
DGRDMG

SEQ ID NO: 24259 - protein, 7 aa, Artificial sequence
  Protein classification predicting sequence
ASAEERA

SEQ ID NO: 24260 - protein, 6 aa, Artificial sequence
  Protein classification predicting sequence
DGRDIG

SEQ ID NO: 24261 - protein, 8 aa, Artificial sequence
  Protein classification predicting sequence
DAPVKIFL

SEQ ID NO: 24262 - protein, 7 aa, Artificial sequence
  Protein classification predicting sequence
FLTASAE

SEQ ID NO: 24263 - protein, 8 aa, Artificial sequence
  Protein classification predicting sequence
PLKPADDA

SEQ ID NO: 24264 - protein, 6 aa, Artificial sequence
  Protein classification predicting sequence
VFPDAP

SEQ ID NO: 24265 - protein, 10 aa, Artificial sequence
  Protein classification predicting sequence
DGPSGAGKGT

SEQ ID NO: 24266 - protein, 7 aa, Artificial sequence
  Protein classification predicting sequence
IAIDGPA

SEQ ID NO: 24267 - protein, 17 aa, Artificial sequence
  Protein classification predicting sequence
IAIDGPASSGKSTVAKI

SEQ ID NO: 24268 - protein, 10 aa, Artificial sequence
  Protein classification predicting sequence
ASVEERAERR

SEQ ID NO: 24269 - protein, 14 aa, Artificial sequence
  Protein classification predicting sequence
TVDGPSGAGKGTLC

SEQ ID NO: 24270 - protein, 12 aa, Artificial sequence
  Protein classification predicting sequence
DGPSGAGKGTLC

SEQ ID NO: 24271 - protein, 7 aa, Artificial sequence
  Protein classification predicting sequence
VNFERLL

SEQ ID NO: 24272 - protein, 7 aa, Artificial sequence
  Protein classification predicting sequence
ERDDRDR

SEQ ID NO: 24273 - protein, 8 aa, Artificial sequence
  Protein classification predicting sequence
ADGRDMGT

SEQ ID NO: 24274 - protein, 6 aa, Artificial sequence
  Protein classification predicting sequence
AIDGPA

SEQ ID NO: 24275 - protein, 10 aa, Artificial sequence
  Protein classification predicting sequence
GKSTVAKIIA

SEQ ID NO: 24276 - protein, 6 aa, Artificial sequence
  Protein classification predicting sequence
AEVKIF

SEQ ID NO: 24277 - protein, 8 aa, Artificial sequence
  Protein classification predicting sequence
RDYKDSHR

SEQ ID NO: 24278 - protein, 9 aa, Artificial sequence
  Protein classification predicting sequence
YLDTGAMYR

SEQ ID NO: 24279 - protein, 12 aa, Artificial sequence
  Protein classification predicting sequence
MDGRDIGTVVLP

SEQ ID NO: 24280 - protein, 9 aa, Artificial sequence
  Protein classification predicting sequence
LKIFLVASV

SEQ ID NO: 24281 - protein, 11 aa, Artificial sequence
  Protein classification predicting sequence
IYVDTGAMYRA

SEQ ID NO: 24282 - protein, 8 aa, Artificial sequence
  Protein classification predicting sequence
DTGAMYRA

SEQ ID NO: 24283 - protein, 7 aa, Artificial sequence
  Protein classification predicting sequence
IALDGPA

SEQ ID NO: 24284 - protein, 9 aa, Artificial sequence
  Protein classification predicting sequence
YIDTGAMYR

SEQ ID NO: 24285 - protein, 7 aa, Artificial sequence
  Protein classification predicting sequence
AELKIFL

SEQ ID NO: 24286 - protein, 18 aa, Artificial sequence
  Protein classification predicting sequence
AQVKLFLDASAEERAKRR

SEQ ID NO: 24287 - protein, 10 aa, Artificial sequence
  Protein classification predicting sequence
RDRNRPVAPL

SEQ ID NO: 24288 - protein, 7 aa, Artificial sequence
  Protein classification predicting sequence
LRKAEDA

SEQ ID NO: 24289 - protein, 8 aa, Artificial sequence
  Protein classification predicting sequence
LDSGAIYR

SEQ ID NO: 24290 - protein, 7 aa, Artificial sequence
  Protein classification predicting sequence
VMDGRDI

SEQ ID NO: 24291 - protein, 8 aa, Artificial sequence
  Protein classification predicting sequence
GRDIGTVV

SEQ ID NO: 24292 - protein, 16 aa, Artificial sequence
  Protein classification predicting sequence
VVAIDGPAGTGKSSVS

SEQ ID NO: 24293 - protein, 6 aa, Artificial sequence
  Protein classification predicting sequence
IAIDGP

SEQ ID NO: 24294 - protein, 7 aa, Artificial sequence
  Protein classification predicting sequence
EERAKRR

SEQ ID NO: 24295 - protein, 9 aa, Artificial sequence
  Protein classification predicting sequence
DAIEVDTTS

SEQ ID NO: 24296 - protein, 7 aa, Artificial sequence
  Protein classification predicting sequence
DTTSLSI

SEQ ID NO: 24297 - protein, 6 aa, Artificial sequence
  Protein classification predicting sequence
ITIDGP

SEQ ID NO: 24298 - protein, 7 aa, Artificial sequence
  Protein classification predicting sequence
DTGAMYR

SEQ ID NO: 24299 - protein, 8 aa, Artificial sequence
  Protein classification predicting sequence
VFEGRDMG

SEQ ID NO: 24300 - protein, 5 aa, Artificial sequence
  Protein classification predicting sequence
GRDMG

SEQ ID NO: 24301 - protein, 8 aa, Artificial sequence
  Protein classification predicting sequence
TSLSIEEV

SEQ ID NO: 24302 - protein, 9 aa, Artificial sequence
  Protein classification predicting sequence
SEDALVPLA

SEQ ID NO: 24303 - protein, 18 aa, Artificial sequence
  Protein classification predicting sequence
AAFPRVREALLRRQRAFR

SEQ ID NO: 24304 - protein, 9 aa, Artificial sequence
  Protein classification predicting sequence
RAVAPLAPA

SEQ ID NO: 24305 - protein, 15 aa, Artificial sequence
  Protein classification predicting sequence
LLDSGAIYRVLALAA

SEQ ID NO: 24306 - protein, 9 aa, Artificial sequence
  Protein classification predicting sequence
VILEGEDVS

SEQ ID NO: 24307 - protein, 9 aa, Artificial sequence
  Protein classification predicting sequence
ELRKEETGM

SEQ ID NO: 24308 - protein, 14 aa, Artificial sequence
  Protein classification predicting sequence
PRVREALLRRQRAF

SEQ ID NO: 24309 - protein, 8 aa, Artificial sequence
  Protein classification predicting sequence
DALVLDST

SEQ ID NO: 24310 - protein, 16 aa, Artificial sequence
  Protein classification predicting sequence
LVITVSGLAGSGTTTL

SEQ ID NO: 24311 - protein, 12 aa, Artificial sequence
  Protein classification predicting sequence
YAGLIFRQMAKE

SEQ ID NO: 24312 - protein, 14 aa, Artificial sequence
  Protein classification predicting sequence
QNRKRYLNLYGIDI

SEQ ID NO: 24313 - protein, 9 aa, Artificial sequence
  Protein classification predicting sequence
ADGRDMGTV

SEQ ID NO: 24314 - protein, 7 aa, Artificial sequence
  Protein classification predicting sequence
RAERRYK

SEQ ID NO: 24315 - protein, 10 aa, Artificial sequence
  Protein classification predicting sequence
VLDGRDIGTV

SEQ ID NO: 24316 - protein, 8 aa, Artificial sequence
  Protein classification predicting sequence
PLKPAADA

SEQ ID NO: 24317 - protein, 7 aa, Artificial sequence
  Protein classification predicting sequence
EERARRR

SEQ ID NO: 24318 - protein, 20 aa, Artificial sequence
  Protein classification predicting sequence
ASEDALVPLASHLDVRFVST

SEQ ID NO: 24319 - protein, 19 aa, Artificial sequence
  Protein classification predicting sequence
AAFPRVREALLRRQRAFRE

SEQ ID NO: 24320 - protein, 47 aa, Artificial sequence
  Protein classification predicting sequence
GNLEVILEGEDVSGEIRTQEVANAASQVAAFPRVREALLRRQRAFRE

SEQ ID NO: 24321 - protein, 41 aa, Artificial sequence
  Protein classification predicting sequence
PGLIADGRDMGTVVFPDAPVKIFLDASSEERAHRRMLQLQE

SEQ ID NO: 24322 - protein, 21 aa, Artificial sequence
  Protein classification predicting sequence
GFSVNFERLLAEIKERDDRDR

SEQ ID NO: 24323 - protein, 6 aa, Artificial sequence
  Protein classification predicting sequence
ERDDRD

SEQ ID NO: 24324 - protein, 8 aa, Artificial sequence
  Protein classification predicting sequence
MDGRDIGT

SEQ ID NO: 24325 - protein, 22 aa, Artificial sequence
  Protein classification predicting sequence
INIALDGPAAAGKSTIAKRVAS

SEQ ID NO: 24326 - protein, 17 aa, Artificial sequence
  Protein classification predicting sequence
HVSYVASKEPVRSFAVK

SEQ ID NO: 24327 - protein, 14 aa, Artificial sequence
  Protein classification predicting sequence
MDGRDIGTVVLPDA

SEQ ID NO: 24328 - protein, 9 aa, Artificial sequence
  Protein classification predicting sequence
LKVYMIASV

SEQ ID NO: 24329 - protein, 10 aa, Artificial sequence
  Protein classification predicting sequence
SNLEQLKEEI

SEQ ID NO: 24330 - protein, 10 aa, Artificial sequence
  Protein classification predicting sequence
YDMNREISPL

SEQ ID NO: 24331 - protein, 13 aa, Artificial sequence
  Protein classification predicting sequence
TLDTTGKSIEEVT

SEQ ID NO: 24332 - protein, 12 aa, Artificial sequence
  Protein classification predicting sequence
EKGIESDFETLK

SEQ ID NO: 24333 - protein, 10 aa, Artificial sequence
  Protein classification predicting sequence
VSPLKAAEDA

SEQ ID NO: 24334 - protein, 9 aa, Artificial sequence
  Protein classification predicting sequence
FIQEKAEKI

SEQ ID NO: 24335 - protein, 13 aa, Artificial sequence
  Protein classification predicting sequence
YLDTGAMYRSATY

SEQ ID NO: 24336 - protein, 11 aa, Artificial sequence
  Protein classification predicting sequence
GIVMDGRDIGT

SEQ ID NO: 24337 - protein, 9 aa, Artificial sequence
  Protein classification predicting sequence
YGIDINDLS

SEQ ID NO: 24338 - protein, 7 aa, Artificial sequence
  Protein classification predicting sequence
VAPLKPA

SEQ ID NO: 24339 - protein, 6 aa, Artificial sequence
  Protein classification predicting sequence
TIDGPS

SEQ ID NO: 24340 - protein, 9 aa, Artificial sequence
  Protein classification predicting sequence
ERDDRDRNR

SEQ ID NO: 24341 - protein, 12 aa, Artificial sequence
  Protein classification predicting sequence
VREALLRRQRAF

SEQ ID NO: 24342 - protein, 8 aa, Artificial sequence
  Protein classification predicting sequence
LDSGALYR

SEQ ID NO: 24343 - protein, 6 aa, Artificial sequence
  Protein classification predicting sequence
RQRAFR

SEQ ID NO: 24344 - protein, 13 aa, Artificial sequence
  Protein classification predicting sequence
PGLVADGRDMGTV

SEQ ID NO: 24345 - protein, 7 aa, Artificial sequence
  Protein classification predicting sequence
SIEQVIE

SEQ ID NO: 24346 - protein, 13 aa, Artificial sequence
  Protein classification predicting sequence
DKANRSSGKSFRG

SEQ ID NO: 24347 - protein, 14 aa, Artificial sequence
  Protein classification predicting sequence
SFGYNNLVSDMRSL

SEQ ID NO: 24348 - protein, 14 aa, Artificial sequence
  Protein classification predicting sequence
GVAGLFMETHPNPA

SEQ ID NO: 24349 - protein, 6 aa, Artificial sequence
  Protein classification predicting sequence
ANDKPF

SEQ ID NO: 24350 - protein, 6 aa, Artificial sequence
  Protein classification predicting sequence
SYRGPG

SEQ ID NO: 24351 - protein, 6 aa, Artificial sequence
  Protein classification predicting sequence
AMAKTG

SEQ ID NO: 24352 - protein, 8 aa, Artificial sequence
  Protein classification predicting sequence
FDVTHALQ

SEQ ID NO: 24353 - protein, 8 aa, Artificial sequence
  Protein classification predicting sequence
LDKLEPFL

SEQ ID NO: 24354 - protein, 7 aa, Artificial sequence
  Protein classification predicting sequence
PFVLFGG

SEQ ID NO: 24355 - protein, 6 aa, Artificial sequence
  Protein classification predicting sequence
ILCDRG

SEQ ID NO: 24356 - protein, 6 aa, Artificial sequence
  Protein classification predicting sequence
VDMLGF

SEQ ID NO: 24357 - protein, 6 aa, Artificial sequence
  Protein classification predicting sequence
RGPGLE

SEQ ID NO: 24358 - protein, 9 aa, Artificial sequence
  Protein classification predicting sequence
DIIQLPAFL

SEQ ID NO: 24359 - protein, 6 aa, Artificial sequence
  Protein classification predicting sequence
RQTDLV

SEQ ID NO: 24360 - protein, 14 aa, Artificial sequence
  Protein classification predicting sequence
PGGRADSAGGRRAQ

SEQ ID NO: 24361 - protein, 6 aa, Artificial sequence
  Protein classification predicting sequence
AKCDGP

SEQ ID NO: 24362 - protein, 9 aa, Artificial sequence
  Protein classification predicting sequence
SPGQMGNIV

SEQ ID NO: 24363 - protein, 7 aa, Artificial sequence
  Protein classification predicting sequence
SFDKANR

SEQ ID NO: 24364 - protein, 13 aa, Artificial sequence
  Protein classification predicting sequence
QIPAFLCRQTDLL

SEQ ID NO: 24365 - protein, 7 aa, Artificial sequence
  Protein classification predicting sequence
FGYNNLV

SEQ ID NO: 24366 - protein, 7 aa, Artificial sequence
  Protein classification predicting sequence
RAAVAVG

SEQ ID NO: 24367 - protein, 6 aa, Artificial sequence
  Protein classification predicting sequence
FMETHP

SEQ ID NO: 24368 - protein, 7 aa, Artificial sequence
  Protein classification predicting sequence
NIKKGQF

SEQ ID NO: 24369 - protein, 6 aa, Artificial sequence
  Protein classification predicting sequence
HTEEQC

SEQ ID NO: 24370 - protein, 6 aa, Artificial sequence
  Protein classification predicting sequence
SDMRSL

SEQ ID NO: 24371 - protein, 10 aa, Artificial sequence
  Protein classification predicting sequence
DPDNAPSDGP

SEQ ID NO: 24372 - protein, 7 aa, Artificial sequence
  Protein classification predicting sequence
PVLTDVH

SEQ ID NO: 24373 - protein, 6 aa, Artificial sequence
  Protein classification predicting sequence
AMQVCE

SEQ ID NO: 24374 - protein, 9 aa, Artificial sequence
  Protein classification predicting sequence
SFDKANRSS

SEQ ID NO: 24375 - protein, 18 aa, Artificial sequence
  Protein classification predicting sequence
THALQCRDPFGAASGGRR

SEQ ID NO: 24376 - protein, 8 aa, Artificial sequence
  Protein classification predicting sequence
AVGLAGLF

SEQ ID NO: 24377 - protein, 6 aa, Artificial sequence
  Protein classification predicting sequence
LVSDMR

SEQ ID NO: 24378 - protein, 8 aa, Artificial sequence
  Protein classification predicting sequence
RGPGLEEG

SEQ ID NO: 24379 - protein, 5 aa, Artificial sequence
  Protein classification predicting sequence
DMKNV

SEQ ID NO: 24380 - protein, 11 aa, Artificial sequence
  Protein classification predicting sequence
PVVFDATHSVQ

SEQ ID NO: 24381 - protein, 12 aa, Artificial sequence
  Protein classification predicting sequence
FDATHSVQQPGG

SEQ ID NO: 24382 - protein, 11 aa, Artificial sequence
  Protein classification predicting sequence
LARAAVAVGVA

SEQ ID NO: 24383 - protein, 20 aa, Artificial sequence
  Protein classification predicting sequence
LTERGCSFGYNNLVSDMRSI

SEQ ID NO: 24384 - protein, 6 aa, Artificial sequence
  Protein classification predicting sequence
KQTFGV

SEQ ID NO: 24385 - protein, 7 aa, Artificial sequence
  Protein classification predicting sequence
GLFIETH

SEQ ID NO: 24386 - protein, 7 aa, Artificial sequence
  Protein classification predicting sequence
PFTLFGG

SEQ ID NO: 24387 - protein, 9 aa, Artificial sequence
  Protein classification predicting sequence
KLGIPYVFK

SEQ ID NO: 24388 - protein, 16 aa, Artificial sequence
  Protein classification predicting sequence
GYDNLVVDMLGFGVMK

SEQ ID NO: 24389 - protein, 7 aa, Artificial sequence
  Protein classification predicting sequence
MKKVSGN

SEQ ID NO: 24390 - protein, 7 aa, Artificial sequence
  Protein classification predicting sequence
AASGGRR

SEQ ID NO: 24391 - protein, 13 aa, Artificial sequence
  Protein classification predicting sequence
KPVNIKKGQFLAP

SEQ ID NO: 24392 - protein, 8 aa, Artificial sequence
  Protein classification predicting sequence
KKGQFLAP

SEQ ID NO: 24393 - protein, 10 aa, Artificial sequence
  Protein classification predicting sequence
QMKAIDDLVK

SEQ ID NO: 24394 - protein, 11 aa, Artificial sequence
  Protein classification predicting sequence
TFGVKIITDVH

SEQ ID NO: 24395 - protein, 15 aa, Artificial sequence
  Protein classification predicting sequence
ELARAGMAVGLAGLF

SEQ ID NO: 24396 - protein, 11 aa, Artificial sequence
  Protein classification predicting sequence
AKCDGPSALPL

SEQ ID NO: 24397 - protein, 13 aa, Artificial sequence
  Protein classification predicting sequence
FKASFDKANRSSI

SEQ ID NO: 24398 - protein, 6 aa, Artificial sequence
  Protein classification predicting sequence
LCERGS

SEQ ID NO: 24399 - protein, 10 aa, Artificial sequence
  Protein classification predicting sequence
PAFLCRQTDL

SEQ ID NO: 24400 - protein, 7 aa, Artificial sequence
  Protein classification predicting sequence
GGQREFV

SEQ ID NO: 24401 - protein, 12 aa, Artificial sequence
  Protein classification predicting sequence
FKASFDKANRSS

SEQ ID NO: 24402 - protein, 7 aa, Artificial sequence
  Protein classification predicting sequence
KIFQELK

SEQ ID NO: 24403 - protein, 12 aa, Artificial sequence
  Protein classification predicting sequence
KIFQELKQTFGV

SEQ ID NO: 24404 - protein, 18 aa, Artificial sequence
  Protein classification predicting sequence
IQLPAFLARQTDLVEAMA

SEQ ID NO: 24405 - protein, 8 aa, Artificial sequence
  Protein classification predicting sequence
PVIFDVTH

SEQ ID NO: 24406 - protein, 13 aa, Artificial sequence
  Protein classification predicting sequence
CDGPSALPLDKLE

SEQ ID NO: 24407 - protein, 6 aa, Artificial sequence
  Protein classification predicting sequence
QMKAID

SEQ ID NO: 24408 - protein, 15 aa, Artificial sequence
  Protein classification predicting sequence
PFVLFGGMNVLESRD

SEQ ID NO: 24409 - protein, 8 aa, Artificial sequence
  Protein classification predicting sequence
QPVADVVD

SEQ ID NO: 24410 - protein, 8 aa, Artificial sequence
  Protein classification predicting sequence
KKPQFLSP

SEQ ID NO: 24411 - protein, 11 aa, Artificial sequence
  Protein classification predicting sequence
KKPQFLSPSQM

SEQ ID NO: 24412 - protein, 6 aa, Artificial sequence
  Protein classification predicting sequence
QMGNIV

SEQ ID NO: 24413 - protein, 10 aa, Artificial sequence
  Protein classification predicting sequence
ECGNDKIILC

SEQ ID NO: 24414 - protein, 7 aa, Artificial sequence
  Protein classification predicting sequence
NFGYDNL

SEQ ID NO: 24415 - protein, 10 aa, Artificial sequence
  Protein classification predicting sequence
VMKKASKGSP

SEQ ID NO: 24416 - protein, 9 aa, Artificial sequence
  Protein classification predicting sequence
AGLFLEAHP

SEQ ID NO: 24417 - protein, 10 aa, Artificial sequence
  Protein classification predicting sequence
FKASFDKANR

SEQ ID NO: 24418 - protein, 7 aa, Artificial sequence
  Protein classification predicting sequence
SDGPNMV

SEQ ID NO: 24419 - protein, 14 aa, Artificial sequence
  Protein classification predicting sequence
LARAAVAVGISGLF

SEQ ID NO: 24420 - protein, 7 aa, Artificial sequence
  Protein classification predicting sequence
ALSDGPN

SEQ ID NO: 24421 - protein, 6 aa, Artificial sequence
  Protein classification predicting sequence
FDATHS

SEQ ID NO: 24422 - protein, 9 aa, Artificial sequence
  Protein classification predicting sequence
IGDINVAND

SEQ ID NO: 24423 - protein, 9 aa, Artificial sequence
  Protein classification predicting sequence
LIAGPCVIE

SEQ ID NO: 24424 - protein, 20 aa, Artificial sequence
  Protein classification predicting sequence
SVVDVLQTPAFLCRQTNFIQ

SEQ ID NO: 24425 - protein, 22 aa, Artificial sequence
  Protein classification predicting sequence
IMRETGCPVVYDATHSVQLPGG

SEQ ID NO: 24426 - protein, 11 aa, Artificial sequence
  Protein classification predicting sequence
DATHSVQLPGG

SEQ ID NO: 24427 - protein, 24 aa, Artificial sequence
  Protein classification predicting sequence
PALARAAVAVGISGLFMETHPDPD

SEQ ID NO: 24428 - protein, 7 aa, Artificial sequence
  Protein classification predicting sequence
LGFGVMK

SEQ ID NO: 24429 - protein, 12 aa, Artificial sequence
  Protein classification predicting sequence
LAGLFLESHPDP

SEQ ID NO: 24430 - protein, 6 aa, Artificial sequence
  Protein classification predicting sequence
DKANRS

SEQ ID NO: 24431 - protein, 12 aa, Artificial sequence
  Protein classification predicting sequence
QIPAFLCRQTDL

SEQ ID NO: 24432 - protein, 29 aa, Artificial sequence
  Protein classification predicting sequence
KLGVPYVFKASFDKANRSSIHSYRGPGME

SEQ ID NO: 24433 - protein, 24 aa, Artificial sequence
  Protein classification predicting sequence
PVIFDVTHALQCRDPFGAASGGRR

SEQ ID NO: 24434 - protein, 6 aa, Artificial sequence
  Protein classification predicting sequence
SFRGPG

SEQ ID NO: 24435 - protein, 23 aa, Artificial sequence
  Protein classification predicting sequence
VANDLPFVLFGGMNVLESRDLAM

SEQ ID NO: 24436 - protein, 12 aa, Artificial sequence
  Protein classification predicting sequence
TGAVINVKKPQF

SEQ ID NO: 24437 - protein, 12 aa, Artificial sequence
  Protein classification predicting sequence
SPGQMGNIVDKF

SEQ ID NO: 24438 - protein, 17 aa, Artificial sequence
  Protein classification predicting sequence
SPGQMGNIVDKFKEGGN

SEQ ID NO: 24439 - protein, 10 aa, Artificial sequence
  Protein classification predicting sequence
ELARAGMAVG

SEQ ID NO: 24440 - protein, 9 aa, Artificial sequence
  Protein classification predicting sequence
CDGPSALPL

SEQ ID NO: 24441 - protein, 7 aa, Artificial sequence
  Protein classification predicting sequence
QMKAIDD

SEQ ID NO: 24442 - protein, 6 aa, Artificial sequence
  Protein classification predicting sequence
ICEHYV

SEQ ID NO: 24443 - protein, 9 aa, Artificial sequence
  Protein classification predicting sequence
YVEVTNKLG

SEQ ID NO: 24444 - protein, 13 aa, Artificial sequence
  Protein classification predicting sequence
VFKASFDKANRSS

SEQ ID NO: 24445 - protein, 7 aa, Artificial sequence
  Protein classification predicting sequence
HSYRGPG

SEQ ID NO: 24446 - protein, 9 aa, Artificial sequence
  Protein classification predicting sequence
TFGVKIITD

SEQ ID NO: 24447 - protein, 11 aa, Artificial sequence
  Protein classification predicting sequence
TGAVINVKKPQ

SEQ ID NO: 24448 - protein, 16 aa, Artificial sequence
  Protein classification predicting sequence
MSPGQVGNIVEKFAEC

SEQ ID NO: 24449 - protein, 8 aa, Artificial sequence
  Protein classification predicting sequence
GAASGGRR

SEQ ID NO: 24450 - protein, 6 aa, Artificial sequence
  Protein classification predicting sequence
CDGPSA

SEQ ID NO: 24451 - protein, 12 aa, Artificial sequence
  Protein classification predicting sequence
NFGYDNLVVDML

SEQ ID NO: 24452 - protein, 12 aa, Artificial sequence
  Protein classification predicting sequence
RDPSGAASGGRR

SEQ ID NO: 24453 - protein, 10 aa, Artificial sequence
  Protein classification predicting sequence
GMAVGLAGLF

SEQ ID NO: 24454 - protein, 12 aa, Artificial sequence
  Protein classification predicting sequence
GMNVLESRDLAM

SEQ ID NO: 24455 - protein, 6 aa, Artificial sequence
  Protein classification predicting sequence
EAHPDP

SEQ ID NO: 24456 - protein, 14 aa, Artificial sequence
  Protein classification predicting sequence
EAHPDPEHAKCDGP

SEQ ID NO: 24457 - protein, 11 aa, Artificial sequence
  Protein classification predicting sequence
FGGMNVLESRD

SEQ ID NO: 24458 - protein, 8 aa, Artificial sequence
  Protein classification predicting sequence
PAFLCRQT

SEQ ID NO: 24459 - protein, 7 aa, Artificial sequence
  Protein classification predicting sequence
SGNPNVL

SEQ ID NO: 24460 - protein, 8 aa, Artificial sequence
  Protein classification predicting sequence
FDATHSVQ

SEQ ID NO: 24461 - protein, 38 aa, Artificial sequence
  Protein classification predicting sequence
FDATHSVQQPGGQGGSTGGQREFVETLARAAVAVGVAG

SEQ ID NO: 24462 - protein, 12 aa, Artificial sequence
  Protein classification predicting sequence
LARAAVAVGVAG

SEQ ID NO: 24463 - protein, 6 aa, Artificial sequence
  Protein classification predicting sequence
IAGPCV

SEQ ID NO: 24464 - protein, 10 aa, Artificial sequence
  Protein classification predicting sequence
PAFLARQTDL

SEQ ID NO: 24465 - protein, 10 aa, Artificial sequence
  Protein classification predicting sequence
RQTDLLVAAA

SEQ ID NO: 24466 - protein, 7 aa, Artificial sequence
  Protein classification predicting sequence
LARAAVA

SEQ ID NO: 24467 - protein, 6 aa, Artificial sequence
  Protein classification predicting sequence
ETHPDP

SEQ ID NO: 24468 - protein, 7 aa, Artificial sequence
  Protein classification predicting sequence
NDLPFVL

SEQ ID NO: 24469 - protein, 9 aa, Artificial sequence
  Protein classification predicting sequence
KSSFDKANR

SEQ ID NO: 24470 - protein, 9 aa, Artificial sequence
  Protein classification predicting sequence
SDMRSLAIM

SEQ ID NO: 24471 - protein, 8 aa, Artificial sequence
  Protein classification predicting sequence
NLVVDMLG

SEQ ID NO: 24472 - protein, 8 aa, Artificial sequence
  Protein classification predicting sequence
KAIDDLVK

SEQ ID NO: 24473 - protein, 7 aa, Artificial sequence
  Protein classification predicting sequence
DKANRSS

SEQ ID NO: 24474 - protein, 10 aa, Artificial sequence
  Protein classification predicting sequence
DKANRSSIHS

SEQ ID NO: 24475 - protein, 10 aa, Artificial sequence
  Protein classification predicting sequence
CDGPSALPLD

SEQ ID NO: 24476 - protein, 19 aa, Artificial sequence
  Protein classification predicting sequence
HSYRGPGLEEGMKIFQELK

SEQ ID NO: 24477 - protein, 76 aa, Artificial sequence
  Protein classification predicting sequence
TFGVKIITDVHTEAQAQPVADVVDVIQLPAFLARQTDLVEAMAKTGAVINVKKPQFMSPGQVGNIVEKFAECGNDK

SEQ ID NO: 24478 - protein, 8 aa, Artificial sequence
  Protein classification predicting sequence
GNDKVILC

SEQ ID NO: 24479 - protein, 25 aa, Artificial sequence
  Protein classification predicting sequence
ILCERGSCHGYDNLVVDMLGFGVMK

SEQ ID NO: 24480 - protein, 53 aa, Artificial sequence
  Protein classification predicting sequence
GSPIIFDVTHSLQMRDPSGAASGGRREQTVELAKAGLATGIAGLFIEAHPNPD

SEQ ID NO: 24481 - protein, 6 aa, Artificial sequence
  Protein classification predicting sequence
IFDVTH

SEQ ID NO: 24482 - protein, 7 aa, Artificial sequence
  Protein classification predicting sequence
DDLVKSF

SEQ ID NO: 24483 - protein, 8 aa, Artificial sequence
  Protein classification predicting sequence
ERGSSFGY

SEQ ID NO: 24484 - protein, 11 aa, Artificial sequence
  Protein classification predicting sequence
VVDVLQTPAFL

SEQ ID NO: 24485 - protein, 13 aa, Artificial sequence
  Protein classification predicting sequence
NFGYDNLVVDMLG

SEQ ID NO: 24486 - protein, 6 aa, Artificial sequence
  Protein classification predicting sequence
ALYFSR

SEQ ID NO: 24487 - protein, 10 aa, Artificial sequence
  Protein classification predicting sequence
ALYFSRSPIP

SEQ ID NO: 24488 - protein, 9 aa, Artificial sequence
  Protein classification predicting sequence
YLHIGVYAF

SEQ ID NO: 24489 - protein, 29 aa, Artificial sequence
  Protein classification predicting sequence
WQPSPLEHIEMLEQLRVLWYGEKIHVAVA

SEQ ID NO: 24490 - protein, 7 aa, Artificial sequence
  Protein classification predicting sequence
NIQGDEP

SEQ ID NO: 24491 - protein, 8 aa, Artificial sequence
  Protein classification predicting sequence
VNVQGDEP

SEQ ID NO: 24492 - protein, 9 aa, Artificial sequence
  Protein classification predicting sequence
QGDEPLIPP

SEQ ID NO: 24493 - protein, 8 aa, Artificial sequence
  Protein classification predicting sequence
RQVADNLA

SEQ ID NO: 24494 - protein, 8 aa, Artificial sequence
  Protein classification predicting sequence
FNPNAVKV

SEQ ID NO: 24495 - protein, 8 aa, Artificial sequence
  Protein classification predicting sequence
RQVAENLA

SEQ ID NO: 24496 - protein, 15 aa, Artificial sequence
  Protein classification predicting sequence
LEQLRVLWYGEKIHV

SEQ ID NO: 24497 - protein, 9 aa, Artificial sequence
  Protein classification predicting sequence
STRLPGKPL

SEQ ID NO: 24498 - protein, 8 aa, Artificial sequence
  Protein classification predicting sequence
FTVVIPAR

SEQ ID NO: 24499 - protein, 17 aa, Artificial sequence
  Protein classification predicting sequence
DDTVIVNVQGDEPMIPA

SEQ ID NO: 24500 - protein, 17 aa, Artificial sequence
  Protein classification predicting sequence
NLAQRQVGMATLAVPIH

SEQ ID NO: 24501 - protein, 18 aa, Artificial sequence
  Protein classification predicting sequence
LRHLGIYGYRAGFIRRYV

SEQ ID NO: 24502 - protein, 8 aa, Artificial sequence
  Protein classification predicting sequence
VCMTSPNH

SEQ ID NO: 24503 - protein, 13 aa, Artificial sequence
  Protein classification predicting sequence
RHIGIYAYRAGFI

SEQ ID NO: 24504 - protein, 8 aa, Artificial sequence
  Protein classification predicting sequence
LEQLRVLW

SEQ ID NO: 24505 - protein, 9 aa, Artificial sequence
  Protein classification predicting sequence
GVDTPEDLE

SEQ ID NO: 24506 - protein, 9 aa, Artificial sequence
  Protein classification predicting sequence
GMATLAVPI

SEQ ID NO: 24507 - protein, 11 aa, Artificial sequence
  Protein classification predicting sequence
GAFGKVVEATA

SEQ ID NO: 24508 - protein, 87 aa, Artificial sequence
  Protein classification predicting sequence
GAFGKVVEATAFGLGKEDAVLKVAVKMLKSTAHADEKEALMSELKIMSHLGQHENIVNLLGACTHGGPVLVITEYCCYGDLLNFLRR

SEQ ID NO: 24509 - protein, 371 aa, Artificial sequence
  Protein classification predicting sequence
FLRTLGKGDWFGEKALQGEDVRTANVIAAEAVTCLVIDRDSFKHLIGGLDDVSNKAYEDAEAKAKYEAEAAFFANLKLSDFNIIDTLGVGGFGRVELVQLKSEESKTFAMKILKKRHIVDTRQQEHIRSEKQIMQGAHSDFIVRLYRTFKDSKYLYMLMEACLGGELWTILRDRGSFEDSTTRFYTACVVEAFAYLHSKGIIYRDLKPENLILDHRGYAKLVDFGFAKKIGFGKKTWTFCGTPEYVAPEIILNKGHDISADYWSLGILMYELLTGSPPFSGPDPMKTYNIILRGIDMIEFPKKIAKNAANLIKKLCRDNPSERLGNLKNGVKDIQKHKWFEGFNWEGLRKGTLTPPIIPSVASPTDTSNFD

SEQ ID NO: 24510 - protein, 6 aa, Artificial sequence
  Protein classification predicting sequence
DTSNFD

SEQ ID NO: 24511 - protein, 37 aa, Artificial sequence
  Protein classification predicting sequence
EILSKLADVLEETHYENGEYIIRQGARGDTFFIISKG

SEQ ID NO: 24512 - protein, 14 aa, Artificial sequence
  Protein classification predicting sequence
FGELAILYNCTRTA

SEQ ID NO: 24513 - protein, 6 aa, Artificial sequence
  Protein classification predicting sequence
YIIRQG

SEQ ID NO: 24514 - protein, 9 aa, Artificial sequence
  Protein classification predicting sequence
GGFGRVELV

SEQ ID NO: 24515 - protein, 7 aa, Artificial sequence
  Protein classification predicting sequence
HIVDTKQ

SEQ ID NO: 24516 - protein, 10 aa, Artificial sequence
  Protein classification predicting sequence
KYVYMLLEAC

SEQ ID NO: 24517 - protein, 9 aa, Artificial sequence
  Protein classification predicting sequence
TYNLILKGI

SEQ ID NO: 24518 - protein, 9 aa, Artificial sequence
  Protein classification predicting sequence
GELAILYNC

SEQ ID NO: 24519 - protein, 14 aa, Artificial sequence
  Protein classification predicting sequence
RQCFQTIMMRTGLI

SEQ ID NO: 24520 - protein, 8 aa, Artificial sequence
  Protein classification predicting sequence
DVLEETHY

SEQ ID NO: 24521 - protein, 11 aa, Artificial sequence
  Protein classification predicting sequence
CLVIDRETFNQ

SEQ ID NO: 24522 - protein, 13 aa, Artificial sequence
  Protein classification predicting sequence
TLGVGGFGRVELV

SEQ ID NO: 24523 - protein, 12 aa, Artificial sequence
  Protein classification predicting sequence
CLGGELWTILRD

SEQ ID NO: 24524 - protein, 15 aa, Artificial sequence
  Protein classification predicting sequence
DSTTRFYTACVVEAF

SEQ ID NO: 24525 - protein, 7 aa, Artificial sequence
  Protein classification predicting sequence
DFGFAKK

SEQ ID NO: 24526 - protein, 15 aa, Artificial sequence
  Protein classification predicting sequence
KTWTFCGTPEYVAPE

SEQ ID NO: 24527 - protein, 12 aa, Artificial sequence
  Protein classification predicting sequence
GHDISADYWSLG

SEQ ID NO: 24528 - protein, 6 aa, Artificial sequence
  Protein classification predicting sequence
TYNIIL

SEQ ID NO: 24529 - protein, 11 aa, Artificial sequence
  Protein classification predicting sequence
NLIKKLCRDNP

SEQ ID NO: 24530 - protein, 7 aa, Artificial sequence
  Protein classification predicting sequence
IQKHKWF

SEQ ID NO: 24531 - protein, 7 aa, Artificial sequence
  Protein classification predicting sequence
LYRTFKD

SEQ ID NO: 24532 - protein, 11 aa, Artificial sequence
  Protein classification predicting sequence
GIIYRDLKPEN

SEQ ID NO: 24533 - protein, 7 aa, Artificial sequence
  Protein classification predicting sequence
GFNWEGL

SEQ ID NO: 24534 - protein, 7 aa, Artificial sequence
  Protein classification predicting sequence
SVSATTR

SEQ ID NO: 24535 - protein, 6 aa, Artificial sequence
  Protein classification predicting sequence
PRPGEV

SEQ ID NO: 24536 - protein, 9 aa, Artificial sequence
  Protein classification predicting sequence
FIFLAPPSL

SEQ ID NO: 24537 - protein, 7 aa, Artificial sequence
  Protein classification predicting sequence
GLLIVLS

SEQ ID NO: 24538 - protein, 120 aa, Artificial sequence
  Protein classification predicting sequence
PSGVGKGTVRKELFSHEDTRFQYSISVTTRKPREGEVDGVDYFFKEREEFEEMIRNEKLLEWAEFVGNYYGTPIDYVEKTLQEGKDVFLEIEVQGAIQVKKAFPEGVFIFLAPPSLSELK

SEQ ID NO: 24539 - protein, 24 aa, Artificial sequence
  Protein classification predicting sequence
RIVGRGTETEDVIENRLTVAKEEI

SEQ ID NO: 24540 - protein, 18 aa, Artificial sequence
  Protein classification predicting sequence
MMDAYDYVVENDQVELAC

SEQ ID NO: 24541 - protein, 9 aa, Artificial sequence
  Protein classification predicting sequence
GLLIVLSGP

SEQ ID NO: 24542 - protein, 8 aa, Artificial sequence
  Protein classification predicting sequence
GEVDGVNY

SEQ ID NO: 24543 - protein, 11 aa, Artificial sequence
  Protein classification predicting sequence
AEYVGNYYGTP

SEQ ID NO: 24544 - protein, 7 aa, Artificial sequence
  Protein classification predicting sequence
NDEVELA

SEQ ID NO: 24545 - protein, 9 aa, Artificial sequence
  Protein classification predicting sequence
TTRKPREGE

SEQ ID NO: 24546 - protein, 8 aa, Artificial sequence
  Protein classification predicting sequence
LEIEVQGA

SEQ ID NO: 24547 - protein, 10 aa, Artificial sequence
  Protein classification predicting sequence
GVDYFFKTRD

SEQ ID NO: 24548 - protein, 7 aa, Artificial sequence
  Protein classification predicting sequence
RYKKMLE

SEQ ID NO: 24549 - protein, 7 aa, Artificial sequence
  Protein classification predicting sequence
SISMTTR

SEQ ID NO: 24550 - protein, 6 aa, Artificial sequence
  Protein classification predicting sequence
GNYYGT

SEQ ID NO: 24551 - protein, 7 aa, Artificial sequence
  Protein classification predicting sequence
SVSVTTR

SEQ ID NO: 24552 - protein, 7 aa, Artificial sequence
  Protein classification predicting sequence
PPSIDEL

SEQ ID NO: 24553 - protein, 17 aa, Artificial sequence
  Protein classification predicting sequence
AGHDVLLEIDWQGARQV

SEQ ID NO: 24554 - protein, 7 aa, Artificial sequence
  Protein classification predicting sequence
RPGEVDG

SEQ ID NO: 24555 - protein, 8 aa, Artificial sequence
  Protein classification predicting sequence
EWAEVHGN

SEQ ID NO: 24556 - protein, 6 aa, Artificial sequence
  Protein classification predicting sequence
EYDYLI

SEQ ID NO: 24557 - protein, 11 aa, Artificial sequence
  Protein classification predicting sequence
DVFLDIDWQGA

SEQ ID NO: 24558 - protein, 8 aa, Artificial sequence
  Protein classification predicting sequence
GNYYGTSR

SEQ ID NO: 24559 - protein, 7 aa, Artificial sequence
  Protein classification predicting sequence
MVVAPSG

SEQ ID NO: 24560 - protein, 6 aa, Artificial sequence
  Protein classification predicting sequence
YYGTSR

SEQ ID NO: 24561 - protein, 7 aa, Artificial sequence
  Protein classification predicting sequence
YVIINDD

SEQ ID NO: 24562 - protein, 7 aa, Artificial sequence
  Protein classification predicting sequence
DYVVVND

SEQ ID NO: 24563 - protein, 6 aa, Artificial sequence
  Protein classification predicting sequence
GNFYGT

SEQ ID NO: 24564 - protein, 7 aa, Artificial sequence
  Protein classification predicting sequence
LFIISAP

SEQ ID NO: 24565 - protein, 7 aa, Artificial sequence
  Protein classification predicting sequence
APSGAGK

SEQ ID NO: 24566 - protein, 6 aa, Artificial sequence
  Protein classification predicting sequence
IDWQGA

SEQ ID NO: 24567 - protein, 7 aa, Artificial sequence
  Protein classification predicting sequence
SISATTR

SEQ ID NO: 24568 - protein, 8 aa, Artificial sequence
  Protein classification predicting sequence
AEKCRVDR

SEQ ID NO: 24569 - protein, 7 aa, Artificial sequence
  Protein classification predicting sequence
EKGLLIV

SEQ ID NO: 24570 - protein, 8 aa, Artificial sequence
  Protein classification predicting sequence
EVDLAGAR

SEQ ID NO: 24571 - protein, 8 aa, Artificial sequence
  Protein classification predicting sequence
IDWQGARQ

SEQ ID NO: 24572 - protein, 6 aa, Artificial sequence
  Protein classification predicting sequence
RGLLIV

SEQ ID NO: 24573 - protein, 8 aa, Artificial sequence
  Protein classification predicting sequence
GEVDGVDY

SEQ ID NO: 24574 - protein, 20 aa, Artificial sequence
  Protein classification predicting sequence
MLEYAEYVGNYYGTPLTYVN

SEQ ID NO: 24575 - protein, 7 aa, Artificial sequence
  Protein classification predicting sequence
KVPDGVF

SEQ ID NO: 24576 - protein, 8 aa, Artificial sequence
  Protein classification predicting sequence
HGEHYFFV

SEQ ID NO: 24577 - protein, 12 aa, Artificial sequence
  Protein classification predicting sequence
DLKTIIRAERLR

SEQ ID NO: 24578 - protein, 7 aa, Artificial sequence
  Protein classification predicting sequence
ERGLLIV

SEQ ID NO: 24579 - protein, 10 aa, Artificial sequence
  Protein classification predicting sequence
GVDYFFRTRE

SEQ ID NO: 24580 - protein, 9 aa, Artificial sequence
  Protein classification predicting sequence
FLEIEVQGA

SEQ ID NO: 24581 - protein, 12 aa, Artificial sequence
  Protein classification predicting sequence
VELACERIKAIV

SEQ ID NO: 24582 - protein, 8 aa, Artificial sequence
  Protein classification predicting sequence
SAPSGAGK

SEQ ID NO: 24583 - protein, 18 aa, Artificial sequence
  Protein classification predicting sequence
GNLYILSAPSGAGKSSLI

SEQ ID NO: 24584 - protein, 13 aa, Artificial sequence
  Protein classification predicting sequence
GIDVFLDIDWQGA

SEQ ID NO: 24585 - protein, 8 aa, Artificial sequence
  Protein classification predicting sequence
VSVSHTTR

SEQ ID NO: 24586 - protein, 6 aa, Artificial sequence
  Protein classification predicting sequence
TTRPMR

SEQ ID NO: 24587 - protein, 6 aa, Artificial sequence
  Protein classification predicting sequence
EWAEVH

SEQ ID NO: 24588 - protein, 6 aa, Artificial sequence
  Protein classification predicting sequence
GVHYHF

SEQ ID NO: 24589 - protein, 8 aa, Artificial sequence
  Protein classification predicting sequence
IDWQGAQQ

SEQ ID NO: 24590 - protein, 7 aa, Artificial sequence
  Protein classification predicting sequence
DVLLEID

SEQ ID NO: 24591 - protein, 8 aa, Artificial sequence
  Protein classification predicting sequence
YDYAVVND

SEQ ID NO: 24592 - protein, 12 aa, Artificial sequence
  Protein classification predicting sequence
SGPSGVGKGTVR

SEQ ID NO: 24593 - protein, 7 aa, Artificial sequence
  Protein classification predicting sequence
FLTPPDL

SEQ ID NO: 24594 - protein, 8 aa, Artificial sequence
  Protein classification predicting sequence
SMTTRQMR

SEQ ID NO: 24595 - protein, 16 aa, Artificial sequence
  Protein classification predicting sequence
MLEYAEYVGNYYGTPL

SEQ ID NO: 24596 - protein, 8 aa, Artificial sequence
  Protein classification predicting sequence
LSELKNRI

SEQ ID NO: 24597 - protein, 10 aa, Artificial sequence
  Protein classification predicting sequence
TTRPQRPGEV

SEQ ID NO: 24598 - protein, 8 aa, Artificial sequence
  Protein classification predicting sequence
LEIDWQGA

SEQ ID NO: 24599 - protein, 17 aa, Artificial sequence
  Protein classification predicting sequence
EMSHYAEYDYLIVNDDF

SEQ ID NO: 24600 - protein, 25 aa, Artificial sequence
  Protein classification predicting sequence
MQRDIAAGDFIEHAEFSGNLYGTSK

SEQ ID NO: 24601 - protein, 6 aa, Artificial sequence
  Protein classification predicting sequence
GRGTET

SEQ ID NO: 24602 - protein, 8 aa, Artificial sequence
  Protein classification predicting sequence
YSISMTTR

SEQ ID NO: 24603 - protein, 6 aa, Artificial sequence
  Protein classification predicting sequence
TTRPPR

SEQ ID NO: 24604 - protein, 7 aa, Artificial sequence
  Protein classification predicting sequence
QGAQQIR

SEQ ID NO: 24605 - protein, 12 aa, Artificial sequence
  Protein classification predicting sequence
IHGGLQRSGTPA

SEQ ID NO: 24606 - protein, 9 aa, Artificial sequence
  Protein classification predicting sequence
MMDAYDYVV

SEQ ID NO: 24607 - protein, 7 aa, Artificial sequence
  Protein classification predicting sequence
VFLEIEV

SEQ ID NO: 24608 - protein, 8 aa, Artificial sequence
  Protein classification predicting sequence
YDYIVVND

SEQ ID NO: 24609 - protein, 6 aa, Artificial sequence
  Protein classification predicting sequence
TTRAPR

SEQ ID NO: 24610 - protein, 15 aa, Artificial sequence
  Protein classification predicting sequence
DVFLDIDWQGAQQIR

SEQ ID NO: 24611 - protein, 6 aa, Artificial sequence
  Protein classification predicting sequence
GEHYFF

SEQ ID NO: 24612 - protein, 11 aa, Artificial sequence
  Protein classification predicting sequence
EYDYLIVNDDF

SEQ ID NO: 24613 - protein, 19 aa, Artificial sequence
  Protein classification predicting sequence
ALMDFKAIIRAERLKQDKQ

SEQ ID NO: 24614 - protein, 14 aa, Artificial sequence
  Protein classification predicting sequence
VSVSHTTRGMRPGE

SEQ ID NO: 24615 - protein, 8 aa, Artificial sequence
  Protein classification predicting sequence
NDDFDTAL

SEQ ID NO: 24616 - protein, 10 aa, Artificial sequence
  Protein classification predicting sequence
ARSIFILPPS

SEQ ID NO: 24617 - protein, 6 aa, Artificial sequence
  Protein classification predicting sequence
SHYNEY

SEQ ID NO: 24618 - protein, 8 aa, Artificial sequence
  Protein classification predicting sequence
SSPSGAGK

SEQ ID NO: 24619 - protein, 20 aa, Artificial sequence
  Protein classification predicting sequence
PRPGEVHGEHYFFVNHDEFK

SEQ ID NO: 24620 - protein, 18 aa, Artificial sequence
  Protein classification predicting sequence
AFLEHAEVFGNYYGTSRE

SEQ ID NO: 24621 - protein, 24 aa, Artificial sequence
  Protein classification predicting sequence
IEQVLATGVDVFLDIDWQGAQQIR

SEQ ID NO: 24622 - protein, 20 aa, Artificial sequence
  Protein classification predicting sequence
DLKTIIRAERLRMSRQKQRH

SEQ ID NO: 24623 - protein, 7 aa, Artificial sequence
  Protein classification predicting sequence
SVSHTTR

SEQ ID NO: 24624 - protein, 9 aa, Artificial sequence
  Protein classification predicting sequence
TTRAPRPGE

SEQ ID NO: 24625 - protein, 9 aa, Artificial sequence
  Protein classification predicting sequence
QVSVSHTTR

SEQ ID NO: 24626 - protein, 7 aa, Artificial sequence
  Protein classification predicting sequence
IFILPPS

SEQ ID NO: 24627 - protein, 8 aa, Artificial sequence
  Protein classification predicting sequence
DVFLEIEV

SEQ ID NO: 24628 - protein, 12 aa, Artificial sequence
  Protein classification predicting sequence
TSYKYSISMTTR

SEQ ID NO: 24629 - protein, 14 aa, Artificial sequence
  Protein classification predicting sequence
FEALIKDDQFIEYA

SEQ ID NO: 24630 - protein, 9 aa, Artificial sequence
  Protein classification predicting sequence
YVGNYYGTP

SEQ ID NO: 24631 - protein, 17 aa, Artificial sequence
  Protein classification predicting sequence
YVGNYYGTPVQYVKDTM

SEQ ID NO: 24632 - protein, 17 aa, Artificial sequence
  Protein classification predicting sequence
ERLVGRGTESDEKIQSR

SEQ ID NO: 24633 - protein, 30 aa, Artificial sequence
  Protein classification predicting sequence
NEARKEVEMMNLYDYVVVNDEVELAKNRIQ

SEQ ID NO: 24634 - protein, 11 aa, Artificial sequence
  Protein classification predicting sequence
IVEAEHLKRER

SEQ ID NO: 24635 - protein, 7 aa, Artificial sequence
  Protein classification predicting sequence
EAKYRKM

SEQ ID NO: 24636 - protein, 8 aa, Artificial sequence
  Protein classification predicting sequence
YSVSMTTR

SEQ ID NO: 24637 - protein, 7 aa, Artificial sequence
  Protein classification predicting sequence
RLVGRGT

SEQ ID NO: 24638 - protein, 27 aa, Artificial sequence
  Protein classification predicting sequence
EVIAQRIERAKEEIALMREYDYAVVND

SEQ ID NO: 24639 - protein, 7 aa, Artificial sequence
  Protein classification predicting sequence
DGVDYFF

SEQ ID NO: 24640 - protein, 16 aa, Artificial sequence
  Protein classification predicting sequence
IIETEHFRVERVIGRY

SEQ ID NO: 24641 - protein, 8 aa, Artificial sequence
  Protein classification predicting sequence
EVIAQRIE

SEQ ID NO: 24642 - protein, 14 aa, Artificial sequence
  Protein classification predicting sequence
AKEEIALMREYDYA

SEQ ID NO: 24643 - protein, 7 aa, Artificial sequence
  Protein classification predicting sequence
GPSAVGK

SEQ ID NO: 24644 - protein, 7 aa, Artificial sequence
  Protein classification predicting sequence
GNYYGTP

SEQ ID NO: 24645 - protein, 8 aa, Artificial sequence
  Protein classification predicting sequence
LEWAEFAG

SEQ ID NO: 24646 - protein, 7 aa, Artificial sequence
  Protein classification predicting sequence
RGQDSEE

SEQ ID NO: 24647 - protein, 9 aa, Artificial sequence
  Protein classification predicting sequence
YGTPRAPVE

SEQ ID NO: 24648 - protein, 6 aa, Artificial sequence
  Protein classification predicting sequence
LLEWAE

SEQ ID NO: 24649 - protein, 8 aa, Artificial sequence
  Protein classification predicting sequence
PPSLSELK

SEQ ID NO: 24650 - protein, 8 aa, Artificial sequence
  Protein classification predicting sequence
NYVSKYNY

SEQ ID NO: 24651 - protein, 8 aa, Artificial sequence
  Protein classification predicting sequence
EWAEFVGN

SEQ ID NO: 24652 - protein, 18 aa, Artificial sequence
  Protein classification predicting sequence
GTLYIVSAPSGAGKSSLI

SEQ ID NO: 24653 - protein, 6 aa, Artificial sequence
  Protein classification predicting sequence
VIAKRM

SEQ ID NO: 24654 - protein, 15 aa, Artificial sequence
  Protein classification predicting sequence
NPTYAMKVSVSHTTR

SEQ ID NO: 24655 - protein, 7 aa, Artificial sequence
  Protein classification predicting sequence
GQMLEYA

SEQ ID NO: 24656 - protein, 7 aa, Artificial sequence
  Protein classification predicting sequence
VLSGPSG

SEQ ID NO: 24657 - protein, 26 aa, Artificial sequence
  Protein classification predicting sequence
QSVEPQLAAGHDVLLEIDWQGARQVR

SEQ ID NO: 24658 - protein, 34 aa, Artificial sequence
  Protein classification predicting sequence
QGTLYIVSAPSGAGKSSLIQALLKTQPLYDTQVS

SEQ ID NO: 24659 - protein, 6 aa, Artificial sequence
  Protein classification predicting sequence
RGLGSS

SEQ ID NO: 24660 - protein, 6 aa, Artificial sequence
  Protein classification predicting sequence
LSGAGP

SEQ ID NO: 24661 - protein, 8 aa, Artificial sequence
  Protein classification predicting sequence
KWQVIHSF

SEQ ID NO: 24662 - protein, 17 aa, Artificial sequence
  Protein classification predicting sequence
SIPTDDKNLIVSTACKV

SEQ ID NO: 24663 - protein, 32 aa, Artificial sequence
  Protein classification predicting sequence
IIEVTSNIPLTRGLGSSASAIVAGIELANQLG

SEQ ID NO: 24664 - protein, 24 aa, Artificial sequence
  Protein classification predicting sequence
RVPASTANVGPGFDSVGIALSLYL

SEQ ID NO: 24665 - protein, 10 aa, Artificial sequence
  Protein classification predicting sequence
DKWQVIHSFE

SEQ ID NO: 24666 - protein, 33 aa, Artificial sequence
  Protein classification predicting sequence
DQKVQIATNFEGHPDNVAASILGGTVIGALDGK

SEQ ID NO: 24667 - protein, 31 aa, Artificial sequence
  Protein classification predicting sequence
SVVRIESKELGVISLIPNEELNTDESRSVLP

SEQ ID NO: 24668 - protein, 23 aa, Artificial sequence
  Protein classification predicting sequence
FPFHEAVKASAISNVLVAALCQK

SEQ ID NO: 24669 - protein, 10 aa, Artificial sequence
  Protein classification predicting sequence
MKVCELEIDH

SEQ ID NO: 24670 - protein, 8 aa, Artificial sequence
  Protein classification predicting sequence
SNVLVAAL

SEQ ID NO: 24671 - protein, 14 aa, Artificial sequence
  Protein classification predicting sequence
ANLGPGFDSIGLAL

SEQ ID NO: 24672 - protein, 11 aa, Artificial sequence
  Protein classification predicting sequence
EGHPDNVAASI

SEQ ID NO: 24673 - protein, 9 aa, Artificial sequence
  Protein classification predicting sequence
SGLGSSACS

SEQ ID NO: 24674 - protein, 6 aa, Artificial sequence
  Protein classification predicting sequence
IAEPYR

SEQ ID NO: 24675 - protein, 8 aa, Artificial sequence
  Protein classification predicting sequence
ILTLYEKR

SEQ ID NO: 24676 - protein, 9 aa, Artificial sequence
  Protein classification predicting sequence
YAPASIGNV

SEQ ID NO: 24677 - protein, 17 aa, Artificial sequence
  Protein classification predicting sequence
LEKNMPIGSGLGSSACS

SEQ ID NO: 24678 - protein, 6 aa, Artificial sequence
  Protein classification predicting sequence
AMNEFC

SEQ ID NO: 24679 - protein, 12 aa, Artificial sequence
  Protein classification predicting sequence
HYDNVAPCYLGG

SEQ ID NO: 24680 - protein, 7 aa, Artificial sequence
  Protein classification predicting sequence
LAGFIHA

SEQ ID NO: 24681 - protein, 8 aa, Artificial sequence
  Protein classification predicting sequence
GISGSGPT

SEQ ID NO: 24682 - protein, 8 aa, Artificial sequence
  Protein classification predicting sequence
APASVANV

SEQ ID NO: 24683 - protein, 12 aa, Artificial sequence
  Protein classification predicting sequence
ISGSIHYDNVAP

SEQ ID NO: 24684 - protein, 9 aa, Artificial sequence
  Protein classification predicting sequence
VGFDVLGAA

SEQ ID NO: 24685 - protein, 7 aa, Artificial sequence
  Protein classification predicting sequence
HYDNVAP

SEQ ID NO: 24686 - protein, 14 aa, Artificial sequence
  Protein classification predicting sequence
ALMSTLSGSGSSFF

SEQ ID NO: 24687 - protein, 7 aa, Artificial sequence
  Protein classification predicting sequence
IDFYFAC

SEQ ID NO: 24688 - protein, 6 aa, Artificial sequence
  Protein classification predicting sequence
GFDVLG

SEQ ID NO: 24689 - protein, 6 aa, Artificial sequence
  Protein classification predicting sequence
PATSAN

SEQ ID NO: 24690 - protein, 7 aa, Artificial sequence
  Protein classification predicting sequence
EGHPDNV

SEQ ID NO: 24691 - protein, 8 aa, Artificial sequence
  Protein classification predicting sequence
ANFGPGFD

SEQ ID NO: 24692 - protein, 9 aa, Artificial sequence
  Protein classification predicting sequence
SANLGPGFD

SEQ ID NO: 24693 - protein, 8 aa, Artificial sequence
  Protein classification predicting sequence
DARFNVSR

SEQ ID NO: 24694 - protein, 11 aa, Artificial sequence
  Protein classification predicting sequence
SVGFDVLGAAV

SEQ ID NO: 24695 - protein, 13 aa, Artificial sequence
  Protein classification predicting sequence
YKEAVAASSIANV

SEQ ID NO: 24696 - protein, 13 aa, Artificial sequence
  Protein classification predicting sequence
ASSIANVMIAAIL

SEQ ID NO: 24697 - protein, 22 aa, Artificial sequence
  Protein classification predicting sequence
YAPASIGNVSVGFDVLGAAVSP

SEQ ID NO: 24698 - protein, 10 aa, Artificial sequence
  Protein classification predicting sequence
GISGSGPTLF

SEQ ID NO: 24699 - protein, 10 aa, Artificial sequence
  Protein classification predicting sequence
EGFVHICRLD

SEQ ID NO: 24700 - protein, 8 aa, Artificial sequence
  Protein classification predicting sequence
YAPASSAN

SEQ ID NO: 24701 - protein, 18 aa, Artificial sequence
  Protein classification predicting sequence
TLEKNMPIGSGLGSSACS

SEQ ID NO: 24702 - protein, 8 aa, Artificial sequence
  Protein classification predicting sequence
WVLAYPGI

SEQ ID NO: 24703 - protein, 7 aa, Artificial sequence
  Protein classification predicting sequence
IAHGRHL

SEQ ID NO: 24704 - protein, 10 aa, Artificial sequence
  Protein classification predicting sequence
STLSGSGSSF

SEQ ID NO: 24705 - protein, 9 aa, Artificial sequence
  Protein classification predicting sequence
PLARGLGSS

SEQ ID NO: 24706 - protein, 13 aa, Artificial sequence
  Protein classification predicting sequence
VPATSANLGPGFD

SEQ ID NO: 24707 - protein, 10 aa, Artificial sequence
  Protein classification predicting sequence
EGHPDNVAPA

SEQ ID NO: 24708 - protein, 7 aa, Artificial sequence
  Protein classification predicting sequence
SGAGPTV

SEQ ID NO: 24709 - protein, 6 aa, Artificial sequence
  Protein classification predicting sequence
PTDETN

SEQ ID NO: 24710 - protein, 8 aa, Artificial sequence
  Protein classification predicting sequence
ANLGVGFD

SEQ ID NO: 24711 - protein, 6 aa, Artificial sequence
  Protein classification predicting sequence
ANLGPG

SEQ ID NO: 24712 - protein, 10 aa, Artificial sequence
  Protein classification predicting sequence
GPEHLVVRAV

SEQ ID NO: 24713 - protein, 11 aa, Artificial sequence
  Protein classification predicting sequence
IPHSRGLGSSA

SEQ ID NO: 24714 - protein, 7 aa, Artificial sequence
  Protein classification predicting sequence
RGLGSSA

SEQ ID NO: 24715 - protein, 10 aa, Artificial sequence
  Protein classification predicting sequence
FEGHPDNAAA

SEQ ID NO: 24716 - protein, 8 aa, Artificial sequence
  Protein classification predicting sequence
FNVSRAAL

SEQ ID NO: 24717 - protein, 7 aa, Artificial sequence
  Protein classification predicting sequence
KASAISN

SEQ ID NO: 24718 - protein, 7 aa, Artificial sequence
  Protein classification predicting sequence
NIVYQCW

SEQ ID NO: 24719 - protein, 19 aa, Artificial sequence
  Protein classification predicting sequence
MTLEKNMPIGSGLGSSACS

SEQ ID NO: 24720 - protein, 8 aa, Artificial sequence
  Protein classification predicting sequence
HYDNVAPC

SEQ ID NO: 24721 - protein, 17 aa, Artificial sequence
  Protein classification predicting sequence
AYPGIKVSTAEARAILP

SEQ ID NO: 24722 - protein, 9 aa, Artificial sequence
  Protein classification predicting sequence
VFARELDKK

SEQ ID NO: 24723 - protein, 10 aa, Artificial sequence
  Protein classification predicting sequence
WVMAYPGIKV

SEQ ID NO: 24724 - protein, 9 aa, Artificial sequence
  Protein classification predicting sequence
TAEARAILP

SEQ ID NO: 24725 - protein, 6 aa, Artificial sequence
  Protein classification predicting sequence
QYRRQD

SEQ ID NO: 24726 - protein, 12 aa, Artificial sequence
  Protein classification predicting sequence
AEPYRERLLPGF

SEQ ID NO: 24727 - protein, 8 aa, Artificial sequence
  Protein classification predicting sequence
QNDEGFVH

SEQ ID NO: 24728 - protein, 11 aa, Artificial sequence
  Protein classification predicting sequence
VPATSANLGPG

SEQ ID NO: 24729 - protein, 10 aa, Artificial sequence
  Protein classification predicting sequence
SRGLGSSAAA

SEQ ID NO: 24730 - protein, 6 aa, Artificial sequence
  Protein classification predicting sequence
EGHPDN

SEQ ID NO: 24731 - protein, 13 aa, Artificial sequence
  Protein classification predicting sequence
RGLGSSASAIVAG

SEQ ID NO: 24732 - protein, 7 aa, Artificial sequence
  Protein classification predicting sequence
ARGLGSS

SEQ ID NO: 24733 - protein, 15 aa, Artificial sequence
  Protein classification predicting sequence
PATIANFGPGFDVFG

SEQ ID NO: 24734 - protein, 8 aa, Artificial sequence
  Protein classification predicting sequence
SYKGIAEG

SEQ ID NO: 24735 - protein, 6 aa, Artificial sequence
  Protein classification predicting sequence
WCFEKD

SEQ ID NO: 24736 - protein, 10 aa, Artificial sequence
  Protein classification predicting sequence
NLGRFADKLP

SEQ ID NO: 24737 - protein, 16 aa, Artificial sequence
  Protein classification predicting sequence
EPRENIVYQCWERFCQ

SEQ ID NO: 24738 - protein, 50 aa, Artificial sequence
  Protein classification predicting sequence
AMNEHCGKPLNDTRLLALMGELEGRISGSIHYDNVAPCFLGGMQLMIEEN

SEQ ID NO: 24739 - protein, 60 aa, Artificial sequence
  Protein classification predicting sequence
IISQQVPGFDEWLWVLAYPGIKVSTAEARAILPAQYRRQDCIAHGRHLAGFIHACYSRQP

SEQ ID NO: 24740 - protein, 21 aa, Artificial sequence
  Protein classification predicting sequence
YLQNQEGFVHICRLDTAGARV

SEQ ID NO: 24741 - protein, 9 aa, Artificial sequence
  Protein classification predicting sequence
VEAAETFSL

SEQ ID NO: 24742 - protein, 8 aa, Artificial sequence
  Protein classification predicting sequence
GRFVSKLP

SEQ ID NO: 24743 - protein, 20 aa, Artificial sequence
  Protein classification predicting sequence
LEKNMPIGSGLGSSACSVVA

SEQ ID NO: 24744 - protein, 9 aa, Artificial sequence
  Protein classification predicting sequence
CHSELVDIN

SEQ ID NO: 24745 - protein, 21 aa, Artificial sequence
  Protein classification predicting sequence
IPASTANLGVGFDSIGMALDK

SEQ ID NO: 24746 - protein, 23 aa, Artificial sequence
  Protein classification predicting sequence
IEMRSDIPLARGLGSSASALVGA

SEQ ID NO: 24747 - protein, 25 aa, Artificial sequence
  Protein classification predicting sequence
LQLATEIEGHPDNVAPTIYGGLIAG

SEQ ID NO: 24748 - protein, 11 aa, Artificial sequence
  Protein classification predicting sequence
SAISNTMICAL

SEQ ID NO: 24749 - protein, 13 aa, Artificial sequence
  Protein classification predicting sequence
QDGFHEPYRQHLI

SEQ ID NO: 24750 - protein, 14 aa, Artificial sequence
  Protein classification predicting sequence
AYATVISGAGPTIL

SEQ ID NO: 24751 - protein, 6 aa, Artificial sequence
  Protein classification predicting sequence
GPGFDS

SEQ ID NO: 24752 - protein, 8 aa, Artificial sequence
  Protein classification predicting sequence
EGHPDNVA

SEQ ID NO: 24753 - protein, 7 aa, Artificial sequence
  Protein classification predicting sequence
VPATSAN

SEQ ID NO: 24754 - protein, 7 aa, Artificial sequence
  Protein classification predicting sequence
VPATTAN

SEQ ID NO: 24755 - protein, 7 aa, Artificial sequence
  Protein classification predicting sequence
NLGAGFD

SEQ ID NO: 24756 - protein, 8 aa, Artificial sequence
  Protein classification predicting sequence
ANLGPGFD

SEQ ID NO: 24757 - protein, 8 aa, Artificial sequence
  Protein classification predicting sequence
ENIVYDCW

SEQ ID NO: 24758 - protein, 26 aa, Artificial sequence
  Protein classification predicting sequence
QPELAAKMIKDVIAEPYREKLLPGFA

SEQ ID NO: 24759 - protein, 21 aa, Artificial sequence
  Protein classification predicting sequence
YAASAGALATGISGSGPTLFS

SEQ ID NO: 24760 - protein, 7 aa, Artificial sequence
  Protein classification predicting sequence
DGTLLGD

SEQ ID NO: 24761 - protein, 10 aa, Artificial sequence
  Protein classification predicting sequence
ILPSQYRRQD

SEQ ID NO: 24762 - protein, 8 aa, Artificial sequence
  Protein classification predicting sequence
LAGFIHAC

SEQ ID NO: 24763 - protein, 7 aa, Artificial sequence
  Protein classification predicting sequence
MGELEGR

SEQ ID NO: 24764 - protein, 10 aa, Artificial sequence
  Protein classification predicting sequence
DNVAPCYLGG

SEQ ID NO: 24765 - protein, 8 aa, Artificial sequence
  Protein classification predicting sequence
GAKLTGAG

SEQ ID NO: 24766 - protein, 7 aa, Artificial sequence
  Protein classification predicting sequence
TGAGGGG

SEQ ID NO: 24767 - protein, 9 aa, Artificial sequence
  Protein classification predicting sequence
DYGKAAEVL

SEQ ID NO: 24768 - protein, 8 aa, Artificial sequence
  Protein classification predicting sequence
GPEVDVWS

SEQ ID NO: 24769 - protein, 8 aa, Artificial sequence
  Protein classification predicting sequence
DLLSFSYQ

SEQ ID NO: 24770 - protein, 6 aa, Artificial sequence
  Protein classification predicting sequence
DIWSVG

SEQ ID NO: 24771 - protein, 7 aa, Artificial sequence
  Protein classification predicting sequence
FRALGTP

SEQ ID NO: 24772 - protein, 7 aa, Artificial sequence
  Protein classification predicting sequence
GPMFSGK

SEQ ID NO: 24773 - protein, 64 aa, Artificial sequence
  Protein classification predicting sequence
DVIAIDEVQFFDGDIVEVVQVLANRGYRVIVAGLDQDFRGLPFGQVPQLMAIAEHVTKLQAVCS

SEQ ID NO: 24774 - protein, 43 aa, Artificial sequence
  Protein classification predicting sequence
CGSPASRTQRLIDGEPAAFDDPIILVGASESYEPRCRHCHAVP

SEQ ID NO: 24775 - protein, 7 aa, Artificial sequence
  Protein classification predicting sequence
AGLDMDF

SEQ ID NO: 24776 - protein, 8 aa, Artificial sequence
  Protein classification predicting sequence
DPIILVGA

SEQ ID NO: 24777 - protein, 7 aa, Artificial sequence
  Protein classification predicting sequence
DFRGEPF

SEQ ID NO: 24778 - protein, 12 aa, Artificial sequence
  Protein classification predicting sequence
CGSPASRTQRLI

SEQ ID NO: 24779 - protein, 7 aa, Artificial sequence
  Protein classification predicting sequence
ILVGASE

SEQ ID NO: 24780 - protein, 7 aa, Artificial sequence
  Protein classification predicting sequence
IEILKVA

SEQ ID NO: 24781 - protein, 6 aa, Artificial sequence
  Protein classification predicting sequence
IDEVQF

SEQ ID NO: 24782 - protein, 14 aa, Artificial sequence
  Protein classification predicting sequence
YDGEQIQIGGNETY

SEQ ID NO: 24783 - protein, 10 aa, Artificial sequence
  Protein classification predicting sequence
QIQIGGNETY

SEQ ID NO: 24784 - protein, 10 aa, Artificial sequence
  Protein classification predicting sequence
RYSEEDVVSH

SEQ ID NO: 24785 - protein, 8 aa, Artificial sequence
  Protein classification predicting sequence
GIDEGQFF

SEQ ID NO: 24786 - protein, 8 aa, Artificial sequence
  Protein classification predicting sequence
RVIIAGLD

SEQ ID NO: 24787 - protein, 6 aa, Artificial sequence
  Protein classification predicting sequence
PFEPMP

SEQ ID NO: 24788 - protein, 7 aa, Artificial sequence
  Protein classification predicting sequence
PASRTQR

SEQ ID NO: 24789 - protein, 6 aa, Artificial sequence
  Protein classification predicting sequence
DRHPIA

SEQ ID NO: 24790 - protein, 17 aa, Artificial sequence
  Protein classification predicting sequence
TALLQSSYNYQERGMRT

SEQ ID NO: 24791 - protein, 10 aa, Artificial sequence
  Protein classification predicting sequence
ELKTICYCGR

SEQ ID NO: 24792 - protein, 7 aa, Artificial sequence
  Protein classification predicting sequence
YGLRTDF

SEQ ID NO: 24793 - protein, 6 aa, Artificial sequence
  Protein classification predicting sequence
LFEGSK

SEQ ID NO: 24794 - protein, 7 aa, Artificial sequence
  Protein classification predicting sequence
RGQIQVI

SEQ ID NO: 24795 - protein, 11 aa, Artificial sequence
  Protein classification predicting sequence
GPMFSGKSTEL

SEQ ID NO: 24796 - protein, 19 aa, Artificial sequence
  Protein classification predicting sequence
GPMFSGKSTELMRRVRRFQ

SEQ ID NO: 24797 - protein, 8 aa, Artificial sequence
  Protein classification predicting sequence
KYAKDTRY

SEQ ID NO: 24798 - protein, 7 aa, Artificial sequence
  Protein classification predicting sequence
KLNAVCM

SEQ ID NO: 24799 - protein, 16 aa, Artificial sequence
  Protein classification predicting sequence
EVEVIGGADKYHSVCR

SEQ ID NO: 24800 - protein, 10 aa, Artificial sequence
  Protein classification predicting sequence
SGKSEELIRR

SEQ ID NO: 24801 - protein, 6 aa, Artificial sequence
  Protein classification predicting sequence
IDNRYS

SEQ ID NO: 24802 - protein, 8 aa, Artificial sequence
  Protein classification predicting sequence
IDEVQFFD

SEQ ID NO: 24803 - protein, 11 aa, Artificial sequence
  Protein classification predicting sequence
RTQRLINGKPA

SEQ ID NO: 24804 - protein, 6 aa, Artificial sequence
  Protein classification predicting sequence
GWIEVI

SEQ ID NO: 24805 - protein, 6 aa, Artificial sequence
  Protein classification predicting sequence
IDEAQF

SEQ ID NO: 24806 - protein, 9 aa, Artificial sequence
  Protein classification predicting sequence
QFLTRQQVY

SEQ ID NO: 24807 - protein, 11 aa, Artificial sequence
  Protein classification predicting sequence
SLTAIQERHRH

SEQ ID NO: 24808 - protein, 6 aa, Artificial sequence
  Protein classification predicting sequence
DECQFL

SEQ ID NO: 24809 - protein, 11 aa, Artificial sequence
  Protein classification predicting sequence
PVMAFGLKNDF

SEQ ID NO: 24810 - protein, 19 aa, Artificial sequence
  Protein classification predicting sequence
GLKNDFRNELFEGSKYLLL

SEQ ID NO: 24811 - protein, 7 aa, Artificial sequence
  Protein classification predicting sequence
KTICWFC

SEQ ID NO: 24812 - protein, 6 aa, Artificial sequence
  Protein classification predicting sequence
VSSRIG

SEQ ID NO: 24813 - protein, 8 aa, Artificial sequence
  Protein classification predicting sequence
QFLTREQV

SEQ ID NO: 24814 - protein, 7 aa, Artificial sequence
  Protein classification predicting sequence
CHCGRKA

SEQ ID NO: 24815 - protein, 8 aa, Artificial sequence
  Protein classification predicting sequence
DGAYGIGK

SEQ ID NO: 24816 - protein, 7 aa, Artificial sequence
  Protein classification predicting sequence
ATLPREP

SEQ ID NO: 24817 - protein, 9 aa, Artificial sequence
  Protein classification predicting sequence
GKTVIVAAL

SEQ ID NO: 24818 - protein, 6 aa, Artificial sequence
  Protein classification predicting sequence
CYGLRT

SEQ ID NO: 24819 - protein, 13 aa, Artificial sequence
  Protein classification predicting sequence
MNTLVYTAAIDDR

SEQ ID NO: 24820 - protein, 6 aa, Artificial sequence
  Protein classification predicting sequence
ELFEGS

SEQ ID NO: 24821 - protein, 8 aa, Artificial sequence
  Protein classification predicting sequence
GSQYLLAW

SEQ ID NO: 24822 - protein, 7 aa, Artificial sequence
  Protein classification predicting sequence
HCVLVDE

SEQ ID NO: 24823 - protein, 7 aa, Artificial sequence
  Protein classification predicting sequence
QIQIGGN

SEQ ID NO: 24824 - protein, 7 aa, Artificial sequence
  Protein classification predicting sequence
GSMFSGK

SEQ ID NO: 24825 - protein, 6 aa, Artificial sequence
  Protein classification predicting sequence
FRGEPF

SEQ ID NO: 24826 - protein, 9 aa, Artificial sequence
  Protein classification predicting sequence
VPQLMAIAE

SEQ ID NO: 24827 - protein, 69 aa, Artificial sequence
  Protein classification predicting sequence
GGSWREDWGQLSGTAVPPQGAEPQSNAGPRPHIGDTLFTLFRAPELLAPNGDLYNVFAWALDVLAKRLR

SEQ ID NO: 24828 - protein, 13 aa, Artificial sequence
  Protein classification predicting sequence
PTLLRVYIDGPHG

SEQ ID NO: 24829 - protein, 13 aa, Artificial sequence
  Protein classification predicting sequence
TDAVLAPHIGGEA

SEQ ID NO: 24830 - protein, 8 aa, Artificial sequence
  Protein classification predicting sequence
TLVFDRHP

SEQ ID NO: 24831 - protein, 25 aa, Artificial sequence
  Protein classification predicting sequence
LLCYPAARYLMGSMTPQAVLAFVAL

SEQ ID NO: 24832 - protein, 13 aa, Artificial sequence
  Protein classification predicting sequence
RQRPGERLDLAML

SEQ ID NO: 24833 - protein, 10 aa, Artificial sequence
  Protein classification predicting sequence
LLANTVRYLQ

SEQ ID NO: 24834 - protein, 6 aa, Artificial sequence
  Protein classification predicting sequence
WREDWG

SEQ ID NO: 24835 - protein, 7 aa, Artificial sequence
  Protein classification predicting sequence
IEDTLFA

SEQ ID NO: 24836 - protein, 11 aa, Artificial sequence
  Protein classification predicting sequence
PELLAPNGDLY

SEQ ID NO: 24837 - protein, 7 aa, Artificial sequence
  Protein classification predicting sequence
GCRDALL

SEQ ID NO: 24838 - protein, 9 aa, Artificial sequence
  Protein classification predicting sequence
DLARTFARE

SEQ ID NO: 24839 - protein, 7 aa, Artificial sequence
  Protein classification predicting sequence
QIAQYKC

SEQ ID NO: 24840 - protein, 7 aa, Artificial sequence
  Protein classification predicting sequence
FGLKNDF

SEQ ID NO: 24841 - protein, 6 aa, Artificial sequence
  Protein classification predicting sequence
YYPVCR

SEQ ID NO: 24842 - protein, 8 aa, Artificial sequence
  Protein classification predicting sequence
LLLLADKI

SEQ ID NO: 24843 - protein, 6 aa, Artificial sequence
  Protein classification predicting sequence
EIKTIC

SEQ ID NO: 24844 - protein, 11 aa, Artificial sequence
  Protein classification predicting sequence
SRIGLKREATP

SEQ ID NO: 24845 - protein, 8 aa, Artificial sequence
  Protein classification predicting sequence
EQVYQLTE

SEQ ID NO: 24846 - protein, 6 aa, Artificial sequence
  Protein classification predicting sequence
SSRIGL

SEQ ID NO: 24847 - protein, 6 aa, Artificial sequence
  Protein classification predicting sequence
IDDRFG

SEQ ID NO: 24848 - protein, 6 aa, Artificial sequence
  Protein classification predicting sequence
ELKTIC

SEQ ID NO: 24849 - protein, 8 aa, Artificial sequence
  Protein classification predicting sequence
QIQIGGNE

SEQ ID NO: 24850 - protein, 8 aa, Artificial sequence
  Protein classification predicting sequence
YQSVCRKC

SEQ ID NO: 24851 - protein, 44 aa, Artificial sequence
  Protein classification predicting sequence
SGKSTELIRRVRRYQIAQYKCVTIKYSNDNRYGTGLWTHDKNNF

SEQ ID NO: 24852 - protein, 14 aa, Artificial sequence
  Protein classification predicting sequence
VIGIDEGQFFPDIV

SEQ ID NO: 24853 - protein, 7 aa, Artificial sequence
  Protein classification predicting sequence
VIVAGLD

SEQ ID NO: 24854 - protein, 7 aa, Artificial sequence
  Protein classification predicting sequence
GPMFAGK

SEQ ID NO: 24855 - protein, 11 aa, Artificial sequence
  Protein classification predicting sequence
VIGIDEGQFFP

SEQ ID NO: 24856 - protein, 8 aa, Artificial sequence
  Protein classification predicting sequence
KPAIDDRY

SEQ ID NO: 24857 - protein, 8 aa, Artificial sequence
  Protein classification predicting sequence
RVIVAGLD

SEQ ID NO: 24858 - protein, 18 aa, Artificial sequence
  Protein classification predicting sequence
DPIILVGASESYEPRCRH

SEQ ID NO: 24859 - protein, 6 aa, Artificial sequence
  Protein classification predicting sequence
RTQRLI

SEQ ID NO: 24860 - protein, 6 aa, Artificial sequence
  Protein classification predicting sequence
VCRQHY

SEQ ID NO: 24861 - protein, 12 aa, Artificial sequence
  Protein classification predicting sequence
QVYQLSEVVDKL

SEQ ID NO: 24862 - protein, 8 aa, Artificial sequence
  Protein classification predicting sequence
LLQSSYNY

SEQ ID NO: 24863 - protein, 14 aa, Artificial sequence
  Protein classification predicting sequence
ERGMRTLVFTAEID

SEQ ID NO: 24864 - protein, 7 aa, Artificial sequence
  Protein classification predicting sequence
SRIGLSS

SEQ ID NO: 24865 - protein, 7 aa, Artificial sequence
  Protein classification predicting sequence
YLLAWAD

SEQ ID NO: 24866 - protein, 10 aa, Artificial sequence
  Protein classification predicting sequence
DKLVELKTIC

SEQ ID NO: 24867 - protein, 6 aa, Artificial sequence
  Protein classification predicting sequence
VCRKHY

SEQ ID NO: 24868 - protein, 7 aa, Artificial sequence
  Protein classification predicting sequence
NYRERGM

SEQ ID NO: 24869 - protein, 9 aa, Artificial sequence
  Protein classification predicting sequence
GKVSSRIGL

SEQ ID NO: 24870 - protein, 7 aa, Artificial sequence
  Protein classification predicting sequence
RYVSVCR

SEQ ID NO: 24871 - protein, 11 aa, Artificial sequence
  Protein classification predicting sequence
RYVSVCRKHYK

SEQ ID NO: 24872 - protein, 9 aa, Artificial sequence
  Protein classification predicting sequence
LRIYLDGAY

SEQ ID NO: 24873 - protein, 6 aa, Artificial sequence
  Protein classification predicting sequence
YVPEPM

SEQ ID NO: 24874 - protein, 6 aa, Artificial sequence
  Protein classification predicting sequence
FKPAID

SEQ ID NO: 24875 - protein, 11 aa, Artificial sequence
  Protein classification predicting sequence
RYGTGLWTHDK

SEQ ID NO: 24876 - protein, 22 aa, Artificial sequence
  Protein classification predicting sequence
TDFSVIGIDEGQFFPDIVEFCE

SEQ ID NO: 24877 - protein, 7 aa, Artificial sequence
  Protein classification predicting sequence
MNAGKST

SEQ ID NO: 24878 - protein, 12 aa, Artificial sequence
  Protein classification predicting sequence
IPVLAYGLRTDF

SEQ ID NO: 24879 - protein, 7 aa, Artificial sequence
  Protein classification predicting sequence
KATMVLR

SEQ ID NO: 24880 - protein, 6 aa, Artificial sequence
  Protein classification predicting sequence
YEPRCR

SEQ ID NO: 24881 - protein, 12 aa, Artificial sequence
  Protein classification predicting sequence
IPVLCYGLRTDF

SEQ ID NO: 24882 - protein, 7 aa, Artificial sequence
  Protein classification predicting sequence
LIIGPMF

SEQ ID NO: 24883 - protein, 11 aa, Artificial sequence
  Protein classification predicting sequence
KYKSVCRKCYF

SEQ ID NO: 24884 - protein, 33 aa, Artificial sequence
  Protein classification predicting sequence
GSQYLLAWSDKLVELKTICFCGRKASMVLRLDQ

SEQ ID NO: 24885 - protein, 27 aa, Artificial sequence
  Protein classification predicting sequence
GRPYNEGEQVVIGGNERYVSVCRKHYK

SEQ ID NO: 24886 - protein, 7 aa, Artificial sequence
  Protein classification predicting sequence
EPMAYWR

SEQ ID NO: 24887 - protein, 6 aa, Artificial sequence
  Protein classification predicting sequence
QIGGNE

SEQ ID NO: 24888 - protein, 18 aa, Artificial sequence
  Protein classification predicting sequence
GHRVIVAGLDMDFRGEPF

SEQ ID NO: 24889 - protein, 7 aa, Artificial sequence
  Protein classification predicting sequence
TKLQAVC

SEQ ID NO: 24890 - protein, 13 aa, Artificial sequence
  Protein classification predicting sequence
TKLQAVCSVCGSP

SEQ ID NO: 24891 - protein, 9 aa, Artificial sequence
  Protein classification predicting sequence
DDPIILVGA

SEQ ID NO: 24892 - protein, 49 aa, Artificial sequence
  Protein classification predicting sequence
ITGSMFSGKSEELIRRLRRGIYAKQKVVVFKPAIDDRYHKEKVVSHNGN

SEQ ID NO: 24893 - protein, 26 aa, Artificial sequence
  Protein classification predicting sequence
DDPIILVGANESYEPRCRAHHIVAPS

SEQ ID NO: 24894 - protein, 6 aa, Artificial sequence
  Protein classification predicting sequence
DEAQFL

SEQ ID NO: 24895 - protein, 8 aa, Artificial sequence
  Protein classification predicting sequence
LDTRDGFG

SEQ ID NO: 24896 - protein, 9 aa, Artificial sequence
  Protein classification predicting sequence
LIDESQFLS

SEQ ID NO: 24897 - protein, 7 aa, Artificial sequence
  Protein classification predicting sequence
NYEEQGK

SEQ ID NO: 24898 - protein, 8 aa, Artificial sequence
  Protein classification predicting sequence
YGTMNSGK

SEQ ID NO: 24899 - protein, 6 aa, Artificial sequence
  Protein classification predicting sequence
CVLIDE

SEQ ID NO: 24900 - protein, 7 aa, Artificial sequence
  Protein classification predicting sequence
NVYDLAR

SEQ ID NO: 24901 - protein, 7 aa, Artificial sequence
  Protein classification predicting sequence
DIVEFCE

SEQ ID NO: 24902 - protein, 29 aa, Artificial sequence
  Protein classification predicting sequence
LIPLSEMVVKLTAVCMKCFKEASFSKRLG

SEQ ID NO: 24903 - protein, 12 aa, Artificial sequence
  Protein classification predicting sequence
ELKTICHCGRKA

SEQ ID NO: 24904 - protein, 22 aa, Artificial sequence
  Protein classification predicting sequence
ELKTICHCGRKANMVIRTDEHG

SEQ ID NO: 24905 - protein, 11 aa, Artificial sequence
  Protein classification predicting sequence
EGDQVAIGGND

SEQ ID NO: 24906 - protein, 7 aa, Artificial sequence
  Protein classification predicting sequence
NYQERGM

SEQ ID NO: 24907 - protein, 14 aa, Artificial sequence
  Protein classification predicting sequence
KEQVYQLTEVVDKL

SEQ ID NO: 24908 - protein, 9 aa, Artificial sequence
  Protein classification predicting sequence
LCYGLRTDF

SEQ ID NO: 24909 - protein, 10 aa, Artificial sequence
  Protein classification predicting sequence
GEQVVIGGNE

SEQ ID NO: 24910 - protein, 9 aa, Artificial sequence
  Protein classification predicting sequence
IVAALDGTF

SEQ ID NO: 24911 - protein, 7 aa, Artificial sequence
  Protein classification predicting sequence
KLTAVCM

SEQ ID NO: 24912 - protein, 6 aa, Artificial sequence
  Protein classification predicting sequence
ASFSKR

SEQ ID NO: 24913 - protein, 6 aa, Artificial sequence
  Protein classification predicting sequence
YQSVCR

SEQ ID NO: 24914 - protein, 7 aa, Artificial sequence
  Protein classification predicting sequence
VAVKMLK

SEQ ID NO: 24915 - protein, 10 aa, Artificial sequence
  Protein classification predicting sequence
NIVNLLGACT

SEQ ID NO: 24916 - protein, 12 aa, Artificial sequence
  Protein classification predicting sequence
CTDPGFVKWTFE

SEQ ID NO: 24917 - protein, 7 aa, Artificial sequence
  Protein classification predicting sequence
EGGTYTF

SEQ ID NO: 24918 - protein, 7 aa, Artificial sequence
  Protein classification predicting sequence
NGMLQCV

SEQ ID NO: 24919 - protein, 6 aa, Artificial sequence
  Protein classification predicting sequence
WYFCPG

SEQ ID NO: 24920 - protein, 6 aa, Artificial sequence
  Protein classification predicting sequence
CPLTDP

SEQ ID NO: 24921 - protein, 9 aa, Artificial sequence
  Protein classification predicting sequence
VEYEAYPKP

SEQ ID NO: 24922 - protein, 11 aa, Artificial sequence
  Protein classification predicting sequence
WYFCPGTEQRC

SEQ ID NO: 24923 - protein, 9 aa, Artificial sequence
  Protein classification predicting sequence
HTLFTPLLI

SEQ ID NO: 24924 - protein, 8 aa, Artificial sequence
  Protein classification predicting sequence
MCIIVMIL

SEQ ID NO: 24925 - protein, 59 aa, Artificial sequence
  Protein classification predicting sequence
YEVQWKVVEEINGNNYVYIDPTQLPYDHKWEFPRNRLSFGKTLGAGAFGKVVEATAYGL

SEQ ID NO: 24926 - protein, 38 aa, Artificial sequence
  Protein classification predicting sequence
KSDAAMTVAVKMLKPSAHLTEREALMSELKVLSYLGNH

SEQ ID NO: 24927 - protein, 12 aa, Artificial sequence
  Protein classification predicting sequence
NEYMDMKPGVSY

SEQ ID NO: 24928 - protein, 8 aa, Artificial sequence
  Protein classification predicting sequence
EDDELALD

SEQ ID NO: 24929 - protein, 14 aa, Artificial sequence
  Protein classification predicting sequence
EDLLSFSYQVAKGM

SEQ ID NO: 24930 - protein, 11 aa, Artificial sequence
  Protein classification predicting sequence
FLASKNCIHRD

SEQ ID NO: 24931 - protein, 36 aa, Artificial sequence
  Protein classification predicting sequence
FLASKNCIHRDLAARNILLTHGRITKICDFGLARDI

SEQ ID NO: 24932 - protein, 8 aa, Artificial sequence
  Protein classification predicting sequence
SDVWSYGI

SEQ ID NO: 24933 - protein, 28 aa, Artificial sequence
  Protein classification predicting sequence
LWELFSLGSSPYPGMPVDSKFYKMIKEG

SEQ ID NO: 24934 - protein, 7 aa, Artificial sequence
  Protein classification predicting sequence
EMYDIMK

SEQ ID NO: 24935 - protein, 8 aa, Artificial sequence
  Protein classification predicting sequence
SLPSIHPA

SEQ ID NO: 24936 - protein, 19 aa, Artificial sequence
  Protein classification predicting sequence
GDEIRLLCTDPGFVKWTFE

SEQ ID NO: 24937 - protein, 18 aa, Artificial sequence
  Protein classification predicting sequence
DTLVRCPLTDPEVTNYSL

SEQ ID NO: 24938 - protein, 9 aa, Artificial sequence
  Protein classification predicting sequence
AVPVVSVSK

SEQ ID NO: 24939 - protein, 9 aa, Artificial sequence
  Protein classification predicting sequence
YHRLCLHCS

SEQ ID NO: 24940 - protein, 8 aa, Artificial sequence
  Protein classification predicting sequence
IKDVSSSV

SEQ ID NO: 24941 - protein, 9 aa, Artificial sequence
  Protein classification predicting sequence
LVRCPLTDP

SEQ ID NO: 24942 - protein, 22 aa, Artificial sequence
  Protein classification predicting sequence
DSGVFMCYANNTFGSANVTTTL

SEQ ID NO: 24943 - protein, 12 aa, Artificial sequence
  Protein classification predicting sequence
GFPEPTIDWYFC

SEQ ID NO: 24944 - protein, 28 aa, Artificial sequence
  Protein classification predicting sequence
GGPTLVITEYCCYGDLLNFLRRKRDSFI

SEQ ID NO: 24945 - protein, 17 aa, Artificial sequence
  Protein classification predicting sequence
NEYMDMKPGVSYVVPTK

SEQ ID NO: 24946 - protein, 21 aa, Artificial sequence
  Protein classification predicting sequence
SYIERDVTPAIMEDDELALDL

SEQ ID NO: 24947 - protein, 8 aa, Artificial sequence
  Protein classification predicting sequence
DFGLARDI

SEQ ID NO: 24948 - protein, 11 aa, Artificial sequence
  Protein classification predicting sequence
SPEHAPAEMYD

SEQ ID NO: 24949 - protein, 17 aa, Artificial sequence
  Protein classification predicting sequence
MKTCWDADPLKRPTFKQ

SEQ ID NO: 24950 - protein, 6 aa, Artificial sequence
  Protein classification predicting sequence
RPTFKQ

SEQ ID NO: 24951 - protein, 6 aa, Artificial sequence
  Protein classification predicting sequence
KPSNLL

SEQ ID NO: 24952 - protein, 9 aa, Artificial sequence
  Protein classification predicting sequence
GHIKIADFG

SEQ ID NO: 24953 - protein, 29 aa, Artificial sequence
  Protein classification predicting sequence
QGCRSVEEFQCLNRIEEGTYGVVYRAKDK

SEQ ID NO: 24954 - protein, 27 aa, Artificial sequence
  Protein classification predicting sequence
EIVALKRLKMEKEKEGFPITSLREINT

SEQ ID NO: 24955 - protein, 20 aa, Artificial sequence
  Protein classification predicting sequence
QHPNIVTVREIVVGSNMDKI

SEQ ID NO: 24956 - protein, 14 aa, Artificial sequence
  Protein classification predicting sequence
YVEHDLKSLMETMK

SEQ ID NO: 24957 - protein, 17 aa, Artificial sequence
  Protein classification predicting sequence
GILKVGDFGLAREYGSP

SEQ ID NO: 24958 - protein, 17 aa, Artificial sequence
  Protein classification predicting sequence
PLPIDPSMFPTWPAKSE

SEQ ID NO: 24959 - protein, 8 aa, Artificial sequence
  Protein classification predicting sequence
YRRGARRW

SEQ ID NO: 24960 - protein, 11 aa, Artificial sequence
  Protein classification predicting sequence
DEDIDWVQTEK

SEQ ID NO: 24961 - protein, 12 aa, Artificial sequence
  Protein classification predicting sequence
PFLVGLHSCFQT

SEQ ID NO: 24962 - protein, 21 aa, Artificial sequence
  Protein classification predicting sequence
PFLVGLHSCFQTESRLFFVIE

SEQ ID NO: 24963 - protein, 9 aa, Artificial sequence
  Protein classification predicting sequence
GGDLMFHMQ

SEQ ID NO: 24964 - protein, 12 aa, Artificial sequence
  Protein classification predicting sequence
QRKLPEEHARFY

SEQ ID NO: 24965 - protein, 5 aa, Artificial sequence
  Protein classification predicting sequence
GMCKE

SEQ ID NO: 24966 - protein, 18 aa, Artificial sequence
  Protein classification predicting sequence
TSTFCGTPNYIAPEILRG

SEQ ID NO: 24967 - protein, 26 aa, Artificial sequence
  Protein classification predicting sequence
YGFSVDWWALGVLMFEMMAGRSPFDI

SEQ ID NO: 24968 - protein, 10 aa, Artificial sequence
  Protein classification predicting sequence
QIRIPRSLSV

SEQ ID NO: 24969 - protein, 22 aa, Artificial sequence
  Protein classification predicting sequence
QDVANRFARKGALRQKNVHEVK

SEQ ID NO: 24970 - protein, 17 aa, Artificial sequence
  Protein classification predicting sequence
RFARKGALRQKNVHEVK

SEQ ID NO: 24971 - protein, 14 aa, Artificial sequence
  Protein classification predicting sequence
DDPRSKHKFKIHTY

SEQ ID NO: 24972 - protein, 7 aa, Artificial sequence
  Protein classification predicting sequence
VRDAKNL

SEQ ID NO: 24973 - protein, 20 aa, Artificial sequence
  Protein classification predicting sequence
PMDPNGLSDPYVKLKLIPDP

SEQ ID NO: 24974 - protein, 9 aa, Artificial sequence
  Protein classification predicting sequence
ESKQKTKTI

SEQ ID NO: 24975 - protein, 17 aa, Artificial sequence
  Protein classification predicting sequence
ESFTFKLKPSDKDRRLS

SEQ ID NO: 24976 - protein, 6 aa, Artificial sequence
  Protein classification predicting sequence
EIWDWD

SEQ ID NO: 24977 - protein, 11 aa, Artificial sequence
  Protein classification predicting sequence
RNDFMGSLSFG

SEQ ID NO: 24978 - protein, 17 aa, Artificial sequence
  Protein classification predicting sequence
GWYKLLNQEEGEYYNVP

SEQ ID NO: 24979 - protein, 7 aa, Artificial sequence
  Protein classification predicting sequence
ELRQKFE

SEQ ID NO: 24980 - protein, 15 aa, Artificial sequence
  Protein classification predicting sequence
FLMVLGKGSFGKVML

SEQ ID NO: 24981 - protein, 14 aa, Artificial sequence
  Protein classification predicting sequence
KPPFLTQLHSCFQT

SEQ ID NO: 24982 - protein, 12 aa, Artificial sequence
  Protein classification predicting sequence
GIIYRDLKLDNV

SEQ ID NO: 24983 - protein, 26 aa, Artificial sequence
  Protein classification predicting sequence
TFCGTPDYIAPEIIAYQPYGKSVDWW

SEQ ID NO: 24984 - protein, 16 aa, Artificial sequence
  Protein classification predicting sequence
GEDEDELFQSIMEHNV

SEQ ID NO: 24985 - protein, 10 aa, Artificial sequence
  Protein classification predicting sequence
ICKGLMTKHP

SEQ ID NO: 24986 - protein, 12 aa, Artificial sequence
  Protein classification predicting sequence
KRLGCGPEGERD

SEQ ID NO: 24987 - protein, 58 aa, Artificial sequence
  Protein classification predicting sequence
LNPQWNESFTFKLKPSDKDRRLSVEIWDWDRTTRNDFMGSLSFGVSELMKMPASGWYK

SEQ ID NO: 24988 - protein, 11 aa, Artificial sequence
  Protein classification predicting sequence
NQEEGEYYNVP

SEQ ID NO: 24989 - protein, 15 aa, Artificial sequence
  Protein classification predicting sequence
SEGHIKIADFGMCKE

SEQ ID NO: 24990 - protein, 103 aa, Artificial sequence
  Protein classification predicting sequence
SEGHIKIADFGMCKEHMMDGVTTRTFCGTPDYIAPEIIAYQPYGKSVDWWAYGVLLYEMLAGQPPFDGEDEDELFQSIMEHNVSYPKSLSKEAVSICKGLMTK

SEQ ID NO: 24991 - protein, 33 aa, Artificial sequence
  Protein classification predicting sequence
TPPDQLVIANIDQSDFEGFSYVNPQFVHPILQS

SEQ ID NO: 24992 - protein, 15 aa, Artificial sequence
  Protein classification predicting sequence
SPTFCDHCGSLLYGL

SEQ ID NO: 24993 - protein, 5 aa, Artificial sequence
  Protein classification predicting sequence
VHKRC

SEQ ID NO: 24994 - protein, 6 aa, Artificial sequence
  Protein classification predicting sequence
RNDFMG

SEQ ID NO: 24995 - protein, 8 aa, Artificial sequence
  Protein classification predicting sequence
PVLTPPDQ

SEQ ID NO: 24996 - protein, 9 aa, Artificial sequence
  Protein classification predicting sequence
IDQSEFEGF

SEQ ID NO: 24997 - protein, 93 aa, Artificial sequence
  Protein classification predicting sequence
VRDAKNLVPMDPNGLSDPYVKLKLIPDPKSESKQKTKTIKCSLNPEWNETFRFQLKESDKDRRLSVEIWDWDLTSRNDFMGSLSFGISELQKA

SEQ ID NO: 24998 - protein, 26 aa, Artificial sequence
  Protein classification predicting sequence
VDGWFKLLSQEEGEYFNVPVPPEGSE

SEQ ID NO: 24999 - protein, 13 aa, Artificial sequence
  Protein classification predicting sequence
NEELRQKFERAKI

SEQ ID NO: 25000 - protein, 53 aa, Artificial sequence
  Protein classification predicting sequence
ARFFKQPTFCSHCTDFIWGFGKQGFQCQVCCFVVHKRCHEFVTFSCPGADKGP

SEQ ID NO: 25001 - protein, 25 aa, Artificial sequence
  Protein classification predicting sequence
SPTFCDHCGSLLYGLIHQGMKCDTC

SEQ ID NO: 25002 - protein, 26 aa, Artificial sequence
  Protein classification predicting sequence
KILKKDVVIQDDDVECTMVEKRVLAL

SEQ ID NO: 25003 - protein, 23 aa, Artificial sequence
  Protein classification predicting sequence
DRLYFVMEYVNGGDLMYHIQQVG

SEQ ID NO: 25004 - protein, 8 aa, Artificial sequence
  Protein classification predicting sequence
RKGALRQK

SEQ ID NO: 25005 - protein, 23 aa, Artificial sequence
  Protein classification predicting sequence
HKFTARFFKQPTFCSHCTDFIWG

SEQ ID NO: 25006 - protein, 8 aa, Artificial sequence
  Protein classification predicting sequence
RCHEFVTF

SEQ ID NO: 25007 - protein, 7 aa, Artificial sequence
  Protein classification predicting sequence
SFGVSEL

SEQ ID NO: 25008 - protein, 12 aa, Artificial sequence
  Protein classification predicting sequence
ELYAIKILKKDV

SEQ ID NO: 25009 - protein, 8 aa, Artificial sequence
  Protein classification predicting sequence
VEKRVLAL

SEQ ID NO: 25010 - protein, 7 aa, Artificial sequence
  Protein classification predicting sequence
FLTQLHS

SEQ ID NO: 25011 - protein, 10 aa, Artificial sequence
  Protein classification predicting sequence
DRLYFVMEYV

SEQ ID NO: 25012 - protein, 10 aa, Artificial sequence
  Protein classification predicting sequence
GGDLMYHIQQ

SEQ ID NO: 25013 - protein, 6 aa, Artificial sequence
  Protein classification predicting sequence
FKEPHA

SEQ ID NO: 25014 - protein, 8 aa, Artificial sequence
  Protein classification predicting sequence
GIIYRDLK

SEQ ID NO: 25015 - protein, 11 aa, Artificial sequence
  Protein classification predicting sequence
GVLLYEMLAGQ

SEQ ID NO: 25016 - protein, 19 aa, Artificial sequence
  Protein classification predicting sequence
GVLLYEMLAGQPPFDGEDE

SEQ ID NO: 25017 - protein, 8 aa, Artificial sequence
  Protein classification predicting sequence
EAVAICKG

SEQ ID NO: 25018 - protein, 9 aa, Artificial sequence
  Protein classification predicting sequence
TKHPGKRLG

SEQ ID NO: 25019 - protein, 9 aa, Artificial sequence
  Protein classification predicting sequence
ENFDKFFTR

SEQ ID NO: 25020 - protein, 6 aa, Artificial sequence
  Protein classification predicting sequence
VPSLCG

SEQ ID NO: 25021 - protein, 34 aa, Artificial sequence
  Protein classification predicting sequence
TPPDRLVLASIDQADFQGFTYVNPDFVHPDARSP

SEQ ID NO: 25022 - protein, 23 aa, Artificial sequence
  Protein classification predicting sequence
HQVRVKAYYRGDIMITHFEPSIS

SEQ ID NO: 25023 - protein, 11 aa, Artificial sequence
  Protein classification predicting sequence
RLYELNKDSEL

SEQ ID NO: 25024 - protein, 9 aa, Artificial sequence
  Protein classification predicting sequence
IHVFPCVPE

SEQ ID NO: 25025 - protein, 45 aa, Artificial sequence
  Protein classification predicting sequence
FQAKRFNRRAHCAICTDRIWGLGRQGYKCINCKLLVHKKCHKLVT

SEQ ID NO: 25026 - protein, 10 aa, Artificial sequence
  Protein classification predicting sequence
CINCKLLVHK

SEQ ID NO: 25027 - protein, 24 aa, Artificial sequence
  Protein classification predicting sequence
DFDLLRVIGRGSYAKVLLVRLKKT

SEQ ID NO: 25028 - protein, 18 aa, Artificial sequence
  Protein classification predicting sequence
RVIGRGSYAKVLLVRLKK

SEQ ID NO: 25029 - protein, 19 aa, Artificial sequence
  Protein classification predicting sequence
DDEDIDWVQTEKHVFEQAS

SEQ ID NO: 25030 - protein, 19 aa, Artificial sequence
  Protein classification predicting sequence
LHERGIIYRDLKLDNVLLD

SEQ ID NO: 25031 - protein, 15 aa, Artificial sequence
  Protein classification predicting sequence
KERLGCHPQTGFADI

SEQ ID NO: 25032 - protein, 10 aa, Artificial sequence
  Protein classification predicting sequence
HPFFRNVDWD

SEQ ID NO: 25033 - protein, 24 aa, Artificial sequence
  Protein classification predicting sequence
MEQKQVVPPFKPNISGEFGLDNFD

SEQ ID NO: 25034 - protein, 16 aa, Artificial sequence
  Protein classification predicting sequence
IDQSEFEGFEYINPLL

SEQ ID NO: 25035 - protein, 12 aa, Artificial sequence
  Protein classification predicting sequence
FLNKDPKERLGC

SEQ ID NO: 25036 - protein, 9 aa, Artificial sequence
  Protein classification predicting sequence
EPVQLTPDD

SEQ ID NO: 25037 - protein, 6 aa, Artificial sequence
  Protein classification predicting sequence
EVRDMC

SEQ ID NO: 25038 - protein, 10 aa, Artificial sequence
  Protein classification predicting sequence
EGDPCTVSSQ

SEQ ID NO: 25039 - protein, 21 aa, Artificial sequence
  Protein classification predicting sequence
PCPGEDKSIYRRGARRWRKLY

SEQ ID NO: 25040 - protein, 5 aa, Artificial sequence
  Protein classification predicting sequence
HARFY

SEQ ID NO: 25041 - protein, 7 aa, Artificial sequence
  Protein classification predicting sequence
HARFYAA

SEQ ID NO: 25042 - protein, 7 aa, Artificial sequence
  Protein classification predicting sequence
GHIKLTD

SEQ ID NO: 25043 - protein, 8 aa, Artificial sequence
  Protein classification predicting sequence
FQAKRFNR

SEQ ID NO: 25044 - protein, 13 aa, Artificial sequence
  Protein classification predicting sequence
AYCGQCSERIWGL

SEQ ID NO: 25045 - protein, 14 aa, Artificial sequence
  Protein classification predicting sequence
HPLTLKWVDSEGDP

SEQ ID NO: 25046 - protein, 8 aa, Artificial sequence
  Protein classification predicting sequence
TVSSQMEL

SEQ ID NO: 25047 - protein, 11 aa, Artificial sequence
  Protein classification predicting sequence
YAMKVVKKELV

SEQ ID NO: 25048 - protein, 28 aa, Artificial sequence
  Protein classification predicting sequence
VIEYVNGGDLMFHMQRQRKLPEEHARFY

SEQ ID NO: 25049 - protein, 23 aa, Artificial sequence
  Protein classification predicting sequence
PGDTTSTFCGTPNYIAPEILRGE

SEQ ID NO: 25050 - protein, 7 aa, Artificial sequence
  Protein classification predicting sequence
LKYSFQT

SEQ ID NO: 25051 - protein, 8 aa, Artificial sequence
  Protein classification predicting sequence
YTAEIVSA

SEQ ID NO: 25052 - protein, 8 aa, Artificial sequence
  Protein classification predicting sequence
IEGDAFHR

SEQ ID NO: 25053 - protein, 20 aa, Artificial sequence
  Protein classification predicting sequence
RGYSTEAVTDTILRRMPDYV

SEQ ID NO: 25054 - protein, 18 aa, Artificial sequence
  Protein classification predicting sequence
VIGLAADSGCGKSTFMRR

SEQ ID NO: 25055 - protein, 12 aa, Artificial sequence
  Protein classification predicting sequence
GGNPDSNTLISD

SEQ ID NO: 25056 - protein, 11 aa, Artificial sequence
  Protein classification predicting sequence
ELIYVESHLSN

SEQ ID NO: 25057 - protein, 18 aa, Artificial sequence
  Protein classification predicting sequence
FPGSNNGTGLFQTIVGLK

SEQ ID NO: 25058 - protein, 7 aa, Artificial sequence
  Protein classification predicting sequence
YVHDDAE

SEQ ID NO: 25059 - protein, 8 aa, Artificial sequence
  Protein classification predicting sequence
MSRANSIV

SEQ ID NO: 25060 - protein, 14 aa, Artificial sequence
  Protein classification predicting sequence
ERGHSLESIKASIE

SEQ ID NO: 25061 - protein, 9 aa, Artificial sequence
  Protein classification predicting sequence
FPGSNNGTG

SEQ ID NO: 25062 - protein, 9 aa, Artificial sequence
  Protein classification predicting sequence
DSGCGKSTF

SEQ ID NO: 25063 - protein, 12 aa, Artificial sequence
  Protein classification predicting sequence
WKIQRDMAERGH

SEQ ID NO: 25064 - protein, 8 aa, Artificial sequence
  Protein classification predicting sequence
PCGRKLTC

SEQ ID NO: 25065 - protein, 8 aa, Artificial sequence
  Protein classification predicting sequence
LFYEGLHG

SEQ ID NO: 25066 - protein, 7 aa, Artificial sequence
  Protein classification predicting sequence
RRMPDYV

SEQ ID NO: 25067 - protein, 8 aa, Artificial sequence
  Protein classification predicting sequence
KDKSRAPI

SEQ ID NO: 25068 - protein, 6 aa, Artificial sequence
  Protein classification predicting sequence
ITAVIP

SEQ ID NO: 25069 - protein, 6 aa, Artificial sequence
  Protein classification predicting sequence
LMELLI

SEQ ID NO: 25070 - protein, 7 aa, Artificial sequence
  Protein classification predicting sequence
RITAVIP

SEQ ID NO: 25071 - protein, 8 aa, Artificial sequence
  Protein classification predicting sequence
ANLLETAG

SEQ ID NO: 25072 - protein, 6 aa, Artificial sequence
  Protein classification predicting sequence
QIQGFF

SEQ ID NO: 25073 - protein, 11 aa, Artificial sequence
  Protein classification predicting sequence
VSPDAGGAKRV

SEQ ID NO: 25074 - protein, 7 aa, Artificial sequence
  Protein classification predicting sequence
THGIFSG

SEQ ID NO: 25075 - protein, 6 aa, Artificial sequence
  Protein classification predicting sequence
ELLIMI

SEQ ID NO: 25076 - protein, 8 aa, Artificial sequence
  Protein classification predicting sequence
DACRRASA

SEQ ID NO: 25077 - protein, 11 aa, Artificial sequence
  Protein classification predicting sequence
TAVIPYFGYAR

SEQ ID NO: 25078 - protein, 11 aa, Artificial sequence
  Protein classification predicting sequence
QPVILDYLASK

SEQ ID NO: 25079 - protein, 7 aa, Artificial sequence
  Protein classification predicting sequence
NVAEVMN

SEQ ID NO: 25080 - protein, 8 aa, Artificial sequence
  Protein classification predicting sequence
NIEESIRG

SEQ ID NO: 25081 - protein, 9 aa, Artificial sequence
  Protein classification predicting sequence
HVYVIQSTS

SEQ ID NO: 25082 - protein, 13 aa, Artificial sequence
  Protein classification predicting sequence
PYYGYARQDRKAR

SEQ ID NO: 25083 - protein, 9 aa, Artificial sequence
  Protein classification predicting sequence
QIQGFFDIP

SEQ ID NO: 25084 - protein, 11 aa, Artificial sequence
  Protein classification predicting sequence
QIQGFFDIPVD

SEQ ID NO: 25085 - protein, 23 aa, Artificial sequence
  Protein classification predicting sequence
QIQGFFDIPVDHLMGAPLIADYF

SEQ ID NO: 25086 - protein, 8 aa, Artificial sequence
  Protein classification predicting sequence
IPVDHLMG

SEQ ID NO: 25087 - protein, 7 aa, Artificial sequence
  Protein classification predicting sequence
MNIIGDV

SEQ ID NO: 25088 - protein, 14 aa, Artificial sequence
  Protein classification predicting sequence
CILIDDMIDTAGTI

SEQ ID NO: 25089 - protein, 10 aa, Artificial sequence
  Protein classification predicting sequence
DDMIDTAGTI

SEQ ID NO: 25090 - protein, 7 aa, Artificial sequence
  Protein classification predicting sequence
IDTAGTI

SEQ ID NO: 25091 - protein, 8 aa, Artificial sequence
  Protein classification predicting sequence
KLVVLDTI

SEQ ID NO: 25092 - protein, 7 aa, Artificial sequence
  Protein classification predicting sequence
AIIRIHE

SEQ ID NO: 25093 - protein, 9 aa, Artificial sequence
  Protein classification predicting sequence
YFDPKLKIF

SEQ ID NO: 25094 - protein, 8 aa, Artificial sequence
  Protein classification predicting sequence
DALRRASA

SEQ ID NO: 25095 - protein, 5 aa, Artificial sequence
  Protein classification predicting sequence
VYACC

SEQ ID NO: 25096 - protein, 12 aa, Artificial sequence
  Protein classification predicting sequence
KWIDKMEQLSVA

SEQ ID NO: 25097 - protein, 8 aa, Artificial sequence
  Protein classification predicting sequence
GYARADRK

SEQ ID NO: 25098 - protein, 13 aa, Artificial sequence
  Protein classification predicting sequence
QGRESIAAKLVAN

SEQ ID NO: 25099 - protein, 6 aa, Artificial sequence
  Protein classification predicting sequence
DDMIDT

SEQ ID NO: 25100 - protein, 24 aa, Artificial sequence
  Protein classification predicting sequence
RVLACDLHSGQSMGYFDIPVDHVY

SEQ ID NO: 25101 - protein, 13 aa, Artificial sequence
  Protein classification predicting sequence
LKLFALSSNKELA

SEQ ID NO: 25102 - protein, 7 aa, Artificial sequence
  Protein classification predicting sequence
LTVDLHA

SEQ ID NO: 25103 - protein, 10 aa, Artificial sequence
  Protein classification predicting sequence
TPIAIIDKRR

SEQ ID NO: 25104 - protein, 15 aa, Artificial sequence
  Protein classification predicting sequence
SAIEKLIVLDTIYLP

SEQ ID NO: 25105 - protein, 13 aa, Artificial sequence
  Protein classification predicting sequence
ERLIDKIEQISIA

SEQ ID NO: 25106 - protein, 8 aa, Artificial sequence
  Protein classification predicting sequence
LIGEAIIR

SEQ ID NO: 25107 - protein, 8 aa, Artificial sequence
  Protein classification predicting sequence
EAIIRIHE

SEQ ID NO: 25108 - protein, 31 aa, Artificial sequence
  Protein classification predicting sequence
SVVMPYYGYARQDRKARSREPITSKLVANML

SEQ ID NO: 25109 - protein, 7 aa, Artificial sequence
  Protein classification predicting sequence
KLVANML

SEQ ID NO: 25110 - protein, 17 aa, Artificial sequence
  Protein classification predicting sequence
VVVSPDHGGVTRARKLA

SEQ ID NO: 25111 - protein, 31 aa, Artificial sequence
  Protein classification predicting sequence
VVVSPDHGGVTRARKLAQFLQTPIAIIDKRR

SEQ ID NO: 25112 - protein, 25 aa, Artificial sequence
  Protein classification predicting sequence
HAADALAEAGATAVYASCTHPVLSG

SEQ ID NO: 25113 - protein, 10 aa, Artificial sequence
  Protein classification predicting sequence
LIDKIEQISI

SEQ ID NO: 25114 - protein, 15 aa, Artificial sequence
  Protein classification predicting sequence
EILIMVDALKRASAE

SEQ ID NO: 25115 - protein, 8 aa, Artificial sequence
  Protein classification predicting sequence
IAIIDKRR

SEQ ID NO: 25116 - protein, 7 aa, Artificial sequence
  Protein classification predicting sequence
GLELGKV

SEQ ID NO: 25117 - protein, 13 aa, Artificial sequence
  Protein classification predicting sequence
IKRFADGEIYVQL

SEQ ID NO: 25118 - protein, 6 aa, Artificial sequence
  Protein classification predicting sequence
GYARQD

SEQ ID NO: 25119 - protein, 7 aa, Artificial sequence
  Protein classification predicting sequence
FSDGEIQ

SEQ ID NO: 25120 - protein, 16 aa, Artificial sequence
  Protein classification predicting sequence
VQVQGFFDIPVDNLFT

SEQ ID NO: 25121 - protein, 7 aa, Artificial sequence
  Protein classification predicting sequence
VSPKNSG

SEQ ID NO: 25122 - protein, 7 aa, Artificial sequence
  Protein classification predicting sequence
DDILNTG

SEQ ID NO: 25123 - protein, 9 aa, Artificial sequence
  Protein classification predicting sequence
GVPLGKLSS

SEQ ID NO: 25124 - protein, 7 aa, Artificial sequence
  Protein classification predicting sequence
QFSDGEI

SEQ ID NO: 25125 - protein, 8 aa, Artificial sequence
  Protein classification predicting sequence
ELLIMIDA

SEQ ID NO: 25126 - protein, 23 aa, Artificial sequence
  Protein classification predicting sequence
HAVQVQGFFDIPVDNLFTVPLFA

SEQ ID NO: 25127 - protein, 9 aa, Artificial sequence
  Protein classification predicting sequence
YAVASHGLF

SEQ ID NO: 25128 - protein, 20 aa, Artificial sequence
  Protein classification predicting sequence
SVKRFSDGEIQINIEESIRG

SEQ ID NO: 25129 - protein, 16 aa, Artificial sequence
  Protein classification predicting sequence
FSDGEIQINIEESIRG

SEQ ID NO: 25130 - protein, 6 aa, Artificial sequence
  Protein classification predicting sequence
RARKMA

SEQ ID NO: 25131 - protein, 7 aa, Artificial sequence
  Protein classification predicting sequence
LMELLIM

SEQ ID NO: 25132 - protein, 7 aa, Artificial sequence
  Protein classification predicting sequence
DALKRAS

SEQ ID NO: 25133 - protein, 6 aa, Artificial sequence
  Protein classification predicting sequence
IPIDHL

SEQ ID NO: 25134 - protein, 10 aa, Artificial sequence
  Protein classification predicting sequence
MIDACRRASA

SEQ ID NO: 25135 - protein, 7 aa, Artificial sequence
  Protein classification predicting sequence
FDIPVDH

SEQ ID NO: 25136 - protein, 8 aa, Artificial sequence
  Protein classification predicting sequence
FPQLTVLS

SEQ ID NO: 25137 - protein, 8 aa, Artificial sequence
  Protein classification predicting sequence
DLVVVSPD

SEQ ID NO: 25138 - protein, 9 aa, Artificial sequence
  Protein classification predicting sequence
FQEVIITNT

SEQ ID NO: 25139 - protein, 12 aa, Artificial sequence
  Protein classification predicting sequence
YADKQIKLFSLT

SEQ ID NO: 25140 - protein, 5 aa, Artificial sequence
  Protein classification predicting sequence
PYFGY

SEQ ID NO: 25141 - protein, 7 aa, Artificial sequence
  Protein classification predicting sequence
DVVVVSP

SEQ ID NO: 25142 - protein, 39 aa, Artificial sequence
  Protein classification predicting sequence
DVVVVSPKNSGIKRARSLAEYLDSPIAIIDYAQDDSERE

SEQ ID NO: 25143 - protein, 6 aa, Artificial sequence
  Protein classification predicting sequence
PIAIID

SEQ ID NO: 25144 - protein, 8 aa, Artificial sequence
  Protein classification predicting sequence
KLFSLTSN

SEQ ID NO: 25145 - protein, 6 aa, Artificial sequence
  Protein classification predicting sequence
INIEES

SEQ ID NO: 25146 - protein, 8 aa, Artificial sequence
  Protein classification predicting sequence
DACKRASA

SEQ ID NO: 25147 - protein, 11 aa, Artificial sequence
  Protein classification predicting sequence
PIAIIDYAQDD

SEQ ID NO: 25148 - protein, 7 aa, Artificial sequence
  Protein classification predicting sequence
RPLSPLF

SEQ ID NO: 25149 - protein, 9 aa, Artificial sequence
  Protein classification predicting sequence
ELLIMIDAC

SEQ ID NO: 25150 - protein, 8 aa, Artificial sequence
  Protein classification predicting sequence
KLFALNSN

SEQ ID NO: 25151 - protein, 16 aa, Artificial sequence
  Protein classification predicting sequence
TAKLVANMLVKAGVDR

SEQ ID NO: 25152 - protein, 14 aa, Artificial sequence
  Protein classification predicting sequence
GKKAILIDDILNTG

SEQ ID NO: 25153 - protein, 8 aa, Artificial sequence
  Protein classification predicting sequence
GATEIYAV

SEQ ID NO: 25154 - protein, 7 aa, Artificial sequence
  Protein classification predicting sequence
SRGGPTS

SEQ ID NO: 25155 - protein, 11 aa, Artificial sequence
  Protein classification predicting sequence
HVAFLASFSSP

SEQ ID NO: 25156 - protein, 15 aa, Artificial sequence
  Protein classification predicting sequence
EGDVATAFTLARILS

SEQ ID NO: 25157 - protein, 8 aa, Artificial sequence
  Protein classification predicting sequence
KVSAYVTH

SEQ ID NO: 25158 - protein, 9 aa, Artificial sequence
  Protein classification predicting sequence
AKLVANLIT

SEQ ID NO: 25159 - protein, 8 aa, Artificial sequence
  Protein classification predicting sequence
AIVVDDII

SEQ ID NO: 25160 - protein, 11 aa, Artificial sequence
  Protein classification predicting sequence
PYFGYARQDRK

SEQ ID NO: 25161 - protein, 7 aa, Artificial sequence
  Protein classification predicting sequence
KRFADGE

SEQ ID NO: 25162 - protein, 7 aa, Artificial sequence
  Protein classification predicting sequence
PYYGYAR

SEQ ID NO: 25163 - protein, 9 aa, Artificial sequence
  Protein classification predicting sequence
DLHAAQIQG

SEQ ID NO: 25164 - protein, 6 aa, Artificial sequence
  Protein classification predicting sequence
SVSSLF

SEQ ID NO: 25165 - protein, 7 aa, Artificial sequence
  Protein classification predicting sequence
SNKELAE

SEQ ID NO: 25166 - protein, 13 aa, Artificial sequence
  Protein classification predicting sequence
VSPDHGGVTRARK

SEQ ID NO: 25167 - protein, 15 aa, Artificial sequence
  Protein classification predicting sequence
IDDIIDTAGTITLAA

SEQ ID NO: 25168 - protein, 15 aa, Artificial sequence
  Protein classification predicting sequence
PYYGYARQDRKARSR

SEQ ID NO: 25169 - protein, 11 aa, Artificial sequence
  Protein classification predicting sequence
PNVAEVMNIVG

SEQ ID NO: 25170 - protein, 15 aa, Artificial sequence
  Protein classification predicting sequence
EVYACCTHPVLSGPA

SEQ ID NO: 25171 - protein, 10 aa, Artificial sequence
  Protein classification predicting sequence
IKELVVTNSI

SEQ ID NO: 25172 - protein, 7 aa, Artificial sequence
  Protein classification predicting sequence
LVVTNSI

SEQ ID NO: 25173 - protein, 17 aa, Artificial sequence
  Protein classification predicting sequence
IIIDDIIDTAGTITLAA

SEQ ID NO: 25174 - protein, 8 aa, Artificial sequence
  Protein classification predicting sequence
EAIVRVHE

SEQ ID NO: 25175 - protein, 12 aa, Artificial sequence
  Protein classification predicting sequence
QINIEESIRGCD

SEQ ID NO: 25176 - protein, 7 aa, Artificial sequence
  Protein classification predicting sequence
YIIQSTS

SEQ ID NO: 25177 - protein, 19 aa, Artificial sequence
  Protein classification predicting sequence
PYYGYARQDRKARSREPIT

SEQ ID NO: 25178 - protein, 25 aa, Artificial sequence
  Protein classification predicting sequence
LDLHAPQIQGFFDIPIDHLMGVPIL

SEQ ID NO: 25179 - protein, 29 aa, Artificial sequence
  Protein classification predicting sequence
ADRLKAPIAIIDKRRPRPNVAEVMNIVGN

SEQ ID NO: 25180 - protein, 9 aa, Artificial sequence
  Protein classification predicting sequence
THPVLSGPA

SEQ ID NO: 25181 - protein, 6 aa, Artificial sequence
  Protein classification predicting sequence
GYSRQD

SEQ ID NO: 25182 - protein, 13 aa, Artificial sequence
  Protein classification predicting sequence
RQDKKHRGREPIS

SEQ ID NO: 25183 - protein, 10 aa, Artificial sequence
  Protein classification predicting sequence
QGFFDGPVDH

SEQ ID NO: 25184 - protein, 14 aa, Artificial sequence
  Protein classification predicting sequence
FIIQSTCAPTNDNL

SEQ ID NO: 25185 - protein, 9 aa, Artificial sequence
  Protein classification predicting sequence
TCAPTNDNL

SEQ ID NO: 25186 - protein, 11 aa, Artificial sequence
  Protein classification predicting sequence
VMVDALRRASA

SEQ ID NO: 25187 - protein, 9 aa, Artificial sequence
  Protein classification predicting sequence
FLSSVGVDR

SEQ ID NO: 25188 - protein, 9 aa, Artificial sequence
  Protein classification predicting sequence
DDMIDTGGT

SEQ ID NO: 25189 - protein, 9 aa, Artificial sequence
  Protein classification predicting sequence
LTLSGMLAE

SEQ ID NO: 25190 - protein, 7 aa, Artificial sequence
  Protein classification predicting sequence
INENVRG

SEQ ID NO: 25191 - protein, 8 aa, Artificial sequence
  Protein classification predicting sequence
GGVVRARA

SEQ ID NO: 25192 - protein, 23 aa, Artificial sequence
  Protein classification predicting sequence
RRSSARRITAVLPYFGYARQDRK

SEQ ID NO: 25193 - protein, 6 aa, Artificial sequence
  Protein classification predicting sequence
TLDLHA

SEQ ID NO: 25194 - protein, 8 aa, Artificial sequence
  Protein classification predicting sequence
LAIVDKRR

SEQ ID NO: 25195 - protein, 10 aa, Artificial sequence
  Protein classification predicting sequence
DDIVDSGGTL

SEQ ID NO: 25196 - protein, 8 aa, Artificial sequence
  Protein classification predicting sequence
DAFRRSSA

SEQ ID NO: 25197 - protein, 9 aa, Artificial sequence
  Protein classification predicting sequence
VQINENVRG

SEQ ID NO: 25198 - protein, 7 aa, Artificial sequence
  Protein classification predicting sequence
FIIQSTC

SEQ ID NO: 25199 - protein, 6 aa, Artificial sequence
  Protein classification predicting sequence
MELVVM

SEQ ID NO: 25200 - protein, 8 aa, Artificial sequence
  Protein classification predicting sequence
ILLEDMLQ

SEQ ID NO: 25201 - protein, 8 aa, Artificial sequence
  Protein classification predicting sequence
LVDDMIDT

SEQ ID NO: 25202 - protein, 7 aa, Artificial sequence
  Protein classification predicting sequence
MKLFAGN

SEQ ID NO: 25203 - protein, 8 aa, Artificial sequence
  Protein classification predicting sequence
VGRFSDGE

SEQ ID NO: 25204 - protein, 9 aa, Artificial sequence
  Protein classification predicting sequence
TAVIPYFGY

SEQ ID NO: 25205 - protein, 9 aa, Artificial sequence
  Protein classification predicting sequence
LPNVRTLTL

SEQ ID NO: 25206 - protein, 10 aa, Artificial sequence
  Protein classification predicting sequence
DRVLTVDLHA

SEQ ID NO: 25207 - protein, 12 aa, Artificial sequence
  Protein classification predicting sequence
NPIVVSPDIGGV

SEQ ID NO: 25208 - protein, 6 aa, Artificial sequence
  Protein classification predicting sequence
RFSDGE

SEQ ID NO: 25209 - protein, 7 aa, Artificial sequence
  Protein classification predicting sequence
RFSDGEI

SEQ ID NO: 25210 - protein, 11 aa, Artificial sequence
  Protein classification predicting sequence
RFSDGEISVQI

SEQ ID NO: 25211 - protein, 7 aa, Artificial sequence
  Protein classification predicting sequence
NDNLMEL

SEQ ID NO: 25212 - protein, 7 aa, Artificial sequence
  Protein classification predicting sequence
RVPITAK

SEQ ID NO: 25213 - protein, 9 aa, Artificial sequence
  Protein classification predicting sequence
QGFFDIPVD

SEQ ID NO: 25214 - protein, 7 aa, Artificial sequence
  Protein classification predicting sequence
GGVARAR

SEQ ID NO: 25215 - protein, 6 aa, Artificial sequence
  Protein classification predicting sequence
IVDKRR

SEQ ID NO: 25216 - protein, 8 aa, Artificial sequence
  Protein classification predicting sequence
KAAEALKE

SEQ ID NO: 25217 - protein, 7 aa, Artificial sequence
  Protein classification predicting sequence
GYARQDR

SEQ ID NO: 25218 - protein, 10 aa, Artificial sequence
  Protein classification predicting sequence
AYITHGVLSG

SEQ ID NO: 25219 - protein, 7 aa, Artificial sequence
  Protein classification predicting sequence
THGVLSG

SEQ ID NO: 25220 - protein, 6 aa, Artificial sequence
  Protein classification predicting sequence
FIIQST

SEQ ID NO: 25221 - protein, 7 aa, Artificial sequence
  Protein classification predicting sequence
SPDVGGV

SEQ ID NO: 25222 - protein, 7 aa, Artificial sequence
  Protein classification predicting sequence
VFILQST

SEQ ID NO: 25223 - protein, 12 aa, Artificial sequence
  Protein classification predicting sequence
QIQGFFDIPVDN

SEQ ID NO: 25224 - protein, 6 aa, Artificial sequence
  Protein classification predicting sequence
MELLIM

SEQ ID NO: 25225 - protein, 7 aa, Artificial sequence
  Protein classification predicting sequence
RASAGRI

SEQ ID NO: 25226 - protein, 8 aa, Artificial sequence
  Protein classification predicting sequence
PITAKLVA

SEQ ID NO: 25227 - protein, 6 aa, Artificial sequence
  Protein classification predicting sequence
VTRARK

SEQ ID NO: 25228 - protein, 11 aa, Artificial sequence
  Protein classification predicting sequence
NLMELLIMIDA

SEQ ID NO: 25229 - protein, 7 aa, Artificial sequence
  Protein classification predicting sequence
VMHIIGD

SEQ ID NO: 25230 - protein, 15 aa, Artificial sequence
  Protein classification predicting sequence
MIDALKRGSAKRITA

SEQ ID NO: 25231 - protein, 11 aa, Artificial sequence
  Protein classification predicting sequence
LTVLSIAPLLA

SEQ ID NO: 25232 - protein, 7 aa, Artificial sequence
  Protein classification predicting sequence
ISAKVVA

SEQ ID NO: 25233 - protein, 6 aa, Artificial sequence
  Protein classification predicting sequence
TVDLHA

SEQ ID NO: 25234 - protein, 8 aa, Artificial sequence
  Protein classification predicting sequence
VSPDVGGV

SEQ ID NO: 25235 - protein, 7 aa, Artificial sequence
  Protein classification predicting sequence
GVDRVLT

SEQ ID NO: 25236 - protein, 7 aa, Artificial sequence
  Protein classification predicting sequence
VRGRDVF

SEQ ID NO: 25237 - protein, 7 aa, Artificial sequence
  Protein classification predicting sequence
EVMNLIG

SEQ ID NO: 25238 - protein, 8 aa, Artificial sequence
  Protein classification predicting sequence
EVYACCTH

SEQ ID NO: 25239 - protein, 7 aa, Artificial sequence
  Protein classification predicting sequence
EVMNVIG

SEQ ID NO: 25240 - protein, 6 aa, Artificial sequence
  Protein classification predicting sequence
VTNTIP

SEQ ID NO: 25241 - protein, 32 aa, Artificial sequence
  Protein classification predicting sequence
RQDRRVRSARVPITAKVVADFLSSVGVDRVLT

SEQ ID NO: 25242 - protein, 8 aa, Artificial sequence
  Protein classification predicting sequence
AIIDKRRP

SEQ ID NO: 25243 - protein, 16 aa, Artificial sequence
  Protein classification predicting sequence
RDCILVDDMIDTGGTL

SEQ ID NO: 25244 - protein, 8 aa, Artificial sequence
  Protein classification predicting sequence
RVFAYATH

SEQ ID NO: 25245 - protein, 13 aa, Artificial sequence
  Protein classification predicting sequence
RVFAYATHAVFSG

SEQ ID NO: 25246 - protein, 19 aa, Artificial sequence
  Protein classification predicting sequence
MLAEAIRRISNEESISAMF

SEQ ID NO: 25247 - protein, 17 aa, Artificial sequence
  Protein classification predicting sequence
FIIQSTCAPTNDNLMEL

SEQ ID NO: 25248 - protein, 10 aa, Artificial sequence
  Protein classification predicting sequence
VDDMIDTGGT

SEQ ID NO: 25249 - protein, 7 aa, Artificial sequence
  Protein classification predicting sequence
QIQGFFD

SEQ ID NO: 25250 - protein, 8 aa, Artificial sequence
  Protein classification predicting sequence
VMVDALRR

SEQ ID NO: 25251 - protein, 7 aa, Artificial sequence
  Protein classification predicting sequence
GGVTRAR

SEQ ID NO: 25252 - protein, 7 aa, Artificial sequence
  Protein classification predicting sequence
THAVLSG

SEQ ID NO: 25253 - protein, 7 aa, Artificial sequence
  Protein classification predicting sequence
NDHLMEL

SEQ ID NO: 25254 - protein, 7 aa, Artificial sequence
  Protein classification predicting sequence
DALRRAS

SEQ ID NO: 25255 - protein, 6 aa, Artificial sequence
  Protein classification predicting sequence
THGVLS

SEQ ID NO: 25256 - protein, 6 aa, Artificial sequence
  Protein classification predicting sequence
YSRQDR

SEQ ID NO: 25257 - protein, 22 aa, Artificial sequence
  Protein classification predicting sequence
PFYPYARQDKKHRGREPISARL

SEQ ID NO: 25258 - protein, 6 aa, Artificial sequence
  Protein classification predicting sequence
QSTCAP

SEQ ID NO: 25259 - protein, 15 aa, Artificial sequence
  Protein classification predicting sequence
LQPTCAPTNDNLMEI

SEQ ID NO: 25260 - protein, 13 aa, Artificial sequence
  Protein classification predicting sequence
VSPDIGGVVRARA

SEQ ID NO: 25261 - protein, 16 aa, Artificial sequence
  Protein classification predicting sequence
VSPDIGGVVRARAVAK

SEQ ID NO: 25262 - protein, 8 aa, Artificial sequence
  Protein classification predicting sequence
RRISNEES

SEQ ID NO: 25263 - protein, 9 aa, Artificial sequence
  Protein classification predicting sequence
SVGVDRVLT

SEQ ID NO: 25264 - protein, 6 aa, Artificial sequence
  Protein classification predicting sequence
FSLNSN

SEQ ID NO: 25265 - protein, 19 aa, Artificial sequence
  Protein classification predicting sequence
LDLHAPQIQGFFDIPIDHL

SEQ ID NO: 25266 - protein, 14 aa, Artificial sequence
  Protein classification predicting sequence
LSVAPLIGEAIIRV

SEQ ID NO: 25267 - protein, 8 aa, Artificial sequence
  Protein classification predicting sequence
GNATPELA

SEQ ID NO: 25268 - protein, 14 aa, Artificial sequence
  Protein classification predicting sequence
QVMHIIGDVAGRDC

SEQ ID NO: 25269 - protein, 6 aa, Artificial sequence
  Protein classification predicting sequence
NENVRG

SEQ ID NO: 25270 - protein, 114 aa, Artificial sequence
  Protein classification predicting sequence
NENVRGGDIFIIQSTCAPTNDNLMELVVMVDALRRASAGRITAVIPYFGYARQDRRVRSARVPITAKVVADFLSSVGVDRVLTVDLHAEQIQGFFDVPVDNVFGSPILLEDMLQ

SEQ ID NO: 25271 - protein, 6 aa, Artificial sequence
  Protein classification predicting sequence
EESIRG

SEQ ID NO: 25272 - protein, 6 aa, Artificial sequence
  Protein classification predicting sequence
ARQDRK

SEQ ID NO: 25273 - protein, 10 aa, Artificial sequence
  Protein classification predicting sequence
RASARQITAV

SEQ ID NO: 25274 - protein, 8 aa, Artificial sequence
  Protein classification predicting sequence
IPYFGYAR

SEQ ID NO: 25275 - protein, 26 aa, Artificial sequence
  Protein classification predicting sequence
IPYFGYARQDRRPRSARVAISAKVVA

SEQ ID NO: 25276 - protein, 9 aa, Artificial sequence
  Protein classification predicting sequence
RVLTVDLHA

SEQ ID NO: 25277 - protein, 6 aa, Artificial sequence
  Protein classification predicting sequence
DVFIIQ

SEQ ID NO: 25278 - protein, 6 aa, Artificial sequence
  Protein classification predicting sequence
IIDKRR

SEQ ID NO: 25279 - protein, 10 aa, Artificial sequence
  Protein classification predicting sequence
ELAVTNTIPT

SEQ ID NO: 25280 - protein, 6 aa, Artificial sequence
  Protein classification predicting sequence
YARQDR

SEQ ID NO: 25281 - protein, 7 aa, Artificial sequence
  Protein classification predicting sequence
RISPTEV

SEQ ID NO: 25282 - protein, 13 aa, Artificial sequence
  Protein classification predicting sequence
ATHGVFAEGAIER

SEQ ID NO: 25283 - protein, 10 aa, Artificial sequence
  Protein classification predicting sequence
VANMLEVAGV

SEQ ID NO: 25284 - protein, 7 aa, Artificial sequence
  Protein classification predicting sequence
GTLCKAA

SEQ ID NO: 25285 - protein, 9 aa, Artificial sequence
  Protein classification predicting sequence
YCTHPVLSG

SEQ ID NO: 25286 - protein, 6 aa, Artificial sequence
  Protein classification predicting sequence
QSTSFP

SEQ ID NO: 25287 - protein, 6 aa, Artificial sequence
  Protein classification predicting sequence
PVNDNL

SEQ ID NO: 25288 - protein, 6 aa, Artificial sequence
  Protein classification predicting sequence
VFILQS

SEQ ID NO: 25289 - protein, 9 aa, Artificial sequence
  Protein classification predicting sequence
PVDNLYAEP

SEQ ID NO: 25290 - protein, 7 aa, Artificial sequence
  Protein classification predicting sequence
LAEAIRR

SEQ ID NO: 25291 - protein, 13 aa, Artificial sequence
  Protein classification predicting sequence
LAEAIRRTHNGES

SEQ ID NO: 25292 - protein, 7 aa, Artificial sequence
  Protein classification predicting sequence
VDDMIDT

SEQ ID NO: 25293 - protein, 20 aa, Artificial sequence
  Protein classification predicting sequence
VDDMIDTGGTLCKAAEALKE

SEQ ID NO: 25294 - protein, 7 aa, Artificial sequence
  Protein classification predicting sequence
NSVIDEV

SEQ ID NO: 25295 - protein, 10 aa, Artificial sequence
  Protein classification predicting sequence
SNEESISAMF

SEQ ID NO: 25296 - protein, 11 aa, Artificial sequence
  Protein classification predicting sequence
KRASAATINIV

SEQ ID NO: 25297 - protein, 36 aa, Artificial sequence
  Protein classification predicting sequence
PYYGYARQDRKARSREPITAKLVANLIETAGATRMI

SEQ ID NO: 25298 - protein, 9 aa, Artificial sequence
  Protein classification predicting sequence
KIFSLKGNE

SEQ ID NO: 25299 - protein, 33 aa, Artificial sequence
  Protein classification predicting sequence
VGIELGKCSVKRFSDGEIQINIEESIRGCDVFI

SEQ ID NO: 25300 - protein, 27 aa, Artificial sequence
  Protein classification predicting sequence
QPTSYPVNLHLMELLIMIDACKRASAA

SEQ ID NO: 25301 - protein, 32 aa, Artificial sequence
  Protein classification predicting sequence
PYYGYARQDRKARSREPITAKLVANLIETAGA

SEQ ID NO: 25302 - protein, 38 aa, Artificial sequence
  Protein classification predicting sequence
INPEECVVVSPDHGGVTRARKLADILKTPIAIIDKRRP

SEQ ID NO: 25303 - protein, 10 aa, Artificial sequence
  Protein classification predicting sequence
PIAIIDKRRP

SEQ ID NO: 25304 - protein, 57 aa, Artificial sequence
  Protein classification predicting sequence
IEGRTAIIIDDIIDTAGTITLAAQALKDKGAKEVYACCTHPVLSGPAKERIENSAIK

SEQ ID NO: 25305 - protein, 12 aa, Artificial sequence
  Protein classification predicting sequence
NTKELSVAGLIA

SEQ ID NO: 25306 - protein, 7 aa, Artificial sequence
  Protein classification predicting sequence
YARQDKK

SEQ ID NO: 25307 - protein, 18 aa, Artificial sequence
  Protein classification predicting sequence
VDLHTDQIQGFFDGPVDH

SEQ ID NO: 25308 - protein, 8 aa, Artificial sequence
  Protein classification predicting sequence
PYLAYSRQ

SEQ ID NO: 25309 - protein, 10 aa, Artificial sequence
  Protein classification predicting sequence
LMELLIMIDA

SEQ ID NO: 25310 - protein, 6 aa, Artificial sequence
  Protein classification predicting sequence
GYFDIP

SEQ ID NO: 25311 - protein, 6 aa, Artificial sequence
  Protein classification predicting sequence
THAVFS

SEQ ID NO: 25312 - protein, 14 aa, Artificial sequence
  Protein classification predicting sequence
THAVFSPPAIERLS

SEQ ID NO: 25313 - protein, 12 aa, Artificial sequence
  Protein classification predicting sequence
FPQLTILSVANL

SEQ ID NO: 25314 - protein, 6 aa, Artificial sequence
  Protein classification predicting sequence
TMDLHA

SEQ ID NO: 25315 - protein, 8 aa, Artificial sequence
  Protein classification predicting sequence
LAIIDKRR

SEQ ID NO: 25316 - protein, 6 aa, Artificial sequence
  Protein classification predicting sequence
REPITA

SEQ ID NO: 25317 - protein, 7 aa, Artificial sequence
  Protein classification predicting sequence
QGFFDIP

SEQ ID NO: 25318 - protein, 15 aa, Artificial sequence
  Protein classification predicting sequence
RDCVIVDDMIDTGGT

SEQ ID NO: 25319 - protein, 8 aa, Artificial sequence
  Protein classification predicting sequence
PELAQRIA

SEQ ID NO: 25320 - protein, 9 aa, Artificial sequence
  Protein classification predicting sequence
DKRRPRANV

SEQ ID NO: 25321 - protein, 32 aa, Artificial sequence
  Protein classification predicting sequence
VDDMIDTGGTLCKAAEALKERGAKRVFAYATH

SEQ ID NO: 25322 - protein, 125 aa, Artificial sequence
  Protein classification predicting sequence
VSRFSDGEVAVQINENVRGSDVFIIQSTCAPTNDNLMELVVMIDAMRRASAGRITAVIPYFGYARQDRRVRSARVPITAKVVADFLSNVGVDRVLTIDLHAEQIQGFFDVPVDNIFGTPVLLEDM

SEQ ID NO: 25323 - protein, 16 aa, Artificial sequence
  Protein classification predicting sequence
NIKNSVLDQVIVTDSI

SEQ ID NO: 25324 - protein, 12 aa, Artificial sequence
  Protein classification predicting sequence
LSKEMAATGKVT

SEQ ID NO: 25325 - protein, 15 aa, Artificial sequence
  Protein classification predicting sequence
KIRQLSVAELLAETI

SEQ ID NO: 25326 - protein, 6 aa, Artificial sequence
  Protein classification predicting sequence
QPTCAP

SEQ ID NO: 25327 - protein, 8 aa, Artificial sequence
  Protein classification predicting sequence
HPVLSGPA

SEQ ID NO: 25328 - protein, 19 aa, Artificial sequence
  Protein classification predicting sequence
PDMKLFAGNATPELAQRIA

SEQ ID NO: 25329 - protein, 6 aa, Artificial sequence
  Protein classification predicting sequence
GMNVAR

SEQ ID NO: 25330 - protein, 10 aa, Artificial sequence
  Protein classification predicting sequence
NFSHGTHEYH

SEQ ID NO: 25331 - protein, 7 aa, Artificial sequence
  Protein classification predicting sequence
PRPTRAE

SEQ ID NO: 25332 - protein, 7 aa, Artificial sequence
  Protein classification predicting sequence
GPASRSV

SEQ ID NO: 25333 - protein, 7 aa, Artificial sequence
  Protein classification predicting sequence
MLSGETA

SEQ ID NO: 25334 - protein, 8 aa, Artificial sequence
  Protein classification predicting sequence
GMNVARLN

SEQ ID NO: 25335 - protein, 7 aa, Artificial sequence
  Protein classification predicting sequence
KPVIVAT

SEQ ID NO: 25336 - protein, 6 aa, Artificial sequence
  Protein classification predicting sequence
MLESMI

SEQ ID NO: 25337 - protein, 8 aa, Artificial sequence
  Protein classification predicting sequence
ATQMLDSM

SEQ ID NO: 25338 - protein, 16 aa, Artificial sequence
  Protein classification predicting sequence
LDGADCVMLSGETAKG

SEQ ID NO: 25339 - protein, 10 aa, Artificial sequence
  Protein classification predicting sequence
LDTKGPEIRT

SEQ ID NO: 25340 - protein, 7 aa, Artificial sequence
  Protein classification predicting sequence
IISKIEN

SEQ ID NO: 25341 - protein, 19 aa, Artificial sequence
  Protein classification predicting sequence
FDEILEASDGIMVARGDLG

SEQ ID NO: 25342 - protein, 8 aa, Artificial sequence
  Protein classification predicting sequence
NFSHGSYE

SEQ ID NO: 25343 - protein, 13 aa, Artificial sequence
  Protein classification predicting sequence
RPTRAEASDVANA

SEQ ID NO: 25344 - protein, 7 aa, Artificial sequence
  Protein classification predicting sequence
MLSGESA

SEQ ID NO: 25345 - protein, 7 aa, Artificial sequence
  Protein classification predicting sequence
IVCTIGP

SEQ ID NO: 25346 - protein, 8 aa, Artificial sequence
  Protein classification predicting sequence
FASFIRTA

SEQ ID NO: 25347 - protein, 18 aa, Artificial sequence
  Protein classification predicting sequence
TDGVMVARGDLGIEIPAP

SEQ ID NO: 25348 - protein, 8 aa, Artificial sequence
  Protein classification predicting sequence
MVARGDLG

SEQ ID NO: 25349 - protein, 10 aa, Artificial sequence
  Protein classification predicting sequence
MVARGDLGVE

SEQ ID NO: 25350 - protein, 8 aa, Artificial sequence
  Protein classification predicting sequence
NPRPTRAE

SEQ ID NO: 25351 - protein, 15 aa, Artificial sequence
  Protein classification predicting sequence
NPRPTRAEVSDVGNA

SEQ ID NO: 25352 - protein, 10 aa, Artificial sequence
  Protein classification predicting sequence
TAIITMTESG

SEQ ID NO: 25353 - protein, 7 aa, Artificial sequence
  Protein classification predicting sequence
RLNFSHG

SEQ ID NO: 25354 - protein, 8 aa, Artificial sequence
  Protein classification predicting sequence
DLQGPKIR

SEQ ID NO: 25355 - protein, 6 aa, Artificial sequence
  Protein classification predicting sequence
MIFTTD

SEQ ID NO: 25356 - protein, 6 aa, Artificial sequence
  Protein classification predicting sequence
IYVDDG

SEQ ID NO: 25357 - protein, 7 aa, Artificial sequence
  Protein classification predicting sequence
KIENQQG

SEQ ID NO: 25358 - protein, 8 aa, Artificial sequence
  Protein classification predicting sequence
KAIVVLST

SEQ ID NO: 25359 - protein, 7 aa, Artificial sequence
  Protein classification predicting sequence
IIATIGP

SEQ ID NO: 25360 - protein, 10 aa, Artificial sequence
  Protein classification predicting sequence
NIVRMNFSHG

SEQ ID NO: 25361 - protein, 7 aa, Artificial sequence
  Protein classification predicting sequence
RMNFSHG

SEQ ID NO: 25362 - protein, 14 aa, Artificial sequence
  Protein classification predicting sequence
AIALDTKGPEIRTG

SEQ ID NO: 25363 - protein, 6 aa, Artificial sequence
  Protein classification predicting sequence
AQKMMI

SEQ ID NO: 25364 - protein, 11 aa, Artificial sequence
  Protein classification predicting sequence
AQKMMIAKCNI

SEQ ID NO: 25365 - protein, 8 aa, Artificial sequence
  Protein classification predicting sequence
ATQMLESM

SEQ ID NO: 25366 - protein, 22 aa, Artificial sequence
  Protein classification predicting sequence
ATQMLESMTYNPRPTRAEVSDV

SEQ ID NO: 25367 - protein, 6 aa, Artificial sequence
  Protein classification predicting sequence
IIAKIE

SEQ ID NO: 25368 - protein, 15 aa, Artificial sequence
  Protein classification predicting sequence
KIENQQGVNNFDEIL

SEQ ID NO: 25369 - protein, 7 aa, Artificial sequence
  Protein classification predicting sequence
TIGPKTN

SEQ ID NO: 25370 - protein, 12 aa, Artificial sequence
  Protein classification predicting sequence
MVARGDLGVEIP

SEQ ID NO: 25371 - protein, 12 aa, Artificial sequence
  Protein classification predicting sequence
ILLDTKGPEIRT

SEQ ID NO: 25372 - protein, 7 aa, Artificial sequence
  Protein classification predicting sequence
DDGLISL

SEQ ID NO: 25373 - protein, 8 aa, Artificial sequence
  Protein classification predicting sequence
ETAAGQYP

SEQ ID NO: 25374 - protein, 6 aa, Artificial sequence
  Protein classification predicting sequence
DTKGPE

SEQ ID NO: 25375 - protein, 6 aa, Artificial sequence
  Protein classification predicting sequence
RRTKIV

SEQ ID NO: 25376 - protein, 8 aa, Artificial sequence
  Protein classification predicting sequence
ARGDLGVE

SEQ ID NO: 25377 - protein, 6 aa, Artificial sequence
  Protein classification predicting sequence
ITATQM

SEQ ID NO: 25378 - protein, 16 aa, Artificial sequence
  Protein classification predicting sequence
LSNNKGINKLGGGLSA

SEQ ID NO: 25379 - protein, 9 aa, Artificial sequence
  Protein classification predicting sequence
DVANAVLDG

SEQ ID NO: 25380 - protein, 17 aa, Artificial sequence
  Protein classification predicting sequence
ARNTGIICTIGPASRSV

SEQ ID NO: 25381 - protein, 10 aa, Artificial sequence
  Protein classification predicting sequence
ATESFASDPI

SEQ ID NO: 25382 - protein, 12 aa, Artificial sequence
  Protein classification predicting sequence
ALDTKGPEIRTG

SEQ ID NO: 25383 - protein, 28 aa, Artificial sequence
  Protein classification predicting sequence
ALDTKGPEIRTGLIKGSGTAEVELKKGA

SEQ ID NO: 25384 - protein, 33 aa, Artificial sequence
  Protein classification predicting sequence
LGSKKGVNLPGAAVDLPAVSEKDIQDLKFGVEQ

SEQ ID NO: 25385 - protein, 16 aa, Artificial sequence
  Protein classification predicting sequence
VDMVFASFIRKAADVH

SEQ ID NO: 25386 - protein, 19 aa, Artificial sequence
  Protein classification predicting sequence
IKIISKIENHEGVRRFDEI

SEQ ID NO: 25387 - protein, 10 aa, Artificial sequence
  Protein classification predicting sequence
ICATQMLESM

SEQ ID NO: 25388 - protein, 12 aa, Artificial sequence
  Protein classification predicting sequence
MQHAIAREAEAA

SEQ ID NO: 25389 - protein, 8 aa, Artificial sequence
  Protein classification predicting sequence
IAREAEAA

SEQ ID NO: 25390 - protein, 9 aa, Artificial sequence
  Protein classification predicting sequence
GAVEASFKC

SEQ ID NO: 25391 - protein, 14 aa, Artificial sequence
  Protein classification predicting sequence
RYRPRAPIIAVTRN

SEQ ID NO: 25392 - protein, 11 aa, Artificial sequence
  Protein classification predicting sequence
QTARQAHLYRG

SEQ ID NO: 25393 - protein, 8 aa, Artificial sequence
  Protein classification predicting sequence
DLKFGVEQ

SEQ ID NO: 25394 - protein, 7 aa, Artificial sequence
  Protein classification predicting sequence
IIAKIEN

SEQ ID NO: 25395 - protein, 8 aa, Artificial sequence
  Protein classification predicting sequence
ARLNFSHG

SEQ ID NO: 25396 - protein, 9 aa, Artificial sequence
  Protein classification predicting sequence
ATQMLESMI

SEQ ID NO: 25397 - protein, 6 aa, Artificial sequence
  Protein classification predicting sequence
SHKGVN

SEQ ID NO: 25398 - protein, 10 aa, Artificial sequence
  Protein classification predicting sequence
SDGIMVARGD

SEQ ID NO: 25399 - protein, 12 aa, Artificial sequence
  Protein classification predicting sequence
RNPRPTRAEASD

SEQ ID NO: 25400 - protein, 8 aa, Artificial sequence
  Protein classification predicting sequence
IKIISKIE

SEQ ID NO: 25401 - protein, 6 aa, Artificial sequence
  Protein classification predicting sequence
TKIVCT

SEQ ID NO: 25402 - protein, 7 aa, Artificial sequence
  Protein classification predicting sequence
PALSEKD

SEQ ID NO: 25403 - protein, 6 aa, Artificial sequence
  Protein classification predicting sequence
SDVANA

SEQ ID NO: 25404 - protein, 8 aa, Artificial sequence
  Protein classification predicting sequence
VDDKTLKV

SEQ ID NO: 25405 - protein, 7 aa, Artificial sequence
  Protein classification predicting sequence
LEHMCRL

SEQ ID NO: 25406 - protein, 10 aa, Artificial sequence
  Protein classification predicting sequence
NFSHGSHEYH

SEQ ID NO: 25407 - protein, 10 aa, Artificial sequence
  Protein classification predicting sequence
VDLPAVSEKD

SEQ ID NO: 25408 - protein, 7 aa, Artificial sequence
  Protein classification predicting sequence
GSGFTNT

SEQ ID NO: 25409 - protein, 6 aa, Artificial sequence
  Protein classification predicting sequence
RRTSII

SEQ ID NO: 25410 - protein, 12 aa, Artificial sequence
  Protein classification predicting sequence
MYVDYKNITKVI

SEQ ID NO: 25411 - protein, 10 aa, Artificial sequence
  Protein classification predicting sequence
TPKPTSTTET

SEQ ID NO: 25412 - protein, 7 aa, Artificial sequence
  Protein classification predicting sequence
IALDTKG

SEQ ID NO: 25413 - protein, 7 aa, Artificial sequence
  Protein classification predicting sequence
GSKKGVN

SEQ ID NO: 25414 - protein, 11 aa, Artificial sequence
  Protein classification predicting sequence
DVANAVLDGTD

SEQ ID NO: 25415 - protein, 10 aa, Artificial sequence
  Protein classification predicting sequence
GLTSHAAVVG

SEQ ID NO: 25416 - protein, 7 aa, Artificial sequence
  Protein classification predicting sequence
IICTIGP

SEQ ID NO: 25417 - protein, 5 aa, Artificial sequence
  Protein classification predicting sequence
CTIGP

SEQ ID NO: 25418 - protein, 8 aa, Artificial sequence
  Protein classification predicting sequence
KYRPNCPI

SEQ ID NO: 25419 - protein, 6 aa, Artificial sequence
  Protein classification predicting sequence
DLQGPK

SEQ ID NO: 25420 - protein, 15 aa, Artificial sequence
  Protein classification predicting sequence
GRRVPVIAKLEKPEA

SEQ ID NO: 25421 - protein, 6 aa, Artificial sequence
  Protein classification predicting sequence
MLSGET

SEQ ID NO: 25422 - protein, 13 aa, Artificial sequence
  Protein classification predicting sequence
MVARGDLGIEIPA

SEQ ID NO: 25423 - protein, 13 aa, Artificial sequence
  Protein classification predicting sequence
VDYPIPPNHEMIF

SEQ ID NO: 25424 - protein, 9 aa, Artificial sequence
  Protein classification predicting sequence
KYAKACDDK

SEQ ID NO: 25425 - protein, 13 aa, Artificial sequence
  Protein classification predicting sequence
TDVDLPALSEKDK

SEQ ID NO: 25426 - protein, 9 aa, Artificial sequence
  Protein classification predicting sequence
TALIAEQAI

SEQ ID NO: 25427 - protein, 12 aa, Artificial sequence
  Protein classification predicting sequence
RRTSIICTIGPK

SEQ ID NO: 25428 - protein, 9 aa, Artificial sequence
  Protein classification predicting sequence
DYKNITKVI

SEQ ID NO: 25429 - protein, 6 aa, Artificial sequence
  Protein classification predicting sequence
KGVNLP

SEQ ID NO: 25430 - protein, 12 aa, Artificial sequence
  Protein classification predicting sequence
KIENQQGVNNFD

SEQ ID NO: 25431 - protein, 8 aa, Artificial sequence
  Protein classification predicting sequence
NAVLDGAD

SEQ ID NO: 25432 - protein, 10 aa, Artificial sequence
  Protein classification predicting sequence
VDMVFASFIR

SEQ ID NO: 25433 - protein, 15 aa, Artificial sequence
  Protein classification predicting sequence
DGADCVMLSGETAKG

SEQ ID NO: 25434 - protein, 18 aa, Artificial sequence
  Protein classification predicting sequence
DGADCVMLSGETAKGNYP

SEQ ID NO: 25435 - protein, 9 aa, Artificial sequence
  Protein classification predicting sequence
RFSHLYRGV

SEQ ID NO: 25436 - protein, 8 aa, Artificial sequence
  Protein classification predicting sequence
VICATQML

SEQ ID NO: 25437 - protein, 14 aa, Artificial sequence
  Protein classification predicting sequence
GADCVMLSGETAKG

SEQ ID NO: 25438 - protein, 27 aa, Artificial sequence
  Protein classification predicting sequence
AFIQTQQLHAAMADTFLEHMCRLDIDS

SEQ ID NO: 25439 - protein, 10 aa, Artificial sequence
  Protein classification predicting sequence
LKEMIKSGMN

SEQ ID NO: 25440 - protein, 20 aa, Artificial sequence
  Protein classification predicting sequence
LGSKKGVNLPGAAVDLPAVS

SEQ ID NO: 25441 - protein, 7 aa, Artificial sequence
  Protein classification predicting sequence
VDLPAVS

SEQ ID NO: 25442 - protein, 8 aa, Artificial sequence
  Protein classification predicting sequence
GKARGFFK

SEQ ID NO: 25443 - protein, 7 aa, Artificial sequence
  Protein classification predicting sequence
CDDKIMY

SEQ ID NO: 25444 - protein, 8 aa, Artificial sequence
  Protein classification predicting sequence
VDDGVLSF

SEQ ID NO: 25445 - protein, 17 aa, Artificial sequence
  Protein classification predicting sequence
LWLDYKNICKVVEVGSK

SEQ ID NO: 25446 - protein, 15 aa, Artificial sequence
  Protein classification predicting sequence
QTARQAHLYRGIFPV

SEQ ID NO: 25447 - protein, 18 aa, Artificial sequence
  Protein classification predicting sequence
NFSHGTHEYHAETIKNVR

SEQ ID NO: 25448 - protein, 55 aa, Artificial sequence
  Protein classification predicting sequence
LGEKGKNIKIISKIENHEGVRRFDEILEASDGIMVARGDLGIEIPAEKVFLAQKM

SEQ ID NO: 25449 - protein, 10 aa, Artificial sequence
  Protein classification predicting sequence
AAMADTFLEH

SEQ ID NO: 25450 - protein, 6 aa, Artificial sequence
  Protein classification predicting sequence
FDEILE

SEQ ID NO: 25451 - protein, 23 aa, Artificial sequence
  Protein classification predicting sequence
SDVANAVLDGADCIMLSGETAKG

SEQ ID NO: 25452 - protein, 9 aa, Artificial sequence
  Protein classification predicting sequence
MLSGETAKG

SEQ ID NO: 25453 - protein, 8 aa, Artificial sequence
  Protein classification predicting sequence
TGWRPGSG

SEQ ID NO: 25454 - protein, 26 aa, Artificial sequence
  Protein classification predicting sequence
ARGDLGIEIPAEKVFLAQKMMIGRCN

SEQ ID NO: 25455 - protein, 6 aa, Artificial sequence
  Protein classification predicting sequence
RPTRAE

SEQ ID NO: 25456 - protein, 6 aa, Artificial sequence
  Protein classification predicting sequence
DIWSAG

SEQ ID NO: 25457 - protein, 12 aa, Artificial sequence
  Protein classification predicting sequence
DIWSAGIVLFEM

SEQ ID NO: 25458 - protein, 7 aa, Artificial sequence
  Protein classification predicting sequence
HPFLVNL

SEQ ID NO: 25459 - protein, 10 aa, Artificial sequence
  Protein classification predicting sequence
NGGELFYHLQ

SEQ ID NO: 25460 - protein, 10 aa, Artificial sequence
  Protein classification predicting sequence
EIVLALEHLH

SEQ ID NO: 25461 - protein, 6 aa, Artificial sequence
  Protein classification predicting sequence
LLYEML

SEQ ID NO: 25462 - protein, 6 aa, Artificial sequence
  Protein classification predicting sequence
PFYNQD

SEQ ID NO: 25463 - protein, 7 aa, Artificial sequence
  Protein classification predicting sequence
FFRSIDW

SEQ ID NO: 25464 - protein, 7 aa, Artificial sequence
  Protein classification predicting sequence
KFHQRCS

SEQ ID NO: 25465 - protein, 9 aa, Artificial sequence
  Protein classification predicting sequence
GSGSFGTVY

SEQ ID NO: 25466 - protein, 10 aa, Artificial sequence
  Protein classification predicting sequence
TQWCEGSSLY

SEQ ID NO: 25467 - protein, 13 aa, Artificial sequence
  Protein classification predicting sequence
TVKIGDFGLATVK

SEQ ID NO: 25468 - protein, 12 aa, Artificial sequence
  Protein classification predicting sequence
LPYSNINNRDQI

SEQ ID NO: 25469 - protein, 7 aa, Artificial sequence
  Protein classification predicting sequence
RKTFFSL

SEQ ID NO: 25470 - protein, 11 aa, Artificial sequence
  Protein classification predicting sequence
RIGSGSFGTVY

SEQ ID NO: 25471 - protein, 14 aa, Artificial sequence
  Protein classification predicting sequence
LAIVTQWCEGSSLY

SEQ ID NO: 25472 - protein, 15 aa, Artificial sequence
  Protein classification predicting sequence
IIHRDLKSNNIFLHE

SEQ ID NO: 25473 - protein, 17 aa, Artificial sequence
  Protein classification predicting sequence
QPTGSILWMAPEVIRMQ

SEQ ID NO: 25474 - protein, 14 aa, Artificial sequence
  Protein classification predicting sequence
GSILWMAPEVIRMQ

SEQ ID NO: 25475 - protein, 6 aa, Artificial sequence
  Protein classification predicting sequence
FMVGRG

SEQ ID NO: 25476 - protein, 11 aa, Artificial sequence
  Protein classification predicting sequence
LPKIHRSASEP

SEQ ID NO: 25477 - protein, 6 aa, Artificial sequence
  Protein classification predicting sequence
ITHHVK

SEQ ID NO: 25478 - protein, 7 aa, Artificial sequence
  Protein classification predicting sequence
IGVGSYS

SEQ ID NO: 25479 - protein, 7 aa, Artificial sequence
  Protein classification predicting sequence
QVLQHPW

SEQ ID NO: 25480 - protein, 6 aa, Artificial sequence
  Protein classification predicting sequence
HHVKEG

SEQ ID NO: 25481 - protein, 18 aa, Artificial sequence
  Protein classification predicting sequence
EKADPSQFELLKVLGQGS

SEQ ID NO: 25482 - protein, 12 aa, Artificial sequence
  Protein classification predicting sequence
TDFGLSKEAIDH

SEQ ID NO: 25483 - protein, 10 aa, Artificial sequence
  Protein classification predicting sequence
EYMAPEVVNR

SEQ ID NO: 25484 - protein, 9 aa, Artificial sequence
  Protein classification predicting sequence
LFRGFSFVA

SEQ ID NO: 25485 - protein, 10 aa, Artificial sequence
  Protein classification predicting sequence
ELMRGGELLD

SEQ ID NO: 25486 - protein, 25 aa, Artificial sequence
  Protein classification predicting sequence
NGLLMTPCYTANFVAPEVLKRQGYD

SEQ ID NO: 25487 - protein, 7 aa, Artificial sequence
  Protein classification predicting sequence
CDIWSLG

SEQ ID NO: 25488 - protein, 15 aa, Artificial sequence
  Protein classification predicting sequence
VSKMLHVDPHQRLTA

SEQ ID NO: 25489 - protein, 22 aa, Artificial sequence
  Protein classification predicting sequence
LGIIYRDLKPENILLDEEGHIK

SEQ ID NO: 25490 - protein, 8 aa, Artificial sequence
  Protein classification predicting sequence
WSLGILLY

SEQ ID NO: 25491 - protein, 13 aa, Artificial sequence
  Protein classification predicting sequence
ILKAKLGMPQFLS

SEQ ID NO: 25492 - protein, 11 aa, Artificial sequence
  Protein classification predicting sequence
LFKRNPANRLG

SEQ ID NO: 25493 - protein, 12 aa, Artificial sequence
  Protein classification predicting sequence
AHQLFRGFSFVA

SEQ ID NO: 25494 - protein, 7 aa, Artificial sequence
  Protein classification predicting sequence
HKATNME

SEQ ID NO: 25495 - protein, 8 aa, Artificial sequence
  Protein classification predicting sequence
IDKSKRDP

SEQ ID NO: 25496 - protein, 8 aa, Artificial sequence
  Protein classification predicting sequence
FELLKVLG

SEQ ID NO: 25497 - protein, 8 aa, Artificial sequence
  Protein classification predicting sequence
GKVFLVRK

SEQ ID NO: 25498 - protein, 7 aa, Artificial sequence
  Protein classification predicting sequence
LHYAFQT

SEQ ID NO: 25499 - protein, 7 aa, Artificial sequence
  Protein classification predicting sequence
LDSEGHI

SEQ ID NO: 25500 - protein, 18 aa, Artificial sequence
  Protein classification predicting sequence
LLKVLGTGAYGKVFLVRK

SEQ ID NO: 25501 - protein, 5 aa, Artificial sequence
  Protein classification predicting sequence
DWWAL

SEQ ID NO: 25502 - protein, 10 aa, Artificial sequence
  Protein classification predicting sequence
LDYINGGELF

SEQ ID NO: 25503 - protein, 8 aa, Artificial sequence
  Protein classification predicting sequence
YRDIKLEN

SEQ ID NO: 25504 - protein, 8 aa, Artificial sequence
  Protein classification predicting sequence
LMYELLTG

SEQ ID NO: 25505 - protein, 24 aa, Artificial sequence
  Protein classification predicting sequence
VKLHYAFQTEGKLYLILDFLRGGD

SEQ ID NO: 25506 - protein, 8 aa, Artificial sequence
  Protein classification predicting sequence
FTRLSKEV

SEQ ID NO: 25507 - protein, 15 aa, Artificial sequence
  Protein classification predicting sequence
FTEEDVKFYLAELAL

SEQ ID NO: 25508 - protein, 21 aa, Artificial sequence
  Protein classification predicting sequence
EKKAYSFCGTVEYMAPEVVNR

SEQ ID NO: 25509 - protein, 8 aa, Artificial sequence
  Protein classification predicting sequence
LPFQGKDR

SEQ ID NO: 25510 - protein, 7 aa, Artificial sequence
  Protein classification predicting sequence
TPKDSPG

SEQ ID NO: 25511 - protein, 15 aa, Artificial sequence
  Protein classification predicting sequence
QGVVHRDLKPSNILY

SEQ ID NO: 25512 - protein, 14 aa, Artificial sequence
  Protein classification predicting sequence
TPCYTANFVAPEVL

SEQ ID NO: 25513 - protein, 21 aa, Artificial sequence
  Protein classification predicting sequence
LYAMKVLKKATLKVRDRVRTK

SEQ ID NO: 25514 - protein, 31 aa, Artificial sequence
  Protein classification predicting sequence
EAQSLLRALFKRNPANRLGSGPDGAEEIKRH

SEQ ID NO: 25515 - protein, 23 aa, Artificial sequence
  Protein classification predicting sequence
FYSTIDWNKLYRREIKPPFKPAV

SEQ ID NO: 25516 - protein, 13 aa, Artificial sequence
  Protein classification predicting sequence
PLHSVVQQLHGKN

SEQ ID NO: 25517 - protein, 12 aa, Artificial sequence
  Protein classification predicting sequence
IGVGSYSVCKRC

SEQ ID NO: 25518 - protein, 29 aa, Artificial sequence
  Protein classification predicting sequence
VYLVTELMRGGELLDKILRQKFFSEREAS

SEQ ID NO: 25519 - protein, 16 aa, Artificial sequence
  Protein classification predicting sequence
PQLKPIESSILAQRRV

SEQ ID NO: 25520 - protein, 12 aa, Artificial sequence
  Protein classification predicting sequence
TNMEYAVKVIDK

SEQ ID NO: 25521 - protein, 11 aa, Artificial sequence
  Protein classification predicting sequence
KRDPSEEIEIL

SEQ ID NO: 25522 - protein, 7 aa, Artificial sequence
  Protein classification predicting sequence
DTPEEIL

SEQ ID NO: 25523 - protein, 8 aa, Artificial sequence
  Protein classification predicting sequence
GGNWNTVS

SEQ ID NO: 25524 - protein, 10 aa, Artificial sequence
  Protein classification predicting sequence
RLTAKQVLQH

SEQ ID NO: 25525 - protein, 9 aa, Artificial sequence
  Protein classification predicting sequence
SSILAQRRV

SEQ ID NO: 25526 - protein, 44 aa, Artificial sequence
  Protein classification predicting sequence
ADWWSYGVLMFEMLTGSLPFQGKDRKETMTLILKAKLGMPQFLS

SEQ ID NO: 25527 - protein, 12 aa, Artificial sequence
  Protein classification predicting sequence
ILRQKFFSEREA

SEQ ID NO: 25528 - protein, 22 aa, Artificial sequence
  Protein classification predicting sequence
CFELLRVLGKGGYGKVFQVRKV

SEQ ID NO: 25529 - protein, 7 aa, Artificial sequence
  Protein classification predicting sequence
GKIYAMK

SEQ ID NO: 25530 - protein, 14 aa, Artificial sequence
  Protein classification predicting sequence
YAFQTGGKLYLILE

SEQ ID NO: 25531 - protein, 13 aa, Artificial sequence
  Protein classification predicting sequence
KLTDFGLCKESIH

SEQ ID NO: 25532 - protein, 7 aa, Artificial sequence
  Protein classification predicting sequence
YMAPEIL

SEQ ID NO: 25533 - protein, 11 aa, Artificial sequence
  Protein classification predicting sequence
LQSEEDVSQFD

SEQ ID NO: 25534 - protein, 12 aa, Artificial sequence
  Protein classification predicting sequence
FTRQTPVDSPDD

SEQ ID NO: 25535 - protein, 12 aa, Artificial sequence
  Protein classification predicting sequence
FLGFTYVAPSVL

SEQ ID NO: 25536 - protein, 16 aa, Artificial sequence
  Protein classification predicting sequence
VLGKGGYGKVFQVRKV

SEQ ID NO: 25537 - protein, 16 aa, Artificial sequence
  Protein classification predicting sequence
THTFCGTIEYMAPEIL

SEQ ID NO: 25538 - protein, 21 aa, Artificial sequence
  Protein classification predicting sequence
GHNRAVDWWSLGALMYDMLTG

SEQ ID NO: 25539 - protein, 9 aa, Artificial sequence
  Protein classification predicting sequence
HPFFRHINW

SEQ ID NO: 25540 - protein, 6 aa, Artificial sequence
  Protein classification predicting sequence
QSILHL

SEQ ID NO: 25541 - protein, 7 aa, Artificial sequence
  Protein classification predicting sequence
GCILAEM

SEQ ID NO: 25542 - protein, 18 aa, Artificial sequence
  Protein classification predicting sequence
RKAHHYTIERELNGTYAI

SEQ ID NO: 25543 - protein, 15 aa, Artificial sequence
  Protein classification predicting sequence
DGLLRVLTVPCQKIG

SEQ ID NO: 25544 - protein, 8 aa, Artificial sequence
  Protein classification predicting sequence
LCHYHSQE

SEQ ID NO: 25545 - protein, 14 aa, Artificial sequence
  Protein classification predicting sequence
FDTLWQLVEHYSYK

SEQ ID NO: 25546 - protein, 6 aa, Artificial sequence
  Protein classification predicting sequence
CPPGCP

SEQ ID NO: 25547 - protein, 13 aa, Artificial sequence
  Protein classification predicting sequence
LCWTYDVENRPGF

SEQ ID NO: 25548 - protein, 6 aa, Artificial sequence
  Protein classification predicting sequence
TREPGG

SEQ ID NO: 25549 - protein, 11 aa, Artificial sequence
  Protein classification predicting sequence
DRFTDASYAYQ

SEQ ID NO: 25550 - protein, 8 aa, Artificial sequence
  Protein classification predicting sequence
EGGEGAGK

SEQ ID NO: 25551 - protein, 10 aa, Artificial sequence
  Protein classification predicting sequence
EGPEGSGKTT

SEQ ID NO: 25552 - protein, 30 aa, Artificial sequence
  Protein classification predicting sequence
FEINRFATEDCMPSLTIYLDIEPEVGLARI

SEQ ID NO: 25553 - protein, 13 aa, Artificial sequence
  Protein classification predicting sequence
IDSSLAYQGYARG

SEQ ID NO: 25554 - protein, 7 aa, Artificial sequence
  Protein classification predicting sequence
QNRLDQE

SEQ ID NO: 25555 - protein, 6 aa, Artificial sequence
  Protein classification predicting sequence
NRLDQE

SEQ ID NO: 25556 - protein, 8 aa, Artificial sequence
  Protein classification predicting sequence
GKVVLCDR

SEQ ID NO: 25557 - protein, 7 aa, Artificial sequence
  Protein classification predicting sequence
DSSLAYQ

SEQ ID NO: 25558 - protein, 7 aa, Artificial sequence
  Protein classification predicting sequence
LMLYAAR

SEQ ID NO: 25559 - protein, 8 aa, Artificial sequence
  Protein classification predicting sequence
LDRIEQES

SEQ ID NO: 25560 - protein, 7 aa, Artificial sequence
  Protein classification predicting sequence
SSLAYQG

SEQ ID NO: 25561 - protein, 7 aa, Artificial sequence
  Protein classification predicting sequence
KFIVIEG

SEQ ID NO: 25562 - protein, 6 aa, Artificial sequence
  Protein classification predicting sequence
SSLAYQ

SEQ ID NO: 25563 - protein, 8 aa, Artificial sequence
  Protein classification predicting sequence
EGIDGAGK

SEQ ID NO: 25564 - protein, 6 aa, Artificial sequence
  Protein classification predicting sequence
ADRAQH

SEQ ID NO: 25565 - protein, 19 aa, Artificial sequence
  Protein classification predicting sequence
GLPKPDLVIFLESGSKEIN

SEQ ID NO: 25566 - protein, 10 aa, Artificial sequence
  Protein classification predicting sequence
NVGEEIYEDV

SEQ ID NO: 25567 - protein, 10 aa, Artificial sequence
  Protein classification predicting sequence
LFLAARAQHI

SEQ ID NO: 25568 - protein, 8 aa, Artificial sequence
  Protein classification predicting sequence
AYQGGGRG

SEQ ID NO: 25569 - protein, 39 aa, Artificial sequence
  Protein classification predicting sequence
MTLSKSYESGLPKPDLVIFLESGSKEINRNVGEEIYEDV

SEQ ID NO: 25570 - protein, 7 aa, Artificial sequence
  Protein classification predicting sequence
LPALEAG

SEQ ID NO: 25571 - protein, 8 aa, Artificial sequence
  Protein classification predicting sequence
DSSLAYQG

SEQ ID NO: 25572 - protein, 11 aa, Artificial sequence
  Protein classification predicting sequence
IVIEGLEGAGK

SEQ ID NO: 25573 - protein, 15 aa, Artificial sequence
  Protein classification predicting sequence
IVIEGLEGAGKTTAR

SEQ ID NO: 25574 - protein, 8 aa, Artificial sequence
  Protein classification predicting sequence
TDKAEVLM

SEQ ID NO: 25575 - protein, 8 aa, Artificial sequence
  Protein classification predicting sequence
YAARVQLV

SEQ ID NO: 25576 - protein, 7 aa, Artificial sequence
  Protein classification predicting sequence
GDRHDLS

SEQ ID NO: 25577 - protein, 8 aa, Artificial sequence
  Protein classification predicting sequence
KFIVIEGL

SEQ ID NO: 25578 - protein, 6 aa, Artificial sequence
  Protein classification predicting sequence
FFNRTR

SEQ ID NO: 25579 - protein, 7 aa, Artificial sequence
  Protein classification predicting sequence
AARRQHL

SEQ ID NO: 25580 - protein, 7 aa, Artificial sequence
  Protein classification predicting sequence
MPSLTIY

SEQ ID NO: 25581 - protein, 9 aa, Artificial sequence
  Protein classification predicting sequence
FITFEGGEG

SEQ ID NO: 25582 - protein, 11 aa, Artificial sequence
  Protein classification predicting sequence
TREPGGTPLAE

SEQ ID NO: 25583 - protein, 7 aa, Artificial sequence
  Protein classification predicting sequence
AYQGGGR

SEQ ID NO: 25584 - protein, 7 aa, Artificial sequence
  Protein classification predicting sequence
GELDRIE

SEQ ID NO: 25585 - protein, 8 aa, Artificial sequence
  Protein classification predicting sequence
WVVGDRHD

SEQ ID NO: 25586 - protein, 9 aa, Artificial sequence
  Protein classification predicting sequence
RTRARYLEL

SEQ ID NO: 25587 - protein, 8 aa, Artificial sequence
  Protein classification predicting sequence
KLIISDRS

SEQ ID NO: 25588 - protein, 11 aa, Artificial sequence
  Protein classification predicting sequence
LEGVDGAGKST

SEQ ID NO: 25589 - protein, 8 aa, Artificial sequence
  Protein classification predicting sequence
EGPDGAGK

SEQ ID NO: 25590 - protein, 7 aa, Artificial sequence
  Protein classification predicting sequence
GLEPDLT

SEQ ID NO: 25591 - protein, 6 aa, Artificial sequence
  Protein classification predicting sequence
VREGYL

SEQ ID NO: 25592 - protein, 10 aa, Artificial sequence
  Protein classification predicting sequence
VLCDRYIDSS

SEQ ID NO: 25593 - protein, 9 aa, Artificial sequence
  Protein classification predicting sequence
IDSSVAYQG

SEQ ID NO: 25594 - protein, 6 aa, Artificial sequence
  Protein classification predicting sequence
VIKPAL

SEQ ID NO: 25595 - protein, 8 aa, Artificial sequence
  Protein classification predicting sequence
PDLTLYLD

SEQ ID NO: 25596 - protein, 16 aa, Artificial sequence
  Protein classification predicting sequence
GDRHDLSSQAYQGGGR

SEQ ID NO: 25597 - protein, 16 aa, Artificial sequence
  Protein classification predicting sequence
WVVCDRFTDASYAYQG

SEQ ID NO: 25598 - protein, 6 aa, Artificial sequence
  Protein classification predicting sequence
FIVIEG

SEQ ID NO: 25599 - protein, 9 aa, Artificial sequence
  Protein classification predicting sequence
ETEALLMFA

SEQ ID NO: 25600 - protein, 7 aa, Artificial sequence
  Protein classification predicting sequence
LLMFAAR

SEQ ID NO: 25601 - protein, 9 aa, Artificial sequence
  Protein classification predicting sequence
RFPERIKTI

SEQ ID NO: 25602 - protein, 12 aa, Artificial sequence
  Protein classification predicting sequence
IVIEGLEGAGKT

SEQ ID NO: 25603 - protein, 10 aa, Artificial sequence
  Protein classification predicting sequence
VLGDFRPDLT

SEQ ID NO: 25604 - protein, 8 aa, Artificial sequence
  Protein classification predicting sequence
RGELDRIE

SEQ ID NO: 25605 - protein, 19 aa, Artificial sequence
  Protein classification predicting sequence
AKFIVIEGLEGAGKSTAIQ

SEQ ID NO: 25606 - protein, 10 aa, Artificial sequence
  Protein classification predicting sequence
SSQAYQGGGR

SEQ ID NO: 25607 - protein, 17 aa, Artificial sequence
  Protein classification predicting sequence
GLERARGRGELDRIEKM

SEQ ID NO: 25608 - protein, 7 aa, Artificial sequence
  Protein classification predicting sequence
TREPGGS

SEQ ID NO: 25609 - protein, 8 aa, Artificial sequence
  Protein classification predicting sequence
EGPEGAGK

SEQ ID NO: 25610 - protein, 6 aa, Artificial sequence
  Protein classification predicting sequence
GKSTQI

SEQ ID NO: 25611 - protein, 8 aa, Artificial sequence
  Protein classification predicting sequence
ITLDGIDG

SEQ ID NO: 25612 - protein, 7 aa, Artificial sequence
  Protein classification predicting sequence
RTEAMLF

SEQ ID NO: 25613 - protein, 6 aa, Artificial sequence
  Protein classification predicting sequence
FITFEG

SEQ ID NO: 25614 - protein, 12 aa, Artificial sequence
  Protein classification predicting sequence
VVVETLEQLGIR

SEQ ID NO: 25615 - protein, 7 aa, Artificial sequence
  Protein classification predicting sequence
VIKPALA

SEQ ID NO: 25616 - protein, 8 aa, Artificial sequence
  Protein classification predicting sequence
TIDATQPL

SEQ ID NO: 25617 - protein, 21 aa, Artificial sequence
  Protein classification predicting sequence
FTREPGGTQLAEKLRSLVLDI

SEQ ID NO: 25618 - protein, 26 aa, Artificial sequence
  Protein classification predicting sequence
LDRIEQESFDFFNRTRARYLELAAQD

SEQ ID NO: 25619 - protein, 6 aa, Artificial sequence
  Protein classification predicting sequence
IVIEGL

SEQ ID NO: 25620 - protein, 7 aa, Artificial sequence
  Protein classification predicting sequence
PDLVIFL

SEQ ID NO: 25621 - protein, 18 aa, Artificial sequence
  Protein classification predicting sequence
DIRTEAMLFAASRREHLV

SEQ ID NO: 25622 - protein, 17 aa, Artificial sequence
  Protein classification predicting sequence
LNEFAINGLYPDLTIYL

SEQ ID NO: 25623 - protein, 7 aa, Artificial sequence
  Protein classification predicting sequence
PDLTIYL

SEQ ID NO: 25624 - protein, 10 aa, Artificial sequence
  Protein classification predicting sequence
FHEKVIEGYQ

SEQ ID NO: 25625 - protein, 7 aa, Artificial sequence
  Protein classification predicting sequence
TREPGGV

SEQ ID NO: 25626 - protein, 7 aa, Artificial sequence
  Protein classification predicting sequence
REVNRLD

SEQ ID NO: 25627 - protein, 7 aa, Artificial sequence
  Protein classification predicting sequence
TTREPGG

SEQ ID NO: 25628 - protein, 9 aa, Artificial sequence
  Protein classification predicting sequence
AARRQHLVE

SEQ ID NO: 25629 - protein, 8 aa, Artificial sequence
  Protein classification predicting sequence
DSSVAYQG

SEQ ID NO: 25630 - protein, 8 aa, Artificial sequence
  Protein classification predicting sequence
DMDIRTEA

SEQ ID NO: 25631 - protein, 7 aa, Artificial sequence
  Protein classification predicting sequence
RTEALLY

SEQ ID NO: 25632 - protein, 72 aa, Artificial sequence
  Protein classification predicting sequence
NTIKYLNFPQRSTVTGKMIDDYLTRKKTYNDHIVNLLFCANRWEFASFIQEQLEQGITLIVDRYAFSGVAYA

SEQ ID NO: 25633 - protein, 16 aa, Artificial sequence
  Protein classification predicting sequence
FQQKVLQEYKKMIEEG

SEQ ID NO: 25634 - protein, 10 aa, Artificial sequence
  Protein classification predicting sequence
PALARGEWVV

SEQ ID NO: 25635 - protein, 24 aa, Artificial sequence
  Protein classification predicting sequence
GLERARGRGELDRIEKMDISFFER

SEQ ID NO: 25636 - protein, 9 aa, Artificial sequence
  Protein classification predicting sequence
ELLLLYAAR

SEQ ID NO: 25637 - protein, 8 aa, Artificial sequence
  Protein classification predicting sequence
EGLEGAGK

SEQ ID NO: 25638 - protein, 8 aa, Artificial sequence
  Protein classification predicting sequence
IVIEGLEG

SEQ ID NO: 25639 - protein, 10 aa, Artificial sequence
  Protein classification predicting sequence
SKEPTNGPWG

SEQ ID NO: 25640 - protein, 9 aa, Artificial sequence
  Protein classification predicting sequence
LRQSAATGR

SEQ ID NO: 25641 - protein, 20 aa, Artificial sequence
  Protein classification predicting sequence
VILDRYFPSMVAYQGAAGLP

SEQ ID NO: 25642 - protein, 15 aa, Artificial sequence
  Protein classification predicting sequence
RARARGELDRIEQES

SEQ ID NO: 25643 - protein, 8 aa, Artificial sequence
  Protein classification predicting sequence
AFFERTRA

SEQ ID NO: 25644 - protein, 12 aa, Artificial sequence
  Protein classification predicting sequence
TLNPSVDISYPL

SEQ ID NO: 25645 - protein, 9 aa, Artificial sequence
  Protein classification predicting sequence
QTEILEQGP

SEQ ID NO: 25646 - protein, 13 aa, Artificial sequence
  Protein classification predicting sequence
NPVGSGDSTVAGI

SEQ ID NO: 25647 - protein, 54 aa, Artificial sequence
  Protein classification predicting sequence
VLNPVGSGDSTVAGITSAILNHENDHDLLKKANTLGMLNAQEAQTGYVNLNNYD

SEQ ID NO: 25648 - protein, 15 aa, Artificial sequence
  Protein classification predicting sequence
SKTAGGKGLNVTRVL

SEQ ID NO: 25649 - protein, 22 aa, Artificial sequence
  Protein classification predicting sequence
IKGETRNCIAILHEGQQTEILE

SEQ ID NO: 25650 - protein, 11 aa, Artificial sequence
  Protein classification predicting sequence
GGKGLNVTRVL

SEQ ID NO: 25651 - protein, 8 aa, Artificial sequence
  Protein classification predicting sequence
KPTVIKPN

SEQ ID NO: 25652 - protein, 15 aa, Artificial sequence
  Protein classification predicting sequence
LLKKANTLGMLNAQE

SEQ ID NO: 25653 - protein, 8 aa, Artificial sequence
  Protein classification predicting sequence
HLNMVFSN

SEQ ID NO: 25654 - protein, 14 aa, Artificial sequence
  Protein classification predicting sequence
FLPLGVDCWIDNTR

SEQ ID NO: 25655 - protein, 9 aa, Artificial sequence
  Protein classification predicting sequence
KLAGLVEEM

SEQ ID NO: 25656 - protein, 18 aa, Artificial sequence
  Protein classification predicting sequence
AAYGKPVFLIGHSLGCLH

SEQ ID NO: 25657 - protein, 17 aa, Artificial sequence
  Protein classification predicting sequence
FIDGFISLGAPWGGSIK

SEQ ID NO: 25658 - protein, 8 aa, Artificial sequence
  Protein classification predicting sequence
DLHFEEGW

SEQ ID NO: 25659 - protein, 20 aa, Artificial sequence
  Protein classification predicting sequence
PGVQIRVPGFGKTYSVEYLD

SEQ ID NO: 25660 - protein, 31 aa, Artificial sequence
  Protein classification predicting sequence
FWLLNVLFPPHTTPKAELSNHTRPVILVPGC

SEQ ID NO: 25661 - protein, 14 aa, Artificial sequence
  Protein classification predicting sequence
CYRKTEDFFTIWLD

SEQ ID NO: 25662 - protein, 24 aa, Artificial sequence
  Protein classification predicting sequence
NMFLPLGVDCWIDNTRVVYNRSSG

SEQ ID NO: 25663 - protein, 26 aa, Artificial sequence
  Protein classification predicting sequence
TLVQNLVNNGYVRDETVRAAPYDWRL

SEQ ID NO: 25664 - protein, 19 aa, Artificial sequence
  Protein classification predicting sequence
FIDGFISLGAPWGGSIKPM

SEQ ID NO: 25665 - protein, 13 aa, Artificial sequence
  Protein classification predicting sequence
ASAIPAYSKRGDI

SEQ ID NO: 25666 - protein, 8 aa, Artificial sequence
  Protein classification predicting sequence
DEAHSIGA

SEQ ID NO: 25667 - protein, 10 aa, Artificial sequence
  Protein classification predicting sequence
MGTFTKSFGA

SEQ ID NO: 25668 - protein, 7 aa, Artificial sequence
  Protein classification predicting sequence
DSPVVPL

SEQ ID NO: 25669 - protein, 9 aa, Artificial sequence
  Protein classification predicting sequence
VLEESGEWW

SEQ ID NO: 25670 - protein, 7 aa, Artificial sequence
  Protein classification predicting sequence
DNGGYYI

SEQ ID NO: 25671 - protein, 6 aa, Artificial sequence
  Protein classification predicting sequence
KPQKPW

SEQ ID NO: 25672 - protein, 11 aa, Artificial sequence
  Protein classification predicting sequence
NYIHRDLRAAN

SEQ ID NO: 25673 - protein, 25 aa, Artificial sequence
  Protein classification predicting sequence
IEDNEYTAREGAKFPIKWTAPEAIN

SEQ ID NO: 25674 - protein, 5 aa, Artificial sequence
  Protein classification predicting sequence
YISPR

SEQ ID NO: 25675 - protein, 9 aa, Artificial sequence
  Protein classification predicting sequence
YISPRITFP

SEQ ID NO: 25676 - protein, 6 aa, Artificial sequence
  Protein classification predicting sequence
ERGYRM

SEQ ID NO: 25677 - protein, 13 aa, Artificial sequence
  Protein classification predicting sequence
DTTLRDGEQTPGV

SEQ ID NO: 25678 - protein, 5 aa, Artificial sequence
  Protein classification predicting sequence
HCHDD

SEQ ID NO: 25679 - protein, 6 aa, Artificial sequence
  Protein classification predicting sequence
IVLGKH

SEQ ID NO: 25680 - protein, 6 aa, Artificial sequence
  Protein classification predicting sequence
NKAVVG

SEQ ID NO: 25681 - protein, 14 aa, Artificial sequence
  Protein classification predicting sequence
NGIGERAGNAALEE

SEQ ID NO: 25682 - protein, 9 aa, Artificial sequence
  Protein classification predicting sequence
NGIGERAGN

SEQ ID NO: 25683 - protein, 7 aa, Artificial sequence
  Protein classification predicting sequence
HCHDDLG

SEQ ID NO: 25684 - protein, 8 aa, Artificial sequence
  Protein classification predicting sequence
INLPDTVG

SEQ ID NO: 25685 - protein, 7 aa, Artificial sequence
  Protein classification predicting sequence
RFKELAD

SEQ ID NO: 25686 - protein, 10 aa, Artificial sequence
  Protein classification predicting sequence
FDTTLRDGEQ

SEQ ID NO: 25687 - protein, 14 aa, Artificial sequence
  Protein classification predicting sequence
FDTTLRDGEQTPGV

SEQ ID NO: 25688 - protein, 16 aa, Artificial sequence
  Protein classification predicting sequence
FDTTLRDGEQTPGVNF

SEQ ID NO: 25689 - protein, 10 aa, Artificial sequence
  Protein classification predicting sequence
LGKLSGRNAF

SEQ ID NO: 25690 - protein, 6 aa, Artificial sequence
  Protein classification predicting sequence
DATRTE

SEQ ID NO: 25691 - protein, 7 aa, Artificial sequence
  Protein classification predicting sequence
NVPDTVG

SEQ ID NO: 25692 - protein, 6 aa, Artificial sequence
  Protein classification predicting sequence
VHCHND

SEQ ID NO: 25693 - protein, 6 aa, Artificial sequence
  Protein classification predicting sequence
GLAVAN

SEQ ID NO: 25694 - protein, 10 aa, Artificial sequence
  Protein classification predicting sequence
NAFSHESGIH

SEQ ID NO: 25695 - protein, 8 aa, Artificial sequence
  Protein classification predicting sequence
GLAVANSL

SEQ ID NO: 25696 - protein, 6 aa, Artificial sequence
  Protein classification predicting sequence
NAFAHE

SEQ ID NO: 25697 - protein, 7 aa, Artificial sequence
  Protein classification predicting sequence
IPDDVTI

SEQ ID NO: 25698 - protein, 8 aa, Artificial sequence
  Protein classification predicting sequence
TVEMATPN

SEQ ID NO: 25699 - protein, 15 aa, Artificial sequence
  Protein classification predicting sequence
HPHNDRGTAVAAAEL

SEQ ID NO: 25700 - protein, 7 aa, Artificial sequence
  Protein classification predicting sequence
PYLPIDP

SEQ ID NO: 25701 - protein, 11 aa, Artificial sequence
  Protein classification predicting sequence
IRVNSQSGKGG

SEQ ID NO: 25702 - protein, 6 aa, Artificial sequence
  Protein classification predicting sequence
FSPEDA

SEQ ID NO: 25703 - protein, 7 aa, Artificial sequence
  Protein classification predicting sequence
EDATRTE

SEQ ID NO: 25704 - protein, 7 aa, Artificial sequence
  Protein classification predicting sequence
HTFIATS

SEQ ID NO: 25705 - protein, 11 aa, Artificial sequence
  Protein classification predicting sequence
NIPDTVGYTVP

SEQ ID NO: 25706 - protein, 15 aa, Artificial sequence
  Protein classification predicting sequence
NIPDTVGYTVPSEFG

SEQ ID NO: 25707 - protein, 7 aa, Artificial sequence
  Protein classification predicting sequence
LGKLSGR

SEQ ID NO: 25708 - protein, 9 aa, Artificial sequence
  Protein classification predicting sequence
RIHTFIATS

SEQ ID NO: 25709 - protein, 6 aa, Artificial sequence
  Protein classification predicting sequence
TINIPD

SEQ ID NO: 25710 - protein, 7 aa, Artificial sequence
  Protein classification predicting sequence
HFYNSTS

SEQ ID NO: 25711 - protein, 6 aa, Artificial sequence
  Protein classification predicting sequence
SPGDFE

SEQ ID NO: 25712 - protein, 7 aa, Artificial sequence
  Protein classification predicting sequence
GNGPVDA

SEQ ID NO: 25713 - protein, 10 aa, Artificial sequence
  Protein classification predicting sequence
VINIPDTVGY

SEQ ID NO: 25714 - protein, 15 aa, Artificial sequence
  Protein classification predicting sequence
EDAATGSGSIEAIYN

SEQ ID NO: 25715 - protein, 7 aa, Artificial sequence
  Protein classification predicting sequence
RTELPFL

SEQ ID NO: 25716 - protein, 7 aa, Artificial sequence
  Protein classification predicting sequence
KENVPNI

SEQ ID NO: 25717 - protein, 11 aa, Artificial sequence
  Protein classification predicting sequence
TINIPDTVGYT

SEQ ID NO: 25718 - protein, 9 aa, Artificial sequence
  Protein classification predicting sequence
VSQLCNMPI

SEQ ID NO: 25719 - protein, 5 aa, Artificial sequence
  Protein classification predicting sequence
CNMPI

SEQ ID NO: 25720 - protein, 14 aa, Artificial sequence
  Protein classification predicting sequence
CNMPIPANKAIVGS

SEQ ID NO: 25721 - protein, 13 aa, Artificial sequence
  Protein classification predicting sequence
LNLTSRSGRAAVK

SEQ ID NO: 25722 - protein, 6 aa, Artificial sequence
  Protein classification predicting sequence
NKAIVG

SEQ ID NO: 25723 - protein, 8 aa, Artificial sequence
  Protein classification predicting sequence
NLPSTVEM

SEQ ID NO: 25724 - protein, 28 aa, Artificial sequence
  Protein classification predicting sequence
ERHPYVGELVYTAFSGSHQDAINKGMKA

SEQ ID NO: 25725 - protein, 11 aa, Artificial sequence
  Protein classification predicting sequence
IFDTTLRDGEQ

SEQ ID NO: 25726 - protein, 6 aa, Artificial sequence
  Protein classification predicting sequence
SSPGDF

SEQ ID NO: 25727 - protein, 7 aa, Artificial sequence
  Protein classification predicting sequence
IMAIKVR

SEQ ID NO: 25728 - protein, 23 aa, Artificial sequence
  Protein classification predicting sequence
AFLKLADKKGQVFDYDLEALAFI

SEQ ID NO: 25729 - protein, 18 aa, Artificial sequence
  Protein classification predicting sequence
EGTINGIGERAGNTALEE

SEQ ID NO: 25730 - protein, 8 aa, Artificial sequence
  Protein classification predicting sequence
DALGQVDI

SEQ ID NO: 25731 - protein, 7 aa, Artificial sequence
  Protein classification predicting sequence
NKAIVGS

SEQ ID NO: 25732 - protein, 33 aa, Artificial sequence
  Protein classification predicting sequence
NKAIVGSNAFAHSSGIHQDGVLKNRKNYEIMEP

SEQ ID NO: 25733 - protein, 7 aa, Artificial sequence
  Protein classification predicting sequence
EFSCEDA

SEQ ID NO: 25734 - protein, 7 aa, Artificial sequence
  Protein classification predicting sequence
SGIHQDG

SEQ ID NO: 25735 - protein, 9 aa, Artificial sequence
  Protein classification predicting sequence
LKNRKNYEI

SEQ ID NO: 25736 - protein, 7 aa, Artificial sequence
  Protein classification predicting sequence
KGQVFDY

SEQ ID NO: 25737 - protein, 9 aa, Artificial sequence
  Protein classification predicting sequence
KDIDAAAEA

SEQ ID NO: 25738 - protein, 9 aa, Artificial sequence
  Protein classification predicting sequence
KLQIALALE

SEQ ID NO: 25739 - protein, 12 aa, Artificial sequence
  Protein classification predicting sequence
VPNIDKAIISVH

SEQ ID NO: 25740 - protein, 9 aa, Artificial sequence
  Protein classification predicting sequence
KAIVGSNAF

SEQ ID NO: 25741 - protein, 7 aa, Artificial sequence
  Protein classification predicting sequence
TYEIISP

SEQ ID NO: 25742 - protein, 8 aa, Artificial sequence
  Protein classification predicting sequence
LADKKGQV

SEQ ID NO: 25743 - protein, 7 aa, Artificial sequence
  Protein classification predicting sequence
DYDLEAL

SEQ ID NO: 25744 - protein, 6 aa, Artificial sequence
  Protein classification predicting sequence
RIHTFI

SEQ ID NO: 25745 - protein, 6 aa, Artificial sequence
  Protein classification predicting sequence
HMKYKL

SEQ ID NO: 25746 - protein, 5 aa, Artificial sequence
  Protein classification predicting sequence
SAHCH

SEQ ID NO: 25747 - protein, 7 aa, Artificial sequence
  Protein classification predicting sequence
VANSIAA

SEQ ID NO: 25748 - protein, 8 aa, Artificial sequence
  Protein classification predicting sequence
AAIEGGAR

SEQ ID NO: 25749 - protein, 6 aa, Artificial sequence
  Protein classification predicting sequence
ETYEIM

SEQ ID NO: 25750 - protein, 9 aa, Artificial sequence
  Protein classification predicting sequence
VTEGTDAQA

SEQ ID NO: 25751 - protein, 7 aa, Artificial sequence
  Protein classification predicting sequence
HCHNDLG

SEQ ID NO: 25752 - protein, 11 aa, Artificial sequence
  Protein classification predicting sequence
GERAGNASLEE

SEQ ID NO: 25753 - protein, 8 aa, Artificial sequence
  Protein classification predicting sequence
TDIIVASA

SEQ ID NO: 25754 - protein, 10 aa, Artificial sequence
  Protein classification predicting sequence
NRESVILSLH

SEQ ID NO: 25755 - protein, 6 aa, Artificial sequence
  Protein classification predicting sequence
HNDRGT

SEQ ID NO: 25756 - protein, 10 aa, Artificial sequence
  Protein classification predicting sequence
LFGNGERTGN

SEQ ID NO: 25757 - protein, 14 aa, Artificial sequence
  Protein classification predicting sequence
TAFSGSHQDAIRKG

SEQ ID NO: 25758 - protein, 6 aa, Artificial sequence
  Protein classification predicting sequence
WEVPYL

SEQ ID NO: 25759 - protein, 8 aa, Artificial sequence
  Protein classification predicting sequence
NSQSGKGG

SEQ ID NO: 25760 - protein, 7 aa, Artificial sequence
  Protein classification predicting sequence
LPDRTWP

SEQ ID NO: 25761 - protein, 19 aa, Artificial sequence
  Protein classification predicting sequence
WCAVDLRDGNQALIDPMSP

SEQ ID NO: 25762 - protein, 11 aa, Artificial sequence
  Protein classification predicting sequence
EYSPESYTGTE

SEQ ID NO: 25763 - protein, 12 aa, Artificial sequence
  Protein classification predicting sequence
TPNVYADSIEWM

SEQ ID NO: 25764 - protein, 10 aa, Artificial sequence
  Protein classification predicting sequence
SLHPHNDRGT

SEQ ID NO: 25765 - protein, 25 aa, Artificial sequence
  Protein classification predicting sequence
AGADRIEGCLFGNGERTGNVCLVTL

SEQ ID NO: 25766 - protein, 10 aa, Artificial sequence
  Protein classification predicting sequence
YSPESFTGTE

SEQ ID NO: 25767 - protein, 8 aa, Artificial sequence
  Protein classification predicting sequence
SRLSGMPV

SEQ ID NO: 25768 - protein, 15 aa, Artificial sequence
  Protein classification predicting sequence
IFDTTLRDGEQSPGA

SEQ ID NO: 25769 - protein, 8 aa, Artificial sequence
  Protein classification predicting sequence
GARQIECT

SEQ ID NO: 25770 - protein, 10 aa, Artificial sequence
  Protein classification predicting sequence
SGIHQDGVLK

SEQ ID NO: 25771 - protein, 9 aa, Artificial sequence
  Protein classification predicting sequence
PNELIEFSV

SEQ ID NO: 25772 - protein, 21 aa, Artificial sequence
  Protein classification predicting sequence
VKRARNYTDDVEFSCEDAGRT

SEQ ID NO: 25773 - protein, 9 aa, Artificial sequence
  Protein classification predicting sequence
VEAAINAGA

SEQ ID NO: 25774 - protein, 13 aa, Artificial sequence
  Protein classification predicting sequence
AGATTVNIPDTVG

SEQ ID NO: 25775 - protein, 7 aa, Artificial sequence
  Protein classification predicting sequence
NIPDTVG

SEQ ID NO: 25776 - protein, 7 aa, Artificial sequence
  Protein classification predicting sequence
VPNIDKA

SEQ ID NO: 25777 - protein, 12 aa, Artificial sequence
  Protein classification predicting sequence
AFAHSSGIHQDG

SEQ ID NO: 25778 - protein, 8 aa, Artificial sequence
  Protein classification predicting sequence
RSGRAAVK

SEQ ID NO: 25779 - protein, 8 aa, Artificial sequence
  Protein classification predicting sequence
AGADRIEG

SEQ ID NO: 25780 - protein, 8 aa, Artificial sequence
  Protein classification predicting sequence
VPYLPIDP

SEQ ID NO: 25781 - protein, 13 aa, Artificial sequence
  Protein classification predicting sequence
VPYLPIDPKDVGR

SEQ ID NO: 25782 - protein, 10 aa, Artificial sequence
  Protein classification predicting sequence
LRDGEQTPGV

SEQ ID NO: 25783 - protein, 6 aa, Artificial sequence
  Protein classification predicting sequence
VIEAGF

SEQ ID NO: 25784 - protein, 10 aa, Artificial sequence
  Protein classification predicting sequence
VQTAVDAGAT

SEQ ID NO: 25785 - protein, 10 aa, Artificial sequence
  Protein classification predicting sequence
MVLGRHSGRA

SEQ ID NO: 25786 - protein, 12 aa, Artificial sequence
  Protein classification predicting sequence
LPLGKLSGKHAF

SEQ ID NO: 25787 - protein, 7 aa, Artificial sequence
  Protein classification predicting sequence
RMEEMGY

SEQ ID NO: 25788 - protein, 8 aa, Artificial sequence
  Protein classification predicting sequence
DAQAEVHV

SEQ ID NO: 25789 - protein, 8 aa, Artificial sequence
  Protein classification predicting sequence
DLGLAVAN

SEQ ID NO: 25790 - protein, 6 aa, Artificial sequence
  Protein classification predicting sequence
SGRNAF

SEQ ID NO: 25791 - protein, 7 aa, Artificial sequence
  Protein classification predicting sequence
QCRPELI

SEQ ID NO: 25792 - protein, 8 aa, Artificial sequence
  Protein classification predicting sequence
HMEYKLKM

SEQ ID NO: 25793 - protein, 8 aa, Artificial sequence
  Protein classification predicting sequence
AVANSLAA

SEQ ID NO: 25794 - protein, 10 aa, Artificial sequence
  Protein classification predicting sequence
GVDVIEAGFP

SEQ ID NO: 25795 - protein, 14 aa, Artificial sequence
  Protein classification predicting sequence
EIFDEDLHALVSDE

SEQ ID NO: 25796 - protein, 6 aa, Artificial sequence
  Protein classification predicting sequence
GDFESV

SEQ ID NO: 25797 - protein, 8 aa, Artificial sequence
  Protein classification predicting sequence
IHIFLATS

SEQ ID NO: 25798 - protein, 7 aa, Artificial sequence
  Protein classification predicting sequence
SAEDATR

SEQ ID NO: 25799 - protein, 6 aa, Artificial sequence
  Protein classification predicting sequence
SRVCAL

SEQ ID NO: 25800 - protein, 13 aa, Artificial sequence
  Protein classification predicting sequence
LKVAEAFRIHTFI

SEQ ID NO: 25801 - protein, 11 aa, Artificial sequence
  Protein classification predicting sequence
TINGIGERAGN

SEQ ID NO: 25802 - protein, 6 aa, Artificial sequence
  Protein classification predicting sequence
PESIGL

SEQ ID NO: 25803 - protein, 8 aa, Artificial sequence
  Protein classification predicting sequence
KNSRVCAL

SEQ ID NO: 25804 - protein, 13 aa, Artificial sequence
  Protein classification predicting sequence
RVPNIDKAIISVH

SEQ ID NO: 25805 - protein, 11 aa, Artificial sequence
  Protein classification predicting sequence
GERAGNCSLEE

SEQ ID NO: 25806 - protein, 7 aa, Artificial sequence
  Protein classification predicting sequence
RETYEIM

SEQ ID NO: 25807 - protein, 7 aa, Artificial sequence
  Protein classification predicting sequence
IHLEHKL

SEQ ID NO: 25808 - protein, 8 aa, Artificial sequence
  Protein classification predicting sequence
RSDPEFLY

SEQ ID NO: 25809 - protein, 5 aa, Artificial sequence
  Protein classification predicting sequence
NAFAH

SEQ ID NO: 25810 - protein, 16 aa, Artificial sequence
  Protein classification predicting sequence
NAFAHESGIHQDGVLK

SEQ ID NO: 25811 - protein, 27 aa, Artificial sequence
  Protein classification predicting sequence
LIFDTTLRDGEQSPGASLNLEEKLAIA

SEQ ID NO: 25812 - protein, 7 aa, Artificial sequence
  Protein classification predicting sequence
TTPSEFG

SEQ ID NO: 25813 - protein, 6 aa, Artificial sequence
  Protein classification predicting sequence
AIISVH

SEQ ID NO: 25814 - protein, 21 aa, Artificial sequence
  Protein classification predicting sequence
KNGARQLECTINGIGERAGNA

SEQ ID NO: 25815 - protein, 18 aa, Artificial sequence
  Protein classification predicting sequence
ISLGKLSGRSAVRARLEE

SEQ ID NO: 25816 - protein, 5 aa, Artificial sequence
  Protein classification predicting sequence
PIWCS

SEQ ID NO: 25817 - protein, 7 aa, Artificial sequence
  Protein classification predicting sequence
DLRDGNQ

SEQ ID NO: 25818 - protein, 7 aa, Artificial sequence
  Protein classification predicting sequence
LITRTFE

SEQ ID NO: 25819 - protein, 7 aa, Artificial sequence
  Protein classification predicting sequence
NLPATVE

SEQ ID NO: 25820 - protein, 7 aa, Artificial sequence
  Protein classification predicting sequence
YADQIEW

SEQ ID NO: 25821 - protein, 15 aa, Artificial sequence
  Protein classification predicting sequence
YEAVIRVNSQSGKGG

SEQ ID NO: 25822 - protein, 6 aa, Artificial sequence
  Protein classification predicting sequence
APIWCS

SEQ ID NO: 25823 - protein, 14 aa, Artificial sequence
  Protein classification predicting sequence
EGCLFGNGERTGNV

SEQ ID NO: 25824 - protein, 9 aa, Artificial sequence
  Protein classification predicting sequence
NSQSGKGGI

SEQ ID NO: 25825 - protein, 8 aa, Artificial sequence
  Protein classification predicting sequence
ASQTDFDF

SEQ ID NO: 25826 - protein, 8 aa, Artificial sequence
  Protein classification predicting sequence
INVPDTVG

SEQ ID NO: 25827 - protein, 7 aa, Artificial sequence
  Protein classification predicting sequence
TPNIYAD

SEQ ID NO: 25828 - protein, 12 aa, Artificial sequence
  Protein classification predicting sequence
LFGNGERTGNVD

SEQ ID NO: 25829 - protein, 6 aa, Artificial sequence
  Protein classification predicting sequence
DYSEHS

SEQ ID NO: 25830 - protein, 7 aa, Artificial sequence
  Protein classification predicting sequence
VTLALNM

SEQ ID NO: 25831 - protein, 13 aa, Artificial sequence
  Protein classification predicting sequence
VPYLPIDPRDVGR

SEQ ID NO: 25832 - protein, 7 aa, Artificial sequence
  Protein classification predicting sequence
NLPRNLQ

SEQ ID NO: 25833 - protein, 14 aa, Artificial sequence
  Protein classification predicting sequence
IFDTTLRDGEQSPG

SEQ ID NO: 25834 - protein, 9 aa, Artificial sequence
  Protein classification predicting sequence
RIHVFLATS

SEQ ID NO: 25835 - protein, 6 aa, Artificial sequence
  Protein classification predicting sequence
DDVEFS

SEQ ID NO: 25836 - protein, 13 aa, Artificial sequence
  Protein classification predicting sequence
ECTINGIGERAGN

SEQ ID NO: 25837 - protein, 7 aa, Artificial sequence
  Protein classification predicting sequence
KEKLQIA

SEQ ID NO: 25838 - protein, 10 aa, Artificial sequence
  Protein classification predicting sequence
NGIGERAGNC

SEQ ID NO: 25839 - protein, 7 aa, Artificial sequence
  Protein classification predicting sequence
EIWRTSQ

SEQ ID NO: 25840 - protein, 20 aa, Artificial sequence
  Protein classification predicting sequence
KQQEEPEHFRLDYFSVQSGS

SEQ ID NO: 25841 - protein, 13 aa, Artificial sequence
  Protein classification predicting sequence
KAEAANGNGPVDA

SEQ ID NO: 25842 - protein, 8 aa, Artificial sequence
  Protein classification predicting sequence
YQAINRIT

SEQ ID NO: 25843 - protein, 30 aa, Artificial sequence
  Protein classification predicting sequence
AFRIHTFIATSPMHIATKLRSTLDEVIERA

SEQ ID NO: 25844 - protein, 44 aa, Artificial sequence
  Protein classification predicting sequence
TINIPDTVGYTMPFEFAGIISGLYERVPNIDKAIISVHTHDDLG

SEQ ID NO: 25845 - protein, 30 aa, Artificial sequence
  Protein classification predicting sequence
AVGNSLAAVHAGARQVEGAMNGIGERAGNC

SEQ ID NO: 25846 - protein, 18 aa, Artificial sequence
  Protein classification predicting sequence
SLHPHNDRGTAVAAAELG

SEQ ID NO: 25847 - protein, 7 aa, Artificial sequence
  Protein classification predicting sequence
VHPRHPY

SEQ ID NO: 25848 - protein, 14 aa, Artificial sequence
  Protein classification predicting sequence
FRIHTFISTSTIHV

SEQ ID NO: 25849 - protein, 13 aa, Artificial sequence
  Protein classification predicting sequence
IIQTLFNRVPNID

SEQ ID NO: 25850 - protein, 14 aa, Artificial sequence
  Protein classification predicting sequence
NGIGERAGNCSLEE

SEQ ID NO: 25851 - protein, 9 aa, Artificial sequence
  Protein classification predicting sequence
HSSGIHQDG

SEQ ID NO: 25852 - protein, 11 aa, Artificial sequence
  Protein classification predicting sequence
YEIMTPESIGL

SEQ ID NO: 25853 - protein, 9 aa, Artificial sequence
  Protein classification predicting sequence
FHGVGLATD

SEQ ID NO: 25854 - protein, 11 aa, Artificial sequence
  Protein classification predicting sequence
GKDALGQVDIV

SEQ ID NO: 25855 - protein, 8 aa, Artificial sequence
  Protein classification predicting sequence
FIATSPIH

SEQ ID NO: 25856 - protein, 14 aa, Artificial sequence
  Protein classification predicting sequence
IDKEAQIDLFKQFK

SEQ ID NO: 25857 - protein, 8 aa, Artificial sequence
  Protein classification predicting sequence
EAGFPASS

SEQ ID NO: 25858 - protein, 15 aa, Artificial sequence
  Protein classification predicting sequence
EAGFPASSTGSFKSV

SEQ ID NO: 25859 - protein, 18 aa, Artificial sequence
  Protein classification predicting sequence
VHVFIATSPIHLEHKLKM

SEQ ID NO: 25860 - protein, 11 aa, Artificial sequence
  Protein classification predicting sequence
NSLAAIEGGAR

SEQ ID NO: 25861 - protein, 12 aa, Artificial sequence
  Protein classification predicting sequence
TVNGIGERAGNA

SEQ ID NO: 25862 - protein, 6 aa, Artificial sequence
  Protein classification predicting sequence
LFKQFK

SEQ ID NO: 25863 - protein, 10 aa, Artificial sequence
  Protein classification predicting sequence
VSDRDIHAII

SEQ ID NO: 25864 - protein, 7 aa, Artificial sequence
  Protein classification predicting sequence
LQLQYVS

SEQ ID NO: 25865 - protein, 8 aa, Artificial sequence
  Protein classification predicting sequence
GLQSAVVV

SEQ ID NO: 25866 - protein, 7 aa, Artificial sequence
  Protein classification predicting sequence
ELIDYRI

SEQ ID NO: 25867 - protein, 26 aa, Artificial sequence
  Protein classification predicting sequence
HIQIFDTTLRDGEQTPGVNFTFDERL

SEQ ID NO: 25868 - protein, 26 aa, Artificial sequence
  Protein classification predicting sequence
TLTTTAVCGLARCKKSDIDAVYEATK

SEQ ID NO: 25869 - protein, 27 aa, Artificial sequence
  Protein classification predicting sequence
NSLAAIEGGARRIEGTVNGIGERAGNA

SEQ ID NO: 25870 - protein, 60 aa, Artificial sequence
  Protein classification predicting sequence
NLEETKKTSDLISRYAGIRVPRNKAIVGQNAFSHESGIHQDGVLKHRETYEIMTPQLVGV

SEQ ID NO: 25871 - protein, 21 aa, Artificial sequence
  Protein classification predicting sequence
QDSSIGTGSIVAIYNAVDRIF

SEQ ID NO: 25872 - protein, 8 aa, Artificial sequence
  Protein classification predicting sequence
KEIEVGFP

SEQ ID NO: 25873 - protein, 8 aa, Artificial sequence
  Protein classification predicting sequence
DVGRSYEA

SEQ ID NO: 25874 - protein, 10 aa, Artificial sequence
  Protein classification predicting sequence
LPRRMQIEFS

SEQ ID NO: 25875 - protein, 7 aa, Artificial sequence
  Protein classification predicting sequence
IDEIRRT

SEQ ID NO: 25876 - protein, 7 aa, Artificial sequence
  Protein classification predicting sequence
GPVDAVY

SEQ ID NO: 25877 - protein, 14 aa, Artificial sequence
  Protein classification predicting sequence
ECTINGIGERAGNA

SEQ ID NO: 25878 - protein, 10 aa, Artificial sequence
  Protein classification predicting sequence
ADTDVVVAAA

SEQ ID NO: 25879 - protein, 8 aa, Artificial sequence
  Protein classification predicting sequence
VEFSAEDA

SEQ ID NO: 25880 - protein, 12 aa, Artificial sequence
  Protein classification predicting sequence
HESGIHQDGVLK

SEQ ID NO: 25881 - protein, 16 aa, Artificial sequence
  Protein classification predicting sequence
QVIIFDTTLRDGEQAL

SEQ ID NO: 25882 - protein, 38 aa, Artificial sequence
  Protein classification predicting sequence
QVIIFDTTLRDGEQALSASLTVKEKLQIAYALERLGVD

SEQ ID NO: 25883 - protein, 8 aa, Artificial sequence
  Protein classification predicting sequence
AIQAGARQ

SEQ ID NO: 25884 - protein, 6 aa, Artificial sequence
  Protein classification predicting sequence
QAGARQ

SEQ ID NO: 25885 - protein, 8 aa, Artificial sequence
  Protein classification predicting sequence
AGARQVEG

SEQ ID NO: 25886 - protein, 17 aa, Artificial sequence
  Protein classification predicting sequence
LEEIAMIIKTRQELLGV

SEQ ID NO: 25887 - protein, 17 aa, Artificial sequence
  Protein classification predicting sequence
TSTIHVQDKLRRSYDDV

SEQ ID NO: 25888 - protein, 13 aa, Artificial sequence
  Protein classification predicting sequence
EGTINGIGERAGN

SEQ ID NO: 25889 - protein, 6 aa, Artificial sequence
  Protein classification predicting sequence
VGANAF

SEQ ID NO: 25890 - protein, 19 aa, Artificial sequence
  Protein classification predicting sequence
CEAAVGNGPVDALYQCIYR

SEQ ID NO: 25891 - protein, 8 aa, Artificial sequence
  Protein classification predicting sequence
NIPDTVGY

SEQ ID NO: 25892 - protein, 8 aa, Artificial sequence
  Protein classification predicting sequence
GARQVECT

SEQ ID NO: 25893 - protein, 7 aa, Artificial sequence
  Protein classification predicting sequence
LGVDIIE

SEQ ID NO: 25894 - protein, 11 aa, Artificial sequence
  Protein classification predicting sequence
NAFAHESGIHQ

SEQ ID NO: 25895 - protein, 14 aa, Artificial sequence
  Protein classification predicting sequence
APRWLSTDLRDGNQ

SEQ ID NO: 25896 - protein, 8 aa, Artificial sequence
  Protein classification predicting sequence
AGADRVEG

SEQ ID NO: 25897 - protein, 26 aa, Artificial sequence
  Protein classification predicting sequence
RVPNIDKAIISVHCHDDLGMSVANSI

SEQ ID NO: 25898 - protein, 30 aa, Artificial sequence
  Protein classification predicting sequence
AFAHSSGIHQDGVLKNRENYEIMTPESIGL

SEQ ID NO: 25899 - protein, 7 aa, Artificial sequence
  Protein classification predicting sequence
KQQEEPE

SEQ ID NO: 25900 - protein, 11 aa, Artificial sequence
  Protein classification predicting sequence
RLDYFSVQSGS

SEQ ID NO: 25901 - protein, 10 aa, Artificial sequence
  Protein classification predicting sequence
VHVLNNIWRA

SEQ ID NO: 25902 - protein, 6 aa, Artificial sequence
  Protein classification predicting sequence
YPHTQD

SEQ ID NO: 25903 - protein, 7 aa, Artificial sequence
  Protein classification predicting sequence
PIEATER

SEQ ID NO: 25904 - protein, 12 aa, Artificial sequence
  Protein classification predicting sequence
TLSYGMFENKRN

SEQ ID NO: 25905 - protein, 19 aa, Artificial sequence
  Protein classification predicting sequence
FIESGRKWFCHVDDDNYVN

SEQ ID NO: 25906 - protein, 7 aa, Artificial sequence
  Protein classification predicting sequence
DPSRFRS

SEQ ID NO: 25907 - protein, 9 aa, Artificial sequence
  Protein classification predicting sequence
LYPDTPWCP

SEQ ID NO: 25908 - protein, 7 aa, Artificial sequence
  Protein classification predicting sequence
FFGESMF

SEQ ID NO: 25909 - protein, 9 aa, Artificial sequence
  Protein classification predicting sequence
GGLYGVSLG

SEQ ID NO: 25910 - protein, 8 aa, Artificial sequence
  Protein classification predicting sequence
AFFGESMF

SEQ ID NO: 25911 - protein, 6 aa, Artificial sequence
  Protein classification predicting sequence
FFGESM

SEQ ID NO: 25912 - protein, 6 aa, Artificial sequence
  Protein classification predicting sequence
PNGLLA

SEQ ID NO: 25913 - protein, 9 aa, Artificial sequence
  Protein classification predicting sequence
GIFPWFSPG

SEQ ID NO: 25914 - protein, 7 aa, Artificial sequence
  Protein classification predicting sequence
PILWWSP

SEQ ID NO: 25915 - protein, 7 aa, Artificial sequence
  Protein classification predicting sequence
GIFPWFS

SEQ ID NO: 25916 - protein, 7 aa, Artificial sequence
  Protein classification predicting sequence
EPNGLLA

SEQ ID NO: 25917 - protein, 6 aa, Artificial sequence
  Protein classification predicting sequence
GIFPWF

SEQ ID NO: 25918 - protein, 8 aa, Artificial sequence
  Protein classification predicting sequence
LWWSPDPR

SEQ ID NO: 25919 - protein, 18 aa, Artificial sequence
  Protein classification predicting sequence
GTLFCGESMFSRMENASK

SEQ ID NO: 25920 - protein, 6 aa, Artificial sequence
  Protein classification predicting sequence
DCQVLN

SEQ ID NO: 25921 - protein, 7 aa, Artificial sequence
  Protein classification predicting sequence
HTASLGA

SEQ ID NO: 25922 - protein, 7 aa, Artificial sequence
  Protein classification predicting sequence
LVGGLYG

SEQ ID NO: 25923 - protein, 6 aa, Artificial sequence
  Protein classification predicting sequence
LHISRS

SEQ ID NO: 25924 - protein, 26 aa, Artificial sequence
  Protein classification predicting sequence
GIFPWFSPGDPILWWSPDPRAVLWPE

SEQ ID NO: 25925 - protein, 8 aa, Artificial sequence
  Protein classification predicting sequence
SRSMKRFH

SEQ ID NO: 25926 - protein, 8 aa, Artificial sequence
  Protein classification predicting sequence
EGTWITRG

SEQ ID NO: 25927 - protein, 9 aa, Artificial sequence
  Protein classification predicting sequence
ELVGGMYGV

SEQ ID NO: 25928 - protein, 12 aa, Artificial sequence
  Protein classification predicting sequence
ENASKTALLVFC

SEQ ID NO: 25929 - protein, 8 aa, Artificial sequence
  Protein classification predicting sequence
EIPRRDYL

SEQ ID NO: 25930 - protein, 9 aa, Artificial sequence
  Protein classification predicting sequence
GHAHSIEVW

SEQ ID NO: 25931 - protein, 6 aa, Artificial sequence
  Protein classification predicting sequence
GESMFS

SEQ ID NO: 25932 - protein, 9 aa, Artificial sequence
  Protein classification predicting sequence
LHELGHAHS

SEQ ID NO: 25933 - protein, 8 aa, Artificial sequence
  Protein classification predicting sequence
LWWSPNPR

SEQ ID NO: 25934 - protein, 10 aa, Artificial sequence
  Protein classification predicting sequence
AYQRGIFPWF

SEQ ID NO: 25935 - protein, 9 aa, Artificial sequence
  Protein classification predicting sequence
ILWWSPDPR

SEQ ID NO: 25936 - protein, 13 aa, Artificial sequence
  Protein classification predicting sequence
GESMFSRADNASK

SEQ ID NO: 25937 - protein, 10 aa, Artificial sequence
  Protein classification predicting sequence
PRNVLIPRTK

SEQ ID NO: 25938 - protein, 9 aa, Artificial sequence
  Protein classification predicting sequence
NHRSDIDWL

SEQ ID NO: 25939 - protein, 13 aa, Artificial sequence
  Protein classification predicting sequence
FWLALFVEGTRFT

SEQ ID NO: 25940 - protein, 17 aa, Artificial sequence
  Protein classification predicting sequence
PRNVLIPRTKGFVSAVS

SEQ ID NO: 25941 - protein, 13 aa, Artificial sequence
  Protein classification predicting sequence
GWILAQRSGCLGS

SEQ ID NO: 25942 - protein, 20 aa, Artificial sequence
  Protein classification predicting sequence
LAVMKKSSKFLPVIGWSMWF

SEQ ID NO: 25943 - protein, 18 aa, Artificial sequence
  Protein classification predicting sequence
DFPRPFWLALFVEGTRFT

SEQ ID NO: 25944 - protein, 7 aa, Artificial sequence
  Protein classification predicting sequence
FVPAIYD

SEQ ID NO: 25945 - protein, 11 aa, Artificial sequence
  Protein classification predicting sequence
FVAKDALLDKH

SEQ ID NO: 25946 - protein, 6 aa, Artificial sequence
  Protein classification predicting sequence
HVAHDC

SEQ ID NO: 25947 - protein, 7 aa, Artificial sequence
  Protein classification predicting sequence
AHDCTVG

SEQ ID NO: 25948 - protein, 8 aa, Artificial sequence
  Protein classification predicting sequence
FIGGLAAV

SEQ ID NO: 25949 - protein, 7 aa, Artificial sequence
  Protein classification predicting sequence
GLKRRGF

SEQ ID NO: 25950 - protein, 11 aa, Artificial sequence
  Protein classification predicting sequence
IHPTAIVEDGA

SEQ ID NO: 25951 - protein, 11 aa, Artificial sequence
  Protein classification predicting sequence
VVVKSYAYIDG

SEQ ID NO: 25952 - protein, 7 aa, Artificial sequence
  Protein classification predicting sequence
TVIGPHV

SEQ ID NO: 25953 - protein, 8 aa, Artificial sequence
  Protein classification predicting sequence
QDLKYAGE

SEQ ID NO: 25954 - protein, 7 aa, Artificial sequence
  Protein classification predicting sequence
ATLAGHV

SEQ ID NO: 25955 - protein, 6 aa, Artificial sequence
  Protein classification predicting sequence
QDVPPY

SEQ ID NO: 25956 - protein, 7 aa, Artificial sequence
  Protein classification predicting sequence
HPTAIVE

SEQ ID NO: 25957 - protein, 7 aa, Artificial sequence
  Protein classification predicting sequence
QDVPPYV

SEQ ID NO: 25958 - protein, 6 aa, Artificial sequence
  Protein classification predicting sequence
TLAGHV

SEQ ID NO: 25959 - protein, 10 aa, Artificial sequence
  Protein classification predicting sequence
MINAHIAHDC

SEQ ID NO: 25960 - protein, 6 aa, Artificial sequence
  Protein classification predicting sequence
HIAHDC

SEQ ID NO: 25961 - protein, 8 aa, Artificial sequence
  Protein classification predicting sequence
EGLKRRGF

SEQ ID NO: 25962 - protein, 10 aa, Artificial sequence
  Protein classification predicting sequence
YKLIYRSGKT

SEQ ID NO: 25963 - protein, 7 aa, Artificial sequence
  Protein classification predicting sequence
DNEIYQF

SEQ ID NO: 25964 - protein, 11 aa, Artificial sequence
  Protein classification predicting sequence
SIGEVNQDLKY

SEQ ID NO: 25965 - protein, 7 aa, Artificial sequence
  Protein classification predicting sequence
YRSGKTL

SEQ ID NO: 25966 - protein, 7 aa, Artificial sequence
  Protein classification predicting sequence
SHVVVKG

SEQ ID NO: 25967 - protein, 7 aa, Artificial sequence
  Protein classification predicting sequence
TKIGRDN

SEQ ID NO: 25968 - protein, 16 aa, Artificial sequence
  Protein classification predicting sequence
HVMVGGCSGVAQDVPP

SEQ ID NO: 25969 - protein, 6 aa, Artificial sequence
  Protein classification predicting sequence
NRIFQF

SEQ ID NO: 25970 - protein, 7 aa, Artificial sequence
  Protein classification predicting sequence
HQFCHIG

SEQ ID NO: 25971 - protein, 9 aa, Artificial sequence
  Protein classification predicting sequence
IHPTAVIDP

SEQ ID NO: 25972 - protein, 8 aa, Artificial sequence
  Protein classification predicting sequence
GDRNTIRE

SEQ ID NO: 25973 - protein, 5 aa, Artificial sequence
  Protein classification predicting sequence
IGPFC

SEQ ID NO: 25974 - protein, 7 aa, Artificial sequence
  Protein classification predicting sequence
VGNNNLF

SEQ ID NO: 25975 - protein, 15 aa, Artificial sequence
  Protein classification predicting sequence
IGANAHIGPFCIVGP

SEQ ID NO: 25976 - protein, 69 aa, Artificial sequence
  Protein classification predicting sequence
TKIGRDNEIYQFASIGEVNQDLKYAGEPTRVEIGDRNRIRESVTIHRGTVQGGGLTKVGSDNLLMINAH

SEQ ID NO: 25977 - protein, 10 aa, Artificial sequence
  Protein classification predicting sequence
MINAHVAHDC

SEQ ID NO: 25978 - protein, 10 aa, Artificial sequence
  Protein classification predicting sequence
ANNATLAGHV

SEQ ID NO: 25979 - protein, 7 aa, Artificial sequence
  Protein classification predicting sequence
VEIGEGT

SEQ ID NO: 25980 - protein, 6 aa, Artificial sequence
  Protein classification predicting sequence
HRGTVQ

SEQ ID NO: 25981 - protein, 7 aa, Artificial sequence
  Protein classification predicting sequence
NAHIAHD

SEQ ID NO: 25982 - protein, 6 aa, Artificial sequence
  Protein classification predicting sequence
TIHRGT

SEQ ID NO: 25983 - protein, 6 aa, Artificial sequence
  Protein classification predicting sequence
AHDCVI

SEQ ID NO: 25984 - protein, 6 aa, Artificial sequence
  Protein classification predicting sequence
LKSHVV

SEQ ID NO: 25985 - protein, 9 aa, Artificial sequence
  Protein classification predicting sequence
LKSHVVVNG

SEQ ID NO: 25986 - protein, 13 aa, Artificial sequence
  Protein classification predicting sequence
TLDEVKPEIAELA

SEQ ID NO: 25987 - protein, 9 aa, Artificial sequence
  Protein classification predicting sequence
DFFARSTRG

SEQ ID NO: 25988 - protein, 14 aa, Artificial sequence
  Protein classification predicting sequence
NQDLKYAGEPTRVE

SEQ ID NO: 25989 - protein, 8 aa, Artificial sequence
  Protein classification predicting sequence
AIIGGMTA

SEQ ID NO: 25990 - protein, 11 aa, Artificial sequence
  Protein classification predicting sequence
VFVGIDAPDFN

SEQ ID NO: 25991 - protein, 8 aa, Artificial sequence
  Protein classification predicting sequence
GIDAPDFN

SEQ ID NO: 25992 - protein, 7 aa, Artificial sequence
  Protein classification predicting sequence
PSIWAWR

SEQ ID NO: 25993 - protein, 7 aa, Artificial sequence
  Protein classification predicting sequence
AGEPSGD

SEQ ID NO: 25994 - protein, 9 aa, Artificial sequence
  Protein classification predicting sequence
PAYSLPNII

SEQ ID NO: 25995 - protein, 7 aa, Artificial sequence
  Protein classification predicting sequence
AGEASGD

SEQ ID NO: 25996 - protein, 7 aa, Artificial sequence
  Protein classification predicting sequence
YKVAPLT

SEQ ID NO: 25997 - protein, 7 aa, Artificial sequence
  Protein classification predicting sequence
IALVAGE

SEQ ID NO: 25998 - protein, 12 aa, Artificial sequence
  Protein classification predicting sequence
LFDMEELAVMGL

SEQ ID NO: 25999 - protein, 11 aa, Artificial sequence
  Protein classification predicting sequence
CRFIGHTMADA

SEQ ID NO: 26000 - protein, 6 aa, Artificial sequence
  Protein classification predicting sequence
PMVVGY

SEQ ID NO: 26001 - protein, 7 aa, Artificial sequence
  Protein classification predicting sequence
SLPNLLA

SEQ ID NO: 26002 - protein, 8 aa, Artificial sequence
  Protein classification predicting sequence
TIALVAGE

SEQ ID NO: 26003 - protein, 19 aa, Artificial sequence
  Protein classification predicting sequence
VLAFLPFEKAFYDKFNVPC

SEQ ID NO: 26004 - protein, 13 aa, Artificial sequence
  Protein classification predicting sequence
PDVFVGIDAPDFN

SEQ ID NO: 26005 - protein, 7 aa, Artificial sequence
  Protein classification predicting sequence
FVGHPMA

SEQ ID NO: 26006 - protein, 7 aa, Artificial sequence
  Protein classification predicting sequence
ALLPGSR

SEQ ID NO: 26007 - protein, 8 aa, Artificial sequence
  Protein classification predicting sequence
LAKRLVKT

SEQ ID NO: 26008 - protein, 18 aa, Artificial sequence
  Protein classification predicting sequence
AGETSGDILGAGLIRALK

SEQ ID NO: 26009 - protein, 12 aa, Artificial sequence
  Protein classification predicting sequence
VPNARFVGVAGP

SEQ ID NO: 26010 - protein, 7 aa, Artificial sequence
  Protein classification predicting sequence
VEVLGRL

SEQ ID NO: 26011 - protein, 21 aa, Artificial sequence
  Protein classification predicting sequence
TIHYVSPSVWAWRQKRVFKIG

SEQ ID NO: 26012 - protein, 16 aa, Artificial sequence
  Protein classification predicting sequence
EVEMLSADFLKTAQLL

SEQ ID NO: 26013 - protein, 31 aa, Artificial sequence
  Protein classification predicting sequence
ASDAALLASGTAALECMLAKCPMVVGYRMKP

SEQ ID NO: 26014 - protein, 7 aa, Artificial sequence
  Protein classification predicting sequence
GIDAPDF

SEQ ID NO: 26015 - protein, 11 aa, Artificial sequence
  Protein classification predicting sequence
VMGLVEVLGRL

SEQ ID NO: 26016 - protein, 6 aa, Artificial sequence
  Protein classification predicting sequence
DAPDFN

SEQ ID NO: 26017 - protein, 7 aa, Artificial sequence
  Protein classification predicting sequence
AVLPGSR

SEQ ID NO: 26018 - protein, 8 aa, Artificial sequence
  Protein classification predicting sequence
SGTATLEA

SEQ ID NO: 26019 - protein, 27 aa, Artificial sequence
  Protein classification predicting sequence
QRPLTIALVAGETSGDILGAGLIRALK

SEQ ID NO: 26020 - protein, 28 aa, Artificial sequence
  Protein classification predicting sequence
YVSLPNLLAGRELVKELLQEECEPQKLA

SEQ ID NO: 26021 - protein, 35 aa, Artificial sequence
  Protein classification predicting sequence
ALLPLLANGKTSHAMHDTFRELHQQIRCNADEQAA

SEQ ID NO: 26022 - protein, 9 aa, Artificial sequence
  Protein classification predicting sequence
SGDILGAGL

SEQ ID NO: 26023 - protein, 7 aa, Artificial sequence
  Protein classification predicting sequence
PNARFVG

SEQ ID NO: 26024 - protein, 13 aa, Artificial sequence
  Protein classification predicting sequence
MEELAVMGIVEVL

SEQ ID NO: 26025 - protein, 13 aa, Artificial sequence
  Protein classification predicting sequence
TVHYVSPSVWAWR

SEQ ID NO: 26026 - protein, 13 aa, Artificial sequence
  Protein classification predicting sequence
LVNQKRREQFEQA

SEQ ID NO: 26027 - protein, 7 aa, Artificial sequence
  Protein classification predicting sequence
KRREQFE

SEQ ID NO: 26028 - protein, 20 aa, Artificial sequence
  Protein classification predicting sequence
NPPDVFVGIDAPDFNLRLEL

SEQ ID NO: 26029 - protein, 12 aa, Artificial sequence
  Protein classification predicting sequence
HYVSPSVWAWRQ

SEQ ID NO: 26030 - protein, 12 aa, Artificial sequence
  Protein classification predicting sequence
WLAVLPGSRGSE

SEQ ID NO: 26031 - protein, 9 aa, Artificial sequence
  Protein classification predicting sequence
LGFVVALVN

SEQ ID NO: 26032 - protein, 12 aa, Artificial sequence
  Protein classification predicting sequence
LVDDTARNVITA

SEQ ID NO: 26033 - protein, 11 aa, Artificial sequence
  Protein classification predicting sequence
WIRKDADQQAA

SEQ ID NO: 26034 - protein, 6 aa, Artificial sequence
  Protein classification predicting sequence
YVSLPN

SEQ ID NO: 26035 - protein, 6 aa, Artificial sequence
  Protein classification predicting sequence
ELAVMG

SEQ ID NO: 26036 - protein, 6 aa, Artificial sequence
  Protein classification predicting sequence
QDDCTP

SEQ ID NO: 26037 - protein, 8 aa, Artificial sequence
  Protein classification predicting sequence
ASGTATLE

SEQ ID NO: 26038 - protein, 6 aa, Artificial sequence
  Protein classification predicting sequence
KRPMVV

SEQ ID NO: 26039 - protein, 19 aa, Artificial sequence
  Protein classification predicting sequence
MQAEGCEAWYEMEELAVMG

SEQ ID NO: 26040 - protein, 18 aa, Artificial sequence
  Protein classification predicting sequence
PDVFVGIDAPDFNITLEG

SEQ ID NO: 26041 - protein, 13 aa, Artificial sequence
  Protein classification predicting sequence
VLAFLPFEKAFYD

SEQ ID NO: 26042 - protein, 10 aa, Artificial sequence
  Protein classification predicting sequence
EVEMLSADFL

SEQ ID NO: 26043 - protein, 11 aa, Artificial sequence
  Protein classification predicting sequence
APDLSVHLLDG

SEQ ID NO: 26044 - protein, 37 aa, Artificial sequence
  Protein classification predicting sequence
ASDAALLASGTAALECMLAKCPMVVGYRMKPFTFWLA

SEQ ID NO: 26045 - protein, 13 aa, Artificial sequence
  Protein classification predicting sequence
ADEQAAQAVLELA

SEQ ID NO: 26046 - protein, 8 aa, Artificial sequence
  Protein classification predicting sequence
SEAPPFWW

SEQ ID NO: 26047 - protein, 12 aa, Artificial sequence
  Protein classification predicting sequence
IIMDDGFQSARL

SEQ ID NO: 26048 - protein, 7 aa, Artificial sequence
  Protein classification predicting sequence
GGNGKTP

SEQ ID NO: 26049 - protein, 13 aa, Artificial sequence
  Protein classification predicting sequence
AWRAPVPVVVVGN

SEQ ID NO: 26050 - protein, 8 aa, Artificial sequence
  Protein classification predicting sequence
GVVSRGYG

SEQ ID NO: 26051 - protein, 6 aa, Artificial sequence
  Protein classification predicting sequence
DDGLQH

SEQ ID NO: 26052 - protein, 7 aa, Artificial sequence
  Protein classification predicting sequence
PAGPMRE

SEQ ID NO: 26053 - protein, 9 aa, Artificial sequence
  Protein classification predicting sequence
VGDEPLLLA

SEQ ID NO: 26054 - protein, 9 aa, Artificial sequence
  Protein classification predicting sequence
LPAGPLREP

SEQ ID NO: 26055 - protein, 5 aa, Artificial sequence
  Protein classification predicting sequence
NWWYL

SEQ ID NO: 26056 - protein, 7 aa, Artificial sequence
  Protein classification predicting sequence
GDEPVLI

SEQ ID NO: 26057 - protein, 12 aa, Artificial sequence
  Protein classification predicting sequence
GGNGKTPVVVWL

SEQ ID NO: 26058 - protein, 8 aa, Artificial sequence
  Protein classification predicting sequence
LPAGPLRE

SEQ ID NO: 26059 - protein, 7 aa, Artificial sequence
  Protein classification predicting sequence
TEKDAVK

SEQ ID NO: 26060 - protein, 13 aa, Artificial sequence
  Protein classification predicting sequence
GGNGKTPVVIWLV

SEQ ID NO: 26061 - protein, 10 aa, Artificial sequence
  Protein classification predicting sequence
APVPVVVVGN

SEQ ID NO: 26062 - protein, 7 aa, Artificial sequence
  Protein classification predicting sequence
WLVEQLQ

SEQ ID NO: 26063 - protein, 12 aa, Artificial sequence
  Protein classification predicting sequence
TTAQAGDEPVLI

SEQ ID NO: 26064 - protein, 21 aa, Artificial sequence
  Protein classification predicting sequence
VIDGVRRFGNGWWLPAGPMRE

SEQ ID NO: 26065 - protein, 7 aa, Artificial sequence
  Protein classification predicting sequence
APVAVSP

SEQ ID NO: 26066 - protein, 7 aa, Artificial sequence
  Protein classification predicting sequence
PHAFPDH

SEQ ID NO: 26067 - protein, 8 aa, Artificial sequence
  Protein classification predicting sequence
QHYRLARD

SEQ ID NO: 26068 - protein, 6 aa, Artificial sequence
  Protein classification predicting sequence
VSRGYG

SEQ ID NO: 26069 - protein, 9 aa, Artificial sequence
  Protein classification predicting sequence
DDGLQHYRL

SEQ ID NO: 26070 - protein, 8 aa, Artificial sequence
  Protein classification predicting sequence
VGGTGKTP

SEQ ID NO: 26071 - protein, 7 aa, Artificial sequence
  Protein classification predicting sequence
GGTGKTP

SEQ ID NO: 26072 - protein, 10 aa, Artificial sequence
  Protein classification predicting sequence
IMDDGFQSAR

SEQ ID NO: 26073 - protein, 18 aa, Artificial sequence
  Protein classification predicting sequence
VICVGNCSVGGTGKTQIV

SEQ ID NO: 26074 - protein, 11 aa, Artificial sequence
  Protein classification predicting sequence
IIVDDFLQNPY

SEQ ID NO: 26075 - protein, 17 aa, Artificial sequence
  Protein classification predicting sequence
HKDFTIVSVDSQRLFGN

SEQ ID NO: 26076 - protein, 10 aa, Artificial sequence
  Protein classification predicting sequence
FLIPAGPLRQ

SEQ ID NO: 26077 - protein, 12 aa, Artificial sequence
  Protein classification predicting sequence
KNYFAFSGIGNP

SEQ ID NO: 26078 - protein, 9 aa, Artificial sequence
  Protein classification predicting sequence
GIGNPQRFF

SEQ ID NO: 26079 - protein, 7 aa, Artificial sequence
  Protein classification predicting sequence
RCDVAQL

SEQ ID NO: 26080 - protein, 9 aa, Artificial sequence
  Protein classification predicting sequence
KCVPLADHQ

SEQ ID NO: 26081 - protein, 19 aa, Artificial sequence
  Protein classification predicting sequence
GQTLVMTEKDAVKCRAFAE

SEQ ID NO: 26082 - protein, 28 aa, Artificial sequence
  Protein classification predicting sequence
IWSGESPLWRLLLPLSWLYGLVSGAIRL

SEQ ID NO: 26083 - protein, 27 aa, Artificial sequence
  Protein classification predicting sequence
KRAWRAPVPVVVVGNLTAGGNGKTPVV

SEQ ID NO: 26084 - protein, 7 aa, Artificial sequence
  Protein classification predicting sequence
DDGLQHY

SEQ ID NO: 26085 - protein, 9 aa, Artificial sequence
  Protein classification predicting sequence
YLLWPLLWP

SEQ ID NO: 26086 - protein, 9 aa, Artificial sequence
  Protein classification predicting sequence
PGVVSRGYG

SEQ ID NO: 26087 - protein, 8 aa, Artificial sequence
  Protein classification predicting sequence
DGVRRFGN

SEQ ID NO: 26088 - protein, 6 aa, Artificial sequence
  Protein classification predicting sequence
VVGNIT

SEQ ID NO: 26089 - protein, 16 aa, Artificial sequence
  Protein classification predicting sequence
VVGNITAGGNGKTPVV

SEQ ID NO: 26090 - protein, 6 aa, Artificial sequence
  Protein classification predicting sequence
NWWYLP

SEQ ID NO: 26091 - protein, 12 aa, Artificial sequence
  Protein classification predicting sequence
DDGLQHYRLARD

SEQ ID NO: 26092 - protein, 10 aa, Artificial sequence
  Protein classification predicting sequence
LLLPLSWLYG

SEQ ID NO: 26093 - protein, 8 aa, Artificial sequence
  Protein classification predicting sequence
TDDGLQHY

SEQ ID NO: 26094 - protein, 16 aa, Artificial sequence
  Protein classification predicting sequence
VASIRVDTVEDFAYGA

SEQ ID NO: 26095 - protein, 7 aa, Artificial sequence
  Protein classification predicting sequence
HYGIYLG

SEQ ID NO: 26096 - protein, 8 aa, Artificial sequence
  Protein classification predicting sequence
LASAVLGL

SEQ ID NO: 26097 - protein, 6 aa, Artificial sequence
  Protein classification predicting sequence
AARNCL

SEQ ID NO: 26098 - protein, 6 aa, Artificial sequence
  Protein classification predicting sequence
LPVKWM

SEQ ID NO: 26099 - protein, 6 aa, Artificial sequence
  Protein classification predicting sequence
LLWEIF

SEQ ID NO: 26100 - protein, 6 aa, Artificial sequence
  Protein classification predicting sequence
GEWWKA

SEQ ID NO: 26101 - protein, 9 aa, Artificial sequence
  Protein classification predicting sequence
RKDAERQLL

SEQ ID NO: 26102 - protein, 6 aa, Artificial sequence
  Protein classification predicting sequence
MAKGSL

SEQ ID NO: 26103 - protein, 11 aa, Artificial sequence
  Protein classification predicting sequence
LGAGQFGEVWM

SEQ ID NO: 26104 - protein, 8 aa, Artificial sequence
  Protein classification predicting sequence
GQFGEVWM

SEQ ID NO: 26105 - protein, 9 aa, Artificial sequence
  Protein classification predicting sequence
KTLKPGTMS

SEQ ID NO: 26106 - protein, 8 aa, Artificial sequence
  Protein classification predicting sequence
LWELLTGE

SEQ ID NO: 26107 - protein, 5 aa, Artificial sequence
  Protein classification predicting sequence
EECWD

SEQ ID NO: 26108 - protein, 10 aa, Artificial sequence
  Protein classification predicting sequence
IHRDLKSNNI

SEQ ID NO: 26109 - protein, 7 aa, Artificial sequence
  Protein classification predicting sequence
GEEVAVK

SEQ ID NO: 26110 - protein, 14 aa, Artificial sequence
  Protein classification predicting sequence
GFLEGLFGCLRPVW

SEQ ID NO: 26111 - protein, 7 aa, Artificial sequence
  Protein classification predicting sequence
IGKAYST

SEQ ID NO: 26112 - protein, 6 aa, Artificial sequence
  Protein classification predicting sequence
GSGAQG

SEQ ID NO: 26113 - protein, 16 aa, Artificial sequence
  Protein classification predicting sequence
ETDIKHLRKLKHPNII

SEQ ID NO: 26114 - protein, 13 aa, Artificial sequence
  Protein classification predicting sequence
FKGVCTQAPCYCI

SEQ ID NO: 26115 - protein, 11 aa, Artificial sequence
  Protein classification predicting sequence
GQLYEVLRAGR

SEQ ID NO: 26116 - protein, 19 aa, Artificial sequence
  Protein classification predicting sequence
GMNYLHLHKIIHRDLKSPN

SEQ ID NO: 26117 - protein, 8 aa, Artificial sequence
  Protein classification predicting sequence
CPDGFKIL

SEQ ID NO: 26118 - protein, 18 aa, Artificial sequence
  Protein classification predicting sequence
TPQETYFKSQAEWREEVK

SEQ ID NO: 26119 - protein, 11 aa, Artificial sequence
  Protein classification predicting sequence
HFEKIKSEGTC

SEQ ID NO: 26120 - protein, 14 aa, Artificial sequence
  Protein classification predicting sequence
SSEEEEGEVDSEVE

SEQ ID NO: 26121 - protein, 27 aa, Artificial sequence
  Protein classification predicting sequence
VKISDFGTSKELSDKSTKMSFAGTVAW

SEQ ID NO: 26122 - protein, 56 aa, Artificial sequence
  Protein classification predicting sequence
APEVIRNEPVSEKVDIWSFGVVLWELLTGEIPYKDVDSSAIIWGVGSNSLHLPVPS

SEQ ID NO: 26123 - protein, 30 aa, Artificial sequence
  Protein classification predicting sequence
RRREELRHALDIREHYERKLERANNLYMEL

SEQ ID NO: 26124 - protein, 8 aa, Artificial sequence
  Protein classification predicting sequence
RPSAEELL

SEQ ID NO: 26125 - protein, 6 aa, Artificial sequence
  Protein classification predicting sequence
HRDVKP

SEQ ID NO: 26126 - protein, 8 aa, Artificial sequence
  Protein classification predicting sequence
GSLYNVLH

SEQ ID NO: 26127 - protein, 6 aa, Artificial sequence
  Protein classification predicting sequence
KADIYS

SEQ ID NO: 26128 - protein, 13 aa, Artificial sequence
  Protein classification predicting sequence
ALTKNPKKRPTAE

SEQ ID NO: 26129 - protein, 7 aa, Artificial sequence
  Protein classification predicting sequence
PKKRPTA

SEQ ID NO: 26130 - protein, 6 aa, Artificial sequence
  Protein classification predicting sequence
LLQHPF

SEQ ID NO: 26131 - protein, 7 aa, Artificial sequence
  Protein classification predicting sequence
GITAIEL

SEQ ID NO: 26132 - protein, 9 aa, Artificial sequence
  Protein classification predicting sequence
MGACFSKVF

SEQ ID NO: 26133 - protein, 6 aa, Artificial sequence
  Protein classification predicting sequence
RLWWIP

SEQ ID NO: 26134 - protein, 7 aa, Artificial sequence
  Protein classification predicting sequence
YTGTHDN

SEQ ID NO: 26135 - protein, 7 aa, Artificial sequence
  Protein classification predicting sequence
RHPSYVG

SEQ ID NO: 26136 - protein, 7 aa, Artificial sequence
  Protein classification predicting sequence
YYWNSGM

SEQ ID NO: 26137 - protein, 8 aa, Artificial sequence
  Protein classification predicting sequence
YQVKRITV

SEQ ID NO: 26138 - protein, 7 aa, Artificial sequence
  Protein classification predicting sequence
HCLENPG

SEQ ID NO: 26139 - protein, 6 aa, Artificial sequence
  Protein classification predicting sequence
NEQHRF

SEQ ID NO: 26140 - protein, 7 aa, Artificial sequence
  Protein classification predicting sequence
LVLAADH

SEQ ID NO: 26141 - protein, 13 aa, Artificial sequence
  Protein classification predicting sequence
IILEPVGRNTAPA

SEQ ID NO: 26142 - protein, 7 aa, Artificial sequence
  Protein classification predicting sequence
YLGEDDI

SEQ ID NO: 26143 - protein, 10 aa, Artificial sequence
  Protein classification predicting sequence
TPYYVAPQVL

SEQ ID NO: 26144 - protein, 9 aa, Artificial sequence
  Protein classification predicting sequence
FLFQLLRGL

SEQ ID NO: 26145 - protein, 6 aa, Artificial sequence
  Protein classification predicting sequence
LRGLKY

SEQ ID NO: 26146 - protein, 38 aa, Artificial sequence
  Protein classification predicting sequence
QFMTEYVVTRWYRAPELLLCCDNYGTSIDVWSVGCIFA

SEQ ID NO: 26147 - protein, 9 aa, Artificial sequence
  Protein classification predicting sequence
WYRAPELLL

SEQ ID NO: 26148 - protein, 10 aa, Artificial sequence
  Protein classification predicting sequence
DVWSVGCIFA

SEQ ID NO: 26149 - protein, 11 aa, Artificial sequence
  Protein classification predicting sequence
DEQPHIGNYRL

SEQ ID NO: 26150 - protein, 13 aa, Artificial sequence
  Protein classification predicting sequence
SLQKLFREVRIMK

SEQ ID NO: 26151 - protein, 10 aa, Artificial sequence
  Protein classification predicting sequence
REIRKVLDAN

SEQ ID NO: 26152 - protein, 6 aa, Artificial sequence
  Protein classification predicting sequence
HQKSMS

SEQ ID NO: 26153 - protein, 27 aa, Artificial sequence
  Protein classification predicting sequence
VQWEMEVCKLPRLSLNGVRFKRISGTS

SEQ ID NO: 26154 - protein, 6 aa, Artificial sequence
  Protein classification predicting sequence
RCRNSI

SEQ ID NO: 26155 - protein, 33 aa, Artificial sequence
  Protein classification predicting sequence
ADEQPHIGNYRLLKTIGKGNFAKVKLARHILTG

SEQ ID NO: 26156 - protein, 8 aa, Artificial sequence
  Protein classification predicting sequence
VAIKIIDK

SEQ ID NO: 26157 - protein, 46 aa, Artificial sequence
  Protein classification predicting sequence
KIIDKTQLNPTSLQKLFREVRIMKILNHPNIVKLFEVIETEKTLYL

SEQ ID NO: 26158 - protein, 21 aa, Artificial sequence
  Protein classification predicting sequence
LNHPNIVKLFEVIETEKTLYL

SEQ ID NO: 26159 - protein, 6 aa, Artificial sequence
  Protein classification predicting sequence
LYLIME

SEQ ID NO: 26160 - protein, 25 aa, Artificial sequence
  Protein classification predicting sequence
MEYASGGEVFDYLVAHGRMKEKEAR

SEQ ID NO: 26161 - protein, 11 aa, Artificial sequence
  Protein classification predicting sequence
IVSAVQYCHQK

SEQ ID NO: 26162 - protein, 9 aa, Artificial sequence
  Protein classification predicting sequence
LVLNPIKRG

SEQ ID NO: 26163 - protein, 7 aa, Artificial sequence
  Protein classification predicting sequence
KRIDIMV

SEQ ID NO: 26164 - protein, 10 aa, Artificial sequence
  Protein classification predicting sequence
RPSSDLNNST

SEQ ID NO: 26165 - protein, 8 aa, Artificial sequence
  Protein classification predicting sequence
HKVQRSVS

SEQ ID NO: 26166 - protein, 8 aa, Artificial sequence
  Protein classification predicting sequence
GEVFDYLV

SEQ ID NO: 26167 - protein, 14 aa, Artificial sequence
  Protein classification predicting sequence
NIKIADFGFSNEFT

SEQ ID NO: 26168 - protein, 28 aa, Artificial sequence
  Protein classification predicting sequence
KLDTFCGSPPYAAPELFQGKKYDGPEVD

SEQ ID NO: 26169 - protein, 19 aa, Artificial sequence
  Protein classification predicting sequence
WSLGVILYTLVSGSLPFDG

SEQ ID NO: 26170 - protein, 15 aa, Artificial sequence
  Protein classification predicting sequence
NLKELRERVLRGKYR

SEQ ID NO: 26171 - protein, 9 aa, Artificial sequence
  Protein classification predicting sequence
PFYMSTDCE

SEQ ID NO: 26172 - protein, 8 aa, Artificial sequence
  Protein classification predicting sequence
MGYTREEI

SEQ ID NO: 26173 - protein, 9 aa, Artificial sequence
  Protein classification predicting sequence
RGAFGKVYL

SEQ ID NO: 26174 - protein, 7 aa, Artificial sequence
  Protein classification predicting sequence
LDDFLTL

SEQ ID NO: 26175 - protein, 51 aa, Artificial sequence
  Protein classification predicting sequence
GPFFYLPKMEHSREAKIWNSVFERAEKMAGIERGSIRATVLIETLPAVFQM

SEQ ID NO: 26176 - protein, 16 aa, Artificial sequence
  Protein classification predicting sequence
QHFMRSYSDLLIRTCH

SEQ ID NO: 26177 - protein, 9 aa, Artificial sequence
  Protein classification predicting sequence
GGMAAQIPI

SEQ ID NO: 26178 - protein, 12 aa, Artificial sequence
  Protein classification predicting sequence
ALELVRKDKLRE

SEQ ID NO: 26179 - protein, 17 aa, Artificial sequence
  Protein classification predicting sequence
AKLFVRPRGWHLPEAHI

SEQ ID NO: 26180 - protein, 8 aa, Artificial sequence
  Protein classification predicting sequence
GSVPLYNL

SEQ ID NO: 26181 - protein, 6 aa, Artificial sequence
  Protein classification predicting sequence
LYFFHN

SEQ ID NO: 26182 - protein, 8 aa, Artificial sequence
  Protein classification predicting sequence
GPYFYLPK

SEQ ID NO: 26183 - protein, 6 aa, Artificial sequence
  Protein classification predicting sequence
GHDGTW

SEQ ID NO: 26184 - protein, 7 aa, Artificial sequence
  Protein classification predicting sequence
FYLPKME

SEQ ID NO: 26185 - protein, 6 aa, Artificial sequence
  Protein classification predicting sequence
TVLIET

SEQ ID NO: 26186 - protein, 15 aa, Artificial sequence
  Protein classification predicting sequence
HSSGLNCGRWDYIFS

SEQ ID NO: 26187 - protein, 12 aa, Artificial sequence
  Protein classification predicting sequence
GLNCGRWDYIFS

SEQ ID NO: 26188 - protein, 26 aa, Artificial sequence
  Protein classification predicting sequence
YELRDHSVGLNCGRWDYIFSYVKTFQ

SEQ ID NO: 26189 - protein, 8 aa, Artificial sequence
  Protein classification predicting sequence
GSIRATVL

SEQ ID NO: 26190 - protein, 17 aa, Artificial sequence
  Protein classification predicting sequence
GLNCGRWDYIFSYVKTF

SEQ ID NO: 26191 - protein, 11 aa, Artificial sequence
  Protein classification predicting sequence
LDDFLTLDAYN

SEQ ID NO: 26192 - protein, 6 aa, Artificial sequence
  Protein classification predicting sequence
RVGIQY

SEQ ID NO: 26193 - protein, 12 aa, Artificial sequence
  Protein classification predicting sequence
HSAGLNCGRWDY

SEQ ID NO: 26194 - protein, 8 aa, Artificial sequence
  Protein classification predicting sequence
IRDDPKAN

SEQ ID NO: 26195 - protein, 16 aa, Artificial sequence
  Protein classification predicting sequence
EDAATAEISRVQNWQW

SEQ ID NO: 26196 - protein, 9 aa, Artificial sequence
  Protein classification predicting sequence
EILYELRDH

SEQ ID NO: 26197 - protein, 6 aa, Artificial sequence
  Protein classification predicting sequence
TCHRRG

SEQ ID NO: 26198 - protein, 8 aa, Artificial sequence
  Protein classification predicting sequence
LHGRSLLF

SEQ ID NO: 26199 - protein, 8 aa, Artificial sequence
  Protein classification predicting sequence
GNEVPEGI

SEQ ID NO: 26200 - protein, 7 aa, Artificial sequence
  Protein classification predicting sequence
RNVGHLM

SEQ ID NO: 26201 - protein, 10 aa, Artificial sequence
  Protein classification predicting sequence
EIPEGILDGV

SEQ ID NO: 26202 - protein, 15 aa, Artificial sequence
  Protein classification predicting sequence
NTLKMGIMDEERRTS

SEQ ID NO: 26203 - protein, 15 aa, Artificial sequence
  Protein classification predicting sequence
FINTGFLDRTGDEIH

SEQ ID NO: 26204 - protein, 12 aa, Artificial sequence
  Protein classification predicting sequence
TPWIKAYERNNV

SEQ ID NO: 26205 - protein, 12 aa, Artificial sequence
  Protein classification predicting sequence
AQIGKGMWAMPD

SEQ ID NO: 26206 - protein, 7 aa, Artificial sequence
  Protein classification predicting sequence
LGYVVRW

SEQ ID NO: 26207 - protein, 8 aa, Artificial sequence
  Protein classification predicting sequence
GCSKVPDI

SEQ ID NO: 26208 - protein, 7 aa, Artificial sequence
  Protein classification predicting sequence
QHMANWL

SEQ ID NO: 26209 - protein, 8 aa, Artificial sequence
  Protein classification predicting sequence
AAVDAEDK

SEQ ID NO: 26210 - protein, 6 aa, Artificial sequence
  Protein classification predicting sequence
EGIMDA

SEQ ID NO: 26211 - protein, 6 aa, Artificial sequence
  Protein classification predicting sequence
GMAPNT

SEQ ID NO: 26212 - protein, 14 aa, Artificial sequence
  Protein classification predicting sequence
GIMDEERRTTVNLK

SEQ ID NO: 26213 - protein, 7 aa, Artificial sequence
  Protein classification predicting sequence
HYHKVDV

SEQ ID NO: 26214 - protein, 12 aa, Artificial sequence
  Protein classification predicting sequence
GLMEDRATLRIS

SEQ ID NO: 26215 - protein, 8 aa, Artificial sequence
  Protein classification predicting sequence
QNAGDPAY

SEQ ID NO: 26216 - protein, 8 aa, Artificial sequence
  Protein classification predicting sequence
AGPQLVVP

SEQ ID NO: 26217 - protein, 9 aa, Artificial sequence
  Protein classification predicting sequence
YIVKPKMHG

SEQ ID NO: 26218 - protein, 7 aa, Artificial sequence
  Protein classification predicting sequence
MDEERRT

SEQ ID NO: 26219 - protein, 14 aa, Artificial sequence
  Protein classification predicting sequence
AQIGKGMWAMPDLM

SEQ ID NO: 26220 - protein, 7 aa, Artificial sequence
  Protein classification predicting sequence
ANWLRHG

SEQ ID NO: 26221 - protein, 15 aa, Artificial sequence
  Protein classification predicting sequence
ALNAANARWGSLYDA

SEQ ID NO: 26222 - protein, 9 aa, Artificial sequence
  Protein classification predicting sequence
AQIGKGMWA

SEQ ID NO: 26223 - protein, 14 aa, Artificial sequence
  Protein classification predicting sequence
TAWVPSPTAATLHA

SEQ ID NO: 26224 - protein, 18 aa, Artificial sequence
  Protein classification predicting sequence
TAWVPSPTAATLHALHYH

SEQ ID NO: 26225 - protein, 10 aa, Artificial sequence
  Protein classification predicting sequence
QGILGYVVRW

SEQ ID NO: 26226 - protein, 7 aa, Artificial sequence
  Protein classification predicting sequence
QPNGYTE

SEQ ID NO: 26227 - protein, 7 aa, Artificial sequence
  Protein classification predicting sequence
IGYLLPE

SEQ ID NO: 26228 - protein, 7 aa, Artificial sequence
  Protein classification predicting sequence
QHIANWL

SEQ ID NO: 26229 - protein, 22 aa, Artificial sequence
  Protein classification predicting sequence
KGREQPNGYTEPVLHRRRLELK

SEQ ID NO: 26230 - protein, 19 aa, Artificial sequence
  Protein classification predicting sequence
ALNAANARWGSLYDALYGT

SEQ ID NO: 26231 - protein, 6 aa, Artificial sequence
  Protein classification predicting sequence
YIVKPK

SEQ ID NO: 26232 - protein, 8 aa, Artificial sequence
  Protein classification predicting sequence
HGPEEVAF

SEQ ID NO: 26233 - protein, 21 aa, Artificial sequence
  Protein classification predicting sequence
FINTGFLDRTGDEIHTSMEAG

SEQ ID NO: 26234 - protein, 10 aa, Artificial sequence
  Protein classification predicting sequence
AQIGKGMWAM

SEQ ID NO: 26235 - protein, 13 aa, Artificial sequence
  Protein classification predicting sequence
LMEDRATLRISSQ

SEQ ID NO: 26236 - protein, 8 aa, Artificial sequence
  Protein classification predicting sequence
GYTEPILH

SEQ ID NO: 26237 - protein, 10 aa, Artificial sequence
  Protein classification predicting sequence
NGLHIELQID

SEQ ID NO: 26238 - protein, 9 aa, Artificial sequence
  Protein classification predicting sequence
ATLHATHYH

SEQ ID NO: 26239 - protein, 10 aa, Artificial sequence
  Protein classification predicting sequence
GVGCSKVPDI

SEQ ID NO: 26240 - protein, 18 aa, Artificial sequence
  Protein classification predicting sequence
ALNAANARWGSLYDALYG

SEQ ID NO: 26241 - protein, 13 aa, Artificial sequence
  Protein classification predicting sequence
FINTGFLDRTGDE

SEQ ID NO: 26242 - protein, 6 aa, Artificial sequence
  Protein classification predicting sequence
MEAGPM

SEQ ID NO: 26243 - protein, 11 aa, Artificial sequence
  Protein classification predicting sequence
YNKVRGDKVIA

SEQ ID NO: 26244 - protein, 9 aa, Artificial sequence
  Protein classification predicting sequence
EDSVAAVDA

SEQ ID NO: 26245 - protein, 5 aa, Artificial sequence
  Protein classification predicting sequence
GKGMW

SEQ ID NO: 26246 - protein, 7 aa, Artificial sequence
  Protein classification predicting sequence
NHGLHIE

SEQ ID NO: 26247 - protein, 13 aa, Artificial sequence
  Protein classification predicting sequence
GRSLLFVRNVGHL

SEQ ID NO: 26248 - protein, 10 aa, Artificial sequence
  Protein classification predicting sequence
GIMDEERRTT

SEQ ID NO: 26249 - protein, 6 aa, Artificial sequence
  Protein classification predicting sequence
NLKACI

SEQ ID NO: 26250 - protein, 8 aa, Artificial sequence
  Protein classification predicting sequence
DPAYRPMA

SEQ ID NO: 26251 - protein, 15 aa, Artificial sequence
  Protein classification predicting sequence
NARWGSLYDALYGTD

SEQ ID NO: 26252 - protein, 13 aa, Artificial sequence
  Protein classification predicting sequence
GSVYIVKPKMHGP

SEQ ID NO: 26253 - protein, 10 aa, Artificial sequence
  Protein classification predicting sequence
YIVKPKMHGP

SEQ ID NO: 26254 - protein, 24 aa, Artificial sequence
  Protein classification predicting sequence
LMEDRATLRISSQLLANWLRHGVI

SEQ ID NO: 26255 - protein, 10 aa, Artificial sequence
  Protein classification predicting sequence
YRPMAPNFDD

SEQ ID NO: 26256 - protein, 8 aa, Artificial sequence
  Protein classification predicting sequence
RNVGHLMT

SEQ ID NO: 26257 - protein, 8 aa, Artificial sequence
  Protein classification predicting sequence
QPNGYTEP

SEQ ID NO: 26258 - protein, 19 aa, Artificial sequence
  Protein classification predicting sequence
MAGPQLVVPVMNARFALNA

SEQ ID NO: 26259 - protein, 8 aa, Artificial sequence
  Protein classification predicting sequence
GNEIPEGI

SEQ ID NO: 26260 - protein, 16 aa, Artificial sequence
  Protein classification predicting sequence
ELDNNAQGILGYVVRW

SEQ ID NO: 26261 - protein, 7 aa, Artificial sequence
  Protein classification predicting sequence
ILLKNNG

SEQ ID NO: 26262 - protein, 10 aa, Artificial sequence
  Protein classification predicting sequence
LESAITTIMD

SEQ ID NO: 26263 - protein, 11 aa, Artificial sequence
  Protein classification predicting sequence
DPAYRPMAGNF

SEQ ID NO: 26264 - protein, 19 aa, Artificial sequence
  Protein classification predicting sequence
GSMYVVKPKMHGPEEVAFA

SEQ ID NO: 26265 - protein, 11 aa, Artificial sequence
  Protein classification predicting sequence
DLAPKNKALLA

SEQ ID NO: 26266 - protein, 7 aa, Artificial sequence
  Protein classification predicting sequence
YRNWLGL

SEQ ID NO: 26267 - protein, 12 aa, Artificial sequence
  Protein classification predicting sequence
YRNWLGLMKGDL

SEQ ID NO: 26268 - protein, 18 aa, Artificial sequence
  Protein classification predicting sequence
AGANTAWVPSPTAATLHA

SEQ ID NO: 26269 - protein, 8 aa, Artificial sequence
  Protein classification predicting sequence
ILGYVVRW

SEQ ID NO: 26270 - protein, 9 aa, Artificial sequence
  Protein classification predicting sequence
LMEDAATAE

SEQ ID NO: 26271 - protein, 9 aa, Artificial sequence
  Protein classification predicting sequence
FPGSQPVSF

SEQ ID NO: 26272 - protein, 9 aa, Artificial sequence
  Protein classification predicting sequence
VCEKTDGLR

SEQ ID NO: 26273 - protein, 7 aa, Artificial sequence
  Protein classification predicting sequence
DYYVCEK

SEQ ID NO: 26274 - protein, 6 aa, Artificial sequence
  Protein classification predicting sequence
RFRDDK

SEQ ID NO: 26275 - protein, 7 aa, Artificial sequence
  Protein classification predicting sequence
LMFDCLA

SEQ ID NO: 26276 - protein, 13 aa, Artificial sequence
  Protein classification predicting sequence
LPSLEYGANYFLQ

SEQ ID NO: 26277 - protein, 8 aa, Artificial sequence
  Protein classification predicting sequence
SRVNDLNR

SEQ ID NO: 26278 - protein, 10 aa, Artificial sequence
  Protein classification predicting sequence
LFTHDIMLPE

SEQ ID NO: 26279 - protein, 13 aa, Artificial sequence
  Protein classification predicting sequence
NNLYISDYKMLTF

SEQ ID NO: 26280 - protein, 10 aa, Artificial sequence
  Protein classification predicting sequence
EFINKFLEFS

SEQ ID NO: 26281 - protein, 12 aa, Artificial sequence
  Protein classification predicting sequence
LYYVHSLLYSSM

SEQ ID NO: 26282 - protein, 14 aa, Artificial sequence
  Protein classification predicting sequence
EKYCIIKLPTLFGR

SEQ ID NO: 26283 - protein, 16 aa, Artificial sequence
  Protein classification predicting sequence
VNNAAMQQMWDDIRRT

SEQ ID NO: 26284 - protein, 7 aa, Artificial sequence
  Protein classification predicting sequence
WDDIRRT

SEQ ID NO: 26285 - protein, 12 aa, Artificial sequence
  Protein classification predicting sequence
NHAMPGAAVVQE

SEQ ID NO: 26286 - protein, 8 aa, Artificial sequence
  Protein classification predicting sequence
IPTIVSRT

SEQ ID NO: 26287 - protein, 9 aa, Artificial sequence
  Protein classification predicting sequence
AVVQEHMVE

SEQ ID NO: 26288 - protein, 7 aa, Artificial sequence
  Protein classification predicting sequence
EKYTKFY

SEQ ID NO: 26289 - protein, 25 aa, Artificial sequence
  Protein classification predicting sequence
PLELRGPNYPNYAMNVGHQGEYAGI

SEQ ID NO: 26290 - protein, 9 aa, Artificial sequence
  Protein classification predicting sequence
KALKEKFEE

SEQ ID NO: 26291 - protein, 9 aa, Artificial sequence
  Protein classification predicting sequence
GGWKQSERK

SEQ ID NO: 26292 - protein, 15 aa, Artificial sequence
  Protein classification predicting sequence
YNPDIGVPLGQRKLM

SEQ ID NO: 26293 - protein, 16 aa, Artificial sequence
  Protein classification predicting sequence
NHALPGGAVVQEHMVE

SEQ ID NO: 26294 - protein, 7 aa, Artificial sequence
  Protein classification predicting sequence
RLGFYGY

SEQ ID NO: 26295 - protein, 7 aa, Artificial sequence
  Protein classification predicting sequence
LQDQCGA

SEQ ID NO: 26296 - protein, 7 aa, Artificial sequence
  Protein classification predicting sequence
IKVAFAD

SEQ ID NO: 26297 - protein, 7 aa, Artificial sequence
  Protein classification predicting sequence
EVTPETI

SEQ ID NO: 26298 - protein, 8 aa, Artificial sequence
  Protein classification predicting sequence
EYPALLED

SEQ ID NO: 26299 - protein, 19 aa, Artificial sequence
  Protein classification predicting sequence
HSRLGFYGYDLQDQCGASN

SEQ ID NO: 26300 - protein, 7 aa, Artificial sequence
  Protein classification predicting sequence
EGDDLHF

SEQ ID NO: 26301 - protein, 7 aa, Artificial sequence
  Protein classification predicting sequence
VGMDTAH

SEQ ID NO: 26302 - protein, 19 aa, Artificial sequence
  Protein classification predicting sequence
VLEKRLGVEVTPETINEYM

SEQ ID NO: 26303 - protein, 8 aa, Artificial sequence
  Protein classification predicting sequence
LYDQIWLG

SEQ ID NO: 26304 - protein, 14 aa, Artificial sequence
  Protein classification predicting sequence
YMSGGVGFTQYATA

SEQ ID NO: 26305 - protein, 8 aa, Artificial sequence
  Protein classification predicting sequence
RRARGPNE

SEQ ID NO: 26306 - protein, 11 aa, Artificial sequence
  Protein classification predicting sequence
TAMFEMGDAVG

SEQ ID NO: 26307 - protein, 8 aa, Artificial sequence
  Protein classification predicting sequence
DLVKANGK

SEQ ID NO: 26308 - protein, 7 aa, Artificial sequence
  Protein classification predicting sequence
GYALRNI

SEQ ID NO: 26309 - protein, 9 aa, Artificial sequence
  Protein classification predicting sequence
VPLEAISPL

SEQ ID NO: 26310 - protein, 11 aa, Artificial sequence
  Protein classification predicting sequence
LEKLREISDED

SEQ ID NO: 26311 - protein, 9 aa, Artificial sequence
  Protein classification predicting sequence
RGATVHGHS

SEQ ID NO: 26312 - protein, 6 aa, Artificial sequence
  Protein classification predicting sequence
APAQPY

SEQ ID NO: 26313 - protein, 7 aa, Artificial sequence
  Protein classification predicting sequence
GTLSGRQ

SEQ ID NO: 26314 - protein, 10 aa, Artificial sequence
  Protein classification predicting sequence
RYIQFADSMY

SEQ ID NO: 26315 - protein, 7 aa, Artificial sequence
  Protein classification predicting sequence
DSMYFAP

SEQ ID NO: 26316 - protein, 7 aa, Artificial sequence
  Protein classification predicting sequence
NNAAIQQ

SEQ ID NO: 26317 - protein, 15 aa, Artificial sequence
  Protein classification predicting sequence
AYKLCAGEAAIADFS

SEQ ID NO: 26318 - protein, 16 aa, Artificial sequence
  Protein classification predicting sequence
WLGSYMSGGVGFTQYA

SEQ ID NO: 26319 - protein, 10 aa, Artificial sequence
  Protein classification predicting sequence
WYLSQILHKE

SEQ ID NO: 26320 - protein, 9 aa, Artificial sequence
  Protein classification predicting sequence
NEPGGVPFG

SEQ ID NO: 26321 - protein, 9 aa, Artificial sequence
  Protein classification predicting sequence
VTRHSKGFA

SEQ ID NO: 26322 - protein, 27 aa, Artificial sequence
  Protein classification predicting sequence
VDFGRAEGTAVGFSFFSHSIYGGGGPG

SEQ ID NO: 26323 - protein, 7 aa, Artificial sequence
  Protein classification predicting sequence
REPLKYV

SEQ ID NO: 26324 - protein, 22 aa, Artificial sequence
  Protein classification predicting sequence
GTAVGFSFFSHSIYGGGGPGIF

SEQ ID NO: 26325 - protein, 17 aa, Artificial sequence
  Protein classification predicting sequence
VAIKKVLQDKRFKNREL

SEQ ID NO: 26326 - protein, 22 aa, Artificial sequence
  Protein classification predicting sequence
EPNVSYICSRYYRAPELIFGAT

SEQ ID NO: 26327 - protein, 6 aa, Artificial sequence
  Protein classification predicting sequence
TFVGTP

SEQ ID NO: 26328 - protein, 7 aa, Artificial sequence
  Protein classification predicting sequence
FAKVKLA

SEQ ID NO: 26329 - protein, 6 aa, Artificial sequence
  Protein classification predicting sequence
CWSADP

SEQ ID NO: 26330 - protein, 6 aa, Artificial sequence
  Protein classification predicting sequence
DWWGPL

SEQ ID NO: 26331 - protein, 7 aa, Artificial sequence
  Protein classification predicting sequence
GGSMGGM

SEQ ID NO: 26332 - protein, 12 aa, Artificial sequence
  Protein classification predicting sequence
TYFSAQSYLRYQ

SEQ ID NO: 26333 - protein, 6 aa, Artificial sequence
  Protein classification predicting sequence
GHDAFL

SEQ ID NO: 26334 - protein, 10 aa, Artificial sequence
  Protein classification predicting sequence
SYLRYQGDKF

SEQ ID NO: 26335 - protein, 11 aa, Artificial sequence
  Protein classification predicting sequence
AARMSALLTYR

SEQ ID NO: 26336 - protein, 6 aa, Artificial sequence
  Protein classification predicting sequence
CHALSG

SEQ ID NO: 26337 - protein, 7 aa, Artificial sequence
  Protein classification predicting sequence
YGPEFPL

SEQ ID NO: 26338 - protein, 17 aa, Artificial sequence
  Protein classification predicting sequence
VAFQTRNPMHRAHRELT

SEQ ID NO: 26339 - protein, 23 aa, Artificial sequence
  Protein classification predicting sequence
RVVAFQTRNPMHRAHRELTVRAA

SEQ ID NO: 26340 - protein, 13 aa, Artificial sequence
  Protein classification predicting sequence
TKPGDIDHFTRVR

SEQ ID NO: 26341 - protein, 6 aa, Artificial sequence
  Protein classification predicting sequence
GRDHAG

SEQ ID NO: 26342 - protein, 19 aa, Artificial sequence
  Protein classification predicting sequence
SKTNVTSTLHICWGAQAGL

SEQ ID NO: 26343 - protein, 12 aa, Artificial sequence
  Protein classification predicting sequence
NLMPKKIETENQ

SEQ ID NO: 26344 - protein, 6 aa, Artificial sequence
  Protein classification predicting sequence
PHSRHT

SEQ ID NO: 26345 - protein, 10 aa, Artificial sequence
  Protein classification predicting sequence
NLMPKKIETE

SEQ ID NO: 26346 - protein, 7 aa, Artificial sequence
  Protein classification predicting sequence
ASWRSHG

SEQ ID NO: 26347 - protein, 5 aa, Artificial sequence
  Protein classification predicting sequence
WRSHG

SEQ ID NO: 26348 - protein, 6 aa, Artificial sequence
  Protein classification predicting sequence
KLSGVY

SEQ ID NO: 26349 - protein, 12 aa, Artificial sequence
  Protein classification predicting sequence
DIQLLRIDSRES

SEQ ID NO: 26350 - protein, 24 aa, Artificial sequence
  Protein classification predicting sequence
HVTSTLFVCWAVQAALNILYGIPK

SEQ ID NO: 26351 - protein, 10 aa, Artificial sequence
  Protein classification predicting sequence
TRKEKLSGVY

SEQ ID NO: 26352 - protein, 8 aa, Artificial sequence
  Protein classification predicting sequence
ALLTRGFD

SEQ ID NO: 26353 - protein, 7 aa, Artificial sequence
  Protein classification predicting sequence
HTDLDIL

SEQ ID NO: 26354 - protein, 9 aa, Artificial sequence
  Protein classification predicting sequence
DGLIVTGAP

SEQ ID NO: 26355 - protein, 7 aa, Artificial sequence
  Protein classification predicting sequence
FEEVDYW

SEQ ID NO: 26356 - protein, 13 aa, Artificial sequence
  Protein classification predicting sequence
RNTPAEHLNNFYC

SEQ ID NO: 26357 - protein, 18 aa, Artificial sequence
  Protein classification predicting sequence
QNFDGLIVTGAPLGLVEF

SEQ ID NO: 26358 - protein, 13 aa, Artificial sequence
  Protein classification predicting sequence
CWAVQAALNILYG

SEQ ID NO: 26359 - protein, 8 aa, Artificial sequence
  Protein classification predicting sequence
EHTDLDIL

SEQ ID NO: 26360 - protein, 11 aa, Artificial sequence
  Protein classification predicting sequence
ASWRSHGHLLF

SEQ ID NO: 26361 - protein, 9 aa, Artificial sequence
  Protein classification predicting sequence
LLFSNWLNY

SEQ ID NO: 26362 - protein, 9 aa, Artificial sequence
  Protein classification predicting sequence
NWLNYYVYQ

SEQ ID NO: 26363 - protein, 11 aa, Artificial sequence
  Protein classification predicting sequence
LNLMPKKIETE

SEQ ID NO: 26364 - protein, 13 aa, Artificial sequence
  Protein classification predicting sequence
QFLRLLSNSPLQV

SEQ ID NO: 26365 - protein, 13 aa, Artificial sequence
  Protein classification predicting sequence
TGAPLGLVQFEDV

SEQ ID NO: 26366 - protein, 9 aa, Artificial sequence
  Protein classification predicting sequence
WAKEHVTST

SEQ ID NO: 26367 - protein, 17 aa, Artificial sequence
  Protein classification predicting sequence
VCWAAQAGLKLLYDLPK

SEQ ID NO: 26368 - protein, 9 aa, Artificial sequence
  Protein classification predicting sequence
APHSRYADF

SEQ ID NO: 26369 - protein, 15 aa, Artificial sequence
  Protein classification predicting sequence
TKDKRNVFVTGHPEY

SEQ ID NO: 26370 - protein, 8 aa, Artificial sequence
  Protein classification predicting sequence
FVTGHPEY

SEQ ID NO: 26371 - protein, 18 aa, Artificial sequence
  Protein classification predicting sequence
RESRNTPAEHLNNFYCNF

SEQ ID NO: 26372 - protein, 7 aa, Artificial sequence
  Protein classification predicting sequence
KIETETQ

SEQ ID NO: 26373 - protein, 6 aa, Artificial sequence
  Protein classification predicting sequence
ILNLMP

SEQ ID NO: 26374 - protein, 9 aa, Artificial sequence
  Protein classification predicting sequence
DGLIITGAP

SEQ ID NO: 26375 - protein, 6 aa, Artificial sequence
  Protein classification predicting sequence
ENIFVM

SEQ ID NO: 26376 - protein, 6 aa, Artificial sequence
  Protein classification predicting sequence
VYQETP

SEQ ID NO: 26377 - protein, 8 aa, Artificial sequence
  Protein classification predicting sequence
IITGAPVE

SEQ ID NO: 26378 - protein, 8 aa, Artificial sequence
  Protein classification predicting sequence
CWAAQAGL

SEQ ID NO: 26379 - protein, 15 aa, Artificial sequence
  Protein classification predicting sequence
NWLNYCVYQQTPYDL

SEQ ID NO: 26380 - protein, 6 aa, Artificial sequence
  Protein classification predicting sequence
NFDGLI

SEQ ID NO: 26381 - protein, 6 aa, Artificial sequence
  Protein classification predicting sequence
HVTSTL

SEQ ID NO: 26382 - protein, 17 aa, Artificial sequence
  Protein classification predicting sequence
RGFDDSFLAPHSRYADF

SEQ ID NO: 26383 - protein, 11 aa, Artificial sequence
  Protein classification predicting sequence
FLAPHSRYADF

SEQ ID NO: 26384 - protein, 6 aa, Artificial sequence
  Protein classification predicting sequence
QEIRPL

SEQ ID NO: 26385 - protein, 41 aa, Artificial sequence
  Protein classification predicting sequence
QEIRPLKVLILNLMPKKIETENQFLRLLSNSPLQVDIQLLR

SEQ ID NO: 26386 - protein, 8 aa, Artificial sequence
  Protein classification predicting sequence
EHLNNFYC

SEQ ID NO: 26387 - protein, 8 aa, Artificial sequence
  Protein classification predicting sequence
DVAYWPQI

SEQ ID NO: 26388 - protein, 7 aa, Artificial sequence
  Protein classification predicting sequence
TKYIGGH

SEQ ID NO: 26389 - protein, 8 aa, Artificial sequence
  Protein classification predicting sequence
AFSSGMAA

SEQ ID NO: 26390 - protein, 9 aa, Artificial sequence
  Protein classification predicting sequence
LVRLSVGIE

SEQ ID NO: 26391 - protein, 6 aa, Artificial sequence
  Protein classification predicting sequence
GDVSRP

SEQ ID NO: 26392 - protein, 18 aa, Artificial sequence
  Protein classification predicting sequence
GKYLFAGVVDGRNIWAND

SEQ ID NO: 26393 - protein, 6 aa, Artificial sequence
  Protein classification predicting sequence
SCSLLH

SEQ ID NO: 26394 - protein, 7 aa, Artificial sequence
  Protein classification predicting sequence
DVLVHGE

SEQ ID NO: 26395 - protein, 6 aa, Artificial sequence
  Protein classification predicting sequence
MTVFWS

SEQ ID NO: 26396 - protein, 8 aa, Artificial sequence
  Protein classification predicting sequence
DADVITIE

SEQ ID NO: 26397 - protein, 7 aa, Artificial sequence
  Protein classification predicting sequence
YFAMARG

SEQ ID NO: 26398 - protein, 5 aa, Artificial sequence
  Protein classification predicting sequence
EMTKW

SEQ ID NO: 26399 - protein, 6 aa, Artificial sequence
  Protein classification predicting sequence
IQVDEP

SEQ ID NO: 26400 - protein, 15 aa, Artificial sequence
  Protein classification predicting sequence
LPLLPTTTIGSFPQT

SEQ ID NO: 26401 - protein, 12 aa, Artificial sequence
  Protein classification predicting sequence
GLDVLVHGEFER

SEQ ID NO: 26402 - protein, 15 aa, Artificial sequence
  Protein classification predicting sequence
KGMLTGPVTILNWSF

SEQ ID NO: 26403 - protein, 5 aa, Artificial sequence
  Protein classification predicting sequence
WSFVR

SEQ ID NO: 26404 - protein, 7 aa, Artificial sequence
  Protein classification predicting sequence
IQIDEPA

SEQ ID NO: 26405 - protein, 15 aa, Artificial sequence
  Protein classification predicting sequence
LDADVISIETSRSHG

SEQ ID NO: 26406 - protein, 21 aa, Artificial sequence
  Protein classification predicting sequence
TTYEKGIGLGVYDIHSPRVPS

SEQ ID NO: 26407 - protein, 12 aa, Artificial sequence
  Protein classification predicting sequence
GVYDIHSPRVPS

SEQ ID NO: 26408 - protein, 6 aa, Artificial sequence
  Protein classification predicting sequence
LGFPRI

SEQ ID NO: 26409 - protein, 17 aa, Artificial sequence
  Protein classification predicting sequence
SEMTKWFNTNYHYIVPE

SEQ ID NO: 26410 - protein, 6 aa, Artificial sequence
  Protein classification predicting sequence
TYFDSV

SEQ ID NO: 26411 - protein, 11 aa, Artificial sequence
  Protein classification predicting sequence
LDVLVHGEFER

SEQ ID NO: 26412 - protein, 13 aa, Artificial sequence
  Protein classification predicting sequence
WVQSYGSRCVRPP

SEQ ID NO: 26413 - protein, 8 aa, Artificial sequence
  Protein classification predicting sequence
ALREGLPL

SEQ ID NO: 26414 - protein, 19 aa, Artificial sequence
  Protein classification predicting sequence
NETQIHTHMCYSNFEDIVD

SEQ ID NO: 26415 - protein, 9 aa, Artificial sequence
  Protein classification predicting sequence
TNYHYLVPE

SEQ ID NO: 26416 - protein, 6 aa, Artificial sequence
  Protein classification predicting sequence
GRNIWR

SEQ ID NO: 26417 - protein, 6 aa, Artificial sequence
  Protein classification predicting sequence
WVQSYG

SEQ ID NO: 26418 - protein, 6 aa, Artificial sequence
  Protein classification predicting sequence
PITVEW

SEQ ID NO: 26419 - protein, 7 aa, Artificial sequence
  Protein classification predicting sequence
WSAYAQS

SEQ ID NO: 26420 - protein, 10 aa, Artificial sequence
  Protein classification predicting sequence
IQIDEAALRE

SEQ ID NO: 26421 - protein, 8 aa, Artificial sequence
  Protein classification predicting sequence
PAFRLVHS

SEQ ID NO: 26422 - protein, 12 aa, Artificial sequence
  Protein classification predicting sequence
TQIHTHMCYSEF

SEQ ID NO: 26423 - protein, 6 aa, Artificial sequence
  Protein classification predicting sequence
YAQSLT

SEQ ID NO: 26424 - protein, 6 aa, Artificial sequence
  Protein classification predicting sequence
NEIGPG

SEQ ID NO: 26425 - protein, 14 aa, Artificial sequence
  Protein classification predicting sequence
GWVQSYGSRCVKPP

SEQ ID NO: 26426 - protein, 7 aa, Artificial sequence
  Protein classification predicting sequence
WSFVRDD

SEQ ID NO: 26427 - protein, 10 aa, Artificial sequence
  Protein classification predicting sequence
PRIGPRRELK

SEQ ID NO: 26428 - protein, 7 aa, Artificial sequence
  Protein classification predicting sequence
WVQFDEP

SEQ ID NO: 26429 - protein, 11 aa, Artificial sequence
  Protein classification predicting sequence
PTTTIGSFPQT

SEQ ID NO: 26430 - protein, 9 aa, Artificial sequence
  Protein classification predicting sequence
ERNDMVQYF

SEQ ID NO: 26431 - protein, 9 aa, Artificial sequence
  Protein classification predicting sequence
MLTGPVTIL

SEQ ID NO: 26432 - protein, 9 aa, Artificial sequence
  Protein classification predicting sequence
ALREGLPLR

SEQ ID NO: 26433 - protein, 7 aa, Artificial sequence
  Protein classification predicting sequence
REGLPLR

SEQ ID NO: 26434 - protein, 8 aa, Artificial sequence
  Protein classification predicting sequence
NHTLGFPR

SEQ ID NO: 26435 - protein, 15 aa, Artificial sequence
  Protein classification predicting sequence
PVGDFAWYDHVLTTS

SEQ ID NO: 26436 - protein, 13 aa, Artificial sequence
  Protein classification predicting sequence
KWFNTNYHYIVPE

SEQ ID NO: 26437 - protein, 10 aa, Artificial sequence
  Protein classification predicting sequence
LSLGVINGRN

SEQ ID NO: 26438 - protein, 7 aa, Artificial sequence
  Protein classification predicting sequence
GVINGRN

SEQ ID NO: 26439 - protein, 19 aa, Artificial sequence
  Protein classification predicting sequence
DVLVHGEAERNDMVEYFGE

SEQ ID NO: 26440 - protein, 9 aa, Artificial sequence
  Protein classification predicting sequence
TQIHTHMCY

SEQ ID NO: 26441 - protein, 20 aa, Artificial sequence
  Protein classification predicting sequence
TQIHTHMCYCEFNDIMDSIA

SEQ ID NO: 26442 - protein, 7 aa, Artificial sequence
  Protein classification predicting sequence
RSDMELL

SEQ ID NO: 26443 - protein, 11 aa, Artificial sequence
  Protein classification predicting sequence
LGPITYLWLGK

SEQ ID NO: 26444 - protein, 7 aa, Artificial sequence
  Protein classification predicting sequence
TYLWLGK

SEQ ID NO: 26445 - protein, 6 aa, Artificial sequence
  Protein classification predicting sequence
VQIDEP

SEQ ID NO: 26446 - protein, 12 aa, Artificial sequence
  Protein classification predicting sequence
SSCSLLHSPIDL

SEQ ID NO: 26447 - protein, 11 aa, Artificial sequence
  Protein classification predicting sequence
ERNDMVEYFGE

SEQ ID NO: 26448 - protein, 14 aa, Artificial sequence
  Protein classification predicting sequence
YPNEIGPGVYDIHS

SEQ ID NO: 26449 - protein, 6 aa, Artificial sequence
  Protein classification predicting sequence
AQEKYW

SEQ ID NO: 26450 - protein, 7 aa, Artificial sequence
  Protein classification predicting sequence
IPVGDFS

SEQ ID NO: 26451 - protein, 6 aa, Artificial sequence
  Protein classification predicting sequence
FALQKC

SEQ ID NO: 26452 - protein, 10 aa, Artificial sequence
  Protein classification predicting sequence
DVLVHGEFER

SEQ ID NO: 26453 - protein, 15 aa, Artificial sequence
  Protein classification predicting sequence
YPNDIGPGVYDIHSP

SEQ ID NO: 26454 - protein, 6 aa, Artificial sequence
  Protein classification predicting sequence
RELKFA

SEQ ID NO: 26455 - protein, 6 aa, Artificial sequence
  Protein classification predicting sequence
DFSLYD

SEQ ID NO: 26456 - protein, 8 aa, Artificial sequence
  Protein classification predicting sequence
NTFSYYDQ

SEQ ID NO: 26457 - protein, 7 aa, Artificial sequence
  Protein classification predicting sequence
YDQVLDT

SEQ ID NO: 26458 - protein, 13 aa, Artificial sequence
  Protein classification predicting sequence
LGVDTVPVLVGPV

SEQ ID NO: 26459 - protein, 7 aa, Artificial sequence
  Protein classification predicting sequence
PVLVGPV

SEQ ID NO: 26460 - protein, 6 aa, Artificial sequence
  Protein classification predicting sequence
DLVRAP

SEQ ID NO: 26461 - protein, 8 aa, Artificial sequence
  Protein classification predicting sequence
WLAFAVQK

SEQ ID NO: 26462 - protein, 8 aa, Artificial sequence
  Protein classification predicting sequence
LPTTTIGS

SEQ ID NO: 26463 - protein, 12 aa, Artificial sequence
  Protein classification predicting sequence
LPTTTIGSFPQT

SEQ ID NO: 26464 - protein, 17 aa, Artificial sequence
  Protein classification predicting sequence
LPTTTIGSFPQTTEVRQ

SEQ ID NO: 26465 - protein, 11 aa, Artificial sequence
  Protein classification predicting sequence
GWVQSYGSRCV

SEQ ID NO: 26466 - protein, 6 aa, Artificial sequence
  Protein classification predicting sequence
DWDAYL

SEQ ID NO: 26467 - protein, 9 aa, Artificial sequence
  Protein classification predicting sequence
DADVISIET

SEQ ID NO: 26468 - protein, 7 aa, Artificial sequence
  Protein classification predicting sequence
DMVEYFG

SEQ ID NO: 26469 - protein, 8 aa, Artificial sequence
  Protein classification predicting sequence
LTGPVTIL

SEQ ID NO: 26470 - protein, 11 aa, Artificial sequence
  Protein classification predicting sequence
WVNPDCGLKTR

SEQ ID NO: 26471 - protein, 13 aa, Artificial sequence
  Protein classification predicting sequence
WVNPDCGLKTRGW

SEQ ID NO: 26472 - protein, 7 aa, Artificial sequence
  Protein classification predicting sequence
LGFPRIG

SEQ ID NO: 26473 - protein, 7 aa, Artificial sequence
  Protein classification predicting sequence
DFSLYDH

SEQ ID NO: 26474 - protein, 7 aa, Artificial sequence
  Protein classification predicting sequence
KPVLLGP

SEQ ID NO: 26475 - protein, 6 aa, Artificial sequence
  Protein classification predicting sequence
DGRNIW

SEQ ID NO: 26476 - protein, 12 aa, Artificial sequence
  Protein classification predicting sequence
RLWLAPSCSLLH

SEQ ID NO: 26477 - protein, 15 aa, Artificial sequence
  Protein classification predicting sequence
VIQIDEPAIREGLPL

SEQ ID NO: 26478 - protein, 14 aa, Artificial sequence
  Protein classification predicting sequence
IQIDEPAIREGLPL

SEQ ID NO: 26479 - protein, 6 aa, Artificial sequence
  Protein classification predicting sequence
GRNVWR

SEQ ID NO: 26480 - protein, 9 aa, Artificial sequence
  Protein classification predicting sequence
RWAVGAFRL

SEQ ID NO: 26481 - protein, 11 aa, Artificial sequence
  Protein classification predicting sequence
QIHTHMCYSEF

SEQ ID NO: 26482 - protein, 12 aa, Artificial sequence
  Protein classification predicting sequence
VKGMLTGPVTIL

SEQ ID NO: 26483 - protein, 16 aa, Artificial sequence
  Protein classification predicting sequence
EMTKWFDTNYHYIVPE

SEQ ID NO: 26484 - protein, 7 aa, Artificial sequence
  Protein classification predicting sequence
GIIDGRN

SEQ ID NO: 26485 - protein, 9 aa, Artificial sequence
  Protein classification predicting sequence
WSFVRDDQP

SEQ ID NO: 26486 - protein, 11 aa, Artificial sequence
  Protein classification predicting sequence
AALDADVITIE

SEQ ID NO: 26487 - protein, 8 aa, Artificial sequence
  Protein classification predicting sequence
YPNDIGPG

SEQ ID NO: 26488 - protein, 6 aa, Artificial sequence
  Protein classification predicting sequence
YDIHSP

SEQ ID NO: 26489 - protein, 9 aa, Artificial sequence
  Protein classification predicting sequence
PGPLTWLWL

SEQ ID NO: 26490 - protein, 6 aa, Artificial sequence
  Protein classification predicting sequence
RCVKPP

SEQ ID NO: 26491 - protein, 8 aa, Artificial sequence
  Protein classification predicting sequence
ALALRDEV

SEQ ID NO: 26492 - protein, 6 aa, Artificial sequence
  Protein classification predicting sequence
HTHMCY

SEQ ID NO: 26493 - protein, 50 aa, Artificial sequence
  Protein classification predicting sequence
EQERLGLDVLVHGEAERNDMVEYFGEHLDGFVFTQNGWVQSYGSRCVKPP

SEQ ID NO: 26494 - protein, 16 aa, Artificial sequence
  Protein classification predicting sequence
SRPAPITVEWAKYAQS

SEQ ID NO: 26495 - protein, 16 aa, Artificial sequence
  Protein classification predicting sequence
TDKPVKGMLTGPVTIL

SEQ ID NO: 26496 - protein, 7 aa, Artificial sequence
  Protein classification predicting sequence
AGIKVIQ

SEQ ID NO: 26497 - protein, 7 aa, Artificial sequence
  Protein classification predicting sequence
RPEAMTV

SEQ ID NO: 26498 - protein, 11 aa, Artificial sequence
  Protein classification predicting sequence
GPGVYDIHSPR

SEQ ID NO: 26499 - protein, 18 aa, Artificial sequence
  Protein classification predicting sequence
DVLVHGEFERTDMVEYFG

SEQ ID NO: 26500 - protein, 7 aa, Artificial sequence
  Protein classification predicting sequence
PVKGMLT

SEQ ID NO: 26501 - protein, 11 aa, Artificial sequence
  Protein classification predicting sequence
TIINWSFVRDD

SEQ ID NO: 26502 - protein, 14 aa, Artificial sequence
  Protein classification predicting sequence
VQNDTQIHTHMCYS

SEQ ID NO: 26503 - protein, 11 aa, Artificial sequence
  Protein classification predicting sequence
WINPDCGLKTR

SEQ ID NO: 26504 - protein, 9 aa, Artificial sequence
  Protein classification predicting sequence
TNYHYIVPE

SEQ ID NO: 26505 - protein, 10 aa, Artificial sequence
  Protein classification predicting sequence
PTTTIGSFPQ

SEQ ID NO: 26506 - protein, 11 aa, Artificial sequence
  Protein classification predicting sequence
DEPALREGLPL

SEQ ID NO: 26507 - protein, 8 aa, Artificial sequence
  Protein classification predicting sequence
ARWIKIQE

SEQ ID NO: 26508 - protein, 7 aa, Artificial sequence
  Protein classification predicting sequence
QIALAIK

SEQ ID NO: 26509 - protein, 12 aa, Artificial sequence
  Protein classification predicting sequence
LWVNPDCGLKTR

SEQ ID NO: 26510 - protein, 13 aa, Artificial sequence
  Protein classification predicting sequence
QERLGLDVLVHGE

SEQ ID NO: 26511 - protein, 7 aa, Artificial sequence
  Protein classification predicting sequence
ALAIRDE

SEQ ID NO: 26512 - protein, 6 aa, Artificial sequence
  Protein classification predicting sequence
TQIHTH

SEQ ID NO: 26513 - protein, 24 aa, Artificial sequence
  Protein classification predicting sequence
LAAAGLDSVPVNTFSYYDQMLDTA

SEQ ID NO: 26514 - protein, 11 aa, Artificial sequence
  Protein classification predicting sequence
RPAIYVATYFG

SEQ ID NO: 26515 - protein, 10 aa, Artificial sequence
  Protein classification predicting sequence
IQVDEPALRE

SEQ ID NO: 26516 - protein, 7 aa, Artificial sequence
  Protein classification predicting sequence
GPKRELK

SEQ ID NO: 26517 - protein, 6 aa, Artificial sequence
  Protein classification predicting sequence
EMTKWF

SEQ ID NO: 26518 - protein, 12 aa, Artificial sequence
  Protein classification predicting sequence
EMTKWFDTNYHY

SEQ ID NO: 26519 - protein, 10 aa, Artificial sequence
  Protein classification predicting sequence
DAPALAEAVY

SEQ ID NO: 26520 - protein, 27 aa, Artificial sequence
  Protein classification predicting sequence
GFFATQNGWVQSYGSRCVRPPILYGDV

SEQ ID NO: 26521 - protein, 21 aa, Artificial sequence
  Protein classification predicting sequence
YAQSLTDKPVKGMLTGPVTIL

SEQ ID NO: 26522 - protein, 51 aa, Artificial sequence
  Protein classification predicting sequence
YAQSLTDKPVKGMLTGPVTILAWSFVRDDQPLADTANQVALAIRDETVDLQ

SEQ ID NO: 26523 - protein, 12 aa, Artificial sequence
  Protein classification predicting sequence
RELKFAQEKYWR

SEQ ID NO: 26524 - protein, 9 aa, Artificial sequence
  Protein classification predicting sequence
YAQSLTKRP

SEQ ID NO: 26525 - protein, 12 aa, Artificial sequence
  Protein classification predicting sequence
DADVITIETSRS

SEQ ID NO: 26526 - protein, 14 aa, Artificial sequence
  Protein classification predicting sequence
IPVGDFSLYDHILD

SEQ ID NO: 26527 - protein, 13 aa, Artificial sequence
  Protein classification predicting sequence
QEEIGLDVLVHGE

SEQ ID NO: 26528 - protein, 9 aa, Artificial sequence
  Protein classification predicting sequence
GLDVLVHGE

SEQ ID NO: 26529 - protein, 7 aa, Artificial sequence
  Protein classification predicting sequence
IGSFPQT

SEQ ID NO: 26530 - protein, 10 aa, Artificial sequence
  Protein classification predicting sequence
PVGDFAWYDH

SEQ ID NO: 26531 - protein, 8 aa, Artificial sequence
  Protein classification predicting sequence
GDFAWYDH

SEQ ID NO: 26532 - protein, 9 aa, Artificial sequence
  Protein classification predicting sequence
KWFNTNYHY

SEQ ID NO: 26533 - protein, 12 aa, Artificial sequence
  Protein classification predicting sequence
WTQLLEEVDEAL

SEQ ID NO: 26534 - protein, 10 aa, Artificial sequence
  Protein classification predicting sequence
TYLWLGKVKG

SEQ ID NO: 26535 - protein, 7 aa, Artificial sequence
  Protein classification predicting sequence
FDRLSLL

SEQ ID NO: 26536 - protein, 11 aa, Artificial sequence
  Protein classification predicting sequence
INGRNVWRADL

SEQ ID NO: 26537 - protein, 16 aa, Artificial sequence
  Protein classification predicting sequence
WPTTTIGSFPQTTEIR

SEQ ID NO: 26538 - protein, 8 aa, Artificial sequence
  Protein classification predicting sequence
LRLDFKKG

SEQ ID NO: 26539 - protein, 7 aa, Artificial sequence
  Protein classification predicting sequence
EHIKQAI

SEQ ID NO: 26540 - protein, 14 aa, Artificial sequence
  Protein classification predicting sequence
KPVKGMLTGPVTIL

SEQ ID NO: 26541 - protein, 8 aa, Artificial sequence
  Protein classification predicting sequence
LANMVQAA

SEQ ID NO: 26542 - protein, 8 aa, Artificial sequence
  Protein classification predicting sequence
THILGYPR

SEQ ID NO: 26543 - protein, 20 aa, Artificial sequence
  Protein classification predicting sequence
AASDMTKWFNTNYHYIVPEF

SEQ ID NO: 26544 - protein, 16 aa, Artificial sequence
  Protein classification predicting sequence
MTKWFNTNYHYIVPEF

SEQ ID NO: 26545 - protein, 7 aa, Artificial sequence
  Protein classification predicting sequence
LPLLPTT

SEQ ID NO: 26546 - protein, 14 aa, Artificial sequence
  Protein classification predicting sequence
VHGEAERNDMVEYF

SEQ ID NO: 26547 - protein, 12 aa, Artificial sequence
  Protein classification predicting sequence
ALALRDEVSDLQ

SEQ ID NO: 26548 - protein, 7 aa, Artificial sequence
  Protein classification predicting sequence
REGLPLK

SEQ ID NO: 26549 - protein, 17 aa, Artificial sequence
  Protein classification predicting sequence
SVAALDADVITIETSRS

SEQ ID NO: 26550 - protein, 15 aa, Artificial sequence
  Protein classification predicting sequence
AALDADVITIETSRS

SEQ ID NO: 26551 - protein, 8 aa, Artificial sequence
  Protein classification predicting sequence
MELLKAFE

SEQ ID NO: 26552 - protein, 16 aa, Artificial sequence
  Protein classification predicting sequence
YPNEIGPGVYDIHSPN

SEQ ID NO: 26553 - protein, 7 aa, Artificial sequence
  Protein classification predicting sequence
LRAAHWQ

SEQ ID NO: 26554 - protein, 8 aa, Artificial sequence
  Protein classification predicting sequence
LGERLWVA

SEQ ID NO: 26555 - protein, 8 aa, Artificial sequence
  Protein classification predicting sequence
SCSLLHSP

SEQ ID NO: 26556 - protein, 7 aa, Artificial sequence
  Protein classification predicting sequence
KSWLAFA

SEQ ID NO: 26557 - protein, 9 aa, Artificial sequence
  Protein classification predicting sequence
ERNDMVEYF

SEQ ID NO: 26558 - protein, 10 aa, Artificial sequence
  Protein classification predicting sequence
TQIHTHMCYS

SEQ ID NO: 26559 - protein, 16 aa, Artificial sequence
  Protein classification predicting sequence
IAAMDADVITIETSRS

SEQ ID NO: 26560 - protein, 15 aa, Artificial sequence
  Protein classification predicting sequence
YPNEIGPGVYDIHSP

SEQ ID NO: 26561 - protein, 8 aa, Artificial sequence
  Protein classification predicting sequence
GVYDIHSP

SEQ ID NO: 26562 - protein, 14 aa, Artificial sequence
  Protein classification predicting sequence
ERLWVNPDCGLKTR

SEQ ID NO: 26563 - protein, 14 aa, Artificial sequence
  Protein classification predicting sequence
TKWFDTNYHYLVPE

SEQ ID NO: 26564 - protein, 6 aa, Artificial sequence
  Protein classification predicting sequence
GVEWVQ

SEQ ID NO: 26565 - protein, 7 aa, Artificial sequence
  Protein classification predicting sequence
PQTSAIR

SEQ ID NO: 26566 - protein, 7 aa, Artificial sequence
  Protein classification predicting sequence
MELLDAF

SEQ ID NO: 26567 - protein, 7 aa, Artificial sequence
  Protein classification predicting sequence
QIDEPAL

SEQ ID NO: 26568 - protein, 6 aa, Artificial sequence
  Protein classification predicting sequence
SLLHVP

SEQ ID NO: 26569 - protein, 7 aa, Artificial sequence
  Protein classification predicting sequence
SLLHVPV

SEQ ID NO: 26570 - protein, 9 aa, Artificial sequence
  Protein classification predicting sequence
FATEKLDEL

SEQ ID NO: 26571 - protein, 7 aa, Artificial sequence
  Protein classification predicting sequence
RPEPMTV

SEQ ID NO: 26572 - protein, 7 aa, Artificial sequence
  Protein classification predicting sequence
KGMLTGP

SEQ ID NO: 26573 - protein, 11 aa, Artificial sequence
  Protein classification predicting sequence
REGLPLRRADW

SEQ ID NO: 26574 - protein, 7 aa, Artificial sequence
  Protein classification predicting sequence
LGYPRIG

SEQ ID NO: 26575 - protein, 10 aa, Artificial sequence
  Protein classification predicting sequence
PRIGAQRELK

SEQ ID NO: 26576 - protein, 10 aa, Artificial sequence
  Protein classification predicting sequence
GVEWVQIDEP

SEQ ID NO: 26577 - protein, 7 aa, Artificial sequence
  Protein classification predicting sequence
LLLATYF

SEQ ID NO: 26578 - protein, 17 aa, Artificial sequence
  Protein classification predicting sequence
DADVITIETSRSNMELL

SEQ ID NO: 26579 - protein, 6 aa, Artificial sequence
  Protein classification predicting sequence
PSNDFS

SEQ ID NO: 26580 - protein, 13 aa, Artificial sequence
  Protein classification predicting sequence
QEKVGLDVLVHGE

SEQ ID NO: 26581 - protein, 7 aa, Artificial sequence
  Protein classification predicting sequence
HTLGFPR

SEQ ID NO: 26582 - protein, 11 aa, Artificial sequence
  Protein classification predicting sequence
MTKWFNTNYHY

SEQ ID NO: 26583 - protein, 9 aa, Artificial sequence
  Protein classification predicting sequence
VLAELAKRG

SEQ ID NO: 26584 - protein, 8 aa, Artificial sequence
  Protein classification predicting sequence
EWVQIDEP

SEQ ID NO: 26585 - protein, 12 aa, Artificial sequence
  Protein classification predicting sequence
EWVQIDEPALVL

SEQ ID NO: 26586 - protein, 21 aa, Artificial sequence
  Protein classification predicting sequence
EWVQIDEPALVLELPQAWLDA

SEQ ID NO: 26587 - protein, 8 aa, Artificial sequence
  Protein classification predicting sequence
PIQARRHS

SEQ ID NO: 26588 - protein, 16 aa, Artificial sequence
  Protein classification predicting sequence
AVEKRLAAITAQDSQR

SEQ ID NO: 26589 - protein, 15 aa, Artificial sequence
  Protein classification predicting sequence
WGVEAFRINAAVAKD

SEQ ID NO: 26590 - protein, 43 aa, Artificial sequence
  Protein classification predicting sequence
TQIHTHMCYCEFNDIMDSIAALDADVITIETSRSDMELLESFE

SEQ ID NO: 26591 - protein, 13 aa, Artificial sequence
  Protein classification predicting sequence
RLWVNPDCGLKTR

SEQ ID NO: 26592 - protein, 15 aa, Artificial sequence
  Protein classification predicting sequence
RLWVNPDCGLKTRGW

SEQ ID NO: 26593 - protein, 38 aa, Artificial sequence
  Protein classification predicting sequence
DGSVDIDTLFRIGRGRAPTGEPAAAAEMTKWFNTNYHY

SEQ ID NO: 26594 - protein, 21 aa, Artificial sequence
  Protein classification predicting sequence
GQVKLLLTTYFEGVTPNLDTI

SEQ ID NO: 26595 - protein, 23 aa, Artificial sequence
  Protein classification predicting sequence
LWVASSCSLLHSPIDLSVETRLD

SEQ ID NO: 26596 - protein, 32 aa, Artificial sequence
  Protein classification predicting sequence
YEVRAEAQRARFKLPAWPTTTIGSFPQTTEIR

SEQ ID NO: 26597 - protein, 49 aa, Artificial sequence
  Protein classification predicting sequence
RETIAKQIALALRDEVADLEAAGIGIIQIDEPALREGLPLRRSDWDAYL

SEQ ID NO: 26598 - protein, 7 aa, Artificial sequence
  Protein classification predicting sequence
RGRAPTG

SEQ ID NO: 26599 - protein, 8 aa, Artificial sequence
  Protein classification predicting sequence
EPILALEL

SEQ ID NO: 26600 - protein, 12 aa, Artificial sequence
  Protein classification predicting sequence
AGIGIIQIDEPA

SEQ ID NO: 26601 - protein, 36 aa, Artificial sequence
  Protein classification predicting sequence
TILNHTLGFPRVGLRRELKKAQESYWAGNSTREELL

SEQ ID NO: 26602 - protein, 18 aa, Artificial sequence
  Protein classification predicting sequence
ELDQTLTDLHKENLLLQK

SEQ ID NO: 26603 - protein, 12 aa, Artificial sequence
  Protein classification predicting sequence
DDLLFDIARGNK

SEQ ID NO: 26604 - protein, 7 aa, Artificial sequence
  Protein classification predicting sequence
RFKYAQS

SEQ ID NO: 26605 - protein, 8 aa, Artificial sequence
  Protein classification predicting sequence
DAGAEYIQ

SEQ ID NO: 26606 - protein, 14 aa, Artificial sequence
  Protein classification predicting sequence
DEPILVTDDSESYE

SEQ ID NO: 26607 - protein, 9 aa, Artificial sequence
  Protein classification predicting sequence
LVIQTYFER

SEQ ID NO: 26608 - protein, 12 aa, Artificial sequence
  Protein classification predicting sequence
VHDNGYNLKQIE

SEQ ID NO: 26609 - protein, 13 aa, Artificial sequence
  Protein classification predicting sequence
LYAGIIDGRNVWA

SEQ ID NO: 26610 - protein, 8 aa, Artificial sequence
  Protein classification predicting sequence
KARYERFQ

SEQ ID NO: 26611 - protein, 17 aa, Artificial sequence
  Protein classification predicting sequence
RLNLPDLPTTTIGSFPQ

SEQ ID NO: 26612 - protein, 13 aa, Artificial sequence
  Protein classification predicting sequence
IYGDVKWTAPLTV

SEQ ID NO: 26613 - protein, 9 aa, Artificial sequence
  Protein classification predicting sequence
ETVYAQSLT

SEQ ID NO: 26614 - protein, 13 aa, Artificial sequence
  Protein classification predicting sequence
PRKVVQDQIALAI

SEQ ID NO: 26615 - protein, 7 aa, Artificial sequence
  Protein classification predicting sequence
EEVLALE

SEQ ID NO: 26616 - protein, 9 aa, Artificial sequence
  Protein classification predicting sequence
SFKLATSSV

SEQ ID NO: 26617 - protein, 14 aa, Artificial sequence
  Protein classification predicting sequence
EVKDALTVLVNAVK

SEQ ID NO: 26618 - protein, 34 aa, Artificial sequence
  Protein classification predicting sequence
YHLDSIPVGDFSLYDHILDTSLLFNIIPERFQGR

SEQ ID NO: 26619 - protein, 28 aa, Artificial sequence
  Protein classification predicting sequence
HVASALIKWFNTNYHYIVPEWDNVEPKV

SEQ ID NO: 26620 - protein, 23 aa, Artificial sequence
  Protein classification predicting sequence
NVNAHPVIVGPITFVKLSKGGHQ

SEQ ID NO: 26621 - protein, 22 aa, Artificial sequence
  Protein classification predicting sequence
LVIQPSSSLLHVPVSLDDETLD

SEQ ID NO: 26622 - protein, 58 aa, Artificial sequence
  Protein classification predicting sequence
NEIARWIKIQEDIGLDVLVHGEFERNDMVEFFGEKLQGFLVTKFGWVQSYGSRAVKPP

SEQ ID NO: 26623 - protein, 32 aa, Artificial sequence
  Protein classification predicting sequence
ETVYAQSLTDKPVKGMLTGPVTILNWSFERVD

SEQ ID NO: 26624 - protein, 28 aa, Artificial sequence
  Protein classification predicting sequence
AGIKVIQVDEPALREGLPLRSEYHEQYL

SEQ ID NO: 26625 - protein, 41 aa, Artificial sequence
  Protein classification predicting sequence
DETQIHTHMCYSQFGQIIHAIHDLDADVISIETSRSHGDLI

SEQ ID NO: 26626 - protein, 25 aa, Artificial sequence
  Protein classification predicting sequence
DFEDINYDLGIGLGVYDIHSPRIPT

SEQ ID NO: 26627 - protein, 32 aa, Artificial sequence
  Protein classification predicting sequence
EEITTAINRSLQQIDRSLFWVNPDCGLKTRKE

SEQ ID NO: 26628 - protein, 9 aa, Artificial sequence
  Protein classification predicting sequence
GWVQSYGSR

SEQ ID NO: 26629 - protein, 6 aa, Artificial sequence
  Protein classification predicting sequence
NWSFER

SEQ ID NO: 26630 - protein, 9 aa, Artificial sequence
  Protein classification predicting sequence
QIALAIKDE

SEQ ID NO: 26631 - protein, 5 aa, Artificial sequence
  Protein classification predicting sequence
GRNIW

SEQ ID NO: 26632 - protein, 12 aa, Artificial sequence
  Protein classification predicting sequence
KPVKGMLTGPVT

SEQ ID NO: 26633 - protein, 9 aa, Artificial sequence
  Protein classification predicting sequence
KGMLTGPVT

SEQ ID NO: 26634 - protein, 8 aa, Artificial sequence
  Protein classification predicting sequence
LGYPRLGE

SEQ ID NO: 26635 - protein, 7 aa, Artificial sequence
  Protein classification predicting sequence
IQVDEPI

SEQ ID NO: 26636 - protein, 11 aa, Artificial sequence
  Protein classification predicting sequence
LPTTTIGSFPQ

SEQ ID NO: 26637 - protein, 12 aa, Artificial sequence
  Protein classification predicting sequence
IGLGVYDIHSPR

SEQ ID NO: 26638 - protein, 6 aa, Artificial sequence
  Protein classification predicting sequence
VKPPII

SEQ ID NO: 26639 - protein, 8 aa, Artificial sequence
  Protein classification predicting sequence
LPLRRSDW

SEQ ID NO: 26640 - protein, 10 aa, Artificial sequence
  Protein classification predicting sequence
MDADVISFEA

SEQ ID NO: 26641 - protein, 7 aa, Artificial sequence
  Protein classification predicting sequence
EPALVLE

SEQ ID NO: 26642 - protein, 7 aa, Artificial sequence
  Protein classification predicting sequence
AQSLTDK

SEQ ID NO: 26643 - protein, 7 aa, Artificial sequence
  Protein classification predicting sequence
MLTGPVT

SEQ ID NO: 26644 - protein, 10 aa, Artificial sequence
  Protein classification predicting sequence
QIALALRDEV

SEQ ID NO: 26645 - protein, 17 aa, Artificial sequence
  Protein classification predicting sequence
QIALALRDEVADLEAAG

SEQ ID NO: 26646 - protein, 6 aa, Artificial sequence
  Protein classification predicting sequence
SYGSRC

SEQ ID NO: 26647 - protein, 6 aa, Artificial sequence
  Protein classification predicting sequence
PPIIYG

SEQ ID NO: 26648 - protein, 10 aa, Artificial sequence
  Protein classification predicting sequence
QIALAINEEV

SEQ ID NO: 26649 - protein, 6 aa, Artificial sequence
  Protein classification predicting sequence
QIDEPA

SEQ ID NO: 26650 - protein, 5 aa, Artificial sequence
  Protein classification predicting sequence
HMCYS

SEQ ID NO: 26651 - protein, 11 aa, Artificial sequence
  Protein classification predicting sequence
NPDCGLKTRNW

SEQ ID NO: 26652 - protein, 20 aa, Artificial sequence
  Protein classification predicting sequence
TTTHILGYPRIGEKRELKFA

SEQ ID NO: 26653 - protein, 13 aa, Artificial sequence
  Protein classification predicting sequence
LWVASSCSLLHSP

SEQ ID NO: 26654 - protein, 6 aa, Artificial sequence
  Protein classification predicting sequence
SWFAFA

SEQ ID NO: 26655 - protein, 17 aa, Artificial sequence
  Protein classification predicting sequence
QALKGHIADAVKRQEAL

SEQ ID NO: 26656 - protein, 18 aa, Artificial sequence
  Protein classification predicting sequence
LDVLVHGEAERNDMVEYF

SEQ ID NO: 26657 - protein, 11 aa, Artificial sequence
  Protein classification predicting sequence
KGMLTGPVTIL

SEQ ID NO: 26658 - protein, 10 aa, Artificial sequence
  Protein classification predicting sequence
QLALALRDEV

SEQ ID NO: 26659 - protein, 18 aa, Artificial sequence
  Protein classification predicting sequence
FDRLTLLPRLLTAYQAIL

SEQ ID NO: 26660 - protein, 10 aa, Artificial sequence
  Protein classification predicting sequence
FGWVQSYGSR

SEQ ID NO: 26661 - protein, 23 aa, Artificial sequence
  Protein classification predicting sequence
KQMKGMLTGPVTILCWTFPREDI

SEQ ID NO: 26662 - protein, 24 aa, Artificial sequence
  Protein classification predicting sequence
AGINIIQIDEPAIREGLPLKKRDH

SEQ ID NO: 26663 - protein, 21 aa, Artificial sequence
  Protein classification predicting sequence
DADVITIETSRSNMELLKAFE

SEQ ID NO: 26664 - protein, 16 aa, Artificial sequence
  Protein classification predicting sequence
IRSDVKVLLTTYFDSV

SEQ ID NO: 26665 - protein, 8 aa, Artificial sequence
  Protein classification predicting sequence
WPETEAAL

SEQ ID NO: 26666 - protein, 8 aa, Artificial sequence
  Protein classification predicting sequence
RELRARHW

SEQ ID NO: 26667 - protein, 9 aa, Artificial sequence
  Protein classification predicting sequence
DGLHIDLVR

SEQ ID NO: 26668 - protein, 12 aa, Artificial sequence
  Protein classification predicting sequence
DEPALREGLPLR

SEQ ID NO: 26669 - protein, 22 aa, Artificial sequence
  Protein classification predicting sequence
PVGDFAWYDHVLTTSLLLGNVP

SEQ ID NO: 26670 - protein, 16 aa, Artificial sequence
  Protein classification predicting sequence
DIDTLFRIGRGRAPTG

SEQ ID NO: 26671 - protein, 6 aa, Artificial sequence
  Protein classification predicting sequence
LRLDFK

SEQ ID NO: 26672 - protein, 8 aa, Artificial sequence
  Protein classification predicting sequence
REGLPLRR

SEQ ID NO: 26673 - protein, 27 aa, Artificial sequence
  Protein classification predicting sequence
YPNEIGPGVYDIHSPNVPSVEWIEALL

SEQ ID NO: 26674 - protein, 6 aa, Artificial sequence
  Protein classification predicting sequence
GAGDQG

SEQ ID NO: 26675 - protein, 8 aa, Artificial sequence
  Protein classification predicting sequence
KTQVTVEY

SEQ ID NO: 26676 - protein, 7 aa, Artificial sequence
  Protein classification predicting sequence
PLSVFVD

SEQ ID NO: 26677 - protein, 6 aa, Artificial sequence
  Protein classification predicting sequence
LRRPIY

SEQ ID NO: 26678 - protein, 6 aa, Artificial sequence
  Protein classification predicting sequence
FTSESV

SEQ ID NO: 26679 - protein, 6 aa, Artificial sequence
  Protein classification predicting sequence
EGHPDK

SEQ ID NO: 26680 - protein, 13 aa, Artificial sequence
  Protein classification predicting sequence
GAGDQGLMFGYAS

SEQ ID NO: 26681 - protein, 12 aa, Artificial sequence
  Protein classification predicting sequence
GAGDQGLMFGYA

SEQ ID NO: 26682 - protein, 7 aa, Artificial sequence
  Protein classification predicting sequence
STQHDPE

SEQ ID NO: 26683 - protein, 6 aa, Artificial sequence
  Protein classification predicting sequence
FVIGGP

SEQ ID NO: 26684 - protein, 13 aa, Artificial sequence
  Protein classification predicting sequence
RYVAKNIVAAGLA

SEQ ID NO: 26685 - protein, 7 aa, Artificial sequence
  Protein classification predicting sequence
SISINTF

SEQ ID NO: 26686 - protein, 10 aa, Artificial sequence
  Protein classification predicting sequence
QDPESKVACE

SEQ ID NO: 26687 - protein, 7 aa, Artificial sequence
  Protein classification predicting sequence
LTEVRKN

SEQ ID NO: 26688 - protein, 15 aa, Artificial sequence
  Protein classification predicting sequence
YLTVTGTSAEHGDDG

SEQ ID NO: 26689 - protein, 12 aa, Artificial sequence
  Protein classification predicting sequence
GRGNRVNGLITP

SEQ ID NO: 26690 - protein, 10 aa, Artificial sequence
  Protein classification predicting sequence
GLITPMRPMS

SEQ ID NO: 26691 - protein, 11 aa, Artificial sequence
  Protein classification predicting sequence
LCRRVLVQVSY

SEQ ID NO: 26692 - protein, 6 aa, Artificial sequence
  Protein classification predicting sequence
FDFRPG

SEQ ID NO: 26693 - protein, 6 aa, Artificial sequence
  Protein classification predicting sequence
AWVDVE

SEQ ID NO: 26694 - protein, 9 aa, Artificial sequence
  Protein classification predicting sequence
VLSAIGKQS

SEQ ID NO: 26695 - protein, 22 aa, Artificial sequence
  Protein classification predicting sequence
TKILGAGDQGLMFGYASRETDV

SEQ ID NO: 26696 - protein, 7 aa, Artificial sequence
  Protein classification predicting sequence
LPWLRPD

SEQ ID NO: 26697 - protein, 8 aa, Artificial sequence
  Protein classification predicting sequence
KCQLTLKY

SEQ ID NO: 26698 - protein, 12 aa, Artificial sequence
  Protein classification predicting sequence
FSGKDPSKVDRS

SEQ ID NO: 26699 - protein, 12 aa, Artificial sequence
  Protein classification predicting sequence
THFDLTPQGIID

SEQ ID NO: 26700 - protein, 6 aa, Artificial sequence
  Protein classification predicting sequence
TAAYGH

SEQ ID NO: 26701 - protein, 6 aa, Artificial sequence
  Protein classification predicting sequence
YGHYGR

SEQ ID NO: 26702 - protein, 6 aa, Artificial sequence
  Protein classification predicting sequence
VTTGLV

SEQ ID NO: 26703 - protein, 9 aa, Artificial sequence
  Protein classification predicting sequence
GFDADTCAV

SEQ ID NO: 26704 - protein, 6 aa, Artificial sequence
  Protein classification predicting sequence
LRPDGK

SEQ ID NO: 26705 - protein, 7 aa, Artificial sequence
  Protein classification predicting sequence
GLTGRKI

SEQ ID NO: 26706 - protein, 7 aa, Artificial sequence
  Protein classification predicting sequence
ETFGTEK

SEQ ID NO: 26707 - protein, 11 aa, Artificial sequence
  Protein classification predicting sequence
VERKGIGHPDS

SEQ ID NO: 26708 - protein, 6 aa, Artificial sequence
  Protein classification predicting sequence
LHHNTD

SEQ ID NO: 26709 - protein, 11 aa, Artificial sequence
  Protein classification predicting sequence
GDDGSVGRGNR

SEQ ID NO: 26710 - protein, 7 aa, Artificial sequence
  Protein classification predicting sequence
RPMSMEA

SEQ ID NO: 26711 - protein, 6 aa, Artificial sequence
  Protein classification predicting sequence
DQVSDA

SEQ ID NO: 26712 - protein, 10 aa, Artificial sequence
  Protein classification predicting sequence
MVFGEITTKA

SEQ ID NO: 26713 - protein, 8 aa, Artificial sequence
  Protein classification predicting sequence
QSPDIAQG

SEQ ID NO: 26714 - protein, 6 aa, Artificial sequence
  Protein classification predicting sequence
DIAQGV

SEQ ID NO: 26715 - protein, 7 aa, Artificial sequence
  Protein classification predicting sequence
TDKAAAL

SEQ ID NO: 26716 - protein, 7 aa, Artificial sequence
  Protein classification predicting sequence
ELMPLPI

SEQ ID NO: 26717 - protein, 11 aa, Artificial sequence
  Protein classification predicting sequence
KVDRSAAYAAR

SEQ ID NO: 26718 - protein, 62 aa, Artificial sequence
  Protein classification predicting sequence
DTLSYLRPDGKTQVTVEYDENGKPVRVDTIVISTQHHPDVTWEEIDRDLKEHVIKAVVPAEL

SEQ ID NO: 26719 - protein, 15 aa, Artificial sequence
  Protein classification predicting sequence
LFTSESVTEGHPDKI

SEQ ID NO: 26720 - protein, 9 aa, Artificial sequence
  Protein classification predicting sequence
QVTVEYDEN

SEQ ID NO: 26721 - protein, 17 aa, Artificial sequence
  Protein classification predicting sequence
GDAGLTGRKIIVDTYGG

SEQ ID NO: 26722 - protein, 12 aa, Artificial sequence
  Protein classification predicting sequence
ARHGGGAFSGKD

SEQ ID NO: 26723 - protein, 17 aa, Artificial sequence
  Protein classification predicting sequence
AYAARYVAKNIVAAGLA

SEQ ID NO: 26724 - protein, 14 aa, Artificial sequence
  Protein classification predicting sequence
FDLRPAGIIKMLDL

SEQ ID NO: 26725 - protein, 11 aa, Artificial sequence
  Protein classification predicting sequence
IGYTRAKYGFD

SEQ ID NO: 26726 - protein, 16 aa, Artificial sequence
  Protein classification predicting sequence
FINPTGRFVIGGPQGD

SEQ ID NO: 26727 - protein, 14 aa, Artificial sequence
  Protein classification predicting sequence
PIYKQTAAYGHFGR

SEQ ID NO: 26728 - protein, 13 aa, Artificial sequence
  Protein classification predicting sequence
EGHPDKICDQISD

SEQ ID NO: 26729 - protein, 6 aa, Artificial sequence
  Protein classification predicting sequence
TYVDIP

SEQ ID NO: 26730 - protein, 7 aa, Artificial sequence
  Protein classification predicting sequence
DLKEHVI

SEQ ID NO: 26731 - protein, 11 aa, Artificial sequence
  Protein classification predicting sequence
EVQLAYAIGVA

SEQ ID NO: 26732 - protein, 6 aa, Artificial sequence
  Protein classification predicting sequence
TFGTGK

SEQ ID NO: 26733 - protein, 9 aa, Artificial sequence
  Protein classification predicting sequence
FDLRPAGII

SEQ ID NO: 26734 - protein, 11 aa, Artificial sequence
  Protein classification predicting sequence
ELMPLPISLAH

SEQ ID NO: 26735 - protein, 8 aa, Artificial sequence
  Protein classification predicting sequence
VQVAYAIG

SEQ ID NO: 26736 - protein, 7 aa, Artificial sequence
  Protein classification predicting sequence
AYAIGVA

SEQ ID NO: 26737 - protein, 8 aa, Artificial sequence
  Protein classification predicting sequence
YAIGVAEP

SEQ ID NO: 26738 - protein, 8 aa, Artificial sequence
  Protein classification predicting sequence
WERLNKVD

SEQ ID NO: 26739 - protein, 14 aa, Artificial sequence
  Protein classification predicting sequence
GLTGRKIIVDTYGG

SEQ ID NO: 26740 - protein, 9 aa, Artificial sequence
  Protein classification predicting sequence
TAAYGHFGR

SEQ ID NO: 26741 - protein, 6 aa, Artificial sequence
  Protein classification predicting sequence
TKFFIN

SEQ ID NO: 26742 - protein, 10 aa, Artificial sequence
  Protein classification predicting sequence
AKNIVAAGLA

SEQ ID NO: 26743 - protein, 7 aa, Artificial sequence
  Protein classification predicting sequence
QLAYAIG

SEQ ID NO: 26744 - protein, 8 aa, Artificial sequence
  Protein classification predicting sequence
ETFGTEKV

SEQ ID NO: 26745 - protein, 9 aa, Artificial sequence
  Protein classification predicting sequence
YAHRLVQRQ

SEQ ID NO: 26746 - protein, 18 aa, Artificial sequence
  Protein classification predicting sequence
GDCGLTGRKIIVDTYGGA

SEQ ID NO: 26747 - protein, 15 aa, Artificial sequence
  Protein classification predicting sequence
GLTGRKIIVDTYGGA

SEQ ID NO: 26748 - protein, 8 aa, Artificial sequence
  Protein classification predicting sequence
VSEGHPDK

SEQ ID NO: 26749 - protein, 8 aa, Artificial sequence
  Protein classification predicting sequence
KVDRSAAY

SEQ ID NO: 26750 - protein, 6 aa, Artificial sequence
  Protein classification predicting sequence
IKDIGY

SEQ ID NO: 26751 - protein, 10 aa, Artificial sequence
  Protein classification predicting sequence
ETPDLMPAPI

SEQ ID NO: 26752 - protein, 6 aa, Artificial sequence
  Protein classification predicting sequence
NPTGKF

SEQ ID NO: 26753 - protein, 16 aa, Artificial sequence
  Protein classification predicting sequence
GLTGRKIIVDTYGGAA

SEQ ID NO: 26754 - protein, 11 aa, Artificial sequence
  Protein classification predicting sequence
HGGGAFSGKDP

SEQ ID NO: 26755 - protein, 7 aa, Artificial sequence
  Protein classification predicting sequence
AYGHFGR

SEQ ID NO: 26756 - protein, 7 aa, Artificial sequence
  Protein classification predicting sequence
IGAGDQG

SEQ ID NO: 26757 - protein, 10 aa, Artificial sequence
  Protein classification predicting sequence
LTEVRKNGTC

SEQ ID NO: 26758 - protein, 14 aa, Artificial sequence
  Protein classification predicting sequence
WLRPDGKTQVTVEY

SEQ ID NO: 26759 - protein, 23 aa, Artificial sequence
  Protein classification predicting sequence
GFDANSCAVLSAIGKQSPDINQG

SEQ ID NO: 26760 - protein, 11 aa, Artificial sequence
  Protein classification predicting sequence
IGKQSPDINQG

SEQ ID NO: 26761 - protein, 12 aa, Artificial sequence
  Protein classification predicting sequence
TGRKIIVDTYGG

SEQ ID NO: 26762 - protein, 5 aa, Artificial sequence
  Protein classification predicting sequence
RCEIQ

SEQ ID NO: 26763 - protein, 7 aa, Artificial sequence
  Protein classification predicting sequence
QLSYAIG

SEQ ID NO: 26764 - protein, 9 aa, Artificial sequence
  Protein classification predicting sequence
MLNLLQPIY

SEQ ID NO: 26765 - protein, 7 aa, Artificial sequence
  Protein classification predicting sequence
EEITRNT

SEQ ID NO: 26766 - protein, 8 aa, Artificial sequence
  Protein classification predicting sequence
IGKQSPDI

SEQ ID NO: 26767 - protein, 11 aa, Artificial sequence
  Protein classification predicting sequence
RHGGGAFSGKD

SEQ ID NO: 26768 - protein, 12 aa, Artificial sequence
  Protein classification predicting sequence
YGHFGREEFPWE

SEQ ID NO: 26769 - protein, 7 aa, Artificial sequence
  Protein classification predicting sequence
QGAGDQG

SEQ ID NO: 26770 - protein, 6 aa, Artificial sequence
  Protein classification predicting sequence
IQMLDL

SEQ ID NO: 26771 - protein, 22 aa, Artificial sequence
  Protein classification predicting sequence
PEEIGAGDQGHMFGYATDETPE

SEQ ID NO: 26772 - protein, 6 aa, Artificial sequence
  Protein classification predicting sequence
RQAAKS

SEQ ID NO: 26773 - protein, 9 aa, Artificial sequence
  Protein classification predicting sequence
INLDLKRGG

SEQ ID NO: 26774 - protein, 7 aa, Artificial sequence
  Protein classification predicting sequence
ADQISDA

SEQ ID NO: 26775 - protein, 6 aa, Artificial sequence
  Protein classification predicting sequence
FDANSC

SEQ ID NO: 26776 - protein, 16 aa, Artificial sequence
  Protein classification predicting sequence
FSGKDPSKVDRSAAYA

SEQ ID NO: 26777 - protein, 18 aa, Artificial sequence
  Protein classification predicting sequence
FSGKDPSKVDRSAAYAAR

SEQ ID NO: 26778 - protein, 8 aa, Artificial sequence
  Protein classification predicting sequence
ARVAAETL

SEQ ID NO: 26779 - protein, 20 aa, Artificial sequence
  Protein classification predicting sequence
NTGLVVLAGEITTTANVDYI

SEQ ID NO: 26780 - protein, 9 aa, Artificial sequence
  Protein classification predicting sequence
QSPDIAQGV

SEQ ID NO: 26781 - protein, 12 aa, Artificial sequence
  Protein classification predicting sequence
INPTGRFVIGGP

SEQ ID NO: 26782 - protein, 6 aa, Artificial sequence
  Protein classification predicting sequence
RVACET

SEQ ID NO: 26783 - protein, 11 aa, Artificial sequence
  Protein classification predicting sequence
RVACETTVTTG

SEQ ID NO: 26784 - protein, 7 aa, Artificial sequence
  Protein classification predicting sequence
DIAMGVD

SEQ ID NO: 26785 - protein, 6 aa, Artificial sequence
  Protein classification predicting sequence
GGPQGD

SEQ ID NO: 26786 - protein, 13 aa, Artificial sequence
  Protein classification predicting sequence
PVSISVDTFGTGK

SEQ ID NO: 26787 - protein, 9 aa, Artificial sequence
  Protein classification predicting sequence
DQISDAVLD

SEQ ID NO: 26788 - protein, 10 aa, Artificial sequence
  Protein classification predicting sequence
DQISDAVLDA

SEQ ID NO: 26789 - protein, 18 aa, Artificial sequence
  Protein classification predicting sequence
RLFTSESVTEGHPDKICD

SEQ ID NO: 26790 - protein, 7 aa, Artificial sequence
  Protein classification predicting sequence
VHVVGEV

SEQ ID NO: 26791 - protein, 8 aa, Artificial sequence
  Protein classification predicting sequence
CGVSVSIG

SEQ ID NO: 26792 - protein, 6 aa, Artificial sequence
  Protein classification predicting sequence
RWVAKN

SEQ ID NO: 26793 - protein, 9 aa, Artificial sequence
  Protein classification predicting sequence
DTVVISTQH

SEQ ID NO: 26794 - protein, 7 aa, Artificial sequence
  Protein classification predicting sequence
VFDLRPA

SEQ ID NO: 26795 - protein, 6 aa, Artificial sequence
  Protein classification predicting sequence
ITRNTV

SEQ ID NO: 26796 - protein, 11 aa, Artificial sequence
  Protein classification predicting sequence
WLRPDAKSQVT

SEQ ID NO: 26797 - protein, 6 aa, Artificial sequence
  Protein classification predicting sequence
VLSTQH

SEQ ID NO: 26798 - protein, 12 aa, Artificial sequence
  Protein classification predicting sequence
VLSTQHSPEISQ

SEQ ID NO: 26799 - protein, 17 aa, Artificial sequence
  Protein classification predicting sequence
GDCGLTGRKIIVDTYGG

SEQ ID NO: 26800 - protein, 24 aa, Artificial sequence
  Protein classification predicting sequence
GDCGLTGRKIIVDTYGGMARHGGG

SEQ ID NO: 26801 - protein, 11 aa, Artificial sequence
  Protein classification predicting sequence
YGHFGREEPEF

SEQ ID NO: 26802 - protein, 5 aa, Artificial sequence
  Protein classification predicting sequence
WERTD

SEQ ID NO: 26803 - protein, 8 aa, Artificial sequence
  Protein classification predicting sequence
SRVAVETL

SEQ ID NO: 26804 - protein, 8 aa, Artificial sequence
  Protein classification predicting sequence
RRLAELRK

SEQ ID NO: 26805 - protein, 8 aa, Artificial sequence
  Protein classification predicting sequence
LRPDAKAQ

SEQ ID NO: 26806 - protein, 12 aa, Artificial sequence
  Protein classification predicting sequence
VTTGMALIAGEI

SEQ ID NO: 26807 - protein, 7 aa, Artificial sequence
  Protein classification predicting sequence
TIKEIGY

SEQ ID NO: 26808 - protein, 6 aa, Artificial sequence
  Protein classification predicting sequence
IGYNSS

SEQ ID NO: 26809 - protein, 6 aa, Artificial sequence
  Protein classification predicting sequence
QVTIEY

SEQ ID NO: 26810 - protein, 6 aa, Artificial sequence
  Protein classification predicting sequence
STQHDE

SEQ ID NO: 26811 - protein, 6 aa, Artificial sequence
  Protein classification predicting sequence
RYVAKN

SEQ ID NO: 26812 - protein, 7 aa, Artificial sequence
  Protein classification predicting sequence
QVAYAIG

SEQ ID NO: 26813 - protein, 7 aa, Artificial sequence
  Protein classification predicting sequence
DLLRPIY

SEQ ID NO: 26814 - protein, 6 aa, Artificial sequence
  Protein classification predicting sequence
LMPAPI

SEQ ID NO: 26815 - protein, 9 aa, Artificial sequence
  Protein classification predicting sequence
TGRFVIGGP

SEQ ID NO: 26816 - protein, 8 aa, Artificial sequence
  Protein classification predicting sequence
GLTGRKII

SEQ ID NO: 26817 - protein, 7 aa, Artificial sequence
  Protein classification predicting sequence
ALDQQSP

SEQ ID NO: 26818 - protein, 16 aa, Artificial sequence
  Protein classification predicting sequence
MFGYATDETEECMPLT

SEQ ID NO: 26819 - protein, 6 aa, Artificial sequence
  Protein classification predicting sequence
GGPMGD

SEQ ID NO: 26820 - protein, 12 aa, Artificial sequence
  Protein classification predicting sequence
TKVDRSAAYAAR

SEQ ID NO: 26821 - protein, 9 aa, Artificial sequence
  Protein classification predicting sequence
SDAILDAIL

SEQ ID NO: 26822 - protein, 10 aa, Artificial sequence
  Protein classification predicting sequence
VFGEISTTAY

SEQ ID NO: 26823 - protein, 13 aa, Artificial sequence
  Protein classification predicting sequence
IGAGDQGLMFGFA

SEQ ID NO: 26824 - protein, 9 aa, Artificial sequence
  Protein classification predicting sequence
TPELMPLPI

SEQ ID NO: 26825 - protein, 7 aa, Artificial sequence
  Protein classification predicting sequence
QVTVEYD

SEQ ID NO: 26826 - protein, 8 aa, Artificial sequence
  Protein classification predicting sequence
LPWEQTDK

SEQ ID NO: 26827 - protein, 28 aa, Artificial sequence
  Protein classification predicting sequence
DPLEQGAGDQGLMFGYATNETDVLMPAP

SEQ ID NO: 26828 - protein, 7 aa, Artificial sequence
  Protein classification predicting sequence
ARVACET

SEQ ID NO: 26829 - protein, 6 aa, Artificial sequence
  Protein classification predicting sequence
AIGKQS

SEQ ID NO: 26830 - protein, 7 aa, Artificial sequence
  Protein classification predicting sequence
AELRKSG

SEQ ID NO: 26831 - protein, 7 aa, Artificial sequence
  Protein classification predicting sequence
IGGPQGD

SEQ ID NO: 26832 - protein, 6 aa, Artificial sequence
  Protein classification predicting sequence
EVFDLR

SEQ ID NO: 26833 - protein, 8 aa, Artificial sequence
  Protein classification predicting sequence
GEITTSTY

SEQ ID NO: 26834 - protein, 10 aa, Artificial sequence
  Protein classification predicting sequence
GAGDQGIMFG

SEQ ID NO: 26835 - protein, 7 aa, Artificial sequence
  Protein classification predicting sequence
TVREIGY

SEQ ID NO: 26836 - protein, 7 aa, Artificial sequence
  Protein classification predicting sequence
ETEELMP

SEQ ID NO: 26837 - protein, 15 aa, Artificial sequence
  Protein classification predicting sequence
EYDENGKPVRVDTIV

SEQ ID NO: 26838 - protein, 6 aa, Artificial sequence
  Protein classification predicting sequence
DTIVVS

SEQ ID NO: 26839 - protein, 12 aa, Artificial sequence
  Protein classification predicting sequence
FSGKDPTKVDRS

SEQ ID NO: 26840 - protein, 17 aa, Artificial sequence
  Protein classification predicting sequence
FTSESVSEGHPDKVADQ

SEQ ID NO: 26841 - protein, 20 aa, Artificial sequence
  Protein classification predicting sequence
HGGGAFSGKDPSKVDRSAAY

SEQ ID NO: 26842 - protein, 6 aa, Artificial sequence
  Protein classification predicting sequence
QVTVEY

SEQ ID NO: 26843 - protein, 8 aa, Artificial sequence
  Protein classification predicting sequence
GRFVIGGP

SEQ ID NO: 26844 - protein, 6 aa, Artificial sequence
  Protein classification predicting sequence
VETFGT

SEQ ID NO: 26845 - protein, 5 aa, Artificial sequence
  Protein classification predicting sequence
DLPWE

SEQ ID NO: 26846 - protein, 11 aa, Artificial sequence
  Protein classification predicting sequence
QSPDINQGVDR

SEQ ID NO: 26847 - protein, 9 aa, Artificial sequence
  Protein classification predicting sequence
MFGYATNET

SEQ ID NO: 26848 - protein, 29 aa, Artificial sequence
  Protein classification predicting sequence
ARHGGGAFSGKDPSKVDRSAAYAARYVAK

SEQ ID NO: 26849 - protein, 15 aa, Artificial sequence
  Protein classification predicting sequence
KVDRSAAYAARYVAK

SEQ ID NO: 26850 - protein, 11 aa, Artificial sequence
  Protein classification predicting sequence
PTSIMVETFGT

SEQ ID NO: 26851 - protein, 7 aa, Artificial sequence
  Protein classification predicting sequence
ITYAHRL

SEQ ID NO: 26852 - protein, 9 aa, Artificial sequence
  Protein classification predicting sequence
DAVVLSTQH

SEQ ID NO: 26853 - protein, 11 aa, Artificial sequence
  Protein classification predicting sequence
ARHGGGAFSGK

SEQ ID NO: 26854 - protein, 7 aa, Artificial sequence
  Protein classification predicting sequence
SYAIGVA

SEQ ID NO: 26855 - protein, 9 aa, Artificial sequence
  Protein classification predicting sequence
SYAIGVAEP

SEQ ID NO: 26856 - protein, 9 aa, Artificial sequence
  Protein classification predicting sequence
FDLRPYGLI

SEQ ID NO: 26857 - protein, 8 aa, Artificial sequence
  Protein classification predicting sequence
IDLTIAAA

SEQ ID NO: 26858 - protein, 11 aa, Artificial sequence
  Protein classification predicting sequence
MSMEATSGKNP

SEQ ID NO: 26859 - protein, 7 aa, Artificial sequence
  Protein classification predicting sequence
GKNPVNH

SEQ ID NO: 26860 - protein, 9 aa, Artificial sequence
  Protein classification predicting sequence
DTIVISTQH

SEQ ID NO: 26861 - protein, 8 aa, Artificial sequence
  Protein classification predicting sequence
LDLLRPIY

SEQ ID NO: 26862 - protein, 18 aa, Artificial sequence
  Protein classification predicting sequence
LATKLGARLTEVRKNGTC

SEQ ID NO: 26863 - protein, 10 aa, Artificial sequence
  Protein classification predicting sequence
LRPDGKTQVT

SEQ ID NO: 26864 - protein, 12 aa, Artificial sequence
  Protein classification predicting sequence
DLKEHVIKPVIP

SEQ ID NO: 26865 - protein, 23 aa, Artificial sequence
  Protein classification predicting sequence
TIFHLNPSGRFVIGGPHGDAGLT

SEQ ID NO: 26866 - protein, 7 aa, Artificial sequence
  Protein classification predicting sequence
RQAAKSI

SEQ ID NO: 26867 - protein, 6 aa, Artificial sequence
  Protein classification predicting sequence
PIRVHT

SEQ ID NO: 26868 - protein, 7 aa, Artificial sequence
  Protein classification predicting sequence
GFDGASC

SEQ ID NO: 26869 - protein, 13 aa, Artificial sequence
  Protein classification predicting sequence
EAVMEEIIKPVLP

SEQ ID NO: 26870 - protein, 21 aa, Artificial sequence
  Protein classification predicting sequence
GGPMGDCGLTGRKIIVDTYGG

SEQ ID NO: 26871 - protein, 16 aa, Artificial sequence
  Protein classification predicting sequence
KVDRSAAYAARYVAKN

SEQ ID NO: 26872 - protein, 12 aa, Artificial sequence
  Protein classification predicting sequence
SYAIGVAEPTSI

SEQ ID NO: 26873 - protein, 8 aa, Artificial sequence
  Protein classification predicting sequence
DTVVISTQ

SEQ ID NO: 26874 - protein, 10 aa, Artificial sequence
  Protein classification predicting sequence
QTAAYGHFGR

SEQ ID NO: 26875 - protein, 7 aa, Artificial sequence
  Protein classification predicting sequence
VVRETIK

SEQ ID NO: 26876 - protein, 10 aa, Artificial sequence
  Protein classification predicting sequence
GAGDQGMMFG

SEQ ID NO: 26877 - protein, 23 aa, Artificial sequence
  Protein classification predicting sequence
LRKSGEISYLRPDAKSQVTVEYD

SEQ ID NO: 26878 - protein, 9 aa, Artificial sequence
  Protein classification predicting sequence
KVIKAVIPA

SEQ ID NO: 26879 - protein, 15 aa, Artificial sequence
  Protein classification predicting sequence
GLTGRKIIVDTYGGY

SEQ ID NO: 26880 - protein, 10 aa, Artificial sequence
  Protein classification predicting sequence
HGGGAFSGKD

SEQ ID NO: 26881 - protein, 5 aa, Artificial sequence
  Protein classification predicting sequence
YAARY

SEQ ID NO: 26882 - protein, 8 aa, Artificial sequence
  Protein classification predicting sequence
GIIQMLDL

SEQ ID NO: 26883 - protein, 7 aa, Artificial sequence
  Protein classification predicting sequence
VVLSTQH

SEQ ID NO: 26884 - protein, 7 aa, Artificial sequence
  Protein classification predicting sequence
IVDTYGG

SEQ ID NO: 26885 - protein, 6 aa, Artificial sequence
  Protein classification predicting sequence
ARVACE

SEQ ID NO: 26886 - protein, 15 aa, Artificial sequence
  Protein classification predicting sequence
SCAVLSAIGKQSPDI

SEQ ID NO: 26887 - protein, 6 aa, Artificial sequence
  Protein classification predicting sequence
SKVACE

SEQ ID NO: 26888 - protein, 6 aa, Artificial sequence
  Protein classification predicting sequence
CNVLVA

SEQ ID NO: 26889 - protein, 8 aa, Artificial sequence
  Protein classification predicting sequence
IEQQSPDI

SEQ ID NO: 26890 - protein, 8 aa, Artificial sequence
  Protein classification predicting sequence
ETETLMPL

SEQ ID NO: 26891 - protein, 12 aa, Artificial sequence
  Protein classification predicting sequence
GAHGGGAFSGKD

SEQ ID NO: 26892 - protein, 7 aa, Artificial sequence
  Protein classification predicting sequence
ISDSILD

SEQ ID NO: 26893 - protein, 14 aa, Artificial sequence
  Protein classification predicting sequence
TTGLVHVAGEVTTK

SEQ ID NO: 26894 - protein, 12 aa, Artificial sequence
  Protein classification predicting sequence
AYAIGKAAPVGL

SEQ ID NO: 26895 - protein, 6 aa, Artificial sequence
  Protein classification predicting sequence
PDFTWE

SEQ ID NO: 26896 - protein, 9 aa, Artificial sequence
  Protein classification predicting sequence
TKYFINPTG

SEQ ID NO: 26897 - protein, 6 aa, Artificial sequence
  Protein classification predicting sequence
GEITTS

SEQ ID NO: 26898 - protein, 19 aa, Artificial sequence
  Protein classification predicting sequence
IGYTRAKYGFDAETCAVLT

SEQ ID NO: 26899 - protein, 9 aa, Artificial sequence
  Protein classification predicting sequence
LDACLEQDP

SEQ ID NO: 26900 - protein, 12 aa, Artificial sequence
  Protein classification predicting sequence
SKVACETCTKTN

SEQ ID NO: 26901 - protein, 15 aa, Artificial sequence
  Protein classification predicting sequence
IEQQSPDIAQGVHGH

SEQ ID NO: 26902 - protein, 14 aa, Artificial sequence
  Protein classification predicting sequence
VGGEITTSAWVDIE

SEQ ID NO: 26903 - protein, 6 aa, Artificial sequence
  Protein classification predicting sequence
SCAVLN

SEQ ID NO: 26904 - protein, 9 aa, Artificial sequence
  Protein classification predicting sequence
NETEVLMPA

SEQ ID NO: 26905 - protein, 10 aa, Artificial sequence
  Protein classification predicting sequence
LRPDAKSQVT

SEQ ID NO: 26906 - protein, 14 aa, Artificial sequence
  Protein classification predicting sequence
EAVMEEIIKPVLPA

SEQ ID NO: 26907 - protein, 7 aa, Artificial sequence
  Protein classification predicting sequence
FPWEKTD

SEQ ID NO: 26908 - protein, 5 aa, Artificial sequence
  Protein classification predicting sequence
WEKTD

SEQ ID NO: 26909 - protein, 9 aa, Artificial sequence
  Protein classification predicting sequence
SDAVLDACL

SEQ ID NO: 26910 - protein, 7 aa, Artificial sequence
  Protein classification predicting sequence
IVAAGLA

SEQ ID NO: 26911 - protein, 15 aa, Artificial sequence
  Protein classification predicting sequence
EPLSVFVDTYGTGKI

SEQ ID NO: 26912 - protein, 7 aa, Artificial sequence
  Protein classification predicting sequence
ILKIVKE

SEQ ID NO: 26913 - protein, 13 aa, Artificial sequence
  Protein classification predicting sequence
LKQDPNAKVACET

SEQ ID NO: 26914 - protein, 6 aa, Artificial sequence
  Protein classification predicting sequence
AKNLVA

SEQ ID NO: 26915 - protein, 7 aa, Artificial sequence
  Protein classification predicting sequence
QVSYAIG

SEQ ID NO: 26916 - protein, 9 aa, Artificial sequence
  Protein classification predicting sequence
ANDTSFGVG

SEQ ID NO: 26917 - protein, 10 aa, Artificial sequence
  Protein classification predicting sequence
EGHPDKIADQ

SEQ ID NO: 26918 - protein, 7 aa, Artificial sequence
  Protein classification predicting sequence
SDAVLDA

SEQ ID NO: 26919 - protein, 8 aa, Artificial sequence
  Protein classification predicting sequence
RVAVETLV

SEQ ID NO: 26920 - protein, 8 aa, Artificial sequence
  Protein classification predicting sequence
EAVMEEII

SEQ ID NO: 26921 - protein, 14 aa, Artificial sequence
  Protein classification predicting sequence
GRYVAKNIVAAGLA

SEQ ID NO: 26922 - protein, 7 aa, Artificial sequence
  Protein classification predicting sequence
WERTDKA

SEQ ID NO: 26923 - protein, 7 aa, Artificial sequence
  Protein classification predicting sequence
EIVERKG

SEQ ID NO: 26924 - protein, 10 aa, Artificial sequence
  Protein classification predicting sequence
VSRALCREYI

SEQ ID NO: 26925 - protein, 7 aa, Artificial sequence
  Protein classification predicting sequence
VFVNTAD

SEQ ID NO: 26926 - protein, 8 aa, Artificial sequence
  Protein classification predicting sequence
DGIAESVS

SEQ ID NO: 26927 - protein, 8 aa, Artificial sequence
  Protein classification predicting sequence
TVTGTSAE

SEQ ID NO: 26928 - protein, 30 aa, Artificial sequence
  Protein classification predicting sequence
TFLFTSESVNEGHPDKLCDQISDAVLDACL

SEQ ID NO: 26929 - protein, 23 aa, Artificial sequence
  Protein classification predicting sequence
SKVACETCTKTNMVMVFGEITTK

SEQ ID NO: 26930 - protein, 7 aa, Artificial sequence
  Protein classification predicting sequence
DVGLDAD

SEQ ID NO: 26931 - protein, 9 aa, Artificial sequence
  Protein classification predicting sequence
KENFDFRPG

SEQ ID NO: 26932 - protein, 11 aa, Artificial sequence
  Protein classification predicting sequence
FSGKDPSKVDR

SEQ ID NO: 26933 - protein, 10 aa, Artificial sequence
  Protein classification predicting sequence
KGFDGASCGV

SEQ ID NO: 26934 - protein, 9 aa, Artificial sequence
  Protein classification predicting sequence
EVQVAYAIG

SEQ ID NO: 26935 - protein, 7 aa, Artificial sequence
  Protein classification predicting sequence
LDLKKPI

SEQ ID NO: 26936 - protein, 7 aa, Artificial sequence
  Protein classification predicting sequence
VRLDTVV

SEQ ID NO: 26937 - protein, 21 aa, Artificial sequence
  Protein classification predicting sequence
GGPMGDAGLTGRKIIVDTYGG

SEQ ID NO: 26938 - protein, 6 aa, Artificial sequence
  Protein classification predicting sequence
FSGKDP

SEQ ID NO: 26939 - protein, 12 aa, Artificial sequence
  Protein classification predicting sequence
GHPDKICDQISD

SEQ ID NO: 26940 - protein, 7 aa, Artificial sequence
  Protein classification predicting sequence
AKNLVAA

SEQ ID NO: 26941 - protein, 9 aa, Artificial sequence
  Protein classification predicting sequence
VHVAGEVTT

SEQ ID NO: 26942 - protein, 9 aa, Artificial sequence
  Protein classification predicting sequence
LVNPTGKFV

SEQ ID NO: 26943 - protein, 7 aa, Artificial sequence
  Protein classification predicting sequence
GEVTTSA

SEQ ID NO: 26944 - protein, 7 aa, Artificial sequence
  Protein classification predicting sequence
LFTSESV

SEQ ID NO: 26945 - protein, 6 aa, Artificial sequence
  Protein classification predicting sequence
YVDIPK

SEQ ID NO: 26946 - protein, 6 aa, Artificial sequence
  Protein classification predicting sequence
GLARRC

SEQ ID NO: 26947 - protein, 9 aa, Artificial sequence
  Protein classification predicting sequence
LPWLRPDAK

SEQ ID NO: 26948 - protein, 6 aa, Artificial sequence
  Protein classification predicting sequence
STQHDP

SEQ ID NO: 26949 - protein, 11 aa, Artificial sequence
  Protein classification predicting sequence
NPTGRFVIGGP

SEQ ID NO: 26950 - protein, 10 aa, Artificial sequence
  Protein classification predicting sequence
LVREHFDLRP

SEQ ID NO: 26951 - protein, 6 aa, Artificial sequence
  Protein classification predicting sequence
NFDLRP

SEQ ID NO: 26952 - protein, 6 aa, Artificial sequence
  Protein classification predicting sequence
TCAVLT

SEQ ID NO: 26953 - protein, 9 aa, Artificial sequence
  Protein classification predicting sequence
HRLVEQQAK

SEQ ID NO: 26954 - protein, 9 aa, Artificial sequence
  Protein classification predicting sequence
LRPDAKSQV

SEQ ID NO: 26955 - protein, 7 aa, Artificial sequence
  Protein classification predicting sequence
GTGKIPD

SEQ ID NO: 26956 - protein, 12 aa, Artificial sequence
  Protein classification predicting sequence
PYLRPDGKTQVT

SEQ ID NO: 26957 - protein, 14 aa, Artificial sequence
  Protein classification predicting sequence
LFTSESVTEGHPDK

SEQ ID NO: 26958 - protein, 10 aa, Artificial sequence
  Protein classification predicting sequence
DPNARVACET

SEQ ID NO: 26959 - protein, 8 aa, Artificial sequence
  Protein classification predicting sequence
LTAIDEQS

SEQ ID NO: 26960 - protein, 27 aa, Artificial sequence
  Protein classification predicting sequence
GLTGRKIIVDTYGGYARHGGGAFSGKD

SEQ ID NO: 26961 - protein, 14 aa, Artificial sequence
  Protein classification predicting sequence
KIVGVDAVVLSTQH

SEQ ID NO: 26962 - protein, 16 aa, Artificial sequence
  Protein classification predicting sequence
TKYFINPTGRFVIGGP

SEQ ID NO: 26963 - protein, 10 aa, Artificial sequence
  Protein classification predicting sequence
YEKIVRDTCR

SEQ ID NO: 26964 - protein, 6 aa, Artificial sequence
  Protein classification predicting sequence
ATKLGA

SEQ ID NO: 26965 - protein, 6 aa, Artificial sequence
  Protein classification predicting sequence
NDNGAM

SEQ ID NO: 26966 - protein, 9 aa, Artificial sequence
  Protein classification predicting sequence
VQVSYAIGV

SEQ ID NO: 26967 - protein, 7 aa, Artificial sequence
  Protein classification predicting sequence
FDFRPGM

SEQ ID NO: 26968 - protein, 14 aa, Artificial sequence
  Protein classification predicting sequence
LFTSESVSEGHPDK

SEQ ID NO: 26969 - protein, 13 aa, Artificial sequence
  Protein classification predicting sequence
QGAGDQGLMFGYA

SEQ ID NO: 26970 - protein, 13 aa, Artificial sequence
  Protein classification predicting sequence
LPWLRPDAKSQVT

SEQ ID NO: 26971 - protein, 10 aa, Artificial sequence
  Protein classification predicting sequence
EAVMEEIIKP

SEQ ID NO: 26972 - protein, 13 aa, Artificial sequence
  Protein classification predicting sequence
FINPTGRFVIGGP

SEQ ID NO: 26973 - protein, 15 aa, Artificial sequence
  Protein classification predicting sequence
VGGEITTSAWVDIEE

SEQ ID NO: 26974 - protein, 15 aa, Artificial sequence
  Protein classification predicting sequence
GKIVGIDAVVLSTQH

SEQ ID NO: 26975 - protein, 13 aa, Artificial sequence
  Protein classification predicting sequence
ETFGTEKVSHDII

SEQ ID NO: 26976 - protein, 27 aa, Artificial sequence
  Protein classification predicting sequence
LLQPIYKKTAAYGHFGREEFPWEATDK

SEQ ID NO: 26977 - protein, 6 aa, Artificial sequence
  Protein classification predicting sequence
YLTVTG

SEQ ID NO: 26978 - protein, 20 aa, Artificial sequence
  Protein classification predicting sequence
PEEIGAGDQGHMFGYATDET

SEQ ID NO: 26979 - protein, 9 aa, Artificial sequence
  Protein classification predicting sequence
MFGYATDET

SEQ ID NO: 26980 - protein, 8 aa, Artificial sequence
  Protein classification predicting sequence
NDNGAMVP

SEQ ID NO: 26981 - protein, 15 aa, Artificial sequence
  Protein classification predicting sequence
RVHTVLISTQHDETV

SEQ ID NO: 26982 - protein, 18 aa, Artificial sequence
  Protein classification predicting sequence
DLKEHVIKPVIPEKYLDE

SEQ ID NO: 26983 - protein, 21 aa, Artificial sequence
  Protein classification predicting sequence
CKVLVNIEQQSPDIAQGVHGH

SEQ ID NO: 26984 - protein, 7 aa, Artificial sequence
  Protein classification predicting sequence
IPDKEIL

SEQ ID NO: 26985 - protein, 10 aa, Artificial sequence
  Protein classification predicting sequence
DPDSKVACET

SEQ ID NO: 26986 - protein, 7 aa, Artificial sequence
  Protein classification predicting sequence
SKVACET

SEQ ID NO: 26987 - protein, 5 aa, Artificial sequence
  Protein classification predicting sequence
VACET

SEQ ID NO: 26988 - protein, 7 aa, Artificial sequence
  Protein classification predicting sequence
ISDAVLD

SEQ ID NO: 26989 - protein, 10 aa, Artificial sequence
  Protein classification predicting sequence
AYAMRWVAKN

SEQ ID NO: 26990 - protein, 7 aa, Artificial sequence
  Protein classification predicting sequence
PDGKTQV

SEQ ID NO: 26991 - protein, 8 aa, Artificial sequence
  Protein classification predicting sequence
TILISTQH

SEQ ID NO: 26992 - protein, 6 aa, Artificial sequence
  Protein classification predicting sequence
YGHFGR

SEQ ID NO: 26993 - protein, 13 aa, Artificial sequence
  Protein classification predicting sequence
FTSESVSEGHPDK

SEQ ID NO: 26994 - protein, 21 aa, Artificial sequence
  Protein classification predicting sequence
FTSESVSEGHPDKIADQISDA

SEQ ID NO: 26995 - protein, 12 aa, Artificial sequence
  Protein classification predicting sequence
VGIDAVVLSTQH

SEQ ID NO: 26996 - protein, 10 aa, Artificial sequence
  Protein classification predicting sequence
GLTGRKIIVD

SEQ ID NO: 26997 - protein, 9 aa, Artificial sequence
  Protein classification predicting sequence
QVSYAIGVA

SEQ ID NO: 26998 - protein, 18 aa, Artificial sequence
  Protein classification predicting sequence
IGGPVGDCGLTGRKIIVD

SEQ ID NO: 26999 - protein, 7 aa, Artificial sequence
  Protein classification predicting sequence
HVGKIYN

SEQ ID NO: 27000 - protein, 12 aa, Artificial sequence
  Protein classification predicting sequence
GRGNRANGLITP

SEQ ID NO: 27001 - protein, 9 aa, Artificial sequence
  Protein classification predicting sequence
EAAAGKNPV

SEQ ID NO: 27002 - protein, 7 aa, Artificial sequence
  Protein classification predicting sequence
APLSETE

SEQ ID NO: 27003 - protein, 15 aa, Artificial sequence
  Protein classification predicting sequence
EIDLTIAAAIVDSEV

SEQ ID NO: 27004 - protein, 6 aa, Artificial sequence
  Protein classification predicting sequence
KVMGLR

SEQ ID NO: 27005 - protein, 13 aa, Artificial sequence
  Protein classification predicting sequence
KPIYILLSGRAVE

SEQ ID NO: 27006 - protein, 27 aa, Artificial sequence
  Protein classification predicting sequence
LFTSESVSEGHPDKVADQISDAILDAI

SEQ ID NO: 27007 - protein, 12 aa, Artificial sequence
  Protein classification predicting sequence
ADQISDAILDAI

SEQ ID NO: 27008 - protein, 27 aa, Artificial sequence
  Protein classification predicting sequence
YGIDYKGCAVLVAYDKQSPDIAQGVDR

SEQ ID NO: 27009 - protein, 18 aa, Artificial sequence
  Protein classification predicting sequence
QGAGDQGLMFGYACDETP

SEQ ID NO: 27010 - protein, 7 aa, Artificial sequence
  Protein classification predicting sequence
HRLVERQ

SEQ ID NO: 27011 - protein, 21 aa, Artificial sequence
  Protein classification predicting sequence
HGGGAFSGKDPSKVDRSAAYA

SEQ ID NO: 27012 - protein, 23 aa, Artificial sequence
  Protein classification predicting sequence
PINITVYTEGTGVIPDEQIAKLV

SEQ ID NO: 27013 - protein, 7 aa, Artificial sequence
  Protein classification predicting sequence
EHFDLRP

SEQ ID NO: 27014 - protein, 7 aa, Artificial sequence
  Protein classification predicting sequence
WEATDKA

SEQ ID NO: 27015 - protein, 8 aa, Artificial sequence
  Protein classification predicting sequence
VVLAGEIT

SEQ ID NO: 27016 - protein, 12 aa, Artificial sequence
  Protein classification predicting sequence
GAGDQGLMFGFA

SEQ ID NO: 27017 - protein, 7 aa, Artificial sequence
  Protein classification predicting sequence
NPTGRFV

SEQ ID NO: 27018 - protein, 24 aa, Artificial sequence
  Protein classification predicting sequence
FTSESVSEGHPDKIADQISDAVLD

SEQ ID NO: 27019 - protein, 16 aa, Artificial sequence
  Protein classification predicting sequence
TKYLINPTGRFVIGGP

SEQ ID NO: 27020 - protein, 6 aa, Artificial sequence
  Protein classification predicting sequence
DRSAAY

SEQ ID NO: 27021 - protein, 20 aa, Artificial sequence
  Protein classification predicting sequence
IDQKSLQEAVMEEIIKPILP

SEQ ID NO: 27022 - protein, 37 aa, Artificial sequence
  Protein classification predicting sequence
LLVREFFDLRPYGLIQMLDLLHPIYKETAAYGHFGRE

SEQ ID NO: 27023 - protein, 6 aa, Artificial sequence
  Protein classification predicting sequence
VVSAQH

SEQ ID NO: 27024 - protein, 21 aa, Artificial sequence
  Protein classification predicting sequence
GGPQGDAGLTGRKIIVDTYGG

SEQ ID NO: 27025 - protein, 7 aa, Artificial sequence
  Protein classification predicting sequence
TTSAWVD

SEQ ID NO: 27026 - protein, 15 aa, Artificial sequence
  Protein classification predicting sequence
AIGKQSPDINQGVDR

SEQ ID NO: 27027 - protein, 14 aa, Artificial sequence
  Protein classification predicting sequence
LPWLRPDAKSQVTF

SEQ ID NO: 27028 - protein, 7 aa, Artificial sequence
  Protein classification predicting sequence
KIVGIDA

SEQ ID NO: 27029 - protein, 6 aa, Artificial sequence
  Protein classification predicting sequence
SPDIAQ

SEQ ID NO: 27030 - protein, 30 aa, Artificial sequence
  Protein classification predicting sequence
INPTGRFVIGGPQGDAGLTGRKIIVDTYGG

SEQ ID NO: 27031 - protein, 6 aa, Artificial sequence
  Protein classification predicting sequence
ARHGGG

SEQ ID NO: 27032 - protein, 13 aa, Artificial sequence
  Protein classification predicting sequence
ARHGGGCFSGKDP

SEQ ID NO: 27033 - protein, 9 aa, Artificial sequence
  Protein classification predicting sequence
DQVSDAILD

SEQ ID NO: 27034 - protein, 20 aa, Artificial sequence
  Protein classification predicting sequence
GEISTTTYVDIPKVVRETIK

SEQ ID NO: 27035 - protein, 9 aa, Artificial sequence
  Protein classification predicting sequence
IGYTRAKYG

SEQ ID NO: 27036 - protein, 13 aa, Artificial sequence
  Protein classification predicting sequence
GAGDQGLMFGYAT

SEQ ID NO: 27037 - protein, 9 aa, Artificial sequence
  Protein classification predicting sequence
LSHQLAKRL

SEQ ID NO: 27038 - protein, 7 aa, Artificial sequence
  Protein classification predicting sequence
YLRPDGK

SEQ ID NO: 27039 - protein, 11 aa, Artificial sequence
  Protein classification predicting sequence
RIDTIVVSTQH

SEQ ID NO: 27040 - protein, 7 aa, Artificial sequence
  Protein classification predicting sequence
HVIYPTV

SEQ ID NO: 27041 - protein, 28 aa, Artificial sequence
  Protein classification predicting sequence
NKRLFTSESVTEGHPDKIADQVSDAILD

SEQ ID NO: 27042 - protein, 23 aa, Artificial sequence
  Protein classification predicting sequence
ILKDDPNARVACETTVTTGMALI

SEQ ID NO: 27043 - protein, 22 aa, Artificial sequence
  Protein classification predicting sequence
LTAIDEQSPDIAQGVDKALEYR

SEQ ID NO: 27044 - protein, 21 aa, Artificial sequence
  Protein classification predicting sequence
SEEEIEATGAGDQGLMFGYAT

SEQ ID NO: 27045 - protein, 23 aa, Artificial sequence
  Protein classification predicting sequence
KVDRSAAYAARYVAKNIVAAGLA

SEQ ID NO: 27046 - protein, 27 aa, Artificial sequence
  Protein classification predicting sequence
LVEAVRKHFDLRPAGIIKMLDLKQPIY

SEQ ID NO: 27047 - protein, 7 aa, Artificial sequence
  Protein classification predicting sequence
DINRVVR

SEQ ID NO: 27048 - protein, 20 aa, Artificial sequence
  Protein classification predicting sequence
AEYGFSAESVGVHPSLVEQS

SEQ ID NO: 27049 - protein, 26 aa, Artificial sequence
  Protein classification predicting sequence
VGVHPSLVEQSPDIAQGVNEALEVRG

SEQ ID NO: 27050 - protein, 11 aa, Artificial sequence
  Protein classification predicting sequence
YLRPDAKSQVT

SEQ ID NO: 27051 - protein, 16 aa, Artificial sequence
  Protein classification predicting sequence
TKFFINPTGRFVIGGP

SEQ ID NO: 27052 - protein, 65 aa, Artificial sequence
  Protein classification predicting sequence
TKFFINPTGRFVIGGPQGDSGLTGRKIIVDTYGGYSRHGGGAFSGKDATKVDRSASYAARYIAKN

SEQ ID NO: 27053 - protein, 7 aa, Artificial sequence
  Protein classification predicting sequence
AKNIVAA

SEQ ID NO: 27054 - protein, 15 aa, Artificial sequence
  Protein classification predicting sequence
EVQLAYAIGVAQPVS

SEQ ID NO: 27055 - protein, 7 aa, Artificial sequence
  Protein classification predicting sequence
QTAAYGH

SEQ ID NO: 27056 - protein, 6 aa, Artificial sequence
  Protein classification predicting sequence
NPTGRF

SEQ ID NO: 27057 - protein, 11 aa, Artificial sequence
  Protein classification predicting sequence
GDAGLTGRKII

SEQ ID NO: 27058 - protein, 11 aa, Artificial sequence
  Protein classification predicting sequence
RVAVETLITTG

SEQ ID NO: 27059 - protein, 9 aa, Artificial sequence
  Protein classification predicting sequence
IGAQSPDIA

SEQ ID NO: 27060 - protein, 6 aa, Artificial sequence
  Protein classification predicting sequence
VFDLRP

SEQ ID NO: 27061 - protein, 16 aa, Artificial sequence
  Protein classification predicting sequence
DINRVVRDTIAEIGYT

SEQ ID NO: 27062 - protein, 10 aa, Artificial sequence
  Protein classification predicting sequence
GRTDIDLPWE

SEQ ID NO: 27063 - protein, 9 aa, Artificial sequence
  Protein classification predicting sequence
DIAQGVNEA

SEQ ID NO: 27064 - protein, 11 aa, Artificial sequence
  Protein classification predicting sequence
PIYKQTAAYGH

SEQ ID NO: 27065 - protein, 7 aa, Artificial sequence
  Protein classification predicting sequence
AHVAAET

SEQ ID NO: 27066 - protein, 14 aa, Artificial sequence
  Protein classification predicting sequence
VYTGSVHVFGEIST

SEQ ID NO: 27067 - protein, 16 aa, Artificial sequence
  Protein classification predicting sequence
YLRPDAKSQVTVEYDE

SEQ ID NO: 27068 - protein, 8 aa, Artificial sequence
  Protein classification predicting sequence
QVTVEYDE

SEQ ID NO: 27069 - protein, 19 aa, Artificial sequence
  Protein classification predicting sequence
PVRVDTVVISTQHDPEATN

SEQ ID NO: 27070 - protein, 6 aa, Artificial sequence
  Protein classification predicting sequence
DTYGGM

SEQ ID NO: 27071 - protein, 11 aa, Artificial sequence
  Protein classification predicting sequence
PVGLFVETFGT

SEQ ID NO: 27072 - protein, 10 aa, Artificial sequence
  Protein classification predicting sequence
GEDIKVMGLR

SEQ ID NO: 27073 - protein, 10 aa, Artificial sequence
  Protein classification predicting sequence
YLTVTGTSAE

SEQ ID NO: 27074 - protein, 11 aa, Artificial sequence
  Protein classification predicting sequence
NDTSFGVGFAP

SEQ ID NO: 27075 - protein, 22 aa, Artificial sequence
  Protein classification predicting sequence
YLTVTGTSAEHGDDGMTGRGNR

SEQ ID NO: 27076 - protein, 6 aa, Artificial sequence
  Protein classification predicting sequence
WERTDK

SEQ ID NO: 27077 - protein, 6 aa, Artificial sequence
  Protein classification predicting sequence
VDTYGG

SEQ ID NO: 27078 - protein, 8 aa, Artificial sequence
  Protein classification predicting sequence
YAIGVARP

SEQ ID NO: 27079 - protein, 7 aa, Artificial sequence
  Protein classification predicting sequence
DPNSRVA

SEQ ID NO: 27080 - protein, 8 aa, Artificial sequence
  Protein classification predicting sequence
ETVVNTGL

SEQ ID NO: 27081 - protein, 6 aa, Artificial sequence
  Protein classification predicting sequence
LISTQH

SEQ ID NO: 27082 - protein, 8 aa, Artificial sequence
  Protein classification predicting sequence
VNPTGKFV

SEQ ID NO: 27083 - protein, 12 aa, Artificial sequence
  Protein classification predicting sequence
CEVQVSYAIGVA

SEQ ID NO: 27084 - protein, 10 aa, Artificial sequence
  Protein classification predicting sequence
VQVSYAIGVA

SEQ ID NO: 27085 - protein, 7 aa, Artificial sequence
  Protein classification predicting sequence
LRPAGII

SEQ ID NO: 27086 - protein, 12 aa, Artificial sequence
  Protein classification predicting sequence
SRVAVETLVTTG

SEQ ID NO: 27087 - protein, 13 aa, Artificial sequence
  Protein classification predicting sequence
LRPDGKTQVTIEY

SEQ ID NO: 27088 - protein, 7 aa, Artificial sequence
  Protein classification predicting sequence
ETLVTTG

SEQ ID NO: 27089 - protein, 6 aa, Artificial sequence
  Protein classification predicting sequence
NPSGRF

SEQ ID NO: 27090 - protein, 8 aa, Artificial sequence
  Protein classification predicting sequence
VTTGLVLV

SEQ ID NO: 27091 - protein, 7 aa, Artificial sequence
  Protein classification predicting sequence
TSIDEQS

SEQ ID NO: 27092 - protein, 8 aa, Artificial sequence
  Protein classification predicting sequence
GAGDQGLM

SEQ ID NO: 27093 - protein, 13 aa, Artificial sequence
  Protein classification predicting sequence
LRPDGKTQVTVEY

SEQ ID NO: 27094 - protein, 6 aa, Artificial sequence
  Protein classification predicting sequence
PWEKTD

SEQ ID NO: 27095 - protein, 10 aa, Artificial sequence
  Protein classification predicting sequence
EGHPDKLCDQ

SEQ ID NO: 27096 - protein, 9 aa, Artificial sequence
  Protein classification predicting sequence
QSPDISQGV

SEQ ID NO: 27097 - protein, 7 aa, Artificial sequence
  Protein classification predicting sequence
AKNVVAA

SEQ ID NO: 27098 - protein, 14 aa, Artificial sequence
  Protein classification predicting sequence
PIYKETAAYGHFGR

SEQ ID NO: 27099 - protein, 6 aa, Artificial sequence
  Protein classification predicting sequence
PEFSWE

SEQ ID NO: 27100 - protein, 7 aa, Artificial sequence
  Protein classification predicting sequence
ETPEFMP

SEQ ID NO: 27101 - protein, 7 aa, Artificial sequence
  Protein classification predicting sequence
YLLPDGK

SEQ ID NO: 27102 - protein, 7 aa, Artificial sequence
  Protein classification predicting sequence
SGKDPSK

SEQ ID NO: 27103 - protein, 19 aa, Artificial sequence
  Protein classification predicting sequence
EQDPKARVACETYVKTGMV

SEQ ID NO: 27104 - protein, 56 aa, Artificial sequence
  Protein classification predicting sequence
TVREIGYVHSDMGFDANSCAVLNTIGKQSPDINQGVDKADPKEQGAGDQGIMFGYA

SEQ ID NO: 27105 - protein, 12 aa, Artificial sequence
  Protein classification predicting sequence
GAGDQGIMFGYA

SEQ ID NO: 27106 - protein, 6 aa, Artificial sequence
  Protein classification predicting sequence
VRKNGT

SEQ ID NO: 27107 - protein, 7 aa, Artificial sequence
  Protein classification predicting sequence
ADRCEIQ

SEQ ID NO: 27108 - protein, 13 aa, Artificial sequence
  Protein classification predicting sequence
EGHPDKIADQISD

SEQ ID NO: 27109 - protein, 6 aa, Artificial sequence
  Protein classification predicting sequence
ILDAIL

SEQ ID NO: 27110 - protein, 10 aa, Artificial sequence
  Protein classification predicting sequence
KTGMVLVGGE

SEQ ID NO: 27111 - protein, 7 aa, Artificial sequence
  Protein classification predicting sequence
PIYRETA

SEQ ID NO: 27112 - protein, 8 aa, Artificial sequence
  Protein classification predicting sequence
LDYIIERD

SEQ ID NO: 27113 - protein, 13 aa, Artificial sequence
  Protein classification predicting sequence
GAGDQGLMFGYAC

SEQ ID NO: 27114 - protein, 10 aa, Artificial sequence
  Protein classification predicting sequence
IDTIVVSTQH

SEQ ID NO: 27115 - protein, 17 aa, Artificial sequence
  Protein classification predicting sequence
HGGGAFSGKDPSKVDRS

SEQ ID NO: 27116 - protein, 10 aa, Artificial sequence
  Protein classification predicting sequence
AYAARYVAKN

SEQ ID NO: 27117 - protein, 8 aa, Artificial sequence
  Protein classification predicting sequence
LDAILAQD

SEQ ID NO: 27118 - protein, 11 aa, Artificial sequence
  Protein classification predicting sequence
QVSYAIGVAEP

SEQ ID NO: 27119 - protein, 12 aa, Artificial sequence
  Protein classification predicting sequence
VQVSYAIGVAEP

SEQ ID NO: 27120 - protein, 7 aa, Artificial sequence
  Protein classification predicting sequence
TFGTGKI

SEQ ID NO: 27121 - protein, 10 aa, Artificial sequence
  Protein classification predicting sequence
EGHPDKICDQ

SEQ ID NO: 27122 - protein, 11 aa, Artificial sequence
  Protein classification predicting sequence
IEQQSPDIAQG

SEQ ID NO: 27123 - protein, 10 aa, Artificial sequence
  Protein classification predicting sequence
AWVDIEEITR

SEQ ID NO: 27124 - protein, 11 aa, Artificial sequence
  Protein classification predicting sequence
ETAAYGHFGRE

SEQ ID NO: 27125 - protein, 6 aa, Artificial sequence
  Protein classification predicting sequence
ATDETP

SEQ ID NO: 27126 - protein, 8 aa, Artificial sequence
  Protein classification predicting sequence
FLFTSESV

SEQ ID NO: 27127 - protein, 23 aa, Artificial sequence
  Protein classification predicting sequence
FLFTSESVNEGHPDKLCDQVSDA

SEQ ID NO: 27128 - protein, 10 aa, Artificial sequence
  Protein classification predicting sequence
EPLSVFVDTY

SEQ ID NO: 27129 - protein, 9 aa, Artificial sequence
  Protein classification predicting sequence
DLKEHVIKP

SEQ ID NO: 27130 - protein, 10 aa, Artificial sequence
  Protein classification predicting sequence
KTAAYGHFGR

SEQ ID NO: 27131 - protein, 18 aa, Artificial sequence
  Protein classification predicting sequence
KTAAYGHFGRDDPDFTWE

SEQ ID NO: 27132 - protein, 10 aa, Artificial sequence
  Protein classification predicting sequence
DLKEHVIKPV

SEQ ID NO: 27133 - protein, 7 aa, Artificial sequence
  Protein classification predicting sequence
VDYEKIV

SEQ ID NO: 27134 - protein, 13 aa, Artificial sequence
  Protein classification predicting sequence
DVGLDADNCKVLV

SEQ ID NO: 27135 - protein, 15 aa, Artificial sequence
  Protein classification predicting sequence
DTYGGWGAHGGGAFS

SEQ ID NO: 27136 - protein, 12 aa, Artificial sequence
  Protein classification predicting sequence
KDPTKVDRSGAY

SEQ ID NO: 27137 - protein, 6 aa, Artificial sequence
  Protein classification predicting sequence
KTGMVL

SEQ ID NO: 27138 - protein, 6 aa, Artificial sequence
  Protein classification predicting sequence
IGYDDS

SEQ ID NO: 27139 - protein, 11 aa, Artificial sequence
  Protein classification predicting sequence
IGYDDSAKGFD

SEQ ID NO: 27140 - protein, 21 aa, Artificial sequence
  Protein classification predicting sequence
RVHTVLISTQHDETVTNDEIA

SEQ ID NO: 27141 - protein, 13 aa, Artificial sequence
  Protein classification predicting sequence
IGFVSDDVGLDAD

SEQ ID NO: 27142 - protein, 19 aa, Artificial sequence
  Protein classification predicting sequence
FDFRPGMMTINLDLKRGGN

SEQ ID NO: 27143 - protein, 10 aa, Artificial sequence
  Protein classification predicting sequence
INLDLKRGGN

SEQ ID NO: 27144 - protein, 11 aa, Artificial sequence
  Protein classification predicting sequence
VMVFGEITTKA

SEQ ID NO: 27145 - protein, 19 aa, Artificial sequence
  Protein classification predicting sequence
IGAGDQGHMFGYATDETPE

SEQ ID NO: 27146 - protein, 11 aa, Artificial sequence
  Protein classification predicting sequence
TIFHLNPSGRF

SEQ ID NO: 27147 - protein, 16 aa, Artificial sequence
  Protein classification predicting sequence
LPWLRPDSKTQVTVQY

SEQ ID NO: 27148 - protein, 23 aa, Artificial sequence
  Protein classification predicting sequence
GAMVPIRVHTVLISTQHDETVTN

SEQ ID NO: 27149 - protein, 17 aa, Artificial sequence
  Protein classification predicting sequence
RVHTVLISTQHDETVTN

SEQ ID NO: 27150 - protein, 10 aa, Artificial sequence
  Protein classification predicting sequence
GRDDPDFTWE

SEQ ID NO: 27151 - protein, 6 aa, Artificial sequence
  Protein classification predicting sequence
LICHAL

SEQ ID NO: 27152 - protein, 8 aa, Artificial sequence
  Protein classification predicting sequence
LICHALSG

SEQ ID NO: 27153 - protein, 12 aa, Artificial sequence
  Protein classification predicting sequence
LARMVGHITYLS

SEQ ID NO: 27154 - protein, 7 aa, Artificial sequence
  Protein classification predicting sequence
FDANTYL

SEQ ID NO: 27155 - protein, 7 aa, Artificial sequence
  Protein classification predicting sequence
ALDYFDP

SEQ ID NO: 27156 - protein, 8 aa, Artificial sequence
  Protein classification predicting sequence
GIERFAAV

SEQ ID NO: 27157 - protein, 12 aa, Artificial sequence
  Protein classification predicting sequence
GWWDNMVGPGKP

SEQ ID NO: 27158 - protein, 6 aa, Artificial sequence
  Protein classification predicting sequence
FNEVAR

SEQ ID NO: 27159 - protein, 9 aa, Artificial sequence
  Protein classification predicting sequence
VESYLRYQG

SEQ ID NO: 27160 - protein, 7 aa, Artificial sequence
  Protein classification predicting sequence
SAQNIAF

SEQ ID NO: 27161 - protein, 15 aa, Artificial sequence
  Protein classification predicting sequence
GLAVARMAAHITYLS

SEQ ID NO: 27162 - protein, 20 aa, Artificial sequence
  Protein classification predicting sequence
FGIERFAAVMGGSLGGMQAL

SEQ ID NO: 27163 - protein, 21 aa, Artificial sequence
  Protein classification predicting sequence
YAEIDAPHGHDAFLLDDARYH

SEQ ID NO: 27164 - protein, 6 aa, Artificial sequence
  Protein classification predicting sequence
HITYLS

SEQ ID NO: 27165 - protein, 8 aa, Artificial sequence
  Protein classification predicting sequence
FQVESYLR

SEQ ID NO: 27166 - protein, 6 aa, Artificial sequence
  Protein classification predicting sequence
LVCHAL

SEQ ID NO: 27167 - protein, 7 aa, Artificial sequence
  Protein classification predicting sequence
RHSAWCI

SEQ ID NO: 27168 - protein, 6 aa, Artificial sequence
  Protein classification predicting sequence
FDANTY

SEQ ID NO: 27169 - protein, 8 aa, Artificial sequence
  Protein classification predicting sequence
FDANTYLL

SEQ ID NO: 27170 - protein, 7 aa, Artificial sequence
  Protein classification predicting sequence
GSTGPSS

SEQ ID NO: 27171 - protein, 10 aa, Artificial sequence
  Protein classification predicting sequence
DGKPWGSRFP

SEQ ID NO: 27172 - protein, 6 aa, Artificial sequence
  Protein classification predicting sequence
GGSMGG

SEQ ID NO: 27173 - protein, 9 aa, Artificial sequence
  Protein classification predicting sequence
GSCYGSTGP

SEQ ID NO: 27174 - protein, 7 aa, Artificial sequence
  Protein classification predicting sequence
GSTGPAS

SEQ ID NO: 27175 - protein, 6 aa, Artificial sequence
  Protein classification predicting sequence
FVDRFD

SEQ ID NO: 27176 - protein, 10 aa, Artificial sequence
  Protein classification predicting sequence
GTTGPSSINP

SEQ ID NO: 27177 - protein, 7 aa, Artificial sequence
  Protein classification predicting sequence
FQVESYL

SEQ ID NO: 27178 - protein, 8 aa, Artificial sequence
  Protein classification predicting sequence
RFDANSYL

SEQ ID NO: 27179 - protein, 7 aa, Artificial sequence
  Protein classification predicting sequence
AAVVGGS

SEQ ID NO: 27180 - protein, 12 aa, Artificial sequence
  Protein classification predicting sequence
PGWWDDYIGPGK

SEQ ID NO: 27181 - protein, 7 aa, Artificial sequence
  Protein classification predicting sequence
RFDANSY

SEQ ID NO: 27182 - protein, 5 aa, Artificial sequence
  Protein classification predicting sequence
PGWWD

SEQ ID NO: 27183 - protein, 6 aa, Artificial sequence
  Protein classification predicting sequence
TYGTLN

SEQ ID NO: 27184 - protein, 10 aa, Artificial sequence
  Protein classification predicting sequence
VRAGLLLAVG

SEQ ID NO: 27185 - protein, 6 aa, Artificial sequence
  Protein classification predicting sequence
AHLTYR

SEQ ID NO: 27186 - protein, 10 aa, Artificial sequence
  Protein classification predicting sequence
TGPAGPGHPT

SEQ ID NO: 27187 - protein, 8 aa, Artificial sequence
  Protein classification predicting sequence
GPGAPIDT

SEQ ID NO: 27188 - protein, 6 aa, Artificial sequence
  Protein classification predicting sequence
GHITYL

SEQ ID NO: 27189 - protein, 5 aa, Artificial sequence
  Protein classification predicting sequence
TDWRF

SEQ ID NO: 27190 - protein, 7 aa, Artificial sequence
  Protein classification predicting sequence
GGSLGGM

SEQ ID NO: 27191 - protein, 10 aa, Artificial sequence
  Protein classification predicting sequence
ARRIAHLTYR

SEQ ID NO: 27192 - protein, 7 aa, Artificial sequence
  Protein classification predicting sequence
DTNRFFV

SEQ ID NO: 27193 - protein, 10 aa, Artificial sequence
  Protein classification predicting sequence
LNAARSNAVL

SEQ ID NO: 27194 - protein, 10 aa, Artificial sequence
  Protein classification predicting sequence
GGSLGGMQAL

SEQ ID NO: 27195 - protein, 17 aa, Artificial sequence
  Protein classification predicting sequence
GGSLGGMQALQWTISYP

SEQ ID NO: 27196 - protein, 13 aa, Artificial sequence
  Protein classification predicting sequence
CHALNASHHVAGV

SEQ ID NO: 27197 - protein, 18 aa, Artificial sequence
  Protein classification predicting sequence
VGWWDNMVGPGKPVDTNR

SEQ ID NO: 27198 - protein, 8 aa, Artificial sequence
  Protein classification predicting sequence
CVVVASTP

SEQ ID NO: 27199 - protein, 20 aa, Artificial sequence
  Protein classification predicting sequence
YFDANTYLLITRALDYFDPA

SEQ ID NO: 27200 - protein, 8 aa, Artificial sequence
  Protein classification predicting sequence
ALDYFDPA

SEQ ID NO: 27201 - protein, 13 aa, Artificial sequence
  Protein classification predicting sequence
EIDAPHGHDAFLL

SEQ ID NO: 27202 - protein, 7 aa, Artificial sequence
  Protein classification predicting sequence
GHDAFLL

SEQ ID NO: 27203 - protein, 6 aa, Artificial sequence
  Protein classification predicting sequence
NVLGGC

SEQ ID NO: 27204 - protein, 6 aa, Artificial sequence
  Protein classification predicting sequence
IAFNEV

SEQ ID NO: 27205 - protein, 8 aa, Artificial sequence
  Protein classification predicting sequence
GPGKPIDT

SEQ ID NO: 27206 - protein, 12 aa, Artificial sequence
  Protein classification predicting sequence
WFCHVDDDNYVN

SEQ ID NO: 27207 - protein, 7 aa, Artificial sequence
  Protein classification predicting sequence
FIAVKTT

SEQ ID NO: 27208 - protein, 22 aa, Artificial sequence
  Protein classification predicting sequence
PDHRKFQGYYKIARHYRWALGQ

SEQ ID NO: 27209 - protein, 28 aa, Artificial sequence
  Protein classification predicting sequence
IPILVIACDRSTVRRCLDKLLHYRPSAE

SEQ ID NO: 27210 - protein, 22 aa, Artificial sequence
  Protein classification predicting sequence
ADKVDVKTWKSTEHNMGLALTR

SEQ ID NO: 27211 - protein, 9 aa, Artificial sequence
  Protein classification predicting sequence
DPRDCPRDL

SEQ ID NO: 27212 - protein, 12 aa, Artificial sequence
  Protein classification predicting sequence
APDFYHVFKKMW

SEQ ID NO: 27213 - protein, 13 aa, Artificial sequence
  Protein classification predicting sequence
NSTNSTTAVPSLV

SEQ ID NO: 27214 - protein, 39 aa, Artificial sequence
  Protein classification predicting sequence
QEKCVLPPMDGYPHCEGKIKWMKDMWRSDPCYADYGVDG

SEQ ID NO: 27215 - protein, 15 aa, Artificial sequence
  Protein classification predicting sequence
CSFFIYLSEVENWCP

SEQ ID NO: 27216 - protein, 119 aa, Artificial sequence
  Protein classification predicting sequence
LVHLGLLTKESGFKIAETAFSGGPLGELVQWSDLITSLYLLGHDIRISASLAELKEIMKKVVGNRSGCPTVGDRIVELIYIDIVGLAQFKKTLGPSWVHYQCMLRVLDSFGTEPEFNHA

SEQ ID NO: 27217 - protein, 8 aa, Artificial sequence
  Protein classification predicting sequence
KDILVPSF

SEQ ID NO: 27218 - protein, 9 aa, Artificial sequence
  Protein classification predicting sequence
KEWLLAHEG

SEQ ID NO: 27219 - protein, 12 aa, Artificial sequence
  Protein classification predicting sequence
NPVPILIPCHRV

SEQ ID NO: 27220 - protein, 6 aa, Artificial sequence
  Protein classification predicting sequence
PCHRVI

SEQ ID NO: 27221 - protein, 10 aa, Artificial sequence
  Protein classification predicting sequence
PALHHPVFQQ

SEQ ID NO: 27222 - protein, 18 aa, Artificial sequence
  Protein classification predicting sequence
SFTRQVLWKLLKVVKFGE

SEQ ID NO: 27223 - protein, 23 aa, Artificial sequence
  Protein classification predicting sequence
SYQQLAALAGNPKAARAVGGAMR

SEQ ID NO: 27224 - protein, 15 aa, Artificial sequence
  Protein classification predicting sequence
PFLGIGLLYSLSGPD

SEQ ID NO: 27225 - protein, 14 aa, Artificial sequence
  Protein classification predicting sequence
YVSTRWYRAPEVLL

SEQ ID NO: 27226 - protein, 9 aa, Artificial sequence
  Protein classification predicting sequence
WYRAPEVLL

SEQ ID NO: 27227 - protein, 6 aa, Artificial sequence
  Protein classification predicting sequence
PILVGG

SEQ ID NO: 27228 - protein, 8 aa, Artificial sequence
  Protein classification predicting sequence
LVGGTMLY

SEQ ID NO: 27229 - protein, 6 aa, Artificial sequence
  Protein classification predicting sequence
DSMQVY

SEQ ID NO: 27230 - protein, 45 aa, Artificial sequence
  Protein classification predicting sequence
MEKLALERGVEYVHKKLQEVDPESAERIHANNVRRVIRALEIFHT

SEQ ID NO: 27231 - protein, 7 aa, Artificial sequence
  Protein classification predicting sequence
EMDGIPH

SEQ ID NO: 27232 - protein, 50 aa, Artificial sequence
  Protein classification predicting sequence
SFSVAEFQERVRKHIREITERGKLPIIVGGTGLYIQSVLFDYQFTDDAGD

SEQ ID NO: 27233 - protein, 13 aa, Artificial sequence
  Protein classification predicting sequence
EKLALERGVEYVH

SEQ ID NO: 27234 - protein, 30 aa, Artificial sequence
  Protein classification predicting sequence
KLQEVDPESAERIHANNVRRVIRALEIFHT

SEQ ID NO: 27235 - protein, 27 aa, Artificial sequence
  Protein classification predicting sequence
ELLYDVSLIGLTMDREMLYDRINLRVD

SEQ ID NO: 27236 - protein, 34 aa, Artificial sequence
  Protein classification predicting sequence
QGLLEEVEGLYNRGIRDCQSIQAIGYKEIYDYFE

SEQ ID NO: 27237 - protein, 49 aa, Artificial sequence
  Protein classification predicting sequence
AVSQLKTNSRRYAKRQLTWFRNKMDVTWFDVTDGEKTSEILRYIEGKLQ

SEQ ID NO: 27238 - protein, 6 aa, Artificial sequence
  Protein classification predicting sequence
IVGPTA

SEQ ID NO: 27239 - protein, 14 aa, Artificial sequence
  Protein classification predicting sequence
IHANNVRRVIRALE

SEQ ID NO: 27240 - protein, 9 aa, Artificial sequence
  Protein classification predicting sequence
GGTGLYIQS

SEQ ID NO: 27241 - protein, 7 aa, Artificial sequence
  Protein classification predicting sequence
RINQRVD

SEQ ID NO: 27242 - protein, 7 aa, Artificial sequence
  Protein classification predicting sequence
QAIGYKE

SEQ ID NO: 27243 - protein, 7 aa, Artificial sequence
  Protein classification predicting sequence
RRYAKRQ

SEQ ID NO: 27244 - protein, 6 aa, Artificial sequence
  Protein classification predicting sequence
TWFRNQ

SEQ ID NO: 27245 - protein, 8 aa, Artificial sequence
  Protein classification predicting sequence
AKRQRTWF

SEQ ID NO: 27246 - protein, 8 aa, Artificial sequence
  Protein classification predicting sequence
GPTASGKT

SEQ ID NO: 27247 - protein, 8 aa, Artificial sequence
  Protein classification predicting sequence
SVDSALVY

SEQ ID NO: 27248 - protein, 6 aa, Artificial sequence
  Protein classification predicting sequence
RIEQRF

SEQ ID NO: 27249 - protein, 9 aa, Artificial sequence
  Protein classification predicting sequence
RCVGYRQMW

SEQ ID NO: 27250 - protein, 8 aa, Artificial sequence
  Protein classification predicting sequence
NTDSMQVY

SEQ ID NO: 27251 - protein, 6 aa, Artificial sequence
  Protein classification predicting sequence
LPSIRC

SEQ ID NO: 27252 - protein, 6 aa, Artificial sequence
  Protein classification predicting sequence
GYRQMW

SEQ ID NO: 27253 - protein, 13 aa, Artificial sequence
  Protein classification predicting sequence
LPSIRCVGYRQMW

SEQ ID NO: 27254 - protein, 7 aa, Artificial sequence
  Protein classification predicting sequence
GGTMLYY

SEQ ID NO: 27255 - protein, 7 aa, Artificial sequence
  Protein classification predicting sequence
RCVGYRQ

SEQ ID NO: 27256 - protein, 7 aa, Artificial sequence
  Protein classification predicting sequence
IIVGGTG

SEQ ID NO: 27257 - protein, 6 aa, Artificial sequence
  Protein classification predicting sequence
DSMQIY

SEQ ID NO: 27258 - protein, 10 aa, Artificial sequence
  Protein classification predicting sequence
YRGMDIGTAK

SEQ ID NO: 27259 - protein, 6 aa, Artificial sequence
  Protein classification predicting sequence
AKRQLT

SEQ ID NO: 27260 - protein, 7 aa, Artificial sequence
  Protein classification predicting sequence
DSALVYR

SEQ ID NO: 27261 - protein, 6 aa, Artificial sequence
  Protein classification predicting sequence
PHHLID

SEQ ID NO: 27262 - protein, 7 aa, Artificial sequence
  Protein classification predicting sequence
PLLVGGT

SEQ ID NO: 27263 - protein, 10 aa, Artificial sequence
  Protein classification predicting sequence
PLLVGGTMLY

SEQ ID NO: 27264 - protein, 8 aa, Artificial sequence
  Protein classification predicting sequence
KALLEGLS

SEQ ID NO: 27265 - protein, 12 aa, Artificial sequence
  Protein classification predicting sequence
ATRQLAKRQLTW

SEQ ID NO: 27266 - protein, 7 aa, Artificial sequence
  Protein classification predicting sequence
RVIRALE

SEQ ID NO: 27267 - protein, 9 aa, Artificial sequence
  Protein classification predicting sequence
RINKRVDIM

SEQ ID NO: 27268 - protein, 8 aa, Artificial sequence
  Protein classification predicting sequence
GMDIGTAK

SEQ ID NO: 27269 - protein, 14 aa, Artificial sequence
  Protein classification predicting sequence
MQLYRGMDIGTAKL

SEQ ID NO: 27270 - protein, 10 aa, Artificial sequence
  Protein classification predicting sequence
GTRRYVRRQR

SEQ ID NO: 27271 - protein, 6 aa, Artificial sequence
  Protein classification predicting sequence
HHQLDV

SEQ ID NO: 27272 - protein, 11 aa, Artificial sequence
  Protein classification predicting sequence
PFEIISVDSAM

SEQ ID NO: 27273 - protein, 6 aa, Artificial sequence
  Protein classification predicting sequence
LHQRIE

SEQ ID NO: 27274 - protein, 6 aa, Artificial sequence
  Protein classification predicting sequence
VYRGLD

SEQ ID NO: 27275 - protein, 6 aa, Artificial sequence
  Protein classification predicting sequence
KRQLTW

SEQ ID NO: 27276 - protein, 7 aa, Artificial sequence
  Protein classification predicting sequence
GKTAAAL

SEQ ID NO: 27277 - protein, 10 aa, Artificial sequence
  Protein classification predicting sequence
CATRQLAKRQ

SEQ ID NO: 27278 - protein, 9 aa, Artificial sequence
  Protein classification predicting sequence
NGEIISGDS

SEQ ID NO: 27279 - protein, 10 aa, Artificial sequence
  Protein classification predicting sequence
AKRQLTWFRN

SEQ ID NO: 27280 - protein, 11 aa, Artificial sequence
  Protein classification predicting sequence
YSAADFRRDAL

SEQ ID NO: 27281 - protein, 18 aa, Artificial sequence
  Protein classification predicting sequence
TSGDALPYQVHQFAIAPA

SEQ ID NO: 27282 - protein, 9 aa, Artificial sequence
  Protein classification predicting sequence
RELLHQRIE

SEQ ID NO: 27283 - protein, 7 aa, Artificial sequence
  Protein classification predicting sequence
EIISVDS

SEQ ID NO: 27284 - protein, 12 aa, Artificial sequence
  Protein classification predicting sequence
VGYRQAWEYLDG

SEQ ID NO: 27285 - protein, 6 aa, Artificial sequence
  Protein classification predicting sequence
IHPNNR

SEQ ID NO: 27286 - protein, 8 aa, Artificial sequence
  Protein classification predicting sequence
GPTAVGKT

SEQ ID NO: 27287 - protein, 7 aa, Artificial sequence
  Protein classification predicting sequence
ISGDSMQ

SEQ ID NO: 27288 - protein, 6 aa, Artificial sequence
  Protein classification predicting sequence
AARIHP

SEQ ID NO: 27289 - protein, 8 aa, Artificial sequence
  Protein classification predicting sequence
RRVIRALE

SEQ ID NO: 27290 - protein, 6 aa, Artificial sequence
  Protein classification predicting sequence
RIHPND

SEQ ID NO: 27291 - protein, 9 aa, Artificial sequence
  Protein classification predicting sequence
ISVDSALIY

SEQ ID NO: 27292 - protein, 6 aa, Artificial sequence
  Protein classification predicting sequence
NDSQRI

SEQ ID NO: 27293 - protein, 7 aa, Artificial sequence
  Protein classification predicting sequence
DLHPDLP

SEQ ID NO: 27294 - protein, 9 aa, Artificial sequence
  Protein classification predicting sequence
ATRQLAKRQ

SEQ ID NO: 27295 - protein, 6 aa, Artificial sequence
  Protein classification predicting sequence
TWLRGW

SEQ ID NO: 27296 - protein, 7 aa, Artificial sequence
  Protein classification predicting sequence
EGLSPLP

SEQ ID NO: 27297 - protein, 6 aa, Artificial sequence
  Protein classification predicting sequence
DIRDPA

SEQ ID NO: 27298 - protein, 7 aa, Artificial sequence
  Protein classification predicting sequence
ARPDLHP

SEQ ID NO: 27299 - protein, 6 aa, Artificial sequence
  Protein classification predicting sequence
LYDRIN

SEQ ID NO: 27300 - protein, 10 aa, Artificial sequence
  Protein classification predicting sequence
RIAQRFDAML

SEQ ID NO: 27301 - protein, 11 aa, Artificial sequence
  Protein classification predicting sequence
KALLEGLSPLP

SEQ ID NO: 27302 - protein, 6 aa, Artificial sequence
  Protein classification predicting sequence
GGTMLY

SEQ ID NO: 27303 - protein, 7 aa, Artificial sequence
  Protein classification predicting sequence
RAVGYRQ

SEQ ID NO: 27304 - protein, 5 aa, Artificial sequence
  Protein classification predicting sequence
VGYRQ

SEQ ID NO: 27305 - protein, 9 aa, Artificial sequence
  Protein classification predicting sequence
RRTVRALEV

SEQ ID NO: 27306 - protein, 7 aa, Artificial sequence
  Protein classification predicting sequence
RRQRSWF

SEQ ID NO: 27307 - protein, 15 aa, Artificial sequence
  Protein classification predicting sequence
RRGIPHHQLDVLDVT

SEQ ID NO: 27308 - protein, 6 aa, Artificial sequence
  Protein classification predicting sequence
PIIVGG

SEQ ID NO: 27309 - protein, 18 aa, Artificial sequence
  Protein classification predicting sequence
PFAASAPRIGAPRWDTVI

SEQ ID NO: 27310 - protein, 7 aa, Artificial sequence
  Protein classification predicting sequence
PNDSQRI

SEQ ID NO: 27311 - protein, 9 aa, Artificial sequence
  Protein classification predicting sequence
AIFLMGPTA

SEQ ID NO: 27312 - protein, 9 aa, Artificial sequence
  Protein classification predicting sequence
LSQLDPVTA

SEQ ID NO: 27313 - protein, 18 aa, Artificial sequence
  Protein classification predicting sequence
DAMQLYRGMDIGTAKLPV

SEQ ID NO: 27314 - protein, 10 aa, Artificial sequence
  Protein classification predicting sequence
PFAASAPRIG

SEQ ID NO: 27315 - protein, 7 aa, Artificial sequence
  Protein classification predicting sequence
MDIGTAK

SEQ ID NO: 27316 - protein, 16 aa, Artificial sequence
  Protein classification predicting sequence
MDIGTAKVTKEEMDGI

SEQ ID NO: 27317 - protein, 6 aa, Artificial sequence
  Protein classification predicting sequence
EEMDGI

SEQ ID NO: 27318 - protein, 14 aa, Artificial sequence
  Protein classification predicting sequence
LPVEVISVDSALIY

SEQ ID NO: 27319 - protein, 9 aa, Artificial sequence
  Protein classification predicting sequence
DALREMADI

SEQ ID NO: 27320 - protein, 6 aa, Artificial sequence
  Protein classification predicting sequence
YSAADF

SEQ ID NO: 27321 - protein, 15 aa, Artificial sequence
  Protein classification predicting sequence
CATRQLAKRQITWLR

SEQ ID NO: 27322 - protein, 7 aa, Artificial sequence
  Protein classification predicting sequence
LLDIRDP

SEQ ID NO: 27323 - protein, 10 aa, Artificial sequence
  Protein classification predicting sequence
ISGKTLTELT

SEQ ID NO: 27324 - protein, 8 aa, Artificial sequence
  Protein classification predicting sequence
VHQFAIAP

SEQ ID NO: 27325 - protein, 8 aa, Artificial sequence
  Protein classification predicting sequence
TASRALGY

SEQ ID NO: 27326 - protein, 12 aa, Artificial sequence
  Protein classification predicting sequence
GPTASGKTDLAI

SEQ ID NO: 27327 - protein, 6 aa, Artificial sequence
  Protein classification predicting sequence
GKTDLA

SEQ ID NO: 27328 - protein, 9 aa, Artificial sequence
  Protein classification predicting sequence
ELISVDSAL

SEQ ID NO: 27329 - protein, 7 aa, Artificial sequence
  Protein classification predicting sequence
PHRLIDI

SEQ ID NO: 27330 - protein, 7 aa, Artificial sequence
  Protein classification predicting sequence
KALLEGL

SEQ ID NO: 27331 - protein, 7 aa, Artificial sequence
  Protein classification predicting sequence
EVDPESA

SEQ ID NO: 27332 - protein, 7 aa, Artificial sequence
  Protein classification predicting sequence
YSAADFR

SEQ ID NO: 27333 - protein, 19 aa, Artificial sequence
  Protein classification predicting sequence
DLHAGLPSIRAVGYRQVWD

SEQ ID NO: 27334 - protein, 6 aa, Artificial sequence
  Protein classification predicting sequence
LHARIA

SEQ ID NO: 27335 - protein, 14 aa, Artificial sequence
  Protein classification predicting sequence
LHARIAQRFDAMLA

SEQ ID NO: 27336 - protein, 7 aa, Artificial sequence
  Protein classification predicting sequence
GGTGLYF

SEQ ID NO: 27337 - protein, 25 aa, Artificial sequence
  Protein classification predicting sequence
SLPKAIFLMGPTASGKTALAIELRK

SEQ ID NO: 27338 - protein, 8 aa, Artificial sequence
  Protein classification predicting sequence
TRQLAKRQ

SEQ ID NO: 27339 - protein, 10 aa, Artificial sequence
  Protein classification predicting sequence
EVLQVVGAIA

SEQ ID NO: 27340 - protein, 36 aa, Artificial sequence
  Protein classification predicting sequence
ITAAGRIPLLVGGTMLYFKALLEGLSPLPSADPEVR

SEQ ID NO: 27341 - protein, 41 aa, Artificial sequence
  Protein classification predicting sequence
RFHQMLASGFEAEVRALFARGDLHTDLPSIRCVGYRQMWSY

SEQ ID NO: 27342 - protein, 7 aa, Artificial sequence
  Protein classification predicting sequence
YRGMDIG

SEQ ID NO: 27343 - protein, 7 aa, Artificial sequence
  Protein classification predicting sequence
ELISVDS

SEQ ID NO: 27344 - protein, 13 aa, Artificial sequence
  Protein classification predicting sequence
LIYKGMDIGTAKP

SEQ ID NO: 27345 - protein, 61 aa, Artificial sequence
  Protein classification predicting sequence
ILNPDDTFSAYEFKRLAEDLITDITNRGKVPIIAGGTGLYIQSLIYNYELEDETVTPAQLS

SEQ ID NO: 27346 - protein, 17 aa, Artificial sequence
  Protein classification predicting sequence
VKQKLSALEHLDNQQLH

SEQ ID NO: 27347 - protein, 16 aa, Artificial sequence
  Protein classification predicting sequence
VIVGPTASGKTELSIE

SEQ ID NO: 27348 - protein, 16 aa, Artificial sequence
  Protein classification predicting sequence
DSMQVYQGMDIGTAKV

SEQ ID NO: 27349 - protein, 7 aa, Artificial sequence
  Protein classification predicting sequence
FSAYEFK

SEQ ID NO: 27350 - protein, 18 aa, Artificial sequence
  Protein classification predicting sequence
RGKVPIIAGGTGLYIQSL

SEQ ID NO: 27351 - protein, 15 aa, Artificial sequence
  Protein classification predicting sequence
RKKVQQFTENYDTLL

SEQ ID NO: 27352 - protein, 7 aa, Artificial sequence
  Protein classification predicting sequence
RQYAKRQ

SEQ ID NO: 27353 - protein, 7 aa, Artificial sequence
  Protein classification predicting sequence
TWFKNKM

SEQ ID NO: 27354 - protein, 14 aa, Artificial sequence
  Protein classification predicting sequence
MSLQMMLDEITTQI

SEQ ID NO: 27355 - protein, 8 aa, Artificial sequence
  Protein classification predicting sequence
IAVVGPTA

SEQ ID NO: 27356 - protein, 7 aa, Artificial sequence
  Protein classification predicting sequence
EGYHLGG

SEQ ID NO: 27357 - protein, 14 aa, Artificial sequence
  Protein classification predicting sequence
QVNRRRAIRALELA

SEQ ID NO: 27358 - protein, 9 aa, Artificial sequence
  Protein classification predicting sequence
IGLNDDRQV

SEQ ID NO: 27359 - protein, 16 aa, Artificial sequence
  Protein classification predicting sequence
VQASRGIGYKELFPYF

SEQ ID NO: 27360 - protein, 20 aa, Artificial sequence
  Protein classification predicting sequence
LKQNTRRFAKRQLTWFRNRM

SEQ ID NO: 27361 - protein, 8 aa, Artificial sequence
  Protein classification predicting sequence
GEIISGDS

SEQ ID NO: 27362 - protein, 11 aa, Artificial sequence
  Protein classification predicting sequence
LPIIVGGTGLY

SEQ ID NO: 27363 - protein, 26 aa, Artificial sequence
  Protein classification predicting sequence
LPIIVGGTGLYLQSLLEGYHLGGQVD

SEQ ID NO: 27364 - protein, 8 aa, Artificial sequence
  Protein classification predicting sequence
AKRQLTWF

SEQ ID NO: 27365 - protein, 6 aa, Artificial sequence
  Protein classification predicting sequence
RINQRV

SEQ ID NO: 27366 - protein, 30 aa, Artificial sequence
  Protein classification predicting sequence
GTAKATQEEQEAAVHHLIDIREVTESYSAY

SEQ ID NO: 27367 - protein, 6 aa, Artificial sequence
  Protein classification predicting sequence
TRQYAK

SEQ ID NO: 27368 - protein, 7 aa, Artificial sequence
  Protein classification predicting sequence
GGTGLYI

SEQ ID NO: 27369 - protein, 6 aa, Artificial sequence
  Protein classification predicting sequence
QVYKHM

SEQ ID NO: 27370 - protein, 9 aa, Artificial sequence
  Protein classification predicting sequence
GMDIGTAKP

SEQ ID NO: 27371 - protein, 11 aa, Artificial sequence
  Protein classification predicting sequence
IPLLVGGTMLY

SEQ ID NO: 27372 - protein, 16 aa, Artificial sequence
  Protein classification predicting sequence
RIHPNDPQRLSRALEV

SEQ ID NO: 27373 - protein, 19 aa, Artificial sequence
  Protein classification predicting sequence
ISVDSALIYKGMDIGTAKP

SEQ ID NO: 27374 - protein, 7 aa, Artificial sequence
  Protein classification predicting sequence
LQEIDPV

SEQ ID NO: 27375 - protein, 9 aa, Artificial sequence
  Protein classification predicting sequence
DPVAAARIH

SEQ ID NO: 27376 - protein, 10 aa, Artificial sequence
  Protein classification predicting sequence
RALEVYRISG

SEQ ID NO: 27377 - protein, 8 aa, Artificial sequence
  Protein classification predicting sequence
VYRGLDIG

SEQ ID NO: 27378 - protein, 9 aa, Artificial sequence
  Protein classification predicting sequence
RGDLHTDLP

SEQ ID NO: 27379 - protein, 8 aa, Artificial sequence
  Protein classification predicting sequence
GPTASGKS

SEQ ID NO: 27380 - protein, 9 aa, Artificial sequence
  Protein classification predicting sequence
HSESASPSA

SEQ ID NO: 27381 - protein, 26 aa, Artificial sequence
  Protein classification predicting sequence
TQEKNKIRPRGQRDSSYYWEIEASEV

SEQ ID NO: 27382 - protein, 8 aa, Artificial sequence
  Protein classification predicting sequence
KSNNIFLH

SEQ ID NO: 27383 - protein, 30 aa, Artificial sequence
  Protein classification predicting sequence
GLTVKIGDFGLATVKSRWSGSQQVEQPTGS

SEQ ID NO: 27384 - protein, 8 aa, Artificial sequence
  Protein classification predicting sequence
GPEMVRGQ

SEQ ID NO: 27385 - protein, 24 aa, Artificial sequence
  Protein classification predicting sequence
FDVGPRYTNLSYIGEGAYGMVCSA

SEQ ID NO: 27386 - protein, 32 aa, Artificial sequence
  Protein classification predicting sequence
NKVRVAIKKISPFEHQTYCQRTLREIKILLRF

SEQ ID NO: 27387 - protein, 21 aa, Artificial sequence
  Protein classification predicting sequence
KALDLLDKMLTFNPHKRIEVE

SEQ ID NO: 27388 - protein, 7 aa, Artificial sequence
  Protein classification predicting sequence
AEAPFKF

SEQ ID NO: 27389 - protein, 9 aa, Artificial sequence
  Protein classification predicting sequence
MELDDLPKE

SEQ ID NO: 27390 - protein, 8 aa, Artificial sequence
  Protein classification predicting sequence
FDVGPRYT

SEQ ID NO: 27391 - protein, 9 aa, Artificial sequence
  Protein classification predicting sequence
ILLRFRHEN

SEQ ID NO: 27392 - protein, 6 aa, Artificial sequence
  Protein classification predicting sequence
HENVIG

SEQ ID NO: 27393 - protein, 36 aa, Artificial sequence
  Protein classification predicting sequence
LSNDHICYFLYQILRGLKYIHSANVLHRDLKPSNLL

SEQ ID NO: 27394 - protein, 12 aa, Artificial sequence
  Protein classification predicting sequence
CDLKICDFGLAR

SEQ ID NO: 27395 - protein, 9 aa, Artificial sequence
  Protein classification predicting sequence
DSKALDLLD

SEQ ID NO: 27396 - protein, 8 aa, Artificial sequence
  Protein classification predicting sequence
ETARFQPG

SEQ ID NO: 27397 - protein, 12 aa, Artificial sequence
  Protein classification predicting sequence
YIVQEYMETDLA

SEQ ID NO: 27398 - protein, 10 aa, Artificial sequence
  Protein classification predicting sequence
LRGLKYIHSA

SEQ ID NO: 27399 - protein, 8 aa, Artificial sequence
  Protein classification predicting sequence
VLHRDLKP

SEQ ID NO: 27400 - protein, 10 aa, Artificial sequence
  Protein classification predicting sequence
VLHRDLKPAN

SEQ ID NO: 27401 - protein, 16 aa, Artificial sequence
  Protein classification predicting sequence
TEDLVLKIGDFGLARI

SEQ ID NO: 27402 - protein, 8 aa, Artificial sequence
  Protein classification predicting sequence
PMDRLTAE

SEQ ID NO: 27403 - protein, 21 aa, Artificial sequence
  Protein classification predicting sequence
KHALREIKIIRRLDHDNIVKV

SEQ ID NO: 27404 - protein, 27 aa, Artificial sequence
  Protein classification predicting sequence
LFMYQLLRGLKYIHSANVLHRDLKPAN

SEQ ID NO: 27405 - protein, 34 aa, Artificial sequence
  Protein classification predicting sequence
LSEGLVTKWYRSPRLLLSPNNYTKAIDMWAAGCI

SEQ ID NO: 27406 - protein, 15 aa, Artificial sequence
  Protein classification predicting sequence
LFAGAHELEQMQLIL

SEQ ID NO: 27407 - protein, 6 aa, Artificial sequence
  Protein classification predicting sequence
DLHQII

SEQ ID NO: 27408 - protein, 7 aa, Artificial sequence
  Protein classification predicting sequence
VNHKNII

SEQ ID NO: 27409 - protein, 21 aa, Artificial sequence
  Protein classification predicting sequence
MTPYVVTRYYRAPEVILGMGY

SEQ ID NO: 27410 - protein, 21 aa, Artificial sequence
  Protein classification predicting sequence
ALQHPYINVWYDPAEVEAPPP

SEQ ID NO: 27411 - protein, 10 aa, Artificial sequence
  Protein classification predicting sequence
SYLLYQMLCG

SEQ ID NO: 27412 - protein, 9 aa, Artificial sequence
  Protein classification predicting sequence
DKQLDEREH

SEQ ID NO: 27413 - protein, 9 aa, Artificial sequence
  Protein classification predicting sequence
LLNVFTPQK

SEQ ID NO: 27414 - protein, 15 aa, Artificial sequence
  Protein classification predicting sequence
LKPIGSGAQGIVCAA

SEQ ID NO: 27415 - protein, 14 aa, Artificial sequence
  Protein classification predicting sequence
IDQWNKVIEQLGTP

SEQ ID NO: 27416 - protein, 11 aa, Artificial sequence
  Protein classification predicting sequence
EFMKKLQPTVR

SEQ ID NO: 27417 - protein, 6 aa, Artificial sequence
  Protein classification predicting sequence
KRISVD

SEQ ID NO: 27418 - protein, 13 aa, Artificial sequence
  Protein classification predicting sequence
ALQHPYINVWYDP

SEQ ID NO: 27419 - protein, 32 aa, Artificial sequence
  Protein classification predicting sequence
EAEAPPPKIPDKQLDEREHTIEEWKELIYKEV

SEQ ID NO: 27420 - protein, 11 aa, Artificial sequence
  Protein classification predicting sequence
DSTFTVLKRYQ

SEQ ID NO: 27421 - protein, 8 aa, Artificial sequence
  Protein classification predicting sequence
KKLSRPFQ

SEQ ID NO: 27422 - protein, 22 aa, Artificial sequence
  Protein classification predicting sequence
KKLSRPFQNQTHAKRAYRELVL

SEQ ID NO: 27423 - protein, 22 aa, Artificial sequence
  Protein classification predicting sequence
LEEFQDVYLVMELMDANLCQVI

SEQ ID NO: 27424 - protein, 12 aa, Artificial sequence
  Protein classification predicting sequence
SQARDLLSKMLV

SEQ ID NO: 27425 - protein, 11 aa, Artificial sequence
  Protein classification predicting sequence
VAVKKLSRPFQ

SEQ ID NO: 27426 - protein, 9 aa, Artificial sequence
  Protein classification predicting sequence
KCVNHKNII

SEQ ID NO: 27427 - protein, 8 aa, Artificial sequence
  Protein classification predicting sequence
YVENRPKY

SEQ ID NO: 27428 - protein, 27 aa, Artificial sequence
  Protein classification predicting sequence
LFPADSEHNKLKASQARDLLSKMLVID

SEQ ID NO: 27429 - protein, 7 aa, Artificial sequence
  Protein classification predicting sequence
DPAKRIS

SEQ ID NO: 27430 - protein, 9 aa, Artificial sequence
  Protein classification predicting sequence
EAPPPQIYD

SEQ ID NO: 27431 - protein, 38 aa, Artificial sequence
  Protein classification predicting sequence
IKHLHSAGIIHRDLKPSNIVVKSDCTLKILDFGLARTA

SEQ ID NO: 27432 - protein, 5 aa, Artificial sequence
  Protein classification predicting sequence
FYRQE

SEQ ID NO: 27433 - protein, 6 aa, Artificial sequence
  Protein classification predicting sequence
RTYREL

SEQ ID NO: 27434 - protein, 13 aa, Artificial sequence
  Protein classification predicting sequence
LMGADLNNIVKCQ

SEQ ID NO: 27435 - protein, 6 aa, Artificial sequence
  Protein classification predicting sequence
QFLVYQ

SEQ ID NO: 27436 - protein, 14 aa, Artificial sequence
  Protein classification predicting sequence
HSAGIIHRDLKPSN

SEQ ID NO: 27437 - protein, 8 aa, Artificial sequence
  Protein classification predicting sequence
AVNEDCEL

SEQ ID NO: 27438 - protein, 7 aa, Artificial sequence
  Protein classification predicting sequence
MLVLDSD

SEQ ID NO: 27439 - protein, 7 aa, Artificial sequence
  Protein classification predicting sequence
ILDFGLA

SEQ ID NO: 27440 - protein, 6 aa, Artificial sequence
  Protein classification predicting sequence
DPDDEP

SEQ ID NO: 27441 - protein, 8 aa, Artificial sequence
  Protein classification predicting sequence
NKTIWEVP

SEQ ID NO: 27442 - protein, 16 aa, Artificial sequence
  Protein classification predicting sequence
LFAKRAYRELRLLKHM

SEQ ID NO: 27443 - protein, 8 aa, Artificial sequence
  Protein classification predicting sequence
AKRAYREL

SEQ ID NO: 27444 - protein, 10 aa, Artificial sequence
  Protein classification predicting sequence
YRELRLLKHM

SEQ ID NO: 27445 - protein, 18 aa, Artificial sequence
  Protein classification predicting sequence
DFYLVMPFMGTDLGKLMK

SEQ ID NO: 27446 - protein, 12 aa, Artificial sequence
  Protein classification predicting sequence
CELKILDFGLAR

SEQ ID NO: 27447 - protein, 18 aa, Artificial sequence
  Protein classification predicting sequence
EMTGYVVTRWYRAPEVIL

SEQ ID NO: 27448 - protein, 23 aa, Artificial sequence
  Protein classification predicting sequence
EMTGYVVTRWYRAPEVILSWMHY

SEQ ID NO: 27449 - protein, 14 aa, Artificial sequence
  Protein classification predicting sequence
QTVDIWSVGCIMAE

SEQ ID NO: 27450 - protein, 15 aa, Artificial sequence
  Protein classification predicting sequence
QTVDIWSVGCIMAEM

SEQ ID NO: 27451 - protein, 8 aa, Artificial sequence
  Protein classification predicting sequence
YRAPEVIL

SEQ ID NO: 27452 - protein, 8 aa, Artificial sequence
  Protein classification predicting sequence
TGKTLFKG

SEQ ID NO: 27453 - protein, 7 aa, Artificial sequence
  Protein classification predicting sequence
VGSGAYG

SEQ ID NO: 27454 - protein, 10 aa, Artificial sequence
  Protein classification predicting sequence
FMQTDLQKIM

SEQ ID NO: 27455 - protein, 13 aa, Artificial sequence
  Protein classification predicting sequence
HENVIGLLDVFTP

SEQ ID NO: 27456 - protein, 7 aa, Artificial sequence
  Protein classification predicting sequence
VFIGANP

SEQ ID NO: 27457 - protein, 6 aa, Artificial sequence
  Protein classification predicting sequence
VCSAYD

SEQ ID NO: 27458 - protein, 8 aa, Artificial sequence
  Protein classification predicting sequence
PVGSGAYG

SEQ ID NO: 27459 - protein, 9 aa, Artificial sequence
  Protein classification predicting sequence
HENVIGLLD

SEQ ID NO: 27460 - protein, 8 aa, Artificial sequence
  Protein classification predicting sequence
VYLVTHLM

SEQ ID NO: 27461 - protein, 7 aa, Artificial sequence
  Protein classification predicting sequence
DDHVQFL

SEQ ID NO: 27462 - protein, 15 aa, Artificial sequence
  Protein classification predicting sequence
HSAGVIHRDLKPSNI

SEQ ID NO: 27463 - protein, 23 aa, Artificial sequence
  Protein classification predicting sequence
EMTGYVATRWYRAPEIMLNWMHY

SEQ ID NO: 27464 - protein, 11 aa, Artificial sequence
  Protein classification predicting sequence
HENVIGLLDVF

SEQ ID NO: 27465 - protein, 38 aa, Artificial sequence
  Protein classification predicting sequence
FNDVYLVTHLMGADLNNIVKCQKLTDDHVQFLIYQILR

SEQ ID NO: 27466 - protein, 7 aa, Artificial sequence
  Protein classification predicting sequence
LKYIHSA

SEQ ID NO: 27467 - protein, 19 aa, Artificial sequence
  Protein classification predicting sequence
AVDLLEKMLVLDTDKRITA

SEQ ID NO: 27468 - protein, 13 aa, Artificial sequence
  Protein classification predicting sequence
ADPYDQSFESRDL

SEQ ID NO: 27469 - protein, 19 aa, Artificial sequence
  Protein classification predicting sequence
NLAVNEDCELKILDFGLAR

SEQ ID NO: 27470 - protein, 8 aa, Artificial sequence
  Protein classification predicting sequence
DIWSVGCI

SEQ ID NO: 27471 - protein, 11 aa, Artificial sequence
  Protein classification predicting sequence
DIWSVGCIMAE

SEQ ID NO: 27472 - protein, 25 aa, Artificial sequence
  Protein classification predicting sequence
DIWSVGCIMAELLTGRTLFPGTDHI

SEQ ID NO: 27473 - protein, 10 aa, Artificial sequence
  Protein classification predicting sequence
ISSESARNYI

SEQ ID NO: 27474 - protein, 7 aa, Artificial sequence
  Protein classification predicting sequence
YHDPTDE

SEQ ID NO: 27475 - protein, 30 aa, Artificial sequence
  Protein classification predicting sequence
WEVPERYQNLSPVGSGAYGSVCAAFDTKTG

SEQ ID NO: 27476 - protein, 57 aa, Artificial sequence
  Protein classification predicting sequence
QMPKMNFANVFIGANPLAVDLLEKMLVLDSDKRITAAQALAHAYFAQYHDPDDEPVA

SEQ ID NO: 27477 - protein, 9 aa, Artificial sequence
  Protein classification predicting sequence
FYRQELNKT

SEQ ID NO: 27478 - protein, 13 aa, Artificial sequence
  Protein classification predicting sequence
YQILRGLKYIHSA

SEQ ID NO: 27479 - protein, 10 aa, Artificial sequence
  Protein classification predicting sequence
IIHRDLKPSN

SEQ ID NO: 27480 - protein, 7 aa, Artificial sequence
  Protein classification predicting sequence
FVPPPLD

SEQ ID NO: 27481 - protein, 6 aa, Artificial sequence
  Protein classification predicting sequence
HQIIRS

SEQ ID NO: 27482 - protein, 6 aa, Artificial sequence
  Protein classification predicting sequence
YTKAID

SEQ ID NO: 27483 - protein, 7 aa, Artificial sequence
  Protein classification predicting sequence
VGCILAE

SEQ ID NO: 27484 - protein, 11 aa, Artificial sequence
  Protein classification predicting sequence
GIAHRDLKPEN

SEQ ID NO: 27485 - protein, 6 aa, Artificial sequence
  Protein classification predicting sequence
LLHVDT

SEQ ID NO: 27486 - protein, 10 aa, Artificial sequence
  Protein classification predicting sequence
LRGLKYVHSA

SEQ ID NO: 27487 - protein, 6 aa, Artificial sequence
  Protein classification predicting sequence
MFTEED

SEQ ID NO: 27488 - protein, 7 aa, Artificial sequence
  Protein classification predicting sequence
IKIVDFG

SEQ ID NO: 27489 - protein, 6 aa, Artificial sequence
  Protein classification predicting sequence
PEVLLG

SEQ ID NO: 27490 - protein, 10 aa, Artificial sequence
  Protein classification predicting sequence
RTRQYAKRQV

SEQ ID NO: 27491 - protein, 7 aa, Artificial sequence
  Protein classification predicting sequence
GGFGSVY

SEQ ID NO: 27492 - protein, 8 aa, Artificial sequence
  Protein classification predicting sequence
ITLWQMTT

SEQ ID NO: 27493 - protein, 9 aa, Artificial sequence
  Protein classification predicting sequence
RLAWCSIDW

SEQ ID NO: 27494 - protein, 9 aa, Artificial sequence
  Protein classification predicting sequence
VYKATYHGV

SEQ ID NO: 27495 - protein, 9 aa, Artificial sequence
  Protein classification predicting sequence
NSLGTIIME

SEQ ID NO: 27496 - protein, 11 aa, Artificial sequence
  Protein classification predicting sequence
HLDLKPANILI

SEQ ID NO: 27497 - protein, 6 aa, Artificial sequence
  Protein classification predicting sequence
YAVVAY

SEQ ID NO: 27498 - protein, 22 aa, Artificial sequence
  Protein classification predicting sequence
LPRELSPSVDSRSCSIPLVAPR

SEQ ID NO: 27499 - protein, 41 aa, Artificial sequence
  Protein classification predicting sequence
LRHDNIVRVVAASTRTPEDSNSLGTIIMEFGGNVTLHQVIY

SEQ ID NO: 27500 - protein, 11 aa, Artificial sequence
  Protein classification predicting sequence
ATRSPEPLSCR

SEQ ID NO: 27501 - protein, 12 aa, Artificial sequence
  Protein classification predicting sequence
LQNIIQSCWEAR

SEQ ID NO: 27502 - protein, 56 aa, Artificial sequence
  Protein classification predicting sequence
QLSLGKCLKYSLDVVNGLLFLHSQSILHLDLKPANILISEQDVCKISDFGCSQKLQ

SEQ ID NO: 27503 - protein, 7 aa, Artificial sequence
  Protein classification predicting sequence
SPSVDSR

SEQ ID NO: 27504 - protein, 8 aa, Artificial sequence
  Protein classification predicting sequence
GLLFLHSQ

SEQ ID NO: 27505 - protein, 7 aa, Artificial sequence
  Protein classification predicting sequence
VDSRSCS

SEQ ID NO: 27506 - protein, 48 aa, Artificial sequence
  Protein classification predicting sequence
SNSLGTIIMEFGGNVTLHQVIYGATRSPEPLSCREQLSLGKCLKYSLD

SEQ ID NO: 27507 - protein, 47 aa, Artificial sequence
  Protein classification predicting sequence
LKGEIATPKADIYSFGITLWQMTTREVPYSGEPQYVQYAVVAYNLRP

SEQ ID NO: 27508 - protein, 7 aa, Artificial sequence
  Protein classification predicting sequence
SIDWEQV

SEQ ID NO: 27509 - protein, 7 aa, Artificial sequence
  Protein classification predicting sequence
VRVVAAS

SEQ ID NO: 27510 - protein, 8 aa, Artificial sequence
  Protein classification predicting sequence
QLLRGLKY

SEQ ID NO: 27511 - protein, 9 aa, Artificial sequence
  Protein classification predicting sequence
KKIANAFDN

SEQ ID NO: 27512 - protein, 12 aa, Artificial sequence
  Protein classification predicting sequence
HRDLKPSNLLLN

SEQ ID NO: 27513 - protein, 41 aa, Artificial sequence
  Protein classification predicting sequence
DFMTEYVVTRWYRAPELLLNSSDYTAAIDVWSVGCIFMELM

SEQ ID NO: 27514 - protein, 6 aa, Artificial sequence
  Protein classification predicting sequence
KPLFPG

SEQ ID NO: 27515 - protein, 9 aa, Artificial sequence
  Protein classification predicting sequence
AKRYIRQLP

SEQ ID NO: 27516 - protein, 7 aa, Artificial sequence
  Protein classification predicting sequence
KELIYRE

SEQ ID NO: 27517 - protein, 8 aa, Artificial sequence
  Protein classification predicting sequence
PIGRGAYG

SEQ ID NO: 27518 - protein, 5 aa, Artificial sequence
  Protein classification predicting sequence
HCQYF

SEQ ID NO: 27519 - protein, 31 aa, Artificial sequence
  Protein classification predicting sequence
YFLYQILRGLKYIHSANVLHRDLKPSNLLLN

SEQ ID NO: 27520 - protein, 17 aa, Artificial sequence
  Protein classification predicting sequence
MTEYVVTRWYRAPELLL

SEQ ID NO: 27521 - protein, 7 aa, Artificial sequence
  Protein classification predicting sequence
DLLEKML

SEQ ID NO: 27522 - protein, 6 aa, Artificial sequence
  Protein classification predicting sequence
HMDHEN

SEQ ID NO: 27523 - protein, 9 aa, Artificial sequence
  Protein classification predicting sequence
SLHDISDEP

SEQ ID NO: 27524 - protein, 24 aa, Artificial sequence
  Protein classification predicting sequence
SFKDVYLVYELMDTDLHQIIKSSQ

SEQ ID NO: 27525 - protein, 17 aa, Artificial sequence
  Protein classification predicting sequence
SNAVNLTDGLDGLAIMP

SEQ ID NO: 27526 - protein, 6 aa, Artificial sequence
  Protein classification predicting sequence
FMGDVG

SEQ ID NO: 27527 - protein, 11 aa, Artificial sequence
  Protein classification predicting sequence
FMGDVGALALG

SEQ ID NO: 27528 - protein, 7 aa, Artificial sequence
  Protein classification predicting sequence
IMGGVFV

SEQ ID NO: 27529 - protein, 8 aa, Artificial sequence
  Protein classification predicting sequence
GWKETQVV

SEQ ID NO: 27530 - protein, 7 aa, Artificial sequence
  Protein classification predicting sequence
FRYITFR

SEQ ID NO: 27531 - protein, 6 aa, Artificial sequence
  Protein classification predicting sequence
ETLSVI

SEQ ID NO: 27532 - protein, 6 aa, Artificial sequence
  Protein classification predicting sequence
TPTMGG

SEQ ID NO: 27533 - protein, 5 aa, Artificial sequence
  Protein classification predicting sequence
PFHHH

SEQ ID NO: 27534 - protein, 6 aa, Artificial sequence
  Protein classification predicting sequence
LLWGDL

SEQ ID NO: 27535 - protein, 6 aa, Artificial sequence
  Protein classification predicting sequence
LSYFVI

SEQ ID NO: 27536 - protein, 12 aa, Artificial sequence
  Protein classification predicting sequence
VFMGDVGALALG

SEQ ID NO: 27537 - protein, 15 aa, Artificial sequence
  Protein classification predicting sequence
GWKETQVVVRFWIIT

SEQ ID NO: 27538 - protein, 96 aa, Artificial sequence
  Protein classification predicting sequence
IGKGQAFHTYIMIPGTDVKFELGWAYFVLVLFMLIGGSNAVNLTDGLDGLLSGTAAIAFGAFSIIAVAQEQFGVAIFCMAVVGAVLGFLVFNANPA

SEQ ID NO: 27539 - protein, 5 aa, Artificial sequence
  Protein classification predicting sequence
VRFWI

SEQ ID NO: 27540 - protein, 17 aa, Artificial sequence
  Protein classification predicting sequence
EGPKSHQKKSGTPTMGG

SEQ ID NO: 27541 - protein, 9 aa, Artificial sequence
  Protein classification predicting sequence
KSGTPTMGG

SEQ ID NO: 27542 - protein, 13 aa, Artificial sequence
  Protein classification predicting sequence
AVVGAVLGFLVFN

SEQ ID NO: 27543 - protein, 9 aa, Artificial sequence
  Protein classification predicting sequence
ETLSVIIQV

SEQ ID NO: 27544 - protein, 18 aa, Artificial sequence
  Protein classification predicting sequence
PAKVFMGDTGSLALGGAI

SEQ ID NO: 27545 - protein, 11 aa, Artificial sequence
  Protein classification predicting sequence
QVISFKTTGKR

SEQ ID NO: 27546 - protein, 9 aa, Artificial sequence
  Protein classification predicting sequence
LLAVLGIYI

SEQ ID NO: 27547 - protein, 8 aa, Artificial sequence
  Protein classification predicting sequence
LKFGQSIR

SEQ ID NO: 27548 - protein, 6 aa, Artificial sequence
  Protein classification predicting sequence
GFVDDY

SEQ ID NO: 27549 - protein, 8 aa, Artificial sequence
  Protein classification predicting sequence
LIVFLFGP

SEQ ID NO: 27550 - protein, 14 aa, Artificial sequence
  Protein classification predicting sequence
NAVNLTDGLDGLAI

SEQ ID NO: 27551 - protein, 7 aa, Artificial sequence
  Protein classification predicting sequence
NVFRYIT

SEQ ID NO: 27552 - protein, 6 aa, Artificial sequence
  Protein classification predicting sequence
DGPQTH

SEQ ID NO: 27553 - protein, 6 aa, Artificial sequence
  Protein classification predicting sequence
QVISFK

SEQ ID NO: 27554 - protein, 6 aa, Artificial sequence
  Protein classification predicting sequence
GFLWYN

SEQ ID NO: 27555 - protein, 5 aa, Artificial sequence
  Protein classification predicting sequence
FKMAP

SEQ ID NO: 27556 - protein, 7 aa, Artificial sequence
  Protein classification predicting sequence
DDYRKVV

SEQ ID NO: 27557 - protein, 5 aa, Artificial sequence
  Protein classification predicting sequence
HHHFE

SEQ ID NO: 27558 - protein, 6 aa, Artificial sequence
  Protein classification predicting sequence
LGLFYI

SEQ ID NO: 27559 - protein, 12 aa, Artificial sequence
  Protein classification predicting sequence
GFYDDYLKVTKQ

SEQ ID NO: 27560 - protein, 7 aa, Artificial sequence
  Protein classification predicting sequence
KHEIVLA

SEQ ID NO: 27561 - protein, 8 aa, Artificial sequence
  Protein classification predicting sequence
SFKLTGKR

SEQ ID NO: 27562 - protein, 30 aa, Artificial sequence
  Protein classification predicting sequence
RQGKGQPIRADGPQTHFKKAGTPTMGGLMI

SEQ ID NO: 27563 - protein, 10 aa, Artificial sequence
  Protein classification predicting sequence
GTPTMGGLMI

SEQ ID NO: 27564 - protein, 7 aa, Artificial sequence
  Protein classification predicting sequence
GSLALGG

SEQ ID NO: 27565 - protein, 6 aa, Artificial sequence
  Protein classification predicting sequence
IVRFWI

SEQ ID NO: 27566 - protein, 6 aa, Artificial sequence
  Protein classification predicting sequence
VLLRQE

SEQ ID NO: 27567 - protein, 6 aa, Artificial sequence
  Protein classification predicting sequence
KYFWQS

SEQ ID NO: 27568 - protein, 8 aa, Artificial sequence
  Protein classification predicting sequence
PAQVFMGD

SEQ ID NO: 27569 - protein, 9 aa, Artificial sequence
  Protein classification predicting sequence
QVTWFKYTK

SEQ ID NO: 27570 - protein, 5 aa, Artificial sequence
  Protein classification predicting sequence
IVRFW

SEQ ID NO: 27571 - protein, 6 aa, Artificial sequence
  Protein classification predicting sequence
SVILQV

SEQ ID NO: 27572 - protein, 6 aa, Artificial sequence
  Protein classification predicting sequence
YLTFRA

SEQ ID NO: 27573 - protein, 8 aa, Artificial sequence
  Protein classification predicting sequence
PTMGGLMI

SEQ ID NO: 27574 - protein, 9 aa, Artificial sequence
  Protein classification predicting sequence
TLLWADLSN

SEQ ID NO: 27575 - protein, 6 aa, Artificial sequence
  Protein classification predicting sequence
IREDGP

SEQ ID NO: 27576 - protein, 7 aa, Artificial sequence
  Protein classification predicting sequence
FMGDTGS

SEQ ID NO: 27577 - protein, 7 aa, Artificial sequence
  Protein classification predicting sequence
FKLTGKR

SEQ ID NO: 27578 - protein, 9 aa, Artificial sequence
  Protein classification predicting sequence
FKMSPLHHH

SEQ ID NO: 27579 - protein, 7 aa, Artificial sequence
  Protein classification predicting sequence
GWAETTV

SEQ ID NO: 27580 - protein, 8 aa, Artificial sequence
  Protein classification predicting sequence
SGLLVLGL

SEQ ID NO: 27581 - protein, 9 aa, Artificial sequence
  Protein classification predicting sequence
IGWMDDYRK

SEQ ID NO: 27582 - protein, 8 aa, Artificial sequence
  Protein classification predicting sequence
GAGLGFLW

SEQ ID NO: 27583 - protein, 12 aa, Artificial sequence
  Protein classification predicting sequence
EPKVIVRFWIIT

SEQ ID NO: 27584 - protein, 7 aa, Artificial sequence
  Protein classification predicting sequence
TDGLDGL

SEQ ID NO: 27585 - protein, 8 aa, Artificial sequence
  Protein classification predicting sequence
WLVLLVTL

SEQ ID NO: 27586 - protein, 9 aa, Artificial sequence
  Protein classification predicting sequence
HHHFEKKGW

SEQ ID NO: 27587 - protein, 5 aa, Artificial sequence
  Protein classification predicting sequence
YITFR

SEQ ID NO: 27588 - protein, 10 aa, Artificial sequence
  Protein classification predicting sequence
ETLSVILQVG

SEQ ID NO: 27589 - protein, 15 aa, Artificial sequence
  Protein classification predicting sequence
GFALVAWATGNMNFA

SEQ ID NO: 27590 - protein, 8 aa, Artificial sequence
  Protein classification predicting sequence
ISIMLNQE

SEQ ID NO: 27591 - protein, 6 aa, Artificial sequence
  Protein classification predicting sequence
PIHHHF

SEQ ID NO: 27592 - protein, 20 aa, Artificial sequence
  Protein classification predicting sequence
GFNVFSYLTFRAIVSLLTAL

SEQ ID NO: 27593 - protein, 17 aa, Artificial sequence
  Protein classification predicting sequence
GYGAVGFVDDYRKVVRK

SEQ ID NO: 27594 - protein, 12 aa, Artificial sequence
  Protein classification predicting sequence
GFVDDYRKVVRK

SEQ ID NO: 27595 - protein, 8 aa, Artificial sequence
  Protein classification predicting sequence
RWKYFWQS

SEQ ID NO: 27596 - protein, 11 aa, Artificial sequence
  Protein classification predicting sequence
GFALVAWATGN

SEQ ID NO: 27597 - protein, 6 aa, Artificial sequence
  Protein classification predicting sequence
SHFSKR

SEQ ID NO: 27598 - protein, 7 aa, Artificial sequence
  Protein classification predicting sequence
ELKGWPE

SEQ ID NO: 27599 - protein, 8 aa, Artificial sequence
  Protein classification predicting sequence
TDGLDGLA

SEQ ID NO: 27600 - protein, 11 aa, Artificial sequence
  Protein classification predicting sequence
TDGLDGLAIMP

SEQ ID NO: 27601 - protein, 7 aa, Artificial sequence
  Protein classification predicting sequence
GKRIFKM

SEQ ID NO: 27602 - protein, 13 aa, Artificial sequence
  Protein classification predicting sequence
IKVVMKRNLGLTS

SEQ ID NO: 27603 - protein, 8 aa, Artificial sequence
  Protein classification predicting sequence
KRNLGLTS

SEQ ID NO: 27604 - protein, 9 aa, Artificial sequence
  Protein classification predicting sequence
GTAAIAFGA

SEQ ID NO: 27605 - protein, 6 aa, Artificial sequence
  Protein classification predicting sequence
GWSEWR

SEQ ID NO: 27606 - protein, 6 aa, Artificial sequence
  Protein classification predicting sequence
DGPESH

SEQ ID NO: 27607 - protein, 5 aa, Artificial sequence
  Protein classification predicting sequence
VPFFK

SEQ ID NO: 27608 - protein, 6 aa, Artificial sequence
  Protein classification predicting sequence
QVGSYK

SEQ ID NO: 27609 - protein, 6 aa, Artificial sequence
  Protein classification predicting sequence
QVGYFK

SEQ ID NO: 27610 - protein, 7 aa, Artificial sequence
  Protein classification predicting sequence
YFKATKG

SEQ ID NO: 27611 - protein, 9 aa, Artificial sequence
  Protein classification predicting sequence
VFMGDTGSL

SEQ ID NO: 27612 - protein, 7 aa, Artificial sequence
  Protein classification predicting sequence
RVFLMAP

SEQ ID NO: 27613 - protein, 6 aa, Artificial sequence
  Protein classification predicting sequence
VIRFWI

SEQ ID NO: 27614 - protein, 8 aa, Artificial sequence
  Protein classification predicting sequence
IAVLVRQE

SEQ ID NO: 27615 - protein, 6 aa, Artificial sequence
  Protein classification predicting sequence
VRFWII

SEQ ID NO: 27616 - protein, 10 aa, Artificial sequence
  Protein classification predicting sequence
LLTALFISLW

SEQ ID NO: 27617 - protein, 10 aa, Artificial sequence
  Protein classification predicting sequence
GLIARWKYFW

SEQ ID NO: 27618 - protein, 25 aa, Artificial sequence
  Protein classification predicting sequence
YFVIVGTGNAVNLTDGLDGLAIMPT

SEQ ID NO: 27619 - protein, 17 aa, Artificial sequence
  Protein classification predicting sequence
NAVNLTDGLDGLAIMPT

SEQ ID NO: 27620 - protein, 7 aa, Artificial sequence
  Protein classification predicting sequence
CTAIVGA

SEQ ID NO: 27621 - protein, 11 aa, Artificial sequence
  Protein classification predicting sequence
ELKGWPEPRVI

SEQ ID NO: 27622 - protein, 11 aa, Artificial sequence
  Protein classification predicting sequence
RFWIISLMLVL

SEQ ID NO: 27623 - protein, 8 aa, Artificial sequence
  Protein classification predicting sequence
VIVRFWII

SEQ ID NO: 27624 - protein, 7 aa, Artificial sequence
  Protein classification predicting sequence
WKYFWQS

SEQ ID NO: 27625 - protein, 12 aa, Artificial sequence
  Protein classification predicting sequence
VPFFKDVMPQLG

SEQ ID NO: 27626 - protein, 9 aa, Artificial sequence
  Protein classification predicting sequence
GNVNFAEYL

SEQ ID NO: 27627 - protein, 7 aa, Artificial sequence
  Protein classification predicting sequence
VRQELVL

SEQ ID NO: 27628 - protein, 9 aa, Artificial sequence
  Protein classification predicting sequence
FRMAPIHHH

SEQ ID NO: 27629 - protein, 6 aa, Artificial sequence
  Protein classification predicting sequence
GLATLK

SEQ ID NO: 27630 - protein, 7 aa, Artificial sequence
  Protein classification predicting sequence
IRDEGPK

SEQ ID NO: 27631 - protein, 11 aa, Artificial sequence
  Protein classification predicting sequence
HEKKSGTPTMG

SEQ ID NO: 27632 - protein, 6 aa, Artificial sequence
  Protein classification predicting sequence
YGIIGF

SEQ ID NO: 27633 - protein, 9 aa, Artificial sequence
  Protein classification predicting sequence
VGFSNAVNL

SEQ ID NO: 27634 - protein, 13 aa, Artificial sequence
  Protein classification predicting sequence
DGLDGLATGLSII

SEQ ID NO: 27635 - protein, 9 aa, Artificial sequence
  Protein classification predicting sequence
SNAVNLTDG

SEQ ID NO: 27636 - protein, 13 aa, Artificial sequence
  Protein classification predicting sequence
LLGFFVFNHKPAK

SEQ ID NO: 27637 - protein, 8 aa, Artificial sequence
  Protein classification predicting sequence
HHHFELGG

SEQ ID NO: 27638 - protein, 6 aa, Artificial sequence
  Protein classification predicting sequence
NHKPAK

SEQ ID NO: 27639 - protein, 6 aa, Artificial sequence
  Protein classification predicting sequence
RWKYFW

SEQ ID NO: 27640 - protein, 13 aa, Artificial sequence
  Protein classification predicting sequence
NAVNLTDGLDGLA

SEQ ID NO: 27641 - protein, 10 aa, Artificial sequence
  Protein classification predicting sequence
IVGAGLGFLW

SEQ ID NO: 27642 - protein, 6 aa, Artificial sequence
  Protein classification predicting sequence
TAIVGA

SEQ ID NO: 27643 - protein, 6 aa, Artificial sequence
  Protein classification predicting sequence
GFLWWN

SEQ ID NO: 27644 - protein, 7 aa, Artificial sequence
  Protein classification predicting sequence
GLTSKQK

SEQ ID NO: 27645 - protein, 7 aa, Artificial sequence
  Protein classification predicting sequence
LVVPFFK

SEQ ID NO: 27646 - protein, 8 aa, Artificial sequence
  Protein classification predicting sequence
MPQLGLFY

SEQ ID NO: 27647 - protein, 14 aa, Artificial sequence
  Protein classification predicting sequence
RQEFLLVIMGGVFV

SEQ ID NO: 27648 - protein, 10 aa, Artificial sequence
  Protein classification predicting sequence
LLVIMGGVFV

SEQ ID NO: 27649 - protein, 26 aa, Artificial sequence
  Protein classification predicting sequence
LLVIMGGVFVMETVSVILQVGSYKLR

SEQ ID NO: 27650 - protein, 9 aa, Artificial sequence
  Protein classification predicting sequence
LVIMGGVFV

SEQ ID NO: 27651 - protein, 12 aa, Artificial sequence
  Protein classification predicting sequence
SVILQVGSYKLR

SEQ ID NO: 27652 - protein, 10 aa, Artificial sequence
  Protein classification predicting sequence
KLVLKNSKGL

SEQ ID NO: 27653 - protein, 8 aa, Artificial sequence
  Protein classification predicting sequence
LALGAALG

SEQ ID NO: 27654 - protein, 7 aa, Artificial sequence
  Protein classification predicting sequence
AVLVRQE

SEQ ID NO: 27655 - protein, 8 aa, Artificial sequence
  Protein classification predicting sequence
FVMETVSV

SEQ ID NO: 27656 - protein, 7 aa, Artificial sequence
  Protein classification predicting sequence
VRDPLDL

SEQ ID NO: 27657 - protein, 8 aa, Artificial sequence
  Protein classification predicting sequence
LFYGEWLA

SEQ ID NO: 27658 - protein, 12 aa, Artificial sequence
  Protein classification predicting sequence
FMGDTGSLALGG

SEQ ID NO: 27659 - protein, 7 aa, Artificial sequence
  Protein classification predicting sequence
TFRAVMA

SEQ ID NO: 27660 - protein, 11 aa, Artificial sequence
  Protein classification predicting sequence
GTPTMGGSLIL

SEQ ID NO: 27661 - protein, 6 aa, Artificial sequence
  Protein classification predicting sequence
LVIMGG

SEQ ID NO: 27662 - protein, 7 aa, Artificial sequence
  Protein classification predicting sequence
MAPIHHH

SEQ ID NO: 27663 - protein, 7 aa, Artificial sequence
  Protein classification predicting sequence
DGPQSHL

SEQ ID NO: 27664 - protein, 9 aa, Artificial sequence
  Protein classification predicting sequence
KAGTPTMGG

SEQ ID NO: 27665 - protein, 14 aa, Artificial sequence
  Protein classification predicting sequence
FGAIGWVDDYRKVI

SEQ ID NO: 27666 - protein, 9 aa, Artificial sequence
  Protein classification predicting sequence
FLWFNTYPA

SEQ ID NO: 27667 - protein, 24 aa, Artificial sequence
  Protein classification predicting sequence
GFLWWNAAPAKIFMGDTGSLALGG

SEQ ID NO: 27668 - protein, 13 aa, Artificial sequence
  Protein classification predicting sequence
IFMGDTGSLALGG

SEQ ID NO: 27669 - protein, 13 aa, Artificial sequence
  Protein classification predicting sequence
WAETTVIIRFWLL

SEQ ID NO: 27670 - protein, 8 aa, Artificial sequence
  Protein classification predicting sequence
GTPTMGGL

SEQ ID NO: 27671 - protein, 31 aa, Artificial sequence
  Protein classification predicting sequence
ETLSVIIQVISFKTTGKRVFKMSPLHHHYEL

SEQ ID NO: 27672 - protein, 6 aa, Artificial sequence
  Protein classification predicting sequence
HHHYEL

SEQ ID NO: 27673 - protein, 9 aa, Artificial sequence
  Protein classification predicting sequence
YPAQVFMGD

SEQ ID NO: 27674 - protein, 8 aa, Artificial sequence
  Protein classification predicting sequence
LTYFVIVG

SEQ ID NO: 27675 - protein, 23 aa, Artificial sequence
  Protein classification predicting sequence
GQVVRNDGPESHFSKRGTPTMGG

SEQ ID NO: 27676 - protein, 7 aa, Artificial sequence
  Protein classification predicting sequence
ALGVAFA

SEQ ID NO: 27677 - protein, 22 aa, Artificial sequence
  Protein classification predicting sequence
GKDTPATQLVVPFFKDVMPQLG

SEQ ID NO: 27678 - protein, 8 aa, Artificial sequence
  Protein classification predicting sequence
FFRLFEYL

SEQ ID NO: 27679 - protein, 18 aa, Artificial sequence
  Protein classification predicting sequence
ATQLVVPFFKDVMPQLGL

SEQ ID NO: 27680 - protein, 24 aa, Artificial sequence
  Protein classification predicting sequence
VIVGTSNAVNLTDGLDGLAIMPTV

SEQ ID NO: 27681 - protein, 36 aa, Artificial sequence
  Protein classification predicting sequence
CTAIVGAGLGFLWFNTYPAQVFMGDVGSLALGGALG

SEQ ID NO: 27682 - protein, 34 aa, Artificial sequence
  Protein classification predicting sequence
KLRGQRIFRMAPIHHHYELKGWPEPRVIVRFWII

SEQ ID NO: 27683 - protein, 17 aa, Artificial sequence
  Protein classification predicting sequence
ELKGWPEPRVIVRFWII

SEQ ID NO: 27684 - protein, 6 aa, Artificial sequence
  Protein classification predicting sequence
LMLVLI

SEQ ID NO: 27685 - protein, 7 aa, Artificial sequence
  Protein classification predicting sequence
GEGRRIF

SEQ ID NO: 27686 - protein, 8 aa, Artificial sequence
  Protein classification predicting sequence
ELLLVIIG

SEQ ID NO: 27687 - protein, 14 aa, Artificial sequence
  Protein classification predicting sequence
SNAVNLTDGLDGLA

SEQ ID NO: 27688 - protein, 7 aa, Artificial sequence
  Protein classification predicting sequence
ALGTIAV

SEQ ID NO: 27689 - protein, 8 aa, Artificial sequence
  Protein classification predicting sequence
GPQTHLVK

SEQ ID NO: 27690 - protein, 13 aa, Artificial sequence
  Protein classification predicting sequence
SNAVNLTDGLDGL

SEQ ID NO: 27691 - protein, 7 aa, Artificial sequence
  Protein classification predicting sequence
AVIVRQE

SEQ ID NO: 27692 - protein, 10 aa, Artificial sequence
  Protein classification predicting sequence
MAPLHHHFEL

SEQ ID NO: 27693 - protein, 9 aa, Artificial sequence
  Protein classification predicting sequence
FMGDTGSLA

SEQ ID NO: 27694 - protein, 11 aa, Artificial sequence
  Protein classification predicting sequence
VNLTDGLDGLA

SEQ ID NO: 27695 - protein, 15 aa, Artificial sequence
  Protein classification predicting sequence
YLQIHFVPGTGELAV

SEQ ID NO: 27696 - protein, 10 aa, Artificial sequence
  Protein classification predicting sequence
GTPTMGGIMI

SEQ ID NO: 27697 - protein, 20 aa, Artificial sequence
  Protein classification predicting sequence
FVIVGSSNAVNLTDGLDGLA

SEQ ID NO: 27698 - protein, 7 aa, Artificial sequence
  Protein classification predicting sequence
GTPTMGG

SEQ ID NO: 27699 - protein, 67 aa, Artificial sequence
  Protein classification predicting sequence
NYLQLTYIPNTGELTVLCAGLVGSCLGFLWFNAQPAEVFMGDTGSLSLGGVLGIISVITKHEIVLAI

SEQ ID NO: 27700 - protein, 35 aa, Artificial sequence
  Protein classification predicting sequence
STLLLADLTNKYIWITLFGFISFGIIGFMDDYAKV

SEQ ID NO: 27701 - protein, 13 aa, Artificial sequence
  Protein classification predicting sequence
LNVPFFKNLSLDL

SEQ ID NO: 27702 - protein, 18 aa, Artificial sequence
  Protein classification predicting sequence
NYLQLTYIPNTGELTVLC

SEQ ID NO: 27703 - protein, 41 aa, Artificial sequence
  Protein classification predicting sequence
GFLWFNAQPAEVFMGDTGSLSLGGVLGIISVITKHEIVLAI

SEQ ID NO: 27704 - protein, 23 aa, Artificial sequence
  Protein classification predicting sequence
IVISVLLWAYPSNPYVWCVLVVL

SEQ ID NO: 27705 - protein, 21 aa, Artificial sequence
  Protein classification predicting sequence
NAVNLTDGLDGLAIMPTVFVA

SEQ ID NO: 27706 - protein, 8 aa, Artificial sequence
  Protein classification predicting sequence
GLIARWKY

SEQ ID NO: 27707 - protein, 8 aa, Artificial sequence
  Protein classification predicting sequence
FMGDVGSL

SEQ ID NO: 27708 - protein, 8 aa, Artificial sequence
  Protein classification predicting sequence
SVILQVGS

SEQ ID NO: 27709 - protein, 16 aa, Artificial sequence
  Protein classification predicting sequence
YPAQVFMGDVGSLALG

SEQ ID NO: 27710 - protein, 12 aa, Artificial sequence
  Protein classification predicting sequence
VFMGDVGSLALG

SEQ ID NO: 27711 - protein, 12 aa, Artificial sequence
  Protein classification predicting sequence
HFSKAGTPTMGG

SEQ ID NO: 27712 - protein, 7 aa, Artificial sequence
  Protein classification predicting sequence
AVATKHE

SEQ ID NO: 27713 - protein, 9 aa, Artificial sequence
  Protein classification predicting sequence
AIGIFCIIM

SEQ ID NO: 27714 - protein, 9 aa, Artificial sequence
  Protein classification predicting sequence
VFVVETLSV

SEQ ID NO: 27715 - protein, 9 aa, Artificial sequence
  Protein classification predicting sequence
EWKVVTVFW

SEQ ID NO: 27716 - protein, 37 aa, Artificial sequence
  Protein classification predicting sequence
LIPTLKRMKFGQSIREEGPQSHMKKTGTPTMGGLTFL

SEQ ID NO: 27717 - protein, 43 aa, Artificial sequence
  Protein classification predicting sequence
NPIILLLFVTIGFGLIGFIDDYIIVVKKNNQGLTSKQKFLAQI

SEQ ID NO: 27718 - protein, 40 aa, Artificial sequence
  Protein classification predicting sequence
IPLSFAYVIFIVFWQVGFSNAVNLTDGLDGLATGLSIIGF

SEQ ID NO: 27719 - protein, 33 aa, Artificial sequence
  Protein classification predicting sequence
NPAKVFMGDTGSLALGGIFATISIMLNQELSLI

SEQ ID NO: 27720 - protein, 9 aa, Artificial sequence
  Protein classification predicting sequence
ETSSVMLQV

SEQ ID NO: 27721 - protein, 6 aa, Artificial sequence
  Protein classification predicting sequence
SVMLQV

SEQ ID NO: 27722 - protein, 7 aa, Artificial sequence
  Protein classification predicting sequence
RIFRMTP

SEQ ID NO: 27723 - protein, 37 aa, Artificial sequence
  Protein classification predicting sequence
FIKFYQLKKIGGQQMHEDVKQHLAKAGTPTMGGTVFL

SEQ ID NO: 27724 - protein, 9 aa, Artificial sequence
  Protein classification predicting sequence
KRGTPTMGG

SEQ ID NO: 27725 - protein, 8 aa, Artificial sequence
  Protein classification predicting sequence
GFLDDYIK

SEQ ID NO: 27726 - protein, 16 aa, Artificial sequence
  Protein classification predicting sequence
PAKIFMGDTGSLALGG

SEQ ID NO: 27727 - protein, 7 aa, Artificial sequence
  Protein classification predicting sequence
FYQLKKI

SEQ ID NO: 27728 - protein, 26 aa, Artificial sequence
  Protein classification predicting sequence
GQQMHEDVKQHLAKAGTPTMGGTVFL

SEQ ID NO: 27729 - protein, 29 aa, Artificial sequence
  Protein classification predicting sequence
LFWVVGFSNAVNLTDGIDGLASISVVISL

SEQ ID NO: 27730 - protein, 26 aa, Artificial sequence
  Protein classification predicting sequence
NHKPAKVFMGDVGSLALGAMLAAISI

SEQ ID NO: 27731 - protein, 18 aa, Artificial sequence
  Protein classification predicting sequence
LRQEWTLLIIGIVYVLET

SEQ ID NO: 27732 - protein, 16 aa, Artificial sequence
  Protein classification predicting sequence
RIFRMTPFHHHLELGG

SEQ ID NO: 27733 - protein, 10 aa, Artificial sequence
  Protein classification predicting sequence
GKKWSEWQVD

SEQ ID NO: 27734 - protein, 25 aa, Artificial sequence
  Protein classification predicting sequence
GGLMFYFLHVSPSGISSINVFGYQL

SEQ ID NO: 27735 - protein, 9 aa, Artificial sequence
  Protein classification predicting sequence
MIGALLGFF

SEQ ID NO: 27736 - protein, 11 aa, Artificial sequence
  Protein classification predicting sequence
GQQMHEDVKQH

SEQ ID NO: 27737 - protein, 8 aa, Artificial sequence
  Protein classification predicting sequence
KQKLALQL

SEQ ID NO: 27738 - protein, 12 aa, Artificial sequence
  Protein classification predicting sequence
DGLASISVVISL

SEQ ID NO: 27739 - protein, 13 aa, Artificial sequence
  Protein classification predicting sequence
QEWTLLIIGIVYV

SEQ ID NO: 27740 - protein, 9 aa, Artificial sequence
  Protein classification predicting sequence
ELGGLSGKG

SEQ ID NO: 27741 - protein, 15 aa, Artificial sequence
  Protein classification predicting sequence
IYGIIGFLDDFLKIF

SEQ ID NO: 27742 - protein, 12 aa, Artificial sequence
  Protein classification predicting sequence
VGFSNAVNLTDG

SEQ ID NO: 27743 - protein, 22 aa, Artificial sequence
  Protein classification predicting sequence
KYGEGRRIFRMTPFHHHLELGG

SEQ ID NO: 27744 - protein, 7 aa, Artificial sequence
  Protein classification predicting sequence
DDYIKVV

SEQ ID NO: 27745 - protein, 17 aa, Artificial sequence
  Protein classification predicting sequence
VFMGDTGSLALGGAIAA

SEQ ID NO: 27746 - protein, 6 aa, Artificial sequence
  Protein classification predicting sequence
IGFLDD

SEQ ID NO: 27747 - protein, 7 aa, Artificial sequence
  Protein classification predicting sequence
RIFKMSP

SEQ ID NO: 27748 - protein, 6 aa, Artificial sequence
  Protein classification predicting sequence
HHHFEL

SEQ ID NO: 27749 - protein, 11 aa, Artificial sequence
  Protein classification predicting sequence
HHHFELIGWSE

SEQ ID NO: 27750 - protein, 7 aa, Artificial sequence
  Protein classification predicting sequence
PLHHHFE

SEQ ID NO: 27751 - protein, 8 aa, Artificial sequence
  Protein classification predicting sequence
PLHHHFEL

SEQ ID NO: 27752 - protein, 6 aa, Artificial sequence
  Protein classification predicting sequence
FRAIVS

SEQ ID NO: 27753 - protein, 5 aa, Artificial sequence
  Protein classification predicting sequence
NPYVW

SEQ ID NO: 27754 - protein, 6 aa, Artificial sequence
  Protein classification predicting sequence
YLHIPY

SEQ ID NO: 27755 - protein, 11 aa, Artificial sequence
  Protein classification predicting sequence
YPAQVFMGDVG

SEQ ID NO: 27756 - protein, 6 aa, Artificial sequence
  Protein classification predicting sequence
RFWIIS

SEQ ID NO: 27757 - protein, 17 aa, Artificial sequence
  Protein classification predicting sequence
DGPESHFSKRGTPTMGG

SEQ ID NO: 27758 - protein, 6 aa, Artificial sequence
  Protein classification predicting sequence
GFLWFN

SEQ ID NO: 27759 - protein, 11 aa, Artificial sequence
  Protein classification predicting sequence
ETLSVILQVGS

SEQ ID NO: 27760 - protein, 6 aa, Artificial sequence
  Protein classification predicting sequence
SLWMGP

SEQ ID NO: 27761 - protein, 16 aa, Artificial sequence
  Protein classification predicting sequence
GPESHFSKRGTPTMGG

SEQ ID NO: 27762 - protein, 8 aa, Artificial sequence
  Protein classification predicting sequence
PAKIFMGD

SEQ ID NO: 27763 - protein, 8 aa, Artificial sequence
  Protein classification predicting sequence
LGGALGII

SEQ ID NO: 27764 - protein, 6 aa, Artificial sequence
  Protein classification predicting sequence
GFIDDY

SEQ ID NO: 27765 - protein, 19 aa, Artificial sequence
  Protein classification predicting sequence
SNAVNLTDGLDGLAIMPTV

SEQ ID NO: 27766 - protein, 11 aa, Artificial sequence
  Protein classification predicting sequence
LGTVAVIVRQE

SEQ ID NO: 27767 - protein, 30 aa, Artificial sequence
  Protein classification predicting sequence
YSGFNVFSYLTFRAIVSLLTALFISLWMGP

SEQ ID NO: 27768 - protein, 13 aa, Artificial sequence
  Protein classification predicting sequence
WAYPSNPYVWCVL

SEQ ID NO: 27769 - protein, 7 aa, Artificial sequence
  Protein classification predicting sequence
YFVIVGT

SEQ ID NO: 27770 - protein, 7 aa, Artificial sequence
  Protein classification predicting sequence
IVGGLFV

SEQ ID NO: 27771 - protein, 14 aa, Artificial sequence
  Protein classification predicting sequence
CHRDIKPQNLLVDP

SEQ ID NO: 27772 - protein, 16 aa, Artificial sequence
  Protein classification predicting sequence
PNVSYICSRYYRAPEL

SEQ ID NO: 27773 - protein, 6 aa, Artificial sequence
  Protein classification predicting sequence
YRAPEL

SEQ ID NO: 27774 - protein, 31 aa, Artificial sequence
  Protein classification predicting sequence
VVAIKIIDLEEAEDEIEDIQQEITVLSQCDS

SEQ ID NO: 27775 - protein, 18 aa, Artificial sequence
  Protein classification predicting sequence
KLWIIMEYLGGGSALDLL

SEQ ID NO: 27776 - protein, 8 aa, Artificial sequence
  Protein classification predicting sequence
DLFAGIGG

SEQ ID NO: 27777 - protein, 8 aa, Artificial sequence
  Protein classification predicting sequence
GFPCQPFS

SEQ ID NO: 27778 - protein, 6 aa, Artificial sequence
  Protein classification predicting sequence
TRGTLF

SEQ ID NO: 27779 - protein, 7 aa, Artificial sequence
  Protein classification predicting sequence
RIQTFPD

SEQ ID NO: 27780 - protein, 6 aa, Artificial sequence
  Protein classification predicting sequence
VTSPPY

SEQ ID NO: 27781 - protein, 10 aa, Artificial sequence
  Protein classification predicting sequence
GIGGIRLGFE

SEQ ID NO: 27782 - protein, 8 aa, Artificial sequence
  Protein classification predicting sequence
DTRGTLFF

SEQ ID NO: 27783 - protein, 9 aa, Artificial sequence
  Protein classification predicting sequence
RERIYIVGF

SEQ ID NO: 27784 - protein, 8 aa, Artificial sequence
  Protein classification predicting sequence
GNSVVVPV

SEQ ID NO: 27785 - protein, 23 aa, Artificial sequence
  Protein classification predicting sequence
KLRVMSLFSGIGAFEAALRNIGV

SEQ ID NO: 27786 - protein, 10 aa, Artificial sequence
  Protein classification predicting sequence
EKRQNGRRFK

SEQ ID NO: 27787 - protein, 9 aa, Artificial sequence
  Protein classification predicting sequence
FNVPFGRYK

SEQ ID NO: 27788 - protein, 8 aa, Artificial sequence
  Protein classification predicting sequence
KDGSEILI

SEQ ID NO: 27789 - protein, 6 aa, Artificial sequence
  Protein classification predicting sequence
GNAVPV

SEQ ID NO: 27790 - protein, 10 aa, Artificial sequence
  Protein classification predicting sequence
IGGPPCQSWS

SEQ ID NO: 27791 - protein, 8 aa, Artificial sequence
  Protein classification predicting sequence
PQNRERIY

SEQ ID NO: 27792 - protein, 7 aa, Artificial sequence
  Protein classification predicting sequence
ISNPNIR

SEQ ID NO: 27793 - protein, 11 aa, Artificial sequence
  Protein classification predicting sequence
YGLGTGVPSIG

SEQ ID NO: 27794 - protein, 16 aa, Artificial sequence
  Protein classification predicting sequence
RRVASYGLGTGVPSIG

SEQ ID NO: 27795 - protein, 15 aa, Artificial sequence
  Protein classification predicting sequence
SYNIGGTIEGFHDPK

SEQ ID NO: 27796 - protein, 8 aa, Artificial sequence
  Protein classification predicting sequence
PTVCFVSG

SEQ ID NO: 27797 - protein, 16 aa, Artificial sequence
  Protein classification predicting sequence
GSQSNPNSQVQLAPQM

SEQ ID NO: 27798 - protein, 9 aa, Artificial sequence
  Protein classification predicting sequence
FNKAISGEP

SEQ ID NO: 27799 - protein, 8 aa, Artificial sequence
  Protein classification predicting sequence
FGGGIPVA

SEQ ID NO: 27800 - protein, 16 aa, Artificial sequence
  Protein classification predicting sequence
GAIGSSTGDVHYGAER

SEQ ID NO: 27801 - protein, 7 aa, Artificial sequence
  Protein classification predicting sequence
SAWDWLR

SEQ ID NO: 27802 - protein, 8 aa, Artificial sequence
  Protein classification predicting sequence
FYARHKIV

SEQ ID NO: 27803 - protein, 8 aa, Artificial sequence
  Protein classification predicting sequence
FPAVAMVD

SEQ ID NO: 27804 - protein, 8 aa, Artificial sequence
  Protein classification predicting sequence
DEDKGIFD

SEQ ID NO: 27805 - protein, 9 aa, Artificial sequence
  Protein classification predicting sequence
GGQPGEYPT

SEQ ID NO: 27806 - protein, 6 aa, Artificial sequence
  Protein classification predicting sequence
GGPPCQ

SEQ ID NO: 27807 - protein, 6 aa, Artificial sequence
  Protein classification predicting sequence
PCQAFS

SEQ ID NO: 27808 - protein, 8 aa, Artificial sequence
  Protein classification predicting sequence
VFSSEWDK

SEQ ID NO: 27809 - protein, 7 aa, Artificial sequence
  Protein classification predicting sequence
DTRGTLF

SEQ ID NO: 27810 - protein, 8 aa, Artificial sequence
  Protein classification predicting sequence
FGNSVAVP

SEQ ID NO: 27811 - protein, 6 aa, Artificial sequence
  Protein classification predicting sequence
PQNRER

SEQ ID NO: 27812 - protein, 12 aa, Artificial sequence
  Protein classification predicting sequence
APFEYVRKMRAS

SEQ ID NO: 27813 - protein, 7 aa, Artificial sequence
  Protein classification predicting sequence
VRKMRAS

SEQ ID NO: 27814 - protein, 6 aa, Artificial sequence
  Protein classification predicting sequence
RPIDQH

SEQ ID NO: 27815 - protein, 9 aa, Artificial sequence
  Protein classification predicting sequence
NGIRVIGPD

SEQ ID NO: 27816 - protein, 10 aa, Artificial sequence
  Protein classification predicting sequence
PHPGFPTDMQ

SEQ ID NO: 27817 - protein, 14 aa, Artificial sequence
  Protein classification predicting sequence
PHPGFPTDMQSQMM

SEQ ID NO: 27818 - protein, 8 aa, Artificial sequence
  Protein classification predicting sequence
VMGPLLAR

SEQ ID NO: 27819 - protein, 8 aa, Artificial sequence
  Protein classification predicting sequence
PSVGATEN

SEQ ID NO: 27820 - protein, 14 aa, Artificial sequence
  Protein classification predicting sequence
AKEPEIVDLANYIN

SEQ ID NO: 27821 - protein, 7 aa, Artificial sequence
  Protein classification predicting sequence
FENRFMH

SEQ ID NO: 27822 - protein, 6 aa, Artificial sequence
  Protein classification predicting sequence
FPTDMQ

SEQ ID NO: 27823 - protein, 7 aa, Artificial sequence
  Protein classification predicting sequence
TVIENAA

SEQ ID NO: 27824 - protein, 5 aa, Artificial sequence
  Protein classification predicting sequence
PTDMQ

SEQ ID NO: 27825 - protein, 6 aa, Artificial sequence
  Protein classification predicting sequence
FENRFM

SEQ ID NO: 27826 - protein, 8 aa, Artificial sequence
  Protein classification predicting sequence
GPILARNG

SEQ ID NO: 27827 - protein, 7 aa, Artificial sequence
  Protein classification predicting sequence
RPIDLHL

SEQ ID NO: 27828 - protein, 13 aa, Artificial sequence
  Protein classification predicting sequence
MVETVFENRFQHL

SEQ ID NO: 27829 - protein, 8 aa, Artificial sequence
  Protein classification predicting sequence
GAKNAVLP

SEQ ID NO: 27830 - protein, 10 aa, Artificial sequence
  Protein classification predicting sequence
LSDVFTMNNV

SEQ ID NO: 27831 - protein, 9 aa, Artificial sequence
  Protein classification predicting sequence
YVSKMRASI

SEQ ID NO: 27832 - protein, 10 aa, Artificial sequence
  Protein classification predicting sequence
PGGCAIGSRP

SEQ ID NO: 27833 - protein, 10 aa, Artificial sequence
  Protein classification predicting sequence
YLDFPSVGAT

SEQ ID NO: 27834 - protein, 9 aa, Artificial sequence
  Protein classification predicting sequence
LDFPSVGAT

SEQ ID NO: 27835 - protein, 9 aa, Artificial sequence
  Protein classification predicting sequence
EPEIVDLAN

SEQ ID NO: 27836 - protein, 9 aa, Artificial sequence
  Protein classification predicting sequence
EGAKNAVLP

SEQ ID NO: 27837 - protein, 11 aa, Artificial sequence
  Protein classification predicting sequence
FPKVSVGATHV

SEQ ID NO: 27838 - protein, 6 aa, Artificial sequence
  Protein classification predicting sequence
FPTDLQ

SEQ ID NO: 27839 - protein, 21 aa, Artificial sequence
  Protein classification predicting sequence
ITETIFENRFMHVQELARLGA

SEQ ID NO: 27840 - protein, 12 aa, Artificial sequence
  Protein classification predicting sequence
YQEDGIRVRAEG

SEQ ID NO: 27841 - protein, 11 aa, Artificial sequence
  Protein classification predicting sequence
LSDVETINNVL

SEQ ID NO: 27842 - protein, 10 aa, Artificial sequence
  Protein classification predicting sequence
VALPGGCAIG

SEQ ID NO: 27843 - protein, 18 aa, Artificial sequence
  Protein classification predicting sequence
IHLENGNIYANAKDGLKG

SEQ ID NO: 27844 - protein, 18 aa, Artificial sequence
  Protein classification predicting sequence
AKEPEIVDLANYINEMGG

SEQ ID NO: 27845 - protein, 9 aa, Artificial sequence
  Protein classification predicting sequence
GAGTDTITI

SEQ ID NO: 27846 - protein, 13 aa, Artificial sequence
  Protein classification predicting sequence
KTLPHPGFPTDMQ

SEQ ID NO: 27847 - protein, 15 aa, Artificial sequence
  Protein classification predicting sequence
TETVFENRFMHVAEF

SEQ ID NO: 27848 - protein, 47 aa, Artificial sequence
  Protein classification predicting sequence
VDATKTLNEEAPYEYVSKMRASILVMGPLLARLGHAIVALPGGCAIG

SEQ ID NO: 27849 - protein, 21 aa, Artificial sequence
  Protein classification predicting sequence
IHLDFPSVGATQNIIMAASLA

SEQ ID NO: 27850 - protein, 40 aa, Artificial sequence
  Protein classification predicting sequence
GVEHAIIPDRIEAGTLLIAGAITRGDIFVRGAIKEHMASL

SEQ ID NO: 27851 - protein, 28 aa, Artificial sequence
  Protein classification predicting sequence
KTLPHPGFPTDMQSQMMALLLTANGHKV

SEQ ID NO: 27852 - protein, 24 aa, Artificial sequence
  Protein classification predicting sequence
LQGAQVKATDLRAAAALILAGLVA

SEQ ID NO: 27853 - protein, 8 aa, Artificial sequence
  Protein classification predicting sequence
PGFPTDMQ

SEQ ID NO: 27854 - protein, 14 aa, Artificial sequence
  Protein classification predicting sequence
MRASIVVLGPILAR

SEQ ID NO: 27855 - protein, 18 aa, Artificial sequence
  Protein classification predicting sequence
GHAKVSMPGGCTIGSRPI

SEQ ID NO: 27856 - protein, 6 aa, Artificial sequence
  Protein classification predicting sequence
IGSRPI

SEQ ID NO: 27857 - protein, 8 aa, Artificial sequence
  Protein classification predicting sequence
HGAHIYMD

SEQ ID NO: 27858 - protein, 15 aa, Artificial sequence
  Protein classification predicting sequence
VLIRDAVWEHNRPLI

SEQ ID NO: 27859 - protein, 25 aa, Artificial sequence
  Protein classification predicting sequence
IYMDFPSVGATQNLMMAATLADGVT

SEQ ID NO: 27860 - protein, 21 aa, Artificial sequence
  Protein classification predicting sequence
VKTLPHPGFPTDMQAQFTALM

SEQ ID NO: 27861 - protein, 25 aa, Artificial sequence
  Protein classification predicting sequence
GESTMVETVFENRFQHLEEMRRMGL

SEQ ID NO: 27862 - protein, 6 aa, Artificial sequence
  Protein classification predicting sequence
ISGAKN

SEQ ID NO: 27863 - protein, 7 aa, Artificial sequence
  Protein classification predicting sequence
PGGCAIG

SEQ ID NO: 27864 - protein, 8 aa, Artificial sequence
  Protein classification predicting sequence
TGGNVLIE

SEQ ID NO: 27865 - protein, 16 aa, Artificial sequence
  Protein classification predicting sequence
VKKLRASYYLMGAMLG

SEQ ID NO: 27866 - protein, 6 aa, Artificial sequence
  Protein classification predicting sequence
LRASYY

SEQ ID NO: 27867 - protein, 8 aa, Artificial sequence
  Protein classification predicting sequence
VIGLPGGC

SEQ ID NO: 27868 - protein, 13 aa, Artificial sequence
  Protein classification predicting sequence
LGPRPIDQHIKGF

SEQ ID NO: 27869 - protein, 57 aa, Artificial sequence
  Protein classification predicting sequence
LGPRPIDQHIKGFEALGAKVTNEQGAIYLRADELKGARIYLDVVSVGATINIMLAAV

SEQ ID NO: 27870 - protein, 7 aa, Artificial sequence
  Protein classification predicting sequence
YPGFPTD

SEQ ID NO: 27871 - protein, 6 aa, Artificial sequence
  Protein classification predicting sequence
TDLQQP

SEQ ID NO: 27872 - protein, 11 aa, Artificial sequence
  Protein classification predicting sequence
QHIKGFEALGA

SEQ ID NO: 27873 - protein, 12 aa, Artificial sequence
  Protein classification predicting sequence
VTNEQGAIYLRA

SEQ ID NO: 27874 - protein, 22 aa, Artificial sequence
  Protein classification predicting sequence
GARIYLDVVSVGATINIMLAAV

SEQ ID NO: 27875 - protein, 8 aa, Artificial sequence
  Protein classification predicting sequence
KTLVYPGF

SEQ ID NO: 27876 - protein, 7 aa, Artificial sequence
  Protein classification predicting sequence
VDVANFL

SEQ ID NO: 27877 - protein, 8 aa, Artificial sequence
  Protein classification predicting sequence
IINGGKAL

SEQ ID NO: 27878 - protein, 8 aa, Artificial sequence
  Protein classification predicting sequence
VVDVANFL

SEQ ID NO: 27879 - protein, 7 aa, Artificial sequence
  Protein classification predicting sequence
IEAGTFM

SEQ ID NO: 27880 - protein, 14 aa, Artificial sequence
  Protein classification predicting sequence
PYGKINSLRASYYF

SEQ ID NO: 27881 - protein, 13 aa, Artificial sequence
  Protein classification predicting sequence
VGLPGGCDLGPRP

SEQ ID NO: 27882 - protein, 8 aa, Artificial sequence
  Protein classification predicting sequence
RGAGTDII

SEQ ID NO: 27883 - protein, 16 aa, Artificial sequence
  Protein classification predicting sequence
YEHLESFIAKLEEMGV

SEQ ID NO: 27884 - protein, 16 aa, Artificial sequence
  Protein classification predicting sequence
YPGFATDLQQPITPLL

SEQ ID NO: 27885 - protein, 9 aa, Artificial sequence
  Protein classification predicting sequence
NIEFILRGY

SEQ ID NO: 27886 - protein, 10 aa, Artificial sequence
  Protein classification predicting sequence
VALIPAAILA

SEQ ID NO: 27887 - protein, 12 aa, Artificial sequence
  Protein classification predicting sequence
GPRPIDQHIKGF

SEQ ID NO: 27888 - protein, 12 aa, Artificial sequence
  Protein classification predicting sequence
LDVVSVGATINI

SEQ ID NO: 27889 - protein, 8 aa, Artificial sequence
  Protein classification predicting sequence
GAKNSAVA

SEQ ID NO: 27890 - protein, 11 aa, Artificial sequence
  Protein classification predicting sequence
EPEIIDVATLL

SEQ ID NO: 27891 - protein, 7 aa, Artificial sequence
  Protein classification predicting sequence
EEDAIFV

SEQ ID NO: 27892 - protein, 9 aa, Artificial sequence
  Protein classification predicting sequence
IENAAKEPE

SEQ ID NO: 27893 - protein, 9 aa, Artificial sequence
  Protein classification predicting sequence
ISGPAKLQG

SEQ ID NO: 27894 - protein, 6 aa, Artificial sequence
  Protein classification predicting sequence
PSVGAT

SEQ ID NO: 27895 - protein, 7 aa, Artificial sequence
  Protein classification predicting sequence
NAAREPE

SEQ ID NO: 27896 - protein, 20 aa, Artificial sequence
  Protein classification predicting sequence
ISGAKNSAVAIIPATLLAQG

SEQ ID NO: 27897 - protein, 12 aa, Artificial sequence
  Protein classification predicting sequence
VKLEGLPQISDV

SEQ ID NO: 27898 - protein, 11 aa, Artificial sequence
  Protein classification predicting sequence
TLVSLLEDLNI

SEQ ID NO: 27899 - protein, 7 aa, Artificial sequence
  Protein classification predicting sequence
NAAKEPE

SEQ ID NO: 27900 - protein, 8 aa, Artificial sequence
  Protein classification predicting sequence
NIVPKHVE

SEQ ID NO: 27901 - protein, 11 aa, Artificial sequence
  Protein classification predicting sequence
GPSFVTDTIYP

SEQ ID NO: 27902 - protein, 16 aa, Artificial sequence
  Protein classification predicting sequence
GAEVYASDLRAGACLI

SEQ ID NO: 27903 - protein, 10 aa, Artificial sequence
  Protein classification predicting sequence
NVKHIYRGYT

SEQ ID NO: 27904 - protein, 59 aa, Artificial sequence
  Protein classification predicting sequence
LPNNKVESLRASYYMMGAMLGRFKKCVIGLPGGCPLGPRPIDQHIKGFKALGAEIDESS

SEQ ID NO: 27905 - protein, 22 aa, Artificial sequence
  Protein classification predicting sequence
GAHIFLDMVSVGATINIMLAAV

SEQ ID NO: 27906 - protein, 25 aa, Artificial sequence
  Protein classification predicting sequence
VDIKTLVYPGFATDLQQPITPLLFM

SEQ ID NO: 27907 - protein, 8 aa, Artificial sequence
  Protein classification predicting sequence
VKATDLRA

SEQ ID NO: 27908 - protein, 7 aa, Artificial sequence
  Protein classification predicting sequence
SVGATIN

SEQ ID NO: 27909 - protein, 90 aa, Artificial sequence
  Protein classification predicting sequence
SLKAITIKTSPYPGFATDLQQPLTPLLLKADGRGTIIDTIYEKRINHVPELMRMGADISVIGGQIVYQGPSRLTGAQVKATDLRAGAALV

SEQ ID NO: 27910 - protein, 11 aa, Artificial sequence
  Protein classification predicting sequence
ATDLRAGAALV

SEQ ID NO: 27911 - protein, 19 aa, Artificial sequence
  Protein classification predicting sequence
SGAKNSVVALIPAIILADD

SEQ ID NO: 27912 - protein, 10 aa, Artificial sequence
  Protein classification predicting sequence
EIMELMGATV

SEQ ID NO: 27913 - protein, 9 aa, Artificial sequence
  Protein classification predicting sequence
LEIDPRGVQ

SEQ ID NO: 27914 - protein, 15 aa, Artificial sequence
  Protein classification predicting sequence
IYMDTVSVGATINTM

SEQ ID NO: 27915 - protein, 19 aa, Artificial sequence
  Protein classification predicting sequence
LHGTRHQVIPDRIEAGTYI

SEQ ID NO: 27916 - protein, 8 aa, Artificial sequence
  Protein classification predicting sequence
NVLYEHLE

SEQ ID NO: 27917 - protein, 18 aa, Artificial sequence
  Protein classification predicting sequence
PYPGFATDLQQPLTPLLL

SEQ ID NO: 27918 - protein, 26 aa, Artificial sequence
  Protein classification predicting sequence
IPMPYGKINSLRASYYFYGSLLGRFG

SEQ ID NO: 27919 - protein, 25 aa, Artificial sequence
  Protein classification predicting sequence
VGLPGGCDLGPRPIDLHLKAFEAMG

SEQ ID NO: 27920 - protein, 29 aa, Artificial sequence
  Protein classification predicting sequence
IENAAREPEIIDVATLLNNMGAHIRGAGT

SEQ ID NO: 27921 - protein, 12 aa, Artificial sequence
  Protein classification predicting sequence
AKLEEMGVRMTV

SEQ ID NO: 27922 - protein, 7 aa, Artificial sequence
  Protein classification predicting sequence
LPILAAT

SEQ ID NO: 27923 - protein, 6 aa, Artificial sequence
  Protein classification predicting sequence
VEGRSA

SEQ ID NO: 27924 - protein, 6 aa, Artificial sequence
  Protein classification predicting sequence
GPLLAR

SEQ ID NO: 27925 - protein, 8 aa, Artificial sequence
  Protein classification predicting sequence
PDRIETGT

SEQ ID NO: 27926 - protein, 8 aa, Artificial sequence
  Protein classification predicting sequence
PGFPTDLQ

SEQ ID NO: 27927 - protein, 8 aa, Artificial sequence
  Protein classification predicting sequence
LPGGCAIG

SEQ ID NO: 27928 - protein, 7 aa, Artificial sequence
  Protein classification predicting sequence
TDLRASA

SEQ ID NO: 27929 - protein, 8 aa, Artificial sequence
  Protein classification predicting sequence
LVLAGLVA

SEQ ID NO: 27930 - protein, 9 aa, Artificial sequence
  Protein classification predicting sequence
SVGATITIM

SEQ ID NO: 27931 - protein, 6 aa, Artificial sequence
  Protein classification predicting sequence
EPEIVD

SEQ ID NO: 27932 - protein, 8 aa, Artificial sequence
  Protein classification predicting sequence
ETIFENRF

SEQ ID NO: 27933 - protein, 6 aa, Artificial sequence
  Protein classification predicting sequence
RPIDLH

SEQ ID NO: 27934 - protein, 7 aa, Artificial sequence
  Protein classification predicting sequence
MSAATLA

SEQ ID NO: 27935 - protein, 7 aa, Artificial sequence
  Protein classification predicting sequence
TIIENAA

SEQ ID NO: 27936 - protein, 8 aa, Artificial sequence
  Protein classification predicting sequence
LVLAGCIA

SEQ ID NO: 27937 - protein, 9 aa, Artificial sequence
  Protein classification predicting sequence
VMATDLRAS

SEQ ID NO: 27938 - protein, 7 aa, Artificial sequence
  Protein classification predicting sequence
VSLPGGC

SEQ ID NO: 27939 - protein, 8 aa, Artificial sequence
  Protein classification predicting sequence
PGFATDLQ

SEQ ID NO: 27940 - protein, 8 aa, Artificial sequence
  Protein classification predicting sequence
RIYHLDRG

SEQ ID NO: 27941 - protein, 14 aa, Artificial sequence
  Protein classification predicting sequence
YHLDRGFERLEEKL

SEQ ID NO: 27942 - protein, 7 aa, Artificial sequence
  Protein classification predicting sequence
SGAKNAA

SEQ ID NO: 27943 - protein, 7 aa, Artificial sequence
  Protein classification predicting sequence
DRIEAGT

SEQ ID NO: 27944 - protein, 7 aa, Artificial sequence
  Protein classification predicting sequence
TIIDRIY

SEQ ID NO: 27945 - protein, 10 aa, Artificial sequence
  Protein classification predicting sequence
VMSTDLRASA

SEQ ID NO: 27946 - protein, 12 aa, Artificial sequence
  Protein classification predicting sequence
GAKNSVLKLMAA

SEQ ID NO: 27947 - protein, 12 aa, Artificial sequence
  Protein classification predicting sequence
QFRASVCVLGPL

SEQ ID NO: 27948 - protein, 16 aa, Artificial sequence
  Protein classification predicting sequence
LPGGDAIGSRPLDMHQ

SEQ ID NO: 27949 - protein, 7 aa, Artificial sequence
  Protein classification predicting sequence
ITIEGVE

SEQ ID NO: 27950 - protein, 8 aa, Artificial sequence
  Protein classification predicting sequence
VIGDRIVA

SEQ ID NO: 27951 - protein, 16 aa, Artificial sequence
  Protein classification predicting sequence
TLPFPGFPTDLQPMAI

SEQ ID NO: 27952 - protein, 12 aa, Artificial sequence
  Protein classification predicting sequence
SDIRAGAGLVLA

SEQ ID NO: 27953 - protein, 6 aa, Artificial sequence
  Protein classification predicting sequence
HIDRGY

SEQ ID NO: 27954 - protein, 7 aa, Artificial sequence
  Protein classification predicting sequence
KNAALPI

SEQ ID NO: 27955 - protein, 6 aa, Artificial sequence
  Protein classification predicting sequence
RPVDQH

SEQ ID NO: 27956 - protein, 8 aa, Artificial sequence
  Protein classification predicting sequence
KVERNGSV

SEQ ID NO: 27957 - protein, 34 aa, Artificial sequence
  Protein classification predicting sequence
APYDLVKTMRASIWALGPLVARFGQGQVSLPGGC

SEQ ID NO: 27958 - protein, 10 aa, Artificial sequence
  Protein classification predicting sequence
IGARPVDLHI

SEQ ID NO: 27959 - protein, 12 aa, Artificial sequence
  Protein classification predicting sequence
IKLEEGYVKASV

SEQ ID NO: 27960 - protein, 9 aa, Artificial sequence
  Protein classification predicting sequence
AATLAEGTT

SEQ ID NO: 27961 - protein, 10 aa, Artificial sequence
  Protein classification predicting sequence
IEGVERLGGG

SEQ ID NO: 27962 - protein, 17 aa, Artificial sequence
  Protein classification predicting sequence
CRNAQPDTLDAVLAKLR

SEQ ID NO: 27963 - protein, 6 aa, Artificial sequence
  Protein classification predicting sequence
GEDWIS

SEQ ID NO: 27964 - protein, 28 aa, Artificial sequence
  Protein classification predicting sequence
VRTAPHPAFPTDMQAQFTLLNLVAEGTG

SEQ ID NO: 27965 - protein, 14 aa, Artificial sequence
  Protein classification predicting sequence
ETIFENRFMHVPEL

SEQ ID NO: 27966 - protein, 8 aa, Artificial sequence
  Protein classification predicting sequence
KGFEALGA

SEQ ID NO: 27967 - protein, 7 aa, Artificial sequence
  Protein classification predicting sequence
TVLENAA

SEQ ID NO: 27968 - protein, 10 aa, Artificial sequence
  Protein classification predicting sequence
ISGAKNAALP

SEQ ID NO: 27969 - protein, 9 aa, Artificial sequence
  Protein classification predicting sequence
MDKVSVGAT

SEQ ID NO: 27970 - protein, 7 aa, Artificial sequence
  Protein classification predicting sequence
MMAATLA

SEQ ID NO: 27971 - protein, 13 aa, Artificial sequence
  Protein classification predicting sequence
DRIETGTFLVAAA

SEQ ID NO: 27972 - protein, 15 aa, Artificial sequence
  Protein classification predicting sequence
DRIETGTFLVAAAIS

SEQ ID NO: 27973 - protein, 6 aa, Artificial sequence
  Protein classification predicting sequence
RPKAVN

SEQ ID NO: 27974 - protein, 6 aa, Artificial sequence
  Protein classification predicting sequence
APYELV

SEQ ID NO: 27975 - protein, 9 aa, Artificial sequence
  Protein classification predicting sequence
ITIEGVERL

SEQ ID NO: 27976 - protein, 7 aa, Artificial sequence
  Protein classification predicting sequence
AAAISGG

SEQ ID NO: 27977 - protein, 8 aa, Artificial sequence
  Protein classification predicting sequence
KAEIEGNT

SEQ ID NO: 27978 - protein, 10 aa, Artificial sequence
  Protein classification predicting sequence
MRASILVLGP

SEQ ID NO: 27979 - protein, 7 aa, Artificial sequence
  Protein classification predicting sequence
FPSVGAT

SEQ ID NO: 27980 - protein, 6 aa, Artificial sequence
  Protein classification predicting sequence
NAAREP

SEQ ID NO: 27981 - protein, 9 aa, Artificial sequence
  Protein classification predicting sequence
SGAKNAALP

SEQ ID NO: 27982 - protein, 9 aa, Artificial sequence
  Protein classification predicting sequence
GTENLLMAA

SEQ ID NO: 27983 - protein, 8 aa, Artificial sequence
  Protein classification predicting sequence
LEDGYVKA

SEQ ID NO: 27984 - protein, 19 aa, Artificial sequence
  Protein classification predicting sequence
NLPHLHDITTMIELFGRMG

SEQ ID NO: 27985 - protein, 33 aa, Artificial sequence
  Protein classification predicting sequence
ARFGEAEVALPGGCAIGSRPVDLHIRGLEAMGA

SEQ ID NO: 27986 - protein, 14 aa, Artificial sequence
  Protein classification predicting sequence
HFFFDTVSVTGTEN

SEQ ID NO: 27987 - protein, 12 aa, Artificial sequence
  Protein classification predicting sequence
KDTDPTILEAVL

SEQ ID NO: 27988 - protein, 11 aa, Artificial sequence
  Protein classification predicting sequence
RPKAVNVRTAP

SEQ ID NO: 27989 - protein, 10 aa, Artificial sequence
  Protein classification predicting sequence
AEGTGAVIET

SEQ ID NO: 27990 - protein, 7 aa, Artificial sequence
  Protein classification predicting sequence
GAGTDTI

SEQ ID NO: 27991 - protein, 9 aa, Artificial sequence
  Protein classification predicting sequence
LVKTMRASI

SEQ ID NO: 27992 - protein, 7 aa, Artificial sequence
  Protein classification predicting sequence
LGPLLAR

SEQ ID NO: 27993 - protein, 7 aa, Artificial sequence
  Protein classification predicting sequence
IGARPVD

SEQ ID NO: 27994 - protein, 6 aa, Artificial sequence
  Protein classification predicting sequence
RPVDLH

SEQ ID NO: 27995 - protein, 7 aa, Artificial sequence
  Protein classification predicting sequence
ETVFENR

SEQ ID NO: 27996 - protein, 6 aa, Artificial sequence
  Protein classification predicting sequence
VIENAA

SEQ ID NO: 27997 - protein, 8 aa, Artificial sequence
  Protein classification predicting sequence
RIVIEGVE

SEQ ID NO: 27998 - protein, 9 aa, Artificial sequence
  Protein classification predicting sequence
IPDRIEAGT

SEQ ID NO: 27999 - protein, 7 aa, Artificial sequence
  Protein classification predicting sequence
ELKRMGA

SEQ ID NO: 28000 - protein, 44 aa, Artificial sequence
  Protein classification predicting sequence
GEVTISGAKNAALPILFASILAEEPVEVANVPHLRDIDTTMELL

SEQ ID NO: 28001 - protein, 12 aa, Artificial sequence
  Protein classification predicting sequence
LGAKVERNGSVH

SEQ ID NO: 28002 - protein, 9 aa, Artificial sequence
  Protein classification predicting sequence
GLEQLGATI

SEQ ID NO: 28003 - protein, 14 aa, Artificial sequence
  Protein classification predicting sequence
GAHIVMDKVSVGAT

SEQ ID NO: 28004 - protein, 10 aa, Artificial sequence
  Protein classification predicting sequence
NAAREPEIVD

SEQ ID NO: 28005 - protein, 15 aa, Artificial sequence
  Protein classification predicting sequence
GETIVDRIYHIDRGY

SEQ ID NO: 28006 - protein, 18 aa, Artificial sequence
  Protein classification predicting sequence
VDRIYHIDRGYERIEDKL

SEQ ID NO: 28007 - protein, 7 aa, Artificial sequence
  Protein classification predicting sequence
EIQNVPK

SEQ ID NO: 28008 - protein, 11 aa, Artificial sequence
  Protein classification predicting sequence
PAFPTDMQAQF

SEQ ID NO: 28009 - protein, 8 aa, Artificial sequence
  Protein classification predicting sequence
LVKTMRAS

SEQ ID NO: 28010 - protein, 11 aa, Artificial sequence
  Protein classification predicting sequence
LPGGCAIGSRP

SEQ ID NO: 28011 - protein, 13 aa, Artificial sequence
  Protein classification predicting sequence
LPGGCAIGSRPVD

SEQ ID NO: 28012 - protein, 8 aa, Artificial sequence
  Protein classification predicting sequence
LILAGLVA

SEQ ID NO: 28013 - protein, 27 aa, Artificial sequence
  Protein classification predicting sequence
GEVTISGAKNAALPILFAALLAEEPVE

SEQ ID NO: 28014 - protein, 8 aa, Artificial sequence
  Protein classification predicting sequence
QNVPKLKD

SEQ ID NO: 28015 - protein, 10 aa, Artificial sequence
  Protein classification predicting sequence
IENAAREPEI

SEQ ID NO: 28016 - protein, 12 aa, Artificial sequence
  Protein classification predicting sequence
IENAAREPEIVD

SEQ ID NO: 28017 - protein, 26 aa, Artificial sequence
  Protein classification predicting sequence
RLGGGVYRVLPDRIETGTFLVAAAIS

SEQ ID NO: 28018 - protein, 12 aa, Artificial sequence
  Protein classification predicting sequence
PDTLDAVLAKLR

SEQ ID NO: 28019 - protein, 8 aa, Artificial sequence
  Protein classification predicting sequence
AGADIEVG

SEQ ID NO: 28020 - protein, 7 aa, Artificial sequence
  Protein classification predicting sequence
DWISLDM

SEQ ID NO: 28021 - protein, 11 aa, Artificial sequence
  Protein classification predicting sequence
PGFPTDMQAQF

SEQ ID NO: 28022 - protein, 10 aa, Artificial sequence
  Protein classification predicting sequence
LLNLVAEGTG

SEQ ID NO: 28023 - protein, 9 aa, Artificial sequence
  Protein classification predicting sequence
TGNPRASEV

SEQ ID NO: 28024 - protein, 18 aa, Artificial sequence
  Protein classification predicting sequence
LVVSRAGATTLAELTALG

SEQ ID NO: 28025 - protein, 7 aa, Artificial sequence
  Protein classification predicting sequence
SGKLRRY

SEQ ID NO: 28026 - protein, 6 aa, Artificial sequence
  Protein classification predicting sequence
GKLRRY

SEQ ID NO: 28027 - protein, 10 aa, Artificial sequence
  Protein classification predicting sequence
FSKGGFVSVP

SEQ ID NO: 28028 - protein, 9 aa, Artificial sequence
  Protein classification predicting sequence
ISSGKLRRY

SEQ ID NO: 28029 - protein, 7 aa, Artificial sequence
  Protein classification predicting sequence
AGGTGGH

SEQ ID NO: 28030 - protein, 8 aa, Artificial sequence
  Protein classification predicting sequence
FPAEALAH

SEQ ID NO: 28031 - protein, 8 aa, Artificial sequence
  Protein classification predicting sequence
VFGGSQGA

SEQ ID NO: 28032 - protein, 9 aa, Artificial sequence
  Protein classification predicting sequence
GTGGHLFPA

SEQ ID NO: 28033 - protein, 6 aa, Artificial sequence
  Protein classification predicting sequence
GGSQGA

SEQ ID NO: 28034 - protein, 6 aa, Artificial sequence
  Protein classification predicting sequence
AVDDHQ

SEQ ID NO: 28035 - protein, 7 aa, Artificial sequence
  Protein classification predicting sequence
GTERGLE

SEQ ID NO: 28036 - protein, 8 aa, Artificial sequence
  Protein classification predicting sequence
TNKFLSRY

SEQ ID NO: 28037 - protein, 18 aa, Artificial sequence
  Protein classification predicting sequence
VIGTGGYVCGPVVYAAAK

SEQ ID NO: 28038 - protein, 13 aa, Artificial sequence
  Protein classification predicting sequence
LIPSPYVTANHQE

SEQ ID NO: 28039 - protein, 7 aa, Artificial sequence
  Protein classification predicting sequence
DMAAAYA

SEQ ID NO: 28040 - protein, 7 aa, Artificial sequence
  Protein classification predicting sequence
DHQTKNA

SEQ ID NO: 28041 - protein, 8 aa, Artificial sequence
  Protein classification predicting sequence
RVLVVGGS

SEQ ID NO: 28042 - protein, 6 aa, Artificial sequence
  Protein classification predicting sequence
QQYWNA

SEQ ID NO: 28043 - protein, 7 aa, Artificial sequence
  Protein classification predicting sequence
VVGFGGY

SEQ ID NO: 28044 - protein, 12 aa, Artificial sequence
  Protein classification predicting sequence
LGMGGYVSGPGG

SEQ ID NO: 28045 - protein, 8 aa, Artificial sequence
  Protein classification predicting sequence
PLIIHEQN

SEQ ID NO: 28046 - protein, 7 aa, Artificial sequence
  Protein classification predicting sequence
GALTVSE

SEQ ID NO: 28047 - protein, 7 aa, Artificial sequence
  Protein classification predicting sequence
VVGNPVR

SEQ ID NO: 28048 - protein, 8 aa, Artificial sequence
  Protein classification predicting sequence
VVGGSQGA

SEQ ID NO: 28049 - protein, 6 aa, Artificial sequence
  Protein classification predicting sequence
SRGDQI

SEQ ID NO: 28050 - protein, 9 aa, Artificial sequence
  Protein classification predicting sequence
YIGSKNGIE

SEQ ID NO: 28051 - protein, 7 aa, Artificial sequence
  Protein classification predicting sequence
FSKGGFV

SEQ ID NO: 28052 - protein, 6 aa, Artificial sequence
  Protein classification predicting sequence
ASRGDQ

SEQ ID NO: 28053 - protein, 8 aa, Artificial sequence
  Protein classification predicting sequence
AGGGTAGH

SEQ ID NO: 28054 - protein, 14 aa, Artificial sequence
  Protein classification predicting sequence
AGGGTAGHIEPALA

SEQ ID NO: 28055 - protein, 8 aa, Artificial sequence
  Protein classification predicting sequence
PAIYVPLP

SEQ ID NO: 28056 - protein, 7 aa, Artificial sequence
  Protein classification predicting sequence
LGMGGYV

SEQ ID NO: 28057 - protein, 10 aa, Artificial sequence
  Protein classification predicting sequence
LVLGGSQGAR

SEQ ID NO: 28058 - protein, 7 aa, Artificial sequence
  Protein classification predicting sequence
GGSQGAR

SEQ ID NO: 28059 - protein, 11 aa, Artificial sequence
  Protein classification predicting sequence
WADLVVCRAGA

SEQ ID NO: 28060 - protein, 7 aa, Artificial sequence
  Protein classification predicting sequence
GFKRSLS

SEQ ID NO: 28061 - protein, 11 aa, Artificial sequence
  Protein classification predicting sequence
PDVVIGTGGYV

SEQ ID NO: 28062 - protein, 7 aa, Artificial sequence
  Protein classification predicting sequence
IPTIIHE

SEQ ID NO: 28063 - protein, 8 aa, Artificial sequence
  Protein classification predicting sequence
GTGGHIFP

SEQ ID NO: 28064 - protein, 6 aa, Artificial sequence
  Protein classification predicting sequence
VGNPVR

SEQ ID NO: 28065 - protein, 8 aa, Artificial sequence
  Protein classification predicting sequence
GGSQGARI

SEQ ID NO: 28066 - protein, 9 aa, Artificial sequence
  Protein classification predicting sequence
EIAAAGLPA

SEQ ID NO: 28067 - protein, 8 aa, Artificial sequence
  Protein classification predicting sequence
QHKDRQQY

SEQ ID NO: 28068 - protein, 8 aa, Artificial sequence
  Protein classification predicting sequence
GAAKIIEQ

SEQ ID NO: 28069 - protein, 9 aa, Artificial sequence
  Protein classification predicting sequence
RGLETRLVP

SEQ ID NO: 28070 - protein, 9 aa, Artificial sequence
  Protein classification predicting sequence
LVVGGSLGA

SEQ ID NO: 28071 - protein, 11 aa, Artificial sequence
  Protein classification predicting sequence
MAGGTGGHVFP

SEQ ID NO: 28072 - protein, 9 aa, Artificial sequence
  Protein classification predicting sequence
DLVICRAGA

SEQ ID NO: 28073 - protein, 7 aa, Artificial sequence
  Protein classification predicting sequence
TPGLANK

SEQ ID NO: 28074 - protein, 6 aa, Artificial sequence
  Protein classification predicting sequence
VISRAG

SEQ ID NO: 28075 - protein, 10 aa, Artificial sequence
  Protein classification predicting sequence
WLGTADRMEA

SEQ ID NO: 28076 - protein, 12 aa, Artificial sequence
  Protein classification predicting sequence
LHEQNAVAGLTN

SEQ ID NO: 28077 - protein, 13 aa, Artificial sequence
  Protein classification predicting sequence
AFPNAEVVGNPVR

SEQ ID NO: 28078 - protein, 23 aa, Artificial sequence
  Protein classification predicting sequence
RLMVMAGGTGGHVFPGLAVAHHL

SEQ ID NO: 28079 - protein, 7 aa, Artificial sequence
  Protein classification predicting sequence
LVPKHGI

SEQ ID NO: 28080 - protein, 13 aa, Artificial sequence
  Protein classification predicting sequence
VLGMGGYVSGPGG

SEQ ID NO: 28081 - protein, 15 aa, Artificial sequence
  Protein classification predicting sequence
PVVLHEQNGIAGLTN

SEQ ID NO: 28082 - protein, 15 aa, Artificial sequence
  Protein classification predicting sequence
CRSGALTVSEVSAAG

SEQ ID NO: 28083 - protein, 6 aa, Artificial sequence
  Protein classification predicting sequence
IRHQAG

SEQ ID NO: 28084 - protein, 27 aa, Artificial sequence
  Protein classification predicting sequence
ICRAGAMTVSEVAAAGVAALFVPFPHA

SEQ ID NO: 28085 - protein, 13 aa, Artificial sequence
  Protein classification predicting sequence
DRMEADLVPKHGI

SEQ ID NO: 28086 - protein, 13 aa, Artificial sequence
  Protein classification predicting sequence
IDFIRISGLRGKG

SEQ ID NO: 28087 - protein, 18 aa, Artificial sequence
  Protein classification predicting sequence
AAPLRIFNAWRQARAIMK

SEQ ID NO: 28088 - protein, 10 aa, Artificial sequence
  Protein classification predicting sequence
VTIWHQSGKG

SEQ ID NO: 28089 - protein, 13 aa, Artificial sequence
  Protein classification predicting sequence
AGQPQHKVTEFID

SEQ ID NO: 28090 - protein, 19 aa, Artificial sequence
  Protein classification predicting sequence
FVPFQHKDRQQYWNALPLE

SEQ ID NO: 28091 - protein, 10 aa, Artificial sequence
  Protein classification predicting sequence
LLTMAERARA

SEQ ID NO: 28092 - protein, 40 aa, Artificial sequence
  Protein classification predicting sequence
KPDVVLGMGGYVSGPGGLAAWSLGIPVVLHEQNGIAGLTN

SEQ ID NO: 28093 - protein, 30 aa, Artificial sequence
  Protein classification predicting sequence
VMQAFPGAFPNAEVVGNPVRTDVLALPLPQ

SEQ ID NO: 28094 - protein, 9 aa, Artificial sequence
  Protein classification predicting sequence
PDVVLGMGG

SEQ ID NO: 28095 - protein, 8 aa, Artificial sequence
  Protein classification predicting sequence
MAGGTGGH

SEQ ID NO: 28096 - protein, 18 aa, Artificial sequence
  Protein classification predicting sequence
TGGGTVGHVSVNLSLIPT

SEQ ID NO: 28097 - protein, 12 aa, Artificial sequence
  Protein classification predicting sequence
GIEREMIESQLP

SEQ ID NO: 28098 - protein, 12 aa, Artificial sequence
  Protein classification predicting sequence
YYPISSGKLRRY

SEQ ID NO: 28099 - protein, 18 aa, Artificial sequence
  Protein classification predicting sequence
ENAKDVFKVLKGILDARK

SEQ ID NO: 28100 - protein, 20 aa, Artificial sequence
  Protein classification predicting sequence
KPDLLFSKGGFVSVPVVIAA

SEQ ID NO: 28101 - protein, 12 aa, Artificial sequence
  Protein classification predicting sequence
LKFAKKIYTTFE

SEQ ID NO: 28102 - protein, 18 aa, Artificial sequence
  Protein classification predicting sequence
NKKVLLVMGGSLGSKKLN

SEQ ID NO: 28103 - protein, 8 aa, Artificial sequence
  Protein classification predicting sequence
IHLTGKGL

SEQ ID NO: 28104 - protein, 12 aa, Artificial sequence
  Protein classification predicting sequence
DLTDLLAITDTV

SEQ ID NO: 28105 - protein, 7 aa, Artificial sequence
  Protein classification predicting sequence
LRIPMLL

SEQ ID NO: 28106 - protein, 15 aa, Artificial sequence
  Protein classification predicting sequence
PLGLDQSRGDQIDNA

SEQ ID NO: 28107 - protein, 10 aa, Artificial sequence
  Protein classification predicting sequence
FTGGGTVGHV

SEQ ID NO: 28108 - protein, 11 aa, Artificial sequence
  Protein classification predicting sequence
LFSKGGFVSVP

SEQ ID NO: 28109 - protein, 15 aa, Artificial sequence
  Protein classification predicting sequence
IAYKFATTMYTTFEQ

SEQ ID NO: 28110 - protein, 13 aa, Artificial sequence
  Protein classification predicting sequence
LKTLLFIGGSAGA

SEQ ID NO: 28111 - protein, 8 aa, Artificial sequence
  Protein classification predicting sequence
VFNQFISD

SEQ ID NO: 28112 - protein, 8 aa, Artificial sequence
  Protein classification predicting sequence
LYRVDYVT

SEQ ID NO: 28113 - protein, 7 aa, Artificial sequence
  Protein classification predicting sequence
TRGGSNT

SEQ ID NO: 28114 - protein, 10 aa, Artificial sequence
  Protein classification predicting sequence
FELLAMAKLH

SEQ ID NO: 28115 - protein, 17 aa, Artificial sequence
  Protein classification predicting sequence
IVPLGKEASRGDQLENA

SEQ ID NO: 28116 - protein, 28 aa, Artificial sequence
  Protein classification predicting sequence
YTTFEQEDQLSKVKHLGAVTKVFKDANQ

SEQ ID NO: 28117 - protein, 9 aa, Artificial sequence
  Protein classification predicting sequence
PESTQLEAV

SEQ ID NO: 28118 - protein, 11 aa, Artificial sequence
  Protein classification predicting sequence
DGWEVHYIGDK

SEQ ID NO: 28119 - protein, 9 aa, Artificial sequence
  Protein classification predicting sequence
KSGLDVTFH

SEQ ID NO: 28120 - protein, 8 aa, Artificial sequence
  Protein classification predicting sequence
LVLGGSLG

SEQ ID NO: 28121 - protein, 11 aa, Artificial sequence
  Protein classification predicting sequence
GGGTGGHIYPA

SEQ ID NO: 28122 - protein, 17 aa, Artificial sequence
  Protein classification predicting sequence
LRPQALFSKGGFVSVPP

SEQ ID NO: 28123 - protein, 8 aa, Artificial sequence
  Protein classification predicting sequence
VKGLRGQG

SEQ ID NO: 28124 - protein, 22 aa, Artificial sequence
  Protein classification predicting sequence
QPDAVLGMGGYVSGPGGIAAWL

SEQ ID NO: 28125 - protein, 7 aa, Artificial sequence
  Protein classification predicting sequence
QAFPGAF

SEQ ID NO: 28126 - protein, 10 aa, Artificial sequence
  Protein classification predicting sequence
CRSGALTVSE

SEQ ID NO: 28127 - protein, 11 aa, Artificial sequence
  Protein classification predicting sequence
RWLGTADRMEA

SEQ ID NO: 28128 - protein, 20 aa, Artificial sequence
  Protein classification predicting sequence
IFIPFMHKDRQQALNADHLV

SEQ ID NO: 28129 - protein, 6 aa, Artificial sequence
  Protein classification predicting sequence
IWHQSG

SEQ ID NO: 28130 - protein, 10 aa, Artificial sequence
  Protein classification predicting sequence
ARRVLSGFPG

SEQ ID NO: 28131 - protein, 6 aa, Artificial sequence
  Protein classification predicting sequence
DMAAAY

SEQ ID NO: 28132 - protein, 8 aa, Artificial sequence
  Protein classification predicting sequence
HGIEIDFI

SEQ ID NO: 28133 - protein, 10 aa, Artificial sequence
  Protein classification predicting sequence
QAFPGAFPNA

SEQ ID NO: 28134 - protein, 16 aa, Artificial sequence
  Protein classification predicting sequence
VVGNPVRTDVLALPLP

SEQ ID NO: 28135 - protein, 9 aa, Artificial sequence
  Protein classification predicting sequence
IPDATERVA

SEQ ID NO: 28136 - protein, 8 aa, Artificial sequence
  Protein classification predicting sequence
LFDTRYSI

SEQ ID NO: 28137 - protein, 16 aa, Artificial sequence
  Protein classification predicting sequence
NGQLLTILSVEDSDDG

SEQ ID NO: 28138 - protein, 7 aa, Artificial sequence
  Protein classification predicting sequence
PKITRPP

SEQ ID NO: 28139 - protein, 26 aa, Artificial sequence
  Protein classification predicting sequence
IIEGLKAVLPCTTMGNPKPSVSWIKG

SEQ ID NO: 28140 - protein, 15 aa, Artificial sequence
  Protein classification predicting sequence
EDAGQYRCVAKNSLG

SEQ ID NO: 28141 - protein, 131 aa, Artificial sequence
  Protein classification predicting sequence
TLTTLPSELLLDRLHPNPMYQRMPLLLNPKLLSLEYPRNNIEYVRDIGEGAFGRVFQARAPGLLPYEPFTMVAVKMLKEEASADMQADFQREAALMAEFDNPNIVKLLGVCAVGKPMCLLFEYMAYGDLNE

SEQ ID NO: 28142 - protein, 20 aa, Artificial sequence
  Protein classification predicting sequence
ELYNLMRLCWSKLPADRPSF

SEQ ID NO: 28143 - protein, 15 aa, Artificial sequence
  Protein classification predicting sequence
FVHRDLATRNCLVGE

SEQ ID NO: 28144 - protein, 10 aa, Artificial sequence
  Protein classification predicting sequence
DTRKTLPGLR

SEQ ID NO: 28145 - protein, 13 aa, Artificial sequence
  Protein classification predicting sequence
PNNVPPHRPQPEA

SEQ ID NO: 28146 - protein, 14 aa, Artificial sequence
  Protein classification predicting sequence
MLELAIADKPLFTL

SEQ ID NO: 28147 - protein, 12 aa, Artificial sequence
  Protein classification predicting sequence
RNAPSYTAQTLK

SEQ ID NO: 28148 - protein, 12 aa, Artificial sequence
  Protein classification predicting sequence
PLAFIIGQDSLL

SEQ ID NO: 28149 - protein, 14 aa, Artificial sequence
  Protein classification predicting sequence
HLIVCRRPGYPLEM

SEQ ID NO: 28150 - protein, 12 aa, Artificial sequence
  Protein classification predicting sequence
PAGKIYLAETPW

SEQ ID NO: 28151 - protein, 19 aa, Artificial sequence
  Protein classification predicting sequence
MLELAIADKPLFTLDEREL

SEQ ID NO: 28152 - protein, 7 aa, Artificial sequence
  Protein classification predicting sequence
YSNNPLV

SEQ ID NO: 28153 - protein, 7 aa, Artificial sequence
  Protein classification predicting sequence
IGIGSAQ

SEQ ID NO: 28154 - protein, 7 aa, Artificial sequence
  Protein classification predicting sequence
GRFQPFH

SEQ ID NO: 28155 - protein, 8 aa, Artificial sequence
  Protein classification predicting sequence
VYTNNPLV

SEQ ID NO: 28156 - protein, 7 aa, Artificial sequence
  Protein classification predicting sequence
AGIIHRD

SEQ ID NO: 28157 - protein, 10 aa, Artificial sequence
  Protein classification predicting sequence
GTPYWMAPEV

SEQ ID NO: 28158 - protein, 45 aa, Artificial sequence
  Protein classification predicting sequence
AAEAEFNILLATDSYKVTHYKQYPPNTSKVYSYFECREKKTENSK

SEQ ID NO: 28159 - protein, 35 aa, Artificial sequence
  Protein classification predicting sequence
RKVKYEETVFYGLQYILNKYLKGKVVTKEKIQEAK

SEQ ID NO: 28160 - protein, 80 aa, Artificial sequence
  Protein classification predicting sequence
ALIKKYYGTKDPVPGYSVPAAEHSTITAWGKDHEKDAFEHIVTQFSSVPVSVVSDSYDIYNACEKIWGEDLRHLIVSRST

SEQ ID NO: 28161 - protein, 20 aa, Artificial sequence
  Protein classification predicting sequence
APLIIRPDSGNPLDTVLKVL

SEQ ID NO: 28162 - protein, 20 aa, Artificial sequence
  Protein classification predicting sequence
DLLHTVFKNGKVTKSYSFDE

SEQ ID NO: 28163 - protein, 12 aa, Artificial sequence
  Protein classification predicting sequence
RESCVSLFLVVL

SEQ ID NO: 28164 - protein, 7 aa, Artificial sequence
  Protein classification predicting sequence
GQFTSSS

SEQ ID NO: 28165 - protein, 8 aa, Artificial sequence
  Protein classification predicting sequence
FKTLHFLL

SEQ ID NO: 28166 - protein, 11 aa, Artificial sequence
  Protein classification predicting sequence
DVVFLAALVGM

SEQ ID NO: 28167 - protein, 9 aa, Artificial sequence
  Protein classification predicting sequence
HGSDSVESA

SEQ ID NO: 28168 - protein, 9 aa, Artificial sequence
  Protein classification predicting sequence
KPDGVQRGL

SEQ ID NO: 28169 - protein, 7 aa, Artificial sequence
  Protein classification predicting sequence
RKLIGAT

SEQ ID NO: 28170 - protein, 7 aa, Artificial sequence
  Protein classification predicting sequence
EIISRFE

SEQ ID NO: 28171 - protein, 6 aa, Artificial sequence
  Protein classification predicting sequence
KERPFF

SEQ ID NO: 28172 - protein, 7 aa, Artificial sequence
  Protein classification predicting sequence
KPDGVQR

SEQ ID NO: 28173 - protein, 7 aa, Artificial sequence
  Protein classification predicting sequence
RFERKGF

SEQ ID NO: 28174 - protein, 6 aa, Artificial sequence
  Protein classification predicting sequence
KHYADL

SEQ ID NO: 28175 - protein, 9 aa, Artificial sequence
  Protein classification predicting sequence
GRNIIHGSD

SEQ ID NO: 28176 - protein, 7 aa, Artificial sequence
  Protein classification predicting sequence
FITSGPV

SEQ ID NO: 28177 - protein, 17 aa, Artificial sequence
  Protein classification predicting sequence
IIKRFEQKGFRLVAMKF

SEQ ID NO: 28178 - protein, 6 aa, Artificial sequence
  Protein classification predicting sequence
AMVWEG

SEQ ID NO: 28179 - protein, 33 aa, Artificial sequence
  Protein classification predicting sequence
AMVWEGLNVVKTGRVMLGETNPADSKPGTIRGD

SEQ ID NO: 28180 - protein, 7 aa, Artificial sequence
  Protein classification predicting sequence
PGTIRGD

SEQ ID NO: 28181 - protein, 14 aa, Artificial sequence
  Protein classification predicting sequence
ERTFIAIKPDGVQR

SEQ ID NO: 28182 - protein, 11 aa, Artificial sequence
  Protein classification predicting sequence
SGPVVAMVWEG

SEQ ID NO: 28183 - protein, 5 aa, Artificial sequence
  Protein classification predicting sequence
MVWEG

SEQ ID NO: 28184 - protein, 13 aa, Artificial sequence
  Protein classification predicting sequence
MVWEGLNVVKTGR

SEQ ID NO: 28185 - protein, 16 aa, Artificial sequence
  Protein classification predicting sequence
ERTFIAIKPDGVQRGL

SEQ ID NO: 28186 - protein, 6 aa, Artificial sequence
  Protein classification predicting sequence
GLVKYM

SEQ ID NO: 28187 - protein, 6 aa, Artificial sequence
  Protein classification predicting sequence
HGSDSV

SEQ ID NO: 28188 - protein, 8 aa, Artificial sequence
  Protein classification predicting sequence
RGLVGEII

SEQ ID NO: 28189 - protein, 7 aa, Artificial sequence
  Protein classification predicting sequence
HKERPFF

SEQ ID NO: 28190 - protein, 8 aa, Artificial sequence
  Protein classification predicting sequence
SGPVVAMV

SEQ ID NO: 28191 - protein, 7 aa, Artificial sequence
  Protein classification predicting sequence
RFEKKGF

SEQ ID NO: 28192 - protein, 6 aa, Artificial sequence
  Protein classification predicting sequence
FMTSGP

SEQ ID NO: 28193 - protein, 8 aa, Artificial sequence
  Protein classification predicting sequence
GATNPKEA

SEQ ID NO: 28194 - protein, 11 aa, Artificial sequence
  Protein classification predicting sequence
AAPGTIRADFA

SEQ ID NO: 28195 - protein, 7 aa, Artificial sequence
  Protein classification predicting sequence
REIAYFF

SEQ ID NO: 28196 - protein, 7 aa, Artificial sequence
  Protein classification predicting sequence
AIERTFS

SEQ ID NO: 28197 - protein, 6 aa, Artificial sequence
  Protein classification predicting sequence
EIAYWF

SEQ ID NO: 28198 - protein, 8 aa, Artificial sequence
  Protein classification predicting sequence
AGLRIVAQ

SEQ ID NO: 28199 - protein, 7 aa, Artificial sequence
  Protein classification predicting sequence
AESIDAN

SEQ ID NO: 28200 - protein, 6 aa, Artificial sequence
  Protein classification predicting sequence
VHGSDS

SEQ ID NO: 28201 - protein, 9 aa, Artificial sequence
  Protein classification predicting sequence
HGSDAPETA

SEQ ID NO: 28202 - protein, 6 aa, Artificial sequence
  Protein classification predicting sequence
IHASDS

SEQ ID NO: 28203 - protein, 7 aa, Artificial sequence
  Protein classification predicting sequence
SDSPESA

SEQ ID NO: 28204 - protein, 6 aa, Artificial sequence
  Protein classification predicting sequence
MTSGPI

SEQ ID NO: 28205 - protein, 8 aa, Artificial sequence
  Protein classification predicting sequence
GTIRADFA

SEQ ID NO: 28206 - protein, 11 aa, Artificial sequence
  Protein classification predicting sequence
SIDANAVHGSD

SEQ ID NO: 28207 - protein, 74 aa, Artificial sequence
  Protein classification predicting sequence
EKPFFGELVDFITSGPVFAMVWQGEGVVDTARNMMGKTRPHEAAPGTIRGDFGVTVAKNIIHGSDSLESAEREI

SEQ ID NO: 28208 - protein, 7 aa, Artificial sequence
  Protein classification predicting sequence
EHQGKPF

SEQ ID NO: 28209 - protein, 8 aa, Artificial sequence
  Protein classification predicting sequence
KPFFGELV

SEQ ID NO: 28210 - protein, 16 aa, Artificial sequence
  Protein classification predicting sequence
NIIHGSDSLESAEREI

SEQ ID NO: 28211 - protein, 7 aa, Artificial sequence
  Protein classification predicting sequence
NSVHGSD

SEQ ID NO: 28212 - protein, 7 aa, Artificial sequence
  Protein classification predicting sequence
TFSIIKP

SEQ ID NO: 28213 - protein, 7 aa, Artificial sequence
  Protein classification predicting sequence
VQVLEGE

SEQ ID NO: 28214 - protein, 7 aa, Artificial sequence
  Protein classification predicting sequence
SIIKPDA

SEQ ID NO: 28215 - protein, 6 aa, Artificial sequence
  Protein classification predicting sequence
MGATDP

SEQ ID NO: 28216 - protein, 12 aa, Artificial sequence
  Protein classification predicting sequence
SRREAEGFYAVH

SEQ ID NO: 28217 - protein, 6 aa, Artificial sequence
  Protein classification predicting sequence
EGTIRK

SEQ ID NO: 28218 - protein, 8 aa, Artificial sequence
  Protein classification predicting sequence
GLRIAAMK

SEQ ID NO: 28219 - protein, 7 aa, Artificial sequence
  Protein classification predicting sequence
FMISGPV

SEQ ID NO: 28220 - protein, 10 aa, Artificial sequence
  Protein classification predicting sequence
VHGSDSLENA

SEQ ID NO: 28221 - protein, 6 aa, Artificial sequence
  Protein classification predicting sequence
FYAVHK

SEQ ID NO: 28222 - protein, 7 aa, Artificial sequence
  Protein classification predicting sequence
NAVHGSD

SEQ ID NO: 28223 - protein, 12 aa, Artificial sequence
  Protein classification predicting sequence
NAVHGSDSLENA

SEQ ID NO: 28224 - protein, 7 aa, Artificial sequence
  Protein classification predicting sequence
EAEGFYA

SEQ ID NO: 28225 - protein, 11 aa, Artificial sequence
  Protein classification predicting sequence
FYAVHKERPFF

SEQ ID NO: 28226 - protein, 7 aa, Artificial sequence
  Protein classification predicting sequence
SGPVMIQ

SEQ ID NO: 28227 - protein, 7 aa, Artificial sequence
  Protein classification predicting sequence
LEGENAV

SEQ ID NO: 28228 - protein, 7 aa, Artificial sequence
  Protein classification predicting sequence
LEGEDAI

SEQ ID NO: 28229 - protein, 7 aa, Artificial sequence
  Protein classification predicting sequence
ESAEKEI

SEQ ID NO: 28230 - protein, 10 aa, Artificial sequence
  Protein classification predicting sequence
FYAVHKDRPF

SEQ ID NO: 28231 - protein, 6 aa, Artificial sequence
  Protein classification predicting sequence
MGATNP

SEQ ID NO: 28232 - protein, 6 aa, Artificial sequence
  Protein classification predicting sequence
IIKPDA

SEQ ID NO: 28233 - protein, 8 aa, Artificial sequence
  Protein classification predicting sequence
AEGFYAVH

SEQ ID NO: 28234 - protein, 8 aa, Artificial sequence
  Protein classification predicting sequence
AVAKNVIG

SEQ ID NO: 28235 - protein, 42 aa, Artificial sequence
  Protein classification predicting sequence
ENAVQRHRDLLGATNPANALAGTLRADYADSLTENGTHGSDS

SEQ ID NO: 28236 - protein, 56 aa, Artificial sequence
  Protein classification predicting sequence
IFARFEAAGFKIVGTKMLHLTVEQARGFYAEHDGKPFFDGLVEFMTSGPIVVSVLE

SEQ ID NO: 28237 - protein, 7 aa, Artificial sequence
  Protein classification predicting sequence
SGPIMVQ

SEQ ID NO: 28238 - protein, 8 aa, Artificial sequence
  Protein classification predicting sequence
QVLEGENA

SEQ ID NO: 28239 - protein, 23 aa, Artificial sequence
  Protein classification predicting sequence
IGEIVARFEKKGFQLVGAKLMQV

SEQ ID NO: 28240 - protein, 8 aa, Artificial sequence
  Protein classification predicting sequence
GFKLVGLK

SEQ ID NO: 28241 - protein, 6 aa, Artificial sequence
  Protein classification predicting sequence
GTIRGD

SEQ ID NO: 28242 - protein, 7 aa, Artificial sequence
  Protein classification predicting sequence
NIIHGSD

SEQ ID NO: 28243 - protein, 8 aa, Artificial sequence
  Protein classification predicting sequence
PIVVSVLE

SEQ ID NO: 28244 - protein, 10 aa, Artificial sequence
  Protein classification predicting sequence
GKIIDRFESN

SEQ ID NO: 28245 - protein, 10 aa, Artificial sequence
  Protein classification predicting sequence
LVDFMISGPV

SEQ ID NO: 28246 - protein, 7 aa, Artificial sequence
  Protein classification predicting sequence
FMVSGPV

SEQ ID NO: 28247 - protein, 7 aa, Artificial sequence
  Protein classification predicting sequence
ESAAREI

SEQ ID NO: 28248 - protein, 7 aa, Artificial sequence
  Protein classification predicting sequence
RFEKAGL

SEQ ID NO: 28249 - protein, 8 aa, Artificial sequence
  Protein classification predicting sequence
GEVISRIE

SEQ ID NO: 28250 - protein, 6 aa, Artificial sequence
  Protein classification predicting sequence
EIAYFF

SEQ ID NO: 28251 - protein, 7 aa, Artificial sequence
  Protein classification predicting sequence
KPDAVKR

SEQ ID NO: 28252 - protein, 7 aa, Artificial sequence
  Protein classification predicting sequence
DRETAEK

SEQ ID NO: 28253 - protein, 6 aa, Artificial sequence
  Protein classification predicting sequence
DIGRNV

SEQ ID NO: 28254 - protein, 6 aa, Artificial sequence
  Protein classification predicting sequence
ITSAPV

SEQ ID NO: 28255 - protein, 6 aa, Artificial sequence
  Protein classification predicting sequence
GRNIIH

SEQ ID NO: 28256 - protein, 6 aa, Artificial sequence
  Protein classification predicting sequence
EIALWF

SEQ ID NO: 28257 - protein, 7 aa, Artificial sequence
  Protein classification predicting sequence
RIERKGL

SEQ ID NO: 28258 - protein, 6 aa, Artificial sequence
  Protein classification predicting sequence
QHYAEH

SEQ ID NO: 28259 - protein, 13 aa, Artificial sequence
  Protein classification predicting sequence
LETQFNLVHGSDS

SEQ ID NO: 28260 - protein, 7 aa, Artificial sequence
  Protein classification predicting sequence
REIALWF

SEQ ID NO: 28261 - protein, 8 aa, Artificial sequence
  Protein classification predicting sequence
TLSIIKPD

SEQ ID NO: 28262 - protein, 7 aa, Artificial sequence
  Protein classification predicting sequence
HGSDSVE

SEQ ID NO: 28263 - protein, 18 aa, Artificial sequence
  Protein classification predicting sequence
ERTLSIIKPDAVAKNVIG

SEQ ID NO: 28264 - protein, 7 aa, Artificial sequence
  Protein classification predicting sequence
ARFEAAG

SEQ ID NO: 28265 - protein, 8 aa, Artificial sequence
  Protein classification predicting sequence
NRELMGAT

SEQ ID NO: 28266 - protein, 12 aa, Artificial sequence
  Protein classification predicting sequence
KAEKGTIRADFA

SEQ ID NO: 28267 - protein, 7 aa, Artificial sequence
  Protein classification predicting sequence
EFITSGP

SEQ ID NO: 28268 - protein, 9 aa, Artificial sequence
  Protein classification predicting sequence
HGSDSPESA

SEQ ID NO: 28269 - protein, 9 aa, Artificial sequence
  Protein classification predicting sequence
MVKPDGVQR

SEQ ID NO: 28270 - protein, 12 aa, Artificial sequence
  Protein classification predicting sequence
MMGKTNPLEADP

SEQ ID NO: 28271 - protein, 6 aa, Artificial sequence
  Protein classification predicting sequence
TIRGDF

SEQ ID NO: 28272 - protein, 8 aa, Artificial sequence
  Protein classification predicting sequence
NSVHGSDS

SEQ ID NO: 28273 - protein, 9 aa, Artificial sequence
  Protein classification predicting sequence
ERTFSIIKP

SEQ ID NO: 28274 - protein, 7 aa, Artificial sequence
  Protein classification predicting sequence
VLEGENA

SEQ ID NO: 28275 - protein, 6 aa, Artificial sequence
  Protein classification predicting sequence
GFYAEH

SEQ ID NO: 28276 - protein, 6 aa, Artificial sequence
  Protein classification predicting sequence
SDSLES

SEQ ID NO: 28277 - protein, 8 aa, Artificial sequence
  Protein classification predicting sequence
LESAEREI

SEQ ID NO: 28278 - protein, 7 aa, Artificial sequence
  Protein classification predicting sequence
AIDIGRN

SEQ ID NO: 28279 - protein, 7 aa, Artificial sequence
  Protein classification predicting sequence
AIAKNRE

SEQ ID NO: 28280 - protein, 9 aa, Artificial sequence
  Protein classification predicting sequence
AGLRVVASK

SEQ ID NO: 28281 - protein, 6 aa, Artificial sequence
  Protein classification predicting sequence
GATDPK

SEQ ID NO: 28282 - protein, 8 aa, Artificial sequence
  Protein classification predicting sequence
NVVHASDS

SEQ ID NO: 28283 - protein, 10 aa, Artificial sequence
  Protein classification predicting sequence
PKDAAPGTIR

SEQ ID NO: 28284 - protein, 7 aa, Artificial sequence
  Protein classification predicting sequence
AAPGTIR

SEQ ID NO: 28285 - protein, 9 aa, Artificial sequence
  Protein classification predicting sequence
GEIISRFEK

SEQ ID NO: 28286 - protein, 8 aa, Artificial sequence
  Protein classification predicting sequence
RPFFGELV

SEQ ID NO: 28287 - protein, 42 aa, Artificial sequence
  Protein classification predicting sequence
RPFFGELVEFMSSGPTVVQVLEGENAIAKNREVMGATNPANA

SEQ ID NO: 28288 - protein, 8 aa, Artificial sequence
  Protein classification predicting sequence
GATNPANA

SEQ ID NO: 28289 - protein, 7 aa, Artificial sequence
  Protein classification predicting sequence
FITSAPV

SEQ ID NO: 28290 - protein, 9 aa, Artificial sequence
  Protein classification predicting sequence
FMISGPVVV

SEQ ID NO: 28291 - protein, 8 aa, Artificial sequence
  Protein classification predicting sequence
TFSMIKPD

SEQ ID NO: 28292 - protein, 12 aa, Artificial sequence
  Protein classification predicting sequence
IKPDATRRNLTG

SEQ ID NO: 28293 - protein, 6 aa, Artificial sequence
  Protein classification predicting sequence
GATNPA

SEQ ID NO: 28294 - protein, 6 aa, Artificial sequence
  Protein classification predicting sequence
HGSDSL

SEQ ID NO: 28295 - protein, 6 aa, Artificial sequence
  Protein classification predicting sequence
RNLIGE

SEQ ID NO: 28296 - protein, 9 aa, Artificial sequence
  Protein classification predicting sequence
KGLKLVGGK

SEQ ID NO: 28297 - protein, 9 aa, Artificial sequence
  Protein classification predicting sequence
MQVPMELAE

SEQ ID NO: 28298 - protein, 7 aa, Artificial sequence
  Protein classification predicting sequence
EHEGKPF

SEQ ID NO: 28299 - protein, 18 aa, Artificial sequence
  Protein classification predicting sequence
LISFITSAPVFAMVVEGE

SEQ ID NO: 28300 - protein, 6 aa, Artificial sequence
  Protein classification predicting sequence
TNPSEA

SEQ ID NO: 28301 - protein, 7 aa, Artificial sequence
  Protein classification predicting sequence
ISRIERK

SEQ ID NO: 28302 - protein, 6 aa, Artificial sequence
  Protein classification predicting sequence
IKPDGV

SEQ ID NO: 28303 - protein, 7 aa, Artificial sequence
  Protein classification predicting sequence
EFMTSGP

SEQ ID NO: 28304 - protein, 7 aa, Artificial sequence
  Protein classification predicting sequence
IIKPDAV

SEQ ID NO: 28305 - protein, 6 aa, Artificial sequence
  Protein classification predicting sequence
PFFNGL

SEQ ID NO: 28306 - protein, 7 aa, Artificial sequence
  Protein classification predicting sequence
PFFKDLV

SEQ ID NO: 28307 - protein, 7 aa, Artificial sequence
  Protein classification predicting sequence
RGLVGEI

SEQ ID NO: 28308 - protein, 7 aa, Artificial sequence
  Protein classification predicting sequence
EKHYEEH

SEQ ID NO: 28309 - protein, 8 aa, Artificial sequence
  Protein classification predicting sequence
SGPVFAMV

SEQ ID NO: 28310 - protein, 9 aa, Artificial sequence
  Protein classification predicting sequence
IIAAKMVHL

SEQ ID NO: 28311 - protein, 8 aa, Artificial sequence
  Protein classification predicting sequence
GTLRADYA

SEQ ID NO: 28312 - protein, 12 aa, Artificial sequence
  Protein classification predicting sequence
GFYAEHEGKEFF

SEQ ID NO: 28313 - protein, 6 aa, Artificial sequence
  Protein classification predicting sequence
LRADYA

SEQ ID NO: 28314 - protein, 6 aa, Artificial sequence
  Protein classification predicting sequence
ERTFSI

SEQ ID NO: 28315 - protein, 7 aa, Artificial sequence
  Protein classification predicting sequence
TLSIIKP

SEQ ID NO: 28316 - protein, 23 aa, Artificial sequence
  Protein classification predicting sequence
AAPGTIRADFADSIDANAVHGSD

SEQ ID NO: 28317 - protein, 20 aa, Artificial sequence
  Protein classification predicting sequence
GTIRADFADSIDANAVHGSD

SEQ ID NO: 28318 - protein, 10 aa, Artificial sequence
  Protein classification predicting sequence
FMISGPVMIQ

SEQ ID NO: 28319 - protein, 8 aa, Artificial sequence
  Protein classification predicting sequence
VLESENAV

SEQ ID NO: 28320 - protein, 21 aa, Artificial sequence
  Protein classification predicting sequence
VAAKYKQLSRREAEGFYAVHR

SEQ ID NO: 28321 - protein, 9 aa, Artificial sequence
  Protein classification predicting sequence
VQVLEGENA

SEQ ID NO: 28322 - protein, 7 aa, Artificial sequence
  Protein classification predicting sequence
KSDIWSL

SEQ ID NO: 28323 - protein, 14 aa, Artificial sequence
  Protein classification predicting sequence
KSDIWALGCVLYEL

SEQ ID NO: 28324 - protein, 6 aa, Artificial sequence
  Protein classification predicting sequence
KPANVF

SEQ ID NO: 28325 - protein, 10 aa, Artificial sequence
  Protein classification predicting sequence
ILHRDLKTQN

SEQ ID NO: 28326 - protein, 9 aa, Artificial sequence
  Protein classification predicting sequence
GTPYYMSPE

SEQ ID NO: 28327 - protein, 14 aa, Artificial sequence
  Protein classification predicting sequence
IEKKIGRGQFSEVY

SEQ ID NO: 28328 - protein, 9 aa, Artificial sequence
  Protein classification predicting sequence
VALKKVQIF

SEQ ID NO: 28329 - protein, 11 aa, Artificial sequence
  Protein classification predicting sequence
KIEQCDYPPLP

SEQ ID NO: 28330 - protein, 21 aa, Artificial sequence
  Protein classification predicting sequence
SFIEDNELNIVLELADAGDLS

SEQ ID NO: 28331 - protein, 23 aa, Artificial sequence
  Protein classification predicting sequence
FKKQKRLIPERTVWKYFVQLCSA

SEQ ID NO: 28332 - protein, 54 aa, Artificial sequence
  Protein classification predicting sequence
TTAAHSLVGTPYYMSPERIHENGYNFKSDIWSLGCLLYEMAALQSPFYGDKMNL

SEQ ID NO: 28333 - protein, 8 aa, Artificial sequence
  Protein classification predicting sequence
YNFKSDIW

SEQ ID NO: 28334 - protein, 11 aa, Artificial sequence
  Protein classification predicting sequence
IIPARSGSKGL

SEQ ID NO: 28335 - protein, 7 aa, Artificial sequence
  Protein classification predicting sequence
PNGAIFI

SEQ ID NO: 28336 - protein, 14 aa, Artificial sequence
  Protein classification predicting sequence
LAGVPLIGWVLRAA

SEQ ID NO: 28337 - protein, 9 aa, Artificial sequence
  Protein classification predicting sequence
SVWVSTDHD

SEQ ID NO: 28338 - protein, 10 aa, Artificial sequence
  Protein classification predicting sequence
IQATSPCLHP

SEQ ID NO: 28339 - protein, 9 aa, Artificial sequence
  Protein classification predicting sequence
SVFSVVRRH

SEQ ID NO: 28340 - protein, 11 aa, Artificial sequence
  Protein classification predicting sequence
RPRRQDWDGEL

SEQ ID NO: 28341 - protein, 11 aa, Artificial sequence
  Protein classification predicting sequence
SVDIDVDIDWP

SEQ ID NO: 28342 - protein, 8 aa, Artificial sequence
  Protein classification predicting sequence
HKIYGPKG

SEQ ID NO: 28343 - protein, 7 aa, Artificial sequence
  Protein classification predicting sequence
YVRRRPR

SEQ ID NO: 28344 - protein, 22 aa, Artificial sequence
  Protein classification predicting sequence
EMNIDLLSISSHKIYGPKGIGA

SEQ ID NO: 28345 - protein, 11 aa, Artificial sequence
  Protein classification predicting sequence
HKIYGPKGIGA

SEQ ID NO: 28346 - protein, 8 aa, Artificial sequence
  Protein classification predicting sequence
LAHSSIRF

SEQ ID NO: 28347 - protein, 7 aa, Artificial sequence
  Protein classification predicting sequence
LSPLWEM

SEQ ID NO: 28348 - protein, 7 aa, Artificial sequence
  Protein classification predicting sequence
FTSGATE

SEQ ID NO: 28349 - protein, 7 aa, Artificial sequence
  Protein classification predicting sequence
DLNSIEW

SEQ ID NO: 28350 - protein, 11 aa, Artificial sequence
  Protein classification predicting sequence
GIIDLKELEAA

SEQ ID NO: 28351 - protein, 8 aa, Artificial sequence
  Protein classification predicting sequence
GRFTTEEE

SEQ ID NO: 28352 - protein, 16 aa, Artificial sequence
  Protein classification predicting sequence
SSGSACTSASLEPSYV

SEQ ID NO: 28353 - protein, 6 aa, Artificial sequence
  Protein classification predicting sequence
SPLWEM

SEQ ID NO: 28354 - protein, 8 aa, Artificial sequence
  Protein classification predicting sequence
YLDNNATT

SEQ ID NO: 28355 - protein, 8 aa, Artificial sequence
  Protein classification predicting sequence
PKGIGALY

SEQ ID NO: 28356 - protein, 7 aa, Artificial sequence
  Protein classification predicting sequence
VEHPAVL

SEQ ID NO: 28357 - protein, 17 aa, Artificial sequence
  Protein classification predicting sequence
ASSGSACTSGSLEPSHV

SEQ ID NO: 28358 - protein, 7 aa, Artificial sequence
  Protein classification predicting sequence
FTSGGTE

SEQ ID NO: 28359 - protein, 9 aa, Artificial sequence
  Protein classification predicting sequence
YLDNNATTR

SEQ ID NO: 28360 - protein, 6 aa, Artificial sequence
  Protein classification predicting sequence
ANNETG

SEQ ID NO: 28361 - protein, 6 aa, Artificial sequence
  Protein classification predicting sequence
DLAVSS

SEQ ID NO: 28362 - protein, 6 aa, Artificial sequence
  Protein classification predicting sequence
GPKGVG

SEQ ID NO: 28363 - protein, 8 aa, Artificial sequence
  Protein classification predicting sequence
FHTDAVQA

SEQ ID NO: 28364 - protein, 7 aa, Artificial sequence
  Protein classification predicting sequence
RLKGGDP

SEQ ID NO: 28365 - protein, 7 aa, Artificial sequence
  Protein classification predicting sequence
FGRGGEE

SEQ ID NO: 28366 - protein, 10 aa, Artificial sequence
  Protein classification predicting sequence
LRGLKYLHSA

SEQ ID NO: 28367 - protein, 8 aa, Artificial sequence
  Protein classification predicting sequence
KPGNLLVN

SEQ ID NO: 28368 - protein, 11 aa, Artificial sequence
  Protein classification predicting sequence
LLACGSFNPIT

SEQ ID NO: 28369 - protein, 9 aa, Artificial sequence
  Protein classification predicting sequence
NLQYYLYNW

SEQ ID NO: 28370 - protein, 10 aa, Artificial sequence
  Protein classification predicting sequence
KDIPVVHQLL

SEQ ID NO: 28371 - protein, 7 aa, Artificial sequence
  Protein classification predicting sequence
QDQPVKM

SEQ ID NO: 28372 - protein, 66 aa, Artificial sequence
  Protein classification predicting sequence
FQAVYTAGVVLPKPVGTCRYWHRSLNPRKLIEVKFSHLSRNMTMQRTMKLYRLPETPKTAGLRPME

SEQ ID NO: 28373 - protein, 20 aa, Artificial sequence
  Protein classification predicting sequence
MMEGNGNGHEHCSDCENEED

SEQ ID NO: 28374 - protein, 27 aa, Artificial sequence
  Protein classification predicting sequence
NRGGLSPANDTGAKKKKKKQKKKKEKG

SEQ ID NO: 28375 - protein, 10 aa, Artificial sequence
  Protein classification predicting sequence
GAKKKKKKQK

SEQ ID NO: 28376 - protein, 12 aa, Artificial sequence
  Protein classification predicting sequence
YQFWDTQPVPKL

SEQ ID NO: 28377 - protein, 37 aa, Artificial sequence
  Protein classification predicting sequence
ELYTLLNENYVEDDDNMFRFDYSPEFLLWALRPPGWL

SEQ ID NO: 28378 - protein, 8 aa, Artificial sequence
  Protein classification predicting sequence
QWHCGVRV

SEQ ID NO: 28379 - protein, 12 aa, Artificial sequence
  Protein classification predicting sequence
EVKFSHLSRNMT

SEQ ID NO: 28380 - protein, 7 aa, Artificial sequence
  Protein classification predicting sequence
YLKQFHL

SEQ ID NO: 28381 - protein, 12 aa, Artificial sequence
  Protein classification predicting sequence
TDFLSFYTLPST

SEQ ID NO: 28382 - protein, 11 aa, Artificial sequence
  Protein classification predicting sequence
TPLLDLMSDAL

SEQ ID NO: 28383 - protein, 6 aa, Artificial sequence
  Protein classification predicting sequence
EPDKDN

SEQ ID NO: 28384 - protein, 12 aa, Artificial sequence
  Protein classification predicting sequence
EPDKDNIRQEPY

SEQ ID NO: 28385 - protein, 7 aa, Artificial sequence
  Protein classification predicting sequence
TPLLDLM

SEQ ID NO: 28386 - protein, 8 aa, Artificial sequence
  Protein classification predicting sequence
HKKLRSKR

SEQ ID NO: 28387 - protein, 8 aa, Artificial sequence
  Protein classification predicting sequence
QAIYTAGV

SEQ ID NO: 28388 - protein, 7 aa, Artificial sequence
  Protein classification predicting sequence
FDVFNAL

SEQ ID NO: 28389 - protein, 9 aa, Artificial sequence
  Protein classification predicting sequence
LLNENYVED

SEQ ID NO: 28390 - protein, 8 aa, Artificial sequence
  Protein classification predicting sequence
YTAGVVLP

SEQ ID NO: 28391 - protein, 8 aa, Artificial sequence
  Protein classification predicting sequence
GFDVFNAL

SEQ ID NO: 28392 - protein, 6 aa, Artificial sequence
  Protein classification predicting sequence
EVEHWF

SEQ ID NO: 28393 - protein, 6 aa, Artificial sequence
  Protein classification predicting sequence
MFRFDY

SEQ ID NO: 28394 - protein, 10 aa, Artificial sequence
  Protein classification predicting sequence
KLVGFISAIP

SEQ ID NO: 28395 - protein, 11 aa, Artificial sequence
  Protein classification predicting sequence
TCRYWHRSLNP

SEQ ID NO: 28396 - protein, 12 aa, Artificial sequence
  Protein classification predicting sequence
RNMTMQRTMKLY

SEQ ID NO: 28397 - protein, 9 aa, Artificial sequence
  Protein classification predicting sequence
NALDLMENK

SEQ ID NO: 28398 - protein, 12 aa, Artificial sequence
  Protein classification predicting sequence
GDGNLQYYLYNW

SEQ ID NO: 28399 - protein, 15 aa, Artificial sequence
  Protein classification predicting sequence
GDGNLQYYLYNWRCP

SEQ ID NO: 28400 - protein, 7 aa, Artificial sequence
  Protein classification predicting sequence
EFLLWAL

SEQ ID NO: 28401 - protein, 6 aa, Artificial sequence
  Protein classification predicting sequence
YYLYNW

SEQ ID NO: 28402 - protein, 8 aa, Artificial sequence
  Protein classification predicting sequence
VASEFRYR

SEQ ID NO: 28403 - protein, 8 aa, Artificial sequence
  Protein classification predicting sequence
TKAFTCQL

SEQ ID NO: 28404 - protein, 9 aa, Artificial sequence
  Protein classification predicting sequence
GAFALAFLF

SEQ ID NO: 28405 - protein, 10 aa, Artificial sequence
  Protein classification predicting sequence
EIGVASTKAF

SEQ ID NO: 28406 - protein, 8 aa, Artificial sequence
  Protein classification predicting sequence
EAMHAMLK

SEQ ID NO: 28407 - protein, 9 aa, Artificial sequence
  Protein classification predicting sequence
GAGKARGTI

SEQ ID NO: 28408 - protein, 10 aa, Artificial sequence
  Protein classification predicting sequence
AMEGALKLKE

SEQ ID NO: 28409 - protein, 8 aa, Artificial sequence
  Protein classification predicting sequence
TMHTIVLP

SEQ ID NO: 28410 - protein, 6 aa, Artificial sequence
  Protein classification predicting sequence
LEAESI

SEQ ID NO: 28411 - protein, 8 aa, Artificial sequence
  Protein classification predicting sequence
LHLARKAF

SEQ ID NO: 28412 - protein, 12 aa, Artificial sequence
  Protein classification predicting sequence
WKFREMIEFRDR

SEQ ID NO: 28413 - protein, 6 aa, Artificial sequence
  Protein classification predicting sequence
DIWQYI

SEQ ID NO: 28414 - protein, 9 aa, Artificial sequence
  Protein classification predicting sequence
WDPKNQRPE

SEQ ID NO: 28415 - protein, 14 aa, Artificial sequence
  Protein classification predicting sequence
GESIRVFPLSNWTE

SEQ ID NO: 28416 - protein, 9 aa, Artificial sequence
  Protein classification predicting sequence
IHIIREVAA

SEQ ID NO: 28417 - protein, 11 aa, Artificial sequence
  Protein classification predicting sequence
KPPFPFLHVDT

SEQ ID NO: 28418 - protein, 9 aa, Artificial sequence
  Protein classification predicting sequence
EEKSRAKER

SEQ ID NO: 28419 - protein, 13 aa, Artificial sequence
  Protein classification predicting sequence
RFRTLGCYPLTGA

SEQ ID NO: 28420 - protein, 7 aa, Artificial sequence
  Protein classification predicting sequence
RLWPLSR

SEQ ID NO: 28421 - protein, 8 aa, Artificial sequence
  Protein classification predicting sequence
GKLVTFGI

SEQ ID NO: 28422 - protein, 9 aa, Artificial sequence
  Protein classification predicting sequence
PIGTVAHEW

SEQ ID NO: 28423 - protein, 8 aa, Artificial sequence
  Protein classification predicting sequence
PLNIVIKL

SEQ ID NO: 28424 - protein, 6 aa, Artificial sequence
  Protein classification predicting sequence
YAMKVL

SEQ ID NO: 28425 - protein, 8 aa, Artificial sequence
  Protein classification predicting sequence
LAFNPEYQ

SEQ ID NO: 28426 - protein, 15 aa, Artificial sequence
  Protein classification predicting sequence
NANCDLKICDFGLAR

SEQ ID NO: 28427 - protein, 7 aa, Artificial sequence
  Protein classification predicting sequence
HHWCIPF

SEQ ID NO: 28428 - protein, 10 aa, Artificial sequence
  Protein classification predicting sequence
HIKRRDIVLK

SEQ ID NO: 28429 - protein, 15 aa, Artificial sequence
  Protein classification predicting sequence
ELGEGAFGKVFLAEC

SEQ ID NO: 28430 - protein, 8 aa, Artificial sequence
  Protein classification predicting sequence
GVVLWEIF

SEQ ID NO: 28431 - protein, 20 aa, Artificial sequence
  Protein classification predicting sequence
GVVLWEIFTYGKQPWYQLSN

SEQ ID NO: 28432 - protein, 6 aa, Artificial sequence
  Protein classification predicting sequence
CITQGR

SEQ ID NO: 28433 - protein, 10 aa, Artificial sequence
  Protein classification predicting sequence
GCWQREPQQR

SEQ ID NO: 28434 - protein, 6 aa, Artificial sequence
  Protein classification predicting sequence
ENPQYF

SEQ ID NO: 28435 - protein, 8 aa, Artificial sequence
  Protein classification predicting sequence
IECITQGR

SEQ ID NO: 28436 - protein, 8 aa, Artificial sequence
  Protein classification predicting sequence
YICTKIHV

SEQ ID NO: 28437 - protein, 13 aa, Artificial sequence
  Protein classification predicting sequence
EYHGCLQLDNPTH

SEQ ID NO: 28438 - protein, 8 aa, Artificial sequence
  Protein classification predicting sequence
SKFGMKGP

SEQ ID NO: 28439 - protein, 14 aa, Artificial sequence
  Protein classification predicting sequence
FVHRDLATRNCLVG

SEQ ID NO: 28440 - protein, 12 aa, Artificial sequence
  Protein classification predicting sequence
EVIECITQGRVL

SEQ ID NO: 28441 - protein, 7 aa, Artificial sequence
  Protein classification predicting sequence
CPKEVYD

SEQ ID NO: 28442 - protein, 23 aa, Artificial sequence
  Protein classification predicting sequence
IVLKRELGEGAFGKVFLAECYNL

SEQ ID NO: 28443 - protein, 21 aa, Artificial sequence
  Protein classification predicting sequence
REAELLTNLQHEHIVKFYGVC

SEQ ID NO: 28444 - protein, 27 aa, Artificial sequence
  Protein classification predicting sequence
GDPLIMVFEYMKHGDLNKFLRAHGPDA

SEQ ID NO: 28445 - protein, 23 aa, Artificial sequence
  Protein classification predicting sequence
GMVYLASQHFVHRDLATRNCLVG

SEQ ID NO: 28446 - protein, 16 aa, Artificial sequence
  Protein classification predicting sequence
PDDGNLFPLLEGQDSG

SEQ ID NO: 28447 - protein, 14 aa, Artificial sequence
  Protein classification predicting sequence
TLNAVDMELYTGLQ

SEQ ID NO: 28448 - protein, 15 aa, Artificial sequence
  Protein classification predicting sequence
IQPRAFAKNPHLRYI

SEQ ID NO: 28449 - protein, 14 aa, Artificial sequence
  Protein classification predicting sequence
NRLTTLSWQLFQTL

SEQ ID NO: 28450 - protein, 9 aa, Artificial sequence
  Protein classification predicting sequence
FNCSCDIRW

SEQ ID NO: 28451 - protein, 19 aa, Artificial sequence
  Protein classification predicting sequence
QCDLPEISVSHVNLTVREG

SEQ ID NO: 28452 - protein, 31 aa, Artificial sequence
  Protein classification predicting sequence
SINTHQTNLNWTNVHAINLTLVNVTSEDNGF

SEQ ID NO: 28453 - protein, 16 aa, Artificial sequence
  Protein classification predicting sequence
LTCIAENVVGMSNASV

SEQ ID NO: 28454 - protein, 8 aa, Artificial sequence
  Protein classification predicting sequence
LTVYYPPR

SEQ ID NO: 28455 - protein, 45 aa, Artificial sequence
  Protein classification predicting sequence
YPPRVVSLEEPELRLEHCIEFVVRGNPPPTLHWLHNGQPLRESKI

SEQ ID NO: 28456 - protein, 98 aa, Artificial sequence
  Protein classification predicting sequence
KMLVAVKALKDPTLAARKDFQREAELLTNLQHEHIVKFYGVCGDGDPLIMVFEYMKHGDLNKFLRAHGPDAMILVDGQPRQAKGELGLSQMLHIASQI

SEQ ID NO: 28457 - protein, 38 aa, Artificial sequence
  Protein classification predicting sequence
IQPRAFAKNPHLRYINLSSNRLTTLSWQLFQTLSLREL

SEQ ID NO: 28458 - protein, 24 aa, Artificial sequence
  Protein classification predicting sequence
LEQNFFNCSCDIRWMQLWQEQGEA

SEQ ID NO: 28459 - protein, 14 aa, Artificial sequence
  Protein classification predicting sequence
RLEHCIEFVVRGNP

SEQ ID NO: 28460 - protein, 6 aa, Artificial sequence
  Protein classification predicting sequence
CGSPLY

SEQ ID NO: 28461 - protein, 6 aa, Artificial sequence
  Protein classification predicting sequence
NYHPLP

SEQ ID NO: 28462 - protein, 14 aa, Artificial sequence
  Protein classification predicting sequence
KYGAHNYHPLPVAL

SEQ ID NO: 28463 - protein, 7 aa, Artificial sequence
  Protein classification predicting sequence
DAWKVCL

SEQ ID NO: 28464 - protein, 12 aa, Artificial sequence
  Protein classification predicting sequence
VRGKGLLNAIVI

SEQ ID NO: 28465 - protein, 8 aa, Artificial sequence
  Protein classification predicting sequence
GLLAKPTH

SEQ ID NO: 28466 - protein, 10 aa, Artificial sequence
  Protein classification predicting sequence
KVLPMNTGVE

SEQ ID NO: 28467 - protein, 15 aa, Artificial sequence
  Protein classification predicting sequence
MVEQAQRLTLTSRAF

SEQ ID NO: 28468 - protein, 26 aa, Artificial sequence
  Protein classification predicting sequence
RNWLEEWWLNVAYLDVRIPSQLNVNF

SEQ ID NO: 28469 - protein, 21 aa, Artificial sequence
  Protein classification predicting sequence
VPMVHNGYGFFYHIRDDRFVV

SEQ ID NO: 28470 - protein, 20 aa, Artificial sequence
  Protein classification predicting sequence
LHPDTFIQLALQLAYYRLHG

SEQ ID NO: 28471 - protein, 11 aa, Artificial sequence
  Protein classification predicting sequence
PGCCYETAMTR

SEQ ID NO: 28472 - protein, 8 aa, Artificial sequence
  Protein classification predicting sequence
FYHGRTET

SEQ ID NO: 28473 - protein, 12 aa, Artificial sequence
  Protein classification predicting sequence
EERTFQYQDSLP

SEQ ID NO: 28474 - protein, 8 aa, Artificial sequence
  Protein classification predicting sequence
ETDAEKLV

SEQ ID NO: 28475 - protein, 8 aa, Artificial sequence
  Protein classification predicting sequence
YDHRLIDG

SEQ ID NO: 28476 - protein, 7 aa, Artificial sequence
  Protein classification predicting sequence
FTITNGG

SEQ ID NO: 28477 - protein, 6 aa, Artificial sequence
  Protein classification predicting sequence
AMLTTF

SEQ ID NO: 28478 - protein, 9 aa, Artificial sequence
  Protein classification predicting sequence
GFMSFFVKA

SEQ ID NO: 28479 - protein, 8 aa, Artificial sequence
  Protein classification predicting sequence
TPIINPPQ

SEQ ID NO: 28480 - protein, 8 aa, Artificial sequence
  Protein classification predicting sequence
VDIETDKV

SEQ ID NO: 28481 - protein, 9 aa, Artificial sequence
  Protein classification predicting sequence
LTTFNEVNM

SEQ ID NO: 28482 - protein, 8 aa, Artificial sequence
  Protein classification predicting sequence
NGGVFGSL

SEQ ID NO: 28483 - protein, 12 aa, Artificial sequence
  Protein classification predicting sequence
INPPQSAILGMH

SEQ ID NO: 28484 - protein, 21 aa, Artificial sequence
  Protein classification predicting sequence
EDEVVCEIETDKTSVQVPSPA

SEQ ID NO: 28485 - protein, 16 aa, Artificial sequence
  Protein classification predicting sequence
LLVPDGGKVEGGTPLF

SEQ ID NO: 28486 - protein, 6 aa, Artificial sequence
  Protein classification predicting sequence
KLGFMS

SEQ ID NO: 28487 - protein, 11 aa, Artificial sequence
  Protein classification predicting sequence
KLGFMSAFVKA

SEQ ID NO: 28488 - protein, 14 aa, Artificial sequence
  Protein classification predicting sequence
RPMMYVALTYDHRL

SEQ ID NO: 28489 - protein, 20 aa, Artificial sequence
  Protein classification predicting sequence
DGREAVTFLRKIKAAVEDPR

SEQ ID NO: 28490 - protein, 8 aa, Artificial sequence
  Protein classification predicting sequence
AMLTTFNE

SEQ ID NO: 28491 - protein, 21 aa, Artificial sequence
  Protein classification predicting sequence
TPAFAESVTEGDVRWEKAVGD

SEQ ID NO: 28492 - protein, 6 aa, Artificial sequence
  Protein classification predicting sequence
LTTFNE

SEQ ID NO: 28493 - protein, 5 aa, Artificial sequence
  Protein classification predicting sequence
RPMMY

SEQ ID NO: 28494 - protein, 7 aa, Artificial sequence
  Protein classification predicting sequence
PMMYLAL

SEQ ID NO: 28495 - protein, 9 aa, Artificial sequence
  Protein classification predicting sequence
DGREAVTFL

SEQ ID NO: 28496 - protein, 9 aa, Artificial sequence
  Protein classification predicting sequence
DIGEGIHEG

SEQ ID NO: 28497 - protein, 7 aa, Artificial sequence
  Protein classification predicting sequence
PEVAILG

SEQ ID NO: 28498 - protein, 8 aa, Artificial sequence
  Protein classification predicting sequence
VVEIPSPV

SEQ ID NO: 28499 - protein, 13 aa, Artificial sequence
  Protein classification predicting sequence
SKHTAPHVTLMDE

SEQ ID NO: 28500 - protein, 16 aa, Artificial sequence
  Protein classification predicting sequence
KLTFLPYVVKALVSAL

SEQ ID NO: 28501 - protein, 6 aa, Artificial sequence
  Protein classification predicting sequence
KHADRK

SEQ ID NO: 28502 - protein, 28 aa, Artificial sequence
  Protein classification predicting sequence
NIGSAGGQWFTPVINHPEVAILGIGRIA

SEQ ID NO: 28503 - protein, 12 aa, Artificial sequence
  Protein classification predicting sequence
EDDVLAEVQNDK

SEQ ID NO: 28504 - protein, 21 aa, Artificial sequence
  Protein classification predicting sequence
AIAKAMVNSKHTAPHVTLMDE

SEQ ID NO: 28505 - protein, 8 aa, Artificial sequence
  Protein classification predicting sequence
NIGIAADT

SEQ ID NO: 28506 - protein, 6 aa, Artificial sequence
  Protein classification predicting sequence
ISDEIN

SEQ ID NO: 28507 - protein, 7 aa, Artificial sequence
  Protein classification predicting sequence
SMEIPSP

SEQ ID NO: 28508 - protein, 7 aa, Artificial sequence
  Protein classification predicting sequence
FTISNLG

SEQ ID NO: 28509 - protein, 6 aa, Artificial sequence
  Protein classification predicting sequence
DKASME

SEQ ID NO: 28510 - protein, 7 aa, Artificial sequence
  Protein classification predicting sequence
SLSFDHR

SEQ ID NO: 28511 - protein, 7 aa, Artificial sequence
  Protein classification predicting sequence
NAPEVAI

SEQ ID NO: 28512 - protein, 35 aa, Artificial sequence
  Protein classification predicting sequence
KAGDTIEEDDVLAEVQNDKSVVEIPSPVSGTVEEV

SEQ ID NO: 28513 - protein, 20 aa, Artificial sequence
  Protein classification predicting sequence
EGTVAVVGDVIVKIDAPDAE

SEQ ID NO: 28514 - protein, 12 aa, Artificial sequence
  Protein classification predicting sequence
GSGKNGRITKED

SEQ ID NO: 28515 - protein, 15 aa, Artificial sequence
  Protein classification predicting sequence
EGDFPETTEKIPAMR

SEQ ID NO: 28516 - protein, 49 aa, Artificial sequence
  Protein classification predicting sequence
LWDHRKKFKEIAAEQGTKLTFLPYVVKALVSALKKYPALNTSFNEEAGE

SEQ ID NO: 28517 - protein, 15 aa, Artificial sequence
  Protein classification predicting sequence
VHKHYWNIGIAADTD

SEQ ID NO: 28518 - protein, 16 aa, Artificial sequence
  Protein classification predicting sequence
GLLVPVVKHADRKSIF

SEQ ID NO: 28519 - protein, 18 aa, Artificial sequence
  Protein classification predicting sequence
ISDEINELAVKARDGKLT

SEQ ID NO: 28520 - protein, 8 aa, Artificial sequence
  Protein classification predicting sequence
AKILVPEG

SEQ ID NO: 28521 - protein, 23 aa, Artificial sequence
  Protein classification predicting sequence
YCPCMGRFGNQADHFLGSLAFAK

SEQ ID NO: 28522 - protein, 9 aa, Artificial sequence
  Protein classification predicting sequence
GNPFGPFWD

SEQ ID NO: 28523 - protein, 6 aa, Artificial sequence
  Protein classification predicting sequence
HFIGNC

SEQ ID NO: 28524 - protein, 7 aa, Artificial sequence
  Protein classification predicting sequence
SLEDFME

SEQ ID NO: 28525 - protein, 10 aa, Artificial sequence
  Protein classification predicting sequence
EGFNLRRDVY

SEQ ID NO: 28526 - protein, 9 aa, Artificial sequence
  Protein classification predicting sequence
LVLPPWGRL

SEQ ID NO: 28527 - protein, 7 aa, Artificial sequence
  Protein classification predicting sequence
AYFAGEL

SEQ ID NO: 28528 - protein, 8 aa, Artificial sequence
  Protein classification predicting sequence
VPCHRVIG

SEQ ID NO: 28529 - protein, 5 aa, Artificial sequence
  Protein classification predicting sequence
PCHRV

SEQ ID NO: 28530 - protein, 7 aa, Artificial sequence
  Protein classification predicting sequence
TSPRAVG

SEQ ID NO: 28531 - protein, 7 aa, Artificial sequence
  Protein classification predicting sequence
PCHRVIG

SEQ ID NO: 28532 - protein, 8 aa, Artificial sequence
  Protein classification predicting sequence
AVFGALGW

SEQ ID NO: 28533 - protein, 10 aa, Artificial sequence
  Protein classification predicting sequence
LRRRRHHPHH

SEQ ID NO: 28534 - protein, 20 aa, Artificial sequence
  Protein classification predicting sequence
PKLNLVYIYGESLERTYFDN

SEQ ID NO: 28535 - protein, 18 aa, Artificial sequence
  Protein classification predicting sequence
LTPELGALKNEGLDFSHT

SEQ ID NO: 28536 - protein, 9 aa, Artificial sequence
  Protein classification predicting sequence
DGKPNQSFS

SEQ ID NO: 28537 - protein, 9 aa, Artificial sequence
  Protein classification predicting sequence
VSCSQENIA

SEQ ID NO: 28538 - protein, 11 aa, Artificial sequence
  Protein classification predicting sequence
GLGRSSLSGQS

SEQ ID NO: 28539 - protein, 8 aa, Artificial sequence
  Protein classification predicting sequence
KPDIIRLW

SEQ ID NO: 28540 - protein, 18 aa, Artificial sequence
  Protein classification predicting sequence
LALSTDWCVSQGQLGGQQ

SEQ ID NO: 28541 - protein, 14 aa, Artificial sequence
  Protein classification predicting sequence
PLPKKFDLVITAKA

SEQ ID NO: 28542 - protein, 17 aa, Artificial sequence
  Protein classification predicting sequence
RPIPVRVGNEEQTLVLG

SEQ ID NO: 28543 - protein, 32 aa, Artificial sequence
  Protein classification predicting sequence
ALFLASVLIYAWKAGRNTWWFAATLTVLGLFV

SEQ ID NO: 28544 - protein, 27 aa, Artificial sequence
  Protein classification predicting sequence
ASDYFTGDGINDAVLYTLTNSLTGAGV

SEQ ID NO: 28545 - protein, 30 aa, Artificial sequence
  Protein classification predicting sequence
GYSLLALLLALGSVDASPAFRQITELVKSQ

SEQ ID NO: 28546 - protein, 81 aa, Artificial sequence
  Protein classification predicting sequence
QLPGTDYTIAGMVASQCGIPLFAPFEGNASASVSSFFPQNICLGDILKNSGYQNYFVQGANLRFAGKDVFLKSHGFDHLYG

SEQ ID NO: 28547 - protein, 21 aa, Artificial sequence
  Protein classification predicting sequence
YRNDWGFYDDTVLDEAWKKFE

SEQ ID NO: 28548 - protein, 31 aa, Artificial sequence
  Protein classification predicting sequence
LSRSGQRFSLFTLTVDTHHPDGFISRTCNRK

SEQ ID NO: 28549 - protein, 43 aa, Artificial sequence
  Protein classification predicting sequence
FINKIKASPWFKDTVIVVSSDHLAMNNTAWKYLNKQDRNNLFF

SEQ ID NO: 28550 - protein, 51 aa, Artificial sequence
  Protein classification predicting sequence
KNMIAFSGSHFRLPLLLRVSDKRVEPLPESEYSAPLRFQLADFAPRDNFVW

SEQ ID NO: 28551 - protein, 63 aa, Artificial sequence
  Protein classification predicting sequence
RYKGNVDTLKIVDNDIRYKADSFIFNVAGAPEEVKQFSGISRPESWGRWSNAQLGDEVKIEYK

SEQ ID NO: 28552 - protein, 27 aa, Artificial sequence
  Protein classification predicting sequence
PVSTNEGNILGHSPRKLGIGMVEIKVV

SEQ ID NO: 28553 - protein, 12 aa, Artificial sequence
  Protein classification predicting sequence
IYGESLERTYFD

SEQ ID NO: 28554 - protein, 7 aa, Artificial sequence
  Protein classification predicting sequence
KESQFLR

SEQ ID NO: 28555 - protein, 6 aa, Artificial sequence
  Protein classification predicting sequence
GFYKQD

SEQ ID NO: 28556 - protein, 11 aa, Artificial sequence
  Protein classification predicting sequence
ENLLKAPTIVG

SEQ ID NO: 28557 - protein, 20 aa, Artificial sequence
  Protein classification predicting sequence
LSLIKYGEFLYDNLIIFSPS

SEQ ID NO: 28558 - protein, 12 aa, Artificial sequence
  Protein classification predicting sequence
EDFGGNINVETI

SEQ ID NO: 28559 - protein, 9 aa, Artificial sequence
  Protein classification predicting sequence
GQHTLIVAD

SEQ ID NO: 28560 - protein, 28 aa, Artificial sequence
  Protein classification predicting sequence
RYSQTGNYELAVALSRWVFKEEGVLRVG

SEQ ID NO: 28561 - protein, 8 aa, Artificial sequence
  Protein classification predicting sequence
TLVLLDNL

SEQ ID NO: 28562 - protein, 15 aa, Artificial sequence
  Protein classification predicting sequence
DIQLEFVRIDPFVRT

SEQ ID NO: 28563 - protein, 8 aa, Artificial sequence
  Protein classification predicting sequence
QFKVDYNR

SEQ ID NO: 28564 - protein, 8 aa, Artificial sequence
  Protein classification predicting sequence
TQVSVRPL

SEQ ID NO: 28565 - protein, 11 aa, Artificial sequence
  Protein classification predicting sequence
HTQYERFIPSA

SEQ ID NO: 28566 - protein, 17 aa, Artificial sequence
  Protein classification predicting sequence
IIIGVRKGGTRALLEML

SEQ ID NO: 28567 - protein, 8 aa, Artificial sequence
  Protein classification predicting sequence
VPVWNGLT

SEQ ID NO: 28568 - protein, 7 aa, Artificial sequence
  Protein classification predicting sequence
FQGRSFL

SEQ ID NO: 28569 - protein, 7 aa, Artificial sequence
  Protein classification predicting sequence
DLGAHPE

SEQ ID NO: 28570 - protein, 9 aa, Artificial sequence
  Protein classification predicting sequence
WHPTQMLAD

SEQ ID NO: 28571 - protein, 7 aa, Artificial sequence
  Protein classification predicting sequence
LAYVGDG

SEQ ID NO: 28572 - protein, 9 aa, Artificial sequence
  Protein classification predicting sequence
YTDVWVSMG

SEQ ID NO: 28573 - protein, 6 aa, Artificial sequence
  Protein classification predicting sequence
FMHCLP

SEQ ID NO: 28574 - protein, 7 aa, Artificial sequence
  Protein classification predicting sequence
HCLPSFH

SEQ ID NO: 28575 - protein, 7 aa, Artificial sequence
  Protein classification predicting sequence
EVTDEVF

SEQ ID NO: 28576 - protein, 7 aa, Artificial sequence
  Protein classification predicting sequence
SKNSVVF

SEQ ID NO: 28577 - protein, 9 aa, Artificial sequence
  Protein classification predicting sequence
GKTVAWIGD

SEQ ID NO: 28578 - protein, 12 aa, Artificial sequence
  Protein classification predicting sequence
KHFLKLLDFTPA

SEQ ID NO: 28579 - protein, 8 aa, Artificial sequence
  Protein classification predicting sequence
YDGIQYRG

SEQ ID NO: 28580 - protein, 15 aa, Artificial sequence
  Protein classification predicting sequence
GADFIYTDVWVSMGE

SEQ ID NO: 28581 - protein, 7 aa, Artificial sequence
  Protein classification predicting sequence
KSLGMIF

SEQ ID NO: 28582 - protein, 12 aa, Artificial sequence
  Protein classification predicting sequence
NGMSDYNHPTQE

SEQ ID NO: 28583 - protein, 8 aa, Artificial sequence
  Protein classification predicting sequence
AELSEEER

SEQ ID NO: 28584 - protein, 8 aa, Artificial sequence
  Protein classification predicting sequence
NLRNRNFL

SEQ ID NO: 28585 - protein, 7 aa, Artificial sequence
  Protein classification predicting sequence
DLKRAKY

SEQ ID NO: 28586 - protein, 9 aa, Artificial sequence
  Protein classification predicting sequence
STRTRCAFE

SEQ ID NO: 28587 - protein, 15 aa, Artificial sequence
  Protein classification predicting sequence
VTYLGPTGSQMGKKE

SEQ ID NO: 28588 - protein, 6 aa, Artificial sequence
  Protein classification predicting sequence
RGFSQR

SEQ ID NO: 28589 - protein, 12 aa, Artificial sequence
  Protein classification predicting sequence
YSGVPVWNGLTD

SEQ ID NO: 28590 - protein, 26 aa, Artificial sequence
  Protein classification predicting sequence
INFTYVGDGRNNVANALMQGAAIMGM

SEQ ID NO: 28591 - protein, 8 aa, Artificial sequence
  Protein classification predicting sequence
ILITDDID

SEQ ID NO: 28592 - protein, 10 aa, Artificial sequence
  Protein classification predicting sequence
FEKDSTRTRC

SEQ ID NO: 28593 - protein, 6 aa, Artificial sequence
  Protein classification predicting sequence
STRTRC

SEQ ID NO: 28594 - protein, 15 aa, Artificial sequence
  Protein classification predicting sequence
DHPTQVLADFLTAKE

SEQ ID NO: 28595 - protein, 16 aa, Artificial sequence
  Protein classification predicting sequence
FTYVGDGRNNVANALM

SEQ ID NO: 28596 - protein, 10 aa, Artificial sequence
  Protein classification predicting sequence
YTDVWVSMGE

SEQ ID NO: 28597 - protein, 15 aa, Artificial sequence
  Protein classification predicting sequence
NPNVIFEHCLPSFHN

SEQ ID NO: 28598 - protein, 7 aa, Artificial sequence
  Protein classification predicting sequence
EAENRMH

SEQ ID NO: 28599 - protein, 18 aa, Artificial sequence
  Protein classification predicting sequence
EAENRMHTIKAVMVATLG

SEQ ID NO: 28600 - protein, 9 aa, Artificial sequence
  Protein classification predicting sequence
EFEGLIDFA

SEQ ID NO: 28601 - protein, 21 aa, Artificial sequence
  Protein classification predicting sequence
EDTAKVLGRMFDGIEFRGFSQ

SEQ ID NO: 28602 - protein, 12 aa, Artificial sequence
  Protein classification predicting sequence
FSGVPVWNGLTD

SEQ ID NO: 28603 - protein, 8 aa, Artificial sequence
  Protein classification predicting sequence
GINLTYVG

SEQ ID NO: 28604 - protein, 20 aa, Artificial sequence
  Protein classification predicting sequence
AHSLMVAGAMLGVNVRICTP

SEQ ID NO: 28605 - protein, 6 aa, Artificial sequence
  Protein classification predicting sequence
IYTDVW

SEQ ID NO: 28606 - protein, 11 aa, Artificial sequence
  Protein classification predicting sequence
IYTDVWVSMGE

SEQ ID NO: 28607 - protein, 16 aa, Artificial sequence
  Protein classification predicting sequence
IYTDVWVSMGEESEFE

SEQ ID NO: 28608 - protein, 7 aa, Artificial sequence
  Protein classification predicting sequence
EMEVTDE

SEQ ID NO: 28609 - protein, 7 aa, Artificial sequence
  Protein classification predicting sequence
IFRSEHS

SEQ ID NO: 28610 - protein, 7 aa, Artificial sequence
  Protein classification predicting sequence
TIKENFG

SEQ ID NO: 28611 - protein, 14 aa, Artificial sequence
  Protein classification predicting sequence
YTDVWVSMGEEDKF

SEQ ID NO: 28612 - protein, 28 aa, Artificial sequence
  Protein classification predicting sequence
YTDVWVSMGEEDKFKERVELLQPYQVNM

SEQ ID NO: 28613 - protein, 6 aa, Artificial sequence
  Protein classification predicting sequence
PYQVNM

SEQ ID NO: 28614 - protein, 9 aa, Artificial sequence
  Protein classification predicting sequence
EMEVTDEVF

SEQ ID NO: 28615 - protein, 9 aa, Artificial sequence
  Protein classification predicting sequence
PHHYLEGKN

SEQ ID NO: 28616 - protein, 9 aa, Artificial sequence
  Protein classification predicting sequence
FEKTSTRTR

SEQ ID NO: 28617 - protein, 6 aa, Artificial sequence
  Protein classification predicting sequence
GMDVRI

SEQ ID NO: 28618 - protein, 15 aa, Artificial sequence
  Protein classification predicting sequence
FDQAENRMHTIKAVM

SEQ ID NO: 28619 - protein, 9 aa, Artificial sequence
  Protein classification predicting sequence
DIQLGKKES

SEQ ID NO: 28620 - protein, 7 aa, Artificial sequence
  Protein classification predicting sequence
GMDVRIC

SEQ ID NO: 28621 - protein, 8 aa, Artificial sequence
  Protein classification predicting sequence
LLKPYQVN

SEQ ID NO: 28622 - protein, 14 aa, Artificial sequence
  Protein classification predicting sequence
LLKPYQVNMDLVKK

SEQ ID NO: 28623 - protein, 8 aa, Artificial sequence
  Protein classification predicting sequence
HCLPAFHD

SEQ ID NO: 28624 - protein, 21 aa, Artificial sequence
  Protein classification predicting sequence
GLKEMEVTDEVFRSKHSKVFD

SEQ ID NO: 28625 - protein, 12 aa, Artificial sequence
  Protein classification predicting sequence
AENRMHTIKAVM

SEQ ID NO: 28626 - protein, 8 aa, Artificial sequence
  Protein classification predicting sequence
NLRNRSFL

SEQ ID NO: 28627 - protein, 6 aa, Artificial sequence
  Protein classification predicting sequence
FRGFSQ

SEQ ID NO: 28628 - protein, 5 aa, Artificial sequence
  Protein classification predicting sequence
RGFSQ

SEQ ID NO: 28629 - protein, 7 aa, Artificial sequence
  Protein classification predicting sequence
GTEQPRL

SEQ ID NO: 28630 - protein, 11 aa, Artificial sequence
  Protein classification predicting sequence
DTARVLGRMYD

SEQ ID NO: 28631 - protein, 10 aa, Artificial sequence
  Protein classification predicting sequence
ETKVGKQIAE

SEQ ID NO: 28632 - protein, 10 aa, Artificial sequence
  Protein classification predicting sequence
AENRMHTIKA

SEQ ID NO: 28633 - protein, 8 aa, Artificial sequence
  Protein classification predicting sequence
RDLKRAKY

SEQ ID NO: 28634 - protein, 11 aa, Artificial sequence
  Protein classification predicting sequence
STRTRCAFEVA

SEQ ID NO: 28635 - protein, 6 aa, Artificial sequence
  Protein classification predicting sequence
EHSDKP

SEQ ID NO: 28636 - protein, 8 aa, Artificial sequence
  Protein classification predicting sequence
KLGMDVRI

SEQ ID NO: 28637 - protein, 15 aa, Artificial sequence
  Protein classification predicting sequence
IAFEQAENRMHTIKA

SEQ ID NO: 28638 - protein, 8 aa, Artificial sequence
  Protein classification predicting sequence
HPTQILAD

SEQ ID NO: 28639 - protein, 7 aa, Artificial sequence
  Protein classification predicting sequence
GAAKMGM

SEQ ID NO: 28640 - protein, 6 aa, Artificial sequence
  Protein classification predicting sequence
WVSMGE

SEQ ID NO: 28641 - protein, 7 aa, Artificial sequence
  Protein classification predicting sequence
DEVFRSK

SEQ ID NO: 28642 - protein, 6 aa, Artificial sequence
  Protein classification predicting sequence
EFHPTQ

SEQ ID NO: 28643 - protein, 10 aa, Artificial sequence
  Protein classification predicting sequence
MFDGIEFRGF

SEQ ID NO: 28644 - protein, 7 aa, Artificial sequence
  Protein classification predicting sequence
TVKENFG

SEQ ID NO: 28645 - protein, 8 aa, Artificial sequence
  Protein classification predicting sequence
ENFGRLEG

SEQ ID NO: 28646 - protein, 11 aa, Artificial sequence
  Protein classification predicting sequence
MAATLGNLFIP

SEQ ID NO: 28647 - protein, 10 aa, Artificial sequence
  Protein classification predicting sequence
FEVAAYDQGA

SEQ ID NO: 28648 - protein, 24 aa, Artificial sequence
  Protein classification predicting sequence
GDARNNMGNSLLLIGAKLGMDVRI

SEQ ID NO: 28649 - protein, 9 aa, Artificial sequence
  Protein classification predicting sequence
EVTEEVFES

SEQ ID NO: 28650 - protein, 13 aa, Artificial sequence
  Protein classification predicting sequence
QAENRMHTIKAVM

SEQ ID NO: 28651 - protein, 14 aa, Artificial sequence
  Protein classification predicting sequence
YLLDLSRDLKRAKY

SEQ ID NO: 28652 - protein, 21 aa, Artificial sequence
  Protein classification predicting sequence
SQIGHKESMKDTARVLGRMYD

SEQ ID NO: 28653 - protein, 7 aa, Artificial sequence
  Protein classification predicting sequence
AVKGVDF

SEQ ID NO: 28654 - protein, 8 aa, Artificial sequence
  Protein classification predicting sequence
IDLGAHPE

SEQ ID NO: 28655 - protein, 10 aa, Artificial sequence
  Protein classification predicting sequence
NDIQLGKKES

SEQ ID NO: 28656 - protein, 11 aa, Artificial sequence
  Protein classification predicting sequence
SGVPVWNGLTD

SEQ ID NO: 28657 - protein, 7 aa, Artificial sequence
  Protein classification predicting sequence
KTSTRTR

SEQ ID NO: 28658 - protein, 8 aa, Artificial sequence
  Protein classification predicting sequence
KESTEDTA

SEQ ID NO: 28659 - protein, 7 aa, Artificial sequence
  Protein classification predicting sequence
VLGSMFD

SEQ ID NO: 28660 - protein, 6 aa, Artificial sequence
  Protein classification predicting sequence
WHPTQM

SEQ ID NO: 28661 - protein, 8 aa, Artificial sequence
  Protein classification predicting sequence
NSVFQGRS

SEQ ID NO: 28662 - protein, 7 aa, Artificial sequence
  Protein classification predicting sequence
LAEKDFT

SEQ ID NO: 28663 - protein, 7 aa, Artificial sequence
  Protein classification predicting sequence
HLKDLKK

SEQ ID NO: 28664 - protein, 10 aa, Artificial sequence
  Protein classification predicting sequence
GKNIALLFEK

SEQ ID NO: 28665 - protein, 31 aa, Artificial sequence
  Protein classification predicting sequence
IDLGAHPEFLGKNDIQLGKKESVEDTAKVLG

SEQ ID NO: 28666 - protein, 7 aa, Artificial sequence
  Protein classification predicting sequence
DTAKVLG

SEQ ID NO: 28667 - protein, 8 aa, Artificial sequence
  Protein classification predicting sequence
MFDGIEFR

SEQ ID NO: 28668 - protein, 8 aa, Artificial sequence
  Protein classification predicting sequence
ANSLLVTG

SEQ ID NO: 28669 - protein, 7 aa, Artificial sequence
  Protein classification predicting sequence
FRSKYAR

SEQ ID NO: 28670 - protein, 10 aa, Artificial sequence
  Protein classification predicting sequence
VFVGDATQVC

SEQ ID NO: 28671 - protein, 7 aa, Artificial sequence
  Protein classification predicting sequence
FMHCLPA

SEQ ID NO: 28672 - protein, 7 aa, Artificial sequence
  Protein classification predicting sequence
DEAENRL

SEQ ID NO: 28673 - protein, 7 aa, Artificial sequence
  Protein classification predicting sequence
VLGRMYD

SEQ ID NO: 28674 - protein, 6 aa, Artificial sequence
  Protein classification predicting sequence
NGLTNE

SEQ ID NO: 28675 - protein, 6 aa, Artificial sequence
  Protein classification predicting sequence
GDGRNN

SEQ ID NO: 28676 - protein, 11 aa, Artificial sequence
  Protein classification predicting sequence
EMEVTDEVFRS

SEQ ID NO: 28677 - protein, 7 aa, Artificial sequence
  Protein classification predicting sequence
FLKLLDF

SEQ ID NO: 28678 - protein, 16 aa, Artificial sequence
  Protein classification predicting sequence
EQPRLKGKNIALIFEK

SEQ ID NO: 28679 - protein, 8 aa, Artificial sequence
  Protein classification predicting sequence
DQGANVTY

SEQ ID NO: 28680 - protein, 6 aa, Artificial sequence
  Protein classification predicting sequence
VTYLGP

SEQ ID NO: 28681 - protein, 10 aa, Artificial sequence
  Protein classification predicting sequence
AGVPVWNGLT

SEQ ID NO: 28682 - protein, 6 aa, Artificial sequence
  Protein classification predicting sequence
LTMQEH

SEQ ID NO: 28683 - protein, 11 aa, Artificial sequence
  Protein classification predicting sequence
HTDVWVSMGEP

SEQ ID NO: 28684 - protein, 8 aa, Artificial sequence
  Protein classification predicting sequence
HNRNLLSL

SEQ ID NO: 28685 - protein, 8 aa, Artificial sequence
  Protein classification predicting sequence
NIALIFEK

SEQ ID NO: 28686 - protein, 6 aa, Artificial sequence
  Protein classification predicting sequence
NLRNRS

SEQ ID NO: 28687 - protein, 10 aa, Artificial sequence
  Protein classification predicting sequence
TDVWVSMGEP

SEQ ID NO: 28688 - protein, 9 aa, Artificial sequence
  Protein classification predicting sequence
STRTRAAFT

SEQ ID NO: 28689 - protein, 14 aa, Artificial sequence
  Protein classification predicting sequence
IFLHCLPAFHDTNT

SEQ ID NO: 28690 - protein, 22 aa, Artificial sequence
  Protein classification predicting sequence
VFQGRSFLAEKDFTRAELEYLI

SEQ ID NO: 28691 - protein, 10 aa, Artificial sequence
  Protein classification predicting sequence
SAHLKDLKKR

SEQ ID NO: 28692 - protein, 42 aa, Artificial sequence
  Protein classification predicting sequence
LEGLTLVYCGDGRNNVANSLLVTGAILGVNVHIFSPKELFPE

SEQ ID NO: 28693 - protein, 31 aa, Artificial sequence
  Protein classification predicting sequence
ILITEDADEAVKGADVLYTDVWVSMGEEDKF

SEQ ID NO: 28694 - protein, 18 aa, Artificial sequence
  Protein classification predicting sequence
ADVLYTDVWVSMGEEDKF

SEQ ID NO: 28695 - protein, 12 aa, Artificial sequence
  Protein classification predicting sequence
IFLHCLPAFHDT

SEQ ID NO: 28696 - protein, 15 aa, Artificial sequence
  Protein classification predicting sequence
TQVFQGRSFLAEKDF

SEQ ID NO: 28697 - protein, 51 aa, Artificial sequence
  Protein classification predicting sequence
AFTTAAIDLGAHPEYLGANDIQLGKKESTEDTAKVLGRMFDGIEFRGFSQR

SEQ ID NO: 28698 - protein, 8 aa, Artificial sequence
  Protein classification predicting sequence
HPTQMLAD

SEQ ID NO: 28699 - protein, 6 aa, Artificial sequence
  Protein classification predicting sequence
LADFLT

SEQ ID NO: 28700 - protein, 7 aa, Artificial sequence
  Protein classification predicting sequence
LGVNVRI

SEQ ID NO: 28701 - protein, 9 aa, Artificial sequence
  Protein classification predicting sequence
IFSPKELFP

SEQ ID NO: 28702 - protein, 10 aa, Artificial sequence
  Protein classification predicting sequence
LITEDADEAV

SEQ ID NO: 28703 - protein, 12 aa, Artificial sequence
  Protein classification predicting sequence
PYQVNMELIKKA

SEQ ID NO: 28704 - protein, 20 aa, Artificial sequence
  Protein classification predicting sequence
LIFLHCLPAFHDTNTVYGKD

SEQ ID NO: 28705 - protein, 17 aa, Artificial sequence
  Protein classification predicting sequence
EKFGVKEMEVTDEVFRS

SEQ ID NO: 28706 - protein, 13 aa, Artificial sequence
  Protein classification predicting sequence
FLAEKDFTRAELE

SEQ ID NO: 28707 - protein, 6 aa, Artificial sequence
  Protein classification predicting sequence
PKELFP

SEQ ID NO: 28708 - protein, 9 aa, Artificial sequence
  Protein classification predicting sequence
LLKPYQVNM

SEQ ID NO: 28709 - protein, 36 aa, Artificial sequence
  Protein classification predicting sequence
EMEVTDEVFRSKYARHFDQAENRMHTIKAVMAATLG

SEQ ID NO: 28710 - protein, 20 aa, Artificial sequence
  Protein classification predicting sequence
FDQAENRMHTIKAVMAATLG

SEQ ID NO: 28711 - protein, 7 aa, Artificial sequence
  Protein classification predicting sequence
YLEGKNI

SEQ ID NO: 28712 - protein, 8 aa, Artificial sequence
  Protein classification predicting sequence
KESIEDTA

SEQ ID NO: 28713 - protein, 6 aa, Artificial sequence
  Protein classification predicting sequence
GDARNN

SEQ ID NO: 28714 - protein, 14 aa, Artificial sequence
  Protein classification predicting sequence
PVINGLTDDHHPCQ

SEQ ID NO: 28715 - protein, 9 aa, Artificial sequence
  Protein classification predicting sequence
VIDGPQSVV

SEQ ID NO: 28716 - protein, 11 aa, Artificial sequence
  Protein classification predicting sequence
DEAENRLHAQK

SEQ ID NO: 28717 - protein, 7 aa, Artificial sequence
  Protein classification predicting sequence
NNVANSL

SEQ ID NO: 28718 - protein, 7 aa, Artificial sequence
  Protein classification predicting sequence
PVINALT

SEQ ID NO: 28719 - protein, 6 aa, Artificial sequence
  Protein classification predicting sequence
TEEVFE

SEQ ID NO: 28720 - protein, 10 aa, Artificial sequence
  Protein classification predicting sequence
HCLPAHRGEE

SEQ ID NO: 28721 - protein, 7 aa, Artificial sequence
  Protein classification predicting sequence
SMGQEEE

SEQ ID NO: 28722 - protein, 11 aa, Artificial sequence
  Protein classification predicting sequence
RSLVFPEAENR

SEQ ID NO: 28723 - protein, 20 aa, Artificial sequence
  Protein classification predicting sequence
GKEMQMGRGETVSDTAKVLS

SEQ ID NO: 28724 - protein, 7 aa, Artificial sequence
  Protein classification predicting sequence
DTAKVLS

SEQ ID NO: 28725 - protein, 37 aa, Artificial sequence
  Protein classification predicting sequence
NTFKGIKLAYVGDGNNVCHSLLLASAKVGMHMTVATP

SEQ ID NO: 28726 - protein, 9 aa, Artificial sequence
  Protein classification predicting sequence
IVKKALAIA

SEQ ID NO: 28727 - protein, 112 aa, Artificial sequence
  Protein classification predicting sequence
NKQEPLLQGKILGLIFDKHSTRTRVSFEAGMVQLGGHGMFLSGKEMQMGRGETVSDTAKVLSQYIDGIMIRTFSHADVEELAKESSIPVINGLTDDHHPCQALADLMTIYEE

SEQ ID NO: 28728 - protein, 6 aa, Artificial sequence
  Protein classification predicting sequence
LGMIFE

SEQ ID NO: 28729 - protein, 8 aa, Artificial sequence
  Protein classification predicting sequence
PVINALTD

SEQ ID NO: 28730 - protein, 11 aa, Artificial sequence
  Protein classification predicting sequence
GDGNNVCHSLL

SEQ ID NO: 28731 - protein, 6 aa, Artificial sequence
  Protein classification predicting sequence
DQAENR

SEQ ID NO: 28732 - protein, 6 aa, Artificial sequence
  Protein classification predicting sequence
AMIFEK

SEQ ID NO: 28733 - protein, 7 aa, Artificial sequence
  Protein classification predicting sequence
DTARVLS

SEQ ID NO: 28734 - protein, 6 aa, Artificial sequence
  Protein classification predicting sequence
IMIRTF

SEQ ID NO: 28735 - protein, 8 aa, Artificial sequence
  Protein classification predicting sequence
HPCQALAD

SEQ ID NO: 28736 - protein, 5 aa, Artificial sequence
  Protein classification predicting sequence
SMGQE

SEQ ID NO: 28737 - protein, 12 aa, Artificial sequence
  Protein classification predicting sequence
HCLPAHRGEEVT

SEQ ID NO: 28738 - protein, 8 aa, Artificial sequence
  Protein classification predicting sequence
NRLHAQKA

SEQ ID NO: 28739 - protein, 8 aa, Artificial sequence
  Protein classification predicting sequence
HEKVEELA

SEQ ID NO: 28740 - protein, 8 aa, Artificial sequence
  Protein classification predicting sequence
PVINGLTD

SEQ ID NO: 28741 - protein, 14 aa, Artificial sequence
  Protein classification predicting sequence
FLHCLPAHREEEVT

SEQ ID NO: 28742 - protein, 7 aa, Artificial sequence
  Protein classification predicting sequence
VWRTFGQ

SEQ ID NO: 28743 - protein, 7 aa, Artificial sequence
  Protein classification predicting sequence
FLHCLPA

SEQ ID NO: 28744 - protein, 6 aa, Artificial sequence
  Protein classification predicting sequence
EMQLGR

SEQ ID NO: 28745 - protein, 10 aa, Artificial sequence
  Protein classification predicting sequence
VLSRYVDAIM

SEQ ID NO: 28746 - protein, 6 aa, Artificial sequence
  Protein classification predicting sequence
EHRGPI

SEQ ID NO: 28747 - protein, 7 aa, Artificial sequence
  Protein classification predicting sequence
LAMIFEK

SEQ ID NO: 28748 - protein, 7 aa, Artificial sequence
  Protein classification predicting sequence
ETIADTA

SEQ ID NO: 28749 - protein, 8 aa, Artificial sequence
  Protein classification predicting sequence
TDVWTSMG

SEQ ID NO: 28750 - protein, 13 aa, Artificial sequence
  Protein classification predicting sequence
QSVVWDEAENRLH

SEQ ID NO: 28751 - protein, 10 aa, Artificial sequence
  Protein classification predicting sequence
ETGFALLGGH

SEQ ID NO: 28752 - protein, 6 aa, Artificial sequence
  Protein classification predicting sequence
FLHCLP

SEQ ID NO: 28753 - protein, 8 aa, Artificial sequence
  Protein classification predicting sequence
DEAENRLH

SEQ ID NO: 28754 - protein, 6 aa, Artificial sequence
  Protein classification predicting sequence
GKTVAW

SEQ ID NO: 28755 - protein, 7 aa, Artificial sequence
  Protein classification predicting sequence
LKNRNFL

SEQ ID NO: 28756 - protein, 9 aa, Artificial sequence
  Protein classification predicting sequence
KNIALIFEK

SEQ ID NO: 28757 - protein, 10 aa, Artificial sequence
  Protein classification predicting sequence
FEVAAHDQGA

SEQ ID NO: 28758 - protein, 7 aa, Artificial sequence
  Protein classification predicting sequence
VLGRMFD

SEQ ID NO: 28759 - protein, 14 aa, Artificial sequence
  Protein classification predicting sequence
NPNVKFMHCLPAFH

SEQ ID NO: 28760 - protein, 11 aa, Artificial sequence
  Protein classification predicting sequence
VKFMHCLPAFH

SEQ ID NO: 28761 - protein, 9 aa, Artificial sequence
  Protein classification predicting sequence
FMHCLPAFH

SEQ ID NO: 28762 - protein, 7 aa, Artificial sequence
  Protein classification predicting sequence
NRLHAQK

SEQ ID NO: 28763 - protein, 6 aa, Artificial sequence
  Protein classification predicting sequence
VLSRYV

SEQ ID NO: 28764 - protein, 9 aa, Artificial sequence
  Protein classification predicting sequence
LTDLHHPCQ

SEQ ID NO: 28765 - protein, 6 aa, Artificial sequence
  Protein classification predicting sequence
FDEAEN

SEQ ID NO: 28766 - protein, 8 aa, Artificial sequence
  Protein classification predicting sequence
SQLGRSEP

SEQ ID NO: 28767 - protein, 9 aa, Artificial sequence
  Protein classification predicting sequence
EVTDEVFES

SEQ ID NO: 28768 - protein, 16 aa, Artificial sequence
  Protein classification predicting sequence
VKFLHCLPAFHDDQTT

SEQ ID NO: 28769 - protein, 8 aa, Artificial sequence
  Protein classification predicting sequence
PHRLLEGK

SEQ ID NO: 28770 - protein, 10 aa, Artificial sequence
  Protein classification predicting sequence
KASTRTRVSF

SEQ ID NO: 28771 - protein, 24 aa, Artificial sequence
  Protein classification predicting sequence
KASTRTRVSFTVAMYQLGGQVIDL

SEQ ID NO: 28772 - protein, 10 aa, Artificial sequence
  Protein classification predicting sequence
AENRLHAQKA

SEQ ID NO: 28773 - protein, 11 aa, Artificial sequence
  Protein classification predicting sequence
YAGVPVFNGLT

SEQ ID NO: 28774 - protein, 9 aa, Artificial sequence
  Protein classification predicting sequence
GKQIAEQYP

SEQ ID NO: 28775 - protein, 7 aa, Artificial sequence
  Protein classification predicting sequence
VPVINGL

SEQ ID NO: 28776 - protein, 7 aa, Artificial sequence
  Protein classification predicting sequence
LGMIFEK

SEQ ID NO: 28777 - protein, 15 aa, Artificial sequence
  Protein classification predicting sequence
HHPCQALADLMTIYE

SEQ ID NO: 28778 - protein, 8 aa, Artificial sequence
  Protein classification predicting sequence
AAYDQGAN

SEQ ID NO: 28779 - protein, 5 aa, Artificial sequence
  Protein classification predicting sequence
DQGAN

SEQ ID NO: 28780 - protein, 11 aa, Artificial sequence
  Protein classification predicting sequence
GVPVFNGLTDE

SEQ ID NO: 28781 - protein, 7 aa, Artificial sequence
  Protein classification predicting sequence
FEEAENR

SEQ ID NO: 28782 - protein, 8 aa, Artificial sequence
  Protein classification predicting sequence
KESIKDTA

SEQ ID NO: 28783 - protein, 6 aa, Artificial sequence
  Protein classification predicting sequence
GDGNNV

SEQ ID NO: 28784 - protein, 9 aa, Artificial sequence
  Protein classification predicting sequence
AIVLHCLPA

SEQ ID NO: 28785 - protein, 9 aa, Artificial sequence
  Protein classification predicting sequence
VLSRYVDAI

SEQ ID NO: 28786 - protein, 11 aa, Artificial sequence
  Protein classification predicting sequence
RHFLRDDDLSP

SEQ ID NO: 28787 - protein, 13 aa, Artificial sequence
  Protein classification predicting sequence
GIAQLGGHAVVVD

SEQ ID NO: 28788 - protein, 12 aa, Artificial sequence
  Protein classification predicting sequence
AIVLHCLPAHRG

SEQ ID NO: 28789 - protein, 10 aa, Artificial sequence
  Protein classification predicting sequence
STQLGRDETL

SEQ ID NO: 28790 - protein, 7 aa, Artificial sequence
  Protein classification predicting sequence
WTSMGQE

SEQ ID NO: 28791 - protein, 8 aa, Artificial sequence
  Protein classification predicting sequence
SQIGHKES

SEQ ID NO: 28792 - protein, 10 aa, Artificial sequence
  Protein classification predicting sequence
GAKLGMDVRI

SEQ ID NO: 28793 - protein, 6 aa, Artificial sequence
  Protein classification predicting sequence
IEYRGF

SEQ ID NO: 28794 - protein, 9 aa, Artificial sequence
  Protein classification predicting sequence
EVTEEIFES

SEQ ID NO: 28795 - protein, 10 aa, Artificial sequence
  Protein classification predicting sequence
DRTLAMIFEK

SEQ ID NO: 28796 - protein, 6 aa, Artificial sequence
  Protein classification predicting sequence
EHRGSI

SEQ ID NO: 28797 - protein, 9 aa, Artificial sequence
  Protein classification predicting sequence
RGETIADTA

SEQ ID NO: 28798 - protein, 8 aa, Artificial sequence
  Protein classification predicting sequence
HPCQVLAD

SEQ ID NO: 28799 - protein, 10 aa, Artificial sequence
  Protein classification predicting sequence
LEGFVVNKGK

SEQ ID NO: 28800 - protein, 12 aa, Artificial sequence
  Protein classification predicting sequence
KDTARVLGRMYD

SEQ ID NO: 28801 - protein, 6 aa, Artificial sequence
  Protein classification predicting sequence
EQRINL

SEQ ID NO: 28802 - protein, 6 aa, Artificial sequence
  Protein classification predicting sequence
KPYQVN

SEQ ID NO: 28803 - protein, 14 aa, Artificial sequence
  Protein classification predicting sequence
DLAKYASVPVINGL

SEQ ID NO: 28804 - protein, 7 aa, Artificial sequence
  Protein classification predicting sequence
AAYDQGA

SEQ ID NO: 28805 - protein, 8 aa, Artificial sequence
  Protein classification predicting sequence
LGRMYDGI

SEQ ID NO: 28806 - protein, 9 aa, Artificial sequence
  Protein classification predicting sequence
LAKYAGVPV

SEQ ID NO: 28807 - protein, 9 aa, Artificial sequence
  Protein classification predicting sequence
MLEAAALTG

SEQ ID NO: 28808 - protein, 6 aa, Artificial sequence
  Protein classification predicting sequence
KITLTE

SEQ ID NO: 28809 - protein, 12 aa, Artificial sequence
  Protein classification predicting sequence
VKFLHCLPAFHD

SEQ ID NO: 28810 - protein, 10 aa, Artificial sequence
  Protein classification predicting sequence
FLHCLPAFHD

SEQ ID NO: 28811 - protein, 8 aa, Artificial sequence
  Protein classification predicting sequence
AKYAGTEQ

SEQ ID NO: 28812 - protein, 12 aa, Artificial sequence
  Protein classification predicting sequence
STRTRCAFEVAA

SEQ ID NO: 28813 - protein, 17 aa, Artificial sequence
  Protein classification predicting sequence
STRTRCAFEVAAHDQGA

SEQ ID NO: 28814 - protein, 8 aa, Artificial sequence
  Protein classification predicting sequence
MHCLPAFH

SEQ ID NO: 28815 - protein, 10 aa, Artificial sequence
  Protein classification predicting sequence
SVVFDEAENR

SEQ ID NO: 28816 - protein, 6 aa, Artificial sequence
  Protein classification predicting sequence
IGHKES

SEQ ID NO: 28817 - protein, 10 aa, Artificial sequence
  Protein classification predicting sequence
EFHPTQMLAD

SEQ ID NO: 28818 - protein, 5 aa, Artificial sequence
  Protein classification predicting sequence
RNNMG

SEQ ID NO: 28819 - protein, 6 aa, Artificial sequence
  Protein classification predicting sequence
MHCLPA

SEQ ID NO: 28820 - protein, 7 aa, Artificial sequence
  Protein classification predicting sequence
FDQAENR

SEQ ID NO: 28821 - protein, 7 aa, Artificial sequence
  Protein classification predicting sequence
LGLIFDK

SEQ ID NO: 28822 - protein, 9 aa, Artificial sequence
  Protein classification predicting sequence
RGEPIKDTA

SEQ ID NO: 28823 - protein, 7 aa, Artificial sequence
  Protein classification predicting sequence
TDEVFES

SEQ ID NO: 28824 - protein, 9 aa, Artificial sequence
  Protein classification predicting sequence
FEKASTRTR

SEQ ID NO: 28825 - protein, 17 aa, Artificial sequence
  Protein classification predicting sequence
HCLPAHRGEEVTDDVID

SEQ ID NO: 28826 - protein, 9 aa, Artificial sequence
  Protein classification predicting sequence
VPVINGLSD

SEQ ID NO: 28827 - protein, 7 aa, Artificial sequence
  Protein classification predicting sequence
KIGKPHR

SEQ ID NO: 28828 - protein, 28 aa, Artificial sequence
  Protein classification predicting sequence
LYLNAQDLQLRRGETIADTARVLSRYVD

SEQ ID NO: 28829 - protein, 24 aa, Artificial sequence
  Protein classification predicting sequence
KVIKWAEQNAAESGGSFELLHDPV

SEQ ID NO: 28830 - protein, 29 aa, Artificial sequence
  Protein classification predicting sequence
AVKDADVIYTDVWASMGQEAEAEERRKIF

SEQ ID NO: 28831 - protein, 10 aa, Artificial sequence
  Protein classification predicting sequence
FMHCLPAHRG

SEQ ID NO: 28832 - protein, 25 aa, Artificial sequence
  Protein classification predicting sequence
FMHCLPAHRGEEVTDDVIDSPNSVV

SEQ ID NO: 28833 - protein, 7 aa, Artificial sequence
  Protein classification predicting sequence
WVGDANN

SEQ ID NO: 28834 - protein, 20 aa, Artificial sequence
  Protein classification predicting sequence
GAHLVTTDVWTSMGYEAENE

SEQ ID NO: 28835 - protein, 13 aa, Artificial sequence
  Protein classification predicting sequence
FMHCLPAHRGEEV

SEQ ID NO: 28836 - protein, 20 aa, Artificial sequence
  Protein classification predicting sequence
QSVVWDEAENRLHVQKALME

SEQ ID NO: 28837 - protein, 12 aa, Artificial sequence
  Protein classification predicting sequence
QLKGRDLLTLKN

SEQ ID NO: 28838 - protein, 13 aa, Artificial sequence
  Protein classification predicting sequence
KGEYLPLLQGKSL

SEQ ID NO: 28839 - protein, 15 aa, Artificial sequence
  Protein classification predicting sequence
LHSIMMSAAKFGMHL

SEQ ID NO: 28840 - protein, 6 aa, Artificial sequence
  Protein classification predicting sequence
TMKTAK

SEQ ID NO: 28841 - protein, 14 aa, Artificial sequence
  Protein classification predicting sequence
MIFDKPSTRTRVSF

SEQ ID NO: 28842 - protein, 10 aa, Artificial sequence
  Protein classification predicting sequence
KPSTRTRVSF

SEQ ID NO: 28843 - protein, 7 aa, Artificial sequence
  Protein classification predicting sequence
TDTWISM

SEQ ID NO: 28844 - protein, 8 aa, Artificial sequence
  Protein classification predicting sequence
GKTLAMIF

SEQ ID NO: 28845 - protein, 13 aa, Artificial sequence
  Protein classification predicting sequence
LLQLAAKLKADKK

SEQ ID NO: 28846 - protein, 19 aa, Artificial sequence
  Protein classification predicting sequence
DGIQYRGYGQEIVETLAEY

SEQ ID NO: 28847 - protein, 7 aa, Artificial sequence
  Protein classification predicting sequence
FDEAENR

SEQ ID NO: 28848 - protein, 16 aa, Artificial sequence
  Protein classification predicting sequence
AENRMHTIKAVMVATL

SEQ ID NO: 28849 - protein, 8 aa, Artificial sequence
  Protein classification predicting sequence
TDTWISMG

SEQ ID NO: 28850 - protein, 8 aa, Artificial sequence
  Protein classification predicting sequence
KTAKVAAS

SEQ ID NO: 28851 - protein, 7 aa, Artificial sequence
  Protein classification predicting sequence
KANPAEY

SEQ ID NO: 28852 - protein, 8 aa, Artificial sequence
  Protein classification predicting sequence
WADAIVAR

SEQ ID NO: 28853 - protein, 7 aa, Artificial sequence
  Protein classification predicting sequence
QAENRMH

SEQ ID NO: 28854 - protein, 28 aa, Artificial sequence
  Protein classification predicting sequence
KDTARVLGGMYDGIEYRGFSQRTVETLA

SEQ ID NO: 28855 - protein, 32 aa, Artificial sequence
  Protein classification predicting sequence
YSGVPVWNGLTDEDHPTQVLADFLTAKEVLKK

SEQ ID NO: 28856 - protein, 19 aa, Artificial sequence
  Protein classification predicting sequence
KTGNPNVIFEHCLPSFHNA

SEQ ID NO: 28857 - protein, 7 aa, Artificial sequence
  Protein classification predicting sequence
TKIGQQI

SEQ ID NO: 28858 - protein, 6 aa, Artificial sequence
  Protein classification predicting sequence
EMEVTD

SEQ ID NO: 28859 - protein, 7 aa, Artificial sequence
  Protein classification predicting sequence
AYLGDAR

SEQ ID NO: 28860 - protein, 10 aa, Artificial sequence
  Protein classification predicting sequence
GDARYNMGNS

SEQ ID NO: 28861 - protein, 12 aa, Artificial sequence
  Protein classification predicting sequence
HPTQMLADVLTM

SEQ ID NO: 28862 - protein, 6 aa, Artificial sequence
  Protein classification predicting sequence
MFDGIE

SEQ ID NO: 28863 - protein, 7 aa, Artificial sequence
  Protein classification predicting sequence
EAENRLH

SEQ ID NO: 28864 - protein, 7 aa, Artificial sequence
  Protein classification predicting sequence
LTLLDFS

SEQ ID NO: 28865 - protein, 7 aa, Artificial sequence
  Protein classification predicting sequence
IALIFEK

SEQ ID NO: 28866 - protein, 7 aa, Artificial sequence
  Protein classification predicting sequence
DFMTVKE

SEQ ID NO: 28867 - protein, 6 aa, Artificial sequence
  Protein classification predicting sequence
NGLTDE

SEQ ID NO: 28868 - protein, 5 aa, Artificial sequence
  Protein classification predicting sequence
YTDVW

SEQ ID NO: 28869 - protein, 11 aa, Artificial sequence
  Protein classification predicting sequence
YTDVWASMGQE

SEQ ID NO: 28870 - protein, 8 aa, Artificial sequence
  Protein classification predicting sequence
HPCQILAD

SEQ ID NO: 28871 - protein, 6 aa, Artificial sequence
  Protein classification predicting sequence
LHCLPA

SEQ ID NO: 28872 - protein, 9 aa, Artificial sequence
  Protein classification predicting sequence
AMYQLGGQV

SEQ ID NO: 28873 - protein, 8 aa, Artificial sequence
  Protein classification predicting sequence
FGKLEGLT

SEQ ID NO: 28874 - protein, 9 aa, Artificial sequence
  Protein classification predicting sequence
LAEYSGVPV

SEQ ID NO: 28875 - protein, 7 aa, Artificial sequence
  Protein classification predicting sequence
SMGEEDK

SEQ ID NO: 28876 - protein, 7 aa, Artificial sequence
  Protein classification predicting sequence
HTIKAVM

SEQ ID NO: 28877 - protein, 6 aa, Artificial sequence
  Protein classification predicting sequence
IEFRGF

SEQ ID NO: 28878 - protein, 11 aa, Artificial sequence
  Protein classification predicting sequence
NGLTDEYHPTQ

SEQ ID NO: 28879 - protein, 8 aa, Artificial sequence
  Protein classification predicting sequence
DIQLGVNE

SEQ ID NO: 28880 - protein, 8 aa, Artificial sequence
  Protein classification predicting sequence
EVDDEVFY

SEQ ID NO: 28881 - protein, 7 aa, Artificial sequence
  Protein classification predicting sequence
GNPQVKF

SEQ ID NO: 28882 - protein, 11 aa, Artificial sequence
  Protein classification predicting sequence
HCLPAFHDDQT

SEQ ID NO: 28883 - protein, 8 aa, Artificial sequence
  Protein classification predicting sequence
GPSGSQIG

SEQ ID NO: 28884 - protein, 13 aa, Artificial sequence
  Protein classification predicting sequence
DFLYTDVWVSMGE

SEQ ID NO: 28885 - protein, 12 aa, Artificial sequence
  Protein classification predicting sequence
LKGKSIALVFFN

SEQ ID NO: 28886 - protein, 8 aa, Artificial sequence
  Protein classification predicting sequence
AWIGDANN

SEQ ID NO: 28887 - protein, 10 aa, Artificial sequence
  Protein classification predicting sequence
GKNIALIFEK

SEQ ID NO: 28888 - protein, 9 aa, Artificial sequence
  Protein classification predicting sequence
GSQIGHKES

SEQ ID NO: 28889 - protein, 8 aa, Artificial sequence
  Protein classification predicting sequence
DFLYTDVW

SEQ ID NO: 28890 - protein, 14 aa, Artificial sequence
  Protein classification predicting sequence
TDVWVSMGEPKEVW

SEQ ID NO: 28891 - protein, 28 aa, Artificial sequence
  Protein classification predicting sequence
VAIKRINLEKCQTSMDELLKEIQAMSQC

SEQ ID NO: 28892 - protein, 35 aa, Artificial sequence
  Protein classification predicting sequence
KKVRRVPGSSGRLHKTEDGGWEWSDDEFDEESEEG

SEQ ID NO: 28893 - protein, 12 aa, Artificial sequence
  Protein classification predicting sequence
AAISQLRSPRVK

SEQ ID NO: 28894 - protein, 22 aa, Artificial sequence
  Protein classification predicting sequence
DDYELQEVIGSGATAVVQAAYC

SEQ ID NO: 28895 - protein, 8 aa, Artificial sequence
  Protein classification predicting sequence
FEHTIHVG

SEQ ID NO: 28896 - protein, 9 aa, Artificial sequence
  Protein classification predicting sequence
KLRTIVSIG

SEQ ID NO: 28897 - protein, 11 aa, Artificial sequence
  Protein classification predicting sequence
NIVNYLDSYLV

SEQ ID NO: 28898 - protein, 8 aa, Artificial sequence
  Protein classification predicting sequence
LQALEFLH

SEQ ID NO: 28899 - protein, 7 aa, Artificial sequence
  Protein classification predicting sequence
VIHRDIK

SEQ ID NO: 28900 - protein, 29 aa, Artificial sequence
  Protein classification predicting sequence
VIHRDIKSDNILLGMDGSVKLTDFGFCAQ

SEQ ID NO: 28901 - protein, 7 aa, Artificial sequence
  Protein classification predicting sequence
YLIATNG

SEQ ID NO: 28902 - protein, 20 aa, Artificial sequence
  Protein classification predicting sequence
PSDFEHTIHVGFDAVTGEFT

SEQ ID NO: 28903 - protein, 37 aa, Artificial sequence
  Protein classification predicting sequence
PSDFEHTIHVGFDAVTGEFTGMPEQWARLLQTSNITK

SEQ ID NO: 28904 - protein, 13 aa, Artificial sequence
  Protein classification predicting sequence
EQKKNPQAVLDVL

SEQ ID NO: 28905 - protein, 14 aa, Artificial sequence
  Protein classification predicting sequence
PPPVIAPRPEHTKS

SEQ ID NO: 28906 - protein, 13 aa, Artificial sequence
  Protein classification predicting sequence
QIAAVCRECLQAL

SEQ ID NO: 28907 - protein, 30 aa, Artificial sequence
  Protein classification predicting sequence
EGEPPYLNENPLRALYLIATNGTPELQNPE

SEQ ID NO: 28908 - protein, 9 aa, Artificial sequence
  Protein classification predicting sequence
FRDFLNRCL

SEQ ID NO: 28909 - protein, 15 aa, Artificial sequence
  Protein classification predicting sequence
MDVEKRGSAKELLQH

SEQ ID NO: 28910 - protein, 7 aa, Artificial sequence
  Protein classification predicting sequence
GDKTNKK

SEQ ID NO: 28911 - protein, 22 aa, Artificial sequence
  Protein classification predicting sequence
DEEILEKLRSIVSVGDPKKKYT

SEQ ID NO: 28912 - protein, 15 aa, Artificial sequence
  Protein classification predicting sequence
FEKIGQGASGTVYTA

SEQ ID NO: 28913 - protein, 10 aa, Artificial sequence
  Protein classification predicting sequence
AKPLSSLTPL

SEQ ID NO: 28914 - protein, 23 aa, Artificial sequence
  Protein classification predicting sequence
APPVIAPRPDHTKSIYTRSVIDP

SEQ ID NO: 28915 - protein, 8 aa, Artificial sequence
  Protein classification predicting sequence
KQKKKPKM

SEQ ID NO: 28916 - protein, 11 aa, Artificial sequence
  Protein classification predicting sequence
EKIGQGASGTV

SEQ ID NO: 28917 - protein, 8 aa, Artificial sequence
  Protein classification predicting sequence
GQEVAIKQ

SEQ ID NO: 28918 - protein, 14 aa, Artificial sequence
  Protein classification predicting sequence
QPKKELIINEILVM

SEQ ID NO: 28919 - protein, 22 aa, Artificial sequence
  Protein classification predicting sequence
VVMEYLAGGSLTDVVTETCMDE

SEQ ID NO: 28920 - protein, 9 aa, Artificial sequence
  Protein classification predicting sequence
IHRDIKSDN

SEQ ID NO: 28921 - protein, 34 aa, Artificial sequence
  Protein classification predicting sequence
PEQWARLLQTSNITKLEQKKNPQAVLDVLKFYDS

SEQ ID NO: 28922 - protein, 26 aa, Artificial sequence
  Protein classification predicting sequence
RGSAKELLQHPFLKLAKPLSSLTPLI

SEQ ID NO: 28923 - protein, 9 aa, Artificial sequence
  Protein classification predicting sequence
PPSAENANS

SEQ ID NO: 28924 - protein, 88 aa, Artificial sequence
  Protein classification predicting sequence
LDNEEKPPAPPLRMNSNNRDSSALNHSSKPLPMAPEEKNKKARLRSIFPGGGDKTNKKKEKERPEISLPSDFEHTIHVGFDAVTGEFT

SEQ ID NO: 28925 - protein, 26 aa, Artificial sequence
  Protein classification predicting sequence
TKTASEPPLAPPVSEEEDEEEEEEED

SEQ ID NO: 28926 - protein, 30 aa, Artificial sequence
  Protein classification predicting sequence
NEPPPVIAPRPEHTKSIYTRSVVESIASPA

SEQ ID NO: 28927 - protein, 22 aa, Artificial sequence
  Protein classification predicting sequence
MDLRKQQRRELLFNEVVIMRDY

SEQ ID NO: 28928 - protein, 14 aa, Artificial sequence
  Protein classification predicting sequence
DGRVKLSDFGFCAQ

SEQ ID NO: 28929 - protein, 7 aa, Artificial sequence
  Protein classification predicting sequence
DFGFCAQ

SEQ ID NO: 28930 - protein, 13 aa, Artificial sequence
  Protein classification predicting sequence
SYLVGDELWVVME

SEQ ID NO: 28931 - protein, 7 aa, Artificial sequence
  Protein classification predicting sequence
HPFLKLA

SEQ ID NO: 28932 - protein, 13 aa, Artificial sequence
  Protein classification predicting sequence
PSNFEHRVHTGFD

SEQ ID NO: 28933 - protein, 9 aa, Artificial sequence
  Protein classification predicting sequence
HEQFRAALQ

SEQ ID NO: 28934 - protein, 8 aa, Artificial sequence
  Protein classification predicting sequence
KIGEGSTG

SEQ ID NO: 28935 - protein, 12 aa, Artificial sequence
  Protein classification predicting sequence
LEGGALTDIVTH

SEQ ID NO: 28936 - protein, 8 aa, Artificial sequence
  Protein classification predicting sequence
EEQIATVC

SEQ ID NO: 28937 - protein, 15 aa, Artificial sequence
  Protein classification predicting sequence
QGVIHRDIKSDSILL

SEQ ID NO: 28938 - protein, 12 aa, Artificial sequence
  Protein classification predicting sequence
GTPYWMSPEVIS

SEQ ID NO: 28939 - protein, 7 aa, Artificial sequence
  Protein classification predicting sequence
ARLLDPH

SEQ ID NO: 28940 - protein, 7 aa, Artificial sequence
  Protein classification predicting sequence
PTIGIGA

SEQ ID NO: 28941 - protein, 8 aa, Artificial sequence
  Protein classification predicting sequence
GEKIAMLT

SEQ ID NO: 28942 - protein, 9 aa, Artificial sequence
  Protein classification predicting sequence
QGHDSTLPV

SEQ ID NO: 28943 - protein, 7 aa, Artificial sequence
  Protein classification predicting sequence
HLGLTPQ

SEQ ID NO: 28944 - protein, 7 aa, Artificial sequence
  Protein classification predicting sequence
PTVGIGA

SEQ ID NO: 28945 - protein, 7 aa, Artificial sequence
  Protein classification predicting sequence
PKFVKRY

SEQ ID NO: 28946 - protein, 10 aa, Artificial sequence
  Protein classification predicting sequence
GVDLILVGDS

SEQ ID NO: 28947 - protein, 7 aa, Artificial sequence
  Protein classification predicting sequence
TTLPITL

SEQ ID NO: 28948 - protein, 7 aa, Artificial sequence
  Protein classification predicting sequence
GIPVMGH

SEQ ID NO: 28949 - protein, 7 aa, Artificial sequence
  Protein classification predicting sequence
GLTPQSV

SEQ ID NO: 28950 - protein, 8 aa, Artificial sequence
  Protein classification predicting sequence
AIALEQAG

SEQ ID NO: 28951 - protein, 20 aa, Artificial sequence
  Protein classification predicting sequence
CEEAGAIALVLECVPMQLAE

SEQ ID NO: 28952 - protein, 41 aa, Artificial sequence
  Protein classification predicting sequence
QLTIPTIGIGAGQKVDGQVLVYHDLISYGVNRVPKFVKQYT

SEQ ID NO: 28953 - protein, 13 aa, Artificial sequence
  Protein classification predicting sequence
VQEEIVRGISQYV

SEQ ID NO: 28954 - protein, 29 aa, Artificial sequence
  Protein classification predicting sequence
TMVNARRIVQESGAHALKVEGAGEVISTI

SEQ ID NO: 28955 - protein, 22 aa, Artificial sequence
  Protein classification predicting sequence
EVKTRQFPEEKHSFTMKEEECL

SEQ ID NO: 28956 - protein, 8 aa, Artificial sequence
  Protein classification predicting sequence
TFIVTDMP

SEQ ID NO: 28957 - protein, 7 aa, Artificial sequence
  Protein classification predicting sequence
LVLECVP

SEQ ID NO: 28958 - protein, 6 aa, Artificial sequence
  Protein classification predicting sequence
MLTAYD

SEQ ID NO: 28959 - protein, 13 aa, Artificial sequence
  Protein classification predicting sequence
GLTPQSVGVLGGY

SEQ ID NO: 28960 - protein, 9 aa, Artificial sequence
  Protein classification predicting sequence
DMIHHTKAV

SEQ ID NO: 28961 - protein, 7 aa, Artificial sequence
  Protein classification predicting sequence
IVQESGA

SEQ ID NO: 28962 - protein, 21 aa, Artificial sequence
  Protein classification predicting sequence
HLGLTPQSVGVLGGYKVQGKD

SEQ ID NO: 28963 - protein, 8 aa, Artificial sequence
  Protein classification predicting sequence
SAKKLIED

SEQ ID NO: 28964 - protein, 6 aa, Artificial sequence
  Protein classification predicting sequence
DGQILV

SEQ ID NO: 28965 - protein, 8 aa, Artificial sequence
  Protein classification predicting sequence
HGQAVMRG

SEQ ID NO: 28966 - protein, 9 aa, Artificial sequence
  Protein classification predicting sequence
DFTPRFVKR

SEQ ID NO: 28967 - protein, 6 aa, Artificial sequence
  Protein classification predicting sequence
GDSLGM

SEQ ID NO: 28968 - protein, 11 aa, Artificial sequence
  Protein classification predicting sequence
GDSLGMTIQGH

SEQ ID NO: 28969 - protein, 8 aa, Artificial sequence
  Protein classification predicting sequence
AVRRGAPN

SEQ ID NO: 28970 - protein, 6 aa, Artificial sequence
  Protein classification predicting sequence
KFVKNF

SEQ ID NO: 28971 - protein, 6 aa, Artificial sequence
  Protein classification predicting sequence
DIAYHT

SEQ ID NO: 28972 - protein, 7 aa, Artificial sequence
  Protein classification predicting sequence
DLPFGTY

SEQ ID NO: 28973 - protein, 7 aa, Artificial sequence
  Protein classification predicting sequence
ERAVPVC

SEQ ID NO: 28974 - protein, 9 aa, Artificial sequence
  Protein classification predicting sequence
DGQVLVYHD

SEQ ID NO: 28975 - protein, 6 aa, Artificial sequence
  Protein classification predicting sequence
ILVGDS

SEQ ID NO: 28976 - protein, 10 aa, Artificial sequence
  Protein classification predicting sequence
ILVGDSASNV

SEQ ID NO: 28977 - protein, 6 aa, Artificial sequence
  Protein classification predicting sequence
YDASFA

SEQ ID NO: 28978 - protein, 7 aa, Artificial sequence
  Protein classification predicting sequence
LVGDSLG

SEQ ID NO: 28979 - protein, 9 aa, Artificial sequence
  Protein classification predicting sequence
FLVERGIPV

SEQ ID NO: 28980 - protein, 7 aa, Artificial sequence
  Protein classification predicting sequence
HIGLTPQ

SEQ ID NO: 28981 - protein, 5 aa, Artificial sequence
  Protein classification predicting sequence
PFMSY

SEQ ID NO: 28982 - protein, 7 aa, Artificial sequence
  Protein classification predicting sequence
AGAFAVV

SEQ ID NO: 28983 - protein, 8 aa, Artificial sequence
  Protein classification predicting sequence
ARIFDEAG

SEQ ID NO: 28984 - protein, 6 aa, Artificial sequence
  Protein classification predicting sequence
TAYDYP

SEQ ID NO: 28985 - protein, 8 aa, Artificial sequence
  Protein classification predicting sequence
LVGDSLGM

SEQ ID NO: 28986 - protein, 7 aa, Artificial sequence
  Protein classification predicting sequence
AVRRGAP

SEQ ID NO: 28987 - protein, 19 aa, Artificial sequence
  Protein classification predicting sequence
KKRFATITAYDYSFAKLFA

SEQ ID NO: 28988 - protein, 8 aa, Artificial sequence
  Protein classification predicting sequence
LGGFRVQG

SEQ ID NO: 28989 - protein, 8 aa, Artificial sequence
  Protein classification predicting sequence
IPVMAHIG

SEQ ID NO: 28990 - protein, 8 aa, Artificial sequence
  Protein classification predicting sequence
FATITAYD

SEQ ID NO: 28991 - protein, 10 aa, Artificial sequence
  Protein classification predicting sequence
QGHDSTLPVT

SEQ ID NO: 28992 - protein, 6 aa, Artificial sequence
  Protein classification predicting sequence
VRRGAP

SEQ ID NO: 28993 - protein, 22 aa, Artificial sequence
  Protein classification predicting sequence
IPVIGIGAGNVTDGQILVMHDA

SEQ ID NO: 28994 - protein, 9 aa, Artificial sequence
  Protein classification predicting sequence
PKFAKNFLA

SEQ ID NO: 28995 - protein, 11 aa, Artificial sequence
  Protein classification predicting sequence
MVTAYDFPSAK

SEQ ID NO: 28996 - protein, 10 aa, Artificial sequence
  Protein classification predicting sequence
DGQVLVYHDL

SEQ ID NO: 28997 - protein, 7 aa, Artificial sequence
  Protein classification predicting sequence
FTMKEEE

SEQ ID NO: 28998 - protein, 7 aa, Artificial sequence
  Protein classification predicting sequence
GGYKVQG

SEQ ID NO: 28999 - protein, 6 aa, Artificial sequence
  Protein classification predicting sequence
PFGSYE

SEQ ID NO: 29000 - protein, 7 aa, Artificial sequence
  Protein classification predicting sequence
DMPFGSY

SEQ ID NO: 29001 - protein, 5 aa, Artificial sequence
  Protein classification predicting sequence
DMPFM

SEQ ID NO: 29002 - protein, 6 aa, Artificial sequence
  Protein classification predicting sequence
FPGPEH

SEQ ID NO: 29003 - protein, 11 aa, Artificial sequence
  Protein classification predicting sequence
DMILVGDSLGM

SEQ ID NO: 29004 - protein, 7 aa, Artificial sequence
  Protein classification predicting sequence
QESGAHA

SEQ ID NO: 29005 - protein, 9 aa, Artificial sequence
  Protein classification predicting sequence
AGAIALVLE

SEQ ID NO: 29006 - protein, 9 aa, Artificial sequence
  Protein classification predicting sequence
VPVCGHLGL

SEQ ID NO: 29007 - protein, 6 aa, Artificial sequence
  Protein classification predicting sequence
LLVLEC

SEQ ID NO: 29008 - protein, 10 aa, Artificial sequence
  Protein classification predicting sequence
PLVRGVVRGA

SEQ ID NO: 29009 - protein, 14 aa, Artificial sequence
  Protein classification predicting sequence
ELATQITGKLTIPT

SEQ ID NO: 29010 - protein, 18 aa, Artificial sequence
  Protein classification predicting sequence
AAGIPVMAHIGFTPQSVN

SEQ ID NO: 29011 - protein, 6 aa, Artificial sequence
  Protein classification predicting sequence
TPQSVN

SEQ ID NO: 29012 - protein, 17 aa, Artificial sequence
  Protein classification predicting sequence
LGGFRVQGRGDAAEQTI

SEQ ID NO: 29013 - protein, 9 aa, Artificial sequence
  Protein classification predicting sequence
LTCYDATFA

SEQ ID NO: 29014 - protein, 26 aa, Artificial sequence
  Protein classification predicting sequence
DELIPLVRGVVRGAPHALVVADLPFG

SEQ ID NO: 29015 - protein, 9 aa, Artificial sequence
  Protein classification predicting sequence
TAYDYPSAK

SEQ ID NO: 29016 - protein, 8 aa, Artificial sequence
  Protein classification predicting sequence
HLGLTPQS

SEQ ID NO: 29017 - protein, 8 aa, Artificial sequence
  Protein classification predicting sequence
GQVLVYHD

SEQ ID NO: 29018 - protein, 7 aa, Artificial sequence
  Protein classification predicting sequence
EEYTYKK

SEQ ID NO: 29019 - protein, 8 aa, Artificial sequence
  Protein classification predicting sequence
TAYDASFA

SEQ ID NO: 29020 - protein, 8 aa, Artificial sequence
  Protein classification predicting sequence
ADMPFMSY

SEQ ID NO: 29021 - protein, 17 aa, Artificial sequence
  Protein classification predicting sequence
LMRAGANMVKLEGGSWL

SEQ ID NO: 29022 - protein, 7 aa, Artificial sequence
  Protein classification predicting sequence
DMPFMSY

SEQ ID NO: 29023 - protein, 9 aa, Artificial sequence
  Protein classification predicting sequence
LTERAVPVC

SEQ ID NO: 29024 - protein, 9 aa, Artificial sequence
  Protein classification predicting sequence
HLGLTPQSV

SEQ ID NO: 29025 - protein, 8 aa, Artificial sequence
  Protein classification predicting sequence
PVIGIGAG

SEQ ID NO: 29026 - protein, 6 aa, Artificial sequence
  Protein classification predicting sequence
MGHLGL

SEQ ID NO: 29027 - protein, 10 aa, Artificial sequence
  Protein classification predicting sequence
GDSLGMVLQG

SEQ ID NO: 29028 - protein, 8 aa, Artificial sequence
  Protein classification predicting sequence
LADLPFMA

SEQ ID NO: 29029 - protein, 7 aa, Artificial sequence
  Protein classification predicting sequence
VTLADMI

SEQ ID NO: 29030 - protein, 6 aa, Artificial sequence
  Protein classification predicting sequence
MVTAYD

SEQ ID NO: 29031 - protein, 15 aa, Artificial sequence
  Protein classification predicting sequence
TAYDYPSALLADKAG

SEQ ID NO: 29032 - protein, 7 aa, Artificial sequence
  Protein classification predicting sequence
RVPKFVK

SEQ ID NO: 29033 - protein, 10 aa, Artificial sequence
  Protein classification predicting sequence
YQESKEQAFR

SEQ ID NO: 29034 - protein, 10 aa, Artificial sequence
  Protein classification predicting sequence
VKLEGGAEMA

SEQ ID NO: 29035 - protein, 7 aa, Artificial sequence
  Protein classification predicting sequence
GMVVQGH

SEQ ID NO: 29036 - protein, 9 aa, Artificial sequence
  Protein classification predicting sequence
LVGDSLGMT

SEQ ID NO: 29037 - protein, 13 aa, Artificial sequence
  Protein classification predicting sequence
TVKMLTERAVPVC

SEQ ID NO: 29038 - protein, 13 aa, Artificial sequence
  Protein classification predicting sequence
DLPFMAYATPEQA

SEQ ID NO: 29039 - protein, 25 aa, Artificial sequence
  Protein classification predicting sequence
DALALEAAGAQLLVLECVPVELAKR

SEQ ID NO: 29040 - protein, 5 aa, Artificial sequence
  Protein classification predicting sequence
PVCAH

SEQ ID NO: 29041 - protein, 11 aa, Artificial sequence
  Protein classification predicting sequence
ALEAAGAQLLV

SEQ ID NO: 29042 - protein, 10 aa, Artificial sequence
  Protein classification predicting sequence
FGGYKVQGRG

SEQ ID NO: 29043 - protein, 50 aa, Artificial sequence
  Protein classification predicting sequence
AGAVALVLEAIPNDLAEEISKHLTIPVIGIGAGKGTDGQVLVYHDMLNYG

SEQ ID NO: 29044 - protein, 7 aa, Artificial sequence
  Protein classification predicting sequence
VVDMPIG

SEQ ID NO: 29045 - protein, 11 aa, Artificial sequence
  Protein classification predicting sequence
LTIPVIGIGAG

SEQ ID NO: 29046 - protein, 7 aa, Artificial sequence
  Protein classification predicting sequence
TDGQVLV

SEQ ID NO: 29047 - protein, 11 aa, Artificial sequence
  Protein classification predicting sequence
AKFVKQFADFS

SEQ ID NO: 29048 - protein, 8 aa, Artificial sequence
  Protein classification predicting sequence
FDEAGIPV

SEQ ID NO: 29049 - protein, 7 aa, Artificial sequence
  Protein classification predicting sequence
AVKLEGG

SEQ ID NO: 29050 - protein, 6 aa, Artificial sequence
  Protein classification predicting sequence
MVVLGY

SEQ ID NO: 29051 - protein, 5 aa, Artificial sequence
  Protein classification predicting sequence
MIHHT

SEQ ID NO: 29052 - protein, 12 aa, Artificial sequence
  Protein classification predicting sequence
RAGANMVKIEGG

SEQ ID NO: 29053 - protein, 7 aa, Artificial sequence
  Protein classification predicting sequence
IGIGAGN

SEQ ID NO: 29054 - protein, 10 aa, Artificial sequence
  Protein classification predicting sequence
TDGQILVMHD

SEQ ID NO: 29055 - protein, 32 aa, Artificial sequence
  Protein classification predicting sequence
TDGQILVMHDMFGISANYMPKFSKNFLAETGD

SEQ ID NO: 29056 - protein, 16 aa, Artificial sequence
  Protein classification predicting sequence
HLGLTPQSVNIFGGYK

SEQ ID NO: 29057 - protein, 7 aa, Artificial sequence
  Protein classification predicting sequence
IPTIGIG

SEQ ID NO: 29058 - protein, 10 aa, Artificial sequence
  Protein classification predicting sequence
EKITMITAYD

SEQ ID NO: 29059 - protein, 8 aa, Artificial sequence
  Protein classification predicting sequence
PTIGIGAG

SEQ ID NO: 29060 - protein, 9 aa, Artificial sequence
  Protein classification predicting sequence
IPVIGIGAG

SEQ ID NO: 29061 - protein, 9 aa, Artificial sequence
  Protein classification predicting sequence
PKFSKNFLA

SEQ ID NO: 29062 - protein, 11 aa, Artificial sequence
  Protein classification predicting sequence
LKSIRKYLTSN

SEQ ID NO: 29063 - protein, 11 aa, Artificial sequence
  Protein classification predicting sequence
TGIRDVHLELK

SEQ ID NO: 29064 - protein, 12 aa, Artificial sequence
  Protein classification predicting sequence
DIYGGDYERFGL

SEQ ID NO: 29065 - protein, 9 aa, Artificial sequence
  Protein classification predicting sequence
ATGGGAYKF

SEQ ID NO: 29066 - protein, 8 aa, Artificial sequence
  Protein classification predicting sequence
MEEYLRRH

SEQ ID NO: 29067 - protein, 7 aa, Artificial sequence
  Protein classification predicting sequence
CYGSYSL

SEQ ID NO: 29068 - protein, 8 aa, Artificial sequence
  Protein classification predicting sequence
QLLNMIKM

SEQ ID NO: 29069 - protein, 7 aa, Artificial sequence
  Protein classification predicting sequence
SQIDRLE

SEQ ID NO: 29070 - protein, 8 aa, Artificial sequence
  Protein classification predicting sequence
MYTYFSNT

SEQ ID NO: 29071 - protein, 12 aa, Artificial sequence
  Protein classification predicting sequence
PSVNEYHMLKLQ

SEQ ID NO: 29072 - protein, 90 aa, Artificial sequence
  Protein classification predicting sequence
VTVTTKDYFSFKKCLVYLDENVLSSDILDLNADTSCDFESVTNSVYLIHDNIMYTYFSNTILLSDKGKVHEISARGLCAHILLYQMLTSG

SEQ ID NO: 29073 - protein, 29 aa, Artificial sequence
  Protein classification predicting sequence
YKQCLSDLLNSMMNRDKIPIYSHTERDKK

SEQ ID NO: 29074 - protein, 11 aa, Artificial sequence
  Protein classification predicting sequence
QGQLKLLLGEL

SEQ ID NO: 29075 - protein, 8 aa, Artificial sequence
  Protein classification predicting sequence
VYIGSAPG

SEQ ID NO: 29076 - protein, 15 aa, Artificial sequence
  Protein classification predicting sequence
ASSLKWRCPFPDQWI

SEQ ID NO: 29077 - protein, 7 aa, Artificial sequence
  Protein classification predicting sequence
DKPFMYF

SEQ ID NO: 29078 - protein, 25 aa, Artificial sequence
  Protein classification predicting sequence
QGQLKLLLGELFFLSKLQRHGILDG

SEQ ID NO: 29079 - protein, 11 aa, Artificial sequence
  Protein classification predicting sequence
VYIGSAPGTHI

SEQ ID NO: 29080 - protein, 9 aa, Artificial sequence
  Protein classification predicting sequence
IKWMLIDGR

SEQ ID NO: 29081 - protein, 11 aa, Artificial sequence
  Protein classification predicting sequence
ILISDVRSKRG

SEQ ID NO: 29082 - protein, 11 aa, Artificial sequence
  Protein classification predicting sequence
YEKKMYYLNKI

SEQ ID NO: 29083 - protein, 45 aa, Artificial sequence
  Protein classification predicting sequence
DLLSNYALQNVMISILNPVASSLKWRCPFPDQWIKDFYIPHGNKM

SEQ ID NO: 29084 - protein, 15 aa, Artificial sequence
  Protein classification predicting sequence
VGGKIFTFGSYRLGV

SEQ ID NO: 29085 - protein, 18 aa, Artificial sequence
  Protein classification predicting sequence
VMVEEFKQGLAITDEILL

SEQ ID NO: 29086 - protein, 8 aa, Artificial sequence
  Protein classification predicting sequence
KAEWSKLF

SEQ ID NO: 29087 - protein, 12 aa, Artificial sequence
  Protein classification predicting sequence
DSDNSMSVPSPT

SEQ ID NO: 29088 - protein, 13 aa, Artificial sequence
  Protein classification predicting sequence
EESPKKTKTEEDE

SEQ ID NO: 29089 - protein, 8 aa, Artificial sequence
  Protein classification predicting sequence
PFPVTTQG

SEQ ID NO: 29090 - protein, 16 aa, Artificial sequence
  Protein classification predicting sequence
PFGVFEEEEELQRRIL

SEQ ID NO: 29091 - protein, 37 aa, Artificial sequence
  Protein classification predicting sequence
LPQSVIENVGGKIFTFGSYRLGVHTKGADIDALCVAP

SEQ ID NO: 29092 - protein, 12 aa, Artificial sequence
  Protein classification predicting sequence
HVDRSDFFTSFY

SEQ ID NO: 29093 - protein, 7 aa, Artificial sequence
  Protein classification predicting sequence
CQLYPNA

SEQ ID NO: 29094 - protein, 7 aa, Artificial sequence
  Protein classification predicting sequence
KFFLVFS

SEQ ID NO: 29095 - protein, 10 aa, Artificial sequence
  Protein classification predicting sequence
WEWPNPVLLK

SEQ ID NO: 29096 - protein, 15 aa, Artificial sequence
  Protein classification predicting sequence
FFQKYKHYIVLLASA

SEQ ID NO: 29097 - protein, 11 aa, Artificial sequence
  Protein classification predicting sequence
EEFRTMWVIGL

SEQ ID NO: 29098 - protein, 17 aa, Artificial sequence
  Protein classification predicting sequence
DLTYDIQSFTDTVYRQA

SEQ ID NO: 29099 - protein, 7 aa, Artificial sequence
  Protein classification predicting sequence
NSMSVPS

SEQ ID NO: 29100 - protein, 9 aa, Artificial sequence
  Protein classification predicting sequence
SPISLAAPK

SEQ ID NO: 29101 - protein, 16 aa, Artificial sequence
  Protein classification predicting sequence
KLNNLVKEWIREISES

SEQ ID NO: 29102 - protein, 13 aa, Artificial sequence
  Protein classification predicting sequence
FRLTLRAIKLWAK

SEQ ID NO: 29103 - protein, 24 aa, Artificial sequence
  Protein classification predicting sequence
DLTYDIQSFTDTVYRQAINSKMFE

SEQ ID NO: 29104 - protein, 8 aa, Artificial sequence
  Protein classification predicting sequence
DMKIAAMH

SEQ ID NO: 29105 - protein, 7 aa, Artificial sequence
  Protein classification predicting sequence
SESKNLP

SEQ ID NO: 29106 - protein, 32 aa, Artificial sequence
  Protein classification predicting sequence
VGGKIFTFGSYRLGVHTKGADIDALCVAPRHV

SEQ ID NO: 29107 - protein, 24 aa, Artificial sequence
  Protein classification predicting sequence
LDIRCIRSLNGCRVTDEILHLVPN

SEQ ID NO: 29108 - protein, 7 aa, Artificial sequence
  Protein classification predicting sequence
FRLTLRA

SEQ ID NO: 29109 - protein, 23 aa, Artificial sequence
  Protein classification predicting sequence
LGFLGGVSWAMLVARTCQLYPNA

SEQ ID NO: 29110 - protein, 25 aa, Artificial sequence
  Protein classification predicting sequence
ASTLVHKFFLVFSKWEWPNPVLLKQ

SEQ ID NO: 29111 - protein, 37 aa, Artificial sequence
  Protein classification predicting sequence
NLNLPVWDPRVNPSDRYHLMPIITPAYPQQNSTYNVS

SEQ ID NO: 29112 - protein, 11 aa, Artificial sequence
  Protein classification predicting sequence
VMVEEFKQGLA

SEQ ID NO: 29113 - protein, 7 aa, Artificial sequence
  Protein classification predicting sequence
PNFFQKY

SEQ ID NO: 29114 - protein, 12 aa, Artificial sequence
  Protein classification predicting sequence
LEWVGLVESKIR

SEQ ID NO: 29115 - protein, 15 aa, Artificial sequence
  Protein classification predicting sequence
NEFITLAHVNPQSFP

SEQ ID NO: 29116 - protein, 7 aa, Artificial sequence
  Protein classification predicting sequence
GSYRLGV

SEQ ID NO: 29117 - protein, 10 aa, Artificial sequence
  Protein classification predicting sequence
GFPGGVAWAM

SEQ ID NO: 29118 - protein, 15 aa, Artificial sequence
  Protein classification predicting sequence
ITPAYPSMCATHNIT

SEQ ID NO: 29119 - protein, 8 aa, Artificial sequence
  Protein classification predicting sequence
LRAIKLWA

SEQ ID NO: 29120 - protein, 13 aa, Artificial sequence
  Protein classification predicting sequence
TGYMFGKGIYFAD

SEQ ID NO: 29121 - protein, 7 aa, Artificial sequence
  Protein classification predicting sequence
GKGIYFA

SEQ ID NO: 29122 - protein, 20 aa, Artificial sequence
  Protein classification predicting sequence
IPREQHAISRKDISENALKV

SEQ ID NO: 29123 - protein, 10 aa, Artificial sequence
  Protein classification predicting sequence
YRLNKAGYEA

SEQ ID NO: 29124 - protein, 36 aa, Artificial sequence
  Protein classification predicting sequence
QVRKLFRNCRLVGRRFRLAHVMFGPEIIEVATFRGH

SEQ ID NO: 29125 - protein, 7 aa, Artificial sequence
  Protein classification predicting sequence
QVLKNTD

SEQ ID NO: 29126 - protein, 19 aa, Artificial sequence
  Protein classification predicting sequence
MRVNPAFLFAAMFWYPLLE

SEQ ID NO: 29127 - protein, 8 aa, Artificial sequence
  Protein classification predicting sequence
EHPKFRAA

SEQ ID NO: 29128 - protein, 9 aa, Artificial sequence
  Protein classification predicting sequence
QKGMLNELD

SEQ ID NO: 29129 - protein, 12 aa, Artificial sequence
  Protein classification predicting sequence
RPRKRAPRREGT

SEQ ID NO: 29130 - protein, 27 aa, Artificial sequence
  Protein classification predicting sequence
IFTRVANFCRKVLSREESEAEQAVARP

SEQ ID NO: 29131 - protein, 26 aa, Artificial sequence
  Protein classification predicting sequence
LVGGGVRDLLLGKKPKDFDVTTNATP

SEQ ID NO: 29132 - protein, 53 aa, Artificial sequence
  Protein classification predicting sequence
SDRTTSQRGQNGMLLRDNIFGSIEEDAQRRDFTINSLYYSVADFTVRDYVGGM

SEQ ID NO: 29133 - protein, 30 aa, Artificial sequence
  Protein classification predicting sequence
GVIRLIGNPETRYREDPVRMLRAVRFAAKL

SEQ ID NO: 29134 - protein, 35 aa, Artificial sequence
  Protein classification predicting sequence
ISPETAEPIPRLATLLNDIPPARLFEESLKLLQAG

SEQ ID NO: 29135 - protein, 22 aa, Artificial sequence
  Protein classification predicting sequence
EYHLFQPLFPTITRYFTENGDS

SEQ ID NO: 29136 - protein, 49 aa, Artificial sequence
  Protein classification predicting sequence
DAFALAMNDVLDEACRSLAIPKRLTTLTRDIWQLQLRMSRRQGKRAWKL

SEQ ID NO: 29137 - protein, 10 aa, Artificial sequence
  Protein classification predicting sequence
KLGEGTYATV

SEQ ID NO: 29138 - protein, 7 aa, Artificial sequence
  Protein classification predicting sequence
FQLLRGL

SEQ ID NO: 29139 - protein, 11 aa, Artificial sequence
  Protein classification predicting sequence
EVVTLWYRPPD

SEQ ID NO: 29140 - protein, 8 aa, Artificial sequence
  Protein classification predicting sequence
IFRILGTP

SEQ ID NO: 29141 - protein, 26 aa, Artificial sequence
  Protein classification predicting sequence
LHRDLKPQNLLINERGELKLADFGLA

SEQ ID NO: 29142 - protein, 11 aa, Artificial sequence
  Protein classification predicting sequence
GELKLADFGLA

SEQ ID NO: 29143 - protein, 39 aa, Artificial sequence
  Protein classification predicting sequence
GELKLADFGLARAKSVPTKTYSNEVVTLWYRPPDVLLGS

SEQ ID NO: 29144 - protein, 12 aa, Artificial sequence
  Protein classification predicting sequence
ELHLIFRLLGTP

SEQ ID NO: 29145 - protein, 8 aa, Artificial sequence
  Protein classification predicting sequence
IFRLLGTP

SEQ ID NO: 29146 - protein, 15 aa, Artificial sequence
  Protein classification predicting sequence
SIFSLKEIQLQKDPG

SEQ ID NO: 29147 - protein, 7 aa, Artificial sequence
  Protein classification predicting sequence
MSMHNVK

SEQ ID NO: 29148 - protein, 6 aa, Artificial sequence
  Protein classification predicting sequence
EETWPG

SEQ ID NO: 29149 - protein, 12 aa, Artificial sequence
  Protein classification predicting sequence
PQPLINHAPRLD

SEQ ID NO: 29150 - protein, 12 aa, Artificial sequence
  Protein classification predicting sequence
SMEDLNKRLSLP

SEQ ID NO: 29151 - protein, 8 aa, Artificial sequence
  Protein classification predicting sequence
PLFPGSTV

SEQ ID NO: 29152 - protein, 11 aa, Artificial sequence
  Protein classification predicting sequence
FQLLRGLAYCH

SEQ ID NO: 29153 - protein, 8 aa, Artificial sequence
  Protein classification predicting sequence
LRGLAYCH

SEQ ID NO: 29154 - protein, 39 aa, Artificial sequence
  Protein classification predicting sequence
WEEKSREFIGSFLEMFGPEGALKHMLKEGKGRMLQAISP

SEQ ID NO: 29155 - protein, 18 aa, Artificial sequence
  Protein classification predicting sequence
ERSPSPSFRWPFSGKTSP

SEQ ID NO: 29156 - protein, 9 aa, Artificial sequence
  Protein classification predicting sequence
FKGFTVMNE

SEQ ID NO: 29157 - protein, 8 aa, Artificial sequence
  Protein classification predicting sequence
HCRYVDEV

SEQ ID NO: 29158 - protein, 10 aa, Artificial sequence
  Protein classification predicting sequence
APWTLTPEFL

SEQ ID NO: 29159 - protein, 46 aa, Artificial sequence
  Protein classification predicting sequence
PTQRTEGISTSDIITRIVRDYDVYARRNLQRGYTAKELNVSFINEK

SEQ ID NO: 29160 - protein, 15 aa, Artificial sequence
  Protein classification predicting sequence
DLIQKWEEKSREFIG

SEQ ID NO: 29161 - protein, 26 aa, Artificial sequence
  Protein classification predicting sequence
RPVRVYADGIFDLFHSGHARALMQAK

SEQ ID NO: 29162 - protein, 8 aa, Artificial sequence
  Protein classification predicting sequence
VAHDDIPY

SEQ ID NO: 29163 - protein, 7 aa, Artificial sequence
  Protein classification predicting sequence
GTDAVIY

SEQ ID NO: 29164 - protein, 8 aa, Artificial sequence
  Protein classification predicting sequence
QYFLDRFY

SEQ ID NO: 29165 - protein, 16 aa, Artificial sequence
  Protein classification predicting sequence
HMLFELFKNAMRATVE

SEQ ID NO: 29166 - protein, 8 aa, Artificial sequence
  Protein classification predicting sequence
ELPVRLAN

SEQ ID NO: 29167 - protein, 7 aa, Artificial sequence
  Protein classification predicting sequence
VYVPSHL

SEQ ID NO: 29168 - protein, 16 aa, Artificial sequence
  Protein classification predicting sequence
PLAGFGYGLPISRLYA

SEQ ID NO: 29169 - protein, 6 aa, Artificial sequence
  Protein classification predicting sequence
YFQGDL

SEQ ID NO: 29170 - protein, 10 aa, Artificial sequence
  Protein classification predicting sequence
YFQGDLKLYS

SEQ ID NO: 29171 - protein, 10 aa, Artificial sequence
  Protein classification predicting sequence
IYLKALSSES

SEQ ID NO: 29172 - protein, 8 aa, Artificial sequence
  Protein classification predicting sequence
NKSAWRHY

SEQ ID NO: 29173 - protein, 9 aa, Artificial sequence
  Protein classification predicting sequence
SPSPLSMKQ

SEQ ID NO: 29174 - protein, 7 aa, Artificial sequence
  Protein classification predicting sequence
TPSVQLV

SEQ ID NO: 29175 - protein, 7 aa, Artificial sequence
  Protein classification predicting sequence
HIGSIDP

SEQ ID NO: 29176 - protein, 13 aa, Artificial sequence
  Protein classification predicting sequence
RLFSYMYSTAPTP

SEQ ID NO: 29177 - protein, 7 aa, Artificial sequence
  Protein classification predicting sequence
YSTAPTP

SEQ ID NO: 29178 - protein, 7 aa, Artificial sequence
  Protein classification predicting sequence
VRLANIM

SEQ ID NO: 29179 - protein, 7 aa, Artificial sequence
  Protein classification predicting sequence
RISIRML

SEQ ID NO: 29180 - protein, 6 aa, Artificial sequence
  Protein classification predicting sequence
FELFKN

SEQ ID NO: 29181 - protein, 7 aa, Artificial sequence
  Protein classification predicting sequence
SDRGGGV

SEQ ID NO: 29182 - protein, 6 aa, Artificial sequence
  Protein classification predicting sequence
QYFLDR

SEQ ID NO: 29183 - protein, 8 aa, Artificial sequence
  Protein classification predicting sequence
SRISIRML

SEQ ID NO: 29184 - protein, 11 aa, Artificial sequence
  Protein classification predicting sequence
GYGLPISRLYA

SEQ ID NO: 29185 - protein, 7 aa, Artificial sequence
  Protein classification predicting sequence
IYLKALS

SEQ ID NO: 29186 - protein, 11 aa, Artificial sequence
  Protein classification predicting sequence
NSVQFSNHTGY

SEQ ID NO: 29187 - protein, 8 aa, Artificial sequence
  Protein classification predicting sequence
VYREKVVP

SEQ ID NO: 29188 - protein, 8 aa, Artificial sequence
  Protein classification predicting sequence
TPNQFEAE

SEQ ID NO: 29189 - protein, 7 aa, Artificial sequence
  Protein classification predicting sequence
TQRIRME

SEQ ID NO: 29190 - protein, 21 aa, Artificial sequence
  Protein classification predicting sequence
VFVGTGDLFAAMLLAWTHKHP

SEQ ID NO: 29191 - protein, 11 aa, Artificial sequence
  Protein classification predicting sequence
MGPDTVVITSS

SEQ ID NO: 29192 - protein, 7 aa, Artificial sequence
  Protein classification predicting sequence
VQFSNHT

SEQ ID NO: 29193 - protein, 17 aa, Artificial sequence
  Protein classification predicting sequence
EGTPSTAIREISLMKEL

SEQ ID NO: 29194 - protein, 7 aa, Artificial sequence
  Protein classification predicting sequence
PDVLLGS

SEQ ID NO: 29195 - protein, 9 aa, Artificial sequence
  Protein classification predicting sequence
EMATGRPLF

SEQ ID NO: 29196 - protein, 6 aa, Artificial sequence
  Protein classification predicting sequence
NIIHYM

SEQ ID NO: 29197 - protein, 7 aa, Artificial sequence
  Protein classification predicting sequence
EAHGGYT

SEQ ID NO: 29198 - protein, 8 aa, Artificial sequence
  Protein classification predicting sequence
NKLVDGCY

SEQ ID NO: 29199 - protein, 14 aa, Artificial sequence
  Protein classification predicting sequence
RDFYHTCYCLSGLS

SEQ ID NO: 29200 - protein, 19 aa, Artificial sequence
  Protein classification predicting sequence
WMFHQQALQEYILMCCQCP

SEQ ID NO: 29201 - protein, 11 aa, Artificial sequence
  Protein classification predicting sequence
FLQKPVPGFEE

SEQ ID NO: 29202 - protein, 40 aa, Artificial sequence
  Protein classification predicting sequence
RERLQDDSVETVTSIEQAKVEEKIQEVFSSYKFNHLVPRL

SEQ ID NO: 29203 - protein, 8 aa, Artificial sequence
  Protein classification predicting sequence
RPWLCYWI

SEQ ID NO: 29204 - protein, 8 aa, Artificial sequence
  Protein classification predicting sequence
CYCLSGLS

SEQ ID NO: 29205 - protein, 7 aa, Artificial sequence
  Protein classification predicting sequence
YHTCYCL

SEQ ID NO: 29206 - protein, 7 aa, Artificial sequence
  Protein classification predicting sequence
LEKLGEG

SEQ ID NO: 29207 - protein, 7 aa, Artificial sequence
  Protein classification predicting sequence
RVDFNVP

SEQ ID NO: 29208 - protein, 6 aa, Artificial sequence
  Protein classification predicting sequence
SHLGRP

SEQ ID NO: 29209 - protein, 8 aa, Artificial sequence
  Protein classification predicting sequence
DCVGPEVE

SEQ ID NO: 29210 - protein, 9 aa, Artificial sequence
  Protein classification predicting sequence
NDAFGTAHR

SEQ ID NO: 29211 - protein, 8 aa, Artificial sequence
  Protein classification predicting sequence
AILGGAKV

SEQ ID NO: 29212 - protein, 9 aa, Artificial sequence
  Protein classification predicting sequence
WNGPVGVFE

SEQ ID NO: 29213 - protein, 6 aa, Artificial sequence
  Protein classification predicting sequence
ACANPA

SEQ ID NO: 29214 - protein, 10 aa, Artificial sequence
  Protein classification predicting sequence
MRVDFNVPMK

SEQ ID NO: 29215 - protein, 7 aa, Artificial sequence
  Protein classification predicting sequence
ITNNQRI

SEQ ID NO: 29216 - protein, 9 aa, Artificial sequence
  Protein classification predicting sequence
ILLENLRFH

SEQ ID NO: 29217 - protein, 8 aa, Artificial sequence
  Protein classification predicting sequence
GFLMKKEL

SEQ ID NO: 29218 - protein, 38 aa, Artificial sequence
  Protein classification predicting sequence
SPERPFLAILGGAKVADKIQLINNMLDKVNEMIIGGGM

SEQ ID NO: 29219 - protein, 31 aa, Artificial sequence
  Protein classification predicting sequence
KAEKNGVKITLPVDFVTADKFDENAKTGQAT

SEQ ID NO: 29220 - protein, 8 aa, Artificial sequence
  Protein classification predicting sequence
GDILLLEN

SEQ ID NO: 29221 - protein, 8 aa, Artificial sequence
  Protein classification predicting sequence
DVFINDAF

SEQ ID NO: 29222 - protein, 10 aa, Artificial sequence
  Protein classification predicting sequence
VILLENLRFH

SEQ ID NO: 29223 - protein, 7 aa, Artificial sequence
  Protein classification predicting sequence
SLFDEEG

SEQ ID NO: 29224 - protein, 24 aa, Artificial sequence
  Protein classification predicting sequence
EAVARAKQIVWNGPVGVFEWEAFA

SEQ ID NO: 29225 - protein, 9 aa, Artificial sequence
  Protein classification predicting sequence
NRIVQALPT

SEQ ID NO: 29226 - protein, 8 aa, Artificial sequence
  Protein classification predicting sequence
ADKFAPDA

SEQ ID NO: 29227 - protein, 9 aa, Artificial sequence
  Protein classification predicting sequence
STGGGASLE

SEQ ID NO: 29228 - protein, 19 aa, Artificial sequence
  Protein classification predicting sequence
STGGGASLELLEGKELPGV

SEQ ID NO: 29229 - protein, 13 aa, Artificial sequence
  Protein classification predicting sequence
RIRSALPTIQKVL

SEQ ID NO: 29230 - protein, 16 aa, Artificial sequence
  Protein classification predicting sequence
EGGSCILMSHLGRPKG

SEQ ID NO: 29231 - protein, 12 aa, Artificial sequence
  Protein classification predicting sequence
GYEEAATLRPVA

SEQ ID NO: 29232 - protein, 16 aa, Artificial sequence
  Protein classification predicting sequence
KMSPGDVVLLENVRFY

SEQ ID NO: 29233 - protein, 6 aa, Artificial sequence
  Protein classification predicting sequence
GGSKVS

SEQ ID NO: 29234 - protein, 10 aa, Artificial sequence
  Protein classification predicting sequence
MAYTFLKAQG

SEQ ID NO: 29235 - protein, 12 aa, Artificial sequence
  Protein classification predicting sequence
DHVCHTEFKAVD

SEQ ID NO: 29236 - protein, 10 aa, Artificial sequence
  Protein classification predicting sequence
WNGPMGVFEM

SEQ ID NO: 29237 - protein, 16 aa, Artificial sequence
  Protein classification predicting sequence
NDAFGTAHRAHSSMVG

SEQ ID NO: 29238 - protein, 7 aa, Artificial sequence
  Protein classification predicting sequence
MAYTFLK

SEQ ID NO: 29239 - protein, 10 aa, Artificial sequence
  Protein classification predicting sequence
PVDFVTADKF

SEQ ID NO: 29240 - protein, 6 aa, Artificial sequence
  Protein classification predicting sequence
IVWNGP

SEQ ID NO: 29241 - protein, 11 aa, Artificial sequence
  Protein classification predicting sequence
IVWNGPVGVFE

SEQ ID NO: 29242 - protein, 47 aa, Artificial sequence
  Protein classification predicting sequence
VKATSRGCITIIGGGDTATCCAKWNTEDKVSHVSTGGGASLELLEGK

SEQ ID NO: 29243 - protein, 9 aa, Artificial sequence
  Protein classification predicting sequence
KLTLDKLDV

SEQ ID NO: 29244 - protein, 12 aa, Artificial sequence
  Protein classification predicting sequence
VVLMSHLGRPDG

SEQ ID NO: 29245 - protein, 18 aa, Artificial sequence
  Protein classification predicting sequence
ELKSLLGKDVLFLKDCVG

SEQ ID NO: 29246 - protein, 7 aa, Artificial sequence
  Protein classification predicting sequence
DKFDENA

SEQ ID NO: 29247 - protein, 7 aa, Artificial sequence
  Protein classification predicting sequence
ATVASGI

SEQ ID NO: 29248 - protein, 23 aa, Artificial sequence
  Protein classification predicting sequence
MRVDFNVPMKNNQITNNQRIKAA

SEQ ID NO: 29249 - protein, 9 aa, Artificial sequence
  Protein classification predicting sequence
KAEKNGVKI

SEQ ID NO: 29250 - protein, 6 aa, Artificial sequence
  Protein classification predicting sequence
TNNQRI

SEQ ID NO: 29251 - protein, 7 aa, Artificial sequence
  Protein classification predicting sequence
MAKAEKN

SEQ ID NO: 29252 - protein, 7 aa, Artificial sequence
  Protein classification predicting sequence
DFRIRSA

SEQ ID NO: 29253 - protein, 8 aa, Artificial sequence
  Protein classification predicting sequence
DQGGICIL

SEQ ID NO: 29254 - protein, 8 aa, Artificial sequence
  Protein classification predicting sequence
DAFGTAHR

SEQ ID NO: 29255 - protein, 14 aa, Artificial sequence
  Protein classification predicting sequence
GAAGYLMEKEISYF

SEQ ID NO: 29256 - protein, 6 aa, Artificial sequence
  Protein classification predicting sequence
NPPRPL

SEQ ID NO: 29257 - protein, 9 aa, Artificial sequence
  Protein classification predicting sequence
ASLELLEGK

SEQ ID NO: 29258 - protein, 8 aa, Artificial sequence
  Protein classification predicting sequence
ITNDYRIR

SEQ ID NO: 29259 - protein, 13 aa, Artificial sequence
  Protein classification predicting sequence
AHRDSATMTGIPK

SEQ ID NO: 29260 - protein, 8 aa, Artificial sequence
  Protein classification predicting sequence
KIQLLDNM

SEQ ID NO: 29261 - protein, 9 aa, Artificial sequence
  Protein classification predicting sequence
GLMSIIGGG

SEQ ID NO: 29262 - protein, 5 aa, Artificial sequence
  Protein classification predicting sequence
MAYTF

SEQ ID NO: 29263 - protein, 10 aa, Artificial sequence
  Protein classification predicting sequence
IWNGPMGVFE

SEQ ID NO: 29264 - protein, 7 aa, Artificial sequence
  Protein classification predicting sequence
SIIGGGD

SEQ ID NO: 29265 - protein, 8 aa, Artificial sequence
  Protein classification predicting sequence
LASYGDVY

SEQ ID NO: 29266 - protein, 7 aa, Artificial sequence
  Protein classification predicting sequence
MALDIGP

SEQ ID NO: 29267 - protein, 15 aa, Artificial sequence
  Protein classification predicting sequence
CKSAIWNGPMGVFEM

SEQ ID NO: 29268 - protein, 9 aa, Artificial sequence
  Protein classification predicting sequence
EEGSKKEEE

SEQ ID NO: 29269 - protein, 9 aa, Artificial sequence
  Protein classification predicting sequence
GGAKVSDKI

SEQ ID NO: 29270 - protein, 6 aa, Artificial sequence
  Protein classification predicting sequence
SKGTFA

SEQ ID NO: 29271 - protein, 12 aa, Artificial sequence
  Protein classification predicting sequence
SKGTFAVAKAMG

SEQ ID NO: 29272 - protein, 7 aa, Artificial sequence
  Protein classification predicting sequence
ASAAELS

SEQ ID NO: 29273 - protein, 7 aa, Artificial sequence
  Protein classification predicting sequence
LLENVRF

SEQ ID NO: 29274 - protein, 22 aa, Artificial sequence
  Protein classification predicting sequence
CEESKLEFARSLLKKAEDRKVQ

SEQ ID NO: 29275 - protein, 7 aa, Artificial sequence
  Protein classification predicting sequence
LEFLEGK

SEQ ID NO: 29276 - protein, 7 aa, Artificial sequence
  Protein classification predicting sequence
LEGKTLP

SEQ ID NO: 29277 - protein, 82 aa, Artificial sequence
  Protein classification predicting sequence
ILPIDHVCHTEFKAVDSPLITEDQNIPEGHMALDIGPKTIEKYVQTIGKCKSAIWNGPMGVFEMVPYSKGTFAIAKAMGRGT

SEQ ID NO: 29278 - protein, 7 aa, Artificial sequence
  Protein classification predicting sequence
RADLNVP

SEQ ID NO: 29279 - protein, 7 aa, Artificial sequence
  Protein classification predicting sequence
HLGRPKG

SEQ ID NO: 29280 - protein, 7 aa, Artificial sequence
  Protein classification predicting sequence
AHRAHAS

SEQ ID NO: 29281 - protein, 9 aa, Artificial sequence
  Protein classification predicting sequence
AIVGGSKVS

SEQ ID NO: 29282 - protein, 6 aa, Artificial sequence
  Protein classification predicting sequence
KIGVIE

SEQ ID NO: 29283 - protein, 11 aa, Artificial sequence
  Protein classification predicting sequence
GGGMIFTFYKA

SEQ ID NO: 29284 - protein, 8 aa, Artificial sequence
  Protein classification predicting sequence
SLVEEDKL

SEQ ID NO: 29285 - protein, 8 aa, Artificial sequence
  Protein classification predicting sequence
LPTDVVVA

SEQ ID NO: 29286 - protein, 7 aa, Artificial sequence
  Protein classification predicting sequence
DGWMGLD

SEQ ID NO: 29287 - protein, 9 aa, Artificial sequence
  Protein classification predicting sequence
RFYKEEEKN

SEQ ID NO: 29288 - protein, 8 aa, Artificial sequence
  Protein classification predicting sequence
LLLENVRF

SEQ ID NO: 29289 - protein, 8 aa, Artificial sequence
  Protein classification predicting sequence
TIIGGGDS

SEQ ID NO: 29290 - protein, 12 aa, Artificial sequence
  Protein classification predicting sequence
VNDAFGTAHRAH

SEQ ID NO: 29291 - protein, 14 aa, Artificial sequence
  Protein classification predicting sequence
VNDAFGTAHRAHAS

SEQ ID NO: 29292 - protein, 15 aa, Artificial sequence
  Protein classification predicting sequence
FSIAGGGDTLAAIAK

SEQ ID NO: 29293 - protein, 8 aa, Artificial sequence
  Protein classification predicting sequence
ADKFAADA

SEQ ID NO: 29294 - protein, 7 aa, Artificial sequence
  Protein classification predicting sequence
PSVAGFL

SEQ ID NO: 29295 - protein, 22 aa, Artificial sequence
  Protein classification predicting sequence
PFAAIVGGSKVSSKIGVIESLL

SEQ ID NO: 29296 - protein, 11 aa, Artificial sequence
  Protein classification predicting sequence
SLVEEDKLELA

SEQ ID NO: 29297 - protein, 8 aa, Artificial sequence
  Protein classification predicting sequence
KGVKLLLP

SEQ ID NO: 29298 - protein, 10 aa, Artificial sequence
  Protein classification predicting sequence
WNGPMGVFEF

SEQ ID NO: 29299 - protein, 14 aa, Artificial sequence
  Protein classification predicting sequence
TIIGGGDSVAAVEK

SEQ ID NO: 29300 - protein, 8 aa, Artificial sequence
  Protein classification predicting sequence
VLIRVDFN

SEQ ID NO: 29301 - protein, 8 aa, Artificial sequence
  Protein classification predicting sequence
LMSHLGRP

SEQ ID NO: 29302 - protein, 12 aa, Artificial sequence
  Protein classification predicting sequence
RPFLAILGGAKV

SEQ ID NO: 29303 - protein, 7 aa, Artificial sequence
  Protein classification predicting sequence
NMLDKVN

SEQ ID NO: 29304 - protein, 7 aa, Artificial sequence
  Protein classification predicting sequence
KGAKVIL

SEQ ID NO: 29305 - protein, 6 aa, Artificial sequence
  Protein classification predicting sequence
EEKNDP

SEQ ID NO: 29306 - protein, 12 aa, Artificial sequence
  Protein classification predicting sequence
TLVWNGPLGAFE

SEQ ID NO: 29307 - protein, 20 aa, Artificial sequence
  Protein classification predicting sequence
DDFTYISTAGGAFLEWMEGK

SEQ ID NO: 29308 - protein, 6 aa, Artificial sequence
  Protein classification predicting sequence
GGAFLE

SEQ ID NO: 29309 - protein, 6 aa, Artificial sequence
  Protein classification predicting sequence
LMKKEL

SEQ ID NO: 29310 - protein, 6 aa, Artificial sequence
  Protein classification predicting sequence
GWMGLD

SEQ ID NO: 29311 - protein, 6 aa, Artificial sequence
  Protein classification predicting sequence
SHVSTG

SEQ ID NO: 29312 - protein, 8 aa, Artificial sequence
  Protein classification predicting sequence
SLELLEGK

SEQ ID NO: 29313 - protein, 7 aa, Artificial sequence
  Protein classification predicting sequence
DDTRIRA

SEQ ID NO: 29314 - protein, 8 aa, Artificial sequence
  Protein classification predicting sequence
RIRASLPT

SEQ ID NO: 29315 - protein, 8 aa, Artificial sequence
  Protein classification predicting sequence
HRKHASVY

SEQ ID NO: 29316 - protein, 13 aa, Artificial sequence
  Protein classification predicting sequence
LAHQSRPGKKDFT

SEQ ID NO: 29317 - protein, 9 aa, Artificial sequence
  Protein classification predicting sequence
IGGGMAFTF

SEQ ID NO: 29318 - protein, 8 aa, Artificial sequence
  Protein classification predicting sequence
GLDCGPES

SEQ ID NO: 29319 - protein, 14 aa, Artificial sequence
  Protein classification predicting sequence
QRIVGALPTIKYAI

SEQ ID NO: 29320 - protein, 7 aa, Artificial sequence
  Protein classification predicting sequence
KYSLKPV

SEQ ID NO: 29321 - protein, 7 aa, Artificial sequence
  Protein classification predicting sequence
MAFTFKK

SEQ ID NO: 29322 - protein, 6 aa, Artificial sequence
  Protein classification predicting sequence
VTADKF

SEQ ID NO: 29323 - protein, 6 aa, Artificial sequence
  Protein classification predicting sequence
RLTPVA

SEQ ID NO: 29324 - protein, 8 aa, Artificial sequence
  Protein classification predicting sequence
AHRAHAST

SEQ ID NO: 29325 - protein, 6 aa, Artificial sequence
  Protein classification predicting sequence
DIGPKT

SEQ ID NO: 29326 - protein, 9 aa, Artificial sequence
  Protein classification predicting sequence
WNGPMGVFE

SEQ ID NO: 29327 - protein, 6 aa, Artificial sequence
  Protein classification predicting sequence
DKIGVI

SEQ ID NO: 29328 - protein, 6 aa, Artificial sequence
  Protein classification predicting sequence
VLLLEN

SEQ ID NO: 29329 - protein, 9 aa, Artificial sequence
  Protein classification predicting sequence
DVYVNDAFG

SEQ ID NO: 29330 - protein, 8 aa, Artificial sequence
  Protein classification predicting sequence
RVDFNVPM

SEQ ID NO: 29331 - protein, 7 aa, Artificial sequence
  Protein classification predicting sequence
YVNDAFG

SEQ ID NO: 29332 - protein, 8 aa, Artificial sequence
  Protein classification predicting sequence
GHDVGKSL

SEQ ID NO: 29333 - protein, 6 aa, Artificial sequence
  Protein classification predicting sequence
AALPTI

SEQ ID NO: 29334 - protein, 7 aa, Artificial sequence
  Protein classification predicting sequence
LPGVAAL

SEQ ID NO: 29335 - protein, 7 aa, Artificial sequence
  Protein classification predicting sequence
GGMTYTF

SEQ ID NO: 29336 - protein, 6 aa, Artificial sequence
  Protein classification predicting sequence
HRAHAS

SEQ ID NO: 29337 - protein, 14 aa, Artificial sequence
  Protein classification predicting sequence
STAGGAFLEWMEGK

SEQ ID NO: 29338 - protein, 6 aa, Artificial sequence
  Protein classification predicting sequence
LPTIKY

SEQ ID NO: 29339 - protein, 6 aa, Artificial sequence
  Protein classification predicting sequence
WNGPMG

SEQ ID NO: 29340 - protein, 11 aa, Artificial sequence
  Protein classification predicting sequence
VLVRADFNVPL

SEQ ID NO: 29341 - protein, 6 aa, Artificial sequence
  Protein classification predicting sequence
DFNVPL

SEQ ID NO: 29342 - protein, 7 aa, Artificial sequence
  Protein classification predicting sequence
LPTDVVV

SEQ ID NO: 29343 - protein, 6 aa, Artificial sequence
  Protein classification predicting sequence
LENVRF

SEQ ID NO: 29344 - protein, 7 aa, Artificial sequence
  Protein classification predicting sequence
ANTFLAA

SEQ ID NO: 29345 - protein, 6 aa, Artificial sequence
  Protein classification predicting sequence
DTRIRA

SEQ ID NO: 29346 - protein, 7 aa, Artificial sequence
  Protein classification predicting sequence
DFNVPLK

SEQ ID NO: 29347 - protein, 11 aa, Artificial sequence
  Protein classification predicting sequence
GDVVLLENVRF

SEQ ID NO: 29348 - protein, 8 aa, Artificial sequence
  Protein classification predicting sequence
GGAKVSTK

SEQ ID NO: 29349 - protein, 6 aa, Artificial sequence
  Protein classification predicting sequence
KRVLVR

SEQ ID NO: 29350 - protein, 8 aa, Artificial sequence
  Protein classification predicting sequence
KYSLEPVA

SEQ ID NO: 29351 - protein, 6 aa, Artificial sequence
  Protein classification predicting sequence
HRAHSS

SEQ ID NO: 29352 - protein, 8 aa, Artificial sequence
  Protein classification predicting sequence
AGFLLQKE

SEQ ID NO: 29353 - protein, 7 aa, Artificial sequence
  Protein classification predicting sequence
DCVGPEV

SEQ ID NO: 29354 - protein, 7 aa, Artificial sequence
  Protein classification predicting sequence
SLFDEAG

SEQ ID NO: 29355 - protein, 12 aa, Artificial sequence
  Protein classification predicting sequence
VIIGGGDTATVA

SEQ ID NO: 29356 - protein, 8 aa, Artificial sequence
  Protein classification predicting sequence
LASHLGRP

SEQ ID NO: 29357 - protein, 14 aa, Artificial sequence
  Protein classification predicting sequence
LLENLRFHIEEEGS

SEQ ID NO: 29358 - protein, 6 aa, Artificial sequence
  Protein classification predicting sequence
KVLNNM

SEQ ID NO: 29359 - protein, 7 aa, Artificial sequence
  Protein classification predicting sequence
KAKKNNV

SEQ ID NO: 29360 - protein, 6 aa, Artificial sequence
  Protein classification predicting sequence
YVNDAF

SEQ ID NO: 29361 - protein, 9 aa, Artificial sequence
  Protein classification predicting sequence
RVDFNVPMK

SEQ ID NO: 29362 - protein, 7 aa, Artificial sequence
  Protein classification predicting sequence
GTKALMD

SEQ ID NO: 29363 - protein, 7 aa, Artificial sequence
  Protein classification predicting sequence
TVVGGGD

SEQ ID NO: 29364 - protein, 7 aa, Artificial sequence
  Protein classification predicting sequence
GNSLVEE

SEQ ID NO: 29365 - protein, 7 aa, Artificial sequence
  Protein classification predicting sequence
LLENLRF

SEQ ID NO: 29366 - protein, 7 aa, Artificial sequence
  Protein classification predicting sequence
AILGGAK

SEQ ID NO: 29367 - protein, 7 aa, Artificial sequence
  Protein classification predicting sequence
LENLRFH

SEQ ID NO: 29368 - protein, 7 aa, Artificial sequence
  Protein classification predicting sequence
RFHKGEE

SEQ ID NO: 29369 - protein, 5 aa, Artificial sequence
  Protein classification predicting sequence
FWNGP

SEQ ID NO: 29370 - protein, 7 aa, Artificial sequence
  Protein classification predicting sequence
APVACAG

SEQ ID NO: 29371 - protein, 8 aa, Artificial sequence
  Protein classification predicting sequence
DVVCAKEF

SEQ ID NO: 29372 - protein, 7 aa, Artificial sequence
  Protein classification predicting sequence
TVVWNGP

SEQ ID NO: 29373 - protein, 12 aa, Artificial sequence
  Protein classification predicting sequence
DFNVPLKDGVIT

SEQ ID NO: 29374 - protein, 8 aa, Artificial sequence
  Protein classification predicting sequence
KGKKVLVR

SEQ ID NO: 29375 - protein, 7 aa, Artificial sequence
  Protein classification predicting sequence
SLVEEDK

SEQ ID NO: 29376 - protein, 14 aa, Artificial sequence
  Protein classification predicting sequence
ILGGAKVSDKINVI

SEQ ID NO: 29377 - protein, 9 aa, Artificial sequence
  Protein classification predicting sequence
LKDLLAEGV

SEQ ID NO: 29378 - protein, 6 aa, Artificial sequence
  Protein classification predicting sequence
LPHYAG

SEQ ID NO: 29379 - protein, 12 aa, Artificial sequence
  Protein classification predicting sequence
SHISTGGGASLE

SEQ ID NO: 29380 - protein, 8 aa, Artificial sequence
  Protein classification predicting sequence
YTFLKAQG

SEQ ID NO: 29381 - protein, 7 aa, Artificial sequence
  Protein classification predicting sequence
LPGVAIL

SEQ ID NO: 29382 - protein, 11 aa, Artificial sequence
  Protein classification predicting sequence
VVLGGSKVSDK

SEQ ID NO: 29383 - protein, 9 aa, Artificial sequence
  Protein classification predicting sequence
LGGSKVSDK

SEQ ID NO: 29384 - protein, 16 aa, Artificial sequence
  Protein classification predicting sequence
HISTGGGASLEYLEGK

SEQ ID NO: 29385 - protein, 6 aa, Artificial sequence
  Protein classification predicting sequence
FVMDAF

SEQ ID NO: 29386 - protein, 7 aa, Artificial sequence
  Protein classification predicting sequence
ACAGPLL

SEQ ID NO: 29387 - protein, 6 aa, Artificial sequence
  Protein classification predicting sequence
HFGRPK

SEQ ID NO: 29388 - protein, 8 aa, Artificial sequence
  Protein classification predicting sequence
NQRIVAAL

SEQ ID NO: 29389 - protein, 8 aa, Artificial sequence
  Protein classification predicting sequence
GSVILLEN

SEQ ID NO: 29390 - protein, 10 aa, Artificial sequence
  Protein classification predicting sequence
FRKGLTALGD

SEQ ID NO: 29391 - protein, 11 aa, Artificial sequence
  Protein classification predicting sequence
KELEYFAKALE

SEQ ID NO: 29392 - protein, 7 aa, Artificial sequence
  Protein classification predicting sequence
YFAKALE

SEQ ID NO: 29393 - protein, 8 aa, Artificial sequence
  Protein classification predicting sequence
KTILWNGP

SEQ ID NO: 29394 - protein, 12 aa, Artificial sequence
  Protein classification predicting sequence
KKVLVRVDFNVP

SEQ ID NO: 29395 - protein, 7 aa, Artificial sequence
  Protein classification predicting sequence
ITNDNRI

SEQ ID NO: 29396 - protein, 8 aa, Artificial sequence
  Protein classification predicting sequence
AILFSHLG

SEQ ID NO: 29397 - protein, 7 aa, Artificial sequence
  Protein classification predicting sequence
FVPETRG

SEQ ID NO: 29398 - protein, 7 aa, Artificial sequence
  Protein classification predicting sequence
ENTRFED

SEQ ID NO: 29399 - protein, 7 aa, Artificial sequence
  Protein classification predicting sequence
KEIKFIG

SEQ ID NO: 29400 - protein, 7 aa, Artificial sequence
  Protein classification predicting sequence
SLLEEDK

SEQ ID NO: 29401 - protein, 15 aa, Artificial sequence
  Protein classification predicting sequence
VVSKEFSNDAPFHTV

SEQ ID NO: 29402 - protein, 17 aa, Artificial sequence
  Protein classification predicting sequence
SNFAKGTIGVCEAIANL

SEQ ID NO: 29403 - protein, 14 aa, Artificial sequence
  Protein classification predicting sequence
STGGGASLELLEGK

SEQ ID NO: 29404 - protein, 6 aa, Artificial sequence
  Protein classification predicting sequence
EEEGKG

SEQ ID NO: 29405 - protein, 9 aa, Artificial sequence
  Protein classification predicting sequence
HRAHSSMVG

SEQ ID NO: 29406 - protein, 7 aa, Artificial sequence
  Protein classification predicting sequence
KKELDYF

SEQ ID NO: 29407 - protein, 7 aa, Artificial sequence
  Protein classification predicting sequence
ILGGAKV

SEQ ID NO: 29408 - protein, 7 aa, Artificial sequence
  Protein classification predicting sequence
EGKELPG

SEQ ID NO: 29409 - protein, 10 aa, Artificial sequence
  Protein classification predicting sequence
EGKELPGIKA

SEQ ID NO: 29410 - protein, 7 aa, Artificial sequence
  Protein classification predicting sequence
ALPTIKY

SEQ ID NO: 29411 - protein, 6 aa, Artificial sequence
  Protein classification predicting sequence
LFSHLG

SEQ ID NO: 29412 - protein, 9 aa, Artificial sequence
  Protein classification predicting sequence
PETRGEKLE

SEQ ID NO: 29413 - protein, 9 aa, Artificial sequence
  Protein classification predicting sequence
DGKKESKND

SEQ ID NO: 29414 - protein, 12 aa, Artificial sequence
  Protein classification predicting sequence
AILGGAKVSDKI

SEQ ID NO: 29415 - protein, 12 aa, Artificial sequence
  Protein classification predicting sequence
SNFAKGTIGVCE

SEQ ID NO: 29416 - protein, 16 aa, Artificial sequence
  Protein classification predicting sequence
TIIGGGDSAAAAISLG

SEQ ID NO: 29417 - protein, 11 aa, Artificial sequence
  Protein classification predicting sequence
HISTGGGASLE

SEQ ID NO: 29418 - protein, 8 aa, Artificial sequence
  Protein classification predicting sequence
LEGKVLPG

SEQ ID NO: 29419 - protein, 9 aa, Artificial sequence
  Protein classification predicting sequence
LPQKAAGFL

SEQ ID NO: 29420 - protein, 7 aa, Artificial sequence
  Protein classification predicting sequence
IGNSLFD

SEQ ID NO: 29421 - protein, 9 aa, Artificial sequence
  Protein classification predicting sequence
IPDGWMGLD

SEQ ID NO: 29422 - protein, 9 aa, Artificial sequence
  Protein classification predicting sequence
KALESPERP

SEQ ID NO: 29423 - protein, 8 aa, Artificial sequence
  Protein classification predicting sequence
NKGEKKND

SEQ ID NO: 29424 - protein, 9 aa, Artificial sequence
  Protein classification predicting sequence
DAFGTAHRA

SEQ ID NO: 29425 - protein, 9 aa, Artificial sequence
  Protein classification predicting sequence
ALGKALKEP

SEQ ID NO: 29426 - protein, 33 aa, Artificial sequence
  Protein classification predicting sequence
AIVGGSKVSTKLTVLDSLSKIADQLIVGGGIAN

SEQ ID NO: 29427 - protein, 13 aa, Artificial sequence
  Protein classification predicting sequence
GHNVGKSLYEADL

SEQ ID NO: 29428 - protein, 7 aa, Artificial sequence
  Protein classification predicting sequence
WNGPVGV

SEQ ID NO: 29429 - protein, 38 aa, Artificial sequence
  Protein classification predicting sequence
ACAGPLLAAELDALGKALKEPARPMVAIVGGSKVSTKL

SEQ ID NO: 29430 - protein, 18 aa, Artificial sequence
  Protein classification predicting sequence
PARPMVAIVGGSKVSTKL

SEQ ID NO: 29431 - protein, 8 aa, Artificial sequence
  Protein classification predicting sequence
GDVLVLEN

SEQ ID NO: 29432 - protein, 7 aa, Artificial sequence
  Protein classification predicting sequence
AHRSHAS

SEQ ID NO: 29433 - protein, 6 aa, Artificial sequence
  Protein classification predicting sequence
DDTRIR

SEQ ID NO: 29434 - protein, 6 aa, Artificial sequence
  Protein classification predicting sequence
GEEKND

SEQ ID NO: 29435 - protein, 6 aa, Artificial sequence
  Protein classification predicting sequence
NDAFGT

SEQ ID NO: 29436 - protein, 8 aa, Artificial sequence
  Protein classification predicting sequence
IVGGSKVS

SEQ ID NO: 29437 - protein, 9 aa, Artificial sequence
  Protein classification predicting sequence
YFAKALENP

SEQ ID NO: 29438 - protein, 35 aa, Artificial sequence
  Protein classification predicting sequence
KALENPTRPFLAILGGAKVADKIQLIDNLLDKVDS

SEQ ID NO: 29439 - protein, 22 aa, Artificial sequence
  Protein classification predicting sequence
SHVSTGGGASLELLEGKELPGV

SEQ ID NO: 29440 - protein, 8 aa, Artificial sequence
  Protein classification predicting sequence
AALPTIKY

SEQ ID NO: 29441 - protein, 9 aa, Artificial sequence
  Protein classification predicting sequence
KVSDKIGVI

SEQ ID NO: 29442 - protein, 8 aa, Artificial sequence
  Protein classification predicting sequence
PVAKALSE

SEQ ID NO: 29443 - protein, 10 aa, Artificial sequence
  Protein classification predicting sequence
KLGQDVVFPG

SEQ ID NO: 29444 - protein, 21 aa, Artificial sequence
  Protein classification predicting sequence
DGKKESKNDPELGKYWASLGD

SEQ ID NO: 29445 - protein, 36 aa, Artificial sequence
  Protein classification predicting sequence
ELGKYWASLGDGIFVNDAFGTAHRAHASNVGISANV

SEQ ID NO: 29446 - protein, 10 aa, Artificial sequence
  Protein classification predicting sequence
ANAFAGYTEV

SEQ ID NO: 29447 - protein, 25 aa, Artificial sequence
  Protein classification predicting sequence
AIVKQPGVKSIIGGGDSAAAAINLG

SEQ ID NO: 29448 - protein, 11 aa, Artificial sequence
  Protein classification predicting sequence
RIVAALPTIKY

SEQ ID NO: 29449 - protein, 8 aa, Artificial sequence
  Protein classification predicting sequence
HASNVGIA

SEQ ID NO: 29450 - protein, 10 aa, Artificial sequence
  Protein classification predicting sequence
EKAGDKLVLP

SEQ ID NO: 29451 - protein, 6 aa, Artificial sequence
  Protein classification predicting sequence
LDIGPK

SEQ ID NO: 29452 - protein, 6 aa, Artificial sequence
  Protein classification predicting sequence
RPFVAI

SEQ ID NO: 29453 - protein, 9 aa, Artificial sequence
  Protein classification predicting sequence
RIVAALPTI

SEQ ID NO: 29454 - protein, 7 aa, Artificial sequence
  Protein classification predicting sequence
DKEGKSL

SEQ ID NO: 29455 - protein, 10 aa, Artificial sequence
  Protein classification predicting sequence
VNDAFGTAHR

SEQ ID NO: 29456 - protein, 7 aa, Artificial sequence
  Protein classification predicting sequence
KLVLPVD

SEQ ID NO: 29457 - protein, 7 aa, Artificial sequence
  Protein classification predicting sequence
QPSLVGF

SEQ ID NO: 29458 - protein, 6 aa, Artificial sequence
  Protein classification predicting sequence
NGPMGV

SEQ ID NO: 29459 - protein, 10 aa, Artificial sequence
  Protein classification predicting sequence
NAIADSEAFS

SEQ ID NO: 29460 - protein, 7 aa, Artificial sequence
  Protein classification predicting sequence
GKTVLVR

SEQ ID NO: 29461 - protein, 8 aa, Artificial sequence
  Protein classification predicting sequence
GVFENPDF

SEQ ID NO: 29462 - protein, 6 aa, Artificial sequence
  Protein classification predicting sequence
HLGRPK

SEQ ID NO: 29463 - protein, 11 aa, Artificial sequence
  Protein classification predicting sequence
FVSDGFGVVHR

SEQ ID NO: 29464 - protein, 6 aa, Artificial sequence
  Protein classification predicting sequence
HRKHAS

SEQ ID NO: 29465 - protein, 6 aa, Artificial sequence
  Protein classification predicting sequence
VLENTR

SEQ ID NO: 29466 - protein, 9 aa, Artificial sequence
  Protein classification predicting sequence
VLENTRFQD

SEQ ID NO: 29467 - protein, 9 aa, Artificial sequence
  Protein classification predicting sequence
RFDPRETSK

SEQ ID NO: 29468 - protein, 8 aa, Artificial sequence
  Protein classification predicting sequence
GGGDSAAA

SEQ ID NO: 29469 - protein, 8 aa, Artificial sequence
  Protein classification predicting sequence
KIVLFSHL

SEQ ID NO: 29470 - protein, 8 aa, Artificial sequence
  Protein classification predicting sequence
SLLEEDKI

SEQ ID NO: 29471 - protein, 7 aa, Artificial sequence
  Protein classification predicting sequence
TIVWNGP

SEQ ID NO: 29472 - protein, 14 aa, Artificial sequence
  Protein classification predicting sequence
WNGPVGVFEFKNFE

SEQ ID NO: 29473 - protein, 13 aa, Artificial sequence
  Protein classification predicting sequence
DKFSWISTGGGAS

SEQ ID NO: 29474 - protein, 8 aa, Artificial sequence
  Protein classification predicting sequence
ISTGGGAS

SEQ ID NO: 29475 - protein, 10 aa, Artificial sequence
  Protein classification predicting sequence
ISTGGGASLE

SEQ ID NO: 29476 - protein, 8 aa, Artificial sequence
  Protein classification predicting sequence
RITASVPT

SEQ ID NO: 29477 - protein, 6 aa, Artificial sequence
  Protein classification predicting sequence
ESKNDP

SEQ ID NO: 29478 - protein, 8 aa, Artificial sequence
  Protein classification predicting sequence
GGAKVSDK

SEQ ID NO: 29479 - protein, 7 aa, Artificial sequence
  Protein classification predicting sequence
KIVLPVD

SEQ ID NO: 29480 - protein, 6 aa, Artificial sequence
  Protein classification predicting sequence
WASLGD

SEQ ID NO: 29481 - protein, 8 aa, Artificial sequence
  Protein classification predicting sequence
PFVAILGG

SEQ ID NO: 29482 - protein, 9 aa, Artificial sequence
  Protein classification predicting sequence
DDMILDIGP

SEQ ID NO: 29483 - protein, 7 aa, Artificial sequence
  Protein classification predicting sequence
DVDLKGK

SEQ ID NO: 29484 - protein, 13 aa, Artificial sequence
  Protein classification predicting sequence
LLENLRFHIEEEG

SEQ ID NO: 29485 - protein, 6 aa, Artificial sequence
  Protein classification predicting sequence
GNKVKA

SEQ ID NO: 29486 - protein, 11 aa, Artificial sequence
  Protein classification predicting sequence
NDAFGTAHRAH

SEQ ID NO: 29487 - protein, 8 aa, Artificial sequence
  Protein classification predicting sequence
ADKFDKDA

SEQ ID NO: 29488 - protein, 9 aa, Artificial sequence
  Protein classification predicting sequence
GVFEFDKFA

SEQ ID NO: 29489 - protein, 38 aa, Artificial sequence
  Protein classification predicting sequence
VIIGGGDTATVAAKYGVEDKLSHVSTGGGASLELLEGK

SEQ ID NO: 29490 - protein, 7 aa, Artificial sequence
  Protein classification predicting sequence
NKGEKKN

SEQ ID NO: 29491 - protein, 9 aa, Artificial sequence
  Protein classification predicting sequence
STAGGAFLE

SEQ ID NO: 29492 - protein, 9 aa, Artificial sequence
  Protein classification predicting sequence
DFNVPLKDG

SEQ ID NO: 29493 - protein, 6 aa, Artificial sequence
  Protein classification predicting sequence
NPERPF

SEQ ID NO: 29494 - protein, 9 aa, Artificial sequence
  Protein classification predicting sequence
IGGGDSAAA

SEQ ID NO: 29495 - protein, 6 aa, Artificial sequence
  Protein classification predicting sequence
NTRFED

SEQ ID NO: 29496 - protein, 7 aa, Artificial sequence
  Protein classification predicting sequence
VNDAFGT

SEQ ID NO: 29497 - protein, 6 aa, Artificial sequence
  Protein classification predicting sequence
DCVGPE

SEQ ID NO: 29498 - protein, 8 aa, Artificial sequence
  Protein classification predicting sequence
LLENLRFH

SEQ ID NO: 29499 - protein, 15 aa, Artificial sequence
  Protein classification predicting sequence
LLENLRFHVEEEGKG

SEQ ID NO: 29500 - protein, 6 aa, Artificial sequence
  Protein classification predicting sequence
NMLDKV

SEQ ID NO: 29501 - protein, 7 aa, Artificial sequence
  Protein classification predicting sequence
GGGDTAT

SEQ ID NO: 29502 - protein, 9 aa, Artificial sequence
  Protein classification predicting sequence
GGGDTATCC

SEQ ID NO: 29503 - protein, 6 aa, Artificial sequence
  Protein classification predicting sequence
ETPERP

SEQ ID NO: 29504 - protein, 10 aa, Artificial sequence
  Protein classification predicting sequence
GHNVGKSLYE

SEQ ID NO: 29505 - protein, 13 aa, Artificial sequence
  Protein classification predicting sequence
FSIAGGGDTLAAI

SEQ ID NO: 29506 - protein, 11 aa, Artificial sequence
  Protein classification predicting sequence
DVYVNDAFGTA

SEQ ID NO: 29507 - protein, 8 aa, Artificial sequence
  Protein classification predicting sequence
RAHSSMVG

SEQ ID NO: 29508 - protein, 13 aa, Artificial sequence
  Protein classification predicting sequence
IDNLLPKVNSLII

SEQ ID NO: 29509 - protein, 8 aa, Artificial sequence
  Protein classification predicting sequence
AAEGHNVG

SEQ ID NO: 29510 - protein, 19 aa, Artificial sequence
  Protein classification predicting sequence
CDIPVPTDVRVATEFSETA

SEQ ID NO: 29511 - protein, 9 aa, Artificial sequence
  Protein classification predicting sequence
AQRLADILK

SEQ ID NO: 29512 - protein, 8 aa, Artificial sequence
  Protein classification predicting sequence
VARAIADS

SEQ ID NO: 29513 - protein, 10 aa, Artificial sequence
  Protein classification predicting sequence
EGEYNEEFSL

SEQ ID NO: 29514 - protein, 22 aa, Artificial sequence
  Protein classification predicting sequence
CLEAGAKVMVTSHLGRPTEGEY

SEQ ID NO: 29515 - protein, 12 aa, Artificial sequence
  Protein classification predicting sequence
PVVNYLNDALDC

SEQ ID NO: 29516 - protein, 18 aa, Artificial sequence
  Protein classification predicting sequence
FVMDAFGTAHRAQASTHG

SEQ ID NO: 29517 - protein, 8 aa, Artificial sequence
  Protein classification predicting sequence
ELEALGKA

SEQ ID NO: 29518 - protein, 9 aa, Artificial sequence
  Protein classification predicting sequence
RPLVAIVGG

SEQ ID NO: 29519 - protein, 9 aa, Artificial sequence
  Protein classification predicting sequence
VGGGIANTF

SEQ ID NO: 29520 - protein, 21 aa, Artificial sequence
  Protein classification predicting sequence
CAIPVATDVACAKAFDENAEA

SEQ ID NO: 29521 - protein, 16 aa, Artificial sequence
  Protein classification predicting sequence
NAKTILWNGPVGVFEF

SEQ ID NO: 29522 - protein, 6 aa, Artificial sequence
  Protein classification predicting sequence
AGGGDT

SEQ ID NO: 29523 - protein, 22 aa, Artificial sequence
  Protein classification predicting sequence
SYISTGGGAFLEFVEGKVLPAV

SEQ ID NO: 29524 - protein, 7 aa, Artificial sequence
  Protein classification predicting sequence
HQSRPGK

SEQ ID NO: 29525 - protein, 5 aa, Artificial sequence
  Protein classification predicting sequence
NGPMG

SEQ ID NO: 29526 - protein, 6 aa, Artificial sequence
  Protein classification predicting sequence
KALENP

SEQ ID NO: 29527 - protein, 8 aa, Artificial sequence
  Protein classification predicting sequence
DKIQLIKN

SEQ ID NO: 29528 - protein, 7 aa, Artificial sequence
  Protein classification predicting sequence
NLLDKVD

SEQ ID NO: 29529 - protein, 8 aa, Artificial sequence
  Protein classification predicting sequence
EKAKAKNV

SEQ ID NO: 29530 - protein, 7 aa, Artificial sequence
  Protein classification predicting sequence
EGKTLPG

SEQ ID NO: 29531 - protein, 10 aa, Artificial sequence
  Protein classification predicting sequence
AHRAHASTEG

SEQ ID NO: 29532 - protein, 10 aa, Artificial sequence
  Protein classification predicting sequence
VLVRVDFNVP

SEQ ID NO: 29533 - protein, 6 aa, Artificial sequence
  Protein classification predicting sequence
PVAARL

SEQ ID NO: 29534 - protein, 6 aa, Artificial sequence
  Protein classification predicting sequence
GVTKFL

SEQ ID NO: 29535 - protein, 8 aa, Artificial sequence
  Protein classification predicting sequence
GLDVGKSL

SEQ ID NO: 29536 - protein, 7 aa, Artificial sequence
  Protein classification predicting sequence
KMTDLDL

SEQ ID NO: 29537 - protein, 7 aa, Artificial sequence
  Protein classification predicting sequence
GKRVLIR

SEQ ID NO: 29538 - protein, 10 aa, Artificial sequence
  Protein classification predicting sequence
WNGPVGVFEF

SEQ ID NO: 29539 - protein, 13 aa, Artificial sequence
  Protein classification predicting sequence
WNGPVGVFEFDQF

SEQ ID NO: 29540 - protein, 7 aa, Artificial sequence
  Protein classification predicting sequence
ANAIADS

SEQ ID NO: 29541 - protein, 6 aa, Artificial sequence
  Protein classification predicting sequence
ASLPTI

SEQ ID NO: 29542 - protein, 15 aa, Artificial sequence
  Protein classification predicting sequence
VANGPMGVFEREEFA

SEQ ID NO: 29543 - protein, 8 aa, Artificial sequence
  Protein classification predicting sequence
HISTGGGA

SEQ ID NO: 29544 - protein, 7 aa, Artificial sequence
  Protein classification predicting sequence
AHRSQPS

SEQ ID NO: 29545 - protein, 8 aa, Artificial sequence
  Protein classification predicting sequence
ILDEFYPY

SEQ ID NO: 29546 - protein, 12 aa, Artificial sequence
  Protein classification predicting sequence
SDARFRAVLPTI

SEQ ID NO: 29547 - protein, 11 aa, Artificial sequence
  Protein classification predicting sequence
LENLRFSAEEV

SEQ ID NO: 29548 - protein, 10 aa, Artificial sequence
  Protein classification predicting sequence
FTLAKGFDLG

SEQ ID NO: 29549 - protein, 10 aa, Artificial sequence
  Protein classification predicting sequence
VMVTSHLGRP

SEQ ID NO: 29550 - protein, 7 aa, Artificial sequence
  Protein classification predicting sequence
RLSELLG

SEQ ID NO: 29551 - protein, 24 aa, Artificial sequence
  Protein classification predicting sequence
LCDVYVNDAFGTAHRAEATTHGIA

SEQ ID NO: 29552 - protein, 12 aa, Artificial sequence
  Protein classification predicting sequence
YISTGGGAFLEF

SEQ ID NO: 29553 - protein, 16 aa, Artificial sequence
  Protein classification predicting sequence
YISTGGGAFLEFLEGK

SEQ ID NO: 29554 - protein, 12 aa, Artificial sequence
  Protein classification predicting sequence
VNDAFSAAHRAH

SEQ ID NO: 29555 - protein, 8 aa, Artificial sequence
  Protein classification predicting sequence
CAIILPVD

SEQ ID NO: 29556 - protein, 7 aa, Artificial sequence
  Protein classification predicting sequence
DCIGDKA

SEQ ID NO: 29557 - protein, 7 aa, Artificial sequence
  Protein classification predicting sequence
VADDFTY

SEQ ID NO: 29558 - protein, 8 aa, Artificial sequence
  Protein classification predicting sequence
STGGGASL

SEQ ID NO: 29559 - protein, 9 aa, Artificial sequence
  Protein classification predicting sequence
GKVTSDARI

SEQ ID NO: 29560 - protein, 13 aa, Artificial sequence
  Protein classification predicting sequence
DQLIVGGGIANTF

SEQ ID NO: 29561 - protein, 13 aa, Artificial sequence
  Protein classification predicting sequence
DEQILDIGDASAQ

SEQ ID NO: 29562 - protein, 21 aa, Artificial sequence
  Protein classification predicting sequence
VGKSLYEADLVDEAKRLLTTC

SEQ ID NO: 29563 - protein, 23 aa, Artificial sequence
  Protein classification predicting sequence
DVRVATEFSETAPATLKSVNDVK

SEQ ID NO: 29564 - protein, 12 aa, Artificial sequence
  Protein classification predicting sequence
KRVLIRVDFNVP

SEQ ID NO: 29565 - protein, 10 aa, Artificial sequence
  Protein classification predicting sequence
VLIRVDFNVP

SEQ ID NO: 29566 - protein, 8 aa, Artificial sequence
  Protein classification predicting sequence
MDEVVKAT

SEQ ID NO: 29567 - protein, 7 aa, Artificial sequence
  Protein classification predicting sequence
TIIGGGD

SEQ ID NO: 29568 - protein, 17 aa, Artificial sequence
  Protein classification predicting sequence
SHVSTGGGASLELLEGK

SEQ ID NO: 29569 - protein, 13 aa, Artificial sequence
  Protein classification predicting sequence
DKIQLIDNLLDKV

SEQ ID NO: 29570 - protein, 7 aa, Artificial sequence
  Protein classification predicting sequence
GGMAFTF

SEQ ID NO: 29571 - protein, 9 aa, Artificial sequence
  Protein classification predicting sequence
GGGDTATVA

SEQ ID NO: 29572 - protein, 12 aa, Artificial sequence
  Protein classification predicting sequence
ENVRFNKGEKKN

SEQ ID NO: 29573 - protein, 9 aa, Artificial sequence
  Protein classification predicting sequence
ELDALGKAL

SEQ ID NO: 29574 - protein, 7 aa, Artificial sequence
  Protein classification predicting sequence
PTDVVVA

SEQ ID NO: 29575 - protein, 22 aa, Artificial sequence
  Protein classification predicting sequence
YISTGGGAFLEFLEGKELPAVA

SEQ ID NO: 29576 - protein, 7 aa, Artificial sequence
  Protein classification predicting sequence
ILFSHLG

SEQ ID NO: 29577 - protein, 11 aa, Artificial sequence
  Protein classification predicting sequence
IGGGDSAAAAI

SEQ ID NO: 29578 - protein, 18 aa, Artificial sequence
  Protein classification predicting sequence
KDGEITNDNRIVQALPTI

SEQ ID NO: 29579 - protein, 9 aa, Artificial sequence
  Protein classification predicting sequence
AGYLMEKEI

SEQ ID NO: 29580 - protein, 6 aa, Artificial sequence
  Protein classification predicting sequence
LMEKEI

SEQ ID NO: 29581 - protein, 8 aa, Artificial sequence
  Protein classification predicting sequence
KAQGKEIG

SEQ ID NO: 29582 - protein, 16 aa, Artificial sequence
  Protein classification predicting sequence
SLLEEDKIDFAKDLLE

SEQ ID NO: 29583 - protein, 11 aa, Artificial sequence
  Protein classification predicting sequence
AKEFSNDAKIT

SEQ ID NO: 29584 - protein, 20 aa, Artificial sequence
  Protein classification predicting sequence
GAHTVVWNGPMGVFEFSNFA

SEQ ID NO: 29585 - protein, 53 aa, Artificial sequence
  Protein classification predicting sequence
EDLDGKKESKNDPELGKYWASLGDVFVNDAFGTAHREHASNVGISTHLETAAG

SEQ ID NO: 29586 - protein, 29 aa, Artificial sequence
  Protein classification predicting sequence
KPVVAILGGAKVSDKINVIKNLVNIADKI

SEQ ID NO: 29587 - protein, 28 aa, Artificial sequence
  Protein classification predicting sequence
DFTHISTGGGASLEYLEGKELPGIKAIN

SEQ ID NO: 29588 - protein, 7 aa, Artificial sequence
  Protein classification predicting sequence
IPADQEG

SEQ ID NO: 29589 - protein, 7 aa, Artificial sequence
  Protein classification predicting sequence
NVPVKDG

SEQ ID NO: 29590 - protein, 12 aa, Artificial sequence
  Protein classification predicting sequence
GKSLAPVAADLA

SEQ ID NO: 29591 - protein, 9 aa, Artificial sequence
  Protein classification predicting sequence
VVFPGVTRG

SEQ ID NO: 29592 - protein, 19 aa, Artificial sequence
  Protein classification predicting sequence
KAVAGFLLENEIAYIQEAV

SEQ ID NO: 29593 - protein, 17 aa, Artificial sequence
  Protein classification predicting sequence
NGKLILPVDSKEANAFA

SEQ ID NO: 29594 - protein, 13 aa, Artificial sequence
  Protein classification predicting sequence
GFLGLDIGPKSIA

SEQ ID NO: 29595 - protein, 17 aa, Artificial sequence
  Protein classification predicting sequence
AINALEDGQVLLVENTR

SEQ ID NO: 29596 - protein, 8 aa, Artificial sequence
  Protein classification predicting sequence
VLLVENTR

SEQ ID NO: 29597 - protein, 65 aa, Artificial sequence
  Protein classification predicting sequence
AKLTVKDVDLKGKKVLVRVDFNVPLKDGVITNDNRITAALPTIKYIIEQGGRAILFSHLGRVKEE

SEQ ID NO: 29598 - protein, 11 aa, Artificial sequence
  Protein classification predicting sequence
ELGKYWASLGD

SEQ ID NO: 29599 - protein, 21 aa, Artificial sequence
  Protein classification predicting sequence
KAQGIEIGNSLVEEDKLDVAK

SEQ ID NO: 29600 - protein, 21 aa, Artificial sequence
  Protein classification predicting sequence
ADKFSWISTGGGASMELLEGK

SEQ ID NO: 29601 - protein, 7 aa, Artificial sequence
  Protein classification predicting sequence
EEKNDPE

SEQ ID NO: 29602 - protein, 14 aa, Artificial sequence
  Protein classification predicting sequence
KMSHISTGGGASLE

SEQ ID NO: 29603 - protein, 11 aa, Artificial sequence
  Protein classification predicting sequence
EEDKLDLAKSL

SEQ ID NO: 29604 - protein, 9 aa, Artificial sequence
  Protein classification predicting sequence
RPYAVVLGG

SEQ ID NO: 29605 - protein, 7 aa, Artificial sequence
  Protein classification predicting sequence
DKIELAK

SEQ ID NO: 29606 - protein, 11 aa, Artificial sequence
  Protein classification predicting sequence
FVNDAFGTAHR

SEQ ID NO: 29607 - protein, 15 aa, Artificial sequence
  Protein classification predicting sequence
FVNDAFGTAHREHAS

SEQ ID NO: 29608 - protein, 10 aa, Artificial sequence
  Protein classification predicting sequence
VVLMSHLGRP

SEQ ID NO: 29609 - protein, 9 aa, Artificial sequence
  Protein classification predicting sequence
GVFEFEKFA

SEQ ID NO: 29610 - protein, 7 aa, Artificial sequence
  Protein classification predicting sequence
MGLDIGP

SEQ ID NO: 29611 - protein, 7 aa, Artificial sequence
  Protein classification predicting sequence
LELLEGK

SEQ ID NO: 29612 - protein, 12 aa, Artificial sequence
  Protein classification predicting sequence
EEFSLLPVVNYL

SEQ ID NO: 29613 - protein, 26 aa, Artificial sequence
  Protein classification predicting sequence
KYAALCDVFVMDAFGTAHRAQASTHG

SEQ ID NO: 29614 - protein, 16 aa, Artificial sequence
  Protein classification predicting sequence
VAIVGGSKVSTKLTVL

SEQ ID NO: 29615 - protein, 12 aa, Artificial sequence
  Protein classification predicting sequence
VGGGIANTFIAA

SEQ ID NO: 29616 - protein, 23 aa, Artificial sequence
  Protein classification predicting sequence
NAKTILWNGPVGVFEFKNFEAGT

SEQ ID NO: 29617 - protein, 17 aa, Artificial sequence
  Protein classification predicting sequence
SYISTGGGAFLEFVEGK

SEQ ID NO: 29618 - protein, 12 aa, Artificial sequence
  Protein classification predicting sequence
LPAVEMLEARAK

SEQ ID NO: 29619 - protein, 10 aa, Artificial sequence
  Protein classification predicting sequence
LSKKYAALCD

SEQ ID NO: 29620 - protein, 39 aa, Artificial sequence
  Protein classification predicting sequence
VAIVGGSKVSTKLTVLESLSKIADQLVVGGGIANTFIAA

SEQ ID NO: 29621 - protein, 6 aa, Artificial sequence
  Protein classification predicting sequence
LSKKYA

SEQ ID NO: 29622 - protein, 10 aa, Artificial sequence
  Protein classification predicting sequence
YISTGGGAFL

SEQ ID NO: 29623 - protein, 7 aa, Artificial sequence
  Protein classification predicting sequence
AIVGGAK

SEQ ID NO: 29624 - protein, 6 aa, Artificial sequence
  Protein classification predicting sequence
MTDLDL

SEQ ID NO: 29625 - protein, 6 aa, Artificial sequence
  Protein classification predicting sequence
GAAVMV

SEQ ID NO: 29626 - protein, 12 aa, Artificial sequence
  Protein classification predicting sequence
AIVAGSKVSTKL

SEQ ID NO: 29627 - protein, 8 aa, Artificial sequence
  Protein classification predicting sequence
GSKVSTKL

SEQ ID NO: 29628 - protein, 9 aa, Artificial sequence
  Protein classification predicting sequence
ILDIGPQTA

SEQ ID NO: 29629 - protein, 13 aa, Artificial sequence
  Protein classification predicting sequence
TVVWNGPVGVFEF

SEQ ID NO: 29630 - protein, 8 aa, Artificial sequence
  Protein classification predicting sequence
KRVLVRVD

SEQ ID NO: 29631 - protein, 8 aa, Artificial sequence
  Protein classification predicting sequence
GGGIANTF

SEQ ID NO: 29632 - protein, 7 aa, Artificial sequence
  Protein classification predicting sequence
SLLGKDV

SEQ ID NO: 29633 - protein, 10 aa, Artificial sequence
  Protein classification predicting sequence
IRADLNVPVK

SEQ ID NO: 29634 - protein, 36 aa, Artificial sequence
  Protein classification predicting sequence
ALKQGAKVMVTSHLGRPTEGEYNEEFSLLPVVNYLK

SEQ ID NO: 29635 - protein, 17 aa, Artificial sequence
  Protein classification predicting sequence
GELVVLENVRFNKGEKK

SEQ ID NO: 29636 - protein, 11 aa, Artificial sequence
  Protein classification predicting sequence
LIVGGGIANTF

SEQ ID NO: 29637 - protein, 33 aa, Artificial sequence
  Protein classification predicting sequence
LAEILKNAKTILWNGPVGVFEFPNFRKGTEIVA

SEQ ID NO: 29638 - protein, 10 aa, Artificial sequence
  Protein classification predicting sequence
LPAFAGRAMQ

SEQ ID NO: 29639 - protein, 8 aa, Artificial sequence
  Protein classification predicting sequence
DVVVAKEF

SEQ ID NO: 29640 - protein, 8 aa, Artificial sequence
  Protein classification predicting sequence
EGKELPGV

SEQ ID NO: 29641 - protein, 13 aa, Artificial sequence
  Protein classification predicting sequence
GKFLDPLADKLLV

SEQ ID NO: 29642 - protein, 10 aa, Artificial sequence
  Protein classification predicting sequence
REFAVTGLRL

SEQ ID NO: 29643 - protein, 14 aa, Artificial sequence
  Protein classification predicting sequence
TRFGAFLDPVADKV

SEQ ID NO: 29644 - protein, 11 aa, Artificial sequence
  Protein classification predicting sequence
FGAFLDPVADK

SEQ ID NO: 29645 - protein, 11 aa, Artificial sequence
  Protein classification predicting sequence
SALREWMAELG

SEQ ID NO: 29646 - protein, 10 aa, Artificial sequence
  Protein classification predicting sequence
LTLWSMLQYL

SEQ ID NO: 29647 - protein, 9 aa, Artificial sequence
  Protein classification predicting sequence
FRVILIPFF

SEQ ID NO: 29648 - protein, 12 aa, Artificial sequence
  Protein classification predicting sequence
FILFALVDFGFG

SEQ ID NO: 29649 - protein, 24 aa, Artificial sequence
  Protein classification predicting sequence
LVTNMGKFLDPLADKLLVASALIV

SEQ ID NO: 29650 - protein, 47 aa, Artificial sequence
  Protein classification predicting sequence
TNSVVAIIIIAREFAVTGLRLLQIEQGFVSAAGQLGKIKTAVTMVAI

SEQ ID NO: 29651 - protein, 18 aa, Artificial sequence
  Protein classification predicting sequence
FTILSGIEYFYKGRDVFK

SEQ ID NO: 29652 - protein, 27 aa, Artificial sequence
  Protein classification predicting sequence
FYENYEPKEILGRGVSSVVRRCIHKPT

SEQ ID NO: 29653 - protein, 16 aa, Artificial sequence
  Protein classification predicting sequence
VEEVRHFSPRGKFKVI

SEQ ID NO: 29654 - protein, 11 aa, Artificial sequence
  Protein classification predicting sequence
GELFDYLTEKV

SEQ ID NO: 29655 - protein, 14 aa, Artificial sequence
  Protein classification predicting sequence
MNIKLTDFGFSCQL

SEQ ID NO: 29656 - protein, 11 aa, Artificial sequence
  Protein classification predicting sequence
GRGVSSVVRRC

SEQ ID NO: 29657 - protein, 12 aa, Artificial sequence
  Protein classification predicting sequence
TLLAGSPPFWHR

SEQ ID NO: 29658 - protein, 7 aa, Artificial sequence
  Protein classification predicting sequence
LMLRMIM

SEQ ID NO: 29659 - protein, 8 aa, Artificial sequence
  Protein classification predicting sequence
QQNRAALF

SEQ ID NO: 29660 - protein, 9 aa, Artificial sequence
  Protein classification predicting sequence
DVIHTENKL

SEQ ID NO: 29661 - protein, 7 aa, Artificial sequence
  Protein classification predicting sequence
KLTLVFE

SEQ ID NO: 29662 - protein, 21 aa, Artificial sequence
  Protein classification predicting sequence
LDSEEGTPSTAIREISLMKEL

SEQ ID NO: 29663 - protein, 6 aa, Artificial sequence
  Protein classification predicting sequence
GLAFCH

SEQ ID NO: 29664 - protein, 7 aa, Artificial sequence
  Protein classification predicting sequence
DLKKFMD

SEQ ID NO: 29665 - protein, 14 aa, Artificial sequence
  Protein classification predicting sequence
RVLHRDLKPQNLLI

SEQ ID NO: 29666 - protein, 15 aa, Artificial sequence
  Protein classification predicting sequence
RVLHRDLKPQNLLIN

SEQ ID NO: 29667 - protein, 8 aa, Artificial sequence
  Protein classification predicting sequence
GRPLFPGS

SEQ ID NO: 29668 - protein, 8 aa, Artificial sequence
  Protein classification predicting sequence
YYLSMEFL

SEQ ID NO: 29669 - protein, 13 aa, Artificial sequence
  Protein classification predicting sequence
DAALGNGGLGRLA

SEQ ID NO: 29670 - protein, 8 aa, Artificial sequence
  Protein classification predicting sequence
YDTPVPGY

SEQ ID NO: 29671 - protein, 8 aa, Artificial sequence
  Protein classification predicting sequence
GKELRLKQ

SEQ ID NO: 29672 - protein, 6 aa, Artificial sequence
  Protein classification predicting sequence
LPEALE

SEQ ID NO: 29673 - protein, 12 aa, Artificial sequence
  Protein classification predicting sequence
KRIHEYKRQLLN

SEQ ID NO: 29674 - protein, 7 aa, Artificial sequence
  Protein classification predicting sequence
GKAAPGY

SEQ ID NO: 29675 - protein, 8 aa, Artificial sequence
  Protein classification predicting sequence
IKLINSVA

SEQ ID NO: 29676 - protein, 10 aa, Artificial sequence
  Protein classification predicting sequence
EASGTSNMKF

SEQ ID NO: 29677 - protein, 17 aa, Artificial sequence
  Protein classification predicting sequence
FNRHLHFTLVKDRNVAT

SEQ ID NO: 29678 - protein, 43 aa, Artificial sequence
  Protein classification predicting sequence
EELEEIEEDAGLGNGGLGRLAACFLDSMATLGLAAYGYGIRYE

SEQ ID NO: 29679 - protein, 7 aa, Artificial sequence
  Protein classification predicting sequence
DTQVVLA

SEQ ID NO: 29680 - protein, 9 aa, Artificial sequence
  Protein classification predicting sequence
VNTMRLWSA

SEQ ID NO: 29681 - protein, 7 aa, Artificial sequence
  Protein classification predicting sequence
APNDFNL

SEQ ID NO: 29682 - protein, 6 aa, Artificial sequence
  Protein classification predicting sequence
FVPRTV

SEQ ID NO: 29683 - protein, 6 aa, Artificial sequence
  Protein classification predicting sequence
FIFGMR

SEQ ID NO: 29684 - protein, 6 aa, Artificial sequence
  Protein classification predicting sequence
YQLGLD

SEQ ID NO: 29685 - protein, 12 aa, Artificial sequence
  Protein classification predicting sequence
GWQVEEADDWLR

SEQ ID NO: 29686 - protein, 17 aa, Artificial sequence
  Protein classification predicting sequence
VKRIHEYKRQLLNCLHV

SEQ ID NO: 29687 - protein, 21 aa, Artificial sequence
  Protein classification predicting sequence
FNRHLHFTLVKDRNVATPRDY

SEQ ID NO: 29688 - protein, 8 aa, Artificial sequence
  Protein classification predicting sequence
EEADDWLR

SEQ ID NO: 29689 - protein, 6 aa, Artificial sequence
  Protein classification predicting sequence
FDAFPD

SEQ ID NO: 29690 - protein, 10 aa, Artificial sequence
  Protein classification predicting sequence
KRINMAHLCI

SEQ ID NO: 29691 - protein, 17 aa, Artificial sequence
  Protein classification predicting sequence
IFLENYRVSLAEKVIPA

SEQ ID NO: 29692 - protein, 22 aa, Artificial sequence
  Protein classification predicting sequence
DLSEQISTAGTEASGTGNMKFM

SEQ ID NO: 29693 - protein, 24 aa, Artificial sequence
  Protein classification predicting sequence
NGALTIGTMDGANVEMAEEAGEEN

SEQ ID NO: 29694 - protein, 24 aa, Artificial sequence
  Protein classification predicting sequence
DVAALDKKGYEAKEYYEALPELKL

SEQ ID NO: 29695 - protein, 13 aa, Artificial sequence
  Protein classification predicting sequence
GFFSPKQPDLFKD

SEQ ID NO: 29696 - protein, 8 aa, Artificial sequence
  Protein classification predicting sequence
PLTDQEKR

SEQ ID NO: 29697 - protein, 13 aa, Artificial sequence
  Protein classification predicting sequence
VKRIHEYKRQLLN

SEQ ID NO: 29698 - protein, 15 aa, Artificial sequence
  Protein classification predicting sequence
GYNAQEYYDRIPELR

SEQ ID NO: 29699 - protein, 8 aa, Artificial sequence
  Protein classification predicting sequence
EFLLGRSL

SEQ ID NO: 29700 - protein, 7 aa, Artificial sequence
  Protein classification predicting sequence
LRLKQQY

SEQ ID NO: 29701 - protein, 9 aa, Artificial sequence
  Protein classification predicting sequence
LKVVFIPNY

SEQ ID NO: 29702 - protein, 11 aa, Artificial sequence
  Protein classification predicting sequence
ISTAGTEASGT

SEQ ID NO: 29703 - protein, 6 aa, Artificial sequence
  Protein classification predicting sequence
DWDKAW

SEQ ID NO: 29704 - protein, 20 aa, Artificial sequence
  Protein classification predicting sequence
LDQRGYNAQEYYDRIPELRQ

SEQ ID NO: 29705 - protein, 7 aa, Artificial sequence
  Protein classification predicting sequence
KCQEKVS

SEQ ID NO: 29706 - protein, 23 aa, Artificial sequence
  Protein classification predicting sequence
WLRYGNPWEKARPEFTLPVHFYG

SEQ ID NO: 29707 - protein, 70 aa, Artificial sequence
  Protein classification predicting sequence
VEHTSQGAKWVDTQVVLAMPYDTPVPGYRNNVVNTMRLWSAKAPNDFNLKDFNVGGYIQAVLDRNLAENI

SEQ ID NO: 29708 - protein, 14 aa, Artificial sequence
  Protein classification predicting sequence
YIQAVLDRNLAENI

SEQ ID NO: 29709 - protein, 24 aa, Artificial sequence
  Protein classification predicting sequence
ETLLPRHLQIIYEINQRFLNRVAA

SEQ ID NO: 29710 - protein, 7 aa, Artificial sequence
  Protein classification predicting sequence
HMAKMII

SEQ ID NO: 29711 - protein, 17 aa, Artificial sequence
  Protein classification predicting sequence
VGDRLRVIFLENYRVSL

SEQ ID NO: 29712 - protein, 16 aa, Artificial sequence
  Protein classification predicting sequence
FIRDVAKVKQENKLKF

SEQ ID NO: 29713 - protein, 10 aa, Artificial sequence
  Protein classification predicting sequence
RWIRTQQHYY

SEQ ID NO: 29714 - protein, 13 aa, Artificial sequence
  Protein classification predicting sequence
EYKVHINPNSLFD

SEQ ID NO: 29715 - protein, 13 aa, Artificial sequence
  Protein classification predicting sequence
MHHDRFKVFADYE

SEQ ID NO: 29716 - protein, 37 aa, Artificial sequence
  Protein classification predicting sequence
LYKNPREWTRMVIRNIATSGKFSSDRTIAQYAREIWG

SEQ ID NO: 29717 - protein, 18 aa, Artificial sequence
  Protein classification predicting sequence
NLGLQNACDEAIYQLGLD

SEQ ID NO: 29718 - protein, 12 aa, Artificial sequence
  Protein classification predicting sequence
NNTVNTMRLWSA

SEQ ID NO: 29719 - protein, 15 aa, Artificial sequence
  Protein classification predicting sequence
GSHAVNGVARIHSEI

SEQ ID NO: 29720 - protein, 9 aa, Artificial sequence
  Protein classification predicting sequence
FKDFYELEP

SEQ ID NO: 29721 - protein, 7 aa, Artificial sequence
  Protein classification predicting sequence
TLYNRIK

SEQ ID NO: 29722 - protein, 7 aa, Artificial sequence
  Protein classification predicting sequence
ENLFIFG

SEQ ID NO: 29723 - protein, 11 aa, Artificial sequence
  Protein classification predicting sequence
HDRFKVFADYE

SEQ ID NO: 29724 - protein, 12 aa, Artificial sequence
  Protein classification predicting sequence
ACDEATYQLGLD

SEQ ID NO: 29725 - protein, 7 aa, Artificial sequence
  Protein classification predicting sequence
LKDFNVG

SEQ ID NO: 29726 - protein, 50 aa, Artificial sequence
  Protein classification predicting sequence
AVLDRNLAENISRVLYPNDNFFEGKELRLKQEYFVVAATLQDIIRRFKSS

SEQ ID NO: 29727 - protein, 9 aa, Artificial sequence
  Protein classification predicting sequence
FGCRDPVRT

SEQ ID NO: 29728 - protein, 12 aa, Artificial sequence
  Protein classification predicting sequence
FLTDLSQLKKLL

SEQ ID NO: 29729 - protein, 22 aa, Artificial sequence
  Protein classification predicting sequence
SMFDVHVKRIHEYKRQLLNCLH

SEQ ID NO: 29730 - protein, 16 aa, Artificial sequence
  Protein classification predicting sequence
VKRIHEYKRQLLNCLH

SEQ ID NO: 29731 - protein, 8 aa, Artificial sequence
  Protein classification predicting sequence
YNRIKKDP

SEQ ID NO: 29732 - protein, 22 aa, Artificial sequence
  Protein classification predicting sequence
VIFLENYRVSLAEKVIPAADLS

SEQ ID NO: 29733 - protein, 11 aa, Artificial sequence
  Protein classification predicting sequence
LPVHFYGRVEH

SEQ ID NO: 29734 - protein, 21 aa, Artificial sequence
  Protein classification predicting sequence
WLDTQVVLAMPYDTPVPGYKN

SEQ ID NO: 29735 - protein, 18 aa, Artificial sequence
  Protein classification predicting sequence
TVNTMRLWSAKAPNDFKL

SEQ ID NO: 29736 - protein, 19 aa, Artificial sequence
  Protein classification predicting sequence
FETFPDKVAIQLNDTHPAL

SEQ ID NO: 29737 - protein, 10 aa, Artificial sequence
  Protein classification predicting sequence
VAIQLNDTHP

SEQ ID NO: 29738 - protein, 12 aa, Artificial sequence
  Protein classification predicting sequence
VAIQLNDTHPAL

SEQ ID NO: 29739 - protein, 7 aa, Artificial sequence
  Protein classification predicting sequence
IPELMRI

SEQ ID NO: 29740 - protein, 10 aa, Artificial sequence
  Protein classification predicting sequence
IPELMRILVD

SEQ ID NO: 29741 - protein, 16 aa, Artificial sequence
  Protein classification predicting sequence
IPELMRILVDVEKVDW

SEQ ID NO: 29742 - protein, 38 aa, Artificial sequence
  Protein classification predicting sequence
KAWEITKKTCAYTNHTVLPEALERWPVSMFEKLLPRHL

SEQ ID NO: 29743 - protein, 62 aa, Artificial sequence
  Protein classification predicting sequence
IIYAINQRHLDHVAALFPGDVDRLRRMSVIEEGDCKRINMAHLCVIGSHAVNGVARIHSEIV

SEQ ID NO: 29744 - protein, 6 aa, Artificial sequence
  Protein classification predicting sequence
SGFFSP

SEQ ID NO: 29745 - protein, 7 aa, Artificial sequence
  Protein classification predicting sequence
KQTYYLS

SEQ ID NO: 29746 - protein, 11 aa, Artificial sequence
  Protein classification predicting sequence
VNGVAKIHSDI

SEQ ID NO: 29747 - protein, 6 aa, Artificial sequence
  Protein classification predicting sequence
NKTNGI

SEQ ID NO: 29748 - protein, 7 aa, Artificial sequence
  Protein classification predicting sequence
YKRQLLN

SEQ ID NO: 29749 - protein, 7 aa, Artificial sequence
  Protein classification predicting sequence
SEQISTA

SEQ ID NO: 29750 - protein, 8 aa, Artificial sequence
  Protein classification predicting sequence
NGALTIGT

SEQ ID NO: 29751 - protein, 7 aa, Artificial sequence
  Protein classification predicting sequence
FSSDRTI

SEQ ID NO: 29752 - protein, 7 aa, Artificial sequence
  Protein classification predicting sequence
EYAKDIW

SEQ ID NO: 29753 - protein, 5 aa, Artificial sequence
  Protein classification predicting sequence
GNPWE

SEQ ID NO: 29754 - protein, 6 aa, Artificial sequence
  Protein classification predicting sequence
PVHFYG

SEQ ID NO: 29755 - protein, 9 aa, Artificial sequence
  Protein classification predicting sequence
ELRLKQEYF

SEQ ID NO: 29756 - protein, 8 aa, Artificial sequence
  Protein classification predicting sequence
LPEALERW

SEQ ID NO: 29757 - protein, 8 aa, Artificial sequence
  Protein classification predicting sequence
NYRVSLAE

SEQ ID NO: 29758 - protein, 10 aa, Artificial sequence
  Protein classification predicting sequence
DLSEQISTAG

SEQ ID NO: 29759 - protein, 7 aa, Artificial sequence
  Protein classification predicting sequence
KRVYYLS

SEQ ID NO: 29760 - protein, 11 aa, Artificial sequence
  Protein classification predicting sequence
ENISRVLYPND

SEQ ID NO: 29761 - protein, 6 aa, Artificial sequence
  Protein classification predicting sequence
IIYEIN

SEQ ID NO: 29762 - protein, 6 aa, Artificial sequence
  Protein classification predicting sequence
FNRHLH

SEQ ID NO: 29763 - protein, 8 aa, Artificial sequence
  Protein classification predicting sequence
TLVKDRNV

SEQ ID NO: 29764 - protein, 8 aa, Artificial sequence
  Protein classification predicting sequence
RDYYFALA

SEQ ID NO: 29765 - protein, 18 aa, Artificial sequence
  Protein classification predicting sequence
VGRWIRTQQHYYEKDPKR

SEQ ID NO: 29766 - protein, 6 aa, Artificial sequence
  Protein classification predicting sequence
YYLSLE

SEQ ID NO: 29767 - protein, 7 aa, Artificial sequence
  Protein classification predicting sequence
NTMINLG

SEQ ID NO: 29768 - protein, 37 aa, Artificial sequence
  Protein classification predicting sequence
EEDAGLGNGGLGRLAACFLDSMATLGLAAYGYGIRYE

SEQ ID NO: 29769 - protein, 6 aa, Artificial sequence
  Protein classification predicting sequence
KWVDTQ

SEQ ID NO: 29770 - protein, 37 aa, Artificial sequence
  Protein classification predicting sequence
YIQAVLDRNLAENISRVLYPNDNFFEGKELRLKQEYF

SEQ ID NO: 29771 - protein, 10 aa, Artificial sequence
  Protein classification predicting sequence
AATLQDIIRR

SEQ ID NO: 29772 - protein, 7 aa, Artificial sequence
  Protein classification predicting sequence
KASKFGS

SEQ ID NO: 29773 - protein, 18 aa, Artificial sequence
  Protein classification predicting sequence
CAYTNHTVLPEALERWPV

SEQ ID NO: 29774 - protein, 10 aa, Artificial sequence
  Protein classification predicting sequence
EASGTGNMKF

SEQ ID NO: 29775 - protein, 10 aa, Artificial sequence
  Protein classification predicting sequence
YAREIWGVEP

SEQ ID NO: 29776 - protein, 6 aa, Artificial sequence
  Protein classification predicting sequence
GYGIRY

SEQ ID NO: 29777 - protein, 8 aa, Artificial sequence
  Protein classification predicting sequence
LPRHLQII

SEQ ID NO: 29778 - protein, 9 aa, Artificial sequence
  Protein classification predicting sequence
TNGVTPRRW

SEQ ID NO: 29779 - protein, 7 aa, Artificial sequence
  Protein classification predicting sequence
DLSEQIS

SEQ ID NO: 29780 - protein, 11 aa, Artificial sequence
  Protein classification predicting sequence
FSSDRTIKEYA

SEQ ID NO: 29781 - protein, 8 aa, Artificial sequence
  Protein classification predicting sequence
LNDTHPAL

SEQ ID NO: 29782 - protein, 6 aa, Artificial sequence
  Protein classification predicting sequence
LNDTHP

SEQ ID NO: 29783 - protein, 8 aa, Artificial sequence
  Protein classification predicting sequence
NISRVLYP

SEQ ID NO: 29784 - protein, 9 aa, Artificial sequence
  Protein classification predicting sequence
TNGITPRRW

SEQ ID NO: 29785 - protein, 6 aa, Artificial sequence
  Protein classification predicting sequence
VLYPND

SEQ ID NO: 29786 - protein, 9 aa, Artificial sequence
  Protein classification predicting sequence
AVQMNDTHP

SEQ ID NO: 29787 - protein, 9 aa, Artificial sequence
  Protein classification predicting sequence
LPEALEKWS

SEQ ID NO: 29788 - protein, 9 aa, Artificial sequence
  Protein classification predicting sequence
GDRLKVIFL

SEQ ID NO: 29789 - protein, 7 aa, Artificial sequence
  Protein classification predicting sequence
YYLSLEF

SEQ ID NO: 29790 - protein, 8 aa, Artificial sequence
  Protein classification predicting sequence
VLYPNDNF

SEQ ID NO: 29791 - protein, 10 aa, Artificial sequence
  Protein classification predicting sequence
LGNGGLGRLA

SEQ ID NO: 29792 - protein, 13 aa, Artificial sequence
  Protein classification predicting sequence
KVAVQMNDTHPTL

SEQ ID NO: 29793 - protein, 7 aa, Artificial sequence
  Protein classification predicting sequence
NDTHPTL

SEQ ID NO: 29794 - protein, 10 aa, Artificial sequence
  Protein classification predicting sequence
KRIHEYKRQL

SEQ ID NO: 29795 - protein, 10 aa, Artificial sequence
  Protein classification predicting sequence
SGKFSSDRTI

SEQ ID NO: 29796 - protein, 14 aa, Artificial sequence
  Protein classification predicting sequence
SGKFSSDRTIAQYA

SEQ ID NO: 29797 - protein, 13 aa, Artificial sequence
  Protein classification predicting sequence
AYTNHTVLPEALE

SEQ ID NO: 29798 - protein, 9 aa, Artificial sequence
  Protein classification predicting sequence
LHSRAQQIC

SEQ ID NO: 29799 - protein, 9 aa, Artificial sequence
  Protein classification predicting sequence
VLYPGDATE

SEQ ID NO: 29800 - protein, 9 aa, Artificial sequence
  Protein classification predicting sequence
RTVMIGGKA

SEQ ID NO: 29801 - protein, 6 aa, Artificial sequence
  Protein classification predicting sequence
GEENFF

SEQ ID NO: 29802 - protein, 7 aa, Artificial sequence
  Protein classification predicting sequence
WGYGLRY

SEQ ID NO: 29803 - protein, 9 aa, Artificial sequence
  Protein classification predicting sequence
AYDVPIPGY

SEQ ID NO: 29804 - protein, 7 aa, Artificial sequence
  Protein classification predicting sequence
QYAKEIW

SEQ ID NO: 29805 - protein, 8 aa, Artificial sequence
  Protein classification predicting sequence
GGKAFATY

SEQ ID NO: 29806 - protein, 7 aa, Artificial sequence
  Protein classification predicting sequence
IHSDIVK

SEQ ID NO: 29807 - protein, 7 aa, Artificial sequence
  Protein classification predicting sequence
PEALERW

SEQ ID NO: 29808 - protein, 6 aa, Artificial sequence
  Protein classification predicting sequence
HEYKRQ

SEQ ID NO: 29809 - protein, 6 aa, Artificial sequence
  Protein classification predicting sequence
KAAPGY

SEQ ID NO: 29810 - protein, 9 aa, Artificial sequence
  Protein classification predicting sequence
EASGTGNMK

SEQ ID NO: 29811 - protein, 6 aa, Artificial sequence
  Protein classification predicting sequence
AYTNHT

SEQ ID NO: 29812 - protein, 7 aa, Artificial sequence
  Protein classification predicting sequence
NKTNGIT

SEQ ID NO: 29813 - protein, 10 aa, Artificial sequence
  Protein classification predicting sequence
FSSDRTIAQY

SEQ ID NO: 29814 - protein, 12 aa, Artificial sequence
  Protein classification predicting sequence
ALTKFLRCVEWS

SEQ ID NO: 29815 - protein, 8 aa, Artificial sequence
  Protein classification predicting sequence
DDLRQDQL

SEQ ID NO: 29816 - protein, 11 aa, Artificial sequence
  Protein classification predicting sequence
PPPMKLCKEMV

SEQ ID NO: 29817 - protein, 8 aa, Artificial sequence
  Protein classification predicting sequence
KGAIQLGI

SEQ ID NO: 29818 - protein, 31 aa, Artificial sequence
  Protein classification predicting sequence
KPERDVLMQDFYVVESIFFPSEGSNLTPAHH

SEQ ID NO: 29819 - protein, 31 aa, Artificial sequence
  Protein classification predicting sequence
DFRFKTYAPVAFRYFRELFGIRPDDYLYSLC

SEQ ID NO: 29820 - protein, 7 aa, Artificial sequence
  Protein classification predicting sequence
GASGSLF

SEQ ID NO: 29821 - protein, 11 aa, Artificial sequence
  Protein classification predicting sequence
PTFKDLDFLQD

SEQ ID NO: 29822 - protein, 7 aa, Artificial sequence
  Protein classification predicting sequence
KTLQRDC

SEQ ID NO: 29823 - protein, 10 aa, Artificial sequence
  Protein classification predicting sequence
SFKIMDYSLL

SEQ ID NO: 29824 - protein, 11 aa, Artificial sequence
  Protein classification predicting sequence
LYSTAMESIQG

SEQ ID NO: 29825 - protein, 6 aa, Artificial sequence
  Protein classification predicting sequence
MGGIPA

SEQ ID NO: 29826 - protein, 12 aa, Artificial sequence
  Protein classification predicting sequence
IGIIDILQSYRF

SEQ ID NO: 29827 - protein, 11 aa, Artificial sequence
  Protein classification predicting sequence
KKLEHSWKALV

SEQ ID NO: 29828 - protein, 16 aa, Artificial sequence
  Protein classification predicting sequence
WKALVHDGDTVSVHRP

SEQ ID NO: 29829 - protein, 9 aa, Artificial sequence
  Protein classification predicting sequence
NEEKTYKKT

SEQ ID NO: 29830 - protein, 5 aa, Artificial sequence
  Protein classification predicting sequence
TYKKT

SEQ ID NO: 29831 - protein, 23 aa, Artificial sequence
  Protein classification predicting sequence
SSAIKGAIQLGIGYTVGNLTSKP

SEQ ID NO: 29832 - protein, 13 aa, Artificial sequence
  Protein classification predicting sequence
RDVLMQDFYVVES

SEQ ID NO: 29833 - protein, 9 aa, Artificial sequence
  Protein classification predicting sequence
DFRFKTYAP

SEQ ID NO: 29834 - protein, 11 aa, Artificial sequence
  Protein classification predicting sequence
AFRYFRELFGI

SEQ ID NO: 29835 - protein, 34 aa, Artificial sequence
  Protein classification predicting sequence
HKEAEFLQKLLPGYYMNLNQNPRTLLPKFYGLYC

SEQ ID NO: 29836 - protein, 28 aa, Artificial sequence
  Protein classification predicting sequence
ALMKTLQRDCRVLESFKIMDYSLLLGIH

SEQ ID NO: 29837 - protein, 10 aa, Artificial sequence
  Protein classification predicting sequence
SPSKKRCNSI

SEQ ID NO: 29838 - protein, 8 aa, Artificial sequence
  Protein classification predicting sequence
SQEWKDEK

SEQ ID NO: 29839 - protein, 20 aa, Artificial sequence
  Protein classification predicting sequence
RPDLVPSTPSLFEAASLATT

SEQ ID NO: 29840 - protein, 10 aa, Artificial sequence
  Protein classification predicting sequence
LPSSSTFTLE

SEQ ID NO: 29841 - protein, 13 aa, Artificial sequence
  Protein classification predicting sequence
KGAIQLGIGYTVG

SEQ ID NO: 29842 - protein, 12 aa, Artificial sequence
  Protein classification predicting sequence
PSEGSNLTPAHH

SEQ ID NO: 29843 - protein, 12 aa, Artificial sequence
  Protein classification predicting sequence
DLKGSTYKRRAS

SEQ ID NO: 29844 - protein, 14 aa, Artificial sequence
  Protein classification predicting sequence
DGDTVSVHRPSFYA

SEQ ID NO: 29845 - protein, 14 aa, Artificial sequence
  Protein classification predicting sequence
EPLIELSNPGASGS

SEQ ID NO: 29846 - protein, 9 aa, Artificial sequence
  Protein classification predicting sequence
VVMNNVLPR

SEQ ID NO: 29847 - protein, 12 aa, Artificial sequence
  Protein classification predicting sequence
ASKTKTKKKHFV

SEQ ID NO: 29848 - protein, 16 aa, Artificial sequence
  Protein classification predicting sequence
SEDVAEMHNILKKYHQ

SEQ ID NO: 29849 - protein, 42 aa, Artificial sequence
  Protein classification predicting sequence
SEDVAEMHNILKKYHQFIVECHGNTLLPQFLGMYRLTVDGVE

SEQ ID NO: 29850 - protein, 12 aa, Artificial sequence
  Protein classification predicting sequence
TLLPQFLGMYRL

SEQ ID NO: 29851 - protein, 7 aa, Artificial sequence
  Protein classification predicting sequence
KDNDFIN

SEQ ID NO: 29852 - protein, 12 aa, Artificial sequence
  Protein classification predicting sequence
ARSGARFHTSYD

SEQ ID NO: 29853 - protein, 28 aa, Artificial sequence
  Protein classification predicting sequence
PRKEVYFMAIIDILTHYDAKKKAAHAAK

SEQ ID NO: 29854 - protein, 42 aa, Artificial sequence
  Protein classification predicting sequence
FLEKLKKDVEFLAQLKLMDYSLLVGIHDVERAEQEEVECEEN

SEQ ID NO: 29855 - protein, 9 aa, Artificial sequence
  Protein classification predicting sequence
QKVKLFRAS

SEQ ID NO: 29856 - protein, 10 aa, Artificial sequence
  Protein classification predicting sequence
LSVLMWGVNH

SEQ ID NO: 29857 - protein, 10 aa, Artificial sequence
  Protein classification predicting sequence
VTRNVFSHRL

SEQ ID NO: 29858 - protein, 9 aa, Artificial sequence
  Protein classification predicting sequence
DVEFLAQLK

SEQ ID NO: 29859 - protein, 13 aa, Artificial sequence
  Protein classification predicting sequence
KEVYFMAIIDILT

SEQ ID NO: 29860 - protein, 26 aa, Artificial sequence
  Protein classification predicting sequence
PVMLMPDDFKAYSKIKVDNHLFNKEN

SEQ ID NO: 29861 - protein, 24 aa, Artificial sequence
  Protein classification predicting sequence
FKFKEYCPMVFRNLRERFGIDDQD

SEQ ID NO: 29862 - protein, 21 aa, Artificial sequence
  Protein classification predicting sequence
RKYDLKGSTVAREASDKEKAK

SEQ ID NO: 29863 - protein, 6 aa, Artificial sequence
  Protein classification predicting sequence
WKDYCP

SEQ ID NO: 29864 - protein, 9 aa, Artificial sequence
  Protein classification predicting sequence
IDILQDYDI

SEQ ID NO: 29865 - protein, 7 aa, Artificial sequence
  Protein classification predicting sequence
GIIDILQ

SEQ ID NO: 29866 - protein, 7 aa, Artificial sequence
  Protein classification predicting sequence
SPGKSGS

SEQ ID NO: 29867 - protein, 7 aa, Artificial sequence
  Protein classification predicting sequence
TKFFGVH

SEQ ID NO: 29868 - protein, 7 aa, Artificial sequence
  Protein classification predicting sequence
IMDYSLL

SEQ ID NO: 29869 - protein, 10 aa, Artificial sequence
  Protein classification predicting sequence
LMLNLQLGIR

SEQ ID NO: 29870 - protein, 7 aa, Artificial sequence
  Protein classification predicting sequence
SISAVDP

SEQ ID NO: 29871 - protein, 10 aa, Artificial sequence
  Protein classification predicting sequence
YCPMVFRNLR

SEQ ID NO: 29872 - protein, 7 aa, Artificial sequence
  Protein classification predicting sequence
YDLKGST

SEQ ID NO: 29873 - protein, 7 aa, Artificial sequence
  Protein classification predicting sequence
DYSLLLG

SEQ ID NO: 29874 - protein, 14 aa, Artificial sequence
  Protein classification predicting sequence
LQLGIRYTVGKITP

SEQ ID NO: 29875 - protein, 9 aa, Artificial sequence
  Protein classification predicting sequence
RFVVMGNMF

SEQ ID NO: 29876 - protein, 6 aa, Artificial sequence
  Protein classification predicting sequence
YDLKGS

SEQ ID NO: 29877 - protein, 8 aa, Artificial sequence
  Protein classification predicting sequence
KDRHNGNI

SEQ ID NO: 29878 - protein, 10 aa, Artificial sequence
  Protein classification predicting sequence
GHIIHIDFGF

SEQ ID NO: 29879 - protein, 13 aa, Artificial sequence
  Protein classification predicting sequence
LLYDMVCGDIPFE

SEQ ID NO: 29880 - protein, 13 aa, Artificial sequence
  Protein classification predicting sequence
LLGSGGFGSVYSG

SEQ ID NO: 29881 - protein, 11 aa, Artificial sequence
  Protein classification predicting sequence
QDLFDFITERG

SEQ ID NO: 29882 - protein, 42 aa, Artificial sequence
  Protein classification predicting sequence
FSGVIRLLDWFERPDSFVLILERPEPVQDLFDFITERGALQE

SEQ ID NO: 29883 - protein, 7 aa, Artificial sequence
  Protein classification predicting sequence
GQVFFRQ

SEQ ID NO: 29884 - protein, 9 aa, Artificial sequence
  Protein classification predicting sequence
VSSECQHLI

SEQ ID NO: 29885 - protein, 17 aa, Artificial sequence
  Protein classification predicting sequence
FRQRVSSECQHLIRWCL

SEQ ID NO: 29886 - protein, 10 aa, Artificial sequence
  Protein classification predicting sequence
GVIRLLDWFE

SEQ ID NO: 29887 - protein, 8 aa, Artificial sequence
  Protein classification predicting sequence
HRDIKDEN

SEQ ID NO: 29888 - protein, 15 aa, Artificial sequence
  Protein classification predicting sequence
VLGSGGFGTVYAGSR

SEQ ID NO: 29889 - protein, 20 aa, Artificial sequence
  Protein classification predicting sequence
ADGLPVAVKHVVKERVTEWG

SEQ ID NO: 29890 - protein, 8 aa, Artificial sequence
  Protein classification predicting sequence
DLFDFITE

SEQ ID NO: 29891 - protein, 9 aa, Artificial sequence
  Protein classification predicting sequence
QVLEAVRHC

SEQ ID NO: 29892 - protein, 10 aa, Artificial sequence
  Protein classification predicting sequence
AVRHCHNCGV

SEQ ID NO: 29893 - protein, 8 aa, Artificial sequence
  Protein classification predicting sequence
KERVTEWG

SEQ ID NO: 29894 - protein, 10 aa, Artificial sequence
  Protein classification predicting sequence
RYHRYHGRSA

SEQ ID NO: 29895 - protein, 6 aa, Artificial sequence
  Protein classification predicting sequence
GDIPFE

SEQ ID NO: 29896 - protein, 13 aa, Artificial sequence
  Protein classification predicting sequence
APYDAIHVGAAAP

SEQ ID NO: 29897 - protein, 9 aa, Artificial sequence
  Protein classification predicting sequence
NLRKNGIIK

SEQ ID NO: 29898 - protein, 10 aa, Artificial sequence
  Protein classification predicting sequence
EVMLATDRSH

SEQ ID NO: 29899 - protein, 17 aa, Artificial sequence
  Protein classification predicting sequence
QATISAPHMHAYALELL

SEQ ID NO: 29900 - protein, 15 aa, Artificial sequence
  Protein classification predicting sequence
EGAKALDVGSGSGIL

SEQ ID NO: 29901 - protein, 13 aa, Artificial sequence
  Protein classification predicting sequence
GKVIGIDHIKELV

SEQ ID NO: 29902 - protein, 28 aa, Artificial sequence
  Protein classification predicting sequence
DQLKPGGRLILPVGPAGGNQMLEQYDKL

SEQ ID NO: 29903 - protein, 16 aa, Artificial sequence
  Protein classification predicting sequence
KMKPLMGVIYVPLTDK

SEQ ID NO: 29904 - protein, 7 aa, Artificial sequence
  Protein classification predicting sequence
AIHVGAA

SEQ ID NO: 29905 - protein, 7 aa, Artificial sequence
  Protein classification predicting sequence
VIYVPLT

SEQ ID NO: 29906 - protein, 7 aa, Artificial sequence
  Protein classification predicting sequence
FVDEAFE

SEQ ID NO: 29907 - protein, 8 aa, Artificial sequence
  Protein classification predicting sequence
VAKMTELL

SEQ ID NO: 29908 - protein, 10 aa, Artificial sequence
  Protein classification predicting sequence
PFDAIIVTAA

SEQ ID NO: 29909 - protein, 15 aa, Artificial sequence
  Protein classification predicting sequence
PFDAIIVTAAPPEIP

SEQ ID NO: 29910 - protein, 7 aa, Artificial sequence
  Protein classification predicting sequence
MTELLEL

SEQ ID NO: 29911 - protein, 6 aa, Artificial sequence
  Protein classification predicting sequence
QTISQP

SEQ ID NO: 29912 - protein, 8 aa, Artificial sequence
  Protein classification predicting sequence
PQALIDQL

SEQ ID NO: 29913 - protein, 7 aa, Artificial sequence
  Protein classification predicting sequence
VLEIGTG

SEQ ID NO: 29914 - protein, 8 aa, Artificial sequence
  Protein classification predicting sequence
GRLVIPVG

SEQ ID NO: 29915 - protein, 8 aa, Artificial sequence
  Protein classification predicting sequence
VARMTELL

SEQ ID NO: 29916 - protein, 9 aa, Artificial sequence
  Protein classification predicting sequence
GTGSGYQTA

SEQ ID NO: 29917 - protein, 8 aa, Artificial sequence
  Protein classification predicting sequence
AKRRLKQL

SEQ ID NO: 29918 - protein, 12 aa, Artificial sequence
  Protein classification predicting sequence
QTISQPYMVARM

SEQ ID NO: 29919 - protein, 9 aa, Artificial sequence
  Protein classification predicting sequence
SVERIKGLQ

SEQ ID NO: 29920 - protein, 7 aa, Artificial sequence
  Protein classification predicting sequence
TISAPHM

SEQ ID NO: 29921 - protein, 18 aa, Artificial sequence
  Protein classification predicting sequence
DVGSGSGILTACFARMVG

SEQ ID NO: 29922 - protein, 13 aa, Artificial sequence
  Protein classification predicting sequence
VLNALAAVPREKF

SEQ ID NO: 29923 - protein, 20 aa, Artificial sequence
  Protein classification predicting sequence
HVCSVERIKGLQWQARRRLK

SEQ ID NO: 29924 - protein, 40 aa, Artificial sequence
  Protein classification predicting sequence
LDLHNVSTRHGDGWQGWQARAPFDAIIVTAAPPEIPTALM

SEQ ID NO: 29925 - protein, 13 aa, Artificial sequence
  Protein classification predicting sequence
QLDEGGILVLPVG

SEQ ID NO: 29926 - protein, 15 aa, Artificial sequence
  Protein classification predicting sequence
GTGSGYQTAILAHLV

SEQ ID NO: 29927 - protein, 14 aa, Artificial sequence
  Protein classification predicting sequence
ALPIGQGQTISQPY

SEQ ID NO: 29928 - protein, 5 aa, Artificial sequence
  Protein classification predicting sequence
HGDGW

SEQ ID NO: 29929 - protein, 8 aa, Artificial sequence
  Protein classification predicting sequence
HGDGWQGW

SEQ ID NO: 29930 - protein, 14 aa, Artificial sequence
  Protein classification predicting sequence
KGPFDAIIVTAAAE

SEQ ID NO: 29931 - protein, 14 aa, Artificial sequence
  Protein classification predicting sequence
LDLHNVSTRHGDGW

SEQ ID NO: 29932 - protein, 6 aa, Artificial sequence
  Protein classification predicting sequence
KSDNIL

SEQ ID NO: 29933 - protein, 6 aa, Artificial sequence
  Protein classification predicting sequence
DIKDEN

SEQ ID NO: 29934 - protein, 7 aa, Artificial sequence
  Protein classification predicting sequence
VDWWALG

SEQ ID NO: 29935 - protein, 8 aa, Artificial sequence
  Protein classification predicting sequence
DLWALGCI

SEQ ID NO: 29936 - protein, 7 aa, Artificial sequence
  Protein classification predicting sequence
AGLPPFR

SEQ ID NO: 29937 - protein, 8 aa, Artificial sequence
  Protein classification predicting sequence
KRKGLFAR

SEQ ID NO: 29938 - protein, 7 aa, Artificial sequence
  Protein classification predicting sequence
KGEIPWS

SEQ ID NO: 29939 - protein, 12 aa, Artificial sequence
  Protein classification predicting sequence
FFVHTPNRTYYL

SEQ ID NO: 29940 - protein, 10 aa, Artificial sequence
  Protein classification predicting sequence
REPVVSRYVE

SEQ ID NO: 29941 - protein, 9 aa, Artificial sequence
  Protein classification predicting sequence
EHRFIKKRY

SEQ ID NO: 29942 - protein, 6 aa, Artificial sequence
  Protein classification predicting sequence
RAVDWW

SEQ ID NO: 29943 - protein, 10 aa, Artificial sequence
  Protein classification predicting sequence
RAVDWWGLGV

SEQ ID NO: 29944 - protein, 10 aa, Artificial sequence
  Protein classification predicting sequence
VGTAQYVSPE

SEQ ID NO: 29945 - protein, 14 aa, Artificial sequence
  Protein classification predicting sequence
IELKVKQGAENMIQ

SEQ ID NO: 29946 - protein, 8 aa, Artificial sequence
  Protein classification predicting sequence
LQDSKTKI

SEQ ID NO: 29947 - protein, 6 aa, Artificial sequence
  Protein classification predicting sequence
EVIRMQ

SEQ ID NO: 29948 - protein, 8 aa, Artificial sequence
  Protein classification predicting sequence
LTGTLEVR

SEQ ID NO: 29949 - protein, 7 aa, Artificial sequence
  Protein classification predicting sequence
LEDFLDN

SEQ ID NO: 29950 - protein, 13 aa, Artificial sequence
  Protein classification predicting sequence
AVLGRGHFGKVLL

SEQ ID NO: 29951 - protein, 6 aa, Artificial sequence
  Protein classification predicting sequence
FGKVLL

SEQ ID NO: 29952 - protein, 17 aa, Artificial sequence
  Protein classification predicting sequence
FAIKALKKGDIVARDEV

SEQ ID NO: 29953 - protein, 6 aa, Artificial sequence
  Protein classification predicting sequence
CFVMEY

SEQ ID NO: 29954 - protein, 8 aa, Artificial sequence
  Protein classification predicting sequence
ACVVLGLQ

SEQ ID NO: 29955 - protein, 15 aa, Artificial sequence
  Protein classification predicting sequence
IMRRLLRRNPERRLG

SEQ ID NO: 29956 - protein, 22 aa, Artificial sequence
  Protein classification predicting sequence
LHEHKIVYRDLKLDNLLLDTEG

SEQ ID NO: 29957 - protein, 35 aa, Artificial sequence
  Protein classification predicting sequence
VKIADFGLCKEGMGYGDRTSTFCGTPEFLAPEVLT

SEQ ID NO: 29958 - protein, 34 aa, Artificial sequence
  Protein classification predicting sequence
YEMLVGESPFPGDDEEEVFDSIVNDEVRYPRFLS

SEQ ID NO: 29959 - protein, 6 aa, Artificial sequence
  Protein classification predicting sequence
GTPEYL

SEQ ID NO: 29960 - protein, 11 aa, Artificial sequence
  Protein classification predicting sequence
ELKVKQGAENM

SEQ ID NO: 29961 - protein, 9 aa, Artificial sequence
  Protein classification predicting sequence
AVAEGAKNV

SEQ ID NO: 29962 - protein, 8 aa, Artificial sequence
  Protein classification predicting sequence
YRDLKLDN

SEQ ID NO: 29963 - protein, 20 aa, Artificial sequence
  Protein classification predicting sequence
GDRTSTFCGTPEFLAPEVLT

SEQ ID NO: 29964 - protein, 7 aa, Artificial sequence
  Protein classification predicting sequence
YQLVRKL

SEQ ID NO: 29965 - protein, 11 aa, Artificial sequence
  Protein classification predicting sequence
VSCLAVPDAFL

SEQ ID NO: 29966 - protein, 7 aa, Artificial sequence
  Protein classification predicting sequence
GGMGEVY

SEQ ID NO: 29967 - protein, 6 aa, Artificial sequence
  Protein classification predicting sequence
FPEGTR

SEQ ID NO: 29968 - protein, 9 aa, Artificial sequence
  Protein classification predicting sequence
SKVLAKKEL

SEQ ID NO: 29969 - protein, 10 aa, Artificial sequence
  Protein classification predicting sequence
GRFLGKGGFA

SEQ ID NO: 29970 - protein, 6 aa, Artificial sequence
  Protein classification predicting sequence
NIIHRD

SEQ ID NO: 29971 - protein, 8 aa, Artificial sequence
  Protein classification predicting sequence
KLGNLFLN

SEQ ID NO: 29972 - protein, 15 aa, Artificial sequence
  Protein classification predicting sequence
GYQLCDNSVGVLFND

SEQ ID NO: 29973 - protein, 7 aa, Artificial sequence
  Protein classification predicting sequence
TLLKYFR

SEQ ID NO: 29974 - protein, 13 aa, Artificial sequence
  Protein classification predicting sequence
LHLSNGTVQINFF

SEQ ID NO: 29975 - protein, 7 aa, Artificial sequence
  Protein classification predicting sequence
KPHQREK

SEQ ID NO: 29976 - protein, 20 aa, Artificial sequence
  Protein classification predicting sequence
VVLELCRRRSLLELHKRRKA

SEQ ID NO: 29977 - protein, 6 aa, Artificial sequence
  Protein classification predicting sequence
GCQYLH

SEQ ID NO: 29978 - protein, 18 aa, Artificial sequence
  Protein classification predicting sequence
RIKKNEYSIPKHINPVAA

SEQ ID NO: 29979 - protein, 9 aa, Artificial sequence
  Protein classification predicting sequence
PPRFSIAPS

SEQ ID NO: 29980 - protein, 9 aa, Artificial sequence
  Protein classification predicting sequence
RQEEAEDPA

SEQ ID NO: 29981 - protein, 11 aa, Artificial sequence
  Protein classification predicting sequence
SKWVDYSDKYG

SEQ ID NO: 29982 - protein, 32 aa, Artificial sequence
  Protein classification predicting sequence
SKWVDYSDKYGLGYQLCDNSVGVLFNDSTRLI

SEQ ID NO: 29983 - protein, 12 aa, Artificial sequence
  Protein classification predicting sequence
YNDGDSLQYIER

SEQ ID NO: 29984 - protein, 12 aa, Artificial sequence
  Protein classification predicting sequence
TPREGDELARLP

SEQ ID NO: 29985 - protein, 17 aa, Artificial sequence
  Protein classification predicting sequence
GCCKELASRLRYARTMV

SEQ ID NO: 29986 - protein, 26 aa, Artificial sequence
  Protein classification predicting sequence
WSIGCIMYTLLVGKPPFETSCLKETY

SEQ ID NO: 29987 - protein, 8 aa, Artificial sequence
  Protein classification predicting sequence
LLNDEFFT

SEQ ID NO: 29988 - protein, 8 aa, Artificial sequence
  Protein classification predicting sequence
HRDLKLGN

SEQ ID NO: 29989 - protein, 11 aa, Artificial sequence
  Protein classification predicting sequence
HLSNGTVQINF

SEQ ID NO: 29990 - protein, 12 aa, Artificial sequence
  Protein classification predicting sequence
SRVAKPHQREKI

SEQ ID NO: 29991 - protein, 6 aa, Artificial sequence
  Protein classification predicting sequence
GLKYLH

SEQ ID NO: 29992 - protein, 13 aa, Artificial sequence
  Protein classification predicting sequence
ILHRDLKLGNFFI

SEQ ID NO: 29993 - protein, 16 aa, Artificial sequence
  Protein classification predicting sequence
MELKVGDFGLAARLEP

SEQ ID NO: 29994 - protein, 8 aa, Artificial sequence
  Protein classification predicting sequence
LKETYRCI

SEQ ID NO: 29995 - protein, 6 aa, Artificial sequence
  Protein classification predicting sequence
KWVDYS

SEQ ID NO: 29996 - protein, 6 aa, Artificial sequence
  Protein classification predicting sequence
TLCGTP

SEQ ID NO: 29997 - protein, 5 aa, Artificial sequence
  Protein classification predicting sequence
WSLGC

SEQ ID NO: 29998 - protein, 8 aa, Artificial sequence
  Protein classification predicting sequence
KYGLGYQL

SEQ ID NO: 29999 - protein, 7 aa, Artificial sequence
  Protein classification predicting sequence
REPFDYY

SEQ ID NO: 30000 - protein, 13 aa, Artificial sequence
  Protein classification predicting sequence
GRNLICVYSKKHM

SEQ ID NO: 30001 - protein, 8 aa, Artificial sequence
  Protein classification predicting sequence
CVYSKKHM

SEQ ID NO: 30002 - protein, 9 aa, Artificial sequence
  Protein classification predicting sequence
FGQNYIRPL

SEQ ID NO: 30003 - protein, 9 aa, Artificial sequence
  Protein classification predicting sequence
LCHDIMPPP

SEQ ID NO: 30004 - protein, 11 aa, Artificial sequence
  Protein classification predicting sequence
FRRGGAFFIRR

SEQ ID NO: 30005 - protein, 7 aa, Artificial sequence
  Protein classification predicting sequence
GAFFIRR

SEQ ID NO: 30006 - protein, 10 aa, Artificial sequence
  Protein classification predicting sequence
LYSTVFREYL

SEQ ID NO: 30007 - protein, 7 aa, Artificial sequence
  Protein classification predicting sequence
LLASRQR

SEQ ID NO: 30008 - protein, 9 aa, Artificial sequence
  Protein classification predicting sequence
AQRLSILHG

SEQ ID NO: 30009 - protein, 7 aa, Artificial sequence
  Protein classification predicting sequence
WLWNKLY

SEQ ID NO: 30010 - protein, 29 aa, Artificial sequence
  Protein classification predicting sequence
DYLLLSYVLYHQGLVPPHIAAGINLNFWP

SEQ ID NO: 30011 - protein, 11 aa, Artificial sequence
  Protein classification predicting sequence
KEKENAGLVLR

SEQ ID NO: 30012 - protein, 8 aa, Artificial sequence
  Protein classification predicting sequence
KLRNLGQG

SEQ ID NO: 30013 - protein, 7 aa, Artificial sequence
  Protein classification predicting sequence
NVPYSTD

SEQ ID NO: 30014 - protein, 10 aa, Artificial sequence
  Protein classification predicting sequence
HRSHIDYLLL

SEQ ID NO: 30015 - protein, 7 aa, Artificial sequence
  Protein classification predicting sequence
FNKLLAS

SEQ ID NO: 30016 - protein, 6 aa, Artificial sequence
  Protein classification predicting sequence
VNFGEP

SEQ ID NO: 30017 - protein, 10 aa, Artificial sequence
  Protein classification predicting sequence
IYYKLLNLPL

SEQ ID NO: 30018 - protein, 8 aa, Artificial sequence
  Protein classification predicting sequence
PVSVMFGR

SEQ ID NO: 30019 - protein, 9 aa, Artificial sequence
  Protein classification predicting sequence
KLARVARMH

SEQ ID NO: 30020 - protein, 8 aa, Artificial sequence
  Protein classification predicting sequence
LFNKLLAS

SEQ ID NO: 30021 - protein, 11 aa, Artificial sequence
  Protein classification predicting sequence
MEEIAANFSYE

SEQ ID NO: 30022 - protein, 16 aa, Artificial sequence
  Protein classification predicting sequence
TWNRLYQGINVHNAER

SEQ ID NO: 30023 - protein, 7 aa, Artificial sequence
  Protein classification predicting sequence
DGHELVY

SEQ ID NO: 30024 - protein, 9 aa, Artificial sequence
  Protein classification predicting sequence
FREYLGELF

SEQ ID NO: 30025 - protein, 11 aa, Artificial sequence
  Protein classification predicting sequence
EGGRSRTGRLL

SEQ ID NO: 30026 - protein, 9 aa, Artificial sequence
  Protein classification predicting sequence
TALLASRQR

SEQ ID NO: 30027 - protein, 8 aa, Artificial sequence
  Protein classification predicting sequence
GDIIILPR

SEQ ID NO: 30028 - protein, 14 aa, Artificial sequence
  Protein classification predicting sequence
AVLMTYYRNNIQHL

SEQ ID NO: 30029 - protein, 10 aa, Artificial sequence
  Protein classification predicting sequence
RETLQRYAIT

SEQ ID NO: 30030 - protein, 21 aa, Artificial sequence
  Protein classification predicting sequence
AQRLSVLHGINAPEFFDKAVF

SEQ ID NO: 30031 - protein, 8 aa, Artificial sequence
  Protein classification predicting sequence
EGYISDSG

SEQ ID NO: 30032 - protein, 11 aa, Artificial sequence
  Protein classification predicting sequence
PPHIAAGINLN

SEQ ID NO: 30033 - protein, 7 aa, Artificial sequence
  Protein classification predicting sequence
RRGGAFF

SEQ ID NO: 30034 - protein, 13 aa, Artificial sequence
  Protein classification predicting sequence
EYFVEGGRSRTGR

SEQ ID NO: 30035 - protein, 6 aa, Artificial sequence
  Protein classification predicting sequence
TYYRNN

SEQ ID NO: 30036 - protein, 8 aa, Artificial sequence
  Protein classification predicting sequence
YVPCHRSH

SEQ ID NO: 30037 - protein, 6 aa, Artificial sequence
  Protein classification predicting sequence
RRTFKG

SEQ ID NO: 30038 - protein, 14 aa, Artificial sequence
  Protein classification predicting sequence
KLFHDYLDLHRSNP

SEQ ID NO: 30039 - protein, 15 aa, Artificial sequence
  Protein classification predicting sequence
NPPLRMLNGVQKFFA

SEQ ID NO: 30040 - protein, 21 aa, Artificial sequence
  Protein classification predicting sequence
VYVPCHRSHMDYLLLSYVLYH

SEQ ID NO: 30041 - protein, 10 aa, Artificial sequence
  Protein classification predicting sequence
WRESIDPIEA

SEQ ID NO: 30042 - protein, 10 aa, Artificial sequence
  Protein classification predicting sequence
RPAWLTPTVN

SEQ ID NO: 30043 - protein, 18 aa, Artificial sequence
  Protein classification predicting sequence
CYLDLMRNVPYSTDSTVP

SEQ ID NO: 30044 - protein, 13 aa, Artificial sequence
  Protein classification predicting sequence
LYPMLKAELFLRW

SEQ ID NO: 30045 - protein, 19 aa, Artificial sequence
  Protein classification predicting sequence
EMQRQGLITLQDDELHINP

SEQ ID NO: 30046 - protein, 10 aa, Artificial sequence
  Protein classification predicting sequence
GDAEPAETMK

SEQ ID NO: 30047 - protein, 45 aa, Artificial sequence
  Protein classification predicting sequence
ELGLDTSRPIMYVLPYNSKADLLTLRAQCLAHDLPDPLEPLEIDG

SEQ ID NO: 30048 - protein, 24 aa, Artificial sequence
  Protein classification predicting sequence
LLPRYVFIHGGPRVFTYYTPKEES

SEQ ID NO: 30049 - protein, 22 aa, Artificial sequence
  Protein classification predicting sequence
LDVQMVPVSVMFGRAPGREKGE

SEQ ID NO: 30050 - protein, 27 aa, Artificial sequence
  Protein classification predicting sequence
WLGRDSFVRFSPSVSLRRMADEHGTDK

SEQ ID NO: 30051 - protein, 38 aa, Artificial sequence
  Protein classification predicting sequence
IAQKLARVARMHFARQRLAAVGPRLPARQDLFNKLLAS

SEQ ID NO: 30052 - protein, 33 aa, Artificial sequence
  Protein classification predicting sequence
PIYIGYEHVMEVGTYAKELRGATKEKESLPQML

SEQ ID NO: 30053 - protein, 30 aa, Artificial sequence
  Protein classification predicting sequence
GLSKLRNLGQGYVNFGEPMPLMTYLNQHVP

SEQ ID NO: 30054 - protein, 42 aa, Artificial sequence
  Protein classification predicting sequence
IAADLMVRINNAGAANAMNLCCTALLASRQRSLTREQLTEQL

SEQ ID NO: 30055 - protein, 34 aa, Artificial sequence
  Protein classification predicting sequence
HSRTLQLLAAGARETLQRYAITFWLLSANPSINR

SEQ ID NO: 30056 - protein, 8 aa, Artificial sequence
  Protein classification predicting sequence
MADEHGTD

SEQ ID NO: 30057 - protein, 23 aa, Artificial sequence
  Protein classification predicting sequence
LFAKGYSVEYFSEGGRSRTGRLL

SEQ ID NO: 30058 - protein, 7 aa, Artificial sequence
  Protein classification predicting sequence
GYSVEYF

SEQ ID NO: 30059 - protein, 9 aa, Artificial sequence
  Protein classification predicting sequence
RPVTLVPVY

SEQ ID NO: 30060 - protein, 8 aa, Artificial sequence
  Protein classification predicting sequence
HVMEVATY

SEQ ID NO: 30061 - protein, 8 aa, Artificial sequence
  Protein classification predicting sequence
ETLQRYAI

SEQ ID NO: 30062 - protein, 8 aa, Artificial sequence
  Protein classification predicting sequence
ANTRSLKE

SEQ ID NO: 30063 - protein, 13 aa, Artificial sequence
  Protein classification predicting sequence
GRDCLVRFSPVVS

SEQ ID NO: 30064 - protein, 13 aa, Artificial sequence
  Protein classification predicting sequence
VPPHIAAGINLNF

SEQ ID NO: 30065 - protein, 9 aa, Artificial sequence
  Protein classification predicting sequence
MTIQAMLRG

SEQ ID NO: 30066 - protein, 10 aa, Artificial sequence
  Protein classification predicting sequence
MMTHINDAAA

SEQ ID NO: 30067 - protein, 15 aa, Artificial sequence
  Protein classification predicting sequence
TLCATALLASRQRAL

SEQ ID NO: 30068 - protein, 8 aa, Artificial sequence
  Protein classification predicting sequence
ALPSLIAQ

SEQ ID NO: 30069 - protein, 8 aa, Artificial sequence
  Protein classification predicting sequence
VFIASRPT

SEQ ID NO: 30070 - protein, 14 aa, Artificial sequence
  Protein classification predicting sequence
IPATVLWGRKPGKE

SEQ ID NO: 30071 - protein, 9 aa, Artificial sequence
  Protein classification predicting sequence
MGDIISLDR

SEQ ID NO: 30072 - protein, 8 aa, Artificial sequence
  Protein classification predicting sequence
TYAKELRG

SEQ ID NO: 30073 - protein, 8 aa, Artificial sequence
  Protein classification predicting sequence
LHGINAPE

SEQ ID NO: 30074 - protein, 12 aa, Artificial sequence
  Protein classification predicting sequence
HRSHMDYLLLSY

SEQ ID NO: 30075 - protein, 7 aa, Artificial sequence
  Protein classification predicting sequence
PVYIGYE

SEQ ID NO: 30076 - protein, 8 aa, Artificial sequence
  Protein classification predicting sequence
GHEIVYVP

SEQ ID NO: 30077 - protein, 20 aa, Artificial sequence
  Protein classification predicting sequence
YVLPYNSKADLLTLRAQCLA

SEQ ID NO: 30078 - protein, 11 aa, Artificial sequence
  Protein classification predicting sequence
KLFHDYLDLHR

SEQ ID NO: 30079 - protein, 22 aa, Artificial sequence
  Protein classification predicting sequence
LNGVQKFFAVLWLGRDSFVRFS

SEQ ID NO: 30080 - protein, 9 aa, Artificial sequence
  Protein classification predicting sequence
RQRLAAVGP

SEQ ID NO: 30081 - protein, 8 aa, Artificial sequence
  Protein classification predicting sequence
LPARQDLF

SEQ ID NO: 30082 - protein, 18 aa, Artificial sequence
  Protein classification predicting sequence
DEARSKKISHEKAQQNAI

SEQ ID NO: 30083 - protein, 23 aa, Artificial sequence
  Protein classification predicting sequence
PKTGTLSMTIQAMLRGGTRPITL

SEQ ID NO: 30084 - protein, 7 aa, Artificial sequence
  Protein classification predicting sequence
MVRINNA

SEQ ID NO: 30085 - protein, 8 aa, Artificial sequence
  Protein classification predicting sequence
AANAMNLC

SEQ ID NO: 30086 - protein, 32 aa, Artificial sequence
  Protein classification predicting sequence
MNKFEVEKDTIGDIIILPREQAVLMTYYRNNI

SEQ ID NO: 30087 - protein, 8 aa, Artificial sequence
  Protein classification predicting sequence
PEVKLTIE

SEQ ID NO: 30088 - protein, 8 aa, Artificial sequence
  Protein classification predicting sequence
PLFGLKVE

SEQ ID NO: 30089 - protein, 10 aa, Artificial sequence
  Protein classification predicting sequence
NHQNNYDMVT

SEQ ID NO: 30090 - protein, 10 aa, Artificial sequence
  Protein classification predicting sequence
SIWMFPEGTR

SEQ ID NO: 30091 - protein, 17 aa, Artificial sequence
  Protein classification predicting sequence
RGRGLLPFKTGAFHAAI

SEQ ID NO: 30092 - protein, 7 aa, Artificial sequence
  Protein classification predicting sequence
GYMFGKG

SEQ ID NO: 30093 - protein, 9 aa, Artificial sequence
  Protein classification predicting sequence
RPFQSIIHA

SEQ ID NO: 30094 - protein, 6 aa, Artificial sequence
  Protein classification predicting sequence
LMGADL

SEQ ID NO: 30095 - protein, 6 aa, Artificial sequence
  Protein classification predicting sequence
RPTAKE

SEQ ID NO: 30096 - protein, 8 aa, Artificial sequence
  Protein classification predicting sequence
KRITVEEA

SEQ ID NO: 30097 - protein, 10 aa, Artificial sequence
  Protein classification predicting sequence
NGTSKHQNGH

SEQ ID NO: 30098 - protein, 7 aa, Artificial sequence
  Protein classification predicting sequence
QQQVTCY

SEQ ID NO: 30099 - protein, 7 aa, Artificial sequence
  Protein classification predicting sequence
FFDVHPP

SEQ ID NO: 30100 - protein, 8 aa, Artificial sequence
  Protein classification predicting sequence
TMMQAVLH

SEQ ID NO: 30101 - protein, 6 aa, Artificial sequence
  Protein classification predicting sequence
GTMAHE

SEQ ID NO: 30102 - protein, 15 aa, Artificial sequence
  Protein classification predicting sequence
KLGIDPLTKTLVFSD

SEQ ID NO: 30103 - protein, 9 aa, Artificial sequence
  Protein classification predicting sequence
RFIKSDFVD

SEQ ID NO: 30104 - protein, 16 aa, Artificial sequence
  Protein classification predicting sequence
RFIKSDFVDYLELFQL

SEQ ID NO: 30105 - protein, 10 aa, Artificial sequence
  Protein classification predicting sequence
EEGERRLQAK

SEQ ID NO: 30106 - protein, 6 aa, Artificial sequence
  Protein classification predicting sequence
DEPPFL

SEQ ID NO: 30107 - protein, 8 aa, Artificial sequence
  Protein classification predicting sequence
GTSNVLLA

SEQ ID NO: 30108 - protein, 23 aa, Artificial sequence
  Protein classification predicting sequence
ITPIGTMAHEFLQAFQALDVRLR

SEQ ID NO: 30109 - protein, 9 aa, Artificial sequence
  Protein classification predicting sequence
WGDKAYAHY

SEQ ID NO: 30110 - protein, 10 aa, Artificial sequence
  Protein classification predicting sequence
FGIGTNLTND

SEQ ID NO: 30111 - protein, 7 aa, Artificial sequence
  Protein classification predicting sequence
GTNLTND

SEQ ID NO: 30112 - protein, 19 aa, Artificial sequence
  Protein classification predicting sequence
TPLNIVLKLVECNGQSVAK

SEQ ID NO: 30113 - protein, 8 aa, Artificial sequence
  Protein classification predicting sequence
LAYLRQVF

SEQ ID NO: 30114 - protein, 14 aa, Artificial sequence
  Protein classification predicting sequence
DTDFYKLLMLQMIW

SEQ ID NO: 30115 - protein, 10 aa, Artificial sequence
  Protein classification predicting sequence
GTNAHELPMV

SEQ ID NO: 30116 - protein, 10 aa, Artificial sequence
  Protein classification predicting sequence
SLLDTDLYKF

SEQ ID NO: 30117 - protein, 7 aa, Artificial sequence
  Protein classification predicting sequence
KTLVFSD

SEQ ID NO: 30118 - protein, 14 aa, Artificial sequence
  Protein classification predicting sequence
GTQAHEWFQAHQQI

SEQ ID NO: 30119 - protein, 7 aa, Artificial sequence
  Protein classification predicting sequence
ITMDAFL

SEQ ID NO: 30120 - protein, 9 aa, Artificial sequence
  Protein classification predicting sequence
HYEKLGIDP

SEQ ID NO: 30121 - protein, 7 aa, Artificial sequence
  Protein classification predicting sequence
PVAKISD

SEQ ID NO: 30122 - protein, 8 aa, Artificial sequence
  Protein classification predicting sequence
LLDTDAYK

SEQ ID NO: 30123 - protein, 6 aa, Artificial sequence
  Protein classification predicting sequence
WGEKAI

SEQ ID NO: 30124 - protein, 11 aa, Artificial sequence
  Protein classification predicting sequence
VKPLNIVIKLV

SEQ ID NO: 30125 - protein, 6 aa, Artificial sequence
  Protein classification predicting sequence
YGTRRR

SEQ ID NO: 30126 - protein, 14 aa, Artificial sequence
  Protein classification predicting sequence
YGTRRRFSKVWHEE

SEQ ID NO: 30127 - protein, 13 aa, Artificial sequence
  Protein classification predicting sequence
TPLGTMAHEYLQA

SEQ ID NO: 30128 - protein, 6 aa, Artificial sequence
  Protein classification predicting sequence
HEYLQA

SEQ ID NO: 30129 - protein, 11 aa, Artificial sequence
  Protein classification predicting sequence
QALGPRLRDSQ

SEQ ID NO: 30130 - protein, 26 aa, Artificial sequence
  Protein classification predicting sequence
KGPWLHTILFEIPVLAIVNEVYFRNT

SEQ ID NO: 30131 - protein, 45 aa, Artificial sequence
  Protein classification predicting sequence
WAKEYRGDLGIALSDVYGMDAFLRDFDMYFCKLFDGARHDSGDPF

SEQ ID NO: 30132 - protein, 12 aa, Artificial sequence
  Protein classification predicting sequence
SLLDTDLYKFTM

SEQ ID NO: 30133 - protein, 21 aa, Artificial sequence
  Protein classification predicting sequence
SLLDTDLYKFTMLQVVLHQFP

SEQ ID NO: 30134 - protein, 8 aa, Artificial sequence
  Protein classification predicting sequence
QAMFFEIF

SEQ ID NO: 30135 - protein, 10 aa, Artificial sequence
  Protein classification predicting sequence
LAIVNELYFR

SEQ ID NO: 30136 - protein, 7 aa, Artificial sequence
  Protein classification predicting sequence
DFGTRRR

SEQ ID NO: 30137 - protein, 9 aa, Artificial sequence
  Protein classification predicting sequence
DFGTRRRFS

SEQ ID NO: 30138 - protein, 10 aa, Artificial sequence
  Protein classification predicting sequence
FQKAALESWV

SEQ ID NO: 30139 - protein, 12 aa, Artificial sequence
  Protein classification predicting sequence
ALTDVVGMDAFL

SEQ ID NO: 30140 - protein, 9 aa, Artificial sequence
  Protein classification predicting sequence
WGEKAIAHY

SEQ ID NO: 30141 - protein, 8 aa, Artificial sequence
  Protein classification predicting sequence
LESKLVDF

SEQ ID NO: 30142 - protein, 23 aa, Artificial sequence
  Protein classification predicting sequence
IVKRLQQESWFVGTSNYDLARRL

SEQ ID NO: 30143 - protein, 17 aa, Artificial sequence
  Protein classification predicting sequence
EFASRYQGLRHDSGDPV

SEQ ID NO: 30144 - protein, 12 aa, Artificial sequence
  Protein classification predicting sequence
WGEKAIAHYEKL

SEQ ID NO: 30145 - protein, 9 aa, Artificial sequence
  Protein classification predicting sequence
KAVELYRHF

SEQ ID NO: 30146 - protein, 32 aa, Artificial sequence
  Protein classification predicting sequence
TQFASPVLHSLLDTDAYKLHMQQAVFHHYYDV

SEQ ID NO: 30147 - protein, 17 aa, Artificial sequence
  Protein classification predicting sequence
QESWFVGTSNYDLARRL

SEQ ID NO: 30148 - protein, 22 aa, Artificial sequence
  Protein classification predicting sequence
LDMSRFHLMDFGTRRRFSREVQ

SEQ ID NO: 30149 - protein, 24 aa, Artificial sequence
  Protein classification predicting sequence
EYPDQLGIALTDCITMDAFLRDFG

SEQ ID NO: 30150 - protein, 65 aa, Artificial sequence
  Protein classification predicting sequence
SRVQLSFGIGTRLTCDIPQVKPLNIVIKLVECNGKPVAKLSDSPGKTICHDKAFVRALRKAFDLP

SEQ ID NO: 30151 - protein, 7 aa, Artificial sequence
  Protein classification predicting sequence
DYLNWLR

SEQ ID NO: 30152 - protein, 7 aa, Artificial sequence
  Protein classification predicting sequence
GPWREVI

SEQ ID NO: 30153 - protein, 11 aa, Artificial sequence
  Protein classification predicting sequence
WEVPLLAVISE

SEQ ID NO: 30154 - protein, 9 aa, Artificial sequence
  Protein classification predicting sequence
GTRLTCDIP

SEQ ID NO: 30155 - protein, 7 aa, Artificial sequence
  Protein classification predicting sequence
DLYKFTM

SEQ ID NO: 30156 - protein, 7 aa, Artificial sequence
  Protein classification predicting sequence
GDLGIAL

SEQ ID NO: 30157 - protein, 7 aa, Artificial sequence
  Protein classification predicting sequence
RHDSGDP

SEQ ID NO: 30158 - protein, 6 aa, Artificial sequence
  Protein classification predicting sequence
KLSDSP

SEQ ID NO: 30159 - protein, 7 aa, Artificial sequence
  Protein classification predicting sequence
LCQLRFT

SEQ ID NO: 30160 - protein, 8 aa, Artificial sequence
  Protein classification predicting sequence
YLSSLPFF

SEQ ID NO: 30161 - protein, 9 aa, Artificial sequence
  Protein classification predicting sequence
LPFFKADYL

SEQ ID NO: 30162 - protein, 13 aa, Artificial sequence
  Protein classification predicting sequence
GTQAHEWFQAHQQ

SEQ ID NO: 30163 - protein, 7 aa, Artificial sequence
  Protein classification predicting sequence
DAFLRDF

SEQ ID NO: 30164 - protein, 18 aa, Artificial sequence
  Protein classification predicting sequence
DFDLYFAKLFDGLRHDSG

SEQ ID NO: 30165 - protein, 7 aa, Artificial sequence
  Protein classification predicting sequence
GPWLHTI

SEQ ID NO: 30166 - protein, 11 aa, Artificial sequence
  Protein classification predicting sequence
PVLAIVNEVYF

SEQ ID NO: 30167 - protein, 12 aa, Artificial sequence
  Protein classification predicting sequence
EYRGDLGIALSD

SEQ ID NO: 30168 - protein, 7 aa, Artificial sequence
  Protein classification predicting sequence
FCKLFDG

SEQ ID NO: 30169 - protein, 7 aa, Artificial sequence
  Protein classification predicting sequence
PVAKLSD

SEQ ID NO: 30170 - protein, 18 aa, Artificial sequence
  Protein classification predicting sequence
SDAPEKTMCDDPAYLAYL

SEQ ID NO: 30171 - protein, 11 aa, Artificial sequence
  Protein classification predicting sequence
VDATFSLINRT

SEQ ID NO: 30172 - protein, 18 aa, Artificial sequence
  Protein classification predicting sequence
WEIPALAIINELRSRAAM

SEQ ID NO: 30173 - protein, 13 aa, Artificial sequence
  Protein classification predicting sequence
LDVLYARAKAKMW

SEQ ID NO: 30174 - protein, 8 aa, Artificial sequence
  Protein classification predicting sequence
VAAEFRCR

SEQ ID NO: 30175 - protein, 7 aa, Artificial sequence
  Protein classification predicting sequence
GTRRRFS

SEQ ID NO: 30176 - protein, 8 aa, Artificial sequence
  Protein classification predicting sequence
PEKAMCED

SEQ ID NO: 30177 - protein, 6 aa, Artificial sequence
  Protein classification predicting sequence
TRRRFS

SEQ ID NO: 30178 - protein, 6 aa, Artificial sequence
  Protein classification predicting sequence
IVIKMV

SEQ ID NO: 30179 - protein, 8 aa, Artificial sequence
  Protein classification predicting sequence
RHDSGDPF

SEQ ID NO: 30180 - protein, 11 aa, Artificial sequence
  Protein classification predicting sequence
DFVDFLGLFHL

SEQ ID NO: 30181 - protein, 8 aa, Artificial sequence
  Protein classification predicting sequence
MCDDPAYL

SEQ ID NO: 30182 - protein, 20 aa, Artificial sequence
  Protein classification predicting sequence
SLLDTDAYKLHMQQAVFHHY

SEQ ID NO: 30183 - protein, 9 aa, Artificial sequence
  Protein classification predicting sequence
GLRHDSGDP

SEQ ID NO: 30184 - protein, 20 aa, Artificial sequence
  Protein classification predicting sequence
PLPADALVSAFCLEAVSPDL

SEQ ID NO: 30185 - protein, 10 aa, Artificial sequence
  Protein classification predicting sequence
HITTLLRPGG

SEQ ID NO: 30186 - protein, 11 aa, Artificial sequence
  Protein classification predicting sequence
RLIDRPIRPLF

SEQ ID NO: 30187 - protein, 7 aa, Artificial sequence
  Protein classification predicting sequence
RREIGHG

SEQ ID NO: 30188 - protein, 9 aa, Artificial sequence
  Protein classification predicting sequence
SEVLESNGS

SEQ ID NO: 30189 - protein, 10 aa, Artificial sequence
  Protein classification predicting sequence
VAGIAMGLVK

SEQ ID NO: 30190 - protein, 8 aa, Artificial sequence
  Protein classification predicting sequence
GITALQMD

SEQ ID NO: 30191 - protein, 7 aa, Artificial sequence
  Protein classification predicting sequence
QYVLNPT

SEQ ID NO: 30192 - protein, 8 aa, Artificial sequence
  Protein classification predicting sequence
LFTRGETQ

SEQ ID NO: 30193 - protein, 8 aa, Artificial sequence
  Protein classification predicting sequence
IEIEDDGT

SEQ ID NO: 30194 - protein, 15 aa, Artificial sequence
  Protein classification predicting sequence
DILGDEDHLGDMDFK

SEQ ID NO: 30195 - protein, 6 aa, Artificial sequence
  Protein classification predicting sequence
GDMDFK

SEQ ID NO: 30196 - protein, 9 aa, Artificial sequence
  Protein classification predicting sequence
AVLMVESEA

SEQ ID NO: 30197 - protein, 7 aa, Artificial sequence
  Protein classification predicting sequence
FTRGETQ

SEQ ID NO: 30198 - protein, 47 aa, Artificial sequence
  Protein classification predicting sequence
VRVVSEITESNGSSSMASVCGASLALMDAGVPIKAAVAGIAMGLVKE

SEQ ID NO: 30199 - protein, 7 aa, Artificial sequence
  Protein classification predicting sequence
EIDRQGR

SEQ ID NO: 30200 - protein, 19 aa, Artificial sequence
  Protein classification predicting sequence
KINPEKIKDVIGKGGSVIR

SEQ ID NO: 30201 - protein, 6 aa, Artificial sequence
  Protein classification predicting sequence
NYEARK

SEQ ID NO: 30202 - protein, 7 aa, Artificial sequence
  Protein classification predicting sequence
DMDAFYA

SEQ ID NO: 30203 - protein, 7 aa, Artificial sequence
  Protein classification predicting sequence
SLDEAYL

SEQ ID NO: 30204 - protein, 7 aa, Artificial sequence
  Protein classification predicting sequence
ELHKRRK

SEQ ID NO: 30205 - protein, 10 aa, Artificial sequence
  Protein classification predicting sequence
CGTPNYIAPE

SEQ ID NO: 30206 - protein, 6 aa, Artificial sequence
  Protein classification predicting sequence
GYQLCD

SEQ ID NO: 30207 - protein, 9 aa, Artificial sequence
  Protein classification predicting sequence
QEVSCYIDY

SEQ ID NO: 30208 - protein, 8 aa, Artificial sequence
  Protein classification predicting sequence
SMPGMMDT

SEQ ID NO: 30209 - protein, 10 aa, Artificial sequence
  Protein classification predicting sequence
NAQGEDVVAG

SEQ ID NO: 30210 - protein, 7 aa, Artificial sequence
  Protein classification predicting sequence
LDQLLHP

SEQ ID NO: 30211 - protein, 6 aa, Artificial sequence
  Protein classification predicting sequence
CCVSGC

SEQ ID NO: 30212 - protein, 11 aa, Artificial sequence
  Protein classification predicting sequence
GTMIEIPRAAL

SEQ ID NO: 30213 - protein, 8 aa, Artificial sequence
  Protein classification predicting sequence
GICGEHGG

SEQ ID NO: 30214 - protein, 9 aa, Artificial sequence
  Protein classification predicting sequence
GLPASPGAA

SEQ ID NO: 30215 - protein, 8 aa, Artificial sequence
  Protein classification predicting sequence
GIGLCRTE

SEQ ID NO: 30216 - protein, 12 aa, Artificial sequence
  Protein classification predicting sequence
RLLDPPLHEFLP

SEQ ID NO: 30217 - protein, 13 aa, Artificial sequence
  Protein classification predicting sequence
VGICGEHGGEPSS

SEQ ID NO: 30218 - protein, 42 aa, Artificial sequence
  Protein classification predicting sequence
HYKDMMDIEFTVQENRLWMLQCRTGKRTGKGAVRIAVDMVNE

SEQ ID NO: 30219 - protein, 15 aa, Artificial sequence
  Protein classification predicting sequence
YVQKEMSASLGDPSK

SEQ ID NO: 30220 - protein, 14 aa, Artificial sequence
  Protein classification predicting sequence
NAQGEDVVAGIRTP

SEQ ID NO: 30221 - protein, 7 aa, Artificial sequence
  Protein classification predicting sequence
EMQVRAI

SEQ ID NO: 30222 - protein, 9 aa, Artificial sequence
  Protein classification predicting sequence
GTMIELPRA

SEQ ID NO: 30223 - protein, 12 aa, Artificial sequence
  Protein classification predicting sequence
RRFLDMFGNVVM

SEQ ID NO: 30224 - protein, 10 aa, Artificial sequence
  Protein classification predicting sequence
DPKKQLELAV

SEQ ID NO: 30225 - protein, 11 aa, Artificial sequence
  Protein classification predicting sequence
KYRSINQITGL

SEQ ID NO: 30226 - protein, 7 aa, Artificial sequence
  Protein classification predicting sequence
MQDIEFT

SEQ ID NO: 30227 - protein, 13 aa, Artificial sequence
  Protein classification predicting sequence
ETSPEDVGGMHAA

SEQ ID NO: 30228 - protein, 33 aa, Artificial sequence
  Protein classification predicting sequence
DALTARNNGAQGIGLCRTEHMFFASDERIKAVR

SEQ ID NO: 30229 - protein, 24 aa, Artificial sequence
  Protein classification predicting sequence
YQRSDFEGIFRAMDGLPVTIRLLD

SEQ ID NO: 30230 - protein, 14 aa, Artificial sequence
  Protein classification predicting sequence
PEIMVPLVGTPQEL

SEQ ID NO: 30231 - protein, 21 aa, Artificial sequence
  Protein classification predicting sequence
RFAYDSYRRFLDMFGNVVMGI

SEQ ID NO: 30232 - protein, 11 aa, Artificial sequence
  Protein classification predicting sequence
AVFDSWDSPRA

SEQ ID NO: 30233 - protein, 14 aa, Artificial sequence
  Protein classification predicting sequence
ATGLPASPGAAVGQ

SEQ ID NO: 30234 - protein, 12 aa, Artificial sequence
  Protein classification predicting sequence
RGGMTSHAAVVA

SEQ ID NO: 30235 - protein, 10 aa, Artificial sequence
  Protein classification predicting sequence
LKVMANADTP

SEQ ID NO: 30236 - protein, 9 aa, Artificial sequence
  Protein classification predicting sequence
VRKMIMAVT

SEQ ID NO: 30237 - protein, 10 aa, Artificial sequence
  Protein classification predicting sequence
RAIFQAAVSM

SEQ ID NO: 30238 - protein, 19 aa, Artificial sequence
  Protein classification predicting sequence
LKVGICGEHGGEPSSVAFF

SEQ ID NO: 30239 - protein, 11 aa, Artificial sequence
  Protein classification predicting sequence
LGGKGANLAEM

SEQ ID NO: 30240 - protein, 9 aa, Artificial sequence
  Protein classification predicting sequence
PEIMVPLVG

SEQ ID NO: 30241 - protein, 10 aa, Artificial sequence
  Protein classification predicting sequence
FSFGTNDLTQ

SEQ ID NO: 30242 - protein, 5 aa, Artificial sequence
  Protein classification predicting sequence
EHMFF

SEQ ID NO: 30243 - protein, 7 aa, Artificial sequence
  Protein classification predicting sequence
EVNPMLG

SEQ ID NO: 30244 - protein, 7 aa, Artificial sequence
  Protein classification predicting sequence
PLHEFLP

SEQ ID NO: 30245 - protein, 7 aa, Artificial sequence
  Protein classification predicting sequence
NRELSWL

SEQ ID NO: 30246 - protein, 7 aa, Artificial sequence
  Protein classification predicting sequence
PVLTPLA

SEQ ID NO: 30247 - protein, 7 aa, Artificial sequence
  Protein classification predicting sequence
IKQTLYR

SEQ ID NO: 30248 - protein, 7 aa, Artificial sequence
  Protein classification predicting sequence
HLGTGNY

SEQ ID NO: 30249 - protein, 6 aa, Artificial sequence
  Protein classification predicting sequence
NRELSW

SEQ ID NO: 30250 - protein, 9 aa, Artificial sequence
  Protein classification predicting sequence
LFNSLTGYS

SEQ ID NO: 30251 - protein, 8 aa, Artificial sequence
  Protein classification predicting sequence
KMNALVDE

SEQ ID NO: 30252 - protein, 8 aa, Artificial sequence
  Protein classification predicting sequence
GRFLEHSR

SEQ ID NO: 30253 - protein, 7 aa, Artificial sequence
  Protein classification predicting sequence
DPAHPFP

SEQ ID NO: 30254 - protein, 8 aa, Artificial sequence
  Protein classification predicting sequence
FRVTRNAD

SEQ ID NO: 30255 - protein, 6 aa, Artificial sequence
  Protein classification predicting sequence
ARFDEE

SEQ ID NO: 30256 - protein, 10 aa, Artificial sequence
  Protein classification predicting sequence
KKLLHAPFTL

SEQ ID NO: 30257 - protein, 6 aa, Artificial sequence
  Protein classification predicting sequence
CCLRPG

SEQ ID NO: 30258 - protein, 8 aa, Artificial sequence
  Protein classification predicting sequence
QIDLIVRG

SEQ ID NO: 30259 - protein, 13 aa, Artificial sequence
  Protein classification predicting sequence
AEPVRFVYQRDMP

SEQ ID NO: 30260 - protein, 23 aa, Artificial sequence
  Protein classification predicting sequence
KLTISRYDSIVPGGRYHNFKDFI

SEQ ID NO: 30261 - protein, 7 aa, Artificial sequence
  Protein classification predicting sequence
MIHAAHN

SEQ ID NO: 30262 - protein, 22 aa, Artificial sequence
  Protein classification predicting sequence
KKVTVVVELQARFDEEANIHWA

SEQ ID NO: 30263 - protein, 31 aa, Artificial sequence
  Protein classification predicting sequence
YTDYSLLTADARITNEVRRVFNFIENPYRPV

SEQ ID NO: 30264 - protein, 32 aa, Artificial sequence
  Protein classification predicting sequence
SGITLKLNNLVDKGLVDRLYAASSSGVPVNLL

SEQ ID NO: 30265 - protein, 9 aa, Artificial sequence
  Protein classification predicting sequence
LEGISDNIR

SEQ ID NO: 30266 - protein, 12 aa, Artificial sequence
  Protein classification predicting sequence
ISIVDRYLEHDR

SEQ ID NO: 30267 - protein, 7 aa, Artificial sequence
  Protein classification predicting sequence
SNLDEFF

SEQ ID NO: 30268 - protein, 7 aa, Artificial sequence
  Protein classification predicting sequence
GLKTHCK

SEQ ID NO: 30269 - protein, 9 aa, Artificial sequence
  Protein classification predicting sequence
LEHSRIYYF

SEQ ID NO: 30270 - protein, 8 aa, Artificial sequence
  Protein classification predicting sequence
MVRVAGLK

SEQ ID NO: 30271 - protein, 8 aa, Artificial sequence
  Protein classification predicting sequence
SSNLDEFF

SEQ ID NO: 30272 - protein, 7 aa, Artificial sequence
  Protein classification predicting sequence
VTVVVEL

SEQ ID NO: 30273 - protein, 10 aa, Artificial sequence
  Protein classification predicting sequence
IFSSNLDEFF

SEQ ID NO: 30274 - protein, 13 aa, Artificial sequence
  Protein classification predicting sequence
DPNVLAIKQTLYR

SEQ ID NO: 30275 - protein, 10 aa, Artificial sequence
  Protein classification predicting sequence
VLAIKQTLYR

SEQ ID NO: 30276 - protein, 30 aa, Artificial sequence
  Protein classification predicting sequence
FDGLYNELLLEMARNQIFLINERQLSVNQQ

SEQ ID NO: 30277 - protein, 6 aa, Artificial sequence
  Protein classification predicting sequence
DTVKAR

SEQ ID NO: 30278 - protein, 18 aa, Artificial sequence
  Protein classification predicting sequence
IDKELSNRYVPRGNRRKV

SEQ ID NO: 30279 - protein, 35 aa, Artificial sequence
  Protein classification predicting sequence
DREIANAQQGLPSGITLKLNNLVDKGLVDRLYAAS

SEQ ID NO: 30280 - protein, 32 aa, Artificial sequence
  Protein classification predicting sequence
LEGISDNIRAISIVDRYLEHDRVYIFENGGDK

SEQ ID NO: 30281 - protein, 24 aa, Artificial sequence
  Protein classification predicting sequence
LDPRLKQRVLDIIDILFSDTVKAR

SEQ ID NO: 30282 - protein, 12 aa, Artificial sequence
  Protein classification predicting sequence
FLAIFASNLDEF

SEQ ID NO: 30283 - protein, 6 aa, Artificial sequence
  Protein classification predicting sequence
FPVLTP

SEQ ID NO: 30284 - protein, 10 aa, Artificial sequence
  Protein classification predicting sequence
VRGICALRPG

SEQ ID NO: 30285 - protein, 13 aa, Artificial sequence
  Protein classification predicting sequence
GSADMMHRNLDRR

SEQ ID NO: 30286 - protein, 8 aa, Artificial sequence
  Protein classification predicting sequence
PLLERLKF

SEQ ID NO: 30287 - protein, 6 aa, Artificial sequence
  Protein classification predicting sequence
RVAGLK

SEQ ID NO: 30288 - protein, 12 aa, Artificial sequence
  Protein classification predicting sequence
TLYRTSGDSPIV

SEQ ID NO: 30289 - protein, 8 aa, Artificial sequence
  Protein classification predicting sequence
RNLDRRVE

SEQ ID NO: 30290 - protein, 11 aa, Artificial sequence
  Protein classification predicting sequence
NLDEFFMVRVA

SEQ ID NO: 30291 - protein, 7 aa, Artificial sequence
  Protein classification predicting sequence
IKMTLYR

SEQ ID NO: 30292 - protein, 6 aa, Artificial sequence
  Protein classification predicting sequence
RGMCSL

SEQ ID NO: 30293 - protein, 11 aa, Artificial sequence
  Protein classification predicting sequence
FPVLTPLAVDP

SEQ ID NO: 30294 - protein, 19 aa, Artificial sequence
  Protein classification predicting sequence
KELSWLSFNERVLQEAADK

SEQ ID NO: 30295 - protein, 13 aa, Artificial sequence
  Protein classification predicting sequence
QFLKDEYAYIAVE

SEQ ID NO: 30296 - protein, 12 aa, Artificial sequence
  Protein classification predicting sequence
IKINIYRVAKDS

SEQ ID NO: 30297 - protein, 15 aa, Artificial sequence
  Protein classification predicting sequence
VVVELQARFDEEANI

SEQ ID NO: 30298 - protein, 8 aa, Artificial sequence
  Protein classification predicting sequence
FKGFFDYD

SEQ ID NO: 30299 - protein, 15 aa, Artificial sequence
  Protein classification predicting sequence
GYAMKMTRDAEYDLR

SEQ ID NO: 30300 - protein, 9 aa, Artificial sequence
  Protein classification predicting sequence
CADFEGYAN

SEQ ID NO: 30301 - protein, 9 aa, Artificial sequence
  Protein classification predicting sequence
LLYYPYHTF

SEQ ID NO: 30302 - protein, 12 aa, Artificial sequence
  Protein classification predicting sequence
ELVRQASFDPKV

SEQ ID NO: 30303 - protein, 7 aa, Artificial sequence
  Protein classification predicting sequence
AGVHVIF

SEQ ID NO: 30304 - protein, 7 aa, Artificial sequence
  Protein classification predicting sequence
APGLKIH

SEQ ID NO: 30305 - protein, 10 aa, Artificial sequence
  Protein classification predicting sequence
RYAHIGTGNF

SEQ ID NO: 30306 - protein, 8 aa, Artificial sequence
  Protein classification predicting sequence
IENPYRPV

SEQ ID NO: 30307 - protein, 7 aa, Artificial sequence
  Protein classification predicting sequence
NNLVDKG

SEQ ID NO: 30308 - protein, 9 aa, Artificial sequence
  Protein classification predicting sequence
DRFLEHPRV

SEQ ID NO: 30309 - protein, 6 aa, Artificial sequence
  Protein classification predicting sequence
SSADWM

SEQ ID NO: 30310 - protein, 12 aa, Artificial sequence
  Protein classification predicting sequence
SNNLDEFYKVRF

SEQ ID NO: 30311 - protein, 7 aa, Artificial sequence
  Protein classification predicting sequence
KRRILIN

SEQ ID NO: 30312 - protein, 11 aa, Artificial sequence
  Protein classification predicting sequence
KADQEFDGLYN

SEQ ID NO: 30313 - protein, 12 aa, Artificial sequence
  Protein classification predicting sequence
LLLEMARNQIFL

SEQ ID NO: 30314 - protein, 11 aa, Artificial sequence
  Protein classification predicting sequence
LRQHITPILIN

SEQ ID NO: 30315 - protein, 19 aa, Artificial sequence
  Protein classification predicting sequence
LVQFLKDDYTYLAVEIIRG

SEQ ID NO: 30316 - protein, 27 aa, Artificial sequence
  Protein classification predicting sequence
IFKGFFDYDALNAYSMKMTRDAEYDLV

SEQ ID NO: 30317 - protein, 25 aa, Artificial sequence
  Protein classification predicting sequence
ELMSSSLKQRLTAEPVRFVYQRDMP

SEQ ID NO: 30318 - protein, 11 aa, Artificial sequence
  Protein classification predicting sequence
GGRYHNFKDFI

SEQ ID NO: 30319 - protein, 23 aa, Artificial sequence
  Protein classification predicting sequence
AGVHVIFSAPGLKIHAKLFLISR

SEQ ID NO: 30320 - protein, 13 aa, Artificial sequence
  Protein classification predicting sequence
NNLVDKGLVDRLY

SEQ ID NO: 30321 - protein, 7 aa, Artificial sequence
  Protein classification predicting sequence
LEHDRVY

SEQ ID NO: 30322 - protein, 8 aa, Artificial sequence
  Protein classification predicting sequence
LKQRVLDI

SEQ ID NO: 30323 - protein, 8 aa, Artificial sequence
  Protein classification predicting sequence
VSTPTGST

SEQ ID NO: 30324 - protein, 7 aa, Artificial sequence
  Protein classification predicting sequence
TDPDWEP

SEQ ID NO: 30325 - protein, 14 aa, Artificial sequence
  Protein classification predicting sequence
DVAVRSSATAEDLP

SEQ ID NO: 30326 - protein, 8 aa, Artificial sequence
  Protein classification predicting sequence
SDFKSNEY

SEQ ID NO: 30327 - protein, 10 aa, Artificial sequence
  Protein classification predicting sequence
CGTPEYLAPE

SEQ ID NO: 30328 - protein, 10 aa, Artificial sequence
  Protein classification predicting sequence
AAKTALSLGV

SEQ ID NO: 30329 - protein, 7 aa, Artificial sequence
  Protein classification predicting sequence
SLLPAGV

SEQ ID NO: 30330 - protein, 8 aa, Artificial sequence
  Protein classification predicting sequence
QAAAAVGQ

SEQ ID NO: 30331 - protein, 9 aa, Artificial sequence
  Protein classification predicting sequence
LLSDIDGLY

SEQ ID NO: 30332 - protein, 6 aa, Artificial sequence
  Protein classification predicting sequence
GGMRTK

SEQ ID NO: 30333 - protein, 9 aa, Artificial sequence
  Protein classification predicting sequence
TKLDAGKIA

SEQ ID NO: 30334 - protein, 13 aa, Artificial sequence
  Protein classification predicting sequence
AAGTAMIITSGTR

SEQ ID NO: 30335 - protein, 14 aa, Artificial sequence
  Protein classification predicting sequence
LEPAGRLTVDAGAV

SEQ ID NO: 30336 - protein, 6 aa, Artificial sequence
  Protein classification predicting sequence
GNFSRG

SEQ ID NO: 30337 - protein, 6 aa, Artificial sequence
  Protein classification predicting sequence
EIARGL

SEQ ID NO: 30338 - protein, 9 aa, Artificial sequence
  Protein classification predicting sequence
GKSLLPAGV

SEQ ID NO: 30339 - protein, 7 aa, Artificial sequence
  Protein classification predicting sequence
GLYDANP

SEQ ID NO: 30340 - protein, 8 aa, Artificial sequence
  Protein classification predicting sequence
ADLLILLS

SEQ ID NO: 30341 - protein, 6 aa, Artificial sequence
  Protein classification predicting sequence
DPRNNP

SEQ ID NO: 30342 - protein, 6 aa, Artificial sequence
  Protein classification predicting sequence
DPRSNP

SEQ ID NO: 30343 - protein, 15 aa, Artificial sequence
  Protein classification predicting sequence
DTEERRRYLNARATI

SEQ ID NO: 30344 - protein, 7 aa, Artificial sequence
  Protein classification predicting sequence
VGQVLLT

SEQ ID NO: 30345 - protein, 10 aa, Artificial sequence
  Protein classification predicting sequence
VVLVSSGAIA

SEQ ID NO: 30346 - protein, 7 aa, Artificial sequence
  Protein classification predicting sequence
LLTHDDL

SEQ ID NO: 30347 - protein, 9 aa, Artificial sequence
  Protein classification predicting sequence
RYLNARSTL

SEQ ID NO: 30348 - protein, 10 aa, Artificial sequence
  Protein classification predicting sequence
ARKQWLADHL

SEQ ID NO: 30349 - protein, 7 aa, Artificial sequence
  Protein classification predicting sequence
PIINEND

SEQ ID NO: 30350 - protein, 8 aa, Artificial sequence
  Protein classification predicting sequence
GTGGMKSK

SEQ ID NO: 30351 - protein, 25 aa, Artificial sequence
  Protein classification predicting sequence
VVEVMTQQGRVIGKGQCTYSAEELR

SEQ ID NO: 30352 - protein, 9 aa, Artificial sequence
  Protein classification predicting sequence
VVKIGSSSL

SEQ ID NO: 30353 - protein, 13 aa, Artificial sequence
  Protein classification predicting sequence
VVKIGSSSLADSH

SEQ ID NO: 30354 - protein, 15 aa, Artificial sequence
  Protein classification predicting sequence
EQLSDHVAALARLKE

SEQ ID NO: 30355 - protein, 15 aa, Artificial sequence
  Protein classification predicting sequence
DAKKYYFLPEVTEEI

SEQ ID NO: 30356 - protein, 24 aa, Artificial sequence
  Protein classification predicting sequence
DAGAATAIIQHGKSLLPAGVTNVS

SEQ ID NO: 30357 - protein, 19 aa, Artificial sequence
  Protein classification predicting sequence
TQQGRVIGKGQCTYSAEEL

SEQ ID NO: 30358 - protein, 8 aa, Artificial sequence
  Protein classification predicting sequence
KIGSSSLT

SEQ ID NO: 30359 - protein, 8 aa, Artificial sequence
  Protein classification predicting sequence
TDVNGLYD

SEQ ID NO: 30360 - protein, 6 aa, Artificial sequence
  Protein classification predicting sequence
GKSLLP

SEQ ID NO: 30361 - protein, 9 aa, Artificial sequence
  Protein classification predicting sequence
KQAAAAVGQ

SEQ ID NO: 30362 - protein, 7 aa, Artificial sequence
  Protein classification predicting sequence
LSALVSG

SEQ ID NO: 30363 - protein, 21 aa, Artificial sequence
  Protein classification predicting sequence
LGYPSRPVTIKGKQAAAAVGQ

SEQ ID NO: 30364 - protein, 8 aa, Artificial sequence
  Protein classification predicting sequence
PIVNENDT

SEQ ID NO: 30365 - protein, 10 aa, Artificial sequence
  Protein classification predicting sequence
LLSDIDGLYT

SEQ ID NO: 30366 - protein, 8 aa, Artificial sequence
  Protein classification predicting sequence
SELSRGGM

SEQ ID NO: 30367 - protein, 19 aa, Artificial sequence
  Protein classification predicting sequence
SELSRGGMKTKLDAGKIAN

SEQ ID NO: 30368 - protein, 10 aa, Artificial sequence
  Protein classification predicting sequence
AGTAMIITSG

SEQ ID NO: 30369 - protein, 11 aa, Artificial sequence
  Protein classification predicting sequence
PVNAWKTWISG

SEQ ID NO: 30370 - protein, 6 aa, Artificial sequence
  Protein classification predicting sequence
NENDTV

SEQ ID NO: 30371 - protein, 7 aa, Artificial sequence
  Protein classification predicting sequence
GSALLVD

SEQ ID NO: 30372 - protein, 12 aa, Artificial sequence
  Protein classification predicting sequence
DTEERRRYLNAR

SEQ ID NO: 30373 - protein, 6 aa, Artificial sequence
  Protein classification predicting sequence
RYLNAR

SEQ ID NO: 30374 - protein, 18 aa, Artificial sequence
  Protein classification predicting sequence
GGMLTKILAAKRAAHSGA

SEQ ID NO: 30375 - protein, 6 aa, Artificial sequence
  Protein classification predicting sequence
GQSLLM

SEQ ID NO: 30376 - protein, 11 aa, Artificial sequence
  Protein classification predicting sequence
LLSDIDGLYTA

SEQ ID NO: 30377 - protein, 19 aa, Artificial sequence
  Protein classification predicting sequence
HELQAAAAVGQMGLCQAYE

SEQ ID NO: 30378 - protein, 18 aa, Artificial sequence
  Protein classification predicting sequence
FGLRTAQILLTHEDLADR

SEQ ID NO: 30379 - protein, 9 aa, Artificial sequence
  Protein classification predicting sequence
INENDTVAT

SEQ ID NO: 30380 - protein, 23 aa, Artificial sequence
  Protein classification predicting sequence
EIRFGDNDTLGALVTNLIEADAL

SEQ ID NO: 30381 - protein, 9 aa, Artificial sequence
  Protein classification predicting sequence
ILTDQRGLY

SEQ ID NO: 30382 - protein, 10 aa, Artificial sequence
  Protein classification predicting sequence
TKILAAKRAA

SEQ ID NO: 30383 - protein, 7 aa, Artificial sequence
  Protein classification predicting sequence
ARKQWLA

SEQ ID NO: 30384 - protein, 7 aa, Artificial sequence
  Protein classification predicting sequence
VAQVLLT

SEQ ID NO: 30385 - protein, 7 aa, Artificial sequence
  Protein classification predicting sequence
VVKVGSS

SEQ ID NO: 30386 - protein, 7 aa, Artificial sequence
  Protein classification predicting sequence
GLYDKNP

SEQ ID NO: 30387 - protein, 8 aa, Artificial sequence
  Protein classification predicting sequence
DGLFDKNP

SEQ ID NO: 30388 - protein, 8 aa, Artificial sequence
  Protein classification predicting sequence
KLGTSVLT

SEQ ID NO: 30389 - protein, 7 aa, Artificial sequence
  Protein classification predicting sequence
PVINEND

SEQ ID NO: 30390 - protein, 10 aa, Artificial sequence
  Protein classification predicting sequence
VANLVEADLL

SEQ ID NO: 30391 - protein, 8 aa, Artificial sequence
  Protein classification predicting sequence
GLYTADPR

SEQ ID NO: 30392 - protein, 9 aa, Artificial sequence
  Protein classification predicting sequence
VSSGAVAAG

SEQ ID NO: 30393 - protein, 8 aa, Artificial sequence
  Protein classification predicting sequence
LYDKNPQK

SEQ ID NO: 30394 - protein, 7 aa, Artificial sequence
  Protein classification predicting sequence
AVGQSRL

SEQ ID NO: 30395 - protein, 11 aa, Artificial sequence
  Protein classification predicting sequence
GADKLLLLTDQ

SEQ ID NO: 30396 - protein, 18 aa, Artificial sequence
  Protein classification predicting sequence
GSKPGVIGDVMEGISVGT

SEQ ID NO: 30397 - protein, 6 aa, Artificial sequence
  Protein classification predicting sequence
LSDIDG

SEQ ID NO: 30398 - protein, 26 aa, Artificial sequence
  Protein classification predicting sequence
KQLLAAVGQSRLIQLWEQLFSIYGIH

SEQ ID NO: 30399 - protein, 8 aa, Artificial sequence
  Protein classification predicting sequence
GLFTADPR

SEQ ID NO: 30400 - protein, 14 aa, Artificial sequence
  Protein classification predicting sequence
WIFGAPPAGEITVD

SEQ ID NO: 30401 - protein, 8 aa, Artificial sequence
  Protein classification predicting sequence
SGAVAAGF

SEQ ID NO: 30402 - protein, 7 aa, Artificial sequence
  Protein classification predicting sequence
ALLDNHI

SEQ ID NO: 30403 - protein, 7 aa, Artificial sequence
  Protein classification predicting sequence
RYNSDAL

SEQ ID NO: 30404 - protein, 13 aa, Artificial sequence
  Protein classification predicting sequence
EDRERFLNARDTL

SEQ ID NO: 30405 - protein, 9 aa, Artificial sequence
  Protein classification predicting sequence
LVDADALFI

SEQ ID NO: 30406 - protein, 7 aa, Artificial sequence
  Protein classification predicting sequence
RIVVKIG

SEQ ID NO: 30407 - protein, 11 aa, Artificial sequence
  Protein classification predicting sequence
KVSQLLLTRDV

SEQ ID NO: 30408 - protein, 7 aa, Artificial sequence
  Protein classification predicting sequence
LSDIDGL

SEQ ID NO: 30409 - protein, 9 aa, Artificial sequence
  Protein classification predicting sequence
IDQLAFVIS

SEQ ID NO: 30410 - protein, 6 aa, Artificial sequence
  Protein classification predicting sequence
QLLLTR

SEQ ID NO: 30411 - protein, 12 aa, Artificial sequence
  Protein classification predicting sequence
ADLLIMLSDIDG

SEQ ID NO: 30412 - protein, 8 aa, Artificial sequence
  Protein classification predicting sequence
NENDTVAT

SEQ ID NO: 30413 - protein, 10 aa, Artificial sequence
  Protein classification predicting sequence
EIRFGDNDRL

SEQ ID NO: 30414 - protein, 15 aa, Artificial sequence
  Protein classification predicting sequence
EIRFGDNDRLAALVA

SEQ ID NO: 30415 - protein, 10 aa, Artificial sequence
  Protein classification predicting sequence
KFGTSTLTQG

SEQ ID NO: 30416 - protein, 10 aa, Artificial sequence
  Protein classification predicting sequence
AAGRHYLNHP

SEQ ID NO: 30417 - protein, 14 aa, Artificial sequence
  Protein classification predicting sequence
IAGGSGTTLGTGGM

SEQ ID NO: 30418 - protein, 6 aa, Artificial sequence
  Protein classification predicting sequence
LGTGGM

SEQ ID NO: 30419 - protein, 15 aa, Artificial sequence
  Protein classification predicting sequence
ATRSGIETIIAPGNR

SEQ ID NO: 30420 - protein, 8 aa, Artificial sequence
  Protein classification predicting sequence
VKIGSALL

SEQ ID NO: 30421 - protein, 6 aa, Artificial sequence
  Protein classification predicting sequence
VGQMGL

SEQ ID NO: 30422 - protein, 8 aa, Artificial sequence
  Protein classification predicting sequence
TAQILLTH

SEQ ID NO: 30423 - protein, 11 aa, Artificial sequence
  Protein classification predicting sequence
FGDNDTLGALV

SEQ ID NO: 30424 - protein, 13 aa, Artificial sequence
  Protein classification predicting sequence
TKLRAARLAARSG

SEQ ID NO: 30425 - protein, 9 aa, Artificial sequence
  Protein classification predicting sequence
FGDNDRLSA

SEQ ID NO: 30426 - protein, 7 aa, Artificial sequence
  Protein classification predicting sequence
FGDNDRL

SEQ ID NO: 30427 - protein, 9 aa, Artificial sequence
  Protein classification predicting sequence
VARGVVAYD

SEQ ID NO: 30428 - protein, 8 aa, Artificial sequence
  Protein classification predicting sequence
VVLVSSGA

SEQ ID NO: 30429 - protein, 8 aa, Artificial sequence
  Protein classification predicting sequence
RYLNARST

SEQ ID NO: 30430 - protein, 8 aa, Artificial sequence
  Protein classification predicting sequence
GREIARGL

SEQ ID NO: 30431 - protein, 7 aa, Artificial sequence
  Protein classification predicting sequence
ARGLINY

SEQ ID NO: 30432 - protein, 7 aa, Artificial sequence
  Protein classification predicting sequence
VVKIGSS

SEQ ID NO: 30433 - protein, 13 aa, Artificial sequence
  Protein classification predicting sequence
DLATKQAAASVGQ

SEQ ID NO: 30434 - protein, 10 aa, Artificial sequence
  Protein classification predicting sequence
NAQRTLDRLR

SEQ ID NO: 30435 - protein, 12 aa, Artificial sequence
  Protein classification predicting sequence
RRSLLAAGITAV

SEQ ID NO: 30436 - protein, 11 aa, Artificial sequence
  Protein classification predicting sequence
NENDTVAVDEL

SEQ ID NO: 30437 - protein, 19 aa, Artificial sequence
  Protein classification predicting sequence
EDRERFLNARDTLRALLDN

SEQ ID NO: 30438 - protein, 14 aa, Artificial sequence
  Protein classification predicting sequence
EIKVGDNDNLSALV

SEQ ID NO: 30439 - protein, 34 aa, Artificial sequence
  Protein classification predicting sequence
EIKVGDNDNLSALVAILVQAEQLYLLTDQQGLFD

SEQ ID NO: 30440 - protein, 25 aa, Artificial sequence
  Protein classification predicting sequence
LPATIASKQLLAAVGQSRLIQLWEQ

SEQ ID NO: 30441 - protein, 12 aa, Artificial sequence
  Protein classification predicting sequence
EDRERFLNARDT

SEQ ID NO: 30442 - protein, 31 aa, Artificial sequence
  Protein classification predicting sequence
IVPVINENDAVATAEIKVGDNDNLSALAAIL

SEQ ID NO: 30443 - protein, 7 aa, Artificial sequence
  Protein classification predicting sequence
FSRGEVI

SEQ ID NO: 30444 - protein, 6 aa, Artificial sequence
  Protein classification predicting sequence
LGYEYG

SEQ ID NO: 30445 - protein, 9 aa, Artificial sequence
  Protein classification predicting sequence
VAVHRDDMI

SEQ ID NO: 30446 - protein, 9 aa, Artificial sequence
  Protein classification predicting sequence
LDRAHMVEL

SEQ ID NO: 30447 - protein, 8 aa, Artificial sequence
  Protein classification predicting sequence
NENDAVAT

SEQ ID NO: 30448 - protein, 9 aa, Artificial sequence
  Protein classification predicting sequence
RKRWILAGP

SEQ ID NO: 30449 - protein, 7 aa, Artificial sequence
  Protein classification predicting sequence
LLTRSDF

SEQ ID NO: 30450 - protein, 12 aa, Artificial sequence
  Protein classification predicting sequence
RPSAMHELQAAA

SEQ ID NO: 30451 - protein, 7 aa, Artificial sequence
  Protein classification predicting sequence
ADPRNNP

SEQ ID NO: 30452 - protein, 13 aa, Artificial sequence
  Protein classification predicting sequence
ELQAAAAVGQMGL

SEQ ID NO: 30453 - protein, 7 aa, Artificial sequence
  Protein classification predicting sequence
FGDNDTL

SEQ ID NO: 30454 - protein, 16 aa, Artificial sequence
  Protein classification predicting sequence
FGDNDTLGALVTNLIE

SEQ ID NO: 30455 - protein, 33 aa, Artificial sequence
  Protein classification predicting sequence
AGDSVSGLGTGGMSTKLQAADVACRAGIDTIIA

SEQ ID NO: 30456 - protein, 17 aa, Artificial sequence
  Protein classification predicting sequence
SQTLVVKLGTSVLTGGS

SEQ ID NO: 30457 - protein, 16 aa, Artificial sequence
  Protein classification predicting sequence
RLNRAHIVELVRQCAQ

SEQ ID NO: 30458 - protein, 9 aa, Artificial sequence
  Protein classification predicting sequence
GQMLLTRAD

SEQ ID NO: 30459 - protein, 22 aa, Artificial sequence
  Protein classification predicting sequence
GIDDALRAIAGDSVSGLGTGGM

SEQ ID NO: 30460 - protein, 15 aa, Artificial sequence
  Protein classification predicting sequence
TKLQAADVACRAGID

SEQ ID NO: 30461 - protein, 10 aa, Artificial sequence
  Protein classification predicting sequence
RGSSLLPKGI

SEQ ID NO: 30462 - protein, 11 aa, Artificial sequence
  Protein classification predicting sequence
AHGVSRYNSDA

SEQ ID NO: 30463 - protein, 7 aa, Artificial sequence
  Protein classification predicting sequence
IAGHHSQ

SEQ ID NO: 30464 - protein, 9 aa, Artificial sequence
  Protein classification predicting sequence
AHMVELARQ

SEQ ID NO: 30465 - protein, 7 aa, Artificial sequence
  Protein classification predicting sequence
QLFSIYG

SEQ ID NO: 30466 - protein, 8 aa, Artificial sequence
  Protein classification predicting sequence
LLTDQKGL

SEQ ID NO: 30467 - protein, 14 aa, Artificial sequence
  Protein classification predicting sequence
SVSGLGTGGMSTKL

SEQ ID NO: 30468 - protein, 12 aa, Artificial sequence
  Protein classification predicting sequence
NPQAELIKDVYG

SEQ ID NO: 30469 - protein, 27 aa, Artificial sequence
  Protein classification predicting sequence
PLENRKRWIFGAPPAGEITVDEGATAA

SEQ ID NO: 30470 - protein, 30 aa, Artificial sequence
  Protein classification predicting sequence
LERGSSLLPKGIKSVTGNFSRGEVIRICNL

SEQ ID NO: 30471 - protein, 25 aa, Artificial sequence
  Protein classification predicting sequence
GRDIAHGVSRYNSDALRRIAGHHSQ

SEQ ID NO: 30472 - protein, 10 aa, Artificial sequence
  Protein classification predicting sequence
SQAAAAVGQI

SEQ ID NO: 30473 - protein, 8 aa, Artificial sequence
  Protein classification predicting sequence
GDNDRLAA

SEQ ID NO: 30474 - protein, 7 aa, Artificial sequence
  Protein classification predicting sequence
GGMKTKL

SEQ ID NO: 30475 - protein, 17 aa, Artificial sequence
  Protein classification predicting sequence
VSQILLTRDVVVFPESL

SEQ ID NO: 30476 - protein, 18 aa, Artificial sequence
  Protein classification predicting sequence
ADLLIMLSDIDGLFDKNP

SEQ ID NO: 30477 - protein, 10 aa, Artificial sequence
  Protein classification predicting sequence
TDEIRFGDND

SEQ ID NO: 30478 - protein, 8 aa, Artificial sequence
  Protein classification predicting sequence
EIRFGDND

SEQ ID NO: 30479 - protein, 12 aa, Artificial sequence
  Protein classification predicting sequence
VIKIGTSSLVLP

SEQ ID NO: 30480 - protein, 18 aa, Artificial sequence
  Protein classification predicting sequence
VILVSSGAMGFGLDILKM

SEQ ID NO: 30481 - protein, 7 aa, Artificial sequence
  Protein classification predicting sequence
LLTRDVV

SEQ ID NO: 30482 - protein, 17 aa, Artificial sequence
  Protein classification predicting sequence
DLLIMLSDIDGLFDKNP

SEQ ID NO: 30483 - protein, 18 aa, Artificial sequence
  Protein classification predicting sequence
GKINLEKIDQLAFVISSL

SEQ ID NO: 30484 - protein, 8 aa, Artificial sequence
  Protein classification predicting sequence
VPIVNEND

SEQ ID NO: 30485 - protein, 29 aa, Artificial sequence
  Protein classification predicting sequence
VPIVNENDAVSVDEMDHATKFGDNDRLSA

SEQ ID NO: 30486 - protein, 7 aa, Artificial sequence
  Protein classification predicting sequence
QMVLMNG

SEQ ID NO: 30487 - protein, 7 aa, Artificial sequence
  Protein classification predicting sequence
LYSADPR

SEQ ID NO: 30488 - protein, 11 aa, Artificial sequence
  Protein classification predicting sequence
LGVVPIVNEND

SEQ ID NO: 30489 - protein, 9 aa, Artificial sequence
  Protein classification predicting sequence
PIVNENDTV

SEQ ID NO: 30490 - protein, 7 aa, Artificial sequence
  Protein classification predicting sequence
LYTADPR

SEQ ID NO: 30491 - protein, 7 aa, Artificial sequence
  Protein classification predicting sequence
VVKLGTS

SEQ ID NO: 30492 - protein, 9 aa, Artificial sequence
  Protein classification predicting sequence
VIKIGTSSL

SEQ ID NO: 30493 - protein, 7 aa, Artificial sequence
  Protein classification predicting sequence
NENDTVA

SEQ ID NO: 30494 - protein, 6 aa, Artificial sequence
  Protein classification predicting sequence
GGMKSK

SEQ ID NO: 30495 - protein, 7 aa, Artificial sequence
  Protein classification predicting sequence
RIVVKVG

SEQ ID NO: 30496 - protein, 11 aa, Artificial sequence
  Protein classification predicting sequence
GDNDTLAALVA

SEQ ID NO: 30497 - protein, 11 aa, Artificial sequence
  Protein classification predicting sequence
DRERFLNARDT

SEQ ID NO: 30498 - protein, 10 aa, Artificial sequence
  Protein classification predicting sequence
KGSSLLAKGV

SEQ ID NO: 30499 - protein, 26 aa, Artificial sequence
  Protein classification predicting sequence
TLRKIAGGSGTTLGTGGMATKLQAAD

SEQ ID NO: 30500 - protein, 14 aa, Artificial sequence
  Protein classification predicting sequence
LGTGGMATKLQAAD

SEQ ID NO: 30501 - protein, 7 aa, Artificial sequence
  Protein classification predicting sequence
TKLQAAD

SEQ ID NO: 30502 - protein, 14 aa, Artificial sequence
  Protein classification predicting sequence
SGAIAAGREHLGYP

SEQ ID NO: 30503 - protein, 20 aa, Artificial sequence
  Protein classification predicting sequence
EALENRKRWILAGPAASGDI

SEQ ID NO: 30504 - protein, 12 aa, Artificial sequence
  Protein classification predicting sequence
ASKQLLAAVGQS

SEQ ID NO: 30505 - protein, 10 aa, Artificial sequence
  Protein classification predicting sequence
GGGLSPRFAL

SEQ ID NO: 30506 - protein, 12 aa, Artificial sequence
  Protein classification predicting sequence
ALFIATDIDGLY

SEQ ID NO: 30507 - protein, 8 aa, Artificial sequence
  Protein classification predicting sequence
TYLFNGRS

SEQ ID NO: 30508 - protein, 9 aa, Artificial sequence
  Protein classification predicting sequence
GASLLPGGV

SEQ ID NO: 30509 - protein, 22 aa, Artificial sequence
  Protein classification predicting sequence
AARQALAALGQAQLIALWQRFF

SEQ ID NO: 30510 - protein, 26 aa, Artificial sequence
  Protein classification predicting sequence
RPVAQVLLTHDDLRNRRRYLNARATL

SEQ ID NO: 30511 - protein, 26 aa, Artificial sequence
  Protein classification predicting sequence
NENDTVSVDELKLGDNDNLAAIVAAL

SEQ ID NO: 30512 - protein, 6 aa, Artificial sequence
  Protein classification predicting sequence
AGHHSQ

SEQ ID NO: 30513 - protein, 11 aa, Artificial sequence
  Protein classification predicting sequence
LGVVPVINEND

SEQ ID NO: 30514 - protein, 6 aa, Artificial sequence
  Protein classification predicting sequence
DIKPDN

SEQ ID NO: 30515 - protein, 6 aa, Artificial sequence
  Protein classification predicting sequence
APEIIL

SEQ ID NO: 30516 - protein, 11 aa, Artificial sequence
  Protein classification predicting sequence
FSGSSHQDLSQ

SEQ ID NO: 30517 - protein, 21 aa, Artificial sequence
  Protein classification predicting sequence
ADRLGLELGKVVTKKFSNQET

SEQ ID NO: 30518 - protein, 14 aa, Artificial sequence
  Protein classification predicting sequence
VEIGESVRGEDVYI

SEQ ID NO: 30519 - protein, 16 aa, Artificial sequence
  Protein classification predicting sequence
IVSPDAGGAKRVTSIA

SEQ ID NO: 30520 - protein, 54 aa, Artificial sequence
  Protein classification predicting sequence
FALIHKERKKANEVDRMVLVGDVKDRVAILVDDMADTCGTICHAADKLLSAGAT

SEQ ID NO: 30521 - protein, 8 aa, Artificial sequence
  Protein classification predicting sequence
AGATKVYA

SEQ ID NO: 30522 - protein, 19 aa, Artificial sequence
  Protein classification predicting sequence
VYAILTHGIFSGPAISRIN

SEQ ID NO: 30523 - protein, 10 aa, Artificial sequence
  Protein classification predicting sequence
ESVRGEDVYI

SEQ ID NO: 30524 - protein, 9 aa, Artificial sequence
  Protein classification predicting sequence
QSGCGEIND

SEQ ID NO: 30525 - protein, 15 aa, Artificial sequence
  Protein classification predicting sequence
LMELLIMINACKIAS

SEQ ID NO: 30526 - protein, 22 aa, Artificial sequence
  Protein classification predicting sequence
SRVTAVIPCFPYARQDKKDKSR

SEQ ID NO: 30527 - protein, 31 aa, Artificial sequence
  Protein classification predicting sequence
AGADHIITMDLHASQIQGFFDIPVDNLYAEP

SEQ ID NO: 30528 - protein, 15 aa, Artificial sequence
  Protein classification predicting sequence
FALIHKERKKANEVD

SEQ ID NO: 30529 - protein, 14 aa, Artificial sequence
  Protein classification predicting sequence
DRVAILVDDMADTC

SEQ ID NO: 30530 - protein, 11 aa, Artificial sequence
  Protein classification predicting sequence
AADKLLSAGAT

SEQ ID NO: 30531 - protein, 12 aa, Artificial sequence
  Protein classification predicting sequence
FEAVVVTNTIPQ

SEQ ID NO: 30532 - protein, 8 aa, Artificial sequence
  Protein classification predicting sequence
KMKHCSKI

SEQ ID NO: 30533 - protein, 6 aa, Artificial sequence
  Protein classification predicting sequence
GLYRTE

SEQ ID NO: 30534 - protein, 11 aa, Artificial sequence
  Protein classification predicting sequence
AHLLVLDDPEL

SEQ ID NO: 30535 - protein, 11 aa, Artificial sequence
  Protein classification predicting sequence
DLTPSDTAQLN

SEQ ID NO: 30536 - protein, 11 aa, Artificial sequence
  Protein classification predicting sequence
IGGRTSHSAIM

SEQ ID NO: 30537 - protein, 7 aa, Artificial sequence
  Protein classification predicting sequence
VIVNPTE

SEQ ID NO: 30538 - protein, 7 aa, Artificial sequence
  Protein classification predicting sequence
MFPMIAT

SEQ ID NO: 30539 - protein, 7 aa, Artificial sequence
  Protein classification predicting sequence
GIMVEIP

SEQ ID NO: 30540 - protein, 7 aa, Artificial sequence
  Protein classification predicting sequence
PTEEEQF

SEQ ID NO: 30541 - protein, 7 aa, Artificial sequence
  Protein classification predicting sequence
EMNPFLG

SEQ ID NO: 30542 - protein, 19 aa, Artificial sequence
  Protein classification predicting sequence
FAKEVDFFSIGTNDLIQYT

SEQ ID NO: 30543 - protein, 7 aa, Artificial sequence
  Protein classification predicting sequence
RSLEIPA

SEQ ID NO: 30544 - protein, 9 aa, Artificial sequence
  Protein classification predicting sequence
HVELAANIG

SEQ ID NO: 30545 - protein, 11 aa, Artificial sequence
  Protein classification predicting sequence
LRALLRASVYG

SEQ ID NO: 30546 - protein, 8 aa, Artificial sequence
  Protein classification predicting sequence
MVEIPATA

SEQ ID NO: 30547 - protein, 10 aa, Artificial sequence
  Protein classification predicting sequence
MNGKPVVVRT

SEQ ID NO: 30548 - protein, 8 aa, Artificial sequence
  Protein classification predicting sequence
YLYQPYNP

SEQ ID NO: 30549 - protein, 7 aa, Artificial sequence
  Protein classification predicting sequence
CGEMAGD

SEQ ID NO: 30550 - protein, 10 aa, Artificial sequence
  Protein classification predicting sequence
LPKEMNPFLG

SEQ ID NO: 30551 - protein, 7 aa, Artificial sequence
  Protein classification predicting sequence
RAIRLCL

SEQ ID NO: 30552 - protein, 7 aa, Artificial sequence
  Protein classification predicting sequence
RTEFLYM

SEQ ID NO: 30553 - protein, 11 aa, Artificial sequence
  Protein classification predicting sequence
ALLLKEDEIVI

SEQ ID NO: 30554 - protein, 9 aa, Artificial sequence
  Protein classification predicting sequence
DLTPSETAQ

SEQ ID NO: 30555 - protein, 11 aa, Artificial sequence
  Protein classification predicting sequence
RSLEIPAIVGT

SEQ ID NO: 30556 - protein, 9 aa, Artificial sequence
  Protein classification predicting sequence
FPMIISVEE

SEQ ID NO: 30557 - protein, 13 aa, Artificial sequence
  Protein classification predicting sequence
KEVDFFSIGTNDL

SEQ ID NO: 30558 - protein, 8 aa, Artificial sequence
  Protein classification predicting sequence
GLDEFSMS

SEQ ID NO: 30559 - protein, 11 aa, Artificial sequence
  Protein classification predicting sequence
IFEGHIMLLED

SEQ ID NO: 30560 - protein, 12 aa, Artificial sequence
  Protein classification predicting sequence
ARSLELPAIVGT

SEQ ID NO: 30561 - protein, 25 aa, Artificial sequence
  Protein classification predicting sequence
AILRASAFGKLRIMFPMIISVEEVR

SEQ ID NO: 30562 - protein, 8 aa, Artificial sequence
  Protein classification predicting sequence
IEVGIMIE

SEQ ID NO: 30563 - protein, 7 aa, Artificial sequence
  Protein classification predicting sequence
PMSPSVL

SEQ ID NO: 30564 - protein, 14 aa, Artificial sequence
  Protein classification predicting sequence
GKWTGMCGELAGDE

SEQ ID NO: 30565 - protein, 7 aa, Artificial sequence
  Protein classification predicting sequence
SIGTNDL

SEQ ID NO: 30566 - protein, 8 aa, Artificial sequence
  Protein classification predicting sequence
GLYRTEFL

SEQ ID NO: 30567 - protein, 6 aa, Artificial sequence
  Protein classification predicting sequence
DIGGDK

SEQ ID NO: 30568 - protein, 9 aa, Artificial sequence
  Protein classification predicting sequence
VFDAHLMVL

SEQ ID NO: 30569 - protein, 9 aa, Artificial sequence
  Protein classification predicting sequence
YMQERAADI

SEQ ID NO: 30570 - protein, 9 aa, Artificial sequence
  Protein classification predicting sequence
ERAADIRDV

SEQ ID NO: 30571 - protein, 13 aa, Artificial sequence
  Protein classification predicting sequence
EAVGLYRTEFLYM

SEQ ID NO: 30572 - protein, 16 aa, Artificial sequence
  Protein classification predicting sequence
GMCGEMAGDQTAVPLL

SEQ ID NO: 30573 - protein, 11 aa, Artificial sequence
  Protein classification predicting sequence
GLDEFSMSATS

SEQ ID NO: 30574 - protein, 22 aa, Artificial sequence
  Protein classification predicting sequence
GGRTSHTSIMARSLELPAIVGT

SEQ ID NO: 30575 - protein, 19 aa, Artificial sequence
  Protein classification predicting sequence
EKAELAKLKDLPAITLDGH

SEQ ID NO: 30576 - protein, 9 aa, Artificial sequence
  Protein classification predicting sequence
GAERNGAEG

SEQ ID NO: 30577 - protein, 8 aa, Artificial sequence
  Protein classification predicting sequence
NPFLGWRA

SEQ ID NO: 30578 - protein, 46 aa, Artificial sequence
  Protein classification predicting sequence
LIKQVIDASHAEGKWTGMCGELAGDERATLLLLGMGLDEFSMSAIS

SEQ ID NO: 30579 - protein, 10 aa, Artificial sequence
  Protein classification predicting sequence
DLTPSDTAQL

SEQ ID NO: 30580 - protein, 9 aa, Artificial sequence
  Protein classification predicting sequence
RTMDIGGDK

SEQ ID NO: 30581 - protein, 15 aa, Artificial sequence
  Protein classification predicting sequence
VSYLYQPYNPSILRL

SEQ ID NO: 30582 - protein, 7 aa, Artificial sequence
  Protein classification predicting sequence
GIAASDG

SEQ ID NO: 30583 - protein, 10 aa, Artificial sequence
  Protein classification predicting sequence
GGRTSHSAIM

SEQ ID NO: 30584 - protein, 7 aa, Artificial sequence
  Protein classification predicting sequence
AANIGTP

SEQ ID NO: 30585 - protein, 10 aa, Artificial sequence
  Protein classification predicting sequence
GLYRTEFLYM

SEQ ID NO: 30586 - protein, 6 aa, Artificial sequence
  Protein classification predicting sequence
QFEAYK

SEQ ID NO: 30587 - protein, 28 aa, Artificial sequence
  Protein classification predicting sequence
QFAKEVDFFSIGTNDLIQYTMAADRMNE

SEQ ID NO: 30588 - protein, 14 aa, Artificial sequence
  Protein classification predicting sequence
ASHKEGKWTGMCGE

SEQ ID NO: 30589 - protein, 13 aa, Artificial sequence
  Protein classification predicting sequence
AIAKAYLLVEPDL

SEQ ID NO: 30590 - protein, 9 aa, Artificial sequence
  Protein classification predicting sequence
FESMDNEYM

SEQ ID NO: 30591 - protein, 9 aa, Artificial sequence
  Protein classification predicting sequence
ERAADIKDV

SEQ ID NO: 30592 - protein, 11 aa, Artificial sequence
  Protein classification predicting sequence
PTEEEQFEAYK

SEQ ID NO: 30593 - protein, 7 aa, Artificial sequence
  Protein classification predicting sequence
FRTQLRA

SEQ ID NO: 30594 - protein, 9 aa, Artificial sequence
  Protein classification predicting sequence
GLDEFSMSA

SEQ ID NO: 30595 - protein, 8 aa, Artificial sequence
  Protein classification predicting sequence
KAAIFDAH

SEQ ID NO: 30596 - protein, 7 aa, Artificial sequence
  Protein classification predicting sequence
GMMVEIP

SEQ ID NO: 30597 - protein, 7 aa, Artificial sequence
  Protein classification predicting sequence
VSYLYQP

SEQ ID NO: 30598 - protein, 12 aa, Artificial sequence
  Protein classification predicting sequence
KWVGMCGEMAGD

SEQ ID NO: 30599 - protein, 9 aa, Artificial sequence
  Protein classification predicting sequence
GMCGEMAGD

SEQ ID NO: 30600 - protein, 7 aa, Artificial sequence
  Protein classification predicting sequence
FSMSATS

SEQ ID NO: 30601 - protein, 8 aa, Artificial sequence
  Protein classification predicting sequence
NPFLGYRA

SEQ ID NO: 30602 - protein, 6 aa, Artificial sequence
  Protein classification predicting sequence
NDLIQY

SEQ ID NO: 30603 - protein, 6 aa, Artificial sequence
  Protein classification predicting sequence
AADRMN

SEQ ID NO: 30604 - protein, 7 aa, Artificial sequence
  Protein classification predicting sequence
GMCGEMA

SEQ ID NO: 30605 - protein, 8 aa, Artificial sequence
  Protein classification predicting sequence
PLLLGLGL

SEQ ID NO: 30606 - protein, 7 aa, Artificial sequence
  Protein classification predicting sequence
AYKAVLE

SEQ ID NO: 30607 - protein, 8 aa, Artificial sequence
  Protein classification predicting sequence
QLRALLRA

SEQ ID NO: 30608 - protein, 7 aa, Artificial sequence
  Protein classification predicting sequence
MIEIPAA

SEQ ID NO: 30609 - protein, 27 aa, Artificial sequence
  Protein classification predicting sequence
IIVDGLNGDVIVNPTEDELIAYQDKRE

SEQ ID NO: 30610 - protein, 17 aa, Artificial sequence
  Protein classification predicting sequence
QLGADKAAIFDAHLLVL

SEQ ID NO: 30611 - protein, 8 aa, Artificial sequence
  Protein classification predicting sequence
DPELIQPI

SEQ ID NO: 30612 - protein, 8 aa, Artificial sequence
  Protein classification predicting sequence
FESMDNEY

SEQ ID NO: 30613 - protein, 11 aa, Artificial sequence
  Protein classification predicting sequence
HILGVELPNPS

SEQ ID NO: 30614 - protein, 15 aa, Artificial sequence
  Protein classification predicting sequence
GNDLTPSDTAQLNKE

SEQ ID NO: 30615 - protein, 7 aa, Artificial sequence
  Protein classification predicting sequence
VGTKSIT

SEQ ID NO: 30616 - protein, 8 aa, Artificial sequence
  Protein classification predicting sequence
ELQKLRDA

SEQ ID NO: 30617 - protein, 9 aa, Artificial sequence
  Protein classification predicting sequence
ELAANIGTP

SEQ ID NO: 30618 - protein, 20 aa, Artificial sequence
  Protein classification predicting sequence
ELAANIGTPNDLPGVIENGA

SEQ ID NO: 30619 - protein, 14 aa, Artificial sequence
  Protein classification predicting sequence
GIGLYRTEFLYMGR

SEQ ID NO: 30620 - protein, 28 aa, Artificial sequence
  Protein classification predicting sequence
GIGLYRTEFLYMGRDQMPTEEEQFEAYK

SEQ ID NO: 30621 - protein, 14 aa, Artificial sequence
  Protein classification predicting sequence
VVVRTLDIGGDKEL

SEQ ID NO: 30622 - protein, 8 aa, Artificial sequence
  Protein classification predicting sequence
DIGGDKEL

SEQ ID NO: 30623 - protein, 10 aa, Artificial sequence
  Protein classification predicting sequence
QLRALLRASV

SEQ ID NO: 30624 - protein, 13 aa, Artificial sequence
  Protein classification predicting sequence
GKLNIMFPMVATI

SEQ ID NO: 30625 - protein, 12 aa, Artificial sequence
  Protein classification predicting sequence
DDIELGIMVEIP

SEQ ID NO: 30626 - protein, 16 aa, Artificial sequence
  Protein classification predicting sequence
AADRMSERVSYLYQPY

SEQ ID NO: 30627 - protein, 10 aa, Artificial sequence
  Protein classification predicting sequence
ERVSYLYQPY

SEQ ID NO: 30628 - protein, 14 aa, Artificial sequence
  Protein classification predicting sequence
ASHAEGKWTGMCGE

SEQ ID NO: 30629 - protein, 10 aa, Artificial sequence
  Protein classification predicting sequence
ELTKIRNNAE

SEQ ID NO: 30630 - protein, 30 aa, Artificial sequence
  Protein classification predicting sequence
QLGADKAAIFDAHLLVLDDPELIQPIQDKI

SEQ ID NO: 30631 - protein, 23 aa, Artificial sequence
  Protein classification predicting sequence
VIVGNDLTPSDTAQLNKEFVQGF

SEQ ID NO: 30632 - protein, 10 aa, Artificial sequence
  Protein classification predicting sequence
PTEDELIAYQ

SEQ ID NO: 30633 - protein, 30 aa, Artificial sequence
  Protein classification predicting sequence
DKKELQKLRDADTVTVDGVHAELAANIGTP

SEQ ID NO: 30634 - protein, 8 aa, Artificial sequence
  Protein classification predicting sequence
LLEEKENL

SEQ ID NO: 30635 - protein, 88 aa, Artificial sequence
  Protein classification predicting sequence
SDDIELGIMVEIPATAALADVFAKEVDFFSIGTNDLIQYTLAADRMSERVSYLYQPYNPSILRLVKQVIEASHKEGKWTGMCGEMAGD

SEQ ID NO: 30636 - protein, 33 aa, Artificial sequence
  Protein classification predicting sequence
PLLLGLGLDEFSMSATSILKARRQINGLSKNEM

SEQ ID NO: 30637 - protein, 9 aa, Artificial sequence
  Protein classification predicting sequence
KRVLAHLLG

SEQ ID NO: 30638 - protein, 73 aa, Artificial sequence
  Protein classification predicting sequence
VGIMIEIPAAAMLADQFAKEVDFFSIGTNDLIQYTMAADRMNEQVSYLYQPYNPSILRLINNVIKAAHAEGKW

SEQ ID NO: 30639 - protein, 7 aa, Artificial sequence
  Protein classification predicting sequence
LRIMFPM

SEQ ID NO: 30640 - protein, 5 aa, Artificial sequence
  Protein classification predicting sequence
IMFPM

SEQ ID NO: 30641 - protein, 9 aa, Artificial sequence
  Protein classification predicting sequence
NYFGTMLVY

SEQ ID NO: 30642 - protein, 9 aa, Artificial sequence
  Protein classification predicting sequence
DGEFQFDAA

SEQ ID NO: 30643 - protein, 7 aa, Artificial sequence
  Protein classification predicting sequence
VAEKKAP

SEQ ID NO: 30644 - protein, 25 aa, Artificial sequence
  Protein classification predicting sequence
GDANVFVFPSLEAGNIGYKIAQRLG

SEQ ID NO: 30645 - protein, 8 aa, Artificial sequence
  Protein classification predicting sequence
LSFSTKGS

SEQ ID NO: 30646 - protein, 7 aa, Artificial sequence
  Protein classification predicting sequence
DLSRGCS

SEQ ID NO: 30647 - protein, 9 aa, Artificial sequence
  Protein classification predicting sequence
RPALQIIKT

SEQ ID NO: 30648 - protein, 7 aa, Artificial sequence
  Protein classification predicting sequence
IGPMLQG

SEQ ID NO: 30649 - protein, 7 aa, Artificial sequence
  Protein classification predicting sequence
PKVAMLS

SEQ ID NO: 30650 - protein, 8 aa, Artificial sequence
  Protein classification predicting sequence
PVNDLSRG

SEQ ID NO: 30651 - protein, 8 aa, Artificial sequence
  Protein classification predicting sequence
VSGAVHTT

SEQ ID NO: 30652 - protein, 6 aa, Artificial sequence
  Protein classification predicting sequence
GNIGYK

SEQ ID NO: 30653 - protein, 6 aa, Artificial sequence
  Protein classification predicting sequence
RPALQI

SEQ ID NO: 30654 - protein, 8 aa, Artificial sequence
  Protein classification predicting sequence
EPRVAMLS

SEQ ID NO: 30655 - protein, 7 aa, Artificial sequence
  Protein classification predicting sequence
GDCAINP

SEQ ID NO: 30656 - protein, 14 aa, Artificial sequence
  Protein classification predicting sequence
RPALQIIKTKPGVS

SEQ ID NO: 30657 - protein, 7 aa, Artificial sequence
  Protein classification predicting sequence
VSGAAHS

SEQ ID NO: 30658 - protein, 8 aa, Artificial sequence
  Protein classification predicting sequence
STKGSAKS

SEQ ID NO: 30659 - protein, 7 aa, Artificial sequence
  Protein classification predicting sequence
YKIAQRL

SEQ ID NO: 30660 - protein, 7 aa, Artificial sequence
  Protein classification predicting sequence
RPALQII

SEQ ID NO: 30661 - protein, 7 aa, Artificial sequence
  Protein classification predicting sequence
YFGTMLV

SEQ ID NO: 30662 - protein, 17 aa, Artificial sequence
  Protein classification predicting sequence
RKPVNDLSRGALVDDIV

SEQ ID NO: 30663 - protein, 31 aa, Artificial sequence
  Protein classification predicting sequence
LDISNIELINPATSELKAELVQSFVERRKGK

SEQ ID NO: 30664 - protein, 14 aa, Artificial sequence
  Protein classification predicting sequence
QGLAEIAVESAKSA

SEQ ID NO: 30665 - protein, 30 aa, Artificial sequence
  Protein classification predicting sequence
SFGMDPKVAMLSFSTKGSAKSDDVTKVQEA

SEQ ID NO: 30666 - protein, 13 aa, Artificial sequence
  Protein classification predicting sequence
IDGEFQFDAAIVP

SEQ ID NO: 30667 - protein, 21 aa, Artificial sequence
  Protein classification predicting sequence
DKLSGKNVKIVLPEGEDERVL

SEQ ID NO: 30668 - protein, 25 aa, Artificial sequence
  Protein classification predicting sequence
PKVAMLSFSTKGSAKSDDVTKVQEA

SEQ ID NO: 30669 - protein, 9 aa, Artificial sequence
  Protein classification predicting sequence
AGMSTSLLV

SEQ ID NO: 30670 - protein, 87 aa, Artificial sequence
  Protein classification predicting sequence
PDEQEQFEAYQQVLLAAGDKPIIFRTMDIGGDKSIPYLNIPQEENPFLGYRAVRIYPEFAGLFRTQLRAILRAASFGNAQLMIPMVH

SEQ ID NO: 30671 - protein, 46 aa, Artificial sequence
  Protein classification predicting sequence
AELTAHPLPRSLSRLNPDLLYGNVLASGVGVGTLTLLQSDSLDSYR

SEQ ID NO: 30672 - protein, 9 aa, Artificial sequence
  Protein classification predicting sequence
IPASAQDST

SEQ ID NO: 30673 - protein, 44 aa, Artificial sequence
  Protein classification predicting sequence
LEHSLATLAEQLNQQLRERDGESKTILSAHLSLIQDDEFAGNIR

SEQ ID NO: 30674 - protein, 84 aa, Artificial sequence
  Protein classification predicting sequence
QKAIVELKRDGLRHAETITLGIMVEVPSVCYIIDHFCDEVDFFSIGSNDMTQYLYAVDRNNPRVSPLYNPITPSFLRMLQQIVT

SEQ ID NO: 30675 - protein, 96 aa, Artificial sequence
  Protein classification predicting sequence
AHQRGKWVGICGELGGESRYLPLLLGLGLDELSMSSPRIPAVKSQLRQLDSEACRELARQACECRSAQEIEALLTAFTPEEDVRPLLALENIFVDQ

SEQ ID NO: 30676 - protein, 66 aa, Artificial sequence
  Protein classification predicting sequence
FSNKEQAIQFLCGNLGVNGRTEHPFELEEDVWQREEIVTTGVGFGVAIPHTKSQWIRHSSISIARL

SEQ ID NO: 30677 - protein, 8 aa, Artificial sequence
  Protein classification predicting sequence
DLTPSDTA

SEQ ID NO: 30678 - protein, 7 aa, Artificial sequence
  Protein classification predicting sequence
GIMIEIP

SEQ ID NO: 30679 - protein, 7 aa, Artificial sequence
  Protein classification predicting sequence
GAEGVGL

SEQ ID NO: 30680 - protein, 11 aa, Artificial sequence
  Protein classification predicting sequence
SGVAHTYMAAE

SEQ ID NO: 30681 - protein, 18 aa, Artificial sequence
  Protein classification predicting sequence
NGAEGVGLFRTEMLYMDR

SEQ ID NO: 30682 - protein, 20 aa, Artificial sequence
  Protein classification predicting sequence
NMPLIFAIGVALGFTNNDGV

SEQ ID NO: 30683 - protein, 20 aa, Artificial sequence
  Protein classification predicting sequence
LPEYLGFFAGKRFVPIISGL

SEQ ID NO: 30684 - protein, 7 aa, Artificial sequence
  Protein classification predicting sequence
WAAYQNP

SEQ ID NO: 30685 - protein, 8 aa, Artificial sequence
  Protein classification predicting sequence
GQVFHGDI

SEQ ID NO: 30686 - protein, 8 aa, Artificial sequence
  Protein classification predicting sequence
IMISAALT

SEQ ID NO: 30687 - protein, 23 aa, Artificial sequence
  Protein classification predicting sequence
LQKVGKSLMLPVSVLPIAGILLG

SEQ ID NO: 30688 - protein, 8 aa, Artificial sequence
  Protein classification predicting sequence
ALAAVVAY

SEQ ID NO: 30689 - protein, 21 aa, Artificial sequence
  Protein classification predicting sequence
LVPFGLHHIWNVPFQMQIGEY

SEQ ID NO: 30690 - protein, 8 aa, Artificial sequence
  Protein classification predicting sequence
IDFIVLSG

SEQ ID NO: 30691 - protein, 17 aa, Artificial sequence
  Protein classification predicting sequence
SLMLPVSVLPIAGILLG

SEQ ID NO: 30692 - protein, 11 aa, Artificial sequence
  Protein classification predicting sequence
NDGVSALAAVV

SEQ ID NO: 30693 - protein, 12 aa, Artificial sequence
  Protein classification predicting sequence
LTGITEPIEFSF

SEQ ID NO: 30694 - protein, 16 aa, Artificial sequence
  Protein classification predicting sequence
IHAILAGLAFPICILL

SEQ ID NO: 30695 - protein, 60 aa, Artificial sequence
  Protein classification predicting sequence
KHLADTGVLGGIISGAIAAYMFNRFYRIKLPEYLGFFAGKRFVPIISGLAAIFTGVVLSF

SEQ ID NO: 30696 - protein, 112 aa, Artificial sequence
  Protein classification predicting sequence
LSGGFLFKMYGLPAAAIAIWHSAKPENRAKVGGIMISAALTSFLTGITEPIEFSFMFVAPILYIIHAILAGLAFPICILLGMRDGTSFSHGLIDFIVLSGNSSKLWLFPIVG

SEQ ID NO: 30697 - protein, 8 aa, Artificial sequence
  Protein classification predicting sequence
GYAIVYYT

SEQ ID NO: 30698 - protein, 17 aa, Artificial sequence
  Protein classification predicting sequence
FRVLIKALDLKTPGRED

SEQ ID NO: 30699 - protein, 35 aa, Artificial sequence
  Protein classification predicting sequence
TSEMAPALVAAFGGKENITNLDACITRLRVSVADV

SEQ ID NO: 30700 - protein, 43 aa, Artificial sequence
  Protein classification predicting sequence
KVDQAGLKKLGAAGVVVAGSGVQAIFGTKSDNLKTEMDEYIRN

SEQ ID NO: 30701 - protein, 6 aa, Artificial sequence
  Protein classification predicting sequence
GSPPYA

SEQ ID NO: 30702 - protein, 6 aa, Artificial sequence
  Protein classification predicting sequence
MKKLRH

SEQ ID NO: 30703 - protein, 7 aa, Artificial sequence
  Protein classification predicting sequence
NILVGEN

SEQ ID NO: 30704 - protein, 9 aa, Artificial sequence
  Protein classification predicting sequence
IHRDLAARN

SEQ ID NO: 30705 - protein, 12 aa, Artificial sequence
  Protein classification predicting sequence
VLVLCAGGGTSG

SEQ ID NO: 30706 - protein, 10 aa, Artificial sequence
  Protein classification predicting sequence
GGIHEIYFPY

SEQ ID NO: 30707 - protein, 12 aa, Artificial sequence
  Protein classification predicting sequence
INHGIFSPLGIQ

SEQ ID NO: 30708 - protein, 8 aa, Artificial sequence
  Protein classification predicting sequence
GGIHEIYF

SEQ ID NO: 30709 - protein, 7 aa, Artificial sequence
  Protein classification predicting sequence
EANPGPG

SEQ ID NO: 30710 - protein, 7 aa, Artificial sequence
  Protein classification predicting sequence
LAMTPKG

SEQ ID NO: 30711 - protein, 16 aa, Artificial sequence
  Protein classification predicting sequence
VEPAKILFLNNAINHG

SEQ ID NO: 30712 - protein, 9 aa, Artificial sequence
  Protein classification predicting sequence
GFEMLVNNF

SEQ ID NO: 30713 - protein, 9 aa, Artificial sequence
  Protein classification predicting sequence
FLNNAINHG

SEQ ID NO: 30714 - protein, 11 aa, Artificial sequence
  Protein classification predicting sequence
EPAKILFLNNA

SEQ ID NO: 30715 - protein, 28 aa, Artificial sequence
  Protein classification predicting sequence
IIFACDAGMGSSAMGASILRDKVKKAGL

SEQ ID NO: 30716 - protein, 8 aa, Artificial sequence
  Protein classification predicting sequence
GITEPIEF

SEQ ID NO: 30717 - protein, 6 aa, Artificial sequence
  Protein classification predicting sequence
CATRLR

SEQ ID NO: 30718 - protein, 7 aa, Artificial sequence
  Protein classification predicting sequence
NMPLIFA

SEQ ID NO: 30719 - protein, 7 aa, Artificial sequence
  Protein classification predicting sequence
HCATRLR

SEQ ID NO: 30720 - protein, 14 aa, Artificial sequence
  Protein classification predicting sequence
DAVGMSTVPEVIVA

SEQ ID NO: 30721 - protein, 10 aa, Artificial sequence
  Protein classification predicting sequence
PGPHYETPAE

SEQ ID NO: 30722 - protein, 10 aa, Artificial sequence
  Protein classification predicting sequence
LGADLVGMST

SEQ ID NO: 30723 - protein, 15 aa, Artificial sequence
  Protein classification predicting sequence
EVLGVSLVTNLAAGI

SEQ ID NO: 30724 - protein, 12 aa, Artificial sequence
  Protein classification predicting sequence
GLNEECGVFGIW

SEQ ID NO: 30725 - protein, 16 aa, Artificial sequence
  Protein classification predicting sequence
GLHSLQHRGQEGAGIV

SEQ ID NO: 30726 - protein, 6 aa, Artificial sequence
  Protein classification predicting sequence
ASETCA

SEQ ID NO: 30727 - protein, 6 aa, Artificial sequence
  Protein classification predicting sequence
ECGVFG

SEQ ID NO: 30728 - protein, 9 aa, Artificial sequence
  Protein classification predicting sequence
YGNRPLCIG

SEQ ID NO: 30729 - protein, 8 aa, Artificial sequence
  Protein classification predicting sequence
FEYVYFAR

SEQ ID NO: 30730 - protein, 12 aa, Artificial sequence
  Protein classification predicting sequence
RLRQLGVAKKFG

SEQ ID NO: 30731 - protein, 7 aa, Artificial sequence
  Protein classification predicting sequence
LAHNGNL

SEQ ID NO: 30732 - protein, 11 aa, Artificial sequence
  Protein classification predicting sequence
FEYVYFARPDS

SEQ ID NO: 30733 - protein, 7 aa, Artificial sequence
  Protein classification predicting sequence
SVRRKLN

SEQ ID NO: 30734 - protein, 6 aa, Artificial sequence
  Protein classification predicting sequence
IGHVRY

SEQ ID NO: 30735 - protein, 6 aa, Artificial sequence
  Protein classification predicting sequence
RYSTTG

SEQ ID NO: 30736 - protein, 10 aa, Artificial sequence
  Protein classification predicting sequence
KNRYVGRTFI

SEQ ID NO: 30737 - protein, 9 aa, Artificial sequence
  Protein classification predicting sequence
DDSIVRGTT

SEQ ID NO: 30738 - protein, 9 aa, Artificial sequence
  Protein classification predicting sequence
ARPDSTIAG

SEQ ID NO: 30739 - protein, 8 aa, Artificial sequence
  Protein classification predicting sequence
VYLARPDS

SEQ ID NO: 30740 - protein, 7 aa, Artificial sequence
  Protein classification predicting sequence
YFARPDS

SEQ ID NO: 30741 - protein, 7 aa, Artificial sequence
  Protein classification predicting sequence
GRTFIMP

SEQ ID NO: 30742 - protein, 8 aa, Artificial sequence
  Protein classification predicting sequence
ALQHRGQE

SEQ ID NO: 30743 - protein, 7 aa, Artificial sequence
  Protein classification predicting sequence
YVGRTFI

SEQ ID NO: 30744 - protein, 9 aa, Artificial sequence
  Protein classification predicting sequence
EVHIRVASP

SEQ ID NO: 30745 - protein, 8 aa, Artificial sequence
  Protein classification predicting sequence
SDSELLLN

SEQ ID NO: 30746 - protein, 6 aa, Artificial sequence
  Protein classification predicting sequence
LQHRGQ

SEQ ID NO: 30747 - protein, 7 aa, Artificial sequence
  Protein classification predicting sequence
LQHRGQE

SEQ ID NO: 30748 - protein, 44 aa, Artificial sequence
  Protein classification predicting sequence
NYSGLNEECGVFGIWNHPEAAQLTYMGLHSLQHRGQEGAGIVVS

SEQ ID NO: 30749 - protein, 50 aa, Artificial sequence
  Protein classification predicting sequence
HAIGHVRYATSGNKGIENIQPFLYHFYDMSVGICHNGNLINAKSLRQNLE

SEQ ID NO: 30750 - protein, 35 aa, Artificial sequence
  Protein classification predicting sequence
QGAIFHSSSDTEVIMHLIRRSKAPTFEEALKESLR

SEQ ID NO: 30751 - protein, 16 aa, Artificial sequence
  Protein classification predicting sequence
KGGFTFAILTKDALYG

SEQ ID NO: 30752 - protein, 14 aa, Artificial sequence
  Protein classification predicting sequence
VDPNAIRPLVVGKM

SEQ ID NO: 30753 - protein, 17 aa, Artificial sequence
  Protein classification predicting sequence
YILASETCAIDVLGAEF

SEQ ID NO: 30754 - protein, 11 aa, Artificial sequence
  Protein classification predicting sequence
QDIHAGEYVVI

SEQ ID NO: 30755 - protein, 34 aa, Artificial sequence
  Protein classification predicting sequence
TTTAISAMEYIYFARPDSTIAGKNVHAVRKASGK

SEQ ID NO: 30756 - protein, 66 aa, Artificial sequence
  Protein classification predicting sequence
ADMVIGVPNSSLSAASGYAEEIGLPYEMGLVKNQYVARTFIQPTQELREQGVRVKLSAVKDIVDGK

SEQ ID NO: 30757 - protein, 12 aa, Artificial sequence
  Protein classification predicting sequence
RIVKMLKDSGAN

SEQ ID NO: 30758 - protein, 7 aa, Artificial sequence
  Protein classification predicting sequence
HVRIASP

SEQ ID NO: 30759 - protein, 36 aa, Artificial sequence
  Protein classification predicting sequence
HVRIASPEFMFPSFYGIDVSTTAELISASKSPEEIK

SEQ ID NO: 30760 - protein, 26 aa, Artificial sequence
  Protein classification predicting sequence
IGADSLAYLSVDGLIESIGLDYDAPY

SEQ ID NO: 30761 - protein, 19 aa, Artificial sequence
  Protein classification predicting sequence
GLCVESFTGDYPAGLYDYE

SEQ ID NO: 30762 - protein, 7 aa, Artificial sequence
  Protein classification predicting sequence
FDSEGNL

SEQ ID NO: 30763 - protein, 7 aa, Artificial sequence
  Protein classification predicting sequence
DSLAYLS

SEQ ID NO: 30764 - protein, 16 aa, Artificial sequence
  Protein classification predicting sequence
IAIFASGSGSNFENIV

SEQ ID NO: 30765 - protein, 7 aa, Artificial sequence
  Protein classification predicting sequence
LEYELYP

SEQ ID NO: 30766 - protein, 7 aa, Artificial sequence
  Protein classification predicting sequence
AAKRLSA

SEQ ID NO: 30767 - protein, 8 aa, Artificial sequence
  Protein classification predicting sequence
NLEAMAAD

SEQ ID NO: 30768 - protein, 7 aa, Artificial sequence
  Protein classification predicting sequence
GDLRYGR

SEQ ID NO: 30769 - protein, 8 aa, Artificial sequence
  Protein classification predicting sequence
FFEASTRT

SEQ ID NO: 30770 - protein, 11 aa, Artificial sequence
  Protein classification predicting sequence
VRVVAPATLLP

SEQ ID NO: 30771 - protein, 7 aa, Artificial sequence
  Protein classification predicting sequence
VINAGDG

SEQ ID NO: 30772 - protein, 10 aa, Artificial sequence
  Protein classification predicting sequence
NAGDGQHEHP

SEQ ID NO: 30773 - protein, 7 aa, Artificial sequence
  Protein classification predicting sequence
KIAIVGD

SEQ ID NO: 30774 - protein, 11 aa, Artificial sequence
  Protein classification predicting sequence
GDILHSRVARS

SEQ ID NO: 30775 - protein, 6 aa, Artificial sequence
  Protein classification predicting sequence
NRGVEI

SEQ ID NO: 30776 - protein, 7 aa, Artificial sequence
  Protein classification predicting sequence
NAGDGTH

SEQ ID NO: 30777 - protein, 6 aa, Artificial sequence
  Protein classification predicting sequence
HPSQGL

SEQ ID NO: 30778 - protein, 7 aa, Artificial sequence
  Protein classification predicting sequence
LRLQKER

SEQ ID NO: 30779 - protein, 5 aa, Artificial sequence
  Protein classification predicting sequence
MHPGP

SEQ ID NO: 30780 - protein, 7 aa, Artificial sequence
  Protein classification predicting sequence
HPGPVNR

SEQ ID NO: 30781 - protein, 9 aa, Artificial sequence
  Protein classification predicting sequence
RHFESGAAR

SEQ ID NO: 30782 - protein, 9 aa, Artificial sequence
  Protein classification predicting sequence
QALLDVYTI

SEQ ID NO: 30783 - protein, 8 aa, Artificial sequence
  Protein classification predicting sequence
EIGKLDGI

SEQ ID NO: 30784 - protein, 8 aa, Artificial sequence
  Protein classification predicting sequence
TRIQRERF

SEQ ID NO: 30785 - protein, 6 aa, Artificial sequence
  Protein classification predicting sequence
AIIMHP

SEQ ID NO: 30786 - protein, 10 aa, Artificial sequence
  Protein classification predicting sequence
QHPTQTLLDL

SEQ ID NO: 30787 - protein, 5 aa, Artificial sequence
  Protein classification predicting sequence
GDLKY

SEQ ID NO: 30788 - protein, 9 aa, Artificial sequence
  Protein classification predicting sequence
HPLPRVDEI

SEQ ID NO: 30789 - protein, 30 aa, Artificial sequence
  Protein classification predicting sequence
FNLFFENSTRTRTTFEIAAKRLSADVVNLN

SEQ ID NO: 30790 - protein, 12 aa, Artificial sequence
  Protein classification predicting sequence
NAGDGRHAHPTQ

SEQ ID NO: 30791 - protein, 11 aa, Artificial sequence
  Protein classification predicting sequence
GDVLHSRVARS

SEQ ID NO: 30792 - protein, 7 aa, Artificial sequence
  Protein classification predicting sequence
SFEVAEK

SEQ ID NO: 30793 - protein, 62 aa, Artificial sequence
  Protein classification predicting sequence
RMKEGSIIMHPAPVNRDVEIASELVECERSRIFKQMENGVYVRMAVLKRALPNVLGGMKHEL

SEQ ID NO: 30794 - protein, 12 aa, Artificial sequence
  Protein classification predicting sequence
STRTKCSFEMAE

SEQ ID NO: 30795 - protein, 6 aa, Artificial sequence
  Protein classification predicting sequence
SFEMAE

SEQ ID NO: 30796 - protein, 9 aa, Artificial sequence
  Protein classification predicting sequence
FFEPSTRTR

SEQ ID NO: 30797 - protein, 7 aa, Artificial sequence
  Protein classification predicting sequence
AYYFQQA

SEQ ID NO: 30798 - protein, 7 aa, Artificial sequence
  Protein classification predicting sequence
SRIFKQM

SEQ ID NO: 30799 - protein, 6 aa, Artificial sequence
  Protein classification predicting sequence
GQHPTQ

SEQ ID NO: 30800 - protein, 12 aa, Artificial sequence
  Protein classification predicting sequence
SRIFKQMENGVY

SEQ ID NO: 30801 - protein, 8 aa, Artificial sequence
  Protein classification predicting sequence
PIINAGDG

SEQ ID NO: 30802 - protein, 11 aa, Artificial sequence
  Protein classification predicting sequence
LLDLLTIKQEF

SEQ ID NO: 30803 - protein, 6 aa, Artificial sequence
  Protein classification predicting sequence
VRMAVL

SEQ ID NO: 30804 - protein, 11 aa, Artificial sequence
  Protein classification predicting sequence
SVQKGETLYDT

SEQ ID NO: 30805 - protein, 19 aa, Artificial sequence
  Protein classification predicting sequence
SVQKGETLYDTIRTLESIG

SEQ ID NO: 30806 - protein, 6 aa, Artificial sequence
  Protein classification predicting sequence
TLESIG

SEQ ID NO: 30807 - protein, 14 aa, Artificial sequence
  Protein classification predicting sequence
QVNIPILNAGDGCG

SEQ ID NO: 30808 - protein, 11 aa, Artificial sequence
  Protein classification predicting sequence
AGAAALLAQKV

SEQ ID NO: 30809 - protein, 6 aa, Artificial sequence
  Protein classification predicting sequence
MMLRLQ

SEQ ID NO: 30810 - protein, 8 aa, Artificial sequence
  Protein classification predicting sequence
NRGVEIAS

SEQ ID NO: 30811 - protein, 12 aa, Artificial sequence
  Protein classification predicting sequence
AVRMAVMEALLD

SEQ ID NO: 30812 - protein, 7 aa, Artificial sequence
  Protein classification predicting sequence
DPRAAYF

SEQ ID NO: 30813 - protein, 9 aa, Artificial sequence
  Protein classification predicting sequence
DVVIMLRLQ

SEQ ID NO: 30814 - protein, 11 aa, Artificial sequence
  Protein classification predicting sequence
QVTFGIAVRMA

SEQ ID NO: 30815 - protein, 7 aa, Artificial sequence
  Protein classification predicting sequence
GIAVRMA

SEQ ID NO: 30816 - protein, 9 aa, Artificial sequence
  Protein classification predicting sequence
DTAMTLNAM

SEQ ID NO: 30817 - protein, 13 aa, Artificial sequence
  Protein classification predicting sequence
VMHPGPMNRGVEI

SEQ ID NO: 30818 - protein, 7 aa, Artificial sequence
  Protein classification predicting sequence
VADGAQS

SEQ ID NO: 30819 - protein, 7 aa, Artificial sequence
  Protein classification predicting sequence
IISINDL

SEQ ID NO: 30820 - protein, 20 aa, Artificial sequence
  Protein classification predicting sequence
KVIASCFFEASTRTRLSFET

SEQ ID NO: 30821 - protein, 7 aa, Artificial sequence
  Protein classification predicting sequence
DTISVIS

SEQ ID NO: 30822 - protein, 13 aa, Artificial sequence
  Protein classification predicting sequence
VGDLKYGRTVHSL

SEQ ID NO: 30823 - protein, 10 aa, Artificial sequence
  Protein classification predicting sequence
VKKVPLLRGK

SEQ ID NO: 30824 - protein, 9 aa, Artificial sequence
  Protein classification predicting sequence
AAKRLSADV

SEQ ID NO: 30825 - protein, 8 aa, Artificial sequence
  Protein classification predicting sequence
FFENSTRT

SEQ ID NO: 30826 - protein, 9 aa, Artificial sequence
  Protein classification predicting sequence
GDIKNSRVA

SEQ ID NO: 30827 - protein, 9 aa, Artificial sequence
  Protein classification predicting sequence
FFENSTRTR

SEQ ID NO: 30828 - protein, 7 aa, Artificial sequence
  Protein classification predicting sequence
SSVSKGE

SEQ ID NO: 30829 - protein, 10 aa, Artificial sequence
  Protein classification predicting sequence
HEHPTQALLD

SEQ ID NO: 30830 - protein, 6 aa, Artificial sequence
  Protein classification predicting sequence
KHIISI

SEQ ID NO: 30831 - protein, 12 aa, Artificial sequence
  Protein classification predicting sequence
GDLKYGRTVHSL

SEQ ID NO: 30832 - protein, 11 aa, Artificial sequence
  Protein classification predicting sequence
LYMTRVQRERF

SEQ ID NO: 30833 - protein, 8 aa, Artificial sequence
  Protein classification predicting sequence
KVLHPLPR

SEQ ID NO: 30834 - protein, 8 aa, Artificial sequence
  Protein classification predicting sequence
GKILATLF

SEQ ID NO: 30835 - protein, 8 aa, Artificial sequence
  Protein classification predicting sequence
RHPLEGAA

SEQ ID NO: 30836 - protein, 9 aa, Artificial sequence
  Protein classification predicting sequence
HPTQALLDA

SEQ ID NO: 30837 - protein, 7 aa, Artificial sequence
  Protein classification predicting sequence
TIRQRLG

SEQ ID NO: 30838 - protein, 6 aa, Artificial sequence
  Protein classification predicting sequence
PPTLLP

SEQ ID NO: 30839 - protein, 10 aa, Artificial sequence
  Protein classification predicting sequence
RQRLGGIEGR

SEQ ID NO: 30840 - protein, 10 aa, Artificial sequence
  Protein classification predicting sequence
IVGDILHSRV

SEQ ID NO: 30841 - protein, 6 aa, Artificial sequence
  Protein classification predicting sequence
GGFFPS

SEQ ID NO: 30842 - protein, 8 aa, Artificial sequence
  Protein classification predicting sequence
FEIAAKRL

SEQ ID NO: 30843 - protein, 6 aa, Artificial sequence
  Protein classification predicting sequence
SKGETL

SEQ ID NO: 30844 - protein, 9 aa, Artificial sequence
  Protein classification predicting sequence
SKGETLFDT

SEQ ID NO: 30845 - protein, 9 aa, Artificial sequence
  Protein classification predicting sequence
GDIRHSRVA

SEQ ID NO: 30846 - protein, 18 aa, Artificial sequence
  Protein classification predicting sequence
SFELAARRMSADVVSFAA

SEQ ID NO: 30847 - protein, 17 aa, Artificial sequence
  Protein classification predicting sequence
GDGRRAHPTQALLDAYT

SEQ ID NO: 30848 - protein, 8 aa, Artificial sequence
  Protein classification predicting sequence
HPTQALLD

SEQ ID NO: 30849 - protein, 7 aa, Artificial sequence
  Protein classification predicting sequence
HPGPMNR

SEQ ID NO: 30850 - protein, 6 aa, Artificial sequence
  Protein classification predicting sequence
RIQKER

SEQ ID NO: 30851 - protein, 8 aa, Artificial sequence
  Protein classification predicting sequence
HSRVARSN

SEQ ID NO: 30852 - protein, 11 aa, Artificial sequence
  Protein classification predicting sequence
NQHPTQTLLDL

SEQ ID NO: 30853 - protein, 8 aa, Artificial sequence
  Protein classification predicting sequence
GDGSGQHP

SEQ ID NO: 30854 - protein, 8 aa, Artificial sequence
  Protein classification predicting sequence
SFSKEGYH

SEQ ID NO: 30855 - protein, 10 aa, Artificial sequence
  Protein classification predicting sequence
IIMHPAPVNR

SEQ ID NO: 30856 - protein, 16 aa, Artificial sequence
  Protein classification predicting sequence
NPLYQKHIISINDLSR

SEQ ID NO: 30857 - protein, 14 aa, Artificial sequence
  Protein classification predicting sequence
YVDAIVMRHPQEGA

SEQ ID NO: 30858 - protein, 8 aa, Artificial sequence
  Protein classification predicting sequence
RLATEFSG

SEQ ID NO: 30859 - protein, 18 aa, Artificial sequence
  Protein classification predicting sequence
DILYMTRVQKERLDPSEY

SEQ ID NO: 30860 - protein, 6 aa, Artificial sequence
  Protein classification predicting sequence
QFVLRA

SEQ ID NO: 30861 - protein, 11 aa, Artificial sequence
  Protein classification predicting sequence
ARQALLALVLN

SEQ ID NO: 30862 - protein, 8 aa, Artificial sequence
  Protein classification predicting sequence
MKNLLSME

SEQ ID NO: 30863 - protein, 9 aa, Artificial sequence
  Protein classification predicting sequence
LYDTCKTLE

SEQ ID NO: 30864 - protein, 7 aa, Artificial sequence
  Protein classification predicting sequence
NGGDGSG

SEQ ID NO: 30865 - protein, 8 aa, Artificial sequence
  Protein classification predicting sequence
HPSQCLLD

SEQ ID NO: 30866 - protein, 7 aa, Artificial sequence
  Protein classification predicting sequence
SRVARSN

(The sequence listing continues in the following parts.)
